(19) United States
(12) Patent Application Publication
(10) Pub. No.: US 2008/0008996 A1
(43) Pub. Date: Jan. 10, 2008

(54) Nucleic acid molecules and other molecules associated with plants

(76) Inventor: Joseph R. Byrum, Des Moines, IA (US)

Correspondence Address: ARNOLD & PORTER, LLP, 555 TWELFTH STREET, N.W., ATTN: IP DOCKETING, WASHINGTON, DC, 20004, US

(21) Appl. No.: 11/491,371

(22) Filed: Jul. 24, 2006

Related U.S. Application Data
(63) Continuation of application No. 09/606,977, filed on Jun. 28, 2000, now abandoned.
(60) Provisional application No. 60/141,233, filed on Jun. 29, 1999.

(51) Int. Cl. A01H 5/00; C07H 21/04; C12Q 1/68

(52) U.S. Cl. 435/6; 536/22.1; 800/298; 800/320.1

(57) ABSTRACT

The present invention is in the field of plant genetics. More specifically the invention relates to nucleic acid molecules and nucleic acid molecules that contain markers, in particular, single nucleotide polymorphism (SNP) and repetitive element markers. In addition, the present invention provides nucleic acid molecules having regulatory elements or encoding proteins or fragments thereof. The invention also relates to proteins and fragments of proteins so encoded and antibodies capable of binding the proteins. The invention also relates to methods of using the nucleic acid molecules, markers, repetitive elements and fragments of repetitive elements, regulatory elements, proteins and fragments of proteins.

### CROSS REFERENCE TO RELATED APPLICATION

[0001] This application is a continuation of U.S. application Ser. No. 09/606,977 filed Jun. 28, 2000, which claims priority under 35 U.S.C. § 119(e) to U.S. Application Ser. No. 60/141,233 filed Jun. 29, 1999, each of which is herein incorporated by reference in its entirety.

### INCORPORATION OF SEQUENCE LISTING

[0002] This application contains a sequence listing, which is contained on three identical CD-ROMs: two copies of the sequence listing (Copy 1 and Copy 2) and a sequence listing Computer Readable Form (CRF), all of which are herein incorporated by reference. All three sequence listing CD-ROMs each contain one file called “15877C seq list.txt” which is 53,428,224 bytes in size (measured in Windows XP) and which was created on Jul. 23, 2006.

### INCORPORATION OF COMPUTER LISTING

[0003] This application contains a computer program listing which contains Table A, which is contained on CD-ROM, all of which is herein incorporated by reference. The computer program listing CD-ROM contains one file called “15877C comp prog list.txt,” which is 3,276,800 bytes (measured in Windows XP) and which was created on Jul. 23, 2006.

### FIELD OF THE INVENTION

[0004] The present invention is in the field of plant genetics. More specifically the invention relates to nucleic acid molecules and nucleic acid molecules that contain markers, in particular, single nucleotide polymorphism (SNP) and repetitive element markers. In addition, the present invention provides nucleic acid molecules having regulatory elements or encoding proteins or fragments thereof. The invention also relates to proteins and fragments of proteins so encoded and antibodies capable of binding the proteins. The invention also relates to methods of using the nucleic acid molecules, markers, repetitive elements and fragments of repetitive elements, regulatory elements, proteins and fragments of proteins.

### BACKGROUND OF THE INVENTION

I. Sequence Tagged Connector Nucleic Acid Molecules and the Bacterial Artificial Chromosomes (BACs) Containing These Sequences.

[0005] Sequence tagged connectors, or STCs, are sequences of insert data generated from both ends (at the vector-insert point) of a BAC clone in a genomic library. These sequences, and BACs containing these STC sequences, can be used, for example, for marker development, genetic mapping or linkage analysis, marker assisted breeding, and physical genome mapping (Venter, et al., Nature, 381:364-366 (1996), the entirety of which is herein incorporated by reference; Choi and Wing, on the Worldwide web at genome.clemson.edu/protocols2-nj.html July, 1998). STCs can represent a copy of up to a full length of a mRNA transcript, a promoter element or part of a promoter, can contain simple sequence repeats (also called microsatellites) repetitive elements or fragments of repetitive elements, other DNA markers, or any combination thereof.

[0006] Markers have been used in genetic mapping which can be a step in isolating a gene. Genetic mapping or linkage analysis is based on the level at which markers and genes are co-inherited (Rothwell, Understanding Genetics. 4^{th} Ed., Oxford University Press, New York, p. 703 (1988). Statistical tests like chi-square analysis can be used to test the randomness of segregation or linkage (Kochert, The Rockefeller Foundation International Program on Rice Biotechnology, University of Georgia, Athens, Ga., pp 1-14 (1989), the entirety of which is herein incorporated by reference. In linkage mapping, the proportion of recombinant individuals out of the total mapping population provides the information for determining the genetic distance between the loci (Young, Encyclopedia of Agricultural Science, Vol. 3, pp 275-282 (1994), the entirety of which is herein incorporated by reference).

[0007] Classical mapping studies utilize easily observable, visible traits instead of molecular markers. These visible traits are also known as naked eye polymorphisms. These traits can be morphological like plant height, fruit size, shape and color or physiological like disease response, photoperiod sensitivity or crop maturity. Visible traits are useful and are still in use because they represent actual phenotypes and are easy to score without any specialized lab equipment. By contrast, the other types of genetic markers are arbitrary loci for use in linkage mapping and often not associated to specific plant phenotypes (Young, Encyclopedia of Agricultural Science, Vol. 3, pp. 275-282 (1994)). Many morphological markers cause such large effects on phenotype that they are undesirable in breeding programs. Many other visible traits have the disadvantage of being developmentally regulated (i.e., expressed only at certain stages; or in specific tissues and organs). Often times, visible traits mask the effects of linked minor genes making it nearly impossible to identify desirable linkages for selection (Tanksely, et al., Biotech. 7:257-264 (1989), the entirety of which is herein incorporated by reference).

[0008] Although a number of important agronomic characters are controlled by loci having major effects on phenotype, many economically important traits, such as yield and some forms of disease resistance, are quantitative in nature. This type of phenotypic variation in a trait is characterized by continuous, normal distribution of phenotypic values in a particular population (Beckmann and Soller, Oxford Surveys of Plant Molecular Biology, Miffen. (ed.), Vol. 3, Oxford University Press, UK., pp. 196-250 (1986), the entirety of which is herein incorporated by reference). Such traits are governed by a large number of loci, Quantitative Trait Loci (QTL), each of which can make a small positive or negative effect to the final phenotype value of the trait (Beckmann and Soller, Oxford Surveys of Plant Molecular Biology, Miffen. (ed.), Vol. 3, Oxford University Press, U.K., pp. 196-250 (1986)). Loci contributing to such genetic variation are often termed minor genes as opposed to major genes with large effects that follow a Mendelian pattern of inheritance. Polygenic traits are also predicted to follow a Mendelian type of inheritance, however the contribution of each locus is expressed as an increase or decrease in the final trait value.

[0009] Markers have been used in physical mapping studies with BAC libraries made from plant genomes. Such mapping studies have been carried out in rice (Kim et al., Genomics 34:213-218 (1996), the entirety of which is herein incorporated by reference; Hang, Plant Mol. Biol. 35:129-133 (1997), the entirety of which is herein incorporated by reference; Zhang and Wing, Plant Mol. Bio. 35:115-127 (1997), the entirety of which is herein incorporated by reference; Chen et al., Proc. Acad. Sci. (U.S.A.) 94:3431-3435 (1997), the entirety of which is herein incorporated by reference; Wang et al., Plant J. 7:525-533 (1995), the entirety of which is herein incorporated by reference) sorghum (Zwick et al., Genetics 148:1983-1992 (1998), the entirety of which is herein incorporated by reference; Zhang, et al., Molecular Breeding 2:11-24 (1996), the entirety of which is herein incorporated by reference) maize, (Chen, et al., Proc. Acad. Sci. (U.S.A) 94:3431-3435 (1997), and Arabidopsis (Kim, et al., Genomics 34:213-218 (1996), the entirety of which is herein incorporated by reference).

[0010] Repetitive elements have been used in physical mapping in cereals (Ananiev, et al., Proc. Acad. Sci. (U.S.A.) 95:13073-8 (1998), the entirety of which is herein incorporated by reference; McLean et al., Mol Gen Genet 253:687-694 (1997), the entirety of which is herein incorporated by reference).

II. Sequence Comparisons

[0011] STCs and sequenced BACs can be compared, for example, to sequences that encode promoters or proteins or other sequences. These homologies can be determined by similarity searches (Adams, et al., Science 252:1651-1656 (1991), the entirety of which is herein incorporated by reference).

[0012] A characteristic feature of a DNA sequence is that it can be compared with other DNA sequences. Sequence comparisons can be undertaken by determining the similarity of the test or query sequence with sequences in publicly available or propriety databases (“similarity analysis”) or by searching for certain motifs (“intrinsic sequence analysis”) (e.g., cis elements) (Coulson, Trends in Biotechnology, 12:76-80 (1994), the entirety of which is herein incorporated by reference; Birren, et al., Genome Analysis, 1:543-559 (1997), the entirety of which is herein incorporated by reference).

[0013] Similarity analysis includes database search and alignment. Examples of public databases include the DNA Database of Japan (DDBJ) (on the Worldwide web at ddbj.nig.ac.jp/); Genebank (on the Worldwide web at ncbi.nlm.nih.gov/web/Genbank/Index.htlm); and the European Molecular Biology Laboratory Nucleic Acid Sequence Database (EMBL) (on the Worldwide web at ebi.ac.uk/ebi_docs/embl_db.html). A number of different search algorithms have been developed, one example of which are the suite of programs referred to as BLAST programs. There are five implementations of BLAST, three designed for nucleotide sequences queries (BLASTN, BLASTX, and TBLASTX) and two designed for protein sequence queries (BLASTP and TBLASTN) (Coulson, Trends in Biotechnology, 12:76-80 (1994); Birren, et al., Genome Analysis, 1:543-559 (1997)).

[0014] BLASTN takes a nucleotide sequence (the query sequence) and its reverse complement and searches them against a nucleotide sequence database. BLASTN was designed for speed, not maximum sensitivity, and may not find distantly related coding sequences. BLASTX takes a nucleotide sequence, translates it in three forward reading frames and three reverse complement reading frames, and then compares the six translations against a protein sequence database. BLASTX is useful for sensitive analysis of preliminary (single-pass) sequence data and is tolerant of sequencing errors (Gish and States, Nature Genetics, 3:266-272 (1993), the entirety of which is herein incorporated by reference). BLASTN and BLASTX may be used in concert for analyzing STC data (Coulson, Trends in Biotechnology, 12:76-80 (1994); Birren, et al., Genome Analysis, 1:543-559 (1997)).

[0015] Given a coding nucleotide sequence and the protein it encodes, it is often preferable to use the protein as the query sequence to search a database because of the greatly increased sensitivity to detect more subtle relationships. This is due to the larger alphabet of proteins (20 amino acids) compared with the alphabet of nucleic acid sequences (4 bases), where it is far easier to obtain a match by chance. In addition, with nucleotide alignments, only a match (positive score) or a mismatch (negative score) is obtained, but with proteins, the presence of conservative amino acid substitutions can be taken into account. Here, a mismatch may yield a positive score if the non-identical residue has physical/chemical properties similar to the one it replaced. Various scoring matrices are used to supply the substitution scores of all possible amino acid pairs. A general purpose scoring system is the BLOSUM62 matrix (Henikoff and Henikoff, Proteins, 17:49-61 (1993), the entirety of which is herein incorporated by reference), which is currently the default choice for BLAST programs. BLOSUM62 is tailored for alignments of moderately diverged sequences and thus may not yield the best results under all conditions. Altschul, J. Mol. Biol. 36:290-300 (1993), the entirety of which is herein incorporated by reference, uses a combination of three matrices to cover all contingencies. This may improve sensitivity, but at the expense of slower searches. In practice, a single BLOSUM62 matrix is often used but others (PAM40 and PAM250) may be attempted when additional analysis is necessary. Low PAM matrices are directed at detecting very strong but localized sequence similarities, whereas high PAM matrices are directed at detecting long but weak alignments between very distantly related sequences.

[0016] Homologues in other organisms are available that can be used for comparative sequence analysis. Multiple alignments are performed to study similarities and differences in a group of related sequences. CLUSTAL W is a multiple sequence alignment package available that performs progressive multiple sequence alignments based on the method of Feng and Doolittle, J. Mol. Evol. 25:351-360 (1987), the entirety of which is herein incorporated by reference. Each pair of sequences is aligned and the distance between each pair is calculated; from this distance matrix, a guide tree is calculated, and all of the sequences are progressively aligned based on this tree. A feature of the program is its sensitivity to the effect of gaps on the alignment; gap penalties are varied to encourage the insertion of gaps in probable loop regions instead of in the middle of structured regions. Users can specify gap penalties, choose between a number of scoring matrices, or supply their own scoring matrix for both the pairwise alignments and the multiple alignments. CLUSTAL W for UNIX and VMS systems is available at: ftp.ebi.ac.uk. Another program is MACAW (Schuler et al., Proteins, Struct. Func. Genet, 9:180-190 (1991), the entirety of which is herein incorporated by reference, for which both Macintosh and Microsoft Windows versions are available. MACAW uses a graphical interface, provides a choice of several alignment algorithms, and is available by anonymous ftp at: ncbi.nlm.nih.gov (directory/pub/macaw).

[0017] Sequence motifs are derived from multiple alignments and can be used to examine individual sequences or an entire database for subtle patterns. With motifs, it is sometimes possible to detect distant relationships that may not be demonstrable based on comparisons of primary sequences alone. Currently, the largest collection of sequence motifs in the world is PROSITE (Bairoch and Bucher, Nucleic Acid Research, 22:3583-3589 (1994), the entirety of which is herein incorporated by reference). PROSITE may be accessed via either the ExPASy server on the World Wide Web or anonymous ftp site. Many commercial sequence analysis packages also provide search programs that use PROSITE data.

[0018] A resource for searching protein motifs is the BLOCKS E-mail server developed by S. Henikoff, Trends Biochem Sci., 18:267-268 (1993), the entirety of which is herein incorporated by reference; Henikoff and Henikoff, Nucleic Acid Research, 19:6565-6572 (1991), the entirety of which is herein incorporated by reference; Henikoff and Henikoff, Proteins, 17:49-61 (1993). BLOCKS searches a protein or nucleotide sequence against a database of protein motifs or “blocks.” Blocks are defined as short, ungapped multiple alignments that represent highly conserved protein patterns. The blocks themselves are derived from entries in PROSITE as well as other sources. Either a protein or nucleotide query can be submitted to the BLOCKS server; if a nucleotide sequence is submitted, the sequence is translated in all six reading frames and motifs are sought in these conceptual translations. Once the search is completed, the server will return a ranked list of significant matches, along with an alignment of the query sequence to the matched BLOCKS entries.

[0019] Conserved protein domains can be represented by two-dimensional matrices, which measure either the frequency or probability of the occurrences of each amino acid residue and deletions or insertions in each position of the domain. This type of model, when used to search against protein databases, is sensitive and usually yields more accurate results than simple motif searches. Two popular implementations of this approach are profile searches (such as GCG program ProfileSearch) and Hidden Markov Models (HMMs) (Krough, et al., J. Mol. Biol. 235:1501-1531 (1994); Eddy, Current Opinion in Structural Biology 6:361-365 (1996), both of which are herein incorporated by reference in their entirety). In both cases, a large number of common protein domains have been converted into profiles, as present in the PROSITE library, or HHM models, as in the Pfam protein domain library (Sonnhammer, et al., Proteins 28:405-420 (1997), the entirety of which is herein incorporated by reference). Pfam contains more than 500 HMM models for enzymes, transcription factors, signal transduction molecules, and structural proteins. Protein databases can be queried with these profiles or HMM models, which will identify proteins containing the domain of interest. For example, HMMSW or HMMFS, two programs in a public domain package called HMMER (Sonnhammer, et al., Proteins 28:405-420 (1997)) can be used.

[0020] PROSITE and BLOCKS represent collected families of protein motifs. Thus, searching these databases entails submitting a single sequence to determine whether or not that sequence is similar to the members of an established family. Programs working in the opposite direction compare a collection of sequences with individual entries in the protein databases. An example of such a program is the Motif Search Tool, or MoST (Tatusov, et al., Proc. Natl. Acad. Sci. 91:12091-12095 (1994), the entirety of which is herein incorporated by reference). On the basis of an aligned set of input sequences, a weight matrix is calculated by using one of four methods (selected by the user); a weight matrix is simply a representation, position by position in an alignment, of how likely a particular amino acid will appear. The calculated weight matrix is then used to search the databases. To increase sensitivity, newly found sequences are added to the original data set, the weight matrix is recalculated, and the search is performed again. This procedure continues until no new sequences are found.

### SUMMARY OF THE INVENTION

[0021] The present invention provides a substantially purified nucleic acid molecule, the nucleic acid molecule capable of specifically hybridizing to a second nucleic acid molecule having a nucleic acid sequence selected from the group consisting of SEQ ID NO: 1 through SEQ ID NO: 82359 or complement or fragment of either.

[0022] The present invention provides a substantially purified nucleic acid molecule comprising a nucleic acid molecule or fragment thereof having a pair of defined ends, wherein the pair of defined ends are selected from the defined ends in Table A.

[0023] The present invention provides a substantially purified protein or fragment thereof encoded by a first nucleic acid molecule which specifically hybridizes to a second nucleic acid molecule, the second nucleic acid molecule having a nucleic acid sequence selected from the group consisting of SEQ ID NO:1 through SEQ ID NO: 82359 or complements thereof.

[0024] The present invention provides a substantially purified protein or fragment thereof encoded by a nucleic acid sequence selected from the group consisting of SEQ ID NO:1 through SEQ ID NO: 82359 or complements thereof or fragments of either.

[0025] The present invention provides a transformed plant having a nucleic acid molecule which comprises: (A) an exogenous promoter region which functions in a plant cell to cause the production of a mRNA molecule; which is linked to (B) a structural nucleic acid molecule, wherein the structural nucleic acid molecule is selected from the group consisting of SEQ ID NO:1 through SEQ ID NO: 82359 or complements thereof or fragments of either; which is linked to (C) a 3′ non-translated sequence that functions in a plant cell to cause termination of transcription and addition of polyadenylated ribonucleotides to a 3′ end of the mRNA molecule.

[0026] The present invention provides a transformed plant having a nucleic acid molecule which comprises: (A) an exogenous promoter region which functions in a plant cell to cause the production of a mRNA molecule wherein the promoter nucleic acid molecule is selected from the group consisting of SEQ ID NO:1 through SEQ ID NO: 82359 or complements thereof or fragments of either; which is linked to (B) a structural nucleic acid molecule encoding a protein or peptide; which is linked to (C) a 3′ non-translated sequence that functions in a plant cell to cause termination of transcription and addition of polyadenylated ribonucleotides to a 3′ end of the mRNA molecule.

[0027] The present invention provides a transformed plant having a nucleic acid molecule which comprises: (A) an exogenous promoter region which functions in a plant cell to cause the production of a mRNA molecule; which is linked to (B) a transcribed nucleic acid molecule with a transcribed strand and a non-transcribed strand, wherein the transcribed strand is complementary to a nucleic acid molecule having a nucleic acid sequence selected from the group consisting of SEQ ID NO:1 through SEQ ID NO: 82359 or complements thereof or fragments of either and the transcribed strand is complementary to an endogenous mRNA molecule; which is linked to (C) a 3′ non-translated sequence that functions in plant cells to cause termination of transcription and addition of polyadenylated ribonucleotides to a 3′ end of the mRNA molecule.

[0028] The present invention provides a transformed plant having a nucleic acid molecule which comprises: (A) an exogenous promoter region which functions in a plant cell to cause the production of a mRNA molecule wherein the promoter nucleic acid molecule is selected from the group consisting of SEQ ID NO:1 through SEQ ID NO: 82359 or complements thereof or fragments of either; which is linked to (B) a transcribed nucleic acid molecule with a transcribed strand and a non-transcribed strand, wherein the transcribed strand is complementary to an endogenous mRNA molecule; which is linked to (C) a 3′ non-translated sequence that functions in plant cells to cause termination of transcription and addition of polyadenylated ribonucleotides to a 3′ end of the mRNA molecule.

[0029] The present invention provides a computer readable medium having recorded thereon one or more of the nucleotide sequences depicted in SEQ ID NO:1 through SEQ ID NO: 82359.

[0030] The present invention provides a method of introgressing a trait into a plant comprising using a nucleic acid marker for marker assisted selection of the plant, the nucleic acid marker complementary to a nucleic acid sequence selected from the group consisting of SEQ ID NO: 1 through SEQ ID NO: 82359 or complement thereof or fragment of either, and introgressing the trait into a plant.

[0031] The present invention provides a method for screening for a trait comprising interrogating genomic DNA for the presence or absence of a marker molecule that is genetically linked to a nucleic acid sequence complementary to a nucleic acid sequence selected from the group consisting of SEQ ID NO: 1 through SEQ ID NO: 82359 or complements thereof or fragment of either; and detecting the presence or absence of the marker.

[0032] The present invention provides a method for determining the likelihood of the level, presence or absence of a trait in a plant comprising the steps of: (A) obtaining genomic DNA from the plant; (B) detecting a marker nucleic acid molecule; the marker nucleic acid molecule wherein the marker nucleic acid molecule specifically hybridizes with a nucleic acid sequence that is genetically linked to a nucleic acid sequence complementary to a nucleic acid sequence selected from the group consisting of SEQ ID NO: 1 through SEQ ID NO: 82359 or complements thereof; (C) and determining the level, presence or absence of the marker nucleic acid molecule, wherein the level, presence or absence of the marker nucleic acid molecule is indicative of the likely presence in the plant of the trait.

[0033] The present invention provides a method for determining a genomic polymorphism in a plant that is predictive of a trait comprising the steps: (A) incubating a marker nucleic acid molecule, under conditions permitting nucleic acid hybridization, and a complementary nucleic acid molecule obtained from the plant, the marker nucleic acid molecule having a nucleic acid sequence selected from the group consisting of SEQ ID NO: 1 through SEQ ID NO: 82359 or complements thereof; (B) permitting hybridization between the marker nucleic acid molecule and the complementary nucleic acid molecule obtained from the plant; and (C) detecting the presence of the polymorphism.

[0034] The present invention provides a method of determining an association between a polymorphism and a plant trait comprising: (A) hybridizing a nucleic acid molecule specific for the polymorphism to genetic material of a plant, wherein the nucleic acid molecule comprises a nucleic acid sequence selected from the group consisting of SEQ ID NO: 1 through SEQ ID NO: 82359 or complements thereof; and (B) calculating the degree of association between the polymorphism and the plant trait.

[0035] The present invention provides a method for isolating a nucleic acid molecule in a non-maize cereal comprising: (A) defining a genomic region of maize by reference to a marker molecule, wherein said marker molecule comprises a nucleic acid sequence selected from the group consisting of SEQ ID NO: 1 through SEQ ID NO: 82359 or complement thereof or fragment of either; (B) identifying a syntenic genomic region of said non-maize cereal that corresponds to said defined genomic region of maize; and (C) isolating said syntenic genomic region of said non-maize cereal that corresponds to said defined genomic region of maize.

[0036] The present invention provides a method for isolating a nucleic acid molecule in a cereal comprising: (A) defining a genomic region of maize by reference to a marker molecule, wherein said marker molecule comprises a nucleic acid sequence selected from the group consisting of SEQ ID NO: 1 through SEQ ID NO: 82359 or complement thereof or fragment of either; (B) identifying a syntenic genomic region of said cereal that corresponds to said defined genomic region of maize; and (C) isolating said syntenic genomic region of said cereal that corresponds to said defined genomic region of maize.

[0037] The present invention provides a method for interrogating a genomic region of a non-maize cereal comprising interrogating genomic DNA for the presence or absence of two marker molecules, wherein said two marker molecules comprise two nucleic acid sequences selected from the group consisting of SEQ ID NO: 1 through SEQ ID NO: 82359 or complement thereof or fragment of either, and detecting the presence or absence of said two marker molecules.

### DETAILED DESCRIPTION OF THE INVENTION

[0038] Agents of the Invention:

[0039] (a) Nucleic Acid Molecules

[0040] Agents of the present invention include nucleic acid molecules and more specifically BACs and STC nucleic acid molecules or nucleic acid fragment molecules thereof.

[0041] A subset of the nucleic acid molecules of the present invention includes nucleic acid molecules that are marker molecules. Another subset of the nucleic molecules of the present invention include nucleic acid molecules that are promoters and/or regulatory elements. Another subset of the nucleic acid molecules of the present invention include nucleic acid molecules that encode proteins or fragments of proteins. In a preferred embodiment the nucleic acid molecules of the present invention are derived from maize (Zea mays L.), and more preferably Zea mays L., genotype LH32, (National Seed Storage Laboratory, Fort Collins Colo.).

[0042] Fragment STC nucleic acid molecules and fragments of BACs may encode significant portion(s) of, or indeed most of, the STC or BAC nucleic acid molecule. In addition, a fragment nucleic acid molecule can encode a maize protein or fragment thereof. Alternatively, the fragments may comprise smaller oligonucleotides (having from about 15 to about 250 nucleotide residues, and more preferably, about 15 to about 30 nucleotide residues). In another preferred embodiment, the fragments may comprise oligonucleotides between about 50 to about 100 nucleotides.

[0043] The term “substantially purified”, as used herein, refers to a molecule separated from substantially all other molecules normally associated with it in its native state. More preferably a substantially purified molecule is the predominant species present in a preparation. A substantially purified molecule may be greater than 60% free, preferably 75% free, more preferably 90% free, and most preferably 95% free from the other molecules (exclusive of solvent) present in the natural mixture. The term “substantially purified” is not intended to encompass molecules present in their native state.

[0044] The agents of the present invention will preferably be “biologically active” with respect to either a structural attribute, such as the capacity of a nucleic acid to hybridize to another nucleic acid molecule, or the ability of a protein to be bound by an antibody (or to compete with another molecule for such binding). Alternatively, such an attribute may be catalytic, and thus involve the capacity of the agent to mediate a chemical reaction or response.

[0045] The agents of the present invention may also be recombinant. As used herein, the term recombinant means any agent (e.g., DNA, peptide etc.), that is, or results, however indirect, from human manipulation of a nucleic acid molecule.

[0046] It is understood that the agents of the present invention may be labeled with reagents that facilitate detection of the agent (e.g., fluorescent labels (Prober, et al., Science 238:336-340 (1987); Albarella et al., EP 144914, chemical labels (Sheldon et al., U.S. Pat. No. 4,582,789; Albarella et al., U.S. Pat. No. 4,563,417, modified bases (Miyoshi et al., EP 119448, all of which are hereby incorporated by reference in their entirety).

[0047] It is further understood, that the present invention provides, for example, bacterial, viral, microbial, insect, fungal, algal and plant cells comprising the agents of the present invention.

[0048] The BAC nucleic acid molecules of the present invention include, without limitation, BAC nucleic acid molecules having inserts with two defined ends (STC) as set forth in Table A. It is understood that fragments of such BAC molecules can contain one or neither of the defined ends.

[0049] STC nucleic acid molecules or fragment STC nucleic acid molecules, or BACs or fragments thereof, of the present invention are capable of specifically hybridizing to other nucleic acid molecules under certain circumstances. As used herein, two nucleic acid molecules are said to be capable of specifically hybridizing to one another if the two molecules are capable of forming an anti-parallel, double-stranded nucleic acid structure. A nucleic acid molecule is said to be the “complement” of another nucleic acid molecule if they exhibit complete complementarity. As used herein, molecules are said to exhibit “complete complementarity” when every nucleotide of one of the molecules is complementary to a nucleotide of the other. Two molecules are said to be “minimally complementary” if they can hybridize to one another with sufficient stability to permit them to remain annealed to one another under at least conventional “low-stringency” conditions. Similarly, the molecules are said to be “complementary” if they can hybridize to one another with sufficient stability to permit them to remain annealed to one another under conventional “high-stringency” conditions. Conventional stringency conditions are described by Sambrook et al., Molecular Cloning, A Laboratory Manual, 2nd Ed., Cold Spring Harbor Press, Cold Spring Harbor, N.Y. (1989), and by Haymes et al., Nucleic Acid Hybridization, A Practical Approach, IRL Press, Washington, D.C. (1985), the entirety of which is herein incorporated by reference. Departures from complete complementarity are therefore permissible, as long as such departures do not completely preclude the capacity of the molecules to form a double-stranded structure. Thus, in order for an STC nucleic acid molecule, fragment STC nucleic acid molecule, BAC nucleic acid molecule or fragment BAC nucleic acid molecule to serve as a primer or probe it need only be sufficiently complementary in sequence to be able to form a stable double-stranded structure under the particular solvent and salt concentrations employed.

[0050] Appropriate stringency conditions which promote DNA hybridization are, for example, 6.0× sodium chloride/sodium citrate (SSC) at about 45° C., followed by a wash of 2.0×SSC at 50° C., are known to those skilled in the art or can be found in Current Protocols in Molecular Biology, John Wiley & Sons, N.Y. (1989), 6.3.1-6.3.6. For example, the salt concentration in the wash step can be selected from a low stringency of about 2.0×SSC at 50° C. to a high stringency of about 0.2×SSC at 50° C. In addition, the temperature in the wash step can be increased from low stringency conditions at room temperature, about 22° C., to high stringency conditions at about 65° C. Both temperature and salt may be varied, or either the temperature or the salt concentration may be held constant while the other variable is changed.

[0051] In a preferred embodiment, a nucleic acid of the present invention will specifically hybridize to one or more of the nucleic acid molecules set forth in SEQ ID NO: 1 through SEQ ID NO: 82359 or complements thereof under moderately stringent conditions, for example at about 2.0×SSC and about 40° C.

[0052] In a particularly preferred embodiment, a nucleic acid of the present invention will specifically hybridize to one or more of the nucleic acid molecules set forth in SEQ ID NO:1 through SEQ ID NO: 82359 or complements thereof under high stringency conditions. In one aspect of the present invention, the nucleic acid molecules of the present invention have one or more of the nucleic acid sequences set forth in SEQ ID NO: 1 through to SEQ ID NO: 82359 or complements thereof. In another aspect of the present invention, one or more of the nucleic acid molecules of the present invention share between 100% and 90% sequence identity with one or more of the nucleic acid sequences set forth in SEQ ID NO: 1 through to SEQ ID NO: 82359 or complements thereof. In a further aspect of the present invention, one or more of the nucleic acid molecules of the present invention share between 100% and 95% sequence identity with one or more of the nucleic acid sequences set forth in SEQ ID NO: 1 through to SEQ ID NO: 82359 or complements thereof. In a more preferred aspect of the present invention, one or more of the nucleic acid molecules of the present invention share between 100% and 98% sequence identity with one or more of the nucleic acid sequences set forth in SEQ ID NO: 1 through to SEQ ID NO: 82359 or complements thereof. In an even more preferred aspect of the present invention, one or more of the nucleic acid molecules of the present invention share between 100% and 99% sequence identity with one or more of the sequences set forth in SEQ ID NO: 1 through to SEQ ID NO: 82359 or complements thereof. In a further, even more preferred aspect of the present invention, one or more of the nucleic acid molecules of the present invention exhibit 100% sequence identity with one or more nucleic acid molecules present within the genomic library herein designated BAC#ZM(Monsanto Company, St. Louis, Mo., United States of America).

[0053] It is understood that the present invention encompasses fragments of such nucleic acid molecules and that such nucleic acid fragments may contain one, part of one, or neither of the defined sequences.

[0054] (i) Nucleic Acid Molecule Markers

[0055] One aspect of the present invention concerns nucleic acid molecules SEQ ID NO:1 through SEQ ID NO: 82359 or complements thereof and other nucleic acid molecules of the present invention, that contain microsatellites, single nucleotide substitutions (SNPs), repetitive elements or parts of repetitive elements or other markers. Microsatellites typically include a 1-6 nucleotide core element within SEQ ID NO:1 through SEQ ID NO: 82359 that are tandemly repeated from one to many thousands of times. A different “allele” occurs at an SSR locus as a result of changes in the number of times a core element is repeated, altering the length of the repeat region, (Brown et al., Methods of Genome Analysis in Plants, (ed.) Jauhar, CRC Press, Inc, Boca Raton, Fla., USA; London, England, UK, pp. 147-159, (1996), the entirety of which is herein incorporated by reference). SSR loci occur throughout plant genomes, and specific repeat motifs occur at different levels of abundance than those found in animals. The relative frequencies of all SSRs with repeat units of 1-6 nucleotides have been surveyed. The most abundant SSR is AAAAAT followed by Aₙ, AGₙ AAT, AAC, AGC, AAG, AATT, AAAT and AC. On average, 1 SSR is found every 21 and 65 kb in dicots and monocots. Fewer CG nucleotides are found in dicots than in monocots. There is no correlation between abundance of SSRs and nuclear DNA content. The abundance of all tri and tetranucleotide SSR combination jointly have been reported to be equivalent to that of the total di-nucleotide combinations. Mono- di- and tetra-nucleotide repeats are all located in noncoding regions of DNA while 57% of those trinucleotide SSRs containing CG were located within gene coding regions. All repeated trinucleotide SSRs composed entirely of AT are found in noncoding regions, (Brown et al., Methods of Genome Analysis in Plants, ed. Jauhar, CRC Press, Inc, Boca Raton, Fla., USA; London, England, UK, pp. 147-159 (1996)).

[0056] Microsatellites can be observed in SEQ NO:1 to SEQ NO:82359 or complements thereof by using the BLASTN program to examine sequences for the presence/absence of microsatellites. In this system, raw sequence data is searched through databases, which store SSR markers collected from publications and 692 classes of di-, tri and tetranucleotide repeat markers generated by computer. Microsatellites can also be observed by screening the BAC library of the present invention by colony or plaque hybridization with a labeled probe containing microsatellite markers; isolating positive clones and sequencing the inserts of the positive clones; suitable primers flanking the microsatellite markers.

[0057] Single nucleotide polymorphisms (SNPs) are single base changes in genomic DNA sequence. They generally occur at greater frequency than other markers and are spaced with a greater uniformity throughout a genome than other reported forms of polymorphism. The greater frequency and uniformity of SNPs means that there is greater probability that such a polymorphism will be found near or in a genetic locus of interest than would be the case for other polymorphisms. SNPs are located in protein-coding regions and noncoding regions of a genome. Some of these SNPs may result in defective or variant protein expression (e.g., as a result of mutations or defective splicing). Analysis (genotyping) of characterized SNPs can require only a plus/minus assay rather than a lengthy measurement, permitting easier automation.

[0058] SNPs can be characterized using any of a variety of methods. Such methods include the direct or indirect sequencing of the site, the use of restriction enzymes (Botstein et al., Am. J Hum. Genet. 32:314-331 (1980), the entirety of which is herein incorporated reference; Konieczny and Ausubel, Plant J. 4:403-410 (1993), the entirety of which is herein incorporated by reference), enzymatic and chemical mismatch assays (Myers et al., Nature 313:495-498 (1985), the entirety of which is herein incorporated by reference), allele-specific PCR (Newton et al., Nucl. Acids Res. 17:2503-2516 (1989), the entirety of which is herein incorporated by reference; Wu et al., Proc. Natl. Acad. Sci. USA 86:2757-2760 (1989), the entirety of which is herein incorporated by reference), ligase chain reaction (Barany, Proc. Natl. Acad. Sci. USA 88:189-193 (1991), the entirety of which is herein incorporated by reference), single-strand conformation polymorphism analysis (Labrune et al., Am. J. Hum. Genet. 48: 1115-1120 (1991), the entirety of which is herein incorporated by reference), primer-directed nucleotide incorporation assays (Kuppuswami et al., Proc. Natl. Acad. Sci. USA 88:1143-1147 (1991), the entirety of which is herein incorporated by reference), dideoxy fingerprinting (Sarkar et al., Genomics 13:441-443 (1992), the entirety of which is herein incorporated by reference), solid-phase ELISA-based oligonucleotide ligation assays (Nikiforov et al., Nucl. Acids Res. 22:4167-4175 (1994), the entirety of which is herein incorporated by reference), oligonucleotide fluorescence-quenching assays (Livak et al., PCR Methods Appl. 4:357-362 (1995a), the entirety of which is herein incorporated by reference), 5′-nuclease allele-specific hybridization TaqMan™ assay (Livak et al., Nature Genet. 9:341-342 (1995), the entirety of which is herein incorporated by reference), template-directed dye-terminator incorporation (TDI) assay (Chen and Kwok, Nucl. Acids Res. 25:347-353 (1997), the entirety of which is herein incorporated by reference), allele-specific molecular beacon assay (Tyagi et al., Nature Biotech. 16: 49-53 (1998), the entirety of which is herein incorporated by reference), PinPoint assay (Haff and Smimov, Genome Res. 7: 378-388 (1997), the entirety of which is herein incorporated by reference), and dCAPS analysis (Neff et al., Plant J. 14:387-392 (1998), the entirety of which is herein incorporated by reference).

[0059] SNPs can be observed by examining sequences of overlapping clones in the BAC library according to the method described by Taillon-Miller et al. Genome Res. 8:748-754 (1998), the entirety of which is herein incorporated by reference). SNPs can also be observed by screening the BAC library of the present invention by colony or plaque hybridization with a labeled probe containing SNP markers; isolating positive clones and sequencing the inserts of the positive clones; suitable primers flanking the SNP markers.

[0060] Genetic markers of the present invention include “dominant” or “codominant” markers. “Codominant markers” reveal the presence of two or more alleles (two per diploid individual) at a locus. “Dominant markers” reveal the presence of only a single allele per locus. The presence of the dominant marker phenotype (e.g., a band of DNA) is an indication that one allele is present in either the homozygous or heterozygous condition. The absence of the dominant marker phenotype (e.g., absence of a DNA band) is merely evidence that “some other” undefined allele is present. In the case of populations where individuals are predominantly homozygous and loci are predominately dimorphic, dominant and codominant markers can be equally valuable. As populations become more heterozygous and multi-allelic, codominant markers often become more informative of the genotype than dominant markers.

[0061] In addition to SSRs and SNPs, repetitive elements can be used as markers. For most eukaryotes, interspersed repeat sequence elements are typically mobile genetic elements (Wright et al., Genetics 142:569-578 (1996), the entirety of which is herein incorporated by reference). They are ubiquitous in most living organisms and are present in copy numbers ranging from just a few elements to tens or hundreds or thousands per genome. In the latter case, they can represent a major fraction of the genome. For example, transposable elements have been estimated to make up greater than 50% of the maize genome (Kidwell, and Lisch Proc. Natl. Acad. Sci. (U.S.A.) 94:7704-7711 (1997), the entirety of which is herein incorporated by reference).

[0062] Transposable elements are classified in families according to their sequence similarity. Two major classes are distinguished by their differing modes of transposition. Class I elements are retroelements that use reverse transcriptase to transpose by means of an RNA intermediate. They include long terminal repeat retrotransposons and long and short interspersed elements (LINES and SINES, respectively). Class II elements transpose directly from DNA to DNA and include transposons such as the Activator-Dissociation (Ac-Ds) family in maize, the P element in Drosophila and the Tc-1 element in Caenhorabditis elegans. Additionally, a category of transposable elements has been discovered whose transposition mechanism is not yet known. These miniature inverted-repeat transposable elements (MITEs) have some properties of both class I and II elements. They are short (100-400 bp in length) and none so far has been found to have any coding potential. They are present in high copy number (3,000-10,000) per genome and have target site preferences for TAA or TA in plants (Kidwell and Lisch, Proc. Natl. Acad. Sci. (U.S.A.) 94:7704-7711 (1997)).

[0063] Insertion elements are found in two areas of the genome. Some are located in regions distant from gene sequences such as in the heterochromatin or in regions between genes; other repeat elements are found in or near single copy sequences. The insertion of an Ac-Ds element into wx-m9, an allele of the waxy locus in maize is an example of a repetitive element found within a coding region. The effect of this insertion is attenuated by the loss through splicing of the transposable element after transcription (Kidwell and Lisch, Proc. Natl. Acad. Sci. (U.S.A.) 94:7704-7711 (1997)).

[0064] The genetic variability resulting from transposable elements ranges from changes in the size and arrangement of whole genomes to changes in single nucleotides. They may produce major effects on phenotypic traits or small silent changes detectable only at the DNA sequence level. Transposable elements may also produce variation when they excise, leaving small footprints of their previous presence (Kidwell and Lisch, Proc. Natl. Acad. Sci. (U.S.A.) 94:7704-7711 (1997)).

[0065] In addition, other markers such as AFLP markers, RFLP markers, RAPD markers, phenotypic markers or isozyme markers can be utilized (Walton, Seed World 22-29,Jul., 1993), the entirety of which is herein incorporated by reference; Burow and Blake, Molecular Dissection of Complex Traits, 13-29, Eds. Paterson, CRC Press, New York (1988), the entirety of which is herein incorporated by reference). DNA markers can be developed from nucleic acid molecules using restriction endonucleases, the PCR and/or DNA sequence information. RFLP markers result from single base changes or insertions/deletions. These codominant markers are highly abundant in plant genomes, have a medium level of polymorphism and are developed by a combination of restriction endonuclease digestion and Southern blotting hybridization. CAPS are similarly developed from restriction nuclease digestion but only of specific PCR products. These markers are also codominant, have a medium level of polymorphism and are highly abundant in the genome. The CAPS result from single base changes and insertions/deletions. Another marker type, RAPDs, are developed from DNA amplification with random primers and result from single base changes and insertions/deletions in plant genomes. They are dominant markers with a medium level of polymorphisms and are highly abundant. AFLP markers require using the PCR on a subset of restriction fragments from extended adapter primers. These markers are both dominant and codominant, are highly abundant in genomes and exhibit a medium level of polymorphism. SSRs require DNA sequence information. These codominant markers result from repeat length changes, are highly polymorphic, and do not exhibit as high a degree of abundance in the genome as CAPS, AFLPs and RAPDs. SNPs also require DNA sequence information. These codominant markers result from single base substitutions. They are highly abundant and exhibit a medium of polymorphism (Rafalski et al., In: Nonmammalian Genomic Analysis, ed. Birren and Lai, Academic Press, San Diego, Calif., pp. 75-134 (1996), the entirety of which is herein incorporated by reference). Methods to isolate such markers are known in the art.

[0066] Long Terminal repeat retrotransposons and MITEs have been found to be associated with the genes of many plants where some of the transposable elements contribute regulatory sequences. MITEs such as the Tourist element in maize and the Stowaway element in Sorghum are found frequently in the 5′ and 3′ noncoding regions of genes and are frequently associated with the regulatory regions of genes of diverse flowering plants (Kidwell and Lisch, Proc. Natl. Acad. Sci. (U.S.A.) 94:7704-7711 (1997)). It is understood that one or more of the Long Terminal repeat retrotransposons and/or MITES may be a marker, and even more preferably a marker for a gene.

[0067] (ii) Nucleic Acid Molecules Comprising Regulatory Elements

[0068] Another class of agents of the present invention are nucleic acid molecules having promoter regions or partial promoter regions within SEQ ID NO: 1 through SEQ ID NO: 82359 or other nucleic acid molecules of the present invention. Such promoter regions are typically found upstream of the trinucleotide ATG sequence at the start site of a protein coding region.

[0069] As used herein, a promoter region is a region of a nucleic acid molecule that is capable, when located in cis to a nucleic acid sequence that encodes for a protein or fragment thereof to function in a way that directs expression of one or more mRNA molecules that encodes for the protein or fragment thereof.

[0070] Promoters of the present invention can include between about 300 bp upstream and about 10 kb upstream of the trinucleotide ATG sequence at the start site of a protein coding region. Promoters of the present invention can preferably include between about 300 bp upstream and about 5 kb upstream of the trinucleotide ATG sequence at the start site of a protein coding region. Promoters of the present invention can more preferably include between about 300 bp upstream and about 2 kb upstream of the trinucleotide ATG sequence at the start site of a protein coding region. Promoters of the present invention can include between about 300 bp upstream and about 1 kb upstream of the trinucleotide ATG sequence at the start site of a protein coding region. While in many circumstances a 300 bp promoter may be sufficient for expression, additional sequences may act to further regulate expression, for example, in response to biochemical, developmental or environmental signals.

[0071] It is also preferred that the promoters of the present invention contain a CAAT and a TATA cis element. Moreover, the promoters of the present invention can contain one or more cis elements in addition to a CAAT and a TATA box.

[0072] By “regulatory element” it is intended a series of nucleotides that determines if, when, and at what level a particular gene is expressed. The regulatory DNA sequences specifically interact with regulatory or other proteins. Many regulatory elements act in cis (“cis elements”) and are believed to affect DNA topology, producing local conformations that selectively allow or restrict access of RNA polymerase to the DNA template or that facilitate selective opening of the double helix at the site of transcriptional initiation. Cis elements occur within, but are not limited to promoters, and promoter modulating sequences (inducible elements). Cis elements can be identified using known cis elements as a target sequence or target motif in the BLAST programs of the present invention.

[0073] Promoters of the present invention include homologues of cis elements known to effect gene regulation that show homology with the nucleic acid molecules of the present invention. These cis elements include, but are not limited to, oxygen responsive cis elements (Cowen et al., J Biol. Chem. 268(36):26904-26910 (1993) the entirety of which is herein incorporated by reference), light regulatory elements (Bruce and Quaill, Plant Cell 2 (11):1081-1089 (1990) the entirety of which is herein incorporated by reference; Bruce et al., EMBO J. 10:3015-3024 (1991), the entirety of which is herein incorporated by reference; Rocholl et al., Plant Sci. 97:189-198 (1994), the entirety of which is herein incorporated by reference; Block et al., Proc. Natl. Acad. Sci. (U.S.A.) 87:5387-5391 (1990), the entirety of which is herein incorporated by reference; Giuliano et al., Proc. Natl. Acad. Sci. (U.S.A) 85:7089-7093 (1988), the entirety of which is herein incorporated by reference; Staiger et al., Proc. Natl. Acad. Sci. (U.S.A.) 86:6930-6934 (1989), the entirety of which is herein incorporated by reference; Izawa et al., Plant Cell 6:1277-1287 (1994), the entirety of which is herein incorporated by reference; Menkens et al., Trends in Biochemistry 20:506-510 (1995), the entirety of which is herein incorporated by reference; Foster et al., FASEB J. 8:192-200 (1994), the entirety of which is herein incorporated by reference; Plesse et al., Mol Gen Gene 254:258-266 (1997), the entirety of which is herein incorporated by reference; Green et al., EMBO J. 6:2543-2549 (1987), the entirety of which is herein incorporated by reference; Kuhlemeier et al., Ann. Rev Plant Physiol. 38:221-257 (1987), the entirety of which is herein incorporated by reference; Villain et al., J. Biol. Chem. 271:32593-32598 (1996), the entirety of which is herein incorporated by reference; Lam et al., Plant Cell 2:857-866 (1990), the entirety of which is herein incorporated by reference; Gilmartin et al., Plant Cell 2:369-378 (1990), the entirety of which is herein incorporated by reference; Datta et al., Plant Cell 1:1069-1077 (1989) the entirety of which is herein incorporated by reference; Gilmartin et al., Plant Cell 2:369-378 (1990), the entirety of which is herein incorporated by reference; Castresana et al., EMBO J. 7:1929-1936 (1988), the entirety of which is herein incorporated by reference; Ueda et al., Plant Cell 1:217-227 (1989), the entirety of which is herein incorporated by reference; Terzaghi et al., Annu. Rev. Plant Physiol. Plant Mol. Biol. 46:445-474 (1995), the entirety of which is herein incorporated by reference; Green et al., EMBO J. 6:2543-2549 (1987), the entirety of which is herein incorporated by reference; Villain et al., J. Biol. Chem. 271:32593-32598 (1996), the entirety of which is herein incorporated by reference; Tjaden et al., Plant Cell 6:107-118 (1994), the entirety of which is herein incorporated by reference; Tjaden et al., Plant Physiol. 108:1109-1117 (1995), the entirety of which is herein incorporated by reference; Ngai et al., Plant J. 12:1021-1234 (1997), the entirety of which is herein incorporated by reference; Bruce et al., EMBO J. 10:3015-3024 (1991), the entirety of which is herein incorporated by reference; Ngai et al., Plant J. 12:1021-1034 (1997), the entirety of which is herein incorporated by reference), elements responsive to gibberellin, (Muller et al., J. Plant Physiol. 145:606-613 (1995), the entirety of which is herein incorporated by reference; Croissant et al., Plant Science 116:27-35 (1996), the entirety of which is herein incorporated by reference; Lohmer et al., EMBO J. 10:617-624 (1991), the entirety of which is herein incorporated by reference; Rogers et al., Plant Cell 4:1443-1451 (1992), the entirety of which is herein incorporated by reference; Lanahan et al., Plant Cell 4:203-211 (1992) the entirety of which is herein incorporated by reference; Skriver et al., Proc. Natl. Acad. Sci. (U.S.A.) 88:7266-7270 (1991) the entirety of which is herein incorporated by reference; Gilmartin et al., Plant Cell 2:369-378 (1990), the entirety of which is herein incorporated by reference; Huang et al., Plant Mol. Biol. 14:655-668 (1990), the entirety of which is herein incorporated by reference, Gubler et al., Plant Cell 7:1879-1891 (1995), the entirety of which is herein incorporated by reference), elements responsive to abscisic acid, (Busk et al., Plant Cell 9:2261-2270 (1997), the entirety of which is herein incorporated by reference; Guiltinan et al., Science 250:267-270 (1990), the entirety of which is herein incorporated by reference; Shen et al., Plant Cell 7:295-307 (1995) the entirety of which is herein incorporated by reference; Shen et al., Plant Cell 8:1107-1119 (1996), the entirety of which is herein incorporated by reference; Seo et al., Plant Mol. Biol. 27:1119-1131 (1995), the entirety of which is herein incorporated by reference; Marcotte et al., Plant Cell 1:969-976 (1989) the entirety of which is herein incorporated by reference; Shen et al., Plant Cell 7:295-307 (1995), the entirety of which is herein incorporated by reference; Iwasaki et al., Mol Gen Genet 247:391-398 (1995), the entirety of which is herein incorporated by reference; Hattori et al., Genes Dev. 6:609-618 (1992), the entirety of which is herein incorporated by reference; Thomas et al., Plant Cell 5:1401-1410 (1993), the entirety of which is herein incorporated by reference), elements similar to abscisic acid responsive elements, (Ellerstrom et al, Plant Mol. Biol. 32:1019-1027 (1996), the entirety of which is herein incorporated by reference), auxin responsive elements (Liu et al., Plant Cell 6:645-657 (1994) the entirety of which is herein incorporated by reference; Liu et al., Plant Physiol. 115:397-407 (1997), the entirety of which is herein incorporated by reference; Kosugi et al., Plant J. 7:877-886 (1995), the entirety of which is herein incorporated by reference; Kosugi et al., Plant Cell 9:1607-1619 (1997), the entirety of which is herein incorporated by reference; Ballas et al., J. Mol. Biol. 233:580-596 (1993), the entirety of which is herein incorporated by reference), a cis element responsive to methyl jasmonate treatment (Beaudoin and Rothstein, Plant Mol. Biol. 33:835-846 (1997), the entirety of which is herein incorporated by reference), a cis element responsive to abscisic acid and stress response (Straub et al., Plant Mol. Biol. 26:617-630 (1994), the entirety of which is herein incorporated by reference), ethylene responsive cis elements (Itzhaki et al., Proc. Natl. Acad. Sci. (U.S.A.) 91:8925-8929 (1994), the entirety of which is herein incorporated by reference; Montgomery et al., Proc. Acad. Sci. (U.S.A.) 90:5939-5943 (1993), the entirety of which is herein incorporated by reference; Sessa et al., Plant Mol. Biol. 28:145-153 (1995), the entirety of which is herein incorporated by reference; Shinshi et al., Plant Mol. Biol. 27:923-932 (1995), the entirety of which is herein incorporated by reference), salicylic acid cis responsive elements, (Strange et al., Plant J. 11:1315-1324 (1997), the entirety of which is herein incorporated by reference; Qin et al., Plant Cell 6:863-874 (1994), the entirety of which is herein incorporated by reference), a cis element that responds to water stress and abscisic acid (Lam et al., J. Biol. Chem. 266:17131-17135 (1991), the entirety of which is herein incorporated by reference; Thomas et al., Plant Cell 5:1401-1410 (1993), the entirety of which is herein incorporated by reference; Pla et al., Plant Mol Biol 21:259-266 (1993), the entirety of which is herein incorporated by reference), a cis element essential for M phase-specific expression (Ito et al., Plant Cell 10:331-341 (1998), the entirety of which is herein incorporated by reference), sucrose responsive elements (Huang et al., Plant Mol. Biol. 14:655-668 (1990), the entirety of which is herein incorporated by reference; Hwang et al., Plant Mol Biol 36:331-341 (1998), the entirety of which is herein incorporated by reference; Grierson et al., Plant J. 5:815-826 (1994), the entirety of which is herein incorporated by reference), heat shock response elements (Pelham et al., Trends Genet. 1:31-35 (1985), the entirety of which is herein incorporated by reference), elements responsive to auxin and/or salicylic acid and also reported for light regulation (Lam et al., Proc. Natl. Acad. Sci. (U.S.A.) 86:7890-7897 (1989), the entirety of which is herein incorporated by reference; Benfey et al., Science 250:959-966 (1990), the entirety of which is herein incorporated by reference), elements responsive to ethylene and salicylic acid (Ohme-Takagi et al., Plant Mol. Biol. 15:941-946 (1990), the entirety of which is herein incorporated by reference), elements responsive to wounding and abiotic stress (Loake et al., Proc. Natl. Acad. Sci. (U.S.A.) 89:9230-9234 (1992), the entirety of which is herein incorporated by reference; Mhiri et al., Plant Mol. Biol. 33:257-266 (1997), the entirety of which is herein incorporated by reference), antioxidant response elements (Rushmore et al., J. Biol. Chem. 266:11632-11639, the entirety of which is herein incorporated by reference; Dalton et al., Nucleic Acids Res. 22:5016-5023 (1994), the entirety of which is herein incorporated by reference), Sph elements (Suzuki et al., Plant Cell 9:799-807 1997), the entirety of which is herein incorporated reference), Elicitor responsive elements, (Fukuda et al., Plant Mol. Biol. 34:81-87 (1997), the entirety of which is herein incorporated by reference; Rushton et al., EMBO J. 15:5690-5700 (1996), the entirety of which is herein incorporated by reference), metal responsive elements (Stuart et al., Nature 317:828-831 (1985), the entirety of which is herein incorporated by reference; Westin et al., EMBO J. 7:3763-3770 (1988), the entirety of which is herein incorporated by reference; Thiele et al., Nucleic Acids Res. 20:1183-1191 (1992), the entirety of which is herein incorporated by reference; Faisst et al., Nucleic Acids Res. 20:3-26 (1992), the entirety of which is herein incorporated by reference), low temperature responsive elements, (Baker et al., Plant Mol. Biol. 24:701-713 (1994), the entirety of which is herein incorporated by reference; Jiang et al., Plant Mol. Biol. 30:679-684 (1996), the entirety of which is herein incorporated by reference; Nordin et al., Plant Mol. Biol. 21:641-653 (1993), the entirety of which is herein incorporated by reference; Zhou et al., J. Biol. Chem. 267:23515-23519 (1992), the entirety of which is herein incorporated by reference), drought responsive elements, (Yamaguchi et al., Plant Cell 6:251-264 (1994), the entirety of which is herein incorporated by reference; Wang et al., Plant Mol. Biol. 28:605-617 (1995), the entirety of which is herein incorporated by reference; Bray E A, Trends in Plant Science 2:48-54 (1997), the entirety of which is herein incorporated by reference) enhancer elements for glutenin, (Colot et al., EMBO J. 6:3559-3564 (1987), the entirety of which is herein incorporated by reference; Thomas et al., Plant Cell 2:1171-1180 (1990), the entirety of which is incorporated by reference; Kreis et al., Philos. Trans. R. Soc. Lond., B314:355-365 (1986), the entirety of which is herein incorporated by reference), light-independent regulatory elements, (Lagrange et al., Plant Cell 9:1469-1479 (1997), the entirety of which is herein incorporated by reference; Villain et al., J. Biol. Chem. 271:32593-32598 (1996), the entirety of which is herein incorporated by reference), OCS enhancer elements, (Bouchez et al., EMBO J. 8:4197-4204 (1989), the entirety of which is herein incorporated by reference; Foley et al., Plant J. 3:669-679 (1993), the entirety of which is herein incorporated by reference), ACGT elements, (Foster et al., FASEB J. 8:192-200 (1994), the entirety of which is herein incorporated by reference; Izawa et al., Plant Cell 6:1277-1287 (1994), the entirety of which is herein incorporated by reference; Izawa et al., J. Mol. Biol. 230:1131-1144 (1993) the entirety of which is herein incorporated by reference), negative cis elements in plastid related genes, (Zhou et al., J. Biol. Chem. 267:23515-23519 (1992), the entirety of which is herein incorporated by reference; Lagrange et al., Mol. Cell Biol. 13:2614-2622 (1993), the entirety of which is herein incorporated by reference; Lagrange et al, Plant Cell 9:1469-1479 (1997), the entirety of which is herein incorporated by reference; Zhou et al., J. Biol. Chem. 267:23515-23519 (1992), the entirety of which is herein incorporated by reference), prolamin box elements, (Forde et al., Nucleic Acids Res. 13:7327-7339 (1985), the entirety of which is herein incorporated by reference; Colot et al., EMBO J. 6:3559-3564 (1987), the entirety of which is herein incorporated by reference; Thomas et al., Plant Cell 2:1171-1180 (1990), the entirety of which is herein incorporated by reference; Thompson et al., Plant Mol. Biol. 15:755-764 (1990), the entirety of which is herein incorporated by reference; Vicente et al., Proc. Natl. Acad. Sci. (U.S.A.) 94:7685-7690 (1997), the entirety of which is herein incorporated by reference), elements in enhancers from the IgM heavy chain gene (Gillies et al., Cell 33:717-728 (1983), the entirety of which is herein incorporated by reference; Whittier et al., Nucleic Acids Res. 15:2515-2535 (1987), the entirety of which is herein incorporated by reference).

[0074] (iii) Nucleic Acid Molecules Comprising Genes or Fragments Thereof

[0075] Nucleic acid molecules of the present invention can comprise one or more genes or fragments thereof. Such genes or fragments thereof include homologues of known genes or protein coding regions in other organisms or genes or fragments thereof that elicit only limited or no matches with known genes or protein coding regions.

[0076] Genomic sequences can be screened for the presence of protein homologues or genes utilizing one or a number of different search algorithms have that been developed, one example of which are the suite of programs referred to as BLAST programs. Other examples of suitable programs that can be utilized are known in the art, several of which are described above in the Background and under the section titled “Uses of the Agents of the Invention.” In addition, unidentified reading frames may be screened for protein coding regions by prediction software such as GenScan, which is located at the website gnomic.standford.edu/GENSCANW.html.

[0077] In a preferred embodiment of the present invention, the maize protein or fragment thereof of the present invention is a homologue of another plant protein. In another preferred embodiment of the present invention, the maize protein or fragment thereof is a homologue of a plant protein. In another preferred embodiment of the present invention, the maize protein or fragment thereof of the present invention is a homologue of a fungal protein. In another preferred embodiment of the present invention, the maize protein or fragment thereof of the present invention is a homologue of a mammalian protein. In another preferred embodiment of the present invention, the maize protein or fragment thereof of the present invention is a homologue of a bacterial protein. In another preferred embodiment of the present invention, the maize protein or fragment thereof of the present invention is a homologue of an algal protein.

[0078] In a preferred embodiment of the present invention, the maize protein or fragments thereof or nucleic acid molecule or fragment thereof has a BLAST score of more than 200, preferably a BLAST score of more than 300, even more preferably a BLAST score of more than 400 with its homologue.

[0079] In another preferred embodiment of the present invention, the nucleic acid molecule encoding the maize protein or fragment thereof and/or nucleic acid molecule or fragment thereof exhibits a % identity with its homologue of between about 25% and about 40%, more preferably of between about 40 and about 70%, even more preferably of between about 70% and about 90%, and even more preferably between about 90% and 99%. In another preferred embodiment, of the present invention, the nucleic acid molecule encoding the maize protein or fragment thereof exhibits a % identity with its homologue of 100%.

[0080] In a preferred embodiment of the present invention, the maize protein or fragment thereof or nucleic acid molecule or fragment thereof exhibits a % coverage of between about 0% and about 33%, more preferably of between about 34% and about 66%, and even more preferably of between about 67% and about 100%.

[0081] Genomic sequences can be screened for the presence of proteins utilizing one or a number of different search algorithms have that been developed, one example of which are the suite of programs referred to as BLAST programs. Other examples of suitable programs that can be utilized are known in the art, several of which are described above in the Background. Nucleic acid molecules of the present invention also include non-maize homologues. Preferred non-maize homologues are selected from the group consisting of alfalfa, Arabidopsis barley, Brassica, broccoli, cabbage, citrus, cotton, garlic, oat, oilseed rape, onion, canola, flax, an ornamental plant, rice, pea, peanut, pepper, potato, rice, rye, sorghum, soybean, strawberry, sugarcane, sugarbeet, tomato, wheat, poplar, pine, fir, eucalyptus, apple, lettuce, lentils, grape, banana, tea, turf grasses, sunflower, oil palm, and Phaseolus.

[0082] In a preferred embodiment, nucleic acid molecules having SEQ ID NO: 1 through SEQ ID NO: 82359 or complements and fragments of either or other nucleic acid molecules of the present invention can be utilized to obtain such homologues.

[0083] In another further aspect of the present invention, nucleic acid molecules of the present invention can comprise sequences, which differ from those encoding a protein or fragment thereof in SEQ ID NO: 1 through SEQ ID NO: 82359 due to fact that the different nucleic acid sequence encodes a protein having one or more conservative amino acid changes. It is understood that codons capable of coding for such conservative amino acid substitutions are known in the art.

[0084] It is well known in the art that one or more amino acids in a native sequence can be substituted with another amino acid(s), the charge and polarity of which are similar to that of the native amino acid, i.e., a conservative amino acid substitution, resulting in a silent change. Conserved substitutes for an amino acid within the native polypeptide sequence can be selected from other members of the class to which the naturally occurring amino acid belongs. Amino acids can be divided into the following four groups: (1) acidic amino acids, (2) basic amino acids, (3) neutral polar amino acids, and (4) neutral nonpolar amino acids. Representative amino acids within these various groups include, but are not limited to, (1) acidic (negatively charged) amino acids such as aspartic acid and glutamic acid; (2) basic (positively charged) amino acids such as arginine, histidine, and lysine; (3) neutral polar amino acids such as glycine, serine, threonine, cysteine, cystine, tyrosine, asparagine, and glutamine; and (4) neutral nonpolar (hydrophobic) amino acids such as alanine, leucine, isoleucine, valine, proline, phenylalanine, tryptophan, and methionine.

[0085] Conservative amino acid changes within the native polypeptides sequence can be made by substituting one amino acid within one of these groups with another amino acid within the same group. Biologically functional equivalents of the proteins or fragments thereof of the present invention can have ten or fewer conservative amino acid changes, more preferably seven or fewer conservative amino acid changes, and most preferably five or fewer conservative amino acid changes. The encoding nucleotide sequence will thus have corresponding base substitutions, permitting it to encode biologically functional equivalent forms of the proteins or fragments of the present invention.

[0086] It is understood that certain amino acids may be substituted for other amino acids in a protein structure without appreciable loss of interactive binding capacity with structures such as, for example, antigen-binding regions of antibodies or binding sites on substrate molecules. Because it is the interactive capacity and nature of a protein that defines that protein's biological functional activity, certain amino acid sequence substitutions can be made in a protein sequence and, of course, its underlying DNA coding sequence and, nevertheless, obtain a protein with like properties. It is thus contemplated by the inventors that various changes may be made in the peptide sequences of the proteins or fragments of the present invention, or corresponding DNA sequences that encode said peptides, without appreciable loss of their biological utility or activity. It is understood that codons capable of coding for such amino acid changes are known in the art.

[0087] In making such changes, the hydropathic index of amino acids may be considered. The importance of the hydropathic amino acid index in conferring interactive biological function on a protein is generally understood in the art (Kyte and Doolittle, J. Mol. Biol. 157, 105-132 (1982)). It is accepted that the relative hydropathic character of the amino acid contributes to the secondary structure of the resultant protein, which in turn defines the interaction of the protein with other molecules, for example, enzymes, substrates, receptors, DNA, antibodies, antigens, and the like.

[0088] Each amino acid has been assigned a hydropathic index on the basis of its hydrophobicity and charge characteristics (Kyte and Doolittle, J. Mol. Biol. 157, 105-132 (1982)); these are isoleucine (+4.5), valine (+4.2), leucine (+3.8), phenylalanine (+2.8), cysteine/cystine (+2.5), methionine (+1.9), alanine (+1.8), glycine (−0.4), threonine (−0.7), serine (−0.8), tryptophan (−0.9), tyrosine (−1.3), proline (−1.6), histidine (−3.2), glutamate (−3.5), glutamine (−3.5), aspartate (−3.5), asparagine (−3.5), lysine (−3.9), and arginine (−4.5).

[0089] In making such changes, the substitution of amino acids whose hydropathic indices are within ±2 is preferred, those which are within ±1 are particularly preferred, and those within ±0.5 are even more particularly preferred.

[0090] It is also understood in the art that the substitution of like amino acids can be made effectively on the basis of hydrophilicity. U.S. Pat. No. 4,554,101 states that the greatest local average hydrophilicity of a protein, as govern by the hydrophilicity of its adjacent amino acids, correlates with a biological property of the protein.

[0091] As detailed in U.S. Pat. No. 4,554,101, the following hydrophilicity values have been assigned to amino acid residues: arginine (+3.0), lysine (+3.0), aspartate (+3.0±1), glutamate (+3.0±1), serine (+0.3), asparagine (+0.2), glutamine (+0.2), glycine (0), threonine (−0.4), proline (−0.5±1), alanine (−0.5), histidine (−0.5), cysteine (−1.0), methionine (−1.3), valine (−1.5), leucine (−1.8), isoleucine (−1.8), tyrosine (−2.3), phenylalanine (−2.5), and tryptophan (−3.4).

[0092] In making such changes, the substitution of amino acids whose hydrophilicity values are within ±2 is preferred, those which are within ±1 are particularly preferred, and those within ±0.5 are even more particularly preferred.

[0093] In a further aspect of the present invention, one or more of the nucleic acid molecules of the present invention differ in nucleic acid sequence from those encoding a protein or fragment thereof set forth in SEQ ID NO: 1 through SEQ ID NO: 82359 or fragment thereof due to the fact that one or more codons encoding an amino acid has been substituted for a codon that encodes a nonessential substitution of the amino acid originally encoded.

[0094] Agents of the invention include nucleic acid molecules that encode at least about a contiguous 10 amino acid region of a protein of the present invention, more preferably at least about a contiguous 25, 40, 50, 100, or 125 amino acid region of a protein of the present invention. In a preferred embodiment the protein is selected from the group consisting of a plant, more preferably a maize protein.

[0095] (iv) Nucleic Acid Molecules Comprising Introns and/or Intron/Exon Junctions

[0096] Nucleic acid molecules of the present invention can comprise an intron and/or one or more intron/exon junction. Sequences of the present invention can be screened for introns and intron/exon junctions utilizing one or a number of different search algorithms that have that been developed, one example of which are the suite of programs referred to as BLAST programs. Other examples of suitable programs that can be utilized are known in the art, several of which are described above in the Background and in the section entitled “Uses of the Agents of the Present Invention.”

[0097] (b) Protein and Peptide Molecules

[0098] A class of agents comprises one or more of the protein or peptide molecules encoded by SEQ ID NO: 1 through SEQ ID NO: 82359, fragments thereof or complements thereof or one or more of the proteins encoded by a nucleic acid molecule or fragment thereof or peptide molecules encoded by other nucleic acid agents of the present invention. Protein and peptide molecules can be identified using known protein or peptide molecules as a target sequence or target motif in the BLAST programs of the present invention. In a preferred embodiment, the protein or peptide molecules of the present invention are derived from maize and more preferably maize genotype LH132.

[0099] As used herein, the term “protein molecule” or “peptide molecule” includes any molecule that comprises five or more amino acids. It is well known in the art that proteins or peptides may undergo modification, including post-translational modifications, such as, but not limited to, disulfide bond formation, glycosylation, phosphorylation, or oligomerization. Thus, as used herein, the term “protein molecule” or “peptide molecule” includes any protein molecule that is modified by any biological or non-biological process. The terms “amino acid” and “amino acids” refer to all naturally occurring L-amino acids. This definition is meant to include norleucine, ornithine, homocysteine, and homoserine.

[0100] One or more of the protein or fragments of peptide molecules may be produced via chemical synthesis, or more preferably, by expression in a suitable bacterial or eukaryotic host. Suitable methods for expression are described by Sambrook et al., Molecular Cloning, A Laboratory Manual, 2nd Edition, Cold Spring Harbor Press, Cold Spring Harbor, N.Y. (1989), or similar texts.

[0101] A “protein fragment” is a peptide or polypeptide molecule whose amino acid sequence comprises a subset of the amino acid sequence of that protein. A protein or fragment thereof that comprises one or more additional peptide regions not derived from that protein is a “fusion” protein. Such molecules may be derivatized to contain carbohydrate or other moieties (such as keyhole limpet hemocyanin, etc.). Fusion protein or peptide molecules of the present invention are preferably produced via recombinant means.

[0102] Another class of agents comprises protein or peptide molecules encoded by SEQ ID NO: 1 through SEQ ID NO: 82359 or complements thereof or, fragments or fusions thereof in which conservative, non-essential, or not relevant, amino acid residues have been added, replaced, or deleted. An example of such a homologue is the homologue protein of all non-maize plant species, including but not limited to alfalfa, barley, Brassica, broccoli, cabbage, citrus, cotton, garlic, oat, oilseed rape, onion, canola, flax, an ornamental plant, pea, peanut, pepper, potato, rice, rye, sorghum, soybean, strawberry, sugarcane, sugarbeet, tomato, wheat, poplar, pine, fir, eucalyptus, apple, lettuce, peas, lentils, grape, banana, tea, turf grasses, etc. Particularly preferred non-maize plants to utilize for the isolation of homologues would include alfalfa, barley, cotton, oat, oilseed rape, rice, canola, ornamentals, sugarcane, sugarbeet, tomato, potato, wheat, and turf grasses. Such a homologue can be obtained by any of a variety of methods. Most preferably, as indicated above, one or more of the disclosed sequences (SEQ ID NO: 1 through SEQ ID NO: 82359 or complements thereof) will be used to define a pair of primers that may be used to isolate the homologue-encoding nucleic acid molecules from any desired species. Such molecules can be expressed to yield homologues by recombinant means.

[0103] (c) Antibodies

[0104] One aspect of the present invention concerns antibodies, single-chain antigen binding molecules, or other proteins that specifically bind to one or more of the protein or peptide molecules of the present invention and their homologues, fusions or fragments. Such antibodies may be used to quantitatively or qualitatively detect the protein or peptide molecules of the present invention. As used herein, an antibody or peptide is said to “specifically bind” to a protein or peptide molecule of the present invention if such binding is not competitively inhibited by the presence of non-related molecules. In a preferred embodiment the antibodies of the present invention bind to proteins derived from maize and more preferably bind to proteins or fragments thereof of maize (LH132).

[0105] Nucleic acid molecules that encode all or part of the protein of the present invention can be expressed, via recombinant means, to yield protein or peptides that can in turn be used to elicit antibodies that are capable of binding the expressed protein or peptide. Such antibodies may be used in immunoassays for that protein. Such protein-encoding molecules, or their fragments may be a “fusion” molecule (i.e., a part of a larger nucleic acid molecule) such that, upon expression, a fusion protein is produced. It is understood that any of the nucleic acid molecules of the present invention may be expressed, via recombinant means, to yield proteins or peptides encoded by these nucleic acid molecules.

[0106] The antibodies that specifically bind proteins and protein fragments of the present invention may be polyclonal or monoclonal, and may comprise intact immunoglobulins, or antigen binding portions of immunoglobulins (such as (F(ab′), F(ab′)₂ fragments), or single-chain immunoglobulins producible, for example, via recombinant means). It is understood that practitioners are familiar with the standard resource materials which describe specific conditions and procedures for the construction, manipulation and isolation of antibodies (see, for example, Harlow and Lane, Antibodies: A Laboratory Manual, Cold Spring Harbor Press, Cold Spring Harbor, N.Y. (1988), the entirety of which is herein incorporated by reference).

[0107] Murine monoclonal antibodies are particularly preferred. BALB/c mice are preferred for this purpose, however, equivalent strains may also be used. The animals are preferably immunized with approximately 25 μg of purified protein (or fragment thereof) that has been emulsified in a suitable adjuvant (such as TiterMax adjuvant (Vaxcel, Norcross, Ga.)). Immunization is preferably conducted at two intramuscular sites, one intraperitoneal site, and one subcutaneous site at the base of the tail. An additional i.v. injection of approximately 25 μg of antigen is preferably given in normal saline three weeks later. After approximately 11 days following the second injection, the mice may be bled and the blood screened for the presence of anti-protein or peptide antibodies. Preferably, a direct binding Enzyme-Linked Immunoassay (ELISA) is employed for this purpose.

[0108] More preferably, the mouse having the highest antibody titer is given a third i.v. injection of approximately 25 μg of the same protein or fragment. The splenic leukocytes from this animal may be recovered 3 days later, and are then permitted to fuse, most preferably, using polyethylene glycol, with cells of a suitable myeloma cell line (such as, for example, the P3X63Ag8.653 myeloma cell line). Hybridoma cells are selected by culturing the cells under “HAT” (hypoxanthine-aminopterin-thymine) selection for about one week. The resulting clones may then be screened for their capacity to produce monoclonal antibodies (“mAbs”), preferably by direct ELISA.

[0109] In one embodiment, anti-protein or peptide monoclonal antibodies are isolated using a fusion of a protein, protein fragment, or peptide of the present invention, or conjugate of a protein, protein fragment, or peptide of the present invention, as immunogens. Thus, for example, a group of mice can be immunized using a fusion protein emulsified in Freund's complete adjuvant (e.g., approximately 50 μg of antigen per immunization). At three week intervals, an identical amount of antigen is emulsified in Freund's incomplete adjuvant and used to immunize the animals. Ten days following the third immunization, serum samples are taken and evaluated for the presence of antibody. If antibody titers are too low, a fourth booster can be employed. Polysera capable of binding the protein or peptide can also be obtained using this method.

[0110] In a preferred procedure for obtaining monoclonal antibodies, the spleens of the above-described immunized mice are removed, disrupted, and immune splenocytes are isolated over a ficoll gradient. The isolated splenocytes are fused, using polyethylene glycol with BALB/c-derived HGPRT (hypoxanthine guanine phosphoribosyl transferase) deficient P3x63xAg8.653 plasmacytoma cells. The fused cells are plated into 96-well microtiter plates and screened for hybridoma fusion cells by their capacity to grow in culture medium supplemented with hypothanthine, aminopterin and thymidine for approximately 2-3 weeks.

[0111] Hybridoma cells that arise from such incubation are preferably screened for their capacity to produce an immunoglobulin that binds to a protein of interest. An indirect ELISA may be used for this purpose. In brief, the supernatants of hybridomas are incubated in microtiter wells that contain immobilized protein. After washing, the titer of bound immunoglobulin can be determined using, for example, a goat anti-mouse antibody conjugated to horseradish peroxidase. After additional washing, the amount of immobilized enzyme is determined (for example through the use of a chromogenic substrate). Such screening is performed as quickly as possible after the identification of the hybridoma in order to ensure that a desired clone is not overgrown by non-secreting neighbors. Desirably, the fusion plates are screened several times since the rates of hybridoma growth vary. In a preferred sub-embodiment, a different antigenic form of immunogen may be used to screen the hybridoma. Thus, for example, the splenocytes may be immunized with one immunogen, but the resulting hybridomas can be screened using a different immunogen. It is understood that any of the protein or peptide molecules of the present invention may be used to raise antibodies.

[0112] As discussed below, such antibody molecules or their fragments may be used for diagnostic purposes. Where the antibodies are intended for diagnostic purposes, it may be desirable to derivatize them, for example with a ligand group (such as biotin) or a detectable marker group (such as a fluorescent group, a radioisotope or an enzyme).

[0113] The ability to produce antibodies that bind the protein or peptide molecules of the present invention permits the identification of mimetic compounds of those molecules. A “mimetic compound” is a compound that is not that compound, or a fragment of that compound, but which nonetheless exhibits an ability to specifically bind to antibodies directed against that compound.

[0114] It is understood that any of the agents of the present invention can be substantially purified and/or be biologically active and/or recombinant.

[0115] Uses of the Agents of the Invention

[0116] Nucleic acid molecules and fragments thereof of the present invention may be employed for genetic mapping studies using linkage analysis (genetic markers). A genetic linkage map shows the relative locations of specific DNA markers along a chromosome. Maps are used for the identification of genes associated with genetic diseases or phenotypic traits, comparative genomics, and as a guide for physical mapping. Through genetic mapping, a fine scale linkage map can be developed using DNA markers, and, then, a genomic DNA library of large-sized fragments can be screened with molecular markers linked to the desired trait. In a preferred embodiment of the present invention, the genomic library screened with the nucleic acid molecules of the present invention is a genomic library of maize.

[0117] Mapping marker locations is based on the observation that two markers located near each other on the same chromosome will tend to be passed together from parent to offspring. During gamete production, DNA strands occasionally break and rejoin in different places on the same chromosome or on the homologous chromosome. The closer the markers are to each other, the more tightly linked and the less likely a recombination event will fall between and separate them. Recombination frequency thus provides an estimate of the distance between two markers.

[0118] In segregating populations, target genes have been reported to have been placed within an interval of 5-10 cM with a high degree of certainty (Tanksley et al., Trends in Genetics 11(2):63-68 (1995), the entirety of which is herein incorporated by reference). The markers defining this interval are used to screen a larger segregating population to identify individuals derived from one or more gametes containing a crossover in the given interval. Such individuals are useful in orienting other markers closer to the target gene. Once identified, these individuals can be analyzed in relation to all molecular markers within the region to identify those closest to the target.

[0119] Markers of the present invention can be employed to construct linkage maps and to locate genes with qualitative and quantitative effects. The genetic linkage of additional marker molecules can be established by a genetic mapping model such as, without limitation, the flanking marker model reported by Lander and Botstein, Genetics, 121:185-199 (1989), and the interval mapping, based on maximum likelihood methods described by Lander and Botstein, Genetics, 121:185-199 (1989), the entirety of which is herein incorporated by reference and implemented in the software package MAPMAKER/QTL (Lincoln and Lander, Mapping Genes Controlling Quantitative Traits Using MAPMAKER/QTL, Whitehead Institute for Biomedical Research, Massachusetts, (1990)). Additional software includes Qgene, Version 2.23 (1996), Department of Plant Breeding and Biometry, 266 Emerson Hall, Cornell University, Ithaca, N.Y., the manual of which is herein incorporated by reference in its entirety). Use of the Qgene software is a particularly preferred approach.

[0120] A maximum likelihood estimate (MLE) for the presence of a marker is calculated, together with an MLE assuming no QTL effect, to avoid false positives. A log₁₀ of an odds ratio (LOD) is then calculated as: LOD=log₁₀ (MLE for the presence of a QTL/MLE given no linked QTL).

[0121] The LOD score essentially indicates how much more likely the data are to have arisen assuming the presence of a QTL than in its absence. The LOD threshold value for avoiding a false positive with a given confidence, say 95%, depends on the number of markers and the length of the genome. Graphs indicating LOD thresholds are set forth in Lander and Botstein, Genetics, 121:185-199 (1989), the entirety of which is herein incorporated by reference and further described by Arús and Moreno-González, Plant Breeding, Hayward, Bosemark, Romagosa (eds.) Chapman & Hall, London, pp. 314-331 (1993).

[0122] Additional models can be used. Many modifications and alternative approaches to interval mapping have been reported, including the use of non-parametric methods (Kruglyak and Lander, Genetics, 139:1421-1428 (1995), the entirety of which is herein incorporated by reference). Multiple regression methods or models can be also be used, in which the trait is regressed on a large number of markers (Jansen, Biometrics in Plant Breed, van Oijen, Jansen (eds.) Proceedings of the Ninth Meeting of the Eucarpia Section Biometrics in Plant Breeding, The Netherlands, pp. 116-124 (1994); Weber and Wricke, Advances in Plant Breeding, Blackwell, Berlin, 16 (1994). Procedures combining interval mapping with regression analysis, whereby the phenotype is regressed onto a single putative QTL at a given marker interval, and at the same time onto a number of markers that serve as ‘cofactors,’ have been reported by Jansen and Stam, Genetics, 136:1447-1455 (1994) and Zeng, Genetics, 136:1457-1468 (1994). Generally, the use of cofactors reduces the bias and sampling error of the estimated QTL positions (Utz and Melchinger, Biometrics in Plant Breeding, van Oijen, Jansen (eds.) Proceedings of the Ninth Meeting of the Eucarpia Section Biometrics in Plant Breeding, The Netherlands, pp. 195-204 (1994), thereby improving the precision and efficiency of QTL mapping (Zeng, Genetics, 136:1457-1468 (1994). These models can be extended to multi-environment experiments to analysis genotype-environment interactions (Jansen et al., Theo. Appl. Genet. 91:33-37 (1995).

[0123] Selection of an appropriate mapping population is important to map construction. The choice of appropriate mapping population depends on the type of marker systems employed (Tanksley et al., J. P. Gustafson and R. Appels (eds.), Plenum Press, New York, pp. 157-173 (1988), the entirety of which is herein incorporated by reference). Consideration must be given to the source of parents (adapted vs. exotic) used in the mapping population. Chromosome pairing and recombination rates can be severely disturbed (suppressed) in wide crosses (adapted×exotic) and generally yield greatly reduced linkage distances. Wide crosses will usually provide segregating populations with a relatively large array of polymorphisms when compared to progeny in a narrow cross (adapted×adapted).

[0124] An F₂ population is the first generation of selfing after the hybrid seed is produced. Usually a single F₁ plant is selfed to generate a population segregating for all the genes in Mendelian (1:2:1) fashion. Maximum genetic information is obtained from a completely classified F₂ population using a codominant marker system (Mather, Measurement of Linkage in Heredity: Methuen and Co., (1938), the entirety of which is herein incorporated by reference). In the case of dominant markers, progeny tests (e.g., F₃, BCF₂) are required to identify the heterozygotes, thus making it equivalent to a completely classified F₂ population. However, this procedure is often prohibitive because of the cost and time involved in progeny testing. Progeny testing of F₂ individuals is often used in map construction where phenotypes do not consistently reflect genotype (e.g., disease resistance) or where trait expression is controlled by a QTL. Segregation data from progeny test populations (e.g., F₃ or BCF₂) can be used in map construction. Marker-assisted selection can then be applied to cross progeny based on marker-trait map associations (F₂, F₃), where linkage groups have not been completely disassociated by recombination events (i.e., maximum disequilibrium).

[0125] Recombinant inbred lines (RIL) (genetically related lines; usually >F₅, developed from continuously selfing F₂ lines towards homozygosity) can be used as a mapping population. Information obtained from dominant markers can be maximized by using RIL because all loci are homozygous or nearly so. Under conditions of tight linkage (i.e., about <10% recombination), dominant and co-dominant markers evaluated in RIL populations provide more information per individual than either marker type in backcross populations (Reiter, Proc. Natl. Acad. Sci. (U.S.A.) 89:1477-1481 (1992). However, as the distance between markers becomes larger (i.e., loci become more independent), the information in RIL populations decreases dramatically when compared to codominant markers.

[0126] Backcross populations (e.g., generated from a cross between a successful variety (recurrent parent) and another variety (donor parent) carrying a trait not present in the former) can be utilized as a mapping population. A series of backcrosses to the recurrent parent can be made to recover most of its desirable traits. Thus a population is created consisting of individuals nearly like the recurrent parent but each individual carries varying amounts or mosaic of genomic regions from the donor parent. Backcross populations can be useful for mapping dominant markers if all loci in the recurrent parent are homozygous and the donor and recurrent parent have contrasting polymorphic marker alleles (Reiter et al., Proc. Natl. Acad. Sci. (U.S.A.) 89:1477-1481 (1992). Information obtained from backcross populations using either codominant or dominant makers is less than that obtained from F₂ populations because one, rather than two, recombinant gametes are sampled per plant. Backcross populations, however, are more informative (at low marker saturation) when compared to RILs as the distance between linked loci increases in RIL populations (i.e., about 0.15% recombination). Increased recombination can be beneficial for resolution of tight linkages, but may be undesirable in the construction of maps with low marker saturation.

[0127] Near-isogenic lines (NIL)(created by many backcrosses to produce an array of individuals that are nearly identical in genetic composition except for the trait or genomic region under interrogation) can be used as a mapping population. In mapping with NILs, only a portion of the polymorphic loci are expected to map to a selected region.

[0128] Bulk segregant analysis (BSA) is a method developed for the rapid identification of linkage between markers and traits of interest (Michelmore et al., Proc. Natl. Acad. Sci. (U.S.A.) 88:9828-9832 (1991). In BSA, two bulked DNA samples are drawn from a segregating population originating from a single cross. These bulks contain individuals that are identical for a particular trait (resistant or susceptible to particular disease) or genomic region but arbitrary at unlinked regions (i.e., heterozygous). Regions unlinked to the target region will not differ between the bulked samples of many individuals in BSA.

[0129] Applications for markers in plant breeding include: Quantitative Trait Loci (QTL) mapping (Edwards et al., Genetics 116:113-115 (1987), the entirety of which is herein incorporated by reference); Nienhuis et al., Crop Sci. 27:797-803 (1987); Osborn et al., Theor. Appl. Genet. 73:350-356 (1987); Romero-Severson et al., Use of RFLPs In Analysis of Quantitative Trait Loci In Maize, In Helentjaris and Burr (eds.) pp. 97-102 (1989), the entirety of which is herein incorporated by reference; Young et al., Genetics 120:570-585 (1988), the entirety of which is herein incorporated by reference; Martin et al., Science 243:1725-1728 (1989), the entirety of which is herein incorporated by reference): Sarfatti et al., Theor. Appl Genet. 78:22-26 (1989), the entirety of which is herein incorporated by reference; Tanksley et al., Biotech. 7:257-264 (1989); Barone et al., Mol. Gen. Genet. 224:177-182 (1990), the entirety of which is herein incorporated by reference); Jung et al., Theor, Appl. Genet. 79:663-672 (1990), the entirety of which is herein incorporated by reference; Keim et al., Genetics 126:735-742 (1990), the entirety of which is herein incorporated by reference, Theor. Appl. Genet. 79:465-369 (1990), the entirety of which is herein incorporated by reference; Paterson et al., Genetics 124:735-742 (1990), the entirety of which is herein incorporated by reference; Martin et al., Proc. Natl. Acad. Sci. (U.S.A.) 88:2336-2340 (1991), the entirety of which is herein incorporated by reference; Messeguer et al., Theor. Appl. Genet. 82:529-536 (1991), the entirety of which is herein incorporated by reference; Michelmore et al., Proc Natl. Acad. Sci. (U.S.A.) 88:9828-9832 (1991), the entirety of which is herein incorporated by reference; Ottaviano et al., Theor. Appl. Genet. 81:713-719 (1991), the entirety of which is herein incorporated by reference; Yu et al., Theor. Appl. Genet. 81:471-476 (1991), the entirety of which is herein incorporated by reference; Diers et al., Crop Sci. 32:77-383 (1992), the entirety of which is herein incorporated by reference, Theor. Appl. Genet. 83:608-612 (1992), the entirety of which is herein incorporated by reference, J. Plant Nut. 15:2127-2136 (1992), the entirety of which is herein incorporated by reference; Doebley et al., Proc. Natl. Acad. Sci. (U.S.A.) 87:9888-9892 (1990), the entirety of which is herein incorporated by reference), screening genetic resource strains for useful quantitative trait alleles and introgression of these alleles into commercial varieties (Beckmann and Soller, Theor. Appl. Genet. 67:35-43 (1983), the entirety of which is herein incorporated by reference; Tanksley et al., (1989) the entirety of which is incorporated by reference), or the mapping of mutations (Rafalski et al., In: Nonmammalian Genomic Analysis, ed. Birren and Lai, Academic Press, San Diego, Calif., pp. 75-134 (1996). Additionally, markers can be used to characterize transformants or germplasm, as a genetic diagnostic test for plant breeding or to identify individuals or varieties (Soller and Beckmann, Theor. Appl. Genet. 67:25-33 (1983), the entirety of which is herein incorporated by reference; Tanksley et al., 1989). Markers also can be used to obtain information about: (1) the number, effect, and chromosomal location of each gene affecting a trait; (2) effects of multiple copies of individual genes (gene dosage); (3) interaction between/among genes controlling a trait (epistasis); (4) whether individual genes affect more than one trait (pleiotropy); and (5) stability of gene function across environments (G×E interactions).

[0130] It is understood that one or more of the nucleic acid molecules of the present invention may in one embodiment be used as markers in genetic mapping. In a preferred embodiment, nucleic acid molecules of the present invention may in one embodiment be used as markers with maize.

[0131] The nucleic acid molecules of the present invention may be used for physical mapping. Physical mapping, in conjunction with linkage analysis, can enable the isolation of genes. Physical mapping has been reported to identify the markers closest in terms of genetic recombination to a gene target for cloning. Once a DNA marker is linked to a gene of interest, the chromosome walking technique can be used to find the genes via overlapping clones. For chromosome walking, random molecular markers or established molecular linkage maps are used to conduct a search to localize the gene adjacent to one or more markers. A chromosome walk (Bukanov and Berg, Mo. Microbiol, 11:509-523 (1994), the entirety of which is herein incorporated by reference; Birkenbihl and Vielmetter Nucleic Acids Res. 17:5057-5069 (1989), the entirety of which is herein incorporated by reference; Wenzel and Herrmann, Nucleic Acids Res. 16:8323-8336, (1988), the entirety of which is herein incorporated by reference) is then initiated from the closest linked marker. Starting from the selected clones, labeled probes specific for the ends of the insert DNA are synthesized and used as probes in hybridizations against a representative library. Clones hybridizing with one of the probes are picked and serve as templates for the synthesis of new probes; by subsequent analysis, contigs are produced.

[0132] The degree of overlap of the hybridizing clones used to produce a contig can be determined by comparative restriction analysis. Comparative restriction analysis can be carried out in different ways all of which exploit the same principle; two clones of a library are very likely to overlap if they contain a limited number of restriction sites for one or more restriction endonucleases located at the same distance from each other. The most frequently used procedures are, fingerprinting (Coulson et al., Proc. Natl. Acad. Sci. (U.S.A.) 83:7821-7821, (1986), the entirety of which is herein incorporated by reference); Knott et al., Nucleic Acids Res. 16:2601-2612 (1988), the entirety of which is herein incorporated by reference; Eiglmeier et al., Mol. Microbiol. 7(2):197-206 (1993), the entirety of which is herein incorporated by reference, 1993), restriction fragment mapping (Smith and Birnstiel, Nucleic Acids Res. 3:2387-2398 (1976), the entirety of which is herein incorporated by reference, or the “landmarking” technique (Charlebois et al., J. Mol. Biol. 222:509-524 (1991), the entirety of which is herein incorporated by reference).

[0133] To generate a physical map of a genome with BACs using the fingerprinting technique, a BAC library containing a number of clones equivalent to 4×-20× haploid genome can be used. (Zhang and Wing, Plant Mol. Bio. 35:115-127 (1997)). For example, BAC DNA can be purified with the conventional alkaline lysis procedure as used for plasmid DNA purification, digested with the restriction enzyme used for construction of the BAC libraries and end-labeled with ³²P-dATP, digested with Sau3AI and fractionated on a denaturing polyacrylamide gel. The gel is dried to chromatography paper and exposed to X-ray film. Fingerprints are scanned and then converted into database records, according to the positions of each band relative to the bands of the closest molecular-weight marker on a gel. The incoming database of fingerprints are first compared against each other to assemble contigs if overlapped, and then compared against all existing databases to place the incoming BACs and BAC contigs in established contigs if overlapped. The physical length of a contig in kb is estimated according to the number of restriction sites of the enzyme used for the first digestion prior to fragment end labeling.

[0134] Restriction analysis of a certain clone can be carried out, for example, according to a method originally described by Smith and Berstiel, Nucleic Acids Res. 3:2387-2398 (1976). First, the number and size of cloned restriction fragments to be mapped are determined by complete digestion and agarose gel electrophoresis. Then, the clone is linearized at a unique restriction site outside of the cloned DNA. Aliquots of the linearized molecules are digested to different extents with the enzyme selected for mapping. These partially cut samples are separated on agarose gels, blotted, and hybridized to a labeled fragment of vector DNA. This probe is derived entirely from one side or the other of the unique site used to linearize the clone.

[0135] The results show a ladder of DNA fragments that have the same unique end. By repeating these analyses in pairs with all the neighboring intermediate DNA fragments, the correct order of restriction fragments as well as the orientation of the cloned insert can be deduced. The order of restriction fragments produced by restriction enzymes other than the cloning enzyme can be determined similarly. Fragment data from different enzymes are then combined by a computer program and compared with the alignments of other clones of the library (Kohara et al., Cell 50:495-508 (1987), the entirety of which is herein incorporated by reference).

[0136] The landmarking technique can be carried out without any labeling and relies on agarose gel analysis. Clones are first digested preferably with a 6 bp specific endonuclease A, if possible with the original clone enzyme. Clones are then digested with a second endonuclease B. Endonuclease B is chosen based on its ability to cut rarely in the genome, for example, on average only once in 30 kbp. Of the fragments generated by digestion of one clone with enzyme A, statistically only a small number (between zero and three fragments) will also be cut by enzyme B. The very specific pattern of those fragments which are produced by double digestion are easily recognized. Any of these fragments which have a restriction site for the rarely cutting endonuclease is called a “landmark” Generally one common landmark is sufficient for defining two overlapping clones.

[0137] Alternatively to chromosome walking and the associated comparative restriction analyses methods, chromosome landing also has been reported to be used to locate a gene of interest (Tanksley et al., Trends in Genetics 11(2):63-68 (1995), the entirety of which is herein incorporated by reference). For chromosome landing, a DNA marker is isolated at a physical distance from the targeted gene. High resolution linkage analysis is used to identify such a marker that cosegregates with the gene. The marker is isolated at a distance that is less than the average insert size of the genomic library used for clone isolation. The DNA marker is then used to screen the library and isolate (or “land” on) the clone containing the gene without chromosome walking. Genome coverage of a library can also be determined by cross-hybridization of individual large insert clones by screening a BAC library with single copy RFLP markers distributed randomly across the genome by hybridization. To assure accuracy of the physical map, the markers should be single-copy or of single-locus origin, if multiple-copy.

[0138] Chromosome landing of large-insert clones using chromosome-specific DNA markers such as STSs microsatellites, RFLPs, or other markers can correlate physical and genetic maps (Zwick et al., Genetics 148:1983-1992 (1998), the entirety of which is herein incorporated by reference in its entirety). These strategies include chromosome landing of BACs containing markers or BAC contigs by BAC-FISH (Fluorescent In Situ Hybridization), a technique that involves tagging the DNA marker with an observable label. BAC clones giving positive hybridization signals are individually analyzed by FISH to metaphase chromosome spreads. The location of the labeled probe can be detected after it binds to its complementary DNA strand in an intact chromosome. The FISH of a BAC selected from a BAC contig will directly place the BAC contig to a specific chromosome region and establish a linkage relationships of the BAC contig to another BAC contig.

[0139] Likewise, BACs and STCs of the present invention can be used for contig mapping (Venter et al., Nature, 381:364-366 (1996), the entirety of which is herein incorporated by reference). A “seed” BAC insert can be sequenced and then STCs and the corresponding BAC of each STC can be placed on the sequenced insert using the BLASTN program. Marker or gene containing STCs can be determined by the BLASTN program and their corresponding BACs can be hybridized to specific chromosomes using BAC-FISH (Zwick et al., Genetics 148:1983-1992 (1998)).

[0140] STCs can be used to identify a minimum tiling path of BACs by computational procedures. Any nucleation sequence (the sequence of an entire BAC, for example) can be electronically compared to a database of STCs to identify the next clones to be sequenced to maximally extend a contig. Chosen STCs need to occupy correct positions in the tiling path. Several factors can contribute to errors in the positioning and selection of these clones. An STC that contains all or part of a repetitive element can appear to align at any part of the growing mosaic which contains that element. One method of selecting the appropriate BAC is to mask out all sections of DNA sequence which are known to be repetitive elements. The sequence symbols of these section are replaced with Ns. These sections of DNA are not used to align the STC. STCs which are completely comprised of Ns are discarded. In this way, the unmasked sections of DNA may be aligned against the growing mosaic without misplacing them due to redundant sequence. A program publicly available, PowerBLAST includes a number of options for masking repetitive elements and low complexity subsequences (Zhang and Madden, Genome Res 7:649-56 (1997), the entirety of which is herein incorporated by reference). cDNA and genomic libraries also can be used as probe sources, thus directly combining the ordering of the genomic DNA with the localization of transcribed sequences. By a simultaneous hybridization to the genomic and back to the transcriptional libraries, results are produced on sequence homologies between transcribed sequences.

[0141] It is understood that the nucleic acid molecules of the present invention may in one embodiment be used in physical mapping. In a preferred embodiment, nucleic acid molecules of the present invention may in one embodiment be used in the physical mapping of maize.

[0142] Nucleic acid molecules of the present invention can be used in comparative mapping (physical and genetic) and to isolate molecules from other cereals based on the syntenic relationship between cereals. Comparative mapping within families provides a method to the degree of sequence conservation, gene order, ploidy of species, ancestral relationships and the rates at which individual genomes are evolving. Comparative mapping has been carried out by cross-hybridizing molecular markers across species within a given family.

[0143] In a preferred embodiment, the nucleic acid molecules of the present invention can be utilized to isolate corresponding syntenic regions in non-maize plants (Bennetzen and Freeling, Trends in Genet., 9(8):259-261 (1993); Ahn et al., Mol. Gen. Genet., 241(5-6):483-490 (1993); Schwarzacher, Cur. Opin. Genet. & Devel., 4(6): 868-874 (1994); Kurata et al., Bio/Technology, 12:276-278 (1994); Kilian et al., Nucl. Acids Res., 23(14):2729-2733 (1995); Bennett, Symp. Soc. Exp. Biol., 50:45-52 (1996); Hu et al., Genetics, 142(3):1021-1031 (1996); Kilian, Plant Mol. Biol., 35:187-195 (1997); Bennetzen and Freeling, Genome Res., 7(4):301-306 (1997); Foote et al., Genetics, 147(2):801-807 (1997); Gallego et al., Genome, 41(3):328-336 (1998), all of which are herein incorporated by reference in their entirety). In a particularly preferred embodiment, the nucleic acid molecules of the present invention that define a genomic region in maize plants associated with a desirable phenotype are utilized to obtain corresponding syntenic regions in non-maize plants. A region can be defined either physically or genetically. In an even more preferred embodiment, the nucleic acid molecules of the present invention that define a genomic region in maize plants associated with a desirable phenotype are utilized to obtain corresponding syntenic regions in maize plants. A region can be defined either physically or genetically.

[0144] One or more of the nucleic acids molecules may be used to define a physical genomic region. For example, two nucleic acid molecules of the present invention can act to define a physical genomic region that lies between them. Moreover, for example, a physical genomic region may be defined by a distance relative to a nucleic acid molecule. In a preferred embodiment of the present invention, the defined physical genomic region is less than about 1,000 kb, more preferably less than about 500 kb, even more preferably less than about 100 kb or less than about 50 kb.

[0145] One or more of the nucleic acids molecules may be used to define a genomic region by its genetic distance from one or more nucleic acid molecules. In a preferred embodiment of the present invention, the genomic region is defined by its linkage to a nucleic acid molecule of the present invention. In such a preferred embodiment, the genomic region that is defined by one or more nucleic acid molecules of the present invention is located within about 50 centimorgans, more preferably within about 20 centimorgans, even more preferably with about 10, about 5 or about 2 centimorgans of the trait or marker at issue.

[0146] In another particularly preferred embodiment, two or more nucleic acid molecules of the present invention derived from maize plants that flank a genomic region of interest in maize plants are used to isolate the syntenic region in another cereal, more preferably rice, sorghum or wheat. Regions of interest in maize include, without limitation, those regions that are associated with a commercially desirable phenotype in maize. In another particularly preferred embodiment the desirable phenotype in maize is the result of a quantitative trait locus (QTL) present in the region.

[0147] One exemplary approach to isolate syntenic genomic regions is as follows. Nucleic acid molecules derived from maize of the present invention can be used to select large insert clones from a total genomic DNA library of a related species such as rice, sorghum or wheat. Any appropriate method to screen the genomic library with a nucleic acid molecule of the present invention may be used to select the required clones (See, for example, Birren et al., Detecting Genes: A Laboratory Manual, Cold Spring Harbor, New York, N.Y. (1998). For example, direct hybridization of a nucleic acid molecule of the present invention to mapping filters comprising the genomic DNA of the syntenic species can be used to select large insert clones from a total genomic DNA library of a related species. The selected clones can then be used to physically map the region in the target species. An advantage of this method for comparative mapping is that no mapping population or linkage map of the target species is needed and the clones may also be used in other closely related species. By comparing the results obtained by genetic mapping in model plants, with those from other species, similarities of genomic structure among plants species can be established. Cross-hybridization of RFLP markers have been reported and conserved gene order has been established in many studies. Such macroscopic synteny is utilized for the estimation of correspondence of loci among these crops. These loci include not only Mendelian genes but also Quantitative Trait Loci (QTL) (Mohan et al., Molecular Breeding 3:87-103 (1997), the entirety of which is herein incorporated by reference). Other methods to isolate syntenic nucleic acid molecules may be used.

[0148] It is understood that markers of the present invention may be used in comparative mapping. In a preferred embodiment the markers of present invention may be used in the comparative mapping of cereals, more preferably rice, sorghum, and wheat.

[0149] It is understood that markers of the present invention may be used to isolate nucleic acid molecules from other cereals based on the syntenic relationship between such cereals. In a preferred embodiment the cereal is selected from the group of rice, sorghum and wheat.

[0150] The nucleic acid molecules of the present invention can be used to identify polymorphisms. In one embodiment, one or more of the STC nucleic acid molecules or a BAC nucleic acid molecule (or a sub-fragment of either) may be employed as a marker nucleic acid molecule to identify such polymorphism(s). Alternatively, such polymorphisms can be detected through the use of a marker nucleic acid molecule or a marker protein that is genetically linked to (i.e., a polynucleotide that co-segregates with) such polymorphism(s). In a preferred embodiment, the plant is selected from the group consisting of cereals, and more preferably rice, sorghum, and wheat.

[0151] In an alternative embodiment, such polymorphisms can be detected through the use of a marker nucleic acid molecule that is physically linked to such polymorphism(s). For this purpose, marker nucleic acid molecules comprising a nucleotide sequence of a polynucleotide located within 1 mb of the polymorphism(s), and more preferably within 100 kb of the polymorphism(s), and most preferably within 10 kb of the polymorphism(s) can be employed.

[0152] The genomes of animals and plants naturally undergo spontaneous mutation in the course of their continuing evolution (Gusella, Ann. Rev. Biochem. 55:831-854 (1986)). A “polymorphism” is a variation or difference in the sequence of the gene or its flanking regions that arises in some of the members of a species. The variant sequence and the “original” sequence co-exist in the species' population. In some instances, such co-existence is in stable or quasi-stable equilibrium.

[0153] A polymorphism is thus said to be “allelic,” in that, due to the existence of the polymorphism, some members of a species may have the original sequence (i.e., the original “allele”) whereas other members may have the variant sequence (i.e., the variant “allele”). In the simplest case, only one variant sequence may exist, and the polymorphism is thus said to be di-allelic. In other cases, the species' population may contain multiple alleles, and the polymorphism is termed tri-allelic, etc. A single gene may have multiple different unrelated polymorphisms. For example, it may have a di-allelic polymorphism at one site, and a multi-allelic polymorphism at another site.

[0154] The variation that defines the polymorphism may range from a single nucleotide variation to the insertion or deletion of extended regions within a gene. In some cases, the DNA sequence variations are in regions of the genome that are characterized by short tandem repeats (STRS) that include tandem di- or tri-nucleotide repeated motifs of nucleotides. Polymorphisms characterized by such tandem repeats are referred to as “variable number tandem repeat” (“VNTR”) polymorphisms. VNTRs have been used in identity analysis (Weber, U.S. Pat. No. 5,075,217; Armour et al., FEBS Lett. 307:113-115 (1992); Jones et al., Eur. J. Haematol. 39:144-147 (1987); Horn et al., PCT Application WO91/14003; Jeffreys, European Patent Application 370,719; Jeffreys, U.S. Pat. No. 5,175,082; Jeffreys et al., Amer. J. Hum. Genet. 39:11-24 (1986); Jeffreys et al., Nature 316:76-79 (1985); Gray et al., Proc. R. Acad. Soc. Lond. 243:241-253 (1991); Moore et al., Genomics 10:654-660 (1991); Jeffreys et al., Anim. Genet. 18:1-15 (1987); Hillel et al., Anim. Genet. 20:145-155 (1989); Hillel et al., Genet. 124:783-789 (1990), all of which are herein incorporated by reference in their entirety).

[0155] The detection of polymorphic sites in a sample of DNA may be facilitated through the use of nucleic acid amplification methods. Such methods specifically increase the concentration of polynucleotides that span the polymorphic site, or include that site and sequences located either distal or proximal to it. Such amplified molecules can be readily detected by gel electrophoresis or other means.

[0156] The most preferred method of achieving such amplification employs the polymerase chain reaction (“PCR”) (Mullis et al., Cold Spring Harbor Symp. Quant. Biol. 51:263-273 (1986); Erlich et al., European Patent Appln. 50,424; European Patent Appln. 84,796, European Patent Application 258,017, European Patent Appln. 237,362; Mullis, European Patent Appln. 201,184; Mullis, et al., U.S. Pat. No. 4,683,202; Erlich., U.S. Pat. No. 4,582,788; and Saiki et al., U.S. Pat. No. 4,683,194, all of which are herein incorporated by reference), using primer pairs that are capable of hybridizing to the proximal sequences that define a polymorphism in its double-stranded form.

[0157] In lieu of PCR, alternative methods, such as the “Ligase Chain Reaction” (“LCR”) may be used (Barany, Proc. Natl. Acad. Sci.(U.S.A.) 88:189-193 (1991), the entirety of which is herein incorporated by reference. LCR uses two pairs of oligonucleotide probes to exponentially amplify a specific target. The sequences of each pair of oligonucleotides is selected to permit the pair to hybridize to abutting sequences of the same strand of the target. Such hybridization forms a substrate for a template-dependent ligase. As with PCR, the resulting products thus serve as a template in subsequent cycles and an exponential amplification of the desired sequence is obtained.

[0158] LCR can be performed with oligonucleotides having the proximal and distal sequences of the same strand of a polymorphic site. In one embodiment, either oligonucleotide will be designed to include the actual polymorphic site of the polymorphism. In such an embodiment, the reaction conditions are selected such that the oligonucleotides can be ligated together only if the target molecule either contains or lacks the specific nucleotide that is complementary to the polymorphic site present on the oligonucleotide. Alternatively, the oligonucleotides may be selected such that they do not include the polymorphic site (see, Segev, PCT Application WO 90/01069, the entirety of which is herein incorporated by reference).

[0159] The “Oligonucleotide Ligation Assay” (“OLA”) may alternatively be employed (Landegren et al., Science 241:1077-1080 (1988), the entirety of which is herein incorporated by reference). The OLA protocol uses two oligonucleotides which are designed to be capable of hybridizing to abutting sequences of a single strand of a target. OLA, like LCR, is particularly suited for the detection of point mutations. Unlike LCR, however, OLA results in “linear” rather than exponential amplification of the target sequence.

[0160] Nickerson et al. have described a nucleic acid detection assay that combines attributes of PCR and OLA (Nickerson et al., Proc. Natl. Acad. Sci. (U.S.A.) 87:8923-8927 (1990), the entirety of which is herein incorporated by reference). In this method, PCR is used to achieve the exponential amplification of target DNA, which is then detected using OLA. In addition to requiring multiple, and separate, processing steps, one problem associated with such combinations is that they inherit all of the problems associated with PCR and OLA.

[0161] Schemes based on ligation of two (or more) oligonucleotides in the presence of nucleic acid having the sequence of the resulting “di-oligonucleotide”, thereby amplifying the di-oligonucleotide, are also known (Wu et al., Genomics 4:560 (1989), the entirety of which is herein incorporated by reference), and may be readily adapted to the purposes of the present invention.

[0162] Other known nucleic acid amplification procedures, such as allele-specific oligomers, branched DNA technology, transcription-based amplification systems, or isothermal amplification methods may also be used to amplify and analyze such polymorphisms (Malek et al., U.S. Pat. No. 5,130,238; Davey et al., European Patent Application 329,822; Schuster et al., U.S. Pat. No. 5,169,766; Miller et al., PCT Application WO 89/06700; Kwoh et al., Proc. Natl. Acad. Sci. (U.S.A.) 86:1173-1177 (1989); Gingeras et al., PCT Application WO 88/10315; Walker et al., Proc. Natl. Acad. Sci. (U.S.A.) 89:392-396 (1992), all of which are herein incorporated by reference in their entirety).

[0163] The identification of a polymorphism can be determined in a variety of ways. By correlating the presence or absence of it in an plant with the presence or absence of a phenotype, it is possible to predict the phenotype of that plant. If a polymorphism creates or destroys a restriction endonuclease cleavage site, or if it results in the loss or insertion of DNA (e.g., a VNTR polymorphism), it will alter the size or profile of the DNA fragments that are generated by digestion with that restriction endonuclease. As such, individuals that possess a variant sequence can be distinguished from those having the original sequence by restriction fragment analysis. Polymorphisms that can be identified in this manner are termed “restriction fragment length polymorphisms” (“RFLPs”). RFLPs have been widely used in human and plant genetic analyses (Glassberg, UK Patent Application 2135774; Skolnick et al., Cytogen. Cell Genet. 32:58-67 (1982); Botstein et al., Ann. J. Hum. Genet. 32:314-331 (1980); Fischer et al. PCT Application WO90/13668; Uhlen, PCT Application WO90/11369).

[0164] Polymorphisms can also be identified by Single Strand Conformation Polymorphism (SSCP) analysis. The SSCP technique is a method capable of identifying most sequence variations in a single strand of DNA, typically between 150 and 250 nucleotides in length (Elles, Methods in Molecular Medicine: Molecular Diagnosis of Genetic Diseases, Humana Press (1996), the entirety of which is herein incorporated by reference); Orita et al., Genomics 5:874-879 (1989), the entirety of which is herein incorporated by reference). Under denaturing conditions a single strand of DNA will adopt a conformation that is uniquely dependent on its sequence conformation. This conformation usually will be different, even if only a single base is changed. Most conformations have been reported to alter the physical configuration or size sufficiently to be detectable by electrophoresis. A number of protocols have been described for SSCP including, but not limited to Lee et al., Anal. Biochem. 205:289-293 (1992), the entirety of which is herein incorporated by reference; Suzuki et al., Anal. Biochem. 192:82-84 (1991), the entirety of which is herein incorporated by reference; Lo et al., Nucleic Acids Research 20:1005-1009 (1992), the entirety of which is herein incorporated by reference; Sarkar et al., Genomics 13:441-443 (1992), the entirety of which is herein incorporated by reference). It is understood that one or more of the nucleic acids of the present invention, may be utilized as markers or probes to detect polymorphisms by SSCP analysis.

[0165] Polymorphisms may also be found using a DNA fingerprinting technique called amplified fragment length polymorphism (AFLP), which is based on the selective PCR amplification of restriction fragments from a total digest of genomic DNA to profile that DNA. Vos et al., Nucleic Acids Res. 23:4407-4414 (1995), the entirety of which is herein incorporated by reference. This method allows for the specific co-amplification of high numbers of restriction fragments, which can be visualized by PCR without knowledge of the nucleic acid sequence.

[0166] AFLP employs basically three steps. Initially, a sample of genomic DNA is cut with restriction enzymes and oligonucleotide adapters are ligated to the restriction fragments of the DNA. The restriction fragments are then amplified using PCR by using the adapter and restriction sequence as target sites for primer annealing. The selective amplification is achieved by the use of primers that extend into the restriction fragments, amplifying only those fragments in which the primer extensions match the nucleotide flanking the restriction sites. These amplified fragments are then visualized on a denaturing polyacrylamide gel.

[0167] AFLP analysis has been performed on Salix (Beismann et al., Mol. Ecol. 6:989-993 (1997), the entirety of which is herein incorporated by reference); Acinetobacter (Janssen et al., Int. J. Syst. Bacteriol 47:1179-1187 (1997), the entirety of which is herein incorporated by reference), Aeromonas popoffi (Huys et al., Int. J. Syst. Bacteriol. 47:1165-1171 (1997), the entirety of which is herein incorporated by reference), rice (McCouch et al., Plant Mol. Biol. 35:89-99 (1997), the entirety of which is herein incorporated by reference); Nandi et al., Mol Gen. Genet. 255:1-8 (1997); Cho et al., Genome 39:373-378 (1996), herein incorporated by reference), barley (Hordeum vulgare) (Simons et al., Genomics 44:61-70 (1997), the entirety of which is herein incorporated by reference; Waugh et al., Mol. Gen. Genet. 255:311-321 (1997), the entirety of which is herein incorporated by reference; Qi et al., Mol. Gen. Genet. 254:330-336 (1997), the entirety of which is herein incorporated by reference; Becker et al., Mol. Gen. Genet. 249:65-73 (1995), the entirety of which is herein incorporated by reference), potato (Van der Voort et al., Mol. Gen. Genet. 255:438-447 (1997), the entirety of which is herein incorporated by reference; Meksem et al., Mol. Gen. Genet. 249:74-81 (1995), the entirety of which is herein incorporated by reference), Phytophthora infestans (Van der Lee et al., Fungal Genet. Biol. 21:278-291 (1997), the entirety of which is herein incorporated by reference), Bacillus anthracis (Keim et al., J. Bacteriol. 179:818-824 (1997)), Astragalus cremnophylax (Travis et al., Mol. Ecol. 5:735-745 (1996), the entirety of which is herein incorporated by reference), Arabidopsis (Cnops et al., Mol. Gen. Genet. 253:32-41 (1996), the entirety of which is herein incorporated by reference), Escherichia coli (Lin et al., Nucleic Acids Res. 24:3649-3650 (1996), the entirety of which is herein incorporated by reference), Aeromonas (Huys et al., Int. J. Syst. Bacteriol. 46:572-580 (1996), the entirety of which is herein incorporated by reference), nematode (Folkertsma et al., Mol. Plant Microbe Interact. 9:47-54 (1996), the entirety of which is herein incorporated by reference), tomato (Thomas et al., Plant J. 8:785-794 (1995), the entirety of which is herein incorporated by reference), and human (Latorra et al., PCR Methods Appl. 3:351-358 (1994) the entirety of which is herein incorporated by reference). AFLP analysis has also been used for fingerprinting mRNA (Money et al., Nucleic Acids Res. 24:2616-2617 (1996), the entirety of which is herein incorporated by reference; Bachem, et al., Plant J. 9:745-753 (1996), the entirety of which is herein incorporated by reference). It is understood that one or more of the nucleic acid molecules of the present invention, may be utilized as markers or probes to detect polymorphisms by AFLP analysis for fingerprinting mRNA.

[0168] Polymorphisms may also be found using random amplified polymorphic DNA (RAPD) (Williams et al., Nucl. Acids Res. 18:6531-6535 (1990), the entirety of which is herein incorporated by reference) and cleavable amplified polymorphic sequences (CAPS) (Lyamichev et al., Science 260:778-783 (1993), the entirety of which is herein incorporated by reference). It is understood that one or more of the nucleic acid molecules of the present invention, may be utilized as markers or probes to detect polymorphisms by RAPD or CAPS analysis.

[0169] Nucleic acid molecules of the present invention can be used to monitor expression. A microarray-based method for high-throughput monitoring of plant gene expression may be utilized to measure gene-specific hybridization targets. This ‘chip’-based approach involves using microarrays of nucleic acid molecules as gene-specific hybridization targets to quantitatively measure expression of the corresponding plant genes (Schena et al., Science 270:467-470 (1995), the entirety of which is herein incorporated by reference; Shalon, Ph.D. Thesis. Stanford University (1996), the entirety of which is herein incorporated by reference). Every nucleotide in a large sequence can be queried at the same time. Hybridization can be used to efficiently analyze nucleotide sequences.

[0170] Several microarray methods have been described. One method compares the sequences to be analyzed by hybridization to a set of oligonucleotides or cDNA molecules representing all possible subsequences (Bains and Smith, J. Theor. Biol. 135:303 (1989), the entirety of which is herein incorporated by reference). A second method hybridizes the sample to an array of oligonucleotide or cDNA probes. An array consisting of oligonucleotides or cDNA molecules complementary to subsequences of a target sequence can be used to determine the identity of a target sequence, measure its amount, and detect differences between the target and a reference sequence. Nucleic acid molecule microarrays may also be screened with protein molecules or fragments thereof to determine nucleic acid molecules that specifically bind protein molecules or fragments thereof.

[0171] Additionally, microarrays of BACs may be prepared to sufficiently cover 3× of an entire genome. Such microarrays can be used in a variety of genomics experiments including gene mapping, DNA fingerprinting and promoter identification. Microarrays of genomic DNA can also be used for parallel analysis of genomes at single gene resolution (Lemieux et al., Molecular Breeding 277-289 (1988), the entirety of which is herein incorporated by reference). It is understood that one or more of the molecules of the present invention, preferably one or more of the nucleic acid molecules or protein molecules or fragments thereof of the present invention may be utilized in a genomic microarray based method. In a preferred embodiment of the present invention, one or more of the maize nucleic acid molecules or protein molecules or fragments thereof of the present invention may be utilized in a genomic microarray based method. For example, Genomic Mismatch Scanning (GMS), a hybridization-based method of linkage analysis that allows rapid identification of regions of identity-by-descent between two related individuals, can be carried out with microarrays. GMS is reported to have been used to identify genetically common chromosomal segments based on the ability of these DNA sequences to form extensive regions of mismatch-free heteroduplexes. A series of enzymatic steps, coupled with filter binding, is used to selectively remove heteroduplexes that contain mismatches (i.e., chromosomal regions that do not share identity-by descent.). Fragments of chromosomal DNA representing inherited regions are hybridized to a microarray of ordered genomic clones and positive hybridization signals pinpoint regions of identity-by-descent at high resolution (Lemieux et al., Molecular Breeding 277-289 (1988)).

[0172] It is understood that one or more of the molecules of the present invention, preferably one or more of the nucleic acid molecules or protein molecules or fragments thereof of the present invention may be utilized in a GMS microarray based method to locate regions of identity-by-descent between related individuals. In a preferred embodiment of the present invention, one or more of the maize nucleic acid molecules or protein molecules or fragments thereof of the present invention may be utilized in a GMS microarray based method to locate regions of identity-by-descent between related individuals. The GMS microarray approach can also be used as a tool to map multigenic traits. For example, in yeast, the entire genomic sequence is known and it has been reported that the genes responsible for growth at elevated temperature, a trait required for the pathogenicity of certain yeast strains, may be determined using GMS (Lemieux et al., Molecular Breeding 277-289 (1988)). By analyzing the inheritance of large numbers of tetrads derived from crosses of pathogenic and wild type strains, all the genes responsible for a yeast strain's ability to grow at 42° C., for example, could be identified.

[0173] It is understood that one or more of the molecules of the present invention, preferably one or more of the nucleic acid molecules or protein molecules or fragments thereof of the present invention may be utilized in a GMS microarray based method to map multigenic traits. In a preferred embodiment of the present invention, one or more of the Zea mays L nucleic acid molecules or protein molecules or fragments thereof of the present invention may be utilized in a GMS microarray based method to map multigenic traits.

[0174] Plant repeat elements may be used with GMS microarraying to identify species specific chromosomes in another species background. For example, the maize genome contains moderately repetitive DNA sequences (ZLRS) representing about 2500 copies per haploid genome; these sequences are present in the genus Zea and absent in other graminaceous species. Ananiev et al. (Proc. Natl. Acad. Sci. (U.S.A.) 94:3526-3529 (1997), all of which are herein incorporated by reference in their entirety) have reported unusual plants with individual maize chromosomes added to a complete oat genome generated by embryo rescue from oat (Avena sativa)×Zea mays crosses. By using highly repetitive maize-specific sequences as probes, Ananiev et al. (Proc. Natl. Acad. Sci. (U.S.A.) 94:3526-3529 (1997)) were able to selectively isolate cosmid clones containing maize genomic DNA.

[0175] It is understood that one or more of the molecules of the present invention, preferably one or more of the nucleic acid molecules or protein molecules or fragments thereof of the present invention may be utilized in a GMS microarray based method using repeat elements to selectively isolate clones containing species specific DNA. In a preferred embodiment of the present invention, one or more of the maize nucleic acid molecules or protein molecules or fragments thereof of the present invention may be utilized in a GMS microarray based method to selectively isolate clones containing species specific DNA. A particular preferred microarray embodiment of the present invention is a microarray comprising nucleic acid molecules encoding genes that are homologues of known genes or nucleic acid molecules that comprise genes or fragments thereof that elicit only limited or no matches to known genes. A further preferred microarray embodiment of the present invention is a microarray comprising nucleic acid molecules encoding genes or fragments thereof that are homologues of known genes and nucleic acid molecules that comprise genes or fragments thereof that elicit only limited or no matches to known genes. A further preferred microarray embodiment of the present invention is a microarray comprising nucleic acid molecules encoding genes or fragments thereof that elicit only limited or no matches to known genes.

[0176] It is understood that one or more of the molecules of the present invention, preferably one or more of the nucleic acid molecules or protein molecules or fragments thereof of the present invention may be utilized in a microarray based method.

[0177] In a preferred embodiment of the present invention, one or more of the maize nucleic acid molecules or protein molecules or fragments thereof or other agents of the present invention may be utilized in a microarray based method. Nucleic acid molecules of the present invention may be used in site directed mutagenesis. Site-directed mutagenesis may be utilized to modify nucleic acid sequences, particularly as it is a technique that allows one or more of the amino acids encoded by a nucleic acid molecule to be altered (e.g., a threonine to be replaced by a methionine). Three basic methods for site-directed mutagenesis are often employed. These are cassette mutagenesis (Wells et al., Gene 34:315-23 (1985), the entirety of which is herein incorporated by reference), primer extension (Gilliam et al., Gene 12:129-137 (1980), the entirety of which is herein incorporated by reference); Zoller and Smith, Methods Enzymol. 100:468-500 (1983), the entirety of which is herein incorporated by reference; and Dalbadie-McFarland et al., Proc. Natl. Acad. Sci.(U.S.A.) 79:6409-6413 (1982), the entirety of which is herein incorporated by reference) and methods based upon PCR (Scharf et al., Science 233:1076-1078 (1986), the entirety of which is herein incorporated by reference; Higuchi et al., Nucleic Acids Res. 16:7351-7367 (1988), the entirety of which is herein incorporated by reference). Site-directed mutagenesis approaches are also described in European Patent 0 385 962, the entirety of which is herein incorporated by reference, European Patent 0 359 472, the entirety of which is herein incorporated by reference, and PCT Patent Application WO 93/07278, the entirety of which is herein incorporated by reference.

[0178] Site-directed mutagenesis strategies have been applied to plants for both in vitro as well as in vivo site-directed mutagenesis (Lanz et al., J. Biol. Chem. 266:9971-6 (1991), the entirety of which is herein incorporated by reference; Kovgan and Zhdanov, Biotekhnologiya 5:148-154, No. 207160n, Chemical Abstracts 110:225 (1989), the entirety of which is herein incorporated by reference; Ge et al., Proc. Natl. Acad. Sci. (U.S.A.) 86:4037-4041 (1989), the entirety of which is herein incorporated by reference, Zhu et al., J. Biol. Chem. 271:18494-18498 (1996), Chu et al., Biochemistry 33:6150-6157 (1994), the entirety of which is herein incorporated by reference, Small et al., EMBO J. 11: 1291-1296 (1992), the entirety of which is herein incorporated by reference, Cho et al., Mol. Biotechnol. 8:13-16 (1997), Kita et al., J. Biol. Chem. 271:26529-26535 (1996), the entirety of which is herein incorporated by reference, Jin et al., Mol. Microbiol. 7:555-562 (1993), the entirety of which is herein incorporated by reference, Hatfield and Vierstra, J. Biol. Chem. 267:14799-14803 (1992), the entirety of which is herein incorporated by reference, Zhao et al., Biochemistry 31:5093-5099 (1992), the entirety of which is herein incorporated by reference).

[0179] Any of the nucleic acid molecules of the present invention may either be modified by site-directed mutagenesis or used as, for example, nucleic acid molecules that are used to target other nucleic acid molecules for modification. It is understood that mutants with more than one altered nucleotide can be constructed using techniques that practitioners skilled in the art are familiar with such as isolating restriction fragments and ligating such fragments into an expression vector (see, for example, Sambrook et al., Molecular Cloning: A Laboratory Manual, Cold Spring Harbor Press (1989)). In a preferred embodiment of the present invention, one or more of the maize nucleic acid molecules or fragments thereof of the present invention may be modified by site-directed mutagenesis.

[0180] Nucleic acid molecules of the present invention may be used in transformation. Exogenous genetic material may be transferred into a plant cell and the plant cell regenerated into a whole, fertile or sterile plant. Exogenous genetic material is any genetic material, whether naturally occurring or otherwise, from any source that is capable of being inserted into any organism. In a preferred embodiment of the present invention the exogenous genetic material can include maize genetic material. Such genetic material may be transferred into either monocotyledons and dicotyledons including but not limited to the plants, maize and Arabidopsis thaliana and rice (See specifically, Chistou, Particle Bombardment for Genetic Engineering of Plants, pp. 63-69 (maize), pp 50-60 (rice), Biotechnology Intelligence Unit, Academic Press, San Diego, Calif. (1996), the entirety of which is herein incorporated by reference and generally Chistou, Particle Bombardment for Genetic Engineering of Plants, Biotechnology Intelligence Unit, Academic Press, San Diego, Calif. (1996), the entirety of which is herein incorporated by reference).

[0181] Transfer of a nucleic acid that encodes for a protein can result in overexpression of that protein in a transformed cell or transgenic plant. One or more of the proteins or fragments thereof encoded by nucleic acid molecules of the present invention may be overexpressed in a transformed cell or transformed plant. Such overexpression may be the result of transient or stable transfer of the exogenous material.

[0182] Exogenous genetic material may be transferred into a plant cell by the use of a DNA vector or construct designed for such a purpose. Vectors have been engineered for transformation of large DNA inserts into plant genomes. Vectors have been designed to replicate in both E. coli and A. tumefaciens and have all of the features required for transferring large inserts of DNA into plant chromosomes (Choi and Wing, at the website genome.clemson.edu/protocols2-nj.html July, 1998). ApBACwich system has been developed to achieve site-directed integration of DNA into the genome. A 150 kb cotton BAC DNA is reported to have been transferred into a specific lox site in tobacco by biolistic bombardment and Cre-lox site specific recombination.

[0183] A construct or vector may include a plant promoter to express the protein or protein fragment of choice. A number of promoters which are active in plant cells have been described in the literature. These include the nopaline synthase (NOS) promoter (Ebert et al., Proc. Natl. Acad. Sci. (U.S.A.) 84:5745-5749 (1987), the entirety of which is herein incorporated by reference), the octopine synthase (OCS) promoter (which are carried on tumor-inducing plasmids of Agrobacterium tumefaciens), the caulimovirus promoters such as the cauliflower mosaic virus (CaMV) 19S promoter (Lawton et al., Plant Mol. Biol. 9:315-324 (1987), the entirety of which is herein incorporated by reference) and the CA MV 35S promoter (Odell et al., Nature 313:810-812 (1985), the entirety of which is herein incorporated by reference), the figwort mosaic virus 35S-promoter, the light-inducible promoter from the small subunit of ribulose-1,5-bis-phosphate carboxylase (ssRUBISCO), the Adh promoter (Walker et al., Proc. Natl. Acad. Sci. (U.S.A.) 84:6624-6628 (1987), the entirety of which is herein incorporated by reference), the sucrose synthase promoter (Yang et al., Proc. Natl. Acad. Sci. (U.S.A.) 87:4144-4148 (1990), the entirety of which is herein incorporated by reference), the R gene complex promoter (Chandler et al., The Plant Cell 1:1175-1183 (1989), the entirety of which is herein incorporated by reference), and the chlorophyll a/b binding protein gene promoter, etc. These promoters have been used to create DNA constructs which have been expressed in plants; see, e.g., PCT publication WO 84/02913, herein incorporated by reference in its entirety.

[0184] Promoters which are known or are found to cause transcription of DNA in plant cells can be used in the present invention. Such promoters may be obtained from a variety of sources such as plants and plant viruses. It is preferred that the particular promoter selected should be capable of causing sufficient expression to result in the production of an effective amount of protein to cause the desired phenotype. In addition to promoters which are known to cause transcription of DNA in plant cells, other promoters may be identified for use in the current invention by screening a plant cDNA library for genes which are selectively or preferably expressed in the target tissues or cells.

[0185] For the purpose of expression in source tissues of the plant, such as the leaf, seed, root or stem, it is preferred that the promoters utilized in the present invention have relatively high expression in these specific tissues. For this purpose, one may choose from a number of promoters for genes with tissue- or cell-specific or -enhanced expression. Examples of such promoters reported in the literature include the chloroplast glutamine synthetase GS2 promoter from pea (Edwards et al., Proc. Natl. Acad. Sci. (U.S.A.) 87:3459-3463 (1990), herein incorporated by reference in its entirety), the chloroplast fructose-1,6-biphosphatase (FBPase) promoter from wheat (Lloyd et al., Mol. Gen. Genet. 225:209-216 (1991), herein incorporated by reference in its entirety), the nuclear photosynthetic ST-LS1 promoter from potato (Stockhaus et al., EMBO J. 8:2445-2451 (1989), herein incorporated by reference in its entirety), the phenylalanine ammonia-lyase (PAL) promoter and the chalcone synthase (CHS) promoter from Arabidopsis thaliana. Also reported to be active in photosynthetically active tissues are the ribulose-1,5-bisphosphate carboxylase (RbcS) promoter from eastern larch (Larix laricina), the promoter for the cab gene, cab6, from pine (Yamamoto et al., Plant Cell Physiol. 35:773-778 (1994), herein incorporated by reference in its entirety), the promoter for the Cab-1 gene from wheat (Fejes et al., Plant Mol. Biol. 15:921-932 (1990), herein incorporated by reference in its entirety), the promoter for the CAB-1 gene from spinach (Lubberstedt et al., Plant Physiol. 104:997-1006 (1994), herein incorporated by reference in its entirety), the promoter for the cab1R gene from rice (Luan et al., Plant Cell. 4:971-981 (1992), the entirety of which is herein incorporated by reference), the pyruvate, orthophosphate dikinase (PPDK) promoter from maize (Matsuoka et al., Proc. Natl. Acad. Sci. (U.S.A.) 90:9586-9590 (1993), herein incorporated by reference in its entirety), the promoter for the tobacco Lhcb1*2 gene (Cerdan et al., Plant Mol. Biol. 33:245-255. (1997), herein incorporated by reference in its entirety), the Arabidopsis thaliana SUC2 sucrose-H+ symporter promoter (Truernit et al., Planta. 196:564-570 (1995), herein incorporated by reference in its entirety), and the promoter for the thylacoid membrane proteins from spinach (psaD, psaF, psaE, PC, FNR, atpC, atpD, cab, rbcS). Other promoters for the chlorophyll a/b-binding proteins may also be utilized in the present invention, such as the promoters for LhcB gene and PsbP gene from white mustard (Sinapis alba; Kretsch et al., Plant Mol. Biol. 28:219-229 (1995), the entirety of which is herein incorporated by reference).

[0186] For the purpose of expression in sink tissues of the plant, such as the tuber of the potato plant, the fruit of tomato, or the seed of maize, wheat, rice, and barley, it is preferred that the promoters utilized in the present invention have relatively high expression in these specific tissues. A number of promoters for genes with tuber-specific or -enhanced expression are known, including the class I patatin promoter (Bevan et al., EMBO J. 8:1899-1906 (1986); Jefferson et al., Plant Mol. Biol. 14995-1006 (1990), both of which are herein incorporated by reference in its entirety), the promoter for the potato tuber ADPGPP genes, both the large and small subunits, the sucrose synthase promoter (Salanoubat and Belliard, Gene. 60:47-56 (1987), Salanoubat and Belliard, Gene. 84:181-185 (1989), both of which are incorporated by reference in their entirety), the promoter for the major tuber proteins including the 22 kd protein complexes and proteinase inhibitors (Hannapel, Plant Physiol. 101:703-704 (1993), herein incorporated by reference in its entirety), the promoter for the granule bound starch synthase gene (GBSS) (Visser et al., Plant Mol. Biol. 17:691-699 (1991), herein incorporated by reference in its entirety), and other class I and II patatins promoters (Koster-Topfer et al., Mol. Gen. Genet. 219:390-396 (1989); Mignery et al., Gene. 62:27-44 (1988), both of which are herein incorporated by reference in their entirety).

[0187] Other promoters can also be used to express a fructose 1,6 bisphosphate aldolase gene in specific tissues, such as seeds or fruits. The promoter for β-conglycinin (Chen et al., Dev. Genet. 10:112-122 (1989), herein incorporated by reference in its entirety) or other seed-specific promoters such as the napin and phaseolin promoters, can be used. The zeins are a group of storage proteins found in maize endosperm. Genomic clones for zein genes have been isolated (Pedersen et al., Cell 29:1015-1026 (1982), herein incorporated by reference in its entirety), and the promoters from these clones, including the 15 kD, 16 kD, 19 kD, 22 kD, 27 kD, and gamma genes, could also be used. Other promoters known to function, for example, in maize, include the promoters for the following genes: waxy, Brittle, Shrunken 2, Branching enzymes I and II, starch synthases, debranching enzymes, oleosins, glutelins, and sucrose synthases. A particularly preferred promoter for maize endosperm expression is the promoter for the glutelin gene from rice, more particularly the Osgt-1 promoter (Zheng et al., Mol. Cell Biol. 13:5829-5842 (1993), herein incorporated by reference in its entirety). Examples of promoters suitable for expression in wheat include those promoters for the ADPglucose pyrophosphorylase (ADPGPP) subunits, the granule bound and other starch synthases, the branching and debranching enzymes, the embryogenesis-abundant proteins, the gliadins, and the glutenins. Examples of such promoters in rice include those promoters for the ADPGPP subunits, the granule bound and other starch synthases, the branching enzymes, the debranching enzymes, sucrose synthases, and the glutelins. A particularly preferred promoter is the promoter for rice glutelin, Osgt-1. Examples of such promoters for barley include those for the ADPGPP subunits, the granule bound and other starch synthases, the branching enzymes, the debranching enzymes, sucrose synthases, the hordeins, the embryo globulins, and the aleurone specific proteins.

[0188] Root specific promoters may also be used. An example of such a promoter is the promoter for the acid chitinase gene (Samac et al., Plant Mol. Biol. 25:587-596 (1994), the entirety of which is herein incorporated by reference). Expression in root tissue could also be accomplished by utilizing the root specific subdomains of the CaMV35S promoter that have been identified (Lam et al., Proc. Natl. Acad. Sci. (U.S.A.) 86:7890-7894 (1989), herein incorporated by reference in its entirety). Other root cell specific promoters include those reported by Conkling et al. (Conkling et al., Plant Physiol. 93:1203-1211 (1990), the entirety of which is herein incorporated by reference).

[0189] Additional promoters that may be utilized are described, for example, in U.S. Pat. Nos. 5,378,619, 5,391,725, 5,428,147, 5,447,858, 5,608,144, 5,608,144, 5,614,399, 5,633,441, 5,633,435, and 4,633,436, all of which are herein incorporated in their entirety. In addition, a tissue specific enhancer may be used (Fromm et al., The Plant Cell 1:977-984 (1989), the entirety of which is herein incorporated by reference).

[0190] Constructs or vectors may also include, with the coding region of interest, a nucleic acid sequence that acts, in whole or in part, to terminate transcription of that region. For example, such sequences have been isolated including the Tr7 3′ sequence and the nos 3′ sequence (Ingelbrecht et al., The Plant Cell 1:671-680 (1989), the entirety of which is herein incorporated by reference; Bevan et al., Nucleic Acids Res. 11:369-385 (1983), the entirety of which is herein incorporated by reference), or the like.

[0191] A vector or construct may also include regulatory elements. Examples of such include the Adh intron 1 (Callis et al., Genes and Develop. 1:1183-1200 (1987), the entirety of which is herein incorporated by reference), the sucrose synthase intron (Vasil et al., Plant Physiol. 91:1575-1579 (1989), the entirety of which is herein incorporated by reference) and the TMV omega element (Gallie et al., The Plant Cell 1:301-311 (1989), the entirety of which is herein incorporated by reference). These and other regulatory elements may be included when appropriate.

[0192] A vector or construct may also include a selectable marker. Selectable markers may also be used to select for plants or plant cells that contain the exogenous genetic material. Examples of such include, but are not limited to, a neo gene (Potrykus et al., Mol. Gen. Genet. 199:183-188 (1985), the entirety of which is herein incorporated by reference) which codes for kanamycin resistance and can be selected for using kanamycin, G418, etc.; a bar gene which codes for bialaphos resistance; a mutant EPSP synthase gene (Hinchee et al., Bio/Technology 6:915-922 (1988), the entirety of which is herein incorporated by reference) which encodes glyphosate resistance; a nitrilase gene which confers resistance to bromoxynil (Stalker et al., J. Biol. Chem. 263:6310-6314 (1988), the entirety of which is herein incorporated by reference); a mutant acetolactate synthase gene (ALS) which confers imidazolinone or sulphonylurea resistance (European Patent Application 154,204 (Sep. 11, 1985), the entirety of which is herein incorporated by reference); and a methotrexate resistant DHFR gene (Thillet et al., J. Biol. Chem. 263:12500-12508 (1988), the entirety of which is herein incorporated by reference).

[0193] A vector or construct may also include a transit peptide. Incorporation of a suitable chloroplast transit peptide may also be employed (European Patent Application Publication Number 0218571, the entirety of which is herein incorporated by reference). Translational enhancers may also be incorporated as part of the vector DNA. DNA constructs could contain one or more 5′ non-translated leader sequences which may serve to enhance expression of the gene products from the resulting mRNA transcripts. Such sequences may be derived from the promoter selected to express the gene or can be specifically modified to increase translation of the mRNA. Such regions may also be obtained from viral RNAs, from suitable eukaryotic genes, or from a synthetic gene sequence. For a review of optimizing expression of transgenes, see Koziel et al., Plant Mol. Biol. 32:393-405 (1996), the entirety of which is herein incorporated by reference.

[0194] A vector or construct may also include a screenable marker. Screenable markers may be used to monitor expression. Exemplary screenable markers include a β-glucuronidase or uidA gene (GUS) which encodes an enzyme for which various chromogenic substrates are known (Jefferson, Plant Mol. Biol, Rep. 5:387-405 (1987), the entirety of which is herein incorporated by reference; Jefferson et al., EMBO J. 6:3901-3907 (1987), the entirety of which is herein incorporated by reference); an R-locus gene, which encodes a product that regulates the production of anthocyanin pigments (red color) in plant tissues ((Dellaporta et al., Stadler Symposium 11:263-282 (1988), the entirety of which is herein incorporated by reference); a β-lactamase gene (Sutcliffe et al., Proc. Natl. Acad. Sci. (U.S.A.) 75:3737-3741 (1978), the entirety of which is herein incorporated by reference), a gene which encodes an enzyme for which various chromogenic substrates are known (e.g., PADAC, a chromogenic cephalosporin); a luciferase gene (Ow et al., Science 234:856-859 (1986), the entirety of which is herein incorporated by reference) a xy1E gene (Zukowsky et al., Proc. Natl. Acad. Sci. (U.S.A.) 80:1101-1105 (1983), the entirety of which is herein incorporated by reference) which encodes a catechol dioxygenase that can convert chromogenic catechols; an α-amylase gene (Ikatu et al., Bio/Technol. 8:241-242 (1990), the entirety of which is herein incorporated by reference); a tyrosinase gene (Katz et al., J. Gen. Microbiol. 129:2703-2714 (1983), the entirety of which is herein incorporated by reference) which encodes an enzyme capable of oxidizing tyrosine to DOPA and dopaquinone which in turn condenses to melanin; an α-galactosidase, which will turn a chromogenic α-galactose substrate.

[0195] Included within the terms “selectable or screenable marker genes” are also genes which encode a secretable marker whose secretion can be detected as a means of identifying or selecting for transformed cells. Examples include markers which encode a secretable antigen that can be identified by antibody interaction, or even secretable enzymes which can be detected catalytically. Secretable proteins fall into a number of classes, including small, diffusible proteins detectable, e.g., by ELISA, small active enzymes detectable in extracellular solution (e.g., α-amylase, β-lactamase, phosphinothricin transferase), or proteins which are inserted or trapped in the cell wall (such as proteins which include a leader sequence such as that found in the expression unit of extension or tobacco PR-S). Other possible selectable and/or screenable marker genes will be apparent to those of skill in the art.

[0196] Methods and compositions for transforming a bacteria and other microorganisms are known in the art (see for example Sambrook et al., Molecular Cloning: A Laboratory Manual, Second Edition, Cold Spring Harbor Laboratory Press, Cold Spring Harbor, N.Y., (1989), the entirety of which is herein incorporated by reference).

[0197] There are many methods for introducing transforming nucleic acid molecules into plant cells. Suitable methods are believed to include virtually any method by which nucleic acid molecules may be introduced into a cell, such as by Agrobacterium infection or direct delivery of nucleic acid molecules such as, for example, by PEG-mediated transformation, by electroporation or by acceleration of DNA coated particles, etc. (Pottykus, Ann. Rev. Plant Physiol. Plant Mol. Biol. 42:205-225 (1991), the entirety of which is herein incorporated by reference; Vasil, Plant Mol. Biol. 25:925-937 (1994), the entirety of which is herein incorporated by reference). For example, electroporation has been used to transform maize protoplasts (Fromm et al., Nature 312:791-793 (1986), the entirety of which is herein incorporated by reference).

[0198] Technology for introduction of DNA into cells is well known to those of skill in the art. Four general methods for delivering a gene into cells have been described: (1) chemical methods (Graham and van der Eb, Virology, 54:536-539 (1973), the entirety of which is herein incorporated by reference); (2) physical methods such as microinjection (Capecchi, Cell 22:479-488 (1980), electroporation (Wong and Neumann, Biochem. Biophys. Res. Commun., 107:584-587 (1982); Fromm et al., Proc. Natl. Acad. Sci. (U.S.A.), 82:5824-5828 (1985); U.S. Pat. No. 5,384,253; and the gene gun (Johnston and Tang, Methods Cell Biol. 43:353-365 (1994), all of which are herein incorporated by reference in their entirety; (3) viral vectors (Clapp, Clin. Perinatol., 20:155-168 (1993); Lu et al., J. Exp. Med., 178:2089-2096 (1993); Eglitis and Anderson, Biotechniques, 6:608-614 (1988), all of which are herein incorporated by reference in their entirety); and (4) receptor-mediated mechanisms (Curiel et al., Hum. Gen. Ther., 3:147-154 (1992); Wagner et al., Proc. Natl. Acad. Sci. U.S.A., 89:6099-6103 (1992), all of are herein incorporated by reference in their entirety).

[0199] Acceleration methods that may be used include, for example, microprojectile bombardment and the like. One example of a method for delivering transforming nucleic acid molecules to plant cells is microprojectile bombardment. This method has been reviewed by Yang and Christou, eds., Particle Bombardment Technology for Gene Transfer, Oxford Press, Oxford, England (1994), the entirety of which is herein incorporated by reference). Non-biological particles (microprojectiles) that may be coated with nucleic acids and delivered into cells by a propelling force. Exemplary particles include those comprised of tungsten, gold, platinum, and the like.

[0200] A particular advantage of microprojectile bombardment, in addition to it being an effective means of reproducibly, and stably transforming monocotyledons, is that neither the isolation of protoplasts (Cristou et al., Plant Physiol. 87:671-674 (1988), the entirety of which is herein incorporated by reference) nor the susceptibility of Agrobacterium infection is required. An illustrative embodiment of a method for delivering DNA into maize cells by acceleration is a biolistics-particle delivery system, which can be used to propel particles coated with DNA through a screen, such as a stainless steel or Nytex screen, onto a filter surface covered with corn cells cultured in suspension. Gordon-Kamm et al., describes the basic procedure for coating tungsten particles with DNA (Gordon-Kamm et al., Plant Cell 2:603-618 (1990), the entirety of which is herein incorporated by reference). The screen disperses the tungsten nucleic acid particles so that they are not delivered to the recipient cells in large aggregates. A particle delivery system suitable for use with the present invention is the helium acceleration PDS-1000/He gun which is available from Bio-Rad Laboratories (Bio-Rad, Hercules, Calif.) (Sanford et al., Technique 3:3-16 (1991), the entirety of which is herein incorporated by reference).

[0201] For the bombardment, cells in suspension may be concentrated on filters. Filters containing the cells to be bombarded are positioned at an appropriate distance below the microprojectile stopping plate. If desired, one or more screens are also positioned between the gun and the cells to be bombarded.

[0202] Alternatively, immature embryos or other target cells may be arranged on solid culture medium. The cells to be bombarded are positioned at an appropriate distance below the macroprojectile stopping plate. If desired, one or more screens are also positioned between the acceleration device and the cells to be bombarded. Through the use of techniques set forth herein one may obtain up to 1000 or more foci of cells transiently expressing a marker gene. The number of cells in a focus which express the exogenous gene product 48 hours post-bombardment often range from one to ten and average one to three.

[0203] In bombardment transformation, one may optimize the prebombardment culturing conditions and the bombardment parameters to yield the maximum numbers of stable transformants. Both the physical and biological parameters for bombardment are important in this technology. Physical factors are those that involve manipulating the DNA/microprojectile precipitate or those that affect the flight and velocity of either the macro- or microprojectiles. Biological factors include all steps involved in manipulation of cells before and immediately after bombardment, the osmotic adjustment of target cells to help alleviate the trauma associated with bombardment, and also the nature of the transforming DNA, such as linearized DNA or intact supercoiled plasmids. It is believed that pre-bombardment manipulations are especially important for successful transformation of immature embryos.

[0204] In another alternative embodiment, plastids can be stably transformed. Methods disclosed for plastid transformation in higher plants include particle gun delivery of DNA containing a selectable marker and targeting of the DNA to the plastid genome through homologous recombination (Svab et al. Proc. Natl. Acad. Sci. (U.S.A.) 87:8526-8530 (1990); Svab and Maliga Proc. Natl. Acad. Sci. (U.S.A.) 90:913-917 (1993)); Staub, J. M. and Maliga, P. EMBO J. 12:601-606 (1993), U.S. Pat. Nos. 5,451,513 and 5,545,818, all of which are herein incorporated by reference in their entirety).

[0205] Accordingly, it is contemplated that one may wish to adjust various aspects of the bombardment parameters in small scale studies to fully optimize the conditions. One may particularly wish to adjust physical parameters such as gap distance, flight distance, tissue distance, and helium pressure. One may also minimize the trauma reduction factors by modifying conditions which influence the physiological state of the recipient cells and which may therefore influence transformation and integration efficiencies. For example, the osmotic state, tissue hydration and the subculture stage or cell cycle of the recipient cells may be adjusted for optimum transformation. The execution of other routine adjustments will be known to those of skill in the art in light of the present disclosure.

[0206] Agrobacterium-mediated transfer is a widely applicable system for introducing genes into plant cells because the DNA can be introduced into whole plant tissues, thereby bypassing the need for regeneration of an intact plant from a protoplast. The use of Agrobacterium-mediated plant integrating vectors to introduce DNA into plant cells is well known in the art. See, for example the methods described (Fraley et al., Biotechnology 3:629-635 (1985); Rogers et al., Meth. In Enzymol, 153:253-277 (1987), both of which are herein incorporated by reference in their entirety. Further, the integration of the Ti-DNA is a relatively precise process resulting in few rearrangements. The region of DNA to be transferred is defined by the border sequences, and intervening DNA is usually inserted into the plant genome as described (Spielmann et al., Mol. Gen. Genet., 205:34 (1986), the entirety of which is herein incorporated by reference).

[0207] Modern Agrobacterium transformation vectors are capable of replication in E. coli as well as Agrobacterium, allowing for convenient manipulations as described (Klee et al., In: Plant DNA Infectious Agents, T. Hohn and J. Schell, eds., Springer-Verlag, New York, pp. 179-203 (1985), the entirety of which is herein incorporated by reference. Moreover, recent technological advances in vectors for Agrobacterium-mediated gene transfer have improved the arrangement of genes and restriction sites in the vectors to facilitate construction of vectors capable of expressing various polypeptide coding genes. The vectors described have convenient multi-linker regions flanked by a promoter and a polyadenylation site for direct expression of inserted polypeptide coding genes and are suitable for present purposes (Rogers et al., Meth. In Enzymol., 153:253-277 (1987), the entirety of which is herein incorporated by reference). In addition, Agrobacterium containing both armed and disarmed Ti genes can be used for the transformations. In those plant strains where Agrobacterium-mediated transformation is efficient, it is the method of choice because of the facile and defined nature of the gene transfer.

[0208] A transgenic plant formed using Agrobacterium transformation methods typically contains a single gene on one chromosome. Such transgenic plants can be referred to as being heterozygous for the added gene. More preferred is a transgenic plant that is homozygous for the added structural gene; i.e., a transgenic plant that contains two added genes, one gene at the same locus on each chromosome of a chromosome pair. A homozygous transgenic plant can be obtained by sexually mating (selfing) an independent segregant transgenic plant that contains a single added gene, germinating some of the seed produced and analyzing the resulting plants produced for the gene of interest.

[0209] It is also to be understood that two different transgenic plants can also be mated to produce offspring that contain two independently segregating added, exogenous genes. Selfing of appropriate progeny can produce plants that are homozygous for both added, exogenous genes that encode a polypeptide of interest. Back-crossing to a parental plant and out-crossing with a non-transgenic plant are also contemplated, as is vegetative propagation.

[0210] Transformation of plant protoplasts can be achieved using methods based on calcium phosphate precipitation, polyethylene glycol treatment, electroporation, and combinations of these treatments. See for example (Potrykus et al., Mol. Gen. Genet., 205:193-200 (1986); Lorz et al., Mol. Gen. Genet., 199:178, (1985); Fromm et al., Nature, 319:791,(1986); Uchimiya et al., Mol. Gen. Genet.:204:204, (1986); Callis et al., Genes and Development, 1183,(1987); Marcotte et al., Nature, 335:454, (1988), all of which the entirety is herein incorporated by reference).

[0211] Application of these systems to different plant strains depends upon the ability to regenerate that particular plant strain from protoplasts. Illustrative methods for the regeneration of cereals from protoplasts are described (Fujimura et al., Plant Tissue Culture Letters, 2:74,(1985); Toriyama et al., Theor Appl. Genet. 205:34. (1986); Yamada et al., Plant Cell Rep., 4:85, (1986); Abdullah et al., Biotechnology, 4:1087, (1986), all of which the entirety is herein incorporated by reference).

[0212] To transform plant strains that cannot be successfully regenerated from protoplasts, other ways to introduce DNA into intact cells or tissues can be utilized. For example, regeneration of cereals from immature embryos or explants can be effected as described (Vasil, Biotechnology, 6:397,(1988), the entirety of which is herein incorporated by reference). In addition, “particle gun” or high-velocity microprojectile technology can be utilized (Vasil et al., Bio/Technology 10:667, (1992), the entirety of which is herein incorporated by reference).

[0213] Using the latter technology, DNA is carried through the cell wall and into the cytoplasm on the surface of small metal particles as described (Klein et al., Nature, 328:70, (1987); Klein et al., Proc. Natl. Acad. Sci. (U.S.A.), 85:8502-8505, (1988); McCabe et al., Biotechnology, 6:923, (1988), all of which the entirety is herein incorporated by reference). The metal particles penetrate through several layers of cells and thus allow the transformation of cells within tissue explants.

[0214] Other methods of cell transformation can also be used and include but are not limited to introduction of DNA into plants by direct DNA transfer into pollen (Zhou et al., Methods in Enzymology, 101:433, (1983); Hess et al., Intern Rev. Cytol., 107:367, (1987); Luo et al., Plant Mol. Biol. Reporter, 6:165, (1988), all of which the entirety is herein incorporated by reference), by direct injection of DNA into reproductive organs of a plant (Pena et al., Nature, 325:274, (1987), the entirety of which is herein incorporated by reference), or by direct injection of DNA into the cells of immature embryos followed by the rehydration of desiccated embryos (Neuhaus et al., Theor. Appl. Genet., 75:30, (1987), the entirety of which is herein incorporated by reference).

[0215] The regeneration, development, and cultivation of plants from single plant protoplast transformants or from various transformed explants is well known in the art (Weissbach and Weissbach, In: Methods for Plant Molecular Biology, (Eds.), Academic Press, Inc., San Diego, Calif., (1988), the entirety of which is herein incorporated by reference). This regeneration and growth process typically includes the steps of selection of transformed cells, culturing those individualized cells through the usual stages of embryonic development through the rooted plantlet stage. Transgenic embryos and seeds are similarly regenerated. The resulting transgenic rooted shoots are thereafter planted in an appropriate plant growth medium such as soil.

[0216] The development or regeneration of plants containing the foreign, exogenous gene that encodes a protein of interest is well known in the art. Preferably, the regenerated plants are self-pollinated to provide homozygous transgenic plants, as discussed before. Otherwise, pollen obtained from the regenerated plants is crossed to seed-grown plants of agronomically important lines. Conversely, pollen from plants of these important lines is used to pollinate regenerated plants. A transgenic plant of the present invention containing a desired polypeptide is cultivated using methods well known to one skilled in the art.

[0217] There are a variety of methods for the regeneration of plants from plant tissue. The particular method of regeneration will depend on the starting plant tissue and the particular plant species to be regenerated.

[0218] Methods for transforming dicots, primarily by use of Agrobacterium tumefaciens, and obtaining transgenic plants have been published for cotton (U.S. Pat. No. 5,004,863, U.S. Pat. No. 5,159,135, U.S. Pat. No. 5,518,908, all of which the entirety is herein incorporated by reference); rice (U.S. Pat. No. 5,569,834, U.S. Pat. No. 5,416,011, McCabe et al., Biotechnology 6:923, (1988), Christou et al., Plant Physiol., 87:671-674 (1988), all of which the entirety is herein incorporated by reference); Brassica (U.S. Pat. No. 5,463,174, the entirety of which is herein incorporated by reference); peanut (Cheng et al., Plant Cell Rep. 15:653-657 (1996), McKently et al., Plant Cell Rep. 14:699-703 (1995), all of which the entirety is herein incorporated by reference); papaya (Yang et al., (1996), the entirety of which is herein incorporated by reference); pea (Grant et al., Plant Cell Rep. 15:254-258, (1995), the entirety of which is herein incorporated by reference).

[0219] Transformation of monocotyledons using electroporation, particle bombardment, and Agrobacterium have also been reported. Transformation and plant regeneration have been achieved in asparagus (Bytebier et al., Proc. Natl. Acad. Sci. (U.S.A.) 84:5345, (1987), the entirety of which is herein incorporated by reference); barley (Wan and Lemaux, Plant Physiol 104:37, (1994), the entirety of which is herein incorporated by reference); maize (Rhodes et al., Science 240:204, (1988), Gordon-Kamm et al., Plant Cell, 2:603, (1990), Fromm et al., Bio/Technology 8:833, (1990), Koziel et al., Bio/Technology 11:194, (1993), Armstrong et al., Crop Science 35:550-557, (1995), all of which the entirety is herein incorporated by reference); oat (Somers et al., Bio/Technology, 10:1589, (1992), the entirety of which is herein incorporated by reference); orchardgrass (Horn et al., Plant Cell Rep. 7:469, (1988), the entirety of which is herein incorporated by reference); rice (Toriyama et al., Theor Appl. Genet. 205:34, (1986); Park et al., Plant Mol. Biol.,32:1135-1148, (1996); Abedinia et al., Aust. J. Plant Physiol. 24:133-141, (1997); Zhang and Wu, Theor. Appl. Genet. 76:835, (1988); Zhang et al., Plant Cell Rep. 7:379, (1988); Battraw and Hall, Plant Sci. 86:191-202, (1992); Christou et al., Bio/Technology 9:957, (1991), all of which the entirety is herein incorporated by reference); sugarcane (Bower and Birch, Plant J. 2:409, (1992), the entirety of which is herein incorporated by reference); tall fescue (Wang et al., Bio/Technology 10:691, (1992), the entirety of which is herein incorporated by reference), and wheat (Vasil et al., Bio/Technology 10:667, (1992), the entirety of which is herein incorporated by reference; U.S. Pat. No. 5,631,152, the entirety of which is herein incorporated by reference.

[0220] Assays for gene expression based on the transient expression of cloned nucleic acid constructs have been developed by introducing the nucleic acid molecules into plant cells by polyethylene glycol treatment, electroporation, or particle bombardment (Marcotte, et al., Nature, 335:454-457 (1988), the entirety of which is herein incorporated by reference; Marcotte, et al., Plant Cell, 1:523-532 (1989), the entirety of which is herein incorporated by reference; McCarty, et al., Cell 66:895-905 (1991), the entirety of which is herein incorporated by reference; Hattori, et al., Genes Dev. 6:609-618 (1992), the entirety of which is herein incorporated by reference; Goff, et al., EMBO J. 9:2517-2522 (1990), the entirety of which is herein incorporated by reference). Transient expression systems may be used to functionally dissect gene constructs (See generally, Mailga et al., Methods in Plant Molecular Biology, Cold Spring Harbor Press (1995)).

[0221] Any of the nucleic acid molecules of the present invention may be introduced into a plant cell in a permanent or transient manner in combination with other genetic elements such as vectors, promoters enhancers etc. Further any of the nucleic acid molecules of the present invention may be introduced into a plant cell in a manner that allows for over expression of the protein or fragment thereof encoded by the nucleic acid molecule.

[0222] Nucleic acid molecules of the present invention may be used in cosuppression. Cosuppression is the reduction in expression levels, usually at the level of RNA, of a particular endogenous gene or gene family by the expression of a homologous sense construct that is capable of transcribing mRNA of the same strandedness as the transcript of the endogenous gene (Napoli et al., Plant Cell 2:279-289 (1990), the entirety of which is herein incorporated by reference; van der Krol et al., Plant Cell 2:291-299 (1990), the entirety of which is herein incorporated by reference). Cosuppression may result from stable transformation with a single copy nucleic acid molecule that is homologous to a nucleic acid sequence found with the cell (Prolls and Meyer, Plant J. 2:465-475 (1992), the entirety of which is herein incorporated by reference) or with multiple copies of a nucleic acid molecule that is homologous to a nucleic acid sequence found with the cell (Mittlesten et al., Mol. Gen. Genet. 244: 325-330 (1994), the entirety of which is herein incorporated by reference). Genes, even though different, linked to homologous promoters may result in the cosuppression of the linked genes (Vaucheret, C. R. Acad. Sci. III 316: 1471-1483 (1993), the entirety of which is herein incorporated by reference).

[0223] This technique has, for example been applied to generate white flowers from red petunia and tomatoes that do not ripen on the vine. Up to 50% of petunia transformants that contained a sense copy of the chalcone synthase (CHS) gene produced white flowers or floral sectors; this was as a result of the post-transcriptional loss of mRNA encoding CHS (Flavell, Proc. Natl. Acad. Sci. (U.S.A.) 91:3490-3496 (1994)), the entirety of which is herein incorporated by reference). Cosuppression may require the coordinate transcription of the transgene and the endogenous gene, and can be reset by a developmental control mechanism (Jorgensen, Trends Biotechnol, 8:340344 (1990), the entirety of which is herein incorporated by reference; Meins and Kunz, In: Gene Inactivation and Homologous Recombination in Plants (Paszkowski, J., ed.), pp. 335-348. Kluwer Academic, Netherlands (1994), the entirety of which is herein incorporated by reference).

[0224] It is understood that one or more of the nucleic acids of the present invention comprising SEQ ID NO:1 or complement thereof through SEQ ID NO: 82359 or complement thereof or fragment thereof or other nucleic acid molecules of the present invention, may be introduced into a plant cell and transcribed using an appropriate promoter with such transcription resulting in the co-suppression of an endogenous protein.

[0225] Nucleic acid molecules of the present invention may be used to reduce gene function. Antisense approaches are a way of preventing or reducing gene function by targeting the genetic material (Mol et al., FEBS Lett. 268:427-430 (1990), the entirety of which is herein incorporated by reference). The objective of the antisense approach is to use a sequence complementary to the target gene to block its expression and create a mutant cell line or organism in which the level of a single chosen protein is selectively reduced or abolished. Antisense techniques have several advantages over other ‘reverse genetic’ approaches. The site of inactivation and its developmental effect can be manipulated by the choice of promoter for antisense genes or by the timing of external application or microinjection. Antisense can manipulate its specificity by selecting either unique regions of the target gene or regions where it shares homology to other related genes (Hiatt et al., In Genetic Engineering, Setlow (ed.), Vol. 11, New York: Plenum 49-63 (1989), the entirety of which is herein incorporated by reference).

[0226] The principle of regulation by antisense RNA is that RNA that is complementary to the target mRNA is introduced into cells, resulting in specific RNA:RNA duplexes being formed by base pairing between the antisense substrate and the target mRNA (Green et al., Annu. Rev. Biochem. 55:569-597 (1986), the entirety of which is herein incorporated by reference). Under one embodiment, the process involves the introduction and expression of an antisense gene sequence. Such a sequence is one in which part or all of the normal gene sequences are placed under a promoter in inverted orientation so that the ‘wrong’ or complementary strand is transcribed into a noncoding antisense RNA that hybridizes with the target mRNA and interferes with its expression (Takayama and Inouye, Crit. Rev. Biochem. Mol. Biol. 25:155-184 (1990), the entirety of which is herein incorporated by reference). An antisense vector is constructed by standard procedures and introduced into cells by transformation, transfection, electroporation, microinjection, or by infection, etc. The type of transformation and choice of vector will determine whether expression is transient or stable. The promoter used for the antisense gene may influence the level, timing, tissue, specificity, or inducibility of the antisense inhibition.

[0227] It is understood that protein synthesis activity in a plant cell may be reduced or depressed by growing a transformed plant cell containing a nucleic acid molecule of the present invention.

[0228] Antibodies have been expressed in plants (Hiatt et al., Nature 342:76-78 (1989), the entirety of which is herein incorporated by reference; Conrad and Fielder, Plant Mol. Biol. 26:1023-1030 (1994), the entirety of which is herein incorporated by reference). Cytoplasmic expression of a scFv (single-chain Fv antibodies) has been reported to delay infection by artichoke mottled crinkle virus. Transgenic plants that express antibodies directed against endogenous proteins may exhibit a physiological effect (Philips et al., EMBO J. 16:4489-4496 (1997), the entirety of which is herein incorporated by reference; Marion-Poll, Trends in Plant Science 2:447-448 (1997), the entirety of which is herein incorporated by reference). For example, expressed anti-abscisic antibodies reportedly result in a general perturbation of seed development (Philips et al., EMBO J. 16:4489-4496 (1997)).

[0229] Nucleic acid molecules of the present invention may be used as antibodies. Antibodies that are catalytic may also be expressed in plants (abzymes). The principle behind abzymes is that since antibodies may be raised against many molecules, this recognition ability can be directed toward generating antibodies that bind transition states to force a chemical reaction forward (Persidas, Nature Biotechnology 15:1313-1315 (1997), the entirety of which is herein incorporated by reference; Baca et al., Ann. Rev. Biophys. Biomol. Struct. 26:461-493 (1997), the entirety of which is herein incorporated by reference). The catalytic abilities of abzymes may be enhanced by site directed mutagenesis. Examples of abzymes are, for example, set forth in U.S. Pat. No: 5,658,753; U.S. Pat. No. 5,632,990; U.S. Pat. No. 5,631,137; U.S. Pat. No. 5,602,015; U.S. Pat. No. 5,559,538; U.S. Pat. No. 5,576,174; U.S. Pat. No. 5,500,358; U.S. Pat. No. 5,318,897; U.S. Pat. No. 5,298,409; U.S. Pat. No. 5,258,289 and U.S. Pat. No. 5,194,585, all of which are herein incorporated in their entirety.

[0230] It is understood that any of the antibodies of the present invention may be expressed in plants and that such expression can result in a physiological effect. It is also understood that any of the expressed antibodies may be catalytic.

[0231] In addition to the above discussed procedures, practitioners are familiar with the standard resource materials which describe specific conditions and procedures for the construction, manipulation and isolation of macromolecules (e.g., DNA molecules, plasmids, etc.), generation of recombinant organisms and the screening and isolating of clones, (see for example, Sambrook et al., Molecular Cloning: A Laboratory Manual, Cold Spring Harbor Press (1989); Mailga et al., Methods in Plant Molecular Biology, Cold Spring Harbor Press (1995), the entirety of which is herein incorporated by reference; Birren et al., Genome Analysis: Analyzing DNA, 1, Cold Spring Harbor, N.Y. (1998), the entirety of which is herein incorporated by reference).

[0232] The nucleotide sequence provided in SEQ ID NO:1, through SEQ ID NO: 82359 or fragment thereof, or complement thereof, or a nucleotide sequence at least 90% identical, preferably 95%, identical even more preferably 99% or 100% identical to the sequence provided in SEQ ID NO:1 through SEQ ID NO: 82359 or fragment thereof, or complement thereof, can be “provided” in a variety of mediums to facilitate use fragment thereof. Such a medium can also provide a subset thereof in a form that allows a skilled artisan to examine the sequences.

[0233] In one application of this embodiment, a nucleotide sequence of the present invention can be recorded on computer readable media. As used herein, “computer readable media” refers to any medium that can be read and accessed directly by a computer. Such media include, but are not limited to: magnetic storage media, such as floppy discs, hard disc, storage medium, and magnetic tape: optical storage media such as CD-ROM; electrical storage media such as RAM and ROM; and hybrids of these categories such as magnetic/optical storage media. A skilled artisan can readily appreciate how any of the presently known computer readable mediums can be used to create a manufacture comprising computer readable medium having recorded thereon a nucleotide sequence of the present invention.

[0234] As used herein, “recorded” refers to a process for storing information on computer readable medium. A skilled artisan can readily adopt any of the presently known methods for recording information on computer readable medium to generate media comprising the nucleotide sequence information of the present invention. A variety of data storage structures are available to a skilled artisan for creating a computer readable medium having recorded thereon a nucleotide sequence of the present invention. The choice of the data storage structure will generally be based on the means chosen to access the stored information. In addition, a variety of data processor programs and formats can be used to store the nucleotide sequence information of the present invention on computer readable medium. The sequence information can be represented in a word processing text file, formatted in commercially-available software such as WordPerfect and Microsoft Word, or represented in the form of an ASCII file, stored in a database application, such as DB2, Sybase, Oracle, or the like. A skilled artisan can readily adapt any number of data processor structuring formats (e.g., text file or database) in order to obtain computer readable medium having recorded thereon the nucleotide sequence information of the present invention.

[0235] By providing one or more of nucleotide sequences of the present invention, a skilled artisan can routinely access the sequence information for a variety of purposes. Computer software is publicly available which allows a skilled artisan to access sequence information provided in a computer readable medium. The examples which follow demonstrate how software which implements the BLAST (Altschul et al., J. Mol. Biol. 215:403-410 (1990)) and BLAZE (Brutlag et al., Comp. Chem. 17:203-207 (1993), the entirety of which is herein incorporated by reference) search algorithms on a Sybase system can be used to identify open reading frames (ORFs) within the genome that contain homology to ORFs or proteins from other organisms. Such ORFs are protein-encoding fragments within the sequences of the present invention and are useful in producing commercially important proteins such as enzymes used in amino acid biosynthesis, metabolism, transcription, translation, RNA processing, nucleic acid and a protein degradation, protein modification, and DNA replication, restriction, modification, recombination, and repair.

[0236] The present invention further provides systems, particularly computer-based systems, which contain the sequence information described herein. Such systems are designed to identify commercially important fragments of the nucleic acid molecule of the present invention. As used herein, “a computer-based system” refers to the hardware means, software means, and data storage means used to analyze the nucleotide sequence information of the present invention. The minimum hardware means of the computer-based systems of the present invention comprises a central processing unit (CPU), input means, output means, and data storage means. A skilled artisan can readily appreciate that any one of the currently available computer-based system are suitable for use in the present invention.

[0237] As indicated above, the computer-based systems of the present invention comprise a data storage means having stored therein a nucleotide sequence of the present invention and the necessary hardware means and software means for supporting and implementing a search means. As used herein, “data storage means” refers to memory that can store nucleotide sequence information of the present invention, or a memory access means which can access manufactures having recorded thereon the nucleotide sequence information of the present invention. As used herein, “search means” refers to one or more programs which are implemented on the computer-based system to compare a target sequence or target structural motif with the sequence information stored within the data storage means. Search means are used to identify fragments or regions of the sequence of the present invention that match a particular target sequence or target motif. A variety of known algorithms are disclosed publicly and a variety of commercially available software for conducting search means are available and can be used in the computer-based systems of the present invention. Examples of such software include, but are not limited to, MacPattern (EMBL), BLASTIN and BLASTIX (NCBIA). One of the available algorithms or implementing software packages for conducting homology searches can be adapted for use in the present computer-based systems.

[0238] The most preferred sequence length of a target sequence is from about 10 to 100 amino acids or from about 30 to 300 nucleotide residues. However, it is well recognized that during searches for commercially important fragments of the nucleic acid molecules of the present invention, such as sequence fragments involved in gene expression and protein processing, may be of shorter length.

[0239] As used herein, “a target structural motif,” or “target motif,” refers to any rationally selected sequence or combination of sequences in which the sequence(s) are chosen based on a three-dimensional configuration which is formed upon the folding of the target motif. There are a variety of target motifs known in the art. Protein target motifs include, but are not limited to, enzymatic active sites and signal sequences. Nucleic acid target motifs include, but are not limited to, promoter sequences, cis elements, hairpin structures and inducible expression elements (protein binding sequences).

[0240] Thus, the present invention further provides an input means for receiving a target sequence, a data storage means for storing the target sequences of the present invention sequence identified using a search means as described above, and an output means for outputting the identified homologous sequences. A variety of structural formats for the input and output means can be used to input and output information in the computer-based systems of the present invention. A preferred format for an output means ranks fragments of the sequence of the present invention by varying degrees of homology to the target sequence or target motif. Such presentation provides a skilled artisan with a ranking of sequences which contain various amounts of the target sequence or target motif and identifies the degree of homology contained in the identified fragment.

[0241] A variety of comparing means can be used to compare a target sequence or target motif with the data storage means to identify sequence fragments sequence of the present invention. For example, implementing software which implement the BLAST and BLAZE algorithms (Altschul et al., J. Mol. Biol. 215:403-410 (1990)) can be used to identify open frames within the nucleic acid molecules of the present invention. A skilled artisan can readily recognize that any one of the publicly available homology search programs can be used as the search means for the computer-based systems of the present invention.

[0242] Having now generally described the invention, the same will be more readily understood through reference to the following examples which are provided by way of illustration, and are not intended to be limiting of the present invention, unless specified.

### EXAMPLE 1

[0243] BACs are stable, non-chimeric cloning systems having genomic fragment inserts (100-300 kb) and their DNA can be prepared for most types of experiments including DNA sequencing. BAC vector, pBeloBAC11, is derived from the endogenous E. coli F-factor plasmid, which contains genes for strict copy number control and unidirectional origin of DNA replication. Additionally, pBeloBAC11 has three unique restriction enzyme sites (Hind III, Bam HI and Sph I) located within the LacZ gene which can be used as cloning sites for megabase-size plant DNA. Indigo, another BAC vector contains Hind III and Eco RI cloning sites. This vector also contains a random mutation in the LacZ gene that allows for darker blue colonies.

[0244] As an alternative, the P1-derived artificial chromosome (PAC) can be used as a large DNA fragment cloning vector (Ioannou, et al., Nature Genet. 6:84-89 (1994), the entirety of which is herein incorporated by reference; Suzuki, et al., Gene 199:133-137 (1997), the entirety of which is herein incorporated by reference). The PAC vector has most of the features of the BAC system, but also contains some of the elements of the bacteriophage P1 cloning system.

[0245] BAC libraries are generated by ligating size-selected restriction digested DNA with pBeloBAC11 followed by electroporation into E. coli. BAC library construction and characterization is extremely efficient when compared to YAC (yeast artificial chromosome) library construction and analysis, particularly because of the chimerism associated with YACs and difficulties associated with extracting YAC DNA.

[0246] There are general methods for preparing megabase-size DNA from plants. For example, the protoplast method yields megabase-size DNA of high quality with minimal breakage. The process involves preparing young leaves which are manually feathered with a razor-blade before being incubated for four to five hours with cell-wall-degrading enzymes. The second method developed by Zhange et al., Plant J. 7:175-184 (1995), the entirety of which is herein incorporated by reference, is a universal nuclei method that works well for several divergent plant taxa. Fresh or frozen tissue is homogenized with a blender or mortar and pestle. Nuclei are then isolated and embedded. DNA is prepared by the nucleic method often more concentrated and is reported to contain lower amounts of chloroplast DNA than the protoplast method.

[0247] Once protoplasts or nuclei are produced, they are embedded in an agarose matrix as plugs or microbeads. The agarose provides a support matrix to prevent shearing of the DNA while allowing enzymes and buffers to diffuse into the DNA. The DNA is purified and manipulated in the agarose and is stable for more than one year at 4° C.

[0248] Once high molecular weight DNA has been prepared, it is fragmented to the desired size range. In general, DNA fragmentation utilizes two general approaches, 1) physical shearing and 2) partial digestion with a restriction enzyme that cuts relatively frequently within the genome. Since physical shearing is not dependent upon the frequency and distribution of particular restriction enzymes sites, this method should yield the most random distribution of DNA fragments. However, the ends of the sheared DNA fragments must be repaired and cloned directly or restriction enzyme sites added by the addition of synthetic linkers. Because of the subsequent steps required to clone DNA fragmented by shearing, most protocols fragment DNA by partial restriction enzyme digestion. The advantage of partial restriction enzyme digestion is that no further enzymatic modification of the ends of the restriction fragments are necessary. Four common techniques that can be used to achieve reproducible partial digestion of megabase-size DNA are 1) varying the concentration of the restriction enzyme, 2) varying the time of incubation with the restriction enzyme 3) varying the concentration of an enzyme cofactor (e.g., Mg²⁺) and 4) varying the ratio of endonuclease to methylase.

[0249] There are three cloning sites in pBeloBAC11, but only Hind III and Bam HI produce 5′ overhangs for easy vector dephosphorylation. These two restriction enzymes are primarily used to construct BAC libraries. The optimal partial digestion conditions for megabase-size DNA are determined by wide and narrow window digestions. To optimize the optimum amount of Hind III, 1, 2, 3, 10, and 5-units of enzyme are each added to 50 ml aliquots of microbeads and incubated at 37° C. for 20 minutes.

[0250] After partial digestion of megabase-size DNA, the DNA is run on a pulsed-field gel, and DNA in a size range of 100-500 kb is excised from the gel. This DNA is ligated to the BAC vector or subjected to a second size selection on a pulsed field gel under different running conditions. Studies have previously reported that two rounds of size selection can eliminate small DNA fragments co-migrating with the selected range in the first pulse-field fractionation. Such a strategy results in an increase in insert sizes and a more uniform insert size distribution. A practical approach to performing size selections is to first test for the number of clones/microliter of ligation and insert size from the first size selected material. If the numbers are good (500 to 2000 white colony/microliter of ligation) and the size range is also good (50 to 300 kb) then a second size selection is practical. When performing a second size selection one expects a 80 to 95% decrease in the number of recombinant clones per transformation.

[0251] Twenty to two hundred nanograms of the size-selected DNA is ligated to dephosphorylated BAC vector (molar ratio of 10 to 1 in BAC vector excess). Most BAC libraries use a molar ratio of 5 to 15:1 (size selected DNA:BAC vector).

[0252] Transformation is carried out by electroporation and the transformation efficiency for BACs is about 40 to 1,500 transformants from one microliter of ligation product or 20 to 1000 transformants/ng DNA.

[0253] Several tests can be carried out to determine the quality of a BAC library. Three basic tests to evaluate the quality include: the genome coverage of a BAC library-average insert size, average number of clones hybridizing with single copy probes and chloroplast DNA content.

[0254] The determination of the average insert size of the library is assessed in two ways. First, during library construction every ligation is tested to determine the average insert size by assaying 20-50 BAC clones per ligation. DNA is isolated from recombinant clones using a standard mini preparation protocol, digested with Not I to free the insert from the BAC vector and then sized using pulsed field gel electrophoresis (Maule, Molecular Biotechnology 9:107-126 (1998), the entirety of which is herein incorporated by reference).

[0255] To determine the genome coverage of the library, it is screened with single copy RFLP markers distributed randomly across the genome by hybridization. Microtiter plates containing BAC clones are spotted onto Hybond membranes. Bacteria from 48 or 72 plates are spotted twice onto one membrane resulting in 18,000 to 27,648 unique clones on each membrane in either a 4×4 or 5×5 orientation. Since each clone is present twice, false positives are easily eliminated and true positives are easily recognized and identified.

[0256] Finally, the chloroplast DNA content in the BAC library is estimated by hybridizing three chloroplast genes spaced evenly across the chloroplast genome to the library on high density hybridization filters.

[0257] There are strategies for isolating rare sequences within the genome. For example, higher plant genomes can range in size from 100 Mb/1C (Arabidopsis) to 15,966 Mb/C (Triticum aestivum), (Arumuganathan and Earle, Plant Mol Bio Rep. 9:208-219 (1991), the entirety of which is herein incorporated by reference). The number of clones required to achieve a given probability that any DNA sequence will be represented in a genomic library is N=(ln(1-P))/(ln(1-L/G)) where N is the number of clones required, P is the probability desired to get the target sequence, L is the length of the average clone insert in base pairs and G is the haploid genome length in base pairs (Clarke et al., Cell 9:91-100 (1976) the entirety of which is herein incorporated by reference).

[0258] The maize BAC library of the present invention is constructed in the pBeloBAC11 or similar vector. Inserts are generated by partial Eco RI or other enzymatic digestion of DNA from the cultivar A3244. The library provides approximately twenty fold coverage of the maize genome.

### EXAMPLE 2

[0259] Two basic methods can be used for DNA sequencing, the chain termination method of Sanger et al., Proc. Natl. Acad. Sci. (U.S.A.) 74:5463-5467 (1977), the entirety of which is herein incorporated by reference and the chemical degradation method of Maxam and Gilbert, Proc. Natl. Acad. Sci. (U.S.A.) 74:560-564 (1977), the entirety of which is herein incorporated by reference. Automation and advances in technology such as the replacement of radioisotopes with fluorescence-based sequencing have reduced the effort required to sequence DNA (Craxton, Methods, 2:20-26 (1991), the entirety of which is herein incorporated by reference; Ju et al., Proc. Natl. Acad. Sci. (U.S.A.) 92:4347-4351 (1995), the entirety of which is herein incorporated by reference; Tabor and Richardson, Proc. Natl. Acad. Sci. (U.S.A.) 92:6339-6343 (1995), the entirety of which is herein incorporated by reference). Automated sequencers are available from, for example, Pharmacia Biotech, Inc., Piscataway, N.J. (Pharmacia ALF), LI-COR, Inc., Lincoln, Nebr. (LI-COR 4,000) and Millipore, Bedford, Mass. (Millipore BaseStation).

[0260] In addition, advances in capillary gel electrophoresis have also reduced the effort required to sequence DNA and such advances provide a rapid high resolution approach for sequencing DNA samples (Swerdlow and Gesteland, Nucleic Acids Res. 18:1415-1419 (1990); Smith, Nature 349:812-813 (1991); Luckey et al., Methods Enzymol. 218:154-172 (1993); Lu et al., J. Chromatog. A. 680:497-501 (1994); Carson et al., Anal. Chem. 65:3219-3226 (1993); Huang et al., Anal. Chem. 64:2149-2154 (1992); Kheterpal et al., Electrophoresis 17:1852-1859 (1996); Quesada and Zhang, Electrophoresis 17:1841-1851 (1996); Baba, Yakugaku Zasshi 117:265-281 (1997), all of which are herein incorporated by reference in their entirety).

[0261] A number of sequencing techniques are known in the art, including fluorescence-based sequencing methodologies. These methods have the detection, automation and instrumentation capability necessary for the analysis of large volumes of sequence data. Currently, the 377 DNA Sequencer (Perkin-Elmer Corp., Applied Biosystems Div., Foster City, Calif.) allows the most rapid electrophoresis and data collection. With these types of automated systems, fluorescent dye-labeled sequence reaction products are detected and data entered directly into the computer, producing a chromatogram that is subsequently viewed, stored, and analyzed using the corresponding software programs. These methods are known to those of skill in the art and have been described and reviewed (Birren et al., Genome Analysis: Analyzing DNA, 1, Cold Spring Harbor, N.Y., the entirety of which is herein incorporated by reference).

We claim:

1. A substantially purified nucleic acid molecule, said nucleic acid molecule capable of specifically hybridizing to a second nucleic acid molecule having a nucleic acid sequence selected from the group consisting of SEQ ID NO: 1 through SEQ ID NO: 82359 or complement or fragment of either.

2. The substantially purified nucleic acid molecule according to claim 1, wherein said nucleic acid molecule comprises a microsatellite sequence.

3. The substantially purified nucleic acid molecule according to claim 1, wherein said nucleic acid molecule comprises a region having a single nucleotide polymorphism.

4. The substantially purified nucleic acid molecule according to claim 1, wherein said nucleic acid molecule comprises a nucleic acid molecule having a nucleic acid sequence selected from the group consisting of SEQ ID NO: 1 through SEQ ID NO: 82359 or complement thereof or fragment of either.

5. The substantially purified nucleic acid molecule according to claim 4, wherein said nucleic acid molecule further comprises a bacterial ORI site.

6. The substantially purified nucleic acid molecule according to claim 1, wherein said nucleic acid molecule has a promoter or partial promoter region.

7. The substantially purified nucleic acid molecule according to claim 6, wherein said promoter region comprises a CAAT cis element and a TATA cis element and an additional cis element.

8. A substantially purified nucleic acid molecule comprising a nucleic acid molecule or fragment thereof having a pair of defined ends, wherein said pair of defined ends are selected from the defined ends in Table A.

9. The substantially purified nucleic acid molecule according to claim 8, wherein said molecule comprises a nucleic acid molecule having one or two of said defined ends.

10. The substantially purified nucleic acid molecule according to claim 9, wherein said molecule comprises a nucleic acid molecule having two of said defined ends.

11. A transformed plant having a nucleic acid molecule which comprises:
(A) an exogenous promoter region which functions in a plant cell to cause the production of a mRNA molecule; which is linked to
(B) a structural nucleic acid molecule, wherein said structural nucleic acid molecule is selected from the group consisting of SEQ ID NO:1 through SEQ ID NO: 82359 or complements thereof or fragment of either; which is linked to
(C) a 3′ non-translated sequence that functions in a plant cell to cause termination of transcription and addition of polyadenylated ribonucleotides to a 3′ end of said mRNA molecule.

12. The transformed plant according to claim 11, wherein said structural nucleic acid molecule is in the antisense orientation.

13. The transformed plant according to claim 11, wherein said plant is a dicot.

14. The transformed plant according to claim 11, wherein said plant is a monocot.

15. The transformed plant according to claim 11, wherein said plant is a maize plant.

16. A method for screening for a trait comprising interrogating genomic DNA for the presence or absence of a marker molecule that is genetically linked to a nucleic acid sequence complementary to a nucleic acid sequence selected from the group consisting of SEQ ID NO: 1 through SEQ ID NO: 82359 or complements thereof or fragment of either; and detecting said presence or absence of said marker.

17. The method for screening for enhanced yield according to claim 16, wherein said marker molecule is a microsatellite marker.

18. The method for screening for enhanced yield according to claim 16, wherein said marker molecule is a single nucleotide polymorphic marker.

19. The method for screening for enhanced yield according to claim 16, wherein said detecting of said presence or absence of said marker is detected by a detection method selected from the group consisting of AFLP, RFLP, RAPD, SNP and microsatellite analysis.

The application's sequence listing, which the Patent Office published only in electronic form, follows.

SEQUENCE LISTING (82359 sequences)

SEQ ID NO: 1 - DNA, 280 bp, Zea mays
  unsure (1)..(280): unsure at all n locations
ctctggtgtggagggtgttcatacccgtcggagtaaaaccggagttctggttgtaatggcaccctgagtacgagtgtctgttcattgtggttgtcgaagcctgaacatttgggtatttgaagtgaatatcgngtttcttccttatttcgagcactaagactcgcctgtcggctagctgaaccgcttaaccgagcgtgagttgccttgcgcggaaggtgacgagtgaggtatctgtattccggaggcgtaagagttcctcggctcggtcgggcttgcccct

SEQ ID NO: 2 - DNA, 360 bp, Zea mays
agagagcgtgccaaaataaagttgcgggttgatcttatttatacgcctagtgcgctgaaaattgaaagaccccgctcgtcagtgaatgttgctattctagcaaagggaaggtgttttttcggaccttcggcgtaaagccttcgtccatgtcgcaatctaaatttattattttaaaataaattaatattgcgaggggctactggtgggggccttctgcttacaaaggtcctcaaaaacaggatttaacaatatttctggagtataatgtgtgagcaggtatcttcggactcaagtcggtatcacaacaggagaagaccagaatagtacgaacgttgatacagcgcccaaaatgtgaacagg

SEQ ID NO: 3 - DNA, 433 bp, Zea mays
  unsure (1)..(433): unsure at all n locations
agcttnggagccgaagcaactccagctttgtacgatttcatcagctcagaaagtggaagtgagttcaccggatgtgggcgccaatgttggggacttgttctcaaatgcttcgaattaagaacaagacaacacaaaaatgttaagtataaattcccttcgtccgctgaagcattatctccccaaggatttaatgagcttcggacgaaggccataaataaagtatcacgaaggtttcaccttcgtgatcatatttttaagacaacaatgagaaatgaaatataaagcacaaaatatattcacatattctgttatatgaatatacaagtattgaaacataacatttacgaacatttataccttcatcttggcagaaaacaataatccgggcgtaacgtgtncgtgatacaagatcgcgtgaacagtaccgggatac

SEQ ID NO: 4 - DNA, 359 bp, Zea mays
aactagctaattgatatagatccttggtgagtcgacagtttgactttgttgatcccaacccaaacctagcttttaaggaatattgccttattaatggaatactgactagaaaacctagttgccaggtgtaccggaagaaagtttattaagaataacttactatcttctatataactgatattatagcatacatgagcatcatgttatgtatggctgttaaaaacaagaaaagaattgtcaaaaaacgactgaccaccgccagactcacctgcggaatgtttatttgttttgggacaatccaatcctacaaggcataccttcttggtttaaacttatacttgtgagcttaggaagagtgg

SEQ ID NO: 5 - DNA, 358 bp, Zea mays
  unsure (1)..(358): unsure at all n locations
gtttattgatgaagcaccagaagaccaatcaaggaaggaatccatgtgggagttcgcaagaggaaagtttgcgtgtcggcatcaatgcttcttcaataagctagctgccaagcgaaacctagaagcctgaagatgattcnttgagtagccagaatcagcgttggcaatcagcaaccagatgctcctcaaagaccagattttgttgaagttccatctcctcgaagagttgcaaagtgaagatatgtagctgaagtaaagctatacccataacccttctaagacgaatctcgaggacgagatttctttaagtgggtaggattgtagcatcccacaaatcaaattctgaattttctcaact

SEQ ID NO: 6 - DNA, 449 bp, Zea mays
  unsure (1)..(449): unsure at all n locations
taagggagaacactgattgttgtgaaaggaaatgtgccctttggccatttctatgtattttggtgatggggtgccaacacaagtgcttaagtgtgaatntatgctcatggataaacaaagcgcaaatcaagagaaaaggtatgtttctaagtcctagtacattggttttgtgtactaatatacttgtctaagtgttggaaacagaaagtataagaaaagagaagaggtgcaaaaagttcggtctggagcaccggactgtccggtggtgcaccggacagtgtccggtgcgccaggctgactcggcgcgaactgcccgctctcaggaatatgccgacggcgtacggctaaaattcaccggactattccgtgtgcaccggactgtccggtgagtcaacggtcgactgagccaacggtcggcagcggaatctgcgcgcgacacgtggctggcc

SEQ ID NO: 7 - DNA, 344 bp, Zea mays
ttatgttatagtttactatcttatgggattttttcaaacaagtcaaccatgccctagaaattgtttctcaagttgggcataattgctttttagatatgactaccttgaaaagacttgcttttatgaacaaaaatatgtaaattttgtaatcgggaggtaagtacaaataattagtcactttaaaactgcacgatgtatctacaggtacaaacctaatcaaaatgcttctaaacagcgtacggagtatctatagatatgtacccactaattagacagtgttaggtacatttgtaaaaaaatatatgaatttctagggaattaatgccttctcaaatatatgaaaa

SEQ ID NO: 8 - DNA, 186 bp, Zea mays
ccagtaggctactataacagtgatatcactttatcaattacagatagtgacctcacactcttgaggtatgattcactttttaagaagaacactatatctaaagaaaggtacccattttaataatgcaaccgagcagttaattaagattacaaaaaattgaggaggggggaaatacaatttccacct

SEQ ID NO: 9 - DNA, 404 bp, Zea mays
  unsure (1)..(404): unsure at all n locations
tgggtccctaaggaaattgttactaaccttgnaggatccaacaagagttgggtacctaagacccaagcctaaatttgccttgcaggtttatgcatccgggggctcaagttggattatcgacagcggatgcacaaaccatatgacgggggagaagaagatgttcacctcctacgtcaagaataaggattcccaagattcaatcatattcggggatgggaaccaaagcaaggtgaaaggtttgggcaagattgcaatatcaaatgagcactctatctctaatgtgtttttagttgagtctcttggatataatttactatctgtcagtcaattatgtaatatgggatattatttgctatttacaaatgtaaatgtgtctgtctttataagaagtgatggttcactat

SEQ ID NO: 10 - DNA, 343 bp, Zea mays
  unsure (1)..(343): unsure at all n locations
ggagccgacgcattgcctcaccggagaagcgtattcactctcgtcggacttcggtcttccgccgccgcacgtggaccgagctaaccagtgagtcttcgtccaattccttgcacccacaacttccctgacatcccgtgaagctctctcacccgttcaattgaactatcgcgccgtgagtaggccggactcctcgccgccgacgagcatctccgcctgcgcacgtggaccgaccgactccaaccatccccgacggcgacccgcacatcgttgtgatcctcgagaccttccctacgtnctcgaccacctcaccggagcaatctcgccggcggtaagcccctccgcc

SEQ ID NO: 11 - DNA, 392 bp, Zea mays
  unsure (1)..(392): unsure at all n locations
tgcaagcttcggctatgtctaannaattggcagttaaacaatgcaatagcaatgaatgtcgtggtaacttcacacctacccgtctgtttatatagtgccgcangtgggaaggtgaatcggcaaggtctccagcaccgaacaaacagtcacccgcactcactgagcggtgggccacagggttcgagaaggtgaatcgctggcgcgcgcgtaattggtgcaagatggggcgcgcgcgacgattattttaatcgtttctcgccaacgagctcagggaaggtgttttttggatcttcggcgtcccgaagcctagaagactttttcacggatcaagctcgttacgaaaaacgatctatcaccgcgaatgggctacttgtgggggtattgcttcgtac

SEQ ID NO: 12 - DNA, 447 bp, Zea mays
  unsure (1)..(447): unsure at all n locations
tctaaagggagaacacgtgataggtttgactaacgtgcatttcgaanaagatagaccttgtgcagcttatcaagcaggtaaacaagtgggaggagcacatcacagcaagaacgtgatgaccacttcaagacccctggagctgctgcatatggacctcttcggacctgtcgcctatctgagcataggaggaagtaagtatggtttagttattgttgatgacttttcccgcttcacttgggtgttctttttgcaggaaaaatccgaaacccaagggactctcaaacgcttcctcaggagagctcaaaatgagtttgagctcaaagtgaaaaagataagaagcgacaacgggtccgagttcaagaaccttcaagtggaggagttccttgaagaggaagggatcaagcacgagttctccgtccctacacaccacagcaaaatggtgtggta

SEQ ID NO: 13 - DNA, 341 bp, Zea mays
tcagacatgcttttgtttaaacctactttgtcagaagaaaagcttctgaataaaaagtttttagttcccaagaaattcagaattaaatggccagagtgtgctctaccgctagagttgagcgtgagggaggcgaaaccgaatgagcggagactgttcctatctccgaagcgatgcaacgatccggactggtgacctctgaaggaatccgtactgccgagacagagcagactgttgccgagacagaataagttgtcgccgaagcggaagaaggaaatattgaggaagctgattccgatgatgattaccatattgccgtgccaagcaagcccagccacttggac

SEQ ID NO: 14 - DNA, 418 bp, Zea mays
actaacgcttactcacgcgccactactacaacttactgactctggtattactctcaatttgaagcgacgcagtggagttggcatatgtgctcgtttgatgcaatgaggtaaacccgttgcatattttactgaaaaatcgaatggccatgttcttaatcattctacttatgataaagaattatatgctctcatacgatctttgcaaacatggaaacattatttgcggtctaacgaatctgttattcattttgatcatgagtcacttaagcatcttcgtagtcaaacaaatctgaaccgtagacatgccaagtgggtagaatttcttgaaactttctcttacatcattaaatataaaaaggggaatgataattggattgccgatgctttgtctagacgctatgctatgttgtctcacttg

SEQ ID NO: 15 - DNA, 380 bp, Zea mays
catgcaagcttctccttgtcatcatcaatcttgttatagaaccactccgacttccagcctgctgcccatttgttccggtaactgattacaggaaactttgtggttttccgataggcgaaattatagcaaccaaaattgtcgtgcaatccatcctttctagccttcgtctgataatgcagctcgtgaacccggcaaaagctgtccgcaaatggctccactgcttggcttcggagtgcccagatataaacactaagcctaacgatagcgttaggggtcagctggtgaaaatagataccgaacctcttcagtacctctgcaataatcccatgtagggggaatcttaatccagcctttagaaagattttgaaataacaatttca

SEQ ID NO: 16 - DNA, 427 bp, Zea mays
tgtgcaaagtccactcgagctaactttcggagaaaccctaccccactgcaacatgacaccagagggtcaaactcaacgggcaatggatgaattcagaatcattgcagagcatattggtatcacggatctggttcaagaattcttagcattcaaagtcttccctactctgaaaaaatgggaaatgccaaagttaaagggggagaagaaggaaggggatcttgtccggcttccttaccacttcaaattcaagaaatattttaagaagccctgccaagagtggctggatacagttgaggtgatgtgtaatgaaattcttggaaattattcgaaaaaagaagatcaactgatgacagcagccttctgcacccgtcccaagcgaaggctgaaccgagtgcttgatgcactgggtttcgaatatcctgattat

SEQ ID NO: 17 - DNA, 211 bp, Zea mays
  unsure (1)..(211): unsure at all n locations
ntgcccacaatggcgcacaaatatacctcatgaactttttatcactgtcaggtactacggtctagggcactccatgtagtttcaagatttctgtgatcaataaataggcgatgtgtgaagcatcctcattcttgttgcatctaatactctgaaccattttcgggaatctctcatccacaacaaaaatgctatgtctctttttttgagacct

SEQ ID NO: 18 - DNA, 390 bp, Zea mays
  unsure (1)..(390): unsure at all n locations
agctggcagctcgcgcgtgcccctgctcttactgcgtctctctcatactctccctgcgtccctgctcggttcctgcgctcgccggccggaaacttcctcctgcgcgtggagcccctccagccgcgtctcctcagttcatctgcccagctcggccgcccagctcatattcctcctctctgcacgcacgaagttttccctgcgtcggcctcctgcgcgcaaagatcttcggtggccgcgcgcacgaatncatgctcgccgcgcgccccagctcacctccctagctcggtctttgtttctctgcagcgtcgtacatggcaagtcgtcgctgctccccatcgcgccatcgattccgcttgagccccttcgcggttttcgatgccccctggctcg

SEQ ID NO: 19 - DNA, 373 bp, Zea mays
cttcagccattctagcagcttcctggctcccatgaatagcaatacgcccttgatccgaacgtatattcatgcatagatatgctggatgaagaattgctttaatgcgttgagtgttctgcgaccaacgactgcattgtaggggtatttcatgtcaacaatatcaaacacaacctgttaacttcttgtattgtggacaaatccgaaggttactgacatcgcgatcttgccaagagatacaatctgcctttctccaaaaccacaaagagggtgtgtagcatcatggatcttatactatagctcttgcatttgtctaaaggccttacaaatatgatatccgttgcactgtatgattaaccacaacaatgtggactat

SEQ ID NO: 20 - DNA, 400 bp, Zea mays
  unsure (1)..(400): unsure at all n locations
cacaactattgcgcattagcctatgtcattggtctttaatgctaccctacatggcatgtttccttactcatatggggttttaggcaccgatctattaagaattctattaaagatatgagcagtagtttttagtgcctccatccataagctaattagcaaagtggagtgatttaacatgcttcttaccatattctttaagttgtgattgtgccttttaatcactccattttgctaggggcacccacatcgaatattgatcaactatagtgtcggtggtttgggtccgaccgcacacccgggggtgcccctcaaggtgtntctatgagtatgacggtgtcaacgactgtagcaaaatgttcgtgccgatcgcacgagggacagtggacaaaattacaggttc

SEQ ID NO: 21 - DNA, 440 bp, Zea mays
  unsure (1)..(440): unsure at all n locations
gtatcttcaatagataaggcagcttctgtttgtgctaaagaatttacatgttcgcaacctatcttctctaagatagctacaactccccttgcgccagagaaggcgtagacgtcccaacggtcatttaaaatttcctcgaaagcttctgcttcgttgctgatccaatcaatcgggcccttaggatcgcctctcacgaagttgtcctcgctggagtatgcgccaacattggcgaagctagtttttatttttcccacacactctatggatttttcataacatttttcttttgaagagcgaagttctacaaccattttttcccaataatttttccagtagttactggcatctcggtcagcttcggcgatagcacattntaattntgcttcggccagctgtttcccaagatcctcaatttcgcacttctgggcttcagtttgggc

SEQ ID NO: 22 - DNA, 323 bp, Zea mays
  unsure (1)..(323): unsure at all n locations
tgaagcccggaacataccagccgacccacaatcaaggcgaggtctacagcaacgcttggaacatccgacagctacgtcgcttttacccttaagatgtttccaagtcgttcatatgcctcgttntctatacatacaccaataaagtctatccgtcaaggaaaggtcagccttgcctcgacaaagcccgacccttcctcgggggctagaaggggggaccccctctgcgtcaaaattttcctcgtaaaaaagtatttttaccagaacatcttttgcgcttttcgactgcttcgatagcgggatcctgaaaacgacagggtacacgt

SEQ ID NO: 23 - DNA, 463 bp, Zea mays
tgccttcgcctcagtgtaccacccgcaattcaacggagtcgtggaactcgccaatggtaaaatcttcacagccgtcaagaaaatgctcctcgacgacaagaaaggcaagtgggccgacctgttacctgaagcggcctgtgcgctgaacacgactgagtgcagggcgactgggttcacctctttccgccttctatatggatcggaggccatgaccccgcaagaaataaaacatgggtcaccatggacagtcacgtcagccgtccccgacgtggacgagcctacttcgaaggacctcatcgacggagaccgcgtcttcgccctacaggctctaaacaaataccaagctcaaacaaaagcatggtgcgaccacacagtcatcctgagggaattcagcgaaggagacctcgtactcgtccggacagctccgacagagttctcgggcaagctatagccaaagtgggag

SEQ ID NO: 24 - DNA, 383 bp, Zea mays
  unsure (1)..(383): unsure at all n locations
gttcactatgattctgttgggatgaggtataatggtgcattctcaaagcttggagccttggaaggctttgaaaaaaagactcacaatgatgaagtggcgttgcacagcaataaccaatcaagacatgtcggatgtgtaaaaaaagagtaagcagaatactatacttagcagtcgtagccagtacagtggcagaacgaggaacagagtaatacaagtaaccaacatgaagttgtagaagtctatactctgaaaanaaacttactatggaacagaatccaaacaccaagaaaggcaaagatcccttttggctaaacaagggttggtttgcggtgagataacaacaaatacaggcactccagcattttgatatggcgaggtcaatg

SEQ ID NO: 25 - DNA, 434 bp, Zea mays
  unsure (1)..(434): unsure at all n locations
tacacaagcttcaagaactttaagtgcacaaatgttattgttttcattagcgaataaacgtcttcgagagaattaaggagtgcgaactaccgctttatttgtcgctctttggtgcttggtttcttggtcgcggtttcttcatcttcttctaagctctcaagtgaattggaaagcaaaccaaaaaacctaattatgcggtgagtctttcacgatctaactgaccctccagattaaaaagaagcactcaactggtataagtgaccatttgagagaagtaaagagttcaaaacgatccgacctatgtggccttctcaacgaggagtaagttctgtaaaaccaaatcttagaaaacaaatcgctatattcatttatgttgatcattaactcatgaattgattntggtccttcctctctctaaagttctcttgcttatc

SEQ ID NO: 26 - DNA, 376 bp, Zea mays
  unsure (1)..(376): unsure at all n locations
gcttntaaagggagagcacatgttaggattaacctttgttcattttgagaaagacagggtttgtagcgcatgtcaagcaggaaagcaagttggcactcatcatccacacaagaacatcatgacaagtgacaggccactggagctcctacacatggatttattcggcccgatcgcttacataagcatcggcgggagtaagtactgtctagttattggggatgattattctcgcttcacttgggtattctttntgcaggaaaaatctcatacccaagagaccttaaagggattcttgagacgggctcaaaacgaagtcggtttaaggatcaagaaaattagaagcgacaacgggacggagttcaagaactcacaaata

SEQ ID NO: 27 - DNA, 257 bp, Zea mays
acttcttttttctctattttttgggccctcatcggggacaacaacgctcgcgccgattctaagcagtcgcgccgtccactccttgccgtgggcggcgttgcgcgctacctctggcgagcatggactatcgcgtgtgtatggacctaacgcgtccctcactcgatagcgtataccatcgtttcgcgacgaatcggggccaccatcacatgcgttcgccccttcagcacacaactcgcatcctttgggttgtatcatcg

SEQ ID NO: 28 - DNA, 266 bp, Zea mays
  unsure (1)..(266): unsure at all n locations
acacatgctcttcttccgactagaagaactataagaagggcagggactagaagaaaaactatgcaaggagtgggattcggattgctcctcttccgactccgacaatgaaggactcgccgccaccgccttcaacaagtcatccctcttcccaaacgagcgtcacacatgccttatggcaagggagaagaaggtatgtactcnaaactctacttatgcttcttcaagtgaggacgaatctagcgatgacgatgaaatagattattcat

SEQ ID NO: 29 - DNA, 431 bp, Zea mays
  unsure (1)..(431): unsure at all n locations
ctaagcttgtacatgcctttctatttttctncatgacaggaaccttaatggaacactaccccacttaaaatgaatgaggcgagatctcttgaatcttggggatttgaactccttgaagtacctcataacaaaggtgttacgaagccttcttctcatgttgctgcttgagcaggctgcggagaaatgactgacacagggttgaattctgggacaaccttcttctcatcttctcttcactatcttcttttctcttctcacttttcacttttcactgcctctttctttctctttgctcttcccactcgaggattctatcaaagagtattaccatcatacagaggaggaaaccgaagatgttgaaccatatacaacagtcttcaacccaagaatcaccaagcattgtgatcttatgggcgacggagtggaaaaat

SEQ ID NO: 30 - DNA, 343 bp, Zea mays
gctctactttaaggacacattttcactattttcgaagagaagatgtctcaagacaaaaaagctcgtgctgagacgaagctgagtgaagaggagaagctccttgaggagaagactgctggatttattgaataaatagcaaagacaaatacataaaagattactaaggaaattctagaaggcttatctgaagatactgatgacagcgacagttatgatgcggaaagtggaggcgaagactctgaagatcggccctggcgaccaagtcatgcagtcttcgggaaatcgactatcaaacaaagtcatcttgataatatgagaggaaggtattttcgagatttgtcta

SEQ ID NO: 31 - DNA, 409 bp, Zea mays
  unsure (1)..(409): unsure at all n locations
taatgcnccctctanaagaatgtctaactntgntaagggcaaagctcccatgcctcacgataacgagggttacattntataccctgccggctatctcgagcacaaaattaagagaattcactctaggaagtctcactctggctctcatcatgcttttatgtataagagtgaggcatctagttctaggcaatcaaaccatgctaaattgcctagaaagaaaactcccattgcatcaaatgatcccaatatttcatttaagacttttgatacatcatatgttntaactagtaaatcacgcaaagtagttgccaaatatgttgggggcaaacacaagggctcaaagacttgtgtttgggtacccaaggtgcttgtttctaatgtcaaaggacccaagaccatttgggtacct

SEQ ID NO: 32 - DNA, 390 bp, Zea mays
  unsure (1)..(390): unsure at all n locations
catgcaagcttntatgtatatatatgtcgtattattacaagatccaactctaacgatctatggttctaggttgatcttggtcttgcaggcgggattgccataagactggtgtccacgctgaggtgagcggtacgggtgctgagtcccaacgggagcggnggaaccaccatccagaaaacgacgttccgcgcgctcagcccgcagcagggcgatctcagcacgagccctactcagctcgtctaatgcatggtccagctccgtgtttagcacggcggctaggttgactgtgctgctcaacctangattgccctcaccgacgggtgagacaatcacgcctcctgtgctgccagatgaacggcgggggttatacttcaggtcaagaccgtcagc

SEQ ID NO: 33 - DNA, 432 bp, Zea mays
  unsure (1)..(432): unsure at all n locations
ttccgtttaaggtcagcatggagccctctaaatttttttgggtggnggtaatacttttaatttgagaggtcctttattttgtatggtttagttttttttacttactctaacaataacttctaaattaaaaccctcaaattcattataatggtacatagaaactacttatcatcatgtaaaacaagttttcctttttttttctctttcattcttcatagtgagtcacccatgttcgccatgtacctatctgttgtgagatcttccccgctaggaagggagaggaggagccaatgaggaaggtgccctaccatcatcatcagagattgcactacagggtagtgatgatgcgtgcggcgaggagcaacggtatggttaggacaaagcaattatgtggcgagagggacgtggtggtatgccaacgtggcatgcaca

SEQ ID NO: 34 - DNA, 408 bp, Zea mays
  unsure (1)..(408): unsure at all n locations
gcttagacgtcacaaccatcgaggagactatgagccgagtggtgctatcctcagtagagattatgagcgagaggcgaggaggccgacgactctatcaagctatggtgaccacgctactacagagaagacgaacgaacaaaaaaatgagaaatgatgatgacgtgatggtcccacatgtaagggagagagatgtgatagtagtgtctagtgtgtttcttggctgagagagacttggtgaaccgattggtcttcaagtgtgaggtgagttcgttgtttcttgttttttttttcaaaattctcttttttttcgtttctttntattttattttcgaaattattttttaaataggtaattcataaaaattataataatattttcataaatagaatacacaaatttaaagaatg

SEQ ID NO: 35 - DNA, 404 bp, Zea mays
  unsure (1)..(404): unsure at all n locations
cgaanacttatcattctgatagatcgcttcagctttcatacgaatacatcacttattgcgcgtaatctctctgctggacaatacaacagagactggagtacttctatcccaatgccagaggtaatgctacccataataaataaatactcgttgcattagctgaataccgttgtcagtattcaccactctatcagttgttcgagttgagaatgttggccctcatggcctccagctccgccgtattctcgatggcgccagagaaagagggctccgggatcggttcctccaccatctgcgacagcctcacgaggctcctggtggccagcaccgcgcgcgcgtacatcgtctcggtggccctccaatacaggcattccgcggcgcgggcggcctgcgccttcagctcg

SEQ ID NO: 36 - DNA, 370 bp, Zea mays
agcttcacctagagaagttcaattgaaatttacaaaaagaattctaagatatttgaagcatacccccaatattggtctatggtatcccaaaggttcttaatttgaattaattggatattcagatttgaactatgcgggtagcagagttgataggaagagcacctccgattgttgtcagtttcttgggaggtctctagtctcatggtcctctaagaagcaaaactcggtcgctctctctacctccgaggtggaatatatttcgaccggtagatgttgtgctcaacttttgtggatgaagcaaacactattagactatgggatttctttcaagaatgtgcctcttatgtgtgatatgagagtgtcataaaat

SEQ ID NO: 37 - DNA, 359 bp, Zea mays
tggcggaaaggattgaaggctgatgtcatacagtttgtgcaacaatgtgaaatttgctaacaggctaacagtgcgaaggttcacccagctggcctgttacaaccattacctgttcctcaaagagtttgggaagatgtcaccatggatttcattgaagggctgccaaaatctgaaggctttgatacaatccttgtggtggttgataagttttcaatgtaaagacattgtttccctttgaagcacccatttacagctaagggagttgctcacgtgttcttagacactggtgaagcttcatggggtgccaaagtccatggtgtcagacagagacaacgttttcacggtagtttttggaaaca

SEQ ID NO: 38 - DNA, 51 bp, Zea mays
tgcatgtctgtaggtcctctgtttattatcacgattccgtcttcaatatca

SEQ ID NO: 39 - DNA, 397 bp, Zea mays
agcttgagaaagttagtcaccagagtactgtgtctcactgttctggcaccttgccgccactatcagcaagagacggttctagtgcccaggcttgtggtacaaatgttcagagtcacctgcttccatcatcatttgcaatccatgatggattgtcaaccatcaagagtggtggtgttggcagtggaactgatgcgataaccatagcttcgttgagatatagtgatgcgaatttgctacctgaaaactccatagcaacttccagttgtttgggtgaatcaagaaccttcaattctcttgacgatgtttgtggtgtaacccatcacaaggtggaacctttgtgaaggtatgtgttcatacttacgcttgatatttctttcaattcatcaaagggcatgtg

SEQ ID NO: 40 - DNA, 426 bp, Zea mays
  unsure (1)..(426): unsure at all n locations
tgcaagagacacctaagtgtgtggtgatccttgcggcgtcttagtgacccaagtgatcaaggagaagcctcgacccatctgtgtgaccgattgagataggaaaagggttgaaatagacttggcctttgtggcctcctcaacggggactaggttctttggaaccgaaccttggtaaacaaatcaccgtgttcacttgttgatcttcacttgatttatttcccctcttttctctctctaaaagttcccttgctaatattgtttgagtttgctcccaaacgttatccgcattgattgagcaactctagcaaagagaactatcttccgcactccaatataattctaacactaaccccggccttagtgcgtgttaaagttataaatntaggctttgctattcactcctttagcgatttcactacacttaag

SEQ ID NO: 41 - DNA, 392 bp, Zea mays
cctgagagatcccaacctaccaatttagcatgtgtctgtagaaaccaaattaatatgcacatgttgaatgtctaacaattcaactgaaaaataatcccattggatttcattcatgacatgcattttgtactgttcagccattctcccaacactatggcaaattactacctaaacaatagcctataaaaatcaggaaaccaaatctagttacggaaaaatttgaaaccaaacatagagcgttcagagtttatggtgatggtacttatactatatagtagtgtgagtgcatcatgcaatagagctgaaataaaatctgcatagtactttgatatttcaatgtaaaaaaaggatatacctctttcacttgctttccaatgcacaaattgagattt

SEQ ID NO: 42 - DNA, 438 bp, Zea mays
  unsure (1)..(438): unsure at all n locations
ctgacatctgggaaaatggcggccgatatatggcgcacgagataataaaaaagagtgaaaaagattctcatgatgcaaacagaagcgacaaacgcagctgagaaagctgcggaacttgaaagacggataggtattgcttaattgcttttgactttgtgttttatttttgtgacttcgaacttacttatattttgtatcgcagctgagctatctccttccccggagcccttcgagccaacgaccgacccacaagcaaagagagaggaagaaattactaaaatggccgaagctattntagataaagctatttctcaactgttaaacgaagctgcggaagtagttttaaaagaagaatagctactattgtaaaaacatttggaatgtaatatttgctgaacaaagtgtgtacgatctttataattttgaatgtaatatatg

SEQ ID NO: 43 - DNA, 376 bp, Zea mays
  unsure (1)..(376): unsure at all n locations
gaatacattctatctcaagaaaaaaaaaactcgtccggggagggaaagaccgccctcccggtattatatatattnttttcgaatcacgcaggagaactgcgtgtcattttattaagaggaaaaaaccgagtacagctcgaggaaagtatcctcanacaccatacaatactcagaaaataaaaaaataaactaacaagtaacaacaacataacaacccagatacaagtctagatgaggggtcacctacgggataagattactcctaagaaggagctcctgaagcctcgaggccccagccaaacaccacatatatccgttattagatacctangacagaactgactgcatatgtggctgggtagcatcgaacacacat

SEQ ID NO: 44 - DNA, 365 bp, Zea mays
catcatccgcataagaacatcatgacgactgacaggccactggagctcctacacatggatctattcggcccgatggcttacataagcattggcgggagtgaaagggaattaagcttacacctatttcctaaactaattttggtggtttaattgcccaacacaaataattggactaactagtttgcccaagtttataagttctacaggtaccaaaggttcacaataagccaataaaaagaccaaaaaaagggtttaacaaaaggagcaagggataaccgaaggtagccctggtctggcgcaccggactatccggtgcaccaggggactccaaccaaaacttcgcaccttcacgaaaacgcagagcg

SEQ ID NO: 45 - DNA, 300 bp, Zea mays
agcgtgacccgcttcctctctagagcgcatgctcccctcggggccaaggtcctcggctgaaccaaggtgcctcgtctgagccgaggtgcctcggtgggccggggtgcctcgggccaaccagggaccttggatgagccgaggtgctatgctcggcgagcctttcggctcggcgtgcgtcttttgacgaggtgatgcagctcggaaaacgtctgggaccgtgttcccccgagtattttaccgcttgccgatctcttgtacgtcgacgatgggctaactcacccgaaactgtttcagcccgac

SEQ ID NO: 46 - DNA, 284 bp, Zea mays
catctacccatgcgtagatttttagcttgcacagaaaacacatttgtaccaaattacacgaggaactctaagttgcctttaaacaaaatatctgcatccatcactaaccttgacgcccaatgcaatggattgaatcaacttcacccctggatgatttattgtagttaatactattctcatcctacttttagtttgaggacgtcaatttcttcctgcctttaactaacagcgaacccctctgtgcttgtgtgctggtgatatgcataccttctaaataacacact

SEQ ID NO: 47 - DNA, 264 bp, Zea mays
  unsure (1)..(264): unsure at all n locations
cttatgcagagttttcctataacaacagttaccaggccagtttgaagatgtcaccgtttcaagcgctntatggaaggagttgtagaactccgttgcaacgggatcagcctggagagaagcaagtgtttgggccagacattttgcttgaagccgaagagaacatcaagatggtccgagagaatctgaagatagcgcaatcgaggcagcgaagctatgcagacacaagaagaagagagctgagtttcgaagtcgagactttgttta

SEQ ID NO: 48 - DNA, 354 bp, Zea mays
  unsure (1)..(354): unsure at all n locations
ttcttcgtttttgcgggctccttttccttctgaaaaagcttcgtcagatgtggccccagtggactcagcttgacaggcaaagattcagtcattacctttaaaatttcctccacgtccgtggtagagggtgttgcacctgtttcttcttcttcgtcaattgccttctgcttcggagctgtagcttttctcttcttcgaagcatctattttcggctcacgcttcagctttttctttttcaattgttcttcatcgtctttattcagagcaccagccactctctttcttttctgcccttcggcatacttgtctagccactcgtagtcgggatactcaaagtccagagcatncattact

SEQ ID NO: 49 - DNA, 418 bp, Zea mays
  unsure (1)..(418): unsure at all n locations
gcatgcaagctttgtcttttgcaaatactttattctttactccatgacacattattgcctacggactatctgatggtaaaacacctgaataacgtctcacagtccgtcggtaaaaagttntaacgacagatcatgtgtgtcagcgaaagtcctgtcggcaatacgctntaccggcagacatatatgtaccgacatactatctgtcggcaatgtttatgtttttgccgacagacatatcattgccgtcagacatacttttgccgacagacatatatgtgtcgacggcttgtgtgtcgctaaaagtctatatgccgacagattgtctgatggtattccctatgtgcagctaaanaaaaagaatccatgcatacaaatatatgctaatgaaacaaataataaaccgactatgatgcacatt

SEQ ID NO: 50 - DNA, 361 bp, Zea mays
tatcaaatggacgtgaagagtgccttcctatttgtgctctataatcgagacgtctatggtgagcaaccttcccggctttgaagatagtgagtatcttaaccatgtgtttaagccctcaaaagcgctttatgggctcaagcaagccccaagagcatggtatgaatgcctgcgagattctcttatcactaatggcttcaaagtcagaaaggtcgatcctactctcttcactaaaactatcacaaaagacttgtttatatgccaaacttatgttgatgatattatatttgggtctactaacaagccatcttgtgaagagtttattctgatcatgatacacaaattccagatgtctatgatgggg

SEQ ID NO: 51 - DNA, 434 bp, Zea mays
  unsure (1)..(434): unsure at all n locations
gcaagcttctaaagggagaacacgtgataggtctaaccaatgttcaattctaaaaagatagaccttgtgcagcttgtcaagcagggaaacaggtaagaggctctcatcacaccaaaaatgtgatgacaacatcaagacccctggagctgctacatatggacctcttcggacccgtcgcctatctgagcataggaggaagtaagtatggtctagttattgttgatgactnttcccgcttcacttgggtattctttttgcaggataaaactgaaacccaagggaccctcaagcgcttcctaaggagagctcanaatgagtttgagctcaaggtgaagaagataaggagcgacaacgggtccgagttcaagaaccttcaagtggaggagttccttgaggangaagggatcaagcacgaggtctccgctccctacaca

SEQ ID NO: 52 - DNA, 412 bp, Zea mays
  unsure (1)..(412): unsure at all n locations
ttagtaattagagagagagaattgntgcgttcatttgagctcttgcgcttggatcgcttcttttctttctcattctttcttgtgatcatctcaattgtaaccgaggcaagagacaccaattgtgtggtggtccttgcggcgacttgttgtcccgtttgattgagaagagaagctcactcggtccgagtgaccgtttgagagagggaaagggttgaaagagacccggtctttgtgaccacctcaatggggagtaggtttgcaagaaccgaacctcggtaaaacaaatcatcgcgtctcgctctttatttgctcacgatttgttttgcgccctctctctcggactccgttatacttctaacgctaacccggcttgtagttctgcttaagtttgtaaatttcagattccgcctat

SEQ ID NO: 53 - DNA, 433 bp, Zea mays
agcttgtaccttataacaggaggatacattatagctggagtggtgtctgaaggcttttgaactgcttgaagcattagtgtagctttggtgcttttgtgactgatcagctctggagcagctagagtgatatagttgtgggcttttgaacaatagttggagtgatatgaaacattagtgatctagttgtgaatgatattataattgtgatgcttttgtgaatatataattgtggtgcttttgtgtttatgtgatggatctatgactgtggtatactgattaactgtgtatgtctttatgatttgtgtataaaaatcagtgatttgtggtgcttaattaaatgtatattattattaataacaactggtaaaagggcgactttctgttggttgctatttgtatagtatgacgacttacggttggttggtaaatctat

SEQ ID NO: 54 - DNA, 452 bp, Zea mays
  unsure (1)..(452): unsure at all n locations
tgccttcgcctcagtatatcacccgcagtccaacggagttgtggaacgtgccaatggaaaaattttcacagctgtcaaaaagatgctcctcgacgaanaaagggcaggtgggccgatttgttacccgaggcggtctgggcgctaaacacgactgagtgcagggcgaccgggttcactcctttccgccttctatatggatcggaggccatgaccccacaagaaataaaacatgggtccccgcgaacagttccgtcagctgtccccgacgtggacgagcccacttcgaaggatctcatcgatggagaccgagtcttcgccctacaggctctaaataaataccaagcccagacaaaagcatggcgcgaccacgcagtcatcccgagggaattcagcgaaggggacctcgtactcgtccgaacagcttcgacagagtccaggggcaagctggagcc

SEQ ID NO: 55 - DNA, 407 bp, Zea mays
catgcaagcttctcggtctgctccacctgtttgattaactttaactcaatcaacaacaatttcataattgacaaattacatctactttgtatgatgtcgtaccctatcatgaattgtcatcccactttgatttctagtttcaatactggtgatacatccacaaaaattgctcactacatcttggatagaactccaatgatgcaacaatgatccctcactacgttctgcaaaatgtcctcggttatcctcaaagaataagtagacccttctccaaaatgtgcctctagtttgatttgtcccttgagtaggatctgtactaacattcaaccaagcggcaacaagaagtctatcttcatcttcagtaacagttttacccttttgctttaaggttgacttcgatgacttgg

SEQ ID NO: 56 - DNA, 388 bp, Zea mays
ttcacaatgtcctctaattccttttatacacagctttagttataagtactgccaaaggactcttttgacaactgaatccatgcttttgaccagagctagaactctcctcctgaatgtttggcaagcttgctgtctgagaaaataaaggattaaatgtcaagtatccgtaagaaaacagcaggcccatttcctcgccaagcaaaacaaatatctacattacctaaatcattctctaccaacgccattgagccacaaacaagttgactgattagaatatgttacaggccccaaaaaatattcagcttgcataatggcattaaactggccattatacaaccacatatcatttttcatcatcacactactctaatcatattctaatcaataa

SEQ ID NO: 57 - DNA, 353 bp, Zea mays
  unsure (1)..(353): unsure at all n locations
ataaaaatagctagcttattaatagtacgagtatgacataacaaattaccggtgtaacgtatgaaaatatttgataattattgttaaactataatcttctaagattgacgacatgagcgtttccttgctaaaagaagggtaactggttacatacatgcacatttgtttatttccctaaaagacaaggtgtcatgtgcaataacactgaaactgagtcccccctcttgtccggccgccgctgccagcttgtatctcgtaatatcttactcattntttttccgttcaaaaagagaagcttttcattntacacctcaccttcccgtnccaccacgcacaaaggcgacgcgagcagc

SEQ ID NO: 58 - DNA, 351 bp, Zea mays
ctcagctgtgcgcacacatctgaatttcagttcagcttatcacccgctgacagcaggccagaccgcaaggactaaccaaattcttgaagacatgtcgagagcctgtgcgttgcaagagcagtccggatggcacaagagattgtcttatgcagagattttctataacaacagttatcaggccagcttaaagatgttaccatctcatgcgctttatggaacgagttgtataactccgctgccatgggataacactggagagaagcaagtgtttgggacagacattttgcttgatgtcggacagaacatcaacatggtccgagagaatatgaagataccgcaatcgatgtagcg

SEQ ID NO: 59 - DNA, 419 bp, Zea mays
  unsure (1)..(419): unsure at all n locations
agcttgacaacatcatttgacatcttacattttantctgagatcaagaatatttagttcattcctcaacatgcaaaagcgtgtcttatcaagtggcttagtgaaaatgtccgctaattgatcttccgatctcactccttctaaaatgatatctcctttagcaacatcatctctaaggaagtgatgaaggatatcaatgtgcttggtgcgagagtgttgtacaagattattagcaattttaacagcactctcattatcacacaacaaaggtaccttttctagaactacgccatagtctagaagagtttgtttcatatataaaatttgtgtgcaacaagcacccgcgggaatgtattccgcttcggcagttgacaagggcaacactatttgcttttggatgtccatganactagtgatcta

SEQ ID NO: 60 - DNA, 401 bp, Zea mays
ttaccaaaggacgtgaagagtgcctttctcaatggaccgatcaaggaagaggtctatgttgagcaacctcccagctttgaagatagtgagtaccctaaccatgtgtacaaactctctaaggcgctttatgggctcaagcaacccccaagagcatggtatgaatgcctaagagatttccttatcactaatggcttcaaagttggaaaggctgatcctactctattcacgaaaactcttgacaatgatttgtttgtatgccaaatttatgttgatgatattatatttgggtctactaacgaatctacatgtgaagaatttagtacgatcatgacacagaaattcgagatgtcgatgctgggggagttgaagtacttcttgggaatttaagtgaaacaacttca

SEQ ID NO: 61 - DNA, 391 bp, Zea mays
  unsure (1)..(391): unsure at all n locations
gcttgtggcgccctngggtgtcttgtcgtatccgaagtaccaagtctcccacttggaagtcttggggccaaaccctccgggcgtgctagcgtcgcagagactgctgataccgcgccgagtgtagtaaggccacgtcccaagcctcttctagctgatccaatgaatcctctcggctggtctggttgctttggtcgtcgtaagcctttgtcctcggggaaccatattccaagtccgtgggtaagatagcctcggccccatagactaggaaaaacggcatgaagcccgtggcccggctcggcgtcgtcctcagactccaaaccactgagggtagttcttttatccaccgcttggccaaacttgtgaggtcatagtagatcctcggctttagtcc

SEQ ID NO: 62 - DNA, 464 bp, Zea mays
  unsure (1)..(464): unsure at all n locations
actaagcttgacagatgagtccaaaaggtacaagtaaaaatcttatcacgatcactgaccatggactggggcaacccatgaagcttaatcacatgatctaacaggagctgagctacttgagcagctatgaatgggtgtttcaaagccaagaagtgagtatattttgtgaaacgatcaacaaccaccaaaattgtatcataactttcagatttgggcaacttttcaataaagtccagtgtgatatcctgccaggcacctgtaggaacaggtaaaggctgaagcagccctgcagggtggattctttcacttttggcctgctgacacacctggcattgcttgacaaagttctccacatctccttttaatcccttccaatagaacaactttnttatgcgttgatatgtcgcctgaacgccagaatgaccaccaagggcactgtcatgcatagctgatacgagcttggt

SEQ ID NO: 63 - DNA, 421 bp, Zea mays
  unsure (1)..(421): unsure at all n locations
gcttacctttagtcttatgtaactaagtgttagaagacttttgaaaagggggaaataattaacaaaaagagggaatcataagaaaaacataagatgtagaaagttgatgagtgcatactatgccatgagcatcctgtttattctaagacacattgtaccccatgaatagtatgatataagttgtatccatactgtgacccaaatatgtgcttttggcattagcgtccaaaattggtattttttgaaatgcatatatttagggggaggaaactatgtcataggattcaaaatcttatttatcaaatcttatgtaagctttaaatgtgttgtcatcaatcaccaaaaagggggagaatgaaagcgcattcatcccttttggtgagtntggttgattggataacaacacatttaaagatctaac

SEQ ID NO: 64 - DNA, 401 bp, Zea mays
tgagctggaatgtaatgtaaagcatcagaatcgatgagggtaaaatggaatgcgaacacttcaaaaaattgcacaaatacaaatacaaatacatccataaaaaatgtagaacctttttatctattggcttttctgcatcccgtgactccaacaaggcagtagctggtgttccgggatgactcttgaatgcaagtgattccccatcatccaacttccgtttgtatgatattgttgatgtggaactgtcagcagtgttcctatcagtgtccctgttatgcagagaaaacctgacagtatgttttttggtaactgtactgtccactgtgacatcttccaatctcactgtgacatcatcagacctttgaattgtccaccatatgatttgtattaacagaagtagt

SEQ ID NO: 65 - DNA, 402 bp, Zea mays
aaatagaaaccagagggcaaccatattttcctagcatgcttaagtcatgtagttcacaagaaaaatctattaacccataatccaggggaaagaaattacactctcaattattcatgaaaaatagagaaaactctataaagtcctaagaaaataatcctaaggtgaaaacaccccaaaccttgggataattaatgttttgttattaagaacataggaaaaaatatgaaatctgctgtttgacatttttcaaataagaaggtaatagaaagtgcctttttgacattaaactttagaaaatcacaactaaataaccaccagttaactttctgtgatttttggcacagaagcttgttattactggtagatgccaacaaaaatgacccttatgacagaacccacccc

SEQ ID NO: 66 - DNA, 451 bp, Zea mays
tctatagtccacacacattcttctttgaacatctttcttggtcacaaatagaactacggctccccatggagacgaactggggcaaataaaacttttttctaataattcttctatttgtttcttcagttcaattaaatttttgacatccattcggtaagctctttttgaaattggtgccgttctgggtaatagttcaatagaaaactctatatcacgattaggtgacatacctggtaattcttccggaaatatgtctgggtattcacacactattctgatatgttccaaagatctctcctccaactgattatcattgcctctgctgttgctggcatactgacattgacttccattctttctccttgcggactggttaatgtaaccatcctcttggcacatgatattactccatcatacatggtcaagtagtctattccaagtatcacatcga

SEQ ID NO: 67 - DNA, 323 bp, Zea mays
ctcacgcagcgtaccaaatgtggctggtgcgagttcttatttatatgcttggcacactccaaattgaagggtcccgcctgtcattgactgctgctattctaacaaaggggaggtgttttttccgaccttctgcttaaggccttcttccacgtcgtagtctgaattccttatcttaaacaaattaatattgcgaggggctactgttggggtccttcctcctccgaaggtcctcataaacgtaaaacaatgtcttccaagcatgcgttatggacatgtacccttctactcaggttaaaagcatatacgatgacaatagcatgatc

SEQ ID NO: 68 - DNA, 352 bp, Zea mays
tgcatagcttatataccaccgaaatatttgtgaagaagctccaaagtcgttcctaaggggatgcagagcttaaagactccaaagacgtccttaaggggatgcagagtcttgggtgttccagtgtgggcatgtgtgtgtgatcggcataaccatcatattgcatcatatcattgcatcatttcgcataacattacatcatacatcatatcgcatcaacgacaaaaagattggatacgaagcagatcttcggcaatgatttgttgaatgaaaatatgctgatgcacgaagcaaaccttcggccaatacaattttatcacaacagattcgccattaaaaagagcttctttcttta

SEQ ID NO: 69 - DNA, 417 bp, Zea mays
ttggcagcaaaacagtgcaatagcaatgaatgctgtggtaacttcacacctacccgtctgtttatataatgctgcaggtaagaacgtgaatcgtcacgaattttacaccaagcaaacagttgctcccaccccctgaacggtgggccgcaaaaaccagaatagtgaacctgcatggtgggaccgctacgcgctcgaaagctgtatcgtttctcgacaacgagctcagggaaggtgtttttcggaccttcggctttctgaagcctaagagaattttttcacggatcaagctcattacgaaaaacgatctatcaccgcgaaggggctactgttgggaccatgcctcgtccgcgaaggtccttgcaaaagaaacagcttctgctgaagctgctcgtacgtgacgccaaggcatcattcatg

SEQ ID NO: 70 - DNA, 437 bp, Zea mays
  unsure (1)..(437): unsure at all n locations
agctngtagcggcgaaatggcgtgttattattactctcgtgcgcgcgccaaattgggaattgcgaatcgagcaggagcagttgattgagcctgattgctcccaaaataaacatgccctttctatgggccgacaacccatgtacaataacgggcgtgggccgtgtggcctcagggctcaggccctcgctcaactattgaacaaatctgattcgcctcactcagctgagaaactattttaattttaaagctgtccgcagtagtataaaatagagaatttatacatgatctagtatatagatccatctaataatatgtgttggttgtttaactcttaatatattcaaattgaattatataatataagggtaaacaaacaagcctaagttttgaaacgtttgaatcacctctataagcgggtttggaagcggatttgacta

SEQ ID NO: 71 - DNA, 370 bp, Zea mays
acactagctgtcactgatcccaccgtacaaccttcaaccaatttattttttcacggccgggcaacgcatgagctattctacgatataacggagctgttctcattgaccaactattaatgggtcgtatccaagcccaaaagcgacgtttttgtgctaaacgatcaatcatcacctctcatgtatcataaattcgacatttgcgcgacttttaattaagttagcgggatctcctgccacacacccgtacgaacagcgtcaacgggtgaaacccgcgactgcagggctggatctcttataacttttggcgctgctcgacacactcggcattgtttgagaaacgtcttccacacttccttataagtccttccaa

SEQ ID NO: 72 - DNA, 438 bp, Zea mays
  unsure (1)..(438): unsure at all n locations
ctattgacaatttctgaatagctagaccggactgaagtgtgggccttgactgcctactttantttttttgaaatatttttgtttttatatcttcggaaattttcgaaatttaaaatcggtaaattctgattaaattcggtaatcgaaggaaacggtcggtaaaaggttgtaccgatttcgataccaattccagtataaaattccgacaaccgatttcgattccgaaaaataccgttattgttgaatccggtcggaaaaatcgaaaacggtatccgaaaaaccgaaaaattctgaaaccgttttcaaccttagatgagaccacacaccttagctttgtttggcgcaacgtagtctacattccgatacgttccgatatctcgccagatcctgtcgagcgcataaaggtcgcataccagcttccatacttttccgcgattt

SEQ ID NO: 73 - DNA, 409 bp, Zea mays
  unsure (1)..(409): unsure at all n locations
agcttatgaagattcttcatcccaacatgttctattcggcggngccagagccaacccatgttagtcttagcaattaagcaagtgtcgagttcagctctatcaaaatctaccaagtatagctgaccctccaacactcccttaaatgctattgaatcatcacttcttctaaagacagtgacacctacatcagtaaagagacagttgtagcccattttgcataattgagatacagaaagcaaattgtaatctagtgaatctacaagaaaaacattggaaatagaatggtcaggagatatagcaattttacccaatcctttgaccaaaccttggtttccatccccgaatgtgatagctcgttggggatcttggtttttctcgtaggaggagaacatctttttctcccttgtca

SEQ ID NO: 74 - DNA, 447 bp, Zea mays
tatgaagaatcttcattccaacatgagctagtctgcggtgctagagccaacccatgttagtcttagcaattaagcaagtgtcgagttcagctttatcaaaatctaccaagtatagctgaccctctaacactcccttaaatgctattgaatcatcacttcttctaaagacagtgacacctacatcagtaaatagacagttgtagcccatttgacataattgcgaaacagaaagcaaattgtaatctaaagaatctacaagaaaaacattggaaatggaatggtcaggagatatagctattttacccaaaccttcgaccaaaccttggtttccatcctcgaatgtgatagctcgttggggatcttgcgttttctcgtagaaggagaacatcttcttctcccccgtcatgtggttggtgcacccgctatcgatgatcaacttgaccaccg

SEQ ID NO: 75 - DNA, 433 bp, Zea mays
agcttctcctcaattggcgccactcctactctctctcgtatatcatcattccggactcggtctctccttgtgtggccacatatccagcgcaacatacgcatctctgccacgcatagttgttggacatgtcgtcttttagtgggccaacattctgctccatacaacatagccggccggattgctgtcctgtagaatttgccttttagtttgtgtggcacccgggggtcgcataagacacccgccgcttgccgccacttcaaccatccagctttaattctatgactgacatcctcatcgatgtctccatccttctgaagccttcgggataaggcccacctcccaaaaattaaacaacatcattttcaactcctcaacctcaaaaagattccacagatccccctcaccaatacttcatccgaacgacgaggacagc

SEQ ID NO: 76 - DNA, 393 bp, Zea mays
  unsure (1)..(393): unsure at all n locations
tgcatcanacaagggcacaggtccattttaccactactggcaagagttcatgtacttccttgaggagaactggaagcgcatttgggttatgactctctggctctcaatctgcattggcctctttatatggaagttcatccaataccgtaatcgagctgtatttcacatcatgggttattgtgtgaccactgcaaaaggtgctgcagagactctcaaattcaatatggccctggttctttttcctgtttgccgaaatacaatcacttggattcgatcgaagacaaagatcggagctgttgtacccttcaatgataacataaacttccataaggtaacacatatgtactcacttagtattgaacataggatgaacctttgtattatgtgggagta

SEQ ID NO: 77 - DNA, 437 bp, Zea mays
  unsure (1)..(437): unsure at all n locations
agcttgcgactggcttatcgaagcaacatattcttgcaggttggtgcccacatattctggtatgtaaggagagtggcacgaagcagtatgtaaaaccagcttcggctgattctgccgagcttctgcttcggcaatctctttttgcttcagaatagtgatctggcacgttcttgtagtgtggcccttgtcctcaccacagaataagcaatagattttcctgggctgatccccatatcttcctccgaagcccctgccgcttctgccccttggagctggtggtctgaaggagctttgctgctgtcccgaagactatgaggtgtgttgtggcctctgaagctagcttcctttgtcatcattctgactggagctgtgtattgatctgacatgcctagggtggattctcccttcanagcccctagtcatctcagaaaatatgt

SEQ ID NO: 78 - DNA, 353 bp, Zea mays
  unsure (1)..(353): unsure at all n locations
tctaaagggagaacacattntacgattaacaaatgttcattttgagaaagacaggatttgtagcgcatgccaagcagggaagcaagttggagcccatcatccacacaagaacatcatgacgaccaacaggtcgcttgagttactccacatggatctattcggcccgattgcttacataagcatcggcgggagtaagtattgtcttgtaatagtggatgattattctcgcttcactcgggtattctttntgcaggaaaaatctcaaacccaagagaccttaaagggattcttgagacgggctcaaaatgagttctgcttaacgatcaagaaaaatagaagcgacaacgggacgg

SEQ ID NO: 79 - DNA, 215 bp, Zea mays
tggcagccctagatgctaaaccatctaatcaatctgcaatcccgtgtgtataattcgtacgttttttcaccgggatgaaatcaacaattaattatactacctccgttcataaatgtatgaagcaattgggtttttttataaaactttgaccattcgttttattaaaaaaaaataagctatcatgtatttggttgccatttattttattaaataaa

SEQ ID NO: 80 - DNA, 359 bp, Zea mays
tgtacttcatagatgagagtcacagaaggtagacgtcgtttatccaaagaggaatgccacaaacacacgagggctatgtgacctccattggaggcataccattttccttctagactcatatctctagaactatttttccactaaaagacctttcaaactcttgtatctgaaccacaaatgccttttatatatctatcgagcatcacagcatcgcaattgcttccacgagaagaatatagcattcgcgtgtcaatgctcaactggaaacggatggaactatatgatcaagatcatgactacgcaccacagtgcacgcatagcgatatgtattctgtgatgtacagtgtacacatacctat

SEQ ID NO: 81 - DNA, 409 bp, Zea mays
  unsure (1)..(409): unsure at all n locations
agcttaactcggttcaaacctgacaagtcttatttttaagcttttagcacttaaattcttactttttatgcaattattggttcttgaaatatgcatgaggtactgcacttangtggagtattcaaaactcaaatcactcatganaacccctaatgcaaaccaagatgcaaatttcaccatttgcctattttctctaaaaattatctagcctatggcgaaatattttgaaaagtctatgagggtgccaatacctgtcccaacaagtgttattttgtgtgattataagttgggatttggtttggttgggagttagatagaaaaaattcaaatttttccaaactctcctctgtctgggctcaccggacagtccggtgtgcaccggacactgcactgtgcaatgtccggtgca

SEQ ID NO: 82 - DNA, 397 bp, Zea mays
  unsure (1)..(397): unsure at all n locations
ntaccaaatggacgtgaagagtggccttctcaatggactatataaggaagaggtctatgttgagcaacctcccggctttgaagacagtgagtaccctaaccatgtttataggctctctaaggcgctttatgggctcaagcaagccccaagagcatggtatgaatgcctaagagatttccttattgcaaatggcttcaaagttggcaaggccgatcctaccttattcactaaaactcttgagaatgatttgtttgtatgcgaaatttatgttgatgatattatatttgggtctactaacgaatctacatgtaaagaatttagtaggatcatgacacagaaattcgagatgtctatgattggggagtcgaagtattttctaggaattccagtcaagcaa

SEQ ID NO: 83 - DNA, 372 bp, Zea mays
  unsure (1)..(372): unsure at all n locations
cacacatagctcatttgaataccttngatcatatctcttttatatgctatgactaatgtgttttcaagtttatttcaaaccaagtcataggtatattgaaagggaattggagtcttcggcgaagacaaaggcttccactccgtaactcatacttcgccaccactccgagcaactctctcctctttgggggagaaatgagcatcaaggaaaaggacttcatccttgggggagagagtaaaagctcagacgcaaaaggacttcgtctttggtataatcctaactcacttatttatgaccaaaggggaagaaagtacttctagggctctaatgattccgtttttggcgattcatgccaaaaagggggagaaatga

SEQ ID NO: 84 - DNA, 332 bp, Zea mays
aatgattatgtgatgatcttaaaatcattttaaaccaaatatgaaagagtcctacacaccatgcttctgtcatgagaagtaacaggaagtagagggtatctatgtggttttggcactgtatgagttggtgattttgatgattcatcctctaatgcagaggaaaactcctctgccttgcgatcacaatcatttttgtcgtttttctgttgtgctggcaagtccagattttgcatatgtttaacaacaccatctggtttgttttcttttgaatttgcaactttgtcactacctgcacatgaataattcttttccttataatattgcaacaaatc

SEQ ID NO: 85 - DNA, 404 bp, Zea mays
ggagagcacatttacgataacacacgtccatttctagaaagacagggtttgtagcccatgccaagcaggaaagcaagatggtgcccatcatccacacaagaacatcatgacgaccgacaggccactcgagctcctacacatagatctattcgacccgatcgcttacataagcatcggcgggagtaagtactgtctagctattgtggatgattattctcgcttcacttgcgtgttctttttgcaggaaaaatctcatacccaagagactttaaaaggattcttgagacgggctcaaaatgagttcggcttgaggatcaaacagattataagcgacaacggaacggagttcaagaactctcaaattgaaggcttccttgacgaggagggcatcaagcatgagttct

SEQ ID NO: 86 - DNA, 431 bp, Zea mays
gcatgcaatgcttgatacatggattaaacatcgccattcacttggcgtcaagagactgtttgtatatggagattctctggtagtcatcagccagataagcaaggaatgggattgttcaagtgattcaatgggaaaatactgcgccgccgtccgaaaactggaagataaattcgagggtctggagtttcatcatatataaagagattggaacacggcggccgatgtactgtccaagctcggatccggtcggactcatgtcccgcccggggtcttcgtgcaagaaattctccagccgagtatctcgacggatcaaatagaagagtgcaacattatagatcaacccgagtcagactctgacgattggagacagccgattattaagtttatatagaatgaagaagaaccagatgactagaactctgcagaacgca

SEQ ID NO: 87 - DNA, 398 bp, Zea mays
caggtgttgtatcgcatgccaagcatgaaagcaagtggagcccatcatccacacaagaacatcatgacgaccgaaaggccacttgaactactccacatggatctattcggctcgaatgcttacataagcatcggcgggagtaagtattgtcttgtaatccgggatgattattctcgcttcacttgggtattctttttgcaggagaaatctcaaacccaagagaccttaaagggattcttgagacgggctcaaaatgagttcggcttaaggatcaagaaaattagaagcgacaacgggacggagttcaagaactcacaaactgaaggccttcttgaggtggagggcatcaagcatgagttctcttcttcctacacgccacaacaaaatggtgtactgga

SEQ ID NO: 88 - DNA, 435 bp, Zea mays
  unsure (1)..(435): unsure at all n locations
gcccgctggaactaatcttctgttaaacccgacctcgctgcaacatgacacccgaaggttcaacacaacaagcaatgagtgaattcagaattattgcagagcatatcagcacaagggacctggttcaggagtttttagctttcaaagtttttcccagtttgaaagaatgggatatgccgaagctacagggggaaaagaaagaaggtgaacttgtacgtttaccttactatttcaagtttaaaaagtactttaaaacaccttgccaagagtggctagatacaattgaagtaatgtgcaatgaaatacttggcaattattccaaaaaagaagatcaattgatgaccgctgccttcggcacccgtccgaagcgaaggcttaatcgagtgttggacgccttgngctttgattatcctgattatgataatctgaacaaag

SEQ ID NO: 89 - DNA, 215 bp, Zea mays
tatatgaaaaataactccctcattcattataatttcgttgatgggttcgattttttgaaaaaaaaaataaagagtcgtaattaaaaaaagtcacaatatattgaaccaagataagttaagataactgccatctttgaagatggtattacaataggtgacgttagatgaaaaataaaactctatatctcttaacttacctgaatcacaatcaattt

SEQ ID NO: 90 - DNA, 365 bp, Zea mays
  unsure (1)..(365): unsure at all n locations
gcctatgctcctatgtgaagatatagaatatcacagggtactgctggggtcttaattatctgatgagcaggaaaacactctgataacgtttttgttcacaacaaaaatggcttcgcttgtacaaccaatgatctttgtggtgtcaatagagatgtcatcgagcattcacttaatgtggatccatctttcacgccaacgaagcaaatacttccaaagatgtctgatgatataactgaacgtgctcggaacgaagtaaagagacttctcagtgctggcgttgttgggggccttcngcttaccaacgtcctcacaaacacggattgacagcattcttgactataatgtgtgaacacgtctcttccgac

SEQ ID NO: 91 - DNA, 334 bp, Zea mays
gaatcgctgggatgactttcaaccattaggttgtgatttttttttcagacgactgaaacccagcgtctgctaccaattggtgctgaattgtgtacttcatgggcttaacacttgcacggttcagaaaggaaacatgtttataaacggaagcggagctgcacgtgtctgctgcaatatgaaacctattccatttcatttggttacatcaaaggttgacccccaccttgaacaactacatgtgtttgcttccattaattggttctaatccacatatgcacactaataaatcgttctagtgcctttgtataataagaccagagtctatactctatat

SEQ ID NO: 92 - DNA, 430 bp, Zea mays
  unsure (1)..(430): unsure at all n locations
agcttctaaagggtgaacacattntatgactaaccaatgggtcatttgagaaagacaggatttgtagcgcatgtcaggcaggaaagcaagttggagcccatcatccacacaagaacatcatgacgaccgacaggccgcttgagctactccacatggatctattcggcccgattgcttacataagcatcggcgggagtaagtattgtcttgttattgtggatgattattctcgcttcacttgggtattctttttacaggaaaaatctcaaacccaagagaccttaaagggattcttgagacgagctcaaaatgagttcggcttaaggatcaagaaaataagaagcgacaacgggacggagttcaagaactctcaaattgaaggcttccttgaggagganggcatcaagcatgagttctcttctccctacac

SEQ ID NO: 93 - DNA, 251 bp, Zea mays
gcgtaaaatatggaagccctcgctcggattatggtggctgcgaatcaaaaacgaggcccatcaccggtgtctggtcacttcgtcctcttgttccaacagcctaaacgtgcgcagaaaggcggaattacccccatttatgtatgaggttgtggttggtacggagaattcttctattccacatcaattaaaacggggggaggactcgtaccatcttgcccccacgaaccacggtatttttcttattttaacct

SEQ ID NO: 94 - DNA, 427 bp, Zea mays
agcttactccctgctgagaaggtgttcttttttttcgccaagaatctgaagcccgggacatacaagctggtctacaatcaacgcgaggtctacagtaacgcttggaacatccaacagctacgtcgctattacccttaaaatgtttcaagtcgtttacgtacctcgctttttttacttacataaatgaagtctaaccatcaaggaaggatcagcattgcctcggcaaagcccgaccctcccttcggggcttaaaggggggaaccccctctgcgtcaaatatttcctcggaaaagacttttactagaacgtatttcgtgcttttcgactacgtcgacaacagaatcctaaagacgaacgagagagaccttgaacagcaaggccgactgatccgagggactccttcgccttcaagatacggatacctcac

SEQ ID NO: 95 - DNA, 362 bp, Zea mays
actacgctgccgcttctctgctgaactactcaagtgggctctttgtgtttcccgcatcaagctatcttcgctcgagtatgcgacaacgctggctaagctagcttctatctttttaacgcatacgacagactcttcaaaacatctttattttgatgagcgaagttctgagactgttttttcccaataattctttcagtaatcactggccatctcgttagcttccgcaacaacccattttaatttggctccagccagctgtttccgaaggtcgttcaattcacatttctgggctccagattgggctttggaagtaccttcatacttcctttatcatggtgaccaacgaaactggtattgtatct

SEQ ID NO: 96 - DNA, 377 bp, Zea mays
  unsure (1)..(377): unsure at all n locations
agcttgtgaagattcttcatcccaacgtggcccggtcggtgatgctctagccaacccatattagtcttagcaattaagcaagtatcgagttcagctctattaaaatcaactaagtatagctgaccctcgagtactcccttaaatgctactgaatcatcacttcttctaaagacagtaacacctatatccgtaaaaagacaattgtaacccattttgcataattgagaaacagaaagcaaattgtaatctaaagaatctacaagaaaaatattggaaatggaatggtcaggtgatatagcaattttaccaagtcctttgaccaaaccttgatttccatccccgaatgtgatagctctttggggatcatcattnttctc

SEQ ID NO: 97 - DNA, 368 bp, Zea mays
cacctctgaactaactcggctgcatcgttctttgctgttggccaatataatcctgacctgaagaccttccctactagtgtcctagaggctgcatgtactccacactgccctgcatggacttcctccagaagttgcttcccggtggacgggagaacgcacttcatgaggacgcctgacgcgcccctcctgtataataccttcccaatgagtgtatagtgagctgattgtctggcaatgcgctctgccgagttcttgtcatctggttcttcttcattctttatatacttaataatacggtgtctccagtcatcagagtctgacttgggttgatctatgatgttgcactcttctatttgatccgtccagat

SEQ ID NO: 98 - DNA, 415 bp, Zea mays
  unsure (1)..(415): unsure at all n locations
agcttccgaacactacgacttcattnttctatgggtcaggcaagttttctctccttcgtcgaccctcacaatggataaatcccggaagtatcttcccctcatgttgacaagatgattttctttgatacctgatttgccaaaagctgaatggcttggtcgccaggggcgatcttcggagtcttcaccaccactatccacatcataactgtcgctgtcatcagtatcttcagacaaaccttctaaaatctctttggtgattttttctgtgttggtcttcgacattgctataagaaaccccaggttcttttcttcagagagactcagcttcatctcgggagcagccttcttatcttcagacatcttcgcaaacactaaaaaactgttttcaacgctgaagcttaaaaacttaaaaagc

SEQ ID NO: 99 - DNA, 396 bp, Zea mays
  unsure (1)..(396): unsure at all n locations
tctctaagggtctccttttatntattttattaaataaataaaactacatctacattagtccatatttattcataaaaattagaatgtgcagacagtaagtgaaaccattttatttaatagagaataattctatgaacattttgcaatttgaatcactaaatttggagttcatatgcaaaagttatgagataacaagtttgggaattcaaaatatgaaattagggctacttctgtgaatatttaaaagtccagggctaaatctgcaagattacaggggtctgcgcgcgaaaaccaaggacgacgggttgatttcaagcaaacccagggtctctttaagaaaactaccgagcgaaggggtatcgggtgaatctaaccgccagatctacaccaacgact

SEQ ID NO: 100 - DNA, 388 bp, Zea mays
  unsure (1)..(388): unsure at all n locations
agctttacttatttgattttgcanaagattatgccggtctagatgcatgcttaattgctaagactagcatgggctggctgtggcatcgccgcttatcacatgtggggatgaagaaccttcacaagcttctaaagggagaacacgtgataggtttgactaacgtacaattcgaaaaagatagaccttgtgcagcttgtcaagcaggtaaacaggtgggaggagcgcatcacagcaagaatgtgatgaccacttcaagacccctggagctgctgcatatggacctcttcggacccgtcgcctatctgagcatanggggaagtaagtatggtctagntattgtcgatgacttttcccgcttcacttgggtgttctttttgcaggataagtc

SEQ ID NO: 101 - DNA, 367 bp, Zea mays
agcttgctgaacgacagcattggttcgactatcatgcaaatatccaatgctaggtcaacccagctcggcagctccgtgtctcctccatgcagtagcttctcaccacccaaccatttcggtcgtatcgttagtcggttgctaccgttaatcactggacgcaccacgccaccacccgtgcaatgctgtagaatgtcctccgcgctacaatcacaagctaggttcctcctaatcccaagcaagcaaccttaacccatatgtagctcctggaggcaatccggaaccaccgagacgaatagaacacgagcaactaaaccagcagatcgatcacggataccgacggaccatcccatcacattccctgatcatg

SEQ ID NO: 102 - DNA, 351 bp, Zea mays
tgctaagagagagcacattctgggactaaccaacggttattgtgagaaagacaacggttgtagctcatgtgctgcaaggaagaaagttggtgttcatcatacagacaagaacatcatgacgactcgacggccggttgagctactacacatggacctattcgacccgatcttacataagcatttgcggcagtaataattgtcttgtgattgtggatgattattcatactacacttgggcgctctgtcttcacgaaaaatttcacacccaatagactttaacgggattcttgagataagctcaagacaacgtctgtttaacgttcaagatgattataagccatcaccggaccg

SEQ ID NO: 103 - DNA, 421 bp, Zea mays
  unsure (1)..(421): unsure at all n locations
agcttgagtcaatcattttgcanaggatatttgatgctcaaaaggataatctgggtatgaagcacatacgagagaagataagggctggagtagccaaatgtttcaaggaagacgatcaaggtgtgatatggtttaaaaaccgcatagtagtgccaaagaacgaagaactccgccagcaaatccttgatgaagcacatcttagtcgttattctattcatcccggaagcactaagatgtaccaagatttaaagcaacattactggtggacaaagatgaagattgaaattgcacgctatgtggctaagtgtgacacttgcagacgtgtcaaggccatacacatgaaaactgatggtccattacagtcgctaccaataccaacatggaaatgggaagacatcagtatggactttattgtgggact

SEQ ID NO: 104 - DNA, 239 bp, Zea mays
ctggagcttctacatatggatctatccgcctgatagcttacataagcatcgacgggagtaagtactgtctagttattgtggatgattattctcgcttcacttgggtattctttttgcaggaaaaatctcatacccaagagaccttaaagggattcttgagacgggctcaaaacgagttcggcttaaggatcaagaaaattagaagcgacaacgggaccggagtcaagaactcacaaatc

SEQ ID NO: 105 - DNA, 362 bp, Zea mays
  unsure (1)..(362): unsure at all n locations
ttgtccaagtcgcacaacttcatcttgggatatctgcagctcatggcggtgatgatctangtcaaacatggtgaagtggtggcttcttctccagatggtcaaggagttactagtgtcacggtacagcctgtccaaattgtcacgagaggcaacgagtgctcgcttctcctcctacgaacagaaagcaacattcagtactgaaagtcgccttgaggggggtggataggcggaatatgaaaactataactttaaacacacactacaagccggggttagcgttagaatgaatattaagtccgggagagaggggaaaacaaatcaaccaagaaataatgtggatgaacatggtgatttgttttgcc

SEQ ID NO: 106 - DNA, 410 bp, Zea mays
tgagaattgagagtctaagtttgtccttcctgtaacgtcgcatgcctctccttttatagctaaggggggcatgtacaaaagtgctaagccccgacatgtgagcccaggaacataacggatgtagtacttggagctactaatgtttgttgctggagcaatcttcttgcgccctgacatccgagatctgcgtagtatcggcgtgcaggggaagcttctcgtacaagggatgatgagcacagtgcgccgcgcagcacgggcgtactgtttgacaacagactggacaggtgcgccgtctgcgggatggccctagcgccgcctgccagtggagtggacatgatgcattaaatgctgtgagggcacatcgcctgtcagcagggtggacatgcggcgcgtccttccacaataaatgc

SEQ ID NO: 107 - DNA, 407 bp, Zea mays
catgttagtcttagcaattaagcaagtgtcgagttcagctctatcaaaatctaccaagtatagctgaccctctaacactcccttaaatgctattgaatcatcacttcttctaaagacagtgacacctacatcagtgaatagacagttgtagcccatttgacataattgggatacggaaagcaaattgtaatctaaataatctacaagaaaaacattggaaatagtatggtcaggtgatatagcaattttacccaatcctttgaccaaaccttgatttccatccccgaatgtgatagctcggtggggatcttggtttttctcatatgaggagaacatccttttctcccctgtcatgtggtttgtgcacccgctgtcgagtattcaacttgagcccccggatgcataaa

SEQ ID NO: 108 - DNA, 445 bp, Zea mays
agcttctccagaagatggatgaatatatcctagcttacaatgactttcgccagagaagagaggaatcttacaggtattctgagatgactaggggcttcggaggaatattccacctcaggcatgtcagaacgatccctaatcccagcacaaatgatgacagtgaaaaccacactcaaggcagccagcaaagctcacaatcttcgggaatgcagcaaacctcctataggccagcagttccaagaggcagagggggaagaagctttggaggaaggtttagcactcaacccaggagattgttctacttattctatggggaggataagggacacacaacaaggacatgccaagtcacgatccaaaagcagaaggagatcgctgaagccgaagcatattataatcagccgaagcagggcttgcatactgcctcatgctatttgccatatat

SEQ ID NO: 109 - DNA, 372 bp, Zea mays
  unsure (1)..(372): unsure at all n locations
gccgaaattccccttgtcgagcttcttcctgcacacgaacaagcccaaggtagaaggtgancaatttgcattttggccctccgaatttctcgaaaatatttctctattttctgtaatacaagtgtatgtgaaagagatccaaaaaccttatgtgctactccccgaagtatatgtgtactttggaatcaaccccgacaatagtattttgaatatgaacattattcttttatttcaaaaataaataagttatgtcatgattctataattttgtgattaaatactataatcctttnttattaactgctcattcttagcatataaaataaaattatgttagtgattgtttaagtatagtttaatgatataagaaat

SEQ ID NO: 110 - DNA, 341 bp, Zea mays
tactcggggcatatgttatggaaatcaaccttcgacttggaattccattggtccaagtcgggctttgttccttgttaccacaccatgctcattttgcttggtgcggaagacccacttgagtcctaccacatcattggtaagacgtggaacaagatgccatacctcattcctcctcaagttgttgagctcctcctgcatcgccaacacccaatctgaatcccttaatgcgtctaacaccctagatggttcaatataagacacatacgagtaatgttccaaaaatgagcgacacgagatcgagtggctacacccttatgaatgccaccgagaatggagttcac

SEQ ID NO: 111 - DNA, 108 bp, Zea mays
acgatagcgacattatatccaagactctctactacaaatacattagagatagaatgctcattagaaattgcaattgtacctaacacttttacctcgccttgattccca

SEQ ID NO: 112 - DNA, 401 bp, Zea mays
  unsure (1)..(401): unsure at all n locations
cttgtcatgatgagcattgtgacaatagtagctcaaatgatgagcccaaagagttacatgtcgataagcttgtttggtctgctaaggccaatctttctgcttgctctttcctacagctggttcaaaagaatcgacaggagaanttgagttcacatttaatgttgctaggtgtgataagatgttcgatgaattacttaagagcaggaacattaaattgtctcacacaattcccctaacagaagaattgaaaaggcgtgcttattataaatggcataactccttttctcatgtcaccaatgattgcaatgctttttgtcagcagataccatcgactataaatgaaggtcggttggtttttaaagaatgcanattgacagacagacattccccatcaatacact

SEQ ID NO: 113 - DNA, 442 bp, Zea mays
cgatgagtacaagacactggatcggttctgtatggaacttattaatacggtttgctactccatcaacggactctaccttcaccgaatcctcaataaaacatcatatgaactcctcaccggcaaaaagcccaatgtttcttattttagagtttttaggagcaaatgctttattcttattaaaaaaggtagaaattcaaaattcgctcctaaagcagtacaacgttttttacttgcttatgactcaaacacacaggcatatacattgtgtttgatgagactaatggctcttaagtagagcacgttgatcttgatgaattacatgatgaagaggctccatgcgtcgcgctaagtaacatatccattggagatgtttgtccaaaagaacccgaagagctttcacaagcacaagatcaaccattatctccatataagcatctccacc

SEQ ID NO: 114 - DNA, 374 bp, Zea mays
  unsure (1)..(374): unsure at all n locations
gaaccattaagggtaaattcatcaaatgtttataacatgcttttgtcagtgcatagtctgtcatgagcatcacatttatattatgacgcatgcacttcactatttctatgatatagacatgttctcattaacctcattatgtgcatttggcatttaaggccaatatatgtattcctctcaaggcacatacttagggggaacaatctatattatagaactataataaagagtaactgacatatcttttgattntatatatctctttcaattagtaattgctcttaattcacatttttgcttataccaaggttcaatgtgtagaacttgcattctcatacctcacaaagtcctaaagtgcattgatctacaagtat

SEQ ID NO: 115 - DNA, 446 bp, Zea mays
  unsure (1)..(446): unsure at all n locations
tcctcatgtgaagacaatgacatctgaacttgtgatgttaccaacagtcatctatgacatattaatatttctctagagaggagattattggaggtatactctgtactgccatcacgactaacatttcctccaaggtcctcaaggatcgcacagctcatagctaatgttttgacaaaaaaacatcctcctgcctgctaaaatctcaacaaaatattggaactttggaagcttgaagtgagtaccacgcatgaatctgcttgatactataacacatggaggatttgggcaccctgagaaactaattaatttaaagcatactaatagccattttttacaagggtctggtgcataacacacatttaattcgagacaactaaagcagatacttcaaaatcagcccagttcgataagtagntgtggcttggagcaaagacatgtgaaaaaat

SEQ ID NO: 116 - DNA, 422 bp, Zea mays
agcttcataactcctagtggtacttattgttaccttcggatgcccgagaggctcaaaaatgctggaggaagcttcagcagaatgactgccaaggttcttcactctcaaataggtaggaatgtgctaacttatgttgatgacatcatagtaaaaagcacaaaacaagaaaatcatgttgccgatttgcaagagacgtttgccaattttaggcaagctggtctaaagttgaatccagaaaagtgtgttttcggagtgaagaagggcaagtttcttggctgtctggtatcaacaaagggtatcgaagctaatccaagcaagatcgaaactatcctttagatggaaccaccaaattcaaagaagggggctcaacggttggcaagaaggctggcatcgttgaatagaattatatcaagatcagcaga

SEQ ID NO: 117 - DNA, 384 bp, Zea mays
  unsure (1)..(384): unsure at all n locations
agcttgcgagcgctgttgggtttcatctatttgcggatnngntctatgtccgtttcacaaaaccgccgcgcattaacacggccaccgtgccacttcagatctgtcgctacgtggactcgtttgctgccttttttagtccgataaagcaaggttctgcctctacctctagttgcatactccctcaaatgtcatatgaattataacaaaacgattgctgcagatgcttaaaatctgtcgacttagaacaaaagtaataggtaacgtatcctgtgtaaaaagttctcctgtgtaaacatgttaaaacgtcttaacaacctttggatccaaaatcacaagctaatcttaatcctacctgataatcttgtgtttttctaagaaccccct

SEQ ID NO: 118 - DNA, 355 bp, Zea mays
  unsure (1)..(355): unsure at all n locations
gcttagcaaaagaaatttctagaatcattttatngagctcatgtctaattctggtaaaagattgttcatcaagtggcttggtaaagatatcggctaattgatctttagtattaatgtaagaaatctcgatatcccccttttgttggtgatccctaagaaaatgataccgaatggctatgtgcttagtgcggctatgctcgacgggattgtcggccattttaattgcactctcattatcacatancaaagggactttggttaatttgtaaccgtagtcccgcagggtttgcctcatccaaagcaattgcgcgcaacaatgtcctgcggcaatgtactcggcttcagcggtggaaag

SEQ ID NO: 119 - DNA, 438 bp, Zea mays
  unsure (1)..(438): unsure at all n locations
agactagcccactaactcataaagcccaattttgttacttaatatcaaaaaacttttccacatactagccatccaactcgctaaattatctggctctttaaattgggctctcgcagtaaccaaacttggctagccaaactaacttagctattggagagtctatcggagtgagatattacatatatatataatctaatctttatagagaggtaaataggagtccctcgaagatgctgctagattctcttagtcagcatgttgccattttcaccggttctgtaaaaaaactgatcagttcaaccggctttggtctgtaaaacgaaccgaactactagtctctagttcggtcctttagggcgtctccaatggctagcaattntactaactagattcactctctttcatacgtagataaaanatatgcgaaaaatgagaata

SEQ ID NO: 120 - DNA, 395 bp, Zea mays
ctgcagcttaactctatgaaaaccggactatggtgaccaccaccaccaaatcccccatctccccgtggctagccttttcgggaaggaagatgttcgatgtgctcacgtttcagaacccaaggatcatagtgatgctcacggaatcttccttttcaactctacagcagtgttttcaccggaacaccgtcgagatatacggtgaacactatcaacgtcgaccgacccaatcgtagcttctttgagcgaacttcggtgagtgccatatgcttgaagggtcgctggtactcgtcatgaactcggattgaactctaccgtgcttgtcgcctcggtccacctcaccggcgttcggttgtctgccgtcaccgtggatggggaggctctagattgtttggatc

SEQ ID NO: 121 - DNA, 419 bp, Zea mays
tatcctccattaaagtgtatctattataaatagacccctcttaactcaaaggaatctatcttaacctaataggttcatcttatgttaaaaaaattcttatcctcttaacttgtttataagataaactagaccaactaaaagtaccccactagaatatatcaaatagatccagcttatcttaaaaggttctctcttatcttaatagatacatcttatctcgaaaagagtctatcttattcttagagactcatcttgtcctaataagcatacttatccccaccttgcttatctcataatagtggaacacacatgaattattccaaagtaattaagaagatttatctaatctatctgatacaccatctaatttgatctatctatctgacatctatctatgacaacatgtagatatactgtaa

SEQ ID NO: 122 - DNA, 417 bp, Zea mays
  unsure (1)..(417): unsure at all n locations
agcttttgggtgcttgagcagtttaacttatttcttatctcaagctatcaatcttacattgtctatcctttaagaatgacccaaagatgaattgagttgttatatcactaacttcatattcatctctagcaagaacttgtgttgtagggaataaggattaacctttgtgggaatcaagcaaaaggcctacaaccaagtgatatccaaaggatggtaacaattaattcttaagtgcacattgcttttaattagtatattcctttgtgccttttgtagccacataggaaaaatgaagtacttgagaatgaacttaaaagattttaccttgccttggaaaagatccaattatatggtagattgcaagttcatatttttatattgtgacaatctacatgctttaaattggntgtatgtatc

SEQ ID NO: 123 - DNA, 326 bp, Zea mays
  unsure (1)..(326): unsure at all n locations
aatgacattcgaagagcagttaattagaacaacttggacaaaaggatctacaacacccaagcacacctttttggtaccctcttaaggatccctacacaaatctccggacgagattcctttaaaggggaagggttgtaacaccccaggtgttaccaaggccctgacttcctacttgcactcatgacatattatctcatgtggttatgtggaggagaacgagcacctaaaactttgggaatatgtattacctaacgaaatgtcatgacaaagccttactccaagcatttatgcaattatcacctttngcaagagaaaaataaacccta

SEQ ID NO: 124 - DNA, 408 bp, Zea mays
taagtagcataggccaataatatatgaattgactcaagcctagctacgggtgcataggtttcaccaaaatccaaaccttcgacttgggagtatcctttgggcacaagtcgggctttgttccttgtcaccacaccatgctcgtcttgcttgttgcggaagacccatttggttcctacaacattttgattaagacgtggaactaaatgccatacctcattcctagtgaagttgttgagctcctcttgcatcgccaccacccaatccgaatcttgtagtgcttcctctaccttgtgtggttcaatagaggaaacaaaagagtaatgttcacaaaaatgcgcaacacgagatctagtagttacccccttatgaatgtcgccgaggatggtgtcgacggggtgatcttgctgg

SEQ ID NO: 125 - DNA, 415 bp, Zea mays
  unsure (1)..(415): unsure at all n locations
tgaattcttctccatctcagttttaagacttgcttctacgcgtttcttttcctgctcagatttttctgattgtttgagcaattcattctttaaactgttattctcagcttggacctcagccaaggagccttccatagactgaataacaaagtctttcttttctaatgcaccttcgtgttctttagccatgatttcaaggtcctggatggtgaagttcttctttttcattacagctttgtaactttcaactttttcttccaaatctttaatgataattttgttcttctcctcttcgaggtcttgttgcattnttagaaccttactcaatagtatactctgccaaaacaatcttcgtcagaaaacgacccaaaaaataaaaaatatgtataataataataaaatgtgttaccttaaa

SEQ ID NO: 126 - DNA, 381 bp, Zea mays
  unsure (1)..(381): unsure at all n locations
tataacaggggcacttgttgctgctataacttgtcctcccaaatcatatgtccttcctgaataacaatgtcaatgataataaatacacagatgtcaaaacaattgaacaagagtgcattagtcaagttcctcaccctcgatatcaatggactcgcacatccctgaaacattatgacatctctcaaacacggttacattgtgataccctagcttagctagtgcatatgctgctgataagccgcttggccctgctccaactatgccaattctggtgtctactggaaaacttggatgcaacttgctgaatttatcatctatttgatttcctggatccatatttgatctattgccgatctggataatcancctgctgaattatat

SEQ ID NO: 127 - DNA, 368 bp, Zea mays
agtacaatacatgaacttcttcatgtagagtattacaataagcctgcaggttatcaatggctgagctaagttcttctactcgggctcgagcttttgcctccttagcctacgcaagcgaacgagagtgaaccgcccagtcaagcgctaaatctcgatctacgagctgatcttgcaggcggcggatgtcgcttctcaattcattgattctgtcgccatccgcgacccatatgtcaatcctgcgttggagttctgtttgaagctgattaactctcgcttcaagatccccgatcggatcattactcccactactgctatcctcgtgtcttggggcaagttgatgacgtggcacaccaattgggtcagtatgc

SEQ ID NO: 128 - DNA, 419 bp, Zea mays
  unsure (1)..(419): unsure at all n locations
agcttgtggaggttcttcatccncacatgtgtctttcggcgatgccacagccagcccatgctggtcttagctattaagcatgcatctagaccgacctcctcttttgcaaaatcaactaagtaaagtttgccgtctaatacacccttaaaagctagtgaaccatcacttcttctaaagacagtcacatctacatttgtaaatagacagttatatcccatattgcataattgactaacagatagcaaattatatccaagagactctactaaaaacacattagagatagagtgctcatttgagattgcaattttacctaacccttttaccttgccttgattcccatcaccgaatattattgaatcttgggaatccttattcttgacgtaggagttgaacatcttcttctcccccgtcatatg

SEQ ID NO: 129 - DNA, 382 bp, Zea mays
cccattttcctttcattgggactactacaaataatagacttgaaaataagtattaatctcaaagacttagattatagagtaacctccccctgaaagtgtgcatacgagttttgaatacttgtaggagacatacactttgatatgatatcaagaggggcaaattatccataatccgagctttggtacatataagttaaatgataccaattgaagcataattgaagcattatactacttgtagtatttcaaaatatcaattgatgtatcatttattttggaatgttaaataagctatgtgtcgtgctttcattttaaaccatgtacgtttgcttaagagtatgaattgaaagcgagcaattctaccataagaattacgtagtat

SEQ ID NO: 130 - DNA, 432 bp, Zea mays
  unsure (1)..(432): unsure at all n locations
gctngtacgccatctgtgagagctacagtctactcatcgagcttgacctttcgaactgcatggtcagtgactacgacgtcgcggtcttggaagtggcgaagcaactcaggctgcatgtcctcatgctgtgtgggtgtggctgtatgaaggtcacccanaagagcgtagctttctttggcagcatgtcttcatccttggaggggctgaatctccggttcaacttcatagacgatctacttatacacttcaacaagtttatctattggttcatactttcatatgataactctcattgacgttctcacgaaatgtcaggttctaccacaaagcatataatgaagtattctcaggtgtaactactgaccaggagcccaaattgtcgactaatactcctgagtatatgctttttgggtggcatctcttcttgatgtt

SEQ ID NO: 131 - DNA, 404 bp, Zea mays
tagtcttagaaatgataatgccaacttaattgctaagattgacaaattgaatgattctctttctagccttaaaattgaaaatgaaaaattaattgctaacgctaagaatttagatgtttgcaacgcttctatttccaatcttagagatgagaatgatatattgcatgctaagattgttgaattaaatacttgcaaaccctctacatcttccgttgagcatgttactatttgcactagatgtagagatattaatgttgatgctattcatgatcacctagccttaattaaacaacaaaatgatcacatagctcaacttagtgccaaaattaatgagcatgacttagaaaatgagaaatttaaattcgctagaagcatgctctatagtgggagacgccctaatatta

SEQ ID NO: 132 - DNA, 408 bp, Zea mays
  unsure (1)..(408): unsure at all n locations
agcttatcaagtctactatcatatgtgattttgtttatagncatatctgttccgaggccgccgtaatcattgttttcttaccgagacatttcctgccttttctgcccatggagctgcgtcaccctattttggcccaatgggtcgtgtatcaagttatgtccattagggacgcatcctatggttgcagcacgaccccaatacccttgtggtcgtcctcccatgtttataaaccccctagccgccaccaagaacagcgggttttgtttagatcaagattagctctcgctacttgcttgcaagcgcgcgtgctaattcagccgcccgtcttcttgtcttctgaaccccaccatatcggagtttgattttaaacctacatttagatctgggaattcaggacttgctctactt

SEQ ID NO: 133 - DNA, 340 bp, Zea mays
  unsure (1)..(340): unsure at all n locations
tctggaactacttcttccctagcaaaacggatcagntcatcgtcattttccccaaaatagcccaactttttcatcacaaccaaatcctttgttgttatgatggatcttccaaactcaatgtgactaggtttcgttgggctcagaatgctgttgtcctcctcactttcattgtcacttccaccttcggccatagtcttttcagctctggcagtagcatcttcggtagtagcttcttccgtcacaaccagacatgatcctctcatcacttctgataccggnngctgttcagttactttggtctcgtctccctcacgggacaccctagcagtggatcttactc

SEQ ID NO: 134 - DNA, 399 bp, Zea mays
  unsure (1)..(399): unsure at all n locations
acaatgcattgatcggtcgtccatggttgcatgaaaataaggttgttccatctactctccatcaatgtattaaatataaagataccttggggaacatagtgctaatttttgcagacaaaaagccattcacagtggcagagactttctatgctgatgccaaattctgttttgagccagttgataagatctcaaaaccgaaaacaatatcatcgtcagttcaagacttgcctgatagggacactgggaagtcttcagtaaatcaaaagagatatcaatacataccaagcgaccaaagaaaaaaatgagatccaatattntgtgttataaataaagcacacaattataaaggtaccatattcccgacaactntacctcctttggtaaaatatagaataaatc

SEQ ID NO: 135 - DNA, 433 bp, Zea mays
  unsure (1)..(433): unsure at all n locations
tgcagcttctaaagggagaacacgtgttatgtctaatcaatgntcattncgaaaaagatagaccttgtgcagcttgtcaagcagggaaacaagggggaggctctcatcacaccaaaaatgtgatgacaacatcaagacccctggagctgctacatatggacctcttcggacccgtcgcctatctgagcatangaggaagtaagtatggtctagttatcgttgatgacttttcccgcttcacttgggtgttctttttgcaggataagtctgaaacccaagggaccctcaagcgcttcctaaggagagctcanaatgagtttgagctcaaagttaaaaaaataggagcgacaacgggtccgaaattcaaaaaccttaagtggaggagtttcttgaagaggaggggatcaagcacgagttctccgctccctacaca

SEQ ID NO: 136 - DNA, 418 bp, Zea mays
aactcagcttgtcaagcatgactataagaagcggtattctatatcttctgaactatgtactctgtagaaatccgatgagtaatgaaatatatggtttatgactgctacacttgtcctcattcgctcgattctttttttatttatttcttttgttctcgcgaacagatcattagctcaaagctcgcagacttgccaatcacttccttaggagacattagtttatatctatgatccccacctcttaattgaacttgagtacgattatgaaatacgacggatctaacaataaccttgaccatctcatggtcatcccacttggtgctccccaggttgcgcacttggttcaccatggtttttacgcgggtcgtcatcgcttgcggctcttctcctttgttgaggatgaaacgacccagctccc

SEQ ID NO: 137 - DNA, 367 bp, Zea mays
agcttctacatgattatatgtttctacgttttagactcatatatatatatatatatatatatacatatataaaataaaataacactcccttatttagaaaaagagaagaaaagcaggtaaaaaagagggtaacacctgaatttgggggatattatgaaagaaattttatacccccaaattcagggtgttacagcaagccagggtggagcaactccggtcagaactacgccacaggaatagggcacgtgagcaggatagtcaccgtattgtggagctatcagccgaagtaagtcgcatgcagtacgaaattgcagaacgcgatacgaccattgattgggccgttaactcgcgctctttcgcttgggat

SEQ ID NO: 138 - DNA, 425 bp, Zea mays
  unsure (1)..(425): unsure at all n locations
tacacttgtacctattgcttacctttttcttgagaatcgcgggtaccttatacccctttggtatgtacaggatgccgaagccgaagagcaatgatccaaagcttggcggatagtgatgaagtgatgaagctgaagacactgctgcgaanaagctctacagaaatttttgaattaaccttgtaaaagatactgtaatttaggaatcaaacgttactctgtaaatttgcccataccttgtaatatatttttacctttccatccatgtatgaactgctttgatgtggacgaaacttgtatttttttgagccaaaggcaaaaaacacctttcctttttttcgtacacaacgaagcgtaaatttgcttcttttgtactcattcaagccttgtcattatagcccaagcaactgtctgtacactatgatatg

SEQ ID NO: 139 - DNA, 326 bp, Zea mays
  unsure (1)..(326): unsure at all n locations
agctttatgggttcatagaatatctaanaaccgccctactaaagtatctccatttgagcttggttataagcagaaaacagtgttgcctatagaggtaagcctaaatgctatcaggttcgccaggcaaaatgatctaattgtcaatgattattacaattcaatgatggacaatattgatgaagtgaccgacaaggaatgatagctctagagaaatagaaaaggacaagatcatggtcgccaaagcttacaacaagaaggtcaaggctaagtcattccatgtaggagacctagtatggaagactgtgggggacggatatccctcgggt

SEQ ID NO: 140 - DNA, 387 bp, Zea mays
  unsure (1)..(387): unsure at all n locations
tctncaaagtttgaggaggcttcctggcgaagtactgagctgacggacctggccgaagccccttgatcatggcctcgatgacaatttcattgggcaccgttggtgcctgtgccctcaaacgcaagaaccttcggacatatgcctgaaggtattcttcgtgatcctgagtgcactggaacagagcctgagcagtgaccggcttcgtctgaaatccttgaaaactggttaacaacaagtccttcagcttctgccatgaagtgatcgttcctggtcgaagggaggaataccaggtttgagcaacacttctgacagccataacgaaagatttggccatgactgaagcatttgcaccgtacgaagacacttgtgcttcgtagctcataaaaa

SEQ ID NO: 141 - DNA, 359 bp, Zea mays
  unsure (1)..(359): unsure at all n locations
tcgtgctcgccagagttcggaaccccgccggcgcacgtggaccgggtgagtctccgcgccattttccgcttcactgcacacatagcctataggtcatcccgtggagctcatcgtgccatttaattgaactagatcaccgtggttaggccggagctctcgccgccgacgagttcacccgcctgcgcgcgtggactggtcgattccggccacccccgttgtcgagccgtacctcgctgtgaccgccaggacctcccaaagccaacttcgcccctcgccggacctctctcgccgncggtaagctgcgccgccctattcctttccgcgggtactggttacataaggggagggacctcggggga

SEQ ID NO: 142 - DNA, 396 bp, Zea mays
taatacccctaaaagatgtctaattttttaatggcaaggctcccatggttcacgataatgaaggctacatattatatcctattaattatcctgagcacaaaactaggagaattcatgctacgaaacctcataacatttctcaccatgcatttatgtataaaaatgaggcttctagctctaggcattgtatacatgttaaattgcctaagaagaaaactcctactgcatcaaatgaacataatgtttcttttaagacttttgatgcatcatatgtgcttactaacaaatcaggcaaagtatttgccaaatatattacgggcaagcacaagagttcaaagacttgtgtttgggtacccaaggtgcttggttctaatgtgaaaggacccaagaaccgtt

SEQ ID NO: 143 - DNA, 363 bp, Zea mays
actcaactctttatttggtaataacctgtcaactctaattggttctttgtaaaagtgtttcttcctcatagccttcaaacaagtgacctgccagggagataatggcacaacatcacatcacagttcaagcagcatttgctgtattttaaaagagaaagcagttagtgtcaattgaaggaatggccggtcccatgttgcaataagagagctgaaacaaactaaatcaaaaggctgttattttttaacagcataagctgctttttgtgcaggggttactgcacgaaccaaaactaacaaatccgtaagctgtgcatggtacccatctgtaagttatgcatggtgcaagctaccatgcctgatttc

SEQ ID NO: 144 - DNA, 446 bp, Zea mays
tgtgaagattcttcatcccaacatgggctagtcggcggtgccagagccaacccatgttagtcttagcaattaagcaagtgccgagttcagctctatcaaaatctaccaagtatagctgaccctctgacactcccttaaatgctattgaatcatcacttcttctaaagacagtgacacctacatcagtgaatagacagttgtagcccatttgacataattgcaaaacggaaagcaaattgtaatctaatgaatctacaagaaaaacattggaaatagaatggtcaggggatatagcaattttacccaatcctttgaccaaaccttgatttccatccccgaatgtgatcgctcgttggggatcttggtttttctcgtaggaggagaacattttcttctcccctgtcatgtggtttgtgcatccgctgtcgatgatctaacttgagccc

SEQ ID NO: 145 - DNA, 427 bp, Zea mays
gtcatctcgaagaaagataccctgaaggaaagagatgatctcagttctccagtcttcactataaacaggagatatattgaggactgctctttcaagaagttcaaccgaaggtgcttttattgtttcgaaaaatactttcgaaggtaagggcagcccctgtgctgctgacttggctagcaaatcagcatgttcattttctcctcgaggaatatttttgacagaaaacccttcaaaggaagcctcaatccatcggaccgtgtctaaatatttctcaagcttcgggtctcttgctttacaactcttgtcaatatgaccagaaataacctgggaatcagttttaagaactgcccttctaattcccattgcctttaacttccgaagacctaaaagcaaagcttcgtactcagcaatgttatttgtgcaactg

SEQ ID NO: 146 - DNA, 429 bp, Zea mays
  unsure (1)..(429): unsure at all n locations
tctacattgagtgagtgttcattgatactccagttgactccacataaatcattagctgaccaagcaaagacatctctattgttgaataaatcctttttcgggatttctttcttgctctttagataactgcgattcgaaagaactttttgatcagccatgtcttcatagagaagtatagcttttggctggtctgtcgatgctgccttctcctttatatgcttctattgtccttgggcttcagcttcgtctacgttgtgaatggctttggaatctatccaactttcttcgcctcttctcgtagcttcttgacttccatatataaagattgggccttgattcgatggtattttcatgcataagatgttggatgcaccacagcttcaaaggcattcaatgttcctctatgaacaantgcattatagggatatt

SEQ ID NO: 147 - DNA, 426 bp, Zea mays
cttgacatcacccagtgcaacgaccgggagaatgtcttgtatgcctcacgaagactcgagggagccacgtctgactgatgggatgccttcacagcggcacaccccaacgcagatacaataacttggcaggagttccaaacgaacttccgcgctaaccatattccctcgagaattatgaagttgaagaagaaggaattcctttcccttactcaagggaatatgtctgtcagtgagtatcgtgatcgtttcactcagctttcatgctacgcaccggaagaagtggacacagatgagaagcgacaagagcgtttcttggaaggattgatcggacctctgaactatcaacttcagagtcacaccttccctcaattccagactccactgaacaaggcaattggccttgaagtaaaagaagggaattgtctg

SEQ ID NO: 148 - DNA, 410 bp, Zea mays
  unsure (1)..(410): unsure at all n locations
agaagacaccttattgcctcgacacttccgtccgttcaatgccgttggggcgatgtgttaaaaccttaactttcttcgacctcggcgtgctagaagtcactgaagcagcacnatttcttttctttccttgctttcgcgaacgatagcagtaatctgggtatacaaacctgatgacatcaaatactctattcagcctcttcttgcctcgagccctgaaggccgttgtcatagcatcatcttcagccttcgagtaggcaccaagcaattcatcactggttgcttcaatggcatctagacagtcatcatttggctcatcaaactggctcctgtatttgaacgtgtacttcacgtagattaaaccaccttggctagacccagcagcaacctcctttcggcatctccacccactt

SEQ ID NO: 149 - DNA, 306 bp, Zea mays
  unsure (1)..(306): unsure at all n locations
tgacattctttcaattgctaataatatattctatgaaaagaaatgtcaatatgaaaattaaattccttctggcttaanattgtaaattagtgcatattatgaattcaccgctccatgtgcattaacttaaaaggaatttaatttatgcctttacgcctcataaatgatgatttgtttgccattcatatatatatatcatcattcattaaatacttccttgtactgctaatacctctnttcaagttttttatcgactagttttaaaaggaaaagagataacaaagaaggaagtctccacacatgatg

SEQ ID NO: 150 - DNA, 311 bp, Zea mays
cacccaaatccaaaccttcgacttgtgagtatcccttggtcacaagtcgggctttgttccttgtcaccacaccatgctcgtcttgcttgttgcagaacacccacttggttcctacaacattttgattacgacgtggaaccaaatgccatacctcgttcctcgtaaaattgttgagctcatcttgcatcgccaccacccaatccaaatcttgtagtgcttactctacctgagtggctcaataaaggaaacaaacgagtaatgctcacaaaagtgtgcaacacgagatctagtggttaccctcttatgaatgt

SEQ ID NO: 151 - DNA, 367 bp, Zea mays
ctaagcttcgatattgctcttcggtttgacattctgtacataacaaagctgtgttatgttaacacaaatctcaaggacaaggtaagcaataggtacgtgtattactggcttgagatgacttcgagcttcgtcatcagctaagtcttgcccacccttcgtccagatttgagttatgaatctatttccaatgcttccggctagactagggatgtcagttaaatatgctggtgacaggctgaagtttggcctgttcacgatctttccatgcgtgcaaccagtcttcatgaaagcaacagcggtgccgcgagaagctagcaaggcacacaagtcaccgtgcccagctataacttctgtaagcgcattaact

SEQ ID NO: 152 - DNA, 381 bp, Zea mays
  unsure (1)..(381): unsure at all n locations
agcttattagttcatcacaaaataagttccttcagacccgcacgtttctttaacctaaccttttttttactgctccagcgaaggcacagccgccgccattacttcatcttcctcgcagcgccggcgccccatcctgcggccctcgtgatcgggctctcagcgacggcgtcagcggcttccccttccgcctctcgccagtcgcctcgcgccctcgccttcggccctccacacaccggnctgcgaccttgcgtgcctgcctctctctctctcctccttccgggggaacggcgcccggctgcgccgcgcgcgccttgagggtagcgggagccaacagccgctgctccaccaaggcggtcgcgccgctttgggagcgcttatgcc

SEQ ID NO: 153 - DNA, 397 bp, Zea mays
tctaagggtagatgtagcttatgtatatgcatcataaataaatgagacttaagagatgtttaaatgcactagagctaataattaattactaaaattagttgaagatatctaaacaattgagctagcagcttagctattagctatttttagtaaattatctaatatttagctagatatttgctagctatctaatttcgctagcaatttttagctaactaactactatcgttcaaacaccccttagcttatggcatgatgtttacttcgctgaagggctacattcctcctgagatgaaaatgtctttgctaacgtgaaaggtcttgtttgaatgactggaactcaagagagggtgagtacatcgtacgtacacgtttctaagaattgtaatcgaagaat

SEQ ID NO: 154 - DNA, 373 bp, Zea mays
  unsure (1)..(373): unsure at all n locations
gccggcttcttggtgccgacggcgccgtcttgggcacctncacgtgcaccaccctcagcatgtcctcgcgccccggcctggccgcctccacgcgccttgcgtggcttgccgcgtttgcggcctcgtgtcgaggaggacatcaccttcttcttgacaccctggcaggcctcccactgctcccgagtgagatgtagcttcccgccgatagtgataggcccagatagagcctgtggttcgtcgccgtcgaccaccttgaggcgaccaatcgcctcttctatcgacatcgtggagaggtctatcagagactcgaacgagcgagcaattctgctgtacttctcggggatgcaaccgaagaacttccaacagctctctt

SEQ ID NO: 155 - DNA, 341 bp, Zea mays
  unsure (1)..(341): unsure at all n locations
tgcaagcttttagttntgaagcttctgttttgttattagttnttagtgtctccgaagatgtccgaagataagaaggctgctgctgagacgaaactaagcctcgacgaagagaaaaatttggggtttcttatagcgatgtcgaagaccaacacagaaaaaatcaccaaggagattctggaaggtttgtctgaggatactggtgatagcgacagctatgatgtggacagtggtggagaagactccgaagatcgcccctggcgaccaagtcatgcggttttcggcatatcagctatcaaagaaagccatcttgccaatatgaggggaaggtatttccgggatct

SEQ ID NO: 156 - DNA, 401 bp, Zea mays
  unsure (1)..(401): unsure at all n locations
tctaagggaggcttacaacanaaagtcagcgctgagatattttaattctatgctctattgcacggatgtgtgtatcttcggcataaatatcattttgcatagcataatatcatcacatcattttgcataacataagcatcatacatcatatcgcatgtagaacaagaaggggacatagtattgatcttcaaagaattttttgaaaaagagaaaatcgtgctaaggcacaagataaattgagaagaagtgtagcttcattagagagacaacataaaacttttttatagcttcgaggaatgttttcacgaagcttggatattcttcatcagagaagtatggaaattcttgtgatacataaaagattttcttcacgaagcatgaaaagaagggaaggtgttttt

SEQ ID NO: 157 - DNA, 391 bp, Zea mays
gctttgtgtggagtgggagatgttttttctctttggtgtgtcttgtattgaatgctatagctcttgtaaggtgtagaagtgtaaaaacttggatgccattgaatgtgggatggttggggtatttatagccccaaccaccaaaagtggccgttgggaggctggctgtcttatggcgcaccagacagtccggtgcgccaccggacactgtccggtgcgccagccacttcagcgagccgttgggtttcgaccgttggagctctgactggtgggacatctgggatgttcggtggttctccggacaggtcctgtatactgtccggtgcgcctcctgcgcgtcctctgtcttttctcgcgcagtgccattatatgcgttgcatctaacgtgggcgcg

SEQ ID NO: 158 - DNA, 437 bp, Zea mays
  unsure (1)..(437): unsure at all n locations
ttagtgattagagagagagaattgntgtgttcattngagctcttgcgcttggattgcttcttttctttctcattcttcttgtgacaaactcaattgtaacttgtaacacccactttgtaatttgctagaaatcataccaatagagaaacaatttctccttgtgtgggtttaacctttatgtatcattctatgtgaacaccatattcaaaagcaaataattaataaaagaatatatatgccattaaaattttgcatcatgctggatattatttttgtgtgtatgcattttgcgacaatataaaaataaagagacaggaaatacattaattcaaaaaaacagaaatctagaatctaaaagaaaactctagaatttgagaaagagaagaacgaacacttaaccaaggataagaaaattattattaagaaaataggtagat

SEQ ID NO: 159 - DNA, 360 bp, Zea mays
tgacactatatccaaccttagaactgagaatgttagtttaatagctaaggttgaaaaatcaaatgtttgtcatgattcaattgccaatcttaaaaattaaaatgcttgtttaattgctaagattgataaattgaatgaatcaattgctaatcttaaaactgagaatgataagttaatttttaaggctaaagatttgaatgtttgcaatatttctatttccaatcttataaatgagaatgtcatgttacatgctaatattgatgaattaaatgcttgcaaacccactacatctagtggtgatcatgttactatttgtactagatgtagagacattaatgttgatgctattcatgatcacct

SEQ ID NO: 160 - DNA, 279 bp, Zea mays
  unsure (1)..(279): unsure at all n locations
tggccactgggccagggattgtctgtagtcacgacgtggccaggccaacgtcgcacacgcagaggcggaggaggaggccctgctcctgacacatgcaagcatcgagccatctncagcggcaccgaccgcagcggcactcctccaccttgatgagtcgaaagcacgcgctttcctcggcgacggctccaacaaggacatgatcgaaggatggtgcctcgacaccggcgccactcatcacatgaccggccgacgggagttcttcaccgagcttaactctag

SEQ ID NO: 161 - DNA, 423 bp, Zea mays
  unsure (1)..(423): unsure at all n locations
gcttaggtctctatcatctaccacgatacaaattgtaaaaagttaacaatacagatatggngggtttatctacagaatcaactctaggaagcccaataattagttctgttcatgaaatagaaacctggttaatatataccttcacttagtacatattgcataaacccgtagttctttatggttgtctaagctttagaaaacagagaatctttcagtagcctcaacttctgtcaaatgatataccatcacgaaaattaatattgtgcaaaagacatgtcatcaacatgtagaattaggagccctgcacagcanatcagttttgcataaacaatccttccagatcgctccccaagccggtccaaggaacggtggcgggtgagcctcgtcatacagtcataaccgccatcgtcgcttgtgtatggg

SEQ ID NO: 162 - DNA, 314 bp, Zea mays
ttccttgacctccatgtacacgtggcgcccggagctggacgacctctctttgctggaaggccgcgagctcgcccgcctgctcctgcattctggctggcgcgctctacctcaccctctcaggccctgcacatttgcctttccctagctatctcctccgctgccatccttcctgtccctcctggccgcttgctagtattgtatttggttggaccacgagtgcttttttgaccgcacgcacggcacgtccctacgattcatctccttaacacgcccgagaattccttataaaccttccactttttacgtccaggcca

SEQ ID NO: 163 - DNA, 374 bp, Zea mays
  unsure (1)..(374): unsure at all n locations
aatatacgaattgactcgagcctagctacgggtgcatagtgtcggcgtttcgaccccgaggggtccctggaccgacgagtaaattgtcgccgcgtgtcccagcccaaatgggtcggcgcgagacggagcacgaaggggggaaggagacaggcaaaaggggaaactcgcggcctccgtgttgtcctgcgcccaggtcgggtgcgcttgcagtatggggttacaagcgtccgcgtgggagagagcgagagacttacgcgccggcccgttctgccgcgcggccaaccttctcgtacgagagcccttgacctttcttttatangcgtaaggagagggcctangtgtacaatgggggatgtaacaatgtgcttacgtgt

SEQ ID NO: 164 - DNA, 448 bp, Zea mays
  unsure (1)..(448): unsure at all n locations
ctcgacctttttaatatttttaatacacaactggttgcatgctcattaaataccctttaaatagcatataatacatgcaattatttattagtagcttcaaaactgaactataacaactctttagtctgaagttgttaaaacatttttgttgctcaaaacacatacttcaaattaaattattcaaaatatgctcataatttaaacaacaaaatggatactcattaaatgattatttatctttacatttagtttcacaaaccttttataaaaaaaggctggtaacatagtataaaacaagtaatgtgtactacaacctagttaattttgccaaagccattctcttttgttataaaactccattatttactaccacaattttctagacaattcttcaaactctgtctcttctcagtacatattntaaaactggtgtacatttcagaattat

SEQ ID NO: 165 - DNA, 283 bp, Zea mays
agcttgaagagatatagcaatggcttgtgatcgtactacccaagagctcaatgacaacgacaagccgccatgtgccttgttctgtctacctctcaagacaagatcgatgtaatgagatgggataaaaaaacttaatattccgatagttatgcctgcggcttgataagagctgcgaatatgaaaacgggtgaaactaaaccgggttaaagagccatgacttccatatattaatggagaggattaatccctgtcaagttttgtggtacatgcctgacgccatgtg

SEQ ID NO: 166 - DNA, 436 bp, Zea mays
  unsure (1)..(436): unsure at all n locations
tgcttctanagggagaacacattatacgattattatatgttcattatgagaaagacagggtgcgtagcgcatgccatgcgggaaagcaagttggaactccaacatccacacaagaacatcatgacgaccgacaggccgcttgagctactccacatggatctattcggcccgattgcttacataagcatcggcgggagtaagtattgacttgttattgtggatgattattctcgcttcacttgggtattctttttacaggaaaaatctcaaacccaagagaccttaaagggattcttgagacgggctcaaaatgagttcggcttaacgatcaagataataagaagcgacatcggaacggagttcaagaactctcaagttgaaggctctcttgaggaggagggtatcaagcatgagttctcttctccctacactcctc

SEQ ID NO: 167 - DNA, 223 bp, Zea mays
aacccgaaaccaacgtccttgcacactcgcttccgtgtccttcaccctacataccaaaatatgtgggtatcattccgaacttctgctgctccggctaaccagcccgaacgtctttggccacagttttcaccttcgcctccattacagcctgcctacttacgaggtcagcagccagaatggagtaaacagacccatcaccaccgagattttacggaggggctcg

SEQ ID NO: 168 - DNA, 334 bp, Zea mays
  unsure (1)..(334): unsure at all n locations
aacacgggtattgcccgcgcagcaatgtaatcataacatactcacacgcccacgcctaaccacccctacaatcatgaacagcacaaacccaagaagcttgatggaacacactaaagcccagccatcgccgaacgcattggttgcgctgttatgaactacagtagccatattcactcacacggcctccgccgatgtacttgtaaagatccatgccatggactgccgacgccgtgncgcccctctaacaggcaccgagaagcaaacgaagcaattggtcagccgagcctcacgcatacgccaaccataaaacctcacacgccgtatcccgagcacg

SEQ ID NO: 169 - DNA, 332 bp, Zea mays
tatcaagaacaagtatcctttgccttgaattgatgctctttacaatcagttggtcggagccattgtgttttccaagatagatctacgctacggttatcatcagatcaagatacgagcaagtgatattccgacgactgccttctcaacccgatatgggctgtatgagtatttagtgatgtcatttgggctgactaatgcgccagcatacttcatgtatctgaagaattctgtcttcatgcctgaactggacaagttcgtggtgcgtttcatggacgatatcttggcgtactcaaagaatgaagattagcatgccagtcatttgcatgtattgc

SEQ ID NO: 170 - DNA, 384 bp, Zea mays
  unsure (1)..(384): unsure at all n locations
aacatgaaatgaccactcgacccatgatagtttgtgtcatgattgtaatccattgccaagagcataaatgtaatttcacatatgctgcgccctgtgcctataaatagatgaacagtacccctgtactgttaaggcaatctttaatcacttgcatgccacacttgaattattgccttctgcccagtcgaacgtataaatgtgattaaatgttatgttttaatatttaagtttgcatgacgaaatatatgaatgaatttaagcgttttaatatattattctttcatattttatattttatatctntcattatttcataactctaatcacgaagggatgccttcgtgacctcttgtcttatgaccttcgtccacagatattataccc

SEQ ID NO: 171 - DNA, 453 bp, Zea mays
  unsure (1)..(453): unsure at all n locations
gcatgcaagctctggcccgtagatggatttatgactgttcataagattgaatgatagcctagcgtttatagagtgaagtttaaaataaaagacagagacaagccactagagattggagttagccttaatgaaaanctatatctttttttctgtatcggtaaagactgaagaggttctccgagacatactcaacttatgaccattacccacaacgccttgcactgtcgcaccagcgaccgccgacccatcgtcatgcggtcgcggcctcgcgggccggatccggttccaccgcaaaaatcccactccagtgtcgtcggtaaaaccgtaacgtccacacgacggcgagtagtactactagcgtacgcggaaaatgattgactgttcactattccctcgccctctcttctcccagacgggcagacgactcctccgttacgccccaccaccaaccta

SEQ ID NO: 172 - DNA, 410 bp, Zea mays
tcggtattacagcatatccgaagatgaagggtctaactcttttaaagatagaacgaccttttagtccataaagggctgagtcaatgctgtaaacctcttatgacgggcatgattgtaattcctcacaggctgtgtcctgtgcctataaatagtgaacaatattcctttactgttcacacattcctgtaattgcaatcgcatcactcggaaattattctttgccaacgcacaggtataaatgtatctaatattatatttgaatacatcaagtttatataatatgtaaatgatgttgtttacttataatttacttgtctttaatgctttatatctcgcattatttcatataatctctgagagttcaattacgaagatttaacctctcgcaattgatcattttaaccttcgtc

SEQ ID NO: 173 - DNA, 441 bp, Zea mays
  unsure (1)..(441): unsure at all n locations
agctttaaaatagagtcaatatagtcatgttgttattataaaattctttgactcatacgacctgtattcccatatatctagggatccaaaatggaagcaatttcaagccgcaataatgttccacgtttcgatgccttactcacacaaggatgcacatatacattgtatagagtgggattctgtctaaatagggaggagattcaatttcggaatattggacatgggctagagatcggactgataacacatactattgtggagccattcatcaagccaatccaatttcctccatttccaaagtatcttatgccattccataaggtgtatcaacaaccgcataagtcgttcgtaggtaatgatcattccttccatatggctaatatatatnagactaatggctgatgtataagttattcaaagaaaactaatcacatgtgaatt

SEQ ID NO: 174 - DNA, 370 bp, Zea mays
agattgggattgcccaggaaaaacacagataaattaacacctcctccaaagcctcaaccacgcctccacaaaaggtaacatccaaggtaatgatcaagccacacttcacattaagaggtgtagcgaatgccttcgaagaggggcacttgattaggtcatgtccctacattaaaaatggcttgattattaacaagaacgatagactttgttttaaatgctccaagaagggacacttgcttagatcttgtccccatttaaaacaaagaggcataggagtagaaaagaaagtttttactaaccatgtagcaagcaacaaacaaggaaagaagaaaacttcaaaacttgaaatacgcctttgctacacatgccg

SEQ ID NO: 175 - DNA, 472 bp, Zea mays
  unsure (1)..(472): unsure at all n locations
atccttaagtcacctgcggcatgcaagcttacacgaggtaaagaataggatatatccattggtgaggtaagtaaaacaccactctcaaattgagattggagactggagattttagataacagacataatgcaatcacaaggcaagatagagtggtgagaaggataaaggaaataacaaacaaaaacacaacaaaggatagagttaaaaactcgcaggtgacaaagaagaggatacacccaaagggaaaataggtaaaatgtacaactctcagattgagatgggagagacaagattttaaagggcaggtataagataaacgtcaaggtaagatatagaggtgataagggtaaaggtgataatgatgaaaagcataaccatggacagagttaaggcaagactgacaaagtggagaatacaagcacgggtaagataggtaagggtcaacaaaatggttgaagtanagaaaataat

SEQ ID NO: 176 - DNA, 410 bp, Zea mays
tctcctgtccggaataatctacggtattccttattgtttacttataatacttgtaaatgaacttatgtacctgtaaaacttataatctagagcaaactagttagtccaattatttgtgttgggcaattcaaccaccaaaatcatttaggaaaaggtttgaccctttttccctttcagcttcttcatcggccaatttgcctacgcgtgctaagaactggcctatgtgttcgtgtgtgcttctcccattctcactacaaaacttagataattccggtattcttgccccttgtggatatgggacaacgtcaaaccagcgattataccacttttggtataattgccccactctggctagactaacttcgaacttatctagaaatacgttagccatctctaacctaatttttttc

SEQ ID NO: 177 - DNA, 181 bp, Zea mays
ggaaatgtacgtacatccacacatcaccgagctaaggaagctggggcaagagacaactaataatctggccatgccttcatggaaacgcggccgcgaaagaacgcaaccgaacctgggcgccgccgcacatttagtaaagttactaatttgctttcgtattccttttagctacccacgtaag

SEQ ID NO: 178 - DNA, 399 bp, Zea mays
agcttcgggtcgacggtggtggccttcggttacatggtggggagtccagtgagcacgagcaaagatatatagagtgggaaagggcgaaccgaggggtgtcttgagttgctggcgctgaggcggagctcaccgtggttacagataccgcggggactcgactgcggccactaaatatgccagagaccatgaaggacgacggtggagctcctcgggtgcgtgcgcgggcgctaagcgggtgctatggctctatagtggggcgtgactggaggaggggagtgagtgagtgggggcgtggcttcaaaaagtgggtctggcgcgtggagaggtggcctgtagaaacacggtgtgggcgcgtccacggcggtgcgtgcatgtgggaggttatggagacttatatag

SEQ ID NO: 179 - DNA, 454 bp, Zea mays
gacactctacacaactcacgcttataacaagaggatagacgctacagctcgtccatatgttatgatataatgggacttgcacaaacatggagattgtgctccgctgctcaaatgtttatccacaaccgaaggtatacagttaatgaaacaaatacatgcaggcctgtgtggatctcacatcggatctatggttccactggccgaatgcagcttatgatgcaccagaattggttcaaaagtgccaaggttgtcagatatgtgcaagagatcaaaaacaaccttcgtccttaacacagctcatacaacccacttggccattgcaaaggcggggccttgacttgttacgtccgttacaccggcccaagggaacctgacgtatgctgtactagctgtcgaatatctatctaaatggattgaggctaaacctttaaccacaataactttggctaccgtc

SEQ ID NO: 180 - DNA, 265 bp, Zea mays
ccaatcctctcgacctcgtgaacaagcctttggtcaccaggcaagctctgtctcttgtcaccacaccgcgctcatcctgcctgttgcggaataccacttggcacctacaccattctgcgtacgacccggaacaaaacgccatacctcattcctggtgaacctcgtgagctcctctcgatacgcagcacctcatccgagtctcttagtgcatcctcctacctatatggctccatacaggacacaaaccagtcatgttcacaacaat

SEQ ID NO: 181 - DNA, 448 bp, Zea mays
  unsure (1)..(448): unsure at all n locations
agcttgtagctactaatatgttccttgttctgttgtctctcagggtgatcttatacagaagatattgcaaatatacctcaggaatagtgactctacttcagatctacttgctgagataggtcgtgaattgcctaaggtggccatcttttcttctcgagtgatgctctgagagacatctcatttagcatatagttgtagatatgaactacatgatccttttttgccttagaatactccttatatgttcttattccatgttttaaggaaccttcgctcaaaacaaaagataaccaagatgtatcgtatggntttccaacattgtgttcctccactattaacctctggtaccgtgtgcttgtaagtatggcgttcgatgcatttatgaaatatgccatgctngtctngtcttctaacattttggtcaccaatacagcacgaggagaacaca

SEQ ID NO: 182 - DNA, 427 bp, Zea mays
  unsure (1)..(427): unsure at all n locations
aaaaactcaacttctgagggagaacacattatgggactaacaaacgttattttgatatagacaggatntgcaccgcatgtcaggcaggaaagcaagttggtgcttatcatccacacaagaacaccatgacgactgacaggccactcgagctcctacgcatggatctattcggcccgattgcttacataagcatcggcgggagtaagtactgtctagttattgtggatgactattctcgcttcacttgggtattatttttgcaggacaaatcacatacccaagagaccttaaagggattcttgagacgggttcaaaatgagttcggcttaaggatcaaaaagattagaagcgacaacgggacagagttcaagaactctcaaattgaaggcttccttgaggaggagggcatcaagcattagttctcttc

SEQ ID NO: 183 - DNA, 472 bp, Zea mays
  unsure (1)..(472): unsure at all n locations
aagtcacctgcggcatgcaagcttncttgatctcgtagggtccaaagtatcgatgagctttatctttccttgatcccgaacctctggacacccttggtgggtgacaccttaagataaacatggttccccacttcaaactgcagaggcttccgcctcttgtcatgatagctcttttgcctggcctgagcagcttctaagttctttgtaataaccctgaccttttcctctgcctcaagtaccanatttggcccaaatatttccctttcttctgcttgagaccaattcagcggggtcctacaccttctcccatataaggcttcaaaaggcgccatctttagactggactgatagctgttattataggacaactcagtcagggaaagacactagtcccaatcctttccgtagtgccagacacatgctcttaacatgtcttccaaaatctggttcaccctttctgtctggacatctg

SEQ ID NO: 184 - DNA, 420 bp, Zea mays
  unsure (1)..(420): unsure at all n locations
tttcgtcacacgcagcaggcccctacctggcacgctactgtctgtgttctagaccggcgggtcccttgggccgacgagtgagttgtcccgcgtgccccaccccacatgggttcagcgccagggtgagcgcgacagggggagaaagcgaggcggtccgagggccgcgtgagagaggtgggaatcccgcggncttcgtgttcgtccctccgccaggtcgggtgcgcttgcactaaggggttacaagcctccacccgggagaaggaagcgagcggtccctaagagagcgcctgtcttgttctcgtccccgcgcggccaaccttctataagagggccctggtccttccttctataggcataacgagaggatccacgtgtacaatggggggtgtagcagagtgctacgtgtctatcgggggagag

SEQ ID NO: 185 - DNA, 369 bp, Zea mays
  unsure (1)..(369): unsure at all n locations
tgcagcatgcaannctatcttatttgagaaaagggatattttattaacaaaacggggaatcataacataaacataatatgaagaacgttgataaccgcattccatgtcatgagcatcacgtttattatatgacacactgcaccctatgaatagtagagatataaagctgactatactttgacctaaatatgtgcttttggcatatgagaacaaaagtgatatattctgaaatgcacatgtttagggggaggaaactatatcataggattcaaaatcttatttatcacatcttatgtaagctttaaatgtgttgtcatcaatcaccaaaaagggggagatcgaaagcgcattcatacccttcgtgagcta

SEQ ID NO: 186 - DNA, 424 bp, Zea mays
tatgaagattcttcctccaacatgggctactctgtgttgtcagacccaacccatgttagtcttagcaattaagcatgcgtcgagttcacctctatccaaatctaccaagtatacctgaccctctagcacacccttaaatgctattgaatcatcacttcttctaaagacagtgacacctacatcagcaaagagacagctgtagcccattctgcataattgagatacataaagcaaatctgcatctaatgaatctactagaaaaacattggaaacagaatggtcaggtgatatatcaattttacccaatcctttgaccaaaccttgatttccatcaccgaatgtgatcgctcgttggggaccttggtttttctcgtacgaggagaacatcttttcctcccagtcatgtggttgtgcacccgctatc

SEQ ID NO: 187 - DNA, 404 bp, Zea mays
agcttttctggcaccgaagatctacttctttgagatctggcttcggcccttcttccggggctacgggttccggatcaacggtccccgcttcttctaggtaaacaggcaataaaacaatacatcaatagtgatttacaaattatagtgtgtcattttctaacatcattaatgcatgtgaccttaaacaatatctttgataatctttggtgcataaaatattgagaagactaattaaaggaggaaaatgctgaaaaaggaaaaagaataaggggtttcagctctggtgggccgagggaaagaaatctggcccagccaagcgcaacgctcgcgtggccgcgagggcgctggcccatcatcggcccaaggcggtgagaaggcgcgggggaaaacgccgtcgccgcggt

SEQ ID NO: 188 - DNA, 412 bp, Zea mays
tcggtattattcaaaatggtcgttcatagctatttttctacaaaaatggcggttttgtggccatcgatcattgaccacaggatcgtacacctcaccccacatatgtttacttgtcatacatcacattcttagattttgggtggagaccatctcttggtcaaaggtctgtcggtgctagccttcggtattattgaaaatggccgcccatggctattctccacaaaaatgggggttatgtggccattgatcattgaccataggctcattcacctcaccccacatatgtttctttgccatacatcacattcttggattttctggtggagaccatttcttggtcaaaacttcgcaggtgttacccttcactattctcgacaacggtccgtcctgctattttcaccacaaatggggg

SEQ ID NO: 189 - DNA, 438 bp, Zea mays
  unsure (1)..(438): unsure at all n locations
gcttggtcattntattgctaactgttccgctatgatagtgatcacgatcaaggaaacaagagggagaaaaagaagaactataagacggaaaaaggcgaggctcatcttggcaaggagtgggattcggactgctcttcgtccgactccgacaatgaaggactcgccgccaccgccttcaacaagtcattcctcttccccaacgagcgtcacacttgcctcatggcaagggagaagaaagtaagcactcataatactagtacttatgcttcttcaagtgaggatgagtctagtgataatgatgagatagattactcatgcttattcaagggattagatagaaccaacgtagacaaaattaatgaattaattgatgccttgaatgataggaatatactcttagaatagcaagaggatctgttgtatgaagaacatgataaa

SEQ ID NO: 190 - DNA, 423 bp, Zea mays
tgcatgacaaaaccgtgaatgccatatatctgactcattttaaaaattaacagaattcactagtttattacacacatcatgcagtgataagcggaacaagcctccgcagccatatcctctaccaacaaaagtaccatgtttcgacacaacacatttattagactcaagaacaactttgtatccatctcgacatagcatagaagcgctaacgagattcttcttgatagagggcacatgctgcatgctttttaatggcaccgcctttcccgaagtaaacttcagaatgacagtaccaacaccaagaacatgagcacgcgacccatttcccattaacaaggcgccagacctcccgacctggtacgaagtgaacatagaggcatcagcacacacatgaatgtttgcaccactgtccatccaccactc

SEQ ID NO: 191 - DNA, 442 bp, Zea mays
  unsure (1)..(442): unsure at all n locations
agcttgtgaagattcttcatcccaacatggtctatttggcgatgctagagccaacgcatattagtcttagcaattaagcaagtgttgagttcagctctattgaaatcaactaagtatagctgaccctctaacactcccttaaatgctattgaatcatcagttcttctaaatacagtaacacttatatctgtaaaaagacagttgtaacccattttacataattgagaaactgaaagcaggttataatctaaagaatctacaagaaaaacattgaaaatagaacggtcaggtgatatagcgattntacccaatcatntgaccaaaccttgatttccatccccgaatgtgatagctctttggcgatcttggtttttctcataggaggagaacatcctttctccttagtcatgtggtttgtgcacccgctatcaatgtcaatgat

SEQ ID NO: 192 - DNA, 425 bp, Zea mays
  unsure (1)..(425): unsure at all n locations
tgttcaggaaccacatgctgaaccggaaatgctatatttctctttntttatatttatgctatattgtagaggattatgcaatgggccttggatgatcgctggggattttaatatgttctatcaggcgtctgacaaaaataactctaacttggataaggcagtgccggtcctgacattagagaggcccaggacaagacttataaaggaggccctttataataataattattacacataaatatagtgtgtatatattgtcaataaagtatttatatgtatctgaaaaagttattcatattaaataaaaataattaaaatatagcctaatatctcacagaaaaatgtgacatatatgtgtctagatgactcanaaggttagttcgaacaacgattaaatggacgcaatgcgttgtcagatcagctat

SEQ ID NO: 193 - DNA, 385 bp, Zea mays
catgcatactttttaatgcgtcagatgaattagtgttagtctacaccactgtgaccgtgaggcaggtggttacacgtcttatggcactgaatgctaaatataaccttctcgactaactactataacgatataatcaatctgaatattgatctcattccatcgaaccattaaaggccaaaagattataccattcttaaaagatcttgtccgtctgggattaagataaaaatattatggggcaaaacaatgctggtgtctggaggaatttaacggcccccattgcaattgccggaacaaaattgcgaggtctaaaaagatgactttttgttcaaatggcattaacaatttgattatccctcccccagttaatgttgttttacccaaa

SEQ ID NO: 194 - DNA, 401 bp, Zea mays
tacaaactaagcttatacctccaggtccacaaggatattttgtttatctacgaaatccttacttacgtcaaacccatcaagttatgtattatctcaaaaagtaaacattattatatgcactgattggctacaacaagaatatgcagagggagaatccacttgccttgctcaaacgcgtcctgaggatcgtcttccaaccaattcggttcgtctaccacaaactcggcttctaataacgtcccacgtctccatacaaaacgaaagcctaaaccaataaataaacacgccccatttcataaacatacaccattacacaaataaatacacatcacactcatcacaccttacatacgtcctaatcgcgtacatacttattaattcaattattatctattattgtg

SEQ ID NO: 195 - DNA, 344 bp, Zea mays
  unsure (1)..(344): unsure at all n locations
atataggctgagacattaccataaatatatactgcgtacactgcgcggaatactttggtctcattaccagaccacgtttaatactcattcttaagcgcaaccatagggatgtaagtgcaacggccacacactagtctactcacaagctacaactgctctctgntacttatatactcacctaattacggcattctatgtgaaaccacactgcattatctgtagcgtctgatagacagccaatgccaaaatatccgcatgtgtgcgccccgcttccactgcaatgtgtctattgtcgaagtctgcaaccagatggtatttattagacccatcctcatctggacctc

SEQ ID NO: 196 - DNA, 460 bp, Zea mays
  unsure (1)..(460): unsure at all n locations
tgcaagcttggaagattcttattccacatgtgctattctgctatgccagagccaacccatattagtcttagcaattaagcaagtatcgagttcagctctattaaaatcaactaagtatagctgaccctctaatactcccttaaatgctactgaatcatcacttcttctaaagacaagaacacctgtacccgtaaaaagacaagtgtatcccatattgcataattgagaaatagaaagcaaattgttatataaagaatctacaagaaaaacattggaaatggaatggtcagatgatatagcaattttaccaagtcctttgaccaaaccttgatttccatccccgaatgtgatagctcgttggggatcatcgtttttctcgtaggaggagaacattctnttctccccagtcatgtggtttgtgcatccgctatcaatgatccaacttgatccctcggatgca

SEQ ID NO: 197 - DNA, 383 bp, Zea mays
ccatattagccttagcaactaagcaagcatcgagttcaagtctttgttgaaatcaactaagtatagcttaccctctaatactccctcagatgctactgaattataacttcttctaaagacagtaacacctatatctgtaaatacacacgttgagcccatcttgcataattgagaaacggaaagcaaatcgtcatctaaagaatctacaagaaaaacattggaaatagaatggtcaggcgatatatcaattctaccaagtgctttgaccaaaccttgattgccatccccgaatgcgatagctctttggggatatctccttttctcgtaggaggagaacatcctcttcctccctgtcatgtcggttgtgcatccgctatctatta

SEQ ID NO: 198 - DNA, 445 bp, Zea mays
  unsure (1)..(445): unsure at all n locations
aagccctcggacccggccggactatatcgaggcccgagatcgacctcaccggactttggtcttccgccgccgcgcgaggaccgagctatccagtgagtccccgcccaattccctgcgctcatatcttctctggcatcccgtggaccttcctgacccatttgattgaactatctcgccgtgaccaggccggtctcctcgccgtcgacgagcatccccgcctgcgcgcgtggaccgaccgactccggccatctccgacggtgttccgcacaccgttgtgatcccgagacctcccctacgtcctcgaccgcttcaccggagcaatctcgtcggcggtaagcccctccgccctttcttccgccgcggatactggttgaggtaaaagaaggacctcgggctaggaattgtagaacccgaggggttttctgtaacgncagtgactcatgtg

SEQ ID NO: 199 - DNA, 445 bp, Zea mays
agcttcggggtagcaacaaagctctttctgatctctatcttcaagaggcagaggcgccaggggcttccgaagaagatatggggatcagtccaagaagaatctcttgctatttttgggggaaaaccaaggcccccatacaagaacattgtcaaatcccatcccaaagcacaaaaagatcgcagaagccgaagcccggcaaagtcaaccgaagcaggtcctgcacactgctttgtgtcactcatcctacataccagaatatgtgggtaatcatcctgcagcttctgttgcttcggctagccagccgcaggtttcttggccacagcttccacctccgccaccactacaacctgcctattcacgaggtcagcagccagaagggagccaacagacccatcagcagcgagacttcaggggggaatccgaagctcgcacagtcaacagtact

SEQ ID NO: 200 - DNA, 448 bp, Zea mays
  unsure (1)..(448): unsure at all n locations
agcttaagggacagtggacaactgcagactatttctatcaagaatcgtaagacgacgaagacacagctttcgacatagctgctcggcacgggtcccaaattgaggctgctccaatccttgacaaaatggtaactatttctttactaaaattagagaattcaattcaatgctttatgtctagttttgagcatcctaatgttttaacttgtgaatagggaaactctattatcgtatctgttgttgaacttgagcgtatctcacagataattttagatagtactacgctntcgttactatcaatgagtatcaatgtttaaaagaaaacttgtttaattgtatgttgtaacatatgtctgtaactaatatttcgattacagagggtatcacgtcgtcttcgtcgtgcagcggctcgttgtggatgccggtctctagcgagcgttgacgtgca

SEQ ID NO: 201 - DNA, 451 bp, Zea mays
tgcggcatgcaagcttcggattataaccgactaaagatttttgatttttttccataagggctgagtcaattgttgaaacttttatatagggcatacttgtaattcctcacaggctgcgtcctgtgcctataaatagtgaacagtattccggtactgttcacgcattctaagaattgcaatcgcatattccggaatccaaccttttgccaatgcagaggtattattggtattcataactcactatatttagtaaatacaatgtaattcgtctatgaagtatgtatcccttttataccttttgttttatgttatcctataaattttactggagatttattaccaagatttaagcttcgtaattatgctcttatcagccttcgtccggggtccattatccctaaaggaataatgtttcatgaacaaggacattgacattaacactttatgttgc

SEQ ID NO: 202 - DNA, 381 bp, Zea mays
atcaaatggacgtgaaaagtgtcttcctcaacggactcattaatgtttatgcctatcgcgaccaacctcccgggtttgaggatagtgagtaccctaaccatgtgtataaactctctaacgggctttatgggcctaaagcaagcccaacaacctggtatgaatgcctacaaagatttcttatcactaatggcttctaaagtggaaaggccgatcctactttatttactaaaactctcgacagtgatttgtttgtatgccaaatttatgttgatgatattatatttgggtctactaatgaatctacatgtgaggaatttagtaggatcatgacacaaaaattcgagatgtcgatgatcggggagttgaagcacttcttgggat

SEQ ID NO: 203 - DNA, 339 bp, Zea mays
ttggtggcctcaaataggcccggattgggcagtgctgaacatgaaaatccactgagcattgcattgtcatgcggtttgcgaccatgcaaatttgctcttcttcttcttttaaagcgatcctgctttctttttgttaacccaaagcccttcctccccttaagttgcgccaaaggcaaagcgccgtttggtgaccaaagacaagcgacagaacaatcgcttgggaaaaaaatatgccgccaatcgatcgcgataactttataaaacccaactaaattgtcacccctgcggagagggaaaaataattgtcttccaatgtctgtgcgcgcataaacaaaacaa

SEQ ID NO: 204 - DNA, 278 bp, Zea mays
  unsure (1)..(278): unsure at all n locations
ccgagaaccaaacctcccactcgcgaacatccctcggccacaagtccggctccgtcccttcgcaccacaccatgctcgtctcgatcgttgcggaagacacacttggctcctcaaaaacnttgatctggacgtggaactaaacgccatacctcattcctcgcgaagctgcagagctccctctgcatcgccaccacccaacccgaaccttgaagcgcttcctctacctcgtgcgggtcaatacaggaaacaaacgagcaatcgccataaacacgagcaac

SEQ ID NO: 205 - DNA, 440 bp, Zea mays
  unsure (1)..(440): unsure at all n locations
agcttctaaagggagaacacacanaggattaacttattttcattnngagaaagacagaatttggagcgcatgccaggcagggaaacatgttggagttcatcatccgcataagaacataatgacgaccgacaggccactggagctcctacacatggatctattcggcccgattgcttacataagcatcggcaggagtaagtattgtctggttattgaggatgattattctcgcttcacttgggtattctttttataggaaaaatctcaaacccaagagaccttatagggattcttgagacgggctcagaatgagttcggcttaaggatcaagaaaataagaagcgacaacgggacggagttcaagaattctcaaattgaaggcttccttgaggaggagggcatcaagcatgagttctcttctacctacacgcctcaacaaa

SEQ ID NO: 206 - DNA, 437 bp, Zea mays
tataaaactcagctggcctgcccccgcgattgctcgactggggtttgaccccccgccggaacggcgaccacagctagctcccgtaggatgtccacgcgaggcacatgcctagggagatcaccgttctccggcataccaaaatggttgccttccgagggaccccctagatcgacgtggaaacattcacgacttgggccgcagtcctcgtcgccgaggctgaggctaccgtcagaacagtccgaaaggttgtagtcgcatgcggccatgaagtcctgcatggcactggggttaccaagtccggagaaatcccaacagaagttgggcacgtcatcttcctcggaccccgagggcccgtaggtcgagatgtccgtcagccggtcctagggtgaccgcatacggtaccccacagggttcggactcacctctacgacagtgtc

SEQ ID NO: 207 - DNA, 445 bp, Zea mays
agcttggctctaagtggacaaacttgttttctatgtgcctcactggatagtctagtgtgcaccggacatgtccgatgcctggcctggtcagctggcctaggtctggaaaaaagcttgagactcgcgagctggctcgagctcgcttaggctcaggtcagctcggagaggctcacgaccctaaacgagcccgagccgagcctacttttatcgctcgctaaaacagtgacccgacccaagcctcagcgagcctgtcatatcatgtagtgctatgttttgacactattacattactatgttattgatttattttcttaattttatggatctattgctaaacatagtttaaaatatggtcatgaattttggtacatattttttattctatatataatgaaaatatacaatctatgctctaaattagatttagtgtggtggttcgtgagct

SEQ ID NO: 208 - DNA, 437 bp, Zea mays
  unsure (1)..(437): unsure at all n locations
ttagggtaaaagtcataaaatgaccccaaaaaaatattgttgaatcacatttatacccctgggataccaaaaatcctaattggaaccctggaaaaccctaagtctaaaccctaggggcctatgtgcaaaaattgtgcacatttggactaaagtgtaaaaactacagtattaaagtatataaagtcacatggttcacatttgggaaaatttacaagccaaaccctgagatttggacttaagtgcaaaagagccacacttgactcatgtgatgaagtctgaatttcagtgtgattgcttcaactttgagcccttgtgtctttcaaattaataagaatttgccctaggtcaccacaccaaatttgtagatctatcaaaggagaataactntgcttaaaagagtaagcaaggttgttatgaagaatttggagataattaaa

SEQ ID NO: 209 - DNA, 426 bp, Zea mays
  unsure (1)..(426): unsure at all n locations
agcttatgcttaaatacactggcgaatcattctgtatgtattggaacacttgaaggtattccagaggagctaaagaatatgctgttcaagattctgtgtcattctatgaagatgaatacttatcttctcaatgaactattatgtgacagtcctacagaactgcatctcagtgagtgttcatggctgagtgaggatgactttgagaaaacttttgggaaatgcagcattgaaagcttgcaggtactatntgtttactctgcagtttctgtgctatggacacattatttttcctttcagtacaatcttatttcttttggataaattaacttgtgagaactcaatcagtgtttgtcttaatgcatgatctacagcttgatatatctgggagatgcatgcctgattacatattgccaactaccttagcta

SEQ ID NO: 210 - DNA, 198 bp, Zea mays
ggtgaaaatgacacgcgccccgaccattttcaaatcatgatatttctccacatgctccgggataaatatctgcacaagaattttaacgtatacttctcgaaactgaactatctaaggggctagggtaagggtcaacaaatgattctaatgtctccaacacaagattatctttgcccgagaggctaaatatgggcctca

SEQ ID NO: 211 - DNA, 466 bp, Zea mays
  unsure (1)..(466): unsure at all n locations
ggaccttaagcaccgcagctgcagctatcctccgccacgtgatgtagtcngctatgatcaccataaggagaaggatgangcatggaggatgaggaggagtcaccaagctctggctcgtcgacctcggcggcagcgagcggttgctcaagaccggcgcgtccgggctcaccatggacgagggcaaggccatcaacctctccctgtcggcgctcggagaccgtcattgctgcgctcaggaggaagaggccccatgttccttataggtaacaggtgatccttcttcaatgtgtcatgccgcgctgggttttctaaactatcggtttcaaaaactacggcatctttcaaaattcaatcatactggagtttgctcgtcagtagtgttctcagatcatatatatttgtatcttctttttttcccctntaaccatgtgcaaaaacagcaagcttacccagattctcagcgact

SEQ ID NO: 212 - DNA, 447 bp, Zea mays
actatgaatactaagcttgctcaggccttcttcttttttcttcatagcatgaactttactgtgacactaccccacttaaaaagaatgagggtagaactcttgaatcttggggatctgaactccttgaagtacctcataacatgggtgttacggggccttcttctgctgttgctgcttgagcacgctacagagagatgactgacatagggttgattttgggagaaccttcttcttatcttctctccactattttattttcacttttcactgcctctttctttctctttgctcttcccactggaggattctatcaaagagtattaccatcatatagaggaagaaaccaaagactatgaaccatgtacaaccgtcttcaacccaagaatcacgaagcattgtgatcttacgggcgagggagtggaaaatggagttgcttgccatttggca

SEQ ID NO: 213 - DNA, 410 bp, Zea mays
  unsure (1)..(410): unsure at all n locations
agcttgacatactatattggtattaatgattatactcataatgtatccattgctatgcttataatttacatgtaacatgatattttgtcaactgtaaatccatcgataaaatagattcaagtcatgtgagtattcgaattcaaactatccgttttgtattttatccgataatattcatattcgtatgcgtatttgaattaaaatgtggtaaatagtgacatacaaattcgccgcaggcgtgcaagttaagggaccactttaaaaaaggacatccatgggctccatctcgtcaaaatctgggcggtgaaaccctcaaaccctaatcctttggcccctcaccatggcggacgctgacgacgcgccgccaacgccgncttctgaggtagtagcccccgaggagcatcccgcgg

SEQ ID NO: 214 - DNA, 448 bp, Zea mays
  unsure (1)..(448): unsure at all n locations
acactatagaantactaagcttcgagaatccgatgctctntgacagggtgcctataatttctgcaccggcacgatcgtggatgcatcctataacttcttcgtccaccccaccaaagagcttggaccctggctgatagccgtagttgatagtaaaatccttcaactctgccatatcttcttcggaaagctgttggccacccaggtgccgtacgtcgaagtctgcttctttcgaagagatttccttagctttttcctctttgtctgacacttctgtggccacctcctttttcacagccacgtctgatataatcttgtcaattcggacatggtggctgtgagatcttcgccttcagccacaacggcagctttagcatcagtagatttgacagtcttgtttgtcgaagctggaggcggcgcttgctcaattgcatggagtatggtcattata

SEQ ID NO: 215 - DNA, 444 bp, Zea mays
agcttgtgaaggatcttcatcctcacatgttctaagcggcgatgccacagccagcccatgctagtcttagctattaagcatgcatctagaccggcctcttcttttgcaaaatcaactaaataaagtttgccgtctaatacacccttaaaagctagtgaaccatcacttcttctaaagacagacacatctacatttgtaaatagacagttatatcccatattgcataattgactcacagatagcagattatatccaagagactcaactaaaaacacattagatatggagtgctcattagaaattgcaattttacctaaaccttttaccttgccttgattcccatcaccgaatataattgaatcttgggaatctttattcttgacgtaggaggtgaacatcttcttctcccccgtcatatgggttgtgcatccgctgtcgataatc

SEQ ID NO: 216 - DNA, 343 bp, Zea mays
ctcacaaaaaacataagatctacaaagttgatgactgcatagtatgccactaagcataccgctttatttttaatgacgatcactcgcaccccccatgatactagtactgatataacatctgtctccgtacctttgaccccaaatatgtgaatttggcatctaatgccaaaagtgctattttctgaaatgcacatatttagggggagaaactatatcataggattcaaacacttatttatcaaatcttatgcaagctctaaatgtgtcgtcattcatcaccaccaagggggagattgaaagagcctttatcccttttatgagatttggtgatctggataacaac

SEQ ID NO: 217 - DNA, 422 bp, Zea mays
  unsure (1)..(422): unsure at all n locations
agcttcgcatgaccgcgtgactcgattcacggttcatattatctcgggccagaaaaattcttgacatatcaccttggcagcaagggccctaggccctgagtgggagccgcaagtttcaatgtggacttcgtgaaggatttgaatgccttcagttttagggatgcatttaagcatgggttgactaaccccttcttgtatagctggcccccaataagtacgaagtcccggcttcggtgtttgaagcgcttagcctcgttgacgtcacttggatggtaatatctttgcaggaacagggttattgaggcccaccaatctttantcatgatgaggttgacgatgcgatggccctcggcgtcgttggttacttgtagaccctctgaattgcggacggctggtgtgccgatgacatggtagaacacgtc

SEQ ID NO: 218 - DNA, 321 bp, Zea mays
catcttgtatgccgatgacatattatcgactgggaatgacattcctatgccggactccgcccacgcttcactgaaaaagagcttttctatgaaggacttacgggacacaacatatattttgggcctaacgatctatcgagatacgtcgaagagacctatacgatccagtcaagatacctacattgacaacgccttgaaacggttcaacatggaacactccaacacagggttcatacctatgtcacatggtaaacaccttagccagatgcaatgtcctgcaacggctaatgagcgcgagcgcatgactcaggtaccatccgc

SEQ ID NO: 219 - DNA, 459 bp, Zea mays
agcttgtcctttataatatactagatgattatgttccattcaagcgtcctataacgatttgaagacaaaagattttgtccttgctagataggaggtgcgtatcttgcaacaaatctgcaaaccaaacttggtgtatgactacaatgagttgagtggcattggaatacaaacatgtcaatcagaaaaatgaagcattaaaacttacggacagatcctaagcaagacaatagagctggtttgtcttggagctagagaatagaacatcaacataccaaacttgaataatgtataaaatgtgcaaaggcacatatacatcaagggtacaaaagcaacaacctgtggaaagacctaaattcataaagacggtaaaaactgaatattatgaagttgtaacagacactacaagaaactgataaatgttcgtgggtaaaattaagaacgtgggtacccatgttctta

SEQ ID NO: 220 - DNA, 436 bp, Zea mays
taatttgtaaatattcgtattggcatgattctttttattatgttttaatgtttgtttacacgtagtgacttattcctagtaaggccttgaaggctaaaaaggatgccgaagacgacaacactcagattgcttttggaaatcttcgatccgaaaccatcgaggttaacgaaatggttgaggaccgtgctaattcgaaaaggttatctgaagaaaagacgataagtaatgaggctagaggccaaaatgtccaaattgaaagaaaaggttgatgaaaagagtgaagatttggatgttgaaaaggagaagcgtgagattgccaaaacagaaaagaacagagttcaaaagatttttgaagagcttccgaagtcgaacgaagaaagttttttgattgcctttatatgctgcgagaagctgaagaacatgtctactaatattg

SEQ ID NO: 221 - DNA, 448 bp, Zea mays
  unsure (1)..(448): unsure at all n locations
agcttaatgcccncaagaatagactctctatttttgttattggtaaagctcccatggttcaggatagagagggttacattttatatcctgaaaactatcctgaacataagattaagagaattcatgctagaaaacctcataatgtttctgtcggagaggaaatctccccggccgggtggcggattgcacccgccctaaatcctaaaaagaggaggggcctaagcgttttgcttgctacgagactggtggatcaacacacgggaacacgcgagggtttagagtggttcgggccaccggagcgtaataccctactccactgtgtgatgtattgcttgggagcttgtatgaacttgtgagtgtctgcctaaagttaggtctgagtgaccctgccttggaacgtcgcattgcctcccttntatagctgaaggggggcatgcacaaagggact

SEQ ID NO: 222 - DNA, 422 bp, Zea mays
tctccaaatattgaggtaaactgcgaacctcgatcatacacgatcttttttggtactccatgcaaacacacaatccgagccatatataactctgctagctgagaacttttataagtagtcttcacaggaataaagtgagccactttaatcaatctatccacaatcacccatatagcatcatatcctttctgggtgcgaggcaatccagtaataaaatccataccaatctcttcccatttccactcgggtatcttcagtggatgcaatagtccagctggcctctggtgttcagccttaactctttgacatacatcgcacatagccacatgtgcagccacatctctcttcaatccataccaccaatacttccgctttaaatcctgatacatcttagtactaccaggatgaatagaataatccga

SEQ ID NO: 223 - DNA, 466 bp, Zea mays
  unsure (1)..(466): unsure at all n locations
gatcttaagtcacctgcggcatgcaagcttgccgtctagtacacccttaanagctagttaaccatcacatcttctaaagacagacacatctacatttgtaaacaaacagttataccccatattgcataattgactaacagatagccaattatatcccagaaactctactaaaaacacattagagattgagtgctcatttgaggttgcaattttacctaacccttttaccttgccttgattcccatcaccgaatattattgaatcttgggaatctttgtttttgacgtaggaggtgaacatcttcttctcccccgtcatatggtttgtgcatccgctgtcaataatccagcttgaacccccggatgcataaacctgcaaggcaaatttaggcttgggtcttaagtacccaactcatgttgggtcctgcaagggtagcacanatatccttagggacccaaatgcaagt

SEQ ID NO: 224 - DNA, 427 bp, Zea mays
tgaaagagatgagctgttcaccttacactcgctggtgagtttatcaggaacaccaacaccagatggggggcagactatgttaactactcaatgccactaaactggcataataacatcattgacattggaaagcaaactttactggaattgtattatgttataaattttatctgctgagggtaaaatgtgagcctcagctaccaatatagtgtattgccatcataacttgggcttggaatatgattgctcagtcaattaccttcaagttaccaagctatggcgattccattgctgaaatcattaaagttactatgacattcactacctaatggcatttgcaaaatgtgttttaccgtgtctacataaccccaaaacaataaacggtctacaattaaaatcattggtcgtaccgaactgagtataaaca

SEQ ID NO: 225 - DNA, 438 bp, Zea mays
gagatattagcgcacgtttattcagtctatgaggcgagctcttgcgaacacaaataaccacatagaggagaaacacacgagacacacgaattttatctcgtggttcggccaagtaacacttgcctacttccacgttgtggcgtcccaatggacgagggttgcactcaacccctttcaagcgatccaatgatcaacttgaataccacgactttcttacttatagtctttctcccgtttgcgaggaatctccacaagttggagcctctcgcccttacaatagagatcacaaagagagcacaagagtaagactaggagagcaacacacacaacacacaaatctgcagcacacacacgcacacaagccaagacttgagctcaaaacgtagcacagagagttcacaactcgaacgtagctcatatcactaacacaatcgatca

SEQ ID NO: 226 - DNA, 327 bp, Zea mays
gcgactaacgctagcctctaattgtgcctacaagcaccacctaatggtctctcattatacatgatctaatggtacttttaagcaacaagctgttcataactcttatgcgtcttttccttggatggcacgttctttacacaaacggctatatatttatcggacaccagcctaatcatccgtgaggcgcataacgccattaaaacgagaaaaggcacggaaatgacatgctgcttcgtccaccttggcctaaaaaacagcatgaactactttggcatcaggggcaagccacatgaattcccggccagcatgggcgacatattatctgct

SEQ ID NO: 227 - DNA, 454 bp, Zea mays
gcagcagcagctactctcttggaaggccttctatttcgtcaagattctgaagcccaggacatacaagctggccaacaatcaaggcgaggtctacagcaacgcttggaacatccaacagctatgacgcttttacccttaaattggatcaagtcggtcaatgatctcgctttctttacatgcataaataaagtctaaccatcaaggaacgatcagctttgcctcggaaaagcccgaccctccctcggaggctagaagggggaatcccctctacgtcaaaaatatcctcgaaaaagtcttttgccagaacgtctttcgagcttttcgactgcgtcgataacagaatcctaaatatgagcgagagagaccttgaacggcaaggccgaccgagccgagggactcctacgcctccgggatacggatacctcactcatcaccttccgcgaaaagaactcac

SEQ ID NO: 228 - DNA, 125 bp, Zea mays
ggaacggcgcttacgtcactgtaattatcatcaaccttcctttaatgacacgatacccagctctcctgcgcgccggagacaaaactggctgtaacaccattctttgaaccacatccggtacaccc

SEQ ID NO: 229 - DNA, 448 bp, Zea mays
agctttgatccccgaagtgccaccgatgtctgtcttcttgccggcttcgacaccatctttgccttgggcgcccgaggcaccagtgggacggattgcccatgcgcagccacgacgacccgaggatcgccctcctgcgcaaccgacacaggcaacggttcttggggaacaggcggctcggcctgactccccggggtcacctcaactacctcggccaaggggtcaagtaccccctcggcctgcccccgttcttcggatcgggaccccgatgtcccggccccggataccgacgacgccagcccgctcgggggctggctcgacgacccctggcccagccttagatccgggctgaggccgaggcgggcagccatgtcatcatcttcatcatcgtcttcatcgtcgtcgtcgtcatcagggcgtctcggcgactgttccctcgggagcccatccc

SEQ ID NO: 230 - DNA, 432 bp, Zea mays
cagcttctaaagggagaacacgtgatacgtctaaccaatgttattttctcaaaagatagaccttgtgcagcttgtcaagcacagaaacaagtgggaagctctcatcatgccaaaaatgtgacgacaacatcaagacccctggagttacttcatatggacctcttccgacccgttgcctatctaaccatacgaggaagtaagcatggtcttgttatagctgacgatttttcccgcttcacttgggtattctttttgcaggataactctgaaacccaagggaccctcacacgcttcctaaggagagctcaaaacgagtttgagctcaacgtgaagaagatcagaagcgacaatgggtccgagttcaagaatcttcaagtggaggagtaccttgaggaggaaggaatcaagcacgaattctccgctgcctacaca

SEQ ID NO: 231 - DNA, 444 bp, Zea mays
  unsure (1)..(444): unsure at all n locations
agcttgtcaacaatataaacacaaattattttggctgcttcngcagatcagccgaagcctatgcttttatgtgaagatatagcagatcaaagggtgctgctgggatctcaactatctgatgagcaagaaaagactctgctaagattttgttccacaacaaatatgtcttcgcttggacagccaatgatctttgtggtgtcaacagagatgtcattgaacattcacttaatgtagatcgatctttcaggccaaggaagcaaaggctttggaagatgtctgaggataaagctaaaggtgctcggaacaatgtaaagagacttctcagtgctagtgttattagagaagtaacatatctagaatggctagctaacactgttatggcgaagaatgctaatggcaaatggagaatgtgtattgatctacagatctcacanagcatgtcta

SEQ ID NO: 232 - DNA, 429 bp, Zea mays
cgactgacatggaagactatcttgacgaaggatgaatttgttcccaagctatgtgcagaacagcttccgcatgacagcacaaaaggggaaccgacttaaagatgaaaagccaaattagacctcggagaattactatagagttattgataaaagccaagggcattaatgcaattttacatgggctgcgtcccgtgcctataaatagatgaacagtacttccgtactgttcacgctgacttggcatttgcatcacgcttgtacctttactttccttcaagccgaaggtacatttataattcgttgtcgcttatataactaaaacaaatagaaataaattaataataatgctcaaagtaatcatgttattttccgcgcttcatgtataaatctctcttatcttttattatgattatgaaggcgtgaccttca

SEQ ID NO: 233 - DNA, 447 bp, Zea mays
agcttccctttaactccgaaacgcgatactttctttattggggagaccttcagataaacataatctccgaccacaaaatacacagggcattcgacgtttgtctgcataacttttctgacgagtttgagctttcttcaaatgatgaatgattctctgaaccttttcttcggtctctctcaccatatcatgcctgaagaaaatctttcacgaggttcagaccattttatcggagtacgacatcgtcgtccatataaagcttcaaagggagccatcttgctgctttcttgatagctattattatatgagaactccgctaatggtaaacattcttcccatttccgtggaaaatccagaacacatgcccacaacatatcttcaagtatctgatcgaccctctcagtctgcccacttgtttgaggatgatacgccgaactgtggagcaactta

SEQ ID NO: 234 - DNA, 427 bp, Zea mays
  unsure (1)..(427): unsure at all n locations
catgtccgatggctgccacgccactcgtcggactgttttgtttatatccagacgccttgcgggccgccggacataacgctatgtccgacggcatcgtagacagccgtccgacataaattgcccgttggacccttgttagtctactgtcgtcgcctctagcatatttccatctacatattaaaagctcggtctcatccagtcatgaatattctatagcaggcaacatctatgacccgatcaactatgtaaggagtccatcggtgataatataagaagggaggacctaccattctgatgaaaaaggttcgatcacgagtcctatctcactacatatataaattgggtgtcacagctcattcacgaaccacgacatacngaaatagttacgcctacctattctacgtctcatagcatatccagccaccac

SEQ ID NO: 235 - DNA, 444 bp, Zea mays
agcttcaactccatctatattatggattgtcttttattcagtccagcttccttcggcccttctggcagcttcctgactcccatgaatagcaataggcccttggtccgaaggtatcttcatgcaaagataagctgggtgaagaattgcttcaaaagcatttagggtaccacgaccaatgatggcgttgtaggggtattccatgtcaacaatatcaaacacaatttgctcagtccttgtgttattaacaaatccgaaggttaccggcatggtaatcttcccgagtgccacaatctgccgccctccgaagccacaaagagggtgcgtagcatcatgaatcttgtcttcaggctcttgcatctgtctgaaggctttggcaaatataatgtcagctgcactgcctgtgtcaactaggacattgtgaaccagaaaccctttgatcacaca

SEQ ID NO: 236 - DNA, 389 bp, Zea mays
  unsure (1)..(389): unsure at all n locations
ctataaaactaagcttaaaaactggataatcgccgaaattttttttttttgaaacttccgacttgatgaacaggggtcgggtgtttccactccaaaatgtccttgactttgctgggatctaccgcaatccccctggcagacagtacatgtcccagaaattgaatttcctccagccaaaacgcgcatttactgaacttggcatataactgatgttatctcaagcgcgttaacacgatccgtaagtgttgggcatgctcntcttcatccttggaatatattaaaatatcgtctatgaagaccacnacaaacttgttcaactcgggcatgaataccgagttcatcaaatacataaagtgggccggagcatttgtcaatccgaaagacattac

SEQ ID NO: 237 - DNA, 431 bp, Zea mays
agcttagattctaatcaggtatgttcttgttaattctcttttgttccagcaactgagtaaaacttggtttctgaagcttaggctgcgtgactttatatctcctcgtgtccatcaacatctgttacagttacagtcgtactgtcgagctttcatacactattgtacaaacgactcctacttttacagcatctgttttctctggtccgcgacttgttggatgatgtcttctgtgttttatatcaatgcaatataactattggtgcaggagtaagcttgtttagaacgattaaaataaatgctgtttatggtgcacgcaatgatattgtaagttgcttctcaagaagcaaggttccataaatataaaagaaaaaaatatcatgtgaatttccacactaaagagactcgagtagccatgattctattagagtttc

SEQ ID NO: 238 - DNA, 421 bp, Zea mays
tcagctccatctatgttatggatcgcttttgagtcagtccaattaccttcggcctttctggcagcttcctgacttccatgtatagcgatgggtccttgatccgaaggtatcttcatgcaaagataggcaggatgaagaattgcttcgaaagcattgagggtgccaccgaccaataattgcattgtaagggtattccatatcaacaatgtcaaacacaacttgctcagttctagtgttgttgatgaacccgaaggttactgacatggtgatcttgcccaatgctacaatctgtctccctccgaagccacagagaggatgtgtagcatcatgaatcttatcttctggctcttgcatttgtctgaaggccttagcaaatatgatatccgctgcactgcctgtgtcaaccaagacattatggacc

SEQ ID NO: 239 - DNA, 430 bp, Zea mays
  unsure (1)..(430): unsure at all n locations
agcttgactcaggtatccacacattaatctttaattcctttttcccgtctcatggacaaggcatcctccctagatccaagtccatagactaacatagatcccgttataaagatgaatacaatcaattcctgacctcgcgcgagtgctagaaaaatcactcgacttctaccgagatcctaattagcaaagcagctactcgacctagcatactagtatccatctaaaaaaaatcctaagttcatgcaactagaggtttcaagcaactcctacacttaagtgcacaatacaatcctacaagcattaagtgtagtaaagtagcatatataaatacggttatgcataaaaccggggcttgccctcaatagctggggctgcggngagatccttgatggcagccttgggagcttgctcctggtcttcctcttggaca

SEQ ID NO: 240 - DNA, 389 bp, Zea mays
tgatcatctcacggcactccaaggcgctgtggcgagcgttggggtgcacatggcacgagtcgctattgcctccctgtggtcgagggcacttgttgcgctctttccggcccccagtcgcggttgcgacaatcggggtggtagacccgggcttctcatggtcgggggtcttctttttgccatcctgggtgacgaccccggagacccctgtctaggtgactccggtttgtggtgccgagtgccatgcacgaccctcggtagctctggcgcacttgttcgccagagtgaagagagtggagacagtttccacgtcgtgtgtggctaacttctccaacatcttttcatcacgtaccccctgggcggaagcagtgatgatcgaagcatctgatata

SEQ ID NO: 241 - DNA, 332 bp, Zea mays
cgaaaacccccatagctaatcctgcaaacgaacaggacgcacctgaatcaagcatgttaagcccgactggccaaaatcaagaatttcaagtgcaacttgaaaattgcaagaacatcaatgccccatccttagtgatcgaatctaagtccaactcctcaaataataccttttgcaaacattgtgccaaatatcatgcttcttgttgtctaaataaccatgcaaggaagaaaagcccacaggtgaaggtcaaagaaataccgaaaagatgctctagcaatgatgggttaaagaaagatgaacccaagtacaagcccctaaagcccaacaatgga

SEQ ID NO: 242 - DNA, 455 bp, Zea mays
  unsure (1)..(455): unsure at all n locations
agcttctaaagggggagcacattttangattaataattgttcatttcgagaaaaacaggatttgtatcgcatgcctagcatggaagctagttggtgctcatcattcacacaagaacatcatgacgactcataggccactggagctcctacacatggatctattcggcccgatagcttacataagcatcggcgggagtaagtactgtctagttattgtggatgaatattctcgcttcacttgagtgttctttttgcaggaaaaatctcatacccaagaaactttaaaaggattcttaagacgggctcaaaatgagttcggcttaaggatcaagaatattaaaagcgacaacgggacagagttcaagaactcacaaatcgaacgctttcttgacgaggagggccataagcatgaattctcttctccctacacgccacaacaaaatggtgtagtggaa

SEQ ID NO: 243 - DNA, 348 bp, Zea mays
aattgactcaagcctagctacgggtgcataggttgtatcgaaatccaaaccttccacttgggagtatcccctggccacaagaccagctctggtccttgtcaccacaccatgctcatcttgcttggtgcggaagacccatttggttcctacaacaatttgattaggacgtggaactaagagccatacctcaatcctagtgaagatgctgagctcctcttgaatagccaccacccaatccgaatcttgtagtgcttcctctaccctgtgtggctcaatagaggaaacaaaagagtaatgctcacaaaaatgtgcaactcgagatctagcggttacccccttatgaatgtc

SEQ ID NO: 244 - DNA, 165 bp, Zea mays
  unsure (1)..(165): unsure at all n locations
caaactccgccatacaaacacagcatgctacaacacaaaacaatactccgatgcggatagctgccgtcacgatcactcacatcccaataacgaccaggaatcctctgacgcgacggctctaacacaacgacggaaacncacgcatcggaaaaaaacgcacaaaaa

SEQ ID NO: 245 - DNA, 445 bp, Zea mays
  unsure (1)..(445): unsure at all n locations
cctgcggcatgcaagctngaatgcaagaaatcacaatgttgtactttatctgaagactgtcaaaccatcttcttgtaaatgtcatcaaacatttcagtctgtcacaaatatatcaagatggagacccatcacaaaactggaataaatgacatgcgacatgaaaccaactttggttgccgacgcaaatgctataaagaatcatagaacgtttataaagcaataataatgcaacaactaatcacatccacccatggaccacaaaagaatcaagtgttggttggtttggcgttaatctgctcccaataatgtgccagccgaacagtctgatttatagcagcggatgagatccattttaaggcctcatcgttttcaacccaattcatataatctatataaattaaaggagattgataggtttgaatcttgttaaaacctttataatttt

SEQ ID NO: 246 - DNA, 326 bp, Zea mays
acggcccacaatcatcgcggcaactgaggttatcgacaagacgccaccaagggccttaactcaacaaaccgcccctgcccaaggtacaccaatcgtcgaaggcgtaacttccgaagccgcgggtaccgaagccgcctacaggcgaagatacaaacttacaaaccacgaataagaacatccacaacatttcggaacacatggctgcggaacaagctggcgctactactgaaaaaaccatggccacagcgcccgagaaaggaaaagaaacagccgaagacccttcggacgacgaagcctactctctccagaacttagctgggccaaaa

SEQ ID NO: 247 - DNA, 261 bp, Zea mays
aaggcaccaactaccctcggaggaaagctgagcccggaagagacgacaaaaaaacgccccacgcgaggggaaacgacaaagaacgaaacccacaaaaataacactccccttggcccaaggccatacccacccctaccaaagaagaagcttcggcaccatcatgcacaaaaaatcaaaaaaacaaccagctaacaaaggagcccacctggaaaagcagaaacaaccccacacagaagggaaaaaacccaccgggacaaaacc

SEQ ID NO: 248 - DNA, 374 bp, Zea mays
  unsure (1)..(374): unsure at all n locations
tntaaagggagagcacattntatgattaacaaatgtttatcttgagaaagacacgatctgtagcgcatgccatgcagggaaacaagttggagtccatcatccacacaagaacattatgacgaccgacaggccgcttgagctactccacatggatctattcggcccgattgcttacataagcattcgcgcgagtaagcattgccctgtcatagtggatgattattctcgctccactcgggtattctttttgcacgaaaaactccacacccaacagaccttatagggactcttgacaccggctcanaacgagctctgcttaccgatcaagaaaactagaagtgataacgggaccgcagttaagaacccacaaaatt

SEQ ID NO: 249 - DNA, 209 bp, Zea mays
agtcactttttttttttccgctaggcggtctctgatcagcccaaccatattcgtttagagaaacacaatcgcctcccgaggtaaaacatgattacgaacgtacagagtctcactacaacatatattaaaagaccaatctgctaaagtcaagcatcacctaggcatgacctcaagcaaggtgaagacaataacaggatctaaacgggtgc

SEQ ID NO: 250 - DNA, 349 bp, Zea mays
tgcttacaccttccgcgctgcaccacatctttatattattctgcgccaccgcgacgccgaggtgagcccgaagatacctcttcacccatcataccccagaaatactatcaaatcctcgctttgaggacctccggaagccgaaggtccccaacagtagcccctcgcaataacaattcgtctaaaataataaactcacattgccacatggacgaacgccctacgcccaacgtcccaaaaaacaccttccctttggtacaatagcaacatccactgacaagcggggtctctcaatcctcaacgcactcggcgcataaatacggccataccgcaaactcatttgacaccctct

SEQ ID NO: 251 - DNA, 393 bp, Zea mays
  unsure (1)..(393): unsure at all n locations
agctctaagagaatggagttcgnggtgctcntttttttggggtaatcgtagtaggtcggagcgaagccagatctgtcgcccattgccgaacgactttgttgttcatgtccactttgaagtcagccaggaacttcgcctttgcttcttggatcagctgctcctggcgctcctccaacaggagctgttcttcagccggcaaggcttcccatgtcggtgtgatgatattgctgcgggaaacctcagagctattttatgaaccgaccatttacggcctgattgataggtctatatgtgttggccccagcggagtcgccaaaaagtatgttgacacctttttggaggtgacaattacttaagagaaccagcggcggtgctctctggtcatgcgcggac

SEQ ID NO: 252 - DNA, 372 bp, Zea mays
  unsure (1)..(372): unsure at all n locations
agctcgcattgcatatataaactacttgttttgttttttggctcgnctaacctagttgagataaccgncaataaagcgagtgaaaaagcttatctcgggtcaaacctgacaagtcttagtctttaagcttttaacacttaaattctttcttttcatgcaattatcggttcttgaaatatgcatgaggtactgcacttagggggagaattcaaaactcaaatcactcttgagaacccccagtgcaagcccaaatgcaaatttcaccatttgtctattttctctaacaattatctagcctactggcaactattttgaaaaatatatgatggagccaatacctgtcccaacaagtgatattttgtgtgactataa

SEQ ID NO: 253 - DNA, 331 bp, Zea mays
gcaagcatgagagcaatacaagttcttattgtgtttaactgctccggctgatcacccaaaccctgctctatgtgaaatatacacacataggtgtattgggatctcaattgtccgaaaagcaggagaaaaaccttgataagggttttcgttcaacaatcaagatgattttgcttggtcagcctatgaacttcgcggagttaacagggatggtattgagcactcgctcaatgttgatccatgcttcagacccacgaaacagaggcttcagaagatgtctgatgacaaggccgaaggcgctcggaacgaagtgaaaagactcctaagtgccgga

SEQ ID NO: 254 - DNA, 202 bp, Zea mays
accacagctgttatgttcaagaactttttaattttcccaaggaaatggaagacattactaggccaaccagtttgtgtccacatggccgcgtgatggaacgccgggagacctttaaagctacacctgcacttaatgagtgcattaacagataattaaactaaatattataagtaagtatgttaatattgacattaaaataaga

SEQ ID NO: 255 - DNA, 393 bp, Zea mays
  unsure (1)..(393): unsure at all n locations
ccggatcttagagcgacgcggctgcaacttacctgactccttttttctttatccttgagaagcctttactgtgtcgggtaagtcttgcgaaagtacacttcgtactcagagctnntgtccatgttgttttaggtgaagaagcaacaaacttttgttgcttctgttcaaaggtggacccaatagtgaaaactaggactaaagctgcgggaggaaatgtcctccattacaaactttctactgcttattcgggaggagtttttgcctccatggtttgaataatatacacagcactcatatattatgtctggtctataactatataactctgcctaactttcaataaagaagttattggactgcttcacatttctgatctccgaacaatataatgct

SEQ ID NO: 256 - DNA, 412 bp, Zea mays
  unsure (1)..(412): unsure at all n locations
acgcttatncccgacggtctcgatataagtcgtcggatgtttatgtgtcttatgtctgaccgntacatgtggccctcggacataataaattccacggatgacataattcttcttgcttttgctcattcccacaatatacattccaacgttcagaattcatagaaatatagatccacaacaaatacatattcacagaaatatacatccacaaacacatacatattcacattcataacacatattttgtcgagaaaatgacattaacaaccacaagcacatatctcacaatctcattcacgtatcacaaaggtccacacatcgaacttagttgatccacattcatataatatagtctcaaattcattcaaatgtcataataaaactactaagttcccaaagtgcattggaattg

SEQ ID NO: 257 - DNA, 389 bp, Zea mays
  unsure (1)..(389): unsure at all n locations
aagacaggaanggcagcgcacgccaagcacggaaacaagtcggtactcaccatccacacaagaacataaagacaaccgacaggccaccggagctccaacacatggaactatacggcccgaaagcatacataagcaccggcgggagaaacgactgactagctaacgaggatgaagatccacgctgcacttggggatgctctgtgcaggaaaaatctcagacccaagaaaccctaaagggatacatgagacgggctcaaaaagagctcggcttaaggagcaagacaataagaagcgacaacgggacggagctcaagaactctcagagtgaacgcgtccttgaggaggagggcatcaagcatgagatctcctcgtcccacacgccacaacaa

SEQ ID NO: 258 - DNA, 363 bp, Zea mays
  unsure (1)..(363): unsure at all n locations
ccatccaaagacaaaacatgttatgccatcaaacccgatttcagctgcacaaataatatcgctaagtaccaagcacttctattggggcttcggaaactaagggccatgggaataagaaaggtcattctaaagactgattctcaagttattgctggccacgtgaacaaaaacaccaaggcacgaaatcccaagcttgaaagatatctggatacagttcgaacgttggaagcttccttcgaaggtttntctgttaagaatattccaagaggttagaatgagcatgcagatttgctacccaaatcaccgcgttaggggcttccccttactctcacaagtattttttgaaacaataaaaagcacctt

SEQ ID NO: 259 - DNA, 409 bp, Zea mays
  unsure (1)..(409): unsure at all n locations
gagactactacatgaaatagactcgaaaaaggtattagtctgaaagtcttacattatacagcaacctccccctgaatgtgtgcatacaagttttgaatacttgtaggagacatgcactttgatttgatatcaagaggggcaaattatctataatctgagctttggcacatataagctaaatgataccaattgtaggatataagtttctgaagcattagtgtaacaccctaaaaaaataaaccatttttataatccaaatatggtatgtcctatggatgatcggaggccgtaaatgtattgatctcatcaagatgattccgatcaatcactagtttgcctttgttggagtccggatgagtcnttttgagtgccggttgatctgagccattggatattaggattgtggaag

SEQ ID NO: 260 - DNA, 434 bp, Zea mays
  unsure (1)..(434): unsure at all n locations
agctngcacacatagctcatttgaataccnttgantttatctcttnnatatgctatgactaatgtgttttcaagtctatttcaaaccaagtcataggtatattgaaagggaattggagtcttcggcgaagaaaaaggcttccactccgtaactcatacttcgccaccactccgagcaactctctcttctttgggggagaaatgagcatcaaggaaaaggacttcatccttgggggagagagtaaaagctcaaacacaaaaggatcggacttcgtctttggtataatcttaactcatttacttatgaccaaagcggaagaaattacttcaagggctctaatgattccgtttttggcgattcatgccaaanagggggagaaatgagcccaaagcataaggaccgcaccaccaccaccaaattcataaacttagtgc

SEQ ID NO: 261 - DNA, 446 bp, Zea mays
  unsure (1)..(446): unsure at all n locations
tgcggcatgcaagcttgaaaatattnggatacagcccgaaattggtttgcttcttcgaaggattctctataaaaggtgcttggaatattttaagctgaaggggtaaactctttggagctggctccaaccgagttaaagacccttttcagtcgttgtacgcaacggttgccgaagttcaaacatatgttccaaagctctttcaaagtttgttgcagctttgtatttttgtcagcttcagcttcgtattttgtctgcaaatcttttctctcttgtttgaagctctctgatttttggagaagttcctcgtttagtctagcgttatcggcttgggcttctgcaagtgaacccttcactgcctgaagcaggaaatttttcttctcaagagaagcttcgtagcctttaaatttgtcttctaaaccctagattataatttccgtctttttatc

SEQ ID NO: 262 - DNA, 253 bp, Zea mays
aaccacaaccaccgaccgaccaaccgaaccaaaaacacccgccaccgacagcccaacgaccaccccccccaccacacacaacactccccacaaaacaaccaacaccaaaatgcagcgcccaacccaaagacaccccacacccacagacaccacacaacacctacgcggaacacaaacaaaccacacaaggcccgacccagaaaccacacccgaaggaaacatcacaacctccgcaaccccgagctcccgacga

SEQ ID NO: 263 - DNA, 399 bp, Zea mays
cagggatccacacattaatccttcaaccccttttcttcgtttatggacaaggcacccttcccagacccaaggccatagaccaacacagactcccttctcaaaacgacaacaaccaaatcctgacctcgcgcgagtgctaaaaaaaacactcgacttctaccgagatcctgattaccaaccagctactccacctaccctactaacattcatcctcaaaaggaatcctaagttcatgcaactagagggttcaagcaactcctacacttaagtgcacatcgcaatcctacaagcattaactgtagtaaagcagcacacaccatacggccacgctataaaccggcggttgccttcaaatgctggggccgccgggagaaccccaatagcaccccctgaacccgc

SEQ ID NO: 264 - DNA, 437 bp, Zea mays
  unsure (1)..(437): unsure at all n locations
agcttaatgccctcaagaacaaattgtcnattttttntatgnggaaggctctcatggntcacgatggagaggagtacactttatatcctgaaaactatcctgagcataagattaggagaattcatgctagaaaacctcataatgtatctcatcatgcttttatgtataacaatgaggcttctagctctaggctttcaactcatatcaaaatgcctaanaggaaaattgtaaatgcatcaaatgagcatgacatttcatttaagacttttgatgcttcttatgtgcttactaacaaatcaggcaaagtagttgccaaatatgttgggggcaaacacaagagtcccaagacttgtgtttgggtacccaaggtgcttgtttctaatgtgaaaggacccaagaccatttgggtacctaagaacaaggcctaaaacttgttt

SEQ ID NO: 265 - DNA, 454 bp, Zea mays
  unsure (1)..(454): unsure at all n locations
agcttctctctgtgatgcacccattatatttantattttatagnactctctctatatcaaaacagaatttgttttgcttctttagtggattcatcgtcatctagttgaatataaacataaaaatcaagagctaaactattttgaaacggatggagtattcgataagtaattgagacattagtttaataatctaaacaagactggtcgatagcgcaatcgttctttacgtatttgtgtttagaatagatagatttaacatgaaaaaatgttaacgtctagttgctagggggtcctctaattttgggggcccggtgcgaccgcacactccgcaccccctcaggtatggtcttgattgcccctaaggctagctgtaagcataggatgatacccatgtcagatcgaactaatctattttctgagataattaaattaacaaagcatataggtttatata

SEQ ID NO: 266 - DNA, 385 bp, Zea mays
  unsure (1)..(385): unsure at all n locations
tcctcaagctgngcttccattcaccctgagcaatttttttattgaggtaccgaaaacatctccaatctagcctcatgaactcactcccgaagctattataagaatggggatttttgcctgggctgcgagaagcccaggtttggagcccaacgctaaaagcttctgcaacatacacgacctattgtatgagacaaagcccctgggaaaggagcaataccacaacaactttgggtgctacagcttcggcgcccgctccgggtcaagctaccctgtgccaacctttcggaagaggtggcccggaccctggatgtctgaatggctttatgtgaaaaacgatctaacagcgcccaataatgccaaaagtatcattatgtacccaattcgg

SEQ ID NO: 267 - DNA, 441 bp, Zea mays
  unsure (1)..(441): unsure at all n locations
agcttcgtttaccattgaatagtttgtagttttatcctgtcctacttcagatcctgccaaagcgtctccgggccctcagccgaaaggagacgacgaaattaaaaagatggctgaagccattatggacgaagtcgtcaatcggctcctgaatgaggctgcagaagttgttctgagagaagattaaatactattgtaaattaaacttctgaaatgtaatatgcgtgacatcttgtagccctaaatgtaatatacctgcttttatcatttaattctttacgatgcatgaaattttacatacgtaccgtttttgagtctgacgaanaaacaccttcccttcttttcatgcttcgngaagaataatttccatttgtcacaacaatattcgtggtgctctgatgaataatatccaagcttcgtgaaaatggtctccgaagctactta

SEQ ID NO: 268 - DNA, 430 bp, Zea mays
  unsure (1)..(430): unsure at all n locations
actaagcttgcccactanggaggtggctaaaccattttttatttgggctgcctcacaggaatcttcgggcaacatgtcgagcatggcatttatttctgcgtcactcagatccaaaggcacctcgaaatgaacctgcctctcgtcgccgggtattttgcccagtgaagcaaccaaagcctcaaccacttcaggagaaggtcgcactctaaggcccacaccgctatcaccagtaggaggatttgccacaaaactgatgaaggccttggaaggaggcagattccaggctaagtatgcaacaggagcaccgatattagacaccttgcctctgagtatcatctcaagccggctcaccaaatccacaacaggaatccttctgttggtaacccgagttgaactatcaacgcctcgatacagataagctagatacgct

SEQ ID NO: 269 - DNA, 411 bp, Zea mays
agcttctaagggagaacacgtgattgtgtttgattttcccgcaattcgaaaaagacagaccttgtgcagcttgtcaagcacgtcaacaagtgggaggagcgcatcacagctagaatgtgatgaccacttcaagacccctggagctgctgcatatggatctcttcggacccgtcgcctatctgagcatatgaggaagtaagtatggtctagttattggtgatgacttttcccgcttcacttgggtgatctttttgcaggataagtctgaaacccaagggaccctcaagcgcttcctcaggagagctcaaaatgagtttgagctcaacgtgaagaagatatggagcgacaacgggtccgagttcaagaaccttcaagtggaggagctccttgaggaggaatggatcaagcatg

SEQ ID NO: 270 - DNA, 444 bp, Zea mays
agcttgattatagctgcgtaatcgataagttcgttctcctttccatccatcccctctacaaattcatgatcaccatagatctccacatcatctgagtcatccacaccaaagtgcatgcctttggaagtaggcatgttgtcctccaattctttggcaagttccacagcatcctcacttgaagagatcggcatgaatttaaggtcatcagaagcttcatgggcaccatcagcttcctcatctaccttatcatgaccatcgtctgcaatggagtctgggtcatcaactttaccatgaactcgcgcgacatcagatgtgacatctcgtgtggcagcataatcaggactagcatcaacattgtgtgtactagcttctgcatcggactcactgctgtgaatttcagcaccagcaccatctccttctgtagcactgtgaataggaagcaat

SEQ ID NO: 271 - DNA, 466 bp, Zea mays
  unsure (1)..(466): unsure at all n locations
cccggatcttaagcacctgggctgcagcttagtgacagngagagaatttgctgtgttctttcgagctcttgcgcttggattgctttcttctttcttgattctttcttgcgatcaaactcacttgtaattgaggcaagagacaccaatcttgtggtggtccttgtaggaactttgtgttccaagtgattgagaagagaaagctcactcggtccgagggaccgtttgagagagggaaggggttgaaaaagacccgacctttgtggcctcctcaacggggagtaggtttgaaagaaccgaacctcggtaaaacaaatccgcgtgtctcacttcactatttcgcttgcgatttgtcttgcaccctctctcgcggactctattatatntctaacgctaacccgacttgtagatgtgtttatatttgtaaatttcagtttcgccctatttcaccccctctatgcgactttca

SEQ ID NO: 272 - DNA, 320 bp, Zea mays
acaaagcgcgcgacacagcctaacccggaccaaacctgaccagtcctacctttaagcttctaacacttaaacccttaccatacaaatgtcggtccttgaaatatgcacgaggcactgcacttagggggagcattcaaaactcaaaacactcatgaaaacccctagtgcaaggccaaaatgcaaatttcaccatttgcctattttctctaaaaattatctagcctatggcaaaatacctcgaaaatcatgagcaaatatatgagggtgccaatacctgtcccaacaagcgttattttgcgtgattataagctgagattcgg

SEQ ID NO: 273 - DNA, 379 bp, Zea mays
  unsure (1)..(379): unsure at all n locations
tccatggttcccagntaaaagaacacataccagatcatactgcagtggtctttgatttgccacctgtagccttttcagagaattctaatccagatcctaaaagcattttttatcgccgtttggtgagaaaaggttcttcggttgttacacaagtcctgatcaagtgggctggtcttccgacagagatgtctacttgtgaggactacactgtgttgcaatccaggtttccaaattctaccatctaggggccagctgattcttcaggaggggcgctgtcatgacttnttctcgaacatgcaggagagttgcgtatcatttcattagcagaaggaagagnaacaaaacacactatatatagggacctaacanaacactcatg

SEQ ID NO: 274 - DNA, 410 bp, Zea mays
acagcttgccaatacttgtctaagcaacaacatttttttcttatcacctgccgaccataccagtaacttgggctttcgcatgttatggactggatatgattggacctttcaagaaagctcaagggggatacactcatgtattggtggcgatcgacaaattcactaaatggatagagttcaagcccattgcttctttaacctctgctaacgccgtggaattcatacaagacataatattcagattcgggataccaaacagcatcataactgacttaggatccaacttcacaagttcagaattcttcgacttctgcgagcaaaagagcattcagatcaagtatgcatctgtagcacatacaagagccaacgggcaggttgagcgagccaacgggatgatattggaggcactc

SEQ ID NO: 275 - DNA, 453 bp, Zea mays
  unsure (1)..(453): unsure at all n locations
gcttgagcgatgaccggcttcagatgattcccttgtttactgggaancagcatgaccttcagcttctgccatgacgtgactgttcctggtccaagagaggagtaccaggtttgtgcaacattcttgacagccatgacgaaagacttcaccatgactgcagtattgccaccatacgaagatatggttgcttcgtagctcatcaaaaactgcttcgggtctgactgtccgtcgtacatgggaagctggggtggcttgtaagaccggggccaaggtgtagcctgcagttctgctgacagaggggaagcatcatcaaaagccaaatttccatgatggaaatcctcataccagtcaacctcgttgaagaagccctcttgatgaagctctatgtgctgaggccttcagttctactcatcttgagctagatgactaacttcttcagaagcttcatctatc

SEQ ID NO: 276 - DNA, 299 bp, Zea mays
catggacctctccagaagctgcttcccagtggaccggaaaatgccctctatgacgacgcccgatgcaccccttccgcacaatggctccccaatgagtcgatactgagcccactcgctggccatgcgctctgccgagttcttgacggccggatctcactcattctttatatactcgatgaccggccctcttcagccatcagagtctgacttgggttgatccataatgccgcactctcctgttcgatccattgaacacctcgctcgaccatctcttgacaaagactccgggcgggcccgag

SEQ ID NO: 277 - DNA, 397 bp, Zea mays
tgcaagcttgccagccctcgacccgcggttatcctttgcccgagacgacctcaccggattcgtcttcgccgcgcgcgggaccagctatcagagtggctcaccgattcttgcacccaatgttctctggatccatgaaccttctgacccatccattgctcatctcccgtgaccaggccggactctcgccgcgacgagcatcccgcctgcgcgcgtggaccgaccgactcggcatctccgatggcacccgccctcgtgtgaccccgaacctccctacgtcctcaccacttaccggagcaattcgccgcggtagcccctcgccctttcttcgctggtactgttgaggaaaagaagacctcggtaggaccgataacccgagggttttgtacgcagcgactat

SEQ ID NO: 278 - DNA, 470 bp, Zea mays
agtcacctgcggcatgcaagcttcgcaagatgtcagacgaaaagacatattctgtctttgcggaggtgcatcgcctcctggaggctaaattcatcgagccggtggcttaccccacgtggctctccaatgttgtgatggtgcagaagaaaagcggaaaatggcgcatgtgcatagacttcaccagtctcaataagtcctgcccaaaggacaatttcccgttgccacggatcgacaaaatagtcgatagcgcggccggatgcgaggtcatgtccctcctcgactgcttctccggctatcaccagatatacatgaaggaggaagacaaggccagcaccagctttataacacccttcggcacttattgctttgtcagaatgccggagggtctcaagaatgccgggtccaccttctccagactcaccaaaacggtgctcgaagggcaggtcggcagaaatgtattcacatatgtg

SEQ ID NO: 279 - DNA, 426 bp, Zea mays
  unsure (1)..(426): unsure at all n locations
gcttctggtgaaccgcggactgtccgtgcgcggaggccgtattttcctttcctgatgcacgccgactttctatttctgtggccggttctttgttctcaacggccttcgggctctatttcttttgccggggcgggtatagtggatgtgtgccattaaatgtcttctccgcctccttctnctggctctcctttgctcttaagcgctcgaattttctcttttgggatcgtgccaatcccgctgggcaccatcgaggcatggagtattttggatcggctgttttgatggtagccgtatccttttcggctgtgttggccgattcgccgaaaatcatcggccctttattggcctcctgtatgacaacatctgcagtgcctattttgacgatgtcttttttcgttgttctttgagttgctacaggcatatgcc

SEQ ID NO: 280 - DNA, 463 bp, Zea mays
  unsure (1)..(463): unsure at all n locations
gtcacctgcggcatgcaagcttcccttttaccccgaaacgtgatacttctcttcattggtgagactatcaggtagacataatcttcaacttgaaagtacaagggtttgccgcgtttgtctgcataactcttttggcgagcttgggcttctttcaaattatgcattattcgttgaaccttctcttccgtttcttttaccatatcaagcctgaaaaaccatctttctcctggttcagaccagtttaatggagtacgacaccgtcgtccatacaaagtttcaaagggtgccattttgatgctctcttgatagctattattatatgagaactccgctaatggcaaacagtcattccatntatgtgagaattccaaaacacatgctngcaacatgtcttccagtatttgatttactctctcagtctgcccactgggttgggtatgataggccgaactatgaagcaact

SEQ ID NO: 281 - DNA, 211 bp, Zea mays
acgtggaccgggtaaaacactgcgccatctttcgatccaatgcacacatagtcttcacctcaccccatgaagcttaacgtgccatttggctgaactaaatccgcctgggttggccggtacaccccccgcctactacagcacccgcttgcgcacctggaccgggcgattccggtcatccccgacgtctagccgtatcacgttgtgaccgtca

SEQ ID NO: 282 - DNA, 431 bp, Zea mays
agcttatattaagcgctatgcgttaggcatgcttttatctactgcttaacgactagagagcttaaacgtagattaatcgtgcttaagcggttataggaatataaaatataatatatatatatatatagttgcaacagaaaaacagttttagctaagaatcaggagttttagctaagctcagatgaaggcatcttatacaaagcatgtgcatgtactaattaagctttcaagtcaaagcatccgtcttaaacatagaatagaacagaggagatggaggagcaacagataaatagaaaagggggagactagaagactggaagagcaacagaactataacgtcactgaccctggtgggcggcgaccggtgaagacaggaagagccatagaggacaaacggacaggcggcgacggcagaactggtcgactgggga

SEQ ID NO: 283 - DNA, 447 bp, Zea mays
  unsure (1)..(447): unsure at all n locations
agctngcacccaggtacattgggccttttctggtttttgagcaatgtggaccagnggcgtatcgactacagctcctcgaaactttgtctgctatacataatgtgttccatgtgtcacaattgaagaagtgtctttgggttcccgatcgaaccattgaagtaacagatgttgtccttgaaccggacttgacatactctgagcaccctattcgagtcttggatcaaaaggacagggttacccgaagaaaaactctcaagttttataagatacagtggaaccagcattccgaagatgaggctacatgggaaactcaagaatttttagataagaatttcccaggctttttagcctcatgtaatttgtaaagtatacttagtcttgtaataaagtagtgacccccacatcacccctgccttgtaccagaaataaggaaataaaagtatgtcg

SEQ ID NO: 284 - DNA, 415 bp, Zea mays
caccatgtatagcatccttaatgaaactttgtttttttatgcagcccaatacgaaaacttggtcatcaaacagactgttgaccttctgaccagtcagcactaaagtaggtcggctgtctttctggtagatttgattatgtcggccttagaagcattggaaactagacttaaagagctttccaaaaagtacttatgggccttcatagctattgcgaatccaaagatatgactgtttcttctggacggttctgtagcgctgaactgactcagacatagctcttcttgctgattcgcctttgatatgttttgcccttcctctttggtaaacctaagtaatatcagcatacacgaattacgtagcataaaattctcattagtgtttaattgaaaatcataaagtagcacgtgcacctct

SEQ ID NO: 285 - DNA, 441 bp, Zea mays
  unsure (1)..(441): unsure at all n locations
gaannactaagcttgagttccnagggccctatattgcataggacctgatgtctttctcaattaacgactctcgcccccagacttgtctacgtctactcttatttggcggcactacgaatgtaaccttaatctctccatttgccacctttcttagaacatagtgagcatcgaaagcaaatggtcttgagcgcttacgcaaaggagtcggtggtttagctttgcagttgtgggccaaatgaccttcatttccacactcaaagcatttgataggcttgtgagtctgctttggcttgtattgagtgatagctttcttttgcacaaaagcattgtattcaataccactcttgttattcttctaacagcgttcatacacagctcattttggaggcattgacccttgttgaacttttgcacactcgttgcaagatgttcattttcact

SEQ ID NO: 286 - DNA, 428 bp, Zea mays
  unsure (1)..(428): unsure at all n locations
ccttaagtcacctgcggcatgcaagcttaggggatcctttattcttaagtctttttgttgttcatgctcaantctggctcacataagatgatggttcttgggttagcacttgagagaaaccctatgtgacactggggtgtcacatcaatcgtccccatcgattccccgttcgcggccagggctcaccgccttggcatacaatgctccactgaccccggctgccgccgtgcagtgaccgcacttgtatccaccatagctagcatgggagacccagtctcaggacgagtgaggagaaatgtccacgcccggcttcactcaggtactaagtttactggttaccatatttcccgacatggtgttagtacgttcaaacgcttgactcaggcatccacacattaatccttaattcctttttccgtctcatggac

SEQ ID NO: 287 - DNA, 432 bp, Zea mays
taaggacatgttggttatcatctctcgaggctttaattgatgccggtcacagctcacgctctgttccaatgtacgcaagaccacgaagaatatcttcaggcctatgtacgaaggttcttgcgactaaaggcacaagcgcctacagtgcccaatgagattgtcattgaggacatgattaagggccttcggccaggacctaccgcttagtacttcccaaggaagcccccgcaaactctagagaagctgcttcagaagatggatgagtacatccgagctgacaacgacttctgccaaagaagggaggaggcttacagattctatgaaatgaccaggggcttcagaggaagagtccatccaaggcacatcacgtccatccacaactccactcaaagtgatgacaaaggaagtcagtctcagaggtcacaatatatc

SEQ ID NO: 288 - DNA, 418 bp, Zea mays
  unsure (1)..(418): unsure at all n locations
agcttgatgatatgtcgangggctattgttatattatagtaattcaccaccatctccacagaaaccacaggtgtcatcactttcatctattgcctcaacttttctaccccatgcattgcttctcctgctcatagattcagcagaccaagcctcaaccaggcacaaagtgtatgacttgccagactctagaaagaggcccaatgaggactgtgggtgactacgaccagcatgagccatgaaatcagatacggataagttttttttgcagcaattgcaaacaataccttcccaggtaaccatcccatcctttataattttattactttttggatcccggtactgtatcacatcttttacgctcagaaagccagtcgcaagcaaccagcagattacagttttacgggccaaacttactctc

SEQ ID NO: 289 - DNA, 431 bp, Zea mays
  unsure (1)..(431): unsure at all n locations
tgacaacaccattngacatcctacaaaaaaattctgatatttagtatatcnaattcattcctcaacatgcaaaagcgggtcttatcaagtggcttagcgaaaatatcccctaattgatctttcgaactcactcctaaaatgatatctcctttcgcaacatgatctctaaggaagcgatggcggatatcaatgtgcttggtgcgagagtgttgtacaggattattagcaattttaacagcactctcattgtcacacaacaaaggtaccttttctagaactacgccattgtctacaagagtttgttccatatataaaatttgtgtgcgacaagcaccccgggcaatgtattcagccttggcggttgacaaggcaacactattttgcttttcggatgtccatgatactagtgatctcccaagcaaatggcaccc

SEQ ID NO: 290 - DNA, 469 bp, Zea mays
  unsure (1)..(469): unsure at all n locations
gatacttagacccacctgcggcatgcaacttcgcttggtaaaaatttgtgattctaacagtgcaatagcaatgaatgctgtggtaacttcacacctacccgtctgtttatatagttctgcaggtaagaaggtgaatcgtcaggattgttacaccaggcaaacagctgcttacacccgctgcgcggtggaccgcagagaccaaatagtaaccctgcagggtgggaccgctacgcgctcggaaactgaatcgtttctcgacaacgagctcagggaaggtgtttttcggaccttcggcttcctgaagcctaagagactttnttcacggatcaagctcgttacgaaaaacgatctagcaccgcgaaggggctactggtgtgaccatgcttcgtcgccgaaggtcctgcangaagaaacagcttcngctgaagctgtctgcacgtgatgaccgaaggttgctgttcatgaagct

SEQ ID NO: 291 - DNA, 282 bp, Zea mays
ccctacgatacactgaggggcgtattgacctacagaccctctggctttgaggaagatgaccagcccgacttttgttgggatttatccgggctcggtcaccctagtggcatgtgggacttcatgaccgcatgcgactaatgcctctccgattgttccgatggtatccgcaccttcaacgacgaggactgcggtccaagtcgtgaatgtttccacgctgatctagggggttccggcgaaggcaaccatctcggtatgctggaaaacggcgattcccctagggct

SEQ ID NO: 292 - DNA, 453 bp, Zea mays
  unsure (1)..(453): unsure at all n locations
ttaagtcacctgcggcatgcaagcttcngatatcccatacttctagccactccttacttacggataattcttnggtgtctgggaggcagtataggaaatcttcttcgtctgtcccattgaacactagtgcccccttcggatatttcaattctttggcatagtgattagcttcaaaaacttcttcttccgataactttntccccgaagcatgtcgcacgatatagtcgtatattttggaagatgcttcagggacggcggtatcaatttcttcgaccaaagttggctgtgacattntcatttcttcgattacctttgcaactttttcttcttctgcttccgaaggtattaccttggttggttctgaaggcccggtttcaactccggtctgttgcttcggagcttaagcaacggacacttcaacaagcgcctcagaagtttcagcagtcttctttg

SEQ ID NO: 293 - DNA, 429 bp, Zea mays
  unsure (1)..(429): unsure at all n locations
ttcgattncccgcttatccaatcaataacaccttcggtgtctttctctaacaaaatccccttcgcaagaataagcacctactttggcaaagcttttcttcaattatcttacccaatgcaaggacttctcgaagcaccttttcttggattcgcgaagctactcaacatttttctctagcctaactctcgaccattcactaatttcttaactaccttttgcaagtggaaaattttcattagcttccgcaagttttttctgaaggtcttcaatttcggccttataagcttcggactgactgataaattttgctacatcttctttcactctatccaccaatgaaagtagaattttatccttctccaacgcttcatctctcagcttgataacttctgatcgaacgttgctgagggctatcacgcagctttcatc

SEQ ID NO: 294 - DNA, 451 bp, Zea mays
  unsure (1)..(451): unsure at all n locations
agcttccggcaaaaacgccgtgttcctttactattctatacacggnggcggccgngacacaaactcgattgtcacggtctcgcaagactcttgcctcactcaatacaattacaacgactcacgcaagagacgaggggttttatagtttttctaaactcactcaactaactaggattcacctagagcaagcgcagaagcggtctaactaacctaagcacttggtaaagcacctatgctaatcgtcgagtgattctattaagcacttggtgtatgagcacttggaaatgtctacaatatgtcttggtatgttgcgggctcccacaccttcaaattgtcggttggtggggtatttataacctcccctacaattctagccattggatagaaagctgactgctctatcgccgggcgcaccggacagtccagtgctctggccacgtcagccaaccat

SEQ ID NO: 295 - DNA, 447 bp, Zea mays
  unsure (1)..(447): unsure at all n locations
agcttatctcccactattcactattactattcattgntactattcactatcgntactattcaacgatgatattcatcattactattcatcatcactattcatcgttactattcctcattactattcattgatcatccgatcacccccaaaatttcaactgctcacccatcatgctgtccagctcacctaagacctggcagaccaatattcgagtcatacgaactccggtgactgtaattntccttccagtaagaacttcccatctggtcatccatcccagatttctccaagttgagcacgcttaactttgagattctttcgaaccaggcttccaaactcaaattccaataattcttgtttctaaattcttatcaaattattccctatccaaccatgtcatccctttagcatggttcatattccagagnactttcaaaatactcttgt

SEQ ID NO: 296 - DNA, 456 bp, Zea mays
tcttaagtgacgcggctgcagctttcatgggattgagtacaagttgattatatttagcttatcaccctcagactgatggacagactgataggactaatcaagtattggaagacatgttgagagcttgtgcccttcagcatggtagtagtaggacaagagtctaccttatgctgagttctcgtataataatagttaccaggccagtctaaagatgtcactgttcgagactctatatggcaggaagtgcaggactcctctctattggatcagactacgaggaagacagttctttggacctaaacatattcaagaggcagaagaacaagttcgtataattcgagagaatttgagggtagctcaaaccaggcaaaagagctacgcggataatagaagaagaccactggaatttgaggaaagaaatcatgtgtacctcaaggtgtcaccacttcgtggaat

SEQ ID NO: 297 - DNA, 443 bp, Zea mays
  unsure (1)..(443): unsure at all n locations
agcttgggaagattcttcatctcttcatcttcatgtcggcgatgccaaagccagcccatgttagtcttagcaattaagcaagtgtctagctcagtattgttatcattaaaatcaactaagtatagctgaccatctaacactcccttaaatgctactgaatcatcacttcttctaaagacagtaacaccaacatcagtaaatagacagttgtagcccattttacacaattaagaaacagaaagcaagttgtagtctaaagaatctacaagaaaaacattagaaatggagtggtcaggggatatagcaattttacccaaacctttgatcaatccttgatttccatccctgaatgtaatcgctctttgnggatcatcatttttctcatatgaggagaacatccttttctcccctgtcatgtggtttgtgcacccgctatcgaatat

SEQ ID NO: 298 - DNA, 59 bp, Zea mays
cccccggcccggccgggctcgggctccgcgaacaccggcctaaaaccgggcccggcttt

SEQ ID NO: 299 - DNA, 450 bp, Zea mays
  unsure (1)..(450): unsure at all n locations
agctntgcaagcaagatgaaacaatctggtactttagcataatctttataagcaaggatgtcctgaatttccctatttaacccgcccaaaaatctagccatagcagattcctcaccctcctctatgttacaacgcagcatacccatttgtaattcctgataatattcttctacacttttagtaccctgtctcaattgttgcaacttgtttaacatatcacgtgcataataagaaggaacaaatctagcccgcatgacccgtttcaacgcatcccaagtttgtggcatgttattaggattcttcttaccatgttctatccaccaaacagaagcaaaatcagtaaatcactagtagcagctctaacccgcgcattctcaggaaattcatggcatggcaaactttgatcaaaccgcaatctccaagtaatgtatgcatcacggtcataattac

SEQ ID NO: 300 - DNA, 429 bp, Zea mays
  unsure (1)..(429): unsure at all n locations
ctccagattgtatttacactctcaaatcggatatgattgtatctgtggcggcaaaaacgaaccagagatgtttntggcgatggtggatttcgtggtgaccaaaacgtggtacaactcaaaactctaaaggaataaactaagaccagcaactcgacacaaccgatgcaaccaaaaactcaacaagccctaactaagtagtactagtaaatgctcactggtttataggattgcggtaaaactaatctactattttttggctttttctggactataggagataagaaaacagcgaagaaaagtaaatctctcaccgataaaccttgctctgataccaactgatgcgcacccgttgggtgattgcccgatctttccatgagagggtgtggaataactcgattggcggaggagacgacgttcacggcccgacta

SEQ ID NO: 301 - DNA, 422 bp, Zea mays
agcttctctaggacaagtgtcgcacttactactgtttgcgaagctgccacatataacaacaaaggagcccctagcattggtggagttaatgtcgttaagtctattaaatactgcttcagctcgtcgaaggctttctgctgaactggcccccatcgaaaaacttcagctgacttcaacacttcaaaaaatggtagatttctctctgctgatctggatatgaatcggtttagagatgcaagtcttcccgtcagtcgttgagcccctttctttgtgctaggtggttccattcgaagaatagcttcaattttatttggattagcctcaatcccttttgttgaaactagacaaccaaggaatttccccttctttactccgaagacacacttttctggattcagctttagaccggcctgtctaaaatt

SEQ ID NO: 302 - DNA, 272 bp, Zea mays
cccgaagcaaggttgaacttcgatgcgcacaactcgtgatttctcaaccttattagcatcaaactcacaaagcgcgagacctctgggggcatcttagaatctaggattgcccccaacaattgacttgagcggataaaaacatcaagactaaaatacatttaccacttctggtcgccacttttgctacgagggtgcgcacttggtcaccagtctgaccggtgcacatggcgcgccctccacttggaaccggaccacgaccttcctacacgctc

SEQ ID NO: 303 - DNA, 435 bp, Zea mays
  unsure (1)..(435): unsure at all n locations
agcttccatctataccgtctcagactggtttatttcagctgtaagtcttcgatgaagttttccgaattctctattttgattaccacatcatctacgtaggcctccacatgcttgccccagtggtcggctaagcacgtttggatggctctctaataagtcgctccagcgtttttgaggccgaacgacatggaggtataacagaaagcaccaaacggagtgatgaacgccgttttttcctcgtcttccttcgccaaactaatctggtggtatccggaatagcaatccaagaaagacagcacagaacatccagcggtggagtccaccacctgatctatcctcgggagcccgaagggatccttcggacagtgtttgntgagatcggtatagtcgatgcacatgcgccactccacttttattcttttgagtacaagaaac

SEQ ID NO: 304 - DNA, 410 bp, Zea mays
  unsure (1)..(410): unsure at all n locations
tgcagtgtgtgttgacctgagactgacgcgtctggcatcatgtcacngaccgaaantgagtgcgcgcgggaaaattctttaccgggccgaatggagggaggtcggcccacccgaggcttctgtcctttttcttttctatctctattctcttctctagttcaagtttaaaatattcaattcaaattcaaatttcaatcttaagtttgattctgaatttcaagcatatatttgatgcatcaaacagaaatcacagcatgacaatgcaagtaaaaattatatatttatttatattggttactttgtccatgccaaaaaaacatataattcaataaggcatgatttatgtaaaatatctcaccatattatctagttgggaaaatagttcacatacatagccaaaatttatatta

SEQ ID NO: 305 - DNA, 438 bp, Zea mays
  unsure (1)..(438): unsure at all n locations
agctntgtaaatagagacagaccaagattttgttttataaccatcgcctaaaagaagttctacagttacctcttgtgacgacatcgttatctccggacggctaagcccacactggagaggcctagctccgataccaattgaaagttccctttgacccgggaacaggatctggatgtcgcctagagggggggggtgaataggcgaataaaacttattactttaaaacttaaattcttactctactcgaagacttagtacgccgtggagtgagaagactcttcgagtaagttgcagcggaatcagagatcttgtctcaaaaatgtcctgcactttcaataaagcttataccacagataagtattgaagtgcatatattaagacgagtaagacagagagtctgattcattcacaacagagccaccgacgcaaggtttatcc

SEQ ID NO: 306 - DNA, 345 bp, Zea mays
caatgatgaactggctacgcctaacgctcaacttaatatatttcaacacagacccccatcagccaccacctgcaagggatgcctacaccaacggtagacacacctcaattaaggacggacttggccctcaacagagaagctaagaacctaacaagccataaagctcccattcccccccaagagaaagggaaagcccctatggccactactgctacaacgaaccacgcacttctgcgtcatgatacaagacaaactacaaacgcaacgcatgatgctcacgattcacatgcctatgattctcataccatgttcgcccctacttcctctcacgcgcatgatagaaat

SEQ ID NO: 307 - DNA, 440 bp, Zea mays
agcttgcagacgtccccagccctatggtcttttgctgtcaccaaatgtttccaaccctcggtgaagcccacaaataacgagcagtggtggtggatgacaggccataatctcttcttggggtccttcagcattataacatcacagccatgccttctctgtctaactgcattggaaagtgcacttctatctgctccgtgcttcccgacccgattcaggcattcagccgatgccattctccatataagtcccaaacagagaatagggatgaggtagtcaagattgtagacgctagtgctcaactactagcatctatagatatggacacaagtccaaatttggtgctactcggcaccatcgatatcactagggaaaacaaatacatcaaagagatccacttcccaatagtactcgaagatagttctttgacttgacactctcta

SEQ ID NO: 308 - DNA, 429 bp, Zea mays
  unsure (1)..(429): unsure at all n locations
taaagatcgnttcccttctctctataatctgactagtttaaaaanggagttcagcggctgatgttttcaggtcagtaccactgaatgtttcttttacgcgaggtttgatgggggcaaaccttgaggcttggtttacattggtgtcgctggtggtggctgttcacgttaatagtgcgaaagatgtgggtgagtgggatttacaccaaaataagaagttctcggttaattccatgtatctggcgcttatggcaaatggtattataagtcataataatcctctctggaaattgaagataccgcttaaaattaaggtttttatgtggtatcttggtagggggggtattctgactaaagataacttggcgtgtaggaactgaaaagggaataagctgtgtgtgttttgctctaatagtgaaacgattagacact

SEQ ID NO: 309 - DNA, 444 bp, Zea mays
  unsure (1)..(444): unsure at all n locations
agctntacagatagttcgacccgttgacctccttatactctgtagcaacgcgctccccgcttgcccctgtaacaccccaggtgtttatcgtctgctcgactacgagtgcggactttaacacgtgatagcggtgaataaaacggacactaaggtctaattatcttcgtctatcgcgattttgatatcgtgtctgtctccatctgtctaaattgccctaatttattttgcaaaatttagactctagtaatcttctggaacatgaaatccagtatcgtttggggttaaaccatcgacatcttgtcccgaactataatccttgaaatcaaatgtggttccttaaaaattcgttggaaattctttcacgcttgcgtcgcacaagtctatctgtggtctgacatcgtgatgcgtgtggcgggtgcaaaatccgtgtttgaatagcgcaca

SEQ ID NO: 310 - DNA, 427 bp, Zea mays
  unsure (1)..(427): unsure at all n locations
agcnttattaaataaatattccttatactttatcattttaaacctaaggttcacataacgtgattatttcctgatcaagaacacaattataatagtacatgtgatgaagcatttcgcaacacccaaattaatcacaacaatcatcgtgactaatatatatctatccaatctaggcatcaaccaaaagcaggagcagtgaaatggctcaccacgaccaaacatgactctaatcacgcggaagcgacgacgagcaccggttcacccaaatcaccggtcggacacctgacgagtgtcgcacgggattcgctctcttctccacaaaatcacaattcatgcacacaattaaaccacaaccaatccttcgcgcacacaacacagtccatagtaataaaaagaagttcagcactataaacaccatgacaaccca

SEQ ID NO: 311 - DNA, 438 bp, Zea mays
  unsure (1)..(438): unsure at all n locations
taccggatcttaagtcacctgcngcatgcaagcttcggtattataaaccgacttaaggtttttttgatcctttagtccataaaggtctgggtcaatgttgtaaacttttataaagggcataattgtaattcctcacaggctgtgtcctgtgcctataaataataacagtattcctttactgttcacgtgttctggcaattgtaatcacatctttcgggaaccaatctttgtcaaggcagaggtataattgtattcaatagttcaatatattcaataaatagaatttaattcgtttgtgattcatttatctcctcataccctttactttatgtcattntatatcattcaatagaatntaattacgaagacttaaccttcgtaattacattcttgtaaccttcgttcatgattcattatcctcaanggaatattgtttca

SEQ ID NO: 312 - DNA, 312 bp, Zea mays
  unsure (1)..(312): unsure at all n locations
cgagacttacgatttgattttgttttgatttctacaaaatctaaccgggaggggccttcttcaccgtatgggacacatacccaatagttagtcgaatcaaccaatcatctgcangctgcattttgaggagcctgacttatttatatgcaggcaaccaatcagactctaagtactttgttggaacttgctctcactaacaaggagagccaacaatggcgaacagtgacgttaacagggttacacgctagattgcaatagctctgtttatctggcctctcacgggcactgtgcgggggtatttatatgtacctg

SEQ ID NO: 313 - DNA, 472 bp, Zea mays
  unsure (1)..(472): unsure at all n locations
tgatctatctgctctttagagattgattgttttcttaacttaagtcttaacattgcanatgatactaaagatggctctcacgtccatacttgagggtggtccggtgaacgccttttatttactattctatgtttaccaaaccgtgataactgatatgtattataatatatataaaccaaaacaaatctcttcatgtttcaggctgctgcatggatcgttcttggtatattttcactcatcacgctggaggttgattaccttcttgttgtcggagttagcttgatatgtattttctattctatgttcaccaacccagcataactatactcttnttattttaaattattagtatatctatgcttcgtatagcaataatgtataccatatatattctttagtgggaatatnctttctataacacaaatgggtgtaactaaagctgctgtggtttgagctgaaagtatgtctgttt

SEQ ID NO: 314 - DNA, 318 bp, Zea mays
aagcaaactttacaatatacagtccatttgaaggtctaagaacagcaatcagtaatttttggtccaaaacataaacaaagaagttcccattttcctcccttaatgtagaaacgttttcttctaatttccctaaactcacaatattactcttcaattcaagaatgtgataaacatctgtcagtaccctgggaccctcatttcgatcttgcataattattgatcccataccttggatcctcacatgatatacatcactgaatttcaccattcctcaaactcttgtattgagttgtggtagcatggtcaagttcctgcata

SEQ ID NO: 315 - DNA, 391 bp, Zea mays
  unsure (1)..(391): unsure at all n locations
aatcgtattgtctacaaagaaaaaggcaccactcattggagtgaaaaagtggaaagatatagagctcaatgttagatcttctatagcctctgacgtactggtatgtgaaatttcttatttgttggtatgatctactgagatatggtctactattcccaaattactagacaattaaccttctctatatatcaaaactgaaacagcgaaggtgggagttttcaagcaatgaagacgcgcatgacaagatctggtctattgccaaggagagataccaaggatggcgatcaacgtttagctcaacatacaaggcatacaatatttatgctgaaaggatgaaaaacaagccttaagatgtanacatcgtcaagtggcattacatgatgttgtattt

SEQ ID NO: 316 - DNA, 392 bp, Zea mays
cactgtgcatcatggttttacaaatcaatactcttttatgcataatgagaagaagcttggtttgcaccctatgtcccccgatgctatcttgaaagatgaagttgctatagcatgccaagagaaaaacaaatctggtcataataaaaatctaaatgttacaaacgaattggtacaacctaagagtgataattctaaatctgctcatgtaaggaaaaatgaaatacaactgaaaagtgcttgtttccttgcttccaaatctgatttacttgaattaaacgatgttgatgcaatctgctatgtgtttatatgcaaagatgctctgttctcacttcacaacataacatctactttgccttctaatatcactaatcttttgcaggactatgctgatg

SEQ ID NO: 317 - DNA, 482 bp, Zea mays
  unsure (1)..(482): unsure at all n locations
agcttatgaagattcttcatcccaacatgggctattctgcggtgccagagccaacccatgttagtcttagcaattaagcaggtgtcgagttcagctctatcaaaatctaccaagtacagctgaccctctaacactcccttaaatgctattgaatcatcatttcttctaaagacagtaacacctacatcagtaaatagacagttgtagcccatttgacataattgagaaacggaaagcaaattgtaatctaatgaatcaacaagaaaaacattggaaatggaatggtcaggtgaaatagcaattntacccaaactttgaccaaaccttgatttccatccgcgaatgtgatcgctctttggggatcttggttcttctcatatgaggagaacatcttcttctcccctgtcatgtggtntgtgcacccgctggcgagtattcaacctgagccctcggatgcataactacaaacaatatagtctgac

SEQ ID NO: 318 - DNA, 395 bp, Zea mays
gcaccccatgtcctacgatgctattttgaaagatgaagttgctagatcttgcaaagagaaaaataaatctgttcataataaaaatccacgtgctgcaaaggagttggtacaacataagagtgacaattctaaatctactcaagtgaggaagacagaaatacaactgaaaagtgcttgttttcttgcttccaaatctgatttgcttgaattaaatgatgttgcttcaatctgctatgtatttatttgcaaggatgctttgttctcacttcacaacataccatctactttgccttctactgtcactaatcttttgcaggaatatgctgatgtatttccaaacgaagtgccacctggcctgccaccgataagaagaattgagcatcagattgacctca

SEQ ID NO: 319 - DNA, 267 bp, Zea mays
ggaagctcacatcatgccaaaaatgtgatgacaacatcaagacctctgcagctacttcatatggatctcttcagatccgtcgcctatctaagcatacgatgaagtaagtatggttttgttatagatgatgatttttcccgcatcacttgagtattctttttgcaggataaatttgatacccaaaggaccctcaagcgcttcctaatgagagcacaaaacgagcttgagctcaaagtgaacaagataagaagcgactatgggtccgag

SEQ ID NO: 320 - DNA, 388 bp, Zea mays
  unsure (1)..(388): unsure at all n locations
aacacacagnggatgttggtattattctacngtggcccgaaccactctaaatgctcgcgtgttctggtgttcggtcatcgcttaacaggacaagcaaaacacttaatccccttcctcatcttatgatatanggcgggtgcactccgtcacccggccggagaatgccctctccgacatttggcgcgccaagtatggggctatgcattaaggttttgcttgttttctcgctcaacatgatggtgcaaatcagtgagcaccgcgccgagacttcaacggatttcctggtggaggaagaagctgtttattccatgccacatgttcccaactgcccaatgccgggcactgctgctgtgcatgctacatggcagcatacaactgcgcagacatc

SEQ ID NO: 321 - DNA, 452 bp, Zea mays
  unsure (1)..(452): unsure at all n locations
agctnttctggctaaatagagtctttgatctttggtaagctntaccttgattcccaacaaaccagcatactcttgggagtcttttctttagtcgggtctgaaagtcgcctagaggggggtgaataggacgaatctgaaatttgtaaacttaagcacaactacaagccggggttagcgttagaaatataaacgagtccgagagagagggtgaaaacaaatcacaagcaaataaagagtgagacacaaggatttgttttaccgatgttcggttcttgcaaacctactccccgttgaggtggtcacaaagaccgggtctcttttaaccctttccctctctcanacgatcacttagaccgagtgagcttctcttctcaatcaaacaggacacaaagtccccgcaaggaccaccacacaattggtgtctcttgccttggtacaatngagttgatcac

SEQ ID NO: 322 - DNA, 452 bp, Zea mays
catcacggacacttgaaactaagctactccccctgggaagggcccttcatcatcgccaagattttgaagcccgggacatacaagctggccaacgatcaatgcgaggtctacaacaacgcttggaacatacaacagctacgtcgcttttacccttaaaatgtttcaagtcgtttacgtacctcgctttctttacatacataagtaaagtctaaccatcaaggaaggatcagccttacctcggcaaagcccgaccctccctcgggggctagaatgggggaaccccctctgcgtcaaatttttcctcggaaaagtcttttactataacgtctttcgtgcttttcgactgcgtcgataacagaatcctatagacgagcgagagagaccttgaacggcaatgccgaacgagccgagggactcctacgcctctgggatacggatacctcactcatcac

SEQ ID NO: 323 - DNA, 465 bp, Zea mays
  unsure (1)..(465): unsure at all n locations
agcttcatcatccgaaagacaattgtctttttagatagatacaatctcaatcctccaatcttcactgtgcactggtgagatagtaagcactgctctctccatgaactcgactgaaggtgcttttattgtttcaaaaaaatacttacgaaggtaatgggagtccctgtgccgctgacttggctaatangtctgcatgttcattttctcctcttaagatattctttactgagaaacctgcgaaagaggcttccattctttggactatgtccagatatttcttgagctttggatctcttgctctactgcttttgtcaatgtggcctgtaataacttgtgagtcagatttgaggattgcccttcttattctcattgccttaacctttggaagccccaagagaagggcttcatactctgcaatgttatttatgcagttgaactgcagtcttgctgataatatgtctgatc

SEQ ID NO: 324 - DNA, 238 bp, Zea mays
tcatcttcattcggtccattgaatattactgcccccctcggatattttaattcccttgcataatggatggcttcatgagtttcttcttcggatagacttttccccgaagcatgtcgtatcatgtaatcacgcatgctggcaagtgcttcggggatggcggtgtcaatttcttcaactaataccggttctggaatttttattgcttccgcttcaaaaggttgctccttgtaaggctctg

SEQ ID NO: 325 - DNA, 448 bp, Zea mays
  unsure (1)..(448): unsure at all n locations
agcttnncaagctctccaagttccaaattgttacaagtgatctttagtgattagaaacttaacagagagtgatccatgttntatttgattgctcttgttgcttggttatctaaatcgtgctttcttcatctctctaaaccttccaagtgaattgtaaagctagcaagagacacctatttgtgtggtgatccttccagggtcttagtgacccatgtgattgagaagaagcactcaaccggtctaagtgaccgattgagagagggaaagggttgaaatagacccggcctttgtggcctcctcaacggggactaggttctttataaccgaacctcagaaaaacacatcaccatgtctactcactttgattatcagttgatctggtttgcactctttccactctctaacgttacttgctagatcggttgagttgctccatacgtatcacatc

SEQ ID NO: 326 - DNA, 429 bp, Zea mays
  unsure (1)..(429): unsure at all n locations
gactctaccagacatacacctttgatttgtcatcttctgtgatgcctccaagcaaagcttatggtgtgtcctaatgcaaaatgagaaagtcattggttatgcatctcgcttactcaagccgcacgaacagaactaccctacccacgaccttgaattggcagccatcatccacgctctaaaaatatggaggcattatctgattgggaacaaatgccacatcttcactgatcacaagagcctaaagtacatcttcacgcaaccggacctcaacctgcatcaaagaaggtggctcgaattgatcaaggattacgacctcgaaatccactaccaccccggaaaggccaacgtattagcatacgccctcagncgaaaaccttgtggggttaaaggaacaaactttctggaagattggaagaaagaatcagctca

SEQ ID NO: 327 - DNA, 341 bp, Zea mays
agcttcggaagattacgacttcattctcttctggagtaggcacagttttctccccaacatctgccctcacaatagacatgtctcgaaaataccttcccttcatggtatcaagatgactctgcttaatgctcgatttaccgaagactgtgtgacttggtcgccacggtcgatcttcagagtcttcacccccactttctacatcataactgtcactgtcaccagtatcttcaaataaaccctccaaggtttccctagtgatcttcttcgtattggtctttgctattgactgaagaaagccgagatgcatctcctcagaaaggctcagcttcgattcaacaaca

SEQ ID NO: 328 - DNA, 457 bp, Zea mays
  unsure (1)..(457): unsure at all n locations
tgccacatgcaactattnttcctcagagcagttcttaactcttatgcaacctcgacggggctcaaagtgaattataataaatcaagtatgtaccccatcaatgtttgccagcaaagatggagattcttgctagaacactcaactgtcagacaggatcaatgcctttcacctaccttggggtccctctatgcctgtcaaaacctataatctgtcactttttaccgcttatccaaaggattgaaaggagactgtcctgtatttctgctctcctctcacaggccggaagattggagctagttaactctgttttctcagctctcccgactttcctgatgtgcacgctgaatattcttgccgccacagtcaagaagatagatgcttaccggaaacattgtctctggagaggaaatgatgtgaactcaaaaaaaccagctcttgctgcttggtgcatgattac

SEQ ID NO: 329 - DNA, 438 bp, Zea mays
  unsure (1)..(438): unsure at all n locations
agcttctaaagggagagctcatttttggactatnggagacttgttctcaaatgctatgagttaagaacaaggcaacacaaaacgttaatggttaaagtccttcgtccttcggagcattatttcccctcatgatataacgactctcggacgaaggttacgaagaacataccttcgtaagcatgatatataaaaatgaagagggattcatatgaaatataatgaacaacatgaacaattaaatatgttgttattattgaattatttttatcttattattatgaatgaatagaaataataacttattacaaatgtaccttcggcttgaaggaagataaagagtacaagcgtgacgcanaagcaaaatgtcaagccagcgtgaacagtacgggagtactgttcatctatttatatgcatgggtcgcagcccatgtaaaatac

SEQ ID NO: 330 - DNA, 370 bp, Zea mays
  unsure (1)..(370): unsure at all n locations
gcacaaagcttctttcttcctcctcatcctcatttgtgattccgctatcatttgtattagccacacaacacatgtgggaattgaaatgggaagacaaactttctggagaggtggattcatcgtttggtctccaccgttcattttcttcttccttgcaagggttagtatcacaaataccaaaggaagtagaagcacaaaatgaactatcatgtgtggaccttattaaattgcttttaattctagtccaaatatcatgcacatcacanatgggtttgtcatattttattatgaaggcatgataatcttctttgctgagggatttacttaagatgtcataagctagataggttaagcgtatacatcttaaatc

SEQ ID NO: 331 - DNA, 439 bp, Zea mays
acaacgacgaaatgactcttatcattaagagcttccggcgaatcctcaagcgaaggaaggggaaggactacaaaccccgctccaagagggtttgctaccggtgtgggtagtccgatcactatattgctaaatgtccatatacaagtgatagtgacagggacaatgatcagaaagggaagaagaagatggagaagaagaaatactacaacaagaagaagggtggcgaagcgcacatatgatgagaatggaactccgatgagagctccaccgactcctcctccgacgaggacgccgccaacatcggcatcaacaaaggtcttctcttccccaacgtcggccacatatgtctcatggctaaagatagcacaaagaagaaagtacattctaaagatacccctcacatatactactttccatgatgaaggtagctctagtgaaa

SEQ ID NO: 332 - DNA, 429 bp, Zea mays
tgacaacgaggaaatgacactcatcatcaagttctttcgtccaatcctcaagccaaagagagggaataactacaagtcccactccaagaaggtttgctaccggtgtggtaagtctggtcacttcatagctaaatgtccaatttctaatgaaagtgacagggatgacgaccagaaggggaagaagaaagaaaagaagtggtactacaagaaaggcggcgatgcccacatatgtcgtgaatgggactccgacgagagctccaccgactcctccgacgaagacgccgtctacatcaccgtcaacaatggcctgctctttctcaacatcgaccacaagtgtctcatggcttatgacggcaagaagaataaggacaatctatagccacccccaaatatacaacatctagtgatgaaggtagctctagtgatagt

SEQ ID NO: 333 - DNA, 497 bp, Zea mays
  unsure (1)..(497): unsure at all n locations
agcttataggttgaaagatacgaagcagatcatttgatccatagtgcacaactacgatatggactgttagtgggaattgtaattgcatatgccctcaagtaattgatgaaaataaatgtagtattggttttagtttggttaggggtgggtggcaaatatttttacgaataactcatgaaaatagatgtattattgatttaaagtttgtaatcaactacaaatgtccattataaatattaattgtcagtatccaatcaaaacgtgatgaactaattattaattgcacttcactacaaaacacacccatgtatccaatcaaaacgtgttgaacgaacaattacttttcatctgcaggcaacaagatctccagtctgatactgatgaagaaactacaaaagtaataattcttccttctctttatacaagtcatattcagtanacanagtaagtatataacanaaaatcagtttatttttcttttttctcaagaacacata

SEQ ID NO: 334 - DNA, 372 bp, Zea mays
accttccatccctagccttgatgaatttcttatgtcaatcactatgccgctcccagatccagtcctatgtagctgtccagtccaaacaaatcagcatgtcccccagttgactggtgctgcctccattattacaacagcagctgaggagtcttctccctatccctttcataaccttcctaccgaagatcaaacttgcaataatagtgcgcagaatttacctctcaccctgcaaactgtagatccctcttgcagtagacagtctagtggtgctcttgctggaaacccgcagctttcgagtcccattcaacgcataagcagcaggctagcaaaaaaggctatgaatagagtcggcaaggagcacttcaatagctg

SEQ ID NO: 335 - DNA, 404 bp, Zea mays
  unsure (1)..(404): unsure at all n locations
agctagccagccatcttcctcgccaagcttctctttgtgtcctgcttccgtagttctgcttcacctcgtcgtggtaaagtagccggtctctagttctttcccacgcactcggcctctcgtcttcctgctccatctctgctccagctctctcccatggccaccccagccatctcccatggtggccgagctcgcccaaccccctctctattggtggctagcgcccatctccctacgccgagcgtnctctccgtgctcgagctcgccctcagctccgtcgtgcccctgcgctcggtcctcgtcaaagtcacgcctgggtgctatccccatcgaccacgcttgctcatgcaccttcaacagctcgtcgtgtatggtagagccttcatctccgcgtccaacatctgatt

SEQ ID NO: 336 - DNA, 293 bp, Zea mays
gactcggcgcgaataaacccccctcgggaattcgccgacggcgtacggctataattcaccggactggccggtgtgcaccggactgtccggtgagccaactgtcggtcgggccaacggtcggccgcgcgatctgcgcgggacacgtggccgagccaacggctagaaggggtcatcggactggccggtgtgcaccggacatgtccggtgcgccaacggctccaagtcagccaacggtcggcttcgccatttaaggaaggaaatcggacaccggacagtgtccggtgtgcaccgga

SEQ ID NO: 337 - DNA, 482 bp, Zea mays
  unsure (1)..(482): unsure at all n locations
agcttcacatgtctcgtatgattcanaatctaattaagttataagcccatcagaatgaagcttcttcatgcgattctcacttatatgacccaaacgacagtgccacatgtaggtaggacttaaatcattaggccgaggcctcttagcactaatattacagataggtgcatcatcaagatttaaaatgaataacccattcataatggatgcaaaagccacaaacatgccattcttagagatcacacaaccattgttttcactcgcaaatgaataaccatccttcatcaaacatgaaggagacataatgtttcgactcatactaggaactagataacaattatttaactccaaaataaatcctgatgggaggtggagtngcatcagcccgacggtaacgcagcaactcttgcattattgcctacccggaaatcaacttctcctcttttcacgcttctacttcttatcattccctcgcatcgaat

SEQ ID NO: 338 - DNA, 410 bp, Zea mays
gtatctgacgaccaaaataattacactcgttagtagaatgaaaaaatgaattatgccatttacagtaatctttcttaaccaattgctcaaggggtggtatcacatgcccctcccttaatctaatgatgttattatgtaataaaatgtcaaacaatttatcacaactggacacatcaaatgtatatttcatctcttcccttttccctagacttggctttaaaaaagcacacgtcatgggcctaccctttggcgcatctacccattcagccacacatacatctgtctcttcatcactgtcattattgggctctaacatgttaaccccctgcttctctttctccctgccattcgtatctctaaatcggctattactgttattgtccctatcacgactttcatgggtgatagca

SEQ ID NO: 339 - DNA, 448 bp, Zea mays
  unsure (1)..(448): unsure at all n locations
agcttgtttatgctcaaacttaggaaaatttagtttagggattaaaaatggaaaccagagggcaaccatatttttcctagcatgcctaagtcatgtagttcacaagaaaaatctattaacccatagtccagtggaaagaaattacactctcaattattcatgaaaaatagagaaaactttaaaaagtcctaagaaaataatcctaaggagaaaacacccctaccttaggaatgactattcttttgttgagaagaacataggaaaaatgaaagttctgttggttgacatttttcaattagtaagttagttctaagtgtctttctggcattaaaccttagaaaatcataactaanaatccactaagtaaccctctatgnattttggcacagaagcatgttatgacccatatatactagcaaanataacccttagtacagaacccacacct

SEQ ID NO: 340 - DNA, 428 bp, Zea mays
  unsure (1)..(428): unsure at all n locations
gcatataagtttctggatgagaagtggtcacccaagttntgttgatgaagcaccagaagaccaatcaaggaaggaatccatgtgggagttcgcaagaaaaaggtttgcgtgttggcatcgatgcttcctcaataagctagccgccaagcgaaagctagaagcctgaagatgatctttgagtagccagaatcagcgtttgcaatcagcaaccggatgcttctgaaagaccagattttgttgaagttccatctcctcgaagaagtctgcaaagtgaagatatgtagctgaagtaaagctatacccataacccttcaaagccaaatctcgaggacgagattcattttaagtggggtagatttgtagcatcccaaaaattcaaattctgaaattgtctcaaactcgccctaaattcaaaatgaatttcaaat

SEQ ID NO: 341 - DNA, 394 bp, Zea mays
  unsure (1)..(394): unsure at all n locations
agcttgccttcgcctcattgtaccaccctcaatctctctgtcgtcgggagcgcgccaacggcaatattttcacggcgatcaagaaaatgctcctcgacgacaagaagggtaaatgggccgatctgctacctgaagcagtctgggcactgaacatgaccgagtgtcgggcgaccggattcactccctttcgcctgctatatggatcggaggccatgaccccacaagaaattaaacatgggtcccagcggacaagtgcttcagcagtacccgacgtcgacgagctaacctctaaagatctcatcgacagagaccgtgtcttcgccctgcangccctcaacaaataccatgcccaaacgaaggcctggcgcgatcacgcagtcgtccaacagaatta

SEQ ID NO: 342 - DNA, 429 bp, Zea mays
  unsure (1)..(429): unsure at all n locations
aaccgacttaaagatgattagccaaatttgtctcttttagaattacgatagagttattgataaatgtaaagggcattaatgtaattttacatggactgcgtcccgtgcctataaatatatgaacagtactcccgtactgttcacgctgacttggcatttgcatcatcatcacgcttgtactcttactttccttcaagccgaaggtacatttgtaattcgttggtgtttatataagtaaaataaatagaaataaattaataataatgttcaaagtaatcatgttattttccgtgttttgtgtataaatctctcttatcttttattatgattgtgaaggtatgtccttcacaaccttcgtccgaaattcattgtatccgaaaggaaataatgttccgaaggacgaanggctttgatatttatacatttatg

SEQ ID NO: 343 - DNA, 415 bp, Zea mays
  unsure (1)..(415): unsure at all n locations
agcttgtgccttccacttccttcgtattttgttctttccacttggtctcttgaacgcataatatatttacccgtctcctcaccgcaacgtcgactatttctcgtaacttacctgttaaggaacctacgttccaactacctacacggacaataaataaaaaattgacctccatatgccaaaagataatttggaacataagaaaattttattttttgaatacatgtaatatgattaccaatgtggttatatgtgacttangggtcaagctggtacacaggatcgtaatccaaactatatcctagtgatatactctaacaagtagtatacgattttggattactatgatattaaagccaattgcaaatttccttatgggtatgtcgaaaaatagtntagcatgctatgctgtcacatg

SEQ ID NO: 344 - DNA, 454 bp, Zea mays
  unsure (1)..(454): unsure at all n locations
agctttaccaaatggacgtgaaatgtgccttcctcaatggaccaattaaggaagaggtctatgttgagcaacctcccggctttgaagatagtgagtaccctaatcacgtatataaactctctaaggcactttatgggctcaagcaagccccaagagcatggtatgaatgcctaagagattttcttatcactaatggcttcaaagtcggaaaggccgatcctactttatttactaaaactcttgacaaatgagttgtttgtatgccaaatttatgttgatgatattatatttgggtctactaacgaatctacatgtgaggaatttagtaggatcatgacacaaaaattcgagatgtcaatgatggnggagttgaagtacttcttatgatttcaagtgaagcaactccaagagggcaccttcattagccaaacanagtatattcaagaaattctaa

SEQ ID NO: 345 - DNA, 377 bp, Zea mays
  unsure (1)..(377): unsure at all n locations
tgctctcttatagagtagtgtaagaatatcaaagaagggtgcaacatttaaatgtgaccaaagaattgagataagcaagttccattttgacaaagaataaagataccaaatcactgccgcactactcaaaggaaacacggatctgttgatcattaaccacatatggaatagaactggacaaagaattttctattcaagaaataaatacagacgctgtacagcaaaccatgagaactatatgaactataagacctatatcatctaaagtgtatcagattntcatctctggaggcattctaacatctaagctaggaccaaaaggcccacattctcggttctaatatattatagtgataaaaaatgaacaatacctacta

SEQ ID NO: 346 - DNA, 484 bp, Zea mays
  unsure (1)..(484): unsure at all n locations
agcttattaaagattatgatttggttattctctatcacccgggcaaggcgaatntggttgcagatgccttgagttgaaaggagtatgttgattcagctgttgttgcccagctacccgatgagattgttgatgatttcaggagacttaacctgnggatagttgctcacactgaaagagttactattgatgtggaacctactttggagcaagaaatccacaaaggacaaattggtgatgctaagatacaagagatcaagaatctgcttactgaaggtcgaggtccggaattcacggaagatgagcaaggcaccatatggttcaagaatcggatatgtgttcctgagattgatagtgttcgtgagactattttaaaggaagaccatgactcagattattctattcatcctgngagtaccaagatgtgtcaagatttgaagcagaagtactggtggtatggactaaagagagatgtggttgcacatgt

SEQ ID NO: 347 - DNA, 378 bp, Zea mays
tcacatctctggactaactcggctacgtcgctctttgccgttggccaatagaaaccagacctgaagacttacccaaccagagttctggatgctgcatgtattccacactgtccggcgtggatctcatctaataattgtttcctaataactgaggaaatgcacatcatgaagactcctatcgcaccccttttgtacagtgcgccccctatgagggtgtagtgggccgactatcaatgtgttttgctgtagccttatcatctggttcttcttcattctttatatacctgatgataagctctctccagtcattagagtctgactctggctagctcaaagtgttgcactcttacgcctaatctgagggaatacttgggcgtg

SEQ ID NO: 348 - DNA, 355 bp, Zea mays
agctttaccaaatggacgtgaagattgtctttctcttggacgaatcaaggaagaggtctatgttgagcaacctctgaaagttccctttgacccgggaacaagatctggatgtcgcctagaggggggggtgaataggcgaataaaacttattactttaaaacttaaattcttactctactcgaagacttagtacgcagtggaatgagaagactcttcgagtatgtcgcagcggagtggaagatcctgtctcaatatgtcctgcacttcaaatcaagcttataacacagataagtattgaagtgcagatataaaaacgagtaaggcagagagtcatgatataacagagcacacagac

SEQ ID NO: 349 - DNA, 432 bp, Zea mays
tatgaagattcttcattccaacatgtgctagtcggcgatgccagagcccacccatgttagtcttagcaattaagcaagtgtcgagttcaactctatcaaaatccactaaatatagctgaccctctaacactcccttaaatgctattgaatcatcactccttctaaagacagtaacacctacatcagttaaaaaacagttgtagcccacttgacataattgcgaaacggaaagcaagttgtagtctaaagaatctacaagaaaaacattagaaatggaatggtcaggtgaaataacaattttacccaaacctttgaccaaaccttggtttccatccccgaatgtgatagctcgttggggatcttggtttttctcatatgaagagaacaacttcttctcccctgtcatatggtttgtgcacccgctatcgatga

SEQ ID NO: 350 - DNA, 366 bp, Zea mays
  unsure (1)..(366): unsure at all n locations
tcgccggatcttaagcacgcggctgcagctttcctanatacatcctttgtcgtgtgtttgtccgttatcaccttaacccttgtcatccctcgatctgtaccttgatgcttatcatgtacccatattttaaagcttcctctcccattttagttcaagagtgttgtcttacccctccccgctcttgttcgtcccctttttcctctatcgcgtggcacgtctagtcttagctcgatcttttgatgtgccttcgcctgttacctcatgtacctttgtaatcacttgatccttccatgatgcttttcttatgcctaccttttgaattatcatctntcccatctcgatttgagaatggtgtttacctaccct

SEQ ID NO: 351 - DNA, 428 bp, Zea mays
tcggtacaccacgacttcattctcctcagggtgtgggctttttctttcaccttcatcggccctcacaatggataaatcccggaagtaccttcctctcatgttgataagatgattctccttgatagttgatttaccataaactgaatggcttggtcgccatggacgatcttcggagtcctcgccaccgctatccacatcatagctgtcactgtcaccagtatcttcggacaaaccttccagaatctcctttgtaatcttttctgtattggtttttgacattgctataagaaaccccaagtttttctcttcgtcaaggctcagcttcatctcagcaatagccttcttatcttcagacatcttcggagacgctaaaaactattttcaaagccgaagcttcaaaaccaatagcctatcaaatcgcagtgcgc

SEQ ID NO: 352 - DNA, 384 bp, Zea mays
  unsure (1)..(384): unsure at all n locations
agctnttcccgaccagtgcgactcgatgatgaggccgaggcaaactcagaggaggacttcttaccagtgatgtgggcgcagaccgccccggccacggtgtcgcgcggcccacggcggtgttctttcttcggtgcgcagtcccagttatgcacgccatggctcccagattcgacgacccaatgcctgattcgctcaatttcacgaagctctcaatccaccagtagaggccagatcgacggcgtaacccggactccattgcgacgacggcggaattgtgtggtcgacgccacccatcgatttcactacctccttggcacccgagatggatgattctcatcatggaggaagaggatcacgtcacagttttatagacggggatgagta

SEQ ID NO: 353 - DNA, 443 bp, Zea mays
tgtgaagattcttcatcccaacatgggctagtctgcggtgccagagccaacccatgttagtcttagcaattaagcaagtgtcgagttcagctctattgaaatcaactaagtatagctgaccctctaacactcccttaaatgctactgaatcatcacttttctaaagacagtaacacctatatccgtaaaaagacagttgtaacccattttacataattgagaaactgaaagcaagttataatctaaagaatctacaagaaaaaacattggaaatagaatggtcaggtgatatagcaattttgccaagtcctttgaccaaaccttgatttccatccccgaatgtgatcgctctttggggatcttgatttttctcgtaggagaacatccttttctcccctgtcatgtggtttgtgcacccgctatcgatgatctaacttgagccc

SEQ ID NO: 354 - DNA, 428 bp, Zea mays
  unsure (1)..(428): unsure at all n locations
agctnnttgcatcaagttccaatccttggctcctcgcagcccacacgaaaatattcatccttatgatcgcttcgggaataagttggtgaaggtggatttcaaatatcttcagcacctccacaacaaaacggctcaggggaaatcgtagtccagctttcaagaagcttcgaaatactacaacttcattttcctcaggagttgggcaagtcttctctccttcgtcggcccttaccatagacaaatcccggaaatatcttcccctcatgttggcaagatgactntctttaatacttgatttgccgaanaccgcatggcttggtcgccagggtcgatcttcggagtcttcgccaccactatccgcatcatagctgtcgctatcaccagtatncttagataaaccttccaaaaattctttagtgatcttctct

SEQ ID NO: 355 - DNA, 449 bp, Zea mays
tctccgccagtctaaacagttcgaacgagataaacaagatcttaatgcaaaacttgaagccgaagctcaacaaaattcagatttgagaaaactactgacaagtcttcaagaaaaatgcttggaatttagcaacaaatgcattcaacgattaagaaagattttttactcagttggagccagcagtgaaaaattcaccccctcagccgaagatctaccgaaaaccttcgaacatattgaggggagattgacgagctcgacgaagtcatagctgggcatggtgacttctgtgcctgggtggcttctcgaggcactgcttgagctttcctgaaggctggctgcgatcatggaaagattgtcaataagccaaatttcactttatcaccatcaatcccggatgacattcctgatctcgcccgaagtatctctaatagaattgtaaaaatgatatg

SEQ ID NO: 356 - DNA, 331 bp, Zea mays
gctctttacttctcgaatacccacttatcatatgggcacgtcgacctcagacacagtagatttttcaaaatccaagtggttgggttttgttgggatcaaaatgttataattgtcggggaccataattaagggtaccctcaaaactcctaaactcggctggtaaccaccatcaacacaaagctgcaaaggcctgatgggctcaatacaagtcaaagctccgcccactcaaaggacacgatctcgcctcgccttgacccagcctcgggcaagaacagcagacccaggtggattcacgtctcgctcgaggatctcctcaagcaacgggcgcacc

SEQ ID NO: 357 - DNA, 433 bp, Zea mays
  unsure (1)..(433): unsure at all n locations
attcttcgaagcatcaaaaagtcgttctaaagaacgcacagttcgtttgccgaagtcacaaaaagccgctgcacagggagtgcagtgttagttttctgctccaaagtcgttccaaatggaatgcagagcttacagcgaanagtcaacgctgataccgcctaaataaaaggcgaagcgcgaaaagtcaacgcgaataccgctgaaagtaaaaggcgaataagctcctaagggaggcttacagcgaaaaataaacgctgattccgctgaagtaaaaggcgaagaagctcctaagggaggcttaaagtaaatagacaatgctgattcaaaaagattatgtgtgttatcgcaggaatgtgtgtgtatcttctgactaaacaccatcttacataacataacatcatcgcatcatttcgcatagcataagcatcataca

SEQ ID NO: 358 - DNA, 475 bp, Zea mays
  unsure (1)..(475): unsure at all n locations
agcttgagttattntattacagaccagatttattattgtgtgctgagtagtaatatcatacaaaccaagggaggcacaaactcctcccgttaagtttaagcaaaagatcctatgtggaggaccgagtcctcccgtacttcagtcttgtttttcctcatttggcaccaccttggagcataagcaacaaaatattgtcgctttctcacctaaaaacaacaaagggataaaccctgagtatggaattactcagcaagtcttacccgactaaggaaaagactctcaagggtatgctggataaatatgagtcaaggagaggctttatcaaaaatcaacttatacttttgcagaagtagcttactaaagtgagtccttactttcaatctttaacgccatatatagtttaatagactctatttgcataagtctaattcacatacatcaaaaaacatcattttatcatagtgttacgtctgac

SEQ ID NO: 359 - DNA, 377 bp, Zea mays
cactcagactcggatgtccactctttaaagttgggaacactctgaatgcctataattcttgcactaagtccctagtgccgatatgctccgcaataactctaaattcaaccggagcaatttggcttggactccctggtgtcatgttgcactggggtctggtctctcccaaaattaattctattggattctggaccaacttctccttttcttcgtcaactttgacataaaaccactcatactttcaaccaactggccacttggtacgatagctgatcactggaaatattgtactcttgcgataagcaaaattgtatcagccaaagttttcatgcaacccatctcctctatccttggtctgataatgaaactcgtgcact

SEQ ID NO: 360 - DNA, 393 bp, Zea mays
agctctcctggtaacatataagtgatgattgtctcagtgcacctcgcagcacgggcatactgtttgacaatggactggacaggcatgccatctgtaggatggcctgtgcgccgcctgccagcggggtggacaggacacattaaatgctgagggagcatatcatctatcagtgggatagacaggcggcgcgtcttctccgcaataaatgcagaggcagcgcgacccagagaccttacgtcaggcttcacccgctggcttacgtcacgggcaataggccacgtggcagcatcgggcctccgcctgagcagagagcggaagcgcacaggtcatatcctcgacacgtgtcagtatcggacccttgcctgtccttgacataggctaaggtatcccctg

SEQ ID NO: 361 - DNA, 289 bp, Zea mays
tgggatgctctcatcacaccaaaaatgtgatgacgacatccaaaaccttggagatgctgcatatggaaccttttggacccgtcgcctatctgagcataagaagaagtaagtatgggttaattattgttgatgaattttcccgcttcacttgggtgttctttttgcacgataagtctgaaacccaagggaccatcaagcgcctcctcaggagagctcaaaatgaatttgagctcaaggtgaagaaaataatgagcgacaacgggtccgaattcaagaaccttcaagtgga

SEQ ID NO: 362 - DNA, 279 bp, Zea mays
tttcctggggagcattgttggggaatttattttttattagaaggtggctgggttgaccatgaacccccttgttgatcatgaaatcttttttctaaaaatttatgatctttatcgtacctctaaccctcatataatctattattttgtctcgaggctggtgcatctaaaggttgttaataaaacttgaaaaacaccttaatagaataacctcttcgaatcaataaaataatggagacttacttaagttgataaacaactacgggattgttgcgcgttttg

SEQ ID NO: 363 - DNA, 490 bp, Zea mays
  unsure (1)..(490): unsure at all n locations
agcttgcangcctactgcaacccctcccttttcctgaatggaagtgggaggaaataagcatggattttgtaaccggactgccccggacgcanaaagggaatgactccatctaggtaataatcgaccgtctcaccaaggtggcccacttcattccagtaaaaaccactgttggaggagccacccttgcccgaatatatcttaaagagatagtcaggctccatggtattccgcggaagatagtgtcagatagagggacacagttcacctcataattttggaagagccttcagcaagctttgggtaccaagttagagttcagcaccgcttatcaccctcagtcagatggtcaaacggagagggtcaacaagggtctcgaagatctactgagagcctgtgtgttgaccttcgacggggattgngagtncagtttaacgtacgccgaattctcatataacaacngccnatcaagcaacatcaaaatatcaccatt

SEQ ID NO: 364 - DNA, 431 bp, Zea mays
  unsure (1)..(431): unsure at all n locations
actttaaagggatgaacacatttaggactaacaaatgtttattttgagaaagacaggagttgtatcgcatgttaagcatgaaagcaagtnggtgttcatcatccacataagaacatcatgacaaccgacaggccgcttgagctactccacatggacctattctgcccgatagcttacataagcatcggcgggagtaagtattgtcttgtaattgtggatgactattctcgtttcacttggatgttctttctgcaggataaatctcatacccaagagaccttaaagggattcttgagatgggctcaaaatgagttcggcttaaggatcaaaaagattagaagcgacaatgggacagagttcaagaactctcacattgaaggctttcttgaggacgaatggcatcaacatgagttctcttcttcctacacacc

SEQ ID NO: 365 - DNA, 440 bp, Zea mays
  unsure (1)..(440): unsure at all n locations
agcttgaacgaagtaacgattaagaacaatgtcctgttacctcggattgaagatctgtttgatcagatgagaggagctacagtattctcaaaaatatatctaagatcaggctatcatcagttgaagattcgaaccgaagatatacctaaaacaactttcactacaagatatggactatatgaatttttagtcatgtcttttggactgactaatgcaccagcttactttatgaacttgatgaataaagtattcatggaataccttgaccagtttgtggtggtattcatcgacgacatactaatatattctcggagtgaagaagcacatgaagatcatctgagattagttctacagaagcttcgtgacaatgagttgtatgtgaaatttttgaagtgtgattnttggctgaaggaagtcactnntctaggtcatattatcac

SEQ ID NO: 366 - DNA, 469 bp, Zea mays
  unsure (1)..(469): unsure at all n locations
gtgacactttatactaagcttctaagggagaacactatttaggattaacaaatattcattttgagaaagacagggtttgtagcgcatgccaagcatggaagcaagttggtgctcatcatccacacaagaacatcatgatgactgacaagccactggagctcctacacatggatctattcggcctgattgcttacataagcatcggcgggagtaagtactgtctaattattgtggatgactattctcgcttcacttgagtattctttttacaggaaaaatctcatacccaagagaccttaaagggattcttgaaacaggctcaaaacgagttcggcttaaggatcaagaaaattagaagcgacaacgggacggagttcaagaactctcaaatngaaggcttccttgaggaggagggcatcaagcatgagttctcttcttcctacacgccacaacaaaatggtgtagtgga

SEQ ID NO: 367 - DNA, 485 bp, Zea mays
  unsure (1)..(485): unsure at all n locations
agcttatntagtcatgtacttgtgtcttttcattcacttctatggtacatactgtggacttgatttgtataaactntcactaacacccatgctttaatgtcacaagttcatgcaaatcaaatactttaaaaatcatcaaatctttctttcacatactcaaagttgtgttgtcatcaatgaccaaaaagggggatattggaagcatctangcccatagttaagtttagtgattaatgacaacattagattattgtgattaatatgtgtcttgcaaaggaaaattcagtttggtcacaataatagtgattgattggcttatatggtatttgctcccctattaatggaagtcaattatcaattttcaaaagatgagcatggaggttgatgactggatagttctaagtgtcaatagaagtgatggacacatagagcagcaataggaaccttatgtttcctttagccatactataaaggggcatggatgg

SEQ ID NO: 368 - DNA, 451 bp, Zea mays
  unsure (1)..(451): unsure at all n locations
tcanaaagagaaggatgcagaaagaatggaagcatggcttttcaagagaatagctgaggaaaagattaaccacacttacagagcactggatattctgaaggaggtcgtggagctgaaacaattggagatctcgtatctgaggtaccaattgcatgtgtgtaaacagaaactactggatgctggcattgacgattgtgacgttgcagatgaaacaatagatagtgataaatctctgtttggaagaaataacatggagaatctttgtcataaaatcaaaagaaattcctctctgccaacgttgcagttgaataaacagtgtacagatatggacatcaagaagaatggtggagtaccatccgcaatgagcatgctgactgatgacggttgtgagcagatttcaatagatgttatggctctcgagcccaaggaaagcttcgcaacagatttgaac

SEQ ID NO: 369 - DNA, 435 bp, Zea mays
agccttcactgcaaaatctgcaatatctttcatgtctcactagcctgccattggtctgtaattggttcgccattgactttcaaatggtatctttgagactaaattcagtatcatttacatgtcttctccaatattctattagactatatctcatatcttatacttcccatgttgcccaaatgcatatattgttgactcatatttcgttacctatgcataaaggaagttagtctattcgaatcatgtcttgcacctcaatatctcacatgctttttcctaagtaaaagatctctgtcacgaggagtatatcttcgtctctagagagggaaaattctttctaaaggagaaaactcattcacggggagtcataatgtcaagtacttcaattcaattagcgataatcttatatgaaggcaagtcccttattgcttccta

SEQ ID NO: 370 - DNA, 454 bp, Zea mays
  unsure (1)..(454): unsure at all n locations
ntagctgattcagagttccttattggtccattcccaggtttatcttctccatctcttgacataaagtgttgtcagaggtcttcaccgtaagacaatgacaggaaaccctacggcttattgcatctgccacaacattggctttgcctgggtgataatgaatttccagttcataatccttaataagctcaagccatcgcctatgtctcatattcaattctgactgggtaaagatgtacttcaagcttttatgatctgtatagatatgacagacatttcccagcagatagtgacgccaaattttcatggcatgaaccacagcagctagctccagatcatgagttgggtaatgctcctcatgtcggcgcaactgccttgaagcatatgcaattactcggccttcttgcattaatacacagccgagtccactgccagatgcatcacaatatacatcaat

SEQ ID NO: 371 - DNA, 401 bp, Zea mays
  unsure (1)..(401): unsure at all n locations
agcttggatagatttatgtngaatttattttagagacttcatttaccatgtgtgagtgatcaaatctatttggattggcttgaaattcagtgtacttgctctatgcatatgatagcaaagtctgtgcaaatttcataatcattggataagtgaaacttcttgattaagtcaatcttgtcagcacaaacacagcagttntcagcatgtacctattatgggagatgttatggctggcagcacatatgaagtcaaatgagtctcaactttttacagctgttagcagacttattaaagcacatctncaccaattttcgtggtcatagcatctgtacatcaaaatttatgaatgattctttggagtatacagaatctgtcataagtgacaagtatttgaaatattg

SEQ ID NO: 372 - DNA, 455 bp, Zea mays
tcttcaccacgcgccacgggatatcttgagagagttgatcaatgcgtcttctccttagttgtctttgcttcttgttcccacacaatttcttttgtgaccctgcatcttgatgcttattcaaacattggctttcttttgaacagcaggggttagcacatggtgatatacaattcaaatgtgcactcgtgcgagagtgaggttcacatgaatttaagttcgcaattataacctcatgagcaacattaagcatgatatggtcatcaatcattttattatgagaatatgacaacacgtcgtactcttcacctagagcaagcttttctaaatttagaatttctacttctctctcaagcatggcattttccattgtaagttgagcaacacaagatatagcatcatcattactatttggctcaattaaaattgaatcataccgttggaccaagacatcatga

SEQ ID NO: 373 - DNA, 419 bp, Zea mays
agctagtgaaggggttttcatcctcacatgtgctaagcggcgatgccacagccagcccatgctagtcttagctattaagcatgcatctagaccagcctcttcttttgcaaaatcaactaaataaagtttgccgtctaatacacccttaaaagctagtgaaccatcacttcttctaaagacaaacacatctacatttgtaaatagacagttatatcccatattgcataattgactaaccgaaagcaaattatatccaagagactctactaaaaacacattagagatagagtgctcattagaaattgcaattttacctaacccttttaccttgccttgattcccatcaccgaatataattgaatcttgggaatccttattcttgacgtaggaggtaaacatcttcttctccccgtcatatg

SEQ ID NO: 374 - DNA, 444 bp, Zea mays
  unsure (1)..(444): unsure at all n locations
tcgccctgtagaaagtgtatgtccgaaatgagacacgtantttgatcgaagggagtagtaagttacccttgattgctccgttgatcacttgtagaagccatcgttgttaaaatagtctccgcaggtaaactgccaatgttctctgtgtcctaaaatacaacatgcatacactgataacctttaagcactcttctccagtcaaagaagcagaaaatatgtgtacagaaacctatgtctacatttcaagggtagtatataataataaattaccaaggtttcattcatcatccaccctggaattgtttctgataaaagattcatgtatttctccatagcaatctcagggttcatattccctaacttctgccaagcagacctgagaaaacaataaatgatcattgatagtaattattgtggattagcactctatgtgcgtatctttac

SEQ ID NO: 375 - DNA, 486 bp, Zea mays
  unsure (1)..(486): unsure at all n locations
agcttaaagagggtgtatatgatagcgtttctcttactgacttcgaaaaagagtggggggccatggtcgaccagtacaatctcaaagacaatgagtggttctctgctttgtacagttgtcggaagcagtgggcacctgngtatatcaatcattcattctgggctggcacctctgctatcangaaggctgaaaaaactgatccatattttgatagtgttgtgagtaaaaccacccttccagttttccttgagcaatacgaggctactctgaaagagaagctggaaagagaaacatatgccgatttgcggccatactattctagactcactntgttgtcgggattgccctttgaggagcaacttgtggagctctacacagtaaccatgtttcanacgttccaagatgagattaagcaattgatgcatgttacttgtaaagaggagacagaagtgggaactcattacttacattgcagtgagtaataca

SEQ ID NO: 376 - DNA, 265 bp, Zea mays
cctaatgttgaagagtggaattcgatgttttaacgagtccgtctacgtcgttcttatcggccgtgctccccttctttctgtgaatgccctgcgcatccccctttatagatacaaagggatgggacaaccgtacatatgggggtgttgctatgttctaacacggcctgcggagaaatgcttgagccctgtataatcctatctggcggtgcggtcctgagtactgctgacgtttctttgccttcgtacatagcttaaagactattta

SEQ ID NO: 377 - DNA, 350 bp, Zea mays
  unsure (1)..(350): unsure at all n locations
agctngaaggaaaaaaggagggggaacttatcctgttaccctaccactacaaattcaagaggcatttcaaagtaccctgccaagaatggctggatacaatcgaagtaatgtgcaacgaaattcttggaaattattctaaaaaagaagatcaattgatgacagcagccttcggcacccgtctgaaacgaaggctaaaccgagtgatggatgctataggctttgaataccctgactacgagcgactggacaagggtgccgaagggcaaaaaagaaaagagtggctagtgctttgaataaggacgacgaagatcaatcaaagaagaaaaaacaagagtctgaggcgaaaacaa

SEQ ID NO: 378 - DNA, 440 bp, Zea mays
actaagcttcggtctctgctttacaacttttgtcatatgaccagtattaacctgtgaatcggttttaagaaccgcccttctaatcctcattgcctttaacttccgaagacccaaaagcaaagcttcgtacttagcaatattaagtgcaactaaaatcaagtcttgttgcgtagcaagttttaactttggagggtgcaaccaacacagcagctgctcctgccccaaaggttccccaagaaccgtcacaaaataccgtccatacttcagtatctttaattgtttcttctccttgagcccctggcgtccaatcgacaatgaagtctgctaacgcctgggattatattgaggatctgtgcacataatcaatgctgaactcattcagctccgcagcccactttccaattcttccagtagcttctctgttcctcatgacatccttc

SEQ ID NO: 379 - DNA, 407 bp, Zea mays
  unsure (1)..(407): unsure at all n locations
agcttctaatgttctatattttagatggtcttatcaaataatcaacgntgaaccaaggcgctacagcagcaggtaaatatttgcttctaatggaactacctattatttttgaactttgtaatcttacttcgcatatattcttcatatatagttgtgtattaatcataaccacagattaaaggcacataacttctaagggaaactaatgaaagggataagcaaaaaccatatcagacctctctctgcctatccatatatctgtaagacattgtgaaaatgtgcaatttgagtaatgggctcacagcatgattcatttgcccatcataataaaatacaataaaatcacagntttgggctgtcacttacatgctccactggatcggattggtgaactctggttcccatga

SEQ ID NO: 380 - DNA, 437 bp, Zea mays
ctaagcttgagtgtctcagttcttccttatatcacatatattaacgttttgttgagtcttcacaacttggagtggcttgtggtcttacaatagaccacaattacaacttaaagtaaggttgagagagagagagagtactcacacaagagcatatgattgctacacatgctagatagccaatgacatgagcgcgtgaacacaatatcatatgaacaactcgaaaattgtgatcgaatctcactaaaatcactataatgcattgatgtatagagtcagagtgttggtgtgctcttgaagtacttgggtgcttgttggaggcacctatgggccttttatagccccaagcgggagtcgttgcctccttcatttgcgggcacactataccatgatcgtgtgcccccagtctatggtctgatttgcacctttccttaaatggg

SEQ ID NO: 381 - DNA, 389 bp, Zea mays
  unsure (1)..(389): unsure at all n locations
agcttaacacagccagattcgtttcatttatacttttatacttcgttcgtttctgttgagggccttcgtcctccgaaggtcctcataaacatgatttgacaatgttttccaagtgaattatatgaacaggtattttcggattcagaattatggatatggagcacgaccaggacgaaggctgagtcagacgaaagtcgggggcagccgaagctgtgcgcaaggaagcttcggcgcgatggcagaaaggggaaccgacttaaagatgaaaagacttcgggggcctcgacagatttccataagccgttagcaaatgtaatgggcatgggtgtaattntacgtgggctgcgtcccgcgttataaatagatgaacagtactcccgtactgttca

SEQ ID NO: 382 - DNA, 437 bp, Zea mays
  unsure (1)..(437): unsure at all n locations
taaattacttgtattgcatctaaggcttgtctaacctatttgagataaccgccaacaaagcgagtgaaaaagcttaactcgggtcaaacttgacaagtcttaatttttaagcttttagcacttaaattcttactttttatgcaattgttggttcttgagatatgcatgaggtactgcacttatggggagtattcaaaactcaaatcactcatgaaaacccctattgcaagccaaaatgcaaatttcaccatttgcctattttctctaaaaattatctagcctatggcaaaatattttgaaaagtatatgagggtgccaatacctgtcccaacaagtgttattntgtgtgatcataaattgggattctggttggttgggaactatatagaanatgtcataaaattcaaaatttccctctgtctgggctcatcggacag

SEQ ID NO: 383 - DNA, 365 bp, Zea mays
  unsure (1)..(365): unsure at all n locations
gtcacctgctgcattgcaagctgaagctgngctctgcgctatgacttaatacgatcttgcggatagccttgcatataatagtctgaaagtatgagaattgtatatttggaaatctgtaatttttggatcattcttttattcttatactaattcttttttcatatagggtttaatactgagcaacactttgagagcgcataagaatgccgaagacgagagctataatattgctttcaacaacctacgaacagaggttattaagctgaggaacgaagctttggaaaaagataaaattctgcttaccttgggggataaaataaaggaagacgaagctacctctaaggctcaagctgaagctcaaaaac

SEQ ID NO: 384 - DNA, 471 bp, Zea mays
tctatatggagaacacgtgataggtctaaccaatgttcatttcgaataagatagaccttgtgcagcttgtcaagcagggaaacaggtgggaggagcgcatctcagcaagaacgtgatgaccacttcaagacccctggagctgctgcatatggacctcttcggacctatcgcctatctgagcataggaggaagtaagtatggcttagttattgttgatgacttgtcccgcttcacttgggtgttctttttgcaggataagtctgaaacccaagggaccctcaagcgcttcctcaggagggctcaaaatgagtttgagctcaaagtgaaaaagataaggagcgacaacgggtccgagttcaagaaccttcaagtggaggagttccttgaagaagaatggatcaagcacgagttctccgctccctacacaccacagcaaaatggtgtggtagagagaaagaacatgacgctcat

SEQ ID NO: 385 - DNA, 435 bp, Zea mays
  unsure (1)..(435): unsure at all n locations
agtcacctgcggcatgcaagcttgacttacaccaaaccgtttcttantcatatacattcaatggctcagcagttgtggttatgtcaatgtaaccaagctggtacgaattaattttgctattggttcatatcgcgatgttgttgactgtgatgttgcgcctatggatgcttgtaatattctgctatgtagaccatggcaattcgattccgattgtatgcatcatggtagatcaaatcaatattctctcaataccatgataagaaaattatgttgcttgccatgtccactgacgctattgtgcgtgatgatgttgctatacctaccccagcgtaaactgagaaccgctagtatacttatgttgctggaattacaaagatgggatcaatcgtaaggacatagcttgttgaacaaaaactgagtaatgattatttgctc

SEQ ID NO: 386 - DNA, 445 bp, Zea mays
  unsure (1)..(445): unsure at all n locations
agcttcagcagaatgacaaccaatgtccttcactctcaattaggcaggaatgtgctgacttatgttgatgacctcatagtaaaaagcacgaagcaagagaatcatattgctgacttgcaagagacatttgccaatttcaggcaagctggtcttaaattaaatctagaaaagtgtgtttttggagtaaagaagggcaagttcctcggctgtctgatatcaacaaagggaatcaaagctaacccaaataagactgaagctatcctttggatgaagccgccaaattcaaagaagggggctcaacggttggcaggaaggctggcatcgttaaatagatntatatcaagatcatcagaaaggaatctaccattctttgaaatactgaagttagccgaagtttccaatggggtccgactcaacanagggctttcgaagagtaaagcaatac

SEQ ID NO: 387 - DNA, 376 bp, Zea mays
gactctctcttcagaaaagcgtactatgagtggatacttaaaaattcattatacttatcgggttaagtatttacctgcatctagattcctttctattcttagatcaagcacttggcctatactatccgtcttttatcatcccttcagttcacttgatgctacgtgtaagtcagtgacaagtcttcatgtccgagaagtaacgatgatccaaatcgattaatacccagctggggatctccaaccacacaacatatgtaacaattaacccttgcatatgttaactcgcactcgggtttctcaagaccagaatgggttgacgccaaccgagagcacagatactccaccatccagcttcttgccacggatggtacacact

SEQ ID NO: 388 - DNA, 380 bp, Zea mays
  unsure (1)..(380): unsure at all n locations
agcttacaacataattgttccttcttcttttcctctgaaggatattatgaggaaccgagaagctactggaaggattggaaaatgggctgcagagctcaatgaattttgtattgaatatgttcatagatcttcgattaagtcccaagcgttagcagacttcattgccgactggacgccaggggctcatgaggaagaaacaaataaagacgccgacgcatggacagtgttttgcgatgggtcttgtggaaccttcngagcgggagcggctgctgtgttggtttcaccttccaaagttaaaacttgctatgcggcaaaactagattntagttgcacaaacaatattgccgagtacgaagccttgcttctgggtcttctgaagc

SEQ ID NO: 389 - DNA, 382 bp, Zea mays
ttgttgcgcatgccatgcatgaaagcaagttggtgctcatcatccacaccagaacataatgacgaccgacaggccactggagctcctacacatggatctattcggcccgatcgcttacattagcatcggcgggaagaagtactgtctaattattggggatgattattctcgcttcacttgggtgttctttttgcaggaaaaatcacaaacccaagagaccttaaagggattcttaagacgggctcaaaatgagttcggcttaaggatcaagaaaattagaagcgacaacgggacggagttcaagaactctcaaatcgaaggcttccttgaggaggagggcatcaagcatgagttctcttctccctacacgccacaacaaaat

SEQ ID NO: 390 - DNA, 361 bp, Zea mays
ttccgctgatcagccgaagcccatgcttctatgtgaagacataacacagcagaaggtattgctggggtcccaattatctgaaaagcgggagaaaaccttgataaggttgtcattctacaacaaacatgttgttgcgctggtcagccaacgatctatgtggtgtcaacagggacgtcattgaacattcactcaatgtcgatccatcctttagacccacgaagcataagcttcagaaaatgtctaacgataaagccgaaggcgctcggaacgaagtaaaaagacttctcaatgctagtgtcatctgagaagtaaatacccatattgctcgccacactgtatggtgaaaaagccaaggtaatgg

SEQ ID NO: 391 - DNA, 445 bp, Zea mays
  unsure (1)..(445): unsure at all n locations
ctaagcttcacagaaactataagcctgcaggggcggtactgtgtttatccccaacttccaggaaatcagcaatgtcgtcgtctcgccttgaattcctccttcttgacgtagacgcgctcggtacgaaagtgctattgcagcaaagccttcggtgctggctccatcgcgtagtgccctatatattggctgttttttttactgcacggactggaactatggaatggaacacgtcgtcgtcagctagtactactatcaacaagctgctatggtcttatcgtatatagaccaaatcaaagtgcagctaattaatatctctactataattaaagcgtggtactgcgtcatctntttacaaaaaagtccttacatttcttctaaatcaactcagtgtaaaatgataaaaattggtgcaaaaagtgggatttgaacccaaaccatgatggaa

SEQ ID NO: 392 - DNA, 380 bp, Zea mays
agcttatcttggcgtgctgccgcattttgtcttatggaagtatctgtatcactgccgtcctgagatggccggggggcaacatcaattggtcggaggtgccagtttagagatgcgccgggggcggaagaccgagtatctcgagatacctctcaaggacagcattaaaggttggcgtctggagtggtttatagtggacaattatggaaactctcttcctcctcgctcaaggagacaggcagacgttcgcactccgagttggactgaatctcccacggaccaagaagtagccgaggcgggcgtgttgcttactgaggttggattactgaaagagagaggtctgactgccgaagccgtggtcacagattttgttttcaaaaaca

SEQ ID NO: 393 - DNA, 412 bp, Zea mays
  unsure (1)..(412): unsure at all n locations
tctgaactgtatagaattatgaacaagttaggactggcaccatcctcgtctacttttaattacttgataatgggactctgcaatcaagtaaaacttgatgaggcacagcttcttttatagcacatggttagcaaaggatattgtctaagtacatcatttactatcagcttggatgcatacttcagagacggtaatgcagttggcgcactgaaatgctaggatgatatgggcaaaattggtttgcagactgattttattgccttctcagcatatattaatggcctaagccgattagattacgtgaatgaggcttatcangcatttgctgagatgacgagcagaggaattgtaccaaacaatattacttacaactccatcatatctactgtttgtaaggcaggcaatatgactg

SEQ ID NO: 394 - DNA, 352 bp, Zea mays
  unsure (1)..(352): unsure at all n locations
gcttgacattatagacacaattagctttgaccgttcctgatcactatttcgtgaanatcgatcttgaagcacgacctgtttccagccaaaatgtgttntatttattcatggacaggacagagggagtacaatatatcaaagtgtcccaactcccaagttcttatccagttatccttacagcttttaatgccaatgtcttggtttactcttcatgtgcgccccttggatttatctatgtaaatagtaaagctaccatcctcttcaattactttttccgcatgtattcttttgaatgatgctctggaacctcttattgaaatntaccacaggacacactacaatgtcaatctgc

SEQ ID NO: 395 - DNA, 446 bp, Zea mays
  unsure (1)..(446): unsure at all n locations
ngaagttggcctctgtgccatgacgaaagacgatcttgtggatagccttgcatacaacagtctgaaggacaaaaaattgtgaatttggaagtttatgaattttgaattagtcttttgttcttatgttaatccattcattctttcgtgtagggcttaatacttagcaatgccttaagggcgcaaaagaatgctgaagacgagagctgcactattgctctcaacaaccttcgaacagaggttatcaagctgagatacgaagccttggaaaaagacaaaattctacttacattggtggacaaagtaaagggggatgaagctaacttcaaggctcaatctgaaatccaaaggaatgagattgaagactataaaaaacaaatggctgaagccaaattataatgcgctcgtgccgaagctgaacgagatgccagtgagtactggaaaaatta

SEQ ID NO: 396 - DNA, 412 bp, Zea mays
agcttatgaagattctttattccaacatggtctagtcggcggtgccagagccaacccaagttagtcttagcaaccaagcaagtgtcgagttcagctctatcaaaatctactaagtatagctgaccctctaacactcccttaaatgctattgaatcatcacttcttctaaagacagtaacacctacatcagtaaatagacagttgtagcccatttgacataattgggatacggaaagcaaattgtaatctaaagaatctacaagaaaaacattggaaatagtatggtcaggtgatatagcaattttacccaatcctttgaccaaaccttggtttccatccccgaatgtgatagctagttggggaatctggtttttctcataagaagagaacatcttccttctccctgtcatgt

SEQ ID NO: 397 - DNA, 442 bp, Zea mays
  unsure (1)..(442): unsure at all n locations
tgtgtatgcatcatcactaaattaatcattgtgtgtttgaagtgtgtaatatttacttgcctttgctttgaaaaataagtggaatgttaaaatgcagatgaagtgtggttgcttggtttttttcaagtgatacaagttgttatctgttaaattgctctgcactgttgggggcaagtcatagtagtaaacaatatcttgcaaaactgacagtaacaacctcacacttcaaacccaagggcctatttggatgttatagatgtttcacgtcaacaatgatacatgaactagcatggtgcatgcgtaatcttgtcttaatctgagtttttattnttattgctgtcttgctgacacagctgtacaaattccaaatatgcactatattcacaaaatacataatattgctaataatatgtaagccgtcatggaattagtcaatcctaca

SEQ ID NO: 398 - DNA, 491 bp, Zea mays
  unsure (1)..(491): unsure at all n locations
agcttctaaagagagagcacantttaggactaaccaatgttcantttgagaaggacagggtttgtagcgcatgccaagcaggaaagcaagttggtgcccatcatccacacaagaacatcatgacgaccaacaggccgcttgagctactccacatggatctattcggcccgattgcttacataagcatcggcgggagtaagtattgtcttgtaatagtggatgattattctcgcttcacttgggtattctttttgcaggaaaaatctcaaacccaagagaccttatagggattcttgagacgggctcaaaatgagttcggcttaaggataaagaaaattagaagcgacaacggaacggagttcaagaactctcaaattgaaggcttccttgaggagganggcatcaagcatgagttctcttcttcctacacgccacaacaaaatggtgtagtggagaagaagaaaatgactctatggacatgcaagactatg

SEQ ID NO: 399 - DNA, 389 bp, Zea mays
ttgaaactctattgtcaaataagatcttatagttgattgtgcatcaagtacctcgggttatctgtacagctgcctgaaattccatgtgatcttttgtagcaatacagtgtttgtattatgcaacctttaaggtaacaacttctacacacttgttcgcttaagcaacagaatccatttttttgcaccgttcatattcataagcacaaaaactagcaagtgaaagaacctcatttatcatgttacacacctataacaacatgactatgcaagtatccatatcagcaaacttagaagcgatttatgtggaatactggaatctacatctcaactactccttatcaattaaaaaactaattcaattcaatatggattggaatgacgagtatcac

SEQ ID NO: 400 - DNA, 356 bp, Zea mays
  unsure (1)..(356): unsure at all n locations
ctgagctgcagctagaaattggttcacaatcnactattttttacaatnnttaacaaattactaaagctctattggtaaagataaaggaaaagcttcaatagtgctatgccaattctagcccaagcggcccaacaccagagggaaaacgcgcccacgcccgcgcgctctggcatctntgcagaagggaccccgggttcttggctaactggagatacgtcctgttactgtttcaccgtgtcgctaacagtttgcagtatagtcctcggttttctatttctttacaccatgaaacccacgacgtcggacggcgatgcgcaggactccgacgagcacgtgaaccggctattttgctcaac

SEQ ID NO: 401 - DNA, 453 bp, Zea mays
gacaatgataaactcgtcgccatacactcataaacacgtgttatacaacgtcgattacttttatatttgtattaaacacctatttatgtatatctcgacgctaaaaaatatacacgatacacggacgtgcttggaaagataactttccaatccaaagttcaacgctacctctatcaaaaacagaaagtaaataagccaaaatccacgattaaatgtcttgctcacatttcaccacttaagggctactatggcctagttggtaactgttgtgatgttgttctaattgctatataacataaaatacaacataatgttaaaacatctgaaccttcgtccctaaggtgtcacttcaatgaagtgttagcagcttgaggacgaaattttttaaaggaaatatatattaagcaacattgagaataatggtgaacaacaaaatatggaactcatcttgtg

SEQ ID NO: 402 - DNA, 489 bp, Zea mays
  unsure (1)..(489): unsure at all n locations
agcttgagggcgagcgagcatatcaagattttgtttgcggcggaaaaaagcaaagttggggtttgttcaccaagaaaccgccaacaaggatgtttatgcgtccactaagtcgggcgcatcacgacatatgatgtaactcagaccagacctcaaccgagcggagtaagtcagatggatttgtcagtcggatatatcaggtgaattcatcagtcggagttatcggtcggatctctcagtaaggtttgtcagtcaaaattgtcagttggatccattcgattggatttatcagacgaaacataagtcgaacaaaacgagaaatccaaacacaacaaccatgttccattcatcagaaggagatcattgcanaggaaaagagtcagttcattattgaaagtcgcctagaggggggtgaatagggcgaatctgataattataaaactaagcacaactacaagcccgggtagtgttagaattatgaacgagtccgag

SEQ ID NO: 403 - DNA, 459 bp, Zea mays
  unsure (1)..(459): unsure at all n locations
ggactcttagacactaagcttctaagggagaacacgtgataggtntaactaatgtgctattcgaaaaagatagaccttgtgcagcttgtcaagcatgcaaacatgtgggaagctcttatcacaccaaaaatgtgatgaccacatcaagacctttggagatgcttcacatggacctcttcaaacccgtcgcctatctaagtataggaggaagtaagtatggtcttgttatagttgatgacttttcccgcttcacttgggtattctttttgcaggataaatctgaaacccaagggaccctcaagcgcttcctaaggagagctcaaaatgagtttgagctcaaggtgaaaaagataaggagcgacaatgggtccgagttcaagaaccttcaagtggaggagtaccttgaggaggaanggatcaagcacgagttctccgctccctacacaccacagcataatg

SEQ ID NO: 404 - DNA, 410 bp, Zea mays
  unsure (1)..(410): unsure at all n locations
agcttaggaatgaactcaatatcctcgattctctgaactntgattgaaatcttgcacacatagctcatttatatacctttgatcatgtctctttcatttggtacaaatgcatatttcttattcttcttgtgccaaagctaagactaatgtgatcccaagtgtatttctatccttagtcttaaattaaaagggagatggagtattcggcaaaggcaaggcttccactaagactccgtcggtatcatttatcctttgtcctactcatgaactttcattcatatccttttacaaagagggagaaagtaataggcctctaaagtttctctgtatttggtgcttaatgcccaaaggggagaaattaatatgcccaaagcaaaggactgcacaccaccctgtttctaaaacttttt

SEQ ID NO: 405 - DNA, 465 bp, Zea mays
tcagctccatctatgttatggattgctgttgagtcagtctcttttccctctgtccttctggcagcttcctgacttccatgaatagcaatgggtccttgatccgaaggtatcttcatgcaaaggtaagcaggatgaaggattgcttcgaaagcattgagggtgccacgaccaataattgcattgtaagggtattccatctcaacaatgtcaaacacaacttgctcagttctggtgttgttgatgaatccgaaggtcactggcatggtgatcttgcccagtgctacaatttgtcttccgccgaagccacagaaaaggtgtgtagcatcatgaatcttatcttctggatcttgcatttgtctgaaggccttagcaaatataatatcagctgcactgcctgtatcaaccaatacattgtggaccatataccctttgataacgcaagaaataaccatagcatcattatga

SEQ ID NO: 406 - DNA, 389 bp, Zea mays
agcttctaaaggagaacacgtgataagtctatctatgttactttcgaaaaagatagaccttgtgcagctggtcaagcagagaaacaggtgggaagctctcatcatgccaaaaatgtgatgacaacattaagacccctagagttacttcatatggacctcttcggacaagtcgcctatctaagcataggaggaagtaagtatggtcttgttatagttgatgatttttcccgcttcacttgggtattctttttgcaggataaatctgaaacccaagggaccctcaagcgcttcctaaggagagctcaaaatgagtttgagcttaatgtgaagaagataaggagcgacaatgggtccgagttcaagaaccttcaagtggaagagtatcttga

SEQ ID NO: 407 - DNA, 395 bp, Zea mays
  unsure (1)..(395): unsure at all n locations
actcgtaccagaaacaactaggtaagtatcgatgtacacataactttcggattaagtaaacgcagttagtgtttatgaacgggtaatgaccacgacattatttgcaagtcatacggggggccaaaaaggccaaaggggcaataagaactgctgttaaaaaaatgataaactcggagtacatggtgcataaatgttcgtaataattcagaagcatgtcgatagattggatatgaattccactgattgagcataatcattttgaaaaataacattgcctgccaattttgaacttttccaaatgataattgagccacccgagttccccaccgaatgaacaaaagcaaaagaatcaaagtgattaggacagaaattntttatatatgccgcatcgaaaa

SEQ ID NO: 408 - DNA, 407 bp, Zea mays
  unsure (1)..(407): unsure at all n locations
agcttatgagtctgctntggcttgtattgtgttgtatttntcttttgcacaaaagaattatatccaataccactcttgttgcttttcatgacagtgttcatgagcaattcattttggaggtattggcccttgttgaacttttgcgcacttgttgcaagatgttcattttcactcttaagtttcttgacctcanttttaagcctttcattatccactgccaactcattgttgaagtcattgttctcaatggtaacctttcctctagtacttgcattagtcaagtatctcttcaatttttggttgtctaatgtcaagacttcaactntttcggtcagttcatcatgtaaactagtttgatcaccttgactcanatcatcacatgatgttgctacatcaatcttaacaac

SEQ ID NO: 409 - DNA, 402 bp, Zea mays
  unsure (1)..(402): unsure at all n locations
cataaagaaaaggaagtacgacgaagcacgcttcttcaataatgcttcgacaccaaccaatcatagatacagtgctatgagaatgtattttttggggacttgttctcaaatgctatgaatcattaactaggccacataaattgtttaatatcacagcccttcgtccttcaaatcattatttcccttcgtatataacgatattatgaccaatgtcatgaangatgtaccctcatgattacttataactttggagaacattctaacaatgtacatatagtaacataatttctgtaaacattattatttatggattttcatttctattactcgcgtacacaatgataaatacaatttacctcaccttgaagaaaataatacaagctcgtcaaattgatttctctt

SEQ ID NO: 410 - DNA, 376 bp, Zea mays
actaccctttaccacacatgagcgtgcagtggttttttcacctttgtgaatagcagtggctgggtgctcaaaaactcttggtatgtagctgcggccggtgggcactattgttgccctctgccaaactgctatggtggagctgacgtttcaccagatgccacaaaatttcgtgtctgttgtggacattctacatcgtgcatctgtttggaagcattgggtgcaggtgtgtaggggtgaaaactacctcgtttttgcccacgtcctgggtctaactaccattctgaaaatatgaattggccgctattactcaagcccaaaatttaaagttgtgacttaacattatgaggagatagcgacacaagattattttgaacca

SEQ ID NO: 411 - DNA, 414 bp, Zea mays
tgtgaaggttcttcatccacacatgctcctagcggcgattccacatccagcccatgccagtcttatcaattaagcatgcatctataccggcctcctcttttgcaaaatcaactaaataaagactgccgtctaatacacccttaaatgctagtgaaccatcacaccttctaaagacagacacatctacatttgtgaatagacagttatatcccatattgcataattgactaacagatagcaaattatatccaagagactctactaaaaacacattagagatagagtgctcattagaaattgcaattttacctaacccttttaccttgccttgattcccatcaccgaatataattgaatcttgggaatactcgttcttgacgtaggaggtgaacatcttcttctccaccgtcatat

SEQ ID NO: 412 - DNA, 355 bp, Zea mays
agcttctgaaatcattagaggtctcagcggtgttttgcttcttcagccctttacgaccaccgtgcccaaacatggaatcctttgccctcctgttctttccttctttacctcgcttagcaagaccaccagacctgtcaccaggagaaacaccaggtctccttttcttagattgtttaaatccttcttctccttcaaaattaaggtctggtgcatcatcatttcccttggtgaatcccccttgttgcctctgcttcctccacttcttgactgactcaatctgctccttcttctgcttagccctctccttcttcttgtcagactgaacctcctttgctctctttctggaatctctagc

SEQ ID NO: 413 - DNA, 454 bp, Zea mays
  unsure (1)..(454): unsure at all n locations
tagtttatatgtaactntttctgtcattatatctcggtttcccttatctcctgaaaagtgatcatgggctccgcaatcggcatcgtcatgaatggtacgctcttgggtcagatagtactgtaccagaagcccgctccaaagaaacagaagaaagaagattaagcaacatggagaagctgcagaaagttcttcctggttgtttaagattctgttccaacactcgctccacatctgaacaaatggcaccagtataggaagttgttggcaacttgttacgagaaaagaacatagtcggactattgctatataacaacatttctgtgctgttgtttttagcacttatcagtgtaccatgacttgaatagttcatataactgcctttaaatattgactgcaagctgctgctgatgcgttttcccttcttgtgtgccgtccatattttagttgagtaaat

SEQ ID NO: 414 - DNA, 443 bp, Zea mays
  unsure (1)..(443): unsure at all n locations
agcttagcagttggagggaattgtccctggtgcaccggacactgtccggtggtgcaccggatgtgggggactgatatcccccgggtccactagaaggataagagacctcacgaaaggcctgtgggcccaataattcacaaggtcatcccttcgtgggcctgaggaagaacgtctagtgaagtggattgacacaagaccgaatcgacgcaagcccagacggcccgatgaatttgagtaatgatcgcaacagtgaccggacctccccatgtaggggcctcgcgtatcggaacagagcggagataggtcgactggattatangaagatagactcagtcagttcactattacttaggcacacgttgttatcatatccacaggtaacgccccacggtcgagtatataaagcctagaggggcactccttcaaaagatcgatctgactac

SEQ ID NO: 415 - DNA, 447 bp, Zea mays
actgtggagattcttcatcccaacatgggcaagtcggtgatgccagagcaagcccatattagtcttagcaattaagcaagtgtctagttcagcatttttatcattaaaatcaactaaatatagctgatcatctaacactcccttaaaagctattgaatcatcacttcttctaaagacagtgtgtcacacccgggttttatgggcaccaagacccgggcgcgaacatcaccatgtgtgttgggaccaagtctcacacgtatgatgaatcatggcacaggatcgaatgtcacatctttactatataacaggagttcaccacttctgtcacacccgggttttatgggcaccaagacccgggcacgaacataatcaccatgtgtgctgggaccaagtctcacacatatgatgaatcatcgcacaggatcgaatgtcacaactttactatat

SEQ ID NO: 416 - DNA, 448 bp, Zea mays
  unsure (1)..(448): unsure at all n locations
agctntatcaaatggacgtgataagtgccttcctcaacggaccaatcaaagaagaggtctatgttgagcaacctcccggctttgaagacagtgagtatcctaaccatgtttataggctctctaaagtgctttatgggctcaagcaagccccaagagcatggtatgaatgccttagagatttccttattgcaaatggcttcaaagtcggaaaggccgatcctacactctttactaaaactcttgaaaatgacttgtttgtatgccaaatctatgtcgatgatattatatttgggtctactaacgagtctacatgtgaagaatttagtaggatcatgacacagaaattcgagatgtctatgatgggggagttgaagtatctcttatgatttcaagtgaagcaactccaagaaggcaccttcattaaccaaacgaagtacactcaagacat

SEQ ID NO: 417 - DNA, 448 bp, Zea mays
  unsure (1)..(448): unsure at all n locations
ngacgacgaagattgtcgtcagtctcccgctgacgccgtgccacctcatggacatcagcagaaatgttgcggcacatggagaaaaatgccgcaaacccatggaccaagcgagcacccatcccgcggccacgacctcgaccacgaccacgagcacgtggcatgggagatccgcggccaggagagggacgcgaggcagcagcggggggagaggaggatggatgaatgggaggctggcgaggtggctcantggaggaggcagggcctccagaccgtgagggagcccgcttcgtacgagcagctgggttggaggaatcaacccagtanggtacgtagcgggagtgtttgacgggtttttcgaagtgggtctgggtgaccacttcgatcatcttcatgataaagggtgcatgaagacaccctctgagaggagaccaggaagcacggacgatct

SEQ ID NO: 418 - DNA, 410 bp, Zea mays
  unsure (1)..(410): unsure at all n locations
anngcttgaaaatctagtatgaatcggctgttatatccagccagtccaaggaaacttcagacctgatgaacagtggtcgggggtttccactccaaaatgtccttgactntgctgggatctaccgcaatccccctggcagacagtacatgtcccagaaactgaatttcctccagccaaaacgcgcatttgctgaacttggcatataactgatgttctctcaagcgcgttaacacgatccgtaaatgttgggcgtgctcctcttcattcttggaatatatcaaaatatcgtctatgaagaccaccacaaacttgtccaactcgggcatgaataccgagttcatcaaatacgtgaagtgggcaggagcatttgtcaatccgaaagacattaccaggtattcaaataatccata

SEQ ID NO: 419 - DNA, 392 bp, Zea mays
  unsure (1)..(392): unsure at all n locations
cagtgcttacatgctcacaacgccaaatggcgatgacctggagcactcctgtgacatcgacnaccttcgcaaattttttgtttgacccatttatggctgatttcgcccttgtaattcgccgcaaacaatcttgttccggcccacactcttttcctcccggggggtgaggtttttaacgaagcggagccatgtaatatatgtgagaaaaatcccccgcanaaacatgcgtcgaaaaaagaccgcgacaacggtcttcggcattcgaccaattcgaaatcaccgcaaggctaagcgctagccaccctcgcgtgcgacaaatccgcgcagaagtcgcctaatggtgcagccggactaatcacaacaagtgcgaaaaaatccgatgtctatcgcga

SEQ ID NO: 420 - DNA, 419 bp, Zea mays
  unsure (1)..(419): unsure at all n locations
agcttgacaacaccattgacaacttatatattatttcagagatcaagtatatntaattcattcctcaacatgcaaaagcgggtcttatcaagtggcttattgaaaatacccgttaattgatcttccgacctcactccttctaaaatgatatctcctttagcaacatgatctctaaggaagtgatgacggatatcaatgtgcttggtgcgagagtgttgtacaggattattagcaattttaacagcactctcattatcacacaacaaaggtaccttttctagaactacgccatagtctagaagagtttgtttcatatataaaatttgtgtgcaacaagcacccgcggcaatgtattccgcttcggcagttgacaaggcaacactatnttgctttttggatgtccatgatactagtgatct

SEQ ID NO: 421 - DNA, 454 bp, Zea mays
  unsure (1)..(454): unsure at all n locations
tggtatgctatgtaatgtaatggctngatgtattgaataaaataactagttaaaaaaaatggcatgtgcataatagtgactctcttcccatggcagatggcttcggatagaaccacgcctaccgcctccgggattggagcaagacttcccctatgagctgaaggaaaggctggcggagaatggggtgagacccaccttcccgcaccttcataactaccactagacctatcccaaattctggccaatcaaaccagactcattgaagtcctcactcgaagtctggagaaccagcgcccatgcggtggaatgccccangacaagatgggagaattcctgagactgaagccgcccacgttcgcggtgtccagcaatcccctcgatgcagatgactggcttcgcacgatcaagaagaagttggaagccatcgcttgccctgagaatcaacgtgtgcagc

SEQ ID NO: 422 - DNA, 361 bp, Zea mays
  unsure (1)..(361): unsure at all n locations
agctagttgccggagaagcccctgctgctgccgcagtggcctggtcagcagccgntgctccctccccagctgcatacgctgcgtgcgccccctctctgcttcctctcttcgtagccgcgcagtactccgtcgtgggcagaattcgcgtcaaccatctgcgacgaccttcacgggtgtagccggtttggcgtcgccgggacctcacttgtgaaccagggggcgtcttcagtgtaccatgaagcaaaccaaggccactgcgcgcacgaattgggttgcggtgcttgggaatttctcgtcgacgacttcggtgccgccgtgaagccatccgcgccgtaaccggtgacctctgctatccttcagt

SEQ ID NO: 423 - DNA, 436 bp, Zea mays
  unsure (1)..(436): unsure at all n locations
tactaagcttgcaacgaggaaatggcgctcgtcatcaagagcttccgtcatatcctcaagcaaaggagggggaaggactacaaatcccgctccaagaaaatttgctacaaatgtggtaagctcggtcactttattgcaaaatgtccactatctaatgacagtgacaggggcgacgacaagaaggggagaagaaaggagaagaagagatactataagaagaagggcggcgatgctcatgtntgccgggagtggaactccgacgagagctccaccgactcctcctccgacgatgacgccgtcaacatcgtcgtcaccaaaggccttctctttcccaacgtcggccacaagtgcctcatggcaaaggacagcaaatagaagaaggttaatccaatcctccataaatatgagtcctctagtgatgataatgctagtgatg

SEQ ID NO: 424 - DNA, 323 bp, Zea mays
  unsure (1)..(323): unsure at all n locations
gcaagcttctaaagggagaacatgtgataagtttgttttacgtgaaattcgaaaaagatagaccttgtgcaacttgtcaagcacgtaaacaagtgggaggagcacatcacagcaagaatgtgatgaccacttcaagacctctggagctgctgcatatggacctctttggacccgtcgcctatctgagcataagaggaaagaagtatggtctagttattggtgatgacttttcctgcttcacttgggtgttcttnttgcaggataagtctgaaacccaagggaccctcaagcgcttcctcaagagagctcanaatgagtttgag

SEQ ID NO: 425 - DNA, 423 bp, Zea mays
tctttacactaagctttgtcattctgtatttgctcgcttcgccataaccttcgtttgctggagctcaaagttctttttctcgatagcatctgattgctcctttattttgctttccaaaatttcaattataacttcgtgcttcttgtcttcaaaatcttgttgcatcttcaaggctttgctcaacagcatactctgcacgataacaaccttcgttagacatgttttcattattagaaacaataaaagttaaaggaaaagtagttcaccttgaatattgaataaaataaactaccaacgatatgttgtcgtcggtagcggctaatgtccatttctagcttcggaaaaccgatactctttgacagagtaccgataactttggctccaatttggtttcggatacaatctaatttctcatcatcaata

SEQ ID NO: 426 - DNA, 404 bp, Zea mays
gtgttatgcgatggttcttgaggaaccttcggttcttgaacagcttctgtcttattggcaccttcaataatcagaacatgttatgcagccaagcttgatttcaattgcacaaataatattgatgagtacgaagcacttctgttggggcttcggaagttaatggcaatgcgaataataatggccattctgaaaactgattctcaagttatttctggccatgtggacaaaagtagcaaggcaagaaatccgaagcttgaaagatatctggatacagttcgaaggttggaggcttctttcaaaggttttttttgttaaaaatatcccaagaggtgaaaatgagcacgcagatttactatccaaatcaacggcccaagggctctctcttacctcagaagtattttttg

SEQ ID NO: 427 - DNA, 432 bp, Zea mays
agcttcagatgacaggtatgatcatccttttattcactgtacactagaatgtcatcgaagaagacaagagcacacttactactaagatgcgtttgagtgtggttcatatcctcctgatatgttccccgtgccccggtgagaccaaatgccatatcccggaactcatattggcccgtgtgtgtttggaaagcagtcttgtgtactctcctaccttgagtagaatctggtggaatcccgctctgagatcttatatggagaactacgaggcaccaaacagctcatcaagtagctcatcaacgatgggtacacggtatttggatttaactgcaacggcgtctaagtgtatgtaatccacgctaatactgccagaaattgtctctcttgtgatcaacaacactggggaggagattgctctgtcgctgtgctgaatca

SEQ ID NO: 428 - DNA, 371 bp, Zea mays
atgttttatacagagttaaaaatatactgtgttgattatgttaatatgtaatcgtgttgagtgaaatttatgttcgtgtatgaataggataatatgtagtattgttgatagacggccatcgtctggatgaattattgtgtggatagtcagcgcatctgtgcctgatatcattctattttggcaagatattatatatacctccacagcgacatgggatggcgcctgccctaaatatttctgttgctatgcttctgttagaggatggacgacctggaatggatgtacacgtgccgtttatgaatgaacgatgtcaccactgaatggatttgaaagaccgatgattttgtggaacggacatattggtgaaactg

SEQ ID NO: 429 - DNA, 370 bp, Zea mays
  unsure (1)..(370): unsure at all n locations
tgcaagcttantgctaagcgagagagatttgtttgttcttttgagctcttgcgctcggagtgctttctttctcattctttcttgagagcaaactcactcgtaattgcgacaagagacaccaatcttgtggtggtccttgtgggaactctgtgttcccagagattgagaatataagctcactcggttcgacggaccgtttgagagagggaaagggtctaaagagaccctgtctttgtgaccacctcaacggtgagtaagctcgccagaaccgaacctctgtaaaacaaatccgcgtgtcacgactcttattcgcttgcgatttgtgttgcaccctctctcttgactctattctattgtaactctacccggg

SEQ ID NO: 430 - DNA, 448 bp, Zea mays
  unsure (1)..(448): unsure at all n locations
tgcttnggctgaagagtctttngtatcttcaatagataatgcagcttcgttntgcgccaaagaatttacatgttcgcaacctatcttctccaagatagctgcaactcccctcgcgccagataatgagcagacgtctccacggccacttaaaatttcctcgaaggcatcagcttcgctgtcgatccattcaattgggccctcaggatcgcctcttacgaagttgtcctcgctggattatgcgccaacgctggcgaagctagtcttattttttctcacacattctatggatttttcgtaacatctttcttttgaagaccgaagttctacagctgttttctgccaataatttttccagtaatcactggcgtttcggtcagcttcggcaattgcacattntaattatgcttctgccagctgcttccgaagatcctcaatntcacatttctag

SEQ ID NO: 431 - DNA, 376 bp, Zea mays
  unsure (1)..(376): unsure at all n locations
agctntatcaaatggacgtgaaaagtgctttcctcaatggaccaatcaaggaagaggtctacattgagcaacctcccggctttgaagacagtgagtaccctaaccatgtntataagctctctaaagcgctntatgggctcaagcaagccccaagagcatggtatgaatgcctaagagatttccttatagctaatggcttcaaagtcggcaaggccgatcctactttattcactaaaactcttgacaatgatttgtttgtatcccaaatttatgttgatgatattatatttgggtctactaacgaatctacatgtgaagaatttagtaggatcatgacacaaaaattccagatgtcgatgatgggggagttgcagta

SEQ ID NO: 432 - DNA, 466 bp, Zea mays
  unsure (1)..(466): unsure at all n locations
gcattacgtgacactttaatactaagcttctaaaggagaacacatttcgggactaacaaatgttcattttgagaaagacaggagttgtagtgcatggtaagcatgatagcatgttggcgcccaccatccacacaaaaacatcatgacgactgacagaccgctcgagcttctccacatggattntttcgacccgattgcttacataagcatcggtgggagtaagtactatcttgttattgtggatgattattcttgcttcacttgggtattctttttgcaggaaaaatcacaaacccaagagaccttatagggattcttaagacggactcaaaacgagttcggattaaggatcanaaagataagaagtgacaatgggacgaagttcaagaactcacaaatcgaaggctttcttgaggatgaaggcatcaagtatgagttctcttctccctacacacctcaacaaaat

SEQ ID NO: 433 - DNA, 355 bp, Zea mays
agctttggaagatcacaacttcgttttcttctggagcatgaacggctctgtctacgtcagccctcacaatatacatatctcgaatataccttcctctcatattatcacgatgactctcgttgatagttgatctcccaaagactgcatgacttggtcgctagggccgatcgtcagagtcttcgcctccactttacacatcatagctgtcgctatcatcagtatcttcagacaagcgctctagtatctctttagtaatcttctctgtatttggtttttgctattgactcaacaaattcacaatcttctcctcaaggagcttcttctcttcgctcagcttcgtctcaacagcaacctt

SEQ ID NO: 434 - DNA, 439 bp, Zea mays
tctaaagggagaacacatcttaggattttcaaatgttctttttgagaaagacagggattgtagcgcatgccatgcatgaaagcaagttggagcccatcatccacacaagaacatcatgatgaccgataggccgcttgagctactccacatggatctattcggcccaattgcttacataagcatcggcgggagtaagtattgtcttgtaatagtggatgattattctcgcttcacttgggtattctttctacaggaaaaatctcaaacccaagggaccttaaagggattcttgagacgagctcaaaatgagtttggcttaaggatcaagaaaataagaagcgacaacgggacgaagttcaagaactctcaaatcgaaggctgtcttgaggaggagggcatcaagcatgagttctcttctccctacactccacaacaaaat

SEQ ID NO: 435 - DNA, 439 bp, Zea mays
  unsure (1)..(439): unsure at all n locations
agcttattgaggaagcatcgatgccaactctctaacctttctcttgcgaactcccacatggattccttccttgattggtcttctggtgcttcatcaacaaaacttgggtgaccacttctcatccagaaacttatatgctttgatgatctggtcctcgacaagcttgcttcaagccttcttatttttctccatagcaggaacttggctggaacactaccccacttaaaatgaatgagggtagatctcttgaatcttggggatttgaactccttgaagtacctcataacaagggtgttacggagccttcttctgctgttgctgcttgaccaggctgcggagtgatgactaacacagggttgattctgggagaaccttcttctcatcttctcttcactatcttcttttcactggtnctttctttctctttgctcttccactc

SEQ ID NO: 436 - DNA, 387 bp, Zea mays
  unsure (1)..(387): unsure at all n locations
tctggtaggactganagtgtaaagtgcattcgtttctattaatctgagttgtgctcaactgctcatgtggtatttctgttgtcctggaaaacgattgtggattctgtgtgtcggcgtttcgcggggggtccctggaccgacgagtaaattgtcgccgcgtgccccatcccatatgggtcggcgcgacacggagcgcgaatgggggaaatggagccggatgaagacaggcgtaaaatgggaaacccacggtcttcgtgtttgtcccgcgcccaggtcgggtgagcttgcagtatggggttacaagcgtccacgcgggatggagcgagatgcttacgcgagcgctgtcccgtccttccccgcgcggccaaccctttgtaatatggccct

SEQ ID NO: 437 - DNA, 466 bp, Zea mays
  unsure (1)..(466): unsure at all n locations
agctntatcaaatggacgtgaagagtgccttcctaaatggaccaatcaaggaagaggtctatgttgagcaacctcccggctttgaagacagtgagtatcctaaccatgtctataggctctctaaggcgctttatgggctcaagcaagccccaagagtatggtatgaatgcctaagagatttccttatcactaatggcttcaaagtcggcaaggccgatcctactttattcactaaaactcttgacaatgatttgtttgtatgccaaatttatgttgatgatattatatttgggtctactaacgaatctacatgtgaagaatttagtaggatcatgacaaagaaattcgagatgtctatgatggnggagttgaagtattttctatgatttcaagtgaagcaactccaagagggcaccttcatcagccaaacgaagtacactcaagacatnctaagcaagtttggaat

SEQ ID NO: 438 - DNA, 412 bp, Zea mays
tgacagtgtattggatgttgccggcggcggatatgatgtcttcatcgcgatccccgctcatcaacaccttgtcttctcgcttgcgctgcccccgtacgtcttctcatcgctcgcatgggattcgttcctggcccctcgagtcctggttgcaatccaaggcctcctgtgcccaaaaaaaaatccaaacctatgggcaagaatcctgatagacttaaccgaacacaaaataaattagaacctggaatttttactgggctaggatttcaacctaacacgaaacggcgaaaacctgtcgtgtccggttgcgccagtgctaataataataataagagggcttgacacgacaagtgtttattccagaaactcgacgttctctgtaataatctgcccaaactctgaacaaacatgccct

SEQ ID NO: 439 - DNA, 387 bp, Zea mays
agcttcatgcaactctacgctcatctaatcctataagataaggcggtcatgctcaaacttttaaacaaagcaagagagcaaagcgaagctcttcaaatgctagaaggtgttcttgccataaaaagccaatgctttgaagagttgactaaagaacatgaggagctaaagtgctctcatgttgatttggtccataggtatgaaactatttcaattgagcaagataactctttatattgtatcgctcaattagtaaataggaatgccttgcttaaggaccaagtagaaaagctaaaaattgaaaatctagcttttcaagaaagatatgatatgcttctatgttctcatgaaaatcttatggatgatcatatcatgttaaacattgctcat

SEQ ID NO: 440 - DNA, 383 bp, Zea mays
ggcgatgccacagccgggccatgctagtcttagctattaagcatgcatctagaccggcctcttcttttgcaaaatcaactaaataaagtttgccgtctaatacacccttaaaagctagtgaaccatcacttcttctaaagacagacacatctacatttgtaaatagacagttatatcccatatgacataattgactaacagatagtaaattatatccaagactctctactaaaaatacattagagatagaatgctcattagaaattgcaattttacctaatccttttaccttgccttgattcccatcaccgaatataattgaatcttgggaatccttattcttgacgtaggaagtgaacatcttcttctaccccgtcatatgg

SEQ ID NO: 441 - DNA, 410 bp, Zea mays
  unsure (1)..(410): unsure at all n locations
agcttgcttacttggtaagatgaccaatgtgctctcttacgggtttaccggagaggacattagatttattggaactcatacatactgatgtgtgcggaccaatgagtacgacatctaggggaggattccaatacttcataagcttcactgatgattttagtagatatgggtatgtctacttaatgaaacacaagtctgaatccttagaaaagttcaaagagtttcagaatgaagtagaaaatcagcgtggcaagaaaattaaagcactgcgatcggatcgtggaggtgaatatttaagtcatgagtttagcaatcatctaaggagttgtggaattgttccacagcttacgccgcctggaacgcctaagaggaatggcgtgtctgagcgacgtaatcngactttattggat

SEQ ID NO: 442 - DNA, 442 bp, Zea mays
  unsure (1)..(442): unsure at all n locations
agcttgaagccatggtaagtagcatatgctttttatatacgaattgactcaagcctagctacgggtgcataggtttcaccgagatccaaaccttcgacttgggagtatcccttggccacaagtcgggctttgttccttgtcaccacaccatgctcatcttgcttgttgcggaagacccacttggttcctacaacattttgttaggacgtggaaccaaatgccatacctcattcctagtgaagttgttgagttcctcttgcatcgccaccacccaatccgaatcttgaagtgcttcctctatcctatgtggctcaatagaggaaacaaaagagtaatgttcacaataatgtgcaactcgagatctagtggttacccncttatgaatatcgccgaggatggtgtcgacggagtgatctcgttggattgcttggtggactcttgg

SEQ ID NO: 443 - DNA, 442 bp, Zea mays
  unsure (1)..(442): unsure at all n locations
atgcgtcttcngagtaccagcaagaatatggctcgggtttattgtcagccaccggggaattgaggccaatccagaaaagatcgaggctatcatgagaatggaagcaccacgatcacagaagaaagtacaaagacttaccggatgcatggcagcactaagcaagttcatatcaaggatgggataaaaaggcctaccgttcaataagttgctcaagaaggtagacaagttccagtggactcgaaaggctcaagaagctctatacgcactgaagaaattcctaacaacaccaccagtgcttaaaccgccgcgccgagccacgccgagtcaatcggctgaagatctactgttatacatctcttgcacgactcacgtggtgagcaccgcgttagtattcgagcgagcagaatatgacacgcatacccagtgcaacatcccgtctatt

SEQ ID NO: 444 - DNA, 302 bp, Zea mays
actgagctgcaactcggaagaaaaatttcgctttttacactgctataacaatgaatgcggtggtgactacacacctactcgtctgtttatataatgctggatgtaataatgcgaaacgccatatatttttcaccaagcggacaccctcttgcgctcgctgcgccgtggaccgcatggacaaacattatactctgcaaggtgggaccgcgacgtgctgtgaaattaaaacatttctcggcaaccagctcacggaaggtggttattggaccttccgctccccgaagcctaagagacttttttca

SEQ ID NO: 445 - DNA, 475 bp, Zea mays
agcttctaagggagagcacatgttaagattatctatttgttcattttgagaaagacaggatttgtagcatgccaagccgggaagcaagttggcactcatcatcaacacaagaacatcatgacgactgacaggccactggagctcctacacatggatttattcggcccgatcgcttacataagcatcggcgggagtaagtactgtctatttattgcggatgattattctcgcttcacttgggtgttctttttgcaggaaaaatcccatacccaagagaccttaaatagattcttgagacgggctcaaaatgagttcggcttaaggattaagaaaattataagcgacaacgggacggagttcaagaactctcaaattgaacgcttccttgaggaagagggaatcaagcatgagttctcttcttcctacacgccacaacaccaatgggtgtagtggagaagataaatcgaactctatt

SEQ ID NO: 446 - DNA, 469 bp, Zea mays
  unsure (1)..(469): unsure at all n locations
acactaagcttctaagggagaacacgtgatatgttcgactaacgngctgtgcttaaaagatttaccttgngcagcnggtcaagcatgtaaacaagtgggaggagcacatcacagcaagaatgtgatgaccacctcaagacctctggagctgctgcatatggacctcttctgacccgtcgcctatctgagcataagaggaagtaagtatggtttagttattgttgatgacttttcccgcttcacttgggtgttctttttgcaggataagtctgaaacccaagggaccctcaagcgcttcctcaagagagctcaaaatgagtttgagctcaacgtgaagaagataaggagcgacaacgggtccgagttcaagaaccttcaagtggaggagttccttgaggaggaanggatcaagcacgagttctccgctccctacacaccacagcataatggtgtggttgagaggaataac

SEQ ID NO: 447 - DNA, 413 bp, Zea mays
  unsure (1)..(413): unsure at all n locations
ctaaacgtaatagttcattttctatgatacttttatgaaggaatcactaagctatcataagacataatttatttactgaaaactatattgaaaggcttaatgcttattccccattccaatatgtgaagtacaacattctaattattcacattaaaacccaccgccggaatacactctgataggcatatatttgttataacattaaacatcttattatataaactgtgctaaagctagagaattgtgacttgggacaaaacccaaacaccttattttttggagcaaagggagtgccaagttattaataacacccatgtagctgaatgttgtcttgaaaactgaatgcactggcagcatcagctggaaaggtaccttgnaaagtctgatgcacattcaaaacctatggaactgga

SEQ ID NO: 448 - DNA, 448 bp, Zea mays
  unsure (1)..(448): unsure at all n locations
attcctgtctatgctacaacatttaccggcacatcatctacagaccatacctgtaacatggctatttgcatgttgggggttagacatgattggacctttcaagaaagcttatggaggctatactcacgtactggttgccattgacaactttactatatgggtagagtacaaacctattgcttctttaacctcagccaatgcagtggagttcatacaagacataatatttatgtttgggataccgaacaacatcataattgacctgngatacaacttcactatctctgaattcttcgatttctgcgaacaacggagtatccagatcaagtatgcaacagtatcgcacccaatatccaatggtcacgtggaaagggccaatggaatgatattggaagcacttacgaagaaagtgttcgacaaaaatgaaaagtttgcagtatagtggatc

SEQ ID NO: 449 - DNA, 434 bp, Zea mays
  unsure (1)..(434): unsure at all n locations
agcttctaaaggagaacacgtgatatgtttgactatcgtgcatttcgaanaagatagaccttgtgcagcttgtcaagcaggtaaacaagtgggaggagcgcatcacagcaagaacgtgatgaccacttcaagacccctagagctgctgcatatggacctcttcggacccgtcgcctatctgagcataggagggagtaagtatggtctagttattgttgatgacttttcccgcttcacttgggtgttctttttgcaggataagtctgaaacccaagtgaccctcaagcgcttcctcaagagagctcaaaatgagtttgagctcaaggtgaagaagataaggagcgacaacgggtccgagttcaagaaccttcaagtggaggagttccttgagaggaagggtcaagcacgagttctncgctccctaacaccacagc

SEQ ID NO: 450 - DNA, 446 bp, Zea mays
tcagtcctactttaggactttgtcggcagcttcgttcaacagcttgtcaaaaacatcattagcaattgtgattatatcgagcgcctccttgacagatgggtcagcttcaaggttatatggctcgtgaggcgtaaaaagctcagttgcattgaaacacaaatatctatcagtgtcgaagctgaaaaaacttatgaagatgagttataaagagcatacatataagtctggcctgctcggcagcttcttcaactcttttggcctcttctaaagcatcatgagattctttctcattccttttaatagcttcatcagcaatttctcgtccaccctttagccataattcggaataaaatttcccacctaaggtagtagcttcggctgaagggtttctaacaccatcagctgagaaggaaagtttggctgagctacagccttgacatgatcac

SEQ ID NO: 451 - DNA, 470 bp, Zea mays
  unsure (1)..(470): unsure at all n locations
agcttctaaagggagagcacnatttatgtctaacggatgatcattntgagaaagacaggatttgtagcgcgtgccaagccgggaagcaagttggcactcatcatccacacaagaacatcatgacgactgacaggccactggagctcctacacatggatctattctgcccgatcgcttacataagcatcggcgggagtaagtactgtctagttattgtggatgattattctcgcttcacttgggtattctttttgcaggaaaaatctcaaacccaagagaccttaaagggattcttaagacgggctcaaaatgagttcgacttgaggatcaagataattagaagcgacaacgggacggagttcaagaactcacaaatngatagctttcttgaagaggaaggcatcaagcatgagttctcttctccntacacgcccacacaaaatggtgtatggagaggaagaatcaactct

SEQ ID NO: 452 - DNA, 354 bp, Zea mays
  unsure (1)..(354): unsure at all n locations
tgccatgagaatcgccgaaaggatgttcctcaaaatgaaggaagatgaggcgaagaacaaaattgaagaagaaaatgatcgatggagaccaaacgatgaatccacctcttcacaaggttcgtctttcaaatccacttctcatatgtgctttgttgctaatgagagtgacagtgaaagcgaaagtgaggatgagaaggagcatganagtgatagtgaagatgaggatgatcttcaaaaattcttcgctcaactaagcaagaagaaccggatgagcttgctcaaactcatgataagagcagaagaacaataggaaatgcttcattatgcataagatatcctcatcgaaaaaaatca

SEQ ID NO: 453 - DNA, 370 bp, Zea mays
  unsure (1)..(370): unsure at all n locations
agcttctctccttccgggtcacctccttctctctgtttgacaccttccgtatgtnctccttgaattcctcacgctcctgctcaagctcaacctgctccgaggcgaattggcaggatgccgccttagtgcgcctctccagttgggagcaccagtcgccaaagtgctgatgctctgtctcgagcgccttccactctcgccggatagccgcctcggtttcctggagggcctggtgagcgcgagtcaacacctgatggagaggagtcagcgttgctccaggctcgacaccagaccggagtggacgcccaagaataacctncggaccctccggagttggcggagggacagaaccggacgcgcccctcacgcctac

SEQ ID NO: 454 - DNA, 414 bp, Zea mays
ctggagagtgagctcgctatatatggttggacaaaaggtttgtcgcttcaatcactctttgatcggttgatggtgttagtaaacaaaataagagtgcttggaagtgaagattggagtgactccaaggtcacaagactattcatgagagcatacaaagaataggacaagagtctagcaaggatgataagggatcgtgatgactatgaggaaatgacacctcatcaattatttgcaaagattcaacaacatgaatccaaagaagccccaatcaatgcaagagactctcatgccttgatctcaaatgaacaagacacccccaagaagaacaaagaccacaaggcatagaaagtggtcgagacatcaagtgatgaagatagctcacgtgatgaagacacagttatgttcatcaaaaca

SEQ ID NO: 455 - DNA, 332 bp, Zea mays
tcgtaccctgttattcaatacacggacgaccgatctgcagctttattcagtacatgaaaaaaggtatggatggcagtagtacctaattgtatgtgcaatgttgcctacagatttcccttatcaactcagggtcttcgtcttcggttccagtttacagtgcaaccaacgtactctcatacacattttgtagcgcagtttactatcaacatgggctcaacccaatagagtttacagtttactaaggatgacattgatctgttgcatcaatattatttgttcacggatcactactttgcttgtttgcacaaaccgtctgatcaaggttaattcat

SEQ ID NO: 456 - DNA, 337 bp, Zea mays
gatgttccctatcacttggacaattataattagcacacaaaacaattgactaagtgttgggaccatatctttttcaccaaatttctccaggatttgcaacatgcctgagactaagtccaaaacacactttctttgcacaactgagttagtagcaaaaacatagtgttagaaacatagagtagggtgtgtgcaacttatccaaacacttaaacctcatgtttatgttggtttgctcaaagttgcacttttggcccttcaatttagctcatatggacttgttggcttcaacttgcttttgctataccctggtgataggaatacgatccctaccacggat

SEQ ID NO: 457 - DNA, 350 bp, Zea mays
accatcgtgttttcgctggtggactatgtgggcgatccacaatggtgactttttcatcgtgccgaggatgatggttcctccgacgcctatcggggtgttcccgatgctcccttttatcgccgctagggtcgacggcgtcacgcgtgcttttttccttgcggaaaaatgaccccattgcatcttccccgtcgacgaacttggtcgctatatcaaacaagtcggctattggtctcggtctcccccgcccaatcctgtggacgaaggcctcgttggtagtgtcgtaagtgaatgcgctcaccacgtcggcgtctgtggcgtcggggaggtcagttctcttttgggaaaaactc

SEQ ID NO: 458 - DNA, 388 bp, Zea mays
  unsure (1)..(388): unsure at all n locations
agctttaaagggagagcacantttatgtctaaccaatgttcattntgagaaagacagggtttgtagcgcatgccaagcaaggaagcatgttggagtccaccatccacacaaaaacataatgacgacgaacaggccgctcgagctactccacatggacttattcggcccgatcgcttacataagcatcggcggggtaagtactgtctagttattgtggatgattactctcgcttcacttgggtattctttttgcaggaaaaatcccagacccaaggcacgctcaaaggattcttaagatgggctcaaaatgcgttcggattaagaataaataagataagaagcgataatgggacgaagttcaagaattcacaaattcgaggatttcttg

SEQ ID NO: 459 - DNA, 405 bp, Zea mays
gtgggacttgattgcttcaatatgctttctatacacttgtgctcatgctcataataggagtgttagttcatagtaatgtgttgagcttctaatcaccaaaacaactagaaatggcccaagggcacatttccctttcaccggtcatgcctcccgacggtacgtgtggatgctataattaattttaccgaacttggcaccttctggttggaccgagtttcaacaggcggatggtccccatatgagaccggacggtccacatgtggtgttggatggtacttctcttctcatcggatggtccgtaattcatgtggcatttttgacatggcatggtgctgcgcatggctagcatttctggaacacatacgcatgtatgggcccgcttgcgggtttgctgcttcactcgtg

SEQ ID NO: 460 - DNA, 416 bp, Zea mays
  unsure (1)..(416): unsure at all n locations
agctggtgaaggttattcatccncacatgttgcttgcggcgatgccacaaccagcccatgctagtcttagcaattaagcatgcatctagaccggcctcctttgttgcaaaatcaactaagtaaagtttgtcgtctaatacacccttaaaagctaatgaaccatcacttcttctaaatacagacacatctacattagtgaatagacaattatatcccatattgcaaagttgactcacagacaacaaattatatccaagcgactctactaagaatacattagaaatagagtgctcatttgagattgcaattttgcctaaccctttcaccttgccttggttcccatcaccgaatatgattgagtcttggggatccttattcttgacgtaggaagagaacatcctcttttcccccgtcat

SEQ ID NO: 461 - DNA, 461 bp, Zea mays
  unsure (1)..(461): unsure at all n locations
agtcagtcctcttgcaaaggataattgatgcccaaaatgataatgagggcatgagacacattcgtgagaagataagggctggaaaagccaaatgcttcaaagaagatgaacaaggcattgtatggtttaataaccgcatagtagtgccaaagaatgaagagctccgccagcagattcttgatgaagcacatcttatccgctattctattcatcccggaagcactaagatgtaccaagacctgaagcaacattactggtggacaaagatgaagatcgaaattgcacgctatgtggctagatgtgacacctgcagacgtgtcaaggccatacatttgaaagctgctggtccattacagtcattaccaataccgacatggaaatgggaagacatcagtatggactttattgtgggatcgcccaagaccgcaaaaggatatgactctatttgngtgattgttgat

SEQ ID NO: 462 - DNA, 408 bp, Zea mays
agctctcaaggaattctgtgaacaaattgtctctttatattcatttgcatcggtcagacatccggagtcaaatggacttgttgaaagagctaatggcattataatgacgggaataatgaagttaatcttcaatcagcccagaggaaagtggccagatgaattgatcaaagtggcgtggagccacaacacatcaatatcaaggtcaataggttttacaccattcaaactattgtttggtgacgaagcaataaccccagaagaagctaaggcaggatcaataagaacaacggcttcgacagatgacgaagctgattattctgtggcaaaagatgctatagaaaggatcaggcttcaggccatggagaatatcactaaataccaagtcgaaacaataaaatggcatgacat

SEQ ID NO: 463 - DNA, 340 bp, Zea mays
  unsure (1)..(340): unsure at all n locations
tttttctgactaacttttctgagaatctggctgtggggagaatctgactgtgtagagaatctgagtatcattaagattacgtgcggaggaagataaaggtgtccataagattcaggatgtagaaagtgacagattactacaattgcaacgactcaactgattatgtgtttatgttgattttgaatggttntaaccaaacgaattntatagaaactgactgaaaagctgagcgtttagcagtccgcatcagcttttgatggtcagaagcttcaaaaagctgaaacaaatatgggcataataagtcggagttgcagccgtccaaagagcaagatgggcccta

SEQ ID NO: 464 - DNA, 409 bp, Zea mays
gtcacctgaggcatgcaagcttcggcttcgctgctgatccattcaattgagccctcttggtcgcctcttatgaagttggcctcgcttgaatatgcgccaacattggcgaagctagtttttatttctcccacacattctatggatctttcataacatctttattttgaagaccgaagttctacaactattttctcccaataatttttccaggaatcactggcgtcttagtcagcttcggcaatagcacattttaattttgctttatccagctgtttccgaagttcctcaatttcatatttctgggcttcagcttgagctttggatgtagcttcgtcttcttttattctgttcaccaatgagtttaatattttatctttgttcacgaccttcgttccttagttcaattact

SEQ ID NO: 465 - DNA, 431 bp, Zea mays
  unsure (1)..(431): unsure at all n locations
tgtgaacagtacaaattcataatggagaaagcagcttcatcatatcagccgtatcctatgctcttatgtgaggacatagcagagcagaaggtgctgttatgctctcaactatccgaagagcatgaacaaaccttgataaagtttttgttcaataacaaagatgtttttgcatggtcagctaatgatctatgcggagttaatagggatgttattgaacactcgctcaatgtcgatccatccttcagacccagaaagcaaaggcttcggaaaatgtcagatgataaggccgaaggtgctcgcaacgaagtcaaaagactcctcagtgcaggagttattaaagaaatgaagtaaaaaaggccaatggcaagtggcgaatgtgcattgattntacagatcttaacaaggcttgtccgaatgatgaatttccacta

SEQ ID NO: 466 - DNA, 386 bp, Zea mays
  unsure (1)..(386): unsure at all n locations
agcttancctttntatcagtgaagtatttaaccatgtctctggcggcggttcgcctagagacatgacatatttatgattatgagcagttctaatgtagttttcaaatgtagcattttcacccaaactaataggaacttctagccgagcaagcaatattaccagttcagtacgtgcgaccatatgacaacactcccaattacgcatactaccatcaggactaaaagagatctgagaatgagacatgcgagttttctcacgcctcctaagacatttatccctatgtcgagtgaagtggctagtgccaccactagagagagcagagtattgcttatagcaatggatgcatttagctgcataccttatcttcttaccattgacaatttta

SEQ ID NO: 467 - DNA, 235 bp, Zea mays
caaatggtcattttgagaaagactatgattgtagcggatgccaaaccggaaagcaagtttggacttatcattcaaccaaaacatattgaaagtgcaggccactggtacaccttcacattgaactaattcggccgatcgcttacataaacattggcgggaagtaatactggctaattattggggatgattattctcgcttcacttgagtggtctttttgcaggaaaaattccatac

SEQ ID NO: 468 - DNA, 361 bp, Zea mays
  unsure (1)..(361): unsure at all n locations
agcttcggcatagtgacttatctccagactaaagggtgaaccgacttanagatgaaatgacttaaagacccataatattctgtgtcattattgtagttcattgtaaagggtataaatgtaattatatacaggctgtgagctgtgcctataaataagtgaacagtacccctgtactggtcacgttttttcctgtaatcacgtattgggcatttgtgtttgcttcacgctggtatttttgctttccttcaagccgaaggtacatttgtaattcgttatcatttttacaataatgaaatagaaataagttaataataataatcatgtgtttaaattatcttacatattttttacccttcattat

SEQ ID NO: 469 - DNA, 437 bp, Zea mays
tcacggcctcctgtggaagctatccgatggctcggatctagcggagatgggcggggatggtctatccacgactggcgccctcgggcggctctggcgggtcgcggggaggtcgccggagctgcgggcgatctcgggagatgtatgcgcggtgcatatgatgcaacagggaagatggtcgtgcacgatggtgggctttatatccgctcgcgggcacggtactggcgtgggcacggtggtggctgaccatacgctggggcgcgcgcgacagcggccattgcgcgctcggccggtcatacaatgcatcgagcacgtggcagcatttgttctggtcatcttcaagcgtcgattggcccgtgatctcttcgtatctatccaaaatccctgtataagatttcttccttgttgtataccctttgtatctcatgcagtgctcgagt

SEQ ID NO: 470 - DNA, 393 bp, Zea mays
cgcaagctacccacatctgtggccactttcattctcactcgaaacgctggagaaatctctagtcgcttggttactaagacaacgctgtggtgcagacacagcaagatgggtctctatgtgtttaatttgtggctacaaaacaattgaagtactgatgagcaggcgacgccggcgtcgcaacgcatacagccgtgcaagctgaagaggccatcatctgcgatcagcggcagatgatgcacaggatgatggcgaccatgacgactagggccacgatcggcatcgagatcaccatcaccagcttcatctccaagcagctcctgcgtcgtacggcgcgacctcgacctgagtacaatagcgatatacgagtcgcgcatctgatattctgatattcag

SEQ ID NO: 471 - DNA, 408 bp, Zea mays
  unsure (1)..(408): unsure at all n locations
tatgaatattctgtatcccaacatgggcttgtctgcgattccagtaccaacccatgttagtcttagtgattaaacatgtgtcgagtttaactctattaaaatcaactaagtatagctgaccctctaacactcccttaaatgctactgaatcatcacttcttctaaagacagtaacacctatattcgtgaaaagacaattgtagcccattttgcataattgtgaaactgaaagcaagttgtaatctaatgagtctacaaggaaaacattggaaatagaatggtcaggtgatatagcaattttaccaagtgctttgaccaaaccttgatttacatccccgaatgtgatagctctttggggatcatggtttttctcgtatgacgagaacatacttntctcaccagtcatgt

SEQ ID NO: 472 - DNA, 442 bp, Zea mays
  unsure (1)..(442): unsure at all n locations
agctttnagggagaacacgtgatatgtttgacttacgtgcaattcgaaaaagatagaccttgtgcagcttgtcaagcaggtaaacaagtgggaggagcacatcacagcaagaatgtgatgaccacctcaagacccctagagctgctgcatatggatctcttcggacccgtcgcctatctgagcataggaggaagtaagtatggtctagttattgttgatgacttttcccgcttcacttgggtgttctttttgcaggataagtctgaaacccaagggaccctcaagcgcttccttaggagagctcaaaatgagtttgagctcaaagtgaagaagataaggagcgacaacgggtccgagttcaagaaaccttcagtggaggagttcctagaggangaagggatcaagcacgagttcttcgctccctacacaccacagcataatg

SEQ ID NO: 473 - DNA, 455 bp, Zea mays
actttaaagttaataaacaaatgtataatgatgatctttctttatctacaccatttttgtgcatggtcacaaatagtgtttaagttggagaatctgttgtcttctcgtatattagtgagagcacctagaggggggtgaataggtgatcctgtaaaattaaacactaaatagccacaaacttgattatcaaggtgttagtgaaatcaggtggctaaggaacgcgctcgtgcgaacaaagcaatcacaataagcaacacacgagacacgtgatttttatatcgtggttcggccaagtaacacttgcctacttccatgttgtggcgtcccaatggacgatggttgcactcaacccctttcaagcgatccaatgatcaacttgaataccacggtcttttcctttatagtatttttcccgtttgcgaggaatctccacaagttggagtctctcgccctta

SEQ ID NO: 474 - DNA, 345 bp, Zea mays
  unsure (1)..(345): unsure at all n locations
agctggtggacccgtagcctatctagtggatatgccacctcacatgtcgtcagntcacaatgtgtntcatgtatctcagctgcggaaatgtgttcgcctacccactgaagtactaccggaaccagacattgagatagaaccagacttatcttaccaagagtaccctgtcaaggtgctagatcaaaaagagagatcaactcgggcaaggtcgatcagaatgtataaagttcagtggagtcaccattcagcagaagaagctacatgggagactgaggattttctacgctctcgctttcccgactttctacccaaaggagtcggtatgtaaccccanaaccccatccc

SEQ ID NO: 475 - DNA, 350 bp, Zea mays
tcagcttagctcatctatgtcggatgttttgattgttcttttctttggccctctggaacttctgacttcatgaattcaatgggtccttggtccgaagtatcttcatgcaaaaatatgctggatgaagaattgcttcgaaggcattgagagtaccacgatcaatgattgcattgtaagggtattccatgtcaacaatatcgaatacaacttggtcagtccttgtgttgttgataaatccgaaggttactggcattgtgattttttcgagtgctacaatctgccttcctccgaagccacaaaggggatgtgtggcatcatggatcttgtcttaaggctcttgcatctgtctg

SEQ ID NO: 476 - DNA, 374 bp, Zea mays
  unsure (1)..(374): unsure at all n locations
agctngaaatcgagcacacatgcatacacttaacatatcatcgggcctagatgcgggaatataaagcatactaccaattattgaacgaataagtttttgatcaaccatagtacctccttcatctaagtctagatgaccatttgttgccattggagtcttgataagctttgcattttctaaagcaaacttcttgagcatgtccttcaaatattttgattgacttataaaaattccatctttcaattgtttgatttgaaggccaagaaagaagctcaattctcctatcatagacatttcaaattcttttgacatcatttttccgaattcctcacaaaataattcattagtagatccaaanataatatcatcaacat

SEQ ID NO: 477 - DNA, 447 bp, Zea mays
  unsure (1)..(447): unsure at all n locations
ttcgtgccggcgcanagcgctgttaggacattatgcttctgtgcctcccggaacaactatggtggcttctgcagctcgcctaccaccggccgcaccatttcacgccgcggttcatgctatgcgaccttgtctaggtgaacaacaaaagtcgtcctcgatctcgatctcgatcctcttatatttatccatgcctgaatttgtacaacgaggttcgtgcacgatcgccctctgcaacgccaccacccacccctgcccgactgaatttgatcccgcccgactgctccttcacagatctcctttccatcgctgccgacctgcctatattctggtgcgacggtggcaataagaatcacacgatcttctcgctgcagagaggaagaatgtaccaagcccacagtattgcttaccgtgcccaagaacgacgccggtgacaaacctggctcctcc

SEQ ID NO: 478 - DNA, 356 bp, Zea mays
  unsure (1)..(356): unsure at all n locations
agcttgcacacatagctcatttgtatacctttgatcatatctcttttatatgctatgactaatgtgttttcaagtttatttcaaaccaagtcatatgtatattgaaagggaattggagtcttcggcgaagacaaaggcttccactccgtaactcatacttcgccaccactccgagcaactctcttctctttgggggagaaatgagcatcaaggaaaaggacttcatccttgggggagagagtaaaagctcaaacgcaaaaggacttcgtctttggtataatcctaactcacttatttatgaccacaagggaagaaagtacttcgagggctctaatgattncgtttttggcgattca

SEQ ID NO: 479 - DNA, 425 bp, Zea mays
tgagaaggagacaaccttatcatgcacaaaaccccttcttaagaataccaagctttccaagaatggcatgagcaaaatccatggtgagaaaattaatgctcatatgatttgctctaacgatgtacctatgtgcttcaacaaagaaagatcaaagagaagcgataggaggtgctatggatgcaaggagaagggccatgaaattgattcatgcccccacatgaagaatcaagaccttgcacgatcaagaaagatgaccatcaaaaaggatgaaagcaaaaggcaaatgcattgcaaggacaagcatcgcatttgctacaattgccgtgaaaaaggtcatctattcaaggtttgtccaaagggtaaaactcctaagcctaacttgtcaatacattcaaatatgcttcggagacccaaaattgactctt

SEQ ID NO: 480 - DNA, 328 bp, Zea mays
  unsure (1)..(328): unsure at all n locations
agctttaccttgattcccatattccaacttattatntagtcatcactacaccattaatggtggtcttcattgtaggagagagaagagaaaaccagggaggagaaaagggaggaaaccgatggtagttttgacgtggcgggaggcggacgggcgaaggttggccagtgggtgcggcgcggtgtcgatgtctatgcggggctgggcccggtggcgagcactgccggccctggcggcggcgctgctgggaagaatggggagagggagaaatggtgggcgctggtggggcaagcgcgcgagtgagagagtggnggggggggggaaccttggc

SEQ ID NO: 481 - DNA, 428 bp, Zea mays
gggttggaagttgcagcgacaccctcatccatatcatgttcaatggttgaatgaatcaggagatatcaagattggttataaggtgaaagttccgttcaagattggagagtatgttgacacagtggagtgcgatgttgcacccatgtctgtgtgtcacatgctgctatgaagaccttggcaatatgaccgatattctcagcattgtggaagagcaaatcaatacacgctagatctgaaagggagaaagtttgtactcaagcctatgacccctcaacaaatcatggctgaacacttacaaaagaaaactgaaattagtacagcaagtagaggaggagaagagcaaaagaaattgagtgccatccacaattcggtgagcgagtgctacaagccatattcaagagataaaatgaaggaagagggagaacatc

SEQ ID NO: 482 - DNA, 375 bp, Zea mays
  unsure (1)..(375): unsure at all n locations
agctttgatcaaagatttaatgtcnataattaactctactntctgcgggtgataccagatacaaacatgcatcaattaataattaataataaaataataaggaagagttagttgtctcgtccacatttacctctggagcttcttcatgtagaactcgagctctttaccctcaaggatgtagctggccaataaaaggaaatgccactgtagttagcctcgaggatgtagctagacaataaaaagaaatgcccagcaactgccaggaaatttcaggtggaaactgtaagctactgaagcgaggtgaaatggtccagtagtccttacccatcagctcgggcacactacccatgacgagcataaatgcaagccaacaat

SEQ ID NO: 483 - DNA, 333 bp, Zea mays
ctgtgacccctaatggatattactgctacattcggatgcccgaggggctcaagaatgctggaggaagcttcatcaggatgacttccaaagtactcacctctcatattagtaggaatattctgacatatattgatgatatcatagtccaaagcacgaagcaagaatatcacattgctgatttgcaagaaacatttgccaacttcataaaggctggcctcaagcaaaatccatagaaatgtgtcttcgggggggaagggaaaatttcatgggtgtctagtatcaacaaaagggattgtagctaacccaaacaaaatagaagctatactttggatg

SEQ ID NO: 484 - DNA, 248 bp, Zea mays
atggaggccgagggtgccttgggctgcgccgaggactcctagggctacggcgtgttgtcgatcatgacggagggatgatgtatatatatggagaagacgtccggtggaaaccgcgacccccctgaggctaatttaacagctcatacgcagactcgatgaccatcaagcgatatggttgagctccagcccgtataacttgtcttccaggcgccgaacttcgttgcaatacgcctccatattccggtcgc

SEQ ID NO: 485 - DNA, 393 bp, Zea mays
  unsure (1)..(393): unsure at all n locations
gttaagcttatcaaagaaaaattacacagaattggagaaagtgttgtatgctgtattaatggcctctacgaagcttcggcattatttccaagcttaccatataattgttgcctcgtcacatcctttgaaggatattatgaggaacaaagaagctactggaagggttggaaagtgggccgcggagctcaatgaattcaccatagactacgtgcacagatcttcaattcaatcccaggcgctagctgacttcatcactgactggacgccaagggctcacgaagaacggacaaacaatgataccgaagcttggacagtgttatgtgatggttcgtggtgaaccttcggagcangagcatctgcngtcctagtagcaccttcaaaagtcaaaacata

SEQ ID NO: 486 - DNA, 449 bp, Zea mays
tgcttcggccgaggggtcttttataccttcaatagataatgcatttctctgtttgcgccaaggatatcacatgttcgcagcctcttctttccaagatagcggcaatccccctagcacccgagaacgcgcatatgtccccatggccactcaaaatttcttcaaaagcttcgggctcgccgctgatcctgtcgattggaccttcgggatcgcccagtacgaagttgccttcatttgaatatgcgccgacgctggcgaaactagtcttattattttccacacatttcatggattattcataacatctttcttttgaagaccgaagatctgcagttggtttctcccaatgaatatttcagtaatcgctggcgtctcggtcagctttggcaattgcacactttaatttcgcttcagccagctgtttctgaagatcttcaatttcgcacttatgg

SEQ ID NO: 487 - DNA, 373 bp, Zea mays
  unsure (1)..(373): unsure at all n locations
tgtacgctattgctgcacaattccggcattcattggctcatgtttatagcgatgtaaatgtattttaagggaagccaactttgtaccagttacgatctgattccgaaattatcgaacagattgccaagttcagttactctgcatgtaagatttgctgaaactggtgtaccatagccactatgggcaattgtaactttgtttctataatgaaaaanaatcatattattttggtgccactcatatacaacatttacaggtttaacatcatgaatgtcatattgttgaatacttattttacattgctacatggcaatatgacattaaaaacaagggaacacaagtgangttcaaaccctcatccataaattattaa

SEQ ID NO: 488 - DNA, 403 bp, Zea mays
  unsure (1)..(403): unsure at all n locations
tatccggtcaccggtggcgtatatctcaacggcgacgacttgttattttgtggagatcgatcgatggcggtgagactgtctcgctgtcgttctgatccatttgggacactgtaccatggcgatctccattcagttggcctgacagtcaacctttgaacttgattttctctcaaatctctatggcaactcataccgagatctgcagcagagttgttcctctatactagctctacaactttgttatagcaaccctatgtagattctcactggatcatagtctgaatagctcttagacttggatctaggtcactgtcaatctgaagttcatactgtatcagcctgacagtccaactttgggcttaattatctncaatttcatctcacaactatgcttacaccctta

SEQ ID NO: 489 - DNA, 470 bp, Zea mays
  unsure (1)..(470): unsure at all n locations
tatgaagattcttcattccaacatgtgctagacggtggttcctgagccagcccatattagtcttagctattaaacatgcatctagatcgacattctctttagagaaatcaactaaatacagcttaccgtctaatacacctttaaaagctaatgaaccatcacttcttctaaagacagatacatcaatatttgtaaataaacaattatagcccatatgacataattgactcactgaaagtaaattgcaaccaatcgattctactaagaacacattagaaatcgaatgctcggtagtgatggctattntacccaaacctttggccttgccttgattcccatctncaaatatgatcgtgtcgcgggaatccttgttcttgacgtacgaggtgaacatcttcttttcccccgcatgtggttctttctattctttattcacctgaccacccatattgcttcttcctggagacgtc

SEQ ID NO: 490 - DNA, 365 bp, Zea mays
  unsure (1)..(365): unsure at all n locations
tctaaagggagaacacattntaggattaacagatgtttattttgtgaaagacagggtttgtagcgcatgccaggcgggaaagcaagttggagttcatcatccacacaagaacatcatgacgaccgacaggccgcttgagctactccacatggatctattcggcccgattgcttacataagcatcggcgggagtaagtattgtcttgttattgtggatgattattctcgcttcacttgngtattctttttacaggaaaaatctcaaacccaagagaccttaaagggattcttgagacgggctcaaaatgagttcggcttaaggatcaagaaaataagaagcgacaacgggacggagttcaagaact

SEQ ID NO: 491 - DNA, 496 bp, Zea mays
ggaccttaaaactcaagcttcataatcttgtcgtgcttattagtatactttaatgtttataattggcccaagccatgattctataattttcatactctttccccatattcttgaatttcgtttatagggctcaattatggtttttattggggttgcacattttgcctttttgaaaaacccatttgttttgaacatgatgcttttaagtataagcttagtgggttctttattcttaaatcaacttaatggttattctcaattttagttcacataagatgatggttcttgggttagcacttgagagaaaccctaggtgacactggcgtgtcacatcttccaattcattacctcctgcactttatttggatcaacagctattccttcttgagagatagtgtgacccaacgaattgatttcttttagccaaaaatcacatttagaccagttggcataaagactgtgctctcttcgacatttgagcactacatgcaaatga

SEQ ID NO: 492 - DNA, 483 bp, Zea mays
  unsure (1)..(483): unsure at all n locations
tatcaaaatctaagatagaaattcatgattataatgaatatttatggcatggaacaaagtctcaaattagacaggaatcttcaagcaaagacaatcgcttccactggaaaaattgatgggcatcaaagattctttgctccaataaatgtatcatttatacattccacaagggaatgaggttctcttttatatgctactccaacatcatctaaaattgctaaacatgtatcacatgcttctggattgcaaatgtctaaagtagcatagcttataaattctcttgtctagaacttaattgattaaatagtgcacatgttccttatgttgtataattatgttcaattgatactccttttatgccaatggtactntaagttgcaaataagtactctcaacaggtattcaatgaattcatatatatgcgcgcactacaacttgatgagaacttactcgaatatgcaattagcgatctgattatctatc

SEQ ID NO: 493 - DNA, 464 bp, Zea mays
  unsure (1)..(464): unsure at all n locations
tagtggatcttttattcttaagtcaatttgatgctcatgctctatntggttcacataagatgatggttcttgggttagcacttgagagaaaccctatgtgacactgggtgtcacagccttccccccttaaaggaatctcgtcccgagattcgggtcagagtcctccaggggtgaagcgaaggatgagacttataggaagtgggtgcttattgttattattagggcaaagtgatcttcgaatgtcattctctttacaacttcagaaggaagtcctttttaaattttgttccatgattacttcattctgatttaagatcatatttctgaatcttagattccaagggtacgaggaggggttgggtgtgattacctaccagtttccttatgtaggcaatcgggaaacgtggatctcaagaattcctcagtctnccangtagcttctttctctgagtgattactccact

SEQ ID NO: 494 - DNA, 361 bp, Zea mays
acaacatcatggtattggtgctcgacggtgtgatatgttggcacaagtgctacgctctttttctactagagttttggttaacggtgaaccgggagagttgatttatcatcaaaggcggctcccgcagggagaccctttatctcctatgctctttgtgtgtgttatggacgttctaaattcaataatcttgaaggctgaaagctatggtttgttacagccgctgcttcgtcggtgaattggacagagaatttccttatacgccgatgatgtggttcttgttatgcaatcgcggaggagtgacatgtagaccgtcaaacaagttttgaacgtgttcggtgaagcctcacgacttggtactaat

SEQ ID NO: 495 - DNA, 352 bp, Zea mays
tatgaagattcttcatcccaacatgggctagtcggtggtttcagagccaacctatgttagtcttagcaattaagcatgtgtcgagttcagctctatcaaaatctaccaagtatagctgaccctctaacacacccttaaatgctattgaatcatcacttcttctaaagacagtgacacctacatcagtaaagagacagttgtagcccatttgacataattgagaaacggaaagcaaattgtaatctaatgaatcaacaaggaaaacattggaaatggaatggtcaggcgatatagcaattttacccaatcctttgaccaaaccttgatatccatccccgaatgtgatagcgcg

SEQ ID NO: 496 - DNA, 304 bp, Zea mays
gcgagttagcccctcatatgaacatgtcttctggttactaacagcaattttcagtatattgcttttatttgcctctattggttagcacctttgatgtagctctaggaaaatgttacaccttttctattggacttaatatggctctggttcaaaacagactaaacctgtgagcaccatataacttctctcttttgcacgttgttcaaaagcatatgattttcaggttattgagaattattcttaacaatcattattcatcttcaaattatcacatgtcaacaattatccctttttgcatccctgc

SEQ ID NO: 497 - DNA, 88 bp, Zea mays
actatcacattcagatatatatgagggctacataactttataatatggcgaacacgacactactagagatatgtatagtctatagata

SEQ ID NO: 498 - DNA, 483 bp, Zea mays
  unsure (1)..(483): unsure at all n locations
ctaagcttggtccttcaaaattcttgaatatgcacttgttcgcagaacaaaattgagttttacaagatggaatgctgaatggaaaagcgctacctccttgtatgagcaagctggtcggtgaattttaccatccttcttaattttcttcggagcaatttttcactggggaatatataagcgaaaatcatttcttcttttgagcaattgcgtataggttcagaaaggacaatgagaaagcaaaagatgcttttgagaaggcctcaaaaggacaggaaatgatctcctcgtatcctttggaaatttctctgcagctttggtattttcattcttcatattattatacattacccgattgtactcttagctaatgccatagaccatgggacgctgctaagcatatggaatctgctgctgctttagcanaggagctcgggcgctggaatgaagtatcctgattctatcacagagcttcagaattatacc

SEQ ID NO: 499 - DNA, 346 bp, Zea mays
  unsure (1)..(346): unsure at all n locations
aagcaaggtggtggtcattattcacaccaaaacaatatgacgaccgacaggccacttgagctacttcacatggatctaatcgaaccgatagcttacataaacaataacggaaagaaggactggctagntaatgtggatggataatctcgcttcacttgagtggtcttttttgaggaaaaatctcaaaccaagagactttaaagggattcttgagacgggctcanaatgagttcggcttgaggatcaagaaaataagaagcgataacggaacggggttcaagaactcacaaaatgaaggcttccttgaggaggagggcatcaagcatgagttctcttctccctacac

SEQ ID NO: 500 - DNA, 434 bp, Zea mays
  unsure (1)..(434): unsure at all n locations
ctacgcttctcagtttacagctcggatgtgagcaaatccattatcttctgcactgcatggtacggtacctgctacgttttgaacatttgtgaagcattcaattttttttttttttttgcctttgtttaagacagactgcttatcacaaagcatcctctgtcggttcaagatatacagcactgtctacctgataacaggtggactatacaaaactccaggcagctaggaaggctctatctgtattgttcgttctcgttcaagatatagtgtttcctctccagaacagaaagatacgattntgtgctacataaattgcaatcaaaagtttggacgcagccttgtaagctaacaaataccacaattgtcaaattactttggtccatctgaaagaccagaaggaaaggaaaaatgacagaacgtccatacagctagta

SEQ ID NO: 501 - DNA, 453 bp, Zea mays
  unsure (1)..(453): unsure at all n locations
aggcgaattggcaggacgcagtcttagtgtgctccttcagntgggtgcaccagtcgccaaggcgctggtgctcggtcttgagcgcctcccactcccgcaggatcgccgcctcggtttcctggagagcctaatgagcgcgggacagcacccgagggagaggagtcggcgttgcttctggctcgatgccggaccggagcggtcgcccaagaataacctccggttcctctggagttggcggtgggatgaagctggacgcgccccccgcgccttccgccgatggtgtattcgacgatatcggcgccattggatctgcagtagctgtcggcggcgctgccgtctctggacccccagccagaacttgtgagcccaatggtgttccttgacggaggcaggcggatcccggggcctgacgggccaccttagacacacgtacactgtacggtggggtagtcc

SEQ ID NO: 502 - DNA, 379 bp, Zea mays
  unsure (1)..(379): unsure at all n locations
tgtgatttatccaatttaaaacaagcaccatctcttaacatagattntctatggataaactcaacacaagagatggcattagtagcacaagcactagtttcttatttagcaaccctttatatgtggaaggcaagcgagttgctaaaatagagaaacatcataatatggactaaatttcccttaagccctcatgcacaatagattttgaatgacatggataatatgcatgattgttcaatgaaatctaaagggctgacttaatccatattatggtgagtgtctaataaagaagaatcaaatccaaattaactagatagagaatatgtcacataattntggattgttaccatatgataatattcattcaacattcaattag

SEQ ID NO: 503 - DNA, 479 bp, Zea mays
  unsure (1)..(479): unsure at all n locations
cgtgaagggtcttcatcccaacatgggctagtcggtgatgtcagagccaacccatgttagtcttagcaattaagcaagtgtcgagttcagctctatcaaaatctaccaagtatagctgaccctctaacacacccttaaatgctattgaatcatcacttcttctaaagacagtgacaccaatatcagtaaaaagacagttgtagcccatttgacataattgagatacagaaagcaagttgtaatctaaggaatcaacaagaaaaacattagaaatggaatggtcaggagatatagctattttacccaatcctttgaccaaaccttgatttccatccccgaatgtgatcgctctttggggatcttggtttttctcataggaggaganacattntcttctccctgtcatgtggtttgtgcacccgctgtcgagtatccaacttgagccctcggatgcataaacctacaaaacaagttttagt

SEQ ID NO: 504 - DNA, 475 bp, Zea mays
ctatatgggagaaacgcaggactcctctatattgtgtatattactggagaaagacagatctttgggcccgaactgattcaagaagcagaacaacaagctcgtataattcgagagaatttgagggtggctcaaaccacgcaaaagagctacgtagataatagaagaagaccactggaatctgaggaaggagattatgtgtacctcaaggtgtcaccacttcgtggaatgaggagattcacatcaagggcaaattgtccactcgctatattggaccattcttgatctttaggcgagttgtggagatggcataccaacttgagctactcgataatctatctgatgtgcataatgtatttcatgtgtttcagcttaagaagtgcctctgtgtccctgaggacagttaccatggatgagttactggttaagtgattgacttcacgcagatgccgcatgattttgctcactgcctccttct

SEQ ID NO: 505 - DNA, 428 bp, Zea mays
  unsure (1)..(428): unsure at all n locations
tctaaagggagaacacgtgataggtctaaccaatgttcatttcgaaaaagatagaccttgtggagcttgtcaagcaggtaaacaagtgggaggagcacatcacagcaagaatgtgatgaccacgtcaagacctctggagctgctacatatggacctcttcggacccgtcgcctatctgagcataggaggaagtaagtatggtctagttattggtgatgacttttcccgcttcacttgggtgttctttntgcaggataagtctgaaacccaagggaccctcaagcgcttcctcaggagagctcaaaatgagtttgagctcacagtgaataacataacgatcgacactggctcccaattcaataatcctcactcgctgggttccttgaccggccggtctcaccatgaatattcgcactcactccctacct

SEQ ID NO: 506 - DNA, 358 bp, Zea mays
  unsure (1)..(358): unsure at all n locations
tagcanaagaaaattctagaatcaagaatattgagctcatgcctaagtctggtaaaagaatgttcatcaagtggcttggtaaagatatcggctaattgatctttagtattaatgtaagaaatctcgatatcccccttttgttggtgatccctaagaaaatgataccgaatggctatgtgcttagtgcggctatgctcgacgggattgtcggccattntgattgcactctcattatcacatagcaaagggactttggttaatttgtaaccgtagtcccgcagggtttgccttatccaaagcaattgcgcgcaacaatgtcctgcggcaatgtactccgcttcgtgcggggaaagagcga

SEQ ID NO: 507 - DNA, 300 bp, Zea mays
tagtgcctcatagagcatctagtggttgcatttgcatgaggactaacaatgcttcaaatttcatgggttaaaaatcttttcaaaagcatgtttgaaaattgccaagtcttggataggcggaccgtccgggccatgtgggtggaccgtccgcgatccttcagtaagggtacaaagtgtgttcacttcggacaggttctgttcatttgtactgtggaccgtctaggccttggtgccggaccgtacatagtcctgaccagagaaggttgctctcggcacagtccttgaattattgggcggaca

SEQ ID NO: 508 - DNA, 167 bp, Zea mays
ctatcttctcttcactatcctattttcactgacactttctttctctttggctcttccactggaggattctatcaaagagtattaccatcatacactggaggaaaccaaagactatgaaccatgaacaacagtcttcaacccaagaatcaccaagcattgtgatctta

SEQ ID NO: 509 - DNA, 326 bp, Zea mays
  unsure (1)..(326): unsure at all n locations
catctagctctttagtttctcatgcttctcgctcttaaggtcttgcacaggtgctcatagccttagtatcaaggtgggttctagccatggtaacacctggggtgttacaagttgtatctctgcggtaagaaaccttttgatgatgtgaaaaaccaataaactatattgcagccaagaggcttgagacttgagagtcgtacacctttgntcttgccagatctttggacttgtgaaagatatctctgagatcccctagtttgtgctctaggcttctgggcattntttgtggattagtcccggattgtggctttgcgatcattcagagg

SEQ ID NO: 510 - DNA, 459 bp, Zea mays
  unsure (1)..(459): unsure at all n locations
cggcactatgatactcaagcttcggcgtctttggttatttcttcttcctgagcccctggcgtnctaatagcgatgaagtctgccaacgcatgggactgaattgaggatctatgcacatagtcaatggtgaaatcattaagttctgtagcccatttcccaatccttcctatagcttctctggtcctcataatggccttcagaggctgtgatgaaggaacaattatgcgatatgcttgaaagtaatgcccaagctttctggaagccattaacacagcatatagcaccttctccaattctgtatattttttctttgacaggcttaaaacttcggaaataaagtacactggagctttgcttttgacttggccatctagcttctcctatacaagtgccacactcactgnagaatgcgaagctgaacatataagagaatggagccctggcgaggggagtaatgtg

SEQ ID NO: 511 - DNA, 328 bp, Zea mays
ctaagcttagaggaaaaaatgcattagaattaagggtcatgtgaaatgtttgtccatgataccaccgatgattgaggtaagagtgaagcctttcttgtatgatgtcttcttaaagaatgatcacatcgaagaaaatggttggaacgatgagacaatcaatctagggaaaaggaactcggtggagaataatgagacaaatgaaaaagaggatagggggagataaaaaaagctagatgtgataacaaggaagagggatctggtttgaataaactagaaaaaaggagtacctgacactaggaagggtaacttgactgtcatggcttcaact

SEQ ID NO: 512 - DNA, 412 bp, Zea mays
actaagctgcagcctcgacccggcgacttaccggaggccgattctactaccggacttcggcttccgcgccgcgcgggaccgagctatcagtgagtcccgccaattcttgcactcatatttctctggcatccatggacctccctgaccatttgttgaactatctcgcgtgacaggccggctcctcgccgcgacgagataccccgctgcgcgcgtggaccgacgactacggcatcttcgacgggtccgcacaccgtggatcccgagactcccttcgtctcgacacttaccggagaatctcgccgcggaagaccttcgccttttttcgcgcggtactgttgaggagagaaggactctgtaggattgaaacccgggggttctgaatgcagtgactcatggagagtagctaggctga

SEQ ID NO: 513 - DNA, 421 bp, Zea mays
  unsure (1)..(421): unsure at all n locations
acactataaaactaagcttatactcggtgcattgtagaggccgngaatagtaattgtagagcgtacttgaggtgttcgcctccaggtgcagtgaagagaatccctgctcctgctccctgcagcttcagcgagccatcaaaatacattcgccatacttctgccgcttctggattgtctggtacttgctgttctgtccactctgatacgaaatcaaccagtgcttgagttttgatagcagtgcgaggtcggaactcgatatcgtgggatcccaactcgcaagcccacttggctattcggccaatggcttccttgttgtgaagaatgtcccctattggaaaaccagtgactactatgactntgtggtcgtcaaagtagtgacgcagcttgcgtgcagttagaagtactgcatataatagcttct

SEQ ID NO: 514 - DNA, 367 bp, Zea mays
actagctgacaagaacgataagacaagtacccgtacctctgtattgaagatctgcttgatcagatgagaggagctacagtgatctcaaagatagatctaagatcagactatcatcagttgaagatacagactgaagatatacctaaaacggccttcaccacaagatatggactatatgagtttttggtcatgtcttttggactgtctaatgcaccagcttactttatgaacttgatgaataaagtattcatggaataccttgactagtttgtggtagtattcatcgacgacataccggtatactctcagaatgaagaagcacatgaggatcatctgagaatacgtctacataaacttcgtgacaatc

SEQ ID NO: 515 - DNA, 250 bp, Zea mays
cgactcctttcgccttgagacaccggaatgtcacttcaatgtcgtagaggaggtcggaagccttccgtgtcttgactacgatgtcatcgacgtaggcctcgactgtgcgtacgatgtgttcgccgaacacatggttcatgcaccgctggtacgtcacgcctgcatttctcaagccgaacggcacggtgacatagcagtacatgccgaacggcgtgatgaaagaagtcgcgagctgcacggactctttcat

SEQ ID NO: 516 - DNA, 481 bp, Zea mays
  unsure (1)..(481): unsure at all n locations
tctaaaggtagaacacattntggcactaacaaatgttcattttgagaaagacagggtttgtagcgcatgtcaggcagggaagcaagttggtgttcatcatccacacaagaacatcatgttgactgacaggccacatgagctcctacacatggacctattcggccgatagcttacataagcatcggcgggagtaagtactgtctagttattgtggatgattattctcgcttcacttgggtgttctttttgcaggaaaaatcacaaacccaagaaaccttaaagggattcttgagacaggctaaaaatgagttcggcttaaggatcaagaaaattagaagcgacaacgggacggagttcatgaactcacaaatcgaaggcttccttgaggaggagggcaataagcatgagttctcttctctctacacgcctaaacanaatggtgtagtggcgtggaagaatagactctattgacatggccggt

SEQ ID NO: 517 - DNA, 453 bp, Zea mays
  unsure (1)..(453): unsure at all n locations
tcagctccatctatgntatggagtgcttttgagtcagtctatattaccttcggcctttctggcagcttcctgacttccatgtatagcgatgggtccttgatccgaaggtatcttcatgcaaagataggcaggatgaagaattgcttcgaaagcattgatggtgccacgaccaataattgcattgtaagggtattccatgtcaacaatgtcaaacacaacttgctcagttctagtgttgttgacgaacccgaaggttactgacatggtgatcttgcccaatgctacaatctgcctccctccgaagccacagagaggatgtgtagcatcatgaatcttatcttctcgctcttgcattcgcctgacgccttacaaatatgatacacttgtactgcctggtcaaccaagaattacggccacaaatccttgattcacacacataccatggaacctgct

SEQ ID NO: 518 - DNA, 416 bp, Zea mays
  unsure (1)..(416): unsure at all n locations
cactatgaaactacgcttgaggttggtggttgtctacaaantaatcttcagttcaccctgatcggtatgacaacgtangcttcacaaatgataatatttttatgtctatcaagaagacagtcataaaagaaatgatgatgaagagtatgatattgtatctgaagggacataccttgatgaattagtttctcgacctgtgaaactcgtagagttaatggatgaagaaccagatccttcgaatgcaaaacgatgaaagtcaacaagacttcttgaaagacaacaatgacttgaacagtttaataatgcacatnatcatagaaaggattatgatgttgtactacaatttatgtatgttattgtacgtttacactttttattactagaatttatgtcgcactcttgctttacatttattc

SEQ ID NO: 519 - DNA, 368 bp, Zea mays
tggcattctcttaggaacgactggcgagctgtttaaccttttatttcacagagataaggtctgcatcgccttactgacgtcgtttgcacttgttgcgcttatatttgagcggaataagtgtggatacccttaggaacgactatcgaacgatttcagggtatagttcggcggtatttggctcttgattgcctatggaacgacttttgagcagagaacttacgctgcgctcccttaggaacgacttcttgtagcttcgactattttggctctgcattaccttaggaacgacttttgagcagacaacttacgctgcgctcccttagaaacgacattatgtagctcagaatattttggctctgatattcatt

SEQ ID NO: 520 - DNA, 315 bp, Zea mays
taagagatgcgaaagggagaggacaggagaaccaccattctatatgtacgatgtcacacccgcgtttagaaggcaaaccgaatgcgaaccatgtacgtgccaggatcagttattcacgtacacagcagttacataacatggacatcatcacacagtgctcaaatagtattaatagggaaataatagtcgattacatcacacgtctgagacgtccatatagtccttacaataaatcaaagtgcggaaaagaaacgcagataaacgcggtcttcacaggcagccaactgcgggttgccgctaacccacgcctagaac

SEQ ID NO: 521 - DNA, 476 bp, Zea mays
  unsure (1)..(476): unsure at all n locations
tatgaagattcttcatcccaacgtgggctagtcggcgatgtcttagccaacccatgttagtcttagcaattaagcatgtgtcgagttcagctctatcaaaatctaccaagtatagctgaccttctaacacacccttaaatgctattgaatcatcacttcttctaaagacagtgacacctacatcagtaaagagacagttgtagcccatttgacataattgagatacagaaagcaaattgtaatctaaagaatctacaagaaaaacattggaaatagtatggtcaggtgatatagcaattttacccaatcctttgaccaaaccttgatttccatccncgaatgtgatagctcgttgcggatcttggttnttctcatatgaggagaacatcttcttctcccctgtcatgtggtttgtgcacccactgtcgagtatccaacttgagcccncggatgcataaacctacanaacaatttta

SEQ ID NO: 522 - DNA, 352 bp, Zea mays
  unsure (1)..(352): unsure at all n locations
ctaagcttcgctatggtcaaantntttgcagcacaacgatgcaatagtctagtaatgttgtggtaacttcacacctacccgtctggttatatagtgctgcaggtgggaaggtgaatcgtcaagccgctcgcacccggtgaacagtcacccgcactcgctgaacggtggaccataatggccaagaagctgaatcgccagatcgtgcgtacccgttgcatggtgggaccatccttcactcggaatattttaaatcgttctcagcaacgagctcagggaagggggttttcggaccttctgcaatccgaagcctgagagaaatttttacgggtctagcttgtcacgataaatgatc

SEQ ID NO: 523 - DNA, 330 bp, Zea mays
tcaatggaccaatcaaggaagaggtctatgttgagcaacctcccggctttgaagacagtgagtatcctaatcatgtctataagctctctaaggcgctttatgggctcaagcaagccccaagagcatggtatgaatgccttagagattttcttattgcaaatggattcaaagtcggaaaggccgatcctacgctctttaccaaaacacttgagaatgatttgcttgtatgccaaatttatgttgatgatattatatttgggtctactaacgaatctacatgtgaagagtttagtaggatcatgacacaaaagttcgagatgtctatgatgg

SEQ ID NO: 524 - DNA, 351 bp, Zea mays
  unsure (1)..(351): unsure at all n locations
cttggctaacgaatgtcatgcaaggcgcaacagtatattttttactgcgtcttgaccctagtaacgcgtcgatcttggtgtaatagtagcgagctaaagctggttgtaactggccatgattgagatgtattggtcctactatacagcgcaataanaacccaacggtcactgcaatgcttggtgggattaccctacaggctcaccatggacgacggtgtgcacgaccaccactaggatgtgctgtggtgcattggtgcctccttccgttctaccaagccagtgggcacacccctctggctaatgtatgtcgtgccatggcatggtatggcgatataatgatacgccttttgc

SEQ ID NO: 525 - DNA, 296 bp, Zea mays
tgtggatgcttcaaaatcatctattgtgcatgaagttgtagtgtggtcactaaggatgttggagtcacttgtgacttacttgatagtcttacaagtgaaccactacctactaactctatttgtgataaatgcaaaatttctctcaatgataatattgctcttgatgaatcaaaaattattgttgagaatgaagtgttagtggatagaataagtactctaactcatgacctagaaaaggcatatggtggtaagaagaatttgtatctcatattgggacgtcaacgacgctctcttaa

SEQ ID NO: 526 - DNA, 416 bp, Zea mays
tatatctcccatagctctgggtgtgcagaaaatttatgtatgttcgaaccattgtattctgtatcgtggcgattttgagaacgcagcaagatgcccagtttgcaatgtgagtcgatacaagaagagctacaatcaaaactgtgtaaaaaattcccgaagaaaaataaaaacaagaaatccactattggacctgaaagtgacgatgacacttttgatgacatggatgggaaaaagaagtcaaagatcctagctttggtgatgtggtatcttccagtaattgatcgcttaaaacgtttgttctcaaatcctagggaggctgagcttatgcgttggcatgctgaaaatcgcaagcagaataacaaacagattcgacacccttgtgatgaatacaatggaaaaatttgatctatgatcct

SEQ ID NO: 527 - DNA, 313 bp, Zea mays
cttcagcaccaaagggcttaatttgcacttcggaagtttcttatattttcttcggagtagtgcttgaagactctattatcttcaaaacatccagtacattaaccatcctttttcttttgggggtcattgatggacccttatggctatttggtgcttcaacttttgctgaaggacttaaaatttcatatgtccttgtttctgtagccttcagatcttctattatctacatttccggcattatgactggctcttcaacatttcggaggggggtcgcctccttggcttccgggtcgaagaggatccatcgacatat

SEQ ID NO: 528 - DNA, 144 bp, Zea mays
ccccgcgagaccctctcccgtttctttctaaccttaatgaatgtgatatcgaatgtcatacctggtgcatattcactttatttgttcccttgtatgatgtactgtttgtttcccaatttgaatggatgaatgtatgcatgcttg

SEQ ID NO: 529 - DNA, 454 bp, Zea mays
  unsure (1)..(454): unsure at all n locations
ttgagagcgagtgaatcaatcttcactttctttgtctaacttatagcatcggcttgagagttcttgaatatatattgagtaagaaattctcccaatacttcggntggagaagttgtagataaatcacttcttactagcatggtcacaatagtctcatacttcttcggaagagatctaaggaacttatgagtgaaatccacattcggtacatcaaaaccaagtcccttgatctcattcactatatcatttaactgcgtgaacatatcggatacactttcttcttctttcataatgaattgctcaaattttcctctgcacacatatagctttgcactcttcacacttgtaggtccttcatgaatttcattagcttaatgcacatctcatgagcagctgtgagaatcttgatacgatcgaactcattaatggcaagagcatcataagatacattcat

SEQ ID NO: 530 - DNA, 391 bp, Zea mays
cttgatccacgaaaacatgaaggcttcggaatgctgaacgtccataatacaccttccctgagctcgttgccgagaaacgattataatattccgggcgttgagcggtccaccattcagcgagtgtgagcggcctggcggtttaccttcccccctgcagcactatataaacacacgagttggtgaggagttaccacagcattcattgccattgcactgttgtgctgttaaaaaatttaaccatagtcgaagctctctgcattgcgctttcaagcgaacacttcatcgtttaaggttaacttcgtcagacgggttagcttcgtcaaacggtaaaaaatcgatgaaatggccagagtgcggtcaactgcaatggtgtctcgtgagggggacgaaa

SEQ ID NO: 531 - DNA, 412 bp, Zea mays
  unsure (1)..(412): unsure at all n locations
tactaagctcgcatattccattcctttaacgtcaaagatactctattggtttattttcctgcaccaaatctctagtaccgatatgctcagacataactcggaattcgccaacagcttctcggtatggtgacccttgcagcatgtcgcacaggggcctaatttacccgaaggttangtccaatgggctctgaactatcttctccttcttctcatcaaccttaacataaaaccactcattcttccaaccggttgggcatttggtgcgatagctcaccaccacagtcttcatatctttgcgataagcaaagttgtaacagccgaaattctcgtgcagcccatcttctctagccttcatctgatagtgaagctcgtgcacccgacagaaagcttcngcaagtgggttcactccttg

SEQ ID NO: 532 - DNA, 381 bp, Zea mays
tactcaatttgcaggaggaaccatagttttattgccaaatagagcacaaaccatgtttatttcagcagatcgcacaaaatctcgttcttactttcagccacaccaccccccccccccaaataactacagcaggtggatcctccgcatatgcaacatgtagactgtggtgagtggtgttacattgtattagctctatctgtatgtatgagcctagagcccagcccatgagaactattacttggctgtgttggctacataaccctacgcttatgcctatacattgtttgcctgattgcgtcaatctaattaatagatatacgatgttatcctctccaacatggtatcacagaaccaaccctaaccctacctggtcaccggtca

SEQ ID NO: 533 - DNA, 288 bp, Zea mays
tgagacgggaacaaccgcggcatgcactaaatctcttgaatattatgtcaatgacttgaggattgtcaagaggaaggaacaaaagaagaaaatcaatacctcttccaaaagcctcaaccacgcctccatagaaggtaacatccaaggtaataatcaagtcacacttcacactaagagaagtaagaagtgtagtgaacgctctgaaaagggacactccgataagtcatgtccctatattaaaaatgacttgatcattaaggatcgctaaactgtcttatatgcaaaaga

SEQ ID NO: 534 - DNA, 325 bp, Zea mays
cagctttaagtatttgaaagggcaagccaaactgaaccgttctcataccaaatgggttgaggttatcgaaacatttccatacattgcgaaatataagaaaggtaacgacaatgtggtcgctgatgccatgtctcgaaggaatgcgttgttgaatcaactagaaggaaaagatttgggtcttgaaaatttgaaagaaacgtataatgatgagcctgaattttcagaaccatacaatcattgcaaagatggaaaaggttgggaaaaatatcatatacacgatggatttttgtttagagctaacaaacattgtgtaccaaattcttcg

SEQ ID NO: 535 - DNA, 319 bp, Zea mays
  unsure (1)..(319): unsure at all n locations
ngaagccatggtaagtagcataggccaataatatactaattgactcangcctagctacgggtgcataggtttcaccgaaatccaaaccttcgacttgggagtatcccttggccacaagtcgagctttgttccttgtcaccacaccatgcttgtcttgcttgttgcggaatacccatttggtttctacaacattttcgttaggacatggaactaaatgccatacctcattcctagtgaagctgttgagctcctcttgcatcgtcaccaaccaatccgaatcttgcagtgcctcctcttattctatgcggctcaacagacg

SEQ ID NO: 536 - DNA, 447 bp, Zea mays
  unsure (1)..(447): unsure at all n locations
taccttggcatacattgcgattattccatgttactttttcagatgataattcaggctaaacagcatctccgagagaccttcatggaggtcttcatcataggaacttggcaaatttagaattaaaggaaacttcatctttgatcgagatcgctcttccttcaacttctggaagcaaagttttttagatgaatctaaaatgcaacctgttagaatctgtctaagcatttggtatttttgtcttttttaaccacagtgggatgatgttggtgggccatcccctgtgcagctcatgttttttagatacctgccctctctccggcctcgttatcttgcctgtttagattactcttgtgttcttgcacacaacctcgtacattttacatgttcttacaagtccgatggtacagntgaccttagatctatacagtacttttgatcatctttaat

SEQ ID NO: 537 - DNA, 409 bp, Zea mays
  unsure (1)..(409): unsure at all n locations
tgtgaaggatcttcatccctacatgtgctaagcggcgattccacagacagcccatgccagtcttagcaattaagcatgcatctagaccggtctcctcttttgcaaaatcaactaaataaaggttggcgtctaatacacccttaaaagctagtgaaccatcacatcttctatagacagacacatctacatttgtaaataagcagttatatcccatattacataactgactcacagatagcaagttatatccaagagactctactanaaacacattagatatagagtgctcattagaaatcgccaatttacctaacccttttaccttgccttgaatcccatcaccgaatataattgaatcttgtgaatccttattcttgacgacgaggcgacactctctttctcccgcata

SEQ ID NO: 538 - DNA, 412 bp, Zea mays
  unsure (1)..(412): unsure at all n locations
actcagctgccaaaggcttagcatgatgtgattattgtttaactgggagacgccgaaggagaccgctgccgggtacagtgaaggcggattaatcgtttgaatataccttcagatacagagacggatttgatgaaccaaatgacgactggctaaaatgtattgaggctactagcgacgagttacttggcgcatataccaaagccgaagatggcactttatcctcagactttggcggtcggngcaagacaagattgaacagggcttatgatgcaattggtttcatataccctgantactggctaccctcacgaaggcaaggaaaaaacaggaaaactatcgctttgtgcatcactgctgtgccgaatggcaagagaataaatgttatgacccacacgccacgatatattgaaac

SEQ ID NO: 539 - DNA, 302 bp, Zea mays
tcttgagcttcgatttaaagtcatgttttcaccatgtctgatgattaaatatccaaggagaaggaggttgttgtgaagacgaagtcaactgaagagacacagctgtttgaggagaagaaggatgtggatccttatattgctggatttgtcaagtcgatggcaaagaaaaaacatagagaagattactaaggagatactggaaggcttatctgaagatactggtgatagggatagctatgatgtggaaagtggggatgaagattctgaagatcgcccctcgtggccaatccactttgtcttcg

SEQ ID NO: 540 - DNA, 375 bp, Zea mays
tggtgaaaagacgaccgaagaaacgagttcacaagaataatttcatatatttgaaagaaagcttcaagcttcgttcaaaagagggtatgcaagacaacacggccgaatggcccttatattttcctttgtgggagacatatgttctaccataaaggtttcgccaaatgaaagaagtgtatcaacgtttccggggttaaagggggaagcttgcacctcaggtacattcgtgtccattctctatacttgagcaatgtggaccagtggcataccgactccaactacccgaaacattgtctgatgtgcataatgtgttacacgtgtcacaattgaagaagtgtcttccggttaccgatcgaactcgtgaagtgacagatg

SEQ ID NO: 541 - DNA, 319 bp, Zea mays
cgacgggttgagcttcggatgtggagggatcatcaagctcgttgatctttctcgagccttcgatcatgcactcaaaacttacaaaatggccgattacttcctcgggggtcattttagtatatctaggattaccaacgattaattgcacttgattagggttaagcgaaataatagatcctagaataaccttaaccacctcatgggcatctcacttcacgcttccgagggtgagcactttgtttatcatggtcttgagccggctgtacatcattgctcctctctcctccctcatccgtatcttgtccgacctcccctctct

SEQ ID NO: 542 - DNA, 378 bp, Zea mays
cgcattgcatatttaaattccttgtattgcatctagggcttgtctaacctagatgagataaccgccaataaagcgagtgaaaaagcttaactcgggtcaaacctgacaagtcttagtctttaagcttttagcacttaaattctttcttttcatgcaattattggttcctgaaatatgcatgaggtactgcacttagggggagtattcaaaactcaaatcactctttgaaacccctagtgcaagcccaaatgcaaatttcaccatttgcctattatctctaaaaattatctagcctatggcataatattttgaaaagtatatgagggtgccaatacctggcccaacaagtggttttgtgtgatataagttgggatttgg

SEQ ID NO: 543 - DNA, 411 bp, Zea mays
  unsure (1)..(411): unsure at all n locations
ngacaatgaggaaatggcactcgtcatcaagagcttccgtcatatcttcaagcacaggagagggaaagactacaagttccgctccaagaaagtttgctacaagtgtggtaagcccggtcatttcattgctaaatgtccattatcaagtgatagtgacaggggcgacgacaagaaagggagaagaaaggagaagaagagatactacaagaagaagggcgcggatgcccatgtttgtcaggagtgggactccgacgaaagctcaagcgacttctctgacgacgaggacgccgccaacatcggcgtcaccaagggacttctctttccaacgtcgggcacaagtgccttatgcgcaaggacgacataaggaagaacgtgaaatcaagatccttcactaaacatgaaacctctagt

SEQ ID NO: 544 - DNA, 276 bp, Zea mays
  unsure (1)..(276): unsure at all n locations
tgccaatggagaaacaganatccttgaagtcttggttgttaaactgcttgccgttgtcaactgtgagttcgaacggtactccgaagcggcaaacaatgttttgccagaagaatttctgtgcagtctttgatgttactgtggaaacagccctcgcctcgatccatttggtaaaatactcgacagtgacaaaggtgaacttgaggttcccctgagccgtgggcaggggcccgacgatgtacaggccccaacgctggaaaggccatgtgtgtctgatca

SEQ ID NO: 545 - DNA, 475 bp, Zea mays
atctgcatatgttgtggttaacagattatattttggcctagttcagagcatgagaaatagaagtcctaattcacccccactcttaggcgtcatcgtttcctacaactggtatttgatccaggtttagctctttaggaacctttttggcttaaccaccattaagctgacgctattaagaggaaatggatgaatacccataggccaccaacttcgatggcactaacttcccatattatagtgctagaatggcttgctacctagaagttgttgatctaggtgtttggagagtcactcgtgactttatgataccacctcataatctcgagaagctcatcgcgagagaagaaaaagaaattcatttaatgctagagccaaaaagtgcttgtaataatctcttaccatccgaaatttcaatcaaatggttactttttaaaactaccaattagatatggcttaaattgcatgacgctcatga

SEQ ID NO: 546 - DNA, 451 bp, Zea mays
  unsure (1)..(451): unsure at all n locations
tctaaagggagaacacgtgataggtctaactaatgttacttntcaaaaagatagaccttgtgcaggttgtcaagcagggaaacaggtgggaagctcttatcatgccaaaaatgtgatgacaacatcaagacccctggagttacttcatatggacctcttcgaacctgtcgcctatttaagcataggaggaagtaagtatggtcttgttatagttgatgaattttcccgcttcacttgggtattctttttgcaggataaatctgaaacccaagggaccctcaagcgctttctaaggagagctcaaaacgagtttgagctcaaagtaaagaagataaggagcgacaatgggtccgaattcaagaaccttcaagtggaggagtatcttgaggaggaaggaatcaagcacgagttcttcgctccttacacaccacagcataatggtgtggagaga

SEQ ID NO: 547 - DNA, 391 bp, Zea mays
tatcttacacacttaaagtaattaagagaataatataatgctcatcatctaagtctgcaccattcagatttgtttgatccctttcgatctacaagcttttttttcgtgtaccaccatagaatgcatcatgcatgccttcttccagataatagcacaatttatttcatagactacatttcacgaacctgcattatattaacctcttaattcatcgctatttgtgtccatcggtaaacctttcaaaaacaaggattggatccccacaacttttgtggtaagaagccaataaggtcagtcatatgcccataagactatctcttcatacctatattcaaactgcactgcaatctacagtgctgaatcgtgcacaacagcatttttggttaactat

SEQ ID NO: 548 - DNA, 432 bp, Zea mays
ctcgcttctcgagaaacgagccacaaaaacttattagttattgtctgtttggaacatagtaacaataccatgatattttagattaaacggtgtttggaagcatgtctaattaaactatgattctcaataccatggtatttttaggggttaaaaaacctttagtctggaccaaagttttttatttgcacgaagcagcagtcttcacttctcctacattacaactaaaatattgtgcatttaaatagatgttatattgtactaatgtaaaatatatcatagttatgccaatgacatacaataaaccgtggtattataattgtggttttgagaaacaagttctctaataggtccttagtttctggctaactctacatttgctttccttcttgtccgcctcttttttccacaaggaagaaaagagcgtgatatcac

SEQ ID NO: 549 - DNA, 337 bp, Zea mays
  unsure (1)..(337): unsure at all n locations
tcngaactatgcccgatacaatctgcttgagccgtatctataagagcttgccagatgcccctgttcctgtcgaccacgaccagcacccaacataagactttcctagttatttagccaagaccagagccatgatagttctcatggtagcactgttttcccgggtggtcactccatgttccaattaatatgcaataatcttgtttaaccatcgagttaacaacaataatggaatcttatcatttggaacattaatatcataagcggtagtgactgcataaagntatgttgtagcaatagcatagctacttgatttaatcatcattctcaggttcgatca

SEQ ID NO: 550 - DNA, 374 bp, Zea mays
  unsure (1)..(374): unsure at all n locations
tagctacaagagcanaagtctcatcacaatccaaacctacgatggagaataacccttntgctacaagtcttgctttgtttcttgtcaccactccatactcgtcttgtttgttttgaaacacccatttggtgcccacaacattttgctttggacgtggcaccagactccatacttcattttctcttgaagctgntgagctcctcttgcatggccaatacccaatccatattctgcaagccttcttctaccttgaaaggctcaataaaagaaacaagacagtatcgctcaccaaaatttgcaatacgtgatcgagtggtactcccttgctatgccacaacaattgactcaccggtggctcttcgaagatgctgcac

SEQ ID NO: 551 - DNA, 439 bp, Zea mays
aggagtgtggcgcatttaggatacctaacgggcggctacagccccgaggaatctttgtaaaggctacatagtgatgccctgctggaccacctaggtagtggtcaatggggagtagctctctccaggcagaaagggaatcacggcttgtggtaaagtgcacaacctctgcagagtgtgagaaaactgatatatcagccgtgctcgctgttatgagcggccaagggagctctagtgattagtggtacttgatcagagatgttcggtttgcaggtggcaatgagattgatggttcttggttatgactctggtaatggtaagtggtactctttcccgtcggaacggagtaccattaggttaataacgtcggataattctaaaactttggctttctctactacgtatattcatccgaccaactaataccatctgcttggcttac

SEQ ID NO: 552 - DNA, 354 bp, Zea mays
ctaagcttcagcttcatctataatatggactgacttggaagcagatcagcttccttcggcccttctggcagctttctgacatccatgaatagcaataggcccttggttcgaaggtatttttatgcagagataagctgggtgaagaattgcttcaaaagcatttagggtaccacgaccaatgatggcgttgtaggggtattccatgtcaacaatatcaaacacaatttgctccgtccttgggatattaacaaaatccgaggttaccgcgatggtaattttctcgagtgccacaatctgccgaccttcgaagccacaaagagggtgcgcagcatcatgaatcttgtcttcaggctc

SEQ ID NO: 553 - DNA, 284 bp, Zea mays
tatatatgcttgtgaaaaactagagacaaccagtgatggatttttggttcattcgccttagaatatttgcttgtttattagagcacctagagggggtgaataggtgatcttgcaaaacttacttcaaacaacacaaacttggtctataaaaggtgttagtataaattaaaaccatgttcggacgagaagaagagagaaaaatagactcttcacttgattgctctcttgatatatgcattaaactaggagcaatatgtaagtgcagtataagcactaaagaagac

SEQ ID NO: 554 - DNA, 265 bp, Zea mays
tgccacggtgagtagctgcaaaccccatgcatgctccatctgttttcatcatcaccagggacaaagtggatcggcataggcgccatggctgctgggttgcgacctttgctccggtctcatctccaggaagttcgtgcatcgccacagcctccaccttgtcggcaatggcaccgcccgattcctgctcgacaccttcttcgtccagagtttggcgtcggtggtggtcgacggacgccatcaccctattgtcgggtgcaggggccct

SEQ ID NO: 555 - DNA, 334 bp, Zea mays
  unsure (1)..(334): unsure at all n locations
tggaggcgtcgantgggtgcctacttgaggtagactccttcttcttgtcctccgacgacttgaatgcgacgggttgagcctcggatgtagatggatcatcaagctcgttgatcttcctcgagccttcgatcatgcaatcaaaacttacaaaattcccgatatacttctcgtgggtcattttagcatatctaggattaccacgaattaattgaacttgagtagggttaaggaaaataagcgatcttagaataaccttaaccacctcgtggtcgttccactatatacttccgaggatgtgcacttgctatcacaagcgttagtaccgactgcacat

SEQ ID NO: 556 - DNA, 493 bp, Zea mays
  unsure (1)..(493): unsure at all n locations
tgtctntggctcatcctctttcttcatccaaatttggtgtttgtccgagtagcagtccaataagctcatgagtttcgaagaagctgctgcatctacaagggagtctattcttggtaaagggaactcatccttcggacatgcattgttgagatatgtgaaatcaatgcacattctccatttcccattagcctacttcaccataacagtgttagctaaccactctagatatgttacttctctgatgacgctagcactgagaagtctctttaattcattctgagcacgttcggctntatcctcagacatttgccgaagtctttgctttcttggcctgaaagatggatccacattgagtgaatgctcaatgacatctctggtaacaccacagagatcgttagctatccaagcgaagacatatttgttgttgaacaaaaaatctagcacggtcttatcttggtcaccagataactgagatcctagcagtaccctttcg

SEQ ID NO: 557 - DNA, 473 bp, Zea mays
  unsure (1)..(473): unsure at all n locations
actataaaactaagctgagccgggcattgctaccggagaggcggtttacttcgccagactntggtcttacgccgctgcgcgtggaccgagctaaccagtaagtctttttccaattccttgcacccacgtctttcctagcgtcccgtgaagctctcagacccgtttaattgacctatcgcgccgtgagtaggccaggtttctcgccgccgacgagcatctccgcctacgcacgtggaccggtcgactccgaccatccacgacggcgacccacacatcgtcgtgatcctcgagacctcccctacgtcctcgaccactttaccgtagcaacctcgccgtcggtaagcccctccggtaaattaattacagaaactgaccaaaccttactaaattaaagaatattatgtatgcttctgtgccgacttgagaaaatctgagatgcttcactccacttgacactgttaaaatactagaca

SEQ ID NO: 558 - DNA, 324 bp, Zea mays
agctcgggaacaatctcttgaagagaccgaaacttgtttggttgatccggagacagactaccttcatcgcaacaccgccgaagagtagcgcccctggttgataccacgaggagacggcggaattttcaaatcttctttgtcagccctcatcaattcttggccaattaagatttgaaagctaaaatcttcttcttctaaagcagattcgactatatctttctccttctcacgcactgtaactgtggttcattcggcggctggagcagcttcttctgcggccatggccagaagcatcttatcaatgttagaaagcgtgctttctag

SEQ ID NO: 559 - DNA, 388 bp, Zea mays
  unsure (1)..(388): unsure at all n locations
tggtgccgatggaanaacaaaaatccttgatatcttggttgtcgaactgcttgccgatgtcgactgttagctcggacggtactccgaagcggcaaacgatgttctgccagaagaatttttgggcagtctttgatgtgattgcggaaacagccctcgcttcaatccatttagtgaagtattcgacagccacgaaggcgaacttaagatttccctgagcggtgggcaggggcccgacgactgccacctcccactgctccacacccctcttacgcaattaacttgtttatcgccgcctctcactgtcctctctgactctccgtcccctccaccaacctctattctccttctcctcctttcttttccctcaccccttcctcctaccctgttc

SEQ ID NO: 560 - DNA, 376 bp, Zea mays
  unsure (1)..(376): unsure at all n locations
tatangtttctggatgagaagtggttacccaagttttgttgatgaagcaccagaagaccaatcaaggaaggaatccatgtggcagttcgcaagagaaaggtttgcctgttggcgtcgatgcttcctcaataagctagctgccaagcgaaagctgaagcctgaagatgatctttgagaagccagaatcagcatttgcaatcagcaaccggatgctcctcaaaggccggattntgttgaagtttcatcttctcgaagagctgcaaagcgaagatatgtagctgaagtaaagttattgagagcaactagaggggggctgatcactactttctctccacaccttctcctcttctcttttatctctcataaacttatctct

SEQ ID NO: 561 - DNA, 400 bp, Zea mays
  unsure (1)..(400): unsure at all n locations
ntagatcaaacttgatcgttntcccatccgaattgaagttatgactcatgagtgacacaacgcccgatcccatgctcatgattttgcgaagccaacaattttaaaccatatataaacgtaagggctagtttagaaactctatttttaagggatttctattttcccaagagaaaatgaaataatttcccttggaaaacgaaaatccgataggtaaatgtggtttccaaactagccctaaccttttttttcctatacagcgctatgctatctttaatttctactccctccggtgagtgtactactagntgtcattctggacacgctntaaatcgaacttataaaacttagactataaataactggtttattatttagtaattgaacctaatgttatatttta

SEQ ID NO: 562 - DNA, 498 bp, Zea mays
  unsure (1)..(498): unsure at all n locations
tttagggcacttagatactaagcttctaagggagaacacattttaggaataacaaatgctcattttgagaaagacaggattttgagcgcatgtcaagcagggaagcacgttggctctcaatatncgcataagaacataatgacgaccgacaggccactggaacttctacacatggacctattcggcccgattgcttacataagcatcggcgggagtaagtactggctagctattgtggatgattattctcgcttcacttgggtattctttttgcaggaacaatctcaaacccaagagatcttatagggattcttaagaagggctcaaaatgagttcggcttaaggatcaagaaaataagaagcgacaacggaacggagttcaagaactctcaaatcgaacgcttccttgaggaggagggcatcaagcatgagttctctttctcctacacgccacaacaaaatggtgtagtggagaggaagatagaactctattgacat

SEQ ID NO: 563 - DNA, 462 bp, Zea mays
  unsure (1)..(462): unsure at all n locations
cttaagctcgacaacacntattgacattttacataagagttctgagatcaataatatttagttcattcctcaacatgcagaagcgggtcttatcaagtggcttagtgaaaatatccgctaattgatctttcgacctcactccttctaaaatgatatctcctttagcaacatgatctctaaggaagcgatgaccgatatcaatgtgcttggtgcgagagtgttgtacagggttattagcaattttaacagcactctcattatcacacaacaaaggtaccttttctagaactacgctatagtctagaagagcttgttcatatataaaatatgtgtgcaacaagcacctgcggcaatgtattccgcttcggcagttgacaaggcaacactatcttgctctttggatgtccatgaaactagtgatctacgaagcagacgtcatcccccagaagtactgcttctatc

SEQ ID NO: 564 - DNA, 216 bp, Zea mays
atacgaaaacttgtgcataaagcagactggtgcattttgccagtcacactaaagaaggcggctgccattctcggagagatgactaaggcagagtcagatgcattgtaaaatagacttcacaagatttccaaaaagtgcttatgggccttcatagtctttggatcacaagaatgactcgttcttcggacggtttattgcgctcgactgaccggacat

SEQ ID NO: 565 - DNA, 370 bp, Zea mays
aaagacagggtttgtagcgcatgccaagcaggaaagcaagttggcacccatcattcgcataagaacataatgacgaccgacaggccactggagctcctacacatggatctattcggcccgattgcttatataagcatcggcgggagtaagtactgtctagctattgtggatgaatattctcgcttcacttgcgtattctttttgcaggaaaaatctcaaacccaagagaccttaaagggattcttgagacgggctcaaaatgagttcggcttaaggatcaagaatattagaagcgacaacgcgacggagttcaagaactctcacatcgaaggctttcctgacgaggagggcatcaagcatgagttttctt

SEQ ID NO: 566 - DNA, 369 bp, Zea mays
tgcattgcatgtttaaatttcttgtattgcatcaagggcttgtctaacctagatgagataaccgccaacaaagcgagtgaaaaagcttaactcgggtcaaacttgacaagtcctagttttaagcttttagcacttaaattcttacttgttatgcaattgttggttcttgaaatatgcatgaggtactgcacttagggggagtattcaaaactcaaatcactcatgaaaacccctagtgcaagccaaaatgcaaatttcatcatttgcttattttctctaaaaattatctagcctatggcaaaatattttgaaaagtatatgagggtgccaatacctgtcccaacaagtgttattttgtgtgattctaag

SEQ ID NO: 567 - DNA, 377 bp, Zea mays
tgccttcgcttcagtctatcacccgcagtgcaacgttgttgtttagcgcgccaatcggaaaatcgtcacagctaataagaagatgctcctcgacgaaataacaggatgatggaccgatttgttaccagagcgcagtatgggcgctaaacacacctgagtgcagggcgactgggttcactcctttccgccttctatacgggtcggaggccatgaccccagacgaaataaagcatgggtactcacgtacagctccgacagccgacctcgacgtggacgagccaacttcaaaagatctcatcgacggagaccgagtcttcgccctacagggcctagacaaagactaagcccagaccaaagcatgtggcgaccatacagac

SEQ ID NO: 568 - DNA, 485 bp, Zea mays
  unsure (1)..(485): unsure at all n locations
ttacacctagtcagcgggcgacactgaatgaccctcatcttttttctttactttggtcaacttgattttctacgcctctttgtgtttcttagccaactcatccaccttcgacaaggaaaatataaggactcaatactagaagaataatgcaaaaataaatgaaaggtgaataaccaacttgttggggccttggtcttttaaaggtccttaaaaacacgtttaaccattggttgccaagtattataggagcttcggcactagaacaccttcgatgcaggacattagaggggcgacgaagctaactttgtcatagcgacacagggagacgatgcanggaagagtcatcctgaatgctaaaagcaaaagacaatgttgcccttgcattaattgtaaatcatgtgtgtagtccttgtgggtgtaaatggaaattcgtacgaagttgacgattctctataatagatgaatagtcgtctgcataaatacct

SEQ ID NO: 569 - DNA, 335 bp, Zea mays
ctcagctagctcattatgtatggatgctttgagcacttcattttctcggccttctggagcttctgacttcatgaaagaagggccttgaccgaggtatttatgcaaggaagcacgagaaaattgctttaaagcattggcgggcacgaccaaaattgcattgaagggattcatgtaacatgcaaacacaattgctcggtctgggtgtgatgaaccgagtcatgcatgggacttgccacgctacactgcttctccaagcacaaggggcgagatcagatatgtttcggtctgcatgcgaagcttacaaataatatagctcactgctgacaacaaacatg

SEQ ID NO: 570 - DNA, 302 bp, Zea mays
  unsure (1)..(302): unsure at all n locations
ctaactganttagagtcccttggtggatgatccccatgtttagctcttccatttcttgacacaaagtgttctcggaggtcttcgccataagacagtggcaggaagtcttacgactcaacgcatctgtcaccacattggccttgtctgggtgataatggatctccagttcatagtctttaatgagctcaagccatccgctttggctcatatttaattctgactggctgaaaatgtactcaaccttttatcacccgctatacgtgacacatatcttccccccccgtcgtctcatccttttggct

SEQ ID NO: 571 - DNA, 392 bp, Zea mays
tcacatggaatagagctagtcgggaagcgatgcttggctatgtctggattcctagctctaaaaactgactacatgatgaattaccatcattcccctcaatttaggatccacatgtcatcctctttattcacgtctcttcttcatacaggtttgccatacagaggcaaaggcggcacatagcgtcggtcggtagcgggagggggcgacgttgggatcagtgaccgagcatgtcctcctcacgcgttgtgtgcgactgtgcatgctctctccaagctctggagcacctaggcatgttctccctaagcagtaacttcgcaaacttcttcttcatcatatccaactctgtagtgcagccactcccaacacatcacatatgctcagatcactctaag

SEQ ID NO: 572 - DNA, 324 bp, Zea mays
actccagaatatccttgaccttgctaggatctaccgcaattcctttggctgaaacacgtgccccaaaattgatttcttcagccagaacgcgcacttgctgaacttggcatatagctgatgttccctcaggcgcgtcaatacaatccgtaggtgctgagcatgctcctcttcattcttagaatatatcaagatatcgtctatgaagactaccacgaatttgtccaactcgggcatgaacaccgagttcatcaaataggtgaaatgggcaggagcatttgtgagcccaaaagacattaccaagtattcaaataatccataccgcgt

SEQ ID NO: 573 - DNA, 293 bp, Zea mays
  unsure (1)..(293): unsure at all n locations
acctatgaaactaagcttgtacacccgggctntaagggacaaagccgggtgcatctattcatgcgccaaagaagacaacatatataatcacagagtgtatagagataaatgtcaccaatcatcagagtacttattacatagcggaagacttattacaaaataaaagaataaatataaaacaaactaaggatcgtcggcgccaatgtcaactgagaaacgccacctagatcagatcatactcctcgccttgtggctcctcctgaaccacctgttcttctcctgtgggggggggg

SEQ ID NO: 574 - DNA, 348 bp, Zea mays
tcacaaaaccgttggttcatctctactcaaattttatcaactaccacatagaaaattttagtatgataatcatgtaagttagtgatagtgaatccttaacatcatgatctacctgtgactagtattttcgtcatagatatttggcaccagaataaatttgtcattacaacattgttgcacctcatcaaataagtttttccatccactctccctcacgataactaactaaacttttacataagaaaatacctctacaacatgggcaatgttagtatattttctttgccaaacatgtgaaagcttatgtgtgaaaccaagcaattgtaacatgagctttaaaataaaatc

SEQ ID NO: 575 - DNA, 411 bp, Zea mays
  unsure (1)..(411): unsure at all n locations
cacatgtgctaagcggcgattcatattctgcccatgctagccttacctattaagcatgcatgtagaccggcctctctttttgcaaaatcaactaaataaagtttgccggctaatacacccttaaaagctagtgaaccatcacttcttctaaagacagacacatctacatttgtaaatagacagttataccccatgttgcataattgactgacatatatcaaattatatccaagagactctactacaaacacattagagatagagtgctcattacaaattggaattttacctaaccctnttaccttgccttgattcccatcaccgaagataattgaatcttgggaatccttattcttgacgtaggaggtgaacatcttcttctcccccgctatatgggttgtgcatccgcta

SEQ ID NO: 576 - DNA, 403 bp, Zea mays
  unsure (1)..(403): unsure at all n locations
ccacatgtgctaaatttgtatgccacagccagcccatgctagtcttaacaattaaacatgcatctaaaccggcctccttttttgcaaaatcaactaaatacagtttggcgtctagtacacccttaaaagctaatgaaccatcacttcgtctaaagacagacacatctacatttgtgaataaacaattatatcccatattacaaagttgactcacagacaacaagttatatccaagcgactcaactaagaatacattagaaatagagtgcacggatgaaatagcaatttttcctaaccctttcaccttgccttggttcccatcaccgaatataattgaatcttggggatccttgctcttgacgtaggaagagaacatcctctnttcccctgtcatgtggtttgg

SEQ ID NO: 577 - DNA, 320 bp, Zea mays
  unsure (1)..(320): unsure at all n locations
gtcaagcacggaaacaggtgggaacctctcatcatgccaaaaatgtgatgacaacatcaagacccctggagttacttcatatggacctcttccgacctcgcccctatctaatcataggaggaacgaacgatggccttgtatagntgatgatttttcccgcttcacttgcgtattctttctgccggataaatctgaaacccaacggaccctcacgcgcttcctaacgagagctcaaaaccaatttgagctcaggtgaagaagataagaagcgacaatgggtccgagttcaagaaccttcacgcggaggagtatttcgagga

SEQ ID NO: 578 - DNA, 294 bp, Zea mays
  unsure (1)..(294): unsure at all n locations
atgaaaactttttctccttcggttgtattagtattctatccttagtgggatgtaccatagtatagttaaatccttgatataaaatgttcatatgctatactttacatcacttatgggcctaatttaaagaattagtctatccttttgggttcaagaatgatggttcattttcatccacatataaggatcatcatttgtaaaatcttcccatgtgttnttaatgctctcttttctaagtgtttgaacaaggtcctttcaagtgcctttaagatggattcaaaatctacggatata

SEQ ID NO: 579 - DNA, 397 bp, Zea mays
  unsure (1)..(397): unsure at all n locations
tccataaagtggcgtagaaaaatcttaacctcgaaacctctaggtgtcttttggctagagctanaacgaaagaaatgcacatgattcacggggatgaaccaaaccaactccaccaactgtgggactatggacatgagttaagcagaagtaatacagggagctccctttatgtaaatctggctggtgacctttttagctcttgctatatgcccctaaacgcatgcaagaggggtctcctacgtggatgcaaacctatcatttgtttagatggctgttttattaacacaaattctggaggccaactgttgtgtgcagtggcgatggacccaaatgactgcattcaccccttagttgtagctattgtcgaagctgaatcacttggcacctggaaacggtt

SEQ ID NO: 580 - DNA, 424 bp, Zea mays
  unsure (1)..(424): unsure at all n locations
agcttctntaaacttctttggatcaacttgataggttccatagcacttagaccaacataattagcacacaaaacaattgacgaagtgttgggaccaatacctttttaccaaatttctctaggatttgcaatatgcccgaaatagagtccaaaacgaactttctttgcaaaactgagttagtagccaaaataaagtgctagaaacatagagtagggtgtatgaaacttatccaacacttaaacctcgtgttatgttggtttgctcaaatttgcacttttggcccttcaatttagctcatatggacttgtttccttcaacttgcttttgttgtatcttgtgctcatgtccatatccaagtggttagtccagtatggtgtgttgagcatttaatcaccaaaataactaaaaatgacccaagggcaca

SEQ ID NO: 581 - DNA, 441 bp, Zea mays
tgtggaggaccagatcatcgaagcatataagttcctggatgattatgtgttcacccaagctttgctgatgaagcaccagaagactagtcaaggaagaaatccatgtgggagttcgcaagaggaaggtttgtgtattggcatcgatgcttcttcaataagctagctgccaagcgaaagccagaagcctgaagatgatctttgagtagccagaatcagcatttgtaatcggcaaccagatgctccgcaagggccagattttgttgaagttccatctcctcgaagagttgcaaagtgaagatatgtagctgaagtaaagctatacccataacccttctaagccaaatctcgaggacgagattcattttaagtggggtagatttgtagcatcccaaaaaaatcaaatcctgaaatttccctaaacttgctctaaattcaaaatga

SEQ ID NO: 582 - DNA, 334 bp, Zea mays
tccatatctgttggcattgccaagccgctaccttattgactcgttcctgcacaaagaggctagcaacacagtagtagcttgtgcatttttatgaatatgtcattataaacatagggctatccgagctatcaaatttcattccattctctacaatctcccatatgcttggatggagagagaataaatgactacgcattttgtgactccaaaatccgtagtcctccccatcaaagtgtggaggttttgccaagaagaatggaaaagcaatgtgaattcgaactatgtggaatacgagaataatcaaatgaaaagttcgaattgaccgtcttcctat

SEQ ID NO: 583 - DNA, 402 bp, Zea mays
  unsure (1)..(402): unsure at all n locations
ttgagacgatacacaggctctatttgtaagaaattcacaaattcatgaagatgaacacgggtcaacctacaataggccccacatcaagaagaaatgctctcaatgatagaaaatgttttgaatgtggggaaccccgtcacatgccatgaattgccctaacaagacaacaaagggcccagatggagatgataagaagaagaaattctacaacaagaagaaatatggcaaagactacctacttgaatgggattcacatgatagctcggatgataatgatgatgacacctcatccaagcttaatgccggaattgccatcaaggaagccccttcactcttctcatcccctcattgtcctatggcanagggagatgctaacgtaaaaatcatcacccgattaaatga

SEQ ID NO: 584 - DNA, 342 bp, Zea mays
tggatattattcatcagagcactacgaatattgttgggacaaatgaaaattattcttcacgaagcatgaaaagaaggaaggtgttttttcgtcaaagactcaaaaatggtacgtatgtaaaatttcatgcatcgtaaagaagtaaacaataaaagcaggtatattacttcaggctacaaatgcaccatattaatttagaagttaattacatgattaatctttctcaacactttgcgctattagaccgatgacatttccataacttaccattttaatctcgctcttcgtgaggccgaaccttacagactgaagacagaacactcctgttacaatgcaacaact

SEQ ID NO: 585 - DNA, 464 bp, Zea mays
tcagctctatatggacggcggtgtcgaactccgctaaattggtcttaacctgtagaaagatacttctttagacctgatatggtgaaagaggtcgaagaaaaggttcagagaattatccataatatgaagaaagctcagactcgacaaaagagttatgcagaccgacgacgacaacccttatgctttctggtagacgattatgtctacttaaaggtttcaccaatgaagggtgtatcgcgtttcggggttaaagggaagcttgcacccagatacattggtccattcctggtacttgagcaatgcggaccagtggcataccgacttcagctccccgaaaccttgtctgctgtgcataatgtgttccacgtgtcacaattgaagaagtgtcttcgggttcctgatcgaaccgttgaagtgactgatgttgtcctggaaccagatttaacatactcggaacatcctat

SEQ ID NO: 586 - DNA, 379 bp, Zea mays
acgactaccatgataaaggagttattctgactatggagtcaagtactgaagttcgatctggatccttcttgtatgtatatgttgggggtctccttcttccgaaggtcctcaaaacgctcattaaccgttctattttgttatctgtacactgcaaggttaatgccgaaggttgcctttggatagaacgtgcaggtgttcaaggaagaatgcttcagacgaccgtcgtatacaagcttcggatgaagccaaatacatagagccttcggaggctgaggaatcaagccgaggagaaagacaatttttcaggttctatgattgaagcaacaacacattttgctcttttgcagtacctttaacaaaagctcgcaagcatatggca

SEQ ID NO: 587 - DNA, 466 bp, Zea mays
  unsure (1)..(466): unsure at all n locations
gacctatgaaactaagctactcctcctgcgaagggtcgttcatcatcaccaagattttgttcccggaacatacaatctggccaacgatcaaggcgaggtctacaacaacgtttggaacatccgacagctacgtcgcttctacccttaagatgttttcaagtcgttcatatacctcgttttctttacatacaaaaataaagtctaaccgtcaaggaaggatcagccttgcctcggcaaagcccgaccctccctcgggggctagaagggggaaccccctctgcgtcaaaattttcctcggaaaagttttctaccaaaacgactttcgtgctttccgactataccgataacagaatcctgcaagcgagtaagagcacacgtaagcagcaaggcagaccgagccgagggacttctacgcctccgggatacggatacctcactagtcaccttncgcgaaaagtaactcttg

SEQ ID NO: 588 - DNA, 370 bp, Zea mays
aaatgcgaatcgattctagcctacctaccggtgcataggtctcaccgaaatccaaaccttcgacttgtgaatattccttggccagaaatcaggctttgttccttgtcaccacaccatgctcatcttgcttgttgcggaaaacccacttggttcctacaacattttggttaggacgtggaactaaatgccatacctcattcctactgaagttgttgagtttctcttgcatcgccaccacccaatccgaatcttgaagtgcttcctctatcctgtgtggctcaatagaggaaacaaaagaagtatgttcacaaaagtgagccacatgagatcgagtagttacccccttttgatatcgccgaggatggtgttc

SEQ ID NO: 589 - DNA, 339 bp, Zea mays
  unsure (1)..(339): unsure at all n locations
ctngatctactgatttaccttctctcatcaaatcgatattcttatttgaagccattggtgtcttggcgtgttttgccttttccatgccaaatttcttgagcatgtcttgtgtgtactcggtctggcatagaaaggttccttccctgagttgttttacttggaatcccacgaagtacttgagctcccccatcatggacatctcaaacctatttgtcataaccctactaaattcctcacaaaatgtttcatcactactgccaaatataatgtcatcgacataaattcgacatacaaataattgattgccaactttgcgagtaaatagagtacaatctactt

SEQ ID NO: 590 - DNA, 409 bp, Zea mays
  unsure (1)..(409): unsure at all n locations
agcttatcttctatgctatgtccatggctgccctaaacagnggtccaattggctatcccttgcagagttttggtataatacatgttttcacactgcactgggtcagacaccgtttgaggttttgtatggccacactccatcccagttaggactgtcaaccattgaacaatgtcaaagtgctgatctgcaaacatatctggcaaccagacagcttatgctccaacaggccaagttacatcttcaaagggctcaagatcgaatgaaaaaacaagctgacaaaggaagatctgaaagggtgtttcaagtgggacaacatgtatttcggaaactgcagccattttgtcagagttcgatggggagcagattgaacgctaaatcgtcatttcgctattttggaccgtttctgatc

SEQ ID NO: 591 - DNA, 454 bp, Zea mays
  unsure (1)..(454): unsure at all n locations
tctaaagggagaacacgtgataggtttgtcttatgtgcttttcgaanaagatagaccttgtgcagcttgtcaagcaggtaaacaagtgggaggagcacatcacagcacgaacgtgatgaccacttcaagacccctggagctgctgcatatggacctcttcggacctgtcgcctatctgagcataggaggaagcaagtatggtttagttattgttgatgacttttcccgcttcacttgggtgttctttttgcaggaaaaatccgaaacccaagggactctcaaacgcttcctcaggagagctcaaaatgagtttgagctcaaagtgaaaaagataagaagcgacaacgggtccgagttcaagaaccttcaagtggaggagttccttgaagaggaagggatcaagcacgagttctccgcttcctacacacccccagcaaatggtgtggtagagagg

SEQ ID NO: 592 - DNA, 407 bp, Zea mays
agcttcaccttcaatttagtatgacaatctttatttaatatcttggacctatgtcacaattatgccaacaagagcttgcaaatgaattctaaatccaacacaagtctggaaaccccttgaaaaggtaaaacacaaaggtacatcacttatgacacttatccattacctttgtgccatctaaggatccttttcattataatgtgttcacatctcgcttaatcataatttctaccctttatattctttgtatcctttttggagatttatgacaaagggggagaagttttgcattaaagcttacctttagtcttatgtaactaagtgttagaagacttttaagaaggggagatataattaacaaaaagggggaatcataagaaaaacgttacctttagtcttatgtaact

SEQ ID NO: 593 - DNA, 420 bp, Zea mays
  unsure (1)..(420): unsure at all n locations
tctcctggacgagtgctgcacttaccgctgagtgcgaatctgncacatataacaacagaggagcctctggcgttggtggagttagtgttgctaggtctatcaaatattgcttcagctcttcgaaggctctctgctgaactggtccccattgaaaaacttcggctgacttcaatacttcaaaaaatggtaaatttctctctgctgatctagatataaatctgttgagagatgccagtcttcctgtcaatctgtgagcccccttctttgtacttggtggttccattcgaaggatagctttgattttatttggattaccttcaatcccttttgttgaaactagacagccaagaaatttccttttcttcactccgaagacacatttctctggattcaactctaaaccagcctgtctaaaattag

SEQ ID NO: 594 - DNA, 304 bp, Zea mays
acttcacacctacccgtctgtttatatagtgccgcaggtgggaaggtgaatcgttaaggtcttccgcaccggacaaacagtcacccgcactcactgaacggtgggccacagagtccgagagggtgaatcgctgcaagatggggccactccgcgcgtggattattttaatcgtttctcgccaacgagctctgggaaggtgtttttcggatattcggcatcccgaagcctagaagactttttcacggatcaagctcgttacgaaaaatgatctatcaccgcgaaggggctactgttgggggtttgc

SEQ ID NO: 595 - DNA, 448 bp, Zea mays
gtcgctgaaaaagtccttaaagaagaatatattttggtgtaacaacattttgagatgcttgatgtatggaacaattgaaggaacgttaggcttctattgtaacaaaactatgtaatatttgatgtatgtaacattaaatcgaatatgtaagctattgtgatttatttctttgcgatgcatgaaacatacacacataccgctttttgagccttcgacgaaaaacaccttcccttcttttcatgcttcgtaaagaaggaaaccccttctagggaagatctgataaaattgtcacccgaagcttgctttgtgccttagcacattttcattcaacgaagtatttccaaagatttgcttcgtattcaatccttttgttgatgcgaaatgatgtatgatgtgatgctatgctaaatgatgcgatgataagatgcaatatgatgatgctttaacg

SEQ ID NO: 596 - DNA, 419 bp, Zea mays
  unsure (1)..(419): unsure at all n locations
agcttgtgaagattcttcatccctacatgtgctaagcggcgatgccacagccagcccatgctagtcttagctattaagcatgcatctagaccggcctnctcttttgcaaaatcaactaaataaagtttgccgtctaatacacccttaaaagctaatgaaccatcacttcttctaaagacagacacatctacattagtaaatagacaattatatcccatattacatagttgactaacagatagcaaattatatccaagggactcaactaaaaacacattagagatagtgatgctcatttgaaattgcaatcttgcctaaacctttcaccttgccttggttcccatcaccaaatatgattgaatcttgggaatccttgtttttgacgtaggaggtgaacatcttcttctcccccgtcatat

SEQ ID NO: 597 - DNA, 456 bp, Zea mays
  unsure (1)..(456): unsure at all n locations
tcggccttcgtaggccgaaggttgaaatgaatgaagctgtcgtttaatgccagagagccttcggcgttatctgttcttttattggaacgagagatttactacaagagcatattgccttcagggtatggccgctcgcggagaaatgagaaatgccgcaagaaaccataaaagaggccgacgaaggtggacttatcaggctgaagtacacttttaagttcggagataaattcgttgagccagatgatgactggttaaaaagcattgaaaatttaagtgatgaactgcttggggcttattcgaaggtcgaagatactgcactgtcagcagccttcggaggccgaaaaaagaagaggctgaatcgggtgtttgatgcaatcgggttcgtctaccctgattatcgttatcccattcgaggaaagaaaagaanaaacacaacctctgcgaaagaagaagctg

SEQ ID NO: 598 - DNA, 274 bp, Zea mays
  unsure (1)..(274): unsure at all n locations
catatgcctcattttctttacatacacaaatagagtctaaaccgcaagggaaggggtcagccttgcctcggcaaaagcccgacccttcccttcggggctagaaagggcnggaacccctctgcgtcaaaattttcctcggtaaaagtctttctgcaagaacatctttcgcgcttttcgacttcttcgatagcggagtcctgaaaacgacggagtacacgtaagcggcaaggccgaccgagccgagggactcctacgcctctgggatacagatacc

SEQ ID NO: 599 - DNA, 455 bp, Zea mays
  unsure (1)..(455): unsure at all n locations
tctaaagggagagncacatttgggactaacaaatggccatttttataaagacagggcttgtancgcatgtcaagcacgaaagaaagttggtacccaccatccacacaagaacataatgacaacggacaagccactggaactactccacatggatctattcggcccgatagcttacataagcatcggcgggagtaagtactgtctagtaattgtggatgattattctcacttcacttgggtattctttttgcaggaaaaatctcaaacccaagagaccttaaaaggattcttgagacgggctcaaaatgagttcggattgagaatcaaaaagataagaagcgacaacgggacggagttcaagaactcacaaattgaaggctctcttgaggatgagggtatcaagcatgagttctattctctctacacacctaaacaaaatggtgtagtggagagga

SEQ ID NO: 600 - DNA, 423 bp, Zea mays
agcttgtgaagattcttcattcccacatgggctagtctgcggtgccagagccagcccatgttagtcttagcaattaagcaagtgtcgagttcagctctatcaaaatctaccaagtacagctgaccctctaacactcccttaaatgctattgaatcatcacttcttttaaagacagtgacacctacatcagtgaatagacagttgtagcccatttggcataattgggatacggaaagcaaattgtaatctaaagaatctacaagaaaaacattggaaatagaatggtcaggagatatagcaattttaccaagtcctttgaccaaaccttgatttccatccccgaatgtgatagctcgttggggatcttggtttttctcatatgaggagaacatccgtttctccccggtcatgtggtttgtgcac

SEQ ID NO: 601 - DNA, 458 bp, Zea mays
  unsure (1)..(458): unsure at all n locations
ctaagcttctcatcatctnttcttctatttctttggccaaagatgttttaattttcgcttacctccgctaatgctttccacacatcattttttacaaaaccacgacacataacatgaacgagtctttccattattatgtgcgagtcatgactctctaacccagaaaacttgctcgtcttcaacattacaagaccttctaaagcccgcggcgtaaccatctgggaactttaagtttttcaaccatttcatcaattgtttcttccttttacgtttaatactgaaaggagcacgcggcttcttctgattctctcctatcttcatagctggccttctacagattaacgccaagcctttccttgccttacggctgccttttgctttctcggtgatattcactgcagcgctgataatgctttcacccatatttcattcctggtgcatgacatcaatgttatgca

SEQ ID NO: 602 - DNA, 421 bp, Zea mays
gcttctctgcttgatgttctagcctccattaagtcttcttctactcttagacccatttaattgaactagactgccctgaatcaccaagaacacatcggttgttctcggtttttgccatcgtcgcggacagagggattccaggctagaatcgtgtaattggtagagggattatggtcgccgagggtggaattatgtgtcgaacaaaggagaagcctagccattgcattttccggtcactacaagttcgctggaggtgtgctcgttgtcgttcaccgtcgtggacttggcgcggtaaagaaataaaactccgagggcctaactgtgaatgtcagagagacaatgaatagtgcacaagggttcttaaccggttattcaaacagctgaggtcctctgtgcgaagttgacatcgcgggcgcggggc

SEQ ID NO: 603 - DNA, 447 bp, Zea mays
  unsure (1)..(447): unsure at all n locations
tgaaataacatatgtgtcatgtttttatatgttcctttctctattttttgtgatgcancattgggttgcgtaaatatccaaaatgtttgtcgtctttttagtggtgttaatgttgcgcgctcgacgatatgtagttagttaacactagtgtgtggtggcttgtgatgtcttgctacttagtgtttacttcgctagcgtgtacttcaagtatcttgtgctatttcattatattcatacatatgcatcttgcatctcatttangaccgagagaggatgatcgtgcaagtgatgtggtgccacccacaagatgcagctggtggacgacctaacgaaggatggatataaccagtggatgctcgccaagcgagtaccctcccccagcaaacactgtctaagtgttaaattataggccagccccggttttatgcatacaccgttatatatgct

SEQ ID NO: 604 - DNA, 417 bp, Zea mays
  unsure (1)..(417): unsure at all n locations
tgcaagcttgtggtaaaaatgcttcttggttatctgtacaataatttatatcagatctatcgagttcctatgaatgaattgctatttatctagcccttggttcagtatacgatgtgggtaatcatgacgtctctctggctcgtttttaacctttggttatacatgtggcatacattgatcttaaaccaatgatattttgaatcatgttttaggctgatttatttttccttttggtcgcttttgatgcatatttatttacctactttaaccaacatagaaaagagaacaatcagctaacgaagctaatcagtgtgattagtatgggtcgatccgcgtgatattgccagaatttgatgttttatttgtcgntgtgcatctatagagtgattcattaatcaccataaaccctccttagct

SEQ ID NO: 605 - DNA, 432 bp, Zea mays
  unsure (1)..(432): unsure at all n locations
tctacagggagagcacattntgngactaaccaatgttctttttctataaagacaggatttgtagcgcatgtcaagcagggaagcaagttggtgttcatcatccacacaataacatcatgacgaccaacaggccgcttgagctactccacatggatctattcggcccaatcgcttacataagcatcagcgggagtaagtattgtcttgttattgtggatgactattctcgcttgacttgggtgttctttttgtaggaaaaatcacaaacccaagagaccttaaagggattcttgagatgggctcaaaatgagttcggcttaaggatcaaaaagattacaagcgacaatgggacggagttcaagaattcacaaatagaaggctctcttgaggatgagggcatcaagcatgagttctcttctccctacacaccac

SEQ ID NO: 606 - DNA, 421 bp, Zea mays
atgcaagctttatgctgcctgaacaatggtaaagctcacacacatgcaattctaacatgccctagtagttgacacaatattcaaaggaacttggatatcacacgacaggaagtctgaaacgttgtagttgcgaccgtaagtaatgctcaattattgtagaccctgcatgacgaattactcaaatagttagcgtagctctatatagagattagggggccaagctagcagacccctattcaacttggtgattattttgtgggaaggtaattctttcagaaaatattactgtccaaggttagtgcgattataaaacttacccaacagcagtggcaccccatgaagcaacattataaatgactttaagttcatcccatgccttccggatattacttttcttttcagctgaaaacgtcttcctaag

SEQ ID NO: 607 - DNA, 353 bp, Zea mays
tttagttctacgagaatgaagaccctgagcatctgtttggtgaaggcaagtgtcctctgacccattatgtcctatctacttataattcagtgtcccgcattacttaaatgaaacctaaggattgactagctttgcatgtaccttatccttgtttaccttttgggctatcatggttagcatttcgctattgtcttaattttaatcaatgaacatgatgtgaacatttatgatacgatactgttatcctgattatgttgatgatattgtgatattctagggggctcagacctttttcctgagtacctctccgtaaggacctgttcgtgaccacccgggataacaatgcaaccatg

SEQ ID NO: 608 - DNA, 410 bp, Zea mays
gcttatgaagattcttcatcccaacatgggctagtcggcggtgccagagccaacccatgttagtcttagcaattaagcaagtgtcgagttcagctctatcaaaatctaccaagtatagctgaccctctaacactcccttaaatgctactgaatcatcacttcttctaaagacagtgacacctacattagtaaatagacagttgtagcccatttgacataattgagaaacggaaagcaaattgtaatctaaagaatctacaagaaaaacattggaaatggaatggtcaggtgatatagcaattttacccaatcctttgaccaaaccttggtttccatcaccgaatgtgatagctcgttggggatcttggtttttctcgtaggaggagaacatctttttctcccctgtcatg

SEQ ID NO: 609 - DNA, 409 bp, Zea mays
  unsure (1)..(409): unsure at all n locations
cgaatcgcactaacctangtcgtatctgctttcagcattatttgtaattcaccctatacgtgtgtataaggcaacaattanaataaactggactacggtagcctatatgcatgattataaagctgggaggcctagatataagagataattccgcatggaccactttaaaaacaatccttatttataataatagtttcttttatttcgcagaagccattacttcaacttttagaacctcacgtgccacttccgttaatatgttgcgagatttatgatgcatggaaataccatttactcttacgttccctctttgtctcacacctctcttccatagtctcaacnaccacactgtattaaaattgatctacatctatgataaagatactatggacatcgttcgcacgacaac

SEQ ID NO: 610 - DNA, 416 bp, Zea mays
  unsure (1)..(416): unsure at all n locations
agctngcaaaaccctggttcatcaagtggcttagtgaacgtattggcaagttgagctttggtacccacactttcaatgttgatatcccctttggcattgttggattgcaaatataacgagacacagagtggtcatgagtaaatcaatccatcgttctttattgatagaatggttgcttatatagaagtacaaggggtgcgacgtacgaacatttccgtacgctgaaggggtgtgatgaacatccgtgttcatttgccgatgacccttccacaaagggtggctgttgagatcatcccttaacactacttccccttgatcgaaaccagcaatacatccttcaattatatttattaattccttcaagaaaacttatggaaaaacttaggaatttatgtgggttaaataataccaagtga

SEQ ID NO: 611 - DNA, 318 bp, Zea mays
ttgcgaaagggcctctagctgagttggttaggcggtctgtttatcactcctcatgtcctgggttcgactccccgtgggagcgaatttcaggctgtggttaaaaaaatcccctcgtctgtcccacgccaaagcacaggtctaaggctcagccccggtcgcggtcgttctcacatgggcttcgatgccgctgtgtatgggtggggtaggggttcggcggttctcttgacctgcgtgagaacgtcttcttcttattaaaatgctcggcggctgtcttaccccccgcacgtcaagttttttattcttgcaagctttaagttg

SEQ ID NO: 612 - DNA, 372 bp, Zea mays
cggcccgtgcgccatgggcgaacccctcattttcggcccagacgcaaggccgaacagccatgccgcccgtcgccttgcgcctccgggccgtttttcctccgttccgccatgcccttcacccaagacatacatattaccttcggtgtctttccacacgcttggacttagcttatttccggggccatgcccgaacctcgggtttccgcccctgcgccatgggcgaacccctcgttttcggcccaaacgcaaggccgaacagccatggccgcccgtcgccatcctgcccttcacccaaggcatacgtcgcagcttcggtgtccttgcacacgcttggacttggctttattattggtcgtgcaccaacccacggcg

SEQ ID NO: 613 - DNA, 425 bp, Zea mays
tagtgcaagcgtgtggaatggaaagacaacgaagttatgttgtatgtatggcttgagtgacaggcaaggtggaacggagggaaaacgggaggaggcgcgcggcgacgggcggcagggctgttcggccttgcgtctgggctgaaaacgaggtgttcgccatggcgcacgggccgaaaacggaggctcgggcacgaactccaaaataagctaagttcaagcatgtggaaagacaccgaacatacagtgtatgtctttggtgaagggcacagtggaacggagggaaaacgacacggaggcacgcggcgacgggcggcatggctgttcggccttgcgtttgggctgaaaacgaggcgttcgccatgtcgcgcgggccgaaaacaacggttcggccacggccctcaaaataagctaagtccaagcgcgta

SEQ ID NO: 614 - DNA, 410 bp, Zea mays
agcttcggctttgggatgaatacgtgtgatatgaggatacatcccgaaggcaacatggatggacgccgaagctatggctaaaggagcttcggcttggcatgttagcatagatgaaggacgaaaccgacctaagggagaaaagattacttagtccttgatagtttgcattagattaagagcaaatgtcaggggcatgaatgtaatcttatccgggctgcgtcccatgcctataaatagatgaacagtaacaccgaaatgttcacgctagattgtaatcgctcctacgtcactctcgcattttcaccttccggcaagccgaaggtatcaatgtaatataaatattgttgatgtttatgatatgagaatataaataacttactgatcattatttatattctcttatatttcat

SEQ ID NO: 615 - DNA, 445 bp, Zea mays
  unsure (1)..(445): unsure at all n locations
tatctatgctatacttgttgtgtccagaaagttgcgcctctattntcaggcacatagggtcatggtggtgacctcctctccgttaagggccattctncacaactataacgccacaggcaacatcgccaagtgggccgcgtagcttgctgagttccaactggacttccagcctcgccacgctatcaagagccaggttctggctgacttcatcatggaatggaccccttccccgaacgctcctgggggtccggatcccgaatcggaccccacacctgcggagcctgtggctccagtcttcaccgagccccactggacgctcttcttcgacggatccgcccgccagcagggtggcggtgttggagtggtcctcatcgacccaagcggagatcaagtgaagtacatggttcaccttgagttcaaggccaccaacaacatggcagagtat

SEQ ID NO: 616 - DNA, 407 bp, Zea mays
agcttctgatatgcagacgtcgtacttgttctcgggtgttgctttgcttaccaggagctcgccggcctcggggcgcgtggcagccggcatctggagaacgggggcaccatgaaccacaagctgctcaaggttacaacttacaatccctgcctgctgcagcactgctcgttatgcatccccatcccacactctactcctggcagagatcacaactgcacgccgcgcgcgcggcaagcgacatccggagcgtttcgtttctatttaatataagtgtccgagagagagagacctgggagtagagcgttagtgatcaagatgttttagattatttgaaaaataatggtatacctgtgagttcataaccgttgaattgatagtggtggaagctgcaagtacattcctggaaa

SEQ ID NO: 617 - DNA, 427 bp, Zea mays
  unsure (1)..(427): unsure at all n locations
tctncttgtcgtcatcaaccttgacatagaaccactcctatttccagcctgctgcccatttgcttcggtagctgattacaggaaactttgtggttttccgataggcgaagttataacaaccaaaattgtcgtgcaatccatcctttctagccttcgtctgatagtgcagttcgtggactcggtaaaagctgtccgcaaatggctccactgcttggcttcggagtgcccagatataaacactaagcctaacgatagcgttaggagtcagctggtgaaaatagataccgaaccttttcagtacctctgcaataatcccatgtagggggaatcttaatccagcctttagaaagcttttgaaaataacaatttcatccttctccggctntggggtggtctcttctcncccgaagcgtaatagctttttctg

SEQ ID NO: 618 - DNA, 413 bp, Zea mays
ttcatataacaaggaggtgaaacgagttgtgttacaaaatgctccaaaaaatgccaaatacacttcatctgatgtccagaaggaaattctaagcattgttgcacggaaagtgcaaaaattaataagagaagaaattggcactaacaagttttgcatcatggttgatgaagctcgagatgaatctaaaaaggagcaaatggcaatagtcatccgttttgtcaacaaagaaggacttatcaaggaacgttttcttgacctcgttcatgtgaagaatactactgcagtgactcttaagaactcaatttgtgctgtcttaactgctaatagcttgagtatagaagacatcagagggcaaggttatgatggtgcaagtaatatgagaggggagtggaatggattgaaggctctaattc

SEQ ID NO: 619 - DNA, 449 bp, Zea mays
  unsure (1)..(449): unsure at all n locations
tgtactctggtattgtaataacttttattcgaactatgtactatttgaagtaangaatatggctactagccctctgggactagtaattgtatcacatttgagtcccaaaggatcgggttgcttcaggtggtatcaaagccataggactggccgtagatcgtagccccgaccttaaaagtttgccttaacaagaaaacacctcttacccctaagaaaaatcttctcccctttccccgatattaacagacccttcttttcttctaccagatggaaggctcttgggtcattaggacatcctactgctcagaggaggaaggattccctcatctcttgcggagttgcgcgcttcgcatggggatccgcaagaagccagagtatgtctggaaagaataccgcgagaacggaattgagaagtgctctatggcagtctacctgggagaaagccgaag

SEQ ID NO: 620 - DNA, 416 bp, Zea mays
  unsure (1)..(416): unsure at all n locations
acgttccacaagattctctggtgattcgcatttattcctcgccaatttcctgctntttcttccagagcttagcacggtcaagttctctcacggtaggttgtgatgaaaacaagttctctcacggtaatttgcaagagatggtcgtgccttatgacagcagcaagaattgagatgctagagttgattgaagtagagttcacaggaatccctgcccatgcctgggagctatctacagctgagcaactgctaaatccctttgcttgggtatatcaagtgcatgaagacacttaatccattgataatcttgcatgttttcggtgtttggcatggtgctgcaatccaaatatcattccttcttcaagggatttgtggatcgttgagctgtttcatgctattgagagcgacgaccatggagt

SEQ ID NO: 621 - DNA, 452 bp, Zea mays
gcagcaaagctcttttcgtccgccagcgccttagtttttattgcgccagggctctgggggaagaattggggatcagccaagaaaaatctactgcttattctgtggtgaagacaaaggccataccaccaggatgtgccatgttaccatccagaagcaaaaggagatagcagaagctgcagcacaatagagtcagccgaagcaggtcatgcatactgcttcgtaccattcgccttacattccaaaatatgtaggcaatcactctgcagcttctgttgcttcggcaagccaacctcaagcatcttggcaacagccttcaccgccaccaccaacacaacgaggtcagcagccagaagggagtcagcacactcaccttcagcgggacttcagagaggagtccgaagctcgcacagtcaatagcattgtgccagagtcgaagcacatttactgacaaa

SEQ ID NO: 622 - DNA, 235 bp, Zea mays
attcctgcccgatgtttcaccggaactgctcaattgttcctgctccctcgtcgagcctggcctgcatctcgcggatttgctcgagctgtgcgtcctgaccccccgcagggactgggaccacaactagctcccgaaggatgtcaacgcgaggcgcagcctaggggatcgccgttccacataccaatgtgcttacggaccctaacacggaacatcacatggccacctcgccaactcg

SEQ ID NO: 623 - DNA, 459 bp, Zea mays
  unsure (1)..(459): unsure at all n locations
ctatagannactaagctttatgtcaacatcaaggccactggaactacttcatatgtatttatctgttcctacaaattatgtcagcgccggcggcaacctntactgtctactgattggcgatgacttctcaacatacccttgggtgttctttctccatgacaagtctgaagttgcatctatattcaagaagcttgccacgaacacccaacatgaatttgattgccagattaagaagactagaagtgacaatggcaaagaatttgacaacaccaacattcatgagtactgcgatgaaattgggatcaagcatgaagtatctggcacatacacacctcaacaaaatggagttgttgaaaggaaaaacacgaccttgatcactcttgcaagaacactgattgatgagtataacacaccgcagaggttctggcgcgaagctgtcaacactgcttgttatgcatc

SEQ ID NO: 624 - DNA, 415 bp, Zea mays
  unsure (1)..(415): unsure at all n locations
agcttgtcttggtgtcgcgccanagcaggagaagtcatactaagcaataggatatccacaaaaacgcttataagacacgttccaactctttcaataagcggtatggtactaatcaaacaaatccataacagtgctagcgatttgtgaagcccagcggttcatgtggcccagcgacgagtgcggcccaacgtccctcgcacaacgatttgtttacctaatgcagcccagcttccatatgcgaacgacgcatgtcatcctcttcggcaacctccgcctccgcgacggcgccgcacgcacgagctccactcccgtgacctcctcccccacgacctcaaccagctctgccacttccgcacgctccctgtgtacgccctcactaatcgcccatggccgaaacccctcgccccaccccgtc

SEQ ID NO: 625 - DNA, 449 bp, Zea mays
tcgggccagcagcaaagttcttttcggccgccagcgccattggtcatatgcgccacggggcttcggggaaggtttggagatcagccaagaaaaatttattgcttattctgtggtgaagacaagggccataccaccaggatgtgtcatgttaccatccagaagcagaaggagatagcagaagcagctgcgcaacaaagtcagccgaagcaggtcatgcatactgcttcgtatcattcgccttatattccagaatatgtaggcaaccaccctgcagcttctgttgcttccgcagccaaccccaagcatcttggcagcatcctccaccaccaccgccgacgcagcgaggacagcagccagaagggagtcagaacaatcaccttcagagagacttcagagaggagtccgaagctcgcacagtcaatagcactgtgccagagtcacagcacatt

SEQ ID NO: 626 - DNA, 400 bp, Zea mays
  unsure (1)..(400): unsure at all n locations
acaggccttcttctttttctccatagcatgaactttactggaatactaccccacttaaaaagaatgagggtagaactcttgaatcttggggatttgaactccttgaagtacctcataacaagggtgttacggggccttcttctgctgttgctgcttgaccaagctgcggaaaaatgactgacacaaggttgatttctgggagaaccttcttctcatcttctcttcactatcttcttttcactgaccctttctttctctttgctcttcccactggaggattctatcaaagagtattactatcatacactggaggaaaccgaagactatgaaccatgtacaacagtcttcaacccaagaatcaccaagcattgtgatcttatgggcgagggagtangaaatg

SEQ ID NO: 627 - DNA, 453 bp, Zea mays
  unsure (1)..(453): unsure at all n locations
tgtcaatacttatcanaacagcaacatttaccagcacagtttctgttaaccatacctgtaacatggccattcgcgtgctggggactggatatgattggacccttgaagaaagctcaaggaggatacactcatgtactggttgctatcgataaattcactaagtggatagagtacaagctcattgattctctaactttggccaaggcagtagaattcatacaagacatattattcacgttcggaataccgaacatcatcataactgacctaggatccaatttcactagttcgaagttctttgatttctgcgaacaaaaaaagcatccagatcaaatgcatcagtagcacacccaagagccaacgggcaagtagaaagagccaacggaatgatattggaagcactcagaaagaaagtcttcgacaagaatgaaaagttcgcacgaaaatggatca

SEQ ID NO: 628 - DNA, 316 bp, Zea mays
agcttgacagtgagggtatcaatgagccataagagaacgacgctgtccatctggatctagtggagcaacgacttcgccgatgacgtggtcggtgagggcgtagcgctggagcgtgaggagcacctcatcgcgcaagcgggcgaagtggggtgacgccggatccccactacggggccagaaccgatattgtgacctcgccgctgacgtgaaagcatgatgggcactcaaccggagggggacacggggacaacaccgcaaagcgtacctgcttacggaaggcaaaggcttctcagtggcgactgtataccacgacatg

SEQ ID NO: 629 - DNA, 452 bp, Zea mays
  unsure (1)..(452): unsure at all n locations
tcttaacgaacaggttntagggtacaatggttctatatattattactgtcgcgcagttccatgatattntgaagttcctcgctgtttacaccgtagccacacagaaaccttaggttgcagagaaatcttctattaggtttatcaagtaaagaactcagagcgcaacttgccgcaatttgtacttgagctatctagcttccaacagtttcaagggaaagaaaagaaaaaaaagaaagaaagaaaagttctccgtctttttgttatgctttattcacaggaggacattatcaatgtagaataaagattttgcatgtttttaaaattgtcctgtttccctctatatatagacccttgctcatttcgtgtctcggcgtgctcatctgagtcctctgtagtagtctgtacttgcctgcactctgcactctgactgagctagccgacatggacttgcg

SEQ ID NO: 630 - DNA, 438 bp, Zea mays
  unsure (1)..(438): unsure at all n locations
ggatctcaagcacctgagctgcagcttataagggagaacacattttacgactaacaaatgttcattntgagaaagacagagtttgtagcgcatgccaggcaggaaagcaagttggagcccatcatccacacaagaacatcatgacaagtgacaggccactggagctcctacacatggatttattcggcccgatcgcttacataagcatcggcgggagtaagtactgtctagttattgtggatgattattctcgcttcacttgggtgttctttttgtaggaaaaatctcaaacccaagaaaccttaaagggattcttgagacgagctcaaaacgagttcggcttaaggatcaagaaaattagaagcgacaacgggatggagttcaagaactctcaaatcgaaggcttccttgaggaggagggcatcaagcatgagttct

SEQ ID NO: 631 - DNA, 455 bp, Zea mays
  unsure (1)..(455): unsure at all n locations
tttctgagaagctggttaccatctntatataacattagatatatttagcgtatgatttatgcaagctatatacttttgttgtgtttaagtgaatgagtaagagaaaagcaaaagttatagctactctaaataatatgaatgatgaagaagaattgttaatgtattttgatatcttaaaaattagacaaaatgtcaatttattatgtatttgcganaactacaaaatatttgtctttccgactggagtttatcgttttcgaatgttttttaataattaacaattctgatcgtgtatttccaccattggttttccttttttgttttttgccccgctaaacaaatatgaaaacaaaaccaatttagctatttttcgatcgttttcataactgcatgctatcgttctatcgcggggtacagggccgacgtgaccaatcgagtccactgccaagtgggac

SEQ ID NO: 632 - DNA, 417 bp, Zea mays
  unsure (1)..(417): unsure at all n locations
agcttgtattcgcctcagtatatcacccttaatctaacggcgtcgtggagcgcgccaatggcaagattntcacggccatcaagaaaatgcttctcgacgacaagaaggggaaatggactgacctgctacctgaagcagtctgggcgctgaacacgaccgagtgtcgggcgactggattcacttcctttcgcctgctatacggatcagaggccatgaccccgcaggaaataaaacatgggtcaccacggacaagcgcttcagccgtccccgacgtagacgaaccaaccttcaaagacctcatcgacggagaccgtgtcttcgccttgcaggccctcaacaaataccaagctcaaataaaggcctggcgcgaccacacagtcgtcccaagagaattcaatgaaggggaccttgtactcg

SEQ ID NO: 633 - DNA, 449 bp, Zea mays
ttaaatgtgttgtcatcaatcaccacaaagggggttatttttgtgcattcatcccttttgtgagttctggtgatttggataacaacacatttaaaggtctaacaagtttgctaactgttgaacagggaattcagtatgatgaacatacttgaatagtgtataatgatcagtgaacaaggttcaacacaaggtcaaataaccagtgagacaatgcaaatggatataatatggcctctatattggtttgaatatatggacaagtcctgagaaatcactatgcataaatatgatcataatacacgttgaagtgattaacaggattggtcaagcccaagtgaataacatatgaggaatcgcgaattggcttgcacatattactattactccatatatgaatatatgacaatcaaactagagctcgatcgatcttagcagttatatctacatga

SEQ ID NO: 634 - DNA, 395 bp, Zea mays
attctgatattcagacttacagtgtaacaaagccatatttgggggtgaattcaaccatgatctagttatcaaatgagctcagtcactataggcgatttgtagctggtatgtaaccctataactttggtacagaaagcttgctcggttactacacaaaattgggagtaaataaccctgcaaatctctctgtcagttcatctgaaaggaacccgccatggtacagtgatctgataaggatcagaccgccagtgcagactgctcaccggcggcgacctcttcgccgggattcgtgccacaggcgtatggattttgttcaccgggtaaatatctcgtcgcggatgtgcctgagctactgtggcctcgctgtcccctgcccctttccaccggcgacgtgg

SEQ ID NO: 635 - DNA, 384 bp, Zea mays
tgaagccatggtaagtagcatacgctaataatatgtgatattgactcaagcctacctacgggtgcataggtttcaccgaaatccaaaccttcgacttgggagtatcccttggccacaagtcgagctttgttccttgtcaccacaccatgctcgtcttgcttgttgcggaagacccattcggttcctacaacattttggttaggacgtagaactaaatgccatacctcatttctagtgaagttgttgagctcctcttgcatcgccaccacccagtccgaatcttgtagtgcttcctctaccctgtgtggctcaatagaggaaacaaaccagtaatgttcacaaaaatgtgcaacacgagatctactagttacccgcttatgaatg

SEQ ID NO: 636 - DNA, 391 bp, Zea mays
  unsure (1)..(391): unsure at all n locations
agctntcatacctatagtcaattattatctcacaattcatttaatatagaccacatatgacgttcattaggctactgtatgtttattgtttgattgctatggcaatctttgtcagttgaatccttcgtgctaacgtgcaggcaaacaaacacaacaccatgatgagattttttttaaagggctcaagtactattattgatggagtcatgtggcttaattattattcgaggtaattatgcttgctttttgctctttaagtttgtattatagacattgttttctagataaatatatatatacacacaaatatcatttgtactattatctttttaatcatgcgataaattgaaaagaaagtagcctaaagggcattgtcggcgtttcgaccccg

SEQ ID NO: 637 - DNA, 421 bp, Zea mays
tcattgagaaaggacaaatctccataaagtcaagtgtggtcattatatagtcttcactaaaagtgaagctttgctcacaaagactaatcactgacaaggtttcaagagctgatatagataataattgtttaaatttcccttacatgggtaaataattggaaccttatagtttagggtagttaggactgcacgattatttacgaagcgagcacctctatagataccctcttatatatattgtttatggatagacaattttttatctaattgagttgatagccatattttacatgtctggattgattcgttagctaacatgtataaatctgtatcgttagtgtgtcagacccaagttttatgggcactaaacccggacgcgaacttcaccatgtgtgttaggatcaagtctcacacatatgat

SEQ ID NO: 638 - DNA, 407 bp, Zea mays
  unsure (1)..(407): unsure at all n locations
caagcttgccgttgcttatacactcgacttagaagttgcttccatttgtgattgttatgattcgaattattaccccactaccttaaaatacaacattntaattgtattaacttctctacctatacatactcactcaaactgtcactatgcctccttcaattcaacattagcaagagctagtcactcaacctccaccctcatagcaagtcactcaaccttagaagtattatataatcaaatctaggattaatcgagtcagacatgtatgggcaaaaaacaacaactaaataaaaagatggcttgaagaactcatagtttaattggttagtcaaagaccgggcacttcctttcaagctagtatctcgaccttgaagtctcttgatttagtctagacaccttcctttcat

SEQ ID NO: 639 - DNA, 438 bp, Zea mays
  unsure (1)..(438): unsure at all n locations
ctggtaggcggaccagtgcaattcaggtggatgttctctatataaagggcgttgaaaaagctcacggcgtctgttcgcaacaaggctagagtccaagggtgtattgcggaggcttttgcccttaaggagatatctcaattctcaaccaggtatttcgctcgagccaacaatgtgtttgctccttcagtgcgacttcatgtcgaaaatgaatcgccccaaagcacccttcaaatttttgcgaatccgggtaaagcagttggaaaagggagtgtacgtcacattgaaggatcagatttgaacacgctaatgctatatatgtatagcaatattgacagcacacaggaggcgttcgagtaagttntcctcatagttacttccattntctcatctcataatttctatagtgtgtaatctccatgtttctaatatgtccagcat

SEQ ID NO: 640 - DNA, 393 bp, Zea mays
tacattatcttttctttcaccaagatgtggttcctaaatagtatagttttcaaaatctgtccggacaatggacataacacaacaatcatattgtaaaattcataactctgaaactatcaggtttatggtcacgaaaatgtaacacaagaaagataatgaaattatctacaactttcatataattgacaaggattgatgctaaacttaacttaagaaaacaatgcaatatctgaaatcggtacagaaattggacagattcagttacttaaattgtgaaaagcataacttctaaaccattaattttgctcatgaaatttttggaaaggatagataaacatgtgaactacaacttttatgtagaaccagaactgtgcgtgcagtcctaactatggc

SEQ ID NO: 641 - DNA, 405 bp, Zea mays
  unsure (1)..(405): unsure at all n locations
tacttcgtgtaactttgacagtattttccacaaatcggtttcgtattccattcttgcgtcattgatgcaatatgatgtatgatgtgattctatgtgaaatgatgtgatgatatgatgcaaaatgataatgatgccgaagacacatactcacactcccaaactggaacacgcaatctcttcattcccttacgaacaactggaatctctttgccgtttatttttcggcttcaccgtttattttttggtgtaagttctgcatccccttacgaacaacttttgaacttcttccgcttatatttcggcggtatttggctctccattccctttggaacgacttttgagcagaaaacttactctgcgcttccttaggaacgactttnttgtagcttcggcaaaacttacgct

SEQ ID NO: 642 - DNA, 404 bp, Zea mays
cttcatccctacatgtgctaagttgcgatgccacagccagcccatgctagtcttagctattaagcatgcatctagaccggcctcttcttttgcaaaatcaactaaataaagtttgccgtctaatactcccttaaaagctagtgaaccatcacttcttctaaagacagacacatctacatttgtaaatagacagttataccccatctgacataattgactaacagatagcaaattatatccaagactctctactaaaaatacattagagatagaatgctcattagaaattgcaattttacctaacccttttaccttgccttgattcccatcaccgaatataattgaatcctgggaatctttattcttgacgtaggaagtgaacatcttcttctcccccgtcatat

SEQ ID NO: 643 - DNA, 457 bp, Zea mays
tgtggaggttcttcatccccacatgtgctaagcggcgatgccttaaccagtccatgcaagtcttaaccattaagcatgcatctagaccggcctctttttttgcaaaatcaactaagtaaagtttgccgtctagtacacccttaaaagctagtgaaccatcacatcttctaaagacagacacatctacatttgtaaataaacagttatatcccatattacataattgactaacagatagtaaattatatcaagactctccactaaaaacacattagagatagaatgctcatttgatattgcaatcttgcctaaacctttcaccttgccttggttcccatcaccaaatatgattgaatcttgggaatccttattcttgacgtaggaggtgaacatcttcttcctccccgtcatatggtttgtgcatccgctgtcgataatccagcttgaacccccggat

SEQ ID NO: 644 - DNA, 420 bp, Zea mays
gcaagcttggcgatattatcggaagtcatgacttaaacattttctaaatgttctgcctcagactgaatacgctgccttcactcagtaccatcgttttgactgtgtgcatagcaaaagacctgccattccatcatgggtcagagagagaactgccacataatgtgaaaacagagaggttcaatggaaataaaacctcgatattggcacgatcatgcattccaaatactgatctcatgagatgggaaagggggtgatttccaaaatcactactcacatatctgtagcgtggaaaggccatttagtctgctgttggataaatcttttcaatttaatgtacaaaagtaagtttgtgtacttaccctactttaatcggcagtgtttaccctctgcttttacaggaacaggaggtggatgcacaaa

SEQ ID NO: 645 - DNA, 440 bp, Zea mays
ctcgctaagccgggacagggccccatgaacgggtgattgtacgcgtaaacggcaaggccgaccgagctgagggattcccacgcctctgggatacggatacctcactcgtcccttccgcgagaagcaactctcgctcacacaaacatccctgttaccgagagagtccagatgctcgaagcaagaggaaaaaagacgcagcttcgcaagcgcggcgagggtgtgtttttctggcctcggcggccgcagaaggcacacgctacaagacaatctgatcctgcaggctcgggtcttcacgccgaagggagccatagcaccctcggcatcgacgacgtcttcagcaaagtccgacccagcctcggacggcgacgcggtccagggactcctccgggaatccggcccgagcaggcggctcggccggttacccctggggcctcggtcaa

SEQ ID NO: 646 - DNA, 418 bp, Zea mays
gctggacggccgccgacatatactgttattttcccgtttgaaatctgtcagagctgtcagaaaagcgaggtccggacagtccgccaaccttggtcggaccgtccgagacctggcaacttggagcaccagcgctttgaccaaaaggagttaacacatgtggacagtccgccctacaaggccggaaggtccgcgacctgggagtcagttttgtccgggcttatcctccggacagtccgtagtacaaatcccaaaaaccacacagtccctgcccaaaccaatttggcacttgcgaacagtccgccctacaaggccggacggtccgcacaataatacagggattgtgccgagagcaaccttctctggtcaagactgcggattgtccggccccaaggcccggacggtccgcggtacaaatgaa

SEQ ID NO: 647 - DNA, 444 bp, Zea mays
tgtgaagccaatcacaagtttattgaagaatgatgttaagttcatttggtcttcacagtgtgatgaagcctttaaacaattgaagacattactaaccactgctccggtattggctcaactggacatcaccaagccttttgatgtatattgtaatgcatctggcagtggactcggctgcgtgctaatgcaagagggccgagtaattgcgtatgcttcacggcagttacgccgacatgaggagcattacccaactcatgatctggagctagctgctgtggttcatgccctgaaaatttggcgtcactatctgctgggaaatgtctgtcatatctatacagatcataagagtttgaagtacatcttcacccagtcagaattgaatatgaggcagagacgatggcttgagcttattaaggactatgaactggaaatccattatcaccc

SEQ ID NO: 648 - DNA, 362 bp, Zea mays
  unsure (1)..(362): unsure at all n locations
ataaatctgctccctatgctctgggcttcgttggggatattaaccaaatctgttaaagataggctgaaagtcggtctattcacaatctttgcgtgtgtacagccagctttcagaaatgctgcagctgtaccgcgagaagctagcagggcacagaagtcaccatgccccgctattacttcatcaagcgcctcgactntgctttcaatgtgttcgaaggtgcttgatatgttttcgaccgaaggggtaaatttttcagcactagctccaactgagttgaaaactttnttcagttgctgtacgcagcggctgccaaaactcaaacacatgttctgaagttctttcaaagattgtcgcagcttcgt

SEQ ID NO: 649 - DNA, 440 bp, Zea mays
tcaccgaggtacgcagaggccatctcgagggtcggatggtgtgttaatggcttggttggccggtctacgtggccgtggctagcgcggccgctagcaccttgctcacggggcgaactccgccgaactcgagctctggttgggtcagtggcacgcgggggtgtacggtcgaggtcgggatggcttttataggcgcacgcgtggacgaaaggttggcgcggcgcggggctgcacgcgtgggcagagcgccgagggcgtgctctggcgcgccagaacgcgtcaaacacgtggtcgtttgtttctgcctctgttcaaacgcttgcagggatcacaaacgtgtgaatctcgccaagggtcttgcgcaaatctcttcctggcacctagggctagctattttgtgtgaagttcattgggagatatgccctaagtcacaagatatgggg

SEQ ID NO: 650 - DNA, 422 bp, Zea mays
gcttctaaaggggagaacacatttaggattaacaaatgttcattttgagaaagacagggattgtagcgcatgccaagccgggaagcaagttggcacccatcatccacacaagaacatcatgacgaccgacaggccgcttgagctactccacatggatctattcggcccgattgcttacataagcatcggcgggagtaagtactgtcttgtaatagaggatgattattctcgcttcacttgggtattctttttacaggaaaaatctcaaacccaagaaaccttaaagggattcttgagacgggctcaaaatgagttcggcttaaggatcaagaaaataagaagcgacaacgggacggagttcaagaaactctcaaatgaaggctttcttgaggaggagggcatcaagcatgagttctcttctc

SEQ ID NO: 651 - DNA, 399 bp, Zea mays
atgttagtcttagcaattaagcaagtgtcgagttcagctctattaaaatcaactaagtatagctgaccctctaacactcccttaaatactactgaatcatcacttcttctagagacagtaacacctatatctgtaaaaagacaattgtagcccattctacataattgagaaacagaaaacaagttgtaatctaaagaatctacaagaaaaacattggaaatagagtggtcaggagatatagcaattttaccaagtcctttgaccaagccttgatttccatccccgaatgtaatagctcgttgggggtcttggttttttttcataggaggagaacatccttttctccctagtcatgtggttggtgcacccgctatcaatgatccaacttgagcccccaga

SEQ ID NO: 652 - DNA, 416 bp, Zea mays
  unsure (1)..(416): unsure at all n locations
gctntatcaaatggacgtgattagtgtctttctcaatggaccaatcaaggaagaggtctatgttgagcaacctcccggctttgaagatagtgagtaccctaaccatgtttataaactctctaaggcgctttatgggctcaagcaagccccaagagcatggtatgaatgcctaagagatttccttatcactaatggattcaaagtcggaaaggccgatcctacactctttaccaaaacacttgaaaatgatttgtttgtatgccaaatttatgttgatgatattatatttgggtctactaacgaatctacatgtgaagagtttagtaggatcatgacacagaaattcgagatatcaatgttgggggagttgaagtacttcttaggatttcaagtgaagcaactccaagagggcacct

SEQ ID NO: 653 - DNA, 464 bp, Zea mays
  unsure (1)..(464): unsure at all n locations
actcagcttctaagggngaacacattntaggactaaccaatgtttattntgagaaagataggatatgtagtgcatgtcaagcagggaagcaggttggagttcatcatccacacaagaacatcatgacgactgaaaggccacttgagctactccatatggatctattcggcctgattgcttacataagcatcgacgggagtaagtattgtattgtaattgtggatgactatatatcctcgcttcattaggtgttctttttgcaggaaaaatcacaaacccaagaaagtttaaagaaattcttgagattggctcaaatgagtacggattgagaataaaaaagattagaagcgacaatggaacgaaattcaagaactctcaaattgaaggatttcttgaggaggagggcatcaagcataagttctcttctccctacacacctcaacaaaatgatgttatggagagag

SEQ ID NO: 654 - DNA, 409 bp, Zea mays
ctgcagcttcttcttattctgataataccatttcctttgatcacttcatcaaaacgaatgttccaactccgagatgcttgcttcaacccataaatggatttctgaagtttgcatatctttccagcattgatcggatcgacaaaaccctcgggctgtatcatatacacgtcctcatctaggtttccattaaggaaagctgttttgacatccatctgccaaatctcataatcgaaatatgcggtaatagctagaatgatccgaatagatttaagcatcgctactggcgagaatgtctcgtcatagtcaactccttgaacttgtcgaaaaccttttgcaacaagtcgagccttatagatgtgaacatttccatccatgtctttctttcttctatagatccacttgcattcta

SEQ ID NO: 655 - DNA, 453 bp, Zea mays
tggatggtggcgcagcaactccctggccgagacaacgttttcggtgttgcccttgacggagtctaggatgtctgcgcagttgtatgctgttgtgcagcgtgcacagtagcagtacccggcactaggcggttgggaacccgtggcgtggaagaagcagcttcctcctccaccaggaaatcctctgaagtctcggtgcggtgctcaacgatttgcaccatcatgctgagcaagaaaacaagcaaaaacctatcgcctagccccctacctggcgcgccaaatgtcgaagaggaaattcttcggccgggtggcggaatgcacccgccctaaatcctaagatgaggaggggcctaagtgttttgcttgtctgctaagcgatgaggcgaacacaagaacacacaacggtttagagtggttcgggcccgccgagcgtaataccctacttcactgtgtgat

SEQ ID NO: 656 - DNA, 416 bp, Zea mays
  unsure (1)..(416): unsure at all n locations
agcttatgaagggtcttcattctaacatgtgctagacggcgatgccaaagccaacccatattagtcttagctattaagcctacatctagatcggcattctctttcgaaaagtcaactaaatagagcttgtcgtcttatacacccttaaaagctaatgaaccatcactccttctaaagacagatacatcaatatttgtaaataaacaattgtagcccatgtgacacaattgacttacagacagtagattatacccgagcgactctactagaaatacacttgatattgagtgctcgtttgtgatggctatcttgtccagtcctttaaccttgccttggttcccatctccaaagatgagagtatcctgngaatccttgttcttgacgtatgaggtgaacatcttcttctcccccgtcat

SEQ ID NO: 657 - DNA, 451 bp, Zea mays
  unsure (1)..(451): unsure at all n locations
ctaagcttcatcagggagtccggcaccaaagctaaggagggatcctccttcccacgtcaagtcgcatcggagtggcgacaagaagaagaagatgaagaaagtggtctactacgagaccgacttttcgtcgctctccacatccggctccgacgcgacgtccatcacttctaagcgccatgagcacaagaagtatattaagatgccacttcgttatccctgtatttctaagcacgctcctctactctccgttccattaggcaaaccaccatattttgatggtgaggactattgtgtgtggagtgataaaataaggcatcacctaacctcactccacgcaagcatatgggacattgttgaatttggagcgcaggtacctaccgtgggggacgagggctacgactcggacgagggttgccaaatacgacactttaactnccaagcaactactata

SEQ ID NO: 658 - DNA, 119 bp, Zea mays
tgtgcaccggactgtccggtgcgccatcgaacaaacagccttccaacgaccactttttggtggttttatacctactatgtaacaatattatttcttcttattctaaatctcttttacct

SEQ ID NO: 659 - DNA, 440 bp, Zea mays
tctaaagggagaacacgtgataggttcgactaacgtactattcgtataagatagaccttgtgcagcttgtcaagcaggtaaacaagtgggaggagcacatcacaacaagaatgtgatgaccacatcaagacccctggagctgctacacatggacctcttcggacccgtcgcctatctgagcataggaggaagtaagtatggtctagttattgttgatgacttttcccgcttcacttgggtgttcttttttgcaggataagtctgaaacccaagggaccctcaagcgcttcctcaggagagctcaaaatgagtttgagctcaaggtgaagaagataaggagcgacaacgggtcggagttcaagaactttcaaatggaggagttccttgaggaggaagggatcaagcacgagttctccgcttcttacacaccatagcaaaat

SEQ ID NO: 660 - DNA, 426 bp, Zea mays
  unsure (1)..(426): unsure at all n locations
tctagcacctgggctgcagcttgcaagattcacataagtttgtgttcaaacactgaaaacataactctcatggaggtaggcggttcgactggtgctgcgttgggctaaacccttcatgagggttgttggatgccgctccagattggccctgcacagagaagagattgcatgtgttataccagacgcattaccaacatgtaactacaattttgatactcataggagtatggaacagagcagggtcaactacagggaataatggaggtggcagagcaaaccctgtgcggcgccaaggctctgcatgtactggaacatctctgccatcctctgatcagctgtcgcccgcttcgccatatccttgcctccatctcttgacgntccctcctctcttcttctagttgggtctgtaatattacaagccaacgt

SEQ ID NO: 661 - DNA, 424 bp, Zea mays
ttagtgactagtgagagagattcgcttgtgttctttcgtgctcttgcgcttggattgctttcttctttcttgattccttattgcgatcaaactcacttgtaattgaggcaagagacaccaatcttgtggtggtccttgtaggaactttgtgttccaagtgattgagaagagaaagctcactcggtcaagggactgtttgagagagggaaagggttgaaagagacccggtctttgtgaccacctcaacggtgagtaggtttgcaagaaccgaacctcggtaaaacaaatccacgtgtcacacctcttatttgcttgcgatttgttttgcaccctctctcgcggacttaattacatttctaacgctaacccggcttgtagttgtgattaattttgagaatttcagtttcaccctatttcacccccc

SEQ ID NO: 662 - DNA, 401 bp, Zea mays
  unsure (1)..(401): unsure at all n locations
agcttacccatacttaacttaatatnntatctaaagggctaaactgaatttagttggacaaactagaggactaaacatactaaggttcattaaatttgctacccaacaatttatagggtctaacttcgctacaacatatattaacactacttgtgtggcttttaaattttctcttttagctatttcaatgttctctaggcaaccaactctaaatacactaaaacttttactcagcactattttagacatagtaaacctacccataaatccgaacgctagagcggctgcctaccttcaccacgggcgccgacgtttgagcagaggggaaaacgcgagcaggcaggatggaggtcgcaacgcaaatgaggttggagagggtcgatgacgactgcggcttggat

SEQ ID NO: 663 - DNA, 448 bp, Zea mays
tctaaagggagaacatgtgttaggactaatcgatgtctgttttgagaaatacagaccttgtgcagcatgccaggtagggacacgggtgggaacaactcatcaaagcaagaacgtgatgacaacttcaataccactggaactcctacatatggatctctttggacccgttgcttatcttagcatcgggggaagtaagtatggtcttgttattattgatgacttttcccgcttaacttcggtgttctttttgcaggaaaaatcagaaaccctaggtactttaaagtgcttcttaaggagagctcaaaatgagttcaagctcaaagtaaagaagataaggagcgacaatggatctgagttcaagaaccttcaagtggaagaatatcttgagaaggaaggcatcaagcatgaattctccgctccctatacaccacaacaaaattgtgtagta

SEQ ID NO: 664 - DNA, 400 bp, Zea mays
  unsure (1)..(400): unsure at all n locations
gcaagcttggatctcttgctttgcaactnttgtcaacatggccagaaataacttgggaatcagttttgagaaccgcccttcttatccccattgccttcaactttcgaagacccaaaagcaaagcttcgtattcagcaatattatttgtacaactaaaatcaagtttcactacgtagcatgttctgactttggaaggtgcaattaaaacggcagctgcacctgcctcgaaggttccccaggaaccatcgcagaatactgtccaagctttggcatctttacttacttcttcctcctgagcccctggcgtccagtcagcgatgaaatctgctagcgcctgggactgaatcgaagatctatgcacataatcaatgcagaactcattgagttccgcagcccactt

SEQ ID NO: 665 - DNA, 339 bp, Zea mays
aacaggtgggaggagcacatcacagcaagaatgtgatgaccacatcaaggcccctggagctgctacatatggaccttttcggacccgtcgcctatctaagcataggaggaagtaagtatggtttagttattgttgatgacttttcccgcttcacttgggtgttctttttgcaggataagtctaaaacccaagggaccctcaagcgcttcctcaggagagctcaaaatgagtttgagctcaaggtgaagaagataaggagcgacaacgggtccgagttcaagaaccttcaagtggaggagttccttgaggaggaagggatcaagcacgagttctccgctc

SEQ ID NO: 666 - DNA, 452 bp, Zea mays
  unsure (1)..(452): unsure at all n locations
tgtgttcaatagccagngccttatcaagtagcctctgaaatgatggaaatgtgtgtgccactagagcatactgcagtggtccattaagtccttcaataaaatgctcctacttcctctcatcttcagcaacttcatcaggggcatatctggataactggataaacttgtcgcggtctcgctgaccgacataccttcttgcttcagcgacagaaattcctttttcttaatcttcattaatccagcaggtatatgataattccggaactgtgtactgaactctgcccaagtaatagtatcagcagcatcgtgggcagcagtatatgaatcccaccagtcagcagcaggacctgtcagacgtccagaagcatataaaaccttctcccggtcagtgcattgtgcaatattcaacatcttctcaacggacttcagccaatcatccgcgtccagtgggt

SEQ ID NO: 667 - DNA, 341 bp, Zea mays
  unsure (1)..(341): unsure at all n locations
acaaacctcgctccaagagggtttgctagaggtgtggtaagtctggtcattatattgcaaaatgttcatatacaaatgacagtgatagggatgacaacaagaaagggaagaagaagatggagaagaaaaggcactataacaagaacgggaatggtactataacacataggacgggaatggtactccgacaagagctccaccgactcctcctccaacgaggacgccgccaacatcaccgtcaagaaaggccttctcttccctaacattggccacaaatgtctcatggccaaggagggcaaaaaaaagaaaggacattctagagatacccgcanatacactac

SEQ ID NO: 668 - DNA, 455 bp, Zea mays
tctaaagggagaacatgtgttaggactaatcgatgtctgttttttatatatacagaccttgtgcagcatgccaagcagggaagcaagtgggaactaatcatccaggcaaaaatgtgatgacaacatcaagaccactggaattcctccacatggatatcttcaggtttgttgcttatcttaccatcgagggaagtaagtatggtcttgttattgttgatgatttttcccgcttcacttgggtattctttttgcaggatacaacagaaacccaaggtactctaaagtgcttcctaaggagagctcaaaatgagtttgagctcaaggtgaagaagatcagaagcgacaatggatctgagtttaagaatcttcaagttgatgagtttcttgaggaagaaggcatcaaccatgagttctccgctccctacacaccacagcaaaatggtgtagtagagaga

SEQ ID NO: 669 - DNA, 343 bp, Zea mays
cggtagctgattacaagaaactttgcggttttccggtaggcaaaattgtagcaaccgaagttttcatgaaacccatcttttctggcctttgtttgataatgcaattcatgaactcgaagaaactgcagcaaaagctccactgcttggcttcggagggcccaaatataaacgctaagcctaacgataacgttaggagttaactggtgaaggtagatgccaaacctcttcaatatctccgcaacaatctcgtgaacagggaatcttagcccagcctttaaaaagcttttgaagatgacaacctcgtccttctctggcttcggggtggtctcttctcccccgaagc

SEQ ID NO: 670 - DNA, 274 bp, Zea mays
tcgatcattgcattctactaccaaagatgtgcccatctcagattgtatatggtttgttacctcgtgctcctattgatctaatgcctttgccatcttctgaaaaactaaattttgatgctactaggcgtgctgaattgatgttaaaactgcacgaaactactaaagaaaacatatagcgtatgaatgctacatataagtttgctactgataaaggtacaaaggaaataaattttgaacctggagatttagtctggtcgatttgagaaaggaaagg

SEQ ID NO: 671 - DNA, 417 bp, Zea mays
  unsure (1)..(417): unsure at all n locations
agcttcgtcatctgaaagaaagntaccctgtatgaattagatgatctcagntctccagtcttcactatagacaggagatatgttaaggactgctctttcaagaagttcgaccgaaggtgcttttattgtttcaaagaatacttccgaaggtaagggcagcccctgtgctgctgacttggctaataaatcatcatgttcattttctcctcgaggaatatttttaacagaaaacccttcaaaggaagcctcaatccttcagaccgtgtctaaatatttttcaagcttcggatctcttgctttataacttttgtcaatatgaccagaaataacctgggaatcagttttaagaaccgcccttctaattctcattgccttcaatttccgaagacccaaaagcaaagcttcgtactcagcaat

SEQ ID NO: 672 - DNA, 345 bp, Zea mays
  unsure (1)..(345): unsure at all n locations
cactacccttcttcaagctattacagaaagccgtcccattctcttggaccgaggaggcagaacgagcctttcaagaattgaagcagcaccttgtgtccctaccaatactggtagctccaaaaccaagggagccgttgtacttatacattgcagcggctacagaggtggtgagcatggtgctggtcataaaaaggacggcacaacatccctaggggagtcaaaaagttcccctaggagaaggtggtggtctgaccaccatgatggtgatagaaggtcaagagttngagggcttcggaacaacctgaagggttcgaaccatccagaagctattctactacgtcagcg

SEQ ID NO: 673 - DNA, 431 bp, Zea mays
actaagcttgtctactgcccgctagcgtaaaactgatgtaagtttttattcttctgagtctcggtctcaaatttttccagggggtgccttaagtggtataccacatttttggtatagaacccaagtggttttggcgccatcttcaaggtgaacacggctggtctttgaatttgggctaaaatgtgacttagagggaaatagagagctctagctctctctccacttggagatttgaaatggggtttctccaggggcctttttgcaatatttcccccccttaattgatggttaaaatgttgcttacggtttgggtaaaagttacacatgctttgcccacttgctcactctcctctccccccttacttagggttttggaaggtacggctctggagaggtctacggctcttctcccctattatcacagagtaagt

SEQ ID NO: 674 - DNA, 361 bp, Zea mays
  unsure (1)..(361): unsure at all n locations
aactagagtatctgaacgactttagctatttgaggccgttcagcagagatgaagaggttagctgctactgtgctatgtacatgtacaataaggaggcgatgcgcatctgaagtggtacgcactgaaacgctgcacggtgtatgcatcaaaatctgagtgtacattggatgattgttcctgacgccaccacaaaggaggccatctggctgaaaggggtctgggacggacggagagttctggaacaaattcagagtgtttatatacggcaatcttcactatacgcagaagccaagcaattgagaggtcgacccctganatgtcgaggatacgcttcgtgtgttgcgatagtaatgggcagatg

SEQ ID NO: 675 - DNA, 431 bp, Zea mays
  unsure (1)..(431): unsure at all n locations
tctagagggagaacacgtgataggtgtaactaatgtgcttttcttaaaagatagaccttgngcagctggtcaagcaggcaaacaggtgggaagctctcatcacaccaaaaatgtgatgaccacatcaagaccttcggagatgctttacatggacctcttcggacccgtcgcctatctaagtataggaggacagaagcatggtcttgttatagttgatgaattttcctgcttcacttgggtattctttttgcaggataaatctgaaacccaagggaccctcaagcgcttcctaaggagagctcataacgagtttgagctcaaggtgaaaaagataaggagcgacaatgggcccgagttcaagaaccttcaagtggaggagtaccttgaggaggaagggatcaagcacgagttctccgttccctacacaccac

SEQ ID NO: 676 - DNA, 378 bp, Zea mays
  unsure (1)..(378): unsure at all n locations
tttagcttcttntaaacacccacttacaacccacaggtttgcatccatatggtcgatcagtgacttcccacgtaccatttgaaagaatagagtccatctcattatgaactgcttctttccaatcatctgcatctggagatgcaaatgcttctgcaatggtagtaggagtatcgtccacaaggtacacaatgaaaccatcaccaaaggatttttcaaccctttgtctcttgctccttttaggagcatcattgtcatcctcctctaggacaatttcatgtgtctgttcaaaactctcaataggtgtattatgttcaggaattatctcagaagagtatctagaattgctatgaatgtctctcattggaaatatatgctcaa

SEQ ID NO: 677 - DNA, 448 bp, Zea mays
tcgcacctctgaactaactcggctacatcactcttcgttttggtctatagaatcctgacctgaagaccttcccgactagtgttctggatgctgcatgtattccacattgcccagcatggacctcctccagaagtcgcttcccagtagatgggggaatgcacttcatgaggacgcctgatgcaccccttctgtacagtgtctccccaatgagtgtgtagtgagccgactgtctggcaatgcgctcggctgaattcttgtcatctggttcctcttcattctttatatacctgatgattggccttctccagtcatcagagtttgactcgggttgatctataatattacactcttctgcttgatccattgagatgctcggctgtagtatttcttgcacaaagactccacgtgggacctgagttcgactggatcctagcttggacaacacatc

SEQ ID NO: 678 - DNA, 350 bp, Zea mays
tattaacgcaagctatcaatcttcaatgatctatatatccaagattgacccaaagttattttgaattgctatgtctaaaactcatatcatctcgagggaagatattgatgttgtaggaaataaagaattatcctgtgcggaaaaatcaaggcctacaacatggaggaaagccaaaggatggtaacatttatgcttttaagtgcaagtatcttaaattaccatttcttatgtgtcttatgtagcaacatagaaaaaggaagcacttcaaatgtttgtaaattatgtcaccattctttgaagaaattcctctcatatggtagattgcatattcatcatttctatactatggc

SEQ ID NO: 679 - DNA, 364 bp, Zea mays
  unsure (1)..(364): unsure at all n locations
aagctanagtccgtgagcacatgaccatcgtcctcagttttcccttctctttctcatcggccttgatataaaaccattcacctttccagccggttggccatttggtgtggcagctaagaactggacccttcgcatccttgcgatatgcaaaattgtaccaaccaaaattttcatgcaaccatctgcctggccttgttcggaatgcaactatacactcgacagaactgcttcgcatctgggctcatcccttggcttctgagggcccagatgaagacactaagcctaacaatgccgttaacgtcagctgatgaacatatattctgaaatnttaagacttcctctactatctcattcagaggaactc

SEQ ID NO: 680 - DNA, 357 bp, Zea mays
ttcctctgcacctgttgatgtaccatactccatgtccctgatctcttggtctagttcatcctcctgaatcgtcaggctgacagccttcctcttctgggttcaggcctcccggagagagacggtctcctggttggggtccagcggttgcagtgctgcagccccagacgctgaagctttcttccgtgccatagcgagggtctatagcttccgaaggtgttcaaaaaactcgaagtggaagtgagttcaccggaggtgggcgccaatgttggggacttgttctcaaatgctaagagttaagaacaaggcaacataaaaagtgttaagtgttaacgtcctttcgccttcgaagcattatgt

SEQ ID NO: 681 - DNA, 287 bp, Zea mays
cgagttcatctctatcacaatctactaagtatagctgaccctctaacactcccttaaatgctattgaatcatcacttcttgtaaagacagtaacacatgtatcccgtaacaagacagctgtaacccattttacataattgcgaaactgaaagcacgttgtaatctacagaatctacaagataaacattcgaaacggaatggtcaggtgatatagctattttacccaaaccctttgaccaaaccttgattcccatctccgaatgtgatacctctttggtgatcttggt

SEQ ID NO: 682 - DNA, 406 bp, Zea mays
  unsure (1)..(406): unsure at all n locations
agcttgactcaggtatccacacattaatctttaattcatttttcccgtctcatggacaaggcatcctccctagatccaagtccatagaccaacataaatcccgttatcaagatgaatacaatcaatttctgacctcgcgcgagtgctaggaaaatcactcgacttctaccgagatcctgattagcaagcagctactcgacctaacatactagtattcatctcaaaaaggaatcctaagttcatgcaactagaggtttcaagcaactcctacacttaagtgcacattgcaatcctacaagcattaagtgtagtaaaatagcataattaacaggttatgcataaaaccggngcttgccttcaattgctggggctgcggagagatcctcgatagcaggctctgaagcct

SEQ ID NO: 683 - DNA, 440 bp, Zea mays
tagccaaaataatcaaaataaaaccccagatcaatcttcttttgttgtgactcattgggaattctgaattctagaattctgaaattcagaccttgagccaaagatcagggatgttcaccttgatccctaactcgaatcctaatggccccattgacaaaattgtgtctaactaacccctctgctgtgtgtcagaagatggcattgggacgcgagccctatacacgacaaaaccctggatttgcctcgggtttgggcagggagacagaccagatttactggctccatatctctgcaaccagtaggcaaaatcctatggcacccacacaagaatggtagcttgtatggaggagaagaggtttcgtgcactgaccaacgcgagagcacgctcggatgagcgaccacacgcgccagagcttgggcagaacgcacgggcacacgtg

SEQ ID NO: 684 - DNA, 407 bp, Zea mays
agcttaactcggatcaaacttacaagttttatttttaagatttagcacttgaattcttactttttatgcaattggtggttcttgaaatatgcatgaggtactgcacttagggggagtattcaaaactcaaatcactcatgaaaacccctagtgcaaggcaaaaatgcaaatttcaccatttgcctattttctctaaaaattatctagcctatggcaaaatattttgaaaaatatgagaaaatatatgagggtgccaatacatgtcccaacaagtgttattttgtgtgattataagttgggatttggtttggttggaaattagatagaaaaattcaaaaatttcaaatcttccctctatctgggctcaccggacagtccggtgtgcaccggacactgcactgtgcact

SEQ ID NO: 685 - DNA, 413 bp, Zea mays
  unsure (1)..(413): unsure at all n locations
ntacgaagaggaaccttccgctatcttatacttatagctttatccgacgatcgcttctctctaccagaccttcggcgacgaagcatggacccaacacttgaggaggaggggatcaagcacgagttctccgctccctacacacctcagcaaaatggtgtggtagagaggaagaacaggacgctcatagatatggcgaggactatgcttggagaattcaatacccccgagcgtttttggtcggaagccgtgaacacggcttgccacgccatcaacagggtctaccttcaccgcctcctcaagaagacttcatatgagctgctgactggtaacaaacccaatgtatcttattttcgtgtatttgggagcaagtgttatattcttgtgaagaaaggtagaacctctaaatttgctcc

SEQ ID NO: 686 - DNA, 370 bp, Zea mays
ctttttagactctaattcattttgtttcattaattattcgctacgttagttaataaaattaatgcttatgtttataatgatataatggatatatttctcatgaaaagattgttctaacacaaggtttggaacaaattcttttagtcttgtcgtagtagtctctcctttaaaccatttctggatccgccactgtaaacacaccacaattgaatatgaaacctgccttagaaccactcatgcatgcatcggtaaaataatatcagtaatgcatattgaaagtcgcctaaaggggggtgaatagggtgaatctgaaatttacaaacttaatcacaactacaagccgggttagcgttagaaatataatcgagtc

SEQ ID NO: 687 - DNA, 401 bp, Zea mays
catttttacctagccagaactaaacattaagcagaggagatggcttgagctgattaaggattatgaattaaaaaattcattaccacctaggcaaagccaacgtggtggcatatacacaaagtcgcaaggcttcctgccattgtctcacagtaaaaacttctgacatcacattatgctaaaaaatggagaaattgaacctatgaatgattcaacatggaaccttaaactaattgaagcttgcgtcagttcttttgcaaaggattattgatgcacaaagaagtgataagggcatgagacatattcatgagaaaataaaggccggtaaagcaaactgtttcaaaaaggatgatcaaggcattgtatggtttaataaccgcatagttgtgcccaaaaatgatgaa

SEQ ID NO: 688 - DNA, 456 bp, Zea mays
ctcaagctgagctagccttgcgcttgacaaggacgatcttgcttatagccttgcatataatagtctgaaggtatgaaaattgtatatttggaaatttataatttttgaattattcttttattcttatactaattcttttcatatagggtttaatacttagcaacgctttgagagcgcaaaagaatgttgaagacgagagctataatattgcttttaacaacctacaaacagaggttattaagctaagaaacgaagctttggaaaaagataaaattctgcttacattggtggataagataaaggaagacgaagctgcttctaaagctcaagctgaggctcagaagcgcgaaattgaagatcttcggaaacagctagccagagctaaagaagagcgcatacttgaagagacgaaacgagaactcagcgaccagtgggcaaatcatttagaaggaaacg

SEQ ID NO: 689 - DNA, 376 bp, Zea mays
  unsure (1)..(376): unsure at all n locations
aatggggacagtgtccttgatgcggtcaataataaccaagtgtnggtagttgtcgtgagtaatttattcgtagtgggtagttgggttacgagttatgtaaggattatgttggaaactaaaatgcggcgcgtaactgtgttcgagttgtgaataatagtgtcggggaccataattaggggtaccctcaagacgcctaattctcagctggtaacccccatcagcataaagctgcagaggcctgatgggtgcgattaagtcagggatcagtccgtacgagcgactcgatcacgcctcgcccgagcctagcctcgggcaacggcagccgaccccgaggggtttccgtctcgcccgaggcccccctttaacggcgaacacg

SEQ ID NO: 690 - DNA, 447 bp, Zea mays
  unsure (1)..(447): unsure at all n locations
gagccagagcactaagacctgaagtcagactagttcctccaataccaatcctactagactggctgagcacaacagggaaacgttccagccaagacaatgcactntgcagtttctgaaccaacagtgccatgggagtttcatctcgtccatgatcaatagaaagggcaacagatatgaaggttttgtatcgtctaacggcctgctgacgaagctgagataggtttccttcagataccttttccttcccaaatgtcccacaggacaaatagtcaagcaatgctatgacaacaccacttctaatgaattcaaatgtggaaacaccattaactctgctaagctcagagagcatttcagatattattttgtctaattgttcttcaacatcaattgagatgtcaaaaaattagtgcttatagcttttgatttcccttctgcttttgttttgac

SEQ ID NO: 691 - DNA, 414 bp, Zea mays
  unsure (1)..(414): unsure at all n locations
catctttatttatctcttctttctgagtctctagcgnccaggcagcgatgaaatctgctaacgtctgggactgaatngaagatctatgcacataatcaatggtgaattcattaagctctgcagcccattttccaattcttccagtagcctctctgttcctcatgaggtcctttagaggttgtgacgaacgaacaattatgtggtatgcttgaaaataatgctgaagctttctggaggccattaacacaacatataataccttttccaactctgtgtaattnttctttgatggacttagaacttcagagacgaagtatattggagcttgctttttagtctgaccatctagcttctcctgtacgagtgccgcacttactgcagaatgcgaagctgccacatataagagcaatggag

SEQ ID NO: 692 - DNA, 406 bp, Zea mays
  unsure (1)..(406): unsure at all n locations
gcagcttagcactaacctgggaaatttgttttctttttcgccatgaactattattgagaactgagatattctttatttcacagaaaatagaatttaaacggaaaaaattgttatcaaggtaggatatttgtcaataaatgtgctttgactctggcacagtactggtgactgtgcgagcttcagattgctctctgagatccctttggtgcgaaacatattggctcccttctggctcgtgaacttgttgcaccggaggtggaggcgaaggccgttgccatgaggcttgaggttgactagccgaaactacagatactgcangatggttgcccacatatttccggatgtaaggctgatggtatgaaacaatatgcatgacctgcttcggctgctcctgttgcgctgcaac

SEQ ID NO: 693 - DNA, 363 bp, Zea mays
tacatgctgaattgactaaaaaagttgaagtcctgactttagacaaccaaaaattgaagaattacttgactgatgcaactactagaggaaaagttgctattgagaacaatgatttcaacaatgagttggcagtggataatcaaaggcttaagaatgaggtcaagaaactaaaaagtgaaaatgaacatcttgcaacaagtgtgcaaaagttcaacaagggtcaatacctccaaaatgagctgcttatgaacactgttatgaaaaataacaagagtggtattggatacaatgcttttgtgcaaaataaagctatcactcaatacaagccaaagcagactcacaagcctatcaaatgctttgagt

SEQ ID NO: 694 - DNA, 422 bp, Zea mays
aaaggatactattcaactaaagtaagatgaagttgatattagtttcttgtatgaaaacttcctctccttcagttggtttagtattctatccttagtgggatgctccatagtatacgttaatttccttgcaatataaattgttcaatagtgcatataactttgacatcaactatatgtgtgcaccaatttaaaggaatctaatctatctttctgggtttcaagaatgatgattcattttccatccacatataaggattatcatttgtgaaaccctcccttgtgtttctaatgctctcttttctaagtgtttaaataagggccttccaagtgctttcaagatggattcaaaatccacggatataagagtcttgggtgttctaatcattgagtttcaatgggtctcatatcacagttgattgaac

SEQ ID NO: 695 - DNA, 364 bp, Zea mays
aagctgccgaagaatgccacagagccttcagagttatttgttcttttattggaacgagagatttagtccaagagcatattgccttcagagtatggccgcttgcggaaaaatgggaaatgccgcaagagaccataaaagaggctgacgaaggtggccttatcatgctaaagtatactttcaagtttggagataaattcgtcgagccagatgatgactggctaaaaagcattgaaaatttgagtgatgagctacttggggtttactcgaaggctgaagatactgcattgtcagcagccttcggaggccgaaaaaagaaaagactgaaccgagtttttgacgccatcgggtttgtctatcccgacta

SEQ ID NO: 696 - DNA, 356 bp, Zea mays
acggagggatcacaaaccctgctccaacagggtccgctatcggcgccggaagtctggccactatatcgctaaacgcccatacgaaagtgatagcgacagggacgacgacaccaaacggaacaacaacaccgacaacaacgaccacaacaccaccacaggtggagacgcgacacgaaaggagtgggaccccgacgagagctccaccaactcctcctctgacgaggacgccgccaacatcgccatcaacaagggtcttctctcccacaacgcccgccacaagtgtctcatggccaacgagagcaaaaagaacaaggcatactctagagacaccccaaatataccactacccacgatga

SEQ ID NO: 697 - DNA, 448 bp, Zea mays
tgtagctaaattacacattaacatattcttggtctctctttctctaagagccatatgtcttgaccactagactactagtgatgataatttgtgatagaaatatgaagatattgtacagacctgttgtatcctctctactcctgatgatttcttcgtatgagagcagtaatatctattgttgaagatggtcctaggcgaataccagtactgtttcgttcttgccaagcagttatcatcatttgcttcatcacaagctagttatatggcgattttctccagataaaatgaattcttggccttgtctgttctattccaaagcttctctttttgccgaacaatgaagagatcgaaataatgctttatacaacaacgtggtatataatatgaggagaaatatttgccctgctggcaacaccatacatatttgactattggtataagttctctc

SEQ ID NO: 698 - DNA, 412 bp, Zea mays
  unsure (1)..(412): unsure at all n locations
gcttagcaaaagaaattnctttaatcaatattattgagctcatgcctaagtctggtaaaagattgttcatcaagtggcttggtaaagatatcggctaattgatctttagtattaatgtaagaaatctcgatatcccccttttgttggtgatccctaagaaaatgataccgaatggctatgtgcttagtgcggctatgctcgacgggattgtcggccattttaattgcactctcattatcacatagcaaagggactttggttaatttgtaaccatagtcccgcagggtttgcctcatccaaagcaattgcgcgcaacaatgtcctgcggcaatgtactcagcttcggcggtggaaagagcgaccgaattttgcttctttgaagcccaagacaccaaggatcttcccaagaact

SEQ ID NO: 699 - DNA, 435 bp, Zea mays
ctagtagccttgccatgcctagcgtccatctaattttattctattatcacactgcaatgcaagctgtagttagttacgtacactactgtatcttttcctgctactcctgatgatacttaactcccatcttcattgttctcttgtcaacatcaacaaaatggctaggttaagatgtactactatatatagatctcggcgcaacggtattcacaactgatgtagggtattaatgtaggtaggcttctgtattctttatttatttattttttgaacaaagcccataagattatttagtaaccttcatagattttattgcgcatctagatataacatattttgtatgtataacaaaacctattcacctagaaaagacagaacatataataatttggtcgagacaaacaccacattattcaagcatgtaaatgaaagata

SEQ ID NO: 700 - DNA, 417 bp, Zea mays
  unsure (1)..(417): unsure at all n locations
agctngacaacgaggaagaggtgctcatttcaagagctttcgccaaancctcaagcaaaggaaggggagagactacaaaccccgttccaagaaggtgtgctacaagtgtggtaagcccggtcattttatagcaaaatgtcctatttctattgacagtgacaggggcgacgacaagaagggaaggaggaaggaaaagaagaagtactacaagaagaagggcggcggtgcccacatgtgtcgggaatgggactccgacatgagcttcaccgactccgacaaagcgacggaggagaagaaagaagagtctacatcaagtaggctccccatcgatgccttcaagcttaacaacgaggaaatggcgctcatcattaagagctttcgccaaatcctcaagcaaaggaatgggagagactacaa

SEQ ID NO: 701 - DNA, 381 bp, Zea mays
  unsure (1)..(381): unsure at all n locations
tacncataacaaggcatgtggccagttaaaaggttctcttttattattcctacatcggctcgatctttaaacgactcacacggagacactacactgagactctcttctcgtgaaagtcacctgatcggtctcatcttataatttataacacaaaaacttggtacctgtcagacatcctcttttcagatgttgaatccatcacgatccgggtggattcatcatcttatgttttatctttgtgaacattcccattccagcgtgaagcatcgcccttttaaaacaaaatcgttgttttctaggcaaagctaagcatcattaaaacttgcttgatgaaatcagacaacaaggaaagatattcaatttttcaaggaaggaaatgca

SEQ ID NO: 702 - DNA, 394 bp, Zea mays
agcttggaatgcggcatgcaatcgatcgagtgaagatggaaggcttgccagccgaagagagcggatcggaatgtggcaacacagcaggaaagccgagggttccacggcaagctttctggatggacaggccacagagctccagatttccaacgaacctggcatcacgtgaacaatcataactaggaacactcgcaggtaaacgaggggcaaagggggcttacgagctgcttttgaaggttccgaggacaccagcatttgggatctctccggagaagaagttagtagacaggttcctgaaagatgcatgcatggtaagtgggtgccccccctctcatcagttgcaattcaacattgtgtgtttccaacatgaaaatggcacatacgaaaacttaca

SEQ ID NO: 703 - DNA, 433 bp, Zea mays
  unsure (1)..(433): unsure at all n locations
tcggctcggtcgaggggtagctctcctcggnggagatattgcatgtatagggtctgccagcttcgattaggcgtgaccccgctccgctcctcctcgacatgtagtgcctcacccttggggccgagggtgcctcgggctgagccgagggtgcctcgggctgaacaaagggtgcctcgggctgagccgagggtgcctcgggcgtatcgtcggtcttgacggagggttgatgcaggtatcgggagaagacgtccgggggaaccgttgtccaccccgaggctatcttagccagctcgtccgcagtctcgttgtatcgtcgggcgatgtggttgagctcgagcccgtagaacttgtccttcaggcgccgaacctcatcgcagtaggcttccatcttcgggtcacaacagtgggagttctttatgacttggtcaatgac

SEQ ID NO: 704 - DNA, 407 bp, Zea mays
  unsure (1)..(407): unsure at all n locations
agcttggacccctgngtggtagcccaaatgttcgagctctctggtgacgttcttgctgttgcgctcggaggacctggaatttcctcttgatgtgccctttttcttcctcttttgctctctccacttgaatagctttgttggagaggtgagagaagctgtggaagtcttggctggcaaggatggtcttaagctcgggtcttagtcctctcaggtaacgagccatctttctggactcggtgctaacatcctcaggcgcgtagcgggccagttctgtgaacttgtgcacatactcactgactgttctcccgccttgagttagctcccggaactcatcctccttgagttgaactatcccctgcggtacgtggtgctcacggaaggttgcttcaaaatctgcccaggtagca

SEQ ID NO: 705 - DNA, 444 bp, Zea mays
  unsure (1)..(444): unsure at all n locations
tctttctgccgttgatcaatcatcaaacactgtcagagttatacttatacataacacagttacacacgttaaaactcgagacaccaggaacctacagcaggccaacgaatctgaaataatttgttccacatgggaacattattattctttcgtcactgtcaatattcatcacatgtataatgtaacgtgctgataatggtacaaagtataaacaccaccaatctgccttattgcaagcaaattccgggagcagcaatntgacacaacaaataaaatacaacagattcccactgtagaatacactcactctatgcatgcttctgcaactcctcgccgaacacggcagagtgatggcccttcacgcactgcaggaccagcctgatgccctgcttccgcttgggccgctttaggtacacaacggacgggacgatgttcacgtcgtcg

SEQ ID NO: 706 - DNA, 411 bp, Zea mays
agcttgtgaagattcttcattccaacatgtgctagtcggcgatgccagagccagcccatgttagtcttagcaattaagcaagtgtcgagttcagctctatcaaaatctaccaagtatagctgaccctctaacactcccttaaatgctactgaatcatcacttcttctaaagacagtaacacctatatccgtaaaaagacagttgtagcccattttgcataattgagaaacggaaagcaaattgtaatctaaagagtctacaagaaaaacatttgaaatggaatggtcaagagatatagcaattttacccaatcctttgaccaaaccttggtttccatccccgaatgtgatcgctctttggggatcttggtttttctcataggaggagaacattttcttctcccctgtcatg

SEQ ID NO: 707 - DNA, 438 bp, Zea mays
tgtaaggcgacaaggagtgaaaagaaatcaatgtatattgtgtaactcacagctctcaaactgggtcgaaagaaaggggaggcttctaaaggataagttcaaggtaagcatttaagtagaagacataaatatcgcacggggcgaaggcgataacagacaagggtatgagagaaaggatgaaggcatagaagagccagtggcatgattacaatgaagaatggagttatgtcaaggcttacatggcgtaaagaagaggatattgccaagggtaggataagacaccgccctcaaactgggatatgatattggagattttagagaacggacatagtgtaattaccaaggtaaggtcgagagatgagaaaagtaaagataataccccaccagagtacaaggatggagttgaaagctcgcacgcgacaaggaagaggatacaac

SEQ ID NO: 708 - DNA, 408 bp, Zea mays
tgatgaagtgatgaagctgctgctaaaagctctagagaaacttttgaattaactttgtaaaagatattgtaatttagaaatcaaacactgctatgtaaatttatccataccttgtaatatatttttacctttccatccatgtatgaactgctttgatgtggatgaaacttgtattttttgagacgaaggcgaaaaacaccttcccttcttttcgtacacaacgaagcataactttgcttttttgtatactcatcgaagccctgtcattagagccgaagcatctgtttgtattctatgttatgatgatgatgatcctacgaatgtctaaatgaatgtgtatgaatgcaaatgaatgatgtgatgtaatcgtgcaaatgaatgtccagacacgcccttacgaagccacac

SEQ ID NO: 709 - DNA, 441 bp, Zea mays
ctgcctcggtcggaccaataccagaaaggctaccatgcaatgtgagtggagagatggcgagagtagcgtgtaccgtccgtggcaagaggctggacggtggactatctgtgctctcggttggtgtgaacccattctggtctttagaaacccgggtgcgagttgacatatgcaaggattaagtgctacatatgtcgtgtggttggagatcctcagctgggtattaatcgattcatatcgtcgttacttctcggacatgaagacttggtcaccgccctataccgtagtgacaagtgaactcaggatgtgataaaagatgactagtgtaggccaggtgcttgacctacattaggaaagaaatctagatttacgtaactatttaacctgacaagtaaaatgaattcataaggaccaacattagtaagctttgagcaaaatgtgtca

SEQ ID NO: 710 - DNA, 420 bp, Zea mays
  unsure (1)..(420): unsure at all n locations
agctntgatacacggattaaacatcgccatatcctggtcgtcaagagattgatggtatatggagattctctggtagtcatcagccaaataaacaaggaatgggattgttcaagtgattcaatgggaaaatactgtgccgccgtccgaaagctggaagataaattcgagggtctggagtttcatcatatanaaagagatcggaacacggcggccgatgtactgtccaagctcggatccggccggactcaggtcccgcccggggtctttgtgcaagaaattctccagccgagtatctcgatggatcgaacagaagagtgcaacgtcatagatcaacccgagtcagactctgatgactggagacggccgattattaagtatataaagaatgaagaagaaccagatgacaagaactcgacagag

SEQ ID NO: 711 - DNA, 451 bp, Zea mays
  unsure (1)..(451): unsure at all n locations
ctatcaaatggacgtgaagagtgcccttctcaatggacctatctttgattacgcctatgctgagcaacctnccggctttgaagacagtgagtaccctaaccatgtctataggctctctaaggcgctttatgggctcaagcagccnccagagcatggtatgaatgcctaagagattttcttattgctaatggcttcaaagttggcaagcgccgatcctacactctttactaaaactcttgaaaatgacttgttcgtatgccaaatttatgttgatgatattatatttgggtctactaacaagtctacatgtgaagagtttagtacgatcatgacacagaaattcgagatgttacatgatgggggagttgaagtattctctaggattccaagtcaagccactccaagagggcacctttattagccaaacgaagtacactcaagacattcttgc

SEQ ID NO: 712 - DNA, 434 bp, Zea mays
  unsure (1)..(434): unsure at all n locations
agagtcacctgaggcatgcaagctttgctttcaccgaggtaaattattgaaaacgtctaatgcccgcccataatagacagagggagcccacaaccacctatggcaaaacacatgcgtaaataaatcgtaagcctgcctctagctgccttggcatttgtgcgtcctggcaagccccacctacaccctcttgcctaaggcagccttgtcatgcacgccaaactgctatattaaagggaccgggttgcagaccttgaagtgatacctcagtgcagaaagtcactccgacaagacctcgtgcacccgcctgaacacacgccagtcacttgtcgcaatcataattaaatgaatgccccaccatgagccaagttaccctgccaacctcgggatgttgcgactgcactgtggcaacatcgncaatcacagtacgccggtcg

SEQ ID NO: 713 - DNA, 424 bp, Zea mays
  unsure (1)..(424): unsure at all n locations
ttaacccctgcgagacctttccncgnttctttctaaccttatctattgcgatatcgaatggcatactttatgcatatttactttatttgtccccttgtgtggtgtactgcttgtttcctaatttgaatggatggatgtatgtatgcttgcaatcgcatagagaacgatccggtcgaagagcctgaggaactcgcaggagaagcccctgagcagcagtcagttggtggaggcaagtgtcctttgacctatctctgtnctattcattatttaattcacctcccgctttacacatttatacttaaggattgactagcttttgttatccatgtccttgattacctacttgggttggattattattgtttagctttatgctattgctcaaactctaatcaatgaacatgatgagattatctatgatacg

SEQ ID NO: 714 - DNA, 416 bp, Zea mays
  unsure (1)..(416): unsure at all n locations
gcttgattggncctttcttatcttatgtattctgatatattcacttagcaaactagttagccctcatgtgtaacacctaaaattctattttaggtttataggaaaaacactatacaaatgtatttgaattaaaatgtcttttaataggatttgctttctttttaaagtattttccctaaaataagtaaatggtaactcaaagttcagatttaatctttgaaactataattcaatttgaaacctaaatacatatgtgtatatagataaatacaaaatcctcaacacataattcaatatgaactaagtgtttataaaccttatctataaaggaataagtaaaaacactacttaatagagatcatacaaaaaaattgagtaagtaaatgctaaattattgagtgtgcctttaattatac

SEQ ID NO: 715 - DNA, 439 bp, Zea mays
tatgaagattcttcatcccaacatgggctagtcggcggttccatagccaacccatgctagtcttagcaattaagcaagtgtcgagttcagctctatcaaaatctaccaagtatagctgaccctctaacactcccttaaatgctattgaatcatcacttcttctaaagacagtgacacctacatcagcgaatagacagttgtagcccatttgacataattgggatacggaaagcaaattgtagtctaatgaatcaacaagaaaaacatttgaaatggaatggtcaggagatatagcaattttaccaagacctttgaccaaaccttgatttccgtccccgaatgtgatagctcgttggggatcttggtttttctcatatgaggagaacatccttttctcccctgtcatgtggtttgtgcatccgctgtcgagtatccagct

SEQ ID NO: 716 - DNA, 354 bp, Zea mays
aattttcacagctgtcaagaagatgctccttgatgaaaaaaagggcagatggaccaaattgttacctgaggcagtctgggcactaaacacgactgagtgcagggcgactgggttcactcccttccgccttctatacggatcggaggctatgaccccgcaagaaataaagcatgggtccccacgaacagttccgtccgccgtccccgacgtggacgagccaacttcaaaggatctcattgacggagaccgagtcttcgccctacaagccctaaacaaataccaagcccagaccaaagcatggcgcgaccacacagtcatcccaagggagttcagctaaggggacctcgtactcgt

SEQ ID NO: 717 - DNA, 451 bp, Zea mays
tgagttatattattacagaccagcctaaaagtgagtgcttacgagtaatattatacaaaccagggaggcaaaaactcctcccaagaagctaaaagcaaaagatcctaaacggaggaccgagtcctcccgcacctcagtcttgattttcttcttttggaaccaccttggcacagaagcagcaaaagtctgctacttcctcacctaaaaacaacgaagggataaaccctgagtttggaatactcagcaagtcttacccgactaaggaaaagactctcaaggggatgctggataaataggagtcaaggggaggctttagcaaaaatcaactcatacttttgcagaagtagcttactaaggtgagtccttactttcaatcttttaacgccatgttaagtattaatagactccatttgcatctagtctaatttcacatcacatcaacacaacatca

SEQ ID NO: 718 - DNA, 332 bp, Zea mays
gctctggcggcaatggcgggcgaaattgagctcgccggagctaaggagagggggctggccggtgaaggtgagcgcggggtgaagtggggcgcgcctggggaggctttataggcacgacacggtgcacgggtggtcgtggaccggcgagcgcgcgcgggcgtgcactggaaggcgcggtgcgcgagcgggcgtgaaccggaggtgtcagccacggtcgaacacgtgtgcccgttgcctctgcccatgttcaagcgctggttgggtgcaaatcttcacgaatttgggcaagatcgctgtgaaagatttgttcacctgaccttgctttgtctttt

SEQ ID NO: 719 - DNA, 414 bp, Zea mays
  unsure (1)..(414): unsure at all n locations
tgtgaaggttcttcatccccacatgtgctaagcggtgatgtcacagccaacccatgctagtcttagctattaagcatgcatctagaccggcctcttcttttgcaaaatcaactaaataaagtttgccgtctaatacacccttaaaagctagtgaaccatcacttcttctaaagacagacacatctacattngtaaatagacagttataccccatgttgcataattgactaaaagatagcaaattataaccaagggactctactaaaaacacattagagatagagtgctcattagaaattgcaattttgcctaacccttttaccttgccttgattcccatcaccgaatataattgaatctagggaatccttattcttgacgtaggaggtgaacatcttcttctcccccgtcatat

SEQ ID NO: 720 - DNA, 368 bp, Zea mays
acatcccaacacacggaggaagtgcacggagggcttcttcccgtaccacgcctggtaaggggtcttgccgtcgagcgcgctggtgggcgcccggttgaggagaaagacagcagtatgtactgcctccccccagaagtgcccgggcactccacgtgcccgcaggatgctcctcgccattgctacgactgactgatttcggcgttccactacgccattttgctgtggcgtgtatggagccgagtggtgacgttgtatcccttctcctgcgcagtattcaccaaatgtgacagaggtgaattcacctccattgtctgtccggagcaccttcagtttcttgccggactcacgctccacccgcgcctggaatt

SEQ ID NO: 721 - DNA, 447 bp, Zea mays
  unsure (1)..(447): unsure at all n locations
ntatgggctcatacaatatctaaacatattgttttattttatctcctttngagcttgcctatgggcaggaagcactattgcctgtggaaataagtttgaatgttgtcaggttcgccagacaaaatgatctaactgtcactgattattataattcaatgatggataatattgatgacgcgaccgacaagaggatgatagctttgggagcaatacaaaaggacaagattatggtagccagggcctaccataagaaggtcaaagcaaagtcatttcaagtaggggatctggtgtggaagaccatcttgcctctaaggaataaagaccggaagtttgggaaatggtcgccaagctgggagggtccttataaacgaaaacaggtaatgtctggtaacgcctatttgctaacaacattacaaggcaatgatttaccaaacgctctgaatgggc

SEQ ID NO: 722 - DNA, 282 bp, Zea mays
ctggccttttttcatggaggacttcactgacatagtagactggcttctggatggttcggacccctgcggttggtcccgagtcctcaaagtcttgacctttcatcaacaccgtggtggtcggaccaccaccttctcctaggggaactttttggctcccctgggatgtgtgccgtctctcgagaccacaccatgctaccaccttgaccgtgaatgatagacaacactcctgcttaaccaccatatggaggaccagtgtgttactttaaggaatttgctatcaaa

SEQ ID NO: 723 - DNA, 400 bp, Zea mays
  unsure (1)..(400): unsure at all n locations
gagcttgctatattgntntctgaagagcactcttttattatagcacacatgtattgattcatattcaagacctaatttctttaaaatgctctttgcttcataatatgatctagggagtgtattgcattctgggaaagcatcacctaacagttttaatattgcagaaaatgaggagttgcatatcctatacaatgacttcatataaagaagctttaccacaaaggacaactttgaaagattcgtacaacctggataaagttgacgcttaacctctttcatcaccaatttaaaaaatgattccttgtcattgggttctggatcattctcattttcattggcttgcttatctttctctgcgctgtgtaggtcttgtaacaacccattcaaattaccatcatca

SEQ ID NO: 724 - DNA, 361 bp, Zea mays
  unsure (1)..(361): unsure at all n locations
tccgcttaagccataattctaaacttttcataccctcttccttattttcttgaattttgctcatggggctcacttacggttcttattacggttgcaanactcttaccttctgaaagacccattcgctttgatcatgatacttttaagcatatgctcggtgaattctctattcttaagtcaaatcgatgctcatgcttacttccgttcacataaaatgatggttcttggttcggcattctaacagaaaccctatgtgacactggggcgtcacaccctctccccttaaaggaatctcgctccgagattctggccacactcctcccagcgcgaaacgcaaggtgacactcatacgacatgggtg

SEQ ID NO: 725 - DNA, 424 bp, Zea mays
gcttgagcccttagttcctttgattaatggttactctcatttctaacaaggtactccatagagattggagactcttgctatccgcacataatgagtgaaagtcagaactccaatgaacaacaagagggagagaggaacacacacaagagcacaacaccaccaccaaagaatcaagcacacaacttgcaacaaagctctccctagactattatcatgaatctgtgtacttggatctctttggagagttgctcaaatgcttaggaatcaaagtgttgctcttgattgacttggtggcttgagaaggctggttagggggtatttatagcctaaatgcccccaaagagccattgagaaatctgccaaaaacatgctttacgtcggctcaccggactgatccatgcaccaccagaccttaactattgct

SEQ ID NO: 726 - DNA, 446 bp, Zea mays
tacttgtcaaggcaacagcacatgccagcacagcagttttataccataccagtaacctggcctttcgcatgctggggactggatatgattggacctttcaagaaagctcaagggggatatacccatgtattggtggcaattgacaaatttactaaatggatagagttcaagcccattgcttctttaacttctgctaaagccgtggaattcatacaaggcataatattcagattcgggataccaaacagtatcatcactgacttgggatccaacttcaccagttcagaattctttgacttctgcgagcaaaagagcattcagatcaagtacgcatctgtagcacatccaagagccaacgggcaggttgagcgagccaacggaatgatattggaggcactcaggaaaagggtcttcgataagaatgaaaaatacgcaggaaaatggat

SEQ ID NO: 727 - DNA, 412 bp, Zea mays
  unsure (1)..(412): unsure at all n locations
atggacgtgaaaagtgccttcctcaatggacctatcaaggaagaggtctatngtgagcaacctcctggctttcaagatagtgagtaccctaaccatgtgtataaactctcaaaggcgctttatgggctcaagcaagccctaagagcatggtatgaatgcctgcgagatttccttatcactaatggcttcaaagtcgaaaaagtcgatcctactctcttcactaaaactattgcaaaggacttctttatatgccaaatctatgttgatgatattatttttgggtctactaacaagtcaacttgtgaagagtttagtaggatgatgatacaaaaattcgagatgtctatgatgggggagctgaagtatttcctttgattccaaatcaagcaacttcaagagggcaccttcatca

SEQ ID NO: 728 - DNA, 451 bp, Zea mays
  unsure (1)..(451): unsure at all n locations
ctaagctttgcatctcgaggacctggcccttcgctcatggaggacctttttgacgtagtagaccggcctctgtatggtccacacccctacggtggcccgggtcctcaaggtccatgggggttagaccaccaccttctccttggggaacctcctaactccnctggggatcttttgtcgtcctcttgacgaccagctccatgctcaccgcctccgcagtcgctgcaatatacaagtacagcggctcgcctggctccagagctaccagtattggtaggacacaaggtgctgcttcaactcctagaaggcttgttctgcctcttcggtccagaagaatgggccagacttctgtaggagcttgaagaagggtagcgccctctcagccagccttgagatgaagcggctaagggcggccagggaccccataagcttctggacgtccttgatccgggcc

SEQ ID NO: 729 - DNA, 417 bp, Zea mays
  unsure (1)..(417): unsure at all n locations
aagctggattatgtgctatgacgaaggaggatcttgcggatagtcttgcgtacaatagcctgaaggtatgggaattgggcgtntggaaattttataattcacaactcactcttttattcttataccaactctttttcatatagggtttaattttaagcaacgcattgagagcacaaaagaatgccgaagacgaaagatatgaaattgcgttcaacaacctacgatcagaagttattaaactgagaaacgaggctctggaaaaggataaaattctgcttacattggtagataaggtaaaaaaggatgaagctgcctcaaaggcccaggccgaagcccagaaacgtgaaattaaagatcttcagaaacagctagctagagccaaagaagaacgtatacttgaagaaacaaaacgagagc

SEQ ID NO: 730 - DNA, 455 bp, Zea mays
  unsure (1)..(455): unsure at all n locations
ttntgaaagctggattgcgattccccttgagcagcttcgtcgtggaggtgttgaaaatcttcgaagtctatcttcatcaacttactcccgaggcaattataaggctaaatatcttcgtgtgggccgcgagaagccaaggtttgaagccggacgcaagaagcttctgtaatgttcatgaattattatatgaaacaaagccttggggcaaagaacagtaccataacaactttggctgctacagcttcgtctctcggtccggggcaagctgtcccgtaccaacctttctgaagagatggcccggggattggatgacagaatggttttatgtgaagaatgacttatcagcacgagaagacatcaaaggtataattatgcgtcctatttggcaaagcttcggccttcggaggccgaaggttgaaatgaacgaagccgccgaagagtgccaaagagccttc

SEQ ID NO: 731 - DNA, 423 bp, Zea mays
agcttctaaagggagaacacgtgataggtctaactaatgtaactttcaaaaaagatagaccttgtgcagcttgtcaagcaagtaaacaggtgggaagctctcatcatgccaaaaatgtgatgacaacatcaagacccctggagttacttcatatggacctattcggacccgtcgcctatctaagtataggaggaagtaagtatggtcttgttatagttgatgactattcccacttcacttgggtattctttttgcaggataaatctgaaacccaagggaccctcaagcgcttcctaaggagagctcaaaatgagtttgagctcaaggtgaagaagataaggagcgacaacgggtccgaattcaagaaccttcaagtggaggagtatcttgaggaggaaggaatcaagcacaagttctccgctc

SEQ ID NO: 732 - DNA, 451 bp, Zea mays
tgtgaagattcttcattccaacatgggctagtcggcggtgccaaagccatcccaagttagtcttagcaactaagcaagtgtcgagttcagctctttcaaaatctaccaagtatagctgaccctctagcactcccttaaaagctattgaatcgtcacttcttctaaagacagtaacaccagtatcagtaaaaagacagttgtagcccattttacataattgggaaacagaaagcaagttgtaatctaatgaatcaacaagaaaaacattggaaatggaatggtcaggtgaaatagcaattttacccaaacctttgaccaacccttgatttccatccccaaatgtgatagctcgttgggggtctttgtttttctcatatgaggagaacatccttttctcccggtcatgtggtttgtgcacccgctgtcgagtatccaacttgagcccccggat

SEQ ID NO: 733 - DNA, 408 bp, Zea mays
agcttgccaatacttatcatagtagcaacatttaccagcacagcaactgcaaaccatacctgttacatggccatttgcgtgctggggactggacatgattggacccttcaagaaagcttaaggaggatacactcacgtgctggttgccattgataaattcactaaatggatagagtgcaaacctattgcttctctgacctcagctaaggcagtagaattcatacaagatataatattcaggtttggaataccaaatagcattataactgacttgggatccaatttcactagctctgaattctttgacttctgcgaacaaagaagcatccagatcaaatatgcgtcagtagcacgcccaagagccaacggtcgggtagaaagggctaatggaatgatattggaagcact

SEQ ID NO: 734 - DNA, 433 bp, Zea mays
  unsure (1)..(433): unsure at all n locations
tggatgaggtgtcatcatcatcatcatttgttctatcatcctagtcccattcaactaggtaggctttgccatctttcttcttgttgtagaatttctttttcttcttgtcactttcatctttgcccttcttcttcttgctagggcaattcatggcaatgtgaccgggttccccacactcaaaacactttctatcattaaaagcatttcttcttgatgtttgacctcttctaggttgacctctcttcatcttcataaatttgttgaattttcttacaaatagagccatatcaccatcactctcactttcattttcttcatcattactatcttctttttcaattgccttagaggctttagctttgagagcaatngattcattcttcactttctttgccaaacttatagcatcggcttaagatttcctgaatatatc

SEQ ID NO: 735 - DNA, 374 bp, Zea mays
  unsure (1)..(374): unsure at all n locations
atacaacatacattaccttctccaactttgtgtaatttntctttataaggctgagtacttcagaaacgaagtatactggtgcttgcttttttacctagccatctttgttttcttgtacaagtgctgcactaaccgcaacatgggaagcaaccacatatagaagtaacagagctcctgatgaaggtggggttagagttgtcagatctatcaaatactgcttcagcttttcgaaggctttctgttgagccggacccactagaagacttcgactgatttctgtatttcaaagaaaggtaaattcctctctattgatcttgatataaatatattcaacgatgccagccttcctgccaaccgttgaacgcccttctttg

SEQ ID NO: 736 - DNA, 411 bp, Zea mays
ttgccaatagggcgcataattatacccttgatatcttctctttatgtcaggtcattcttcacataaaaccattctgtcatccagtcgccgggccatctcttccgaaaggttggcacgggacagcttgacccggaccgagaaacgaaactgtagcaaccaaaattattgtgatactgttccttaccccaaggttttgtttcgtatgataattcgtgtatattgcagaagctttttgcatcaggcttcagaccttggcttctcacggcccacacgaagatattcagccttatgattgcctcgggggtaagttggtgaagatagacttcgaagattctcagcacctccacgacgaagctgctcaagggaaatcgcagcccagctttcaaaaagcttcggtacactacgacttca

SEQ ID NO: 737 - DNA, 407 bp, Zea mays
  unsure (1)..(407): unsure at all n locations
cttgtcatagtatccccagtcaaattctcattggatcctgctcaaatttgatcccaaatttctgccaatgtcactggtggccatatttcaattcaaaggctgactgtcagcccgactttaagtccttttatctcccatttctgtacaacaccaatgcttagtcacttaataaaacttgtacccataacatagctctatagttntgatgtgttgacctagggcaaaatcctcaagaattttgagatataaagctccaaagttgaccccattcactgaaattcagacttaagcatatagggttcatggggtactttttgcaaataagtccaaattccactatttaacttgcaaattctcaaatgtgaaaacacatgatttgtggtgttctgtcactntggtatttgcac

SEQ ID NO: 738 - DNA, 436 bp, Zea mays
  unsure (1)..(436): unsure at all n locations
ctaacccnncccccccgcgagaccttntcccgcttctttctaaccataatgaatgcgatattgaatgtcatacttgatgcatatttactttatctgttctcttgtatggggtactgcctgtttcctaattcgaatggatgaatgtatgtgtgcttgcaatcacatagagaacgatccggctgaagagcccgacgaacttccaggagaagctcctgagcaccaatcggttggtggaggcaagtgtcctttgacctatctctatcctattcattatttaattcacctcccgcattacacatttatacttaaggattgactagcttttgttatccatgtccttgtttacctatttgggtcggattattattgtttagcttcatgctattgctcaactctaatcaatgaacatgatgagattatatatgatacactgttt

SEQ ID NO: 739 - DNA, 395 bp, Zea mays
acatgtgctaagcggcgatgccacaaccagcccatgcaagtcttagccattaagcatgcatctagaccgacctcttcttttgcaaaatcaactaagtaaagtttgccgtctagtacacccttaaaagctagtgaaccatcacatcttctaaagacagacacatctacatttgtaaataaacaattatatcccatattacataattgactgacagatagtaaattatatccaagagactcaactaaaaacacattagagatagagtgctcattagatattgcaatcttgcctaaacctttcaccttgccttggttcccatcaccgaatatgattgaatcttgggaatccttattcttgacgtaggaggtgaacatcttcttctcccccgtcatatg

SEQ ID NO: 740 - DNA, 427 bp, Zea mays
  unsure (1)..(427): unsure at all n locations
tctaaaggtagaatacattctgcgactaacaaatgttcattntgagaaagacagggtttgtagcgcatgtcaagcagggaagcaagttggtacccaccatccacacaagaacatcatgacgaccgacaggccgcttgagctactccatatggatttattcggcccgatcgcttacataagcatcgacgggagtaagtactgtctagtaattgtggatgattattctcgcttcatttgggtattctttttgcaggaaaaatctcaaacctaggagactttgaagggattcttgagacgggctcaaaatgagtttggattgagaatcaagaagataagaagcgacaaccggatggagttcaagaactctcaaattgaaggttttcttgaggatgagggcatcaagcatgagttctcttctacctacaca

SEQ ID NO: 741 - DNA, 417 bp, Zea mays
  unsure (1)..(417): unsure at all n locations
agcttctcctgtctggaataatctatggtatttcggacagtcgatttanaatagttgtagatgaacttatgcacctgtgaaatgatcaactaagcaaactggttagtccacaaggtttgtgatggtcgtcaaacaccaaaatcgattatatgaaatattgagactatttccctttcagatttgttttcccctctctcccagactcggattttattctaacgctaacctcggcttgtagtgtgtttaaagttgtaaattttagtttccgcatatccacccccctctaggcgactttcaattggtatcaaagcccggtacttcattagaatctaaccactcgaagtgatgtcgggaggatccgcctatagagagatggaaatggccacaagccacaggaaggctccatcaagagagtct

SEQ ID NO: 742 - DNA, 411 bp, Zea mays
tgccacagtctcatgacaagtagataattcacaagacagcatttcattccttttaacttctaaagcaagagacttttgcacactaacaaatttatcatgttcttcatataaaagatcctcttgcttttctaaaagtctatctttttcattcaatgcatcaatcagctcattaatcttttctaccttagactaatcctttgaacaaccaagtgtagtctacttcatcatcactagagtcctcatcactagaagtagagtacttaggagtttctctagtttttaccttcttttcctttgccattagacaagtatggcgctcgttggggaagagcaaccacttgttgaaggctgaagcggcgagtccttcgtcgtccgagtcggacgacgaacaatccgagtcccactctttgc

SEQ ID NO: 743 - DNA, 387 bp, Zea mays
  unsure (1)..(387): unsure at all n locations
agcttgctgattttggtctttcaagatcattctcgagngatcacaatggcaaccttactaaccgtgtgatcactttgtggtataagtattgtctattttcacaggttntgttaccatatttacagcatgtttggaagtaaaatatttttatagtttctaggcaataccatggtttataggaataccaaagtattttatgccataaggtgtttggttccatcttcttaagaactatgttttcaaaaccatggtattctagataacatggtattttttggagtattggaaaccccactttcaacccaagttttcattttctgattaacttttgcctaataccatagtttacaatattgtatccaaacaataggtactattattggagct

SEQ ID NO: 744 - DNA, 405 bp, Zea mays
  unsure (1)..(405): unsure at all n locations
tctgctnnttgggtcgcaccgaagggttatatctccaatctgtgctcaattatggctcggctgactccgaccagatcgagggcagaccaggcgaagacatctttattcttggccaggcagcaaagaagtttctcttcttcaagtgaggtgaggtcttcgctgatagttactgtctgcttgggcgtggcctgatcgagggggacggtcttggtcgactcaccacncaaacccaaggatgtcccccaactcacccctctcgcgctgctcgccgtcgggctcccccgcgcacccacttctcgctggcccctgagacactcgaccattctctgaccgccaccaacctccccctacgtccgcgccgctgccgcccccgccactcgcctcccccccccggcctcgcttctc

SEQ ID NO: 745 - DNA, 409 bp, Zea mays
  unsure (1)..(409): unsure at all n locations
agcttctaaagggagagcacattntaggactaacaaatgttcattntgagaaagacagggtttgtagcgcatgccaagcaggaaagcaagttggtgttcatcatccacacaagaacattatgacgactgacaggccactggagctactccacatggatatattcggcccgatagcttacataagcttcggcgggagtaagtactgtctagttattgtggatgattattctcgcttcacttgggtgttctttttgcaggaaaaatcacaaacccaagagaccctaaagggattcttgatacgagctcaaaatgagtttggcttaaggatcaaaaagattagaagcgacaacgggacggagttcaagaacatgcaaatagaaagcttccttgaggatgagggcatcaagca

SEQ ID NO: 746 - DNA, 402 bp, Zea mays
  unsure (1)..(402): unsure at all n locations
taagatgccgggccccaacggngtcatcaccgtcggccccacgtacaaacacgcgttcgaatgcgacgtggagtgtgtggactacgcgaggccctcgccgagtccgaggcccccatcgccgacctggaaagcctctctaaggaggtgccagacgtgaagcgtcacgccggcaacttcgagccagcagagacggttaagtccgtccccctcgaccccagcagcgacgcctccaagcagatccggatcggctctgagctcgaccccaaataggaagcagtgctcgtcgactttcgcgtggagtccctcggacatgcccggcataccgagggatgtcgccgagcactcgctggatatccgagctggagcccgacccgtcaagcaggctctgcaccgattcgacga

SEQ ID NO: 747 - DNA, 278 bp, Zea mays
ttactgtggctgtttctgttgcctgaccaaaatgagcgggtctgtacactggtaggtttcatcacataaatggccgaattggcaattccaactatggagacttctgtagagggataaaaatttcttacttccaatagaatttcacgattattggttcagtggtttgtgagatatcgaattttcaaggtaactacgctgctgtctgaagcagattcaatcagttatcttgtcagatgttttagaacttatagatggcaaaattaattattcattgaata

SEQ ID NO: 748 - DNA, 298 bp, Zea mays
aagcttgtaaaagtgcacatgtccatgcttatcctttgtcttatcaatacgccaagcaaatgatgaagcttctacacagtagaaagatgacagagtcaaaggtagcagtgggaagcatggggaggataaattggtatgccgtatatttataccttaatataagtgaaagctattttgacatataactccccgagattcgaaagagtggaacgcgctatacacgtgcgagaacccggatggagagcatacacaacggccgtgatgaataaatcccatgaatgcttcaaatatacaaccg

SEQ ID NO: 749 - DNA, 452 bp, Zea mays
agctggacaacatcaaattcttctttaccttattgtgatcacgtctcagttttgcagcagcatccacttcaccgtgtcaatcagaaaactccctgactcctccagcacatggcaaacccaaaatcagacgaaccgtatcttttgttatcttcagttccttgccagcccctgggcgtatggtcatgtcatgtggatccaatttatccatcaaccacctgatgagagatctgctctctaagacatcagttcaaaaatcaaatatactagaaaatcccaacctagcgacagcatcgcgctgccgatcgctcattatccaagatgagacaataacatcatagggaatgcagcggatattcaatttctgaaagcataaatgaatatgcattaatacacaaagtatatatatggttataactaaggatactatatttacatacaagggatattattac

SEQ ID NO: 750 - DNA, 396 bp, Zea mays
tttatgggtaagttccctatccagggtcctatttgcaaaatgctataacaatacaacttggttgaaatttttacctaatgaatgccctctacgtgtgtcaaacatatgcaatggcaatgcttatgaagccatgctcaagttttagttaccagaacaccagcggtgttacatcctttcccccataaaagaatctcttcctgagattaaaagtcctacggtaagtaatggaaaaggaaatgtgcacattcttatttccttatttctggacaaggcaagggtggtttgcgaatctactcctttattacacagctatacatgctttacaaattacaagacgctaacaacgctgggaaattcatatctaagaagtctcgagtctccatgtagcctcatctt

SEQ ID NO: 751 - DNA, 436 bp, Zea mays
  unsure (1)..(436): unsure at all n locations
catgcaagcttatgcaacatcgcttgagatggtngtatatatccaacgaagacctgaagaggcaccagtgcatatcggaataattaggcgtcccgaaaatgtgaagagaggtagaggtcgaccaactttgacgtggacagaggctgtgaagagagacctgaaggagtggaatattgacaaagaactcgccgcagataggaaggggtggaagtgtgcaattcacgtgccagaaccctgattgatagtttcgcttttcctccttaatcgtttgacctcttcttgtgtccattttagatcttgctggtcattgtgggttttatctcttttatgtgtttccctggttcgctgttttcgggtctcctntgcctttgtttcccttttctggtctttggggggtgagctctgaggttntcatatgggggttcatctctagcct

SEQ ID NO: 752 - DNA, 416 bp, Zea mays
  unsure (1)..(416): unsure at all n locations
tctcatacgagtcgtaatgcttcagattcacatgcctatgactctcatgctatgtatgcctccacgctttcctatatgcatggtagagatatgcctaggaaaaatattcatcatgtcgcctaggaagaatatcgctcatgttcctacaaaagctatgaatggtccctctacaatttatcatgctttaaatgctctctttgctatttgtagaaatgataggaagatagttgctacgaaattacgggcaaaatgcaagggtgataaaacttgcattcgggtccctaaggaaattgtgactaacaagcctaaatttgccttgcagggttatgcatccgggggctcaagctggattatcgacagcggatgcacaaaccacatgacggnggagaagacgatgtcaccttctacgtaagaat

SEQ ID NO: 753 - DNA, 424 bp, Zea mays
  unsure (1)..(424): unsure at all n locations
agcttgagaaggatcttcatcccctcttgtttctttgtggcgatgccacanccagcccatgctagtcttagctattaagcatgcatctagaccggcctcttcttttgcaaaatcaactaagtaaagtttgccgtctaatacacccttaaaagctagtgaaccatcacttcttctaaagacagacacatctacatttgtaaatagacaggtatatcccatattgcataattgactaaccgatagcaaattatatcctagagactctactaaaaacacattagagatagagtgctcattaaaaattgcaaatntacctaacccttttaccttggcttgattcccatcaccgaatatgattgaatcttgggaatccttattctttgactaggaggtgaacatcttcttctcccccgccatatgggtt

SEQ ID NO: 754 - DNA, 307 bp, Zea mays
tttggagatgctttacatggacctcttcggacccatcgcctatctaagtataggacgaagcaagcatggtcttgctatcagtgaccacttttcccgttcacttgcgtattctttttgcacgataaatctgaaacccaagggacccttcagccgcttcctaaggagagctcaacacgagtttgagcctcaggtgaaaaagataacgagcgacaatgggtcccagttcaagaaccttcaagttcaggagtaccttaaggacgaagggatcaagcacgagttctcccgtgcctacacaccacaacataat

SEQ ID NO: 755 - DNA, 425 bp, Zea mays
  unsure (1)..(425): unsure at all n locations
agctngnccactacaaccaaacatgatactttctgagtatgatgatgtgtactcacactcgctctacacaccaaacccgccccatccccagggtgtcagcattgcaaccactgctcaggagaagatgaagctgtggaaggagacttccaggagttccaagactacgacgagttctaagcgtgggttagcggcaacccctaatctgctgtctgtgaaagccgcgtttatctacggttacgtttcgcactttgatatattggaaagactatgtgaatgtctcagacatatgaagtaatcgactactatttcccttattaatactatttgagcactgtgtgatgatgtccatgttatgtaactgctggtgaccggaattgctgatcctcgcacggacatgggtcgcatttcggttgcctttaaaaccg

SEQ ID NO: 756 - DNA, 333 bp, Zea mays
  unsure (1)..(333): unsure at all n locations
tgccaagccctctgacccggtcggacttcaccgtacgtctgagatcgacctcaccggactctggtcttccgccgccgcgcgtggaccgagctatccagtgagtctccgaccaattccttgcgctcatgtcttctctagaatcccgtggacctcnctgacccatctgattgaactatctcgccgtgaccaggccggtctcctcgccgccgagagcatccccgcctgcgcgcgtggaccgaccgactccggccatctccgacggggtcccgcacactgctgtgatcgccgagacctccccttcgtcctcgaccacttcaccggagcaatctcgcc

SEQ ID NO: 757 - DNA, 402 bp, Zea mays
  unsure (1)..(402): unsure at all n locations
cttanagtcacctgaggcatgcaagctcgaagccatggtaagtagcatatgcttgttatatgcgaattgactcaagcctatctacgggtgcataggtttcaccgaaatctaaaccttcgacttgtgaataccccttggccacaagtcgggctttgttccttgtcaccacaccatgctcgtcttgcttgttgcggaaaacccacttggctcctacaacattttgattaggacgtggaactaaatgacatacctcgttcctagtgaagttgttgagttcctcttgcatcgccaccaaccaatccgaatcttgtagtgcttcctctaccctgtgtggctcaatagaagaaacaataagagtgatgctcacanaaatgtgcaacacgagatctagtgggtaccccc

SEQ ID NO: 758 - DNA, 431 bp, Zea mays
ttgtcgagtaactgaagcactcggcacagtagctgtgtctggtagtggatatcttccaacgatactaacgataagccatcataaccggttgaagacactaaccgacactaattaggctatcttcagcactcgttatcatacctatattcaaactgcactctacaaacagtgcaatctacagtgcaaacaatattttaggtgaccacatgagtgaactgttgggcattgtcttatattagaaccagccgatgtttttaattagtactgataatttaacattaataccaattagagacatcaatcggtagtaatgtacctgtgttacatacactcttcctcctcgagttggcgccaagaatagagatgagctctatttatgacactataagctttaacgacggagatgtcgcccaacttttttcaagaaatta

SEQ ID NO: 759 - DNA, 454 bp, Zea mays
agcttgtgaagattcttcattcctttatgttctagtcggcgatgccagagccagcccatgttagtcttagcaattaagcaggtgtcgagttcagctctatcaaagtttactaagtatagctgaccctctaacactcccttaaatgctattgaatcatcacttcttctaaagacagtgacacctacatcagtgaataaacagttgtagcccattttgcataattgagatacagaaagcaaattgtaatctaaagaatctacaagaaaaacattggaaatagaatggtcaggagatatagctattttacccaatcctttgaccaaaccttgatttccatccccgaatgtgatagctcgttggggatcttggtttttctcgtaggaggagaacatcttcttctcccctgtcatgtggttggtgcacctgctgtcgattacccaacttgagcccgcgg

SEQ ID NO: 760 - DNA, 354 bp, Zea mays
  unsure (1)..(354): unsure at all n locations
aggaaacaggcgggaggctctcatcccacccaaatgtgatgacaacatcaagaaccctagagctgctacatatggaactcttcggacccgtcgcctatctgagcatacgaggaagtaagaacggtctagttatcgctgatgaccttttccacttcacttgggtgttctttttgcaggataagtgtgaaacccaagggaccctcaagcgcttcctcaggagagctcanaatgagtctgagctcaaggtgaagaagataatgagcgacaacgggtccgagttcaagaaccttcaagcggaggagttccttgaggaggaagggatcaagcacgagttctccggtccctacacaccac

SEQ ID NO: 761 - DNA, 354 bp, Zea mays
gcttgagctgactctttctcttctttttacagcatatcatcgatagcttatgctattctaatttcaagggcaaacatttccttcagccttttcattattttccaatgaatgtgattgctgaccaaggttattttgcacagagaatgctactaaataaagtcttgaagatgcaaccggacctccaagataagataaacgagaatatagctgaatgcttggaaagcaaaaccaaagatcgtgatactgctcttgagaaaaaagattttgtttttcaaacaatggatggttcactaacagaagcccaagccgaaattgtcccattaaacagtgaacttctcacgatatcagaaaact

SEQ ID NO: 762 - DNA, 270 bp, Zea mays
  unsure (1)..(270): unsure at all n locations
tctattctgcttgcacaaccactgcataccatggaaaaatgttacacataaaccgtgcttcaccaagcacaactaggccaaacaagatggaatggcagacaagaagacgacagaggatgttggcttatgtctagtccttaacttgngcttctctcaatctctccttagcacacgcatcacatactccatgacggctgtaacacaacgacgcatgatcctctcatcactggtatacccaaactcttcttgtgacatcttgaggagctctgc

SEQ ID NO: 763 - DNA, 294 bp, Zea mays
ttctctggcatgcttctatattattcctacgagcagtggctggcctcctgatgctgaagccagaccaaatggggcgttgaataataccttttatatcttccctctcaactaaggtattcttcacataaaaccattcttccattcaggctcctggccaccttttctgaaatgttggaactgggtaacttacatcagggcgaggcacgaagccataacaaccaaagttgttgtgtactgcttcttgcaataacccttgtttatacagcagcttatgcatattgcagaaaattttgc

SEQ ID NO: 764 - DNA, 426 bp, Zea mays
  unsure (1)..(426): unsure at all n locations
tcgacacaaccaacttattttgttttgcagacttcgcttgcggctactcgctttgctgctgttgaaaagaagcccttccatttcttacattgctggtccatattgaaggatcaacctaaatggatggaccagcacatgagcactcaaaatcctccacccaacccaattgctacccaatcaaatactattgactgtgacgctgctgaagaatcagctccttcaagctttacttccaaaaggccgcttggtcgtgattcaccaaaggaaaaggcaaagaagcaaagatcagaaaacacatcatccactgattcggagtgaaagtcgcctagagggggggtggataggcgaaacctgacaataaaactttatccccaactgactctntgatagtgttagaacagatgaacaatatccgagtataaaact

SEQ ID NO: 765 - DNA, 444 bp, Zea mays
  unsure (1)..(444): unsure at all n locations
agctngaagccatggtaagtagcataggctttaatatgcgaattgactcaagcctagctacgggtgcataggtttcaccgaaatccaaaccttcgacttgtgaatatcccttggccacaagtcgggctttgttccttgtcaccacaccatgctcatcttgcttgttgtggaatacccacttcgttcctacaacattttgattagtacgtggaactaaatgccataccttattccttgtgaagttgttgagttcctcttgcattgccaacacccaatccgaatctcttaatgcatcttccaccctgtatggctcaatagaagacacaaaagagtaatgttcacaaaaatcagcgactcgagatcgagttgttaccccccttatgaaaatcgccgaggatggagttcacgggatgatctctttgagtccgtctcaagaatcccttt

SEQ ID NO: 766 - DNA, 449 bp, Zea mays
  unsure (1)..(449): unsure at all n locations
tgtcaacttggcatgaccggcgactggggtgtctcctttgtttgcgccgattaactcggcgtgctcacgctatcaggctaccattggtcacactaactatcgcgcctgttcgcgccgctgactgacccgaggtcttcgcactcgatggctttattgggccatgcccggngtgccttgataccgctgcgattggtttcgaaaactcaccttatttgtcttctgtggcggcaccgaggaggcatggcactggcgtgagcggcagcttgacttttctgcacccaggaaccagcgcccaaggaggatgactcatgggcccgggcccccacgtcagagactgtgctgttggtttctgccgacgcgaagaggcgcactaccgcatgcggcggtattgcactcacgcaacagtctaccttcttcacacacggaggccgacgcacgcatagtatgac

SEQ ID NO: 767 - DNA, 411 bp, Zea mays
  unsure (1)..(411): unsure at all n locations
gcaatgggagtggagagaaggcgagagtagcatgtaccctccgtggcaagaggttggacggtggtgtatctgtgctctcggttggcgtgaacccggtctggtcttgagaaacccggtggtgagttgacatatgcaagggttaagtgctacatatgtcgtgtggttggagatctgcaactgggtattaatcgattcggatcgtcgttgcttcttagacatgaagacttggtcactgccctacacgtagcaatccagtaaagtaaaggggtgataaaagatggctagtgtaggccaagtgcttgaactangatagaaagaactctagatgcaggtaatgacttaacctgatcataaatttttgattttaaggatccactgttagtaagcatttctacaaacagaatatttgat

SEQ ID NO: 768 - DNA, 448 bp, Zea mays
agcttcgacattattttcaagcataccatattattgttccttcatcacagcctttgaaggatatcatgagaaacagagaagctactggaaggattggaaagtgggctgcggaactcaatgagttctgcattgattatgtgcatagatcttcgattcagtcctaggcgctagcagatttcatcgctgactggacgccaggggctcatgaagaagaagcaagtaaagatgccgaagcttgaactgtattctgcgatggttcctggagaaccttcggggcaggtgcagctgccgttttaattgcaccttctaaaatcagaacatgctacgcagtgaaacttgattttagttgtacaaataatattgctgaatatgaagctttgcttttgggtcttcggaagttgaggcaatggggataagagggcggttctcaaactgatcccaagtattt

SEQ ID NO: 769 - DNA, 364 bp, Zea mays
ctcgatcatcaagcctacattggtttggcccctaagcgactcagacaaaggcactacaccaagactctcttgtcgtgcaagtcacccgcgcggtccttattttattcattcacaacccactataggtatataatagaaacatactaaggtggatcttgaataccactttccttcacgggacatactaaccactagggtttcctaagttagtagtctatcagtattaagcaactaaaccctaagagactagcttattgggtttgggaccaaacaatgtccaaatcatttcaagcttcatccaaggtctttaatcctcatactaagcctacccaaaaattttactatttttggagctactaaatta

SEQ ID NO: 770 - DNA, 440 bp, Zea mays
  unsure (1)..(440): unsure at all n locations
agcttctaaaacttgttcctcaggatttcatatattttattggacttccttgcatcataatatatctccagaattttttcctgaattttctagaggtgcttgaatgtttttacatatgctattaacagttatctggattattccttcaactggaaacttatttcagaaattttaaagaaactaaactaaacctggtcatcaacccacatggaagtgacagtagcaagccagataggcagttgggctgatgtggaccagttgggcctagctgaaaacccaggacatgtttaaggtcccaaatatgcattttttgagagttcatagacttaaatgagatcataagtatgctaaggtaatggcagataaactataaagggtcanggcctgagggtaaaatcagtctaaaaactatngtcttgacttcagatcgtacatatgat

SEQ ID NO: 771 - DNA, 459 bp, Zea mays
  unsure (1)..(459): unsure at all n locations
ttccgcgagcgcactggcgtcgtcttcttgctcgggattggtgtgttattgtgggacggcgcttgcctttgtctcgaacgccaggtcgacgcccggcgtgcctttcgttggggcgctgggaacgtcgattcgctcgacagccgacgaagcgcggccttccgcttggccttggttgccccgcctcctactccgttggcggnggagaggacggggcgagctcgaatgttgttcttccaccatacggngaagatgtcgtcgattccgccgccggcgggcgggttgtcggccgccattaccgttgtcgcgcggcggtggaaagagtatcatgtcgtagctgccgtcgaaggacatgaactcaagactcccgatacggagcaccgtcccgggccgaagaggttgctggagactgcccatctggagctcgacgggaagctgttcgtcagcacgcagcagggccct

SEQ ID NO: 772 - DNA, 440 bp, Zea mays
  unsure (1)..(440): unsure at all n locations
agctntgtaagcgaggcaagagacaccaattgtgtggtggtccttgcggngtctaagtgacccgtgagattaaggaagaagcttcactcggtctaagtgaccgtttgagagagggaaatggttgaaagagatccagtctttgtgaccacctcaatggggactaggttcattagagccgaacctcagtaaaataaatcaccgtgtcatccgctttactttcttggttgatttgttttcccctctctcccggactcagattttattctaacgctaaccccggcttgtagtgtgtttaaagttgtaaatttcagtttccgcctatccacccccctctaggcgactntcaccagggatcttccttgaaacagacaagtccttgatgtgctctccctatcaaccttactcccggcatagtcggaatctgaatatccgattaagtc

SEQ ID NO: 773 - DNA, 336 bp, Zea mays
ctgcgctctactgttggtagttaacgcctttgtccattagcctcagggcggagggcggcctccgatcctcctccatgttggtcctgcttattaccagtaccagctgcacccaagttgatgagtacgtaactacctaatggtaaggtgtcttcaacagctttcatatcttatctcccgctctacctcatgtttcagatttcacttcgtaaatattactgtctacaacgggaaacagagtgtttttcaccgcttaaggacgtccctacgcagtgtggcacgtgcgaatcgacacggtcctataagaacaccccccccacacacacacaccaaatatat

SEQ ID NO: 774 - DNA, 345 bp, Zea mays
tcgtcgacccgacgtccacgaggtgcaatgccacatcgatcccctgtagaaaaagctagctaatagcctatatggacaggtaatattcagactgtggacgataaggaagcaaatatactttttttccggaggaaaaaaacatgcacactgcagatacaccgatctcattctaagaagtataagccatggaatcgatgccaacattttttctctaggaaaaaaaaggaattggtaacaaattccagtcgtcgcgtgcaaactggtttatcatgatcccccagtagagcatgagagcatccatggcccatggggaggaccgaggaaaaaactaggccaacgctggtc

SEQ ID NO: 775 - DNA, 468 bp, Zea mays
ctcacgcttcaaatcctgagagctgcatacttaaagtggctgttgtgttttataaaggaaaatcagctttcaagggaagagtttcagattttttcttgtctaaaagtaaaaggccaagaaggcagatgcctgcttatcatcaatctgattgtattgctgaggggcttgaaggctgtattactcataatagacaggactgcaatcataaaatggatgccatcgagaaagcgatgcattacgatgatgaattcaatagtttttcgacacgaatatcaactagcataccagatgtaagcatttctcgaatatcatgcaagtttaatactctctctgttacaaagtataagatgttttggcttttctagatatattgcttttattatgtatctagacatagtgtatatatctaagtgtacgaaaaactacatcttttttagaaaagccaaaatgtcttataattcggaacat

SEQ ID NO: 776 - DNA, 440 bp, Zea mays
  unsure (1)..(440): unsure at all n locations
agcttataacaagagaatggaggttatatttataccatatgtgataatagaaggggaattgtataaacatggagtttgttcaccactcctcaagtgtttatcaagaactgaagttccttctttttcttttcccctttgagcttcggcatgtcccattctttcaaagttgggaacactctaaaagctaagaattcttgcactagatccctagtaccaatgtgctccacaataactcgaaattcgcctagtgcaatttggcatggactatccggtttcatgtcgcaccggggcctagtttctccgaagattaattctaatgggctttgaaccagcttctcctttntctcatcaactgtaacataaaaccattcagtcttccagccagctggcccattggtacgatagctgattactggagacttcgcatctttgcgataagc

SEQ ID NO: 777 - DNA, 467 bp, Zea mays
  unsure (1)..(467): unsure at all n locations
tttaattatatcttacgacatgcttccgcgaaagaattgtttgtcaaagaaaagcgagaggctcagttctatgcccaaaaactaaaatatncaaagggggcattgatattcaacggccgcggagaagaagacttcttgtattgtctccctgacaacaaggagatttctgtctgtcgggagatgagcaagagcttctgattcccaacattagaaaacgggctctaggtgttatcaaaagacgagctggccgacagcttggcgtataatagcttaaaggtgcgaaaatgaggtctttgtattattttttgaaatcaaaatttttcatttgcttaaacttattgacacacacacaattttttgcagggccttatactaagcaacgccctcagggctcacaaagatgctgaagacgaagggtgcgttatggccctgagcaaccttcgttccgaagaattgagctaacgaac

SEQ ID NO: 778 - DNA, 371 bp, Zea mays
  unsure (1)..(371): unsure at all n locations
gatcttaagtcacctgggctgcagcttgtgctcagggaattatgtttctttccagntgatgacatcacaaggcatgtggcgtgcacactaattataagatatggtattaacaaaaaaaggagccacatgccttgggatctcaagacattagttccatggaagcgacattccataaaactattgtagggtagaaaggatgacggttgtccaaagaaccgatgaccacatgctagcccttccttggcttgatggtattgtgacacttggacaccctatcaaaaatgccatctttggcctccaaggatggtgaattgttgatccccacagttattgtgttacctgccaaacgtgtttggctataaaatggagtt

SEQ ID NO: 779 - DNA, 424 bp, Zea mays
ttgctgccatgctcacagctcatagccgatgaataccttattgggctgagaatgacgtgctgcagtttcagttatcagacgatgaaataagggaggatgaagataaccgaactgaagtgagaaaatgggatgcggctaagatagtacagggtgacttgacagacgatgagactagtgaagatgagctgcataaggatgaagcatgggttttaaaggatgggggaatcgtctctactgacgagggcgacgaaggtattgatgagtccaacgaagggaattgcactgctgatgcaccccacaggttgcagggaactgggatagcggaagaggccgatgaagatacctctaccgaagatgatttcagtggtgaaccatcacggttggacaatatcatactattcggtgaagctgaatttgacagtga

SEQ ID NO: 780 - DNA, 334 bp, Zea mays
agcttctgacttgtgggcccgcctgtgtgtcgtgtgcacaccggacaggtactgtttgctgtccggtgtgccagcatgggcgtgcctgacagctgcgcgcgctgcgcgcgcatttattgcgcagcaagtatccgttggcgcggagaagaccgttgctccggagccgcaccggacagtccggtgcacaccggacagtccggtgaattatagtggacgagccgttggcttttcccgaagctggcgagtttctggggccgacctcccttggcgcaccggacactgtccggtgtacatcggacagtccggtgaattatagccgagtccgcttcggaaa

SEQ ID NO: 781 - DNA, 410 bp, Zea mays
  unsure (1)..(410): unsure at all n locations
ntccacccgggagtttacgtgggtgcagcgggaggaaatttatcatagtggttatcgagagtgtggagatatccgaccatgtagacgatggtggggtcatcctcagtaggatctcttcctgatagggcctgaagtcttttcctccgggctggggtattttttgctaggtggaaagtaacgaagaggggtttcaaagacctctctgttgtagttntggcatagctgtcggcgggcttttcgggcaacattttggcaagtgtcggngaagcggtgtccggtgaaggtgacttggaaaggagggtggttgggtagttttggctttctcccaggtagactgccatagagcacttctcagttccattctcgtggtacttctttcagacgtattttagcttcttgcggatccccat

SEQ ID NO: 782 - DNA, 452 bp, Zea mays
  unsure (1)..(452): unsure at all n locations
agctntaccaaatggacgtgaattgtgccttctttaatggaccgatcaaagaagaggtctatgttgagcaacctctctgctttgaagatagtgagtaccctaaccatgtttataaactctctaaggcgctttatgggctcaagcaagccccaagagcatggtatgaatgccttagagatttcttatcactaatggattcaaagtcggaaaggccgatcctactctattcactaaaactcttgaaaatgacttgtttgtatgccaaatttatgttgatgatattatatttgggtctactaacgagtctacttgtgaagagtttagtagaatcatgacacaaaaattcgagatgtctatgatggaggagttaaagtatttcttatgatttcaagtgaagcaactccaagagggcactcttctatgccacacaaagtatactcaagacattctaa

SEQ ID NO: 783 - DNA, 446 bp, Zea mays
cttcgcagacacttggtgcgtattttaccttagccgaggcgggtttcttcatagccccaatgacagtaataattcttcgcttttttggttcaacaggcttctcggcagccgaaggctccttcttctgtaaaagcttcatcagttccggtcccagcggacttagcttattaggtagagattcagtcattacctttaaaatttcttctatgtcactggcagaacgtgttgagggaacttcttcttctaaatcagcttttggcttcagagctggagcctttcttttcttcgacacggccaccttcggctcaggactggtgtcggggaccataattaagggtacccacaagtctcctaattctcagctggcaacccccatcagcataaagctgcaaaggcctgatgggtgcgattaagtcagggatcggtccattcgagggactcgatca

SEQ ID NO: 784 - DNA, 391 bp, Zea mays
  unsure (1)..(391): unsure at all n locations
agcttggaagttagatgtatagtgcagtgtctgctgactntattttgaataattcacttgcaatttaaattgtctgattctttactccttccggagtcatttaatgtgtgtgaatctacatgtctgaaattgagtttttggcaccatgctgtttcacttacatttcctacatgtgaatttttcccatgcagtttactgatcattacttatctgatatttttaaatttttttctaatgtagtttactggtctgatattntttttgttttcttatgacttagcttgatgcagcagcttggtcacgatttggaccaagaagagccaagaacctacagacattctcatgttggttcacctattgctaactctcctccaggtacttctgttggaac

SEQ ID NO: 785 - DNA, 393 bp, Zea mays
tttctggcagcttcctgacttccatgaatagcaatacgcccttgatccgaaggtatctttatgcacagatatgctggatgaagaattgcttcaaaagcattgagagtaccacgaccaatgattgcgttgtaagggtactccatgtcaacaatatcaaacacaacttgctcagttcttgtgttgttgataaatccgaacgtcactggcattgcgatcttgccaagtgctacaatcctcgcttcctccaaagccacaaaggggatgtgtggcgtcatggatcttatcttcgggctcttgcatctgtctgaacgccctaccacatataatatccgatgcactggctgtgtcaaccaacatattatggaccacaaatcctctgataacacaagagat

SEQ ID NO: 786 - DNA, 340 bp, Zea mays
gggacatgacttcgcattctactgcgctatcgactattttgtccattcctggcagcggcaaattcgccttacggcaggccttattaaggctggtgaagcagatacacatgcgccatttgccgcttttcttttgcaccatgaccacgttggccagccatgtacgataagcaattggctcaatgaagttggcttccaacaggtagtgcactcggctttggcggcttcggtcttctcgtccgacattttgcgcagtcgttgctcttttgggcgcaccgaagggtcgatgcccacgttgtgctctatgatggtgtggctgaccccgaccaggtcgagggcggac

SEQ ID NO: 787 - DNA, 426 bp, Zea mays
agcttatagggtttctgagatgactaagtgcttcgtatgatgaatccaccctaggcatgtcagatcaatccacaactccagtcagagtgatggtaaaggaagccagtttcagaggccacaacatagctcacagtcttcagggcagcagtagagctctttcaggccaccagccccaaggggcagaggcgttaggggctctgaaggaagatatggggatcagcccgggaaactctactacttattatgtggtgaggacaagggccacactacaagaacatgtaaggtcaccatccagaagcaaaaagagattgccgaagcagaagcgcgacagaatcagccgaagcaggttttacatactgggtaatcaacctgcagcttctgttgcttcggcaagtattcacaagcttcctagccctagctcccact

SEQ ID NO: 788 - DNA, 489 bp, Zea mays
actcagcttggatacaactgacaatctcgtacctctgaagtactttcctcaaatgttcctcacgttcttgctcattctgggaatatataagaatgtcatcaatgaacactactacgaacttgtcgaggtagtccttgaacacactgttcatcaagtacatgaagtaagctggcgcattcgtcaaacagaatgacatgaccgtgaactcatatagtccatactcggtgatgaatgctatcttcggtatatccgaaggtcggattctaagctgatggtagcctgacctcagatctatctttgagaacacactggctcctctcaatggatcgaataaatcttcaattctaggcaaggggtacttgttcttgatagtaacctcattcaaggatctgtagtcaatgcacatcctctttgttccatccttcttctccacaaatagcactagggcttgccaacggacgtacttagtctgatgtaacctttctctga

SEQ ID NO: 789 - DNA, 441 bp, Zea mays
agcttaccacatttgatgcatgagcgcttttttttttcttggccttgcttggctgccccttgcgacactttagcgccgacttgaatctcttgatgatgagagccatctcttcatcattaagtccggccacctcaatttgtgccaccttgctagggagagactccttgctttttggtgccttgagagcaagagggtgaggctcattgattgcaccattcaatgcgtcgtccacgtatcttgcttccttgatcatcatacgcccgctcacgaactttccaagtatctcctcgggcgtcatcttggtgtacctaggattctcacgaatattgtttacaagatgaggatcagggacaataaaagaccttagcattaggcagacgacgtcatggtccgtccatcgcgtgcttccatagcttcttatcttggtgacaggggtcttga

SEQ ID NO: 790 - DNA, 213 bp, Zea mays
acttctaagctcatcaacaaacagaaataataccgcctttaacacttcacaccaacataatagcaagatgaatatcaaaagccagccaacatgacgaagaagagattctggaatcgggggataaaccctctaagacggcgatggtcatggcggaaattcggaggcatacctataatcagtgcggaaccacccatcattgactcgagcattcct

SEQ ID NO: 791 - DNA, 430 bp, Zea mays
  unsure (1)..(430): unsure at all n locations
agctngactcatgtatccacacattaatctttattttattnttctcgnctcatggacaaggcatcctccctggatccaagtccatagaccaacatatatcccattatcatgatgaatacaatcaattcctgacctcgcgcgagtgctagaaaaatcactcgacttctaccgagatcctgattagcaagcagctactcgacctagcatactagtattcatctcaaaaggagtcctaagttcatgcaactagaggtttcaagcaactcctacacttaagtgcacattacagtcctacaagcattaagtgtagtaaagtagcatataataacatggttatgcataaaaccggggcttgccttcaattgctggggctgcggggagatcctcaatagcagcctctgaagcctgctcctggtccttctcttggaca

SEQ ID NO: 792 - DNA, 365 bp, Zea mays
ctctatcaaaactcactaattatagctggccctctaagcaccccttaaatggtattgaatcatcactcttcttagagacagtgacacatacatcagccaattgacaggtggtacccattttgcataattgagacaccaaaaccatattgaatctaatgaatctacaagaaaaacattggaaatagaatgcgcacgagatatagcaattctacccaatcctctgaccaaaccttgacttccattcccgaatgtgatagctcgatggtgattttggtttttcttgtaggaggagaacatcttctctctccctgtcatgtggtttgtacacccgctgtcgatactcagcttgagccccggatgcataa

SEQ ID NO: 793 - DNA, 463 bp, Zea mays
  unsure (1)..(463): unsure at all n locations
ttaagtgactgagctgcagctttgacaaacnaaactctattctattattttaaaatctctcaaggggtagctgatccatttatcactttggcctttattttctccccctttggcatcaagcaccaaaacgggatcaatcttggcctgttaaccccattgcctcaccaaagtcttcaattaagagcaaatggcaataagatttcatgagatgaacttggaattagttaccctctcatcggagtgcagtggaagtctttcagggtccaagttcaccttttccctttcaatcctccttcgagactaaattatcaaacttaagcacaaggttagtctcaaagggtcaagttgtaacacatctccccctaaacatgtgcatcactttgcaacggacttgtgaggtccagggagtgttggtacaacttgagcaccacaataagcaacanaatgcagaatgaacctgatc

SEQ ID NO: 794 - DNA, 386 bp, Zea mays
cagcttattaagcacggaaacacgtgggaagctctcatcatgtccaaaatgtgatgaccacatcaagacccctggagttacttcatatggacctctcttgacccgttggctatttaagcatacgaggaaataagttcggcttggtataagtgaagaatatttccccttcacttgggtattctttttgcaagataaatctgaaacccaagggaacctggcgctttctaaggagagctaaaacgagttcggctccacgtgaaaagaaaggagcgaccatggtctgattcagaaacttcagtgacgagatcttgggaggaagaataagcacgagtctcgtcctaccacccagcaaatgtgcgtacagagaaacaggaccttataactgc

SEQ ID NO: 795 - DNA, 448 bp, Zea mays
  unsure (1)..(448): unsure at all n locations
agcttgacgctgtggtgtggaacgttgtctctcttgtattactcaccggtcgccgccgtccctggtacaccgccatgtctcctccaagtggcggtagcgaggcggcatcgttaagcatcgccgatgccccgatgggcatcgtgtcttcctctgctagggttagctgtgctggcatgctgggccaagtgaattatgatttggatccttccaagatgtcatggtgtaaggggaaagaaatggagtccttagggtatttctttgggtttgtgaccggngcacccgagcggagactattcctatttcgaacgataaagtcttggtctttgagagtttgtccttgtcggtcttcaccttccctaccataattttctgattgcgggcctcaacaattttcaaggtttaaattcatcacctgacaccggacgtggtggaggcttaatcaaatttg

SEQ ID NO: 796 - DNA, 407 bp, Zea mays
  unsure (1)..(407): unsure at all n locations
tgtggagtttgcgagaggaattgatctctttcgcgtgtcttgtattgaatgctatatctctctgaaggagtacaaccgtcgaaactcggatgccattgaatgtggggtggccnaccccaccaccntactcccaccctttacccatcccctctacccaccccctcacccttccccctcctctctccccccctctcaacacaactcacccctcctctcgccccaaatcttctcactccttctctccccctcactcctcatccccccccccccccctccccctcctcccctttctccccccccccccccctctccctccctctcccccgcccccccgctctcctcactccctcctccaccctcccccccacccctacccaacccccccctccccctcttcctccccccct

SEQ ID NO: 797 - DNA, 247 bp, Zea mays
ccaagctctcgggctggtatgttgacgctgtcaacggttggccagagacgggtttgcaaaacaaaccccgagcctccgcacagggcgagaggacgatcatggacagactctgcgtttttacatacgcccctacgtcgcctttccgcaaggaggagggggggagagcgccatgttaccctcgatgggcaccgaacatggtgtctccggtgagctggcagcgggtaatccgagtggacgttcgtgcccc

SEQ ID NO: 798 - DNA, 457 bp, Zea mays
tcagctccatctatgctatgcgatgcttttgagtcagtctattttccctcggcccttctggcagcttcctgactttcatgaatagcaatgggtccttgatccgaaggtatcttcatgccaaggtaagcacgatgaagaattgcttcgaaagcgttgaaggtgccacgaccaataattgcattgtaagggtattccatgccaacaatgtcaaacacaacttgctcggttctggtgttgttgatgaagccgaaggtcactggcatggtgatcttgcccagtgctacaatctgtcttcctccgaagccacagagagggtgtgtagcatcatgaatcttgtcttctggctcttgcatttgtctgaaggccttagcaaatataatatcagctgcactgcctgtatcaaccaaaacattgtggaccagaaatcctttgataacgcaagaaataaccatagcat

SEQ ID NO: 799 - DNA, 453 bp, Zea mays
  unsure (1)..(453): unsure at all n locations
agcttccctttaaccccgaaacgtgatatattcttcattggtgaaactttcaaatagacataatctcccactagaaaattcaagggttgtcgtcgcttgtctgcataactcttctatcgagcttgagcttcttttaaattatgaattattcgccgaactttctcttcggtctcttttaccatatcaggcctgaagaaacttctttcaccaggttcagaccaatttagcggagtacgacatcatcgtccatataaagcttcgaagggtaccatcttaatactttcttgatagctattattatatgagaactctgctaatggtaaacaatcatcccatttctatgggaattccagaacatatgctcgcaacatatcttcaagtattttgattaccctctcagtttgacaaccttgntngaggatgataggccgaactatggagcaacttggtacc

SEQ ID NO: 800 - DNA, 435 bp, Zea mays
  unsure (1)..(435): unsure at all n locations
agcttagtgcaatggttggcaactatggtttatttgaagggngtattgctgaagaatntaaatataaagagatatcagccttcacgagtgtatactttgcagaagaacacaatgtaaatgcacctacattaaggtataatgttgatcaagctggtccatgcagtaaactcaaaattttgtcattcgagggaaagacagttggagcatcaactgaatatcacattggacgtgaagaaaagttggatgcattactctacatgtatgaaaacatggaagagatgactccatacttcaagtaagcatagattttcaaaattgaagagcaacatgtgctcattactcctcgtaactctnttatttactntttttcaacagagagtacgaacgacagaataatggtanactgtcgacgaggntgtatgaaatcatgcttcg

SEQ ID NO: 801 - DNA, 414 bp, Zea mays
tgatagttgtttacaatatactttcctgcacaaattctgtataaacttttgtaatatacttatggaacaacttatgtcaatttgtacataccttgtaatatattttgtttctgctatctgcgtatgttgggggccttcggcttccgaaggtcctcaaaaacatgatttaacaatgtttctggagtataatgtgtgaataggtaacttcggattcgagtcggtaccacagtgggagaagcccaaagaatacgaaggttgacacagcgccgaagctgtaagcaggaaagcttcggcgtgatagcagaaaacgaaaccgacttaaagatgaaaaggctattcagacctcggtggattactataaaattactaccacatgtacacggcatggatgtaatttacatgggctgtgtcccg

SEQ ID NO: 802 - DNA, 347 bp, Zea mays
  unsure (1)..(347): unsure at all n locations
gattagcaggccgggatattgatgtccaagagaagatcacgaaattagctttcatacagctttgggtgtgttcaccattccaatgaccacttgtgcctgcacaaaggaagttgtttataaaattctgacctattttaagaaataaacacatttactgttagacatcaagacatattatgccaggaaaacaatggtatatacaggtgttcgaaaaataatgcttttaaataaacggttggagaacaatatcttcgtacaacagatagcgactcttaccgtaatagagttagctggctattattantacataaaacacaggtggtctcatccaaaatttctcacgtaag

SEQ ID NO: 803 - DNA, 401 bp, Zea mays
  unsure (1)..(401): unsure at all n locations
tgcacgggagtcaagctggtttacaagaaccgtatggcttttgggctcccaactctaaagaactgaagcttgcaaactaaacattaatgacacctatttagggccatggaaccatcactaacttcagtaattagctgctggtgttgccacaactgtatggaagaaaaccaataacagttgaggtaatgtctacagttgctagtaagttctttattaacatgaaccaaatatgctttatgtcangtggcactggattcaggaattgccaaatgtgtagctttctctagtttgcttcatacttttgcagactatgttcagtaactacattgtagagtgctaactcctatccgaacacaggacgtagacggctgaatcggaccacaaagatggatcctgagcag

SEQ ID NO: 804 - DNA, 415 bp, Zea mays
agcttcggcattggcacaaccgttgttttttggctgaagagaagaaggttgttgaccctgcattggttgggttttatgaagctatggagaagacaaacacagagaaaatcaccaatgaaatgctggctgggttgtttgaagattccagcgatagcgaaagttttgatttggaaagtggaaacgaagatgtcgaagatcggccctggcggccgagtcataccatcttcggaaagtcatccatcaagcagagtcaaattgatgctatgaaagggagatatttccacgatatttctattgtgagggctggaggagatagcaccgttgtgcgcccaagtagacgaagtttgttgttacaggagctttatgaaggcagggcttcaatttcccttgagtaaatttctagttaaaattctga

SEQ ID NO: 805 - DNA, 442 bp, Zea mays
  unsure (1)..(442): unsure at all n locations
agcttgtggaggttcttcatccctttatgttctaagcggcgatgccacagccagcccatgcaagtcttagctattaagcatgcatctagaccggccttctcttttgcaaaatcaactaaataaagtttgccgtctaatacacccttaaatgctagtgaaccatcacttcttctaaagacagacacatctacatttgtaaatagacagttataccccatgttgcataattgactaacagatagcaaattatatccaagagactctactaaaaacacattagagatagagtgctcattagaaattgcaattttacctaacccttttaccttgccttgattcccatcaccgaatataattgaatcttgggaatctttattcttgacgtaggaggtgaacatcttcttcntccccgtcatatggtttgtgcatccgctatcaataa

SEQ ID NO: 806 - DNA, 391 bp, Zea mays
  unsure (1)..(391): unsure at all n locations
agcttgaagcgttcgactgcgcattctttattcgctggcagattaagactcgcatgtggctcactgacctaaaattattttggttagtgacgtcggctgttccccaggttgcatcagatgattctgatgatgcagcgaaggccgccgcactagtggagaaggccaagtgggacgaagccaatgaggcatgcttgtctcgtctgctgaacgtcttgtcgaaccgcttatttgacgtgtactctggttntacctctgctaagagtctatggactgaacttgagaacgagttctctgaagttgacaatggcaatgagtcattcacagcggataactacctcaaccataaaatggctgacggaaggtgataggatcacgatgcccaagagggggg

SEQ ID NO: 807 - DNA, 382 bp, Zea mays
accttgcattacggacctataaaactccgctctgcgtaagcttgacatgaaatggacaactgctggtacttataccccacaaccctaatcttctagtaatgcgtgccctaagaacctcagttctggctccaaaaaccttacttctctagagtcccgtgaaggaaaattgtattccagacctaagataatatacttttattatctttgcattttcataagcattacatgagcattcatggttatatatgtgatatatatagaaaacgaagaagtagatgttgaagaagcaagagctacaccaccaccacctaaagacccaccggccgggaactgcttttattttgacatttgtggagcagagcccgacttccctataacacaa

SEQ ID NO: 808 - DNA, 434 bp, Zea mays
  unsure (1)..(434): unsure at all n locations
agctttantagtgcacccataggacccatttactgtgtatctgttatcctttgattcacgcaacaggacctgcatgacttangccatgaagccaatccatgtgtccgggtcccctgtgttacagttccgaaaactatggcacccgtctcagagtggtggagcatgtatgcttaggggtctaaaccaggctaagcggttacacaactccggaccaccccaggggacgtgtgtccgttgtctaaaactgccccccaggctatcggaccctcttatcgagggatcccaaactgctcgtctggctactcaattcggatgcccatataccatcaagggtgggaactgtatgggtggttcagataaaatatgatgttcgtaagttgaagcataataagaccaccacataaacagatctggcgacaaatccttttcttata

SEQ ID NO: 809 - DNA, 449 bp, Zea mays
  unsure (1)..(449): unsure at all n locations
agcttaagcgtgccgcgtatctgtgcttgatcccttccggtgaggtgatgactgcggcagcgcctgcccccgcatggcaccatgcgccgtcgcagtggattgtccaaaccttctctgcggacgggtccggctgtgttattggcccggtccagtcgacgacgaagtctgctaggacttgtgacttgatggctgtcctgcgctcgaaagtgatgtggtagccggagagttcggccgcccatttggcgatccgtaccgatgcctccgggtttctgaataattcgcgaagtcccctatctgaggtgacgcggaccttgaatgcttcaaaatagtggcgcaatttgcgcgaagacataacaactgcataggcaatcttttccagttccgtcatattacantttgatggtgtaagcacttcagatacgtaataaactatgcactgtctgatcacg

SEQ ID NO: 810 - DNA, 396 bp, Zea mays
tgttgagacatgagagaacttaagtccacagcataatccattgaacctaatggatacactgcttagagatagaatcgataaaatggtgtcctgattattggaggaagagcctgagatcgacccgaattgagagatttaggccagatccacatccgatacttgagaacgggttatagcagataaccagataaccgggccgaatcattaaaggatccacggattcggattgataagccacaacatgattcacaaggaaagagatcaccagatccatgtgaaaggagaggtaggcaaacaagatcagccaggatgattaacagaaatgctatgaagttttacgagcacggatttatggaaagaaacatggccttgatagggtttgcgcaactagacacc

SEQ ID NO: 811 - DNA, 412 bp, Zea mays
  unsure (1)..(412): unsure at all n locations
agcttgataaacttattccttcttagaggttatatttattttattangnccntntctagaagtggtgaataggacaaaggatatatttgtcttggtttttggccagattctagctgccaaacatttatatgagaatcgtttgtgtgaaaagcgttcaaatcaacgtgaattcataatttgccgagtcgtcggacgggggaatccgcctcttcctaaaacctaaacatgcacacctctccatctttcttcgcaagcaagtcctacaatgtccagatcctggtaacagctatattattcagaaatctagtttttcataaaaactcttaaaaaagctatcctaaacatgtccaaaattgcattacgtcgtgatttaaaagatgacgcangagccacaacctgttgcatgaggagc

SEQ ID NO: 812 - DNA, 373 bp, Zea mays
  unsure (1)..(373): unsure at all n locations
ccagcggacgacaacggcgtcggcgctcccttcctcgcccatgtcggcgtcgacgaccgtcagcggaccgcgctgctggaagcccatgaggttcggacccttcccatagcttactgcgatcctgcacgctnctccagatcttggcctgtatatttttatttgcatgaactctatatatcatgcatcacgaatatgtcgagtcgactattcttatatccagtgccaacatatgttccatgtacaccttataagtgaccattgcagcctatgcatgccacatcaatcctggagttcctgcaaacatgcaaagaatgaggttcaaataccactggcagaacaaatattgccagcttgcagcttattaaagatatat

SEQ ID NO: 813 - DNA, 409 bp, Zea mays
agcttaccacatttgaagcatgagcgcttttctttgtcttggtcttgcttggctgtcccttgcgacctttaagtgccgtcttgaagcgcttaatgatgagggccatctcctcattatttagcccggccgcctcaacttgcgccaccttgcttggtagcgcctccttgctcctcgttgccttgagagcaatgggttgaggctcgttgatcggaccattcaaggcgtcgtccacgtacctcgcctccttgatcatcattcgcccgctaacgaatttcccgagaacttcttcgggcgacatcttggtgtacctaggattttcacgtatattgtttaccaaatgaggatcaagaatggtaaatgaccttagcattaggcggacgacgtcatggtccgtccatcgcgtgctccc

SEQ ID NO: 814 - DNA, 444 bp, Zea mays
  unsure (1)..(444): unsure at all n locations
agctntaagctctttgaaaataaaattactttacccagttttaacaaagatgcaagaatgagtaattgagaagttaaactaggtatgaagcagggataatgcgtggacatgctttctcttccttttaaacaaaatatgcaaggaatgtataggaaaggaagatttatgtacaagttagaatgaaaaagtaaattgttttaaccttttgtaccttcacttagagatgctctcatcattgtgctttgtccttagtcttagtcacttaagacctatactcaacacaatacatgaaaatattttgcacaagagagagttctacaactagtgatcctttgtaagtcattggttagcatatatcaaatggatcacaaggtgcataattgtatcatgaattctctttttaacttagtgcacatcaagagagatatcgattgagaatacatg

SEQ ID NO: 815 - DNA, 317 bp, Zea mays
  unsure (1)..(317): unsure at all n locations
tggacgtgaaaatgccttcctaatggacaatcaagaagagtctatttgagcacactccggctttgaagatagtgagtatnctaaccatgtctataaactctctaaggcgctttatgggttcaagcaagccccaagagcatggtatgaatgccttagggatttccttattactaatggattcaaagtcggaaaggccgatcctactctattcactaaaactctggaaaatgacttgtttgattgccaaatttatgttgatgatattatattggcgcctactaacgagtctacatgtgaaaattttactaggatcatga

SEQ ID NO: 816 - DNA, 319 bp, Zea mays
tgccctcaagtacgccatgatgagagtgctaagagactctttggaggaagacttagatgatatggctagagatacatctattagtgagaagcgtttcataggaggagatctcaatgcgcatgtatgtacaacaagtgtaagtttcgatgcgggtcatagagggtttggctatggtagtaggaatcaaagggtgaggaggcttgattttgtgatagcttttgacccgtgatagccaacactttcttaagaagagagaatccatttatgacacatagagtgtcaacctatagtcaattgatttgtctccaaaagagagata

SEQ ID NO: 817 - DNA, 369 bp, Zea mays
tggagggtatcgtaacacattcctgacccccgacaatgttctcggagacgcccttgatggagtctgggacgcttgcgctggtgtgcgctgccgggcggcgtgcacagcaggagtacttggtactgggcgaccaggaacctgcggtgtggaggaagtaacttctccctccaccgcaaagtctaccgaagtctcggcgtggcgctcaatgatctgcaccatcattcttgggcaagggatcaagccaaaacctaatgcctacgcccctacctggcgcgccaaatgtgaaagagtatatctccggccgggtggcggagtgcacccgccctaaatcctgagatgaggaggggcttacgagtttcgcttgatcat

SEQ ID NO: 818 - DNA, 436 bp, Zea mays
  unsure (1)..(436): unsure at all n locations
agctntaagctctttgacaataagattattttatcctagntttaacaaagatgcataaatgcaggaatgaaatgtttgacaggttaaattaggtatgaagcagggaaaaatgcatggacatgctttctcttccttttatacaagatatgtaaataaagtatagaaatggaagatttaggtacaagtttgaatcaaaggaagtagttttacccttttgtaccttcacatagagatgctctcttcattgtgcttgtccttagtcttagttgattaagaccaatacttaagacaatatatggaaatattttgcacaagagagagttctacaactagtgatccttttctaagtcattatttagcatatatcanaatggatcacanaatgcataaatgaatcatgaattctccttntaacttagtgcatatcaagatagat

SEQ ID NO: 819 - DNA, 346 bp, Zea mays
atggctcacgataacgagggctatattttatatcctactagttatcccaagcataaaattaggagaattcattctaggaagtctcattctggttctcatcatgcttttatgtataaaaatgaggcttctagctctaggcaatcaacccatgttaaattgcctaagaagaaaactcctactgcatcaaatgaacccagtgtttcatttaagacttttgatgcttcttatgttttaactaacaaatcaggcaaagtagttgccaaatatgttgggggcaaacacaagggctacaagacttgtgtttgggtacccaaggtgcttgtttctaacgtgaaatgacccaaca

SEQ ID NO: 820 - DNA, 384 bp, Zea mays
agcttgagaaggttcttcatccttattgttgctttctgagatgccatagccagcccatgctagtcttagcgatgaagcatgcctctagaccgaccttctcttttgtcaaatcaactaaataaagtttgctgtctaatacacccttaaaagctaatgaaccatcacttcttctaaagacagacacatctacatttgtgaatagacaattatatcccattttgcataattgactaacagataacaagttatatccaagagactcaactaaaaacacattagatatagagtgctctgatgaaaaagcgattttaactaacccttttaccttgccttggattccatcaccgaatattatggaatcatgggaatccttgtttttacgta

SEQ ID NO: 821 - DNA, 438 bp, Zea mays
  unsure (1)..(438): unsure at all n locations
agcttgtgagcaatacaagttcagtattggttaaatctgattcggctgatcagccgaagcctatgctcttgtgtgaggatatagcagagcagaaggtgctcttgggatctcaactatccaaagagcaagagaaaaccttgataaggtatttgttcaacaacaaaaatgtttttgcttggtcagctaatgatctttgcggagtcaacagggatgttattgaacactcgctcaatgttgatccatccttcagacccagaaaacagaggcttcggaagatgtttgatgacaaggccgaaggtgctcgaaatgaagtgaaaagactcctcagtgccggagttatcagagtggtaaaatacccataatggttggctaacacttgtatgttaaagaaggccaatggcanatggagaatgtgtatcgattntactgatctcaata

SEQ ID NO: 822 - DNA, 465 bp, Zea mays
  unsure (1)..(465): unsure at all n locations
tatcgtcacggcaactccattctacctcgacgtcatctttatcggcggagagtgcaatcgtnccccatgttcgacgacgaaccaaccgtgcctgtggaagaacctcctcagcgggaagctcgtcgatgaaggaaccgacgccataatgcccggcgacatcatgaagtccgagaacgagacccggcgcaacctgtatctcgagacgagatctcggaggtgggagaaactccagatgaatgagtcttcagggaaatgaggaactcccgccgacgtgatcgtcggtaagctcaagagcaagccgagcaggaggcaagacagcgccgagagaaccctctcnttggacgaaacctgaaccccgacttcacccgagccatgaacacaccaagcgaggtcggaggagtgttggccccgatagctgatggccttccncgaactccagacgccgagggctatcggcgtcagctc

SEQ ID NO: 823 - DNA, 424 bp, Zea mays
  unsure (1)..(424): unsure at all n locations
agcttcaactttaaggactctttttcttcttttccgaagaaaagatgcctcaagacaaaaaagttgttgctgagacgaatgtgagcgaagaggagaagctccttgagaagaagactgctggatttgttgaatcaataggaaagacaaatacagaaaagattactaaggagattctagaaggcttatctgaagatactgatgacagcgacagttatgatgtgaaaagtggaggcgaagactctgaagattggccctggcgaccaagtcatgcaatcttcgggaaatcgactatcaaacagagtcatcttgataatatgagaggaaggtattttcgagatatgtctattgtgagggctgacgcagacagggctgttcctgttcccgaagaanacgaagttgtgatctaccgaagcttcttcaaagc

SEQ ID NO: 824 - DNA, 306 bp, Zea mays
ggcgtagcccagtctttcaacgaacaccatcacgtgtgaatggctaaaaaccgatactcgccccaagaaccaagagctcccgcagcaaactcttgatgaggcacatcttaatcgctattcaattcattccggaagcactaacatgtatcacgacttaaagcaacattactggtggacaaagatgaagattgaaattgcacgctatgtggctaactgtgacacttgccgacgtcgcacggccatacacatgaaaactgatggtccattacaactctttgccatcccaacatggcaatgggaagacat

SEQ ID NO: 825 - DNA, 178 bp, Zea mays
  unsure (1)..(178): unsure at all n locations
agatggatcccaacgttgagattgaagaatgtgtcaccatgatacaattcaatgagctcaaacaaaccatanaagccaagcaagatctgttggcacaagatcttcagaccctattggctgaaatcagaggtcatcgtcgactccttgatggtgtaagaaaccatgatgaaattgggga

SEQ ID NO: 826 - DNA, 429 bp, Zea mays
  unsure (1)..(429): unsure at all n locations
tacccatgatgaggcatgtgaccagttaaagggtcctctgtcagcaggcctacatcgacaaggtccttaattgactcaaacggagacactattctgatactctcttctcgtgtaagtcacccgcccggtctcagctttatcatttcaacccanagtttggtacctgacagaggtacatcttttccgatgttgaacccatcatggccatgatggatccaccatcaagttttatttttaaaaacattccatcccgcttgaagcatcatattttgtcaaaacaagacattttgttttctcgagcaagactaagcatcagaaaaatcttttcataaaacaggtgatcaaggaaaggtaatcaaacttccaaggaaggaaatgcatcaatntgtttagcacacaactcctatcacctaatgcatcaagcaagtg

SEQ ID NO: 827 - DNA, 421 bp, Zea mays
  unsure (1)..(421): unsure at all n locations
agctngcattgcatgtttaaacttcnagttttgttttatgtgctngcctaacctagttgagataaccgccaacaaagcgagtgaaaaagcttaactcggatcaaacttgacaagtcttagaatttaagcttttagcacttaaattcttactttttatgcaattggtggttcttgaaatgtgcatgaagtactgcacttagggggagtattcaaaactcaaatcactcatgaaaacccctagtgcaaacctaaatgcaaatttcactatatgcctattttctctaaaaattatctagcctatggcaaaatattttgaaaaatatgagaaaatatatgagggtgccaatacctgtcccaacaagtgttattttgtgtgtttataagttgggacttggatttggtgggaactanatataacatt

SEQ ID NO: 828 - DNA, 420 bp, Zea mays
  unsure (1)..(420): unsure at all n locations
tatgccaaattctacttnacaagctaagtactttctcctgaatctagattctgctaatctagagcatttacttgctctacactaccttcatcttagccagctctagtctcccattgttatctacgatgaagggcgaagatccaaccttcatatctgaaaactatggcgatccgaatcgattaatacccagcctgggatctccaaccacacgacatatgtagcacttaaccctcgcatatgtcaactcacactcgggtttttcaagaccagaacgggttcacgagacctgagagcacagtaacccaccattcacccacttgctaggtggcgacacgtnactcccgcatctctacactccagcgcgtgcgagtggtctagtattggtccgtcgacgaaagcttaccatgacatgcatgtgtt

SEQ ID NO: 829 - DNA, 441 bp, Zea mays
  unsure (1)..(441): unsure at all n locations
cagctgcagcttactttttgattttacaaagaattttttttttcttatgcatgcttaatggctaagacttgcatgggctggctgtggcatcgccgcttagcacatgtggggatgaagaacctccacaagcttctaaagggagaacacgtgataagtctaaccaatgttcacttcgaaaaggataaaccttgtgcagcttgtcaagcaaggaaacaggtgggaggctctcatcacaccaaaagtgtgatgacaacatcaagacccctggagctgctacatatggacctcttcggacccatcgcctatctaagcataagaggaagtaagtatggtttagttattgttgatgactnttcccgcttcacttgngtgttctttttgcaggataagtctgaaacccaaggaaccctcaagcgctttctcaagagagctcaaaatgag

SEQ ID NO: 830 - DNA, 360 bp, Zea mays
agcttatgaagattcttatcccacatgttctattctgcggtgccagagccaacctatgttagtcctagcaattaagcaagtgtcgagttcagctctatcaaaatctaccaagtatagctgaccctccaacactcccttaaatgctattgaatcatcacttcttctaaagacagtgacacctacatcagtgaaaagacagttgtaacccatattgcataattgagatacagaaagcaaattgtgatctaatgaatctacaagaaaaacattggaaatagaatggtcaggagatataacaattttacccaatccttggaccaaaccttggattccatccccgaatgggaatgctcgttgggg

SEQ ID NO: 831 - DNA, 416 bp, Zea mays
  unsure (1)..(416): unsure at all n locations
agcttaaggaatgtgttattcggaccttttttatttctatccttggagattntttcacggatcacgctcgttacaaaaaacgatctaccaccgcgaaggggctactgttgggggtctgattcgtcgccgaaggtcctgtcagaattaccttcagaagattagcatagaagtaacgccgaagctaccatccagggagcttcggcataacgacgcgccttgagacaaagggttgcaccgacttaaatatgaaaagaccgatcggcccatgataatttgtgtcatgattgtcactagcttgaaaggacataaatgtaattttgaccgggctgcgtgccgtgcctataaataggtgaacagtaccctcgtactgttcacgctggctggtattcgctcgtgcgtcacgcttgaacctctac

SEQ ID NO: 832 - DNA, 451 bp, Zea mays
gcaacaacacttaccggcacagtatctgtttattctacccgtaacatggccatttgcgtgttggggactaagcatgagtgcacccttcaagaccgctaaggagggtatacctccctgttggccgccattgattcattcaccccatggatagagtacaaactcactgcttctctaactttagcccatgtagtggaaattatacaagacataatattcacgtttgggatacccaatatgatcgtaactgacctaggatccaacttcactggctctgaactctttgaattctgcgaacaacggaacctccagatcaagtatgcatcagtagcacacccaagagctaatggcccagtcgatacggctaatggtatgatgctggaagcactaaggaagacagtttcgacacgactgaacagttcacaggaaagtggattagagagctaccttatgt

SEQ ID NO: 833 - DNA, 439 bp, Zea mays
agcttcggcctcgccgatgatcctttcaattttatcttccggatcttccagtacgaagttgccttcattcgaatatgcgtcaacgctggcgaaactagtcttaattgtttccacacatttcatggatttttcataatatctttcttttgaagaccgaagttctacaattgttttctcccaatgatttttccaataatcgctggcgtctcggtcagcttcgacagttgcacactttaatttcgcttcagccagctgtttctgaagattttcaatttcgcacttctgggcttcagcttgggccttggaaatagcttctgcttcttttattttattaagcaatgagtgtaatattttatctttctcaagaccttcgttccttagctcaatcacttcggaacgaaggttatttcacgccatggtacatacctcgtcttcagcg

SEQ ID NO: 834 - DNA, 374 bp, Zea mays
  unsure (1)..(374): unsure at all n locations
tcngaacactacnacttcattctctcccgggtgtggactatttttcntcccttcgtcggccctcacaacggacaaatcccggaaatacccttctctcatgttaacaagacgatcctctttgatagctgacctaccgacaactgagcggctcgcgcgccagggaccatcttcggagtcttcaccaccgctgtccacatcatacactgtcgctgtcaccagtatcttcacacaaacctctcagaatcccctcggcgatttttctcgtgctgcgcttcgacatcgctacaagacaccccaagttcctctcttcatcaagactcagcttcatctcagcagcagcctctctagcagcttcagacatcttcgcgaacact

SEQ ID NO: 835 - DNA, 442 bp, Zea mays
tgaagccatggcaagtagcataggctaataatatacgaattgactcaagcctagctacgggtgcatagcgttcacgaaaatccaaaccttcaacttgggagtatcccttggccacaagtcgagctttgttccttgtcaccacaccatgctcatcttgcttgttgcggaagacccatttggttcctacaacattttgattaggacgtggaactaaatgccatacctcgtttctagtgaagttgttgagctcctcttgcattgccaccacccaatccgaatcttgaagcgcttcctctaccctgtgtggctcaatagaggaaacaaaagagtaatgctcacaaaaatgtgcaacacgagatctagtggttacccccttatgaatgtcgccgaggatggtgtcgacggggtgatctcgttggattgcttggcggactcttgggtg

SEQ ID NO: 836 - DNA, 406 bp, Zea mays
agctttgccttgggcagactaattctagattagttcaacacacaatgggagtggagagatggcgatagtagcgtgtaccctccgtggcaagagattggacggtggagtatctgtgctctcggttggcgtgaacccgatctggtcttaagaaccttggtggctatttgacatatgcaaggttaagtgctacatatgtcgtgtgattggagatccttagctgagtgttaatcgatacggatcaccgttacttctcgtacatgaagacttggtcactgacttacacgtagcattccagtgaacttaaagggaatataaaaggatggctagtatacgccaagtgtttgaactatgggagaaagaactctagattcatgtaatgtcttaacttgctaataaactggatttt

SEQ ID NO: 837 - DNA, 406 bp, Zea mays
  unsure (1)..(406): unsure at all n locations
ancttgccataattgtttgaatattattattatgttaaccactgcaccaatactagtaatgccagacatccacaagggatttgatgtgtattgcgatgcatcacaccttggacttggatgtgtgctaatgcaagaaggaagggagattgcttatgcttcatgacagttgatgaaacatgagatgaattatcatacacatgatttgtaactaacggccgtagtgcatgctttgaagatttggaggcactatatgattggaaacaagtgcaaaatcttcacggatcacaaaagcctgatatatatatccactcagaaggaactcaacctcaaacagagaagatgcttgagttgattaaagattatgatttgaaaaacaatatccccccggaaagccaatttttaactg

SEQ ID NO: 838 - DNA, 290 bp, Zea mays
taaacatgccgttagaccggcctctctctttgcaaaatcaactaaatcaagtctcgccatctaatacacccttaaaggataatgaaccactcacttctcttaaagacagacacatctacattacggaatacacagctataacccatattgcacaattgactaacccatagtaaattgtatccaagagactcaactaaaaacacattacatatagagtgctcattggagaatgaattttacctaaccctttcaccttgccttggttcccatcaccgaatattattgaatct

SEQ ID NO: 839 - DNA, 419 bp, Zea mays
  unsure (1)..(419): unsure at all n locations
gctngtacaacaacggcacctcctctttattttgtgtaacattaggattgttcagcaaataagaatagtacttagccttgngctcaagctcaaaaccaggaagactattcacagcttcaaacaaacctggtggcaacgctctcttggatgctgcatctcgtatagcaccagctatggtgtgagtaccgagttcaaaggcgtgaaccaaaggatcaactatattttcatccttcttagctctcttggagggcctattgcctgaacccgctgtgtcttctttgtcaatggaagtactggatggtgttccaacattcatctcatcctcttcaacatcaacagcaagaggttcacttgaggtcttcacaaattgacctcgggcaacactatcaccgaagatggagctagatttcatagtatgg

SEQ ID NO: 840 - DNA, 344 bp, Zea mays
  unsure (1)..(344): unsure at all n locations
tttgtgaccacctcacacgggagtaggtttgcgagaaccgaacctccggaaaacaaatccttgtgcctcatccgctttacttgcttgcgacttgttctactccctcttaccgactcgtttatatttctaacgctaacccggcttgtagctgtgattatttgtgagaatttcagtttcgccctattcacaccccctctaggcgactataaccttcattgtcctctactcaacacacatccggctatcacaacccaacgatttagtatacctatgcatctcatgcctaccatgtctaatgtaccaatcgatgagctgagatccacaccacatctntctctcccatg

SEQ ID NO: 841 - DNA, 351 bp, Zea mays
  unsure (1)..(351): unsure at all n locations
agcttctaaagggagaacatgagaaggttttacttacgttcaatncgaaaaagatagaccttgtgcagcttgtcaagcaggtaaacaagtgggaggagcgcatcacagcaagaatgtgatgaccactttaagacccctggagctgctgcatatggacctcttcggacccgtcgcctatctgagcataggaggaagtaagtatggcctagttattgttgatgactattcccgcttcacttgggtgttctttttgcaggataagtctgaaacccaagggaccctcaagcgctttctcaggagagctcaaaatgagtttgagctcaagatgaagaaaataatgagcgacaacgg

SEQ ID NO: 842 - DNA, 444 bp, Zea mays
tgactcacgactctgcatacttttaacatatattccattactaccacaccctataaatactcgctacttaactatcttaactaaatggcaattacactttcaatcctcaccattatggactcgacacatatatccgccattgaatgtgctacctctcggatcaaactctaacaccatcttcacaaatcaacggttgcaggagtggcaataaagatgttcttatacaactcgaacatatcaacacagattagggatagcacgagcaaccgtcattatgaaaatgtgaaacgcttacatttatttttacacattacttggaactgactcgaataaatgacataatacattttattactccatcaatcagcaagacgtccacatcctgagttcttaacttcctcttcacctctgtgaatagatacagccatcccgaggggcctatcg

SEQ ID NO: 843 - DNA, 320 bp, Zea mays
  unsure (1)..(320): unsure at all n locations
agctntaagaactatgcccgtatccaatctttctgtgtttgaactataagagcttgccagatgcctccgttcctgtcgaccacgaccagcacccaacataagacttccctaggtatttagccaagaccagaaccatgatagttctcatggtagcacttgttacccgggtgggcactccatgttccatttaatatgcaataatcttgttaaccatcgggttacaacaataagtaatctaccatttggacataaaatcaaacaggaggactgcataagttaagtgagcaatacatactactgatagacataatccacgttaa

SEQ ID NO: 844 - DNA, 408 bp, Zea mays
tatcctttgcctcatattgatgttctttttgaccaattggtccgggcccacgtgttttccaagatagaccttcgctttggctaccatcagatcaagatacgagccagtgatattctgaagacgacattctcaaccagatatgggctatatgaattcttggtgatgtcattcgggctcacaaatgcaccagcatatttcatgtatctgatgaattcagttttcatgccggaattggacaagttcgtggtggtttttatcgatgatattctggtgtactcaaagaacgaagaagaacatgccgcgcatttgcatgtagtgcttcaacgtctgcgagagcaccacctttatgcccagttatccaagtgtgaattttggctaaaggaaatcaaattcttgggtcacactatc

SEQ ID NO: 845 - DNA, 297 bp, Zea mays
  unsure (1)..(297): unsure at all n locations
tgcaagcatgcgngcttctaaatggagaacacattcaggcttaacgtgttttcagcggagaaacacacggcctgtccgcttgtcaagcatgaggcacattggctcccatcatcttcactagaacatcatgacgatcgacaggccgttagagctactccacatggacctatgaggcctgatcgcttacataagcatacgcgggagcaattattgactagcaattgtggccgagtagtctcgcttgacttgggtattctttttgcattacaaatccctcacccaagagaccttataggg

SEQ ID NO: 846 - DNA, 453 bp, Zea mays
  unsure (1)..(453): unsure at all n locations
agcttgacatcaccaatgcctttgactcgttctcttggtcctttntaattgatgtcatgcagcagattgggtttggacagatctggagggacatggtttgtggtctccttgcttcatccaccacacaagtcatgctcaacgggtttcctggtcaacaaattcagcatataagggggcttagacaaggggatccgctgtcaccaatgctgttcatattggtcatggatgttcttggacacttatttataaaggcagaagaggcaagtttattgcagcagcttgcagcaagaagacaacttcatagagtatccatttatgcagatgatgtagccctcttcttacaccctacggtggatgaaatctccatcactcttgatatcttgcagctttttggcagtgcctctggtctaaaactaatgtgcagaaatccaatgtctaccncatacaagtgtc

SEQ ID NO: 847 - DNA, 445 bp, Zea mays
tgcacccatgcaagctcgccaatacctgtcgaagcaacagttcatgttatttcagtagctacaaaccataccagtaacttggtctttcgcatgctggggactggatatgaatggacccttcaataaagctcaaggaggatacacccatgtattggtggcaattgacatattcactaaatggatagagttccatgccattgcctctttaacctctgctaaagcccgggaattcatacaaagcataatattcatatttgggataccgaacagtatcatcactgacttgggatccaacttcaccagctcagaattctttgacttctgcgagcaaaaaagcattcagatcaagtttgcatctgtagcccatacgagagccaacgggcatgttgagcgatctaacggaatgatataggaggcacttagaataagggtttttgataaaatg

SEQ ID NO: 848 - DNA, 234 bp, Zea mays
  unsure (1)..(234): unsure at all n locations
agcttctaaacctcttcaagtgctttaattatattagtgatcattagngaatagtaacttgatagagtgtgactcgtgcttgatctgttgctcttgttgcttggctttttaaccatgctttcttcatctccttctaaactctctagtgacttgtaaagctagcaagagacacctaagtgtgtggtggtccttgcggggtcttagtgatccttgacattaagaagaagcactcaa

SEQ ID NO: 849 - DNA, 355 bp, Zea mays
aaagccttcaatgtccatatcatctatgtaacggaccacactccgctcatctgaaacaacttaaagaacttaacccactcagatcagactacatgatcagagggacctaacatcccattcgccacatgatactcatcaagcatctatcttatgggaaaaacatgaccaacagaattgcccataacttttcactcaccccaataatggaatcaccaatgcagtcttacccaacatggtaagtatcatcactagaaaagttataacatacgcaacactccgtatgggaggatcgatgtacaatacacctcatatgaaatgtcttgagaacctaccaatatccatcactatcacattg

SEQ ID NO: 850 - DNA, 385 bp, Zea mays
  unsure (1)..(385): unsure at all n locations
ncaagctgtgaaggctcttcatcctcttangttcntttcggcgangccacagccagcccatgctagtcttagctattaagcatgcatctagaccgacctcttcttttgcaaaatcaactaaataaagtttgtcgtctaatacacccttaaaagctagtgaaccatcacttcttctaaagacagacacgtctacatttgtaaatagacagttatatcccatgtgacataattgactaacagatagcaaattatatccaagactctccactaaaaacacattagagatagaatgctcattagaaattggcaatttacctaaccctcttacctcgccttgattcccatcaccgaatataattgaatcctgggaattcttattcttgac

SEQ ID NO: 851 - DNA, 436 bp, Zea mays
  unsure (1)..(436): unsure at all n locations
ttagagtcacctgcggcatgaagcttgccccaggtacattggttcttttttggttcttagcaangaggaccagtggcatatcgacttcagctccccgaaacattgtctgctgtgcataatgtgttccacgtgtcacaattgaagaagtgtcttcgggttcccgatcgaaccattgaagtgactgatgttgttctggaaccagatttaacatactcggaacattctattcgagttctggatcaaaaggacagggttacccggagaaaaactctcaagttttataagatacagtggaaccagcattctgaagatgaggctacatgggaaactcaagacttcttgaacaagaatgtcccaggctttctagtctcattgtaattgtaaagtctggatagctgttgtaataaagaagtgactcccacatcacccctgtctt

SEQ ID NO: 852 - DNA, 367 bp, Zea mays
agcttcttaccggcttaagatgacttcgttcttcgtcacccgccattttccgcacgccatttacccaaatctgggtcataaatctattcccgatgcttcaagctatgcttggaatatctatcagatctgatgatgataagctgaagttgggcctattaacaatttttccatgcgtgcagccaaccttcagaaaagcggtagctgtgccccgagaagctaccagggcgcagaagtcagcatggccaccaataacttcgtcaagagcgtcaacctcgccttcaatatattctaatgtgctgggcaagttttcagctgaaggtgtaaatttttcagggctggctccgatagaatgaaacacatccttcag

SEQ ID NO: 853 - DNA, 336 bp, Zea mays
  unsure (1)..(336): unsure at all n locations
agcttgtggaggttcttcatcccttcatgtgctaagcggcgangccacaaccagaccatgcaaggcttagccattaagcatgcatctagaccggccttttcttttgcaaaatcaactaagtaaagcttgccgtctaaatcacccttaaaagatagtgaaccatcacatcttctaaagacagacacatctacatttgtgagataacaattatatcccatattacataattgactaacagatagtaaattatatccaagagactctcctaaaaacaaattagagatagagtgctcattggagattgcaattttacctagcccttttaccttgccttga

SEQ ID NO: 854 - DNA, 464 bp, Zea mays
  unsure (1)..(464): unsure at all n locations
cccggaccttaagcaccgcggctgcagcttctttggatcaataccttcatgttttctganaggaaatcaattaaccgctcggtccttttgaatctccaaactgattttgaacacattttctttaaaacttcaatatcaataaaacaccgctcccgccgacggtgcggggacagacataaaagcaggcagcgagagacatcgccacaccgagctgttaattgatttttccatcagaactgcgagcgacgtgtgctcgaacccccatctggcgtaccagcgatggcagagagtgcccttctgtttccttgtttttatttttattcgatttccagttcggccgggtgcggactcgtttgctcaatatttttttagtggcgggttagttgagttgagggtgccggtcaaaacgcgctttgcgtgtccagatctgcctcaccggtcagtgacagggaaccagggttcgc

SEQ ID NO: 855 - DNA, 451 bp, Zea mays
  unsure (1)..(451): unsure at all n locations
agcttgtcctcaaaggattgctcccccttatgagttattttttttagaaagaatttctctccctctttgtgagatgaagaaatactccccctgacagagatcttctacttaagaaaaagcatgtgaaaattagaggtgcaagacatgatttgaatagactaacttcccttatgcataggtaacaaaatatgagttaaccacttatgcatttttagcaacatggaagtatatgatatgaaatatagtctaatcaaatattgaagaagacaggtaaatgatactaaatgtagtctcaaagataccgattgaaagtcaatgacgagcttgtgagacatgagagttcttggagatnttgcagtggaagtttgttgtcattctctgnggacctcattttccttataatgagactatcacatgaaataaacttaanaagatgttagtctcatagtct

SEQ ID NO: 856 - DNA, 306 bp, Zea mays
  unsure (1)..(306): unsure at all n locations
cttgccgcttaacacacccttacaagccagtgaaacatcacttnttctaaagacagaccactcacatctcgaactagaaagttatatcccatatcgcataattgacacaaagattaccaatgatattcaagagactttactaaaaacacattaaagatagagggctcacttgacactcgcattctacctaaccttcttaccttgccttgattcccatcaacgaatactatcgactctgtgaatcttctttttaccgaggaggaaacatcctcttccccccgaatatggctgtgactcaccgccata

SEQ ID NO: 857 - DNA, 460 bp, Zea mays
  unsure (1)..(460): unsure at all n locations
ttaagcacctgcggcatgcaagcttctaaagggagaacacatnttgggatcttcttatgttcattttgagaaagacaggacttgtagcgcatgtcaagcacggaagcaagttggtgttcatcatccacacaagaacattatgacaactgacaggccacttgagctcctacacatagacctattcggttcgatagcttacataagcatcggcgcgagtaagtactgtctagttattgtggatgactattctcgcttcacttgggtgttctttttgcaggaaaaatctcatacccaatagaccttaaagggattcttgagacgggctcaaaacgagttcggcttaaggatcaagaaaataagaagcgacaatgggacggagttcaagaactctcaaatagaagttttcttgaggaggagggcatcaagcatgagttctcttcttcctacacgccacaacaaa

SEQ ID NO: 858 - DNA, 464 bp, Zea mays
  unsure (1)..(464): unsure at all n locations
cactcaacctctcacattacagctctgcaaaatattgaacaccactctttatcttacaaatgctacaacacactctatatacttattctcttggatgaaaccgatctcaatagcataatcgacgaatttgcacccaaaaatgttaccagaaatcctattagacgacaagtgccaagctacatgtagctttcaccgaaatactgctactacatgcgtcaatgatacctacatatatagtcatatgggggcccaaatatattttcttttgcttacggtccccgcaatgtcaggacccgccctactactacagagaatatgcataccgcgatatttggatacaatgtcggtctatattacttgaacagcgacgcaacattcgcaccgtaattgtaggcgcttccatgtatacccatattgaatgggcttcccgcccataactnatctattacctactgctcacctct

SEQ ID NO: 859 - DNA, 428 bp, Zea mays
catgcaagcttaatgaccctcctaaaagatcggcttatttgtttattcaaggcacccatgcctcaggataacgagggctatattttatatcgcgctggttatcctgaggataagattaggagaattcatgcgaagaagactcattctcaccatgcttttatttataagaatgaggcttctagctctaggcgttctacacatgttaaaatgcctaagaagaaaactcctattgcattaaataatcataacatctcattcaagacttttgatgcttcctatgtgctcactaacaaatcacgcaaagtagttgccaaatatgttgggggcaaacacaagggatcaaagacttgtgtttgggtacccaatgtacttgtttctaatgtgaaaggacccaagaccggttgtgtacctaagaataaggcctaaat

SEQ ID NO: 860 - DNA, 405 bp, Zea mays
  unsure (1)..(405): unsure at all n locations
agcttgttgcctcaagtaatcctgatgttgtctattttcttctcgtagntgctctacttatgctagatcttgagtggagcgacgggagctacgagcagcatacctctacgaacctgaaagggaattaggcttacacctatttcctaaatgattttgttggttgaattgcctaacacaaataattggactaactagtttgctctagtgtacaagttatacaggtgccaaaggctcacacttagccaataaaaagaccaagtatggggttcaacaaagagagcaagggataaccgaaggcacctctggtctggcgcaccggactgtccggtgtgccaccggacaatgtccggtgcaccaacggacagtgtccagtgcaccaggggactttacgcttaacttctcacc

SEQ ID NO: 861 - DNA, 494 bp, Zea mays
  unsure (1)..(494): unsure at all n locations
aactataaaactaagcttggatagncacttcctctgcctccgattggccccatttgttttatccattcaacaagattgaactgacgaaagggtgggttatcatctaaaccaaaatgtgtccacaatttgccaaagcataaaaatatttactgtttttattggacaacaaaagctaaggatgtaaaactgatggaaatgttcataacctaaataaaagagagatccacgttaatgttgttgtgttgtcaattgtgacactgtcacactggtcctggntataaaaatgccactataacaaataacatgatgtaaaattcaaatggataatattggatttggatacaaccaacgacaatgaatacaaataaatacacaacaaacgacaatcaatagaagtaaacaaacttcaactctatacctcattggaagatcggctgtagtcaacaggattcccttctgtcacagtttctaacaagagaacgcaaaactgtaac

SEQ ID NO: 862 - DNA, 421 bp, Zea mays
  unsure (1)..(421): unsure at all n locations
gagcttcngattcccaacgctagaagacggttctcttattgttgtcaaaagatgaattggccgacagcttatcgtacaacagcttaaaggtgagaaaataaaattttcgtgtgcttaaaaattcgtgtgcttattttttaataccacattccttttgtagggccttattctttgcaatgccctcagagcgcataaaagcgctgaagacgagggatgtaccatggcgttgaataaccttcgttccgaagtgattgagataatgaacgaaagtcttgagagagataaaatattaaactcattgcttaataaaataaaagaagacgaagctacttcgaatgcccaagctgaagcccagaagtgcgaaattgaagatcttcagatacagctggctgaagcgaaattaaagtgtgcaattgccgaa

SEQ ID NO: 863 - DNA, 368 bp, Zea mays
ctatccaggggcctatttgaaaaacactataacaatacaacttgtttgaaattcttacctaaggaatgcactctaggtgtgtcaaacatatgcaatgccaatgcttatgatgccatgctcaagttttaagttacagaacacaggggtgttacagccctaaccatgcatttatgtataaggtgagacatctagttctaggcaaccaacccgtgctaagttgctaagaagaaaactcctagtgcatcaaatgatcatgacatttcatttgaaacctttgatacatcataatgtttaactaacaaatacggcaagggtaattgcaagtatgttgggggcaagcacaacgggtcatagacttgtgtttggta

SEQ ID NO: 864 - DNA, 200 bp, Zea mays
aaatctacccagcatagctgaccctctaacactcccttaaatgctattgaatcatcacttcttctacagacagtgacacctacattagtaaatagacagtcgtagcccattttcgataatcgacaaacggaaaggcaattgcaatctatagaatctacaagagaaacattggaaatagaatggtcaggtgatataccaat

SEQ ID NO: 865 - DNA, 448 bp, Zea mays
  unsure (1)..(448): unsure at all n locations
agcttatggacagtgatacaggctcttcttatgactntgntggngaagcaacgtaagcaactaatcacactgtaatttgtgtctgcagatctactttccttttattttcttttttgaagaaagcaagcagctgtcctgaagttgccattcttacttctgcccttatactaatttaattcagcaactgtagtggtatttggtgatttggaatttaaagagccctgttgaattggttttgacaggattccattggaagcagtgtatactgaaaggagcattccaccaacactctataatgttgtgaaaggtgaaaaatactgcggggaaatcatagttggtctcacattcactcctgaggtaggttctagaaatctgcctctatgtttatatttatatatgaatgtngaacatttttatctaatttaactttaaatcctgttgtgatata

SEQ ID NO: 866 - DNA, 461 bp, Zea mays
ctacagaggatgaacaggcgccccgcgatgggtctatattgtatctcaatagacgtgtggaaatgcctcggagatattgctatcgtttacctaaccaagtcgctcaaccatattcttcgatccaatagtatgtctgatgactggaggaggagtacattggtaccaatcttcaagaccaacggagatattcaaagttgtagcaactatccagggattaagctcatgagccacactgtgaagttatgggagagagttattgagcatcgcctcagaggaatgacttatatcatcattaaccaatttagattcatgcctggaagatcaaccatggaagcaattttcttaataacgcacgtcatggaccgatataacgagcacaagaacgacttgcacatggtttttatcgacttggaaaagggctatgataaaatacctagaaatctcatgtggtgcgcatggat

SEQ ID NO: 867 - DNA, 437 bp, Zea mays
ctcgacccggatcttaagcaccgcggctgcagctttggattatctttataaatcgtttatgatactaaggtattatgctccaaagttaatatttactatgaactgtgttacttttcttgtgaaaaaacctagctaatctattttgatattgtttgcatgtagggtcttgcactggtttgagttaaagactggatgtatgtgtgcatcaatatcatctttggctgatatgacctaagaaacttttggaggttcttttggatagttgctctattagacaccgagcaactatattgctccaagcaatgccttttaagtactgtcatctggcaatttggttctgttataactagacatgaacttgtaatatgttattggctacgcatcaacttatgagtggtgactgatgtgtgcggcgtgcctatgtggttggtctgtac

SEQ ID NO: 868 - DNA, 263 bp, Zea mays
  unsure (1)..(263): unsure at all n locations
tatagagtacagaccaaaaccatatgcacaccggacacatgagacaccactcataagttcatgcctagccgataacatattataaggtcatgactagctataacagaaccagatgccagatgacagtacttaanaggcgatgcttggagcaatatagttgctcagtgtctaacagagcaactagtcaaaagaaccttcaaaagtttcttaaggcatatcagccagatatgatattgatgcacacatacattcagttcttaact

SEQ ID NO: 869 - DNA, 431 bp, Zea mays
  unsure (1)..(431): unsure at all n locations
agcttacatgtctcgttgtatttaatcttcgaantaaaagcccatcagaatgaagcttcttcatgcgattctcacttatatgacccaaacgacagtgccacatgtaggtaggacttaaatcattaggccgaggccttttagcactaatattacagataggtgcatcatcaagatttaaaatgaataacccattcataatggatgcaaaagccacaaacatgccattcttagagatcacacaaccattgttttcactcgcaaatgaataaccatccttcatcaaacatgaaggagacataatgtttcgactcatactaggaactagataacaattatttaactccaaaatatatcttgatgggaggtggagttgcatcgtcccgacggtcaacgcagcaactctttgcatattgcctacccggaaatcaact

SEQ ID NO: 870 - DNA, 160 bp, Zea mays
tctaaagacagacacattcacatttgtgcatagacagttctattccatattgcataattgactaacacatagtaaattatttcccagagacttaactcaaaacccattacaaattgagtgctatttgagattcaatttacctaaccctttaacttccttg

SEQ ID NO: 871 - DNA, 439 bp, Zea mays
  unsure (1)..(439): unsure at all n locations
agctngcagcatcctcaacggcgacagagcgcatgtgcctaatgtcagtcttgttgccaatgagcattacgactatgttcgagtcagcatggtcccggagctccttcaaccacctcttcacattctcaaatgtcattactttagtgacatcgtagactagcaacgccccgacagctcctcgatagtaagcacttgtaattgctcggtacctctcctgcccagcagtgtcccagatttgagcttttataatcttgttctccacctgagtcagaggaaatcaaattttgtaacttgtttcttcagtggcagcaggaacagaagtattgctgtgctaataaggaaaatttattcataagtaaatgcaatgtgcatcacatataagtgaaataatgatcaatntatctcgaataataaaataactaggaactttcttcagagc

SEQ ID NO: 872 - DNA, 333 bp, Zea mays
tgtcacgcacatattggtacccatctcttgatgggtccattaacgttatttcacaaatatctacggacctcaacgttctttgtgctaacactacggcagctccttacctttgaatcacaagttgcaattttgggctgtctacctacatgagaattaattgaacagctacgaacgggattgtacccacgggacaatccttgcattgagtccctctttttcgacatgtagcatacgcgaacctcaagctttggagaatacttatgtaattgcttctctctagctatatggtcagtgaaaactttactttctaacattatgcctttttgcctaaat

SEQ ID NO: 873 - DNA, 471 bp, Zea mays
ttaagtcacctgaggcatgcaagcttattctctttctgcaggtgaagggttatagttatccgttgagctggttagccccttggaagtacctttgaaaagaaaaggtggtgcttctgttgtggttgaacaaaaactagaaagttctgagatcatttctgaaacacctaacaagaaaagtagaacataacaaaaatcaagcaagaacaccactcgtgaggaaatttcggtgactaatgtcaagctaagtaagactgttgtccagaaggaaacagttgccggtatgcacatttgttgacttatctttactcctgttgtaagattacttcccccttgcctaactgtttgttactcacagtccaaggtcctgttcctaatgcaggattaagtcctgatgatgattcagagccttggactatactcgtgcataagaaaccacaagccagctggattccatacaaccctaggactatg

SEQ ID NO: 874 - DNA, 454 bp, Zea mays
gtacataagctcaaatatgcgaattgactcaatcctagctaccggtgcataggtttcaccgaaatccaaaccttcgacttgcgaataccctgtggccacgagtagaactttgttccttgtcaccacaccatgctcgtcttgcttgttgcggaagacccacttggctcctacaacattttggttatgacgtggaactaagtgccatacctcgttccttgtgaacatgttgagctcctcttgcatcgctatcacccaatccgcatcttggagtgcttcctctaccctgtgtggctcactacacgaaacaaaagagtaatgttcacaacaatgtgcaacccgagatcgagtacttacccccttatgaatgtcgacgacgatggtgtccacagggtgatctcgctggattgcttggtggactcttgcgtgtggcgggcttggctcttgctcatcctcc

SEQ ID NO: 875 - DNA, 424 bp, Zea mays
agcttgaagccatggtaagtagcataggcttatattatacgaattgactcaagtctagctacgggtgcataggtttcaccaaaatccaaaccttcgacttgtgaataacctttggccacgagtcgagctttgttccttgtcaccacaccatgctcgtcttgcttgttgcggaagacccacttggttcctacaacattttggttaggacgtggaactaaatgccatacctcgttcctcgtgaaattgttgagctcctcttgcatcgccatcacccaatccgaatcttgtagtgcttcctctaccctgtgtggctcaatagaggaaacaaaagagtaatgctcacaaaaatgtgcaacccgagattgagtagttacccacttatgaatgtcgccgaggatgatgtcgacggtgtgatctcgttgga

SEQ ID NO: 876 - DNA, 461 bp, Zea mays
agcttgtgcaatctgaagaatcaaatcattatacattattgcagaagcaagcatattagtattatgagtttataaagaataagtaaaccaaatgttgaaaagcaagagaatgacataccagaagtatcccccatcctgtgggcaagaatgctagaaagcacacaaatatatcgcgaaaggtcatatgaagtaatactatcaagacaatcaaaatagcaatgaaagcaacaaatatcaaaaacttgatcagacggaagaatagctggaaatctgcactgaatgtccgccttcccaccgacacagtctgcaaagaatataggcaacttatgaaagaaactagaaatagcagccagagatgtaatgctaagaaaattgtaccattattgctacaagatccatattctgttcataaactaaacagtatcatatttaccttcataacgagcagaaccgccacaatt

SEQ ID NO: 877 - DNA, 416 bp, Zea mays
tgtctgactaaaacttcctgatattcaacacagacagtacattggatcaactttgcggtcttgtggagctcgattaaatggatgtttagctaaaacctctgtgacaaaagttgagctggattgataagctacaactttgatgcacagcattgatctagtcaccatacaaaatctaaaggaaattcgcccccaacatgatctatcagaccgactgaagaagttcctgatggtacagtgaccaaaaagatctgttggttcaatgaaccgaccgctggtgacctcgcgcatggattcacgccggtgaagtgatttctgctcacttacgctcggataacgccctcaagtacaaagatctttaccgctattgagccatggccactgttccgtccgggtcgcatgtccggtcacccccggcc

SEQ ID NO: 878 - DNA, 306 bp, Zea mays
  unsure (1)..(306): unsure at all n locations
tcggcgatgccagagcccacccatgttagtcttagcaattaaacatgtgtcgagttcaactctatcaaaatctactacgtataactgaccctctaacacacccttaaaggctattgaatcatcactctttctaaaaacagtgacccctacaataaataaagaaacaaggtgtacccattttgcataattgagataagaaagccaattggtatcttatggatctaccgaaaaacattggaaatataatgggcagggagaatagcaaatntaccccaatctttgaaccaaccttgggtctccttcccc

SEQ ID NO: 879 - DNA, 377 bp, Zea mays
gcttatatgttcccgcgcgctttttccaccttcactataaaatttacagaagtctggtatccctaacccctgtggatatgacacccgcgtcaatcactggctataaagcttccgatacaattgacatatacttgacatactaacaccgagtttgtctctgaacattccggctacctcatctctaaatctctccgccatgtctggcgaccacccattatagttgtgggtggaaatctcacgttgcctgacatcactctgtcggctttcctccccacgatgtctgaggtgtgtgttacatgtcctattaatatcaccaactcctgccctataccctccaggctctctagtggccgaacagtattcagccctgtgttcat

SEQ ID NO: 880 - DNA, 446 bp, Zea mays
  unsure (1)..(446): unsure at all n locations
agcttctaaagggagaacacgtgttattattaactaatgtgcaattcgaaaaagatagaccttgtgcagcttgtcaggcaggtaaacaagtgggaggagcacatcacagcaagaatgtgatcaccacatcaagacccctggagctgctacatatggaccttttcggacccgtcacctatctaagcataggaggaagtaagtatggtctagttatttttgatgacttttcccgcttcacttgggtattctttttgcaggataagtctgaaacccaagtgactctcaagcgctttctaaggagagctcaaaatgagtttgagctcaaggtgacaaagataaagagcgacaacgggcccgagttcaagaaccttcangtggaggagttccttgaggaggaagggatcatgcacgagttcttcgctccttacacaccacaacagaatggt

SEQ ID NO: 881 - DNA, 413 bp, Zea mays
cgcgaaggttcttcatacccacatgtgctacacatcgattccacacccagcccatgcacgtcttagaaattaagcatgcatctagaccggcctcctcttttgcaaaatcaactaaataaagtttgtcgtctagtacaccctttaaagctagtgaaccatcacaccttctaaagacagtcacatctacatgtgtgaacaaacaattatatctcatattacacaattgactaacagataacaaattatatccaagagactcaactaaaaacacgttagaaatcgagtgctcggatgaaatagcaattctacctaaccctttcactctgccttggttcccatctccgaatatgattaaatcttgcgaatccttgttcttgacgtaggaggtgaacatcttcttctccaccccatgt

SEQ ID NO: 882 - DNA, 407 bp, Zea mays
agcttgaagcaaaaaaataaaatgtttattattacataattagactataaatctatccttctatccaaccttattttcaaaggcaatggttttattgtcagtaatggttttgatgttaaaacagggtcttgccaaccttattttcaaaggcctaatatttcgacgaaaattatctgggctctaaattaaagagctaaccaaaaaagcggttcgtccaacctagacatctgctgccaaacacatgtcggcaaactccacaacaaccactcacaattcacaatgctaatcaccaacagcgccccttgcatctcgtacttgttccactacatgaacctctcatactcattccactacatgaaccaactagcaattgcaaaagccatctataactcactgcttgttcatgt

SEQ ID NO: 883 - DNA, 439 bp, Zea mays
  unsure (1)..(439): unsure at all n locations
gcatgcaagcttagcggttctgcagccaagttcttttttttcaccttcccctacactatgtttgcaagctactcgattgatttaacattcttattatgtaggcagtgccattgtcaaattacaagtactaactattttgcttctaaaccacgcatggaaagatatatgtgacagctgcaaagaagatcatggacaagggctctgactacactaagaaggagactgagaggcttcaccgcatgctggagaaggtgggcatataagtttccatcctccagttcaatcttgagctatattactatntaagaagctaattctcataagtttcttagtggtgagctagttcagtaaagatgaaaagcgtcaaagtagttgtggaatggtggtattggttataatacatcgtgttggactttgacactgggttccaatgacatta

SEQ ID NO: 884 - DNA, 298 bp, Zea mays
tttgccacttttgaaatatctctttattcttatactaactcttttatcatatagggcttaacactgacgcacgctttcagagcccaaaagaatgccgcagacgaaagctatactatcgcttccaacaacctaccaccagacgttattaagctgatgaacaaagctttggaaaaagataaaactctacttacactagtggataaaataaaggaagacgaagcttactctaacggtcaagctgaagcccacaaacgtgaaatatatgatcttctgacacagctggtcacagttaaagaag

SEQ ID NO: 885 - DNA, 362 bp, Zea mays
  unsure (1)..(362): unsure at all n locations
agcttgccttcgcttcagtttatcatccgtattccaacggngtcgtggagcgcgctaatgggaaaatcttcacagctgtcaagaaaatgctcctcgatgaaaaaaaggcagatggaccgatttgttacctgaggcagtctaggcgctaaacacaactgagtgcagagcgaccgggttcactcctttccgccttctatacggatcggaggccatgaccccgcaagaaataaagcatgggtccccgcgaacagttccgtcagccgtccccgacgtggacgagccaacttcaaaggatctcatcgacggagaccgggtcttcgccctacaggccctaaacaaataccaagcccagaccaaagcat

SEQ ID NO: 886 - DNA, 342 bp, Zea mays
  unsure (1)..(342): unsure at all n locations
tgaaaacttcctctccctcagctggtgtagcattctatccttaangggatgtaccatactataagttaaatttcttgccatataaaatgttcaatagtgcatataactttgacatcaactatatgtgggcactaatttaaacgaatttagtcctatcctttgggtttcactaatgatgattcatttgccatccacatataaggatcatcattngtgaaaccctctcttgtgttntaatgctctcttttctaagtgctacaaccaggtccttctcagagctttcaagatggattcaaaatctacaaaaaatgaatgaagttaagatcacttgttggatgaaat

SEQ ID NO: 887 - DNA, 211 bp, Zea mays
gagatgcaccggggcaagggtctctacatatggtggctactgccgttcatggaacgcggcactgttagaatgcaccaaccccttgcggcgccgccgcaccatttagttgagttaatcaatttgcttatcgtatatattattggctcaccgcgtaagcccatactgctaaaaatccccgcctgcatatgagatgtgatattacatttgcgct

SEQ ID NO: 888 - DNA, 444 bp, Zea mays
  unsure (1)..(444): unsure at all n locations
agcttcataaaatcataattttatattttttctcccaatctaatgaatccagttcctgtgaacttattgtaatgcctacaatattactgngtgatttatttacatgcctggtgtaatgttaatattgcctatacaatgtttgtttgtattgctacgactatagcgaggacacgtgttatctgaaaaacaagttggtaccttggattctcaaatgccaagcaagatgtgcccttgatcacatcttttacccattcatgttcttattattcataatgatctgcataagataattntgatgggacccaatatgttaccctagatattactatctttataccttgttcaccacttggtttactactaaaggtatgggtagttcatgctattgctttatgtggattttggtatagagatattcatcactcattggtatactctttatta

SEQ ID NO: 889 - DNA, 421 bp, Zea mays
  unsure (1)..(421): unsure at all n locations
agcttcttgtcaaagatgttagtttctatctatttgtgcgcactggataatttagctcatgccgttatggttgtcttcccattgctagcagactattaatgtctattatgttttcttatcatgatatctatttatactttgttgcttccccgtttatgccattttcaaaggagatgctgtcgaaattttatatacgaatgttagatgtgtagtttagtatcattctggggtgtttgtggatcccggggtgttacagttggtatcaaagcatangctttagattcttggcaatttgaagataaatttgacacacttgcacatataggaagggtatgggtacaaatatctttgatatatattaatgtctttgaaatgcagatgacaataatttcacccctccctattgctttatggtgatgtg

SEQ ID NO: 890 - DNA, 272 bp, Zea mays
tcggtatggcacattctacctcgactaggtcaaggacacggtcatctcggcaccaatacgaggcatcggcgtctgtgcgctcgccctcagtaaggggcgctcagaccaacgacctccgagcagagctcaaatgcagacgcgcgggagaggatgcctatatctatttataaagggcgcgcgagcgccgccaaaacatcgagggccgcaacctcgatcaagacttcgctgcggcagcaccgcagacaccaatgggcacccggtcccaagtgggt

SEQ ID NO: 891 - DNA, 305 bp, Zea mays
aatctaccaagtatagctgaccctctaacactcccttaaatgctattgaatcatcacttcttctaaagacagtaacacctacatcagtaaatagacagctgtagcccatttgacataatcgggatacggaaagcaaattgtcatctaatgaatcaaccagaaaaacattcgaaatggaatggtcaggagatatagcaattttacccaatcctttgaccaaaccttgatttcatccccgaatgtgataactcgttggggatcttgggttttctcatatgaagagaaacatctcctctccctctcat

SEQ ID NO: 892 - DNA, 454 bp, Zea mays
  unsure (1)..(454): unsure at all n locations
actaagcttgatgacananacgtgaatgccataaatctgactcattatatatttgaacagaatgcaccattttattacacacatcatgcagagataagcggaacaagcctccgcagtcatattctttaccaacaaaagtaccatgtttcgacacaacacatttattagactcaagaacaactttgtatccatctcgacatagcatagaagcgctcatgagattcttcttgatagagggcacatgctgcacactcttcaatggcaccatctttcctgaagtaaacttcagaatgaccgtaccaacaccaagaacatgagcacgcgacccatattccattaacaagacgccagaccttccgacctggtaggaagtgaacatagaggcatcagcacacacatgaatgtttgcaccactgtccatccaccactcatgtgaattacaaactgaaagaac

SEQ ID NO: 893 - DNA, 379 bp, Zea mays
tagcttctaaagggagagcacatgctgggactaacacatgttccatttgataaatacagggtgtgtagcgcatgtcaagcagggaagcaagttggtgttcatcatccacacaaaaacatcatgacgactgacaggtcgcttgaactacttcacatggacctattctggccgatagcttacataagcatcgacgggagtaagtactgtctacttattgtggatgattatcctcgcttcacttgggtgttctttttgtaagaaaaaatacaaaccccagagaccttaaagggattcttgagacgggctcaaaatgagttcgacttaatgatcaaaaagattagaagcgataatgggaccgagttcaagaactcttacattg

SEQ ID NO: 894 - DNA, 361 bp, Zea mays
atttcctgacctatagaaactcaagcttcagtcttagcgttagtctcggatttagttagtcttagttttacatggtatttcgctatatcctgtgcatgtatgtttgtcatgatgaactatgtttggtctggatctttgtaatgattgtcaccatagtgtgggtatcccctgcattttggtttacctattatgttaatggagttaattatatatttgggaaaacctttattccacttttctctttatctgagaagctgtgtggtctgcgttggagatcagtgaagatgctcatctgttcactgctgtgtgaaaattctattctctttccttatgctgcaagatttgccataaaacttctgat

SEQ ID NO: 895 - DNA, 312 bp, Zea mays
agcctttttttgttagactatgagaaaagtactccttagcaaggtcaattttaggtgcacatctttttagtatgataagttactttcttaccactgcacctcgaaaccatttatggcaaaaggctaatgcattgctcttgtattaataatgaattttatgatgcacatttgatgccactaacaaatttaaatggaaaatatctgaaccgaaaaactttagatcttctcaagtacctatacttcggtttagtcaacgcactgatgtgttttggacattgttttctaacgccacatttatgtcggtcatatccc

SEQ ID NO: 896 - DNA, 351 bp, Zea mays
agctcgagaccgacataagccgctaccgactatagcatcttgtcggcagcttattctattctaatgtgaaggtaaaaacttttcttccactctttattgttttgaacaacgaatgtgttttctaacgaaagtcgcttgtgcacagagcttgatgttgagtaaagctttgagaaagcaaccagatcttgaagataaaaaacatgaagttataattgacggtttataaagctaattaaaagatcaagcacctgctcttgaaaaaaaagatttcgagcttcagacaacagaatgtttattggcagaagccgcagctaaaattgcaaagttaattatggagcttctttcgaagtc

SEQ ID NO: 897 - DNA, 405 bp, Zea mays
tgtgcagagtccgcttgaactaatcttcggagaaacccgtatcttttgttacatgacaccacaaggtccaacccacaaagcgttggctgagttcaaaattatttcagagcatatcagcacaagagacttggttcaagagtttttggctttccagggttttcctaccgtaaaagaatgggaaatgccgaagctagaaggggagaagaaagaaagggaacttgtgcggttaccttactattacaagtttaagaaatattttaaaacaccttgccaagagtggctggacacaattgaaataatgtgcaatgaaatactcggtaattactctcaaaaagaagatcagttgatgactgcggccttcggtacccgtccgaagcgaagactgaatcgagtgctggatgccct

SEQ ID NO: 898 - DNA, 327 bp, Zea mays
  unsure (1)..(327): unsure at all n locations
cagcttagatgtatcggagccttttcgctctttatcaacactctctttaatgaacaaaggtgtactctcagcactgatcttgtgaatgatgccaactgaattntgcaagaattcaatcatcttctcattagacttgccaaagaactgcaaagtacccataaactgttagcccgtagcaccaattgtgttgaccttactattaaatgagcatcattcagacaatcagtaaataggcttcagaatagtcataaagcaggtttggcagataaaccatgagcaaaagatataccaccanagtgatttgtgctgctgtttatcattcgaatt

SEQ ID NO: 899 - DNA, 420 bp, Zea mays
  unsure (1)..(420): unsure at all n locations
ttcttcaagaagaaaatttatgcagctgtcaagatagtgataatnttttcgaacaattccctttggtttcngcataacattatacaaaaattattatgtgaattataaaatgtatatttacaataaatcagtttagagttataaatattcactatanaatggatcaacgatctgtctggaccataaaggcttctttgaaacgagttaatttcataagattggtataggtattttacagtaattagttcacaaacaaagaataaaataccgaattcaccaaattccaaatgaggcccttatcgcctgcctggccaggaagcttcaatcaaacaggctgtataaaagccaatgccgagagaaccatagattgctgaagattcagtaatcacattagtgaaacatgcaacatctgtgtctgtc

SEQ ID NO: 900 - DNA, 444 bp, Zea mays
  unsure (1)..(444): unsure at all n locations
agcttggaagcgtcgatagtaagcctacttgatgtanactcccttttctcttcttccatcgccttgaatgcgatgggttgcacctcgggtgtggaggtggcaccttgctccaagttgacaatatgtttggagtctttgatcataagttcaaagctcacaaacttgccaataacttcctcgagagacatctatttatatctagggtctccacggattagttgcacttgagtgggattacgaaaaacaagtgatctaagaataaccttgaccatttcatggtcatcccacttggtgctcccgaggttgcgcacttggttcaccaaggtcttgagccggttgtacattgcctgtggctcctctcccttattgaggatgaatcgatcgagttccccctcgatcgtctcgcgtttggtgatcttggtcacctcgtctccttcgtgcgcc

SEQ ID NO: 901 - DNA, 474 bp, Zea mays
cctaaaaactccgctttatgatctgtataatatgacagatattccccagtttatttgacgccatattttcagggcatgaaccacaacagctaattccaggtcatgagttggataatgttcgtcatgccggcgcaactgtctcgaggcatacgctataactcggccttcttgcattaagacacaacccaaaccactgtctgatgcgtcacaatacacatcaaacggctttttaatttctggttgagctaataccggagcagtggtcaataacaccttcagctgctcgaaggcttcatcgcatcttgaagaccagttaaatttggtatcgttcttcaataaacttgtgattggtttcacaagtttggaaaaatctggaataaatcggcggtaataaccagtcaatccaaaggaaacttccgacttgatgtacagtggttggtggtttccactccaaaatatccctgactttgctgg

SEQ ID NO: 902 - DNA, 403 bp, Zea mays
agcttgccacctcgaaccttaagaactctgttctgtagttttctggagttccaaaggtaacacgcatgtagatgtgtccgagcgggtattctccttcagtcggcacaatgccgaagaagggagtgtccgactcgtggagctctttgagtgcaacttcaaagcctaaagtgtccgaggaaaggatgtgatgctgttccccatcactaatacttttttaccctactctctcgataccggatcaatgaggagcggtacttgcccaatatcaagtgagccatgatcttcccggtaagggatcggtgtttgacaccgataggacgggggcatgtggttgcaccatattatcgtcgtgagctctgtgcctatgtttctgccaccgtgtcctccaaatatgtgattctca

SEQ ID NO: 903 - DNA, 462 bp, Zea mays
tctcaagggggagaacacgtgatatggtttgactaatgtgcttttctaaaaagatagaccttgtgcagcttgtcaagcaggtaaacaagtgggaggagcgcatcacagcaagaatgtgatgaccacttcaagacccctggagctgctgcatatggacctcttcggacccgtcacctatctgagcatatgagggagtaagtatggtctagttattgttgatgacttttcccgcttcacttgggtgttctttttgcaggataagtctgaaacccaagggaccctcaagcgcttcctcaggagagctcaaaatgagtttgagctcaaggtgaagaagataaggagcgacaacgggtccgagttcaagaaccttcaagtggaggagttccttgaggaggaagggatcaagcacgagttctccgcttcctacacaccacagcaaaatggtgtggtagagagcaagaa

SEQ ID NO: 904 - DNA, 409 bp, Zea mays
agctctatgcttctgccgtcagacaaggatgtgaactgcgttcctctgtctgacactatcttttttggcacaccatgaagaccaacgatccgagacatatacaactctgccaatactgcactactgtagttggtcttgacaagtatgaaatgggctgacttggttcagcggtccaccactacccaaatggaatcgtatccggctcgagtgcgaggcaatccgactatgaaaaccataccaatttcatcccatttccactgagggatctgcaacggttgcaacaatccaccacgtctctggtgctctgccttaattctttgacaactatcgcacatagccacatgctctgcgaattttcttcttaattccgaccacccagaatttcttttcagaaactgatacatcttct

SEQ ID NO: 905 - DNA, 473 bp, Zea mays
acatataatactcagcttgctccttactacccatccattcaagcttcttactttcgacgggcgtcacgaattcctatagagtgttggtcgataatttggacgtacaaatgatagtgttggctttttggctggatgttcctctcttgtgttgtccaataaatttgtaagttaaattcaccttgaccaatttgaacaatggagtcgcatgctcctcacattattaattcagcgacaccatgcttttgtttcatgtgtgagataataacttaccatattaatcttaagacgtgttctctggtagcgtagatttgttgtcattaatggtatagtggtatgccaatgctctgaaagcttgccttattggtttcatgtgatatctggcattgtctgccaacataagagtgggactgtgctaccccttgaacaccaaatatctgctttgtttggaagcctatctctgtagcaaattcaca

SEQ ID NO: 906 - DNA, 446 bp, Zea mays
  unsure (1)..(446): unsure at all n locations
agcttcttcatcatatctttctttatttctttaccacaaagaagtctataaaagtatcgtaactccgctaatgctntccacacatcattttttacaaaaccacgaaacataatatgatggagtctttccattattatgtggtagtcatgactcttcaacccagaaaacttgcccgtcttcaaattcacaaaccttctaaagcccgcggcgtaaccatctgggaactntaagattttcaaccatttcatcaattgtttcttccttttaggtttaatactgaaaagagcacgtggcttcttctgattctctcctatctccatagttggtcttctacagattaaagccaagtctttccttgccttaaggttgtcttttgttttgtcagtgatattcatgcaagtgctgataatgctgtcacccatattctgttcctggtgcatgacatc

SEQ ID NO: 907 - DNA, 326 bp, Zea mays
  unsure (1)..(326): unsure at all n locations
gaaaactcttcatgcggtggtcgacagtatgtctcaccggaatgagttgtcatggaccatggcctttatgggatacacaccaatctatacttcttattcaaaaaggaagagtagtctgccttttttgttctgccccactcgtgatctggcttccatccgttctgccttctctctaaccgtactactctgacaaccatgaaccgctcccttctacacccacgcacgcacccaagccatcgttctgctcacgatntcgaggcagccgacgagtgacgctcgagatttctcacatctgcccctgcctgccacggatgagatcccctaat

SEQ ID NO: 908 - DNA, 411 bp, Zea mays
agcttgtgaagattcttcattccaacgtgggctagtcggtgatgctagagccaactcatgttagtcttagcgattaagcaagtatcgagtttagctctattgaaatcaactaagtatagctgaccctctaatactcccttaaaagctactgaatcatcacttcttctaaagacaggaacacctgtatccgtaaaaagacaggtgtagcccattttacataattgagaaaccgaaagcaggttgtaatctaatgagtctacaagaaaaacattagaaatggaatggtcaggtgatataacaattttacccaatcctttgactaaaccttgatttccgtccccgaatgtgataagctcgtggggatcttggtttttctcgtaagaggagaaacatcttttctccctagtcata

SEQ ID NO: 909 - DNA, 460 bp, Zea mays
tggcgttggcggaagagtccgaggcatgggcttgggtcctttctattgatgcgtgaggaagcggccgtggggacgctaccccgcggagatccgcgacccaaccaagaagagtcccgtgtggctgggcacgtacgacacggccgaggaggccgccaaggcctacgacgtcgccgcccgcgaggttcctggcgccaaggccaagactaacttcccgttccccctcgccgtcgccgtcgccggcggtgctggtagccccagcagcgacagcaccaccttggaatcgagctgtggcggcagcgggtgtggcgtctaagcgcctgtgcaggcggccatgccgctgaccccggccctcgacctcgatctctttcaccgggcgggcgccgtcagcgcggtcaccaccggcggcatgccctttccgttcaaggccttccccgtcgtgcgcccgaccccacatcagtac

SEQ ID NO: 910 - DNA, 344 bp, Zea mays
  unsure (1)..(344): unsure at all n locations
attttaatngactcaagcctagcgtccggtgcataggtttcaccgatatccaaaccttccacttggtagtatcccttggccacaagtcgagctttgttccttgtcaccacaccatgcttcgattgcttgttgtggaagacccatatggttcctacaacattttgaataagacgtggaaccatatgccatacctcattatagtgaagtttgaaaggccaaaacttttgcactgaaatttacatgtttttactaccaaaaaacaggcataactattcttttctttcccttcctaaagctgaccttctcacgttaaccggatccgttgaattccgttataaaaaaac

SEQ ID NO: 911 - DNA, 490 bp, Zea mays
  unsure (1)..(490): unsure at all n locations
ctaagcttnctgattgatcaataaatgggctgtgatagccatgttgtctttcttttggttggctgcagtccacatatcagtagtgatagcaaccctagagttgtttcctgccatgaaatcaatggctttcttcttttctatctcatattgcttcataatgtcattcctaaggaaatataagttagccaaaacacactaagtagtttagtacagttagccaaaacacactaagtagtttacctaatagtgttccttgtcaccattttaaacaaaggttgaagtgcgctaacaaatcttctaaatcctgtatgatcaaccatgcataatgggtattcatgccaaaccatcatagatgcaagctcctttctagcaatttcttgatcaaaagtatagttctccactgacactnttcctgtcttacgacaaccaaacctcaatgagctttgactaaatgtcttgctttgtccggtcattttgcttttacgatatg

SEQ ID NO: 912 - DNA, 408 bp, Zea mays
agcttaattaataatttattgcgtatgttgttctcttgatcacatctgctatttgttggatcatagaatgacttctattaacaatcatacttcttagtgccgcatatactatcaatcaatatctcttgatatgcactaagttaaaaggagaatttatgatacatttatgcaatttgtgatccatttgccatatgctaacaataacttagaaaaggatcacttgttgtagaactctcttttgtgcaaaatatttccatatattgtcttaagaataggtcttaagcaactaagacaaaggacaaagcacaatgaagagagtgtttctatgtgaaggtacaaaacgggtaaactacttccattcatttacataagtacctaaatctctcttttgtatacattccttgcata

SEQ ID NO: 913 - DNA, 436 bp, Zea mays
tgtgttgtcatcaatcaccaaagagggggagattgaaagtgcattcatcccttttgagagttttggtgatttggataacaacacatttaaaggtctaacaagtttgctaagtgttgaacatgaaattcagtatgatgaacatacttgaatagtgtataatgatcagtgaacaaggttcaacacaaggtgaaataaccagtgagacaatgcaaatggatataatatggtctctatattggtttgaatatatggacaagtcctgagaaatcactatgcattaatatgatcataatagaggttgaagtgattaagaggattggtcaagcccaagtgaataagatatgaggaatcgtgaattggcttgaccatattactattagtccatatatgaatatattgagatcaaactaaagctcgattaatcttaatagttata

SEQ ID NO: 914 - DNA, 211 bp, Zea mays
  unsure (1)..(211): unsure at all n locations
cggggaagatggctatgcatganggtgggctttatagccgctcgtgggcacgacatgggcgtgggcacagaggcggccgaaggcgcgcgcgggcgtgctctgtcgcgttcccgagtgtctgcccacgtcgaacacgtggtggtttacttctgccagtgttcaacggcctgtttggtcgccttaacctgcagaatttaccaaaaattccatg

SEQ ID NO: 915 - DNA, 443 bp, Zea mays
  unsure (1)..(443): unsure at all n locations
actaagcttctaagggggagcatattntaggattaacaaatgttcattttgataaagacagggtttgtagtgcatgtcgagtatgaaagcaagttggctctcaccattcacacaagaatataatgacaacgaacaggccactaaagatactccacatggatctattcagcccgatatcttacataagcatcggcgggagtaagtattggctagtaattgtggatgattattctctcttcacttgggtattctttttacaggaaaaatcacaaacccaggaggctttaaagggattcttgagacgggctcaaaatgagttccgattgagaatcaaaaagataagaagcgtcaatgggacggagttcaagaactcacaaatcgaaggctttcttgaagatgaaggcatcaagcatgagttctcttcctacacaccttaacaaaat

SEQ ID NO: 916 - DNA, 381 bp, Zea mays
tgcaagcttgtgcacagtccgcttgaactaatctttttagaaacccgacctcgttgcgacatgacaccagaaggcccaacccaacaagcgttggatgaattcaaaattattgcgcagcatatcagtacaagagacctggttcacgagtttttggctttcacggtttttcctaatttaaaagaatgggaaatgccgaagctagaaggggagaaaaaaaaacgagaacttgtgcggttaccttactatttcaagtttaagaaatactttaaaacaccttgcccagagtggctggatacaattgaagtgatgtgccatgaaatactccgcaattactccaaaaaagaagatcagttgatgaccgctgcctttggcaccccgtcc

SEQ ID NO: 917 - DNA, 498 bp, Zea mays
  unsure (1)..(498): unsure at all n locations
cgtgacctataaaactcagcttantctttggtgtttcaatttctttaatagcttcgttcttatcataatgtaatataccttcctcataaatcgacgaagttccacaagttttgacgaagcaacaaaaagtcgttttaaagaacgcatggcaagtctttgtcggagcaacaaaagtcgttcttaagggaacgcagcgtaagttttctgctcaaaagtcgttccaaagggaatgcaaagcttacagcgaaaaataaacgctgataccgccgaaataaaaggcgaagaagctcctaatggaggcttacaacgaanaataaatgctgataccgccgaaatataaggcgaagaagctcctaagggaggcttacaacgaatagtcaacgctgatacacagaaaaataagcggtgaagccgaataatatacggcaaagaactgtgtcctactgtggaaacgtatgtgtattcttcgcacanatatcattttgcatatcatagcat

SEQ ID NO: 918 - DNA, 430 bp, Zea mays
  unsure (1)..(430): unsure at all n locations
ggaccctaagcactgcgctcaacttgactacagcactttgtatctgtataatacccntccgcctatgggcgaaggttcttactactgagggcacaagcgccaacggtgtctaatgaaattgttattaacgccatgattaaagggcttcagccaggacctacagcccaatactttgacaagaaaccccctcataccttggagaaactgctttcgaagatggaagaatatatccgagcacatcatgactttctgcaaacaaaggaggaagcttacaagttctctaaaatgactatgggcttccgaaggagaatccaccctacgcacgtcagatctatccattctactcagaatggcaatacgggaagtcagcaaccaagaccgcagtatttcttccaagcttcaaggcaacaacagaactattctcagtccc

SEQ ID NO: 919 - DNA, 449 bp, Zea mays
actagctggattaaccaatctgtgtgacagctttgttttgtttttcacatctttccgtgtgtcagccagccttcagaaaagcggtagctgtgcctcgagaagctaccagggcgcataagtcggcatgcccaccaataacttcgtcaagagcatcaacctcgccttcaatatgttccaaggtgctgggcaggttttccgctgaaggagaattattttcagaactggctccgatagagtgaaatacgtccttcagccgctgcacgcattggctgccgaaattatgcatttctcttggagatccttcaatgatatttgcaaatgtgaattattctcgacgtcagtcttgagacttgcttcaagtttcttcttttcttgctcatatttttctgactatttcagtaattcattctttacactatcattttcgggctcgacttcaaccaaggagc

SEQ ID NO: 920 - DNA, 453 bp, Zea mays
  unsure (1)..(453): unsure at all n locations
agctaggttcccatctncatagatgatcgaatcctgcgaattcttgttcttgacgtaagaggtgaacatcttcttcttccccgtcatgtggtttgtgcatccactgtcgataatccagcttgagcccacggatgcataaacctgcaaggtaatttacacttgggttttaggtacccaactcttgttgggtcctacaaggttagtcacaatagcctttggaacccaaatacaagtcttgtctcccttgcatttggatcccaactttctagcaactactttttcattcttacataaaagcgcaaaagaagtattgcaagcatggtaaatggtagaaggttcattacatactctcctangaacatgatgcacaccatgatttctnctacgcttacttctatcatgcaccaaagtagaactcgatgcanacatagcatgtgaatcattatagtagta

SEQ ID NO: 921 - DNA, 437 bp, Zea mays
  unsure (1)..(437): unsure at all n locations
aagctttaagggagaactgtataggtctactatgttatttgtataagatagaccttggcagcttgcaagcanggaaacaagtgggaggctctcatcacaccaaaaatgtgatgacaacatcaagacccctggagctgctacatatggacctcttcggacccgtcgcctatctgagcatacgaggaagtgagtatggtctagttattgttgatgacttttcccgcttcacttgggtgttctttttgcaggataagtctgaaacccaagggaccctcaagcgcttcctaaggagagctcanaatgagtttgagctcaatgtgaagaagataaagagcgacaacgggtccgaattcaagaaccttcaagtggaagagttccttgaagaggaagggatcaagcacgagttcttcgctccctacacacctcancaaaatggt

SEQ ID NO: 922 - DNA, 326 bp, Zea mays
  unsure (1)..(326): unsure at all n locations
agcttgtggacccgttgcctatcaactgttattgccacccagcatgtcagctgttcatgatgtattccatgtatctcanctgcggaaatgtgttcgcctacccactgaagtgctgccagaaccagacattgagatagaaccagacttatctaccaaagtccccgtaaggtttagatcaaaagagaatcaactcagcaagcggcaaatgtataagtcaggagccatcacaaaaactctggaatgagatttccttcctccatttgcaaatatctaccaacccccctgttatattaaaatataagattattgttactaagtcttatgaa

SEQ ID NO: 923 - DNA, 352 bp, Zea mays
tcaacttcataaaaagcgcataaagatccatcagatggccagagtacgctcgactgcaagggtgactcgcaaaggagaggagaccgaggccgccgtgacagatccgatttccgaagtcatgagacagccgggcctagttgtgacaggaggaaccattgacgaaagcactcctgctgtcaaagctgaacaggttgacattaaagaagaaaatgttgaagaagaggaggattacagcattttgatcccatctaaacccagccacctggattatgagaaatctactatgtctgaagccgatgtgcccatgatgatgaagctgggttacttcgaagaagctgaacggaaactgatc

SEQ ID NO: 924 - DNA, 425 bp, Zea mays
cccggacctctaagcaccgcagctgcagctatgaaatcttcttccacgtgttgttttcggcgatgccagagccaacccatggtactcttagctattaagcaagcgtctagttcacctctattaaaattcactaaatatagctgaccctctaacattcccttaaatgctactgaatcatcacttcttctaaagacagttacacctatatcccgtaaaagacaggtgctacccattttacataattgagaaacagaaagcaagttgtcatctaaagaatctacaagaaaaacattggaaatacagtggtcacgtgatattgctattttaccaagtcctcttgaccaacactgattttcatcccccgatgtgataactcggtggggatcttcgctattcttataagaagagaacatcttcttctccct

SEQ ID NO: 925 - DNA, 406 bp, Zea mays
  unsure (1)..(406): unsure at all n locations
aactcnagcttgggaagattcttcattccaacatgagcgaggcggtgatttcttatcccacccacgtcagactgagcaaggaagcaagcgtcgagttcaactctatcaaaaactactaagtatagctgaacctctaacacttcctaaaatactatggaatcatcacttcttctaaagacaggaacacctatatctgcaaaaagacaggtgtaacccatcgtacatatatgtgaaactgaaagcaagttgcaatctaaagaatctacaagaaaaacattctgaaatggaatggtcacgtgatatagcaattatacccaatcctttgaccaaatctcgattaccatccccgaatgcgatagcacgatggggatcttggttattctcataggaggagaacatcctgctt

SEQ ID NO: 926 - DNA, 426 bp, Zea mays
  unsure (1)..(426): unsure at all n locations
agcttacccatgacgaggcatgtttccagtttaagggtcctcggtcagcaggcccacatcgacacggtccttaagtgactcagacggagacactacaccgagactttcttctcgtgcaagtcacccgcccagtcttgtctttatcatttaaaacccaaagtttggtacctatcagaggtacatctttttccgatgatgaacccatcatggccatgatggattcacaatcaagtcttttctttgaaaacttcccatcccatatgaagcatcatctttgtttaaaacaaaacattttgttttctaaggcaaggctaagcattagaaaacttttaagtaaaacaggtatcaaggaacggtaatctgttccagggaacgaaatgcagcaattggttatcnactcaactctatcatctaatgcatcatttc

SEQ ID NO: 927 - DNA, 446 bp, Zea mays
tgacgggatcgacaacgagcggttactttctctggctcggcacgcggtcaaggtggtcgccctggtcgaaagtgatgggcttgtcagaccagtctaggtagactggcgccgccaccttcaccaagcagacctcccggcgctcttgcttgcggtgccgaaccgaggcgttcgccacttgcccaccgtagatcatgaagcagtcatggacctcggggaactcttctgccttgtggccctccttcttgtcgttgtcgcggactctgccaccttccgccggtggcccggccttgtggaaatagcgccgaaacatgacacactcctcaagggtgtggttgacgagaccctgatgataggggcacgactccttgagcatcttgtcgaacaagttggcgccttcgggaggctttcaagggttcctgtgcttcgcggcagcaacaaggtctgcg

SEQ ID NO: 928 - DNA, 341 bp, Zea mays
agcttgtaagatgtcgccctcgtaccggatgcgacgatgcagtcagtcctcgacgtgacttcatcgccgctcgacgaccaaaaataccaaccgattcccatcctacgtcatttgtactcagcctcaacccacctaacaatctcgctttggcgggcgccctcgtagaggcgagtacaaaccctctggggtttcgcttgcggtcgccttgggaccggctgacggacgtctcgacctacgggccctctgggtccgaagaagatgtcgaccccaacatctgttgggatttctctggatttggcaaccccagtgccatgcagaacttcatgaccgcatgtgactac

SEQ ID NO: 929 - DNA, 269 bp, Zea mays
acaagtgggaggagcacatcacagcaagaatgtgatgaccacttctagacttctggagctgttgcatatggacctcttccgacctgtcgcctatctgagcatatgagggagtaaatatgggctaattattgatgatgacttttcccgcttcacttgggtgttctttttgcaggataaatctgaaacccaaaggaccctcaagcgcttcctcaggagagctcaaaatgagtttgagctcaaagtgaagaagatatagagcgacaacgggt

SEQ ID NO: 930 - DNA, 409 bp, Zea mays
agctttactgtttcttttcagaccgttttacaggtctccagaagtacttcttggttatcccgatcctgtgtgtcatctctataatcagacgcattgcctacagttacacaagcatctcataatgcatagttgttctgcttttgttaacctatgttgaaggcttgaggcctcataatgatttgtggctttgtgaattttaacttgtcaacttgtgcgcttaaccaatgccagatatactactgccattgatatgtggtcattctggtgcatcgttgctgagctatatatatggctgcctttattttctggtgccataaaatatgatgttctctgccgtatgattgagaatattaggtcaatgctttctactgaaaaattgagcccttggtctaaagttcattggttattt

SEQ ID NO: 931 - DNA, 463 bp, Zea mays
  unsure (1)..(463): unsure at all n locations
tctatactctttctgctggtgctggagcatcgtctcttatctatctccagcgaaccggacattgtatgttcgacgtgccaatggccatttattttttgaattttagctgtttcttcacgttcacactcgactattaccgcgtttgatcctaacagccggcatcatataatgtcgaggttacacggcagggccgtgcacagggcctccacttttttgggcccccaaatatctagcccattaataatactaattaggtttagtcattaacatttgctatttatcacatttgaagaattgggctgctgctgggatgctctagcacccacgactgcccaggcgacgatgcgcttctaccttctacggttctcgctgcagttgctcactgtgctggcangtgccagactggcagcgcgcttctacggtccttcactccttctgctgtctttatcgccaccgccgttat

SEQ ID NO: 932 - DNA, 422 bp, Zea mays
agcttgaagccatggtaagtagcataggctagttaaatgtgaattgactctagcctagctatgggtgcataggtttcacctaaatccaaaccttcgacttgtgaataccccttggccacaagtcgggctttgttccttgtcaccacaccatgctcatcttgcttgttgcggaaaacccacttggtttctacaacattttggttaggacgtggaactaaatgtcatacctcattcctagtgaagttgttgagctcctcttgcatcgccaccacccaatccgaatcttgaagtgctttctctaccttgtgtggctcaatagaggaaacaaaagagtaatgttcacaaaaatgagcaacacgagatcgagtattacccccttttgaaatcaccgaggatggtgttcatggagtgatctcgctgga

SEQ ID NO: 933 - DNA, 430 bp, Zea mays
  unsure (1)..(430): unsure at all n locations
aagctatacttntttgaaaccgcattgaataagtaacacaagcctgtgatgacaactttgacatgctctgtttcgagggctcttaccgcaattgggaggaacaccgtcatcatcacatggcagtcatgagagttgtagccaaatagagacaagtccttcatcctgactagtctgctgatattggatgagaaacctatggacactttgaccccacgcaaacatttgcaaatctttgttctctcctcaactgacaagttgtagctagctggggggaggtaaaggcttcctttgccactatccactggatgaagttccgggttgatttgaagatctactagatcattgcgtgatttgagtccgtcttttgtcttactcggcatgcccagcaaggttccaatgatgctgtcaaacacattttttgttacatgca

SEQ ID NO: 934 - DNA, 459 bp, Zea mays
  unsure (1)..(459): unsure at all n locations
agcttgtcaagcatattgtggtgcncacttcttgatgggttcatcaaagttagtcaacaaagatttaggaacccaaatgtcctttgtgctagcatttggtaaactcattacctttctagcacaagttgcaattttgggttgcctagttacatgtgaaacaattgacaagctacgagcggaatagttaccaatgggacaatccttacatagatgtcccttctttcaacatatgtagcaaaggcgatcttcacattgtgaagatttcttatttccttgtctcttgcttgctacatggttagtaaatattttcttttctaaaactatgctcttttggtttacatagggacatgacttaaccatatgttccttctcagagcatattaaacacttttggtcatccttggtaataatcaagctattttctttactatagtaacatgatctaatcacgtcccattt

SEQ ID NO: 935 - DNA, 344 bp, Zea mays
  unsure (1)..(344): unsure at all n locations
tcgcgcaaccaaacccgtcgccctcgcatgtcgnngcgtgatccgcgcgttagctccggagtccgttgggatgggatcgcctgtgcgggcttgggatataaatcttcccttccgtgtccttggtaacttgattcaagccatacccgaacgccattacccttgccaccgtcgttgcgtgagggagcaatgtatggagttttcaccaccggggatttcatctcgccgggctcgaagctcaacccgtgggcttaatgtgcccggccgcgggagacttggtgacctcttggcggattgcacaggaccctgatttgcccgaccattgctccgggaccgccctctgggat

SEQ ID NO: 936 - DNA, 402 bp, Zea mays
  unsure (1)..(402): unsure at all n locations
agctntgccagatcagttctgatgtgtggttgcgttctgcacatgtcagagaacgggcgcagaggaggaaggcgtgctcancaagagcgagccgctccgcaagatgaggtgccccagcagcagcacctgccgtcccgcccccgatgtcgattgagcagatgtttctgatgcacactcatgcagttcaagccatcggtcagactctggccgccattcagcagcagcagcagcagcaacagcagcaagcaccaccccagcctcagatgcctcagatgcctagagacaagcgtgctgaattcatgagaggtcatccaccaacgttcgctcactcttctgaccccatggatgctgaagattggctgcgcactgtggagcgggagttgcataccgctcagtgcgatg

SEQ ID NO: 937 - DNA, 402 bp, Zea mays
tcgaagctcggaaatggatcgctgtctattttctacgcgcaacgaatacaaacaggcacaagctaacatatacttgcataagaacattacaccatacaagaaatattatagagcgagcaatataaaatagagagcgcttctacagttatgcgagaaaaagaacacccatagtcgaagctactgtcgaggggttagcgtgtttacactgagaaagtattaatttgaatattaatccaataaatattagtcgagcaaaccttaagttaattgtctaaaatatgtggccagacgaattaacgttattaacatgagtgtgtataagcgaaaacaatttattattacgcgcagacgccgcgcgacacacgtgaaaatggcatgtgcggcacacgggaatgacgtgtg

SEQ ID NO: 938 - DNA, 282 bp, Zea mays
  unsure (1)..(282): unsure at all n locations
agcttctaaagggagaacacgtgataggtttgactaacgtgcaattcgaaaaagatagaccttgtgcagcttgtcaagcatgtcaaccagtgggaggagcacatcacagcagaatgtgatgactactcaagaccttggactgtgctatggacctttcgaccgtccctattgacatngagaagtagatggctatattgtatactttccgttactggtgtttttgagatagttaaaccaagacctaaccttctagaactaaatgattgactcagtgaaaataga

SEQ ID NO: 939 - DNA, 460 bp, Zea mays
agcttcagattcccaacattataagatggtttttcagtactgtcgaaagatgaattgaccgacagtttggcatataatagtataaaggtgtgaaaatcaattcttgtacttaaaaacgaattttttttcatttgtttatgcttcatactatgctccttgcacagggcttgatccttagcaacgccctcagggcatagaaaaatatcgaagacgaaggatgcactatagccctgaacaaccttcgttcgaaagtaattgaactaaggaacgaaggtcttgaaaaagataaaatattaatttcattggtgagcaaaataaaagaagacgaagctatttccaaagcacaagttgatgcccagaacaatgaaattgaagaccttctgaaatagctagccgaggccaaataaaatgcgctgttgccgaagctgatcgagatgccagtgagtactggaaaaactat

SEQ ID NO: 940 - DNA, 460 bp, Zea mays
  unsure (1)..(460): unsure at all n locations
tcatctatctgtctctgaagatcagctagacgagtcatcttctccttttttcgttgcacctgctgctgaaggatctccaggttttggatcttctgatccaagtcgtcctccggaggcgttggactatcggccttcctcttctggcttcgggcctccctaagggaaaggacgtcctgattggggtccaacggctgcagagtggcagcccctgttgctgaagcttttatcggcggcatgacgaaagtgatgcttgccgaaggtattcaaagctcaagaaatggaagtgagttcaccggaggtgggcgccaatgttggggacttgttctcanatgctatgaattaagaacaaggccacataaaatgtttaatatcaatgcccttcgtccttcggatcattatttcccttcggatacaatgaatctaggacgaatgtcatgaaggacataccttcaccatcatg

SEQ ID NO: 941 - DNA, 369 bp, Zea mays
  unsure (1)..(369): unsure at all n locations
agctntatatgggaggaagtgcatgacttctctatattgggatcagactggagaaagacagttctttgggcctgaactgattcaagaagcagaagaacaagtccgtataattcgagagaatttgagggtagctcaaaccaggcaaaagagctatgctgataatagaaggagaccactggaatttgaggaaggagactatgtgtatctcaaggtgtcaacacttcgtggaatgaggagattcaaagttaagggcaaatagtcccctcgctatattggaccattcttgatctttaagcgagttggggagatggcataccaactcgagttacctgctactctatcggatgtgcataatggtgtccacgtgtc

SEQ ID NO: 942 - DNA, 480 bp, Zea mays
acggaccttaaaactcaagctgtgaggttcttcatccccacatgtgctaagcggtgatttacagccagcccatgctagtcttagctattaagcatgcatctaaaccggcctcttcttttgcaaaatctactaaataaagattgccgtctaatacacccttaaaagctagtgaaccatcacttcttctaaagacagacacatctacatttgtaaatagacagttatatcccatattgcataattgactcacagatagcaaattatatccaagactctctactaaaaatacattagagatagaatgctcattaaaaatcgcaattttacctaacccttttaccttgccttgattcccatcaccgaatataattgaatcttgggaatccttattcttgacgtacgaggtgaacattttcttcttccccgtcatatgggttgtgcacccgctgtcgataatccagcttgaacccccggatgcat

SEQ ID NO: 943 - DNA, 399 bp, Zea mays
  unsure (1)..(399): unsure at all n locations
ctcaacttcatgcatttgttggctctggtgggtttcctcatttatagtcgagaaggatggagtgacaataacactatcatcatcatcttcttcctttggctttatttcaccaataaccatagttttcatatcaattctcaattgacttccaccaacgtcatcaaagttctcattttcatcttgatatctattngtttcatcaaactcaacatcatatgcttcttcaataatgccatgagtttagtgaaaactctatatgccttgctatttgatgaatatccaaagagaaaaccttcatcacatttcttctcagatgtaaaagagttcactacctttcctcaaaatatagcacttgcaactgaacaccctaaaataagaaatgtttggctttctgcccat

SEQ ID NO: 944 - DNA, 443 bp, Zea mays
  unsure (1)..(443): unsure at all n locations
gacctataaaactcagcttcnaggcctgatgggtgcgaataagtcaatgatctgtcttctcaagggacacaatctcgcctcgcccgagcccagcctcgggcaagggcagccgaccccggaggatttacgtctcgcccgaggaccccctccagcagcggacacaccttctgctcgcccgaggcccagtcttcgccaagaagcaaccttggccaagtcgccacgccgaccgaccgtatcgcaggggcatttaatgcaaaggtggcctgacaccttatcctgacgcgcgcccttcagtcgacagccacctgcgctgctccgactgtggtgccactcgaaagagtgaggctaacagcagcaaagtccggcctctggcgccatatgaaactncgcatcgcccgaagggctcggactcgggctcagccctcgaagacgatgaactccgc

SEQ ID NO: 945 - DNA, 359 bp, Zea mays
tgcaagcttggagctgatggagaatcagaaatttttgcagtctttgttcggaaactgcttgccggtgtcaactgggagttccgacggcactcccaatcggcaaacactgtttcgccaaacgaatctctgtgcagtctttgatgttattggggaaaccgccctcgcctccaaccatgttggtaaagtactcgacagcgacgaaggtgaacttgaagctcccctgagccgtgggcaggggcccgactatgtccaggccccaacgctggaggggccatgtgtgggcgatcagcattgcgaatcgcgaagggctgcctgatcgatgagaaaacttatggcaagcttcgcaagaccttgtgacc

SEQ ID NO: 946 - DNA, 389 bp, Zea mays
tgaatgaagtaacaattaagaataagtacccattaccttttaatgaatattcagccgatcagatgaaaggagctaagatattctcgaagatagatctaaggtcgggatatcatcagtttaagattcgagcagaagatgtacccaagacagccttcactacgagatatggattatatgagtttttggtcatgtcgtttggactgactaatgcaccggcatactttatgaacttgatgaataaagtattcatggaatatctggatcagtttgtggtcgtattcattgacgacatattgatatactctccaaatgaagaaacacatgaagatcatctaacgctagtcctacaaaagcttcgtgacaaccaattgtatgcaaagatctcgaag

SEQ ID NO: 947 - DNA, 440 bp, Zea mays
  unsure (1)..(440): unsure at all n locations
agcttctaaagggagaacacantttgggactaacaaatgttcattttgagaaagacagggtttgtagcgcatgtcaagcacggaagcaagttggtgttcatcatccacataagaacatcatgacgaccgacaggccacttgagctactccacatggatctattcagcccgatcgcttacataagcatcggtgggagtaagtattgtcttgtaattgtggatgattattctcgcttcacttgggtgatctttttgcaggaaaaatcacaaacccaagagaccttaaagggattcttgagacgggctcaaaatgagttcggcttaaggatacaaaagattagaagcgacaatgggacggagttcaagaactctcaaatagaaggctttcttgaagacgaaggcatcaaacatgagttctcttctcctaccaccacaacaaat

SEQ ID NO: 948 - DNA, 446 bp, Zea mays
ctcccagtggtacttattgttaccttaatatgcttctatggactcaagaatgctggaggaagctttagcagaatgatagccaaggttcttcactctcaaataggcatgaatgtgctaacttatgttgatgacatcatagtaaaaagcacgaaacaagaaaaccatattgccgatttgcaagagacatttgctaattttaggcaagctagtctcaagttaaatccagaaaagtgtgtctttggggtaaaaaagggcaagttccttggctgtctggtatcaacaaagggaatcgaagctaacccaagtaagatcgaagctatccttcggatggagccgccaaattcaaagaagggggcttcacgattggcagataggctggcgtcacttaatagatctatatcaagatctacagaaaggaatctgccattctttgaaatactaaagtc

SEQ ID NO: 949 - DNA, 432 bp, Zea mays
  unsure (1)..(432): unsure at all n locations
gcttgtttcacgatgaattgtgtattgtattctatatgtgtgtgggtatggtcacggatgaaaagtagtagtgctcaggtgatgtctaaattaagatgcaaactattggtgaagagcgcttcgatattgattgttatagagaatgcgtcgttgattggttgtagtagttntagtgcactaaatgacttgaataaaatttgcaagttgacttgttggttctcatttgattgttttaactctaacaaatggtaaaagtgttagaataattcaaatctctagatcatggcaattcttgaattatatagaaactgaaattcattgattgctgttttggactgcacgcacttgtttagttatgctgtatagttgatgaactaaattgtgttctctgtagatatgtgctatagaacagtggtagataactttattatc

SEQ ID NO: 950 - DNA, 447 bp, Zea mays
  unsure (1)..(447): unsure at all n locations
cttcttcgaaggattntctgtcaagaatatttctctaggttttaatgagcatgctgatctgctagctaagtcagcagcacaggggctgcctttaccttcggatgtgttcttcgaaacaataaaagcaccttctgtggaacttcttgaaagagcagttcttaatatatctcctgtttttagcgaagattggagaaccgagatcatttcttaccttcagggtaaatttctttcagatgacgaagcttataataagaggatagaagccagagctcgtccatatgtcatgatataaggggagttgtacaaacatggagtttgtgctccgctgctcaaatgcttatccagaaccgaaggtatagagttaatgaaagaaatacatgcaggcctgtgtggatctcacatcggacctaggccgttacttggaaaagttttcgtcagggttttact

SEQ ID NO: 951 - DNA, 376 bp, Zea mays
  unsure (1)..(376): unsure at all n locations
agctaggtattgtttatattcganctctttatgtggngcaaccttgctagggcttggctcctatattatagtgcctctttatctatctaaccacatgagattatatgtctcacggggtactgaaggacaaccatatataacactaagtgtgtaccagtatggatccacgttgtgaaccgcaagatatatcaaactctttcaattctgagttgccctctccagaaactattgggacaacgccctgaattgcggggcgcaattttcttcttctaacttaacaaatctaggcgtgctctcttttgcttatccggttgctccttttccattttgacagagttagtaatatgtcatattgccagtaacaaaaactctacgc

SEQ ID NO: 952 - DNA, 464 bp, Zea mays
tcagcttactctacagacctttcccatcttttcttccatgtgtagttcattatcatatgtgatattctatgtatatttacttcatttgttctcttgtatggtgtactggttgttccctaatttgaatggatggatgtatgtatgcttgcaatcgcatagagaacgatccggttgaagagcccgaggaactcgcaagagaagcccctaagcagcaatcggttggtggaggcaagtgtcccttgacctatctctgtcctattcattctttaattcacctcccgctttacacatttatacttaaggattgactagcttttgttatccatatccttgttcacctatttgggttggattattattgcatagctttatgctattgcttaactctaatcaatgaacatgatgagattatctatgatacgctgttttcccctctcgtatgatgatgttatacttgtggtctt

SEQ ID NO: 953 - DNA, 462 bp, Zea mays
agcttgttgcagatctgagaagtaaacagtttgaatgctatgcaacatgaacgaggaggcggtatggtgggatctcccttggtatagctaatgtttctcatgtgcttatccgtgttccacgcctgccgctgcagaccaagtgaaggatcctattgaactgaggttttagaattttcagatcctgatctgcagtatatcttagtgccaagtgaaccaatagctgccttgctgatcttatgcgatgcaagtggtagctgtttctatctgcaatgatgactagaaatctgaaactatgtacagatggcattgtgctcacgtcgtcacgtgcttggtggttagagaatacggttgttatttgcttagttagcagcctatgccatggaataaagaaagtgtttactacattgtaagcataaaatttaataatcccactctgtgttgatgaatatttttcctccatct

SEQ ID NO: 954 - DNA, 300 bp, Zea mays
  unsure (1)..(300): unsure at all n locations
tatacacacttctaatagaattataatttgaatttgctatttcagtaccgtgctttttacttcacaagaaaaggttggccgaggtccctgctctagcgcaaggatttctactgcaacgattgcaacacacccaggtaagagacgntctatgctcctctcctctctactttctgttgcttcaggctttgcccagatggatgcatattatgtatttgaattggatcatgagcgattcaaatcttaagtattgctagtaagtctctctaatattggacgcttatgggctcttattttgggcaa

SEQ ID NO: 955 - DNA, 352 bp, Zea mays
agctggtgcctctttcaagatatggatgattcgttgaactcattcttctggttcagacctgaaaaaccatgtcaggcctgaaaaaccacctttctcctggttcagaccaattcaagggggtacggcaccgtcgtccatacaatgcttcaaatggtgccatcttaatactttcttgataactattgttatacaaaaactctgccaatggtaaacattcatcccatttttgtgggaattctagaattcatgcccgtaacatgtcttcaagtatttgattcactctcttagtctgtccacttggttgaggatgatatgccgaactgtggaacaacttaatacccagggacttatg

SEQ ID NO: 956 - DNA, 429 bp, Zea mays
  unsure (1)..(429): unsure at all n locations
tctactgaagcttcngctcaacaagctgaagctgaagctttgtcttcttagcccttcaaagaacaaccttttgaagccgaagcagtaaaaattccggaaccaatattagttgaagaaacggacaccgtcatccccgaagcacctgccggcatgcatgattacatcatacgacatgcttcggggaaaaagctatccgaggaagaaactcatgaggcccaccattatgcaaaggagctaaaatatccgaagggggcagtaatattcaatggaacaaacgaagatgactccttatactggctgcctgataacaaagagctatccgtctgccgagagatagcgagaagcataagctttccgaagcttggagctgcgctaagtgccatgacgaaagaagatctcgcagacagcctcgcgtaccacagcctgaag

SEQ ID NO: 957 - DNA, 383 bp, Zea mays
tctccacagtcacctgcggctgcagcttcaccagcgctttgaacccctattgattgtttgatagcagcatgtgccactagggggttattgtaacatcccacaatttcaacccgaggttagaaaccctaatcttccccatatttatctctccctacaactccaccccataggcgctctcatcatatgcatacactctgtttgattagaagcacctcacatagattatattcttttagcacctaagattatctacctaattaattgttcacgaggaaaggagataaccgaaatagaaatagaaaatggaaatacgaaattaataaaaacaggagaaacctttcccccctggctgaggcgattgccggccatacccgcggctcttc

SEQ ID NO: 958 - DNA, 400 bp, Zea mays
  unsure (1)..(400): unsure at all n locations
tacaagaaacatcctaagacatctagactctgctttcacactatcggatcatcgctcttgagatttgagcactattcgagtagtaaactcctcgcgctgtgtttgtgtgctcacattctcacttgtgtgtgtggntgtgctgcagatttgagtcttgtgtgtgttgctcttcccaaccttactttgtgctttctttgtgatctcaattgtaagggcgagagactccaaattgtgaagattcatcgcaaacgggaaaaatactatgaaggaaaagactgtggtattcaagntggtcattggatctcttggaaagggttgagcgcaacccttcgccattaggacgccacaacgtggaacgaagcatggtgccaacccagacacaacatgcaagcttcaggca

SEQ ID NO: 959 - DNA, 385 bp, Zea mays
  unsure (1)..(385): unsure at all n locations
agcttgtgaaggttcttcatccncacatgttctaagcgttgatgccacagccagcccatgctagtcttagctattaagcatgcatctagaccagcctcttcttttgcaaaatcaactaaataaagtttgtcgtctaatacacccttaaaagctagtgaaccatcacttcttctaaagacagacacatctacatttgtaaatagacagttatatcccatatgacataattgactaacagataacaaattatatccaagactctctactaaaaatacattagagatagaatgctcattagaaattgcaattttacctaacccttttaccttgccttgagttccatcaccgaatataattgaatcttgggaattcttattcttgacgt

SEQ ID NO: 960 - DNA, 342 bp, Zea mays
atggccagagggcaacatcaattggccggaggtgccagtttagaaatgcgccgggggcgaaagaccgagtatctcgagatacccctcaaagacagcattaaaggttggcgtctggagtggtttatagtggataattatggaaattctctcccttcccgctcaagaagacagccggacgttcgtactccgagttggactgaatctcccacggaccaagaagtagccgaagcgggtgtgttgcttactgaagttggattactgaaagagagaagtctgactgccgaagccgtggtcacaagatttgtgttcaaaaacattcaagtcgttgaaagacagggccta

SEQ ID NO: 961 - DNA, 363 bp, Zea mays
tgcggcatgaagcttgacaggaagcaagcaacttggtttttcggaaaacatcaatctttgagtgggcaggccgagcacttgctggagaagcgcgtcatcaagtccaggacgtccagcgccctaacgctgacgatgccaaagcaaggctgcccccggccttcaacggggtcggccagaatctggctgcagcggcaatactactccgagcaatgacggagccatccaccaccgaggggcagagtatctagggagaactcaagaatctcttggaggatgccgcggttcgacgggccgaaagctctgcctctcgaaggcaagggtgccccccggagcatcgcgcaacgacttcccgactcatgcggg

SEQ ID NO: 962 - DNA, 342 bp, Zea mays
atttcagagaacctgaatgcttcctcccttctttggcgaaagtcattgtcagctcgaatatactcgtccatcttctggagcagcttcttcaaagactgtggtggctttctggcaaagtattgcgctgaaagtgccggccgaagtcccttaatcatggcctcaatgacaatttcattgggcactggtggcgcatgtgccctcagacgcagaaaccttctgacatacgcctgaaagtattcttcgtggtcctgcgtacactggaatagagcctgagcgtgactggtcttgctgaaatcctgaaagtggtatcacatatcttcactttgcatgagaatgtcctgg

SEQ ID NO: 963 - DNA, 344 bp, Zea mays
gagcaatgagagtctagggctacattcacagctaccgatgatggccttattaaaaacaatgaacaacttaaggctaagttagctagctctcaagaagctattgaaaattttctagagaaaatggaaattcttagcatacacaacaatgagctaactactaagctagaacacattgctagcgccccacgagcatctttagttgaaattcctgaaattattaaaaaggatgcttctacttttttcttggatctaattgatgattctaactcctgcaacccagtctttgtgagaatattgttgtagaaacatgtctcaatgacggttgcaacggaaatgagcaatta

SEQ ID NO: 964 - DNA, 455 bp, Zea mays
agctagacaatgaagagatgtcactcattatcaagagcttctgccaaatcctcaagcacaggagggggaaggactacaaaccccactccaaaagggtgtgctacaaatgtggtaagtccggtcatttcattgctaaatgtccaatgtctagtgaaagtgatagggacgacgacaagaaagggaagaagaaggaaaagaagaggtactacaagaagaagggcggtgatgcccacgtgtgtcgggaatgggactccgaagagagctccaccgactcctcctccaacgaggacgccaccaacatcaccgtcaacaagggcctcctcttccccaacgtcggccacaaatatttcatggctaaagaaagcaagaaaaagaaagtttatgcatccggtggttcaagttggataatcgatagcgggtgcacaaaccacatgacaggggagaaaagaatgttc

SEQ ID NO: 965 - DNA, 201 bp, Zea mays
tagctctgtgtggaatcgggttatgatcttatcacttgagtgtgtctagaattgaatgctagagctcttgtaagtagttggaaggtggaaaacttggatgacttgaatgaggggtggttgggggtatttataaccccaactaccaaactagccgtttggtggaggctgctgtctcatggcgcacctgacatttcggcgttc

SEQ ID NO: 966 - DNA, 394 bp, Zea mays
  unsure (1)..(394): unsure at all n locations
tgcacccaggaccacgaagaataccttcgtgcgtatgtccgaaggttcctgcgtctgagagcacaggcaccaacagtgcccaacgaaattgtcattgaggccatgatcaaggggcttcggtcgggaccttcagctcagtactttgccaganagtctcctcaaactttggagaagttgctccagaagatggacgagtatattcgagctgataatggttttcgccaaagaagggaggaagcattcaggttctctgaaatgaccaggggcttcggaggaagattccatccgaggcacgtcaggtcaattcacaactctactcaaagtgatgatagagggagtcaacagcaaaggccgcagtactcttcgcaagctttggggcagcagcaaagctctt

SEQ ID NO: 967 - DNA, 430 bp, Zea mays
  unsure (1)..(430): unsure at all n locations
agcttcaaccttaaacccattattctgttttcaggcaacctttctccaagcgggcatacaaatcatttggcccatttgaggtgttggcacgagttggcagcgcatcctacaaagctcaaactaccggacgaaagtctgatacattcagtatttcacatgtctctcaacacaaacccttcacttcaaattatgcacatgcttttactgacttccaagctttggttgatctgagtgcacatgatcttgtgcgtgagaaaattctggtgcagtggcataagcttcctgttaccgccgctacttgggaagattggcatgtgttacagtccaagtttctaagagcagctgcttgtggtcaagcaacatcccgaagagtcgatgatggtgggcccggngccggtacatgcggcgcatcaacaacagtaagagatac

SEQ ID NO: 968 - DNA, 456 bp, Zea mays
  unsure (1)..(456): unsure at all n locations
actatanaaactcaagctctttgtcgagtgtccagcanataaccctcggcattcattctcttgccgagtgatttatttttgacactcggcaaagaagctctttgccgagtggtatatttctgacactcggtgaaagtcgcctagagggggtgaataggcgaaacctaaattttataaacttaaatgcacactaaggtcgggggttagcgctagaattaaatttaagtccggagagagggaaaacaaatcaaacaagaatcaaggcgattgaacacgatgatttgttttaccgaggttcggttccaaagaacctagtccccgttgaggaggtcacaaacaccgggtctatttcaaccatttccatctctcaaacggtcacttagaccaagtgagccttttccttaatctatcgggtcactaagaactcgcaaggaccaccacacacttaggtgtctc

SEQ ID NO: 969 - DNA, 109 bp, Zea mays
gtcttgtacaacatgtgtctgttgtgggaaaccattcggtctacaacattctgttaagacgtggaaccaaatgccatacctcatttctaacgaaattagtgtaacgccc

SEQ ID NO: 970 - DNA, 463 bp, Zea mays
  unsure (1)..(463): unsure at all n locations
cactatnnatactcaagcttcctgatcgatccagaaatgggctgagaagccatgtttcctttcttttggttgacagcagtccacatatcagtcgtgatagcaatcctataattgtgtcctgccatgaaatcaaaggctttattccttcctatctcatattgcttcataatggcactcctaacgaaatataagttatccaaaacacactaagtagttcagaacagactgccaacacacactaagtagtttacctaatagcgctccttgtcaccattttaaacaaaggttgaagtgcgctaacaaatcttctaaaacctgcatgaacaaccatgcataatgggtattcatgcaaaaccatcatagatgcgagcctctttctagcaatttcttgatccaaagtatagttctacactgacactatcactgtatcacgaaaccaaacctcaatgagctntgactaaat

SEQ ID NO: 971 - DNA, 333 bp, Zea mays
gcaatggaaagatctgatacgggcggcgttatacgccttgtaagttgcaactccttctaagataataaaacgtaaccacgacggagattacgaatattccaagcatatacatcttaagccacttagctaaggatagatgaaatccagttagacagccaagccagaagcaaacgagttatcaagtggcgagataaagctttgtatagctgctgtctttttcatatatacatatgtataaaggggtttagctgaggagctttgaattctaagagcacgcatattgagaataagcgagcagttgtatttcttacatcactactgtttcaagtgctt

SEQ ID NO: 972 - DNA, 288 bp, Zea mays
cagcctctttatggagaactcgtgatacgtttattcaacgctcaattcgaaaaagatagaccttgtgcagccttgtcagcagggaaacaggtgggaggaacgcatcacaacaagaatgtgatgaccacttctagacccctggagctgctgcatatggacctcttcggacccggcgcctatctaagcatagggggaagtaactacggtctagttattgttgatgatcttttccgctttacttgtgtgtactttttgtaggataagtctgaaacccaagggaccctcaac

SEQ ID NO: 973 - DNA, 457 bp, Zea mays
  unsure (1)..(457): unsure at all n locations
ggagctgaggcattgcctcaccggagaggctgtatactttcgccggacttcggtcttccgccgccgcgcgtggaccgagctaactagtgagtatttttccaattccttgcacccacgtcttccctagcatcctgtgaagctctctgacccgttcaattgatctatcacgccgtgagtaggccggatttctcgccgccgacgagcatctccgcctgcgcacgtggaccggccgactccgaccatccccgacggcgacccgcacatcgccgtgatcctcgagacctcccctatgtcctcgaccacctcaccggagcatnctcgctgccggtaagcccctccgcctctttcttctccgtggccactggtncattagggagggactgcgggtttgatttccagaaccctagggggttntctgcagagccgcagactcagatgaatagtgccccgacgagct

SEQ ID NO: 974 - DNA, 441 bp, Zea mays
  unsure (1)..(441): unsure at all n locations
agcttagttaaactaagtggtaagtctattttggtgtttcactaatttctttttaaagtcttagtgagaatttaataagatttctagttgaacttatttgagcgaggtatattattttcctttcttcttatttcctttatgcttttaaggtgggtttgaactacaagttatattaataaattcccaaaacttctgaacaaattacagtggcttcttactggtgtatgagtctttgtctcaaaatttgggctttaaaaagtaagtagttctttctgtataaaattatcaaatattacggcaggaggggtgttttgaactatggctccttcttaacagaaggttattccttaagacatnattttgctggcatctagatgtcataacatgactttgcacacaattccgatcatttatacttaccagttatttattatgatgttc

SEQ ID NO: 975 - DNA, 400 bp, Zea mays
  unsure (1)..(400): unsure at all n locations
cagctgtgagtcaagtcaattcagaaagtcgtgaacaactgttgaaccagccttgttnttcttgctagcttcttcttgaatctcgagggcgagattctgttaaggggttagatttgtaacaccctgaatttgggggtataaaaattcttttctaatatccaccaaattcaggtgttaccctctcttttccttacttttcttttcttttttttctaaataatggataagtattttgctatatattggcgtaagcctagtgaagtgagccctaaaggtgttttgtttgttgcattcataccgtcacaaagtgtttctaagtgcaaaaagtgtttgaaacgtgttaatataccatgtagaagccccaataattnttatattggttcagagattttttctcctt

SEQ ID NO: 976 - DNA, 454 bp, Zea mays
  unsure (1)..(454): unsure at all n locations
agcttgcacacatagctcatttgaatacctttgatcatatctcttctatatgctatgactaatgtgttttcaagtctatttcaaaccaagtcataagtatattgaaagggaattggagtcttcggcgaagacaaaggcttccactccgtaactcatgcttcgccatcactccgagcaactctctattccttggggagaaatgagcatcaaagaaaaggacttcatccttcgaggagagagtaaaagcttcaaagcaaaaggaccggatttcgtctntggtataatcttaactcatttacttatgaccaaaggggaagaacttaccgagggctctaatggttccgcttttggcgattcatgcccaaaagggggagaaatgagcccaaagcaaaaagaccgcaccaccaccaccaaattcaaaacttagtggcttcacaagtccttatcattggat

SEQ ID NO: 977 - DNA, 454 bp, Zea mays
  unsure (1)..(454): unsure at all n locations
ctcagcttggttgttaaaggactatggtattctgggtttgttgttttcactgcagngtccaaagcaccagctatactaaaattttctgccgagattcttcttcgcaagaatgggttcctcgtcatcgaagctgcactggagccacggtacattgtgcaaaggcctgtactgctcacatacagcctggagaagaagctagtgccacggcattgtgtcatgaaggtcctgtgggaaaagggattgctcaatagcaattcaaactttttcacagtaattaaattacgtgaggaaactttcagatcgaagttcatcgactgtcacaaggactctgttcctggccttgcatattcctatgctacaacccgtgctggtatttgtgccctctagaagttattatgttaaccatctttatttatgttgtaagccccttgctagcacactggtgggactgcaa

SEQ ID NO: 978 - DNA, 444 bp, Zea mays
  unsure (1)..(444): unsure at all n locations
agcttatgttagagaaagcattatggctnttctcaagattataacatttctgaataactgttctgcataggcatggtaccatcttcatcatgtagcctgagatgagctggcaccatgaaagaattcaagtggttaaatcatgcatctgcaaaaatattgtactctcaaatggtgggttgctgcgtcacgggagtttgggtgaaggcctgaaagatgtgattcaaaacgtcgatgcaagttcatgtcttctcctaacattattcctactatatttgaatttgaggcacatatcatgaattactgctaggacattcttagtgtgtcaaatatgtcatgtaaagtgaagttcagtggtatgaataatgctttgttgtttactgaatgttcattgttcagtgatagcagcttacacaccccatgctttctttctctaggtctgggatg

SEQ ID NO: 979 - DNA, 150 bp, Zea mays
ggacaacgacaagatagggaagaagaagatggaaaagaagaattactacaagaagaagggtggcgaggcgcacatggggcgagaatggactccgacgagagctccaccgactcctccgacgaggacgccgccaacatcgccattcaacaa

SEQ ID NO: 980 - DNA, 453 bp, Zea mays
  unsure (1)..(453): unsure at all n locations
agcttcctccagcattcttgagcccctcatgtatctgattatagcaataggtgccactaggagttatgaagctagtcttcaactcatcctccttcttcattcatatttgatgatatcttgagtagcaatccagcagactcataagctctaaagaagctgctgcatctacaagagagtctattcttggtaaccgaaattcctcggttggataggccttgttaagatctgtgaagtcaatacacattctccatttgtcgttggccttcttcaccataacaatattggctagccactctggatattttacctctctgatgacaccagcactgagaagcctttttactttcattcgagcaccttcagctttatcatcagacattttctgaagccttggcttcctggcctgaatgatgggtcnaccttgagtgaatgttcatgacatctctgttgacc

SEQ ID NO: 981 - DNA, 473 bp, Zea mays
  unsure (1)..(473): unsure at all n locations
ntgccgcataacannatttgattntggaaggtgaaaccttcacagtatccgctcctgctccgaaggttccccaagatccatcacataacactgtccaggcttcgttgtctttattcgtttcctcctcctgagtccctagcgtccaatcagcaataaagtctgccagcgcctgtgactgaattgaagatctatgaacatattcaatacaaaattcattgagctctgcagcccattntccaatccttccagtagcttctcgattcctcataatatccttcagaggttgtgatgaaggaacaattatgttgtaagcttggaaatagtgtcgaagcttcctggaggccatcaagacagcatacaataccttctccagctctgagtaatttttctttgacaaactaagaacctcggatacaaaatatatttgggcctgcctcttgacttgaccatcaagcttcttctggacaagcgct

SEQ ID NO: 982 - DNA, 371 bp, Zea mays
tttttttcatagacccgatttgtagcgcatgccaagctagacagcaagttggcactcatcatccgcataaaaacataatgactaccgacacgcactggagctcctacacatggatatattccgcccgatcgcttacataagcatcggcgggagtaagtactatctagttattgtggatgattattctcgcttcacttgggtgttcttttgcaagaaaaatctcaaacccaagagaccttttagggattcttgagacgggctcaaaatgagttctgcttaatgatcaagacaataataagcgactacgggacggagttcaagaactcttaaattgaaagcctttctgaggaggatggcatcaagcatgagtt

SEQ ID NO: 983 - DNA, 418 bp, Zea mays
agctagacaatgaagagatggcgctcgttatcaagagctttcgccaaatcctcaaacaaaggagggggaaagactacaagccccgctccaaaaaggtttgctacaaatgtggtaagcccggtcattttattgccaaatgtcctatatcaagtgacagtgaccgaggcgacgacaagaaggggagaagaaaggagaaaaagaagtactacaagaagaaaggcggcgatgcccatgtttgtcgggagtgggattccgacgaaagctcaagcgactccttcgacgacgaggacgccgccaacatcgccgtcaccaagggacttctcttcccaaacgtctgccacaagtgcctcatggcaaaagacggcacacggaagaaagttaatctaactcttcaataatatgagtcgctagtgatgat

SEQ ID NO: 984 - DNA, 170 bp, Zea mays
  unsure (1)..(170): unsure at all n locations
tgtctacagatcttttatcccatcccatgcctgtgcaaacctcattgctggatgcacnccatgggctcaagacgaaaaaactactccatatgtcgaaacctggacaccggtatcgcatcggacttggggaaccttatgaacaagaacggctgctgagttgtgactcacct

SEQ ID NO: 985 - DNA, 373 bp, Zea mays
agcctgaggcgccctaagttgtatcgtcttatccgaagcaccaaatctcccacctagaagcctctgggccgaatccttgcggcgtggtattgtctcagaaactgctgataccgaactgagtgtagtaaggctacccctcgagcctctttcatctggtacaataaatcctctcagctgggctatttgttctggtagtattatgcctttgtgctcggcgagccatattctaagtccgcgggtaggatggcctcggccctatagactaggaaaaacggtgagaaactcgtggcccggctcgagcgccttctcagactccaaaccaccgacggtagctcttttatcaaccgcttgccaaacttggtgaagtattgta

SEQ ID NO: 986 - DNA, 332 bp, Zea mays
gaccgagccgagggattcccacgcccctgggatacggatacctcactcatcccctccgcgaaaagccactctcgctcacacaaacatccctggtaccgacagaaaccagatgcccgatacaggaggagaaaagacgcaactacccaagcgcggagagggcgtgatcttctggcctcagcggccgcaaaaagcacacgctacaagatgatctgatcctgcaagctcaggtcttcacgccgaagggagcacgagcaccctcagcatcgacgacgacatcaaccaagcccgacccagccccgggcggcgccgctgaccacgggctacctcgggaa

SEQ ID NO: 987 - DNA, 193 bp, Zea mays
agctttcgtacacttgggtgatgagcatttctttatcaattttctccttgctattaaaaagaggtccagatgatgaagcatgatgcaatggagtgtaaagcacgatcataccctgagacggagaagattgagaagcaccaaactatggagcccgcgacaaaaaaccttacactcatctgctgcttcgtcgctg

SEQ ID NO: 988 - DNA, 168 bp, Zea mays
taatagcatccatgcgaaggtcacttgcactctcgtgcccacgtttcacatctgatagaacatgtgattcttaccggatgagcatccgcaacatagttctggaacctaagcctaacccaacagagttggggagttggggaatatgaacacccataacattaaacgttc

SEQ ID NO: 989 - DNA, 442 bp, Zea mays
  unsure (1)..(442): unsure at all n locations
agcttctacccatctcccggtatacagatatctctntgttatccgggaggcagtacaaaaaatcttcttctctgctatcgttaaacactaatgcccccttcggatattttagcttctgggcatagtgttgagcttctcgttcttcttctttagagagttttttccgaagcatgacggatgatatattcaatactttcttttaaagcttcgggagcaggagcggcaactttttcaggctcttcaattttcgagggttttttctcagcaagtgtcacacccggttttggaaggtaaaccgaatgcgaaccatgtacgtgccaggatcanaactcacgtacacagcgattacataaatgaacatcatcgcacaatgcttcaataataacatanaagagtacttatctttatacatcacagagtcatagacatcaacctagtcatc

SEQ ID NO: 990 - DNA, 479 bp, Zea mays
  unsure (1)..(479): unsure at all n locations
gcttcggatgttcgcagaaagggaaccgacttaaagatgataggtcatttagacctcgatagattgctatggaattatcaccaaatgtaaagggcatgtatgtaattttgtatgggttgtatcccgtgcctataaataggtgaacagtacccccgtactgttcacgctgacttggcatttgcttttgcgtcacgcttgtactttttatcttctctcaggaccgaaggtacatttgtaatttgaaatcatttctatttttccatgttaataaaatagaaatgattctatgatgatgcttatattatatttcatgctttatatgaatccttcgtcattacttgttatgttcacgaaggtatgtctcttatgaccttcgtccgaagctcattattttccgaagggacataatgcttcgaaggacgaaggactnntaacacttaacacttttatgttgccttgttcttaactcttaacatttg

SEQ ID NO: 991 - DNA, 334 bp, Zea mays
agcttctcttcttcatgtgacgtgaggtcttttctgatagtgactgtctgcttgggcgtggtctgatcaaggggaacagtcttggtttcgtcttggctctgcaactgtgccttctcgtgctgcttatctgttgggctggcgggcgcggggacctcccgctgggtcgtgaggcagtgtacgttcctctgaccaggcacgaaatcccgctctatgttgtgcgccgtctgctggttgccgtagattctgataacgcctatcggaccttggtatcttatacatacggacagtcccgggatggccacttccaacttattgatggaacccccgcccatga

SEQ ID NO: 992 - DNA, 351 bp, Zea mays
tgtgaagattcttcatgccaacatgggctattctgcgatttctgagccaacacatattagtcttagcaattaaagcaagtgtcaagctcatcttgattatcattaaaatcaactaaatttagctgaccctctaacactcccttaaatgctattgaatcatcatttttgtctaaagacagtaacacctatatcagtgaatagacagctgcagccattttgcataattgagaaacagaaagcaaattgtaatctaaagaatctacgagaaaaacattggaaatagaatggtcaggtgatatagcaattttacccaaacctttgaccaaaccttgatttccatctcccaatgtg

SEQ ID NO: 993 - DNA, 412 bp, Zea mays
  unsure (1)..(412): unsure at all n locations
agcttatgaagattcttcatcccaacatgttctagtcggcgatgccagagccaacccatgttagtcttagcaattaagcaagtgtcgagttcagctctatcaaaatctaccaagtatagctgaccttctaacactcccttaaatgctactgaatcatcacttcttctaaagacagtgacacctacatcagtgaatagacagttgtagcccattttgcataattgagatacagaaagcaaatggtaatctaaagaatctacaagaaaaacattggaaatagaatggtcaggagatatagcaattttacccaatccttggaccaaaccttgattttcatctccgaatgtgatagctccgtggggatcttggttnttggtggaagaaggagaacatttcttctcccctgtcatgt

SEQ ID NO: 994 - DNA, 473 bp, Zea mays
tatctatgctatacttgttgcgtccaggttatttctccttattttcacgcacacaaagatgtggtggtgacctccttcccgttaagggccattctccacaactctaacgccacgggcaatatcgccaagtgggcagcggagcttgctgagttccaactggacttccagcctcgccacgctgtcaagagccaagtcctggctaacttcatcgtggagtggaccccttccccgagcactcctgggggtccggatcttgattcagaccccacacctgcggagcctaaggctccgatcttcatcaaaccccactggacgctcttcttcgacggatccgcccgcactagtaagaatgtgatcatcagtgacgattttctagtgacgctggtgacttcagtcacagattgatacatttctatgaccaaatttacatcttcgtcaacaattacaagtgacgaagattagacttgaatatt

SEQ ID NO: 995 - DNA, 391 bp, Zea mays
  unsure (1)..(391): unsure at all n locations
agcttctaaaaggagaacacatgataggtctaactaatgttactttcgaaaaagatagaccttgtgcagcttgtcaagcaggtaaacaagtgggaggaatgcatcacagcaagaatgtgatgacctcatcaagacccctggagctgctacatatggacctcttcggacccgtcgcgtatctaagcatangaggaagtaagtatggtctagttattgttgatgacttttcccgcttcacttgggtgttctttttgcaagataagtctgaaacccaaaggaccctcaagcgctttctaaagagagctcaaaatgagtttgagctcaaagtgaagaagataaagagcgacaatgggtccgagttcaagaaccttcaagtggaggagtaccttga

SEQ ID NO: 996 - DNA, 419 bp, Zea mays
  unsure (1)..(419): unsure at all n locations
aagccatgcaagcacagcccagatgccatctttctcacgaatgtggtcagaccctagccaaagtagtacatataaacatctcaataatgtatataccaaataccaacaagtccttgattttactatgggttggattcatgaccaccaactcaataaaagggcgagagagctcactgtcagaacacaagaagtgatttgccccattcatataccacatgataacacaatttacccatctaacatgacaatacaagaggtggtgacatgtttactatgtgattggcatgtatagaaatgatagccagaagccaaatattaccagtgccaaagctttcttcaccacagaatgagcacattccagcattcatcaaattcccaaaaaattccacccagtaggcacctganacatgttttttatg

SEQ ID NO: 997 - DNA, 434 bp, Zea mays
  unsure (1)..(434): unsure at all n locations
agcttaaatacgtaaaatctcatgagacatgttgaatgttctcaaggtatcacatntgagggactttagtggcacaaaaaccctaaagaactcaaaaccctaaaaagacaccctataaaaccccaattaaaaccctatggggtagatgtaaattttgtgcacttctggaccaaagtgcaaataccaaagtgatagaacaccacaaatcatgtgtttatcacacatgagaatttccaaattaaataatggtatttggacttatttgcaaaaagtaccccatgaaccctatatgcttaagtctgaattttagtaaatggggtcaactttggagctctatanttctaaatctacacagaatgttccctacgtcaacacattcaaattgtagagctactatagaagcataactcgggttaagtcacaagacatgagtg

SEQ ID NO: 998 - DNA, 421 bp, Zea mays
taagcttccctctacctccaaatgagatacacccatcattggtgttacttttatagacataatcttcaacttgaaagtacaagtgtctgcgtacttgtctcataactcttctgtggagcttgggcttctttcaaattatgtattattcgtcgaactttttcttctatttcctttaccatatcaagccagaagaaacatctttcacctgattgagaccagtttaaaagagtacgacaccgtcattcatacaaagcttcaaagggtgccattttaatgctttcttgatagctattattgtatgaaaactccgctcatggtaaacagacatcccatttctgcggaaactccagaacacatgctcgcagcatattctcaagtatctgatttactctctcaatctgcccactagtttgtggatgat

SEQ ID NO: 999 - DNA, 244 bp, Zea mays
  unsure (1)..(244): unsure at all n locations
gcagcatactcggctcgattgttctatgtttcgtacanccactggagggcgtgcttgaagtgtttctctcccactgcggcgcaaaaaatccctgctcctgttccctgcaagttcaccgagccatctaaatacatccgccatactcttgccagcttctggattatccggtacttgctgctctgtccactctgatacaaaatcaatccaggcttgagtcttgatggcattgcgaggtctgaacctt

SEQ ID NO: 1000 - DNA, 328 bp, Zea mays
agcttttgtcattaacattcttagttaacctcagggtccaaggttttggacctccctctcctccacttaaccacatgagataacatgtcatgagtacaagtatggagttatggccctggtaacacctgtggtgttacatgtacgagcctctggtcgatgataatggccacactcccttatgttgtcaaaaagcctgaatgactttcatatacgaagtaatttcaattcgacaaatgttcacaaatcaatgacatgataactatgtggtaacctacatacatgccaccctttcaatgtacacttttattagccctaataacaatgctcc

SEQ ID NO: 1001 - DNA, 391 bp, Zea mays
tccacgtgttcgacgcgagctggcatccgggggcgcgctcatatcacgcccgtgcgcgaacccccgcgcacccgcggtcacccgtgaccacgcccgcgccacggctataaagcccgccctagtgcttggctgccttccccgttaccttctccgtactgcgccggactcgcccgagccagccattaactccggcgacctccccgcgacccgccagtgccgcccgagagcaaccaccgtggccagcccctctcccgtcctcctccgttcgatccaagccctcagagagcttcctggtgaagccgtgagtcttgctcaagcttgacccggggacccgcgtcaccggaatagcccaatcgtgctcaccggagttcaagaacccgccggcgcacgt

SEQ ID NO: 1002 - DNA, 353 bp, Zea mays
gtatacctcgaaaattcaaatatatagaggctcccccctccactactgtatactttgcagaccagcacaatatcaatgcccctacattgaggtatcatgatgccaaagtaccgactcgcaacaatctccaaatatttgagattgagggcaagactgttggagcatccactgaatatcatcctgagtgcgaaaaaaagttggacgctttgctctatatgtatgaaaatatggatgacatgaccccatatttcaagtaagatgacaattaagttgttcattgtgtatctatataagaatcgtgttccgcaccccatttgtgtacttgttgtacacacaattccactcgcacctaa

SEQ ID NO: 1003 - DNA, 480 bp, Zea mays
  unsure (1)..(480): unsure at all n locations
tccgcttggnggggaacaacttgtttcctactatgcagttatattttgtctctgtcttaccatgcatatgtgacgaagaggagaaaatccgagtggtcctttcccatcatgaatcatacacttactgcaatgtgaactgtgtggtgtgtgcatgttcatgaataacatttactttagttactgatttgtttgcaaggttgcacgcgaaacacatgaagaactccgtgctataaaagctgatccagctgagggatttgatatcggagcaattctttcaatcgcantaaggttctctatcaagtcccttggaaatgacactatgtagaactggtacgcatctatctgtatgctctgcctatgctggtatttgataattatatcaacatgacaattgtgacaaggcattgacctattgtccttcatttccagagaattgaacagtgaacatgatgccactccaatcgatcattgcattgttct

SEQ ID NO: 1004 - DNA, 404 bp, Zea mays
agcttaaaggatactattcatctaaagtaatatggagttgataataggccaaagtatgaaaacttcgtctccttcagttgttttagtattctatccttagtgggatgtaccatagtataggttaaattccttgcaatataaaatgttcaatagtgcatataactttgacatcaactatatgtgtgcactaatttaaaggaatttagtctatccttttgggtttcaataatgatgattcatttgccatccacatataaagatcatcatttgtgaaaccctctcttgtgtttttaatgctctcttttctaagtgttacaacgaggtccttccaagagctctcaagatgaattcaacaccaagcaaagatgaataaagttcaagatcacttgattggatgaaatcat

SEQ ID NO: 1005 - DNA, 394 bp, Zea mays
acgggctaccgaaccctttatattacggaccccaaaatttgggtactcaggttataaagcatgtgttccggtaccgcttcaagataccccaaatttaaaaagcccgaaaaacccgacctgaaatttctggctagcttcaatgctgaagtctatgtgactgacatgcgatcgaactcggatttggtggctgtctggctggagtgctatcaccaggatgacatcatcatggcctaccatgggaggagaatgaaacaatgccactgatatgcttgtgaccgctgaagcatgatcgtgcagctgtaaagccaaatgctgacgtggctgaatctgagaacaaatttctttcctgctttaatatataaaaaattcacacacatcgagtcttgcactatat

SEQ ID NO: 1006 - DNA, 434 bp, Zea mays
  unsure (1)..(434): unsure at all n locations
agcttaanaagagatactntattagcaccgtgtntagatattctgtgagcccataaagcttcaaacaaaatcttatgccaatgcttaagattaccacatatcttcttttttatcaagttaatcaatgtcctattactggactcggcctgtccattggcctgagcataatatggagataaattgagcaacttaattctatataattcggcaaactcacatacctcttttgacataaaagaagtcccttgatctgtagtcaaggtctggggaatgtcgaatctatgaataatatgttcagttatgaactcaattacctncttatgtgtcatgtttntcagagcaacggcttcagtccatttggtaaagtagtcagtggcaactaacacgaacctatgcccctttgatgaataaagatgaatttcttctataaagta

SEQ ID NO: 1007 - DNA, 462 bp, Zea mays
actcagcttctaagggagagcacatcttatgattaacaaatgttcattttgttaaagacaggatttgtagcgcatgccaggcggtgaagcaagttggagtccatcatccacacaagaacatcatgacgaccgacaggccgcttgagctactccacatggatttattctgcccgattgcttacataagcatcggcgggagtaagtattgtcttgtaatagtggatgattattctcgcttcacttgggtattctttttacaggaaaaatctcaaacccaagaaactttaaaggggttcttgagacgggctcaaaatgagtttggcttaaggatcaagaaaataagaagcgacaacgggacggagttcaagaactctcaaatcgaaagctttcttgaggaggagggcatcaagcatgagttctcctctccctacacgccacaacaaaatggtgtagtggagagga

SEQ ID NO: 1008 - DNA, 444 bp, Zea mays
agcttcattctcttctcatacatgtcatatttatgaaggttgttcttataaccttcgcctaaagatcattatatcctataggaaataatgcttctaatgacgaacgacattaacatttaacatttcgtgttgccttgttcttaactcatagcatttgagaacaacttcccaacattggcgcccacctccggtaaactcactttcacttttgagctgatggcttcgttcaacaaccaagtcgtagcaccttcagttacaaagcgggtgctcccgataacaggcggttcaagttcagagccggctaacaagaatcataataaggaagcgcatagaagggtgctttatgttggggtgcaaggacccttcatcaagtcaaaatggtgccacatcccaatcaccttatcccaggaagaccttcacctcaaagagtaccctcacaatgat

SEQ ID NO: 1009 - DNA, 435 bp, Zea mays
ctgttgtcaccgcaactccattctaccccgatgtcctctttattgggggagagtggaatcgtcccccatcttcaacgacaaaccaaccgtgcctgggcaagaacctcctcagtgagaagctcaccgacaaaggaaccgacaccgtaatgatcggcgacatcatgaagctagagaacgagacccggcgcagcctgtatcacgagatgagatctcgaaggtgggagaaactcctgatgaacgagtcttcacggaaaggaagaactcccaccgacgtgatcgtcagcaagctcaagagcaagccgagcaagatgcgaggcaacgccgagagaccctctcttagacaaacatgaacccgactctcccgaccatgacacaccagcaggcggtgtgtgttgccggatgttgatgctccccgactcaaaactgaggtatcac

SEQ ID NO: 1010 - DNA, 301 bp, Zea mays
  unsure (1)..(301): unsure at all n locations
agctngacaatgaagaaatggcgctcgtttataacaagcttcgccaaatccttcaaccaaggagagggaaagactaccagttccgctccaaaaaggtttgctacaagtgtggtaagccccggcactttatagctaaatgtccattatcaagtgatagtgacagggcgaccacagaagggaaaaaagaaaaaagagtctacaaagaagcggcatcccatgttgcggaggactcacaaacttacactctcacactgacccgcactgcgtacaagatttttccatgcgccatgctatgaagacg

SEQ ID NO: 1011 - DNA, 401 bp, Zea mays
  unsure (1)..(401): unsure at all n locations
tnncccagcgcttacaggctcgcaacgccagatggctatttctctggagcactcctggaacattgacaaccttcgtaaaatttttgtttaattcctagggctgagttcgcccttgtaattcaccgcaaacaatcttgtaccggcccgcactcttttcctcccggggggtgaggtttttaacgaagcggagccatgtaatatatgtgagaaaaatcccccgcaaaagcatgtgtcgaaaaaaaaccgcgacaacggtcttcggcattcgaccaattcgaagtcaccgcgaggctaagcgctagccaccctcgcgtgcgaccaatccgcgcagaagtcgcctaaaggtgcagccggacttatcacaacaagtgcgcanaaatcaaagtctatcgcgaagacta

SEQ ID NO: 1012 - DNA, 355 bp, Zea mays
  unsure (1)..(355): unsure at all n locations
agcttgganaaatctggaataaatcggctgttattacctttcagtccaatgaaacttcggacttgatgtacagtggttggtggtttccactctaaaatatccttgaccttgctgggatcaaccgcaatctccttggcagaaaatacgtgtcccagaaattggatttcctcttaccaaaacgtgcacttgctgaatttagcataaagttgatgttcccttaagcacgttaatacgatccgcaaatgccgaacatgctcctctttattcttggaataaattaagatatcattcataaagaccactacaaatttgtccaactcgggccttaataccgagttcatcacatatgtgaagt

SEQ ID NO: 1013 - DNA, 475 bp, Zea mays
  unsure (1)..(475): unsure at all n locations
ctgagtaacccatgttgtccatcatttcccggcaaacattaatctctttgttattaggaaggcagtacaagtaatcatcttcgttgctgcctccataaactaaggaccctctaggaaacctcagatcttcggcataatgttgaacttcggcaatttgttccttcgtcagttgctttcccgaagcatgacggataataaagttaacatttccaaacggtgccgtatcgatggatggtgttgtcattccctctggtaggctttcaaattttttcttcgattgtgtgggctccgaaggtctagccttatctcaatcaggagaactacctacaataacagccatcggttcatcgaccttgtctttggaaaccttcggcgatgcatgtgtcgccatcttcgaaagcctctaaacagcctcaagcacattagccattcttcttctttttangagttctgttgagcagtggtaactatggtt

SEQ ID NO: 1014 - DNA, 349 bp, Zea mays
  unsure (1)..(349): unsure at all n locations
agcttgactcacgtatccacacattaatccttaattcctttntcccgtctcatggacaaggcatcctccctggatccaagtccatagactaacatatatctcgttatcaagatgaatacattcaattcctgacctcgcgcgagtgctagaaaaatcactcgacttctaccgagatcctgatttgcaagcagctactcgacctagcatactagtattcatctcaaaaaggaatcctaagttcatgcaactagaggtttcaagcaactcttacacttaagtgcacattacaatcctacaagcattaagtgtagtaaagtagcatataataatacggttatgcatataaacc

SEQ ID NO: 1015 - DNA, 375 bp, Zea mays
ccttgggcaagcgtgctcagtactcggcgccggtgttccaacctctgtgcataatcgcgtgggtgcgccaacgtccggtggaatccgtccgtgccttctgagcgggcggggcgaccccgaatcgggcggaattcgtcgtcggagttcaatgacctggcggatctcgatctgtttgcgtggtcaaaggcctctgcgccacctctgccggtaagtgacatcccctccaagccattgactctactcacgctctaccatggttagattcgaacttggggtagctgggcgcctgctcgtgtatctccggcgaaggtatcgctgggcgatttctgtgcaccgccgtgacatcacgcaatgtcgtagtcgggagtttgagct

SEQ ID NO: 1016 - DNA, 373 bp, Zea mays
agcttaaagccatggtaagtagcataagcaagtaaaatgtgaattgattctagcctaactacgggtgcataggtttcaccgaaatacaaaccttcgacttgtgaatatcctttggccacaagtctggctttgttccttgtcaccacaccatgctcatcttgcttgttgtgaaagacccacttggttcctacaacattttgattaggacgtggaactaaatgccatacctcgttccttgtgaaattgttgagctcctcttgcatcgccaccacccaatccgaatcttgcagtgcttcctctaccctatgtggctcaatagaggaaacaaacgagtaatgttcacaaaaatgagccacacgagatctagtagtta

SEQ ID NO: 1017 - DNA, 376 bp, Zea mays
  unsure (1)..(376): unsure at all n locations
acgtacagaaagagaatttaaagaaggtggcatggtatatctcaagctacaactctatgtgcaatcatcagtggctcgtcatgctaatcacaagctaagtttcaagttcttcggtccatacatggcgcttcagcgtgtcggaaaagtagcttacaagctatagttaccatctacttcaactattcacccagtggttcatgtctcccaactcaagcgttcagtgggtgatcgaccggtcggtgcagttttaccaaatgatttggaacatcttcaggtgccattgcaggcaattgatcgcagggtggtggtcangggaggtaaatctgttcaacaagtgctgatcaaatggtccaaccatgatgcaacattagctaca

SEQ ID NO: 1018 - DNA, 377 bp, Zea mays
agcttctaaagggagaacacattgtgggactaacagatgttcattttgagaaagacaggatttgtagcgcatgtcaggcaaggaagcaagttggtgttcatcatccacacaagaacattatgacgactgacaggccactcgagctcctacacatggacctattcgcgccaatggcttacataagcatcggcgggagtaagtactgtctacgtattggggatgactattctcgcttcacttgggtgtttttttgcaagaaaaatctcatacccaagagaccttaaagggattcttgagacaggctcaaaatgagttcggcttaaggataaaaaagattagaagcgacaacgggacggagttcacaaactctcaaattg

SEQ ID NO: 1019 - DNA, 399 bp, Zea mays
tcggccttcggaggccgaaagttgaaatgaacgaagccgtcgaagagtgccaaagagccttcggcgttgtctgttcttttatatgaacaagggacttattacaagaacatatcgccttcagggtgtggccgcttgctgagaaatgggaaatgccacaagaaaccataaaagaggccgacgaatgtgggcttgtgagactgaagtacaccttcaaatttggagataaatttattgagccagatgatgagtggttgaaaagcattgacaatttaagtgatgagctactcgggacctactcgaaggctgaagataatgcaatgtcagcagccttcggaggccgaaaaaagaagagactgaatcgggtatttgatgccattgggtttgtctaccctgattact

SEQ ID NO: 1020 - DNA, 297 bp, Zea mays
tccgctagctggatattttatatgggagtgttgcattgcgtgggagaaactactctaattgtcttaggatgaattcttagtacacttctatggggtataaaccctctagtagggacatggttttgttgagcttgaccacccactcagaggggctttattgatattgatccgctatcttggacgtaacgactgatgacccactgataggggtgaattaaactatgcgcttcacacgttatacatgaacaaccggctaattgatgcttcataattgcccaagaatctattctgtggaac

SEQ ID NO: 1021 - DNA, 238 bp, Zea mays
aactcaagctttctcgcttcggttggtgtaacctttggaagcagaatttttctttttgtatgaaccagattatatgtctggaaaagatacgacacctttggctgataccactcagttaagcaacccttctgcaccgatgcgtccacagaacgagcaattgtcacactgtgccaacaaccgtctgatgttggttagtgactgaataaaagattgattaacctatatgatggcttgggaa

SEQ ID NO: 1022 - DNA, 450 bp, Zea mays
agccggaagagcataagctatacaccttatcatcatcaaatagcatggcggcctccaaaattgtaaattcagcatatgtacaatctcgagattcaaacatctagcacatatttagagaaagatagcagcaccaaaattgggttagaaaacttgcctaaatatggttaaaatcttagacaagctactcaaatccaaaccaagttagtaactcatacttgtatggagtactaacttagaaatctattgtaattcctacgtgtgcgcggttgccatcaactaccaaaagggataaattgaaaggcccatgtgtggttttgataattgagagaactaatggactaacctctactctagagttgcattcgagataagtttaagtatgcatctacgtttgaacaagattgacaaccatggaaagctagtgaagtcaatacactccaccttagatat

SEQ ID NO: 1023 - DNA, 380 bp, Zea mays
atttttatctgatgagaaaggtgcacaactaaggataaagttaaagtaacaagtataagtttcttaccggcttaaggtagctcctagcttcttcaccaggcatatttcgcccgccgtttatccaaatctgggtcataaatctgtatcctatgcttcaggctatgcttgggatgtcaatcaaatctgccggtgacaagctgaagcttggcctatctacaaattttccgtgtgtacaaccatgcttcaggaaagcgggatctgtgcctcgagaagctatcaaggcgcagaattcagcatgcccagtaataacttcgccaagtgcatcaacttaccccttaatgaatttcaaagtgcttggcatgatttcagcctgaagtgta

SEQ ID NO: 1024 - DNA, 440 bp, Zea mays
  unsure (1)..(440): unsure at all n locations
agctgggccaagcagggggcgacacctcgtctgctgtcgagcgagacgacggcgccccagcgggggacacgcccgggcgttgacctcacgtcggagacaaagacgagcgccgtttccccgcaacacgccaacatcgagctgacggatgacgccagcacacttgcgaagggcttgctgggcgtcgccctcgtacctgagacaacggtgcagtccgcccctgacgcgactttgtcaccacccgtcgatcaagaggtaccgtccgtttcccaccccatgcctttcagattcagcttcgatccaccaagcgaccccgcttcggtggaggctttcgcaaaggcatgtccaaaccctccggggtaccatgtgcggtcaccctgggacagactgacggccgtctcgacctatgggccctcaagttncgaggaagatgacgagcctga

SEQ ID NO: 1025 - DNA, 366 bp, Zea mays
ttctgtgacggctcttgaggaaccttctgctcaagagcggctgctgttctagtagcgccctctaaagtctggacatgttatgcagtaaagatggactttagttgtacaaataacattgccgagtacgaagctcttcttttaaggcttcgaaagctaaaagcaatgtaaataagaaggtaaatcctcaaaactatttctcaagttatttctggccacgtagacaaaagtggcaagggaagggatccgaagcttgaaaaatatttggatgcaatccgaagattggaagcttcttttgaaggattttctgtaaaaaatatcccaagggggaaaatgagcacgccggattcctatctaaatcagcggcac

SEQ ID NO: 1026 - DNA, 400 bp, Zea mays
agctttcaccatgggcaagatcaacaagctctagcgtgagccgactcctccatcggaagagtttggtgactcggaatactcacaggaggagttctcctctgagtccgaagggtctctggctcccatccccctgcgtgagtcgtctgatgattcatacgactcccaagggcttgcggcggaggtctggacgtatatccgggccgtctagcgctccgggctctagggctcggatgagtctgagttcttctcggacgaggaggactcagacggcggcgaggacgaagatgacgacaacgacggtggcgacggtgatggtgacagcacccacgtctgcggaggcagcggcggcaagggcgacaccataggcggcagcagcacaggcagcaccataggcggcagc

SEQ ID NO: 1027 - DNA, 416 bp, Zea mays
  unsure (1)..(416): unsure at all n locations
tcttctcagcttctccgaagangctcaagtttatcattattggcatatcagcttcatacacagtagatttttcaaaatccatgtggctgggttttgatgagatcagaatgctatgatcttcttcttcatcagcattttcttcctcaacatcagcttgttcagcttcggcagcaggtgcaccttcttcaatggctccctctgtcacaactaatcctgattggctcataactttggagatcggagctcgttcagtagttttagtctcctccccttcacgggtcaccctcgtagtcgagtgcactctggccatctgatgaatcttttagtggtttttacaaagctgatgaattttacaggttttatgaagctctttcttttgtcaaagctaattccaaagagatggttcgctcgagaat

SEQ ID NO: 1028 - DNA, 437 bp, Zea mays
agcttatgaagaatctgcatcctaacatgggctagtcggcggtgccagagccaacccatgttagtcttagcaattaagcaaatgtcgagttcagctctatcaaaatctactaagtatagctgaccctctaacactcccttaaatgctattgaatcatcacttcttctaaagacagtgacacctacatcagtgaatagacagttgtagcctatttgacataattgagaaacagaaagcaagttgtaatctaatgaatcaacaagaaaaacattggaaatggagtggtcacgggaaatagcaattttacccaaacctttgaccaatccttgatttccatctcccaatgtgatagctcgctggggatcttggtttttctcatatgaagagaacatccttttctcccatgtcatgtggttagggcacccgctgtcgagtat

SEQ ID NO: 1029 - DNA, 444 bp, Zea mays
ttggagcactataactcttgatccatgagctgttggtctttggatgctatagcaaacttgtaaagatatgtttggtgagcaaatgttattgactaacgttgacatgtattacttgggatcgtgaggatcaaaggggttaatgttgggggttttagtttggtgctctgtttggagctctattgtgccaaatcctgttaatattagacagaaaacgttaaagataaatggaagaacatatctaggagaacaaacttatttaagcaatgctatgctggtgctacataaaagcgggaataaagtgtctccaaaggttctctatcagacttaagagaggactgatttatttgactgttgctaaaagatttattgagttctgaagatgtttggggcactgttacttttgatccctgcatatttgtcttgaactgctgcaaaaactaatag

SEQ ID NO: 1030 - DNA, 187 bp, Zea mays
agcttttatttacttcctactgctttaatgtcttccttctcgtggttgatgccaaaggggagaagtttatgggccaaagcaatgaaaactatatcaaacaccaaacaccactaatttaaaattttatatctacaaatggcttttaagggtttggtattggccaaaatagaatatgatatgagtaggg

SEQ ID NO: 1031 - DNA, 461 bp, Zea mays
tggtgccgatggagaaacaaaaatccttgatatcttggctgtcaaactgcttgccgctgtcaactgttagctcggacggtactccgaagcggcaaacgatgttctgccagaagaatttttgggcagtctttgatgtgattgtggaaacagccctcgcttcaatccatttggtgaagtattcgacggctacgaaggcgaacttaaggttcccctgagcggtgggcaggggcccgacgatgtctatgccccagcgctggagaggccatgtatgggcaatcagctttgtatattgcgaggggttgcctgaccgaggggagaacttctggcaggcttcgcaggacctcgtgacccgatttgcggcgcagatcattgagggccagtaaaacccttgtcggatcaccttggcagccaggggcccttggccctgcgtgcgagccgcacgtgccactatggacttcgcg

SEQ ID NO: 1032 - DNA, 376 bp, Zea mays
agcttgtggaggaccagatcaccaaagcttataagtttctggatgagaagtggtcacccaagttccgttgatgaagcactataagagcaatcaaggaagggacccatggataagttcgcaagagaaaggtttgcgcgttggcatcgatgcttcttcaataagctagctgccaagcgaaagcttgaagcctgaagatgatcttgagtagccagaaccagcgtttgcaatcagcaaccagatgcccctcacaggccagaatttgttgaagctctatctcctcgaagagtgtgcaaagtgaagatatgtatctgaagtaaagctatacccataacccttctaagccaaatctcgaggacgagattccttttaagtgggg

SEQ ID NO: 1033 - DNA, 400 bp, Zea mays
  unsure (1)..(400): unsure at all n locations
gtgtgaatattcttcattccaacatgggctattttgtgatgccagagccaacccatattagtcttagcgattaagcaagtatcgagttcagctctattaaaatcaactaagtatagctgaccctctaatactcccttaaatgctactgaatcatcacttcttctaaagacagtaacacctatatccgtaaaagacagttgtaacccatcttgcataattgagatacagaaagtaaattgtaatctaaagaatctacaagaaaaacattggaaatagaatggtcaggtgatatagcaattntaccaagtccattgaccatacctcgatttccatctctgaatgtgatagctcgttggggatcttcgattttctcgtaggaagagaaacatcctttctccct

SEQ ID NO: 1034 - DNA, 450 bp, Zea mays
  unsure (1)..(450): unsure at all n locations
agcttctgaatggacttaattcantcattgtctatctctatgccatgtgcatggataatgaatcctaacaacttatcagtcgatactcgaaaagcacatttacatgagatcatttttaaacgataccgacacattttatcaaaggctttgctcaaatcagctatatgagagccaaactcagccgatttgactacaatatcgttaatgtaaacttccatagtgttttccaatagctcatgaaagatcaaattcataaccctcttataagtggcaccgcgcatttttaaaccagatgtcatgaccacccacttcaataaaccaatgaagccctggacatattaagagtgtgttagacgtatcttcctctgacatgaatatatgaatatattcgacattaccatcgagagaggctaatactatggtttcttgaggcatcataattaacatatc

SEQ ID NO: 1035 - DNA, 415 bp, Zea mays
tgcgcatttgctcaagcagccaacaagggcgatccatctgctgatgaaaaatgggcctactatatgacctacaacagctcaatactgatccgagtttttttttttaaaaaaaagaataaagaataaaaaacttgttaccagaataaccaaaaccttgtggaacattaattagctgctactcttcctacacctctgtgccaccaagacacacacagtcaccctactctaccagcatcaattcctgtctcaaacaaagcaaagcaaagcaaagcaatccatcattctgttctgcacattgaaaaacaatcataatagcctgctgagagacttgatcacaagcttgatgttctgccttgtcgtctcatcacccgtgaacccacagatgttcgagctgatactctgaattagttaaaat

SEQ ID NO: 1036 - DNA, 307 bp, Zea mays
cataatatcgccggcgaattcatgaacaggttagagatattccttcattaccttacttctgaagcttcaattaaagctggagttctcatctgggcgacaagaagccaaggatcggagcctgatgctgattgcttctacatactcacgaactctcttatcgaacgaacgctaccggaaaagagccatattacaataattctggctggtacttcttcggatatctctctaacgcgagatggctcgttccgacctatcgaatcaatggccagggtcatggatgaagcgatggttctatgctaagaatgac

SEQ ID NO: 1037 - DNA, 470 bp, Zea mays
  unsure (1)..(470): unsure at all n locations
tcggccttcggaggccgaaggttgaaatgaatgaagctgttttataatgccagagggccttcggcgttatctgttcttttattggaacaagagatttagtacaagagcatattgccttcacggtatggccgctcgcggagaaatgggaaatgccacacgaaaccataaaagaggccgacgaaagcggacttatcaggttgaagtacactcttaaatttggagataaattcgttgagccagatgatgactggntaaaaagcattgaaaatttaagcgatgaactgcttggggcttattcgaaggccgaagatactgcactgtcagcagccttcggnggccgaaaaaagaaaagactgaatcgggtgtttgatgcaatcgggtttgtctaccctgattactggtatcccattcgaagcaaaaaagaaatacacaacctctgtaaagaagagttgaactggtctagcgagcat

SEQ ID NO: 1038 - DNA, 464 bp, Zea mays
  unsure (1)..(464): unsure at all n locations
ctagtgttaagtgagagcgatttgctgagttcctttgatctcttgttcttggattgctttcttctttctcattctttcctgngagcaatactcaattgtaaccaaggcaagagacaccaattgtgtggtggtccttgcggcgaagttttgttcccggttgatttgagaagagaaagctcactcagtccgagggaccgtttgagagagggaaggggttgaaaaagacccggtctttgtgaccacctcaacggtgagtaggtttgcgagaaccgaacctcggtaaaacaaatccgcttgtcacactctttattctcttgcgatttgttttgcaccctctctcgcggacttgattatatttctaacgctaacccggcttgtagttgtgaataactttgtaaatttcagttccgctctattcaccccctctaagcgactttcaaaaccacagaagaactgttttaatg

SEQ ID NO: 1039 - DNA, 376 bp, Zea mays
agaaactctcttgacaaagctgatggaagaaatagctcaactcttgaagcgctagccagacatgctcaaggacatagcctcaaaccattcgtagaagaatccattcaattcatatggggaagtcatgacttttcatccctaagacttgcatagtagataagttcaccccctacttaggttaaatgcatacccatcagggaacatcaacatcttgatccactgaagtacttcctttctctgggccctggttaggacgaaatccgccctacgccttcttcaacgtttttccgccacttgggggcgtcattctctaggtttgggatatcacataacgctgccagatcccattcttgccttcacaatatcctttgactta

SEQ ID NO: 1040 - DNA, 382 bp, Zea mays
ttccatgctggattggtatattgacctttaaaaagctaaggaggtatacccacgtattggtggcaattgacaaattcactaaatggatagagttcaagcccattgcttctttaacctctgctaaggccgcggaattcatacaggatataatattcagattcgggataccaaacagcatcatcactgacttaagatccaacttcaccagctcagaattctttgacttctgcgagcaaaagagcattcagatcaaatacgcatctgtggcgcatccaagagccaacgggcaggttgagcgagccaacggaatgatattggaggcactcaaggaaagggtcttcgataagaatgaaacattctcaggataatggataagagaact

SEQ ID NO: 1041 - DNA, 465 bp, Zea mays
  unsure (1)..(465): unsure at all n locations
atcctcagagncacctgaggctgcagctgcgagatcttattccacggttctattcttcgatgccagagccaacccatgttagtcttagcaattaagcaagtgtcgagctcaactctattaaaatcaactaagtatagctgaccctctaacactcccttaaatgttactgaatcatcacttcttctaaagacaataacacctatatccgtaaaaagatagttgtaacccaatttacataattgagaaacagaaagcaagttgtaatctaaagaatctacaagaaaaacattggaaatagagtggtcaggagatatagcaattttaccaagtcatttgaccaaaccttgatttccatctccgaatgtgatagctctttggagatcatggttcttctcataggaggagaacatccttttctccccggtcatgtggtctgtgcacccgctatcaatgatccaacttgag

SEQ ID NO: 1042 - DNA, 412 bp, Zea mays
  unsure (1)..(412): unsure at all n locations
tgtcctgaacaagtgctgcacttaccgctgagtgcgaagttgcctcatataataacaaaggagcccctggcatcggtggggttaatgctgttagatctattaaatactgtttcatcttttcaaaggccttctgctggattggtccccattgaaagacttcggctgacttcagcacttcgaagaatggtaagtttctctctgctgatctagatatgaatatgttgagagacgccagccttcctgtcaatctttgagcccccttttttgtacttggcggctccattcgaagaattgcttcgattatgcttggattagcctcgattccctttgttgagactaggcaaccgagaaatttcccctttttactccgaagacacattnttctggatttaattctagaccagcctgtcta

SEQ ID NO: 1043 - DNA, 445 bp, Zea mays
  unsure (1)..(445): unsure at all n locations
agcttctttctttctcctcatcctcgcttgtgcttccgctatcattttcattagccacacaacatatgcgggaatcgaaatgggaagacaaaccttttggagaggaggattcatcgtttggtctccatcgctcattatcttcttcttccttgcaaaggctagtatcacaaatactaaaggaagtagaagcacacaatggactatcataataggattcatcaaatttgcttctaattctagtccaaatatcatgtgcatcatggattgattcgtcataatttgatatgaaggcatgataatcttctttactaagagaattagntaagatgtcaaaagctagatagttcaagcgataacatctttgatcctcctcggaattaaactttccattcgaattagagggaanaatactctcgtctataatttgctctaatcgcggatctat

SEQ ID NO: 1044 - DNA, 281 bp, Zea mays
  unsure (1)..(281): unsure at all n locations
aatggaaaatcttcacagctggcaagaagatgctcctcgatgaaaaanaaggcagatggaccgacttggtaccggaggcagtctgcgcgctaaacacaactgagtgcagggcgaccggcgtcactcctttccgccttctatacggatcggaggcaatgaccgcgcaagaaataaagcatgggtctccgcgtacagctccgtcagccgtacctgacgtgtatgagccagactcataagatctcattgacggagaccggctcttcgccctgcacgccataaac

SEQ ID NO: 1045 - DNA, 271 bp, Zea mays
agctgcaagcaaagcagagagactcatgatctctacagttctagacagagagggccgagacaaacaaggttttgccttgactccctaactagctaagttttgctctataccaatggcacatagtataggcgacccgttagcactcacggggatgtaaacgtatcatcagttgttctaaggaccactgctctatgataggaaggcaacgcggagagccaactagcaaccaatgatggacagtcacattagcgggttttagtgaacaccgaca

SEQ ID NO: 1046 - DNA, 387 bp, Zea mays
  unsure (1)..(387): unsure at all n locations
tgtgaagattcttcatcccaacatgtgctagtctgtggtgttatagccaacccatgttagtcttagcaattaagcaagtgtcgagttcagctctatcaaaatctaccaagtatagctgaccttctaacactcccttaaatgctattgaatcatcacttcttctaaagacagtgacacctacatcagtaaatagacagttgtagcccattntgcataattgagatacaaaaagcaaattgtaatctaaagaatctacaagaaaaacattagaaatggaatggtcaggtgatatagcaattttacccaatcctttgaccaaaccttggtttccatccccgaatgtgatcgctctttggngaatcttggtnttctcataggaggagaaca

SEQ ID NO: 1047 - DNA, 430 bp, Zea mays
  unsure (1)..(430): unsure at all n locations
agcttcatgcctttcgccttgagacatcgtaatgtcgctttttgtcggaaaggaggtcagaggccttcctcgtcttgactacgatgtcatcgacgtaggcctcgaccttcggccgatgtgttcgccaaacacatggttcatgcatcgctggtacgttgcctccgcattcctcaaaccaaacgacattgtaacatagcagtacatgccgaagggtgtgatgaatgaagtcgtgagctggtcggactctttcatcctgatctggtgataccctgagtaggcatcgaggaaagacagggtttcgcacccagcagtggaatccacgatctgatcgatgcgaggcagagggtanggaaccttctgacatgctttgtttagaccagtgtagtctacacacatncgccatttcccccctttctttctcacaagcaca

SEQ ID NO: 1048 - DNA, 406 bp, Zea mays
ctcagctgagtagtcctcttgcaaggataattgatgctcaaatgtataatgagggtatgaaacacatttgtgagaagataagggctggaaaagcccaatgtttcaaagaagatgatcaaggcattgtatggtttaataaccgcatagtggtgccgaagaatgaaaaggtccgccagcaaattctcgatgaagcacatcttagtcgctattatattcatcctggaagcactaagatgtaccaagacttgaaacaacattattggtggacgaaaatgaaaatcgagattgcacgctatgtggctagatgtgacacctgcagacgtgtcaaggccatacacttgaaagctgccggtccattacagtctttaccaataccaacatggaaatgggaagacataagtatgga

SEQ ID NO: 1049 - DNA, 378 bp, Zea mays
agcttcatcagcttcgcagtaatttcttttttttctaggcactgcggccatggcctcttcggcggcagtagtagcttcttctatggccatgtctagcagcattttgtcgatgtgttcgattgtgctttccaagctcaaatcttcaattaaggtagcttcggcagccgcgaccttcgaaggtgcgatttcaatatttgctatttcttcatccgctggtatcttctgagctgaagctctcggtggcgtcttgtcaatgacttctgtcacggcgatgattctttgtctctttgctttaggcgctttcttcgtttttccggctccttttcctttaaaaaaactctgtcagttgaagccccaatggacttacttcgcaggcag

SEQ ID NO: 1050 - DNA, 465 bp, Zea mays
  unsure (1)..(465): unsure at all n locations
tcttgtttttatgtctaagttgggtgtaagcttacaactcaatttccctttattttatcttctctcttctacctcagcatttagtctgcttacaaccaattattatacttgctcttgccatcgcgagtaaatcttttccattgagctgcgcaaaatggcttgatgggcaacaagctactgttgagcaagggaaacctttacccttactcgtaataaaaaaacttggccggngagagaacgactgccctcccagtattatactaaaaagagactgaaacaatggtcaatgctcgagaaaatctttgaaccctgactcccatcactaacgaggtgatgtcaaccatccactctgcaacgacccaaccgcagggtgaccacatgacatagtaactcgagagcagatgcggcataacaagaggattttttaaccaacgcagaaaattcgtctccgataggaaacgaacc

SEQ ID NO: 1051 - DNA, 334 bp, Zea mays
taacctgagacccaaagagtgggtacctaacaccaaacctaaattgccttgcagggttatggatccgagggctcaagctggattatcgacagcggatgcacaaaccacatgacgggggagaagaagatgttcacctcctacctcaagaacaaagaatcccaagattcaatcatcttctgtgacgggaatcaaggcaaggttaaaggaccagggaaaaatgctatttcatccgagcactccatttctaatgtgtttttagtcgagtcgctcgggtataactagttggtcgttagtcaactttgtaatatgggctataattgcttattacaaatgt

SEQ ID NO: 1052 - DNA, 111 bp, Zea mays
tccacctcatccttatcccccccccccaggctggcatgtctgatcggcaaaaatactggtgcggcgtcgactgtaagtcttaggcccgcccccgcgtagttgcgcgccaca

SEQ ID NO: 1053 - DNA, 340 bp, Zea mays
  unsure (1)..(340): unsure at all n locations
gaccttaagcgcctgaggcatgaagcttgtcatgaggagatggcgctcgtttantatagcttccgccaaatcctcaaacagaggagggtgaaagactactagttccgctccaagaaggtttgctacaaatgtggtaagcccggtcattttattgctaaatggcctatactaagtgacagtgaccgaggtgatgacaagaaggggagaagaaaggagaagaacagctactacaataaataacggcggcgatgcccatgtttgtcgggagtgggacttcgacgaaagctctaatganttctccgatgacgaggacgccgccaacatccgcgtcactaaggga

SEQ ID NO: 1054 - DNA, 331 bp, Zea mays
  unsure (1)..(331): unsure at all n locations
ggaggtagtacacttcacaagttgttactttgcacaagaacataacgtatttgctcgaaagacaaggtaccatgatgatgaacgagagatgcctccgtgcagtgatctttcgatttttcagacaaacggtaaagccgttggtccacccacggcatatcacctcagtatggaagaacggaagtctgctttactgtgcatgttcacanatatgcctgaggtggagaaatactctgtgtaagacttgttttcttaaactggtgatatgtgaattagattatgctatcaaatatctcatgtcatacaacaatatttgacagcgagattgatgaac

SEQ ID NO: 1055 - DNA, 418 bp, Zea mays
agctttatggtacagtcgttatggatcatatgtgcgtaactctgacgcagaaaggtggcttatgtaccacatcaaaattggagaaaatagagctccaacttgctctgccagataagttctttactgaatctggcgcactgttcatcggtcttcagaaatatcgcgccgcggataaggacctggacctcgccggcgataaggatgccacggcggtcgggatgggtcggtggccgtggtaaatatccttgtcaacgcggcaaagaatcactgaggtggcaggccccaagtaatcgacggtcgccgcgccatcaccggaatctgtcgcacggcgagctcgtcagcatgaccgggaatacacacttcttctccaactctgtgcgacggcctataaattgaggccggactccgctgcttatca

SEQ ID NO: 1056 - DNA, 427 bp, Zea mays
  unsure (1)..(427): unsure at all n locations
cataaaactcactggccgacaagctctagcctaatgttctcttatctgtgttgtcctacaacngattggcttcctggattggtggcaatttatagaaatacgcgacatgctctcttcataattaaataaattaaatagatctattttcgaataaaacaatcattttcctcacataaacgccatatgtacttatagcacgcaatgaacacgaacaattctagacatgtaaaccatgaaaatagcgacacaggtccattttaaaaataaacatggcttgcagatgaagaacgtagattaaacacataaacataattatttatcttacactattgctcttaaaatagcgggttgatgcaataaaaagccctccaacgctaaaacgtgatcagagatcctcgactaacatgaacggcctatcttaccaata

SEQ ID NO: 1057 - DNA, 434 bp, Zea mays
  unsure (1)..(434): unsure at all n locations
agctntaagctctntgacaatagaaccacttcttctatttttagcaaagatgcaataatgcatgagtgaaatttttttaagaggttaaactaggtatgaagcagggataaatgcaaaggacatgctttctcttccttttatacaaggtatgcaaagagtgtatataagaggaagattttaggtacatatgtaaatgataggaataagttntacccgttttgtacctttacttgtagacgctctcttcattgtgcttttgtccttagtcttgtttgcttaagatctatgctcaatgacaatgtgtgaaaatattttgcacaagagagagttcttacaactagtgatccttttccaagtcatggttaacatatattaagtggatcacaaattgtataaatgaatcatgaattctccctttaacttagtgcatatca

SEQ ID NO: 1058 - DNA, 393 bp, Zea mays
  unsure (1)..(393): unsure at all n locations
ccatcttccttgagttcacgtatggtgccaggcctaagtttttangccacacgatacagaacttctcgctatcatatcctctgccatctttacctgcaaattcaaacgggtttcaaatgggttggttactgttagagagctgcaacgtttgtgatatttcactggttgtggcagctgtgagaagcgaactggtcaccttgattcttaacgcttctacatcggatttgaggattctgttgtctgtgactgcagtactgaactgttggttggcatctgaaaattgctggaacagcgttgcgttttcacctttgagtcgctcaacctgataacgaggaaccatgtcagtgcgcattctacaaacttgcagtatacatcattggttggaagtcattc

SEQ ID NO: 1059 - DNA, 453 bp, Zea mays
  unsure (1)..(453): unsure at all n locations
tgccgcatgcaagctnggacagtgttctgcgacagnnccttattttattttgtgcacgngcggctcgctgcctatttgcaccttccaaagtcagaacatgctatgcaataaggcttgatttcagctgtacaaataatattgctgaattcgaagctttacttttgggacttcgaaagttaaaggcaatggggataagaagggcggtccttaaaactgactctcaagttatttctggtcatgttgacaagagttgcaaggcaagagatctgaagcttgagaaatacctggacacagttcgaaggcttgaagcttctttcgaaggaatttctgttaagaatattccacgaggagaaaatgagcatgttgatctgctagccaagtcagcggcacagaggctccctttaccttcagaagtantttttgagacaataagagcacctttggtggagcttc

SEQ ID NO: 1060 - DNA, 206 bp, Zea mays
  unsure (1)..(206): unsure at all n locations
cccaagaaccatcgcacaatactgtccaacgcttcggctctttactcgctcctctttcctgagccctggcgttcaatcacccatcgaatctcctaacgcctgcgactgaatncaatatccatcgccctaatcaacgccaaactcattgagttcctgagccgcattttcaactcttccgaaacttctctatcttcataatatccttc

SEQ ID NO: 1061 - DNA, 450 bp, Zea mays
agcttggacaaagctggaatacatccgctttttttaccattcagtccaacgaaacttcggacttgatgtacagtggttggtggattccactctaaaacatccttgaccttgctgggatcaaccgcaatccccttggcagaaaatacgtgtcccacaaatgggatttcctctaaccaaaacgtgcactagctgaatttagcataaagttgatgttcccttacgcacgttaatacgatccgcaaatgccgaacatgctgctctatattcttggaataaattaagacatcatcaataaagaccactaccaatttgtgcgactcgtgcatgaataccgagttcatcagatatgcgaagtgggcatgagcattagtctatccgaaagacataactagatattcgaataatccataccgcgtagtaaatgcggccttaggtatattttccggtccg

SEQ ID NO: 1062 - DNA, 375 bp, Zea mays
  unsure (1)..(375): unsure at all n locations
tgacgcatgcagcttacacctctgaactaactcggctgtatcatantttgctatcggccagtagaaaccagacctaaagaccttcccaaccagagtcctggatgttgtgtgtatcctgcactgtccggcatggacctcatctaacagttgcttcccagtagctgaaagaatgcacttcatgaggactcctgttgcgccccttctgtacagtgcctccccaatgagggtgtagngagctgattgccttgcgatgcgttctgctgcaagtttgtcatccgactcctcttcattctttatatatctgatgattggctccctccagtcattagagtctgactcttgcttgctcagaacattgcactcttctgctcgatc

SEQ ID NO: 1063 - DNA, 168 bp, Zea mays
gcaacggattatatccaccaaaaatatgagaccgaatgcgatcaaggacttacatgatgattcgccaatccttactaacatcacggagaacattgccctgtatgggaggaaaattcctcactcgggcggtttgccgaaaatacaaccacaaacttcagggattctgaa

SEQ ID NO: 1064 - DNA, 453 bp, Zea mays
tgaggcatgcaagcttgtgaagattcttcattccaacatgggtcatttggcgatgccaaagccagcccatgttagtcttagcaattaagcaagtgtcgagttcagctctatcaaaatctactaagtatagctgaccctctaacactcccttaaatgctattgaatcatcacttcttctaaagacagtaacacctgtattcgtaaaaagacaggtgtaaccaattttacataattgcgaaactgaaagcaagttgtaatctaaagaatctacaagaaaaacattggaaatggagtggtcagaagatatagcaattttacccaatcctttgaccaaaccttggtttccatccccgaatgtgatcgctctttggggatcttggtgtttctcatatgaggagaacaatttcttctcccttgcatatggattgtgcacccgctgcatgatccactgag

SEQ ID NO: 1065 - DNA, 381 bp, Zea mays
  unsure (1)..(381): unsure at all n locations
agcttatgaagattcttcattccatcatttgctattcggcggngccagagccaacccaagttagtcttagcaactaagcaagtgtcaagttcagctctatcaaaatctaccaagtatagctgaccctctaacactcccttaaatgctattgaatcatcacttcttctaaagacagtgacacctacatcagtaaatagacagttgtagcccatttgacataattgggatacggaaagcaaattgtaatctaaagaatctacaagaaaaacattggaaatggaatggtcaggagatatagctattttacccaaacctttgaccaaaccttggtttccatccccgaatgtgatagctcgttggggatctttggttttctcatat

SEQ ID NO: 1066 - DNA, 398 bp, Zea mays
tagaatcccgacctgaagagccttccgactagtgtcttggacgctgcgtgtattccacattgtccagcatgaaccttctccagaagttgcttctcagtggacgatagaatgcatttcatgaagatgtctgatgcgccccttctgtatagtgtctccccaatgagtgtgtattgagccgactgtctggcgatacgctcggctgcatttttatccgctggctcctcttcgttctttatatatctgatgatcggccttctccagtcatcagagcttgactcaggttgtttcacgatattacactctcttgcctgggccattgagatgctttggtgtgggatttcttgtacaaagactctgcgtgggacctgagttcgacttggatctaccttggacaatac

SEQ ID NO: 1067 - DNA, 419 bp, Zea mays
agcttaaggatactattcaactaatttattatgatgttgataagaggccaaggtatgaaaacttcctctccttcagctgttttagtattctatccttagtgggatgtaccatagtataggttaatttccttgcaatataaaatattcaatagtgcatataactttgacatcaaccatatgtatgcactaatttaaaggaatttaatctatccctttgggttctaagaatgatgattcatttgccatccgcatataaagatcatcatttgtgaaaccctcacttgtgtttctaatgctctcttttctaagtgtttcaataaggtccttccaagtgttttcaagattcaaaatctacggatataagagtcttggttgtttcaatcattgagtcttaattgatctcatatcaagtatgatcg

SEQ ID NO: 1068 - DNA, 383 bp, Zea mays
  unsure (1)..(383): unsure at all n locations
cctctaaagggagaacacgcgataggtctaaccaatgttcttttctaacaagatagaccttgcgcgagctggccagcatggaaacaggtgggaggaccgcatcacagcaagaatgtgatgaccacttcaagacccctggagctgctgtatatggacctcttcggacccgtcgcctatctaagcatagggggaagcacgtatggcttacttatcgctgatgatttttcccgctctcacttgggtgttctttttgcaggataagtctgaaactcaacggaccctcaaacgctctctcatgagagctcaaaatgagtntgagctcaaagtgaaaaagataagaagcgacaacgggcgcgaattcaagaaccttcaagtggaggagc

SEQ ID NO: 1069 - DNA, 293 bp, Zea mays
caaacgccaaaggaaaacagaacaaaatctgtaacaaaaagaatcaatggggagaagcatacctgggcccaaacctcacctttcggcccataacctgttcccttagtcgagcggacagggcccgattgggacaacttttttctgaccagctcttccgagaatatagctgaggggagaatctggctgtatagagaatccgagtatcattaggattatgtgcggaggaagacaaagtgtctatgggactcacgatctataaagtgacggattactactaatgcgacgactcaacc

SEQ ID NO: 1070 - DNA, 343 bp, Zea mays
  unsure (1)..(343): unsure at all n locations
cttggagcactacattgtacacaccttgatgcttttgtacctttggctgatcaaggggggtataggaatacgaagcaacatatcaccacatgttntgggtgtttgtgatccacacatgaagtttggttatgttctanctggatgggaagggtcagcttcacattcacgtgtgctacatgataccatgtctcgggacgatgcatcttctatttcaagtggtaaatattatctactagatgctggatacaccaatggaccaggctttcttgcttcatattgatccactcgctaccacttgaatgagtgggctcgccaacggaataacctatccaatgcncacgaa

SEQ ID NO: 1071 - DNA, 306 bp, Zea mays
tgttgcttccgccgatcaaccgaagcctatgctcctatgtgaagatatatccgatcaaaggggtctgctgggatctcacctatctgatgaacaagaaaagactctgctcagatttttggtcaacaaccaagatgttttcgcttggatagcccatgatcttttgggtgttaataaagatgtcattgaacattcacttaatggggatccatctttcacgccaaggaagcaaagactttcaaagatgtctgaggataaagctgaaggtgctcggaacgaaataaagaaacttctcactgctggtgttat

SEQ ID NO: 1072 - DNA, 248 bp, Zea mays
agcccacccatatttatcttagcaattaagcgaggatcgagctcaactctattaaaaccaactataggtagccgaccctctaatactcccttaaatgcgaatgaatcatcacttcttctaaagacagcgacacccatatccgtaaaaagacaactgctgcccatcttgcctaagttggaaacagaaagcggattataatctaaagaatctacaagaaaaacattggagatagaatgggtcagggatat

SEQ ID NO: 1073 - DNA, 296 bp, Zea mays
atactttgacgagcctatctaattgcttcatactaacactgtgacacaccttctatatatgccatacccgaaccaaccttgatttggagaatacacatgtcgataaacaccagagcgatgcacaagatgcacccacatgtgacttgttcagcaactcggatagaatagtagccaccaaccctgaataccgcacttgtttggtaaacacaccaaacaagtctgatcagtgaagagtagcttatcaaaaattggattcaaaagccaaaacatgacatataatgagtgttgtccaacat

SEQ ID NO: 1074 - DNA, 331 bp, Zea mays
gagaaagacaggatttgtagcgcatgccaggcacgaaagcaagttggagctcatcatcctcacaagaacattatgacaaccgacaggccactaaagctcttacacatggacctattcggcccgatcgcttacataagcattggcgggagtaagtactgtctagttattgtggatgattattctcgcttcacttgggtattctttttacaggaaaaatctcaaacccaagagaccttaaaagggattcttgagacgggctcaaaatgagttcggcttaaggatcaagaaaataagaagcgacaacggaacggagttcaagaactctcaaatc

SEQ ID NO: 1075 - DNA, 374 bp, Zea mays
  unsure (1)..(374): unsure at all n locations
agcttnttcttatcgtcatcaaccttgatgtatattcatnccaatttccaccctgctgcccatttgctttggtagctgatcacaggatacttcgtagctnttcgataagcaaaattatagcaaccaaaaatctcatgtaatccatcttttctagcctttggctgatagtgcaattcgagaacccggcaaaagctgtccgcaaacggctccaccgcctggcttccgaatgcccaaatataaacattaagcctaaccgatgccgtcgggggttagctcgtgaaaatagactccaaaactctttaatatctcctgcataaatccatgaagggggaatcttaatccacctttatgaagctcttaaaataaccaattca

SEQ ID NO: 1076 - DNA, 324 bp, Zea mays
  unsure (1)..(324): unsure at all n locations
agatcccccaccctctagaacaaccgaaaaagtgaaaagctcctaactgaaagacagatangattgttaatggctgcctctcgcattcggttccggcttcaactgatcgacttttctatcgagctgacctcctcctccccggagccgttgaccccctaccgatccggaacaaagaaatcgataaaatcattatatggccgacacatcatcgaccaagctgtaccaaactgcttaccaacctgcctaaacagtctgagcgagaatagcgctattgtaaaacatctctaacaagtatatatatntgctgactatgtgtgcatattc

SEQ ID NO: 1077 - DNA, 359 bp, Zea mays
  unsure (1)..(359): unsure at all n locations
agcttcgccgccgcgtgtggcgaattctttgctgttctgcagcancaacacgggaggaaggggaaggtatcggggggtcacaggcttcacatggcctgctccaaaagaggcaaccgaccacggcgtcgcgggattttaaagcgagaccgagacgacaggaggtgggaggcggcactgtgctaaagcctttggtccgtctgctgcccactgccaaactgccgtaggcggaaatggggtggggcactggtgctgcccggacccggggacctcagtcagactgacatctaaccctgctactttgtggggcctgcacaccacacaaggccggagtggtgctgtgggctcggtaatttgaactg

SEQ ID NO: 1078 - DNA, 250 bp, Zea mays
ttggctgccctccttggggagattcctgatgacgaacggtaggcccattctgaggtgtccctgaactctactgatgcagagataagcgctatgcttgatttgctggctgaggatctcttcgacgctgttctctgtggggcgttggtactggcgccccttccaaacgctgataccagctttgatacttataacgctgtcagtactcccccgatgccgccttgccgagccaaccagtctgatcttcttgttg

SEQ ID NO: 1079 - DNA, 269 bp, Zea mays
agtggggacgccaacgagagccttccagtcgtagcgtccgtcctgggaccatcgctgctgctacaaaggccgctggcgagctacctggagtatgtcgtcctgcagggcctccaatgtttgcaatggcaccttgagtgccggcgccctttcattgcggctgctggggcctgaacatctgtgtatttgggcgtaaagccgtgcttctttctccttttgagcactacgacttcgctgtcgactagccaaccgcttaaacaagtgtgaattgc

SEQ ID NO: 1080 - DNA, 364 bp, Zea mays
actaccttgtttgcgacttcatgatctatgccgaatttttctttaacgaagctcctgtaacacttagaaacacgctgataacaaatcggtagtcgtgtttttgaggaccttcggaagatgaaggccctcaacagtaccaacatagatgtagtatagcaatagtaggtaggtggtgctttatacttactcggccatataccttgaccgactgaaccatcatgacctaaaatcccaaaactaacagacatgtgttctacctatttagctatatttatatctacaaaagtatcttacttatgcatctcaaaccttatatggtgaataccaagacaggagaacgtgttgatcaacctacatgcctatg

SEQ ID NO: 1081 - DNA, 285 bp, Zea mays
  unsure (1)..(285): unsure at all n locations
agcttcgcacgacctcgncactcgattcattgtttagattatcgcgggctagtaaaatccttgacggatcaccttggcagcgagggccctgggccctgagtgggagccgcaagttccgctgtggacttcacgaaggatttgaatgccttcggtttccgtgacacattctagcatgggttgactgatccccttcttgtataattggtccccgactagtacgaagcccgactttggtgcttgaggcatttggcctcattgacgtcacttgggttggaatatccttgc

SEQ ID NO: 1082 - DNA, 318 bp, Zea mays
gacagtgaagggcaatcatctaatgaaacaaagaaagaaaggcgagcaacacaggaactctattaccatcgacctggaaccacaacgaacaggatacatcagtccaacatcccccccatccaagctataacagcggcatcagcccaaaccccgagtcaaaatatacaaacaaatcggcagctcatagcgcgcactgtcacataagaccatccgaaccagccgatcgaatactcgaatccaattcaacatggaacgagcacccaggacccacagtcaaggaccggcggatggaaaatccaatccgcaacaacggcacac

SEQ ID NO: 1083 - DNA, 265 bp, Zea mays
ctacttacggtcaagctttctattctagggctttatctgccaaacaccagaacaatacaacttgtttgcaaattttgcctactgaatgcactttaagtgtgttcaacatatgcaatgtccacgctatgaggcttttctcacagattagttaacgtaacaccacgggtgctacatcctttcccccataacagaatattctccccaaataacagtcctcgggcagttatggctcacgaaaccactcaccgtttattctttattcttg

SEQ ID NO: 1084 - DNA, 434 bp, Zea mays
  unsure (1)..(434): unsure at all n locations
agcttgacattgtctccctgttggaagccaatgtctttcttaatgtcagggcgtctcccactataaagcatactacgagcaaatttaaattttttattctctaattcatgctccgcaattntagcatctaattttgctatatgatcatttttgttgttaatcatagcaatgtgatcatggatagcatcaacattaatatctctaaatctagtgcaaatagagacatgactaacagtagatgtagagggtttgcaagcatttaattcatcaatcttagcatgtaaaatagcattttcattcttaagattggaaatagaaatattgcaaacatttaagtatttagccttagcaattagtttttcattctcaattttaaggctagagagtgatgcatttaacttgtcaatcttagtaatcaaactagcattatcatt

SEQ ID NO: 1085 - DNA, 317 bp, Zea mays
  unsure (1)..(317): unsure at all n locations
gagagtctctccgggactacatccggcgattcttgaagcagngcaccgagctgtccaacgtcaccgactcagatgtgatctgcgcgttcctcgctggcaccacctgccgcgacctgctgagcaagctgggtcgcaagacttccaccagggcgagcgagctgatggacatcgccaccaagttcgcctctggccaagaggcggttgaggccatcttccggaaggacaagcagccccatggccaccagtcggaagatgtccccgaggcgtcactcagtgagcacccagaagaagtgaagaagaagtccacgcgaaacgcg

SEQ ID NO: 1086 - DNA, 379 bp, Zea mays
cacaacgggaccatgtggatcctctcctcgaagaaatccccatcacatcttccggtgaggaagtggaccccaccgtcctctacctccccatgaagattgccgagagaatgttcctcccaatgaaagacgaagatgctcataaaaccgccgaacaacaataatccaagagacaggccgaagaagataaaggtaagggaacatttgattacaatgacgatctagtggatcttttggtgtccaaggtattgagcaaggtaagtctcaacaccgaatgatcatctaccaaaagcaaatgtaacgaatctagcaaagttcaattccattactctagaacatatattcccatcttctcttccgccccacttgtgaagttaccaac

SEQ ID NO: 1087 - DNA, 359 bp, Zea mays
  unsure (1)..(359): unsure at all n locations
atcatccctgggaagcgcgttcagcccctcgggcgactcgacctcccaagctgcttcgggacaccctccaactttcgaagggagaccctgacgttcgaagtggtcgggttccgaggaacctaccacgccgtgctagggaggccatgctacgcgaagttcatggccgtccccaactacacctacctgaagctcaagatgccgggccncaacggggtcatcaccgtcggccccacgtacaaacacgcgctccaatgcgacgtggagtgcgtggagtacgccgaggccctcgccgagtccgaggccctcatcgccgacctggagaacctctccaaggaggtcccagacgtgaagcgccatgc

SEQ ID NO: 1088 - DNA, 305 bp, Zea mays
cccctgtcttgtaccaaaaataaggaaataaaaatgtgatgcgttttctttaccattacttaccctaggattcttaatctcgggacgaaattcttttatgggggaaaggatgtaacacccctggtgttactataactaaaacttgagcataacatcatgagcattggcatttgctatgtttgacacacctagaatgcattcactatgcaaaatattcaaacaagttgtattgtttaaagtggtttgcaaaaagaaccctggttaaatgacttaaccctaaatagtggttaaggggtaaacttaac

SEQ ID NO: 1089 - DNA, 379 bp, Zea mays
  unsure (1)..(379): unsure at all n locations
atattatgctcacagcttcattctatgcncactctttctataagaccttcggcgacgaagcgtacacccaacagtcgcccctttcgtggtgctaaatcgcctttcgtaacgagcctgatccgtgaaaaaagtctcttaagcttcggcgcgctgaacgtctaaaacacaccttccctgagctcgctgccgagaaacgattcaatctcacagcgtgtagcggtcccaccttgcacagttactgttcggtctctgcgggccaccacgcagtgagtgcgagcgggtgtccgcctggtgaaaaattctggcgcttccgcttcttacctgcagcactatataaacagacgagtatgcgtgaagctaccacagcattcattgctat

SEQ ID NO: 1090 - DNA, 405 bp, Zea mays
  unsure (1)..(405): unsure at all n locations
tgaggcatgcaagcttcngcttcactactgatccactcgattatttccttanggtcgcccatatgaaggtgtcttcgtttgagtaggcgcccatattggcgaagctagtcttcatctttttcacgcattccacagatttttcaaaacatctttcttttgatgcgcgaagctctacaactgttttttcaaaataatttctccagtactcactggcatctcgatcagcttcggcaacagcgcattttaacttggcctcagctaattgtttccgaaggtcttcaatttcattcttttaggactcggcttgaactttggaactagcttcgtcttcttttatcttggttactaatgaaattaatattntatccttttcaaggccttcgttcctcagttcaatcacctctg

SEQ ID NO: 1091 - DNA, 421 bp, Zea mays
agggagaacacgcgatatgtttgactaacgcacaatttatatagatagaccttgtgcaacttgtcaagcagggaaacaggtgggaggagcgcatcacagccagaatgtgatgaccacatcaagacccctcgagttgctacatatggacctcttcggacccgtcgcctatctaagcatacgaggaagtaagtatgggttagttattattgatgacttttcccgcttcacttgggtgttctttttgcaggataagtctgaaacccaagggacccttaagcgctttctcaggagagctcaaaatgagtttgagctcaaggtgaagaagataaagagcgacaacgggttcgagttcaagaacctttaagtggaggagtctcttgaggaggaagggatcaagcacgagttctccgcttcctacaca

SEQ ID NO: 1092 - DNA, 404 bp, Zea mays
  unsure (1)..(404): unsure at all n locations
ctcaacatagaacntcttatggataaactcaacacaagagatgacattactagcacaagcactagtttcttatttagcaaccctttatatgtggaaggcaagtgtgttgctaaaataaagaaacctcataatatggactaaatttcccttgagcccttatgcacaatatattttgaatgacatggataatatgcatggttgttcaatgaagtctaaagggctgacttaatccatattatggtgagtgtctaatatggaagaataaaatccacattaactatataaaacatacgtcacataattgtggatcgtcaccatatgataatattcattcatcttccaattagacctttatttcataatcaacaactgatgtatatcctcaagtgcctctttttttagtg

SEQ ID NO: 1093 - DNA, 370 bp, Zea mays
  unsure (1)..(370): unsure at all n locations
ataagcaacggaaacattaggagaacaatccacctctctgacatgcctcaaaatctccatagcagacaatacttcatctggcaaagtgaatttcataatcttcaattcagaaataagatcatgtacctcaacatcagataagccatcatgagataaagtgtttgcgaatttggtgcaatgctcttcaagttcagtatcatttaatgacttcacggtgcttgagctcaacaaaaatccgaatatacctttaaacaccatgagttcttcaaatctagtctttaaagaagtgatagccatatcaaccaaaaccaaaaaatatttaacttcaaaagccctctcaacttctaggatttcctnttgggaactactt

SEQ ID NO: 1094 - DNA, 445 bp, Zea mays
  unsure (1)..(445): unsure at all n locations
agcttactacgcaacgaatatntgtcgttttaattgatcgctatccgcatgcggagagtttgagagcatgactaggaaattgctggagtgttgtttttacttttcccccacaatgaggattgagaccaaggttntcataaactattggagatgtgcttatgctagtgcaaaaatctagcgacacttacaaagtaacggagggagtagagatgagttgcaatgtcaggtgtgtgtgttaggattatagatgatcaaacatgacgtcagtagtgcatatcggagaatgaaacctaaccctaaaccagggttgcgtgatgtactaataatagctgtaggtgggcctaggcccaatacagggacaaacacacagtacatcgatacgcacacaatacaactaacacccctttagtcaaaactctagccacgacagatgttgagattggat

SEQ ID NO: 1095 - DNA, 111 bp, Zea mays
atccccccccagttgaccgcaacttttttttttgcaccaggggtggtttgcacccacagctccatgactttcagagatggaacaactaatgactaccattccggtgccgac

SEQ ID NO: 1096 - DNA, 375 bp, Zea mays
  unsure (1)..(375): unsure at all n locations
cgcccgtgcgccaaccgccgcgcactcgcgggcgcccgtgaccaccctccgcgccgcggctataaagcccgccctagtgcttggctgccttcccgttaccttctncgtactacgccggactcgcccaagccagccattaactccggcgaccttcccgcgaccctccagtgccgtccgagagcaaccacacgtggccagccctcttccgtcctccttcgttcgatccaagccctcacggagcttcctggtgaagccgtgagttttgcctaagctagacccggggacccgcgtcaccggtttagcccaatcatgctcaccggagctcaagaacccgcccgcgcacgtggaccgggaaaggccctgcaccgcttttca

SEQ ID NO: 1097 - DNA, 396 bp, Zea mays
  unsure (1)..(396): unsure at all n locations
atgtngaggtgacttatgatgagggtgaattttattttctaangtcgcagctaagccacttcgtagcgtgcctattattcctcggctttcaaggctgttcctcaacaaagaaatagctctgcatatgacgcggccaaagaatggtgtacgtctcgtcactgatccagacataatggtccatcccgccgacggtgatgcctggaacgcatttgacgagtttgatcccgaatctgcaaacgaccctacgagtgtacggcttggtctatcgacggacggattcacacctttcaataccagcgcaagcccttactcgtgttggcctgtcttcattgcgcatataatcttcctctgagttggccataaagaagagatcatgctccttgcactactcattcc

SEQ ID NO: 1098 - DNA, 385 bp, Zea mays
tgcacttgtcatcgccaaagccagatgttaaacaaataaccttcgagattcaaatgatctttgacaaaaccttgcgcccttaaataattgaatatcataatcaaaacaaaggacctttggcaacatatgcccccaacagtaaccccttgcgggatgagttcgttttttgataacgagcttagatcgcaataatttgtaattggaaggtcttgtgccgaacgttcggaaaacaccctcctgaagctcgttattgaatcggttgacatgcaatgggacccactattcattgagtgagacagttaacgtgagatgacagcatgtataataaggggcgacacccagcattatagggtacgccctctcactgtcactactactagtgctt

SEQ ID NO: 1099 - DNA, 409 bp, Zea mays
agcttgtaccttataacatgatgttacattatttctggagcggtgtccgaaggcttttgaactgcttgaagcattagtgtagctctggtgcttttgtgactgatcagctctagagcagctagagtgatgtagttgtgggcttttgaacaatagctggagtgatatgcaacattaatgatgtagttgtgggcttttgaactgcttcaagctggagtgatgtcgctgtggcgcttttgtgactgatcatctctggagctcttgtgaatgatctagctagctatctgtacatggtctaattgtgaatgatattataattgtgatgcttttgtgaatatataattgtggtgcttttgtgtttacgtgatggatctatgactgtggtatactgattaactgtgttttgttttat

SEQ ID NO: 1100 - DNA, 298 bp, Zea mays
  unsure (1)..(298): unsure at all n locations
ttcttgtccctgacatgaattaaagtttaaaaattnccgatcacttcctcgggagtcattagtgtgtatctaggattgccacgaattaattgtacttgagtagggttaaggaaaataagtgatcttaaaataaccttaaccacctcgtggtcatcccacttcttactcccgaggttgcgcacttgattcaccaaggttttgagccggctgtacatgtcctatggctccctcccttggccaacacngaagcgaccgagcttccccccgatcgttttccgcttggtgatcctggtgagtt

SEQ ID NO: 1101 - DNA, 171 bp, Zea mays
agcaataagcaagtgtctagttcatcttgattatcattaacatgaactaagcaagtgtctaatttcattttgattaacatgggtaatctaaagaatctacaacaaacacattggaaatagaatggccaagtgatatagcatttttacccaaacctttgaccaaaccttgat

SEQ ID NO: 1102 - DNA, 446 bp, Zea mays
agcttgatgacgaagattgtcgtcggtcttcctctgactccttgccagctcatgcacatctgcagaaatattccggcacatagaaaagaatgccgcaatcccatgggccaggcgggcacccatccctcggccacgacctcgaccacgaccacgtggcgtgggagatccgcggccaggggagggacgcgaggcactggcagcagcagcagcaggaccagcagaggtatgtgcacgggagctagaaggggctttcctcaaacacactgttggattgttgggatcaatccacaagggtgtataagattgatgtctagtacctttctcatatcggaactgcatcacaacttcaatcatcttcatgatgaaaggtgcatgtagacatcccttaagtggaaaacaggcagcatggataatctcctgccatatcatatcaaaaatgttgatgc

SEQ ID NO: 1103 - DNA, 406 bp, Zea mays
cggcgcataggtttcaccgaaatccaaaccttcgacttgggagtatccctcggccacaagtcgagctttgtgtcttgccaccacaccatgctcatcttgcttgttgcggaagacccattcggctcctacaacattttgattaggacgtggaaccaacatgtataccttatttctagtgaagctgttgagctcctctcgcatcaccaccacccaatccgaatcttgcagcgctctctctaccctgtgtggctcaatagaggaaacaaacgagttatgttcacaaaaatgtgcaacacgagatctagtagctacccccttatcaatgtccccgacgatggtgtccaccgcgcgatctccgctgaatcttcggggactctcgggtgcggcggctctgctctcatcctcc

SEQ ID NO: 1104 - DNA, 422 bp, Zea mays
agcttcagctccatctatgttatggattgttttttattctgtccagtttccttcggcccttctggcagcttcctgacttccatgaatagcactgggtccttggtccgaaggtatcttcatgcaaagatatgctggatgaagaattgcttcgaaggcattgagagtaccacgaccaatgattgcattgtaagggtattccatgtcaacaatatcgaatacaacttgttcagtccttgtgttgttgataaatccgaaggttactggcattgtgatttttccgagtgctacaatctgccttcctccgaagccacaaaggggatgtgtggcatcatggatcttgtcttcgggctcttgcatctgtctgaaggccttatcaaatatgatatcagctgcactggctgtattaaccaacacattatgga

SEQ ID NO: 1105 - DNA, 102 bp, Zea mays
tcgccggcgaccatctgcctattggcgtattctctctaacatcacttcgagttggtaaactgtaatgaagcaacagactctgataccaattgaaagtcccct

SEQ ID NO: 1106 - DNA, 418 bp, Zea mays
  unsure (1)..(418): unsure at all n locations
acttctatatcagacattattgtgttagntctcaatccgagtatcattccaatagagagcaagattctagaagatatacttttattaacaattgtctagaagtcttcagatttaatgaataaatcattgaccttttggtacagcttggaccagagctcactcgtctgcaccagatctgagtggaactttgagaggaaaggaatcgacttgggtagtgtcagtgtggccttcactaggcccacccagatttggctttgcatgggatgacagtgatcactctattaatcgatgctaggtgggatcctttctatcattacctcttgtgtagctgctattcctggcttaatagggctggagtcacctttggttgttgcttcttgggttaactctacgttgttggatagtggggagacttcat

SEQ ID NO: 1107 - DNA, 457 bp, Zea mays
  unsure (1)..(457): unsure at all n locations
agcttcgtcaatccatggagcttcgnctttttactcttcagcttcggacttggcttcgnattacagcattaaagtattataagcaaaaatcaagttcgaaggaaaaggtaagcacaaggtatgatttttttaccgggttaagatgactccgagcctcatcaccagctttgcttcgtccaccctttgtccataccagttttacaaatctatttgctatgcttcgggcaaggttggggatattatccagatctgctggtgataggctgaaattaggtctgttgataacctttccatggtcacagccagatttcaggaaggcaacagctgtgctccgagaagctaccacggcacaaaagtcaccatgtccagcaataacttcataaggtcatcaatatcaccttcgatatgttcgaaggcacctggcaggtcttcagtcgaaggagtaaatatttcgctg

SEQ ID NO: 1108 - DNA, 316 bp, Zea mays
acaaaggatctatctcggcgtccaaattgacagacacatctgcgctgctgccaacgatgaaacgaccagcatcctccgcgtcgctgtggtcctgcacccttatctccgcggcctcagcgagcccatccaacgtccatttctatgcgatgccgacccgctggacacccacaccacacctctataggtccggctccctaacggcgtgcgcgagacccaccaaatcagtccgtgaccttcaccattaacagacccaaatatcggatcacagatgaattcatgatgcaccgcacgtggcaccaaacttaacagttaatag

SEQ ID NO: 1109 - DNA, 406 bp, Zea mays
gcatgcaaacctcttacaacgagacgatattattttttgtgtccctccacccggagagcagacaagtctgtcttcaatgaatatgaccacaaactgatcttgatattccatgaatgctttattcatcatgtacataaagaatgccggtgcacttagcattcccaacaacatgaacaaaaactcatatgatccgtatctcgtgtgaaagctgtctcgagacattgtccgttcgaagtttagctgaggaaccctgatcttagatatattatgtgaaaatctggctctttctctgataaataactttcaattcagggaagggatgtattctaattgtacttcgtcaactcatgataaccacatcacttgaccactgtctgctccaaaaaaacggggctccaggggagaa

SEQ ID NO: 1110 - DNA, 439 bp, Zea mays
agcttcggcagataagagtagcagtcttttatgttttgttatgtaaggaaaggcttcggcaaaaagaggaagcggccttttatgcttcgctgtgtacgaaaagaagggaaggtgttttttcgccttcggctcaaaaaactgatttcgtccacatcaaagcacctcaatcgaagggtaagaatatattacaaggtatgtacaaagttccttgaagaacagtttaattctatttacaagagttgttacaaaatcatcctgagtttttctaaagcacacttctgctagttttcattaagcttcagcttcgacgacaacttcggcgacatatcctaggcatcatcttcaccttcgtcatcctacatgagtcaaggaatcataagaatcaagcccacaggaaaaggtaagcacgaaatgtcatttcttactggttcaagatgac

SEQ ID NO: 1111 - DNA, 432 bp, Zea mays
  unsure (1)..(432): unsure at all n locations
tccagattcttgagcctcctacgcatcagatgatattaatatgtgncaccgggagctatgaagctactcttcggctcatattccttctcgatctaganttgatgatactctgaataacaatccaatagactcatgagctctgaagacgttgctgcatccataagacagtttattcttggtagcgagaattcgtcttttgggcatgccttgtcaagatctgtcgaagtaatgcacattatccatttgccattggccttcttcaccatgacagcatcggctaacgcctctgggtattttacctctctgatgacgccagcactgataagcctttatacttgattccgcagaccttccactctatgatcaaacatttttcgaagcctttgctttctaggcccgatagatgggtccacattgancgaatgccaatga

SEQ ID NO: 1112 - DNA, 318 bp, Zea mays
acaagagaaaaaccctaaagacacctaagggcactagacttccaacaagggatcaagggataagttaatcaaattgccaaacatgattctaaatcctaaacaaagtttaagtaacattgtaacctaccaaatgcaggggggaaacattacaaaaagaccccttaaagaccccaatttcccccttaaagaaagaacacactagagctctcttattctctctaagtcaaaatctaaccctaatctaaagagcagacgtgttcacttagtaaataatgcccacaccacttgggttaaataccaaaaatgtgccaaagcacc

SEQ ID NO: 1113 - DNA, 319 bp, Zea mays
  unsure (1)..(319): unsure at all n locations
cataccggcctacatacgcatncgatgcttaattaacctacgcggagcatcacctgtctctagcccaagcctcaagctaagtacctcccacccttcaggattgtatctgtgtccctaccgatgaaaccagcattatacggaactctgtagtaagatcccaccatgctcccaatgaaaatattcttgcaggtagaagtcatccttccttaagataacccttgagctacgcattattgcaaaagacaacctccatccacaagatctaagcacggctaagcatttctttacaccatattttgatacttcatcaaagcatcta

SEQ ID NO: 1114 - DNA, 363 bp, Zea mays
  unsure (1)..(363): unsure at all n locations
agcttcacatgtctcggatgagncaaaatttatttattgttaaagcccatcagaatgaagcttcttatgcgaatctcacttatatgacccaaacgacagtgccacatgtacgtaggacttacatcattaggccgaggccttttagcactaatattacagataggtgcatcatcaagatttataatgaataacccattcataatggatgcaaaagccacaaacatgccattcttagagatcacacaaccattgttttcactcgcaaatgaataaccatccttcatcaaacatgaaggagacataatgtttcgactcatactacgaactagataacaaatatttaactccaaaataaatcctgat

SEQ ID NO: 1115 - DNA, 413 bp, Zea mays
cctcgcatgaggcggcatcaccatgatcatccgagctatttttgtttctcattcaactacgcacgctccggcatctttcttcttgtggtagaatctcttcttcttatcatctccatccttgcccttcttctctttgttagggcaatccatggcaatgtgaccgggttccccacactcaaaacattctctatcattgaaagcatttcttcttgatgtttggcctcttctaggttgacctctcttcatcttcctgaatttcgtgaatttctttacaaatagagccatatctccatcactctcactttcattttcttcatcatcactattcttttcaatcgccttggaagctttagctttgagagcgattgattcactctttactttctttgccaaacttatagcaccggcttgag

SEQ ID NO: 1116 - DNA, 363 bp, Zea mays
  unsure (1)..(363): unsure at all n locations
agcttgtgaagattcttcatcccaacatgttctattcggcgatgccagagccagcccatgttagtcttagcaattaagcaagtgtcgagctcagctctatcaaaatctaccaagtatagctgaccctctaacactcccttaaatgctattgaatcatcacttcttctaaagacagggacacctacatcagtaaaaagacagttgtagcccatttgacataattgataaacggaaagcaaattgtaatcttaagaatcaacaagaaaaacattataaatggaatggtcaggtgatatagcaatnttacccaatcctttgaccaaaccttggtttccatccccgaatgtgatcgctctttgggga

SEQ ID NO: 1117 - DNA, 415 bp, Zea mays
tattgtgtggacacgattaaactttcagaaaatacattttatgttttatattcgacacgttatatgtcacttgggcccaaacttataaaaccaagaaaacatgtcttgaacttggttgacccgtgcaaaatcgtctaaaaccgaatttgcttaaaccacatgttgatgccgcgcggcacgctggagggcactaacgaaagttcacagacccaagtcacatataatgccaagttcacgacctaagtgtcatggcatgccaagtttggggattgcgcgtacctgcaggtggtgcacgacaggtgtgggaaggctccaacgtggctctaacatggcatatgccgcatcgctatccggcttgagcaaatctgatattagacgattctacacgttacacatgtcgacaaagtctaaatga

SEQ ID NO: 1118 - DNA, 421 bp, Zea mays
agcttctcgcacaagggatgatgatcatattgcgccgcgcagcatgggtgtactgtttgacaacggactggacacgtgcgccgtctgcaggatggccctggcaccgcctgccagtggagtggacaggacgcattaaatgctgtgagggcacatcgtctgtcagcagggtggacaggcggcgtgtcctttccacaataaatgcagagaccacgcggcctataggccttacgtcaggctccgcccgctggcttatgtcacgggctacaagccacgtggccgcattgggtctccgtctgagcggagagcgcatgcgtgcaaggtaaggcccggacgcgtggcagtactggacccttgcttatgccggagtttccactgtcctgggacctcgttgtggcccggagcttactcggagggatctgga

SEQ ID NO: 1119 - DNA, 404 bp, Zea mays
tagcgactgccagttcgacctctagaagcagtactacgtggttgcatgcgtcgctgtgttcggcaagctccggcgcagccgccgcttggacgcggtctacagtggctacaccgcgatgtccatcttcaaatagggtacctcatggtcgtcgccaacgccgacgactcttaagttgttctggtcaccgcatccgacaacggcagcgtcacaccgtccagctcatcatccacctgaagctcaacctcccacataagtcactactgaccggccatgaattcttgtgcgctgggacgacgatcgttgctaacgttgtgtgagtgtctcgaacaagatttatgtagaggagtagcacatccggtggtgcaacggctatgtgtactatctcgctgatgagcccgcgatgc

SEQ ID NO: 1120 - DNA, 462 bp, Zea mays
  unsure (1)..(462): unsure at all n locations
tatagtcacctgccgcatgcaagctntatcaaatggacgtgaagagtgcttttttttatggaccaatcaaggaggaggtctacgttgagcaacctcccggctntgaagacagtgagtatcctaatcatgtctataagctctctaaggcgctttatgggctcaagcaagccccaagagcatggtatgaatgccttagagatttccttattgcaaatggcttcaaagtcggcaaggccgatcctactatattcactaaaactctcgacaatgatttgtttatatgccaaatttatgttgatgatattatatttgggtctactaacgaatctacatgtgaagaatatagtaggatcatgacacagaaattcgagatgtctatgatgggggagttgaagtattttctaggattccaagtcaagcaacctcaagagggcaccttcattatccaaacgaagtacactc

SEQ ID NO: 1121 - DNA, 274 bp, Zea mays
  unsure (1)..(274): unsure at all n locations
ggcaaagncactgtgtacggtcgcttgtctgctccaaatcctatcttttcgctgtgagtcccaagtccagatatggcccgggtagagagatacagaggggagaacgttgctgtgtcagccaagcccgaaccgagacaaaaggagtgtcaagtcatgtctcagccccctangataggctgtatctctttccagcgtgttctatggttaatttggcgccattttgtcaatcgcgtccaacggttctgaaaaggcgattaacgtgaacatgtggagt

SEQ ID NO: 1122 - DNA, 133 bp, Zea mays
gaattcatttcgctattcaataatttaccggcctttctggcaccatttcccagattacagcaataactccaccaccatactgctctgcgaagatattggatttcaaagaaaattgggccgactggctaagttt

SEQ ID NO: 1123 - DNA, 337 bp, Zea mays
  unsure (1)..(337): unsure at all n locations
gcttgctctcgaaactggtattcatgattcattttgttattgacctggaagattaaccacaacgctgttttccttatctctgncgaaaattgtctgaatggatttaagttattgtggcaggtggcaatgagcgtcaatgacattgtaactctacgtgcaaaaccatcgttcttcctagattactatgcaacgagcaagcttgatgttgatcttgcagagaaggtagttccattttattttctcacttaaacatcataatttttgccctactcatacttatttagttagccatctgctcaattttcccataagtactatgtaaatcctgtacgttatc

SEQ ID NO: 1124 - DNA, 80 bp, Zea mays
cgcgctcactggattagttggatttttttttttgaaatccggattatatgccgtctactttcgagattaagggtaattct

SEQ ID NO: 1125 - DNA, 281 bp, Zea mays
  unsure (1)..(281): unsure at all n locations
acccgttgcacaatccttccagcaccttctctgctcctcataatgcccttcagacgctctgatgaacgaacaaccatcgcatatcgctcgaaaataacgtcgaagcttcttggaggccatcaacacaacatatagcacctctcccaactctgcataattcctctcggacagactcaaaactttgggacaacacacactggaccttgctctttgacttgggcatctaccttnttctgcacaagtgcccgccttactacagaatgcgaagctgaacatataac

SEQ ID NO: 1126 - DNA, 424 bp, Zea mays
tagattatataatcagattattttctttttctaccacccacactatgatctctatatattataatccatctgccgctgcctgcgtccttacattatacaaacgtctattattcataaagacaacactactcttattgtctatttcacgtgagaaaagaaggatgacctatattgtaatttctatttacattaccatgggtagtgggtctttcggtaaaataatctcaaataagctaatcttgaggagccctcgcaccgttactcccttgggccgttactcccctgggcaccgtcatcctctaaatgatcattaacacatttccttttctcttcgtgcctgggcgctgccatcctctgtcgttctcccgacgcgagccattctcttcttcctcagacactctgtctttgactggtccccgtctcc

SEQ ID NO: 1127 - DNA, 400 bp, Zea mays
ggattagtgttcgctgacagtgcccacgcaacatgctccatgatggcttcacgaatgaaagagccctgcgcatttccaggagctctcattgacgactttgatgagacatttgttttgcagaccttggtgtccaatgcaagattgccccagttgtactttttgagagaacctatgacaggtgctgcaatcattggactcatatctggagatattccaccattgatcccaagatcaagatgtaaggctgtgatcttgccgtttgacttgaacccaacagagtacttcaccttcataggatgccgcccgcctgccattatcatgtctgtcttgcgatcgaggtacattcgaactggacggtgagcttcaatgcagcaactgacatgcccatgccaccttacaa

SEQ ID NO: 1128 - DNA, 450 bp, Zea mays
cacctgccgcatgcaagcttgacattgtctacctatgggtttcctttgtcatccttaatgccaaggcgtctcccactatagagcatgcttctatcaaaattaaatatttcattttctaagtcatgctcattgattttagcagttaatgtagctatatgatcattttgttgtttgattaaagcaaggtgatcatgaatagcatctaccttaacatctctacatctagtgcaaatagaaacatgctcaacagtagatgtagagggtttgcaatcttctaattcaacaatcttagcatgtaaaatggcatcttcatctctaagattgaaaatggcatcattgcaaacattgaagtctttagccttagcaattaattgtttattctcatttctaaggctagcaagagaggcattcaattctcaatcttataattaaactagcattatcatttct

SEQ ID NO: 1129 - DNA, 421 bp, Zea mays
  unsure (1)..(421): unsure at all n locations
tctccttttctggctcatatttttctgactctcttatttttttattctttaaactgtcattnttggcttggacctcagccaaggagccttccatagactgaataataaagtctttcttctctaaagcaccttcgtgttctttagccataatttcaagatcttgaatggtgaagtccttcttcttcagaacagcttcgtaattctcaactctttcttctaaatctttgataatagctctgttcttctcctcttcaagatcttgttgcattcttagcactctacttaataatatactctgccaaaacaatcttcgtcagacaaataaataaataataataataatatctttaccttanaattcgcatagagcaagctgccggcgacatgatgtcgctgatacctgcagaggtctcgctttatc

SEQ ID NO: 1130 - DNA, 422 bp, Zea mays
  unsure (1)..(422): unsure at all n locations
taagcaccgcngctgcagctgactaggttgcacactttttttttattatntntcccgnctcatggacaaggcattctccctggatccaagtccatagaccaacatatattccattatcaagatgaatacaatcaattcctgacctcgcgcgagtgctagaaaaatcactcgaattctaccgagatcctgattagcaagcagctactcgacctagcatactagtattcatctcaaaaaggaatcctaagttcatgcaactagaggtttcaagcaactcctacacttaagtgcacattacagtcctactagcattaagtggtagaaagtagcatatattaacatggttatgcataaaaccggcgcttgccttcaattgctggggctgcggtgagatactcaatagcagcctctgaaacctgctc

SEQ ID NO: 1131 - DNA, 311 bp, Zea mays
  unsure (1)..(311): unsure at all n locations
tcagcaacttcaacactctattctggaagcgcgcttgtttacttaattgtncccaagaccgcccggacatttaccattctcttcctttctggggtcactgatggccccttttggccttctgctgtcccaatgatcgctgtaagactcaaaacttctgatgttntggagccctcagctgcttctcttacctcctcaattttttctgtgagcggcgcttcggctttctctttcgtttctgaccacaaaacgctcgactgctctgactctatctttggtggcacttcggccgcttctgccatctctggcaacaa

SEQ ID NO: 1132 - DNA, 315 bp, Zea mays
  unsure (1)..(315): unsure at all n locations
agcttggatattcatcagaacactactgattttgttttgaacaaagaaaatacttcttcacgaagcatgaaaagaagggaaggtgtttctttcgtcaaaaactcaaaaacggtacgtatgtaatatatcatgcattcgaaagaattgaaccataacagcacgtatattacattcagggttacaagatgttaaatatattacatttcagaagttnttacaatagcacttaatcttctctaagtacaacttccgcagcttcgttcacaagccgattaacaacttcatccatgatagcttcaaccatctttttaattt

SEQ ID NO: 1133 - DNA, 422 bp, Zea mays
ctgatacacggattgaacatcgccatatcactgtgcgtatatatattgatggtctaccgacattctctggtagtcatcacgcacataaacaaggaatgggatcgttcaagcgacttcacgggaaaatactgcgctgccgtccgaacgctggaagataaattccacggtctggaatttcatcatatacaaagagatcggaacacagcagccgatgtactgtccaagctcggatccagtctaactcaggtcccaccccgagtcttctgcaacaaattctgcagccgactatctcaatggatcacacagaagagtgcaacctcataaatcaacccgagccacactctgatgactggagaaggctgcttattaagtccattaacaatgaagaacaaccataccacaagaacaccgcagagcgcatt

SEQ ID NO: 1134 - DNA, 397 bp, Zea mays
  unsure (1)..(397): unsure at all n locations
agctnttgtggtgcttggagtaatttatgtatcacttaactcttgaaggtacaattgcatgatctgttgaaatgtactcctatttgtaatttcttattgtacttctgcagcttctgcattttcattcctgacaatcttctctaccacttctatgtacgctacattggcagtatctcctgggcagtcctcattaatctctgatgatgctgatgttgctgctctgattgggacaagtaaggacttggccaaacaaataaatcacaaggaagtacattgggggggatgttatgcatctgttggtctgttattaaattgtgtgaaataacccactgcagataaaatatttatatttgatgtatttccagcccagttaacatgtgctgttcatatgctctcg

SEQ ID NO: 1135 - DNA, 438 bp, Zea mays
cgctcaagttaaacatgcttatgctcaagagatatatttatgttctaaatcaactaccgagctaagcacttgccatgatatcatttccaaccttataaatgacaacgctacactacttgctaaggttgagaagttacatagctgcgatgattcaaccgccactcttagaaatgataatgctgattcgattgctaagatcgaacatttgaatgcacctctctctagccctaaaattgagaatgaaaaattaattgctaaggctaaagattcaaacgtttgcactgatgctatttccacacttacaaatgaaaatgtcatgttacacgctaagattgatgaattaaatatttgcaaaccctctacatctaccgttgagcatgttactatttgtactagatgtacagatattaatgtcgatgctattcatgatcacctacc

SEQ ID NO: 1136 - DNA, 404 bp, Zea mays
agcttgtgaagattcttcattcctacatgtgctagtcggcgaagccagagccagcccatgttagtcttagcaattaagcaagtgtcaagttcagctctatcaaaatctactaagtatagctgaccctctaacactcccttaaatgctactgaatcatcacttcttctaaagacagtaacacctgtatccgtaaaaagacagttgtaacccattttacacaattgcgaaactgaaagcaagttgtaatctaaagaatctacaagaaaaacatttgaaatggaatggtcaggtgatatatcaattttacccaatcctttgaccaaaccttgatttccatccccgaatgtgatagctctttgggatcgtggttttctcatggaagagacatcttcttctccctgcat

SEQ ID NO: 1137 - DNA, 418 bp, Zea mays
tctccgagggcaagacggggttcgggatggctctgctgtctcttctacggcggcaaaggggttgggcggccgcggactatttgtgcactggcaaacagagacgagctaactccggtgaggtgtggagggtgcgcggaacgcgtgtaccgaagcctgtgagggctttataagctcacgcgcggaccacggcgcgggtttggctcgggcgcggcgcggtgcatgcggggacgcgcgcgatcgtgctctggcgcgggcagaaggcgtcgaacacgtggaggtgagtttcttccagtgttcaaacgtctccagagatcgcatacgtgcgaatctcgccatgaaaccggcgcataccttctcctggcacctagggctatctcacatgtgtgagttccaacggatgatacgccctacatcggga

SEQ ID NO: 1138 - DNA, 405 bp, Zea mays
  unsure (1)..(405): unsure at all n locations
cttaagcaccgcagctgcagcttacttagagatttgcatttttatgccggncnagacgcatgcttaatggctaagacttgcatgggctggctgtggcatcgccgcttagcacatgtggggatgaagaaccttcacaagcttctaaagggagaacacgtgataagtctaaccaatgttcatttcgaaaaagatagaccttgtgcagcttgtcaagcagggaaacaggtgggaggctctcatcacaccaaaaatgtgatgacaacatcaagacccctggagctgctacatatggacctcttctgacccgtcgcctatctgagcataggaggaagtaagtatgggctagttatcgttgatgacttttccctttcacttggggttctttttgcccgtaagtctgaaccc

SEQ ID NO: 1139 - DNA, 250 bp, Zea mays
cggcatatccatcagatctgacgacgataagctgttatttggtctattcacaacatttccatgcgtacaaccagccttcagaaaagcggcagctgtgtccccgagaagctaccacggcgcagaactccgcatggccaccaataacttccgcaagagcatcaaccctcgcctcaatatattctaatgcgatgggcgcggtttcagctgaaggtggaaacctttcagagctggctctgatagaatgaaacac

SEQ ID NO: 1140 - DNA, 438 bp, Zea mays
  unsure (1)..(438): unsure at all n locations
agctntcaagacttcactagttcatttctttttctagaaactggaatagaatagccttctagaagggtaacaatattagggcagggtgcttggaatattttaagcttatttacaccatttgttcccctatttcctttatttgctaggcacgaaggattggtgtgatcattggaagcagtgtgtttggtttatacaagggacaggggctcctgcaaagaaagatcaaactctttctttgagcgctagccataaccaaactagcatctcatatcagttgaatataaatgatgaaggaagtagaagccccaaaagtaatcatctaacactgttaccagaaagggtagcactctatggtgataaagtttggagatcagcgttgataagtgtaatcaggaattatgtaagtaatccctctatgtacttggatagtatgttcta

SEQ ID NO: 1141 - DNA, 275 bp, Zea mays
tcatacgccacacgacgaacgaactgcacatcaacacgaacgtacgcgcctacacccagtacatccgtattggggacgaacgaagccacccaagcgccagaaacaggaaacgaaacacattggaagagagtgcctctgtgcagccaagactcaacacagcctggcacaccggactgtgcggcggagcaccagatagtgcctggcgccccaggctggacctcggcgaacaggccaccctcgggaaaacttccgcggagtccggctataactcaccg

SEQ ID NO: 1142 - DNA, 437 bp, Zea mays
  unsure (1)..(437): unsure at all n locations
gctgcagctatgaagattcttatccaacattttctttttgcggtgccagagccaacccatgttagtcttagcaattaagcatgtgtcgcagtcacttctatcaaaatctactaagtatagctgaccctctaacacacccttaaatgctattgaatcatcactttttttaagacagtgacacctacatctgtgaaaagacagttgtagcccattttgcataattgagatacagacagcaaattgtaatccaatgaacttacaagaaaaacatnggaaatagaatggtcaggagatatagcaattttacccaatcctttgaccaaacccttggttccattcaccaatgtgataccctgtcgggatcttgatttctctctaggaagagaaatcttcttctccctcgcatggggttgcgcacccctatcgataatcaactt

SEQ ID NO: 1143 - DNA, 357 bp, Zea mays
agcttgggctaccaccatgcaaccagagtgtgtttatatcctgcgtgaacatccatggaagtacaagagggagaccccgctcggacaccctcgggggttgggccataatttgcgctacccacttgagccggatcatctccggcaataccctcgggggctggaccgtggcttgcgtttcccacccgagccgaatcatccccggcaacaccctcgggggcttggtaagtgtcaacaccatccttgaggaccaagttctctgcagtagccgcctctaaggctgaaggtccctcagttacttacatgggaacaagatggccaagtcagtttcctgactctaagaccgcactccaggtcgat

SEQ ID NO: 1144 - DNA, 274 bp, Zea mays
accttctttgttttaggatgaacacgttgttatgaaggcgatgtgcgacaaggccatggataaggttgctcgtgccgggcagatcctaatgaggaggtttggcgttgtggtgcctgaagacattgtcgccgagttcttgccacgcctgttgtcatagccgcccatcctcttctgctactcctgcagccgacgcttcctgcaaaaatgctccagcgcaatgatttacttgaattggaaacactctttcattgagttagtactttttacagagaaa

SEQ ID NO: 1145 - DNA, 298 bp, Zea mays
  unsure (1)..(298): unsure at all n locations
ttttatgagtgtcttcaaggcagggctttggttccctctacatgagatgataggagaagcttttcagaattttgagatataccttcatcagttaacactcaatgcaatcgttaaacttatggtctacatatgggctctccgaagccaaggtatgagtgctaatgccgaagctttctgcgaggtgcacgagctgcactactaaaccaaggccagagtggacggtcttcataaaaactttggctgttacaactcngcatatcggaaagatacaaagggccactgttatttgttatcgcac

SEQ ID NO: 1146 - DNA, 400 bp, Zea mays
  unsure (1)..(400): unsure at all n locations
acctgcggcatgaagcttcgtatatattctccgaagttgttttatgtngcctctctaatgaagctacacgtcttcttgatttatcttgtgccttaacacgatttgctctttttcaaatcaccctccgaagaccaatgtgtatccccttcttgttccgcatgcaatatgctgtatgatgcttatgttatgctaaatgatgtgatgatgctatgttatgcaaaatgatatttgtgccgaaagtacacacatccctgcaataaaacacacaatctttttatatcagcgatgacttttcgctgtaagcctcccttatgagcttcttcgccttttacttcagcggaatcagcgtttatttttcgctgtaggcacagaaaacatacactgcgctcccttaagaacg

SEQ ID NO: 1147 - DNA, 427 bp, Zea mays
tagtcgaacgcgccttcgcaatgcagccggctttattcttctgtgtgggaggagcacctctctttgcttcagtaactgaagaagtttccttgccaaactcaggcactatggccggttgaatatagcgcgatcggtgggtaaggaccttcaatcttttcctctttggcgtacgctcgcttggagcagccgaagcaacaacctttccagaagttgcaccctttcttttctgccccctcggcgggtagcgatagtaaggatacataaatccaatagcatcaaaaaccctatttaatcttttcttcttttggctcccgaaggccgcagatagtgcattatcttcggacttggaatatgctccaagtagctcatcgctagtatttttaacacactctagccagtcatcatctggttcgacacactactctcc

SEQ ID NO: 1148 - DNA, 292 bp, Zea mays
  unsure (1)..(292): unsure at all n locations
caacaacacccacaaccacggaccggccnccgcagccgggaccggaaagaccggaccccccaaaaagcccccggggaaaacccacgatggcggcaagacaacccctcaagggaacagccaacccatgcatcctaaccccgcaagccggcatcccacacaccaaaccccaccgggacacaaagcacccaccactagaccacccaccagcaaacctcgatacggacaaaaaaccaaccagcgctcgaaccaccaaaccaccgccgtaccacccacgagaacgaggcccgaaaag

SEQ ID NO: 1149 - DNA, 314 bp, Zea mays
  unsure (1)..(314): unsure at all n locations
cactatacaanacctcaagctcaaacaatatntagaaaccggggtgacaggagttcattatttggacaacgctcgataccaaaaccctacaccgctaaggagcgcctgccctatgagaaccgacgcgggcgacaccgcatgacgaagacagctctcgcgcgtagtcgcctctcgcccgagccgattaacgaccctacccacgcaggctcgacgattgacgaccttccaactggccacatgcctcatcatgggtaagctctgcctcgggcccactaataccagaacacgacaacacacaatgggagtggagagac

SEQ ID NO: 1150 - DNA, 428 bp, Zea mays
agcttggatccagtcgaactcacgtttcttttgtagtctttgtacaagaaatactacagccgagcatctcaatggatcaagcagaagagtgtaatattgtgaatcaaccagagtcagactctgatgactggagaaggccaatcctcccgtatatgaagaataaagagaaaccacatgacaaaaatgcagccgagcgtatcgctagacagtcggctcactacacactcattggggagacattatacagacagggtgcatcaggtgttctcatgaagtgcattctctcatctactgggaagcaacttctggaggagggtcatgctggacaatgtggaatacacgcagcgtccaagacactaatcgggaaggtcttcacgtcgggattctattggccaacagcaaaaagtgatgctgccaagttagttcac

SEQ ID NO: 1151 - DNA, 287 bp, Zea mays
  unsure (1)..(287): unsure at all n locations
ccatttaaactcttcattttcaagantatgctcattaatgtttgtaggtcaataaactatgtgatcatttgttgcttaattatagcaaggtgatcatcaacagcttctacattaatatctctacatctagcgcaaatggaaacatgctccatagtagatgtcgagggtctgcaaacattcaatttattcatcttacatcttaccatgacattttcatctctaacacacgaaatggaatcattgcaaacatttaactccctaaccttacaaattaaactaccattttc

SEQ ID NO: 1152 - DNA, 401 bp, Zea mays
agcttatcaaataaaaattatactttattgtagaaggcgttatatgctgcgctgatggcctctatgaagcttcggcattattttcaagcatatcatataattgttcgttcgccgcaacctttgaaagacataatgaggaatagagaagctactgggtggatcggaaaatgggctgccgagcacaatgcaattttcattgactatgtacacaagtcctcaattcaatcctacgcgttagcagatttcatcgctgattggacgccaagggctcatgaagaagtaacaaaagacgccgaagcctggacagtcttctgtgatggttcttggggaaccttctgcgcacgagccactgctgtcctagtagcgccctctaaagtcagaacatgctatgcagcaagact

SEQ ID NO: 1153 - DNA, 425 bp, Zea mays
tacagccatgcgaagtagcataggcaagtaatattcgattcgactcaagcctatctacgggtgcataggtttcaccaaaatccaaacctttcactcgtgaatatcccttggccacaagtccggctttgttccttgtcaccacaccatgctcatcttgcttgttacggaagacccacttggttcctacaacattttgattacgaccgggaactaaatgccatacctcattccttgtgaagatgctgagttcctcttgcattgccaacacccaatccgaatcccttaatgcatcttctaccctgtatggctcaatagaagacacaaaggagtaatgttcacaaaaatgagcaacaccagatcgagtggctacccccttatgaatatcgccgaggatggagttcatgggtgatctcgctgtatcgctt

SEQ ID NO: 1154 - DNA, 320 bp, Zea mays
  unsure (1)..(320): unsure at all n locations
ctatgttgagcaacctcccggctttgaagatagtgagtatcctaaccacgtatataaactctctaaggcgctttatgggctcaagcaagccccaagagcatggtatgaatgcctaagagattttcttatcactaatggcttcaaagtcggaaaagccgatcctactntatttactaaaattcttgcaaatgatttgtttgtatgccaaatttatggtgataatattatatttgggtctactaacgaatctacatgtgaggaatttagtangatcatgacacagaaattcgagatgtccatgatgggggaagtgaagtact

SEQ ID NO: 1155 - DNA, 370 bp, Zea mays
  unsure (1)..(370): unsure at all n locations
acgttagatctattggaactcatacatactgatgtgtgcggaccaatgagtacgacagctaggggaggaattcaatacttcataaccttcactgatgattttagtagatatgggtatgtctacttaatgaaacacaagtctgaatccttagaaaagttcaaagaatttcagaatgaagtanaaaatcagcgtggcaagaaaattaaagcactgcgatcagatcgtggtggtgaatatttgagtcatgagtttagcaatcatctaaagagttgtggaattgttccacagcttacgccgcctggaacgcctcaaaggaatggcgtgtctgagcgacgtaatcggactctattgatatggttcgatcaatgat

SEQ ID NO: 1156 - DNA, 443 bp, Zea mays
agcttaatgcccctcctaatagattgtcttatttgttaagggcaaggctcccatgcctcaggataacgagggctatattttatatcttgctggttatcctgaggataagattaggagaattcatgcaaagaagactcattctactcaccatgcttttatttataagaatgaggcttctagctctaggcgttctacaaatgttaaaatgcctaagaagaaaactcctattgcatcaaatgaacctaatgtttcatttaagacttttgatgcatcatatgttttaactaacaaatcaggcaaagtagtttccaaatatgttgggggcaaacacaaggggtcaaagacttgtgtttgggtacccaaggtgcttgtttctaatgtgaaaggacccaagaccgtttgggtacctaagaataagacctaaatttgttttgtagttttat

SEQ ID NO: 1157 - DNA, 451 bp, Zea mays
  unsure (1)..(451): unsure at all n locations
catgcaagcttcgggatatatagaacgccatcatcttatttttacatctctgacgaagnccagctcggggtccctggagaggcattcaacttcagccagtgccagaacaaggtggctgttgcggagggtgccggctcaactggtaatgttttggccgtggagcaattcatccgtgaacatgtgagggcgtacgtcgttcttattgttctcagggctccaaatggctctcttgatctaatgaggcaagatgtacattgcgtcaatggggttgcctttcaatgtgactcttcatccggtcctctgaagttgcttaagaagcattgaggcgcaatcatattctgcactgtgtcagctgacccatgtttacatgttgcaatgtgtatgcctgacagtcatcggatatgaatagagcatggtataacctgctcgctatgggtgctttgcactttgc

SEQ ID NO: 1158 - DNA, 367 bp, Zea mays
  unsure (1)..(367): unsure at all n locations
cctacagatcgtccatgatgactacgcggcttccaacgaaggctccaccttatgcatgtaataaccctagaccacctgatgataacggcaactatactcaacggcatcagcataccttttacccattaggaacacaacaaagctcctttagccaccatcttcaagacgcacaggatgaagaacctctcgagaacgttcatctcccaccaaaaaggttgttttcgctattctgtggacaagacaaangacatacaacaacgacgtgctcagctacaatccataaatcaaaggaaatatctgaagtcgaaccaccacacacttaacccaaacacgtcctacatactgcttatgctattcccatacatcc

SEQ ID NO: 1159 - DNA, 337 bp, Zea mays
  unsure (1)..(337): unsure at all n locations
nagcttacaacaaacattctaagactgaattactccttcttcgcgcactggatccattgagagagtgacgtaagctccatttgagttgtgaactccgagggttgtgttctgagcctcaagtgtgacttgtgtgcgcgattgagctgggatttgagtcctgtgtgggttggtctcacctcccttacttctgtgcttcttttgtaaccatcactgtaagggcgacaggcttcaagttgtggagattcctctcacacgggagaaagacaaaggaaggaaaaaccatggtattcaagttgatcatcggatcacttgaaaggggttgagtgcaaccctcgtc

SEQ ID NO: 1160 - DNA, 318 bp, Zea mays
  unsure (1)..(318): unsure at all n locations
aagctctcatggctcacgataacgagggttccatcttatatcatgttggttatcccgagcacaaaattaggagaattcattctaggaagtctcactctggctctcatcatgcttttatgtataagagtgaggcatctagttctaggcaatccactcatgttaaattgcctaaaaagaaatctcatattgcatcaaatgaacccaatgtttcgtttaagacttttgatgcatcatatgttntaactaacaaatcacgcaaagtagttgccaaatatgctggggcaaacacaaggggtcaaagacttgtgtttgggtacc

SEQ ID NO: 1161 - DNA, 198 bp, Zea mays
ggcccaagcaccaggtcttgtgatcacaaacatactctgctggtaccaagaatccatatctcgactcttctttggctcgataacttgacgacggtcgaagtgaatcctttctcgaagacatggaatttttccttgtaagcatacgcatgacattttaagcaactgttctcaacccttccaagcattataatctaacag

SEQ ID NO: 1162 - DNA, 420 bp, Zea mays
  unsure (1)..(420): unsure at all n locations
cctgccgcatgcaagcttgaggctgtgtatagattaccgccttctttatgctgtaactatcaagaacaagtatcctttgcctcgtattgatgttctctttgactagctggtcggggccaagggtattttcaagatagaccttcgctctggctaccatcagatcaagatactagcaagtgatattccgaagacgacattctcaaccagatatgggctatatgaattnttggtgatgtcattcaggctgacaaatgcaccagcatatttcatgtatctgatgaattctggtttcatgccggaattggacaagttcgtggtggttttcatcgatgatattctggtgtactcaaagaacgaagaacatgtcgggcatttgcatgtagtacttcaccgctgcgagagcccacctttatgcaagta

SEQ ID NO: 1163 - DNA, 272 bp, Zea mays
caccgagcatgcactgaccaatagaacattgtttttattctcccgcaaagccgagttttggggagccctcgactgccagctaccgaggatgtcccggcactcactgacaccgaccgggcccgaccgtgaagcaaaatttgtgccgttctacaagaaaatcttatcctttgcaggaggttcaagctctggctgcgggttcataaaaggtattccatccaaaggtagctaactgtgcttggacaaaaaagtgggaaaggccgatgtgctcaata

SEQ ID NO: 1164 - DNA, 367 bp, Zea mays
gatcagcaggcctacatacgcatacaatccttaattgaccccggccgaccatcacctgttcctagcccaagtctcgacttaagtatttccatccttaggattgcgtttgttccttacgatgaaagagcatcacagggaactttgccagaagatcccactattgctcccaatgaacatattcttgcaggtagaagccatcctttctcgagttaaattaacgacaacctctatccacaagatttaagcaaggctaagcatttcgtacatcatatcttgatacttcacagaagtatctataaaggtatggatatcacggaaagcaatgcatcacacgggtttcaagtaatttctatgaacctaatgcaca

SEQ ID NO: 1165 - DNA, 362 bp, Zea mays
  unsure (1)..(362): unsure at all n locations
agctngccttcgctatagacaacattcctagattatccttgncgcggagcgcgccaagggaaaaatcttnacagacggcaaaaacaagccccncgaacaaaagaagggcagatggaccaaattattatcccgggcgggctgggcactaaacaccactgagtgcaaggcgaccggcttcactccttatcgccttctatactgatcggaggccatgactccacaagaaataaaacatgggtccccaccaacggttctgtcagcctgtcccgacgtggacgagccaacttcataggatcttatcaacggagaccgagtcttcgccttacggcactaaacaaataccaagcccagccaaagcatgg

SEQ ID NO: 1166 - DNA, 350 bp, Zea mays
tttgtccgacccttggccccggcggccgagtgtaccgagattaaattaactcggacgttgatgcttatctcgtgcgcggctatccatctaatcacgagggagataggtggctatctcttaagaaaatgtccagacctctctccctataaatatagaggggtacgaccgactgaaaacccccggacacattccaatcgaaccaattaccttatttacttttcctgccctatgagtagatgtaccatagctctagttgtaatcttccacatatccacctccacccttattcgactctacgtcgtctagatccgtcttgggtggcctaccgatcccaagacgagcctacgatc

SEQ ID NO: 1167 - DNA, 228 bp, Zea mays
  unsure (1)..(228): unsure at all n locations
agactgctgctgagaacaagctaaccccttaccaacagaaaaatttggggtttcttatagcgatgtncaagaccaacacagaaaaaatcacccacgagattctggaaggtttgtctgacgatacttgggacagtgacagctatgatgtggacagcggtggtgaagacttcgaagattgtccctggcgacccagccattcactttatggtaaatccactatcaaagaaa

SEQ ID NO: 1168 - DNA, 176 bp, Zea mays
  unsure (1)..(176): unsure at all n locations
cattcngatatccagcctgccggccatttgcttcggtagctaattacaggaaactttgcggttttccggtacgcaaacatgtagcaaccgaagttttatgaaacccatcttttctggcctctgtttgataatgcaattcatgaactccacagaaactgtcagcaaaaggctccact

SEQ ID NO: 1169 - DNA, 389 bp, Zea mays
tgagcagtgactggcttcgtctgaaacccttggaagcttgttatgagcatgtctttcagctttttccatgatgtaattgttcctggccgaacagaagagtaccacgtttgtgcaacatttttgactgccatgacgaaggatttcgccatgactgcagtattgccaccatatgaagatatggttgcttcatagctcatcagaaattgcttcggatctgagtgtccatcatacattgggagctgaggtggtttgtaagacgggggccaaggtgtagcctgcagttctgatgacagaggagaagcatcatcaaaagcaaagttctcatgatataaatcctcataccagtcatcctcgttgacgaagccctcttggtgaagctttctgtactg

SEQ ID NO: 1170 - DNA, 391 bp, Zea mays
  unsure (1)..(391): unsure at all n locations
ttcagatccaataaacaatggttggttgaaaccaaggaggtcagagaacttcactagtttggagagcgcatgtgttcagccagaatacaaactaccagtcaggacacgtgctgactgtaaagcagagcagtatgaaataacaggctcacctttgagcccttctgatgttcctgctgatgccgctatgattggagatacaaacgagatttctccctggtggcaggagtttccaaagcgctggacggncgntctcctctgcttctttgcgtttcttctttgcaatatggaccgngtgagttagacagnaattcttctattttgtctcattntttctgataagaacaattgggtttaagtacattatgcactccttcttttctctttctgaaac

SEQ ID NO: 1171 - DNA, 333 bp, Zea mays
ttttgagaaagacaggatttgtagcgcatgctgaaagggaattacgcttacacctacttcctaattaattttggtgggtgaattggccaatacaaataattagactaattagtttgctctagattatatgttctacaggtgtcaaaggttcatctacaactatactaaatcgactgtccggaataccgtagattattccggacaggagaagctttctggaaaaacaggccaagcgcggaccgtccgggcccttgcggcggaccgtccgcaacaccaggataacactcggacagaaccaatgcaaaaatccaagtatgcactatggactgtccg

SEQ ID NO: 1172 - DNA, 186 bp, Zea mays
  unsure (1)..(186): unsure at all n locations
tgcagcnnaaatggctccccagcggagtttttatatagtatgncgacgcccacatggagcgccgaacactcaacaaaaaccgcggcggtgcctacagcacaggggcggacccgccgcgcacaagggccgacacgcccgcggactggagcgaagcgcggcggtgctctctgcccaaaggcggaccgc

SEQ ID NO: 1173 - DNA, 338 bp, Zea mays
  unsure (1)..(338): unsure at all n locations
ataccctgaacgagagagatgatcttagntttttaatcctcgctatcaacatgggatatgtcaaggatcgctcttctcagaacctcgaccgaacgcgcttttattgtttcgaaaaatactttccaaggtatacgcagcccctgtgctgctgacttgcgcaatagatcagcatattcattctctccacgacgaatatttctgacagagaaacctttgaaggaagcctcaatccttcggactgtatctagatatttttcaagcttcgggtctcctgctttatagctcttcgcaacatgaccagaaataacttgagaatcagctttaagaattgcccttct

SEQ ID NO: 1174 - DNA, 368 bp, Zea mays
  unsure (1)..(368): unsure at all n locations
cctgccgcatgcaagctngtgtaatctacttcatcatcactttagtcttttcacttgaaatagtatacttagaggtcactcgagcgcttacctttctctcctttgccatgaggcaagtatggcgctcgttggggaagagtgtccatctgttgaaagctgaagcagcgagtccttcgtcgccggagtccgaagttgagcagtctgaatcccattctttgccaaggtgcgcctctcccttcgccttcttgtaggccttcttcttttccctcttcccgagtctttcttctccctagacattttcattatcgggacattgtgctatgaaatgaccactcttaccgcatttaagacaggaacgctttcccttt

SEQ ID NO: 1175 - DNA, 319 bp, Zea mays
  unsure (1)..(319): unsure at all n locations
cgagttcagcctctattacnaaccaactcgagtatagcctgacctctctaataccttccttaaatgctccggaatcatcacctcttctaaagacagtaacacctaaatctatacgaagagtagtgtaccccatcttacataattgagagacaaattgcgcattgtcatctaaagaacctcacagaaaaacactgcacatagaatggccagtgatatagcaattttataagtcctttgacaaaccctgattccactcccgaatggagagctctttgggacttcattttttggggaggaaaatccttcttccctggatggg

SEQ ID NO: 1176 - DNA, 289 bp, Zea mays
  unsure (1)..(289): unsure at all n locations
gctggccctctttttatataactcgttcggtttttcgtcctcctttagctagcagggggatactatataggagtngttgtgttgtgtgcgactacatgtcgtattgggttcgagtagtttctcactatcatctatggcataacggcccactaatagaaggttggatggtagcctatttatgggataataaaactgggagggaacttatgtgggtttagagtttacgggtttaaaagttagaagttagaagtttatggttttagggtttctttcaactgttcgattggat

SEQ ID NO: 1177 - DNA, 366 bp, Zea mays
tgctgctgctaatttagcatttaaatcattgttgacacccttcacagtagaaatggcttcatgacaagtatatagttcaaaagaaagcatctcatttctcttaacttctaaagcatacgatcttcgtgccataacaaatttattatgctcttgatacaacaaatcctcttgcttttctaaaagcatattcttttcattcaaggcatccattaattcattaatcttgtctatcttagatctatctaagccctctaacaaacatgaataatctacttcatcctcatcactacattcctgctcacttgaagaagcatacgtagagtggcgagtacataccttcttcttcttgtcataacgcatgtgtga

SEQ ID NO: 1178 - DNA, 255 bp, Zea mays
gaatctaaagacgcggagcagttaggcgggagtttactcttcagccggcgaggcaacaccttaggcggtgagccaccctgggcgcaagggaaatcttgcgctgagtgaataatgggcaactccccgggggggacaaatcgaagggggagcgcctgtttctgctaacgcagggaagcaaacatgcgcattgactccactgagaactggcagataaggagcacctccatgatgcccgcaacgcgggggaggattgca

SEQ ID NO: 1179 - DNA, 404 bp, Zea mays
acctcctaagctaagattctggccccaacggggtcatcaccggcgggcccacatacaaacacgcgttcgaatgcgacgtggagtgcatggagtacgccgaggccctcgccgaatccgaggccctcatcgccgacctggagagcctttctaaggaggtgccagacgtgaagcgccacgtcggcaacttcgagccagcggagacgggtaagtctgtccctctcgacctcagcagcgacgcctccaagcagatccggattggctccgagctcgatcccaaataggaagcagtgctcgtcgactttctccacgcaaacaccgacgttttcgcgtggaagtccttggacatgcccgacataccgagggagttcgccgagcactcgctagatatccgagctgggagccga

SEQ ID NO: 1180 - DNA, 446 bp, Zea mays
  unsure (1)..(446): unsure at all n locations
agctntatcaaatggatgtgaagagtgctttcctcaatggaccaatcaaggaagaggtctatgtgaagatagtgagtaccctaactatgtatacaaactctctaaggcgctttataggcttaagcaagccccaagagcatggtatgaatgcctaagagattttcttatcactaatggcttcaaagtcggaaaagccaatcctacactctttactaaaacacttgaaaatgatttgtttgtatgccaaatttatgttgatgatatcatatttgggtctactaacgaatctacttgtgaagaagttagtaggatcatgacacaaaaattcgagatgtctatgatggnggagttgaagtacttcttataatttcaagtgaagcaacttccagagggcaccttcattagccaaacaaagtatattcacgacaatctaaacaagtttggga

SEQ ID NO: 1181 - DNA, 318 bp, Zea mays
  unsure (1)..(318): unsure at all n locations
tcaccaccggaagccattccgttctcacgctatgtcgctcgcaggcacgggcggggtgttgccacttgccacaccacagcacatgcgccgggcagaagagagggaaaaaaaaagatcgcaggcaggcaggccgtgatcggtgtcagaagaggcgagctggagatgcgcgatggactcaacagcacgcanaggcgcgcactcaccacgttccacgggggggttttttttgggtgatgaaataacgtcccgtccacggtgggttgaggcggaccgggacgagctgggctggggccagccgccagcgacgctcggctgatc

SEQ ID NO: 1182 - DNA, 443 bp, Zea mays
  unsure (1)..(443): unsure at all n locations
agctttctataaaggccttgntcaccccttttggttgaatatttngngagttatgagcaaaaccgttgactgctgtgctgctgtccaaaaaaatctgcatgtggtaaattgattgtttggtgttattcttgtttggctcgacagaattagttaattttttattattgaagactggttgaatatagtggttatagtaatccgtgctatgctttagtagtatgatattctttgttaatgaccgattaaataccttagataaatatttattagtgcagaataatttatcttcatgtggggtagtaataatgtgtttcaaattttggtcggttatctgattgtatgtattggatagcagtagtaatttgcttgcataggtaatttttatggaaacccaatacggntaattaaataattcatatccttattccaagntcgagtatcct

SEQ ID NO: 1183 - DNA, 399 bp, Zea mays
  unsure (1)..(399): unsure at all n locations
attttgtacgaggagcataacaccatgactggatgtgaacatgcgttaacaataataaccgcttgtaaccacgtatcatattaaaaaaatattgctcatttgtatataatgaaaatatatatttatgctgcatggaaatgttgatgtatttgggttgggctatataggaggacaacatgagaattccacctgaggttggtgatacaagttctccgtgtcacgtagcacaggaacaaatggaacatattgctgcatcctcagaagctaaaaatgtgagcattgataaatgattntactgactcgcataaagataatttatgtcaatatgtgtatactaaataataacttctcttattatacagacgctgaatttaatgtggatgtatacatctgagtatg

SEQ ID NO: 1184 - DNA, 379 bp, Zea mays
  unsure (1)..(379): unsure at all n locations
aaatcgngggctgcatgagcgcgacgcctaaggatggttgaccacgnnggcgagcgcctcgtgcagcctcatgtcgccgaggtgctggcgaaacaagccatggaggtacttgccgtcgtacttgggccccctcaccatcctcagcgtgccggcgatcttggacaggatccagctcctgcacaactcaactcacgcgcgcgccagcatctttaatttctcttcattccgtccgaggggtggagcaaacaattaataataatgcatctcttctaaaccgcgccgcgaaattctcgccatgcatgcatgcagctgtgttacttacttctgtgggaagatcttgggcgagtggtccacgtataactgcgccagatccttggcg

SEQ ID NO: 1185 - DNA, 174 bp, Zea mays
tctatgcttacctctcctaattagttggtcaacgagcttccatatcacccttgtggaattaatatttgctcgggtggctctccatgtggcatcttacacaataatccgattatgaacaataattgaacttcaatggtattggaacatgagcataactcatatataacattaatc

SEQ ID NO: 1186 - DNA, 421 bp, Zea mays
  unsure (1)..(421): unsure at all n locations
aacttggaatgcacatttatgtatttatttatttgtcacttgactactttaattccttttgttgaatatgcgccactaacagaaaacccaataatcttcataggttccataactctaaaaccaacttgaaaacattgctatttatccattatattatttttacacaaatttttgggctttacaatactaccccccttaacaaaaatctcgtcctccatattagtaagataaggtatatacaacgtttcgcttgtaatatgctcctatgttccaatagctatttggtgactaggatagcatgggtgcctcataatcatgttttacctattggtaagaaagttggggtgagaaagatcatgatatgtcaagaaagaaagattttggganggacacttcatctgcatagtngtctcgattatct

SEQ ID NO: 1187 - DNA, 266 bp, Zea mays
agaccttgtgcagcttgtcaagcagggaaacaagtatgaggctctcatcacaccaaaaatgtgatgacaacatcaaaacccctggagctgctacatatggacctcttcgaacccgtcgcctatctgagcataagaggaagtaagcatggtctagttattgttgatgacttttcccgcttcacttgggtattctttctgcaggataaaactgaaacccaagggaccctcaagcgcttcctaaggagagctcaaaatgagtttgagct

SEQ ID NO: 1188 - DNA, 424 bp, Zea mays
ttagcagacgattcgtagctcaacagatgatgtttttctcgaatatctagctgtggaaaagctctaagaaaactctcgtattaacccttataaagaatattgtaatcaaattctactctgtcaatttgtccatactttgtaatataatcttacctttccatcaatgtatgaagtgctttgatgtggacgaaacttgtattttttgagccgaaggcgaaaaaacaccttcccttcttgtacacaacgaagcataaatctgcttttgaagctgtatccttagagccgaagcaactgtctgtatctgtatgatatgatgatgatcctatgtatgtctaaatgaatgtttatgaatgcaatgtatgatgtaatgtaccgtgccaatgaatgcccaaacacacacgcatatgaagcttcatccataacc

SEQ ID NO: 1189 - DNA, 382 bp, Zea mays
ttaagtacctgagctgcatctttaagggaaacacggaagttttcttcgcgaaatcaaaaggataacctgtgcgcttgtcaagcagtaacaaggggagacgcatacaacaaaatgtgataccacttaagacccctgagtgctgcatatggaacttttggacccaccctatctgagcatgggggaaggatctgttctagtattgcgagactttcccgctattggtgtcttttgcagaaagctgaacccatggccctaagccttctagagagttaaatgattgactcaagtaaaagatagagcacatgggtcgattaaaacctaagggagattctgagagaaggacagccgatttcgctcctccacacataaagggtggaaagaa

SEQ ID NO: 1190 - DNA, 443 bp, Zea mays
agcttgtttacgaccaatgttgcctgtgtctctctccttacatcctctgcaataataaccaatgaccaatggtgctcttgatggctggacaacatcacagtttatacaagccaaaacaagcaagtgattgttgtgcacctgaaattgatgatctacaatcacaatggataccaacttcagcgtaaatacttaccttaacaagcagcctattcttctcagaattttctttcacaattacacccattgatcttctagtgtgatcaaattccaaagttactactcttaacaacattgttccaccaccgacatcacccatgataataaataaaattattacatgacctttgacgatgtgtacagaagcattctacatatgcagtaaggatcaaaggaatacttattcagcaaatcagatgaactgatagataaccaccaggaagccc

SEQ ID NO: 1191 - DNA, 389 bp, Zea mays
  unsure (1)..(389): unsure at all n locations
tattgtattngcagatgttcagcgctcacatgggatcttcaatgggatcccagtccacccgctcgtcacaatctggacagactccaaacaccaatgaaacacaggtatagctttgtagtatatttactttcatttacaatcataatcatatgcatcgttttatttggttatagggttctgagaccggacaggaaacccacagatggacttacagtggtcgatgccccctagaggacagatttttcctcctccacaaccaggtatgggatattggccgccaccaccatggggatatcctacacatccaatggggccttggggacggcccncatggtcaacacagccactttcatcaccagcggnacgttcctgaatgtaatgctacctga

SEQ ID NO: 1192 - DNA, 457 bp, Zea mays
agcttcttgattactttctaatagtatgttgtttgtgcttgttagccaattcctagtccttgatgcatgatagcaccttcaccatgttcgctcctcaagcaccctgctagctagtctgaaagtggattatgaagatatagtagaaacagggacaatcgtaatatctccaccaagtatagaaagaattggatgtctgactatagcgctgccaccagctaagaatgttgaaatctggaccaaacttagtttcaatgtcattatcaaggcatgaagagagctcatatagagaagatgaattactagtactaggtgtacctacaccagatatactactagcgccagcattgtaagtttcatcatcaccatatatatcatcccaatcctttatgcctttaccagaatcagcacttggcactggctgagcactcatacaagctccaccaacattgttttcata

SEQ ID NO: 1193 - DNA, 457 bp, Zea mays
  unsure (1)..(457): unsure at all n locations
tataaatactcaagctctgatacccttcagctaaagctcacagaagcaccactgttatattntctacattctgataagcactttgaactagagcgtgacgtacgtggcattgtcatcggaggagttgtcattcaaggagataaacatactgcattatctagtgaaaaaactacatggcctagctgtgaattattgcacatacgacatatacgtctatgctttagtgcatatctggaaatgcgtcaacattatctatggcctaaagaattcgacatacgttgagatcatcgaaccttngaagtacattaacggttgaggtaatctgaataaatgttatgctaaatggatggaatccatagtcatgtccatacatcattaaacatacgacacggaaaggcaacttgataatcgatgttatatcttaaccgtataccataatgtgtcaacttgaccataa

SEQ ID NO: 1194 - DNA, 424 bp, Zea mays
  unsure (1)..(424): unsure at all n locations
agcttgttcattgcaaatctaagagatatgtattaatttattntctgnacttttcatatctaacagctaaacaaactaatgttgcaagcaagcaaatgcttgattacttctgatcaacatcaaatgcctcgagtaatatgcatcatanaacaacctgccattcaacttgcgaactagaactgaaataaggtataagttccaaaaacctgcatgacatattgtccagcatatgtccccgtaattgtagaactctgaccagatgccaacaaagcaactgcaaacaactatgagctccagtttccaaggacattctaaaagaacagtaaagaaaatgcagtgtcagatttgaatatttaccgaaaagtatatatagacttcacaaaagacatttcataactgaagcagaagctctatgtatagctat

SEQ ID NO: 1195 - DNA, 359 bp, Zea mays
agctaccccaaccgtagcaacaatggtgtatgttgtattttctaaaacaaacatcgctcctgatgtcctaaaatagtagtcgctttatagaactactggggttcatataattcttgatgcatgtactttatatatgtgtctacctagattcatccttcatcatcatttttttaatatacacattaaaattaataagctaaggaccatacgctagaggatgggcggctaacataagagacaatataaaacgaaaaaatctgctctccaggaaaaattactagcctggacataaaaactgaacctgctgctttaacaagaatagagcatgatctccttgcacagttaatgaatcaacttgc

SEQ ID NO: 1196 - DNA, 458 bp, Zea mays
  unsure (1)..(458): unsure at all n locations
gctgtggacccgtagcctatctagttttattaccacctcacatgtcgncagntcacaatgtgttccatgtatctcagctgcggaaatgcggtcgcctacccactgaagtgctaccagaaccagacattgagatagaaccagacttgtcctaccaagagtaccccgtcaaggtattagatcagaaggaaagatcaactcgggcaaggtcggtcagaatgtataagggtcagtggagtcaccattcggcagaagaagctacatgggagactgaggattttctacgctctcgcttccccgactttctacccaaaggagtcggtatgtaaccccaaaaccccacccccacctgccctttgaatccaattataagaanaacttagataacaaggatagtctaagctgtggatntaatttaagaagggcttccttctgaagttgaaagaggatgacattcgaag

SEQ ID NO: 1197 - DNA, 458 bp, Zea mays
cttgatgtacactcctctctctttcctccgtcgccttgaatgcgacgggttgagcttcggatgtggagggatcatcaagctcattgatcttcctcgaaccttcgatcatgcactcaaaacttacaaaattcccgataaccttctcgggggtcattttagtatatctaggactaccacgaattaattgaacctgagtggggttaaggaaaatgagagatcttagaataaccttaaccatattgtggccgtcccacttctcgctcccgaggttgcgcacttggttcacaagatcttgagccggctgtacatgtgttgtggctctctccctttgcgaagccggaaccgaccgagcctcccttcgatccgttcccgctcgtgatctttggagctcatctccctgtgcgccgtttgagacatcccaacctcttggcgctcttcaaccttgcacttgtatactc

SEQ ID NO: 1198 - DNA, 348 bp, Zea mays
ggaacataagacgacctgagcatgcaagcttggaggtatcaaatgggagtctattatgtgtaagctcttacttcacttctttcattgccatgaatgcaacgggatgcacctccggcgtggaggaggcaccatgctacaagctgacaatgggattggagcctttgaacatagtaaaagctcacaaactgctaataccatctcagagacaattgcttatacctatgatctccatgaaataattgcacttaaatgggataacgaaaaacaagagaacttagaataaccttgaccatatcatggtcatccaatatggtgctactgaagtagtggacctaaataaccaacatc

SEQ ID NO: 1199 - DNA, 298 bp, Zea mays
  unsure (1)..(298): unsure at all n locations
cggaggcgcctatcggctgcacactcggtgtagacttcttcttcttctnctccgtcgccttgaacgcaacgggctgggctttagatgagctgccaagctcgttatcattctttagcctcttatcatgcactcaaaacttacaaaatgcccgataacttcctcgggggtcattctagtatatctatgatcaccacgaattaattgaacttgagtgggattaacaaaaatgagagatcttaacacaacattcaccacttcatgatcgtcccactatctgctccccaggttgcgcacttgg

SEQ ID NO: 1200 - DNA, 329 bp, Zea mays
aatgacaactcacaggctgctcgagctactcaacatggatctatctccgcccgactagcttacatcaatcatgcggacgggagtaagcatctgtctagctactcgtggactgactattccacgctccacttgggtgtcctttttgcaggataaatctcacaccccagagaccttaaagggatctttgagacgggctcccaacgagcacggcttactgataaaaaagattagacgcaacaatgggatggagttcaccaactcacacacagaaggctttctcgaggacgacggcatcaaccatgagttctcctctcccctaccaccataac

SEQ ID NO: 1201 - DNA, 449 bp, Zea mays
  unsure (1)..(449): unsure at all n locations
agctngagctgaggcattgcctcttcgttaagcgggatcaccctcgtcggacttcgaccgccagccaccgcgcgtagaccgagctatcgggtgagccattcttcaattcctcgcgtccatgcctcgcctggcacctagtgaagctcactgaccgcgtgaattgaactctaccgccctggataggccggagccctcgccgccgacaagctcccccgcctgcgcacgtggaccggcctgcttcgaccatccccggcgatgattcgcacatcggcgtgatcgtcacaaccttccctacaccctcgaccaccttaccggagcaatctcaccgtcggtaagcccctccgtaatttcctcccgtgtgggtactggttaattaggggaaggacctcgggttaggtttagtaaaaccncagaggggtttctgaatggtcagtggcacatgtgaatat

SEQ ID NO: 1202 - DNA, 436 bp, Zea mays
  unsure (1)..(436): unsure at all n locations
tcgtattattccggtctgctgcaatgccgattttattctgagggtacctgttcacatattgtactacagaaatactgttaaatcctgtttttgaggaccttcggacgccgaaggtccccaacagtagcccctcgcaatattaatttgtttgaaataataaattcagattgcgatatgaacgaaggctttatgccgaagggtccaaaaaacaccttccctttgctagaatagcaacattcaatgacaagtggggtctttcaactttcaacgcatcaagcgtataaatacggccataccgcaaacttattttgcacgctttctgtgcaaccactcctgctcactcattntttagctcttgtgcactgtgatctggctaagctttagctttgaagcttccgctttgaaaacagttttctagtgtctccgaagatgtctg

SEQ ID NO: 1203 - DNA, 451 bp, Zea mays
  unsure (1)..(451): unsure at all n locations
agcatgcaagcttctaaagggtgaacacattttatgactaaccaatggtcaatntgagaaagacaggattttgagcgcatgtcacgcaggaaagcaagatggagcccatcatccacacaagaacatcatgacgaccgacaggccgcttgagctactccacatggatctattcggcccgattgcttacataagcatcggcgggagtaagtattgtcttgaattgtggatgattattctcgcttcacttgggtattctttttacaggaaaaatctcaaacccaagagaccttaaagggattcttgagacgagctcaaaatgagttcggcttaaggatcaagaaaataacaagcgaccacgggacggagttcaagaactctcaaattgaaggcttccttgaagaggagggcatcaagcatgagttctcctctccctacacgccacaacaaaatg

SEQ ID NO: 1204 - DNA, 326 bp, Zea mays
  unsure (1)..(326): unsure at all n locations
gtcacagcggctcttagggcagcggactgtcatctaccccgttcgtcgctccactgactatcacgctgngctctaagaatccacgcatccattgagccgacgggtgcgtcggcccaatgttcctgtgacacggacacagtgggccgactgatgaggcctgcgtgcaataaatactacctgacttgatatttcgcacaggaaggaactgaacaaagctctcccgtcttttccagcttcatagcttctatacgctcttcttcctcgctcttatccttccactgctgcatagcgaagcgaggctgacagggaacctgactccggtcatg

SEQ ID NO: 1205 - DNA, 339 bp, Zea mays
agcttacccacgacgaggtatatggccttttctaagggcacgattagcatgcctacattcgatctgtccttaagcgactgatacagagatactacatcaagactctcttctcgtgcaagacacccgtctggtatacgtttattacttgaaccccacaggaggtaccagacagaaggacttctttgaatatgatgaacccatcacggacgtgatggatacactcatcattaatcttgttttgagaagaattccattcaatgtgaagcatcaccttctcaaacgaaacactatgtttgtatgtcagactagcatcaaacacttgttaaataaaacagcaac

SEQ ID NO: 1206 - DNA, 466 bp, Zea mays
  unsure (1)..(466): unsure at all n locations
agcttatccttanggtcatattatgacttttactctctaaagtatttagggtttcttaacttgggtaaagttttaccccaataatccccatttaaggttaagttccttaaccagggttctagttgcaaaacacttaaaacaatacaacttgtttgaaatttttgcctagtgaatgcactctaggtgtgtcacacatatgcaatgtcaatgcttatgatgttatgctcaagttttagttatagtaacaccaggggtgttacatccttccccccataaaagaatctcgtcccgagattaaaagtcctatggtaagtaatggaaaaggaaagtgcggaatattttatttccttaattttggtacaaggcaggggtgatgtgggggttacctctttattacaacaactgtacaggctttacacttcacatgaggctaanaagcctgngaaattcttatctaagaaatctt

SEQ ID NO: 1207 - DNA, 369 bp, Zea mays
aactgttagttcagacggtacttcgaagcggcaaacaatgttttgcccgaagaatctttgggtaatctttgacgctattgtagaaacagccctcgcctcgatccatttggtgaagtattcgacggcgacgaatgcgaatttaaggttcccctgagcggtgggcaggggcccgacaatgtccaggccccagcgctggagaggccatgtatgggcgatcagctttgtatactgcgaggtgctgcctgaccgacgagaaaacttctggcaggcttcgcacgaccttgagacctgatttgcggggcagatcattgcggtccagtaaaaaccctggcggatcaccttggcagctaacggccttggccctgcgtg

SEQ ID NO: 1208 - DNA, 479 bp, Zea mays
  unsure (1)..(479): unsure at all n locations
cttaagtgaccgcggctgcagcttaccaatggacgtagaggttcttttaatggaccaatcaaggaagaggtctatgttgagcaacctcccggctttgaagatagtgagtatcctaaccatgtttataaactctctaaggcgctttatgggctcaagcaagccccaagagcatggtatgaatgccttaaagatttccttatcactaatggattcaaagtcgaaaaagccgatcctactttattcactaaaactcttgagaatgacttgtttgtatgccaaatttatgttgatgatattatatttgggtctactaacgagtctacatgtgaagaatttagtaggatcatgacgcanaaattcgagatgtctatgatgggggagttgaagtatttcttatgaattcaagtaaagcaactccaagaggcacctttctaagccaaacgaagtatactcaagatattctaagcaagtttgggatg

SEQ ID NO: 1209 - DNA, 484 bp, Zea mays
  unsure (1)..(484): unsure at all n locations
tagtgctgngccaaatctagcccaagcgcgccaacacctgatagaaaacacgcccacgcccgcgcgcactggtagttttgcagaacggtcctctggtttttagctaactgggaacaagttctttcactgttctatgagtcgctgacggtttgcagtatggtccctggatttctatttctttacccgacacaacctcgacggcgcccgcgcttggagccgagctccggcgagcaagaccgcgcggagggggccacgaacggcgctcccgagcagcggacacaaacttggatctactccgaccgtttnccctaagttaattgcacggatggcgacctacanccgcctgcccacgggaacagcggaggcatcggatagaatcgcgtgttccccgtgatctacgtgcggttagttcaatctacaaggtccaggagtttgagaagagcttatggatgctagaacgagccacagcgcaacatgagttgac

SEQ ID NO: 1210 - DNA, 436 bp, Zea mays
  unsure (1)..(436): unsure at all n locations
agcttgccttcgctacaatctatcacccttctttcattgggncgtggagcgcgccaatgggaaaatcttctcagctgtcaagaaaatgctcctcgatgaataaaaggtagatggaccgatttggtaccggaggcagtctgggcgcttaacacaaccgagtgcaaggcgactgggatcacttctttacgccttctatacagatcggaggccatgaccccgcaagacataaagcatgggaccccgtgtacagtttcgtcatccgtccccgacgtggacgagccaccttcaaaagatctcattgacggagatcgggtcttcgccctacaggccctaaacatataccaagcccagaccatagcatggcgcgaccacgcagacattccgatggagttcagcgaaggggacctcgtactctgtcgaacagatcggacggagt

SEQ ID NO: 1211 - DNA, 374 bp, Zea mays
  unsure (1)..(374): unsure at all n locations
acactcacaaactcaagcttactcacnctactatcgctatgtgtccaacgcatcttcatattctcttatgcgataccaccagggcccatcagcttatctaccttaatactctttaccgcctccttaacttaatattcttgtatccttccgacaaaacccccgttgttgccatcgaatgggtcgtccaattctattgtagaactctcatctcctccattgaacaatttgttgaagcctccttccatctattctagatctcttcattcttcactaatagtcggtttgcttcatccttgatgcatttgacttgcgtgacatcccttgtcttcctattacgaatcttggccatgctatagatatacttctctccctgc

SEQ ID NO: 1212 - DNA, 456 bp, Zea mays
agcttggctagcacgtcttcaaaggagatagtctatgttatccctatgagatttataattcatatgtatatacgaagatgtattgtgagttgtcattataaatagaggtacgatgtaatgtataagatagtcggtctaaggaaacgggaattgctccaccttcgaagttgtgacccttctatctttgtattgttgctcatatttttaaggtacatttgtaattatttgtgatgggggaagtaataaaagaagcacgacaataattctccatttcaagtggttttacttgatccgaagatcttttattcttatgatcttttttcctttaatctatccttagaataaattaaaggaatgaaggtgttccattattaattgtgttgtcgtggtttagtttatccttaggaatcaaagcaggtgaccaatcattcctattatcagtttaatatctgatat

SEQ ID NO: 1213 - DNA, 431 bp, Zea mays
  unsure (1)..(431): unsure at all n locations
tgagtcangaacaancgnggcatgcacaatatctctngataaatatgtccaggacttaaggattgtcaagaggaaggaacataagaagaaaatcaatacctctgccaaacgcctcaaccatgccttcatgcaaggtaacatccaaggtaatgatcaagccacattttacactaaaaaaaataagaagtgtactgaatgctttgaaaagacgcacttgattacgtcatgtccctatattgaagaaaatggcttaattattaaggataataaactttgttttaaatgctcaaagaagggacatttagttaagtcttgtcccatgtgaaacaaaaaggcatagttttacaacagaaaatagttactaaccatgtagcgagcaagaaacaaggaaagaagaaatcttaagacatgaagatcgcctttgtacatat

SEQ ID NO: 1214 - DNA, 426 bp, Zea mays
  unsure (1)..(426): unsure at all n locations
agcttcttcgctntataagtgcttgttgttattttgttgggttttgggagtaattgggacagaaaattcaaaagatctgtgaagctagtatcagaccatccggcgctagccttcaacttcagaagttctagaactgtacgcagtgtagtaaactctttctcacaaccctttgattcatcatataaaggttcttttgaagcactttccagtccctccattttagatagccctttctgcgatcccatagaactcaacatttctggttccatatggcgcaacatctcttcgcaatcaaattcttcaaaatcttgattagcatccacattatccactttaccatcaactttaagatctaaaattccgacaactctctcgtcattaccaggcacttcacacggatccaactcaccatgttatgaccatatc

SEQ ID NO: 1215 - DNA, 456 bp, Zea mays
  unsure (1)..(456): unsure at all n locations
tcggcgagccgaaggtccacaaaacaccttccctgagctctttgtctataaacgattcagtntgccagcgcgtagtggtcccaccttgcagagttactgttcgtccctgcggcccaccgcgcagcgagtgcaagcgggtgtccgcctggtgtaaaaatcctcgccgctccccttcttacctgcagtactatataaacagaccagtaggtgtgaagttaccacaacattcattgctatttgcactgttctgctgccaaaatttttaaccatcgccgaagcttgactgtcggaatccaacgaagctccaacttgaagcctgcttcgtcaagagaaaaaaccttgggagaaaaaagtatctaacttccacaacatcagaattaaatggccagagtacgctctaccgctacgcgtgagcatgggggtggggcgaagctgacagctcggagactggttcca

SEQ ID NO: 1216 - DNA, 476 bp, Zea mays
  unsure (1)..(476): unsure at all n locations
acctgcggcatgcaagcttcaactccatctatattattgattttctnggaatcagaccagcttccttcggcccttctggcagcttcctgactcccatgaatagcaataggcccttggtccgaaggtatcttcatgcaaagataagctgggtgaagaattgcttcaaaagcatttagggtaccacgaccaatgatggcgttgtaggggtattccatgtcaacaatatcaaacacaatttgctcagtccttgtgttattaacaaatccgaaggttaccggcatggtaatcttcccgagtgccacaatctgccgccctccgaagccacaaagagggtgcgtagcatcatgaatcttgtcttcaggctcttgcatctgtctgaaggctttggcaaatataatgtcagctgcactgcctgtgtcaactangacattgtgaaccagaaaccctttgatcacacaggaaatgaccatagcatc

SEQ ID NO: 1217 - DNA, 295 bp, Zea mays
ctctgacatgactgttactttgcgtgccaagctgtaacatgcaatgcaccgctgtctcatatttctgatgaagtttgcatgacaatgactaatctggtacttggttgcaggcaatgtcctgtcattgtgttcgtattgaacctgttttattacttgcttgatgacatactcttggagctgttcatcttgagagcttctgctatatgcggtctgctttgcctgcccagctgattgaatcatgttgatatcactactgcaggccagtatcccactctggtcactcaccaagaattcc

SEQ ID NO: 1218 - DNA, 458 bp, Zea mays
agcttcttcttcttcatatacatattgttttttatatctgatgcatatccatctggaaattttactcctttcagtgcctcacaaaataacgtcttctcagacgcactcattgtatatgatgctggtggtaaatataacttgtcacccactggaataggatgaagctcagttcgaatgcctagggactgaagatccaaacaatatttcaagttatccttggactttcgttgaatgcctaagagggtgttgacaatgttatcacacacattcttctcgatatgcatgacatctaaattatgtcgtaacattaaatccttccaatatggaagcctaaaaaaatagaccttcttttccatatgatagtaggctccccttccttcttttttgctttctttttatgttggcaacctttcccatgcactgtgtgcatattctctgtttgcaataaacttcctctc

SEQ ID NO: 1219 - DNA, 424 bp, Zea mays
cttaagttacatcaccttgggcaaggtaggaatgaacctcggtctcccctctcttgaagcctttagttgagagaaagactacgccaatgcccattccatgatttaaacccttaaccaaaggttaagaataccaaaatgtttacaaaataccgcaaaggaactttacaaaaagacccctaaaagacccctaaatcagccccaagtggagaacactatggaatcaccccattctctctaagtcccaaaatcagccctaatctagagatcaggggtgttcaccaagctaatgacaccaaaaccgtagggtctaaataacaaaaaggagccaaattatttaaggaactccctggaagagtctgaacccaagccaagaccggttgacacgggttggcacctgttttgcttgtgttgaacagtgcagaca

SEQ ID NO: 1220 - DNA, 435 bp, Zea mays
  unsure (1)..(435): unsure at all n locations
agcttctaanaggagaacacatgatttgtttaactaacgtgcaattcgaaaaagatagaccttgtgcagcttgtcaagcaggtaaacaagtgggaggagcgcatcacagcaagaatgtgatgaccacttcaagacccctagagctgctgcatatggacctcttcggacccgtcgcctatctgagcataggaggaagtaagtatggtctagttattgttgatgactcttcccgcttcacttgggtgttctttttgcaggataagtctgaaacccaagggaccctcaagcgcttcctcaggagagctcaaaatgagtntgagctcaaggtgaagaagataaggagcgacaacgggtccgagttcaagaaccttcaagtggaggagttccttgaggaggaagggatcaagcacgagttctccgctccctacacaccat

SEQ ID NO: 1221 - DNA, 467 bp, Zea mays
  unsure (1)..(467): unsure at all n locations
tatggaggttcttcatccncacatgtgctaagcggtgatgccacaaccagcccatgcaagtcttggccattaagcatgcatctagaccggcctcttcttttgcaaaatcaactaggtaaagtttgctgtctagtacacccttaaaagctagtgaaccatcgcatcttctagagacagacacatctatatttgtaaataaacagttatatcccatattacataattgactaacagatagtaaattatatccaagactctccactaaaaacacattagagatagaatgctcatttgatattgcaattgtgcctaaacctttcaccttgccttggttcccatcaccgaatatgattgaatcttgggaatccttattcttgacgtaagaggtgaacatccttcttctccccgtcatatggtttgtgcatccgctgtcgaaatccagcttgacccccggatcataaacctga

SEQ ID NO: 1222 - DNA, 449 bp, Zea mays
  unsure (1)..(449): unsure at all n locations
agcttaagttattttattacagatcatatcttaaaaaggcgagtgctgagtagtaatattatacaaaccaagggaggcacagactcctcccgttaagttataagcaaaagatcctatgtggaggaccgagtcctcccgcacttcagtcttgtttttcttctttaagaaccaccttggcacagaagcagcagaaatctgctacttcctcacctaaaacaacgaagggataaaccctgagtatggaattactcagcaagtcttactcgactaaagaaaagactctcaagggtatgcttgttatatgggagtcaaggtaaggcttttcaataatcaaagactctattttgcagaaatgcttactaaagtggatccttaaaaatccaattttatntgtcaagttaagtacaattacctgcaactagagttctttctaccctagttcaatcact

SEQ ID NO: 1223 - DNA, 462 bp, Zea mays
tgagttatcttattacagaccagaactaaaagtgtgtgtagagtactaatattatacaaaccaagggaggcacagacctctcccgataagttataagcaaaagatcctacgtggaggaccgagtcctcccgcacttcactcttgtttttcttcttttggaaccaccttggctcagaagcagcaaatgtctgctacttcctcacctacaaacaacgaagggataaaccctgagtatggaattactcaccaagttttacctcactaaagaagagactctcaagggtatgctgcgtatatgggagtcaaggtaaggcttcttaataatcaaagactctggtttgcataaaggcttactaaagtggatccttacaaatccaatcttatctgtcaagttaagtagagttacctgcactacagtctttctccctagtcaataactgtcctgcctagcacattctaaca

SEQ ID NO: 1224 - DNA, 386 bp, Zea mays
ggttaaccttgttttattttgattccacgctctctgtgccccatgtgcattatgaaagttgaggtttgaatggatggtacattacgccaattgagttcagagcttacagtcctgattggtgaatgcgatggttatccaatatttgtcgctttgcttaaattctagtatccatgcgccgatgcattgcggtcacgtgccttgttttgcttagagctggcaccctcgagagggttcctcgtccttatatgggcatgcatctagtggtctttgttttctccggtgccatattgctcggcttaatgaagcctttcgcaaccttgtgctcactatgctaggctcgctgtgggtctctctcgctcatgccctcacaatcagcaatggtcctg

SEQ ID NO: 1225 - DNA, 444 bp, Zea mays
gtgtatgacaagaaaggcaaagtcaaacaaattcaacctttttatgataacaccactgcgggagtgaacaagcctgtggagggcgaaactgtgatttgtacgctatgccacaacgaacgccacaagtcttaccactgcaaggcgaagaccgaggatagcttacgcaaaagccaacaagaaaaatttccaacacatacatcgacaaggtggataaaaaggctgctacaccatatttaatcaaaaagaaaaagaatggaaaggtgatagcaataaaggccaacaagcaagccaacaaaggaaagggggtcaaacgcatctggatgccaaaggaaactattacaaccatgcaaggcaccaagaagggttgcatcccaagagggaagtaagacagctgaacgactttggggcatttagagacttggcaaattgggatgatatcatggg

SEQ ID NO: 1226 - DNA, 435 bp, Zea mays
  unsure (1)..(435): unsure at all n locations
agctngactcaagtatccatacattaatccttaattcctttntcccgactcatggacaaggcatcctccctggatccaaatccatagactaacatctatcccgttatcaagatgaatacaatcaattcctgatctcgcgcgagtgctanaaaaatcactcgacttctaccgagatcctgatttagcatagcagctactcgacctagcatactagtatccatctcaaaacgattcctgagatcatgcaactagggtttcaaacaactcctacacttaagtgcacggtacaagcctacaaacattaagtgtagtaaaatagcatataataacatggttatgcataaaaccggggcttgccttcaatcgctgaggctgcggagagattcttattagcagcctctgaagcctgctcctggtcctcctcttggacaggtc

SEQ ID NO: 1227 - DNA, 423 bp, Zea mays
  unsure (1)..(423): unsure at all n locations
tgtgcttgatcgttgcattaggaacttaaaactcagcttaaaggatgtgattaacaacttgctttccatcttgacatgcactgcatggcttgtctttttcaaacaccacatcctttaatcctttaaccatatctttctgtaataccttcttgagggtgctcattccaacatgggcaagccctctatgccaaagccatcctagagaagctttggtgaagaggcaagttcttaagtctgcatcttctgaagggaaatccactaagtaaaggctggtggatctaaatcccttgaataccattgattcatcatccattgttgttaccataacctctgatggagtgaataagcattgaagttcaagatcacagagtttgcccactgataataaatngaagctcaaaggtgcaactaagagaacatttg

SEQ ID NO: 1228 - DNA, 463 bp, Zea mays
  unsure (1)..(463): unsure at all n locations
agctttgaaaagctcacccagacggcttattttcatcaacaaaacacttcagggcaaacctccactccacaactctagacctctcaagagacctgggatccgttccttctctcgcaaagcttgtatcccctactacaagcaccccggtgcaagataatataagcctcatcctccctctgctggaagtagggccttcttagcccgaaccaggataaaccttgtgtttcatcttgcatcaatccatccgggcagggacacgcagtataaaatttactagtcggttgagggtctcccgggtccaaaacactgacagatattatggtttctgtatgcatgtgtgcaagggtccaagccgatcctaaggaagttcaccttatggccgtgaaaagaatcatgagatatttagtttacactcctaagtttggactntggtacccaagggatccacttctgattaatagga

SEQ ID NO: 1229 - DNA, 453 bp, Zea mays
  unsure (1)..(453): unsure at all n locations
ttaactctcgcgagaccttntctnatttctttctaaccatggtaagttcattatcgcatgtgatattctatgcatatttactttatttgttctcttgtatggagtactgtttgtttcctaatttgaatggatggatgtatgtatgcttgcaatcgcatatagaacgatccgcgtgaagagcccgaggaactcgcacgagaagcccctgagcaccactccgctggtggaggcaagtgtcccttgacctatctctgtcctattcattctttaattcacctcccgctctacacatttatgcctaaggattgactagctttgttatccatgtccttgcttacctatttgggtgaattattattgcttagctttatgctatttcttaactctaatcaatgaacatgatgagattatctatgatacgctgtcttcccttctcttatgatgatcgtatac

SEQ ID NO: 1230 - DNA, 440 bp, Zea mays
ctgcagcttacaaaacttaagagtttattatttatgaagaaagcacgaataaggaaaccaagcaacaagagcaacaaatgaaaaatgaatcactctctctcaagtcactaatcactaatgatcacttgtctcaattgtggaacttggagagattagaagctttgattatgtcttggaatgaattgctagatcttgtattgaatgtgtatgagtggagtgcttgggtgtattgaatggaggtggttggggttgtatttatagcctccaaccacttcctagccgttgctccaatcctgccgaccgcggacggtccgtgcctggtccggacggtccacccctgcacatcaacggttgaaatcgcaacggtcaacagtaacggctatatcaacggctatagaagcattaatgcgtcgtcagatgtcagataaagcaatcacgga

SEQ ID NO: 1231 - DNA, 449 bp, Zea mays
  unsure (1)..(449): unsure at all n locations
tatanaaactcaagcttcgtcgggctaagagtagtggactttccacgcccaggaggcgtatcatcggatgctggaacttggccaggttgtccactggcgggaccgaccctggagtccggctgccaaggccatgagccgggctgatgtccttgggggacagctagctgaggctacggagcggccagacaagccgtctgctcgggccgggtttctggaggagaccctggcggcgatggcccacgcgcggtgctgacatctttcttcgaggtggagatcctctgactgtgtcgccgtccgaggccgggccagattccgccgaaggtggagtccacgccgagggtgctgctgctctccctgttgatgtctgaacctacaggaacagtttgtctgtagtgtgccgtatgtttttgcggccgccgaggcccacacatatcattgttgtgtataaa

SEQ ID NO: 1232 - DNA, 345 bp, Zea mays
agctttgtgtggaattgggataggattttatttcttgggtgtgtgtagaattgaatgctagagctcttgtaagtagttggaaggtggaaaacttggatgacttgaatgtggaggtggttagggtatttatagccccaaccaccaaactagccgtttggtggaggctgctgtcgcatggtgcaccggacagtccggtgcgtcaccggacactgtccggtgcgccagccacgtcacctggtcgttgggttccgaccgttggagctctgtcttgtgggcccgcctggctgtctggtggcgcaccggacaagttctgtaggctgtccggtggcgcaccggacaagttct

SEQ ID NO: 1233 - DNA, 477 bp, Zea mays
  unsure (1)..(477): unsure at all n locations
cgccaatacctggtaaagcaacaacacatgccagcacagtctttactgaccataccggtaacttggccttttgcgtgctggggactggatatgattggacctttcaagaaagctcaacgaggatatacacatgtattggtggcgattgacaacatcaccaaatggatagagttccaccccattgcttctttaacctctgctaaagccgtggaattcatacaaagcataatattcagattcgggataccaaacagtattatcactgacttgggatccaacttcatcagttcataattctttgacttctgcgacaaaagagcattcagatcaagtacgcatctgtagcacatccaagagccaacgggcaggtcgagcgagccaacgggatgatatcggaggcactcacgatgagggtcttcgataaaaatgaaanattcgcacgatagtgtgtaagagaactgncttatgtcgtttgga

SEQ ID NO: 1234 - DNA, 382 bp, Zea mays
  unsure (1)..(382): unsure at all n locations
agctngctgagatcgcaaacgtgcgaatcttgtttaaatccggcgcagacctcttnctagcacctaggggtgtctcttgtatgtgagttccaatggcagatatgccctatgtagggagatttgcggacaccaattctgggttgtctcactgttcaccccgagacaaaagtggtgtcaaatcatgtcaacgaatatggctcgggttcaaatntttccagtgggttccttaggtagtttggctccttattggtattcacgccaagtggttttggtgccatttactaagtgaacacgtctgatctttaaactagggtttagttttgacttaaagaggattagagagctctagtgtgcttgctacttaaggaatgtatttggggtc

SEQ ID NO: 1235 - DNA, 424 bp, Zea mays
  unsure (1)..(424): unsure at all n locations
cgacccgggacccgcgtcaccggaatagcccaatcgtgctttccggagttcaagaacccgccggcgcacgtggaccgggtaagcccctgcaccgtttttcaattccttgcgcgtacggcctctgtgtcaccccgtgaagctacttgtgcaccctaatcgatctatgccgccgtggtttggccggagcaagagccgccgacgactcccgccgtctgtgctcgtggtcagggtagcttcgaccacctccgacaccgacccgcacatcggcgtgaccgttgcgacctcccggacgtcactgaccaccccgccggagctctacntgcggcggtaagccccaccgccgtaaaatgtaccacgggcactgtttaagccggtcacggagcgcgggttatattttagttaagtccagggggctttgcgcaat

SEQ ID NO: 1236 - DNA, 449 bp, Zea mays
  unsure (1)..(449): unsure at all n locations
agcttgataaatatttggatacagntcttatgtctgattctttttntgaaggggtttctgtcaagaatattccacgaggagaaaatgagcacgctgatctgctagccaagtcagcggcacaggggctacctttgccttcggaagtattctttgagacaataaaagcaccttcggtggaacttcttgaaagagcagtgctcaatatatctcctgttcatagtgaagattggagaaccgagattatatcttttctccagggcaactgcctttcagatgacgaagcttataataagagaatagaggcaagagcccgaccatatgtaataatagaaggggagttatacaaacatggagtctggtctccattgctcaaatgcctatccagagccgaaggtatagaattgatgaaggaaatacaagcaggcatgtgtggatctcatatcggatct

SEQ ID NO: 1237 - DNA, 410 bp, Zea mays
  unsure (1)..(410): unsure at all n locations
cgaggagcctcggacaacaaggccgaccgagccgagggactcttacttttnctggatacggatacctcactcgtcaccttgacacggcgcgactcacgcttagtgaagcggttcatacaaccaacaggcgagttttagtgctcgaaaataaggaaaaaacacggctctgcgccaaaattacatacatgttcacgccctcgacagccacgatgaacaaaaacactggcattcaaagtgccattacaaacggaactccggttgcccctgcgcaggtacgaacaaccccactccatgggggagggcctgcggagcaacagaagaccgacgaacggcgcgccgtcgcctgctccagcagcagcgacgacgacgacttctgctccgtggggccgaacagcggcagcactgacctc

SEQ ID NO: 1238 - DNA, 440 bp, Zea mays
agcttgagagctaccaagcgctattaattacaagtcaacaaatatagaaaataaggcaaatggcacaagcagtgtatcaaatgtacgcgatgtgagatcctatatatacgcccagcgcactccaagatggagggccccgtctgtcattgacggctgctattctaacaaagggaaggtgattatacaaaccttcggcttagggccttcgtccatatcgcaatctgaattcgtattctaacaaattaatattgcgaggcgctactgttgggggccttcgacttccaaagggcctcaaaaacataatttaacgaatttttccgagagtaatatgtgaacaggcgccctctgtcttggatcagaatcacatggagtgaaaagcatgaacaatacgaaaggtgacgcagcgaccaagctacacgcaaggaagcttcgacataaca

SEQ ID NO: 1239 - DNA, 420 bp, Zea mays
  unsure (1)..(420): unsure at all n locations
ttatgtcaattatgccagccatctgactatgactctttctatgtcattgttccgagtaaaccgaaccaggcccttagttatgttcttcatcctcttctcccncatgttcatcttctgatatggcaagttcactgtgctttggattcttaaccatctcaagtcatatgagacaaccccattcatggatacctcctgataattatatatgactatatccaattgaaagaagattccttcttgcattgacttgcgatttggatcatttgttacgattggcctcatgttcctctctgaaggagttatatctggtcagtaacaagatcagtgacgtatatggtcttcaccggctgctgaagctcaaggctctagactagtgccacattcagntcttctatagccactatacttggcgttggtgag

SEQ ID NO: 1240 - DNA, 456 bp, Zea mays
agcttgcatgacaaaaacgtgaatgtcatatattcgactcatcagaaaaatgaacagaattcacgagtttattacacacatcatgcagtgataagcgggacaaccctctgcagtcatatcctttaccaacaaaaataccatgtttagacacaacacatttattagactcaagaacaactttgtatccatctcgacatagcatagacgcgctaacgagattcttcttgatagagggcacatgttgaacgctcttcaatggcaccgtctttcccgaagtaaacttcagaatgaccgtaccaacaccaagaacatgagcacgcgacccatttcccattaacaaggcgccagacctcccgacctagtaggaggagaacatagaggcatcagcacacacatgaatatttgcaccactgtccatccaccactcaggtgaattacaaactgagagaacaaatg

SEQ ID NO: 1241 - DNA, 259 bp, Zea mays
ggggatgcacaaataatgcttgatgattcattgcgcgtcccaagccttttgcttttcttccgatctgttattttgcgacaagtctctttggttctcaaaaaaaaacagctctgaaagggttaattgtaccaaatgaatctctacaacctgggatctcttaccatcaagcgagaaaaagcctcgatttctggaattgcttatgtctatctcatgcaaaagaagacgatctccggcctagaccacaacaatacaaggaaca

SEQ ID NO: 1242 - DNA, 476 bp, Zea mays
  unsure (1)..(476): unsure at all n locations
atcttagagacacctgcngcatgcaagcttgagtcaatcatgttgcatattgatttttgatgctcaaaaggataatctgggtatgaagcacatacgagagaagataagggctggagtagccaagtgtttcaaggaagacgatcaaggcgtgatatggattaaaaaccgcatagtagtgccaaagaacgaagaactccaccagcaaattcttgatgaagcacatcttagtcgttattctattcatcccggaagcactaagatgtaccaagatttaaagcaacattactggtggacaaagatgaagatcgaaatggcacgctatgtggctaagtgtgacacttgcatacgtgtcaaggccatacacatgagaactgctggtccattacaatctttgccaatctcaacatggtaatgggaagacataagtatggactttattgtgggactgcccaggaccgcagaatgatatgactcta

SEQ ID NO: 1243 - DNA, 387 bp, Zea mays
  unsure (1)..(387): unsure at all n locations
acactatanaatactnacgccttccctttacaccgaaacgtatacacacttcattgtttttactctcacgcagacctaacctccaactagaaagtacaagggttgttcgcccttgtctcgataactnctctgacgagcttgggctctctctaatctatgaattattcttgaactttctcttatgcctcatcacacataggcctgaccaaatttctttcaccctagttcagaccagtttaacagagtacgacatcgtcctccatataaagcttngaagggtgccactttaatgctttcttgatagctattattatatgacaactccgctcatggtaaacactcattccatctctgtacgaattgcagaacacatgctccgaacatatc

SEQ ID NO: 1244 - DNA, 108 bp, Zea mays
gagggaaaccacccccaagtgcccaggagccgcataagcaagcaacagacgaccagacacaaagaaaaagaaaaagaccaaaaaggcgaccagtgcgaaggatcacaa

SEQ ID NO: 1245 - DNA, 368 bp, Zea mays
  unsure (1)..(368): unsure at all n locations
cttgatgacgaacgccatncctcatcgcgagcttgtatgcgtttatcggtgctctactcgatgcagattcctccttcttctcctctgtcgccttaaatgcgaccggttgtgcttcggacatggaggggccattaagctcgttgatcttctttgagcccttgatcattaattcaaagctcacaaaattccctattacctcctcgggagacattagtggatatctaggatttcctcgaattaattgaacttgcgtacggttaagaaaaatgagggatcttataataaccttgaccatctcatggtcatccgatttcttgctcccgaggttgcgcactcggctcaccaaggttttgagccgattgtacatg

SEQ ID NO: 1246 - DNA, 447 bp, Zea mays
  unsure (1)..(447): unsure at all n locations
agcttcgatattgagaatgagaattagtttgtttaagatcggccgtgcagacctagccacgttgttttcaggaaatccacaatcaaacaaggtcaaattgaagcaatggaagacaagtactttcatgatgtatctatagtgagggctggaggagaagacaccgttccgctgctagaaagtgatgaagtggtagtctttagaagcttcatcaaagctaggcttcgtttttcgctccacaagatgctggtcgaggttttgaaaacatttgaaatataccttcatcagattaccctcaaagctcttattagagtgggggtttatctgggccatgaggagccaaggactggaaccagatgcaagattgctttgcaatatccatgagctgtcttatcagacgaaggcaatngtgaaggaatagtatcacaancaatttgggtggtacatctt

SEQ ID NO: 1247 - DNA, 498 bp, Zea mays
  unsure (1)..(498): unsure at all n locations
tttcaaccatctcacgacttgcaagattatggcagctctcttccatcaatgatcacctttactacattgtcttgcacttttgctcgtgtttgaaaaagattatgtcgctgtccaatttcagcttctttcatttgaacactcaagatttgtgtaaccacaagagtagtaccatgctcaaattcacatcctgtatgttcttcagatttatcaatgtcatcttcatttcctgcttcaacttcctcttcactagctgatgtatattctccatcattagtcacaaggatcacacgattatttggacactcctttatgacatgaccatgacctccacacttgaagcactgaataccactactcttggctgttgaacccactgatgttgaagtggatgctgctggtttataactcgtgtctgnggcaacaccgctctttccactagaatntccttgaatattggattgcaagcctccagttgaacctcttatcgctgacgatgca

SEQ ID NO: 1248 - DNA, 453 bp, Zea mays
  unsure (1)..(453): unsure at all n locations
agcttataaaaatctggtttgaatctgttataatacccagctagtccaagaaaactccggactcggtgaacagttgttgggggtttccactccagaatatctttgaccttgctaggatctaccgcaattcctttagccgataatacgtgccccaaaaattgaatttctttcagccagaacgcgcacttgctgaacttggcatatagctgatgttcccttaggcgtgtcaatacaatccgtagatgctgagcatgatcctcttcatttntagaatatatcaagatatcgtcaatgaagactatcacgaatttgtccaactcgggcatgaacaccgagttcatcaaataagtgaaatgggcaggagtcattgtgagcccgaaagacattaccaggaattctaacaatccataccgcgtagtaaacgcggtcttctgtatatccttgggccgaata

SEQ ID NO: 1249 - DNA, 395 bp, Zea mays
acactatagacatactaaacttttccttcggcaaaacaatacctgagaagtctattctcttgggaatacagagatggcgacagtatcgtgtaccctctgtggcaagaggccagatggcggtgtatatttgctctcggttggatgaacccggtctggtcttgagaaactccgtggcgagttgaattggacaacccatgcacctacggtcctccttaagctaacttgaactattatcagatgtgaaccaaatagaggcatgaacatcaaaaactaatgatcaagatttaaaagtgaggcttttgtgtcttataaaacaccctaatcatatcatgaacctcacgatgagaagggggtcttacaccctaattaacccaaagtgaacctttaagcacata

SEQ ID NO: 1250 - DNA, 416 bp, Zea mays
  unsure (1)..(416): unsure at all n locations
agcttgggaagggtcttcatcctcacatgtgctaagcggcgatgccacagccagcccatgctagtcttagcaattaagcatgcatctagaccggcctcctcttttgcaaaatcaactaaataaagtttgtcgtctaatacacccttaaaagctaatgaaccatcacttcttctaaagacagacacatctatattagtgaatagacaattatatcccatattgcaaagttgacttacagataacaaattatacccaagcgactctactaagaatacattagaaatagagtgctcatttgagattgcaattntgcctaaccctttcaccttgccttggttcccatcactgaatattattgaatcttggggatccttgttcttgacgtaggaagagaacatcttcttttcccccgtcat

SEQ ID NO: 1251 - DNA, 459 bp, Zea mays
  unsure (1)..(459): unsure at all n locations
gagttcactttntaatctggcagtttccgcttgggcttctgccaatgaacccttcattggttgaagaagaaaatctttcttttcaagaacagcttcatgatctttgattttacttttcaagccctcaattataacctcattcttcttatcttcgaggtcttggtgcatccttcaggctctacttagtagcatactctgtgcaaaataaccttcatcagaaatcaccttcatcgcaaaacaataaaaagttgagggaaaactttaccttacaattagaatagaataagctgtcgacgatatgctgtcgtcggtagctgctgatgtcagcttcaagcttcagacaaccaacactctttgacagagtgctgataatcttcgcctagttcgatctcgatacactctaaggctcttcgtaattcaccaaaagaatggctctgctggtacccaggattacatact

SEQ ID NO: 1252 - DNA, 462 bp, Zea mays
  unsure (1)..(462): unsure at all n locations
agctttgatacaacttgatgagaatggtgtttccgatctttcgatgagagtggggatagcttcgattcgggaaagaatgatgttgtgctaccttcccgattcttgttgttgttgccttggcaagaacaacattgaacctactagcaaatcgaaagaacaaacaagaacaagtggacaagcaaatagcgcaaagaaccatgtccaagggtgaatctcactcacaatggtggggttctgaattaggcaaatcaagtgctctagccgagtcacacgtttacaaggaagtagcagcagctaacttgcatctaaaacaaaaccgagggtttagggtggcggctatagtagtatntataggtggacatgtgttttggaggtggaaaccctaaaggggcgccccctaatgggccttaanaacaccacaaccttcagcacagattggatggcttgacttcacctggactg

SEQ ID NO: 1253 - DNA, 403 bp, Zea mays
  unsure (1)..(403): unsure at all n locations
gctcttggtgctctggtgctttcttcttctcattctaatttttcatgtgttttgtaaagcgagcaagagacatctaatcatgtggtgatccttgcggggtcttagtgccccgtgtgattaagaagaagcactcgacctgtctaggtgaccgattaagagagggaaaggattgaaatagacccgacctttgtggcctcctcgacggngagtaggttctttggaactgaacctcgagaaacaaatcgtcgtgtccatttgtattgatctttactatttgatttgttttccctctccctctcactagaagtcttttgttacattggttgagttacttcaaagtatccgattgatgaacactatacaagagactatctccgacttgaatattctacactatccaaga

SEQ ID NO: 1254 - DNA, 419 bp, Zea mays
gtcgtggagcacgccaacggcaaaactttcacagccgtctagaaaatgctcctcgacgacaaaaaaggcatgtggcccgacctgttacccgaagtgggctgggcgctgaatacaacctagtgcatggcgacctggttcacccccttccccctattatacggatcggaggccatgactccgcaagaaataaagcatgggtcgtcttggacaaccgcgtcggacgtccccgacgatgacgagccgacttctaaggacctcatcgacggagaccacgtcttcctcctacatgctctggacaaataccaagcccagacaaaggcatggcgcgaccatgctgtcattccaagggaattcagcgaaggggacctcgtactgcgtctgacagctcgaacagagttcagggcaagctggagcccagt

SEQ ID NO: 1255 - DNA, 379 bp, Zea mays
tgtgagcaatacaacgtcagaagggagaaggctgcttctgtctatcagccgaagcccatgctcttatgtgaagatatagcacaccacaaggtgctgttgggaactcaattatctgaggaacaggagaaaaacctaacaaggttttctgttcaacaaccaagatgcctttgcatggtacgccaaccatctatgtggtgtcaacaaggatgtcattgaacactcgctcaatgttgatccatccttcagacccacaaagcagaggcctccgaaaatgtctgatgacaaagccgaaggtgctcgaaatgaagtgaatagacttcttagtgctggagtcatcacagaagtacaatacccagaatggctagctaacactgttatg

SEQ ID NO: 1256 - DNA, 438 bp, Zea mays
  unsure (1)..(438): unsure at all n locations
agctctgaaagactgactgggcttcccatttcttacttatctagcgacctacggtcacattgctttgataccacttctgtcacacccgtcctcgtagggcatagccaggtgcatagcatatgtgtgccatgatctattttcacacatatgttgacgtcacaagtgtaatatattaaataaacaatgcataagagcgttaataacgattatattaacatattacacttctaacagacaaaatgtcttaacctttattcatcaaagtacagcgaacatggacatccatccacaggaagatgaccagnggtatcacaagactagcatccatggaggtcagcatcatatcttcatctgcaacttctgatcaaaataaagcaagggtgagctcacttatggtcggagctcatcaagtgggggaaaaactaatgcatggctaac

SEQ ID NO: 1257 - DNA, 448 bp, Zea mays
  unsure (1)..(448): unsure at all n locations
ttgcgcaagcgcgctggcgttgtncgcttgctcgggattggcgtgtcttggagagaccgcgctcatctttgtctcaagcgcggagtcgatacccggtgcgcccccccgtggggcgccggcgctgtcgactcgctcgacagccgacgaggcgctgcctcctgcttggccttggttgccctggccttccctccgccgaccgggaagaaggcgggacgagctcgaaggttgttcttccgtcacgcggggaaaacgtcgtccattccgccgccagcgggcgggctatcggtcgccattgtctgtgtcgtgcgtcggtggaaggagtatcatgttctagctgccgtcgagggacatgaactcaagactcccgaaacggagcaccgtcccgggttggagagggtgctggagactgcccatctggagcttgacgggaagctggtcgtcaacacgc

SEQ ID NO: 1258 - DNA, 421 bp, Zea mays
  unsure (1)..(421): unsure at all n locations
tgaaattatgactattaaacgcgtaaacaaagtttaaacgtaattctaaacaccataggagaaataccaatatatcataatttcagacaataacatgaagtctaataccataacaaagaggttagtggcttaccaaaacttcacccatgagccggattagaccccaaaagtaacttacagactatgcccaaaagtagctaatggtctaaaatgcatgaaacactgtcgtatagtttagaacgccaaaaccaataaaagtgactccaacctctaattagagntttgaggcttaaacatacgtttaataacaccggatttatcatacgctattactgtgaatattttgatttgacgctgctgcaactgtgcaggcacttggttcgagtgggaaagaagcgattgaacttcttgacatactatt

SEQ ID NO: 1259 - DNA, 350 bp, Zea mays
  unsure (1)..(350): unsure at all n locations
ntatcacacacgagtgctacctaaggtaccctcgaactctttctctatagtgtccccaaattccttgagaaggtcatcaacgctggccacggacatgtcctccgagtccgactggttcctgcgagaggtttcttcctgccgctcagactgacatcctgggctattggtcttcttgcggattttacttgcggnggccagcttcttcagtaccttgtcgcactccattncgacggtgcggtacgcttcacgggtgttggtctcttcgccttcacctaacgaaaggctctcttggagggacgctttttcttctgacaagttcctgactctctgctccaagctttccacctggg

SEQ ID NO: 1260 - DNA, 406 bp, Zea mays
  unsure (1)..(406): unsure at all n locations
cgaaaagagggttcaccagatgtgggcgccaatgttggggacttgctctcaaatgctataaattgagaacaaggccacaccaacaaaagttatttgttaatgcccttcgtccttcgaagcattatttcctcaaggatataatgatcttcatacgaaggtcatgaaggacataccttcatcatctcaacatacacatatgtataaatattaacaacgaatgaagcatgtaatgcataagaaacaatgtgaacaataacattatcatatatatttctcagtatataattgtaaattaatataaggacaatattgaataacatntggtaccttcngcttgacaaanaacaaaggtacaagcgtgacgcataagcatatgccaagtcagtgtgaacagtacgggagtact

SEQ ID NO: 1261 - DNA, 345 bp, Zea mays
aaaccaatactcttggacatgcttataattctagtacagatgttgtcacggatgcatcccactaattcttcatcgaccccgccgaagagcattgacctcgactggtagccgcaagaaatagcaaattcttttagctctgatatgccctcttcgaagagctgctggccgcccaagtgtcgcaggtagaaattcacaccttccgaaaaggtttcttcaattttcttcctcttgtcgaaaactactgcgcctacctctttctctgcaaccacgtctgatataagtctgtcgatttcagacaacgtggctgtgagattttcgtcttcggctgcaatggtaccttcggca

SEQ ID NO: 1262 - DNA, 442 bp, Zea mays
  unsure (1)..(442): unsure at all n locations
tagcttctaaagggagagcacatcttatgttttataaatgttcattttgagaaagacagggtttgtatcgcatgtcaagcatgaaagcaagttggcgctcattatccacacaagaacatattgacagcggacatggtactggaactactccacatggatctattcggcccgatagcttacataatcatcagcgggagtaaatactatctagtaattgtggatgactattctcgcttcacttgggtatttttcttgcaggaaaaatcacaaacccagaagactttaataaagggattcttgagacggactcaaaatgagttcggattgagaataaaaaagataagaagcgacaacgggacggagttcaagaactcacaaatagaaggatntcttgaggatgagggcatcaagcatgagttctcttatccctacacacctcaac

SEQ ID NO: 1263 - DNA, 431 bp, Zea mays
aaaaactcagctttagttctcaactaagtaagtttacccttttatcactatctacgcgtaagtcctttaaccagtgtcctatttgtaaaacattaaaacaatacaacttgtttgatactttcgcctactggatgcactctacgtgtgtcaaacatatgcaatgcccatgctcatgatgccatgctcaacgtttagttatacgaacaccatgggtgttacagcggcctgagttttattcgccggtaccgtgaggcctttctcatgcttacagtccgccatgcagaaggaaccgtcgacagcttggtggtgaaggctgcctgaatggccactcagaaacactctgcggcgccttggaagtcggcacgcacagctatgatttcttctggtgcccgcatcttcagtatcatgtatgtataatgcggaatggccat

SEQ ID NO: 1264 - DNA, 448 bp, Zea mays
agcttcttgaccaaatctgaactaaccttattattgcagcttccaccatcaataataacacgtgcacgccgattctcgatggcgaagaaagtctggaacaaattatggcgttgctgcttctctgatgattcaggctgagaactaagaacacgctgcaccatgatgcttcgaaggttcaccgtagcattagcaccaagcatggcatcatcattagcagcaacatcattggagtcatcatcgtcaccctcaccgtcggaagcactaatgtagccacatcatccgtagcaatgtatgttcgctgactcgggcaatccttcttcaagtgaccaatcccatgacagcggtggaaaacaatacccgaagaacgaccactggaaggtgctgtaagtgctgatagaatatgtttcttggcgggtaactactaaggaagtttaccaacatgtgcagc

SEQ ID NO: 1265 - DNA, 391 bp, Zea mays
tgcacatagtctcgatgatgtatgcctttagatagtctatattttctaaagctattactctttgtgaaaccgcattgaaaaagtaacacaagcgtgcgatgacaactttgacatgctctgtttcgagggctcttaccgcaattgggaggaacaccgccatcatcacatggcagtcatgagagttgtacccaaatagtgacaagtccttcatcctgactagtctgctgatattggatgagaaacctgtgggcactttgaccccacgcaaacatttgcaaatctttgttctctcctcaactgacaagtcgtagctagctggcgggaggtaacgcttccctttgcactatccactggatgaagttccggtctgatttgaagatctactagatca

SEQ ID NO: 1266 - DNA, 430 bp, Zea mays
  unsure (1)..(430): unsure at all n locations
tagcttgttcaaacatgaggacatttatttattcatggattgcagaatattagtcgcgcgtaggtggtggaatcgaggaagcgaacactatggtgatgatcgtttttcaaatgatgtatgtgtgccatatagtggttatgaccgccaccttgatagactgatatatgacatttaccccgatctaaatgataatatgtctaacacaagctacatcacttcaagagcaatattgtctacacggaatgactaggtggatatgataaatatgaggatgatcgatcgtttccaaggggagcagatgatgtaccatagttttgacgccgcggtggatgatctctaataactattacccatcagagtttctaaacacgctgactcctaatggactacccncgcacgttctgaagctcaaagttggatgctcaatcat

SEQ ID NO: 1267 - DNA, 351 bp, Zea mays
gacaagctcaaagcacaagattcttaagtggacgaccgagtcctcccgcactacagtcttgattatcttcttctggaaccatcttggcacagaagcgacaaaagtccgctacttccttacctaaacacaacaaagggatcaaccctgagtatggaatactcagcagagtttacccgactaaagaaaagactcctaagggtatgctggttatatgggagtcaccgtaaggctcttcaatattcaaagactctgttctgcagaaatgcttactaaagctgatccttacaaatccagtttaatttgccagctaagaaaatacctgcctagagcttttctaccctaattaatact

SEQ ID NO: 1268 - DNA, 450 bp, Zea mays
  unsure (1)..(450): unsure at all n locations
agcttgagaatggtctgtctctttttccttcttcttttattnataattagaacaacattttctgcactgtctgactactgattggcaaagggctactctcggatcatgtcttattttcttttcgctccaattgttttggggtcagatattgctctgctgtcttgacttcgtttttctgaggattactttggtagactggtattggagtgacaacagcatatgagacacagagaacctttctgttgtatgcttgtttgatttggaaacatanatgatatttactggattcgttgggcgtttgagatttctttgatctaaccaactcgtttgttgcctgggactggcatcgaaatccacactgcttagtcttgcattatatacaattcagccccttgataatcgaattgaggtacatgtntcttttggacttaaaaacgctgtcaaagaaca

SEQ ID NO: 1269 - DNA, 491 bp, Zea mays
tattcaagaaggccagcgagctctccaccctatgcggttctatatgtcctgtcgccaccttctcgcctggcggcaagtgcttatccttcggccacccctccacttcgtctgttactgaccgcttcctcgctgtgcacactctggacgatggccgcgccatggcaagtgggagccatggcagtcgtcgaggactgacagatacaagccatgcgatgaaccagcagctcatggagctgcaacggttcatggagaccgataagaggaggaaggagagggcaatggaggccatggtgagggagagtggcgggcctgtgatgcaactgttgagtgcaaatgttggtgcgttagggatacgtgagttggaggagctgcggaaggagctctgtatggtggaaaacatggtcaatgagagggcccgcgacgtgctgtgcgatgccatgcaaacaagaaggctaccaccacaactctatgtgcacatggcacctgcctcg

SEQ ID NO: 1270 - DNA, 379 bp, Zea mays
atagcaaagaatgctgtggttacttcacacctacccgcttgtttatatagtgtagcatgatagaaggtgaatcgtcagggttcttacaccaggcaaacagttgctcgcaccctctgaacggtgggccgctaaaaccagaatagtgaacctgcacggtgggaccgctctgcgctcggaaactgtatcgattcttgacaacgagctcagggaaggtgtttttcggaccttctgctttctgaagcctaatagaacttttttacggatcaagctcgttacgaataacaatctatcaccgctgaggggctacttgtgggaccatgcttcttcgtcgaaggtgctgcggaaagaaacacttttgctgaagctgcttaacatgatg

SEQ ID NO: 1271 - DNA, 378 bp, Zea mays
tcaaggataaacacactacggctaaaatacactgacataaacatatgctttcttaaggcttcactagcgaaccactacatcgttcggagaacggggtctttgtatgggcaaaacacgccacaattctcatcaaaaaggtttgaacaattaccataccacctatatagcaagacaagtgaatcatataacacgacctaacaagacataccaatccgacgcgagcgaagacatttcttatagttcctaacatagcagtacatcacattattcacaagctcttattattggaatacaggtgagagaagcatgttggtgcacaagagacaatgatgcgacaatcatgacgcatgctcattctagacgtctctcagacctact

SEQ ID NO: 1272 - DNA, 51 bp, Zea mays
cggatcttagagcgactgagctgcagcttaaatgagacatttttttttttt

SEQ ID NO: 1273 - DNA, 501 bp, Zea mays
  unsure (1)..(501): unsure at all n locations
ggaactataaaactaagctgggcgtctaaggtacctggcctctgcctcatggatgatcttactgacgtactatactggcttctggatggttcagacccttgcgtttggtcctggccttccgtcaacatcgtggtggtcggaccaccatcttcttctatgggaactttttgactcccctgnggatgttgcgtcgtaactttagcgaccagcaccatgctcaccgcctctgaagccgctgcaatgtataagtacaacggctcccttggctttggagcgactagtattggtagggacacaaggtgctgcttcaattcttgaaaggctcgttctgcgtcctcggtccaagagaatggaccggacttccgcaataacttgaagaagggtagcgccctctcggcagtcttagatgaagccgctaaaggcgaccagtgaccccgtaagcttatggacatccttgatgtgggccggacgcctcattgtctcaattgctttgatcttttc

SEQ ID NO: 1274 - DNA, 474 bp, Zea mays
  unsure (1)..(474): unsure at all n locations
cctgcggcatgcaagcttcatagcaacaatctganactgatttctttcctttagagcccgccaaggtgaaatccttggaagccgaagaagcagaaattgcagaacaaattttggctgaagaaactggcactgctgcccccaaagcatcttccgaagtacttgattatattggacgacatgcttcgggaataagattatctgaagaagagatttttgaagctaatcactatgcccaaaaattgaagtattcaaagggggccttagtattcaatggtatagacgaagatgacttcttatactgcctcccagacaacaaagaattatctgtctgccgggagatggctaggatgatcttgcagatagcctcgcatacaatagcctgaaggtatgaaaattatatatttggaagtttatacatttctaattattctttaattctcatactaatactttccatataggcgttaatactta

SEQ ID NO: 1275 - DNA, 318 bp, Zea mays
tggaggaccgcgcccagctctgtacgctccactagggactccacataccaccccacactcgtcaggctgcccccactgacaccccgacgagacccatatgacaaaggacaggccctacatgcttcaagtgcagccaggttgggcactatgcaaatgcttgttcaatggggagttccagcacgacaactacgaacaagcaacagactcctgcaagggatcagcattgcagagttaaccaagtagtgcgagccactgctgaggacgacatcctatcgtatgtttacattatgcaatttaaagcctatatttgatctgagc

SEQ ID NO: 1276 - DNA, 454 bp, Zea mays
  unsure (1)..(454): unsure at all n locations
agcttgatatattttcctccattaaaatttattttatattaaaactcgnctcttttattttcaactcttctagtctgattttggtctatcagaagaccctactcggaagcactacaaggtgatcaagttaggattgtggaacttgaagtgaagtctaccggaaggaaccctttagaagctatggaagatgccccattctctgtcttatccccgccctacaagaagtttcattatagatctcttggatctattaccattcttcttggttaggttgataggatagttctatagtgctaaagttttcgactagatcggtaatgacgatgttatattgtagttgttttctaatccataatattgttatataacccttgatttcttctaatattggtttcttgccattgtattgccatccttgcgcaatatctaccttgatatatntttgcctctctac

SEQ ID NO: 1277 - DNA, 446 bp, Zea mays
  unsure (1)..(446): unsure at all n locations
cgcacacatngctcatttataccttngatcatgtctctttcatttggtacaaatgcatattctttattcttcttgtaccaaagctaagactaatgtgtttccaagagtatttctaagattagtcttagattgaaagggaaatggagtaatcgacaaaggcaaggcttccactatgactctgtcggtatcatatatcctctgccctactcatgaccttactttcatatctttcttataaaaggcctccaagttttcttcgtttttggcgcttaatgccaaaggaggagaaattactatgccaaagcaaaaggacaacaccaccacaaggaccgcaccaccacccagttttctaaaacctttttcaaacaaaaagggggagaaattaataggtaattgcacatcaaagttattggtggtatgatgtcttaccgtanaacgatcataac

SEQ ID NO: 1278 - DNA, 469 bp, Zea mays
  unsure (1)..(469): unsure at all n locations
tgcagcaggcaagctngaaaatgtaatgcataacataattcttttcttaacacagtgactcaaatatattcatatatcatgttggactataatgtatttacaaccaaacattctaaaatgacttacctttggcagttgtccaaaatcgtaactcttaaaaagtttcgttcaagaaagcttaaagtataatgcaattgcagacatgataagttgtgcaattgattcggcccaaaactatgaggtctatgctcatcgagcattgtcctagccatctcaacaaggatacgattctcgcattcagaaatgacattttgttgagatacatatggagagagaaaactgatgctcaagatccagaaaaacacgaaaggtctcaaatttagtggtcttgaattatgggccattgtcacagcgaatagctctcgtaacattctttggaaaactcatttacaacccaagaatcaaatct

SEQ ID NO: 1279 - DNA, 492 bp, Zea mays
  unsure (1)..(492): unsure at all n locations
ntatcaaatggacgtgaaaagtgcctctctcaatgggtctatcaatgaagagggctacgtcgagcacacctcccgctatgaagatactgagtaccctaaccatgtctataggctctctaacgcgctttatgggctcaagcaagctccaagagcatggtatgaatgccttagagatttccttattgcaaatgtcttcaaagtcggaaaagccgatcctacactctctactaaaactcttgaaaatgacttgtttgtatgccaaatttatgtcgatgatattatattcgggtctactaacgagtctacatgtgaagagtttactaggattatgacacagaaatttgagatgtcgatgatgggggagttgaagtacttcttacgatttcaagtgaagcaactccaagagggcaccttccttagtcaaaccaagtatactcaagatattctaagcacagttgggatgaacgatgccaagcgcatcaagacactcat

SEQ ID NO: 1280 - DNA, 220 bp, Zea mays
gacaatagaactgtggtgaggctaaatacagaacgaatattcagcatgggcaaaaaaccagatcaccatatctctcgggaatgtgtaaaacattgatgcaaactccttcttgaagaaagggattgtcaatcatactcttaggtctatgcactacatttattatgtcaaaggacaagatgatttttgagaatgcatttatagacacgaacaatctatattg

SEQ ID NO: 1281 - DNA, 462 bp, Zea mays
  unsure (1)..(462): unsure at all n locations
tgttcatttttataaagacaggatttgtagcgcatgtcaggcaagaaagcaagttggcactcattcatcccataagaacataatgacgaccgacaggccactggagctcctacacgtggatctattcgggccgattgcttacataagcatcggcgggagtaagtactgtctagctattgtggatgattattctcgcttcacttgggtattctttttacaggaaaaatctcaaacccaagagaccttatagggattcttgagacgggctcacaatgagttcggcttaaggatcaagaaaataagaagcgacaacggaacggagttcaagaactctcaaatcgaatgcttccttgaggaggagggcatcaagcatgagttctctttctcctacacgccacagcacaatggtgtacntgagacgaagaatccaactctatttgacatggcaagaaccatgcttga

SEQ ID NO: 1282 - DNA, 459 bp, Zea mays
  unsure (1)..(459): unsure at all n locations
tgcggcagcaagcttctaagggagaacacgtgatatgtttgttcttacgtcaatacgaaatagatagaccttgtgctgcctgtcaagcacgttaacatgtgggaggagcccattacagcaagaatgtgatgaccacttcatgacctctggagctgctgctatatggagcctctatcggacgcccgtcgctctattctgtagcataggacggaagtaatgtatcgggcctatattattttgttgagtgatctnttacccgcttcactttgggtgttctttttgcaggataagtctgaaactcatgggaccctcaagcgctctctaatgagagctcataaatgagttgagctaatagtgaagaagattagaagcgaccaagggtcctagttcaagaacctcatgtggaggagttacttgacgaggatgggatcaagcacgagttcttctgttccttcacac

SEQ ID NO: 1283 - DNA, 480 bp, Zea mays
  unsure (1)..(480): unsure at all n locations
tctccgccagtccgagcagttcgaacgagagacacaatatcttaatgaanaacttgaagccggagctcagcagaattcagatttgagaaaactactgacaaatcttcaagaacaatgcctggaatttagcaacaagtgcattcaacgattaagaaagattttctactccgttggagctagcagcgaaaaatttatcccctcagctgaagatctaccgaaaacctttgaacacattgaggaggaaattgacgagctcgacgaagtcatagctgggcatggtgacttctgtgcctgngtggcttctcgagggactgctgctgcatttctgaaggccggctgcgaacactgaaaaattgtcaacaggcccaacttcaccttatctccatcaatcctggatgatatgcctgacctcgcccgaagcatctccaatagatttataanaatgatatggacaaaatgcgggcgggagaaagctggaga

SEQ ID NO: 1284 - DNA, 448 bp, Zea mays
  unsure (1)..(448): unsure at all n locations
tgcttatagacacacacaacattttactgtttattcctttgcctttccatagatatggatgttcaagccgattggcctctcctgacctcttgggaatgcacatatgactcagtgtaccttggattagctgtgggcactatattgttactgcttanagaaactctttgatcttttgtgtgtgactatgtgtcattacaatctggccttgttcccaaccttttaagtattgatcccctcagtttatacatttcaacacttggttagtcgtttcttcagataactaaacctctactccctacaataatgtttacaaataatctaatcgagcttagtgaccattaagccagatagccgatcatctggactagtcgtgtgtaatcatagtgcacaactgatgactatatacttattaccctgcgcctgactaatcacgattagctggacactt

SEQ ID NO: 1285 - DNA, 240 bp, Zea mays
ggcagcttcctgacttccatgacatagcaagggtccttgatccgaaagtatcttcatgcagagataagcaggatgaagaattgcttcgaaagcattgagggtgccaccaccacaaattgcattgtaagggtatttcatgtcaacaatgtcaaacacaacttgctcacttctagtgttgttgacgaacccgaacgtactgacatggtgatccttgccactgctacaatctgtcttcctccg

SEQ ID NO: 1286 - DNA, 379 bp, Zea mays
gcacacaaaaactcaagccactctccctggaaagggcggcatcatgcgcctaattctgaaacccgggacatacatactacgcaatgagccaggcgaggactacagccacgctcgaaacatcaaacacctacgccccttttacccttaaaaagtctaagccattatgatctcgggccttacatgacaaaaaaaagcctatctgtccagcgaggatcggccttacctcagcaaaaaaccgaccctccctccgcggctaaaaaggaggaatcccccctgcgtcacaatttgacctcaaaaagatctctaccgaaacgactatcgtgccttccgactatgtcgacaccggaatcctataaacgacaccagagacctcgaacag

SEQ ID NO: 1287 - DNA, 390 bp, Zea mays
  unsure (1)..(390): unsure at all n locations
caggcaagcaaacangagacagcaccgcgggcatatgattattgatgcccaaaaagcaaacgaaggaatgaaacacaatcgagagaaggcgacggccgcgaaagccaaatgcctcaaagaagacgagcaacgcatcgtacggataaataaccgcaaagtggtgccaaagaatgaagagcaccggcagcaaatgcttgatgaagcacaacatagccgctatcctagacatccgggaagcacaacaatggaccaagacgcgaagcaacgatactggtggacaaagacgaacaacgaacacgcacgctatgtggcgagaagcgacacccgcagacctgcaaggccatacacatgaaagctgccggtccaatacagcgactaccaacaccgaca

SEQ ID NO: 1288 - DNA, 366 bp, Zea mays
  unsure (1)..(366): unsure at all n locations
agcttccctggatctgggaagtttctctttcttggttttgggatcgtttgatcgattatcttgatcgctacttatgggcgtgcgctcaaaggatacaaacagggattcgcaaacaaaaaggggaattcgtagtcactttttcctgtcgcgtaaaaaaaaggctttacgcgagagcaatagaggttgggatacatctatctcttctgagcaacctcttttggattcttaagaccacccttgcagtaggataccgcctgctttaggttctttattatctncttcgaggggtttttaggatcattcacgctatatttagtatattttggcttttactgcctactnttctcagggagatggttaaggacc

SEQ ID NO: 1289 - DNA, 445 bp, Zea mays
  unsure (1)..(445): unsure at all n locations
nttattctctntctctttatcttctctttctatattcttcttttctaagcacagtttgaattctaatctaaattcgaatttgtgccaaattcattctctatgattctttgtgaagtttaacaatcccaattctaggaatataattatatatattatctatatcacctttctctctttcttattttaaaaccctactttcaaccttagggcttaattccacttctagcatttattatcttattgttattatccttattatttttatttaatacacaaacacataaaactccaacaagatgcactttcttttatttttgtatcattcgtttgcaattaatataattacttgggtgctctttctatgatgcaatatggcccataaaataaggaattcactatatatactcgtataccattttgagtattacaaatgctaccnccctta

SEQ ID NO: 1290 - DNA, 452 bp, Zea mays
  unsure (1)..(452): unsure at all n locations
agctttggggtgatgtaggtatttatttttatttgtctactcttctcacttctggtagatcggaggtagataatggtaagcatgccaaagggtggaattcagtgtagttcggctacataaaccccaggtatgtgtccattcaggaccgacctttaccatttagtttacagtgtataccaaacttgtcaaaggaccatccttgagtcaattagtgactataagtatttacaattccgagagatgtatgcgacacaagcatagaggttctagatagaacgagtaaagtggntcgacgggaacacactatggttttcacaccaacatagtgaattntttttagaataacctctcggtatactcgcaacatcgtgttgctagcggttacatatccttttatctcatagtttgcttcatgtcattcagcgacanagagagctatgtgctatcatctg

SEQ ID NO: 1291 - DNA, 318 bp, Zea mays
  unsure (1)..(318): unsure at all n locations
tctaaagggagagcacattttaagactaatctatgtctattctgagaaagacacgatctgtagcgcttgccaggcacggaagcaagttggagtccatcatccacacaagaacatcatgacgaccgacaggccactggagctcctacacatggatctattcggcccgattgcttacataagcatcggcgggagcaagtactggctagttattgcggatgactattctcgcttcacttgggtattctttttacaggaaaaatctcaaacccaagagaccttanaaggattcttgagacgggctcaaaatgagtccgcctt

SEQ ID NO: 1292 - DNA, 371 bp, Zea mays
agcttatatatggcccttttcttgtttgtaacgggcaacaaatctatcagagccataggtatgaaccactatacgatactcaaggggcatacaacaaatggccaatgtacagccctgacataatcatactccctgtgtggcatacattcctcccaatccttcgagtgcttttctaccatcgtacacaacatccttgacgatgtactattcacacacttcaatatgtccatcaatgtgggggcggcatgtggtggataacaaagattattgccaagctgtgaccggcatgttttacaagaatacctaacatacttcacatcacagacagatacgatgggcctgtgcactccatgtcaccttaaggcatatct

SEQ ID NO: 1293 - DNA, 286 bp, Zea mays
tataacaggaggacacaggctggagctccacatgtgtttgatagaaggagaggagtacgaacatgggatttgcgctgcgctgcttcaatgcttatccagaacccaaggactttatgtcatgataaaagtacatgcaggcctgtgaggatgtcacatcggatctaagtggttacttgaacaaatgttgcaggaaggattgtataggtcgagggcagctatagatgcactacacttgagtcaaaagtacgaaggatgacacacatgcgcaagagatcttaaacggact

SEQ ID NO: 1294 - DNA, 463 bp, Zea mays
gcaagctgttgcggcgacgtcgacgagttctattgttctgatcatcattagacgccggcggcgacgggggaggggaaacatctcccgccgacggagagattagagacaccgaggccatcacctgataagctagaagatgcttcacagtggtctccacttcaaaactctgaaccggcttcagaatcaaaagatcaacagcaaccggaatgagctctggatgccggctccaaccaagaaccctgatggaggagaagttcagacgagcaacagtgtcgggatgaagctccaatgccgtgcagtgcgctcgcagcaaacttctagcagtttccacactccatgcgtgcgacgggactccctcgaagctcacagacacaaaggaaggcagggaaaccgcttcagcgtgtgcaagccttgaccacttgatgaacttgatagacccagaaggtgagttgagaacagctcc

SEQ ID NO: 1295 - DNA, 392 bp, Zea mays
  unsure (1)..(392): unsure at all n locations
acatgtgctaagcggcgatgtttagtcagcccatgctagtcttagctattaagcatgcatctagaccggcttcttcttttgcaaaatcaactaaataaagtttgtcgtctaatacacccttaaaagctagtgaaccatcacttcttctaaagacagacacatctacatttgtaaatagacagctatatcccatattgcataattgactaacagatagtaaattatatcctagagactctactaaaaacacattagagatagaatgctcattagaaattgcaattntacctaacccttttaccttgccttgattcccatcaccgaatatgattgaatcttgggaatccttattcttgacgtaggaggtgaacattctcttctcccccgcatat

SEQ ID NO: 1296 - DNA, 463 bp, Zea mays
  unsure (1)..(463): unsure at all n locations
ttaagnaccgcggctgcagctagaccgtaaaaaacaagacttgtgttaatgtccgataaacatcttctactgagccagactgacttatataaacagtgcccagagcgaggttgaacaataacgaccattttgggtgtatggactcagacatgctagacacagaaaccgagactcaattaattagatgtcttgttatatccttgattaatgcatctaattaagaattaagaaacaattttacttttgtgtttctcatatttttatgaacaaactaaatctcacttgctatataaaatatataaaatatttttaaattttctgcttcttactcagtcatccaactaataaaaaaatctatactggatctggctgaacagagaaataaaaccaatcacacaagcttgatccatagtatatgtttcaacttatggcttgtctgtatgtcggaacggatctttggaat

SEQ ID NO: 1297 - DNA, 433 bp, Zea mays
tctcaggccacgcagaacacttaccatgataagagaaggtattctcctcacttcgaggcgggagatctcgcatatttgaacgcatcacccaccaagggagtgcagagattcgggatcaaaggcaagctaccccctcgttacattagaccttatgagatcatagaagcatgtggaccggtggcataccaaattgaagttacctccaaaaatgcctgccatccacaatgtattccatgtattccaactgaagaagtgtgttcaattgccgattgagatcatagcacaaccacaattggagatagagccagatctatcgtagcaagagcaccctttcaaggttctagattgccagacagatcaactcgggctaaatcgatcataatgtataagatccaacggaggaatcacttagaagaagagactacatcggaga

SEQ ID NO: 1298 - DNA, 435 bp, Zea mays
tgcggcatgcaagcttcgatctctgggcgccgggcgcttttgtgattctaagaaagatacgcgaggggtggtggggccgtgggggactattcttggccctgctcgaagcttctcgatgcgtcgcgtggtgcggaggcgcgggaggtttcgtgctatgtggaaccattcaatcttcatcggacggctccaaaatacgatgatgacgtggatgagctcatagaagccgtgtcctaccggctttaaagtataggaaattccatatagtattagatatagcataaatactgattcactctcaaccaatagccccacgttcacgtggacaccatgaattaagggattaattagaagagctaattagagaattttattagatgagttgattagataattctgattttatggcagtcatgaacattatagattaagggattt

SEQ ID NO: 1299 - DNA, 452 bp, Zea mays
tgtgccaaagtacaggagactctacaatctccttttgtatttatctgtagaaagacttacgaactttctgtatcatatggctaacaattgtaattgacacttggacaaaatattgtatatatatgttaatatctcgcaataccatttaaccttttgctcatgtgtgaattgctttggtgtgaacgaaaccaatacttgtaatattttgagtctaaggcgaaaaacaccttcccttctttttgttcgcatcaaagcatttcattgaagacgaagcatcttcgtatgcaacgaagcgttttctcgtcaaggataggcatttcctgttttttctcttaatatctatgctttatgccatgatgatgagcctatgaatgactaatgtattgtcacatgaatgcacaggatgatgtgatgataaatgcaaatgtatgccaaaaacgcacccagactct

SEQ ID NO: 1300 - DNA, 282 bp, Zea mays
ggaccactcatggaagaggctcatgtcgagcaactcaccggatgagaagatagcgactaccctaaccatgtgtacaaacactgaaaggcgctgtatgggctcaagcaagccccaagagcatggaatgaatgcctgcgacaaaccctcaacactaatgcgctcaaagtcgaaaaagaccatcccactctctttactaaaaccacggcaaaagagtcggctgcatgccaaaattatgaggatgaaatcatatatgggtcaaccaacaaatctactagagaagag

SEQ ID NO: 1301 - DNA, 490 bp, Zea mays
tgtcgagcttggtcgatggtggctggtgctccatccgctctttgtggtggacgcggctgaagcccctgcaacagcgacttcatcccctgctgtgagatcagagagttttggtctgtgatttacataatataggcacctgcacttctattttctgcagcaaaccaacacatctgacatgctggatttggctgtcgactacatcaagggtctccacaagcaagttaaggcaagccatccaatagtaaggtccttaataagagaaagacaaaccgaccctgagtagtaaggtctaaaaccaagctatattgatttgttgcgctttaaactaaaatgagaaagttgtgcatagcgttctgttttagacttatctgaaatacacactcggaacacagagtttgagagttcgtttctgctatctgttcacctgaggtgctaaaggagagccaagataattgacctactcacaagcaagacccgcagcactcctgtg

SEQ ID NO: 1302 - DNA, 452 bp, Zea mays
  unsure (1)..(452): unsure at all n locations
acctgcggcatgcagcttctaagagagaaccatttttgtacttcatangcncattctgagaaagacagggtatgtagtgcatgtcaagcaggaaagcaagatggcgctcaccatccacacaagaacattatgacgattgacaggccgctcgagttactccacatggattnattcggcacgattgcttatataagcatctatgggagtaagtgctgtctagttattgtggatgactattctcgcttcacttgggtattctttttgcaggaagaatctcagacccaagatactttgaagggattcttaagacgggctcacaatgagttcggattaaggatcaagaaaataagaagcgataatggaacgaagttcaagaactcttaaatcgaacgctttcttgaggatgagggcatcaagcatgagttctcttctccttacacaccttaacaaaa

SEQ ID NO: 1303 - DNA, 285 bp, Zea mays
catggaaattctgctttgatgatgctcctcctctatcaacacaattgtaggctacaccatggccccagtcttacaagcccacccagctccccatgtacgacggtcattcacacccgaagcaattcttgatgagctatgaagcaaccatatcttcgtatggtggcaatattgcagccatggcaaagtctttcgtcatggctgtcaagagtgtcgctcaaacctgttactcctctcttcggccagggacaatcacctcatggcagaagctgaacgatatgttgataa

SEQ ID NO: 1304 - DNA, 454 bp, Zea mays
  unsure (1)..(454): unsure at all n locations
agcttatgaagatacttcattccttcattagcttttcggcggngccaaagccaacccatgttagtcttagcaattaagcaagtgtcgagttcagctctatcaaaatctaccaagtatagctgaccctctaatactcccttaaatgctattgaatcatcacttcttctaaagacagtgacaccaatatcagtaaaaagacagttgtagcccattttgcataattgagatacataaagcaaattgtaatctaaagaatctacaagaaaaacattggaaatagtatggtcaggtgatatagcaattttacccaaacctttgaccaaaccttgatttccatccccgaatgtgatagctctttgtggatcttagtctttctcatatgaggagaactatttcttctccacggtcatgtggtttgtgcacccgctgtcatgatccaacttgagcccccgga

SEQ ID NO: 1305 - DNA, 423 bp, Zea mays
cttaaagggaaaacacattctacgactaacaaatgttctttttgataaagacacggtctgccacgcatgccaagcaagaaagcaagctggactctatcattcacacacacaacaaatgaccacagacaggtcactcgagctgctccacatggacctattcggccctatcgctcacataagcatcggcgggagtaagtactatcttcgcattgcgacgatcatcatcgcttcacttgggtattctttttgcaggaaaactacaaacccaagagaccttacaaggattcttaagacgggctcaaaatgagttcggattgacgataaaaaagataagacgcgacaatgcgacggagctcaagaattctcagatcgaaggatctctcgacgacgagggcatcacggatgagtcttcttctacctaca

SEQ ID NO: 1306 - DNA, 458 bp, Zea mays
agctttacgaagagaaaccttcggcttattttgtctaacagcttcatccgaggattacttataagaccttcggcgacgaagcatagacccaacagccgcggctgttgcgctgtcgccacgacctacaaaaccgtgccccgcctactattcaaccgcctcgcttcgtcgccagagaatccgtgacaccgagaaggagagggagagccaagaaattggagattgaccgctgccgccgtaaaagctcaaccacgacgttatctaggggccgaattcaagccggggaggtgcgagtggccccgtgcgatgatctattctcaacaattgcgcgcaggaggcggaagatcgtgggcaatcccacgccggggacatcaagctgccgcgggtccgcctatcgccgtggacctcaccactaccctcgcggaaagcccgtaagaacctcctctggctgttcgcatcgc

SEQ ID NO: 1307 - DNA, 374 bp, Zea mays
  unsure (1)..(374): unsure at all n locations
ctgatgtgtggttgcgttctgtatatgttttataacaggcgcctaggaggaaggcgtgctcagcacgagcgagccgctcaacacgaagaggtgcctcagcagcaacagctgctcgccctgcccccgatgtcgattgagcacatgtttctgatgcagactcaggcaggtcaagccttccgtcagactttggtcgctattcaggagcatcatgagcagcaggctccaccccagccttagatgccttagatgcctagagataagcgtgctgaattcatgagaggtcatccaccaacgttcgctcattcttntgaccncatggatgctgaagattggctgtgcacagtggagcgggagctgcataccgctcagtgcga

SEQ ID NO: 1308 - DNA, 434 bp, Zea mays
  unsure (1)..(434): unsure at all n locations
agctntaaccctcgcgagatctttccttttctctttctaaccatggtaaattcattatcgtatgtgatattctatgcatatttactttatttgttctcttgtatggagtactgtttgttttctaatatgaatggatagatgtatgtatgcttgcaatcgcatagagaacgatccggttgaagagcctgaagaactcgcaggagaagcccctgagcagcagtcggttggtggaggcaagagtcccttgatctatctctgtcctattcattctttaattcaccttccgcattacacatttatgcctaaggattgactagctttgttatccatgtcctttgttacctatttgggatggattattaatgtttagctttatgctattgcttacactctaatcaatgaacatgatgagaatatctatgatacgctgtttt

SEQ ID NO: 1309 - DNA, 451 bp, Zea mays
ctagcgttgcttactcagaatgtttggctgtatatatatagacagacacaggggtattagattaatggaatacgtacctgacctatgcgccatttcaacatagaaaaatcagtctgtcacgaccagcctgtgagctgtggctaccatcattcttaaggccatggtaaagaagggccaccacgcgcggtggttggttggagccaactattattacctgcatcaatggcggattatggtaaggatagacgatgatgcgtacttggagatggcgacagtgacaacggggaggcaagcacagacccaatcaatgctgagctgtgctcgccctgcactgtttaagcctatcatcagctgataagtaaagatattcagtgattaacagtattattaaatgcatgccacggtatgctacaaggctacaaccaggtgtgccatgtgaatcggatacgtc

SEQ ID NO: 1310 - DNA, 453 bp, Zea mays
  unsure (1)..(453): unsure at all n locations
gcanntgcaagcttnggcgtggagttggttatctgtgagttattataagaanctcttcttgattatagctcaacctgacggttctgagttcagtgttgagaattgccttgtgttgggttaaccaattcatacccaaaattacatctatatcctggcctttcagaacaatcatgttagcaagaaagttccgttcggccattgttactggcactccataggccacttctctagtaaaaatgtgtcccccaggtgaatgaattttaaatccctcttttgattcatggcacgcaatatgatgttgctccacaaatttcttgctaatgaatgtatgcgaagcaccagaatcaaaaagaataattgcagggtgactggtcacgggaaacgtacccatcatcaccggctctcctttcggtgtagtggccacttgggtgtaatatacacgcaccgtcttct

SEQ ID NO: 1311 - DNA, 468 bp, Zea mays
  unsure (1)..(468): unsure at all n locations
tgtgaaggttcttcatccccacatgtgctaagcggcgatgccacagccagcccatgctagtcttagcaattaagcatgcatctagaccggcctcctcttttgcaaaatcaactaagtaaagtttgccgtctaatacacccttaaaagctagtgaaccatcacttcttctaatgacagacacatctacatttgtgaatagacaattatatcccatattgcataattgactaacagataacaaattatatccaagagactcaactaaaaacacattagatatagagtgctcggatgaaatagcaattttacctaacccttttaccttgccttgattcccatcaccgaatattattgaatcttgggaatccttggttttgacgtaggaggtgaacatcttcttctcccncgtcatatggtttgtgcatccgctatcgataatccagcttgaacacncggatgcataaacct

SEQ ID NO: 1312 - DNA, 457 bp, Zea mays
  unsure (1)..(457): unsure at all n locations
agcttataataaaagaatagaggcaagattcttttncgtatatcattatagaaggggagttatacaagcatggagtttgtgccccgctgctcaagtgcttgtctagagccgaaggtatatagttgatgaaggagatacatgcaggcctttgtggatcccacatcggatccaggccgttacttggaaaagtgttccgtcaaggattttattggccgaaggcagcttcggatgcagctgagttagttcaaaagtgcgaaggttgtcaaatatgtgcaagagatcaaaaacaaccttcgtctttgacacagctaatacaacccatctggccattgcaaaggtggtgcctcgatttgctgggcccattgccaccggctcaaggcaatctgaaatatgtngtagttgctgtggaatatttttccaagtggattgaggcgaagccattaactacaataacttc

SEQ ID NO: 1313 - DNA, 480 bp, Zea mays
  unsure (1)..(480): unsure at all n locations
tgttcaacgtcaggtggtgtcattttttagtgccttaataatgctactgatcttgctctggatttcttgcagagatactggaaggatataaagcagttgcagatccagcagaggaggagaagaaaagccaaagatctttgtcctctcaactcgaggctgtagcagacatgaaatttacatatgttgctacttgccagatatatggaaatcagaaacaatctggtgatcgacgtgcaacagatatcttgaacttgatggtgaagtaagtcgtttcttctgagaaagaaatatgaattagatcgttatgctaatcacaagatatgacaagatgttctttttccaacttaaggatactacttcagttgatttttaattcacgagttaacactgaatttatagtgaagtcctccccaacaacaataatcactgacgcaatttccattgaaactacangtaccctggtctgcgtgtggcatatat

SEQ ID NO: 1314 - DNA, 457 bp, Zea mays
  unsure (1)..(457): unsure at all n locations
agcttgtgaaggttcttcatcctcacatgtgttattcggcgatgccacagccagcccatgctagtcttagcaattaagcatgcatctagaccggcctcctcttttgcaaaatcaactaaataaagtttgtcgtctagtacacccttaaaagctagtgaaccatcacatcttctaaagacagacacatctacatttgtaaatagacaattatatcccattttgcataattgactaacagataacaaattatatccaagagactcaactaaaaacacattaaagatagaatgctcattagatattgcaatcttgcctaaacctttcaccttgccttggttcccatcaccgaatatgattgaatcttgcgaatcctcattnttgacgtaggaggtgaacatcttcttctcccncgtcatatgggttgtgcatccgctgtcgataatccagcttgagcccc

SEQ ID NO: 1315 - DNA, 407 bp, Zea mays
cttccgcgacttgtagcgggcttgtcgccggtctccatcttctttttggcgtgttctcctgacatcacttcaagcggttaggctctaatgaagcaacgggctttgataccaattgaaagtcgcgtagagggggggtgaatagggcgaaactgaaatttacaaagttaatcacaactacaagccgggttagcgttagaaatataatcgagtccgcgagagagggtgcaaaacaaatcgcaagcaaatagagagtgtgacacgcggatttgttttaccgaggttcggttctcgcaaacctactccctgttgaggtggtcacaaagaccgggtctctttcaacccttttcctctctcaaacggtccctcggaccgagtgagcttcttcttctcaatcatacgggaacaaa

SEQ ID NO: 1316 - DNA, 342 bp, Zea mays
ggatcaatctaagtcatccaatatattagatccaatggaccaatctaagatatcgaatatttcagaaccaatcacattcttcctgtcacacccggatttcatggcaccaaaacccgggcgcgaacataatcaccaggtgggccgggaccaagcctcacacatatgacgaatcatggcacaggatccaatgtcacatctttactatataatcggagttctgtacaaaataaataaatatatatttacattataaggagacaacggcccagcaaccaaagttgactgggagacgacgacctagacctctcacgaacacatcacagcatcctccaagcgcctcat

SEQ ID NO: 1317 - DNA, 327 bp, Zea mays
ggcccactccatcaccccccggcgggtgactgaccgaccacaaccactcccggtgaaggctgcccgccattttttggggccccactatcgagcgtagctagaacacactgtccaacaaccgctaagggggaaagcaactgaatcaaagtaacccacagcggtacgtaaaaaaacgaccaagaagccaaaaacgagcaaaaagggaaggattgttacagtcgtccgaccacgcctgagggaaaaacggctttaccttctttaacgcctgacgagacttcttaaacggacaatcccgagaacacagggcctgctggacaggtgaccaca

SEQ ID NO: 1318 - DNA, 438 bp, Zea mays
  unsure (1)..(438): unsure at all n locations
tctaaagggagaacacattctgngactaacaaatgtttatttttagaaagacaggatttgtagcgcatgtcatgcacggacacaagttggtgttcatcatccacacaagaacatcatgatgaccgagaggccgcttgagctcctacacatggacctattcggcccgatagcttatataagcatcggcgggagtaagtactgtctagttattgtggatgattattctcgcttcacttgggtattctttttgcaggaaaaatctcacacccaagaaactttgaaagaattcttgagacgggctcaaaatgagtttggcttgaggatcaagaagataagaagcaacaacgggacggagttcaagaactctcaaattgaaggttctcttgacgaggaaggcatcaagcatgagttctctctctcctacacgccacaacaaaa

SEQ ID NO: 1319 - DNA, 70 bp, Zea mays
cttcttgtgataatattgccatgggaaacggggcagaaaattgcatatggcgtctttattaaactgtgaa

SEQ ID NO: 1320 - DNA, 292 bp, Zea mays
gggaggaaccatttaagtgggagaataggtgacgaaggaaccgacgccaaaatacccgggcgcatcatgaagccggaaagcgggacccggcgcaaccagaggcacgagatgagaacgcggaggtgggagaaactccacaacaacgggtcttcagggaaagaaagaattccgaacgacatgatcagtcgcaagctacagagcaggccgaacaggaggccagaaaacggcgagagaacccacgactcggacggaaccggaacctggactcgcccgagccagaacacaccgagcg

SEQ ID NO: 1321 - DNA, 420 bp, Zea mays
  unsure (1)..(420): unsure at all n locations
agaacatgngacaagacaaaccaatgttcttattctaacaggacagacctcgcgcagcttgtcaagcaggcaaacaggtgggaagctctcatcacaccaaaaatgtgatgaccacatcaagacctttggagatgctccacatggacctcttcggacccatcgcctatctaagtataagaggaagcaagtatcggcttgctatagttgaccactcttcccgcttcacttgggtattctttttgcaggataaatctgatacccaagggaccctcaagcgctctctaaggagagctcacaacgagcttgagctcatcgtgaaaaacataaggagcgacaactgggccgagttcaagaaccttcacgcagaggagtaccttaaggaggaagggatcaagcaccagttcctcgctccctacacac

SEQ ID NO: 1322 - DNA, 454 bp, Zea mays
agcttgggaagattcttcattccaacatttgctattcggcgatgccagagccagcccatgttagtcttagcaattaagcaagtgtcgagttcagctctatcaaaatctaccaagtatagctgaccctctaacactcccttaaatgctactgaatcatcacttcttctaaagacagtaacacctatatccgtaaaaagacagttgtagcccattttgcataattgagaaacggacagcaaattgtaatctaaagagtctacaagaaaaacattggaaatggaatggtcaggagatatagcaattttacccaatcctttgaccaaaccttggtttccatccccgaatgtgatcgctctttggggatcttgcgttttctcataggaggagaacatcttcttctcccctgtcatgtggtttgtgcacccgctgtcgatgatccaacttgagcccccgg

SEQ ID NO: 1323 - DNA, 473 bp, Zea mays
cgtccgtgatgtgtttgttcatagccgcatcatgtgattatgctctagctaatgcatcgcgtcgactactttcttataccacctacgtatatatatgtataatttctatatctaataacatgcgcccttcctcttgaaaagtttgggctctgcttgcctgaaatttagattgttgctacttcacatgtctgaaatatagattgtgttcagcgacgtttcacattgtattagatctgcatccaaaaccaagagtctagatttgtctatagtgaattatatatagtagatccagaaattatttgttatacaacactatcttagcagatcaaaaaataatctgataagccagttggtgaattttacacaccggcttccaaacgcctcgagaaaaaaattttggagacgtatcgatccattaagcacattacatctactcactgtttcggtgcataagcacattacatctatctaca

SEQ ID NO: 1324 - DNA, 414 bp, Zea mays
  unsure (1)..(414): unsure at all n locations
gagaacaantttattatttcaaatgctcaatccgagaaagacagggtctgtagcgcatgccaagcaggaaagcaagttggagcccatcatccacacaagaacatcatgacgaccgacatgccgcttgagctactccacatggatctatacggcccgattgcttacataagcatcgacgggagaaagtattgtctcgtaatagtggatgattatactcgctaaacttgggcattctctatgcaggaaaaatctcaaacccacgagaccttatagggattctcgagacgggctcaaaatgagctcggcttaaggatcaagaaaattagaagcgactacggaacggagttcaagaactctcaaatcgaaggcttccttgaggaggagggcatctagcatgagatctcttctcctaca

SEQ ID NO: 1325 - DNA, 509 bp, Zea mays
  unsure (1)..(509): unsure at all n locations
gaatataaaaataagctccnagtcctaaaccctaaccaaattagtcgcgctgtttctgtacataatcatcccgcccaagaggagggcctgggccctagtggccacacgcctgaatacgcccctgccaaagcggcattctggctggcctatgcgccgattttgacaaaagtcatgaattatggcgccgagctcggccacgtaagtctgccgtcgtcaacgatgcaagcaccctcggcacaaagatctgtgatgcgagccgtgttacgtcgtccgcggtcatagctcgtggcaaaaacaaacggtctaaaaatgagattaagctatttaaggatctaaacatgaatattcttcaaaaacaattaaaataaaaaaaatcgcgcttttggtgttgctctaaccctatcagctgcgctgggcacgtcctctcacacgagaaacaccccacgtctcaagctgctcctttctcaccgcagcgtccgcacgcgcatgagcaaccgagcaagagcgca

SEQ ID NO: 1326 - DNA, 441 bp, Zea mays
  unsure (1)..(441): unsure at all n locations
agctntatagggagaaggaggtgatactgtgttttgaggtgcttgagcgagttaagccaaattcttaacttaagctatcaatcttacaatgttttatatctctaagattgatccaaagttattttgaattattatatctaaaactcatgcgtatcgagcaagatattgatgttgtagggaataaaggattgccctacgtggaaaatcaagaaaagcctgcaacatggaggaagatagaaggatggtaacaattatgtccttaagtgcaagtatcttcaattatcattccttgtgtatattatgttggcacataggaaaaagaagcacttaagaaagttcttaaataatgtcaccattctttgtaactccaacgtggactatgtgagcatttcaagtttgccgaaccacatgataaatccctgcgtctatgtgctctactct

SEQ ID NO: 1327 - DNA, 487 bp, Zea mays
  unsure (1)..(487): unsure at all n locations
cgacaacgaggaaatggcgctcatcatcaagagcttntttctaatcctcaagcaaaggagggggaaggattacaagccccgctccaagaaggtttgctataaatgtggtaagcccgatcattttatcgctaaatgtcctttgtctagtgatagtgacagggataacgataagagggggaagaagaacgagaagaagagatattacaagaagggcggcgattcccatgtttgccgggagtgggactccgacgagagctccactgactcctcgtccgacgaggacgccgccaacattgccgtcaacaagggactcctcttccccaacgtcggccacaagtgcctcatgacaaaggacggcaagaagaagaaggtataaccaagatccttcactaagtatgcaacatctagtgatgaggctaattctagtgatgatgacgatgacttgttactcttttgccatcttacatgcacanacagagaactgatg

SEQ ID NO: 1328 - DNA, 415 bp, Zea mays
tatataccaaccgactctagacgagctactggtgcatatgattcaccgaaatccaaaccttcgacttgtgaataaccctcggccacaagtcgggctttgttccttttgaccacaccatgctcatcttgcttgttgccgaagacccacttggttctacacattttgtttagacgtggaacaagaagccatacctcattcctcgtgaagatgatgaggtcctcttgcattgccaacacctaatctgaatccctctatgcggctttcaccctgtatggctcaatagaagacacataggagtaatgttcacaaaaatgagcaatacgagaacgagtggatactcccttatgaatatctgccatgatggaggtcatggggtgatctccgtgtattagtttggtggactcttgggtgtggc

SEQ ID NO: 1329 - DNA, 438 bp, Zea mays
  unsure (1)..(438): unsure at all n locations
tctnagggagaacacattntgcgactaacacatgttctttttgagaaagacacgatttgtagcgcatgtcatgcagggaagcaagttggtgttcatcatccacacaagaacatcatgacgaccgacaggctgcttgagctactccacatggatctattccgcctgatagcttacataagcatcggcgagagtaaggactgtctagttattgtggatgattattctcgcttcacttgggtgttctttttacaggaaaaatctcatacccaagaaaccttacagggattcttgaggcaggctcaaaatgagttcggcttacggatcaagacaataagaagcgacaacgggacggagttcaagaactctcacattgaaggcttccttgaggaggacggaatcaagcatgagttctcttctcctacacaccacaacaaaatg

SEQ ID NO: 1330 - DNA, 299 bp, Zea mays
ctggctcccttcaggctgatggccatggagatatgcgggttgcattggtggctgaggttgaggctgctgccataatgcctgaagatggcttgtctaagcaacagacactacatgatggctgcccacatactctggaatgtacggtgagtggtacaaaacattatgcatatcctgcttatgctggctctgttgggcttgatcttctgctttatctatttgtttctggatggtgatatggcacatcctgcttgtatggtccttgtcctcatcgaaaataagcaaaatttttcctgggctga

SEQ ID NO: 1331 - DNA, 64 bp, Zea mays
ttgcttcactggtctgtggcctgaacactgtatctcctccatctctggaggtgaaaggccatct

SEQ ID NO: 1332 - DNA, 433 bp, Zea mays
agcttcttcaccatggtggtcacgtgttattttgagaaggtcgagcaatgcacttccctttaagatgtgtcaagctcatctttagcctctcattttcttctttgagcttttgataggtatcatcacttgttcctgcaaattctagctcaaaggaagatttgcttgtcgacggacaacaagcattagcacatggtaatatagtttctatttgaatacatgtgcatgagtgaggttgttgggattttaagttttctattacaacctcatgagcaatgtttaatatgatatgatcatctctaagattttcatgagaacatagaagcatatcatatttttgttgaaaagctagatcttcaatatttagcttttctacttggtccttaagaaaggtattcctatttactaattgagcgatacaatgtaaagcgttatc

SEQ ID NO: 1333 - DNA, 257 bp, Zea mays
ggaggagcacatcacagcaagaatgtgatgaccacatcaaggcccctggaactgctacatatggatctctttggacccgtcacctatctaagcataggaggaggtaagtatggtctaagtattggtgatgacttttcccgcttcacttgggtgttctttttgccgataagtctgaaactcaagggacccttaagcgctttctcaggagagctcagaatgagtttgagctcaaggtgaacaagataagaagcgacaac

SEQ ID NO: 1334 - DNA, 380 bp, Zea mays
  unsure (1)..(380): unsure at all n locations
ntttaaagggagaacacgtgataggtctaaccaatgctcattcttaaaaagatagaccttgtgcagcttgccaagcaggtaaacaagtgggtggagcacatcacagcaagaatgtgatgaccacgtcaagacctctagagctgctgcatatggacctcttcggacccgtcgcctatctgagcataggaggaagtaagtatggtctagctattggtgatgactttttccgcttcacgtgggtgttctttttgcaggataagtctgaaacccaagggaccctcaagcgcttcctaaggagagctcaaaatgagtctgagctcaaggtgaagaagataaggagcgacaatgggtccgaattcaaaaaccttcatgtggaggag

SEQ ID NO: 1335 - DNA, 331 bp, Zea mays
  unsure (1)..(331): unsure at all n locations
catgcaagcacngaacaacatgaaacgactctcaccaatctatagtaggaacgcactccgaccaagagaccatccacaaaggcatactgtgctctctgtggactgtcacttaccgccgggctgatgctggcaaccagaactcacagaccggagaaacattagacgatatccacaggaacctttccatcaaccagatgaacaaaatgtgccgaaatgtcacccagatcaagttctccgctcgctccgaacagaacgtgcacgttcagcatgctgaccgacagagggtcgaccgccagacggaggtggcaaattcccatcgcctgcatgccga

SEQ ID NO: 1336 - DNA, 102 bp, Zea mays
aaggctatccttgcataacgaccacgcaccagacaaaggcacttatacgacggcctacagacaaactgtatgccgacgggaaaccgaagtcgacacaaaaac

SEQ ID NO: 1337 - DNA, 162 bp, Zea mays
acccaagaaaccttagagggagtctcgagacgagctcaaaacaagtccgcttaaggagcaagaaaattagaagcgacgacggaacgaaggtcacaaactcacaaattgaaggcttccttgaagaggagggcatcaaacatgagtgctcttcatcctacaccc

SEQ ID NO: 1338 - DNA, 427 bp, Zea mays
  unsure (1)..(427): unsure at all n locations
acactananaacactcaagcgcgccttcactatacactatcatccgcagcccaacggagtcttttatcgtgccaanagaaaaatcttcagagctgccaagaagatgctcctcgatgacaaaaaacgccgatggacacacttgttatcggaggcatattgggcgctaaacacaaccgagtgcacgggtatccgcgttcactccttctccgcttccataccgatcggatgcaacgaccccgcaagaaataatacatgggcctctgcgacagctccgccgccaccctgacgtgatgacccacatccaagacttatgacgacacgggcctcgcctgcagcttaaaaatacaagccaacaacaggtcgacgccacctccaagagtatcgggggacgtactcatcacactgacgaccaaggagtgagcaggga

SEQ ID NO: 1339 - DNA, 452 bp, Zea mays
  unsure (1)..(452): unsure at all n locations
agctttaagttgatttattgaattcacttttgtttgtctaggctggattagataattcttgattcttgattgatgaagacgtattgcatataagtgttttagataattaagttgagaaaactaattaaaattcttctctccttattctaaatcttaaatgtctgattctaataagtctaagtctggtaatcggatagtgttatgtttgaaacaagacaatatagaagctatgtctagtttcttaattctggatgtttggatttgattcgtgtaagttagagaacgtgatcattgtgtttggttgtgtatatctatctaattctttttttnttctcgaaagcgcacgagaactgcgcatcattatattaagtagaaggagaatagggtccaaaatagaccatagtacaaaagacctccccggaggggataaaataccaaagaacaaagaagag

SEQ ID NO: 1340 - DNA, 487 bp, Zea mays
  unsure (1)..(487): unsure at all n locations
nttgaagaaatacttagcgacaatgtggagtcttgcgctttctccggtgcccgaggggttgcagcaattgtggagaaaactggctgtgaacatgttaaagctgcagcccaggcagaagttatcttctccatagacgatacaaaggaaccttcagccgaagctactctaatgggtgggaaattttattctgatgtttggatgaaggacgaccgcgagatagccgacgaagcaataaagaaaaatgaaaaagaatcccatgatgcccgagtagaagctaaggaagctgaagaagctgccgaacgtgcattaattacaggtacttccatttaatgccctttntctttactattcgtttatggctttgaaccctaattatcatatactntgctacagccggcctttcgccaccctcggagccattcaatactgaggctgaccccatcataaaagaggctttggatgtgatgaaggtcgccantacactcat

SEQ ID NO: 1341 - DNA, 452 bp, Zea mays
agcttatatctcccatagctctttgtgtttttaaaattcatgcatgtccgaaccattgtattctgtatcgtggcgagtttgagaacgcatcaagatgcccagtttgcaatgtcagtcgatacaagaagagctaccatcaagactgtgtaaaaaaattcccgaagaaaaataaaaacaagaaatccactattggacctgaaagtgacgatgacacttttgatgacatggatgggaaaaagaagtcaaagaacccaactttggtgatgtggtatcttccagtaattgatcgcttaaaacgtttgttctcaaaccctacggaggctgagcttatgcgttggcatgctgaaaatcgcaagcagaataacaaacagattcgacaccctgctgatgcatcacaatgtgaaaaattcgatcttatgtatcctgagtttgccaaagaaaccagaaatgtt

SEQ ID NO: 1342 - DNA, 474 bp, Zea mays
  unsure (1)..(474): unsure at all n locations
tgtgaagattcttcatcccaatgcgggctattctgttatgttagagccaaccnatattagtcttagcaattaagcaaatatcgagtttagctctattaaaatcaactaagtatagctgaccctcgagtactcccttaaatgctattgaatcatcacttcttctaaagacagtaacacctgtatccgtaaaaagacagttgtaactcattttgcataattgagaaactgaaagcaagttataatctaaagaatctacaagacaaacattggaaatagaatggtcaggtgatatagcaattttaccaagtcctttgaccaaaccttgatttccatccccgaatgtgatagctctttggggatcatcgtttttctcgtacgagaacatcattttctccctgtcatgtggtttgtgcacccgctatcaatgatccaacttgagccctcggatgcataacacctacaaacaagtttatg

SEQ ID NO: 1343 - DNA, 274 bp, Zea mays
catgcaagcatatcactatgagatgactgttatcttgagtaagatgatcactgcactcactctttcatagagtcaagataatattcaacctctcaattacttctatgagcattggatatgtagcatcttcggtttctgcataatctaactcaaaggaagatttgcttgtagacggacataaagcattaatcacaaggcaataaaggttcagattgaatacatgcgcctgagtgaagtcgcagggaattaagagttctaacacaaccttatgagt

SEQ ID NO: 1344 - DNA, 475 bp, Zea mays
  unsure (1)..(475): unsure at all n locations
ntatcaaatggacgtgaagagtgccttcctcaatggacttatcaaggaagaggtctatgtcgagcaacctcccggctctgaagacagtgagtaccctaaccatgtctataggctctctaaggcgctctatgggctcaagcaagccccaagagcatggtatgaatgcctaagagatttccttattgctaatggcttcaaagtcggaaaggtcgatcctactttatttactaaaactcttgcaaatgatttgcttgtatgccaaatttatgttgatgatattatatttgggtctactaacgaatctacatctgaggaatttagtaggatcatggcacaaaaattcaagatgtctatgatggnggagttgaagtattttctatgattcaagtcaagcaactcaagagggcccttattaccaaacaagtacatcaagacatctaaacagttgggatgatgacgccagccatcagacacc

SEQ ID NO: 1345 - DNA, 466 bp, Zea mays
ttaagtcacctgcggctgctagctctaaggttaatcttcacctaaatatatatttgaatgctcaagccaagcatggaactaattgcttaatcggtagttgtcaatagtagttcctttcaagtggcatactctcaattagtaataatctattttatgaaaagaaatgtcaatatgaaggttaaattccttttggattaaatttgtaaatcggcgcatattgttaattcactcatccatgtgcattaacttagaaggaagttaatttatgcctttatgcctcataaatgatgatttatttgacattcatatataaatatcatcattcattaaatacttcattgtactactaatacctcttttaaaagtgcttcttttactagttttaagacgaaaagagataacaagctaaagaatgaggtctccacaattgaagagaagaagaatacttagatgacaccatctcata

SEQ ID NO: 1346 - DNA, 476 bp, Zea mays
  unsure (1)..(476): unsure at all n locations
tctaaagggagaaccacatttaggattaacacatgtttattttgagaaagacaggatttatagcgcatgccaagcacgaaagcaagttggtgtccatcaaccacacaagaacatcatgacgaccgacaggccgcttgagctactccacatggatttattcggcccgattgcttacataagcatcggcgggagtaagtattgtcttgtaatagtggatgattattctcgcttcacttgggtattctttttgcaggacaaatttcaaacccaagagaccttaaagggattcttgagacgggcttaaaacgagttcggcttaaggaacaagacaattagaagtgataacgggacggagttcaagaactctcanattgaaggccttcttgaggaggagggcatcaagcatgagttctcttctacctacacgccacaacaaaatggtgtagtggagaggaagaatagaactctatctgaca

SEQ ID NO: 1347 - DNA, 451 bp, Zea mays
  unsure (1)..(451): unsure at all n locations
agctcttggatagcatgaacaagttctatgtctcggattcctcggcttccgcgacacagtgaagtccttcggcaaatggatcgacaagatgaaggcctacaagattattccttgaacgtgcttggattttattatggttaagtttccctgataacgctggctgcaacctgttttcattctcaggtatcaactgtttcccaggaatcaaataaagatgaacacgtttgctctctcctccctagcatctcgtattgtcgaataaattaagatgaacctgttattcatgtgtactacgtggaagaatcatttaatttctattttttcagcaattaccctgttacagactgttaaagataatactatntaggtgtccgtgcgttgcaacaacatataaaatattcgataaaatttagtgattacattaaaacaaacataatacatatatattatc

SEQ ID NO: 1348 - DNA, 461 bp, Zea mays
  unsure (1)..(461): unsure at all n locations
tcgtaaccaagggactcggtctcgcctcgcccgatcttgtcctcgggcggaacagtggtcccggacgagttcgcgttccgcccgagggtctcctcaggcagtgagcgcactctcgggtcagccaaaggcaagccttgtcgtgcaagcaaccttggccaaatcgccttaccagccgaccgtattgcatgcgcatttaatgctgggatcgcctgacaccttatcctgacacgtgcgcctcagtcggcaaggtcgaagtgaccgcagtcactttgccccttcactgaccgatctgacagggaaacagcgccgcccgcccgggcgagaccaacaatagtcgagttcagcctcaggaggaaatctccgcctcgcccgaccccagggtcagcctcggcctcggcctcgggaggaaatctncgcctcgcccgaccncagggctcggcctcgggaagagtcacgtcctt

SEQ ID NO: 1349 - DNA, 446 bp, Zea mays
agcttgaagccatggtaagtagcttatttcattttatacgaattgactcaagcctagctacgggtgcataggtttcaccgaaatccaaaccttcgacttgggagtattctttggccacaagtcgagctttgttccttgtcaccacaccatgctcatcttgcttgttgcggaagacccacttggatcctacaacattttggttaggacgtggaactaaatgccatacctcgtttctagtgaagttgttgagctcctcttgcatcgccactacccaatccgaatcttgaagtgcttcctctaccctgtgtggctcaatggaggaaacaaaagagtaatgctcacaaaaatgtgcaacgcgagatctagtggttacccccttatgaatgtcgcctaggatggtgtcgacggggtgatctcgttggattgcttggtggactcttgggtgt

SEQ ID NO: 1350 - DNA, 381 bp, Zea mays
  unsure (1)..(381): unsure at all n locations
ggggaaggctcttcatccacacatgtgctagacggttatgccttattcagccgatgctagtcttagcaattaagcatgcatctagaccggtctcctcttttgcaaaatcaactaaataaacgttgtcgtctagtacacgcttaaaagctaatgaaccatcacttcttctaaagacagacacatctaaatttgtgaataaacagttatatcccatattacaaagctgactcacagacaacaagttatatccaagcgactcacctaagaacacattagaaatagagcgctcgaatgagatagcaattnttcctaaccctttcaccttgccttgggtcccatcaccgaatatgatagaatcttggggatccttgttcttgacgt

SEQ ID NO: 1351 - DNA, 455 bp, Zea mays
agcttatgattcagcttactctattcatttcttgaagtacaaagatgtaccacgatcttaatgaatagtattgtgggtaccgattgaaaagagatgttgctactcatgttgcattatgtgacgtgtgtcagcgagttaaagccgaacaccaaagaccagcaggattgctacaacctctcaaggtacctgaatggaaatgggaagaaatcagtatggattttatagttggactaccccgtactcgagatggctatgattcaatatgggtcatagtagacaggttgactaaagtggcacactttatacctgtgaagacaacttactcaggagcccagttagcagaagtatacatgtcaagaattgtttgtctgcatggagtaccaaagaagatcgtataagatcgaggaacccagtttacctcgcgctttggaagagactacatgagtccatggata

SEQ ID NO: 1352 - DNA, 490 bp, Zea mays
  unsure (1)..(490): unsure at all n locations
tgaggctggctcgccgaagcaacagaaactgcatgatgtattgtcacatattctggaatgtacggcgaatgatacgaagctgtatgcatgacctgcttcggctgagcttgttgtgctgctgcttcagctatttcctttcgcttctgaatagtaacatggcacatcctgctagtatggcctttgttctcaccgcagaataagcaaaagattcttctcggttgatcgccaaatcttcctccaaagcccctggcgcctctgcctcttggaactggtggtctgaaggagctttgctgttgccccgaagcctgtgaggaacattgtggcctttgctggtggcttcctctatcatccttatgtgtagagntatgaattgatcttacgtgcctcgggtagaacctccctccgaagcccctggtcatttcagaaaacctngaaagcctctcccttctttggcgaanatcattatcggcccgaatgtactcgtccatct

SEQ ID NO: 1353 - DNA, 432 bp, Zea mays
agcttgccataagatttctctctactttgcaacccttcccagatcaccaagctgatcgcccacacatggccacttcaacgctgggggctggacattgtcgggccactacctacggctcaagggaacctcaagttcaccttcgtcgctatcgaatactttaccaagtggatcgaggccagggcagtatccacaataatgtcgaagaccgcccagaaattcttctggcaaaacattgtttgccgattcggaatcccgtctgagctcacagtcgacaacggcaaacagtttgatagccaggacttcacggatttctgcctctccatcggcaccaagcccgtcttcgccttggtataccatccgcaatctaacggcgtcgtcgagcgcgccaacggcaaaatcttcatcgtcatcaagataatacttctcgacgac

SEQ ID NO: 1354 - DNA, 454 bp, Zea mays
  unsure (1)..(454): unsure at all n locations
actaagcttaagctctntgcaataaaaccacttcatctagtntttattaagatgcattaatgcatgagtgaaattctaagaggttaaactacgtatgaagcagggataatgcatggacatgctttctcttccttttatacaagatatgtaaagaaagtatagaaaaggaagatttacgtacaacgttgaatggaatgaagcagttttacccttttgtaccttcacatagagatgctctcttcattgtgctatgtccttagtcttagatgcttgagacctatactcaatgacaatgaatgaaaatattttgcacaagagagagttcttacaactagtgattcctttctaattcatggttagcctataacaagtggatcaccaatggtacaaatgaatcatgaattctcctcttaacttagtgcatatcaagagagatattgattgaaagaatatg

SEQ ID NO: 1355 - DNA, 409 bp, Zea mays
ttaagtgactgcagcatgcaagcttgaacccgagacccgcgtcaccggaatttttaatatcggctcgcccgagtatttttccccgccggcgcacgtggaacgggtaaatccctcaaccatttttcgatttcctcgtgcacaacgggcttctacgttaccccgtgaaagctacagtgcccttggattgaaccaaaatcgccgtggtttggcccggtacaactcgtcgttcaacgaaaacaacctgcctgtgcgcgtggaccgagcgattccggcccatccccgttcgtcgagcccgaccttcgctgtgaccgccagagccttcccgatacaaccctgcccttcgccggaactatttcgacgccggttagccgcgccacccttttcttatccgcgggtactggttacattg

SEQ ID NO: 1356 - DNA, 284 bp, Zea mays
gcttagcccgagatacattgtaccatttctctatcgtgctcttgtttatatctggcttatcgcttgcaattgccggaatccatggcaggggtgcaccccgtatatcatgtctctatgttgatgaagattttgggggattcggaccatctaaccgagtttgaaccgattgctgtgcagcaaaatctgactcttgagtgtcgctcggtgcgtatgttggagtactccgagcgtgtcatgaggaggagatcaattaatgttgttaaggtcttgtgaataatcaatct

SEQ ID NO: 1357 - DNA, 411 bp, Zea mays
agcttctaaagggagagcacattatgggactaaccaatgttcattttgagaaagacatggcttgtagctcatgtcatacaagaaagcaagttggcttccatcatcctcacaaaaacataatgacgactgacaggtcgcttcaactactccacatggatttattccgcccgatcgcttacataagcatcggcgggagtaagtactgtctagttattgcggatgattattctcgcttcacttgggtattctttttgcaggagaaatcacacacccaagaaactttaaagggatctttgagacaggctcaaaataagtttggattgagaatcaagaagataagaagccatattggaacggagttcaagaactttcatatataatgctctcttgaggatgaaggcatcaagcatg

SEQ ID NO: 1358 - DNA, 304 bp, Zea mays
tttgctccttgcttctaccatacttcagcactttttttatcttttcaaatgcaaggaacatttagccaaatattattacggcattcctacttcctagacattagacaacatttcttctaggcttcgacgccaacactttttctaacccatttctaccatgcataccattacaactacaagcagccatagcataagactcataatcatgtgaatcaaaaacactcatgacctctcaaaaccattctagaataatctctatcatacgacatgaaaacacgattcttctaacactattagccataag

SEQ ID NO: 1359 - DNA, 412 bp, Zea mays
agcttgacacaggtatccgcacgttaatccttattccaattttgtctcatagacaacgcatccccatggatccgtgtccacagaccatcatcattcaattatcaaaatggatacaaccaattcctgacctcgcgcgagtgctagaaaaatcactcgacttctaccgagatcctgatttaacatagtagctactcgacctagcatactagtatccatctcaaaaggaatcctgagttcatgcaactagggtttcaggcaactcctacacttaagtgcacggtacaagcctacaaacattaagtgtagtaaaatagcatatataaacggttatgcataaaaccggggcttgcctttaatttaacacttaagtagtgtttgatgggggaggtactcgcttggtgagcatccactg

SEQ ID NO: 1360 - DNA, 309 bp, Zea mays
cttgcttagaagcatgctctgcaaataaacaatcttcgtttattttattgccattattaaaaaacaatagaagttagagagaaggatgcttaccttgatatttgaataaaataagctgccgacgatctgttgtcgtcggtagcggctgatgtctgtctctaatttcggaaaaccgatactctttgatatagtaccgatgaccttatccccagctgagttcctgatgcagcccagtttttcatcatcaatgcctccaaaaagaagagctcctggcttgtatctgcaagaattggcgtattccttaagttc

SEQ ID NO: 1361 - DNA, 373 bp, Zea mays
tttcattgaagaatgacagctagtcttcaacagtctacggcgatatcgatggaagcttaattctggaaaatgtgtcttcaaagtaccggcaagaaagttgcttgggtttattgtcagccaccgggtaattgaggccaatccagaaaagatcgaagctatcatgagaatggaagccccacgatcacagaataaagtacaaagacttaccggatgcatggcagctctaagcacattcatatcacggctgggagaaataggcttaccgttctataagttgctcaagaaggtagacaaattccagtggacttcataagcacaggaagctctatatgcgttgaagaaattcttgacaacaccaccagtgcctaaacca

SEQ ID NO: 1362 - DNA, 390 bp, Zea mays
  unsure (1)..(390): unsure at all n locations
gacacaagaaactcagcttatcaaatggcgtgaagagtgccttcctcaacttactctttatagaagagggctatgttgagcaacctcccggctttgaagatagtaagtaccctaaccatgtctataagctctctaaagcgctttatgggctcaagcaagccccaagagcatggtatgaatgccttagagatttccttatcgctaatggcttcaaagtcggcaaggccgatcctactctattcactaaaactcttgacaatgatttgtttgtatgccaaatttatgttgatgatatcatatntgggtctactaacgaatctacttgtgaggagattattaggatcatgacacacaaattcgagatgtctatgattgcggaggtgaaagtat

SEQ ID NO: 1363 - DNA, 346 bp, Zea mays
ctcaagcttctcctggacaagggctgcacttaccgctgagtattatatctgcttcatataataacaaaagagcccctggcgttggtggacttaatgatcgtatatctatctatattgcctaagatctcccaaggctctctgctggactggtccccattgaaaaacttctgctgacttcagcacttcaaaaaatggtagatttctctctgctgatctagatatgaatctgtcgagagatgccagcctttctgtcaatctttgggcccccttctctgtacttggtggttccattcgaagtatagcttcgatatttcttggattagcctcaattccctttgttgaaact

SEQ ID NO: 1364 - DNA, 411 bp, Zea mays
  unsure (1)..(411): unsure at all n locations
agctntaaatgtgttgtcatcaatcaccaaaagggggagattgaaagtgcattcatcccttttgtgagttttgatgatttggataacaacacatttaaaggtctaacgagtttgctaagtgttgaacaggaaattcagtatgatgaacatacttgaatagtgtataatgatcagtgaacgaaggttcaacacgaggttaaataaccaatgagacaatgcaaatggatattatatgatctttatgttggtttgaatatatggacaagacccgagaaattactacatacatatgatcaaaatagaggatgaagtgattaagaggataggtcaagccaaagtgaataagatatgaggaatcgtgaattggcttgaccatattactatcagtccatatatgcttctatgagaatc

SEQ ID NO: 1365 - DNA, 373 bp, Zea mays
tcttcttatacctaggatcaagagagcatgctattgcattactcaaactagaacaactccaatatttctcaaacttgtcactcatagatatttccattgttctaattgtccaatcttcatccacacaccattcatcaagcagttcttttatttcacagaaacctctatagaatacctagatttgcagttggatataaaccagatttggagctatcagtatcagctatgggcatcagggcatggcagattggcagtatacctgatttagagctgacgagctggcgtgccgatgtgccgtccgccatatggacaaccggagaagtcgagcagcagccatcagatctgtccgcagcagcccgcagggagaaccgga

SEQ ID NO: 1366 - DNA, 413 bp, Zea mays
agcttctaaagggagaacacatgtgaggtattttcttatgttcattttgagaaagacaggatttgtatcgcatgccaagcagggaagcaagttggctctcatcatccacacaagaacatcatgacgaccgacaggccgcttgagctactccacatggatctattcggcccgattgcttacattagcatcggcgggagtaagtactgtctagttattgcggatgattattctcgcttcacttgggtattctttttacaggaaaaatctcaaacccaagagaccttaaagggattcttgagacgggctcaaaatgagttcggcttaaggatcaagaaaataagaagcgacaacgggacggagttcaagaattcccaaattgaaggcttccttgaggaggagggcatcaagcatga

SEQ ID NO: 1367 - DNA, 438 bp, Zea mays
gggacaaatatctccaatctcccaagccctgcttttatctgttcaccttcaaccaacgtgctacagtgccttcaaaattcagagacgccacaatggatttcatgatagtagggacccgatagaggatgaagtagtcttcacattgaattatccatataggtgggtctgttcctgcaaactttgtgaaaggcatcttcggtatatgctgctgcaactgtgtccatctctctcttgtcgaccagaactctcctctcttccttcctgagtcctacctcctctattctggggaattcttctgttaccacctcctacatcttcagaattatctagagagcgatccatatctctaaccatggcttccaacatagaagagaacagcctaccagtctcttcacttgttgcgagcaacatggttctcttcattttgaactcttgctt

SEQ ID NO: 1368 - DNA, 255 bp, Zea mays
ggagaacacgtgatacggctaactatgttctatttaaaagaaaacctcgcgcagcgtgtccagcctggaaacacgtgggaggaactcatcacatcacaaatatgatgacgacatcaagacccctggagatgccgcatatggacctttttggacacaccccctatctgagcatatgaggaagtaagtatggtctacgtattgttgatgactttgtccgcttcacttggggaatctttttgcaggaaaagtctgaaa

SEQ ID NO: 1369 - DNA, 387 bp, Zea mays
  unsure (1)..(387): unsure at all n locations
cagcttatgaaggttcttgatgtctacctgtgctatacgaccaagcctgagccaggccatactagtcttatccattaaacatgcatctagatttacattctctttcgaanaatcaactaaatagagcttgccgtctaatacacccttaaatgctaatgaaccatcacttcttctaaagacagaatcatcaacattttgtaaacaaacaattgtagcccatgtggcacaattgacttacagacaggaggttgtatcctagcgactctactaaaaatagatatgaaaaagagtgctcgcttgtgatggctatctctcccaaacctttgaccttgccttgattcccatctccaaatatgattgtattctgagagtccttgttcttgacgt

SEQ ID NO: 1370 - DNA, 341 bp, Zea mays
aggagaacatcgactgtatttttcgcccaaaaggacaacctacggcttttgaatggctagggcctctgcggaagaatatccccaagcatgtcaagtcgatccacaatttccacccaagtgatgatagaggaagtcaatctccaaggcgacaacacagcttccagtcatcaaggccacaacaaagcccctttaggccaccagccccaagaggccgatggggcgaaagcttccgacgaagataccgagatcagcccacaagactattttgttattctgcggtgaataccagggccataccacagaacatccaagtcacgaatcaaacgaaaggagatgccaag

SEQ ID NO: 1371 - DNA, 391 bp, Zea mays
agcctcatcctctgtttatacatgtcatacttattaatgtatgtccctcataacctttgtcccaagaacattatatctttagggaaataatgcttcgaatgacgaaggacgttaacatataacattttgtgttggcttgttcctaattcatagcatttgagaacaagtccccaacattggccgccacctcccgtgaactcacttccactgttgagctgatggcttcgttcaacaatcaaacttgaagttgcttctgctacgaacctggtgctcccgataaaaggcggctcatgctcacaaccggccaacaagaagcagaagaaggaagctcagagaagggtacaacatgttggggtgcacgggcccttcatcaaatcaaaatggtctcaca

SEQ ID NO: 1372 - DNA, 389 bp, Zea mays
tactggcggagctagccaaagcacgggcttgtttttgggttgctggagtgggctggccacgatggccgaagctctggtcggaatggcgggcggaattgagctcgccggagcttatggaagtggctggccggtgagggtgagtgcggggcgaactggggcgcgcccggggaggctttatatgcacggcgcggtgcactggcggtcgtggaccggcgagcgctcgcgggcgtgcactgtgaggcgcggtgcgcgaacgggcgtgaaccgggtgtgtaatcacagtcgaacacgtgttcccgttgcctctgccatgttcaacgccgattggtgcaatcttcccaatttgggcaaatcctgtgaatgattgtcacctgccaacttttttttgt

SEQ ID NO: 1373 - DNA, 415 bp, Zea mays
agcttcacttccatctatattatggattgctttttatttcttccagtttccctcagcccttctggcagctttctgacttccatgaatagcaatgggtccttgatccgaaggtatcttcatgcaaagataagcaagatgaagaatcgcttctaaagcattgaaggtgccacgaccaataattgcattgaagggtattccatgtcaacaatgtcaacacaacttgctcacttctggtgttgttgatgaatccgaaagttactggcatggtgatcttgcccagtgctacaatctgtcttcctccgaagccacagagagggtgtgtagcgtcatgaatcttatcttctggctcttgcatctgtctgaacgccttaccaaatataatatcagctgcactgcctgtatcaatcaaaacatt

SEQ ID NO: 1374 - DNA, 389 bp, Zea mays
  unsure (1)..(389): unsure at all n locations
ggcatgaagtattgtgcataatacatatataatatcaatgtttttatcaaataacattngggaggaatcgcataacaccaggtctggatgtgaacatgcgttaacaataataacaactggtaaccacgtacatattaaaataattttgtttatttgtctaaaatgaaaatatatatttatgctgcatgtaaatgttgatgtatttgtgttgggctctaatggaggacaacatgagaatttcacatgaggttggtgatacaagttctccgtgtcacgtagcacatgaacaaatggaacatattgctgcattctcataagctaaaaaggtgagcattgataaatgatcttactgattggtataaatatatgtgaatatgccgatactaaat

SEQ ID NO: 1375 - DNA, 411 bp, Zea mays
  unsure (1)..(411): unsure at all n locations
agctttgtttntgtgaccacaacatctgcatgtcatctctagccgaaggcatcattcggtatatgctctgctacaatttaaaataaacttgacaatggttaatggataaacattttgaggacctttgattaaagaaccccccccaacaacaagtatcctcatctaacctccacaaacatgacaccgagtatctagtctcaaagctctacttgtaatctttattttcaaaatctataacactatataattcatcagttaaaactttgctaaacccacccaaccaaatcaccctcacacctataagctttcctacgtacaccaaacaaattgcacccacaaataacacaccctcaaaatcaacggttcagatcgccctctcttcctcccctcatcactcatatccaatggtca

SEQ ID NO: 1376 - DNA, 412 bp, Zea mays
actcaacttaagagcaggtagagaagcaaactctcgggatgactccttttttttaccgaggtatccagaaccgcacaaggtcccgaataatccttcatggtgcccctacgcaaagggaagcccacgcgagggccaatcacctcggtcgagtaactccgtatagagccacgggccttctccacacgcaagtggagctccgctatcggcttctctcggacgctccccgctgtctccactattcgagcttccggccgaaaacgccgcgggcctcgttccctccggtacacggtggcagccgtgacacaaacacgggatgcacggtctcgcaagactactccccctctcggtacaattacaactgctcatgcaagaaccaaggctttgtgtggtttactatactcactcacttact

SEQ ID NO: 1377 - DNA, 408 bp, Zea mays
agctttctcaatctatcttgttgcttatcaaatatactttaactcatatcattggctcaactcaaaattataaacttttcattcccttttgcttattttcttgaattttgttcatggggttcacttacggttcttaattacggttgcacattcttatcttttcaaggactcaattgttttgatcatgacacttttaaacatatacttggtgaattctttgtcacttaagttattttgatgctcatgcttactttggttcacaggaagtaatggctcttggtgtggctttttaagagaaaccctaggtgacactggggtgtcacaattagagcctaaccgctcgaagtgatgtcgggagatcacaccaagatggagatggagaccggtgacaagcccactacgagccac

SEQ ID NO: 1378 - DNA, 420 bp, Zea mays
agcttctactgaagcttcggctgagcttgctttatttgaagctgggccttcagagcccttgaaagaacattcttttgaagccgaagcagtaaacattccggaaccacatattatttgaagaaacggacaccgtcatcccccaagcacctggcggcttgcatgattacatcatacgacatgcttcggggaaaaagctatctgaggaagatactcatgaggccaaccattatgcaaaggagctgaaatatccgaagggggcagtaatattcaatggaacaaatgaagatgacttcttatactgcctgcctgatatcaaagagctatccgtctgccgagagatggcgagaagcataggctttccgaagcttgaagctgggttaagtgccatgactgaagaggatctcgcagacagcctcgcgt

SEQ ID NO: 1379 - DNA, 266 bp, Zea mays
gcccatgcgaggtttagccattaagcatgcatctagaccggcctcttctttggaaaatcaactaaatacagactggcgtctaatacacccttaatagctagtgaaccatcactgtttctaaagacagacacatctataattgtgaatagacagttatattccatattgcacaactgactaacagataggagattatatcctagtgactttactaaaaacacactagagatagagtgctcgttacaaaatgcaactttacctaaccc

SEQ ID NO: 1380 - DNA, 417 bp, Zea mays
  unsure (1)..(417): unsure at all n locations
agctttggttntcgcaacctaagagaatagtcagataagagaaaaccgcgcacctcatgcgcttcggcttcaccggttccgctcggcgatggctgacaaggcgaccgtcgttccgccgcgcgacccgtggcctttctccaccgttactgtggaggatctggaggcccttgtttccgacggtttgctccgtcctctcttcggcgggccgcaacctgagtggatggcccccgggagcgaggccgacccgactctgccgcgggggtacgtggttagtttcatccccttccatgagcgggggtttgggttgccggcgagccgcttcatgcgggcgctcctgcaccactatggggtggagctgcataacctcaaccccaactccattacgcaagcggncattttcgcggcgggttgcgagtg

SEQ ID NO: 1381 - DNA, 429 bp, Zea mays
  unsure (1)..(429): unsure at all n locations
tcctaaagcaatcagcgaagtaatcaacaagagacaagataaaggtaatgattcaattagtcatgttatttgcactaataatctctctatgtcatccaaaagcatatagagaagacgaaaaaggaggtgcttcaagtgcaagagattatgtcacctcattgcttcttgtccatacacagacgacgactaanggataaggatatgttttggatgcaatgaacaggaccacatgatcacctcatgtccggtcataaagaatcaaggacatgcaccctccaagatgaccctcaccttaggaaaaatgataacagcaagcattatgtccggttgaccgacgcttctgctacctgtgtggtgagcattggcatctacctatgagtatgtagaagggtatggtcctaaccaagtaaattatctcaatcttattcc

SEQ ID NO: 1382 - DNA, 405 bp, Zea mays
agcttatggccgccgcgagtgtctctgggtggtggataccgacggcgtggctgagcggcggtagaacgcccccggtgaagagctggacacgctgcgcctcttcaagccgaccggcgcgaggtaaaagggcctggaatcggctggcgtactcttccacggttccggtgcgtcggcagtcggcgagttcgaacatcggggcagaccggagtgggggcccgaaccggaggttcaggagatctttgaaatgtccccacgatggggtgccctcatcgtcctgaagctggatataccatagttgcgcgacctcgtccatgtgataggacgccatgcgcacgcgctcctccgccatggtgcgatgttggcggaagtatgcttcacacttgttgaggaagagcattggatcga

SEQ ID NO: 1383 - DNA, 436 bp, Zea mays
  unsure (1)..(436): unsure at all n locations
tctaagggagagcacattntaggattaaccaatgtttatttttagaaagacagggtttgtagcgcataccatgcatgaaagcaagttggagcccatcatccacacaagaacatcatgacgaccgataagccgcttgagctactccacatggatttattcggcccgattgcctacataagcatcggcgggagtaaatactgtctagatattgtggatgattattctcgcttcacttgggtgttctttttgcaggaaaaatctcatacccaagatacattaaagggattcttgagacgggctcaaaatgagttctgcttatagatcaagaaaattagaagcgacaacgggacggagttcaagaactcacaaattgagggcttcttgggangaggcataagcatgagtctcttctcctacacccacaaaaaaggtgtat

SEQ ID NO: 1384 - DNA, 411 bp, Zea mays
  unsure (1)..(411): unsure at all n locations
agcttatctatgctgtacttggtgcgtccaggaatttgcaccactattntcacgcacacagggttgtagtggtgacctcctacccattaaaggccatcctccacaactctaacaccacgggcaacatctccaagtgggcggcggagcttgctgagtttcaactggacttccagcctcgccacacagtcaagagccaggtcctggctgacttcatcgtggaatgaaccccctccaccaagcgctcctgggggtccggatcccgattcataccccacacctgcagagcccaggactccggtcttcaccgagccccactggacgctcttcttcaactgatccgcccgccaacatgctggcggagctggggtggtcctcatcgacccaaacagagatcaagtgaagtacatggcg

SEQ ID NO: 1385 - DNA, 377 bp, Zea mays
  unsure (1)..(377): unsure at all n locations
tatcannattcanagactcatttgtgcagaagagctcttctttattgtgtccttatgccaaaatgttacatcacaagttaaatacttttcctgaatctagatattcctaatctagagcattcacttgtcctatactacctttcttttaaaatcaaaattttgtttcgcttgttatctacgatgaagggcagcgatccagtcttcatatctgagaagtaacggcgatccgaatcgattaatacccagctggggatctccaaccacacgacatatgtagcacttaacccttgcatatgttaaccattcccaccgatcctccactacatgaaccggtccgcgctacccgggagcatattaccctaccatccagcctctta

SEQ ID NO: 1386 - DNA, 377 bp, Zea mays
agcttacgcttcagattcttggcaagttttttatttatctgacacacttgcacatataggaggcggatgggttcaagtatcctcgatatatattagtgactttgaagtgcagacgacaataatttcacccctctcgattcctttacagtgatgtggtatgttgcttatggcttaatgcttgatataatatatctctgaaattctgatattggtatattaatgccgtaaatatcgctgatcattcgtgagaatgaaattgttattatgcttgtgatatacaactatgcctatgatgttttcactattgttttcatggttgagatttattacaataatattgttatatatgcttgactgaggatgtttctaacaagagt

SEQ ID NO: 1387 - DNA, 418 bp, Zea mays
ctgcagcatcaagctatgaagatacttatcccatgtgggtctttcggcgatgccagagccaacccatgttagttttagcaataaagcatgtgtcgagttcatctatatcaaaatctaccaagtatagctgaccctctaacacacccttaaatgctattgaatcatcacttcttctaaagacagtgacacctacatcagtaaagagacagttgtagcccatttgacataattgagatacagaaagcaaattgtaatctaaagaatctacaagaaaaacattggaaatagtatggtcaggtgatatagcaattttacccaatcctttgaccaaaccttgatttccatccccgaatgtgatagctcgttggggatcttggttcttctcatatgaagagaacatcttcttcttccctgtcat

SEQ ID NO: 1388 - DNA, 196 bp, Zea mays
cagaatcaacccgcgctaaaatgcctacaaataaaactcctattgcatcaaatgaacctcatatttcatttaagacttttgatgcgtcatatgtattaactaacaaatctggcgaagcagtcgccatatatcttgggggcacacacaacggatcaaacacctggttgggtcccaaagctcttgtatctaatgccaa

SEQ ID NO: 1389 - DNA, 445 bp, Zea mays
  unsure (1)..(445): unsure at all n locations
agatatttgaatcccgggagccgcacggtcgtgccatcttgttttctcccagcttgctcgncaacgcacgattaacatgccatactaataacgccatggcgtggcacgctagcacctaaaggcttatttgggaggaagagtaatggagaggattgaagcggctagaataccccactattcaattctaaatagtgaggaattatagcaccctcaatccccttcatgtcacttgctcccaaacaagccctaagactatatccagcagcttgtccctacttcatatttatatttaaatttcactctataaactacgatacaaaatggtattgtggatgactatatatatagatagattattgaacatggtctatcggtcgtaagcacataacccccacacccctaacaaaagggtagaatgctgacccagtgggaccgaatcaatagg

SEQ ID NO: 1390 - DNA, 422 bp, Zea mays
tgcaagctttgatggtgtctttgaattgattgctatttcttatattaaatgtagaggattgaaatgcttgggtgttgtgaatgtaagtggttgaaattgtatttatagcctacaaccatttcctagccgttgctccatcggaccgaatacacaagatttgtcaacttgccttaaataaatccacatgccatactacaaaactaaacagttggcatgtattaattcaagaaacacaagcacggtccatcatcagagattaaatttgctgtgcatcgggacacagctataaataatccaggaaacaagcatggttcttctcaaattaaattaaatggaagtgacgtagcatgactaggatggtgtctaaattactcttctaacatggcaccggctgcaaggctccagaacagttagtataactg

SEQ ID NO: 1391 - DNA, 359 bp, Zea mays
  unsure (1)..(359): unsure at all n locations
aactaagcttgcatcagntcagctttcttgtgcagaatatctgattgggaaagaagcctccaatctaaattctggtatttgtgcttcagcatccgctaataaaccttcggctggttgaaactcgaagtctctctttttgatggcaacctggaatggtctctttatccttgtgttgtccacagagtctcatattataacattcagtgcccttttggcctctaagacctgctgcatttttaaggccttgctcacaagcatactctgtggacaaataaccttcgttagaaaatatttctattattacaaataataagagttagacacacgatgtttaccttataattggaatagaacaaact

SEQ ID NO: 1392 - DNA, 403 bp, Zea mays
agcttctaaagggagaacacgtgataggtctatcttttgttctttcgaaaaagatagaccttgtgcagcttgtcaagcaggttaacaggtgggaagctttcatcatgccaaaaatgtgatgacaacatcaagacccctggagttactttatatggacctttttggacccgtcgcctatctaagtataggaggaagtaagtatggtcttgttatagctgatgatttttcccgcttcacttgagtattctttttgcaggataaatctgaaacccaagggaccctcaagcgcttcctaaggagagcccaaaacgagtttgagcttacagtgaagaagataatgagcgactatgggtccgagttcataaaccttcaagtggaggagtaccttgaggaggaatgaatc

SEQ ID NO: 1393 - DNA, 353 bp, Zea mays
gctctaagggaaacacgtggaggtctacaatgttcttttttattaatagaccttgtgcagcttgtcaagcaaggaaacaagtgggaagctctcatcacaccaaaaatgtgatgacgacatcgagacccttggagatgctgcatatggacctctttggacccgtcgcctatctgagcatatgaaggagtaagtctggtttacttattgtcgatgattattcccgcttcacttgggtgttctttttgcaggattagtctgaaacccaaaggaccctcaagcgctttctcatgagaagctcaaatgagtttgagcttatagtgaagaagattatgagcgactacgggtccgagttc

SEQ ID NO: 1394 - DNA, 317 bp, Zea mays
  unsure (1)..(317): unsure at all n locations
gtgaccagcccgtggacccgaccggacgtgaccggaggtctgatttttatctcaccggacttcggtcttccgccgccgcgcgtggaccgagctatccagtgagtctncgcccaattcctttcgctcatgtcttctctggcgtccgcgggacctccctgacctatatgattggactatctcggcgggaccaggccgggctactcggccgcgacgagcattcccgcctacgcgcgtggaccgaccgactccggccatctccgactgtgatccgcacaccggtgtgatccccgggaccttcaccttaccctcgaccactt

SEQ ID NO: 1395 - DNA, 407 bp, Zea mays
agcttgctggttaaaggcccattaaggcccatctatttatagacgcacagaacgtccgtagaacgggtaaaacgtccgtagaacgcgcgttccgacgtttaaacgtcgcttaaacgtccaaaacggacgttctatgcagtttttttaaaacgtacggacactttaactcttaatcacgttttagcgcttaaacgacgcttaatcgtcgtttaaacgacgctttaataaccatggttacgatccagtgtggagtctgtgacttatagtgaatggttacttgaaattgctgtgattctgtctttctctagcttgaatataacatggtcacttgtggtgtgatatatatcttcaaagtttgttttgtgctcctgtatgctattggtgtactgcttaccatgtgcttcttt

SEQ ID NO: 1396 - DNA, 283 bp, Zea mays
acctttctggcagcttgctgacttccatgaatagcaataagcccttgatccaaaggtatcttgatgcataaatatactggatgaaagaatgcttctaatgcattgagttgtccacgaccaatgattgcattggaggggtatttcatgtcaacaatatcaaacacaacttgttcaattcttgtattgtggacaaatccgaaagtcactcgcattgtgatcttgccaagtgctacaatctgccttcctccgaaaccacaaagagggtgtgtagcatcatgggttt

SEQ ID NO: 1397 - DNA, 348 bp, Zea mays
  unsure (1)..(348): unsure at all n locations
tagcttgtgtcctcttgaagcacccatcagaatctatactattctttactnatgcactagacgagaggagcctcgtgttataacatcaacctgactaaaataattttaaaacatgatagagaaattaaaaattagtctctaaaaatcaaacaccaaataattatccctaattgtaccgggtgtttgggtgcaagaacgtaacgtgctcacctagacgactatctagatatgagcagaggagcattagagggcaaaaagggaaagctgctttactctgtactacaacggacnagtatctggacttctagtacctataaagatagcggactggtattatgtacaccactc

SEQ ID NO: 1398 - DNA, 436 bp, Zea mays
acagcttacctcagtcaagacagatagacactcctttgtctcattcaaaaccttcaatcctgtgcaggtgccataatcaagtaaacgtgatcaaaagtagttcacgtcttgagagagggtgatttgagtttcaatcgttgatcttgtcgcttggttgctctattattctcttctaacttttcaatggttgtaaaactagcaagaaacacctaaatgggtggtgatacttatgggggctcaacgacttgagagatatacataagcactccgcccgtctatgtgacctattgagaagggaaatggctgaatagaccccgcctttgtgacctcctcacggcatgtgcggaatttctatccagaagggatatggcgggattgaacctctctcgcccgttttgaattgtgtaccgcacaaccctttacgaggtatgttatt

SEQ ID NO: 1399 - DNA, 412 bp, Zea mays
tagcttataacaagaggatagcggcgagtatttttttatatgtcatgatagaaggggaggtgtacaaacatggagtttgtgctccgttgctcaaatgtttatccagaaccgaaggtatagagttaatgaaagaaatacatgcaggcctgtgtggatctcacatcggacctaggccgttacttggaaaaattttccgccaagggttttattggccgaaggcagcttcggatgcagcagaattggtccaaaagtgcgaaggttgtcagaaatgtgcaagagatcaaaaacaaccttcgtccttaacacagctcatacaacccacttggccattgcataggtggggccttgacttgttatgtccgttaccaccagcccaagggaacctgagatatgttgtagtagctgtggaata

SEQ ID NO: 1400 - DNA, 357 bp, Zea mays
ctaccaaatggacgtgaagagtgccgctctcattgttctctatcttcgaagaggtctatgctgagcgacgctctggctttgaagacagtgagtaccctacaccatgtctatacgctctctgaagcactttattggctcaagccagccccacaagcatgggatgaatgcccgagagatttccttattgctaattgccttcacagttcggcaggcccaacctactctattcactaaaactcttgaaaatgatggggtcgcacgtccaatcgacgctgatgatatcatatttgggtctacctacggaactactgtgaggaagtaataggagcatgacacaaaaatttcggatgatctcga

SEQ ID NO: 1401 - DNA, 414 bp, Zea mays
  unsure (1)..(414): unsure at all n locations
agcttcggatctctcgccttactacttttgtctacatgaccagaaatgacttgagagtcagttttaaggatggcccttcttattcccattgcctttaactttcgaaaccccaacagaagtgcttcgtattcagcaatattatttgtacaactgaagtcaagttttgctgcataacatgttctgactttagaaggcgcaactaggacagcaactgcccctacgccgaaggttccctaggaaccatcgcagaacactgtccaagcttcggcgtctttatttgtttcttctttctaagcccctgacgtccaatcagcaatgaagtctgctaacgcctgngactgaattgaggatctatgtacatagtcaatacagaattcgttaagctccgcagcccattttccaatccttccagta

SEQ ID NO: 1402 - DNA, 451 bp, Zea mays
tatgatggccaccattatgcataggagctgaaatatctttaggggctgtaatattcaatggaacaaacgaagatgacttcttatactgcctgcctgataacaaagagctatccgtctgccgagagatggcgagaagcataggctttccgaagcttgaagctgggttaagtgccatgacgaaagaggatctcgcagacagccttgcgtataatagcttgaaggtaccggaattaaacacttgaaaaaacccccttattatttttacgcacatcattcctttttccttatttgaattctttgtcgtatagggcctgatcctaagcaacgcgctaagagcgcataagagcgccgaagatgatagttatgaaattgcgttaataatttacgctccgaacgtatcaagctgagagatgaagcttcggaaaagataaattctgttacattgtggata

SEQ ID NO: 1403 - DNA, 409 bp, Zea mays
  unsure (1)..(409): unsure at all n locations
agcttgtcgccgtcggaccttcgttgtggcgtcttacgtgtncgtcgaaacgaatagcaaggatatctggcggtgtagcatgttgacctcttgccggaattctccgctgctgtcaagccgccggtcaccatgggcgggggtttgcgccgcatgagcaccggtatgtaagctctcaccatgtacaccattttcccctctatgagatccagccatcggtaggatggggggcacactgggtgggaacgagtgtagctctagcggcactgccgtcgtgcggggactgcggctcgctgtggctctcgcctgtggaagaagaagctgtgtgcgccgtagattggatcggatccaatggctggtgcacttaaagtgggtgagtgctttgtagccgtacgatcttgatccgatggcc

SEQ ID NO: 1404 - DNA, 408 bp, Zea mays
actcagctgggaagatttatccaacatgcgctatctggatgttaagccgcccaagtagtcttaggattaagcagtgttgagtcagctctataaaatgactaagtatactgacctctaacactccctaaatgctattgaatatcacttcttctaagacaggacccaacatccgaaaaagaagttgagcccatttatacaattgtgaaactgaaagcagtataatctaagaatcacagaaaacatgaaatggaaggcaagtgatatactatttacccaatctttgacaacctgattccatcccaatggatactcgtggggatctggttttctcatagagagaaatcttttctccctgcatgtggttggccccgctatcatgatcaattggccccggagaaaactacaaca

SEQ ID NO: 1405 - DNA, 405 bp, Zea mays
agcttcgcacctctgaactaactcggctgtatcattctttgctgtgggccaatagaatcctgacctgaagactttcctgactagtgttttggaggctgcatgtattccacattgcccagcatggacctcctccagaagttgctttccagtggaccggaggatgcactttatgaggacgcctgacgcaccccttctatattatgtcttcccaatgagtgtgtaatgacccgactgtctggcaatgcgctcggacgaaatcttgtcatctggttcttcttcattctttatatacttgatgattggccttctccaatcatcagagtctgactcgggttgatctataatgttgcactcttctgtttgatccattgagatactcggctgctgtatatcttgcacaaagac

SEQ ID NO: 1406 - DNA, 317 bp, Zea mays
  unsure (1)..(317): unsure at all n locations
tgcacgagctngaaccgagaacccgtgccaccgttatattttaatcgtgctcgccggagttcagaaccccgccggcgcacgtgcaccgggtaagtcactgctgccattttcgattcaatgcattgatagcctctacatcaccctgtgaagctcaccgtgccattggattgaactaaatcgtcgtgggttgaccggaacactctccgccgacgagagcccccgcctgcgcacgtggaccggacgattccggccacccccgccgtcaagtcatacaccgttgtgaccgccaggacctaccggagccaacacccgccctt

SEQ ID NO: 1407 - DNA, 408 bp, Zea mays
  unsure (1)..(408): unsure at all n locations
agcttgaaaccaaaccatccaagcacacatgttgtgaggatatcactaccaaaccgcttttatggtgcttatccaaatcttaacaaatgatcttatagttggataaggaacataagaactttgccaaactagcaatttacacttgtgtgaaaagctagcttggaaaaagaacaaaaacgataaatctttgtagagatgtcatcaattaccaaaaagggggagattgtgagaccctgtttggttntggtaattgattgacaacctacatggactaataagtgtttatgttgagatacacaggtgattagtccacaagtacactagtgtgagttattctacccatggtggtgatgtggcttggtgatattgagatgctcaactagtgtgataaaggagctcattgtatat

SEQ ID NO: 1408 - DNA, 327 bp, Zea mays
atatacccaacaggagggtgaatatgtctttgatgcctactcaccactggctcgattgactaccattcgcaccgttataaccggggcatcctcttatggtcttatcattcatcaacatggatgtttagacaacttttcttaatggagagttggatgaagagatctatatggatcagcccaagggttattgtggatggtcaatagaacaaagtgtgcacgttgataaaatcattgtatggcctcaaactagcacctaatcaacggcgtgaaaagtttgataatactcttacagcacctggctttcgtttacatgaatctgacacgtgt

SEQ ID NO: 1409 - DNA, 401 bp, Zea mays
cagcttatgaagattatacatttctttatggtcttgtcggcggcgccagagccaacccatgttagtcttagcaattaagcaagtgtcgagttcatctttatcaaaatctactaagtatagctgaccctctaacactcccttaaatgctattgaatcatcacttcttctaaagacagtgacacctacatcagtgaatagacagatgtagcccatttgacataattgtgaaacggaaagcaaatcgtaatctaatgaatcaacaagaaaaacattggaaatggaatggtcaggtgaaatagcaattttacccagacctttgaccaaaccttgggttccatccccgaatgtgatagctcgttggggatcttggttattctcatatgatgagaacatttctttct

SEQ ID NO: 1410 - DNA, 415 bp, Zea mays
cgactgcggcagcaagctttatcatggtaattaatatatcatctattgaggcctaccctctgactaaacacttcaggatataatatgtatgtagactcttatgcatagatcaaagcagctgtctcaaagtcttaaagctgcaaaaagtgacactgagttctcccggaccgaaaggttgttagagactgctacactagctttaggtaattaagtttgccagaattggaatcagatcttatttcttttagctaaatacttttatctttaacagctccagctagtagtggatctgcttcaccaaatacacggatactgctctagattcgcccaatttgtggtgtgaagtacctagagtgtgcttcacttaatccaagtttgttggagtcggagaatattaccgactataagctgcgtt

SEQ ID NO: 1411 - DNA, 413 bp, Zea mays
  unsure (1)..(413): unsure at all n locations
agcttagtaagctaattggtaagtcccatttggtgttccactgatttatntttgatgtcttagtgagagtntattaaagatttctagctgaacttattggagtgagaatttattttgcctctctcctttctaatctttatgctttaaggtgggtttgaacttacagacaacttaataaaattccaaaaattctgcaaaaattacagtggcttcttactggtgtatagttctctgtctcaaaatttggagcttaaacagtgaggggttctctctgtataaaattatcaaatgttagggcaaagggggtgttttgaactacagctcctttntaatagtgagttattatctaagacatattttttctggcatttagatgttataacatgactttgtacaaatttctagccactaat

SEQ ID NO: 1412 - DNA, 308 bp, Zea mays
aagaagaagaacgagaaactcaacactatgcccagaagctgaaatatccaaagggggcattagtattcaacgacagcggagaagaggatttcttgtattgtctcccagacagcaaggagatttctgtctgctgggagatgagcaaaagcttctgattcccgacattagaagacgggctttcaatgctgtcgaaagatgaattgtccgacagtttagcatataatagtataaaggtgtgaacatcaattttttgtacttaacaacgattgtttttcatttgcttatactcaataccgtacttcttttgc

SEQ ID NO: 1413 - DNA, 408 bp, Zea mays
agcttctaaagggagagcacgtaataggtcttattttgttactttcgaaaaagatagaccttgtgtagcttgtcaagcaggtaaacaggtgggaagctctcatcataccaaaaatgtgatgaccacatcaagaccttcggagttgcttcatatggatctcttcggacccgttgcctatctaagcataggaggaagtaagtatggtcttgttatagttgatgatttttcctgcttcacttgggtattctttttgcaggataaatctgaaacccaagggaccctcaagcgcttcctaaggagagctcaaaatgagtttgagctcaaggtgaagaagataaggagcgacaacgggtccgagttcaagaaccttcaagtggaggagtatcttgagggggaaggtatcaagca

SEQ ID NO: 1414 - DNA, 307 bp, Zea mays
tccgagaagtgtgtctttggagttccccgaagcattgctcttggagttcattatctctgagcggggcatcgaggccaacccggataagatcaccgccatcaccagcatggggcccatcaaggacttgaaaggcgtacagagagtcatgggatgtcttgcggctctgagccgcttcatctcacgcctcggcgaaagaggcctgcctctgtaccgcctcttaaggaaggccgagtgcttcacttggacccctgaggccgaagaagccctctggaacctgaatgcgctactcaccaacgcgcccatcttg

SEQ ID NO: 1415 - DNA, 411 bp, Zea mays
agcttgacatctctaaagctttcgacaccctttatttttcatatctcctagatgtgttaagggcctgtgggttctcccccaaatggcgcaactgggtaactcaaatcctgagatcgtcctcctcaaaaataattttaaatgggcaacgttcaaaggcaatcaaacacagacgtggggttcgacaaggggaccctctatctcccttcctattcattttaacgatggacccgctgcatctgatgattgacaaggccgctgaggatggactgcttggacaggtattgtctagaggagctaagctttggtgctctctctatgcggatgatgcgggtgttcttgttagagctgacaaatcatacttggaggtgctgaaagggatactcaacgcgttcgaggggtgttcatgactaa

SEQ ID NO: 1416 - DNA, 387 bp, Zea mays
cttcataggtactacatcgcaatccgcataatcagaaacttacttgtttaggaaatgtgctccgggccattttaagtatttggtgaattaatgcccaacacaagtgcctaaatgttaaatggtggacaaagtacaaatcaagtataaaggtatgtttctcagacttagtacattgttttagagactaatgtattgcgtctaagtgctggaaacacgaaaaatcaagttgaaattaaagatggctttgttcagccaaaatcaactctgtctgggtgcaccggacagtgtccgatgcgccacgctgactcatgcgaacttgctgctctcgggaagtgattaacgggtacagctataattcaccggactgtccagtgagccaacagtctg

SEQ ID NO: 1417 - DNA, 410 bp, Zea mays
agcttgtgaaggttcttcatccccacatgtgctatttgtgtatgccacagccagcccatgctaggcttagcaattaagcatgcatctataccggccttctcttttgcaaaatcaactaagtaaagattgccgtctaatacacccttataagctagtgaaccatcacttcttctaaagacggacacatctacatttgtgaatagacaattatatcccatattgcataattgactaacagataacaaattatatccaagagactcaactaaaaacacattagatatagagtgctcggatgaaatagcaattttacctaacccttttaccttgccttgatttccatcaccgaatattattgaatcttgggaatccttgtctttgacgtaggacgagaacatcttcttctcccc

SEQ ID NO: 1418 - DNA, 380 bp, Zea mays
tactcagctatagagcttcacaaaactcatgggttattgaagaatcctattatgttgaattcgatgaaacaaatgggtcccaagatgagagtgatcaacctgatgatggttgtggaacccaattgataaatgccatgaacaccatggccattggtgaaataaagcccaacgaagatgatgatgaaaatagtggggttgtcattccctcatcctcaactctaaatgaagaagaccacccacagcccacaaccatgatgaaaacttaggatactcatgatgaaggtacctcaagacattcggttcctccctatgcttcaaccatccattatcaaacggtatcaagaattcatcattccatcgtaaggatcacccggtgatca

SEQ ID NO: 1419 - DNA, 413 bp, Zea mays
agcttccgcatggcccactctttcatagtgggaaacactttgaaagccaaaaattcctgcactaagtccctagtgccgatgtgctctgcgataatcctgaattcagcaagtgcaatttgggttggaccctctggtctcatattgcacgggggtctggtctctccgaagatcaactctaacggactctggaccagcttctccttatcatcgacaactttgacgtagaaccattccgatttccagccagccggccacttgcttcagtaactgatcacgggaaattttgtagtcttgcggtaggaaaacatgtagcagccgaagttttcatgtaacccatctcttctggccttggtttggtaatgaagctcatgcactcggtaaaaaccttctgcaaacggttccaccccttggct

SEQ ID NO: 1420 - DNA, 308 bp, Zea mays
atgtatagtattacacatctgtatcccaaatctatataaaatcacatgtctcattatgcttgtgtgactatgatttggtaggcatactacacgacgctggaactcattccatgctccttaagtagaattattttaagtatctagggtatcatggtgttgctttcatgacacacaaatatactaattttttgttgaaaatgtgcatgtatttatacataaatgttaccaatcctagtctttgactagtcaataatgaactcatggaaattagaggtgcatacgccccccacatgatatgaatggtactc

SEQ ID NO: 1421 - DNA, 414 bp, Zea mays
agcttatatctcccatagctctgggtgtgtttttatttcatgcatgtccgaaccattgtgttctgtatcgtggcgattttgagaacgcatcaagatgcccagtttgcaatgtcagtcgatacaagaagagctacaattaagactgtgttaaaaaattcccgaagaaaaataaaaacaagaaatccactattggaccttgaagtgacgatgaaacttttgatgacatggatgggaaaaagaagtcaaagaacccagctttggtgatgtggtatctctcagtaattgatcgcttaaaacgtttgttctcaaaccctagggaggctgagcttatgcgttggcatgctgaatatcgcaagcagaataacaaacagattcgacaccctgctgatgcatcacaatggaaaaatttcgatc

SEQ ID NO: 1422 - DNA, 396 bp, Zea mays
agtactcaatagcatactctgtgcagaaacaacctttgttgtttataaccatacaaagtcggagagaagtcttttaccttgaaattagaatagaataaactaccgacgatatgctgtcttccgtaacggctaatgactgtctcaagctttgggaaaccaatactcttcgaaagagtactgataaccttcgctccagatcggtctcgaagacagcctaagcttacgtcgtcaacaccgccaaagagaagtgcccctgcgtcatatccacaggatacgagataagctctcaactcttctttctcaccttcgacaattcttgtcgaattaagtcttgaaaattgaaatgttattcttctgaagcatcttcgactatatacttcttctcttcaggcacat

SEQ ID NO: 1423 - DNA, 407 bp, Zea mays
agcttgtgcgtctcaaggtacctggcctttgttttatgggggacttcgctgacgtagtagactggcttctggatggttcggacccctgtggttggtctcgagccctcaaactcttgaccttccatcaccatcatggtggtcggaccatcaccttctcctaggggaactttttgactcccctagggatgttgtgccgtccttttgacgatcagcaccatgctcaccacctctgtagccgctgcaatgtataagtacaacggctcccctggctctggagctactagtattggtagggacacaaggtgctgcttcaactcttgaaaggctcgttttgccttctcggtccaagagaatgggccgaacttcccgtatagcttgaagaaggtagtgccctcttgccagtctga

SEQ ID NO: 1424 - DNA, 356 bp, Zea mays
tgtgtaagttcttcatccacacatgtgctaagctgtgattcctcatccagcccatgctagtcttagcaattaagcatgcatctagaccggcctcctcttttgcaaaatcaactaaatatagtttgccgtctaatacacccttaaaagctagtgaaccatcacttcttctaaagacaaacacatctatatctgtaaataggcagctataacccatattgcacaattgacttacagatagtaaattatattccagagacttacctgaaacacattagagatagagtgctcatttgaaattgcaatcttgcctaagcctttacactggcttggtcccataccaatttgatgaatcttgg

SEQ ID NO: 1425 - DNA, 399 bp, Zea mays
agcttgaattgttccctgtggaagccttgttttccttaataccagggcgtctcccactatagagcatgcttctagcaaatttaaaattttcattttctaagtcatgctcattaattttagcactaagttgagctatgtgataattttggtgtttaattaaagctaggtggtcatggatagcatcaacattaatgtctctacatctagtacaaatagtaacatgatcaacactagatgtagagggtttgcaagtatttaattcatcaatcttagcatgtaacatttcattttcattcctaagattggaaatcgatgcattgcaaacatttaaatctttagccttagaaattaatttatcattctcaatcttaaggcacgaaattgattcatgtaatttat

SEQ ID NO: 1426 - DNA, 329 bp, Zea mays
  unsure (1)..(329): unsure at all n locations
tatgaaacatancgaaacaacataaacaatgatattgattcattataaaaatatatatcattaaataatcatgagtacatgagagcaatatcaaattacatttgttacttgatcttgacagaaggcaaaagtaaaagtaagatgcgaaagcgtgaacagtacggaggtattgtccacctatttataagcacaaagcgcaccctgtgagaatttacattcatgtcctctacaaatgattacaatcataacacaggttatcatgggtcgattggtcatttcatctttaagtcggtgcatctggaagtacactacgaaactccctgattggt

SEQ ID NO: 1427 - DNA, 402 bp, Zea mays
agcttgttactcaagagctggaggccgctcttcttttatcaaggcctcggaggatgactgtgtcgttatgaaagcgatgtgcgacaaggccatggataatgctattcgtgctggtcggatcctgatgaggaagcctggtgttgtggtgcctgaagacatttacgctgatgttcttgctgcacccgctgtcgcgagccaaccatcctcttctgctactcttgcagccgaggctttttgaaaaaatgctccagtgtagtgattcacttgaatcgaaaacactttttcactgagttagcactttttaaggaaaagtgtagcgtgaattctgtgtatatgtaattgttgcgcttgaaccgattgttccgtcagcagggtgctgaatacacctttgacaatgcgagc

SEQ ID NO: 1428 - DNA, 245 bp, Zea mays
tgcctaggagtattggggtacccctaaatacaggacccgacacgactgttcccccaaggcgtacaactggtggcaatcctgaaggcgagcggcggcgcccccgagccgggcatgcaatgactcgcaatccagaggcacggtggcggctacctaatcttgatgcacggcggtggtggcaactcatgagctcgaagcggtgatggctccccagtctggaggcgcaacaactgtggatccccagtcca

SEQ ID NO: 1429 - DNA, 413 bp, Zea mays
agcttcacatttatcaaaagtccttgctgcactatttccagattcaacttctccatttcttgacatataaaggggtcaagtgctcttactataagacaatgacaaaaagtcttgcgacttaaagcatctgccaccacattggcttttcctgggtgataatggatttccaagtcataatctttgattagctcaagccatcttctttgcctcatgtttagttctgactgggtaaagatatatttcaaacttttgtgatccgtctacaaatggcaggtatttcccagcagataatgacgccaaatcttgagggcatgaacgactgcagctagttccaagtcatgagttgggtagtgttcttcatgccgacaaagctgccttgaagcatatgctataactagcccttcttgcatcaa

SEQ ID NO: 1430 - DNA, 336 bp, Zea mays
  unsure (1)..(336): unsure at all n locations
tattctaataagttggtgatgtatgaaattattaatttatttctataatgccacgggtatgggttttggctatcttaaatatcccataattccctatttgaactaaatatcatgaaactatttttattaaatactattgaaaatcaagagcctatcagaaatggnctggtatttttaaaattattctgtaattttctagaaattctctaactattggtgaaaagaaaaagaaaaagtgccaatagttcttgttcgaaactggcccaaggtggcccatacccatgcgataaccggcccacgcgtgcccgcgcgttgccaggtttgacaaagacccct

SEQ ID NO: 1431 - DNA, 344 bp, Zea mays
ggaacttagatatcaactctataggagaaaaaattgggactctcttgtttattttatataatacggtttgtatcgcatgtcaagcatggaagacaagtggtacctgaaaaggaaatggccttaaaccatttcttatatgttggagcttgacgaccatcattcataactactagtttgcctagtctttgattcacagggtcataagatacaaaaggtcaagttcttattccgaatcagctcatactcaaccaaatatgggtaaaacatgagataaatgaactaccaatagttatactctgtggataaattcaaaacactccaaggaacgtattcacacttctaga

SEQ ID NO: 1432 - DNA, 406 bp, Zea mays
agctttcagccgggccatacgacgagcgtctttttcgacccggttccgaaccccgactgccatcactaagtactcaggggagacaaggccggaactgtggctcgcggactaccggctggcctgccagctgggtggaatggacaatgacaacctcatcatccgcaaccttcccatgttcctctccgacgccgcccgagcctggttggagcatctgcctcttgcgcagatctccaactgggacgacctgttcaaagccttcgccggcaatttccagggcacatacgtgcgccctaagaactcctgagatctccgaagctgccgccagcagccgggagaatccctccgggactacatccggcgattttcgaagcagcgcaccgagctgcccaacatcaccgactcggat

SEQ ID NO: 1433 - DNA, 343 bp, Zea mays
tctatagggagaacacgtgataagtttgactaactgtttattctgaaaagatagacactgtgcaacttgtcaagcaggttaacaagtgggaggagcacatcacagctagaatgtgatgaccacttcttaacacttggagctgctgcatatggatctcttcggacccgtcgcctatctgagcataagagggaagtagtatgggctagttatttgtgatgactttttccgcttcacttgggtgttctttttgcaggataagtctgaaacccaatggaccctctagcgctttcttaagagagctcaaaagagtttgagctcatgtgaagaagattatgagcgacaa

SEQ ID NO: 1434 - DNA, 414 bp, Zea mays
  unsure (1)..(414): unsure at all n locations
agctttatcaaatggacgtgaaaagtgcttttctattggaccaatcaaggaagaggtctatgttgagcaacctcccggctttgaagatagtgagtaccctaaccatgtttataaactctctaaggcgctttatgggctcaaacaagccccaagagcatggtatgaatgccttagggatttccttatcactaatggcttcaaagtcggaaaagccgatcctactntattcactaaagctcttgaaaatgacttgttcgtatgccaaatttatgttgatgatattatanttgggtctactaacgagtctacatgtgaagaaattagtaggatcatgacacacaaatttgagatgtctatgatgagggagtcgaagtatttcttacgatttcaagtaaagcaacttcaagaaggcac

SEQ ID NO: 1435 - DNA, 399 bp, Zea mays
  unsure (1)..(399): unsure at all n locations
tagacccgtggggagcccatgatgatttctgggggaaggtntgtttcatccccgtagaccaagaagaacggagtctccccggtggctcggctgggtgctgtccggttcccccatagcatggacggaagctcactgacccaatttgcaccatgcttcttcaagcagacgtagtgtgtgtcttgagtcccctgaggatctctgcatttgccctttccacttggtcgttactcctgggatgagccacagacgcgaagcaaagctgggtgccgatgccctcacaatactcctggaagatccgacttgtaaactgggttccgttgtccgtaatgatatggcttgngaccccaaatctacagacgatggacttgatgaaagcgacagcggcaacctgtgtgatgc

SEQ ID NO: 1436 - DNA, 413 bp, Zea mays
  unsure (1)..(413): unsure at all n locations
agctttaaccctaaataggattaaaggggtaattttttttctcaattgagaaaacctaaaagctttagggtaaaggtcataaaatgaccccaaaaataaagttgaatcacatttatacccctgggataccagaaaccctaattggaaccctcggaaaaccctgaaaccaaaccctaggggcttatgtgcaaaattagcccacttttgggttaaagtgcaaaaaccaagctaaataagtattttaagtcatttggttcacaaatatgtggacttgaaagccaaaccctaagttttggacttaaatgcaaaatggacctcatttgagttctattctaagtctaaaaatcagagaattggctcaactttggagctntgcatctttcanattatagggtttttgccctaggtcacca

SEQ ID NO: 1437 - DNA, 412 bp, Zea mays
agcctttcacatatttattattaaaaatatcttatttttattatatatccatatatttatcatcgggatatttttctttaatattaaaatgactcctactaggccatggcccgacacctagcccatctactagaataaacccatatcttttatggtcccttttccctcattattttagcaccctccctctccctgaccccgcctatagatggccaaacgggccggcacggcccgacccggcacggcccgtcgctggcacgacccgacgctggcacggcccgccaggcctggctacgaatcgtgccgtgcctagatgggccggcgtgccgctgccgcggcctaagcacggcccgtgagcctgttagtcgtgccaggccggcccggtggcactatggcccatctgagtatattg

SEQ ID NO: 1438 - DNA, 448 bp, Zea mays
  unsure (1)..(448): unsure at all n locations
ttatttttctgtacacctgaacaccactccccgatggattntttatgatgggaagatggagtgcgtataaattcccaataacagctgctgccgttctgaagcactctttctcatcatcccacgaacctattttaagattgaaacttcctaaagaattatggttgccagaacgaagactgcatcatccaaaaaaatgccaccgaggaagcttattatggcctcaacaaagaaacacagttaataataacttatgttcagatacttatatacgaaaagctaattaaatttcattagctgaaacagttatgcaaagaatcactttcatctcgatagtgagtgtatagtctagcactctagttccacgatccaattntaaagtagcacacatgatgaacttgacttantaagagaaaacctacatcagtccccataatcaaacaaattctgg

SEQ ID NO: 1439 - DNA, 407 bp, Zea mays
  unsure (1)..(407): unsure at all n locations
agcttatacatttagtttacagacaacacaatgtgtattatcgtattttctctatcatcttggtgccagaatcttataaagttcattcggcttcatttgacttctatattcgtctttccgaaggtaatactttttttgtttactttatttcccctgaaggtggtctttgccgaagcacatgtatcactttagaaatgtaccaagaaataatgattaactattattctgaggaacttcgaaggatgaaggcccccaacaaccacccattgtcttcttttgccaatgcagacaatatatgtttgcgaagatctcaaacgaaagctccncactaatgtagtcatcgccacacatacttggatagtgccacattacatttggtgtaactggtgcgctaaacttgaaaggaa

SEQ ID NO: 1440 - DNA, 368 bp, Zea mays
  unsure (1)..(368): unsure at all n locations
ctaaagggagaacacantttgngactaaccaatgttcatttttatatagacagggtttgtagcgcatgtcaagcatggaaacaagttggcgctcatcatccacacaagaacatcatgacgaccgacaggccactggagctactccacatggatctattccggccgatagcttacataagcatcgacgggagtaagtattgtctagttattgtggatgattattctcgcttcacttgggtactctntttgcaggataaatcttcaaaccaagagaccctaaagggattcttgagatgtgctctaaactagttctgaatgagaatcaagaagataagaagccatgatgggacggagttcaagaactctta

SEQ ID NO: 1441 - DNA, 412 bp, Zea mays
  unsure (1)..(412): unsure at all n locations
tagcttctaaagggagaacacatggtgtgtctttcttatgtacattncgagaaaaacaggatctgttgcgcatgtcaggcagggaatcaagctggtgttcaccattcacacaagaacatcatgacgactgacaggccactcgagctcctacacatggatctattcggcccgatagcttacataagcatcggcgggagtaagtactgtctagctattgaggatgattattctcgcttcacttgggtgttctttttgcaggaaaaatctcataccctagagaccttaaaaggattcttgagatgggctcaaaacgagttcggcttacggatcaagataattataagcgacaacgggacggagttcaagaactctcaaatcgaaggcttccttgaggaggagggcatcatgcatg

SEQ ID NO: 1442 - DNA, 414 bp, Zea mays
agcttgtgaagattcttcatcccaacgtggttcttctctgcggtgtcagagccaacccatattagtcttagcaattaagcaagtatcgagttcagctctattaaaatcaactaagtatagctgaccctctaatactcctttaaaggctactgaatcgtcacttcttctaaagacagtaacacctatatccgtaaaaagacagttgtaacccattttgcataattgagaaacagaaagcacattgtaatctaaagaatctacaagaaaaacattggaaatagaatggtcaggtgatatagcaattttaccaagtcctttgaccaaaccttgatttccatccccgaatgtgatagctctttggggatcttggtttttctcataggaggagaacattcttttctcccctgtcatgtg

SEQ ID NO: 1443 - DNA, 408 bp, Zea mays
  unsure (1)..(408): unsure at all n locations
actaagcggttcttacataacaaacataaagaccgtactcttatacatctcgatgcacaaaaaaccacttggtgcgaacttttcttttacataacgaatcataacaaaccatttatccgaaactcttctctgtgccgaagcaaccatttaggaacacaaatgctatgaatgaatgcttatgcatgcaaatgccatatgtaatgtgcaaatgaatgtccgaagcgtatgtccgaagccacactcatccatcattttcttaggagcaaacacacgtcagctctgcattcccttatgaacgactntggagcatctntgccttttacttaagcagtatcagcgttgacttttcgctgtaagctctgcatgcccctatggacgtctttggagcttcctcgtcttttacttaga

SEQ ID NO: 1444 - DNA, 412 bp, Zea mays
agcttcataactcctagttggacctattgtttctttcacatgcctgaggggctcaagaatgctagaggaagcttcagcagaatgactgtcaaagttcttcactcccaaattggcaaaaatgtcctgacatatgttgatgacatcaaagtaaagagcacgaaataagaaaaccatgttgctgatttgcaagagacatttgccaacttcagacgggctggtcttaagctaaatctagaaaaatgcgtctttggagtgaagaagggcaagtttcttggtatcaacaaatggtattgaagctaacccaagtaaaatcaaagctatccttcggatggaaccgtcaaattccagaaagggggctcaaaggttagcaggaaggctggcatcactgaacagatttatctcaagatcagca

SEQ ID NO: 1445 - DNA, 394 bp, Zea mays
ggaccttgaaactaagctgagcagaactggcttcgtctgaacccttgtatctgtttatcaacatatacttctgcttctgccatgaggtgattgtccttggccgaagagaggagtaccaagtttgagcgacactcttgacggccatgacaaaagactttgccatgactgcagtattgccaccatacgaagatatggttgcttcatagctcatcaagaatttcttctggtctgaatgaccgtcgtacatgcagagatggggtggcttgtaagactggggccatggtgtagcctgcaattctgttgatagaggagaagcatcatcaaaagcaagattttcatgatggaaatcttcataacagtcatcctcattgtagaagccctcctgatgaagctc

SEQ ID NO: 1446 - DNA, 397 bp, Zea mays
agctttatcaaatggacgtgaagagtgcctttctattggaccaatcaaagaagaggtctatgttgagcaacctcccggctttgaagatagtgagtatcctaaccatgtttataaactctctaaggcgctttatgggctcaagctagccccaaaagcatggtatgaatgcctaagagattttcttttagctaatggcttcaaagtcggaaaagccgatcctactctctttactaaaacacttgcaaatgatttgtttgtatgccaaatttatgtcgatgatatcatatttgggtctactaacgaatctacatgtgaagagtttagtaggatcatgactcaaaaattcgagatgtctatgatgggggagttgaagtattttctattatttcaagtcaag

SEQ ID NO: 1447 - DNA, 388 bp, Zea mays
  unsure (1)..(388): unsure at all n locations
agatactcagcttggaagatcttctcccacatggcaagtcgtctattctctatccaacccatattagtcttagcaataacgcaagtgtctagatcaacactgttattattaaaatcaactaggtatagctgaccatccaacactcccttaaaagctactaaaccatcacttcttctaaagacaagaacacctacatcagtgaataaataggtgtaacccattttgcataattaagaaacagaaagcaagttggaatttagagcatcacatgaaaaacattagaaatggaatggtcaggagatatagcacatttacccanacctttgaccaaaccttgatttccatccccgaatgtaatcagtctatggggatcaatcattttctcata

SEQ ID NO: 1448 - DNA, 279 bp, Zea mays
cgacccttaaacaccggcttgaattggagcactccaaaaattcaaatgctgaaatcttctcaaacctcctctaaattcaaaatgaaatgcgaattccatttccacactggtcggctcgcaagttgatatcaacaaaaaaaatatagtgggccatattctctcccaaatccctctcaaaataatctacaaatatttcctcagtgacccccccctaaaatcattccacaaataccggcgagatatttcactgatatatctcccagtattttcctcttaaaa

SEQ ID NO: 1449 - DNA, 394 bp, Zea mays
tgtgaagattcttcatcccaacatgggctagtctttctatttatcagtgtcgagttcagctctcttgaaatcaactaagtatagctgaccctctaacactcccttaaatgctactgaaccgtcacttcttttaaagacagtaatacctatatccgtaaaaagacagttggagcccatattgcataattgagaaactgaaagcaaattgtaatctatagaatctacaagaaaaacattggaaatagaatggtcaggtgatatagcaatattaccaagtcctttgaccaaaccttgatttccatccccgaatgtgatagttctttggggatcttcattttctcgtaggaggagaacatcactttctcccctgtcatgtgggttgtgcatctgctat

SEQ ID NO: 1450 - DNA, 408 bp, Zea mays
agcttctaaagggagagcacatcttgtgactatccaatgttcatataagaaagacagggtttgtatcgcatgtcaagcagggaagcaagttggctcccaccatccacacaagaacatcatgacaacggacaggccacttgtcggggaccataattaggggtaccctcaagacgcctaattctcagctggtaacccccatcaccataaagctgcacaggcctgatgggtgcgattaagttagggatcagtccatacgagcgacttgatcacgccttgcccgagcctagcctcgggcaagggcagccgaccccgagggatttctgtctcgcccgaggcccccctataacggcggacacatctccggctcgcccgaggccttgccttcgctaataagcaaccctgactaaa

SEQ ID NO: 1451 - DNA, 399 bp, Zea mays
agcttctccaccatggcgcaggtagtcaagttgtttgcactacccccatcaatgatcaaacgacatgaacgctccttaatgacccactttgtttgaaacaacgtatgtagctgaatctgctctgccttctccatttgtgcactaagcacacgcttgacaatgaggctctcataatgctctgcatcatctgcaccaatctgttccttgggtggttccttagtgcctacatcatcagtcgcaagcaaagcaagtgtagcttcatccaaatcactagcagaggaatacccaccatcgtcttttaccaccaaaacacgctgattaggacaataacgctgcacgtgttcatagccctcgcatcgataacacagaacatctctcgttctacctgtggaagctact

SEQ ID NO: 1452 - DNA, 434 bp, Zea mays
ttagagcgacccgcggcatgcaagcttggagaaatccgggataaatctgcggttatatccatctcgtccaaggaaacatcgaacctgatgcaccgtggttggcggcttccattctaaaatatccttgaccttgctgggatcaaccgcaattccatttgatgacaatacatgtcccaaaaattggatttcctccaactagaacgcgcatttgctgaacttagcatataattggtgttccctcaagtgcgttaatacgatccgtagatgtgtagcatgctcctcttcattcttggaatatatcaagatatcatcaaagaagaccaccacgaatttatccaactcgggcataaataccgagttcattagatatgtgaagtgggcaggagcatttgtcaatccgaaggacataaccaaatattcgaataatccgtacc

SEQ ID NO: 1453 - DNA, 300 bp, Zea mays
  unsure (1)..(300): unsure at all n locations
ttgaactttccggtattcttccggacaaagacttcctttaattatgctcactgcttgagcatttcgatgaacctcttgcatcatttccggagtcatctcttctccttgggcgggtttatacatacctacattaacaatatcccanagactaggatgcacaccgattaaatgcgacttcatcttgtcggcccactcatcatagttcaactcactaagagttggtaactctccaagtggggcggaagaaaagttgggaatataattctagagtaatcgaattgaactttgcttaagttatta

SEQ ID NO: 1454 - DNA, 393 bp, Zea mays
gcggcatgcaagctagtcttttctttctgcgagaacaaatttatgttttatgtggtgctatatggattaaagggcgcgcaaaccatgaggagtctccacatttctttggtccatttggagcataatttaatcttgcggtatcacaactgccacttcccttcaccattttttgtgctttgaactattaaccttgacgggagcctatgcgtaccaaaatctttttctgatgctcccatgtattttccttcctcaatccgttatgcaggtattttctatccgtatatgaaaaccgccgaaagagctcatctgtccaacaaattatgggagagagttatacttgccaaaaattatgagagagcgatggaagtcattaaccaacatcttgtatgcatc

SEQ ID NO: 1455 - DNA, 373 bp, Zea mays
agcttgccctcgctactgaccactcaccaccttatttctctgtatgccaccaacgattcacatgccgagggtcacgccacaaaacaaaaacaaccaaccacctccaccgaacaagagtgcgaggtccacaccaccagtttaaaaaacttgggggaccccctcccaaaccccaaaagccaaccctaccaagctaaagtttgtctggatttgatgaaaaacctgcctctggccccttaggtttcaatgccatagcaggccaccaacatcacccattcgaaatgcctccggaatacaatgatgcatacctccacgacggcccggaccttggtgtcaacaccgaagagcaactcttactcaagagcctttgcatgtg

SEQ ID NO: 1456 - DNA, 346 bp, Zea mays
  unsure (1)..(346): unsure at all n locations
tctgttatgttcatgagttattatatgaaacagagcctttgtgctnatatcatttccataacaactttggctgctaagcttcgctctcgtccgggcaagctgacccgtaccaacctttcagaagagatggcccggggattggatgatacaatggttctatgtgaagaatgactcatcagcacgagaagacatcaaatgtataattatgcgtcctatatggcaaagcttcggccttccgaggccgaaggttgaaatgaaccgaaccgccgaagagtgccaaagagccttctgcgttgtctgctcttttataggaacaaaggacttagtacaagagcatattgccttc

SEQ ID NO: 1457 - DNA, 403 bp, Zea mays
tggatatttgacgaagagcggatccttttcttttcgacacatgaaaagaaaggaacgtggtttttccctgaaggctcacaaatgatatgtatataaacattcatgcatcgccaaacagtgaattaccaactattacatattagattcaaaaatatacacatcaaatactacaatcttggtacaataaagctacattgacgattcaaaaatgtctctacaaaaagtgctagtcttctttcacgatcttctccgcaacttcatttagcaatttattgacgacttcgccaacaatagattcagtcatattaatgatctccagtgcttccttcgtttatggatcggccaagggattcaacggttccggaggcggagataattcatctacagtggaaaacattaatta

SEQ ID NO: 1458 - DNA, 409 bp, Zea mays
  unsure (1)..(409): unsure at all n locations
tcggctttgtgctcnttcgcttcgtcattctgtgtatatttattagttatcaggaanattcaagtgtaaagaaaaaggtcagcattacggattgatttgctaccggcttaagatgacttcgaacctttgaccacctaagctttgtcaccctttcgtcatactaagctaaataaatcttggttcctatgcttcgggcaagactgggaatatcaattataactgctggcgataagctaaagttgggtctattgacaatcttttcatgtgtgctaccagatttcatgaaggcaacagctgtgccccgagaaactactatggcacagaaatctccatgttcaactataatttcatcaagagcatcaatttcaccctcgatatattctgaaagcccctggtaaggcttcaaatc

SEQ ID NO: 1459 - DNA, 401 bp, Zea mays
  unsure (1)..(401): unsure at all n locations
agctatgggccacggagtcgctttagaggctatctgtttctccgaccaagtnttgggctctgttgatggcactgagttggtcctgctggttcattgctatgctgcttcgggtggcgaccctatgccaagacatcaattgatctttcacgatttgggagtaccttcgttcttttccaacctccaagtactgtgatatattatagcctgacttttacaccgtacgaacatgtggcattacactcatctattctccatatcacgcattatcggaccggatggctattcaactgatagtgcaaagtgcttctgttccagaatgagcttcgtctttggcacattggaatacggtggagcttcaacatcgtcgctctgacttggatgcgacaaagctggtaatgctc

SEQ ID NO: 1460 - DNA, 264 bp, Zea mays
ggagtaccctaacatgtggtaaactctttaagcgcttatgggcttaagcatgccccacgagcatggtatgaatgccttaaggatttccttattactattggattctaagacagaaaaacccatcctacacttttcactaaaactctttgaaatgacttatatgtatgccaaatttatggtgatattatatttggatctactaacgagtctacatgttaagaatttagtaagatcatgacacaataattcgagatgtctattatg

SEQ ID NO: 1461 - DNA, 412 bp, Zea mays
agcttgtgaaggttcttcatccccacatgttttatttggcgatgccacagccagcccatgctagtcttagctattaagcatgcatctagaccggcctcttcttgtgcaaaatcaactaaataaagtttgccgtctaatacacccttaaaagctagtgaaccatcacttcttctaaagacagacacatctacatttgtaaataaacagttataccccatgttgcataattgactaacagatagcaaattataaccaagagactctattaaaaacacattagagatagagtgctcattagaaattgcaattttacctaacccttttaccttgccttgattcccatcaccgaatacaattgaatcttgggaatccttattcttgacgtaggaggtgaacatcttcttctcccccg

SEQ ID NO: 1462 - DNA, 411 bp, Zea mays
agcttcgccatagctcagctactgtggtcttatctatccaccacctccccacctcatgcaagggcattgatgtgttccctgtgcctcaacggagctcacccacccattcccgagctcgttaccgcaccataaccatgcgtcagtctcgccggaccacatagagctcaagacaaccgcgatacttaatcgctcaaatagccaccttagacggacacatccattagaagaagaaacgaaaattcaatggagtaccagagatcctcgacaaagaatgtcccgattcaaggaatagaataaatttccttgattgaaaagaccggtaagagaaaagaaagtagcttagatagttcatatagaagtatagctagccaggtaactaggtttagcggagatagaaataccaggcgagat

SEQ ID NO: 1463 - DNA, 433 bp, Zea mays
tatgtgccaaatatcacagaaagctaaaggatggtctttgatttgtgatcttctaaagtttaatgcccaaagagcacttctcactaccttgctatttgagaaatgtcaaacagcaaattccatatttttcctatattctctataacaaaagatttactattccaaagggtggggtgttcttaccttggggttatttttgagggctctactaagttttccttgcttttttaaaataaaaggtattctatttattttatactaaaccagggtataatcaatgtttctagtaacctacactgaataagtatactaacaaacatatgggggctccctggttctttatttaaatcactattcctattttctttaaccttaagcataatggtaaataaatggcaaactctaccttaatgggttgtacagagggtgttac

SEQ ID NO: 1464 - DNA, 405 bp, Zea mays
agcttacctcgacctgagaggaaagcttatttttttgtgaagagggtgaagattaaatttttgtgtgctaaaggacacaaaagggcttccttgaggtcctatgatcttaaggaagaatgtgttaattttgatgataatactgatcatatgcttcttgttgcattatatggtgataatacataattagtgcttccgatgatatgaatcaataagtatctattgggtttgtcctgtaatagatattcatttggttctggtgctttgtattggtatcttaatggagaatagtggtaggttgatattcctatggtatatccatttaattggtgtttaactcttatcatgtgcatttgtgtgttatatgcatcacattttaattcttgacacaatgcatcccacaggtgc

SEQ ID NO: 1465 - DNA, 450 bp, Zea mays
  unsure (1)..(450): unsure at all n locations
tatgaagattctncatcccaacatgggctagtctgtgattcctaaaccaacccatgttagtcttattaattaagcaagtatcgagttcaggtctattaaaatcaactaagtatagttgtccctctaacactcacttaaaagctactgaatcatcacttcttttatagacagtaacacccatatccgtaaaaagacaattgtagcccattatgcataattgagaaacagaaagcaagttgtatataaagaatctacaagataaacattggaaatataatgggcatgtgatataacaaatttaccaagtcctttgagccaacccttgatttcattcccgaatgtgatagctctttgggatcatgggttttctcataagaggagaataatcctttctctcctgtatgtggtgttgcaccgctatcatgatcaactgagccccggatgcataac

SEQ ID NO: 1466 - DNA, 415 bp, Zea mays
agcttgagcaagcttcacggactcaccatgtttcttctgagggcttggatcgaacggaggaggacgggataggggctggccacagtggttgctctctgtcggcactggcgggtcgcggggaggtcgccggagctaatggctggctcgggtaagtcatgcgaggtacggaggacgctactgggaatgcagcccagcactggtgcgggctttataaccgtggcgcgggcgtggtcacgggcggccgcgggcgcgcgggggtttgcgcacgggcgtgctctgagcgcgcccccggatgtcatctcgcgtctaacacgtggaagcttgctactgccatggctcaacggcggattagagcaccatagcgtgcgtatcttggcaaagtcactgtgtatggtcgcttctttgctccatatcc

SEQ ID NO: 1467 - DNA, 411 bp, Zea mays
cagctttagaaaccctggctgaatcttatatgttcatgatacatgaaatacactagcttttcttgtgtctccaccttggaaaaagatgctcaaaccctattttcccctcttgagccattagaccccccaagcattggattaaagggaaaactatgcaaatgaccaatgcatgacttgaaccctttaccaaagttgaagtacattaatatatctacaaaatatagtaagggaagtgttacaaaaatatcccacaaaaacccccaaatcatcccccaagtggagagcactatatagtaactcacatgttctttaagtcaaaaatcagcccactttcaaagatggagatgttcattaagttgctggcgccaaatccttagtgtccaaataacaaaaagaagccaaactacctta

SEQ ID NO: 1468 - DNA, 371 bp, Zea mays
  unsure (1)..(371): unsure at all n locations
tatntaatcaaacgctcgatagatgctagtcgagctgtgttctagcccgaatcctcgaccttcgagcgatgtccgactattttatccggatccgtactctcaagtaaaatgctctgatgtgttggtctctaattaattattatacaactccgccaaatatctctgtgtccgaaccgaacccaaaacctgcatcggcagtgaatttttaagatgtcacgattcgccttctccgactaaaaatccaaagcctaccgaaatcttgagataaaaattgttcgtaaatagcatgcgagaaaatttcaagtgctgcaaactcaaaatctcgatccgaatgaagactcaatcgtctgcatcttgtcgcggttcctcgt

SEQ ID NO: 1469 - DNA, 403 bp, Zea mays
agcttgattataaagatattagtgcgagtttattaagtctatgaggtgagctctcgcgaacacaaacaatcactgagaggagccctcaagagacacgcgcattttatcccgtggtttggccaagtaacacttgcctactttcacgttgtggcgtcccaatggacgagggttgcactcaacccctttcaagggatccaatgatcaacttgaataccacggctttcttccttatagtctttctcccgtttgcgaggaatcttcacaatttggagcctctcgcccttacaatgatgatcacaaaagaaacacagaagtaagggaggggagcaacacacaagactcaaatacgcagcacaaccacgcacacaagtgaagacttgagctcatatgacaacacagagag

SEQ ID NO: 1470 - DNA, 444 bp, Zea mays
ctttgaaagctggattacgacttcccctgttctattttgtcttataggtgctgaaaatatatgaaatgtatcttcaccaacttacccccgaagcaatcataaagatgaatatcttcgtgtgggccgcgagaagccaacgtctggaacctaatgcgaatagcttctgcaacatacacgaattgttatacgagacaaaaccctggggttaggagcaatatcacaataatgttggctgctacagtttacgtctctcgtctgggacaagctgtcctgtgcaacctttcgaatagattgcccgcgactggttacagaatgggttatgtgaaaagacctgaaacacggaaatattaacgatatatttgccatttggaaccttcggccaccgagcgaaggtgaatgataaactgcgaaaagcccagaccttcgattatgctctttttggac

SEQ ID NO: 1471 - DNA, 412 bp, Zea mays
cagcttgacacaccattggacattatacatattttttctgatatcaacaatattcagttcatgcctcagcatgcaaaaacgggtcttatcaagtggcttagcgaaaatattcgctaattgatcttccgacctcactccttctaaaatgatatctcctttagcaacatgatctctaaggaagtgatgatggatatcaatgtgcttggtgcgagagtgttgtacagggttattggcaattttaacagcactctcattatcacacaacaaaggtaccttttctagaactacgccatagtctagaagagttcgtttcatatataaaatttgtgtgcaacaagcacctgcggcaatgtattccgctttggcagttgacaaggcaacacttgtttgatttttgaatgctcatgaaact

SEQ ID NO: 1472 - DNA, 410 bp, Zea mays
agctttaccaaatggacgtgaagagtgccttttttatttgaccaatcaaggaggaggtctatgttgagcaacctcccggctttgaagatagtgagtaccctaaccatgtctataggctctctaaggcgctttatgggctcaagcaagccccaagagcatggtatgaatgccttagagatttccttattgctaatggcttcaaagtcggcaaggccgatcctactttattcactaaaactcttgacaattatttgtttatatgccaaatttatgttgatgatatcatatttgggtctactaacgaatctacttgtgaagaatttagtaggatcatgacacaaaaattcgagatgtctatgatgggggagttgaagtattttctaggattccaagtcaagcaactccaagag

SEQ ID NO: 1473 - DNA, 434 bp, Zea mays
taagcatgctagagattcagtggtggtgtctaataagattgaatgtgacacatgtgctcttcacatgccgaacgtgtttcatactaagcacgccaccctactagatgagtttgatgagttacaatcttgatctagcttattggatgcatgttagacttgtcctagctttctaattgagctagtggagaataatgctatgatattctcatttgagaaagcaacttattgagtgtgatggaacctctcaagatatgaggcccacctacacctgttcttgttccaaagaccttggacggctatgtgggtgtgccatatagcttgacaggaccacgaatgtacttcttaacatcccaagagtgattaacccatttcacatacattggcccatatatcggagtaaaggggaaagagtatgaattccttaattacattca

SEQ ID NO: 1474 - DNA, 412 bp, Zea mays
agctttcatccttcttcttcacaaacagtgcttgtcattcccaaggcgaagtacttgggcgaataaatcccttatccagcaactcctgcaattgcttcttcaattctgccaactcagtggggggcattcggtagggcctcttggaaattggtgcccttcccggtcgcaactcgatgggaaattcaatatcccggtcttggtggcattcgtggcaaaccatcaggaaagacatctgcctactaacagaccactgggatcttcttcagaggtaactccatcatagagaaagcacatgactgagtaaaaccttgactgcgcagaattaaggtgaagttcccacagaatggaaaattaacttccacggtacggctggctacatcaagcacaacttggtgcaaggtcatccaattag

SEQ ID NO: 1475 - DNA, 226 bp, Zea mays
tctcgcctaaaccacgcagccgacgcgagacgggcatttactacgactgctcgcgcccggacacatcaggcccccaaccgcgcaattttgatccggaccctaccatgtgacattggggacagcgctctgcgcaaaatccccggccggacacactcgcttcacgggcgcactgacccaacccctgtctacctatgagaccgccgaacctcgctctcgcggacgtaga

SEQ ID NO: 1476 - DNA, 393 bp, Zea mays
agctaggtagaatctggaataaatcgacggttattttttctcgtccacagaaacttctgacttgatgtacagtggttggtggctctcactctaaaatattcttgaccttgctgggatcaaccgcaatccccttggcagactacacgtgttccaaaattggatttcctccagccaaaatgcgccattactgaatttagcatataattgatgctgccttaagcgcgctaatacgatccgcaaatgccgagcatgctcctctttattcttggaatatatcacgatatcatcaatgaagaccaccacaaatttatcccactcgggcatgaataccgagttcatatgtttgtgaagtgggcacgagcatttgttattcgaagacatacccgatattca

SEQ ID NO: 1477 - DNA, 339 bp, Zea mays
aactcagctgaactacctgcaatggtggcccagcgagaatttattgttctctgaaaacagaataagggggaaacaaaattgggacgctcaggtggattatcataggcgagaactggtggactgggcgcgtaataacctaacggagctcactggtgcatctatttatatagatcaacagccgtggcattcattttggtgaagacacattggcggccggagaaagaaggaggtcactaacgccagttactgtggcattcactggagcaacgactcagccgatatacagaccatatatatcgacctattgcgacgtggtaacaacgtatgaacgttgcatgc

SEQ ID NO: 1478 - DNA, 305 bp, Zea mays
aacgaccgggcttaagaaaggatctaagtctatgatcttgacatcacttgtagctctcttatggtcatgttttcctcctaagcttcgactcgttcggatgggcaaactggtatccctatttagttgtctctgcttgatgatacattgtcgtttctcaatctacccaggaaaggatgcccataaattttctgaatatacgccttgcgttctcattctctcaaggctataattaatctccatcgttatctgtgtatctataggcgctcatcttgaccttgaattgctacagggctaaaatatgctgg

SEQ ID NO: 1479 - DNA, 339 bp, Zea mays
tctgcatcggccatgaaaccagctacgcctctagaagcacctagtgccttgatctttctgcagacggcgggaaatggtctgccacggtggtgccctcggcggcttagcgggtcccgggaggtcgctgaactatgagcgagctcccgggagtcttgcgcgtgacatacgatgccacggggtaaatagtctggcactggtacggctctataaaccgggcgcgggcgtggtcacaggccgacgcagacgcactgaggttcacgcacgggcgtgctctaagtgcacccccgagtgtcagccgcgttgaacacgtgtgtgcctgcttctgccatggatcaacga

SEQ ID NO: 1480 - DNA, 406 bp, Zea mays
agcttctactgtactgatttaggaactacttctattcttcgccctgcgtatggtttcgaattgacttcttctccgggtttatagggctatcgcttttagaagctaagtgaaggtgccggatggaaactcactcttgactcgccatctccatatcatagcttgtgttctgccgtgagcaaaagagttctagaaatgcatagagcaatgaagtgactccgtaacaatagattcgtaatgaagtgttccccaatagattcgtatttcttctagcgctcgtgatgtgagattcgtgatatgagattatatacgctttacccgaggcagatagacccaaagtccagaatgaatgattggagaaagcaaggtcaagtcaagaagctaagtctagtattgcaagggaacaagt

SEQ ID NO: 1481 - DNA, 340 bp, Zea mays
tgagctccatggatacgacgatagtggccactatatcttatcttgtaaaaaataaaattctgtgaccctgtctagaaccctaccgagtctaacagtactaaattgatgctcgttttcctcatgctgtgaagtttatatagttatatactcgatcaaaagaacaaagcaatatgggtacatggaattttaaatgggcactctcacgcctaccttcagctccacacaaaggacacacaaccatgcctttactcacacaccatgtgccaagaggctacaaccattatgctcgcctccactcacacgcgtacgtgcctaatctgcctaattctactaaaagctt

SEQ ID NO: 1482 - DNA, 398 bp, Zea mays
agcttgagtatatcaccgaagccaggtcttttttttgtttcgagaaccacgttgtctcaagttcctactcttccgataggttctcgtttgctattgtctgcaactgaactgttgaaagacttgtcaagccagtctactcgaattcgagtctcgagctctctctccaagaatttgactcgcttatttggtgaactgatccatccacactctgtggtgtgattgagttgcagggatggagagcgacgatgagatattgagagtgcctgagctgggcctgaagttgccgggagcctccacgtcaggcagggaggctggccctggcgctgctggcgcaaaccgctccctatgctagtcgtacactgcgcaagccatcgcgcgccgccgctgtcgcaacctcg

SEQ ID NO: 1483 - DNA, 385 bp, Zea mays
ctcaagctacaacttcatccatatcatggattggctcggaattatttcatcttccttcaggcctgctggcagcattcctgactcccatgaataacaataggcccttggtccgaaggtatctccatgcagacataagctgggtgagaaattgcttcaaaagcatgtacggtaccacgaccaatgatggcgttcgaggggtattccatgtcaacaatatcaaacacaattcgctcagtccttgtgttattaacaaatgcgaacgttaccggcatggtaatcttcccgagtgccacaatctgccgcccttcgaagccacaaagaaggtgcgcagcatcatgaatctgtgatcaggctcttgcatctgtctgaatgcttcgtcaatata

SEQ ID NO: 1484 - DNA, 411 bp, Zea mays
agcttctaaagggagaacacgtgatatgtttttctttcgtgcaattcgaaaaagatagaccttgtgcagcttgtcaagcaagtaaacaagtgggaggagcgcatcacagcaagaatgtgatgaccacttcaagacccctggagctactacatatggacctcttcggacccgtcgcctatctaagcataggaggaagtaagtatggcctagttattggtgatgacttttcccgcttcacttgggtatactttttgcaggataaatctgaaacccaagggaccctcaagcgcttcctcaggagagctcataatgagtttgaactcaaagtgaagaagattaggagcgacaacgggttcgagttcaagaacctttaagtggaggagttccttgaggaggaagggatcaagcacg

SEQ ID NO: 1485 - DNA, 373 bp, Zea mays
  unsure (1)..(373): unsure at all n locations
gacacataaatctcagcttgccccgaacctcccttttgagtcagatcacttgctttatattgtttgttcattcggagcatacaatctcctatattccctcaaaagctcatggacacaatgctaatggcttcccaaactagctctcccctttcttaccaaatatttcttctgatggatatctttgtgtccaagatatcttgtatcttgcatcaagaacagcagccacaaaaatcaacaagtcaatgtgctctatctccttctctttgtcctttcacttccgcttacgcctgcccctcccatatccatactaatcctcgtcctcatcagtcattctcatacgaattgntgtttgtgtgccactactcccactact

SEQ ID NO: 1486 - DNA, 386 bp, Zea mays
agcttgtgaaggttcttcatccccacatgttcttattttgatgccacaaccagcccatgctggtcttagctattaagcatgcatctaaaccggcctcttcttttgctaaatcaactaaataaagattgccggctaatacacccttaaaagctagtgaaccatcacttcttgtaaagacagacacatctacatctgtaaatagacagttataccccatgttgcataattgactgacatatagcaaattatatccaagagactctactacaaacacattatagatagagcgctcattagaaattgcaactttacctaaccctcttaccttgccttgattcccatcaccgaagaaaattgaatcttgagaatccttattcttgacgtat

SEQ ID NO: 1487 - DNA, 340 bp, Zea mays
  unsure (1)..(340): unsure at all n locations
ngaccacaacactntctacagtagcagccttcatctcttttntatcagctcatcccaacaaacaagtgtgtaaattgaaattgttgacaaagcagcacaatacaccttactatcacaattaatctagctaagcactatgtagacccacttccctctaactaacatgacaatgtagtgtattcacaggccatatcagttgataattcaagttacttccataagacaattcagggggatgagccttcttcaaatccctctgaagtcgatgtggttatttgttctgtttgtcaactgcatagagcacaagatctgcttctgtatctctctcacacggtactgt

SEQ ID NO: 1488 - DNA, 408 bp, Zea mays
agcttctccgccagtctgagcagttctaactatataaacaagatctcaatgcaaaacttgaagccgaagctcagcaaaattcggatttgagaaaactactgacaaatcttcaagaaaaatgccttgaatttagcaacaagtgtattcaacgactaaggaaaatttttcactcagttggagccagcagcgaaaattttaccccctcagctgaagatctaccaaaaaccttcgaacacattgagggggagattgacgagctcgacgaagtcatagctgggcatggcgacttttgtgcctgggtggcttctcgagggacagctgcagcattcctgaaggctggctgtgatcatgagagaattgtcaacaggccaaatttcactttgtcaccatcaatcctggatgacattc

SEQ ID NO: 1489 - DNA, 352 bp, Zea mays
  unsure (1)..(352): unsure at all n locations
tacggaccttanattctcagcgttggcaccgtggtgtagccaccctagccattcgtagtatacgatatcgactaggttagccttgccagagacccgtgaatcaccccaagccctcatacccagcagaaccttaccggagaccccgaatcaccctcggcggacttctttcacccgccggcgaacatggacccggtgagtgtctacgccattttgcaatatctcacgtgtgccgcctctaagtcacctggttaagccttccgagccaacccattgatctatttagtcatgagcagccgaagtactcgtcgccgactatctgccccggctacgcacgtggaccagccgaattcga

SEQ ID NO: 1490 - DNA, 408 bp, Zea mays
agcttgcaaagctggagcttctaaaaaagagttgtcgcttttcttctaaaatcatcatgatttgataaatgtgtcatgccaccgcacataattctcattctcaggtcattggacacttgttgttgtgcatgttccactgtacaagcatataggcgatattgttggcaaaacgtatttaggcaatttgttgttcatgcatatcaaccatatcaatatgtttggttgtagttctggagtaactataaacatttattatttgtaggaaattatgatccttcctgttggtgctataaactttgaagaagcaatgtagatgggttcagacacctgtcaccatctcaaggtatccttcacttccaataatgtactgtagatacaacttaagtcgctatatgatgaggcatcaca

SEQ ID NO: 1491 - DNA, 290 bp, Zea mays
  unsure (1)..(290): unsure at all n locations
tatgaaactcagcttgcaatagtgattctcctgcaacactttgtcttcatcttgtctatccgctcctcctctgcctcgtaacttttcactctntgccaaaatgaaaaattaacaatattgctatttagttgctgcctagtaccacgtacactttaaaaaaacaatccacttttcgccaattaggttcaatttaaacaaagccggcagcggccagacgaccaagagatttgatctttttccagatgagaacaaaagaggagcatatttacgtgatttgacgggacaattat

SEQ ID NO: 1492 - DNA, 411 bp, Zea mays
agctttatcaaatggacgtgaaaagtgcctctttctattgaccaatcaaggaagaggtctatgttgagcaacctcccggctttgaagatagtgagtaccctaatcatgtctataaactctcaaaggcgctttatgggctcaagcaagccccaagagcatgatatgaatgcctaagagatttccttatcgctaatggcttcaaagtcggcaaagccgatctactctctttactaaaactattgcaaacgatttgtttgtatgccaaatttatgttgatgatatcatattgatatcatttgggtctactaacaaatctacttgtgaagagtttagtaggataatggtacaaaaattcgagatgtcaatgatgggggagttgaagtatttcttatgacttcaagtgaagcaact

SEQ ID NO: 1493 - DNA, 457 bp, Zea mays
  unsure (1)..(457): unsure at all n locations
tacacgcgaagccctnttcgtacgttgcaggcttgcattgtttctccttcccttgcagaccggctggccgtgcccttcttgacgcgacgcatctgctagcactccgtcggacgcgggcgatcctttacccgctacgagaccaagacagtctcgttagatgagacgacagacgagtatcccgctaccaaataaatgccggtggcagcggtacagcaaaagcgtataaattccgccgcggacggcggacagctcggcgtgctctgtcagaggaaacgcccggcactgttggcggcggcaggcggcaacatccgtggagtatggtgttgagtccccaaaagattaatacacgtgatgtcgaatgtttaaataacaattacgaatctanatatagatgatctataaacttattccccatatgtcgagataaatttatcaatctattaaacatatattaata

SEQ ID NO: 1494 - DNA, 411 bp, Zea mays
agcttctaagggagaacacatttatgacttttttttgttcacttcgcgaaagacaggatttgtggtcgctatgccatgcaggaaagcaagttggcacccaccattcacacaagaacattttgacgaccgactggccactggagcttctacacatggatctattaggcccgatcgcttacataagcatcggcgggagtaagtactgtctagttattggggatgattattctcgcttcacttgggtattctttttgcaggaaaaatctcaaacccaagagaccctcaagggattcttgagactagctctatatgagttattcttaaggatcaagaaaataaaagcgacaactggacggagttcaagaactcacaaattgaatgcttccttgacgatgagggcatacagcatga

SEQ ID NO: 1495 - DNA, 377 bp, Zea mays
  unsure (1)..(377): unsure at all n locations
tgtgaaaggtcttcatgcccacatgtgctgagcggcgatttcttagtctgcccatgctagtcttagcgagtaagcatgcatctagaccagccttctcctttgcaaaatcaactaaatagaggttgccgcctaatacacccttaaaagctaatgaaccatcacttcttctaaagacatacacatctatatttgtgaatagacaattatatcccatattacataattgacttacggataacaaattatatccaagcgactcaactaagaatacattanaaatagagtgctcatttgagattgcaatcttgcctaagcacttaaccttgccttggattccgtcaccgaatatgagtggatcttgcgaatccttattcttg

SEQ ID NO: 1496 - DNA, 423 bp, Zea mays
cgctgcaagcttctgagaactttccggtagagagctttgtttttctctcatttgtaatacgacggaagatcgccacccatctgggagcgagatacttagatgaatcccggagttcaaggccaacacaattctgcaccattacattcacttcggggaccacctggcttttatttaacaaccgggctgattctgtcaagtaatctcggcaagcacttcctcaagtaacttcttctgatcctggatctgcttgcccatgtgagaaccatggtttagccaagatagatcgtaactgaactctggaatcttgcagctattaatggttgcaagcagtggctagatccttgatggcgaaaaccatccaatgctaggcaagaacatttctgcatatatcctctcattgcttgttctctccagaagatcaat

SEQ ID NO: 1497 - DNA, 350 bp, Zea mays
accttaaaactagctttttctatgtgacggagcttcctgataggtttgctgcttgggcgtggcctgatcaaagggaacagtcttgagttcttcttggctctgcaactgtgccttcctctgctgcttgtctgttgggctgagcggcgcggggacctcccgctggtcaagaagcattgtacgttcctctgaccaagcacgaattcccgctctatgttgcgcgccgactgctggttgccgtagatcgtgataacgcctatcagacctggtatcttcatacatacgtacagtccgaggatggcagcttcgaacttattgagtgagcccccgcccatgatggcgttgtacggata

SEQ ID NO: 1498 - DNA, 415 bp, Zea mays
  unsure (1)..(415): unsure at all n locations
agcttctaaagggagaacacattttgggactaatctttgttcattntgagaaagacagggtttgtagcgcatgttaagcagggaagcaagttggcgttcatcatccacacaagaacatcatgacgaccgacaggccgcttgagctacttcacatggacctattcggcctgattgcttacataagcatcggcgggagtaattattgtcttgtaattgtggatgactattctcgcttcacttgggtgttctttttgcaggataaatcccaaacccaagagaccttaaagggattcttgagacgagctcaaaatgagtttgacttaaggataaaaaagattagaagcgacaatggaacggagttcaagaactctcaaattgagggctttcttgaggacgagggcatcaagcatgagtt

SEQ ID NO: 1499 - DNA, 404 bp, Zea mays
  unsure (1)..(404): unsure at all n locations
agcttatttagggtgagaacggatcaccatttatataattcttaataaaatgatagggcactcaatatattttagttcaaaaattaatagaaatatggcctgataataatccgattcgatcttcaaatcttatattgtaaaatttatagttcattgtcatccattagcttactcgaaatctattttattagtagtctaataagaaatatgagcatgtttataggatcagtccagcgacaaacctctagggaccaatgttagcatctagagaaggttataccctcaaatgtttgtcaagacacattcgagaattccatcataaaaaccatcatggagctaggaacctaccctatcntccgctagggcagaggcctaatcctctatcaaacttgaccttatgacaa

SEQ ID NO: 1500 - DNA, 359 bp, Zea mays
tgagcaccgcctggtccaccgagacgcatgtcttctctttcgcgccgtgcgccgtatgcagccccgcgaagctggccaccaggagcatcgcgacgacgcatacgcaccttgcctggagctccatatttttttttcttggtgcctggtagtgcacctcacgctctgctggcttggctgcactacactgttggccaattacccctgagattgtgtaagctcttccactgtctgcagagtgaaagcttcttctggactgtctaacgcagaagataactggttctctgcaatgatcacattggacagagttttcttgaaggtgtttatagcatcctctggatccccttttgctatagatgcct

SEQ ID NO: 1501 - DNA, 413 bp, Zea mays
  unsure (1)..(413): unsure at all n locations
agcttctaaagggagaacacgctatatgttttttctttcgtntaccttcgacaaagatagaccttgtgcagcttgtcaagcatgtaaacaagtgggaggagcgcatcacagcaagaatgtgatgaccacatcaagacccctggagctgctacatatggacctcttcggacccgtcgcctatctaagcataggaggaagtaagtatggtttaattattgttgatgaactttcccgcttcacttgggtgttctttttgcaggataaatctgaaacccaagggaccctcaagcgcttcctaaggagagctcaaaacgagtttgagctcaaggtgaaaaagataaggagcgacaatgggtccgagttcaagaaccttcaagtggaggagtaccttgaggaggaagggatcatgcacc

SEQ ID NO: 1502 - DNA, 359 bp, Zea mays
atactcagcgtgaacatatcgcttaaggacatgagtgctctatgttcactcgcaggcatcataatgtgcaccatagaaccaataaagctctctatgtccaaacaatcgctgtgatggaacacactcggtcctttgaaacaactctaagaacctaccccattcagatcatatgttaagacaacacggacttacaatctcaattccgatgacactcatcaagtattcatcttatgggaaaaacatgaccaatagaattgtccataacttgtcatttgatcccaataatggaattaccaattccagcatacccagcatgcgtagtatcaccacatgaataggttaacaaatggcacacactg

SEQ ID NO: 1503 - DNA, 413 bp, Zea mays
agctttaccttggcccgcccacttcagagtcgtgttcttaccccaagtacaacgacatcaccgatctagcccagtacatcatgagctaccaagtcgtcgttgcatcatctagaggggacgccaccaccatggccaaatccttcatcatcactgtaacacccaggtgttacctagggtttttttcttagtgcccaactggtgaccattatcacatgtaaatcaaattgagcaaaagacacccaaatttaggagcaagggtttaattaaatatttttcatgtcaaggatcataccttaacacatgtcatcaacctcaaagtgagaaaaatgcacaaaacctaaaataaccctaagtaagccatttaaagtgcaaaagggaaaatctgtaaaaatattatgaacacataaaatcat

SEQ ID NO: 1504 - DNA, 409 bp, Zea mays
  unsure (1)..(409): unsure at all n locations
agcttgtgaagagtgttgcggcctttgcttttgttcttctccatcatcacnntgagcagagttatggattgacctaacatgcctcgggtgaaatcttcctccgaagcccctggtcatttcagaaaacctgaatgcttcctcccttctttggcggaaatcattgtcagctcgaatgtattcgtccatcttctggagcagcttctccaatgtttgtggtggcttcctggcaaaatactgcgctgatggccccggccgaagccccttaatcatggcctcaatgacaatttcattgggcactgttggcgcttgtgccctcagacgcagaaacctccagacatacgcctgaaggtactcttcgtggtcctgggtacattggaagagagcctgagcggtgactggcttcgtctga

SEQ ID NO: 1505 - DNA, 345 bp, Zea mays
tcggtgatgggtaaaaatttggcagcaaaacatttctttattagctaatgctgtggtaacttcacacctactcgtctgtttatatagtgctgcaggtaagaaggcgaaacggcagggtttttacaccaggcgggcagcaacttgtactctctgcgcagtggaccgtaaagaccaaacagtgactctgcaaggtgggaccgacaccatctcgggaaatgaatcgtttctcggcaacgagctcacggaaagtgttttttggaccttcggcttcccgaagcttgagaggattctttcacggctcaagctcgttacgaaaaacgatctaacgccgcgaaaggggctact

SEQ ID NO: 1506 - DNA, 412 bp, Zea mays
agcttgtccaactggagatagttgggacatgttttttgagatcgccagaggcgtcagtgcatagtgggaagtgggaacctaagacgcgatagcaatgagaaaatagtaagaccgaagttgacatgagaagagatagtaagatgagacttgaaaggataagatatacctaaagatttagcattgaataggagtgcatggaaaacaactatttatgtgttccttggttacatatcccttttagtgatgttcctcagttatgtaattgtgtaagtgatatgttcactgaggaacaaaatgagctcgtagaatcagctgcagagatgctttatggtctgatacatgcacgatacattctgaccagtaaaggactggctgcaatggtaattgttcttctctaaccggtgtactgaca

SEQ ID NO: 1507 - DNA, 339 bp, Zea mays
  unsure (1)..(339): unsure at all n locations
tggttcggcctctactgacctggagaaagctgatgctcttatctgtgtcgatgttcacagtgcgctcaatgctgcattgaccggttaattggggtcatcttaaattgcctgtcttttagattgagtttaactttgcgaatcctaaataaattatagtccatctaaaacatggacatattgttcttgttacctgaatcctgcatggatttatttttgtactcgtgaatattntaactctggagctcaaaacccggagttgctttctttttccgctgagttgcggccttggatcaaatgaaatcgatgttgctccatagctcccggaaattgttaaatatt

SEQ ID NO: 1508 - DNA, 410 bp, Zea mays
agcttgtgaagatacttcattccaacatgtgttaatctgcgatgccagagccagcccatgttagtcttagcaattaagcaggtgtcgagttcagctctatcaaagcttactaagtatagctgaccctctaacactcccttaaatgctattgaatcatcacttcttctaaagacagtgacacctacatcagtgaataaacagttggagcccattttgcataattgaaatacagaaagcaaattgtaatctaaagaatctacaagaaaaacattggaaatagaatggtcgggagatatagctattctacccaatcctttgaccaaaccttgatttccatccccgaatgtgatagctcggtggggatcttggtttttctcgtaggaggagaacatgatgttctcccctgtcat

SEQ ID NO: 1509 - DNA, 444 bp, Zea mays
  unsure (1)..(444): unsure at all n locations
tctcaagggagaacacgtgatagggctaaccaatgttctatttcaaaaagataagccttgtgcagcttgtcaagcaaggaaacaggtgggaagctctcatcacacccaaaatgtgatgacaacatcaagacccctatagctgctacatatggacctcttcggacccgtcgcctatctgagcatangaggaagtaagtatggtctagttatcgttgatgacttttcccacttcacttgggtgttctttttgcaggataagtctgaaacccaagggaccctcatacgcttcctcatgagagctcataatgagtatgagctcacggtgaagaagataatgagcgacaacgggtccgagttcaagaaccttcaagtggatgaagtccttgaggaggaagggatcaagcacgagttctccgcttcctacacaccacagcataatggtgt

SEQ ID NO: 1510 - DNA, 403 bp, Zea mays
agctcaacattcttatggagagaagatttctttcttcgacgagctccgctgtggtctcttgctctttttagaagatcgagcatgaccgccttatcttctacgcttaaatgagcgtagagtcgcatgaagcttctttcatcctcctcatcctcatatgtgcttccactatcatcttcattatccacacaacatatgtgggaatcgaaatcggaagacaaaccttttggagaggtggattcatcgcttggtctccatcgttcattttcttcttccttcaaagggttagtttcacaagggcaataggatgtagaagcacaaaatgaaccatcatgtttggactcatcaaatctatttttaattctagttcacatatcatgtgcatcacgaatagattcattataat

SEQ ID NO: 1511 - DNA, 314 bp, Zea mays
aagatggcaccgcgtgaagaactctatggacggaaatgcacaacaccgttattttggattcatacgggagaaagtcaagtatttggtccagacattctttataaagcagagaagcctatgcacattgtcagagagaatttgaaaatagcccagtcaaggcagaaaaactatgctgacaatagaataagagaattgatatatgaagtcgaagacttcgcatatcttaaagtttcaccaatgagaagaatgaaaagatttaatggtaaaggcagattatcctctcgctatatcgacccattcaaatttttggaaag

SEQ ID NO: 1512 - DNA, 389 bp, Zea mays
agcttatccacacgtagcttagaaacttgtttttttttctcccagaccgcgcttttcatattgtgtactagcttatcccaaggccgaaggtccctgtgaacctattatacatggaaaacatgttagtcgcgcttttgaggaccttcggaagatgaaggcccccaacaccaaaaccctcattcaaacaactttatggtctaaaggaagaggagtacactcctcgcaccgggtaagtcaagttgaatattagtatacttagccttgcttgtggcacaattttacaggtctcttgcaagaaatggttgatggtttgacttggccatccaccctgccaccggattggacggtcgagtgggatgctgtcttacacgagaagacatgagtagtag

SEQ ID NO: 1513 - DNA, 411 bp, Zea mays
  unsure (1)..(411): unsure at all n locations
tatccatgtaagggcattntatccatgaattatctcattttatgccttgcttatatattaataaacggtctattttgtactcgatacgatattccaaggctgaagaatatccaagcaaaatcattccctttgttttatgaactggaaaaactgcatgaacgtattgtaatatttgtatcacataccttttagttaattaagttaaataaaactaggctaactcattgatttcctaaaaaccaatccgttaatggagtggcaactagctatctttgtgtagaaacaagagtaaaacaaaatctttcttgtctctctatttgctatgtgaaacaagaagcattgctacaggtgatttaaacttcacattagctgaactacaccccaaccaangaacatgtagcactattgtat

SEQ ID NO: 1514 - DNA, 182 bp, Zea mays
tactatgatctgatgagcgcctggtcataccaatatgattaagagcgccaaaccaaaatcttagatgaagcttaccactccaaattatcgactcatactggaaacaacacaatgtactatgatccgaacggccatttctggcggccaacgatgaccaccccgcaccgcaacccatgcgtccg

SEQ ID NO: 1515 - DNA, 140 bp, Zea mays
gcttgccttcgtttgtctatcgatcgtattcaacggaggcgcggagcgtgccaatgggaaaatcttcaaggcatcaagaagatgctcctcgacgagaaaaagggcagatggacccgcttgttaccggaggcagtctggcc

SEQ ID NO: 1516 - DNA, 382 bp, Zea mays
  unsure (1)..(382): unsure at all n locations
ctagtagagctgataattntggaatcgagtggaatcgatgtgatacttggattatactacttgaccaagtatgatggaacgatatcatgtgccaaaatgatggctacattaaccagtccgcaaggagaaagaactgaagtcaatgtcagcatgccaacaaacctagaggcaatgataaattagttggaagagaaatctttgcagcacatcacaatactgcgtgaatactcacacgtacttctggcacaaatactcagcttgccatttatctctcatatatcgtcctcatctcaccctaccccccctcctacaacttctaccgcgcaatcacccctccctccaccttacctcgcccctctccctatccactctaccccccgcc

SEQ ID NO: 1517 - DNA, 95 bp, Zea mays
  unsure (1)..(95): unsure at all n locations
ggcaacgacctcggcctaatcgccttaccaaccgatcgtatagtatgcgcatttaatgcggngatcgcccgacaccttatcctgacacaggcgcc

SEQ ID NO: 1518 - DNA, 224 bp, Zea mays
  unsure (1)..(224): unsure at all n locations
gcatgcaagcttgtatacctgcctcaataaggntaactccacaaacttacagtgcttgagaaggtttttcagcaagagttcgcgatgagacccagtatctacccacgccttcaccattcacaaaaatcattcctttgtccattgagctcatgtcaagaacaacggcatcatctccatctggctcatcgaagcatctctagcatgcgagcgaacataccgacacc

SEQ ID NO: 1519 - DNA, 357 bp, Zea mays
  unsure (1)..(357): unsure at all n locations
ntagctgcgacgatgcggctatggcatcgcaacaaagatgtgacctgcgtgactgtccgccctctctagcgagcacgcgagcttcatgcccctcccaccaccgctgccactatcctaccacctttcctgctccaccgacccttcccacccactccaccctccctccccattcctctccccgctcctctccccccctatcccgcctcccgccgccccccctccccccaccccctcctccccccccccccccccctcccccgccccccccccccccctccctcccccctcccccccccccccccccccccccctcccccctccccccccctcccccctcaccccccgcccatccccccc

SEQ ID NO: 1520 - DNA, 169 bp, Zea mays
  unsure (1)..(169): unsure at all n locations
agcttggcatacaactgacaatctcatagcctatggagtactnttcttaaatgctcctcatgctcttgcttaatctgggaatatataacacaattatcaatgaacaccactatgaactgtgccgaggtagtcatgaacacactgctaatcagtacatgaagcaagctgc

SEQ ID NO: 1521 - DNA, 416 bp, Zea mays
  unsure (1)..(416): unsure at all n locations
agcttcgaaaggccatgagaaatatatattttactctgatgcatacacgattattacaagcaattgaaattaagttcttcattacttgcttctcatacaaaaaatgaaatggcctaaaggataaaggtacatcacaaataggatattcctcagtatatatgcaccgattctggcacaacgctattcgatgtaccagctctcgctcctcccctgagtcacgcatctgtctctcccaccttcttgatcacctctccttctcatccgctccacatcctcccacttacattcatccctctacctcgcgccatacctcgctctccgccccaccctataccancccncccancntccgcctcccaaccccctccccctcccccttcccccttacgtcccttccctcttcatcctccctcccc

SEQ ID NO: 1522 - DNA, 351 bp, Zea mays
  unsure (1)..(351): unsure at all n locations
agctntagcttggcaattttgtcccaatatgtatatgggtcgattagaaatctacttatgcatgtacacacacattacagtttacttcaagttgttcgttttggattaaagccaactgtttggactgatgcacagtgaaagtcgcctagagggggctgaatctgcgctacccatcaattttaaaactctatcacacctctttgcccgcgggccaccgctacatctaccacccaccttcccacatccacttcccccattctcctaacacctcattgcagttattgaatccttctgttcctcctctatctctcccacatccctactccgcccatctccaccccaattccctcc

SEQ ID NO: 1523 - DNA, 153 bp, Zea mays
tgagtcagtcctcttacgcaggatagctgatgctcaaagaaataatgagggtatgaaacacattcgtgagaaaataagggctggaaaaggcaaatgtttcaatgaagatgatcaaggtattgtatggttcaatgaccgcatagtggcgccaaa

SEQ ID NO: 1524 - DNA, 168 bp, Zea mays
  unsure (1)..(168): unsure at all n locations
agctntgcggacaagatctctactgnttctgtgtccttctttgagagaaagattctctaaattggcggcacgcctagtcgcaaattcttcttccgtctcacctgttttgcaccagatagactattagcaaaagatccggctcccgtatacagcacgcttctcccctcc

SEQ ID NO: 1525 - DNA, 396 bp, Zea mays
  unsure (1)..(396): unsure at all n locations
tctctacaacaaattcgtccttgtcaagagggctgtcttcatccgcttgatcctctgagcttgctaaatttgaatccacatcttggacatactttttgcatagaactgcccattccttaaggagggcacgaaacttatcggntcttccatttcgcaccaccatcaacaatcacaactctttcgaccgctgccgccccctggcctcaaatcgaccactccctcccccccttgctccccccaccctctcctccccctcccccccccacctccccccccctaccccctcaccccccctccgtcccacctcacgctcctccctcacccccccgccccctccccttcccactcccccatctcccccctccgcccccccccgtgcctcccccaccccccccc

SEQ ID NO: 1526 - DNA, 301 bp, Zea mays
ttcttctgacgccgagttctgctaaccaattagagttccgcggcggcgccaaggaccgggcaacccccaccatgccaccccaatgtctcatactcaacgccatttgggtgctaacttacacgaaacctatggcgatcaaccaatctttcacccaaacgcgatccgagtgtgaccagaagcgcatggcggcgcaaaccttgcagcgcacaacatggccggagtttgtcatcctccgcgcacaagcacccaggcggcgcctccttagcgctacaactaagcgacataacgtcaactccatagc

SEQ ID NO: 1527 - DNA, 225 bp, Zea mays
agcttgtgcagagtccgcttgaactaatcttcggagaaacccgacctcattgcaacatgacaccagaaggtccaacccaaaaagcgttggctgagtttaaaattatttcagagcatatcagcacaagagacctggttcaagagtttttggctttcagggattttcctatcttaaaagaatgggaaatgccgaaactagaggggcgaaaaaacgacacggcacttg

SEQ ID NO: 1528 - DNA, 234 bp, Zea mays
gagaaaatgagcgaatgccgtaaggaaactacaccatgcgaaattcaacagccacatgcataacacaggcacacatattgagcaaccacttacacatatgcccaggaatcaggattacgggaactcacaccgatcgcacgacgtgagattgaatcttacagcggggaaacgcgcgtccagctatttcctatggcggtgacggaaaggcgctgtaacacccccgtaaacctcctc

SEQ ID NO: 1529 - DNA, 284 bp, Zea mays
actaagcttggaagattcttcatcccaacatgggctagtcggcggtgccagagtcaacccatgttagtcttagcaattaagcatgtgtcgagttcagctctatcaaagtctactaagtatagctgaccctctaacacacccttaaatgctattgagtcatcacttcttctaaagacagtgacacctacatcagtacaaagacacgtgtagcccatttgacataactgcgaaacagaaagcaagctgccaccaaggcactaacacgaacaacactgcccaccacc

SEQ ID NO: 1530 - DNA, 140 bp, Zea mays
  unsure (1)..(140): unsure at all n locations
agcttactcctccctgngaagggccattcanctggcgtcaagatctttgtatgcccggaacatacaagctcggccaacgatcaaggcgaggtctacagcaaccgctcggaacatcgaacagctacgtcgcttntaccctt

SEQ ID NO: 1531 - DNA, 394 bp, Zea mays
tcgcgcgacgaaacgcacgacgacatacgtctactaaactgagtctataagtggaacgccgcgtcactacacgccgtctttcccccacctacacacccctcccgctcgcatacgccccccccccacctgtcccccccgccggcccccccggcccgcccccccccccctcgcctctcgccctcccgcctcctcccaccgcccccccgcccctcttcccagcgccccccccccaccccctcccctcctcttccccccccatcccctcccctcgtctccccctaccccccctcccaccctccccctcccccccccccccccaccgccctcccctcacccccccccaccccccccctccacccccctccccgccaccccccccccccggccccctccc

SEQ ID NO: 1532 - DNA, 318 bp, Zea mays
  unsure (1)..(318): unsure at all n locations
agctttagtgttaagggagagcgatttgttgtgttctctttgagctcttgcgcttggattgctttctatcttctcaatctttcttgcgagcaaaactcaattgtcaccaaggcatgagacaccaattggcggggggcccttgcgaggcagcccccattccgtcccccttcgcgccctccctacactacaacacaccacctctccccccactttcttccatccctcttcccccccccnnngaggcaccncactcactcctcactccctcccccctcccacctcactcacgcccccccccccccctctaccccctaccta

SEQ ID NO: 1533 - DNA, 259 bp, Zea mays
  unsure (1)..(259): unsure at all n locations
ctaagcttgcagatgctttctctcaanactcttcgtcgtatgtctatgcagcagcctgctgcttcagcccttcttgcgtacaaaatgcatccagactttatcctcaacttgcaaccgagccctccaaggtaaaagcataaaccaattactgcatcccccttcgctcncccgtaacccgcacgcaccaccaccgacagccagatttgcacccggccactccaccccgccatccacgcatantgtgccaacgccaagcacg

SEQ ID NO: 1534 - DNA, 252 bp, Zea mays
  unsure (1)..(252): unsure at all n locations
agcttncgcaaaacttgaggccgaagccatttatgttcagacttgtaaaaatcattgacaagccttcaaaataaatgtctggagttcagcaatcgatgcgctcaacggctgaagcaggtgttctattttgttcgcaccagcccccacaccctctctcacctcccctgcttacctcccactgccctttcgcccattcctcgtccccctctcctcttatctctcaccccctctcctcattctcacctctcctct

SEQ ID NO: 1535 - DNA, 382 bp, Zea mays
  unsure (1)..(382): unsure at all n locations
agctcatctatgctatggattgtttttgagtcacnccattttccctcggcttttctggcagcttcttgacttacatgacaagcaacgggtccttgatccgaaggcaccttcatgcaaaggcaaccaggatgaataactgcttttaaagattgagggtgacacgaccactccttgcattgcatgggtctctcaccgttacaatgcgtaacacaacttgcttggttcacaactgaactctcacacatccctcactctccctcacatatcctcccacccctcatccttctcctcctctctccatactctcctcactctcctactctctatgtcttctcccctcttaaacactaccgcaccctcacttatccattcttatcccgcc

SEQ ID NO: 1536 - DNA, 111 bp, Zea mays
tagcgtgggagcctgaaaccagagattgatggcaaaaattcccttgatatggtcaactactgtagaataatgcgtggcaggacacaagccagtggtgcagagccgcatttc

SEQ ID NO: 1537 - DNA, 168 bp, Zea mays
ccaacaatctggtccggccttaatcgacacagacgggcgacctttcctgctcaacgtctggtcccatcttaaactattttacaactttggcgcctgacagagggcccatgcctgcataatgaaactatcacacgcttgctgccttccttatcctaagaccactttttc

SEQ ID NO: 1538 - DNA, 335 bp, Zea mays
  unsure (1)..(335): unsure at all n locations
agcttctatagggagagtactatttaggattaaccaatgntcattgtgagaaagacagggtctgtagcgcatgtcaagcaggacagcaagttggaacccaccatccacacaagaacattatgacgaccgacaggccgcttgagctactccacatggtattatttcgcccagccgcttacataagcatcggcaggagtaagtattgtcttgtaatgtggatgactattcttgcttcacttggacggtctttttataggaaaaatctcaaacccaagagactttgaagggaatctttgagacagcctaaaatgagtctcggattgccaatcaaaacg

SEQ ID NO: 1539 - DNA, 216 bp, Zea mays
tttcaccatagaagagaggaagcttacaagtattctgagatgactgcggccttcgtaggaagactccaccctaggcatgtcagaacaatccacaatcctagcacaaatgatgacagtgcaaatcacaaccagagcagtccgcaaagcttcacaatcttcgggaatgcagcaaacctcttaaaggtcaccacccccaagaggcagaaatgggagaag

SEQ ID NO: 1540 - DNA, 239 bp, Zea mays
agctcgaagccatgttaatgtgcataggcttgtataatgcgaatttactcaagcttagctacgggcgtctaggtttataccgaaattcaaacctttgacttgcgaatatcctttggccacaagacggactttgtttcttgtcactacaccatgctcatcttgctcgctgcgcgagacccacttggatcctacaacatcttagggtaggacgtcggactaaacgccatacctcatttctc

SEQ ID NO: 1541 - DNA, 160 bp, Zea mays
cccatcatccacacaagaacatcatgacgaccgacaggccgcttgagctactccacatggatctattcgcgccgattgcttacataagcattggcgggagtaagtattgccttgcaatagtggatgattattctcgcttcacttgggtattctttttaca

SEQ ID NO: 1542 - DNA, 117 bp, Zea mays
agctgggcgactgtcatatcgacctctagatgtagtcctacgtaggcgcatgcgccgctatgtacgacaagctcccgcgaagtcgccgcttggacagcgatcaaagctattgcaccg

SEQ ID NO: 1543 - DNA, 188 bp, Zea mays
  unsure (1)..(188): unsure at all n locations
tctaaagggagaacacactntaggattaacaaatgttcattctgagaaagacaggatttgtagcgcatgccaggcagggaagcaagttggagctcatcatccacacaagaacatcatgacgactgacaggccactggagctcctacacatggatctattcggccggattgcttacataagcatcggcg

SEQ ID NO: 1544 - DNA, 292 bp, Zea mays
  unsure (1)..(292): unsure at all n locations
agcttgaagccatggtatgtagcataggcttgttatatacaaantgactcaagcctagctacgggtgcatagagttcaccgaaatccaaaccttcgacttgtgaatatcccttggccacaagacgagctttgtttcttgtcaccacaccatgctcatcttgcttgttgtggaagacccacttggttcctacaacattctgattaggacgnggaactaaatgccatacctcattcctcgcgaagntntcgaggtcctcttgcattgtcaacacccaatcccgacttccttaac

SEQ ID NO: 1545 - DNA, 159 bp, Zea mays
actaagcttttcattctacagtttgcgtgcagcttcgtttgcaccacaagcatccgttttctttcgagcggcgctgtcatgcatgggcatcaaatccgcttggttccccggcgtcgacacatggttccaactccgcggctcgtctctgctcccgcccac

SEQ ID NO: 1546 - DNA, 203 bp, Zea mays
agcttatctccccctaggaagggccactcattattgccaagatcttgaagcccagaatatacaagctggccaacgatcaaggcgaggtctacagcaacgcttggaccaccgaacagctaccgcgcttctacccttataaagttccaagccattcgtgttcctcgtttttacgcgctccaacaagactaaccatcacggaccct

SEQ ID NO: 1547 - DNA, 138 bp, Zea mays
  unsure (1)..(138): unsure at all n locations
ctcttcagaattcttgagcccctcaggcatccgattgtttcatatatgctccactcggggctacgaagctaggttttggctnatcctccctcttcattcagatttgatgcgtagctgaacaccatgtacgcggctcat

SEQ ID NO: 1548 - DNA, 405 bp, Zea mays
  unsure (1)..(405): unsure at all n locations
agcttgtgtacaccaggaacatagacaaggttagctctccgaatttcagctgtacatactcattcttttcaaccatctaagcaaactgacactttntcttttaatcacaaaacgttgacgagtatacagaccggctaaccaacaatgaattgtcatcaccaaccaaaaggtatgtaagcaagtacattgggtattataaaacgagaacaaagcatgtcgtttaagcttacaactacaaattctattccatattgctataatacacaacacatgcaggataaagcacacctaggttagcaaagccatgccggattctacatgttccaagaatgacaacatttagcccaccctgaaacacatcaaggcatggcccaaaactttacttctctagaatgcggccctgcc

SEQ ID NO: 1549 - DNA, 230 bp, Zea mays
cgtgaagagtgccttcctcaatggaccaatcaaggaggaggtctatgttgagcaacctctcggctttgaagatagtgagtatcctaatcacgtatataaactctctaaggcgctttatgggctcaagcaagccccaagagcatggtatgaatgcctaagagacttccttatcactaacggctttaaagctgaaaaggccgatcctacactctttacccaaacacttgaaa

SEQ ID NO: 1550 - DNA, 366 bp, Zea mays
  unsure (1)..(366): unsure at all n locations
tctaaagggagaacacgtgataggtttgactaacgtgcaattcgaataagatagaccttgtgcagcttgtcaagcaggtaaacaagtgggaggagcgcatcacagcaagaatgtgatgaccacttcaagacccctggagctactacatatggacctcttcggacccgtcgcctatctaagcataggaggaagtaagtatggtctagttattgctgatgacttttcccgcttcacttgggtatactttttgcaggataaatctgaaacccaagggaccctcaagcgcttcctcaggagagctcanaatgagtttgaactcaaagtgaagaagataaggagcgacaacgggtccgagttcaagaacct

SEQ ID NO: 1551 - DNA, 271 bp, Zea mays
aggcatgcaagctttctcgactaagtcggcgacagggccttatgtacgggtgatagtacccgcaagcggcaaggccgaccgagccgagggacttccacgcctttgggatacggatacctcacttgtgccttccgcgagaaggaactctcgctcacacaaacatccctgttaccggcagagagtccagatgcttgaaacaagaggaaaaaggacgcagctcttgaagcatggcgagggtgtgtttttctggcctccgcggccgtacaaagca

SEQ ID NO: 1552 - DNA, 151 bp, Zea mays
  unsure (1)..(151): unsure at all n locations
aactaagtgtctttgctattatagtcagggagtataacaacattcaaattgcaaggtcgtattcactgatctttatttcgctctaagaatactttatacctaactgtntgtctcttgcatttctgactctgctgttatgacactgatgcaa

SEQ ID NO: 1553 - DNA, 428 bp, Zea mays
  unsure (1)..(428): unsure at all n locations
agctntatattattatgagactaatacctatgcaaaacctcgtctctcattattcgataacacacttgcttgcaaattctcgtttcataattactgcaaattcttgtttgtctgtaatttgtagtctaccacaacattatgtaagcgttttgcctcatttccccattcccctaaaaacaaggtcgttgaggcgtggcttagccatgctagaatcaatgaaatccaggtagggattccccatgacagtcaaaaaaaactatctttaatcttgcaaattcttggttcgtagtaacttgctttataacattttttttgctagcaagttaccgagggccaggacgatatattaagatcccgcaacataatgaaccacgatttataatggtcattnaacagccgccaagaccccatgatgacaacgatttaca

SEQ ID NO: 1554 - DNA, 384 bp, Zea mays
  unsure (1)..(384): unsure at all n locations
actaagcttgtgaaggaaacaccagatcgcttatgcctaagaagaaccaagacctgtgcagcacgcacctagaatttctaatgctaaccttgctatgctgtgtcgggaaatattgtcaagattacctctccctaccgcccaaggatgatgagcggacaccgaaggatggtgatggtgagccacggctgccgtaggatgatgagcggccaccaaaggatgaggaggaacggtttgattttctcccaccgcctgaccagtcatcatctgaccaactatcgntgtcagacctcaagcttctggcaccacgccggtatnggtcctcactgtcgcgtgcccacccaccctcgctctttgaacaactacatctctggtacgcctggtcct

SEQ ID NO: 1555 - DNA, 310 bp, Zea mays
cttattcaccacatgttcgtgaatatcttgtggaagccgagcttgttgtcttctcctttttgcccttggtcctcgatcccaagcaattttctttttgaccctacagcttgtttctcaataaaagattggcctttcttggggcagcggaggccaccacatgataatactttaactaattgatcacttgtgcacgaatgaggttcacatgagtctaaactagtaattactacctcatacgcaatatcgagcatgacatggccatcaactaacttactatgcgagtaccacagcatatcaatacttttcacct

SEQ ID NO: 1556 - DNA, 111 bp, Zea mays
caggagcaaggcttcgtactcagcaatattatttgtgcagctgaagtccagtcttgctgcatagcaagttttaaccttggacggtgaaactcaaacaggagctggtcctgc

SEQ ID NO: 1557 - DNA, 186 bp, Zea mays
agcttgcgggcgacttgactcagtgttatttttaattgcgaggagcgcactgggctagagcgggaaaaccttttatttattgtatacatgtacatttgagcaatttagcgtgcacatttacattcttaaaattgtgatgctagccgacggtttgaaaataaggggtaaaactctttgtcaaacatt

SEQ ID NO: 1558 - DNA, 274 bp, Zea mays
  unsure (1)..(274): unsure at all n locations
tctaaagggagaacacgtgataggtttgactaacgtacatttcgaanaagatagaccttgtgcagcttgtcaagcaggtaaacaagtgggaggagcgcatcacagcaagaatgtgatgaccacttcaagacccctggagctgcttcatatggacctcttcggacctgtcgcctatctgagcataggagggagtcaagctggtctagntcttgctgatgacctcttccagctccacctacttcttccttctccctgctgacaccccaccccccct

SEQ ID NO: 1559 - DNA, 157 bp, Zea mays
  unsure (1)..(157): unsure at all n locations
agctttgtgaaggntcttcatccccacatgttctaagcggcgatgtcacagncagcccatgctagtcttagcaaataagcatgcatctagacccggcctctcttttgcacaaccaactacataaagtctgccgtctaattcacccttaaacgctagt

SEQ ID NO: 1560 - DNA, 54 bp, Zea mays
tctggttccgtgcaccattctccacgtccgccgctcatcatccaccttccgcca

SEQ ID NO: 1561 - DNA, 234 bp, Zea mays
agctcgctacagctacttgtataatacagctgttcgtcagcgccgttgcagaatgaaggaaaagacccttccgcgcgcctgagagcacctagagaggtggtgattagctgtctctataacaacaaaagatttacagacacacacctgattattaagacgctagtataaacaagcgcatatggaacacgctcgcgtggactcaaacgatcacaagaagtatcacacgagacacga

SEQ ID NO: 1562 - DNA, 168 bp, Zea mays
  unsure (1)..(168): unsure at all n locations
ctaagcttgaccggggcccggtaccgcagaagtcattattgtgttattgttagttaagaactcgtcggtgacgtggaccgggctaaccnctctaccattctccgattcgttgcgcgcatggcctctgtgtcataccgtgaagctccttctgcccattaattgcactct

SEQ ID NO: 1563 - DNA, 393 bp, Zea mays
  unsure (1)..(393): unsure at all n locations
agcttgataactgcttattccgacctctagatgtatgttctacgtggccgcatgagctgctgtgtatgacaagctccgatgcagccgccacttggacgcnggccagaatggctgcaccacgctgtccatcgtcaagcaggaggacctcataggcgttgcctacgacgccacgactcgttgtgctctagtcacgcccacacgacgcccatccatccactacccccccataaccactatcacagcccacaatgtcatcaatacactactatgaccgaccgcacggttccctctctcccaccatgacccctctctaacctactctcgaatctcaccctatccctacaccccatacccccttctccccacatactcacactagccattcctccctca

SEQ ID NO: 1564 - DNA, 330 bp, Zea mays
tagcaagcctcttgtagctgtacatgctgctgtttgcttaattgtgcgcggcatgtttctgacaggtttatgagatccggcttcacttaaaaaacaactctactccatacaaaagcttggaccctaggtaacttatactatccaaggtaatccacactaccagcagacgaacaatataacccctctgtcccatagctttattacagacacttgcaccccatacaaaccctcccctccctctctcccccccccccccccccccctctcccccccctccccccccctccctcccctccccctctccccccccctcccaccccccccctcccc

SEQ ID NO: 1565 - DNA, 119 bp, Zea mays
agcttgggcttggagcgtcgagtaatctgtgcgctattgccgcgtagtcactacggcttgaggattggcgtgcttgttgtgaaacgaggattgctgcgcttggctctgaaatgtgacaa

SEQ ID NO: 1566 - DNA, 231 bp, Zea mays
aaactcagctgtactagggacagccacatgctattaactattctattcgaaaccccaacgacagcaatgatatgtctgcagtttatttacacaccatcatggttgtgagaatatatggtctgtcgggtctacccgcgaaccccacgtcgcttatttacttcgacaacaccttagtggcctccctccctacggtcaccgcccccactgttcttctcctcctccccgctcccc

SEQ ID NO: 1567 - DNA, 310 bp, Zea mays
tgctatgaagattttatcccaacatgtttagtcggtggtgccagagccaacccatgttagtcttagcaactaagcatgtgtcgagctcagctctatcaaaatctactaagtatagctgaccctctaacacacccttaaacgctattgaatcatcacttcttctaaagacagtgacacctatatcagtgaacagacagttgtaacccattctgcataattgagatacagaaagcaaaatgctatctaatgaatctacaaaaacaacattggaaatagaatgctcaggagacatagctatctcagcccatcc

SEQ ID NO: 1568 - DNA, 403 bp, Zea mays
  unsure (1)..(403): unsure at all n locations
agcttcacacctctggactaactcggctgcatcattatttgctgtcggccagnagaaacgagacctgaagaccttccccactagagctctggatgctgcgcgcatcccgcactgtccgccatgcctctcatctaacagntgccttccagccaccgccggcccgcccccccacgcccactccgtctcgtccccttcccccccacctcatccacccgcccccccctccccatctacctcccccccctccgctccccccttcttcctccccccgtccccccccaccctccccgctctccccttctcccctcccctccccgccccccccccccccctcgccccctctccctcccttaccaccctaccctccccgtccccccccaccccccctccccccccccccccc

SEQ ID NO: 1569 - DNA, 254 bp, Zea mays
agcttctaaagggagaacacgtgataggtcttttattgctcaattcgaaaaagatagaccttgtgcagcttgtcaagcagggaaacaggtgggaggctctcatcacaccaaaaatgggatgacgacatcaagacccttggagatgctgcatatggacctttttggacccgtcgcctatctgagcataggaggaagtaagtatggtttagctattggtgatgacttttcccgcttcacttgcgcgctctttttgc

SEQ ID NO: 1570 - DNA, 107 bp, Zea mays
ctaagcttgagaaattggagagttattgggcgggtggtgaaaacatctttttaagggcacttgatctttatgtggaccaaggcgaagcaacacctttgcctacgtgc

SEQ ID NO: 1571 - DNA, 256 bp, Zea mays
  unsure (1)..(256): unsure at all n locations
agcttcagctccatctatgntacggattgcttttgagtcagnccattttccttcggcccttctggcagcttcctgacttccatgaatagcgatggcgccctgatcccaagggattttcaagccaagaaaccaccggtgaacaatcttctacaagcacgctgctgcccacacttacacacgccttgccaggcctcccacgcccagacgtttccactgcaattcatcaaccccacagtccctcactcctcaaaaccta

SEQ ID NO: 1572 - DNA, 218 bp, Zea mays
cagatacaaaccttctcatatttgtgtattcttctttgacatactaagaacttcagatacaaaatacactggaacctgctttctaacctggacatcaagcttctcctgaacaagcgctgtacttactgctgagtgcgaagctcccccatataatacgacaggacgccctggcactgcggtactaacgctcgccacccacaccctccggcgcccccccc

SEQ ID NO: 1573 - DNA, 402 bp, Zea mays
  unsure (1)..(402): unsure at all n locations
atcctctagttgatacctgtcggcatgcacgcttcggntctcttgctctacaactcttgtttaatgactagaaataacttgggaatttatttaaggacccgccttcttatcaccattgcttttaacttctgaagccccaaaagcaaagcttcgtattcagcaatattatttgtgcagctgaaatctaggtttactgcatagcatgttctgactttggaaggtgcaaccaagacagcagctgcacctgccccaaaggttccccaggaaccgtcacagaacaccggccaaactttgggatccgtattcgcttcttcttcctgagcccctggcgtccagccagcgaagaagtctggcaacgcttgggactggaccgaggatatatgcacataatcaatgcttaaa

SEQ ID NO: 1574 - DNA, 173 bp, Zea mays
  unsure (1)..(173): unsure at all n locations
tgtncaaaggatgagtttactatgcttatgatcgattctctcatagatgtaatagccacttaggagcttatgagcctattggattgctattctagatatcatcagatatggataaagaaagaagatgcgcctaacacttgctttctagaacctaatggccctattgctccttt

SEQ ID NO: 1575 - DNA, 307 bp, Zea mays
agcttcaccattgttctgtatgccttatcttttaactctagggcgctgcgcgaagccctggagaacccaccgagacttgtatcggctcaaagaaccattctcctttggattatgcgctcagactcacttgctagtcatcacattgtcgcctgggcaacgggacaccaagctccaggtgcggttggcacggacggcctgccaccctttcttcatagcgcgatgctagtgagaatcgacaagggcctatcaacggaacgacgcctgatggtgaccgacagagaggtttttacgacgaggaaaagacggt

SEQ ID NO: 1576 - DNA, 285 bp, Zea mays
actaagctacatatgacgaggtatgtggtcgctaaaatgttctatatcatcaggccaacaatcggttcggtccttaatcgacacagacgggcgacctttcctgctcaacgtctggtcccattttaaactattttaaaactttggcgcctgacagaggggccatgcctggataatgaaactatcaacgtcttgatgcctttattatcctaagcccattttcttgtttgtcaaaaaacatgcgtcatagatcaaaaacatttttcttagcctatcagcatgactaag

SEQ ID NO: 1577 - DNA, 182 bp, Zea mays
agctcgcaaggtggatcagtgagagctgtttcttcattctatatctcagaggcacggatggctacctccaccatgggccaacgccgcagatcacagaaggtgtccacgaacaccaatttgttacacgcagctattgcgaggacgaagcctggcgaccgctttcctgacgtgggatattagat

SEQ ID NO: 1578 - DNA, 96 bp, Zea mays
tttattgtcttgctacatgcttttaatggctttctttttgttgtttgacgccacagcgggagaagcgtatgggctcaagccactgcacatctcttg

SEQ ID NO: 1579 - DNA, 105 bp, Zea mays
ttcacgaacaaaacctttataagaagatcttgtacttgtctttgtatttccttagcttctgtaggatcggctcgatatggtggacggctaggaagcgcagcccct

SEQ ID NO: 1580 - DNA, 355 bp, Zea mays
tcttagagcgacctgcggcatgcaagcttaaaggtaatcttatctacagttttattaggaatgctcaaggcaaaggtatggaacaaactgcttcaattggcagtcgatcaacagtcgcttcttccaagtggcatcctttcaattggtcataatatattctatggccaggaatgtcagtactgaacggtaaattccttttggcttaaatttgtcaattagcgcatattgcgaatccactgctccatgtgcattaacttaaaaggaacttaatttatgcctttaccccctataaatgatgatctgcctgcattcatatatcgatatcatcattcattatatacttccttgtactact

SEQ ID NO: 1581 - DNA, 387 bp, Zea mays
  unsure (1)..(387): unsure at all n locations
agcttggcacgttagttcttaggttcgagtttttcagtattagttctgncgaggggctagcacgttactgccgtgccgactatcgcggcgtatgacgttatctcgtcattctttctcctttctttttttctcctttacacactccatctcccagtcttctttttctcctcttcttcctcattttctgtcctttatcttcttacattttctctttcctcccttctttcttcttccaatctactcctccctctacctctcaatctcatctcttctcttttttcccttctttctctccttcttctcttcttttcctctcacttctttctttttctcctcctcttttcctcctcttcctcttctctccttcttcaccctcccttttctttt

SEQ ID NO: 1582 - DNA, 241 bp, Zea mays
  unsure (1)..(241): unsure at all n locations
ttcttgtatatcctactacaagcaccccgttgtttgataatataagcctcatcctccctctgctggaagtagggccttcttaggccgaaccaggataaacactgtgttttattcttgcaataatccatctgggccgggacacgcaacataaaatttactagttgggtgaggggtcccntggttcaaaacgccgacagttggcgctaggtaggggcacgctgcgtgctgacaatacttttcc

SEQ ID NO: 1583 - DNA, 197 bp, Zea mays
  unsure (1)..(197): unsure at all n locations
tgattgattctttgatgtcatattaactactccctctgttcgaaaatagcattcgctctacgncgacagtaacctcggctaccattgcaggaggtggcgcgccatcgccatctccagaccatgatgctactatcgcccgagccaccactgccatagaaaatcaagctgtatttcagaggtgctttcagacctgcatt

SEQ ID NO: 1584 - DNA, 358 bp, Zea mays
  unsure (1)..(358): unsure at all n locations
tagctttatagtctcatagatgcacgccattatcagaggttcagaaggagcggcgccagtagaatcctcagctaacatattcagcacggcacttatctctgcgtcacttgcattcaaaggcacctaataaggaacctgcctctcgccgacaggaaattctccaagtgaggcaaccaaagcactaacttcttcgggagagggttgcactataaggcccaaaccgntatcaccaacatnanatttgacaccaaactggcaaaggcctgagacggaggtcaatctccaggcgactatgcattaggaccctcgacgntacacaccttcacactcaccccaccccgaacccactttcacgccc

SEQ ID NO: 1585 - DNA, 193 bp, Zea mays
  unsure (1)..(193): unsure at all n locations
ttaattgtgagaacgcattgtagtgaaanataccgaggtttaagagaaagatagggtgacatagggaggtgataggagacattgcggtgcggcacagcatcgacacatggcgatatagagatcggaggccgattggctactccaatggaatattggccgagtgttactagcaagggggagaagtattggctga

SEQ ID NO: 1586 - DNA, 223 bp, Zea mays
  unsure (1)..(223): unsure at all n locations
agctntagctccatctatgctacggattgcttctgagtcagnccattttccttcgacccttctggcagcttcctgacttccatgaatagcaacgggtccttggtccgaaggtatcttcatgcaaagatatgccggatgaagaactgcttcgaaggcattgagagtaccaccgacaacgagtgcattgtcaggccacttcctcgtccacaccaccgaacacacc

SEQ ID NO: 1587 - DNA, 386 bp, Zea mays
tcggcatggtagcagaaaatgaaaccgacttaaagatgaaaaggctattcagacctcgatagattactatagaattattatcaaatgtaaagggcatgaatgtaattttgtatgggctgtgttccgcgcctataaataggcgcacaccccccctcccttctcccccttccctcccctcccccacactcctcctcctccccttcccccctcccccaccacccccccccccctcctcccctctccccctctcccctcccccccctactcccccccccctctcctccacctctcccctcccctactccctcacccctccctcccccacccccccccctccccccctccccccccccccacctccccccccccctcctcccctccccccc

SEQ ID NO: 1588 - DNA, 278 bp, Zea mays
agcttagagctctaaaattataaaaagcttttgcttatttttaatatttaaaactctaagcgaagcggataaagatttaaatctaatttcataatacttatttaaatctttacttctaaaggttagcttagagctttaaaatttaaagaagagaatttaaataggccataaactacctggccggtgagcaccatttaaatagacctttaggctatttatttttataataaaatctaaaaacttaaaagaccccttcatacatggcgaaagtaaaggcg

SEQ ID NO: 1589 - DNA, 116 bp, Zea mays
actaagcttgacagtgttctgcgacggtttctggaaaccatcggtgcaggtgcggttgttgtcctagctgcaccttccaaaggcagaacatgctatgcgcgaaggcttgactttag

SEQ ID NO: 1590 - DNA, 350 bp, Zea mays
  unsure (1)..(350): unsure at all n locations
tgaggcatgcaagcttgccttctttcagaaacccttctggatctctacgcgtccatgctgncgacaggnacacgcgggagtggtcacagccaaagacgagggctcccgggtcagatgtagatgggaacccagggtcgggacctagccctacggcaagtaccaaaccaagaagggctctgtaactcttcccaggtaggaagaacccttcgaggtaacgggaatgcatcgacccaagggcaaccatctagctacgactggaggagtaccttaccccgatgccgaatcatctctgtaagttctatccatagagcaagtctgaggcggcaaaaactatttcccttttttgtaac

SEQ ID NO: 1591 - DNA, 324 bp, Zea mays
tatgaagattcttcatcccaacgcgcgctagtcggcgatgccagagccagcccatgttagtcttagcaattaagcaagcgtcgagttcagctctattaaaatcaactaagtatagctgaccctctaacactcccttaaagtactgatcatcacttcttataagacgtacactattccaaaagacatgagcatttgctatggaaaagaagcgtgatcaagttaaaaaacgaagaggaggcacgcacagctgcaccgtccccaggacttgaccctttggcccctcccccttccccccccccccccccccccctccttccccccctc

SEQ ID NO: 1592 - DNA, 211 bp, Zea mays
agcttactagacgctagtgtttcaagatccatccatcgacatcatgtctttaactaatcaacctaaacaatataaatcaaaatataaatctagttatcgacatcatgtctttaactaatcaatctaaaaaatataaatctagttttgaaaaccgtacgaaaaacaaagaatagataatctaacttaatgctgatttggtgacctgggatcc

SEQ ID NO: 1593 - DNA, 220 bp, Zea mays
  unsure (1)..(220): unsure at all n locations
gacactatacaaactcaagcttcatgaagcggcaccttcggcatcgcgtacaatcagtctagccgaagctgnttctttctacaggaccttcggcgatgaagcatggtcccacacacctactttcggatcaggcttcaactttttcttttgcagcccgcctctatcacccttattcagagcaccagccactctcttccttttctgcccttcggcatccttg

SEQ ID NO: 1594 - DNA, 385 bp, Zea mays
  unsure (1)..(385): unsure at all n locations
agcttacccatgatgtaggcatgtgacacgtttataggtcctcgttcatcaggncctacatcgacacggtccttaatcgactcagacggagacactacaccgagactctcttctcgcgcaagacaccccgccggtctcagctttatcatttaaaatcccaaagttcggcacccggcagacgcacaccttgtacaatgtccaacccactccgccacccatacatcccccccctctataccagggatccgccctccccaccccctcatggagcgcgtatcaccaaacctcacccccccctatcctctcacaccccgcccccctcatcccctaccgccacaccaccccccctctctccgcccttacccccctccttccacgccgtccc

SEQ ID NO: 1595 - DNA, 195 bp, Zea mays
  unsure (1)..(195): unsure at all n locations
tggcctcgaaatgcatcgccaccctcacccgtactatatgcaatggttgaataattcagggatagtgaaggttacatacatgcntcgcttgccattctcaattggcgactataatgatgaggcggattcgccaccctgtcctatgtctccctcgtcctactattctcccctccacgcccctcccccttctccccc

SEQ ID NO: 1596 - DNA, 402 bp, Zea mays
agcttgcttacttgttaagatgaccacagtgtttttcacgggtttatcggagaggacattggatttattggaactcatacatactgatgtgcgcggaccaatgagtacgacagctaggcgaggttttcaatacttcataaccttaactgatggaattagtacatatggctctgcctacttaatgaaacctacgtctgattcttacatatgctctccagcgctaccatccattccaaccctaacaccactctccaatcataatactccccctacgcactcctacaccacaccgtctaatcgtcacactcttctactcctaccaatctccttccacccactccttcttcctccacacctctccctccaaccttacaacccctcatcacttacctcctccctctc

SEQ ID NO: 1597 - DNA, 336 bp, Zea mays
agcttggtaccagtctcttctccactacatgttatatcatgcttttgttcaatgcgaacaacagctttaggtttctgaatattgtgggcacacaagagtatgggacgctaggtcacactaagcaattgattctgatataaagcaatgatctaatggtcgaaaagaattttggagcacaacaattccatgttctcttttgagggtatctacaacccttataaaagaaaaccccactagcatgcatttatgatattctaactcttcatgtcagctattcacaccatcccacatttgttggcttgttgctgcccattctgccactacaaatcccatctg

SEQ ID NO: 1598 - DNA, 195 bp, Zea mays
actcagcttatcgcattgaagcatgagcgcttccccttggcctgttcttgcttggctgtcccttgcgacccttaagcgccatcttgaatcttttgatgacgagcggcatctcttcatcattaagtccgaccgcctcaatttgtgccatcttgctagggaccgcctccttgcttcctggtgccctgagaggaaggg

SEQ ID NO: 1599 - DNA, 307 bp, Zea mays
  unsure (1)..(307): unsure at all n locations
agcttgagcagtgactgtgttcgtctgattattttggcagctagntatcagcatatccttcaacttctgccaagaagggattgcccctggccgaagagaagagtaccaggtctaagcaacgctcttgatagccatgacaaaagattttgccatgactgcagtattgccaccatacgaagatatggttggctcatagctcatcaagaactgcttcgggtctgtatgaccgtcatacatggggagctgtggtggcttgtaagactggggccatggtgtagcctcgcaattctgctcagagggtagacgc

SEQ ID NO: 1600 - DNA, 160 bp, Zea mays
  unsure (1)..(160): unsure at all n locations
actcagcttcttaccacgtcatcgcggttatcttgagaaggttgagctatgcacttccctttcagttgtgcaagctcgttnttagcctctcattttcttccttgagctcccgatatgcaatatcatctattcctggagattctagctcaaagaaggattt

SEQ ID NO: 1601 - DNA, 418 bp, Zea mays
  unsure (1)..(418): unsure at all n locations
agctntagctgantcagagctccttgntgtattatttccaggtttattttttccatcttttaacataaagagctggcggaggtcttcaccgctaaacaatggcaggaaaccttgcgactgagcgcatctgccactacattggctttgcctgggtgacaacgaatttccaactcatagcccttaataagcttaagccatcgcctttgtctcatattcaattttgactgggtgaagatatacttcaagcttttatgatctgcataaacgcgacagatatttcccagcagatagngacgccacactnttagggcatgaaccataccagctagttccacgaccatgagttgggtaacgctcctcatgacgtgcaactgccttgagcatatgcaattactcggccctcttgtctatcacacag

SEQ ID NO: 1602 - DNA, 391 bp, Zea mays
actaagcttaaagataaagcgggctttgaaagcaaagaatacaatgcagtgtatgtcgtgcaaatggccataggcatcgccccttttatacgaattttttaaagtagatacttcattaacttagcacttgaccccactggtcagagttttatgaagtaacttttcaaaacgagcttcaggtaggtgttttcggacctttggcacaaggcctcccaatcatattttttgtggtctaatctcgttctgaaagtgtttccagattgagaaagtgcattttaggcatgacatgaagaagaagatagcaaaccagaaagcgacaagttcgcctaggcatgagcacgacaaaggtgcatgccgaagttaccagccctggctgtgaacagtttcatgc

SEQ ID NO: 1603 - DNA, 191 bp, Zea mays
agcttaacaaacagagcaggccgcctgttattatgatgaccactgtatcatcctcgcacgcgacggaaggtatcgcaaaatgaccgttcctggacgaagttgttctgagcagatgatacgatctcgtttattcctaacgccagcctgtttgccagaatttttgttatgattttaatgaccctattgatcac

SEQ ID NO: 1604 - DNA, 353 bp, Zea mays
actaagctgcctttcgtgaagaaaaatgaacttcgacttgcgtctttgctttgtgcttctccagatgaagcctccatttccgaagtctagcttcatctatcctttgtatacctgaaaacacacttgtttatttcgaagcaagggttatctaaggaccttcggcaaaggtaggcccccaacagtagccccttgcgggatgagcttatttgttcgtaatgagcttagatcgcaaataacaaaattgggaggccttgcgctgaaggtgggaataacacattcccgaagctcgttattaatcgccagcttgataccacctctgactgatggggtccagtgctcacggggttcaaagg

SEQ ID NO: 1605 - DNA, 232 bp, Zea mays
  unsure (1)..(232): unsure at all n locations
aagcttatctttatttntgaaaaggngagaaataattaacacaatgtggaattatatgaaaaacataagatgtagaaagttgatgagtgcatactatttcatgagcatcatgtttattttatgatacactgcaccatatgaatagtatgatataagctgtctccatactttgacccaaatatgcgcttttggcatctgagtacaaaactgccactctgcgctccgcacatat

SEQ ID NO: 1606 - DNA, 266 bp, Zea mays
  unsure (1)..(266): unsure at all n locations
agcttcggnctgcggaggccgaaggntgaattgatctaagctgcctaataatgccagagagccctcggtgctagttgctcttttattggaacgagagatttggtacaagagcatattgccttcagagtatgggcgctcgcggagaaatgggaaatgcgcgaagagaccataaaggaggcagacgaagggggccttatcaggctgaaggataccttcaagtttggagataaaatcactcgaccacatgacgactcggtaaaaagcat

SEQ ID NO: 1607 - DNA, 180 bp, Zea mays
actaagcttgaccgaggacccgcgtcaccggattagcgcaatcgtgctcgctgtagttcaagaacccgccggcgcaggtggaccgggtaagcctctgcaccatttcccaattcgttgcgcgcatggcctctacatcaccccgtggagctcctcgtgtaccttaattgaactataccatcg

SEQ ID NO: 1608 - DNA, 241 bp, Zea mays
ggcatgcaagctttaaggagagcacagttggacttttaatgctatttagagaaagacatggctcgtagcgcatgtcaagcagggaagcaaattggtacccaccatccacacaagaacataatgacaacggacatgccactggagctactccacatagatctattcgacccgattgcttacataagcatcggcgcgagtaagtattgtctagacactgcggatgactattctcgcttcactt

SEQ ID NO: 1609 - DNA, 333 bp, Zea mays
  unsure (1)..(333): unsure at all n locations
cgacgccacaancaatccatggtagccatagcaactaagcaagcgtcagctcagctctattaaaaccaactaagtctagctgaccctctaacacatcccttaaaggctactgaatcatcacttctttctaatgacagtaacacctacatcccgaataagacaaccgctgaccattttgcataattgagaaacagacacgccattgttatctaaagtatctacacacaaaacactggaaacagaatggtcaggagatacagcaattttacgaaggccctctgaccaaacattagaattcgatctcgccaacgtgagagcctctgtgggatcatg

SEQ ID NO: 1610 - DNA, 230 bp, Zea mays
ctaagcttctaaagggagaacacattctaggattaacacatgctcattttgataaagacaggatttgtagcgcatgccaagcagggaagcaagttggctctcatcatccacacaagaacatcatgacgaccgacaggccgcttgagctactccacatggatctattcggcccgaacgcttacataaggactcgggggcagtaagtactgcctagctattgcgcctgatta

SEQ ID NO: 1611 - DNA, 137 bp, Zea mays
tgaaggtcaagtcacagagcaaggcccaatatactttgttttagaagctcttagcctatcagagaaagagtatacagaattggagaaggtactgcgtgctgccttgatggccacaggaaggttcggattattttaag

SEQ ID NO: 1612 - DNA, 324 bp, Zea mays
  unsure (1)..(324): unsure at all n locations
cttagagncacctgaggcatgaagcttgcaagggagttttattctagtagtatctctggncattttgagaaagacagggggccgnatcggatgccaaccacgatagctagtcgcgactcatcatccacacaagaacattctgactagcgacaggccactgaagctcctacacatggacctattcggcctgatcgcttacataagtatcgccgcgacgtaagactgactacctactgcggacgataattctcacttcacttgcgcgctccttctggtgtataattgtcatacctatgagaccttataggtatcctttaacccctc

SEQ ID NO: 1613 - DNA, 324 bp, Zea mays
  unsure (1)..(324): unsure at all n locations
ctaagcttcaccatgttgggaagtacgctacatgtgggctaatgattctcccactagtactaaagatagactcatatgccattgctgccacggcaactgataggatatcttgagcaagctaaattaaagcaaaatacttcaacccttcaactttccaccaatcaatgacatccaattcaagcgttcttggcggnatatcctcttcgaagtacatatccaattctgtgcacataaaagatggcggcacaactgggttaaaagccatgtatccatcagatactttcatttacttcagcatcaccctcatttactgctttactggta

SEQ ID NO: 1614 - DNA, 77 bp, Zea mays
agcttgctgcccaagtctaagatcacaaagtctttagtacacgatctatagaggaacggcgctgaagcaaccaaaaa

SEQ ID NO: 1615 - DNA, 180 bp, Zea mays
  unsure (1)..(180): unsure at all n locations
ctaagcttctaaaggagaacacgtgataggtttgactaacgtgatattcgtaaaggatagaccttgtgcagcttgtcaagcaggtaaacaagtgggaggagcgcatcacagcatgaatgtgatgatcacttcaagagccctggagttgttgcatatggatctcttnggcanccgcaccta

SEQ ID NO: 1616 - DNA, 110 bp, Zea mays
agcttaaagctcaaggttcactcaactcggtgctctgacaaggatggctactcttgctgtcagaccctaatgaatacacatcatgacccacactcgcctattaattcgca

SEQ ID NO: 1617 - DNA, 205 bp, Zea mays
  unsure (1)..(205): unsure at all n locations
actaagctctgacctgcgcgnctctctgataagtgtgtatcatagcacaatacaaaaactgaacttgtcaccaagaccagtaaaaaaatgacagttttgtaccaccgacgtgagcgagacggcatatcgtaccacggggtccaggaggtggcgtctccggcgttcgtgcggcctgctagacgcttgcgacagcttttcttttgct

SEQ ID NO: 1618 - DNA, 263 bp, Zea mays
taggaaagaactcaacatcttagattctcggaactttgattgaaagcttgcacacatagctcatttatatacctttggtcatatctctttcatttggtacaaatgcatatttcttattcttcttgtgccaacactaagactaatgtgtttccaagtgtacttttatccttactcttaggctgaaagggaaatggagcaatcggcaatggcacggcttccactcaactctgtcggcatcatctaccctttgccctactcttaaa

SEQ ID NO: 1619 - DNA, 292 bp, Zea mays
agcttcgtaagtgaaactaggcggtcactattatcattaatggctttatctttacacctagtacaaatttcaacatgttctacacaagaatcggatttatttgctacttctaatttagcatttaaatcattgctgacacctttcaaagtagaaatggcttcatgacaagtagatagttcaaaagaaagcatttcatttctcttagcttctaaagcataggatttttgtgcctcaacaaatttatcatgctcttcatacaacacaccctctcgcttttccaacaggctattct

SEQ ID NO: 1620 - DNA, 312 bp, Zea mays
ctaagcttagaaaggagctacagtagataaatggcgcatgtaattgttgttcaaacatcaaacttatactaaaaacttgcattctagcatttaaataatcataaagtagcagattctcaaaagtgacacaactattaaaatttctgataagccttagtctgttaaaatagccatataaaattaacgagttcaaggacaactagcatatgttaacatagtgtagttataaaagaagaaatatctaatttcatgcatcccaatgcactattaagctaaacacttaaacagactccaaaagtcgcacaccaaaag

SEQ ID NO: 1621 - DNA, 351 bp, Zea mays
  unsure (1)..(351): unsure at all n locations
agcttgtgaagggtattcatcaccacacgttgtatgcgttganactatagacacgcccaggctagtggtagcaagtaagcatgcatctagaccggcctcctcttttgccaaatcaactaaataaagtctgccgtctaatacacccttagaagctagtgaaccatcacttgttttaaagacagacacatctacatttgttaacagacaattatatcccatattgcataactgactaacagatagcaagctatatccaagagactcacccaaaaacacattananatagagtgctcatttgaaataccaaccntacccaaacctttcacctctgcttgattcacaccaccgca

SEQ ID NO: 1622 - DNA, 142 bp, Zea mays
  unsure (1)..(142): unsure at all n locations
gagcgactgattcatcttctactctctttgccaaacttatagcatcagctcgagatttattgaatatatcttgaataagaatttcccccaatacttcgggtggagaagctgtacaccgatcanctctttactaccatggcca

SEQ ID NO: 1623 - DNA, 227 bp, Zea mays
  unsure (1)..(227): unsure at all n locations
agcttcttcaccatgagatcacagntatcttgagaaggntgagcattgcatttcccttttagttgtgtcaagctcatttttagcctctcattttcttccatgagcttttgatatgcatcatcttttgttcctgcaaattctagctcaaaggagggtttgcttgtcgcccaacaacacgcattaacacatggtcatacactatcaatttgcatacccgtccaccagcg

SEQ ID NO: 1624 - DNA, 142 bp, Zea mays
  unsure (1)..(142): unsure at all n locations
ctcaagcttaatgccggaantgctatcaaggacgctacctcactcttatcatactcccattgtctcatggcacagggcgatgctcaggtaaaaatcatcaccgatttaaatgatataaaacatgatgatgctctccatgatg

SEQ ID NO: 1625 - DNA, 322 bp, Zea mays
agcttgcacttacgaccaaaccgcacccgtttttatatcacatttttgtgcttaacaatagcggtaaggtcaaggtaaccaagctggtacgaattaattttgctattggttcatatcgcgatgttgttgactgtgatgttgtgcctatggatgcttgtaatattctgctaggtagcgatgaagacatccacactactgatgcatctataccaacactagtaccaacttttggtcccattattcgcgctcctgctcgccaactcaaacactacgtgattaccctcttgagcttatgctccacatatttatgaccccgctaccc

SEQ ID NO: 1626 - DNA, 236 bp, Zea mays
tgcacttacgaccaaaccgcacccgcatccatatcacattcaatggctcaacaatagtggtaaggccacggtaaccaagctggtacgaactaattctgctattggttcatatcgtgatgctgctgactgtgatgctgtgcctacggatgcttgcaacattctgctaggtcgaccatggcaacctgcctcacctcgacgcacatgcgagacccacctcgttttttcccccccccacc

SEQ ID NO: 1627 - DNA, 343 bp, Zea mays
  unsure (1)..(343): unsure at all n locations
agcttgtggaggttcttcatccccacatgtgtcttcgcggcgatgctacagtcagcccatgcaagncttagccattaagcatgcatctagaccggcctctccttttgcaaaatcaactaaataaagctggccgtctaacacacccttaaaagctagcgaaccatcacttcttctaaagacagacacatctacatctgtaaacagacagttataacccatattgcacaattgactaacagatagcaacatcatatcttaaggactctactaaaaacacattagagatagagtgctcattccatattgcctcttctacacaaacctctcaccctgccctgatttc

SEQ ID NO: 1628 - DNA, 173 bp, Zea mays
  unsure (1)..(173): unsure at all n locations
agcttgcacgtatgatatcctcagagatcctgtagtccggncccgagctcacacgcagcaaccccgtgttcccctgtgatgccaccccagcgacgatggccggggccggagcacgcttcttcctctcaccaacccgcgcacgaatttctggagccttgggaccaacggatgcg

SEQ ID NO: 1629 - DNA, 159 bp, Zea mays
ctataaaactaagcttgaagacacagcgctggctgacttaacacataatcagttcgggaagtaacttggagacaaagtatcttggctttctctctttgggccttctcgaacacccattctgtaatatataacaaaagaggataaacggcattctcctat

SEQ ID NO: 1630 - DNA, 191 bp, Zea mays
  unsure (1)..(191): unsure at all n locations
agctntgcatgctgtgcttgaacattccatatacgagcccgcatgtgacacgggcgaccgccacaagtttgggttcttctgctcgccgaatccagcatgtacaaaaacttttccttttcggtcctcctcctggcaactaaacacgacaagcccgcacgcgcatacatcctccatacaacccgttcatcgcc

SEQ ID NO: 1631 - DNA, 148 bp, Zea mays
tattctcagattatatattcaatctgaacttaccaatattggatttattcatttatgaacctactcgcattgtataacatttcttttctccttttctttcttttcctattgccactctctttgactctgaagcctaactttaaacttt

SEQ ID NO: 1632 - DNA, 311 bp, Zea mays
  unsure (1)..(311): unsure at all n locations
agcttgctntacattgtcggctgcgaatgaatttttactgccagacgtgacagtatctgatacttctgaaactaattctcactagcagctttatttaaggagatgtctcggaccaccccacccacggtatttttaaaaaacagcaagtcatggcatttttcgcgcaacacagttgctaggatgtcacacccggatttcgggggcaccaaggcccgggcgcgaacataatcatcaagtgttctaagaccaagtcttacacacatgatgactcatggtatagaaacgaatgtcacatctctactatataatag

SEQ ID NO: 1633 - DNA, 291 bp, Zea mays
aactaagcttgctgattccgcggtgtaatggaaccaattttctaatctaccttagcactattactggttaccacgacacgagcttgctacattcgtctatcgtgcgtgcgtggtcccagtcccagaacaggacaattcccgctgctcttgtacgtgcggaccgcacgcaggaagttattacagccgctgtacacaaaataaaaataacctgttccactgcctgctcttgtacgtccgtcgcatgtttgtcaagaaagaacaaacacattggtactgcatgagctatagaga

SEQ ID NO: 1634 - DNA, 368 bp, Zea mays
agcttcctccagcatttcttgagcccctcagtttattctgaaggttattatatgcttccgctaggggatatgaaggcgggttttggctcatcctccttcttcatccatatttgatgatagcctgaataacaatccagcagactcataagctctgatgaagctgctgcatcaactagggaatctatccttgggaatggaaactcatctttcggacaagccttgttgagatcagtaaaataaatacacatcctccatttgccattggccttctttaccataacggtgttggctagccattctgcgtattatacttccctgatgactccggcgctgaggagcttttcactctaatccgagcaccctcggcc

SEQ ID NO: 1635 - DNA, 399 bp, Zea mays
  unsure (1)..(399): unsure at all n locations
acgaggaggtgacccttgaagaggtcaggcgttgctcttttgtgagcagctgcgacgtgaactcagtgacgctgatcagatcaacacgttcgagagcggcggagatgaccgcatcgtcgtcgagatcgacgntggccacccacaatgaaccgatcatcctctccaccaacgcgccaccgtccactancttccttccatgctcacccaccttcccctccccacccttcacgcgacctaccccncccaccccttccaccacaatgacccggcgcctccccctccttcacctcttccccctctccccaccccccccctccccccgaccctctatctctcccatcccccatcccccatcacacctaccgccccctgcaccacccccccccagctccccctccc

SEQ ID NO: 1636 - DNA, 205 bp, Zea mays
agcttcggaatcaaattgtgtcccattatttacagtaatggccttcggcactccgaaacgacaaacaatattttgccagaaaaacttttaaatagtgaccgaagttattgtggctaaaggctttgcctcaatccatttagaaaaatattccactgccactacaacatatcttaatttcccttgtgttggcgggaacggacctaac

SEQ ID NO: 1637 - DNA, 259 bp, Zea mays
  unsure (1)..(259): unsure at all n locations
agcttggaggcgtcgtttggaagcctactttatgtagactncctcttattctcttccggcgctttgaatgcgacgggttgcacctcgccagtagaggtggcgccttgttccaagctgacgatatgtttagagcctatgaacatcaattcaaaggtcacaaacttgccaataagctcctgctgcgacaatagtttatagccaaccaccccacgcattaaatgaacctgagcaggatacgaaaacacggcaccttaaaaaa

SEQ ID NO: 1638 - DNA, 280 bp, Zea mays
  unsure (1)..(280): unsure at all n locations
taagcttcgggttgactaggcccctgtgccgcatgttgatggngtcaccgtgccaagaagctgtggcagaatttcgggtggtagccgagcagatcaggaccagagatctagtccaagaatatctggcctataaggtgttcccgacgctgagtgaatggaacatgtcgaagctaaaggggacaaaggagaagaacgaacttgtgcgactggcttatcgatntcaatttgagaaatagcttaaagggccattgcaagaatgggtagaaatgatagaaaccat

SEQ ID NO: 1639 - DNA, 314 bp, Zea mays
  unsure (1)..(314): unsure at all n locations
nttgacacaacacaaactcacaaaaactctattctactattttcaaaatctctcaagcggcagctgaggcatctatcactttggcctttattctctcnccctttgggatcaagcaccaaaacgggaccacatctggcctctcaaccccatcgcctcacccaaagcttcaattaacagcccctgcgtccaagcactccagcgccgcccgtcgcacccccactccccccaccagcccgcctggctgctcccacccccccctcctcgcgtcccctcgccccgcccgcccaccgcgcgccgctcgccccaccctcccc

SEQ ID NO: 1640 - DNA, 249 bp, Zea mays
  unsure (1)..(249): unsure at all n locations
ccncgcgccgcatccaccgcaccacgcttaccaacaccatcaggaagtacaaatcgtacgctccccacccccaccatcacagcagcaacatcaaaacatcccccacgtcccaaagcaggaagacttcgccgatcagncatatcgcggagtcatccacacgataactggcgggtccagccctgaccttcacaccaagcgcccgaagcgcgcccactaccgccgcatcacccatgtcgcccgccgtcgccc

SEQ ID NO: 1641 - DNA, 372 bp, Zea mays
  unsure (1)..(372): unsure at all n locations
agcttgacattgtcttcctggtggaagccaatgccatccttaatgtcaaggcggctcgcattataaagcatgctacgagaaaatttaattttttcattttctagctcatgctcggcaattttagcatttaggttagctatatgatcattttggtgctcaaacatacccacggagtctgggtagcatccccattaacgcctctcctctagcaacaacagaccatgtcaacactccatgantagtttgcggccgcccgtgctccccccacgccgagccctccttcctcccccccctgccccccgtcctccttccacctctcccctctctcgccataccccccttctcctcccctccccgcttcttcatcccctc

SEQ ID NO: 1642 - DNA, 324 bp, Zea mays
  unsure (1)..(324): unsure at all n locations
agcttataggtgatagcttcgtcgctactcctgataggatctgccgaaggtgttctctttctttaggatcttcggctacggagcatacccccaacacccggtccaataggtgcgacccatttggctatctatatcgcgccctccctccactccatcgtcagtcgcaagaccatcccatgttccacgcaccgctgcacaacccgcgctcctcgcctctttcgcgtcgccgccaaacgcccaccatactcgtctccctccactccggcccctttctgcgcctggccncacatgttgtccctgcctttccgggcccatgtcctatcg

SEQ ID NO: 1643 - DNA, 221 bp, Zea mays
ggagaaacgaataggtcgataacgctaattaaacaagtataccctgcgcagcttgccaagccaggaaacatgtgggacgaacacatcacagcaagaatgtgatgaccacctcaagaccactggagctgctgcatatggacctctttggacccgtcgcctatctgagcatacgaggaagccagcatcggctacctattgttgatgcaccttcccgctccact

SEQ ID NO: 1644 - DNA, 307 bp, Zea mays
agctcgacattgctttgtttcccttggtggaacccaatgccatccttaatgctagggcgtctcccattataaagcatgcttctagcaaatttaaacttttcatttttaagttcatggtcggcaattttagcatttaatttagctatgtgatcattttgctcttcaatcatagcaatgtgatcatcaatagcttcaacactaatatctctacatctcgtacaaatagtaatatgctcatcagtggatgtagagggcttgcacacactcaatcctcctatttcagcccctacctactcttcccatctct

SEQ ID NO: 1645 - DNA, 408 bp, Zea mays
ttctcataacgggaggtcacgtgagtaattttattaacgggcacgccgaaaataacagccactgtgagatcgtcaggcgccacaaaagcagggaggctctcatcacaccaataatgtgtgcagacgtcaagaaccctggcggtgtaacatgtggacgactttggaacccgcagccatcacagtatatgcggcagccacaaaggttcaccaatagccgacgcatatcaccgcccacactcgggcgtctttatttgctgcttcttcctgagcccaaggcgcccatgaagcgatgaatcttcggaacgctcgtgactggatccgaggacgtatgcacataaccaatgctaaacttgttgagctccacagcccactttccaactcttcccatacgctgctctgttcctcaca

SEQ ID NO: 1646 - DNA, 378 bp, Zea mays
agcttcggaatctctagctagaagacggttattcaacaccaccgaaggatgaactggctaacagcttaccctataatcgcataaaggcataagagccaattttgtatctgcaaatgaattacttcactcgtttatacttaatgctgccctcctcttgcagggcttgatccttagcaatgcccttagagcacagaacaatattgaagatgaagggtatatgatggctctaaacaaccttccgtcagaggcgattgaactaaggaatgaaggccttgaaaaagacaagacattaactttattgggcaacaaagccacagaagacgaagctaatctccaaagcctacagcgcagtccaaacgaacgagccgaacgaccttc

SEQ ID NO: 1647 - DNA, 260 bp, Zea mays
  unsure (1)..(260): unsure at all n locations
tngataccagctgtggcggaaccgcccgaattattccattttaagtgcctaagtcccacattagaggctagaccacacttaaataggaataacacgtcagtccctcggatctagtccgacgaggccactaacaggatcaagtaccacgtactcactcgatggtgaggcacagagcaaataccctaaaacataaaaccaacattaacgagtattaaatttattacaacatcatccaagctttagcccacgtcgcgctcatt

SEQ ID NO: 1648 - DNA, 209 bp, Zea mays
  unsure (1)..(209): unsure at all n locations
tgcaagctgcagcaacttcaacactcttttttggttatgtgctngaagtacttaattggctccaagacgtctagtacatttaccattcttttcctttttggggtcactgatggccccttttggttntttgctgtttcaatatttactgcaggactcaaaacttctaatgctttttccttaggcggctttttcggttcctccattttttc

SEQ ID NO: 1649 - DNA, 343 bp, Zea mays
actaagcttataagattcttatcccacatgggctagtcggcgctgtcagagccaacccatgttagtcttagcaattaagcatgtgtcgagctcagctctatcaaaatctactaagtatagctgaccctctaacacacccttaaatgctattgaatcatcacttcttctaaagacagtgacacctacatcagtaaaaagacagttgtagcccatttgacataattgagaaacggcaagcaaattgtaatctaaagaatctacaagaaacacattggaaatagaatggtcaggagatatagcaatcttacccaatcctttgaccaaaccttgatttccatccccg

SEQ ID NO: 1650 - DNA, 390 bp, Zea mays
  unsure (1)..(390): unsure at all n locations
agctgtgngaggaatatgtagaggatcttatctctttggngcgccgagaattgaatgcgagagctcttgtaagcagccgagacgtcgaaaacttggatcacctgaatgcgaccggtccgtctctccacccaaaatacccacaccacgacgcgcacaaccccacgttgttgcccacgcccgacaccaccccaaccccccccccccctctcactcaaccacccctctaccctcccgacgacaccgccgacactctccccccatcatcccacaacccctaccctccccacaccacataattggaccccctcactccaccctaccccgactccccacaccctcctcacgcaccactccctccccaatccccgccccacaccatgcgaccccccc

SEQ ID NO: 1651 - DNA, 434 bp, Zea mays
  unsure (1)..(434): unsure at all n locations
tctaaagggagaacacgtgatacggctaaccactgctcatttttaanaagatcgaccttgcgccggttgtcaagcaggtaaacaagtgggaggagcacatcacaacaagaatgtgatgatcacactaagacctctggagctcctgcatatggacctctctctacccgccccctatctgagcacccgacgacacaactcacttctaccactccttgccccctctcccctcctcctcgtctacctgcctctccttccatctccacctcctccctttccccgcccctctcccccccgcccatctccccttctcctatctgcctccccaccgtcctctctggtatccttccccctttccgcttccccccgccccccctcctctccctttccctcctctcccccccccctcacgcccgacgtcttctcctcccgccccc

SEQ ID NO: 1652 - DNA, 405 bp, Zea mays
agcttacccatgacgaggtatgcgaccagtttttggtcctcgttatcaagcctacagcggcatggtccttaattgacttaagacggagacactacaccaagactctcttttcatgcaaggcacccacccggtctccagctaatcatttcaaacccaaagtttggtacctggcagaggtacatctttttcgatgctggacccatcatggccatgatgtataccaccaccaaggtttaactccggtatcaaggtcaatcccttcccttctatacctcccaaacacccccactcttgtcttcccattcacggctacacctcacctacccttaccgctcctcggcccccacttcgcacttcatccattcgcccttctagcccgtcccccccttccacttccgctcgacc

SEQ ID NO: 1653 - DNA, 51 bp, Zea mays
gacttgatgaacagtgggtaggggttctcactccaaaatgtccttgacttt

SEQ ID NO: 1654 - DNA, 209 bp, Zea mays
  unsure (1)..(209): unsure at all n locations
tgcttaagaaaatctggtataaatcggcgtttataaccagccagnccaaggaaacttcggacttgatgaacaacggctgggggcttccactcccaaacgaccttgactctgctgggatccaccgcaatacccctgacagacagcacatgtcccagaaatttgatttcttccagccagaacgcgcatttactgaacttggcatataactg

SEQ ID NO: 1655 - DNA, 275 bp, Zea mays
  unsure (1)..(275): unsure at all n locations
agcttcacacatgtacatcacaagccanaatttatgttgcagcacacagncacgaatggttagtctacaagctagctcaaccaaaattcttcatgtcattgacaatcaatcatgacacttaaaacatcgtggacacatgtcaaccacgtgttcgcgttatagatggtcaaatgggccgtgctagatgggtcggcccgaaaaacagcccatttaatagtgtcgggccgtgcccggcacgagagtcgtgtcgtgcttggntccgtacctcagctcgc

SEQ ID NO: 1656 - DNA, 294 bp, Zea mays
  unsure (1)..(294): unsure at all n locations
agcttgggcggtactcatggatcataacattctatcaaantgnctaaaagcgccgccatctaaagntactacatgcttatttatttgttatacaagcttatctatgatacaccccatcaatcatgaccaagctaacttaagggtgttcttaaagctttcaagatgctgaactgctagagatttgctgaatccctttactgacatgcctttagaagcgaaaaagagcatacacttaaacatgcttagtatgagcatggaccattgacggcgttaccaaacctcggccctcgactg

SEQ ID NO: 1657 - DNA, 285 bp, Zea mays
tgtcggcctgctcctggattatcaccaatgtttatgcttcttgcacccctcatgggaaaattgattgtctcaactggctgcataatatttctatgccccctgacaaactttggctcctagttggtgatttcaatttaatccgtcggccggagaatagaaatagaattggggggatattaaccttatgctgaagttcaatgaagcgataagcaatttagatttgcttgacatccctcttcacgggctcacctacacctggtcgaaccgaccacaggaaccactact

SEQ ID NO: 1658 - DNA, 120 bp, Zea mays
  unsure (1)..(120): unsure at all n locations
ccccctccccccccctctccatctttaaatcctaaatttntatccanccccccaccgcgccccccccttatacattctccaccacccccccccncatcctcgctgaaaaaaaaccccccc

SEQ ID NO: 1659 - DNA, 456 bp, Zea mays
  unsure (1)..(456): unsure at all n locations
tcctatatgtgcaagtgtgtcaaatttgtcttcaaattgtcattaatctaaagcctatgctttgataccaactgtaacaccccaggatccacaaacaccctgaaatgctactaaactacacaactaacattcatatataaaatttcgacagcatctcctttggaagattgcataaacgtggaagcaacagagtataaacagatatcatgataagaaaacatactagacattaataatttgctagcaatgagaagataaccataacgacataaactgaattaactagtgtgcacgactagntaaaaacaaacatccttgacaagaagtttctaattaaatcatggttgtgcctgcgcagcgttattatgagagtgaaggtggacgtgctgctactttcctcattcccaacatgaattaagtacctgcattgagtaatgcacgagtgagatgaaacat

SEQ ID NO: 1660 - DNA, 206 bp, Zea mays
  unsure (1)..(206): unsure at all n locations
ttttaattcacccccccccccccccccccccccttattcttttccctcccccccncnatgtgtataaacaacctccccccctcccaccttttcattttttcacctactactgttgtttacaataaacaaccaaccccctccccaatcccccctctcacacccccccctttcttattccccattcccctttatcttttccaaccccc

SEQ ID NO: 1661 - DNA, 419 bp, Zea mays
caagctgggagaacagttctgatgtgtggttgcattccgcagatgttatactatatgcgcacaggaggaacgcgtgctcagcaggagcatgcagccccccaagatgaggcacaccgtcagcagctgccaccaccgcccccgatgaccatcgagcagatgttcttgatgcagactcagtcagttcaagccattggtcagactttggccaccattcagcagcagcagcagtagccaccacctcagcctcagatgcctcagatgcctaaagacaagcgcgtcgaattcatgtgaggtcatcccccagtgttcgctcactcttctgacaccatggatgctgaagatttggtgcacactgtacagcgggagctgcacaccgcttagtgcgactacagggagaacgttatgtatgtgccccgtct

SEQ ID NO: 1662 - DNA, 144 bp, Zea mays
ccccccccccccttgttctcctccactcccccccacatgctgttaaaaaacctcccccccccaccttttctaaccacaacacctcaccggtctcaccaaaaaccacttccccaaaacatctaaccttctaccatccttcttcac

SEQ ID NO: 1663 - DNA, 449 bp, Zea mays
  unsure (1)..(449): unsure at all n locations
tcctccagcattcttgagcccctctggcatccgaaggtaacaatatgttccactaggggttatgaagctggtttttggctcatcctccttcttcatccaaatttgatgatagcctgaataataatccagcagactcataagctctgataaagctgctgcatcaactagggaatctatcctaggcaatggaaactcatccttcggacaggccttgttgagatcagtaaaatcaatacacatcctccatttgccattggccttttttaccataacagtgttagccagccattntgggtattttacttctctgataactccggcgctgaggagtcttttcacttcattccgagcaccttcggccttgtcatcagacatcttncgaagcctctgctntctgggtctgaaagatggatcaacattgagcgagtgttaataacatccttggtgac

SEQ ID NO: 1664 - DNA, 374 bp, Zea mays
ttaccaaatggacgtgaagagtgccttcctcaatggaccaatcaatgaggaggtctatgttgagcaacctcccgggtttgaagatagtaagtaccctaaccatgtttataggctctctaaggcgctttatgggctcaagcaagccccaagagcatggtatgaatgccttagagatttccttattgctaatggcttcaaagtcggaaaggccgatcctaccttattcactaaaactccaatgatttgtttgtatgccaaatttatgttgatgatatcatatttgggtctactaacgaatctacatgtgaagaatttagtaggatcatgacacagaaattcgagatgtctatgatgggggagtcgaagtattttct

SEQ ID NO: 1665 - DNA, 333 bp, Zea mays
  unsure (1)..(333): unsure at all n locations
cgcccccccccttcatacatcctcctccaccccncacccggacgtcgacaaaacaccccccctcccacaattctttctttaacaacccccccgcggcccctaaaacacaaaccccccacacataacaaccccaccaccccccctatcccctccccccgacactcaaccctccccctaacgtccctatccacaactactttaccttccgcctgccttccacaagcctcctcctcactccaacccacctccccccaattcccacaaacctttccccctcaactttcacccaccttcccaaccaatcccccaaacatcccccctccccctccaccc

SEQ ID NO: 1666 - DNA, 394 bp, Zea mays
tcttcacctacaaggaagattatgaatgttcatggcaaaggtatggaacaaagtgcttcaattggtagttgatcaatagtagttccttccaagtggcattctttcaattggtaataatatattctatggaaaggaatgtcaatatgaaggttaaattccttttggcttaaatttgtaaattaatgcatattgtgaattcactgctccatgtgcattaacttaaaaggaatttaatttatgcctttacgcctcataaatgatgatttgtttgccattcatatatagatatcatcattcattaaatacttccttgtactactaatacctcttttaaagtgtttatcgactagttctaaaggaaaagagaaacaaagacgaagtctccccaatgatg

SEQ ID NO: 1667 - DNA, 455 bp, Zea mays
ggacctatgaaactaagcttgggaggacactggcttaaaagttcatgttggagaagaaccaaagctggatgctgcagtggctagaagcaatgatgttgagatagtaccatcagatggtttgagaaacaggaaacaacccaatgcaagaggaagcaggaccgggagccctactgctgataccccagcacggggaactgaatccagtctaactgctggtgcagacctggaaactgctccagctcctttggtggtagaacatcatcaaggcttacgggctagtgatggtggtggatggattgcaaagattgctgccttacttgtggcagaggacccatcacagtcatatgctttgatatgtggcaactgccatatgcataatggtgtgtattatagacaaagcactcttgatatttttcacataccataattacctaacccagtattactaatatttg

SEQ ID NO: 1668 - DNA, 453 bp, Zea mays
tcaagccgaacaaaagggcctcataatcggcttgattgttattgcaataagtttccaattggctagcgaagtcaaagtagtcattacttggtgaaacaagcacgatgccaatcccttgtccttcattgcaaactgatccatcaaagtatagggttcagggagtaacagtgagatataatatatctagtttataagtatcctcaatccgatgttctacaataaaatctgctacgacctggcctttcatagatttcaatggttcatacgccaagtcatattctataagtgcgcaagcccatttaccaatcttaccactcataatcaggttttgcaacatgtatttgatcgcatcgcgttgaccagagacaatgctatgactagatagaaaataacacctacatttggtgcatgcataagacagacataaacatcacttatcaatgagagtgtacc

SEQ ID NO: 1669 - DNA, 416 bp, Zea mays
tataaaactaagcttgtggatgccttcttctttttctccatagcaggaaccttgtttgaacactaccccacttaaaaaggatgagggtagatctcttggatttttggggatttgaactccttgaagtgcctcataacaagggtgttacgggcccttcttctgctgttgctgcttgagcaggctccggagaaatgactgacacagggttgattctgggagaaccttcttattatcttcccttcgctatcttcttttcactgaccctttctttctctttgctcttcccactggaggattctatccaagagtattaccatcatacagaggaagaagccaaatactatgaaccatgtgcaacagtcttcaacccaagaatcaccaagcattgtgatcttatgggcgacggagtggaaaat

SEQ ID NO: 1670 - DNA, 119 bp, Zea mays
cacctccacgcctgccctttttttttaacacctcacacccttccggaggcggaaaaaaacaaacttcccccccactcccccccaacccccatgcctccctccccccatgcatatcaccc

SEQ ID NO: 1671 - DNA, 371 bp, Zea mays
  unsure (1)..(371): unsure at all n locations
cgtcgatccgtccttcgtccgagcaggtgctgctcccttccacgggatcatccctggggagcgcgtccagtccctcgggcgactcgacctnccagtctgcttctggacaccctccaactttcgaagggagaccctgacgttcgaagtggtcgggttccgaggaacctaccacgccgtgttagggaggccatgctacgcgaagttcatggccgtccccaactacacctacctgaagctcaagatgccgggccccaacggggtcatcaccgtcggccccacgtacaaacacgcgttcgaatgcgacgtggagtgcgtggagtacgccgaggccctcgccgagtccgaggccctcatcggcgacctggagaacc

SEQ ID NO: 1672 - DNA, 175 bp, Zea mays
aggtccctttcatagtaccgccctggggtccctttgacaagcctcaaaggcccgagccgccgagaaggggccattcacccattgaccatctgccctgtgggaagtcttgagacaaaccacagtactatctgcacccgctgattgaccgccccctgggcaaccgtgaccttcatca

SEQ ID NO: 1673 - DNA, 447 bp, Zea mays
gtaacaacaatattgtgggacactactaaatactgaagaaaaatttgattgaggaaattgatgtccttgacaaagctagtgagacttcaggtttatcagatgctgacagatttttgaaactagatctggaatctaacctcaagaagattgttaatgaggaaaacattagcctcagacagaaagctagagataaattcttattagagggtgatgagaactctaagtattttcatttgttggccaaacacaagaagaggaaacttaaaattttaactctttctcatggtgatatcgtggcccgtgatgaacaaggcattaatcatctggcgacttctttctacagagatctcttcggcccttccaagggtcaaatatttctttgctaatttgatatgaaacagcttgagggggtgatagaaaccttcttaccagtcctttttccttgga

SEQ ID NO: 1674 - DNA, 157 bp, Zea mays
aaaatccacactaaattcttctacctaccctttcatcccttgaccaacctaaagcccctttcccttcagcgatcaataaatccctctcttatctccccaatcactcataaccaacaccctaattcccccatcttgaactcaccatacccgaaacatt

SEQ ID NO: 1675 - DNA, 218 bp, Zea mays
  unsure (1)..(218): unsure at all n locations
cacatcacacccagaatgtgatgagccacttaagacctctggagctggtggatatggacctcttcggaccgctcgcgtatctaagcatacgacgaagtaagtatgggctacttattggtgatgacttttcccgcttcacttgggtggtctttttgcaggataaggctgaaacccaagggaccctcaagcgcttcctaaggagagcgtcnaatgagttt

SEQ ID NO: 1676 - DNA, 211 bp, Zea mays
  unsure (1)..(211): unsure at all n locations
agcctattttttatttncggagcctagaattcttaaaataagcctcaatagcaaatggccaccccactgtaatttttaaaatattaaacccctggtcgcagttgaaacctaccctagaaaccctaagtcgaaattaaagaaaggaaaatgaataatggtaattaatggcatcctaaaacccttgtaatttgtccactgaaatgtataaaga

SEQ ID NO: 1677 - DNA, 407 bp, Zea mays
tacggacctataaaactaagcggagccgggaccctcgtcaccggaatagcccaatcacttctctttatagttcaagaacccgccggcgcgggtggaccgggtaagcccctgcaccgttttccaattccttgcgtgcatggcctctgtgtcaccccgtgaagctcctcgtgcaccctaattgaactataccgccgtggtttggccggagcaggagccgccgacgacccccgccgcctgtgctcgtggccagagtagctccgaccaccttcgacaccgacccgcacaccgacgtgaccgtcgcaacctcccggacgtcactgaccaccccgccggagctctactgccgccggtaagccccaccgccgtaatctatgccgcgggtactggttaagccggtcagggagcgc

SEQ ID NO: 1678 - DNA, 348 bp, Zea mays
  unsure (1)..(348): unsure at all n locations
cccctcccccccccccacctcctctcatctatacttntnaacccacgccccccgcctgagctcacccaccccnaccccggacgcgtggaggcacccggccgcctgccagcttctgatctaaacctcccgggccgggttggcttaccgaacaacgcggcaccccctgacacaaactcacttgtccacggtcctcccaagaactctcccccccaccccagtaccaattaccaatggcctcccagcaaaaatccccacgggcatgtcgtgaccttttataaaactccactcaactaaactacggattccacctaaagccaagccccactaagtggctctaaactaacccta

SEQ ID NO: 1679 - DNA, 444 bp, Zea mays
  unsure (1)..(444): unsure at all n locations
actcaagcttcgaaggtgccggctngatactttcttgatagctattattatatgataactccgctaagggcaaacattccttccggtttctgtgagaagtccaaaacacatgcccgcagcatatcttcaagtatttgattgaccctctcagtctgcctacttgtttgaggatgataggccgaactgtggagcaatttggtacccacggattggtgaagttcttcccagaatntggatacgaattgaagtccacgatccgacactatagttttcgaaacaccgtgcaaactgagaatgcgagcaatatacaattgggcataaacagcaactgggtgaactgtcttgactggcagaaaatgagccatcttcatgagccgatcaacagtaacccagatagagtcatacccttttgcagctttgggcaataccacaataaagtccata

SEQ ID NO: 1680 - DNA, 216 bp, Zea mays
agctttattgtgttctcctccatcaggggttgatatgcaagtacacctaatcatacatctcgtggatcagataaaaatattagggccactatatttacatcatatgtttcagttggagcaatacctgggagtattaaaaggttatgtgcgaaatcgcgctcacccagagggttcaatcatggagggatacactacagaaaaagtgattgagagctg

SEQ ID NO: 1681 - DNA, 342 bp, Zea mays
tattcgcattccaagaccttggaatgtcattaccgccctagttttttaacctgtatgatccacgccttgacgaagatatcaccaagaagggaccttccaacataagctgaatcttccccaatgtatctgcattggccaccattcgaagcactaggtgccttggcctgatgttcttcaattttaccttccgatcacgccatttaattgttttggcctgatacttattgatgtggtctactgcttggagcctggtctcttctatggtgtcttctgttattttgcaattctcttcaactattgccgaagccatggtccttattgagccccttcttgcttcttccg

SEQ ID NO: 1682 - DNA, 219 bp, Zea mays
agcttttttttttctgacattttggttgcgagttttgcagcttcggcagcagctttggcttcggcacttgcagcagttatcgttttgccttctgaggctgaaggcggtgctcgctcaatggcttgcatcacgttgactattcttcgtttcttttgccctttagctttctcctttgcagccgacgattgttccttcttctgtaaaaatttcgtaagtttc

SEQ ID NO: 1683 - DNA, 311 bp, Zea mays
  unsure (1)..(311): unsure at all n locations
actaaggtggaggccctggtagtagcatacgcaacttanatgcgaattgtcttttcctatctaccggtgcataggggtcaccggaatccaaatctttgacttgtgaatatcccttggccacaagtcgggctttgttccttgtcaccacaccatgctcatcttgcttgttgcggaagacccacttggttcctacaacattttggttacgacgtggaactaaatgccatacctcattccttgtaaagttgttgagctcctcttgcatcgccaacacccaatacatatcttgaactgcttnctctaccctgtgt

SEQ ID NO: 1684 - DNA, 243 bp, Zea mays
accacctgcatgcatgcaattttttttttaaacaataaaccgggggtgttaaaccacttcttccacatttagcaacctacccaacacattgttggggcacatgccatacctgcacgcaaacaccaacttatcaaatttccgtccatcaacatacaacattcactcaccaatgcaactatcgcaaggagtcatcccaaaaatctctcacctaaaaaaatttggatgcatggtatatgcacctat

SEQ ID NO: 1685 - DNA, 213 bp, Zea mays
aatcactctttgtgtggcaacttctctgaaagagcatttgctcacctatatctccctgtttatatgtgaacattggagaaccgacatcatgtcttttctttacggcaattttctttcggacgactaagcttataataagggaatagatgcaagagcccgaccatatgtgataatagaaggggagttatataacctggagttcgtctttattgc

SEQ ID NO: 1686 - DNA, 218 bp, Zea mays
catcttttactccatctatattatggggggccttggaatcagtccaccttccttcggccccttctggcagcttcctgactcccatgaatagcaataggcccttggtccgaaggtatcttcatgcagagataagctgggtgaagaattgcttcaaaagcatttagggtaccacgaccaatgatggcgttgtaggggtattccatgtcaacaatatcaaa

SEQ ID NO: 1687 - DNA, 435 bp, Zea mays
gtatcaaatggacgtgaagagtgccttcctcaatggacttatcaaggaagaggtctatgttgagcaagctcccggctttgaagacagtgagtatcctaaccatgtctataagctctctaaggcgctttatgggctcaagcaagccccaagagcatggtatgaatgccttacagattttcttattgcaaatggattcaaagtcggaaaggccgatcctacgctctttaccaaaacacttgaaaatgatttgtttgtatgccaaatttatgttgatgatattatatttgggtctactaacgaatctacatgtgaagagcttagtaggatcatgacacacaaattccagatgtctatgatgggggagttgaagtacttcctacgatttcaagtgaagcaactccaagagggcaccttcatcagccaaacaaagtatac

SEQ ID NO: 1688 - DNA, 213 bp, Zea mays
atctttattagattcttctgcactgcgggtccatgtctgactgccaattcaattgccgcttcatcctataatctgatcagacatgtgagttcccctgatatatctcttttatagtatataaagcatcagtttctaccgtttccaacgtcctccagctctctcatatttaaatgataaaaaagctaaaattatgcataaacggggattccaacc

SEQ ID NO: 1689 - DNA, 457 bp, Zea mays
  unsure (1)..(457): unsure at all n locations
tagctgcgggtgcataggtttcaccgaaatccaaaccttctacttgtgaatagcccttggccacaagtcgggcgttgttccttgttaccacaccatgctcatcttgcttgttgcggaaaacccacttggttcctacaacattttggttagtacgtggaacaagatgacatacctcattcctcgtgaagttgttgagttcctcttgcattgccaacacccaatccgaatcccttaatgcgtcttccaccctgtatggctcaatagaagacacaaaagagtaatgttcacaaaaatgagcgacacgagatcgagtggttacccccttatgaatatcgccgaggatggagttcacggcgtgatctcgttgtatcgcttggtggactcttgggtgtggcggtcttggaccctgatcatcttccttgtcctgatcatgggcatcctccncttgatcattggc

SEQ ID NO: 1690 - DNA, 218 bp, Zea mays
atctttttgaggaagagggcatcaagcatgagttctcttctccctacaccccacaacaaaatggtctaatagagaggaagaatcgaactctattggacatggcaagaaccatgcttgatgagtacaaaacaccggatcagttttgggccgaggcggttaacaccgcttgctacgccatcaaccggttatatcttcaccgaatcctcaagaagacatct

SEQ ID NO: 1691 - DNA, 349 bp, Zea mays
ttagtgattagagagagtgatttgtcgtgttcatttgatctcttgcgcttggattgcttccttgtttctcattcttcttgtgatcatactcaattgtaaccaacgcaagagacaccaattgtgtggtggtccttgcgggaactttgtgttctgtttgattgagaagagaagctcactcggtccgagggaccgtttgagagagggaaagggttgaaagagacccggtctttgtgaccacctcaacggggagtaggtttgcaagaaccgaacctcggtaaaacaaatcatcgtgtctcgctctttattcgctcacgatttgttttgtgccctctctctcggacttgtttat

SEQ ID NO: 1692 - DNA, 211 bp, Zea mays
agcttttcaagcgcgagttctggatcagtgatatcctattcttgggtcacattataaactgagagggattggctgtagatcccaagaaggtaacagctatcttggactggaaagcaccaaaagatgtccgaggaatcaagggtttcatcggaatggccggttattatcggcgtttcattgaaggtttctccaaaatcgccaggccaatgac

SEQ ID NO: 1693 - DNA, 504 bp, Zea mays
  unsure (1)..(504): unsure at all n locations
cggacctataaaactcaancgttggagggagagcacattntgggactaagcaatgttcattntgagaaagacagggtttgtagcgcatgtcaagcatggaagcaagttggtgcccaccatccacacaaaaacatcatgacaacggacaggccactggagttactccacatggatttattcggctcgatagcttacataagcatcggcgggagtaagtactgtcttgtaattgtggatgattattctcgcttcacttgggtattctttttacaggaaaaatctcagacccaagagaccttaaaggtattcttgagacgagctcaaatgagttcggattaaggatcaagaagataagaagcgacaacgggacagagttcaagaactctcaaattgaaggctttcttgaggaggagggcatcaagcatgagttctcttctccctacacacctcaacanaatggtgtagtggagaggaagaatagaactctactggacatggcgagga

SEQ ID NO: 1694 - DNA, 240 bp, Zea mays
aaccacctgcctgcatgcaatttttatccagcccgacaaccggggggcgctttaaagatgctccctcgccggccctgtccattactacccgacacaaacaaccactaatatcttccccccctaaggaaaaactctccatttcaccacaccatcccaaatgtaaaaaaatcctcacccagccccccccgggggatacgaacattcctaggccaccaacccccccgcaacccacaccatccc

SEQ ID NO: 1695 - DNA, 282 bp, Zea mays
  unsure (1)..(282): unsure at all n locations
ggcttcttgtggggagaagcatcgactatgggacatacggggggtntgttgaaatatttgatcaacctcttctggaatgactctctttatacttcaacatgtgtggtcgacttagagatagagatttgagtttgatttgctaaaacaaacccagtggtggcaaaggatgatccatatatgcccaaaattgaataaaatttaaatttattttatttgaagtgagtttgcacttggtctagctgctttatggtgcggtggcataaatcacccaaaagggggaga

SEQ ID NO: 1696 - DNA, 228 bp, Zea mays
gcatgtcatagctttatttttgttaagaataaacacttatccatttatgaaaaggagttttttgtacttattatggctgtggagaaatggaagaccttatttgcaacacaaggagtttacaattaagactgatcacaaaagcttgtgtttttaggaaggtcaacaattgcattcagatttacatataatagttatgtctaaattgatgggtcttcagttccatattta

SEQ ID NO: 1697 - DNA, 391 bp, Zea mays
  unsure (1)..(391): unsure at all n locations
atggacgtganaagtgcccttcctaatggacttcttatgaagaagtctatgttgaccaacgtctctgctatgaagatagtgactaccctaaccatgtttataagctctctaaggcgctttatgggctcaagcaagccccaagagcatggtatgaatgcctaagagatttccttatcgctaatggcttcaaagtcggaaaagccgatcctacgctctttaccaaaacacttgagaatgatgtgtttgtatgccaaatttattgttgatgatattatatttgggtctactaacgaatctacatgtgaagagtttagtaggatcatgacacacaagttccacatgtctatgatgggggagttgaagtacttcttgggatttaagtgaagcaact

SEQ ID NO: 1698 - DNA, 216 bp, Zea mays
catctttttttgtttgactcttcctgcagggtgggcctagcaatggcatcatggcgcggtggcgaccagctgctatgtgcagctcttcctctcagtaactaccagttcacgacagtgtggtaggagttcatcaagatcggatagggatcgcaagttggacatgtttttttgtctatctacatactgtgtttggagatgtagcactttattctctac

SEQ ID NO: 1699 - DNA, 331 bp, Zea mays
  unsure (1)..(331): unsure at all n locations
tggacgaagctccatcttgaatcctgtttctgagaaaaaagtatcaaagtggcgcaagttcataattaaatggccagagttcgctctacagctagggttgagcgcgagggggacgaaactggagcttcggagactatgcccatctccgaagcgatgcagcgctccggactagtgactgcggaagaaatgcctgctgccgaggcaaacccgacagctgccgaaggagaagggaacattgaagaaaccgactccgaagatgactaccgtattgccatgcccagcanacccagccacctagacttcggaaaatcgactgtttcaagggtgatct

SEQ ID NO: 1700 - DNA, 251 bp, Zea mays
  unsure (1)..(251): unsure at all n locations
ccggatggtgtanagtccacctgccagcctgccagcttttgcatctatgtctgattaagggggagccataacttaagtgattgcaaagtatttgttccctttagcatgaaactccagctatactataatttgtttgcttcttgcttcccaagcaaggggtatgcattacaggctaggtaataaccctatagttcttatttttaaatacccagcaattatttattgatgtaccctaagattcaagttgctca

SEQ ID NO: 1701 - DNA, 443 bp, Zea mays
tgtagagatatgtggccagttaaaaggtcctcgatcagcaatcttacattggctcggtccttgaacatttcatatagagacactacaccgagactcccttctcgtgcaagtcacgcaaccggtctcatcttaccatttacaacccaaagcttggtacctggcagacgtactcttctcagatgttgaacccaccacggccgtgaaggattcaacatcataagtttctctttataaaaattcccattccaatgtgaagtagcacctttttaaaacaaaacattttttgttttctaagcaaggctaagcatcataaaaaacatgtttaaataaattaggtaacaaggaatggtactcaatttctcaaggaaggaaatgcatcaatagtttatcacacaattcctattacctaatgcagtattcaaagttgataaaactttaaaata

SEQ ID NO: 1702 - DNA, 218 bp, Zea mays
agcttattttccaattttgcccacaaaggcctccaaaaatgactaagaaatttagcatcacgatcagaaacgattgtgttgggcacaccatgcaagcgaacaatttcacgaaagaacaaatcagcaatatgagtagcatcgtcagttttatgacatggtatgaaatgtgccatcttagaaaatctatcaacaaccacaaacacactatcacgtccctt

SEQ ID NO: 1703 - DNA, 377 bp, Zea mays
  unsure (1)..(377): unsure at all n locations
gtatcaagtctactttcatatggatccggaattatagtcatatctgttctgaggccgccgcaatcattgggttcttaccgagacatttcctgccttttctgcccatggtgctgcgtcaccctattntggcccaatgggtcgtgtatcaagttaggtccattaaggacgcatcctacnggtgcagcacgaccccaatacccttgtggtcgtncttccatgtttataaaccccctagccgccaccaagaacagcgggttttgtttagatcaagtatagctctcgctacttgcttgcaagcgcgcgtgctagttcagccgcccgtcttcttgtcttcggaaccccaccatattgtaggttgatctttaaacctacattta

SEQ ID NO: 1704 - DNA, 218 bp, Zea mays
agctttgtttggattggttaccgggagagacaaaagaatctcttcttgattatagctcaacctgacggttctaagttcagtgttgagaattgccttgtgttgggttaaccagttcatacccaaaattacatctatatcctggccttttagaacaatcatgttagcaggaaagttccgtccggccattgtcactggcacttcataggccacttctctag

SEQ ID NO: 1705 - DNA, 396 bp, Zea mays
  unsure (1)..(396): unsure at all n locations
taaaactaagcttanacggtgacatcttcagactggcctgataactattattatatgataactctgcatacggcaaactcttatcccaacttccaccatgtttaagagcacaagctcttaacatgtcctctagcacttggttggtcctctcagtctgcccatcaatctgtggatggtaagccgaactaaaattcaatctcgtatccaatgattcgtgcaacttcttccaataccgagaggtaaactgtgatccccggtctgacacaatcttctttggcacaccatgtaggcatacaatccgtgccatgtacaactctgccaacttggctcctgaatacgtggtcttcactggaataaagtgggctactttatttagcctgtccacaatcacccata

SEQ ID NO: 1706 - DNA, 220 bp, Zea mays
agctttttttacatagttggcaagaattcgcgagggctaaatcgttaagaaaaaaaatagagcagaagaaccaaagtgagatcttcgagggcatatgcgaggaaaatgataataagagggacagtgcgcgaaatcccatgtttgcaagggcaagggccaatcggcaaacagcgaacaaaaggttctggtacagagccggcaagaattggcgaggactgaa

SEQ ID NO: 1707 - DNA, 401 bp, Zea mays
  unsure (1)..(401): unsure at all n locations
ntacttagttngatttgcaaaagaagaggccagtctagatgcattcttaatggctaagacttgcatgggctggctgtggcatcgccgcttagcgcatgtagggatgaagaacctccacaagcttctaaagggagaacacgtgataggtctaaccaatgttcatttcgaaaaagatagaccttgtgcagcttgtcaagcagggaaacaggtgggaggctctcatcacaccaaaaatgtgatgacaacatcaagacccctggagctgctacatatggacctcttcggacccgtcgcctatctgagcataggaggaagtaagtatggtctagttatcgntgatgacttttcccgcttcacttgggtgttctttctgcaggataagtctgaaacccaagggaccc

SEQ ID NO: 1708 - DNA, 222 bp, Zea mays
agcttttttaaggttcttcatccccacatgtgctaaacggcgatgcctcagctagcccatgtaagtcttagcaattaagcatgcatctagaccgggcccctcttttgcaaaatcaactaaataaagtttgtcgtctagtacacccttaaaagctaatgaaacatcacaccttttaaagacagacacatctacatttgggaataaaaaattattttccatatt

SEQ ID NO: 1709 - DNA, 410 bp, Zea mays
  unsure (1)..(410): unsure at all n locations
tcggaaccgaagcagctccagcttgaatattgaacgaagtcctcagctcagaanagtggtagtgagttcaccggaggtgggcgccaatgttggggactcgttctcaaatgctatgaattaagaacaaggcaacataaaatgttaaatgtcaatgcccttcgtccgctgaagcattattcccttaaggatttaatgaacttcggacgaaggttaaggacggtacaattacgaaggttaaatctttgtaattgaactctaatagattatataaaataatacgagatatgaagcatcaaagacaaataaattataaatgaataacatcgctttcatattatattagcttagtgtattcaaatattagacacatcttgacctctgccttggcgaagaataatttccgagtgatg

SEQ ID NO: 1710 - DNA, 205 bp, Zea mays
atcttcactcactggggcttctaaacccctggcgtacaaccagcgatgaaacctgctaacgcctgggactcaatccaagatctatgcccataatcaatgctgaactcttagagttccgcaacccactttccaatccttccataaacttctctgttcctcataatatccttcaaaggctttgatgaaagaacaattatatggtatg

SEQ ID NO: 1711 - DNA, 407 bp, Zea mays
  unsure (1)..(407): unsure at all n locations
atactattcaactaaagtaagaagaagtttattttatgctaangtatgaaaactnccggccttctgtaaaattagtattctatccttactgggatgtaccatagtatagggtaaattcattgcattataaaatgttcaatagtgcatataactttgacataaactatatgtgagcactaatttaaaggaatttactctatccatttgggtttcaagaatgatggttcatattcatccacatataaggatcatcatttgtgaaaccttcccatngtgttttaatgctctcttttctaagtgtttcaacaaggtccttccaagtgctttcaagatggattcaaaatctaccgatataagagtcttggttatttcaatcattgagtttaatgggtctcataccatgtatg

SEQ ID NO: 1712 - DNA, 216 bp, Zea mays
agctttttatgggagcacattttaggacaaacaagtgtttattttgagaaagacagaatttgtagcgcatgtcaagtagggaagcaggttggagctcatcatcgaaacaagaacatcatgacgaccaagaggccgcttgagctacaccacatggatctattcggcctgaccgcttacataagcatcgacgggagtaagtattgtcttgttattgtg

SEQ ID NO: 1713 - DNA, 468 bp, Zea mays
  unsure (1)..(468): unsure at all n locations
tcatgaagaggaaccttcggccatcttatacaaacagtatcagtcgaaaaccgcttcttcctataagaccttcggcgacaaagcatggacccaacaatggggaagaacatctccttgatcctctcttccccttcaactcaatgtgctcctcctcttctcgatccttgctgcgcggggggagatctacagggaggaggaagccgtggagaggggctgccatgggaggagaggacagccagcccaagggaaaaggagagaggggcggccaagtgtgggaggggggggaaaggggtggcggccaagtatgggcaaaagggggaaaaggccaccactagggttttctttgcgggagaaaagaagcgacgccacagatgactccgacttagcatccaacggnccacaacccttttcccacattcacgcaccgaagatcaacctttggcaacanttttttngatattacactct

SEQ ID NO: 1714 - DNA, 218 bp, Zea mays
atttttttcagatgtggccccaatggacttagcttgataggcaatgattcagccattacctttagaatttcttccaagtcggcaacagaaggtgtcgaaggaacctcttcttctatttcagttgttttttgcttcagagccacaagtttactcttcttccgagtacctaccttcggctcagggctcgattatctcctctttagaatttcttcatcttc

SEQ ID NO: 1715 - DNA, 377 bp, Zea mays
  unsure (1)..(377): unsure at all n locations
tgagttcatgtgacttattntagannattgagctcacattctttatcttattntggtctctgtatgatggaattatgtcattttataatccctgttcgtccagtcagtcgttatgaactattttctaatcgctcacttcattgacattgtcggcgtttcgagaccggggggtccctaagccgacgagtgaatgtcgctgcgtgccccagcccaaatgggtcgagcgcgaggccgagcgtgaaggggggaagcgaggtggccggagttgggcgtgagagaggtggaaatcccgcggccttcgtgttcgtcccgcgcccaggtcgggtgcgcttgcagtagggggttacaagcgtcaacacgggagagggagcgagcag

SEQ ID NO: 1716 - DNA, 215 bp, Zea mays
atctttttcaaggtttaaagctttggcttgagatgatcaccaaggtcacacatgaaatcaagcccgtaatggaaagacatgtttatcattgatatttgtattacagcaatgtatagatatcagtgtcataactgtacttttgcttgggttgtgtctcatgcctataaatagataaacagtaccacgtactgttcacgctctattggaaggttgta

SEQ ID NO: 1717 - DNA, 384 bp, Zea mays
  unsure (1)..(384): unsure at all n locations
tcgcgggacggagcgggtggaagcnttggcagaccgtttttttctatccgatggctaaaaaataaaggatggcatggacggtctggttgatccgctttgctcccacgcttaatatattgtaatttgccctgtgtttgacagagggtggggtagcgaccaagcatgagggttagccagggggatggagcttgagcttatgggagcttcggggaatggagagggtgggactctgcatcggtagcacagaagatggggcaatagccgttagccggtccggtgggatggagctctatcttctataagctttgcgggacggacagggtggaaactttggtggaccgtcattgcgcgatccgatggctaaaanataaacgatgacgtgga

SEQ ID NO: 1718 - DNA, 218 bp, Zea mays
agcttctgcttatttcctttttttgtttttccttacgtcttatttttattttatcttgttttcaaatattcctattcaaatctgagtttaagaattcaactgatcctagcatgtatgcaaagttatatattttatttatttattttatgttttgtatttttttaaatttacaatttttgaatttaattctgagttgagttttaaatttaaactaaatg

SEQ ID NO: 1719 - DNA, 368 bp, Zea mays
taatttggttatgtctaccccttttatctctaattaaggttaagttccctatcaagggttctatttgtcaaaacacttaaacaatacaacttgtttgaaatttttgcctaatgaatgcactctaggtgtatcaaacatatgcaatgccaatgcttatgatgccatgctcaagttttagttatagtaacaccaggggtgttacaggtaatcctagtgccatgtgagacttcatgaccgcatgtgactactgcctctccgattgctccaatgatggccacagccttgacgacgagggttgtggcccaagtcgcgaatgtttccacgtcgatctatggggtcacgacgaaggcaaccaccttggtatgctg

SEQ ID NO: 1720 - DNA, 214 bp, Zea mays
agcttttcaccaacaacctgtcacagggaaaacacatatacaagaaaaacacatacttgattttttttatgaattattccttccgagaatgacattttagcctttttaaatacacaaacaagaaataaaagctcaatattggtggcacttactgaattaatctctgcaacctgaaaaaattgagcaaccttgaagaatccttgaagaacctctg

SEQ ID NO: 1721 - DNA, 456 bp, Zea mays
  unsure (1)..(456): unsure at all n locations
tcctttatcaaannaaaaattaacaggccaaactctcctctctcacactcctcttgtttgtctctctagttcacccatcactctctctagataccatccaagagcacaaggaggaggaaggagggatttgggggagatgaccaatgagagaccatggagatgaagatctaaggagaccatgggtgttactttttctcaagagagcatgagttagaattagctgatttagcttcagtgcgacaggaggaatggagaatcagttaatgactatatttagaggttctgggacactagaaaccgatgcttacaaatccatgtcacggataaacagctagcagggctggcttttaatgggttgcgatcttacctaagagaaaaatagagggcactcggttcttttcattagtacaactgcaccagcgagcgttggcctatgagagccgaaataaagagaca

SEQ ID NO: 1722 - DNA, 260 bp, Zea mays
tctaaagtgtgctcttttgagcttgtctatgggcgggaggccgtgttgcctgtggaaataaatctgaatgctgtcaggttccgccgaccaaatgatctaaccatcactgattattacaattcaatgatggataatattgatgaggtgaccgacaagagggtgatagctttgggagcaatagaaaaggacaagatcatggtagccagggcctacaacaagaaggtcaaagcaaagtcatttcaagtatgggacctggtgtg

SEQ ID NO: 1723 - DNA, 222 bp, Zea mays
agctttcaaaaataaaatgaccccaagggtggaggtaccccttcccctgttgatcacataaatatggatagtaatgtccatgatgatttctgacctgaatattgatcaggacttacttgatgtgatggttttacgaaaaggtaggaaaattaagcctcggaaaaaaacgattaaaaaaaaggcttcccctaaaagtagaggttcatctaccaaaaaagggga

SEQ ID NO: 1724 - DNA, 449 bp, Zea mays
tataaaactaagcgtggcatacttgtcaaagcaacaacacatgcccgcacagtaactactgaccataccagtaacctggcctgtcgcatgctggggactggatatgattggacctttcaagaaagctcaagggggatatactcatatattggtggcgattgacaaattcactaaatggatagagttcaagcccattgcttctttaacctctgctaaagtcgtggaattcatacaggacataatattcagattcgggataccaaacaacatcatcactgacttatgatccaacttcaccagttcagaattcttcgatttctgcgagcaaaagagcattcagatcaagtacgcatctgtagcacattcgagagccaacgggcacgttgagcgagccaacggaatgatattggaagcactcacgaaataagtcttcgataagaatgaaaaat

SEQ ID NO: 1725 - DNA, 218 bp, Zea mays
agctttatttaatggacgtgaaaagtgccttcctcaatggaccaatcaaggaagaagtctatgttgagcaacctcccggctttgaagatagtgagtaccctaaccatgtatataaactctctaaggcgctttatgggctcaagcaagccccaagagcatggtatgaatgccttagagatttccttatcactaatggtttcaaagtcggaaaggtcgat

SEQ ID NO: 1726 - DNA, 420 bp, Zea mays
  unsure (1)..(420): unsure at all n locations
tactaagcttataaattattatccaacgcaggacttctgttgctcactcttctgttaagattgnattgcccacaactccggatgatgaggcctacttgcaatatatgaatgtaaatatgttaggaacactgttcatagctgtctgctgttctgctgctttagcttatttcgtgacagcctgcttcatgtatgaaactctgaatccatttttattcacggggtagtgacgtaaatgctgctgtaattcttttaaatggcacgtgaatattgcatcctgaataagtcatcgttgctataattgttgctatggctncgataggatcggctatgactacctgtttgctcgcgctatacaatagatggattgttggatctctggctatacctaaccactgaccatgataccctcgtctttatcct

SEQ ID NO: 1727 - DNA, 245 bp, Zea mays
ccgggacctctagagcgaccgcagcatgcaagcttttttaaaaggcaaagtcttggatgcgcggaccgtccgggctttgagggcggaccgtccgcgatcctctagtggggtccgaaatctgtccactttggacatgtcctattcatttgcactggggaccgtccgcagtcctgaccaggggaggctcctctcgggacagtccctgaattataatgcggacagtccggccttgaggggcggacagt

SEQ ID NO: 1728 - DNA, 469 bp, Zea mays
  unsure (1)..(469): unsure at all n locations
cggggccgagggagaaacaanaatccttgaaatcttggctgttttactgcttgccgctgtcaactgttagctcggagcgggctccgaagcggccaacgatgttctgccagaagaatttttgggcagtctttgatgtgattgtggaaacagccctcgcttcaatccatttggtgaagtattcgacggctacgaaggcgaacttaaggttcccctgagcggtgggcaggggccccacgatgtctatgccccagcgctggagaggccatgtattggcaatcagctttgtatattgcgaggggttgcctgaccgaggggagaacttctggcangcttcgcacgacctcgtgatctgatttgcggcgcacatcattganggccagtaaaacccttgtcggatcaccttggcagccaaggcccttggccctgcgtgcgagccgcacgtgccactatggacttngcgtaagatctg

SEQ ID NO: 1729 - DNA, 217 bp, Zea mays
agcttgtttccagcttttcgtgcctcgtaatgtacattatgtttcgcaaaaaaaaagagggggtttatgaatttgagttattagagcatctccaagagactctttattttttactctctatttgactctttatttgtctctacataaatattaaactctgtatataacatcttattccaacaaactctccaaaatgcaatttagctttgctagcgag

SEQ ID NO: 1730 - DNA, 283 bp, Zea mays
cttctaccaataaaccctctggtgtccaaagttcgaaatctttcttttcaagaacaggtgcttgaacttctattatgggcttctaaaccctcaattatcactccaagcctgttatcttcgacgtactaatggactctcaaagctttactcaatagcatactctgtgtagaaacaaccttcgttagaaaacaccttcgttgtaaaaacaatcaacagttgaagaaaagttttaccttgaaatagataaaataaataccgacatatgctatcgcggtgcaactga

SEQ ID NO: 1731 - DNA, 235 bp, Zea mays
agaagcagggagacaacctacatgcatgcaagcattttttggagaacaacacaccagaatgcggcgaaaatacacaaccaaaaaaaaccaaccgaaagaccaaagccggaacacacgaaagcaaaaacgaagagaagtgcccaccactgcaccgaaaccatttgtaaaagacctatgccaaaataaacgagcactaatgaaaattcgcacaagaaccgaccgaatctcttataaa

SEQ ID NO: 1732 - DNA, 377 bp, Zea mays
ctaagctttcgcttgactgagaacaggaaccaacatgctgagtggtacttggttctcggcatcagaatggtgaacaggcgtgcttgttctctgaggtgccacaaagaacacaagggaggtgaagccctgtccatccttatgcacaccgtatagatgctaaggatggaaccatcgagttcctgtcttcgacgttcgatacgaatcctgtatactcgtggttgatatgagaaaattctattagacctaattgagaacgcaaacagtttcattcattcgtcttgctgtacgggacgcaacatacccgaattgtgaccaggagacattaaggtgccgtctggttcataccgtgtaacatgaatcgtaatgagatcccttac

SEQ ID NO: 1733 - DNA, 214 bp, Zea mays
tttttttttcgggaccacaaggacgggagaaggacctccagaaggtgttcgcccaggagctggaggtggcccggaaggagaagaagctagccaagaaggaggagcacttggaccatagggaggaggtcgtcacagagctctgggccaagctgaatgccttcaaccaagtcctagaggagcagcaggcccagcagaccgcgactgtggagagcct

SEQ ID NO: 1734 - DNA, 489 bp, Zea mays
  unsure (1)..(489): unsure at all n locations
gttgccactgcctatggaggagacggcggcaccgttacttcttcagtgcgggccgngggtgctggcgccgactgcgatgagcgaacgcagccgcagctggaaggaggaggacaccaccatattcagagccaggagacggaggaggagcacgcgcacgcggtgtactgcgccgtggggattgggaccggcagcggcagccatgagtggaaggacaacctgcgctgggtgctcgccgtcctcgccccccgccggagcagcagcaggtgcctcgtgctcgcgcacctgcgccgacccaccttcctgatcaacatcagtgcgtgaccccgctgcccttcctctgttactgattgctctcttgctttctgtctgaataaacttgcattccattcactgcctctgcctgactgcattttatattatccagctaccccgctcctccctctctgcttgtcgtatggcagcagctagatactgactcccgttcttatc

SEQ ID NO: 1735 - DNA, 215 bp, Zea mays
agcttttttgctttatcctaagaaccatcatgccaagaaagctcaagctagaaatgctcataattctcatgatcatcatgcttatatttatggaaatgaagcatctcactctaggcatacttcttcccacctactgcttctgaggtatcacattccgctgatgatcttgtcgctaagatagaagagttgaatgctactttggtgaattaggtcaa

SEQ ID NO: 1736 - DNA, 480 bp, Zea mays
  unsure (1)..(480): unsure at all n locations
tgtgatttatctaatttaataataagcaccatctctcattatagatnttctatggataaactgaacacaagagatgacattagtagcacaagcactagtttcgtatttagcaaccctttatatgtggaaggcaagcgtgttgctaaaatagagaaacctcataatatggactaaatttcccttgagcccttatgcacaatatattttgaatgacatggataatatgcatggttattcaatgaagtctaaagggctgactaaatccatattatggtgagtgtctaatatagaagaatcaaatccaaattaactagagagagaatacatcacataattntggattgttgaccatatgataatattcatttatcttacagttggacctttattacataatcaacaactgatgtatatcctcaagtgcttctttttcttagtggctacacaagtcacaaaagagatangggttgaaataatatg

SEQ ID NO: 1737 - DNA, 217 bp, Zea mays
attttgtttgatgtaaatgggtgttcaagaaaaagcttagacttgatagtacttttgagaagtattgtaacaccttaaagctctattttgaggtctaagaaaacttcttccaaaatatactaaattaaagtattttttacaaatgaatcaaattaaccttgggcgaatcatgcatttgaatatattctctaagataatggaattataaataataatt

SEQ ID NO: 1738 - DNA, 460 bp, Zea mays
  unsure (1)..(460): unsure at all n locations
ntaccaaatggacgtgaagagtgccttcctcaatggacttatctaggaagaggtctatgttgagcaacctcccggctctgaagatagtgagtaccctaaccatgtctataaactctctaaggcgctttatgggctcaagcaagccccaagagcatggtatgaatgccttagagatttccttattgctaatggcttcaaagccggaaaggccgatcctacgctctttacgaaaacacttgagaatgatttgtttgtatgccaaatttatgttgatgatattatatttgggtctactaacgaatctacatgtgaagagtttagtaggatcatgacacacaagttcgagatgtcaatgatgggggagttgaagtacttcttgggatcttcagtgaagcaactacaagaaggcaccttcattagccaaacaaagtatactcaagatattctaagcacagtttga

SEQ ID NO: 1739 - DNA, 217 bp, Zea mays
agcttttactggcctctgcgccatgacgaaagacgatcttgtgaatagccccgcatacaatagtccgaaggtacaaaaattgggaattttgaagttcaaattttgaattagacttttattcctcatgttaatccattcattcttttgtatagggcttaatacttagcaacgccttaagggcacaaaagaatgctaaagatgagagctgcactattgc

SEQ ID NO: 1740 - DNA, 462 bp, Zea mays
  unsure (1)..(462): unsure at all n locations
ntagagacatctgaattatctttgtaaagttattggttatttatgaatcaaacattactctgtaaatgtgcggtaccttgtaatatatatctttaccttttcatccgtgtgtgaattgctttgatatggacgaaacttgtaccttttgagtcgaatgcgaaaaacaccttcccttcttttcgtacacaacgaagcatatctttgcttctttatactcatcgaagcattgtcatcgaattcgaagcatctgtttgtactcttatgttatgatgatgatgctcctatgaatgtctacatgaatgtgtatgaatgcaatgaatgatgtgatgtcatgcgcatatgaatgtccatacacacacacacgaagccacacccagactctgcatccccttaggaactgtttatgagtcttacgctctgcatccccttaataacgtcttttgagctttttcaccttctatt

SEQ ID NO: 1741 - DNA, 218 bp, Zea mays
agctttcttctccctgggaggggctgttggtcatcgccaaagttctgaagcccgggacatacaagctggccaactatcaaggcgaggtgtacaacaacgcttggaacatcgaacaactacgtcgcttttacccttaaaatgtttcaagtcgttcatgtatctcactttctttacatacacaaataaagtctaaccatcaagggaggatcggccttgcc

SEQ ID NO: 1742 - DNA, 453 bp, Zea mays
  unsure (1)..(453): unsure at all n locations
tatcagtcgatcanaacaatntgatcaggagaagtcttatctgatttctaagcttaaagccgaagtccagacgagctcataattgaagaaagcattaataatccttcatgacaaatgcttgaactttggcaataattgtattggacgattaaagaagatattttactctgttggagccagcagtgggaaatataacccttcggcggaaaatttaccccaggccttcgatcatattgaagctgaaatcgaagagcttgacgaagttatagccgggcacggcgacttctgtgcctgggtagcttctcggcgtaccgctgctgcatttctgaaggccggctgcgaacatggaaaggttgtcaacaggcgcaacttcaccttatcttcatcaatcctggatgatatgcccgacctcgcccgaagtatctccaatagatgtataaaaatggtatggac

SEQ ID NO: 1743 - DNA, 248 bp, Zea mays
gagcctgcttttttttttaacaaggtaccagggaatcgctttctgtcatcggatccctttttcaaaagaattctagacgatcacggatcatcatgtgctttatcacatgaggaaacagccaggccgcacacatttgaagtgttcaccctaatgagcactaaggcggcttctagatgatcctcctgtgcccagcggaccgagtcttagaacccgtcagcattccgttactcaccctggcttgatccgag

SEQ ID NO: 1744 - DNA, 450 bp, Zea mays
gcttctatcagcttgtatgagcctgcatgagcctgtgttgtaacgtcgcatgtcgggccttttataactaaagggggacatgcacaaaggtactgggccccaacatgtgggcccagggacataatgaatataacacttggagccacaaatgtttgctgctggggcaatcttcttatgtcctgacgcccgagatctgcgtatcctcggcgtgcaggggaagcttcttgtagaagggatgatgagtacagtgcgccgctcggcacgggcgcactgttcaccaacagactggccaggcgcgccgtctgctggatgactctgatgccgtctgccagcggattggacagggcgcattaaatgctgagagggcatgtcgtccgtcagcgtggtggcacgcggcgcgtcctcttccgaataaatgcagaggctgcacagctgtatgggccttacgtc

SEQ ID NO: 1745 - DNA, 239 bp, Zea mays
aaagttcggagttcgcataggaactcccgctataccggccaacgagatagactgcaagcatgcgtgctgtgtgaatgtcatgtgccatgctatgcatcgcggcaacttatctcaatgccgtccattctttcgcggacagtaacaaagaaatgcatgtagatagttctaataatagttgtggaccttaaactcatctatgaactatatataataattatgccgctattaactacactaat

SEQ ID NO: 1746 - DNA, 204 bp, Zea mays
acgaaatttgacaacactctccctctgacacgatgtgtgccttatagtggagcgacaacatttgacagctataaactctttcccaatctaccaaatatgtctaaccagctattacttcaaggccatactgcaccggaacactgcgggattataatgcaaatatcatcgttcaaggaccaacgtgccatacttcaagccctggat

SEQ ID NO: 1747 - DNA, 219 bp, Zea mays
agcttttttccttatggagaagcaaaaatccttgaaatcttggctgtcaaactgccttgccgttgtcgactgttagtttcggacggtactccgaagcggcaaacaatgttttgctgtcacacccggattttagggatccaaaacccgggcgcgaacataatcaccaggtgtgctgggaccaagtctcacacatatgatgaatcatggcacaggatccaa

SEQ ID NO: 1748 - DNA, 411 bp, Zea mays
  unsure (1)..(411): unsure at all n locations
gagtgagctcctcgncatgactcgtaagacatgaggggggcttctgntcttttttgcttcaatccttgcgctaaatttttctgtaagagagataatggcaaattgatttttagttggcacaataacaaaatatcaagtttttttaagaacaaacctgacaaagttgttttatcatctgtctccaatcctagctcctgcatacatcaggcatactaagcaatgaaacgttatcaaactagaagttaaacatcatgtcaaacaaaatgaaatcaaccaaaaagaataaaagagtgttaccaggccaggtaaatatctaacatgaatgacgaattatataataaaaaaatattatgtattcatgaaccaaggcattgtccaagaactccacagaagagatatagactattatca

SEQ ID NO: 1749 - DNA, 196 bp, Zea mays
tcgcatcggagtggtggcgggacaaataagatgacgaatgtcgtccactaccataccgacacctcatcgcgctgtacctccggctccgacaccccctccgtaacttccaagcgccctgagcgcaatatatctagtctcatccccttacactatcctcgtactcctagacatactccattactttcggatccattac

SEQ ID NO: 1750 - DNA, 218 bp, Zea mays
agctttttaatgaacttttaactcacgaaatgagaagcgctgttatgtccttatgcaaatgcaactacttgatgctctatgaggcactaagttttacacagatctaagtcattgacccctcttaatagtaccgctatctatcctactaatccggtcaggtatcttctctaaactcctcaagaccggcaaaagtaaaacctatattatacctttgcctt

SEQ ID NO: 1751 - DNA, 459 bp, Zea mays
  unsure (1)..(459): unsure at all n locations
tggatgaggtgtcatcatcatcatcatccgagctatcatccgattcccattcaactaagtaggctttgccatctttcttcttgatatagtatttctttttcttcttgtcactttcatctttgcccttcttcttcttgcttggacaattcatggcaatgtgaccgggttccccacactcaaaacattttctatcattgaaagcatttcttctaaatgtttgacctcttctaggttgacctcttttcatcttcatgaatttattgaatttccttacaaataaagccatgtcaccatcactctcactttcattntcttcatcattgctatcttccttttcaattgcctttgacgccttggctttgagagcaatagaatcatttttcacctttctttgccacacttatagcatcgacttgtgacttcttaaatatatcttgagtgagaactttctccaatact

SEQ ID NO: 1752 - DNA, 296 bp, Zea mays
  unsure (1)..(296): unsure at all n locations
ctaagcttcctacaggaacctcatgcattatntcgaacagcttttctgtttatcgctacttggtatgagaccttcggtggctaatcatagagccgacaataaccccttctgcggtgttagatgatattcctggactagcgtgatccgtgaaaaaagcgtcatgagctctgggagcctaatgtcaaaaaacactcttccctgatctatgtggagagaaacgattacaantccatactgagctagccgcacttgcgaattactggtggtctctgcagacagcgtacacgagtgaaccg

SEQ ID NO: 1753 - DNA, 490 bp, Zea mays
  unsure (1)..(490): unsure at all n locations
cactatannaaactgaagcttcgtcttgaccatgcttctgtatacccgccacctgatttctgtattccaagatacctgctcgcgtacttagaaaacattgtcaaatcacgttttttgaggaccttctgaagccgaacgtccccaacaggctcaatagaagagacaaaagagtaatgctcacaaaaattaactaatcgagaccgagtagttactcccttgctaatatcacccaaaatctggtcgacgggatgattcctttgaatcatctctcggacttgggttggaggtgccggttgcgcttcttcctccattacatgatcatcttgtgctcccccttgatcatacgcctcatgttcatcatcttgagatgggggttgcaccattgttgaggaagaaggctgatctcgctcatcttgttcatgtggcccgacatctctaatcgccatggtgcggattgcgtccgtnggaacttcttctcatctacatcatc

SEQ ID NO: 1754 - DNA, 216 bp, Zea mays
agcttgttttgattcttcatcccaacatgagcaagtcggcgatgccagagccatcccatattagtcttagcaattaaacaagtgtctagctcagcattgttatcattaaaatcaactaaatatagttgaccatctaaccactctaaaagctattgaatcatcacttcttctaaagacagtaacaccaacatcagtaaaaggacagttgtagcccat

SEQ ID NO: 1755 - DNA, 464 bp, Zea mays
ggctttagcccatatagcgccttagacaacctgtaagcttggttaggatatctagggtcttcaaatccaggtggttgctcaacatatacaagttcatttatgaagccatttaaaaatgcactttttacatccatttgataaagctttatatcatagcatgatgcatatgcaagtaggatacggatggcttctagtcgagcaaccggtgcaaaggtctccccaaaatctaagccttcaacttgagagaatccctttgtaacaagtattgccttgttccttacaataacgccttgatcactttgttggtttctgaacacccactttgttccaatgattcttgcatcttgtgggggcttctccagggtccaaacttggttacaggtgaagttgttaagttcttcatgcatggcgttcacccagtacggatcctgtagcgcctcatctatacatgtaggctcaacaca

SEQ ID NO: 1756 - DNA, 220 bp, Zea mays
agcttatatggatgacgaaaccgaagccgaagctcaatggatactaatgaagcttgaatagataactgtagaaaaaactctaagaacttttgtaataacttttgtaaagaataatgtaattaaattttactctgaactttgtccatatcttgtaatatattcttacctttccgtaaatgtataaagtgcttcggtgtgaacgaacttagcatttttgagc

SEQ ID NO: 1757 - DNA, 478 bp, Zea mays
tctaaagggagagcacattctaggattaacaaatgttcattttgagaaagacagggtttgtagcgcatgccaagcaggaaagcaagttggtgctcaccatccacacaacaacataatgacgaccgacagaccactggagctcctacacatggatctattcggaccgattacttacataagcatcggcgggagtaagtactatctagttattgtggatgattattctcgcttcacttgggtgttctttttataggaaaaatctcacacccaagagaccttaaagggattcttgagacgggctcaaaatgagttccgcttaaggattaagaaaattagaagcgacaacgggacggagttcaagaactctcaaatcgaaaggtttcttgaggaggaaggcatcaagcatgagttctcttctccatacatgccacaacaaaatggtgtagtggataggaagaaatcaactctattggacatg

SEQ ID NO: 1758 - DNA, 215 bp, Zea mays
agctttacgacgggctgctgcacgacctgctgatcgagcccgagaaggacagggtgatggacgacatcgtcccgtggctgagccccagggtctgacgccgccggcgcgttgcggtgctggccgtaagaagcgagcggcttttcgatcatctgcaggccaaggacgcctcgcctccggatggtgggtgatgacgcggtctggtctggtaagctgcg

SEQ ID NO: 1759 - DNA, 335 bp, Zea mays
gcctaactaccggtgcataggttgcgccgaaatccaaaccttcgacttgtgaatatcctttggccacgagtcgagctttgttccttgtcaccacaccatgctcgtcttgtttgttgcggaagacccatttggttcctacaacattttggctatgacgtggaactaaatgccatacctcattcctcgtgaagttgttgagctcctcttgcattgccaccacccaatccgaatctttgagtgcctcctctaccctgtgtggctcaatagacgaaacaaacgagtaatgttcacaaaaatgtgcaacacgagatctagcggttaccctcttatgaata

SEQ ID NO: 1760 - DNA, 218 bp, Zea mays
attttgttatcatcaacctaaagattagagaaccaggagaggaaagcctctcgcccttgacgagagcatggggcataaatgttggtgagccaccagacctggcttgttaatttagaccgaaaaagaatcgtgtgcccaaacaaatcctgctcaattacctcagcatcaaaatgagctcctttccatattgtaataaaacctctatatgctccaataga

SEQ ID NO: 1761 - DNA, 383 bp, Zea mays
  unsure (1)..(383): unsure at all n locations
tcttcaatntctgctgaaacaagatacaagttactacttacacacaagtgtgtagaagtatatgaagaaaaatagcaactaaaattacaactcggtcacagtgattggtttcccaataagcaatccaagtagttaccttctgctcgctggaagcacgccctgcattaactccagcaccaagtctgtttatcagctcctttgtctgttaatttccttctgttgcttgctccacgcagcatactgtgcctccactgctaccgcctttgctagaatgtactctgaatagttacccttgtatgtcttggacacaccacatgcagataccactatctttgtgacaactgataaggaacgccctgtatgagaataatgacatcggcaca

SEQ ID NO: 1762 - DNA, 61 bp, Zea mays
agctttttgtggaccaaaccataagctgcatattgactggctgccgtgaaaagagatcacg

SEQ ID NO: 1763 - DNA, 265 bp, Zea mays
  unsure (1)..(265): unsure at all n locations
gtgcatgtgctcagcgatctgttatggagacaagtataatgcttatacccctatcttgtactacgattgagggagagaaccttcactcaactgggcggaaagtggtctttccgagcaaacacatactatgatgagagggagcatatttacaaagaacatgtcctcgaatcaagcggtctctaatctatgaatatacatgtgttcctgttctgcanagatctctatcatcaccagctgttgcgagtgacataccatactgaccctg

SEQ ID NO: 1764 - DNA, 213 bp, Zea mays
agctttgcttagaagcatgctctacggataaacaaccttcgttaaagaatattgcccttattaaaaaacaatagaagttagggagaaggatgtctaccttgaaatttgaataaaataagctgccgacgatatgttgtcctccatagcggctgatgtctgtctctagcttcggaaaacccgatactctttgatagagtaccgatgaccttagct

SEQ ID NO: 1765 - DNA, 365 bp, Zea mays
  unsure (1)..(365): unsure at all n locations
gagaacacgtgataggtttgactaacgtgcatttcgaaaaagatagaccttgtgcagctgggaagcaggtaaacaagtgggaggagcacatcaccagcagaacgtgatgaccacttcaagacccctggagctgctgcatatggacctcttcggacctgtcacctatctgagcatatgaggaagtaagtatggtttagttattgctgatgacttttcccgcttcacttgggtgttctttntgcaggaaaaatcccaaacccaaggaactctcaaacgcttcctcaggagagctcaaaatgagtttgagctcaaagtgaaaaagataagaagcgacaacgggttcgagttcaagaaccttcaagtgg

SEQ ID NO: 1766 - DNA, 215 bp, Zea mays
agcttatttgttccttgtatggcctcaagctgacgccacaggcctggtacaatcgctttgcctcctatttggtcccactgggctttgtcgaggccaagtcgaacacgtcattgttcgtcctccggtgcaacgctaacaccatctacttgatgctctacatcaacaacatcgtgctcaggacgtacagtcccgccctcctttagcacacaatcatc

SEQ ID NO: 1767 - DNA, 180 bp, Zea mays
atgaccaatgacaggccactggaactcctacacatggaattattctgactgatcacttacataatcatccgatggagtaagtactggctaatattgaggatgattattctcgcttcaattgagtggtctttttgcaggaaaaattccatacccaatagaccttaaagggattcttgagac

SEQ ID NO: 1768 - DNA, 418 bp, Zea mays
tggacgtgaaaagtgccttcctaagtggacctatctaagaagaggtctatgttgagcaagctcccggctttgaagatagtgagcaacctcccggcttctctaaggcgctctatgggcttaagcaagccccaagagcatggtatgaatgccttagggatttccttatcattaatggattcaaagtcggaaaggccgatcctactctattcactaaaactcttgaaaatgactttgttgtatgccaaatttatgttgatgatattatatttgggtctactaacgagtctacatgtgaagaatttagtacgatcatgacacaaaaattcgagatgtctatgatgggggagttgaagtatttcttatgatttcaagtgaagccactccaagagggcacctttctaagccaaacgaaatatac

SEQ ID NO: 1769 - DNA, 255 bp, Zea mays
cccgggatgcggagagtccacctgtcggcatgccaactttatttcattgcacccaggaccgggagggaaacccttgacgcgtatgtccccaaggttcctgccgtctgaggggcacaaagccccaacagtggcccccaatgaacattggcattaaaggcccatgatttaagggggcttccggccgggaaccttccagcctcagtactttggcccaggaagcccctcctcaaacctttggagaaacgcctgctccaa

SEQ ID NO: 1770 - DNA, 230 bp, Zea mays
gcagtgcaaagctttcttccatcgcctacaggctcacaacgccaaacggcgaggacctggagccctcctagaacatcgacaaccttcgcaaaatttttgtttgactcatcggggctgattctgcccttgtaattcgccaaaaacaatcttgtaccggcccgcactcttttcctcccggggggtgaggtttttaacgagggggagccatgtaatatatgtgtgaaaaatcc

SEQ ID NO: 1771 - DNA, 373 bp, Zea mays
tatcagatcggccctcaatgaccggttcagggatagctctgatatttctccaagcaacatcatagagccgacttgggaaaccttgccggctgacgagcagctccagttcgaggagcacaaggagcggatgatccaggaggcgaaagcaaagttcttggccaacttcaaaatggacaggaacaacaaggtcgtccgacatcgggcgacggatccggcttcgctccaacccacgccagatattcctaatgtaagtaataccaacgatctgcaatctcttataaattatgtagaagatcagcgtgaacaaatgcagaacatcatatggggtatgcaaagcgatcttaagagactagtacgtacatttgataaatct

SEQ ID NO: 1772 - DNA, 219 bp, Zea mays
agcttatatcatgaggatagaggcaagagctcgaccatatggtataatagaaagggaactatacaagcgcgggggctgttctccgttactcaagtgtttatccagagccgaaggtatagaattgatgaaggaaatacacgcaggcttatgtggatctcacattggatctaggcctttgcttggaaaagatttccggcaaggattttattggccaaaggc

SEQ ID NO: 1773 - DNA, 355 bp, Zea mays
acagcttgtgaagccaatcacaagtttattgaagaatgatactaagttctattggtcttcaaagtgtgatgaagctcttgaacaattgaagacattattaaccactgctccggtattggctcaactggacatcaccaagccctttgatgtatattgtgatgcctcaggcagtggactcggctgtgtattaatgcaagaagaccgagtaattgcatatgcttcaaggcagttacgccgacatgaggaacattatcctactcatgatctggagttagctgcggtggttcatgccctaaagatctggcgtcattatctgctgggtaatgtctgtcatatctatacagaccataaaagc

SEQ ID NO: 1774 - DNA, 217 bp, Zea mays
atcttttttcgaaggaagaagtcgggttttatgttttgctatgtaaaagcttcggccgaaggaacaagtagtcttttatgttttgctatgtaaaagcttcggcagaaagaaaaagtagttttttatgtcttgctatatgaagaaaagctttggcaaaaagaggaagcggccgtttaggcttcgttgtgtacgaaaagaagggaaggtgttttttcgc

SEQ ID NO: 1775 - DNA, 361 bp, Zea mays
  unsure (1)..(361): unsure at all n locations
tgatgccccacacccgttcgaagggttatgtctgcaacaaattgccaaagggccctacatgagtttggacctaactattggaatgggcatggtccttgtgaaaaactatgaaatggttcccgtggcaaaaactccngcttgtattcacccccgacacatcgtttcggaatgggtaacgtgcggtcaccaaattgcgcaaaaccaacccaaacatgtaacttggaccttaagtagtggactgggtattgtccttgataaaaacgtaaaaatgggttcggtggccaaaacctcctgcttgtatgcaccccaacacccgtttttgaatgcgtgatgtccggcaacgatattgcccaaaccaccc

SEQ ID NO: 1776 - DNA, 216 bp, Zea mays
agctttggcgtctttatttggttgttgttgttgagcctatggcgtctaatcagcgatgaagtctgctaacgcctgggactgaattgaggatctatgcacatagtcaatactgaattcattaagctctgcagcccattttccaatccttctaatagcttctctgttccttattatgtcgttcagaggctgtgacgaaggaacaattatgtgatatgc

SEQ ID NO: 1777 - DNA, 463 bp, Zea mays
ttatcaaatggacgtgaaaagtgccttcctcaatggaccaatcaaggaagaggtctatgttgagcaacctcccggctttgaagacagtgagtatcctaaccatgtttataggctctctaaggcgctttatgggctcaagcaagccccaagagcatggtatgaatgccttagagatttccttattgcaaatggcttcaaagtcggaaaggccgatcctacactctttactaaaactcttgaaaatgacttgtttgtatgccaaatctatgtcgatgatattatatttgggtctactaacgagtctacatgtgaagaatttagtatgatcatgacacagaaattcgagatgtctatgatgggggagttgaagtatctcttacgatctcaagtgaagcaactccaagaaggcaccttcattagccaaacgaagtacactcaagacattcttgctaagtttgggatg

SEQ ID NO: 1778 - DNA, 217 bp, Zea mays
atctttttctccatctatattatggattgcttttgaatctgtccagtttccttcggcctttctggcagcttcctgacttccatgagtagcaataggcccttgatccgaaggcatcttcatgcaaagatatgctggatgaagaattgcttcaaaagcattgagtgtcccacgaccaatgattgcattggaggggtattccatgtcgacaatatcaaac

SEQ ID NO: 1779 - DNA, 490 bp, Zea mays
  unsure (1)..(490): unsure at all n locations
tctaaagggagaacacattctangattaacaaatgtttattntgagaaagacaggatctgtagcgcatgccaagccgggaagcaagttggaacccaacatccacacaagaacatcatgacgaccgacaggccgcttgagctactccacatggatctattcggcccgattgcttacataagcatcggcgggagtaagtattgtcttgtaatagtggatgattattctcgcttcacttgggtgttctttttgcaagaaaaatctcacacccaagagaccttaaagggattcttgagacgggctcaaaatgaattcggcttacggatcaagaaaattataagcgacaacgggacggagttcaagaactctcacattgaaggctctcttgaggaggagggcatcaagcatgagttctcttctccctacactccacaacanaatggagtagtggagaggaagactcgaactctattggacatgcgcagaaccatg

SEQ ID NO: 1780 - DNA, 218 bp, Zea mays
agcttttttgcccatggagaaacaaaaatgcttgaagtcttggttgtcgaactgcttgccgttgtcaactgttagttcggacggtactccgaagcggcaaacaatgttctgccagaaaaatttttgggcagtctttgatgttattgtaaaaacagcccttgcctcgatccatttggtgaagtactcgacagcgatgaaggcgaacttaaggttcccct

SEQ ID NO: 1781 - DNA, 462 bp, Zea mays
  unsure (1)..(462): unsure at all n locations
gacctataaaactaagcttaaggaatcgacagtcaagcttcgtcgaccaagtgatcaagctcctcgagctttacgagattgaagattgaagattctgagcatctgtttggtgaaggcaagtgtcctctgacccattatgtcctatctacttataattcactgtcccgcattacttaattgaaacctaaggattgactagctttctatttaccttatccttngttacctnttgggttatcatggttagcttcacgctattgctttactttaatcaatgaacatgatgtgaatattatgatacgatgatgttatccctatgaggttcttgtgattactttatggggctcaagctgttttcctgagtgcctctccgtaaggacctgttcggggagtgacaaccncggataacagtgcaaccatgagggtggaatgggacgcccttagctgattaattataggaac

SEQ ID NO: 1782 - DNA, 216 bp, Zea mays
tagcttttaaagggagaacacgtgataggtttgactaacgtgcatttcgaaaaagatagaccttgtgcagcttgtcaagcaggtaaacaagtgggaggagcgcatcacagcaagaatgtgatgaccacttcaagacccctggagctgctgcatatggacctcttcggacccgtcgcctatctgagcataggagggagtaagtatggtttagttatt

SEQ ID NO: 1783 - DNA, 433 bp, Zea mays
  unsure (1)..(433): unsure at all n locations
tctaaagggagaacatgtgatacgtctaactaatgttcatttcgaaaaagatagaccttgtgcagcttgtcaagcagggaaacaagtgggaggctctcatcacaccaaaaatgtgatgacaacatcaagacccctggagctgctacatatggacctcttcggacccgtcgcctatctgagcataggaggaagtaagtatggtctagttattgttgatgacttttcccgcttcatttgggtgttctttttgcaggataagtctganacccaagggaccctcaagcgcttcctaaggagagctcacaatgagtttgagctcaaagtgaataagataaggagcgacaacgggtccgagttaagaaccttaagtggggaatttctgaggaggagggatcaagacgagttcttcgctcctacacacctagaaaatggt

SEQ ID NO: 1784 - DNA, 213 bp, Zea mays
cagcttgaaatgtgttttcctgggtcaggttttgatatgcaagtacccctaatcatacatctcgtggatcagataaaaatattagggccactatatttacatcatatgtttcagttggagccatacctgggagtattaaaaggttatgtgcgaaatcgcgctcacccagagggttcaatcatggagggatacactacagaagaagtgattgag

SEQ ID NO: 1785 - DNA, 375 bp, Zea mays
  unsure (1)..(375): unsure at all n locations
tacgtgacctatgaaactcagctngatcttgatgtgctttaattaatttccagtgactatatttgcctgctctgtacatgcgggttgtcgttgattcacctgtccgaatatcgtcaatgaatttgagacttgcccaaaggacttattccttgtatcagctgtaaggtgaagcttttgtcctgatatttttgccagtcgctgtcgaaccattacgttacttaagggaaagaaagcacattcccggtacgaaatgccatcatggagtcatagtgataatcctaggtgagggacacttggagagtagtaaagtcagcggagggtaatcacagttaattgntactgatacagtgtgtttactttccatggctacctggg

SEQ ID NO: 1786 - DNA, 84 bp, Zea mays
cactaaaggagccacgcctccctcaacctgggtaaacgctttaccccctacaacccccccactcacggcaaaactccctctaac

SEQ ID NO: 1787 - DNA, 353 bp, Zea mays
gttaactccatctatattatggattgccttggaatcagttcagcttccttcggcccttctggcagctgggtgactcccatgaatagcaataggcccttggtccgaaggtatcttcatgcagagataagctgggtgaagaattgcttcaaaagcatttagggtaccacgaccaatgatggcgttgtaggggtattccatgtcaacaatatcaaacacaatttgctcagtccttgtgttattaacaaatccgaaggttaccggcatggtaatcttcccgagtgccacaatctgccgccctctgaagccacaaagagggtgcgtagcatcatgaatcttgtcttcaggctcttgca

SEQ ID NO: 1788 - DNA, 125 bp, Zea mays
caacttaagatcatatccccgatgaccccaggtattcttaaattactattcttaaactatatcatctccagaagacattatttgaggaaataaaagatatcatatgcgaaaatcaagcctacaca

SEQ ID NO: 1789 - DNA, 393 bp, Zea mays
  unsure (1)..(393): unsure at all n locations
cacatgtgctaagcggcgatgccttagtcagcccatgctagtcttagcgggtgggcatgcatctagaccggcctcttcttttgcaaaatcaactaaataaaggttgccgtctaatacacccttaatagctaatgaaccatcgcttcttctaaagacagacacatctacatttgtaaatagacagttataccccatatgacataattgactaacagatagcaaattatatccaagactctctactaaaaatacattacagatagaatgctcattagaaattgcaattttacctaaaccttntaccttgccttgattcccatcaccgaatacaatgaatcttgggaattcttatttttgaccgacgaggggaacatcttcttctcccccgtatat

SEQ ID NO: 1790 - DNA, 251 bp, Zea mays
agcttgcatcccttatacattgcgtatgacgccgggctcttgaaactacgggggaccaaaatgccatacacgactcccaattaccacgacaacaatagactgcaattgcaccaatgtggtgtccattgtactccccaattgaaagacagtgccctttccgggttccctgatccccaacccattgaaaggtaatggatcgttacactttggaacccagaccttaacatacctttggaaacatacctattttg

SEQ ID NO: 1791 - DNA, 220 bp, Zea mays
agcttctttctcctaaacgactacgtgtcgcttgtgagtctccaaatcttgtggaagaccacaagaaagtttgtattacccgctcgtttgagcaaagtttagtgtgtgggcttgacctttgtggttggcaaggggaggattagggttgaaagagacccggctctttgtgggcgcctcaacaaggaagtagggcaccttggtggtgtgaccgaacctcggg

SEQ ID NO: 1792 - DNA, 459 bp, Zea mays
ttccacatatataagcgagggcgccacactctacatcggctctaccttaggaataattcccatctccctatgattaaataacattatcctaagctcctcacccgcaaaaagacttcgcagttccccttcccctgtacccgcggcggccggcaaagacaacagctcctgccgaccagccccactcacgcgaagccgagccccttcctccgcactaaccctacgctttgcaaccgcccttcgccgtcggcgcccggtgctaggacctggcacgtctggcgtgtccgcggtgtgtggcgaaacctccgtcgcagccacgtccaatgccgcaaaataatccaagtcctccttcgacgactcctcagtccactcaaccgagctcccagagtcacgtaaatcacaaaactcagatacagacccaccatattcattcccacctttcgcggtcgaagccggcaaaac

SEQ ID NO: 1793 - DNA, 216 bp, Zea mays
ttttttatagcaatggtgggcaataaggcaacattgaaggatgtattgcgaaacaatttaaactcaaggaggtagcacactttacaagttgttactttgccgaagaacataatgtatttgctcgaaagaagaggtaccatgatgatgaaccaaaaaagcctccatgtagtgatctttctatttttcagacaaacggtacagtctttggtccaccca

SEQ ID NO: 1794 - DNA, 345 bp, Zea mays
tggtgccaatggagaagcagacatccttgatgccttatctgtttaactgcttgccgttgtcaactgtgagttctgacggtactccgaagcggcaaacaatgttttgccacaagaatttttgtgcagtctttgatgttactgtggatacaaccctcgcctcgatccatttggtaaaatactcgacagcgacgaatgtgaacttgaggtttccctgagccgtgggcaatggcccgacgatgtccaagccccagcgctggagaggccatgtgtgggcgattagttttgtgaattgcgaggggctgcctgatcgatgagaaaacttctggcacgccttgcatgaccttg

SEQ ID NO: 1795 - DNA, 216 bp, Zea mays
atcttctaaagggagaacacgtggggggtttgactaacgtgcaatttgaaaaggatagaccttgtgcagcttgtcaagcaggtaaacaagtgggaggagcgcatcacagcaagaatgtgatgaccacttcaagacccctggagctgctacatatggatctcttcagacccgtcgcctatctgagcataggaggaagtaagtatggtctagttattg

SEQ ID NO: 1796 - DNA, 440 bp, Zea mays
  unsure (1)..(440): unsure at all n locations
gtctctgagccaccgtttagtgaatcaacgcagcgcgggtagcagttactatgtatgaggagcgtgtggcgtatggaggatcttgtggccttgtgtgggtgaagcttgcgtgtccctttcgatcccggttctatgcccaatttcccaatcaatatatatagggagaacggctggtgggtagatatggggtgcccagcgccctttgcttggggcgatggtacttggccatggcagattggatttggctctccctttagaggtgcgagtgcgatcatgtgaggtagggtttcgacacagcggtgtgggggagtgtgtttttgagctggcatatcgtaggaccccagttngcccgtgcccgggccgggggccttctcaactacgcgtaaacttaaactgcaacgcagcagggcatcagaaacgagcacccaagaccgatgatc

SEQ ID NO: 1797 - DNA, 216 bp, Zea mays
agctttggatgctcaaaggtctggcggggttcgcccgaaacgttctcgccgagccaatcaacccacttctcctgctgaggggcagaaaaagaagaagagacgtcttcgtcgggtgtctagcttggatcaggatgccggtccttctgttcctgttgctaaggaagtgccagtgcctgaatttgctgaagctgaccccaatgggtgtgacccgactgc

SEQ ID NO: 1798 - DNA, 505 bp, Zea mays
tacgtgacctatgaaactaagcggcttggttgtgacactgttgttttgtagaccttctgttatgaagcccccgaggtgagtatattatgagctatttctatgccatggtgtatgctgccttccccttttctcgctttttcaattggatcctcaactactatagccagcaggttaggtacctcatgcctagcatcatactcgccctattaatcttcgcctttctatgcaacacatttattggggtgaggttgtgcatggatctattctgtcacatctttgttctattttcttcaagcattctaacctctttgagaaggtgtacttctagcttcacacaccaaacttcggtacaagggctcatacattaccaccccacttgttggggaagtgggagcactggtggacttcatgggtgtatgtttgtatctggccaagctcatacaagaagatgagagtggttgaacctatcatcgatcgggtcttgtgggaggacgtcctaaacata

SEQ ID NO: 1799 - DNA, 216 bp, Zea mays
agcttgataaaatatttcctccatcattttttgatgtgatgctacacttgacaatccatttacccgatgaagcaatccttagaggtccagtgcaatatggctggatgtacccaatagaaagacctttatacactttgaaacattccgtgaggaacatggctcatcctgaaggttcaattgcagaatcatatgttgctaatgaatgcttaaccgcgt

SEQ ID NO: 1800 - DNA, 126 bp, Zea mays
tcgcggccgacggataattttatcgtcgtcagctgtcgccgtacggcgacgtgtttggcgctggtcctcctcaaacgactcactgggtgcatgtacggtgatcaccggagtgactggcactgctaa

SEQ ID NO: 1801 - DNA, 219 bp, Zea mays
agcttggtaccggcaaagataacggcgtgggattcagacagttgctgacgcccctttgccgagcgctgccattcgccgagtgtttggcactcggcaaagatttctttgccgagcgtatttctgtgtcgagagtcctgctctcagtaaacgctgtcattaccgagagcaggactttgccgaatgccggcaaagagtcagattccggtaatgaacgtatat

SEQ ID NO: 1802 - DNA, 466 bp, Zea mays
  unsure (1)..(466): unsure at all n locations
tgagcaagaaataccgattntggtatgcaaacttgaaatatatatttccaccaggtttcttcaatccgatgcaacatctacttgttcacctaccatacgaagctaaggtaggaggtcctgtgcaatatatatggatgtatcacatcgaaaggacactaaagaagctacgtgcaatggttggtaataagagacgagttgaagggtgcatcgctgaagaattcaaatacaaagagatagcatcgttcacgggcctgtactttgcagaggaacacaatgtcaatgcccatacgttgcggtatcatgtcgacgagcccnctattagtgatattgaaatttttcaatggaggggcaaaactgtaggacccagcacaacatactggttcaccaacgacgaatggaagactgctctactctacatgtataacaacatggaagagatgagtcaatttctcctgtaagtgtaaac

SEQ ID NO: 1803 - DNA, 205 bp, Zea mays
atctttccaagccctccgactcggccggacttcacccgaggcccccagatcgaccttacccgacttcggtcttccgccgccgcgcgtggaccgagctatctagtgagtctccgcccaattccttgcgctcatgtcttctctggcattccggggacctccctgacccatttgattgaactatctcgccgtgaccaggcccgtctcc

SEQ ID NO: 1804 - DNA, 444 bp, Zea mays
tattcttcatcccaacatgggctattcttgcgatgccagagccaacccatattagtcttagcggtgaagcaagtatcgagttcagctctattgaaatcaactaagtatagctgaccctctaatactcccttaaatgctactgaatcatcacttcttctaaagacagtaacacctatattcgtaaaaagatagttgtaacccattttgcatatttgagaaacagaaagcaaattgtaatctaaagaatctacaagaaaaacattggaaatagaatggtcaggagatatagcaattttaccaagtcctttgaccaaaccttgattccatccccgaatgtgatagctcgttggagatcttggtttttctcgtaggaggagaacatccttttctccccaacatatgggtgtgcatccgtatcaatgaccacttgagccctgatgcata

SEQ ID NO: 1805 - DNA, 82 bp, Zea mays
taacccaagtgaagccccctgtgcgtgtggccggaaatataaatggatggataaattcctatccaaatgattgccttacact

SEQ ID NO: 1806 - DNA, 411 bp, Zea mays
gttggcattgcacaccgacttaaagatagaatgaccttttattccataaagggctgagtcaatggtgtgagttcttataaggggcatacttgtgattcctcacaggctgcgttctgtgcctataaatagtgaacagtattccggtactgttcacagattcttgtatttgcaatcgcatctttcggaatacaacctttgtcaaggcatacgtattattggtatttaatgattcaatatattaaatgaatatgatgtgatgtatctgtgagacatttatccatcttatatctcttattctgtattatcttacaacgctgattggaagttcattactaaggttcaactttgtaatgagactctcatcaaccttcgtccaagatccattatcctcaacgaataatgcttcaccga

SEQ ID NO: 1807 - DNA, 343 bp, Zea mays
atcttatacaaacagctttatccgaggaccacttctttctataagagcttcggcgacgaaacataaacccaacagtaacccctttcgcggtgctagatcgtttttcgtaacgagcttgatccgtgaaaaaagtttcttatgcttcggagcgccgaaggtctcaaaaacaccttccctgagctccgtgtcgagaaacgatttaatctccctgcgcgtagcggccccaccttgcagagctactgttcggtctctgcggtccacccgacagcgagtgcaagcgggtgtccgcctggtgaaaacttctggcgcttccgcttcttacctgtggcactatataaacaga

SEQ ID NO: 1808 - DNA, 62 bp, Zea mays
taattttttattttttaataccctttctttcccttaacattagagtaaagaatcctcacccc

SEQ ID NO: 1809 - DNA, 359 bp, Zea mays
agcgtagacaatgctgattgcttgaactccttaaggattattatctggatattcactatcaccccagcaaagcagaggtgtgtgcatatgccttgagtcaaaatgaacacgtccatgctacttatgttgcccaactacccgatgagatttgtgaggatttcaagagactcaacctgagaatagttgcacatgctgaatgagtcactattgatagtgaacctaccttggagcaacaaattcgtaaggttatattggtgatgcttaaatccaagagatcaaagacctgattgctgaaagtagacgtccataattcatataagatgatcaaggcacattattgttcaaggaccggatatgtg

SEQ ID NO: 1810 - DNA, 324 bp, Zea mays
  unsure (1)..(324): unsure at all n locations
ctaagctgtcagcatatttggacccatctcttgatgggtccatcaagggtagtcaacaaagatctgggaacccaatagtcctttgtgttatcactgtgtaaactcattacctttctatcacaagttgcaattttgggttgcctaagtacatgagaattaattgacaagctatgagtgggattgttaccaatgggacaatcctttgattgattgtccttctttctgcatatgtagcaaaggcgatcttcaagtcttgaagatttcttcctttctcgtttcttgcttgctacatggttagtaaatattntcttttctagccctatg

SEQ ID NO: 1811 - DNA, 230 bp, Zea mays
ttaaggaaactatatctacctgctattcaaaaataactttgggttgcacagtaacactgagaacctccccaaattataccctcaacctgactgtgattgactctcacccacctattaactagagagaatatgttactttgcatactttccttcctgcttctttccatatctaatcaagacctcacctttcgaactaaatattacctagaaaaataaccacatgcccatca

SEQ ID NO: 1812 - DNA, 329 bp, Zea mays
  unsure (1)..(329): unsure at all n locations
catatcatttctaatggaagaatatcaatggatcctgctcaagtcaacgagatagtggcgtggagcatacccactatagttacgataattcggaatttcctactgagtgcaagatattatcggaaatttattgaaggattctctaagatggctaagcctatgacctcacttctggagaatggaagagagttcatgtggaatgagaagtgcaagatagctttgataatttgaaggatagactaatgtcatcaccagtattgattatgccagatctgagaatggatttgacattattgtgatgcatgtggcatgatgngatgtgtgctcat

SEQ ID NO: 1813 - DNA, 94 bp, Zea mays
cttattttcaacttttagcatgaataaaaaccaaaaactcggggattttgttcataccaaaactacttgtggataaaaaaacttaaaaactaca

SEQ ID NO: 1814 - DNA, 195 bp, Zea mays
gctgctcgtcacaggcgcactgttcgccaacatactggtcatgcgtgtcgtctgctgggtgaccctgacgccgtctgtcggtggattgtacaagacgcattatatgctgagagggcgcgtctgccgtcatcgtggtggcaggcggcgtgttctctccacaataaatgcgaagactgcacaaccgtattggcccta

SEQ ID NO: 1815 - DNA, 190 bp, Zea mays
  unsure (1)..(190): unsure at all n locations
ttaccaaactgcccggaaagcatttcttgtcataaacgaagaccgcaagctggacctatgatctttgggctgattatctcaaaatcaacccaaagatcgggggcttgtgggggacagatatnccccgggtccactggaaggataaaagacctcacgaaaggcccaanggcccaataaatcgtaaggtcac

SEQ ID NO: 1816 - DNA, 345 bp, Zea mays
  unsure (1)..(345): unsure at all n locations
tatagagaacacattatagaataatgcgatgactctatccatcacaagttgcatggagccataactataaatatgcgttgaacgaaattcagcccgcccacaaattcatagccagagttcttaacccattctcttgcctagcaagagccaatcaaacaggctggactgtgaatnttgatcatcaaaatttgcacactattggggttcagccctgccttcaacagctagtcatatgcctataacttgcgatatggtatgggatacgtagcacaacttgacatgtagtaacagaacttgccattgccccatttaagtcgccagcatagtggacataccttacaatct

SEQ ID NO: 1817 - DNA, 377 bp, Zea mays
  unsure (1)..(377): unsure at all n locations
cattacctttctaacacaagttgcaattttaggttgactaattacatgtgaaataattgacaagctagaagtgggatagttaccaatggaacattcctttgattgatgtcccttctttcagcatatgtagcataagcgatctctaagtcttgaagattccttctttccttgtctcctgcttgctacatggctagtgaaatatttcttttctatacctatgcctttttggtgtaaatggtgacaagacttaattaagtgtcccttctttgagcatttanaacaaagttatcatccttgtaataataagctatttgtaatattgaacatgatctaatcgagtgtccctttcanagcantcactacactttctacttctc

SEQ ID NO: 1818 - DNA, 289 bp, Zea mays
  unsure (1)..(289): unsure at all n locations
agtcacctgcggcatgcaagcttctggaaccccatacttctatccatctcccggcagacttataattctttgttggctgggaggcagtataagaagtcatcttcgtctgtgccattgaatactaaggccccctttggatacttcagttctcgggcatagtgattagcttcaaaaatctcttcttcagataatctttttcccgaagcatgtcggataatataatcgagggttttggaagatgcttcnggggcggcagtgccagtttcttcaaccaaaattggctctgcta

SEQ ID NO: 1819 - DNA, 324 bp, Zea mays
ttcgggcttaaattattatattaattataattatttttttaaaaacttggggggaatataaaaacctcacactctcaaacaaaaagattataaaatttacttttatatataaaataccattttatataaaatatatatcattatatattacttatgtaaatattatattaatatttaaaatattttttattataaaaaaaattttaaaaacatttaaatattatatatatatatcaaatctataacataatctataatcatttaattaaatcaataaaatcaaaatattatctaataaaaatttaatatactaccaaacatata

SEQ ID NO: 1820 - DNA, 247 bp, Zea mays
agctcgccaagccctcggacccgaccggacttcatcggaggcccgatatcaacctcaccggacttcggtcttccgccgccgctcgtggaccgagctatccagtgagtctccgacccattccttgcgctcatagcttctctggcaacccgtggacctccctgacctatttgattgaactatctcgccgtgaccaggccggtctcctcgccgccgacgagcattcccgcctgcgcgcatggaccgaccg

SEQ ID NO: 1821 - DNA, 238 bp, Zea mays
gatggggctaacctaatataggattcaaatacaaagctcacaacgggaaaagggctgttcttcctgcatcatctagtcacattctaactctgataccgaacactttacaattctattcttcttcctcaatttaaacaaatacataaattcggccctttttgctttcaaaaataactgggggacatcacttcacatatagaaaaaaatttcttttgtaactgaaatgcactttaccttt

SEQ ID NO: 1822 - DNA, 206 bp, Zea mays
  unsure (1)..(206): unsure at all n locations
cttctcctactgtgattccgactccagtntcaagatacctgttcacacattatgctccagaaatactcgtaaatcctgtctttgaggaccttcgtacaccgaatgccctcaacaatgtcaaacttaatgcccctcctataagattgtctaactttgttaatggcaaagcttccatgccttacgctaacgagggttacatcttgtac

SEQ ID NO: 1823 - DNA, 406 bp, Zea mays
  unsure (1)..(406): unsure at all n locations
gcttgtatctgacnnccatgtccccgatgctattntgcaatgatgaagtgctanagcttgcanagagaataataaatctgttcataataaaaatctacgtgctgcaaaggacttggtacaacataagagtgacaattctaaatctactcaagtgaggaagacagatatacaactgataagtgcttggtttcttgcttccaaatctgattcgcttgaattaaatgatgttgcttcaatctgctatgtatttatttgcaaggatgctttgttctcacttcacaacataccatctactttgccttctactgtcactaatcttttgcacgaatatgctgatgtatttccaaacgaagtgccaccttgccttgcaccgataagaggaattgagcatcatattgacctaatc

SEQ ID NO: 1824 - DNA, 236 bp, Zea mays
tctattccttctctatttcgtctatattttttccaaattacataacttttaacgaagcctatatgaaatatccaacctcgccaacttaattgtaaataccaattctaattcctaatgcgtgtggggtatttatacccaaccttcactggggtccctgtattatgcctatttcaaggaaggttttgacttgttacctcgtactctactaattgttataaaataaactgagggtctgt

SEQ ID NO: 1825 - DNA, 243 bp, Zea mays
  unsure (1)..(243): unsure at all n locations
gcttatgaagaggaaccttcngtcatcacatgcngacagctttagcctaagcttgttctttctaccagaccttcggcgacgaagcatagtcccaacagtattcactgcgtgccctgcacagatgtgacccgtttaaaaaatatactgataatttatgggcatcccncccaatgggtgtgggcaatggacggctttgtacgctgagtgtttatccggctgcttctgagtagtaatgtgatgtga

SEQ ID NO: 1826 - DNA, 393 bp, Zea mays
  unsure (1)..(393): unsure at all n locations
acatgtgctaagcggcgatgccacagccagcccatgctattcttatctattaagcatgcatctagaccggcctcttcttttgcaaaatcaactaaataaagtttggcgtctaatacacccttataagctagtgaaccatcacttcttctaaagacagacacatctacatttgtgaatagacagttatatcccattttgcataattgactcacagatagcagattatatccaagagactcaactaataacacattagatatggagtgctcattagaanatgcaatttacctaaaccttctaccttgccttgattcccatcaccgaatataattgaatcttgggaatctctattcttgacgtaagaggtgaacatcttcttctcccccgcatatg

SEQ ID NO: 1827 - DNA, 185 bp, Zea mays
catatagtggtcaatatcagaagcccctcgacctcaaatattatttcctttcgatatacaatttagaccatagcatgacgacgcacctctgatcatgaaaaaaggaaactccaacaaatcagatataactattctggaacacatataattattccattgattactatgaaaaaataatacaatga

SEQ ID NO: 1828 - DNA, 405 bp, Zea mays
  unsure (1)..(405): unsure at all n locations
tcttttgtaacctctccttacaactcaaatcataatccaacggcctagaaaaatgcccttctccgtgactatacgggtgtgtntcgttcagctttctgaaccatatccgctgtaaaatatctagaatctcaatcaaatgggtacaattaatagcagaatatatttccaaaaaattacagtttctccggctcaattatcaagctaccatgctcttatagagcataccggaaatttcaactgttcttttccgatccgtttcgatttggtcagataccgattataaacggtgcgaatacgatgtatctagtttctcaacccgtgtcgtatntttcgtatcgagtattctaataccgtttctactgtttatataatatgagatagcccagcatataatttattaagtat

SEQ ID NO: 1829 - DNA, 233 bp, Zea mays
  unsure (1)..(233): unsure at all n locations
gaccacttgagcncttgaccctttacgaacaacaggcaagacctgtctgaaatccccaccgaagacaatgtgtttaccaccgaatggcagtccgggtcgacccattatatcgcgcatgctattgtccagtgccttcacagcttgtctcttattcatagaagcctcgtccaaataatgagagatgctcttcgtagcaactctgcgggtccactctgcttcgtgaagctacatac

SEQ ID NO: 1830 - DNA, 114 bp, Zea mays
actgagcttgactttgacaactcgcgatactttcgtgtggcataaatcgactaaaccgcgctggttgatgctctattcaatgccacatgactattaaagtgttcccgaatgaaa

SEQ ID NO: 1831 - DNA, 331 bp, Zea mays
  unsure (1)..(331): unsure at all n locations
atatcattacgcggagatgacactaagataatcatcccagtattctctctgtgttctgtaggaacagacctcagcanaaggtgagtataacgaggccgctccgctcctcctaatgaaaatggccttgaagtagaggcaggagaaggttccaatactctagaaccacttgatgaatcatatttgctatcaactgcggccgacggtgttccacgtctcctttgttgttctttgcccttactactccgcctggcaaaatggtgggatagatacactgtaatactcacacatgtaaacaaagaataatagagagctattcctattttatgtgtca

SEQ ID NO: 1832 - DNA, 84 bp, Zea mays
ttcaatcccccctatatcacagtatttatatgtttacacaattcttatcttgctttcttcttttacataaactcttctattttt

SEQ ID NO: 1833 - DNA, 227 bp, Zea mays
gctcctcctctgacctatacaatgaaagacctcgcagcactgccttcaacaatgtattcctctttcccaacgagcatcacacatgcctcatgtgcaaggagaagaatgtatgtactccagacaatactacttatgtttctttaatgatgatgagtctagcgatgacgaaatagattactctaccttgttcacggattgatagaaataaaattgtaacactaatgaat

SEQ ID NO: 1834 - DNA, 335 bp, Zea mays
  unsure (1)..(335): unsure at all n locations
caagtcctcttatcgacacaaatcttgctttcatgccttccggtggatgcacctgtggcgcattcacatatacccaacctctctcacgagagcggcgatcttcctttggccttcattagctttatggacctganaaacatctaaatattgaattcatcattttggaccttcgactagagacactccccacaacaacccaatagaaacaatcgctggtttacaaatgccactaaacactggttagagaagcgcacatataattctaatgcagtcttagacatacttcacgccagtgtgaaatgtaacgctatatacttggatactgaccttggtac

SEQ ID NO: 1835 - DNA, 298 bp, Zea mays
  unsure (1)..(298): unsure at all n locations
ttcaaactaagcttggataaatatgtctctggatgatttccaccctcggtgctgtaagcacttgttgtgctgaccagctgccccttagaagacttttgcttatataaaaacatgcgtctgttggacgacttcacacccttgggtgctattacacacttgttgttcgtagcttcaccactagaactgagacatctgtccgcgaagtcaacgtgagggggaggagtcacttgatgaaagccggaatcctacaaaataaaccaacattctcatanatacacaactggcattaaatcacatg

SEQ ID NO: 1836 - DNA, 339 bp, Zea mays
  unsure (1)..(339): unsure at all n locations
agcctatattcgacggctactggcggncgtcagatcttgctggacatcctagggctggcaggcaagccgactgacataatcttaagttcgacagctggcaaacatgccgttgcatgatcacacgatagtgaccgcgcttgtatttgtgactcgatttatgggtattnagtctaagcgtgcattctcaaacaactgctacaaggagctcttgaacttgatcagtgatgtatttcccgagaatcacaagatgccacaggacaagtatcacgtcacaaagttgttctttgggctccgtatggactacaacaaaatccgatgttgtgacaataacttgttgct

SEQ ID NO: 1837 - DNA, 159 bp, Zea mays
  unsure (1)..(159): unsure at all n locations
cccccccccccccccccngcgacccccctaacggcccagcgcgccccgggcccccgaagagccgccgccacgaagaaaaaagaacagtcccccgacgaaccccccccacgcaacgcaagccgcgaccacccccaaaatcgagtcggaacccactaggca

SEQ ID NO: 1838 - DNA, 132 bp, Zea mays
  unsure (1)..(132): unsure at all n locations
tcacgggctactggcggagctagccgaatcactggcttgcccggaagatggctggtgtgggctggccacaatggccgaagctctggcggctatggcgggcggaattaatctcgccggagctaangggaaatg

SEQ ID NO: 1839 - DNA, 139 bp, Zea mays
gctttctcgtcactcctgctcttctcgatactcctgacaaatgtgttcggtgctgtactacctacaccgatattatctatcgtactcatcttcgacaaatgtgttcccttgatgctccacccaccaccgatctaactcc

SEQ ID NO: 1840 - DNA, 198 bp, Zea mays
  unsure (1)..(198): unsure at all n locations
atatcagattgtccttcaccagatcactcctgaagcaattattagaatggggatcttcgtctgggctgtgagaagtcaaggtctggagccaagtgcaaaatgtttttgtagcatgcatgaactttcgtatgagacgaagccctgnggtaaagaacagtatcataacaattctggttcaagctgcccaatgtcaacctt

SEQ ID NO: 1841 - DNA, 148 bp, Zea mays
  unsure (1)..(148): unsure at all n locations
aagtatagctgaccctctaacactcccttaaatgctattgaatnatcacttcttctaaagacagtgacacctatatcagtaaagagacagttgtagcccattttgcataattgagatacngaaagcaaactgcaatctaatgaatcta

SEQ ID NO: 1842 - DNA, 400 bp, Zea mays
  unsure (1)..(400): unsure at all n locations
agctnggaccactacagcgtggccaagaagtgctcatgagtcgtgaagaagatgcacatcaagaaggataagaagcctcaatctgaaacctaccgccacaagtacctgaacgctgaacctgaacatgttcaaaggcccattgccagctgccagcttggcataagcggctccggaccacagcagcagcatgagcaggcagacgcaccanaaatggtgctcgacgcctgacttacgaaacgtgggccgtggggtatattgtttcagttgcctccaagttagataacgtggggtatccgctgaaattntaaaaaacaacaataataggacaacaccatcaatttaaaaaatcttctttcatccctaaatgtttcgaaagaaagaaagtacaaaatactttttc

SEQ ID NO: 1843 - DNA, 284 bp, Zea mays
  unsure (1)..(284): unsure at all n locations
gggctcaagctggattatcgacagtggatgcacacaccatatgacggtggagaagaagatgttcacctcctacatcaagaataaggattcccaagattcaatcatattcggtgatgggaaccaacgcatagtgaaagggttaggcaagattgcgatatccaatgagcactctatctctaatgtgggtnttagtngagtctcttgggatataattactttctgtcagtcaattatgtaatatgggatataattggctatttacaaatgtagatgtgtctgtcttt

SEQ ID NO: 1844 - DNA, 91 bp, Zea mays
  unsure (1)..(91): unsure at all n locations
atgtacacgtgcaagcaaagacatgttctntgtagtacctacaatacatatgcctacaatatcatcctgatatgtacctacagttatagat

SEQ ID NO: 1845 - DNA, 288 bp, Zea mays
  unsure (1)..(288): unsure at all n locations
tgcattcttctatttaagtgttccttctgtgctctcccacaagaatggtctatatgttatgtgacagtgtcaatctaagttagagaagatactataatttgaacacttatgtgtgcaaatttacctgatgtgcattccgacttggatttgcctatgttcttaatacctgagttagtaccaatccagtgaatgtgtttctcgacagggaaacaagtgctagctctcaaatatgaatattgtaatgttaggcatggaatgtgtangagcatgctactatatgaatttaat

SEQ ID NO: 1846 - DNA, 408 bp, Zea mays
  unsure (1)..(408): unsure at all n locations
tgccccaagaatagactctctaatttgtaatggtaaagctcccatggttcaagatagagagggttacattntatatcctgaacactatcctgaacataagattaagagaattcatgctagaaaacctcataatgtttctgtcggagaggaaatctccccggccgggtggcggattgcacccgccctaaatcctaaaaagaggaggggcctaagcgttttgcttgctacgagactggtggatcaacacacgggaacacgcgatggtttagagtggttcgggccaccggagcgtaataccctactccactgtgtgatgtattgcttgggagcttgtatgaacttgtgagtgtctgcctaaagttaagtctgagtgaccctgccttgtaacgtcgcatgccttttccttta

SEQ ID NO: 1847 - DNA, 361 bp, Zea mays
ctattattatatgagaactcaccataccgtagacggttatcccaactgtcttcatgttgaaaggcacaacctctcaacatattactcacaacttgatttgtcctttcagtctgtgcatcaatcttatggtgataagttgtactaaaattcaacttcgtactcatgttctcatgaaagcttctgcaaaatattgaggtaaactgcgaacctcgatcagacacgatcttctttggtactccatgcacacacacaatccgagccatatataactctgctagctgagaactcttataagtagtcttcacaggaataaagtgagccactttagtcaatctatcacaatcaccatatagcatatatc

SEQ ID NO: 1848 - DNA, 292 bp, Zea mays
  unsure (1)..(292): unsure at all n locations
tctaagtcacctgatgcatgcaagcttgaatgttcaatatcaagaacttcagtgcaacttgtattttgcttgattcataatgcctcatcgttagtgattgaatctaagtctagctccttaaatgataatatttgcacacattgtgccaaatatcatgcttcttgttgtctaacttaccatgcaaggaagaatagcccacaggtgaatgtcaaaggaattntgaaaagatgctctancaattgatgggtaaagaaagttgaacccaagttcaagtccctataacccaacaatg

SEQ ID NO: 1849 - DNA, 294 bp, Zea mays
gcatgcaactctatcgaggagagcaacaacaccctccatcgtctggatctcttgatcactctattcttccactctgatttggaacgcttgctcgaatcccctgactatttccacctaacacctgaatcaaggctcatcttctttgattggtcgtttgacgggtctaactatcagactcatggaccaacaacacaagtggtataccgtgtcgagtgaataggctccaatgactacaaactgtctctcctattacgttggtgtcttcgagtataccatactgattcttcatgatct

SEQ ID NO: 1850 - DNA, 298 bp, Zea mays
  unsure (1)..(298): unsure at all n locations
gcttctgcctgaagtgatcgttcctggccgaaaggaggaataccatgtctgagcaacactcctgacggccataacgaaagactntgccattactgcagcattgccaccatacgaagacactgttgcttcgtaactcatcaagaactgcttcgggtccgaatggccatcgaacatgggaagctggggtggcttatatgacgaaggccaaggtgtagcctgcagctcagcggacagaggagaagcatcgtcgaaaacaaaatttccatgatgaaaattgtcataccagtcatcttcattg

SEQ ID NO: 1851 - DNA, 153 bp, Zea mays
ctaagcttcttgtgctgctgccaaaatgagatgtgaactgcgttcctcgatctgacactatcttcttctgcacaccatgaatgcagactattcgtgacatgtataactcagctaacgttgctccggtgtatgttgtcttcacgggtatgaaat

SEQ ID NO: 1852 - DNA, 377 bp, Zea mays
cagaatcgattcatccttctaccatatctcgctcttcatgtcgtgcacacctctatctcacagccgaatgtccctgtgacagtattttatacttggatagcatgatatccatgttattgaggaccttcggaagacgattgcccacatcagcgcccgcttctacggtcacacgatataataaaacgccgagatcgtaacatggattgtgaagttactgcgtctacattatacgattatgaaatagaacatttaattcgacatacttgcattaatcaacatttattaaatgcatctaaagctatcacctagtttctaattactctgcttcgccaacaactttcagttatattaatatctcacataacgctagcgactat

SEQ ID NO: 1853 - DNA, 517 bp, Zea mays
  unsure (1)..(517): unsure at all n locations
cgcatgcaaactttcacatcctctccctgttggacatcttatcgtttgtttgtgctcataagcggtgtggtcttctatcangctctgtctctgtgtccctggatctgccgccgctggatcttctctgtcctgatctgcgctgttcttggtcatcccccacaaaactggtgctccgacattcangctaggtatgaacccgctaaaccccaaaccctaatccctctgtctttgcttctttaaccctacatcacctttaatgntgcaccacattcttcatattaataagcacatgaacatgtatgagaatgataacttgcttagacatatagttgcaccaatgaaagacacattcttaaaatattgtggtacaattcctttgctatatccatttcatttatacttgaccccttaactataatgtatggttccacattgtcctgcactgatnctcagctactcattcgatactctgatactaactctgtgaggccgatatctgttattaataatataaata

SEQ ID NO: 1854 - DNA, 153 bp, Zea mays
gctctcgtcatgccaaaaatgtgatgacaacattaagacccctggagtacttcatatggacctcttcggacccgtcgcctatctaagcatatgatgaagtaagtatggtcctgttatagttgatgatttttcccgcttcacttgggtattctt

SEQ ID NO: 1855 - DNA, 203 bp, Zea mays
  unsure (1)..(203): unsure at all n locations
tcatcttctattaccatctcagcaaaggcatctctaagtgcttcttgatcaaaccttcaagtggcaggagcttccccatgacatgcttgcaaggtgccttgctttgagtccttggtgaaaacatgaagattgcgttngcatgtaccaaagtgtttcttcaacgcaaatgttccatgcccccttgtgtcagccttgatttcatg

SEQ ID NO: 1856 - DNA, 280 bp, Zea mays
cagctggcctggtgcacccctatgactattgcacacacacacctcatgttatcttaatgctgtgctttgggtgcagaatataccttggccgtgcttaatccttatgaacacatcatgtgaattcctgatatgaatgagatggtatttatcttgctaccagatccccatgttattatattggttatttgtgccggcgagttttaattaatttcgcaaagcttgtagtattgttgtcatattttagccgtcttgcactgcaactcgtatgtatatgtgtaca

SEQ ID NO: 1857 - DNA, 281 bp, Zea mays
  unsure (1)..(281): unsure at all n locations
agcttgcaatgagactcgacgacgacgcggatctatgcgagccacgcacaaaggcgatgtcacggtgacagtgacttcgctgccattcatgacatatagcttcactcgggcattacattgaacacccgcgaagcgccaatgttgcggtgctgtgggggaaatctcggctgcgaagagctgcgctgtatatggttgggcatgctttatccaaagtggagggaggngatggtgctgtccactggacttgtgcaacatggagccgccagatcgcgaagttgtcg

SEQ ID NO: 1858 - DNA, 444 bp, Zea mays
  unsure (1)..(444): unsure at all n locations
agcttcttgtaactgatgccaaaaatgagatgtgaactgctttcctcgatctgacactatcttcttcggcacaccatgaaggctgactatccgtgacatgtataactcggctaacgttgctccggtgtatgttgtcttcacaggtatgaaatgagccaccttcgttaatcggtccacaaccacccatatggaatcataaccggtccgggtacgaggtaggccaactataanatncattccgatctcataccaccttcactgaagaatccgcaatggctgcacaatccggacgcctttatgctctgcttggtcttcgacagtatccagatggcacaattctggattctctttcatgcatccaacaaacctccttttaatactgaacattttcctccaggtgatggagagctgctatgacttcttgagacactccgaatgttgagc

SEQ ID NO: 1859 - DNA, 301 bp, Zea mays
  unsure (1)..(301): unsure at all n locations
tctaaatgagaacactttatgataacacatgctcattntgagaaatactcgtattgtancgcatgccaatcatgtaatcatgttggtgcccaccatccacattaaacattatgacgactgacaggccactatatctcctacacatggatctattctgcccgattgcttacataagcatcggcgggagtaagtactggctatgtattgaggatgattattctcgctcacttgggtattatttgtgcaggataaatctcatacccaagaaacattattaatgattcttgagacaggctcaaaa

SEQ ID NO: 1860 - DNA, 458 bp, Zea mays
agcttggagctagctgacacccctgtgggctgtgtggcctgtggcaacctggccggcatgcatgcatacggcagccgcatggcgcccgctatctcgagaccctgcgtgctgcgtgcaagcgcctacgacgtactcctaccgtgctacgggtctatacgtactcctacgtacaagtagaccgcagctgctggtaccctggtacctgtgtgtggtcacttgtgcggaacgaccctggcagctgctcaagccggccggtcggtcatgcagatgctgcatgcgcgcggtggatcatggagcgggacgtttcgtctcaccagcgtacggtacggcagtcacctatcatgtgacgcgacgtcttggcacctgtatgctatgagtacactagttactttgcctacagcctccggactgaccgatggatcactcacgcggcatcacgcactacgacgtacgagtac

SEQ ID NO: 1861 - DNA, 266 bp, Zea mays
  unsure (1)..(266): unsure at all n locations
gagacatcggaatgttacttcaaggtcggaaatgtggtctgangctntcctcgtcttgactactatgtggtggacgtaagcctcgaccgtccggccaatgtgttcgcacgacacatggttcatgcaccgttggtacgtcgcacccgcattcctcaagccgaaccacatggtgacatatcagtatatgccgaatggcatgatgatagaagtcgtgagctggtcggactctttcatcctgatttggtgataccgngagtatgcatcga

SEQ ID NO: 1862 - DNA, 382 bp, Zea mays
acttaccaatgttcattttgagaaagacagggtatgtagcacatgtcaagcacgatagcaagttggtgttcatcatccacacaagaacatcatgacgaccgacaagcgccttgagctactccacatggatctattcgacccgatagcttacataagcatcggcgggagtaagtatgggcttgtaattgtggatgattattctcgcttcacttgggtgttctttttgcaggaaatatcacaagccaagagacatttatgggattcttgagacgggctcaacatgagttcggcttattgatcaaaaagattagatgcggcaacggaacggagttcatgaactcacaaatcaaaagctctcttgaggaggatggcatcaagcatg

SEQ ID NO: 1863 - DNA, 206 bp, Zea mays
cgtacaatcgcctttcgttccactcaagctgtgtgtggacattctcttatatactcgtaatccaatttcgaagatacccgttcatacatttcacttggaaaacattgtcaaatcatgtttttgaggaccttcggaagccgaatgcctccaacagttgcccctcgcaatattaattttctatactgataaaatcatattgcgatatt

SEQ ID NO: 1864 - DNA, 447 bp, Zea mays
  unsure (1)..(447): unsure at all n locations
aagcacatatattgtccatgcattgactgcanaagtgtttgtgtatttgatgacacanaatgaatcattcttcatctggtatgccgaggatttatgaaggattacatgatttggacaaagcatggagatgatagctcttcccattatacaactggaaactctgcgaacgtcgatgatagatttcaatttgttcatgagaccaacaaccttttccacaaagtgaacatgtagtgccaaatgttatgtatcatggattcgctagaggaaatgaatgcngcagaactcatgttctgccaaatgatatggatgagtccatattcttcttaagtggtatggaggccctgatgaaggtagtacaagagcctttgtataatgagtctaaaggtataccaaagaagtcatgacactgcagtctgtgctacaagtgttgatgttaaaagtagatat

SEQ ID NO: 1865 - DNA, 188 bp, Zea mays
tcacataccatctggacacactccatcacgctacagtcagcatattctgatctcccttcaggcaccgctccgttgcaagcatccaaccgccatcatacgcctattggctctgcggagaccccagtcacttcaagaataactggcctcagttgtatgcacccggaccaacctactccaactcggtgaat

SEQ ID NO: 1866 - DNA, 380 bp, Zea mays
gcagcttggatacatctaacactctcgtaacctctgaagtactttcctcaaatgttcctcatgctcttgctcattgtgggaatatataagaatatcatcaatgaacaccactacgaacttgtcgaggtagtccatgaacacactgttcatcaagtacatgaagtaagctggcgcattcgtcaaaccgaatgacataaccgtgaactgatatagtccatacttagtgatgaaagatgtctttggtatgtctgagggtcggattctgaactgatggtagcctgacctcagatctttcttcgagaacacactcagctctctcaactgatcgaataaatctttaattctgggcagggggttcttggtcttgacagtgacttcat

SEQ ID NO: 1867 - DNA, 381 bp, Zea mays
  unsure (1)..(381): unsure at all n locations
tattctcatgctcatcctttattcgcatttgcaaggcttaatacttaacaacgccctgatggcgtataacaacgccgaagactaaagctgctctatagctctcagcaaccttcgatcagatgtcatcagactgagatacggtgccatggaaaaagacaaaattctactttcattgatggattaagcaaaagaagatgaagcataatttaatactcattccatagcttatagagccgaagttgaagatcttcttatataacttgccgaagccaatgaatagcgcactctcgcagagcataagccagagatcagtgaatactanagagataaactagagaataatgttgaagaacttcgtgaatgcaaagaaaggtactttga

SEQ ID NO: 1868 - DNA, 389 bp, Zea mays
actgagcatcatctttaaaggaaaacttttggactacaatgttcatttgagaagacggggtgtagccatgccaacaagaaacagttggcttcatcatcaacaagaaatatgacactgacggccgtcgagtactcacatggattattcggccatcgctataaagcatcgggggagaagactgcttgttatgcggagatatctcctcacttggattttttgcagaaaattcaacccagaacctaaaggatttaaacagccaaatagtcggataggacaaatataaacgacaggaagagcaaaattcaatgatgttttggatagcatacatagtttttctaccctacaaagggatgaagatattacttttgactggagactgtatacacaat

SEQ ID NO: 1869 - DNA, 320 bp, Zea mays
  unsure (1)..(320): unsure at all n locations
agcttaaggcagcccacgccctatctttgctgttccaacgtatccaccaccatcttaatgttagccgcctcgcaaaacgatcaatgtccagcacaccaagtccttccttgtcctttgggaggcatgttatgggccaattgacgaagcagtgccccccgctgcaagcttctggattgccccctttccacaggaaatttctacgcattntgtcaattgtttgcagcagccatttttgaggtggaanaaccgttaaatggtagattggttgtgcggatagcaccgctttaacatgagtttctctaccggcctttgacagcaat

SEQ ID NO: 1870 - DNA, 348 bp, Zea mays
tattcagtaactttttgtttatatctgatacatgtaggctcaagcatcacttgagcgggatgatgaggtatattcacatatactgtttatattcattgtatcatttcgaattgaactgaacagattggtgtttgatgtttttctctggctattatatctgccgcacgatgtatattctgatgatgaatctgcagaagtagttatctcctcccttcgccttggagacgaccaataaaggtttattctctctatatctgatttgactactgctctctcttttgtaacacatttggtgttgatacaagaatcggctatgaagatgcatttcagtggctcctcttacaattc

SEQ ID NO: 1871 - DNA, 385 bp, Zea mays
  unsure (1)..(385): unsure at all n locations
atcttaaacattaaaatgtcaaacaagtgttgtcgcgcacatgctcaaagctgagtgagcaagagcagatggccagagagcatgccaaataaactcgtggtgagctcttatttatacgcctagcgcgtagaataatggagggtcccgcttgtcaatgactgntgctattctagcaaagagaagggtgtttttcggaccttcngcttaaagccttcgtccatgtcgcaatatgaatttatcattacagcanattaatattgcgaggtgctactgttggtggccttcagctttcaaaggtcctcanaaacatgatntgataatgttttccaagtgaaatatgtgaacaggtatcttcggaatcagggtacgggtatacaagtgtctg

SEQ ID NO: 1872 - DNA, 95 bp, Zea mays
  unsure (1)..(95): unsure at all n locations
gtgggtgtgtcttcggcattagcatcattctttgcatcatatcatcngatcatatcgcataacatcacatcatacattatatcacatcaataaca

SEQ ID NO: 1873 - DNA, 406 bp, Zea mays
  unsure (1)..(406): unsure at all n locations
accggatcctttagtcacctgcngcatgcaagctctcgcttcattatattatggattgnctttgtatctttccagttccccctcacctttctgccagctttctgactcccatatatagcaatatgtccttgatccaaaggtatcttcatacaaagatatgctggatgaagaactgcttctaaagcattgagtgttccgcgaccaatgatcgcattgtaatggtactccatgtcgacaatgtcaaacacaacttgctcagttcttgtattgtgacaaatccgaatgcattggataatcttgcaagactacaattgtcttctccgaagcacaaagaggtgcgtacatcgtgaatcttgctctggctcttgcatcttgtggagataggcgaaactccacccttcgctcg

SEQ ID NO: 1874 - DNA, 373 bp, Zea mays
  unsure (1)..(373): unsure at all n locations
ttagcattgtaccttggcaaatatgtatnatctatacccttaagcactatacttcaagcagggatattgtgcaacaataaatggcaattcttgttttaatcctaccaatattaagttcactaatgtttcttccaatacacgttaggaatcattacaaaatggccccttatagaccccaaatccattccttatantagatagcacactagagctctctaatcttctctaaatcaaaactaaaccctatgtttaagatcagaacggtcactaataaatggcgccaaaccacttggctgaaaccaanatgatcctactactaagaaccactaaaattatgaaccgaccaattcttgacacattatacactttgctc

SEQ ID NO: 1875 - DNA, 487 bp, Zea mays
  unsure (1)..(487): unsure at all n locations
tccaccggatcttaagacacctgctgcatgcaagcttaccncatttgatgcacgaacgctccctcttgtctttggtctctgctggctgacccttgcgacctctaagcgctgtcttgaatctcttgacgatgaaggccatctcttcatcattaagtccggccacctcaatttgtgccaccctgcttggtagcgcctccttgcttcttgttgccttgagagcaaagggttgaagctcgttgatttggccattcaaggcatcgtccacatatcttgcctccttgatcatcatccgcccgcttacaaattttccgagaacctcctcgggcgtcattttcgtgtacctgggattctcacgaatattgttcacgagatgaggatcaagaaccggaatgaccttagcattaggcggacgacgtcgtgatccgccatcgcgtgcttccgtacttcttattttgtgatatgatcctgagccggtgtatgttgcgtc

SEQ ID NO: 1876 - DNA, 215 bp, Zea mays
  unsure (1)..(215): unsure at all n locations
cgcactggtttagatctacgctgatggtcgaactctataatggtgcgcatttctcatgtgtattgaaccacaaaaataatgatttatgccaataattatacctgaagtcttctgcatgatatctgcaaatnctggaataccactttctttatgacactattgttccatatttgtatctttgttgcatatataaacactgtgatgttactatttgt

SEQ ID NO: 1877 - DNA, 271 bp, Zea mays
actcaagccctggttctatgcgcgcaagaccatgaagagtatcttcaggcgtacgcccgaatgttcttgcgtcttagagcacaagcgcctacagtgcccaatgaaattgtcattgaggccatgatcaaagggctatgtccaggacctacttgccaatattttgccatgaagcctccacatactccggagaagctgctccataagatggatgaatacatcaacactgacaatgacttccgccaaagattggaggaagcttacaggctctctg

SEQ ID NO: 1878 - DNA, 419 bp, Zea mays
agtcattgttgttaacttctatgaagggcatgatttgtattactcacaagctgtgtcctgtgcctataaatagtgaacaatattcctttactgttcacgcattcctgttattacaaacacatcactcgggaattattatttgccaaggcaaaggtatatatgtacctaaacattatgttctaacattctagattcatttaataagagatgcgaatgatatcatctatgtctgatatatttatctgtaatggttcacattctatatcatcttggattatcttgtaagttcaattacgaaggtgaaacctccgtaatattctgctcgtggtcttcgccgaagttattaaatacttggggatatatgctcatcgaacaatggcattatatttatcattatgttgcttgtcttgatcatacat

SEQ ID NO: 1879 - DNA, 379 bp, Zea mays
  unsure (1)..(379): unsure at all n locations
cacttgatctcncactcggaagacacgctctagtttgggccatgcttaaagagtacaaaactctagatcacatttgggtgaagcgaacaagacggcttgctacaacatccaccaggtatatctcaactgaatcctcaagaaaacatcatatgaactccttaccagttaaaagtctaatgtttcatattttggagctctttggagtaaatgctttattatagttaataaaggttggattntgatgaaaccttagcacctttagctaggcttgagtcaattcgcatattattggtcgtatttacttaccatgttntcaagttgtctcaaatgaacgtgaaatgtgcattcgtcaacggacccatcaagcaagaagtattta

SEQ ID NO: 1880 - DNA, 409 bp, Zea mays
ctccgcaccactttcttcctacatttcatctgattcatgctttccttctaacacttaatagagaacgcccacaactgattatttgaaatagggcactattgttgaaaatggtgcatatgctcgctgtcaattggggtccgtatccattataccttacaatcttctcgtagtcgagtcgttgttgacgaccctcttctacatgtatatacttcctctggtgtttcaagaaagtctagtatttggtggattcacgttgatccgtggatatctaaaggtgttttgataaccttgctgaatgatactatctgtgcaacaacgtagatcttactcactatttttaaatatatatttaccgccattgtcacagaagtggtaaacaacttacgcaacgtcaatcacatgcatctct

SEQ ID NO: 1881 - DNA, 205 bp, Zea mays
acatgtgcatcatttgcataaagacttgtgaggtccggggatgacttgtacacacttgagcaccacacataagcaataaatgatgtaaatgctcaaagtaacatgatcaaaggcatagagcacatgtatgctatatatcaatccaagttacgcgaatctaagacatttatctcactacgcaacctgcaaaaccttttctcatcta

SEQ ID NO: 1882 - DNA, 56 bp, Zea mays
tatccgattcaaatcctgtccattttcactgaaacattgtcaacatgttttgagga

SEQ ID NO: 1883 - DNA, 349 bp, Zea mays
acacatctcttatcttcatttacaacaaacctgcttgtgttaaagcatcattaaatttctcatgccacctctttgatacttactttatcccatacaaatacttcaattatctacatgcctttgcctctctgttaattattacaaatccttcacactaatccatatagatctcttatttgactctacattgatggaacgttacctccaaatttatttgatgtactataagaccatatgatgcagtcaatgactagatcactctatatgtttcattgtatcaacacggaataatatcaaaatattaccaccttcttctatgcatacatctaaccacaatactatcatggct

SEQ ID NO: 1884 - DNA, 515 bp, Zea mays
  unsure (1)..(515): unsure at all n locations
tctcgaccggatctcttagtcacctgcngcatgcaagcttctaaagggagaacacgtgatatgtctatactaacgtcatttcataatagatagaccttgtgcagcttgtcaagcatgcaaacaggtgggaagctctcatcacaccaaaaatgtgatgaccacatcaagacccttggagatgcttcatatggacctcttcggacccgtcgcctatctaagtataggaggaagtaagtatggtcttgttatagttgatgatatttcccgcttcacttgggtattcttttcgcaggataaatctgaaacccaaatgaccctcaagcgctttctaaagagagctcaaaatgagtttgagctcaaggtgaaatagataaggagcgacaacgggtccgaattcaagaaccttcatgtggaggagtatattgaggaggaatggatcaagcacgagttctccgctccctacacaccacaacataatggtgtggatagatgaagaacaggacgctcatcatatg

SEQ ID NO: 1885 - DNA, 351 bp, Zea mays
  unsure (1)..(351): unsure at all n locations
caccgtttactcgcctggcaatgggcccgattgctgtgctccaccgttggtcgatgccgccatgccctttgaagcggatgaacatgcagggccctttgtagacaacctcgtgcaccacgttttgacgcgcggcccatcacagcgtcttccaactagcgcgatctacgcgtggaactccggcttgacgatccaccgcccgctgcttcgtcgcgtcgactcactgccggattctcctgctccttgcatgtgcctanggtagttactcgactggtaactaactgagtgcgttgaatttcaatcgctgcaaatcgcgagtgggatgatcactctgcaaataaacgcttctggcac

SEQ ID NO: 1886 - DNA, 367 bp, Zea mays
  unsure (1)..(367): unsure at all n locations
cacctgcagcataccagttcngctcctctatgtatagattgttttgaactttctcatttcctctggccctgctggcagcttactgactctcatgaataacaataggcccctgatccgacagtatcttcatgccaatatatgcgcgatgaagaattgcttcgaaagcattgagagtaccatgaccaatgattgccttgtaaaggtacttcatgtcaacaatatcaaacacaaccttgttcaatccttgtattgctgatatatccgaatgtcattagcatngtgattctgacaagtgctaccaattggcttcctccgnaaccacataagtgatgtgtggcgacatggatcttatcttctggctcttgca

SEQ ID NO: 1887 - DNA, 302 bp, Zea mays
  unsure (1)..(302): unsure at all n locations
cacccagctgcactttacattttggacggtggaccttcgctctattgcaacctttggtatcgaaaagaaagagcatctaatataacctttcttcttttttaatacactaagattcgcttatgtaattctaagtatatcaatactgtactttacctctattaatataccatctcttntctatattatttcggaaactttgtatttatcaagatagactataccctatgaaccccatgaagggctgatttgagcatgaacaatttataggatatgctcgccctctttcttcacattcttaggtt

SEQ ID NO: 1888 - DNA, 190 bp, Zea mays
cattatgtgagcagtgccagatggatatgtgtattcaaaagacatgtgacgcttaccgtctcgcagtcggaaaactaatgaactactcactatgacttggacctatcagcattgtgcatgactcaatatctgttacactatattatgggaactatatgcatgcgtgcacgaacatatatgtttgagtatt

SEQ ID NO: 1889 - DNA, 399 bp, Zea mays
  unsure (1)..(399): unsure at all n locations
cacttaactatttgtacatcacaaaactttttcagatgagggtcctatgaattgtcatcaccatcaagccttattgctaaatcgcatatcataccatacatgtatcttactcattgtattcattagattgcaatctcgctgacgaagagtacgtgctcattcccgagcaatgagctatccccgaggaagaccangagcaagctcccgagactggcatcaaggatctncccgatctccagctttgatgcaagcctcggtttatcattaccgatctatatatgcactttactaacttaatgttggatgatagcacgtgcactaagtgaagagtccttgaaccctagtgcataactacgattcctttgaatgacatgtttctagcaatgctgtatgctatag

SEQ ID NO: 1890 - DNA, 383 bp, Zea mays
tcatttattccacacttccctgcatggacttcttcacaagttctttccactggacgggagaatacacttcatgagaacccctgatgcaccccttctgtataatatctccccaacgagtgtgtactgagcccactgtctggccatgcgctcctctgagatcttgtcgtctggcctcttctcttctttatgtactaatgatccgcctctccaatcttaaaatcgactcggttgatctacatgtgcactcctctgtggctattgaatctcgccggcattcttgcacaaactcgtggacctattcaccgatccacctgatatgataactctgtgtcatccttcacatataatcaacctcactatttcccttaacgacgacattcctt

SEQ ID NO: 1891 - DNA, 291 bp, Zea mays
  unsure (1)..(291): unsure at all n locations
tggggcgggggatgactttctttatatcnttctctgccctcaaatcattgttcacgtacaaccattccttcatacaagcttcgggccaccttctccggaatgttggcaccgagtggcttgtagtggggcgagcgataaatcaataacacccaaattgttatgatatngttctttgcccatggcctctcgtctcatatacaagttcgtgcatacttgtcggcgtttcagaaccacgcggaccctcaaccgactagtgaatttgtcgctcgtatccctcccaaatgggtgatg

SEQ ID NO: 1892 - DNA, 217 bp, Zea mays
cctcttcttatcctctgcacgactccacgtggaagcactcgcgtcgctgtccagcgagtggaagaaaggcatgcttatccgggacaacattctgtatacattatcagtgtagttctgggtactcacataaaaagtactctctagttcagaagctattatatgccatacttctaactgtccgcaagctgtgtcactactttgacgaccacaaaatcat

SEQ ID NO: 1893 - DNA, 356 bp, Zea mays
  unsure (1)..(356): unsure at all n locations
acagacataaagtatagaggttataaatgagggggctagatactgccttcagcttatgaaatcaaaatatgagaaatagctgactaacatcaagtacagtaattactgtagaataatcacatcaagtcagcacaaatagatggtggaggtgtgttatattacctgtcccataacaacaccagaatgaatctnactttgttccccaaccatgataactcacagcctttgagtgtccatgggcctgtggtagcatgtatatcataacaccaggatctgtcccccgttgaatgcttaaaacaccatntatcaatgccctttcatagtaatctgcatatgctatttcctctgtccatctg

SEQ ID NO: 1894 - DNA, 403 bp, Zea mays
  unsure (1)..(403): unsure at all n locations
acgattaanccacatccagcactgctcaaccagaaaatctaataatgttgaagtccccacccacgatgtaaggttctgtactgttaacacaaaatgtttccagctcatccagaatattatctttattttcctcatgagctgggccatacaccaccatcatagtccatttgcataaagcactcttatcccagtaattaacttggagaacatgtgtcccttgcttaaaggatccaacatcaagatcatcaatcctataacccaccagaatacctccatatttcccattagatggataccagagccacagatagtcattcgaacggtccagcttctctgtaatataatcatctccttcaacaaccatagtctcttgcataccatgaacttaaattatgaagccaat

SEQ ID NO: 1895 - DNA, 259 bp, Zea mays
gaaatacaaagacctctccccttgcctgcaaacccttctgacaagcatgagctctcttcatattatgaatagaatttctgaaccatatctctcggcctccttcaccatatcaagcctaaagaagcacctttctcctcgctcacaccaattcaacggagtacgacaccgtctcccatataaagcctcgaacggtgccatcttgatactctcttgaagctactactatatgataactcccccaaaggcaaacattcatccc

SEQ ID NO: 1896 - DNA, 133 bp, Zea mays
aaccccccatcactgatctgaaaccagctccatcacccattcaactaactccagagtcaactaccatccaatcacccaaccaagctcctacccccaacacaaacatctcgctaccaaaacatcttcattccca

SEQ ID NO: 1897 - DNA, 309 bp, Zea mays
  unsure (1)..(309): unsure at all n locations
taacctaatatgcctgtgctgttgaactcttatattgtgcctgtattgctcgtgcttgaagaccanaantagtaaacctctcggcggtgtggtactgttgtgatttgccaaaataaaaataaatttctgttgatcattccgtggcgtcccattgtacacctgatgctaattttgttcaccatttcgacttcgatttgctcagtcatgcctaacttgattccctgatagaagaaaggtccacgtggactanataaagaaccactctcacgagtagctgtgacattctctcaacgctngcagttcttctga

SEQ ID NO: 1898 - DNA, 200 bp, Zea mays
acctttaccaattaatatacttgggaaaatttgataaattctttaaaactgattaccatcacgggacattggtatatcaccaactctatataagccctactctccatatatcgccatactcatactccaaataattttatcattatatatttccttatggattttacgaaattaaccaaacttaagacttaacgccaata

SEQ ID NO: 1899 - DNA, 352 bp, Zea mays
  unsure (1)..(352): unsure at all n locations
ccaccgcngcatccacttntgtcaaatatataaacacagctctaacgtctctatatttcatacggggcctatagtctgctaagacggtacattattacagccgacaaatcggttcgccaacactggatgatttaaaccagaagctatgcattctcaaagattctgtcccatttaaaaacagatgcaataaaggtgtnctggaaaaacagtttacaccgaaggccctgaggtgaaactatagccaccttcgcaaatctacgcccacgccactattcccctcgtgctctgatatattacaaaaaccacctgagcttctctctctctcacccgcagagcttccccttatgcaaac

SEQ ID NO: 1900 - DNA, 311 bp, Zea mays
caacttctctactttccaatacccatttctttcatgggcacgcgctgagagcggaaatttcaaatctacgtggtgcgtcttatggatcacaagcctatcccctctctcatcaacatttcttctcaaacaccctgtcaactctggacaagagacctcgcaatggtccctcatcacaactaacccactgtctatacttcgaaatcaagctgctcggggcctccgccctctcccatagtacccttgcatcaactacctaccattgaagatttttgtggtttacaactgaagcttccaccttgacaagtctcttt

SEQ ID NO: 1901 - DNA, 198 bp, Zea mays
gatagtgaattcattcagctctgcggtccatttgccaacccttctttgaacttctctatatcttataatggctcttaatggttgagacgaaaggtctattatatgatgagattggaaataatgccgaatctttctagaagccatccacacggtgtataataccttctccaattctgtgtaatttctttttgacggact

SEQ ID NO: 1902 - DNA, 443 bp, Zea mays
  unsure (1)..(443): unsure at all n locations
tgagctatcatttgtctgttatttatattatacacttgtgtcggatgaactaataagtgataagctgcgttatcttagtgttcaattgatgtgacatatgacattatggatattattacatattctccaatgttaaattgatatataattaattagcaattgattatattgttaaatataaataagtatattcttttggtggctcgtgagctaaacaagctatgtcgagcttataaacgagccgagctgaatttctgggacagttcttattgcttgataagatcctagtgtgtgggaagccagactcgtgcgagcctgaccgatgagatacaccgntctaggcgtacgagcagatgcaacaaatagtcttaaaatgcaatgtttttgcattctgttatacaagctgtatgctccgcgtgcaagcaaacaaacaataatttata

SEQ ID NO: 1903 - DNA, 311 bp, Zea mays
  unsure (1)..(311): unsure at all n locations
gatgtgtgggtgttttctttttatttcatanaacacgcgtagaggaggaaggcgtgctcatcacgagcgagccgctcccatgatgaagtgcccaacaacataactgtcgtcctcgcctcgatgtcgattgagcagatgtttctgatgcatactcatgcacgtcaagccatcggtcagactttgggcggcattcatcagcagcagcagcagcagcagcaagcaccacctcaccctagatgccttacatcccacagacaagcgtgctgattatgagaagtcatcacaacgttcgctactcttctgaccatgga

SEQ ID NO: 1904 - DNA, 377 bp, Zea mays
  unsure (1)..(377): unsure at all n locations
gcttcggatccttatccttgcactcttggcatatgacctcatacaacctgggaatcagctntaaggatgggccttctgattcccattgcttttaacttccgaagaactagaatcaatgcttcgtactcagcaatgttatttgtgccattaaaatcaagctttggcgcataacaaggtttgattttagaaggtgaaaccaacacagcagccgctcctgcttcgaaggttccccaggatccatcacaaaacactgtccaggcttcggtgtctttattcgttccctcctcctgagccccttgcgtncagtcaacaatgaagtctgccaatgcctgggactgaatcaagatctgtggcatatcaatacagaatcattgagc

SEQ ID NO: 1905 - DNA, 235 bp, Zea mays
  unsure (1)..(235): unsure at all n locations
attcacaaaagatttgatgtatactgtgacacctcacatctaagtctttgatgtgtgttaatacaggaaggaaaagtaataactcatgcttctaggcagttgaggaaacatgaaaagaattacccgacacacgatttggaattaacaactgtagtacatgctttgaagaattggacgcactatatgattgtgaataagtgcanaatcttaccgatcacaaaagttgaaatgctat

SEQ ID NO: 1906 - DNA, 259 bp, Zea mays
gaactacgatcttggaatttgaactatagattgcaactttgaaattggaactgttatcgcatatttatatgttggtaccgaggatttaatccaccgtacgtgatttacccgacttcgttcagttctgaaaccaatcgtccattccggtccgatcattcgtttgtaaaataaacgaacgtttggtaccaccgtcacattatctatggaggtcccctgctttgacgcagcacctgcgacagataggatttgcctcgtaaat

SEQ ID NO: 1907 - DNA, 397 bp, Zea mays
  unsure (1)..(397): unsure at all n locations
gcttcggatctttanccttgcaactcttgtcgatatgatcctaaacaacttgggaatcagttntaagaatggcccttctgattcccattgcttntancttccgaagacccaaaagcaaggcttcgtactcagtaatattgnttgtacaactgaaatcgagtcttgccgcataacaagttttaactttggatggcgagaccaacactgcagcttgttctgccctgaaggtttcccaagacccatcgcaaaacactgtccatacttcggcatctttatttgtntcttcatcctgagcccctggcgtccaatcggcgataaaatctgccaatgcttgtgactggatcgaagatctatgcacataatcaatgcagaaatcattgagctctgcagcccattt

SEQ ID NO: 1908 - DNA, 350 bp, Zea mays
  unsure (1)..(350): unsure at all n locations
gctactgttgcgtctatgcttctctcctcgaaagtcttatataaagaaaaggtcctctgctgaagctgttatcataagttaacccaaaggtcctcttcgtgaagcttcttcattacaaaccgacttaaacatagaatgacctcttattccataaaagtctgagtcaatgttgtcagcttttataangggcataattgtaattcttcacacgctgcgtcctgtgcctataaataatgaacagtattccattactgttcacgttttctgattttnccaatcgcatctattgggaatcacacgttgtccacgcagaagtatacatgtattcaatgatttaacatgattccgct

SEQ ID NO: 1909 - DNA, 292 bp, Zea mays
cgcctctcctaccgagaggccgactctaatccgaagggatctctttacacaatatgctccacaaaaactattaaatcgttgttttgaagaccttcctaatgccaaagaccccaccaagtacctctcccaatattaatatgtcctacataataaatctagattgcgacatggacgaacgaattaagcccaacgtccaataacaccttccctctgctagaataacaacattcactgacaggcggggtctttcaatttcaacgcactgtgtgtatatataagatcatacccgaag

SEQ ID NO: 1910 - DNA, 324 bp, Zea mays
ctatcaaagaaaaattatacataggttggagaacgtactgtatgctgtcttgatggcctccaagaagctttcgcactactttcaagcttacaacataatagttccttcttcacaacctctgaaggatattatgaagaaccgggaagcttcttggaggattggaaaatgggctgcacagctcaatgaatcttgtattgaatatgttcatagatcttcgattcaatcccaggcgttaacagacttcattgctgattggacgccacggacttctgaggatgaaacgaataaagacaacgaaccctggacagttgtttgtgatggatc

SEQ ID NO: 1911 - DNA, 444 bp, Zea mays
agcttctaaagggagaacatgtgataagtttgacttacttgctttcgaaaaagatagaccttgtgcagcttgtcaagcaggttaacaagtgggaggagtgcatcacagcaagaatgtgatgaccacatcaagacccctggagctgctacatatggacctcttcagacccgtcgcctatctaagcataggaggaagtaagtatggtctagttattggtgatgacttttcccgcttcacttgggtgttctttttgcaggataagtctgaaacccaaaggaccctcaagcgcttcctaaagagagctcaaaatgatgttgagctcaaggtgaagaaaataatgagcgacaacgggtccgagttcaagaatcttcaagtggaagagtttcttgaggaggaaaggatcaagcactagttctccactctctacacaccacacacaaatgg

SEQ ID NO: 1912 - DNA, 306 bp, Zea mays
  unsure (1)..(306): unsure at all n locations
agcttatgaaaattcttcatcccaacatgggctantccgcggtgcctataccaacccatgttagtcttagcaagttagcatgtgtcgaagtcagctctatcaaaatctaccaagtatagctgaccctctaacacacccttaaatgctattgaattatcacttcttcttaagacagtgacacctacatcagtaaaaagacagctgtagcccatctgacacaattgggaaacagagagcaaggtgttatctaatgaatcaacaagaaaaacacggtacatagtatggtcaggtgatatagtcaattta

SEQ ID NO: 1913 - DNA, 407 bp, Zea mays
  unsure (1)..(407): unsure at all n locations
atctctaagtcacctgaggctgcagcgtgcgttgccacccccccctcaactcttttctctttctcgtcgtcaactcatgcatggccgaggtggaacctgagtgttgcttggcatattgagttgggccgcgtcngatttcgggatcttggatggagcgcctgggaaaggacgtgtgttggcggaggaaccactggtggagcttcctgttgtcggggtgggcttctgtgcgtccaagcgcgccggtgtcgctgcctggtgaataagacacaagcgcgccgttggatgaacaatctgtggtcaggattagatccangttacccgttcgttcgtgtcgatctgcggcgtccggtttggatctcgcgatcgcgatcgatttagttatttaaatccgatcattgcctcggatc

SEQ ID NO: 1914 - DNA, 419 bp, Zea mays
gcttctatgccctggtgcatacatacgccgccagttcatgacaatgatttatgtacactacatctaataaaagaaaggctcacatcatggggctccaccgcttttcacatatgagaccacgactgttatgtcatcaagcttcccaccataataccggtacccagcttcttgagcagctgatgcaaaaggagactgcgctattttgtccgtagctctttgtcgagccagagccggcaatttttgtgctgcaatctgaggcttaaattcaacccggagagcttaacaataacaccacttatctcattgttgtataaattgtcaaatagttcatccgtgccagcaacgataacatcaccctgggcaaccggaaagtgaaatacctaaaataaatcacatatgaagcacaagtattatataat

SEQ ID NO: 1915 - DNA, 319 bp, Zea mays
  unsure (1)..(319): unsure at all n locations
ctcttccnaagcccagtcttctcccattaacacgagctcaggtaaaangccctttccaacctactcgtttgtattttccatcgcaggacattaaggtacacttgaaccataaccgctttctatctcccttatgttgtctaacaagcgcctacccctcgggaaaccacataataacaggtacaaaaactggcttgtaaacgcacttcaaagactgttaataagcaaagcgccctgtctttcccaacaatctttccctcaattttagaagggaaatcctctcgattgaataattttaggagcatttcttagcctgactttt

SEQ ID NO: 1916 - DNA, 140 bp, Zea mays
  unsure (1)..(140): unsure at all n locations
ttttttttttntttttcctcnaacccccatctataaccttcacccaannaacagcagggacatcttatccccccaaacttttttttactccccgctgggatataaaaccctctcacactcccaatatcccaaccttcccc

SEQ ID NO: 1917 - DNA, 379 bp, Zea mays
cccccctcccccccaccccttttttttttactcctccccaggaaggtaataaaaaacccccccccccctccccccccccccctcatccctctccccacaactcccaacccccccacgctctcactcaccaccccacctcacccacaccctcacccctacaccaaaaacacacaacctccacaccacacattcccacacatcactatccctcaacacccttacatccatcacactaccatcctccctccttcaccccccccacctctacactcccactctacacaccccctccacctccatcaccaacacccccccacctcacactcctcacacccccccccccacctcactcacccccaactcccaaccaccctccccc

SEQ ID NO: 1918 - DNA, 378 bp, Zea mays
  unsure (1)..(378): unsure at all n locations
tggataacaacacatttaaaggtctaacaagnttgcttagtgttgaacaggaaattcactatgatgaacatacttgaatagtgtataatgatcagtgaacaagggttaacacaaggtcaaataaccagtgagacaatgcacatggatataatatggtctctatattggcttgaatatatggacacagtcctgaaaatcactatgcataaatatgatcataatagaggttgaagtgactaagaagattggcaacgcccagtgaataagatatgacgaatcgtgaatcggctcgaccatattacttctagtccatatatgaatatatgagactcanactagagctcgattgatcttagcacgtatatctagatgacattc

SEQ ID NO: 1919 - DNA, 142 bp, Zea mays
  unsure (1)..(142): unsure at all n locations
tgagcaagtgtcgagttcagctctatcaaaatctacccagtatagctgaccctctaacacntccttaaatgctattgaatcatcacttcttctaaagacagtgacacctacatcagtgaatagacaggtgtagcccatttga

SEQ ID NO: 1920 - DNA, 117 bp, Zea mays
acttactgtcatctactcaagaggggtcctgagagggccgtgcaatatcgtcggatgttctcccctcaaagaccgttattcaatttgaaccattctgtgagaaacatcgcacgacct

SEQ ID NO: 1921 - DNA, 271 bp, Zea mays
  unsure (1)..(271): unsure at all n locations
tatacatactgacgtgtgccgacccatgagtactacagctatgggaggagttcaatacttcataaccttcactgatgattttagttgatattggtatgcctacttaatgaaacacaatgtctgaatccctanaaaagttcaaagagcttcagaatgaagtagaatatccccgtggcacgaaattaagcactgcatcagatcgtggtggtgaatatttgagttttgattttagcaatcatctacagagtngtggaattgatccacagcttac

SEQ ID NO: 1922 - DNA, 340 bp, Zea mays
  unsure (1)..(340): unsure at all n locations
tcacacaacacagctgaaacaaaatatctccagactgagcaaaccacacaggttatgttcaatagatggacacctgcagctgagagcagtagcttccaacctatcacaagtctttttatctttaaaaggggctacataccacanagagttgctggatcttcttacctggaagaacgaaatatctgctcccacaatgtgtcaccaatcacataatgtctgtatcacatattattcacgatactaagtattcttaagaaatattgacaatcaacctactctctctctgaattctgtgatccgatctatattcattgattctcctttgcagcaacaacaaact

SEQ ID NO: 1923 - DNA, 239 bp, Zea mays
  unsure (1)..(239): unsure at all n locations
acattcttgacagccatgacgaaagacttcgccatgactgcagtattgccaccatgcgaagatatgggtgcttcgtagctcatcaaanactgcttccagtctgagtgttcgtcgtacatgggaagctggtgtggcttgtaagacggnggccaccgtgtancctgccagtctgcttacagaggagaagcatcatcanaagcaaaatttccatgatggaaatcctgatactagtcatcctc

SEQ ID NO: 1924 - DNA, 301 bp, Zea mays
  unsure (1)..(301): unsure at all n locations
tggagcggctaaggcgatgctagtagaactgaggtattgagcaatctcttgtttacttggctcagagatctagtcgtgtcttgatagaggagcaagtgagaacttggaatccacctcaatgtggattaggggtgatcggcaaatcaccgataccacaggagaaaatntggcgcctctctttccatcttacttggttcaatttcatgtagctagtgattatcgaactatcattcatttctagctctgatattgttggattccattagccgcatacttctagcatctagagaatctatatttc

SEQ ID NO: 1925 - DNA, 97 bp, Zea mays
  unsure (1)..(97): unsure at all n locations
gctatatgtgatactaactttcactactgngaatggcgtgtgatgtacacatgattttatgttacatattggcttaatgataatgaaaatcatgaac

SEQ ID NO: 1926 - DNA, 215 bp, Zea mays
tggatgaatacatccgagctgacaatgattttcgccaaattatggaggaagcatatacgtattctgagatgactatgggcttcagaagaagacttcaccccacgcacgttagaacaatccacaatctccatacaaatgatgataggaccaatcatacttatagtatcccacacagcgcacagtcttctggaatgcaacaaactttctacagggca

SEQ ID NO: 1927 - DNA, 187 bp, Zea mays
attccagacaagcctcgtcttgaccatgctcttttatacccgtaaactgattccgaaaatgtttgctcgtatacttggaaaacattatgaaatcatgtttttgaagagcttttgatgccgaaggcctccaacagtagcccctcgcaatattaatttgctgtaatgataaattcatattgcgacatgg

SEQ ID NO: 1928 - DNA, 132 bp, Zea mays
ttcttggttgctctaggcttgtctacctaatgagaaaccgccacaaagcgagtgaatagctaactcgatcaaactgaaagtcttgcttaagctttagcacttaattcttctttcatgcaatagtggttcttg

SEQ ID NO: 1929 - DNA, 345 bp, Zea mays
  unsure (1)..(345): unsure at all n locations
atactccagtggcagcattgactattgagttccatgcatcttgcagntctatttttttcttgacnatttacttgttgcttaagactcccctatgtgtagtgtcccttagatctataacatggaaataaagagtcatgtgcaactatttaatttaattatgtatatcaagattcgaacttgagacatctagctagttctgatactatattgagaattatgcaccctgcggaacaagaaactgactanaaacctctccgtctggtatcatattagaactaaaaactctcgttctggtatcatattaagctacattcactaaccaattcaaccctactacaatcgggc

SEQ ID NO: 1930 - DNA, 416 bp, Zea mays
  unsure (1)..(416): unsure at all n locations
tccgcgatgtcagagcccacccctattagtcctaggcgagcaacaagtgttgagttcagctgtgttctcattaaaatcaactaaatatagctgaccctctaacactctcttaaatgctattgaatcgtcacttcttctaaagacacgaacacctaagtctgtaaaagacaggtgaacccatttgcataattgagaaacaaaagccnattgtatctaaagaatctacgaganaacattggaaatagaatggcacgtgatataagcaatttaccaagcctttgaccaaccttgatttccatcaccgaatgtgatagctcattgcggatcttcatttntctcataggaggagaacattctcttctccctgtcatgtggttgtgcatccgtatcaaaattaactgagccccgatgctaaa

SEQ ID NO: 1931 - DNA, 182 bp, Zea mays
  unsure (1)..(182): unsure at all n locations
atacgagcaagtgatattccgaagaccgcattctcaaccagatatgggctatatgaaatcttggtgatgtcattcnggctgacnaatgcaccaccactattcatgtatctgatgaattctgttctcatgccggaattggacacgttcgtattggttttcatcgatgatattctggtgtattc

SEQ ID NO: 1932 - DNA, 223 bp, Zea mays
  unsure (1)..(223): unsure at all n locations
ttgatttatctcttccgcattatttgaaagctatactctctactagcaagaacttagttttttctttatacaccgataattgntcatcttgttctaaccactaatcaaaggatctagttgggggataaagttttcaggtttcgcctatccaccccccctctatgcgactttcaattggtatcagagctaggcacttcatcttgagtctaacaactcgaagtga

SEQ ID NO: 1933 - DNA, 288 bp, Zea mays
  unsure (1)..(288): unsure at all n locations
atatatcacccacagtcccactctcttcgatgaatactgctgcttgggcttctttaaatgatttaaattatttctagagacccatctgaaaccaaaacaaccgaatcagagacgcaaatgcttgttattgcttaagtaacatcgagtcaacaagaaatgaacgaaaatatgacgaccctttgaagtaatgagatactttngtattttctcctatccatatgtatacaaggaaaataccactttcgaccagttgtgttcgatccacaatcttcatgatatatatcaccc

SEQ ID NO: 1934 - DNA, 432 bp, Zea mays
  unsure (1)..(432): unsure at all n locations
catgcaagctctgtcaacatggttgaccaagctcgtactctcaatcatattttattcatgtcttcaaccanccaacacgaagcagaagatagaagcataatgaatggtacaacatgttggagtgcacaggccctatgttacatataaatggtctcatgttccgatcaccttctcccaagaagaccttcatctcaaggactacccacataatgatgccatggtcatatcttgtgtcataaaaggttcattggttcacaatgttntattagacacaggcagtgcggcagatattatttttgtttaagccttcatacagatgcaagagccacaagacaagatacaagatgcaatgcaccctctatgtggcttcggagggaaacagtaacatcactcggcaaataacaatgtcagtaccttctgctcatacacaaa

SEQ ID NO: 1935 - DNA, 241 bp, Zea mays
  unsure (1)..(241): unsure at all n locations
tatgcttcatatggcgagtgttttatacaatctctgagagttcaactaccaagattcaaccttcgtaattgtaccgtctttaaccttcgtgcgaagntcattaaatccttaaggaaataatgcttcagcggacgaagggcattaacatttaacattntatgttgccttgttcttaattcatagcatttgagaacgagtccccaacactgggtatacaaaaccaatgacatcaaaaacccta

SEQ ID NO: 1936 - DNA, 161 bp, Zea mays
tgggacgctctcctcacacccaaaatgtgatgacgacattcagacctttggagatgctgcatatggacctttcttgacccgtcgtctattcgtacataagaagagataagtatgggttggttattgttgaagacttttcccgcttcacttcggtggtcttt

SEQ ID NO: 1937 - DNA, 381 bp, Zea mays
  unsure (1)..(381): unsure at all n locations
ctttggtggtgatctctcanaaagtgatatatgatgtccatatgctttgtgcggcagtgttcaacacgattattcaccatgcagattgcactctcattgtcacatatgagttggacattgctcaatttgtagacataaaccctaagggtttgcctcatccacaaggaatgtgcacaacgtcctgcaacaatatactcagctttgtgggtggatagagctactgaattntgttttttaagcccaagacaccagggatctcccagaaactgaccagccctgatgtactctnttatcatcttacattacatattagatgaaatacccgtagacaaggagatccttgggaccataccccactaagagataactaatattcatgat

SEQ ID NO: 1938 - DNA, 386 bp, Zea mays
  unsure (1)..(386): unsure at all n locations
cgcgatacacccttcattggtgaaacttttcagtagacataatcgccttccagaaagcataaggggtgtcatcgtcggtctgcataactctnttgtcgagtctaagctntcttcatattatgaataattctctgaaccttttcttcgacctctttcaccatatcaggcctaaagaagtatctttctccaggttcagaccaatntagcggagtacgacatcgtcgtccatagtaaagcttcaaaggtgtcatcttgatactttcttgctagctattattatatgagaattccgctaagggcaaactntcaccccacttctgtgggaatccagaacacatgcctgtagcatatcttccagtatttggttaccctctcagtctgccact

SEQ ID NO: 1939 - DNA, 258 bp, Zea mays
  unsure (1)..(258): unsure at all n locations
gagaagaagaagaactattagaatgctaagggcgacgcacctctacgccatgagtgggatttggattgctcctctttcgactcccacaatgaaggactcgccgccaccgccttcaacaagtcatccctcttcctcaacgagcgttacacatgccttatggcaagggagaacaanggttgtagtcgaaactctacttatgcttcttcaagtgaggacgaatctaccgatgaggatgaaatatattattccatgttattt

SEQ ID NO: 1940 - DNA, 327 bp, Zea mays
ttgtctccaaaagcttctgttatttttttttttttctattaaaccggggtgattattggttataacttacttctgctaaacttaatatatactttgcactcatataaattctcccactaaaaagagactcgaagattagatatgtcctttttccttaacatagccatatatttccttggataggaggctttcctagcgagcggtctcctcttgccgagtcgataaaactgtaacaccttccttcctggtccctcctcgcctctgagattactcccccctccccttttatctggccggcatggatacacgcattgcttaatgcccatt

SEQ ID NO: 1941 - DNA, 120 bp, Zea mays
gatccggattggatgagacacgaatggcaacgaatacggtatcgatctgactggtaatcgcaacggatatcgattccgactgaatcgaactcaatttgatggaattaacgattcggatgt

SEQ ID NO: 1942 - DNA, 162 bp, Zea mays
tatctttattttctatagatatcttgaccaaagagatttccctagttaagacatctagcatttcattctttttgtgaatcaactcttgaagctctacgtttctttccttttcaggataagtaagtcttcttgagcatcaagagtagcctttcttttatctag

SEQ ID NO: 1943 - DNA, 288 bp, Zea mays
  unsure (1)..(288): unsure at all n locations
atgcttgaactttggcaataattgtattggacgaataaagaagatattctactctgttggagccagcagtgggaaatttaaccctttggcggaaaaattaccccacgcctttcatcatattgaagctgaaatcgaagagcttgacgaagttatagccgggcaccgcgacttctgtgcctgngtggcttctcggggaaccgctgctgcatttctgaaagccggctgcgaacatggaaaggttgtcaacaggcccaacttcaccttatcttcatcaatcctggatgatat

SEQ ID NO: 1944 - DNA, 240 bp, Zea mays
tttttttattccaagtacgggggagattgtcatggtgaattcggatatccatattgaagggtaacttgattggcattgggtataacatgttgatttgacatgatccaaatgtaagtgtaaaagtcaatgctatatggcaatgggttgagcaaaatgtttgagaacactatagggagattatactaattaaattgcttaatttattataacttatggtgctcatacaaagggaatgaactt

SEQ ID NO: 1945 - DNA, 215 bp, Zea mays
  unsure (1)..(215): unsure at all n locations
agagatcttcaccgtaagacagtgacacgaaaccttactgcttattgcatctgccacaacattggctttgcgtgggtgataatgaaattccagttcatagtccttaataagctcaagccatcgcctcttgctcattcaattctgactgggtgaagatatacttcaagcttntatgatctgtatanatgtgacagaatatttccagcagatagtga

SEQ ID NO: 1946 - DNA, 114 bp, Zea mays
cgaatcgcatcgaaagcatccgaacgaaaccgaatccactcgtatatgaatccgaatcgcggatccgaatcgatccgaacggaacacgatgcgaacgcggatcgaaatcggatc

SEQ ID NO: 1947 - DNA, 472 bp, Zea mays
  unsure (1)..(472): unsure at all n locations
gcttatatatttatcttttacataccttgttatggcatgttattgtattgacatcttccatcggagcgcgagcattatatttattcaactcttcttcctggtacaaataacatgtcactatgcataatttatgttacaaatagtatcacactaaaaacatctggaatattattaccttgtctttctcatcatcactaacatctggtgactcattacatccaatatctggctctaatcggcttagaacgacatcgagctcatccaacactttcatcgccttatcgtaacctgcttntgacatacacgcctgatgaactactttcattgttntcgtcaacaacattttctgtctgtatgaattagtaactccatccttcccctgaaactcttatcaattctttcaaacggaacatcttttcttgatgtcacagtgtacctcttgcatatatattttaaaggtatctttaacttg

SEQ ID NO: 1948 - DNA, 162 bp, Zea mays
gtggagttaacgtccctacaactatcagatactgctttagctcttcgaaggctttctgctgagctgatccccattggaagacttccgccgacttcagcacttcaaagaatggtaaatttctctctgctgatctagatataaatcaattcaaagatgccaatc

SEQ ID NO: 1949 - DNA, 206 bp, Zea mays
tatacttttctaaacaggaccctacatagtaaaaacagtggaccattgactaatgtaaacaaaagcagttgtatctaatgaatcacaagaaaaacttataaatgaatggcaggtgaatagcattttaccaaaccttgaccaaccttgattcatccccaatggatactcgtgggatttggtttttcaatgggagacatctttctccc

SEQ ID NO: 1950 - DNA, 459 bp, Zea mays
  unsure (1)..(459): unsure at all n locations
cgcagctgcagcttcttagcatgttaagccactcatgttttcttatattgcaanacggaccactagggggtatgaagctaggcttcagctcatcttccttcttcatccaaatttgatggtgacctgagtatataatccacaaacccatgagctctgtagaaaaagatgcatctactagagagtctatcctctggaatgggaactctgcctgtggacaagccttgttgagatctgtgaaaacaatgcacattctccatttaccattgaccttcttcccataacagtggtggctaaccattcttggtatctcacctctctgatgacaccagcactaataagactcttcactctgttccaagcaccttgatctgtgagttcagacaatattccaatcctcatgttctttgcctgaaagatggtccatattgagtgaatgtcacttacatctctgtagcacca

SEQ ID NO: 1951 - DNA, 428 bp, Zea mays
tactactcttcagaatcagagagctgtttatatgtctgtttttcacattcatcttctgctggcaacccagacataccatatgtggttgtctccaagtcatcaattatgactgttgtatgcaaggagattcttgcctgctacaggaagggcgttctattgatgcattttctgttatctaaaaatagacgagatctagaaactgaagctgctaatggtgagaccctagttggttctggtaattgattgacaacttatatggactaataagtgtttatgttgagatacacaggtgattattccacaagttcactattgttgagtattctagccatggtggcgatgtggcttggtgatatggagatgctcaactagtgtgataaaggagctcattgcatatgaagacatgacatggtgtcatgtggctatat

SEQ ID NO: 1952 - DNA, 495 bp, Zea mays
  unsure (1)..(495): unsure at all n locations
acccagagtcacctgaggcatgcaagcttccatctataccgtctcagactggtgtaatccttctgtagtcttcgangaaatcctccgaattctccgttntgattaccacatcatctacgtaggcctccacacgcttgccccagtgatcggctaagcatgtttgaatggctctctgataggtcgctccagcgttcttgaggccgaacgacatggaggtataacataaagcaccaaacggagtgatgaacgctgttttttcctcgtcttccttcgccaaactaatctgatgatacccggaatagaaatctaagaaagacagcacagaacatccagcggtggagtccaccacctgatctatcctcgggagcccgaagggatccttcggacagtgtttgttgagatcagtatagtcgacgcacatgcgccaatccacttttattctttttagtacaagaacagggttggctaaccactncgngtgaacacttctctaat

SEQ ID NO: 1953 - DNA, 462 bp, Zea mays
  unsure (1)..(462): unsure at all n locations
agcttcctttggtgccttgtcctcagggtttactgacttgttcccctatgcatatgacaattccatagttagtcaattcaggttaagcagtatacaagtgaaccatagaatcagtaatgcacttacatttagctgtgacacaaagctgttgtagtatttctggtcgtccttgtaatctttccaacgagttaggataggcatggtttcccgaataatgatgccagcctctgatgcaaacttggcagcttgaacaggttcatgtggcctttntttgccttcctcaacagctatgggcagtctcctttgcataactntagtcatcctgtccagttgttttcccttggttgctgccctgngtctccttggtgctcgctgtgtangagctacaaaatataattcgctcttattggaataatgaaatgttntgnttcatgcaaatcagcaaaagagatgccttatttg

SEQ ID NO: 1954 - DNA, 467 bp, Zea mays
  unsure (1)..(467): unsure at all n locations
ctatggatgatagcttcagcattgcttttgagaggatctgccgtaggtgtttcttcttacaggatcttcggcgacgaagcatacccccaacagcgggcatggataatgcgggatgcagagctcacctaccggttggacgaggagtaggatgcctgcccagcaacaaatcgatccccgctcttccttgcttcgatccaagaccgcaccacacctatcgtcttcaccacaaactacacggagcggcttgacccagtactgcaaaccaggttgtgttgttgtacatgacaatggctaacctctctggagctgcagtagaatattcagacttggtattgactggttgtgttaaaaaatagctaaaataagctacccaatgctagattatttcagcttatttatgatgataaagngatattctatttttatattcttctattcaattccacttatataatctagaagtaaac

SEQ ID NO: 1955 - DNA, 392 bp, Zea mays
gccatacaaagaagtatgtataggtacatatgttatgatgccgaattataaatagttactaccattaaatatgcataatatctgcaatttaataaatgtagattgcatacctttctaacatccccatattgtgttccttcacaatcatcatttccaacaagcgtcatttgcagttcagattgatgatgtgcatcaatatttaagcctccatcctactcattagtgcattatagtcaatattacaaataagggataaatcatcccatttgtttgcactatacataaattacattggtgtttgccataatattacctgttgtcgtgaatgtactggcacatgctcctcgttatcacattgcgatacatgttcatctccagcggttccaacatca

SEQ ID NO: 1956 - DNA, 328 bp, Zea mays
  unsure (1)..(328): unsure at all n locations
accggaggcaaagaacacactgaacctcacgacaatggaaaggaatctctaaaatctgttaatggcaaggctctaattgtccatgactatgatgcttacatcatttatcctcaaaactatcatgctaagaatgctcatgccaagaatgctaacattgctcatgtttatcattcttatgcttctaatgcagaaacatcttattctacgcatatcgtctccaatgctcanattgctcacatgcctaaggagaatactcaaaatgtctcaatcgatcgcacatgtctttctatacattcgatgcatcttatggggtactaacacatctgac

SEQ ID NO: 1957 - DNA, 467 bp, Zea mays
atccttaagtcacctgcggcatgcaagcttctaaagggagaacacgtgatatgtctttcctatgttcatttcgaaaaagatagaccttgtgcagcttgtcaagcaggtaaacaagtgggtggagcacatcacagcaagaatgtgatgaccacgtcaagacctctggagctgctgcatatggacctcttcggacccgtcgcctatctgagcataggaggaagtaagtatggtctagttattgttgatgactcttcccgcttcacgtgggtgttctttttgcaggataagtctgaaacccaagggaccctcaagcgcttcctaaggagagctcaaaatgagtttgagctcaaggtgaagaagataaggagcgacaatgggtccgaattaaaaaccttcaagggaggagttcttgaggaggaggagataagcacgagttctccgctccctacacacctacaaaatgggtg

SEQ ID NO: 1958 - DNA, 433 bp, Zea mays
aaccgcagcaagggtcaaactccgcattatttttctcccaaggaaatcaacatgaacaaagaaaaaggtaaagattcaattagtcatgttgtttgcactgatcatctctctatgttatccaagagcaaaaagagaagaggaaaaaggaggtgccttaagtgcaatgagttatgccacctcattgcgtcttgtccatacaaagacaaggatgaacggatgatgagatgttttggatgcaatgacaaggaccatatgatcaggaacttctatttcgctgcaacctactcgaagggtctttcattccactgcgatccagccttcgagtagagtaagaatctccagctttaaagtcataattattatccgcctattcacccccctctaggcgacaaccagatcatgtgtccgagcataaggaactttcaccattcta

SEQ ID NO: 1959 - DNA, 348 bp, Zea mays
  unsure (1)..(348): unsure at all n locations
tcttttcatnccnaanaacagagaaatgacggcttgtgatgtgctcatgctatgaacaacattagtacgtgaggctatacatcaatacctttgctaaggagcatgtaacttcattggctagtagctgctaaatgcgtctaatgcttcggagaaagactgccagtgcctctactaatagctaccgaagccattggaggtggcctttccatggggtactaatacgacctcaaatttttaaatgtgggatccttacatatagaccttaataaccaagttcccggatcaatgggatcaggaaacgggaacgcagcacacgtgactctactaagactttgttgtaacactaca

SEQ ID NO: 1960 - DNA, 408 bp, Zea mays
tcatgcaactgccgctataaatgagaggcgaactgtgtttctctgtctgacactatcttcttcggcacacaatgaatacaaacgattcgagacatataccatcctgccaatactgcactgacgcacctggtcttgacacgtatgaaatgggctgacttggtcaacgcgcccacctactacccaaacggaatcgcacacggctcgagtgcgacgcaacccgtctatgaaatacataccaactttattccatttccactgacggatctgcaacggtcgaacaactcaacaggtctttggtgctctgccttaattcttcgacaactattgcacatatacacatgctctgcgatcctcctccttactacgcaccaacagaaccttctcttcagatcctgtacatctcctccc

SEQ ID NO: 1961 - DNA, 446 bp, Zea mays
agctttatgatctgtataaatgtgacagacatcattccagcagataatgacgctagatcttcagggcatgaaccactgcagctagctctagatcatgagtgggataatgctcctcatgtcggtgcaactgccttgaagcatacgctattactcggccttcttgcattaacacacaaccgagaccactgcctaatgtgtcacaatacacatcaaagggcttattgatatctggttgagccaataccggagcagtggttaataataccttcaattgttcaaaagcttcactacattttgaagaccaattgaatttagtatcattcttcagtaaacttgtgattggcttcacaagcttggaaaaatctggtataaatcggcgggaataaccagccagtccaaggaaacttctgacttgatgaacaatggtcggtggttccactccaaat

SEQ ID NO: 1962 - DNA, 468 bp, Zea mays
cgcacccaggtacattggtccatctctggcgattgacctatgtggaccactggcataccgacttcaactccccgaaacattgtctgctgcgcataatgtgttccacgtgtcacaattgaagaactgccttcggattcctgatcgaaccattgaagtgactgatgttgtcctggaaccagatttaacctactcggaacatcctattcgagttctggatcaaaaggacaggatcacccgaagaaagactctcatgttctacaagatacagtggaaccagcattctgaagacgaggctacatgggaaacccaacacttcttgaataagaatttcccacgctctctaccctcatgtaatttgtaaagtgtatatagctctcgcaataaaaacaagtgacccccacatcacccctgccttgtaccaaattaaggaaatacaaatgtgatgcgtttcctttaccattatttacc

SEQ ID NO: 1963 - DNA, 408 bp, Zea mays
  unsure (1)..(408): unsure at all n locations
atgagcacactcaagaaggtattaaaaaaggacatggntagaggattaaaggatgtggtgtttgaaaaagacaagccatgtattgcatgtcaagccgaataacaagttgcttatacacatcctactaaagctttcatgttcacatcaaggccactggaactacttcatatggatttatttggacctacaaattatgtaagtgccggtggcaacctctactgtctagtgattgttgatgacttctcaagatacacttgggtgctctttctccatgacaaatctgaagttgcatctatattcaagaagattgccaagaaagcacaacatgaattngattgcaagatcaagaagattataagtgattatggcgaagaatttgacaacaccaacattcatgaatactgtgat

SEQ ID NO: 1964 - DNA, 431 bp, Zea mays
cttttcgactaagtcgggacagggcctcatggacttgtgtattacgcgcaagcgcgaacgccgaccgagccgtaggattcccacgcctctgggatacggatacctcactcgtcccttccgcgaaaagcgattctcgctcacacaaacatccctgttaccgacagagtcaagatgctcgatacaggaggaaaaaaggcgcagcttcccaagcgcaccgagggtgttttcttctggcctcggcggccgcaggaagcacacgctaccagatgatcggatcctgcaggctctggtcttcacgccgaatggagctgtagcacactcggcatcgacgacgtcttcagcaaagcccgacccagcctcgggcggcgccgggtccacggactcctccgggaatacgggccgaccatgcggctcaaccgggtacccctggg

SEQ ID NO: 1965 - DNA, 437 bp, Zea mays
ggcgatgccacaaccagcccatgctagtcttagctatagagcatgcatctagactggcctcctcttttgcgaaatcaactatataaagtttgccgtctaatacacccttgaaagctaatgaaccatcacttcttctaaagacagacacatctacattggtaaatagacaattatatcccatattgcataattgactaacagatagcacattatatccaagggactcaactaaaaacacattatagatagagtgctcattagagattgcaatcttgcctaaacctttcactttgccttgggtcccatcaccaaatatgattgaatcttgggaatccttatttttgacgtaggaggtgaacatcttcttctaccccgtcatatggattgtgcattcgctgtcgatatatcagcttgaacccaccgatgcataaccctgc

SEQ ID NO: 1966 - DNA, 410 bp, Zea mays
  unsure (1)..(410): unsure at all n locations
tgaagctgacatcagcagctaccgacgacagcatatcgtttgttgcctattctatcacaattntaaggtaaagtttttccctcaactttttattgttctacgatgaagcaaagatttctgatgaaggttattttgcacagagtatgctgctaagcacagccttgacaatgccacacgacctcaaagataagaagaatgaagttataattgaaggcttggaaagtaaaatcaaagatcatgaagctgctcttgaaaagaaagattttcttcttcaaacaatggagggttcattggcagaagcccaagccaaaattgccagattaaacagtgaactcctcctaaagtcagaaagcttcgagcaagaaaagaagaattctgatgtgaagctcgaagccgaagatgaaaaaagt

SEQ ID NO: 1967 - DNA, 242 bp, Zea mays
tttatatgaacaccggacttagtacaacaacatattcgcttcacggtgtggccgcttgctgagaaatgggaaatggcacaagaaaccatcaaatacgcccacgaacgtgagctcgtgacactgaaccacacctttaaatctggagataaatttattgagccacatgacgagcggttgaaaagcattgacaacttaagtgacgagctaatcgggaactactccaatgctgaagataatgcaat

SEQ ID NO: 1968 - DNA, 351 bp, Zea mays
  unsure (1)..(351): unsure at all n locations
ctctaggcgctctcaattgggatcgataccattctcttcacataacggactaatcgcctgataagatgtgatctaaaggataggggatggtggtcaaccaaaaggaaaatgagtccatcttcaacgagccatgagatgacaaacccactgactcttgctcaagtcacaaaataaacgactggaacaatatgatgcgcatcaagataatctttactacgacagcgacgaatcttctttntaccataagacacgacgaccagtaagaaaacctgttattcaatattcattggatataccgtatcccttcattccaatgctcatctctttcaatacccttggtaacctcccact

SEQ ID NO: 1969 - DNA, 416 bp, Zea mays
cttcacatgagctgccacctttagcgagctcatgtatattattttctcacaacttgtgagcgacgaacgtatgtgagctcatccttgctgaattgatcaccccaggtctagaacaggtaccccaggatgagaaacatgaacgatggcgcgatgtgttcatgagaggtctataccgtcgtcacccaatcaactttggttgctggatcgttgccttctgtatgatgtaattatttaaatattttatacagaactccggtatatattaatgttgtgacattcgtttatgtaccatgagtcatcatatgtgtaagacttattcctagcacacttggtgactatgttcacgcccgagtccctaataaccgggtgtgacacaataccacatatacaatagcatgtactacccacaagttcag

SEQ ID NO: 1970 - DNA, 463 bp, Zea mays
agcttatgaacaatatctggacctgagtgaagtatggtattatattaatctcgaggacacacaagataactggaaatatatgtggggctctggttttttctcggcgcagcaggcttacaaaaggcaaatgggacactctaatggtcatattgcatacaaatggctttggaaaagcaaatgtcagccccgacacaaagttttcttctggttatggttaaagagtatgctaaacacaagtatgcatggcaatttaacccgcgggttctggtacccgtcgggtacccgacccgactggtgcgggcgcgggtgcgttttttcacccacgggtgtgacccgaccccgacccgcaccttttcgggttcaggttcgggtttctcacttcacccacgggtgacccacgggtacccgaacatgaaccggtctgctggcccaagcccactactgtctacggcagtacaccacc

SEQ ID NO: 1971 - DNA, 461 bp, Zea mays
tgtacagaaacaagtgggaactcggtctcgcactcgcgtgacatgttaaccctatctagcttctcgtacgttggggtacgtaaagagttcgcccacgcatattgtcggccagtgagatcaatctctcttaattcaaaactgtctattacagcgctgaacaagaaaggccatctatcactgaatctattattattcttttccttgctgctacgcataatgttaaagtcccccccaattagagttggtaaatggttgtgctgaaaatctcttacaagttcagccaagaaagctgatttgaagtcatcctgtgctagaccatatactgccataaggatccatttgaaatgatctgacttattgcttatatggaattaatcaaaaactccccttcccaattaatgacaaatcacaaatgtagtgttattcctaatagcaagcgcactgatctacccctcggggga

SEQ ID NO: 1972 - DNA, 474 bp, Zea mays
catgcaagctttgcttctgagtcttcggaagctaatgttatatgtttatattattggcggctcttaatactgattccaggttatttctggtcatattgacaaaatttgcatagcaagcgaccccgcacttgataaatatttagacacggcccgaaggattgaagctttctttgaagggtgttctggcacaaatattcctcgaggagaaaaagaacatgctcatttgctaaccaagacatcagcacaggggctgcccttaccttcggaagtatttatctaaacaataaaagcaccttcagttgaacttcttgaaagagtactcctcaatatatctcctgcttatagtgaagactggagaactgagatcatctctttccttcaaggttacttgctttcagatgacaaagcttataacaagagactagaggctagagctcgaccatatattataatagaaggtgagttgtcaagcgt

SEQ ID NO: 1973 - DNA, 455 bp, Zea mays
  unsure (1)..(455): unsure at all n locations
catgcaagcttagcttataatctcttacctcaaggttgttaaatctcgtttttcttaaactcaaatgatcttggatcaactttgcaatctgtatctagtctagncaaaacaaatcagcagcaaccatatcagtaatcctatagaggcatacaacactatacaaaacaatagtaacaactaacaagactactactaataagataaagtaccaagctccaacactaagtttatttaaacttccatgaggcagtttaatggcacaacggtagtgttttttagggctgctaatatgatgcactgccttctttgtattattctggaaagttgggatatgaattagagaaccaatgaaatttgcatcctcctctggaacattgtccagacaaccgcctaactaattntgtgtacaagtaaccctccagatattatagatggtcagacccaccccttaataa

SEQ ID NO: 1974 - DNA, 459 bp, Zea mays
tataacaagagaatagaggcaagagctcgtccatatgttatgtattaatgggagttgtacaaacatggagtgtgtgctccgttgctcaaatgcttatccacaaccgaaggtatagagttaatgaaagaaatacatgcaggcctgtgtggatctcacatcggatctatgccgttacttggaaaaattttccgtcaaggattttattggccgaaggcagcttcggatgcagcagaattggttcaaaagtgcgaaggttgtcagaaatgtgcaagagatcaaaaacaaccttcgttcttgacacagctcatacaacacacttggccatttgaaaggtggggccttgacttgttaagtccgttaccaccggcccacaggaacttgagatatgttgtggtagctgtggaatatttttctaaatggattgaggcgaagcccttagccacaataacttctgctacc

SEQ ID NO: 1975 - DNA, 439 bp, Zea mays
  unsure (1)..(439): unsure at all n locations
agcttgaagccatggtaagtagcatatgcctattatatacgaatngactcaagcctagctacgggtgcataggtttcaccgaaatccaaaccttcgacttgggagtatcctttggccacaagtcgagctttgttccttgtcaccacaccatgctcatcttgcttgttgcggaaaacccatttggttcctacaacattttggttaggacgtggaactaagtgccatacctcattcctagtgaagttgttgagctcctcttgcatcgccaccacccaatccgaatcttgaagggcttcctctaccctgtgtggctcaatagaggaaacacaagagtagtgctcacacaaatgtgcaacacgagatctagtgtgtacccccttatgaatgtcgccgaggatggtgtcgatggcgtgatctcgttggattgcttggtggactc

SEQ ID NO: 1976 - DNA, 430 bp, Zea mays
atatatataaatatttgatgccgcacaacataaatcatacaaaatgtagagcccaacaaaatcgtttatgaaggctgcgctatgatgtgacttcaagggcacgaataattcaccatgttgtacacgagtacaagctccagcgtatctggtatcaaagtgtgtgcgaccattatggctacgacaacacaacaagtcttcgtaacaagctcaacgggcgtagttgtggctcgatagtctagttacaacgtaagtccatgcaacatgcggaacgagtgcaattgtggttcgatgaccacgacaggcaaacagtgcctacatggcatgcgaaaaatacgtgactcgacgatggtggtccgacccgacggaggcggtccgataagcgagagtgcgacatatcaattatatgacgcagccaagttcgtacgggcac

SEQ ID NO: 1977 - DNA, 473 bp, Zea mays
  unsure (1)..(473): unsure at all n locations
gctatacagtgtgcctgttagctctcccttcgttttcatgatcaatatgagtaccactttactgaactctgccccagctgcccatccgattgagtgcccacatacctattgcttagacagtgtcctggagagtggcccttgcgctgttccggtctctgcttggccggacaattttttatcgggccaacagacaatgctgtcagagttacaacttgtgaacgataatcgagctattgacttcatcatgcctgctcccgatctgggtgggctgttaggtggctcagtcacccacgatccagttgtcactgacaatcangaagccgtgagaaatctaccttccctcggatcagagaacctaccgacagacaacaccaaattgatagacttcatatgcacaataaccaagacaccagagccacctgtgatctcattcccgccgcaaccactcccgttaaaatctcagatgcacccac

SEQ ID NO: 1978 - DNA, 421 bp, Zea mays
ctcgagagctagctaactctgctagtctatcattttcttatttattttctcatcgcgggggtgcgcttgcactaaattcatgtcgcttaatttcattaaatagctcaacattaacgttagcaaaaaaatcatattgttcaagaaaaatcttataatatgttttttgatctaactaaattctattttagtagtcttagttatactttttcttgttgcacacttcttcacaaatggcttatacaacttctctattagaggatatttcatcgtcactatcactattactctcaatctcactaaaggatgattctttagtgttacctcgtgccatagtgcatttgcgagaagcgtaatgatgaattctttcgcgtgtgtctcttgcatttggcttcatcttaactcaatgaatcattccaaatct

SEQ ID NO: 1979 - DNA, 372 bp, Zea mays
  unsure (1)..(372): unsure at all n locations
agcttgacattgttnccctggagtttaccattgccatccttgaagccagagcgtctcccattatagagcatgcttctagcaaatntaaatttttcattctctatctcatgctcattgattntataagttaatcgagctatatgatcattttgttatttaattaaagcaaggtgatcatgaatagcatcaatattaacatatctacatctagtgcaaatggaaacatgatcagcagtatatgtagatggtttgcaagcacttatttcatcaatcttagcatgtaaaatagcattctcatttctaagactggagatagcatcattgcaaacatctatatctttagccttagaaattaattaatcattctcagtt

SEQ ID NO: 1980 - DNA, 402 bp, Zea mays
  unsure (1)..(402): unsure at all n locations
cgagcaaaatgaatagcttcgattacaggatgcacttatactattcttcagctatggtcaaatttgttgcagcataacagtgcaatagcaatgaatgttgtggtaacttcacacctacccgcctgtttatatagtgccgtangtgggaaggtaaatcgtcaagtcttccgcaccggacaaacagtcgcctgcacccactgaatattgggccacagagcctgataaggtgaatcgccaggacgtgcgtatctgctgcatggtggggccaccttgcgctcggattattttaatcgtttctcggcaacgagctcaaggaaggtgtgtttcggatctttggcactccgaagcctacaagactttttcatggatcaagctcgttacgaacaacgatctatcaccacc

SEQ ID NO: 1981 - DNA, 338 bp, Zea mays
ctcgccggagttcagaaccccgccggcgcacgtggaccgggtaagtcactgcgccatttttctattcaatgcacaaatagcctctacatcaccccgtgaagctcaccgcgccattggattgaactagatcgccgttggttgaccggaacactctccgacgacgagatcccccgcctgcgcacgtggaccggacgatttctgccacccccgccgtcgagccgctcaccgttgtcaccgtctgaaactaccggagccaagcccgacactcgtcggacctctctatgcagccgtatgccacgccaaccttttgtttctcgcgtgtactgtttaaacctatg

SEQ ID NO: 1982 - DNA, 430 bp, Zea mays
tttctcgctgtcacactctacttgatttgcgagtttcgtgatttacacaagtgctcgttatatgcccgaagggtagaagatgtctgacgacaacaaagttgtggaccctgctctacctgcgttttacgaagctatggaaaagacaaacactgaaaacattacaaatgaaatattagctgggttgtctgaggatcctgatgatagcgacaattttgatgtggaaagtgggaacgaagatgccgaagatcgaccctggcggtcaagtcatactatcttcggaaagccgtccatcaaacagagtcagattgatgccatgaacggaagatatttccgacatatgtccattgtgagaactggaggggatagtgctgcccctacacccgacataagatgaagttgttgtttaccggagcttcatgaatgcagatct

SEQ ID NO: 1983 - DNA, 463 bp, Zea mays
  unsure (1)..(463): unsure at all n locations
agcttcttcaccatgtgatcactgttatcttgttattgttgggcaatgcatttcccttttagttgtgtcaagctcttctttagcctctcattttcttctttgagcttttgatatgaatcatcatttgttcctgcagattctatctcaaaggaagatttgcttgttgacaaacaacaagcattagcacatggtaatatagtatcaatttgaatacatgtgcatgagtgaggttgttgggattttaaattttctatcacaacctcatgagcaatgtttaatatgatatgatcatctctaagattttcatgagagcataggagcatatcatatttttcttgaaaagctagattnntcaattttagcttttccacttggtccttaagcaaggtattcctatttactaattgagcgatacaatgtgaagcgttatcttgctcaattgaaatagtttcatacctttgga

SEQ ID NO: 1984 - DNA, 433 bp, Zea mays
gtttcgcttataagtgcccgttggtagttcgttgtgttttggtaccaatcgcgacagacaattcaaaagatctataaagctagtatcagaccatccggcgctagccttcaacttaagaagttctagaactgtacgcagcgtagtaaactctctgtgacaaccctttgactcatcatataaaggttcttttgaggctctcttcaagccctccattctagatagccctttttgcgatgccacagaactcaacatttctggttccatatggcgcaacatctcttcgcaatcaaattcttcaaaatcttgattagcatgcacataatccactgtaccatcaactttatttaaaattgcgacaactctctcatcattaccaggcacttcacacggattcaactcaccatggtctgaccatattgaattgttttaaacc

SEQ ID NO: 1985 - DNA, 417 bp, Zea mays
  unsure (1)..(417): unsure at all n locations
agcttgtgaagggtcttcatccnctcatgttctaagcggcgatgccacaaccagcccatgctagtcttagcaattaagcatgcatctagaccggcctcctcttttgcaaaatcaactaaataaagtttgtcatctagtacacccttaaaagctagtgaaccatcacatcttctaaagacagacacatctacatttgtaaataaacaattatatcccatattacataattgactgacagatagtaaattatatccaagagactcaactaaaaacacattagagatagagtgctcatttgatattgcaatcttgcctaaacctttcaccttgccttggttcccatcaccgaatatgattgaatcttgggaatccttattcttgacgtaggaggtgaacatattcttttccccgtcatat

SEQ ID NO: 1986 - DNA, 413 bp, Zea mays
  unsure (1)..(413): unsure at all n locations
ntagtgatcagtgagagagatttgttgtgttcttttgttctctcgcgcttggattgcttctttttctcattctttcttgtgatcatctcaatcgtaaacaaggcaagagacaccaattgtgtggtggtccttgcgggaagtttggttcccaattgatttgagaagagaagctcactcggtctgatggaccgtttgagagacggaaagggttgaaagagacccggtctttgtgaccacctcaacggtgagtaggtttgcgagaaccgaacctcggtaaaacaaatccacgtgccatactctttattcgcttgtgatttgttctgcaccctctctctcggactcgtttatatttctaacgctaacctggcttgtagttgcgattaagtttgtaaatctcagattcgccctattca

SEQ ID NO: 1987 - DNA, 424 bp, Zea mays
tcgggaaaccgatactcttcgatagagtaccgataaccttctcgccagtctgatctcgtatgcagcctaacctttcatcatcaatgccaccgaagagaagcgctcccgaccaatacccacaggatatagcatattcttttagttcctctttttcagcttttgtcagctcttggccaactaagttttgaaagtcaaaagtctcatcttccgaagtatcttcggtcatctcttccttctcggggtttgcggccgtagtctcttcggtggctacggcagcttcttccacggccatgtttagtagcattttgtctatatcagcagctatgctctctaaattaatatcctcggatttggcatcttcggctctgacctcttctgcggcggccttcgaaggtacagcttcagtagctgtcatgctctcaat

SEQ ID NO: 1988 - DNA, 420 bp, Zea mays
  unsure (1)..(420): unsure at all n locations
aagcacctgcagctgaagcttngtaatgctttggtccttggcatttcttaactttctcatgcttccaaggtcttaagtgctccctctcctccaagttttacccacatgtgataataggtagatgtgccattatgaagccagcaccttggtaacacctgtggtgttacagccctccccccttataggaatctcgccccgagattattgggggtgctatgaaggtgtgctggtgtgttacccttccctttatctaagattctcttgttaactgctctttggatgtcattctctttgcaacttcagaaggaagtcctttttaagttaaatccacaacttagactaccctcgctatctaagtttttcttacaattgtattcaaagggcaggtggnggtggggttntggggtttacataccaact

SEQ ID NO: 1989 - DNA, 476 bp, Zea mays
tagtcatggcaagtctacattacttaagtgttaaccaaactattttagtttacagggtgaactaaacaatcaaataagcactagcagaattttcggacagcaatacagcagttacttgttttaatcataactcttcaattattagtccaaaagtatcaaactagaactctctggaaagcttaaaaagtgctctacaactctggtattatcatcacaacatgattaaacacttagcaaggtcgaattgtgcaaacacagtagctctatctaaatttggatagattcagacttgcaacttcaaaaattcacaactaaagattcagacatccaaacaaattgatcctagactttctggaaaagtaattaaattgtctacatattatttataaacatctcaaggtgattcaatacttaactaagaataaaagacactagaagacgttgtttccagaactgacagattcagcttcacattt

SEQ ID NO: 1990 - DNA, 450 bp, Zea mays
agcttgtgaagattcttcatcccaacatggttctttctgtggttctagagccaactcatgttagtcttagcaatcaagcaagtgtcgagttcagctctattgaaatcaactaagtatagttgaccctctaacactcccttaaaggctactgaatcatcacttcttctaaagatcaataacacatgtatccgcataaagacagccgtaacccattttgcatatattgagaaacagacagcaagttgtaatctaaagaatctacaaaaaaacattggaaatagaatggtcaggtgatatagcaattttacccaatcatttgaccaaaccttgatttccatccccgaatgtgatcgctctttgtggatcttggtttttctccccaatcatgtgggttgtgcacccgctgtcgatgatccaacttgaacccccggatgcataaacctacaaaac

SEQ ID NO: 1991 - DNA, 351 bp, Zea mays
  unsure (1)..(351): unsure at all n locations
cncataatccttcgttgctgcttatccacgtacactcctaatgtcttattacttgttcccacgccatcgcttcttatttttcgtcatacacctttctccctcttctctcgaaaatatgcttatcacggcctcaactaccggcttcttatctgggcggtgccacatctcctgccctctttgaaaaacaccatttggttctgaacatgacactctctaagtataaagcttatgtggcgcctctcattcttaacgtgaatctgacgctcacgctcaaattgcgccacataaaacgacggatcttacgctagcatttttgacaaaaaccctatgtgacacctgggtgtcacaggc

SEQ ID NO: 1992 - DNA, 406 bp, Zea mays
  unsure (1)..(406): unsure at all n locations
atccttaagtcacctgcggcatgcaagctnttccttatcgtcatcaaccttgacattgtacctctccgatatccagcctgctgcccatttgcttcggtagctgatcacaggaaacttcgttgttttccgattagcaaaattatagcaaccaaaattgtcatgtgatccatcctttctagccttcgtctgatagtgcagctcgtgaactcggcataagctgtccgcaaacggctccaccgcttggcctcggagtgcccagatataaacacttaacctaacgatagcgttaggggtcagctggtgaaaatagataccgaacctcttcaatacctctgccataatcccatgtagggggaatcttaatccaccctttaagaagcgtttgataaaacaatttatccctctc

SEQ ID NO: 1993 - DNA, 329 bp, Zea mays
ccatccttaatcccattgtgtctcccattatagagcatgcttctagcaaatttaaattttttattttctaagtcatgctcattaattttggcactaagtcgagctatgcgatcattctgttgcttgattaaagctagatgatcatgaacagcatcaacattaatatctctacatctagtgcaaatagtaacatgctcaatggtagatgtagagggtttgcaaacatttaattcatcaatcttagcacgtaaaatagcattttcattcttacgattggaaatagaaacatcgcaaacaattaaatctttagccttacaattaattttatt

SEQ ID NO: 1994 - DNA, 392 bp, Zea mays
  unsure (1)..(392): unsure at all n locations
ctgtcaaaaatattcctcgaggagaaaatgaacatgctganttgctagccaagtcagcagcacaggggctgcccttacctttggaagtatttttcgaaacaataaaagcaccttcggttgagcttcttgaaagagcagacctcaatatatctcctgtttatagtgaagactggagaactgagatcatctctttccttcagggtaactttctttcagatgacgaagcttataacaggaggatagaggcaagagctcgaccatatgttataatagaaggggagctgtacaagcatggggtctgttctccattactcaagtgtttatccagagccgaaggtatagaattgatgaaggatatacatgcacgcctgtgtggatctcacattggatct

SEQ ID NO: 1995 - DNA, 391 bp, Zea mays
tcttcataagctgggcctcccgtcttcctctacgcatttttttgtgttgaagttctgaagatatccgacatctgcctttatcaaattactcccgaagcaatcatacgaatgggaatcttcgtatgggccgcgaatagccaacgtttggagccaaacgcacaaacgttctgcaatatgcatgagctgctatatgagacgaaaccctgtggtaacgaacaatatcataacaattttggctgctataacttacgtgctcgatctgggtcaagctgtcctgtgccaacccttcgaaagagatggcccacagactggatgaacgaatggttctatgtgataaacgatttgaaagcacgacatgatattaaagatatcatcatgcgccctatctggc

SEQ ID NO: 1996 - DNA, 408 bp, Zea mays
  unsure (1)..(408): unsure at all n locations
tctagangcatgcttaatggctaagactagcatgggctggctgtggcatcgncgcttaacacatgtggggatgaagaaacctctcaagcttctaaggggagaacacgtgattggttttgactaacgtacaattcgaaaaagatagaccttgtgcagcttgtcaagcaggtaaacaagtgggaggagcacatcacagcaagaatgtgatgaccacatcaagacccctggagctgctacacatggacctcttcggacccgtcgcctatctgagcataggaggaagtaagtatggtctagtcatagttgatgactctcccgcttcacttgngtgttctttttgcatgataagtctgaaacccaatggaccctcaagcgcttcctcatgagagctcanaatgaggttgagct

SEQ ID NO: 1997 - DNA, 469 bp, Zea mays
tctaatgcaatcgaaaaagaagagagtgatgatgatgattataatgaaagtgagagtgatggagatatggctctatctgtaaagaaattcaaaaaattcatgaaaatgaagagaggtcaacctacaagaggccaaacatcaagaagaaatgctttcaatgatagaaaatgttttgagtgtggggaacccggtcacattgccatgaatcgccctaacaagaagaagaagggcaaagatggagatgataagaagaagaagaaattctacaacaagaagaaagatggcaaagcctacctagttgaatgggattcagatgatagctcggatgatgatgatgatgatgacacctcatccaagcttaatgccggaattgccatcaaggaagctccttcacttttctcatcccctcactgtctcatggcaaacggagatgctaaggtaaaatcaacaccgatctaatgatataatg

SEQ ID NO: 1998 - DNA, 263 bp, Zea mays
attgacagccccatcgattgccaaataccggtcagcaagctcatcttgcagatgtctgacgtcaactcttaactcatttatacgctgaccatcttctacccacaccctattttggtgacgtaactacgcgcgaaactgctctacttggacttctagggctctgatgaggggattaccgccggtgctgctctcttcatgccttggagccagctggtgccgaggtacgccaatctggccaatggaactacgcgcgggttttctcg

SEQ ID NO: 1999 - DNA, 435 bp, Zea mays
  unsure (1)..(435): unsure at all n locations
ggaactataatactaagcttgcaatgtaaagaggcatgcatatgactctgtttcttcactatgcncggcctactgtggctgttcctgtctgcctgacaaatatgactgggtctgttcactggtgggcttcatctattaaatggccacatcggctcttcctactatggagacttttgtagacggataaaagtgcttaccttcaacagaatttcataatttttggttcaacagtttgggagatatcgaattttcaagttaaccatactgctgtctaaaacagattcagtcagttatcttgccagatgttttacaacttgttgatggcagaatctaattatacattgaatactgaagttgtagaatattttgcgcacatactcctacagtatttgtttgatatcaccgctgtcttaattttaaagatacataattaac

SEQ ID NO: 2000 - DNA, 314 bp, Zea mays
  unsure (1)..(314): unsure at all n locations
acccaaagacagcagctgcactnaaggcacaaacaacggttttactatggataaaaaccaaataatgaactctgtccaactgctcatgcaaaaggccaagcctcacatacccccagaactggtagacactcagtggcacaccctgagagaaagacaactgaactcaactcaaacacggctcaaaaagaactccaacactgaggaaaccgcgaccccacagaaagaattctccactcgccactgaaaccttatagaacccgaccagataaggagccactggcagctatcccagccccaacgaatacacccccggg

SEQ ID NO: 2001 - DNA, 445 bp, Zea mays
  unsure (1)..(445): unsure at all n locations
ctaagcttaaagcttttattccttagtcccctaacatgatcttttcctcacacggtntaacattagaacgaggattatgttctgataccaattgaaagttgcctagagggggtgaataggcaagcagaaactttttcaacaaaaactagaaacgaactgggttaaatcggttcagccggtgtcaaaaccggttcaaccggtttgcataagtcaactaaagaatgagatataaaactaaattgatctcgaaattcaccaagttaactttggaaatgagattttctagatgatccacatggttcaaagtagtagatcttagaacggcacttctcaaaatttacacaccaaaaagatattaacaaatcttccatgggatgctgagagaaccaagaacacctaccatctcccttgtgcatgaacacaagagacaccagatctttcccga

SEQ ID NO: 2002 - DNA, 466 bp, Zea mays
tagtgtgggagaactgcccgaattataccaatttatttgtctaagtcccgacttaaaggctagaccacacttaaatgggaataacacgtcaatcccttggatctagtccgacaaggccactgacaggatcaagtaccacatactcactcgatggtgaggcacacagcacatacaataaagcatatcaccatacattgaggagtacgtaaagttattacatcatcactggagttttagcaaaagtagccatcattgttcggaatgcagcggaataaaactaacgataaaaaaatagagagatggggaagcctgtcccatcactcctcatgctccctctcaaccgaggcagggtcccactcgactgtccatcccggcggcaagatggacaaccaattcactccagcaaccacgtccttcagaaaaccctgtgaaattatgccacaagcaacgctgagtatactaatac

SEQ ID NO: 2003 - DNA, 288 bp, Zea mays
ctggatttccgaagctacaagaccgcctctcactgtctttttaagatgaaccggctgaccacttaccctataataccataaaggtctgaaaatcaatcttgtattcgaaaacgaattactcattcgctcatactcaataccgtactcctctcgtacggctcgatcagtaacaatgtcctcagaccacagaaaactatcgaagatgaaggcggtacatggctgtgaacaaccctccctcacaggtgattgaactaacgaacgaaggccttgaaaaggataaaatattaa

SEQ ID NO: 2004 - DNA, 470 bp, Zea mays
  unsure (1)..(470): unsure at all n locations
ntatcatatggacgtgaaaagtgccttcctcaatggacctatctatgtataggtctatgtcgagcaacctcccggctctgaagacactgagtatcctaaccatgtttatagactctctaaggcgctgtatgggctcaagcaagccccaagagcatggtatgaatgcctaagagattctcttattgctaatggctgcaaagtcggaaaagccgatcctacactctttactaaaacacttgaaaatgatttgtttgtatgccaaatttatgttgatgatatcatatttgggtctactaatgaatctacatgtgaagagtttagtaggatcatgacacacaaattcgagatgtctatgatgggggagttgaagtatttcttatgatttcaagtgaagcaactncaagagggcaccttcattagccaaacaaagtacattcaaggcattctaaccacgtctgggatgaacgatg

SEQ ID NO: 2005 - DNA, 485 bp, Zea mays
  unsure (1)..(485): unsure at all n locations
agcttatatgataattttagaaagtggtggtttgtctttttctatataaaaaacctattccattagtaagattccaattcctcaaaatgaaagtaaataaatgggaccttatcgttttcgtattcatagaaaatatagaaacggaacgaaaatggatgagggtttattccgtccgctttttcatcccgtttttatttggattatacccatatttattctgtatttgataagtatgggacgagcctaatatgcattattatataaactaaagtctcgtgtgtctttaggtgataaattatactacaagtggtcattgtaaccatcgactcttttcaatgacaagtggtctaaagtcttaaacaacattggatgtagctaaatgtacactattagtaaccaaacaacaaaagaatgttgcctctctatatctattnaatttatgttattggcctaccaatcaatcactagtcaaacctcaatatcat

SEQ ID NO: 2006 - DNA, 411 bp, Zea mays
  unsure (1)..(411): unsure at all n locations
ttcttcggtggcatgacgaacgtcagtgcttgccgaatgtggtcttattatttcaccgcaagtgggcgccaatgttggggacttgttctcaaatgctatgaatcacaaacaaggcaacacagaatgttatatgttaatgcccttcctcctatgaagcattgttatccttatgacacaatgatcttccaacgaaggtcatgaangacataccttcatcattgcagtatatattaatgaaagaagaagcatatgaagcataaaaacaccatgaataattatgtagcattattaacccatttttattacattatcccgaatgaatgaaaacaatataaaattatagattgtaccttccgcttgacagaaagtaaatgcacaagcctgacgcaagaacatgtacaactcaacgtg

SEQ ID NO: 2007 - DNA, 474 bp, Zea mays
  unsure (1)..(474): unsure at all n locations
catgcaagctttgcaagtgtggaggaagaagaagacctgtgggtctcttttgatagngacattangggtcatgagtgtcaggccagtggtccaacggtgaggcccaccgtggaggtatttgagcccactttggcccaagccgggtgcaggggaagaagataatgtcggtgggcccgcgcaccagtgtgccatattcatgaccacgcgcgcaagggtgagtgcctgcccatggggcccgcatgttggtgacccacacgcaccgaagtgagcgcggttgtgtatattgggctgaagtgttggctgggcggcggtggtccatttgggccgaaatgataacgtgacccacttatggtttcctccattattcttttatctacggttatcttttccatacctttgggtttctatatcccttttattttcaaatactcaatcttccaacttcaaattgctttacaaatgttaatataaata

SEQ ID NO: 2008 - DNA, 434 bp, Zea mays
acggaccaacaaactaacttgaaatacttcaacgactccctcgaactgatatttatttcattcgaagacacctcactacagaaacttggctaacggaaaatgcaacacaccagcacaccttcttggtacccactaaaggatccctacccaaaatctcggggcgagattcctctaaggggggagggctgtagcacctcaggtgttaccaagacactggcttcatacttgcactgatgacttgtgatcacactgtgcgtaatcggaggagaacgagccactaaaaccttggaaacatgggttagctaagaaatgttaatgacaaaagcttcacacaaacattttgaacaattgtcatcttgagccacagatgttcaaccgtaaacacctaaaggcactagacttccaacaacggatcagtggataaatcaatcaag

SEQ ID NO: 2009 - DNA, 427 bp, Zea mays
ctagagtagtcttcttaagatcttccttgatttctcgattaactttttggaaattctttaccacaagaaatgtaatatttgtaactgtaatgagagcagaatcgtaaatgtttgtaaatgccttgtaatactatttacctttcgcttatatatcatctgctttgctgtggacgaaaccgacacttgtaggttttgagccgaagacgaaaaacaccttcgcttcatttcgttcacatcgaagcacctttcgtatacaccgaagtttcctttgaaacaaagcaccttcgtataaaacgaagtttcctttgaaacgaagcaccctcgtataaaatgaagcgttttctcattgaaggcaaaaatccccacttttcctgctaatgcctcatgctctatgtgacgatgattaacctacgaatgcctaatgtat

SEQ ID NO: 2010 - DNA, 349 bp, Zea mays
ctccttactcaataacgtactctgtacacatcatccttcgttagataacatattcgatgtcatagataataaaagctgaagcaaaagtttttaccttgaaattgtaataaaacaaactaccaacgatgtgctgttattggtagcggctaatgactgtttcgagcttccggaaaccaatactctttgatatagtaccaataaccttcgctccggtttgatctcagacacagtctaactctctatcgactacgccaccgaagagtagtgccaccggatgatatccgcatgatatggcatattcttttattgcttctatatcatgcgtagtcaactcgtgtccactaagtta

SEQ ID NO: 2011 - DNA, 438 bp, Zea mays
actcaagcttgcgagcaatacaagttcacaacggaaaaagctgcccctttgatctctcttatccacgctcttgcgcgaggacatagcaaatcagaaggtgctcttgagatctcaactgtccgaagagcatgagaaaaccttgataaggtttttgttcaacaacaaacatgtttctgcttggtcagctaatgatctttgccgagtcaacagggatgttattgaacactcgctcaatgttgatccatccttcagacccacaaaacagaggcttccgaagatgtctgatgacaacgccgaaggtgctcgtaatgaaccgaaaagactcctcactgccggagttatcagagatgtaaaatacctataatggctggctaacactgttatggttaaagacgccaatggtaaatggagaatgtgtatcgttttactgatctaata

SEQ ID NO: 2012 - DNA, 444 bp, Zea mays
  unsure (1)..(444): unsure at all n locations
gagaacacgtgatatgtttttcttacgcgcattncgaanaagatagaccctgtgccgcttgtcaagcaggttaacaagtgggaggagcgcatcacagcaagaacatgatgaccacttcaagacccctggagctgctgcatatggacctcttcggacctgtcgcctatctgagcataggagggagtaagcatggtttagttattgttgatgaattttcccgcttcacttgggtgttctttttgcaagataaatctgaaacccaaggaaccctcaagcgcttcctcacgagagctcaaaatgagtttgagctcaggtgaagaaaataggagcgaaacgggtccaattcaagaccttcaagggaggattccttgggaggaaggacatgcacgattcttcgtcctacacaccacagcaaatgggtggatagaggagacaggacgctat

SEQ ID NO: 2013 - DNA, 442 bp, Zea mays
  unsure (1)..(442): unsure at all n locations
tatcaaacatagatcgatcatgcctcacacattatctattgtataagagacatcatttacgtcaaaagaagtatgagagtttgccaaattatataagatcatattactcaatttatattcataccatgctcaagctaatagccaagctgagtctagtaataagactttgataaatcttatcaaaaataagattgaaaacaatttaaggaggtggcattatgttttgtctagagctatatgggcatatgtgtgcctagatatggtgtaactaaaattactctttttgagctggtaaatagacaagaggctatgttgttgttgcctatcaaagtgactttggatgcatataagcttgctaaataaaatagattatctattgttatgtatcgatgatgaacaatatatatgttgnggactcgttctcaaatgctatgaattaaga

SEQ ID NO: 2014 - DNA, 429 bp, Zea mays
  unsure (1)..(429): unsure at all n locations
gatacttcatactatcatgtcttcattctcggngccagagccaacccatgttaatcttagctattaagcaagtgtccagttcaactctattaaaatcaactaagtatagctgaccctctaacactcccttaaatgctactgaatcatcacttcctttcaagactgnaacacctatatccgcaaaaagacaattgtaacccattctacataattgagaaacagacagcatgntgtaatctacagaatctacaagataaacattggaaatagaatggtcaggtgatattgcaatattaccaagtcctttgaccaaaccttgatttccatccccaaatgtgatagctcgctcgggatcttggttttttgtcataagatgagaacatacttttctccctgtcatgtggtttgtgccccgctatcgatgatcca

SEQ ID NO: 2015 - DNA, 273 bp, Zea mays
gggaaaaatgggaagagggaaaagaaaaagaattacaagaaagccacaggcgaggcgcatctcggcaaggagtgggattcggattgctcctcctccgactccgacaatgagggactcgcccgcactgccttcaacaaatcggctctcttccacaacgagcatcacactcgtctcatggcaaaggaaaagaaggtaatcacttcgaatgctaatacttatgattcttctaatgatgatgaatctagtgaggatgaagtagattattcatgttta

SEQ ID NO: 2016 - DNA, 383 bp, Zea mays
tcttctcatcatcgatgagcgacgacaacgcgagtgtttttgctcatggagtccgttcgtggttcgaagtacgaaacatggattcatgcttggcgttggtttatgaaaatgactcacatgtctgatccatggaaaaaaatattacgaacaaaaaaattcacacatgcaaaaaagggaatttaagtataatgcattatctaaacaaaagaaatagcatgcaaagctcttctttaaataatattacctccatccaaaaatataattcaagaatatcggtgatacttattgtcggcgtttcgaacacggcgggtccctggaccgacgagtaaattgtcggcgggtgcccgagcccatatgggtcggcgcgagacatagcgcgaagg

SEQ ID NO: 2017 - DNA, 314 bp, Zea mays
atgcgagctaaacaaaaaaacagatttgaattttgttttttttttaataagaaggaggaacgcagaaaatacttccttaaattaaattaaaatcagaattaacacccttcacccctatattattagaatacaccattcaaactgatgacaaagtatttcacagaggtggaatttaaacttgtaactctaatggatgtgaaattgagagaagaaattagaaatcaaaagaataagaatataacctggtgttgggcctggatacgcgccttctggccacttaaagaatcataccgcgcagtccatttgatcttcac

SEQ ID NO: 2018 - DNA, 335 bp, Zea mays
  unsure (1)..(335): unsure at all n locations
ntatcaaatggacgcgaaaagagcctcgctcaacggatctatctttgaagangcccaagccgagcaaccccccggctttgaagatagcgagtaccccaaccatgtttataaactatctaaggcgctccacgggcgcaagcaagccccaacagcatggcacgaatgccttacggaccttcctttagataatggcttcaaagtcggacaggccgatcctaccttatctactacaaccctcgagaatgacttgctcgcatgccaaactcacgctgatgatatcatattcggggctactaacgacgccacatgtgaagaatttagtacgatcatgacac

SEQ ID NO: 2019 - DNA, 366 bp, Zea mays
tctccacgatcctcaagagagaactaaccttcatattaggttccgactgctgtattcccataaaccgcttcccaatgaaggttgatgtcacatggcgacgtttcatcgttcactcatgttcaacacatgtgtgtggccccactacttttgttatcttccactttgcggtgatcttttgtatactagcacaaacccctcatgcacaggtgtccttgtcccatacaacccggtaacgaccgttctcttacgaatgaaggactctattctgccctttacctaagactgtggtatgctgcaccacctctcaatgcagtacgcccttgaagacctaccctttccatcttctgccttgaccgcctcagagca

SEQ ID NO: 2020 - DNA, 462 bp, Zea mays
  unsure (1)..(462): unsure at all n locations
cgtgaaggttcttcatccccacatgtgctaagcggcgatgccacagccagcccatgcatgtgttatccattaagcatgcatctagaccggcctcttcttttgcaaaatcaactaaataaagtttgccgtctaatacacccttaaaagctagtgagccatcacttcttctaaagacagacacatctacatttgtaaatagacagttataccccatatgacataattgactaacagataacaaattatatccaagactctctactaaaaatacattagagatagaatgctcattagaaatcgcaattttacctaaaccttttaccttgccttgattcccatcaccgaatataattgaatcctgggaattcttattcttgacgtaggaagtgaacatcttcttctcccccgtcatatggtttgtgcatccgctatcaataattcagcttgacccncggatcacta

SEQ ID NO: 2021 - DNA, 378 bp, Zea mays
  unsure (1)..(378): unsure at all n locations
agcttcacacctctgaactagcttttctgtttcattcttcgccgtcggcanatagaatcctgacctgaaaacctttccgactagtgttctggatgatgcatgtatcccacattgccctgcatggacctcctccagaagttgttttccagtggacgggagaacgcacttcatgaggatgcctgacgcgccccttctgtacaattcttccccaatgagtgtatagtgagccgactgcctggcaatgcgctctaccgagctcttgtcatctggctcttcttcattctttatatacttaataatcggcccgctccagtcatcagaatttgactcgggctgatctatgatgatgcactcttctgtctgatctattgagatact

SEQ ID NO: 2022 - DNA, 430 bp, Zea mays
tgtctggtgcagcgtcatgcttatcgatatacatccctgttgtagaagggcattcaagactagatagaataattacaaccaggataaatctgataggattctgtcctgaccttgtttccaagacagcccataatcccgcgccctatgcaagccttccttatatgcccaatatgctgcactagctctttcttcacccacacagtaacaaaaatgccaaccatttgtttgcacgctatgagattatattttagttgatccctagtggcaggaccagaagtaattccatcgaccacagagccatcagagtcccttgatttctctttatctttccctttctcttcatcctctccagaggaatcagtctcatctgcatatgctttttgacatacaaagcaagcatccctgtaagacgttctggtcatttctaccg

SEQ ID NO: 2023 - DNA, 319 bp, Zea mays
  unsure (1)..(319): unsure at all n locations
gcttcgagtagattttgtgaaataatcttctcttttgtcttcatcacaaaatatttttattttactcttgtactttgngtgagggccagccttgtccttaatctggtcttatgccttataagtcggcactatcttggcttgaaatggtaattcatggggtgcaccgaaagtgcccctatgggtgtagcccccgacctttgagtggatttttgaaaataatcctctcgaaagtcttcatttccggtgcctctgctgagaataatcccttctttttctgaatgccttataaggccacattatgtcatcaatattattcttt

SEQ ID NO: 2024 - DNA, 440 bp, Zea mays
  unsure (1)..(440): unsure at all n locations
tctaaagggagagcacattgtgngactaacaaatgtgctttttgagaaaggcaggatctgtagcgcatgccaagcaggaaagcaagttggtgctcatcatccacataagaacatcttgacgactgacaggccactcgagcttatccacatggacctattcggcctgatcgcttacataagcatcggtgggagtaagtactgtcttgttattgtggacgactattctcgcttcacttgggtattctttttacaggaaaaatctcaaacccaagagaccttaaagggattcttgagacgagctcgaaatgagttcggcttaaggatcaagaaaattagaagcgataatgggacggagttcaagaattcacaaactggaaggcttcttgaggaggagggcatcaagcatgagttctcttctncctacacaccacaacaaaatg

SEQ ID NO: 2025 - DNA, 402 bp, Zea mays
ccgaggtcttcgatgttgattaccacatcatctacgtaggcttccacacgcttgccccagtgatcggctaagcatgtctgaatggctctctaataagtcgctccagcgttcttgatgcccaacggcatggatgtgtaacagaaagcaccaatcggagtgatgaacgttgtttttcctcgtcttccttccgcaagctaatctaatggtatctggaatagcaatccaggaatgatagcacagaacatccagcggtggagtctaccacctgatctatccttgggagcccgaagggatcctttggacaatgtttgatgagatcaatatagacgacgcacatgcgccaatccactctatttcttctgagtacaacaacagggttggttaccactcggtgtgaacacc

SEQ ID NO: 2026 - DNA, 163 bp, Zea mays
aaacggaaggaagacaaaaacaaataaaaaaaagacgaacatgccgaacccaaaaaaacggggaaaaaaaaaaaaaaagtgttaaagaaaaaaggggagggggacaaaccaaaaaaaaaaaaagagaaaaaaaaagaagaaaaacaaaaacaaacccaaccga

SEQ ID NO: 2027 - DNA, 340 bp, Zea mays
tttactcaagcccagctacgggagcataggcgtaccgaaatccaaaccttcgacttgagagtataccttggccacaagtagggctttgttccttgtcaccacaccatgctcatcttgcttgttgcggaacacccatctgggacctacaatattttgggtatgacgaggaactaaatgccatacctcattcctagtgaagatgctgagctcctctctgattggcaccacccaaaccagatcttgaagagcttcctctatcctatgtggctcaatataggaaacacaagagtaatgttcaccaggatgagcaacacaagatctattggttaccccctatgga

SEQ ID NO: 2028 - DNA, 321 bp, Zea mays
acattgcgcttgtaaacttgtgcgcaccctgtcatatatctctacctttccatctacgagtagattgcttttctgtggatgatacttatattgtgaggcgaaggcaaaaaacaccctcccttctttttatacacaacaaatcacatcgttgcttcctcgagccattattatcaaagctagagtattttctgcttctcctcaatgttatgattatgatgaacctataaatgtctacatgaatggttatggatgcaatgaaacgatgtgatgtaacgcgcaaatgaatgtgcaaacgcacatttactaagcacatacagactc

SEQ ID NO: 2029 - DNA, 432 bp, Zea mays
  unsure (1)..(432): unsure at all n locations
tctanagggagaacacacgttgcgactaacacacgttcattctgttttttacagggntcgcaccgcatgtcaagcatggaagcaagttggaacccaccatccacacaagaacatcatgatgaccgacaggccgcttgagctactccacatggatttattcggcccgaccgcttacataagcatcggcggtagcaagtattgccttgaactgtggatgattattctcgcttcacttgggtattctttttgcaggataaatctcaaacccaagagaccttaaagggattcttgagatgggctcaaaatgagttcggaataaggatcaaaaagataagaagcgacaatgggatggagttcaagaactctcaaatcgaacgcttcttgaagaggagggcatcaagcatgagttctctttctcctacacaccacaac

SEQ ID NO: 2030 - DNA, 393 bp, Zea mays
agatactaaggtcataatcatcaccgatttagatgatgtgaatgatgatgatgttgatgatgatggctattcatatgatgatcttgttagaatgctaagtgagaccgatgactacttgcacatagaagaagaagaatttacgaccttgtaagaattgtgtaacaaccttcaaatgtcttttgaggagctcacgacctctcacaacgatctgaaagagaatcgtgagaatctcgcggaagctcaaaactcatctattattcatgaagttgtggtggtcaccgaagatgttggagtcacttgtgacttactcgatagtgctacaagtgaaccactacctactaactctattgtgatatatgccaacttctctatgaatgaaatattgctcttgat

SEQ ID NO: 2031 - DNA, 432 bp, Zea mays
tgccttcgcttcagtctatcatccgcagtccaacggcgtctgtgtttcgcgccaatgggaaaatattcacagttgtcaaaaagatgctcctcgatgaaagaaaaggcagatggaccgatttattaccggaggcagtctgggcgctcaacacaaccgagtgcagggcgaccgggttcactcctttccgccttctatacggatcggaggcaataaccccgcaagaaataaagcatgggtccccgcgtacagttccgtcagccgctcccgacgtggatgagccaacttcaaaagatctcattgacggagaccgggtcttcgccctacaggccctatacaaatatcaagcccaaaccaaagcatggcgcgaccgcgcagtcattccgagggagttcagcgagggggaccctgtactcatccgaacagctcggacgg

SEQ ID NO: 2032 - DNA, 387 bp, Zea mays
  unsure (1)..(387): unsure at all n locations
ccatttgacaagcacaagcgacttcccatcanaaccaacacgatgcttcagaacttgttcaggtacttggaaaccatccaaagagggaggcatgtgaccagcggagactagaggtggaccaactttctttaattgcgacacatggaaaactggatgaatgctcgaagtagatggcaatccaagcttgtatgcaacagacccagatttctcaattactggaaaaggtccaaagaaccgaaaagccaacttttgatttgcacgaagagcgaggaaggactggacataaagctgaattttcatgaacacttgatctccaactttcaaatgtctntcagtgcgttgatcgtcagcttgtgacttcatacgctgctgagctcgggctaagtg

SEQ ID NO: 2033 - DNA, 428 bp, Zea mays
  unsure (1)..(428): unsure at all n locations
tcatagccgaagcaacttcagctctgaacgaagctgntcttntcataaagtggaggtgagctcaccggaggtgggcgccaatgttggggacttgttctcaaatgcttcgaattaacaacaaggcaccacaaacatgttaagtataaatgcccttcgtcactgaagcattatctcaccaaggatttaatgagcttcggacgacagtcataactaaagtatcacgaaggtttcaccttcgtgaccatatttctaagacaaccatgagaaatgaaatatacaacacaaaatatattgacatgttttattatatgaatatacaagcattaaaacataatatttatgcacatttataccttcgccttggcagaaaacaataatccaagcgtaacgtgtacgtgattacaggatcgcgtgaacagtgccgggat

SEQ ID NO: 2034 - DNA, 439 bp, Zea mays
agcttatcatcaccatcgagcttttttgtctttgcttctctctacaaccaacatactttgagacttccatagagctcaatctttatcttggcgccactcatagtaagcctctctatttatcctacctgttattgtcacataatcggtagccttatttattttggggtgactcatcctgatatttcttatattgtatatattcttaggttgttttgccctcactaaactccactatagtcacatgctttgtgtcttatgttatctttgtgtgactatctcatgtcgtttgttctttcgacgcacaagtaatattagtatttctcgtgatctagtcatgcatgagcttattactctctccattctttttatttatcgcgcgttaattcaaaaataaactagcaggcgacaaatattcgagaacagaggtagtatataggta

SEQ ID NO: 2035 - DNA, 442 bp, Zea mays
tacggaacttaaaactaagctttagggaaacacggaaggttgactacggcttttataaaagatagaccttgtgcagcttgtcaagcaggtaaacaagtgggaggagcgcatcacagcaagaacgtgatgaccacttctagacccctggagctgctgcatatggacctcttcggacctgtcgcctatctgagcataggagggagtaagtatggtttagttattgttgatgatttttcccgcttcacttgggtgttctttttgcaggataagtctgaaacccaagggaccctcaagcgctctctcaggagagctcaaaatgagtttgagctcaaagtgaagaagataggagcgacaacggatgcgagttcaagaacctctcagtggaggagtttcttgaagaggaagggatcaagcacgagttcttcgctccctacacaccaca

SEQ ID NO: 2036 - DNA, 409 bp, Zea mays
caagaatcccagtaggcgatattgttcacaacaagggagctgttgggagaataaccatgtgggcgtgcaagctcagagctcatggtacagagttccgaccccgcacgatgataaaaactcaggcactggttgacttcatatcagaatggactgagcaccacgtcccagaaagcctagaggtcactgaaatatggaggatgtacttcgatggctcgctgagactgcaagaagcagggggagggattctccttatcgctcccggatgtgaacaactcaagtatgcactccaggtcttggttccagcatccaataatgcagcagagtacgaagcactggtccacgggctaagcatcgctgtttcactcggcatcaagagattaatggtgtacgatgactcactgctggtcat

SEQ ID NO: 2037 - DNA, 402 bp, Zea mays
  unsure (1)..(402): unsure at all n locations
ctaagctgactctngaatcgaacgaactccgcttgaacctgttttgttataaaacttcagaagaagatattttaaattcacaatttagattagatggccagattgcgttcgactgctnggttgagcgtgagggaggcgaaattgaagcttcggagactgtccctatctccgaagcaatgcgacgttccgggctggtaactacagaagaaaaccctactgctgaaacagaacaaacaactgccgtagtagaagaagaagaagaaaacactgaagaaactgatcctgaagatgattctcatattgccgcgccaagcaagcccagccatttggactttgacaagtcaactgtttccaaggctgacttcccaaagatggtgaagtcgggctattttactgaaaatg

SEQ ID NO: 2038 - DNA, 495 bp, Zea mays
  unsure (1)..(495): unsure at all n locations
atcctcttagtcacctgcggcatgcaagcttggcaagaccaaataactcataactctatgtttatcaataaaggggagngaagaaagggttattaaattgggagcaaaaggtacaaaaaaatgaccaggaaatgtcagaagtgtggaattgctgatggtcacaacagtaggacatgtttgtcaatggaggaaaatagacaaaggtcggcaagccttgctggacgtaagagatgacgacctccaggatctaggaacaagggtggcagtaaagctcctgattggaatgagacaacaacatctaaataacacgcaaatgatttcgatagtagtgagtcagacagtgattagacttgtgtatgagatacgattaatttgttttgtacaataaaccttgcttgtttggcaactgatttatatagaggtggatattgaaatctaataaatggcgcgtatattgcttaataatggtgcgtaactggaactacaaaacatcgt

SEQ ID NO: 2039 - DNA, 411 bp, Zea mays
  unsure (1)..(411): unsure at all n locations
tganatgtgttttcctccatcattctctgatatgcaagttcatctaatcatacatctcgcggatcagataaaaatattagggccactatatttacatcatatgtttcagttggagcgatacctgtgagtattaaaaggttatgtgcgaaatcgcgctcacccagagggttcaatcatggagggatacactacagaacaagtgattgaaagctgtatagattacatcagtgacggaacaatgatacgtgtgcatgtacctaaacatgatggtaaactatgtgggagagggagaatgggcaagaaaactcttctggttgaggattacaagctattacattgtgctcatggtagtgtactacaacatctcatgatagccgagccttacatagatgaacacctcgatgagcttcg

SEQ ID NO: 2040 - DNA, 395 bp, Zea mays
tgatgcacaactcgaggccgaagtccgaattagttagttctgaaagaatctctgccacccctcagaataaacgttgggaattcagcacacgatgcattcaacggctgaaacacgtcgtttattttgttggagccagcagcgagaagtatactccttccgctgaagacctgccaggtgccttcgaccatattgaaggtgaatttaacgatcttgacgaagttatatgtgggcatggcgacttctgtgccctggtagcttctcagggcacagcctgtgcctttctgaagtccggctgtgaacacgggaagattagcaatagacccaacttaacctcgtcccagcagattatataatattcccaacattgcccgaagtatcgtcaatagatttataaa

SEQ ID NO: 2041 - DNA, 434 bp, Zea mays
  unsure (1)..(434): unsure at all n locations
gctttaagatgttattacaattcgtcctattgttcttctctgcaacttcgntcagcaattggttcacgacttcgtcgacaatggattcaaccatgtttataatgtccagcgcttccttcatttctggatcggctaggggatcgaacggttccagcagcggagataattcagctgaagtaggaaaagttaatcagtccgaagccacaaaaacaaatgtcgaagctaaaagccaaaaaacaatacctatacgcttttcgcgctctgcagcttcttcagctcgcgttgcttctgctcgggcgtcatgggtatccttttcacttttctttataatttcatgggccatctctcggccaccattcacccagacatcattgtaaaaatttccgcccatcaaggtcgcttcagctgaaggatccttcgtatcatctacggag

SEQ ID NO: 2042 - DNA, 442 bp, Zea mays
  unsure (1)..(442): unsure at all n locations
tctaaagggagaacacattttacgactaacaaatgtgcattntgttaaatgcgggatttgtagcgcatgtcaagcaaggaagcaagtcgtaatccatcatccacacaagaacatcatgactactgacaggccgcttgagctactccacatggatctattcggcccgatagcttacataagcatcatcgggagtaagtactgtctcactattgtggatgactattctcgcttcacttgggtattcttcttgcacgaaaaatctcaaacccaagagatctcgaagagattcttaagaccagctcataattagttcggattgagaatcaaaaagattacaagcgagaatgggacgaagctcaagaattcttaaattgaacgatttcttaatgatgagtgcatcaaacatgagttctcttcccgctacacacctgaacaaaatggt

SEQ ID NO: 2043 - DNA, 426 bp, Zea mays
  unsure (1)..(426): unsure at all n locations
tcacatttatacccctgagataccaaanacccatttgataccctggaaaaccctaagtccaaaccctatgggcctatgtgcaaagacagtgcacatttggactaaagtgtaaaaactacaatgtcaagacatataaagtcccatggttcacatttggaaaggtttacaagccaaaccctaagttttggaatgatttgcaaaaaggaccccaattgagaatctactctaagtctgaatttcagatttgtgggctcaacttatgagtcttggaactttcaaatactagggtttttgccctaggctaccacatcaaagttatagacctaacatagaagaacaactgttcttaagagcataagcatagttgttaagaagaatttggaaataattaagcctacagctttgctgtcaagccggttccattct

SEQ ID NO: 2044 - DNA, 464 bp, Zea mays
  unsure (1)..(464): unsure at all n locations
aatactcaactctcctgtttctctctttctatgcactcgatggcgcatgctcttattgtacatttacatattctgggggattctgctctcatggagctgaataagaaaggataaatttacaaactatggccccactaaaaacatttctccccctttggaaaggaaaagggtgccataggaaaaacgaaaaagattacatcaagttatacataatatcgccgaagctcatcccgattccaagatctatgaatgtcgttgccgcccatattcttcaatctgtaagaaccgggtcttgacgaacataccaccagaaagggtcctctccaccttagctgtaacttgcctactgtgtccggattagccactctccgaaccgccaaatgccctggcttgatattnttcaatcggaacttcttgtcacaccattgtattggttcggcttgatatttaattatatctctcat

SEQ ID NO: 2045 - DNA, 377 bp, Zea mays
atccatagccttcattctcttacgaatgaccgaagtgtcttttccgtttatttttccgctgcaccgcttatttatcggtgtaagttctgcatccccttatgaacgtcttttgaacttctttcgcttctattttggcagtattcgcgttgactcttcgcgcttcgccttatatttcggcggaatttggctctgcattgccttaaaaacgactcttgagcagaaaacttacgttgcgcttccttaagaaccgctttttgtagattccgcatgctctgcatccccttatggacgactttcgagcttccccctatattttctttctttctctgcctcgatggtgcatgctcagattgtacatttacatattctgggggact

SEQ ID NO: 2046 - DNA, 365 bp, Zea mays
  unsure (1)..(365): unsure at all n locations
caccacctcggcgaccatggattcaaccatgtttataatgtccaccgcttccttcatttctggatcggctaggggatcgaacggctcccgcaacggagataattcaactgaagtaagaaaaggtaatcagtccgaagccacaaaaancaatgtcgaagcttaaagcccacaaacaatacctatacgcttttcgcgctctgcagcttcttcagctcgcgttgcttctgctccggcgccatgggtatccttttcacttttctttataaattcatgggccatctctcggccaccattcacccagacatcattgtaaaattntccgcccatcatagtcgcttcaactgaaagatccttcgtatcatcta

SEQ ID NO: 2047 - DNA, 408 bp, Zea mays
tgccactgttgtgacaaccgtcttctcgtgccggcttcttgttgccgacggcgtcgcctttggcgcctccgcgggcaccaccctcagcttgtcctcgcgctctggactgagcgcctccgcgcgtcttgcgcggcttgccgcgtttgcggccccgtgtcgaggactcccccttcttcttgtcacaccctgtcaggcctcccactgctcccgagtgagatgtatcttcccgctgatggtgataggcccacagagggcctgtggttcgttgccgtcgacgaccttgagacgaccaatcgcttcttcgttcgtcatcgtggagaggtctagtacagactcgatcgagcgagcgatctgcttgtacttctcgaggatgcaacggaagagcttctcgacgactctctcctcatt

SEQ ID NO: 2048 - DNA, 473 bp, Zea mays
tactaagctcttctttcgtcttccaatcatgataactgcatgttgtttctctacaaacgtgtccttcggcatttaacatgttacactcggaacatactataaatagttgatgaattgatgctttgatgaccttccgctaaagagggcacccaacaccttacacatcgaacaaatctatcatgtgcaataaaatgcaatgcttatcggtcattcaagtattttgctctggtaacctaaagcaaccaaaatatgacaatgatcagcaaccaccttgcgctatggtagaaaaataacaagccaaaagttataatacaggatataatgccattgcatctgggtacaagcacatgtacgtccaccaaatatgtttgttacaacgaaacaaaactaagaactatacaagaagataaatcaatgtgcgcaataaccgtatcaataacttgtactatttgtaccaaccatttcaagcttga

SEQ ID NO: 2049 - DNA, 398 bp, Zea mays
aagcactgagctgcactgactctcgaacaattttctcttttgacctgttcgcagacaaaaactcggtagaaatatattaattgccacaaattcagaataaaatggccagagtgcgctctaccgctaaggtatatcgtgaaggaagcttctattggccttgaccgaaagttctttatcaaatgtatcaggatgaaaaattgcttccaaagcattgagggtgccacgaccaataattgcattgtaagggtattccatgtcaacaatgtcaaacacaacttgctcagttctaatgttggtgatgaacctaaaggtcactggcatggtgatcttgcccagtgctacaatctgtcttcctccgaagccacagagagggtgtgtagcatcatgaatcttatctt

SEQ ID NO: 2050 - DNA, 447 bp, Zea mays
  unsure (1)..(447): unsure at all n locations
acactatacaacactcacagctgtagtcgaacacaatacatgtgctgctcgctctatgttattattatgcactaacattcgacgaaatgaattgttaatttgttcaccagcgcaacgcacggacactcatctatttataacaagaagacaacattgggagtggcaaaaatccaattatctcttgtccgcccgggctctctcgtctcggagcgagaaactagagggatcgccgcgcgcatccgaagcgcacacgacaatgcagggtggatccagcggcatcgtctatggtggcctcaagtaccaggcaagcaagcaagcaccagcagtgccttntggaaccttctttgaaccatctgccttaaccaacgtcgtcctttctctctgctcttgcaggcacggcgtatcgccgatgtgcgcccggacgccacttcgaccacctctctcgcc

SEQ ID NO: 2051 - DNA, 443 bp, Zea mays
  unsure (1)..(443): unsure at all n locations
agctngngaaggttcttcattcacacatgtgtcttacggcgatgccacagccagcccatgcgagtcttaacaattaagcatgcatctagaccggcctcctcttttgcaaaatcaactaaataaagtttgccgcctagtacacccttaaaagctagtgaaccatcacaccttctaaagacagacacatctacattggtgaacatacaattatatcccatcttacaaagtggactaacggataacaaattatatccaagcgactcaactaaaaacacattataaatagagtgctcggatgaaatagcaatcttccctaacccttttaccttgccttggttcccatcaccgaatatgattgaatcttgggaatccttgttcttgacgtaggaggtgaacatcttcttctcccacgtcatgtggtttgtgcatccgctgtcgataat

SEQ ID NO: 2052 - DNA, 373 bp, Zea mays
ttaaaactcagctttcctaagggaatgcgtagttcgagcttgggatttgttttttgagcttgctagtggttattcatatgcttcttgcagattatatgtgctgcatatatggatagtgcttccgttctatgaattaattggcatctattgtgctcattctgaaataaacagtcatgtggataatgatgcatatcggttatggcgcttaagattgctttaaattaagatctgagtttaaattggcatcttaatggtgaatagtggtaggttgatattcctgtgagatatccactaaattgaatggcgtttaactctgattatgtgcatttgtgtgctatagcatcatggtttgatctttgacacaatgcattcc

SEQ ID NO: 2053 - DNA, 431 bp, Zea mays
tgtagtgataccaggtccttatgaactgatagattcctgtttctcacgttacactcggctggccacattaatcttggcaaaagaccacatatctctaggaatacttaccgctactggctccagcaacaagaaaatcacatgcaaactatgcacaacttttatacaatcaccagacttacatgtcgctgctaatggctgcaagggaccaaacataattggttacaatatactgaaatcctttcacaaggatccccaacctttaccgataaatcatacagctaacagtgtagcttgtagaaatacatttatccaaatcggaccaactgtcaacagcaacgcagctgacataattgaactataggaggattattctgaatcaaacactctaccagtactcaaaagacacctaatcaacgattgcttatagcttc

SEQ ID NO: 2054 - DNA, 310 bp, Zea mays
ctcccaccaggaagcctcgggaccggagcccgcgggcatggcagcgtcgtaaggactgctgataccgcgccgagtgtagtaaggccacgtcccgagcctcttcaagctggaccaaagagtcttctcggctggactggatgcttcggacgtcggacgccaatgtcctcgtggaacacgatcccacgtctgggggcaagcaagcttcagccccatagactagaaagaacggcgagaaacccgaggctcggctcgagggtgtcctcagactccagaccaccgagggaagcgcctgcatccaccgcgtgccgaa

SEQ ID NO: 2055 - DNA, 400 bp, Zea mays
  unsure (1)..(400): unsure at all n locations
tgccttcgtctnactatattaccgacaatctatcggtgttgtcgttctcgccaacggcaaacatttcacggccattacagaaaatgcttctcgaccacaagaatggcaaatgggccgacctgcttcctgaagcaatcacaggcgctgaacaccaacgattgctgggcgactgaggtgactccttccgtcgctatatggatcggaggccctgacctcgcaagaaataaaacatgggtcaccgcggacaagcacttctgccgctccccgacgttgacaaacaacttcccatgaccccatttacggagaccgtgtctttgccctgcccgccctcaatagttccaagctcaacaaaagcatggcgcgaccaccagtcgcccaatagaatttacctaagggacct

SEQ ID NO: 2056 - DNA, 456 bp, Zea mays
cctgcaggctgcaagcttctaaagggagagcacattctgggacctacaatttgtttatttgagaaagacaagatcagttgcgcatgtcaagctaggaaacatgttggagttcaccatccacacaataacatcatgacgactgataagacgcttgagctactccacatggacctatttggcccgatagcttacataagcatcggcgggagtaaatattgtcttgttattgtggatgattattctcgcgtcacttgggtgttctttgtgcaggaaaaatctcacaaccaagagaccttaaagggattcttgagacgggctcaaaatgagttcggcttaaagatcaaatagattataagcgacaatgggacggagttcaagaactctcacattgaaagcttccttgacgatgagggcatcaaacatgagttctcttctccctacacaccacaacaaaat

SEQ ID NO: 2057 - DNA, 336 bp, Zea mays
aaccggaaaggtgggccccgctgcgcctcccatctcttttctcacatcatggatcgacccaacatgcctcgggtgacatcttcctccgaagcccccgcgcatctcagaaaacctgaacgctcgctcccttccttggcggaaggcactggcagcccgaatgtacccggcgcactcttctggaccagcgtcctccaaaatttcgtggcggcctacctggcaaaggactgcgctgacggtcccggccgaacccccttaatcactggctgaatgacaatttcactgggcactgtcggcgcttgtgcccttaagcgcaaaaacctccggacatacccctga

SEQ ID NO: 2058 - DNA, 449 bp, Zea mays
  unsure (1)..(449): unsure at all n locations
agctntaagtcggaattaatggacgggatgtgtattctttattccagtagactaaatgtgatatttattagactacctgaatcgtttacggtggtttgatcgatagtcgtacatgttgctgctcccttgcgttataatagttattacgttctaggtagtttgcttgggttattagtttcgagtaatttaatattagtacggtattcaacatgtaatcgacgaaaaacctagattcatattcgttaatcaaagtagtgaatctaagctaaatttattactggcgcgcaagttgttagccgaattgttagatggattaaataaatatgtgtgaagtgaaataaaattaaattagttcttggctgcaaagtggtataatttataaagcggnggatgaatttagcatttaaccaattagctaatgagttgtgtttaagctgattatgtttaat

SEQ ID NO: 2059 - DNA, 421 bp, Zea mays
gtttccgaaatgtctgtttattcaacatccctgctgacacgaagctgagtctctaggaggagaacaatctggggttcctgatagcgatggcagacactaatacagagaaaatcacgaaggagattctcgaaggtttgtccgaagatactgatgacagcgacagctatgatgtggatagtgatggggaagaggccgaatatcgaccgtggcgaccaagtcactcagtttgggggaaaacaaccatcaagcacagtcacattgataatatgagggggcgatacttccgagacatatctattgtgagagctgatgccggtgaaaagacttcttccacacctgaagaagatgaagttgtgattttccgaaacctcctcaaggctgggcttcgattcccctcgacaatctttgtgttgacgtactg

SEQ ID NO: 2060 - DNA, 211 bp, Zea mays
acggcgacgagagatcgccgaaacacgggcatgcacaacgcgacggcaccccgcatacctgacgcccaccggcgcgaagacacaccaccacgtgccgcacggcgtgatgaaagaaggagcgagcaggtcggactcctgcatccggatccggcgataccccgagtaggcatcgacgaacgaaacggtctcgcccccagcagcggaacccacg

SEQ ID NO: 2061 - DNA, 343 bp, Zea mays
  unsure (1)..(343): unsure at all n locations
actcaagccnagctacgggtgcataggtttcaccgaaatccaaaccttcgacttgggagtatcccttggccacaagtcgagctttgttccttgtcaccacaccatgcttgtcttgcttggtgcggaatacccatttggttcctacaacattttcgttaggacatggaactaaatgccatacctcattcctagtgaagttgttgaagctctcttgcatcgccaccacccaatccgaatcttgaagtgcttcctctatcctatgtggctcaatagaggaaaccaaagagtaatgctcacaaatatgtgcaacacgagatctagtagttacccccttatgaatgtc

SEQ ID NO: 2062 - DNA, 373 bp, Zea mays
gtgtgagccatcacatccgtgatggagggcggatattatattgcgataaccgttcggttatggcgtgtgtggatcgctggatcgtgggccgaccggcatgatcggatccttagtgtttaaaattggcaccgccggatcttgatccgacgatcggtggcgcgtaccggttcgctgtatccggcttttcatttgggccgttgaattggatcggacgggcgaccttgcctggtaccccttcggcctcaacaatatgcataagagaccctggaaaatccttttatcaacccgcagtcctggttctttataaaaccgtctcgcagaagccctagaatctatgaataaaaccctgaactactctggaatcgtgtgcgca

SEQ ID NO: 2063 - DNA, 395 bp, Zea mays
tgccttcgcctcagtatatcacccacaatccaacgtctttgtggagcgcgccaatggaaagattctcatggctatcaagaaaatgcctttcgacgacaagaacggtaagtgggtcgacctgctacctaaagcagtctgggcgctgaacacgaccgagtgtcgggcaaccagattcactcactttcgcctgctataccgttcggaggccatgactccgcatgaactcaagcatgggtccccaaagacaagcgcttcatcctcacccgacgtagacgagctaacctccaaagatctcatcgatggagtccgcgtcttcaccctgcaggcccttaatatatatcaacgccaaacaaaaacctggcgcgaccacgcagttgtcccgagagaattcaacg

SEQ ID NO: 2064 - DNA, 342 bp, Zea mays
  unsure (1)..(342): unsure at all n locations
ctcgcatgagnataagcccatttatgagagatattttagcagcatgtctgggatgtgccgctgaaagttatctggtcaggtcactgagagagaggctcgcaagttggcaacccaatctttactcttatctgcccaaccccgtcactgcaccgtcagcagaacaactgctgctccgactcctatttaacaaagcagcaagcctatgcactgcacacttctctgaggaccttgataaccattaagctctggtttacaggaatgcacatgtacttaagtactgtacacatctatatctaattgagcaagatgcaagcgggacccattttgtatctgggtcacgtc

SEQ ID NO: 2065 - DNA, 334 bp, Zea mays
cgaaaactcatggacacggatcgcttcggttcagccactgcccacatgcatggaacatgactacatgagcagtccgttcttgttgcacccgctggctgcggacaagacatgtccccctctttcaaataccttccatctgcgcgcatacataccgcacaacacatacctgaatcacccgcagtgggctagcaccttttcgaaccttggaatagagaatgcgaaattacgacttccgtcctgaaatataacgtattgaaggttgtcccaacgccaattatggcaagtgtgcaccaggttatggagaaaagtgttaacatctaccacgtcacagagc

SEQ ID NO: 2066 - DNA, 350 bp, Zea mays
  unsure (1)..(350): unsure at all n locations
aacaagagggagaacgaaaagaaaaagaagggaaatgagctgaatcgaaacaaagagaagagagnaaggaaaagagagaaaagaaagtttaaatttataaaaaaaaaaagaagagaggagggagaggatgagaaaagagaaagaatgagaagaagagggagaggaaggagggagagtagaggagggggggaagagaggggagaaaggagggaggagaaaaaaggaggaggaggaagaagggaggagagagggagggagaggaagggagaaagaggagaaaaaagggagagggagggagaaaggggaaggagaagggaagggagaaaaagagaagaaaagagagagagaga

SEQ ID NO: 2067 - DNA, 433 bp, Zea mays
tgagcttctaaataaatctggcatcctttattttcttgtctaaatcatacttcgatgagcctatctaattgcttcataccaacatgtgacaaccttctatatatgccatagccaacccaaccctgatgtggagaatagacatgttgataaacaacagatcgatgcacaagatgcacacacatgtgacttgcccactaagtaggacagaatattacccaacaaccctgaataccgcacttgtttgctaaacacaccaaacaagtctgataagtgaagagtagctcatcaaaaatcggattatcaagcccaacatgacaaaaaatgagtgtagtcaaacatggcacatatatttacaatgcagacaagaagatatacagagagtttcggactatcacatccctcacacccagaggaatccgcaaactattctcta

SEQ ID NO: 2068 - DNA, 361 bp, Zea mays
  unsure (1)..(361): unsure at all n locations
aagcaccacaagactaatcattgaaggaatccatgtgggagttcgcaagagaaaggtttgcgtgttggcatcgatgcttcatcaataaactatgtgccaagcgaaagctagaagcctgaagatgatctttgagtagccagaatcagcgtttgcaatcggcaaccagatgcttctcaaaggccagattttgtgtaagctccgtctcctcgaagagtctgcatagtgaagatatgtagctgaagtaaagctatacccataacccttctaagctgaatctcgaggacgagaattcatttaagtggcgtagatttgtagcatcccaaacattcacatcttggaattntctcaaactcgctctaaa

SEQ ID NO: 2069 - DNA, 432 bp, Zea mays
  unsure (1)..(432): unsure at all n locations
ttatcaaatggatgtgaacagaccctcctcatgtattacctcaggaagaggtccatgttaaccaacctccctggctctgaagatagngagcaccctaacgaagcgtcccaatcctctgcgactcaaatgtgagacaattactagtcccaggaggctcagaaacacatctatacatcagatgactccacatctgcttataccacacaaacctataaaggtggcgaacaactctaagagttggtccacaactccggacatatcatcatagtgggggtgaagcacctcgatatacgcagccgaacaaatcatcggtcctacagccacaggcaacggtgggaacagccgcaactcttacccgatctccttttctcgaaaacaacacataagcaatggtgagtacacacgtactcaatagaccacccttcacccacg

SEQ ID NO: 2070 - DNA, 433 bp, Zea mays
  unsure (1)..(433): unsure at all n locations
agcttcanaggagagctcatttatgacatgattgttcatnnngagaaagacaagatttgtagtgcatgtcaagcaaggaagcaagttggagttcattatccacacaagaacatcatgacgaccgacaggccgcttgagctactccacatggatctattcggtccaatcgcttacataaacattgccgggagtaagtattgttttgttgttgtggattattattctcgcttcacttgggtattctttttgcaggaaaaatctcaaacccatgagaccttaaagagtttcttgagacggacacaaaatgagttcagattaagaatcaaaaagattagaagcgataatgtaacggagttcaagaactctcatatcgaaggatttcttgaggaggagggcatcaagcatgagttctcttcaccctacatacctcaac

SEQ ID NO: 2071 - DNA, 377 bp, Zea mays
tgtgaaggttcttcatcaccacatgtgctatactgtatgtcacagccagcccatgctagccttaacaattaagcatgcatctacaccggcctcctcttttgcaaaataaactaaataaagtttgccgtctagtacacccttaaaagctaatgaaccatcacttcttctaaagacagacacatctacatttgtgaataagcaatctatatcccatgttacaaagttgactcacacacaacaagatatatccaagccgaccaactaagaatacattagacatagagtgctcggatgaaatagcaatttcttctagtgctttcaccttgccttggttccatcaccgaatatgattgaatcttgggaatacctgttcttga

SEQ ID NO: 2072 - DNA, 359 bp, Zea mays
  unsure (1)..(359): unsure at all n locations
gagatgaagcttgaatcntattgcanctcatctgagcttttctttcatcacaagaagctgctacgccggactgaatgggatctatgccatagcaaactgaatcgtaagctccgcacccactttcatctttcagagctctctgttctataatatcttcaagctggatgaagaacaattactggatgcttgaaaaatgccgaagcttctgaggcataacacagatacaacacctttccaattgatagatttttgataactaaacttcgagacaagatactgggttgctttaatgccttcagcttttgacagcccgcctcctgcaaggcaactgccatacatgtatggaccttgccagggag

SEQ ID NO: 2073 - DNA, 338 bp, Zea mays
tggctgtgtacagccaacactcatcccagtctggcacaccggtctgttcggtggtgcaccggacagcgtccggcggtgcatcggacagtgtccggtgcgccaggctgactcggcgtgaagtatccgctctcgggaattcgcagacggcgtacggctaaaattcaccggactgtccggtgtgcaccggactgtccggtgagccaacggtcggaccggccaacggtcggccgcgcgatctgtgcgggacacgtggccgagccaacggtcggaatggggcaccggactgttcggtgtgtaccgtacatgtaccgcgcgcccacggttaccaaatctgcaac

SEQ ID NO: 2074 - DNA, 484 bp, Zea mays
  unsure (1)..(484): unsure at all n locations
agcttctanagggagaacacattntaagatttactttttgttcattntgagaaagacaggatttgtagcgcatgccaagcagggaagcaagttggctctcatcatccgcataagaacataatgacgaccgacaggccactggaactcctacacatggacctattcggcccgatcgcttacataagcatcggcgggagtaagtactgtctagttattgtggatgattattctcgcttcacttgggtattctttttacaggaaaaatatcaaacccaagagaccttatagggattcttgagacgggctcaaaatgagttcgccttaaggatcaagaaaataagaagcgataacgggacggagttcaagaactctcaaattgaaagcttncttgaggaggagggcatcaagcatgagttctcttctccctacacgccacaacaaaatggtgtagtggagaggaagaatcgaactctactggacatgg

SEQ ID NO: 2075 - DNA, 454 bp, Zea mays
cgctggtgaaatctcttgtacgcacgcatgactcgagcgggattatgaccaagaatggcactgctagaaagctgacgtgtttatcctcagattcagtacggcctttaactttcatgtgagcctcaatagtcacaggatccaccagcagaacagcacggctaggacctgtcagattcaaatttggaacctgcatgcagcaccgtcaacactgggtaaactgaagtcggcaaacattatatgcaaacaaaagataagaaagaaaagggtacagtaaacacactgaacatgtagcgggcatcagaaaacatggcaggaaaatattggcttgatgcattattgacaaatcaaaaacagcacatttcatcagaacacattcaagtatttcttatttggaacatttgtttgtcagggcctagtaaacatgggctgaacagtttcaagacaatgcctctcc

SEQ ID NO: 2076 - DNA, 397 bp, Zea mays
tctctcttaactccgcaaacgcgatacgacccttcattcggtttatcttctaagtacacacaacctcctacgaaaaagtataagggttgtcgccgtcggtccgcataactcttctgaccaataggggccctctctatatcatgcatcattctctgaaccttcgccccagcccctcttaccacgacaggcccgaagaagtacctttcacccgatccacaccaatctaacgcgagacgacatcgccgccatatagtgcttcggaaggtgccatctcgacgctctctcgatagccaccattatacgaaaactccgctaacggcaaacattcatcccattttggtgagaacgccagaacacatgccgcgagcatatctctcagtacttgatcgactctctc

SEQ ID NO: 2077 - DNA, 440 bp, Zea mays
tctatagggagaacacgtgataggcttgactaacgtgcatttctaaaaagatagaccttgtgcagcatgtcaagcaagtaaacaagtgggaggagcacatcacagcaagaatgcgatgaccacctcaagacctctggagctgctgcatatggacctcttcggacccgtcgcctatctaagcatacgaggaagtaagcatggttcagttattgttgatgacttttcccgcttcacttgggtgttctttttgcaggataagtctgaaacccaagggaccttcaagcgcttcctcatgagagctcaaaacgagtttgagctcacagtgaagaagataaggagcgacaacgggtccgagttcaagaaccttcaagtggaggagttccttgaagatgaaggaatcaagcacgagttctccgctccctacacaccacagcaaaatg

SEQ ID NO: 2078 - DNA, 400 bp, Zea mays
  unsure (1)..(400): unsure at all n locations
agcttggaanaagataaaacactgtttcatggtttgataaagagaacaaagacgaagctgcttcaaaggcccaggccgaagctcaaaaacgcgagattaaagatcttcagaaacagctggctagagctaaagaggagcgcgcgcttgaggaaacgaaacgagaacttagtgattttatggtcagcaaattggaatcaaaagttaaggagcttcgcacatctcaggggaaatgctatgtcaaatctgtagaatgtgtgaataaaattaaatccagcttcgccagcgtatgcgccttttccagcgaagagaatttctctcgaggcaatcccgaatgtccgctggaatggattagccacgaagcagaggccttcgaagagattctgaacagtcgtggcgacat

SEQ ID NO: 2079 - DNA, 399 bp, Zea mays
  unsure (1)..(399): unsure at all n locations
gaccttaagcgactgggctgcaagctggaaagttttatgcttcttgttcttttgcgangccacagccagcccatgctagttttagcaattaaacatgcatctagactggcctcttcttttgcaaaatcaactaagaagagcttgtcgtctaatacacccttaaaagctagtgaaccatcacttcttctaaagacagacacatctacatttgtcaatagacaagtatatcccatattgcataattgactaacatatagcaagtttatccaagactctctactaaaaacacattagagatagaatgctcattggagattgcaattntacctaacccttttaccttgccttgattcccatcaccgaatataattgaatcttgggaatccttattcttgacat

SEQ ID NO: 2080 - DNA, 403 bp, Zea mays
cttacagggagaacacctgataagctcaactcatgtgctatttctaaaagatagaccatgcgcagcctgccaagcaggaaaacaggtgggacatcctcatcacaccaaaaatgtgatgaccacattaagacctctggagatgtttcacatggacctcttcggacccgtcgcctatctaagtataggacgaagtaagtatgggcttgttatagccaatgacttttcccgctgtacttgggtattctctttgcatgataaatctcgaatccaagggaccctgaagcgctccctaaggagagctgataacgagtctgagctccacgtgaaaaagataaggagcgacaatgggtccgagctcaagaaaccccaagtggaggagcaccttgaggacgtaaggatcaat

SEQ ID NO: 2081 - DNA, 423 bp, Zea mays
aactataaatactaagcttgccttcgcctcagtgtaccacccacaattcaactacgtcttggagcgcgccaccggcaatgttttcacggcgatcaacaaaatgctcctcgacgacaacaagggcatatgggccgacctgctacctgaagcagtctgggcactgaacacgaccgagtgtcgggcgaccggattcacttcctttcgcctgctatacggatcggaggccatgaccccgcaggaaatcaaacatgggtcccgcggacaagcgcttcatcagtacccgacgtcgacgagccaacttccaaagacctcattgacggagaccatgtcttcgccctgcaggccctcgacatatatcaagcacaaacgaatgcctggcgcgaccatgcggtcgtccaagagaattaacgaagggacctcgac

SEQ ID NO: 2082 - DNA, 179 bp, Zea mays
tttttttttcacgaagaaggagaccatccaaatatgagaggcctacaagaagaaaatccatgtgcgctgaagtatgactgcctttcactagggatctaatgtatggcgctattggttgtgtcctgctgtgtgtgtatcactgcgttccctaatcagtagcgggtggtaattcacctcgg

SEQ ID NO: 2083 - DNA, 426 bp, Zea mays
ggaggcgtctattggttgtcgacttgcggtacactcctctttcttttctctccgtcgccttgaatgcgacgggttgagcttccgatgtacatggatcatcaagctcgttgatcttcctccagcctccgatcatgcactcaaaacttacaaaatgcccgattacttcctggggggtcattttagcatatctaggattaccacgaattaattgaacttgagtccggttaaggaaaataagagatcttagaataaccttaaccacttcatggtcatcccactttacgctcccgatggtgcgcacttggttcaccaatgtcttgagccggatgtacatgtgttgcggctcctcacctttgtgaagccggaaccaaccgagctccccctcgatcgttctccgcttggagatctttgaaagctatctccctc

SEQ ID NO: 2084 - DNA, 368 bp, Zea mays
  unsure (1)..(368): unsure at all n locations
ccagagccagcccatgttagtcttatcaacttaacaagtgtcaagttcagctctatcaaaaatcactaagtatagctgagcctctaacactcccttatatgctattgaatcatcacttcttctaaagacagtgacacctacatcagtgaataaacagttgtagcccattttgcgtaattgagatacagaaagcaaattgtaatctaaagaatctacaagaaaaacattggaaatagaatggtcaggagatatatgaattttacccaaacccttaaccaaaccttggtttccatccccgaatgtgatagcatcgtggggatcctggnttntctcgtatgaggaagacatcttcttcttccctgtcatgt

SEQ ID NO: 2085 - DNA, 265 bp, Zea mays
tatgcgaagctcaccgtcgccaatgcactgtcttatatttattgacgacggcggaaccgcgaagccaccgacgctgtgggctgggtgactgcgacgggcacggagagagccaatgacggccatgggcatgctggtggagtgcgcggtgccttcacctaccactcgagcgacgtgggcgaataccgggaacgtgcgcgtggtctgaccgcgcgcgatgcgcacgccatggggactgatgcggcggctgcgtgggaggggatggatc

SEQ ID NO: 2086 - DNA, 238 bp, Zea mays
caatgcacacctgaccggcccgtcgtgtgtgaaccaacctggatgtagcggaattatattgtggctgtcgtgttgaaaccgacatgtatgccgagaacttcttctcgcccaagatttcctccttcccctacctctagatatcgtctccttctgtgacagagccaggggacattgaaggccgtacatgtgacacctcatcacgctgacagaatacttccgtcacttccttggcgtgtca

SEQ ID NO: 2087 - DNA, 352 bp, Zea mays
cgaagccatggtcagtagcatacgctaataatataccaattgactcaagcctagctacgggtgcataggtttcaccgaaatccaaaccttcaacttgcgagtatcccttggccacaagtctggctatgttccttgtcaccacaccatgctcgttttgcttgttgcggaagacacactttgttcctacaatattttgataaggacgtggaaccaaatgccataccctaattcctaatgaaattgtcaacttcctcttgcatcgccaccacccaatctgaatcttgtagtgcttcctctaccctgtgtggctcaatacatgaaccaaagagtaatgctcacataaatgtgcaac

SEQ ID NO: 2088 - DNA, 103 bp, Zea mays
gatcctactctctttactaaaactatcacaaaagaactgtttatatgcccaatttatgttgatgatattatatttgggtctactaacaagccatcttgtgaag

SEQ ID NO: 2089 - DNA, 174 bp, Zea mays
  unsure (1)..(174): unsure at all n locations
agacttaccggatgtatggcagctctaagcagatttatatccaggctgcgagagaaaaggtttaccaattctataagttactcaaaaaagtggacaacattctgtggactttacaagcacacgaagccctacatgcatcgaanaaaattcttgacgacaccaccagtgctgaaa

SEQ ID NO: 2090 - DNA, 417 bp, Zea mays
gcttatatgggtagtccccagcaaccttttctatcctggatgacgctccgtttcgagagtctcaaattcatgtctctcgacggtgactacgacatgatactccttctttcgccgcgcgacgacgacaatggcggccatcatctcgcccgccggcggcagaatcaacgacgtcttcgccacatggtggaagaacaacatccgggtttgtcccgtcatctcccccaccgacggaggaggaggcggggcaaccatggcaaagcaggaggcggcacctcatcggctgtcgagcgagtcgacggcgccggcgccccagcgggggacacgccgggcgttgatcttgcgtcggagacgaagacaacgccgtttccccgcaacacgccaatatcgagctgacggatgacgccagcacgctcgcga

SEQ ID NO: 2091 - DNA, 372 bp, Zea mays
tttttactaaaaattattttcttaatgaatttctctattttataatcaggctggactgctcgccaaaatcagagaaatgcagggtctcgggggtaaaagtcccaagactcaaaattcccagccagtggaccgtgggttcatttcaaaataacctaaggttcttcacgcaatagcgccacgacgaaggggtataggattacatcggccgttggatcttcactggacgaccgagatattaaaacccaccttgtcggactagattttatgtggcacacgatatgatcttggctgtctcttcaagatcgacggtcaacaattcgcttgaacccgattgaatactgcccgccgatttctgatccaacgctcccagat

SEQ ID NO: 2092 - DNA, 276 bp, Zea mays
  unsure (1)..(276): unsure at all n locations
agctctcaatccctcagagtcccatgatntatactttgatcacttaggctcagtgacttgagagagtgtgatatgcgtatttttttgacgctcctgttgcttggctatcacaatcgagccttcttcatctctttctcaacttactaagcgaattgtaaagctagcaaaagacacctaattgtgtggtcatacttgcggggtcttattgactcgcgtgattaaaaagaagccctcgactggtctaagtgactgattgagagaggaaaagggttggat

SEQ ID NO: 2093 - DNA, 468 bp, Zea mays
  unsure (1)..(468): unsure at all n locations
cttattgtctttctcctgaaatttcatctctcctttaatgagatatctacttatatattacgcttggaaagagtgttagtcccacagaaacatattatacagtaacattcccctaaaatgcgcatatacgttttgaatactcgcaggagacatgcactttaacttctgagatcaagtcgggaaaattaaccattactcaacaactctggcacatatacttcacaatgatactatttaaaggatatcaaatgaatggtacacgcaagtatcatttatctacgagcttaattaagctatgtgccatgctttgctaacattttaaaaccatataggtttgctcaaaagtataaatntaagccgagcaatcctaccatatgatatacctagtatgcatacgattcaactgatattactaccaattgacaaggtaaacgcatgaacaatatcaatggaacaacataacaattg

SEQ ID NO: 2094 - DNA, 351 bp, Zea mays
gactaacagacgttattttgagaaagacacgatctatagcgcatgtcacgcacggaagcaagatggtgttcatcatccacaccagaacatcatgacaactgaccggccactcgagctcctgcacatggacctattcggcctgatagcttacataaccatcggcgggagtaagcactgtctagttattgtggatgactattctcgcttcacttgggtgttctttctgcacgagaaatctcatacccaacgagacctctaaggcattattgagaccggctctcaacgagtccggccctacgatcaagaaaatacgaagcgataaccgaacgaagctcaagaactctcaaatcg

SEQ ID NO: 2095 - DNA, 434 bp, Zea mays
  unsure (1)..(434): unsure at all n locations
agcttctccttgtcatcatcaaccttgacatatattcactccgacttccagcctgctgcccatttgcttcaatagctgattacaagaaactttgtggttttccgataagcaaagttatagcaaccaaaattgtcgtgcaatccatcctttctaaccttcgtctgataatgcagctcgtggacccgacaaaagctgtccgcaaatggctccactgcttggcttcggagtgcccagatataaacgctaagcctaacgatagcgttaggggtcagctggtgaaaatagataccgaacctcttcagtacctctccaataatcccatgtagggggaatcttaatccagcctttagaaagcttntgaaaataacaatntcatccttctccggctttggagtagtctcttctcccccgaagcgtaatagctttttctgatt

SEQ ID NO: 2096 - DNA, 352 bp, Zea mays
  unsure (1)..(352): unsure at all n locations
tgtcacagtccgcttgaactaatcttcggagaaacctcttctcaatgcaatatgacaccagaaggtccaaccccaacgacgttggctgagttcagaattattgcagagcatactggcactacggatttggtgcaggaatttctggctnttcaagtatttccatctatgaaggaatgggctatgtccaagcttatacgagaaaaaaaagagggggagcttgttcgggtaccctatcataaaaaatcaagacatactttaacgcaccctgcccagaatggctcgaacaatctaaataatggcacagagactcttgaaattactctaaaaaagaggacaattgatgacagcagct

SEQ ID NO: 2097 - DNA, 433 bp, Zea mays
  unsure (1)..(433): unsure at all n locations
agcttcgcatctctgaactaactctgttgtatctttcttcgccgncggccaataaaatcctgacctgaaaaccttcccgactagtgttctggatgctgcatgtactccacactgccctgcatggacttcctccagaagttgcttcccagtggacgggaaaacgcacttcatgaggacgcctgacgcgcccctcctgtataatacctccccaatgagtgtataatgagctgattgtctggcaatacgctctgccgagttcttgtcatctggttcttcttcatcctttatatacttaataatcggtcgtctccagtcatcagagtctgactcaggttgatctatgatgttgcactcttctatttgatccgtcgagatgctcggctggagaaattcttgcacaaagatcccgggcgggacctgagtccgaccggat

SEQ ID NO: 2098 - DNA, 412 bp, Zea mays
  unsure (1)..(412): unsure at all n locations
agcttatcaagattctttaacacccttaatttgttggtataaaatttcttttctaatatccatcaaatttaggtgttacctcctctctcccttgcttttctttcctttntcctaaagggtgaagaattattttgtttattatctatgtgtagcctaataaaaataaaacactaaaggaataataattgttgcatcatgtcggaatacatctatttttgtatgatgatttgctttagtgtgcatctatctaaactcggagagagtggttgaattcgaattcaaaacctaaaacaatattcaaatagagaaaagagaaagatatagaaaaatgagaaaataaaccccaatacccctagccggcccagcatgaccccagctttgctttctcgacccagcgcgtaagcgcgtgctt

SEQ ID NO: 2099 - DNA, 465 bp, Zea mays
  unsure (1)..(465): unsure at all n locations
tcggctcggtcgaggggcagatctactcggcggagatattgcacgtaccgtgtctgccactctcgattaggccggaccccattccgctcttcctcgacgcgcagtgcctcaccctcgggggccaagggtgcctcaggctaagccgacggtgcctcgggcagggtcgaggccttctcgggctcgagcgtgtcgtcggtcttcaatgacggttgatgtangtctcggtagaagacgtccggagggacggttgttcgccccgaggctatcttagccagctcgtccgtagtctcgctgtatcatcgggcgatgtggttgagctcgagcccgtacaacttgtcctccaggcgccgaacctcatcgcagtacgcttccatcttcgggtcgcgcgagcgcgagttcttcatgactcggtcaatgaacagctgcgagtcaccgagagcgtcgaggcgcccgaccactaactcg

SEQ ID NO: 2100 - DNA, 438 bp, Zea mays
tcatctatctgcctctgtaggtcagctagacgagccatcttttctttctttcgttgaacctgttgatggagcatctgcaagatttggatttcttgaatcaagtcgtcctccggaggcgttggactggtggcctttcttttctggcttcgggcctccctaagagaaaggacatcctgattgggatccagcggctgcacggtggcagcccctgaggctaaagctatcttcggcggcatgacgaaggtgatgcttgccgaaggtgttcaaaactcaaaaaatggacgtgagttcaccggaggtgcgcaccaatgttggggacttgttctcaaatgctaagagttaagaacaacgcaacatacaaagtgttaaatgttaaagtccttcctccttcaagacattatgtcccttccgatataatgaattctggacgaacgttat

SEQ ID NO: 2101 - DNA, 380 bp, Zea mays
ttatgtgttgaccctaagaaaattctttggtattttaaaactacagagctccaaagttagccctgttcactagttttcagacttagtcacatgagaggaatagagtggctttttgcaaataagcccaaatctcatcttttgacatggaaatcctcaaatgtgtgaaccttattctttggggtaccctagtaccttggtttttgcacttgggtccaaaagtgtgcaaaatttacatataaccccctagggtttcaacttgggttttccaggggtcttttagggttttttggcacttctagggtttgggtgccacttaagtccattaaatgtgatatcttatgattatttctcatgagtattgaagttctctctcatttggg

SEQ ID NO: 2102 - DNA, 350 bp, Zea mays
  unsure (1)..(350): unsure at all n locations
gcaaaacattcttcccatttttgcgagaagtccagaacacatgcccgcagcatatcctcgagtatctgattcactctctcagtctgtccactggtttgaggatgataagccaaactgtggagcatattggtacccaaagatttatgaagttcttcccaaaacttggctacaaattgaggtccacgatccgacactatggtctttggaacaccatgcacactaagaatacgagcaatgtacaactgggcgtagacagtaaccgggatatntgtcttgactggcagaaagtgagccatctttgtaaatcgatcgattataacccaaatagaagcatacccttgtgtcgtcct

SEQ ID NO: 2103 - DNA, 345 bp, Zea mays
gctacatgacaccagaaggtgcaacacaataagctgtgaacgaattcaaaattattgctcagcatatcacctccagagacctggttcaagagttcttggctttccacgttttctctacttcaaaagaatgggaaatgccgaagctcaagggggacacaaaagaacgtgaacttgtcgtgtcaccttactacttcaagtttaagaaatactttaaaacatcttgccaacagtggctggatacaactgaagtaatcgtgaatgaaatactcggcacctccctccaaaaagaacaataattgatgactgcggtctaccgcacccgtccgaagcaagactgaaccgagt

SEQ ID NO: 2104 - DNA, 388 bp, Zea mays
gatgtgctgctacttaccacttcccttgatgagcaacaagcacctgcattgagtacatgcacgaatgagatgaaacactctcaccagcgaataattttgacgagatctttaaaccacacattgaattcatcaacattttaaaagagtcccaattaaaatcagaaatacttgtagatatggaactcagtaatcccactataaccaataccatctcatttcctcgaacaaccacaataggttctataacacttgcgtgcgacaataatacctgcaaatatcacttcaatgtatgcataggaacgcaatgtgtacgtactctatcttcatacctctgagaggataacaccacatcatctgcaatatcacttcaatgaatgcatatgaatgc

SEQ ID NO: 2105 - DNA, 398 bp, Zea mays
aaacttgatgttgcgtctcgtacggtgagtgagaagatcataactttataaccttgccgactggcatagtactgttttcggtttccttctccaagtccgaatagatacagcacagatttcagatgatgtgaactccaaaggttacagggtttagatcatgtgaactccgaactctctgtataaaagaaaaaaaaaacataatgaactcctggcaaagcgatgcgtatatgttgacaagctattcgtccgttctcttcccgagctccagactctggccagactgtctgatgatggcccagacacatcagatcacttccggctcttcttcttctgctgtttagctgtcgatcgacacgggtccatggcgacaccaagaaatcaacccgtttgagttagta

SEQ ID NO: 2106 - DNA, 468 bp, Zea mays
tatgaagaattttcataccaacgtgggctagtcggcgatgtcatagccaactcatgttagtcttagcaactaagcaagtgtcgagttcacccctattaaaatcaactaagtatagctgaccctctaacaactccttaaatgctactgaatcatcactttttccacagacagtaacacctatatccgtaaaaagacaatcgtagcccattttgcataattgagaaactgacagcaagttataatctacagaatctacaagacaaacatcggaaatagaatggccacgtgatatagcaactttaccaagtccttcgaccaaaccttgatttccatcaccgaatatgatagctctttagggatcatggttcttctcgtacgacgataacatcattctcttcccagtcatgtggtttgtgcacccgctatcaattatccatcttgagctcctagatgcataacctacaaaac

SEQ ID NO: 2107 - DNA, 263 bp, Zea mays
actgaggcgtgcgatctcggctttgatcataggaggacggggcatattattctgcctacatatgaacaggtctgtggataaatgccatcgcatatgagtgacgcacccccagatatgaagtcagattctacttccactatagcacagatcgaggtgtggagcctataggacgttcgctcatcgatgtctctccgcgagcgcaacaatgatgtaccacatgaaattgtgaagaagactctaagatgacgctgcacatctctata

SEQ ID NO: 2108 - DNA, 469 bp, Zea mays
  unsure (1)..(469): unsure at all n locations
ctaagcttcngcgtggtagcataaaatgaaaccgacttagagatgaaaatgctattcatacctctgtggattactatagaagtgttatcaaatgtaaacggcatgaatgtaattttgtatgggttgtgtcccctgcctataaataggtgaacaataaccccgtactgttcacgctgatttagcattcgcttttgcgtcacgcttgtactttcatctccttcaagtcgaaggtacatctgtaattcgatgttatttccgtttctacataataataatgcagagataagctaataataatatacaattgtctatgttatccttcataatccttatgattcatccttcgtcactgtatagtgtatttatgaaggtacgcccttcataaccttcgtccgaagatattatatcctaagggaaataatgcttctaacgacgaaggactcttaccgataacattntctatgttgac

SEQ ID NO: 2109 - DNA, 434 bp, Zea mays
ctgcagctggtgtgttttattcccttgtggttatcataccatccttaatgccagggcgtctcccattatagagcatgcttctagcaaatttaaacttttcattttcaagttcatgctcgtcaattttagcatttaatgtagatatgttatcattttgttgtttaatcatggcaaggtgatcatcaatagcttcaacattaatatctctacatctagtacaaatggtaacattttcagcagtagatgtagatgctttgcaagtatttaattctactatcttagcatttaattttgcattctcaattttaagacaggaaatagaatcattgcaaacatttaattcttcaatcttagacactaagttatcattttcagttctaagactagagattgaatcatggcatatgctaagctccttagaataaatttcacat

SEQ ID NO: 2110 - DNA, 231 bp, Zea mays
  unsure (1)..(231): unsure at all n locations
ttattatcatgttaactcattacctatatctagagctctttttatcctaattcacgcacttaacctacactacgcatnctttatcacccctcgagttcactggattgctacatgtaagtcagcgaccaagtcttcatgtccaagaagtaacggcgatccgaatagaataatacccagctggggatctccaacacacgacatatgtagcacttaacccttgcatatgtaact

SEQ ID NO: 2111 - DNA, 436 bp, Zea mays
  unsure (1)..(436): unsure at all n locations
agcttagatctgaggctcgtagatggaactttgttgtgtttggtttgacttttgactttgatttttgccccctaaaagccaaaagccaaccaaagggctggattcaggaagcagcgtttcctaaaagccgactttctcgtagtgcaaatctgaaagcacccctggacctgcttttagtggcttttcggatggaactatgaaaacatatatcaaagaatttttaacgacttttagtggtttccaccaaatggtttttagctttttaacagcttacagcctacatcagctttttccacagctcacagcccacaacaactttttttcacagccacagcccaaccaaacagaccataaggctcctaatttcaacattaggagggaacatatatcttatgctcataatatctgtatgaacactntaaatctggtacttcgg

SEQ ID NO: 2112 - DNA, 77 bp, Zea mays
tcaacggtcaaatcccaacggtcggctgacgtggctgtcttaccgtacatgtccggtgtgcaccggactgtcctgtg

SEQ ID NO: 2113 - DNA, 439 bp, Zea mays
  unsure (1)..(439): unsure at all n locations
agcttctaaagggagagcacattntaggattaactaatgttcattttgagaaagacaggatttgtagcgcatgccaagcggngaagcaagttggtgctcatcatccacataagaacatcatgatgactgataggccactggagctcctacatatggatctattcggcccgatagcttacataagcatcggcgggagtaagtactgtctagttattgtggatgattattctcgcttcacttgggtgttctttttgcaggaaaaacctcatacccaagaaaccttaaagggattcttgagacgggctcaaaatgagttcgacttaaggatcaagaaaataagaagcgataacatgacggagttcaagaactcacaaatcgaaggcttccttgaggaggagggcatcaagcatgagttctcttctccctacaccccacaaca

SEQ ID NO: 2114 - DNA, 372 bp, Zea mays
actatacaaatccgcttgactctatatttcatatttttcacacttgctacactctaacaaagcgctctcctaccttgggctaccattttgatgtcgtgacactaggcaaactcttactgatttgaaagctataaagctcccaagttgagccgaactttctgatttccgacttagcatacaacttcaatgaggtccatcttgcaggtcacctctcattcagaaataccttacaaatccacatatttgtgaaccatatgacttaggatactctattaacatagcttctgcactctatctccacaagtggactaactttgcacataggttcctagggttcggttatacggttctccagggcttcaaatacggctt

SEQ ID NO: 2115 - DNA, 433 bp, Zea mays
agcttgtgaagattcttcattccaacatgtgttattcggcgatgccagagccagcccatgttagtcttagtaattaagcatgtgtcgagttcagctctatcaaaatctactaagtacagctgaccctctaacacacccttaaatgctattgaatcatcacttcttctaaagacagtgacaccaacatcagtaaagagacagttgtagcccattttacataattgagatacagaaagcaacttgtaatctaatgaatctacaagaaaaacattggaaatagaatggtcaggagatatagctattttaccaagacctttgaccaaaccttgatttccatccccgaatgtgatagctcgttggggatcttggtttttctcgtaggagaacatcattttctcccctgtcatatggtttgtgcacccgctgtcgagta

SEQ ID NO: 2116 - DNA, 324 bp, Zea mays
acgtcacaactaaacaataatttcttagctggagtaaactaaataataatctggtagcggactaactatcaatcgtacgggttcaaatatgacactaatctctttgctaaaaaacaagacctaaggcgaagccagcctttgcgctagtttggagacttggtgatttgaacagattgaggtctgacaatacccttatattgtcacccatggaaatgaaggcctctgaatctgttggcatggccgcatgagaccataaccatatggaggcatggagccgccgacgaccacgagtacagattactcctccataatgccggtgaactc

SEQ ID NO: 2117 - DNA, 429 bp, Zea mays
agcttgcttacttggtaagatgacttttgtttcctttcacgggtttaccggagaggacgttagatttattggaactcatacatactgatgtgtgtggaccaatgagtacgacagctaggggaggattccaatacttcataaccttcactgatgattttagtagatatgggtatgtctacttaatgaaacacaagtctgaatccttagaaaagttcaaagagtttcagaatgaagtagaaaatcagcgtggcaagaaaattaaagcactgcgatcagatcgtggaggtgaatatttgagtcatgagtttagcaatcatctaaagagttgtggaattgttccacagcttacgccgcctgtaacgcctcaaaggaatggcgtgtctgagcgacgtaatcggactttattggatatggttcgatcaatgatga

SEQ ID NO: 2118 - DNA, 87 bp, Zea mays
taaaagctaatgaaccattcctttttctaaagacagacacatttacattcgtgaataaacaggtatttcccatattacaaagttgac

SEQ ID NO: 2119 - DNA, 425 bp, Zea mays
agcttttgactttgactttatctctctttctctttcaatctaagaccaagtattaaaatacatgacagaacgctttaccagaccttgttggagccggtcttaacctctcaaacgagctaaaaaagttttagttttattttacgaaagttgagttttctaagaatatacacgccatctcgaccatagatgaagtaattaactcagcgcatgaaatcatccccggccgctagacgacaatgcaaccaaaatgaaaaaaaatgaaaactctagacgacaacgcacgggaggttgtactctacggacgagagctatagcgaggagcagactcgctttagcggacaggagaacgtccgccacgtttggagagcgtccgagccagccgataaaatagaggagcctttagtgtgcgttgttgggcgcgtagt

SEQ ID NO: 2120 - DNA, 387 bp, Zea mays
ctcgcttttaaaaacacgcttttagcgcttccgaagatgtctcgaactgctaagaacgctgctgctgagatgaagctgagtcttgatgaagagaagaacctacggtttcttatagcgatgtcgaagtcccacacagaaaagattaccaaggaaattctggaggggctgtctgaagatactggtgacagtgaaagttatgatatggacagcggtggcgaagactccgaagatcgcccctggcgaccaagccattcagtttatggtaaatcaactatcaaagagaatcatcttgttaatatgagaggaaggtatttccgggatctgtccattgtgagggcggacgaaggggaaaaaacttgtccacaccctgaagaaaatgaagttgtg

SEQ ID NO: 2121 - DNA, 199 bp, Zea mays
tagagctacgatagtagagcatctttgcttagaggaataagcattgctgttaagcatagttgaaagaaaagtgggcccaaagttgggctatcagccagcctcaagtctgaaactctggttaacagtgtgtagggtcaactttggaaccatgtagagcttgattcagttgttcattaactaagacctctgtgacaaatta

SEQ ID NO: 2122 - DNA, 432 bp, Zea mays
  unsure (1)..(432): unsure at all n locations
tgctcttcataaagcttcggaattatgaacccgcctaatagtattattatctcttagtccataagcgcttgagtcgttattgtaaactctcattgaaggcatggttgtaaattctcacacgctgtgtcctgtgcctatanatagtgaacagtactcctctacttgttacgcttatttttggggaatttaccacctcatcattttgagaaataacccttgtcaacgcagaggtataatcgtatccagtacttacagatattgaacggatattatatcattcatttactcttgatattctatattctatgctattccgaccattaccaacgtacattacacaactaaccttctaatcgattgccgtcgcttctcccagttattatctccagggaaatgcttattgacaacgaattgcaattacatttatgtgcc

SEQ ID NO: 2123 - DNA, 442 bp, Zea mays
  unsure (1)..(442): unsure at all n locations
agcttgaagctgacattagcagctaccgacgttttcttattgtcaacagcttattttattctaattttaaggtaaagttttttcctcatctttttaatcttttgtgatgaagcaaagatttctgatgaaggctattttgcacagagtatgctgctaagcaaagccctaagaatgcaacaagacctcgaagataagaagaatgaggttataatcgaagttgctagattaaacgatgaacacctccaaaaatcagaaaacttcgaacaagaaaagaaaagttttgatgcaaggcttgaagctgaagtcgagaaaaactcaaaattacaagaatccctanaggagcttcagaatgtttgcttaaactntggcaaccgctgcgtgcaacgggtaaggcaggtctttaactcagtgggagccagctctgaanaatntgaaccttcga

SEQ ID NO: 2124 - DNA, 336 bp, Zea mays
  unsure (1)..(336): unsure at all n locations
atgtccgacgaattcaagagtttcattggaatggtcgattattatcggcatttcattgaaggtttctccaacattgccagaccaatgacagccctgctagcaaagaaggttgagttcaagtggaccccagagtgccaagaatcatttgagatgttgaagcataagttgacaacagcaccagtgtaggttctgccaaatgttcacaagccattctcagtatattgcaatgcttcatataccggactacgatgtgtgttattgcangaagggaaagtagtggcatactcgttccgacaattgatagttcacatgaagaattatcctactcatgatctg

SEQ ID NO: 2125 - DNA, 431 bp, Zea mays
agcttgagaagattcttcaatccaacatgtgcttatctgttatgccagagccagcccacgttaggcttagcaattaagcaagggtccagttcaactctatcaaaatctactaagtataactgaccctctaacactcccttaaatgctattgaatcatcacttcttctaaagacaagaacacctacatccgtaaacagatagttgtagcccattttgcataattgagaaactgaaagcaagttgtaatctaaagaatctaccagaaaaatatttgaaatggaatgggcaggtgatataacaaatttacccaatctttcgaccaaaccttgatttccatccccgaatatgatagctccgtggggatcttggttattctccgaagaagagagcatcttcttctcccctgtcatgtggattgtgcacccgctatc

SEQ ID NO: 2126 - DNA, 481 bp, Zea mays
  unsure (1)..(481): unsure at all n locations
tctaaagggagagcacattntatgactaaccaatgttcactctgataaagacaggatatgtagcgcatgccaagcacgaaagcaagttggagcccatcatccacacacgaacattatgacgaccgacacgccgctcgagctactccacatggatctattcggcccgattgcttacataagcatcggcgagagtaagtattgtcttgtaatagcggatgattattctcgcttcacttgggtattctttttgcaggaaaaatctcaaacccaacaaaccttaaagggattcttgagacgagctcaaaatgagttcggcttacggatcaagaaaattagaagcgacaacgggacagagttcaagaactcacaaattgaacgtttccttgaggaggagggcatcaagcatgagttctcttctccctacacgccacaacaaaatggtgtagtggagacgaagaatagaactctattggacatggca

SEQ ID NO: 2127 - DNA, 278 bp, Zea mays
  unsure (1)..(278): unsure at all n locations
gtgcgagcgttggctcggacgaggagtacctctcctcggtggagatattgccagtacgcggactgccagctttgatcacgcttgaacccgctttgctccccctggacgtgcaacgtctcgccatcaggggccgaaggtacctggcgcttgacctacggtgcctggggccgatccgacggtgcctcagactatgccgaggggaactcaggctgggccggaggtgcctcatgctcnggcgtgccttcgatcttgacggagggttgatgcaaatcttcgga

SEQ ID NO: 2128 - DNA, 167 bp, Zea mays
  unsure (1)..(167): unsure at all n locations
actaagctttagttcttccgcttgtatgcgagtntcagcatacaattcctattacttctttgaatttgtggagttcagattacctgggtcaagctaccatgatttatttttgataatgagcttgccactataaacacgcccacgcgggggcctccgtggatttgggg

SEQ ID NO: 2129 - DNA, 418 bp, Zea mays
  unsure (1)..(418): unsure at all n locations
agcttgtgaaggttcttcatccccacatgttcttatcggcgatgccacagccagcccatgctagtcttagctattaagcatgcatcaagaccggcctcttcttttgcaaaatcaactaaataaagtttgccgtctaatacaaccttaaaagctagtgaaccatcacttcttctaaagacagacacatctacatttgtaaatagacagttatatcccatattgcataattgacttacagatagtaaattatatcccagagactcaactaaaaacacattagaaattgagtgctcatttgagattgcaattntacctaacccttttaccttgccttgattcccatcaccgaatataattgaatcttgggaatccttattcttgacgtaggaggtgaacatcttcttctcccccgtcatat

SEQ ID NO: 2130 - DNA, 302 bp, Zea mays
  unsure (1)..(302): unsure at all n locations
tcaactccatctatattatggattgcctcggaatcaatctattcnttcttcggnccttctggcagcttcctgacttccatgaatagcaataagcccttggtccgaaggtattttcatgcagagataagctgggtgaagaatcgcttcaaaagcatttagggtaccaccaccaatgatcgcgttgtaggggtattccatgtcaacaatatcaaacacaatttgctcagtcctttgtgtattaacacaatccgaaggttactggcatggtcaatcttccgagtgccacaatctggccgcctccg

SEQ ID NO: 2131 - DNA, 437 bp, Zea mays
  unsure (1)..(437): unsure at all n locations
agcttgacngaatttgttcccacgtagactgtttttagggtcttcaaatgcttatccatgatcctagcaaatattcagataaaataatttccataagtgccaaaaggcagaacaatgtcttaagaagcaagaaagacaagctatggcatacttgcaacggtaaaattcactgtggtaaaaatggcatatgactaacagtagatgggtggatagattgatgtgaagtcataacatcaagaagcataacatgcgctagactggcaacaaaagatgatcattgtaatacaaacacatattattgtcaggtgcaaatgataatccaagagcacacatgaatcaaatagaccttccataactcgaccagatggaatgttgagccacggcaacatgttaactataaatcatgaacgatctgattaaaatgataacatagacat

SEQ ID NO: 2132 - DNA, 264 bp, Zea mays
tgagacctaccatgttataactcttaagcgcttatggctcaacaaccccgaagcatggatgaagctacgaatttcttatcctaatggatcaagtcgaaagtcacctatttatcataaaatcttgaaagattgttgatgccaattatgtgatgatattatattggtctataacagttacatggagattatagatctgaccaacatcaagttttatggggtgagactttagattaggaacactcaaggacctctagcaacaattat

SEQ ID NO: 2133 - DNA, 439 bp, Zea mays
  unsure (1)..(439): unsure at all n locations
agcttcggcatctntaattgcttctttctcctgagccttggcgtccagtcagcaatgaaatctgctagcgcctatgactgaatcgaaaatctatgcacataatcaatgctgaactcattgagttccgcagcccactttccaatccttctagtagcttctctgtttctcataatatccttcaaaggctgtgatgaaggaacaattatatggtatgcttgaaaataatgtcgaagcttcctggaggccattaaaacagcatacatcaccttctccaattctgtatagtttttctttgataaactgagaacttcggaaacaaagtatactggagcctgctttttcaattgcccttcaagcttctcctgaacaagcgccgcacttactgcagagtgcgaagctgccacatacaacagcagaggagcccctggcgctggtggag

SEQ ID NO: 2134 - DNA, 447 bp, Zea mays
  unsure (1)..(447): unsure at all n locations
ctggtgctcaatcctactaatgggaggaagttctggaggtcactcagagggaaaaacatctttgaactgctgcaaaaggctaatcacagatgcaggcaaagcgctagccatatcatcaatagaaaagaaagcatctttgccaaccaaggcatatcaacaagcatcagtagcatgagtttcaagaagatcagatttagtagcacgcatgacaggagctttcaatctaatttcgtgctgaatttctcgctcattacctggttccttatgggtatttgcagctctatctttattagcttgtacaatttcagcaagagtcacaggtagcaaagtaatatntttatctttatgcctaagagtgtatgtattactcctagcatggtgacgtgcatcagtatcatattccaacgtctacccaacgnaagagaacaagcttccatacgtactaca

SEQ ID NO: 2135 - DNA, 440 bp, Zea mays
  unsure (1)..(440): unsure at all n locations
agcttcttcttgtcctcatcaaccttgacatataattcatttgatttccagcctgccggccatttgcttcggtagctgattacaggaaactttgcggttttccggtaggcaaaattgtagcaaccgaagttntcatgaagcccatcttttctggcctttgtttgataatgcaattcatgaactcgacagaaactgtcagcaaaaggctccactgcttggcttcggaaggcccaaatataaacgctaagcctaacgatagcgttaggagttaactgatgaaggtagatgccaaacctcttcaatatctccgcaacaatctcgtgaacaaggaatcttagcccagcctttaaaaagcttttgaagatgacaacctcgtccttctctggcttcggggtggtctcttctcccccgaagcgaagtagcttcttctgatcttcact

SEQ ID NO: 2136 - DNA, 461 bp, Zea mays
  unsure (1)..(461): unsure at all n locations
cttcattctcacatgtgctaagcggtgatgtcatcatcagtccatgctaatgttaacaattaagcatgcatctagaccggccttctcttttgcaaaatcaactacataaagcttgtcgtctaatacacccttaaaagctaatgaaccatcacattttctatagaccgacacatctacatctgcaaatagacaatcatatcccatattacataattgactaacagatagctaattatattcaagagactcaactaaaaacacattagagatagagtgctcatttgatattgcaatcttgcctaacactttcaccttgccttggtcccatcaccgaatatgattgaatcttgggaatccttattcttgacatangacgcgaacatcttcttctaccccgtcatatgcgttgcgcatccgntgtcgacaatccaaacttgaacccacggatgcataaacctaca

SEQ ID NO: 2137 - DNA, 352 bp, Zea mays
cggggaagctagttggagtccatcacccacacaagaacatgaagatcaccgacaggccgcttgagctactccacatggatctatacggaccgattgcttacataagcatcagcgggagtaagcattgtcttgtgattgcggaagactattctcgctccactagggtattctttttacaggaaaaatcttatacccaagagaccttaaagggattcttgataccagctctaaatgagctcggcttaaagcataataaaataagaagcgacaacgggactgagttcacgagctctcaaaatgaaagctttcttgacgaggaggtgatcaagcatgagctctctcttttctacac

SEQ ID NO: 2138 - DNA, 296 bp, Zea mays
aatacaaggcattccccgttgtcttgctaactcttctgacgagcttgtgccttcttcatattataaataattttctgaatcttattctcggcctctttcaccatatcaggcctaaagaagcacctttcaccaggttcagaccaatttaacggagtacgacatcgacgtccatataaagcttcaaagggtgccatcttgatactttcttgatagctattattatatgaaaactccgctaagggcaaacattcatcccatttctgtgagaagtccagaacacatgcctgtagcatatc

SEQ ID NO: 2139 - DNA, 432 bp, Zea mays
  unsure (1)..(432): unsure at all n locations
agctntatcaaatggacgtgaaatgttgttttctcaatggaccaatcaaggaagaggtctatgttgagcaacctcccggctttgaagatagtgagtaccctaatcatgtttacaaactctcaaaggcgctttatgggctcaagcaagctccaagagcatggtatgaatgtctgctagattttcttatcactaatggcttcaaagtcggtaaagccgatcctactctctttactaaaactattgcaaaagatttgtttgtatgccaaatttatgttgatgatatcatatttgggtctactaacaaatctacttgtgaagagttgagtacgatcatgattcagaaatttgagatgtctattgaaagtcgcctagaggggggtgaataggcggaatctgaaatttagaaacttaagcacacactancagccgggg

SEQ ID NO: 2140 - DNA, 432 bp, Zea mays
agcttcttcttcattctgatgaaaaccaagttctttgatcacttcatcaaaacgaatgttccaactccgagatgcttgcttcaacccataaatggatttctgaagtttgcatatctttccagcattgatcggatcgacaaaaccctcgggctgtatcatatacacgtcctcatctaggtttccattaaggaaagttgttttgacatccatctgccaaatctcataatcgaaatatgcggcaatagctaaaatgatccgaatagatttaagcatcgctactggcgagaatgtctcgtcatagtcaactccttgaacttgtcgaaaaccctttgcaacaagtcgagccttatagatgtgaacatttccatccatatctttcttcttcttatagatccatttgcattctataggtctaacaccatcaggcgggtc

SEQ ID NO: 2141 - DNA, 425 bp, Zea mays
  unsure (1)..(425): unsure at all n locations
agcttattgacttgtaagaacatcatttcgttctttatctattatttctatccaacggaaaacaaagtatagttagaaccatcgtagagatgattctgtgaggtcattcttaatataaaaatccaattattgggtgtattacttctttttggacatgtatggaccgcatgggatgcaaaactatcttataatgaatggacttatggacgtagctgttagaatacccgtttagggtttgggggttttccctgtgtaattactgtctcgcccctctgtaatgggcatgacccagtactcaagtctattaatacaccacccaacccctgttagggttagggttcacattccaacatggtatcagaggcaacttaattttttctagcccccatctccctctcgggcactgccaaccncattcgcaccac

SEQ ID NO: 2142 - DNA, 461 bp, Zea mays
ctcagagtcacctgcggcatgcaagcttctaattaaatcatgactgcgcctaagcagctttattatgagagtgaagggggatgtgctgctacttcccacttccctggatgagcaacaagcacctgcattgagtaatgcaagagtgagatgaaacatctcagcaagcgaattgttttgatgagatatttaaaccacaaattgaattaatcaacattttaaaagaatcacaattaagatcagaaatacttgtagatatagaactcagtagtcccaatataaccaataccatctcatttcctcgaacaaccacaataggttctataacacttccctgcgtcaacaaaaccagcaaatatcacttcaatgtatgcataggagtgcaaagtgtaggtactctgtcttcatacctctgagggtataaaaccacatcatctgcaaatatcacttcaatgaatgcatat

SEQ ID NO: 2143 - DNA, 217 bp, Zea mays
cgcctttatcaggggcatatttgtaattcctcacaggctgcgtcctgtgcctataaatactgaacagtattccgttactgtccacgcattctagcaactgtcatcgcatatcctgcaattaaaccttttcgccaagcccaggcatagcacttgagaacacgtatctcacataggtgcccacctctggtgaactcactctcactccttgagctgatgg

SEQ ID NO: 2144 - DNA, 470 bp, Zea mays
  unsure (1)..(470): unsure at all n locations
cggagtcaacaaaaatcatcataacacgattaccgtccaaatatgctatatattaattacacctcgttttgggtccaaaggccttgtacactctacggttacttggccatcaccttggatgtcaccttagccgcctcttttagatatacattcagtagtatctattagcttagatgggttttgcttagattaatatatgctcttacagtttcgtcgttcatcaggttgtgagaccacagctcatgatcttcatctttattcgcanattatgctgcatcttctatggtcttgcttgtggtctcgatttcacttgcacggattagctatcgtgacatggtcaaccgagttgtgtcgattgataactacaggacacgtggtgatgtgattgtggcgttccaatctgtcaattagatgccggatcctgtgtgtctcgtgctggccactcaagagttttctatcacctaatggat

SEQ ID NO: 2145 - DNA, 317 bp, Zea mays
ttttattcctctggggttgagagtagacaccgccagggacacatggcgaaggtatatatgaaaacacaataaacggtgcatcataaaaatgggaaaacccatcccaaaaaggggaaacgggatagaaaaggaaaatcgctgggtggcaggctttaaataacaataccctaccaaatattctcaaggatacaaaaggaagctgcgcaccacaacaccaatatatcaacgaggggaagtgcacaactatggaaacatacttcatactgcaaaacaaaattactaaaggggaaatgaatcctgcaaagtgaccataaaaa

SEQ ID NO: 2146 - DNA, 395 bp, Zea mays
acatgtgctaagcggcgatgccacagccaggccatgctagtcttaacaattaagcatgcatctagaccaacctcttcttttgcgaaatcaactaagtaaagcttggccgctaatacacccttaaaggctaatgaaccatcacttcttctaaagacagacacatctacatttggtaaaagaccattatatcccatattgcatagttgactaacagatagcaaattggaaccaagatactcaactaaaaacacattggagatagagtgctcattacgaatcgcaattttacctaacccttttaccttgccttgaatcccatcaccgaatataatcgaatcttggcgaatcttattcttgacataggaggtgaacatcttcttctcccccgtcatatg

SEQ ID NO: 2147 - DNA, 450 bp, Zea mays
  unsure (1)..(450): unsure at all n locations
agcttcaacctctagagataaacaacgaatataacaaacaatagacattttaacaattggactgaacgtttcatcataatcaatgttatatctttgtttaagatcattcaccaccaatctagccttatattgatctagactgccatcttgcgtcaatttagttttataaaccacttgtatgttacaacatgactacctttcacgatgagattaaatggtatgccttatttttaataggagcataaaattctaatctattacaactttcaaatctttatttgttaatgctccaacaactcaattagattcatcaacggtagttaataaactagttntaggattgtaccataaggtgtcgtctttgtagattctgggttgcacaataccatgttgagaccttgtataggacactgagcatcatcaacctcctactatgtactcgatgctcta

SEQ ID NO: 2148 - DNA, 332 bp, Zea mays
tatacactcgttgttgtacaatttctagacaactgtgaattggttttctaatcttaaccttagctcacttagtcgttgcatctatcagtaactaatactaacttctttgtcatgcatatacgacgtgtttggtacgctgcatatgggcccgccaagctggtgagatacaacgacgcttgttgggtgctggctctgatctgggggctgagggcggcgttgttgcctgatgttgtgctactgcatgcggatgaacatctcctggagcagctgtggaaaacagtttattttgtattcggagcagccctgctacctgttggagcggcggctcactg

SEQ ID NO: 2149 - DNA, 433 bp, Zea mays
  unsure (1)..(433): unsure at all n locations
agcttcacgggctactggcggagctagcctattctctggttgggctggagggtggctggagtgggctggccacggcggccgaagctctggcggcaatggcgggcggaaataagctcgccggagctaaggaacggtggctggccggtgagggtgagtgcggggcgaagtggggcgcgcctggggaggctttataggcacggcgcggtgcacgggcggtcgtggaccggcgagtgcgcgcgggcgtgcactgggaaggcgcggtgcgcgaacgggcgtgaaccaggggtgtcagccgcggtcgaacacgtgttcccgttgcctctgcccctgttcaagcgccgattgggagcaaatcttcgcgaatttgggcaagatcactgcaagggatttggtcaccggaccaagctntgtcttttgtgtatggacgacgtgc

SEQ ID NO: 2150 - DNA, 188 bp, Zea mays
ctgagctgtgatatgactttcgaccgcgcattagatagagagaagtatgctattatgttgatgacttttccgttcacttggtgttcttttgccgatagtctgaacccagggacctaagcgcttctcggagagcttaaagatttgactcaggtgacgagataggagcacaccggtccattcagaacttc

SEQ ID NO: 2151 - DNA, 427 bp, Zea mays
  unsure (1)..(427): unsure at all n locations
tgcaagctttacgttntatacaaccaaaagtatgcatggttcggcatggtgcatcacatgagataaagtgttntaaggttttgctttacacgaggtctaaagccaaaacccgctgtgactttggaaaagatcaaagcttaaagagaagaaaagggaaaaggaaagagtaacgcctgaatttggtgagagaaaagaagaaaaaattctgcccccaaatttagggcgttacaaacctatcccccttaaaagaatctcgccctcgagattcagggttggctagcaaagagctcagggtatttggccatcagatcatcttcacgctcccaggttgcttcttcctctgagtgatggtcccatctgactttgcacattctgatggtcttccttcgggtgactctgtctgcaacctcaaggatttgcactggct

SEQ ID NO: 2152 - DNA, 429 bp, Zea mays
agttttcttgatgagaaagattcttccaaattaattctgctattttggcttcagcatccgctaataagcattcgggtgtgtgaagctcgaagtctttctttttgatagccaccgattgctcttttatcttggtttctaagttctcaattataacttcgtgctttttatcctctaagtcatgctgcatttttaaagccttgctcaacagcatactctgcgaacaaataaccttcgttagaaaacatctatgttattaaaaacaataaaagttagagaaaagttgtttaccttgaaatcggaataaaatagactaccgacaatgtgttgtcgtcggtagcggctgatatctgcttcgagcttcacgaagccgatacactttgatagagtatcgataacttttgcgtcggtctgatcttgtatgcagccaac

SEQ ID NO: 2153 - DNA, 428 bp, Zea mays
  unsure (1)..(428): unsure at all n locations
agctngaaggccaagttaagaggcaggccctaatatattttgtatccgaggttcttagtttatcaaagaaaaattatacagagttggaaaaggtattgtatgctgtcttgatggcctccaggaagcttcgacactattttcaagcttacaacataattgttccttcttcacaacctctgaaggatattatgaggaaccgagaagctactggaaggattggaaaatgggctgcagagctcaatgaattttgtattgaatatgttcatagatcttcgattcagtcccaggcgttagcagacttcattgctgactggacaccaggggctcaggaggaagaaacaaataaagacgccgaagcatggacagtgttttgtgatgggtcttggggaaccttcggagcgggagcggctgctgtgttggtttcacct

SEQ ID NO: 2154 - DNA, 327 bp, Zea mays
  unsure (1)..(327): unsure at all n locations
tcattgatgaagcaccacaagaccaatcaacgaaggaattcatgacggagttcgcaagagaaaggctcgtgtgtcggcatcgatgcttcctcaataagctagctgccaagcgaaaggcgaagcctgaagatgatctttgagtaaccagaatcaacatttgcaatcggcaattcgatgctcctcacaggtcggattttgttgaagttccatctcctcgaagagtctgcanagtgaagatatgtagctaaagtaaagctatactcataacccttctgagccgaatctcgaggacgagattcatcttaagtgccgtagatctgtagcatc

SEQ ID NO: 2155 - DNA, 436 bp, Zea mays
  unsure (1)..(436): unsure at all n locations
gcttgacgaataaagggagcgacttatacttctctgtcaaaacatcgagcaagagtgggcaggccgagccctctctggaggagcacgttatcgagcccgggacgtccaatgcgcgtattattaacgacgccagggcaggggtgtcctcgacctttaacgggccaaccagaaactagatgcagcggcgatgttactccgaacaatgccagagccattcaccaccgaggggcaacgtgtccagagcaaactcaaggatctcctgtgaaacgccacagtccaatatgccgagagctctgcctcttgaaggcagggatgcccctcggagcatcacgtcgagccctcccaacatgagcgagaagcctcggtccataccgagcccacaagagacaggacccctgcngtcctggaccgcctcgaaaacagcacaccaccacga

SEQ ID NO: 2156 - DNA, 413 bp, Zea mays
agttagtcttatcaaccacgcaagtgtcgagttcagctctatcacaatctaccacgtatagctgaccctctaacactcccttgaatgctattgaatcatcacttcttctaaagacagcaacacctacattagtaaacagacagctgtggcccatttgacataattgagatacggaaagccaattgtgatctaaagaatctacaacaaaaacattggaaatagtatggtcacgtgatatagcaatattacccaatcctttgaccaaaccttgatttccatccccgaatgtgatagctcgctgcggatcttgcgtgttctcatatgaggagaacatcttcttctccctgtcatgtgggttgtgcacacactgtcgagtatccaacttgagccctcctgatgcataacctacaaac

SEQ ID NO: 2157 - DNA, 422 bp, Zea mays
agcttgccaagccctcggacccgatcggactttaccggaggcccgagatcaccctcaccggacttcggtcttccgccgccgcgcgtggaccgagctatccagtgagtctccgcccaattcctttcgctcatagcttctctggcatcccgtggacctccctgacctttttaattgaactacctcgccgtgaccaggccggtctcctcgccgtcgacgagcatccccgcctgcgcgcgtggaccgaccaactccggccatctccgtcgacgttccgcacaccgttgtgatccccgcgacctccccttcatcctcgaccacttcaccggaacagtctcgccgccggtaagcccctccgcccttttctccggcgcggctactgtatgaggtagaagaacgacctcgggttaggttctgtagacccg

SEQ ID NO: 2158 - DNA, 196 bp, Zea mays
cattaagatcttaacgaaagaaagcttctccggacgaagggcatcacacattaacatattacgttgccatgtacataattcataccatttgagaactaaccccaacactgggtattcaacaccaatgacatcaaacactctattcacgctcttcttgcctcgacctctgaaggctgcagtcatagcatcatctttc

SEQ ID NO: 2159 - DNA, 429 bp, Zea mays
  unsure (1)..(429): unsure at all n locations
cagcttcgactatctgtctctgaatgtcatttttacgagccatcttctccttcttgcgctgcacctgttgctgaaggatctccacgttntggatctcctgatccaagtcatcctccggaggtgttggactaacaaccttcctcttctggcttcgagcctctctaagagaaaggacgtcctgattgggatccagcggctgtaaagtaccagcccctgtcgctgaagcttttttcggcggcatgacgaaggtgatgcttgccgaaagtgttcaagactcaaaaaatggaattgagttcaccggtggtgcgcgccaatgttggggacttgttctcaaatgctatgaatcaagaacaaggcaacatanaatgttaaatatcaaaaacccttcgttcttctaataattattccctttggaataacaaattagga

SEQ ID NO: 2160 - DNA, 478 bp, Zea mays
  unsure (1)..(478): unsure at all n locations
tcatcgtattcaacgaagcactttgtcaccaaagccggactatttctattcatattatcgctcgcgcttcatgttatgataatgatgatcctaccaatgtctaatgaatgtttgtatgaatgcaaagaatgatgtgatgtaatatgcaaatgtatgacccaaacgcacacgaagccatacctagactctgcatccccatacgaatgactttggagtctcttcaccnttctatttggtggcatttaagctctgcattcccttaggaacgactttggagcttcttcaccttctatttcggtggcatttaagctttgcatccccttaggaacgactntagagcttcttcaccttctatttcggtggtattttgctctacattcncttaggaacgacatttgagcttcgatacttactctgcgctcccttaggaacgactnttgtaactttggaacttactctgcgcttccttangaatgac

SEQ ID NO: 2161 - DNA, 442 bp, Zea mays
  unsure (1)..(442): unsure at all n locations
agcttgtggcaaaagctagntacgtcgtgctgttgttantttaggcaataagccccaacaaaatagggacgtacgccaccaaaatgttaccgccacttgttggagagcttggctccaaaaggattactcccaggagttgcgggtgaatgagttgctggcgaatcacgtgatgtctgtgagaacagaaaagacagcaggcaaattatgtatagataatatcatgaaagaaatcaccctttctctatcagccagcgatgcttcaacctgcttgttcttggacatctatctcaagacagccacaacctactacactacggtctggaattcttcgtagattgcagcatgaggtacctgtgaacaaacatttcagattcatgatgctaacatatagtgtcatacacgcgcatcaagaatcaagtgtcatatactggatataatatta

SEQ ID NO: 2162 - DNA, 373 bp, Zea mays
  unsure (1)..(373): unsure at all n locations
gaacccgaatacttatccaagaagaaatccctgtggaaagtttgcaatgaggaagcggttgtgtcgttggcattcaatgcttcttcaataagctagctgtcaagcgaaacctataatcctgaagatgaatctttgagtagccataatcancgttgccatcatcaaccaaatgcccctcaaaggccatattgtgttgaaggtccatctcctcgaagagtctgcacagtgaacatatgtatctgaagtaaagctatacccataacccttctaagccgaatctcgaggacgagattccttttaagtggtgtagatttgtagcatcccacaacatcaaatcttganatttctcacactcctctaaatccaaatgaat

SEQ ID NO: 2163 - DNA, 446 bp, Zea mays
  unsure (1)..(446): unsure at all n locations
agcttcgtcacttgaaagataatcgccttttatgtatatatttatttcagntctccagtcttcactgtgtactagagaaataataagcactgctctctccatgagttcaaccaaaggtgcttttattgtttcaaaaaatacttctgaaggtagggggagcccctgagctgctgatttggctagcaaatctgcatgctcattntcacctcttggaatattcttgacagaaaaaccttcgaaggaagcttccaaccttcgaacttgatccaaatatctttcaagctttggatctcatgccttgctacttttgtccacgtggccaacaataacttgagaatcggtctttangatggcccctattatccccattgcccttaatttccgaagccccaagaggagtgcttcttactcaacaatattatttgtgcaactgaaatccagtttga

SEQ ID NO: 2164 - DNA, 448 bp, Zea mays
  unsure (1)..(448): unsure at all n locations
cctgatatganggatggcgctttcataagagcttccgtcttattctcaacaaacgcaggcgaaagacacaactcccgctccaagaaggcttgctacaactgtggtaagtccggtcactttattgctaaatgtccattatcaagtgatagtgacccgggcgaccacaagaatgggagaacaaatgacaagaacagatactacaaatagaacggcggttatgtccatgtttgtccgcagtgggattccgacgagagctcaagcgactcctccgacgacgaggacgtcgccaacatcgccgtcaccaaaggacttcttttccacaacgtcggtcacaagtgtctcatggcaaaggacggcagaccgaagaatgttaaatccaactnctccactaaatatgactctcttagtgatgataatgctactgacgacgaggataacttgcgtacta

SEQ ID NO: 2165 - DNA, 421 bp, Zea mays
ttacaagaaggaaagtgtgatttcttttgtatttctgatcttgtatgtagatgacacattattaattaggaatgacattcctatgctagagtctgtcaaggcttcactaaaaaaagagtttttctatgaaggacttaagggaagcagcttatattctaaacataaggatctataaatataggtcgaagaggctcatatgattaagccaggacatgtacattgacaaggtgttgaaatggttgaacatggaacagtccaagaaagggttcttacctatgtcacatggtatacaccttagcgcatgagtaacgtaccatatgactcgacaattggatcaatcatgtatgccatgatatgtacatacccagatgtttcatacgctataagtgctacgagtaggcaccaagctgatccacgtgag

SEQ ID NO: 2166 - DNA, 436 bp, Zea mays
  unsure (1)..(436): unsure at all n locations
agcttggatattattcatcagaacactactgtattttgtgtgataaataaaaattcttcttcacgaagcatgaaaagaagggaaggtgtgttttcgtcaaagactcaaaaacggtacgtatgtaaaaatttcatgcatcgcaaagaattgaacaataaaaacaggtatattatattcagggttacaagatgttacatatgttacatttcagaagtttttacaatagtacttaatcttctctcagaacaacttccgcagtcttgttcaggagccgattaacaacttcatccatgatagcttcagccatctttttaatttcgtcgtctcctttcgggtgagggcccggagacgctntaataggatctgaaggaggacaggatacggctacattgctattacaaattgcgaacgaagtttaaaaccaaaatattacaac

SEQ ID NO: 2167 - DNA, 439 bp, Zea mays
agcttaaagaaatcaggtatgaatctgctataatttcttctagtccaagaaaacttcgcacttggtgaacagttgttgggggtctccactccataatatccttgaccttgctaggatctaccgcaattcctttagctgataacacgtgccccacaaattgaatttcttccagccagaacgcgcacttgctgaacttggcatatagctgatgttcccttaggcgcgtcaatacaatccgtagatgctgagcatggtcttcttcattcttggaatatatcaagatatcgtcgatgaagactaccacgaacttgtccaattcgggcatgaataccgagttcatcaaataagtgaaatgggcaggagcatttgtgagccccaaagacattaccaagtattcaaacaatccatatcgcgtagcaaacgcggtcttcgcgatatc

SEQ ID NO: 2168 - DNA, 452 bp, Zea mays
gaaactcaaagcttcactccatctatgttatggattgcctatgagtcagttctatttatttctgccctattggcagcttcctgactgtcatgaatagcgatgggtccttgatcccaaggtatcttcacgcaaagataagcacggtgaagaattcgcttaaaagcattgaggggccacgaccaaaattcattgtagggcattcatgtcacaatgcaaacacaacttgctcacttctaatgttcgtgatgaacccgaaggtcactgacatggtgatcttgcccagtgctacaatttgtctttcttcgaagccacagagaggatgtgtagcatcatgaatcttatcttctggctcttgcatttgtctgacagccttaccaaatatgatatcagctgcactgcctgtgtcaaccaagacattgtggactagacatccctctgataacacaggagat

SEQ ID NO: 2169 - DNA, 413 bp, Zea mays
  unsure (1)..(413): unsure at all n locations
agcntgatggtgctctgactcccttgttgtattcctatgccatccctaatgccaggacgtctcccactataaagcatgcttcgagccaacttacaaatttcattctctaattcatgctccgccaatttagccctcaacttagctatgtgatcattgtttttaatcatggcaaggtgatcatctatagcttcaacattaacatctctacatctaatacaaataatgacatgttcaatagtagatgtagatggttcgcaaacattcaattctttaatcttaacaatcaaattatcattctccaagtctacgacaagaaaatgaatcattgcacatatatagctccttaaaataatattcacatttgtctacctctaaacataagaatatttcaatttgaaaatgttcttattttc

SEQ ID NO: 2170 - DNA, 411 bp, Zea mays
agcttatgaagattcttcatcccaacatgttctagtcggcggtgccagagccaacccatgttagtcttaacaattaagcaagtgtcgagttcagctctatcaaaatctaccaagtatagctgaccctctaacactcccttaaatgttattgaatcatctcttcttctaaagacagttacacctacatcagtgaatagacagttgtagcctatttgacataattgagaaacagaaagcaagttgtaatctaaagaatcaacaagaaaaacattggaaatggaatggtcaggagatatagcaattttacccaaacctttgaccaaaccttgatttccatccccgaatgtgatcgctctttggggatgcttggttttctcatatgaggagaacatctttttcttcccagtcatg

SEQ ID NO: 2171 - DNA, 359 bp, Zea mays
  unsure (1)..(359): unsure at all n locations
atatttatcaataaatgtgcttcgactctgacacagtgctatagactgtgcgagcttctgactcctctctgaagtccctctgaaggtgaatatgctgactcccttctggctgctgtcctcgctgcgtccgcgggggcggtggaagctgttgccaagatgcttggggttggctcgccgaagcaacagaagttgcagggtgggtgcctacatattctggaatataaggcgaatgatacgaagcagtatgcatgacctgcttcggctgacntctgtgcgctgctgcttctgctatctccttctgcttctggatnggaacgtggcacatccaggtggtatgaccctttgcttcaccacagaat

SEQ ID NO: 2172 - DNA, 411 bp, Zea mays
  unsure (1)..(411): unsure at all n locations
agctntagtaggatgtgtattagcaacttgttttttatcttgacatgcactgcatggcttgtctttttcaaacaccacatcctttaaacctctaaccatatctttctttaataccttcttgagtgtgctcatcccaacatgtgcaagcctcctatgccaaagccatccaagagaagctttggtgaagaagcaagttcttaagtctgcatcttctgaagtgaaatccactaagtagaggttgttgtatctaaaacccttgaataccattgattcatcatccatttttgttacaataacctctgatggagtgaataagcattgaagtccaagatcacagagttgtcccactgataataaattgaagctcaagggtgcaactaagagaacatttgatattgataagtcatttga

SEQ ID NO: 2173 - DNA, 377 bp, Zea mays
gatgccacagccagcccatgcaagtcttaaccattaagcatgcatctagaccggcctcttcttttgcaaaatcaactaaataaaggttggcgtctaatacacccttaaaagctagtgaaccatcacttcttctaaagacagacacatctatatttggtaacagacagttatatcccatattgcacaattgactaacagaatgtaaattatatcctaatgactctactaaaaacacattagagatagagtgctcattagaaattgcaattttacctaacccttttaccttgccttgattcccatcaccgaatatgattgaatcttgggaatccttattcttgacgtaggaggtgaacatcttcttctccccgtcatat

SEQ ID NO: 2174 - DNA, 399 bp, Zea mays
  unsure (1)..(399): unsure at all n locations
ttcaaagccagcagccagaagggcgccagcattcccaacaacaacgtgacttcatggaggagtccaaagctcgtacaatcaatagcactgtaccagaatcaaagcatatatactgagcaatatcctgcttctgaaatacttttaccttctacgctcatttactttctgaataatgaacaagcaataaaaacttagttttaatttcttgtaatgatcttgtttctaccagaatgaaatatatcttcttcacagatttacgaagctcanaagtcgttcctaagggaatgcagagccaaaattgacgaagctacaaaaagtcgttcctagtggagcgcaacgtacgttttctgctcacaagtcgttccacagggaatgcagagccaaataccgtcgaaatat

SEQ ID NO: 2175 - DNA, 415 bp, Zea mays
  unsure (1)..(415): unsure at all n locations
agcttgacaggtgcaatgcgaggcagcgcctatttctggatatcttgccgcttgcaggacaggataggtataggggatccggtaaagagacagacacagacaactattctattctctctggtgccggtgagaatctagcctaagtagtcaccattggcggttcatagctttccgggtcagcgttctcttatcttgtatcacggatttgttgaaacgattttcaacaggtacccccttggaaatggngtacttgactattctacaaggattatagtggatttggaacaaactatgttggagttttatcaacaattttattctaaaaaaagggttgggagtcgaatttatactgcagagtatctaaaatatactactggctgcccaacaaaaaataaaaagcatatcctacatacct

SEQ ID NO: 2176 - DNA, 412 bp, Zea mays
tgtacttcgactcaacaaggcatgacctgtgattggggcaccatcttagcacgcctgctgacgcaccgtattaattcagcacatctgtcgacgcacgcgctgtcaatctgccttcggtcacatcaactgccatatctgtccccacggccgactgacccacgacccccacgtctggcggtttcattgggccacgcgtcgaatgcctcgttgccgccgccttggttaataatatccttccacagcagccccaacgcggcgcgcgatcgtgtgcgacgatttgctccccgcgtggcggttcgctcttttcgcactcgaagtctggcgcacaatttgtatgacttgtgggcctgcgcccctatgtcatagactgtgatgtcttggtccttggtactcgtcgggagagatgtcctgt

SEQ ID NO: 2177 - DNA, 436 bp, Zea mays
  unsure (1)..(436): unsure at all n locations
agctntatcaaatggacgtgaaaagtgcctttctcaacggaccaatcaaggaagaggtctatgttgagcaacctcccggatttgaagatagtgagtaccctaaccatgtttacaaactctctaaggcgctttatgggctcaaacaaaccccaagagcatggtatgaatgcctaagagatttccttatcactaacggtttcaaagtcggaaaggtcgatcctactttatttactaaaactcttgacaatgatttgtttgtatatcaaatttatgttgatgatattatatttgggtctactaacgaatcaacttgtgagggatttagtaggatcatggcacagaaattcgagatgtcgatgatgggggagttgaagtatttcttgggatttcaagtaaagcaactccaagagggcaccttcattagccaaacgaagta

SEQ ID NO: 2178 - DNA, 405 bp, Zea mays
  unsure (1)..(405): unsure at all n locations
tttattaactctagttatcaatcttaaatgatctatacccaagaatgacccacagttattctaaacttattatattcaaaactcatatcatctcgagaaagatattgatgttgtacgaaataaagaattaccccgtgcaagaaagatcaacgtctacaacatggaggaaaaccaaacgatggaacacttatgttctacgtgcacatcctanattatgatttctcatgtgtcttgtgtagtcacatagaanaagaagcactttaaatgtccttaaaattatgtcaccattctttgaagaaatctctctcatatggtagattgcatagtcatcatttctattctatggccatctacattctttaacatatcgaagtacctcatggcatggtttacactaattatctt

SEQ ID NO: 2179 - DNA, 436 bp, Zea mays
  unsure (1)..(436): unsure at all n locations
agcttgtgaaatgaacgtggaatggttcctttttatntattgccataagcattgctgttacaagagccagaaggttatgtaccgaaccaccaaacgtaccataaaacttcaggagaacagatggaacttacaaactaatgagatttgcacatgaacttaaattctcagggataggtcctataaggttgttgtttgcaaggttcctgtgaataataagtgacaagcgacattgacaaacatctaaattagcattctagtaagcatcatatgtaaaaaatatgaaaataaatatacttacaattcaaacaattctgtaagttttccaagatcaggaggaatgaacccagtcaacagattgtcgttcagttccctgaaaccagatgtatttaaactggggagaacactaaactaacaagaagcaaagtaacatanaatc

SEQ ID NO: 2180 - DNA, 202 bp, Zea mays
acctgataggtctacccaatgtttatctctgaacaacatatatcctgtgcacttgtcaacacggaaacaggcgggaagctctcatcacactacacaatgttgatgacacacatcatagaacctctgcagctgctacatatggacctcttccgacccgttgcctatttgagcatacgaggatgtaagtatggtctacttatcc

SEQ ID NO: 2181 - DNA, 406 bp, Zea mays
ggcttattacatatggctcatgttttttttttgttgtacatttccacggacgccgggtgattcttatactagaggttttgtagaatctctggttctaacagttagattggttagagtacagtgtacataaagatgcagcttattgctattattgcttattatttaagcctacaagaaccaacatctttggtaaagatacattcactaacgtaggatttaagaatcggaaaaaagcttatgatgtattcaaggaacatgtccaagcaactaatgggtctcatagttatgctaagaaacgtgctcttgattttgctaatcggagacaaagtgtgcttatgcgtggtcatctacaagtgcagcctaacatgatgcatattaagcgtgtttgtctatcatgttacgcatt

SEQ ID NO: 2182 - DNA, 301 bp, Zea mays
atgaagcggagcataactctgaacgtcgctgcgctggtttcatgcaatggtatcgacgtaatcatggtagctttccgcatggagcccgagagctgcgcctttgagaaccgcgagcgggcggcgagcacggtccggtgagcagcgaacctctcgccgtcgacaacgaacgtaacgtcggaaccggcccgcgagtacagcaggaggccgaggtggctccgatgttgtcgacggtggcaagtcaggggaatctcctctgcacaccttgatgctccacaatgacgaacatccatcattctcacgt

SEQ ID NO: 2183 - DNA, 98 bp, Zea mays
tgtgcagcctgtcaagcagggaaacaggtgggaggagccgcatcacaacaagaatgtgatgaccactttaagaccctcggagctgctgcatatggacc

SEQ ID NO: 2184 - DNA, 57 bp, Zea mays
aaaatataacgggcggggccatgaaccttaaccccccccaaaacacccaaacaacaa

SEQ ID NO: 2185 - DNA, 135 bp, Zea mays
gcagcttgggaggctaaaactcactattgttctctttatttggcgggcacccaggatggtggagcacctgtgaattacttgataggtctaccagggaaccaccatctactaagtttacttgggataaatgccaaa

SEQ ID NO: 2186 - DNA, 395 bp, Zea mays
  unsure (1)..(395): unsure at all n locations
ataacttgttggcaagagccaaacaagaattgatatcatctgggactagtcttcaacaatagatagtactgctttcatatgaagaagtcatcaggactacggagaatacaacaggtcttcacaagatcttcatatttctgtcacaaattaccatcgctaacaatctagtggtcaagacttatggctcttccggcgccaacgaccaaggatagattaatgcccaaattagcttcaagctctgtgataatgtgggatttcatggctaattttctactcttcttgcttctggcaactcanagcacccgagctcttgacaagacgaatttagatgcgcggactgtccgcccttcaaggccagaccgtccacgatctgcgagtaagtactcgccgggctg

SEQ ID NO: 2187 - DNA, 314 bp, Zea mays
aatatttttctacgcgattattctgattctcgtgtggaacacggtattattcatgagaggacacccgcctactaccacaatacacggggtgttgaagaaaaaccgcctctattgatggttaccccatgttagagactttcggactatctaacgaatggtggggtgaggcgatcttgacagtgtgtcatgtcctgcataaagtatcctcccaagaacacagaaattacactcttccaccaatgggaaaagaggacaatacaatatttccattcgcgcacctccgctgtttgactaaagtgaatgtgcccattacc

SEQ ID NO: 2188 - DNA, 427 bp, Zea mays
  unsure (1)..(427): unsure at all n locations
taatgattgggagttgtgctgatgccattgagtatgattttccctgtcgtctcttgagctgggattatggatcgtcctgacatgcctagggtggagtcttcctctgaagcccttggtcatctcagagtttctttaggcttcttcccttctctgctgaaagtcattgtccgctctgatgtattcatccatcttctgtagaagcttctccaaagtttgtgggggcttcctggtgaaatactgcgctgttggtcctggtcgaagccccttgatcatagcttcaataactatctcatttggcancgttggtgcctgagctctgagacgcagacaccttcatacatacgcctgtaagtattcctcatggttctatgtgcattcgaacaaagtatgcgcaatcactggcttcttctagaaaccctggaagctg

SEQ ID NO: 2189 - DNA, 439 bp, Zea mays
  unsure (1)..(439): unsure at all n locations
agctttgcttactaatgactatgtgtttctattattgatcatgaaaacgtggcataatatcaatgtgacaaaacttggaatagaggaactctgcccagttctacaatttggataagttgtatacaccactacaaacctattagatatatctaaagaggtcggttagctcatatttacaaaatcactattttggagctagtttgagcaaaacaagattctatgttggagagaacaaaaagtccaaaaatcatgacttagaccagttagattgtcactatatatgtttgtctaagtcataagaacatcctcanagtagtcagacagatgtggagaagatttggataaagaagacaatactangctactgctacaggtaccagactggtccgatggcaaactagaccgtccgagcagagggtcgggcttagctaattcgtag

SEQ ID NO: 2190 - DNA, 452 bp, Zea mays
  unsure (1)..(452): unsure at all n locations
tcacaacctcacatgtgatcctctcggcgctgcctttattgattgatatgcccatgaaaacgtggggattattaaccttgcgcatggttgccgcacccacttgagatgacctgcaggtgtgacaaacgagaaaatctttagcaacatccctcangcgagccatgggctatctagagcacatgagaaccccaaatcaccacttcgtccactggcggatttatgataccaagaccgagctaatgaaattaaagtgattgatatcagtacttcggtagcactcccacgacattagggtacacgactacaacacactcgattaanaaaagagccaaaccggatggaatcgaaacagagatgagtcggatcggtgctattcagagtatcgaacaaatccaaccgggactatccggatggacttgaaattgagtattgacatataaaataatggaaaa

SEQ ID NO: 2191 - DNA, 445 bp, Zea mays
agcttagaaaaatctggaatgaatcggctgtatgtaccagccagcccaaggaaacttcggacttgatgtacagcggttgggggtttccactccaaaatatccttgactttgctgggatccactgcaacccccttggcagataatacatgtcccaaaaattggatctcctctagccagaatgtgcacttactgaacttagcatataattggtgttcccttaagcgcgttaatacgatccgcaaatgccgagcatgctcctcttcattcgtggagtatattaagatatcgtcaatgaataccaccacaaatttgtccaactcgggcataaataccgagttcatcagatatgtgaagtggacaggagcatttgttagtccgaaagacataaatagatattcaaatagtccataccgcgtagtgaatgcggtctttggtatatcttccg

SEQ ID NO: 2192 - DNA, 339 bp, Zea mays
tttttttcatactgaacttatggacatacccactaaagaagaggtgactctgaatttggagattgaacttcttgacatacctcataacaagggtgttaccgcacttcttttgctgctgctgctcgagctggctgcggagagatgactgacacacggtcgattctgcgagaaccatcttcttatcttctcttcactatcttcttttcatttacactctctttatctttgctctttcccactggaggagtctatcaaagagtattaccatcatacagaggacgaaaccaggactatgaaccatgtacaacagctctcaacccaagaatcaccaacattgtg

SEQ ID NO: 2193 - DNA, 235 bp, Zea mays
ttttcgcgcttgagcacggtgactcgaggggggtgcagctgtgattctcgaccttcatatgcctaaattacaagcccatacttctggggcatttattattagtacccaattattaactgaaaggtaagaaataagactaaatacttaccttgggcatccacttacctccagtggcctggtacaggttgagcgtgacaggtgggtctccttgaaccgaccacactccctacgtccg

SEQ ID NO: 2194 - DNA, 435 bp, Zea mays
ctccgcttatctcacctgagacgaaagcttatcctaaggggtgatgtgttaactcaagctttgctagcgcggcattcatatgcttccttgcagtattatatgcgttgcatcatatggactaacgcttccgttgctatgaattaattggcatctattgtggtcattctgaaataaacacgcatgtggataatgatgcatgtggttaatggcgctttaagattgctttaaattgcgatcttagtttaaatcagtatcttaatggtgaatagtggcagcgtgatattcctgtgctatatccactaagttgaacggcgtttaactctgattatgtgtgcttgactatgtgcatttgcgcgctatagtatcatggcttgattttcgcacaatgcatactaattactgctaacgtgtagaaatgttccaattgctaaatat

SEQ ID NO: 2195 - DNA, 286 bp, Zea mays
ccaccgctttattttttctttgggggcgagccaacgggagaatttaggccaaactacgaaaacattcaaccccaacccccacattaaatttataccacaacggttttcagcggtcaggtattaggcctaaaaaagaattagcgactacggacaaggggagcctaagaccaaacatccattgggggacaaccaccagctaccaagaagggatacattcatcaaacctgaaaatagcctgcttgggggggggctcaaccccaaaaaggggagatataaggaaatgacc

SEQ ID NO: 2196 - DNA, 307 bp, Zea mays
  unsure (1)..(307): unsure at all n locations
tcagattcccgacgctagaagacgggctctcagtgttattaaaagatgaattgaccgacagcttagcatacaacagcttaaaggtgagagaataagatttttgtacttaaaaacaaaacaaattcgctgcttatacttaataccacactccttttgcagggcctctatcttagcaacgccctcacggcgcanaaaagcgctgaagacgagggatgtaccatggccttgaataaccttcgctccgaagtaatggagctaaggaacgaaggtcttcaaaaagacaaaatattaaactcattgataaaca

SEQ ID NO: 2197 - DNA, 429 bp, Zea mays
  unsure (1)..(429): unsure at all n locations
acatgagctattatatgagacgaatacctgttggtaagagcaatatcataacaaatgtgggtggtatagcttcggtgcccgctctgggtcaagctgtctggtgccaacttttccgaagagattgccccgcgactggatgaacgaatggttctatgtgaaaaacgactttgaggcccgaaaagatattaaagatatcattatgcgccctatctggcagcgtttccgactccggaaaccgaacgtggaaatggatgaagcagccgaagaatgccacacggccttcgacatagtttgctctttcatcacgacgagggacttagttcaagagcacgtggcctacatgatatggccattggtagctaactgggaaatgccagacgaaaccatcagcacnccacacgaacgtggtcttgatccgactaaatatac

SEQ ID NO: 2198 - DNA, 427 bp, Zea mays
agcttaatgctaataacaaaaacaacaaccttattgctaaaaacaaaaacataggtttgcatgacatattttatatcctaattattcataataaaaaagaccaaaaacttaatatcccaacaagtatcattcggattcatccatacaagctctatacttcatggcaagacgtgtagaggacttcaaggatcgaatgtgttggcgccgatccgggcgctaatcactgcattgagaaccggcggcggtgctctgcacaggcgtggacggtccgtggctagggaccggacggtccgcgaactggagcagggctagggttccctgcctgacgggccggacggtccgagcctataggccggacgatccgcgcgtgcgcaggtgcggccgagttcgtcgacggcgcctgaatctcgctcccgggagggacccc

SEQ ID NO: 2199 - DNA, 457 bp, Zea mays
  unsure (1)..(457): unsure at all n locations
tatgaagattctctattccaacatgggctagtcggcggtgtcagagcccacccatggtagtcttagcaattaagcatgtgtcgagttcagctctatcaaaaactactaagtatagttgaccctctaacacacccttaaatgctattgaatcatcacttcttctaaagacagtgacacctacatcagtaaagagacagttgtagcccatcttgcataatcgagatacagaaagcaaattgtaatctaaagaatctacaagaaaaacattggaaatagaatggtcaggagatatagcaattntacccaatcctttgaccaaaccttggtttccatccccgaatgtgattgctcgttggggatcttgatttttctcgtacgaggagaacatcttcttctccctgtatgtggtttgtgacccgctgcgagtatcaactgagccccggatgataaactacaa

SEQ ID NO: 2200 - DNA, 255 bp, Zea mays
  unsure (1)..(255): unsure at all n locations
agcttaacttggtgagaacacaaacggnattgttatacttggaccctctaaggctggttccaacaacttttctatctcactttctatatcgccttttatttcaaactctactctataaatagtgcattatagtttaaaacaatgttttatatgatcatacctatggtttggtctgggacgctctacgatcctttccatcaccagcggtatcctacgtacttacctcgtcaccgtcctcgctccccttttcaacac

SEQ ID NO: 2201 - DNA, 429 bp, Zea mays
catgatcttttctcattcggttaagcgttacaacgacgattaggctctgataccaattgaaagttgcctagagggggggggtgaataggcaagttaaaactttttcaacaaaaactaaaagcaaactgcgtaaaactgaattgatctcgaaattcacccagttaactttggaaatgagatgttctaaatgatccacacggttcaaagtagtagatctgagaagcgcacttctcaaaatccacacaccaaaaagatataaacaaatcttttacgaaatggtgagagaaccaagaacacaaacaaacacaatacgcaagaacacaagagacacaagagttatcctgaggttcggtcacaccaccaaggtgctctacttcctctgtgaggcgcccacaaagagccgggtctctttcaaccctatatcctcct

SEQ ID NO: 2202 - DNA, 429 bp, Zea mays
  unsure (1)..(429): unsure at all n locations
taagcaccaacaattagagattctgctctcgctatactctttttggccactctntcaagggcaatgagtcaaagacaatgcacgtaacacaccggaacacacgcctcaagggcagtggccacagaactaccagaacaggcaaacttcaaactttccaagtcggtacaacctgacaactcgaaatcttagtagcaatcagcccataaagttccaaaaatggttccatggaaaattttcaatacaacacatgatcctcgcatccaatgcccttgaggcatctgacttaaccatgacaatgaagatgtacatatattaggggggaaaaaagatgcagtatggtccacagaatgtaagtagaaacatacacgatgcagtatggtacagagacggcaagtaaaaaacacacgaaatctttcactccaacgactt

SEQ ID NO: 2203 - DNA, 444 bp, Zea mays
agcttctctaccatggtggtgcttgctaagttgtttcagcttcctccatcaattataatacgacaagatcgttccaaaactacacatttagtgtggaacaaattgtgtcgctggttttgttgagctttaataatttgggcactcaagacacgtcttacaacgaagctctcatagtgttcagcatgttcagccccaatatgctcttcatcatcattctccttttcagcatcttgggcagcaagcatggcatatgtatcattatctaaatcgctcgctgatgagtactcaccattttctcttataattagcacacgcttgattgggcagtcccttcggatgtgcccaaatcctttgcattggaggcattggatgtcctttgttcttcccgtggaagcaatagaagaagaattggctacagcttgagaggatcctttccctgtctca

SEQ ID NO: 2204 - DNA, 409 bp, Zea mays
tctcaccatgtcgctgctagccaagttgttgcagctacctctatttatgatcaaacgacatgaacgctccttaatgacacactttcgttgaaacaacgtatgtcgctgattctgctctgccttctccatttgtgcactaagcacacgctgtacaatgaggctctcataatgctctgcatcatctgcaccaatctgttcttcgggtggttccttactgcctacatcatcagccgcaagcaaagcaagtgtagcttcatccaaatcactagcagaggaatacccaccatcgtcttttaccaccaaaacacgctgattaggacaataacgctgcacgtgtccatagcccttgcatcgataacacagaacatctcttgttctacctgtggaagctactgaagaggcactacct

SEQ ID NO: 2205 - DNA, 444 bp, Zea mays
tagtgcccctaacaaattatctaactctgctaagggcaattctccctcggctcaagaaaacgagggttacattttgtaccctgccggttatcccgaacataaaattaggagaattcactctaggaagtctcactctagctctcatcatgcttttatgtataagagtgaggcatctagctctaggcaatcaacccatgttaaattgcctaaaaagaaatctcctattgcatcaaatgagcctattatttcatttaagacttttgatgcttcttatgtgctcactaacaaatcacggaaagtagttgccaaatatgttggggccaaacacacgggatcaaagacttgtgtttgggtactcaacgtgcttgtttctaatgtcaaagaacccaagaccgtttgggtacctaagaacaagggctaaatttgatttgacggttatgaatc

SEQ ID NO: 2206 - DNA, 327 bp, Zea mays
tggctgacgacgtgaacactgcttctggcccgctgtcgcttttattactggcggcccatttttgaccgcatttgaccgtcgcgctcggatggcactggacggttgccttcaatcgccgtattgactccgcaatcaaagaggcgccgtaatggcgtgagtggcggtgcaattgctcacacgtaacgaccggcgcacctgttgcatgacgcgtgggcctggacctccatgcttgggcttgtggagtcgaaggggcgcgcccacttggcacggatacatgccgcctgcatggccgtcccgcctttcacccgctggtctgggcgaaagtgg

SEQ ID NO: 2207 - DNA, 343 bp, Zea mays
  unsure (1)..(343): unsure at all n locations
gcaagactgngctggcctagtactcctctattatgttattctggcggtaaccggagaaacagtggcggagggacatgaattccgtacctgctgcgctatcgactattttgtcgattcgtggcagggggaagttattctcgggacaagcgttatagaagcttgtgaagtctatgcacatgccccacttgccgctcttcttttgcaccatgacaacactggcgacccatgtaagataagcgattggctcaatgaatttggctcccgataggcggagcacctcaggcttggcagcttagccttctcatctgacatttagtgcagtcgttgcttctttgggcgcacc

SEQ ID NO: 2208 - DNA, 330 bp, Zea mays
tactaagctgggccatacatagttagtcacggcaggcgatgtgctttttttatggacagccgacgccaatccaggcgcctctaacattatcgtacacaacgggctactgacgtattaaacaatgtcggcattgtagatgtaacatctgaatactcaactatatccgcagcacgggagacataggaaaaatatagaaggcctgatttccgtcatattatcgtggaagcgtcaatataaagaaagacatatgataactagaaaactctcttatcatttgtgattactccctccattcacaaacatatggctccgctgtctttttacctaaaa

SEQ ID NO: 2209 - DNA, 329 bp, Zea mays
  unsure (1)..(329): unsure at all n locations
gcttatccctgaacacataagtattgcgtgtaatatactatatccgtatcattnttctcttaatcgaggaactcgacaaaaacctctttgcttcgctgtgaagcaacagtggcggcttttgcatctgctaatttccaaagtaacagcaacagcgcggtggtggtgaatcttgtgagtggaaaggagagtcaaggtggaatggaccgactcgcgactttaccaggggtggggggtggggccgtgggggtgattgaactctgatgggactaccccaaaggcaacgccaaagctgacggcataaatactccatcctgtaactgtaacgggat

SEQ ID NO: 2210 - DNA, 470 bp, Zea mays
  unsure (1)..(470): unsure at all n locations
tagttcttcaattcanacgatcaatattaaataaatggtttcatattttgccgcgaaccacatagactgagtgtcctttnttatgaggaaaatgtatgagtggttattcctcccgggtcagctctcccggagtggaaatcgttttgagaggcatcactactttgctattatgaaacatgccgcatatgctataatatcatttgattgtttaaaaaatgacaataataaatatattataaacattgagggatgatttgcctctgttgttgttcgtgcattcactttggtcgctgatgttcgtctccctataaaattgaccctcaatgtcgctatatatataatatatatatgtcttttccgatttattaaacgatcaaatgatatcataacgtggatgacatgttttataatgatattcagacgaatcctctcaaacgatgaatcccaatgttttccgtggcgggccacag

SEQ ID NO: 2211 - DNA, 420 bp, Zea mays
agcttgtgctgtctccgcaactgattactatacaattaactctcctctagtcagactatttctagatccgccggcgctgtggaccgtccaaacattcacccatccatctacagctacagttcccgcttccccgtaccacggccgcgcgcactccgcgttgtaaacggcacattggcattgccaaatgcagcacgcgacacagggggtcggcagtgcaggagaccttcttttctgtgggagtggtgggcggcggaccacaagcagaatgagtagggaggagtacctgtgtgtgctgtgtgtccgctgccgcgctcatcactacatagggctggcatgtactataatgtgtagggaggagtatcagtgttgtgagagctgtcacggacggagaaaaaaaacgggagaccatctcaccatgca

SEQ ID NO: 2212 - DNA, 478 bp, Zea mays
  unsure (1)..(478): unsure at all n locations
tgtgaagattcttcattccaacatgggctagtcggcggtgccttagccaacccaagttagtcttagcaactaagcaagtgtcgagttcagctctttcaaaatctaccaagtacagctgaccctctagcactctcttaaaagctattgaatcgtcacttcttctaaagacagtaacaccagtatcagtaaaaagacagttgtagcccattttacataattgggatacggaaagcaaattgtaatctaaagaatctacaagaaaaacattggaaatagtatggtcaggtgatatagcaattttacccaaacctttgaccaaaccttgatttccatccccgaatgtgatcgctctctggggatcttgngttttctcgtatgaggagaacattcttttctccccggtcatgtgggttgtgcacccgctggcgagtatccaacttggagccccggatgcataaacctacannaacaaattagt

SEQ ID NO: 2213 - DNA, 448 bp, Zea mays
  unsure (1)..(448): unsure at all n locations
agcttgttctcttttgttgggtagaccttgggaatattatactgatgcacgtcaccatggtaggagtaatacatacacttttaggcataaagattaaaacattactttgctacctttgactcttgctgaaattgtacaagctgataaagatagagctgcaaatacccataaggaaccaactaatgagacagaaattcagcaacaaattacattgaaagctcctgtcatgcttgctactaaatctgatcttcttgaaactcatgctactaatgcttgttgctatgccttggattgcaaagatgctttcttttctattgatgaatattgtagcactttgcctgcatctgtgactaacctttngcagcagttccgagatgtttttccctctgagttacctcacgacttcctccattcatgggattgagcacaaattgattgattctggagc

SEQ ID NO: 2214 - DNA, 486 bp, Zea mays
gacctatgatactaagcttatacaggagaatagaagcaagagctcgaccatatgtcataatataaggggagttatacaagcgcggggtctgttccccattgctcaagtgcttatccagatccgaaggtatagaattaatgaaggacatacatgcaggtctgtgtggatctcacattggatctaggcccttgcttgggaaagtttttcgccaaggattttattggccaaaggcagcttcagatgcagcggatttagttcaaaagtgcgaaggttgtcagaaatgtgcaagagatcaaaaacaaccttcgtctttaactcaattaatacaacccacttggccgttgcaaaggtgggggctggatttgctaggtccattaccaccagcacaagggaacttaagatatgtggtggtggcagtggaatatttttccaaatggattgaggcaaagcccttagctatcaataacttcatttactattcaaaag

SEQ ID NO: 2215 - DNA, 424 bp, Zea mays
agcttgtgccttcgtactcatggttgtggccattcccaccgaagatgatcatcggtattctatctgtaacacttgagataggctaagaaatagttgctaagttagtgttttaaggatcttcggaagaagaaggccccccaacaagtagtctaactaacataagcacttcgcagaagcacctacactaaccatagagtaattctattacgaatttgagtatctaagagccatggaataaagtttcgacttcttagcaatatatctgagctcccacactctgaaaaggcatgttggggtggtatttatagccttcccactcaattagagatattataattcaacaacattttctacatactcactagacatatcagatggaactttgacacgtctagtgagttcacgtcagctggctcttgaaata

SEQ ID NO: 2216 - DNA, 480 bp, Zea mays
  unsure (1)..(480): unsure at all n locations
taccctctaggtcattntatgactcttaccctaaagtatttatgttttcttaacctgngtaacagtttacccctataatccccatttaagggttagttccttaactatggttctagttgcgaaacacttaaaacaatacaacttgtttgaaatttttgcttagtgaatgcactctaggtgtgtcaaacatatgcaatgcccatgctatgatgccatgctcaagttatagttatagtaacaccaagggtgttacaaataagccctaaaccgacgggaattacttattctcgtcggtctaatgcttattaccatcggatcctgcccgacaggaattaaatgtttttctgtantgctcatggggatttcagcattaccgagaatcgtaatgttagaattaaaaagattcatatccgtgacatttcccacgcttatttctgtcaacagccgatcgacatatgttgaaatcaccaatcagcattc

SEQ ID NO: 2217 - DNA, 427 bp, Zea mays
  unsure (1)..(427): unsure at all n locations
agctataaccactccgcgagattttttntcttttctttctaaccataatgaatgcgacatcgaatgtcatacttgatgcatattcactttatttgttcccttgtatgatgtactcgttgtttcccaatctgaatggatgtatgtatgtatgctcgcaatcgcatataaaacgatccggtcgaagagcccgaagaactcgcaggagaagcccctgagcatcagtcggttggtggaggcaagtgtcccttgacctatctccgtcctattcattatttaattcacctcccgcttacacatttatgcctaaggattgactagctntgttaaccatgtcctctgttacctatttgggttggatcattattngttagctntatgctattgcctaaactctaatcaatgaacatgatgagattatctatgatac

SEQ ID NO: 2218 - DNA, 479 bp, Zea mays
tactcagcttgtcacaatataaacacaaaagagagaaggcctgtttttgttatcagccgaagcctatgctcctttgtgaagatatagcagatcaaagggtactactgcgatcttagttatctgatgaacaagaaaagagtctgctaagatttttgttcaataaaaaagatgttttcgcttggacagctaatgatctctgtggtgtcaacagagatgtcattgaacattcactcaatgtggatccatctttcaggctaagggaacaaagacttcggaaaatgtctaaagataaagccgaaggtgctcggaatgaagtaaagagacttctcagtgctggcgttatcggagaagtaacatatccagaatggctagccaacactgttatggtgaagaaggctaatgggaaatggagaatgtgtattgacttcatagagctcaacaaggcatgtccgaaggacgagttccctttaccaagaata

SEQ ID NO: 2219 - DNA, 393 bp, Zea mays
  unsure (1)..(393): unsure at all n locations
agcttgtgaaggttcttcatcccaacatgggctantcggcggtgccagagccaacccatgttagtcttagcaattaagcaagtgtcttgttcaactctatcaaaatctaccaagtatagctgaccctctaatactcccttaaatgctattgaatcatcacttcttctaaagacagtgacaccaacatcagtgaatagacagttgtagcccatttgacataattgagatacagaaagcaagttgtaatctaaagaatcaacaagaaaaacatttgaaatggaatggtcaggtgaaatagcaattntacccaaacctttgaccaaaccttgatttccatacccgaatgtgatcgctctttggggatctcggtttttctcatatgaggagaacatc

SEQ ID NO: 2220 - DNA, 487 bp, Zea mays
  unsure (1)..(487): unsure at all n locations
acctatgaatactaagcttctnagggagaacacattctacgactaacaaatgtttattnttatatagacagggtttgtagcgcatgccaagcatgaaagcaagttggtgcccatcatccacacaagaacatcatgacgactgataggccgcttgagctactccacatggatctattcggcccgattgcttacataagcatcggcgggagtaagtattgtcttgtaatagtggatgattattctcgcttcacttgggtgttctttttgcaggaaaaatctcaaacccaagaaaccttaaaggggttcttaagacgagctcaaaacgagttcggcttaaggatcaagaaaattagaagcgacaacgggacggagttcaagaactctcanancgaaggcttccttgaggaggaaggcatcaagcatgagttctcttctccctatatgccacaacaaaatggtgtagtggagaggaagaatcgaactctat

SEQ ID NO: 2221 - DNA, 374 bp, Zea mays
ttagagtagtggtactttcttatgactccaagccatacaaataattctaacatggcacacttcaaattttaacatggcaccattcaaaattttacatgtatgcaaataaattttgcttgaatagcaaatgtgtcgtggatgaaattgcgctttacatggcacatctcaaattttaacatgtatacaaatacattctctatgctttgtcctttcttatttgatatgaatactctttaaaaaaacctcaatcaccggtcttactcaaaaaatgtaggtttcatctatcttcttggtgatattctattgtaagctaagtttacatttattatctttatatggtacattaatttttgaaatactgaactattaagttt

SEQ ID NO: 2222 - DNA, 463 bp, Zea mays
  unsure (1)..(463): unsure at all n locations
ntaccaaatggacgtgaagagtgccttcctcaatggacttatcaaggaagaggtctatgttgagcaacctcccggctttgaagatagtgagtaccctaaccatgtttataaactctctaaggcgctttatgggctcaagcaagccccaagagcatggtatgaatgccttagagatttccttatcactaatggattcaaagtcagaaaggctgatcctacactctttaccaaaacacttgaaaatgatttgtttgtatgccaaatttatgttgatgatattatatttgggtctactaacgaatctacatgtgaagagtttagtaggatcatgacacaaaaattcgagatgtcaatgatgggggagttgaagtatttcttatgatttcaagtgaagcaactccaagagggcaccttcattagccaaactaagtatactcaagacattctaagcaaggttgggatg

SEQ ID NO: 2223 - DNA, 465 bp, Zea mays
agcttctctcacctttattccaataatatttaattgtgaataatgtgttgtattgctatgaactacaaacaaaatgtcttattctgtgtgtcatgataatcttgactaggttgtgctatgaggttctcttgtcttgctatctaggagatattgtgattgttcaaccctttttgcaaaaaaaaaaatgttgcttgttttgcccataaaaagaagacccctctctccaaacaatctaatggttccctagtgaaacctaaaaaaaatcatatgcttatgttagtttttctagcccttgtgaagttatcctttgaaatacacatgcacagcttgtagacccccatagcttgaccgctatacaaacccaagtctccttgtgcacttcgtacgttataaaaatgttgtttggtgtctagttgcgcaacccctataaaagccatgtttctttccataagatctttgccctta

SEQ ID NO: 2224 - DNA, 451 bp, Zea mays
  unsure (1)..(451): unsure at all n locations
ggctntatgctaatttcaaggtaacaaatatttttgttattttattactattattattatcttttaggtcattttctgacgaagatcgtttcgacagagcatattattaagtaaggttctaaaaatgcaacaagatctcgaagaagagaagaacaaggccgtcatccaagatttagctgaaaaagttgaaaattacgaagctaatctgaaaaagaaatacttcaccatccaagaccttgaaatcgtggttaaagagcacgaaggtgcattagagaagaaatattttgttattcagaccatggagggttcttcggctgaagtccaaaatgagaatagtaacttaaagaatgaattgctccaacagtcggaaaaatttgagcaagaaaagaagtatcttgaagcaaggctgaaaactgaggtggataaaaattcaaatttgcagaaattctta

SEQ ID NO: 2225 - DNA, 354 bp, Zea mays
  unsure (1)..(354): unsure at all n locations
agcttccgcagataagagtagctgtcttttatgttttgttatgtaaggaaaggcttcggcaaaaagaggaagcggccttttatgcttcgttgtgtacgaaaagaagggaaggtgttttttcgccttcggctcaaaaaactgatttcgtccacatcaaagcacctcaatcgaagggtaagaatatattacaaggtatgtacaaagttccttgaagaacagtttagttctatttacaagagttgttacaaaattatcctgagtttttctaaagcacacttctgctagtcttcattaagcttcagcttcgacgacaacttcggcgacatatcctangcatcatcttcaccttcgaca

SEQ ID NO: 2226 - DNA, 400 bp, Zea mays
agcttgctggtgggggtgcagcatcattctgcgcctatgtacactgcaatggcagcgcgaccgctgcttcttccccctccggtcctcctcctcctggtggtgctggctgcttcgtcggccgcccatggctacggcgcctaccgctacggcgacgctgctgctgagctcagggtcgggttctacaaggactcgtgcccggacgccgaggccgtcgtccgcaggatcgtcgccaaggccgtccaagaggaccccacggtcaacgcgccgctgctcaggctccacttccacgactgcttcgtccgggtacggggttccgattccattgtaggtgtagagtgagtagtaatgtcatgtcctgcccttttctttgatggcatccaatacaatgcagcttctgatg

SEQ ID NO: 2227 - DNA, 373 bp, Zea mays
cttccccagctgccaccacgtcagcacagactgcggcgtccgcctctccaccaacgccgacagttggcaaggcgcaccggcgggtcctcactcccgtcctcgccacgaaagcgaggagaaggatggaatgttgcatcctagctggacagcaacagttcgccttccccggcatggctagaggacgcctcctccacagggccggaggatggtttccaccaccagaagctggaagaggaggtgaccggccggcccgcacggtgggaagagctctggctcagcccggcctccgccccagcaaggatgatgaacatccttgaagctgagggcgggaccaagatcgcagcccggcttgcttctccccacccaggggctg

SEQ ID NO: 2228 - DNA, 290 bp, Zea mays
gttgcattcgtcagttatatacgaattgactcaagcctagctacgggtgcataagtttcaccgaaatcaaaccttcgacttgtgagtatcccttgggcccatgttgggctttgttccttattaccacaccatgcccatcttgcttgttgcggaatacctacttggttcctacaacattttggtaggacgtggaacaagatgccatacctcatttctcgtgaacgtggtgagttcctcttgcattacccacacccaatctgaatctcttaaagcatcttccactctatatg

SEQ ID NO: 2229 - DNA, 429 bp, Zea mays
  unsure (1)..(429): unsure at all n locations
tcgggtctcttgcttacaactcttgcaatatggccataaataacctgcgaatcggttttaagaaccgcccttctaatccccattgcctttaacttccaaaggcccaaaagcaaagctttgtactcagcaatattatttgtgcagctaaaatcaagtcttgctgtgtagcaagttctaactttggagggtgcaactaacacagcagctgctcctgccccgaaggttccccaagaaccatcacaaaataccgtccatatttcggtatctttagttgtttcttctccttgagcccctggcgtccaatcggcaatgaagtctgctaacgcctgngattgtattgaggatctgtgcacataatcaatactgaactcattgagctccgcagcccactttccaattcttccagtagcttctctgttcctcatgaca

SEQ ID NO: 2230 - DNA, 416 bp, Zea mays
  unsure (1)..(416): unsure at all n locations
atgcagcttatggctataaaatctaactagtttntctatagtatcncctttcgagctcgtctatgggcaggaagcagtgttgtctgtggaaataagtttgaatgctgtcatgtttgccagacaaaatgatctaactgatactgactattataatgcaatgatggataatattgatgaggtgaccgacaagaggatgatagctttggaagcaatattaaaggacaagatcatggtagcccaggcctacaacaagaaggtcaaaacaaaatcatttctagtatgggacctggtgtggaagaccattctgtctctaaggaataaagaccggaatcttgggaaatggtcgccaagctatgatggtccttataaagttagacatgtgatgtctggcaacgcctatttgctacaacattaca

SEQ ID NO: 2231 - DNA, 474 bp, Zea mays
  unsure (1)..(474): unsure at all n locations
taaccttgtaacgaggataagctaccttcgttctaaaggtggatggtccttaagctctttgaaatccttaagggaaaatgcttaagatgtttataacatgctttcataagtgcataaactgtcgtgagcatcacacttatactatgacacaatgcacttcacattctgtatgatatagatatattctcattaacctaattatgtgcaattggcatttaaggccaaaatatatgttcctttccatgcacacatttagggggagcaatctatgttatagaactatgatcatgcttgatttgataaatcctttgatcatatctcttttatgtctatgactaatgtgttttcaagtgtgttctcatgcttagtcatagaattgaaagggaaatggagtattcggcaaagacgacgcttccactcaacgccttcggtattatccactctttgnnggtatttcgcacaattctccacttt

SEQ ID NO: 2232 - DNA, 403 bp, Zea mays
  unsure (1)..(403): unsure at all n locations
agcttcggccttcggaggccgaaggttgttattaatgaatctgccgaagaatgccagagagccttcggcgttatctgttcttttattgggacgagagatttagtacaagagcatattgccttcagggtatggccgctcgcggagaaatgggaaatgccgcaagaaaccataaaagataccgacgaaggtggacttatgaggctgaaatatacttttaagttcggagataaattcgttgagccagatgacgactggttaaaaagtattgaaaatttaagtgatgaactgcttggggcttattcgaaggccgaagatactgcactgtcagcagccttcggaggccgaaaaaagaagaggctgaattgngtgtttgatgcaatacggttcgtctaccctgactatc

SEQ ID NO: 2233 - DNA, 468 bp, Zea mays
  unsure (1)..(468): unsure at all n locations
cagcagcaaagctatcttcggtcgccagctccaagatgcatatgcgccaagggcttcggaggaaggtttggggatcaacctangaaaatatattacctattctgtggtgaggacaagggccatacttcaaggatgtgccatgtcaccatttagaaacagaaggaaatagcagaagctgcagctcagcagaaccagccgaagcaggtcatgcatactgcttcatatcacttaccctacataccagagtatgtgggtaaccatcctgcagcatctgttgcttcggctagtcagccacaggcatcctggccacagcctccacctccgccaccacttcaacctgcatattcacgcggccaacagccagaagggagtcaacagacccatcagcagagagacttcagggaggagtccgaagctcgcacagtcaacagtactgtgccagagtcgaagcatatctactaagagata

SEQ ID NO: 2234 - DNA, 409 bp, Zea mays
  unsure (1)..(409): unsure at all n locations
agcttgttgaaacaaagagacatgaggtgtttgatatggtttatttgattctcanattggtattgcttttgcctgtggcgacagcaagtgttgaaagggcattttctgcaatgagtttggtgaagactaaattgagaaacaagatgtgtgatagtcttttggatgattgtcttgttacatacatcgagagggatattttcttcgaagtgaatgaagaaaatataattgaaacttttatggccttgaggaagcgcaggccagataagtagtattattgcaatctttatgtttaatatatgccaatttcatgcttatttgttgagtgtcaaaccttatatctatatatcagattatttacccaatttactatgaaattatatgttaattagatataattctacatgaaaat

SEQ ID NO: 2235 - DNA, 432 bp, Zea mays
  unsure (1)..(432): unsure at all n locations
ggcgatcctcagcttggtggctttctgtgctcgaggggtgtattaantataaacagcaattcagatgacagagtaaatgaacgaacaaaacagccttgtgaaagctgctgatgaacacgcatgaagtatgatcctctcgatggtgttccctcaatctcaactgtttgcagctttgctagatcactgcgattctttgattntttttctctatgtntgatgagggcgctgcaacattgacaattgaacatcgattcagcgtggtagcataaacaaagagacgctgatagctaccttgatcgttggatgggatccctctgccatagggatgtcagtcctgccaacagcctccagctcaagcacacacatcataagcaaatgtgagccgcggtcggagtgggtggaacatacnancatggtggtggagagagagga

SEQ ID NO: 2236 - DNA, 431 bp, Zea mays
  unsure (1)..(431): unsure at all n locations
agcttaaactcaatggactcaggaccatcgtctttaacttctccctctttttctcatcagccttgacatagaaccattcacttttgcagccgggtggccacttggtgcgatagctgaacaccggggccttcatattcttgcgatacacgaagttgtaacagccaaaattctcatgtaacccgtcttctctggcctttgtctggtaatgaagctcatgcactcgatagaaagcttcagcatttgggtccattccttggcttcgaagggccagatgaagacgctgagtctaacgatagcgttaggggtcagctgatgaagatatacttcataattatccaaaactctcccaatcatctcgttcaagggaaaccgcaatcccgctctaaaaagctcttgaaaccaccacttcatttttttnggctctggagtga

SEQ ID NO: 2237 - DNA, 471 bp, Zea mays
tgtgtcattggtccctgattagctacgaatggtgaagtgatcattggtgtggttgtatcaatggcagcgatgtccttatcatcctccccttcttacaatagagtcgtcctcaactctagcgtgtacttctcacccaagtatgtggtcaatcttatgatgggattgcctgattaggggatgttggaaatatcattacttggtccccaatcaacttctttgttcctcaaagccttccttgtacccttaacacatcgcttgatccatgtaagaagttctacaaataaaagtatacacactttacggcgcaatatcaattcttcaaatatatcgatggtagttataatgtggaagagtttcaccttcgcagtaggagccattgacatggtcatatctgagcaggttatgttctcatcattctcctcttcttgatagcaaaatgtcctctgtgttacatcatgattgatgttcatg

SEQ ID NO: 2238 - DNA, 316 bp, Zea mays
agcttctaaagggagaacacattttaggattaacaaatgttcattatgagaaagacaggatttgtagcgcatgccacgcagggaagcaagttggagtccatcatccacacaagaacatcatgtcgaccgacaggccgcttgagctactccacatggatctattcggcccgattgcttacataagcatcggcgggagtaagtattgtcttgttattgtggatgattattctcgcttcacttgggtattctttttacaggaaaaatctcaaacccaagagaccttataaggattcttgagacgggctcacaatgagtt

SEQ ID NO: 2239 - DNA, 248 bp, Zea mays
  unsure (1)..(248): unsure at all n locations
tanagccatggtaggtagcttaggcaagtaatatgagaattgactcaagcctagctacgggtgcataagtttcaacaaaatccaaaccttcgacttgtgaataacctttagccacaagtcgggctttgttccttgttaccacaccatgctcatcttgcttggtgcggaatacccatttggtacctacaacattttgattacgacgtggaactaaatgccatacctcatttctcgtgaagctgttgagc

SEQ ID NO: 2240 - DNA, 412 bp, Zea mays
  unsure (1)..(412): unsure at all n locations
agcttagcttcgtccgttagtcttaatcattcctgaaatacacttgttaatgacgaagccacatgctaggcaaacaatcttcggtatataagtgatcttcggcatataaggcccccaacactagccaatttcactaacacttttttagccaactagctattagctntagctctaatgcattcaaacattcccttagtctctgtttgattgtattagagctaataattaggtgctaaaattagccagagacatccagacagcctagctgatagttcaactattggctgactttatagctggtgacgttcaaatactcctagctaatagtccagcttactattagttgcaccctcaaatactcgttagttcattaactagttcaacttagctaaaatacgttaatatttagcta

SEQ ID NO: 2241 - DNA, 446 bp, Zea mays
  unsure (1)..(446): unsure at all n locations
tggaggcgtcnatgggttgtctacttggtgtagactccttcttcttttcttccgtcgccttgaatgcgacgggttgagcttcngatgtagatggatcatcaagctcgttgatcttcctcgagccttcgatcatgcactcaaaacttacaaaatgcccgattacttcctcgggggtcattttagtatatcttggaataccacgaattaattgaacttgagtagggttaagaaaaataagagatcttagaataaccttaaccacttcgtggtcatcccactttacgctcccgaggttgcgcacttggttcaccaaggtcttgagccggttgtacatgtgttgtggctcctcccctttgcgaagccggaaccgaccgagctcgccctcgatcgtttcccgcttggtgatcttggtgagctcgtctccctcgtgcgcggttttgagcaca

SEQ ID NO: 2242 - DNA, 418 bp, Zea mays
  unsure (1)..(418): unsure at all n locations
aagcttggaaggttcttcatcctcacatgtgctaagcggcgatgccacaaccagcccatgcaagtcttagccattaagcatgcatctagaccagcctcttcttttgcaaaatcaactaagtaaaggttgccgtctagtacacccttaaaagctagtgaaccatcacatcttctaaagacagacacatctacatttgtaaataaacagttatatcccatattacataattgactaacagatagtaaattatatccaagactctccactaaaaacacattagagatagaatgctcatttgatattgcaatcttgcctaaacctttcaccttgccttggttcccatcaccgaatatgattgaatcttgggaatccttattcttgacgtaggaggtgaacatcttcttctcccncgtcatat

SEQ ID NO: 2243 - DNA, 473 bp, Zea mays
  unsure (1)..(473): unsure at all n locations
nntagaaaatggatccatgtgcttaaccttaaattatatatattgaatggtcagcatgtaacgcaacaacgaaatagggcaccatataacattttggtatacaatcatcaagtaatcctgagactatttgcagcacaactatcacttcagatgagaaatgtgataattagggaaacaaataacattcaggtacatgacagatgaggaatatatgagttcaacaaatgaaatgaaaacataagccatcatttattttagagcagtctctatttgcaaaaagaaaagattagcacactaaaaatctttaaccaacctgctaatgctgtaggctattgaagtaggcgatgagaaaaatgatagcctgaaaacatgagcatatgcaccatgactccatgagcaaccaanaaatcaaagtaagaacagtagcagttaggtaaccacacaactgatttaagtgtccaaaacagatttaa

SEQ ID NO: 2244 - DNA, 424 bp, Zea mays
  unsure (1)..(424): unsure at all n locations
atactcgagctactgcgagggcaggaccgaggaggggatggctcttcttgtctgctaccgaggcaaaggggatgggcggcctgtgactctctgctcacgggcaaacggcgaccagctaacttccgtgatgtgtggaaggtgcgcagaagggtgttntcaacacctgagagggcttaatagcttgtgccggggccactgcgcgggtttggctccggcgcatcgcggggcatgcggggacgcgcgcgagcgtgctctggcgcgggcagaaggcgtcgaacacgtggatgtgagtntcttccagtgtccgaacgtcttcagagatctgcaaacgtgcgaatctcgccatgaatccggcgcagacctcctcctggcacctagggctatctcacatgagtgagttccaagggaggatacgccctatatc

SEQ ID NO: 2245 - DNA, 393 bp, Zea mays
  unsure (1)..(393): unsure at all n locations
agctntgngaactatgcccgtatccaatctgcctgagccggaactataagagcttgctagatgcccccgttcctgtcgaccacgaccagcatccaacataagacttccctagttatttagccaagaccagagccatgatagttctcatggtagcactgttttcccgggtggtcactccatgttccaattaatatgcaataatcttgtttaaccatcgggttaacaacaataatgtaaacttaccaagtttggaacattaatatcataaacgggagtgactgcataaagttaagttgtagaaatagcatagctacttgataaatcataaccccaggtatacaaggagtaatggtggaaagggtatctaaatatgtaaccactcaattatgcata

SEQ ID NO: 2246 - DNA, 387 bp, Zea mays
  unsure (1)..(387): unsure at all n locations
tcgngaaatgcttcngnggcggcagtgccagtctctttatccttaatttgttctgctgcttctgattctttggtttccaaagatttcaccttggcgggctctgaaggcccagcttcagtctcagcttggtgctttgtagcttcgacaccaaaagcttcaatttgcacttcgggagtttcggcaatcttcttcggagtagcgcttgaagactttattgtctccagtacatccaaaacatttaccatccttttccttttaggggtcacagccggacccttctgggcttgtggcactccaacgtctgccgaagggcttaaaacttctgatatttttgtcccttcagctttcggctcttcaattctttcagcctttggtgttgcagacagc

SEQ ID NO: 2247 - DNA, 423 bp, Zea mays
agcttctagatatgtcgaggtgacaaatgatgagggtgaattggtagttacgaaggtcgcagctaagcaacttcgtcggttgcccatcattcctcggctttcaaggttgttcctcaacaaggaaatagctctgcatatgacgtggccaaagaatggtgtacgtctcgtcactggtccagacataatggtccatccgtcggacggtgatgcgtggaaggcatttgacgagtttgatcccgaatttgcaaatgaccctaggagtgtacggcttggtctatcgacagacggattcacacctttcaatagcagtgcaagcccttactcgtgttggcatgtcttcattgtgccatataatcttcctcttgagttggtcaataaagaagagttcatgttccttgcactagtcattccaggccccgagca

SEQ ID NO: 2248 - DNA, 478 bp, Zea mays
  unsure (1)..(478): unsure at all n locations
tggaccaaggatagngaattgtgtctntcttggatatgcttcatgtagcatagcttatagattnttattagttaaatcttaagttcttgatttgtatatagatactattatggaatcatgtgatgctactttctttgaacacatatttccaatgaaagacattcatagcaattctagatacactttgagataactccacatgatacactagctgatatttttgaataaccacatgagatcgtccttgaggaggatgacattgatgctcctagaaagagcaagagatagagggttgaaaaaatcctttggtgacgatttcattatgtaccttgtggacaacactcctactaccattacngaagtgattggaaagaagcagtttagaatgagatagactcaattctttcaaatgatacataagaggtcaacgatggaccctatatttgcaaacctgtgggttgtaagtgggtgtttaaaa

SEQ ID NO: 2249 - DNA, 410 bp, Zea mays
  unsure (1)..(410): unsure at all n locations
agcttgcgtaaagtctcttcatccatgggcttggtgaagatatcggctaattggttgtaggtgctaacgtaagcaatttaaatatccactttgttggtgatctctcaaaaagtgatatcggatgtctatctgcttagtgtggctgtgttcaatgggattatcggccatgcagattgcactctcattatcacaaaggagagggactntgctcaacttttagccatagtccctaagggtttgcctcatccagagtaattgtgcacaacaatgtcctgcaacaatatactcagcctcggtggtggatagagctactgagtcttgtttctttgaagcccaagatatcatagatcttcctagaaactgacaagtccctgatgtgatcttcatgtcaaatttacatctggcataat

SEQ ID NO: 2250 - DNA, 434 bp, Zea mays
  unsure (1)..(434): unsure at all n locations
tctanagggagaacacgtgatagggttgactaacgtacaattcgaaaaagatagaccttgtgcagcttgtcaagcaggtaaacaagtgggaggagcacatcacagcaagaatgtgatgaccacttcaagacctctggagctgctgcatatggacctcttcggacccgtcgcctatctgagcataggggggagtaagtatggtctagttattgttgatgacttttcccgcttcacttgggtgttctttatgcaggataagtctgaaacccaagggaccctcaagcgcttcctcaggagagctcaaaatgagtttgagctcaaggtgaagaagataaggagcaacaacgggtccgagttcaagaaccttcaagtagaggagttccttgagaaggaaggaatcaagcacgagttctccgctccctatacaccacagc

SEQ ID NO: 2251 - DNA, 418 bp, Zea mays
  unsure (1)..(418): unsure at all n locations
agcttgggtactgatcatcccgatcggtgataggtactcacgtttggccactctgttcttacttatttgnttattgtacactatatatatgacatgacttccttgtttttttgtcatgcatccaatgggatgacacgtctttcgacggtcgaggccaccatagacaggttaatcaattcttaggtaacctatgtcgtctacataatccacgaattgtcaccgactcgaaaggtgtggtggttccttgcactatctggtcgcacttcgcactagctccacatgctacatatggaacagctcaaggcgccgtccaacacgacttttgggtacgtaagagtaatgtttcaaactaacgtttatgatttgtttcacactaaatttattttcgaagttggcagagacgctatcgtgtggaacc

SEQ ID NO: 2252 - DNA, 446 bp, Zea mays
  unsure (1)..(446): unsure at all n locations
tcatgtnttgggatccagtcctataccgctagctactatggataaaatatgggaagagatagtcgaattatttagagaaaggataggggattaatatgtctggctctggggcgtcgtatcggaaaccatacgatcaccaatttgataccattccatacccaccaggaacaaggatattggactttctggttaatgccgtaagagcgcgacaaacatatagatcagtttttagctcagctaggagaattggttgatatggaggcattctgtgttcggttattttctgtctcttactgtaccactttcgcatggtatgttgccttaccacctaactccattagctcctagggtgatttagaacatangttccatgagcattttttctctgggggatatgagttagaattagttgatctagcagcgcttcagcagggatgtgatgaatc

SEQ ID NO: 2253 - DNA, 312 bp, Zea mays
agcttctactaagaggaacaccgtcgagtatactccaccatgagttactcagctgactattctgctaagactcccggcgggaatagagctgtcctgacctttaagaagagatatttgctatattgacctgagaagctgaagccactgtcttgcaaacacagaccactatatggcctctactgatgacgaacctgtcgagccaccgaaattcctaagattccggctggattgtttaagatggacctttcttatgcaatgacaccttaagctgcatcgatcttcgtatgtacccgcgcagggagaccaatcttt

SEQ ID NO: 2254 - DNA, 411 bp, Zea mays
tcatcacggtgaaatgcgtagaccacgtggcgcctgcattccgactaggacatccaacgaaacacgctagctcgagcaggcttcgtgaccactaaaccatgacacaatgctcagagaaggtgttgtcctagctattataatacaattggagatgttacccttgtgacattatgagatctctgtatgtactacgtagagggcatttatgttataacgtactaaccctctcgggatcgtattattagatgaactgcacccccgtactgatcccactggattgtaattgctctcacgacagcaccttcatacaacctgatcctattaatgttatatgaattctggtaatcttcatatgcgtcttacgaactgtctgtatgagcgaatgaataacatacattatgtatatgaact

SEQ ID NO: 2255 - DNA, 434 bp, Zea mays
agcttgtggaggaccagatcatcaaagcatataagtttctggatgagaagtggtcacccaagttttgttgatgaagcaccagaagactaatcaaagaagaaatccatgtggaagttcgcaagaggaaggtttgcgggttggcatcgatgcttcttcaataagctagctgccaagcgaaagctaaagcctgaagatgatctttgagtagccagaatcagtgtttgcaatcggcaaccagatgctccgcaaaggctagattttgttgaagttccatctcctcgaagagtctgcaaagtgaagatatgtagctgaagtaaagctatacccataacccttctaaaccgaatctcgaggacgagattccttttaagtggggtagatttgtagcatcccacaaattcaaatctcggaattttctcaaactcgctctaaat

SEQ ID NO: 2256 - DNA, 465 bp, Zea mays
  unsure (1)..(465): unsure at all n locations
tccgaagataacgacttcatcatcttcagggctcggcattgttctttctccggcatctgctctcacaatggacatatctcaaaagtatctgcccttcatgttttcaaggtgactctgcccaatagttgattttccgaagactgaatggcttggtcgccatggccgatcttcggaatcttcacccccgctatctgcatcgtaactgtcactctcaccagtatcttcagataaaccttctaaaatctcccttgtaatcttctccgtattcgtcttcgccattgactcaagaaaacccagatgcatatcttcagaaaggctcagcttcatttcggcagcaaccttcttctcctcagacattccttcgtaattcttgcctctcgcttccgaagcttaaaactagggaggcaaccaaattattgtaggcagaaaactatttgagcacgaanaacagatggcaagagagcg

SEQ ID NO: 2257 - DNA, 400 bp, Zea mays
agcttgcacatgatctgctgatgattgcctttctgcatgtacctcacaattctggtgcgccttaatgtccttgtcggctatcatcgcgtttttgaatgtatgaagcataatttgaactgcccgcggtatcgttcacttgtgatgttacaaagaaaggcactctattcctggagtcttctataggaccactacaccctcaatctattcaatttggtggctgctgatgtgagcggctgtcattcctggtgttgtcttgacaattaggttagcacgccaaccatgtgttttattcgcaaagcttactcattcgtccgtccaaataatgcgtcttgtttaacatggaaaaatcagagatataatattttgttatatagatctatatttattcatactattattg

SEQ ID NO: 2258 - DNA, 475 bp, Zea mays
  unsure (1)..(475): unsure at all n locations
tanagccatggtnagtagcataggccaataatatacgaattgactcaatcctagctacgggtgcataggtttcaccaaaatccaaaccttcgacttgggagtatcccttggccacaagtcgagctttgttccttgtcaccacaccatgctcgtcttgcttgttgcggaagacccatttggttcctacaacattttggttaagacgtggaactaaatgccatacctcattcctagtgaagttgttgagctcctcttgcatcgccactacccaatccgaatcttgaagtgcttcctctaccctgtgtggctcaatagaggtaacaaacgagtaatgttcacaaaaatgtgcaacccgagatcgagtagttacccccttatgaatgtcgccgacgatggtgtcgacggggtgatctcgttggattgcttggtggactcttggggtggcgggctggttctcatcctcttggcttcatat

SEQ ID NO: 2259 - DNA, 338 bp, Zea mays
agcttcaccgtcgccagccatactccggtcagttcccgtcctctgctcccttgtttaagcattcacatacgtcggtgatacttgcccaccccttgaattggacttagaactcttttggtgttcggaaccccaaccgtttattcgccttatcaccggcctccgtggccaaagctcaatagtggatcattaccgcaaataagttaggggaatgggccaggtctcccccaatttcttgtctgccgttggaaaaacccagccgttgcccaattcggccggtccaggtgctcgccgagacacggccgcccgtgaccggcgtcggggacttaaactcagaataa

SEQ ID NO: 2260 - DNA, 502 bp, Zea mays
gctattacggacctataatactcagcttcgacaacatcggagtttggcggatactagtcatggttccatttctgagcgcaatgagtacatcaacaacaggtacgaccaactacatgatccagtgaaatataatcagttgctggttgatctaatccaccaccactgggcgcggcttggatccggagctgcttaagtatgaagtttatgtctgccatgtgttaagtatgtttgtcattgtcatgtctagtgtgttatgtcgtcggttatgttaatccgaagctagtatgtgttaagtatgaagtttgtcatgtcgtcggttggttattccgaaggtactatgtgttaagtatgatgaagtttatgttactactatgtgtaatgcaaaaagatgaataatagaaacagatgaatgtttctactatttgtggttggccaatggtgtaatgctataatgacgaatgatataagacgtctactattattaagcaacatgactgagttc

SEQ ID NO: 2261 - DNA, 382 bp, Zea mays
ggcacctgcaagcatgcacgcttgcgaacatcaataagaagacaagtcaaagtttaatttatacttgtgaatttcatagctcctaagtgggtgaacttacgcgactatgatatctcctttcttacaaaaggcaggtatcacactgaatattgtataaatcccatatgaatacagaatggagtctggagtgcccaccaatttagctatttttgactcacagtcaagatggacatctgcaagaatacattggaaagctaagttcatcctctatactggcgaccaatgtcattgactgtggatgatagtacaaaccaattgttccatataagccacgtggaccacaagacacaacaccatatttctccagtgaaccaatgcaaga

SEQ ID NO: 2262 - DNA, 336 bp, Zea mays
  unsure (1)..(336): unsure at all n locations
tgaccctctttcctggtgtccacgtaactaggcttacacagtcgtatttcctcttcattgtcctcagatccttacaatgtaagtatgtgtttgatttccgaacgatatggattgggtcagagccgacttatttctctagaatgggtccgactcatttcttgtttgggatcagtgataggtcgaacctaatttctcgtttgattacaagagtaaagtgggctagagctgcaccatatcttgtntattntggaatgaaggaagaactgaatatggacaaccacctggtcatattaccacacttacgatgctatcttctattcattaaatgacatcatt

SEQ ID NO: 2263 - DNA, 397 bp, Zea mays
gcggctgcaggctgcaagctgacgtgccatccagcgatatttggttatctctctcacacggcgtgaagacggcacgcccgtgttccgttcctcgaacggctctcgcacgtgcaactgctgccctgtgaacaactcgcctcgttcattaactctgccgcatgacacgcggcacctttggcaggagaagcgggcgacgcttcaccttcgccataatgaccgcatcaaaaaaggtgtgccacgtcatctagagtccgtattctgtcccttttcctctgtctctctcttaccacagggaccgggaaagggggataccctgaaagggatccttctccgtgaatgaaactggccccgagcccccctactgaacagaagttctaatgctggtccctcacagggg

SEQ ID NO: 2264 - DNA, 471 bp, Zea mays
  unsure (1)..(471): unsure at all n locations
cgccaatacttatcanaacagcaacattaaccttctctgttactgcaaaccatacctgtaacatgaccgttcgcatgctggggactagatatgattggacccttcataaaggctcaaggaggatatactcatgtactggttgctatcgacaaattcactaagtggatagagttcaagcccattgcttctctaactttagctaaggcagtggaattcatacaggacataatattcaggttcggaataccaaacaacatcatatcgacctggaatccaatttcactagttcggagttctttgatttctgcgaacaaaaaagcatccagattaaatatgcatcagtggcacacccaagagccaacgggcaggtagaaagagccaacagaatgatattggaagcacttagaataaagtcttcgacaagaatgaataagtcgcaggaaagtggaccagagagttgctgcatgttat

SEQ ID NO: 2265 - DNA, 467 bp, Zea mays
  unsure (1)..(467): unsure at all n locations
agcttgttacgaaaaacgatctatcaccgtataggggctactgttgggggtccgcttcgtcgccgaaggtcctgtaagaagaaacaccttcggaagatcagcacaaaaataatgtcgaaactaccttccaggaagcttcggcataacggcacgccttgagacaaagggttgcaccgacttaaagatgaaaagacagatcggcccatgataatttgtgtcgtgattgtaattgggtgtaaagggtataaatgtaattttgaccgggctgcgtcccgtgcctataaatagatgaacagtgccccagtactgttcacgctgatttgtactcgctcgtacatcacgcttgtattcaaatcttctgtcgagccgaaggtacaaatgtaattcaatattggtcttaattcctcatgggtatataatanagatatgtaaataatggtatgtgattattcatgtgattctctcat

SEQ ID NO: 2266 - DNA, 458 bp, Zea mays
  unsure (1)..(458): unsure at all n locations
tcaattctatgtctcttagctgtggggtctccttcatgtgacattttaagaatgttccaaatatcacgagcatcctctcttccttggactttccggcattcttccggacgaagacttccttttattatgctcaccgcttgagcattgcggtgaacttcttgcatcatttccggagtcatctcttctccttggacgggcttatacatacctgagagcacctacagggggggggtgaataggtgatcctgtaaaaacttgaaacttaaagccacaaacttgattaagtgttagcacaatgaaatcaagtggctaaggagagctcttgtgaaccacaattgacacagtgagaacaagcacacgagacacagagatntatcccgtgggtcggccaagtacaacacttgcttagtccacgttgtgggcgtccaatggacgagagttgcactcaactcctttca

SEQ ID NO: 2267 - DNA, 414 bp, Zea mays
  unsure (1)..(414): unsure at all n locations
tgtggaggttcttcatccacacatgtgctaagctgcgatgccacagccagcccatgcaagtcttagccattaagcatgcatctagaccggcctcttcttttgcaaaatcaactaagtaaagcttgccgtctagtacacccttaaaagctagtgaaccatcacatcttctaaagacagacacatctacatttgtaaacaaacaattatatcccatattgcataattgactaacagatagcaaattatatccaagactctccactagaaacacattagagatagaatgctcattggagattgcaattntacctagcccttttaccttgccttgattcccatcaccgaatattattgaatcttgggaatctttgttnttgacgtaggaggtgaacatcttcttctctcccgtcatat

SEQ ID NO: 2268 - DNA, 369 bp, Zea mays
  unsure (1)..(369): unsure at all n locations
agcttcggcgatggttacaaattttggcttctaaacagtgcaaatagcagtaaatgctgtggtaacttcacacctactcgtctgtttatatagtgccgcaggtaagaaggcgaagcgccagaagttttacaccaggcggacacccgctcgcactcgctgtacggtgggccgcanagactgaacagtaattctgcacggtggggccgccacgcgcagggaaattgaatcgtttctcgacaacgagctcagggaaggtgttttttgagaccttcggcgctccgaagcttaagaaacttttttcacggatcaagctcgttacgaaaaacgatctagcaccgcgaaaggggctactgtgnaccatgcttcgtc

SEQ ID NO: 2269 - DNA, 378 bp, Zea mays
  unsure (1)..(378): unsure at all n locations
taaatcttcgtaataaaatatcaatagatattgttcgactacatataatanaaggtacaaaacggggttaatcaatcatcgaccaattatattaaatttacttaatatattgaatcattgaatacaataatacctatgccttggcaaaggatgaattccaaaatatgccattgcaattcctagaatgcgtgaacagtaaaggaatactgttcactatttataggcacatgacgtaccctgtgaggaattacaagtatgccccttataaaagcttacaacattgactcagacctttatggactaaaaggtcattctatctttaagtacgtttgtaatgccgaagcttcacaaagaggaactttcggccatcttatacaa

SEQ ID NO: 2270 - DNA, 281 bp, Zea mays
  unsure (1)..(281): unsure at all n locations
agctngacaatgaggagatggcgctcgttatctagagcttccgctaaatcctcaaacaaaggagggggaaagactacaagtcccgctccaagaaggtttgctacaaatgtggtaagcccggtcatcttattgctaaatgtcctatgtctagtgacagtgaccgaggcgacgacaagaaggggagaagaaaggagaagaataggtactacaagaagaagggcggcgatgcccatgtttgtcgggaatgggattccgacgaaagctcaagcgactcctccgac

SEQ ID NO: 2271 - DNA, 476 bp, Zea mays
  unsure (1)..(476): unsure at all n locations
tctaaagtgagagcacattntatgactaacgaatgtgcattntgagaaagacaggatttgtagcgcatgccaagcagggaagcaagttggtgttcatcatccacataagaacatcttaacgactgacaggccactcgagctcctccacatggacctattcggctcgatcgcttacataagcatcggcaggagtaagtactgtctagttattgtggatgactattctcgcttcacttgggtattctttttacaggaaaatctcaaacccaagagacctaaaagggattcttgagacgggctcaaaatgagtttgccttgaggatcaagaaaattagaagcgacaatgggacggagttcaagaactcacaaatagaaggctttcttgaggacgagggcatcaagcatgagttctcttctccctacacgccacaacaaaatggtgtagtagagaggaagaatagaactctattggacat

SEQ ID NO: 2272 - DNA, 454 bp, Zea mays
  unsure (1)..(454): unsure at all n locations
agcttctncttgtcgtcatcaactttgatgtagaaccattctgatttctagcctgccggccacttgcttcggtagctgatcacaggaaattttgtagttttctgataggcgaaattgtaacaaccgaaattttcatgaagtccatcctttctggccttggtttggtagtgtaactcgtgtactcggcagaaaccttcggcaaatggctccaccgcctggctttggagagcccaaatataaacactaagcctaacaatagcgttaggagttagttggtgaaaatagatcccaaacttttttagcacatcagcaatcatcctattcaaaggaaatctcaagccagctttgaggaaactcttgaaaatcactatttcatctttctgaggctgtggggtaatttcttctncaccaaagcgaatcagctttttctcatcttcgctaaagtagcccgact

SEQ ID NO: 2273 - DNA, 467 bp, Zea mays
  unsure (1)..(467): unsure at all n locations
tcngcagccgatgcgtgcagcggctgaatgatgtgtntcattctgtcggagccagctctgcaaaatttacaccttcagctgaaaatctgcccagcacattataatatattgaaggcgaggttgatgcccttgacgaagttattggtgggcatgccgacttctgcgccctggtagcttctcggggtacagctatcgcttttctgaaggctggctgtacgcatggaaatattgtgaatagaccaaacttcagcttatcagcatcagatctgatagatatcccaagcctggcccgaagcattggaaatagattcatgacccagatctgggtaagtggcgggcgaaaaatggcaggtgacgaagctcgaagtcatcttaagccggtaagaaacttatatttgttatttttactttctccttgaatttgcaccttattctgctgtttgatgtacgcaggatgacgaagctga

SEQ ID NO: 2274 - DNA, 317 bp, Zea mays
  unsure (1)..(317): unsure at all n locations
agcttatcaatcaatcaaatcaatntgatcatgagaagctagaactgaattcgaagcttaaagccgaagtccagaccagctcagaattgaagaaagcattaacaagccttcaagacaaatgcttgaactttggcaataattgtattggacgattaaagaagatattttactctgttggagccagcagtgggaaatataacccttcggcggaaaatttaccccaggccttcgatcatattgaagctgaaatcgaagagcttgacgaagttatagccgggcacggcgacttctgtgcctgcgtagcttctccgggtacc

SEQ ID NO: 2275 - DNA, 379 bp, Zea mays
  unsure (1)..(379): unsure at all n locations
ataaagactcgacttctccatcgcgcaagatgcacacagcttagataaaacaatggcaccagtcgctctagtagtaatcaatccgaagactagatcgccacccatgtgctgggtaaaaaaacaccctagacacttgctccaatcgacgggtaaccaaaaccaactccttgaagataggcttctatagcacatcacaggtatggagccaatgaatagccaagtgtagagcctacaaaggattagtcacatttttacgtttaaacacaatatcatttctaagacgacaactagcccaacatatcgatgtcgcccctaataaagctagcggttntaaaaccttattaattccccatagccaagaatcaaacaaattcgagat

SEQ ID NO: 2276 - DNA, 438 bp, Zea mays
  unsure (1)..(438): unsure at all n locations
agcttctaaagggagaacacgtgataggtctaaccaatgttacttttgaaaaagatagaccttgtgcagcttgtcaaggaggtaaacaagtgggaggagcacatcacagcaagaatgtgatgaccacatcaagacctctggagctgctacatatggacctcttcggacccgtcgcctatctaagcataggaggaagtaagtatggtctagttattgttgatgacttttcccgcttcacttgggtattccttttgtaggataaatctgaaacccaagggaccctcaagcgcttcctaaggagagctcaaaacgagtttgagctcaaggtgaagaagataaagagcgacaatgggtccgagttcaagaaaccttcagtggaggagtaccttgaggaggaanggatcaagcacgagttcttcgcttcctacacaccacagc

SEQ ID NO: 2277 - DNA, 470 bp, Zea mays
  unsure (1)..(470): unsure at all n locations
tcanatgtgtcgaagttccttgttgtactatccccagatttaatctttccatttcctgacataaagtggtgtctggtgatctcactatgagacaatgacaaaagacttttcgacttagagcatctgccaccacattagcgtttcctgggtggtaatgaatttttaggtcataatccttgatcagctcgagccaccttctctgtctcatgtttagctctaactaggtgaaaatatactttaaactcttgtgatccgtatatatatgacacaaattccctagtagataatgacgccaaattttaagggcatgtactactgcagccagttccaaatcatgtgttgggtagtgttcctcatgtcgacacagctgccttgaagcatacgctattactcgtccctcttgcattagaacacacccaagcccaatgtcggatgcgtcacaataaacatcaaatggcttctcaatatct

SEQ ID NO: 2278 - DNA, 395 bp, Zea mays
  unsure (1)..(395): unsure at all n locations
agctntccagattgtatttaaacttccaaatcggatatgatatgtatccgtggtggcaaaaacgaaccagagatgtttttggtgatggtggatctcgtggtgaccaaaacgtggtagaactcaaaactctaaaggaataaactaagaccagcaactcgacacaaccgatgcaaccaaaaactcaacaagccctaactaagtagtactagtaaatgctcaatggtttataggattgtggtaaaactaatctactattttttggctttttctggactataggagataagaaaacagcgaagaaaagtaaatctctcaccgataaaccttgctctgattaccaactgatgtgcacccgttgggtgattgcccgatctttcgatgagagggtgtggaat

SEQ ID NO: 2279 - DNA, 366 bp, Zea mays
  unsure (1)..(366): unsure at all n locations
cctattgactggtgtataaaatntatgagaagtttgtatctacctactaacccaaataaaaatgttaaacctctctgtccactccattaagttagtttttacccctcattctataatatgcttaaggataagaaaaatagaaaatgttagttaaacaatgaaccagagagcacctctatttttgttaagatacttgtttaatgtagatcactggaaaaatatatcataccctggtttagtataaaataagtaggataccttttattttaataaactaaggataacttataaaaaccctacaaaaataaccccaaggtaaaaacacccccacccttgggataactaatgttttattaataacaactt

SEQ ID NO: 2280 - DNA, 457 bp, Zea mays
  unsure (1)..(457): unsure at all n locations
agctnaggcctgctccattatagaaactattctatgtgatatacaggggcacaaccactacttctttcatgaactacctaagctacgtagagataaaaacatgcaccacaacaaactcaatggacttacctaggtcaagcaactagttcatacccgctattatagtaagatcaaacgaaaaggacttaatttctaagtgtcatttaactccaaacgacacttataactagttcgtccttaaccttgccatccattctttaaaaacagaaaccaaacccataatccaggcatgagaaccattgattgttcaaacgatctccatcactgtgacctaaccgtaatttgcttcttcataacatacatcagccacaatcatctttgttgccattatcataaaaccactaacatctacattcttatcatctcctcttttgtagtaatgaaacaatatctatga

SEQ ID NO: 2281 - DNA, 473 bp, Zea mays
tcagctccatctatgttatggattggctttgagtccgttcatttgcttcggcccttcttgcagcttcctgacttccatggatagcaatgggtccctaatccgaaggtatcttcatgcaaagataggcaggatgaaggattgcttctaaggcattgagggtaccacgaccaataattgcattgtaagggtattccatgtcaacaatgtcaaacacaacttgctcagttctagtgttgttgatgaacccgaaggtcactgacatggtgatcttgcccagtgctacaatctgtcttcctccgaagccacagagaggatgtgtagcatcatgaatcttatcttctggctcttgcatttgtctgaaggccttagcaaatatgatgtcagctgcactgcctgtatcaaccaaaacattgtggaccagaaatcctttgataacacaagagaataaccatgcatcatttatgtgggtaatc

SEQ ID NO: 2282 - DNA, 373 bp, Zea mays
  unsure (1)..(373): unsure at all n locations
agctnttacagaagaaggaggatcctttggcagccaagaagtctgctgggccaaaaaggcggaggattattactgtaattgaagctattgaggaaacacaccgccagcctcagcgtcaaaaacaacaacaactgccaaagttgctgctcttgccgaaggcgctacaaccaaggcggctactaccgaagctacgattgccgaagaaaccaatctgaagagcacattatctgatattgataaaatgctcttggatatggccacggaagaagctgctgcagctgctgaagaaaccttggccacagtgcctggaaaagggaaggagaatctccaagatatttcagaggaaaaagacttcaattttaaaatataattg

SEQ ID NO: 2283 - DNA, 476 bp, Zea mays
  unsure (1)..(476): unsure at all n locations
ggtgctntcttcatattatgaataatattctgaaccttatcctctgcctctttcaccatatcaggcctaaagaagcacctttcaccaggttcagaccaatttagcggagtacgacatcgacgtccatataaagcttcaaagggtgccatcttgatactttcttgatagctattattatatgaaaactccgccaaaggcaaacattcatcccatttcggtgagaagtccagaacgcatgctcgcaacatatcttcaagtatctggttcactctctcagtttgtccactggtttgaggatgataggccgaactgtggagtagtttagtacccagaaatttatgaagttcttcccagaatttggatacaaattgtggtccacgatccgacactatagtctttggaacaccatgcaaactgagaatacgggcgatgtacaactncgcatangcaatgacggnngtatttaccttgacagg

SEQ ID NO: 2284 - DNA, 299 bp, Zea mays
  unsure (1)..(299): unsure at all n locations
agcttgacaacaccatttgacattntacataaaatttctgagatcaagaatatttagttcattcctcaacatgcaaaagcgggtcttatcaagtggcttaatgaaaatatccgctaattgatcttccgacctcactccttctaaaatgatatctcctttagcaacatgatctctaaggaagtgatgatggatatcaatgtgcttggtgcgagagtgttgtacaggattattagcaattntaacagcactctcattatcacacaacaaaggtaccttntctagaactacgccatagtcta

SEQ ID NO: 2285 - DNA, 400 bp, Zea mays
  unsure (1)..(400): unsure at all n locations
ntagatgncactgaaanattcttaacgacaccaccagtattgaaaccgccccggcgagctacgccgactcaaccggctgaagaattgctgttgtatatctcttgcacgactcacgtggtaagcactgcgttggtagtcgagcgagtggaagaagggcatgcctactcggtacaacatcctgtttacttcatcagtgaagttctaggtccctcgaagaaaaaatatcctcaggttcagaagctattatatgcagtacttctaactgcccgcaagctgcgtcactactttgacgaccacaaagtcatagtagttactggttttccaataggggatattcttcacaacaaggaagccattggccgaatagccaagtgggcttgcgagttgggatcccacgata

SEQ ID NO: 2286 - DNA, 413 bp, Zea mays
ttcgaaaacgcagattgaaatcgagacaaagctgaccgaagccgatgctacactgagccaggatgatgccgaagctgggccttcagagcccgccaaggagaaatcctcggaaactggagaaaaggcagcggaagaagctatagaacagattttgcctgaaaaagctgccgctcctactcccgaagcaccttccgaagtccttgattatattattcgacacacttcgggaaaaagattatctgaagaagaaatttttgtagctaaacactatgcccgagaactgaagtacccgaaaggggccttagtgtttaatggcatagatgaagatgacttcttgtattgccttccagacaacaaagaattatctgtctgtcgggagatggccacaagtatgggggttccgaagcttgagc

SEQ ID NO: 2287 - DNA, 463 bp, Zea mays
  unsure (1)..(463): unsure at all n locations
tgtggtcacggtaaattgctcgttgtattctatatgcgtatggttacngncgcggatgaaaagtattagtgctcatataatgtctaatttacaacgcagatggttgggtgattatcggggagaatgcgtcgttgattggttgcagtagttttagtgcactaaatgacttgaataaaaattgtaagttgacttgttggttctcatttgattaatttaactctaacaaatggtaaagcgttagagtaattcaagtctctcgaacgcggcgattcttgaattatatagaagctgaattttattgattgctgttttggactgcacgcgctgtattagttgtgctgtatgtttgatgaaccaaattgtgttttctgtagatatgtgctatagaaaagtggtagataactctattatcttgctggtgttaatatatgacaaccataagtctgacggtgtacgagttacg

SEQ ID NO: 2288 - DNA, 374 bp, Zea mays
tgcagctatattatgtacaggggatcctttattgggctctatttttaatggaaaactgaaattcatttacaacataaacatgtatatcagttttcagagcggatatttagttacaacatgaacaatgacctacagttttcagagctaacatcaacaacaccaaaattcataactgaatacaagattatttcaatatttcctctctgtatgtgatacaaattctgtaactcgacgtcgtctgcaactcatcttctacgcgtgcatttggagacgaggtgagatcctctagcggcaccgtatcacacaaaggtggtggcgtgttgtgcctggccggtcacgacatgttgtgcctgtgcggagatggagagctgtgc

SEQ ID NO: 2289 - DNA, 455 bp, Zea mays
  unsure (1)..(455): unsure at all n locations
tcggattcccgacactagaagatgagctctcggtgctgtcaaaagatgaattggtcgacagcttagcatacaacagcttaaaggtgagggaatgagagttttgtacttaaaaacaaaattctttcatttgcttatacttaataccgcacttcttttgcagggccttattcttagcaacgccctcatggcacaaaaaagtgcagaagacgaaggatgtactatagctttgaacaaccttcgttccgaagtaattgagctaaggaacgaaggtcttgaaaaagataaaatattaaactcattggtgaacaagataaaagaagacgaagctacttcaaaagcccaagctgaagcccagaaatgcgaaattgaagatcttccgaaacagctggcagaagcaaaaataanatgtgcaatngccgaagctgactgagacgccagtgattactggaaaaatt

SEQ ID NO: 2290 - DNA, 470 bp, Zea mays
tgactcgccgaagcaacagagactgcttgatttttgcccacatattctgggatgtaaggcgaatgatacgaagctgtatgcatgacctgcttcggctgagcttgtcgcgctgctgcttcagctatttccttttgcttctgaatagtgacatggcacatcctggagtatggcctttgttctcaccgcagaataagcaaaagattcttctcggctgatcgccaaatcttcctccgaagcccctggcgcccctgcctcttggagctggaggtcggaaggaactttgctgtgccctgaagcctgtgaggagtattgtggcctttgttgctgacttcctttatcatcattctgagtggaattgcggattgacctgatatgcctcgggtaaaaccttcctccgaagcgcctggtcatttcagaaaacctgaaagctttctcccttctgtgacgagaatcattgacagctcgaatga

SEQ ID NO: 2291 - DNA, 444 bp, Zea mays
  unsure (1)..(444): unsure at all n locations
agcttctaaagggagaacacgtgataggtctaactaatgtaactttcgaanaagatagaccttgtgcagcttgtcaagcaggtaaacaggtgggaagctctcatcatgccaaaaatgtgatgacaacatcaagacccctggagttacttcatatggacctcttcggacccgtcgcctatctaagcataagaggaagtaagtatggtcttgttatagttgatgatttttcccgcttcacttgggtattctttttgcaggataaatcagaaacccaagggaccctcaagcgcttcctaaggagagcccaaaacgagtttgagctcaaagtgaagaagataagaagcgacaatgggtccgagttcaagaaccttcaagtggaggagtatcttgaggaggaaggaatcaagcacgagttcttcgctccctacacaccacangcaaatg

SEQ ID NO: 2292 - DNA, 476 bp, Zea mays
  unsure (1)..(476): unsure at all n locations
cgaggctgactcgccgaagcaacagagactgccggatggttgcccacatattctgggatgtaaggcgaatgatacgaagctgtatgcatgacctgcttcggctgagcttgttgtgctgctgcttcagctatttccttttgcttctgaatagtgacatggcacatcctggtagtatggcctttgttctcaccgcagaataagcaaaagattcttctcggctgatcgccaaatcttcctccgaagcccctggcgcccctgcctcttggagctggaggtcggaaggaactttgttgctgccctgaagcctgtgaggagtattgtggcctttgttgctgacttcctttatcatcattctgagtggaattgtggattgacctgatatgcctcgggtaaaaccttcctccgaagcccctggtcatttcagaaaacctgaaagcttccttccttctttgaccaanatcattgtcagctcgaat

SEQ ID NO: 2293 - DNA, 421 bp, Zea mays
tccaaccagagagctcctcattcatctgagcttgtgccttcttattcaactcttcataccgagtcaagtccctcctcactgtacgcaagaatatgacaaatacaatgccagccaaaaatagaattaccatcaatgagttcataattgaaaaccagtgaatcttcgaaccctccatcttcaggtatgcatcccaccgtgatggccacctgatatcactgtttacaaattcaacctcataagtaaaagtaatcttctctttctccctaaccaattgagatttttccaactccacagggcagttcacaggatcgactttatcatacatattaagcttcaatatggattcaggatcacgcttcacgctgcatgggacaacttcaaatccacaatctcatattcagaaatggcatctttgtcagtc

SEQ ID NO: 2294 - DNA, 458 bp, Zea mays
  unsure (1)..(458): unsure at all n locations
accggatcttaagcacctgagctgcagcttgaaagattcttcattccatcatgtgctagtcggcgatgccagagccagcccatgttagtcttagcaattaagcaagtgtcgagttcagctctatcaaaatctaccaagtatagctgaccctctaacactcccttaaatgctactgaatcatcacttcttctaaagacagtaacacctatatttgtaaaaggacagttgtagcccattttacacaattgcgaaactaaaagcaagttgtaatctaaagagtttacaaggaaaacattggaaatgggatggtcaggtgatatagcaattttacccaatcctttgaccaaaccttggtttccatccccaaatgtgatagctcgttggggatcttggtttntctcgtaggaggagaacatcttcttctcccctgtcatgtgngttgtgcacccgctatcgat

SEQ ID NO: 2295 - DNA, 463 bp, Zea mays
  unsure (1)..(463): unsure at all n locations
tctatagacaaccacctcgtcagcttcgggcagatggattatactctcccctgcagcccgcacaatagaaatgtcacaaaagtaacttcccctcatggcatcaatctatccttatttgattgttgactttccaaagacaacatgacttggcctcaagggccaatcttcggcaccctcattctcactttctgcatcaaagtcttcactgtcactggaatcctcagatatcccagctaatgtctcatgtgcaatcttttctgcattggtcctctccatagcttcgtaaaactcggacagcaccaggtcgacagtcttcttctcactagccatcaaatcaaaacttgttgaaatgtcgaagctcaaagtcacgacaaaacaataaagtttaaaatggcgagaacagtgtaagcaaccgaaatagcacaagaaacgctntcaatatgagctcatatttatatgcatg

SEQ ID NO: 2296 - DNA, 427 bp, Zea mays
agcttatagtgcactgttctgtctctctcatgtttatgctagtgaaattagcagagatacggaaggaggttcagtgccctatctgcttaggtgagaatatcctttctcaatatgctttagtgtttttgttattacattgtcgttcactcattcttcagttttctcgcatgactgaagcattcaaataaagtagccatgtttctgtaatgaattttctgcattagctgtttgctagtataaactcatcttcctgttatttgtagcacgataatatggctgacttgtagcatataccgtgtcattttatggatcaccccacatgtaaatgtttgattagatgtggtcctttattgtcgtccttatcttaatggaccaaatcgttgtgtaattaagtttctcataccataaactaccaaaagtcatgaca

SEQ ID NO: 2297 - DNA, 370 bp, Zea mays
ttctcgcacgcttttcacagaacttgctgattatccgtacaccacatctgaactctgttttaggtgaaacttcgagtacctcctatgttgatgcttcttgtgctgagaaaaatatcacaaaaaatcattcaaaatagaagaactgaatcacttgtgattcctactagtggcctcgctagtacaatatttacggtactgccattctgctagttccatccgtcctttgcacttgtggccagcgatatagttgcgtgttctgcactatcattcaactttgcattattgcttgattgtgctaatcaatgaatttgagtgcagcctacccaaaactccacatatttctaccacgagaacgtttctgtttcttcaa

SEQ ID NO: 2298 - DNA, 433 bp, Zea mays
  unsure (1)..(433): unsure at all n locations
agcttaatngacatatctatngatcatatcttcttcatttggtacacatccatatttcttattcttcttgtgccaaggctaagactaatgtgcttccacgagtatttcttgtattagtcttagattgaaagggaaatggagtattcggcaaagacaacgcttccactcaactccatcggtattatttaccctttgccggttttccgccatctctccaattggtataatatttcacttatatttattttatcaatgtgaaaaaagggctcacaaagtctccgtttttggcgattaatgccaaagggggagaaagtattatcccaaagcaaaaggacaacaccaccacctttcgaaaagttntaattaatatatttcaaattggtatgnttactcttaattggtatattttcagaattagcatctaagctacata

SEQ ID NO: 2299 - DNA, 473 bp, Zea mays
tcagctccatctatgttatggattgcttttgaatcagtctcagtttccttctgcccttctggcagcttcctggcttccatgaatagcgatgggtccttgatccgaatgtatcttcatgcaaagataggcagggtgaagaattgcttcaaaagcattgagggtgccacgaccaataattgcattgtaagggtattccatgtcaacaatgtcaaacacaacttgctcagttctagtgttgttgatgaacccgaaggtcactgacatggtaatcttgcccagtgctacaatctgtcttcctccgaagccacagagaggatatgtagcatcatgaatcttatcttctggctcttgcatttgtctgaaggccttaacaaatatgatgtcagctgcactgcctgtgtcaaccaagacattgtggaccagaaattctttgataacacaagagataaccatggcatcgttgtgtgggtaat

SEQ ID NO: 2300 - DNA, 485 bp, Zea mays
  unsure (1)..(485): unsure at all n locations
gatccttaagcacctgagctgcagcttagtgtgggaaagtggcaattatttgtcacttcaacacacccagtcacgtgcaaccagagaggaaggtgcaaacgtgaaaataaagggatggaggcacaaatgaagcatctgccaggattcaaactcggacctctgggtatgataccatgttagagtggacacacgttagttcaacccaaaagcttaagctgttaggagaagataaacaatccacttatacacttcaacagaaatatgtattgataatgcatttacacgaacttgtagatattaatattattttctaaaaacttgatcaaagttagataagtttgtcttaagacaaagctaaagtgaactataatttgaaacggagggataaaaaaaggagtttatttttctcgaacgtgcagaaagaanaaaggagtttacagtcatctcaattctaaattagacattanggttgagacatgtgtaca

SEQ ID NO: 2301 - DNA, 453 bp, Zea mays
  unsure (1)..(453): unsure at all n locations
ggaccttcaatctaagcctgcatacagctgacaatctcatagcctctgaagtactttcctcaaatgctcctcatgctcttgctcattctgggaatatacaagaatatcatcaatgaacaccactacgaacttgtcgaggtagtccatgaacacactgttcatcagatacatgaagtaagctggtgcattcgtcaatccaaatgacataaccatgaactcatatagtccatacttagtgatgaatgttgtctttggtatatctgcaggtcggatcctaagctgatggtaacctgacctcagctctatctttaagaacacactggctcctctcaactgatcaaataggtcttcaattcgaggcagagggtacttgttcttaacagtgacttcattcaaagctctgtaatcgatgcacatcctctttgtgccatccttcttctncacaaataacac

SEQ ID NO: 2302 - DNA, 387 bp, Zea mays
agcttctagttgatcttccatagctcaatattctcaatctgtcattcggacaactattaagactgttgaaaactaagcgtgtgttttgtttagagacaaattgggataggatggacccatccccgattctggggatggaaccttcccaattctgtgtctggataggaggataggttcattccaattttattgcttggttggatgagtgtaaagggataggatgacatagatgtttaccagtgttaccaactgttattaggacccacctatcatattcggaccctagttatcaatcctccgttacgtatctctctccctttttctggcttgtctttacacccgcatcagatttgcctctgtgtcttctcttggtcctgcagcttgcac

SEQ ID NO: 2303 - DNA, 474 bp, Zea mays
  unsure (1)..(474): unsure at all n locations
tgtgaagattcttcatcccaacgtgggctagtcggcgatgctatagccaactcatgttagtattagcaattaagcacatgtcgagtttagctctattaaaatcaactaagtatagctgaccctctaacactcccttaaatgctactgaatcatcacttcttctaaagacagtaacctatatccgtaaaaagacaattgtagcccatttttgcataattgagaaacagaaagcaaattgtaatctaaagaatctacaagaaaaacattggaaatagaatggttaggagatatagcaattntaccaagtcctttgaccaaaccttgatttccatccccgaatgtgatagctttntggggatcatggttnttctcgtaggaggagaacatccttttctcccctgtcatgtggttggtgcacccgctatcaatgatccaacttgagcccccggatgcataaacctatcaaaacaattt

SEQ ID NO: 2304 - DNA, 356 bp, Zea mays
  unsure (1)..(356): unsure at all n locations
agcttatcataaccacctttgctaagcctgtctcctctgtgagagatggtgngantgatgaacctatgagagatcctcctcagaaacaagtgtggctttcaaaacctaaccatcttaggaacacactaaacacctttcccgacatctttagcgatcccctttctagagcccctcagccatccaagaagaaaatcctcttccacaaacaaaatccacccaagagaggggtgaggtaccattgtgaatattgtgagagggatgggcatctagcttctttttgcttaagaagaagagagatgacggcaggtttctgagtcgacaagaaggaatgaaccgcccctctatggtgtcatgct

SEQ ID NO: 2305 - DNA, 413 bp, Zea mays
cacaatattagagattcatttgtgatcttaaggtctaataaaattagcttctagcagccggtggatttcgtccttgattcgtgggagaagatctggacgaaatgttctagctctctgcttgaaaggtctgaaaccggacttaatgggcagccgatgctctacgatctctcgtcttaatcccggcatctcagtgtaattccaagcaaagcaatcagaatattccttcaatagattgatcatttcatttctaggatcggtctccagggttttgtttacaaaagtcggccttggagttttaccatctcctatatcgatctcctccaaaggattggccgatgtaaacccctgtcctaagttatcgagatctttgaattcctctatcattgtccccacagaggaatcagatgatcttt

SEQ ID NO: 2306 - DNA, 321 bp, Zea mays
agcttctaaagggagaacatgtgttaggactaacctatgtctgcttcgagaaagacagaccttgtgcagcttgtcagacagggaaacaggtatgaagcactcatcacaccaataatgtgatgactacatcaagaccactggagcttcttcacatggacctcttcggacccgtcgcctaccttagcatcgggggaagtaagtatggtcttgtaattgtagatgactgttcccgcttcacttgggtgttctttttgcaggataaatcagaaacccaagggaccctcaagcgctttctaaggagggcttaaaacgagtttgagc

SEQ ID NO: 2307 - DNA, 436 bp, Zea mays
  unsure (1)..(436): unsure at all n locations
tctggataagtnttattacgaacatatgactgtagcttttctatgtacctacaacacaaataaaataactaaattattagattgaacaaccaacatatttgtataacgaatattgttaccatagctcattagtacctctcaatataatacatccatcgataattgacaggtccagcaatcttacatttagccacaagatgaactattaaatgaaccatcaccgtgaaaaaaccaagaggaaaaaccatctccattttgcatagagtaataataatagatttttccaaatggtccaactcatcgacacgaagaacttttgaacatatncctcgaaaaaatgcagacaactcaaacagtagtgttgtaatatcatctggaaaaataacccctggaagcaataggcataaattgttgcatcatgacatgacaatcatga

SEQ ID NO: 2308 - DNA, 431 bp, Zea mays
  unsure (1)..(431): unsure at all n locations
gcttcatatcatctctgggtattctactttacttattaagtacattntggtacccatttttggatgggtccaccaaggttagctaataaatacttaggcacccaaatggcctttgtgctagttttaggtgaactacttacttttctagcaccagtgtcatttttgggtctcctaagtgaatatgaatgaattgacatggtaggcttaagatactcactcatgggacaatccttgcataggtgtccctttcttcggcaagtgtagcaaatctgatttttaattntgcaagactccttctttgccttgcttcttgttgctacatggatagtgagcctctttctttctaaagntaagccactatcctttgtgtagggacatgacttaatctcatgtcccttctcatgacattgataacactttctagcgcatct

SEQ ID NO: 2309 - DNA, 461 bp, Zea mays
  unsure (1)..(461): unsure at all n locations
tgtgagacgaagtntgcttcgctcctcttatgttatacctaagcttttctaattgataaagttcctgtaatattcagtagtacgctgaaagcaaatggtcagtcatgtttttaggaccttcagaagaggaaggtccccaacaataccgcttcagataggactaataggagcccttcgatttagatcaggcggatccaaccgatcgcgctcgtttaaaatctccgccatcggtattggatccatcggctaccgtcgcgtaccgcttcggcacagtttgatataatctggaccgtggaattctaattgtgtggccagaatctgcccataccccttcatcgtgcactnttacataagagaccctgacacatactanaatgaactcgccgtccatacagcgtgtaatgcaatacaaacaagtccctagaatatgtagtttaaaccttgggttcccatgtatttat

SEQ ID NO: 2310 - DNA, 188 bp, Zea mays
ccaggcaagaacccacagccaaccctccccttgccacaacaccaaccaatcaagcagaaccaacgatgatggcaagggacagcagggcattcaacatggacaatgccacacactaacattactccccttacacataaacaatgcacacaacatcggaaaaaactaggacaaaaccccaaaggcaatac

SEQ ID NO: 2311 - DNA, 371 bp, Zea mays
  unsure (1)..(371): unsure at all n locations
tccgcggctgcngcgcaggcggtgcangggactaacttcattatatgtcgtcgcggaggtagtgctccctgactacctgcgaagaggcgaccacggttgtctgtagggccgtanggtttgggggagcacctctagagacggcgacgttttgcccgagcagttaccttttggatgcggccttgcttcgtcttctttacgaatgacttgctctgcagcatggtggtgagttagacagtgcgccgcgggattgctccggcggcggcgaggaacgcggagaagtgtgtgtagcagccggcggcgacaacggggctaataatttggntcgaggtgagtggctggctgcctgcctgcctggtctgggtgtaggttcg

SEQ ID NO: 2312 - DNA, 394 bp, Zea mays
  unsure (1)..(394): unsure at all n locations
agcttgttagcctcanaactatatctactcttacaagaccctcctccctgaggtaacttgatccacgccaaaaacctatcacaggaatgctggtggtatttcaagactttgtatagatcgactgcttagatctaagcaaattcatgaaatcacaaccatgcataccacaagcttagagcataccaaagcagtaaaatcatagggaaacgacggtgagtaccgcgatccanggttctatcgccgcgcgaagcgaaagcagggagccggggacatccgatgctaatataacaatgcctccttgatcttggagaactccttgagagttcagatgggctcattggcagcacgtacattgttgtaggaaacccagtcttcaccatggatcacctgatat

SEQ ID NO: 2313 - DNA, 477 bp, Zea mays
  unsure (1)..(477): unsure at all n locations
tctaaagggagagncacatttgtgactaaccaatgtttattttgagaaatacagggtttgtagcgcatgtcaagtatggaagcaagttggtgttcatcatccacacaagaacatcatgacaaccgacaggccacttgagctactccacatggatctattcggcctgatagcttacataagcatcggcgggagtaagtactgtctagttattgtggatgattattctcgcttcacttgggtgttctttttgcaggaaaaatcccaaacccaagaaaccttaaagggattcttaagacgagctcaaaacgagttcggtttaaggatcaagaaaataagaagcgacaacgggacggagttcaagaactcacaaatagaaggctttcttgaggaagagggcatcaagcatgagttctcttctccctacacaccacaacanaatggtgtagtagagaggaagaatagaactctacttgacat

SEQ ID NO: 2314 - DNA, 450 bp, Zea mays
  unsure (1)..(450): unsure at all n locations
agcttcactgacatgtctgtaaacatttatttctctttcaatcgatacttattcttaattcatacttcttttgtttctgccaaggtttaatgtgtagatcttgtattcccatgcctcatattccaacgtgcattgttttacaagtattcatcacctgtatgcatgaatatagagggagcaatatttgcactttaaatcttctagactagtgttgttntaagtctattttgtacttagtctcaaactgaaagggatatatagtttacgtgtaaggaaaatgcttccactgcattctcaattgatatcaaagatcccttggtataactcaattggctttattatcgcattcattgtaaagaccgctatccattgttgagaaaagggagtgctttctgtgcacatttgttcggcagacacccttgcctcaacctaagtttaaaaatccatatt

SEQ ID NO: 2315 - DNA, 381 bp, Zea mays
gaacccgtcgtgctccatcaatgtcacccaagtcagcatacacatcaagtaatgcagtccatgaaacaacatctctcacctccatgtcatcaaacaccctgcgtgccgcaactgcatctcccattcttagatacagagtgatcaaagaattgtgtacctcgatactcttttcaaacaagttgcatttgactgccaatcccacaacacccatggcaagatcaaattcaccagcaccaacacaggccttgatgacacaaatcagagtaaccacattatgtctcacactgcaggttagcatctttcgaacaacagtgaatgcatccttatggagtcattgcggcaaacccagaatcatgctgtgagaaggaaccgagtgagtgg

SEQ ID NO: 2316 - DNA, 339 bp, Zea mays
agcttgtgatttatccaatttataacaatctctatctcttaacatagattttctatggataaactcaacacaagagatggaattagtagcacaagcactagtttcttatttagcagccctttatatgtggaaggcaagcgagttgctaaaatagagaaacctcataatatggactaaatttccttgaaccctcatgcacaatatattttgaatgacatggataatatgcatggttgttcaatgaagtctaaaagggctgacttaatccatattatggtaagtgtctaataaagaagaatcaaatccaaattaactaaattgagaatacgtcacatattt

SEQ ID NO: 2317 - DNA, 479 bp, Zea mays
  unsure (1)..(479): unsure at all n locations
gggtggtacaactgaatctcaagtgcaaattattttctaatcttatctcttttgtgacttgtgtagccactaagggaaaagaagcacttgaggatatacatcagttgttgattatgaaataaaggtctaattggaagatgaatgaatattatcatatggtgaacaatccaaaattatgtgacgtattctctatctagttaatttggatttgattcttctttattagacacttaccataatatggattaagtcagcccttttagacttcattgaacaaccatgcatattatccatgtcattcaaaatatattgtgcatgagggttcaaggaaatttantccatattatgaggtttctctattttagcaactcgcttgccttccacatataaagggctgctaaataagaaactagtgcttgtgctactaattccatctcttgtgttgagtttatccatagaaaatctatgttaagagatgg

SEQ ID NO: 2318 - DNA, 423 bp, Zea mays
agcttgagtcaattcttctgcttattattattgattcccaaagaaatgataagggtatgaaacatattcatgagaaaatagaagccggcaaagagaattgtttcagaaaggatgatcaagtcatagtatgggttaataatcgcatagttgtgcctaaaaatgatgaagtccgccaacaaattttggatgaagctcatcttagtcgatattccattcatctcggaagtactaagatgtattaagatttaaagcaacattattggtggacaaaaatgaagattgaaattgcacgctatgtggcgagatgtgacacctgtatatgtgtcaaagcaatacatatgaagactgctggtccactgcaatctttgcccatcccaacatggaaatgggaggacattagcatggacttcattctgggattac

SEQ ID NO: 2319 - DNA, 459 bp, Zea mays
  unsure (1)..(459): unsure at all n locations
gggaggaccagatcaccaaagcttataagtttctgttttataagtggtcacccaagttccgttgatgaagcaccagaagaacaatcaccgaacgaatccatgtgggagttcgcaagagaaaggtttgtgtgttggcatctatgctccttcaataagcaagctgccaagcgaaagctagaagcctgaagatgatctttgagtagccagaatcagtgttttcaatcagcaaccagatgttcctcaaaggccagactttgttgaagtttcatctcctcgaagagttgcaaagtgaagatatgtagctgaagtaaagctatacccataacccttctaaaccgaatctcgaggacgagattccttttaagtggggtagaattgtagcatcccaaanattcaaattcttgaaatttctcanactcgcccttaattcaaaatgaatttcaaatttcatttcaaaat

SEQ ID NO: 2320 - DNA, 262 bp, Zea mays
agcttcaacaacttaagcctgtggattatatatattctccttgtggcaaacaacgaagctattacatgaagattaaaaaatgtcccttattacacagaaaataaaactgaacggaaaagactactatcaaggtaggatatttgtcaatagatgtgcttcgactctggcacagtgctattgactgtgcgagcttcggactgttctctgaaatccctttggtgttgagcatattggcccccttctggctgctggccttgttgca

SEQ ID NO: 2321 - DNA, 303 bp, Zea mays
ggacgcgacaggagtgagctggcgcgcgtggccaaagcttgggcactggtggctggctgcagaaaagctcgccggagctaaagaggggcgtctggccagcgagggcgagcactgggtgaggtgaggcgcggacaaccacagccgacggcgaaggcgcccggcggacttgaccggatgctggggcgagcacgcgcgggggttgggcgaatgccggcgcgccgaccatggccagacaccggtgcgcgatcattctgcccgagttctggcgcgtgaggacaattatcctgagcctgctctcgcctt

SEQ ID NO: 2322 - DNA, 414 bp, Zea mays
  unsure (1)..(414): unsure at all n locations
agcttgaaatttgaactttgtctatgtcttattttgtatttgatggggaaaaatgaagacacacaaaagagaggaacgataactatcttgggactaaaagcaccagccgaccaactcattgtctagatatcccaaacgaccagcccacaagtcatttgtttattatttctccggccacttgcctcagcacgacatcagcatggtatcacgcattaaactaatcccacgtgccaggtgattctattctccttctccgcgcggccggatggctcgaacagaccatagttcaggtcttctcatctgcgttcgcgtccatgcggaggggccgtccgcgggacgtctgtttccgtaaaaatctcccgaacagactccacagatntcggtgtcgttacgattcgacgatctggtccctac

SEQ ID NO: 2323 - DNA, 454 bp, Zea mays
tgtggacatgggcgtgagatccattactagatttctctgcctgccacagttcgagctggtgattcaagcggcccagaagagcccccacatgggcatactggaggcatggctccggcgtctcaaagaagcctactatgatgccgaggacttgttggacgagcatgagtacaatgtccttgagggcaaggccaagagcgaaaaaagtctcctgctgggagagcatggaagctcctccactgcaactactgtcatgaagccttttcatgctgctatgagcagggcacggaacttgctccctcaaaacagaaggctaattagcaagatgaacgagctcaaagcaatcctgacagaagcccaacaacttcgagatcttcttggtttgccacatggcaataccgtcgagtggccagctgcagcacctaccagtgttcccacaaccacatcactttccact

SEQ ID NO: 2324 - DNA, 419 bp, Zea mays
  unsure (1)..(419): unsure at all n locations
accttaagtcacctgaggcatgcaagcttatanatggacgtgaagagtgtttccttttggaccgacaaggaagagtctatgttgacaacctcccactctgaagatagtgagtaccctaaccatgttataaactctctaagcgctttatgggctcaagcaagccccaagagcatggttgaatgcctaagagatttcttatactaatggcttaaagttggaaggctgatcctacactcttaccaaacacttgaaatgattgtttgatgccaaatttatgttgatgatattaattgggctataaaaattaatgtgaagagttatcgatatgacacaaaattcaatgcatgaggggagtgagacttttggattaaggaacactcaaaggacttctagccaacaattctcaattttaacagtgg

SEQ ID NO: 2325 - DNA, 466 bp, Zea mays
gtgacctatgatactaagcttctctagaaggataccgtatgctgaagctgaaatattttgccgagttgtaagtgatgacagaggatgatggtatactaagtccaacatgcctagccatatcgagtttggcagatccaccgtgaaacctaaggacttagttttgatgaaaaaacttggttattttggaaaaaaatgatgataacttgataaggttcgtgggtgaagagataattccagagccaaaggatgatgaggtggtggtttttaagagattcttccatgttgggcttcgattcccgttgtacgagatgattggtgaagtattaaaaagatttaggatatatcttcattagctgacaccaaacgctatagtcaggctcagtgtttacatatgggctctccaaagccagggaaagagtgccaatgttgaaggattctatagagtacatgaactccattaccaaac

SEQ ID NO: 2326 - DNA, 354 bp, Zea mays
  unsure (1)..(354): unsure at all n locations
tgcagcatcaagctttaccgagcattgcctcaccggttagtttttttatcctcggcggactatggacttccgcctccgcgcgtggaccgagctaaccaataagtctntttccaattacttgcacccacgtctatcctagcgtcccgtgaagctctctgacccattcatttgacctatcgcaccgagagtaggtcggattcctcggcgacgacgagcatctccgcctgcgcacgtggaccggacgactccgaccatccccgacggcgacccgcacatcgtcgtgatcctcgagaccatccctacgtactcgaccacctcactggagcaacctcgccgccggtaaaccctccgcct

SEQ ID NO: 2327 - DNA, 486 bp, Zea mays
  unsure (1)..(486): unsure at all n locations
aagcttggcatgtacaccgccttaagtcatcgacgacttaagtctattgcttcgttactaaggtatagtgatcacccctggttaagtaagcgtgagcatgtcacaccgccttaagtcatcgccgacttaagtcgattgctccgttagtagggtataatggtcaccctgagtcgagtaagcgtgagcatgtagtntgacaataaacggttcgagttcctttgagaatgaagtctttttattgatggtgtattttccaattacataatacaatgccgtcccaatagcttttgaaatctagctaggggtaaaacttcctaaggtgctttatattccatgagttccctatttccgtgccatgcacttgagtaagacgatatgatccaagccgagtgacttctgctactatgaatggtccttctcatagtggtgacaatttgtgtcggtccttctccgtagaatactatggaggacaagatctcccactgc

SEQ ID NO: 2328 - DNA, 367 bp, Zea mays
  unsure (1)..(367): unsure at all n locations
agctntagacgactacgccaagctcttcaagaatactctntctcgtagtcatgtgcaggctcttgctgccctttttgggtggtctgtcccagataatttagaatatataactgggactggggatattaccgcagcaagcttattttagctggcgatgttgctgatattgtttgtcgatttacctctcattgtttctacatggatccggaaaaaataattgtttggaatgttagaggtcttaattctctagctcgacagaattctgtccgtgagctcctcaattgttatggagcggatataatctgtcttcaagaaactaagatggcacaaccttcttcgcgtgttctcctctctatgnttgggtctg

SEQ ID NO: 2329 - DNA, 417 bp, Zea mays
  unsure (1)..(417): unsure at all n locations
acggaccttagaaactaagcttatcaatggacgtgaaaagtgccttcctcaatggaccattctttgaagaggtctatgttgagcaacctcccggctntgaagatagtgagtaccctaatcatgtgtataaactctctaaggcgctctatgggctcaagcaagccccaagagcatggtatgaatgccttagagatttccttatcactaatggattcaaagtcggaaaggccgatcctacactcttcactaaaactcttgaaaatgacttgtttgtatgccaaatttatgttgatgatattatatttgggtctactaacgagtctacatgtgaagaatttagtaggatcatgacacaaaaattcgagatgtctatgatgggggagttgaagtatttcttatgaattcaagtgaagcaac

SEQ ID NO: 2330 - DNA, 321 bp, Zea mays
  unsure (1)..(321): unsure at all n locations
agcttctccttgtcgtcatcaactttgatatagaaccattccgatttccagcctgccggccacttgcttcgttagctgatcacaggaaattttgtagttttccgataggcaaaattgtaacaaccaaaattttcatgtagcccatcctttctggccttagtttggtagtgtagctcgtgtactcagcagaaaccttcggcaaatggctccaccccctggcttcggagagcccaaatataaacactaagcctaacaatagcgttaggagttagttgatgaatatagatcccaaacttttntagcacatcagcaatcatccta

SEQ ID NO: 2331 - DNA, 464 bp, Zea mays
ctcagcttttcggccaccactccaggggcagaggtggcaggggcttcttaggaagatatggggatcaacccacaagaatctatcatttattctatggtgaggacaagggtcacacgacaagaacgtgtcaggttaccattcagaaacaaaaggaaattgtcgaagtagaagcccggcagaatcagccgaagcaggttttacatactgcttcgtgtcactctccttacataccagagtatgtgggcaatcaacctgcaacttctgttgcttcggcaagacattcacaagcttcctggacccagctcccaccgccaccacccttgcaacctacctatacccaaagccagcagccagaagggcgccagcattccgaacaacaatgcgacttcatggaggagtccgaagctcgtacagtcaacaacactgtaccagagtcaaagcacatatacttgagcaatatctac

SEQ ID NO: 2332 - DNA, 318 bp, Zea mays
gaagccggcgacatacaagctacccaacgatcaacgcgaggcctacagcaacgcttggaacaactaacagctacgtcacttctacccctagaatgattcaagtcggtcaagtatctccgcttctctccaagcataacaaaagtctaaccgtcaagggaggatcggccttgcctcagcaaaaaccgaccctccctcgggggctagaaggggggaaccccctttgcagcataattctcctcagaaaagttttctaccaaaatgactttcgtgcttttcgactatatcgataacggaatcctaaaaacgaggagaggaaca

SEQ ID NO: 2333 - DNA, 402 bp, Zea mays
ggaccttaaaactaagctgaggaagtgtattgggacgaccataactttctttcttggctcccagcactgcgggaggttcctcggactcgaccacctcaaacgtgagtttccttttgaagttggagggagtcctaaacagacgggcagtttgagttgcccaaggggttggacgcgtttcccgaggatgatcccgtgaaaaggcgtcgcgccggccctgatcgaggacagatcgatctgcaagagcccgacggtctcgacatagatgatgttgaggctgctgcctccgtccatgaggaccttgctaagacagatgttgccaatgacgggattgacaacgagcatgtacttccccgggctctgcacgctgacggtgtggtcgccctcgtccaaggtgatgggctt

SEQ ID NO: 2334 - DNA, 465 bp, Zea mays
  unsure (1)..(465): unsure at all n locations
agcttgctcctntttgtctccatttatcagtcgagggggagtcaccaacgaacgacccacaattggtaagcctcgttattcgactggattttttatttcgcctctagagaatacttttcattacctaactgctttgttctcttgccatttctgattctgctgttatgatactgatggaatcctcattcgccgctgctaaggagtttgagcaggactagagaggagacgtcagttcttcctcctccgctcagtgcgaccattgtccctgtcccccaactctgaactcttagaacaattacgatcactgccactccccgctcattntttctaaaggggaaatatccatcttcttgttgttttgtacccgtggatactttagcatatttctcatactactangagtgtaggtaaggagtccacacacgagtttgtaaacaccatgtgtaagggagttcaccaacgtga

SEQ ID NO: 2335 - DNA, 454 bp, Zea mays
  unsure (1)..(454): unsure at all n locations
ntattatattaaaaagattcaatcatgcagcaatgtattgtggtctataaactgagaaaaataaacttcaaaaggtaaacgacatacactaaacaaagaaagttaaattatatccaaaagtttcagaatgcattcagcaaggtaaggtgaaaagattgaataccaagaatggtacattgaaaagtttcagcaatgcattcagtaaagcaaagtgaaaaaatggtatattcaaaaggttcggtgatgcattcagtaaaataagtttcagacttccatggtgcattaagtaaagtaaggtgaaaaaaaataaatataaaaaatggttcggtgatgtattcgctaaagtttcagacattcagtgatgcatcaataaagcaaaagtgaaaaatggtatattcaaaagggttggtgatgcatttcagtaaaataagtttcagactttcatggagcattc

SEQ ID NO: 2336 - DNA, 411 bp, Zea mays
agcttatgaagattcttcatcctaacatgagctagtcgggggtgccagagccaacccatgttagtcttggcaattaagcaagtgtcgagttcagctctatcaaaatctactaagtatagctgaccctctaacactcccttaaatgctactgaatcatcacttcttctaaagacagtaacacctatatccgtaaaaatacagttgtagcccattttgcataattgagaaacagaaagcaaattgtaatctaaagaatctacaagaaaaacattggaaatagagtggtcaggagatatagcaattttacccaatcctttgaccaaaccttgatttccatccccaaatatgatagctcgttggggatcttggtttttctcataggaggagaacatcttcttctcccctgtcatg

SEQ ID NO: 2337 - DNA, 480 bp, Zea mays
  unsure (1)..(480): unsure at all n locations
tgctacggcggcaatgatggcgcacagtggtggtgactgtatggctcgggcaggcggggtgaatggacagctcangcacagtgcgcggtggcgcaaggcgccaaaccgagctagcaagcgtgttaatggcgaagcgatggagcgcacggcggccggcggtgatcgcgtcgatagtttggtcacgggcgcgaggaaggggctaacaagcggtgcccgcttgctatagagaggatggttgcgagggagcgagggcgagcgcggctgacgggtggggccgggctgacagcgacggagggaggagcgcgagcgcgcgagcggagatgggccgtgtgggccgcgatgggggggagaggagcgcggcgcgcgggagagaggagagaaggttgggccggatttggcccatccgangggggatnttcctttntctatttctatntctattttctttatctnctttttcttttgaacaaatacttagct

SEQ ID NO: 2338 - DNA, 381 bp, Zea mays
  unsure (1)..(381): unsure at all n locations
agctntatcaaatggacatgaaaagtgccttcctcaatggaccaatcaaggaagaggtctatgttgagcaacctccaggctttgaatatagtgagtaccctaaaccccatgtgtataaactctcaaaggcgctttatgggctcaagcaagccccaagagcatggtatgaatgcctgcgagattttctaatcactaatggcttcaaagtcgaaaaagccgatcctactctctttgctaaaactattgcaagtgatttgtttgtatgccaaatttatgttgatgatattatatttgggtctactaacaaatccacttgtgaagagtttagtacgattatggtacagaaattcgagatgtctatgatgggggagttgagatatt

SEQ ID NO: 2339 - DNA, 481 bp, Zea mays
  unsure (1)..(481): unsure at all n locations
tccgcgatgggttaaaaattttggcagcagcacagtgcatatagctatgaatgctgtggtaacttcacacctactcgtctgtttatatagtgctgcaggtaagaaagcgaagcgccaggatttttacaccaggcggacacctgcttgcactcgttgtacggtggaccgcagagaccaaacagtaactctgcaaggtgggaccgctacgcgctgggaaattgaatcgtttctcgacaacgagctcagggaaggtgttttttggaccttcggctccccgaagcttaagagacttntttcacggatcaagctcgttacgaaaaatgatctagcaccgcgaaaggggctactgttgggtctatgcttcgtcgccgaaggtcttatangaagaagcggtcttcggcttgagctgtttgtataagatgggccgagggttctcttcgtgaagcttcggcattacaaaccgacttanagatagaatgac

SEQ ID NO: 2340 - DNA, 447 bp, Zea mays
  unsure (1)..(447): unsure at all n locations
agctntgggaggaggtaggttccagaccgtgtatgccactggagcaccaacgtttgaaaccttacccctgaggatcatttcaagtcggctcaccaagtctgcagaaggaattctcctattggtaactcgagtcgagtcggctagccctctatacagatatgccggataggccctgtctttcagtggctgaatgttcttgaaaacaaagtcagtgaccacagcttcagcagtcagacctctctcttttagcaatccaacttcagtcagcaacacacctgcctcggccacttcctgatctgtgggagactcagtccaactcggagcgcgaacgtctggctgtcttcccgaccgcgaggggagagaatntccataattatcaactataaaccactctagacgccaccccttaatgctatctttgaggggaatctcaagatactcagtctt

SEQ ID NO: 2341 - DNA, 464 bp, Zea mays
  unsure (1)..(464): unsure at all n locations
tgtgatttatccaatttaaaacaagcaccatctcttaatatagantttctatggataaactcaacacacgagatggcattagtagcacaagcactagtttcttatttagcaaccctttatatgcgaaagacaagcgtgttgctaaaaatagagaaacctcataatatggactaaatttcccttgagcccttaagcacaatatattttgaatgatatggataatatgcatggttattcaatgaagtctaaagggctaacttaatccatattatggtgagtgtctaatatagaagaatcaaatccaaattaactagagagagagtacatcacatagttttgaatttgttgaccatatgataatattcatttatcttccaattggacctttatttcataatcaataactgatgtatatcctcaagtgcttctttntccttagtggctacacaagtcacaaaagagat

SEQ ID NO: 2342 - DNA, 331 bp, Zea mays
  unsure (1)..(331): unsure at all n locations
agctttcactcccaacaatgtgcctgtcttctaaactntgcccagatatgaggatctgagtaaacaaggcgtggttcctttggagattttacaccgcagattggttaaaaagggaaacaaggcagtgccttacgtgcttattcgatggagtaacattcctcaggaatcacccacatgggaggattactatgtgctccgtcagaagtttccggatgcaagtgcttggggacaagtagattctgtggagggggcaaatgtgacgacctccgaggttgagacagttgtgacggaggtatagaaagctgtattgtattcataatctgcggtgggc

SEQ ID NO: 2343 - DNA, 476 bp, Zea mays
  unsure (1)..(476): unsure at all n locations
tgaagcaccgntgatgaagaatatgctttaattctttcttagacacaatctacctcaggtacaatgatttggaataatcattacaaagatggtagagtttcttccaataaaaaggcaggatctttctggtggaatgatattatgaaaattgtaagcgccttcaaaggtatctccaaagcaactgttgaaaatggtcacttggtacagctatggtatgatctatgggacggtatagtgcaccacctatcatcactacctatcatatcctgaactattttcttatgtcattaacaaagatgtcaccttatcacgcaaaaatgatcaccacaaccctggagctatttcacctgcttatgtcagttaaggcctttgtgcagttccaactcctcatcaatgcactcccggacaaacaattngacagaatgttgtgataatggtcatataagtggngaacttcacattactctttccaaaag

SEQ ID NO: 2344 - DNA, 472 bp, Zea mays
  unsure (1)..(472): unsure at all n locations
agcttgtgaagattcttcattccaacatgtttcttntcggtgatgccagagccaacccatattagtcttagcaattaagaaagtatcaagttcagctctattaaaatcaactaagtatagctgaccctctaatactcccataaatgctactgaatcatcacttcttttaaagacagcaacacctatatccgtaaaaagacagttgtaacccattttgcataattgagaaacagaaagcaaattgtaatctaaagaatctacaagaaaaacattggaaatagaatggtcaggagatatagcaattttaccaagtcctttgaccaaaccttgatttccatccccgaatgtgatagttctttggggatcatcatntttctcgtaagaggagaacatcctnttctccccagtcatgtggtntgtgcacccgctatcaattatccaacttgagccccgggatgcataaacctacaaa

SEQ ID NO: 2345 - DNA, 489 bp, Zea mays
  unsure (1)..(489): unsure at all n locations
cgtgacctatgatactcagctntatagaggcgtgtccaaaccctccggggtacggtatgcggtcaccctgtgaccggctgacagccgtctcgacctacgggccctcgggttccgaggaagatgacgagcccgacttttgttggaatttctccggacttggtaaccctagtgccatgcgggacttcatgaccgcatgcgactactgcctttccgattgttccgacggtagccgcagcttcggcgacgaggactgcggcccaagtcgtgaatgtttccacgtcaatctagggggtcccggcgaaggcaaccatcttggtataccggaaaacggtgatccccctaggcctgtgcctcgcgttgacatccttcaggagctagctgtggtcccagtccctaccgggggtcaggactcacagctcgagcaaatccgcgagatgcaggccaagctcgaccagggagcangaacactttgagccgtccgccgggaca

SEQ ID NO: 2346 - DNA, 461 bp, Zea mays
agacttaaccctcccgcgagacctttctctttttttttctaaccataatgaatgcgatatcgaatgtcatacttgatgcatattcactttatttgttcccttgtatgatgtactgtttgtttcccaatttgaatggatgaacgtacgtatgcttgcaatcgcatagagaacgatccggtcgaagagcccgaagaactcgcaggagaagcccctgagcagcagtcggttggtggaggcaagtgtcccttgacctatctctgtcctattcattatttaattcacctcccgctctacacatttatgcctaaggattgacctagctttgttatccatgtccttgtttacctatctgggttggattattattgttatgcttatgctattgctcacactctaatcaatgaacatgatgagattatctatgatacgctgttttcccttctctaatatgatgtggactt

SEQ ID NO: 2347 - DNA, 351 bp, Zea mays
  unsure (1)..(351): unsure at all n locations
ntaccaaatggacgtgaagagtgccttactgaatggattttctttgaagaggcctatgttgaacaacctcccggctgtgaagatagtaagaaccctaaccatgtctataaactctctaaggcgctttatgggctcaaacaagccccacgagcatggtatgaatgccttagagatttccttattgctaatggcttcaaagttggataagtcgatcctactttattcactaaacctcttgaaaatgacttcgtctgatgccaaaattatgttgatgatatcatatttgggtctactaacgagtctacatgtgaaaaattcaacaggatcactgacacataacgtccacatgtc

SEQ ID NO: 2348 - DNA, 399 bp, Zea mays
  unsure (1)..(399): unsure at all n locations
agctnttgaacgtactaagcacatgccggttaaaatgggatctcgataacctagtacctgagtgaagccgggcgcacactntatccctcatgcgacctgagactgggtctcccgtgctagctatggtgggtacaagtgcggtcactacatggcggcatccggggttagtggagcattgtatgccaaggcggtgaggcctggacgcgaacggagaatcgatggggacaattgtcatgtgcggggtcggagtaccctgacatgtcgtgtgtttacgtttaccttgcaacgataaaactcgattcgaatcgtctgcttctcacagctaatgagactgcttgacccttgtctgcatcgagtagaagtgaatgatgtacatgaacaatttgtgataatgcttgt

SEQ ID NO: 2349 - DNA, 504 bp, Zea mays
  unsure (1)..(504): unsure at all n locations
ctatccaatactcaagcttctaaaggcagagcacattntaggattaacaaatgttcattttgagaaagacaggatctgtagcgcatgccaagcagggaagcaagttggcactcatcatccacacaataacatcatgacgactgacaggccgctcgagctcctacacatggacctattcggcccgatagcttacataagcatcggcgggagtaagtactgtctagttattgtggatgattattctcgcttcacttgggtattctttttgcaggaaaaatctcatacccaagagaccttagagggattcttgagacgggctcaaaacgagttcggcttaaggatcaagaaaattagaagcgacaacgggacggagttcaagaactctcaaatcgaaggcttccttgaggatgagggcatcaagcatgaattctcttctccctacacgccacaacaaaatggtgtagtggagaggaagaaccanacactattgtacatggcaagaac

SEQ ID NO: 2350 - DNA, 368 bp, Zea mays
  unsure (1)..(368): unsure at all n locations
agcttgtggaggttcttcatccncacatgtgctaagcggcgatgccacagccagcccatgcaagtcttagccattaagcatgcatctagaccggcctcttcttttgcaaaatcaactaaataaagtttgccgtctaatacacccttaaaagctagtgaaccatcacttcttctaaagacagacacatctatatttgtgaacagacagttatatcccatattgcacaattgactaacagatagtaaattatatcctagtgactctactaaaaacacattagagatagagtgctcattaaaaattggcaatttacctaacccttttaccttggcttgaatcccatcaccggatatgattggatcttggga

SEQ ID NO: 2351 - DNA, 356 bp, Zea mays
ggacctataaatctcagctgatgggatgaactcgagtcaccttaaccggttataaactcttaccttatgcttaccttttcctttaaacttgaatttaccttataacgctttggtatgtacaggatgtggaagccgagtagcaatgagccgaagcttggtggatgatcccaagcttatccgatggtgatgaaaccgaagacattggtatgaaaaaactctagagaaacttttgattattcttgtaaagacatttgaatttaagaatcagatactacttccgtaaattgccataccttgtatattattttacctttcgtccatgtttaactgcttgatgggacgaaacttgtattttg

SEQ ID NO: 2352 - DNA, 382 bp, Zea mays
agcttgcacttcgggtttcttccttgtcattcatatgtgttaaacgaagcttctcttccttgtcattcgtatgtgtaaatcgcgtacttgaaacacatatggttatgccgaagtgaaggttttatgaggacctccggcaaagcaggcccccaaaaagcattctatgagcaaatttaaatttctcattttgaagttcatgcttggcatagcatccaacttaactatgtgatcattttggtctttaatcaaagcaaggtgatcactaatagcatcaacatcaatatcgctatatctagtgcaaatagtaacatgctcaacaatagatgtagaagagggcaagcattcaattcctctattctaacaatcaaattaatattttcag

SEQ ID NO: 2353 - DNA, 298 bp, Zea mays
  unsure (1)..(298): unsure at all n locations
ctaagcttaacgaccaagtggacgagctcctcgagttctacaaggttcatgttctctgacttgntcctgttctatttacatgataattcatttccccacattacataattgaaacctaaggattgactagttgtctaatcaccttgtccttgattatcttttgcgttattatggttagctttatgctagtgctatactataatcaatgaacatgatgaaatacatttgtgatacgatgattttattctggatatgatgacgaatttgtgcactaaagggactcgagatgttcctgata

SEQ ID NO: 2354 - DNA, 437 bp, Zea mays
  unsure (1)..(437): unsure at all n locations
ntcagaagaatttgagccaaacagtcaggagctgtcttcttactcatcccaggcccttggaccaatgtttgaagccccagaccatgatccaatcccagcttatgatgtactcgtaaactaacatgattcactaagcttagcacagcataggtctaaggacatattcacgtagtcacatctacgctagaaggatgcattggtcaatttgaaaacagggaccaaattaagactgcacgtaactataaaaaataaaatgatcatcaacggaggcatatctggaggtaccttgtatctgtactaactagcgaaagggcctctagccaagtaggttaggtggtctgagtagtactcctcaggtctcgagttcaactccccatggaagcgaatttcagaatatgggttaaaaaatcctcctcatctgtcccacatcaaagcac

SEQ ID NO: 2355 - DNA, 447 bp, Zea mays
  unsure (1)..(447): unsure at all n locations
agctnnttgcatcaggcttcatatcttggtctttcacggcccacacgaagatattcagccttatgattgcctcggnggtaagttggtgaagatagacttcgaagattttcagcacctccacgacgaagctgctcaagggaaatcgcagcccagctttcaaaaagcttcagtacactacgacttcattctcttcagggtgtggacaagtcttctccccttcgtcggcgctcacaacggacaaatctcggaaataccttcctctcatgttgacaagatgattctcttttatagttgatttaccataaactgaatggcttggtcgccagggacgatcttcggagtcttcaccaccgctgtccacatcataactgtcgttgtcaccagtatcctcagacaaaccttctagaatctccttgggtgatttttctgtgttggtcttcgacatcg

SEQ ID NO: 2356 - DNA, 444 bp, Zea mays
  unsure (1)..(444): unsure at all n locations
tgtgagcaatacaagttcagaagggaaaaagctgcttctgctgaccagccgaaacccatgctcttatgtgaggatataacagagcagaaggtgctattgggatcttaattgttcgaagagcaggagaaaaccttactaaggtttttgttcaacaataaagatgtttttgcttggtcagctaatgatctttgcggagttaacagagatgttattgagcactcgctcaatgttgatccatccttcagacccaggaagcagaggcttcggaagatgtctgatgacaaggccgaaggtgctcggaacgaagtgaaaagactcctcagtgccggagttattagagaggtaaaatacccagaatggttggctaacactgttatggtgaagaaggccaatggtaaatggagaatgtgtatcgattntactgacctcaataaggcctgtctg

SEQ ID NO: 2357 - DNA, 361 bp, Zea mays
agcttatctccagtagtctacttatccttgtactaatattcaaattcaactatgtaaatagtacaatttatataaaacagtcgtttaggtgactatataagtgtcattcagagtgcaaatgacggatcacgttttctcttgtgacatcgatttggcacggctacactgtaaaggtgaacagcgaactgcagaagccaataataacaacaattataaatggtgcctcaatagcaaaatgtgtgcacaacgatcccagataacgggcacaggaatatggcaccagatgaaactcatgacgagagaacatgcacgacgcattcgcgacattcatgtgtagtggttacaacaccacactgatatg

SEQ ID NO: 2358 - DNA, 427 bp, Zea mays
  unsure (1)..(427): unsure at all n locations
tccttcgcatatcacggactgcgacatgggtattcatatgtttggntggtacgatcccaacaatctcccagcgtctttctggtgaaaccacattttagaaaaagatggtcttgtgtttcctctttctaccgtatgcagttttcacacgtgtatgagtccagttacatggtccttgtgagcattgctctagtgtttagtctatcatgcaggagtagccaaaagaaaataaagtttttgtttcggttggcatttggctatccagatttgggccattttagcaaaatcccactcatctggtgtgcctatcaattccacaagttgaagcatgttggtgagtgattgcaatttgagagtaagcccttagcatacatgggcaggtgtaatacggtttcaatctgggggcatattcacatgtcataatggtata

SEQ ID NO: 2359 - DNA, 375 bp, Zea mays
agctctatggtagaagtcataatatgaccctaataataaactcgaatcacttatgtacccctgtgataccagaaaccctaattaaaaccctggaaaaccctaaaaccaaaccctaggggcttatatgcaaaattggtccacttttggactaaagtgcaaaaaccaagccaaataagtattttaagtcctttggttcacaaatatgtggacttgaaagcaaaaccctgagatttggacttaagtgcaaaagagccacactttttctcaaatgcttaagtctgattttcagtgatattggctcaactttggagctctacatctttcaaattattgcgaatttgccctatgtcaccacatcaactatgtagatctatc

SEQ ID NO: 2360 - DNA, 281 bp, Zea mays
  unsure (1)..(281): unsure at all n locations
taatgccggaattgccatcaaggaagctccctcactcttctcattcncncattgcctcatggcaaagggagatgctaatgtaaactacaacgcgggagggaatcatagggtgttggatagtggatgtactcaacacatgaccggngatatgaagatgtttacccacatgagtgaggaagaattgctcaaattatgatagtatcacatttggagataatcgctaaggaaaggttacaggttngggtaaaattgcgatctcaaatgatcattctatatcaaat

SEQ ID NO: 2361 - DNA, 358 bp, Zea mays
  unsure (1)..(358): unsure at all n locations
agctntaagactaagaatcaaaaatagtgaatcaaacaatctgtgtgtccgtttttaagttaagttacgagaatccaagatatttaattcactcctaagagagcaaaacctagtctcatcgaggggttttgtgaagatatcggctagttgattttcggtgctcacatgaaacaattcgatatctcctttggcttcgtggtctctcaagaaatggtgtctgatgtcaatatgtttagttctagagtgttgcactgaattgtttgcaagttttatggcactctcattgcacacaaaagtggaattttttaaactcacaccaaatctctagggtttgcttatcataacactggcacacatg

SEQ ID NO: 2362 - DNA, 414 bp, Zea mays
tggaaggttcttcatacgcacatgtgctaagcggcgatgccacagccagcccatgctagtcttagctattaagcatgcatctagaccgacttcttcttttgcaaaatcaactaaataaagtttgccgtctagtacacccttaaaagctagtgaaccatcacttcttctatagacagacacatctacatttgtgaatagatagttataccccatattgcataattgactaaccgataacaaattatatcctagagactctactataaacacattagagatagaatgctcattagaaattgcaattttacctcacccttttaccttgccttgattcccatcaccgaatatgattgaatcttgcgaattcttattctcgacgtatgaggtgaacatcttcttcacccccgtcatatg

SEQ ID NO: 2363 - DNA, 442 bp, Zea mays
  unsure (1)..(442): unsure at all n locations
agcttgaaccgaggacccgtgtcaccggattagcgtaaccgtgctcgccggagttctttccccgccggcgcacgtggaccgggtaagcctctgcaccatttcccaattcgttgcgcgcatggcctctacatcaccccgtggagctcctcgtgcaccttaattgaactataccgtcgtgatttggccggaccaggaaccgccgacgacccccgccgcctgtgctcgtggccagggtagctccggccacctccgacgccgacccgcacaccgtcgtgaccgtcgtgacctcccggacgtcaccaaccaccccgacggagctctactgccgccggtaagcctcgccgccgtaatctatgccgcgggtactgtttaagtcagccagggagcgcgggttagattttggttaggtccagngggttttgtgcaatgtcagtgacccatg

SEQ ID NO: 2364 - DNA, 471 bp, Zea mays
  unsure (1)..(471): unsure at all n locations
ntcagagaaattcgtgaacaaatgagcacgaggatccattttgcatcaggtcggcatccggagtcaaatggacttgttgaaagggctaatggcatcataatgacgggaataatgaagttaatcttcaatcagcccatgggaaagtggccagatgaattaatcaaagtggtgtggagccacaacacaacaatatcaagatcaacaagttttacaccattcaaattgttgttcggtgacgaagcaataaccctagaagaagctaaagcgggatcaataacaacaatggcttcggcagaagacgaagctgattattctgtggcaaaagatgctatagaatggatcagacttcatgctgtcgagaatatcaacaaatatcaagctgaaacaataaaatggcgtgacagaaaggtttggctaataaatattaagccaggacacttggtacttcngagagtcgcctacccagacaca

SEQ ID NO: 2365 - DNA, 195 bp, Zea mays
ttccttccgaagttataaccctcatggatgaacctcttgagaaggataaaatcctgctctccttggctgaaaggttaaaatttagcgaagctaggcttgctagccttttccaagtagataaaaaaatcaaggagactcaaaagatacaagagaaagatgccaagcataatgctgatctacaatatgcactatcta

SEQ ID NO: 2366 - DNA, 475 bp, Zea mays
  unsure (1)..(475): unsure at all n locations
taagagactnttttcacggatcaagctcgttactaataacgatctagcaccgcgaaaggggctactggtgggtctatgcttcgtcgccgaaggtcttcaagggagaagctcaaaagatacaaaggttgacacagcgccgaagctgtgaagcaggaaagcttcggcatgttcgcagaaaagggaaccgacttaaagatgaaaaggccatttagacctcgatagagtgctatagaattatcaccaaatgtaaagggcatgtatgtaattttgtatgggtcgtaccccgtgcctataaataggtgaacagtacccccgtactgttcacgtggacttggcatttgcttttgcgtcacacttgtattttcatctccttccaagccgaaggtacatttataattcgatattggttctatttctctatgatgatatataaagttaatggataatgtatatgattatcatgctatctttatgt

SEQ ID NO: 2367 - DNA, 424 bp, Zea mays
  unsure (1)..(424): unsure at all n locations
agcttgcatgacaaaaatgtgaatgccatatatctgactcatcagaaaaattaacagaattcaccattntatttcacacatcatgcagtgataagcggaacaagcctctacagtcatatcctttaccaacaaaagtaccatgtttcgacacaacacatttatttgattcaagaacaactttgtatccatctcgacatagcatagaagcactaacgagattcttcgtgatagagggcacatgctgcatgctcttcaatgacaccgtctttcccgaagtaaacttcagaatgactgtaccaacacaagaacatgagcacgcgacccatttcccattaacaaggcgccagacctnccgacctggtaggaggagaacatagaggcatcagcacacacatgaatgtttgaccactatccatcaccactc

SEQ ID NO: 2368 - DNA, 468 bp, Zea mays
  unsure (1)..(468): unsure at all n locations
agcttatgaagattcttcatcccaacatggtctagtctacggtgccagagccaacccatgttagtcttagcaatcaagcatgtgtcgagctcagctctatcaaaatctactaagtatagctgaccctctaacacacctttaaatgctattgaatcatcacttcttctaaagacaatgacaccaatatcagtaaaaagacagttgtagcccatttgacataattgagaaacagaaagcaagttgtaatctaaagaatcaacaagaaaaacattggaaatagtatggtcaggtgatatagcaattttacccaaacctttgaccaaaccttgatttccatccccgaatgtgatagctcgttgggaatcttggttnttctcatatgaggagaacatccttttctccccggtcatgtggtttgtgcacccgttgtcgagtattcaacttgagcccncggatgcataaacctac

SEQ ID NO: 2369 - DNA, 474 bp, Zea mays
ggaccgtcgattcctcgaagctcggaaatggatcgcagtctattcgcgacgcacagcgaatacaaacaggcacaaacaaacatatacttgcataagaacattacaccatacgagataaaatattataaaagcgaacaatataaaatagagagcgcttctacagttatgcgaggaaaagaaccacgatactcgaagctacggtcgaggggttagcgcgtttacgttaaacaagtactaattagaacatccaattcaacataattatattaattgatattaatcaaatgtaaattaatactactacttagttttgactaacttactattttaatagttgacagttaagcaagtaacttaatgaatatgagcgattctaagcgagacgaattaacgacacacgacgtgcaaacacgatgtgcgcaacgcgcggacacaaacgacttagcgcgcggacaacgcgtgatacgcgcgaac

SEQ ID NO: 2370 - DNA, 360 bp, Zea mays
  unsure (1)..(360): unsure at all n locations
agcnttgacttcatctatattgtggattgcttttgaatctgtccaatttccttcggcttttctggcagcctcttgacttccatgaatagcaataggcccttattccgaaggtatcttcatgcatagatatgctgggtgaagtattgcttcgaaagcgttgagtgtcccacggccaatgattgcattgtaggggtattccatgtcaacaatgtcaaaaacaacctattcagtccttgtattgtgaacaaagccgaaggtaactggcattgtgattttaccaagtgctacgatctgctttcctctgaagccacatatgggatgtgtagcatcgngaatcttatcttctggctcttgcatttc

SEQ ID NO: 2371 - DNA, 454 bp, Zea mays
gtgaccttagatactcaagctgtcatacctgtcaaacaacagcacatgccagcacagttgcttcagaccataccagtaacttggcctttcgcgtgctggggattggatatgattggacccttcaagaaagctcaaggaggttatacccacgtattggtggcaattgacaaattcactaaatggatagagttcaagcccattgcttctttaacctctgctaaggccgtggaattcatacaggatataatattcagattcgggataccaaacagcatcatcactgacttatgatccaacttcaccagctcagaattctttgacttctgcgagcaaaagagcattcagatcaaatacgcatctgtggcgcatccaagagccaacgggcaggttgagcgagccaacggaatgatattggaggcactcatgaaaagggtcttcgataagaatgaaaaat

SEQ ID NO: 2372 - DNA, 248 bp, Zea mays
  unsure (1)..(248): unsure at all n locations
agcttcaacggtcagaatccaacggcagtgatgactgtggcggnggcaccggacatgtctggtgtgcaccggactgtccggtgcgccatcgagcagacagcctccaccaacggtcaagttggtggaggctgnctgcncgattgcgcaccggacagtccggtgctcactatatctgttaggtgcccccgcttcgttttcactgccgttggattccgcccgttgaatcattcatacacgctggtcgattc

SEQ ID NO: 2373 - DNA, 483 bp, Zea mays
  unsure (1)..(483): unsure at all n locations
tggtgatttcccaacagcccgtatgaaaataaggggcataaaagcatggcagctcaataaataatcaaccaaaatctncatgtaatgcctcctcggcaccggagaagagcgatggccgatgagcagcgcaacaacgatgaacttacggaagcgatggctgatgaccttgagtggcttgtgaatttcaagctaaaacatgtaaactagttggacttcttacaaagtcaagttttataaaattaaataaaaagtcaaacaccttgctcaaaaggttacaacacgtggtaacttttaatgttgatctcaaaagagtaataatgaaaattagaaaataattacaatcacggttcttttaagagttcccaagtcccaatggtggagtttccaatagtccaatcccagctgtacaattggataatagtcggttngcaatggataacagaagacagaatcactcttgtagntggtttacgttattttggt

SEQ ID NO: 2374 - DNA, 335 bp, Zea mays
  unsure (1)..(335): unsure at all n locations
cgcaagctttgaaattgaaacagctgatgactctggaataggaccaaaagcatcacatgaattagcatgtcgccaagtgggtgggccgcttaatttgagttacaccattcgtgaccataaaaactatttgcgtggcaagcgacaacgagagatggtatatggtcaagctggaagcatgctcaaatatttccaggataaaatggtagagaatccggcgttccaatatgcgacacaaatggatgctgaagagaagattgcaaatatattttgggctgatgctagaatgatngccgattatatacactttggtgacattgtttcgtttgacactactt

SEQ ID NO: 2375 - DNA, 346 bp, Zea mays
  unsure (1)..(346): unsure at all n locations
tcctcgactaagtcggagacagggcctcatggactggtgaaagtatgcgtaaacggcaaggccgaccgagccgagggactcctacgcccccacgatacggatacctcactcatcaccttccgcgagaagcaactctcgcccgcacaaacatccctgttaccgacggaaagtccagaggctcggaataaggggaaaagagacgcagctntgcaagtgcagcgaaggtgtgttttctggcctcaacggccgcagaaggcacgcgctacaagacgatctgatcctgcaggctcgggtcttcacgctgaagggggtcgtagcaccttcggcatcgacgacgtcttcagca

SEQ ID NO: 2376 - DNA, 282 bp, Zea mays
ctatgaagacagtgagtaccctacccatgtctatgcgctctctaacgcgctttatgggctcatactagcctcaagagcttggtatgaatggcttatagattttcttatcgctaatggcatcaaagttgtgcaggccgatcctaccttattcactaaaactctcgaccatgattagttagtatgccaaatgtatgctgatgatatcatatctgggtctactaacgaacctacatgtgaataatttagctcgataatgacacacaacttccatatgtcattgat

SEQ ID NO: 2377 - DNA, 445 bp, Zea mays
tatgaagagtcttcattccaacatgggctagactgtgttgccttagcccacccaagttagtcttagcaactaagcaagtgtcgagttcagctctatcaaaatctaccaagtatagctgaccctctaacactcccttaaatgctatagaatcatcacttcttctaaagacagtaacacctatatcggtaaatagacagttgtagcccatttgacataattgggatacagaaagcaaattgtaatctaatgaatcaacaagaaaaacattggaaatagtatggtcaggtgatatagcaattttacccagtcctttgaccaaaccttgatttccatccctgaatgtgataactcgatggggatcttggtttttctcatatgaggagaacatacttttcttccctgtcatgtggagtgtgcacccgcttgtcagtatccaacttgagcc

SEQ ID NO: 2378 - DNA, 417 bp, Zea mays
  unsure (1)..(417): unsure at all n locations
agctnttagagacatgagagatttttagattacatcaacattcattaatccacatggatatgccgtttagagataagttgatcaaacaagcgtcatgattgtaggagaaaggggtatgagactaaccagaaatgagagattcaggcagatcaacatccgatacttgagaagggttattaaagataactagataacgaggcagaatcaatgtaggatccggggatttggatgataagccctaacatgattcacaaggaaaatgatcactatatcgaggtgaaaagagaggtcatcaacctacatggcttctaggttgagcagaggagaacttaatgaggattttggacaaggttcccaaaaaagaattggaggctagatatggtttgcatgaatagatcagtaaccattnttttgaca

SEQ ID NO: 2379 - DNA, 437 bp, Zea mays
  unsure (1)..(437): unsure at all n locations
nnttgctctaganatcttgtaagccccaaaatagagtggtttatccctaatcaagtgtgggttagtgctttggaagggagataagtttatctagggaagagataaagttgcttaagaagttttaagcttttggatgagatataagttggattaattccctggtttacctaagtgaattcaaattggtcactttaatcgagcgataagaaataggtgtattcttgtcatgtgctttagttgtagtgtttctgttctccacctctttgtgatagtttgcattacatggcattcattcttatatatatacctatatggttatatttagaaaacggagaagagggtgaagtgactgaagaaaagacatcaccacctttggaatctcaggcagagacttggctctacttcgacatctgcgagtccgagcctgactcacctac

SEQ ID NO: 2380 - DNA, 367 bp, Zea mays
  unsure (1)..(367): unsure at all n locations
agcttgtaacccctactacgagctcccttgtgcaagataatataagcctcatcccccctctcatgtttcatcttgcatcaacccatctgggtagggacacgtagcatcaaattcactagtcggttgagggtccatgcaggtccaaaacgccgataattattacaacaattgactataaaaaaatagcatacagagatatatatactatagtaagatgatatcataattnttagctaataattttataaatcatacaataatatcatcatatattaagagttttttatattttggtttattccgtctattctggtataaaggttagcaaccgaacctaaaactacgaatagaccgacaattcagtcta

SEQ ID NO: 2381 - DNA, 422 bp, Zea mays
  unsure (1)..(422): unsure at all n locations
ntgtgtagaattcgcgagaggattagatctcttgagtgtgtctagaattgaatgcctagctcttgtaggtggttggaagtgtgaaaacttggatgccatgaatggtgggtggttgggggtatttatagccccaaccaccaaactagccgtttggtggggctgtctgtcgcatggtgcaccggacagtccggtgcacaccggacatgtccggtgcgccagccacgtcatcaaagccgttaggttctgaccgctggagctctgacttctggacccgcctggatgttccgagtcgcncattccatctgactcaatattcactttctttacgcattccctcatctagtctctatatcaatctaccagcttcactggtcgagctctctgattcttcatactataatatataatcatataattatctt

SEQ ID NO: 2382 - DNA, 364 bp, Zea mays
  unsure (1)..(364): unsure at all n locations
agcttgtgaagattcttcattccaacatgtgctagtcggcgatgccagagccagcccatgttggtcttagcaattaagcaagtgtcgagttcagctctatcaaaatctaccaagtatagctgaccctctaacactcccttaaatgctattgaatcatcacttcttctaaagacagtgacacctatatcagtgaaaagacagttgtagcccattttgcataattgagatacagaaagcaaattgtaatctaatgaatctacaagaaaaacattggaaatagaatggtcaggagatatagctattntaccaagacctttgaccaaaccttgatntccatccccgaatgtgatagctcgttgggatc

SEQ ID NO: 2383 - DNA, 462 bp, Zea mays
  unsure (1)..(462): unsure at all n locations
tgtgaaggttcttcatccncacatgagctaagcggcgatgccacagccagcccatgctagtcttagctattaagcatgcatctataccggcctcttcttttgcaaaatcaactaaataaagtttgccttctaatacacccttaaaagctagtgaaccatcacttcttctaaagacagacacatctacatttgtaaatagacagttatatcccatgttacataattgactaactgatagcaaattatattcaagagactctactaaaaacacattatagatagagtgctcattagaaattgcaattatacctaacccttttaccttgccttgattcccatcaccgaatataattgaatcttgggaatccttattcttgacgtaagaggtgaacatcttcttctcccccatcatatggtctgtgcattcggtgtcaataatacagcttgaacccccggatgcgt

SEQ ID NO: 2384 - DNA, 355 bp, Zea mays
agcttgagcaaccgtccgggtcgagctgtctctactgtccaccagacagacaacctctggagcaatatcaaagatagccttcccattcaaccatttatcaaaccaaaagagagtgctagttccatctccgaccacatgaaagaccgaaagattgaaaaactgtctcacttgctgctgaataggaagactcattccctgccaaggtctggacggatcggttctttgcagccataaccatttcacctgtagagcccaacttttgaattgtaaattagaaactccaagaccgccatactttagaggcctagttactatctcccaaggaacaagacagcttccaccattaacattcttt

SEQ ID NO: 2385 - DNA, 472 bp, Zea mays
  unsure (1)..(472): unsure at all n locations
tcatcccatttgaactctgtgcctttctccagtagtgatgttagaggcttcactaacttggagaaaccttcaataaatcttctatagtatcctgccaatccaagaaaacttctgatcttggacgcatcctttggttgtttccaatctagtatctcacttatctttcctcggtccactttaattccaccatcggtaacaatatgccctaagaaagcaacttccttcaaccaaaaatcacacttagagaactttgcgtacagttggttgtcacgaagtttttgtaggactagccttagatgatcttcgtgtgcttcttcattcggagaatatatcagtatgtcgtcaatgaatacgaccacaaactgatccagatatttcatgaatactgtattncatcaagtcataaagtatgctggtgcattagtcacgcccaacgacatagaccaaaactcatataatccatatctcgtcg

SEQ ID NO: 2386 - DNA, 390 bp, Zea mays
  unsure (1)..(390): unsure at all n locations
agcttcttgcaatccacatgccccatatttataanaggatcacgatgatcatgaacttaggaacgtttgaggtgcttttaaacggggttctaggcaaacactttcactggaaacgtggtgtcagacagggtgatcctctatcaccccttctctttgtcctagtagctgaccttctgcaatatattgccaacaaagcaaaggaaactggtcttctttgactccctctttagactggctgcgaacaagacattcacattatacaatatgcagatgctccggtcatggtaatggaagcatgcccaaaatagttattctttctaaaggcgattgataatttctttgcaggatcaactggtctccacgtcaattatcataaggtccacatatata

SEQ ID NO: 2387 - DNA, 459 bp, Zea mays
  unsure (1)..(459): unsure at all n locations
tcagtatgaaactcaaacacaaacctttgttaactcgtgttacaaagagagtttatttttctcaatgcaatatatgacagccaaacttattatgagcagaataccatggtaaaattagcagtgtctgtctaacaaagaaggtaataactacctgacctttctaaaaacaagcttcagtatgaaactcaaacataaacctttgcaaactcatgttaacaaagagcgtttatttttctcaaccttgcctagccttgctagtgtttaatcgttagtgcaatgaaaccatcaactgtccaaagaaatgtccttgataataaacatcaacactcgctatgttctccattgttcttatgaccacagaagtcaaacatggcatgctcattacacattgcatgcaatangatttcattganatgcaacataaataaagttcgcacaatttagcagataatgttaaat

SEQ ID NO: 2388 - DNA, 424 bp, Zea mays
agcttcgatggggcctctgaagctgttcttctctgtcatcattctaactattgtggtttgatctgacatgcctagggtggattcgtcctccgaagcccctagtcatctcacaaaacctataggcctcttcccttctttggcggaaatcattattggcccggatgtactcatccattttctgaagcagcttctccagagtctgagggggtttcttgtctacgtattgagccgtacgtcctggccgaagacccttgatcatggcctcaatgacgatttcattgggcactgtgggtgcttgtgctctcagatgccggaaccttcagacatacgcctgaaggtactcttatggtcttgtgtgcctagaacacggctagagcagagactggcctttttcgaaaccttgaaagctgggacaacatgtttt

SEQ ID NO: 2389 - DNA, 303 bp, Zea mays
  unsure (1)..(303): unsure at all n locations
ccttctccctcttttacnatattattatcccccccccccctcccatattcttatcccacaaatatgggccgacgtccaacaaccttaccacccccaaactttttacttttccggccgggaataaaaaaaaactccccatctttttaactttctcatcccacccctactctaactaaactccccacaaccccctctcacccacacaccccctaaccctaccaccatcacctcctcaacctccaacctcaaccccactccttacctcccatttctaaactaccccacacctccctttttccccct

SEQ ID NO: 2390 - DNA, 352 bp, Zea mays
  unsure (1)..(352): unsure at all n locations
ctatattcaagattaaccccccgctattttaatttgntatatcttaaactcatatcatctccacggaagctgctgatgttgtacgaaataaagaattattctatgcggagaagtccaagcctactacatggaggaaagtccaaggatggtaatacttatgttctttaagtaccactatcttaacattatcatgtgtcttgtgtgggcacatacaaataggaagcccttaagatgtctttaaatacataccattcccttagaatttccttctatgggagatacatactctcatttctatatggcaactacatgcttaaatgtgccaagtccactgctgtttatcttactatct

SEQ ID NO: 2391 - DNA, 464 bp, Zea mays
  unsure (1)..(464): unsure at all n locations
agctatattactanagatgccaacacaataacctttatgacagaacccacccctaattaagagttgtagtgcacagaggcccatttaggcgactcttgttatttttgtctacagcatatcctttttcaattgaaccttaaagtcctaagataagctatattgaccaaaggcaagccactgtaatttttaccaaatctttggaaaaaagataaaccaatgttgtagttcaaacctacactagaattcataaatagaatactaagaaacgatcatgaatgatggaaaatggtatatcctaaacccttgtaattgtcactaaatataataaggaataccaatctattgttatcttaacaaacctaactaagtgatagctaaacctaaagcctgctgacaaaaacctagtactcataactagtttctttttacatatgtataatctgctatatgactcatgtataatc

SEQ ID NO: 2392 - DNA, 127 bp, Zea mays
  unsure (1)..(127): unsure at all n locations
tactactagacccacacctcattggcatctacctccggctccgacacgccgttcgtcacttntaagcgccatgagcgcaagaagttagtaagaaccccctacgctaccctcgcattcctaaacatac

SEQ ID NO: 2393 - DNA, 162 bp, Zea mays
agtggcctgacctgttaccccaagtggtctgggtgctgaacacaactgagtgcacggcgactgggttcaccccttttccgcttctatacggatccgaggctatgactcccgcagaaataaaacatgggtcccctttgacagtcgcgtctgccgtccccacgt

SEQ ID NO: 2394 - DNA, 350 bp, Zea mays
  unsure (1)..(350): unsure at all n locations
tctgcttctattataattgcatctctttttcggtactgccccacagcttgagccacgctagaaccatccaaaatcaattcacacttctggatggcgtccgcgatagatgaagcatcttcgcactgcatcaattgtgtacctcgtgaatttgacataccaggaagtctgctagaaaaaagatcaagactgaatataaatgtcccttcctgcctttcacaaaaaaaatgtatgaacattgtgcgtgaactcttgacttttatcaacaatcacaactgctgaanagcaatacaaacctccattgacactgctgaagtcttcatctgagtcagatcccaagatactgacagagt

SEQ ID NO: 2395 - DNA, 197 bp, Zea mays
  unsure (1)..(197): unsure at all n locations
actatacactactcaagctggagagtgagaagtgagaaagaanagaaagccaagccaagcaaacaagagcatcaaggaactacatgaatcctctcacaagtgcaaatgcgctatagttgaatttgggactcttagcaaatcgatcacttgaattgtgtctttggagtgaagtgtattgctcctgtattgaatgtact

SEQ ID NO: 2396 - DNA, 233 bp, Zea mays
  unsure (1)..(233): unsure at all n locations
cgagaaaaacaagatctctatgataaacttgtagccgaagctcagcagaattcagatttgagaaaactactgaccaatcttctagaaaaatgcctgtgatttatcaacaagtgcattccacgatttagaaagattttttactctcgtggagcttgcagcgaanaatttaccccctcagctgaagatctaccgaaaacctttgaacacattgagggggagattgacgagctcga

SEQ ID NO: 2397 - DNA, 138 bp, Zea mays
tcatccacacacgaacatcatgacgaccgacatgccgcttgagctacttcacatggacctatttggccccataacttacataagcatcgacgggagtaagtattgtcctgtcattgcggatgattattcttgcttcac

SEQ ID NO: 2398 - DNA, 218 bp, Zea mays
ctgctgtatatcctttatttgtcaacattattattgtttgtactgcctttcggagggatacaaggtgcaacatctaacattatgccctgctgtctcttttgacggaataaatttaaaaatgctatgaccagtccactaatataaaaacatgctggtttatgtgtacttctagtgataccatttactggaggctcgttatattggtagtggaattttta

SEQ ID NO: 2399 - DNA, 185 bp, Zea mays
gagagacaaatcaatatggtccttcaaaaattttactaccgatggaacccacttttaccggcctcactacacaactgtggcccacatgatagatcaaattacaaataacctttagttatttctcatcggcactttaattatttcaattttcctgaccgaaaatgctgagtcctgagccgaaccac

SEQ ID NO: 2400 - DNA, 190 bp, Zea mays
  unsure (1)..(190): unsure at all n locations
tattatcacgaggttcgcagcgcagacgacatcttaagttccatttaaactcacgatccgaagttggagagtaaacatagatgccatcgtcgaacaccagcttgatatggttgagcgcacacaactccctatttttttattttagnttttatataaaaaaaatccgtttaaactcacacgtgttgtactt

SEQ ID NO: 2401 - DNA, 284 bp, Zea mays
  unsure (1)..(284): unsure at all n locations
ccttgaaactcagcttcgaattatgcttgttgtctatgaactctactacattagatgggaaattcagataatgtgatggctaataatcaacataaattgaatggtgaagcatatgctaaataaaaattgagttttgtatgtccttcagtgaagacatgatctcatttntaataacttatgcttcataccgtctagtatataaaagcggtaccaccttctggtcaaagaccaagaaatatatttaattttctttatcaccactagtactactgcgttggtatgcg

SEQ ID NO: 2402 - DNA, 268 bp, Zea mays
accttaaatctgggtgaccgagacccccacgatacaatctcttttttttttccccgacagggggggaacttgacattcaattgtggccctgcctaatacccgggactctcggcctttatgacaaccgcatattggcgacagagcgcacacaccccccgctggtcgggcaagtactcacaccttgactcaccgcacgattacgtggactcccactactacacctgcgacttatgcgcggaacctccgcgaatcatgcgggtctgttacc

SEQ ID NO: 2403 - DNA, 161 bp, Zea mays
aaatcgctcgttgtaaattgcgcaacatgcctattttatgtttgtactccacaccgcgtataatgctcagaaaaaggaactcagattttacacaccaacaatggcgacccttgcggggcgaagaccatataactgaggggggacctcgcgctcgaatgatt

SEQ ID NO: 2404 - DNA, 397 bp, Zea mays
  unsure (1)..(397): unsure at all n locations
ccactctacctaggctcaatcttgaattcgaaatctagttggcttggcttcaaagacatgcattgtcttgttgaagagtctacataccctctacatgcccactaacaaatagaagtcctcatgttacaagtactgcatataatcaccatgttgaagagttccggtgaccactaatgcctttaaattatcttgtaggattatcttaatataataggatacattgccggctgcccaaactgttgtgtttacacgaagatatatggtgagatactattcaaatccaccatgttacattcaacttgagggctctctctcatgtcactgttgggtgctaaagcatgtatccatttggcatggactatcttgntcattctgccaactaatggcttgcttaaac

SEQ ID NO: 2405 - DNA, 96 bp, Zea mays
atgtcaatattcaaaagtcaaattcttcactctgcgaacgaaaagcattagatcaagatgcatctgtagccatacgaaaccaacgggcaggtgagc

SEQ ID NO: 2406 - DNA, 236 bp, Zea mays
  unsure (1)..(236): unsure at all n locations
agatagaaatcttcttgctctctatgagacaatacaagaaatcctcttctccgcttgctgtgaataccaatgcccnctttggatatttcagcttctgggcatagtgttgagcttctcgttcttcttctttatagagatttgttcccgaagcatgacccataatatattcagtattttttcatagcttcgggagtaggagcggcagctttttcacgccaaaattgatctatagcttc

SEQ ID NO: 2407 - DNA, 167 bp, Zea mays
attattcacacaagaacatcaagacgactgacaggccactcgagctacttcacatggacctattccggccgatagcttacataaacatcgaccggagtaagtattggctaagtattgtggatgaataatctcgcttcacttgggtattctttttgcagcataaatct

SEQ ID NO: 2408 - DNA, 199 bp, Zea mays
ccttcaactcacttggaaatctcgatcatcgctgaccgactaagccactccacatgacttcctagtattagccaaaccagaccatatagtttatggtacctattttccggtggcactcctgttcaattatatgcaaaatcttgttaaccatcacggttacaaccataatggtaacttaccatttggaacattaatatca

SEQ ID NO: 2409 - DNA, 138 bp, Zea mays
  unsure (1)..(138): unsure at all n locations
tgctctgatacttccaattttgtataatcaactntttttttcttttgcgcagatccaggcgcgcgtgacatcacatcagttcaactatatgcctgaaagagaagttcattaacacaccactacctcacaaaacagctc

SEQ ID NO: 2410 - DNA, 257 bp, Zea mays
ttaaactcgttaaggaccattagactcctgtattataaaagatgacgcgcggccggaaatggcctatccccaaaatctggacgcagcgttgactatcccagggaatcgccatgtactacatgggagaaacgctgatagggtatatctcttcccgcggtctttacacgaaaattcctacctaagacctataagatcttggacggcctccaatgagcttggttaaagatcagaaaaaataatcaccacggacggaggtc

SEQ ID NO: 2411 - DNA, 83 bp, Zea mays
cttaaatgacatgatacgggaaaggttaaagaaccttgagatataccttcatcaattgacaccccattgtcacacaccggctt

SEQ ID NO: 2412 - DNA, 341 bp, Zea mays
ctctggctctatacagcccaaactataactctcattcttattattgcttcacggggcacttgatgaggattaacccgatattgtttcataacttctaccacaaacctgcctaaaggaaatcgtagcccaccttttaaaaagcttcggaagatcaccacttcattattttctggagtctggacagtcttcttctccgttatctgccctcaccatggatatatctcgaaaatatctaccctcctgtttcaaaatgactctgtccatagatgatttccgagaaccaatggcttggcccatggccatcatggaatctcacctcactgtctgcgcatactataact

SEQ ID NO: 2413 - DNA, 330 bp, Zea mays
ttaccgatccaccgatctgtcgatacacgcgtctcggcagttcgccttcttcacccgcggggctatataaacagacgaggtggtgagcagttaccataacattcattgctactacgccggtgtgctgctgacaaattttactgaagctgaagctctctgctttctatgcacttgctgcataagctttgaccaattgtccaatttgttgaatctagcttcgtctcacagaactaaaatggctaaagtcaagtctactgcccagagtacaaacgaaggagaagaagcttaaactactatacgacccctacttcagaaatgatgaaacgttct

SEQ ID NO: 2414 - DNA, 367 bp, Zea mays
  unsure (1)..(367): unsure at all n locations
tatggagagtcttcattccaacatgggctagtcggcggtgccagagccaacccaagttagtcttagctattaagcaagtgtcgagtgcaggtctatctaaatctaccaagtatagctgaccctctaacactcccttaaatggtattgaaacatcacttcttctaaagacagtgacacctacatcactaaatagacaggtggagcccattcgacataattgggatactgaaagccaattggtatctaaagaatctacaagaaaaacattgganatagtatgggcacgtgatatagcacatttacccaatactttgaccaacattgatttcatcccgatgtgatagctcgtgggatcttggtttctata

SEQ ID NO: 2415 - DNA, 140 bp, Zea mays
tgggatctcaattatctgaggagcacgagaaaactcttataatggttttgttcaacaacaaagatgtcttcgtatggtcagcccacgatctatgtggtgtcaacagggacatcattgaacattcgctcaatgtcgatcca

SEQ ID NO: 2416 - DNA, 169 bp, Zea mays
accaccggacacatagtatttatttcacatgagatgcgctcgaggtaagtcactgtgattgagaaatttatgccagaatttgattagaagagcctcgttctgggtttccaagcgaagaacccccagcccaccattcacttttctctgagtaaccgcattccaagcaatc

SEQ ID NO: 2417 - DNA, 334 bp, Zea mays
  unsure (1)..(334): unsure at all n locations
atgccttagtgagagctattaaggcttctagcttaatcattanaatgagaattattattccctctcttccttcttatttcttttatgcctttaacgcggcgttgaactacaagatagcttaataaattttcaaaaatttgcaaaaaatacagnggcatcttactggcgtataataactctgcctcaatatttggcgttaaaaaatgagtgattctctctgtataacattatcaaatattacggaagaagcggtgttttgaactacaatcctccttttacagtgagttattgtccaagacttattctttctagcatctagatgctataacatgac

SEQ ID NO: 2418 - DNA, 468 bp, Zea mays
  unsure (1)..(468): unsure at all n locations
tttaagtgacagatgaccaaaataatctataaattcttcagatntacgctatatctcttgactcgaacttaagaaacacatgtgtgatcgtcgttacatgtggacttcacgaatatcaaatgacacaactccattttaatatgagtcttctatatttgttggttggaggttagcatatcagatttttctgctctgttgtaacttgtgagggtagtcacttaaatgcttgcatgccattgataatgcatatgcttatatagataanaaggcagacataatgcctgaggctcccacatgagtatgggaaaggataacccgaacaaccttcctctgaaatgtgagatctgcttcaatcacgactggtgactatagacactcacttcacatgcacccgctgcttctgatatctatataatatactaacatgatggtggcagtatatcctgtgatcttatgctgcatcttata

SEQ ID NO: 2419 - DNA, 338 bp, Zea mays
acgttaatgtgaactctatgcgcctgataaaaacattccctaaccaaactatttagtccatatgggttgtgatggatgcggaacaccaaaatcgattatatgaaatattgagggcatttccctttcaatctccccctttttggtgattgatgcccacacaaaccaaagcaaatacaaagtgtagaaatgtaactagtttgtaatttgtcagatgtgcataagttactttgaattgaaccaaatgaaagatttctaaagatcatggttgcttgatctagttaacattttggaccacgtttgcccacttagcttgttttgcaatcttttggaaaagcttt

SEQ ID NO: 2420 - DNA, 384 bp, Zea mays
  unsure (1)..(384): unsure at all n locations
aacgacatatgaagaatacgaggtgcactgtgatcatncctcttaaagcatatatgacgaggggggattctangcatgccaccaccgacggtgtattatggtatgtgaaatgcctaacacagattatacgtccaattctatccagatcgtgtggatcaacctgtgtgaggtgcattcattgactcccttgagtacattatcatctttttgtgtcgatagggaaaaataatgaacataacagtgcattgggagtgaccgacaacatataccaacctgcctaaagcatgattagaggattattgtcctaaacnacacatgctatgtcacaaccaaagaattaaataggccaaaattcacattatattccactattaccaatctaga

SEQ ID NO: 2421 - DNA, 267 bp, Zea mays
  unsure (1)..(267): unsure at all n locations
aaaaaataacttatatcacgctgaanatcatggtatgcttaacagttagccctctccaagtaaaaaagaagatatgcactcttctgataagatattgtgcacgtccggtgatatgcctttcacaatagcttaatattactacaacttctaggcatattgctatgtatgtttaatggacatgaattcttcattctttttacatattattgaattgtacttgagtcctgacactgagaatgcatcagttacatggggagttggttggtt

SEQ ID NO: 2422 - DNA, 198 bp, Zea mays
  unsure (1)..(198): unsure at all n locations
aagagccaatgtttctatgaccagggagaccacgggacaaatagtatttatttcagatgagatgcactcaagttaagtcactgtgattgaaaaatttatgccagaatttgattagaagagcctcgntctgggtttccaagcgaagaacccccagcccaccattcactttcctctgagtaaccgcattccaagcaatca

SEQ ID NO: 2423 - DNA, 207 bp, Zea mays
ttataacttatcagagtgggtatacatagattaattgactcgtctcatgattttctgcgattattttttaaattcgaaagatatacttaaagtatattatatgttacacaatatcacaatataatttagatatagtgatgggttttaataataccaactgactaaatttataggaaagaaggcacataaattataaatcggaatcat

SEQ ID NO: 2424 - DNA, 156 bp, Zea mays
  unsure (1)..(156): unsure at all n locations
atctanttagagagaagaacagaacataacttgcttctcaaaacctaacacggtataaataatggatgtatgcgttgtggaacacgattttattgtaccacatggatcacatggttgtgtcacaactgatcttatttgcttgtgttgcatattaaa

SEQ ID NO: 2425 - DNA, 278 bp, Zea mays
  unsure (1)..(278): unsure at all n locations
gataattcctaagtgtctcttatacctagaaaatcanaccaccgtcctatggttgtgtataccctgatataactctgagcttttagatcataaatacccgctaaagagcatatatatgaagaattatatagagacgatctctctgtgaagaggtcgtctcttctattttttcaattaaccccttaagacctcttaagagaccactacaggaaacagcttctttgccgagtgtctgaagcactcgacanagcctgganaacactcgacgaatgcacact

SEQ ID NO: 2426 - DNA, 323 bp, Zea mays
  unsure (1)..(323): unsure at all n locations
gcacaacaatgcaatagtagtaaatgttgtggtcacttcacgcctacccgtctgtttatatagtgttgcaagtgggaaggtaaatcttcaagccgctcgcaccacctaaacattcgcccacacccactgaacggtggaccatattgcacgagaaggcgaatcaccagaccaaccatacccgtcgtatggtgggaccaccttgcactcggaatatttaaaatcgttctcgacaacgtgctcacggaanggtgttttcggacctttcacattccgaagcctaagagaaattttcacgggtcgagctcattacgaaaaacgatctg

SEQ ID NO: 2427 - DNA, 358 bp, Zea mays
  unsure (1)..(358): unsure at all n locations
tagtacaaattacaacatgttctacaggggaattggatttatttgctacttctaatttaccatttaaataattggtgacaccttttaaagtagaaatgggttcatgacacgtagatagttcaaaagaaagcatttcatttcttctaacttctaaagcatacgacttttgtgcttctatgaatntatcatgttcttcataccataaatcctcttgtttctctaagagtctatccttcttattcaaggcatcaatcaattcatcgatnttatcaatcttatttctatccacatccttgaacaagctagagtaatctatttnctcatcgctagactcatcatcactagaagaaacataagt

SEQ ID NO: 2428 - DNA, 270 bp, Zea mays
tccacttgcctttcctgagatatcaccacactccaacggaagtgtgtacactctcctggaagaatatcacagctgtcagagatgctcttataaacaaggacgtggcccttttataactaacggctggtgctaacaaatgatgcgggcaacggtttacccttcctttctttggatggaggcatgaccccaaaaatatatttggccccccaccgttgtagtgcccactggccaccccttttagttttcacgaacggttctttatgctaaaaa

SEQ ID NO: 2429 - DNA, 276 bp, Zea mays
  unsure (1)..(276): unsure at all n locations
actcggcgaacttcactactctgtctatgctatggctatactatggccgcgcccacggggtcgagtganggacaaggcatcgtctggttatatacccacccgaattcggtcaacggcggtaccgcggaggtcgggatgaccgcccaagccgcgtcgttcggagggtgttgatgaccctgcgcgctcgctggctgacatcttggacccacgccacagggaacggaagataagacgagcgcgagactgctgctgatgcgtgggcccataaagacagtg

SEQ ID NO: 2430 - DNA, 89 bp, Zea mays
ggatatgttgagggcttgtgcttcttcaaacaagaaattgttgggactacaagctaccgtatgcataattctcttacaacaacagctat

SEQ ID NO: 2431 - DNA, 365 bp, Zea mays
  unsure (1)..(365): unsure at all n locations
tgcagctacctccatcaatgatcaaacgacatgaacgctccttaatgagagcgtgtgttagaaacaacgtatgtcgctgattctgctctgccttcttcatttgtgcactaagcactcgctgtacaatgaggctctcataatgctctgcatcatctgcaccaatctgttctttcggtgggtccttattgcctgcatcatcagccgcaagcaaagcaagtgtagcttcatcccaatcactagcagaggaatacccaccatcgtcttttacaccaaaacacgctgattangacaatcacgctgcacgtgtccatagcccttgcatcgataacacagaacatctcttgttctacccgtggaggctactg

SEQ ID NO: 2432 - DNA, 66 bp, Zea mays
tgtcattggtgcgatatgatggatgatgggatgctatgccggatgatgtgatgatatgatgcttat

SEQ ID NO: 2433 - DNA, 247 bp, Zea mays
agctttttaagggagaacacattgggggactaacaaatgttcattttgagaaagacagggtttgtagcgcatgccaagcaggaaagcaagttggtgctcatcatccacacaagaacatcatgacgaccgacaggccgcttgagctactccatatggatctattcggctcgattgcttacataagcatcggcgggagtaagtattgtcttgtaatagtggatgattattctcgcttcacttgggtgtt

SEQ ID NO: 2434 - DNA, 53 bp, Zea mays
  unsure (1)..(53): unsure at all n locations
acatttangattaacaaatgttcattttgataaagacaggatttgtagcgcat

SEQ ID NO: 2435 - DNA, 222 bp, Zea mays
  unsure (1)..(222): unsure at all n locations
aaaaccacgggaaaaacacgcacanaggcacgttttttatcacaaaccacaaccgggggggataaaaaggaccaaccagcccttctgcataaaacaaacgcaacaactcacagaaacccaaacaaaaggaaacaacagacccaggcaactaaagaaaaagcagaaagcccaaaacagaccacaccaccaaacacaccaaccaagagacaaacaaaaaaaaac

SEQ ID NO: 2436 - DNA, 238 bp, Zea mays
agcttgtttccatggtaagtagcataggcaagtaaaatgcgaattgattctagcctagctacgggtgcataggtttcaccaaaatccaaaccttcgacttgtgaataccccttggccacaagttgggctttgttccttgtcaccacacggggtgatctcgttggattgcttggtggactcttgggtgtggcggccttggaacttgttcatcttcctcaccttgatcatgggaatctcc

SEQ ID NO: 2437 - DNA, 322 bp, Zea mays
tgagcgtgcacgtcgtgcataggaagcaatgaaggacaactctgatgcatttctcaagggcaaatggccccgttgcactcagtagtctatgtgtttcatttgaagttatgtaataatgaacttattattcggtattatgtattgtcgaacaatgatatttggtaatgaattaccttcaaattgatgaaaacgacataaatacgcaattgatgaaaactacatttaaagcaattgttgaaggcgacttctagcaattgataaagataatcaacacgctgaaagcaattgttacagaaaaagatttctagtagtgctcccacat

SEQ ID NO: 2438 - DNA, 241 bp, Zea mays
agcttattaatcaatcaaaacaatttgatcaggagaagctagaactgaattcgaagcttaaagccgaagtccagaccagctcagaattgaagaaagcattaacaagccttcaagacaaatgcttgaactttggcaataattgtattggacgattaaagaagatattttactctgttggagccagcagtgggaaatttaacccttcggcggaaaatttaccccaggccttcgatcatattga

SEQ ID NO: 2439 - DNA, 241 bp, Zea mays
tgagttttcgccaccggaaccatttgttcgtttttcacaacgaatatgcccaatccattactttaggtccaaaactcatgtttggggtggtttcgcgcaattttgtgctcgtacatcacccattcccaaaacgggtgtcggggtgcgtacaaagcacgagtttttttccaccggaaccatttcttcgtttttcgcaacgaacatgcccaatccactactctatgcccaaaactcatgtttg

SEQ ID NO: 2440 - DNA, 245 bp, Zea mays
agcttccctcttggttgtgtccgtggtgtccggatgagggctaagtcaccttcgtcaaactctttgcctttgatgacttgtctccaagtcttggtagctttttgatatctgtcaactgtggtgagggcctcggtctgttgtcttcgagcaagtctttgttcatggattcttcagtctctggtgtcaagctgttttccactcttggagatttacatttgagctcctattgcgtcattgccttcgca

SEQ ID NO: 2441 - DNA, 245 bp, Zea mays
ttctttcttcgaaggtttttggggcaaaaatattccaataggtgaaaatgagcatgcagatttgctagccaaatcagcggctcaggggctccccctaccttctgaagtattttttgaagcgataaaagcaccttcggttgagcttatggagagagcagtgcttactatttctccagtacacagtgaagactggagaactgaaataatatcttttcttcaaggaaattgtctttcaagtgacgaag

SEQ ID NO: 2442 - DNA, 339 bp, Zea mays
  unsure (1)..(339): unsure at all n locations
ccattcttgcggcgatttttctattcttcttcaatgatatattgagcggcggcacaacttggaatgagcacttacnacatgtggccgctgttctgaatactcttcgggtcaacactctgttcgtcaaacgctccaaatgcatatttggggccaactccattgcatacttgggccatgtaatatcatcaaatggagtcactatggatccagagaaggtaaacgcagtcacgacctggccgcaaccacattcagtcaagggattgagaggatttctcagactcgcctgttattatagaaaatcatccacaatttcggcatcattgcaaccctctgacatag

SEQ ID NO: 2443 - DNA, 244 bp, Zea mays
agcttcaagctcttgacaataaaaccacttcatctagttttaacaaagatgcaataatgcatgagtgaaatttttaagaggttaaactaggtatgaagcagggataaatgcaaaggacatgctttctcttccttttatacaagatatgcaaagattgtacataagaggaagatttaggtacatatgtaaatgataggaattagttttaccctttttgtacctttacttgtagacgctctctcca

SEQ ID NO: 2444 - DNA, 269 bp, Zea mays
ttcgagtagctccactgacaacttttgggcatctggcttggtatttgtgatgggtctgcgccacttagcgtttatgatcaatggtgagccaatctcaggcactttgctgctcttatacagagatgttgtcgtgcaagctttattttggatactttatgtaggaaatttgttaactatcaagctttggtggtcatgttactacatgtcaaaatatgttggacaggcccctggcaccctgttctcatcattactgcaagattttatctgtc

SEQ ID NO: 2445 - DNA, 239 bp, Zea mays
ttcttgggtttttggaagcttacgaacctggatggacggcctcccaacaagaaatggagttaagttctattgaaacatgatgagtgcattctcattttatctttctaattggcaaaggtataatagtgctccttaggtttcagaattgttttttatggtacaacaaacaacatacaatcaagagatttatttttcaagttccatctctaacctacccaatctttcttgggttttcccta

SEQ ID NO: 2446 - DNA, 238 bp, Zea mays
agcttttcctgaacaagcgccgcacttactgcagagtgcgaagctaccacatacagcagtagaggagcccctggcgctggtggagttagagttgttaaatctatcaaatactgtttcagttcttcgaaggctttttgctgagctgatccccattgaaaaacttcggctgacttcagcacttcaaagaatggtaaatttctctctgctgatctggatattaatcgattcaaagatgcca

SEQ ID NO: 2447 - DNA, 414 bp, Zea mays
tcaacacttgtgatattcaataagataaacttaccatgtcctgtataaataaggattcctcttgggttcttcctatggtgaatgaaaagggctctcgtcaaattgagattatattgatagttgagacaaagtataacaatatatctctttcctttttctattgatgaataatacaaaacacctattacaaaattgaaaatgttctctaagaactaaatatacctctttacatcttctatgggcagatcatcattgcggtatacttcgaagttcatccaagctcccccatatacttcatcattaaagattaaatgtcagcgaagacatgttgtgctcatagcatatgcctctcttgttttccctttcctctatactatagttcaatagatgatacaatgtgatatgacattgagt

SEQ ID NO: 2448 - DNA, 244 bp, Zea mays
ttcttgccttcgcttcagtctatcatccgcagtccaacggggtcgtggagcgtgccaatgggaaaatattcacagctgtcaaaaagatgctcctcgatgaaaaaaaaggcagatggaccgatttattaccggaggtagtctgggcgctaaacacaactgagtgcagggcgaccgggttcactcctttccgccttctatacggatcggaggcaatgaccccgcaagaaataaagcatgggtcccc

SEQ ID NO: 2449 - DNA, 280 bp, Zea mays
  unsure (1)..(280): unsure at all n locations
ccactgagagttatgaagcttgtctttggctcatcctctttcttcatccaaatttggtgatagcccgagtagcagtccaataagctcatgagttccgaagaagctgctgcatctattacggagtctattcttggtaaagggaactcatccttcggacatgccttggtgaggtctgtgaaatcaatacacattctccattntccattagccttcttcaccataacagtgttagctagccactctgggtatgttacttctctgataacaccagcactgagaa

SEQ ID NO: 2450 - DNA, 244 bp, Zea mays
tatcttctccttgtcctcatcaaccttgacatagaaccattctgatttccagcctgccggccatttgcttcggtagctgattacaggaaactttgcggttttccggtaggcaaaattgtagcaaccgaagttttcatgaagcccatcttttctggcctttgtttgataatgcaattcatgaactcgacagaaactgtcagcaaaaggctccactgcttggcttcggagggcccaaatataaacg

SEQ ID NO: 2451 - DNA, 352 bp, Zea mays
atatgtgtgacttcgattgtctgtttctttgcttggttcttcggtgggctcctgtcatatcaaacttatccgaaaattcaagtttaaggaaaggtaatcaaggttgattttattaccgacttgagatgacttaagcttcgcactaactagcttcgccccccttcgccatatttgcttataaatctgtccctatgcttcagctagctagggatatcaccaaatctactggtgataagcgacgtttggtctataacaatctatacgtgtgtgcaacagacttatgaaggcacagctgtccccgagaactagcgggcactaaataccatttcggtatactaattcaacataatac

SEQ ID NO: 2452 - DNA, 236 bp, Zea mays
agcttgcattgcatatttaaattccttgtattgcatctaggacttgtctaacctagttgagataaccgccaacaaagcgagtgaaaaagcttaacttaggtcaaacctgacaagtcttagtttttaagcttttagcacttaaattcttactttttatgcaattattggttcttgaaatatgcatgaggtactgcacttagggggagtattcaaaactcaaatctctcatgaaaacc

SEQ ID NO: 2453 - DNA, 327 bp, Zea mays
ctatgttgagcaacctgccggctttgaagacagtaagtatcctaatcatgtctatagactctctaaggcgctttatgggctcaagcaagccccaagagcatggtatgaatgccttagagacttccttatcgctaatggcttcaaagtcggcaaggccgatcctactctattcactaaaactcttgacaatgatttgtttgtatgccaaatttatgttgatgatatcatatttgggtctactaacgaatctacatgtgaggaatttagtaggatcatgacacagaaatttgagatgtctatgatgggggagttgaagtatttcttggg

SEQ ID NO: 2454 - DNA, 248 bp, Zea mays
agcttgtgaaggttcttcatccccacatgtgctaagcggcgatgccacagccagcccatgccagtcttagcaattaagcatgcatctagaccagcctcctcttttgcaaaatcaactaaataaagtttgccgtctaatacacccttaaatgctagtgaaccatcacaccttctaaagacagacacatctacatttgtgaatagacaattatatcccatattgcataattgactaacagatagcaaatt

SEQ ID NO: 2455 - DNA, 395 bp, Zea mays
  unsure (1)..(395): unsure at all n locations
ggcacacgctngccccagtggtcggctaagcatgtctgaatagctctctgataagtcgctccaccatttttgaggccgaacggtgagagcacctagagggggtgaataggtgatcctgtaaaacttaaaactaattgccacaaaaacttggttaagtgttagtgcaataggatcaagtagctggagaggagtacttgtgaaacacagaaaccacagagagaaacaacacagaagacacagtggtttatcccgtggttcggccaagtacaaaacttgcctactccacgttgtggcgtcccaatggacgagggttgcactcaacccctctcaagtgatccaatgatcaacttgaataccatggtgttcctttntcttatcactttttccgttagcga

SEQ ID NO: 2456 - DNA, 247 bp, Zea mays
agcttgtttgtggaatgaattgatctattataagcaaactcaatatatggcaaacattcctcccacaacctcaaattatccttcaaaacagcccgcaacatggtagataaagtgcgattaacaacctctatttgcgcgtcagtttggggatgacaagtagtagaaaacagcaactttgttcccaatttaaaccacaaggttctccaaaaatgacttaaaaacttagcatccctatcagaaacaatag

SEQ ID NO: 2457 - DNA, 362 bp, Zea mays
  unsure (1)..(362): unsure at all n locations
tctcacaactctctnttagaatggtgtgggaggtcttgagctccttataggacacttgaagggtttgtataattccttcaaggtcctaaacttctctttctttctttgtgcatgtagtcatcggcctcacccaacattctaacaagatcatcatatgaatatccatcatcatcaagatcatcaatatcatcatcatcatctacatcatttaaatcggttatgatttttaccttggcatcaccttttgccatgagacaacgaggagatgagaaaagtgaaggagcctccttgatagcgattcctgcatttagtttggatgaggaatcatcatcatcatcatccgagctagcatacgagatcca

SEQ ID NO: 2458 - DNA, 211 bp, Zea mays
agctttttattattccggtctactgcaatgccgactttagtccgagggtacctgttcacacattgtactacagaaatactgttaaatcctggttttgaggaccttcggacgccgaaggtccccaacagtagcccctcgcaatattaatttgtttgaaataataaatttagattgcgatatggacgaaggctttacgccgaaggtccgaaaa

SEQ ID NO: 2459 - DNA, 439 bp, Zea mays
ggacaacaccatttgacatttcacataaaatttctgagatcaagaatatttagttcattcctcaacatgcaaaagcgggtcttatcaagtggcttagtgaaaatatccgccaattgatcttccgacctcactccttctaaaatgatatcttctttagcaacatgatctctaaggaagtgatgccggatatcaatgtgcttggtgcgagagtgttgtacaggattattagcaattttaacagcactctcattatcacacaacaaaggtactttttctagaactacgccatagtctagaagagttcgtttcatatataaaatctgtgtgcaacaggcacctgcggcaatgtattccgcttcggcagttgacaaggcaacactattttgctttttggatgtccatgaaactagtgatctaccaagcagatggcattccccgg

SEQ ID NO: 2460 - DNA, 279 bp, Zea mays
ccggggatgatttttattagacctgctggcatgcaaccttgtgttcgttaccctcgagactactgaatttaccaaatggccttacaatggcgattggctgtcctggcattaaaaatgatatccataaaggatattataaatctgtgatagaatccaaaatttcagatcattaatgaccatcagtaatgaattgtcatttccaactaattatggttggactcaggaagttttgcacgctcctgacttgtgattaactgcatgtactgcatgcacaagttc

SEQ ID NO: 2461 - DNA, 327 bp, Zea mays
  unsure (1)..(327): unsure at all n locations
tcatatcatctgtgggtacctgcaaaacttattaagtacattttggtacccatctcatgatgggtccatcaagggtagccaataaggacttatgcacccaaacaaccttggtcctagaatgtggtgaactcaccacctttctagcacaagagtcaaaattgggtctcctaagcatatttgaatgtattgacaagttaggcttatgagttttaccatttggacaaaccttgaatagatgaacctttttacggcaattgtagcanatgcggtgcttgtccttgcaatgcattngccttttgctttcatctttcttgatgatcattcttc

SEQ ID NO: 2462 - DNA, 248 bp, Zea mays
ttttctttagtcaattcatatattattagcctatgctacttaccatggcttcaagctctatcaaatggacgtgaagagtgccttcctcaatggaccaatcaaggaagagagtctatgttgagcaacctcccggctttgaagatagtgagtaccctaaccatgtttataaactctataagtcgctttatgggctcaaacaagccccaaaagcatggcatgaatgccttagagattttcttatcactaat

SEQ ID NO: 2463 - DNA, 306 bp, Zea mays
agaactttgagacaagtatactgaggcttgctttttttattgttcttccaacttctcctacgcgggcaccgcactcactgtagagtgctaacctgccacatataatagtaacggagcccctggcgcaggtggagttaatgtatgtagatcaattatgtattgcttcaattcttccaaggctttctgttgagctgggccccactgaaagacttctgctaactttactatttcacagaatgaccagtttctctctactgatctagatataaatcttgtcaatgaaggcaatctttcttgcaaccggtg

SEQ ID NO: 2464 - DNA, 245 bp, Zea mays
agctttatattttttgcagttttgagattatactatggtattcaatgataccgtggtattgatggccaaaatgtgtttggttggtacatgtaaaacactgtttcaaatatcatggtttacccaaaactgtggtattttttttggagttttggaaactccactcacactagtagaaaagagctcaaagcctgcggcacgttcaacttttcactggcggtttccgttatcaaacgtcagtgaaagaa

SEQ ID NO: 2465 - DNA, 425 bp, Zea mays
  unsure (1)..(425): unsure at all n locations
ntaagctctntgacaataaaatcacttcacctagttntaacaaaaatacataaatgcaggaatgaaaattttgagaggttaaactaggtatgaagcanggatatgcatagacatgctttctctttacttttatacaagatatgcaaggaatgtatagaagaggaagatttaggtacatgtataaatgagaggaagtagttttacccttttgtaccttcacatagagacgctctcttcattgtgttttgtccttagtcttagttacttaagacctatattcaagacagtgtatggaaatattntgcacaagagagggttctacaactagtgatccttttctaagtcattggtattatatatcaagtagatcacanatggcataaatgtatcatgaaattctctcttaacctagtgcatatcaagaa

SEQ ID NO: 2466 - DNA, 239 bp, Zea mays
tgcttcggatctcttgccttgctacttttgtccacatggccagaaataacttgagaaacaattttcagaatggcccttcttattcctattgcccttaacttccgaagccccaacagaagtgcttcgtactcagcaatattatttgtgcaactgaaatcaagcttggctgcataacatgttttgacttttgaaggtgccactaggaccgcagccgctcctgcaccgaaggttccccaaga

SEQ ID NO: 2467 - DNA, 384 bp, Zea mays
tgtgatcaacatatccctcagcttttgccaagaggtttctgtccctggtacaagctaagaataccatgtctaggcaacattattgaccaccatgatgaaggacttggacatcattgctgtgttgcccccatatgaggatattgtggcttcataactcatcaagaatttcttcaggttggagtggccatcgtacaatggtagctggggtggtttgtatgaatgtgaccaagtcattgcctatagttctacatccaggggaggcgtcatcataaataaagccattatggttgaaagcttcatacagaagatcatcataatcttggccttcattctgaaggcccctatgtttgtactggtgcactggctattctgtattctacgaaa

SEQ ID NO: 2468 - DNA, 240 bp, Zea mays
agcttgtgctcccgataacaggcggttcatgctcggagccagctaacaagaaacagaagaaggaggcacagagaagagtacaacatgtaggggtacaaggacccttcatcaagtcaagatggtctcacatcccgattaccttctctcaagaggatcttcagctcaaggactacccacacaatgatgctatggttatctcttgtgtgatcaaatgatttctggtccacaatgttttggttg

SEQ ID NO: 2469 - DNA, 241 bp, Zea mays
agcttttattgtctcttattgtctctattttcaaaagttggcttcttgtggggaaaagtgttgattatgggaaatagggggagtttttgaaatctttgatcaatctcttttggaatgactctctttatacttcaacatgtgtgtttgacttagagatagagatttgaatttgatttgcaaaaacaaaccaattggtggcaaaagatgatccatatatgccaaaattgaataaaactcaaag

SEQ ID NO: 2470 - DNA, 317 bp, Zea mays
  unsure (1)..(317): unsure at all n locations
tctaagggagaacacgcgataggtttaactaatgtgctattcgaaaaagatagaccttgtgcagcttgtcgagcaggtaaacaagtgggaggagcacatcacagcaagaatgtgatgaccacatcaagacccctggagctgctacatatggacctcttcggacccatcgcttatctaagcataggaggaagtaagtatggtttagttattgttgatgactttttccgcttcacttgggtattctttttgcaggataagtctgaaacccaagggaccctcaagcgcttcctaatgagagctcanaatgagtttgagct

SEQ ID NO: 2471 - DNA, 237 bp, Zea mays
atctttcagctttgaagcttcggctttgaaaacagttttttagtgtttccgaaaatgtctgaagctgctaagaaggctgctgctgagatgaagctgagtcttgatgaagagaagaacttaggatttcttatagcgatgtcgaagaccaacatagaaaaaatcaccaaggagattctggaagggctgtctgaagatactggtgacagtgaaagttatgatgtggacagtggtggcgaa

SEQ ID NO: 2472 - DNA, 263 bp, Zea mays
agccaacacatacatacaaccggctcaagaaccttatcaacaaaataaagagctaccggagcacgcgatggacggaccacgacgtcgtctgactgatgctaaaggcccttacccgtcttgatcctcatttggtgaataatattcgtgagaatcccacgtacaccaaaatgtcgcccgaagaagtccttggaaaattcgtaagcgagcgaatgatgatcaaggaggcaagatacgtggacgacgcattatatggaccaatcaac

SEQ ID NO: 2473 - DNA, 246 bp, Zea mays
agcttgttcattttattgctaactgtcccgacaatgatagtgaccaggaacacgggagcaagagggaaaagaagaagcattacaagaaggccaagggcgaggcacatatcggaaaggagtgagattcggattgctccttctccgactccgacaatgaaggactcgccgccactgccttcaacaagtcatccctcttccccaacgagcgtcacacatgccttatggcaagggaggagaaggtatgta

SEQ ID NO: 2474 - DNA, 391 bp, Zea mays
tcatacacttcagccacggttagagtatcacgactgtatatgatggtatctcgaaaattgctaaacgatgcagggagggaacacaggagaagaagagctaggtcttcatcatcaaactttacctccatagacgtcagatcggccacgatctccttaaacaccgatatgtgcgtcagaacggatcctccttcctgcaacttgtgggagaacaacttcattttgacatgcatcttgctggtcagatcctttgacatacagatcgactccagcttcaaccagagagcagcggcagttttctctgccagaacctcctgcagaatattggtagacagatgaatgtgaatatgtgcgagcgccttacgatccttgcgccctctctcatcagtccacg

SEQ ID NO: 2475 - DNA, 241 bp, Zea mays
agcttctgaattacaaaccgacataaaagtagaatgaccttttagtccataaatatttgagtcgctgttgtaattccttatgaggggcatgattgtaattcctcacaggctgtgtcctgtgcctataaatagtgaacagtattcctttactgttcacgcattcctggaatagtgatcgcaccattcgggaatcaaccttttgccaaggcagaggtattactgtattcaatgcttaaatatt

SEQ ID NO: 2476 - DNA, 428 bp, Zea mays
  unsure (1)..(428): unsure at all n locations
tactcctcctgggaagggccgttcatcatcgcaaagattttgaagcctggaacatacaagctggccaatgatcaaggcgaggtctacagcaatgcctggaacatccaacagctacgtcgcttctacccttaagatgtttcaagtcattcatatacctcgttctctttacatacataaataaagtctaaccgtcaaggatgggtcagccttgcctcggcaaagcccgaccctccctcgggggctagaaggggggaaccccctctgcatcaaaattttcctcggaaaagttttctaccaaaacgactntcgtgctttccgactatatcaataacagaatcctgcaaagcgagtaagagcgcacgtaagcggcanggccgaccgagccgagtgactcctacanccttcggatacggatacctcactcatca

SEQ ID NO: 2477 - DNA, 237 bp, Zea mays
ttttttaaagggagaacaaaacggtagaataaacacaagcccaacacgaaaaaaacagggggtggatgcccaagcccaaacaagggaaccaaggaggggccccaccatcacataagaacctcatgaaccaccgacaaggcacaggagcccccaacaaaggaaccaatcgggcccaaaggctacaaaaagcccggcgggaggaaagatcggccaagcaatggggaagaataaaacccc

SEQ ID NO: 2478 - DNA, 243 bp, Zea mays
ttcttgttgcctcctgtccgggtcgccatcgccgtgaaatcacaactccggccaggtattcggcgtggttctgtcgtggaccaaagactgtgaagaaatagaagtatgggggtttatgcgcaattgtcagcgaaacagggaaacaatgttgtgggttctttactggtttttcaaatcatccaggacctttacgcaaaaatcgccagcgcgggtgcgtgcgcgagcgcgtttcacccggtaatg

SEQ ID NO: 2479 - DNA, 239 bp, Zea mays
ttcttaaccttgtaacgaggataagctgcatttgttccaaaggtggatggtccttaagtctctttgaaatccttaagggaaaatgcttaaaatgtttacaacatgctttcataagtgcataaattgtcatgaacatcacacttatactatgacacaatgcacttcacattctgtatgatatagatatgttctcattaacctaattatgtgcaattggcatttaaggccaaaatatgtgt

SEQ ID NO: 2480 - DNA, 261 bp, Zea mays
ccgtaatgacggatactaaaccatttgcaaaccacaagcccaaagctccgggccagcatacggagaaaagaaaagactgacaaccctcactatacacacgtagaaagacactagccggcaaaaactggaccaacattttctgtactaagaccataccttcctccttgagatagaagacagatctatcaagcgaagaaatgacacgccattgacctctgacgatacaagaagcaacagtccacagcacaacaaacctatagc

SEQ ID NO: 2481 - DNA, 245 bp, Zea mays
agcttcttaaatcccatacttctagccatctcccaacagacggataattctttgttatctaggaggcagtataggaaatcttcttcgtctgtcccattgaacactagtgcccccttcggatatttcaattctttggcatagtgattaacttcaaaaacttcttcttccgataactttttccccgaagcatgtcacacgatatagtcgtatatcttggaagatgctccggggacggcagtatcaat

SEQ ID NO: 2482 - DNA, 471 bp, Zea mays
  unsure (1)..(471): unsure at all n locations
gacctataaaactaagcttanaaggtgccatcttgatactttcttgataactattattatatgaaaactccgctaggggcaaacattcatcccattttagtgagaaatccaggacacatgcccgcagcatatcttcaagtatttggttcaccctctcagtctgcccactggtttgaggatgataagccgaactgtggagcaattttgtacccaaggagttgtgaagtgcttcccagaacttggccacaaattgaggtccacgatccgacacaatggtctttggaacaccgtgcagactgagaatgcgggcaatgtataatgctgcataagtggctactgtatatttggccctgacgggtaggaagtgggaaatttttgtgagtcgatcaactattacccaaatagaatcataccctttggctgtcctggcaggccacaataaagtcatactgaggtcttccatttcatgtt

SEQ ID NO: 2483 - DNA, 243 bp, Zea mays
agcttgttcgtcggaatcgaacgaagctccagcctgaaacctgcttcggaggaagaaagtattaaagtttcgcaagttcatagttaaatggccagagtgcgttctactgccagggttgagcgtgagggaggcgaaactgaagcttcggagactgttcccatctccgaagccatgcaacgatccgggctggtagtttctgaagatattcctggtgagggtgcagaacaaacacaacaagcagct

SEQ ID NO: 2484 - DNA, 362 bp, Zea mays
  unsure (1)..(362): unsure at all n locations
tctccaccatgtcgctgctagccaagttgttgcagctacctccatcaatgatcaaacgacatgaacgctccttaatgacacactntgtttgaaacaacgtatgtcgctgattctgctctgccttctccatttgtgcactaagcacacgctgtacaatgaggctctcataatgctctgcatcatctgcaccaatctgttcttcgggtggttccttagtgcctacatcatcagccgcaagcaaagcaagtgtagcttcatccaaatcactagcagaggaatacccaccatcgtcttttaccaccaaaacacgctgattaggacaataacgctgcacgtgttcatagcccttgcatcgataacac

SEQ ID NO: 2485 - DNA, 241 bp, Zea mays
agctttggagactctcaagcgaggtctagccatctaggagcttgaagctcaaagagtaatgaattcacaaagatcttgaagttgacccaaaacgcaagagagattgacgagaatcaagaatgaagcccaacaattcacagtatctcaacttcacaccgagtttcagtcaagatttggaatgattgagtctcagcgtgtaagagagattggagaggagtaaatgctcttatgttgcttttgc

SEQ ID NO: 2486 - DNA, 373 bp, Zea mays
  unsure (1)..(373): unsure at all n locations
tctaaagggagagcacattntaggattaacaaatgttcattttgagaaagacaggatttgtagcgcatgccaagcagggaagcaagttggtgcccatcatccacacaagaacatcatgacgactgacaggccactggagctcctacacatggatctattcggcccgatagcttatataagcatcggcgagagtaagtactgtctagttattgtggatgattattctcgcttcacttgggtgttctttttgcaggaaaaatctcatacccaagagaccttaaaaggattcttaagacgggctcaaaacgagttcggcttaaggatcaagaaaattagaagcgacaacgggacggagttcaagaactcacaaata

SEQ ID NO: 2487 - DNA, 241 bp, Zea mays
agcttttaatgtgatttcctccatcattttttgatatgcaagtacacctaatcatacatctcgtggatcagataaaaatattagggccactatatttacatcatatgtttcagttggagcgatacctgggagtattaaaaggttatgtgcgaaatcgcgctcacccagagggttcaatcatggagggatacactacacaagaagtgattgagagctgtatagattacattagtgacggaac

SEQ ID NO: 2488 - DNA, 373 bp, Zea mays
  unsure (1)..(373): unsure at all n locations
tcagcaacaaaggcttcagtagacacttcagaagtttcaactgttttctttggagttatgcttgaagatttaattgtctccaaaacatctaacacattaaccatcctttttcttttcaaggtcactgttggacccttctggctttttcctgtctcaatntttactgaaggacttaaaacttccaatgtttttgcttcttcaagctttgcttcttctatcttttctgttgctggcacttcggccaacggttcgatttctggcaccagcgttgattatttagcttcggtggccgaaaaggtctcaccggcgaactcangcactgtggccagttcaatataacgtggccggtgtgtgagaacctttaccctttttc

SEQ ID NO: 2489 - DNA, 246 bp, Zea mays
agcttttccaccatgtcgctgctagccaagttgttgcagctacctccatcaatgatcaaacgacatgaacgctccttaatgacacactttgtttgaaacaacgtatgtcgctgattctgctctgccttctccatttgtgcactaagcacacgctgtacaatgaggctctcataatgctctgcatcatctgcaccaatctgttcttcgggtggttccttagtgcctgcatcatcagccgcaagcaaa

SEQ ID NO: 2490 - DNA, 198 bp, Zea mays
actcaagctttccatgttgtgcctgaacattccaatccgagcccgcatctgttctgggtgaccgtcacaaaatggtggtcttctgcagtccgaattcaacatgttcaaaaccttttccctttcggtcttctccctggtttctaaacaaaacaagagtgcaccggtctccctggtctaaatatgatggacatgaacctc

SEQ ID NO: 2491 - DNA, 243 bp, Zea mays
ttcttatgaagattcttcatcccaacatgggctagtcagcggtgccagagccaacccatgttagtcttagcaattaagcaagtgtcgagttcaactctatcaaaatctaccaagtatagctgaccctctaacactcccttaaatgctactgaatcatcacttcttctaaagacagtgacacctacatcagtaaatagacagttgtagcccattttgcataattgagaaacggaaagcaaattg

SEQ ID NO: 2492 - DNA, 304 bp, Zea mays
atgtgtgaataccttggaagctggtgagaagcatgctttttttgtctaccgtgaagtgatagttgctggtctaatagatgagtaccaaatttgagctacactcctgactgccatgacaaaggatttgccataactatcatgttgcctccatatgacgatatcgtagctgtgcgactcatcaaaaattgtttcaggtctgacaaatcatgatacattggtagttgcggaggtctgtataacggtgaccatggtgtggcttgcaactctggtatcaagggagaagcatcatcatatatgaaatcat

SEQ ID NO: 2493 - DNA, 240 bp, Zea mays
tgcttttgcaaacttacactgcgctctttaagaacgactttttgtagcttcggtgaaatttttaatgcggttttagctctgcattcttgaaggaatatctctttgtagcttcgacattctcgtaagtctgtgacgaaggtatatttcattttgacataacagctagtacagagaattttaaaaaaaacaagaagactaggtttacattgattgttccttattaaaaagaaaacgacagtt

SEQ ID NO: 2494 - DNA, 338 bp, Zea mays
  unsure (1)..(338): unsure at all n locations
tatgaaagggaaatgtgcctttgggccatttctaagtattttggtgtttgagtgccaacacaaatgcttaaatgtgaatctatgcccatgaatggacaaagtgcaaatcaagagcaaaggtatgcttctatatcttagtacnatggttttgtgtactaatatacttgtctaagtatcagaaataggaagaagaagaaaagaggggagttggctgtgtactgccaagaggctgtttcggtctggggcaccggactgtccggtggtgcaaccgacagtgtccggtgcgccgggctgcctcggtcgaagtagccgctctcgggaatcgctgacggcgtgcg

SEQ ID NO: 2495 - DNA, 238 bp, Zea mays
ttctttagaaaatatttcctcctgcattttttgatgtcatggtccacttgactatccatttacctgatgaagctatcctgagaggcccagtgcaatatggttggatgtaccccgttgaaagacggttatttactttgaagcattctgtgaggaacatggcacggcctgaaggctcaattgctgaagcatatgttgctaatgaatgcttgactgcttgttcgcggtattttgatgatct

SEQ ID NO: 2496 - DNA, 80 bp, Zea mays
aaaacacagacagaacacacgacacaaattaacgccaagggaccaggaacgaagcacctacggaaaaagaaagaaacacg

SEQ ID NO: 2497 - DNA, 238 bp, Zea mays
tgcttatctcaacctgagaggaaagcttatcctaaggggtgatgtgttaagttgagctttgctggtgtgttattcatatgcttcttcttgcagtattatatgtgttgcaacatatggactagtgcttccgaagttatgaattaattggcatctattgtgttcattctgaaatagatagtcatgaggataatggtgcatatggttaatggtgctttaagattcattctgaaatagatag

SEQ ID NO: 2498 - DNA, 449 bp, Zea mays
  unsure (1)..(449): unsure at all n locations
ttgcacatctgaagtcactattctgccccccagcaagcttcttgaaccaccatgcaaaatggtcatgttgtcttccattccgtattcctatgatggctctatttctgcgaagtgtgtggggaaggaaggaaaatcatttttccatattgctattgattgcccagttgcaaagcagttctggggagtggttaaaaacatctcgagaataaaactgccagttgttttggaggtcacttggacaaaggatttattggctgacgaccacttcactgactcagttaaaacaatggttatttgtggacaaaggggctgggggtgtggtgatgaggaactcgcggggagaggttttggcggcagcancacagttatatgaacacatccctgatgcgctaaccaacgaagccttggctgctcgtgatggcgtggtgcttgcccagatgcttaacatg

SEQ ID NO: 2499 - DNA, 242 bp, Zea mays
agcttcatattttgctgcattgttggacgctgagaatagtaactgaaagggaattaggcttacacctagttcctatataattttggtggttgaattgcccaacacaaataatggactaactagtttacccaagtgtatagactatacaggtgtaaaaggttcacactcagccaataaaaagaccaagttttggattcaacaaaggagcaaaggggcaaccgaaggcaaccctggtctggcgc

SEQ ID NO: 2500 - DNA, 351 bp, Zea mays
  unsure (1)..(351): unsure at all n locations
taaagccatggtgagtagcataggcaagtgatatactaattgactcaagcctagctacgggtgcataagtttcaccgaaatccaaaccttcgacttgtgaatatcccttggccacaagtcgagctttgttccttgtcaccgcaccatgctcgtcttgctttgtgcggaagacccacttggttcctacaacattttgattaagacgtggaaccaaatgccatacctcgttcctagtgaagttgttgagctcctcttgcatcgncaccaccccatcccgaatcttaggtgccttctctaccctgtgtggctcaatagaggaaacaaagagtaatgctcacaaaatgtgcacac

SEQ ID NO: 2501 - DNA, 190 bp, Zea mays
atcttgccagtacttgtcgaagcaacaacatctaccagcacagcaattgcagaccataccggtgacttggcccttcgcatgctggggactggatatgattggacctttcaagaaagctcaaggaggatacactcatgtactggtagcaatcgacaaattcaccaaatggatagagttcaaactcatcgct

SEQ ID NO: 2502 - DNA, 364 bp, Zea mays
  unsure (1)..(364): unsure at all n locations
ntaccaaatggacgtgaaaagtgccttcctcaatggaccaatcaaggaggaggtctatgttgagcaacctcccggctttgaagatagtgagtaccctaatcatgtatataaactctctaaggcgctttatgggctcaagaaagccccaagagcatggtatgaatgcctaagaaattntcttatcgctaatggctntaaagtcggaaaagccgatcctactctctttactaaaactattgcaaatgatttgtttgtatgccaaaattatgttgatgatatcatatttgggtccactaacaaatctacatgtgaagagttagtaggatcatggtacanannatcgagatgtctatgatggggggga

SEQ ID NO: 2503 - DNA, 239 bp, Zea mays
ttgcttgcattgcatgtttaaattccttgtattgcatctaggacttgtctaacctagttgagataaccgcccccaaagcgagtgaaaaagcttaactcgggtcaaacctgacaagtcttagttttaagtttttagcacttaaattcttactttttatgcaattattggttcttgaaatatgcatgaggtactgcacttagggggagtattcaaaactcaaatcactcatgaaaacccct

SEQ ID NO: 2504 - DNA, 364 bp, Zea mays
tcttcaccatgtgaacacgggtatcttgataaggttgggctatgcatttcccttttagttgtgtcaagctcttctttagcctctcattttcttctttgagcttttgatatgaatcatcatttgttcctgccaattctagctcaaaggaagatttgcttggtgacaaacaacaagcattaacacatggtaatatagtattaatttgaatacatgtgcacgagtgaggtttgtgggattttaagttctttatcacaacctcatgagcaatggttaatatgatatgattatccataagaatttcatgagaatattaaagcatatcatatttatctttgagagctagattttcaacttttaacttttc

SEQ ID NO: 2505 - DNA, 242 bp, Zea mays
agcttttcgttccctttaaatttctactcctacatcactttttgcgttacattattgtcggcgtttcgagaccgggaggtccctggaccgacgagtgaatgtcgccgcgtgccccagcccagatgggtcgagcgcgggggcgagcgcgaaggggggagagcgaggcggccggagaccggcgtgagagaggtgggaatcccgcggccttcgtgttcgtcccgcgcccaggtcggatgcgcttg

SEQ ID NO: 2506 - DNA, 117 bp, Zea mays
ctagaagcactttttcttgtccctcgacatgatcttttctattctgttaacgtagaacaaggataggctctgatccaattgaaagttcctatacgggggggtgaaatccatccttac

SEQ ID NO: 2507 - DNA, 242 bp, Zea mays
agctttttctcaacttaactcgtcgggaacaacataatataacgagtagtgataccagatacaatgtctaaactataaacaagtgcataataaaatgaacagactacataagacagtacaacaacccataatgccccttagcatttgatccatgaagttagattatctcttgggtgaaacttctggattcatgggacatgaattgataataccagacataaaaaataaatggtgaattaatg

SEQ ID NO: 2508 - DNA, 452 bp, Zea mays
tatgaagattcttcatcccaacatgggctattcggcggtgtctgtattcatccatgttagtcttaacaattaagcatgtgttgagttcagctctatcaaaatctactaagtatagctgaccctctaacacacccttaaatgttattgaatcatcacttcttctaaagacagtgtcacctacatcagtaaagagacagttgtagcccaatttgcataattgagatacggatagcaaattgtaatctaatgaatctacaagaaaaacattggaaataaaatggtcacgagatatagcgtatttaccaagacctttgaccaaaccttgaatttcatccccgaatgtgatagctctttggggagtttgtatttctcgtagaggagacatcttcttttccctgcataattgttgtgccccgctgccagtatcaattgagccccggtgctaaactaca

SEQ ID NO: 2509 - DNA, 242 bp, Zea mays
agctttgtcgaatattacactcactaaaaagaacgtataacaaaaataattattgtcaaaaagctctttaccaagttttctttttgtgccgttcattggtttttatcgagtgccaaaaacactggacaaatgaaaaattgataaaaaaaacaaaaaaacaaaaatcacatcgtcgcgtaatatgcgttggcgtcataagatctaccacgtacatgaaaaatcttatactacagagctgcttt

SEQ ID NO: 2510 - DNA, 242 bp, Zea mays
agctttttaagggagagcacatttttggattaacaaatgttcattttgagaaagacaggatttgtagcgcatgccaggcggggaagcaagttggagtccatcatccacacaagaacatcatgacgaccgacaggccgcttgagctactccacatggatctattcggcccgattgcttacataagcatcggcgggagtaagtattgtcttgtaattgtggatgattattctcgcttcacttgg

SEQ ID NO: 2511 - DNA, 393 bp, Zea mays
taaagccatggtaagtagcataggctaataatatgcgaatttgtttatgcctagctacgggtgcatagggttcacccgaatccaaaccttcgacttgtgaataccacttgggcacaagtcgtgctatggtccttgtcaccacaccatgcttaattttgcttgttgcggaagacccaattggttcctaccacattttggttaagacgtggaactaaaaggcatacctcattctagtgaagatattgagctcctcttgcatcggcaccacccaatccgaatcttggagaggcttctttaccctgtgtggctcaatagagggaacaaaagagtaatggtcacaaaaatgagcacaccgagatcgatagttacccctctatgaatgtcgcccaagat

SEQ ID NO: 2512 - DNA, 244 bp, Zea mays
agcttatgcaacatcgcttgagatggtttggacatatccaacgaagacctgaagaggcaccagtgcatatcggaataattaggcgtcccgaaaatgtgaagagaggtagaggtcgaccaactttgacgtggacagaggctgtgaagagagacctgaaggagtggaatattgacaaagagctcgccgcagataggaaggggtggaagtgtgcaattcacgtgccagaaccctgattgatagtttc

SEQ ID NO: 2513 - DNA, 324 bp, Zea mays
  unsure (1)..(324): unsure at all n locations
tatacaantactaagcttngatgatctggtcctcgacaagcttgctacaagccttcttctttttcttcaccgcacgaactttactggaacagcttccgcatataaaaatgatggtagaactctttaatcttggggaattgaactccttgaagcatctcatacaaaggtggtacggggccttcttctgctgttgctgctttaccacactgcagataaatgactggcacacggttgattcttggaccaaactctactaatctctcttcactatctttctttcactgaccctttctttctctttggtcttcccactgggaggatctt

SEQ ID NO: 2514 - DNA, 243 bp, Zea mays
tttcttttgtgccaaaaatcacagaaagctaagggatggttatttagttgtgattttccaaagttttaatgccaaaaaggcactttctactgccttgctatttgaaaaatgtcaaccggcagatttcatatttttcctaagttcttaataacaaaatattaattatcccaaggtttggggtgtttttgccttggggttatttttctagggtttttctaagttttccttgttttctcaaaataa

SEQ ID NO: 2515 - DNA, 311 bp, Zea mays
tatctaagctatacttgtcgcgtccaggaaattgcgccactattttcaggcacacagagttgtggtggtgacctccttcccgttaaaggccattccccacaactctaatgccacaggcaacatcgctaagtgggcagcggagcttgctgagttccaactggacttccagcctcgccacgctatcaagagccaggtcctggctgacttcatcgtggaatggaccccttccccgagcgctctttggggtccggatcccgattcggaccccacacctgcgttgcctaaggctcccgtcttcaaccaaccccact

SEQ ID NO: 2516 - DNA, 240 bp, Zea mays
ttttttggtcattttattgctaactgtcccgataatgatagtgaccaggaaaaagggaacaagagggagaagaagaagaattacaagaaggccaagggcgaggcacacatcggaaaagagtgggattcggattgctcctcctcctcctccgacaatgaaggactcgccgccactgccttcaacaagtcatccctcttccccaacgagcatcacacatgcctcatggtgaaggagaagaag

SEQ ID NO: 2517 - DNA, 337 bp, Zea mays
tgaagaaggtggtccagaactagccggatgtcccatatgctatttagtttgaacctgataaagcaggcttacagacaatgtcagcaaacgaaataaacttattacgatgacgggaaactagtttcaatgactttgattcttcatcaattaaaggtgccattcattgatccaatttgggccaccagaattccacaagtgcgggtaagctttgaacgatggacagacataagaacgaagccgataaactgtgaaacccacattcttgcaagaaagcgagaatcaaaagacccgatccgacagaagagtaaccctgaataagtccgcttcttcacaaatg

SEQ ID NO: 2518 - DNA, 239 bp, Zea mays
ttctttattattggatacttcagctatgtctttcttgggagccacatcagatataagtatgtcattctctaacattgtgatcctgaggttttcaactttaggtgcggcttcattagcttcggcttcggcagtatcttcggcatcagcaggcacaacatttttttctaccgaagccgggggcggggtcttttggatggcttgcattacgtccatcattcaccattttttttgacccccgg

SEQ ID NO: 2519 - DNA, 330 bp, Zea mays
tatctacgcatagcttcgtgatcatctcatccttcgtcactatatctcttccggcccactcaagcttcgtcttgaccatactcttgtatacccgtaacccaatttcgaagacacctgttcacatatttcacttggaaaacattgtcaaatcatgtttttgaggaccttctgaagccgaaggcccccaacagacgcgaaataggcccgagctcgcgaaaggatgctagctcgagaagccttggagaagcgttatcggaggcaggcgagggatgggctcccgagggagtcgtcgccagagacgcctgacgacgacgatgaagatgatgatga

SEQ ID NO: 2520 - DNA, 244 bp, Zea mays
agctttaagtgatttttgtgtaactatgctctaggcttacgttcgcccccgattcttactgaactccgtgtgcggagtttcagttatactgtaatgtatggtgtcttgtgtagcaaacaaactcatgctagtacagatcatctgccggatgaaaattttccttgacagcgaacatcagtgcattcagcaacaacagcaaaggaattgacacgtttctacgaagaatgcatgctaaggctcgcaa

SEQ ID NO: 2521 - DNA, 174 bp, Zea mays
  unsure (1)..(174): unsure at all n locations
ntgtgtggaagttgggagaggattagatctcccgagtgtgtctagaattgaatgctacaactctttgtaagtaattgagaagtggaaagcttggatgccatgaatggtgggtggttgggggtatatatagccccaaccacctaactaacccgttggtgtggctgtctgtttcat

SEQ ID NO: 2522 - DNA, 239 bp, Zea mays
tttctttattcctgatgctgaattccaggtaatggtcaatatactaacatccatttcgagaagactgattgcatagtttacctgaatgaacttcagcacatggagaaactttggtagttaagctattaaaatgaacggtttaatgagtctatataagttcatgtatatatattgtaaaatgatggaaaaacaaaaaaaaaatgtgtcctcttggctatctagggatatatcatctatgc

SEQ ID NO: 2523 - DNA, 275 bp, Zea mays
  unsure (1)..(275): unsure at all n locations
tgccaatacctgtcaaagcaacagcacctgtcattacagcttctacagaccataccagtaacttggcctttcgcatgctggggattggatatgattggacctttcaagaaagctcaagggggatacacccatgtattggtggcaattgacaaattcactaaatggatagagttccagcccattgcctctntaacctctgctaaagccgtggaattcatacaaagcataatattcagattcgggataccaaacagtatcatcactgacttgngatc

SEQ ID NO: 2524 - DNA, 236 bp, Zea mays
agcttttaaagggagaacacgtgataggtctaaccaatgtttatttcgaaaaagatagaccttgtgcagcttgtcaagcaggtaaacaagtgggaggagcacatcacagcaagaatgtgatgaccacgtcaagacctctggagctgttgcatatggacctcttcggacccgtcgcctatctaagcataggaggaagtaagtatggtctagttattgttgatgacttttcccgcttc

SEQ ID NO: 2525 - DNA, 337 bp, Zea mays
  unsure (1)..(337): unsure at all n locations
tactccttcctgngaagggcccttcatcatcgccaagattttgaagcccgagacatacaaactggccaacggtcaaggcgaggtctacaacaacgcttggaacatccaacagctacgtcgcttttacccttaaaatgtttcaagtcgttcatgtatctcgctttctttacatgcataaataaagtctaaccatcaaggaaggatcaaccttgcctcggcaaagcccgaccctccctcgggggctagaagggggcaaccccctctgcgtcaaatttttcctcgaaaaagcttttattagaacatctttcgtgcttttcgactacgtcgataacagaat

SEQ ID NO: 2526 - DNA, 240 bp, Zea mays
agctttagcatcatttattctttcttcatcctaagcccctagcgtccaatcggcaatgaagtctgctaacacctgagattgaattgaagaactatgtacataatcaatggtgaattcattgagttctgtggcccattttccgacccttcctgtagcttgtctgttcctcattatgtccttcaggggttgtgatgaaggcactattatgtgttatgcttggaaatagtgtcgaagctttct

SEQ ID NO: 2527 - DNA, 270 bp, Zea mays
  unsure (1)..(270): unsure at all n locations
tgtggaagctcaaaactcatctattgtgcatgaagntgtggtggtcatccgaggatgtggagtcacttgtgcttacttgatagtcctacaagtgaaccacaacatactaactctatttgtgataaatgcaaaaattctcttgtgaatgataatattgctcgtgatgaatcacaaatcattattgagaatgaagtattagtagagagagtgaatgctctaacccatgatctaaagaaggcatatggtggaaaggctaaattggatttcata

SEQ ID NO: 2528 - DNA, 242 bp, Zea mays
agctttaagccatggtaagtagcataggccaataatatgcgaattgactcaagcctagctacgggtgcataggtttcaccgaaatccagaccttcgacttgggagtatcccttggccacaagtcgagctttgttccttgtcaccacaccatgctcatcttgcttgttgcggaagacccatttggttcctacaacattttgattaggacgtggaactaaatgtcatacctcattcctagtgaa

SEQ ID NO: 2529 - DNA, 383 bp, Zea mays
tgcttcagaactagtagatgaccatggtgatgagctgaaataactttcagacagaaaactaaaagatttctctattgctttagcatactctcccttggaataatccattccgttctcaaattttaaatctatcaacttgtgtctatggaggcatgttctatgatattttgaacgagcacaatgctagtgcgcaacttgttgcacaataacaggcaacccgaagtacttttcttgttactccctctgtctctgaataaatcaatttctagagttgtctgcagtagaactattttaaagtttgactgtatttatagacaatatcattaaagattaaagacatcaatttagtatcattagaatcactaataaccatattttcatat

SEQ ID NO: 2530 - DNA, 239 bp, Zea mays
agcttgtttctaccaccatgcagtcggagtgcggaggcgaacccgcatgaacgttcatggaagtacaagagggagaccccgttcggacacccttgggggctgggtcacggttcgcgctgcccacttgagccggatcatctccggcagtaccctcgggggctgggcagtggcttgcgcttcccacccgagccgagtcatccccggcaacatccttgggggctgggcaagtgtcaacaccg

SEQ ID NO: 2531 - DNA, 296 bp, Zea mays
  unsure (1)..(296): unsure at all n locations
ntaccaaatggacgtgaagagtgccttccttaacggaccattctattaagaggtctatgttgagcaacctcccggctgtgaagatagtgagtaccctaaccatgtatataagctctctaaggcgctttatgggctcaagcaagccccaagagcatggtatgaatgccttaaagatttccttatcgctaatggattcaaagccggaaaggccgattctacactctttaacaaaacacttgaaaatgaaatggttggatgccaaatttatggtgatgatactatatttggggctacta

SEQ ID NO: 2532 - DNA, 262 bp, Zea mays
aacaaccacccgcaggcaaccagcttgcggtggccaacgagaaaggaaaaccacaacggaggcgagccgccgaatgccaacataccaagggggcaacctgcacgagcacccgcagcaaagaagcgcacaacgcgaacccctacaggggggcagcaccacgaagaaatagggacgcacaacaaccccccatccaattaaaccgagggcaacactgccggagcagccacgcgacatcaacccaagcctgaaaaaaagccgaaag

SEQ ID NO: 2533 - DNA, 224 bp, Zea mays
taaaaactaactagggatctttttgggcaaatgagctccgtttttttttgtacataaagaggttttgggtgcggtgaagaactaaaggcaaggccctgggccttttaaaatttgggattatgtcacacatgcctaggttaatggggacaagtcaaatcagttaaggatgtttcaacttaacatgttcaaactatgatctgctaaggctgaacagaaaacagttg

SEQ ID NO: 2534 - DNA, 269 bp, Zea mays
tcctctatagtaccagctggacgcctgccatcttttccaacaccttttgagcctattctaaagcttctcaaggacagaggacaaggaattaattaattgggaaacttgtaaatcataggttccctcattgagcaaccagaggtcatatcttgatctctatgacaaaatagaacacattgactattaagccaggaagcgatcactgatgcgcactataacatgtaatgagatacttgaaaagctcttcgacatatgtacttcactatact

SEQ ID NO: 2535 - DNA, 337 bp, Zea mays
tacccatgacgaggcatgtgaccagttaaagggttctcttctttaagcctacatcgacacggtccataatgaactcatacggagacactacaccaagactctcttctcgtgcaagtcacccgcccggactcaacttaatcatttcaaaccccaaagtttggtacctggcagaggtacatcttttccgatgttgaacccatcatggccatgatggattcaccatcaagttttattttcgaaaacaacccatccactttgcaccataatcttttgataaaacaaaacattttgttgttctaaagcaagctaagcataagaaaacctgttataaaacagg

SEQ ID NO: 2536 - DNA, 239 bp, Zea mays
ttctttcctgaaattggcaaatgtctcctgcaagtcagcaatatgattctcctgcttcgtgctttttactatgatatcatcaacataagtcagcacattcctgcctatttgagtgtgaaggaccttggctgtcattctgctgaagcttcctccagcattcttgagtccctcaggcatccgaaggtagcaataagtgccactagaagttatgaagctagtctttggctcatcttccttct

SEQ ID NO: 2537 - DNA, 331 bp, Zea mays
  unsure (1)..(331): unsure at all n locations
gacttagcttgtatgtagatattctgtcattaccctttaaaattcttcgacgtcagtggcagaaggtgttcacggaatttcttcttctaaatcagcttttggcttcgaagctgtagctnttcttttcttcgaaacggccaacttcggctcaggactggattttttcttttttgccaaattatcatcttctttaatcattctggcagcttgcctttgcataacactgacaactcttttttgtttggcccttcgcacctttgcttactgtcataagctggataggcttggaaaaagctcgagctcacgagctgcttcggctccaacactcact

SEQ ID NO: 2538 - DNA, 239 bp, Zea mays
tttttttctgggctctggatcttgaattaatgggttgatgcattgtatagtgcgatgagaagtgctgctgggacgggtgagaattccggtaacaatcctcctcaaaaaggtcatgtgcggactgtccgaacattgggccggaccgtccgtgattatgtgcggaccgtccgttgttgtacgcggacggtccgactgggtagtttagattctgtgtcgtgtgtggtggttcaggcgcatat

SEQ ID NO: 2539 - DNA, 449 bp, Zea mays
  unsure (1)..(449): unsure at all n locations
ctattacggacctataaaactaagctgtccttaggaggcgcgtcccagccaaataaagcatcattctctgccacatggtcgcggaatagtctatcctcatcatagaggttgatgtacctctcaagggtttcatcagatatccttccttcttcatctgacaagccaagctcgcggcatagtctatcctcatcatagaatttgatgtacctctcaagggtttcatcagatatccttccttcttcatctgacaagccaagcttacggcaagcggctgatgctgaaactaagtcagtttcagcctttcaagtggcagttaagcaattccacgggtgcgccgtggcatgcgggtcgggtagttcattttctttctccttttctgaatgatcggaacangtacaagggtgtctatcttcttggtaaccttttaaatgaactcagatgctggagct

SEQ ID NO: 2540 - DNA, 241 bp, Zea mays
tgcttcttgaccaactcaacgttcaccaagttgttgtagctaccatcatcaatgatggtatgtacacagtagtccttgacgatgaggaacatgttgaagaggttgtggcgctgtctgttgtcgtcgccgtcactagatgtggcactcaaagctcgttgcacaatcaaggccttataggtctcagtcgctgttgtgccaagaacctcttcatcaccatcacaagtctctataatgttagctt

SEQ ID NO: 2541 - DNA, 344 bp, Zea mays
tttgaacgtactaagcacatgccgggaaaaatggttaccgtttaacctaatacctggatgaagccgggcgcggactttatttcttatgcgacctgagactgggttctccatgcttactatggggggtacaagtgcgggcactgcacggcggcagccgggtcagtggagcattgtatgccaatgcggtgaggcctggacgcgaactgggaatcgatggggacgggtgtcatgtgtggggtcggagtatcctgatatgccgtgtgtttagggttaccttgcaagttaaactcgattcaatcgtctgttctcgcactatgagctgttgacccctgtactgatcgagt

SEQ ID NO: 2542 - DNA, 243 bp, Zea mays
agcttgtgaagattcttcattccaacatgtgctagtcggcgatgccagagccagcccatgttagtcttagcaattaagcaagtgtcgagttcagctctatcaaaatctactaagtatagctgaccctctaacactcccttaaatgctattgaatcatcacttcttctaaagacagtaacacctgtatccgtaaaaagacagttgtaacccattttacataattgcgaaactgaaagcaagttg

SEQ ID NO: 2543 - DNA, 266 bp, Zea mays
atgaccaggaacatcaacaatattctcaggttttactttgcctttctgcacggaagggccacaagaaagtttatcaaaactattgcagtcagcaaatgcactgttcttcataaaaaaaaaagctattcacttcattcttatctcaatatgttggaaaaagaatgagctctaaaagtatccataccccttcttgctccgaatgcagcacaaaaataatacttgtttcttcccttgaagtcacagttccttgatgtgatgatccgtcc

SEQ ID NO: 2544 - DNA, 235 bp, Zea mays
ttttctttatgaacggaatgaataacaaactcttttggccataagtagtgctaccatgtttcaagcgctcggaccaaagcatacaattctttgtcatacacagaataatttaattgagcacctcccaatttttcactaaaatatgctataggttttccttgttgcattaaaactcctcctatcccaatcccactagcatcacattctactttaaaagttttattgaaatcaggaa

SEQ ID NO: 2545 - DNA, 381 bp, Zea mays
  unsure (1)..(381): unsure at all n locations
ttcttgctttattatcatagacttattagttgtattgatttatcacttccgcattatatgaaagctatactctttactagcaagaacttcatttttatactccgataattgttcatcttgttctaaccactaatcaagggatctagttgggggataaagttgtaattttcaggttccgcctattcaccgccncctctaggcgactttcaattgttatcggagctaggcacttcatcttgagtctacaacttgaagtgatggctcgtagaagatcccaatagaacaataagacccaggagaacccacttcgaacgacgtaactcttgagatatatgtgatgattgactatttataatcatgtgtactatgtgataatgcttt

SEQ ID NO: 2546 - DNA, 238 bp, Zea mays
agcttttaaagggagagcacattttaggactaacaaatgtttattttgagaaagacaggatttgtaacgcatgccaagcagggaagcaagttggagttcatcatccacacaagaacattatgacaattgataggccacttgagctactccacaaggatctattcggcccaatcgcttacataagcatcagcgggagtaagtactgtcttgttattgtggatgactattctcgcttcac

SEQ ID NO: 2547 - DNA, 319 bp, Zea mays
  unsure (1)..(319): unsure at all n locations
gtgaagatgcagcaagatttggaagaataaaaacatgatgttataattgagaatntagaaagcaaaatggaggatcaatcagctgctcttgagaagaaaaacttcgagcttcagaccaccgaaggcttattggtagaagctgaagctaaaatagcagaattaaatacgaagcttctcttccagtcagaaagcttcgaacaagaaaagcagaagcttaatgcaaaatttgaggccgaggtccagaaaagttcagaattgaaaaaatcattgacaagccttcaaaacaaatgtctagagtttagtaaccgatgtgttcaac

SEQ ID NO: 2548 - DNA, 261 bp, Zea mays
  unsure (1)..(261): unsure at all n locations
ttgngcacacatgtgaacttcagctcagcttatcacccgtatacttacggtcagactgaaagaactaaccagatcctagatgatatgttgagagcctgtgcgttgcaagacaagtcaggatgggacaaaaggttaccttatgcagaattcttctacaacaatagttaccaggccagcttgaagatgtcaccgtttcaggcactctatgggcggagttgtatgactccgctgcactgggaccagcctggagagaaacaggtg

SEQ ID NO: 2549 - DNA, 248 bp, Zea mays
gatgcaagcttgtgaacagtacaaattcagaagggagaaagtagcttcagcagatcagccgaagcctaagctcttatgtgaggacatagcagagtagaaggtgctgttaggctctcaattatccgaagagcaggagaaaaccttgataaggtttttgttcaataacaaagatgtttttgcatggtcagccaatgatctttgtggagttaatagagatgttattgagcactcgctcaatgtcgatccat

SEQ ID NO: 2550 - DNA, 336 bp, Zea mays
  unsure (1)..(336): unsure at all n locations
ngagaataatgtcgaagcttcctggaggccatcaaaacaacatacagtactttctccaattctgtataattgtttctttgataaactaagaacttcggatacaaaatatattggggcctgcttcttgacttggccttcaagcttctcctggacaagtgctgcacttaccgctgagtgcgaagctgccacatataataacaaaggagcccctggcgttcaaatattgctttagttcttcgaaggctctctactggactggtccccattgaaaaactttggctgacttcagcacttcgaaaaatggtaaatttctctctgctgatctagatatgaatc

SEQ ID NO: 2551 - DNA, 241 bp, Zea mays
agcttttcttttctggtgcgaagcgtgtatctagcgacatgcatgccacgctagcctgggacatgcagccgaccagagtggcagatgatgctctctttcgaattttcgatgtggtagcgattaagctatccggaaccgctcctaaatttttccttctataatacttttccccctattttccccctattatttcatcttccgcaacgattcccactaaatactccccctatatcccactatc

SEQ ID NO: 2552 - DNA, 340 bp, Zea mays
  unsure (1)..(340): unsure at all n locations
ctagcttctgttaagttggcctggtaaccttcgatctttgagctttcccttctgaatcaagccgaagatagctgttcacacattatactccaaacacattgttcaatcatgtntttgaggaccttctgaagccgaaggcccccaacagtaacccctcgcaatattaatttgtttgaaataataaatatagattgcgatatggacgaaggcctttgacccaaggttccaaaaaacaccttccctttggtagaatagcaacattcactgactagcggagccttttaactttcaacgccctaagccgataaataggaacacatcgtgaattcattttgtacac

SEQ ID NO: 2553 - DNA, 199 bp, Zea mays
ggccccggaaaacacgcgccgggaccccagggggaggagccccccagggattcgaaaaacccccccccgaggaaacccccgggaaaaaaaaagcccccagaacgggcacaaaaaaccccttacagaaaacgaagggagcatcccccaagaaggacacgaggcacacccccaacaggcggaccggaaaaaaaaaaacgag

SEQ ID NO: 2554 - DNA, 263 bp, Zea mays
  unsure (1)..(263): unsure at all n locations
tataagccacctgcngcatgcaagccttttaagataacatgggtgctctctccagtcagtttgataatctttctacaactgacaacatgcatgatatcagtcagaggcagcagcagctccagcaggactttgcccagttctcctccctgtttgacaccttcagcactcattattacaacatgcatcctccgccgagtgatcagtaaagcctctcctttgtggcaattgatgccaaagggggagagaagtgatgagaagttgtc

SEQ ID NO: 2555 - DNA, 247 bp, Zea mays
gcatgcaagcttttagctagctgattgcctgattcaagtaacctgccaacttaattgccctagatcaagcgcctattaattagatgatcaagtttcgtacttctgtacgatattagctgcacacgtaatctctaatggatttgtcctggtacgagcactggaggtttaggaagcgatcagcttaaatcaaacgaaaaattttccattgaagtgtgtgtgttggggggtggggtgaaaacaaaatact

SEQ ID NO: 2556 - DNA, 360 bp, Zea mays
ggaggagaagacgtggccttttctggtgatggaaaagtctatccgtttgttggaccaacataaaattatggggagtgaaacgtcccttaatgaaggcactctggattggagacaccatatcattcagcttttgacttaaccgattggccaataattttgtgatcaactttgcagcactatgcaccaaactgattggcctaaagtctttgacatgcacagccccatcatgctttgggattaaagtaatgtaggccgagttcaacaagcaaaaattgtcaactttctgttcaaaccgaagcactacagccataagatcatcttgataagggtccacaaaattatagagcgccaatgaacatc

SEQ ID NO: 2557 - DNA, 242 bp, Zea mays
ttcttttcattcacgatggtaaattctatcaaatgtctgatgcccacccgccataacgcatgccaggcagaaggagcccacaaccacctatggcagaacacatgcgtgaagaaaccacaagcctgtctctagccgctttggtatttgtgcatcccggcaagccccacctacaccctctgccctgagacagccttatcgtgcacgccgagctgctatattaaagtgtcgtgtcgcggaccttg

SEQ ID NO: 2558 - DNA, 379 bp, Zea mays
ggacaacaccatatgacatttacataaaatttctgttattctgaatatttaattcattcctaacatgggaagcgggtcttatcaagtggcttagtgaaaatatccgctaattgatcttccgacctcactccttctagaatgatatctcctctagcaacatgatctctaaggaagtgatgaccgatatcaatgtgcttggtgcgagagtgttgtacaggaatattaacacatttaacagcactctcattatcacacaacaaaggtaccttttctagaactaccccatagactagaagagtttgtttcatatataaaatttgggtgccacaagcacctgctgcaatgtattccgcttcggcaggtgacaaggcaaacacta

SEQ ID NO: 2559 - DNA, 241 bp, Zea mays
agcttatctctaacaaagcactggaaaggatcatcttcatcaaaatatgaatcaaggaaacataacgcttattcttcaaatccacaaagaacaaaaaccaatgcttcgagtggcacaccggaaagtacaactgaaaaacagattgagagaaattaaggataaaaatagaaaaatgcatgaagattttttaaaaatataacaaaaagagagagcaacaaccttattagagcgatgtagcttc

SEQ ID NO: 2560 - DNA, 240 bp, Zea mays
atcttgcggaccgggtggttcgggcgaggggctccgatcctctccgctgtcgtagcgtcccccatgcctagggtggtagcctcggcgcaccttctcgtcgaggtgggctcgacggtcgcggcggtggtgctcattgccgaggcgtcccggggccgcaggtgctgtgttccgcgtgcgccctgtgtggaccgaggcttcccgcatgaatcgggaagtcacggcgcgatgctccggggggta

SEQ ID NO: 2561 - DNA, 324 bp, Zea mays
tggacgtgaagagtgccttccttaatggacctatcaaggaagaggtctatgttgagcaacctgccggctttgaagatagtgagtatcctaaccatgtttataaactctctaaggcgttttatgggctcaagcaagccccaagagcatggtatgaatgccttagagatttccttattgctaatggcttcaaagtcggaaaggccgatcctactctattcactaaaactcttgacaatgatttgtttgtatgccaaatttatgttgatgatattatagttgtgtctactaacgaatctacttgtgaagaaattagtaggatcatga

SEQ ID NO: 2562 - DNA, 238 bp, Zea mays
tagcttaatggacaatgacgaggtgatgaagctgccgcaaaggaactctagagaaattctctgaattatctttgtaaaaaatattgttatttaggaatcaaacattactctataaatttgtggataccttgtaatatattttacctttccctccatgtatgaactgctttgatgtggacgaaacttgttctttttgagccgaaggcgaaaaacaccttcccttcttttcgtatacaac

SEQ ID NO: 2563 - DNA, 392 bp, Zea mays
  unsure (1)..(392): unsure at all n locations
tgtgaagttggatcctangtcagttatgatgttgttcggtattccaaacctgaatactatgtcttgtatgaattccactgccttagctgaagtcaaggaagcaatgggtttgaattctatccacttagtgaacttgtcaatagcaaccagtacatgagtgtatcccccttgagcttttttgaaaggtccaatcatatccaatctgcagcacacaaatggccaagttacaggtatggtttgtagttgctgcgccggtagatgctactgttttgacaagtattggcaggcctcgcacctctgaactaacttggctgcatcactttntgttgttggccagtanaaacccgacctaaagactttccaaccatggtcctgatgctgatgcactcaca

SEQ ID NO: 2564 - DNA, 240 bp, Zea mays
atcttgaacccggctattccatacgtgaaaagacaaccgcgcactgggcgtgggagatggtgggagtagcgtgtgccctcctggctagaggctggatggaggagtactgtgctcccgggtagcgcggaccggttcacgttgtggaggatctgtgggaacggttgacatatgcaagggttaagtgctacatatgtcgtgtggttagagatcctcagctgagtaaatcgattcggatcgccg

SEQ ID NO: 2565 - DNA, 301 bp, Zea mays
  unsure (1)..(301): unsure at all n locations
ntagaaacgtaccagggctcaagaatggtggctatgaatgtgggtggagggacanaacggtgggtcgacggatggggtgtctggagcggtgccaaagactggtttgggggaaattccgaattcgggcgctatggtggcaaatcggggatgctgagctgtgctctgtgttcgtaacaagctaacggagcaggtcgggtatcaatttatagggattaacaacggtggctccgaatttggggaagaaagctggtggttggagcaaggtgagtcaccagagttcgcataatgtggcattcactgg

SEQ ID NO: 2566 - DNA, 243 bp, Zea mays
agcttgaataaaatatttcctcctagtttcttcaatctaatgcaacatatatttattcatcttccatccaaagctaaggtaggtggtcttgtccagtatagatggatttatcaaattgaaaggacactaaataagcttcgtgcaatggttggtaataataaaagagttgaacggacgaataccttgaggtaaacaagttggtgactcttttatcttttggcagattcttgttttgggtacatg

SEQ ID NO: 2567 - DNA, 383 bp, Zea mays
  unsure (1)..(383): unsure at all n locations
gctattacggacctatgaaactaagcttcggtgaagaattgtaatgtcttccgctgagaaaacaaatcctggctgatctacagccttggcatgttcgtagccagcggtctctaatatcgatgtggcccccgtgcaccagcgaaggtgcagaaatctcctcggtcatttaaaatttcgtcaaaagctgtggcttctccgctgatccacaggacaactccatcagggtcgccacagatgaatttttgctcagaagaatatgccctaaccttagcaaagttgtcctttaacttcttggagcattccaaggatatatcataacgcttttctttcanagcacgaagctcatcggcgttcttttgcgctcttgacctctcgaactcaca

SEQ ID NO: 2568 - DNA, 242 bp, Zea mays
agcttttggtggaccagatcatcaaagcatataagtttccagatgaaaagtggtcacccaagttccgttgatgaagcaccagaagaccaatcaaggaaggaatccatgtgtgagttcacaagaagaaagtttgtgtgttggcatcaatgcttttttaataagctagctgccaagcaaaagctagaagcctgaagatgatctttgagtagccagaatcaacgtttgcactcagcaaccggatg

SEQ ID NO: 2569 - DNA, 311 bp, Zea mays
ggaggagcttgaagccgtccatgtccagcatgtggacgttgctgatcacaaggtcaaactggtcctttttctgcctcagcagctcaaggtcgtggttgcctgtcccattgttgtcactgcgacatcacaaatccggacaatttagcgcatgtatagctgtatacaagtcaaagccctccggaggaacacattatacatgtggaatcactcgactccgaggaaagttagcgagaacgattttttcttacgttgaacaaaaccagaccacagtggagatcggaaatggacagccagaaaattgcacgacacac

SEQ ID NO: 2570 - DNA, 239 bp, Zea mays
agcttgtctgggaccgcgatcacgacgaaagataagacgaacccgaagctatgtgcggaagagctttggcataacggggggaaaggggaaaccgacttaaagatgaaaagccaaattacacctcgaagaattactatagagttattgataaatgtaaagggcattaatgcaatttcgcatgggctgcgacccgtgcctataaataggcgaacagtactcccggactgttcacgctgact

SEQ ID NO: 2571 - DNA, 246 bp, Zea mays
ttttttttgtgaagattctttatcccaacatgtgctagtcggcgatgccagagccagcccatgttagtcttagcaattaagcatgtgtcgagttcagctctatcaaaatctactaagtataggtgaccctctaacacacccttaaatgctattgaatcatcacttcttctaaagacagtgacacctacatcagtaaagagacagttgtagcccattttgcataatggagatacagaaagcaaattg

SEQ ID NO: 2572 - DNA, 110 bp, Zea mays
attggtattatacacttggaaccagaacagattatactttcggagtgcacagtttagacgggactccatcggattctatacacagaactttcaccaacccccggttgtga

SEQ ID NO: 2573 - DNA, 245 bp, Zea mays
cacgcattcttttgaaaattcttcatcccaacatgtgctaaacggcgatgccagaaccagcccatgttagtcttagcaagtaagcaagtggcgagttcagctctaacaaaatgcactaagtatagctgaccctctaacactcccttaaatgctattgaatcatcacttcttctaaagacagtgacacctacatcagtgaatagacagttggagcccattttgcataattgagatacagaaagcaa

SEQ ID NO: 2574 - DNA, 368 bp, Zea mays
  unsure (1)..(368): unsure at all n locations
gtatcaaatggacgtganaagtgccttcctcaatggaccaatcaatgaagaggtctatgttgagcaacctcccgactttgaagacagtgagtatcctaaccatgtctataagctctctaaggcgctntatgggctcaagcaagccccaagagcatggtatgaatgccttagagattttcttattgctaatggcttcaaagtcggaaaggccgatcctacactctttactaaatctcttgaaaatgacttggttgtatgccaaatttatgttgatgatattatatttgggtctactaacgagtctacatgtgaagagttagtaggaatatgacacggaaattcgagatgtctatgatgggggagttgaa

SEQ ID NO: 2575 - DNA, 242 bp, Zea mays
agcttggtgcccaatgcactgtgaagactctcccagaatttggatacaaatttggagtctcgatcagaaacaatggacttaggtaccccgtggagcctgattactttcttcatatacaaggggaccaattctgaagctgaatttgcggtcttcatgggaataaaatgcgcagacttagtcaagcgatccactaccacccaaatagcatctctaccccgaggagaacgaggtaagcccaccac

SEQ ID NO: 2576 - DNA, 243 bp, Zea mays
atcttttcggaggtgggtgccaatgttggtcacttgttctcaaatgctatgagttgaaaacaaggcaacacaaatgttaatagttaaagaccttcgtccttcgaagcatcatctcccttaggatataatgatcttcagacgaaggttacgaaggacgtaccttcataatttcattatgtaagaataaaaacaggaacatatgaaacatagaaagagcatgaataattatcttaaatcactaga

SEQ ID NO: 2577 - DNA, 243 bp, Zea mays
atcttttaaagggagagcaaattttaggattaacaaatgttcattttgaaaaagacagggtttgtagcacatgccaagcagggaagcaagttggtgcccatcatccacataagaacatcatgacgactgacaggccactggagctcctacacatggatctattcggcccgattgcttacataagcatcggcgggagtaagtattgtctagttattgtggatgattattctcgcttcacttggg

SEQ ID NO: 2578 - DNA, 239 bp, Zea mays
tagcttcaacggtcagaacccaacggccgggtgacgtggctggcgcaccatacagtgtccggtggcgcaccggactgcgccatgcgacagcagcctccaccaacggctcctttggtggatcaaaattaataaattttctttacttattcctttacttttattttttttcttaccattttttactttttcttttttcttattttttttccctttttttccatttatttctcttttttttt

SEQ ID NO: 2579 - DNA, 351 bp, Zea mays
  unsure (1)..(351): unsure at all n locations
gatgaagattcttcatcccaatgtgggctagtcggcgatgctagagccaacccatgttagtcttagcaaggaagcaagtgtcgagtttagccctattgaaatcaactaagtatagctgaccctctaacactcccttaaatgctattgaatcatcacttcttctaaaaacagtaacacctatatctgtaaaagacagttggaacctattttgcataattgagaaacagaaagcanattgtaatctatagaatctacaagaaaaaacatggaaatagaatggtcaggtgatatagcaattttaccaagtcctttaaccaaaccttgatttccatccccgaatgtgatagctct

SEQ ID NO: 2580 - DNA, 242 bp, Zea mays
agcttaaagccatggtaagtagcataggccaataatatgcgaattgactcaagcctagctacgggtgcataggtttcaccgaaatccaaaccttcgacttgggagtatcccttggccacaagtcgtgctttgttccttgtcaccacaccatgctcatcttgcttgttgcggaagacccatttggttcctacaacattttggttaggacgtggaactaaatgtcatacctcatttctagtgaa

SEQ ID NO: 2581 - DNA, 136 bp, Zea mays
taaatttgacattcacatttataaagtctttcaaaagttgacatctctttcacaataacatactatgaatcctctatatgtgggctagaatgtcaaatcatgaaatttctttcaagctacagccccgtccaaaaaa

SEQ ID NO: 2582 - DNA, 257 bp, Zea mays
tgaaaccaaaccattcaagcacacatgtaagcgaggatatcactaccaaaccatttttatggtgcttatccaaatcttaacaaatgagcttaaagttggataaggaacttaagaactttgccaaactagcaatttacacttgtgtgaaaagctagcttggaaaagaacaaaaacgacaaatctttgtagagttgtcatcaattaccaaaaagggggagattgtgagaccctgtttggttttggtaattgattgacaa

SEQ ID NO: 2583 - DNA, 256 bp, Zea mays
tatgcaacatcgtttgttatggtttggacatatccaacggggacctgaagaggcaccagtgcatatcggaataattaggcgtcccgagaatgtgaagagaggtagaggtcgactaaccttgacgtggacagaggctgtgaagagggacctgaaggagtggaatattgataaagagctcgccgtggataggaaagggtggaagtgtgcaattcacgtgtcagaaccctgatttgtagtttcgcttttctttcttaat

SEQ ID NO: 2584 - DNA, 250 bp, Zea mays
tgtctgatgtacttttttttggtccttaaagatctgcggcggggttttgaatgttgatgacacatggtgatgtaccactgctgagcgtcttacatttaatgtaaacatggtcacttaaccaatgaccctttatctgttctgtgtgaagatcgtcacttaaagtacttgtctcgcacaaataatatttgggctaccgatgttctgaaaggtcactggtaaacctatactggaatggaacatttgacaaccc

SEQ ID NO: 2585 - DNA, 182 bp, Zea mays
cacatgtagcaggatggactcaaacccttctacatgcttttctgacctaacaaacagcctagatctgatagctctcactatcctacaacacagaaaatcttgataaggttttgttcaacaacaatattttttgcatggcccctatgatgttgggagtaataggatttattacactcctaatg

SEQ ID NO: 2586 - DNA, 242 bp, Zea mays
tttaatatctggagcagtaaagatttcatcacacgaatggttgaatccaacctaagcgctgccttcatgttcgaaacatcttctgcatggacaaaggggatttaattgcacaccacaggaaaatgatgcaaaaagacagtactcaacatttagactaagattatacgtgcatctagccattttagttggttttggatgattgaatgacaacatgattaaaggtctaacaggtttactaagta

SEQ ID NO: 2587 - DNA, 246 bp, Zea mays
tactcctcctttttttgtcactcatcatcgggaagattttgaagccggggacatacaagctggccaacgatctaggcgaattctatagcaacgcttggaacatccaacagctacgtcgcttctacccttaaaatgtttcaagtcgttcatgtacctcgctttctttacgtgtataaataaagtctaaccgtcaagggaggatcggccttgcctcaacaaaaatcgaacctccctcggggactaaaa

SEQ ID NO: 2588 - DNA, 248 bp, Zea mays
  unsure (1)..(248): unsure at all n locations
tcangcctaattatttacttccataaaactcaacgggttttttttagggctgccccccagaatttacaactttatacccaactctttggatgtaaaccgggtaacctccccatcaattaccttggtattccaatccacttcccaaagctaaaaaatagagactgggctaaagtccaagagcgctttgagaagaaacttaccagttggaaagggaagcacttgtctatccgaggacccctgactttgat

SEQ ID NO: 2589 - DNA, 256 bp, Zea mays
tcggtttagagagctctttctcaacatttgcaaggatgtctgaagataaaaaagttgttggtgattcgaagctaagtctttctgaggagatgcatctgggttttcttcaatcgatgtcgaagactaatacagagaaaattactaaagaaattttggagggtttatctgaagatactggtgacagtgacagctatgatgtggatagtggtggtgaagactccgaagatcgaccttggcgaccaagccatgcggtttt

SEQ ID NO: 2590 - DNA, 256 bp, Zea mays
tgtggaggacccgttcattcaagcatgtaagtttctagatgagaagtggtcacccaagttttgttgatgaagcaccagaagactaatcaaggaaggaatccatgtgggagttcgcaagagaaaggtttgcgtgttggcatcgatgcttcctcaataagctaagcaaaacctagaagcccgaagatgatctttgagtagccagaatcagcgtttgcaatcagcaaccggatgctcttgaaaggccagattttgttga

SEQ ID NO: 2591 - DNA, 251 bp, Zea mays
tttatgcctcaacttattttactgttatgcacattggttctgattaatatattagttatatttatactctataatttatatcacaaattgcctaaatcttagcaaagttcactattatgcatattttatttcactgttatttttatagtttatatttacaaagttcactattatgcatttgatgtgctgctatttttatatgcagtgatccgcgttgtaactggggttgaaacttgtcttataatttactg

SEQ ID NO: 2592 - DNA, 251 bp, Zea mays
ttgcaccttgatgattattaatagcggttagcggctgcaactggcattggtggaaagaaacaatagaaaatggaatccattaccatcaggaacagtctgtttgtccatctttacatagtttccaccaatgctcttcttcctggacagcaagcagatccataggaacccaagtacggctaccaaggcaagagccaaggttgacatcgagccgatcacgacgccattgagaaagtgtgacgtcttgttgttat

SEQ ID NO: 2593 - DNA, 250 bp, Zea mays
ttaagcggtgactcttgtctctttcaccaaccttttcagggacttcggccggtatgcacttccatgagaaactgcgtacccagaattccacactcgcacacactaattttgtgagaaactcctgtgtccttttaatcatattgacctgcatgaaaaaacacactccccaagcgtgttgaacaagcataggaggcctcgggggcaggtaatacaggccacccacgggaggtctgattgcagcgaccatgct

SEQ ID NO: 2594 - DNA, 253 bp, Zea mays
tggatgctcattgttatttttttatttctcgatcgtgtctatcactgtttatcaggattattcatggaagttcatcgaatttggagctatccgatctccagaacgaccaaatttggagcatgttaaaacttttatttctcagagcaaatgtaaattcaaatgtcaatctcgtcttgtaactcgcgtccagacttatttattcggactctcgatagttgttatgttattcgatctgtgtccggatctgatttct

SEQ ID NO: 2595 - DNA, 252 bp, Zea mays
ttgatacacggttttaacatcgccatatcactgggcgtcaagagattgatggtatatggagactctctggtagtcattagccagataaacaaagaattggattgttcaagtgattcaatgggaaaatattgcgctgccgttcgaaagctggaagataagttcgagggtctggaatttcatcatgtggaaagggatcgtaacacagcagctgatacactatccaagctcggatccggtcgaactcaggtccca

SEQ ID NO: 2596 - DNA, 250 bp, Zea mays
tgtgaaggttctttatccccacatgtgctaagcggcgatgccacagccagcccatgctagtcttagctattaagcatgcatctagactggcctcttcttttgcaaaatcaactaaataaagtttgtcgtctaatacacccttaaaagctagtgaaccatcacttcttctaaagacaaacacatctacatttgtaaatagacagttataccccatgttgcataattgactaacagatagcaaattataacc

SEQ ID NO: 2597 - DNA, 249 bp, Zea mays
tccaatctcgttcattttttacaattgagacaagtaatcattattgattaatgacttgagagagagagagagagtgatccaggtgttatttgtcgctcttgtcgcttggcttttgcaatcgtgctttcttttttcccattcttattctcaagcatttgtaatcaaagcaagagacactaagtttgtactggtccttatggggctaagtgacccgtttgattaagaagaaaactcactcagtctaggtga

SEQ ID NO: 2598 - DNA, 250 bp, Zea mays
tgatcaagcgacatgtgcttgtccaagagatgaagagtcaaggtgcaagccggatatttgcacgtacaatacaatgatttatcatctgtgaaggactcaaagcttaagcacgtcatcatttctaaacatgtagataagaagttaaagttgtatttgattcgttacatgcacatgctttatgtttctgttatttatgtaaagtgctaataaaaatatagaataacaattagtgtttttatatcaatatatt

SEQ ID NO: 2599 - DNA, 251 bp, Zea mays
tgtgaagattcttttttccaacatgtgctagtcggcgatgctagagccagcccatgttagtcttagcaattaagcaagtgttgagttcagctctatcaaaatctactaagtatagctgaccctctaacactcccttaaatgctactgaatcatcacttcttctaaagacagtaacacctgtgttgggggccttcggcttccgaaggtcctcaaaaacataatttgacaatgttttccaagtatgtgagcag

SEQ ID NO: 2600 - DNA, 256 bp, Zea mays
tagagcaatggtggtcattattgcaagagttgaaggatgtattgcggaacaatttaaacttaaggaggtagcacacttcacaagttgttactttgcagaagaacataatgtatttgctcgaaagaaaaggtaccatgatgatgaatgagagatgcctccttgtagtgatctttcaatttttcagacaaacggcaaagccgttggtccacccaaggcatatcacctcagtatggaagaacggaagtctgctttactg

SEQ ID NO: 2601 - DNA, 255 bp, Zea mays
tcgactatatcatgtatatttaatctttatcaccgattccttctcaatatagatgatcatgtaacttcatagaataatagaacaaaggtgagctaaatagcgcaaggaatttggaggtggagctcgtagcagcacctttgtgggcacaagtgagaaataacttcagacgctcctcacatgtttatataaccagagccggctcacaaattaattaagagtcccgcacaaaaaaaacactcgatgtcaaagtggtcc

SEQ ID NO: 2602 - DNA, 251 bp, Zea mays
tgtgaaggttcttttttctcacatgtgctaagcggggatgccacagccagcccatgctagtcttagcaattaagcatgcatatagaccgacctcttcttttgcaaaatcgactaaatagagtttgccgtctagtacacccttaaaagctagtgaaccatcacatcttctaaagacagacacatctacatttgtaaatagacaattatatcccatattacataattgactgacagatagtaaattatatcca

SEQ ID NO: 2603 - DNA, 251 bp, Zea mays
tctaaagggagagctcgttttaggattaacaaatgttcattttgagaaagacagggtttgtagcgcatgccaagtagggaagcaagttggtgctcatcatccacacaagaacatcatgacgactgacatgccactggagctcctacacatggatctattcgacccgatagcttacataagcatcggcaggagtaagtactgtctagttattgtggatgattattctcgcttcacttgggtattctttttgc

SEQ ID NO: 2604 - DNA, 249 bp, Zea mays
taccgcatttgaagtatgttcgcttccccttggtcttagtcttgctcggctgtccattgcgaccctttaacaccgccttgaaacgcttaatgatgagagccatttcttcatcattaaacccggccgcctcaatttgcgccaccttgcttggtagtgcctccttgctcctcgatgccttgagagcaatgggttgaggctcgtggattggaccgtccaacgcgtcatcgacataccttgcctacttgatca

SEQ ID NO: 2605 - DNA, 251 bp, Zea mays
tcggaaaccttttttttttagccatctcccggcagacagataattctttggtgcctgggaggcagtataagaagtcatcttcatctgtgtcgttgaatactaaggcccctttcggatacttcagctctcgggcatagtgattagcttcaaaaatctcttcttcagataatttcttccccgaagcatgtcgtacaatataatcaagtactttggaagatgcttcgggggcagcagtgccagtttcttcagcc

SEQ ID NO: 2606 - DNA, 248 bp, Zea mays
tggcgtcatgttattgacagaatagaatggtgactgggcgttatagtgttcaagaaaagaacgctgcagacgccgcaaagaaaacaaaggcgtgtccaggaccactgcctttggctctgaatctttggaacaccaaaagcgaccaatgcagctgcgacacaagttagctagcttctagctagattcgttgcgttgatctaagagcaacgatgcagtcaattagcaatgtggctgaccactttgctcat

SEQ ID NO: 2607 - DNA, 247 bp, Zea mays
tgggagtcatccatttttaaacaagcaccatctcttaacatagattttctatagatgaactccacacaagagatggcattagtagcacacgcactagtttcttattaaccaaccctttatatgcggaacgcaagcaagttgctaaaatagagaaacctcatcatatggactaaatttcccttgagcccttatgcacaatatattttgaatgacatggataataagcatggtttttcaatgaagtcta

SEQ ID NO: 2608 - DNA, 248 bp, Zea mays
tttaaagagttctgtggacaagttggcacgaagatccattttgcatcggtcaggcatccagagtcaaatagacttgttgaaagagctaatgacatcataatgatgggaataatgaaattaatcttcaatcagcccagaggaaaatggccagatgaattaattaaggtagtatggagccacaatacaacggcatcaaggtcaacaggctttacaccattcaagttattattcgatgatgaagcaataac

SEQ ID NO: 2609 - DNA, 250 bp, Zea mays
tgtgaaggttcttttttcccacatgtgctaagcggcgatgccacagccagcccatgctagtcttagcaattaagcatgcatctagaccggcctcctcttttgcaaaatcaactaagtaaagtttgccgtctaatacacccttaaaagctagtgaaccatcacttcttctaaagacagacacatctacatttgtgaatagacaattatatcccatattgcataattgacttacagataacaaattatatcc

SEQ ID NO: 2610 - DNA, 247 bp, Zea mays
tgtgaaggttctttatccccacatgtgctaagcggcgatgccacagccagcccctgctagtcttagcaattaagcatgcatctagaccggcctcttcttttgcaaaatcaactaggtagagcttgccgtctaatacacccttaaaagctagtgaaccatcacttcttctaaagacagacacatctacatttgtaaatagacagttatatcccatatgacataattgactaacagatagcaaattata

SEQ ID NO: 2611 - DNA, 254 bp, Zea mays
ttctcgactaagtttgggacagggcctcatggacgggcgaaagtacgtgtaagcggcaaggccgaccgagccgagggactcccacgcctctgggatacggatacctcactcatcaccttccgcgagaagcaactctcgcccgcacaaacatccctgttaccgacggaaagtccagatgctcgaaacaagaggaaaaaagacgcagcttcacaagcgcagcgagggtgtgtttttctggcctcggcggccgcaga

SEQ ID NO: 2612 - DNA, 253 bp, Zea mays
tcggcgtctttatttgttttttcttcctgagcccgtggcatccaatcagcaatgaagtatgctaacgcctgggactgaattgaggatctatggacataatcaatgctaaactcattaagctccgcaacccattttccaatccttccagtagcttctctattcctcattatttccttcagaggctgtgacgaaggaacaattatgtgatatgcttgaaaataatgttgaagctttctggaggccattaacacac

SEQ ID NO: 2613 - DNA, 251 bp, Zea mays
tgccaatacttgtttaaatatacaacatctaccagcacagcaactgcagaccataccagtgacttggcccttcgcgtgctggggactagatatgattggacctgtcggcgtttcgagaccggggggtccctaagccgacgagtgagtgtgccgcgtgccccagcccagatgggtcgagcgcatgggcgagcgcgaaggggggaaaggcgaggtggccggaaacgggcgtgagagaggtggaaatcccgcgg

SEQ ID NO: 2614 - DNA, 251 bp, Zea mays
tcacgagagagggtttggccttgaagtgagccatctgagttagcctcccttgggaaggccctgggcatccccttttataaatacaaggggatggtctagcagtacatatgggggtgtagctatgtgctaacgtggccgacggagaagtgtttgagccctgtagaagcgtagctggcggtgcggccctaggtcctgctgacgtttctttgccttcgtagagagctgagaacaattgacgtcatggatgcatg

SEQ ID NO: 2615 - DNA, 250 bp, Zea mays
  unsure (1)..(250): unsure at all n locations
taaagcagntgcttttattttgtcaggtatttattgaaaggaaaatgtgcccttgggcaatttctattatgttttggtgattaaagtgcccaacaaatttaaataagtttttatgtgctaaatgaagagagaagtgcaaatcaatgagaagatatgtttctagacttagtacatagtttttaagtactaatatgttttatctaagtgctagaaacagtgagaagaaaagaagaaaagatttgcaaatgac

SEQ ID NO: 2616 - DNA, 251 bp, Zea mays
tcacacctttttatttactgggcggcatcactgctggctgttggccaatagaaaccagatctgaaagccttcccggccagagttctggatgctgcgtgtacttcgcactatacggcgtggatttcatccaatagctgcttcccagtagtcgaggaaatgcacttcatgaggactccagtcgcgcctttctgtacagtgcgccccctataagggtgtagtgggccgactgtcttgcgatgcgctgtgtcaca

SEQ ID NO: 2617 - DNA, 250 bp, Zea mays
tggtgaattctttgttcttaagttaatttgatgctcatgcttactttttgttcacataaaatgatggtccttggtttggcatttttaagaggaaccctagttgacactggggtgtcacagtcgtagagcgcgccaacggcaagattttcacggcaatcaagaaaatgctcctcgacgacaagaagggtaaatgggtcgacctgctacctgaagcagtctgggcactgaacacgaccgagtgtcgggcgac

SEQ ID NO: 2618 - DNA, 246 bp, Zea mays
tgccctcaacattatttgtatcaaatgatatcacaagaaggatattaaattaaaccatatgaatgataccagttgaaatgattactctccctaaatgagtgttctctttagaaagaggtttctcccctttttagagatgaagaaatactccccctgacagagatcctctacttaggaaaaagcatgtgaaaattagaggtgcaagacatgatttgaaaagactaacttcccttacgcataggtaac

SEQ ID NO: 2619 - DNA, 247 bp, Zea mays
tgaaatgagttttttttttcattatttgatatgcaagttcacctaatcatacaactcgtggatcagataaaaatattagggccactatatttacatcatatgtttcagttggagcgatacctgagagtattaaaaggttatgtgcgaaatcgcgctcacccagagggttcaatcatggagggatacactacagaagaagtgatagagagctgtatagattacatcagtgacagaacaatgataggtg

SEQ ID NO: 2620 - DNA, 250 bp, Zea mays
tcacgcagacatgcaaggcgtgaataaacctgctaaacattgaacagccaacaaagtttccaccagcaagtaccatatatataagggggtcaatgcatcaacaccatgatcgcaaagaacaactgtacatatatcagacatggcaaatgccttctattgttcccaaatacatgggccaatgcatcaaaacagtgatcacaaagaacaactgcacatattatcaacatagataatgtattgtcatgctgtc

SEQ ID NO: 2621 - DNA, 249 bp, Zea mays
tctaaagggagaacatgtgataggtctaaccaatgttcatttcgaaaaagatagaccttgtgcagcttgtcaagcagggaaacaggtgggaggagcgcatcacagcaagaatgtgatgaccacttcaagacccctggagctgctgcatatggacctcttcggacccgtcgcctatctaagcatagggggaagtaagtatggtctagttattgttgatgacttttcccgcttcacttgggtgttcttttt

SEQ ID NO: 2622 - DNA, 250 bp, Zea mays
  unsure (1)..(250): unsure at all n locations
cttgtgangatttttttttcccacntgggctggggggtggtgcctgaggccccccctgtttgtcttagcnnttnngccngtgtcgngttctgctctatcntgatctaccaagtatagctgaccctctaacactcccttaaatgctattgaatcgtcacttcttctaaagacagtgacaccaatatcagtaaaaagacagttgtagcccatttgacataattgagaaacagaaagcaaattgtaatctaaa

SEQ ID NO: 2623 - DNA, 253 bp, Zea mays
tttgattcatcataatctgatcccattaccaatttctcttcctatgtgtacagcaatctcgtggccactggtgggatatgtggttgtctcaattgcagacaattttgttgaacctgtaatatcaatgaggttgaagatatcagaagtaaaggcaatttttaatcaggtatctcgctagccctgttgctactggttgattgcttcatttaatttgatgatacttttcttttgagaagagtagtctatggttaaa

SEQ ID NO: 2624 - DNA, 252 bp, Zea mays
tgagatccaacaattttttctcacatgaccgctatgttttccttagcaaaccatagttatggggccaatgcagatatttgcggatgggcttaaaggcggactatgagcttaacaactttgctaaacgaggaattaaaacttgtgagaaaaggtaacttgtaataaagcatataccacgcccttttgctgagttgtgatcagataccaaaaagggggaaatcgttacaccctggaagagtatggtaaggtata

SEQ ID NO: 2625 - DNA, 257 bp, Zea mays
tactcaagcttctgtttacgtcgtttttatttttcttggcaatgtcctggccaaaggttagcttcgttcactattagttgtgaacctgaaacacatttgtttgtgccaaagtgaaggttttgtgaggaccttcggctaagtagggccccaacaacgatcataactcatttgtcactgtgctcttcgccaatggaggtagcggttaaaactctaataaatttcctaatgacaatctgaagtaatgtttcttttgataa

SEQ ID NO: 2626 - DNA, 250 bp, Zea mays
tttttgcaagagtctttttattttgataagctttacctggattttcaaaagccagcatatcctagaaagtcattttcctttgatgggtaagacttgtgaaagtacactccgtactcagggttttcaaacccatgttgttgtaggcgatgaaactgctgagttctgttgtttctggtccaagggtgttccaaagcaggaggaagaaaactaagacctacctggggaaggtgttttgccttcctaagatgta

SEQ ID NO: 2627 - DNA, 244 bp, Zea mays
ataaccccctttttttcgagaccctttcccggttttttttatccataatgaatgcgatatccaatgtcatacttgatgcatatttactttatttgaacccttgtatgacgtactgtttgtttcccaatttgaatggatgaatgtatgtatgcttgcaatcgcatatagaacgatccggtcgaatagccctaggaactcccaggagaagcccctgagcagcatttggttggaggaggcaagtgtc

SEQ ID NO: 2628 - DNA, 251 bp, Zea mays
ttaccaaatggacgtgaagagttccttcctcaatggaccaatcaaggaagaggtctatgttgagcaacctcccggctttgaagacagtgagtaccctaaccatgtctataggctctctaaggcgctttatgggctcaagcaagccccaagagcatggtatgaatgccttagagatttccttattgctaatggcttcaaagtcggcaaggccgatcctactttatttactaaaactcttgacaatgatttgt

SEQ ID NO: 2629 - DNA, 250 bp, Zea mays
ggttagcaactttttttcactacggaaaaaactgcttttttctgatcaggggaaccccatgctcttgtgtgaggatatagcagagcagaaggtgctcttgggatcccaactgtccgaagagcaggagaaaaccttgataaggtttttgttcaacaacaaagatgtttttgcttggtcagctaatgatctttgtggagtcaacagggatgttattgaacactcgctcaatgttgatccatccttcagaccc

SEQ ID NO: 2630 - DNA, 250 bp, Zea mays
ttgacgagttgactattttaacatgaggagctaaagtgctctcatgttgatttggttcaaaggtatgaaactatttcaattgagcaagataacgctttacattgtatcgctcaattagtaaataggaataccttgcttaagaaccaagtagaaaagctaaaagttgaaaatctagcttttcaagaaaaatatgatatgctcctatgctctcatgaaaatcttatggatgatcatatcatattaaacattg

SEQ ID NO: 2631 - DNA, 250 bp, Zea mays
tgtcggtattctatctcgccatccattgtgaggggagcctgagtctagtattccttacgcataagcccctggattttcctgtttttgcgcacgtagcccaaacagagatataatcagggatttatttaagaaatgatttttcagatataaaaataattccagaacttggataattcatagaaaattcatatgaacttcaaattaacccattctagtttctaaaattttgtaatattattctctatcactt

SEQ ID NO: 2632 - DNA, 248 bp, Zea mays
ttaggggaatggttttaaaatgttcccaagaatgaagttgaatcacttttatacccctgggataccaaaaatccccatttgaaccctggaaaaccctaaaactaaaacctaggggcttatgtgcaaaattgatgcacatttggactaaagtgcaaaaaccaagttaataaagtatcttaagtcccttgattcactaaggtgtgaatttggaagccaaaccctaagatttggattcatttgcaaaaagg

SEQ ID NO: 2633 - DNA, 254 bp, Zea mays
tcttaagagccaatgtaactgtatgtctagtagatggttttctcgcaagcttcgtcatatataatgttttaggatcaagtgcaccatctagagaaagaagcaagattattattagaaacaaactcaacaaaaaagaacaattctcatttcttctctacctacaacaatgagagtatcatcaagtatatattttagtctcttcttcatcactccaactattctatcgagaagatctttctcttgacttaaattac

SEQ ID NO: 2634 - DNA, 252 bp, Zea mays
tctaaagggagaactcattttaggactaacaaatgggcattttgagaaagacaggatttgtagcgcatgccaagcaggaaagcaagttggcactcatcatccgcataagaacataatgacgaccgacaggccactggagctcctgcacatggatctattcggcccgatcatttacataagcatcggcgggagtaagtactgtctagttattgtggatgattattctcgcttcacttgggtattctttttgca

SEQ ID NO: 2635 - DNA, 251 bp, Zea mays
ttggctatggttaaattttttaacagcacaacagtgcaatggcaatgaatgctgtggtaactcctcaccaacccgtctgtttatatagtgctgcaggagggaaggtgaaccgccaaggcgcttacactcgctgaacggtggaccggtcgatgcttggaatattataatcgtttctcggcaacgagctcagggaaggtgtttttcggaccttcggcattccaaagccttcgagtttttcgcggatcaagctc

SEQ ID NO: 2636 - DNA, 251 bp, Zea mays
tctttaggtcacactttttttacccacgacatatgtagcagatttgaggttacaaatgactacaactgatcaagataacggtggcccacaaggaatgtgctgccacctacagagcttgagagtacttaaaaaggctatcaatttctggcagcacatttcaacgaggagtccggacctccaacggcagcattggagacgtcgcgctggtgctcgtcccgctccttagctgctgctcggacgctgcagacttg

SEQ ID NO: 2637 - DNA, 249 bp, Zea mays
tgagggtctttatttttatgatgttgaggcaggtgcccccgtccatcaggaccttggtgagcctgacatcaccgacaacggggttgacgacgagcgggtatttccccgggctcggcacatggtcggggtggtcggcccggtcgaaagtgatgggcttgtccgaccaatatatgtagactggcgccgccacctttaccgagcagacctcccggcgctcttgcttgcggtgccgagccgaggtattcgccg

SEQ ID NO: 2638 - DNA, 267 bp, Zea mays
attaaatactcaagcttgtcgcgcaattttttttatgtcgcccgactcaggattttttgacttagaggattatcgtgctgtcatgaaggcgatgtgcgataaagccatggacaatgccatttgcgctgggcggatcctgatgaggaggcctggcgttgtggtgcctaaagatattgttgccaatgtccttgctacgcctgctgtcgtgagccaaccttcttcttctgccactcttgcagctgaggcttcctacaaaaatgctccagt

SEQ ID NO: 2639 - DNA, 249 bp, Zea mays
taccttaggaaccattttggtgggtcctgtaactaaaggttagcttcaatagcaacacataaatataaatatacacatattagaccaccccaatgtgtgtcgttattatgacactataaacaaataaagaataatatatcatagcacatgaatcggtgccattccctatcgaaagattggaaggatcctcattgataggatagaacagctcaataattcatgcttgcagtaaaaggtacaaagaacaat

SEQ ID NO: 2640 - DNA, 68 bp, Zea mays
tgtgacaacattgattttttattgggaacccctcgctgaaggttctgatactagtggtgaggcatgac

SEQ ID NO: 2641 - DNA, 246 bp, Zea mays
tgaaaccatggtaagtttcataggcaagtaaaatgcgaattgactcaagcctagctatgggtgcataagtttcaccaaaatccaaacctttgacttgtgaatatcctttggccacaagtcgggctttgttcctggtcaccacaccatgctcatcttgcttgttgcggaatacccacttggagcctacaacattttggttaggatgcggaactaaatgtcatacctcattcctcgtgaagttgttga

SEQ ID NO: 2642 - DNA, 248 bp, Zea mays
tccatactaattttttaataaggaaaatcggcaccatcaaaaacgggaggaggtccatccccaccggacatcgtaactctagcggttaagctaatctatgagcaacaagcctttgataccaattgaaaggatcacgatgcccaagagggggggtgaattgggcttttctaaaaaatcaacactaattaaaacctaagcaagagctaagcaagagcccaacttcaccccaacaactagcactaagaata

SEQ ID NO: 2643 - DNA, 245 bp, Zea mays
tgtcccatcactttttatgctcctcctcagccgaggtagggtcccactcgactgtcgaacccggtggtgagatggacgaccaagtcactccagcaaccatgtcctccaaagaacctgtaaaaattatgccacaagcaaggctgagtatactaatactcaactagacttacccggtgtgaggagtctactcctctacctctagacatgcagctgtttggctgaggggtttggtttgccaaaagcac

SEQ ID NO: 2644 - DNA, 251 bp, Zea mays
tcctcccttctttttcggaaatcattattggcccgggtgtactcatccattttttgaagcagcttctctagagtctgagggggtttcctggcgaagtattgagccataggtcctggcccaagacccttgatcatggcctcaatgacgatttcattaggcaccatttgcgcttgtgctctcagacgcaagaaccttcagacatacgtctgaaggtactcatcatggtcttgtgtgcactagaacaaggcctg

SEQ ID NO: 2645 - DNA, 251 bp, Zea mays
tctaaagggagacactttttgggactaaccaatgggggggtttgagaaagacagggtttgtagcgcatgtcaagcagggaagcaagttggtgttcatcatccacacaagaacatcatgactactgacaggccgcttgagctactccacatggatcttgttggggaccttccgcttccgaaggtcctcaaaaacaggatttaacagtatttctggagtataatgtgtgaacaggtatcttcagactcaagtc

SEQ ID NO: 2646 - DNA, 247 bp, Zea mays
tgagcagggactgtctttttttgaaacccttggaagctagttatcaacatatcctacaacttctgccaagaagtgattgtccctggccgaatagaagagtaccaggtctgaacaacgcttttgacggccatgacaaaagattttgccatgactgcagtattgccaccatacgaagatatggttgcttcatagctcattaagaattgctttcggtctgtatgaccgtccttcctggggaactggggtg

SEQ ID NO: 2647 - DNA, 250 bp, Zea mays
ttatggaggccatttactcatcatataataccttctccaattctgtgtaatttttcttcgatggacttagaacttcagagacgaagtatattggagcttgttttttagcctgaccatctagcttctcctataccagtgctgcagaatgcgaagctgccacatataaaagcaatggagcccctggcacgggtggagttaatgttgttaaatcaatcaaatattgtttcaactcttcaaaagctttttgttg

SEQ ID NO: 2648 - DNA, 269 bp, Zea mays
agagactctattacttaagcttggaggcatcaattgtttttcctattaggcggcgtaggccgtgccttcttttcttccgctgccctgaatgcaacgggttgcacctcgagagtggaggtggcaccttgctccaagttgacaatgagtttggagtctttgataataagtccaaagctcataaacttgccaataacctccttgggagacatttgcttatacctaggatctccatgaataaattgcacttgagtggggctatgaaaaacaag

SEQ ID NO: 2649 - DNA, 288 bp, Zea mays
ccgctatgtaaggggcgctataaaatactcaatcttctaaagggtttttttcatttctacgattaacaggggtttttaaataagaaacacctggcttgttattgcatgccatgcgggaaagcaagttggagcccatcatccacacaataacatcattatgaccgacaggccgctttgaactactccacatggatctattcggcccaattgcttacataagcatccgcgggagtaagtattgtcttgtaataagtggaagattattcttgcttcacttgggtattcttt

SEQ ID NO: 2650 - DNA, 249 bp, Zea mays
tcgaatagatgttttttttgtccacaagacagggagaaggcaataaggcatcatcgcttcttctcgacttatgcgcttatttgtgtacaaaaacataggagtgttgtgcgggtcggttggcatttattgcctttgcaccaacttgttaacactttttctcatcctccgaagctttatgctagcctttgctcttcgtgcgagcttcgagagtttgttagatgactaggatttgtgcaactgctaggcaag

SEQ ID NO: 2651 - DNA, 248 bp, Zea mays
tctcttggattgctttggcataggaggcttgcacatgttgggatgagcacactcaagaaggtattaaagaaagatatggttagaggtttaaaggatgtggtgtttgaaaaagacaagccatgcagtgcatgtcaagctggaaagcaagttgctaatacacatcctactaaagctttcatgtcaacatcaaggccactggaactacttcacatggatttatttggacctacaaattatgtcagtgctgg

SEQ ID NO: 2652 - DNA, 247 bp, Zea mays
tctccgtgagtgtttttgggggatggggacggggacatggattttttctccccgcggggatagggatgaggagtcgttccccacgggaaattccccattgccatccctacttatattttatgctccaatatccccatccatggtttttactcttttttgtaagaacaccatccacaaaatgcttcaagtgattcatcaccttgtgttctagcttatttttcaaattttagttttcccttttattatg

SEQ ID NO: 2653 - DNA, 248 bp, Zea mays
tgcacaccatacctttatgactggagtctacgaaatggttgcagtacaccgtcttggagagtgtgccgttggggaaggagttcttgacgtccaactggtgcaccacctagtttcgagagtgcgctaaagagaggacggtccgagctagagttggcaatggatacccgaaacccaaatacccgacaagatttacccaatatgaaggtagatatgagatgattttattacctacgatatgttaatgggca

SEQ ID NO: 2654 - DNA, 247 bp, Zea mays
ttgtcgaccggggcttggctgggtcgtccactggcgggaccaacgccggagtcgagttctttaggccacgagccgggctggtgtcctcgggggacagctggctgaggcttcggagcggccggccgagctgtctgctcgggccgggttcctggaggagtccctagcggcgatggcctgggcgtggtgctgacgtcgtccttcggagcggagatcctccgaccgtgttgccgtctgaggctcggtcggg

SEQ ID NO: 2655 - DNA, 245 bp, Zea mays
tctatgtatgttctttcatgttcttaagcggcaaaacacatacttagctaagcagaaccgagttaattacatgcatgatcacacggatactggtgccatctgatgcggccgtggggagtgtccgttggtgggccaattggctgtagacttgctcaaagattggtggcacatgcaccgcgatgatctggtctgctgggttgattgccatggcaacatctgtcatccattgaaccttccgtgatgtc

SEQ ID NO: 2656 - DNA, 251 bp, Zea mays
tatcataggatttttaggtgttacacaccaggttgggccattgcaaccattgctcagtagaagatgaaggcaacaaggaggacttttaggagtttcaggactatgatgagttctagggtagattagcggcaaacccccggtcggctgcctatgaaggccttatcatactacgtttcgtttagcactttgatttatgtttaagttaatgactatgtggatgtttcggacatcatgatgtaataaagtaatac

SEQ ID NO: 2657 - DNA, 252 bp, Zea mays
tagcaagtgcgagttctttatcagagaagtcctgtgggttgggtcacattataaaccaagagggattggctgtagatccgaagaaggcaacaactatcttggactagaaagcaccaacagatgtccgaggaatcaagagtttcatcggaatggccggttattatcggtgtttcattgaaggtttctccaagattgccaggccaatgacagccttgttggcaaagaaggttgagttcaagtgggccccagcat

SEQ ID NO: 2658 - DNA, 250 bp, Zea mays
tgtgagcaataaattttctttaatggagaatgctgcggcggctgattaaccgaaccccatgcttttatgtgaagatataccaggcgaaaggtaacactatattacaagggatggctaaagtccatgaactgaaatttaattacatcatactttatacaagttattaccggagttttttgagctatttctactgactactcgagcttctgcagcattcatggagcttcgtctttttacctccgatcttcag

SEQ ID NO: 2659 - DNA, 249 bp, Zea mays
tgctatcaatgtggttcttgaagggcattacttccgggactgtcctgagaaaagttcactacagatcacctccgatatgaagttatctcagtctccagacaaagaatatgaacaaaaatgcacagaaacttctatcgatatcatgaagacaactcgatcaagtaacttatcaagtcatgcttgctttggctgtggtgatatcggccatcttgttaatggttgtcctaagaaggatgtagagatcaatat

SEQ ID NO: 2660 - DNA, 342 bp, Zea mays
  unsure (1)..(342): unsure at all n locations
ttatgaattttattctattacatatacctactggcggcccanntttgtactacttcccccactatttagcgcgagtataaaatactcaagcttgcattgcatttttaaattccttgtattgcatggaggacttgcctaacccattcgaaataaccgccatcaaagcgagtgaaaaagcttaactcgggtcaaacctgacaagtcttagttttaagcttttatcacttaaattcttactttcatgcaattattggttcttgaaatatgcatgaggtactgcacttagggggagtattcaaaactcaaatcactcatgaaaacccctaacgcaaaccaaaatac

SEQ ID NO: 2661 - DNA, 249 bp, Zea mays
tggtgccgatggtatattcataagtctttgaaatcttggttgtctaactgcttgccgttgtctaccgtgagttcggacggtactccgaagcggcaaacaatattttgccagaagaatttctgggctgtcttcgatgtgatggtggatactgccctcgcttcaatccatttggtgaagtattcaacggcgatgaaggtgaacttgaggttcccttgagccgtgggtaggggcccgacaatgtctaggccc

SEQ ID NO: 2662 - DNA, 249 bp, Zea mays
ttatgggctcttattatatctaaacatattggggctaaagtgtatccttttgagcttgtccatgggcaggaagcagtgttgcctgtggacataagtttgaatgctgccaggttccccagacaaaatgatctaactctcactgattattacaatgcaatgatggataatattgatgaggtgaccgacaagagggtgatagctttgggagcaatagaaaaggacaagatcatggtagctaaggcctacaac

SEQ ID NO: 2663 - DNA, 248 bp, Zea mays
tgcacgcgccgtcttgtcctctcccacgcggccaacggtctcgtacgagtgccctggaccttccttttataggcgtaaggagagggcccaggtgtacaataggagatgtagcagggtgctaacgtgtctagcagagaggagctagtgccctaagtacatgccgtcgtggcagccggagaggtttttgcaccctgtccatgtgatgtcgtggccgtcggaggagcgctggagccttgtggaaggacagc

SEQ ID NO: 2664 - DNA, 248 bp, Zea mays
tatgaagattctttttcccaacgtgggctagacggggatgccagagccaacccatgttagtcttagcaattaagcaagtgtcgagttgagctctattaaaatcaactaagtatagctgaccctctaacactcccttaaatgctactgaatcatcacttctaaagacagtaacacctaaatctataaaaagacagttgtagcccattttgcataattgagaaacagaaagcaaattgtaatctaaagaa

SEQ ID NO: 2665 - DNA, 248 bp, Zea mays
tttataggatgagtgtttgcatcttgctttccagcgctgacatgcactacaaagcttgtccttttcaaatacaacatccttcaatcctctaaccatgtctttctttagaaccttcttgagtgtgctcattccaacatgtggaaaccttctatgccatagccatccaagagatgctttggtaaagaggcaagtccttaggtttgcatcttcagaagagaaatccactaagtataggttgttgtatctaa

SEQ ID NO: 2666 - DNA, 249 bp, Zea mays
tctaaagggagattatcattttacgactaaccaaggggcattttgagaaagacaagctttgtagcgcatgccaagcaggaaagcaagttggcgctcaccatccacacaaaaacataatgatgacggataggccgctcgagctactccacatggacctattccgtctgatcgcttatataagcatcggcgggagaaaaatcacaaacccaagatacattaaagggattcttgagacgggctcaaactgag

SEQ ID NO: 2667 - DNA, 333 bp, Zea mays
cttaaaaaaaggggggtggaactgttgaatcttcccgatctcaactccttcaaataccctctaacaacggcgttacggggccttcttttactgttgctgcttgaccacgctgcagacagatgactgacatacgggtgattctgggagaaccttctttttaacttctcttcactatcttcctttgtgttgtcacttttcactggctctttcttctctctttatcttccccgtggagatttatgccagagtattaccctcctacagaggaggagactcaagatgttgaaccatgtacaacagtcttcaacccaagaatcacccaccattgtgatc

SEQ ID NO: 2668 - DNA, 266 bp, Zea mays
  unsure (1)..(266): unsure at all n locations
acaccgatttggtttatccaggttcggttcttgccaacctactttccgctgaggtggtcacaaaaaccgggtctctttcaaccctttccctctccatacggtccctctacccagtgagcttcttcttctaatcagacgggaacaaattttccaaaggaccaccccccaatggtggcccttgcactggttcaactgaacgtttgccccaagattgtaacaaataaagaaccatcccatgcctaactccanaacacacacacactctt

SEQ ID NO: 2669 - DNA, 132 bp, Zea mays
  unsure (1)..(132): unsure at all n locations
acctatgaatctcagcttcacggtcgaatccacggaactggtgacgtggctatgtctctgactttccggngtgcaccggactgtcccgtgctccatcaaacaaacggccttcaccaacggtcaagtttgtgg

SEQ ID NO: 2670 - DNA, 455 bp, Zea mays
  unsure (1)..(455): unsure at all n locations
tcgcatgangatggttgttttcttgctcgaagctntctgacttcttgaggagttcactgtttaatctggtaattggggcgggggcctctgacaatgaaacctccattgtttcaagaacaaaatctttcttttttcaagagcagcttcatgatctttgattttactttccaagccttcatttataacctcattcttcttatcttcgaggtcctattgcatcctcaaggctttacttaatagcatactctgtgcaaaataaccttcatcagaaattgccttcatcgtaaaacaatgaaaagctaagggaaaaaattttaccttgaaattagaatagaataaacttccgacgatatgttgtcgttggtagcgactgatgtcagcttcaagcttcgaaaagccaacactctttgacagagtgctgataatatttgctccagttcgatctcgaatacatc

SEQ ID NO: 2671 - DNA, 340 bp, Zea mays
aaaacacgttttctatggcgggtttttcaaacaaacaaatatttcttcatcatccacacaagaacatcatgacgaccgacaggccgcttgagctactccacatggatctattctgcccgatccgttacataagcatcagcgggagtaatttttgccttgtaatttgcgatgaacattctcgcttcacttgggagtactttttgcacgataaatctcaaccctagagacctttaagggattcttgacacgagctcaaaatgagttcggctatggatcacaaagattataaccgaaaccggaccgagttcaagatctcacaaatataatgctttcttgagga

SEQ ID NO: 2672 - DNA, 203 bp, Zea mays
cctaagtcctggtccaaaccctttgatcatggcctcaatgacaatttcattgggcactgtgggcgcttgggctttcacacgccagaaccttgggacatacccctgaagatattcttccgggtcttgcctgcactggaacaaaacttgagtagtgacccggcttctttggaacccttggaaatagtgatcagcatgtccttcat

SEQ ID NO: 2673 - DNA, 449 bp, Zea mays
  unsure (1)..(449): unsure at all n locations
tgagtcaatcattntgctaaggataattgatgctttaaattattatctgggtatgaagcacattcgagagaagataaaggctggagtagccaaatgtttcaaggaagacgatcaaggtgtgatatggtttaaaaaccgcatagtagtgccaaagaacgaagagctccgccagcaaattcttgatgaagcacatcttagtcgttattctattcatcccggaagcactaagatgtatcaaaacttaaagcaacattactggtggacaaagatgaaaatcgaaattgcacgctatgtggctaagtgtgacacttgcagacgtgtcaaagccatacacatgaaaactgctggtccattacaatccttgccaatcccaacatggaaatgggaagacatcagtatggactttattgtgggactacccaggacagcaaaggggtatgactctattt

SEQ ID NO: 2674 - DNA, 178 bp, Zea mays
  unsure (1)..(178): unsure at all n locations
cgaaaaccctcgcgctactccacttaatctccttgcacccacatcccctttacccacctcgcctaataaccaataagcgcccancccatcccctttccaacacatgccccacctaatggccaacggggcctcatgccggatattctccctacacatctgtgcccatttcacacccata

SEQ ID NO: 2675 - DNA, 443 bp, Zea mays
  unsure (1)..(443): unsure at all n locations
tcggaattacaaagcgacttaaagatacaatgacattntagtccataagagtttgagtcattgttgtaaacttttatgaggggtatgattgtaatcgctcacacgctgtgtcttgtgcctataaatagtgaacaatatccctttactgttcacgcattcttgtaattgcaatcgcatcactcggaaattattctttgtcaaggcagaggtataaatgtgtctaaacattatatttgaatatcttaaatttatataatatgtaaatgatgttgtttatttctaatttacttgactttaatgctttatgtctcatgttattttatattatctctgagagttcaattacgaaggtataaccttcgtaattgtgtcattataaccttcgtccgaagttcattaaatccttggggaaataatgtttcagcggacgaaggacactaata

SEQ ID NO: 2676 - DNA, 456 bp, Zea mays
tctaaagggagaacacgtgataggtctaacaaatgttactttcttttatatagaccttgtgcagcttgtcaagcagggaaacaggtgggaagctctcatcatgccaaaaatgtgatgacaacatcaagacccctggagtggacctcttcggacccgttgcctatctgagcataggaggaagtaagtatggtcttgttatagttgatgatttttcccgcttcacttgggtattctttctgcaggataaatctgatacccaagggaccctcaagcgctttctaaggagagctcaaaacgagtttgagctcaacgtaaagaaggtaagaagcgacaatgggtccgagttcaagaaccttcaagtggaggagtatcttgaggaggaaggaatcaagcacgagttctccgctccctacacaccacagcataatggtgtggtagagaggaataacaggacgc

SEQ ID NO: 2677 - DNA, 446 bp, Zea mays
  unsure (1)..(446): unsure at all n locations
nttccaaatggacgtgaagagtgccttcctcaatggaccattcatgatgatgtctacgttgagcaacctcccggctttgaagacagtgagtaccctaatcatgtctataggctctctaaggcgctttatgggctcaagcaagccccaagagcatggtatgaatgccttagagatttccttattgctaatggcttcaaagtcggcaaagccgatcctactttatttactaaaactcttgacaatgatttgtttgtatgccaaatttatgttgatgatattatatttgggtctactaacgaatctacatgtgaagaatttagtaggatcatgacacagaaattcgagatgtcgatgatgggggagttgaagtattttctaggattccaagtcaagcaacttccagagggcaccttcattatccaaacgaagtacactcaagacattct

SEQ ID NO: 2678 - DNA, 415 bp, Zea mays
tgcagaagactaagccacagaggtagcaatggccggctgttgtctattctagcgatgaggtcatgagtggcatatcattcttgtatggttgtttgggtttgagcgtgtgacggaggatgatagaaaggagaatagaggggaatggagatggtgtacactgcacagctagtacgtactgttgtgaactatctgctaatagctagagtctaaaaagagaagatgatgctgtcctagtagctactacgactacgaatactgttaaagcagaagggatggtgatagttatagagagaacattgtgaagaagatgagattggcagtgtcccagcagctcagatattcccttcaagaagaatatatatttatattaagttgccaaacgcctatagatcgacgattgaaaacgagagatatg

SEQ ID NO: 2679 - DNA, 365 bp, Zea mays
gaacctatgcttttatgtgaggacgtagcagagcacaaagtgctgttacgctctctattattccaatagcatgagaaaaccttgcttacgttgtttgtccaacacaaagatgtttttgcatgtgcagctaatgatctctgcggagtaaatacggatgttattgaacactcgctcaatgttgatccatccttcatagccagaaaacagcggcttctgaaaatgtcatatgataaggccgaatgtgctcgtaacgaaatcaaaagactcctcaacacaggagtcattatagaagtaaagacccccaatggctagctaatactgtatggtaaaaaagctatggcaagtggcgaatgtgtatcgattta

SEQ ID NO: 2680 - DNA, 365 bp, Zea mays
aatgacgagtgtactcacacgaaaaattgattaaacatgccggcgaattgacagggtcggttgggacttggaatacctatgggttgctacaaaaacaacgagacattgaaacctcacgacatggcaacactggactctggcctttctaaagaaaacatgtgcactggtatatatggccaagcctatgttaggcgcaatagggccaaggctggccaggtggggcccaaggcccaatagctaatagataagctctatctagttagttatacttatccaaagttagtagataaagatcagctctatctagaaaggtatacttatccaaagctagtagatagacttaagatagctctatatatagatct

SEQ ID NO: 2681 - DNA, 457 bp, Zea mays
  unsure (1)..(457): unsure at all n locations
cggaactatnaaactcagcttcttaccatgtcgctgctagccaagttggtgcatctactttcatccatgatcaaaccacatgaacgctgcttaatgacacactttgtttgaaacaacatatgtccctgattctgctctgccttctccatttgggcactaaacacacgctgtacaatgaggctctcataatgctctgcatcatctgcaccaaactgttcttcgggtggttccttaatgcctacatcatcaaccgcaagcaaagcaagtgtagcttcattcaaatcactagcagaggaatacccaccatcgtcttttaccaccaaaacacgctgattaggacaatcacgctgcacgtgtccatagcccttgcattgataacacagaacatctctggttctacccgtggaggctactgaagaggcactacctgcttggttctgggcagatttggttgctg

SEQ ID NO: 2682 - DNA, 338 bp, Zea mays
  unsure (1)..(338): unsure at all n locations
aataacccttggccacaagtcgagctttattccttgtcaccacaccatgctcatcttgcttgttgcggaatacccacttggtacctacaacattttggttaggacgtggaactaaatgtcatacctcattcctcgtgaagatgatgagctcctcttgcatcgccagcacccaatctgaatctttaagtgcatcctctaccctgtgtggntcaatagaggaaacaaaagaagaatgttcacaaaaatgagcgactcgagatcgagttgttacccccttatgaatatcaccgangatggtgttcacgggatgatctctttgaatcgcctggtggactctt

SEQ ID NO: 2683 - DNA, 327 bp, Zea mays
  unsure (1)..(327): unsure at all n locations
acggaccttnaaactcacggggttttatcaaaacttggatttgtgtgataatgacatccttcttccaacctggggagaaggaaagtgtttttctccaacactctaaaacgtatgtggttaaaatttcatgcctccgtaacaattaaaccctaaaaaacaagtatattacattctaggttaccagatattacccatattacatttcaaatggttttaccatagcacctagtcttccctaagtactacttctgcagctttcttcacgagtcgatcgacaacttgatccatgatagcttcacccatctttttaatttcatcggaatcttt

SEQ ID NO: 2684 - DNA, 402 bp, Zea mays
  unsure (1)..(402): unsure at all n locations
ggaatcanaatgcggggtactagtagcacgctgggcaggctgtgttccaaatagataaatcgggtgatgtggtagttgtcaaacgtgatagaagttgagtcacttaagttataaattgatgctcgacatgtgaagtctccaaaatatggtgttttaaggacttgtgtgttttccagtttaagttgagaaaatggttaagaaaaactaattaacctgctcccacctctgtttttgagttgcgaagtctaaaatacttgctaagttttatattagttagccaacttgttagatgactgggttaagcgcggaatcacgatgaattgtttgttgtagtctaaatacgtatgtttatggtcgtggatgaagcttattagtgctcatgggaagtctaagttaaaatgc

SEQ ID NO: 2685 - DNA, 383 bp, Zea mays
aaactcagcttctaagggagaacacgtgataggtctaaccaatggtcaattttatataagaagaccctgtgccacttggccagcccgggaacaggtgggaagagcgcatcacaccaagaatgtgatgaccacttcaagaccccctggagctgctgcataggaccctcttcggacccgcgcccatttaaacataaggggaagtaagtatggtctaagtattggtgatgacttttcccgcttcactcgggtgttctttttgcaggataagtctgaaacccaagggaccctcaagcgccttcttaagagggctcaaaatgatgttgagctcaaagtgaagaagataatgagcgacaacgggtccgaattcaagaaccttcaagtgg

SEQ ID NO: 2686 - DNA, 435 bp, Zea mays
actctcagaatcagacgaagctccagattgaagcctacttctttataatataaagcttccgaagaaaaaacattcagttcccaaaagaaccatagttaaatggccagagtgcgttctaccgcttaggttgagcgtgagggaggcgaaactgaaagatcggagactgttcccatcctcgaagcgatgcaacgatccacactggtaaccccggaagaaatccccactgctgaaacagaacaagcgactgccgaagcggaagaaagaaacattgacgaaactgattccgaagatgattatcgcaatgccatgccaagtaagcccagccactcggacttcggaaagtccactgtttcgaaagctgatctctccaagatggtgaagtcggggtatttcaatgaaagtctgaataaactactacgctctgggggggaagaa

SEQ ID NO: 2687 - DNA, 381 bp, Zea mays
  unsure (1)..(381): unsure at all n locations
atcaacacaaaaatgtatccactaatggggagaaggtaactgtatactcgctcttatgcgcctccaanaaagcttctatcattattttccaagcttacaacataaattgttcgcttcttcacaaacctttgaaggatattatgagaaaacgagaagctactggaaggattggaaaatgggctgcacagctcaatgaattttgtattgattatgtccatagatcttcgattcagtcccaagcgttggcagactttattgctgactggacgccacgggctcacgaggaagaaatgaataaagatgccgaagcatggacaatgttttgcgatgggtctttgggaaccttctgagcacgagcagctgttgtgttggtttcacctt

SEQ ID NO: 2688 - DNA, 447 bp, Zea mays
  unsure (1)..(447): unsure at all n locations
ctcaagcttgtgaagaggaacctttggccatnccatacaaatatctttattcgtaagccgcttcttcctacagaacttcggcgacgaagcatagtcccaacagtagcccctttcggggggctagatcgttattcgtaacgagcttgatccgtgaaaaaagtctcttaagcttcggggagccgaaaggccaaaaaacaccttccctgagctcgttggcgagaaacgattcaatttcccagcgcgtggcggtcccaccttgcagagttactgtttgactctgcggtccaccacgcagcgagtgcaagcgggtatcccgctggtgtaaaaatactggcgcttcgccttcttacctgcagtactatataaacagacgagtaggtgtgaagttaccacagcattcattgctatatgcaatggtttgctgccataattttaaccgacgccgag

SEQ ID NO: 2689 - DNA, 325 bp, Zea mays
  unsure (1)..(325): unsure at all n locations
cgctatcctaaaacccttgtgtagcctttgcaatttcgcttttagtttggctttggtcaattcgtgtcccgggacgagtcgtggtgacgggttacggtggatcttcggcataaaataactaccctcgctagccggtatcccatccaacattactcagatcacaagtcgatccaccccattaatcgttgtgattgcatatacggaagttttgccctanccgccgctatctagttgtgcctccaacaacataacttgaggtactctccttaaaccagacataacttttcgctcgggtgttcaaaaaatatgaaatttttataggagc

SEQ ID NO: 2690 - DNA, 444 bp, Zea mays
tggttgtgagctacaacaacttaattcatgtatgattactatatctatacccatgctttaatataatgaccccggagcgtgatggcccatgaatatcatatttgagtacacttgttacatacttaagaaactttcgagataacttttggtaatatgactaaacttgctcttaatgaattctattcataccttgtaatatgctcttaccctttcatttatgtatgagaagtgctttgatgtggatgaaattaatcttttgagccgaaggcgataaaacacctttccttctttctgtacacagcgaatcataaaaaacaacttttctctttatttccaagctcttctttttcataaataacaacttattcctattttttctttttgtcgaagcaaccacttatgctatgatgatagttatcctacatatgcctggatgaatgttta

SEQ ID NO: 2691 - DNA, 459 bp, Zea mays
acactataaaatactggagcgtgtaaagggagaacacgcgacaggtttgactaactttctattttaaaagatagaccttgtgcagctggtgtaacaggtaaacaagtgggaggagcacatcacatcaagaatgtgatgaccacctcaagaccactggagctgctgcatatggacctcttcggacccgtcgcctatctgagcataggaggaagtaagtatggtctaagtattattgatgacttttctcgcttcacttgggtattctttttgcaggataagtctgagacccaaggaaccctcaagcgcttcctaaggagagctcataacgagtttgagctcaaagtgaaaaagataaggagcgacaacgggttcgagttcaagaaccttcaagtggaggagttccttgaagaggaacggatcaagcacgagttctctgctctctacacaccacagcaaaat

SEQ ID NO: 2692 - DNA, 335 bp, Zea mays
tgagcgagtctaccccgggatagagcggcgatgtctttgctgttcgatggcgaagcgctggtccactgtccttgtgatgccccggatgaattcctccctgggcagaacggcgattcaccaacgtctgccccccttctgactccgcgtgtcttccttccagcaccgatggccgcaataaaccaccgctcgcacccctctcgtttggcgacagcgcccaagatggaagaccgtggcggcggtcgtggtcgggtttgaagcacgctggcagctgatgaaggaaaggcgcggtggacgccgatcttttatccccccagccaccgagcgcccgggtccga

SEQ ID NO: 2693 - DNA, 224 bp, Zea mays
tccacgcctctttactctccataataacctctaacatgctggccatcctcctcctcttggggagtgaggcacgagctttttgcatcttccgccaacttgcctttgtccgtgggctaaagatctctggccttcttattattctttcgccatgggggctcttcggcctatcatacttaacctccggtggcgccactaaaggcaccatctgcactacaattgggtct

SEQ ID NO: 2694 - DNA, 443 bp, Zea mays
tatgaagattcttcatcccaacatgggctagtcggcggtgtcagagccaacccatgttagtcctagcaattaagcaagtgtcgagttcagctctatcaaaatctaccaagtatagctgaccctccaacattcccttaaatgctattgaatcatcacttcttctaaagacagtgacacctacatcagtgaaaagacagttgtaacccattttgcataattgagatacagaaagcaaattgtaatctaatgaatctacaagaaaaacattggaaatagaatggtcaggagatatagcaattttacccaatcctttgaccaaaccttggtttccatccccgaatgtgatcgctcgttggggatcttgtgttttctcgtaagaggagaacatctttcttttccctgtcatgtgggttgtgcacacactgtcgatgatccagcttgag

SEQ ID NO: 2695 - DNA, 438 bp, Zea mays
  unsure (1)..(438): unsure at all n locations
tggcatacagctagcactctcgtagcctctgaagtacttttctcaaatgttcctcatgctcttgctcattttgggaatatattagaatatcatcaatgaacaccactaccaacttgtcgaggtagtccatgaacacactggtcatcaagtacatgaagtaagctggcgcattcgtcaaaccgaatgacataaccgtgaactggtatagtccatatttaatgatgaaagatgtctttggtatgtctgagggtcggattttgagctgatggtagcctgacctcagatctttcttcgagaacacactagctcctctcaactgatcgaataaaatttcaattctgggcacggggttcttggtcttgacagtgaccttcttcaaagctctgtaatcgatgcacgtnctcttcgtgccattcttattctccacaaatagcactg

SEQ ID NO: 2696 - DNA, 430 bp, Zea mays
tcttcttcattctgagtgaggaccaagccctttgatcactttattttaacgaatgttccaactccgagatgcttgcttcaaccgcgggaaaggatttctgaagtttgcatatctttccagcattgatcggatcgacaaaaccctcgggctgtatcatatacacgtcctcatctaggtttccattaaagaaagctgttttgacatccatctgccaaatctcataatcgaaatatgtggcaatagctagaatgatccgaatagatttaagcatcgctactggcgagaatgtctcgtcatagtcaactacttgaacttgtcgaaaaccctttgcaacaagtcgagccttatagatgtgaacatttccatccatgtctttcttcttcttatagatccattcgcattctataggtctaacaccatcaggcgggtc

SEQ ID NO: 2697 - DNA, 445 bp, Zea mays
ctctagcttcatccttttcttccaaacaagctccctcactatcatttgcttacatccccaacgcgaaatacttgggcggataaaacctttgtccagcaattcttgcaattgcttcttcaaatctaccaactcatcgggtggcatctggtaaggtctcttacaaataagtgtcgttccacgttgcaactcgatggcgaattcaatatcttcgtccggtggcattcctggtaattcatccgagaaaacatccgcatactcaaaaaccactgggatctttttaaggggtcactccttcataccaaaagcacatgaccgactacaatctcggctgggccgaaataacgagaaacttccacaaattgtggaattgatatcacgatgtggctggcttcatcaacactacttggcgtcgggtcatccaactggatcccaccatatatccaca

SEQ ID NO: 2698 - DNA, 364 bp, Zea mays
ctcccattataagcatacctctaagcaaaataaacttttcattttctatctcatgcccagtaatcctgctagatagatgcgctatgtgaacatattggtggttaaataaagccaggtgatcatggatagcaacaatattaatgtctctacatctaataccaatggaaacatgatcaacaaatagaatgtatgaggggttcgcaattgctatttaattcattcaaacccttaagcattgtaaaaatagccatctctcattctctaaagaagggggaaaaaacgaaccgttgcaaacatctaaatctgtagccctagatattaatttatcattttcaatcctaacggtataaagtgaaagtcgcct

SEQ ID NO: 2699 - DNA, 159 bp, Zea mays
tcggactccctcgaaagtggagtttacgcccacggtgctgctgctcccccttcattggcgtctgaacctgctggatcggttcacctgtagtatgcgcattgtttttgcggccgcccacgcccaaacatattgtcatcgcattgaaaactgcgttttttt

SEQ ID NO: 2700 - DNA, 445 bp, Zea mays
  unsure (1)..(445): unsure at all n locations
tgcaccttgccttaatatggcctgattggtgattggctcgtctttttancacgtctggtgacgcaccctctgtcaatcaccttcggtcacgccaactgccatatctgtcctcgcgactgactgacccatggcccccacgcctggtggtttcgttgggccacgcgcggggcacctcgttaccgctgcattggtttaaaaaattaccttttgttttctgcagcagccccaaggaggcgcactaccggcacgtgcggcggttcgctctttccacacccgaaatccgacacacatattgtatgacctgtggacccgggcccccgtgtcatagactaagctgcttgggtcctaagtacccatcgagcgggatttcctgcggcaattcangggcgcgcggatgggtttccctgaacgaggactcangttttccttgaaaaggattcacccc

SEQ ID NO: 2701 - DNA, 406 bp, Zea mays
tgatagatgttctatgcgaatatgaatttctctttataatattcacattattctaagactatcaataggtttaacgttataaatgccaatgctcacatgtctggctattgtgcctaacggcatggtatgacatgattataagcctatacggttgcgaaagggtctataacgtaatggttaagccttccgagtagcaccttctggtgatcaggtctcgggtccgatctacttcgggggccaatttatggcttggttaaaaatagtcccctcgttgtgctccacccgcgcccgggttatattctatgtgccacccaccggctgggccggtgcagactgaacagcgatggcctactattgatggaggacgagagtttgaacggtttctctggtcttaatataatgcccg

SEQ ID NO: 2702 - DNA, 436 bp, Zea mays
  unsure (1)..(436): unsure at all n locations
attggaagtctacttggtgtagactctttcttctcttcttctgttgccttgaatgcaacgggttgcacctcatgtgtagaggtagcgccttgctccaagttgacaatgtgtttaaagtctttgatcataagttcatagctcacaaacttgtcaatcacttcttcgggagacatctgtttatatctagtatccccacgaattaattgaacttgagtaggattacaaaaaatgagggatcttagaataactttgaccatttcatggtcatcccatttggtgctctcaaggttgcgcacttgattcaccattgttttgaatcgattgtacattgcttgcggatcttctcctttgttgaggacgaatcaaccgagctctccctcgatcgnctnccgcttagtgatcttggtcacctcgtccccttcgtgtgccattttga

SEQ ID NO: 2703 - DNA, 456 bp, Zea mays
  unsure (1)..(456): unsure at all n locations
ttacggacctatgaaactcagcttctaaaggagaacacgtgataaggttgactaacgtgcaatttctataaaatagaccctgtgcaacttgtcaagcatgtggcaggtgggaggagcgcatcacagcaagaatgtgatgaccacttcaagacctctggagctgttgcatatggatctcttcggacccgtcgcctatctgagcataggaggaagtaagtatggtctggttattgttgatgactnttcccgcttcacttgggtgttctttttgcaggataagtctgaaacccaagggaccctcaagcgcttcctcaggagagctcaaaatgagtttgagctcaaagtgaagaagataaggagcgacaacgggtccgagttctagaatctttcagtggaggaattcctttgagaaaaagggatcaagcatgagttctgcgctccctacacaccacagca

SEQ ID NO: 2704 - DNA, 338 bp, Zea mays
ataaatctaacttctgtggtctggctacaacaataaaagggctgtttttatcctgcagctgatgacatcgtcacgttcactttcatcagcaattgaaaactgcgcggtgcaaccttggataatacggttaattagtggatgactgtacactacaaggcgcgtcgttgatacattttattatactgagtcatatataaactaaaactctgcgtttgtggtagatgagggaatatgagtttgagtaatactgattaattgaattatggaattagtttttctattaatgcgagagcaaaagacatgaactgggaacggatgtgtatgacattcaactggcg

SEQ ID NO: 2705 - DNA, 455 bp, Zea mays
  unsure (1)..(455): unsure at all n locations
ctaagctntaatcgttgccattttagtttccaaattgatgtaataattgtttctttattctgtttatcccctcttgggctgtggtggtaaccttaccaatgtatgcaagaggtgactttaacaacatgcatgcagccaaccaaacgtccatgtgcttgcatctgcaatttgaatccgcatctcatacaagcaaccaaacatagactctgtgcagccaggatcgacttgaccgagtaaccaaacactgggctgttggaggaactcaaccaggccagctgtaacctggctggtatggtgcgagccaagcaggcctgggaaacgatccaaacgcgcccatagagcatcagcaaacactccaagatttttgttggagggtatttgtttgaaatgtgaataacgttcggtttatttcgttttcatttcgcatgtcatacataactaatgcatataacatg

SEQ ID NO: 2706 - DNA, 344 bp, Zea mays
  unsure (1)..(344): unsure at all n locations
accaacaacaactactgctaattccgcgggaaagcaacggccataccaccagaatgtgccatatcaccactcacaagcacaaggagctagcagaggctgcagcacaacaaagcccctcgaagcaagatatgcatactgctccgcaccatacaccttacactccagaatatgtaggccatcaccctgcaccctctgtgcttcggcaagccaaccccaagcttactggcaacacgcttcaccgccaccaccatacaacgagctacgcagtcacaagggagccagcactctcacccccagatggacttcacagaagaacctgaaactcgcacantcaaatcactgcg

SEQ ID NO: 2707 - DNA, 326 bp, Zea mays
catattgcataattgactaacagatagcgaattatatccaagagactctactataaacacattaaagatagagtgcccatatgagattgcaatattacctaacccttttactttgccttgattcccatcaccgaatattattgaatcttgggaatccttattcttgacgtaggaggtgaacatcttcttctcccccgccatatggattgtgcatcccgtgtcgataatccagcttgaacccccggatgcataaacctgcaaggcatatttatgcttgggacttaggtacccaactcttgttgggtcctacaacggtagtcacaatt

SEQ ID NO: 2708 - DNA, 387 bp, Zea mays
gatgttcctaaagcaataaatgaagaaatcaacatgaacatggaaaaaggtaaaaattcaattaggcatgttggttgcactgatcatctctctatgtcatccaagaacaaaaagggaagaggaaataagaggtgcttcaagtgcaaggaattacggcacttcattgcatcttggccacacaaagacaacgatgaacgaatgaggagatgttttggatgcaatgttaaggaccatatgatcacttcatgtccgctcatgaagaatcaaaggcgtgcaccctccaagatgaccctcactaagaaaaaagacaaacagcaagtgtcatgtcatgttgagcgacgcttctgctacatgtgtggtgaaccatgtcatctacctaaggaatgt

SEQ ID NO: 2709 - DNA, 383 bp, Zea mays
ctcaagaaattataaggaaaggggatctatgtattcaccacccctcaaaaagtacacacgcccgccagaaaaatgcggatctccagaggcgaaaaggtattgactactatgttctgactttatgttgtaaatatatgatttccgacttatttacactttgtaacacagtcgcactatcttcttccccagagcccgtcgagccattggcggacccccaacgcaaagggggacgaccaaattagaaaaatggtcgcagctattatggataacgctgttgattaattattaaacgaagctgcagaagcggtctttagagagaattaagtgctacttgaaagacatttaaatgtaatatttgtggacaaatgtgtatatttcatacc

SEQ ID NO: 2710 - DNA, 414 bp, Zea mays
tgtgaacggtgcaaattcataagggagaaagcagctttagttttattattctaagcccatgctcttatgtgaggacgtggcatagcaaaatgtgctgttgggctctcaattattcgaagaacaggagaaaaccttgataaggtttttgttcaacaacaaagatgtttttgcatggtcagccaatgatctctgcggagtaaatagggatgttattgaacactcgctcaatgttgacccatccttcagacccacaaagcagaggcttccgaaaatgtctgatgataaggccgaaggtgctcgtaatgaagtcaaaagactcctcagtgcaggagttatcagagaagtaaagtacccagaatgggtagcttacactgttatggttaaaaaggccaatggccagtggcgaatgtgtat

SEQ ID NO: 2711 - DNA, 346 bp, Zea mays
tggggaagaggaaatggcgagccttcatgagcttctcccttgtgagaactcttctttcccctataaataccctggcatgcccctggctttgaaaagctttcacaaatcaaactcaatgcataatcaacaagattgctgactagctccctgggtggaaagctgacttgatgactagagctggaagaaaagtgcacgttcaatatgttatgacacgaatgatcatctaccttgcaatggcggagtacttacctccaagagctctcaatgacattgataaatatgaaaaagatcctgtgcgtggaagcaagaagtatagggggacactcctggtggctggggtaagcgg

SEQ ID NO: 2712 - DNA, 462 bp, Zea mays
  unsure (1)..(462): unsure at all n locations
taaaactcagcttataagggtgaacacattttatgactaaccaatattcatttctgagaaagacanggattgtagcgcatgccaagccaggaagcaagttggcgcccatcatccacataagaacatcttgacgactgacaggccactagagctcctccatatggacctattcggcccgatcgcttacataagcattggcgggagtaagtactgtcttgttattgtggatgactattctcgcttcacttgggtattctttttacaggaaaaatctcaaacccaagagactttaaagggattcttgagacgggctcaaaatgagttcggcttaaggatcaagataattagaagcgataatgggacggagttcaagaactcacaaatcgaaggcttccttgaggaggagggcataaagcatgagttctcttctccctacacaccacaacaaaatggtgtagtgga

SEQ ID NO: 2713 - DNA, 352 bp, Zea mays
acacagaataatttaaattgagcaccctcccatttttcactataaatatgttataaggttttcctggtgcatcaaaactcctcctatcccaatcccactagcatcacattctacttcataagtttattgaaatcaggaagaataactacaggtgcttcagtcaaacgtttcttcaattcttgaagagcatcttcttgtgagtttccccatttaaattcaacacctttctttgtcaattcattaaaggaaaagctatggtactgacatctcgcacaaatcttctataaaaaccagcaagatcatgaaaacttcttacttgacttacattcgttggagctggccaatacttgat

SEQ ID NO: 2714 - DNA, 401 bp, Zea mays
acatacactaattcactaatcttaccatttaaaaaggcactctttacatccatttggtagagcttgatatttgtgtgcacaagcctaagcaagtagaatccggaatgcttctaatcttgctacgggagcaaatgtctccccaaaatccaatccttcaatttgagtatatccttgtgcaactaatcttgccttgtttcttactaccacaccatcttcattgtgcttgttgcgaaacacccattttgtaccaataacattgtgggtctttggtctctcaacaagctcccaaacttcatttcgagcgaagttatttaattcttcatgcattgcattcacccaatcaacatcaagtagagcttcatctacacgggtagggttcatacaagatacataagagaaat

SEQ ID NO: 2715 - DNA, 243 bp, Zea mays
aaagacgaaaagcccaacccaacctcgaagaaataccataaaactactgatcaatgtcaagggccataaagtaatcctgcatgggctgcgaccccggcctaataaaaagtgaacaagaattccctactgtacacccctgacttggcaatcacctttgcacccccccctgtatacttttccttaaaacccaaagaacatatggaatatatccttatctacacaacctatacacatagaaatata

SEQ ID NO: 2716 - DNA, 227 bp, Zea mays
gaccacccagcaccgggaataagaaggagagccccccacccaacaaccagtgagagagcagaacatccctaaagctaggaacaaacgccgcaagaacggacccccccaataaaaaaggcggacccagggcaaatcgagaacacaagcgatgaatcaaagaacacaaacacgtggaaacggggcacggaacagcaaaacccaccctgacaaccagaatcaccccaagg

SEQ ID NO: 2717 - DNA, 405 bp, Zea mays
tttccttggacgacaagcgcacggattctattcgaagcggacttcctctataaaaaccaagggacccttccatactttactcaaccttgcctttacaaactcgacaaccgtgaatccctacttagaaaacaattttcttgtgcgctcgatggcaaaaatggaagaggatataaaagaggtgcatttggcgaagcacatggtcaataagaggcgacgtgcacgcaatgagcgttgtcatggtggttcgattccacggcgtgttaagattcattgtgatcacatgagcggcgatgcaagaatccgagcggactactttggagccaacccggtgtacacggatgctcagattctttcgatgcatttacgattaacacatatcttttaccatggtcagaactctatgac

SEQ ID NO: 2718 - DNA, 300 bp, Zea mays
gcgctttacctcaaagttcagccgccatgatctcgatcccttacatataaaataaaggctaccgtcaagaaggaccgaccttgccccggcaaagaccgaccctccctcgggggctaaaacgcgggaaccccctctgcgtcaaaatattacttcacgagcgccctttacttcctcggagaagtctctaccaaaaatgactcacgtgcccttcgactacctcgataacagaatcctaaaagaacgagaaaacctccaacggaaggcgaccgacccaggactctacgccccgggataggaacc

SEQ ID NO: 2719 - DNA, 332 bp, Zea mays
tgggctggcgctgtcttcctctttcatgtagatcttgtgtgttcctgataagaaatccaggagggacatgacttggcatcctgctgcgctatcgactattttgacgaaccgcggcagggggaagttgtccttgggacaagccttattgaggctggtgaagactatgcacatgcgccgcttgccgctatttcttttgcaccatgaccaccttggcgagccatgtacgataagcaattggctcgatgaagttggcttccaatatgcggtgcacctcggccttggcggcttcagacttctctttagacattttgcgcaatcgctgctttttgggc

SEQ ID NO: 2720 - DNA, 432 bp, Zea mays
  unsure (1)..(432): unsure at all n locations
tctaaagggagaacacctgatacgnttgactaactttctattctaaatagatagaccttgngcagcttcgcnaacagggagacaagtgggaagctctcatcacacaaaaaatgtgatgacaacatcaagacccttggagatgctgcatatggacctcttcggacccgtcgcctatctgagcataagaggaagaaagtatggtctagttattgttgatgacatttcccgcttcacttgggtgttctctttgcaggaaaagtctgaaacccaagggaccctcaagcgctttctaaagagagctcaaaatgagtttgagctcaaggtgaagaagataagaagcgacaaccggtcccaattcaagaatcttcaagtggaggagttccttgaggaggaggggatcaagcacgaattctctgctcctacacacctcaa

SEQ ID NO: 2721 - DNA, 436 bp, Zea mays
actcagcttaaaaattgaagttcctgccggatcattctcaggtttatcttctccatttcttgacatatcgtaatgtcagaagtctttatgggaagacaatgacagaaagccttacgacttaacacatctgccactacattggctttgcctgggggatagtgaatctctaattcataatactttatcaactcgagccatctcctttgtctcatattaagctctgactatgtaaagaagtacttcaaactcttatgatcttgttaaatgtgacagacattccccagcagataatgacgccatatttttagggcatgaaccaccgtatctaactccaggtcatgagttggataatgttctttatgtcggcgcaactgccttgaagcataagctattactcaggctttttgcattagaacacagccgagaccactgcctg

SEQ ID NO: 2722 - DNA, 388 bp, Zea mays
tggtcaaaattatcgcagcttatcagtgcaatttcagttaatgcctgggtgacttcacatctacccgtctgtttatatagagcctgcagtgggaaagtgaatcgtcaaattgctcacacgcgctgaacagtcacccacacccactgaatggtggaccatagtgcccaagaagctgaatcaccagatcgcgcgtaccccgtgtatggtgggaccacccttcactcggaatatttatattatttctcggcaacaagctacaggaaggtgttttttggacctttggcattccgaaacctgagagagttttttacgggttgagctcgttacgaaaaacgatctggctccgtgaatgggatattattgggtgtctgcttccgaagattgacac

SEQ ID NO: 2723 - DNA, 438 bp, Zea mays
  unsure (1)..(438): unsure at all n locations
tgtaaagggtgaacatattntagtactaacaaatgttcattttgagaaagatagggtttgnagcgcatgcaagccgggaagcaagttggcactcatcatccacacaagaacatcatgacaagtgacaggccactggagctcctacacatggacctattcggcccgatcgcttacataagcatcggcgggagtaagtactgtctagttattgtggatgattattctcgcttcacttgggtgttctttttgcaggaaaaatctcatacccaagagaccttaaagggattcttgagacgggctcaaaatgagttcggcttaaggatcaagaaaattagaagcgacaacaggacggagttcaagaactcacatatagaacgcttccttgaggaggagggcatcaagcatgagttctcttctncctacaccccacaacaaaat

SEQ ID NO: 2724 - DNA, 428 bp, Zea mays
gaaactcaagctgcaccgcgtcgcagtaagccgctctagagtgccggctcgtcttattaattctgccacggtgaaagccacacaggatattgcgcttgtgctcttcccctcttcggccgccaacgcgccatctcaaattcacgggccaccgccctcgagtcctatagaatgagtgtgccatgagctccactaagtagtcaagcatccagcgcacccactcgtgtctcaaattgtccaccagagagctctaatttgggatttcccccaattctgtcaagaacaccgcgtgtgtgagctcgccgtggccagctctctatatgtccgatcatgccttcctcgctctcgtttcaaccatcctgtgtgttgtagatgcttagtagcccggccaattgaactagatcacgctagatcaccgggaacacttcgga

SEQ ID NO: 2725 - DNA, 434 bp, Zea mays
ctcaagctgttaaagggagagcacatcttaggattaacaaacggcatttttatatagataggacttgaagcgcatgccacgcggagaagcaagttggagctcatcatccacataagaacataatgacgaccgacaggccactggagcttctccacatggatctattcggcccgattgcttacataagcattggcgggagtaaatattgtcttggtattgaggatgagtattctcgcttcacttgagtattctttttgcacgaaaaatcacaaacccaagagaccttaaaaggattcttaagacgagctcaaaatgatgtccgcttaaggatcaagataaatataaacgacaatgggacggagttcaagaactctcaaatagaatgcttccttgaggatgagggcattaagcatgagttcttctcttcctacacg

SEQ ID NO: 2726 - DNA, 203 bp, Zea mays
  unsure (1)..(203): unsure at all n locations
taccataattntggtgtttctttgagaagttatataaggctttttcttttgcaccatatttcattgaattcaggggccccatatacctggaataagaaatattaaagatgtgtcaattgtgctgatgaggacggaattacaatgaatattatttttaccatggtttgaataataacttccataatttcaatataccggcatct

SEQ ID NO: 2727 - DNA, 456 bp, Zea mays
  unsure (1)..(456): unsure at all n locations
actaagcttcgattcccactttgaaacggacttcgggctgtctaattctatctggctgacagtctancttacaacagtttaaaggtgcgacaaatggaattcttgtattttttgtcgagttcaaaattcttcgtttgtttaaaactattgacacaaacatgctcctgtttgcagggcctgatactcancaatgccctcagggcacagaaagatgctgaagacgaaggttgtactatagccctgagcaaccttcgttccgaagtaattgaactgaggaacgaaggtctcgaaaaagacaaaatattatactcattaatagataaaataaaggaggacgaagctgcttttaaaagtcaagctgaagctcagaaacgcgaaattgaagaccttctgaaacaactggccagagccaaagaagaacgtatacttgaagaaacaaagcgtgaactcagcgat

SEQ ID NO: 2728 - DNA, 339 bp, Zea mays
  unsure (1)..(339): unsure at all n locations
acatatctgaaaggagtgggattcggattgttcctcctctgactctgacaatgaaggactccccgccaccgcctttaacaagtcatacctctttcccaatgagcgtcacacttgcctcatggcaagagagaagaaagtangcactcctactaatacttatgattcttcaagagaggatgagtctattgatgacgatgagatagattactcatgcttattcaccggattagatagaaccaccgtcgacacaattaatgaattaatcgatgccttggatgacaatgaatatgctcttataaaaacaagaggatttgtgcctgaagaacatgataaatttgt

SEQ ID NO: 2729 - DNA, 358 bp, Zea mays
  unsure (1)..(358): unsure at all n locations
atgcctgaatcacttaaggaccttaaaagtatacatttncaagccgctgatttccttatattttctatgtctaatttatgtagataagaaagaagagatgagtaaacccttgcaaccgaatacatgctctgttatgctatttcatttatatcaatggactcaaccaagtttcctatttactcccctctcttacaccttcaacccatcaaggtggaaggaggggacttctttaattgatttcctattgtagtctttcngagcttctgagatctcaacatttgggccccatcggcaactcgtaaccccactccatgcctcatgaaggacagagacatggtggtgtgtaacttactgtcac

SEQ ID NO: 2730 - DNA, 393 bp, Zea mays
ttccagattgtatttaaactttcaaatcggatattatatttatccttggtggctaaaacgaaccagagatgttttttgtgatggtggatttcctggtgaccaaaacgtggtttaactcaaaactcttaaagaataaactaagaccagctactcgacacaaccgatgcaaccaaaaactcaacaagccctaactaagtagtactagtaaatgctcaatggtttataggattgcggccaaactaatctactattttttggctttttctggactatctgagatcaaaaaacagcgaagaaaagtaaatctctcaccgataaaccttgctctgataccaactgatgtgcacccgttgtgtgattgcccgatctttcgatgagagggtgtggaataac

SEQ ID NO: 2731 - DNA, 370 bp, Zea mays
actaagcttgtgttgcacaaaaagaaccgactagtttgttttgtttctttcctcataagcggcggtctctattctacataaaggcttaatgaattttaccaggctgcccctggcctataaatagatgaacagtatccccgactgtcaccctatttgtattcactccgcgtcacgctggactttttcctttaacaagccgaagaataatgtattaataccggtatatttattctgagattaatcagaaatttgaagatgcatatgatatttggctctctcttatattcatatgctcctcttcattataatactgcgatatgaagggtcggcttcagacctttctgagatattatttctaaggagaaatgct

SEQ ID NO: 2732 - DNA, 430 bp, Zea mays
gttgttcacaaatgaacaccttcaaaacacacgaaaccatttcaataaataatcatgaatataaaaatcgcaagtgtaatttagagtgtaaattacatgaccccggttctacaatgttgactataggacaacaatgaccaataaaaaattagtgaacactcgtatggccaagtcacataattagcaactgatagcacaatgtcaagcatgctagttgcaagcaataattaggtattcagcttaaatagttcaaataggctattcatgtcaattgcctgtagtgggttgagatgcatactctggaaaacatctttaaattaaaccatgttatatacataaacgaataaattctgctcattatactaagcaaaaaaactacaggaaggaaacaacatttttcaatttcaaaatatattgtagcagaacataa

SEQ ID NO: 2733 - DNA, 313 bp, Zea mays
aaaaaccgatccacgccatccggtttgacccaaaccaaatccagcttcaactctactaggtcctcgaagaaattatgcgccactatgataatcacatatcttaacgaagaagtctcagtagatcgaaatgaaatatagctcttacacaacattgaactgaaattgatgaacaacaagaaagcattttagaaaaacaagtgtggtggactcatgttgatgatgcaaaaataattgagcaccacgtgttatactatcatatataggaaccatcgaaacttcttagggggccaagagtccaaaacaataaaccaca

SEQ ID NO: 2734 - DNA, 358 bp, Zea mays
  unsure (1)..(358): unsure at all n locations
tcanactatatttttaaggcaatcagggtattttctcgatattttctcaacatgaacccttaataacttttgttgtagagctgatatatatttgtttgagtaagatgacaaggtttggttgaatttcaaaatttgcatttgtccaaacgagaagtttcaagcacgtataggattcatcttttcatgtgagtatttgctttaaacttctagaattctttagaatacactttgataatagagatgaatgatgacataaaataacaagctgatttgcatataaataattagagggtgacaccatagagatttcgctggagaatgccgattctgacattatttgagatacatcacaactggc

SEQ ID NO: 2735 - DNA, 436 bp, Zea mays
ttttcatataatttgcttctgaagttatatcttcttagaattatttctaacgagagaggggatgagaagtatcccaatatgatttttttattcctccattgaaaaatatataaaataagtactctctgaaagaatttttataaactatttcttaatgtaccctttttctgatcttgtatgcgtgaggggcatatttaaaagactttgcggaaataagataataaatagattaattaatcaaataatatttggtgcatttcatactggtactttggttgtgcatttgattttgcagacaaattcatatttgaaattgaaaccacacattaaaagtagaatataaaactgaagcatatagaaaaaaaagaaatatgagaaacttgcgtgttattaggctcaaattgcgacgcaacccatgctgtacaaatgcaccgca

SEQ ID NO: 2736 - DNA, 268 bp, Zea mays
  unsure (1)..(268): unsure at all n locations
accaaaagacatccgaggagataagagtttcattggaatggtcaggtattatctgcgtttcattgaacggttctccaagattgccagaccaatgacaaccttgttggccaacaagggtgagttcaagtggaccccaacatgcccgaagtcctttgagacattgaacgagaagttgaccacgacaccactattgaatctcgccaatgttcacaagtacttctcagtatattgngatgcttcgtacatccgactgtgatgtgggttgatc

SEQ ID NO: 2737 - DNA, 420 bp, Zea mays
  unsure (1)..(420): unsure at all n locations
ctcatggggaaccttctgtctatgttcagcgactgttttaattgcgccatttaagataataacatgctattccatcacgctanaattcaagtgcacaaacaatattgcagaataccaagcagtcctgttggggctttgaaagcttaaggccatgggaataagaagagcaatacttaaatctgacttgcaagtaatcacaggtcacgttgacaaaagccagcaggcaaaggattcaaagctcgaaaaatatcttgacatagtccgaaagatggaagcctcctttcaaggaatttgagtgaaaaataccacaagagggataatgaacaagaagatttgctagccaaatcagtggcacaaaggctcccactcccccaaaagtgttctttgaaacttctaaagcacctttcgttgaactcatgg

SEQ ID NO: 2738 - DNA, 407 bp, Zea mays
ccatttgatatcttaaataaaatttcttatattattatatttaattcatttctggggatgggtgagcggatattatcaaatcccttaacgaaaatatccattaattgatctttcgacctcacttcttctaaaatgatggctcctttcacaacatgatctctaaggaagtgatgacagatatcaatgtgcttggtgcgagagtgttgtacacgattattagcaattttaacagcactctcattgtcacacaacaaaggtaccttctctagaattacgccatagtctagaagagtttgtttcatataataaatttgtgtgcaacacgcaccccgcggcaatgtattctgctttcgcgattgacaagacacactattttgctttatggatgtccatgatactagtgatct

SEQ ID NO: 2739 - DNA, 164 bp, Zea mays
  unsure (1)..(164): unsure at all n locations
atcacancnagaatgtgatgaccacctcaagaccactggagctgctggatatggacctcttccgacccggcccctatctgaacatatgaggaagtaagtatgggctagttattattgatgacttgttttccttcaccttgggattctttttgcaggataagtct

SEQ ID NO: 2740 - DNA, 252 bp, Zea mays
accccactaaataaaaaactctccaaggtatcctaactttttgggaatcaacggaaaacctcatcaattatcaatgactccttttttcctaaaagcttactaataatggatccttaagccacggtttatttcaccagctacgttattacctcaatctactaatccgcctctagattttcctaatgtagatcattcacttcgcctatactagattgcttttaaccaaacctctgtatacttggtatctaccat

SEQ ID NO: 2741 - DNA, 369 bp, Zea mays
agctttgtctcgatcggaccaataccagttatgtcactcacacacgggagtggagagatggtgagagatacgttgtccctctgtggaaagaggctgaaccagggtgtatttgtgctctcggttggcgtgaactcattctggtcttgaaaaaaccgatggcgagttgacatatgcaaaggttaaatgctacatatgtcttgtggttggagatccctagctgggtattaatcgattcggatcgccgttacttcttggacataaaaacttagtcactgacttacacctagcaatcaagtgaactgaagggttgataaatgaccgctagcatatgccaagtgcctgatctaagattaaaagaactctagatgc

SEQ ID NO: 2742 - DNA, 406 bp, Zea mays
  unsure (1)..(406): unsure at all n locations
agctnttgtcttgactataaaggggcctctccacttgggctccagcttgcccctggactccgtccgagctgttcggacgagtacgaggtccccctcgctgaactccctcgggatgaccgcgtggtcgcgccatgctntggtctgggcttggtatttggttaaggcctgtagggcgaagacccggtctccgtcaatgagatcctttaaaagtggctcgtccacgtcggggacggctgacggaactgttcgcggtgacccatgctttatttcttgcggggtcatggcctccgatccgtatagaaagcggaaaggagtgaacccggtcgccctgcactcagttgtgtttagcgcccagactgcttctggtacaaatcggtccatctgcctttntttcatcgaggagcat

SEQ ID NO: 2743 - DNA, 294 bp, Zea mays
tcagctccatctatgctatggattcgcttttgagtgacgtcaattgccttctcgccttattgcagcttcctgacttccatggatagcaatgcggccctgatccgaacgtatcttcatgcaaagataggcccgatgaacgattgcttccaacgcattgagggtaccaccaccaataattgcattgtaagggtactccatgctaacaatgtcaaacacaacttgctcagctctactgttgttgatgaacccgaaggtcactgacatggtgactctgcccaatgctacaatctgcct

SEQ ID NO: 2744 - DNA, 440 bp, Zea mays
agctttcacgtgttccacgcgagctggtatacgggggcgcgctcaaaacacgcccgtgcgcgaacacccgcgcgcccgcgggcgtccgtgaacacgcacgcgccactgttatagagcccagcccagggcataggtgactatcgcataacctcctccgaccttcgcagacttgtccgagctagccattaacttcagggaccttctcgcgacacgacagagccgcccgagagcaaccaccgtggacagcccctctcccgtccttcttcgctcgatccaagccctcagatagctttctggtgaggccgtgagacttgctcaagcttgacccaaggaccctcagcaccggaatagcccaatcgtgctcaccggagttcaagaacccgccggcgcacgtggaccgggtaagcccctgcaccgttttccaattgcgtgcgcgcatg

SEQ ID NO: 2745 - DNA, 302 bp, Zea mays
gctaagagacctcggcggcaccacccgcatagtccgaacagactccagggtagtcgccggccaaggcgaaaaaaaccatgcagcaaaagaccccgcacttatgcagcacctcgcggccatccgaagcctcgagaaacaattcaagggagtcactgtgcagcatgtggaccaagccaagaatgaagaagctgacacattggccaaagcggccgacagggaagaagccctcccctccgacgagggctatcacgcgatcggcacactaggcgtccgcagccccgaagggctccaaataaccaacg

SEQ ID NO: 2746 - DNA, 466 bp, Zea mays
  unsure (1)..(466): unsure at all n locations
ttagagccacctgcngcatgcaagcttgngagcaagagcggtcactttttcaggcattgtctgttctatagcctctttctctggtgccttctcttcaatttgcgacggatttttctcagcaggctctgaaagcccaacttccgcactagcctggctcacttgcacttcaacttctgtcggatttgtttcagcttctaattgcattttcgaagcctcgacaattttccctaaaagagtagatcttgaagcctttactgattatagcacatctagtacatgtgccatccttcttcttttgggagttgccgtaagacctttctgtatcttcggcagtgttacttctgccgaagggcttaatatttctaacattcttgttccttcagttcttggctcttcggccttatctttaccagtctttgcctcagctagctcagctgacggtgccatcggcatggtagccggttct

SEQ ID NO: 2747 - DNA, 359 bp, Zea mays
atttgcaccgcatgtcaagccgggaaggcagttggcatccatcattcacaccaaaatattatgactacccgaaggccactggagctcctacacatgggcttattcgcgccaatcgcttatataagcatcggcggcagcaaggattgtcttgtaattgtggatgactattctcgcttcacttgggtgctctttttacaggataaatcttataccccagaagacctaaaaggagttttgagaccggctcacaatgagttcggcttgaggatcaagaacattataagcgacaacgggacggagtttcagaactctcaaattgaagactttcttgaggaggaaggcatcaagcatgagttctc

SEQ ID NO: 2748 - DNA, 408 bp, Zea mays
  unsure (1)..(408): unsure at all n locations
gctagtgaagattcttcatcccaacatgggctagtcggcgatgccagagccaacccatgttagtcttagcgattaagcaagtatcgagttcagctctattgaaatcaactaaggatagctgaccctctaatactcccttaaaagctattgaatcatcacttcttgtaaagacagtgacacctgtatccgtaaaaagacaattgtagcccattttacataattgggaaatagaaagtaagttgtaatctaaagattctacaagaaaaacattggaaatagaatggtcacgtgatatagcaattttactcaatcctttgaccaaaccctgatttccatccccgaatgtgatagctcgttgaggatcttggttntctcataagaagagaacaatcttttctcttctgtcat

SEQ ID NO: 2749 - DNA, 240 bp, Zea mays
aagctcatctttagactctcattctcttctttgagctctcgacacggatcatcttttgtctccggaaatcttagctcaaaggaggatttgcttgctgacgagcacacaacattaccacatggtaatatagtctccatctcaacacatgtgcatgggcgacgctgttgggatcttaaacttgtatcactacgccatgagcaatatttaacatgatatgaccatccataagactttcatgag

SEQ ID NO: 2750 - DNA, 432 bp, Zea mays
  unsure (1)..(432): unsure at all n locations
agcttcgatcttttcagaagctatttgttctgtcgtatnttcttcagatgcagcaagcattgttgtgaaaggcactgaagggcctacttcaatttcagcttgaatttgcgtagcttcagtttcagcttgaacttgtgcagcttccgcttgcctaatttcggttttggcctgcgatttaatttcggttggaacgactttctttacgagagcaggactcaaaactttcgtcgtttctaacacaacatccaacacgtttgccatccttctcctcttaagagaggcagcagaagtcttttgtatctttggcagatctgcctctatcagaaagctcagaatctntggcgtttctggtatctcgtcaaatcttggctcttcagccttttcagccttaccttcagctggctcagctatatgcatcttcggcattacagc

SEQ ID NO: 2751 - DNA, 437 bp, Zea mays
  unsure (1)..(437): unsure at all n locations
agcttggactactactctacaattaattttatatctatgangntcgaaatattgcatatgcattatgttattcgactatatctataggaaaataacaatatttatgatactaatttgagtctaaaatcataaaccttgtgatagatgtggttcgactacttgtatatatgatgtccaatgcattgcatatatgtcatagtgtcgttgatatacctgtgaatatcagccatcgtgctgctacttttatttgcaggttttggaaacctccccgtgcaggggaggtagctgccgattttttgtcgatatatgttagatagcggtagataggcacaagtagtggtaggtttgccgatggcatgcgtggtcctaaagatggcggtcgttgatgtgaattcatatgaacaaagtttggcaatattttttttgtattaatagac

SEQ ID NO: 2752 - DNA, 331 bp, Zea mays
agcttgaaaaatacctagactctttcctttagatcgaagcttctttcgaaagattttctgttaagaatatccctcgagggcaaaatgaacatgctgatttgttagccaagtctgcagcacaggggctgccgctaccttcggatgtattcttcgaaacaataaaggcaccttcagtggagttacttgaaagagcagttcttactatttctcctgtgtacagggaagattggagaactgaaataatttcttaccttcagggcaacttcctatcagatgacgaagcttattataaaaaaatagaggccaaagcttgtacgtatatcattataga

SEQ ID NO: 2753 - DNA, 442 bp, Zea mays
  unsure (1)..(442): unsure at all n locations
agcttgtgaagattcttcatttcaacatgtgctaatcggcgatgccagagccagtccatgttagtcttagcaaataagcaagtattgagttcagctctatcaaaatctaccaagtatagctgaccctctaacactcccttaaatgctactgaatcatcacttcttctaaagacagtaacacctatatccgtaaaaagacagttgtagcccattttgcataattgagaaacggaaagcagattgtaatctaaagagtctacaagaaaaacattggaaatggaatggtcaggagatatagcaattttacccaatcctttgaccaaaccttggtttccatccacgaatgtgatcgctctctgtggatcttaggttttctcataagaagagaacatcttcttctccnctgtcatgtggttagtgcacccgctatcgatgatccagc

SEQ ID NO: 2754 - DNA, 437 bp, Zea mays
  unsure (1)..(437): unsure at all n locations
agcttctanaaggagagcctattttgtactaacaaaagttcattttgagaaagacaggatttgtagcgcatgtcaagcacggaagcaagttggtgttcatcatccacacaagaacatcatgacaaccgataggccgcttgagctactccacatggatctatttggcccgatagcttacataagcatcggcaggagtaagtattgtctagttattgaggatgattattctcgcttcacttgggtgttctttttgtaagataaatctcacacccaagagaccttagagggattcttgagacgggctctaaatgagttcggcttaaggatcaaaaagattagaagcgacaatgggacggagtttaagaactctcaaattgaaagatntcttgaagaagagggcatcaagcatgggttctcttctccctacacaccacaat

SEQ ID NO: 2755 - DNA, 407 bp, Zea mays
  unsure (1)..(407): unsure at all n locations
agctngaagccatggtaagtagcatatgctaataatatgcgaattgactcaagtctagctacgggtgcataggtttcaccaaaatccaaaccttcgacttgtgaataccccttggccacgagtcgagctttgttccttgtcaccacaccatgctcgtcttgtttgttgcggaagacccacttggttcctacaacatnttggttaggacgtggaaccaaatgccatacctcgttcctcgtgaaattgttgagctcctcttgcatcgccatcacccaatctgactcttgaagagcttcctctaccctgtgtggctcaatagaggaaacaaaagagtaatgctcacaaaaatgggcaacacgagatcgagtggttaccctcttatgaatgtcgccgaagatggtgtcgac

SEQ ID NO: 2756 - DNA, 425 bp, Zea mays
  unsure (1)..(425): unsure at all n locations
gctttcatactgagaaaatatgacaattgtgtattcttgctgnagagagggacacacagacttcccctgatgactgactattcanagttgagcatatacactgattacacgcagaactgccagtttgtcacaaataaaactctaactaaatgatccatttagactgatttcacgtaaagttcttttttttggtttcgatccactactttaactctatgatacattaatcagtcttgctacatgttgattggctgaaggaaaataagactcttaagaacaggattactgctaactgccatgaacccgaactttcagtcgccttgtacgtgataatgcaacgtgcaaccagaccaatagcattggcaacagtaggtgaccttaagcaggggagtctactacagcaatatatgttagtagttcgcgac

SEQ ID NO: 2757 - DNA, 446 bp, Zea mays
gcaagcttctaaagggagagcacattttaggattaacctatgttcattttgagaaagacaggacttgtagcgcatgcgaagcaaggaagccagttggtgctcaccatccacacaagaacattatgactcccgacaagccactggagctcctacacatggatctattcggcccgatagcttacataagcatcggcgggagtaagtactgtctagttattgaggatgattattctcgcttcacttgggtgttctttttgcaagaaaaatctcacacccaagagactttaaagggattcttgagacgggctcataatgagttcggcttgaggattaagaaaattagaagcgacaacggaacggagttcaagaactcacaaatcgaaggcttccttgaggaggagggcatcaagcatgagttctcttctccctacacccctcaacaaaat

SEQ ID NO: 2758 - DNA, 444 bp, Zea mays
  unsure (1)..(444): unsure at all n locations
agcttataaagggagaacacattttaggactaacatatgttcattttgagaaagacagggtttgtagcgcatgccaagcatgaaagcaagttggcactcatcatccacacacgaacatcatgacaagcgacaggccactggagctcctacacatggatttattccgcccgatagcttacataagcatcggcgggagtaagtactgtctagttattgtggatgattattctcgcttcacttgggtgttctttttgcaggaaaaatctcatacccaagaaaccttaaagggattcttgaaacgggctcaaaacgagttcggcttaaggatcaagaaaattagaagcgacaacgggaccgagttcaagaactcacaaattggaagctttcttgaggaggaaggcatcaagcatgagttctcttctcctacaccccacaancaaatga

SEQ ID NO: 2759 - DNA, 353 bp, Zea mays
  unsure (1)..(353): unsure at all n locations
gatgggacacacaagagcccaaccttattgtgtttgttcttgccctctatgacacttgctgactaaaaggcccctttggcctcatcatgttagtgcagccacgccctgccacgccgatatgcctcttgtcctacatgtccttaattaccctttgggccacacagtggtcatagccattggcaactttactcatatgatgcatgcatgctaccgaatttcctggaatgaccattcagactatcctcgatgttaaagcatgtctgctgacatatnaactctcatattgtcatttgcactacacacctatgtcncagattgactgtttcatacctttcctggatggcgatcggcat

SEQ ID NO: 2760 - DNA, 440 bp, Zea mays
agctggactcaagtatccactcttttattttttaattcattattcccggctcatggacaaggcattctccctggatccaagtccatagaccaacatatatcccattatcaagatgaatacaatcaattcctgacctcgcgcgagtgctagaaaaatcactcgacttctaccgagatcctgattagcaagcagctactcgacctagcatactagtattcatctcaacaaggaatcctaagttcatgcaactagaggtttcaagcaactcctacacttaagtgcacattacagtcctacaagcattaagtgtagtaaagtagcatatattaacatggttatgcataaaaccggggcttgccttcaattgttggggctgcaaggagatcctcaatagcagcctctgaagcctgctcctggtcctcctcttggacaagtcttgc

SEQ ID NO: 2761 - DNA, 321 bp, Zea mays
  unsure (1)..(321): unsure at all n locations
ttgcctcggcacactaataccacaatacgacaacactctatgggagcggacggatggcgagagtagagtgtcccctccgcgcgatgaggctggacggcggtgtatttgtactctcggttggcgtgaaaccgatctggtcttacactacaggaaactggttaaagaccatgggtgaaaaaccgccgaacttaatgtaataagccgtcgaacttactgtaagaacgtgggtttaccgaagaatatagccgacgacgatttttggacgaacttacagaagtaagttcgatggcccccgtcaacttattgttaaatncccctccc

SEQ ID NO: 2762 - DNA, 438 bp, Zea mays
  unsure (1)..(438): unsure at all n locations
agcttcggaaaaccaacactcttcgatttagtgctgataatcttcgccccggtgcggtctcggatgcaccccaaggattcttcatcaacgccaccaaaaagcatggctcctgattggtatccacaggatatagcatactcctgcagctcctccttctcggccttagataactcttgaccaattagattttgaaagttaaagttttttcctttcgaagtatcttcggcaatttctttccctttcccaggcactgcggccagggcttcttctgtaaccacagcagtctcctctgcagccaagactctctctgcagccgcgacagtctcttccgcggccaaatccaagagcactntatcaatagcagataatgtgctctccagaatggtagcttcggcagtcacaacttcggcagtagtagtagcttctgcagcgggtatc

SEQ ID NO: 2763 - DNA, 174 bp, Zea mays
ctttttttaaaagctcccccagctcttgctcatattgggaatatacacgaatatacttcctgaacaccacttccaacttgggcaggtgagtcatgaacacaccgttcaacatggacatgaagtaagctggtgccttcttcaatccctacgacataaccttgaactcatatatcc

SEQ ID NO: 2764 - DNA, 375 bp, Zea mays
  unsure (1)..(375): unsure at all n locations
gcttgtgagcaatacaagtttataatgtaaaaagctgcttcagctgancagccgaagcccatgctcttgtgtgaggacataacagaacagaaggggctggtgggatctcaactgtccgaggaacaagaaaaaaccttgataaagtttttgttcaacaataaagaaagttttgcttggtcagctaatgatctttgcggagttaacaaggatgttattgagcactcgctcaatgttgatccatccttcagacccagaaagcaaaggcttcgaaagatgtctgatgacaaggccgaatgtgctcggaatgaagtgaaaagactcctcagtgccggagttatcagagaggtaaaatacccagaatggatggctaacact

SEQ ID NO: 2765 - DNA, 414 bp, Zea mays
  unsure (1)..(414): unsure at all n locations
cgagagctcttcaacaagtgtgcanagcgtatggccctatcttgacaatttgctcaaggataccttgatctttctaagatatctctagcttctacaaccaacactttagctctatgctcacttcttggcggcgtttcgaaccagcttcgacaaataaatttctatgtgcgcgctctgtggtccggatggcgtgcccactgggcgccacatctatactggcttgagtgaaacagccctatattcagtctttggtggctcacgctaccgacacccttattgcttaatgctcgtactacgggttaccagcgaccgagagtgggacgagctcccatgtgtcttatgcatggctagacctaaacactatggcactggtgctctatgctaacccttatacgtctcgatgactaccttctt

SEQ ID NO: 2766 - DNA, 344 bp, Zea mays
  unsure (1)..(344): unsure at all n locations
agcttggaggcgtctattgttatcctacttgatgtagactcttctttcttctcttccatcgctntgaacgcgacaggttgcacctccggtgtggaagtgccgccttgctccaagttgacgatttgtttggagcctttgatcatcaattcaaagctcagaaactttcctataacctcctcgggagacattagcttatatctaggatcaccacataataattgaacttgcgtaggattacaaaatacgagagatctaagaataaccttgaccatttcatggtcatcccatttggagcttncgaggttgcgcacttgattcaccaaggtcttgagccggttgtacat

SEQ ID NO: 2767 - DNA, 360 bp, Zea mays
agcttcagaagatgtctaatgacaaggcctaaagtgccaaaaacgaagtcaaaagacttctgagtgccagagtaatcagagaggtgacgtatctataacagttaaccagtactgtgatggtaaaaaaggccaatggaaagtggagaatgtgtattgattttacagatctcaataaggcatgcccgaaggatgatttcaccttgccaagaatagactctcttgtggatgcagcagccacttcggagctcatgagtttattggactgctatttacgctatcatcaaatctggatgaaagaggacgagcctaaaacgagcatcataaccactagtgggatctattgctaccttcggatgcctg

SEQ ID NO: 2768 - DNA, 452 bp, Zea mays
  unsure (1)..(452): unsure at all n locations
agcttctgactaaaaacgacgcgagcctcgttccctccggtacacggnggcgaccgtgacacaaacacggttgtcatggtctcgcaagactctcgccccactcagtacaattacaacggctcgcgcaagaaccgaggggttgtatggtttatctaaactcactcaactaactagggttcacctatagcaagcgctaaagcgatctaactaacctaaacacttcgcaaagcacctacgctaatcatcgagtgattctattaagcacttgagtgtatgagcacttgggaatgtctactatatgccttggtatgttgcttgggctcccacaccttggaatggccggttggaggtgtatttatgtcccccaacacaaactagccgtagaagaaatgtgtgctctctgcggcacaccggatagtccggtggtgcaccagacagtgcactgttcactg

SEQ ID NO: 2769 - DNA, 449 bp, Zea mays
  unsure (1)..(449): unsure at all n locations
gcttgaagtagttgtagcttgcaattttattactagtatttatcttttaggaacaacagagaattatagagtacatcgcatccatggttccaaagcatattcacacacctttccacctatacatgtccaaacatggaactcaggctaatcccacttgagcatagctagacccaacataaattggggcatttcttttaaaaaattggggccgagctaggacgacctgtagcgggccatatcatgccagccatgggccatgagtgaggtccaagtatagcccgctaaatcagtaattatgatgggcaagatcgtggcgcgacaggcctataatagcacatgacgtttaaatgacaaanataagctaaaatatgcataaattanggtttggactacctatccaacaaaacaaatatatttttggctctatactctatattcaagcgtaatat

SEQ ID NO: 2770 - DNA, 448 bp, Zea mays
  unsure (1)..(448): unsure at all n locations
agcttgacattgctcccctgttggaaactcatgccatccttaatgccagggcgtctcccattataaagcatacttctagcaaatttgaacttttcattttcaagttcatgctcattaattttagcagttaatttagctatgtgatcattntgttgtttaatcatagcaaggtgatcatcaatagcttctacattaacatctctacatctagcacaaatagaaacatgctcaacagtagatgtagatggtttgcaagtatttaattcttctatcttagcatttaaaatagcattttcatctctaagacaggaaatagaatcattgcaaatattaaattctttaatcttagaaactaaactagcattgtcatttctaagactagaaattgaatcatggcaaatgctaagctccttagatacattttcacatttttctacttcctgagcat

SEQ ID NO: 2771 - DNA, 404 bp, Zea mays
  unsure (1)..(404): unsure at all n locations
cctcccggctttgaagatagtgagtaccctaaccatgtgtataaactctctaatgcgctttatgggctcaagcaagccccaagagcatggtatgaatgccttacagatttccttatcacaaatggattcaaagtccgaaaggccgatcctacactcttcactaaaactcttgaaaatgacttatttgcatgccaaatttatgtcgatgatattatatttgggtctactaacgagtctacatgtgaagaatttagtaggatcatgacacaaaaaatcgagatgtcaatgatgggggagttgaagtatttcttgggatttcaagtaaagcaacttcaagagggcaccttcctaagccaaacgaagtatactcaagatattctaagcaagtntgggatgaacgatgc

SEQ ID NO: 2772 - DNA, 422 bp, Zea mays
  unsure (1)..(422): unsure at all n locations
agcttcatcacttgaaagacaatttccttgaagaaaagatattatttcaattctccagtcttcactgtgcactagagaaatagtgagcactgctctttccatgagctcaaccgaaggtgcttttattgtttcaaaaaatacttcggagggcaaggggagcccctgagccgctgatttggctagcaaatccacatgctcattttcacctcttggaatacttttgacggaaaatccttcgaaggaagcttccaaccttcggactgcatccagatatttttcaagcttcggatctcgtgccctgctgcttttatccacatggccagctatgacttgagaatcagtctttaagaatgcccttcttattcccattgcccttagtntccgaagccccaataaaagtgcttcgtactcagcaatattat

SEQ ID NO: 2773 - DNA, 476 bp, Zea mays
  unsure (1)..(476): unsure at all n locations
actatacaaactcagctcgcacacatagctcttttaaatacctctgatcgcatctcttttatatgctatgactaacgngctttcaagcttatttcacaccaactcatacgtatatcgaaagggaattggagtcttccgcgaagacaaaaggcttncactccgtaactcatacttcgccaccactccgagcaactctctcttctttgggggagaaatgagcactcccgaaaaggacttcatccttgggggagaaagtaaaagctcaaacgccaaaggaccggatttcgtctttggataatcttaactcatttactttgtgaccaaaggagaagaaaatactttcacggctctaatgattccctttttggcgatccatgccacaaagggggagaaagtaagagccccaagcacaaggagcgcaccccaccaatttcaaaacttaacgctgaatattttcaatcgaatcctattgcgcc

SEQ ID NO: 2774 - DNA, 386 bp, Zea mays
  unsure (1)..(386): unsure at all n locations
ttgatcatgggcttcaataacactatcattnaggcaaccgccagtgcctgggctatgaggcacaaagaacctttggacatatgcctaccaacattcttcatgatcttgtgtgcattggaataaagctaagccagtagtggctctatctgaaatccttgaaagctagtgaccagcatgtggcagaaccacccaaactattctagcttaatgcttgagtcacgccttgaggccacaacacacttaaattgaataacccatcaattctttggatctcgtccgatagagtcagntaccaaagatcgagtaccattagctcaaacgatggtgagactcaaagagaatactataaacatgaaaccacacattagagtacttgagttatacat

SEQ ID NO: 2775 - DNA, 448 bp, Zea mays
  unsure (1)..(448): unsure at all n locations
gagtgatctaagacattctcgaattcttatctcaagtactacacaatntttataaccacccagaattgattttaggttgaactgaatcaaacaattcacttcttgaaatctgttctgtcagtggacagaatacaactaccagctttgaaaattcataactcttaaactatcaggcctaatgcgtatgaacagttaacacaaccaagatagcacaaacatctacaactttcttatcacgaccatgaactgattgcaacattaaattgagcaaacaatgcaatctctgaaatctgcactaatttcacagattcagtacggaatttgcaaaaccatcactacttactgtcnacctatggttgtcaatttaacaccacaagataataaagtatctacacctctctatagacatatctacagaaaacacaattagtctatccacatacagcat

SEQ ID NO: 2776 - DNA, 409 bp, Zea mays
  unsure (1)..(409): unsure at all n locations
aagctgctagtacttgtcgaatcaacattatctaccagcacagcaactgcagaccataccagtgacttggcccttcgcatgctggggactcgatatgattggacctttcaagaaagctcaaagaggatacactcatgtactggtagcaatcgataaattcaccaaatggatagagttcaaacccatcgcttctttaacctcagctaaggccgtggaattcgtacaagacataatattcagattcgggataccaaacagcatcataactgacctangatccaacttcacaagttcagagttcttcgatttctacgagcaaaaaagcattcagatcaagtatgcttctgtagcacacccaagagccaacgggcaggttgaacgagctaacgggatgatattggaggcactc

SEQ ID NO: 2777 - DNA, 444 bp, Zea mays
agcttggagaagcttcacagcatcttgtggaagctgtccaagggctagggcgaggctgggggtcgttagaaaagaatggtcacgccggccgtgctcgggcagtgatggcgggcggtggcgctcgctttccacggcgaactccggtgatctttggctcgggcggagctttgggtgcgcgagtgcaaacgactaaggcctctaggggcacttataggcgagggcaaggtgcagacgcggggcagggcaacaacgcacgaggcgcgcgctaccgtggctagggcgcgctcggccggtcaggcaagcgattgaacacgtggcctcgctcggtctggtcattttcgaacgctaattggctcgcgatcttctcgtaactctcctaaatccctacacacgattttttccttttcatttactctttggttctcttacaacacttgagtagat

SEQ ID NO: 2778 - DNA, 392 bp, Zea mays
  unsure (1)..(392): unsure at all n locations
ttctaacatgggctattctgcggcgccacagccaacccatgttaacctctgcaactaagcatgtgtgcagttcagctctatcaaaatctactaactataacctgaccctctaacacacccttaagtgctattgaatcatcacttcttctaaagacagtgacacctccatcactcaagagaccgttgtagcccactttgcataattgagataccgaaagcatattgtaatctattgaatcaacaacaaaaatattgtgaatggaatggtccggggatatagctattatacccaaacctttgaccacaccttgattgccatccccgaatgtgacagctcgatgnggatcttggttattctcgacgaaagaaacatattcttctcacctgcatat

SEQ ID NO: 2779 - DNA, 432 bp, Zea mays
agcttcagcgaagcatccctctacttttttcttatttcgaaccatgcctcgcaggtttttgagtgcacgttcaatgtgatacatccacctatattgtacaggtccaccaacctttgccttatatggaatgtgaataagtagatgctccatcggattgaaaaatccacgtgggaatattttgtctagcttgcataacaacactggtatttgtttctccaacttctccatcatatttttacttatttctttggcacagatctgcctgtagaaataacttagctcaactattgcctgccacatggcgtcgggcatataaccacgaaacatgacagggataatcctctccattaatatatggaagtcatggctctttaacccagttaagtttcccgttttcaaattcacagctcttttaagctcgcagcataacca

SEQ ID NO: 2780 - DNA, 443 bp, Zea mays
  unsure (1)..(443): unsure at all n locations
nagcttctaaagggatagcacatcttatgtactaaccaatgttcattttgagaaagacagggattgtagtgcatgccaagcaggaaagaaagttggagtccatcatccacacaaaaacataatgacgacggacaggcaactcgagctactccacatggacctattcagcccgatcgcttacataagcatcggcgggagtaagtactgtctagttattgtggatgattattctcgcatcacttgggtgttctttttgcaggaaaaatcacaaacccaagatacattaaagggattcttgagatgggctcaaaatgagttcggattaaggataaaaaagataagaagcgacaatgggacgaatttcaagaattcacaaattgaaggttctcttgangaagagggcatcaagcatgagttctcttctccctacacacctcaacaaa

SEQ ID NO: 2781 - DNA, 427 bp, Zea mays
agcttctccagagttagggtggcttcctggcgaaataccacgctgttggtcctggacgaagtcccttgatcatagcttcaataacaatctcatttggcaccgttggcgcctaagctctgagaagtagaaaccttcggacatacgcctgcaagtattcctcgtggtcctgtgtgcattggaatagagctagagcagccactggtttcgtttgaaaaccctaaaagctggtgactagcatatccttcagcttctgccacgatgtgattgttcccgtccgaagagaagaatatcatgtttgagccacactcctaattgccatgatgaagggacttgtcatgacagtagtgttgccaccatatgatgatatgggtgcgttcgaacttatgaagaactgtttgggtcaaatgctcgcatacatgggagcttt

SEQ ID NO: 2782 - DNA, 431 bp, Zea mays
gcactacataacttctataatcaccaagaatttatccaatgtttaactaaatccaacaacacagttttcgaaatctgttctgaccgtggacagaacacagcaagcagtttgtaaaattcataactcttaaactatcaggcctgtggttatgaaattttaacacaaaaaagataagaaaagcacctacaactttcttataatgaccatgaacagattgtaacattaacttaagcaaacagtgcaagttctgaaatctgtacagaaagtggacagaatcagttactgaatttgtaaaaatcataactcctaaactgtcagacctatggctgtcaaattttaacaccagcaagataataaagttatctaccacttttctatagcacatatctacagaagacacaatttagttcatcaaacatacaacacaacta

SEQ ID NO: 2783 - DNA, 417 bp, Zea mays
  unsure (1)..(417): unsure at all n locations
agaacacgatttaagattaacttatgttcattntgagaaagacaggatatgtagcgcatgccaggcagggaagcaagttggagtccatcatccacacaagaacatcatgacgaccgacaggccgcttgagctactccacatggatctattcggcccgagtgcttacataagcatcggcgggagtaagtatagtcttgaatagtggatgattattctcgcttcacttgggtatgctgtttacaggaaaaatctcaaacccaacacaccttanagggattcttgagacgggctcaaaatgagttcgccttaaggatcaagaaaatatgaagcgacaacgggacggagttcaagaactctcatatagaaagctttcctgaggaggagggcatcaagcatgagttctcctctccctacaca

SEQ ID NO: 2784 - DNA, 443 bp, Zea mays
agcttttggttgtactgttaggagcatgctatttaatatggtatcagagcgagaggtctcgagttcgaatcctggttagcgcaattaaataaaataattgttgctcactcctattccatgtctaagaccaaagagaggctcaacgtgacgaggagtgttagaatataatataagtggattgcccacctcttcctatcagcttatgcttttgggttgcactggctggcgcatgcaacttaataatgagatctgactgttgtattaaaaagaaaaaacaccccaagggctaaagtacaatgtacacatgaaaacaacaacacaattgcaaggcaacacaacagcctatggtaatcagtgaggatgtaccaacagactagctaaatggctagtccctgccaacatctaggcagaggcagctaaatgtctagtccctgccaacattt

SEQ ID NO: 2785 - DNA, 491 bp, Zea mays
  unsure (1)..(491): unsure at all n locations
actatacaaactcaagcctctaaagggagaacacctgatacgcttaactaacgtgctatttctaaaagatacaccttgcgcagctcgtcaagcaggtaaacaagtgggaggagcacatcacagcaagaatgtgatgaccacttcaagacccctggagctgctgcatatggaccttttcggacccgtcgcctatctgagcataggagggagtaaacatggtctacgtattgttgatgacttttcccgcttcactcgggtgttcttttngcaggataagtctgaaacccaagggaccctcaagcgcttcctcaggagagctcaaaatgagtctgagctcaaggtgaagaagataaggagcgacaacgggtccgagttcaagaaccttcaagtggaggagttccttgaggatgaatggatcaagcatgagctctctgctccctacacaccacagcanaatggtgtggagagaggaaaacagaacgcaatcacat

SEQ ID NO: 2786 - DNA, 450 bp, Zea mays
agctttaaggtaaaggtcataaaatgactcttaattataagttgaatcacatttatacccctgggataccaaaaaccctaattggaaccctcggaaaaccctgaaaccaaaccctaggggcttatgtgcaaaattagcccacttttgggttaaagtgcaaaaaccaagctaaataagtattttaagtcatttggttcacaaatatgtggacttgaaagccaaaccctaagttttggacttaaatgcaaaatggacctcatttgagttctattctaagtctaaaaatcagagaattggctcaactttggagctttgcatctttcaaattataggagttttgccctaggtcaccacatcaaaattgtagcccacatataggagaacaactttgtttaaagattcaagccatggtcttatgtgaaatttggagaacaactcaatcaaagatgg

SEQ ID NO: 2787 - DNA, 436 bp, Zea mays
ctcttctccttatcttcctcgcttcaccaacacgcctcattttctcttcctcttcaccgtgttgctcggccacagctcctctcgctatttttacactctccttttgtcgcctgcaacccacttttgaagattctccaaccacctcctgacctatcctgatatttctgtggcaatccactgctcaaaatcacataccggtggaaggagtctacaaaatatgcaattattacgtacgcagaaaaacatttaccaaaacattcacaaattggcaacatattacaagactattctcaccattaaattcatccgacgttgaacaatagctggctcaaatgcaaagttagcacacatccaatacctctggtcataggtgtcatgatcttcagacttaccgaccttacaacgattaccacaaaaacacatatgcactggaaca

SEQ ID NO: 2788 - DNA, 195 bp, Zea mays
agcttggtcgacacaaacacagactcccatactgcgacatcacacattagacctgctatgttaactatgtgctctgcaattgaaatgccaactctatgcactaggtctagagcacgagcctttattggtgcgcataagactttcgaaggattaaggagcccctatgctactgaccctgacagaatatcgggctgc

SEQ ID NO: 2789 - DNA, 425 bp, Zea mays
  unsure (1)..(425): unsure at all n locations
agcttatcaagtctactttcatatggatccggaattatagncatatctgttctgaggccgccgtaatcattgttttcttaccgagatattttctgccttttctgcccatggtgctgcgtcaccctattttggcccaatgggtcgtgtatcaagttaggtccattaaggacgcatcctagggttccagcacgaccccaatacccttgtggtcgtcctcccatggttataaacaccctagccgccaccaagaacagcgggttttgtttagatcaagtttagctctcgctacttgcttgcaagcgcgcgtgctagttcagccgcccgtcttcttgtcttcggaacccaccatattggagtttgactttgaaacctacatttagatctggtaattcagtacttgttctacttgttcttgctagttcttc

SEQ ID NO: 2790 - DNA, 380 bp, Zea mays
  unsure (1)..(380): unsure at all n locations
tttgagaaaaccaggttggagcgcatgccaagctgaaagcaagttggtgcccatcatccacacaagaaccatatgacgaccgacaggccgcttgaactacttcacatggaactatttggccccgaatgcttacataagcatcgaccggagtaagtattgtcttggaataagggatgattattctcgcttcacttgggtgttctttttgcatgaaaaatctcataccaagaaaccctaaagggattcttgagacgagcttcaaacgagttcggcataaggatcaagaaaantagaagcgacnacgggacggagttcaagaactctcaatcgaaggcttccctgaagaggaaaggcatcagcatgagttctcttctccctac

SEQ ID NO: 2791 - DNA, 373 bp, Zea mays
  unsure (1)..(373): unsure at all n locations
tctaagggatagcacattctaggattaaccaatgtttattttgagaaagacaggggttgtaacgcatgccaagcacgaaagcaagttggtgccccatatccgcacaagaacattatgacgaccgacaggccactggagcttctacacatggacctattcggcccgatcgcttacataaacatccgtgggacgaaatactgccctgttattgtggatgattattctcgcttcacttgtgtgtgctttttgcacgaaanatctcataccccagaaacattaaagggattcttgagacgggctcaaaatgagttcggcttaaggatcaaaacacatanacagcaccaccggacagagntcaagaactcacaaattg

SEQ ID NO: 2792 - DNA, 423 bp, Zea mays
  unsure (1)..(423): unsure at all n locations
agctntgccagatcagttctgatgtgtggttgcgttctgcagatgtcagagaacaggcgtataggaagaaggcgtgctcatcaagagcgagccgctccgcaagatgaggtgccccaacagcagcacctgccgcccccgcccccgatgtcgattgagcagatgtttctgatgcagactcaggcagttcaagccatcggtcagactctggccgccattcagcagcagcagcagcagcaacagcagcaggctccaccccagcctcagatgcctcagatgcctagagataagcgtgctgaattcatgagaggtcatccaccaacgttcgctcactcttttgaccccatggatgctgaagattggctgcgcactgtggagcgggagtcgcataccgctcagtgcgatgacagggagaaagttctgtat

SEQ ID NO: 2793 - DNA, 275 bp, Zea mays
  unsure (1)..(275): unsure at all n locations
agcttagagcacaagtaattattgagcattgcaatctgctcaccaaattggtgtgctagaaagaagtgcttctgaccttgcatatatataggcctagcgctagctcgaggatctagggagatagtactactaatcataaaagtgggggcttgaccttgtcatataaactaacccttgcaaaaggnccatgtatatagatggatttggaaccgctccgttcatatgtggaaaaggggcttgataaagaaataaaattttctgaccaaccaacccaa

SEQ ID NO: 2794 - DNA, 412 bp, Zea mays
agcttgtttctttcggggtaattgagaggcatatgttcgtatttcactgctacgctcatctagtcatcatgtgtctgcgcttgatatgcaacctcttcttcagttctcctccaccacgctaccagttcgtcaccaaatcgtatcgcgctgtgcttctgagtagcattacgctaagaagagagggagggaggggatccgtgctccgtgctactatcaaagaggaaagggaaaccgaatctgtcaagccctttttttttcgaaagttggatgcttttcactttcaggactgggatcgaatacccctccctttattccgctctcagctggagtatgggcgaatatcattacgcatgcatagtagttcctcaaaagccacagatgatgaggaatggcagctcagctacttgtcctg

SEQ ID NO: 2795 - DNA, 427 bp, Zea mays
  unsure (1)..(427): unsure at all n locations
tctcaagggagaacacattntacgactaacaaatgttcattttgataaagacagaatttgtagcgcatgccaagcacgaaagcaagttggcattcatcatccgcataagaacataatgacgaccgacaggccactggagctcctgcacatggatctattcggcccgatcgcttacataagcatcggcgggagtaagcactgtctacctattgcggatgaatattctcgcttcacttgggtattctttttgcaggaaaaatctcaaacccacaagaccttaaagggattcttgagaccggctcaaaatgagttcggcttaaggatcaagaaaattagaagcgaccacgggacggagtcaagaactcacaaatcgacgcttcttgagaggaggcataacatgagtctctctcctaactcccaaaaaatg

SEQ ID NO: 2796 - DNA, 429 bp, Zea mays
  unsure (1)..(429): unsure at all n locations
gagagcacattttatttttaacaaatggtcattntgagaaagacaggatttgtagcgcatgccaggcggggaagcaagttggagtccatcatccacacaagaacatcatgacgaccgataggccgcttgagctactccacatggatctattcggcccgattgcttacataagcatcggcgggagtaagtattgtcttgtaatagtggatgattattctcgcttcacttgggtattctttgtacaggaaaaatctcaaacccaagagaccataaagggattcttgagacgagctcaaaatgagttcggcttaaggatcagganaataagaagcgacaacgggacggagttcaagaactctcanattgaagggcttcttgaggaggagggcatcaagcatgaagtctcttctccctacactccacaacaaa

SEQ ID NO: 2797 - DNA, 420 bp, Zea mays
  unsure (1)..(420): unsure at all n locations
agcttcggcgacagttgagaattttggcttctaaacagtgcaaatagcaatgaatgttgtggtaacttcacacctactcgtctgtttatatagtgctgcaggtaagaaggcgaaacgccataatttttacaccaagcggacacccgctcgcactcgctgcgtggtggaccgcagagaccgaacagtaactctgcaaggtggggctgctacacgctgggagattgaatcgtttctcgacaacgagctcagggaaggtgttttttagaccttcggcgcttcgaagcttaagagactttnttcacggatcaagctcgttacgaaaaacgatctagcaccgtgaaaggggctactgttgggtctatgcttcgtcgccgaaagtcttatataaagaagtgatccttcgctgaagctgtttgcata

SEQ ID NO: 2798 - DNA, 364 bp, Zea mays
tgcagcatgcaagcttctaaagggagagcacagtgtacgattacttttgtttattttgagaaagacaagattcgtagcgcatgccatacagggaagcaagttggagtccatcatccacacaagaacatcatgacgaccgacaggccgcttgagctactccacatggatctattcagcccgactggctacataaacatcggcgggagtaagtatcggcttgcaatagtggatgattattctcgcttcctttgggattctttctacaggaaaaatctcaaacccaagagaccttaaagggattcttgagacgggctcaaaaagagttccgcttaaggatcaagaaaataagaagcgacaatgggac

SEQ ID NO: 2799 - DNA, 449 bp, Zea mays
agcttaaggtaacacgtatggtccgagtggaatttactatatgttcataccatgattatattgattgtgatgtggtacccatgcaagcttgctctatgttatttggtagaccatggcaatttgataaggacaccatgcatcatggtaaaacaaatcaatactcttttatgcataatgagaagaagcttgttttgcaccctatgtcccccgatgctatcttgaaagatgaagttgctagagcatgcaaagagaataacaaatctgttcataataaaaatctagatgttacaaaggaattggtacaacctaagagtgataattctaaatctgctcatgtaaggaaaaatgaaatacaactgaaaagtgcttgtttccttgcttccaaatctgaattacttgaattaaacgatgttgatgcaatctgctatgtgtttatatgcaaggatgct

SEQ ID NO: 2800 - DNA, 412 bp, Zea mays
  unsure (1)..(412): unsure at all n locations
agcttgcatagcatggttaaatttcctgtatagcatctanggcttgtctaacctagctgagataaccgccaacaaagcgagtgaaaaagcttaactcgggtcaaacttgacaagtcttaaatttaagcttttagcacttaaattcttacttatgcaattgttggttcttgaaatatgcatgaagtactgcactaaaggggagtattcaacacttaaatcactcatgaaaacccctagtgcaagccaaaatgcaaatttcaccatttgcctattttccctaaaaaattatctagcctatggcaaaatagttttgaaaagtatatgagggtgccaatacctgtcccaacaagtgttatgttgtgtgaatataagttgggatttggcttggtcgaaaataaatagtaaaattcaa

SEQ ID NO: 2801 - DNA, 446 bp, Zea mays
agcttgccagatactttagtcattacctctctattttttatcgcgtaccagcgttaagtttaggtcatcaacacggtcaggggcatgcgtcatctaaggcgctgcctccgtgcttagtcaccggttggggcgtgcgatctcggtcgtcgatccatgggtggatggcagagattacacgctaagtaatggttcggccgatgtgtacacaaccataggattccgggcgaatggtcggattagctcccggccccgatatctcgtctaccattgattcaccattgtgtggccacaattagaattaaggtaatgattcaatgcgtgtgatcctggccgctggatggtgatctacaggttgtgatatgagcactgtgtggatgtatagtgagccatacgagttagatccgagagctcttcggtgcgtactgtttcacaggggcactgatcta

SEQ ID NO: 2802 - DNA, 447 bp, Zea mays
  unsure (1)..(447): unsure at all n locations
caacatgataattatagcccttgtgtgaagcttcgcatgttttggacattgctcgattccccacaccagaaccctagctttcttagctaataattgcctaatnctattagagcactaactcataaaaccctatttacccaggagtaccatgaaggaaagttatattccagatataacttactatgttctattataactgcatacatatagcattacatgggcatctatgcatgtatattgtcatgcctacaaaaccaagaggaaatagtccacaaagaagaaattgcaccaccaactgagactccacccggcgggaatagcctttattttgatatctatggaacagatcccgtatcctctacaacacaaggcaagccccggcgcatttacctctctcttgggattctaaactctctatcacttgaatgatgcattacgtgatacgag

SEQ ID NO: 2803 - DNA, 406 bp, Zea mays
  unsure (1)..(406): unsure at all n locations
agcttggtgccgatggagaagcaaaaattcttgaaatcttggctgtcgaactgcttgccgttgtcaactgttagctcggacggtactccgaagcggcaaacaatgttctgccagaagaatttttgggccgtctttgatgtgattgtggaaacagccctcgcttcgatccatttggtgaagtattcgacggctacgaaggcgaacttaaggttcccctgagcggtgggcaggggcccgacaatgtccaggccccagcgctggagaggccatgtatgggcgatcagctntgtatattgcgaggggttgcctgaccgaggagagaacttctggcaggcttcgcaggaccttgtgactcaatttgcggcgcagatcattgcaggccagtaaaacccttgtcggatcacct

SEQ ID NO: 2804 - DNA, 414 bp, Zea mays
  unsure (1)..(414): unsure at all n locations
cactagtctctaacaattggcatccagtatccactagttatttacgatngactntatttcacccttgtaaacatcttgaaacgccaataagacctaccggggcaaaaatctatcaatctataatgtctaacatcaagctgacctcagaactaaaaagattgttattagctaactcgttgcaggcttgattcgagctcggctcaacaggaaatcaagcgaactttgagctcaggccaaagctagtgagctcttattgagcaatactaagcagcttgatggagctcgtgtcaattgattttctagcatgtctatcttctttcaaacttaaaagcagtcaatgaaggcccaatgaccaagcaactatcggactagcagacaacagagcccactcctgtgtcaccgattctatctcta

SEQ ID NO: 2805 - DNA, 444 bp, Zea mays
  unsure (1)..(444): unsure at all n locations
agcttgtgaaggttcttcatcctcacatgtgctaagcggcgatgccacagccagcccatgctagtcttagcaattaagcatgcatctagaccggcctcctcttttgcaaaatcaactaaataaagtttgccgtctaatacacccttaaaagctagtgaaccatcacttcttctaaagacagacacatctatatttgtaaatagacaattatatcccatattgcataattgactaacagataacaaattatatccaagagactcaactaaaaacacattagagatagagtgctcattagatattgcaattttacctaacccttttaccttgccttgattcccatcaccgaatattattgaatcttgngaatccttattcttgacgtaggaggtgaacatcttcttctcccccgtcatatggtttgtgcatccgctgtcaataatc

SEQ ID NO: 2806 - DNA, 445 bp, Zea mays
  unsure (1)..(445): unsure at all n locations
agcttgttcaaatgcaaatagaagaagtcttatattgtacgctctgnccggatcatgatccataaagagtatagtatcatctgcgtattggagaattgagagcccgccatcaacaaggtgagggatcattcccacaacctgctcatccgttgtggccctactaatgaacacttgtagcatgtctgccataatattgaacaagaggggagataaaggatccccttgtcggagtcctttttttgtctgaaagaaatctccgatatcgtcattaacattcaccgctacacttcctcccgaaatgaaggtcttaatccaagatatccatttggacgagaaacccttcatcctgagagtttgatataaaaaaggccacctcaccttatcatangctttctcaaagtcaagcttaaaggatacaccactgaggtttttccgatggagttcg

SEQ ID NO: 2807 - DNA, 436 bp, Zea mays
  unsure (1)..(436): unsure at all n locations
agcttgtgagcaatacaagttcagaatgtgtaaaagctgcttcggctgatcaaccgaagcccatgctcttatgtgaggacatagcanagcaaaagtgctattgggatctcaactgtctgaagagcaggagaaaaccttgataagggttttgttcaacaacaaagatgtttttgcttggtcagctaatgatctttgcagggtaaacagggatgttattgagcactcgctcaatgttgatccatccttcagaccaagaaagcaaaggcttcggaagatgtctgatgacaaagccgaaggtgctcgcaacgaagtgaaaagactcctcagtgctggagttatcagagaggtaaaatatccagaataggtggctaacactgttatggtaaagaaagcccatgtgtaatggagaatgtgccatcgatttactgatctcaat

SEQ ID NO: 2808 - DNA, 326 bp, Zea mays
ttttgcaaaaataaccaaataaaagttggcgtctaatacacccttaaaagctagtgaaccatcacatcttttaaagacagacacatctacatttgtaaatagacaattatatcccatattacataattgactgacagatagtaaattatatccaagagactcaactaaaaacacattagagatagagtgctcattggatattgcaatcttgcctaagcctttcaccttgccttggttcccatcaccgaatatgattgaatcttgggaatccttattcttgacgtaggaggtgaacatcttcttctccccagcatatggtttatgca

SEQ ID NO: 2809 - DNA, 357 bp, Zea mays
gccctatggactcgacgcccggcccgctatcttattcttattctctggccgcagccgctgggagcatcgtacaatctacaatttccagctcgagaataaaatcacctcgataaaaaccacacatcccacacaatctaatatgttctcgcaccacaacacattagccctatatacccttctaatttagttcatctacccttatgcactaaggaacactatgcaagcactgaccgggctgggcgggaggaacctaacgaggcgccacccatcgtggttcctctgaggctctaccatcgccgctgtcttgttgcatgcactgaggctgaatgcgctgctgctgctcctctgtctgtgcgc

SEQ ID NO: 2810 - DNA, 393 bp, Zea mays
ccaactccctctcacccttctggcagcttcttgacttccatggatggcaatgggcccttgttccgaaggtatcttcaagcataagtgtcggggaccataattaggggtaccctcaaagctcctaattctcagctggtaacccccatcagcataaagctgcaaaggcctgatgggtgcgattaagtcagggatcagtccattcgagcgactcgatcacgcctcgcccgagcctagcctcggacaaaggcaaccgaccccggaggatttctgtctcgcccgaggcccccctccaacgacgaacatatatccggctcgcccgaagccctgccttcgctaagaagcaaccctgaccaaatcgccgcaccaaccgaccaaatcgcaagagcatttaat

SEQ ID NO: 2811 - DNA, 440 bp, Zea mays
  unsure (1)..(440): unsure at all n locations
agcttcttgcggaagagaagacagtattgtttgccgctcggnacgagcgcactgtttgccagcagacccagcagacgcgccgcctgctggatgaccttgactccgcctgccaatgaatgggacgggacgcattaaatgctgagagggcacgtcacatgtcagcgcagtggcaggcggcacgtcctttcctcaataaatgcagggctgcacgacttcacgtcaagttcggcccaatagcttatgtcatgggccacaagctgcgggtctccacctgagcaggacgtgaagggcaaggcccagacacgtgtcagcatcggacccctgctcatactagagtccttctcgttcccggaccttgctgatgttcggacctacccggaagctccggacttatatgtataggggtccggtgtccttctgtggnggtccggacttactgg

SEQ ID NO: 2812 - DNA, 404 bp, Zea mays
  unsure (1)..(404): unsure at all n locations
agcttatcaagactttcatgggaaccattgggcatctcgacctcgacatgggaggtaaatccgtcgatcaaaaggtataccggtcgatgataggttccttactctatttatgtgcatctcgaccggatattatgctttctgtatgcatgtgtgcaagattccaagccgaccctaaggaagctcaccttacggccataaaacgaatcttgagatatttagtttatactcctaagtttgggctttggtaccctcggggatccacatttgatttaattggttattcggatgccgattgggcggngtgtaaaattaatagaaagagcacatcggggacttgccagttcttgggaagatcattggtgtcttgtgcttcaaagaagcaaaattccatagctctttctact

SEQ ID NO: 2813 - DNA, 448 bp, Zea mays
gcagcaagctgcacacaagctcattgaaactcttgatatatctcttatatgctaagacaatgtgtttcaagtcgattcaaaccaagtcataggtatattgaaaggaaattggagtcttcggcgaaaacaaaggctttcactccataactcatgcttcgccatcactccgagcaactctctcgtctttgggggagaaatgagcatcaaggaaaaggacttcatccttgggggagagagtaaaagctcaaacgcaaaaagacttcgtctttggtataatcttaactcacttatttatgaccaaaggggaagattgcacttcgagggctctaatgattccgtttttggcgattcatgccaaaaaggtggagaaatgagcccaaagcaaaaggaccgcaccaccaccaagcaaaaggaccgcaccaccaccaccaaatccaaaaacttagtg

SEQ ID NO: 2814 - DNA, 472 bp, Zea mays
  unsure (1)..(472): unsure at all n locations
tattatntacaagccttgggtcaagcccggcattatttggaccatgcttggtacctagaacccacaaccctagtcttctaacaaagcttgccctatgaacttcactattgactccaaaaaccctagttttctggagtcccgtgaaggaaaattatattcaagacctaagataatatacttttattatctttgcattctcatgagcattacatgagcattcatgattatatatggctatatatagaaaacgaagaagagatagaagttgaagaagcgaggactacaccaccaccacctgaagaaccctgngccgggaactgcttttattttgacatctgtggagcagagcctgactcacctataacatatgtcgtgtgatcggagatccccagctgggtattaatcgatttcggattgctgctacttcccggatatgaagacttggtcactgacctacacgtagcaatccagt

SEQ ID NO: 2815 - DNA, 136 bp, Zea mays
tgagtccccaactgcttccgcgcgaccccttgtttattctcctctcggcgccgccggggaggctttcgattgtcgagaaaactgcagtcccgcgggtcacggcccgaccctaccttaggcatcccgacccgtgaca

SEQ ID NO: 2816 - DNA, 433 bp, Zea mays
  unsure (1)..(433): unsure at all n locations
agcttagtttactgccccaaatcagccctttattttgtttaaaccatactatctctaccaccactatagtgaaacagggcattttcaacagccaaatccgtcggacataagcctcaggccatcgtacataaactattttagacggccgaaggtacctgtctctcggtccgaacgcgtcggaaataaccttatttctgacggcggccgtcgaaaatagtgtatgtccgacggccgcaaagggccgtcggtgtttaacttcgtgaacggttgtaacggtctttggtgggacccacatcccttatgtccgacggcttatcaaatgccgtcagacttaaaggaaccttatgtctgacggcttatcaaaggcgtcggacataaggctattcactaatgngcaaaaaaaccataatcttataaatttctgacatttaca

SEQ ID NO: 2817 - DNA, 267 bp, Zea mays
tctaattctatgtccagtatgacaaactgattctgttcattgtaccaccggagcaccgacatgctctgtcctgcacctgctccatgcatttaaagtacaatgttcctactggtgtacatgatttgaacatcttacaaacacttgtctaaaacgctatttattatgcatgtatcgcacaaactgcaccagcattttacttctggcacctaagatgcctatctcacatctttcaattcactctgcatttcacggaacactccaactctg

SEQ ID NO: 2818 - DNA, 435 bp, Zea mays
  unsure (1)..(435): unsure at all n locations
agctcgactcaagtatccacacattaattcttaattcnattttcccggctcatggacaagacatcctccctagatccaagtccatagaccaacatagatctcgttatcaagatgaatacaatcaattcctgacctcgcgcgagtgctagaaaaatcactcgacttctaccgagatcctgattagcaagcagctactcgacctagcatactagtattcatctcaaaaaggaatcctaagttcatgcaactagaggttcaagcaactcctacacttaagtgcacatttcaatcctacaagcattaagtgtagtaaagtagcatataataatacggttatgcataaaaccggtgcttgccttcaattgctggggctgcggagagatcctcgatagcagcctctgaagcctgctcctggtccttctcttggacaggtcc

SEQ ID NO: 2819 - DNA, 446 bp, Zea mays
  unsure (1)..(446): unsure at all n locations
agcttaagagactnttttcacggatcattctcgttacgaanaacgatctagcaccgcgaaaggggctactgttgggactatgcttcgtcgccgaaggtcttgtaagaaaaagcggctttcggctgaagctgtttgtatgagatggccgaaggttcctcttcatgaagcttcggtattacaaaccgacttaaagatagaatgaccttttagtccataaaggtctgagtcaatgttgtaaacttttatgagaggcacaattgtaattcttcacaggctgtgtcctgtgtctataaaatagtgaacagtattcctttactgttcacgcattcttgtaattgcaatcgcatcattcaagaaccaatctttgtcaaggcagaggtataactatattcagtgattcaatatattaagtaaatataatatggttcatttacctgtggtaccct

SEQ ID NO: 2820 - DNA, 375 bp, Zea mays
  unsure (1)..(375): unsure at all n locations
gacctatgaaactaagctttagatctgatacagcgacagaattttctcacctatacgacgcccaatttctagggcatgaaccacaacagctaccttcatatcatgagttgggcaacgccactcatgtccgnataaccgccttgaaacatatgcaatcactccgccttcttgcattagcacacagcccgagcccactgcctgaggcatcacaatataccatcaaacgcttgcggaagtccggctgagccaataccggagccacggttacataatgcttcaacttgtcaaaacgcttcttacacttacaagaccaattgacatcaatatcattcttcaataaacttgtgattggcttcaaaagcttataaaaatctg

SEQ ID NO: 2821 - DNA, 393 bp, Zea mays
agcttgaagtgtctgtgaatgtatgtgatctactagaccggtgggagccattgggttattgacagtggatgcacacaacatatgacaggccacccacggatgttcacctcactagatgagaatattgatggtcaagataaaatcacatttggagaccactcaaaaggaaaagtgccaggacttggcaaggtggcaatctcaaatgacttatcaatatcaaatgttctcttagttgcacccttgagcttcaatttattatcagtgggacaactctgtgatcttggacttcaatgcttattcactccatcagaggttattgtaacaaaaatggatgatgaatcaatggtattcaagggatttagatacaacaacctctacttagtggatttcact

SEQ ID NO: 2822 - DNA, 381 bp, Zea mays
  unsure (1)..(381): unsure at all n locations
ggacacgtgttaccaccgcgaccccgcttatttcatcgtatcctctatcccggacctcgctacgggtgggtcggaacttactccgagggatctagaacccatccaatggacccagcatgcttacttgggagtcccgaaccctattcaggggtctcagctgtgcccacaagggcttcgtgcttcctcctctaggcacactccaactgaatgcaanctgcgatacattaacctctttggcccactggcgcccctaaagacattcacgtgcgggcgccgggtgctgttcaacgctgaaagtcacctataggcggtcaatacaggcaatctgctacctatgatcgttaactccacactaccaaccgcgttaccgcttgaaacata

SEQ ID NO: 2823 - DNA, 433 bp, Zea mays
  unsure (1)..(433): unsure at all n locations
agcttcgtgaaaacattctccgaagctatactccgtatatgaagaatgtgtctccttgtgacttaacacgatnttcactctttcaaagcatactttcgaagatcaatattgtgtccccttcttgtgccatatgcaacattatgtatgatgcttatgctatgcaaaatgatgtgatgatgttatgttacgtagatgacatttgttccgaaagatacacacatatccccacacaatatttttgtatcagcgctgattcttcgctgtaagctctacattcccttaggaacgactttcgagcctcttcaccttttacttagtcggtataagctctgcattcccttaagaacgtctttggagcttcttcgccttttacttangcggtataagctctgcattcccttaagaacagtcttggagcttcttcgccttttac

SEQ ID NO: 2824 - DNA, 320 bp, Zea mays
  unsure (1)..(320): unsure at all n locations
gcgacatatagaaactnaagcttgtccacatagctctcttgaatacctccgatcatatccttgttatattctatgaccaatgcgtctctcagtctatctcacaccaagccatacgtatattgaaagggaaccgcagtcttctgcgaagacaaaggcttccactccgtaactcatgcttcgccatcactccgagcaactctctcgtctttgggggacaaacgagcatcactgaaaaggacttcatccttgggggagagagtaatacctcaaacacaacacgactttgtctttgggataatcttaactcacttatttatgac

SEQ ID NO: 2825 - DNA, 454 bp, Zea mays
  unsure (1)..(454): unsure at all n locations
tatgagtggctgagggtttcaaggcttcatgtcattccattaaccaaccttgtcaaactgaacatcactcccagacctagaagcaaagagtattctcagtccgccagttctcctcttgaactaactgaccaccatgcccaattgaggcttactacacgacacccaactcaagatcaatcgactccgatcccttagtcaagttccagcactcgtccttcaccactcccggtccatcgacccgagacgctacctattggcaatcactcatcatcaattcgaaccataagggaaaagtcagccttgtgttcgcaaaggctcattatggcttcttggtttcatttaatctatgaaattagcttggcatacgaggcatctgtgtgtactctacatgtcattatgnttaaactttgttgggtgtgtttaaagatccgggccattgtngcgtctgacggga

SEQ ID NO: 2826 - DNA, 385 bp, Zea mays
attcttctgacgtatgacttggaaccatattctaaccattgtgttggccttgtgatatcagcctcttaataaacataagaaaacatagtctaatattaattttaaagtctcaaatacctagttgccagcttaatttgaacattaatcctcatgagaaccatgtctatttcgctccaacaaaagccacatgtatcataattcaatacattcatcctcatccctctacccagctagacagcttcatccttttcatttcctaaggaagggcatttccttagctgtttctctattttcctgcaggtgatggctccacgtctcgtgcaatctttggttgcagctttgggagatctatacctatataaactttccaaacttaatttcaatg

SEQ ID NO: 2827 - DNA, 439 bp, Zea mays
agcttgagaagattcttcattccaacatgtgctaatcggcgatgacagagcctgcccatgttagtcttagcaattaagcaagtgtcaagttcagctctatcaaaatctactaagtatagctgaccctctaacactcccttaaatgctactaaatcatcacttcttctaaagacagtaacacctatatccgtaaaaagacagttgtagcccattttacataattgcgaaactgaaagcaagttataatctaaagaatctacaagaaaaacattggaaattgtcggggaccataattaggggtacccccaagactcctaatctcagctggtaacccccatcagcacaaagctgcaaaggcctgatgggcgcgattcaagtcaaggctccgtccactcaagggacatgatctcgcctcgcccgagcccagcctcgggcaaag

SEQ ID NO: 2828 - DNA, 206 bp, Zea mays
  unsure (1)..(206): unsure at all n locations
cggcaccggcaggctggggctgtgctgattcaagaacgagtgcgtgtaaagcgaatgctttcttcagtgacactaacaaacggaatcacaagtctggccgtcggggaataacaggaaacttggtccgtccgcangcatgcatgctgtctggtcttcacacattgagagatcaaaggagtccacacattgtctgagttatagacgac

SEQ ID NO: 2829 - DNA, 330 bp, Zea mays
atgctgggtaagctacgccatcgcaacctatttgcgctaaagggatattactggacgccgtcccttcaacttctcatttatgagattgtcttcggaggcaacctgcacaaacaattgcatgaatcatccaccacaaactgtctgccatggaaagagaggtttgacataatcctcggtatagcgagaagccttgctcatcttcacaggcatgatattatccactacaatctgaaatcaagcaacatcctgctcgacggatcaagcgaagcaaaggtaggagattatgggctagcgaagctgcttccaatgctggaccgctacgtcttaagt

SEQ ID NO: 2830 - DNA, 473 bp, Zea mays
  unsure (1)..(473): unsure at all n locations
ctcaagcttgtgaagaatcttcatccccacatgggctaacccgcggtgttttagcctacccacgtcagncctaccaacgaagcctgtgtcgagttcagctctatcaaaatctactaaggatagccgaccctctaacacacccttaaatgctattgaatcatcacttcttctaaagacagtgacacccatatcagtaaaaagacagtcgcagcccatttgacataatcgtgaaacggaaagcaaattgtcattcaaagaatctacaagaaaaacattggaaatagaatggccgggtgatatagcaattttaccaagtccttngaccaaaccttgatttccaatcccgaatgtgaaactcgctggggatcttggttttttcatatgaagagaacatcctcttctcccccgcatgtgngttgggccccgctatcgagatccaacttgacccccggagctaaaccacaaacaatcta

SEQ ID NO: 2831 - DNA, 445 bp, Zea mays
agcttcggcttcatctatattatgaatattcttctaatccgcccaactcccttcagcctcttggcatcttcttgactcccgtgtacagagatgggcccttgttccgaaggtatctacatgcatagatatgatggatgaagtattgcttctaaggcattgagtgttcctcgaccaataattgcattgtatggatactccatatcaacaatgtcaaagacaacctattttgttcttgtgttatggacatagccgaaggtaactgacattgttatcttgccaagtgccacaatctgtcttcctccgaagccacaaagagggtgtgttgcatcatgtatcttatcttctggctcttgaatttgcccgaaagcctttgcaaagatgatgtacgctgcactacctctgtcaatcaggacattgtggaccagaaatcccttgatgacacaag

SEQ ID NO: 2832 - DNA, 369 bp, Zea mays
agcttcagtcttagcgggagtctcagttttattttttcttacttagacagggtagttagctatatcctgtgcatttatgtttgtcatgatgaactatgattggtttggatctttgtaatgattgtcaccagagtgtgggtatcccctgcattttggtttacatactatgttaataaagttagttatatagttgggaaaccttttattccactttcctctttatctgagaagctgtgtggtctgtgttggagatcagtgaagatgctcacctgctcagtgctgttgaggaattctattctcttctcttatgctgcaagatttgccaaatcagttctgatgtgtggttgcattctgcagatgtcaaagaac

SEQ ID NO: 2833 - DNA, 435 bp, Zea mays
  unsure (1)..(435): unsure at all n locations
ctgcaagcttctcactaataggtatatctctattttattcatctaagtctntccagaaaagtcgcttagcactctcgtcgtggcctacttagggggcatacacactaattatgttcaagaccaaatcacccatgacaagcttgactaagataatcctatatccttgcctcctcacatccaccacaccgttcttgagacctatcaatcaaaactcatactccattcttgtttgtagctgtctcggtgtaccaaagcttcaagttggtattgtccacctcctttaccttctgagccttcacttaatctttaggacgcataagttatttacatgctgtcatgtacagccgcacttacaggcgccgtcgtgacgccaggagggctgcagatcgcgcagccaaggcaggcgccacaatcagtggctaagtttagaaagat

SEQ ID NO: 2834 - DNA, 371 bp, Zea mays
tccaacctcttcgcggacaagcttccgctcatcacgcggaacaaagaaactcgacttacatgggaaaagggtgcctattcctctacatactattcctatcggctataccaaatgtcaacggcctcaatgtcattctacacacgctcgtctcttgcgcctatacacaaatgacacctgacatcatacttctcaccctgacttgtattcacttccacctaacgctcggacttttactttccgtcacccccaacggattaatgttattccaagctgctcctgtctattcataataacacaataaaaaagtcctgctcatatcctctgactatttatgctgcttcccatgttctatatgcctctactcgcttcct

SEQ ID NO: 2835 - DNA, 440 bp, Zea mays
  unsure (1)..(440): unsure at all n locations
tgcaagcttggatattattcatcaaatcacttttgatattgtcgcaatagataaaaagtcttcttcacgaagcatgaaaagaagggaaggtgttttttcgtcaaagactcaaaaacagtacgtatgtaaaatttcatgcatcgtaaagaattgaacaataaaaacaggtatattatatacagggctacaagatgctacacatgttacatttcagaagtttttacaatagtacttaatcttctctcagaacaacatctgcagcttcgttcaggagccgattaacaacttcgtccatgatggcttcagccatctttttaatttcgtcatctcctttcgggtgagggcccggagacgctntagtaggatctgaaggaggacaggatacggctacattgctattacaaatggcgaacgaagtttanaactcaaaattacaacat

SEQ ID NO: 2836 - DNA, 440 bp, Zea mays
agcttgacattgcttccctgttggaaactattgacatccttaatgccagggcgtctcccattatagagcatgcttctagcaaatttaaacttttcattttcaatttcatgctcattgattttagcagttaattgagctatatgatcattttgttgtttaattaaagcaaggtgatcatttatagcattaatattaacatctctacatctagtgcaaatagtaacatgatcaacattagatgtagagggtttgcaaacatttaattcatctatcttagcatgtaatatgtcattctcatttctaagacaggaaatagtatcattgtaaacatttaaatatttagccttggaaattaaactatcattttctgtcctaaagctagatattttgattattcaattatcaatatttagcattaaactagcattctcatttctaag

SEQ ID NO: 2837 - DNA, 381 bp, Zea mays
tgtcccaaggacccgcatccactttcacgtatatatcattttgtggattctacctaccggcgtgacctcttgtccttcttagatgcttactctggcttccatcaaatccagatgtctatggaagataggaatcatactgcttttgtaacagtggatgggctttactgcgatgtcgtaatgccttaccgtctgaaaaacgcctctgcgacatttgtgcgggcgatgagtaagactttcggcgacctgattagggacaaggcggaagtgtacgtcgatgacatcgtagtccagactaagagagggtcgaccctactggaagacttaaccctggtctttgcaagctgcgggaacacgcacaaagctgaaactgtacagtgcatc

SEQ ID NO: 2838 - DNA, 371 bp, Zea mays
gcagcttctaagggagaacacattttaatatttacaaatgttcattttgagaaagacagggtttgtagcgcatgccaagcaagaaagcaagttggcactcatcatccacataagaacataatgacgaccgacaggccactggagctcctacacatggatctattcggcccgatcgcctacataagcatcggcgggagtaagtactgtctagttattgtggatgattattctcgcttcacttgggtattctttttacaggaaaaatctcaaacccaagagaccttaaagggattcttgagacgggcttcaaatgagttcggcttaaagatcaaaaaaataagaagcgacaacgggacggagttcaagaattc

SEQ ID NO: 2839 - DNA, 360 bp, Zea mays
caattaccaccctttccaaggaaacttttgacttgatgtaccagcggtggcggtctccacttccaaatatacttgaccttgctgggatccaccgcaatcccgttaatagacaacacatgtcccacaaattggatttcctctatccaaaatgagcaattactgaatctagcatatagttgatgctcccttaagcgtgttaacatgatccgcaaatgccaacatgctcctcttcattcttggaatatattaagcaatcactcatgaacaccaccacgaatttatcccactccggcctgaataccgaattcataacatatgtgaagtgggcacgagcatttgtagtccgaacacataccaata

SEQ ID NO: 2840 - DNA, 127 bp, Zea mays
cagggctgctcacaacccacaacagagacaatggcatggtcagacactcagccaaacccccatggacaccaagatgccccccctgcccaaacgagcaccagcgcgcaaggacggaaagcgccccggg

SEQ ID NO: 2841 - DNA, 351 bp, Zea mays
gtgacaagagtcctgcatcattgaagaccgttgtaacacctcgtccactcttggaccgacgatacttccttctggcagccctctaagatcatatatcatccccacagttcaacacgagtattttgtacgcactttgtcctcattcatgcgcacctgagaagacttctaggtctgtcacccatcctaagattgctctaggctaatcacgcttaaccccaaggttcttacgagacaggcttctgaacaagaagatgtaccttgttgatatgagtactctattaattctattaagccttgtgccaggatatcaccatccactggcgccaggatatcataatccaccctcttaga

SEQ ID NO: 2842 - DNA, 444 bp, Zea mays
  unsure (1)..(444): unsure at all n locations
agcttggtcgcttcgacacacgccgaatttttcttggctatcaaacagnaaggacattcttatgcattttcttgagcgaagatgaaaagctctatacatctaaaaatagcgcgaatgcaccaccaccatggatttggcgcaccgtggtctggctagtcgattcgccgcgcaagcagccacagactacggtgaaaaatcttcgcgcagctaaatctctctctcttttatgttgaaaactccgtgagctatctctccctctctctttctctctctctcagaattggagtagattctttggttccggtggagcaaaccaacgagcatgtgctnggttcacggataaagtggaatgcgttagggccatctatccttctaattagggacaatcaaaacactcaaacttccgataataagtaagctagtcactcgcatggcatggagcga

SEQ ID NO: 2843 - DNA, 405 bp, Zea mays
ctgcagcttcaagcagagattggtagctagtatatttgcagcgtatgccatgccaataattacaaatgtcgcccctttaaaatgagaaaccttttcaaactaaaccggttactcactaagcaggtgatcccactaatcaaagttccctgaagtgcctttcatgacgagctttgggaagatgtttttcggaacttcggcacaaggcctcccaatcatatttttgcgatataagctcgttataaaaacaaaataattccgcaaggggctactattgggggcctatattgtcgaagatccttaaaatcccttatcaccaagtcgagaaggtgtatttcatgtacaattcaaaggatcaacgaagccaaccttcgtcagaagcagcttgcaaatcagaaaggagaagct

SEQ ID NO: 2844 - DNA, 461 bp, Zea mays
  unsure (1)..(461): unsure at all n locations
aaactcaagctctaatgcacaaattctccccctttgacatcaaccaccaatactatattcatgcaagaacatangacgacgtccagggacagcacggtcgtaacgaggacagacacattatcaacactccctcttacttattgagcatatgcactaccaacatttaatgaaaaaagattactacttccttttgtacctttaccatgttgtactgtacttcccatcttgaacagattaaatctcttgagagcttctccacacttgtgccagattctctatcctaaccttttcttgttgctaagacaccaaacttacaacaagttatagttttgggcacaacaagaaacttctatcctaatgattatcacaagacgtcaattaaagcacactaccatggctaccaatcgaaaaacaccaattgcaagatcatctactatcgtagctctatgatattaaagaat

SEQ ID NO: 2845 - DNA, 306 bp, Zea mays
tctacgaaagtaggagggtcccggtagccctaagtggccggttctaaagaaacgggagcccattccatggggtggtccggagctgtgtggccgcttagcctggttctgtacccaaagcctatacactccaccactctgtgacgggtaccctagtatttggagctatagtcctgtgggtccgacaatcggaggcctggttctatagaatggatacttgtctcctgaggtggtctagagccgtgtagccgcttagcctggttctgtaccgtaagcctgcacgctccaccactctacgacgggtgtcct

SEQ ID NO: 2846 - DNA, 444 bp, Zea mays
agcttcctccagcattcttaatcccttatgcatccgaaagtaacagtatgtcccactaggggttatgaaactggtttttggttcatcttccttcttcatccatatttgatgatagcctgaatagcaatccagcaaactcatgagctctgatgaagctgctgcatcaactaaggaatctatccttggcaatggaaactcgtccttcggacaggctttattaaggtcagtaaaatcgatacacattctccatttaccattggccttcttcaccataacagtgttagccaaccattctggatattttacctctctaataactccggcactgaggagtcttttcacttcattccgagcaccttcggccttgtcatcagacatcttccgaagcctctgcttcctgagtctgaaggatgggtcaacattgagcgagtgctcaataacatt

SEQ ID NO: 2847 - DNA, 419 bp, Zea mays
  unsure (1)..(419): unsure at all n locations
agcttacttcgtgccttagcacttttttatttttaagaagcatttgccgaaaatcagctctgtattcagttctcgtgtcattgatgcgatatgatgtatgatgtgatgttatgtaaaatgatgtgatgatatgatgcaaaatgatgatgatgccgaagccacacacccacacgcccacactggaacacacaagctctgcatacccttaggaacgactttggagcttcttcaccttctatttcggtgatataagttctgcatccccttaagaacgtcttttgaacttcttcgccttatatttcgacggtataagttctgcatccccttaggaacgacttttgaacttcttcgccttctatttcggcggtattttggctctgcattccctttggaatgactnttgagcagaanacttacac

SEQ ID NO: 2848 - DNA, 432 bp, Zea mays
  unsure (1)..(432): unsure at all n locations
agcttgtaccttattatcggttgtatctataagctggagtggtcgtctgaaggcttttgaactgcttgaagcatagctntggtgattntgtgactgatcagctctggagtagctagagtgatgtagttgtgggcttttgaacaatagctggagtgatatgaaacattagtgatgtagttatgggcttttgaactgcttcaagctggagtgatgtcgctgtggtgcttttatgactgatcgtctctagagcttttgtgaatgatctaactagctatttgtaaatgatctagttgtgaatgatattataatngtgatgcttttgtgaatatataattgtggtgcttttgtgtttatgtgatggatctatgactgtggtatactgattaacagtgtatgtctctatgaattgtgtataacaatctgtgatttatg

SEQ ID NO: 2849 - DNA, 428 bp, Zea mays
aacttacccatgatgaagcatgtggccttttaagaggtcctagattaacaaacaaacaatcatcgtggtccttaaacgatatagacgggcgacctttcctgctcaatgtctggtctcaaattaaactattgctgaaaacctggtacctgtcagaggtacccttatgagatgatgaagtcattaaagcctttgataccttcatcattccatcccctttttctttgtaaaacatgattcatagatcaaaacattttgttcctaatctataagcatactaagcgcatctagcttttcaaatcaggtatcaaggatggtcatcaatagttcaaggaagttatgcaacaaaggtttaatcattcaactcctaccacctaatgcaatatataagtgataaaaagtttaaaggcacaatgaagtggcaaatgcac

SEQ ID NO: 2850 - DNA, 435 bp, Zea mays
agcttcagcttcgtggctgatttatccaatagggccttcggggtcgccccatatgaagttttcctcacttgagaacgtgccaacgctggcgaagctggttcttattttcttaacacattctatagatatttcataacaccttttcttgaatgcacgaagctcttcaacgtttttctctaaatgatttgcccattgttcactaatttctcgttttgtttcttcaactgtgcactcttctttagctctggctagttgtttccgaagatcctcaatttcgcgcttctgagcctcagcttgagctttgaaagcagcttcgtcttcttttattttattcaccaacgagtgtaatattttaactttttcgagaccttcgttccttagttcaattaattcggaacgaaggttgctcaaggctatgtgacacccttcgtcttc

SEQ ID NO: 2851 - DNA, 421 bp, Zea mays
  unsure (1)..(421): unsure at all n locations
ggagaagcaaaaatccttgaagtctcggttgtctaattgcttgccgctgtcaactgttagttcggacggtactccgaagcggcaaacgatgttttgccaaaagaattcttgggccgcttttgatgttattatggaaacagcccttgcctcgatccatttggtgaagtactctaccgcgacgaaggtgaacttaaggttcccctgagcggtgggcaggggcccgacaatgtccaggccccaccgctggagaagccatgtgtgggcgatcagctttgtatactgcgaggggctgcctgaccgacgagaacacttctggcaggctttccaggaccttgtgacccgacttgcggagcagattattgngggccactaaaagccttggcggatcaccttcacacctatggcccttggccctgcgtgc

SEQ ID NO: 2852 - DNA, 116 bp, Zea mays
tagaccttgcgcaggttgtccagcacggaaacaggtgggatgctctcatcacagccaaaatgtgatgacaacgtccctacccttggagctgctacatatggacctttttcgaccct

SEQ ID NO: 2853 - DNA, 444 bp, Zea mays
tgaggcatgcaacgtaggactactccagaagcgcctttttgtgttctagttgctagcactaagctgggttacttatctgatgagaaagagaataacacgatgggggacgccaatgattcacaagatgggctgtagactgtaatgatagccgtctgttgaaatgcgtcaatattatccttgcttttctgtcaaatcagtggtagtgtttcctaagggaagttttctttgtcttgccttagttcaatcctgaatcatgttttgtgttccttgctggaaaatacttgtctgctcattatgtgtttagtaagagcatctccaacaacagaccctgaaatagagtcctacaatctgaaatatgaccatatttagaatgtttatggtttcataagagatgtttactccaatagtcaggccttacataatgctatttacgaaataaatcat

SEQ ID NO: 2854 - DNA, 434 bp, Zea mays
  unsure (1)..(434): unsure at all n locations
gcttcgcgtcgctcacgagaagnctgcctttgaacgatgccctgtctttttatcaagaatcgcacgcgtgaaaaatttctatgtgacgtgataccgtgaggggagccgnttcatctggctttaataataaggaaatttatatcccggaagaacgaaccccacctttcaatctcaaaacctacctttcggaggctgcgtgcgtagtcacacaaataaccacacgcaggttactacatctatgaacgcaacaggtatattttttctacagagagagggtaacaagagcaacacgttaagatggcaatgtgtgaagacccgtccagttttgtcgntccagatctggcttcgtagaataaaatctcccaagagctccaataactatatccatgcatgtgtacaattctacatacatggatccgtgtgagtattctata

SEQ ID NO: 2855 - DNA, 470 bp, Zea mays
tgagttgcatatgagaccacgccctgcgggaaagaactatatcacacacactttgggtgttacagcttcgttgcccgctccgggtcaagctggcctgtgccgaccttctcgaagagatggcccggagcctggatgactgaatggttctatgtaaaaaatgacctaacaacgcacgaagacgtcaagagtatcattatgcgccccatctggcaacgtttcggacttccaaggccgaaggttgaaatgaatgaagcagccgaggaatgccaaagagccttcggcgtagtctgctcttttattgggaccagggacttgattcaagaacatattgtcttcacggtgtggccacttgcacgaaagtgggaaatgcccaacgagaccatcacagagtccgacgaatgcggactgtgcagactaaaatacacattcaaataccgcgataaatttgttgaacctgatgaccactggtc

SEQ ID NO: 2856 - DNA, 425 bp, Zea mays
agcttctacacattgtggtgtgagacggtttttattctcacttagaaccctaccactagtgctaaaagctgattcacaagctactgtggttattggaatatccaaaacatcacgagcaattaacctcaatgtaggataacgagtaccagcaacctttcaccaaccaaggatatcaaagtactcattctcatcatgaggaagagtttcttcttccaaatagcgatctagctcattcttgcttttcacaaaggttgttgtctttttacttgcagcaagtgatttgaatattgacaaaacagcagttgcattaattgtagttgtaaaagaagcgccactagatgatgtacccacacactcttgatcagattgcaataggaactgaattatcaaattagttagcacttcataaactcttgaaacatata

SEQ ID NO: 2857 - DNA, 417 bp, Zea mays
gcaagcttattggaaagctatgatacacaacgctcctcttaaatatgtgtattaagggggggcgcgggatacctctaaggtcccactccaatatgaaactggtagatataacatcaacttggatagtcctaagacaagctttatattaattataaataaaattacttatcccgatgtcttttagagaattacagcttcgactccatgattctctggagcacttaatgacctgctccaccagctctaccatttttcttgaagacaaaactgtcccaaacagggtctaagacgaataccaatcttggtcttaaatgacaatggctcacacataggtcaatatgccacaacatatttacattatagccaccgtgaagagccgtgtggcataatataccgcgatgctcgcgacataatatg

SEQ ID NO: 2858 - DNA, 391 bp, Zea mays
gagcttctgcttcgtttgcactcacttgcatcacgccaaaaggacggagaccagcttatgcgaaacgcagacgtagtggagatcctgaggaagaccacgttcccgcacgttcacggagcaggtgaagagaagtcaccggagacgatcctggatcacgagtgagtagtagcgcactagcagcacttcctggttccttcccgctaatttccaggccagctaaacacttgacagctaaaaaaaatcaagaaaaaagtttggaagcaccgaaccttattctatcggttttatttcatcttctcagtcgtgttatttggcttggggacctgaactaccggatcgcgctttcctaccgctcggtgaaggctttggttgagatgcacaactggaagca

SEQ ID NO: 2859 - DNA, 427 bp, Zea mays
gcagcttgtaaagcatatgctttttgaaaataaacttatctgtcgacaagatctagatttagaaaaggttcatgatgaagaacacagttcagatgatgattttgtgggcaatagtgatgacgacgatgacaacaagccatcttccacaaccaaatttaatggaacatcgaatacaatgaaattcttcctgagggaagataggccaatgaagaatggctatgtgggctggggttcaaaagagctcatggagttcctttcctctataggcaaagatacattgaattccctagatcaacatggtgctactgaagttgtgaaggtgtacattcaacaaaaaggtctcttagcaagagataagaaaaaacttgtcatatgtgatgacaagctcaagattttgttatgagatcacaagtgaggtacaacagga

SEQ ID NO: 2860 - DNA, 427 bp, Zea mays
agacaaaatatactggtgcttgtgttttgacctggccatcttgcttctcctgtacaagcgtcgcactgactgtaaagagagaggctgctacatataatagccccttgcgaaggtggagttagtgctgtcaagtcgatcaagtattgctttaactcttcgaaagccctttgctgagccggaccccactggaaaacttccgctgacttcaatatttcaaagaatggtagattcctttctgctgatctagatataaatctatttaatgatgtgagcctttctaccaaccattgggcgcctttcttcgtatttggcagctccatcccaaggatagcttcgatcttattcgaattagcttcaattcccttcattgatactagacaaccaaggaacttgcccttctttactccaaaaacatactcttctggat

SEQ ID NO: 2861 - DNA, 411 bp, Zea mays
agcttcacagcctctcgagatagctgtccattggctaaggcgaggctgggggtcgttagaaaagactggtcacgacgaccgtgctcaagtagtgatggcgggcggtggcgctcgccttcaatggcgaactccggtgatctctggctcgggcggggctttgggtgcggaagtgcaaatggctaaggcctctgggtgcacttatagacgagggcaaggtgcagacgcgcagggcaaggcgaccacgcgcatggcgcgcgctgccgcggccagtccgcgctcggccgattaggcaagcgatccaacacgtggcctcgctcggtctggtcattttcaaatgctaattggctcgcgatccttttgtaactctcccaaatccatgcacacgatttcttctttaatcgttactctttg

SEQ ID NO: 2862 - DNA, 358 bp, Zea mays
ggcagcaaaacagtgcgatagcaatgaatgttgtcggaacttcacacctacccgtctgtttatatactgccggaggtgggaagatgaaccgcccagtctttcgcaccggacaaacagtcgcccgcacccactgaacggtgggccacagagccccacacagtgaatcgccaggacacgtgtaactgctgcatggtggggctacctctcgctatgattattttaatcatttctcggcaacgagctcccggaaagtgttctttagatcttcggccatccaaagcctcatagactttttcacggaccatgctcgttacgaaaaacgatctagcatcaccaatgggctactgttgcgggcatg

SEQ ID NO: 2863 - DNA, 347 bp, Zea mays
agcttgaaggaccactttggctgaagagctttcgaacgtgaagacttgtccggtccacggagtctctttatccgaacgcgagttacttatcgcagaaggtgatgagtgaggtatccgtatcccggaggcgtaggagtccctcggctcggtcagccttgactgcttacgtgtactccgtcgtttccaggatccgcttttcgaagtagtcaaaaagcacggaagaaattctgctaaaaagagatcttttttcgaaggaaaaaaatcgacgcagagggggtctccccccttttagcccccgagggagggtcgggctttgtcgaggcgaggccgacccttccttgatgact

SEQ ID NO: 2864 - DNA, 429 bp, Zea mays
  unsure (1)..(429): unsure at all n locations
cgtagaaaagcctctcgtncgctcgccgccttctgagaatatgagggcctaagcacaatcattggaccaaccattcattctaaatgaacatctcatatcaattatgttggccatcacaagctttcgtataagagtataaaggataaattatgacaacctgaaggtacataatggctgtgaactggtactatcgcagggtgttcatgaactttctaatctacatatactttanagtgatcttcggtaagtataaaaagaaagaaaggtcaccacaagaacatgtactatatactataccatgacacaattttagcgtcaaacaactgacgggaaaaatagacattttgcgacagacagtctgtcacaaaatattaccatcacactatctgtcgatagtattgtatggagtcaacaaattgtggcaataat

SEQ ID NO: 2865 - DNA, 388 bp, Zea mays
agcttgacgatcgcgggcgctttgtggtcttatcggctaccaagatggggccaaggcctaccgtttctacgaccctgtccccgagcgcgtccacgtctcgcgcgatgccgtcttcaacgagggagcgtgctgggactggggaggtgccacagacaccgtcgacatgcaccctttcactatcgcggaggagtatgagctgcggcgccagcaagttgagggaccgtccttagagcctgtctctcccgaagcgtgcatgctagctccgtcggcattgacaccatgctctgcgtcggcctcatcgacaccggcgccgcacataatgtcttcaacggcacctagcgtgtcggcggtagcaccctcggcctcgacaccgcaagcaccggggact

SEQ ID NO: 2866 - DNA, 441 bp, Zea mays
agctttaccaaatggacgtgaagagtgcctttctcaatggaccaatcaaggaagaggtctatgttgagcaacctcccggctttaaagacagtaagtaccctaaccatgtctataagctctctaaggtgctttatgggctcaagcaagccccaagagcatggtatgaatgcctaagagatttccttattgctaatggcttcaaagtcggaaaggccgatcctactctattcactaaaactcttgacaatgatttgtttgtatgccaaatttatgttgatgatattatatttgggtctactaacgaatctacatgtgaagaatttagtaggatcatgacacaaaaaatcgagatgtctatgatgggggagttgaagtatttcttatgatttcaagtgaagcaactccaagagggcacattcattagccaaacaaagtatattc

SEQ ID NO: 2867 - DNA, 363 bp, Zea mays
acactgacaggaagtcttacgactcagtgcatttgccaccacattggctttgcctgggtgataatggatcttcagctcatagtctttaataagctcaagccatcgtctttgcctcatatttaattctgactgggtgaagatgtacttcaaacttttgtgatctgtatatatgtgacagatattttccaccagatagtgacgccaaatcttcagggcatgaaccacagcagctagctccagatcatgagttgggtaatgctcctcatgtccgcacaactggcttgaagcatatgccattactctgccctcttgcatcagtacacagccgagcccacttgcagatgcatcacaatatacatcaaa

SEQ ID NO: 2868 - DNA, 434 bp, Zea mays
  unsure (1)..(434): unsure at all n locations
agacacctgaggcatgcaagcttgtaccttataacaggaggatacaatatgctggtgtgtttgtctgaaggcttttgaactgcttgaagcattattgtagctttggtgcttttgagactgatcaactctggagcagctagagtgatgtagttgtaggcttttgaacaatagctggagtgatatgaaacattagtgatgtagttgcgggctattcaactgcttcaagctggagtgatgtcactgtggtgctattgtgattgatcatctctggatcattgagaatgatctagctagctacctgtaaatgatctagttgtgaatgatattataattgtgatgcttttgtgaatatataattgtggtgctattgtgtttatgtgatggaactatgactgtggtatactgattaactgcgtatgtncttatgaattgtg

SEQ ID NO: 2869 - DNA, 436 bp, Zea mays
  unsure (1)..(436): unsure at all n locations
agcttctcatgtccgtgagcacgactgatataccagntttacactctgcagagaaggccactcccatacacctctaccgaggaggcgaggcagggtaacactacgaggcctttacatagttccactagcttcaaaaaacccgctacagttctatgaagctccaatgcagggacccctcgcctgaccgccatcgcagcaaaatcaacccaagggcctccctacactgaccactcccctacttcccttgccccttccgggtaagggagacctctactagctttcctaattagtcagccaatggcgtcccataccacccttgtggtagcactattttcctgcgtgggtctccatgttccaattaacataattatcttatcatgaatagtanataacaatttatactaacattataatcatgaataatgtgtatctctat

SEQ ID NO: 2870 - DNA, 449 bp, Zea mays
acccgggatccttaagtcacctgcggcatgcaagcttcggcacaaagacgaatctcaagatgtatggtcgaaccgacttaaagatgaattgacttaaagacccatgatgctttgtgcattattgtagtcggttgtaaaggacataaatgtaattttgcgcaggttgcatcctgtgcctataaacaggtgaacagtatcatggcactgttcacggaattctgtaatcactgacacatcacgcttggattattgctttccaccaaggcaaaggtataaatgtgcttaaatattatgttttaatacttgtatattcatataataaaacatacgaatatattttatactttatatttcatttttcattggttggtgtcttacaaatataatcacgaaggtgaaatctcgggatgtttacttatgaccttcgtccgaagctattaaatccttgg

SEQ ID NO: 2871 - DNA, 406 bp, Zea mays
cattcatgtggagactaaaccatatttcaacttttatactctgagctatacctgcacttcaagacaaaaactgtgttgtttgtacaaatatataatggaggtaaacagactaacaaagtcatgcaaaaaatctataattttacaaatgggttacagaacctggtggctctatatgtgtactggtattaggaatctctatttgacagttcccttgcatcagcaaaaacatttatgggcaaattaacagattcacatctgatacaggaacaacctaatgacaataacccattattggccatataaaaattagattcttctcacaaataaaaattgaagaagggtgagaagtcccttttattaacatggaaatgcccagcccaagaactatgacaccaagagatatgat

SEQ ID NO: 2872 - DNA, 261 bp, Zea mays
ctcaagcttcaccaccaaatgacccagctcttcgagttctacgaatctgaagaccctgatcatctgtttggtgaaggcaactgtcctctgacctattatgtcccatctactttataattcattcacccgcataccctgatcaacctaaggattgactagctttgtatttaccttgtccttgaatacctttcgggctattattgattagctttatgctattgctcaactctaactcatgaacatgatgagatttatcatgat

SEQ ID NO: 2873 - DNA, 416 bp, Zea mays
catgcaagctggtgaagattcttcatttcaacatgggctagtcggcgatgccagagccaacccatattagtcttagcaattaagcaagtatcaagttcagctctattaaaatcaactaagtatagctgaccctctaatactcccttaaatgctattgaatcatcacttcttctaaagacagtaacacctaaatctgtaaaaagacagttgtaacccattttgcataattgagaaactgaaagcaaattgtaatctaaagaatctacaagaaaaacattggaaatggaatggtcaggtgatatagcaattttaccaagtcctttgaccaaaccttgatttccatccccgaatgtgatagctctttggggatcatcatttttctcgtaggaggagaacatccttttctcccctctcat

SEQ ID NO: 2874 - DNA, 401 bp, Zea mays
  unsure (1)..(401): unsure at all n locations
agcttctgaggaagttcgtcatctcactcacgatgagcagaacagaaggcctcatcaaaaagaccttcatcaggagggcttcgtcaacgaagacgactggtatgataatttccatcagggaaattttgtttttgatgatgcttctcctctgtctgctgagctgcaggctactccttggcctccatcctataagccaccccagctccccatgtttgacggccactccgacccgaagcaattcttgatgagctacgaagcaacagtgtcttcgtacggnggcaacgctgcagtcatggcgaagtctttcgtcatggccgtcaggaatgttgctcagacctggtattcctcccttcggccaggaacaatcacttcatggcagaagctgaaggatatgttactga

SEQ ID NO: 2875 - DNA, 479 bp, Zea mays
  unsure (1)..(479): unsure at all n locations
gcttctgctctctcgtccttatattgggaccaatattgagagaatgttcaatgatacttctgtccactgcacacaaaatcattggctgaccacacgaagacatctttgttgtagaagataaatttcttcaagctttgttcttcttctgatgataattatgactcaagtaccccacgatccattatctaggtcaccatggcgtgcccacacgcctgcccgacacacgtgcccttgcgtggcttcgccctcgtgctcgtgcagcaagcagaccacgactgagccgcccnccgcgctcgtccaaacgagccaccgtgagccgagccatctcatctaaaatgacttaatatttctgaatgacttaatgtagcctaaaatgacttaaatgttacatagactttagatgacttacagttacatagaatgacttanatgttgtttgtacgctagaatgactgaaccaataacattagaaatatatg

SEQ ID NO: 2876 - DNA, 396 bp, Zea mays
tcggccgagggatccttcgtgttatcaatagagaaagcagcttcggcttgggccagaatcttcacatgttcgcatcctgctttctccaaaatagatgcgactcctcttgcacaagaaaaggcgcagacgtcccaacagccactcaaaactttctcaaaagcttcggcttcgccgcagatccattcaattggaccttcgggatagcccagtctgaagttgtcttcatttgaatatgcgccaatattggcgaagctagtttttatcttttgtacacatgctacagattctccatagcatctttcttttgaagagcgaagctctacaactgtttttcccagtaatttattcaatagacactggcgtctcggtcagcttccgcaatagcacattttaatt

SEQ ID NO: 2877 - DNA, 347 bp, Zea mays
tgcaccggactgtccggcgcgccatccaacagaggctgccaccaacggtcacttttggcggttgcctcaccaccccccccccctctcccctcgacccctctctcccttcacctccctctcccctccctctcgccactctccgcactcctccccttaccgcacccctccactcctcacctcccacctccctctctcattcaattcccccccccctttccccccctcctctctcccacttctactctctcctctctcccccatcctctccccctccccaccctcctccttctccactcctccctacttccccaccctctcctccttactccctacctcacatccccctc

SEQ ID NO: 2878 - DNA, 191 bp, Zea mays
attggcaatcccatttattggattccaaccttttgcaaaggcaaaggtataatggttttccataactcaatatattaagtggacataacggaattcggctatgacgtagttatcccttttataccttctgctttatgttattctataattcttactgaaattttattacgaagacttaagctttcgtaata

SEQ ID NO: 2879 - DNA, 384 bp, Zea mays
  unsure (1)..(384): unsure at all n locations
acctctagagggacctgcggcatgctagcttccttgttggagcgattacagagccctattttagcgttagacacaactgtattatttaaatcatgtgatttctataaggcatgtcgatatgtcatataacaaacagtgttttctccctaccgcttgtaatgacgtattgtagtgtgaaccatgataaatgggcgagcaccaattntgatagttgatctggttntgcgtacgaatgggcattacagatcaataaggagaaaatggctatgtagcattgaaagaacatcactattagaaaataacatgaaaagatctccacatcagtattgtctttgggtgacatttgacatgatggagatctttgagtggcattttctgaacatg

SEQ ID NO: 2880 - DNA, 398 bp, Zea mays
atggcatttagatccttggcgctccaatagatggctaaaccttctgctatcacgacaacgtcgatctcatcaaaatgggagaccatctgccctagagctacgttgctctagtggaacgtgccttcagcaacaacgcgctccacgtgtccaggtaacgcccacagccgatcaactacaggcaccttgatcagacgcaggggcgagagggggcgcacaccatactgacaaccaggtgaaactcctaaagctctacgctccgcttggagggcgcaattgacgcctcggccgttacagcaacgccaccatcatgagcaagcaatagctcttgcatcctagccttcggctactactccattttctttgcctctgggcgcttcaaaaaacttccatctaagaca

SEQ ID NO: 2881 - DNA, 403 bp, Zea mays
tcacttacttatgggtgtcctcccacaactgagcttggatccagtccacaaccttcttgttcacctgaaacgccttggcaagaacatcattcgcgattggtggttttgatccaaatactgcattacaaatggtaatggcaccagggttctggctgctgaatgcggcgagggcaactgctggcttgtcatgacttggattgaactgaaagtggattaagccttgtgggaacacgaaaacatcacccttggtgagcagcttgctaaagaatttgttgtctgggttagatgtgacaaaacccacatagagtgatccttcaagaaccgctaagatctcagtggcacggcgatgaatatgtggtgggttctgttcttgatgggcatagtcaatcctggccatggagat

SEQ ID NO: 2882 - DNA, 392 bp, Zea mays
agcttgagaatgttcttcatcacttcatgttgttttgtgtgatgccatatcctaccacggctaatcggagcaaataagtcatcgactaaaccggcctattattttgcacaacaatattgaaacattgggcgcctagtcactctgacttgctagaggacgattactttattaagcgacaaacactattatattcgggaatcaacaatggaataccgtattatatatatgagttacagacacaaaattgtatgccatacacttatctaccttcacaatacaaacaacatgcgcatataagattgtggacttacctgatacttttaccttgacttggttcgcaacgccgaatattatcgaatagtgacaatcctctgatcttgatcgaagaagtg

SEQ ID NO: 2883 - DNA, 361 bp, Zea mays
  unsure (1)..(361): unsure at all n locations
ttctgatcctgnatggggacgacatattattgattgggaatgacattcctatgctggagtccgtcaaggcctcactgaaaaagagtttttttatgaaggacttatgggaagcagcatatattttgggcataaggatctatagagataggtctaagaggcttatatgattaagtcaagatacgtacattgacaagggtttgaaacggttcaacatggaacaatccaagaaagggttcatacctatgtcacatggtaaacaccttatccagatgcaatgtcctgcgacggctaatgagcgggagcgcatgagtaaggtaccatacgcctcagcaattggatcaatcatgtatgccatgataag

SEQ ID NO: 2884 - DNA, 430 bp, Zea mays
  unsure (1)..(430): unsure at all n locations
agctttgtaccttctttgaaatagntttttatataattccagcgatgctctctacagtattcttatatgctgagtcctcgtccattccttgttctgtgtatctcctgaaaagagcctccaccatgccatggacagcaccaagcaaaatacctgcataataaataaccaaatacagattcaaacttcaaagtgcaaaactttatttcattagacagaaaaagtcaccactcacctcgctcgccaaaaatgtcactccggtactcctgctctagagtagtagcaaatgtgaaaggagaacctaaagctactgaccaccctatagctacatctgttgcccttccatcaacatcctataaaatgcaaagaacaacacaagaatgtctatagagattcaaaaatatacacttgaaggaagaccacacaaaacagc

SEQ ID NO: 2885 - DNA, 157 bp, Zea mays
tcgtataacatacaccctcgtgtaggtagtccagctggtcaatatgtgtgacgacgcgaatctgccaataatgttatgatcatattaagatccctgggaacgctgcttctggacgtctttggaccctgtttcttttttagcttacgaggaagtcatt

SEQ ID NO: 2886 - DNA, 445 bp, Zea mays
  unsure (1)..(445): unsure at all n locations
agctcgtgaagattctncattccaacatgtgctagtcggtgatgccagagccagcccatgttagtcttagcaattaagcaagtgtcgagttcaactctatcaaaatctactaagtatagctgaccctctaacactcccttaaatgctattgaatcatcacttcttctaaagacagtaacacctatatccgtaaaaagacagttgtagcccattttacacaattgcgaaactgaaagcaagtggtcaggtgatatagcaattttacccaagcctttgaccaacccttgatttccatccccgaatgtgatagctctttgaggatcttggtttttctcgtaggaggagaacattcttttctcccctgtcatgtggtttgtgcacccgctatcgatgatacaacttgagccctcggatgcataaacctacaaaacaaatttagttcttg

SEQ ID NO: 2887 - DNA, 433 bp, Zea mays
  unsure (1)..(433): unsure at all n locations
agactggatgcgtcgaatgtgattctacttgttgtaaactcttccttctcttccgntgctttgaatgcaatgggttgcacctcgagtgtggaggtggcgccttgctccaagttgacaatgtgtttggagtctctgatcataagttcaaagctcacaaacttgccaattacctcctcgaggggcatttgtttgtatctaggatctccacgaattaattgaacttgagtaggattaccaataacaagagatcttagaacaaccttgaccatttgatggtcatcccatttggtgctcccgaggttgcgcacttggttaaccattgctttgagtcggatgtacattgcttgtggatcctttcctttgctgaggatgaatcgaccgagctctccctcgatcatttcacgcttggcgagcttggtcacctcgtcccctg

SEQ ID NO: 2888 - DNA, 433 bp, Zea mays
  unsure (1)..(433): unsure at all n locations
agcttccccgctnttcaacctccaagtgaaatcagatgtgctgacacaacagtttcttccaccgccatttccatttctattagcaaactgttttttcacttccgtgtacaaattagcgcatttcactgtagtcgccggatatcaggtatgtaatatctacaactttatatcatacttacttacaatgcaatgtttttgttgttgttgtcaatgtacaaaattcgtactagggccttcttattgtgaatttaattgctcccttttatgaggatcatgggttctcaagtacatgtgtatactatacattgctatcctaaaaaggaatgactgtcgtgtaacataagtatggctgtattttttgtggattatcagttcacatggataatattgtaagttcatgcttcacataacgtgtatatgctcgtgcaaaaca

SEQ ID NO: 2889 - DNA, 378 bp, Zea mays
  unsure (1)..(378): unsure at all n locations
cagcttctaagggagagcacattttangatttaccaatgntcactttgagaaagacaggatatgtttcgcatgccaagcatgaaagccagttggtgcccatcatccacacaagaacatcatgacgaccgacaggccactggagctcctacacatggacctattcggaccgatcgcttacataagcatcggcgggagtaagtactgtcttgttattgtggatgattattctcgcttcacttgggtgttctttgtgcaggaaaatctcacacccaatagaccttaaaaggattcttgagatgggctcaaaatgagttcggcttgaggatcaagaaaattagaagcgacaatgggacggagttcaagaactcacaaatcga

SEQ ID NO: 2890 - DNA, 423 bp, Zea mays
ttcttcactctataagtgctggtggttttttgttgggtctcggtagtaattgggacagaaaattcagaagatctgcgaagctagtatcaaaccatccggcgctagccttcaacttaagaagatctataactggacacagtgtagtaaactctttgtcacaaccctttgattcatcatataaaggttcttttgaagcacttttcagtccctccattttagatagccctttctgcgatcccacagaactcaacatttctggttccatatggcgcaacatctcttagcaatcaaattcttcaaaatcttgattagcatccacattatccactttaccatcaactttaagatctaaaatttcgacaactctctcgtcattaccaggcactttacacggatcctacttaccatgttctgaccatatcg

SEQ ID NO: 2891 - DNA, 414 bp, Zea mays
agcttataataagagaatggaagctaggacattaccgtatgtgataatagaaggggaattatataaacatggagtctgttctccactcctcaagtgtttatcaagagctgaaggtattgaattaatgaaggaaatacatgcaggtctatgtggatctcatattgggtctaggcctttgttgggaaaagtgtttatacaaggattttactggccgaatgcagctttggatgcagcagatctagttcaaaaatgtgaaaattgtcaaaaatgtgcaagagaccagaaacaaccttcatctctcacccagctaatacaacctacttggccattgcaaagatggggcctggatctgttatgcccacttccaccagcgcaaggtaacttgaaatatgttgtggtggctgtagaatattt

SEQ ID NO: 2892 - DNA, 403 bp, Zea mays
  unsure (1)..(403): unsure at all n locations
agctttagaggaatatatcgttatcagcccatgagactcatttgtttgtgcggcaaagacaaaggccacaccacaagaacgtgccaagtcacgattcagaagcagaaagagattttcgaagctgaagcacggcagaatcagccgaagcaggttctacacaccgcttcatgctattctccctacgtcccagagtacgcagacaatcaacagcctacgacctctatcgctttggcaagccattctcaagcttcctgggctcagctgcaaccaccaccaccgctagcacctactctagttcagagccagcagccagaagggcatcaacaagctcagcagcaatgagattttngggtggattctgaagctcgcgcagtcaatagcactgtgcccgagtccaagcata

SEQ ID NO: 2893 - DNA, 326 bp, Zea mays
agctgagctatgtgtcaattatgaaggatattctgaaccttttcttcggtctcttatcccgtatgaaggctgcagaagtacctttcaccatgttcgaaccaatttaccggagtacgacatcttcgtccatataaagcttcgaagggtgccatcttgatactctcttgatagctattattatatgaaaactcctgtaacggtaaacattcatcccatttgtgtggaaactccagaacacatgcgccgcgcagatcttcaagtatctgattgaccctctcagtcatgccacttgtttgacgatgataggacgaactgtggagcaattt

SEQ ID NO: 2894 - DNA, 427 bp, Zea mays
  unsure (1)..(427): unsure at all n locations
agctntaagtgtatctttagaaggttcagttaatggtttccaacctttacctcatatgatcattgaggtagactaagctattgaggctcatccttaagatgctcctgccggacaggcctaagtacaagttcaagttgcacccccagatgagtaactatcccaacaacctatagtgcacaatcttcatgttggattcatgcttcatctcaatgatcagatgattgcccctatgttggatgactttgctcgagaattctccttcctcgaccattagaaggctagagagaggcatgataagacccttgatttatgggcctgaaactttgctcctgatgggttgtctaagagcgatgtcttggtccccatggattgggctctattctntatatgaaaacttctatctncagtctattttcaatggtccata

SEQ ID NO: 2895 - DNA, 331 bp, Zea mays
ctcaccttgagcgacactctgctaccctctacttcgaccacctcgaattgtcactttctgacacctttgatctcgacgtaatggcgcctcagcgtcaatgaaaaaaacacttgtcctacggcgaagaaaacgcagataacacttcgcatgccctaacaatagggtttcaaggcacgtgatctaccacacttggaccaagtgcaaccacaggatcacaagtgcttctcccagacctttctaacgacacgatcaccggtgtcatgctgatctcgaaccttcagccccttattactcctcccgtttcccgcattgagcggcgacacctttctgc

SEQ ID NO: 2896 - DNA, 437 bp, Zea mays
agcttggcttgaccacacgagagcatccccacccttatcacattcaatggtttaacaacagcggtaagttcaaggtaacaaaaacaacaaaggtgcatttttctattggctcttaccatgactttgctgatttcgatgtggtgactatggatgcttgctctcttttactgggacatccttgggagtttgatactgatgctattcaccatggtagatctaataaatatacttttatgcataagggaaagaaaattgtgttgcttcctatgactcccactgagattgtccactttgaacatgagaaaaagactaatgctaagcaaaaaggtgttttgaactctgaaaatcagcaacctattaagtttaaaactcctactttgctagccactaaatctgatcttgatgaggtacatgcctctcttggactttgctatgcc

SEQ ID NO: 2897 - DNA, 166 bp, Zea mays
ccaacccttccagtaccttctctatttctcataatattccttaatgcgtgtgaggaagggacaactatatctgcatgcctgaaaaacatgccgaagctctctgtacgcgctacaaacagcatacaacaccttctcaattatgataatctcttttgacaactaacaa

SEQ ID NO: 2898 - DNA, 443 bp, Zea mays
  unsure (1)..(443): unsure at all n locations
agctngacaacgaggaaatggctcttatcatctagagcttctggcaaatcctcaagtaaagaaaagggaaggactacaaacctcgctctaagagggtttgctacaggtgtggtaagttcagtcattttatagctaaatgtccatatacaagtgacagtgacagggatgacgacaagaaagggaagaagaagatggggaagaaaagatactagaacaagaagaagggtggcgaggtgcccataggacgagaatgggacttcgacgagagcaaatgtctcatggccaaggatagcaaaaagaagaaggtacattctggagatacccccaaatacactacttccgatgatgagggtagctctagtgaaaatgataatgatatgacttctctttttgcaaaccttaccatggaacacaagaagaaaattaatgaattaatcaaaacc

SEQ ID NO: 2899 - DNA, 254 bp, Zea mays
cctgcaaaacacgattttactttgtctctaccaataatagactcgacgagcacaactttgaccagaccaaatgcacgataggtagatctatcgctgatgccacctcgcccatgggatgggaggagcggagcttgcactcgagcggaagactagtgagctaggagaccgtctcacggtccctcttggtgatgaggaggtttagagtcgcctggactctatgcaccttttatacctagtgagcatccttatcggag

SEQ ID NO: 2900 - DNA, 432 bp, Zea mays
  unsure (1)..(432): unsure at all n locations
agcttcggcatctttgcttgtcccctcttcttgagcccctggcgtccaatcagcgatgaaatctactagcgctcgggattgaattgaagatctgtgcacgtagtcaatagtgaattcgttaagctccgcgacccactttccaatccttccagtagcttctctattcctcatgatatccttcaggggctgtgatgaaggaacaattatgtgatatgcttgaaaataatgccgaagcttcctggacgccatcaacacagcatacaacaccttctccaattctgtatagttnttctttgataaactcaaaacttcggagacgaagtatattgggacttgctttttggcttggccttcaagtttctcttgtacaagtgccgtacttactgtagagtgtgaagctgccacatacaatagcaatggagcccctaacac

SEQ ID NO: 2901 - DNA, 427 bp, Zea mays
cccaatatccttcttctcttatgggttccctcccataggggatcttgctctttcccaaagctctctgggcgacaacaactatgacaacgactagccacacatgaactatcacttttgtaggtacttgacttggtatgctggtgtggctaggtccaagttaagggccagcggatagctgcagactatgttgagctaaattcgccagacgacgaatacacttcgtacgacatagatgcttggcaagggtcgcaagttgaggctgctcccatcctagacagagtggtaacaagttgttaactcaatttatttttgttaatccgatgcatacgtttgtcatggcatctcacgtctcgtgtgatacggaaactctatgcccatatctgggcgaattgagcgtattcacgatgctaccgacacacgaacttgc

SEQ ID NO: 2902 - DNA, 348 bp, Zea mays
  unsure (1)..(348): unsure at all n locations
tatgccgttgaccatttcccgcatttaccctatgaggactctatggagaagcctcgtagtgagaccctgggcattcacctcgggagggaataccggtctagctaatccgggctagaaacgaattgtgactcatgggtaaagatgcccccccttggagagtgtaaaactgattattagtcgcgctcctggtatgagcagccggactcctcacatgataatttgacttgaagagggaaataatcgagatccgatgatcctgccatggtttgcttaagnggtttcacttaagaggtgatgatatactcttataccctttgttaatggggaatccttgggattcacacttat

SEQ ID NO: 2903 - DNA, 433 bp, Zea mays
agcttgtgaaggatcttcattcctacatgttctaagcggcgatgccacagccagcccatgctagtcttagcaattaagcatgcatctagaccggcctcctcttttgcaaaatcaactaagtaaagtttgccgtctaatacacccttaaaagctagtgaaccatcacttcttctaaagacagacacatctacatttgtgaatagacaattatatcccatattgcataattgactaacagataacaaattatatccaagagactcaactaaaaacacattagatatagagtgctcatttgatattgcaattttgcctaagcctttcaccttgccttgattcccatcaccgaatatgattgagtcttggggatccttgttcttgacgtaggaggtaaacatcttcttctcccccgtcatgtgggttgtgcatccgc

SEQ ID NO: 2904 - DNA, 433 bp, Zea mays
  unsure (1)..(433): unsure at all n locations
agctntgcctcgggcagactaaggccagattaagataacacgcaatgggcgtggagtggtggcgagagtancgtgtaccctccgtggcaagaggctggacagtggtgtagctgtgctctcggttgacatgaacctgatctggtcttaagaaccccagtagcgggttgacatatgcaagggttaagtgctacatatgtcgtgtgattggagatccttagctgagtataatcgattcggatcgccgtaccttcgcggttatgaagacttggtcactaccctatacgtagaactccagtaaagatgaagggtttgctaagaaattggctattgcaggtcaagtgattggactatggtagaaagaactctagttgcaggtaattttacttaactcggcaaataaaacttgaatnttaaggatccacttttagtaagc

SEQ ID NO: 2905 - DNA, 416 bp, Zea mays
atcacagtgcacttgagctttttattgcgtaagagggagatggtggccagaaagcgtgctaaatgagtttgcggtatggccgtattatacgctcggtgcgttgaaaaatcaaagaccccgcttgtaagtgaatgttgctattctagcaaagggaaggtgttttttcggaccttcggcgtaaagccttcgtccacgtcgcaatctgaattcgttattataaacaaattaatattgcgaggggctactgttggggaccttcggcatccgaaggtcctcaaaaacaggatttatcagtatttctggagtacaatgtgtgagcaggtatcctcggacaagtcggcgttgctgtaaaccggaataatacgaaggttgatacacacccgatgttgtgaacagaaattttcagcgtgacacta

SEQ ID NO: 2906 - DNA, 386 bp, Zea mays
cccttgaaactcagctgccttatgtcggccatttatcgatatgtgtcttcttctccgccgacaggtgcaacataactccatggttctcgccaagcgaggtcaattaattgaacgcggttcaatatgtgataatttatctcatctataacacattgcagcttgaaacaacacataaattctcgttagctgtctaataaacatcagatgctaggcccctttaaggaaatggcaggacatctactatatttgtggtaaaacacattgacgattactaattgactggacacaaaggatctaaatattcacttttattaactggagatagtacctaaagaagctactttctatcacatcttagagatgagctattgttactatacattatt

SEQ ID NO: 2907 - DNA, 430 bp, Zea mays
  unsure (1)..(430): unsure at all n locations
agctntacgacatcacttgccacgtcattatattttacgatgaaaatattcgtcacaaatgcattcccatgtcagatgtcacctcctaatttatgatgaaatttttgtcataagaatttttccacgttatctgccacatggtttgccatgtgatcaaatctatgacaaatgttttcgtcataaaggttttgccacatcacataccacgtcatcaccattagccatgtggcaatgcatgacactacgaattgtgacgtttttagaggcacttatgacgaaatagctcgtcatagatttagtgacgaatatgctatgcgtcataaaatctatgacggntttttgatgatcgtcattgtagtctatttaacacgcaccttctgtgacgccgacatttttgtcacaatgacgtcaccaatatataacttgtgac

SEQ ID NO: 2908 - DNA, 408 bp, Zea mays
tgcaagcttgagaaggggacaaccgtagcatgcacaataccctcttctaagaataccaagcttttcaagaagggcatgagcaaaatccatggtaagaaaattaatgatcatactatttgctctaacaatgtgcctatgtgcttccacaaagaaagatcaaagagaagcgattgaaggtgctatggatgcaatgagaagggtcatgaaattggttcatgcccccacatgaagaacaaagaccttgcacaatcaagaaagatgatcatcaagaaagatgaacgcaaaaggcaaatgcattgctaggacaagcaccgcatttgctacaattgccgtaaaaaaggtcatctattcaacgtttgtgcaaatggtaaaactcctaagcctaacttgtcatacattcaaatatgc

SEQ ID NO: 2909 - DNA, 138 bp, Zea mays
acttgcgcattgtggattcgcctttttgccgcttcttgttgcgaccgagtcacttgggaactcacgtgcaccaccttagatgtgctcgtcaccggatgggcgactcacgcgccttgtgcggcttgcccgattgcggcc

SEQ ID NO: 2910 - DNA, 420 bp, Zea mays
agctctatcaaatggacgtgaatagtgccttcctcaatggaccaatcaaggaagaggtctatgttgagcaacctctcggctttgaagatagtgagtaccctaaccatgtctataaactctctaaggcgctttatgggctcaagtaagccccaagagcatggtatgaatgcctaagagattttcttatcgctaatggcttcaaggttggaaaagcctatcctactctctttactaaaacaattgcaaatgatttgtttgtatgccaaatttatgttgatgatatcatatttgggtctactaacaaatctacttgtgaagagtttagtaggattatggttcaaaaattcgagatgtctatgatgggggatctgaagtatttcttacgatttcaagtgaggcactcccagaaggcaccttcat

SEQ ID NO: 2911 - DNA, 306 bp, Zea mays
ctaggtcacatgggaacgccccttcttggtagtatctttgtcttaacccggttcttaccagctgaaggatatgaacggcaacgacatacccaggtcttggaatgtggatgagcttccgcgatattatgtgtaattgatgtaattttcttatttctcctatggcacccttttcctttcacgaggggggaaaggtttttaatggggccataggttgtaatcttcaatctttcttggttaaccctatgtaatacaagggccaaatttccccacatgtaaaatgtaacaccaggaaccgcaccatatgga

SEQ ID NO: 2912 - DNA, 440 bp, Zea mays
  unsure (1)..(440): unsure at all n locations
agctnttaaaaggagaacatgtgataggtttatccaatgttcatttctaanaagatagaccttgtgcagcttgtcaagcagggaaacaagtgggaggctctcatcacaccaaaaatgtgatgacaacatcaagacccctggagctgctacatatggacctcttcggacccgtcgcctatctgagcataggaggaagtaagtatgatctagttattgttgatgacttttcccgcttcacttgggtgttctttttgcaggataagtctgaaacccaagggaccctcaagcgcttcctaaggagagctcaaaatgagtttgagctcaaggtgaagaagataaggagcgacaacgggtccgaattcaagaaccttcaagtggaagagttccttgaggaggaggggatcaagcacgagttttccgctctctacacacctcagcaa

SEQ ID NO: 2913 - DNA, 394 bp, Zea mays
catctatctgtagatttctactacatagttccctgaagaaggtccccagctctgcaattgcttcatatacatccttcctcaccagtcctctaaggccagcggctatgattctctgtacgagtatgtggcaagaatgtgttttcacttctccaaccacctttgaaccatcttcacttatgtatcttgctaggttatccgcaaatccatcaggaaacttgatacctttgaggaacttgcaaaactcgactttctgatccttccccaacacatatggagcaggtggagccctgcacgccgagttgccatcttgttgcaagtgcagttcaggtcttatgcccatatcatacaaatctagccttgcattatgtgtgtccttggactctgctggtatact

SEQ ID NO: 2914 - DNA, 436 bp, Zea mays
  unsure (1)..(436): unsure at all n locations
agctttattacatacatgtgaattaacttgtttttntctttgattntatataactgaaaatagtcctaactattcaatggcacctacaaaactcttcttccactgacacaaacaaaagcaagcaacacaatagcgagacatgaacaacaactgctgtggataactcctttaacccaatggcatatcacctccaccgcccaccttgctggagaatcccggcagcaacaagttttcctttttacctgcacagagtaaaatgtatgtttttagctgaagtggaattacccatattcattatgactcaccctgctatacacactgtattgaataatataatctttttgtaccaaaaaagccaccaagtatcgtgcagggcatcattaaggaatattacctatggaatacagattatatggtacctatgcaaatttcgtgt

SEQ ID NO: 2915 - DNA, 464 bp, Zea mays
ttaccctggtttcagatgtacgccaacttctcaatcctttggtttgatgcatttccattacattaatcgtgggtttttttctttctcctaacattacagatgaaaggtccaaagttgatgatcacaactgaaagttttatcttagggtgccagatgatattgatgtatcaattaagcttcaaaactggctatttgcacttgaaggaactgaagtaggagattattcttctcatggatgtgatcatattagtagagaagaaaaatgttggcattcaaccttcaagagtctacatgtctctggcaagagcagtgcgcgacttaagttgggggcggatgacaggctgtcccaagaacgcatttccagtggaacgctctatggtacaacatacatgattgcatattgctgcatttagcctggattcttccttttgtgttcacttttgcacgcacattgtacgttttat

SEQ ID NO: 2916 - DNA, 420 bp, Zea mays
agcttgtaacctctactacgagcaccctgtttctggataatacaaggctcattcccctcttgggttccatctcgcaccaacccatctgggcagggacacgcagcgacaaatttactagtcggtccagggaccccccgggtccgaaacgccgacagttggcgtgccaagtaagggcctgctgcgtgttaacgaacactttcccgttgagtcctatatgggtagacttcagcaacctcttcagcccgggacggtgctccacttcgggagtctcgagttcatgtccctcgacggcagctacgacatggtactcctcccctcgcagcatgacaacaacgatagtctgctcgcccggcgacggcgaattctacgacggcatctccccacggtggaagaggaacacccgggtcgtcctcgccaccc

SEQ ID NO: 2917 - DNA, 370 bp, Zea mays
  unsure (1)..(370): unsure at all n locations
tgctgctgtcccaagcaagactgtagcccagtgcaataaaaaggtcgcaccaatgagataatctgtcggagcaagaaaactggggaatacactgaggcattacctcactcgcagtacattttgcaaggaagatggcgacgtgatatacatcgactttacgatctttgctggggggtactgcttggcgaggataattctgctatggaactgtaacgactcatttattgtgccaggccacaacggttgttgtactgcggctagccgcaggataatgtcattgaacctcatntactgggcgatgactgacgataggaacctgagcaccggntcgcctgggtccttttcgcctggcccttcaggtcgtcatgga

SEQ ID NO: 2918 - DNA, 433 bp, Zea mays
  unsure (1)..(433): unsure at all n locations
agcttaacaacagggttaatagcctcatgttttttgcaagatataagttcattntcaacaagaagattgtcatgatcaaatctaatttgagtatagtcttccttgatcttaactagtctattttgcaactccctattagcttcatttaatttgtcatacttctccttagcatcttttagggagtttgtgagctcatttacagctgatgacataggtttattttcttcttttatttcatcactagcctttataactatgtcatacttggcatttaaagattcattttcattcttcaacctatcacatttagcttttgactttctaatgaattgagtatattctttaagtaagtcagctaacttatcatatgaaggtgaagcanattcttcatcactatcactatcactatcatcatcaatattaatatcatttc

SEQ ID NO: 2919 - DNA, 415 bp, Zea mays
  unsure (1)..(415): unsure at all n locations
agctngccttcgcttcagactatcatccgctgtccaactgtgtcgtggttcgcgccaatgggaaaatcttcacagctgtcaagaaaacgctcctcgatgaaaaaaaaggcagatggaccgatttattacctgaggcggtctgggcgctaaacacaactgagtgcatggcgactgggttcactcctttccgccttttatacggatcggaggccatgaccccgcaagaaataaagcatgggtccccgcgtacagtttcgtcagccgtccccgacgtggacgagccaacttcaaaagatcttattgatggagaccgggtcttctccctacaggtgctaaacaaataccaagcccagaccaaagcatggcgcgaccacgcagtcgtcccgagagagttcagcgaaggggacctcgtact

SEQ ID NO: 2920 - DNA, 292 bp, Zea mays
actcactaacaaacatctatgggggacaaccccccccctttatttgttttcctcactggacgcccctggagccaaagcacaacaaatttggcgcttcttcacctaataacaacacagggataaaccctgagcatggaattactcaacaagtcttaccccactaaggaaaacactcttaagggtctgctggataaatatgactcaccgacgacgcttttagcaaaaactcaactatacttctgcagaagtaccttactaaagtgagtccttactttcaatcttttaatgccat

SEQ ID NO: 2921 - DNA, 409 bp, Zea mays
cccggatcttagaggaccgcggctgcagctcgacagggcagagatcttcttgtattgccatccatagcccctgaagagagctgataatatcgatcccaagcatttgcatcattcttttacactgatcaggtaaccaacattttgtatatccaagccactaaacctgaccgaacaatgtacagtcaaatattgcgtatagcatatataacaatcgttgtacatgatacataattcttgtgtatccatgcatctgaatgcttattccacaagtatgttacggtgagttgcctgagttgagcatctctcgttgagccaggccaagatatccccacggacacgctcgatgttctcgttcggttccccaaatagcaaagagtggagcatcccgtcgcatatactgataatatta

SEQ ID NO: 2922 - DNA, 412 bp, Zea mays
  unsure (1)..(412): unsure at all n locations
cccctgttaatcttatcaattacgaacgtgcccagctcagcntctatcaaacatctacctaacttatatgctgacgtctctaacacgtcacttaaatgctactgaatcatcacttcttctaaagacaggtacacctatatccgtaacaagacagttgtacccattacatataattgctaaactgaaagcctgctataacctaaagaatctacaacaaaaacatgtgatatggaatggccacgtgatatatcaattttacccaaaccttagaccagaccttgatccacatccccgaatgtgatagctcgatgcggatcctgtgtcttttcataagaggagaacatcttcttctccctgtcatatggcttgtgcacccgctgataatgatccaacttgagcccacccgatgcat

SEQ ID NO: 2923 - DNA, 374 bp, Zea mays
agcttcgccagaaccggacccttaggacttatcagcttgataggcagagattcagtcattatctttgaaaggtctgccacttccgcagcaggaggtgtcgagggagtctcctcttctacctcggccaccttcggctctagagttgcagctttttctttacttcaaagctgccacttttggctcaggggtggattttctcttctttaaaatcttctcatcctccttcaccattctggcagcttgtctactcagaacgctaacaatgcttttcctttttgccccttcggcacccttgatgagctgctcataatcagggtattcaaattttagagcatccattacctggtttaaccttccttttggtcgggtgctga

SEQ ID NO: 2924 - DNA, 424 bp, Zea mays
  unsure (1)..(424): unsure at all n locations
agcttgaccgtcgagtcctctaagctcgtaatagatcggcgnctattcgcgacgcgcaacgaatataaattggcataagcaaacatatatttgaataataacattataccatacaagataaaatattataaaagcgagcaatataaaatagagagcgcttctacggttacgtgaggaaaagaaccgcgatagtcgaagctacgatcgaagggttagcatgtttacactaagcaagtattaattagaatatttaattcgacgtaattatattaattgacatttatgaaatataaattaaaactacttagtttttactaacttattgttttaattatggataattaaataaataacttattaactgacatgagtgattattagcgaacggtttaatctcgcgcgcggataacttgcgatacgtgct

SEQ ID NO: 2925 - DNA, 299 bp, Zea mays
gcatgccacgcggggaagcaacgtggagtccatcatccacacaagaacatcatgacgaccgacaggccgcttgagctactccacatggatctattccgcccgattgcttacataagcatcggcgggagtaagcattgtcttgttattgcggatgattattctcgcttcacttgggtattcttttacaggaaaaatctcaaacccaataaaccttacagggattcgtgagacgggctcaaaatgagttcggcttaccgatcaagacaataacaagcgaccacgggacggagttcaagaac

SEQ ID NO: 2926 - DNA, 432 bp, Zea mays
gcttctcctgtacggaataatctacggtttttctgactgtcgaattagtatagttgtagatgaaccttcggcacctgtatagcatattatctacagcatactaaatagttcaattattagtgtggagcaaatcaaccaccaaaattatttaggaaaaggtttgagcctatttccctttcaatgttcaattgcgatcagagctaggcacttcatcttgagtctaacaactcgaagtgatggctcgtataagatcccataagaacaagaagacatcttccaaggaaaacacggaggtaactcttgaaatattactttccgattgttctaattatgattcatggtctactagagatataaatgcctttataaccgtagatccacaattagaacaaattttagacaagagtattatccctcctaactatgataggg

SEQ ID NO: 2927 - DNA, 400 bp, Zea mays
  unsure (1)..(400): unsure at all n locations
agcttgagctatataccttgatctangttgttggnagggggatctgacctagacaagggtggatctggctggaggaacgactggattaaccagcggcgtcaccctctcgctttttcaccaggcggctacatgcaggacgtggtgcagcaagctcccctctagccctctctcacatgtggtggnggcacccctccctccctctgtatcaagtggcggggggtgcgtctacctccctctgtcatcaagcagctgttggtggtgtggcacctaacctagtggctcccctactcanatggactattgcgtcngctgggctggtgattggcaacctgctggacggctgcagctctaacgacattgtgccgcggctcactcaaaaaaggcactccatatgtctctt

SEQ ID NO: 2928 - DNA, 262 bp, Zea mays
caagaacatcatgactaccgacacgccgtttgagctactccacatggatctgatcggtcagattggttacataatcatcggccggagcaactattgtcttgtaatagtggacgattattctcgcctcacttgggtactttttttgcagtgataaatgttaaacccaagagaccttacacggattcttgagacgggctcaaaatgagttccgcttaaggattaacaaaataagaagcgacaccgggacggagtccaagaactc

SEQ ID NO: 2929 - DNA, 356 bp, Zea mays
gattatatggatttcagtgtgtggctaatgttgaatcaaactatggtatgccttggaatggtttgtggaagtgaatataacaaggaaatgtttcttatgaccaatcgaaggtgaagagtaaccgatatcttgggtgttgaaagaccatggttgtggtggataaaagagtagttgcagtcatcactaagaatgttatatcaacttatattatgaagacaatcaaatctttggcaggtcatttgatgaaagtgacttggtgtatttggatgtattcaaatacgtggaattggaccaagttacatgctcaatatggttatgcccaagcaacaaacacaattgacatgttggcagtggcg

SEQ ID NO: 2930 - DNA, 397 bp, Zea mays
  unsure (1)..(397): unsure at all n locations
ctcagcttacaagcagatcgctcattaaactttatactttttcgttctgggggggccctcgcnctccgaaggtccttaaaaacatgatttgacaatgttttccaagtgaattatatgaacaggtattctcggatttacaattatggatatggagcacgaccaggaccaaggctgagtcatacgaaggtcggtggcagccgaaactgtgcgcaaggaagctttcgcgcgatggcagaaaggggaaccgacttaaagatgaaaagacttcgggggcctcgacagatttccataagccgttagcaaatgtaatgggcatgggtgtaaatttacgtgggctgcgtcccgcgtttataaatagatgaacagtactcctgtactgttcacgcggaccttttat

SEQ ID NO: 2931 - DNA, 440 bp, Zea mays
agcttcccttttatcccaaaacgcgatacacccttcattggtgaaaccttcaggtaaacatagtcccctttaagaaaatacaagggcattcgccgtttgtctgcataactcttctgacgagcttgggctttcttcatattatgaattattttctgaaccttttcttcggtctctttcaccatatcaggcctgaagaagtatctttcactaggttcagaccaatttagcgaagtacgacatcgtcgtccatataaagcttcgaaaggtgccatcttgatactttcttgatagctattattatatgaaaactccgctaaaggcaagcattcatgccatttttgcgagaagtccagaacacatccccgcagcatatcttcaagtatttgattaaccctctcagtctgcccacttgtttgtggattatatgccgaactgtggag

SEQ ID NO: 2932 - DNA, 383 bp, Zea mays
  unsure (1)..(383): unsure at all n locations
catttgcttcggtagcctaattacaggatactttgcggctttccgggacgcaaaactgcagcaaccgaattttcatgaagcccatcttttctggcctttggctgataatgcaattcatgaacttgacagaaactgtcacgcaaacggctccactcgtttggcttcggagggcccaaatataaacgctaagcctaaccatagcgttaggagttaactgatgaaggtagatgccaaacctcttcaatatctccgcaacaatctcgtgaacagggaatcctagcccagcctttaacaaagctttgaagatgacaacctcgtgcttctctggcttcggggtgtgctnttctcccccgaagcgaagtacctcctttcgatctttactt

SEQ ID NO: 2933 - DNA, 430 bp, Zea mays
agcttagtcgacaggatagaagcaaaggactactttgctctcagcatgtatgaattctaaatgtataggtttaagggcacgattgtaaattcactaaagttgtactttgtgcctataaatagatgaacagtgccatgtgttggaggaggattttttggtcgaggaaggttccacctctctccatatgaagttgtaatttccctcttcttctagctttgtaaatttacgaaggctatggtacttgaacaaatccttgtctaataataaaaattttggaacgcataatgatatgacttctcttacgtttaaccatgtgttttctcatcgtacaatatcattttgtttatattttttctaagaaccttcgtcctctagctattacttcgaagaagtaactaccttgtggacgaaggttcaaacttcttaactt

SEQ ID NO: 2934 - DNA, 428 bp, Zea mays
actcaagcttctaaaggacagcacacctcacgacaacacatgtccatttgaaatacagcattgcacccatgctcagcagggaagcaagctggcgttcatcattcacacaaaaacatcatgaccactgatatgccactggagctcctacacatggacctattcggcccgatagcttacataaacatccgcaggacgtaagactgtcttaccattgtggacgattattctcgcctcagctggcatgtctttctgccggaaacaacccatacctaagaaaccttatagggattcttgataccggctcaaaatgagtttggcttaaggatcaacacaataagaagcgacaaccggacggagctaagaactctcaaattgaacgcttccttgaggaggagggcctcaagcatgagttctcttttccctacact

SEQ ID NO: 2935 - DNA, 442 bp, Zea mays
agctaggcggcgagacccgccgtgatgctgttgtgccatcatcggcgcacgcaaagcggcccaacgaggcaccaaactccagttcgttcaatcctaaacgattcagaggcgacctcgaactgatctagggtgttcttaccgggaatcaagaagtagccgaggccaaccacgatcagcatcggacaccgagctccagcgtggaattccggtgccgccccaaatccttcttctaatccgattcttctgccaccactgtagagacccgctaaagcttctccaatcgataccgagttcaaccacagcgactaaagtggaaatcgtcagcgacgatacgatcccgcctccctctatctctgtgtaacaccctataagtttaatcctgattgtgggataaaaaaaatatatatttctataagatgccccttaagaataattaaacttt

SEQ ID NO: 2936 - DNA, 403 bp, Zea mays
  unsure (1)..(403): unsure at all n locations
cattctttaatcttctaaccataccttcttttaataccttcttgagtgtgctcatcccaacatgtgcaagcctcctatgcccaagccatccacgacaagctttggtgaagaggcaagtccttaagtctgcatcttctgaagcgaaatccactaagtaaaggctgttgtatctaaaaccctcgaataccattgattcatcatccattcttgttancatacactctgatggggtgaataagcattgacactcaagatcacacagctgtgccactgataataaattgaagctcaaaggtgcaactaagagaacattcgatattgataagttatttgagaatgccacatcgcccagtccttgtacctttcctcttgagttgcctccaatgtgagtctacctcgccat

SEQ ID NO: 2937 - DNA, 429 bp, Zea mays
agcttcgtattttggtacccaattttaattgagtcctttaagattagtagtaagagccttgggtacccacacattccttattgtggcctttctctttgtgtaggcatccacatatacttgacaaccatcttactatggttccaagttaatatgtaaactcacagataagagcaagagttaagaatacgagccttttctccttttcttgatacatcattgtgttgccttcttgatgatgaacctaacttgaccttgggtgcacctaccttatcaaggttagttgcacaagcattcatatcataaagacaagttatgcatggaatttacaacttagtgatccaattcaatgtgaagcatatggatacccattgaagtacatttctaagatatcaaaatatgggtttgcaaaattatggatcactaattgtc

SEQ ID NO: 2938 - DNA, 430 bp, Zea mays
agcttgtgacataacaaagactctattctactattttcaaaatctctcaagaggtagctgatccatttatcgctttggcctttattttctccccctttggcatcaagcaccaaaacgggatcaatcttggccttttaaccccattgcctcaccaaagtcttcaattaagagcaaatggcaataagatttcatgagatgaacttggaattagttaccctctcatcggagtgcagtggaagtctttcatggtccaagaccaccttttccctttcaatcctccttcgagactaaatcaagcaaactcaagcaaatggttagtctcaaagggtcaagttgtaacatatctccccctaaacatgtgcatcactttgcaacggacttgtgaggtccagggagtgttggtacaacttgagcaccacaataagcaaca

SEQ ID NO: 2939 - DNA, 419 bp, Zea mays
  unsure (1)..(419): unsure at all n locations
agctggctnttgacatccattcatccgctgtgctgtttgccacaggtaggtgaactgaagatattagttgcggagggcatgatcaaatacatcggcctgtccgaggcgtcggcgtcgacgatcaagatagcgcacgcaagtcacccaatctccgctgtccagctggagtggtcgctctggtcaagggatgttgaagctgacataatcccgacctgcaggtcttgtctttccatggccatagccatagctgtatctacagtacaatgttcatctacttacttacatatgtgctctggcaaatcttatggagcttggcattgggatagtagcctacagtccactgggcagagggatcttgtcgagtggtcctacgatggtcgacaagttgttcgatcaagatttacgcaagggttaacata

SEQ ID NO: 2940 - DNA, 365 bp, Zea mays
  unsure (1)..(365): unsure at all n locations
tattatctttcccttaatgagaaactgacgttggtcccttttttatgactcgctctncctgagtattcaactgattctttcgatacagtagatgaataacttgtgcatcacactgacgcttncacaagtagctgtcgagtaatactgtagtccgtatcggcggtttagaagcaacgccgagcgattgaaggtcgacgtcgtcattctagaaataatgtcgagctttttaacacgacatcagcgttctatagacaacgcccagtgaattgaagtcgtcgtcggcactttaaaagtgatgccgagcgatcgaatacgagatcagcgttttagacgcaacgctcagtgactggaggtcgacctccgca

SEQ ID NO: 2941 - DNA, 434 bp, Zea mays
agcttgttgcaatccaaaatatattaagtttatgtgttcactttgctcatgaacaaactcatatgctaccactagtttcaatcaacgaaaataaccaattgtggtagaacatgaatttaaatctttcatttaatatgcatgatactattaagtatgtactatatgcactaaccacatactagtaggggatgatatgatcatgcacatcacaatgatacctttgctatgttggagtagaggatagtcaagattcttttgattagctctccaatagcaatgtgaagtccaatttaatagcttggtgaagaccaattatcaataagaaatccattcttcaccagtatgaagtcgagaacccatttaagatcaagtgcacaatttgaatggtgtagttcacatgcatctgttccttcaataccacttgtatgtgagag

SEQ ID NO: 2942 - DNA, 420 bp, Zea mays
tttagctctgaagcttcggctttgacaacagttttttattgtttccgaagatgtctgaagctgctaagaacgctgttgctgaaatgaagctgagtcttgatgaagagaagaacttagggtctcttatagcaatgtcgaagaccaacacagaaaagatcaccagcgaaattctggaagggctgtctgaagatactggtgacagtgaaagctatgatgtggacagcggtggcgaagactccgaagatcgctcctggcgaccaagccattcactttatggtaaatcaactatcaaagagaatcatcttgttaatatgagaggaagggatttccgggatctgtccattgtgagggcggacgaacgggaaaagacttgtccatcacctcgagaaaatgaacgtgtggtgtaccgaagctttttga

SEQ ID NO: 2943 - DNA, 327 bp, Zea mays
  unsure (1)..(327): unsure at all n locations
agcttntaacacttaaaatcttacttcttattcttttgttggntcctgaaatatgcatgaggtacttgcacttagggtagtattcacaactcaaatcactcatgaaaaccccttatgccaggccaaaatgcaaatttcaccattggcctatttctctaaaaatatctaccataggcaaaatattttgaaattatataaatatataagggggccaatacctgtcccaacaagagtatttttcctgattataaattggaattgggtttggttgggacctaaatagaaaaattcaaaaaattccaaattttccctttgtctgggttcacc

SEQ ID NO: 2944 - DNA, 343 bp, Zea mays
atgcacaaaatctccccctttgacatcaaacaccacaaccatattcaagcaagaacatatgatgatgtcaagggacagcacagtattaagcagggaaaatgcaacacactaacattactcccccttacacattaaacatatgcaacacaagcattggagaaaaattaaggtacaaatacgcaaaaaggtcaatacctccttttgtacctttaccatgttatggtgtactttgcatctaagtaggcggagttccttttgtcatcaattcaagatttccatcttgaaaggtttatctctagggagctccttcacacttgtgcctgatcctttatcctgacctttt

SEQ ID NO: 2945 - DNA, 396 bp, Zea mays
  unsure (1)..(396): unsure at all n locations
accctgacaacaagagatgttctcacatctccaatcttcgctataaacaggggatatatcaaggattgctctttcaagaagctcgaccgaacgtgcttttagtgtttccaaaaatacttncgaaggcataggtacgccctgcgctgccgacttggccaatagatcagcatattcattttccccacgaggaatatctttgacagagaaacctctaaaggaagcctcaatccttcggactctatctagatatttttcaagcttcgggtctctcgctttgtaactcttgtcaacatgaccagaaataacttgcgaatcagctctaagaatggcccttctatctccattgcctttaacttccgaagactcaagagcagagcttcgtactcagcaatatta

SEQ ID NO: 2946 - DNA, 385 bp, Zea mays
acaccggagcaagagggaaaagaagaagcattacaagaaggccaagggcgaggcacatattggaaaagagtgggattcggattgctcctcctccgactccgacaatgaagaactcgccgccactgccttcaacaagtcatccctcttccccaatgagcgtcacacatgccttatggcaagggagaagaaagtaagtaatcaaaacaatgtcacttatgattcttccagtgatgatgagtctagtgatgatgaaatacattactctagtttgttcaaaggattggatagaactaaagtagataaaattaatgaattgattgatgccttgaatgacaaagatagactcttagaaaaacaagacgaccttttgtatgaagagcatgac

SEQ ID NO: 2947 - DNA, 442 bp, Zea mays
tatacaacactcaagctttcagagagttctgtgaacaaactggcaccaagatccattttgtatctgtttggcatccggagcccaatggacttgccgaaagagttaatggcattataatgacaggaataatgacattaatccttaaccagcccagcgggaagtggccagaccaattaatcaaagtggtgtggagtcacaacacaacaatgtcaaggtcaacaggttttacatcattcaaattgttgtttggtgacgaagcaataaccccagaacacgctaaaacaggatcaataagaacagtggcttctgcagaggacgaacctgattattctgtggcaaaagatgctatagaagggatcaggcttcacgctgtggagaatatcaataaatatcaagccgaacaaatacaatggcatgacagacaggttcggtttaaaaatat

SEQ ID NO: 2948 - DNA, 308 bp, Zea mays
aaactagctgaacaactaccacatctatctggctacattactttgctatggggctcaattagaaactgaaagcggcaggctgacactgattagtcgaccacgagtcacacacatgtcaaccacgttcgtgacacacactgaaggaggaggcgagcaagccatgattgagctggtgaaaataggagctggtgagaacgcacaaacgacaacactcagatctattctactgaacccctgtactcgcattacgttacaggagtaacggtgaattctcaccacaccacaagacacgactgcggtgagagcgc

SEQ ID NO: 2949 - DNA, 414 bp, Zea mays
ctttctccagggacttcatttttctttcaatgagactactacatgaaatagacttagaaaaggtattattctccaagtcttagattataaagtaaccttcccctgaaagtgtgcataccagatttgaatacttgtaagagacatgcactttgatttgatatcaagaggggcaaattatttataattcgagcttttgggcctattagttaaatgataccaattgtaggatatgagtttctgaagcattagtgtcatttacttaaggatgttaaataagctatgtgtcgtgcttaattaaacattttaaacatgtacgtttgctcaagattatgaattgaaaacaagcaatcctaccatgtgatttacctagtatgtatgcattgttaatcttcaataagtaccaaatgaaatact

SEQ ID NO: 2950 - DNA, 423 bp, Zea mays
  unsure (1)..(423): unsure at all n locations
agcttgtgaagagtattggggtctttgctgttgactccctcgatcatcagtntgagcagagttatgaattgacctaacgtgcctcgtgtgaaatcttcctccgaaacccctggtcatttcagagaacctgaatgcttcctcccttctttggcggaagtcattgtcagctcgaatgtattcatccatcttctggagcagtttctccaatgtttgcggtggcttcctagcaaaatactgcgctgaaggccccggctgaagccctttaatcatggcctcaatgacaatttcattgggcactgttggcgcttgtgccctcagacgcagaaaccttcggacgtacgcctggaggtattcttcatggtcctgggtacactaaaataaagcgtgagcagtgactggcttcgtctgaaacccttggaagct

SEQ ID NO: 2951 - DNA, 434 bp, Zea mays
agctttaatgcaaaatttctccccctttgttataaatctccaaaaaggatacaaagaatataaagggtagaaattatgattaatcaagatttgaacacactatcatgaaaagggtccttatatggcacaaaggtaatggagaagtgtcataagtgatgtacctttgtgttttaccttttcaaaggggtgttccacacttgtgttgtatttagagttcattttgcaatctcttgttggcataattttgacataggtccaagatatcaaatgaatattgtcatactaattgaaagataaatcttgatacctggagtctagatgtcacctagcattttcttatcataacaagaggcagcatgaaaattgcacaagtatgaattatacaactagtgatcatgtaagaaaaatatcaattgaaaaccaccaattgatac

SEQ ID NO: 2952 - DNA, 373 bp, Zea mays
cgcctatctaagcggtcatggagcagtaacgagaaacttgaacttattcatgcttggagacttggaggaatctctggaggattgatgacgatttggcgtatggctcactaaacgaggacatgacctatctttgggtttatgcaaacaaactacctgcattctaccagcacacaagcacgaaaacaaacccaagttgcactatcggtcaaactaagaagaatcacatgccacataaacacatgtctaaaggacataacaaaaaaaactaaaaattttcttataggacagcaatgcttcgcacatttttccaacatttattattacaataaagatgagaaaagcatgtttgttccgcatcacccattattacaat

SEQ ID NO: 2953 - DNA, 401 bp, Zea mays
  unsure (1)..(401): unsure at all n locations
atgcaagctntatcacacccttcggcacgtactgtttcttntgaatgccacaacgactcaaaaacgtcgggtcaaccttttctcgccataccaagagggatctcaaaagtcaagctacgccgcaacatttccacctacgtagatgacattgtcgctgccagcaaaaacaaagaggatcacctcggcgaccttgcagaaacatttcccaatatgcgcgatgcatgacttcggctcaaccctgagaagtgtgtcttcagaatccgccaggggaagaaacttggttacctggtgtcacatcgagggatcgacgccaacccaactaaaaaccaagtgatcatcaacatcgcaccccccgcagtccaccaaagatggccaacgactgacaggcagaatggcccgcc

SEQ ID NO: 2954 - DNA, 462 bp, Zea mays
tgtgaaggctcttcatccccacatgtgctaagtggcgattctacagccagcccatgctagccttagcacttaagcatgcatatagactggcctcatcttctgcaaaatcaactaaataaagtccgccatctaatacacccttaaaagctaatgaaccatcactttttctaaagacagacacatctacattcgtgaatagacaattatatcccatattacataattgacttacggataaccaattatatccaagagactctactaacaatacattggaaatagagtgctcatttgagattgcaatctctgcctaaacctttaccttgccttggttccatcaccgaatataattgagtcttggggatccttgttcttgacgtacgaagagaacatcttcttctcctccgcatgtggttctgcatccgctgttataatccagcttgactcccggatgctaaacct

SEQ ID NO: 2955 - DNA, 425 bp, Zea mays
  unsure (1)..(425): unsure at all n locations
atacagtntcatgcttggtatactgccaccgtggagcacatgctcaactcttttgcctcggctcatcaagtgcaccaagaaactgtcaatttggtgaacatgtcggctttcagatgctctaattggtgtgtaaattctgcgaccattgctagctcgagggagctgtggatcgtcgagcctatccagaccgttgagggccgatgttaaggaagaagggcgatgggttacccggtgaccattcgcttttctgtcactctccagctgaatggctctgattcacgtcctgcccccctaacacatggtccatatgagctgcaccttaccgttgtgaagcggcttcttcgataccttcgaggtaatcttgactacaaccttcttcttcgacattcctcgctgaccgagcttgtcgtctacaccgtacaatt

SEQ ID NO: 2956 - DNA, 95 bp, Zea mays
ccctccatactttaaaaaccacattcatttttcacaacgcctcggaacccctttataccaccaagcgcaatgggagactataccagcctagcctc

SEQ ID NO: 2957 - DNA, 375 bp, Zea mays
  unsure (1)..(375): unsure at all n locations
agcttctaaagggagaacacattntgggttttacatatgttcttgagaaagacagggtttgtagtgcatgtcaagcagggaagcaagtangttcccatcatccacataagaacatcatgacgaccgacatgccacttgagctactccacatggatttattcggcccaatcgcttacataagcatcggcgggagtaagtactgacttgtaattgtggaagattattctcgcttcacttgggtattctttttgcaggaaaaatctcaaacccaagagaccttatagggattcttgagacgggctcaaaatgagttcgaattaaggatcaagaaaataagaagcgagaatgggatggagttcaagaactcacaaatag

SEQ ID NO: 2958 - DNA, 202 bp, Zea mays
acaggggaaaaggggctcaacgattaagttttggctgtggaaactcaacagaatcaactgaaatatgatcattaaactgagcccttcaaggttttgtaaaattctgagaaaaagaccctgttatccagacacacaggctgctactcgagttttgaacaaacccttggactttgaaacaggccaatttctgtataccaataaa

SEQ ID NO: 2959 - DNA, 246 bp, Zea mays
ggcaatggtcggcggaaatgagctctcccgagctcacgggaaatggttggccggcgatggtgattgcggggcaaacagaggtgcgcccggcgaggctttatacgcgcgggcgggcaacgacgaaggcgtgggcgctcggcggacttgaccagaccccggcgtgagcgcgctccccggttgtgcgagaccttgcgtgccgaccatgcgtcaacacgtgctgccgtgagctctgacaagctatggcgc

SEQ ID NO: 2960 - DNA, 400 bp, Zea mays
agcttaatatgttgtgtaattttcactgacatccgggaaaatggcggccgagggatggcccatgaaataatgaagaagagcgaaatagacattcatgacgcccgagaagcaacaaaaggagctgaaaaagctgcggaactcgaaagatggatatgtattatttaatgacttttaagtttgctgtttatttttatgacttcgtattaatttatgtcttctaccgcagctgaactatctccccccagagcccttcaatccactaaccgaccctgaaacagagaagacaacagagattatcaatatggccgaagctattgtggatgaagttgttaccaagctgctaaaccgaagctgctgaaaaagctctgaaggacgaagaagagctattgtaaaacatttt

SEQ ID NO: 2961 - DNA, 279 bp, Zea mays
ctttagttgcccaaatgtgggccacttcctttagtatctttggcgggcacactaatgaaaaccattggtttaccatccctcttcggcatagggaaaggttactactctaacgctcattctatttaccctaacaaaaagatatatcggcttgaaaccgcgatggatttccatcccctagaattatatttgtttctttatatataccaaacaggttaacttgtaccattcggtttatttctaaaaaaatgtatgacacttacattactattttctttcccc

SEQ ID NO: 2962 - DNA, 341 bp, Zea mays
agcttagtgcaagcgtgtggaatggaaagtatactaagctaaggcgtatgtatggctcgagcgaacggcaatgtggaacggagggaaaacaggaggaggcgcgcggtgaccggcggcacggctgttcggccttgcgtctgggctgaaaacgaagtgttcgccatggcgcacgggccgacaactgaggctcgggcaccaactcgaaaataagctgagctcaagcatgtggaaagacacccaacatacaaagtatgtctctggcgaatggcacagtggaacggagggaaaacgacacgcacgcactctgcgacaggcgcgatggatgctcggccttgcggatg

SEQ ID NO: 2963 - DNA, 434 bp, Zea mays
  unsure (1)..(434): unsure at all n locations
agcttactcccnctgngaagggtcgttcattatcttcaatattntgaagcccgggacatacaagctggccaacgatcaaggtgaggtctaccgcaacgcttggaacatcgaacaactacgtcacttttatccttaaagtgtttcaagtcattcatgtatctcattttctttacatgcataaataaagtctaaccatcaaggaaggatcagctttgcctcgacaaagccctaccctccctcgggggctagaaggggggaaccccctctgcgtcaaaattntcatcagaaaagttttctaccaaaatgactttcgtgcttttcgactcatatcgataacagaatcctaaaaatgtcgagaggaaccttaaacggcaaggtcgaccgagccgagggactnctacgcctncgggatacggatacctcactcatcacct

SEQ ID NO: 2964 - DNA, 442 bp, Zea mays
  unsure (1)..(442): unsure at all n locations
gcttgagaacctaaacgagtgatttgcgtgtttactgaccaagatgancaagaaaaagtgtgaggaattgaggatctaaacgaccgatttgcgagtttagtgaccgggatgacacaaccgaacaagtttgaggactgctagttgactttacactttctatacaaaaaactcggccggtaggggaaagaccgtccccacagtatattaaggatgcgtttggctttggcttttgccccctaaaaaccaaaagccaaaccaaagggctggaaccaggaagcagtttttttaaaaagccgactttctcacagtgcaaaactgaaagcacttctggacccacttttagtggcttttggatgaaacttgtcggcgtttcgaccccggggggtccctggaccgacgagtaaattgtcgccgcgtgccccagcccagatgggtcggcgcg

SEQ ID NO: 2965 - DNA, 343 bp, Zea mays
ggaattggagtcttcggcgaagacaaaggcttccactccgtaactcatacttcgccaccactccgagcaactctttcttctttgggggagaaacgagcatcaaggaaaacgacttcatccttgggggagagagtaaaagctcaaacgcaaaaggacttcgtctttggtataatcttaactcacttatttatgaccaaaggggaagattgcacttcgagggctctaatgattccgtttttggcgattcatgccaaaaagggggagaaatgacccaaagcaaaggaccgcacaccaccaccaattcataacttagtgcttccaaagtcttatcatttgcgatcta

SEQ ID NO: 2966 - DNA, 448 bp, Zea mays
ctaagtcacctgcggcatgcaagcttgaagccatggtaagtagcataggtcttattatatacgaattgactcaagcctagctacgggtgcataggtttcaccaaaatccaaaccttcgacttgggagtatcccttggccacaagtcgggctttgttccttgtcaccacaccatgctcgtcttgcttgttgcggaagacccacttggttcctacaacattttggttaggacgtggaactaaatgtcatacctcgttcctagtgaagatgttgagctcctcttgcatcgccatcacccaatccgaatcttgaagtgcttcctctaccctgtgtggctcaataaaggaaacaaaggagtaatgctcacaaaaatgtgcaacacgagatttagtggttacccccttatgaatgtcgccgaggatggtatcgacggggtgatctcgttggatt

SEQ ID NO: 2967 - DNA, 349 bp, Zea mays
agcttctatgtatatatatttcgtgattattacatagacccacccttacgatctatggttctaagttgatcttggtcttgcaggcgggaattgcataacactggtgttcacactgaggtgagcggtacgggtgctgaatcccgactggagcgggggaaccaccattcagataacgacgtttcgcgcgctcagaccgcagatgtgcgatcttaacacgagccctactcagctcgtctaatgcatggtccaactccgtgtttagcacggcggctaagttgactgtgctgctcaaactaggattgtcctcaccgacaggtgagacaattacgcctcctgtgctgtcatatga

SEQ ID NO: 2968 - DNA, 387 bp, Zea mays
tgaggcatgcaagcttctgcatggcctcatctttcttgacatagaaccattctgagttccagcctgccggccatttgcttcggtagctgattacaggaaactttgcggttttccggtaggcaaaattgtagcaaccgaagttttcatgaagcccatcttttctggcctttgtttgataatgcaattcatgaactcgacagaaactgtcagcaaaaggctccactgcttggcttcggagggcccaaatataaacgctaagcctaacgatagcgttaggagttaactgatgaaggtagatgccaaacctcttcaatatctccgcaacaatctcgtgaacagggaatcttagcccagcctttaagaagcttttgaagatgacaacctcgt

SEQ ID NO: 2969 - DNA, 432 bp, Zea mays
agctttctaaagctctctatgggcttaagttatctccacgtgcttggtatgaaaggcttacggatttcttgctttccaaagactttaaaattgggaaggttgacactactctattcactaaaagaattggcaaagacttatttgtttgtcaaatttatgttgatgatattatttttggatctactaatgaattattttgtgaggaatttggaaaaaggatgtcaaaagaatttgaaatgtctatgataggagaattgagcttctttctttgtcttcaaatcaaacaattgaaagatggaatttttataagtcaatcaaaatatttgaaggacatgctcaagaagtttggcttagaaaatgcaaagcctatcaagacttttatagcaataaatggtcatctagacttagatgaaggaggtactatggttgatc

SEQ ID NO: 2970 - DNA, 446 bp, Zea mays
ggacctataaaactcagcttccgtctcttgctctgtaactttgcccatatgaccataaattatctgggacatcactctaaggatgacccttctgattcccattgcctctaatttccgaagactcaaaagcagagcttcatactcggcgatgttatttgtgcaactaaaatcacagtttgccgcataacaaggtataactttggaaggtgaaaccaacacagcagccgctcccgctccgaaggttccccaagacccatcgcaaaacactggccatgcttcggcgtctttatttgtttcttcctcctgagcccctggcgtccacgtcgcaatgaagtctgctaacccctgcgactgaatcgaagatctatgaacatattcaatacaaaattcactgagctctgcagccattttccatccttccagtacttctgggtcctataatatcc

SEQ ID NO: 2971 - DNA, 353 bp, Zea mays
aatataccaattgactcgagcctaactacgggtgcataggtttcaccaaaatccaaaccttcgacttgggagtatcccttggccacaagtcgagctttgttccttgtcaccacaccatgctcatcttgcttggtgcggaagacccaattggttcctacaacattctgattatgacgtggaactaaatgccatacctcattcctagtgaagttgttgagctcctcttgcatccccaccacccaatccgaatattgaagtgctttctctaccctgtgtggctcaatagaggaaacacaagagtaatgctcacaaaaatgtgcaacacgagatctagtggttacccccttatggat

SEQ ID NO: 2972 - DNA, 428 bp, Zea mays
ctcagcttcgtccctttctttccgccttcattctttattatttgcctcgagccagggtattcaaaacccaaggcgtccaccactcgattcagtcttcgcttcggacgggtaccgaaggccgcagtcatcaactgatcttcttctttggagtaattaccgagcatttcattgcacattatttcaattgtgtccagccactcttggcaacgtggtttaaagtctttcttaaactcgtaatagcaaggtaaacgcacaagttccccttctttcttcttcccctctagcttcggcattttccattcttttaaagtacgaaaaaccctgaaggccaagaactcttgaaccaggtctcttgtgcagatatgctctgaaataatgttaaactcagccagtgcagccccaagtgggaccttctaatgacatttggc

SEQ ID NO: 2973 - DNA, 375 bp, Zea mays
acttctaacccgcggcccatttgcttcaggagctgattacaggaaactttgtggtttttcgatatgcgaagttatagcaaccaacattgtcgtgctatccatcctttctagccttcatctgataaagcagctagtgaaccccgcaaaagctgtgcacgaaaggctccactgcttggcttccgagcgcccagatataaacactaatcctaacgatagcgttaggggtcagctggtgaaaatagataccggatctcttcaggacctctgtaataataccatgaagggggaatcttaatccagcctttagaaagcttttgaaaataacaaattcatccttctgcggctttggggtagactgttcttccccgagcgtat

SEQ ID NO: 2974 - DNA, 386 bp, Zea mays
cttcggctgatcaaccgaagcccatgctgctgtgtgaggatatagcagagcagaaggtgctattgggctcccaattatctgaagatcaagagaaaaccttgataaggtttttattcaacaataaagatgtttttgcatggtcagccaatgatctttgtggagtgaatcgggatgttattgaacattcgctcaatgttgacccatccttcagaccccgcaagcagaggcttcggaaaatgtctgatgacaaggccgaaggggctcgcaacgaagtaaaaagactcctaagtgcaggagttatcagagaagtgaagtatccagaatggctagctaacactgttatggtgaagaaggccaatggaaagtggagaatgtgtattgatttc

SEQ ID NO: 2975 - DNA, 400 bp, Zea mays
catacgctaataatattcgatttgactcaagcctagctacgggtgcataggcttcacccgaaatcaaaccttcgacttgggagtatcccttggccacaagatcagctttgttccttgtcaacacaccatgctcgttttgcttgttgcggaagacccatttggttactacaacattttgggtatgacctggaactaaatgccatatctcattccttgtgaagatgttgaactcctcttgcatcgccacacccaatacgaatttgaagtgcttctctaccctgtgtggttaatagacgaaacaaacgataatgttcacaaaatgaccacaccagaacagtagtacccccttggatgctccgagatgggtcaacgggggatccctcgaatgcttgcgactctg

SEQ ID NO: 2976 - DNA, 427 bp, Zea mays
  unsure (1)..(427): unsure at all n locations
agctttaagctctttgacaattaaatcactttatctagtttcaacaaggatgcattaaagcatgaatgaatttttgagaagttaaactagatatgaagcagggataatacatggacatgctttctcttccttttatacaagatatgcaaagaatgtatagaaaaggaagatttacgtacaagtttaaatgaaaggagatagttntacctttatgtacctttacatagggacgctctcttcattgtgcttgtccttagtcttagatgcttaagaccaattcttaatgacaatatatggaaatattntgcacaagagagagttctacaactagtaatcttttcaagttcttgttagcatatatcaaatggatcataagttgcataaatgtatcatgaattattcttttaacttagtgcatatcaagata

SEQ ID NO: 2977 - DNA, 437 bp, Zea mays
tctaaagggagaacacattctgcgactaacaaatgtttattttgagaaagacaggatttgtagcgcatgtcaagcagggaagcaacgtggtgttcatcatccacacaagaacatcatgacgaccgacaggccgcttgagctactccacatggacctgttcggcccgatagcttacataagcatcggcggaagtaagtattgtcttgtaattgtggatgactattctcgcttcacttgggtgttctttttgcaggaaaaatctcaaacccaatagaccttaaagggattcttaagacaggcttaaaacgagttcggcttaagaatcaagaaaataagaagcgacaacgggaccgagttcaagaactcacaaatagaatgtcttcttgacgaagagggcatcaagcatgaattctctttccctacacacacaacacaat

SEQ ID NO: 2978 - DNA, 186 bp, Zea mays
tgcaagcttgtcgaggggatctcgacagtttccatcttggaaatgtactacaatccgagcgagcgatctctgtgaatgggacgcccccgtcgtcatcgtgaaagctctccgtgggtttgacttgcgtacagagggcgatgggctctgcgcgcgccaatggccggtggcgtgtatataaattacaca

SEQ ID NO: 2979 - DNA, 456 bp, Zea mays
  unsure (1)..(456): unsure at all n locations
tgagaaggggacaaccgtagcatgcacaanaccccttctatataataccaagctttccaagaagggcatgagcaaaatctatggtgagaaaattaatgctcatatgatttgctctaacaatgtacctatgtgcttcgacaaagaaagatcaaagagaagcgataggaggtgctatggatgcaaggagaagggccatgaaattgattcatgcccccacatgaagaatcaagaccttgcacgatcaagaaagatgaccatcaaaaaggatgaaagcaaaaggcaaatgcattgcaaggacaagcatcacatttgctacaactgccgtgaaaaaggtcatatattcaaggtttgtccaaagggtaaaactcctaagcctaacttgtcaatacattcaaatatgcttangagacccaaatttgactcttgtgctagaaaggtgatgagttcaccacattc

SEQ ID NO: 2980 - DNA, 302 bp, Zea mays
ccagcctgccgggcgattgcttcggtagctaattacaagaaacttgcggtttttcggtcgcaaaattgtgcaacccgaagtttcatgaagcccatctttctgcctttgttgataatgcaattcatgaactcaacagaactgtcagcaaaggttcactgcttggctttggaggggccacatataaacgctcaaccttacgatagcgttaggagttaactgatgaaagtagatgcccaacctctttaatatctccgcaacaatctcgtgaacaggggattttactcaacctttaaaagcttttg

SEQ ID NO: 2981 - DNA, 376 bp, Zea mays
atgcagcttcgtgaaaacattctacgaagctatacttttaagatgtaaactttttttcttgtgacttaacacgattttcactctttcaaagcatactctccgagatcaatattgtgtccccttcttgtgccatatgcaacatgatgtatgatgcttatgctatgcaaaatgatgtgatgatgttatgttacttagatgacatttggtccgaaagatacccacatattcccacacaatatatttgtatcagcgctgattcttcgctgtaagctctgcattcccttaagaacgaccttctagcttcttcaccttttacttagtcggtataagctctgcattcccttatgaacgtctttggagcttcttcgccttttac

SEQ ID NO: 2982 - DNA, 485 bp, Zea mays
  unsure (1)..(485): unsure at all n locations
tgtgaagattcttcatcccaacatgggctagttggcgatgtttatccaacccatattagtcttagcaattaagcaagtatcgagtcagctttgttgaaatcaaccaagtatagctgaccctctaatactcccttaaatgctactgaatcgtcacttcttctaaagacagtaacacctacatctgtaaatagacagttgcagcccattttgcataattgagaaacagaaagcaagttgtaatctaaagaatctacaaggaaaacattagaaatagaatggtcagatgatatagcaattntaccaagtcctttgaccaaaccttgatttccatccccgaatgtgatagctctttggggatcttcgttnttctcgtaggaggagaacatacttttctcccctgtcatgtggtttgtgcactcgctatcaattatccaacttgagcccccggatgcataaacctgcaaaacaatttaagccttgttctt

SEQ ID NO: 2983 - DNA, 371 bp, Zea mays
  unsure (1)..(371): unsure at all n locations
agcttcggcatggcccactctttcatagttggaaacactttgaaagccaaaaattcttgcactaagtccctagtgctgatgtgctccgcaataactctaaattcagccagagcaatttgggttggaacctctggtgtcatgttgcacgggggtctaatctctccgaagatcaactctaacggactttgaaccagctttttcttatcttcgtcaactttgacataaaaccattcagacttccaaccagctggccacttgctacggtaactgatcactggaaattntgtagtcttgcggtaggcaaaattgtagcagccaaagttttcattgtacccatctcatctagccttggtctggtaatgaagctcatg

SEQ ID NO: 2984 - DNA, 471 bp, Zea mays
  unsure (1)..(471): unsure at all n locations
tctaaaatgaccacctcgtcagcttcaggcagggggacattattctcccctccagccctcacaatagaaatgtcacggaagtaccttcccctcattgcatcaatttgtccatgcttgattgttgacttcctaaagacaacatggcttggtctccagggccgatctttggcatccacattctcactttctgcatcaaagtcttcactatcactgcaaactctcagatatcccagctagtgtctcatgtgcaatcttttctgcattggttctttccatagcttcgtaaaactcggacatcgacgggtcgacagtcttcttctcgtcagccatcaaatcaaaccttgttgaaatgtcgaagcttaaaatctgatcaaaactcgacaaagcaagaaagtttaaaatggcaagcatagtgtaagcaactganatggcacaagaaatgctttcaatacgagcttctattatatgcct

SEQ ID NO: 2985 - DNA, 344 bp, Zea mays
gctttagcgttggtctaggcatcttcatatgagattgctagtatatgaatgttcctttgccctcggaggagttgttgcatgtttcttgcctatgtttgaccttcgaagacgattatgactatgttaatagttgtcgtcttcatacatatgttagaatgacctatgattgcttcgaacatgttgatacttcctctgctaaaaatggggtgttaaggggagtgcatttttactacatcaaaggctatttgcttaatccctgcattatccatggtctcaaatgatacatgccacgttatcatacttatattgtgaattctcaccccccagtcatattgaaggctgtg

SEQ ID NO: 2986 - DNA, 462 bp, Zea mays
  unsure (1)..(462): unsure at all n locations
tgaagctgatatcagcggctacctacgacaacatatcattgtgtttntgttttactccaacttcaaggtgaagatctgttgtctgaattactcctatttttgtgatgaaacaaggttttctgatgtcggcttatctctacagagtatgctgctaagtaaggcgctgagaatgcaacaagacctctaagacaagaagactgaaatcataatcgagggcttggaaagcaaaattaaagattactaagccactcttgagaagaatgatttcctgcttcaagcgatggagggtttcctcgtagagcttcataatgaaaatgccagattaaactaggagcttctgcaggctcaagaaacttttaaaaaaattcataatgcttcatgcatgagatacaagaactgcaagcaaaatgcaaagtcgaagctaataatagtacgaagctgctggagtctttgaaagagctt

SEQ ID NO: 2987 - DNA, 421 bp, Zea mays
  unsure (1)..(421): unsure at all n locations
tcggcgatggtcaacaagtttggcagcaaaacagtgcatttatcattgaatgttgtgcgaacttgacacctacccgtctgtttatatagtactgcaggctagaaggctaagcgccaggatttttacaccaggcggacacccgctcgcactcgctgcgtggtggaccgcagagaccaaatagtaactctgcgaggtgggaccgctacgcgctggacaactgaatcgtttctcgactgcgagctcanggaaggtgatttttggaccttcggctccccgaagcttaagagactttttttttcacggatcaagctcgttacgaagaacgatctagcgccgcgaaaggtgctactgttgggtctatgcttcttcgccgaaggtcttctatgaagaagcggctctccgctgaagctgcttgtatgag

SEQ ID NO: 2988 - DNA, 242 bp, Zea mays
  unsure (1)..(242): unsure at all n locations
gcttcngccccatctatgttatggattgcttttgaatctatctagnttccttccgcctttctggcagcttcctgacttccatgaatagcaataggcccttgatccgaaggtttcttcatgccaagatatgatgggtgaagaattgcttcaaaagcattgagtgtcccacgaccaatgattgcattgtgggggtacttcatgtcgacaatatctaacacaactttcttaatccctgtattttt

SEQ ID NO: 2989 - DNA, 390 bp, Zea mays
  unsure (1)..(390): unsure at all n locations
tcggactcctccctgtagtcacgttgttgttgggaatgttgacgcccttctggctgctagcttcnggaataggtaagctgcagtggtggtggcggtgggagctgatgccaacaagcttgtgaatggcttgccgaagcaacagaagctacaggttggttgcccacatattctggtatgtaaggagagtggcacgaagcagtgtgtaaaacctgcttcggctgattctgccgagcttctgcttcggcaatctctttttgcttcagaatagttatttggcacgttcttgtagtgtggcccttgtcctcaccacaaaataagcaatagattatcctgggttgatccccatatcttcctccgaagcttctgccgcctctgccccttggagctagt

SEQ ID NO: 2990 - DNA, 460 bp, Zea mays
  unsure (1)..(460): unsure at all n locations
agcttccacacgctcgccccagtggtcggcttaacatgtctgaatggctctctggtaagtcgctccaacgtctttgaggccaaaccacatggaggtatagcagaaagccctgaacggggtgatgaatgttgttttttcctcgtcttcttttgcccagctgatctgatgatacccggaatagcaatctaagaaagacaacacagaacacacggcggtcgagtctaccacctggtctattctagaaagtccgaagggatccttcggacagtgtttgttgagatccatgtagtcgacgcacatgcgccaatccactttattctntttgagtacaagaacaggaattgctagccacttcggatgtaacacttctctaatgaatcctgccgcaaccaagtgagccagctccgcacggatggcttctcccttgtcgagcgtgaaacgacgtatattttgtcggatc

SEQ ID NO: 2991 - DNA, 455 bp, Zea mays
  unsure (1)..(455): unsure at all n locations
tacgtgacactatgatactaagcttaatggtcaatccacggcgtgatgacgtggcaggatcacctgactgtccggtgtgcaccagactgtcctgtgcgccatcgaacagacagcccatccaacggtcaagtttggtggctcntncancactcataaactagctaattttcttactatttataaattaagtatacacatcaatttcttactgaaataatattcttatttcatcaatttaatactaaccacaaaactcatgaaaataatttctgcatagtattttaaaatatttataaactactataaacattaattatttactcataattccatcaaaaattttattatttctatcataattctccactaaatataaatctattttcatatattggattttaaagctattaaaattaaaacttatttattatactttaaatattattcatttctat

SEQ ID NO: 2992 - DNA, 328 bp, Zea mays
  unsure (1)..(328): unsure at all n locations
caagcacgcgctcactaagttgtaataaatttaccttatcggggcatttggccattcagtttgaaaggtgctcctttatggtaattttgcctgtggctatnataaactatgatgatttagcacttgctgtttaaatggaaactacccgttcttaatattttggctctttgacatggatcccatgttacctttgaatttttacggtataagtatacatgataagagtttactcacccttatttggttttaggactaaatcatcacacatgcaatgaaatgagacaccaccatactatgagcattattcttaggtacacatgtaaatctt

SEQ ID NO: 2993 - DNA, 490 bp, Zea mays
tctaaagggagaacacgtgataggtttgactaacgcgctattctaataagatagaccttgtgcagcttgtcaagcaggtaaacaagtgggaggagcacatcacagcaagaatgtgatgaccacctcaagacctctggagatgatgcatatggacctcttcggacccgtcgcctatctgagcataggaggaagtaagtatggtctagttattgttgatgacttttcccgcttcacttgggtgttctttttgcaggataagtctgaaacccaagggatcctcaagcgctttctaaggagagctcaaaatgagtttgagctcaatgtgaagaagataagaagcgacaacgggtccgaattcaagaatcttcaagtggaggagttctttgaggaggaggggatcaagcacgagttctcctgttcctacacacctcatcaaaatggtgtattatagaagaagaacatgacactcattgatacggcaaggactatg

SEQ ID NO: 2994 - DNA, 290 bp, Zea mays
  unsure (1)..(290): unsure at all n locations
agcttctaaagggagaacatgtgttacgactaatcnatgtctatccagagaaagatagaccttgtgtagcgtgccaagcatggaagcactcatcaaagcaagaatgtaatgacatcatctagaccactggaactcctacacatggatctcttcgggtccgttgcctatctcaacatcgggggaaagtaatatggacttggtatagttgatgaatttttccgcttcacatgggggttcttattgcaggataatctgaactcaggaaccctaaactctcttaagagactcaa

SEQ ID NO: 2995 - DNA, 468 bp, Zea mays
gacctatgaaactcagctcgaattaactctatattagcctagtgcagccatcattccttcggtcgatcggagctcgaagtctatctttacaatgatggcagtacgctcttctattatgctttacaagatttcaattatagcttcgtgctatctagcctccagatcttgtagcatctgcagagctttgctcactagcatgctctgaacagaaacaacttatgttaagtaatatgttcattattaacggcgataacaaaccacagaaagaggttgtttaccttgtagttagaataaaacaagctgccgacgatatgaagtcgtccgtagcggctgatgtttgtctctagcttcgtgaaaccgatactcttcgatagataccgattaccttagcccagtctggtcttgaatacaacctagtacttcatcatctacactcccaaataggagggcacctgacttgtagccgaa

SEQ ID NO: 2996 - DNA, 128 bp, Zea mays
  unsure (1)..(128): unsure at all n locations
agcttgcactgcataagacctttacagtgggtttattccacattccggatcatctacatgtgttctgcacttttgaatagactggcattatcacatctcttgccctncatgttgccatatatgcatat

SEQ ID NO: 2997 - DNA, 430 bp, Zea mays
  unsure (1)..(430): unsure at all n locations
tgagtcaattcttctgcaaaagattattgatgtccttataagtgataagggtatgaaacatattcttgagaaaatagaagccgacaaagcgaattgtttcagaaaggatgatcaaggcatagtatggtttaataatcgcatagttgtgcctaatgatgcgggagtccaccagcaaattttggatgaagctcatcttagtcaatattccattcatcccgaaagcactaagatgtatcaagatttaaaacaacattattggtggacaaaaatgaagattaagattgcacgatatgtggcgagatgtgacagctgtagacgtgtcaaagccatagatatgaagactgctggtccactgcagtctttgcccatccccacttggaaatgggagggcattagcatggacttcattgtgggattacccangacaact

SEQ ID NO: 2998 - DNA, 384 bp, Zea mays
  unsure (1)..(384): unsure at all n locations
agcttcagcagaataactgccatagtcttcactctcaaattggcacgaatgtgctgacttatgtcnatgacatcatagtaaaaagcacaaagtaagaaaatcatgttgccgaattgcaagagacgtttgccaatttcaaacaagctggtctcaagttaaattcagaaaaatgtgtcttcggagtgaaaaagggcaagtttcttagttgcctggtatcaacaaaaggcatcgaagctaatctaagcaaaatcgaagctatccttcggatggagccaccaaattcaaagaagggggctcaacggttggcagaaaggctanncatcgtgaatagatttatatcaagatcagcagagacgaatctacctttctttgaatactaaaatc

SEQ ID NO: 2999 - DNA, 477 bp, Zea mays
  unsure (1)..(477): unsure at all n locations
nnttgcaccggactgtccggacttcacaccagatattctattgaccttttctccatagtgcctcctggaactagccgttagggctactgttcctggtgcaccggacagtctggtgccctcgcatggacagtccgcttggcaacacttgcttcgtttcttggatttcacttgatcttcataatgtcttcttttgaggtgttgctttcctcaatgccttggtccaagtaactttagcatcctgtgaactacaaacacaaccagtaacaaaacatattagtccataggttatgttgatcatcaaacaccaaaacttatttagccaaatggctcggagtccattttccttacactactctgagtaataatagtagtagtgatctgaataatagtgtatcaagtcttatagtctgagtaatagttagtcgtcgtaattacacttaccaactaggttttagtatagtctactgtgcagaatac

SEQ ID NO: 3000 - DNA, 324 bp, Zea mays
  unsure (1)..(324): unsure at all n locations
gcttctcctggacaagtgctgcacttaccgctgagtgcgaagctgccacatataataataaaggagcccctggcacgggtggagttaatgctgttagatctattaaatactgcttcaggtcttcaaaggccttctgctggattggtccccattgaaagacttcggctgacttcagcacttcgaagaatggtaagtttctctctgctgatctggatatgaatctattgagagatgccaaccttcctgtcaatctttgggccccctttntttgtagttggtggctccatccgaagtatagcttcaatcttacttggattggcttca

SEQ ID NO: 3001 - DNA, 478 bp, Zea mays
tctaaagggagaacatgtgatagatctaaccaatgttcatttctaaaaagatagaccttgtgcagcttgtcaagcagggaaacaggtgggaggagcgcatcacagcaagaatgtgatgaccacttcaagacccctggagctgctgcatatggacctcttcggacccgtcgcctatctgagcatatggggaagtaagtatggtctagttattgttgatgactattcccgcttcacttgagtgttctttttgcaggataagtctgaaacccaagggaccctcaagcgcttcctcaggagagctcaaaatgagtttgagctcaaggtgaagaagataaggagcgacaacgggtccgagttcaagaaccttcaagtggaggagttccttgaggaggaagggatcaagcacgagttcttcgctccctacacaccacagcaaaatggtgtggtagagaggaagaacaggacgctaatcgatatg

SEQ ID NO: 3002 - DNA, 402 bp, Zea mays
  unsure (1)..(402): unsure at all n locations
gctgtattctttttaaataaaatatattcttccaacacctgatactgttgtcaaccacaacaaattcctgagtaatgaatttaagctatcacaattatgacttgtgtagtggactttttatccctaattaaagccacaccaagaaacaaagttcattcctgaacccctgaccaaggtcaaatatacatgatacatgaagagaatgtgtgtggacgacatatacatgatataaaannaggggcttctttcgccggccatgtactggtttcaatatgtgctttatatgccctcacatnttctcacaaaggggctttacatgaattaaaccaattattatgtattacatcgcatactccacccagttggtttatatacaccacatctacacacattccaacaatg

SEQ ID NO: 3003 - DNA, 475 bp, Zea mays
tgtgaggggaacacatcttatgactaaccaatgttcatttttataaagacaggatttgtagcgcatgccaagccgggaagcaagttggcacccatcatccacacaagaacattatgacaagtgacaggccactagagctccttcacatggatttattcggcccgattgcttacataagcatcggcgggagtaagtactgtctagttattgtggatgattattctcgcttcacttgggtgctctttttgcacgagaaatcttatacccaagagaccttacagggattcttgagacgggctcataatgagttcggcttaaggatcaagaaaattagaagcgacaacgggacggagttcaagaactcttaaatatgaggcttccttgatgaggagggaatcaagcatgagttctcttctccatacaccccacaacaaaatggagtagtggagaggaagaatcgaactctattggacat

SEQ ID NO: 3004 - DNA, 400 bp, Zea mays
attagtcttagcaattaagcaattatcgagttctgatctatcgaaattaactaagtatagctgagcctctaacactcccttaaatgctactgaatcatcacttcttttaaagacagtaacacctacatcagtaaatagacagttgtagcccatattgcataattaaaaaactgaaagccaattgtaatctaaagaatctacaagaaaaacattggaaatagaatggtcacgtgatatatgcaatttaccaagtcctttgaccagaccttgatttccatccccgaatgtgatagctccttggggatcatcgggtttctcatatgaagagaacattcttttcttccaaccatgtgggttgtgcacccgctatcaatgatccaacttgagccccccgatgcat

SEQ ID NO: 3005 - DNA, 468 bp, Zea mays
cacgatacattggtccttgtcttattctggaaatattttgccagtggcataccgactccaactacccgaaacattgtctgctgtgcataatgtgttccacgtgtcacaattgaagaagtgtcttgagattcctgatcgaaccgctgaagtgacagatgttgtccttgaaccggacttgacatattctgagcaccctattcgagtcttggatcaaaaggacagggttacccggagaaaaactttcaagttttataagatacagtggaaccagcattctgaagatgaggctacatgggaaactcaagactttctataaaagaatttcccaggctttctagcctcatgtagatatgtaagcctgtataactgtgtaataaagaagtgacccccacatcacctctgtcttataccagaaataatgaagataaagatgtcgcgtttctttttcttactaccctacgactttta

SEQ ID NO: 3006 - DNA, 493 bp, Zea mays
  unsure (1)..(493): unsure at all n locations
tgtactcagttcgcctttagaaatgaaaatttcacgtggttttgtgcctcacccattgagctatccacgtagcaggcctggaaaccattaatcttcctagaataatgtgtacaactagcttgctgacccaggcctgaactagttccgttttcgactttagaatttgtgcaacagtgtttaagttcagctgtttgatcaacaacatggtgcgttttttaatgaaaccgtcacattgccgaacttatattggatacaacacggtacattcagctaacttgaaatgtatctaacatatcattagctgttgagaaaatatatggtaaaaaatagtttcaaattttccaccaggcatgctatatatagggaatgaaaatgggacttggtccagcacaatatagttnttctgtgtactctagtattcactccaatntaaatgctgtcactatgtcatcagttcttaattgtgttgtcactatgtntataattctccccg

SEQ ID NO: 3007 - DNA, 286 bp, Zea mays
agcatgcaagcttctgccttctggtgaaccaacaggtgtttgtgcgataactcatatgtgtccgcgcagaggaataaagtgatccatcttcttctcactcctcactcttttatttggttcgtggcatataatggattgatccatcaccccccattcctcataagctaatattagctatacctgagaggggtgatcccccaatgaggataacttgagctactataactaatgcttccacaccccttatgttacaggtgtaactgacaatatatacgaatttccttta

SEQ ID NO: 3008 - DNA, 468 bp, Zea mays
gaaactaagcttagatgggacatcttaaactggagcgtttattctattatatactgccatagggtatactcttgtcccaactgccaccatgtttaagagcacaagctcttaacatatcttatagtactcggttggatcgtctcggtctacccatcagtttggggatggtaggccaagatgaaattgaacttcgtgtccaagcactatgcgacttctgccaacaccaagaagtgaactgggatccctagtctgacgcaatcttcttaggtactccatgtaggcaaactatctgggccatatactattaacctaggtatggccccatgttgttagtccccatctgaatgaagcgagccacttttgttaatctgtccacaatcaccccattagagtcataccccgcagaagtgcggggtagaccaacatgaagtcctacaaatttctcccacttcactcggtaccttctcg

SEQ ID NO: 3009 - DNA, 139 bp, Zea mays
aacaagtgggaggagcacatcacagcaagaatgtgataaccacttcaagacctctggagctgttgcatatggacctcttcggacccgttgcctatctgagtataggaggaagtaagtatggtctagttatcgttgatga

SEQ ID NO: 3010 - DNA, 494 bp, Zea mays
  unsure (1)..(494): unsure at all n locations
ntttgaaggctgagctgcgatttaccttgacagctttttgtggatgtgctgaaaattntcgaagtctaccttcaccaacttacccccgaggcaatcataaggctgaacatcttcgtgtgggccgtgcgaagccaaggtctgaagcctgatgcaaaaagtttctgcaatatgcacgaactattatatgaaacaaagccttggggcaaagaacagtaccataataactttggctgctacagtttcgtttctcggtccggggcaagctgtcccgtaccaacctttctgaaaagatggcccggtgattggatgacagaatggttntatgtgaagaatgacctatcagcacgagaagacatcaaaggtataattatgcgtcctatntggcaaagcttcngccttcggaggccgaaggttgaaataaatgaagctgccgaagaatgccagagagccttctgcgttgtctgctcttttatatggacaagggacttagtaca

SEQ ID NO: 3011 - DNA, 315 bp, Zea mays
  unsure (1)..(315): unsure at all n locations
atttcttgtattgcatctagggcttgtctaacctagttgagataaccgccaacaaagcgagtgaaaaagcttaactcggatcaaacttgacaagtcttagttttaagcttttagcacttaaattcttactttttatgncaatgttggttcttgaaatatgcatgaggtactgcacttagggggagtattcaaaactcaaatcactcatgagaacccctagtgcaagccaaaatgcaaatttcaccatttgcctattttctctaaaaaatatctagcctatggcaaaatattttgaaaaatatgagaaaatatatg

SEQ ID NO: 3012 - DNA, 505 bp, Zea mays
  unsure (1)..(505): unsure at all n locations
ggaccttgaaactaagcttgggacagatcggacctatgacaattgacaagcgacactgcacacatgggcctaagaaaatgtaatacgctgaagttgtcaacaaaccgaccgaccataaaccgaaagtaaaatttccctgactttattgtggcaaaatgtggctatcaaccaaatgcacaggtcttcagataaagtgaaaataggtggacatatcttttagtcccaagttcccacacacatggtaactgatgtatacataagatttctacaacattatatcatcacggtcaggggtgcatggatggacggatggaggggcggagggggccaagcacatggtggcggctaaggttgaggtagcgcaagggagccgatcggngccttgcccacgaccgagcaagtggaaaggtcaaaaggattgtccttcttaattcttgcttgcctttaccaagttctgtgatctctatatntangcctncttcggaatgcagaattggtaaaacat

SEQ ID NO: 3013 - DNA, 392 bp, Zea mays
aagcactgggctgcaagctggaagatcttcattcaacatgtgctattcggcgatgccagagccagcccatgttagtcttagcaattaagcatgtgtcgagttcagctttatcaaaatctactaagtatagctgaccctctaacacacccttaaatgctattgaatcatcacttcttctaaagacagtgacacctatatcagtgaatagacagttgtagcccatttgacataattgagatacagaaagtaagttgttatcttaagaatcaacaagaaaaacattggaaatagaatggtcacgagatatatgcgatttacccaaacctttgaccaaaccttgatttccattcccgaatgtgatcgctctttggggatctttggttttctcatat

SEQ ID NO: 3014 - DNA, 455 bp, Zea mays
  unsure (1)..(455): unsure at all n locations
tgctcgtactcaagtcttattttaaactctactctatctatttacaaaacaatgttttgcgtgaccatatacacaatcagttagctatagtcttaagagcgaacccgtcgtcactcctgtatttcaggttcatcatacatgtttttgcattttattttttaaaacaaccgtagaagtggcccggaagcacaggccacgttcattttcataagtataggttgcaccttctgtgttgccagtttggtatggcttctgaagccgttttatgataaacaacataaaatcagttgacttcaactcttcacccaagaaacccttttaatgatgctctcattgaggacaagtgaaaggtgaaaccgaaagtagtggcttcgtctgatttcaccttacactgatcggctntgcatgaaattctataanggatatgttttaagaagactctatatacagttatg

SEQ ID NO: 3015 - DNA, 428 bp, Zea mays
agcttctccgctggcttgcgttcgaagcttttctccttttgcaaaagctatcaactttaactgactcctttattatctatgcatataggcgaagcttctttatatgatgtttcgatcaaaggctaacttcagccattgattcaagtgtacctaaaacataattgttcatgccgaactgaaggttaatgaggacctttggcaaagggaagcccccaacatgttcacaagctaagaccccaggatggtgtagctaaggatgcaaatgtttcgccagtcttgcaaaaaacagctggcatggattcaaggggacctagtttagccaggtctacccgcaattgaagggcatattgtgctacagaccgaaggactaacaggtatctggtcgatgatatcgaaaaccaatgccatgccacatcaccgagccctac

SEQ ID NO: 3016 - DNA, 468 bp, Zea mays
  unsure (1)..(468): unsure at all n locations
accttagatactcagctnttctttttgtacatgacgaaacataaaagaccgcttctttctcttgccgaagctantttctttttgtacataacggaacataaaagaccacttcttccttttgccgaagcaaccacttatgaacacaaatgctatgaatgaatgcttatgaatgcaaatgctatgatgtaatgtgcgaatgaatgtccaaagcatataaccgaagccacactcaaccattatttccttggaatcaaccacacatcagctctgcattcccttaggaacgactttggagcttcctcgtcttttacttagacggtataaactctgcattcccttaggaacgtctntggagtttcttcgccttttacttaagcggtataagctctgcattcccttatgaacgtctttggagcttcttcgtcttttacttagacggtataaactctgcattcccttaggaacgtc

SEQ ID NO: 3017 - DNA, 275 bp, Zea mays
  unsure (1)..(275): unsure at all n locations
agctntgccaaatagggcacataattatacccttaatatcttcttgggttttcaggtcattcttcacataaaaccattctgtcatccagtcgccgggccatctcttccgaaaggttggcacgggacagcttgacccagtccgagagccgaaactgtagcagccgaaattattgggatactgctccttaccccacggttcgtctcgtataaaattatgtatgtgcaaaacttttgcgtcagtcagacctgctttcgcgcccacaaatatatctata

SEQ ID NO: 3018 - DNA, 476 bp, Zea mays
  unsure (1)..(476): unsure at all n locations
ntggtaggcagaccagtgcaattcaagtggatgtatcctatataaagggcgttgaanaagctcanggcgtctgttcgcaacaaggctagagtcgaagggtgtattgcagaggcttttgcccttaaagagatatctcaattctcaaccaggtatttcgctcgagccaacaatgtgtttgctccttcagtgcgactacgtgtcgaaaatgaatcaccccaaagcacccttcaaatttttgcgaatccgggtaaagcaattggaaaagggagtgtacgtcacattgaaggatcagatttgaacacgctaatgctatatatgtatagcaatattgacagcacacaggaggcgttcgagtaagttttcctcatagttacttccattntctcatctcataatttctatagtgtgtaatctccatgtttctaatatgtccagcatgtttgatgaagaaatgtggaaatctactagtaaaccta

SEQ ID NO: 3019 - DNA, 294 bp, Zea mays
  unsure (1)..(294): unsure at all n locations
agcttctcaagcttaagcatntacttttcttttagagaccagcgtcttggagctaatgtatggtctgcccaaagaccgaccggtttaggtaaatatctaatgagttccccaacgggagaggttatctttggaggggaaactatgcgtttttgggaccttcctgctccgtggttagaacctctaacgggccccaacggtttggacttgaatatgttgaaaaaagacatccaaccttggcaagaacgacgttcaacagaatatatgacccatgctcctttangctctttaaattcc

SEQ ID NO: 3020 - DNA, 480 bp, Zea mays
  unsure (1)..(480): unsure at all n locations
taaaggatactattcaactaaagtaagaagaggttgatattatgccaaggtatgaaaacttcctatccttcagttgttttagtattctatccttagtgggatgtaccatagtatagattaaattcattgcgttataaaatgttcaatagtgcatataactttgacatcaactatatgtgtgcactaatttaaaggaatttagtctatccttttgggtttcaagaatgatggttcattttcatccacatataaggatcatcatttgtgaaaccttcccatgtgtttntaatgctctcctttctaagtgtttgaacaaggtccttccaagtgctttcaagatggattcaaaatctacggatataagagtcttagttatttcaatcattgagtttcaatgggtctcatatcatgtatgattgaaccatgccaagatgaatgaaagtcaagattgcctcgttggatgaaatcataaagagaaaa

SEQ ID NO: 3021 - DNA, 326 bp, Zea mays
tgcaagcttggaacatgtgaacatatagtcacttgtataagttgcacatgagcatatcatagcagactatttataagggagttagttgacgtcatctctagtagaactgtataataatggcaaatagttcttgctcaaataattgaaacacgtgtatttaaccaagtcatgtgttaaatcaaaaattattaactagggcgttctccaagaagagatgagatctgtatcaagacacagacatgaatattgtgcctcttgggaaggaatattgtgaagtattgtgacactgtattgaaagggatgcatcttgcttgtcttatggtatg

SEQ ID NO: 3022 - DNA, 496 bp, Zea mays
  unsure (1)..(496): unsure at all n locations
ntctaaagctctctatgggctcaagcaagctccacacgcttggtatgagaggcttagagatttcttgctttccaaagacttcaaaattgggaaggttgacactaccctattcactaagagaattggtaaagatttgtttgtttgtcaaatttatgttgacgatattattttttgatctactaatgagtcattttgcgaggagttcggcaaaatgatgtcaaaggaatttgaaatgtccatgattggagaattgagtttatttctcggtcttcaaataaaacaattgaaagatgggatctttgtgagccaatctaaatatttgaaagacatgctcaagaagtttggtctagaaaatgcanagccaatcaagactcctatggcaacaaatggtcatcttgacttagatgagggaggtacaattgttgaccaannagcttttcgttcaataattggtagtttactttatattaccgcatctaggcccgatgtcatgttt

SEQ ID NO: 3023 - DNA, 399 bp, Zea mays
agcttggtcattttattgctaactgtcctgttatatgaaagtgaccaggaaaagggaaacaagagggaaaagaacaagccttatatgaaggccaagggtgaggcgcatctaagcaaggagtgggactccgattgctcctcatccgacttcgacaatgaaggactcgccgccaccgccttcaacaaaataacccttcttcccaacgagcgtcacacatgccttattgcaagggagaagaagtatgtactccaactctactatgcttttcagtgagacaattagtgtacgataagagatattatgttgtcacgctaataatctaaaacaattatgatattgtcctgatgaaaaatcttaaaacaagattgtttaaactatattttagcaaatcttcttagt

SEQ ID NO: 3024 - DNA, 442 bp, Zea mays
tacgcgacctataaaactcagcttgctcaggccttcttctttttctccatagcaggaacctttctataacactaccccacttaaaatggatgagggtagaactcctgaatcttgaggatttgaactccttgaagtacctcataacaagggcgttacaaggccttcttctgttgttgctgcttgagcatgctgcggagaaatgactgacacagggttgattctgggagaaccttcttctcatcttctcttcactattttcttttcacttctcacttctcactgcttctttctttctctttgctcttcccactggaggattctatcaaagagtattaccatcatacagaggaggaaaccaaagactatgaaccatgtataacagtcttcaacccaagaatcaccaagcattgtgatcttatgggcgagggagtggaaactggag

SEQ ID NO: 3025 - DNA, 454 bp, Zea mays
  unsure (1)..(454): unsure at all n locations
tctctaagcacctgcggctgcagcttacactctaacatgatgatcttgttatgctctcattcatttcatacactttctaacctttatgttcataaaccctcaaaaacattgaagttaattattcttaatcatttgcaccagagtggaaaagatgtcatattatatgctatgttgagatctgaattgcctgtggctaaagggacaattgtttcaacttaaccaagcacaacagttggaggccagatccttggaatgcaatattgtgaagttattgtaacttgtgtgctaaaaccagatacaatcttgcctcaccctgngcccatgtggaaactatggctgatgcttacatgatgtcagctgcatggcccgataaaaaaataagtctatatcttatacttttttatggttagaaatatatgagccatcaacttaatgatgataaccctgatgcacc

SEQ ID NO: 3026 - DNA, 377 bp, Zea mays
  unsure (1)..(377): unsure at all n locations
agcttctaaagagagagcacattntaggacttacgaatgttcattttaagaaagacaggatttgtagcgcatgccaagcacggaagcaagttggagttccttattcacacaagaacatcatgacgactaataggccactcgagctcctacacatggatttattcggccccatcgcttacataagcatcggggggaagtagtactgtatagttattgtggatgattattctcgcttcacttgggtgttctttttgcaggaaaaatctcatactcaagagaccttaaaagggatcttgagacgggctcaaaatgagttcggcttaaggatcaaaaaaattagaagcgacaacgggacggagttcaagaactcacaaatc

SEQ ID NO: 3027 - DNA, 496 bp, Zea mays
  unsure (1)..(496): unsure at all n locations
ccctcgacgacgaagattgtcgtcagtctcccgctgacgccttgttccctcatgtacatcagcagaaatgttgcggcatatagagaaaaacgccttaaacccatggaccaagcgagcacccatccctcggccacgacctcgaccacgaccacgagcacgtggcatgggagatccgcgaccaggagagggacgcgaggcatcggcggtgcgagaggaagatggatgatggggaggctggggaggtggctcaacggaggaggcagggccttcagaccctgagggagcccgctntgtacgagcagctgggttggaggaatcaacccagtagggtacgtagcgggagtgtttgactggttnttcgaagtgggtctgggtgaccacttcgatcatcttcatgataaagggtgcatgaagacaccctctgagaggagaccaggaagcacggatgatctcttcccagatcatgtcaaacacattgatgcgagcgagactggtg

SEQ ID NO: 3028 - DNA, 314 bp, Zea mays
  unsure (1)..(314): unsure at all n locations
gagttgctacaatatgtattcttaacaagatgacccaaactaaggggttcgcttcatatttattatgaatggcaccatggttggagcttacctcatatcatacctatggtgcatatgttcattcgtctacctaacgtgctaacatgaatagtagtattttaaaaacatcatatgttnttgacaaatacgcattgtcatacaatatcatcataattattatgtggagaaatttatgatgatttgtcttatgatgattcctatattgcataaaaaatgtccaaacatgatgcctaagatgtatgataatttaatga

SEQ ID NO: 3029 - DNA, 482 bp, Zea mays
agcttcatgacagcggcgtctcgggtccctctggataaattgtttgtttaagttctgaaaaccttcaaaatgagttaaaaactaaaggaacatattttatgcaatcgctcatttggtgtaaatgtggccatcaaacaatctagatccaatgatctgctgttttaatatttctaccctcccatatcacccttcatctattattctccatgccctatattggaaggataaaaaatacaaaaatagtatatccttggatataaattggatgttctgaatgatatgatcgtacacttgcacgaaatagataattgtacatgttatgtccttagcaacgagacatgatggaactaactcgtggacatttgaaagcatacaagatcgatttatccattgacatgtatttgttacaccctatagatcatattgtacttgtgatagaaaacatgaggctactgaatacatagatcactagtgctgatatt

SEQ ID NO: 3030 - DNA, 250 bp, Zea mays
  unsure (1)..(250): unsure at all n locations
agtgacttgcagttcaaatgtgaatgatccgaagaaatttaattaaaagaactaaatctaatagctatagcaaataattntataattataccaaaatggtacatgtagatctacataatgtagcaacataccacacaaagtttggttggaaaaataaaaaatactttactgagtgtcacacgtaagacactcngcaaataagcttctttgtcgagcgccaaacccggctctcggcaaatataacggtcgt

SEQ ID NO: 3031 - DNA, 494 bp, Zea mays
  unsure (1)..(494): unsure at all n locations
tagtctcggccggaccaatactagaacagctcgcacgctctatgagtggagagatggcgggagtaacgtgtgcccacctggcaagtggctggatggtggggtaccctgctcttggatcgcgtgaacccgttctggtcttgagaaacccggtggcgagttgacatatgcaagggttaagtgctacatatgtcgtgtggttggagatccccatctgggtattaatcgattcggatcgctgaacctctcggatatgaagattggatcttcgaccctcatcttatataacaagtgaaactaaagttgataaaaggaagctagtgtacggcaaatgaatgctctanattagccaaatctagattcctgaaaagtacttaacttgtgaagtaaaatttccgcataaggatccactactagtaagcttttctgctaagattgagtctttgaactttggtaagctttaccttgatctcaacaaaccagcatactcttgggag

SEQ ID NO: 3032 - DNA, 397 bp, Zea mays
agtgagtgcagagtagtaatattatacaaaccaagggaggcacaaactcctcctgaagctataagcaaaagatcctaagtggaggaccgagtcctcccgcacttcagtcttgtttttcttcttttggaaccaccttggcacaaaagcagcaaaagtctgctacttcctcacctaaaaacaacgaagggataaaccctgagtatggaattactcagcaagtcttacccgactaaagaaaagactctcaagggtatgctggttatatgggagtcaagggtaggcttttcaatattcaaagactctgttttgcagaaatgcttactaaagtggatccttaaaaaaatccaattttatttgtcaagttaagtaaattacctacactagaggtctttctacc

SEQ ID NO: 3033 - DNA, 493 bp, Zea mays
  unsure (1)..(493): unsure at all n locations
ntaacgtcaaagctatcgttgtgacgaagattactttgctactcctaaaacaaaccaaaagacaactatgatttattggtttgaggaccttcgacacaggcacacccctaatattattcatattattttaggtgtaacagattttcttttaaactagaaacaatagaagtcttgaaacccacttcaactccggtagggaggtgaggtatgatagttgagggaggctcttgttcagttttggagtttgagtagaaaaatctagacttcaaggtaaaaaagagtttttttgttagaaaaaacatacaataaataacttatatcatgtatctacatctctttatatgagttaaggtgtttgatagaatcatggattaatatagatacatgagtatataaacaaggtctacacttttcactgngtgtgtntggttgagaagtgcagtangatggagcagctccattcatattttctgaatgtttgatttccaacaaa

SEQ ID NO: 3034 - DNA, 490 bp, Zea mays
  unsure (1)..(490): unsure at all n locations
tcgacccggatccttaagtcacctgcggcatgcagctnaccaaatggacgtgtagagtgcctttctcaatggaccaatcaaggaagaggtctatgttgagcaacctcccgactttgaagacagtaagtaccctaaccatgtctataagctctctaaggcgctttatgggctcaagcaagccccaagagcatggtatgaatgccttaaagatttccttattgctaatggcttcaaagtcggaaaggccgatcctacgctctttaccaaaacacttgagaatgatttgtttgtatgccaaatttatgttgatgatattatatttgggtctactaacgaatctacatgtgaagagtttagtaggatcatgacacaaaagttcgagatgtctatgatgggggagttgaagtacttcttgggatttcaagtgaagcaactccaagagggcaccttcattagccaaacgaagtatactcaagacattctaaacaag

SEQ ID NO: 3035 - DNA, 456 bp, Zea mays
  unsure (1)..(456): unsure at all n locations
taactgcttaagaatatcaganatggctaactcgtataatctatcacttcaaaatacactaacaaaatatacaaccaaagcaaaacatgataaatcctatatcttataaatggaccaaagacaaggatattttttccaacacagttgctacataattttctttgtaccctttcagctgctttttaatagataagctatggtgtagtgagctatgaacagtttgcaggctggaagtgtctttataaaaaaaaatagacttgctagtagggttattttcattattacttcaatagtctaatatcatcaaaacctgaaaggaaaaataacttaacaaataaagtttaacaaactgattcttaccttcaaatgcatcgtagaattctgcacctggtgtaccaacagaggttccaagaggtgaactangcttccgccattcaaaggtgtcactctcacaaa

SEQ ID NO: 3036 - DNA, 450 bp, Zea mays
agcttgtgtgatgggatcactatacaacaattaagattggaaagtttagtatataagtaaattgagcaaagacagtggtatatattaaaagcttgaaacacaacagtgctacttttctataagatacaatagaccaatgggcattggccaaccaaccaaacaatagggttcactaggtaaagcttcttcgtataagatccaaatctgattctgatattttatctcgacattgatttcataaagctcacatatattgcatcaatgtgtaactaaccctgcagtcatctatcctgctgaaaattagacagctaggctctgaagatgctcagttttctgacacatacctgcccattttcatcacaaatacttgtagaagcaagcataaagacgcccattcctgtcacagaagaccccattggagaggaatcaactgggtcgacaactcgacat

SEQ ID NO: 3037 - DNA, 475 bp, Zea mays
  unsure (1)..(475): unsure at all n locations
cgcattgaagcatgatcactttcccttggtcttagtcttgcttggctgtccattgcgactctgtagcaccgtcttgaatcttttgatgatgagggccatctcttcatcattaagaccggccgcttcaatttgcgccaccttgctaagtagtgcttccttgctccttgttgctttgagagcaagtgattgcggctcgttgatcggtccattcaaggcgtcgtccacataccttgcctccttgatcatcattcgcccgctgacgaatattcctaggacttcttcgggcgacattttggtgtacctgggattctcacgaatattattcaccaaatgatgatcaagaacggtaaaggacctgagcattagtcggacgacgtcgtggtccgtccatcgcgtgcttccgtagctccttattntgtngataagggtcttgagccggttgtatgtctgagttggctcctcgccccttatcatc

SEQ ID NO: 3038 - DNA, 215 bp, Zea mays
tgttttttctctactccctcgtgggatctaggaagaagagggaccaattaactgaagaaaacagccaagatgatttgtccgcttagatactttagcttatcaccaactttgtttcggccaccctttgttcatacccaatttataaaactatatgctatacttcggccacgctggaatgtattcaaactgcgatatagctgaaatggtctatgata

SEQ ID NO: 3039 - DNA, 472 bp, Zea mays
  unsure (1)..(472): unsure at all n locations
tataaaactcagcttctgaccttcttgtgttaaaaattactttacttttcaattggctcaagtcataattntaaattnttcatacccttttccttattttcttgaattttgctcatggggctcacttagggtttttattagggttgcacattcttacctttttaagagactcaattgttttgatcatgatacttttaagtatatgcttggtggattctttcttactcaagttaatttgatgctcatgcttactttggttcacatgaaataatggttcttggcttggcattttgagagaaaccctacgtgacactggggtgtcacagccttccncccttaaaggaatctcgtcccgagattcgggccagagtcctcccggggtgaagcgaanggtgagacttatatgaaatgggtgattattgttattattaaggtaaaactgctcttcgaatgtcattcttctttgcacttc

SEQ ID NO: 3040 - DNA, 239 bp, Zea mays
  unsure (1)..(239): unsure at all n locations
ggatcctaatcgactgcagctgcagcttaacaatatctacactctnntttggaattgcgcccgaagacttaattggctccaagacgtctattacatttaccatccttttccttcttggggtcactgatggccccttttggatatttgctggttcaatatttactgcacgactcaaaacttgtaatgttttttccttactcgggtctttcgcttcttccatttttctggggatgggtgct

SEQ ID NO: 3041 - DNA, 235 bp, Zea mays
agataatagcgcatgccatcatggatcaagttgggttcatcatcaaactaaacatctgacgactgaagggcttggagctctacactggacctatcccgcccgttgcttactaacatatgaggagaatgactgttagttattgggatgaacatcccctccattgggcttcttatagagaaaactcaacctcgaaacctagggatctacactgctagatgaatcgtaaagatcctat

SEQ ID NO: 3042 - DNA, 292 bp, Zea mays
tcttagccattaagcatgcatctagaccgacctcttcttttgcaaaatcaaccaaataaagtttgtcgtctagtacacccttaaaagctagtgaaccatcacatcttttaaagacagacacatctacatttgtaaatagacaattatatcccatattgcataattgactaaccgataacaaattatatccaagcgactcagcttaaaagacattagaaatagagtgctcggatgaaatagcaattttacctaacccttttaccttgccttggttcccatcaccgaatattat

SEQ ID NO: 3043 - DNA, 492 bp, Zea mays
  unsure (1)..(492): unsure at all n locations
ggatgttgcttttggctccccttgtggaagtcaatgccattcttaatgccagggcgtctcccattatacagcatactacgagcaaatttaaaattttcattctcaagctcatgctcggcaatttgcatttaatttagctatttgattattttgttctttaatcatggcaaagtgatcattcatagcatcaatgttaacatctctacatctagtgtaaatagtgacatgttcaacagtagatgtagaaatattgcaagcattcaattattcaatcttagcaattgaactagcattttcagttctaagacaagaaattgaatcactgcaaatatcaagctctttagacaaattntcacatttttctacttcaagtgcataatcattttttggcttaacaaatttttttatttttttaacgagcaagtcctcttgaattccaagatatcatccttctcgtaatggttctatntaatcgtaatctcatatttgatc

SEQ ID NO: 3044 - DNA, 440 bp, Zea mays
  unsure (1)..(440): unsure at all n locations
gcttctncagcattcttgagcccctcatgtattcgaatatagcaacaagntccactaggggttatgaagcttgttttgggctcatcttctttcttcatccaaatctgatgatagcctgagtaacagtccagcaggctcataagctccaaagtggttgctgcatctatgagggagtctatcttggcaagggaaattcatccttcggacatgccttattgagatctgtgaaatcgatgcacattctccactttccattggccttctttaccatcactgtgttggctaaccattctaggtatgtcacctctctgattactccaccactaaggagttgtttaacttcgtttcttgaacattcgtctttgtcatctgacatcttttgaagcttctgctttctcggtctgagggttgggtctacattgagagagtgctcgatgaca

SEQ ID NO: 3045 - DNA, 478 bp, Zea mays
  unsure (1)..(478): unsure at all n locations
tctaaagggagaacacgtgatacgtctaactaatgttctatttaaaaagatagaccttgtgcagcttgtcaagcaaggaaacaggtgggaggctctcatcacaccaaaaatgtgatgacgacatcaagacccttggagatgctgcatatggacctttttggacccgtcgcctatctgagcatatgaggaagtaagtatggtttagttattgttgatgacttttcccgcttcacttgggtgttctttttgcaggaaaagtccgaaacccaagggactctcaaacgcttccttagaagagctcanaatgagtttgagctcaaagtgaagaagataaggagcgacaacggatccgagttcaagaaccttcaagtggaggagttccttgaagaggaagggatcaagcacgagttctccgctccctacacaccacagcanaatggtgtggtagagagaaagaacaggacgctcatcgatatgg

SEQ ID NO: 3046 - DNA, 386 bp, Zea mays
  unsure (1)..(386): unsure at all n locations
atatcttctcgnactggcagatcattcttcacataaaaccattctgtcatccaatctccgggccatctcttccggaaggttggcacaaggcagcttgacccggaccgggaaaccaaactgtagcagccaaaattattgtgatactgttccttaccccaaggttttgtttcgtatgataattcgtgtatattgcaaaagctttttgcatcaggctgcagaccttggcttcttacggcccacacgaagatatntagctttatgatttgcttcggggtaagttggtgaagatagacttcgaagatttcagcacctccacgacgaagctgctcanaggaaatcgcaatccacctttcaaaaagcttcggtacaccacgacttcattttct

SEQ ID NO: 3047 - DNA, 491 bp, Zea mays
  unsure (1)..(491): unsure at all n locations
cgatcttgatgatctcttgngtgaggaaagggtgagagatttctctgtcccttggtggcctcaatggagacatatgtttctttttcaaatcgaactttgatagacgaattgtaatgtctttcttgtgtttttgtgattgcaatttgatttactcgttccctccctaattctcttgctattgataattttcatattcttgtattgctctaagtcttaatcttcatctcattcaaaagagcaattacatgcaagaagaaattctctcttcactccgattaacttgataattatcctatcttataaatngggatcaagtttgttttaagcgttaaatttcaggtttcggctattcaccccatctctaggtgactgccaccgctgctttgcaactgcgatgtcgacgcaacgacgatgtctgctcaacctangacgatgaatgacactgccgatgctactactcctgcgacagcattgtcgtctctaacattgcc

SEQ ID NO: 3048 - DNA, 474 bp, Zea mays
agcttgagaagaaccaaatccccaacctgatattgcttctcagatcgcaaccaatctgccttaagtttcatctgatttcgtgcagctgccagtttttctttcagcatatccacaaaatgagccctttcagtcaacatctgtgccacagtcacctgtgtctgaaggaaccataggggcagcagcaaagggaggatcgtatccgtacagcactttgaaagaagaacaagccaaagcagtgtgataagaagtgttgtaccaaaactctgctagtgaaagccaagccttccatttgtgaggttgagcgtgaactgcacagcgcaaatacatctctacacactggtcacccgctcgctctgtccatcggtctgtggatgatatgcggtactcaaattcagcttggtccccaacagcttgaacaactgggtccagaaggcactggtaaaaaatctgtcacggtcactaccaatagactta

SEQ ID NO: 3049 - DNA, 426 bp, Zea mays
  unsure (1)..(426): unsure at all n locations
tgagggtctcggcgtagatgatgttgaggcagctgcccttgttcatcangaccttggtgagcctgacatcgccgacaacggggtcgacgacgagcgggtatttccccgggctcggcacatggtcggggtggtcggcccggtcgaaagtgatgggcttgtcggaccagtctaggtagactggcgccgccaccttcaccgagcagacctcccggcgctcttgcttgcggtgccgagccgaggtattcgccgcatgccctccatagatcatgaagcagtcgcggacctcggggaacccccctgctgggtgatcttcgttcttgtcgtcgtcgtgggccccgccaccctcggcgggtggcccggccctgtggaaatgacgccgaagcataacgcactcctcgagggtgtgcttgacgggcccctgatggt

SEQ ID NO: 3050 - DNA, 427 bp, Zea mays
  unsure (1)..(427): unsure at all n locations
ctgcagcttacattgctcctatggaaccatgcatcctaatgctttttcgtctccattatagagctgcctctacaaaattaaacttttcattgtccaggtcatgctcattaattttagcacgcaaattagctatgtgaacattttcgtgtctcatcatgcgaatgtgaacatcaatagcttccacattaatatctctacatccagtgcaaatgggaacatgctccacagtanatgtatacggtttgcaagcatctaattatcttatcttaacatgtaaaataacatcttcatctctaagacacgagatagcatgacttaccacatttaaatctgctgccctagaagctaagctagcattttcaattctaaggctagaaatggaacatgacacacgctcaactccttagaaaattttacaattttctac

SEQ ID NO: 3051 - DNA, 473 bp, Zea mays
  unsure (1)..(473): unsure at all n locations
agaacagacgntaacagcaggctgccagcactgtttctttttagctcgtggataccaagctcaagttcatgtggacgatatatcagatgcatttgacaaggctgttggccccaatcaaacctacttattaactgacgagaaaaaattgtgatactggaaattctagaggttgatggttcagagatgtacaataagatcataataggtgttaatgcacatgatgcactaaaagtactatgagatgaagctacacgtgtgaattgttctacagagattcaacaatagtaaacttgcaggtactgctgttgccttttgatcacttattctgttatgtcaagaatataccatatgcttttgctatatctttggtgcaatgcatgctatatttagaacgattgagcatccaagtatcattctgaaacctatgaaaggacttaccttctgttgtcttgagtatcacattactaacatga

SEQ ID NO: 3052 - DNA, 373 bp, Zea mays
  unsure (1)..(373): unsure at all n locations
cagcttaaacctcccaatttttttttacttattctaactagnaaagcagagctaattaaaataagctatcctacttaactaatgaccaaaagctgaaatctgtcaatatatctatgggtggcagctgtagtgataatcaactatactaaactgatggaggagactccaaggtaagcggccagcatctcatcttcgtcagcgcagagctctgctactacgttgatgccagcaggcaacttccgtacagccggcgactctgcctctaactctactggctgatatgctgctgctggcaaagctggggcatggacatggtggtctgcagttgcatctgcctccgtcgtctctgcgtaatcgccgccattgcgcgcga

SEQ ID NO: 3053 - DNA, 412 bp, Zea mays
cgaagccgtggtaagtagcataagccaataatatacgaatttactcaagcctagctacaggtgcataggtttcaccgaaatacaaaccttcgacttgggagtatcccttggccacaagtcgggctttgttccttgtcaccacaccatgcttgtcttgcttgttgcggaagacccatttggctcctacaacattttgattacgacgtggaactaaatgtcatacctcattcctagtgaaattattgagctcctcttgcatcggcaccacccagtccgaatcttgaagtgcttcctctactctgtgtggctcaatagaggaaacacaggagtaatgctcacaataatgtgcaacactagatctagtagttacccccttatgaatgtcgccgaggatggtgtcaaccgcgtgatc

SEQ ID NO: 3054 - DNA, 440 bp, Zea mays
ggatcttaagtcacctgcggcatgcaagcttcttatggaacaagcatatggatatctaatggcaagttccatagacctacagcaatatcagatcagaactcgtataatagagctaaaaatattcaggttgcttccacaagtaaaaacgttttaaaaacatacgataaagtgggaagtgtaagctttgactgaaagaacaatgcatagcataacatggtaaacaaaacaaaggaatttcctaatacttcccctgaaacacattgctaacttgtctaattagttgcagcaccatataattcggaaggatccaaaaggaatattgcaaaattgtcactatattttttaaatccaatccaacaggcaacagctagtgcaccagtttttcaaccattaaaaagcaaattcaaaacattctgccaaaatgactaaacaggtggagt

SEQ ID NO: 3055 - DNA, 449 bp, Zea mays
gagtatgaactgattatccaggttctgtttcacaaaggtttcggtcctagatggatcaactggattctgagcatccttctctctggcacgtcttctgtgttactcaatggtgttcctggtaagctctttcattgcaagagaggtgttaggcacggtgatcctctttcgcctctgttgtttgtcttggcagctgaccttcttcagagcatcatcaataaagctaagctgtggaatcttcttaagctccctttaccgaatattggtgaccagcactacccgattgttcactatgtagatgacactcctttgattttggaggcatgccctcaacaacatattcttctcaaggcaatcctcaactcttttgcttcttctactggcctgaaggttaactattataaatcatatatgtaccctataaacgtgcgccctgaaaaatggcgacctgt

SEQ ID NO: 3056 - DNA, 280 bp, Zea mays
agctctggagggggaccacctttttgcttttgtgataagatatgcaccctgagtatatcaggacttgtaataaatgtaactcttcctatgtgataaccttcagctttagaaataaaaagaatgttttgtaaagtcttccgctcttatcttcgaagtgtgtgtatcgaatgtgattactgtgatatgcatgtatggtgggagattcttgggatgatgaattcaagtgggtgaactcgcgatagcctctgtaagttacctggtacacgtgcatagccatctg

SEQ ID NO: 3057 - DNA, 482 bp, Zea mays
  unsure (1)..(482): unsure at all n locations
ntagatattatttagaagccttggtgaaggttggatgatatggcaatgtttgggtcctaaaccccgaaacctaatcttctagtgatacctgccctatgaactacacttctgactcaaaaaccctagtttcctatagtcccgtgaaggaaaattgtattcaagacctaagataatatatgtttattatctttgcattntcataagcattacatgagcattcatgattatatatatgtgatatatatataaaacgaatgaaaagtagaagttgaagaagccagagctacaccaccaccatctgaagaaccaccggccggtaactgcttttattttgacatctgtggagcagagcccgactcatctgtcacacccgggtataganngtnnnccnaatgcgaaccatgtacgtgccaggatcagttatttacgtacacagcgattacataattgactcatcatagcacaatgcttcgactacaata

SEQ ID NO: 3058 - DNA, 273 bp, Zea mays
agcttgtggtggccctcggcgttctgccgctttcgaagtaccaagtctcccacctagaagccttggggccgaacccctcgagcgtggtagcgtcgcagagactgctgataccgcgccgagtgtagtaaagccacgtcccgagcctttttgagctggtccagtgagtcttctcggctggtctggttgcttccgtcgtcgtacgcctttgtccttcgggaaccgtattctaagtctatggttaagatagcctcggccccatagactagaaagaac

SEQ ID NO: 3059 - DNA, 486 bp, Zea mays
  unsure (1)..(486): unsure at all n locations
ngagtcaattcgtatattacttgcctatgctacttaccattgctttaagctntataaaatggacgtgaaaagtgccttcctcaatggactaatcaaggaagaggtctatgttgagcaacctcccagctttgaagatagtgagtaccctaaccatgtgtataaactctcaaaggcgctttatgggctaaagcaagccccaagagcatggtatgaatgcctgcgagatttccttatcactaatggcttcaaagtcggtaaagtcgatcctactctttntactaaaactattgcaaaatatttgtttgtatgccaaatatatgttgatgatatcatatttgggtctactaacaaatctacttgtgaagagattagtaggattatgattcanaaattcgagatgtctatgatgggggagttgaagtantttctagggattcaagtcaagcaactccaagatggaccttcatcagccaacaaagtacattc

SEQ ID NO: 3060 - DNA, 295 bp, Zea mays
ctgtcccgacaatgatagtgatcaggatcaagggaacaagagggagaagaagaactataagaaggcaaagggcgaggcgcatctaggtaaggagtgggattcggattgctcctcttccaactccgacaatgaaggactcgccgccaccgccttcaacaagtcatccctcttcctcaacgagcgtcacacatgccttatggcaagggagaagaaagtatgtactcaaaactctacttatgcttcttcaagtgaggacgaatctagtgatgaggatgaaatagattattcatgttta

SEQ ID NO: 3061 - DNA, 468 bp, Zea mays
  unsure (1)..(468): unsure at all n locations
tgtggaggttcttcatccncacatgtgctaagcggcgatgcctcaaccagcccatgcaagtcttagccattaagcatgcatctagaccggccccctcttttgcaaaatcaactaaataaagtttgccgtctagtacacccttaaaagctagtgaaccatcacgtcttctaaagacagatacatctacatttgtaaatagacaattatatcccatattacataattgactaacagatagtaaattatatccaagagactcaactaaaaacacattagagatagagtgttcatttgatattgcaatcttgcctaagcctttcaccttgccttggttcccatcaccgaatatgattgaatcttgggaatccttattcgtgacgtaggaggtgaacatcttcttctcccccgtcatatggtttgtgcatccgctgtcgataatccagcttgaacccccggatgcataaacct

SEQ ID NO: 3062 - DNA, 214 bp, Zea mays
  unsure (1)..(214): unsure at all n locations
agcttcggatattcttgctatctaccatctcccgacagatagatatctccttatcgntcggaaggcaatacaaaaatttgtcttcgtcagtaccgttgtatatcaaggatctctttgggtactttagatccctggcgtattgtgtagcttcggcaatctactcttttgataactgcttcccaaaagcatgtcgcacgataaagtctatctcttc

SEQ ID NO: 3063 - DNA, 458 bp, Zea mays
  unsure (1)..(458): unsure at all n locations
tgagaagatctttccacctgccttctttgatgtcattgttcacttgagtgtccatcttcccgatgaggcaatgcttagaggacctactcagtatggatggatgtacccaatagaaaggtgactaggcactttgaaaatttttgtaaggaacatggctaggccggaaggatcaattgctgaggcatatatggcaagtgataccttaacattttgttctacgtacatgaaggatgttgacactagatttaaccaggatgatgatagtggtacagagatgccattgcctaatgacatgtctgtttttaagcatggtgctactcttgttggagctactaagactgagtacattgatgatgctatcatgaataagttattttggtatgtgctacataatgctgatgaagtacaggaatatntgacgtaccttagttcggtatatgctacataatatatgttat

SEQ ID NO: 3064 - DNA, 359 bp, Zea mays
agcttcaaatagatgaaacgatttgttgcggaatttcttagcccttgcaaatgactgcgcaataaagtcaaattaaatagaagattggtatcatgttttcatatatagtgcaatgatacagttattatctaaagcaacaccatacatgctaaccaatagttatgaaaaccattcagaccaacagatacaattcaaagtggatgaggttcaatactattgaagaaagaaacttactcttgatatgttgtcccatatcggtggatcagttgaatcatacaccttctctcattccaagaaactccggcttgtgtccttgcatcttttaatatcttggaatctctctttaactcctttttttt

SEQ ID NO: 3065 - DNA, 453 bp, Zea mays
tatagtagaggaataataggattagagagccatatgtgtttctacaaatgaaaagggatatgtcagcaccggatcgaccaagcgattctattcgtttcttcacatggatcggatcagatcgacaaggacaatgggtcaagacgagaggcggtagaggccaagtcctacagggccgcactcggacctgagtttcacagcctaggttcctaggaagcggagcacgtcaacgaaggagagggccaggtcgtggatgcagctatcgacgaaattgacaatgaccagggatgaggacacatagtcggcgtctgacgaggagggcgtggtggagacgaggagccggccgagaagcttggcgatctccttctttgctgttgtgcgctaaaggctggagtggggagccggcacaggaagacgcggcgcgacgcggggactcgccgagatgggcatgcatct

SEQ ID NO: 3066 - DNA, 462 bp, Zea mays
  unsure (1)..(462): unsure at all n locations
tgcagctataaattctctactncagagttttatcctactattntgatgcaaattggcataccggacagtccggtgtgcaccggacatcccatatgctgctcttgttttttcagcaattccgacttcgtattgtggccataacttttagctccgaactccgattttgatgatcttggactttttggaaagcttataaaattatctacatctcagagttgaagccatgtcagtttgagtagatttgattttgtaaaacacttccaattcagtcagcccttcctctcaactttgtcaagttcacttttgttttgcatctttgtatctcacttctacttcttgatgtggtggactcttagaatatataaattgtcttcaatatgacattgtaatgtgttatatgggtattataatgtcttctttgaggtgttgcatcctcagagcctcagtccaatccactttgca

SEQ ID NO: 3067 - DNA, 389 bp, Zea mays
  unsure (1)..(389): unsure at all n locations
gaagaagattttaacttcctcaatcacattgagaattgatccaaagatcaagatgtcatcaacataaaggcacagcataacagactcaccccaccataccgataatatacacatgtgtcagcttcatttacagcagaaccaacagctgtaagagtattatcaaacttttcatgccattgcttaagtgcttgttttacgccatacaatgatttttatcaacctgcacaccttgttctgttgaccatctgcaaatgaacccttctggttgatccatgtagatattcctatccaactcttcatataggaaaagctgtcctaacatccatctgatgaatgataagaacataataggctgccacaactattaatgtgcgaatngtagtcaatcg

SEQ ID NO: 3068 - DNA, 387 bp, Zea mays
  unsure (1)..(387): unsure at all n locations
atttgagtgaccgtggggacgtctgcgcattctctggcgcgagaggagtatgcaccgtgctggagaaggggggttgcgaacatgttaaaaccttggcccatgccgaagctgcctttnttattgacgatacgaaggacccttctgtcgaagcaagtttattgggaggcaaattttttactgatatctggtaaaatggcggccgagggatggctcatgaaataatgaagaagagtgaaaaagatattcatgacgctcgagaagcaacaaaagaagctgaaaaaattgcgaaactcgaaagacggataggtattacttgatggcgtttaactttgttgttnattttttgagtttgaactacattatgtcttctacacgcacctgaactat

SEQ ID NO: 3069 - DNA, 335 bp, Zea mays
  unsure (1)..(335): unsure at all n locations
gatcctcgccgagtttgcttcaatgccccaatgtgaaaccaggaatcccagccacttctcagcagagacaccaaagacgcacttgtccgggttcagcttcgtgcgtgttgcccacagctngtcatagaccagggtcaagtattccactagagtcgaccctttcttagtcttgaccacgatgtcattgacgtatatctctatcctgtcccaaatcaggtccccgaaggtcttactcatcgcccgtacaaatgttgggcaaacgttcttcagatcgtagggcattacaacataataataaagcccattcactgttaccaaagcggtatgcttcctat

SEQ ID NO: 3070 - DNA, 497 bp, Zea mays
  unsure (1)..(497): unsure at all n locations
ccttaaactaagctttaaggaagccatttaggactaaaaatgtctatttgttaaagacaggatnngtagcgcatatcaagcatgaaagttcgttggagtccatcatcaacacaataacataatgacgactgacaggccacttgatctactgcacatggacctattcggcccgattgcttacataagcatcggcgggagtaagtactgtctagttattgcggatgattattctcgcttcacttgggtattctttttacaggaaaaatctcaaacccaagagaccctatagagattcttaagacgggctcaaaatgagtttggattgagaatcaaaaagataagaagcgacaatgagacgttgttcaaaaattcacaaattgaacgatttcttgatgaggagggcatcatgcatgagttctcttcttcctacacacctcanaaaagatggtgtagtggagaggaaaaatagaaatctactggacatggcaagaaccatg

SEQ ID NO: 3071 - DNA, 338 bp, Zea mays
  unsure (1)..(338): unsure at all n locations
acctgcggcatgcaagctntcctacaccaaataacattgactctgttagttcttaataaanatatatatatgtatatatgtgaatgcaatacatactgtgctcaaatagcctaaaccaaacctatccaaacaagagtaacttcaaaagatcaatataatgcttgcatatttctagacagcaccacaaccgttatttgctttccttataactcacaaaatattcatccaataaaaataaactaggaacttatggaaagcttacaaagttcactattacccttggttttatcaatcccacaagatttacacttataaagggccaacattgcgaaacgtta

SEQ ID NO: 3072 - DNA, 324 bp, Zea mays
  unsure (1)..(324): unsure at all n locations
atctctaagcacctgcggcatgcaagctntgtcttgaccatgtttttgtatatcttcaacctgattccgaagatacctgcttacatacttggaaaacattgtcaaattatgtttttgaggatcttcggaagccgaaggcccccaacaatatcagagacccatcttctgttagttagagcctcacaaacagttcttttagaagcaattctttttggaacagttaagaggagcattgaagaaatatcagagacacttctggcattaaccatttgtcactcaagaaaaaggtgttagcaccatcatcgatctctgtgacaagcacag

SEQ ID NO: 3073 - DNA, 372 bp, Zea mays
  unsure (1)..(372): unsure at all n locations
tctaagcacctgaggctgcagcttggttccccctttttgtcnggtggtttatttacgaaaccgaacgggcggctatagcctcagggaatctttgtaaaagctacgtattgatgccctgctgggccacctatgcagtggtcaatggggagtatctctctctgggcagaaagggaatcacggcttgtggataaagtgcacaacctctggagagtgttagaaaactgatatatcaatcatgctcgtggttatgagccaccaagggagctccactgattaattttgctcgatcagacatgctcgtatatgcaggtggcaatgagaatgatgggtcctcgtattgtgtcttgtaatggtaagtggtactctttccgt

SEQ ID NO: 3074 - DNA, 490 bp, Zea mays
  unsure (1)..(490): unsure at all n locations
tactcacgcttctcctgaacaagtgctgcactcaccgctgagtgcgaatttgtcacatatagcaacagaggagcccctggcgttggtggagttagtgttgttaggtctatcaaatattgtttcagctcttcgaaggctctctgctggactagtccccattgaaaaacttcggctgactacagcacttcgaaaaatggtaaatttctctctgctgatctagatatgaatctgttgagagatgccagtcttcctgttaatctttgagcccccttctttgtacttggtggttccattcgaaggatagcttcgattctatttggattagcctcaatcccttttgttgaaactaggcagccaagaaatttccctttcttcactccgaagacacnattttctggattccacttataaccggcctgtctaatattagcgaatgtctcctgcagatcagtaatgtgaatctcttgcttcgtgctttttacaatgatat

SEQ ID NO: 3075 - DNA, 457 bp, Zea mays
  unsure (1)..(457): unsure at all n locations
agcttgcattgcatgtnnaaatatcttgtattgcatctagggcgtgtctaacctagttgagataaccgccaacaaagcgagtgaaaaagcttaactcgggtcaaacttgacatgtcttagttttaagcttttagcacttaaattcttacttgttatgcaattgttggttcttgaaatatgcatgaggtactgcaccaagggggagtattcaacactcaaatcactcatgaaaacccctantgcaagccaaaatgcaaatttcaccatttgcctattttctctaanaattatctagcctatggcanaatattntgaaaagtatatgagggtgccaatacctgtcccaacaagtgttattntgtgtgattataaagttgggaattggttnggatggaaaatagatagaaaaattcannaatttcaatctntcctctgtctgggctcaccggacagtccg

SEQ ID NO: 3076 - DNA, 403 bp, Zea mays
  unsure (1)..(403): unsure at all n locations
taaaagaatgtctaattatgtgaagggtcttgctcccaagcctcaggataacgagggctacattntataccctgctggttatcctgaggataagattaggagaattcatgcaaagaagactcattctgtttctcaccatgcttttatttataagaatgaggcttctagctctaggcgttctacccatgttagaatgcctaagaagaaatctcctattacatcaaatgaacctaacatttcatttaagacttttgatgcttcatatgtgcttactaacaaatcaggcaaggtagttgccaaatatgttgggggcaaacacaaaggatcaaagacttgtatttgggtacccaacgtgcttgtttctaatgtcaatggacccaagaccgtntgagtacctaagaac

SEQ ID NO: 3077 - DNA, 360 bp, Zea mays
agcttgtgaagggtcttcatttctacatgtgttaagcggcgatgccacagccagcccatgctagtcttagctattaagcatgcatctagaccggcctcttcttttgcaaaatcaactaaatacagtttgccgtctaatacacccttaaaagctagtgaaccatcacttcttctaaagacagacacatttacatttgtaaatagacagttataccccatatgacataattgactaacagatagcaaattatatccaagactctctactaaaaatacattagatatagaatgctcattaggaaatggcaatttacctaaccctttaccttgccttgattccattcacgaatatgattgaatc

SEQ ID NO: 3078 - DNA, 493 bp, Zea mays
  unsure (1)..(493): unsure at all n locations
tgagctgctgccatgcaaccagaatgcggaggagaagattctacgtgaacatccatggaagtgtgagagagagagaaccaactcggacaccctcgggggctgggtcatagctcgcgctacccatccgagccggatcatccccggcgacaccctcgggggctgggtaagcgctagcaccatccttgaaggccaagctctctgtaacaaccacctctaaggctgaaggaccttaaaccacttccatgggagcagagcaatccagaccagcctcctgacccttaagaccgcgctccaaggtcgatgaggcacgggacgccgctcgggatagctccaacccggcatcaggcacatcagcgcanacttccatcattccaccatctgtcggctctgacaacagatcttctaggaccatgtcttcaagagtctgatcaaagtttgccagagacaattcttgcagaccaatgatggcagacnaagctggagaaggaacacc

SEQ ID NO: 3079 - DNA, 327 bp, Zea mays
  unsure (1)..(327): unsure at all n locations
agcttcattgatctctcactgtctatgcacttttcggtgtgtattataggtactcgagggggcgcccgtccctatcaaagacattcctaccctcgagtacctgngttatccctagaatattcccacaaggggaggttacagatagtcattacggntaactttattacagacatggcccttattactcctattcaccccggggccgaattacacatgggccttccncgctggtgagggagcgggaagcctcaaacttctgatggccttcttctgtctgtcggacaaggaggtcaacagctcatccgatgaccctcgctgtctgtggtt

SEQ ID NO: 3080 - DNA, 457 bp, Zea mays
  unsure (1)..(457): unsure at all n locations
ntatcatatggacgtgaagagtgccttcctcaatggactttttttgaggaggtctatgttgagcaacctcccggctttgaagatagtgagtatcctaaccatgtctataaactctctaaggcgctttatgggctcaagcaagccccaagagcatggtatgaatgtctaagagattttcttatcactaatggcttcaaagtcggagaagccgatcctactctctttactaaaacaattgcaaatgatttgtttgtatgccaaatttatgttgatgatatcatatttgggtctactaacaaatctacttgtgaagagtttagtatgattatggttcaaaaattctagatgtctatgatggtggagttgaagtatttcttatgatttcaagtcaagcaactccaagagggcacctctcttagtcaaacgaagtacattcaagacatcctcaccacagttt

SEQ ID NO: 3081 - DNA, 348 bp, Zea mays
  unsure (1)..(348): unsure at all n locations
gatctctaagcacctgaggctgcaagcttgtcaaagggttagatataactaattttgatatgatcaacgaattaattgatgctctgaatgagaagaatagattgttagagaagcaagaggatcttttatatgaagagcatgatataattgtaagtgtgcaaaattctcttgctttataagttaaaagaaatgaaatgctctcatgtgaattatctacatgccatgaatctatctctagcttaaagaggattaatgatgatntaaatactaagttataaataacttataaatcaagctcttgtgtagaacatgtagtcatttgtcataggtgtaaaggatttaatggtg

SEQ ID NO: 3082 - DNA, 482 bp, Zea mays
tgtaagggagaacacgtgataggtgtgactaacgtgcattttttaagagatagaccttgtgcagcttgtcgagcaggtgaacaagtgggaggagcacatcacagcaagaacatgatgaccacttcaagacccctggagctgctgcatatggacctcttcggacctgtcgcctatctgagcataagaggaagtaagtatggtatagttattgttgatgatttttcccgcttcacttgggtgttctttttgcaagataagtctgaaacccaatggaccctcaaacgcttcctcaggagagctcaaaatgagtttgagctcaaagtgaaaaagataagaagcgacaacgggtccgagttcaagaaccttcaagtggaggagttccttgaagaggaagggatcaagcacgagttcttcgcttcctacacaccacagcaaaatggtgtggtagagaggaagaacaggacgctcatcgacatggcaag

SEQ ID NO: 3083 - DNA, 337 bp, Zea mays
  unsure (1)..(337): unsure at all n locations
atggggatcaccctacaaagctctattgcttattctgtggtgaagacaagggccgcactacaagaacatgtcagatcaccattcataagcaaaagaagattgccgaagcagaggcgcggcagaatcagccgaagcaggtcttacatacttcttcatgttattctccctatataccagaatacgtaggtaatcaacctgcggcttctgttgcttcggcaagtcattcacaagctttctgggcccagnctccattaccaccaccattgccacctactcacacccaaagccagtagccagaagggcaccagcacgcccaacagcagtgtgacttccggga

SEQ ID NO: 3084 - DNA, 449 bp, Zea mays
  unsure (1)..(449): unsure at all n locations
actcagctttgtgcactcctaccttgacaagggagagtatattcttacctctctngaaccctatctcccaagccatggttgagagggggagagaataagcaaatgtgcaaaccatgagttaatctttaaccaaactttaagtaactttataaccagcacttgtgggagggtaatgttgcaaaaagaccccttgagaaaccccaaatccattccctaagtagagagagagctagagctctctatttctctctaagtcaaaaactacacctacactaaagatcaaccgtgttcaccttgaagatggcaccaaaaccacctatgttctataccaaaaatgtggcataccacctatggaacccactggaaaaagttgagcccgagaccttgacgtttgatgtgccttggcatggtttatgtcgcgaggtgggcagagtgacatacctgatttg

SEQ ID NO: 3085 - DNA, 410 bp, Zea mays
  unsure (1)..(410): unsure at all n locations
ggcgtataaatatttcaccttntagtagaacgcgaaaacaatgcatatatttgttcatcaccatatagattttccatatgggatgaaggctgcatattntcctatgcgacattatcctcattgacatcaacatctgtaattaaattctgctcattcatagtatcattattaaccccaacatctgtatttaaattatcatatcatgctctggctcatgactangtccaggttgctgctcttcctctacagtgacattagcattactagaagccgaagagaacttatgtaagacacccttttgtgattcaataaatcgagcttcttgggttctaactttcttttcttttctgggcaccggacaaatgccttttatgcaacattgcaacgccctaacaatgaacgaaattact

SEQ ID NO: 3086 - DNA, 479 bp, Zea mays
  unsure (1)..(479): unsure at all n locations
ntaaccnctgcgagaaccttccccgtctctttctattcttggtnaatgcaatatcgcatgtcatattctatgcacgtttaatctacttgttctcttgtatggtgtactgtttgtttcctaatttgaatggatggatgtatgtatgtttgcaatcgcatagagaacgattcggtcgaggagcccgaagaactcgcaggagaagcccctgagcaacagtcggttggtggaggcaagtgtcccttgacctatctttgtcctattcattctttaattcacctcccgcattacacatttatgcctaaggattgactagctctgttatccatgtccttgtttacctatttgggttggattattattgtttagctttatgctattgctcaactataatcaatgaacatgatgagattatctatgatacgttgntttcccttttgattatgatgatggaacttgtggcccttacgcgactctagggg

SEQ ID NO: 3087 - DNA, 268 bp, Zea mays
cacaagcaccaacggtgcctaatgaaattgtcattgaggccatgattaaggggcttcggccgggaccttcagcttaatattttgccaggaaaccccctcaaactttggagaagctgctccagaagatggatgagtatattcgagctgacaatgacttccgccaaagaagggaagaagcatacaggttctctgaaatgaccaggggcttcgaaggaagaatccacccgaggcacgtcaggtcaattcacaactctactcagagtgatga

SEQ ID NO: 3088 - DNA, 485 bp, Zea mays
  unsure (1)..(485): unsure at all n locations
tgagtcaatcattttgcanaggataattgatgctcaaattgtttatctgggtatgaagcacattcgagagaagataaaggctagagtagccaggtgtttcaaggaagacgatcaaggtgtgatatggtttaaaaaccgcatagtagtaccaaagaacgaagagctccgccagcaaattctggatgaagcacatcttagtcgctattctattcatcccggaagcactaagatgtatcaagacttaaaacaacattactggtggactaagatgaagattgaaattgcacgctatgtggctaagtgtgacacctgcagacgtgtcaaggccatacacatganaactgctggtccattacaatctttgccaatcccaacatggaaatgggaagacatcagtatggactntattgtgggactgcccaggacggccaatgggtatgattctatttgggttatcgttgatcgactcacaaagattggccact

SEQ ID NO: 3089 - DNA, 313 bp, Zea mays
  unsure (1)..(313): unsure at all n locations
cccgtgctcgtgcaggcgaccagcgagcagctcggcagctgtaggaaacgggtgacgcctaagagggggggtgaattaagacttctaaaacttttactaaactaagccacaattaaatccctagagcaaaacctatgcaaataatcaaaactagaatgtgcaaactcggttttgtctaagtgttgctatctctacggcatangctaagtttcaatctacactaaataagtatgacaataagattgaaacttaaatgcttaatataaatgcggaatgtaaagagctaagtagagaagcaaactctcgtggatga

SEQ ID NO: 3090 - DNA, 483 bp, Zea mays
  unsure (1)..(483): unsure at all n locations
nntaatgcacatattctcccctttgacatcaaacaccatttctatattcaagcaagaacatangatgatgtcaagggacagcanggtgttaaggaggagagacacagtatcaaaactcccccttacttattgagcatatgcactaccaacatttaagtaagatacaaatacgcaaaaagattaccacttccttttgtacctttaccatgttgtagtgtacttcccatcttgagagtatttaatctctcgagagcttctccacacttgtgcctgattctttatcctaaccttttcttgttgctaagacaccagacttagaacaagttatagtattgggcacaagaagaaacttctattctagtgattaccaaaagataccaattgaagcacactaccaaggctaccaattgaagaatcatcactgtcatagctncatgatatttcaagataagcatctacgatcaccaactattatagagcacg

SEQ ID NO: 3091 - DNA, 340 bp, Zea mays
  unsure (1)..(340): unsure at all n locations
agcttagtgccggaattgccatcaaggaagtcttctcactcttctcatccccccattgnctcatggcaaagggagatgctaaggtaaaaatcatcaccgatttaaatgatataaaagatgatgatgatatcgatgatgttgatgatgatggctattcatatgatgatcttgttagaatgttaggtgaggccgatgactacatgcacaaagaaaaagaataatttaagaccttgaaggaattgtataaaaacctccaagtgtcttttgaggagctcaagacctctcacaatgacctcaaagaaaattgtgagaagcttgcggatgctcaaaaatcatctat

SEQ ID NO: 3092 - DNA, 403 bp, Zea mays
  unsure (1)..(403): unsure at all n locations
tactcttcgacagagtaccaacgaccttcgttccattccggtctcggaggcaacctaagctttcatcgtcgataccgccgaagagcatcgcccctggctgataaccgcaggatatggcatactccctcaactcttctttctcagcctttgtcaattcttgttcagttaagttttgaaagttgaagttttcttcttctgaaatatcttcggctatttccttctctttcccaggcactgtggccatggtctcttcggcggctatagcagcttcttctgcggccatatccagaagtattntatctatatcagacagtatgctttctaagttgcatccttggtcgtcgagcttcggcaattgtggcttctgtaggtgcagcttcgataattgtagcgctctcgacag

SEQ ID NO: 3093 - DNA, 310 bp, Zea mays
caagtctccacacaagggttccccgaaccaagagatcccgcaaatcttgtaggagaagggtttaattatgaaaaatggaatgctaaggccaaaaacactctttttagaggcatttgcaaagatgtctttaatagagttagaaatcatagaaatgctcatgatttgtggatggatatttgtgctctacatgaagggactaaaagtgagcgtgaggagagatatcatattgaaatgagaaaattatattcttttgagatgcttgcaaatgaaaatacaaatgctatgtactcatgccttaacattcttgtat

SEQ ID NO: 3094 - DNA, 493 bp, Zea mays
  unsure (1)..(493): unsure at all n locations
tgtggaggacccgatcatccaagcatataagtttctggattataagtggtcacccaagttntgttgatgaagcaccagaagactaatcaaggaaggaatccatgtgggagttcgcaagaaaaaggtttgcgtgttggcatcaatgcttcctcaataagctaagcgaaacctagaagcctgaagatgatgtttgagtagccagaatcagcgtttgcaatcagcaaccggatgctcctgaaaggccagattttgttaaagttccatctcctcgaagagtctgcaaagtgaagatatgtagctgaagtaaagctatacccataacccttctaagccgaatctcgaggacgatattccttttaagtggggtagatttgtagcatccttgtcggggaccataattaggggtaccctcaagactcctaattctcacctagntaaccccatcagcacaaagctgcaaaggcctgatgggtgcgactaantcanggatccg

SEQ ID NO: 3095 - DNA, 473 bp, Zea mays
tggacttagctaatcttggaggtcgtgcgtgagcctccgttttctgcccgtgcgccatggcgaacccctcgttttcagcccatacgcaaggccgaacagccctgccgcccgtcgccgcgtgcctccgtgacgttttccctccgttccaccgtgcccttcaccaaagacatccactttaggttcggtgtgtttccacatgcttggacttagtttattttcgggttcgtgccacagccaccatttccggcccgcgcgccatggcgaaccacctgttttcagcccagacgcatggccgaacagccctgccgcccgtcgccgcgggcctccctgtcgttttccctccgttccaccgagcccttcacccaagacatacgcattagcttcggtgtctttacacacgctgggacttagcttatttccgaggccgtgccccagccgctgttttcggcccgcgcgccatggcgataccctcg

SEQ ID NO: 3096 - DNA, 274 bp, Zea mays
aatactgaaggctgcgcagaagtcaaacagctacacggaaatcagctctgcagatctcccgaagaggctccttcacattatcacgtgaaaatacttttgtttcgtgtctatacctcgctaaggctggttgttactagtataaataccccctatgtctatgatgtaaggcagcctttggtaatctaaaacaaaacccctttgttcagctgtgtgctaacaaatattgagagtgatctctacccctttgctcttgtgaattccttcgcgggattgc

SEQ ID NO: 3097 - DNA, 501 bp, Zea mays
  unsure (1)..(501): unsure at all n locations
acctataaaactcagcttgtaaatgaaacatcagcctatggataaatcttagtattgttatcacaaacgcagaacggaagtgtgcgaccataaaaacgaaacatacacatgatcaggcaaagagaacacaaaactatggtgctagcagtcaagctgagacagcgaaacttctctctatgaagcctgatgtgcatgtgtttcaatttcaagagtataatgtgatgatacttcagggtacacaaatatgagcaaccacttcagaagacctgcttagattcagttgctaaattgctcttgaaattatacggaaagaaaccttccatcgtgtaacaagataatactaacaagaccatcaaatctgggaatataattaatgatttcgacatgatcatgcttttatcaacagagaacaagaaacaagaataacttacttggcaagtcccacatatcgctcacgaccacattcttgtaaccatatggtagtgcanacttcagtatcat

SEQ ID NO: 3098 - DNA, 422 bp, Zea mays
  unsure (1)..(422): unsure at all n locations
tcaatgaattaattgatgcttctaatgaanaagatagattgttagagaagcacgaagatattttgtatgaagagcatgacaagtttgttagtgtgcaaaaatctcttgctgtagaggttaaaaggaatgaaatgctttcttctgaattatctgcttgtcatgaaactgtgtctagcttaaagagtgttaatgatgaattaaatgctaagctagaagtagccaataaaactagatcttgtgtagaacatgttgccatttgtaatacgtgtaacgattttgatgttgatgcttgtgttgaacaccttacatcaattactaaattaaataatgacgtggcaagtcttaatgcttaacttaagacttgccagatagattttgataagttgaatttgctagggatgcctacaccgttggtagacatc

SEQ ID NO: 3099 - DNA, 472 bp, Zea mays
  unsure (1)..(472): unsure at all n locations
acctataatactcagcttcacacgcttgccccagtggtcggctaagcatgtctggttatctctctgataagtcgctccagcgttgttgaggccgaacgacatggaggtatatcagaaagctccgaacggggtgatgaatgctgttttttcctcgtcctctttcgccaagctaatctgatgatacccggagtaacaatccaagaaagacaacacagaacacccggcggtcgagtccaccacttggtcgatcctatgaagtccgaagggatccttccgacagtgtttgttgagatccgtatagtcaacgcacatgcgccaatccaccttattcttttttagtacaagaacaggattagctaaccactcatgatgtaacacctctctaatgaatccggccgcgaccaagtgagccagctcagcacggatggcttctcttttgtcgggcgtgaagcgacgtaattnttgtcggatc

SEQ ID NO: 3100 - DNA, 317 bp, Zea mays
agcacctgaggctgcagctaaagcctggaagtatctttgcctttatatgcgaattgactcaagcctagctacgggtgcataggtttcaccgaaatccaaaccttcgacttgagagtatcccttggccacaagtcgagctttgttccttgtcaccacaccatgctcgtcttgcttgttgcggaagacccatttggttcctacaacactttgattaggacgtggaactaaatgccatacctcattcctagtgaagatgttgagcttctcttgcatcggcaccacccaatcccgatcttggagtgccttctctaccctgt

SEQ ID NO: 3101 - DNA, 482 bp, Zea mays
  unsure (1)..(482): unsure at all n locations
cgatttatttatagctaacaatgaacatatctgtttattttatttggtcatgtcaaggacttacgttntaatctggaacaccatgtgtttgataaaaaaacgttcaataaaatctggaacaccacactggatatgccaaggtagatttgataactttattctgggactaaataaaaaaaaatgatatgtgttctattttgttaaatgtcacaccagcttctatcattgtaccattattgttaattcttgtcaatttgcccaaagaattgacgttagacatgatccaatatgtaaacatgatacaatccctatcagttactgaattcaatgcctattaactttatgatggaaaagatcatggcatgttagaaaagttcaactacgacacaatagtttgtaataagtatagccgctgacagcttagcaataatcactcaacctttgagcaatggtgttcctctcagccataagcatttcatgat

SEQ ID NO: 3102 - DNA, 274 bp, Zea mays
  unsure (1)..(274): unsure at all n locations
agcttctaaagggagagcacattntaggattaacaaatgttcattttgagaaagacaggatttgtagcgcatgccaagtaaggaagcaagttggtgctcatcatccacataagaacatcatgacgactgacagaccactggagctcctacacatggatctatttggcccgattacttacataagcatcggcgggagtaagtactgtctagttattggggatgattattctcgcttcactcgagttttctttttgcaggagaaatcttataccca

SEQ ID NO: 3103 - DNA, 480 bp, Zea mays
  unsure (1)..(480): unsure at all n locations
tgccagaagatttctctacgatcgagaagcccttcgcaattataaagctaatcgcccacacatggcctcttcagcgctggggcctggacattgtcgggcccctacccatggcccaggggaacctcaagttcaccttcatcgccgtcgagtattttaccaaatggatcgaggcgagggctgtatccacgataacatcgaagactgcccagaaattcttctagcaaaacattatttgccgcttcggagtcccgtccgagctcacagttgacaatggcaagcaatttgacagctaagacttcaaggatttctgcttctccattggcaccaagcttgccttcgcctcagtgtaccacccgcaatccaacggagtcgttgaacgcgccaatggtaaaattntcacagccgtcaagaaaatgctcctcgacgacaagaaaagcaagtgggctgaccttttacctgaagcggtctgggcactgaaca

SEQ ID NO: 3104 - DNA, 240 bp, Zea mays
agctttatcaaatggacgcgaaaagtgccttcctcaatggccctatcaaggaagaagtctatgttgagcaacctcccgtctttgaagatagtgagtatcctaaccatgtatataagctctcaaaggcgctttatgggctcaagcaagccccaaagcatggatgaatgcctaaaactttttatattaaggtcaaagcggaaagcgacctacttttataaactatgaaaactgtcatatcca

SEQ ID NO: 3105 - DNA, 458 bp, Zea mays
  unsure (1)..(458): unsure at all n locations
ngaggctgtgcatagattaccgccctcttaatgcggtgtctatcatgaacaagtatcctttgcctcgtattgatgttctttttgaccagttggtcggagccaaagtgttttccaagatagaccttcgctccagctaccatcaaatcaagatatgagcaagcgatattccgaagacgactttctcaaccagatatgggctatatgaattcttggtgatgtcttttgggctgactaatgcactagcatatttcatatatctgatgaattctgttttcatgcctgaattggacaaattcgtagtgggtttcatcgatgatatcttggtgtactcaaagaatgaagaagaacatgtcacgcatttgcatgtagtgcttcaacgtctgcgagagcaccacctttatgccaagttgtcaaaatgtgatttttggtaaaggagatcaaatcttgggaacactatc

SEQ ID NO: 3106 - DNA, 407 bp, Zea mays
cttcgaatttcacactcttttgcagtatgctgataatcttcgccccggtgcggtcttgaatgcatcctaaggcttcttcattgattccaccaaagagcatggctcctggttggtagccacaagatatagcatactcctgcagctcgttcttctcagcctcggataattcttgaccaactagaatttgaaggctaaagcttatttcttccgaagtatcttcggggatccctttccctttctcatgcactgtggccatggcttcttctgtagccgcagtagtctcctctgtggccatatccaagagcactttatcaatagcatataacgaactcttcagattggaagcttcggcggctgcagcttcggtagaagaactgcttccgcagctggtgtcatctttgatgctg

SEQ ID NO: 3107 - DNA, 462 bp, Zea mays
ctttgaacgtactaagcacatgccgggaaaaatggtttccttgttacctagtacctgattgaagccgggcgcggactttatccctcatgcgacctgagacaaggtctcccatgctagctatggtgggtacaagtgcggtcactgcacggcggcagccggggtcagtggagcattgtatgccaaggcggtgaggcctggccgcgaacggggaatcgatggggacggttgacatgtgtggggacggagtgccctgacatgtcgtgtgtttaggtttaccttgcaaggttaaaactcgattcgaatcgtctgcttctcgcagctaatgagactgcttgatttcttgtactgcatcgagtaataagtgaaatgtggattacatgagataacttgttgattgaactaattgcttgttaccatgtatgcttagaaggagcaaatctagctaagttaatgatggtagaa

SEQ ID NO: 3108 - DNA, 310 bp, Zea mays
agcttgacacagcgccctcttctgagcgattgtcgatgagacaggagaagaagctcctctgacgccctctgccaccgaagtatccaaaattctgaacgtaatgactgactccatgcccttcaagctgctaagtcctctgggatcacgactgacaaaaatttatataggaaagaacagccttcgctgcaaagagaagttaaaaacaaaaaatgataattgtaatgtatggagcaatgacaacacgtctcacttcgaccaaacacatctgcgatccactgaatggaggtgcgagtaaatctgtaaccaacac

SEQ ID NO: 3109 - DNA, 457 bp, Zea mays
ctggtgaagaggcaagttcttaagtctgcatcttcttatgtgaaatccactaagtagagggtgttgtatctaaatcccttgaataccattgattcatcatccatttttgttacaataacctctgatggagtaaataagcattaaagtccaagatcacagagttgtcccactgataataaattgaagctcaagggtgcaactaagagaacatttgatattgacaggtcatttgagattgccaccttgccaagtccttgcactttttcttttgagttgtctccaaatgtgattttatcttgaccatcaacattctcatctaatgaggtgaacattcgtgggttgcctgtcatatgttgtgtgcattcactgtcaataacccaatggctcccaccggtcttgtagttcacctacatttacagacaatacaagcttgagtttggagagcactatactgcat

SEQ ID NO: 3110 - DNA, 418 bp, Zea mays
aagactaaacagtactgtgtcattttcatcccaggcggcccagtaacacagggaaagcggagcgcgcccgcgccgtggtggaaacttcgcagaaaggccctcggggtttttgctaactgggaacgggttccttcactgttactcacagtcgctgacagtttgcgctaaggtccttcggtttctattaccttccacgtcgaagtccccaacgacggtgagcgcggggaagctcctgcgagcttgcagactatccaaacggggcaatgaccggcgctcccaagcggcagacacgaaattggacctcccccgatcaattcccccaacttaatttcacgattggtaagctatcaacctctgtccacgtgaaccgcggacgatgaggacaatggcacgcgttctcggtgatgggtggtggttc

SEQ ID NO: 3111 - DNA, 319 bp, Zea mays
atgcagctgcccaaaagtttatgaatctggttctatcaatttatttctaaaattccaaaagactaagtttaagccttcttaaatgttaaataattcatggctgggactaaaaatcttggaattatttttattaaatactagagaaatttagaagtctagtaaaattgggctcttgattttattaatgttctagaattttctacaaatttcctaagcctggtagaaaaagaaaaggaaaaagattaaacagtaatgggctcaaaccagcccaactcagcccacggacaaggagacgcatgcgcgcctgcgccagcgatgt

SEQ ID NO: 3112 - DNA, 483 bp, Zea mays
  unsure (1)..(483): unsure at all n locations
tcggcgtccttgtttatttcttcttcgtgagcccttggttttctttcagcgatgaagtctgctaatgcctgngactgaattgagggtctatgcacataatcaatggtgaattcattaagttctgcggctcatttcccaatccttctagtagtttctctgttcctcataatgtccttcataggctgtgatgaaggaacaattatgcgatatgcttgaaaataatgccgaagctttctagaggccatttacacagcatatagcacattctccaattctgtataatttttctttgacagacttagaacttctgagacgaagtacactggagcttgctttntgacttgggcatctagcttctcctgtacaaatgccgcactcattgcagaatgcgaagctgcaacatataagagcaatggagcccctcgcgaacgtggagttaatgttgttaaatcaatcanactattgttcaactcttcgaaagct

SEQ ID NO: 3113 - DNA, 251 bp, Zea mays
gcggcccattacgatatataccaattaccggcctagctttgatgctgtgctggataattgactatacaaaaaccccacatataacgaagcgtgttactgatctatctacgggataccaatcctgggaaaaagattgaatagaagaacacgtgggtggaaaaaccccaccccactgcgggctgtgcgccgtgtattaagccgagatactgttaatataggctgactctacgggaaggggggggaggcgacct

SEQ ID NO: 3114 - DNA, 502 bp, Zea mays
  unsure (1)..(502): unsure at all n locations
acctataaaactcagcttctaagggagatcatgtgttaggactaaccgatgtctgtttttatatatacagaccttatgcagcatgtcgggcagggaaacaagtgggaagcactcatcacagcaagaatgtgatgacgacatcaagaccacaagagcttcttcacttggatctcttcggacccgttgcttacctcagcatcaggggaagtaagtatggtcttgtaatagttgatgatttttcccgcttcacttgggtattctttttgcaggacaaaaccgaaacccaagggaccctaaaacgcttcctaagaagagctcaaaatgagtttgagcataatgtgaagaagataataagcgacaatgggtccgagnttaagaatctacaagttgaagagtatcttgaggaggaaggcatcaagcacgagttcttcgctccctacacaccatagaaaaatggtgtggtagagaggaagaacaagacgctaatcgacatggcgagaac

SEQ ID NO: 3115 - DNA, 329 bp, Zea mays
tctctgagtcacctgcggcatgcaagcttgtccgtcaggatccaacgaagctctttcttgaagcctgcttcggaggagaaaagtctttatgtttcacaagttcataattaaatggctagagtccgttctactgccacgggtgatcgtgagggggacgaaactgaatctttcgcgactgtccccatcttacgatcaatgcgaccttccgggatggtaactactgaagagaaccctactgctgaaacagaacaaacaactgccctcgaagaagaacaacaaaacactgaagaaattggtcctgaagatgattctcatattgccgcaccaag

SEQ ID NO: 3116 - DNA, 454 bp, Zea mays
tctcgctgtagacttctctttatcctttgcactcgaagtgtgtctttctcagctattacatttacattgttgggggatatcgctcttatataattgaaatagcgaaaagaaaagattacatgttgtggccccattaaaaacctttctccccgtttggaaaggagaacggtgcctccaaaaagaatatacaaaattacatcgaacaaaacataatatcaccgagactcatccgcattgcacgatctaggaatgtcattgccgtccatattcttcaatctgtatgaaccgggtcttgactaaaatgctaccacctacgggccttcccactttagcatgaatgagcctactgttgtatggttagctactcttcaaagtaccaagtgttctgttcaatgctcttcaactagacctttatcatgcagttattgttcagctcgatattattgatgattca

SEQ ID NO: 3117 - DNA, 373 bp, Zea mays
  unsure (1)..(373): unsure at all n locations
agcttctaaagggagaacacattntgggactatcagatgttcattttgagaaagacaagatttgtagcgcatgtcaggcagggaagcaagttggtgttcatcatccacacaagaacattatgacgactgacaggccactctagctcctacatatggacctattcagcctaattgctaacataagcatcgcgggagtaactactgtctacatattggggatgattattctcgcttcacttgggtgttctttttgcaggataaatctcatacccaagagaccttaaagggattcttgagacgggctcaaaatgagttcggcttaaggatcaaaaagattagaaacgacaacgggacggagttcatgaactctcaa

SEQ ID NO: 3118 - DNA, 483 bp, Zea mays
  unsure (1)..(483): unsure at all n locations
accttaaaactcagcttgggccacctgcggctgcatctacctgaggggtcttgtggccactgtcagtaccctaaaactagggtaccccttactactgtataaagatgcagtacccacgtggctatttttagtcgcgtggtaaaggagttatatgtgggaccaggccatgactcgccccagcctcaggcgactactctggaccagcaacagcacctgaccgcaccacatatgcgggtccggtgccgccacgtgtccagagaaagtgacatactctgaggtatcaccagtgagtccagacccccatgagaaggtgtcggacccctgtatatacggtgcgggtctccaagtttggtccaggacctccatgtgtgcgaaccggacccctggaatgggatctagacccctgtatggcgtccaggcctgtcataatgatgttccagggtcccangacagagcatacctgcgcctttatcatgtccaagc

SEQ ID NO: 3119 - DNA, 391 bp, Zea mays
  unsure (1)..(391): unsure at all n locations
agcttggcgtggctaaggtttctctaatgtgtttangccactgcactcaccaaccttaccaaaacaagtgacactcccatccttagcagtaaagcctaaccccggtctgctaattcccctcttgaactgattaaccatcatgcccaactagggctcactgcatgacacctagctcaagacagatcgaaggtatgtgttttcttccttgattcttatcttatcgtgtatgtaggactcaagagcagactgcaaaacctcacaaagtgcacactacgtaggtacaagggcactcacttgactagccttctaagcaagtctatcctagcgctctctctctctctttctgctaactccgtctacaagctaggacaaacaatacatgcacggtgca

SEQ ID NO: 3120 - DNA, 380 bp, Zea mays
agcaacacttgcgacagcttcttcaactcagacaactcagcaggtggcattccggaggtcctcaggaaaaggggccgtccccgagcaacacatgggaattaatatcccggtccggtggcattcctggcaatacatcaagagagacatctgcatactcacaggaccactgggaatcttctatacggggtaccttcgtcatagagagagcacatgactgagaagaaccctgactacgcagaatcaaagagaactcttcgtataaaggagaataatactccacggtacgactggctacctcaagcacaactaggtgcaacgcatccaaatagctcgcaaagaatgccacgatttcaatccaacacaaaagagtggtctgatat

SEQ ID NO: 3121 - DNA, 260 bp, Zea mays
gcttatcaagccagctcaagctatctaacttgtcgagttgaacttttagctcattatgataatgagccgagctagctcgttacgcaaacgatattcttggatgttcatggatttatgtcttttattggtataacttacaagcttattaagccagcttaagctagctaacgagtcgagttgaacttttaactcattatgataatgagccgagctagctcgttacgcaaacgagccgagctggcttattatctaaccctaac

SEQ ID NO: 3122 - DNA, 482 bp, Zea mays
taaccttgtaacgaggataagaataccttgttccaaaggtgtatggtccttaagcctctctgaaatccttaagggaaaatgcttaagatgtttataacatgctttcataagtgcataaactgtcatgagcatcactctttattatgacacattgcacttcacagtttctatgatatagatatgttctcattaacctaattacgtgcacttagcatttaaggccaaaatctgtattcctctcaaggcacatatttagggggagcaatctatattatatagaactgtataagcttaattgacatatccttttaaccatgtctctttcctttggtacatttgcatatttcctatctctcttgtgccaaggctaagactaatatgcttccatgagtatcttgtgtattaagtcttagattgaaagggaaatggagtattcggcaaagacatcgcttccactctacaccatcgatattatctatcct

SEQ ID NO: 3123 - DNA, 332 bp, Zea mays
agcaccgcggctgcagcttaatttcagaacttatagttctatcacactaacgcgcacattatctagaagtagaggtaataagctccgatagatattgacgtgttccatcattgtaaaaaaagaaattactgatctgatttaccaagttctaacgggcaaccatgagaagcgaccatggaagaactcacgttgaagatttctagctgctccccagtctttgcaggaagacgctttatagtcctaccatttacacgatactaacaaaaattcttttcttcccccaatcagaatatagcgttcaatgcaccgtccttatgctaaagatctggtgc

SEQ ID NO: 3124 - DNA, 489 bp, Zea mays
  unsure (1)..(489): unsure at all n locations
tctnaggggagaacacatttgngactaacaaatgttcattttgagaaagacaggatttgtagcgcatgccaagcaagaaagcaagttggtgttcatcatccacacaagaacatcatgacgactgacaggccactggaactactccacatggacctattcgacccaatagcttacataagcatcggcgggagtaagtactgtctagttattgtggatgactattctcacttcacttgggtattctttttacaggaaaaatctcaaacccaagagactttgaaaggattcttgagacgagctcaaaatgagttcggcttgaggatcaagaaaataagaagcgacaatggaacggagttcaagaattctcacactgaatgcttccttgaggaggaaggcatcaagcatgagttctcttctccctacacgccacaacaaaatggtgtagtggagaggaagaatagaactctattgtacatggcaagaaccatg

SEQ ID NO: 3125 - DNA, 442 bp, Zea mays
  unsure (1)..(442): unsure at all n locations
cggacctataaaactcagcttatagtcgaccaggtcttctcccagtaggtcgtcctctttcattgatgttggtacgtcgttggaggcatcttgatgtggtgcggacgatccagactcangggtcagatggtccgtgcctgatgcagctggtccggctttgttagccaggctgtctgccatatctgcagggtgctgcacaagtgttgttttattttctatttttgtggtcgtttgtttttcctcaacagcctttggtctccatttcttttgtggtggagggtactgtagatgtgtgtcattgaatatcttttccgcctccttctcttggctctccttcgctcttaggcgctgtaatttccgcttttgggatcgtgtcaatcccgacgggcaccatcgaggcatggagtattntggatgggctgttttgatggcagtcgtatcc

SEQ ID NO: 3126 - DNA, 112 bp, Zea mays
tacttcatcatcactattatcctcatcactagaagtagaatacttaggggtttctcgaacgcttacctttttcttctttgccatgaggcaagtgtggcgttcgttggggaaa

SEQ ID NO: 3127 - DNA, 353 bp, Zea mays
gctagatgggttcttttatgttactcaacatcgatctatgctacccaaaagactttgcgttagcatttggcgaacgcagtaccttactagcacaatgtgcgagctcgggctgcctagctgcatgatatattatcgacatgccttatgtgggatagtgactgatatggagatgtgcccttgaggcctatctacactatcctggcgagagagcgcccaacacgaatgctttaagtgtgacacagtgccactcacttaagagtggcatatacaggatctaggtatgcttctagactgagtacattcgatagaggactattgtattgcgtctaagtgctagatacagaacaaatcgc

SEQ ID NO: 3128 - DNA, 234 bp, Zea mays
  unsure (1)..(234): unsure at all n locations
agcttgcatatattattgggattaatggtgtcttcattactcggngggtgcttcatataaatgtcttcatcaagaaatccatggtggtggctgctttcatttaaatgtcaatctatcaaagtgaccatccccgagaagccatctaagatatataaacgcatatggtggagccgctttcaactggactaaagggacatcttaattaatcctattgttgtttaaacctccgataaa

SEQ ID NO: 3129 - DNA, 481 bp, Zea mays
  unsure (1)..(481): unsure at all n locations
tgagagagggaaaactgcagcaagtgtcaagctcaataataagaatgttcctaanaatgaagaaatcaacatgagcttggaaaaaggtaaagattcaattaatcatgttgtttgcactgaccttttctctatgtcatctaagaacaaaaagagaaaagggaaaaggaggtgttttaagtgcaacaagtcaggacacctcatcgcatcgtgtccatacaccaacaagggtgaagggataaggagatgcttcagatgcaatgacaagaaccacacgatcacttcttgtcctctactgtgtggtgagcagggtcatctatcgaaggtatgtaataaaggtgaggtctctaagcaagtaaatttgtctcaatttcattcgcttaggagacccaaatcatacacctgtgctagatctataacgagatcacctagaactagcataaaggctatttgggtaccaaaggcacatttatatgatcattat

SEQ ID NO: 3130 - DNA, 344 bp, Zea mays
gtatgctccacaccagagggacttcagagagcagtctgaagctcgtacagtcaatagcactgtgccagagtcaaagcacatctattgacaaatatcctaccttaatagcaatctttttcattcagttttattttctgtaataaaggacattgtttaggtttcatgtaattggtttcgttgattcctacaaggaaaatatattttcttcacaggcttatattgattaaagttcaaagacttgtgataacaaagaggaccttcgaactatcgaaaattcttcgaagcaacaaaaagtcgttctaaggaacgcagaagtaagttgccgaagtcacaaaaaaagtcgt

SEQ ID NO: 3131 - DNA, 489 bp, Zea mays
  unsure (1)..(489): unsure at all n locations
tgaggccgacatcagatgctaccgatgacagcatatcatcggtagtttattctattctaatttcaaggtaaaaactttacttcggcttttcattgttttaacgacgaaggtgttttttgatgaaggttgtttttgcacagagcatgctattgagtaaagccttaagaatgcaacaggaccttgaagataaaaatcatgaggttataattgaaggcttagagagcaaattaaaaggtcacgaaacttcaatcgatggaaggcttactggcagaagtccaagctaaaattgccagattgaataatgaactcctcgcaaagacagaaagcttcgaacaagaaaagcaganattggatgcgaagtttgaggctgaagttgaaaaaagttcanatntacagaaatcattgaaagagcttcaagataaatggcctataaaatttatagccttggactagctctggaatngnngttcctgtatttntcatatgctc

SEQ ID NO: 3132 - DNA, 412 bp, Zea mays
  unsure (1)..(412): unsure at all n locations
gtcgcgcgcgtagcgttccgatgtcctgcgcgtgctgtcgcgaagctccctgttcagttcgccttcgtcgcgttgtcgtgcgcgcgaaactgctcgcagtcgatattaagttcgtgacgcgcgcgttggacacggtaaaacgctgcgtgtgctggtgtccaaactcgccctggccatggtgctaggtacagtgtcgtgctgtttctctgcgcgcgtnctcctgtcatcagagtcgctcaactcaccaatcatatcttggtcggtcatcgatttcatattcgtcatggtcctcacgtcagccgcgagcgcacccgccgggtgtagcccctgatgcctcggaagagtggtttgactcctctgaggtcttaattcttatcgcgatgcctcagtcggncttgttgtttcctcatgc

SEQ ID NO: 3133 - DNA, 437 bp, Zea mays
tcaggtctcttgctctacaacttttgtaagtatgaccagttatatcctgcgaatcggatataagaaccacccttctaatccccattgcctttaacttccgaagacccaaaagcaaagcttcatactcagcaatattatttgtgcagctaaaatcaagtcttgctgcgtagaaagttctaactttggagggtgcaaccaacacaacagctgctcctgccccgaaggttctcgaagaaccagcacaaaatatcgtccatacttcagtatctttagttgtttcctctccttgagcccctggcgtccaatcggcaatgaagtctgctaacgcctgcgattgtattgaggatctgtgcacataatcaatgctgaactcattgagctccacagcccactttccaattctttcagtagcttctctggtcctcatgacctccttc

SEQ ID NO: 3134 - DNA, 327 bp, Zea mays
agcttcacatgacctcgtgactcaatttgtggcgcaaatcatagcgggccagtaaaagccttgtcggatcaccttatcagcgagggccctatgccccgcgtgagagctgcaagttccgttgtggacttcgcgcaggatttggacaccttcgtctcgggaccatttaacatggtggctgaccctttttaactgccctcataggtaatcttgttcggttagcctggctgtgatgcctgatgaatccgagacggatggctcccttgcttagtgttcgggctggatgtttagctggtggacggtcatatgtaatgagagctcttgttttgc

SEQ ID NO: 3135 - DNA, 470 bp, Zea mays
  unsure (1)..(470): unsure at all n locations
tgacgacgggatcgtgtttgaagcgagctggtgaggtggtggtctagccacggatgacgtgtttgacgactcgacggcaaacgacacaacgacatgagcagaaaggcttggccacggtggagactgaatgggttgatagtgagccgggccacgacagatcaaggctgagtcgcagtaatcccaaattaaattagaaggagaccgacgagctgaaggcgttgattcttgaaaatcggcgaccaccagatcgacatcggggctcgacaaacacgaaccgccgacatgctttggttcaagcctctcgccgagcaccaggtgagcgaccttctacccttcgctttcttcaactaatctcctcctacctcatcagcacacaggcaagtcgcttaccaccggacggtctgtgtgaggctatagttatcgcgacgaggacggatcggngtgagcagcaaccggcgcatgaccataac

SEQ ID NO: 3136 - DNA, 371 bp, Zea mays
  unsure (1)..(371): unsure at all n locations
tgcaagcttgtgaaggttcttcatccacacatgtgtttagcggttatgccacatctagcccatgctagtcttagcaattaagcatgcatctagaccagcctcctcttttgcaaaatcaactaagtaaagtttgttgtctaatacacccttgaaagctagtgaaccatcacttcttctaaagacagacacatctacatttgtgaatagacaattatatcctatattgcataattgactaacagataacaaattatatccaagagactcaactaaaaacacattanatatagagtgctcggatgaaatagcaattntacctaacccttttaccttgccttgattcccatcactgaatattattgaatcctggg

SEQ ID NO: 3137 - DNA, 454 bp, Zea mays
  unsure (1)..(454): unsure at all n locations
nggtgccaatggagaagcagaaatccttgaagtcttggttgtctaattgcttgccattgtcaactgtgagttcggacgggactccaaagcggcaaacaatgttttgccagaagaatttctgggcagtcttcgatgttattgtggatacagccctcgcctcgatccatttggtaaaatacttgacaacgacgaaagtgaacttgaggttcccctgggccgtgggcaggggcccgacaatgtccaggccccatcgctgaagaggccatgtgtgggcgattagcttcgtgaattgcgaagggcttctcgagcgtggagaaaatttctgacacgcttcgcaggaccttgtgacccgatttgcggcgcagatcatggcgggccagtagaaaccttgacggattacctttacggctagggccctangccctgcgtgagagatgcaagtcccgctgtggac

SEQ ID NO: 3138 - DNA, 315 bp, Zea mays
agcttgaaggactgcttcggcatgagagcttcttaacgtgatgactcgttcggtccacggagtcgctttatccgagcgcaagttacttatcgcagaaggtgatgagtgaggtatccgtatcccggaggcgtaagagtccctcggctcggtcagccttggctgcttacgtgtacctcgtcgtttccaggatccgctttccgaagtagtcaagaagcacgaaagaaatcctgtctaaaagagatcctttttcgaggaaaaattcgacgcagagggggtcttcctccttttatcccccgagggagggtcgggctttgc

SEQ ID NO: 3139 - DNA, 467 bp, Zea mays
  unsure (1)..(467): unsure at all n locations
ntaaccncgcgagaccttcccgcgtctctttctaaccattgtaaatgcaatattgtatgtcatattttatgcatgtttaatctatttgttctcttgtatggtgtactgtttgtttcctaatttaaatgtatggatgtatgtatgtttgcactcgcatagagaacaatccggttgaagagcccaaagaactcgcaggagaagcccctgagcagcagtcggttggtggaggcaagtgtcccttggcctatctctgtcctatacattctttaattcacctcccgcattacacatttatacctaaggattgactagcttttgttatccatgtccttgtctacctatctgggttggattattattgcttagtcttatgctattgctccactctaatcaatgaacatgatgagaatgatcaatgatacgctcgtttcccttcttttattatgatgttatgcttgtggtcttca

SEQ ID NO: 3140 - DNA, 412 bp, Zea mays
ctccaatggatttgctacctttaccaacttctgaaatagtgaacttggatgctacacaacgttctgaattcattcttaagttacatgaaacaactaagttgcaaattgaaaagatgaatgaacaagtattgtattgctactaataaaggcaggaaggaaatgaaattggaacctggtgacttggtgtgggttcatttgaggtttcctgatttgaaaaagtctaaactcatgccacgtgctgctagtccttataaagttcttgcaaaaattaatgataatgcatatacacttgagttgcctccagattttggggttagtcccacctttaacattttagatttgaagccatatatgggtgacgaacatgagatcgagttgatgacgacttctattcaagagggggaggatgatg

SEQ ID NO: 3141 - DNA, 433 bp, Zea mays
tgtgagcaatacaagttcacaagggaaaaggctgcttcgtctgttcagccgaagcccatgctcttatgtgaggatatagcagagtagaaggtgctattgggatctcaattgtccgaagagcaagagaaaaccttgataaggtttttgttcaacaataaagatgtttttgcttggtcagctaatgatctttgtggagttaacacggatgttattgagcactcgctcaatgttgatccatccttcagacccacaaagtagaggcttctgaagatgtctgatgacaacgtcgaaggtgctcggaatgaagtgaaaagactcctcagtgccggagttattataaaggtaaaatactcacaatggttggctaacacttgtttggtgaagaaggccaatggtaaagggagaatgtgtatcgattttactgacctcaata

SEQ ID NO: 3142 - DNA, 468 bp, Zea mays
tgcaagctggtgaagattcttcatcccaacatgggctagtcagcgatgccagagccaacccatattagtcttagcaattaaccaagtgtcgagttcagctctattgaaatcaactaagtatagctgaccctctaacactcccttaaatgctattgaatcatcacttcttctaaagacagtaacacctacatcagtaaatagacagttgtagcccatattgcataattgagaaacggaaagcaaattgtaatctaaagaatctacaagaaaaacattggaaatagaatggtcaggtgatatagcaattttaccaagtcctttgaccaaaccttgatttccatccccgaatgtgatagctctttggggatcatcgtttttctcataggaggagaacattcttttctcccctgtcatgtgggttgtgcacccgctatcaatgatccaacttgagccccccggatgcataaa

SEQ ID NO: 3143 - DNA, 465 bp, Zea mays
tactcagctgaaagaacaagccacaaagagagaatgtttatttgtcgtggtttagtttaaaaaataaactagtggacgacaaatatttatgtagtatatgtttagatggtctccagcaacacgggtgggaccatacgtgtttatctggaccatcattgttaccgtggctcactggcatggagtgtttgaatgcattagatctgatagttagtggttaaaactagatgaagatatccaaatatcctagataatagtttaataattatctatttttaataaattaggtaatagttaactatatatttgttagctagttaatttcactattaattttgtaaccaattagatctagcgccgtcagggtgtgtaaaaaacgtgccgtctttagttaatgacgtggtatggtctcatgaatagtcgaaattgctactgattgctgttagaatctgccttcgtaaaattact

SEQ ID NO: 3144 - DNA, 326 bp, Zea mays
  unsure (1)..(326): unsure at all n locations
tctgagtcacctgcggcatgcaagcttaagtagatngagatgatagatctctttcttaattcatttctgatgcacatctttcctatctgtaaggtaagatggtatttaccttaatgtattccaagagtcttatagaagtgagatgttgtcctacagaacatcttttgaggagtacacctatataagtcagactgctggtcatagtctatggaacttgggtaatccctaaatactcatgaaaggcactaaagtgtgactcatangcttcaaaatagcggggatgccttttgcagcctaatatcagcaatggatttgaatgaatctca

SEQ ID NO: 3145 - DNA, 448 bp, Zea mays
tggttataaagatgttagtgcaatagaaccaagtggctatgtagcgagctcttgtaaatcacaataatcacagagaaagacaacacaagagacacagtggtttatcccattgtcagcgtttcgaccccggggggtccctataccgacgagtgaattgtcgtcgcgtgtcccagcctaaatgggtcggcgcgagacggagcacgaagggggagaaacgacaagggggaatcccgcggcctccgtgttgtcctgcgcccaggtcgggtgcgcttgcagtagggggttacaagcgtccgcgagggcgagagagagagagagagagactgttcgccagcccgttctcccgcgcggccaaccttttcgtacgagagccctggaccttccttttataggcgtaacgagagggcccacgtgtacaatggtgggtgtagcactgtgctaatgtgtc

SEQ ID NO: 3146 - DNA, 332 bp, Zea mays
  unsure (1)..(332): unsure at all n locations
agcttataacataatagntccttcttcacatatcttgaatgatattatgagaaatcaagaagctactggaaagattggaaaacgggctgcagagctcaatgnaatttgtattgattatgttcatagatcttcgattcagactcaagcgttggcagacttcattgctgactggacgccagggctcatgagaagaaacaataaaagccaaacatgacaggtttgcatggttttgaactcgacagacactgcggtgttaccttaagaaaacgatgcgaatattcatgcaaaatgtaacaactttttgctcgataagatgataagcattaacatca

SEQ ID NO: 3147 - DNA, 457 bp, Zea mays
  unsure (1)..(457): unsure at all n locations
tttaaggagaagaaggttgtgaatccttacattgctggttttatctagtcaatggccaaaacaaatgaagagaagattactaaggagatactggaaggcttgtctgaagatactagtgacagtgatagttatgatgcgaaaagcggcggcgaagattctgatgatcgaccctggaggccaagtcatacaatctttgggaaatcaacaattaaacagagtcatcttgacaatatcagaggaaggtactttcgggatatgtctattgtgagagctggtggagacaacaacgtccctgtccccaaggaaaatgaagttgtgatttaccgaagcttcttcaaagctgggcttcggttcccactgagcacgtttttggttgaagtgctgaaaatatatcagatntaccttcatcagataacccccgaagctattattatgaatgggatttttgtctgggctg

SEQ ID NO: 3148 - DNA, 116 bp, Zea mays
  unsure (1)..(116): unsure at all n locations
agcntccatcgatatcgccgtttactattgtttaccagctgcaaatcttcaatgaagtgtgctgaattcttcggcttgatcaccacatcatccacataagcttccacacgcttgcc

SEQ ID NO: 3149 - DNA, 327 bp, Zea mays
gtgtggaagaatagactaagcgcggaccatccgggttcttgttgtggaccgtccgcaacaccaggatgaccctctgacagaacaaatgcaaaaacccatgtctacactacggaccgtcccgagggaaagcaagcaccgtccgataccacacgcggaccgtccgggctcaagcgcggaccgtttggtaagtgaggaaaccaaaaacccgaaggtgaccggttcgataaaatgaattatatcgtcctcgcggaccgtccagggtgcacgaacgaaccattcgcgactgcctttatctgacatctgacgacacatttaatgcattataac

SEQ ID NO: 3150 - DNA, 265 bp, Zea mays
  unsure (1)..(265): unsure at all n locations
ctgcagctacccattgaagctgacgcttttctttgtctggncttgcttggctgccctttgcgacctttaaacgctgtcttgaatctcttgatgatgagagccatctcttcatcattaagtccgaccgcctcaatttgtgccaccttgctaggtagcgtctcattgcttcttgttgccttgagagcaagaggttgaggctcattgattggaccattcaatgcgtcggtcacatatcttgcttccttgatcatcattcgctcgctca

SEQ ID NO: 3151 - DNA, 457 bp, Zea mays
  unsure (1)..(457): unsure at all n locations
ctaccaaatggacgtgaagagtgccttcctcaatggtcctttctacgaagaggtctatgttgagcaacctcccgactttgaagacagtaagtaccctaaccatgtctataagctctctaaggcgctttatgggctcaagcaagccccaagagcatggtatgaatgccttagagatttccttattgctaatggcttcaaagtcggaaaggccgatcctacgctctttaccaaaacacttgagaatgatttgtttgtatgccaaatttatgttgatgatattatatttgggtctactaacgaatctacatgtgaagagtttagtaggatcatgacacaaaagttcgagatgtctatgatggtggagttgaagtacttcttgngatntcaagtgaagcaactccaagagggcaccttcattagccatacgaagtatactcaagacattctataacaagtt

SEQ ID NO: 3152 - DNA, 193 bp, Zea mays
tcgacccggatccttaagtcacctgcggcatgcaagcttgcttacttggtaagatgaccaatgtgtctcttacgggtttaccggagaggacgttagatttattggaactcatacatactgatgtgtgcggaccaatgagtacgacagctatggggaggattccaatactttataacccttcactgatgaattt

SEQ ID NO: 3153 - DNA, 484 bp, Zea mays
ctgaagccatggtaagtagcataggcaagtaaaatgtgtattgattctagcctagctacgggtgcataggtttcaccgaaatccaaaccttcgacttgtgagtatcccttggccacaagtcgtgctttgttccttgttgccacaccatgctcatcttgcttattgcggtaaacccacttggttcctacaacattttggttaggcgtggaactaaatgccatacctcgttcctagtgaagttgttgagctcctcttgcattgccaccacccaatccaaatcttgaagtgcttcctctaccctgtgtggctcaacagaggaaacaaaagagtaatgttcacaaaaatgagcaacacgagatcgggtagttacccccttttgaatatcgccgaggatggtgttcacggggtgatctcgttggattgcttggtggactcttgagtgtggcggtcttggaacttgttcatcttactcatcttgatcatg

SEQ ID NO: 3154 - DNA, 190 bp, Zea mays
agcttgctaccttatgtttgaaccagcatatgaatctgtcaacccatctcctgcaccctttctaagaagggcatcatattcctatggcagtggctccctcgatcgacgccagaactcacgaacaacacgctccatgtatgacatcaccctctcacaggttggccaacacatacagcatcgatacggcgcc

SEQ ID NO: 3155 - DNA, 94 bp, Zea mays
agcttaacatgcttgattcaagcgcattctttttatttgcaaggctatcaatagaggttttcaagctaattacttctatatctttactgcgaat

SEQ ID NO: 3156 - DNA, 315 bp, Zea mays
  unsure (1)..(315): unsure at all n locations
ccaacccccccttccccntcccctcccccccccccgccgcnatgtctccgagcggaccaagcaccacagcacccaaggagaccactttatgccacgcccaccgcaagaacgagtgagcgcagccagccgcacccgtgcgccacaccacaccacagacgcgccgcacgcaccggcacccacagcacactccccgccgcccaaaccacgcccgagaccccgcacccatccccccccgccccccaccccccccccccgccccccgcccccccacccgcccgcccccgccccccccaacccccccacccccccccaccc

SEQ ID NO: 3157 - DNA, 165 bp, Zea mays
agcttctaaagggagaacacgtgatttattatttaacgcgcaattcgaaaaagatagaccttgtgcagcatgtcaagcaggtaaacaggtgggaggagcacatcacagcaagaatgtgatgaccacattaagcgccctggagcttctacatatggacctcttcgg

SEQ ID NO: 3158 - DNA, 295 bp, Zea mays
  unsure (1)..(295): unsure at all n locations
gactgaggatgcaagcttggaggatttcatttctttgttctaagcggcgaagccacagccagcccatgctagtcttagcgattaagcatgcatctagactagccttctcttttgcacaatcaactaaacaaagcctgccatctagtacacccttaaaagctagcgaaccatcacattttctaaagacagacacatctacctttgtaaataaacaggtatatnccatattgcataactgactaacagatagtaaattatctccaagagactccactaaaaacacattagagataga

SEQ ID NO: 3159 - DNA, 396 bp, Zea mays
  unsure (1)..(396): unsure at all n locations
taatgtaagtacgaagatattatgcttcaaattgctatctatcagtaagagcagaattaagaacaccaaccatatttgtaaatttactagtaaaagctagacttacacaattgaacacttcaggagcctctggtcctgcatttgaaaggtacacgataaggcaaagaaaaaacagcaaatcgcttagagcagaacactagtgcattttgatattcttaaagacttaaaaccatgaggagaccagggaaaggaaaggtgacaataccatagtctatgaaacaagtatagcaaaatgatagaaagaaatgatgaagaacacgtggtttagtacctatctccacaacatgccatggtcgagcncaaccttctttcgggcacggcagacacctcccccac

SEQ ID NO: 3160 - DNA, 246 bp, Zea mays
agcttataacataagaatggaggcatgaattataccatatatcatgatagaaggggaattgtataaacatggagtctgctcaccactcctcaaatgtttatcaagaaccaaaggtatcaaattgatgaacgagatacccgcaggtctgtgtggatctcacatcggatctacgcccttgctgcgaaaaaaatttcatcaaggattttattggccgcaggcagctctggatgcaccagagctagctca

SEQ ID NO: 3161 - DNA, 184 bp, Zea mays
  unsure (1)..(184): unsure at all n locations
ntgtggcacgtgtgaagatgagaacaagaagttctgtggtatgcgggcatggctactgttctttcaaggtctatcatgccctgtgcctgaaagaaagccagattgcaagcgagaagcagaggaatctaaaatgctggtactgcccgtcttgcctgtgcagacgctgcttcaagaacaaggacga

SEQ ID NO: 3162 - DNA, 328 bp, Zea mays
  unsure (1)..(328): unsure at all n locations
agcttcggcatctttatttgcttcttctttctgatgccctggcatccaatcagcaatgaagtctgctaacgcctgggactgaattgaggacctatgcacatagtcaatactgaattcattaagctccgtagcccactttccaatccttccagtagtttctctgtttctcataatatccttcaaaggctgtgatgaaggaacaattatgtggtatgcttgaaaataatgccgaagcttcctggaggccattaacacagcatacaacaccttctccaattctgtatagnttttctttgataaacttagaactttagagacacagtatact

SEQ ID NO: 3163 - DNA, 234 bp, Zea mays
ctatcgaaatgcattccgttttcaacaatttcccaaatactatgatggagagaaaataactgactgccaatttatgactccaaatgaaaaccctctcatcgaagggcgcgtcctccccgctccccccgctctccccctctatatcccgcattcccacccccccccccccccctactccccaccgctccatcctcccctcccctccccctcccctctacgccgcccccgcccccc

SEQ ID NO: 3164 - DNA, 97 bp, Zea mays
  unsure (1)..(97): unsure at all n locations
agcttgatctgtggatcacttgagaaaggttgcttttgtataccttgtcnncttgcgactccacaacggngaattgcacctcggtaaacaaattatt

SEQ ID NO: 3165 - DNA, 361 bp, Zea mays
agcttcttgtagaagggaagatgagtacagctcgccgctcagcacgggcgcactgtttgccagtagactgatcagacgcgccatctgctggatgggcctgacaccgtctgccagcagatgcgacgcggcgcaccaaacgaccagcagtcaccgccgctcgacgtcgcctccccccgacccgaccaccccccgccccactcctcccgcacccacccccccccctccctgcaccacacgccccacccgtccccccttccctcccgccacacacccccacccaaccgcccccaccacccctccctacctccctcccacccccctctccatccccccccctctccatacccctctcgaacccccc

SEQ ID NO: 3166 - DNA, 330 bp, Zea mays
  unsure (1)..(330): unsure at all n locations
agcttgcgcaggntcttcatccgcacatgtgctaagcgttgatgccatagccagcccatgcaagtcttagccattaagcatgcatctagaccggcctcttcttttgcaaaatcaactaaataacagctcgcccgcctagtacacccttaaaagctagtgaaccatcacatcttctacagacagacacatgtacattcgcaacaaaacaattatatcccatttgacataattgactgacagatagcaaacttatatccaagactctccattaagaatacatttgatatagaacgctcacttcgaatctgcaacttacctaggccttttacc

SEQ ID NO: 3167 - DNA, 345 bp, Zea mays
  unsure (1)..(345): unsure at all n locations
gcttatctncaggtcctcttcaggtatgtccacagccatggatttctctggtagaataggcataacctcaacaccagcaaagcttgtctgcataaagtagcacatatagcagaaaactgaaaattagaaaggtacaatatctttaacttagacaaaatgttgataaatttacagaattagaacagtgcaatgcaaatattacctgccgaagccctttagcattaaatggtgattgacgaacaatcctgtgtgtccctttctcgccagagagatagccataagcatatcttccctctagttcaacagtcgctgattttatacccggctgctcaccaggcgatttct

SEQ ID NO: 3168 - DNA, 130 bp, Zea mays
cccccaaacaccaccccccgacccgcacacacagcccgcccgacagccccacgcgcaaaaccgcgcccccaccccccccccccccccccggcccgcccccccccgcccccccccccccccctcccccccc

SEQ ID NO: 3169 - DNA, 164 bp, Zea mays
  unsure (1)..(164): unsure at all n locations
agcttaggntgatctgctctaaccggacaatgctcttgcgttaaggagtaatagacatatatctagtgtgtacattgagcgcgggaagagataatgcaaagacaggaaatcgcaccttccggaccaagatgaacattactacattagccgtggccacacacgcg

SEQ ID NO: 3170 - DNA, 118 bp, Zea mays
caggagaaggagatgatatgaatctttgtgtgcttgttagagtcaagccaacgcagactaactcaggctatcattctacaacgatccacatactccccactgacccaagggtattttt

SEQ ID NO: 3171 - DNA, 248 bp, Zea mays
ggacgccctgccaccgacggaccgcaaaccagaccacggcacggaaaacggaaaccagacacgcaacccaacacgccgccagccccgcagccaccggcaaaccccagcaccccgccacccccacaaccccaaccccccccccccccacccccctccccccccccccccccgcccccccccacccccccccccccacacccccaccccccacaaccccgcaccccccccgcgccggcccccccgcaccc

SEQ ID NO: 3172 - DNA, 183 bp, Zea mays
  unsure (1)..(183): unsure at all n locations
tctaaatggttatgtgaggcgctttcttaggccttgctctgtttgcgncagantgcacccggaatcgttgcagctaatcacagtttatataaactagagaagcaatccggctatgaatcattccgacccactaatctggcacacatgaataacgccctaccgcacccccattacaaataactc

SEQ ID NO: 3173 - DNA, 176 bp, Zea mays
  unsure (1)..(176): unsure at all n locations
ntatcanatggatgtgaagagtgccttctctcaatggacctaatcaaggaagaggctatgntgagcaacctccaggctttgaagatagcgagtaacctaatcatgtctacaaactctctaaggcgctgtatgggctcaagcatgtcccacgaggatgttctgaccgcttcagacat

SEQ ID NO: 3174 - DNA, 59 bp, Zea mays
agctttatatggacgacgatgtcgtattctttatattggcctgaacctggagaaagata

SEQ ID NO: 3175 - DNA, 238 bp, Zea mays
  unsure (1)..(238): unsure at all n locations
ttagctgattcagaagtccctgctggattatncccagatttagntnttccatctcttgacacaaagngttgtcagaggtcttcaccataacacagtgacaggaagtcttacggctcagtgcatctgccaccacattggctttgcctgggtgataatggatctccagttcatagtccttaataagctcaagccatcgcctttgcctcatatttaattctgactgcgcgaagatggactc

SEQ ID NO: 3176 - DNA, 204 bp, Zea mays
  unsure (1)..(204): unsure at all n locations
agcttgcgacagggcccaagttcaccccacgacgatcttttcaccctctccgncgatattttcactcacctgcgccgctgngcgcacacttntcaaccgacacgcagaccacgacgcaagatcgtcggcggcgaagcgcactgaacctgatcttcttcagttaactggtacactgaacaaccatatgagacagactgacatgga

SEQ ID NO: 3177 - DNA, 250 bp, Zea mays
  unsure (1)..(250): unsure at all n locations
tcggaatatcacgacttcattctcctcgggagtcggacaagttntctctccttcgtcagccctcacaatagataaatcccgaaaatatctacccctcatattgacaagatggctttgtttaatgcttgattttccaaaaactgcatggcttggtcgccaaggtcgatcttcggaatcttcaccaccacttctcacatcatagctgtcactgccaccagccgctttagacacaccctctaaaatctcccta

SEQ ID NO: 3178 - DNA, 422 bp, Zea mays
  unsure (1)..(422): unsure at all n locations
agcttaggaatgagctaaacatcttagantttcgaaactttgattgaaacattgcacacattgctcatttatataccttcgatcatatctctttcatttggcacacacgcatactcctcactctctctgcggctcgcctctcacccacgcgcctctcacctccccccccaccccgccaccccctcccgcctccacccccctcgccccagacctcacccctccctcctcccccccccaccgcccacccacccccccccctaccccccgcccgcccccgctctcctcccccctctcccccccctcccttccccccctccccccctctcccccccctgcgcccccgccccccctcgtctcctccccccccccgtcccctcccccccccctcccacccccttctcccacccccccggcccgccccc

SEQ ID NO: 3179 - DNA, 323 bp, Zea mays
  unsure (1)..(323): unsure at all n locations
agcttcggcataacggtagaaaaggcgaattgatttgtatatgaaaagccaaattagaccttgaagaattactataaagctattgttaaatgtaatgggtattaatgtaattntgcatgggttgcgatccgtgcctgtaaataggtgaacagtattcccgtactgttcacgctgacttggcatttgcttttgcatcacacctgtattcacattccttcaagccgaaggtatatttgcaatttaccattatttacatgagtaatataagtagaagataaattaataataatatttacagagattatgctagctcttatattctg

SEQ ID NO: 3180 - DNA, 458 bp, Zea mays
  unsure (1)..(458): unsure at all n locations
tataaacactaagctntatccttcttacanatagcgctggacatccccaaggtgaagtgcttgggcgaataaatcctttatccagcaactcttgcaattgcttcttcaattctgccaactcagcgggtggcattcggtagggcctcttggaaattggggccgctcccgngtgcaactcgatggtgaattcaatatcccggtctgctggcattcctcggcatttatcaggaaagacatntgcatactcacagaccactgcgatcttttctagaggtagctccgccacacataaagcccactactgcatacacctcccactcacgcacctcacacacactctccctacccgagttcctcacctccacgccaccgcgtgctccacctagacccctcttccacgctcacccacatcgttctaacttctggacaccctccccccgcctcctcccgagcgtggg

SEQ ID NO: 3181 - DNA, 80 bp, Zea mays
agcttaaaggatactattcaactaaagtaagatgtatgttgataaaaggccaaggtatgaaaacttcctctccttcagtt

SEQ ID NO: 3182 - DNA, 71 bp, Zea mays
  unsure (1)..(71): unsure at all n locations
gctttgtcaacaatataaacacanaagagagaaggctgtttcggtagattagccattgtctatgctcctat

SEQ ID NO: 3183 - DNA, 197 bp, Zea mays
gagcactgaggatgcagcttatacatggacggaaaagcgcttcctcatgttcaatcaaggaagaggcctatgctgagcaacctcccggttttgaagacagcgagcatcctaaccatgtctataagctctctaaggcgctttatgggctcaagcacgccccaagagcatgcgatgaatgccctaaagattttcttacc

SEQ ID NO: 3184 - DNA, 174 bp, Zea mays
agcttcatgcaactgctgtcagatatgagaggtgaactgcgttcctctatctgacactatcttctttggcacaccatgaagacaaacgatccgagacatatacaattctgccaatacggcactgctatagttggtcttgacaggcatgaagtcgcctgattcgcccaaaacgcc

SEQ ID NO: 3185 - DNA, 336 bp, Zea mays
gaacagcctaacactcactcgccaagttaacgaacattaatgcctaagagcctggcgccgccggctaaaaagggccgcggtcaacacgggggacgcgaccccctagctcccccgcgcacccctcccaacacacccccctcacctgcccccaccctacccgcttcccgcacgcccccccgccacaccatccccgccccccacgcctcacccccgcccacaccctcccgccacacccctcccctctcccaccaccccgcaactccccccccccccccccctgccgtcccccccctcccccccgcggcggcgcgcgccccccccgcccccctcaccccc

SEQ ID NO: 3186 - DNA, 251 bp, Zea mays
  unsure (1)..(251): unsure at all n locations
tgtagaaccgacaattaccttgatgattcaataagntgttccacaccactctcacgcggaaacaaaggctgtccaaatagctcttgtaagacagtgcgaactgaaaggacccttgtgccttgcaaaccttttttacaatggcactaaaacattgagacaccttacctgtcctaggataagctcagcacgaacacatccagcacaccaaatgtcactcgctggccatcatcactcgccccaagcatcatctc

SEQ ID NO: 3187 - DNA, 122 bp, Zea mays
  unsure (1)..(122): unsure at all n locations
agcttcaggttatcgcgtaacacgagggaatttccatatttctgaaaacccgggaatcagaggcgtgctgagctcccaggctgcggaccatctgattggagtagtcagaccatccgngctgg

SEQ ID NO: 3188 - DNA, 115 bp, Zea mays
tgagactcgatggctcgagatgaagaatgatgaaaaagtttggaacacaatgaacggcctatctaggattagatcgccacaatatctggcactgaaacggtactcccaacttccc

SEQ ID NO: 3189 - DNA, 226 bp, Zea mays
agctctagcccggcattcttcagcttcattatcctgtacatattaaaaccaaatgagaaaggtaccaatttcacggagaacggaaaagtaacaagtataagtttttcaccggcttaaggcggctccgagcttcgtcaccagccattttttgcccggcgtttacacaaatctgggtatacacctctttcctatgcttcggcctacgcttgcgatgtcaattaaatct

SEQ ID NO: 3190 - DNA, 253 bp, Zea mays
taacaagcgtacaccaatctgtccgttgatagaccggctatatgtgtacccgactaacacaacaaatagaccagacaacgtacgcaacgccttcgtaagcactaccgaatgtgcgaaggcacataaccttattatacaagccattacatatgcacaagcgagggcatcacagcttacataggctcaatccttggaataattcttatctccctatagttaaacaacattatctccagctccttacccgaaaaag

SEQ ID NO: 3191 - DNA, 413 bp, Zea mays
  unsure (1)..(413): unsure at all n locations
agcttaaacatttaaccagcctcntatagctgttggtgtgcaaagagctaaaaattaggaagacaagagccgatggccccccgccgtgctaaatgcgctcgcggcgcgttcttatttatacgcccaatacgttgcaagcgcgagggccccacttgtcattgactatttctattctagcacagggaaggcgcttctcccccccttncctcccacactctcctccccgccaacctctccctcccctctcttccccctccctccccctgtctgctcctcgccacccctcccctccccttcctcccctccccctctctctccccccccctcacctcccctcgcccccccctccgcccccttcccctccctccctccccccccctttccgtccgcctcccgccccccgcgcccctccc

SEQ ID NO: 3192 - DNA, 303 bp, Zea mays
ggattgagcgcatgccagccggaagcacgtgcactcatatcacacagaaatatgactaggcaggccactgggctctaacatggactattggccgacgttaataacatgcgggagaagactgctagtatggctgactatcccccactggcaccttctcccaacctccaccacccccctcgccacctccaccctccccgccccctcgcctcaatctccccccaccccccccaccccctatcccctctccccctccccgccctccctccactcccctcctccgcgcccccccctccgccctccccc

SEQ ID NO: 3193 - DNA, 294 bp, Zea mays
aaaagggggggggggagaggggagagaggggggggggaaagggatatgggggggaggggagaggggggggggaggaagggaaggggaggaaggaagaaagggtaagattgagagtgagaattaatgaaaaatgggggaggggaggggggaatgggaaaaagagggaagggaaaaaggggaatgaggaaatggggggagagaggagagaggaggggaagagagagggagagaaggagggagggagaagaggaaggggggaaggaataaaagagaggagggggggggggggggagg

SEQ ID NO: 3194 - DNA, 405 bp, Zea mays
aaattattcaataagcggaacaacaaagctagcagctggctataatctgcagattctttagtagggcttaatctttggtttatgctcagactgagcgacccagctcgcatcaggctgcacctctaagcgcaccgaacaacccgcccaccctcacgcccttccgcccccctacccccgcaactctgcccaccaccctcccctcccacccctcgcccaccctcccgccccggcccctccaccccacccgcccctcctccactccaccccaccccaccctcccccctactcccctcccatcccgctcccctcccccccacctccccccacacccgcccccccccccccccgccgcctcccctcacgccccccctctctcccgccccgcccgctccccccccccccccc

SEQ ID NO: 3195 - DNA, 242 bp, Zea mays
  unsure (1)..(242): unsure at all n locations
agcttcatgcaactgccgccagaaatgagttgtgaactgcgttcctctgtctgacactatcttctttggcacaccatgcacacaacngatccgagacatatacaattctgccaatactgcactgctgcacctgcgctccacagctctgcaccgtcctccctctgctcccctccccatccccacctcctccccacccctcccgccgctccctctccccctctcaccctcctntctcccccccc

SEQ ID NO: 3196 - DNA, 53 bp, Zea mays
actgagtatgaactttataaataggcgtttttttttttcgctgaacagcgtcg

SEQ ID NO: 3197 - DNA, 401 bp, Zea mays
  unsure (1)..(401): unsure at all n locations
agctnttcttcttctaactggcatactntcttatatgcctaattctcncattcacctgaccacaagcagaagagtgcataatcccggatgatgcaacaaccaaaaatagctctaggctctgcttacacaagatgtcgagctaattcttgctataacttttggaaaagatcaaggcttagcgagaagaaaagggaacaggaaagggtaacgcctgaatttggtgagagaaaagaagaagaaaaaaaaatttacccccaaattcagggcgttacatttactcacaatctctctngcgcgtatacccttctctaccactatactactatatcaaatatgtctatatcacattctcattccttatgtactataacaaatcgagacgtactcgagtatttgagaca

SEQ ID NO: 3198 - DNA, 381 bp, Zea mays
  unsure (1)..(381): unsure at all n locations
tatcaactcagatgacnctacanagctgngaatacattatattgagtatattcttgtgggaattaaagactataatgttagtcgttagaaagtgtttgaaagttccgactgctgtcagggaagagatgtatatatgcttggcttacagaacagacacacaaaaacgattagaaaatcaaggagaagcatagcttgtgcttattattttactcatagattcataaaaagaagaggaacagaccgcttcatgataggatgatagatcttgtgtttgtaaaatttaagtcaaaactaaacaaaagggaaattaagaaaaggcagagatcctttagagagggaagtagatgatgtcgtggctgatcggaaaaatgagcctattac

SEQ ID NO: 3199 - DNA, 76 bp, Zea mays
agcttcgctcacacaccgaccatgagtccctgctgcgtccacgtcgctgatattgcccgtgctcgctcagatcgct

SEQ ID NO: 3200 - DNA, 175 bp, Zea mays
  unsure (1)..(175): unsure at all n locations
ctatgagactttatccaacatttccatttttcggcgncagagccaacccatgctagctttagcaatcaaccaagggtcgacctcagctctatcaaaatctacccagtatagctgaccgtctaacactccgtcacacgctattgaactatcacttctttctacgacagcgccccct

SEQ ID NO: 3201 - DNA, 90 bp, Zea mays
  unsure (1)..(90): unsure at all n locations
atgaaatgcataatgcatctttgacatcaatgccaactcaaagtctcagatangtcaggngattcttgcatccatattgggcaagtcttg

SEQ ID NO: 3202 - DNA, 165 bp, Zea mays
  unsure (1)..(165): unsure at all n locations
ttanatgaagatgagaaagaaccatcttattataagatttctttgaagaagaggaaagtaacatcttcgaagcatataagatctgaccaacagctcactccttcctcatactctgccactcgtcgttctctcccatctccgcctctcctcttttctctccctcct

SEQ ID NO: 3203 - DNA, 130 bp, Zea mays
  unsure (1)..(130): unsure at all n locations
gcttgtcattatattgctaactgttcgtatattgaaagcgatcaggaaaaggngaacaaaagggagaagaagaagcactacacgaaggcaaaggcggaggcgcatctaggcacggaacgggactcgcatt

SEQ ID NO: 3204 - DNA, 81 bp, Zea mays
tcgacatctttatttatctcttcttcgtgagcccctagcttccatgtagcgacgaaagctggtaacgcctggactgaattg

SEQ ID NO: 3205 - DNA, 249 bp, Zea mays
  unsure (1)..(249): unsure at all n locations
tctgaagggagagcacattntaggattaacacatgntcatttgagaaagacagaatttgcagcgcatgccaggcagggaagcaagttggagtccatcatccacacaaaaatgtcatgactaccgacaggccgctggagctactacacatggacttattcggcccgatcgcttacataagcatcggccggagtaagtattgcctttgaattgtggatgattattctcgcttcactcgcgcattcttttta

SEQ ID NO: 3206 - DNA, 433 bp, Zea mays
  unsure (1)..(433): unsure at all n locations
ctatananactcaagctgggaaggttctncaccctttatgtgctaagttgtgatgtctcagccaggccatgctagccgtaggagttaagcccgcatccacaccgcctccttccttttgaaaatcaactaaataaagcttgccgtctaatacacccttaaaagctagtgaaccatcacttcttctaaagacagacacatctacatctcgaaatagacagttatatcgcatattgcataattgactaaccgatagcaaactatattcaagtgactctactaaaaacacattacagacagagcgctcattagaaattgcaattttacctacaccctttaccttgcctcgattcccatcaccgaatatgatcgaatcttgtgaactcttaatcttgacgtacgaggtgaacatcttcttctatcccgcatatgggct

SEQ ID NO: 3207 - DNA, 430 bp, Zea mays
  unsure (1)..(430): unsure at all n locations
agcttatgaacccgtgaatcaaagactagtcaaactagttagttcgaacggctgtgagggtcatcaagcaccaaaatataagaaatggtttaagtccatttccatttcataatgtcctattaatagtctcggcctgtccattggcctgagcataatacaaagatgaattgagcaatttaattctatataattcagcaaactcatgtaccttctttgacaaaaaaagaagcccctggtctgtagtcaaagtctggggaataccgcatctatgaataatatgtttagttacaaactcaattacctcccagcgttcatgttcttcagagcaacgacttcagtccatttggtaaacgaattagtggcaacttacacgaaccgatgcncttttgatgacgactgatgactctcttctatacagcccatccccatc

SEQ ID NO: 3208 - DNA, 192 bp, Zea mays
tgtctgtcggaatcagacgaagcttcagtttgaagcctgcttcgtcagaacaaacctcggaagaagaaagtgttaaatttccacatattcataactaaatggccagagtgtgttctaccgccagggttgagcgtgagggaggcgaaactgaagcttcggagactgttcccatctccgaagccatgcaacgat

SEQ ID NO: 3209 - DNA, 245 bp, Zea mays
  unsure (1)..(245): unsure at all n locations
agcttatatatagcagggttagcgcatgttgattatgtgactgcaacctcaaatctatctctatcagcgctagnacgctctacagctcctcaagcacaacgtatgactgcatcccactgcgttaaccagcttttaccaaggatcaagcctatgctactttcctccaatattatagcgatagcccaaaagtttctccccataatggttatgcctatcttgtggctcacaaagtttgcttcgcgagg

SEQ ID NO: 3210 - DNA, 209 bp, Zea mays
ctgtatcttgcagagagactacactgactgaatctagtacttctggattaatggaaaggcttctcaccactttgctagacttgtccttctctggtggtatactggcatctgataaaataattcaatagcaagctaagcaacagtatacttcatacatggcagagctcaactttgacttctcagggcttaacaatgaacctatatgacat

SEQ ID NO: 3211 - DNA, 262 bp, Zea mays
agcttgagagagccagaaatacaaagcgtattttagataaactgggccaagccacaggcagaactgtttgaagacacagccttttcaatcaagcatagcagaaaagaagtcttcagctgctaaaaaacataaataaatctgcgtgaatacactactgatttcgcaagcccacctggcttccgtaaagagaaagaggcttattgtgggggacagatatcccccgcgtccactagaagaataaacgacctcaccacaggcccaa

SEQ ID NO: 3212 - DNA, 170 bp, Zea mays
gcttctaaagggagaacacgtgataggtctaactaatgttcatttcgaacaagattgaccttgtgcagcttgtcaagcagggaaacaggtgggaggctctcatcacaccacaaaatgtgatgacgacatcaagacccttggagatgctgcatatggtcctttctgtaccc

SEQ ID NO: 3213 - DNA, 469 bp, Zea mays
  unsure (1)..(469): unsure at all n locations
actaagaatactaagcttggaaggtcttatcccacacgtctaagcggngattccacaaccagcccatgctagncttagcaagtaagcatgcatctagaccggcctcttcttttgcaaaatcaactaagtagagcttgccgtctaatacacccttaaaagctagtgaaccatcacttcttctaaagacagacacatctacatttgtaaatagacagttatatctcatatgacataattgactaacagatagcaaattatatccaagactctccactaaaaacacattagagatagaatgctcattggagattgcaattttacctagcccttttaccttgcctctgattccatcaccgaatataattgaatcttgggaatccttattcttgacataggaggtgaacatcttcttctctcccgtcatatgcgttgcgcatccgctgtcgataatccagcttgaacccccgat

SEQ ID NO: 3214 - DNA, 311 bp, Zea mays
tagtgcaatggttggcaacaaggaagagttgaagggtgtattgctgaagaatttaaatataaagagatatcagccttcacgagtgtatactctgcagaagaacacaatgtaaatgcacctacattaaggtataatgttgatcaagctggtccatgcagtaaactcaaaattttgtcattcgagggaaagacagttggagcatcaactgaatatcacattggacgtgaagaaaagctggatgcattactctacatgtatgaaaacatgccagagacgactccatacttcacgtaagcatagacttccaaaat

SEQ ID NO: 3215 - DNA, 376 bp, Zea mays
  unsure (1)..(376): unsure at all n locations
agctngcatgacacaaacgcgaatgtcatatatctgactcatcagaacaattaacagaattcactattttattacacacatcatgcagtgataagcggaacaagcctctgcagtcatattctttaccaacaaaagcaccatgttttgacacaacacatttatttgactcaagaacaactttgtacccatctcgacatagcatagaagcactaacatgattcttcttgatagagagcacatgctgcacgctcttcaatggcaccgtctttccaaagtaaactctagaatgaccgtaccaacaccaagaatatgagcatgcgacccattttccattaacaaggcgctagacctcccgacctggtatgaggagaacata

SEQ ID NO: 3216 - DNA, 345 bp, Zea mays
  unsure (1)..(345): unsure at all n locations
acactatagaaactaagcttcgggcaacagcagagctccttccgtccatccagctccatgaggcagaggcgccaggggcttcggcggaagattcggngatcaacccagaagaatattntgcttattctgtggtgaaaacaaaggtcatactaccaggatgtgtcatgttaccattcagaagcaaaaagagatagccgaagctgccgcgcaacaggctcagccgaagcaggtcatgcacactgcttcgtatcattcgccctacatcccagaatatgtgggcaaccatcctgcactctctgctgcttccgcaagtcagccttcagcttcctggcaacagcccccgcc

SEQ ID NO: 3217 - DNA, 322 bp, Zea mays
  unsure (1)..(322): unsure at all n locations
agcttgagaaggntcttcactccaactatgttctaagaggcgacgccacagccagnccatgctagtcttagcaattaagcatgcatctagaccggcctcctcttttgcaaaatcaacctaacaaaagtttgccgtctaacacacccttaaaagctaatgaaccactcacttctctaaagacagacacatctacattngtgaatagacaattatatcccatattgcacaattgactaacagataacaaattatatccaagagactccactaaaaacacattagatatagagcgctcggatgacaaaccaattctacctaaccc

SEQ ID NO: 3218 - DNA, 245 bp, Zea mays
  unsure (1)..(245): unsure at all n locations
tctaaagggagaacacgngataggtctaaccaatggttctttcgtaanagatagaccttgcgcaacttgtcaagcaggtaaacaagtgggaggagcgcatcacaacaagaatgtgatgaccacatcaagacctctcgagctgctacatatggacctcttcgtacccgtcgcctatctaagcataggaggaagcaagtatggactagttattgttgatgacttttcccgcttcacttgcgtattct

SEQ ID NO: 3219 - DNA, 343 bp, Zea mays
  unsure (1)..(343): unsure at all n locations
tatacttataagtatcatgttcaaaacaaatgggttctttataaaggtaaaatgtgcaaccccaataaaaaccctaattgagccctataaacaaaattcaagagaaggggcaaaagagtatgaagaatatagaatcatggcttgggccaattataaacattaaagtatactaaataagcaacaacaaagattatggaagcttngccaaaacaatttaaataaaaccctaaacaagcctctcaagtgggatttcattagggaattctgaaattcagaattctgaatttcagaccttgagccaaagatcaagcgtgttcaccttgatccctaactcaaaatctaa

SEQ ID NO: 3220 - DNA, 219 bp, Zea mays
  unsure (1)..(219): unsure at all n locations
tctcgntcttcttctttagagagnttctttcccgaagctatgacagatgatatattcaatattttcttttaaagcttcgggagcaggcgtgggagctttctcaggcaaactctgtcctatagcctcttcatttgctgccttctcttcaaatcccgaaggttgtttatcagcaggctctgaaggcccaactccgacgctggcctggctcatcgcagcttc

SEQ ID NO: 3221 - DNA, 419 bp, Zea mays
  unsure (1)..(419): unsure at all n locations
tcgtcatctgaaaganatttttcctgaaggtaagagatgatctcagntctccaatcctcgctataaacaggagatatgttgagcactgcctcccccacaacgccccccgcccccccccctcnccctccccttcctcgcccctctccccccccctcccgctctctcccttcccccccccccctccctctcccccctcccgccccctcccatttcccatcaccccccaccttcggcccccctccattcctncccccctcccctccccccctccccccctccccccctccctcccccccccgtcctggccccctcacctcctccctcccccccccccccccccctcctccccccccccctccccccccccccctccctcctcccctctccctcccccccccccccccccccctccccccccc

SEQ ID NO: 3222 - DNA, 299 bp, Zea mays
  unsure (1)..(299): unsure at all n locations
agcttaaccttgaagcctggaatcagctatataataaaccagtccagccactcagtcaaaaggaccaaccgtgagaatcaaagcactggccctgagtcaaagtaaacagaaaaagaggacaaaagaagttattaccatacagagaggcaaggattcttggaaccatagaccacaaacatcagggtcattgaccncaccactcactcgtgcccccgcacgcgtgctcgcctctatgcacaccagcaccgccccacccctctcccctcactcaccccatctccgtcaccccccctcccccc

SEQ ID NO: 3223 - DNA, 418 bp, Zea mays
  unsure (1)..(418): unsure at all n locations
agcttnacacgcttgcccagtggctgttttttatgtctgaatgcntttctggtaagtcgctccagcgttctaaggccaaacgcgatggaggtatagcagaaagccccgaatgtcgtgatgacatgctgatcttcctnggcgtctctgcgcaagctcctctctgcacctctcgcttatccgcgcacacaccgcccccacattcgccactcccttccctccaccctcccctctccccctcgcgccccccctccccccaccccccactccttccctctccccccctcctcccccccccccgctcccttccccacccacctccccccccctcgcctcctcccccccccttcccccccctctcccccccccccacccacatcccccccatccccgcacacctctcccctctctcccccccccc

SEQ ID NO: 3224 - DNA, 438 bp, Zea mays
  unsure (1)..(438): unsure at all n locations
gcttctcctgacaagtgctgcacttaccgtgagtgcgaatctgcacatatatatattaaaggagccccctgcataggtggaggtagtgctgttagatctattaaatactgcttcagctcttcgaagccttctgctgnattgccctccatcgccccacntccgctgacttcagcacttcccgccccgctgacctcacctgccctccccctccttcccccctacgccctccccccaccttccacccccccacaccctcccctccctatccctcccctcccgcccctcccccctccgcccccactcccccctccctcccccctctctgtcacccccccatcccctctccccccctcctccaccccccccctcccccactcccccccctccccctcccccaccccccattcccccttctcccccccgcgcctccccatcccc

SEQ ID NO: 3225 - DNA, 360 bp, Zea mays
  unsure (1)..(360): unsure at all n locations
cgctcttnctatacaagagccgcactcactgtatagtgcgaacntgccacatacaatagtaatggagcccctggcgcaggcggagtctaacgtcgttaaactaaccaagtattgcttcagctcgtcgaaggctctttgntgagctggaccccattgaaaaacttcggctgactttagtatttcaaagaatggcaagtctttttctgctgatctagatataaatctattcaatgatgccaatcttcctgtcagtcggtgggcccccttattcgtacttggtggctccatccaaaggatagcttcaatcttgcttggattaccctcaatcctcttccgtgaaactagacagccaaggaactt

SEQ ID NO: 3226 - DNA, 457 bp, Zea mays
  unsure (1)..(457): unsure at all n locations
aaggntcttcatccccacatgtgctaagcggcgnttccttaaccagcccatgctattcttagcaattaagcatgcatctagaccggcctcctcttttgcaaaatcaactaaataaaggttggcgtctaatacacccttaaaagctaatgaaccatcacttcttctaaagacagacacatctatacttgaaatagacaattatatctcatattacataattgactaacagatagtaaattatatccaagagactcaactaaaaacacattagagatagagtgctcatttgatattgcaatcttgcctaaacctttcaccttgccttggntcccatcaccgaatatgattgaatcttgcgaatccttattcttgacgtaggaggtgaacatcttcttctcccccgtcatatggtttgtgcatccgctgtcgataatccagcttggaacccccgatgcat

SEQ ID NO: 3227 - DNA, 142 bp, Zea mays
agcttatactcggctgcgatgctagagttcgctaatagcaattggagagcgtacttgaggcgttcgcctctcggtgcagtgaacagaatctctgcttctgcctcctgcagcttcagcgcgccatcaacatacacctgccata

SEQ ID NO: 3228 - DNA, 74 bp, Zea mays
agcttgcttcccaggagcagctggttgtaatggtatctcaaactagaaaggttagtctgtaactgttatcttcg

SEQ ID NO: 3229 - DNA, 183 bp, Zea mays
ttgaagccatggtaagtagcataggctaataatattcgaattgactcaagccttgctacgggtgcataggtttcgtcgaaagccaaaccttcgacttgcgaatatcccttggccacaaggcgagctcttgtcctcgtcacaaccccacgccatctcgctcgttgcggccccccacccgccccc

SEQ ID NO: 3230 - DNA, 158 bp, Zea mays
  unsure (1)..(158): unsure at all n locations
agcttctaactgaaactctcttggtttcattgtacgcctgaaaccaaaatgctactcttgcactatgttttcttgaaactctcgcgtctgtcagacaagtcattttcatgttgccctacagaacggcttgcacttgcaactatggctctgtntgccct

SEQ ID NO: 3231 - DNA, 133 bp, Zea mays
agcttgcggcggcggcctttattttcaggtgtgtactcatagggataaacaagccaagattgcgtaacaaagtggcaactaaacaggcagatatcaaaagtcttcaaagaacggctcattcaaagagggcact

SEQ ID NO: 3232 - DNA, 249 bp, Zea mays
  unsure (1)..(249): unsure at all n locations
tctaaagggagaacacgcgataggtgtaaccaatgctctatttcgaanaagatagaccttgtgcagcttgtcaagcagggaaacaggtggcagactctaatcacaccaaatatgtgatgacaacatcaagacccctggagctgctacatatggacctcttcggacccgccgctatctgagcataggacgaacgacgcttgcctactcccagcttcgacccttcccctacaccttcctgcgcgttctccc

SEQ ID NO: 3233 - DNA, 105 bp, Zea mays
tgtaacataatcttctgagcacgtttatcatggggttgatgctcctatcacggcttctagaagaaagcaaagaactccatgcacgagcacctacacgcatgcgat

SEQ ID NO: 3234 - DNA, 221 bp, Zea mays
agctttaagattgcaccatttgaagcactgtatggacgacagcgccggacacctttaaattggtcagaacccgaagaaagatgggttttcaggcccgacatggttaaagagacggaagaaacagtccaacggatcatacacaacttgcaagaggcataagctcggcacaagaattatgcggataagcgacgccaacctttggtctcttcagctaacgatca

SEQ ID NO: 3235 - DNA, 245 bp, Zea mays
  unsure (1)..(245): unsure at all n locations
ttgtgtccccnctccccgtcaccccccttcccgcttcgcacctaccctctgctttctccacttctccgcttttaccctcctccagcctcaacccacccctcaccccccactcttgtcttcccatctcccccccactctccctcccccctctcctgccccctactaccctcctcctcgcctcctcccctccccttccttcccccccctctccccctccctccttctctcctcctctcccctcctcc

SEQ ID NO: 3236 - DNA, 190 bp, Zea mays
  unsure (1)..(190): unsure at all n locations
agcttgaggctgcgcatagattatccgcctcttaacgcggcaactatcaagaacacgtatcatttgcctcgcatcgacgctctttctgaccagntggtcggcgccaaggtattctccaagatagaccttngctctggctaccatcagaccaagataccagcaagccctattccgaacacgctactctcaa

SEQ ID NO: 3237 - DNA, 74 bp, Zea mays
  unsure (1)..(74): unsure at all n locations
tgagaaaatctttccacctgccttctttgatgtcaatggtcacttgagtgncccatcttccgatgaggcaatgc

SEQ ID NO: 3238 - DNA, 311 bp, Zea mays
  unsure (1)..(311): unsure at all n locations
gcacgcaagctccaacggcgcactcagctcgagcattatattctcgcaccncacccttagacncggcaacgccccaacgcacaacacgcgataacggcgcagcgcagtgaaaccacggcggcatgaccgaactactaagtacaagcaacctgacgggcgagaggcgcgaacgaaatcaagcactcctactccantcaaagcacggaccccatgaccttctcgaatctgcaaacctccctactattttttaactcacaacgatcgaccgatatggatggatccaagtcgataccgactagatctctagggcc

SEQ ID NO: 3239 - DNA, 264 bp, Zea mays
gcttcggctatggttaaacttttcagcagcacaacagtgcaatgttaatgaatgttgtggtaacttcacacgtacccgtctggttatatagtgctgcaagtgcgaaggcgaatcgccaagtcgcccataccccgccaacagacacccgcactcactgaacggtggaccacggtgcgtggcagatgaatcgccagatcgccgggacccgctgcatgatggagccacctcgcgctcggattatttaaaccgtttcttagcaacaac

SEQ ID NO: 3240 - DNA, 55 bp, Zea mays
aggatgcaagttgggctatggagaagaaaattttgtagcttggctgcaaactgtt

SEQ ID NO: 3241 - DNA, 176 bp, Zea mays
taaaaaccctaattgagccctataaacaaaactcaagagaaggggcaaaagagtatgaagaatatagaatcatggcttgggccaattataaacattaaagtatactaaataagcaacaacaaagattatggaagcttggtcaaaacaatttaaataaaaccctaaacaagcctctc

SEQ ID NO: 3242 - DNA, 160 bp, Zea mays
agcttggacagtgctctgcgaaggttcttgtcgaaccttcgctgcaggagaagccgcggtcctagtggcactttcacaacgccaccacatgctatgcagccaagcttgacttcagctgcacaaataatattgctgagtacaaagcacttctgttggcgct

SEQ ID NO: 3243 - DNA, 388 bp, Zea mays
  unsure (1)..(388): unsure at all n locations
tagcacanagacagtgatggagaatgtaactcgacctaattgtgaaaagactgctcagtcctcgatagattacctttggctaacagcaaaggtcagggacataaatgtaattctacccaggctatgtcctgtgcctataaatagatgaacagtaacaccatactgttcacgttgacctgtaaccactggcacatcattctccgacatccacctctttccacactctccctctctctccccccccatcggcgaccccgccgtctccccctcccccccccctccccacccctcccctcacacccctcccctcccccgccgcccccaccatacccaactccatcctcccttcctccccactcagcaccccgtccccgaccccccccctccc

SEQ ID NO: 3244 - DNA, 240 bp, Zea mays
agcttcggtatggtaaacatttggattataatagtgcaatagcaatgaatgctgtggtaacttcacacctacctgtttgtttatatagtgctgcaggtaagaaggtgacatcgtcggatttttacacaaggcaaacagctgctcgcacccgctgcgcggtgggccgcacagaccaaaatagcgaacctgcatggtgggaccgctacgcgctcggaaactgtatcgcttctcgacaacgag

SEQ ID NO: 3245 - DNA, 418 bp, Zea mays
  unsure (1)..(418): unsure at all n locations
tggtcttcttgtaactctagacgaagctccaacctgagtgctgagagtcaacacccttatcaattctctggntcttgcacttgcgcttcctgtcaacaacacacagccacttgtacttcttcagattcagcagctctcagtgaatttctcctggaacgcctcanagggacaactgcgcccacctctacagaaccggcttgagcagacttcccccttgtcttggcaacaacaggcgaacagggggctcggaacctcagctcacagtcttgagcctcancacatagcgagctcttcgcggctgccttacacggactccacctacccatctcaccctagccaccccacgtctacatccggcctaccactctccccgcccttctcccaccctctctccctcccgtcctcacccacctgtcct

SEQ ID NO: 3246 - DNA, 443 bp, Zea mays
  unsure (1)..(443): unsure at all n locations
agcatgcagcttaggctatagagcatattatttgcatttgcatgaggactaacatcgcttcaaaatttcttgagttaacagccctctcacaagcgagcttgaaaattgcatagtcttggatgcgcggaccgctcggnccttgcgggcgcaccgtccgcgcatcccacaccaccgctcccgcctcccctccctccgcgcgcgctccaccggtgcccccgctcttccccccctctccgccccctccgcgccccacctctcgccctcccccctaacccctctccctttcccctcctctccccccacccgccccctctccccccccccccccgtctccccgctccaccctccccgccccctcctcccaccccccccctcgcacccctccctcccacccaccctccctcccctcccctccccggccgcgcccccccccccaccccccc

SEQ ID NO: 3247 - DNA, 258 bp, Zea mays
  unsure (1)..(258): unsure at all n locations
tcattaacaacctttacagcattggtataatcgctaacagagcacagcangagaagaagattctcgtagcaagacatgcttgggattataccactatccctttgcttcctaaagaacatcattggcttgtcanggcttctaacttcacataggccagatataaatacattatataaccttgcacaaggtggtgtctttcgacgaacgatggtataaaattaagtgcactcccgagatttttgcccttacataactaat

SEQ ID NO: 3248 - DNA, 433 bp, Zea mays
  unsure (1)..(433): unsure at all n locations
cttaatttatgtaggatgactatactgagaccgatgcttaataagcatgacgccgaagctgatgccccatgaagatcaatangagtaaactgtagacagacttaagaaacttttgagataacttttgtaaatatgactaaacttggtttaatgaattctggtcataccttgtaatatgctcttacccttgcattaatggattacaggtgctttgatgtggacgaaattatacttttgagccgaaggcgaaaaaaaacaccttccctttcttttgtccacatcagccataaaaaacttttcgaactcttttttttacccctcctctttttacccttccttctttttacacctccttttttgagcttttttcgacacacaagacaaagacagtttcttttgcgaaccccctatgctatatgatggatctatatat

SEQ ID NO: 3249 - DNA, 334 bp, Zea mays
  unsure (1)..(334): unsure at all n locations
tttataacacacgctcgagtgccacattgtgcgcagntgtctttgatgtggagaaactggagacggcgattcgtcgtcttgctcacgttccttcggcaataaaatgcacgtgcacgaatgccacattgttcgtagttttgaacgttcatgtgcacgagtacaatcagtttacactgatggtactgtttcctcgatctggatctgctcggctgcctatttttntctacgttggctgtagcacagctgtccttgcagcagcacaaacagcgcctgattaccggcagtcaatttctactttcgccgagcacaaagtgcacacctaaacaagcaccct

SEQ ID NO: 3250 - DNA, 317 bp, Zea mays
  unsure (1)..(317): unsure at all n locations
agcaatggtgccgctagcagagaatcaacctactcgtcattgatgaggcaccgtctccccacatttgatgcaaatgccatgccccccatctgagtctctatcagacttaaatgtgtcttcatcagcaggtggcccaattcttacgaaccaacctgctgcaggtgtcccatatgtgtctgtagaaactaccaagagctccatgacatctaaacgtctccagtctcatccttagagnttgagtcctcctgaacacctgtcatcctcanatatgatacagctaccatgacagccatcatttgcaacatcagaaattcctc

SEQ ID NO: 3251 - DNA, 376 bp, Zea mays
  unsure (1)..(376): unsure at all n locations
ttcctgttatgcgtngcacggtgcacctcttagtttctgatccgatttgagtctgaaaatatgggcatattaacacgaagaatgtctgaacattgtattaaacatgccttgtataaatggtgcgctggttcttgactcgcgaggaaatggctcactgaaggtgactttaaacttctaactgcacagactataaccttgttttatgtttgctgggattcataattggtgtaaccattcctgatgataactgtatcctttccgtgttgtcggcttgggggcttcttgtttggaagcttttgagttgatacgatttacccgccactcgtccanttgtggacttgatggtcatctcctggctttatacccgttgagatta

SEQ ID NO: 3252 - DNA, 160 bp, Zea mays
tcttatggtgtacctgaagacggcaccactgaatcaatctgctcttacataaatacttttgacgttgacggcaaaatttgcaatttccaacttttaaagttgtgtcccatcagacaaccggatctttctaggctccacacaagggaaccaccctgctaca

SEQ ID NO: 3253 - DNA, 389 bp, Zea mays
tcaaccgaagcctatgctcttatgtgaggacatatcacagcagaacgtgctgataggctctcaattatccgaagagcaggagaaaaccttgataatggttttgttcaacaataaagatgtttttgcatggtcagctaatgatctctgcggagtaaataaggatgttattgaacactcgctcaatgttgatccatctttcacagccagacagcataggcttcggataatgtcagatgataaagccgaatgtgctcgtaacgaagtcaaaagactcctcagtgcaggagtcatcacagaagtatagtacccagaatggctagctaacactgttatggaaaaaaggccaatggcaagtggcgaatgtgtatcgattttacagacctcaacaa

SEQ ID NO: 3254 - DNA, 291 bp, Zea mays
acactcctcttgaaatgttttcaaaaagagagccgcttagcacaacacgaaattcaagggggttaattccgccgcggtaaaaaactagataggtcctgactcaggaattctctgcggaataacaaactccatttcaactaaaagggtctcgggataaaacagctgcgacgttgcgcaaacttaaggcaaagagcttgatattttgaacaatttattgcaaccatgacaaccgattttgaggctatcttaccccctaacctaaaaagctgaacaaggggatgcctaccacct

SEQ ID NO: 3255 - DNA, 509 bp, Zea mays
  unsure (1)..(509): unsure at all n locations
gtcacctgcggcatgcaagcttttgaatacttgngtatgtgtggctccctctatatgtgtgcatatgaattgaacttcaatattgagttaatatgtcaatggtgcaacacatttggagaaggtgaaaaatccacacattacacaattattcgaggggtgcaaacatagtatcctataaggagacatgatgcaagtgatagtacatgcacatagttcatcacatatcatcaaagagtagcaaatgacataataaaacatcataaatgttctaatagatattacaatagagatgagcataatcaaattgttcatggcccacaactaacatacatcataagttgttcgaatcatcaccacataaaaagtattacataccaaggttcaatacataaatagataaaatatataataaaaaggtcagccccaatggccatagaaacaccatcttncanagcttcaactctagggtcttcaagaactcaatcataatcttcttctcaacatacttc

SEQ ID NO: 3256 - DNA, 136 bp, Zea mays
gctaatacacccttaatagctagggaaccatcacttcttctacagacagacacatctacatttggtaaaagacagggataccccatgtcgcataaatgactaacacatagcagatcataaccaagagactctacta

SEQ ID NO: 3257 - DNA, 370 bp, Zea mays
  unsure (1)..(370): unsure at all n locations
gcttctaaaggggagaacacatttaggattaacanatgttcattttgagaaagacagggattgtagcgcatgccaagcanggaagcaagttggtgctcatcatccacacaagaacatcatgactagtgacaggccactggagctcctacacatggacctattcggcccgatcgcttacataagcatcggcgggagtaagtactggctaggtattgtggatgattattctcgcttcacttaggtgttctttnttgcaggaaaaatctcatacccaagagaccttanaaggattcttgagacgggctcanaatgagttcggcttaaggatcaagaaaattagaagcgacaacgggacggagttcaagaactc

SEQ ID NO: 3258 - DNA, 364 bp, Zea mays
gacgtgaagagtgtcttactcaatggaccaattattgaagagggctatgttgagcaacctcccggctttaaagatagtgagtatcctaaccatgtgtataaactctctaaggagctatatgggctcaagcaagccccaagagcatggtatgaatgccttaaagatttccttatcactaatggattcaaagtcagaaaagcggatcctacactctataccaaaacacttgagaatgatttgtttgtatgccaaatttatgttgatgatattatatgtgggtctactaacgaatgtacatgtgaagagtttagtaggatcatgacacataaattcgagatgtcaatgatggagagctgaaatactt

SEQ ID NO: 3259 - DNA, 475 bp, Zea mays
  unsure (1)..(475): unsure at all n locations
aagggagaacacgtgatacgtttgactaacgtgcaattctaataagatagactttgtgcagcttgncaagcacgtcaacaagtgggaggagtacatcacagcaagaatgtgatgaccacttcaagacctctggagctgctgcatatggacctcttcggacccgtcgcctatctgagcataggaggaagtaagtatggtctagttattgttgatgactattcccgcttcacttgggtgttctttttgcaggataagtctgaaacccacaggaccctcaagcgcttcctcaggagagctcacaatgagtttgagctcaaggtgaagaagataacgagcgacaacgggtccgagttcaagaaccttcaagtggaggagtttcttgatgaggaagggatcaagcatgagttctccgctccctacacaccacaacaaaatggtgtggtagagaggaagaacatgacgctcattgatattg

SEQ ID NO: 3260 - DNA, 177 bp, Zea mays
ggacgaaacaactaaggcactcagcaaaacaacaaggggaaggtgcaataatataataatgagagattaactaacgaaaactgaactaattaccacaccagtactacaccatagacaaggggaaggagacacgcatacaacttgaacgggggcgaagcaaatacacagtgcgaaaga

SEQ ID NO: 3261 - DNA, 275 bp, Zea mays
gcacatgaattagagagttatgaagtttagtgatccttctagctatcatatatatctgctttctcgactctattagtgttgaactctgggctcacgacccaacaatgtaactaccatttaccattacctgcttttgctggaatctgtggtaatgaaattcaagtggggatagttcatctccttcggtgatctaaaaaaatacaaatgcactactatatgtagcattgtagctacatgtattaccaattaccatggctctctagattctagaatgc

SEQ ID NO: 3262 - DNA, 333 bp, Zea mays
  unsure (1)..(333): unsure at all n locations
ctgacttgngggtccgnctggatgtgcagcgcacaccgtattatttctgttcattgtacggtgcgccagaatgggcgcgcctgccttctgcacgcgcaaagcgcgcattaattgcgccgcatgtagccgttggcgcgatgtaaccgttgcttctgagttgcaccggacagtccgggtccaccggacatgtccggtgaatatagcggactatccgttggaactttcagaactggcgagtgctgggacgctcatcttgggcaccaaacactgtcggggacaccggacagtcgggtacacggacgcccggtgaattatacgcagtgctccaaaatt

SEQ ID NO: 3263 - DNA, 350 bp, Zea mays
  unsure (1)..(350): unsure at all n locations
gcgttgtctgctcttttataggaacaacggacttggtacaagaacatatcgtcttcagggtgtggccgctcgctgagaaaagggaaatgccacaagaaaccataaaagatgccgaagaaggtgagcttgtgagactgaagtacacctttcagattggagataaatttattgagccacatgatgagtggttgaaaagcattgacgatttaagtgatgagctactcgggacctactcgaaggctgaagataatgcaatgtcagcagccttcggaggccgaaaaaagaagagactgaatcnggtgtttgatgcaattgggttcttttaccctgactatcgttatcccactcga

SEQ ID NO: 3264 - DNA, 314 bp, Zea mays
acaaaaataggagaattcattctagtaagatgatgattacaatctgctatcctgcttcaatggtattcttgtagaatctttagattacaatttgccttctcgttctcaattatgcaaaaagggctacaactgtctcttacagatttaggtggtactggctttagaagaagagatcattcacgaacatctaagggagtattagagggtcagctatacttaattgatttaatagagccgaactcgatactgttaattgctaaactaaatggttgctctgcatcgcactacctatgtggataaaatctccagctcaa

SEQ ID NO: 3265 - DNA, 215 bp, Zea mays
  unsure (1)..(215): unsure at all n locations
tgtccaagcaatagttctcttcatgacccccctgattgatgtggaaacactcgcgactcgggtcgaaacccgtcgcctccatgctgaggccatcgtcagagcanccttagaggcagtagtcacacgccgacatgaagactcgcatggcactaagatcactgagtactgagaaataccaaccgaagaccgagtcgccgacttcctcggaacccacg

SEQ ID NO: 3266 - DNA, 287 bp, Zea mays
  unsure (1)..(287): unsure at all n locations
gactatgacaagcacatggcgtaaataaagctcttggatttatatcaagcagtggtctttgcacgcccttgtgctttcctttcatgttagatccattatcataactttgaccccgaacatcttcaatatttatgccacgggacttaatggaatcaagtaatgaattaaaaagtccctcaccggatgtatcatctaccttcattaaacccacaaaatacttctcaactttatgagtagacatatntacacatcagatcaacaaactcatttggtcttgatgactaaca

SEQ ID NO: 3267 - DNA, 313 bp, Zea mays
  unsure (1)..(313): unsure at all n locations
gttgcgcatgtcaagcatgaaagcatgttggagttcaccattcacataagaacataatgacgacggacaggccgctcgagctactccacatggatctattttgcccgatcgcttacataagcatcgacgggagtaagtactggctagntattgtggatgattattctcgcttcacttgggtgctctttttgcaggaaaatcactaacccaacataaattaaagggattcttaagacgggctcataatgagttcggattaaggatcaataagataagatgccgatatgggacggagttcaagaaatctcaaatt

SEQ ID NO: 3268 - DNA, 443 bp, Zea mays
  unsure (1)..(443): unsure at all n locations
agcttcgtaaaataatctccgaagctatacctctaatatcaatattggttctncctggaacttggcatgatttgcccctcttcaaagcattttccgaagatcgataacatgcccncttcttgtgccacatgcagcatgatgtatgatgattatgctatgcaaaatgatgtgatgatgttatgttatgcaaaatgatattttgtgccgaagatacacacattcctgcaatggggcacaatcttttgtatcaatactgactttntcattataagcctcccttaggagcttcttcgccttttacttcagcggaatcagcgtttatttttcgctgtaagttctgcatccccttatgaacgtctttggaacttcttcgccttttacttaggcggtataagctctgcattcccttangaacgtctttggagcttcttcgccttttactt

SEQ ID NO: 3269 - DNA, 399 bp, Zea mays
  unsure (1)..(399): unsure at all n locations
tctcttctcctacacttcacaacaaaatggtgtagtggagaggaagaatctaactctattggacatggcgagaaccatgcttgatgaatacaagacaccggatcggttttgggccgaagcggtcaacaccgcctgctacgccattcaccggttatatttacaccgaatcctcaagaagacattctatgaactcctaaccggtaaaaagcccaatatttcatattttagagtttttggtagcaaatgttttattcttgttaaaggaggtagaaaatctaaatttgcttcctaaactgtagaagggcttttactangatatgactcaaacacaatggcatatagagtctctaacaagtcctcacgacttgntgaagtttcttgtgacgttgtgtttgatga

SEQ ID NO: 3270 - DNA, 500 bp, Zea mays
  unsure (1)..(500): unsure at all n locations
aactngggggcacttatcatcttggacaagaatggagttattcttatacctctcttgaacccctatctcctacacaccatggttgaaggggagagattaatccaaggtgccaatcatgaccaaacctttggcataatagtaagtgacttattaatctacatatattgagaggagacattgctaaaagaccccttaagaaacctctaatccattccttaagtagagaaagagctagagctctctaattctctctaagtcaaaatctacacctaatctaaagatccaccatcgtcacctcgaagatgacactaataccacctaaggtctataccaataatgtggcataccacctaacgcaccctctgtagaaagttgagaccgagcccttgacacttgacatgtactggcatcacttttgttgcgcagcgcgcacggaggacaaacctattttggtgtccgcatattctctgacctagggcttatcttccatggaacaacat

SEQ ID NO: 3271 - DNA, 414 bp, Zea mays
  unsure (1)..(414): unsure at all n locations
tggatacagntcgaatgctggaagcttctttctaacgattntgtgttttgaatattcccagaggcgaaaatgagcatacagacctgttagccaagtcaactgcacatgggctccctttaccttcggatgtattttttgagacaataaaagcacatacagctgaacttatggagagagcaatgctcacaatatcttctgtacatagtgaagattggaggactaaaattatatctttcctccaaggtaattgtctttcggatgatgaagcttataataagaggatggaagctagaacaagaccatatgtgataatttaacgggaattatattagcatggagtctgttctccactcctcaagtggttatccagaaccgaaggtatagagataatgaatgagatacttgcagggttat

SEQ ID NO: 3272 - DNA, 351 bp, Zea mays
  unsure (1)..(351): unsure at all n locations
tcccagtgtttttgtatctgaagttcttagtatatcanagaagaactatacagaattagagaaggtgttatatgctgttttgatggcatccaggaagcttcggcattactttcaagcatacaatgttattgttccttcttcacaagccgtgaaggatattatgaggaatagagaagctactgtgcggattggaaaatgggctgcagagctcaatgaattttgcattgattatgtgcatagatcttcgatccagtcccaagcgttggcagatattatcgccgattggacgccacgggcttatgatgaagaaacacataaagatgccgaagtatggacaatgttttgcgatgg

SEQ ID NO: 3273 - DNA, 400 bp, Zea mays
  unsure (1)..(400): unsure at all n locations
tggcagcttgtcagcagggaaacaagtgggaggagcgcatcacagcaagaatgtgatgaccacttcaagacccctggagctgctgcatatggacctcttcggacctgtcggctatctgagcatatgagggagtaagtatgggttagntattgttgatgacttttcccgcttcacttgggtgttctttntgcaggataagtctgaaacccaagggaccctcaagcgcttgctcaggagagctcaaaatgagtttgagctcaaggtgaagaagataaggagcgacaatgggtccgaattcaagaaccttcaagcggaggaatttcttgaggaggaaggngtcaagcacgagttctccgcaccctacacaccacagcaaaatggtgtggtagagaggaagaac

SEQ ID NO: 3274 - DNA, 460 bp, Zea mays
  unsure (1)..(460): unsure at all n locations
agcttatctctgacagatttaattgatatccctagcctagctcggagnatagggaacagattcataactcacatatgggtaaaaggcgggcgcanaatgcgtggcgatgaagctcgaagccaccttaagccggtaaaaatttatgcccgttattttaccttctctttgaagtatgcacttcccgcataccgttttaatatgtacagggtgatgatgctgaagaaacatgagccgaagcttgaccggtagtccgatgatgtcaaagctgaagtcgctgctagaanaattctagagaaaaatcttgtaatatcattgtaaaaaatctttgtaattaagaatcggcataatttgtaatatatctttacctttttgtgcatgtatgaaactgctttgctgtggacgaaactagcattctntgagccgagggcgaagaacaccttntcttcttttcgtacacaac

SEQ ID NO: 3275 - DNA, 433 bp, Zea mays
  unsure (1)..(433): unsure at all n locations
tctaaagggagaacatgtgatatgtctaactaacgtgcatttcatataagatagaccttgtgtagcttgtcaggcaaggaaataagtgggaagctctcatcacaccaaaaatgtgatgaccacatcaagacccttggagatgcttcatatggacctcttcngacccgtcgcctatctaaacatatgaggaagtaagtatggtctttgtatagttgatgatttttctcgcttcacttgggtattctttttgcaggacaaatctgaaacccaatggaccctcaagcgcttcctcaggagagctcaaaatgagtttgagctgaaggtgaagaagataangagcgacaatgggtccgagttcaagaaccttcaagtggaggaagttcttgacgaggangggatcaagcacgagttctccgctccctacacaccacaa

SEQ ID NO: 3276 - DNA, 463 bp, Zea mays
  unsure (1)..(463): unsure at all n locations
atgtctttttatctatcatcttctcttatgccatcaatataattgtcaagttgcaagtcaagttttaacaagtcaatgcttgacatgtcattangataaaaattagctagctttcgtaccttgtgtgcatcaaaagaagcaaaagagttggaaggatccaaggctgacatacaagaaacagctccatattagcctcactaaacagactatcaagctctaggctaatttgatcaatgaccccaatatatacttctcttctgaagtggtcatcattggtttggttatgaacaaatcgtgatgatcttccataaggcttataatttccatccatagcangaacttggatatcatgtttgctgcaaaatgaagtgattctttgaaggaattgatcccaaccatcaagccttaactgttgcattcttctctttgccacattaacaagtgaaaatgcattgataatatc

SEQ ID NO: 3277 - DNA, 358 bp, Zea mays
  unsure (1)..(358): unsure at all n locations
tctattaaaaacaactaagtatagctgacccttttacactcccttaaatgctactggatcatcacttctttttaagacagtaacacctaaatcttgtaaaagatagttgtagcccattttgcataattgagaaacagaaagccaatcgtaatctaaagaatctacaagaanaacattggaaatggaatggtcatgtgatatagcaattttaccaagtcctttgaccaaaccttgatttccatccccgaatgtgatggctctttagcgatcattgttnttctcataggaggagaacatccttntctcccaagtcatgtggtttgtgcacncgctatcaatgatccaacttgagtccccg

SEQ ID NO: 3278 - DNA, 367 bp, Zea mays
  unsure (1)..(367): unsure at all n locations
attgtagcgcatgtcaggcagggaaacaagttggtactcatcatccacaccagaacatcatgatgactgacagaccactcgagctcctacatatggacctattcggcccgatagcttacataagcatcggcgggaagaagtactgtctagttatggtggatgactattctcgcttcacttgggtgttctttttacaggaaaaatctcatacccaagagaccttaaatggattcttgagacgggctcaaaatgagttcggcttatggatcanaaagactagaagcgataacgggacgaagttcaagaattctcanatcgaatgctttcttgaggagganggcatcaagcatgagttctcttctcccta

SEQ ID NO: 3279 - DNA, 480 bp, Zea mays
  unsure (1)..(480): unsure at all n locations
tcaccacgtcncaataagccgctctagagtgccggctcgttttatgttagcctgcctctgtgaaagccacacagctcttgcgcttgtgctcttcccctcttcggccgccagcgcgccatcttaaattcacgggccaccgccctcgagtcctatagattgagtgtgccatgagctccactaggtagtcaagcatccagcgcacccactcgtgtctcaaattgtccaccagagagctctaatttgggatttccctcaattctgtcaagaacaccgcgtgtgtgagctcgccgtggccagctctctataggttcgatcatgccttcctcgctctcgtttcaacatccctgtgtgttgtagatgcttagtagcccgggcaattgaactagatcacgctagatcaccgggaacacttcggattgtcctttgtnntgcgctgcaccatgggcagcgagattaggagctagaaccttgcattaatcg

SEQ ID NO: 3280 - DNA, 368 bp, Zea mays
cgaggtcagctctatcaaaatctactaagtatagctgaccctctaacactgccttaaatgctactgaatcatcactttgtctaaagacagcaacacctatatccggaaaagacagttgaacccattacaaattgcgaactgaagcagttgtatctaagaattacaagaaaacatggaatagagtggcaggtgtatagcaatttacccaatccttgacaaacttgattcatcccgaagtgacgtcgtgggacttggtttctcgagaggaaaatctttctcctgcatgtggttggcccactatgtgaccacagggcgccggagctaactaaaacaaattatctgatttggacccaacggttggccttgaa

SEQ ID NO: 3281 - DNA, 198 bp, Zea mays
gcaactatgagttcggacgggactccgaagcggcaaacaatggtttgccagaagaatttctgtgcagtctttgatgttattgtggatacaagcctcgcctcgatccatgtgtgtaaatactcgacagcgacgaaggtgaacttgaggttcccctgagccgtgggcaggggcccgacaatgttcaagccccaacgctgg

SEQ ID NO: 3282 - DNA, 316 bp, Zea mays
gcttcaacatctttatttggtttttcttcctgaagcccctacggtcaatcagcgatgaagtctgttacgcctgggactgaatcgaggatctatgcacataatcaatggtgaaatcatttgagttcgcaggccacttttccaatctttcagtagctttttgttccttatgatccccttcagaggttgtgacgaaggaaccattatatggaatgcttgaaataatgctgaagcttctggaggcccataaacagatacaacaccttctccaattctggataattttctttgagagactacttgggagacaaagatactg

SEQ ID NO: 3283 - DNA, 203 bp, Zea mays
  unsure (1)..(203): unsure at all n locations
aaacctaaagcttcagggaaagtcataaatgaccccacataaactngaacaccttatacacctgngataccaaaaccctaattggagccctgggaaaaccctaataccacacccttggtgcctatgtgcgaaagcagcgcatatctggaccacaaggtatatactactatgtttaaatatgtaaagtcacatcggtcacattt

SEQ ID NO: 3284 - DNA, 287 bp, Zea mays
gcagccgtgtaaacgccgacagttttatttagtccatttttgagaaaacacctgttctgctgtgagctcggacaatgggagagctctcatcacaccaaatggatgacccctcactcccctgcagctgattgatattgaccttttctgacccgtgggctatttaatcataggaggaaatatgtatgtgctagttatcgccgatgacttcttccgcttgaattgggtcgatttttttgcaggataaatctgaaacccaatggacccttaaacgcttcctcatgagagct

SEQ ID NO: 3285 - DNA, 454 bp, Zea mays
  unsure (1)..(454): unsure at all n locations
atcttaagtcacctgaggcatgcaagcttcactgttctctttatgctgatgatgcatgagtgtttgttanagcagataaagatgatctgaaagctctgaacaggatcctggaagttcttgaacgatgttctggactgaagatcaattntgataaaactgaaattctcccaattcgttatcccgagactctttggccagatctgatggaggtgtttcctggcaaatacttcaaaattcctgggaagtatcttggactgcctcttcatttcaggactgttagaagagtggatcttcaacctttaattgataaaattactaacaggctaacaggatggaaaggcaggttgctctctaaggcaggcagggaaactttggtaaagcggtgctttctgctcagcctatntaccatctgacgaattttccggcgcananatggcttcttanaagaattgac

SEQ ID NO: 3286 - DNA, 99 bp, Zea mays
gtgtatggctctccctctcagcaccaggcccatctaaatcctgcctgcccctcagtctataatgaggtgcatgacttctctaggtggagcatacagcca

SEQ ID NO: 3287 - DNA, 95 bp, Zea mays
aaggagaaagaagggaggaaacgaaacaaggaaagaaacaagaaagaaggggaggaagcaagaagaaacaaagaaagagggaagacgaaaggaag

SEQ ID NO: 3288 - DNA, 359 bp, Zea mays
  unsure (1)..(359): unsure at all n locations
atcttaagcaccgcggcatgcagctttctggcgtgttgcccattttggggtgtggaagtacttgtatcactgcccgcctaagatggccggnggcaacatcagctgggtggggtgctagtttggagatgcgccgtgggaggaagactgagtatctttgaatccctctcanagacagtatcaanggatggcgctcggaatgggttattgttgagaaccatgtgaaatctcttcccccacggtcgggaagacagacggatgttcgcactccgagttggaccgagtcccccacggatcangaggtaactganggcgcgggcttgctagcttgaagtggactgctgaaagagaggggtctgact

SEQ ID NO: 3289 - DNA, 445 bp, Zea mays
  unsure (1)..(445): unsure at all n locations
ccccccgcgcgagaccttttcccgtntctttctaaccataactgatgcgatatcgaatgtcatacttaatgcatattcactntatttgttcccttgtatgatgtactgtctggtttcccaattgaatggatgaatgtatgtatgcttgcaatcgcatagagaacgatccggtcgaagagcccgaggagctcgcaggagaagcccctgagcagcagtcggttggtggaggcaagtgtcctttgacctatctatgtcctattcattatttaattcacctcccgctttacacatttatgcctaaggattgactagcttttgttatccatgtccttgttcacctatttgggttggattattactggttagctttatgctatngcttaactctaaatcatgaacatgatgagattatctatgatacgctcgtttcccttctcttattatg

SEQ ID NO: 3290 - DNA, 405 bp, Zea mays
  unsure (1)..(405): unsure at all n locations
ttatttattctattctcccaaatagaaaattaaataaatatgtatttcatgtattacctcctacgaggtaatagataattctaaccatctgatctgatgaaacggatgtcttcctgttatttgggagtaccacagcaaagctctttggtgtatctaaacggcgcttgccgttctatgcagggatgagctatctangtttgtttctgagaagcgatctctgtcagttcttaaattagatggctgcagcagtcttggttttatcaatatcagctcttcaagcctttcaagactttggatgtcangtctttcttcccttaccanagcggtatgtcgagaattttctgcaattgatttgctatgaatcccctgacttcatatattgcatanattcatttggctatcaaa

SEQ ID NO: 3291 - DNA, 468 bp, Zea mays
  unsure (1)..(468): unsure at all n locations
ttcccttttattttgtaattctttttctttttcactttctcttaaacgtacttttatgacttctcacggatcctcggacggagggaacgcacattcccacactgacggacttgcacgagagggttttccccgtatcttgtgggaggtacttcagggagcaggttacacgacgccttcccagtacacggtgcagctgttcgagaagcaccgggtgccccgctgtagggtgaggatgaccctggagcctcatcccttatagccaggctggcattcattggactctgagtctttcggataccangttgatgatactatcgaggccattgctctccacgggctgaccaccttctgtggttttcaccccttggagctgtctactcatcccattggcttgttccccgctgaaaaggaggacgacccaatgtggaaagaccgagtggagcatgcctacgatatatgggctcttta

SEQ ID NO: 3292 - DNA, 402 bp, Zea mays
  unsure (1)..(402): unsure at all n locations
cattcatatgaaatttgacacttcagtctatgttggtttactggggctggtcctgtttgcctgacaaaaatgagtgngtctgttcactggttggtttcgtctagtaaattgccgaattggctctttcaactatggagactcttgtagagggataaaagttattactttcagcagaatttcataatttttggttgagtagtttgggagatatcgaacttttaagttaactatgctgctgtctgaaacagattcagtcaggtatcttgtcagatgttntataacttatagatggcagaatttaattatccattgaataccgaagttgtaaagtattttgtgtagacacttctagagtatttgtttatatcaccacccgtatatatttaatgatacaanattaac

SEQ ID NO: 3293 - DNA, 444 bp, Zea mays
  unsure (1)..(444): unsure at all n locations
gaatttataagatcacctattcattcttctctangtgctctcaattggtatcggagccgtactcttcatctaagggactaatcgctcgaagagatggatcctataggaaaagggatggtggtcaacgaaaaggaggagtctctcctcaatgagccaagaaacgataagcctacccactcaagctcaagtcacaagaagagggatgggaagaagaagaggcacatcaagaaaattatctactacgacagcgatgcctcttcatcttcaccaagagacgatgactcttcatcggaaaagaatacggttaatcagaactactctcttgactattctcgtatgccatacaatacaaatgcgcatttacgtatcaatcctctttggaaaacctctcactttgatggagaagacctattcattttgagtcataaaatgccgtggcatcta

SEQ ID NO: 3294 - DNA, 519 bp, Zea mays
  unsure (1)..(519): unsure at all n locations
taagcactgcggctgcagcttctaagggagagcacattttatgactaaccaatgttcattttataaagacaggatttgtagcgcatgtcatgcaggaaagcaagttggcgcccatcatccacacaagaacatcatgacgaccgacagaccactagagctcctacacatggacctattctgcccgattgcttacataaacatcggcgggagtaagtactggctagttattggggatgattattctcgcttcacttgggtgttctttttgcaggaaaaatctcaaacccaagagaccttatagggattcttgagacgggctcaaaatgtgttcggcttaatgatcaagataattagaagcgacaacgggacggagttcaagaactctcanatcgaacgctttcttgatgaggaaggcatacagcatgaattctcttctcctacacgccacaacanaatggtgtagtggagaggaagaatttaactctattggacatggtcaggaccatgcttgatgaatac

SEQ ID NO: 3295 - DNA, 468 bp, Zea mays
  unsure (1)..(468): unsure at all n locations
cttctaagggagagcacattttaggattaacaaatgttcattttttataaagacaggatttttagcgcatgccangcaaggaagcaagttggagtccatcatccacacaagaacatcatgacgaccgacaggccgcttgagctgctccacatggatctattcggcccgattgcttacataagcatcggcaggagtaagcattgtcttgtaatagtggatgattattctcgcttcacttgggtattctttttacaggaaaaatctcaaacccaagagactttacagggattcttgagacgggctcaaaatgagttcggcttaaggatcaagaaaataagaagcgacaacgggacggagttcaagaactctcannatgaaggcttncttgaggaggagggcatcaagcatgagttctcttcttctacacacctcaacaaaatggtgtagtggagaggaagaatcgaactc

SEQ ID NO: 3296 - DNA, 415 bp, Zea mays
catgcagcttaaaaaaacatgtatgaatcggcggtagtaaccattcattccaatgaaacttcggacttgatgtacagagggtgtgggtttccactccaaaatatccttgactctgctgggatccactgcaaccaccttggcagataatacatgtcccaaaaattggatctcctctagccagaatgtgcacttactgaacttagcatataataggggttcccttaagcgcgttaatacgatccggagatgccgagcatgctcctcttcaatcgtggagtatattaagatatcgtcaatgaataccaccacaatattgtgccactcgggcataaataccgagttcatcagatatgtgatgtggacacgagcaacttgtatgttcgatagacataaatagatatttaaataatcatac

SEQ ID NO: 3297 - DNA, 357 bp, Zea mays
actaccccacttaaaaagaatgagggtataactcttgaatcttggagatttgaacttcttgaagtacctcataacaagggtgttacgaggccttcttctgctgatgttagcttgagctggatgcggagagatgacttacactaggttgattctgggagaaccttcttcttatcttctcttcactatcttcttttcactgaccctttctttctctttgctcttcccactggaggaggctatcaaagagtattaccattctacaaaggacgaaacccacgactatgaaccatgtacaacagtcttcaacccaagaatcaccaagcattgtgatcttagggacgcgggagtggaaaatgg

SEQ ID NO: 3298 - DNA, 309 bp, Zea mays
gaagcagggatatccttaaacatgccttctctttcttttatcatgagaaattctactcccatacttgagacttattcgattactaagatcaagtgtttgtcacggcatcatcacgacgtagaagatgctgcccctgaagatatgcattacgacatcgaatgactaggatagatgcactcacaaatatggtgaagcattattcatcttgatcaacgcttattagatttgccctaaatgacttatgcctaggtattctcaccatgaagaggagttacaatgcttacaaccacaccatgattgttttgaaga

SEQ ID NO: 3299 - DNA, 352 bp, Zea mays
  unsure (1)..(352): unsure at all n locations
ataactattcagaattagagaacgtgttatatgctgttttgatggcatccacgaagcttctgcattactttcaagcatacaatgttattgttccttctttcgcaccgttgaaggatattatgagaaatagagaagctactgggcggattggaaaatgggctgcagaactcaatgaattttgcattgattgtgtgcatagatcttcgatccagtcccaagcgttggcagaatttatcgccgattggacgccagaggctcangatgaagaaacaaataaagatgccgaagtatggacagtgttctgcgatgggtcctgcggaaccttcgggcacgagcagctgctgtgttgtct

SEQ ID NO: 3300 - DNA, 392 bp, Zea mays
  unsure (1)..(392): unsure at all n locations
ttaagtcaccgcggctgcagcttcnatagaacagctctgttctttacaaatttacatatcgattaatctagttaaattcttttctcgaacatgaatctggtgaaattcatcagaaaaactatgaacagaataggtgtgattcataagttgtcttttggactttgagcagaacatatgacgaaagcatgagagatgaataggtgcgaaaattacaatttagctacgaaatactagatatacaaaatatgccacaaagcatgttattaacctctaactctgatctggaaagtgctatgctggtaacaaaatactagaatggagtggacaacagcgcccttaataaaaccgaagcagttagaatttcgaagtcatgctaatgagccatcaccacg

SEQ ID NO: 3301 - DNA, 450 bp, Zea mays
  unsure (1)..(450): unsure at all n locations
gaaatgtaactgaacatanatttttttatccagaaactgttatagtatatcaatacaatgttaaaacattgntatggccaggtattcaagtacataatcatggtctctgtaactaaatgtcgatggaataactcctcattatactcacggtttgcaacaaaataatcttgcatgaaccaaaagtaacctaatcttctgtgtcctggtggatgacgtgacgacaaataatggagccattattgtgtggtagctgctcatcctcctctacgagtcgtgtggtatgcacgatatggaggaactcttcgtcgccgtacatcggcatcattcgccgatatcgcctctcgaacactattattgatntggtgtcttcttgagtgctgacattgtagtagaggaagttgcttaatgagtacatacacataatagatatgaagttgncaggcctacaac

SEQ ID NO: 3302 - DNA, 341 bp, Zea mays
  unsure (1)..(341): unsure at all n locations
gacctctataagcactcctatatgttctcatgtgtcgctgtgtaagacaagctcccgcgaagccgccgcttggacgtggtctataacaactacaccgcgctattcatcgttaagaaggggggcctcatggttgtcgccaacatcgacgactcttggattgttctggacacttgatncgacgacgacgccatcacgccgtccagctcattattcacctaaagcacaacctgccacgtaagtcgctactgaccggacatgaattcttgtgcgctgggacgatggacgttgctgacagtgtgtgagtgtcctcaaacatgatgtatgttgtggagtagcacatt

SEQ ID NO: 3303 - DNA, 455 bp, Zea mays
  unsure (1)..(455): unsure at all n locations
atagcccgtanagaaaaaaccttggaaactgatgaagaaaaaataacaaagccaacttctgttgaagaaatcggtgtcgttgcccccgaagcatcctccaaagtccgtgattatattgttcgtcatgcttcggcgaaaaaactatcagaaaaagaagagcaagaggcccagcgctacgcccaataactgaagtatccaaagggggcgttaatattcaatggtagtggagaagaagactttntgtattgtctccctgacagcaaggagatttctgtctgccgggagatgagcangagcttctgattcccaactttagaagacgggctctcggtgctgtcgaagaacgatctggccgacagcctggcctataatagcttataggtgcgacaaatgggatcctcgtattttctgttgagaccaacatggttggttaaatctattgacacacacatatt

SEQ ID NO: 3304 - DNA, 416 bp, Zea mays
  unsure (1)..(416): unsure at all n locations
tggacttctttgnttgtgtatctaacccatcctggagctggtttaaatggctagtaacaacaatgtgcgcattgggaagccaccacattttgatgggaacaattatgactagtggaaaataagaatgtcaatgcatcttatagctatgggaggaaagatttggcctattgttagagatgtggttgttgtattgaagtaagatgaaccatcacctagtgataatgagaatgttctaaccaatgatcaagccttgaatgtattctatgttgttctagacataaatgagttcaaccgtatcaaaaatttcacaacctgtaacacccttgccgttacgtgaactaaaactataagtcgcctagagggggagtgaatacgcgaaacctaaaaattataaacttttgacatgcacttcaccc

SEQ ID NO: 3305 - DNA, 507 bp, Zea mays
  unsure (1)..(507): unsure at all n locations
agcttanaggatactattcaactaaagttagatgaagttgataagacgccaacgtatgaaaacttcctctccttcagttggtttagtattctatccttagtgggatgtaccatagtataggntaatttccttgcaatataaaatgttcaatagtgcatataactttgacatcaactatatgtgtgcactaatttaaaggaatttagtctatccttttgggtttcaataatgatgattcatttgccatccacatataaggatcatcatttgtgaaaccctctcttgtgttnttaatgctctcttttctaagtgttacaacgaggtccttccaagagctttcaagatggattcaaaatctacaaaaattgaatgaagttcaagaccacttgtgtgaatgatatcacaaagagaaaagagatcacagtgaatcaagaacggagttatatattcttttgtcaaccaaataatgaagatgtagtgacatatttatatgatatccttcattat

SEQ ID NO: 3306 - DNA, 391 bp, Zea mays
atgtttctcatgcctctgctcattatgggaatatataagaatatcatcaatgaacaccactacgaacttgttgagggagtccatgaacacactggtcattagatacatgaagtaagttggcacattcgtcaatctaaatgacataaccatgaactcatatagtccatacttggtgatgaatgctgtctttggtatgtctgagggtcggattctcaattgatggtaacctaaccttagatctatctttgagaacacattggctcgtctcaactgatcaaataagtcttcaattcgaggcagggggtacttattcttgacagtaacttcattcaaagctctataatcgatgcacatcatctttgtgccatccttcttcttcacaaataacact

SEQ ID NO: 3307 - DNA, 391 bp, Zea mays
  unsure (1)..(391): unsure at all n locations
tggcttagcctgaccactgtggcggtgaacactgaacacaatatcatgtgttccgggtaattgagcgtggtcaaacatatacggttgagccgacgagtatcacgagcatgtatgggtgctaaaacacgattaagaagaataggagcggacctgtgatcggctggccatggagcgcggaggattttcgtttgccggagactgagaaggggggaaatggtgtcgcgatgggctctggtgacaataggaggtgaggatggggctacatggtcgcatagtgctattgattcaccatgcactgctaattcgggaagaggtgganaggatttcacgaatttgtgcttaaccgagtcactggtaggtgggagacctcctgtgggtggcggactattaa

SEQ ID NO: 3308 - DNA, 470 bp, Zea mays
  unsure (1)..(470): unsure at all n locations
gcttgcaccgaggacccgcgccaccggaatagtgtaatcgtgttcaccggagttcaagaccccgtcggcgcacgtggaccgggtaagtcactgcgccattattcgattcaatgcacagatagcctctacatcaccccgtgaagctaaccgtgccattggattggactagatcgccgcggtttggccggaatacctgccgccgacgagagcacctgcctgcgcacgtggaccagacgattccggccactcccgccgtcgagccatacaccgttgtgaccgccagaacctctcggagccaacccacgccctcaccggacctctctcgccgcctgtaagccgcgcctgccttttctttctcgcgggtactgattaaacctagggagggaccgcggtggagaagaagagaaagctagggggttntgcgcaatgtcagtgactcggatgaatagtagcgcggtggtataactgag

SEQ ID NO: 3309 - DNA, 247 bp, Zea mays
tcaccagctagcgccagatatccccttatcgacttacatatgcacgccaccatctcttgtcatcgctcggcttttgctattcacagccgacttctcctcgacaagatgccgatgctgcgctcggagacgcctcacatttggtagcaatactctataatcagcgcacctgacgcgaacatgtctgtgaagtccggcgctgacacaaaaactatgagactcacaacctcataaaaccaacgaaacttcc

SEQ ID NO: 3310 - DNA, 314 bp, Zea mays
  unsure (1)..(314): unsure at all n locations
caatttattgacgacttcgtcaataatggattcacccatgcttatgatgtccaatgattccttcatctctagatcagctaggggatcgtacggctccggtggcggggatagttcagatgtagtatgataaattgttaatacgaagccttgaagcaagtactggaaactaaaaatcaaaagcaatacctatgcgcctttcacgctcggcagcctctcagctcgctttgctttttcccgggcgtcatgggtgtctatctcaattcttttataagtttcgngggccagctctctgccaccatcttccagacatcaga

SEQ ID NO: 3311 - DNA, 347 bp, Zea mays
tgagttatgactgaaacaagtgactgctgtattgctgtccaaaaattctgctagtgcacttttgattgcttagttcacccttggcgctaataatgtttggtttgctcttaaataatatagactcgccatgattacgcttaataatgcatgcgtggcacgatttatatggctcttctctagttgattgagatatatgagtgttccataaacattgatgcctatgttctctattgaacctgtgtgctcggcgaagcgttcatgcgatcaattgaagaactaatgaaaagccgtacacattaaataaacgcttgacttatggagtcgcattcgtgttgcgcaatatacca

SEQ ID NO: 3312 - DNA, 278 bp, Zea mays
  unsure (1)..(278): unsure at all n locations
ggcgcgctactcccgtgcgcttgctgttcttttactgccagccttgtctttggncacgtcaactgtcacgcctgtccccgcggctgactgacctgtggtctccgcacttgatagcttntactgggccatgcgcggagtgcctcgataccactgcatttggttttgaaaattcaccttatttgtctttcgcggcggccccatgaggcgcggtactggcatgagtggcggttcgacttctgcgcacccagaaaccgacgcccaaggaggatgactcgtgg

SEQ ID NO: 3313 - DNA, 304 bp, Zea mays
catctgactgctccattatatatgtgttcaacattccgagcatatactcatgcggtttattgtcaagaacttgctgcatatgcaaggcttgctcaataacatactttacataaacacaaccttcgtcaacatgttttattagaacaattaatgtaagggacagtcattcacttgaagtggagaacaaaaactaccaacgacatgttgtcctctgtaacgctgatgtatgtaccaacttccggaaccaatactcctgacagagtgttatgacttagcccctgttgtgcccaatcactctatttct

SEQ ID NO: 3314 - DNA, 282 bp, Zea mays
tgtgcgaaatagcgctcacgcacagggtgcaatcatggagggatacactacagagaaagggattgagaacctgtatagattacatcagtgacaggacaactgaaggtgtgcctgtcctaaacatgatggtaaactatgtgggagagggagaatgggcacgaatactattcgcgttgaggattacaagctagaacattgtgctcatggtagcgtactaccacaatctaagatagccgagccttacatagaggaacacctgtgtgagctttgtaaagaatatca

SEQ ID NO: 3315 - DNA, 447 bp, Zea mays
  unsure (1)..(447): unsure at all n locations
ctgagtcctaaagcttagaatgatatattgatctattaagaaatgcctcataagactaaatacagagaaaataaaaataacattttacctgcatcctctggtcattgtagatgcaatgcaaggtcaaaacgaacaccataaacatgcatttctattacccagtatctgcaacatcaaacttagttattagtgtataaacaattgcaccatctaatagaatgacaagcgacagaaggaaattatgagcaatttaatagaagttatatacaaatttgtacctcaagcaatcctctatatatccacggattacaggatgattactaatgaagttatttccacaaccagaataattataaaactcttcctgcacagataaatgcccttcaataaattgtatatatacatgaatgtatgacacagaatacataactatntttgtggtccatg

SEQ ID NO: 3316 - DNA, 338 bp, Zea mays
atcatggttgcttaccgagacatttcctgccttttctgcccatggtgctgcgtgaccttattttgggcccatgggtcgtgtattcaagtgggttcattatggacgcatcctatggttgcagcacgaccacaatacccttatggtcgtctcccatgttataaaccccctaatcgtcccaagaatagcggttttgttagatcaagttactctcgctacttgcttgaagcgcgcgtgctggttagccgcccgcttcttgtctcggaacccaccatattggagttgatttgaaactacattagatctgtaatcagacttgtctactgtcttgtagtcttcat

SEQ ID NO: 3317 - DNA, 127 bp, Zea mays
tctgccaaaacagacaaaatgtttccatcttgggggccccaccaaaatccggagggattctgcacaagcaaccactgccaattacgttctgaaacccaagtctgcagagaaagccaagcacattaca

SEQ ID NO: 3318 - DNA, 427 bp, Zea mays
  unsure (1)..(427): unsure at all n locations
atcctctgagtcacctgcggcatcaagcttcggtctcttgcttacaactcttgtaatattgcctttataacctaggaatcgtgtttaagaaccgcccttctaatccccattgcctttaacttccgaaggcccaaaagcanagcttcgtactcagcaatattatttgtgcagctaaaatcaagtctcgctgcgtagcaagttctaactttggagggtgcaactaacacagcagctgctcctgccccgaaggttccccaagaactgtcacataataccgnccatacttcggtatctttagttgattcttctccttgagcctctggcgtgcaatcggaaatgaagtctgctaacgcttgtgactgtattaatgatctatgcacataatcaatgctgaactcattgagcttcacacgccacttttcaattc

SEQ ID NO: 3319 - DNA, 333 bp, Zea mays
cacctttacatgctaatgaaccattattccttctaaagataggtacatgaatatttgataagtaaaaaatagtatcccatgtgacatatctgactaaccgaaagcacattatgaccaagcgattctaccaaaaagacattataaattgaatgctcggcagaaatcgctatcttacctatcccttataccttgtcttgatacccatctccaaagatgatcgagtcatgagaataccttgtcttgaatgaagaagagaaatgctcttcttctcagcatgtgagtgtgcatctctatcgagatccaacatgcgccctaatgcataacctgagaaca

SEQ ID NO: 3320 - DNA, 281 bp, Zea mays
gcacctactctgaaggtctttcattcctttgaatccaatcctccagtagagtaagaaattccagttcttaagtgcttaattttattcgcctattcaccctcctctggacgacatctagatcatgttccagacaaagggaacctttagaggcttgcagatgatgagcatcttccaacctctgagaaacaaagccaaaaccatggacatcatacccggcataacgtcccaacagtactggctctacggacaattgtcaaaggtacgagtgtatattgtcattc

SEQ ID NO: 3321 - DNA, 339 bp, Zea mays
  unsure (1)..(339): unsure at all n locations
cagcttgtctatatgggcactggaaagtagtcttattctatttctctntcaagcatatgtacgtgaacactagctaatgtattcttggataacataatccataccctctctcttacagaaaggtctgaaatatctatctatgacaatgatctgtatcttggatttctagaacacaagagagatagttntatccgcgcgaccgctattcattttgtcgcgctaaaaggacatactcgctgcattccgcttcttgtggctgattatgtgcctagcttgtctgagtattggaccattatgcgtggatagtacacagatgaaatgaaatagggtgcctttgat

SEQ ID NO: 3322 - DNA, 505 bp, Zea mays
  unsure (1)..(505): unsure at all n locations
agcttgaancaagtctcaagactgatgacgagaaaaattcttattgcatataatcttgaacgatcttcaagagaaatgcttaaaattcggcagccgatgcgtgcaacggctgaaggacgtatntcactctgtcggagcccagtctgaaaaaatntcaccttcaaccgaaaacctgcccagcaccttggaacatattgaaggcgaaggtgatgctctcgacgaagttattggtgggcatgccgacttctgcgccctggtagcttctcgaggcacagctaccgctnttctgaaggctggctgtacgcacggaaagaatgtgaataggccanacttcagcttgtcagcagcagatttggttgaatcccaagcttaacccgaagcatcggaaatagatttatgacccatatttgtgtaaatggcgggcgaaaaatggctggtgacgaaactcgaagccacctangccagtgagaaacttatatgtcgtacttttaccttcttcttgaca

SEQ ID NO: 3323 - DNA, 286 bp, Zea mays
acgccactatgaaggcaacttttttcatacaagaccccgcctgtgggtaacgtgtaactacagattgcttcacttcaagcttcacgactgtccatgaagattggtgactaccttaaaaggaaatctcttgtgactaaatgaacatcaaagccttcttgcagtgtgacccctcttggctggcgtctcaagaactcattattggaactcacccttgtgactgacacagattcctttctcgagacctttaggtcactagcactgctaatacaaagtctacacacagatt

SEQ ID NO: 3324 - DNA, 266 bp, Zea mays
  unsure (1)..(266): unsure at all n locations
gatagaccttgtgcagcttgtcaagcatgtnaacaagtgggaggagcacatcacaacaagaatgtgatgaccactctaagacctctggagctggtgcatattgacctcttcggacccgtcgcctatctgagcatatgagggagtcagtatggtctaattatttganatgatatttcccgctttacttgcgtgttctctttgcctgataagtctgatacccagggaccctcatgcgccttctatgagagctcaaatgaatttgagct

SEQ ID NO: 3325 - DNA, 474 bp, Zea mays
  unsure (1)..(474): unsure at all n locations
ccgcctatgaaaattcttcattccaacgtgggctattcggcgatgttctatccaacccatattagtcttagcaattaagcaagtatcgagttcagctctattaaaatcaactaagtatagttgacgctctaatactcccttaaatgctactgaatcatcacttcttctaaagatagtaacacctatattcgtaaaaagacaattggtagcccatttgcataatcgagaaactgaaagcaagttataatctaaagaatctacaagaaaaacattggaaatataatggttaggtgatatagcaattntaccaagtcctttgaccaaaccttgatttccatctccgaatgtgatagctctttggggatcttggtgtttctcataggaggagaacatccttttcttcccagtcatgtgggttgtgcacncgctatcaatgatccaacttgagcctccggatgcactaacctacgaaac

SEQ ID NO: 3326 - DNA, 412 bp, Zea mays
  unsure (1)..(412): unsure at all n locations
taagcaccgcggctgcagcttaagctctttgacaataagattacttcatccagttttatcatagatgcataaatgcaggaatgaaatggttgagaggttaaactangtatgaagcaagaaaaatgcatggacattgctttactttcttttatacaagatatgtaaggaaagtatagaaaaggaagattttacgtacaagtttgaatgaaagggaagagttttaccctcttgtaccttcacataaagacgctctcttcattgtgcttgttcttagtcttagttgcttatgacctatactcaagacaatatatggaaatattttgcacaagagagagttctacaactagtgatccttttccaagttaacgttagaataaattaaatggatcacgaattgtatanaggcaacatg

SEQ ID NO: 3327 - DNA, 414 bp, Zea mays
  unsure (1)..(414): unsure at all n locations
cgtcaatggntgtcgatttggtgtagactccttcttcttgtcttccgttgttttgaatgcgacgggttgagctccggatgtggtgggttcatcaagctacgtgatctttctcgagccttcaatcatgcactcaaaactaacaaaatgcccgataacttcctcgggggtcaattttgtatatcgacgattaccacgaattaattgaacttgagttgggttaaggaaaatgagagatcttagaataaccttaaccatttcgtggtcgtcccattttacgctcccgaggttgcgcacttggtttaccaaggtcttgagccggttgtacatgtgttgtggctcttcccctttgagaagtccgaaccgaccgagctccccctcgatcgattcccgcttggtgatcttggtgagctcatc

SEQ ID NO: 3328 - DNA, 394 bp, Zea mays
  unsure (1)..(394): unsure at all n locations
gtagttgactgtacgatgttgnggggaaagctctcggtcgtcggatgtacgatcagcagtctggattataaaggcgattccatctcaccttgttttgatccgagccattcgcgcacaatcgtgcggccgaaaacattccactcctgtccgaccgagcgcttttgcagaagagcccttgggctggtagagaatcaacctgcggtccaccgcgtggttagcttgtgtcttacgaccttctacgccagggtccttgtccttaccagaaattgaggcccagtcccgagtagatttaaaatagtgaaatatcgattgatattcgttttaatacacaaataaatctataaactggttaaatgccttagataattcatcttattcccaatcactttattta

SEQ ID NO: 3329 - DNA, 382 bp, Zea mays
  unsure (1)..(382): unsure at all n locations
cattatgtggatcatagttactgatctcctatagttaattcaaatcgaagtattctttctgatattttttccatctcatcttacttttggtaggtcaatgtgtgatcgtttgaccttttcttgtgcccctttagatcttgctggntcttgtgagttttatctctttctatgtggttcctcgtttcggcgattatcggatctcctttgcctgtctcccttttcttttctttgggggtgaactctgaggttatcatatggagattcatctctagcctaccccaacgtgcttgggacaaaaaggctttgttgtttgtgtaagttgtgatcgttagtctgaaaacgcctaaacttgatttcaatcgacattatatcaatactcgtt

SEQ ID NO: 3330 - DNA, 423 bp, Zea mays
  unsure (1)..(423): unsure at all n locations
aattatatagaaattgtataacgtgtgatattctatgttgatggccttaatgaaacttcgacattattttcaagcatatcatantaatggtccttcatcacaacctctaaaggacatcatgaagaatagagaagccactgggaggatcggaaaatgggctgccgagctcaatgaattctctattgattatgtacacagatccttaattcagtcccaggcgttagcagatttcattgctgattggacgccaagggctcatggagaagaagtaacaaaagatgccgaagccttgacagtcttctgtgatggttcttggtgaaccttcngcgctggagcggctgctgttctagtagcgtgctccanagtcagaacatgctatgcaccaagaactggacttagctgtacaaataacatggctgagta

SEQ ID NO: 3331 - DNA, 407 bp, Zea mays
  unsure (1)..(407): unsure at all n locations
tacttggtataacaaagttgtctaccaatgttatatcttctactctgccacaatgaccctgaccttatctgcattgaattaaccatgaattgcttccacagttaaccaaatgtcactgaacttaggttgttagaattgaagctgtgtgacacgccaacttcaagtctctttttctcccattttcatgtagaactagggcttactcacttaatcaaagttgtaccctttacatagctctacaagtttgatgtattgacctatggaaaaatccttatgaatncagagataccaagctccaaagctgaccccattctactgaaaatcagacttaaccatatagtgttcatgcgtacatttgcaaataagtccaatttcctccacactacatgaaaatcctccaatgtgaa

SEQ ID NO: 3332 - DNA, 450 bp, Zea mays
  unsure (1)..(450): unsure at all n locations
tcatccttcttcttcacaaaagttctggacatccccaatgctaagtgcttgggcgaataaatcctttatccagcaactcttgcaattgcttcttcaactctgccaactcagcgggtggcattcgggtaggcctcttggaaattggggctgttctcggttgcaattcgatggagaattcaatatcccggtccggtggcattcctggcaattcatcagggaagacatctgcatactcacagaccactgggatcttcttcagaggtaactccgtcatagagaaagcacatgactgagtagaaccttgactgggcagaattaaagtgaaagttccatagatcggagaattaacttccacggtacgactggctatatcaagcacaacttggtgcaaggtcatccaattagctcctagaatgatgtccacattntccaatcccaacacaagaagag

SEQ ID NO: 3333 - DNA, 362 bp, Zea mays
  unsure (1)..(362): unsure at all n locations
tattgagactacatttggcatcatttacatgtcttctccaatatttggtttgataacatttcatatcttatacttcacatgttgctatacatgcataagatgtcaactcatatctgttacctatgcatataggaagttagtctaatcaaatcatgtcttgttcctctatttctcacatgctttctcctaagtagaagatctttgtcggcgggagtatttattcgtctctaaagggagaagtttctttcataaggagaacactcatttatggggagcaataatatttactgcttcaatcggtattggtggagaggaaatctccggctgggtggcgaaatgcacccgccctanatccgaagatg

SEQ ID NO: 3334 - DNA, 360 bp, Zea mays
  unsure (1)..(360): unsure at all n locations
agcttgataagaccctgtgtgtttgacaggaatactctttatattattctagttaatcaaaacatatatatatatatatatattatagaagcaatctggataagaattattccctctattccataataaccgaacgacagtgagaataattccggcctccattcctggagagaaagaaacgggacctttntcataaaggcctattcggtttctataaatccatatggattgaggggatcaaatctcttataagttaaaatctcttcaatctctttcaatcctcttcaatccatatggtttaggggttgttcgtttatccaagaatggacttggaatcgttacagctaatcaaaacttata

SEQ ID NO: 3335 - DNA, 420 bp, Zea mays
  unsure (1)..(420): unsure at all n locations
cttcgcatctttttatgttctccctgggtgatataagtccgaaggtacctgttcacacaatacactctaaaaacactgttaaatcatgtttttgaggaccttctgaagcccaaagcccccaacagtagcccctcgcaatattaatttgtttgaaataataaattcagattgcgatatgaacgaaggctttatgccgaaggtccgaaaaaacaccttccctttgctagaatagcaacattcaatgacaagtggggtctttcaactttcaacgcatcaagcgtataaatacggccataccgcaaacttattttgcacgctttctggccaaccactcctgctcactcattntttagctcttgtgcactgtgatctgctaagtttttagctttgaagcttcngttttaaaanacagtttttagt

SEQ ID NO: 3336 - DNA, 367 bp, Zea mays
  unsure (1)..(367): unsure at all n locations
tctaagtcaactgcagcatgcagcttatgatcacngttcataagacattatctattttctaagtctagaaacaactcacatccaatccaatatgggtaaaacttggaaaaatgaanttatattagttctacactttacataagttctagatacccctatgaacatatttgatacatctagaaagggtggagagtctagaatcannattacacgctttttgagctaactcgaaccaaaacacgaatgtgagctaaagaaatcaaaatgtccaaatttcatgacttaaactaattggataatatctagatatgtttgtctaaataacacgaacattctgaagtgcagccaaatcaaattgaaaaaaatt

SEQ ID NO: 3337 - DNA, 361 bp, Zea mays
ctgctctctgagtccaatccgaagaaaatctgaagataagcatttaaggaaaaacacaagagtccattgtttgtcttcgtcctgcggatgaggctcacacttgctaatcgattaattaaatattatgttgtcgcattgtactagctatagcagatgcaagtgctacacacataataatataaaaatatggctgtgtgcataggctaatgggcaaaagcccacagatctgatccaagcgttgccaccttctcaggtggagcaaacaaagttaactatatataggactaaatatgacaacttcacctaatctagcacatacttcgctttaaggctggatctacctacgtgccgagcatcgttt

SEQ ID NO: 3338 - DNA, 467 bp, Zea mays
  unsure (1)..(467): unsure at all n locations
gtcacctgcggcatgcaagcttaccatacactgaattctactgagtcttaaccttatatgtttcattggacttattatcacaaccatatgctggcgatgcagcggtaggctcgtttataataggcagaacctccatcctgtaagtattgtgacaccaacaacgaactcaaattggtccatctctaatgatgtactcaccatgtgtaattcattatccaaaagtagttcgtgacatgcaatattattntgtttccatcactattcactggaccttttcatttacctcatgtgttatgggtgattgggataaacatgagtatatccttcaggtgtacatattttcttagaaaacaatgacatagtcattatagtgagggaaaatatgttgcatatttatagcctttaaaaccactaggtcaatacccgtgcgcttgcacgggaacatataatatcatgataacttatat

SEQ ID NO: 3339 - DNA, 354 bp, Zea mays
aaagtctcaaactggcaggcatgtctcgggccgactggtctgagagggtcttttctgccgatagactgacatacttggcttttggtcttcttgcaggtttttcttgcgggggcgagcttcttcagttcttgtcgtagtccaatttgagggtgcggtaagcctcacaggtattggcctcttcgccttcagctagcgagaggctctcttgaagggacgctttttcttcttgaaagtccctgactttctgctccaagctttccacctgggatgttaaggacgtgcactggagggcgaggtcatcatattggttatccaaggtatgaaggtatcctgccttgttaacaatgtgggatc

SEQ ID NO: 3340 - DNA, 433 bp, Zea mays
agcttacaattaaagcgaaggaccgggataagccaaagcaatagctcaagcatagccaacaagaataatctccaacacctacattaacaaggtggagcataaaggccgctacaccatatttgatcaagaagaaaaagaatggaaaggtgataacaatcaaggctaacaaagcaagccaacagatgaaaggggaccaaacgcatctgggtgccaaaggagaatatctcaactatggaaagcaccaagaaggtttggatcccaagtgggaagtgagaagtccgaacgacttcggtgaatttgagacttggcaaaatgggatgtatatcatgggatgatcatattgatctatctattgcaagtgattagtgatatttgacccaattccaccatgacaagtactagatattgattctatttagaatggatcatctct

SEQ ID NO: 3341 - DNA, 358 bp, Zea mays
gcttcgcacctctaaactaactcggctgcatcattctttgctgttggccaatagaatcctgacctgaagaccttcccgactagtgttctggaggctgcatgtattccacattgcccagcatggacctcctccagaagatgcttcccagtagacgggagaatgcacttcatgaggacgcctgatgcaccccttctgtacaatgtcttctcaatgagtgtgtagtgagccgactgtctggcaatgcgctcggctgagttctctgcatctggttcttcttcattctttatatacttgatgattggccttctccagtcatcagagtctgactcgggttgatctataatgttgcactcttctg

SEQ ID NO: 3342 - DNA, 112 bp, Zea mays
tcacacatcgcaacggccggcccgcgaaaatccacaacaacaaaaaggcgccgttctcgcgaaacgccaaaatcggcacacacagcttaaagcccgacggcagccaccccac

SEQ ID NO: 3343 - DNA, 316 bp, Zea mays
  unsure (1)..(316): unsure at all n locations
accgcttattaataatttggatttataaacaaaacgtgcgctctgtntatatccattactttaatatgacttttcattcatgttttatgatttttgaatagacaagtacctaaggtgatggtgaaaagcaaacggaattatttaaaatggaggagtattttactgaaaattaacgagaatggctcacgtgtgcagggcaatcacggtcaagacttgatggtcagagtcataaacggggaaacccaatccccgttgtgtgggatcaaagaggcaacatggcaacgattgaagatgtgaatgacgcatgagacatacc

SEQ ID NO: 3344 - DNA, 372 bp, Zea mays
  unsure (1)..(372): unsure at all n locations
acataaattggagaatgtgctgtatgctgcattgatggcttccaggaagcttcggcactatcttcaagcataccatatgattgctccttcttcacagccattgaaggatattatgagaaacagagacgccactggaagggttggaaagtgggctgcggaactcaatgagttctacattgattgtgggcatagatcttcgatttagtcccaggtgttagcagatttcattgctgactggacgccagaggctaaggaagaaaagcaagtaaagataccgaagctnggacagtacactgcgatggatcttggggaacctacggngcacgtgcagctcgccgtattaattgcaccttctaaaggtagaacatgcta

SEQ ID NO: 3345 - DNA, 404 bp, Zea mays
  unsure (1)..(404): unsure at all n locations
taacctttctgaataacctgttattatctattctatgtgcagnggtacacatgtaagacttgttctgatntgaagtccacatgtccattgtggcactaaatcggcacggaacagttttagacaatgcatacaacttctctttgtcttgcaaatacacgcttagaatttctttcctaatggtaacacgagacacgattgtgaagctatgacgtatggattcaacgaagtcaacaacagactcatgatcagctatcgggaagggggactcatgcatcacatagccaagtagaacatcctcacactagcttcttcatcactacttgtgaggatgcacaacaatgatgcttatatcattgtctctttccactgtgagaagntgttggacctatactatactatgtgat

SEQ ID NO: 3346 - DNA, 127 bp, Zea mays
gcatcacagcaagaatatgatgaccaccttcaacacctcctggagctgctgcatatggacctcttcagacccgtcgctctatctgagcataggagggagtaagtatggactagttatagtcgatgac

SEQ ID NO: 3347 - DNA, 435 bp, Zea mays
agcttctaaagggagaacacgtgatatgtttaacttatgttatcttcgaacaagatagaccttgtgcagctcgtctagcaggtaaacacgtgggaggagcgcatcacatcatgaatgtgatgaccacatcaagacctttggagatgcttcacatggacctcttcggacccgtcgcctatctaagtatatgaggaagtaagcatggtcttgttatagttgatgacttttcccgcttcacttgggtattctttttgcaggaaaaatctgaaactcaagggacccccaagcgcttcctaagaagagctcataactagtttgagctcaaggtgaagaagataatgagcgacaatgggtctgagttatagaaccttcaagtggacgagtaccttgaggatgaacggatcaagcacgagttttctgcttcctacacaccac

SEQ ID NO: 3348 - DNA, 446 bp, Zea mays
  unsure (1)..(446): unsure at all n locations
tgagatgccacttataaaacatcatgcttcgaaacatagatctttcttcacatcaaactgagaagctgtattctcacttactttgtgcctacacctttcattttgtaagcattctccgaagatcgactncatttccaattcgtgtcattggtgtgatatgatgtatgatgtgatgctatgcgatatgatgcgatgatatgatgcaaaaaatgatgctaatgtcgaagacacacacccgcgctgaaatacacaatctttgcgtcctcttgagaacgatcaaaatctctttgccgtatattgttcggcttcaccgcttattattcggtgtaagttctgcatccgcctatgaacatctgttgaacttcgtcagcttctattgtggcggagttttcgcggtgacttccgcacttcgcctatatatcggcgggattggctctgattccctt

SEQ ID NO: 3349 - DNA, 167 bp, Zea mays
acacgagcagcactttaaaagaagacacctttggggacttgatttatttatggatggcaaagtccgaaacggatctgtcaatcggacacaagccttatggcttaccctgaaccaaaaccaccaggaggaaaacattaagacacaatagcttccaaaggcaaacactt

SEQ ID NO: 3350 - DNA, 389 bp, Zea mays
ctgaagattttataccatccacattcctaactgccatgacgaaggatttggccatgacagctgcattgcctccatatgaagatatggttgcctcataactcatcaaaaactgcttcggatccgaatgcccatcatacatatggagctgaagtggactgtatgatggaggccatgggatagctcgcagttctggtgccaagggagaagcagcatcaaaggtaaaggtatcatgattaaaatcatcataccatccatccttgttgaataaaccttcttgatgaagatccctgtgttggggccttcgatctttgtcgtcttgaacaagatggcgtacttcttcagtggcttcatcgatttgcctttgaagatcatccagtctggccatcttc

SEQ ID NO: 3351 - DNA, 307 bp, Zea mays
aaccatgtttacatactctctaaagcgctatatgggctcaagcaagccgcaagaacttggttgtatagggaatacccttacacctatctctaattgattttggtggttgaattgcgcaacacaaataactagactaactagctcgctctagtctataagttctacaggcgcgcaaggtttacaattagccaataaatagaccaagagaagggttcatcatatagagcaatggataactgaattgtctcctgatcttgcgcaccagacttgcccgtgcactaaggaactccaagttgaactcatcacc

SEQ ID NO: 3352 - DNA, 216 bp, Zea mays
ataaagggaccagtataagtgaccctcttgtccgtgctttgggaccgaccgcacaccaagggttgcccctcaaggtgtctttatgagtacgacggtgtcgacaactgtagcaaaatggttcgtgtccgaacgcaccagggacagtggacaaggtttacaggctcgggccgcttagagatgcataacaccctacgtcctggtgaagatgcttggaga

SEQ ID NO: 3353 - DNA, 324 bp, Zea mays
  unsure (1)..(324): unsure at all n locations
gcttcttagctgcagctgagctttcagctgagctgtatttcatctgagttgagctttctcaacttcagctgaacttcaacttcaacgcggggtcccaggcaagttcaacccgggtcgagagaggttcaaccggggtccagggcatagtcaaccgaagttcagagaggttcaaccggtgtccaaggaaagttcatccggcgtattttcctcggacctcactgttcaaaaccggttgaaccggtcctaggtgaggttcaaccggtgtcanggtcacctgaccggtctgacctcctgactggcagactgactgtcagtgtgacccct

SEQ ID NO: 3354 - DNA, 444 bp, Zea mays
  unsure (1)..(444): unsure at all n locations
acacctatgaactaactcggctgcatcgcttntcactgttggccaatagaatctttatctgaagaccttcccgactagtgtcttggatgctgcgtgtattccgcattgcccagcatggacctcatctagaagttgcttcccagtagatgagagaatgcacttcatgaggacgcctgatgcaccccttctgtataatgtttccccaatgagtgtgtagtgggctgactgtctggcgatgcgctcggctatactttagtcatctggttcctctttgtccttatatatctgatgatcggccttctccagtcatcagagtctgactctggttgattcacgatgttacacttgtcgggctgatccatagagatgcttggntggtggatttcttgtacaaagacttcgggtgggaccttgggtcgactgtatcctaacttggacaataca

SEQ ID NO: 3355 - DNA, 481 bp, Zea mays
  unsure (1)..(481): unsure at all n locations
acaacaccattngacattttacatataatttttttatcaacgaatattagttcattcctcaacatgcaaaagcaggtcttatcaagaggcttagtgaaaatatccgcttattgatcttccgacctcactccttctaaaatgatatcttctttacaacatgatctctaaggaagtgatgacggatatcaatgtgcttggtgcgagagtgttgtacatggttattatcaattataacagcactctcattatcacacaacaaaggtacctcttctagaactacgccatagtctagaagaagttgtttcatatataaaatttgtgtgcaacaagcacctgccgcaatgtattccgcttctgcacttgacaaggcaacactgttgtgctttttggatgttcatgaaactagtgatctaccaagcagatggcatcccccagaagtactntctctatcaattgtgcaaccggcataatctcgatctga

SEQ ID NO: 3356 - DNA, 437 bp, Zea mays
  unsure (1)..(437): unsure at all n locations
actaaccaatgttcattttgagaaagacagggtttgtaacgcatgtcaagcaagaaaggaagttggtgttcgtcatccacacaagaacatcatgacaacggacatgcctctggagttactccacatggatctattcggcctgatagcttatataagcatcgacgggagtaagtactgtcttgtaactgtagatgattattctcgcttcacttgggtattctttttgcaagaaaaatcacaaacccaagagaccttaaagggattcttgagacgagctcanaatgagttcggattgaggatcaagaagataagaagcgacaacgggacggagttcaagaactcacaaatcgaaggctttcttaaggatgagggcatcaagcatgagttctcttctccctacacacctcaacaaaatggtgtagtggagaggatgaata

SEQ ID NO: 3357 - DNA, 463 bp, Zea mays
  unsure (1)..(463): unsure at all n locations
atgcaancttgacnacaccatntgacattacacataanatttcttagatctataatatntagntcatttctcaacatgcagaagcggggtctatcaagtggcttagtgaaaatatccgctaattgatcttccgacctcactccttctaaaatgatatctcctttagcaacatgatctctaaggaagtgatgacggatatcaatgtgcttggtgcgagagtgtgtacacgattattagcaattttaacagcactctcattatcacacagcataggtaccttttctaggactacgccatagtctagaagagtttgtttcatatataaaatctgtgtgcaacaagcacctgcggcaatgtattccgcttcggcagttgacaaggcaacactattttgctctttggatgtccatganactagtgatctaccaagcagatggcatcccccagaagtacttttcctatc

SEQ ID NO: 3358 - DNA, 454 bp, Zea mays
acttaaaactcaccctcttcgcattgtaacagcttttcatctctctgcgtatgaagaatgagctcttctggttcagcaactgaagaggtctcctcgccaaactcatgcaccacggccggttcaatatagcatggtcgatgggtaaggaccttcaactattagcccttcggcgcaggatcgactggagtggccgaagcagcagttttactcttctttccctgacctcgtactggataacagtagtcggggtagacaaagccaatagcgtcaaagactctgttcaatctctatcttctttgacctctgaaagctgcggataatgcattatcttctgccttggagtatgatccaagcagttcatcactggtagcatcgatgcagttagccagttatcgtttgcgtcattgaatatatctccgtatctgaacgtgtatatcaagtcaaccaagtcacc

SEQ ID NO: 3359 - DNA, 479 bp, Zea mays
  unsure (1)..(479): unsure at all n locations
atgcagcttgtaagaacggatcgcgttactggtgttttttgtggcatggatgctngcgtccatggcggattgctcaccgatgtccgcttcatccgtcgccgggtgtacccacaccatagtcaacaggcgccagccattttttaccggtaagcaaaccacctccgagttcgccttaacccgctccacgtgtagaacccatccatgctcgattatgccccctcgttcgtccagctctcctgctcaccgtcgcggtgccgcgaggcgctgtggacggactgtcaccgcattcgtcaccaatgtggaaccctcccgtaaagatcgcctggaccttctctccaccttttgcgaagaaatactagtatcgagcccggctccccagatcacctgaacaccggcaatggtgccgccgcgtatagctaccacggcggactgtgttgggcatgtgcagctgggttagcgcctgtgccattgatctattg

SEQ ID NO: 3360 - DNA, 369 bp, Zea mays
  unsure (1)..(369): unsure at all n locations
atcaaaagacttctttggctaaataaaagcactataaagaagtatctcgtctttgaagtcaagtagcaccttcacccaacatataagtatatgaacatactagcttgccagcaagtgaaaaaacctactgtggagtcccttcgaaaagctttccctatgatagaatgaacaatgcgtcacatggtaatataactctagaaccaacaaaataatagcaaacatgacatagtagaaagacatggaaagtgaacgaaaagcctttgtggcgctcgcaggagataattggtcaactttaaatgtgtcggcgaccataattagggggaccctcaaggctcctaatntcagctggaacccccatctcacaaagct

SEQ ID NO: 3361 - DNA, 281 bp, Zea mays
  unsure (1)..(281): unsure at all n locations
cagccagcccatgctagactnagcggataagcaagcatctagaccggcctgctcttttgcaaaatcaactaaatagagggtgtcatctaagacacccttaaaagctaatgaaccatcactttttctaaagacagacacatctacatttgtgaatagacaattgtatcccatattacataattgagctacggatcacaaagtatatccaagcgactctactaagaatacattagacatagaatgctcatttgagattgcatcttgcctaagcctntaacctt

SEQ ID NO: 3362 - DNA, 444 bp, Zea mays
  unsure (1)..(444): unsure at all n locations
aagctatttatgttggactcgctgcgttcacaaagttgtaccactattttcaggcacatatggttgtggtggtgacctcctacccattaaaggccatcctccacaactctaacgccacgggcaacatcgccaagtgggcagcgaagcttgctgagttccagctggacttccagcctcgccacactgtcaagagccaggtcctggctgacttcatcgtggagtggaccccttccccgagcgctcctgngggtctggatcctgatttggatcccacacctgcggagcccacggcttcggttttcaccgagccccactggacgctcttcttcgacggatccgcccgccaataagctatcggcgcttgagtggtcctcatagaacccaacggagatcaagtgaagtaaatggtgcaccttgagttcaggccaccaacaacatgacgga

SEQ ID NO: 3363 - DNA, 389 bp, Zea mays
  unsure (1)..(389): unsure at all n locations
acactgcgctgatggtcctggacaaagtcccttgatcatggcttcattaacaatctcatttggcaccgttggctcctgagctctaagacgtagaaaccttcggacatacgcctgtanatactccctgtggacctgtgtgcactaaaatagggcttgagcaggcactggcttcgtttgaaagcccttgaagctagtgactaatatatccttcaacttctgccacgatgtgattgttcccggccgaagagaagaataccagcgtttgagcaacacttctgactgctatgatgaagggattcaccatgacggcagtgttgccaccatatgatgatatggttgcttcataactcatgagaaactggcttggatccaaatgcccgtcatacatg

SEQ ID NO: 3364 - DNA, 406 bp, Zea mays
  unsure (1)..(406): unsure at all n locations
tcgaccatagaatgacttctattaacaatcatacttcttagtgccgcgtatactatcaatcaatatctcttgatatgcactaagttaaaaggagaattcatgatacatttatgcagattgtgatccatttgccgtctgctaacaataacttagaaaaggatcacttgttgtagaactctcttttgtgcaaaatatttccatatattgtcttaagaataggtcttaagcaactaagacaaaggacaaagcacaatgaagagagcgtctctatgtgaaggtacaaaacgaataanactacttccattcatttacatatgtacctaaatcttcctcttgtatacattccttgcatatcttgtatagaaagaagagaaagcatgtccatgcatatccctgcgtcatatct

SEQ ID NO: 3365 - DNA, 415 bp, Zea mays
  unsure (1)..(415): unsure at all n locations
tgtccagtggtattatttaggacctaaaattgggtgagtttctattgagtccaaacaatgcctaataacccactatacacgatggctatcgtttctctatccaaaataaacaaagcattcactattcagatgaaatttctctactaagcctacatttccaagacaaatgaagcaagcaaacatatatggcaacagtctacaacctttgaaggacgtgcatgtgaggtagtacgctctaccggaatccagctctttgccgagtgctttctgtcgggcactcggcaaagatgtctttaccgagtgccgcattcgacaaagttctgctctcgataatgaccacgtttaccgagagcagaactcccggcacagaaagacactcgacaaagaaaactntgccaagtatcatacactcggt

SEQ ID NO: 3366 - DNA, 436 bp, Zea mays
  unsure (1)..(436): unsure at all n locations
aagcttctaaaggagaacacgtgatatgtttgactaacttgcaattcgaaaagatagaccttgtgcagctggtcaagcaggtaaacaagtgggaggagcgcatcacagcaagaatgtgatgaccacttcaagacccctggagctactacatatggacctcttcggacccgtcgcctatctaagcataggaggaagtaagtatgggctagttattggtgatgacttttcccgcttcacttgggtatactttttgcaggataaatctgaaacccaagggaccctcaagcgctctctcaggagagctcaaaatgagtttgaactcanagtgaagaagataaggagcgacaacgggtccgagttcaagaaccttcaagtggaggagttccttgaggaggaanggatcaagcacgagttctccgttcctacacaccacagc

SEQ ID NO: 3367 - DNA, 399 bp, Zea mays
agcttcattcatgatcagcacaatccagggttctttttttcctaagcccccaacagtgaactattgcaggacagttctgtcttgaaatttggttgatggctgaactatgtctaattgttttatcaataattgggtgctagctgtttacaagtatgacttaataggtccaagtttattgatttttgttactggtacccccaaattttgttgaacattgttgcttcttgcaagacgtattgtgatctatgaattggaactcatgtctgctataatattggttattggatgtgtaaattttgtgaaatatgttatgtgaacatctgtccgctcgaatgagattgcttcatgggctataaattttgataatataaattactattcatggaaaattaccaatta

SEQ ID NO: 3368 - DNA, 414 bp, Zea mays
agcttcacgaagaggaaccttcggctatcttatatttacagcttcagccgaagaccactgtttcctgtaagaccttcggcgacgaagcatagacccaacatccctggtttaggggagggcctcaagtgaatgctcatctggtttatgcgtgagcagaaggattgtcccctcatataaggacccggttgtcatctttcactacctgtactcatgataagtacaaccactcgagactgtgtgggcagtcactcaatctgaactcgtacggtccaacctcacggttattaaggctggggagcacctggaggataacgagggggaaagttttgtccgagttggacatggtggtggcctgactccttcctggtaaccattatggttaacacgtgcgacgaaagacagatattcgattct

SEQ ID NO: 3369 - DNA, 132 bp, Zea mays
cttaagaacctgagctgcaacttaacggtagaatcaacggcgtgattctctgtcttggcaccggacatgtccggtgtgcaccggactgtccggtgcgccatctatcatacaggctcccaacggtcacttttg

SEQ ID NO: 3370 - DNA, 411 bp, Zea mays
  unsure (1)..(411): unsure at all n locations
agcttctaaaggaagaacacattntgggactattctttgttcattntgagaaagacaaggattgtagcgcatgtcaagcagggaagcaagttggtgttcatcatccacacaagaacatcatgacgactgacaggtcactcgagctcctacacatggatcttttcggcccgattgcttacataagcatcggcgggagtaagtactgtctagttattatggatgactattctcgcttcacttgggtgttctttttgcaggaaaaatctcatacccaagaaaccttaaagagattcttgagacgggctcaaaacgagttcggcttaaggatcaagaaaataagaagcgacaacgggacggagttcaagaattcacaaatcgaaggcttccttgaggaggagggcatcaagcatg

SEQ ID NO: 3371 - DNA, 431 bp, Zea mays
  unsure (1)..(431): unsure at all n locations
ggatgtaattggacatgcaacacttgccttggcactctatatacattttcacacctgctgtatatatcttcagcttatccgccatctgcaggtgaaaaaaaatcaatacgtaccatgaattacattagcacaaacacaacacagcttctacaggttgttcggtttactgtttaacttgtcacaggttgccactcctaagcgtaccacacgtatgatcaaancagacatgtcgttttgcttgaacctacaatcgcggtatgattgctctcctgctacgtacgctttactcatcaattacgcataaaagtgtggcaagatttccttatacgcgactaactgtggtggagaatctcgacatctaaccttacatatatgtcgcataacactgtgtgacaatctttcgcattatacgtatataaccaaacaactct

SEQ ID NO: 3372 - DNA, 460 bp, Zea mays
  unsure (1)..(460): unsure at all n locations
gtgtgaaagtctcttcattccccacatgtgtcttattcttctgtatgccacactccacgcccatgcctagtgcttaggccattaagacatgccatctagtactcgaccttccttcttttgcagaaatcccactataataaaagttgtgcgcgtatatatacatcccgttaaatagcgtcagtgagactcatcaacatgtttctaatagaacagaccacattctatcgatttgtaanatacgataaattataatctccataattacactgaattgactcatacagataagtagaattatactccatagagacatcaactcaaaaacaacattagagaatagagtgcntcattacgatatctgcaatacttgcctaacacctttaaccttgccttggttcccatcacccaatatgaatgaatcttgggaatccttattcttgacgtacgaggtgaacatatt

SEQ ID NO: 3373 - DNA, 433 bp, Zea mays
  unsure (1)..(433): unsure at all n locations
tttatcgtctccaacacatctaacacactagccatcctctttatcttggcggttgctgntaaacctttctgtgtcttcaggatctccactcctgccgaacgacttacaactcataatgctctccgccctctggttctcggtctttcaatcttcgcaatccttaccattgctaccgactcttcaatcctctgcataagagcacgccccttcggctcaataactcgaaaagtctacccgccaattcacgcactgcggcccgttcaatgagcgcggtccgcgagtgacgaccttcaactctttcctcctccgggccggcttgcttgaagcaaccaaagcagcagcccttccaagaaatgcaccctttctttttctgcccccccggctggctatcgatagtcaaggtacaccacacccatatacatcaaaactctat

SEQ ID NO: 3374 - DNA, 196 bp, Zea mays
cttctgtcatcatgcccacaacatggtatttgtgacgctgagccctatacacgacaaaaccctgaattttcctcaggtttgagcatggggacagaccggatttccgggcttcatatctctgtaacacctatgctatatcctattacccccccacaaaacggagctgtagggggagaataagtcttgtgcactgacc

SEQ ID NO: 3375 - DNA, 425 bp, Zea mays
cgtgaacgctcttcatccccacatgtgctaagcggcgatgcctcatccaccccatgctagtcttagctattaagcatgcatctagaccgggctcttctcttgcaacataactaaataaagtttgccgtctaatacacccttaaaagctagtgaaccatcacttcttgtaaagacagacacatctacatctggtaatagacagttatatcccactattgataattgactaaccgatagccaattatatccaagagactctactacaaacacattagagatagagggctcattagaaactgtaactttacctaacccttttaccttgccttgattcccatcaccgaatataattgaatcttgggaatccttattcttgacgtaggaggtgaacatcttcttctccctcgcatatggttcgtgcatcg

SEQ ID NO: 3376 - DNA, 411 bp, Zea mays
  unsure (1)..(411): unsure at all n locations
nnagcttgttctcttttgttgggtagacttgtgatattgatactaatgcatgtcaccgcggtaggagtaatacatacacttttatgcataaagataaaaacattactttgctacctttgactcttgctgaaattgtacaagctgacaaagatagagctgcaagtacccataaggaaccaactaatgagacaaaaattcagcaacaaattaaattgaaagctcctgtcatgcttgctactaaatctgatcttcttgaaactcatgctactgatgcttgttgctatgccttggtttgcaaagatgctttcttttctattgatgatattcctagcactttgcctgcatctgtgaactgaccttttcagcaattccaagatgtttttcccactgagttacctctaagacttcctc

SEQ ID NO: 3377 - DNA, 312 bp, Zea mays
aaggagccgaattttttatcgccttcgcgaaccgggcgaccggagacctcgcgacaaacagggcccacaaaagcccagaacaaaggccccaagggaaggctgaggcacttagaagataaaaaaaaaaggccccaccaaaaaagggcgaaaaccatcctcccacagggcctacaagaagacataatatgctatcaaccacgccggaacgggccgaagcgcgaaacagacaggcccgcccccatgggggagcaaaccacagcacgtctcacaaaaacaaccacaccacccatcgcgaaacctagacagacaaag

SEQ ID NO: 3378 - DNA, 410 bp, Zea mays
gcatgcaagctttgattaaaacaaggaggtggtgttcttcttgtctaaaaatctgcaagtgcttatttgattgttgagttcacccgcttgtctaaaaatgcttaattagcacttaacggacatagacttgtaatggctaaacttcggttaacatgcgttccatgattaaatgggctcttgagtagttggttgtggataggaatctctcctatgttgaacttgtgtttgggatgcttttgtgtgattgtcggtaccctaaaacaggggtaccccttactgcaatgtggaggcacggtgcccatgcggctacctttaatcacgtggtaaaacagcgcccgaccccaccacatggacggctcccgggttgccacgtggccagagaagatgatatactccaggatatccacagt

SEQ ID NO: 3379 - DNA, 411 bp, Zea mays
agcttccactccgtaactcatacttcttcgtctctccgcgtatctctccatctttttggggagagttcaaagcaaaaggacttcgtctttggtacaatcttcactcatttattcatgaccaaaggggaagaaagtacttcaagggatctaatgactccgtttttggcgattcatgccaaaggggagaaaatatttgcccaaagcaaaaggactgcaccaccacctaattttaaaattggagaatttcaattggtaaatttcaaattggtatcttattgtgttcaaaagggggagaaagtagtatttcaaaaatgatatatcaaaaccctcttgaacactaagaggaggttctcatttatgggggagtttgtttagtcaaaggaaaagcatttgaaacacggggagaaaatt

SEQ ID NO: 3380 - DNA, 432 bp, Zea mays
  unsure (1)..(432): unsure at all n locations
ggatacttaagtcacctgaggcatgcagcttgaaggtgcttaaaattcttaactctgtaagagcgcataattcatcagcagcaaagacacttgaaagtcataataagccaaacatgtacttntgttcaactttagcgatctattgtagccaacttgggagctgaacaaatgacatccacaagaagcctttgtttttaaccaccaagtccaactcaatgaaatacttgatctcaagtctgatactgatttcatagccacacaggattttctgagttcatgctagacttactgcacaatacatttaatttccaatatctagatattagaacattcatccagcatgaaactgttgtgctgatttcttgaactatatatcatgttataagcaattcaaaaatcttctctacttgaatgtgctaaatagaccatacc

SEQ ID NO: 3381 - DNA, 407 bp, Zea mays
agcttatgaagattcttcatcccaacatgggctagtcggcggtgccagagccaacccatgttagtcttagcaattaagcaagtgttgagttcagctctatcaaaatctaccaagtatagctgaccctctaacactcccttaaatgctattgaatcatcacttcttctaaagacaatgacacctacatcagtgaacagacagttgtagcccatttgacataattgagaaacagaaagaaaattgtaatctaaagaatctacaagaaaaacattggaaatggaatggtcaggtgatatagcaattttaaccaatcttttgaccaaaccttgatttccatccccgaatgtgatagctcgttggggatcttggtttttctcataggagaacattttcttctcccctgtcat

SEQ ID NO: 3382 - DNA, 423 bp, Zea mays
  unsure (1)..(423): unsure at all n locations
tgcaagctttctctttntgctgagcactgaagagatctttattatgctctataaaacaactcggtatataatatgaggagaaacgtatgccctgctggccacaccacaaataattaactattgatatacgctctcatctcaatcattaaacctacaaaggttgcataaattcctcccgcagttccataaagttttgagtaattaggaaaaccatgggctgtgataaaaatgagctggactatacactttctgcatattaaaaactttgctcggcagcaatggcctgatgccgtgcacttcactaccaataaaaacacacacatttgttctatgtgcttaaaagcacaatgcaaccattgaatgactttgtgaacgttagactatgatggtcattttacttgttgaactgaagtccactaatgg

SEQ ID NO: 3383 - DNA, 311 bp, Zea mays
agatggtattttgatcttaccataccacggttttgaaagcaaaccgcatgcgaaccatgtacttgcaagtatcagtatttttcgatcacaactggtacataaccggacatcatcacacaatgctcttatattaacatataggggcataatagatgaatacaccaaatatgttgataacgccacattgttattaacaattattaaaatggggaaaagatacatatataattcagtctttcatgctgcctattggggttgtcctaaccccccctaaaacattttgttattttgaactactgaaatctttctca

SEQ ID NO: 3384 - DNA, 409 bp, Zea mays
agctttcaagagagtttaacatgattacatcatattgtcccaaaatgactcaactctatctagcctagtaccccgagggtgcaaaagctaagctagttacgaggagtccgaccatccaacttctaatcctatcctgaaacctagtgagcgaacgaagcaacactcgactcgggggaaggtggtcttcccgagccagcagtgtccacactggaggcaggctcatctcctccctcaatgtcgacgtcctcgttggcctcctggtcctggatctcctggtgatgcatgtccaggtgctcgttagcctcagcaagctgctgctgagtgttaatgagctgatcctctaggacctcgatggtgttctccctggtgcccactagctcctccaactcctgaatatcagtggatagct

SEQ ID NO: 3385 - DNA, 416 bp, Zea mays
  unsure (1)..(416): unsure at all n locations
tanagccatggtcagtagcatacgcaagtaaagcgcgaatcgattctatcctagctatgggtgcataggtttcaccaagattcaaaccttcgacttgtgaatataccttggccacaagtcgggatttgttccttgtcaccacaccatgctcatcttgcttgttgcggaagacccacttggttcctacaacattttggttacgacgtggaactaaatgccatacctcattcctagtgaagctgctgagctcctcttgcatatccaccacgcaatcagaaccttgtagtgcttcctctaccttatgtggcttaatagaggaaacataagagtaatgttcacacacatgagcaacatgagatcgagtagttacctccttttgaatatcggcgaagatggcgttcacagcgcgatctcgt

SEQ ID NO: 3386 - DNA, 322 bp, Zea mays
agctgaagccaatcaaaacaagccccttatttttttttcgagttttagttatcaaagaaaatatcagagtggagaagtgtgtacctgttaatggctcagaagcttggcactatttcagctacaatataatgtccttttcacaccgtgtagatatttaaaatgagaactctggaaggtggaaaagggctgggactaataatctgattgtatgtgcataatcttcataatttagcatggagacttatgtgatggacccagggctagaaaaaacaatagatgctgattgacgttttgcagatttgggactcgacagacactgtgg

SEQ ID NO: 3387 - DNA, 359 bp, Zea mays
caacgccgtgaacagtgccttgtcaatggacctataatgaactcgtccatgtcgaccaatctctcggctttggaggcagtgagaaccctaaccatgcttatagactctctaacgcgctctatgggcttaagcaaacctcaagagcatggtatgaatgcctacaacactttcttattgctatggcttcaagtcaaaagctgatctaccttatttataaactcttgcaatgatttgttgatgcaaattatgtgacgaatatattggtcactacaatcactgtaggattcagggatatgaacaaacttcagatgcaatgatggggattgacccccccccgcccccccccccatttaaaggat

SEQ ID NO: 3388 - DNA, 413 bp, Zea mays
  unsure (1)..(413): unsure at all n locations
agctttgngaactatgcgcgtatccaatctgtctgagccggtactataagcgctcgtcaggtgccctcgttcctggtcgaccacgaccaacacccaacataagacttccctagttatttagccaagaccagagccatgatagctctcatggtagcactgtatacccgggtggtcactccatgctccaattaatatgcaataatcttgtttaaccatcgggttaacaacaataaagtaaacttaccatttggaacattaatatcataaacaggagtgactgcgtaaatataagttgtagcaatagcatagctacttgattagatcataataccaggttaaacaaggagtaaggatggaaaggttaggggtatctaaataggtaacccatcatattatgcatatatatcacagag

SEQ ID NO: 3389 - DNA, 292 bp, Zea mays
  unsure (1)..(292): unsure at all n locations
gagctaccgccgctaggcccatcacacattgtttcagctcttcgaaagctctctgctgcaactggccccaatcaaacacttnggatgactctagcacttcgaacaatgcgaaatctctctctgctgatctaaatatgaatctgcgagagacctacggctctgtcatcgtgagcccccttttcggctcggggtccattcaaggatacctcccattctattcggattaccctcgatccactttgtcgatactatgcacaccaggaatttccccttctttactccgaacacacac

SEQ ID NO: 3390 - DNA, 414 bp, Zea mays
agcttctaaagggagagcacattttgggactaacaaatgttcattttgagaaagacaggatttgtagcgcatatcaagcagggaagcaagttggtgttcatcatccacataagaacatcatgacgactgacaaatctacttgtgaagagtttagtaggataatggttcaaaaattcgagatgtctatgatgggggagttgaagtatttcttaggatttcaagtcaagcaactccaagagggcaccttcatcaaccaaacgaagtacattcaagacatactcaccaagtttgggatgaaggatgccaagcccatcaagacacccatgggaaccaatgggcatctcgacctcgacacgggaggtaaatccgtatatcaaaaggtatactggtcgatgataggatccttactctatt

SEQ ID NO: 3391 - DNA, 409 bp, Zea mays
agcttgttgggctaaagagccatgattttcttgttctgctacagtatttactcccacttgctgtgagaaggattttaccagaaatagttagtgctgcactgattcgtgtgagcaattttttcaagcaaatctattcgccagttattcgtataagcgatatgcataagctagagtcacaaatagctgagactctaagcattcttgagactatattattgccatccttttttgatattatggtacacttaatggttcatctccctactcaagtcagaattgctggccctgttcaatttcgtaatatgtacccagtggagaggtaaattttgatatattttagaaataaattaaacttatttttactcaaagggaggtttaacatatatgccatttctcctttataggtttt

SEQ ID NO: 3392 - DNA, 474 bp, Zea mays
  unsure (1)..(474): unsure at all n locations
ctatcatatggacgtganaagtgcctctctcaatggaccatatcttaaagaggtctatgttgagcaacctccccgctttgaagacagcgagtatcctaaccatgtctataagctctctaaggcgctttatgggctcaagcaagccccacaagcatggtatgaatgccttacagattctcttatttcaaatggattcaaagccggaaaagccgattctacactctttactaaaactctcgaaaatgactcgtttgtatgcccaatttatgttgatgatattatatttgggcctactaccgagtctacatgtgaagagtctattacgatcatgacacaaaagttccagatgtctatgatgggggagttgaaatatttcttacgattccaagtgaagcaactccaagatggcaccttcattagccaaacgaagtacactcaagacattctaaacaagttgggatgaacgatgccacc

SEQ ID NO: 3393 - DNA, 426 bp, Zea mays
agcttcgtgccatctcccggcagacatagatctccttgctgtttgggagacaatacaagaagtcttcttctccactgccattgcatatcaacgcccctttccgatattttaatattctggcgcataatagatagacgcttcctctcgtttttctttctctcagaatagctactctataccacgaagacatcgtcgcacatataataattcgtgcaatcttggaacgtgcttaatgagctgcacaaagaatttttttcaaacaggatttgctttaaaggtccccttctactttctccttctgaatccaaggatttctctttggtagactctgaaggtccacgtttgatttctacccgatgctctgtagattcccctccagaagatgccgcttcaatttgtgctttttgaactctcggcactattttc

SEQ ID NO: 3394 - DNA, 416 bp, Zea mays
  unsure (1)..(416): unsure at all n locations
gcatgcaagcttctaaagggagagcacantntatgatttacaaatgtccattttgagaaagacaggatgtgtagcgcatgccaggcgggaaagcaagttggagtccatcattcacacaagaacatcatgacgaccgacaggccgcttgagctactccacatggatctatttggcccgattgcttacataagcatcggcgggagtaagtattgtcttgtaatagtggatgattattctcgcttcacttgggtattctttttacaggaaaaatctcaaacccaagagactttaaagggattcttgagacgggctcaaaatgagttcggcttaaggatcaagaaaataagaagcgacaatgggacggagttcaagaactcacaaattgaaggcttccttgaggaggagggcatcaagca

SEQ ID NO: 3395 - DNA, 317 bp, Zea mays
  unsure (1)..(317): unsure at all n locations
ttatgcacgttgaccatctgcagcatttgtgtaatgaggactctanggagaagcctcgtagtgaacacctgcgcatctacctcggaagtgaatacgggtctagctaacccgggctcgaagggaatcgcgactcatgggtaaagatgcgccacctctgcacaagtgtaaactgatatataacccgcgtcaccgtattgacagcctcgactcctacatgaaattgaacttgaagatggaaataatcgagatccgatgatctgccaacggcttgcttaagcgggtccacttaagtgctttcgatctactctcataccttt

SEQ ID NO: 3396 - DNA, 409 bp, Zea mays
  unsure (1)..(409): unsure at all n locations
gcttccctacttttgactggggcggtgactgnggaatggggatggatcccgagcgcaacgaggaggaatgaggtggagcggtgtttgggggaaaacacctcatgtttttttttatttaaaaaaattatattctacggagtacatttgtatttcctaccccctcgctttctctttcgaaatataaggtacttgattttcttagaaaaaaccaaaataatgtaaatttattttaaaaatataataaaataaatgatttaagtgttttaaacaatcagaatataccttatgatttgaaatgggggaatacgtggtcatgaacctgccacatatgatccagtgaggtagccggtgacatgaccttgttgcgtactacgtgtagcgtcatcattaagtgacggaaacataaatg

SEQ ID NO: 3397 - DNA, 206 bp, Zea mays
cgggaaaagaatggtcatcaagcggcctgggaaaaaaaacggctaattgaaccttaatattaatggaagaaaactcgaaatcccccttttgttggcgaaccctaagaaaaagatacccaatggctatgggcttaatgccgctatgctccacgggaatggccgccaatttaattgcactctcattatcacataacaaaaggactttg

SEQ ID NO: 3398 - DNA, 272 bp, Zea mays
ggagaaagtgttagatgctgccataatggcccccaggcagcgtccacattattgtcaaccataccatataattgtctcttactcacagccttcgacggatattatgacaaacacagaacctactgtaacgattgcaacatggggtgccgaacccaatgagctcagcagtgagtatgtgcatagatctcccattcatgcccatgcgctcgcagattctatactcgactggacgccagacgctcaggaggagaaagcggtacagatgccatacc

SEQ ID NO: 3399 - DNA, 416 bp, Zea mays
  unsure (1)..(416): unsure at all n locations
agcttttgaagaaattatgagcgaccgcggagacgtctgtgccttctctggtgcgagaggagttgcagctattttggagaaagcagagtgcgaacatgtgaaaactttggcccaagctgaagctgctttattggttgacgatacgaaggacccctcggccgaagcaagcttattaggcggaaaatctttcactgacatctgggaaaatggcggccgagggatggcccatgaaataataaagaagagcgaaaaagatactcatgacgctagggaagcaacgaaggcagctgaaaaagctgtggaactcgaaaggaggatatgtattgcttaatgggctttaactatattgtttattnttgtgacttcgaactgatatacgttntctaccgcagctgaactatcttctcttcccgagc

SEQ ID NO: 3400 - DNA, 411 bp, Zea mays
agcttcgggagcaggagttgcaactttttcattctttatttgctctgtggctttttcttctgttgccttttcttcaattatggtaggctttttctcagcgggatctgaaggcccagcatcggttccagcctcaattactgcagcttcgacttctatctacttagtatcagcttcggtttgtgccttggaagcttcaacaactttccctgtagaagcgggattcaaggtttcggttgtttctagcacatccagtacatttaccattctcctcctcttaggagttacgacagaacccatttgtaccttcggtactattgcctttactggagggctcaaaacctctggcatctttgttatttcttcagtttctggcttttcaaccttatcaaccttcgtttcaactaccttgac

SEQ ID NO: 3401 - DNA, 474 bp, Zea mays
  unsure (1)..(474): unsure at all n locations
tagntagtggcgaagcttgaagtcacctcaagctggcaatatagttatttctgatgctcgccttctccttgaaacttgagtgtaccttataacgctctgttatgcacaggatgacgcagccgaagagcaatgatccgaagcttggcggatgatccgaagctgaagacactgttatgaaaaaactctagagaaattcttgaattattcttgctaagaatattgtaatttaagaatcacatactactatgtaaatttgtccataccttggaatatattgttaccttctcgctcatgtgcgaactgctctgatgtggacgaaacttgtatttcttgagccgaacgcgacaaataccttccctctttttcgtacacaacgaagcataaatctgcttcttttttctccttgcanagtcttgtcattacagccgaaccactgtccgacttgtatgaatgacgatgtcgaccattaatgcc

SEQ ID NO: 3402 - DNA, 450 bp, Zea mays
gatccttaagtaacctgaggcatgcaagcttgacattgtctccctggtggaagccaatgttattctttatgccagggcgtctcccattatagagcatgcttctagcaaatttaaatttttcattttctatcccatgctcataaattttactagttagctgcgctatgtgatcattttgttctttaattaaagcaaggtgatcatgaatagcatcaacattaatatctctatatctagtacaaatagaaatatgtactacagtagaagcagagggttggccagatcttaattcctctatcttagcatataaagtggcattctcatttctaagacaggaaatagagtcattggaaacattcacattcttagccttagcaattaatttatcattctcaatcttaaggctagaaactgagtcatttaatttgtcaatcttagcaattaaactag

SEQ ID NO: 3403 - DNA, 407 bp, Zea mays
agcttgtgaaggttcttcatccccacatgtgtttagcggcgatgccatagccagcccatgctagtcttagctattaagcatgcatctagaccggcctcttcttttgcaaaatcaactaaataaagtttgccgtctaatacacccttaaaagctagtgaaccatcactttttctaaagacagacacatctacatttgtaaatagacagttataccccatatgacataattgactaacagatagcaaattatatccaagactctctactaaaaatacattagagatagaatgctcattagaaattgcaattttacctaacccttttaccttgccttgattcccatcaccgaatataattgaatcctgcgaatccttattcttgacgtaggaagtgaacatctctcttct

SEQ ID NO: 3404 - DNA, 143 bp, Zea mays
gggatccaatttgaactggaaaaaccgcactcctatatcccaaaccataagttgaagcctcctaataatataatccaacaggctcggggaaaacaatattcttcacaagaaaaagcgagaagctcaatttttgcctcaaaaat

SEQ ID NO: 3405 - DNA, 491 bp, Zea mays
  unsure (1)..(491): unsure at all n locations
actaagcttanatggtgaattttagactggcctgtaactatatttatttagaactcaacatatggtatactctggtcccaactgcctccatgcttaagggcacatgctcttaacatatcctcaagtacttgggtagttctctcaatctggccatcagtttgaggatgataagctgagctgaagttcaactttgtattctcatgaagactcttccaaaatcttgaggtgaattgagatcctcgatcagatataatcttcttcgatacgccatgtatgcacacaattcgagccatgtataactttaccaactgggaacccttgtaagttgtgttgactggaaagtgagccactctggtgagtctatccacgatcacccatatagaatcgtaacccttctgcgtgcgaggtaacccgataatgaaatccataccaatttcttctcactctcattcgggtactttaatgggtgtagagtccactgcgcttgatgt

SEQ ID NO: 3406 - DNA, 356 bp, Zea mays
aacttaaaactaagctttgtcttggcccaccgaaggccatctcaccttgttaacatcgctcggtgactcacaccagatgacggagacactcactacactctttattcctggccagcagcagataagtctctcttcttcaagcgaggcgaggtcttcgctgatcggtactgtccgcctgggcatggcctgatcgaggggaacactcttggtccccgcttggcactgcaactgtgctttgtcggctgcttgtccgtcgggctggcccgcgcggagacctcacgctgggtcgagagacagtgtacgtccctctgaccgggcaccaagtcctctctatgttgcgcgcccgctgctggttg

SEQ ID NO: 3407 - DNA, 409 bp, Zea mays
gcttctaaagggagagcacattttaggacttacaaatgttcattttgagaaagacaggatttgtagcgcatgccaagcaggaaagcaagttggcactcatcatccacacaagaacatcatgactagtgacaggccattggagctcctacacatggatctattcggtccgattgcttacataagcatcggcgggagtaaagactgtctagatattgtggatgattattctcgcttcacttgggtattctttctacaggaaaaatctcaaacccaagaaaccttaaagggattcttgagacgagctcaaaatgagttcggcttaaggatcaagaaaataagaagcgacaacgggacggagtcaagaactctcaaattgaaggctttcttgaggaggagggcatcaagcatg

SEQ ID NO: 3408 - DNA, 418 bp, Zea mays
  unsure (1)..(418): unsure at all n locations
tctccatggtccgcgcgcagcagcagctccaagctctctgtttccttctncctcaaagccgacgaccctggtgtcttcttcaatggagcatggcgcaaggagcaaacatccctggcttggccacagctctgcatgctctatccactgcgccccctcctttctgcctggttctgcacacgcggaacgggggcacccttcttccccaagagcagggagcagccgcttccatctaccagcagttcgcccctgcgagctctcttccctttccatggctcgagcccgagattcctcatggcgctccctccttgtccatggctgccagaccttgctccccttcgcgccactgggcagcagcttttcgctgcacctccatggaaaccagccgacctcatagtacacggcattcccagaacagcct

SEQ ID NO: 3409 - DNA, 414 bp, Zea mays
agcttatcccatcctcaacaaaccgctcggtgttccatgatttccgagctccatggctcaaccacccgcgtgaattccgcgctcagctgcaaccactggctgggatttcgatcggaagctgaccatcgcgcacccgggtgactatataacccaagccttgttgctttgtggagcaaggaccgccgtgtgcgcaacatcgaagaagcagagagggcgagaaagaatatggcctggatgtcacctctggtgcccgtcttcttggtgccgttaggacttcagaggtggtcatggatgggtgggcatgtggtgtggctttgggaggccccaattcgacgaagaagcttcggaccatgggaatcgctcaccaaatttctctgctaccgcggtgccgcgaaataccgtcgccggcccact

SEQ ID NO: 3410 - DNA, 280 bp, Zea mays
ggaagacttctcattccaacaggagtcccccagaaacaaacgcactcccacctgcaaaaaactccacagccacattgaaagcgccccgcctatctataacgtaattgctactcataaactacgtcgagatcgaaaggactcaatcagagcgctcaaccctattctcaactacacacctccgaatgaaataaacgtagccacaccgcttgcatacgacccgcgaatcacgatttatcctccgagccaaccatgatcatttctacaaccaactacggggacc

SEQ ID NO: 3411 - DNA, 401 bp, Zea mays
agcttcaaccatgggcaagaacaacatgcgcttgcgtgagccgactcctccatcggaggagtttggtgactcggaatactcggaggaggagttctcctccgagtccgaggggtctccggctcccgtctctcccctggcgtcgtccgatgattctgacgactcccacgggatagccgcggaggtctggacgtatatccgggccgtcgagcgcgccgggctcgaaggctcggatgagtcggagtactcctcggatgaggaggactcggacggcggcgacgagggtgaagacgacgacgacgacgacgacgactatgacgatggcgacggcgacggcagcggcagtggcatgggcggcggcgactgcagcatggacagcaccaagggcagcaacaggggcagca

SEQ ID NO: 3412 - DNA, 307 bp, Zea mays
atacacactcagctttccctcgtcacaatctggcagcaaacagcgtttatcaatgaatgcctgggtaactccacacctaccctgctggttatatagcggcacatgcgggaaggtgaaccatcaaggtcctccgcaccgggcaaaccaccacccacactcactgaacgacgggccacagggtcccaaaacgcgaatcgccagagcgccgtgaaccgctgcaaggtggggccaccccaccgcgcacactatcctaatccgtcctcgccaatgagcttccggaaggagctttccggatctgtcgcaactc

SEQ ID NO: 3413 - DNA, 415 bp, Zea mays
  unsure (1)..(415): unsure at all n locations
agcttataaatgcagggaatttatatactctttatctttgaactnttgagccaaaactcaccaagtgatccgtggttgtctggctacaaagctggtcaaggttgttcgggtctggtcctttgtggccctcctggtagacctcaatgtcactaggcttttggccactcgtagcttcctgtataaacaaaaaacattcataagaaatcgtactatttgctgatcgacatagctagatcaaacttaccattcttttagcttttcgtatcatgtcgtcaccgccaaacttgtggataggattggttcctccacattgtctgtgatgcgctgacgctttctggaagccttcgaaagcccaatatcgacaccaagcatagtacgcatcatgcacgggcgccatccatggaaccatcacctg

SEQ ID NO: 3414 - DNA, 414 bp, Zea mays
agcttaaaggatactattcaactaaagtaatatttttttattagaggccaaggtatgaaaacttcctctccttcagatgttttagtattctatccttagtggaatgctccatagtataggttaatttccttgcaatataaaatgttcaatagtgcatataactttgacatcaactatatgtgtgcactaatttaaaggaatttaatctatctttttgggtttcaagaatgatgattcattttccatccacatataaggattatcatttgtgaaaccctcccttgtgtttctaatgctctcgtttctaagcgtttaaataaggtccttccaagtgctttcaagatggattcaaaatccacggatataagagtcttggttgtttcaatcattgagtttcaacgggtctcatatcaa

SEQ ID NO: 3415 - DNA, 417 bp, Zea mays
  unsure (1)..(417): unsure at all n locations
agcttctaaagggagagcacattntaggattaacatatgttcattntgagaaagacaggatttgtagcgcatgccaagcgggaaagcaagttggagtccatcatccacacaagaacatcatgacgaccgacaggccgcttgagctactccacatggatctattcggcccgattgcttacataagcatcggcgggagtaagtattgtcttgtaattgtggatgattattctcgcttcacttgggtattctttttacaggaaaaatctcaaacccaagagaccttaaagggattcttgagacgggctcaaaatgagttcggcctaaggatcaagaagataagaagcgacaacgggacggagttcaagaactcacaaattgaaggcttccttgaggaggagggcatcaagcatgagttct

SEQ ID NO: 3416 - DNA, 249 bp, Zea mays
aatgtgatgaccacatcaagacccctcgagctgctacatatggatctcttcggacccgtcgcctatctaagcataggaggaagtaagtatggcctagttattggtgatgactcttcccgcttcacttgggtgttctttttgcaggataagtctgaaacccacaggaccctcaagcgctctctcacgagagctcaaaatgagcttgagctcaagggcaaaaagataacgagcgacaacgggtccgagttc

SEQ ID NO: 3417 - DNA, 431 bp, Zea mays
gcatgcaagcttcataagcatacaaagttcgaaaaaatatataagtgtatttaacaggcaaacaaagtagtcaatctgatctacacaaggtaccacaggaactaattactaatcaactaatttgatgtgatggcgtacaagattttgaagggtgtgcgtgaacggaaattaattatatgtctcaacgctgcaaaagcttatagacaatgcaagacgactagaccaattagaatcaacaatttgttatattggtcagaaatatcagcatcatgtagatcaccatattatggtagcatactaccttaaaaacaagttattactttcatcccaactatttgcacccaagtgacagcatttccagtcgccttggacatgaactcttgatatgactgttaatactgttgaggacacaagggctttgatattaccta

SEQ ID NO: 3418 - DNA, 410 bp, Zea mays
agcttgcacacctagctcttttgaatttcttttatcatatctcttttatatgccatgactaatgtgttttcaagtttatttcacaccaagtcataggtatatcgaaagggaattggagtcttccgcgaagacaaaggcttccactccgtaactcatacttcgccatcactccgagcaactctctcgtctttgggggagaaatgagcatcaaggaaaagaacttcatccttgggggagagagtaaaagctcaaacgcaaaaggacttcgtctttggtataatcttaactcacttatttatgaccaaagggaaagattgcacttcaagggctctaatgattccgtttttggcgattcatgccaaaaagggggagaaatgagcccaaagcaaaatgaccgcaccaccaccacc

SEQ ID NO: 3419 - DNA, 413 bp, Zea mays
agcttctaaagggagaacacattttggttactaacatgtaacacctcgggatccacaaacaccccagaatgctactaaactacacctctaacatccgtatataaaatttcgacagcatctcctttgaaaattgcataaacggagaagcaacaaagtataaatagctatcatgataagaaaacataatcgacattaataatctgctatcaatgggaagacaaccataacggcataaactaaattaaccagtgcgcacaactagttagaaacaaacatcatttgacaagaagcttctaattaaatcatgattgcgcctaagcagcgttattatgagagtgaaggtggatgtgctgctacttcccacttccctggatgagcaagaagcacctacattgagtaatgcaagagtgaga

SEQ ID NO: 3420 - DNA, 460 bp, Zea mays
  unsure (1)..(460): unsure at all n locations
tcggcttcatctatattgtggatggacttcgagtctgccttatttcctcacgctttctggcagcttcctgacttccatgaattgcaatacgcccttgttncgaaggtatcttcatgcataggtatgctggatgaagaattgctctcaaagcattaagtgtcccacgaccaatgattgcattgtaagggtattccatgtcgacaatatcaaacacaacttgttcagtccttgtgttgtggacacatccgaaggtcactggcattgtgattcttgcaagtgctacgatctgccttcctcccaagccataaagagggtgtgtagcatcatgaatcttgtcctctggctcttgcatctgtctgaaggccttatcaaatgtgatatccgctgcactgcctgtatcaaccanaacattatggaccagaaatcccttgatgacacaagatataaccatagcattatt

SEQ ID NO: 3421 - DNA, 407 bp, Zea mays
agcttgtggcgccctcgagcgtcttgtcgctttttaagcaccaaatctcctacttggaggtctcggggccgaacccctcgggcgtggtagcgtcgcaaagactgctgatatcgcgccgagtgtagcaaggccacgtcccaagcttcttctagctggtccagcgagtcttctcggctggtctggttgctttggtcgacgtacgcccttgtcctcggggaaccgtattctaagtctgtgggcaagacagcctcggccccatagactagaaagaacgatgagaaacctgtggctcggcttggcgtcgtcctcagactccagaccaccgagggtagttccttcatccaccaccttgccgaacttgtgaggtcgttgtagatcctcggcttaagtccctgcagaatcatgcc

SEQ ID NO: 3422 - DNA, 431 bp, Zea mays
  unsure (1)..(431): unsure at all n locations
tganagagagaagaaagatggtgagcttggccgactgccttattactataagttcaagaaatattctaaagcaccctgtctagaatggctcgaaacgatcgaagtgatgagtactgaaattcttgggaattattctaaaaaagaggatcaattgatgacatcagccttcagtacccggccgaaacgaaggctaaacagagtgcttgatgctatacgctttgaatatcctgattatgtgcggctcgataagggtgtcgaagggcataaaaggaatagagtagctggcactctgattaaagacgacgaagatcaaccataaaagaagaaagaatagtttgaaccgaaggtagctgcttcaagacaaagaatagctgcatctncaaagcccgtatctccaaagcctgtatctccagaccaaagagattggtccg

SEQ ID NO: 3423 - DNA, 385 bp, Zea mays
agcattgagcacaaagaaacaggtgttgttcttttattataaggaattattagctctgatcttagcagtggaaaaagggaggcaatatctgcaacatgcagaacttgtgataagaacagatcatagagctttgagttcttttggaggatcaagtgttgcattcatatttgcagaagaaaggtatggcaaagcttatggggctgcaattcaaaattgtgtatagaaaaggcaaagagaatttatctgctgatgctccgtccatagtgggtcatgtgatggctctgcagtctgtttcagaagtgacactcagttggattcaagaagttatcaattcctatgtcacggatcaggcagcccaggatatgttggctcaataaagtgccat

SEQ ID NO: 3424 - DNA, 413 bp, Zea mays
  unsure (1)..(413): unsure at all n locations
agctttaagctctttgacaagaaaattattttattcatttttaacaaaaaatgcatcaatgcaggaatgaaatttttgagtggttaaactaggtgtgaagcacgtatatgcatagacatgctttctcttccttttataaaagatatgcaaagaatgtatataagaggaagatttatgtacatgtataaatgataggaagtagtttacccttttgtacctttacataaagacactctcttcattgtgctttgtccttagtcttggttacttaagacctatattcaagacaatgtatggaaatattttgcacaagagagagttctacaacaagtgatccttttctaagtcattttgtcatatatcaagtagatcacaaattgcataaatntattctgatttctccttttgactta

SEQ ID NO: 3425 - DNA, 307 bp, Zea mays
tatccctcgagggccaaatgaacatgccgatttgttagccaagtctgcagcacaagggctggccgtaccttcggatgtattcctcgaaacaataaaggcaccttcaccggagttactcgaaagagccagtcctactatctctcccgtgtacagcgaagactggagaactgaaataatttcttaccttcagggccacttcctatcacatgacgaagcttataataaaagaatagaggcaacagctcggccgcatatcattatagaacgcgagttatacaaccatggagtgtgcgccccgctgctcaag

SEQ ID NO: 3426 - DNA, 405 bp, Zea mays
agcttattacacacgagtgctacctatgtgtttcccgaactctttctctaaggtgtcaccaaattccaagagaaggtcatcaagactggccagggacatgtcctcggggtcggactggttcctgggagggttctcttcctgctgctcagtctgacatccttggcttttggtcttcttgcgggtttttcttgcgggggcgagcttcttcagtttcttgtcgtagtccaatttgagggtgcggtaagcttcacgggtattggcctcttcgccttcagctagcgagaggctctcttgaagggacgctttttcttctgaaagttccctgactttctgctccaggctttccacctgggaggttatggaggtgcactggagggcgaggtcatcatattggttatcaagggt

SEQ ID NO: 3427 - DNA, 266 bp, Zea mays
tatgtccaatttactttataattcactggcctgcattacttaatggaaacctaacgagtgactagcttcgcatctaccgtgtccttaattacctttcggctacatggtagctcatcctttggttaccttaatccacgaacatgataagaaccttcatgataccatgatgctctccttattatgatgatgaacttgcgatactttacgggactcacgctgtttctcgagtatctctacataacgacctattcattgacagaccacct

SEQ ID NO: 3428 - DNA, 407 bp, Zea mays
  unsure (1)..(407): unsure at all n locations
gctttgccaaatagggcgcataattatatctttaatatcttcccgcgttttcaggtcattcttcacataaaaccattctgtcatccagtcgccgggccatctctttcgaaaggttggcacgggacagcttgacccagaccgagaaacgaagctgtagcagccaaaattattgtgatactgttccttaccccagggttttgtctcgtatgataattcgcgtatgttgcagaaacttttcgcatcaggttccagaccttggcttctcacggcccacacgaagatattcagccttatgattgcttcgggggtaagttgatgaagatagacttcaaacattntcagcacctctacgacaaagctgctcaggggaaatcgtagtccagctttcaaaaagcttccgaacacta

SEQ ID NO: 3429 - DNA, 412 bp, Zea mays
  unsure (1)..(412): unsure at all n locations
agcttgtgaagattcttcattccaacatgtgctagtcggttatgccagagccagcccatgttattcttagcaattaagcaagtgtcgagtttagctctatcaaaatctactaagtatagctgaccctctaacactcccttaaatgctattgaatcatcacttcttctaaagaaagtaacacctatatctgtaaaaagacagttgtagcccattttacataattgcgaaactgaaagcaagttataatctagagaatctacaagaaaaacattggaaatggagtggtcaggagatataacaattttacccaatcctttgaccaaaccttgatttccatccccgaatgtgatagctcgttggggatcttggtttttctcataggaggagaacattntcttctcccctgtcatat

SEQ ID NO: 3430 - DNA, 410 bp, Zea mays
agcttcagaatgattgctcttgcacaaaatatttatcctttataaataagaactctgttggctaatgtgtttcaaatatagtgatagtagaaagcatctatttggctagaaacttgagaaaaccatagaaaaataattaaaagatatcaatgattagaaatttgtatcaagtcatgttataacacctaaaagccagcataaataagttttaaagaattgcccactgttaaatagtagttgtagatcaaagcaccccttcttccctagaatttaataattttgtacagagaaaactattcactttctgatccccaaattctgagacagagaaacacacaccagtaacaagccactgttattgttgcagaatttttagaatattataaaagcaacttgtagttcaaacctac

SEQ ID NO: 3431 - DNA, 413 bp, Zea mays
agcttgcacttacgaccaaaccgcacccatttacttatcatattcaatggctcacacaatagtggtgaggtcatagtaaccaacctggtacgaattaattctgctattggttcatatcgtgatgtcgtcgactgtgatgttgagcctatggatgcttgtaatattatgctacgaaaaccatggcaatttgattcctattgcatgcttcatggtagatcaaatcaatagtctttcatacaccatgatcagacaattattttgctttccatgtcccctgaggctatcgtgcgtgatgatgttgttaaatctaccaaagcgtaaactgagaacaacgacattattaatgcttgttggcctttacaaacatgggatctaagtgataggacattgctcgcttgcacacatactgatgt

SEQ ID NO: 3432 - DNA, 405 bp, Zea mays
cgcttataagtctactctcatatggatccggaatatagccattctgttctatgccgccgtaatcatcgctttcttaccgagatatattctgccttttctgcccatggtgctgcgtcaccctattttggcccaatggcgcgcgtatcaagttaagtccattagggacgcattctatggttgcagcacgaccccaatacccttgtggtgcgtcttctatgtttatagactccctacccgccaccaacaacaggggggttttgtttacatcaagtttagctctcgttacttgcttgcaagcgcgcgtgctatttcagccgctcgtcttcttgtcttcggaaccccaccatattggagtttgacttttaaacccacacttagatctggtaatcacgacttggtccaatt

SEQ ID NO: 3433 - DNA, 409 bp, Zea mays
agctttctcgactaagtcggggacagggccccattgttggtgaaagacgcgtaagcggcaaggccgaccgagccgagggattcccacgcctctgggatacggatacctcactcgtcccttccgcgaaaagcaactctcgctcacacaaacatccctgttaccgacagagtccagatgctcgaaacaagaggaaaaaagacgcagcttcgcaagcgcggcgagggtgtgtttttctggcctcggcggccgcaaaaagcacacgctacaagatgatctgatcctgcaggctcgggtcttcacgctgaagggagccgtagcaccctcggcatcgacgacgtcttcagcatagcccgacccagcctcgggcggcgacgcggtccatggactcctacgggaattcggcccgagc

SEQ ID NO: 3434 - DNA, 376 bp, Zea mays
  unsure (1)..(376): unsure at all n locations
ctaaattgtcttgcagntntatgcatccggcgactctagtttgatattctacagcggatgcacaaaccacatgacgggggagaagaagatgttcacctcctacgtcaagaacaaggattcccacgatacgatcatctttggagatgggaaccaacgcaaggtcaaaggcttggtcaagattgccatcactaacgagcactccatatcgaatgtatttctagcagagccccttgtgtacaaccttctgtctgtaagtcaattgtgttacatgcgttacaattgtctgtttacaaatattgatgtatcagcctttaaaaagagcgatggttcattaccttttaagggtgtattatatggcaaactctatttagttgac

SEQ ID NO: 3435 - DNA, 422 bp, Zea mays
gcttagatcattcaacacaaggacaaaatgttcttatgttttcacataaagggttgaacctgaaattttggcaaggcgtctgtcaggaaagcccactggtgagtttcatctgcagtcacagatttccaggagtccccataagccttctggtactcatcaagaaccttcatgaaacccaccatattaatatctgaatctcataaagggactacaaagagtgcagcattttgacaatcgataaagactgctcagtaagttactgagtctcataaaagaagagcagcattttgataattgatgaagacgactgatattaattttcaatcagtaatgaaaattaagaaactagcaaggagcaaacagttttggcattgccaatgtccaatgcacagaacattgtagttgtgttgagttcaactgca

SEQ ID NO: 3436 - DNA, 347 bp, Zea mays
  unsure (1)..(347): unsure at all n locations
gatattaaattcctcgattgatataggacttgtcttatctatntgagataaccgnccacatagcgagtgagaaagcttaactcgggtcaaacctgacaagtcttacgcttaagcttttagcacttaacattttacttttcatgcaattattggttcttgaaatatgcataaggtactgcacttagggggagtattcacaactcaaatcactcttgaaaacctctagtgcaagccaaaatgcaaatttcaccatttgcctattctctctaaaaattatctagcctatggcaaaatatcctgaaaagtatatgagggtgccatacctgtcccaacaagtgttatttgtg

SEQ ID NO: 3437 - DNA, 412 bp, Zea mays
agcttggtgccgatggagaagcagaagtctttttaatcttggttgtcgaactgcttgccgttgtcgaccgtgagttcggatggtactccgaagcggcaaacaatattttgccagaagaatttctgggccgtctttgatgtgatggtggacactgccctcgcttcaatccatttggtgaagtattcaacggctacaaaggtgaacttgaggttcccctgagccgtgggcaggggcccgacaatgtctaggccccagcgttgaaggggccatgtgtgggcgatcaacttcgtgaactgcgagggtcgtcccgtgcgtggggaaaatttctgacaggcctcgcaggatctgacaacccgatttgcggcgcagataatggcgggccagtagaaaccttggcgtatcacctttgccg

SEQ ID NO: 3438 - DNA, 411 bp, Zea mays
gagcttatgaagattcttcatccccacatggtctattttgtggtgccagagccaacccatgtgaatcttagcaattaagcatgtgtcgagttcagctctatcaaaatctactaggtatagctgaccctctaacacacccttaaatgctattgaatcatcacttcttctaaagacagtgacacctacatcagtaaaaagacagctgtagcccatttgacacaattggaaaacagaaagcaagttgtaatctaatgaatcaacaagaaaaacattggaaatagtatggtcaggtgatatagcaattttacccaatcctttgaccaaaccttgatatccatcctcgaatgtgataacctcgtggggatcttggtttttcttatatgaagagaacattcttttctcccagccata

SEQ ID NO: 3439 - DNA, 386 bp, Zea mays
  unsure (1)..(386): unsure at all n locations
agcttggttactggagtcaagattattcttacatgatcttttgagtggcctccatacgatggcccaaagtatgtcgccgatccaagcagtcgttggaccaagcgtggatccaggaagaggacgaggcacaagatggttttggatcaggtaggtggtaggagtacgagggtaagaagaacaccatttcttaccgaccctgaacagtatgagtgtggcaaatgcggtagacttggtcataattcacgcacttgtcgttggcagattagcaagggttgtattatttaatattnttatattaccttttttatttaataagtacatattatttactaacattaatttgattttgtaggatggcacagtttcacctgctcgacccgttctac

SEQ ID NO: 3440 - DNA, 396 bp, Zea mays
  unsure (1)..(396): unsure at all n locations
agcttntgatatgggggagacgctgtctttgttttcatttgncgccactaagcagcgacgggggaaaagaatacagtcgtcggactgttagcgttggctagctcctgcgatcaacaacttgcatattcttatccaggagtgctggagttagactggtctaatctctcccggtgcctgccgccgacacccgtcaccgagctgcggccgcgagcgcgaatgcagagagagtgtcactcacttctcagctaagggcatgtcctgtaatgtttaatatatagtcttttgagttgtttaaatgtgacatttacaaaaaaaaattatagagccgtctacgtgaagctacgaagagatacgtctagctcgtaattcagcagtaacagatgatcattttcattg

SEQ ID NO: 3441 - DNA, 447 bp, Zea mays
  unsure (1)..(447): unsure at all n locations
atactngcactaactatgagggttactaacactataaatctatacatacngngcgataccccaccgctcgataaaccctgggaggaatcagctcaaccatcacctgttgaaacagagaggctatcttagtaaaaggatatactcaagcagtcacatatcattcgtgcttaatgaccattacttctttcctatggcgaaattattggtttctaaaacaactttattagaagcagaacagctagattatccgtcagagtatattagacaacccctgacatggtcggctcataattgaccgcaatccctgaataacctttcttatatttaggataatcctaccttatctctaggataggcttcttgccctccaagcatgtactcctatatattctccctagaggctcaatgcacacattccacatattatacacatctctctctcttcat

SEQ ID NO: 3442 - DNA, 381 bp, Zea mays
agcttgtgaagattcttcatcccaacatgtgtctattttgcgatgccagagccagcccatgttagtcttagcaattaagcatgtgtcgagttcagctctatcaaaatctactaagtatagctgaccctctaacacacccttaaatgctattgaatcatcacttcttctaaagacagtgacacctacatcagtaaagagacagttgtagcccattttgcataattgagatacagaaagcaaattgtaatctaaagaatctacaagaaaaacattggaaatagaatggtcaggagatataactattttaccaagacctttgaccaaaccttgatttccatccccgaatgtgatagctcgttggggatcttggtttttctcgta

SEQ ID NO: 3443 - DNA, 418 bp, Zea mays
  unsure (1)..(418): unsure at all n locations
agcttgaaatagctagtaaatcacacatcttgtgtttaattgttgcaacttgtaataggtgtaaagattttgacattgatgcttgtagtgaacacctagtttcaatttctaaacttaatgatgaattggctagtcttaatgctcaacttaagactagcaagagcgaatttgataagctaaaatttgcgagggatgcctacacgattggtagacacccctcaattaaggatggacttggcttcaagagggaagccaagaacttaacaagccataaggttcccatccccgccaaggagaaagggaaggctcctatggcaagtagtactaaaaagaaccatgctnttatgtatcataataggagacatgctagaaatgactatatgaagtatgattcacatgctatggttgcgtctagttc

SEQ ID NO: 3444 - DNA, 312 bp, Zea mays
  unsure (1)..(312): unsure at all n locations
tatgctggtanaagatgagaacaatgtgtgagtgttgagtttctctatttcagtggtaaaccatggcgtgtgtgcctaaagacacactgcaccagctgaaggtcttatgatgggctacgctgtagcatgaacctcagcatatggaattttgtctagggtccacatagaagaacaagaaatgccaaagtggtgcattctttatagtaacacggtccagttatataccgcgtacacagtggaagtatataattacaacccacgtagtgatgagaatgtatcttcggaacccccgcaatattacacctattatca

SEQ ID NO: 3445 - DNA, 403 bp, Zea mays
  unsure (1)..(403): unsure at all n locations
agctntntaaaggctgggctaagattccctgttcacgagattagtgcggagatattgaagaggtttggcatctaccttcaccagttaactcctaacgctatcgttaggcttagcgtttatatttgggccctccgaagccaagcagtggagccttttgctgacagtttctgtcgagttcatgaattgcattatcaaacaaaggccagaaaagatgggcttcatgaaaacttcggttgttacaattttgcctaccggaaaaccgcaaagtttcctgtaatcagctaccgaagcaaatggccggcaggctggaaatcagaatggttctatgtcaaggttgatgaggacaaagagaagcttgtgcaaagtccactcgagctaactttcggagaaacccgaccccact

SEQ ID NO: 3446 - DNA, 404 bp, Zea mays
agcttgtgaagattcttcatcccaacttgttctagtcggcgatgccagagccagcccatgttagtcttagcaattaagcaagtgtcgagttcagctctatcaaaatctaccaagtatagctgaccctctaacactcccttaaatgctattgaatcatcacttcttctaaagacagtgacacctacatcagtgaatagacagttgtagcccatttgacataattgtgaaacggaaagcaaattgtaatctaatgaatctacaagaaaaacattggaaatagaatggtcaggagatatagcaattttaccaagacctttgaccaaaccttgatttccatccccgaatgtgatagctcgttgggaatcttggttttctcgaggaggagacatcttttctccctgcat

SEQ ID NO: 3447 - DNA, 390 bp, Zea mays
  unsure (1)..(390): unsure at all n locations
agctnntttttcttttttctgtaattacatgatttcttttctctgtattttgatttctctagaccgaattcatcttctatcttctgagatcatctttgaaagtattttatttggtatccctactatgcctcatatcgtcttataaatcccagtaggacatataccttgtattgtttaattcctccaaaaaccctatggagaaaattcgaggaatatatagttggatatgccactaaaagccttttaaaccctagtggaaaaatgtcggcgtttcgagaccgggggtccctaagccgacgagtgaatgtcgctgcgtgccccagcccagatgggtcaagcgcgtgggcgagcgcgaaggggggaagcgaggtggccggagaccggcgtgag

SEQ ID NO: 3448 - DNA, 426 bp, Zea mays
  unsure (1)..(426): unsure at all n locations
ttaagtcacctgagctgcagcttgccgaatgcccaacctcaccacactttatcaactggtgactgtaccctgtcctacaagtctcgtcggggtgctagtggggacaacctgacgaatgtgtggagtctgtggtgtatactgagttggtcgttgccctcctccaggacgagctggtgtattctaaggtggaacatagcgaggacggatgctactactccccttcccatgggtgatagccttcctcttcatctcacccagctgaacacgnttgtgttcaacagctatagccttgtccagaagtctctagaaagatgggaagatgtgaaaaaccagctgatactgaagtggcccaataagtccctccatgaaatgctcctacttcctttcatcattagcaacctcatctggagcatacctcgacaactg

SEQ ID NO: 3449 - DNA, 421 bp, Zea mays
ctcccatgttcataacggttatgcctgtaccatgccgacacactggcgatgaggaacctcctatcagtgatctcaacatctttcaatggagaggcacatatactagttagggcacgttctactaccttagcatgtatgacagaatgcccacattgtttacatgctctctcacatggaagagatggagccatatttcatgtcagtccttattttacctcttacttcctttaccgcaggagccttatatatttaactactcatttgccgcacagtatgttcgactaagaaaactggactcacttccatcagcctacaagcaaaccactatatactatgcgacgacctgggacgcatggaagacctaattttgttgactggctccctcacctgtaatctctctatatccctacgttcatgtatt

SEQ ID NO: 3450 - DNA, 424 bp, Zea mays
tgcggcatgaagcttcgggcagcaacaaagttttccgttttttctccaagaggcagaggcgccaggggcttcgaaagaagatatggggaccatcccacgaagatctactgcttattttgtggtgaagacaagggccacaatacaagaacgtgccaaatcaccatccaaaagcaaaaagagattgcagaagccgaagcccggcaaagtcaaccaaagcaggtcctgcacactgcttcgtgtcactcaccctacataccagaatatgtgggtaatcatcctgcagcttctgttgcttcggctagtcagccacaagtttcttggccacagcttccaccttcgccaccaccacaacctgcctatttacgaggtcagcagccagaagggagccaacagacccatcagcagcgagaattcagggagggat

SEQ ID NO: 3451 - DNA, 388 bp, Zea mays
gatgcttcgaaccaactgcggaaacccgggatccacagtctacctttaatgctactagactacacaactatcattcatatataaaaatctgacagcatctcctttgaaaatgtgcataaacgtggaagcatcagagcataaacagatatcatgataagaaaacatactagacattaataactctgctagcaatgggaagatcaccctaacagcataaactgaattaactaatgcgcacgactagttaaatacaaacacccttgacaagaaggctctaattaaatcatggctgcgcccatgcagcattattatgagagtgactgcggacgtgctgcactctcctcattcccaaatgaatcaagtacccgcattgacgaatgccagagtg

SEQ ID NO: 3452 - DNA, 419 bp, Zea mays
agcttcggctccatctatattatggattgcttttgaatctgtccagtttccttcagcctttctggcagcttcctgacttccgtgaatagcaataggcccttgatccgaaggtatcttcatgcatagatatgctggatgaagaattgcttcaaaagcatttagtgtcccacgaccaatgattgcattgtaggggtactccatgtcgacaatatcaaacacaacttgctcagtccttgtattgttaacaaatctgaaggtcactggcatcgtgatcttgccgagtgctacaatctgccttcctccgaagccacaaagagggtgtgtagcatcatgaatcttatcctctggctcttgcatctgtctgaaggccttagcaaatataatatccgctgcactgcctatatcaaccagaacattgg

SEQ ID NO: 3453 - DNA, 375 bp, Zea mays
actaagcttttgcattggctcaagccctggctcctcacggccactacaatattccattcttatgattgcttcacgcgggatttgatgaaggtgcactcgataaattcctagaacatcaaccatcaagttgcttaatggaaaccgaaacccatctttaaaaaagctctggaagatcacagccgcgttctctccgggagtaggcacacacttcatctccgttctaggccttacagtataccagccccgaatatacctctcgcctatattaccgagatgatccttattgacagtagatcttcccacaactgcatggactcgcgccgcagagccatcttctgatttttcccgcctttccacattatagctatactattc

SEQ ID NO: 3454 - DNA, 422 bp, Zea mays
gcttggccgacgacttgcatccacgcaaatagttttattttatttataattggtggactacacaagatatcatacgaataaaggatcatggatcattacttctagacgtgcagtgcagtaaaaaaagagtgtgtctttgtataggaagaagttgtacatcttcatgtactagcagcaacaacatgtttccccatattccttaagttcgttgttgattaacatcatagcagcagcaacaatgtctctatagtatccacatatagagtaataaaatgtctcggcgatggtgtactaacaccgcacgaacgatgagagatggcgataggtttaagcgcccaccatcctaaagagagagacgacgacctctgacacaccataggctttgtatatatagaccatttctaatatgcttttatcctgga

SEQ ID NO: 3455 - DNA, 372 bp, Zea mays
atattatttcgatcctccagtcttcactatgtacatgtgagattgtgagcactgctctttccatgagctcgattgagggtgcttttattgtttcaaaaaatacttttgaaggcaaagggagcccctgtgccgctgacttatctaataaaactgcatgctcattctctccccttgggatattttttacagaaaatccctccaaagaagcttccaatctttggaatgcatccaaatacttttcaagcttcggatctcttgccttgctactcttatccacgtggccagaaataacttgtgaatcagctttaaagattgccctctttattcccattgtctttagtttccgaagccccaaaagaagagcttcgtact

SEQ ID NO: 3456 - DNA, 303 bp, Zea mays
  unsure (1)..(303): unsure at all n locations
tcaactcatcctgacatgctctcgatacccgcaccctgttcttattatacctaccngcatacctgcagaacatcgccaaattatgcttctgaggaccttcggtagccgcacgcctcatcaacagcgttctgatgcggtcattatggctaacgccaagcgtcactcgctccccctgcaaaagcccccgttgtacccccgcgggttaatgagacggggcgagtggttctcggtgcaactcgtgcgcgtgcgccagcccgttcacgaaaggccgctctccttgagatatgaaccccgcggcgggct

SEQ ID NO: 3457 - DNA, 397 bp, Zea mays
agcttgatgccacctcacatacacagtttttttatactggggattatgccacggacatccctcctactccatacacttcctccgtttcaaattagaacatgaatggttcttttttttgcgagagtcaagatattttacatttaatcaaagccctcaaaataaatcacaaagatttataatatcatcatcattattttattatataagcttggtcaaattccagatgtatatcacacactccatttccccaaccaagttagctaggatgacatattttggaatggaaagagtaccgttactcagtggcggatccaggattgatccaagagggggctactaagctaacgttataaaactttttaaaccaaacaaaaaatataattgatgtttaatatga

SEQ ID NO: 3458 - DNA, 360 bp, Zea mays
  unsure (1)..(360): unsure at all n locations
caagtacagaacagagaacgccgccttcgttgatcatccgaagcccatgcttntatgngaagacatagcagatcagaaggtactactggggtctcaactatctgaagagaaggaaaaaactctgataaggtctttattcaacaacaatgatgctcttcgcatggcaacccgcgatctctgtggtgttaacacggatgtcattgaacattcactcaatgttgacccatccttgacgcccagaaagcaaaagcctcagaacatgtctgatgataaagccgaaggcgctcacaatgaagtacaaagactgctcagcgctggcgtgctcagacacagcacaaatccagaatggttagccacact

SEQ ID NO: 3459 - DNA, 56 bp, Zea mays
caggaccgcttagtagcctagacgacagacacagaaaagaaaaatcaagcgaccca

SEQ ID NO: 3460 - DNA, 440 bp, Zea mays
  unsure (1)..(440): unsure at all n locations
cgtcagaacgcatacacatattacgaagccagattatactctctntcttccatgacgggcacaaggagcataaacatttgcaacaatccaagaacaagccgacaaacttgaagtcaactccactgactgagcataattgttttggaagataacataccctgacagtcttgagctcttccaaatgataatggaccctcccgagtttctcaccgagggaacaaacacaaatgattcaaaccgacaacgacacaagcttttaatgtaagccgacgccaagaactccttctttgattcttgtaaacaaataacatcacaaccagcattctgaattgaacaacgaatgcgattccattaatcggacagctgattcctctaacattgtgactcagcacagaccatcccacatagtaacaacagtcacagtactcattgagtaaaca

SEQ ID NO: 3461 - DNA, 413 bp, Zea mays
  unsure (1)..(413): unsure at all n locations
agctttgccttatgcagaccaatattagatttgtcttttctcaatgggagtggagagatggcgagagtatcgtgtaccctccgtggcaagatactggacggtggtgtatctgtactctcggatggcgtgaacccggtctggtcttgaaaaacccggtggtgaattgacatatgcaagggttaagtgctacatatgtcgtgtgattggagatcctcagctgagtattaatcgattcgaatcgccgntacttcacggacatgaagacttgatcactgacttacacgtagcattccagtgaactgaaagggttgattaaagatgactagtataggccaagtgcttgaactanggtagaaagaactctatctacaggtaatgacttaacttggtaataaaactggatttttaaggat

SEQ ID NO: 3462 - DNA, 250 bp, Zea mays
agaaactaagcttaacattattcacaacccgggcaagttggatgatttgataaacttgggtccaacccccacaacgtaatcttctaaagatgcctgccctacgacactccagcctgactcccaaaaccatagctacctggagccccgcgaagcaaaatcgcattcacgacctaagacacgatacttctaatatatttgcatctccataacgattacatgagcattcacgggtctatctgtgatatataca

SEQ ID NO: 3463 - DNA, 408 bp, Zea mays
  unsure (1)..(408): unsure at all n locations
agctcgcaccccgatacattggttcgtgttctattttttaaagangaggaccagaggcgtatcgactccaactacccaaaacattgttggtagtgcacaatatgttccatgtattccaattgaagaagtgtctttgggttccagatcgaaccattgatgaggtggatgttaccttggaaccagacctaacatattcaaaacatcctattcgagtcctggatctcaaggatagggtcacccgaagaagagttctcaaattctataagatacaatggaaccaacatacggaagatgaagctacatgggaaacccaagactttgtagaacagaatttccctggctttctagcttcatataattggtgagatatgtacaattgttgtaaagatggaatagaccacatacaac

SEQ ID NO: 3464 - DNA, 203 bp, Zea mays
atgctcctatgcgcaaatatagcagaacacaaggtattggtgggatctcagctctctgatgagcaagagaagactttgcttagatccttatctcacaacccagatgtatttgcttcgccgcccatgatctctgcggcgccacacagatgtattgaacattcctcaatgtggaccatctttgggccaagaaaacaaggcttcga

SEQ ID NO: 3465 - DNA, 405 bp, Zea mays
agcttcacatgtctcgtatgattcataatcttacgaagttaaaagcccatcagaatgaagcttcttcatgcgattctcacttatatgacccaaacgacagtgccacatgtaggtaggacttaaatcattaggccgaggccttttagcactaatattacagataggtgcatcatcaagatttaaaatgaataacccattcataatggatgcaaaagccacaaacatgccattcttagagatcacacaaccattgttttcactcgcaaatgaataaccatccttcatcaaacatgaaggagacataatgtttcgactcatactaggaactagataacaattatttaactccaaaataaatcctgatgggaggtggagttgcatcgtcccgacggtcaacgcagcaac

SEQ ID NO: 3466 - DNA, 328 bp, Zea mays
  unsure (1)..(328): unsure at all n locations
ctcccgcctctgaacatacagaccccctctaactatgtacataaactctctaatgcgctctatgggctcaagcaagccccacgagcatggcatgaatgcctaacagactctcttatcactaatggctccaaagcgcgcaaagctcattctactctatctaccaacacacttgcacatgacttgnccgtctgccacatttacgctatgatactatatctgggctaccaacgaatccatgcgcgaggaatccaggcggatcatgacccagacattccacacgtccatgatggggaagtcgaagtaccccttgggaactccgcgaagccac

SEQ ID NO: 3467 - DNA, 396 bp, Zea mays
agcttgtgaaggatcttcatccttatatgttttagcggcgatgccacagccagcccatgcaagtcttagccattaagcatgcatctaaaccggcctcttcttttgcaaaatcaactaaataaagtttgccgtctaatacacccttaaaagctagtgaaccatcacttcttctaaagacagacacatctatatttgtaaacagacagttatatcccatattgcacaattgactaacagatagtaaattatatcctagtgactctactaaaaacacattagagatagagtgctcattagaaattgcaattttacctaacccttttaccttgccttgattcccatcaccgaatatgattgagtcttgtgaatccttattcttgacgtatgaggtgaaca

SEQ ID NO: 3468 - DNA, 273 bp, Zea mays
caatgaataatgtattttatttcaatcggccttcgaagagtgaagaagcctctgaacaattgaagacattgttaaccactgcttcggtattggctcaaccggacatcaccaagccttttgatgcttattgcgatgcatctggcagtggactcggctgcgtgcttatgcaagaaggctgaataattgcgtatgcctcacggcagttaccccgacatgaggagcattacccaactcatgatctggagctagctgctggtgctcatgccctgaaaa

SEQ ID NO: 3469 - DNA, 383 bp, Zea mays
atccctacatgagctaaaccgagatgccacagcctcttcatgctaggtttagcaaccaagcatgcgtgtagccaggcttctcttttgcaaaaccaactacataaagattgtcgtctagcacacccttaaaagctaatgaaccatcacttcttctaacgacagacacatctacattcgtgaataagcacgtataccccatattacaaagctcgactcacacacaagacgttatatccaagcgacttatctaagaacacattagacatagagtgctcggatgaaacagcatttgttcctaaccctgtcaccttgacttggctccattaccgaatatgattgaatctcggggatccttcgcgttgacgtacgacgagaacatcctc

SEQ ID NO: 3470 - DNA, 414 bp, Zea mays
agctttggccccacctgcaagctcgtatccttctttgttgtgggcccggggccactgtcggtaccctaaaacaggggtaccccttactgagagcacctaaaggggggtgaataggtgatcctgtaaaattcaacaactaatagccacaaaacttggttataaagatgttagtgctcaaaagaaccaagtggctatagagtgagttcttgcgaatcacaataatcactaagaaagacaacacaagagacacaatggtttatcccgtggttcggtcaagaataacacttgcctacctccacgctgtggcgtaccaatggacgagggttgcactcaacccctttcaagtgatccaatgatcaacttgaataccacgacatttctttgcttatatcttttcccgtttgcgaagaatct

SEQ ID NO: 3471 - DNA, 418 bp, Zea mays
  unsure (1)..(418): unsure at all n locations
agctttanggtaaaagtcataaaaggacccttatttttttttgaatcacctttatacccctgggatactaaaaaaccaaattggaaccctggaaaaccctaaaaccaaatcctagggacttatgtgcaaaagtgatgaacctttggactaaagtgtaaaaactactatgtttaaacatataaagccatttggttcacaaatatgtgaatttgcaagttaaaccctaagttttgggcttatttgcaaaaatcacctcttaagcactatcgagcctaagtctgaaattcagtttagttggttcaactttggagccctgtatcttctgaaatatagggtgtttgcccaaagtgaccacaacaagtttgtagcccaatcatatgagaacaactctgtttaagaattcaagccatgttcttat

SEQ ID NO: 3472 - DNA, 438 bp, Zea mays
cttaagtgacctgagctgcagctgccttccctcatgtccacccactttttttgcgttgtggagcgtgccacgcaagattttcacgacgatcaagaaaatgctcctcgacgacaagaagggtaaatgggccgacctgctacctgaagcagtctgggcactgaacacgaccgagtgttgggcgaccggattcactccctttcgcctgctatatggatcggaggccatgaccccgcaggaaatcaaacatgggtccccatggacaagcgcttcagcagtacccgacgtcgacgagctaacctccaaagatctcatcgacggagaccgtgtcttcgccctgcaggccctcaacaaataccaagcccaaacaaaggcctggcgcgaccacgcagtcgtcccaagagaaatcaacgaaggggacctcgtacttgtccgcacaac

SEQ ID NO: 3473 - DNA, 259 bp, Zea mays
gtgattgtccctgcgcgaataaaacagtacgaggtttgaccaatgctgttgaccgccatgacacaatattctgacctgtctgcagtattgccaccgtacgcacgatatgtcgcttcgatatctgtgaagaataatatatgtctgtatgaccgtcatacatggggagctggcgtggctccaagactggggccctggcgagcctgccattctgtgagagacgagaccctatccaaccaaagcttcctgaggaaatcttcta

SEQ ID NO: 3474 - DNA, 409 bp, Zea mays
agcttctaaagggagaacacgtgatatgtttattcaatgttcatttcgaaaaagatagaccttgtgcagcttgtcaagcagggaaacaggtgggaggctctcatcacaccaaaaatgtgatgacaacatcaagacccttggagatgcttcatatggacctcttcggacccgtcgcctatctgagtataggaggaagtaagtatggtcttgttatagttgatgatttttcccgcttcacttgggtattctttatgcaggataaatctgaaacccaagggaccctcaagcgcttcctcaggagagctcaaaatgagtttgagctcaaagtgaagaagataaagagcgacaacgggtccgaattcaagaatcttcaagtggaggagttccttgaggaggaggggatcaagca

SEQ ID NO: 3475 - DNA, 326 bp, Zea mays
  unsure (1)..(326): unsure at all n locations
ccaaaacgccaaggaagctctcaaatcataaaggagaaacttacaaccgcacccgatctatcgctgccagacacttatcaagatctcgtcgtcttctgcgatgccccaagaccacgctcacggtgtgtgctaatgcataacgagaaagtcattgcttacgcatcgcgtctactcaagccacatgaacacaattaccccccccatgagttggaactaccagccatagtgcatgcctctgaaatatggaggcactacctaatcggaacaaatgccaattntcatcgacacaagagtctgagatatattactcaccagatctcaccttc

SEQ ID NO: 3476 - DNA, 409 bp, Zea mays
  unsure (1)..(409): unsure at all n locations
agcttctaaagggagatcatgtgttaggacttatctatgtctgntttgagaaagacagaccttgtgcagcatgtcaagcagggaaacaggtgggaagcactcatcacagcaagaatgtgatgacgacatcaagaccactggagcttcttcacatggacctcttcggactcgttgcctacctaagcataggaggaagtaagtatggtcttgtaatagttgatgatttttcctgcttcacttgggtgttctttttatgggataaatcagaaacccaagggacccttaagagcttcttaacgagagctcaaaattagtttgagcttaaggtgaagaagataagaagcgacaatgtgtccgaattcaagaatttacaagttgaagagtttattgaggaggaaggcatcaagca

SEQ ID NO: 3477 - DNA, 422 bp, Zea mays
tgcctctcccttagtatatcacccgcagtccaacggagttttggttctcgccaatggaaaaaatctcacagctgtcaagaagatgctcctcgacaaaaaaacggcaggtgggccgatttgttacctgaagcggtatgggcgctaaacacgactgagtgcatggcgactgggttcacccctttccgccttctatatggatcggaggccatgaccccacaagaaataaaacatgggtcctcgcgaacagtttcgtcagctgtccccgacatggacgaacccacttcgaaggatcttatcgatggagaccgcgtcttcgctctacaggctctaaataaataccaagcccagacaaaagcatggcgcgaccatgcagtcattccgagggaattcaccgaaggggacctcgtactcgtctgaacagc

SEQ ID NO: 3478 - DNA, 426 bp, Zea mays
  unsure (1)..(426): unsure at all n locations
ttaagcgactgagctgcagcttaataatattagaaccttttgtatttttggcatgacttggactatgtttggtacttaaaacccaaaacccttgtcccctgccctatgaacttcactatagactcctaaaaccctagtttcctggagatccgtgaaggaaagttatattcaagacattagataataaacttttattatctttgcattttcatgagcattcatgattatatatggctatatctagaaaacgaggaggaaatagaagttgaagaagtaaggactacaccaccacctaaagaacctcaggcaggaaactgcttttactttgatatctgtggagcagagcctgattcacctatcacacaaggcaagccccagtgcatttgccacctnncttgctatttaaaatctttctcacttacttga

SEQ ID NO: 3479 - DNA, 403 bp, Zea mays
  unsure (1)..(403): unsure at all n locations
agcttcgngttcagttctggtatttttgttttattttccgccaatagtccttcgggtgcctggagctcaaagttctttttctcgaaggcatctgattgttcctttattttgctttccaaattttcaattataacttcgtgctttttatcttcaaaatcttgttgcatctgcaaggctttgctcaaaagcatactctgcacgaaaacaaccttcgtcagacatgttttcgttcttagaaacaataaaggttaagggaaaaaagcagttcaccttgaagttggaataaaataagctgccaacgacatgttgtcgtcggtagcggctgatgtccgtttctagcttcggaaatccgatattcttggacagagtactgataattttggccccagtttgatctcggata

SEQ ID NO: 3480 - DNA, 407 bp, Zea mays
  unsure (1)..(407): unsure at all n locations
atgtatgggcaaatgtattctgtttatngcaactacagactgcaatgggtaccccgtacccgaaactcgatgggtctttgctctattacggtatgggtttgggtcaatttctctacccatgggcttgctaatgggtctcaacggaaacccaacgggtaccggggcatgggtttgttctctcactacccataccngcaaacccatgggtttttaaaacgccgctttaaatcacacattccctatcaatatgccgcaaacactattaatcgaatatcgtatactgaaataagctctatgtacaaattcaggctaacataattatcacttggtctttatgcccctaataaggattgacatcatttaatgatgaattattttatgtgatgtacccgcccccccctcgtggt

SEQ ID NO: 3481 - DNA, 372 bp, Zea mays
agcctgttaagattcttcatcccatcatggtctagtccgcgatgccagagccaacccatattagtcttaccaatcaggccagtgtctagttcaacattgtcatcagtgaattcaactaaataaagttgtctatttaacactcccctaaaagctagtgaatcatcacttcttctaaagatggtaacatcaatatcagtaaataaacagttatagcccattttgcataattgagatacagaaagcaagtcgtggccaagagattctacaagaaatacattataaatggaatggtcaggtgatatagcaattttacccaatcctttgaccaaactgtgattcccatcccaatgtgattgtctttgggatattacc

SEQ ID NO: 3482 - DNA, 308 bp, Zea mays
tgactttcatgaatagcaatgggggctcggtccgaacgtatctttatgcaaagataagctggatcacaattcttcaacgcttaaagtacacgaacataattgcattgaaaggtattcacgcacaatataaacataacttgtcaactcttgggtcgctgataaatccgaagacactgacattgaaatctttgcgaatgctacaatatgtcttcctccgacaccgcataggcgatgtgcggcactaagaattttatcttccggctcttgcatctgtctaaaagctttaacacaaatgaatcatctggtct

SEQ ID NO: 3483 - DNA, 399 bp, Zea mays
  unsure (1)..(399): unsure at all n locations
agctntggcgatgtagatgccgctgtgtttttctacgccatggaccgagcgggctttgatgctgctcagcccttcagattcaaagggtaagcagcaactatgctgcctcaaaggtggttatggctggagcttggttgggggccaacagtgattaccccgaatgccatgagtccaggactgcaggctgactcagcctaccccgaatgccatgagcttgtgccatggtcgacgagttgggccttggcggtgcgaagcctatcagtaggctgatgcagtggaccacgtaggtcttggctctgctctacccttgaaacaccaccggtgtgggtggtggcctctgaaggggagccaccatgaccgacggccactggtggctacaccatggatgagcttgattgg

SEQ ID NO: 3484 - DNA, 275 bp, Zea mays
ctaacctcactgcaatctacacgaactccagcctcactttttgcatcgacctaaatggcccaatgacttccatcggcatccctcacactacacttaatatcattcacatcgcctctcgcatattcgattacaccatacttcatatcctatactccccacgccgctataaacgcatatactatcaactcatatcttgcacccatgcataacggacagcagcctattcaaactcatgcgtacgacctctatctttaaccatgctgttctcctaagca

SEQ ID NO: 3485 - DNA, 378 bp, Zea mays
  unsure (1)..(378): unsure at all n locations
agctttataattngggtattacaaattctaccccacttataaagaatctcgtccttgagattatgatggactagaaaagaggtggggaaaatctactcgtagctcttgttctctctcccaagtagcttcatcttctccatggtgactccattgcactttgcacattttaatcactttactcctcgtgacgcgagtcaaagtatcaagaatcttgataggaaattccgtataagtcagatcatcatgaacactgagatcctccataggtaactggtcttcgggtaccctgaggcacttcttcagttgagacacgtggaagacattatgtacatccgcaagatgatctggtagtccaagtgataagcaacttctcccact

SEQ ID NO: 3486 - DNA, 415 bp, Zea mays
atgatctgtataaatgtgacagatattacccagcagattatgacgccagatttttatggcatgggccactgcagctagctccagatcatgagtgggataattcttattatgccggcgcaactgccttgaagcatacgcgattactcggccttcttgcattaatacgcagccgagaccactgcctgatgcgtcacaatacacatcacacggcttattaatgtccggttgagccaataccggagcagcggttaataatatcttcaagcgctcaaaggtttcattacactctgaataccaattcgaattaggctcattcttgaatagacttgtgattggcttcacaagcttataacaatctggtataaagtcgccggaataaccagccagtccaaggaaactttggacttgatgaata

SEQ ID NO: 3487 - DNA, 411 bp, Zea mays
agcttgacattgtctccctgttggaagccaatgtcttttttaatgtcagggcatctcccattataaagcatgcttctagcaaatttaaatttttcattttctaagtcatgctcattaatttttgcactaagttgagctatgtgatcattttattatttaattaaggctaggtgatcatggatagcttcaacattaatatctctacatctagtgcaaatagtaacatgctcaacggtagatgtagaaggtttgcaagtatttaattcaacaatcttagcatgtaaaatatcattctcatctctaagattggaaatagcaacatcgcaaacttctaattccttagccttagcaattaatttatcattctcaaacttaaggctagtaagagattcattcaacatgtcaatctta

SEQ ID NO: 3488 - DNA, 423 bp, Zea mays
  unsure (1)..(423): unsure at all n locations
gacctataaaactaatctttaattactgtgtcatgaacgaagaagcgtcttggaatgtggaacatatcagtggcgctgaagaaacagcgtttagatcacngagaaacgcagaatcttcactttcattactgtcaattgaactagataacgcatgaggcagtcctgaaagtccaggagtgttcaactgtggatgaaagaccccatgcgttaaattgggctgaaacacccctgcggccactaaattactctgtaggttgctgatattctgacgtccttgaagctgcacaatattttcacgaagcttatccctagatagagtctcagcaggtaatatatcaatctggccagcaccagcataggctaactgttcgtttggaagcatagtggcatcctgtccatgcacactgaaatctacattgtgat

SEQ ID NO: 3489 - DNA, 387 bp, Zea mays
  unsure (1)..(387): unsure at all n locations
agcttctttccacaagtcgcatcggaggggcgacaatanattagaagatgaggaagggggtctactacgagaccgacacttcatcaccatctacctccggctccgactcgggctccataacttctaagcgccatgagcgcaagaagtttagttagatgcccttacactaccctcgcacttttagacatactctattactttccgttccattaggcaaaccgccaacctttgaccgtgaagattatgctacgtggagtgatttaatgaaaattcatctaacctcactcacaaaagtatatggaatgttgctgagtctggagcacaggaccactcgttcgggatgaggaacttgatgaggacgaggtggcctgaatcgggcacttcaac

SEQ ID NO: 3490 - DNA, 418 bp, Zea mays
agcttgtggaggttcttcatccccacatgtgttatattgtgatgccacagccagcccatgcaagtcttagccattaagcatgcatctagaccggcctcttcttttgcaaaatcaactaggtaaagcttgccgtctagtacacccttaaaagctaatgaaccatcacatcttctaaagacagacacatctatatttgtaaacaaacagttatatcccacattgcataattgactaacagatagcaaattatatccaagagactctactaaaaacacattatagatagagtgctcatttgagattgcaattttacctaacccttttaccttgccttgattcccatcaccgaatattattgaatcttgggaatctttgctcttgacgtaggaggtgaacatcttcttctcccccgtcatat

SEQ ID NO: 3491 - DNA, 336 bp, Zea mays
atagctcgcggagacatatgtgccttctccggtgctatgggattgccactgctttggacaagaaaggctgcgatcacgtgaaatccctggcacaacaccgaattattatatatcctctgaagacataaaagacccttcggcccaagcaagttcgggtggtggaaaatctctcaccgacatccgggaaaacggcggccgggagatggctcaagatattatacggagaagcgagacaggtatacatgacgctagagaagcaccagacgccgctgagaaaagtgcggatctcgaagggcgaataggtattaactagcagtctttggctttctgttgaac

SEQ ID NO: 3492 - DNA, 401 bp, Zea mays
  unsure (1)..(401): unsure at all n locations
aagcccctgctgctgccgctgtggcctggtcngcagccgttgctccctccccagctgcatccgctgcgtgcgccccctctctgcttcctctcttcgtagccgcgcagtactccgtcgggggcagaattcgcgtcaaccatctgcgacgaccttcacgggtgtagccggtttggcgtcgccgggacctcacttgtgaaccagggggcgtcttcagtgtaccaggaagcaaaccaaggccactgcgcgcacgaattgtgttgcggtgcttgggaatttctcgtcgacgacttcggtgccgccgtgaagccatccgcgccgtagccggtgacctctgctaccttccagtgcgggtaaggccatggcccagctccctttcctttatagtttgcgtcgggacctat

SEQ ID NO: 3493 - DNA, 330 bp, Zea mays
  unsure (1)..(330): unsure at all n locations
tctatatggagagcacatntacgataacaattggtcatttgagatagacaggatttgtagcacatgccaagcaggaaagcaagttggtgctcatcatccacataagaacatcatgattatctgacaggccactagagctcctacacatggacctattcggcccgatagcttatataagcatcggcgggagtaagtactgcctagttattgtggatgatcactctcgcttcacttaagtattctttttgcaggaaaaatctcatacccaagagaccttaagagcttggttgggataaagagtaatggagggaattgatcgctccccctctt

SEQ ID NO: 3494 - DNA, 416 bp, Zea mays
  unsure (1)..(416): unsure at all n locations
agcttgggaagattcttcattccaacatgtgtttgtcggcgangccagagccagcccatgttagtcttagcaattaagcaagtgtcgagttcagctctatcaaaattactaagtatagctaaccctctaacactcccttaaatgctactgaatcatcacttcttctaaagacagtaacacctatatccgtaaaaagacagttgtaacccattttacataattgagaaactgaaagcaagttatagtctaaagaatctacaagaaaaacattggaaatggaatgctcaggtgatatagcaattttacccaatccattgaccaaaccttgatttccatccccgaatgtgatagctcgttggggatcttggtttttgtaatacccacatttgtaaaagcataagaactaagaatattct

SEQ ID NO: 3495 - DNA, 401 bp, Zea mays
agcttcataacttctaatggcactcattgttttgtttgtatgcctaaggggctcaataatgctatagagaaacttcaacaaaatgactgcctaagttcttcactcttacattggcagaaatttgctaacatatgttgatgacatcctactaataagcacaccacaacaaaaccatgttgctgatttgcgagatacatctaccaaattcagacaagctgatctcaagttaaatacagaaaaatgcgtctccggagtaaagaacggcaagttcttggttgattcgtgtcgacaaacggtattgaagctaacacaagctaaatcgaagatatccttctgatggagccgtcccactccaaaaacgtggctcataggttagcaggaaggctggcatcactgaacag

SEQ ID NO: 3496 - DNA, 407 bp, Zea mays
  unsure (1)..(407): unsure at all n locations
agctttcctgcttagaccttcggnggttcacttaccttcgtattattctggtctactgtaatacctgacttgagtccgaagatacctgttcacacattatactccagaaacactattaaatcctgtttttgaggaccttcggatgccgaaggtccccaacagtagcctctcgcaatattaattngttcaaaataataaatttagattgcgacctggacgaaggctttacgccgaaggtccgaaaaaacaccttccctttgctagaatagcaatattcactgacaagcggggtctttcaattttcagcgcactcggcgtataaatacggccataccgcanacgcatttgacacgctctctggccaactgctcctgctcactcaatttttagctcttgtgcactacgat

SEQ ID NO: 3497 - DNA, 287 bp, Zea mays
tacagagaagctggactaacaacttgatatatatctattgtagttttcatttatttcgcttcatgttcttgcctcagaaacaatctgagaaggtgcaaccttcgacatgttgtaataaatctatggttacaccatcgagtgtaacagctgttgggggcctctccgcttccgaaggtcctcaaaaacaggatgtaacagtatttttggagtataatgtgtgaacaggtatcttccgactcaagtcggcatcacagcagaccagaataatacgaaggttgataccgcgc

SEQ ID NO: 3498 - DNA, 409 bp, Zea mays
agcttggctgacgacgtgaccactgctcctttctcttctgccaccgctattactgccggcccatttttggccgcattgaccgtcgcgcctggctggcactgctgggtcgaacgcagggttgcctcgagtcgcggtactggttccgcagtccaggaggcgtggcattggtgcgagtggcggtgcagttgcttgcacgtagcgaccggtgcgccggttgcatgacgcgtgggcgtgggcccccatgctgggtgcgttggaagttggaggggcgcgcccacttggcgcggttgcatgccgcctgcatggctgcccgcccttttgcccgctggtctgggcgaaagtggaggaatgctcgtaaccgctgggcggttgcatgcaccgcgcgcggcggtttggcttcttctgccct

SEQ ID NO: 3499 - DNA, 405 bp, Zea mays
agcttgctacaggccttcttctttttctctattcatgaaccttactggaatactaccccacttaaaaagaatgagggtagaactcttgaatctcggggatttgaactccttgaagtacctcataacaagggtgttacggggccttctgctgctgttgctgcttgagcaggctgcggagagatgactgacacaaggttgattctgggagaaccttcttcttatcttctcttcactatcttcttttcactgaccctttctttctatttgctcttcccactggaggattctatcaaatagtattaccatcatacagaggaggaaaccgaagactatgaaccatgtgcaacagtcttcaacccaagaatcaccaagcattgtgatcttatgggcgagggagtggaaaaa

SEQ ID NO: 3500 - DNA, 356 bp, Zea mays
  unsure (1)..(356): unsure at all n locations
cttggtacccanatgcgagcccttgtctgctttacattcggatctcatatatctagcaaccacttcttcattgttacatgaaagtaccaacgtaatgttgcacgcatgaaacatattantacgtttattacacattttcctaagagcatgagacacaaaatttctcctaggcctatcattaaaactagaacttgaagcaaacctaccatgtgacttacagacatcatgatcatatcttctattatgactagcaactttcctattatacatgaaagcatgattcttctgaacgctactagacataggggcctctcctttctccttggcaagaatgggagccctttggcttgttaagt

SEQ ID NO: 3501 - DNA, 362 bp, Zea mays
agcttgtgaagattcttcatcccaacatgggctagtcggcgatgccagagccaacccatattagtcttagcaatcaagcaagtatcgagttcagctctattaaaatcaactaagtatagctgaccctctaatactcccttaaattctactgaatcatcacttcttctaaagacagtaacacctatatccgtaaaacgatagtagtagcccattctacataattgagaaactgaaagcaaattgtaatctaaagaatctacaagaaaaacattggaaatggaatggtcaggtgatatagcaattttaccaagtcctttgaccaaaccttggtttccatccccgaatgtgatagctcttttggg

SEQ ID NO: 3502 - DNA, 386 bp, Zea mays
agcttcgctccttggtcgatcatttatctcggtgcactgggtctggatacagtacaacataatcgtgctaactatttttttatgtaaagtttggtaacttggtttgtgtgttcattcacagccgcagaggtggtttgattttggcgacctgtgctgctgatgatgttggcgttccatttggcaaccaatgcaaatgcaacccagtcccttggtcacgtcacgtcgccccctcggccccctttggttacggacaccaaggggcgggcaggcagtcaggtgcatgcatgcagcacgcgcactcacggtgaaaaggaagaagcagacaagtccacaagtgcgaaaggctcatcggggcagatgaaaatgagtggcgcacagaatctggt

SEQ ID NO: 3503 - DNA, 451 bp, Zea mays
acgcgaactataaatactcagctcgccaaactaagagacaaaagcatctgatatggtttgtttgcttcatacataacattgctttagtcggaggcaataacaactgttgaaacgtcatttatgcaatgaatctagtcaaaaactaaagtgagaaacataatatgtgacattcttctgaatgattgccatgctacatacatcgagagagatcttctcttcacattaatgtggatgaacaacacataactgacactcttatcgagtctacgaagggtaagccagataaccagcattgcaatctttatgtccattcataacacgtccgaactatctgattagtacatgtgccgcgtttatacttactcgttgaatgttagacttgtgagagcacctatagggggaggggtgaatacgcgatcctgtgaaactcaaccctatatggcacacactt

SEQ ID NO: 3504 - DNA, 406 bp, Zea mays
agctttaaccccccccccgccttgatatcttttcccgcttctttctaaccataatgaatgcgaaatcgaatgtcatacttgatgcatatccactttatttgttcccttgtatgatgtactgtttgcttcccaagatgaacggatgtatgtatgtatgcttgcaatcgcatagagaacgatccggttgaagagcccgaggaactcacacgagaaacccctgaacatcagacaattgggggaggcaagtgtcctttgacctatctctgtcctatacattatttaattcacctcccgctttacacatttatgcctaaagactgactagcattggtatctatatcccttgttacctatatgggtaggactattattagatacctttatgctatatgtcaactctatcaaa

SEQ ID NO: 3505 - DNA, 504 bp, Zea mays
  unsure (1)..(504): unsure at all n locations
tattacgcgacactataaatatcagcttagctgattagagtcctcgtggatatccctagtttatctcgttcatntcttgacacaaagtgttgtcagaggtcttcaccataagacagtggcaggaagtcttacgactcagtgcatctgccaccacattggctctgcctgggtgataatggatctccagttcatagtctttaataagctcaagccatccgcctttgtctgatatttaattctgactgggtgaaaatgtacttcaaacttttatgatctggatatatgtgacagatatttcccagcagatagtgacgccaaattttcagggcatgaaccacagcagctagctccagatcatgagttgggtattggctctcatgtnggcgcaactgtctcccccccccccccaccccccccccctcccccttatttatatgtgagtttttggtaatgattaaatataattaaaatgttaatgtgtatggtgacccctccccacccccg

SEQ ID NO: 3506 - DNA, 474 bp, Zea mays
  unsure (1)..(474): unsure at all n locations
agcttgacattgtctctcctttggaagcctatgttattcttaatcccagggcgtctcccattatagagcattcttctaacaaatttaaaattttcattntctaagtcatgctcatttattttggcactaaattgaactatgtgatcatttntttggttaattaaggctaggtgatcatgaatagcatcaacattaatgtctctacatctagtacaaatagtaacatgctcaatggtagatgtagagggtttacaaacatttaattcatcaatcctagcatgtaacatgacattntcatttctaagaatggaaacaatatcattgcaaacattntaaatgttagccttagcnaatcaattatcattttctatcttaagactagcaatggattcattcaacttgtcaatcttaacaagtaaactagcattatcatttntaagaatggcaaaagaatcatcacanacatttaacttc

SEQ ID NO: 3507 - DNA, 438 bp, Zea mays
  unsure (1)..(438): unsure at all n locations
ccacacgaagatatttagccttataatcgcctctggagtaagttgatgaagatagacttctaagattttcaacacctccacgacgaagctgctcaaggggaatcgcaatccggctttcaaaaagcttcggtacaccacaacttcattttcttcagggtgtggacaagtcttttccccttcgtccgccctcacaatggacagatcccggaaataccttcccctcatattggcaagatggttttctttgatagctgatttgccgaanaccgcatgacttggtcgccaggggcggtcttcggagtcttcaccgncactatctacatcanaactggcactgtcaccagtatcttcagacaagccttccagaatttccttggtgaatttttccgtgtttgtcttcgacatcgctataagaaaccccaggtttttctcctcatc

SEQ ID NO: 3508 - DNA, 261 bp, Zea mays
  unsure (1)..(261): unsure at all n locations
agcttatgaagattcttcatcccaacatgggctattctgtggtgctagagccaacccatggtagtcttagcaattaagcatgtgtcgagttcagctctatcaaaatctactaagtatagctgaccctctaacacacccttaaatgctattgaatcatcacttcttctaaagacagngacacctacatcagtgaaaagacacgtgtaacccattttgcataattgagatacagaaagcaaattgtgatctaatgaatctaca

SEQ ID NO: 3509 - DNA, 431 bp, Zea mays
  unsure (1)..(431): unsure at all n locations
cttgcagaccttcttgttataatagcttggaaggttacatatatttatttctgtatttattgatttctgataggtaggtttgccggaatcggcttgagatagaactttgtatattatttggttgtcagggtcttatccttagcaaggctttgaaggtccagaaagatgctgaagatnaaagcactctgatagccttcaaaaacctgtgctcacatgtcataacacttcggaatgaggccctngagaaggacaagatcctgctttctttagttgagaggttaaaatctagcgaagctagactggctagcctttctaaagtggatcaaaatatggagaaacttgagaagatggacaagaagatgcaaagtgtattgctcgattagaatatgctctatctactcaagtgggactgcacatatccgaagtggaag

SEQ ID NO: 3510 - DNA, 393 bp, Zea mays
cttctagattcggcttgaattccaggccacccgttgtctcccagacatgcattcagctgagctgattctttcttccaatcttccacaaagtttgctcctttaaccccgaaaggttttcggctgagggcgtctgctactacgctggcctttccggtgtcggagcggatttcgaggccatacgctttgatcaattcgagccaccctttttgacggacgttgacgtccacttgcgtgaagatgtactttagactcttgtgatcagtgaagatgtggcatctgttcccaatcagataatgcctccaaattcttacggcgtgcactatggctgccaattccagatcgtgggtaggatagtcttcgtccgcgcgggttgagtaatcgcgatgcataagc

SEQ ID NO: 3511 - DNA, 409 bp, Zea mays
  unsure (1)..(409): unsure at all n locations
agcttgcggttatatgacacgcagacttttataactccaaaattgcaagccgggaaattcaatcttggtatcttaccttcccgctttgctcagtgctcacacagtagaacccactacacatacctaatgtaacgcatcttcgactctgactgagcacacggctgctgaacaaaaggcaagaaccacgtcaccttgccggattcaatcgaggaatccggtttggctgagcacagcgtcgcgcacacgccgcaggtctcggcctttgagcgtgcgcccggcgccctcgagcatcgagaacggagcggcgggcccagccccaccagcggatgcgcgggcgaccatctcatgcggnggcagcatggcggcgtcgccgcgcccgaagtccgcgtcgtcatcgaatttcgtccac

SEQ ID NO: 3512 - DNA, 383 bp, Zea mays
atcttaagcgacgcggctgcagcttgcaagccctcggacccgaccggactttaccggaggcccgagatcaacctcaccggacttcggtcttccgccgccgcgcgtggaccgagctatccagtgagtctccgaccaattccttgcgctcatagcttctctggcaacccggggacctccccgacctatttgattgaactatctcgccatgaccaggccggtctcctcgccgccgacgagcatccccgcctgcgcgcgtggaccgaccgactccggccatctccgacggcgttccgcacaccgttgtgatccccgcgacctccccttcaccctcgaccacttcaccggaacagtctcgccgccggtaagcccctccgcccttttct

SEQ ID NO: 3513 - DNA, 382 bp, Zea mays
gctgaggaggttctatatccccacatgtgctgagcggagaagcccaaccagcccatgcaaggcttatgcaataagcatgcatatagacccggctcttattttgcacaatcaactaagtaaagtttgccaggtagtacacccttaagagctagtgaaccatcacatcttctaaagacagacacatctacagttgtaaataaacagatatatcccatattacataactgacgaacagatagtgaattatctccaagactctccactaaaaacacattagagagagaatgctcattcgatattgcaatcttgcctaaacctttgaccttgccttggatcccatcaccgcatatgattgaatcttgcggatccttattcttgacgt

SEQ ID NO: 3514 - DNA, 261 bp, Zea mays
tatgaacctattattgcttccgctacttggtcaatctgaataaaatccctgaaaattcctattgcaccaaattctttccaaacaaatactatgggttgatggttaatggggtaatacacctccttattttttgccttcatatgaatactttactactcccttcgttccaaattataagatggtttgcctattttagacacattcctttactatgtctttaaacatcgacacatcgtgtatatctaattgcataagaaaaac

SEQ ID NO: 3515 - DNA, 424 bp, Zea mays
tcgaacatgagagaatttacgtgatactagcaaacacaaatagaaactcgcgacgatggcattctattttcgtaggctcttggatggctcgagaatagtggcaagcacaaattccgcaaatggtcgatccttctaacggtcgcacagttaacatagttacaggattgagctcttatacaaccttgtgtaaaaatttattttaattactatgctctgtacattcttgacatttcgccatgcaaacatgccatatacttcttctcttagccaaggtgtatttcactggctgtcgcccggcgccgggcctctcgctgccactcacccatccttggtttctcacacccttcggcccaacatctcggagcagcaagtatactctctcctagctgttttggagggcttgcatcttcaagacgacaggacg

SEQ ID NO: 3516 - DNA, 463 bp, Zea mays
  unsure (1)..(463): unsure at all n locations
agcttctaaagggagagcacattttatgattaacaaatgttcattctgagaaagacaggatatgtagcgcatgccaagcagggaagcaagttggtgttcatcatccgcataagaacatcatgacgactgacaggccactggagctcctacacatggacctattcgacccgattgcttacttaagcatcggcgggagtaagtactgtctagttattgtggatgattattctcgcttcacttgggtattctttttgcaggaaaaatctcatacacaagagaccttatnaggattcttgagacgagctcaaaacgagttcggttgaagtatcaaaaaataagaagcgacaacgggactgagtttaagaactcacacatcaaggctttctggaggaggagggcatcaagcatgagttctcttctccctacacaccactacaaaatggtgtagtggagaggaagaatc

SEQ ID NO: 3517 - DNA, 421 bp, Zea mays
  unsure (1)..(421): unsure at all n locations
tgtggttcacncaaaaccttgcttgcgcgcttttgtataatctngaccacacaagtaatgaagagtaagatgtcccttntgttctccaactaatattacgcgatatcttgtaatgcattgaatgctggtaaagtttattgttcatatgtagtggcgtgaacgcgtgtgccaatccgggaaataactgagttatgttgattggacgtgatgtgtaaattcaaaaatagtaggtttgtgtgtacagtgtgtgattgaacatgtatgccgatgtattataatagcgattgcattaaagctcgttgaactattttaaatgcatgacggagatggttgcattcnacatagggaaagagacaggttgtgccgataaaacgctagactgatttataggtcatatgaaaaacgttttattaactgtata

SEQ ID NO: 3518 - DNA, 420 bp, Zea mays
  unsure (1)..(420): unsure at all n locations
agcttctccttgtcgtcatcaactttgacgtataaccattccgatttccagcctgccggccacttgcttcgatagctgatcacaggaaattttgtagttttccgatatgcaaagttgtaacaaccaaaattttcatgaagcccatcctttctggccttagtttggtagagtagctcgtgtactcggcagaagccttcggcaaatggctccactacttggcttcggagagcccagatataaacactaagcctaacaatagcattaggagttagttggtgaaaatagatcccaaatntcttcagcacatcagcaatcattctattcaaaggaaaatctaaaccagccttgaggagactcttaagaatcactatctcatctttttgtggctgtcgggtaatctcttctcaccaaagcgaatca

SEQ ID NO: 3519 - DNA, 366 bp, Zea mays
  unsure (1)..(366): unsure at all n locations
ctaagctcacacctctggactaactcggctgcatcactctttgttgtccgccagcacaaaccagatctgaagacctttccaaccagagtcctggatgctacgtgtatcccacactgtccggcgtggatctcatctaacagctgtcttccagctaccgaaggaatgcactctatgacgactcttgttgcgccccttctgaacagtgcatcccncatgagggtgtactgggctgactaccttgcgatacgctctgctgcagctctgtcatccggctcctcttcattctttatatatctgatgatgggcctcctccagtcattagagtctgactctggctggctcaaaacggtggactcttctgcttga

SEQ ID NO: 3520 - DNA, 366 bp, Zea mays
  unsure (1)..(366): unsure at all n locations
cattttgtcatcgttacgcacccggagtcaaatggactcngtgaaagagccaacggcattataatgacaggaataatgaagttaatcttcaatcaacccagaggaaaatggccagatcagttaatcaaagtggtgtggagccacaacacgacaacatcaaggtctacaggcttcactccattcaagttgttattcggtgacgaagcaataacttcagaggaagctaaaaccggatcaataaggatagtagcttcggcagaatcagattccgaagctgcttattctatagaaaaagatgctttagaagggatcagactgcaagccgtggagaatatcaataagtatcaagctgaaacagttaaatgg

SEQ ID NO: 3521 - DNA, 421 bp, Zea mays
  unsure (1)..(421): unsure at all n locations
tatattagtcttagcaattaggcaggtatcgagttcagctctattaaaatcaactaagtatagctgaccctctaatactcccttaaatgctactgaatcatcacttcttctaaagacagtaacacctatatccataaaaagacagttgtaacccattttgtgtaattgagatacataaagcaaattgtaatctaaaaaatctacaagaaaaacattggaaatgaaatggtcaggtgatatagcaattttaccaagtcctttgaccaaaccttgatttccatccccgaatgtgaatagctcgtggggatcttcgtttntctcataggaggagaacattcttttctcccctgtcatgtggtttgtgcatccgctatcataatnccaacttgagccccggatgcatanaacctgcaaacaattt

SEQ ID NO: 3522 - DNA, 405 bp, Zea mays
  unsure (1)..(405): unsure at all n locations
tcttcatccncacatgtgctaagcggcgatgttatattcagcccatgctactcttagctagtaaggatgcatctacaccggcctcttcttttgcacaatcaactacataaagcttgccgtctaatacacccttaaaagctagtgaaccattacttcttctacagacagacatatctacatttgtaaatagacagttatatcccatatgacataattgactaacagatagcaaattatatccaatattctccactaaaaacacattacagatagaatgctcattggagattgcaattctacctagctcttttaccttgccttgactcccatcaccgaatataattgaatcctgcgaatccttattcttgacgtaggaggtgaacatcttcttctccccccgcatat

SEQ ID NO: 3523 - DNA, 472 bp, Zea mays
  unsure (1)..(472): unsure at all n locations
gctttatcaaatggacgtgaaaagtgcctttcttttttgtcccatcaangaagaggtctatgttgagcaacatcccggctttgaagacagtgagtaccctaaccatgtctataagactctctaaggcgccttatgggctcaagcaagccccaagagcatggtatgaatgccttanagattttcttattgcaaatggattcaaagtcggaaaagccgatcctacactctttactaaaacactngagaatgatntgttngtatgccaacattatgttgatgatattatnattgggtctactaacgaatctacttgtgaagaggttagtatgattatgacacagaagttcgagatgtctatgatgggggagttgaagtatcttctaggatttaagtgaaacaactccaagaaggcaccttcattagccaaacgaagtacactcaagacattctanacaagtttgggatgaagaat

SEQ ID NO: 3524 - DNA, 252 bp, Zea mays
attcataaaccgaggcccacttgtgagccgacccttgagacgctgaacttacattcatcgggctggattggcctctatgggcataggggcggtagtgatccacaaatggtcacgaacattatagaaatgaaagaaactctcacagggacgtcttcaaactctagggtcgcgggctataaattcttggaaatccaacttgggaattggaggccgaaatcccatggttccttcaagttgatcacgcggaaaaac

SEQ ID NO: 3525 - DNA, 455 bp, Zea mays
  unsure (1)..(455): unsure at all n locations
tncaatctgagagcacgtttttagtatttccgaagatgtctgaatataaaacaagtcgctgccaaaacaagactgagtctttntaacgacaagaatcttgggtttcttgaatcaatcacaaagacaaatacagagaagattactaacgagattttacaaggtttatctacagacactggcgatagtgacagctatgatgtggaaagtgaaagggaaatgtgcccttgggccatttctaagcattttggtgattgagtgccaacacaagtggacttatgttaatctatgcacagcggtggataaagtgcacatcaagtaacaacgtatgttcctaagacttactacattatttcggagactaatgtattgtgtctaagcgctggaaacaggagaaatcaagttggaacagagatggctctgttcagcaaaaacacgctcagtctgggtgcccggac

SEQ ID NO: 3526 - DNA, 243 bp, Zea mays
ggcatccagcgcccacactaccccggaaagacaaatctctgaaaaagcacaggttatggagagaaagacccactccacctattgcttccttagtgcggcatctgcgaagcagcgaaaaacatcaccttagtctggaacacaaaaacagctaaaacgcctctaatatcaccgcatctctgtaaccactattcctgaatacaactccaccacactgtccttaatatcctagaaatacaaatgcaa

SEQ ID NO: 3527 - DNA, 418 bp, Zea mays
  unsure (1)..(418): unsure at all n locations
gctttaattagtatttaaaagccctgtgttatatttggtatgctttggaccattgttggtacttaaaacccaaaaccctagtcccttgccctatgaacttcactatagactctaaaaaccctaatttcctggagatccatgaaggaaagttatattcaagacttaagataatatacttttgtcatctttgcactttcatgagcatacatgagcattcatgattatatatgactatatatagaaaacaaggaagaaatagaagttgaagaagcgaggactacaccaccacttgaagaacctcaggcaggaaactgcttttactntgaaatctgtggaactgagcctgattcacctatcacacaaggcaagccccggtgcatttgccacctnctttgttatttgaaatctttctcactta

SEQ ID NO: 3528 - DNA, 465 bp, Zea mays
  unsure (1)..(465): unsure at all n locations
gacctataaaactaagcttgaaataatgccaaagctntctggatgccatcaaaacagcatataacaccttctctaattctgtgtagttcttctttgatatactaagaacttcagatacaaaatacaccgggacctgcttcctgagttggccatcatgcttctcctggacaagtgctgcacttaccgctgaatgcgaagctgccacatataataacaaaggagcccctggcgtacgtggagttagtgctgttagatctatcaaatactgcttcagctcttcaaaggccttttgctggattggtccccattgaaagacttcggctgacttcagtacttcgaagaatggtaagtttctctctgctgatctagatatgaatctattgagagatgccagcctacctgtcaatctttgagcccnnctttttgtagttggtggctccatccgaagtatagcttcaatcttac

SEQ ID NO: 3529 - DNA, 458 bp, Zea mays
  unsure (1)..(458): unsure at all n locations
agctgaatgacgtgacatattcaacgtccgtcaatcggncccggctntcctcgactaaggcgaccatgccattaccttcgatcactctaaccatcatgagcacgttcctcggcccgggcggtacccgttcatcgtcaaacccattgttgggtcgatacgactatcaaaaatattcgtggatgggggtagtgggctcaactttctctactctgccgtgttcgatgccatggagctcgatcatgatcgtctctgatcgtcgaggggaccatttcaaggtgtcgcgcctgtgaggcaagcaaccccgctcggacgaatcgatcttcttgtaacctttgggacaccggacaacttcaggactgagactctaaccttcaaggtagttgggttccatgaaacctatcacaccatccttggagggccatgctacatgaagttcaagacccgcctcaactatatct

SEQ ID NO: 3530 - DNA, 286 bp, Zea mays
  unsure (1)..(286): unsure at all n locations
gcaaggagtgggattcggactgctcttcgtccaactctgacaatgaaggactcgccgncaccgccttcaacaagtcatccctcttccgcaacgagcgtcacatttgnctcatggcaagggagaacaaagtaaccactcataacactagtacttatgcttcttcaagtgaggatgagtctactgatgatgatgagatacattactcatgcttattcaagggattagatacaaccaaggtagacaaacataatgaattaattgatgccttgaatgatacgaatatact

SEQ ID NO: 3531 - DNA, 329 bp, Zea mays
  unsure (1)..(329): unsure at all n locations
actcaaccttgcacccaggcacatcggtccattcctggtgattgatcaatgtgtactagcggtgtaccaacttcaactacccgaaacatctgctgctgcgcataatgtgttccacgtcgtacaattgaagaagtgctttcggattcctgatcgaaccgttgaagtaacagatgttgcccttgaactgcacctgacatattctaagtgtcctattcaagtnttggatcaaaacgacatggctacccggacaaaaactcctaaattctataagatacagcggaatcagcattctgaacatgatgctacatgggacatctccgattttctac

SEQ ID NO: 3532 - DNA, 388 bp, Zea mays
  unsure (1)..(388): unsure at all n locations
catacttgtctttcttttgntttcgcggcaatcatccgaaatgggccattcaaccggtgataaaattttgctgtgcgactgaagagtcaaaaactctgctagtatctccatatatgtgtgaatgtggcggatggtggtgggtgtgtatcttcctatggattgctctcgaacagaagattgtcagtgtcattatccgcgtcgctgtggtccatgttaaatggcgagggttgtggtgtcttctccaagatgatgtcgctttaagtccaaagtaccttctttgtgctagccactccttgtaatgtgatcccacctagagtangcatggcgaagtcattctttagatgatttgggtggacccatgtcatcgaaaccctgcaatatatgggat

SEQ ID NO: 3533 - DNA, 419 bp, Zea mays
  unsure (1)..(419): unsure at all n locations
tcggcccaacagcagagttcttttcggccgccagcgccaatgggcagaggcgccaggggcttcgggggaagatttggagaccaaccaagacaaatatattgnctattctgtggtgaagacaagggccatactaccaggatgtgccatgttaccatccagaagcagaaggaaatagcggaagcagcagcacaacagagtcagccgaagtaggtcatgcatactgcttcgtatcactcaccttatattccacaatatgtaggcaaccaccctgcagcttctgttgcttcggcgagccaaccccaagcatcttggcagcaacctccaccgccaccgctgatccagcgaggacaacagccagaagggagtcagcacaatcatcttcagagggatntcagagaagagtccgaagctcgcacagt

SEQ ID NO: 3534 - DNA, 481 bp, Zea mays
  unsure (1)..(481): unsure at all n locations
acccttccgacccggatnnttaagtcacctgcggcatgaagcttcaaaataactggagtgtactcttttcttgcttgcagcaacataggtgtgtgcatttgccttcttggcacttttttcttgcctcaaattcagattccaattccgtagctcttttatctgccactgtcctctcaaaatgcttcaaaaaacgaataatatcaaaatctgatttcaaatgattcttcagtgcattgttgaagctctcacttagttgtgtacttcgcactcccaaactaaagacatctctcatatagcattcaacccatttttctttaaccttgtatatactatctaaccatgtttgcttatacactctagatcttataatgtcaaatgcttcttganattctgccttgtcctcataaccatacatacaagcactaaaatcggataaaatggtagtntcttcatcttcatcttcatcttcgccttctccttc

SEQ ID NO: 3535 - DNA, 409 bp, Zea mays
tgtaaaaatccgagatacatcggtggtaatagccagccagtccaaggaaacttcggacttgatgtacagtggttggtggtttccactctaaaatatccttgaccttgttaggatcaaccgcaatccccttggcagacaacacgtgtcctagaaattggatttcctctagccaaaacgcgcacttgctgaatttagcatatagttgatgctcccttaagcttgttaatacgatccacagatgccgagcatgctcctcttcattcttggaatatatcaagatatcatcaatgaagaccactacaaatttgtccaactcgggcatgaataccgagttcatcagatatgtgaagtgggcacgagcatttgttaatccgaaagacataaccagatattcgaataatccataccg

SEQ ID NO: 3536 - DNA, 249 bp, Zea mays
  unsure (1)..(249): unsure at all n locations
tcaactcaacaacctctggcgccaccatcctacagacagactaacgtataacgtaatcggaaatctgaaaaaggaaantcaagataaaaagacaggtaaaagtttcatactgagttgagtagntttcgagcttcatcctcagccagctcacgccgcccttagcccaaatgtgggtaataaatctgtttcctatgcttcgggcttcggctaggatatcaactatatctgacgttgaaagattgaaagttg

SEQ ID NO: 3537 - DNA, 189 bp, Zea mays
cattttggttaggacgtggaactaaatgccatacctcattcctagtgaagtttgtgagctcctcttgcattgccaccacccaatccgaatcttggagtgcttcctctaccctttgtggctcaatagaggaaacaaaagagtaatgctcacaaaaatgtgcaacacgagatctagtagttacccccttat

SEQ ID NO: 3538 - DNA, 404 bp, Zea mays
  unsure (1)..(404): unsure at all n locations
aacaattaaacatgtgtcgagctcagctctatcaaaatctactaagtatagctgaccctctaacacacccttaaatgctattgaatcatcacttcttctaaagacagtgacacctatatcagtaaaaagacagttgtagcccatttgacataattgagatacagaaagcaaattgtaatctaaagaatctacaacaaaaacattggaaatagaatggtcaggagatatagcaattttacccaaacctttgaccaaaccttgatttccatccccgaatgtgaatgctctntgcggatcttggtttttctcatatgaggagaacatccttttcttccctgcatgtggttggtgacccgntgtcagtatcaactcgagncccggatgataaacctaaaaacaagtta

SEQ ID NO: 3539 - DNA, 432 bp, Zea mays
cgcgagctgtagcagcttcggcaaccttctttgtatggacaggagttaatgcccttgctgactccatgatagcgtctagcacgcttgccatcctcctcctcttgggagttattgcaggagcttttgacaccttcagcaattttggctccggtggcggacttaagattcttggtggtcctaccgattcctctcggtgtagctcttcaactgcctttcctttagcttcggtagtatgtttcagtgcttcggccgatccggttgcaggaacctttggcacttcagtcgattcttcggcgcttcgaccgacaggagcagactgtcctagctccacgatggaagatgtcccttcaccaagcttcggcaccgtggccatttcaatatacctaggtcggtgtgttaaaaccttaaactttttcgctttcggcacaacag

SEQ ID NO: 3540 - DNA, 377 bp, Zea mays
cttgggctttcccatgctggggactggatattaatggacctttcaagaaaagctaagggggatacacttatgtattggggccattgaccaaatcactaaatggatagagtttaagcccattgcctctttaacactttgtaaggccggggaattcatacaagacataatattcagattccggataccaaacaacatcataactgacttaggaaccaacttcacaagttcagaattcttcgaactttgcgagcaaaagaacattcagatcaagtatgcatctgtagcacatccaagagccaacgggcatgttgagcgagccaacggaatgattatggacgcactcaagaaaaagggtcttcataagaatgaaaaattcc

SEQ ID NO: 3541 - DNA, 467 bp, Zea mays
  unsure (1)..(467): unsure at all n locations
tccgattcccgacactagaagacgggctctcggcgctgtcaaaatatgaattggccgacagcttaacatataatagtttaaaggtacgagaatgagctttttgtacttaaaaacaaaagattntttatttgcttatacttaataccgcactcctttcggagggcctcattcttagcaacgccctcagggcgcagaaaagtgccaaagacgaaggatgcactatagctttaaacaaccttcgttccgaagtaattgaactaaggaacgaaggtcttgaaaaagataaaatattgaactcattggtgaacaaaataaaagaagacaaagctacttccaaagctcagactgaagcccagaaatacgaaattgaggaacttccgaaacaactagctaaagcaaaattaaaatgtgctattgtcgaggctgaccgagatgccactgattactggacaaattattgggagaaa

SEQ ID NO: 3542 - DNA, 276 bp, Zea mays
taagcttctaaagggagaacacgtgatacgtctaaccaacgtccatttctaacattatagaccttgtgcaccttgccaagcagggaaacaggtgggaggctctcatcacaccaaaaatgtgatgacaacatcaagacccctggagctgctacatatggacctctttggactcatcgcctatctgagcatacgaggaagtaagcatggcctagctatcgttgatgactcttcctgcttcacttgtgtgttctctttgcacgataagtctgaaaccca

SEQ ID NO: 3543 - DNA, 412 bp, Zea mays
  unsure (1)..(412): unsure at all n locations
agcttgtgaagattcttcattccgacatgtttctttcggcgatgccagagccagcccatggtagtcttagcaattaagcaagcgttgagttcacctctatcaaaacctactaagtatagctgaccctgtaacactcccttaaatgctactgaatcatcacttcttctaaagaccataacacctatatccgcaaaaagacagtgcgaagccattttacataatcgcgaaactgaaagcaagttgtaatctacagaatgtacaacaaaaacattggacatggaatggtcaggagatataacaattttacgcaatcctttgaccaaaccttgagttccatccccgaatgtgacagctcgatggggatctnggtctttctcgtaagaagagaacatcgtngttctcactatcatat

SEQ ID NO: 3544 - DNA, 388 bp, Zea mays
  unsure (1)..(388): unsure at all n locations
acgcgacactataaacatactcagcttcatactcggctgcgttgttagaggccgggaatatcttttgtatagcctacttgaggtgttcgcctcccgtgcagtgaagagaatntctgctcctgctccctgcagcttcagcgagccatcaaaatacattcgccatacttctgcggtttctggattatccggcacttgctgttctgtccattctgatacgaagtcgaccaatgcttgagttttgatggcagcgcgacgtcggaactcgatatcatgggaccccaactcgcaagcccacttggctattcggccaatggcttccttgttgtgaacaatgtcccctattggaaaaccagtaactactatgactttgtggctcgcaaagtagtga

SEQ ID NO: 3545 - DNA, 442 bp, Zea mays
  unsure (1)..(442): unsure at all n locations
acatgtgcttagcggcgatgccacagccagcccatgctagtcttagctattaagcatgcatctagaccggcctcttcttttgcaaaatcaactaaataaagtttgccgtctaatacacccttaaaagctagtgaaccatcacttcttctaaagacagacacatctacatttgtaaatagacagttatatcccatatgacataattgactaacagatagtaaattatatccaagactctctactaaaaatacattagagatagaatgctcattagaaattgcaattgtacctaatccttntaccttgccttgattcccatcaccgaatataattgaatcttgggaatccttattcttgacgtaggaagtgaacatcttcttctccnccgtcatatgtgttgtgcatccgctggcgataatccagcttggaaccccggatgcat

SEQ ID NO: 3546 - DNA, 408 bp, Zea mays
  unsure (1)..(408): unsure at all n locations
ctctaaagctctctatgggcttaagcaagctccacgcgcttgtgtatgaaaggcttagggatttcttgctttccaaagacttcaaaattgggaaggttgacactactctattcactaaaagaattggcaaagacttatttgtttgtcaaatctacgttgatgatattatctttggatctactaatgaattattttgcgaggagttcggancaatgatgtcaaaagaatttgaaatgtctatgatacgagaattgagcttctttcttggccttcaaatcaaacaattgaaagatggaatttttataagtcaatcaaaatatttgaaggacatgctcaagaagtttggtttagaaaatgctaagcctatcaagactccaatggccacaaatggtcatctagacttagatg

SEQ ID NO: 3547 - DNA, 385 bp, Zea mays
  unsure (1)..(385): unsure at all n locations
cgaccaaacactctctactgaattgaacgtcgatgaagctgtatagaaaacccctctcctgccaactgcgggcgaagtggttgaaattctgaacgtaattactgattctccgccattcaagctgctaagtcctctggtgtcggggacctctcgcattcgaacgtcntcaaaaacaggatttaacagtctttctggagtacactgcgtgaacaggtatcctcggactaaagccggcattgttgtagaccgcaataatacgaacatcgatccagagccgaacgtgcaactccgacagcttcggcgtcacatcaaagagtgcaatcgacttaaacatgaacaggctcttcacacctcgatngactactatacaattaatatcacacgt

SEQ ID NO: 3548 - DNA, 437 bp, Zea mays
  unsure (1)..(437): unsure at all n locations
gagtcacctgcggcatgcaagcttatcatgatttaggagagatgatgttgtcttcccttaccttacgagatgtggtggtggatttatgagatccgctggccacattgagggcgcctaactcgcaacctcatctcttgcgaaccgactttacctaaaaactgatcttgggaagatataaatacacctccatttcggggaggctataagtatcccctatgagctctcttgtgaagagaggaagaaagttgagagtagatacatcctagagagtttacctcttcctatttcatagtataggttagttcctatgagttagaatatgagctttgccttgcgaagtccagatatctcttcatcgagtcattggatatatctcttctggatcagcggctatcgatgaaactcaactatctngcgtgctattatgaggtctatct

SEQ ID NO: 3549 - DNA, 350 bp, Zea mays
  unsure (1)..(350): unsure at all n locations
cgtgagcaatacaagttcagaagggaaaaagctgctttttttgaccacccgaaacacatgctcttgtgtgaggatatagcagagcagaaggtgctattgggatctcaattgtccgaagagcaggagaaaaccttgataaggtgtttgttcaacaataaagatgtttntgcttggtcagctaatgatctgtgcggagttaacagggatgttattgagcactcactcaatgttgatccatccttcaaacccaggaaacagagccttcggaagatgtctgatgataaggtcgaaggtgctcggaatgaagtgaaacgactcctcagtgctggagttattagagaggtagaata

SEQ ID NO: 3550 - DNA, 439 bp, Zea mays
  unsure (1)..(439): unsure at all n locations
agcttgaagccgaagtcgagaaanactcatttctgcaaaaaattcctaaaagagcttcggaatgtttgcttaaacttcggcaaccgctgcgtgcaacggctacgacaggtcttcaactcagtgggagccaactctgaaaaatttgaaccttcggttcaagacttgccaagcaccttcgaacatattgaaagcgaagttgaggcgcttgacgaagttatagctgggcatggtgacttctgtgccctgttggcttctcgcggcacagctgtagcttttatgaaggctggttgcacgcacggaaagattgtaaataggccatacttcagtctatcaccagcggacctagctgatatccccagcctagcccaaagtattgngaatagatttataacacannattggacgaagggtgggcgggacttagctggtgacgatgctc

SEQ ID NO: 3551 - DNA, 436 bp, Zea mays
tcttctcgaggagctcactttggatgctgagtccttcgtgttctccgccgatcacccctcgcactcagccgccaagggcggccctatgcacccttctgtcgcccccattactcctggaactcctcatcaagctcctagcttcagaggcggtcgccgacctcgcaagggcagtcgcgggggcgacgaccctccccgtggtgaccccactggtccggaggcggtcatgtgtggtcgtcctcctataacccctgcaccgggacccctcccagttacctcagtaggtgactcggttctttcggggtcgttccacctcaaatacattcttgttgctccccacattattcagaatcttctttctgttcgtcggttcaccaccgacaactctagtttcattgagtttaaccactttggtttatctgtgaaggatatggctacc

SEQ ID NO: 3552 - DNA, 169 bp, Zea mays
atcggatatcttcttctttatcaagttaatccatgtcttaatactagactccgccctgccattggcctgagcataatatggagatgaattaagcaaactaattctatttaattcagcaaattcacgtacctcttttgacataaaataagttccttgatctgtagttaaa

SEQ ID NO: 3553 - DNA, 337 bp, Zea mays
cgacgctgtgtatagattaccgccctcttaatgcggtaactatccagaacaagtatcctttgcctcgtattgatgttctctttgaccagctggtcggcgccaaggtgttttccaaaatagaccttcgctctggctaccatcagatcaaaatacgagcaagtgatattccgaagacggcattctcacccagtgtaatacccaaattataaataatgaaatagtgattgatctccttaagtgtgtggcttccacttcttaacacatgggaaccccatatttaaaaattaacaagtaacaaatgacattattaagttgtgcatcatgttggctcttaatt

SEQ ID NO: 3554 - DNA, 225 bp, Zea mays
  unsure (1)..(225): unsure at all n locations
caacaaaaactatttgaagatgaggtggcgaggctacgaccggaggatttactggcggcacgccgttgtcgccgccggatcagccccacgcttgccgcaacggcaaatgcagattttcagtcacctcaaatgaaggcaattgctgattgccaactctctgactngctttactgggagtcagatatccctaaggaaaacgccaattgtgctctccgtacacaatag

SEQ ID NO: 3555 - DNA, 414 bp, Zea mays
gagggacttcttgttttacaagaaacgatgtggcattgatcgatccacgctattggcacttgattacatccaccaagaagaggccatgctgtctgataacatggatgagagaaaaataagttttgtgctcacaaaagatccacccagtgatctagaggtaagcataactcccatcaagcgtccaagacagcgaacaaatgttgatgaagaaactatagaagcgtcgattgatgcatataaggagtggcttgcaatactacaacatgataatccagaaacgggtaagttaagatgtcaaactcattacattaaatacatgatatgttatagtttccacagttaaacttacatattggttaagtgcagatctaatggatgacttcagggaggatacgatcaaaacatataaagaat

SEQ ID NO: 3556 - DNA, 416 bp, Zea mays
  unsure (1)..(416): unsure at all n locations
agcttgtggcgtcctcgggcgtcttgtcgtattctaagcaccaagtctcccacttggaagcctcagggccgaaccattcgggcgtggtagcgtcgtagagactgctgataccgtgccgagtgtagtaaggcaacgtcccgagcttcttcgagctggtccagtgagtcctctgggctggtctggttgctttggtcgtcgtatgcctttgtcctcggggaaccgtattctaagtccgtggggaggatggcctcggccccatagactagaaagaacggcgagaaacccgtggctcggctcggcgtcgtcctcagactctagatgttggaacttgctctcctgggcaagatgatccaatgggggattgagtgcagcacanacaagggttcaacttgggatggcaattgctcttgtaatct

SEQ ID NO: 3557 - DNA, 441 bp, Zea mays
aagctaccgatcaacttagacaggtcttagttacataattttattattgtgggacactactttcagccaatgagacaataaaaggggaaagatccgcgtcgatatgaatgtggacttaattagcatgattgtagaaaccaaacacgaaactcttagcatgacatgactttgcaagagctggactaaaacacaaggaatacaaagcactattgctgaaatgacacctcttttggtttcagagagtactctaaaataatcaattagctgtaagcataactataaaaacgatgagcttttttgataatgggagctctatagaaaagtttaccaagaacgttacatcaagcggatacaaagtcttcgtacaagctcctggcctctgtctaacgcacatggccaaactaaagaaaaggacaaacaagagaaagaaatgcaacaccc

SEQ ID NO: 3558 - DNA, 376 bp, Zea mays
gcttctaaagggagaacacattttaggatttacatatgttcattttgagaaagacaggatttgtagcgcatgccaagccgggaagcaagttggagctcatcatccacacaagaacatcatgacgaccgacaggccgcttgagctactccacatggacctattcggcccgattgcttacataagcatcggcgggagtaagtattgtcttggaatagtggatgattattctcacttcacttaggtattctttttgcaggaaaaatctcaaacccaagagaccttaaaaggattcttgagacggactcaaaatgagttcggcttgaggatcaagaaaattagaagcgacaacgggacagagttcaagaactctcaaatt

SEQ ID NO: 3559 - DNA, 371 bp, Zea mays
  unsure (1)..(371): unsure at all n locations
tgacgttgaatagggtttacatatttatcgcattattcctactgctgcgtaanagggctaaatttatgttctaagcttttttataagacattcacgcagaatttgatctaggcgcaaggaataatttctccggtccttacagattttcctaacgaggtaattatcacttacttacacttgatctacgcacaaggaatgaccatactattcactctggaaaaaaaagcacctcgctggaagttaggtatgtatttgaaccttctagaattacgtctatttctttacgcagcntttcgcttattaaaattgcattagttctataagttcttcgccaaaacattatatatgttctagatgaattgttcttattt

SEQ ID NO: 3560 - DNA, 463 bp, Zea mays
  unsure (1)..(463): unsure at all n locations
agcttgccatcttatgagcagattatcatgtttatatatacacaaaaacatttgctcaaaggtactgggtactttatgtcctgtgcctacccttttcaatttgcctgtttctcttttttccatatttacctcttgagatctatatataccgaacaacttttatctggatcaatatattttggtatagttctgcccacttggcgaatgaaggtcaatatggaatatacttcctctaggttctaaatgataatatatctattgcaattggtatttagttntggctctagtaagggactatattggtgggagtggcatgctgatcagattaacaacttggtcaaattttgtgcttntcatgctatctattcttgagaagtaccttaattgatgttntatgcgattntcaggaaaaatagtgactcttgaatttcttcatgggactggaanttaagtggtcaacact

SEQ ID NO: 3561 - DNA, 420 bp, Zea mays
tctctctgttctcctttgagggcggaggtaccaggagagcttcttgacaagcctttacctcgtttgcttcctttttccttgtgattcgtgtccatttttccgtagaagaggtcgacatcggagttctccgggtagatggatcctctgctcctggcttgcagtaggtagtcttcgctcggagcgctggaggttgcgctttttccttcttcgctccggctttccccgagattgttgaggaaggctttctctacggcggatccgtgatgcgatgtagagttccctcttcgtctgctacggatgaaatggttccgaagcagaacacacactcggcgcggaggatgatcttgtgctggaaagtgatggccattgagctagcttggatcagtgacacaccccctacctggcgtgccagctgtcggt

SEQ ID NO: 3562 - DNA, 383 bp, Zea mays
agcttatcccgtaggtctacatatgaaattaccagagattgtgaagaatgaagtggaagagccacttgattgtaacaccccgtccaatccctggaccggcggtacttacttctggcagctctctaggatcatatattggccccacagaccaacatgagtcttttgtgcgcactttgtcctcactcatgcgcacccgagaaaacttcccggtcggtcacccatcccaaattgctccaagccaagcacgcttaatttggaggttctttcgagataggcttccgaaaaaaagatgcaccttgttggtatgattacactattaattctattaagccttgggccaggacatcccatcccaggggccaggatatcacaatccacccccc

SEQ ID NO: 3563 - DNA, 320 bp, Zea mays
  unsure (1)..(320): unsure at all n locations
tctaaagggagaacacgtgatacgtttgactaacgtgcaattctaaaaggatagaccttgtgcagcttgtcaagcaggtaaacaagtgggaggagcacatcacagcaagaatgtgatgaccacttcaagacctctggagctgctacatatggacctcttcggacccgtcggctatctgagcataggaggaagtaagtatgcgctagttattgttgatgacntttcccgcttcacttgggtgttcttttttgcacgataagtctgaaacctaacggaccctcaagcgcttccttacgagaagctcaaatgagtttgagctc

SEQ ID NO: 3564 - DNA, 425 bp, Zea mays
  unsure (1)..(425): unsure at all n locations
aataacagaattgaattcgaagctcttctctcaatcagaaaacttcgaacaagaaaaactgaagcttaatgcaaaacttgaggccgaagtccaaaaaacttcaaagttgaaaaaatcattgacaagcctttagaataaatgtctggagttcagcaatcgatgcgttcaacggctgaagcaggtgttctattttgttggagccagcagcgagaaatttactccttcggctgaagacctgccaggtgccttcgtgcatattgaatgtgaaattgatgatcttgatgaagctatagctggacatggtgacttctgtgcnctggtagcttctcggtgcacaactgttgcctttctgaagtctggctgcgaacactgaagaattatcaatagacccaacttcgacttatcaccagcagatttggataaca

SEQ ID NO: 3565 - DNA, 369 bp, Zea mays
ccaagaagggcatgagcaatatccatggtgagaaaactcctgctcatatgcattgctctaacaatgtacctatgtgcttcaacaaagaaagatcaaagagaagcgataggagatgctatggatgcaaggagaagggccatgaaattgattcatgcccccacatgaagaatcaagaccttgcacgatcaagaaagatgaccatcaaaaaagatgaaagcaaaaggcaaatgcattgcaaggacaagcatcgcatttgctacaattgccgtgaaaaaggtcatctattcaaggtttgtccaaagggtaaaactcctaagcctaactcgtcaatacattcaaatatgcttaggagacccaaatttgactctt

SEQ ID NO: 3566 - DNA, 366 bp, Zea mays
  unsure (1)..(366): unsure at all n locations
atggtatgaccctcagttttagaaacgaaaagaatattttggcaagtcttccgctcttatctcccaagcgggtgtgtcgaatgtgaataccgtaatatacatgaatgtgggagatccttgggatgatgaattcaagttgttgaactcgtgatagccttgttaagttacctggtacacgtgcctagccactcgaggccatcaaggctaggattggtgcatgtggaccccgatacttgggagggccgtcacacttatccttgatcattctcatcttcccctagatcaatgtcctactcttggggggctcatcatcttgatcttaatcttttcttcttgagccttctctatctngagttggtgacatgc

SEQ ID NO: 3567 - DNA, 398 bp, Zea mays
  unsure (1)..(398): unsure at all n locations
agaggattcgatctctctggtgtgtctataattaaatgctacagctcttgtaagtagttggaacgtgaaaaacttcgatgacttgcatgtggggtcgcgccctccccctccccctcccccccccccnctccttcccttcgctttctcccgccttctcctccctccccctccttctcccctnctacccccccctccccctcccccccctccctccctcccccccccccccctccccctccccccctcccccccccccctcccctcccctctccctctcccccccccccccccccccccccccccccccccctcccccccctctccccccgctcctcccccccccccctccccccccaccctcccccaccccctcccccccctccccccccccctccccc

SEQ ID NO: 3568 - DNA, 486 bp, Zea mays
  unsure (1)..(486): unsure at all n locations
atcttaagcacctgcggcatgcaagcttctgctggacaagtgctgcacttacttctgagtgcgaagctgccacatataataacaaaggagcccctgacgttggtggagatagtgttgatagttctatcaaatattgcttcagttcttcgaaagctctctgctggactggtccccattgaaaaactttggctgacttcagtacttcgaaaaatggtaaatttctctctgctgatctagatatgaatctgttgagagatgccagccttcctgtcaatctttgagcccccttttttgtacttggtggttccattcgaagtatagctctgattgtgcttggattagcctcaattcccattggtgaaactaggcgaccaagaaatttccacttcttcactccgaagacacattattctggattcagctntaaaccagcctgtctaacattagcgaaggtctcctgcagatcagcaatgtgattatcttgct

SEQ ID NO: 3569 - DNA, 418 bp, Zea mays
  unsure (1)..(418): unsure at all n locations
catcctaacatgagtaagtcctttatttagagcccgctcacgtttgtcttagcaatcaagcaagcgcctacttcaccattgttatcatgaaaactacncaaatatagctgaccatctaacactctctcaacagctattgaagtatcacttattctaaagacacgaacacgcacatccgtacatacaccgttgtagcccattctacataatcgacaaacaaaaagcaagctgtaatctaacacatgtacaagaagaacattacaaatggaatggtctgcggatataccaatcttacccaaacctttgaccaaaccttgattccatccctgaatgcgatcgctctttgcggatcactcgctttctcatacgacgagaacatatttcttctccctcgcatatggtctgtgcacccgctatc

SEQ ID NO: 3570 - DNA, 464 bp, Zea mays
  unsure (1)..(464): unsure at all n locations
gatccttaagtcacctgaggcatgcaagcttctaaagggagaacacattntgtgactatccaatattcattctgagaaagacaggatttgtagcgcatgccaagccgggaagcaagttggcatccatcatccacacaaaaatgtcatgactaccgacaggccgctggagctactacacatggatttattcggcccgatcgcttacataagcatcggcggtagtaagtattgccttgtaattgcggatgattattctcgcttcacttgggtattctttatacaggaaaaatctcaaacccaagaaactttaaaaggattcttgagacgggctcaaaatgagtttggcttaaggatcaagaaaataagaagcgataatgggacggagttcaagaactctcaaatcgatagcttccttgaggaggaaggcatcaagcatgagttctcttctgcctacacgccacaac

SEQ ID NO: 3571 - DNA, 446 bp, Zea mays
  unsure (1)..(446): unsure at all n locations
tgacgagatggcgctcatcatcaaaagctttcgttttattctcaagcaaaggaggggaaaggactacaaatcccgctccaagaaagtgtgctataagtgtggtaagcccggtcatttcattgctaaatgtccattatctagtgatagtgataggggcgacgataagaagggaaaaaggagaaaaaagaagagatactacaagaagaagggcggcgatgcccatgtgtgtcgcgagtgggactccgacgagagctcctccgactcctcctccgacgaggacgccgccaacatcgncgtcaccaagggactcctcttccccaacgtcggccacaagtgcctcatatcaaaggacgacaaaaggaagaaggtaaaatcacaatcctccactaaatatgcttcctctagtgatgaagataattctagtgaaaatgacgaggataacttgc

SEQ ID NO: 3572 - DNA, 473 bp, Zea mays
  unsure (1)..(473): unsure at all n locations
taaggagaacataanaaccttggagacgctgggttaatctatatttgttaatgacctaagagcctcactgaagcctatgtgcacttgctaccttgggcaagaggagggagaaccctaaacccctcttgaaccctctctttcaaagccatggtagaaagggggagagagtgagcatttgtgcacaccatgatttaaaattntggcacaaagttaagtaacttattaacctacaattatatggaggaaatattgcaaaaagacccctggaggaaccccaaatcaaatccccaagtagagtgagagctacagctctctaattctctctaagtcaaaaattacacctacactaaagatcaactgtgttcaccttgaagatggcaccaaaccacctatgttctataccaaaaatgtggcataccacctacgtcacccactagaaaaagttgagcccgagaccttgacgttcgacatgt

SEQ ID NO: 3573 - DNA, 450 bp, Zea mays
  unsure (1)..(450): unsure at all n locations
agatgtgttttgagaactttgngtgaaagtggatgcggaatatagctatgttagaacgactttgctctaagaccatgtcattaagactttaggcgatttttaacgaatgtgtctgacacatatttcattaagcggaatagaaaatgcaatcacaaaaacgtagggcttatgcagcattaaaaacaaaaaagcttttccgttgaaggaaaagcctaggaaactacagatttgaaacatatccagctgagacgtgcatgcacctcattgttcaggctgtaacaacattgactatctatatggnggacacagcaatatggccaanaaggcatgccttaagcccttaaccagtgcatgcacgannagtcgaagcatattaaatataccagcataatattttatntaaacaactntagccccaagggatgggcatgggaattacttatcactaat

SEQ ID NO: 3574 - DNA, 421 bp, Zea mays
  unsure (1)..(421): unsure at all n locations
tggtcattntattgctaactgtcccgacaatgatagtgatcatgaccaagggaacaagagggagaagaagaagcattacaagaaggccaagggcgaggcacatatcggaaaggagtgggattcggattgctcctcctccgactctgacaatgaaggactcgccgccaccgccttcaacaagtcatccctcttcccaaacgagcgtcacacttgcctcatggcaagggagaagaaagtaagcactcataatactagtacttatgcttcttcaagtgaggatgagtctagtgatgatgatgagatagattactcatgcttattcaagggattagatagaaccaaggtacacaaaattaatgaattaattgatgccttgaatgataagaatatgcttttagaaaagcaagaggatttgttgtat

SEQ ID NO: 3575 - DNA, 113 bp, Zea mays
ccttacagattttttttttttaggggggggctaacccttaatcctagggaaaccaaaattggacgcctccaatgctaaatggatggctccaccattttgaacaagccccccat

SEQ ID NO: 3576 - DNA, 401 bp, Zea mays
  unsure (1)..(401): unsure at all n locations
tgccttcgcctccatgtaccatccncagtccaacggagtcatggagcgcgccaacggcaaaagtttcacagctgtcaagaaaatgctcctcgacgacaaanaaggcaagtggcccgacctgttacccgaagtggtctgggcactgaatacaactgagtgcagggcgactgggtttacccccttccgcctattatacggatcggaggccatgactccgcaagaaataaagcatgggtcgcctcggacagccgcgtcggccgtcccagacatagacgagccgacttcaaaggatctcatcgacggagaccgcgtcttcgccctacaggctctggacaaataccaagcccagacaaaagcatggcgcgaccaggcagtcattccgagggagttcagcgaagggg

SEQ ID NO: 3577 - DNA, 453 bp, Zea mays
  unsure (1)..(453): unsure at all n locations
agcttgctagtaggagtcgagaatgcgctttcgtatcttgcgctcgtcagagagcttcttggcgaagtgagctagcgcctctgcattcgtcccctcgccggagcagggctcgtacacacctgtgtcgatgttcactctggccactggcttcttgagcaggtcctggccgatcccgatcagagactccatgttctccttggtcgcgatgtccactgatgatgtgttcccaatcagagtatcatcctacacacacaggcgtccaatataatagcagccatcaatggtcgtcatccgttttatatgaagaacattnttgttttttgctttagtatgtccaatgtagatgttttcatgtatcctgtacatacactgtacctgaatgcgaaggagttcttctacagtgganggcctgaaaacacggcagcatggatgtcaccatgtcggagctggcgt

SEQ ID NO: 3578 - DNA, 444 bp, Zea mays
  unsure (1)..(444): unsure at all n locations
aacatgtgttatgtctaacacatgtaactcttcttttagatagaccttgcgcagcttgtcaagcacgttaataagtgcgaaatgctcatcacagcaagaacgtgatgaccacatcaagacctctagagctgctgcatatggacctcttnggacccgtcgtctacctcaacatcgggggaagcaagtatggtcttgttatactggatgatttctcccgcttcacttgggtattctttttgcaggataaatctgaaacccaagggaccctcaagcgcttcctaacgagagctcacaatgaatttgagctcaaggtgaacaagataacgagcgacaacgggtccgagttcaagaatcttcaagtggaggagtaccttgaggaggaacgaactaagnatgagttctccgctccctacacaccacaacaaaacagtgtggtagagagga

SEQ ID NO: 3579 - DNA, 484 bp, Zea mays
  unsure (1)..(484): unsure at all n locations
cctgaggcatgcagcttaagaattaaatgttgatcaaatgatatgttataagaattaaatttcgccagntcatctgtagagtatgttgttatctgcaataggcgcaaagaatttaacattgatgcttgtaatgaacatgcctctactattcttaagttaaataatgatgttgcaagtcttaatgctcaacttaagacttgcaaggataattatgaaaaactaatatttgctagaaatgcctacaccattggtagacccctctctattaaggatgggtctggtttncaaaaggagaccaggaacttaacaagccaaaggacttccaatctcaacaaggagaaaggaaaggctcctatggctagtagctcttattcttcacatgaccaaaagaaccatgcttatctttatgcttatgtcaagaatatttctagtgctgctcatcatgatagggtgtataatcatgctatntttcttactcgtcatg

SEQ ID NO: 3580 - DNA, 51 bp, Zea mays
aaggactgagctgcagccgggtgctatgagtggctactctcttttttgtcg

SEQ ID NO: 3581 - DNA, 371 bp, Zea mays
atgcagcttcgcttggttaaatatttggcagcttttttgtgcatatagcaatgaatgttgtggtaacttcacatctacccgtctgtttatatagtgatgcaggtaagaaggcgaatcgccaggatttttacaccaagcggacagctgcttgcaccgctgtccggtggaccgcagagaccaaatagtaactctacaaggtgggaccgttacgcgctcggaaaccaaatcgtttctcggcaacgagctcagggaaggtgtttttttggaccttcggctttccgaagcttaagagacgtttttcacggatccagctcgttacgaaaaacgatctatcaccgcgaaagcgctactgttggaccatgcttcgcgcg

SEQ ID NO: 3582 - DNA, 268 bp, Zea mays
  unsure (1)..(268): unsure at all n locations
tctnagggagaacacattntgcgactcacatatgttcattcttagaaagacacgatttgtaccgcatgtcaggcagggaagcaagttggtgttcatcatgcacacaagaacatcatgacgactgacaggccactcgagcttctacacatggacctacttgggccgatagcttacataagcatcggcgggagctagtaatgtctagttattgtggatgataattctcgctccacttgngtgttcttctgcacgaaaaatctcataccca

SEQ ID NO: 3583 - DNA, 376 bp, Zea mays
atgccacagccagcccatgctagtcttagcaattaaacatgcatctagaccggcctcttcttttgcaaaatcaactaagtaaagcttgccgtctaatacacccttaaaggctagtgaaccatcactccttctaaagacagatacatctacatttgtaaaaagacaattatatcccatattgcatagttgactaacagatagcaaattgtaaccaagagactcaactaaaaacacattggagatagagtgctcattagaaattgcaattttacctaacccttttaccttgccttgattcccatcaccgaatataattgaatcttgggaatccttattcttgacgtaggaggtgaacatcttcttctcccgctcatat

SEQ ID NO: 3584 - DNA, 287 bp, Zea mays
agctcctacacatggacctattcggcccgattgcttacataacgcatcggcgggagtaagtattgtctacttattgcggatgattattctcgcttcacttgggtattctttttacaggaaaaatctcaaacccaagagatcttaaagggattcttgagacgggctcaaaatgagtccagcttaccgatcaagaaaataagaagcgaccacgggacggagttcaagaactctcaaattgaacgctctcttgaggaggagggcactaagcatgagttctcatctcctac

SEQ ID NO: 3585 - DNA, 263 bp, Zea mays
tagaccttgggcatcttggcaagccagtaaaccagtgggaggagcgcatccagaaaaatgtgagaccacgtaagacccctggaggtactacatatggaccttttctgacccgtcgcctatctaagcataggaggaaggtagcatggtctacttattgttgatgacttttcccgcttcacttgggtattctttttgcaggataaatctgaaacccaagggaccctcaagcgctttctaatgagagctcaaaatgagtttgagct

SEQ ID NO: 3586 - DNA, 470 bp, Zea mays
  unsure (1)..(470): unsure at all n locations
agcttgtggcaccctcgggcatcttgtcatattctaagcaccaaatctcccacttggaagcctcggggccgaatccttcgggcgtggtagcgtcgcagagactactgataccgcgtcgagtgtagtaaggctacgtcccgagcctcttccagctggtccaatgaatcctctcggctggtttggttgttttggtcgtcgtatgcctttgtcctcggggaaccgtattccaagtccgtgggtaagatggcctcggccccatagactaggaaaaatggcgagaaacccgtggcccggctcggcgtcgtcctcagactccaaactaccgagggtagctcttttatccaccgcttgccgaacttgttaagggtggtgtagatcctcggctntagtccctgcanaatcatgccattggcgcgctccacctgcccatttgtcatcgggtgagctacggcggcccagtccactcggat

SEQ ID NO: 3587 - DNA, 471 bp, Zea mays
tctacagggagaacacgtgatacgtctaacaaatgttactttctaacaagatagaccttgtgcagcttgttaagcagggaaacaggtgggaagctctcatcatgccaaaaatgtgatgacaacatcaagacccctggagttacttcatatggacctcttcggacccgtcgcctatctgagcataggaggaagtaagtatggtcttgttatagttgatgatttttcccacttcacttgggtattctttttgcaggataaatctgaaacccaagggaccctcaagcgcttcctaaagagagctcacaatgagtttgagctcaaggtgaagaagataagaagcgacaatgggtccgagttcaagaaccttcaagtggacgagtatcttgaggaggaaggaatcaagcacgagttcttcgctccctacacaccacagcaaaatggtgtggtagagaggaagaacacgacgcttat

SEQ ID NO: 3588 - DNA, 476 bp, Zea mays
  unsure (1)..(476): unsure at all n locations
agcttctaaagggagaacacattntaggatttacatatgttcatnttgagaaagacaggatttgtagcgcatgccaagcagggaagcaaattggagtccatcatccacacaagaacatcatgacgaccgacagaccgcttgagctgctccacatggatctattcgggctgattgcttatataagtatcggcgggagtaagtattgtcttgtaatagtggatgattattctcgcttcacttgggtgttctttttgcaggacaaatctcatacccaagagaccttaaagggattcttgagacgggctcaaaacgagtttggcttaaggatcaagaaaattagaagcgacaacgggacggagttcaagaactcacaaattgaaggcttccttgaggaggaggaggagggcataaagcatgagttctcttctccctacacgccacaacaaaatggtatagtggagaggaagaatagaact

SEQ ID NO: 3589 - DNA, 446 bp, Zea mays
  unsure (1)..(446): unsure at all n locations
ttagtgataagtgagagagatctgntgcgcccttttgatctcttgcgctnggattgctcttctctctcattctttcttgcgaacaactcaattgtaaccaaggcaagagacaccaattgtgtggtggtccttgcggggaagtttgattcccgtttgattgagaagagaagttcactcggtccgagggaccgtttgagagagggaaagggttgaaagagacccggtctttgtgaccacctcaacggggagtaggtttgcgagaaccgaacctcggtaaaacaaatccgcgtgtcacactctttattcgcttgtgatttgttttgcaccctctctctcagactcgattatatttctaacgccaacccgacttgtagttgtgattaagtttgtaaatttcagattcgccctagttcacccccccccctctaggcgaatttcaatctgta

SEQ ID NO: 3590 - DNA, 466 bp, Zea mays
  unsure (1)..(466): unsure at all n locations
tctaaagggagaacacatcttgggactaacaaatgttcattttgataaagacaggatttgtagtgcatgtcaagtaagcacagtggtgttcatcatccacacaagaacatcatgacaacttacaggccactcgagctactccacatggacctatttggcccgatagcttacataagcatcggcgggagtaagtactgtctagttattgtggatgattattctcgcttcacttgggtgttcttcttgcacgaaaaatctcaaacccaagagaccttgaaaggattcttgagatgggctcaaaatgagttcagcttaaggatcaaaaagattagaagcgaaaatggaacggagttcaagaactcacaaatagaaggctttcttgaggaggagggcatcangcatgagttctcttctccctacacgccacaacaaaatggtgtagtggagaggaagaatacgactctac

SEQ ID NO: 3591 - DNA, 455 bp, Zea mays
  unsure (1)..(455): unsure at all n locations
agcttcagctccatctatgttattgtttgcttttgacgaatgccagnttccttcggcccttctggcggctttctgacttccatgaatagcaatgggcccttggtccgaaggtatcttcatgcaaagatatgctggatgaagaattgcttcaaaggcattgagagtaccacgaccaatgattgcattgtaggggtactccatgtcaacaatatcaaacacaacttgttcagtccttgtgttgttgataaacccaaaggttactggcattgtgatcttgtcgagtgctacaatctgccttccttcgaagccacaaaggggatgtgtggcatcatggatcctttcttncggctcttgcattagtctgaaaggcttancaaatataatggctgctgcactgtctatatcaaaccaaacattgtggaccagaaatcctttgatccacaagacataactat

SEQ ID NO: 3592 - DNA, 395 bp, Zea mays
  unsure (1)..(395): unsure at all n locations
cgccagtacttgtcaaaacgacaacatctactattctcatttctgcagacnataccagtgacttggcccttcgcgtgctggggactggatatgattggacctttcaagaaggctcaaggaggataaactcatgtactagtagcaatcgacaaattcactaaaaggatagaattcaaacccattgcctcattgacctcagctaaggccgtggaattcatacaagacataatattcagattcgggataccaaacagcatcataactgacctacgatccaacttcacaagttcagagttcttcgacttctgcgagcaaaaaagcattcagatcaagtatgcttcttgtacacatccaagagcccacgagcaagttgagcgagctaacgggatgatact

SEQ ID NO: 3593 - DNA, 382 bp, Zea mays
agcatactacgagcaaatttaaaaatttcattctctagctcatgctcagaaattttagcatttaaattagctatgtgatcattctgatttttaatcatggcaaggtggtcatcaatagcttcaacattaatatctctacatctagtacaaatagcaatatgttcaacagtagatgtagatgggttgcaaatatttaattcttctatcttagaatttaatctagcattctcatctctaagacagataatagaatcattgcaaacattcacattttcaatcttagaaactaacttatcgttctcagctttagacttgagattgaatatggacatgctagctcttatacaatatacattttcactttaagcaaacattttaacta

SEQ ID NO: 3594 - DNA, 381 bp, Zea mays
tggctgacgacgtgaccgctgctcctgcccgcctgccactttcattactgccggcccatttttggccgtattgaccgtcgcgcctggctggcactgctggatcgtacgcagggttgcctcgagtcgcggtactggttccgcagtccaggtggcgtggtagtggtgcgagtggcggtgcagttgctcgcacgtagtaatcggtgcgccggttgcatgacgcgtgggcctgcgcctccatgctgggtgcgttggaagttgaaggggtgcacccacttggcgcgattgcgtgccgactgcatggctgtccgccctttcacccgctggtctgggcgaaagtggaggaatgcttgtaaccgctgggcagttgcatgcaccgcgcgt

SEQ ID NO: 3595 - DNA, 393 bp, Zea mays
  unsure (1)..(393): unsure at all n locations
tgaacaagaaggatctaaaagcttgctcgacacatctacaaatgaaaataatagctttgcccctacaaggtttgtagtgcatatgtatagaaatcaacggtacaattgtactgttatacaaagttgtgtgtcgagccaccactatagatagagttacagtgccatgcgcggngagggaggaggctagttntttatacgtcgaaaactctccgtttgtgaagcatatatttatacattcgcatcctcatctataaccgaaggtattattcgaaatatctgtatgtagaaaacaatacacagacgaataagagtaatggcttctctactcatattaccttattttattctttgaattccatggttaatcatcgcagcctctatccgtttgattta

SEQ ID NO: 3596 - DNA, 479 bp, Zea mays
  unsure (1)..(479): unsure at all n locations
agcttgtggaggttcttcatccccacatgtgtctttgtggcgatgccacaaccagcccatgcaagtcttagccattaagcatgcatctagaccggcctctttgaaagggaaatgtgcccttgggccatttataagtattttggtgattgagtgccaacacaagtgcttaaatgtgaaatcatgcttgtggatggacaaagtgcaaatcaagagcaaaggtatgtttctatgtcttagtacattggttttgtgtactaatatacttgtctaagtattggaaacaggaagaanaagaaaagaacagagttggctgtgtacagccaaggtgctgtttcggtctggggcaccggactgtccggtggtgcaccggacagtgtccggtgcgccaggctgcctcggacgaagaggccgctctcggaattatgctgacggcgtacggctaaaattcaccggactgtccggtgtgcaccggactgtcc

SEQ ID NO: 3597 - DNA, 375 bp, Zea mays
ttcaccttctaccatgatgggattgtacctggccgacgggacaattactacgtctgtgcaacattctggaccgccatgaccaaagacttcgccatactgcactgttgcccccatatgaagatattgttgcttcgcagctcatcacacactgctttggactgaatgtccgccgacatggggagttgaggtggcttttaacacggacgccaaggtgtagcctccagttctgttgaaagaggagaacgctcatcaaaagcaaaatttccatgatggaaatcttcataccagccactcctcgttgaacaagcccttctgatgaagctctctgcgctgaggccttcggttatgctcatcttgagcaagatggtgaacttc

SEQ ID NO: 3598 - DNA, 390 bp, Zea mays
agcttatagagtcatcaacaaaatccatcaaatgtgtttaagtatcttggtatggtgggtttgaagaaactaatggctctcaagcagagtaagttgatcatgatgatattgatgattaagaggctccttaataacactaaacaacatgtcactcggtggtgtgtatcccaaggagtcaacacaagaaaaaggtcaaccattctctacacaagtcgaacccttaactcacgatgacacaaatgaaagggaaaatgaataaaatccagaaaagaagtgaaagtcgcctagagggggtgaataggagaaacctgaaatatatgactttaaacacacactaaggtcgggggttagcgtttagaattaaattcgagtccgaagagagggaaaaac

SEQ ID NO: 3599 - DNA, 147 bp, Zea mays
  unsure (1)..(147): unsure at all n locations
tatgaagattcttcatccnaacgtgggctagtcggcgatgttatatccaacccgcgttagtcttagcaattaagcaagtgtcaagttcagctctattaaaatcaactaagtatagctgaccctttaacactcccttagatgctactg

SEQ ID NO: 3600 - DNA, 362 bp, Zea mays
  unsure (1)..(362): unsure at all n locations
agctntaccaaatggatgtgaagagagcctttcttttggtccaatcaaggaagaagtctatgttgagcaacctccccgctttgaagatagtgagtaccctaaccatgtgtataaactctctaaggcgctttatgggcttaagcaagccccaccagcatgggatgaatgccttatggatttccttatcactaatggattcaaagtcggaaaggccgatcctacactctttactaaaactcttgaaaatgacttgntcgtatgcccaaattatgttgatgatattatatttgggtctactaacgagtctacatgtgaagaatttaataggatcatgacacaaaaggtcgagatggctatgattg

SEQ ID NO: 3601 - DNA, 461 bp, Zea mays
  unsure (1)..(461): unsure at all n locations
agcttagcttatcctatgaagaattttttatttttatccaagccaaatcgntgcgcatgcacaactcagaaagacaagcaagcaggatggataattctactatatattatattttttaaataaaaaacagaatcggcagcattcttcgatattgcacatgcacaaattggaaccacgagcaggtatgcacaaagatgacaaattcgaacagtaaaaaacgcttaaccacttctgctttagtcagcatgaaagcaccacttcaattgtgagacaaatatttaagttgcggtacaaacaccatatactctggtatgcatattgtaccgagaacccctgagggtcataataggatcatataatctgaatgaacatgccattntatgctacctagtttcaaacactgatcccatcagtcatcacgaggaaattggccagcccaacagaccgagaaagctaaattc

SEQ ID NO: 3602 - DNA, 410 bp, Zea mays
aactaagcttaaagataaacacatgagaattccaactccttcttttattcctcactcatcttccttgatacaagggagcacactcacttcaaccacaaagtgtagcttcactacatttccacacttcaccaaatgagcaccctagtgctatttatagttgaaactacgctaggggtacttataggtgaactaacgcggtgaaggactaaagttggtggttgggcgaggtcggtttttacttaaaatagttgtgcacgcgacttggtgagctcaacaatctatgggagtgatgatgtggtttccttttggcccttgaataatccacatgtcaaagttcatggttgaatattgtaacaactttcgttgtttgcacacaagacggatttggacgtgataaggaaaagtgaccc

SEQ ID NO: 3603 - DNA, 378 bp, Zea mays
gctgcacgccttcttccttttcttcattatcctgaacacttaccggaacactaccccacttaacaagaatgagggtagaactctcgaatcctggtgacttgaactccctgaaaaccttataccagggtgttacgggaccttcttccgctgttgctgcttgaacaagctgccgagaaatgactgacacatggttgattctgggacaacctcttctcatcttttcttcactatcttcttttctctcctcacttctcacctatcactgccctctttctatctctatggtcttcccactcgaggattctatcacagagtattactatcatacagaggaggaaaccgaagactatgaaccatgtacaacagtcttcaacccaa

SEQ ID NO: 3604 - DNA, 435 bp, Zea mays
tgaaaatatctcaacacagttcgaaggttggaggcttctttcgaaggtttttctgccaaaaatattccaagaggtgaaaatgaccatgcagatctgctacccaaatcagtggctcaggggctccctctaccttcggaagtatttttgaaacaataaaagcaccttcggttgagctcatggagagaacagcgcttgcaatttccctagtacatagtgaagattggaggactgaaattatatctttcctccaaggcaattgtctttcggatgacgaagcttataataagagaatggaagcaaggacaagaccatatgtgataatagaaggggaattgtacaaacatggagtctgttctccactcctcaagtggttatccagagctaaaggtatctgaataatgaaggagatacctgcacgtttgtgtggatctcata

SEQ ID NO: 3605 - DNA, 498 bp, Zea mays
  unsure (1)..(498): unsure at all n locations
gaccttaagncacctgcggcatgcaagcttgtgaagggtcttcatccncacatgttcttatctgcgatgccacagcgagcccatgctagtcttagctattaagcatgcatctagaccggcctcttcttttgcaaaatcaactaaataaagtttgtcgtctaatacacccttaaaagctagtgaaccatcacttcttctaaagaccgacacatctatatttgtaaatagacagttatatcccatattgcataattgactaaccgatagcaaattatatccaagagactctactaanaacacattagagatagagtgctcattagaaattgcaattntacctaacccttttaccttgccttgattcccatcaccgaatataattgaatcttgggaatccttattcttgacgtaggaggtgaacattttcttctcccccgtcatatggtttgtgcatccgctgtcgataatccagctggaacccccggatgcatanaacct

SEQ ID NO: 3606 - DNA, 474 bp, Zea mays
  unsure (1)..(474): unsure at all n locations
tgacaacgacgaaatggctnttattattaagagcttccgttatatcctcaagcaatgaaaggggaaggactacaaaccccgctccaagagggtctgctataggtgtggtaagtccggtcattacattgctaaatgtccatacagaagtgatagtgacagggacaatgacaataacgggaacaagaagatggagaacaagagatactacaacaagaagaagggtggcgaggcgcacataagatgacaatgggactccaacgagagcttcaccgactcctcctccgacgaggacaccgncaacatcgcggtcaacaaagctcttctcttacctaacgtcggccacaaatatctcatggccaaggatagcacaaagaagaaggtacattctacagataccccgatgatgagggttacatctagtgaaaatgatgataacttgccttctctttttgccaccttaccatggaacaaaac

SEQ ID NO: 3607 - DNA, 363 bp, Zea mays
  unsure (1)..(363): unsure at all n locations
atcctgcaagccccaagaaacttcgggcctccgtaaccgtagagggtatgctccacaccactatctccttgactttagcaggatccactgatatccctncatgatatggccaagaaatggcccctcgccaaatcaaaactcgcacttgctaaacttaacgtagagttgaatatcttgcaacttctgtagcaccaaccttagatgttcttcatggtcactctcattcttagaatagataagaatatcgtcgatgaacaccacgacgattctgtccaaatactccaaaaacatgttattcatcagatccataaaataagctggtgcattaattatcgcaacgacataacgatgatctcatataat

SEQ ID NO: 3608 - DNA, 192 bp, Zea mays
  unsure (1)..(192): unsure at all n locations
aaagcctcttccactttcttattaccacccttaacagattggtacatttaattaagcgaaccatgccgtttctgaaatctggaccgaaattgggcagattcgttactgaatttgtgaaaagcataactccttaacgaacagacttatgactgttcaaatntaacacccgcaatattatagggtatctacact

SEQ ID NO: 3609 - DNA, 200 bp, Zea mays
  unsure (1)..(200): unsure at all n locations
gcttgataatttanattgagctaagctagcacttaataatcttcaattaagctttattccaaagataaaaaaaatctgggatgctacacgctaatatatactcgaacatatgcttggtccgcatgaccaacttttgaagggatatcaaagtcaaggcctggacagaggtctatcatccttaaaaccaccattctattcta

SEQ ID NO: 3610 - DNA, 385 bp, Zea mays
cttcctggacgccattaacacagcatactacaccttctccaattctgtatagcttttctttgataaactcaaaacttctgagaccaagtatactgggacttgctttttagcttgtccttcgagcttctctcgtacaagtgccgcactcactgtagagtccgaagctgccacatacaatagcaatggagcccctagcatgggtggagttaatgtcggtaattcgatcagatattgcttcagctcctcgaaagctttctattgaattgagcgccattgaaaaactttagctaactttagtacttcaaagaatggtaaatttctttctgctgatctagatataaatcgattcaaagatgccagtcttcctgtcagccgttgggccccc

SEQ ID NO: 3611 - DNA, 349 bp, Zea mays
  unsure (1)..(349): unsure at all n locations
tcgactgttgnttcangagtgacggcagccttcttcggaggggtgcttgaagatttgatcgtttccagcacatctagcacattagccattctccttcttttcggagtcactgctggcactttttgatttcttactgtttcaatgtttgccacaggactcaaaactcctgatgttttggagtcctcgcttgcttcctttacctcttccattttttctgtgaatggcgcttcggccttctctttcgtttctggtaacaaaatttttgattgctccaattttgtcttcgttggtatttcggctgtttctgtgacttctggcagcaaagttggctcggctggtttttcagctt

SEQ ID NO: 3612 - DNA, 468 bp, Zea mays
  unsure (1)..(468): unsure at all n locations
ctcacgctatgaagaattctctatccaacatgggccagtcgggggtgttttagcctacccatgttagtcttagcaagtaagcaagtgtcgaattcagctctatcaaaatctaccaagtatagctgaccctctaatactcccttaaatgctactgaatcatcacttcttctaaagacagtgacacctacatcagtaaaaagacagctgtagcccatttgacataattgagatacagaaagcaaattgtaatctaatgaatctacaagaaaaacattggaaatagaatggtcaggagatatagcaattttacccaatcctttgaccaaaccttgatttccatccncgaatgtgatagctcgttggggatcttggcttttctcgtaggaggagaacactttcttctcccctgcatgtggttgtgcacccgtatcatgatccaacttgagccccgatgcataacctacaaac

SEQ ID NO: 3613 - DNA, 463 bp, Zea mays
  unsure (1)..(463): unsure at all n locations
catgcaagcttgagaatgacatcagtcgctatcgacgatatcatatcttctttaggnnaacccactctaacctcaagggaaaaactcttcttcgactttctattgggtttaacaatgaaggtgttttctaatgaagcatgctatttattaaagctttgaggatgccacaagatcttgaagataaaaagcatgaacttataattgacgggttagaaagcaaaataaaagatcaagccgctgctcttgaaaagaaggatntcgaacctcacacagcagagggtttattggcagaagctgaagctaaaattgcaaagttgaatatggagcttctctcaaagtcgaaagcttcgaacaagaaaacaaaaatttgatgcaagatttgacgctgaggtccgaaaaagttcatactttgcaaaatcattgncagagcttcaaaataaatgtctgggagttagcaaccgat

SEQ ID NO: 3614 - DNA, 424 bp, Zea mays
  unsure (1)..(424): unsure at all n locations
catggctcacgcaattctctattttagaaaccctgncgctccatcatgcagtgatcaggaaacgcaccttctcacagtacgactatggatggtggcgaaacctacagcgctacggccanctgcgtccctcctcattcgatctaagcccgcataccggaatcactgcccatatggacggggtatgggggccttgatgccctggctgacgtaccagacgttgaccgcaccatcaaagagctgagatccacgccagagctcttgtacattggtggttatggccacattgatttcatcatgagcgtcaaggcaaaggaagatgcttatgctgacttaatgaggcttctcacggcccaccacggaatgcacacgagctattacgacgcacgtcacgtacgccgtcaaatagatgctcatgctatgatga

SEQ ID NO: 3615 - DNA, 442 bp, Zea mays
  unsure (1)..(442): unsure at all n locations
gctgccgtcgctcttccacgccggaggcttcctcggcgcgaacttgatctcgaagccgtcgtcgatgtcgtggatcgtggcgcgggagctcgccacgggcttcatcgcccggcacttgatctcgaatccgccgcccttcttcaggtcgcctccgacggagtcggaggcgtaggagtcctggtccgcggcgtacctcttcctggagagccggcgcccgcacagcctgccggcgacgcaggcggccacggcgaggaaggagatcgccgcgagcacggcgaagaccgggccgaacgagcccttggcggtcgtggaaggcgcccgcgcgcgcangacggcgttggaggacgcggtgtagtagaccgtggggtcaggcatatncttggttctcggcgctctctcaagctgctagctgctgatatatgccaccaccacgctctccctc

SEQ ID NO: 3616 - DNA, 483 bp, Zea mays
  unsure (1)..(483): unsure at all n locations
ctataaaactaagcttctaagggagaacacgtgataggcttgactaacgtgcatttctaataagatagaccttgcgcagcttgtcaagcacgtaaacaagtgggaggagcacatcacagcaagaacgtgatgaccacttcaagacccctggagctgctgcatatggacctttttggacccgtcgcctatctgagcataggagggagtaagtacgggttagttattgttgatgattcttccccgcttacttgggtgttctttttgcaggataagtctgaaacccaagggaccctcaagcgcttcctcaggagagctcaaaatgagtttgagctcaaagtgaagaagataaggagcgacaacggatccgagttcaagaaccttcaagtggaggagttccttgaagaggaagggatcaagcacgagttctccgctcctacacaccacagcanaatggtgtggtagagaggaagaacaggacgctca

SEQ ID NO: 3617 - DNA, 309 bp, Zea mays
gacttcggtcttccgccggcgcgcgaggaccaagctatccagtgagtctccgaccgatttcttgcacccatatcttctgtggcatcccgtgaacctctctgacccatccaattgctctatctcgccgagaccaggccggactcctcgccggcgacgagcatccccgcctgcgcgcgtggaccgaccgactccggccatctccgacggcgatacgcacaccgatgtgatccccgagacctcccctatgtgctcgaccacttcaccggagcaatcatcgccgcggtaagcccctccgccctctcttctgca

SEQ ID NO: 3618 - DNA, 453 bp, Zea mays
tatgaagattcttcatcccaacatgggctagtcggtggtgttatagccaacccatgttagtcttagcaatgaaacaagtgtcgagttcagctctatcaaaatctactaagtatagctgaccctctaacactcccttaaatgctattgaatcatcacttcttctaaagacagtgacacctatatcagtgaatagacagttgtagcccattcgacataattgagatacggaaaccaaattgtaatctaatgaatcaacaagaaaaacattggaaatggaatggtcaggagatatagcaattttaccaagacctttgactaaaccttgatttccatccccaaatgcgatagctcgctggggatctttgctcttctcatatgaggagaacatcttcttctccctgtcatgtggtttgtgcacccgctgtcgagtatccaacttgagcccccggatgc

SEQ ID NO: 3619 - DNA, 401 bp, Zea mays
agcttgtgaagggtcttcatccctacatgtgctaagcggcgatgccatagccagcccatgctagtcttagcaattaaacatgcatctagaccggcctcctcttttgcaaaatcaactaggtagagtttgccgtctaatacacctttaaaagctagtgaaccatcacttcttctaaagacagacacatctacatttgtgaatagacaattatatcccatattgcataattgactaacagataacaaattatatccaagagactcaactaaaaacacattagatatagagtgctcatttgatattgcaattttgcctaaacctttcaccttgccttgattcccatcacccgaatataatgaatcttgggaatccttgttcttgacgtaggagggaaacatctt

SEQ ID NO: 3620 - DNA, 391 bp, Zea mays
  unsure (1)..(391): unsure at all n locations
tcggctaaatgaaggacaaaggaaccaacttanaggggatattgctatttagtcctcgcagagttgtccataagtcaatagtaaatatgaagggcatgaatgtaatttcgcacaggttgcgtcctgtgcctataaatagatgaacagtaccctcgtactgttcacgctgatttgtactcgctcgtgcatcacgcttgtactatctccttctgtcaagtcgaaggtacaaatgtaattctgtattatttctgtctattcatgataatataatagaagattaattaataatgttacataatcgttcatgttgtctttttttgtttcgcatgcttcttctttcattaatgtatactgcgcccgatgaaggtatgtccttcatgaccttcgcctg

SEQ ID NO: 3621 - DNA, 429 bp, Zea mays
  unsure (1)..(429): unsure at all n locations
agcatataagttttttgtataacaagtggccacccaagttccggtgatgaagcaccagaagaacaatccacgaaggaatccatgtgggagttcgcaagacaacagcttgtgtgttggcatctatgctccttccataagcaagctgccaagccaaagctagaagcctgaagatgatctctgagtacccagaatcagtgttttcaatcagcaancagatgtttctcataggccacactttgttgaagtttcatctcctcgaagagttgcaaagtgaagatatgtatctgaagtaaagctatacccataaccctcctaaaccgaatcctcaggacgagattcttttaagtggcgtagatctagaacatcccagatatccagatattgaaatcttctcacacttgctctaaattcaaaatgaacttcaaattc

SEQ ID NO: 3622 - DNA, 430 bp, Zea mays
  unsure (1)..(430): unsure at all n locations
agcttaatgatgaactggctattcttaatgctcaacttaagactagcaagaatgatttcgataagctaaaatttgcaagggatgcctacacaattggtagacacccctcaattaaggatggacttggcttcaagagagaagctaagaacttaacaagccataaggctcccattctcgccaaggagaaagggaaggcccctatggctaataatgtgcaaaagaaccatgcttttatgtattatgataggagacaaactagaaatacttataggagttataatgcttgtgatgattttgactctcatgccatgtttgctcctagttcctcttatgtgtatgatagaaatgttactancgggaaatgtgttcctaanagaaatgctattcatcatgtgcctagaaaggaatgtattcatgctcctatgaaaat

SEQ ID NO: 3623 - DNA, 449 bp, Zea mays
gcaagcttgaaaagaaacgctctggaaagaaacttctcttcttgtagacatcaaacttgaacaaaatgtataaatcttatcccccatgtcacaaatttcatcagtagtaaaattgtgtctaatctataagcccagacagcagacagtcttattcggacgcttatatttgagattgagatttacagcactagttccataaattcgcaaaatgaagttgctaaacgggtacaaacaagctcaacgccacatcaacaatagaacctaaacctacccaccagccatcgtactctacccaaccgagagatatatgaacccttacgcattgccttccaaagttcaccgagcagatatggtcgaatcatctaccgagtaggagatactgaattccggaaggattcaaaattcgaagtgcaggataaacagaattaacagagaggaaagaacctcga

SEQ ID NO: 3624 - DNA, 411 bp, Zea mays
  unsure (1)..(411): unsure at all n locations
ccatgttagtcttagcaattaagcaagtgtcgagttcagctctatcaaaatcgactaagtatagctgaccctctaacaccctcttaaatgttactgaatcatcacttcttctaaagacagtaacacctatatccgtaaaaagacagttgtagcccattttacataattgagaaacggaaagcaaattgtaatctaaagagtctacaagaaaaacattggaaatagaatggtcaggagatatagcaaatttacccaatcctttgaccaaaccttgatttccatcccagaatgtgatagctctttggggatcatggtttttctcataggaggagaacatccttttctcccctatcatgtnggttgtgcacccgctatcgatgatctaacttgagccctcggatgcataaacct

SEQ ID NO: 3625 - DNA, 474 bp, Zea mays
  unsure (1)..(474): unsure at all n locations
agctngcacttactctcttgtagaatttcttttgttagctcaagagaaatgttaatagcaacacaagcactagtttccctttttgtaatcattttgataaggaatgaaaagtggattactaaagcattgaaactctataacatgaactagattattccttgaagtatgctcagttttttcttatggaacaagcatagttagttcttttgggaataaatctaattcataacatggagagcgatagatgaagaagaatcatatccaatataagcaagaagcaaaacaacataaatcattggattgactnttctatttatgttaaattacgcatctccaaagagaaacatattctctattagtgagactacatgggttacttagataaaagcattagtctcactattctagttatagagagaatcttncttttgtaggtgtcgtagggatttcaattccttatatgacaccctattc

SEQ ID NO: 3626 - DNA, 395 bp, Zea mays
  unsure (1)..(395): unsure at all n locations
ntcttatactatntaatggtgttctttatatattctagctctatttactattatgtcaaataattaatactttgatatattgaataacatcatcttatgatctattcttgttgtgcgtgttatgatttagtttactggttgtgtaatatgtatggccaattatatgttatatattttatatgctatgaaactaatcctatgtgatactataatcaattatatatgtctaccaactattaagatagactttaggctattatttcctttacaccagtaaaattttgaatactcattctctaaattctggacccgccccagcatgagtgtgccgctagctcgggatgcgcggnccatgaatgtgccgagtccgagtgctctaggtcatgagtgttcta

SEQ ID NO: 3627 - DNA, 372 bp, Zea mays
gcttggacagtgttctacgatggttccttttgtttctttggtgcacgagcggctgctgtcctaatggcgccttctaaagtcaaaacatgttatgtaccacgcttgactttatttgcacaaataatattgctgaataccaagcacttctgttggggcttccgaagttaaaggcaatgggaataagaagggccattctgaaaactgattctcaagtcatttctggacatatagacaaaagtagcaaggcaagggacccgaaacttgaaaaatatctgatacagttcgaaggttagaggctctctttaaagggttttctgtcaagaatatcccaagaggagaaaatgagcatgcagatctgctagccaagtcagc

SEQ ID NO: 3628 - DNA, 452 bp, Zea mays
  unsure (1)..(452): unsure at all n locations
aactaagctaaacattatgagggatcgnctactatacatcgactctggaattattgcactatcaacaagtagaacaataagaatggtattcacacaacagctgtgattcggtatggcttgctttccacatggtgatncccatctccaataatctgtccatcacgatgatctccatctccatgatataggtatgccatcctccaggtgatgagtccttcaagatctatctaacgtatgctggtaaacaaattacatatacgctttggatcatcacatgttgacacgcaggtcattacattaaatctggacaatacatgtggctccagccgtattgccctgctcacgacacgcaggtcatgaataatctattaacatgcatcatatacacaatagccataccgatcacaagatgtnctgcaaaaacacgttagacaaccccgttcctatacgtt

SEQ ID NO: 3629 - DNA, 154 bp, Zea mays
  unsure (1)..(154): unsure at all n locations
ctaacaacagtcgcatcttgccacatactctgcttctctcttttcataccgtaccaccagaatctcttcttcaggtcttggtacattttctcgctaccagtgtgtatagaatatgctgtctcatgagcttncttgagaatcagttcccgaatcg

SEQ ID NO: 3630 - DNA, 456 bp, Zea mays
  unsure (1)..(456): unsure at all n locations
ctaagcttacaggttcaccagagactgtgtacacgtttgaatccgtactgaacggtgataggaaagtgggtcgacagagagggtgtccgcgaccgcgttctacgggacgactgggtgttccagagtttgggctctggtaaagttcaattggttgacaccgtgagcaacacaaggttaaaggcaagctaaaacaagaggcaattgggtatgtacttacccgaggggagctggccaccgatgggtccttcgcgacggcggaagtgaccaatnccagggaaatccgatgatctccgatgatggtgaatagaacagggtggtaagtgagtcgttagcttcgtaactaagagatgaagagcagcgcacggtcaatctggatgccggcggtgagggcacggttaatctatacgtccagtgatctatggngacggccaagatgataaccctcacccggagttt

SEQ ID NO: 3631 - DNA, 383 bp, Zea mays
  unsure (1)..(383): unsure at all n locations
ctggtcacagttntaatgtcaataattaactctactttctgtgggtgataccagatataaacaagcatcaattaataattaataaaaataataacgatgaaatggttcatttgacaaaaatgatttactgtaacataaaattgttattgcgccatgatacacacggttgctttcaaggaaaaaaattgaagaaaaaacgaagatttctagtactactttgttccagtgacttctaaatgataccttcctcataatacccacaggcatgtaggaacctgactaaactaagcaccttatgttaacacagtgaaaacaaagcactanttcaaaaaatccagcgcttacacaatgcctgaattcataaggatatatagcataataca

SEQ ID NO: 3632 - DNA, 410 bp, Zea mays
  unsure (1)..(410): unsure at all n locations
gcgccagcggtgtcngataggaacaaagggaggttgccgatgatgaggttgtccgtctccgttccacccagtttgcaagccaagcggtattccgcgagccataattccggtctcgtctcccccgagtactttgtgatagtagtcgggggtcggaaccaggtcgggaatggtgcccgtcggatggcccggctgaaggcctgcggaccgggcggttcgggcgagggactccgatccttcccactgtcgtagcgtcccccacgcctggggtgatagcctcggcgcaccctctcgtcgaggtgggcccgacggtcgcgatgatggtgctcgttgccgangcggcccggngccgcangcgcggtgttgctcgtgcgcccggtgtagactgangcttcctgcatgaatcgggaagt

SEQ ID NO: 3633 - DNA, 424 bp, Zea mays
  unsure (1)..(424): unsure at all n locations
agcttcgagttcagttctgatatttttgcttcattttccgccagtaagccttctgctgcctggagctcaaagttctttttctcaaaagcatctgattgctcctttattttgttttccaaatttccgattataatttcatgctttttatcttcaagatcttgctgcatttgcaaggctttgctcaataacatactctacacaaacacaaccttcgtcagacatgtttttattagaagcaataaaggttaagggacaagtcattcacctttgaagtggagtaaaataaactaccaacgacatgttgtcgtcggtagcggctgatgtctgtttctagcttcgggaatccaatactcttggacagagtactgataactntggcccctgtttggtcccgaatacactctaatntctcgtcatcaacgcc

SEQ ID NO: 3634 - DNA, 330 bp, Zea mays
  unsure (1)..(330): unsure at all n locations
agcttgacattggctncctcgtggaagcctattctattcttaatgctagggagtctcctattatagagcatgcttctagcaaatttgaatttttcattttctatatcatgctcattgatgttaacagtaagttgagctatgtgatcattttgttgcttaattaaggctaggtgatcatggatagcatcaacattaacatctctacatctagtgcaaatagaactactgtcaacagtagaagtaaagggtttgcaagatcttaattcctctatcttagcatataaagcagcattctcatttttaagtgtcggggaccataattaggggtac

SEQ ID NO: 3635 - DNA, 455 bp, Zea mays
tctatatgccatcctatccgccttcatgaacttgcaccattacttcaaagcatataaaatctcccgtagtcacattgtaccctctcgatgtcatgttacgtaactcataaccactagacgcatagcaaagtgggttgcggagctggtacagctcaatctaaagttcatttagctacgcattgcaccatgaagagccaagttcccacctacttcatggcgacagggaccctagccttaaggttgttttctagagtgcaggcacctcacgggcatgtgcgacttgggtccccattcaccagtcccactacacaatgttcttcgatggctctagtagggttttgacctaaggggcaagcattctcgcgtatctatagatgggagtagctatctacacatctgctcaattaacgcaaccataacatgcgaaatatagggcccatcgttagtctacctaa

SEQ ID NO: 3636 - DNA, 398 bp, Zea mays
  unsure (1)..(398): unsure at all n locations
acctgcggcatgcaagcttgaccgangattgctctaatctcatttcagatcgcaaactattcgcgtcgcacagcgaatacaaacatgttcaaacaaacaaccatatatatgcctaaaaacattacaccatttaagtaaaacataataaaatacggaaaataaaataaaatgtgttactactgtcgcacgaggacaaagaaacgcgacgttcgaggctaccgtcgataggatatcgcgtccacactaaacgagtgttaatcataacatctaattagacattgtaaactataagtaatatctataatttagttcgattaatccgctatgctaacgaatatcagtcaaataagtaatgtaattaacacgagagattctatgctatgcgaacttacgataca

SEQ ID NO: 3637 - DNA, 444 bp, Zea mays
  unsure (1)..(444): unsure at all n locations
tcttctatctatctccaaagctgaacaacctatagtagcttttgttttttgatctccatgtgcctttagatagtttctagccccctcaatctccaaattgacaccattctattcaaccaataactttacgactgttctcttctcaatgccttagttgttaaattcgatatgcttgtcttcactatagccttgttattcgacattgttatgacaatctgttacgctaacatcccttacacttctacgagtcatggttatggtcgctgtgagttcaccgtacatgaatgccaaatgttggatacctatcacatctttgaaaagaacaacattaggacaacaacattaatttaaaaatccttctttcttacaaaggttttagaaggagaangtatcaaatagagttgcgactatcttaacaagtgtgtaaaatacgaacaacaataa

SEQ ID NO: 3638 - DNA, 342 bp, Zea mays
  unsure (1)..(342): unsure at all n locations
aacatacgctactcggcgatgtcatagccacaccatattagtcttagcaattaagcacgtatcgagttcagctctattaaaatcaactaagtatagctgaccctctaatactcccttaaatgctactgaaacactattctttctaaagacagtaacacttatatccgtaaaaagacagttgtaacccattcttcataattgagacactaaaagcaagttataatctaaagaatctacaacaaaacattggaaatggaatgatcatgagatatagcaattttaccaagtcctttgaccaaaccttgattctcatcccngaatctgatagctctttggggatct

SEQ ID NO: 3639 - DNA, 341 bp, Zea mays
  unsure (1)..(341): unsure at all n locations
agcgcgccaatggaaaaattttcacagccattaaaaagatgctcctcgacgaaaagaagggcagatggaccgaattattacccgaggcggtctgggcactaaacacgaccgagtgcagggcgaccgggttcactcctttccgccttctatacggatcggaggctatgaccccacaagaaataaaacatgggtccccacgaacggcttcgtcagccgtacccgacgtggacgagccaacttcaaaggatctcatcgacggagaccgagtcttcgccttacaggcactaaacaaataccaagcccagacnaaagcatggcgcgaccactcagtcattccgagg

SEQ ID NO: 3640 - DNA, 425 bp, Zea mays
  unsure (1)..(425): unsure at all n locations
ttaacccagcccctctgtggcttcagtaaatatgactcgactctggaacagtgctattaactgtccaagcttcggactcttctcttacatcacattgttgctgaatttgacgctaccctttaggttgttggttgcgggacgaaattggagccatgaccgatggttgtggcaaggcccaagcaattggagagtggcttgctgaagctactgaaactgtgggatgtgaaaatggttgttgattgccaacatactctagaatgtatggngaataagacaaaacagtatgcatgacttgttttagctgattttgtcgtgcgtcggcctcagctatctccttttgcttctgtattggaacttggaagggtctagttgtgtgccccttatccttctcgcagaacaaacagaacaaccttctcggttatgag

SEQ ID NO: 3641 - DNA, 450 bp, Zea mays
  unsure (1)..(450): unsure at all n locations
agcttgtgaaggttcttcatccncacatgttctatacggcgatgccacagccagcccatgctagtcttagcaattaagcatgcatctagaccggcctcctctttttgcaaatcaactaagtagagttcgccgtctaatacacccttaaaagctaatgaaccatcacttcttctatagacagacacatctacgtttgtaaataaacatttatatcccatgttacaaagttgactcatagacaacaagctatatccgagcgactcaactaagaatacattagaaatagagcgctcggatgaaatagcaatttatcctagtcctttcaccttgctttggttcccatcaccgaatatgattgaatcttgggaatgcttgttcatgacgtatgaagagaacatccttctatcctccgacatgtggctagtgcatacacgtgcgataatacacctt

SEQ ID NO: 3642 - DNA, 446 bp, Zea mays
  unsure (1)..(446): unsure at all n locations
ctaagcttgtaaggtagaacatgagtaatacaatggttggacactctttggccatttgtggtgccagccagccaggtcaccttgtagtttgcagaaaaagcattgacttttatgagcaaatgctttcatagttatatgtgatcatgttgtgggcttttggcattagacaccttcctttactcttagtgtcaatgctatggggattgttctgccaaggtgtcatgggcatcatanggagcggtcactcatgtggggccgcacctatgcgcgccaaaagcgagaggccgcanggggcgctggcagcaacgcgcgcaaggaaagcacgggcgctggcagcagcgcgcgcaaggaaggcatggcaaatganagtgactgatttggtggctaaattgatagacctaaattgtaggggagataattccaattagtcacttgcctaattagtg

SEQ ID NO: 3643 - DNA, 477 bp, Zea mays
  unsure (1)..(477): unsure at all n locations
agcttaacgacgatgagtgtgtctctcatctggaattgaaggagatgatgcgcgcattgactaaagctnttcagagccacaccattgatgatgattcgtctccctcaggttctatatatccatctttctcttcttttgatgcaaatattgcaaatgaatatactgaatgggaaatatcaatggataagaattttgcacgacgtcgtatatgtgataggcgaanaattaaaattgtggctagtactttaacgaatgatgcgttagtttggtggaataatttgcatgactatgagaaaccacaaacttggactgatgtaaaagcactaatgagacaacaatttgtttctatggatgatactaaaaataatttaagtaattctaccgatatcatgccttcagataaatctgagttgcctttgttacaagaagattgtcttgttgttccttatgataaagaagagttgtgtgatgataata

SEQ ID NO: 3644 - DNA, 397 bp, Zea mays
  unsure (1)..(397): unsure at all n locations
tatgtggaccgatgtggtatcaaaacagaaaattcagattatttcattgtatatttacaactggttttcaacaccctacgacgatatcaatggaagcttaatccctgaaaaatgtgtcttcagggtaccagcaggaaagttactcggttttattgtcagccacccaggaattgaagctaatccaaaanagatcgaagctatcatgaggatggaggcaccgcgatcacagaagaaagttcaaagacttaccggatgtatggcagccctgagcagattcatatccaggctgggagaaaaaggcttaccattttataagctactcaagaaggtggacaagtttcagtggacttcagaagcacaggaagccctacacgcattgaaaaagttcttgacaaca

SEQ ID NO: 3645 - DNA, 446 bp, Zea mays
  unsure (1)..(446): unsure at all n locations
cctctcattcgacctgtggcatgcaagcttgaatttgtgcccaaagtctctgtaattacactgatagtctgaanatcaaacattagacagcctgacagtccaactttgggtgtaattttctctaatttcttcataacaaccatgcttacactcttgagcaaaggtgttcccctttcatagagctacaaagttgatgtggtacccttacgtgaattctcactgatttgaaagttataaagctccaaagttgagccaaaatactgattttcagacttagcactagaacacctatggggcctttttgcaaataagtccaaaaattcaagtattagctgtgaaattcacacattggtgaaccatatgacttaagataccttatcgacatgcgttctgcactttagtctaacagtggactaattttgcacttaaccccctaagggttggat

SEQ ID NO: 3646 - DNA, 385 bp, Zea mays
  unsure (1)..(385): unsure at all n locations
tatatgtgaattatntgtaattcagctctttgcgatgcatgaaacgttatgtacataaccgttttgagccttcggcgaaaaaacaccttcacttattttcatgattcgtaaagaagagtttttatacctcgtaagaacatccacacttcgtaaaaatcatcaatgctttgtaaacaatagatcccttcttccacatcagaactgatgaagatgtaattctcagcttactttgtgccttggcactttttcattntttgtaaagcattctccgaagatcggcttcgcttccaattgatgtcattgatgtgatatgatgtatgatgtaatgctatgcgatatgatgcgatgatatgatgcaaagaatgatggtaatgcccgagacaca

SEQ ID NO: 3647 - DNA, 444 bp, Zea mays
  unsure (1)..(444): unsure at all n locations
agctnnggatgttttatcagagaagtaaacaaattcttgtgatataaaaaagatcttcttcacgaagcatgaaaagaaaggaaggtgtttntttttccccgaaggctcaaaaaaatggtatgtacgcaaagtttcatgcatcttaaagaattaaattataaatagactatatgttacattcaaaagtacaatatattacacatcttatgttccaaatgtttctacaataacgatttaattctccttgagaactatctctgctgcttcgttcaaaagttggttgacaaccttatccataatgtcttcagccatttttctaatttcatcgtcccccttcgagtgggggcccggagatgcctcaacatgttctgagggaagaaaagataccgctatattactattacaagccgagagcagagtctggaataaaaattacagcttgat

SEQ ID NO: 3648 - DNA, 422 bp, Zea mays
tgaagccatggtaagtagcataagctaataatatgcgaattgactcaagcctagctacgggtgcataggtttcaccgaaatccaaaccttcgacttgtgaataccctttggccacgagtcgagctgtggtccttgtcaccacaccatgctcgtcttgcttgttgcggaagacccacttggttcctacaacattttggttaggacatggaactaaatgccatacctcgttccttgtgaaattgttgagctcctcttgcatcgccaccacccaatccgaatcttgtagtgcttcctctaccctgtgtggctcactagaggaaacaaacgagtaatgttcacaaaaatgtgcaacacgagatctagtagttacccccttatgaatgtcgccgacgatggtgtcgacagcgtgatctcgttgtatt

SEQ ID NO: 3649 - DNA, 355 bp, Zea mays
agcttaccctatcccataccagggtatgtatctagttgcttagtctcaaccacaatatgccaatcaacggtgtagtccttaattgacacagattggcgaccttgtctgctcaatgtctggacttgatttattcaaaccattttcccagttttggtacccgacaggggtactcttttcggatgatgaacccaaccggagtcctaatggactcatcatcataagtttgctctgatttttaagtcaaaaagcgcataaccaatgttacacatcattattttgaaaaacacatgatttttgagtttctaagcaggactaatcagtaataattctgtttataaaacaggggttcaggaat

SEQ ID NO: 3650 - DNA, 458 bp, Zea mays
  unsure (1)..(458): unsure at all n locations
tcgtgaccttacaaactcagcttgagaagcttatagcctctcggcaaagctgtccagatgctaatgcgaggctgggggtcgttagaaaatattggtcacgacggccgtgctcgggcagtgatggcgggcggtggcgctcgctttcaacggcgaactccggtgatctctggctcgggcggggcttttggtgcgcaagtgcatacggctaaggcctctgggcgcacttataggcgaaggcaaggtgcagacgagcggggtggggcgaccatgcgcggggcgcgcgctgccgcggccagtctgcgctcggccggtcaggcaagcgatcgaacaggtggcctcgctcggtcttgtcattttcaaacgctaattggctcgcgatcttctcataactctcccanatccctgcacacgaattcttccttggtcgttactctttggttctcttacaacacttgagt

SEQ ID NO: 3651 - DNA, 449 bp, Zea mays
  unsure (1)..(449): unsure at all n locations
agcttatgaaggctcttcatcccaacatgggctagttagtgatgccatagccaacccatatcggttntagctatcaagaaagtgttaagtttggctttatcattcgagaaatctaatagatagagctctccctttaacactcccttaaaaataattgaaccatcaatccttctaaaagcggtaacaccgacattggtaaataaacaattgcaaccatctaaacataattgcgatacagaaagcaaattatagtccagggaatccgccaaaaagacattggaaatgacatgctcggtggtgatagtgattntacctagacctcttaccttgccttgactcccatccctaaatgtaatagcatcttgggattctctattnttcttgtaggatgagaccaatttcttctcacgtgtcatgcggtatgtgcatccgctataaactaccaactt

SEQ ID NO: 3652 - DNA, 405 bp, Zea mays
tactcagcttcaccctttgtgtgcaatccgccgtgactgatatttattgggtcttagagtgcgaccctctgctgaagaagtctgtactttggttgcttcgctcggggagattcctgatgatgaacgacaggtttattttgaagtgcccctgaaccctagtgatgcagacataaatgacatgcttgatctgttagctgaggattcatctgatgctgctcctgatggtacgttggcagtggtgtcccttctagaggttgatacaactttggatgtcccgaaacctgtcagtactcgcccgaggcgccctagccgaactagtcagcctgaaccatctgctgatgagcaaaagaagaagagaagacgcctccggcgagtatccagttttgatgaggacgccagtacctt

SEQ ID NO: 3653 - DNA, 354 bp, Zea mays
aatgagcatgttgatctgctagctaagtcagcagcacaggggctgcctttacctacggatgtgatcttcgaaacaataaatgcaccttcagtggaaccttttcgaagagcagatcttaatatatctcctgcttttagcgaagattggagaaccgagatcatctcttaccttctgggtaaattcctttcacatgacgaagcttataacatcaggatagaggcaagagcttgcccatatgtcatgatataacgggagttgtcaaacattgagattgtgctcctgctgctcaatgttttccataacccacgtatagagtaatgaagaaaacatgccgcctgtgtgatctacatggat

SEQ ID NO: 3654 - DNA, 443 bp, Zea mays
  unsure (1)..(443): unsure at all n locations
tgttgtctttctgcggagacttcattttcttacaatgagtctactatatgaaatagactggaaaaaggtattagtctcaaagtctaagattatagagtaatctccccctgaaagtgtgcgtacaacgtttgaatacttgtaggagacatgcagtttgatttgatatcaagaggggcacattatccataatccgagctttggcacatataagttaaatgataccaattgaagcataccaaatgaagtataattgaagtgttataccacttgaagtatttcaccaaatcaattgatgtatcattttcttaagaatattaaataagttatgtgtcgtgcttatcattctaaaccatgtagggttgctcaagagtgtngaattgaagtgagncatcctaccatatgatttacctagtatgcatgcatttntaatcaaaaaataaata

SEQ ID NO: 3655 - DNA, 435 bp, Zea mays
  unsure (1)..(435): unsure at all n locations
agctttgaatgaataggaagcgagatcatctggtcaactgctacacccaaccttccgtagagcaatattatgccccacagcaaaataggtagcacagatcatacacaaatcaagaacatatatgctactatatagtgataacatacatgattgtccaagggtgacaaaggaaatcatgatgtggagaagagacaaatgaaggaagtagggaaggtacaggacatggtcgtggcctgacctcgctgacagacagtgagggtggacttgttccatacaggggcgctggagttggtgtccggaagctaaagtagctcctgctagacatgcagtgctgcaagagcgatgagttccacccatgtgagatgaacgagcgctttaatcaactgccgggcgcagacaagatatganaaattgatttactgatctaatacatga

SEQ ID NO: 3656 - DNA, 389 bp, Zea mays
  unsure (1)..(389): unsure at all n locations
ngagtntcattngctggcagagtttcagtttatattatttcaacaataatatggacaggtagaaagtagcacatgatgatgtgaactctatttattaattnttgtactgttacatgaaccttctatattaatttgtgtaatgttatgtgaactcaaattattatctaatgacgatagtggctccgaagatgggagtgcatctaatgatgggagtaccatgttcctaattgtggagaagggctccttcaccaaatgatgagcaagagcctacatgggactgtgttcttccaaccaatcaacgccaaaaattatgccaaagttctttagtggaagaactcgggcatcaaagctgaatgagtgtccctggatgcaccacttgaaaccatgga

SEQ ID NO: 3657 - DNA, 447 bp, Zea mays
  unsure (1)..(447): unsure at all n locations
agcttaccggagctgatttgactgccgttagaagccacggcgacacggtagataagttaggccacgcgacgcacggccgggaggcggcggtcaccggcgttcttatcggctcaagccgcagggtagagggaaagcacgggggttcaccggaatggagtccagctcaccggcgacgaatattccctctccccgggatgttatccggttaccagcgagtgcgaatctcaacggcggcgatgatcttggcgcaaggtcgtcgacggtgaagacagccgcgctggcggtctgatctatttcagttgccatactataccatggcgattttcagtntatgacgcctgacagagcaactctagagcaacttttctctcaaatcttcatggcgacaggtccaaatctctgcagcaatattgtagtgctataaaccaactacatcttggctatatg

SEQ ID NO: 3658 - DNA, 448 bp, Zea mays
  unsure (1)..(448): unsure at all n locations
tcttggtttctttaataaggaagtcctcttgtgtgtcctagagatcatccttttcatggatagcactaatcaattcatttaattttttttgttgcatgtttaggttggcaaaaagggtacgcaaattatcctcttcatcactagcattatcatcactagatgactcatatttagtggaggatttggatttaaccttcttctttntgccgtcctttgccatgaggcacttgtgtccgacgttggggaagagaagacccttggtgatggcgatgtttgcggcatcctcgtcggaggaggagtcggtggagctctcgtcggagtcccactcccggcaaacatgggcatcgtcgcccttcttcttgtagtatctttttgtcggtgtttcgaccccggngggtcctggaccgacgagtaaattgtcgtcgcgtgccccagcccagaatgggtc

SEQ ID NO: 3659 - DNA, 407 bp, Zea mays
  unsure (1)..(407): unsure at all n locations
ctgaagagaaacaactgccacgtttctagctgctgaattggtaagctatggcccattctaattctactaagtttaaacagaaatctatcaatttcacagctgccatggttttcaacggtatatttctcgntgtgtcatttatgcccaagtgttatttcctattgtatggactgcagtgttatttaaactacgttcaaactgttgagaactacgtcaccacggatcaccagatccactcccttccctcccgtcatcagtaaaggcgcaagaagctgtagaagacccgtttcccttcccataagcacgacagcgtaacacacgacacactgtatttaaaggtgggcctctggcctctttctgatctctgtattatgaacgggtgtacaggttccttatatagagatgtg

SEQ ID NO: 3660 - DNA, 402 bp, Zea mays
  unsure (1)..(402): unsure at all n locations
tagcttanctaagcttatgtctgaaaagcattatctgtagccagctagttggattggaattgtaaattactatggagtacatccattgaacaatatacctaagtctgcattctttaagaacggacacactaacggggtccgagtgattgaatgaaccaaaaagatgttcgagcagtacatatggatgagcgagagcgggcaactgtatatccaacactacaaaagaaagaaaggttgaccatgcgtatcaagattccttatggcatgtacaacctagacaccgctgcaccgatactccaagtataagacacagctataacataacatgatacagngggcatgtttaaaacatatgtgttaccatatttattataccgatcagagcattcattatattaaagt

SEQ ID NO: 3661 - DNA, 424 bp, Zea mays
  unsure (1)..(424): unsure at all n locations
agctntagtgactagtgagagaganttgcttgtgttctttcgagctcttgcgctnggattgctttcttctttcttgattctttattgcgatcaaactcacttgtaattgaggcaagagacaccaatcttgtggtggtccttgtaggaactttgtgttccaagtgattgagaagagaaagctcactcggtccgagggaccgtttgagagaaggaaagggttgaaagagacccggtctttgtgaccacctcaacggggagtaggtttgcgagaatcgaacctcggtaaaacaaatccacgtgtctcactccttattcacttgcgatttgttttgcaccctctctcgcggactcgattatatttctaacgctaacccggcttggtagtgtgattattnttgagaatttcagtttcgccctattcacc

SEQ ID NO: 3662 - DNA, 470 bp, Zea mays
  unsure (1)..(470): unsure at all n locations
tactcagcttattccatgtcaaaggttcagtaccctgagtttcctgataataagatttatctagcatgcatgcatgtataccagaatccattgctagttntctgggacttgaacgattgttcataaatcatgcctgcataaaatgaatggcggaaagcccaagtatcgcccccacctatctgtataatttgcatcaggcctatctcaatttctctagaatggtggctaggtcttttatgtatggcatgtacctatttttctcagacttcctattcagtctctctctctctctctctctcgngttgacagtccgacgtaaaaaaagtttatctagataattatagctagttagctaccagcatatactagagaacaaggtttgcgtactgtaacgagaacagaaatttggcataagagcattagatgtcctgtaatgaanatagacanaacttggcccgccattttggggg

SEQ ID NO: 3663 - DNA, 462 bp, Zea mays
  unsure (1)..(462): unsure at all n locations
ttacagtcacctgcggcatgcaagctnnttgaatcgaacagctgatgactctggaatangacttaaagcatcacatgaattagcatgtcgcccagtgggtgggccgcttaatttgagttacaccattcgtgaccataaaaactatttgcgtggcatgcgacaacgagagatggtatatggtcaagctggaagcatgctcaaatatttccaggataaaatggtagagaatccggcgttccaatatgcgacacaaatggatgctgaagagaaaatgcacatatattttgggctgatgctagaatgattgccgattatatacactttggtgacatttgtttccgttgacactacttttgggacgaatagagagagccggcctttcggtgtctttgttggatccaatcagtttagacaaactatagtttttggtgctgctctaatgtatgatgaaacatttgagtc

SEQ ID NO: 3664 - DNA, 226 bp, Zea mays
  unsure (1)..(226): unsure at all n locations
ctctcatcacaccaaaaacgggatgacaacatcaagacccctggagctgctacatatggacctcttcggacccgtcgcctatctaagcatangaggaagtaagtatggtttagttattgttgatgacttttcccgcttcacttgggtgttctttttgcaggataagtctgaaacccaagggaccctcaagcgctctctcaagagagctcanaatgagtttgagctc

SEQ ID NO: 3665 - DNA, 330 bp, Zea mays
  unsure (1)..(330): unsure at all n locations
agctntntaattacaatatcatanaacgaatagctagcaatcactctggaggtttggtcgcgggcgagacgacngggcacggngggttgaggtangccacgtgcactttggcggcgggctggcgaatgcgcgacaggcggcgcggcgggcatgcgaaggcaccgcggcaggcaatgtctcgggtatggagggcgcggccggccaatggtgatgtatcgggcatggagggcacgactgcggtgtggatcatagggcaccacatagtgagagagtgagagagtgaggaanaaaaaaaactgaccacgcgctatgtacgagtgatctggcact

SEQ ID NO: 3666 - DNA, 462 bp, Zea mays
agcttgtgaaggttcttcatccctacatgtgctaaacggcgatgccacagccagcccatgctagtcttagctattaagcatgcatctagaccggcctcttcttttgcaaaatcaactaaataaagtttgtcgtctaatacacccttaaaagctagtgaaccatcacttcttctaaagacagacacatctacatttgtaaatagacagttataccccatgttgcatagttgactaacagatagcaaattatatccaagagactctactaaaaacacattagagatagagtgctcattagaaattgcaattttacctaacccttttaccttgccttgattcccatcaccgaatataattgaatcttgggaatccttattcttgacgtaggaggtgaacatcttcttcttccccgtcatatggtttgtgcatccgctgtcgataatccagcttgaacccccggat

SEQ ID NO: 3667 - DNA, 359 bp, Zea mays
  unsure (1)..(359): unsure at all n locations
ctaattggttgggggcaaaaaagtcggtaagctagaggacttggattgcacaatcctatctaagtgtctagaggcttgtanggttgtttttttccttttttttgtttgggaagttgtttcacgtttatgtcttactttgcttgttactccttgttctttgagataaaagatagcacgaaacagggaaggggcagcagttccaggtctggatctctctaaagcttgtcggcttgtgtgtgtgtgtttgctgtcacagaaatgctctggttggccatcctgagtggaaagaaaaagatgggacgctgcgggagcattctcaactacacaatanacacacctattccttaatcatctcattt

SEQ ID NO: 3668 - DNA, 442 bp, Zea mays
  unsure (1)..(442): unsure at all n locations
agcttataacaggagaatatattcaagagctcgaccatatgtcataatagaaggggagttatacaagcgtggggtctgttccccattgctcaagtgtttatccagatccgaaggtatagaattaatgaaagaaatacatgcaggcatgtgtggatctcacattggatctangcccttgcttgggaaagtttttcgccaaggattttattggccaaaggcagcttcggatgcagcgaatctggtccaaaagtgcgaaggttgtcagaaatgtgcaaaagatcaaaaacaaccttcgtctttaactcaattaacaagaaaaggaaacagggagaagctcaaaagtcgttcctaagggaatgcagagcctacagcgaacaataaacgctgattccgctganagtaaaggcgaagaagctctaagggatgcttacagacgaaaata

SEQ ID NO: 3669 - DNA, 391 bp, Zea mays
ttaactgccatgacgaaggatgtggccatgacaactgcattgcctacatatgaagatatggctgcttcataactcatcaaaaactgcttcaggtcaaaatgcccatcatacatctggagctgaggtggcttgtatgatgggggccaggagatagcttgcagttctgctgccaaaggagaagcatcatcaaaagtaaagatatcatgattaaaatcatcataccatccatcatcgttgaacaagctctcttgatgaagttccctgtgctggggccttcggtcttgctcgtcttgagcaaggtgacgtacttcttcagtaacttcgtcaatctggctttgaacgtcagctagtcgaagccattctttctctccccctctttctcttctctttg

SEQ ID NO: 3670 - DNA, 399 bp, Zea mays
  unsure (1)..(399): unsure at all n locations
agcttgttctggngcttggaccatgttgtggtgaacttttntttttttttttttgccatagcataaactgatggatgtaatgaaatgtggggcttgtatttttagagtatcaaacttttataaagaatgcatcaggcactccacgatagcaaaagcagggggaatcagcttgtttcatattggtgggatggtttctgctacaaccgagttgggtagtggtgggtctttgcaacaaaatgttttatgtggtggtattccaaacgaatgagaaacatgggattgtctttccaattttccatgtttctgaactcatgcggcaatgctctggttatggctattcctgcagtgcctacccaaagaactacaaacaataaaggaagataaatgagtacaatggta

SEQ ID NO: 3671 - DNA, 429 bp, Zea mays
  unsure (1)..(429): unsure at all n locations
agcttttgtgccaattattcataangcttaattgaggggttctactcgtgatattactaaagttgaatgcgccaaaggcgcttgctactgtcttcgttattgaaaaagcttaaaccccacatttcatatatttcctatgcccttacaaacaaaacattaattattcctagggttggggtggctccactatggggttattttatgagggctcttctagctttacttgggttcttaacataaaacgcatcctatttttttgttctatacccacggcttataaatctttctagtgactacactgaatgagtagaatatcaaaatagacgtgctcctggatctatattaaatgacctttctatttgcttagctttaagccactgcggataaatgaccacactctaccttatgggcgtgtacacgggttatttt

SEQ ID NO: 3672 - DNA, 453 bp, Zea mays
  unsure (1)..(453): unsure at all n locations
agcttatgaaggttcttcatcccaacatgtgctagatggtgatgccaaagccagcccatattcgtcttagctattaagcatgcatctagatcggcattctctttcgaaaaatcaactaagtagagcttgtcgtctaatacacccttaaaagctaatgaaccatcactccttctaaagacagatacatctacatttgtgaataaacaattataacccatgttacataattgactcacagataacaaattatacccgagcgattcaactaanaacacattagagatagaatgctcggatgtgatggctatctttcccaatccttttaccttgccttggttctcatctccaaagatgatcgaatcctggggaatccttgttntgacgtaggagggtgaacatttcttctccctcgtcatgtggttcgtgcatccgctgtcgataatctagcttgag

SEQ ID NO: 3673 - DNA, 396 bp, Zea mays
gagccttcggcgttgtctgctcttttatatgaacaagggacttattacaagagcatattgccttcagggtgtggccgcttgccgagaaatgggaaatgccacaagaaaccgttaaagaggccgacgaaagtggacttgtcaggtttaagtacactcttaaatttgaagataaatttattgagccagacgatgagtggttgaaaagcattgacaatttaagtgatgagctgcttgtgacatactcgaaggccgaagatactgcaatgtcagcaaccttcggaggccgaaaaaagaaaaggctgaatcgggtatatgatgccatcgggtttgtctaccctgactattgctaccccattcgaaggcagaagagaaaatatacaacctcttgcaaaagaa

SEQ ID NO: 3674 - DNA, 437 bp, Zea mays
  unsure (1)..(437): unsure at all n locations
agctntccagaaagttctagtntaccattttaggatgaatatctcgtgagttatgagcaaaacaaatagctgctatcttgctgtccaaaatcagcaagtattaaaatggttgttcggaattgactttgtgtaagtcactacgtttggttagtacttgtggttttaagtttgacgtacttattatgctagaagtgttttagcgaatatatagaataagtttggtatttctgtcagttagcaaaacatattcccctagagatacttgtactgattntattatttcaatattgtcttgccttactagtaatatcttaccctcttcggcatagaggtaatatcttggattggttatgcttattctcatgcatatgcattatgcatatcatataagtatgataattgatcacgtaatgtggaggacatacgatggattaatc

SEQ ID NO: 3675 - DNA, 415 bp, Zea mays
  unsure (1)..(415): unsure at all n locations
agcttctcctgtacaagtgccgcactcactgtagagtgcgaagctgccacatacaacagcagaggagcccctggcgtgggtggagttagcgtcgttagatctatcaggtactgcttcagctcttcaaaggctttttgctgagctgatccccattgaaagacttcggccgactttagcacttcaaaaaatggtaaatttctctctactgatctagatatgaatcggttcanagatgccagtattcctgtcagccgttgagaattgcttccaaagcattgagtgtcccccgaccaatgattgcgttgtacgggtactccatgtcgactatgttaaacacaacttggctagttcttgtattgttgacaaattcgaaagtcaccgacattctgaacttgccgagcgctacaatctgtct

SEQ ID NO: 3676 - DNA, 467 bp, Zea mays
  unsure (1)..(467): unsure at all n locations
agcttgtgaaggttcttcatccncacatgtgctaagcggcgatgccacagccagcccatgctagtcttagctattaagcatgcatctagaccggcttcttcttttgcaaaatcaactaaataaagtttgccgtctaatacacccttaaaagctagtgaaccatcacttcttctaaagacagacacatctacatttgtaaatagacagttataccccatgttgcataattgactaacagatagcaaattataaccaagagactctactaaaaacacattagagatagagtgctcattagaaattgcaattttacctaacccttttaccttgccttgattcccatcaccgaatacaattgaatcttgggaatccttattcttgacgtaggaggtgaacatcttcttctcccncgtcatatggtttgtgcatncgctgtcgataatccagcttgaacccccggatgcata

SEQ ID NO: 3677 - DNA, 453 bp, Zea mays
  unsure (1)..(453): unsure at all n locations
tgatgtttagaatgacatcagcttctcccaaatctttcattttcgaaatttcntcgatagaagatntttaacttcctcaatcacattgagatttgattcaaagatcaagatgtcgtcaacataaaggcacagcataatagactcacccccaccataccgataatacacacacgtgtcaaattcatttacagcaaaaccagcagttgtaagagtattatcaaacttttcatgccattgcttaggtgcttgttttaggtcatacaatgattttatcaacctgcacaccttgttctcttgaccatccgcaatgaacccttctggctgatccatgtagatctcctcatccaactctccatttaggaaagttgtcttaacatccatctgatgaatgataagaccataagaggctgccacagctattaatgtgcgaatngtagtcaatcgagcccactg

SEQ ID NO: 3678 - DNA, 248 bp, Zea mays
  unsure (1)..(248): unsure at all n locations
agctntagtgttaagtgagagtgattcggtgngttcttcttatctccagcacttggagtggtatctgctgtctcattctttcttgagatcaatccttacttgtaacccatgcacgaaacaccaattgtgtggcgtgtccttgccgctgaatgtaaattcgctgttgatttgataagtgaatactcactccgtcccgaggaccatttcagagatggaatgggaggaaaaaaacccgaccttagtggcct

SEQ ID NO: 3679 - DNA, 353 bp, Zea mays
  unsure (1)..(353): unsure at all n locations
ccagatttacccaaggaatatcataattattgaagaatgtatgcaaaaacttgagcagcaaagctttgttgtgcgtctncagtctgaccactcccagccccccatttttttagtctgagtaaccatgctccaagcagccagagccggtttcttcgagttgacgtcgttgcctctccagagacaatgtttccgataagagtcaatcttcttgaccgtggcaaccggaattttcagggtgcacatcananaggtcgggagagccgagaacaccgagttaacaagctcaagcctaccggcatgggagaggagagccgaagtacatgataatctcttctcaatcctacaaatgagcg

SEQ ID NO: 3680 - DNA, 456 bp, Zea mays
  unsure (1)..(456): unsure at all n locations
agctngaggtgggttgtcggtcaggttgattatctggtcggcgaagtttgtaccatcgtccggagtaggacgcgaccccgaaccctacaaaagatgtggtccatatgttatcgtatatatttagcttgatctattacattctagttaactaaagctcaaattgaagtcgagctattacctgtcgatgcatccacatatacatattatgagattgcatcatttgcatatgttgtcgtatttcttacatcttctgtcgcagctgttgcatctcctcgtcctgtgcagatgatcgctaagggtttgtcccatctagagtagttgtgcacaacaattcacaacaggaatcgtggagatccccattggccaaaattatcctcgtcggttttttggttggccgatgggaattaagtaattcccgtcggccaaaaagcgagctgacgggggttaagttaactc

SEQ ID NO: 3681 - DNA, 191 bp, Zea mays
  unsure (1)..(191): unsure at all n locations
ggggngaggatnccgaagatcgaccatggcgaccaagccattcagtcttcagaaaatcaactattgggcaaagtcaccttgaaaacatgaggggaagatattttcgagatatgtccatcgtgagggcagatgacggagagaggactgtgccgactcccaaagataatgaagtcgtgatcttccgaagcttt

SEQ ID NO: 3682 - DNA, 449 bp, Zea mays
agctctatatggacgacgatgtcgtactccgctaaattggtctgaacctggagaaaggtacttctttaggcctgatatggtgaaagaggtcgaagaaaaggttcaaaaaattattcataatatgaagaaagctcagactcgacaaaagagttatgcagaccgacgacgacaacccttatgctttctgataggcgattatgtctacttgaaagtttcaccacagaagggtgtatcgcgttttggggttaaagggaagcttgcacccaggtacattggtccattcctggtgcttgagcaatgtggaccagtggcatatcgacttcagctccccgaaacattgtctgctgtgtataatgtgttccacgtgtcacaattgaagaagtggtcttcggttcccgatcgaaccattgaagtgattgatgttgtcctggaaccagaattaacatact

SEQ ID NO: 3683 - DNA, 366 bp, Zea mays
tcgtcatctgataggaagttgccctgaaggtaagaaattatttcagttctccaatcttcactgtacacaggagaaatagtaagaactgctctttcaagtaactctactgaaggtgcctttattgtttcgaagaatacatccgaaggtagcggcagcccctgtgctgcagacctggctaacaaatcagcatgttcattttgccctcgagggatattcttaacagaaaatccttcgaaggaagcttcgatccttcggactgtgtctaggtatttttcaagcttcgggtctttagccttgcaacttttgtcaatatgacccgaaacaatctgagaatcagttttaaggatcgccctcctgatccccatc

SEQ ID NO: 3684 - DNA, 449 bp, Zea mays
agcttcggcatggtccactccttcatagttggaaatactctgaaggccagaaattcctacactaaatctctagtgccaatgtgttctgcaataatcttgaattcagctagtgcggtccaagttggaccttctgctgacattttacatcgaggtctggttgctcctaagatcagttcaagtgggctctgtaccagcttatctatgtcttcgtcaactgtgacataaacccattctgacttccagcctgccggtcatttgcttcggtagctgatcacaggatattatgtggttttccgataggcaaaattataacaaccaaaattttcatgcaatccatcctttctagccttagtctggtaatgtagctcatgtactcgacagaagctgtagcaaacggctccaccgcctggcttcggagagcccagaataaacgcttagcctgacaatga

SEQ ID NO: 3685 - DNA, 416 bp, Zea mays
  unsure (1)..(416): unsure at all n locations
tgtgaaggttcttcatccncacatgtgctaagcggcgattccacagccatcccatgctagtcttagctattaagcatgcatctagaccggcctcttcttttgcaaaatcaactaaataaagtttgccgtctaatacacccttaaaagctagtgaaccatcacttcttctaaagacagacacatctacatttgtaaatagacagttataccccatgttgcataattgactaacagatagcaaattataaccaagagactctactaaaaacacattagatatagagtgctcattagaaattgcaattntacctagcccttttaccttgccttgattcccatcaccgaatataattgaatcttgggaatccttattcttgacgtaggaggtgaacatcttcttcttccncgtcatatgg

SEQ ID NO: 3686 - DNA, 426 bp, Zea mays
  unsure (1)..(426): unsure at all n locations
gacccggaccttaagtgactgggctgcaacttgtgtgncacctcatgtgatgatttgattcaagaagagcaaactagtctacatgctgaattgactgaaaaagttgaagtcctgactttagacaaccaaaaattgaagaattacttgactgatgcaactactagaggaaaagttgctattgagaacaatgatttcaacaacgagttggcagtggataatcaaaggcttaagaatgaggtcaagaaactaaaaagtgaaaatgaacatcttgcaacatgtgtgcaaaagttcaacaagggtcaatacctccaaaatgagctgcttatgaacactgctatgaacaataacaagagtggtattggatacaatgcttttgtgctaaagaaagctatcacttcatacaagccaaagcagactcacaagcct

SEQ ID NO: 3687 - DNA, 348 bp, Zea mays
  unsure (1)..(348): unsure at all n locations
aacccacaaagggccgggtcttttccaaccctaatccttcactagccgaccacaaaagtcaaggccatctcttctcaaatctgctcaaggaacgggtgatacanacttcttggggtcgtccacaaatttggagactcccaagcaacctctaaccgtcaaggaacacgaggttccaagagtaacaaatacgcacacggttaagtttgcaacgagctcaagaacaaaagaatgggagaatcgagatgaaattgacagcgagttcgatcgagttcacctcacaccaagggtccttcaaatgattgaaggagatgcgatcgcnggtgtgagatgtgaagtgaatgctcttgt

SEQ ID NO: 3688 - DNA, 359 bp, Zea mays
  unsure (1)..(359): unsure at all n locations
agctaggtcattntattgctaactgtcctgataatgaaagtgaccagganaaggggaacaaaagggagaagaagaagcactacaagatagccaagggcgaggcgcatctaggcaaggagtgggattcggattgctcctcctccgactccgacaatgagggactcgccgccaccgccttcaacaaatcggacctcttccccaacgagcgtcacacgtgtctcatggctaaggagaagaaagtaagtactcgaaactctacttatgcttcttctagtgataatgattccagtgacgatgatgaaatagactattctagtgtattaaaggtctagatagaattacaattggcacaattaatg

SEQ ID NO: 3689 - DNA, 422 bp, Zea mays
  unsure (1)..(422): unsure at all n locations
ctatagttcatagggggttttatatttttcttaaataggntacattaattggagtctggcaaaatttgtttgaccaaatttggatgaactaatcataagttatgaatttttaaagtttctgtccaatttaaaaacagatttaataaaggttttctggaaaaacaatttacaccggggtccctgagtttaaactaattccgccttcgcaagtctacccccacgccactattcctctgtgtctctgacatttcacaaaaccccctgaccttctctccctctcacccgcagtccttccccttatgcaaacagtaaccgcgggaaagaaaagggtggcgcggcttaccggtggcgagggaggtccggcgaanggtggngttggcttcgggagactctggcggtcacgtcgaggtacggcttgacgt

SEQ ID NO: 3690 - DNA, 447 bp, Zea mays
agctggtagactaacatcttatgcataatatagcaacaagagcacatagatgaactgattagcaagcttaagaccattgaggtagtgaaaataagatatatccatggcttaacaaagcatatatatgtcgagcaaataaaaaaataactgcaaagctggcattattcatgtagtatatggaagtgcaaaggacgacacacataatggaaagagattacattactgaagaattaagacatccgtgaaaggcatggtcctgtgcaactaaaaaaagacactcgcttgatatatagacctaatatgtagtacttcgttttgcaaatatctgcccattatcttgggagatgccatatcaaagagactacaatctaattaatttctagttctctatccatactctaataacatagtgacagagaacaatatattgcagcgtgccacattgat

SEQ ID NO: 3691 - DNA, 268 bp, Zea mays
  unsure (1)..(268): unsure at all n locations
gcatggagtttgggctccactactcaaatgtttatccagagccgaaggtatagagttaatgaaagaaatacatgcaggcctgtgtggatctcacatcggatccaggccgttacttggaaaaattctccgccaaggattttattggccgaaagcagcttcngatgcagcagaattggttcaaaagtgcgaaggttgtcagaaatgtgcaaaagatcaaaaacaaccttcgtccttaacacagctcatacaacccacttggccattgcaa

SEQ ID NO: 3692 - DNA, 293 bp, Zea mays
  unsure (1)..(293): unsure at all n locations
agactaaactntctctatgttatggattgttttgcatccgaccgttcccttcaccccttctaccaacttattgactcccatggaaaacaatggaccctcggtaccaaagtaccttcatgcctaaatatgctggacgaatatgcttccaagcatatactgccctccacctatgattgcgttatagcggaactccatgtcgactaagacacagacaaccagttcactccttggctgtggacctaaccgatagacactgacattgtgatattaccaagtgcgacaatctgcctttc

SEQ ID NO: 3693 - DNA, 452 bp, Zea mays
  unsure (1)..(452): unsure at all n locations
tactaaagcttattattactattagataccaacaaaaattacctttaagtattatacccaccctaattaagagttgtagtgcacagtggcccatntacaccactcttgttatttttgtctagagcctaacctatttcaattgaacctcacaagtctacgataagctatattgaccaaaggcaagccactgttattcttacaaaatgtttggaagaagttaaaccaatgttgtagttcaaacctacactagaaaccataaatagaaaatatagaaaggaaaatgaataatggaaattagtgtcatcctaaaaccctttataaatcgtccactaanatatgtaaaggaaatacccatccactatgcttatccttacaaaacttaaacctagagtgataatcataaaccactaaaagccacgtatgaacaagaaaccctaagttactcaataaac

SEQ ID NO: 3694 - DNA, 392 bp, Zea mays
  unsure (1)..(392): unsure at all n locations
agcttgtggatgctcattaatcgtctattgtgcatgaagttgtggtggtcactaaggatgttggagtcacttgtgacttacttgatagtcttacaagtgaaccactacctactaactctatttgtgataaatgcaaaatttctctcaatgataatattgctcttgatgaatcaaaaaacattgttgagaatgaagtgttagtagatagagtaaatactctaactcatgacctanaaaaggcatatggtggaaaggctaaattggatttcatattaggaagtcaacggtgctcacttaaccgtgaaggtcttggatatgttcctaagaaaggaaagaatgcnntttataagcaaaagacattgtttgtgaaagaatgtgacanagtgtgtcac

SEQ ID NO: 3695 - DNA, 453 bp, Zea mays
  unsure (1)..(453): unsure at all n locations
gcttgtgggttctcaaagtcatgcaaattattctaccaaacttacacatcattcgttaaaggaatgccacaattttaatttttcgcctatcacatatacgacgtcgaacaaaaatattatccattgatacttccaattcattatactcatttgcaatattatcatcaaaagaagaaaaggatggatatatcgaacctaaggtagactaatcagcatcaatggtgtggctctcaaaggatttagtcaatgcttgcatcatctccttcaattctagataagcgacgcactcaccatgagtagcttanggcccttattcttgtttgtttgggtctttggtcctgtcattggtagtacaaaacaagagacaaaagccaacaaacaattagtgtgaaccctacaactactctcacgggtggtggtggaacaaaattatgaaagtgtcttaccttgttc

SEQ ID NO: 3696 - DNA, 309 bp, Zea mays
  unsure (1)..(309): unsure at all n locations
tagcttaatgcccctaagaaactgtctaattttgttaagggcaaagctcccatggttcaggatagggaaggctacattttatatcctgctaactatcatgagcacaaaattaagagaattcatgctaggaaacctcacaatggttcttatcatgcatttatgtacaaaaatgaggcttctagttctaggcataccactcatattaaaatgcctaaacagaaaattcctgctgcatcaaatgaacttaatgtttcttttaagacttttgatgcttcatacgttntaactaacaaatcaagcaaagtattt

SEQ ID NO: 3697 - DNA, 414 bp, Zea mays
  unsure (1)..(414): unsure at all n locations
tgtgaaggttcttcatccncacatgtgctaagcggcgatgccacagccagcccatgctagtcttagctattaagcatgcatctagaccggcctcttcttttgcaaaatcaactaaataaagtttgccgtctaatacacccttaaaagctagtgaaccatcacttcttctaaagacagacacatctacatttgtaaatagacagttataccccatatgacataattgactaacagatagcaaattatatccaagactctctactaaaaatacattagagatagaatgctcattagaaatcgcaattttacctaacccttttaccttgccttgattcccatcaccgaatataattgaatcttgggaatccttattcttgacgtaggaggtgaacatcttcttcntccccgtcatat

SEQ ID NO: 3698 - DNA, 237 bp, Zea mays
  unsure (1)..(237): unsure at all n locations
tcagcttctaaagggagaacacatattgggactaacaaatgttcacctctgaganaagacagcgatatntgtagtcggcactgtctatgccagggagagcacagttgtgtgtttcattattcccaccaagaacattatgacgactgacagaccacctcgagctcctacacatggatctattcggcccgattgcttacataagcatcggcgggagtaaggactgcctagatattacgg

SEQ ID NO: 3699 - DNA, 427 bp, Zea mays
  unsure (1)..(427): unsure at all n locations
acgctgattgtttgctcttatggagtttctgaacaactttntgaacgtataggaaattatcgtgaattgaacgtttcttaatgaaagcgttttgggttgtggagacgatctcgttcattcttggcgcaagtctatttgctaaaatcttggttaagattttcataaaactgttgatgagactgatcggtctaaacatgtcaatcctgtcagccccttccctcttttgcaaaagcgtgatatttgcctcattaacaagatgcaggcttttgcatctatgattatagaaatcatgaatagcattggatagatcatccttaatcagctcanagcaacacttatagaataaccctatgaacccatctggaccaggcgccttttcagagtgcattcccataaccacattnttaatctcatcaacgttgattcg

SEQ ID NO: 3700 - DNA, 437 bp, Zea mays
  unsure (1)..(437): unsure at all n locations
gatcacttcatcaaaatgaatgttncaactccgagatgcttgcttcaacccataaatggatttctgaagtttgcatatctttctagcattgatcggatcgacaaaaccgtctggctgtctcatatacacgttctcatctacgtttccattaaggaaagccgttttgaatccatctgccaaatgtcataatcgaaatatgcggcaatagctagaatgatccgaatagatttaagcatcgctactggcgagaatgtctcgtcatagttaactgcttgaacttgtcgaaaaccctctgcaacaagtcgagtcttatacatgtgaacatttccatccatgtcgttcttcttttattcatccatttgaagtttatacgtcttacacctctacgtggtgatggangttcgatatgtgatatattccccccccccccccccccc

SEQ ID NO: 3701 - DNA, 240 bp, Zea mays
  unsure (1)..(240): unsure at all n locations
agctntaaggttaatcttcacctaaaagaaagattangaatgctcaacgcaaaggtatggaactaattgcttcaatcggtcgctgatccataactagntccttctcagcggcatactttcaattagtcatactctattttctgaaaacaaatgtcactatgaagcgtcaattccttttcgattacatttgtacaacggcgcatattgctactccactcatacctgtccatcgactcaaaa

SEQ ID NO: 3702 - DNA, 446 bp, Zea mays
  unsure (1)..(446): unsure at all n locations
tggtcattntattgctaactgtcctgataatgatagtgaccattacaatgttatcaacacggaaaagaagaagcattacaagaaggcaaatggcgacgcgcatctatgcaaggagtgggactctgatacctactcgtccaactctgacctggacgactctctcccacctgcttcaaccaatcaatccatctctcaacaacgattcacattcctatgttaacaagataacgcatccccttctctcaactatcttttcctattacacaacctcgcattacgtcatgtcaaataacgccaactacttggtagatcatctctactacccactcacccactaataaacccccttaacacccttctcctaacgcccttttaaagtntcgtctcaccacattttaattatttcggctatttatttattataacacccccccccccccccaccc

SEQ ID NO: 3703 - DNA, 444 bp, Zea mays
  unsure (1)..(444): unsure at all n locations
agcttatatgtgttagtttgagctttggtgatgtgttagtttgagctttggtgatgtgttagttttgagctntgctagtgtgttattcatatgcttcttgcagtattatatgtgttgcatcatatggactaatgcttccgttgctatgaattaattggcatctattgtgttcattctgaaatagacagtcatgttgataatgatgcatgtggtttatggtgcttaagattgctttaaattagtatctgagtttaaattggtatcttaatggtgaatagtggtaggttgatattcctgtgagatatccactaaatngaatggtgtttaactctgattacgtgcattgtgtgttatagcatcatgggttgatctttgacacaatgcatttcanaaagtgctaaggtgtagaaatgcttcgaatgcctaagtatgtgcaatgacata

SEQ ID NO: 3704 - DNA, 436 bp, Zea mays
ggcacctagtcacaccagcataccaaatcaaataccttctgaagtggtattttgtgtgcgcctattcggtgacatagttaagatccccgtgctgttcccattcatcaatgtaatcacggtggtgggtctcgaagtccgtgaccttcttctgtctctgtctgtcgaacctgctaaagttagaaacatataatagtaactcattgaatatttgaaataatagttagaataacaagtggatgtagtcactcacttatgaagttctattgaagtccagaagggctccaccggaaactcctatcgcaatccgaactgtcgagcaactctgtggggcaagtggtactcaacagcataaaaacaaatgaggggacatctcattatgtgatgtcctcgtctattgagcacatgctgctcaactgtatgcttgcgaaatatggat

SEQ ID NO: 3705 - DNA, 427 bp, Zea mays
  unsure (1)..(427): unsure at all n locations
gctttcgattatattatacgacatgcttttttgaaaaagttgattgaaaaagaaaagcaagaggttcagctttatgcccaaaaactgaaatatccaaagggggcgttgatattcaacggcagcggagaagaagacttcttgtattgtctccctgacagcaagcagatttctgtctgtcgggagatgagcaagagcttcgaattcccaacattagaagacgggctctcggtgttgtcaaaaaatgagctggccgacagcttggcgtataatagcttaaaggtgcaaaaatgaggtctttgtattatttctcgaaaccaaaatntttcatttgcttaaacttattgacacacacacantttttngcagggccttatacttaacaatgccctcanggctcaaaaagatgttgaagaccaaaggtgtgtta

SEQ ID NO: 3706 - DNA, 359 bp, Zea mays
  unsure (1)..(359): unsure at all n locations
ccatcttccactataaagcatgctacgagcaaattntaatttctcattttctagtttatgctcggcaattttagcatctagtttagctatatgatcattttgttgtttaatcatagcaaggtgatcataaatagcatcaacattaatatctctacatctagtgcaaatagaaacatgatcaaccatagatgtagagggtttgcaatcatttaattcaacaattctagcgtgtaaaatagcattctcatctctaagattggtaatagcatcattgcaaacatttaaatccttagccttagcaattaaattttcattctcattcttaaggctagcaagagaatcattcaacatgtcaatct

SEQ ID NO: 3707 - DNA, 412 bp, Zea mays
  unsure (1)..(412): unsure at all n locations
agcttatcaaaaccacctttgctaagcctgtcacccttgtgagagatggtgtgattgatgaacctatgagagatcctcctcagaaacaagtgtggcttccaaaacctaaccatcttaggaacacacttgacatctttcccgacatctctagcgatccccttcctagagcccctcaaccatccgaaaagaaaatcctcttccacaaacaaaatccacccaagagagaggttaggtaccattgtgaatattgtgatagggatggacatctagcttctttntgctttaggaggaagagagatgagcggcagggtttctgagtcgagcaggaaggacatgaaccgcccctctcatggtgtcggagaggaaatctccggccgggtggtggagtgcacccgccctaaatcctaagatg

SEQ ID NO: 3708 - DNA, 410 bp, Zea mays
cgggtctctacagtggtggccgattaatctgattataagaaggatttggggcggcaccggaattccacgctggagctcggtgtccgctgctgctcgtggttggcctcggctacttcttgattcccggtaagaaaaccctagatcagttcgaggtcgcctctgaatcgtttaggattaaacgtactggagtttggtgcctcgttgggccgctttgcgtgcgccgatgatggcgccgccgcatcacggcgggtctcgccgccaagcttggtcggagggaagaagaaccctgtgaaccatcggatccgagatggagggtggagattagatgggcgataacggttcgatcatggcgtgcgtggatcgctggatcgtgagccgacggctatgatcggatccttagtgtttaaaat

SEQ ID NO: 3709 - DNA, 391 bp, Zea mays
agctcgaagccgaagttgagaaaagtttgaatctgcaaaaatccttataagagcttcaggacagatgcttgaactttggcacccggtgcgtgtaacggctgaaacaggtcttcaactcagtgggagctagctctaacaaatttgaaccttcggttgaagacctgccaagcaccttcgaacatattgagagcgaagttgaggcgcttgacgaagttatagctaggcatggtgagttctgtgccctgctagcttctcgtggcacaactgtagcttttatgaaggctgattgtacgcacggggagattgtaacatgtcgaacttcagcctatcaccagcagacttgacagatatccccagcctagcccgaagcattgtaaatagattattacac

SEQ ID NO: 3710 - DNA, 463 bp, Zea mays
  unsure (1)..(463): unsure at all n locations
ntagaaaaccaacactcttcgacagagtgctgatnatctttcctccaattcgatctcgaatacaacctaaggcttcttcgttaatttcgccgaagagcatggctcctggctggtagccataggatatagcatattcctgcagttcctccttctcagccttggataattcttgaccaattatattttgaaagttgaagcctttttcttccgaaatatcttcggcaatttccttccctttctcaggcactgtggccaggacttcttctgcagccgcagcagtctcctccgcagccaaatccaagagcactttatcaatagcggataatgtactcaccagattggtagcttcggcagtcgtagcttcggcagctggtgtcattntcgatgctgaggccgacggtggcgtttcctcaatggctttgcataacggtaacaattcttttcgcctttttttttttttttt

SEQ ID NO: 3711 - DNA, 433 bp, Zea mays
agcttgttgcgaggagttctaccatccaacttctaactctgtcctgaacacctagtgagcgaacgaggcaacactcgactcgggggaaggtggtctccctgagccagcagtgtccacactagaggcaggttcctctcctccctcgatgtcgacgtcctcgttggcctccatgtcctgaatctcctgatgatgcatatccaggtgctcattagcctcggcaagctgctgctgggtgttaatgagctgatcctctagaacctcgatggtgttctccctggtgcccactagttcctccaactcttggatatcaatggatagctgctccacctgcaagtccttctccaccatttcagtggacaaattaaccacgagctcctctctgttgtccaagtaatctttgtgcttcagtattgccatagatggacatccctta

SEQ ID NO: 3712 - DNA, 336 bp, Zea mays
  unsure (1)..(336): unsure at all n locations
ctcagctggccaaataattaaataaaccccagctagcttctatgtggggactcaatagggaattctgagtttcagaattctgaattccagaccttgagccaaagatcaagcgtgttcaccttgatccctaactcaaatcttaatggccccattaacaaaaatgtgcctaactaacccctccatcgcatgccagaagatgacattgggacgcgagccctagacatgacaaaaccctggattngcctcgggtttgagcagagagacagatcggatttccgggctccaaatctctgcaaccagtaggcaaaattctatgacccccacacaagatcggta

SEQ ID NO: 3713 - DNA, 436 bp, Zea mays
  unsure (1)..(436): unsure at all n locations
agcttntgaattaaattttgtactaaaattcgattntcggattaaattcagaattacatcctgctatcggactgcggctactaatatcaccaagatcagggactaaagcacaaagcttacgcagactcagaactcctccgctaggactgcgggttgattcactaatcttcggagggctctttagaaaaatattcgtcacgaaggggtacggttaagccctggccgcccgatttactatgcacggcccagatttgacctgatctacaccgagctagtattcaatattgaacgtgcgatcaaagatcgacggttcaccacgcgatcaatcctaggcccttggcttccgatctggtggccccattntaatgagccgaaccggtacatctcccttctaatctcatccgtccgagttggatcggacgacatccatgccttc

SEQ ID NO: 3714 - DNA, 387 bp, Zea mays
tatttgatgacttgggttgacaagaattcttatatgctaccaaaatggaaagctatgctcctcaaccttgctggtaggacagcccttgtgcgctttggtctctctgccatcccaggttatcttttccttgccatgaatgtccctaagtgggtgattcacaaaattgataaaatcagaaaaggatttgtgtggagagggaaaaaagaggtgaatggaggtagctgccttgtggcatgggattcagtcaccagacctttgaagtatggtgggcttgggatccctaatttacaacacatgtgttgggcccttcaaagccaatggctttggcttcaaaaaacagatcgggataagccttggcttggcttgttcatccccattcagcaacat

SEQ ID NO: 3715 - DNA, 388 bp, Zea mays
agcttgaagccatggtaagtagcataggcttataatatttgaattgtctcaagcctagctacgggtgcataggtttcaccgaaatccaaaccttcgacttgggagtatcccttggccacaagtcgagctttgttccttgtcaccacaccatgctcgtcttgcttgttgcggaagacccatttggttccaacaacattttggttaggacgtggaactaaatgccatacctcattcctagtgaaattgttgagctcctcttgcatcgccaccacccaattcgaatcttgaagtgcttcctctaccctgtgtggctcaatagaggaaacaaaagagtaatgctcacaaaaatgtgcaacacgagatctagtagttacccccttatgaatgt

SEQ ID NO: 3716 - DNA, 432 bp, Zea mays
  unsure (1)..(432): unsure at all n locations
ttagctngtgagcaatacaagttcagaagggagaaagctgcttcggccgatcagccgaagcccatgctcttatgcgaggacatagcagagcagaaggtgctattgggatcccaactgtccgaagaacaggagaaaaccttgataaggtttctgttcaacaacaaagatgtttttgcatggtcagctaatggcctttgcggagtcaacagggatgttattgaacactccctcaatgttgatccattctttagacccagaaagcagatgcttcggaagatgtctgatgacaacgccgaacgtgctcggaatgaagtgaaaagactcctcagtgccggagttatcagagaggttaaataccccaaatggctggctaacactgctatggtaaaaaagcaacgggtaatggagaatgtgtattgattctactgatct

SEQ ID NO: 3717 - DNA, 386 bp, Zea mays
tagcaagtgcgagttctagatcagtgaagtcctgttcttggtgtcacattataaaccgagaaagattggatgtagatctaaagaaggtaataactatcttggactggaaagcaccaaaagatgtccgaggaatcaagagcttcattggatggccggttattatcggcgtttcattgaagggttctccaagatttccagaccaatgaaagccttgttggcaaagaacgttgagttcaagtggaccccagcatgtcagaagttctttgagacattgaaggagaagttgacaacggcaccagtactgattttgcagatgtcacaagccattctcagtgtattgtgatgcttcgtatacccgactgggatgtgtattgatgcacgaaagg

SEQ ID NO: 3718 - DNA, 390 bp, Zea mays
  unsure (1)..(390): unsure at all n locations
ttagcttcngcttcatctatgttatagattgcttttgaatctgtccagtttccttcggcctttctggcagcttcctaacttccatgaatagcaataggcccttgatctgaaggtatattcatgcaaagatacgctggatgaagaattgcttcaaaagcattgagagtaccacgaccaatgatcgcgttgtaagggtactccatgtcaacaatatcaaacacaacttgtttagttcttgtattgttgataaatccgaaggttattggcatcgtgatcttgccaagtgctacaatctgccttcctccgaagccacaaaggggatgtgtggcgtcatggatcttatcttcgggctcttgcatctgtctgaaggccttagcaaatatgatatct

SEQ ID NO: 3719 - DNA, 470 bp, Zea mays
  unsure (1)..(470): unsure at all n locations
tgagagtgacttgctgaagtagcagaagccgtctactgttgattgcctacgtattcggagatatatggagagtagcacaaagcagtatgcaggacctacttcggttgattctgccgtgcctcagctttagcaatttccttttgcttttggatcgtgacctagcacgtccttgtttttgtcccttgtcctcgccatagaaaaggcagaacaatttcctaggctgattaccataccttcctccactgaagcttctccctcctctgcctctcggagctggtggtttgtaagaagtttgctacatgcccgaagactatatgagctgtgatgactgctctgagcattgttggccctttcatcgttggcattgggattgtggattgtnctgacatgcctagggtgaagtcttnctccgaagcccctagtcatttcagaataccctataatggccttttttccccctttcccttcgt

SEQ ID NO: 3720 - DNA, 451 bp, Zea mays
agcttctccaccatgtcgctgctagccattttgttgcagcttctctccatcaatgatcaaacgacatgaacgctccttaatgacacactttgtttgaaacaacgtatgtcgctgattctgctctgccttctccatttgtgcactaagcacacgctgtacaatgaggctctcataatgctctgcatcatctgcaccaatctgttcttcgggtggttccttagtgcctacatcatcagccgcaagcaaagcaagtgtagcttcatccaaatcactagcagaggaatacccaccatcgtcttttaccaccaaaacacactgattaggacaataacgctgcacgtgttcatagcccttgcatcgataacacagaacatctctttgtctacctgtggaagctactgaagaagcactacctgcgggtttctgggcagattggttgctgaatttgtgg

SEQ ID NO: 3721 - DNA, 400 bp, Zea mays
  unsure (1)..(400): unsure at all n locations
tatcaagtctactttcatatggatccggaattatagtcatatctgttctgatgccgccgtaatcattggtttcttaccgagacatttcctgccttttctgcccatggtgctgcgtcaccctatnttggcccaatgggtcgtgtatcaagttaggtccattagggacgcatcctanggttgcagcacgaccccaatacccttgtggtcgtcctcccatgtttataaaccccctagccgccaccaagaacagcgggttttgtttagatcaagtttagctctcgctacttgcttgcaagcgcgcgtgctagttcagccgcccgtcttcttgtcttcggaaccccaccatattgtagtttgatctttaaacctacatttagatctggaattcagtacttgttct

SEQ ID NO: 3722 - DNA, 385 bp, Zea mays
  unsure (1)..(385): unsure at all n locations
agcttctaaagggagaacacatganacgtttaactaatgtgtctttctaaaaagaaagaccttgtgcagtgtgtcaagcaggcaaacaggtgggaagttctcatcacaccaaaaatgtgatgaccacatcaagacctttggagatgcttcacatggacctcttcggacccgtcgcctatctaagtataggaggaagtaagtatggtcttgttatagttgatgactcttcccgcttcacttgggtattctttttgcaggataaatctgaaacccaagggaccctcaagcgctttctaaggagagctcacaacgagtttgagctcaaggtgaaaaagataacgagcgacaatgggtccgagttcaagaacctttaagtggaggagta

SEQ ID NO: 3723 - DNA, 452 bp, Zea mays
  unsure (1)..(452): unsure at all n locations
actatagctatctataaagtcctagtttactatttgtgggtaaatatcttatgagttatgactgaaacaatgactgctgtattgttgtccaaaaaaaaatctgcatgtgcgcatttgattgtttaattcaccctgtttgctaaaaatgtttggttaacacttaagtaatgtagacttgccataactaagcttaatactgcacgtgtgtcatgttttgtatgttttttgctctagttgattgcgatatagaagttccatagacattgacgcttaggtattttgggaaacttgtgttgttgggatgctttcgtatgatcactagaaaaactaatgaaaagccgtatccaaacaaataanatgcgcatacttgtgatgtagtagttgcgttgcgtaaataaataaaatggttgtgtccttttaaatggtgtaatgttgatncgccgataacgtgt

SEQ ID NO: 3724 - DNA, 300 bp, Zea mays
cttctatcacgacgtgattggccctgttctgatagaagtttaccatgtctgggccacacttcggactgccatgacgaaggactttgccatgacagcagcattgccttcgtatgagaatattggtgcctcatagctcatcaacaattgcctttggtccaagtgcccatcatacatgggcaactaaggtggcctgtatgattgtggccatggaatagcctgcaattctgctgccagcggagaagcatcatctacagtaaagttaccatgatgagagtcatcataccactcatcttcggtgat

SEQ ID NO: 3725 - DNA, 346 bp, Zea mays
  unsure (1)..(346): unsure at all n locations
catctctggtggcgtccgtttgccgcagngcagccatgatagagctggaatagctgactggattggatgcctccaaaacccggtcccttgccaaaagaagaagaggaggaagaagaagaactggcagcactgaatttcatcatatgtaagatctccaggctggttacagtggatggacagaatgttttggacacatacaagggcaggaaaatgatggcttgaagtttttggtttcactttcactcagcctcgttcgagtttcacccgccacatgtatagtgcctgtacatcacttgagaccatggcagacaactgcagccaggttaactcactattctgagtagtg

SEQ ID NO: 3726 - DNA, 459 bp, Zea mays
  unsure (1)..(459): unsure at all n locations
gctgtggatttgtcgcaggtcgggacttgttctatggatttctcggccgccgaccgngagctccatgagacccggaggccttcccaccttgcatgacgttgccagatcctcgcccacgtttggatctggaacgtgggggagtatcttcatgaatctcttgttcgtcagaggagtcgaattcaacaacagatggattccttcgacgcaccatccttaacaagaaaagatagaacctatgatgagcaaggatcttaacaaacacgtttgagtagagacgcgtatgatattgagcatgcacttcaaccgttcatgcgagcggttcaactacaacgaacaatatcaaaccgctaaactcaaacaatgttcgagacaaacgaagatagtctaagtgttgcaagcacctaaactaagatgtatcctagacacgatacactagataatcaagagcgggtgagatcg

SEQ ID NO: 3727 - DNA, 277 bp, Zea mays
agcttacccttgaagcatggaataagctatatattacaccttttcagccgctcagtcgaaaggaccgaccgtgagaatcatagcgctgcccctgagtcaaagtatacaggagaagaggacagaagaagtcattaccatacacagaggcaaagattcttagaaccagagaccacaaacatgagggtcatcgaccccaccactcactagtgcccccgcacgcgtgcccgcctccatgcgcactatcaccgtcgtccatgccccctttgcagcgcactac

SEQ ID NO: 3728 - DNA, 376 bp, Zea mays
  unsure (1)..(376): unsure at all n locations
gggagaacacgtgatatgtttgtgaaagggatttttgcccttgggccaatactatgcacaggggggaangggtgccaacacaagtgcttaagtgtgaatttatgctcatggataaacagagtgcaaattaagagaaaaggtatgtttctaagtcctagtacattggttctgtgtactaatatactcgtctaagtgctggaaacagaaagtagaataaaagagaagaggtgcataaagttcggtctggagcaccggactgtccggtggtgcaccggacagtgtccggtgcgccaggctgactcggcgcgaactgcccgctctcatgaatttgccgacggcgtacggctaaaattcaccggactattccgtgtgcacc

SEQ ID NO: 3729 - DNA, 266 bp, Zea mays
  unsure (1)..(266): unsure at all n locations
ttaatcgatagacggatacactacaccgagactccgtttcatgcaagcacccacccggtctcgtcttattatttaaaacccacagntgggtacccgacagagggtcctcctttcagatggtgaacccatcacggccgtgatggatccaccatcatcaatcttttctttgtaaaaattcctatccagtatgaagcatcacctgtttgtttaaaacaaaacattttgttttctaaagcaaggctaagcatcataaaaatccttctcat

SEQ ID NO: 3730 - DNA, 419 bp, Zea mays
  unsure (1)..(419): unsure at all n locations
gacattgcttcctggtggaaccaatgtcattcttttgtttggcgncncccatggtagagcgtgcttctatcaaatttaaacttttcatttctaatttcatgctcattaattttagcagttaatgttgctatgtgatcattttgttgtttaattaaagcaaggtgatcatttatagcatctacattaatatctctacatctagtgcaaatagaaacatgatcaacagtagatgtagaaggtttgcaaatatataattcttctatcttagcatgtaatatagcattctcatctttaagacaggaaatagaatcattgcanacatntaaatctttaaccttataaattaatctagcatcttcatctctaaggctagaaaattgtatcattcaatatatcaatcttagcatttagactagcat

SEQ ID NO: 3731 - DNA, 360 bp, Zea mays
  unsure (1)..(360): unsure at all n locations
agcttaatgcccctatattattgtccaattttgttaanggcaaggctcccatggttcgggataatgaaggctacattatatatcctgctaattatcttgagcacaaaattaggagaattcatgctagaaaacctcacactgcttctcatcatgcatttatgtataaaaatgaggcttctagctctaggcaatcaactcatgttaaattgcctaaaaggaaaactcctactgcatcaaatgagcataacatctcatttaaaacttttgatgcatcctatgtgcttacaaacaaatcangcaaagtagttgccaaatatgttgggggcaaacacaagagtataaagacttgtgtttgggtac

SEQ ID NO: 3732 - DNA, 470 bp, Zea mays
  unsure (1)..(470): unsure at all n locations
ttaccaaatggacgtgaagagtgccttcctcatggactantcaggaagaggnctatgttgagcaacctcccgactntgaagatagtgagtaccctaaccatgtttataaactctctaaggcgctttatgggctcaagcaagccccaagagcatggtatgaatgccttagagatttccttatcactaatggcttcaaagttggaaaggccgatcctacactcttcactaaaactcttgaaaatgacttgtttgtatgccaaatttatgttgatgatattatttttgggtctactaacgagtctacatgtgaagaatttagtaggatcatgacacanaaattcgagatgtctatgatgggggagttgaagtatttcttaggatttcaagtgaagcaactccaagagggcaccttcattagccaaacgaagtatactcaaagaatatttccctctaaaagggccccagtttgg

SEQ ID NO: 3733 - DNA, 447 bp, Zea mays
agcttataacaagaaatttcttaatacatttactacaaaccggggttagtgttagaattaaatctgagtccgggagagagggaaaacacatcaaccaagaaataaagcgagtgaacacggtgatttgttttaccgaggttcggttctaaagaacctagtccccgttgaggtggtcacaaagaccggatctctttccaccctttccctctctcaaacggtcacttagatcgagtgagctttctccttaattctcatgggttacttagaccctgcaaggaccaccacactattggtgtctcttgccttgcttacaaaacacttgtgaacaagaatgaggaatgaagaaagcgatccaagcaacaagagcgcaaagaaacacgaacacactctctctcaagccactatgtggttggaatgaattctatacttggagaggctgtgatctta

SEQ ID NO: 3734 - DNA, 304 bp, Zea mays
  unsure (1)..(304): unsure at all n locations
cacaagtgcctaagttgtaaaggtggacanagtacaaatcaaggataaaggtatgtttctcagacctagtacattgtttatggactaatgtattgtgtctaagtgctggaaacaggaaaaatccaattgtaaatgtcttggctcgagcagccaagactctgctgagtctgggagcaccggactgtccggtggtgcaccggacagtgtccggtgcgccaggatggctcgagcgaagtggccactcttgggaattcacccgcgacgtacgactattattcaccggactgtctggtgtgcaccggac

SEQ ID NO: 3735 - DNA, 437 bp, Zea mays
agcttagccgtcgaagtttttatgctgtttatcgactgcgtcactagaaagttgttgcgaagatgagtcgctagtaagaactgcatacaatgacatctgccgctcaaccttctttcagtgaaatgagtggctatcatgacatctaattgacagaaacacttctcgttactgtactcactttcacgtgacttggtcccttccgtttctcttagaactattaagcagtaattcggttttctcgtgtccacgcagaacataacacacgtacgtcgctgtggaagagctgcattcattcgcatcacatcagtcacccgctggagacagcactgccctgacagggggttggtgaccattacagattcttgatgctactacaggtagcagctgctaactctgctcttaaagagtaaacacacacacctgttctgctttgttgc

SEQ ID NO: 3736 - DNA, 430 bp, Zea mays
  unsure (1)..(430): unsure at all n locations
cagcataccgacttcagtgacccgaaacattgtctgctgtgcataatgtgttccacgtgtctcaattgaagatgtgtcttcggattcccgatcgaaccattgaagtaacagatgttgccttagaaccagacttgacatatgcagaacatcctattcgagtcttggatcacaaggacaggattacccgaagaaaaactctcaagttttacaagatacagtggaaccaacattcagaagatgaggctacatgggaaactcaagactttttagaatacaatttcccaggctttttagcctcatgcaatttgtaaagtatgtacatttgttgtaataaaggaatgagccctataacacctatgccttggtccanaaattagggagataaaaatatgtttggggttttcccctttttttttttccccattacttg

SEQ ID NO: 3737 - DNA, 410 bp, Zea mays
agcttatgaagattcttcatcccaacatgggctggtcggcggtgccagagccaacccatgttagtcttagcaattaagcaagtgtcgagtttagctctatcaaagtctactaagtatagctgaccctctaacactcccttaaatgctactgaatcatcacttcttctaaagacagtaacacctaaatctgtaaaaagacagttgtagcccattttgcacaattgagaaacggaaagcaaattgtaatctaaagaatctacaagaaaaacattggaaatagaatggtcaggtgatattgcaattttacccaatcctttggccaaaccttgatttccatccccgaatgtgatagctcgttgaggatcttggtttttctcgtatgaggagaacatcttcttctcccctgtcat

SEQ ID NO: 3738 - DNA, 269 bp, Zea mays
taagctaagcaattattgggtagaacaattgtctgcttttatgggaccatgaaaagatcgcctgccatgaatatctaaccctcagtggcataatatctacgagaaaggtcacgcccaattattccttcattggattcactaaggggtctagacaatcatccattgatatctttgagggacaagacttcagtgatcccaaccttaagtgatcatcaactcaagagataactctctctaaaataagtcatgcagtgatgtcaggatttttt

SEQ ID NO: 3739 - DNA, 281 bp, Zea mays
taaactttctataagtgatgatggacacggtgcaccccacagcacgggcgcacttgtttgacaatgcactggacaagcacgatgtctgcaggatggccctggcgccgcctgccagcggagtggacaggacacattaaatgctaagggggcacatcgcctgtcaacaggatggacagacagcgtgtcctttcgcaatatatgcatagaccgcgcggcacagaggccttactttacgctccgcccgctggcttacgtcacgggcaacaagccacgtggcagca

SEQ ID NO: 3740 - DNA, 440 bp, Zea mays
  unsure (1)..(440): unsure at all n locations
tttctttgagtggtatttgaaaagaatccattcataagtcttcatcttatgctttagaaatcagcattttgtcatcatcttatgctttagaaatcaacattttatcttcatgggactaaaaatctattgggtgtagcccccgagctttgagtggatttttaaaataatccattcaaagggcttcatcttatgctttgtgaattcaaacgatgctatctgtccacaccttgttaggtttgaaattaatctgatcgatgacagattggatgnttggctggttgaggcagatggctctcagctggacatcaccctgctctgtgcttcaatgcttctgctgattagacttacactctagtagccacatttagacttccttccatctcagccgatctcctccttttgtcgtggtacattcattgcgtatattttgtggatatgac

SEQ ID NO: 3741 - DNA, 467 bp, Zea mays
  unsure (1)..(467): unsure at all n locations
nggctttganataaaatgtaagtttatgtaattctcttttgcatttcttcatctccgatgttctgtaatgtctacaagacgggtgagacgttcctggtaaggtaaggaaagataccgagcttgtcaagtagttcaggggcacctacagggttgtctgatgtctgtgagacaaggacaactgtaggtgggcctaattacttgggaggttccgtcacagctggtatcggagcgtagcccttcttggcagatattatgaggcatcttcaaaagaattttcgaaagtcttacctaaaaattcttttctcttcttacctaagtattctgaagaagtctatcttaaagaccagataggaagagtgccacatatagaagggtgaatcgactaagggtgattctgtaattatacatgcatcatgctaagcactattctaataaacattttttcttggcctttttaaaaaaaaaaa

SEQ ID NO: 3742 - DNA, 424 bp, Zea mays
  unsure (1)..(424): unsure at all n locations
agcttatcacgacatgaacctatgagagatttaaattaccttcatgtgtaatacacaacatatgagacaattaactcaaacaatttaaaaatattacacaacaacactatttcaaacttatttagcaaatgaacaaagctccaatctagtttactactaatttctattacattcattcatatttctacacatattagaggacgaacatactaatttttccctaaattatataaaccacaaatatcaaaaaacctaaacaaaaaataactatttcaacttcactatataggaggacgaacttgctgactttntcgcacttaaatgaatgaaaattntaacaaattcttgaaaaatttgcacaacacttcaccactttaagcttatagcgacataaatagagagctagactatgttcttcacacga

SEQ ID NO: 3743 - DNA, 248 bp, Zea mays
  unsure (1)..(248): unsure at all n locations
tttcccaatccttgaacaggtgttgaagcccctagccttttcccgaagcctaacactccttttaactttaatttcaaccataattggttgcttctgccttgtaacggcttctgcaggaatgggtgactgtggctccacatgtangtcctgactagaaggaggcaggcacttggggggaatcttgatcgagacggtttccatgctgggctcaacgagggcagagatagcacctggcattaaaaatttct

SEQ ID NO: 3744 - DNA, 359 bp, Zea mays
  unsure (1)..(359): unsure at all n locations
agcttaaaggagaaaagaaagaaggggagtctttcacactgtcttanttattataagttaanaaatattttaaagcacactgccaagaatggctcgattcaattgaaacaatgagtaatgaaattcttggaaattactccaaaaaagaggagcagctgatgacagcagccttcggcactcggccgaagcgaaggctgaacaaggtgcttgacgctatangatttgaatatgctgactatggtcgagtgggcggcgatgttggacgcccgaatcgaaaaagaatagccagcgctactgacgaagaggtcggcaatggtaccaaacaaaaaaagaaagattctgaaaaacttagccctgga

SEQ ID NO: 3745 - DNA, 317 bp, Zea mays
  unsure (1)..(317): unsure at all n locations
aacactaatagccacaaaagttggttattaaagttagaacggctaagtggcttgaaacgagctcttgtgaacacagacaatcaaagagaaagcacacaagagacacacgatttttataccgtggttcggcctagtagcacttgcctacttccacgttgtggcgtcccaatggacaagggttgcactcaacccctttcaagtgatccgatgatcaacttgaataccacgatntttcctttcctagtctttctcccgtttgcgaggaatctccacaacttggagcctcttgcccttacaatgatgatcacaaaagaagc

SEQ ID NO: 3746 - DNA, 457 bp, Zea mays
  unsure (1)..(457): unsure at all n locations
agctntagaaatatgtagacaaatatagtttatatggtaaattgtgaaaccaattntcctaggtttcttattttccctagaatntaatatacatagttttgtgatttttagggtaaataaggaattctaaagcatttaaagtagttcaaggtagtagttttggattntcaaagataagttgtaatcccaaaaatgcctcaaaattttatatgagttcctcatattatttagaagccttgggtagaatttgggttgatttggaccttgtttgatcaccaaaccccaaaacacccccctgccctatgaactcctttactgactccggaaaccctatgttctcggagtaccgtgaaggaaagttgtattcaagacttagataataagttatattatctttgaccctcatgagcattccatggatccattcttatacatatatatgaatatgttagaacac

SEQ ID NO: 3747 - DNA, 416 bp, Zea mays
  unsure (1)..(416): unsure at all n locations
tcgcttggaaaatatggaatanatcggcaataataaccagcctttccaaggatacttctgacttgatgtacagtggttgggggtttccactctaaaatatccttgactttgctgggatcaactgcaatccctttggcagataatacgtgtcccagaaattggatttcctccagccagaacgcgcacttactgaacttagcatataattggtgctctcttaagcacgttaatacgatccgcaaatgccgagcatgctcctcttcattcttggagtatatcaagatatcatcaatgaataccaccacaaatttattcaactcgggcatgaataccgagttcataagatatgtgaagtgggcaggagcatttgttagtccgaaagacataaccagatattcaaataatccataccgcgt

SEQ ID NO: 3748 - DNA, 425 bp, Zea mays
  unsure (1)..(425): unsure at all n locations
agctntagagaagagagtgacattgaccttttgagcacgattagtgttgaggacgagattatttgttgcagaaaattaaaccaggtcgtggcgagagccgtggctgtggtgcatggcgcgtgcttatcagttagttatcagcttatcatcacgtacggtcgggtcacctcatgattatattggtggctaacatgaacgtgaagctatctttgtgccaagtatctgctttcgaacttgggttagggtttaatctcacgtatgtgatgacgccaggtgccgtgttgcggcggcgaatatgctagatagatgccggccagatacttcaggtcgttaacgttgcctacctgtatcgcgatagatacgtattggatacgactgcgacgacgatacggtatcagagaaatatactgggcaaatatcatcat

SEQ ID NO: 3749 - DNA, 413 bp, Zea mays
  unsure (1)..(413): unsure at all n locations
ctctcgctgatgctcggccgactntgggtactganagctncnggtctctacttactgctttttctctgcatgagaaagaacgaagaagttacagacaacagccaaggccagaaaccattccgcagaatttgcaagagctaaatgtcaaatgagagaaaatattattatctctcagatcatggagaactggtaatactcacaaccgctcttttccagtagcggatgttttgtcttgttcttggtccacaacgttgttcgctgaactgtcagtttctgcacccgcgggtataccgccatctgatatatcacttagccttccatctgaatcaccaccaggatcagccgagttctggctcagctgtcgggcctcgtcagtagagagcatggacccaacttcngaatgcctatcactg

SEQ ID NO: 3750 - DNA, 452 bp, Zea mays
agcttgacaacgaggaaatgtcgctcgttatcaagagctttcgccaaatcctcaagcaaaggagggggaaagattacaagccccactccaagaaggtttgctacaagtgtggtaagcccggtcactttatagcaaaatgctctatttctagtgatagtgacaggggcgatgacaagaaggtgagaagaaaggaaaagaagaaatactaaagaagaagggtggcgacgcccatgtatgtcgcgagtgggactcggacgagagctcctccgactcctcctctgacgaggacgccgccaacatcgccatcaacaaaggccttctcttccccaacgtcggccacaagtgcctcatggcaaaggacggcaaaaagaaggttaaatccaaatcctccactagatatgagtcttctagcgatgataatgctagtgatgaggaagataatttgcgtactc

SEQ ID NO: 3751 - DNA, 389 bp, Zea mays
  unsure (1)..(389): unsure at all n locations
cggaggcgtcngatggntgtctacttggtgtagactcctttcttttttcttccatcgccttgaatgcgacgggttgagcttctgatgtatatggatcatcaagctcgttgatcttcctcgagccttcgatcatgcactcaaaacttacaaaatgcccgattactttctcgggggtcattattgtatatcttggattaccacgaattaattgaacttgagtagggttaagaaaaataagagatcttagaataaccttaaccacttcgtggtcatcccactttacgctcctgaggttgcgcacttggttcaccaaggtcttgagccggttgtacatgtgttgtggcttcctccctttgcgaagccggaaccgaccgagctctccctcgatc

SEQ ID NO: 3752 - DNA, 445 bp, Zea mays
agcttctatcacgacgttattgtccctgttcggagagaagagcaccaggtctgggccacacttcggactgccatgacaaaggactttgccatgacagcagcattgccttcgtatgaaaatattgtcgcctcatagctcatcaagaattgctttgggtccaagtgcccatcatacatgggcaactagggtggcttgtacgatcgcggccatggaataacctgcaattctgctgccaggggagaagcatcatcaaaagtaaagttaccatgatgaaagtcatcataccactcatcttccttgaatgagccatcttgacgaagctctctgtgctgaggcctggggttctggtcatcttgagtgagatgacacatttctctcgcgacctcgtcgatcttcttctgaagatcggcgagatgaagcatcttctcccttttcctctggacct

SEQ ID NO: 3753 - DNA, 457 bp, Zea mays
atcctcagagtcacctgcggcatcaagcttggaaatcttgttccacattttaagtcggcgatgccagagcaatcccatattagtcttagaaattaagcaagtgtctagttcagcattgttctcattaaaatcaactaagtatagctgaccatctaacactcccttacatgctactgaatcatcactttttctaaagacaggaacaccaacatcagtaaataggcagttgtagcccattttacataattgagaaactaacagcaagctgtaaactaaagagtctacaagaaatacattggaaatggaatggtcaggagatatattaattttacccaaacctttgactaaaccttgatttctatcccccaatgtaataagctcttctgggatcatcatttttctcatatgaagagaaacatacttttctctcttgcatgttggtttgtgcactcgctat

SEQ ID NO: 3754 - DNA, 464 bp, Zea mays
  unsure (1)..(464): unsure at all n locations
attgctaactgtcccgacttgatagtgtcattatcaanggaacaagagggaaaagaagaagtactataagaaggcaaagggcgaggctcatctangcaaggagtgggattcggattgctcctctttcgactccgacaatgaaggactcgccgccaccgccttcaacaagtcatccctcttccccaacgagcgtcacacatgccttatggcaagggagaagaaggtatgtactcgaaacactacttatgcttcttcaagtgaggacgaatctagtgatgagaatgaaatagattattcatgtttatttaaaggcttagatagatctaaggtagataaaattaatgaattgattgatgccttgaatgataagaataggctnttagaanagcaagaggatttgttgtatgaagaacatgacanattttgtaagaaagccacccaaaaaaaaaaaaaatttctcatgc

SEQ ID NO: 3755 - DNA, 382 bp, Zea mays
agcgtgacaacaccattttacatcttaattataattgcagagaccaagtatatttaattcattcctcaacatgcaaaagcgggtcctatcaagtggcttaaagacaatatccactagttgatcttccgacctcactccttctaaaatgatatctccttttgcaacatgatctctaaggaagcgatgactgatatcaatgtgcttggtgcgagagtgtcgaacagggttattatcaattttaacagctctctcattgtcacacaacaaaggtaccttttctagaactacgccatagtctacaagagtttgtttcatatataaaatttgtgtgaacaagcacccgcggtaatgtattcggcttccgacgttgacaatgcaacac

SEQ ID NO: 3756 - DNA, 333 bp, Zea mays
  unsure (1)..(333): unsure at all n locations
gatatncaaaaggaaattgtcacatatgatatacatatattaccatccacagctttgtttgtttacctggtagttaatctatgtatgtagttttccagttctgtttgtgcgcttgtcctgtcttcatatttgctatctcattctaaggtgcgactttgagagaggacagtgtatgtacccaagttgaatgtcataatttagattgtttttttgtattccagtgccgttagtactttctattcgatttagatgtcgataattaggatcttgtttatgcttcattgtggccataagcatactgatgtatttcacggatagactgagcattgatgt

SEQ ID NO: 3757 - DNA, 266 bp, Zea mays
tgcttaagcagccactctctctgtacttattatatagtgatggatgtatagatgagtgctcagtgagttatgcagcccacgacgatttactaccccagtgtgccgcgccatattatccacagcatccttcacatgtattgacgacactcgactagcgctgatattttggatttctccgttcttgatgatgagatgagtctgaatggactgcttctcgcgcaggaagaaaactacccccacccttcttgctgtcaactatgctggat

SEQ ID NO: 3758 - DNA, 434 bp, Zea mays
  unsure (1)..(434): unsure at all n locations
agcttcanctncatctatgttatggattgctnttgagtcacaccagtttccttcggcccttctggcagcttcctgacttccatgaatagcgatgggtccttgatccgaaagtatcttcatgcacagataagcaggatgaagaattgcttcaaaagcattgagggtgccacgaccaataattgcattgtaagggtattccatgtcaacaatgtcaaacacaacttgctcagttctggtgttgttgatgaacccgaaggtcactgacatggtgaccttgcccagtgctataatctgtctttctccgaagccacagagaggatgtgtagcatcatgaatcatgacttctggctcttgcattgtctgaaggcctagcaaatatgatatagctgactacctgtgtcaaccagacatgtggaccaaaatcttgatacaca

SEQ ID NO: 3759 - DNA, 366 bp, Zea mays
cggatattcttcatcagaacactatggatattgttgtgttgattgaaaattcttcttcacgaagcatgaaaaaaagggaaggtgttttttttcgtcaaagactcaaaaatggtacgtatgtagaatttcatgcatcgtaaagaattgaaccataaaaaacaagtatattacattcagagttacaagatattacacatacaagatattacacatattacatttcagatgtttttataatagcacctcagtcttcctaagtactagttccgcagcttcgttcaggagttgattgacaacttgatccatgatagcttcagccatctttttaatttcatcgtcttctttcgggtgaggacccggagatgc

SEQ ID NO: 3760 - DNA, 429 bp, Zea mays
tagcttaagttattaatgtttcaaatataattactgaatctgtccagttctggacagcaaagtcttttagtgatgtttatccttagttaaatactgaatcaccttgggatgtttataaataatttgtataacatttaattagctctccggaaagtctaggatcactttgtttggatgtctgaatctttagttgtgaatttttgaagctgcaagtctgaatctgtccaaatctggacagagctgctgtgtttgcacaattcgaccttgctaagagtctaatcatattgagatgataataccaaaattgtagaacactttctaagctttccaaaaagtcctagtttaatatttttgaactaataattaaaaagttatgatcaaaacaagtgactgctgtattgctgtcaaaaattctgtagtgcgctttga

SEQ ID NO: 3761 - DNA, 414 bp, Zea mays
gtgattcgaagtttcatgttgaatcattcttaggttttacttctccatttcttggcataacgtaatgtcagaagtccccattgtaagacaatgacaaaagtcttgcgactcaaggcatctgccactacattagctttgcctgggtgatagtgaatctccagttcataatccttaatcagctcgagccatcttctctgtctcatgttgagctctgactgggtgaagatatacttcaagcttttatgatctatatagatgtgacagatattacccagcagataatgacgccatattttcagggcatgaactactgcagctaactccaggtcatgagttgggtaatgttcttcataccgacgcaactgccttgaagcataagctatcactcggccttcttgcattagaacatagcct

SEQ ID NO: 3762 - DNA, 455 bp, Zea mays
  unsure (1)..(455): unsure at all n locations
agctntagcagaatgacagcgaaggtcctctattctcagataggcaggaatgtactaacttatgttgatgatatcattgtaaaaagcacgaagcaagataatcacattgctgatctgtaggagaccttcgctaatttagacaggctggtttaaagctgaatccggaaaaatgtgtcttccgagtaaagaaggggaaatttcttggttgcctagtttcaacaaagggcattgaggctaatccaagcaaaatcgaagctatacttcgaatggaaccaccaagtacaaagaagggggctcaaagattgacaggaaggctggcatctctcaacagattcatatctagatcagcagagagacatttatcatttttcgaagtgctgaagtcagccgaagttttcaatggggaccagtccagcagagagccttcgaagaactgaacaatatttgatagatct

SEQ ID NO: 3763 - DNA, 330 bp, Zea mays
  unsure (1)..(330): unsure at all n locations
tgcccgagcttgaaccgaggacccncgccaccggaatagtacaatcgtgctcgccggagttcggaaccccgccgaagcacgtggaccgggtgagtctccgcaccattttccaattcactgcacgcatagcctctacgtcaccccgtggagctcctcgtaccgtttaattgaactataccgccatggtttggccggagcaggagccgccgatgacctctgccgcctccgctcgtggccaggatcgctccgaccacctctgacgccgacccgcacaccgacgtgaccgccgtgacctcccctacgtcactgacaaccccatcggagctctac

SEQ ID NO: 3764 - DNA, 425 bp, Zea mays
agcttcagttctcttactccatgtctctttttttccggaggtttcatagaaagatactatctctacctaattaataatttctagagttgactttaagttcaagatttgttttatgtttaaacgaatgtatggaacagaacgcacagttttgtaacaaaaaaattactatattaaggtacaccatgagatatatctgcaccatatgtttttttctctatagattcgattaaacacaacaatgatttaatagaattacaagcattgatttattaatggaagtgctctccgcttgcacctcatgcaaacaaattcatgtttgtagttcttgtgtttcaacataccgcaacaatatctttcaaaaaagatactgcgatatttctttgttatacacttccgtatcttcatcacgcaccatcaattttctt

SEQ ID NO: 3765 - DNA, 318 bp, Zea mays
  unsure (1)..(318): unsure at all n locations
aaacacagtgcgctgctnggcacggtcgttctgtttgccagcagacccancaggcgcgccgcctactggaagaccatgacacctcccgccagccgatgggacgggacacattaaatgctgagaaggcacgtcgccccgtgcctgtcagcgcaagggcaggtggcgcgtccctctcctaataaatgcaggggctacacggctttacgtcaggctcagcccgatggcttatgtcatgggccacaagcagcgggccttcgcctgcgcggggagcagtgaacaaggcctgcacacgtgtcagcaccggacccctgcataccc

SEQ ID NO: 3766 - DNA, 451 bp, Zea mays
agcttcttgttggtgacgaagcaataactctcttaagaagtatgagcgggctcaataaggaccttggcttcaacagaagatgaagagggttgtcaaatatcaaaagacaccatataagggatgaaagtcgcctaaagggggggtgaatatggctaaactgaaatttacaagtataaacacaactacaagccgtgttagcgttagaaatataaacgagtccgcgagagagggcgcaaaacaaatcgcatgataataaagagtgtgacacgcggatttgttttaccgaggttcggttctcgcaaacctactccccgctgaggaggccacaaaggccgtgtcttttttaacccttccctctctcaaacgatcccttggaccgagtgagcttctcttctacaattaaacccggaacaaaaacttcctcgcaagggcaccacacaattggtgcctt

SEQ ID NO: 3767 - DNA, 312 bp, Zea mays
attttgagaaagacaatgattgtagcgcaggccaagcaggaagagcgggtggagcccatcatccacacaacaacaccatgacgactgataggccgcttgagctactccacatggatccattcggcccgattgcctacataagcatcggcgggagtaaagattggcctgtaatagtggatgattattctcgctccacttgggtgttctttttgcaggaaaaatctcaaacccaagaaaccctaaaggggttcttaagacgagctcaaaacgagttcggcttaaggagcaagaaaattagaagcgacaacggga

SEQ ID NO: 3768 - DNA, 385 bp, Zea mays
catgcaagcttgccaagccctcggacccgaccggacttcaccggatgtcttagatcgacctcaccggacttcggtcttccgccgccgcacgtggaccgagctatccagtgagtctccgcccaattcctttcgctcatgtcttctctggcatcccgtggacctccctgacctatttgattgaactatctcgccgtgaccaggccggtctcctcgccgccgacgagcatccccgcctgcgcgcgtggaccgaccgactccggccatctccgacggtgttccgcacaccgttgtgatccccgcgacctccccttcaccctcgaccacttcaccggaacagtctcgccgccggtaagcccctccgcccttttctttgccgcggctactg

SEQ ID NO: 3769 - DNA, 406 bp, Zea mays
  unsure (1)..(406): unsure at all n locations
ggggcaacgaagctagagctcgagcgccgcgtggaagatcttatcttatctgttgataacttgcaggtttattgtaatacattacatgaagaagttcatgtgttgtattcacaactgcacccgaacgtccctgcggatcctgtcgggatgggagccggaccatctggagcagcaggagaagcccttggggagaactggaccttttcaggccccctccttcaatgaatttggtcgaccagtggtctcctacgcctgacagcgaggctaccaaaagcgacaagaagcaagagtagtatagtatagaagtagtagtagtttgtaataggtaatgtaatcctgttgtatatactagtctgtaaacctttntcagtaatgtgaaatggatgggttgttctggcatatcata

SEQ ID NO: 3770 - DNA, 418 bp, Zea mays
agcttgtgaaggttcttcatccccacatgtgctaagcggcgatgccacagccagcccatgctagtcttagctattaagcatgcatctagaccagcctcttcttttgcaaaatcaactaaataaagtttgccgtctaatacacccttaaaagctagtgaaccatcacttcttctaaagacagacacatctacatttgtaaataaacagttataccccatgttgcataattgactaacagatagcaaattatatcccaaggactcaactaaaaacacattagaaattgagtgctcatttgagattgcaattttacccaatccttttaccttgccttgattcccatcaccgaatataattgaatcttgggaatccttattcttgacgtaggaggtgaacatcttcttcttccccgtcatat

SEQ ID NO: 3771 - DNA, 347 bp, Zea mays
  unsure (1)..(347): unsure at all n locations
agaattggagaatggtattatggttcttatgagtcangttgatgtgataaaaatcaaggaggccacggaaaaaaaggagatatgggaaggctgaggccgcggagaaggaaaggagcgtaaactactgactcgtgggtatcttctgttgggacggtagtcccgtggcaaacccgccaagaacagagttcccgcggaggaagaacaccgatggagacaagacggaggagctcagcttcggaaataacagacatatggttacctgcgaagggtaactgactgttggggtcgattgcggngatcacagcagcagacgagttcgcggttttcctcttatgcgccatcttgct

SEQ ID NO: 3772 - DNA, 366 bp, Zea mays
agactgtgaagaatctttattctcacatgtgctagtcggcgatgccagagccaacccatgttagtcttagcaattaagcatgtgtcgagttcagctctattaaaatccactaagtatagctgaccctctaacacacccttatatgctattgaatcatcaccttttctaaagacagggacacctatatcagtaaaaagacagttgttgcccatttgacataattgggaaacagaaagcaagttgtaatctaaggaatcaacaagaaaaacattggaaatggaatggtcaggagatataacaaatttacccaaacctttgaccacaccttgattatcattcccgaatgtgatagctcgatggggatct

SEQ ID NO: 3773 - DNA, 325 bp, Zea mays
  unsure (1)..(325): unsure at all n locations
aaaaatatctcgtcttgccaggtggagcatcaaagctcaacctaagaaacaagaagggcttangattcatgaacttaattttaaaatatttctttgttaggcaaatggctttttaagcttctcacagcaaccaatacttagcaacaacttatctatgataaatactagacttctaaactgcttgtgcaggttcattggaaactatttgtcacttctgcacttctggtctactccaatgaaagcaaagcagatcttttcttcactttagatcctctatcactatangtgtacattcgggccgcccggcccggcacggtctaagccc

SEQ ID NO: 3774 - DNA, 349 bp, Zea mays
gcttgtggagctatatacgactattggcatgaagagcggtggtactaatgaggaggagtacttgtgactagttgatagcttacaagtgaaccactacctactaactctatttgtgacaaatgcaacattgatctcagtgataatattgctcttggagaatcaaaaaacattggtgaaaatgaactgctagtgaatagagtaaatactctaactcatgacctataaaaggcatatggcggaaaggctaagtaggatttcatattaggaagacaacggcgctcacttaaccgtgaatgtcttggataatggcctaagaacggtacgaatgctatggtaaagcaaaagacat

SEQ ID NO: 3775 - DNA, 324 bp, Zea mays
tagctggggacacaagcttttaaccatctgttgagccaaaataaagccgctggcagatgctcccgttccggtccaccaccactttcacccaacataagacttcgcctagttatctagccaagggcgttccataccacctctatgggagcactgacttccatggtggtcactccatgttccaaataaatcatatcgatcttgcttaatcgccggattagctactataatgccaacttattatttggaacattaatatcacacaactgagtgactgcatagagctaagttgttgcaatgcatagctaccaacgtctaacttaatat

SEQ ID NO: 3776 - DNA, 295 bp, Zea mays
cggggggcaacattaatttgtccgacgtgccacctcagacatgcgcctgtggcggaagaccgagtatctcgagatacctcttaaggacagcattaaatgttggcgtctgaagtggttcatagtggacaattatggaaactttattcgtccttgctcagggagacaggcagacgttcgcactccgagttggactgaatctcccacggacacagaagtattcgatgcgggcgtcgtgcttactgaggttggattactgcaagaaagaggcctgactgccgaagcccggagcacagat

SEQ ID NO: 3777 - DNA, 409 bp, Zea mays
  unsure (1)..(409): unsure at all n locations
agacaacaactgcacaactngcaagatatattatcggttgtttcgaaaaccccgcggaagtttggagcgagttattcattataaacttgagtgttcacagacagatgcacaatgcacaagcatgcaacatccaaatgcatgtacagctattacacattcatagataacagaaacaattagcgagagtcacattatcatgtgacaggctagacattagacatcaaaatacttcatacgagataagttgaacatgtggaaattattctacggccaacaataaaattaaaaccaaacagggatatcacagttgaactacttcccctgcttcattttatcagtgcatctgcatctgcatttgaacaaaatatttatagctgtgtctaacagattccctattacatactctatc

SEQ ID NO: 3778 - DNA, 426 bp, Zea mays
taagcttatcaaatggacgtgaaaagtgctcttcctcaacggaccaatcaaggaagaggtctatgttgagcaaccttccggctctgaagatagtgagtatcctaatcacgtgtataaactctctaaagcgctttatgggctcaagcaagccccaagagcatggtatgaatgcctaagagattttcttatcactaatggcttcaaagtcggaaaggccgatcctactttattcactaaaacacttccaaatgatttgtttgtatgccaaatttatgttgatgatattatatttgggtctactaacgaatctacatgtgaagaaattagtaggatcatgacacagatattcgagatgtccatgatggcggagttgatgtacttcttgggatttcaagtaaagcaactccaagagggcacctttattat

SEQ ID NO: 3779 - DNA, 290 bp, Zea mays
gctgaacttcaactgagttgaacttcttcaactgcaattgagctctttcaactacagttgagctttctgaactccagctgaacttcaacttcaactgtgaagttttctgaccatacaccagttgaacttgcctccgggcagttgaactacggttttctctcctgaactctctggttaagaccagctgaagtggttttccagggcagttcaactagtctctgaccgatctaacctctgaccaacagtctgccagccagactggtgaacagttcgacagagtcgtcaggggc

SEQ ID NO: 3780 - DNA, 428 bp, Zea mays
  unsure (1)..(428): unsure at all n locations
tatctntgtaggatatagagatggtatgcttctttggggtgcttgagggagttaattcaattcttatcaacttaagctatcaatcttcaaatgatctacatattcaagattgacccaaggttacctcaatttattgtatttaaaactcatatcatctcggggaagatattgatgttgtacgaattgaagaatcatcatgtgcggaaaatcaaggcctacaacatggaggactgtcaaaggatggtaacacttatgtctttaagtgcaaataccttaaaattatcatttcttatgcatcttgtgtagtcacatagaaaaattgaagcacttcanatacctttaaatttatgttaccattctctgaagaatttctatcatatggtagattgcatactcatcantttcatcctatgacaatctacatgcct

SEQ ID NO: 3781 - DNA, 452 bp, Zea mays
  unsure (1)..(452): unsure at all n locations
taatgccggaattgccatcaaggaagctccctcacttttctcatccncncattgcctcatggcggagggagatgctaaggtaaaaatcatcaccgatttaaatgatataaatgatgatgatgatatcgatgatgttgatgatgatggctattcatatgatgatcttgttagaatgttaggtgaggccgatgactacatgcacaaagaanaagaaaaatttaagaccttgaaggaattgtataaaaacctccaagtgtcttttgaggagctcaagacctctcacaatgacctcaaagaaaattgtgagaagcttgcggatgctcaaaaatcatctattgtgcatgaagttgaagtggtcactaaggatattggagtcacttgtgacttacttgatagtcttacaagtgaaccactacctactaactctatttgtgataaatggcaaaaaaatt

SEQ ID NO: 3782 - DNA, 333 bp, Zea mays
tggtcaagaagaaagaacacctagaccgaaggaagatgtcgtacagctctccatgataagctgaaagcttataatgcagtgctggagaaacagcgagacaagcaggctgcggctgaggcgaagttgcagcaggagcttgccgacaaggctagtgacattgctcgcgctgagggaaacctcaaggcgagggaagcttccctggtgaaacgaacaactgacctcacttggcaggaggaggacctcgctttcagggaggagatgtgggcaaggcggaacaagctgctggatgagcttgagctcgaggcacatgagaaagggaagcgtcttgaaggg

SEQ ID NO: 3783 - DNA, 199 bp, Zea mays
agcttggatcgtgcttgaataaatatcttattatctagctgcttgtgctttactactgctattttctatcatatcaatacgcattgagatgcttatctctactactccttaagagtctaaggtaggcgcgcacagtctgctcggatctgccgagacgcgcccggcgcccatctcccttctactcccgcccatcaacgtc

SEQ ID NO: 3784 - DNA, 351 bp, Zea mays
  unsure (1)..(351): unsure at all n locations
tactttntaatatctctagtggttggttgtctagagacagcagacaatctaggattatgagcctttttaatgtactcttcaaaagcagatgattcagccaagcaaataagtggatcaagcctacatatcaaacgacacatctcaaacctagcaacatcagcattgtactcccacaatctagcactaccatcaggattaaactggagcaaggactgggcaaaggcatttctgccatgcttcagtttgcatgcatttctatggcgattaagatggccagcgccaccagttgatttagcagacagaacacaacttgcaactttgcacttagccttacaccttaaccttacacca

SEQ ID NO: 3785 - DNA, 436 bp, Zea mays
  unsure (1)..(436): unsure at all n locations
gcatgcaagcttggcaaaagcactacataactnttattataccaagatgtgattccaggtttaatcaaatcaaacattacagttctcgaaatctgtgctgacataggacagaacacagtaaccagtttgtaaaattcataacttttaaactatcacgcctgtgtttatgaaattttaacaccagcaagatcagaacagcgtctccacctttcttataatgaccatgaacagatcgcaacattaaattaggcaaacaatgcagcttctgaaatttgtacagaatgtggacagattcagttactgaatgtgcaaaatcacaactgttacctggtcagacctatggctgtcaattttaacccccaagatataaagcttatagcttttctatcgccattctacagaaacacctttagtaatcataatcagtcaccgatac

SEQ ID NO: 3786 - DNA, 439 bp, Zea mays
  unsure (1)..(439): unsure at all n locations
agctngacaatgaggaaatggcgctcgttattaagagctttctccaaatcctcaaacaaaagagggggaaggactacataccccgctccaagaaagtgtgctacaaatgtggtacgcccggtcatttcattgcggagtgtactatatctactgacagtgacaggggcgacgacactaacggaacgagaaaagagaagaagagatactacaccaagaacggcggcgatgcccatgtttgtaaggagtgggactccgacgaaagctctaccgactcctccgacgacgaggacgccgccaacatcgtcgtcaccaagggacttctcttcctcaacgtcggccacaagtgcctcatggctaaggacggcaaanagaagaaagttaaatccaaatcctccactacatatgagtgctctagtgatgaaaatgctagcgatgagga

SEQ ID NO: 3787 - DNA, 157 bp, Zea mays
gagagcacattttaggactaaccagtgtacattttgagaaagacaggggttgtagcgcattccaggcgaaaaagcaagttggagcccatcatccacacaagaacatcatgacgaccgagaagccgcttgagctactccacatggatttattcggccc

SEQ ID NO: 3788 - DNA, 467 bp, Zea mays
  unsure (1)..(467): unsure at all n locations
tgaatcaggcaaatggtggcaaagttattaattcttcgttgatggtacctgattaccctgtgttgctaaggtttatatagaaattgtagttacccaaccgtttcaattctcgagaaaggggtccttggatgatacctgattaccctgcgatgttgtgtgaatgtatgttccacagtgcacacttatctatgattgaaagatggaaggggatttatgttgcagtagttggttatgattntctggtataaccagcacaaattattaaatatggttgttctttcaaatttaacaacatttgttgttagcatttggaacgtgttttaaccactcatgtttaaaaatgtctacttgtatgatataaagaanatgtagcaacgtacagacacctaactagttgatagcttaaacagaattacaatatacttatangcaagccccattgcaaacagaaatttaagggggaaaaa

SEQ ID NO: 3789 - DNA, 230 bp, Zea mays
tgggttaatggatgaccggtctgcctataatggcttgactggccccttatgcatctcttttcatctaacttataggtgtatctgacgcaatgtcgttagcacaccatctcgcttaattattgtctgacaacactttatataatatgtaagccgcgtttggcagtttctatataatctctaactatgtgatgtttgggataaaatatgttgtccctggttaattatcattt

SEQ ID NO: 3790 - DNA, 417 bp, Zea mays
agcttctatcacgacgtgattgtccctgttctgagagaagagtaccatgtctgggccacacttcggactgccatgacgaaggactttgccatgacagcagcattgccttcgtatgagaatattgttgcctcatagctcatcaagaattgctttgggtccaagtgcccatcatacatgggcaactagggtggcttgtatgattgtggccatggaatagcctgcaattctgctgccaggggagaagcatcatcaaaagtaaagttaccatgatgaaagtcatcataccactcatcttcgttgaatgagccatcttgacgaagctccctgtgctgaggccttgggttctggtcatcttgagtgagatgacacatttcttcagcgacctcgtcgatcttcttctgaagatcggcgagatga

SEQ ID NO: 3791 - DNA, 379 bp, Zea mays
ctgatgaaaacatattgtgaacagcacatatgtggtcatccgtctaattcctgctcttgtctttgaaagtctcttcgttgcaccatctctggtggtgtccgtttgccgcagtgcagccatgatagagctggaatagctgactggattggatgcctccaaaacccggtcccttgccaaaagaagaagaggaggaagaagaagaactggcagcactgaatttcatcatatgtaagatctccaggctggttacagtggatggacagaatgttttggacacatacaagggcaggaaaatgatggcttgaagtttttggtttcactttcactcagcctcgttcgagtttcacccgccacatgtatagtgcctgtacatcacttg

SEQ ID NO: 3792 - DNA, 416 bp, Zea mays
  unsure (1)..(416): unsure at all n locations
agctttccaaaaagtattagatcgtcgatattggagttcggagcaaaaagttacgaccaaaatacgacaagcggacatgggctgttctgtgcacaccggaccgtccggtgcgccatgtccggtgcgccatcttcggaagctcaaacggctacttttaacggctagtacacgtggcatgtncggtgcaccaccggacagtccggtgcacctgtccggtgcgccgcagaaagctacagaactgctttccaacggctatatttgagttggggcctatatatacttcacccaaccggccatttggaggtgtgggagcccaagcaacataccaaggcatattgtagacatttccaagtgctcaaacacccaagtgcttaatagaatcactcggtgattagcgtaggtgctttgcgaagtgc

SEQ ID NO: 3793 - DNA, 458 bp, Zea mays
  unsure (1)..(458): unsure at all n locations
tgcaagcttgccaatacctgtttaagcaacagtttatgccagcacagcatttacagaccataccagtaacttggcctttcgcatgctggggactggatatgattggacctttcaagaaagctcaaggaggatatacccatgtattggtggcaattgacaaattcactaaatggatagagttccagcccattgcttctttaacctctgctaaagccgtggaattcatacaaagcataatattcagattcgggataccaaagagtatcatcactgacttgggatccaacttcaccagctcagaattctttgacttctgcgagcaaaagagcattcagatcaagtacgcatctgtagcacatccaagagccaacgggcaggttgagcgagccaacggaatgatattggaggcactcangaaaagggtctttcgatagaaatgaaaattcgcaggagaatgg

SEQ ID NO: 3794 - DNA, 289 bp, Zea mays
ccttgatatacctccatgttcacggcagtgttgcctattattttgcacggggaccgggggttttcttgtatccccacaccacactcttggaatcatttttggactatgattccggaacctcgccatatggacagcgtgaagcctgtgaagtggctcacttatgctttctggaagtccaaactgacttggtggctctcagtcttttcccgcagagcgagaattggctcaggggtgcccgctctacgtcattcactcctaaaatagcacttcgcctctatatatgttcact

SEQ ID NO: 3795 - DNA, 414 bp, Zea mays
  unsure (1)..(414): unsure at all n locations
agcttgacaccgtagatctccacgttgagctgttatcctatcctatagatcttggcatacacaatacaagatctattgntccaaaaaacatagaacaccgttgtagtttagttggttaggatactcagctcttagctgagagacccacgttcgagtcccactaatggcatatttttttgctatttctataatcattttagtcctttgtgcggacttatctctgcctgtgcgggctaacccctccatctaatcactgaaacattacatttctcgtctcatggaatatgtgaatggccgttgctgcgtgcaaaggcagaatgccatttgtggctggatcatactggctgctgccgttcatgtctagcttgtggctcactaacacaaacaacttgctcccattgaacatgagtatcg

SEQ ID NO: 3796 - DNA, 373 bp, Zea mays
  unsure (1)..(373): unsure at all n locations
agtcatanaatgatcccaagaatatacttgagtcacttttgtacccctgtgataccaganaccctaattggaaccctggaaaaccctaaaaccaaaccctaggggcttatgtgcaaaagtgatgaacctttggactaaaatgtaaaaactactatgtttaagcatctaaagccaattggttcacaaatatgtgaatttacaagccaaaccctaagtcttggacttaaatgtaaaatggacctcatttgagttctataccaagtctgaaatttagtgttaaaggctccactctggggctctgtaactttcaaattatagggtttttgccctacgtcaccacatcaagattatagcccaactataggagtacaac

SEQ ID NO: 3797 - DNA, 404 bp, Zea mays
  unsure (1)..(404): unsure at all n locations
cttcatccctacatgtgctaagcggcgatgccacagccagcccatgctagtcttagctattaagcatgcatctagaccagnctcttcttttgcaaaatcaactaaataaaagttgccgtctaatacacccttaaaagctagtgaaccatcacttcttctaaagacagacacatctacatttgtaaatagacagttataccccatgttgcataattgactaacagatagcaaattataaccaagagactctactaaaaacacattagagatagagtgctcattagaaaatgcgattntacctaaccctcttaccttgccttgattcccatcaccgaatataattgaatcttgggaatccttattcttgacgtaggaggtgaacattttcttctccccgtcatatg

SEQ ID NO: 3798 - DNA, 405 bp, Zea mays
  unsure (1)..(405): unsure at all n locations
ctctgtatccattgngtgtaacccccgagctttgaattgatttgagcatcaatcagttcaaaggtcttcaaaaccacttttgagtttagctttgcctcatctttgtaggtgcacctagtgggtgtagcccccgagctttgcattgatttaagcatcaattagttcaaagatcttcatgatctgcttttgagttcagtgtttgctttgtctttgtatccattggatgtaaccctcgagctttgaattgatttgagcatcaatcagttcaaaggtcttcatgatccgcttttgagttcagtgtttgctttgtctttgtatccattggatgcactatanggtgtatcccncaagctttgaatttgatttacaatcaatcagatcanaggtcttcacaatcttttgttt

SEQ ID NO: 3799 - DNA, 246 bp, Zea mays
attattgcttattctgtggtgaggaccagggccatactacaaagatgtgccatgtatccacttccaaacaaacagaaatacgccgaagtcgcatctcaacataaccagccgaaacacgtcatgcctactgttttgtatcactcaccctacataccacagtatgtgggtcaccaaccctgcacacgctgttgcttcggctacccagccacatgcttcttattcacagccctccactttcacgaccac

SEQ ID NO: 3800 - DNA, 171 bp, Zea mays
gttcattatgagagagacaggggttgtagcgcatgtcaagcaaggaagcaagttgttacccaccatccacacataacatcatgacgacagacatgccactggagttactccacatggatctattcggcccgatagcttacataagcatcgggggggaagaagtactgtctt

SEQ ID NO: 3801 - DNA, 320 bp, Zea mays
  unsure (1)..(320): unsure at all n locations
atcagaacgacacaataaggacggtcattgatcaacggatatccaccatgttagcccggatgatactcctggaacttgaacatgactcgctgccgctttccgacggacttgttccgncattctttgaatgccgtcctggtggctttatctgcggctttgtactcatctgtcgtattgagcggtatctctggacaccatcttctttgtccgcttgtacacccaccaccattcaccgttgaccgccccatattcgagcatcacatactccaaattataaaatctcgtgggacacggaacccttgttcacggggttggtgacg

SEQ ID NO: 3802 - DNA, 434 bp, Zea mays
tgccaatacttgtcaaagcaacaacacatgccagctcatttattacagaccataccagtaacttggcctttcgcatgttggggactggatatgattggacctttcaagaaagctcaagggggatatacccatgtattggtggcgattgacaaattcactaaatggatagagttcaagcccattgcctctttaacatctgctaaggccgtggaattcatacaagacataatattcagattcgagataccaaacaatatcattactgacttaggatccaacttcaccagttcagaattctttgacttctgcgaggaaaagagcattcagatcaagtacgcatctgtagcacatccaagaaccaacgggcaggttgagcgagctaacagaatgatattggaggcactcaggaaaaaggtcttcgataagaatgaaaa

SEQ ID NO: 3803 - DNA, 275 bp, Zea mays
  unsure (1)..(275): unsure at all n locations
cccaccctcccgcacttnttctcccccccccggggactgtctcttcaaccaccaaaaccaccagaacagaaggcttagataaattatctaactataatcaaaaatccattttaactctttaacccattcactcgcaatatcttgattaatattggctaccaactagtaacactttttagccatgaaactagaattaaaattgttcattaagaataatctattctaagccctaaataattccggaaaatcataacttaaaatccgaactctgaaat

SEQ ID NO: 3804 - DNA, 335 bp, Zea mays
tatctctctgctgaacaatgaagagatcaaaataattctctataaagcatattgggatataatatgaagagaaatggttgccctgctaacagcctacaccaaaaataattaactattggtataagttctctctcaaaattattatacgcaaaaatggtgcataaatcgatacccaatttcaaagggatatgagtaatttggtaaaccatgaacaatgaaaaaaagagctggactatacatctctgtatataaaaaaacctctatttacaacattaacctgatgctgagcactttactaccattatatgcacactcatttttcttatgtgcttaaa

SEQ ID NO: 3805 - DNA, 396 bp, Zea mays
  unsure (1)..(396): unsure at all n locations
cttatcnatggacgtgaagaatgccttccttttggacttataaggaagaggtctatgttgagcaaccttccggctttgaagatagtgagtaccctaaccatgtgtataaactctctaaagtgctctatgggcttaagctagccccaagatcatggtatgaatgcctaacagaattccttatcactaatggcttcagagccgggaaagccgatcctacactgtttactatcaacattgcatatgaattgtctgtgtgccaaaatttacgacgatgatatcataatttggggctactaataaaatcttcttgtgaagagtttactatgaacatgtaactaaaattcgcgatcgctatgatggggagtcgaatctttttacgattacagggaacaactt

SEQ ID NO: 3806 - DNA, 290 bp, Zea mays
gtatgttgtcataatggcctacaggaagcttacgcattattttcaagcattccatataattgatccttcatcacagcctttgcatgatatcatgatgaacataacaacctactggaaagataagcaaacgtgctccaaagtctccaatgacacaggtaaagggttgcaaaagaccctattattgtcacaaccacacaaggagacgtttgcttaatccaacctctgtaaacaaatacacgtgtacactctttttcacttgtgaatgttctgcacctatattcgcacatctt

SEQ ID NO: 3807 - DNA, 417 bp, Zea mays
  unsure (1)..(417): unsure at all n locations
ttatcaaatggacgtgaagagtgccttcctcaatggactatttttgtataggtctatgntgagcaacctcccggctttgaagatagtgagtaccctaaccatgtgtataaactctctaaggcgctttatggccttaagcaagccccacgagcatggtatgaatgccttatggatttccttatcactaatggattcanagtcggaaaagccgaccctactttattcactaaaactcttgaaaatgacttgttatgcatgccaaatgtatgttgatgatattatatctgggtctactaacgagtctacatgtgaagaatttagtaggatcatgacctataaattaaaaacgccaatgatgggggagtagaactatttcttatgatttctagtgaagccacttccagagggcacctttct

SEQ ID NO: 3808 - DNA, 411 bp, Zea mays
tagtgcccctaagaaaattgccaactgtgttaaaggcaatgctcccatggttcaagataaccagggttacattttatatcctggcggatatcccaaacacaaaattaggagaattcattctaggaagtctcactctggctctcatcatgcttttatgtataagagtgaggcatctagctctaggcaatcaacccatgttaaaatgcctaaaaagaaaactcctattgcatcaaatgagcctattatttcatttaagacttttgatgcttcttatgtgctaactaacaaatcaggcaaagtagttgccaaatatgttggggcccaacacaagggctcaaagacttgtgtttgggtacccaaagtgctcgtttctaatgtcaaaggacccaagaccgcttgggtcctaagaac

SEQ ID NO: 3809 - DNA, 375 bp, Zea mays
ttaccaaatggacgtgaagagtgccttcctcaatggacctatattgaagagatctatggtgagcaacctcccgggtttgaagatagtgagtattctaaccatgtctataggctctctaaggcgctttatgggctcaagcaagccccacaagcatgggttgaatgcctaagagaattccttattgctaacggcttacaagtcggcaagggcgatcctactttatttactaaaactcttgaaaatgatttgttcgtatgccaaatttatgtcgatgatattatatttgggtctactaacgaatctacatgtgaggaatttagtacgatcatgacacaaaaattccagatgtctatgatgggggagttgaagtacttc

SEQ ID NO: 3810 - DNA, 403 bp, Zea mays
  unsure (1)..(403): unsure at all n locations
agcattagtgttaagtgagagtgatttgttgtgttcttttgagctcttgcgcttggattgctttctttctcattctttcttgagatcaaactcacttgtaattgaggcaagagacatcaatcgtgtggtggtccttgtgggaactttgtgttccaagtgattgagaagaaaagctcactcggtccaagggaccgtgtgagagagggaaagggtttaaagacaccttattttctggaccacccttacatgtagttagtttgcaagactccaaccttagtaaaacaaatccgcgtgtcacactctttattcacttgtgatttgtttgcaccctctatttcggactcgtttatatctctaacgctcaccccgcttgttgttgtgatcaagtgcgtaaatntcaaat

SEQ ID NO: 3811 - DNA, 433 bp, Zea mays
  unsure (1)..(433): unsure at all n locations
atttactaagatcatagcaaggggagtgggcgatctttgtatttttttacgtgactagtggctaacaaccaggaatgcaggaactctcataagagctatccgtatagtcctcgagtcattatacttcaattggtaggactgttagcaaggagtttgaagctttgatacttctcctgttttagccaggattgaagttgatcgagacatgccaagtataaaggagtgctgagtgcatcatggtatacttagccttgtggaggaggctcagcatcatgttatactgagatgccaattgcatcaagttatacttggacggtggtgaattggaaccttctatgaaaaacccaggcccagcatataaaagcctctgccatttctgctattacagagtcttgattntgacttcatgtgtcatatccatctatctacattg

SEQ ID NO: 3812 - DNA, 365 bp, Zea mays
aaaatgatttttatgacaatcaatctattagacttctattagctataacttggatctacaaccgtattttcctagacagctctagcactatgatttcttgactactattccaacatatgtttgcatgcaccaaaatggtcagaatattgtagcagtttatttagcacttactattcacataaactggtcggtcccaatgtggaattaccgaagctgggcctgggccagctcatagatgttgatgtagattgaaactttgaactccatctctctctctctttttgctttgaaatgtcctgcccaacttggatatgaaataaatcaaaattgtatgttttggggcaataaaaagcaaattaccttgc

SEQ ID NO: 3813 - DNA, 410 bp, Zea mays
cttaggttctctcaacttgggttatgttttaccccttttattcctatttagggttaagtcctttaaccagggtcctatttgcaaaacacttaaacaatacaacttgtttgaaatttttgcctagtgaatgcactctaggtgtgtcaaacatatgcaatgccaatgctatgatgccatgctcaagttttagttacagtaacactaggggtgttacattcttccccccataaaagaatctcgtcccgagattaaaagtcctagggtaagtaatggtaaaggaaacacatcacatttttatttccttatttttggaacaagacaggggtggggtgggggttacttctttattacaacatctatacaggctgtacaatttacaagaggctagaaagcctgtgaaattcttatct

SEQ ID NO: 3814 - DNA, 192 bp, Zea mays
  unsure (1)..(192): unsure at all n locations
gctnttcttgaagtangttcttgactttttccatgtttcccttttcgtttcttggacctgatgcgacgacaaggctgaaattgtgagcaagtaatagtccatccatcaatgtaacactcctgtgtttcttcttggggctgggcatccttgtgatgtttcctttttggaatactttgtaattcatcaactgac

SEQ ID NO: 3815 - DNA, 214 bp, Zea mays
accgggatccctaagtcacctgctgctgcagcttcgaattactctatatttatttctattttcagccaacaagccttcggtcgattggagctctaaatctttttatatatgatgggtgatgctcttttttttgctgtcaaggtttaataatactttggctatttgcctcacatcttgtgcatcctcgagcttactcagctctctctctgacata

SEQ ID NO: 3816 - DNA, 378 bp, Zea mays
gacctgatgcgacgacaaggctgaaattgtgagcaagtaatagtccatccatcaatgtaacactcctgtgtttcttcttggggctgggcatccttgtgatgtttcctttttggaatactttgtaattcatcaactgacagtgcattaggtatgagagaatctgctattatttgtccttggggaaacatttgtctgtttatcccacaatataaaatccggttcttctgtattgtagtttcactttcgtttgtactgatctggcgacaaggaattccatagtactcacaacaacaacatgttccaaggtcacttgtttgttggtttgggtgtgcatacttttgtgtcttgaatgtctgttcatcagctgtattatttata

SEQ ID NO: 3817 - DNA, 114 bp, Zea mays
  unsure (1)..(114): unsure at all n locations
ctggccacataaaagagtaccaggtttgtgcaacattttngactgccatgacgaaggatttcgccatgactccagtattgccaccatatgaagatatggttactccgtatctca

SEQ ID NO: 3818 - DNA, 404 bp, Zea mays
  unsure (1)..(404): unsure at all n locations
tggcccnctgngtgggagcccaaagggtcgagctctctgtgtgtttttcttgctgangagctcggaggacttggaatttcctcttgaggtgccctttttcttcctcttttgccctttccagttggatagccttgttggagaggtgagagaagttgaggaagtcctggctggcgaggatggtcttaagctcgggtcttagtcctttcagaaaacgggccatcttcctggactcggtgctgacatcctcatgcgcgtaacgggccaactttgtgaacttgtgcacatattcactgactgttctcccgccttgagtcagttcccggaatttatcctccttgagttgaactatcccctgnggtacatggtgctcacggaaggctgattcgaattctgcccaggtagca

SEQ ID NO: 3819 - DNA, 440 bp, Zea mays
  unsure (1)..(440): unsure at all n locations
ctcagcttattcaaggtctagatagaactaacattgataagatctttgttttaattgatgctttgaatgagaagaatagattgttagagaagcaagatgatcttttatatgaagagcattgataaattgttagtgcgcaaaattctcttgctttagaagttaaaagaaatgaaatgctttcatgtgaattatctacatgccatgaatctatttctagcttaaagagtattaatgatgatttaaatactaagttagaaatagctaataaatcaagcgcttgtgtagaacatgttgtgatttgaataggtgtaaggattttaatgttgatgcttgtagtgaacacttaatttccattttcaaattaaatgatgaagtggctagtcttaaggcccaacttaagactagcaagaatgaattngacaaactaaaatttgcagggg

SEQ ID NO: 3820 - DNA, 338 bp, Zea mays
  unsure (1)..(338): unsure at all n locations
tgaatgccgngcgaacctcacacctactcgtctgttatatagcgccgcacgcaagaaggcgaagcgccagaggttttacaccaggcgtacacccgcttgcgctcgctgcgcggaggaccgcagggacaaacacgaaaccctgcaaggcgggaccgctgcgtgctgggaaattaaatcgcctctcggcaacgagctcagggaaggtgctctttggaccctccgccccccgaagcttaaaaaactcttctcacggaacaagctccgtacgaaaaacgatctatcaccgcgaaaggggctaccgccgggtctatgcttcgtcccgaaagtctccaagggag

SEQ ID NO: 3821 - DNA, 335 bp, Zea mays
  unsure (1)..(335): unsure at all n locations
tgcaactttaaagaaaatatcgagatatcatctttttttttcnggaaaaaaccttctacggacgaagattatgaggacttgctctgtgcacaggagctctgactacccaatggggtgcttcctgaaccaaagcttcgagataaaaccaaacttggcctatcaagagtaccccgtcaggggtttatatcagaaggagagaactcgggcgagatcagtcagaatgtataaagttcaatggagtcaccattcagcaaaagaagctacatgggaaactgaggattntctacgctctctcttccccgactttctacccaaaagagtcggtacgtaacccc

SEQ ID NO: 3822 - DNA, 243 bp, Zea mays
agaaagatatggttataggattaaaggatgttgtggttgaaaaaaacaaaccattccctggatgttaagctggaaagccagttgcttataacccttctactaaagcttttatgtcaacattaaggccactggaactactttacatggatttatttggacctacaaaatatgtgaatgcccggggcgacctttactggcttagggatgggggtgaactttccagaaacacctggggggtctttt

SEQ ID NO: 3823 - DNA, 185 bp, Zea mays
aacatacctgccactttacaacatcatatttgagaagacaaagcagattgttctgctaaagccggaccgagcctaacaaaagcatctcgaaaacagggattacgcgaaaagccaacgaacgaaatgcggcagagtgagccacaactacgtcacctaacgctatggaaacataaagagggacaagg

SEQ ID NO: 3824 - DNA, 404 bp, Zea mays
  unsure (1)..(404): unsure at all n locations
tgaaccagaaccaattgaccgctgaaatcgcntcttctttgatagaatncatggagcgctcgtcacgccttggccatggcaagcctctctcgcacttggctttataggccttcgccggaagtgtgacgctgagggctcctatggacatcgatatggtgtacgggccttcaatcaaagttggttgggaggacagcaccctgaccatgccgctttcctagcttatgtcgatgcgggggccaccgtcggcccttgcgcctctcagcaccctgatttcttctccttcgccggtgatggggaaggtaaggctcccataatgaatcaccattttgggagggtgattgtccgtgtggcttgccatatggagcttgtataatctcatcgccaaatgcacaagtcccctacct

SEQ ID NO: 3825 - DNA, 400 bp, Zea mays
tgtccctctctgcctcctcgggctaggggccagttgtatgtttgctgcatgccccaaaactgtgagctgtgctggctgctctgagtgtgattggccctgtcgccgtttgtattgggattgtggattgttctgacgtacctcgggtggagtcttactccgaagcccctaatcatctctgaaagcatatatgcttcctcccttctttggcgaaaaatgttgtcagctcagatgtattcatccatcttctggagaagtttctccaaggtctatggtggcttccttgcaaaatattgtgttatgggtcctggtcggagccccttgatcatggtctcaatgacaatctcataaggcactgcacgcgctttagctcttacttgctataaccttttgacgtacacct

SEQ ID NO: 3826 - DNA, 139 bp, Zea mays
cttatgctgcgctcccttaggaacgactatttggcaactgcgtcatgcactgcatccccttggggactgctttagagcttctccctattgtatcttttgcactggatggtgcatgcttagattatacatattacatctg

SEQ ID NO: 3827 - DNA, 423 bp, Zea mays
tgacgacgtaggttgtcgtcagtctcccgctgacttctttcctcctcatggacatccgcagcaatgttccagcacatggagaaaaatgccgcatacccgtgggccaagcgggcacccatccctcggccacgacctcgaccacgaccacgtggcgtgggagatccgcggccaggggagggacgcgaggcaccggcagcagcagcagcatgaccagcagacggacccgcagatgtatgagcacgagagctggagggggctttcctgaggcgccctgctggattgttgggatcaatccacaaaggggtatatgactgatgtcttgtaccttcgtcaaatttaaactgggtcacaacctcaatcatcttcatgataaacggagcatgaagacaccccttcaatggagagcacgcgggatgaatgatt

SEQ ID NO: 3828 - DNA, 161 bp, Zea mays
aaaacgagagaagaaaaaaaaatttttttaagagagaataggaggaagtgataattataaatgtttataaaagaggaatagtaaaaagggtgttgttatagatagtatgtgaagaatcaagaggaagaagatggggagtttgaagagggagtagtttaaga

SEQ ID NO: 3829 - DNA, 426 bp, Zea mays
  unsure (1)..(426): unsure at all n locations
cttacctaanatgataggaatgaaataattagtatagaatgtatatctataaaaatattgcatctcatgtggatttatttttttgttgcatttaatttcgttaatcaaaaccagatttgattctgaatccaagacaaattggaaattgaaatagaagggaaaaataaaagaaaaagaagaaaagaacatgctttgggcctggtctgctttgcaagcccatttctcctttaaacccgctcgccgactgactaaacctcacccactttcttcttccccgggtggatgacacatgggccctgtgtgttagtcgagtagggctagactccgcatgccaatcgtgctcgtgtctcctacctctgccactgtcaggtgggtcccggtgctagtctctcttaagccgcactcgctcaccgccatgtgggcccc

SEQ ID NO: 3830 - DNA, 367 bp, Zea mays
  unsure (1)..(367): unsure at all n locations
actcagcncctctcagagagaaagcncaatacacaaagncttcctctttgacaacaaacaccaaacaccatagtcaagcgacaacataggatgatgtcaagggacagccgggcgctaaaggaggaaaaactactatcaaaacccccccccacgcattgaacagatgcaccaccaccctcaggagagatacatatatgcaaaacagataatactggcttccgcacccccaccatgttgaagaggacttcccatacagaaagaatctaatccctcgagagctcctacacacctgagccagagtctaactgctaactatcccttgaggccaacacaccaaacttagaacaaggtacagtaatgggcacaa

SEQ ID NO: 3831 - DNA, 356 bp, Zea mays
  unsure (1)..(356): unsure at all n locations
tgagttattntattacacaccacactaaaagcgagtgtttttagtaatatnatacaaaccacaggaggcgcaaactcctcccgataagttcttaaacaaaaagtgctaactggaggagcgagtcctcccgcacttcaatcttgtttttcttcttttggaaccaccttggcacacaaacaccaaaagactgctacttcctcacctaaaaacaacgaagggataaaccctgagtatggaattactcagcaagacttacccgactaaagaaaagacatctaagggtatgctggttatattggagtcaagggaaggctttttaataatcaaagactctgttttgcagaaatgcttactaa

SEQ ID NO: 3832 - DNA, 406 bp, Zea mays
  unsure (1)..(406): unsure at all n locations
ctggcttcccggtcccaagcaatggaatgtgaattgactttctcttctattgccgaatcccgttcagcaagcttgccttgcagatgtctaacgtcagctcttaactcatttatacgctgaccgtcttctacccacaccctgtttctgtgacgtagctctgtccgaagctgctccacttgggcttntaggtctccgatggggtcgttactgccgctgctgctctcttcattccttggagccagctgatgccgaagtacgccaataggtccggtggacttacgtgcggttttcctcgtgcacggcggcatatctccataagggggaaaactttattagtatagtttttacacatgatgcatgcataattacggaatcaaccttcgttgataccccacctcctatacat

SEQ ID NO: 3833 - DNA, 412 bp, Zea mays
tgtgaatattcttcatcccaacatgggcaagttggctattctggagccaccccatattagtcttagcaattaaacaggtgttgagttcagctgtgttctcattaaaatcaactaaatatagctaacattctaacactcccttaaatgctattgaatcatcacttcttctaaagacagtaacacctatatcagtaaaaagacagttgtagcccattttgcataattgagatacagaaagcaaattgtaatctaaagaatctacaagaaaaacattataaatagaatggtcaggagatatagcaattttacccaatcctttgaccaaaccttgatttccatccccgaatgtgatagctcgctggggatcttcgtttttctcgtaggaggagaacattcttttctcccctgtcat

SEQ ID NO: 3834 - DNA, 118 bp, Zea mays
gctagatgaaagccttaattcctggccaataaaagagctgcttaatatctgctatacgtgacaggaaacccagaatgacctccgatagcactggaatgaagcgctgatatgtactctt

SEQ ID NO: 3835 - DNA, 253 bp, Zea mays
  unsure (1)..(253): unsure at all n locations
ctaagcacctgcggcatgcaagcttgctgaggcacaggcagcggctacatcatattctgatacctggaccgatcaggctgagctntgtgacacacttcacatgcagctacaaactctctgatgaaagccttctctcctggctcataaaacgaatcgcttacttcttctatacatgttcatgaaccgggaatgaccccagccaatacttgcattagtgacagttccacaacttttacagctatcgctatacgct

SEQ ID NO: 3836 - DNA, 348 bp, Zea mays
acgatgacacacaagaaacagcttttcgcttgatacctgaagcattattggaggacgtaattattatttacgcaatatggagccagggattagaacctgatgtagaaaggttgtgaaacaggctccacgtggactagtagaacaacgttattgggaacgagctgcttcatatataactgttggagctaaccttttgttaccggtgataagcgaggtatatcctgccgaccattgagaacactgaccacctcattagtgatatagtgcgattgtgtgaagaatggcccaactgaaaaaattctcctgaagttatgacttcagaggcctgtccgatgcaagttctgacta

SEQ ID NO: 3837 - DNA, 426 bp, Zea mays
tgtcctagatgacaagtagcagttcgctttagcgaaggctaattatttttcttccgtacgggtcttggtgtcttgattcgcgtgtacgcgtgaatatgatccgcagatgagtagagaggaggatcggcgcgtatcctgaaggacaaaagccccggtggagaattatgaaaatactactactgctggttgcgtcacgactcacgaaccacaagttgatccggccggccggcaacacacacacaggtgcgccagtctctttctagacaagttctagtatcagaacttataatcgagtgtggattggaacgcaccacgctagcaagtggccaataaatgacgccctgcccctgctgattggcattttaattagaggccacgacaaggatcggtcggctagccactctctgaacccgtccagagcttaat

SEQ ID NO: 3838 - DNA, 200 bp, Zea mays
  unsure (1)..(200): unsure at all n locations
agcttatgaagattcttcatcccaacatggtctatgtcggcggngccagagccaacccatgttagtcttagcaattaagcaagtgtcgagttcagctctatcaaaatctactaagtatagctgaccctctaacactcccttaaatgctattgaataatcactttttctaaagacagggacacgttcactctgtgaatata

SEQ ID NO: 3839 - DNA, 434 bp, Zea mays
  unsure (1)..(434): unsure at all n locations
ntacaagaaaatattgaatatatcatccgtcatgcttctgtatatatactctctaaagaagaagagtgagaagcacaacactatgcccacaagctgaaatatccaaagggggcattaatgttcaatggcagcggagaagaggattttttgtactgtctcccggacaacaaggagatatctgtctaccgggagatgagcagaaggttcggatttccaacattataaaatgggctttcagtactgtcgaaggatgaattggtcgacagtttancatataatagtataaaggtatgaaaatcaaatttctgtacttaagaacaaatttttttcatttgcttatacttaatactatgctcctttcgcagggcttgatccttagcaacgccttaagggcacaaaagaatactgaagatgagagctgcactattgctctc

SEQ ID NO: 3840 - DNA, 352 bp, Zea mays
  unsure (1)..(352): unsure at all n locations
ggctctaaccgtcggacataaggcgttggaaatagtggtatgtctgacagcctcccgcggacataacttattctcgacggccgcaaccaaccatcaaaaaaaatggttgtcaacccgtttaccgggcgactggtgggacccacatctgttatgtctgacgctctggcgtcagccatcggacataacgggatcttatgtccgacgacttaaatataaacccgcggacataagcagcccttatgtccgacggctgacgctaggccgtcngacatagcaaatttcacaaattgcccaaaattttgattttaaaaaaactgacattggcaaaacacaaccgattcatgccgacata

SEQ ID NO: 3841 - DNA, 347 bp, Zea mays
  unsure (1)..(347): unsure at all n locations
actcacgctcgtgaagagacttcactccaacatgtgctagtcaatgatgctccagccaccccacgtgagtcttagcaatcaagcaagtgttgagttcacctctatcacaaattacttattatagctgagcctctaacactccctaaaaagcgattgaatcattacttcttntaaagatagtgacacctacatcagngaataaacagatggagcccattttgcataattgagagaccgaaagccaattggaatctaatggatctacaagaaaaacattggaaatagaatgggcaggagatatagctatattgcccaatcctttgaccaaaccttgagtttcattcccc

SEQ ID NO: 3842 - DNA, 409 bp, Zea mays
cgaagccatggtaagtaccataggctaataatatacgaatttattcaagcctggctacgggtgcataggtttcaccgaaatccaaaccttcgacttgagagtatcccttggccacaagtcgagctctgttccttgtcaccacaccatgctcatcttgcttgttgctgaagacccacttggttcctacaacattttgattatgacgtggaaccaaatgccatacctcattcctagtgaagctgttgagctccttttgcattgccaccacccaatcccaatcttgtagcgcttcctctaccctatgcggctcaatagaggaaacaaactagtaatgcttaccaaaatgtgccacacgagatctagtggttacccccttatgtatgtccccgaggatggtgtcgaccgggtg

SEQ ID NO: 3843 - DNA, 179 bp, Zea mays
agcttgtggacccgtagcctaccaattggatttgtcacctcacatgtcagcagatcacaatgtatttcacgtatctcagctgcggaaatgtgtccgcctacccactgaagtgctacctgaaccagatcttgagatagaaccagacttgtcctatcaagagtaccccgtcaaggattata

SEQ ID NO: 3844 - DNA, 178 bp, Zea mays
aacccacgaggacggcccagacgaaaaaaacccgccccaacagaaccaaacgacaacaagagacacagaccgcacccgggaagcagcaggacaaaccaccagcaagagccgcaggaacaagaaccaagcagaagcaggagcgagaacgaaggagaaggagaaagaggaccaagaagga

SEQ ID NO: 3845 - DNA, 432 bp, Zea mays
tctaagggagaacatgtgttacgactaacatatgtcttgtttgagagagacataccttgtgccgcgtgtcaggcaagaaagcggtggggaactactcatcaaagcgagaacgtgatgaccacatcaagaccactggaactccccatatggatgctttctgagcgccttgcttatcttaccatcgagggaaggaagcctggacttgggatcgttgatgacactttctgcctcacctgggtgttctttccgcaggacaagactgaaaccaaaggtaccttaaagcgcttactaacgagagctcaaaatgagggtgagctcatggtgaaaaaaatgagaagcgacattggatctgagtttaagaacctttcagtcgaaacataccttgagaaagaaggcctcatgcgtgatttctctgctccttacacaccacaa

SEQ ID NO: 3846 - DNA, 101 bp, Zea mays
acaggcacaaaccatcaaacaaacaaacaaacatatatatatatgcataacaatattacaccactcgaataacaatataataaaacatgcagaacgaaata

SEQ ID NO: 3847 - DNA, 319 bp, Zea mays
attatagagcatgctcctaacaaacttaaacttttcattttctatctcatactcattaattctactagttactcgtgctatgtgaccattttggtggtaattaaagctacgtgatcatgaatagcatcaccattaatgtctctacatctcatgcaaataaaaatatgatcgacactggatgcacacgcgttgccagcatcttattcatcaatcttaacatgcaacacttgtctctaaatgctttgaattaagaacaaggtcccataaaatgttcaaatataatgccctgtctcccccccaacatatctctgcccgattt

SEQ ID NO: 3848 - DNA, 91 bp, Zea mays
ataaaactaggagaattcatgcaaagaagactcattctcaccatgcttttatttataagaatgaggcatctagctctaggcgttctacaca

SEQ ID NO: 3849 - DNA, 394 bp, Zea mays
tcacacctctggactaactcgacgacatcactcttcgccttttgcctatagaaaccagacctgaaaactttcccaaccaaagttctagatgctgcgtgtactccgcattatccggcgtggatttcatccaatagctgcttcccagtagtcgagaaaatgcacttcatgaagactcccgtcgtaccccttctgtatagtgtgccccctatgagggtgtagtgggccgactgtcttgcgatgcgttctgccacagccttatcatctggttcttcttcattctttatgtacctgatgataggctctctccagtcattaaggtccaactctggttggctcaaggtgttgcattcttctgtctgatctgagggaatactcgggcatgacacttcttgga

SEQ ID NO: 3850 - DNA, 261 bp, Zea mays
gcgagacttagcaggaaagcctgcatctagaccgagtctctcgaagaccaaaacagcgaacccaatgttggacatgtaacacgctgcaagaagctaatgaaccgcgacatgatatgaagatggaccgctctgcaaaaggggatagactacgaagagacacgcccgaatcctggaataaaacacatcaaacttttaaaacaaggctgacctttaaccgcaagccacacagaggagctatttcgccttgcacattagcggaac

SEQ ID NO: 3851 - DNA, 435 bp, Zea mays
  unsure (1)..(435): unsure at all n locations
taaagattngcgatcacaaggaggaccttcgaattatcaaaatattcttcgaagcaacaaaaagtcgttctaaggaacgcaaagtaagtttgctgaagtcacaaaaagccattccaaagggaacacagtgtaatttttctgctccaaagtcgttccaaagggaatgcagagcttacagcgaaaagtcaacgctgataccgcctaagtaaaaggcgaagcgcataaagtcaacgcgaataccgctgaaagtaaaaggcgaagaagctcctaagggaggcttacagcgaaaaataaacgctgattccgctgaagtaaaaggcgaagaagctcctaagggaggcttatagcaaaagtcaacgctgattcaaaaagattatgtgttttatcgcaaggatgtgtgcgtatcttccgaataaacaccatcttacataacat

SEQ ID NO: 3852 - DNA, 381 bp, Zea mays
  unsure (1)..(381): unsure at all n locations
ntaggggtttctctatttgggtgtggctttctctctcataactatatttaaggttaagtaccctactctaggggtttatttgcaaaataacataagaatacaacttgtttgaaaattttgcctattgaatgcattctaggtgtatcacacatattaaatgctcatgcacatgatgttatgctcaacttttaataatagtaacaccaggggtgttacataaaacttgcttataaaccaaagttggatagatattatgacgataaggatagacctacgacatgaagcattatgaaatagatgggtagataggtggttatatctatataggccataaagtctactattgctactattaggatgctggagaagcatctacaaatt

SEQ ID NO: 3853 - DNA, 190 bp, Zea mays
atgcctctcctaaaagattgtctattcttgtttatgtcaaggctcccatgcctcaggataacgagggctatattttatattctgctggttatcctgaggataaaattatgagaattcatgcatacaagactcattctcaccatgcttttatttataaaatgaagcactcagctttatgctatcttatctc

SEQ ID NO: 3854 - DNA, 342 bp, Zea mays
ccttcaaaacaaatgtctggagttcaagaatctatgtgttcaacggctgaagcaagtcttctattctgctggagccagcacccaaaaatttaatccttcgtctaaagaactgcccagggccttccaacatattgaaggggaaattgaatgaccttgaagaagttataactggacatggagacttttgggccctggtagcttctcagggcacaactgtcgccttcttgaaatctggctgcgaacattgaaaggttatcaatagacctaatttcagcttatcaccagcagaacctgataatgttcccaaccttgccccaagcataacaaatatatgtataaaac

SEQ ID NO: 3855 - DNA, 290 bp, Zea mays
  unsure (1)..(290): unsure at all n locations
gatatgcagcatgatgtatgatgcttatgctatgcgaaatgatatgatgatgttatgctatggaaaatgggatttattccgaagatacaccgcacatcccctgcaataaaacacataatctttttaaatcagcgttggactttcactggaagcctcccttaggagcttcttcgccctttacttcagcggaatcaacgtttatntttccgttgtaagcctcccttaagagcttctttcgcctttactttccgcgggattcgcgttgacttttcgcggcttcgcctttactt

SEQ ID NO: 3856 - DNA, 425 bp, Zea mays
  unsure (1)..(425): unsure at all n locations
tggctctanccctaactagctagagcccctggttcaaattctaatacggaaacgaaaacttgcatgttttttttttcaaaaagtttatcatgattctgncaatcggaatgcgccagctataaaaagattggaagtgcatccaagtcgaaacctggtttaatctcttcaattctaacactacttaagaggggaatatactcctgatcacacggtcgtcacgcagccaatccactcgtttttttacccgcgtttacaccctagctaggactccgctactgcgtactactgcgtccgtaaaagcgatggatggccgggcaaccaaatgtcaataaacgttccacacgctcaaccagccggccacttcttagtaccccacaccgtaggggcgtatgccccgaaacacattctggcgcttttgtagacat

SEQ ID NO: 3857 - DNA, 162 bp, Zea mays
  unsure (1)..(162): unsure at all n locations
ttaagtcacctgaagctgcagcttgacttgacccaactgtctnctaatggtcaatcctggaggagactatcagtcgtgtttaggggtgatgggggtacccctaattatggtacccaacagtaaccccagagccttgaagggagcgcatgcactcacttggag

SEQ ID NO: 3858 - DNA, 427 bp, Zea mays
  unsure (1)..(427): unsure at all n locations
tgaagctgacatcagtagctaccgacgacagcatatcgttggccgcttattctattccaactttaaggtaaagcttttttcctcatcttttattttttgtgacgaaacaaaaaatttctgatgaaggctatattgtatagagtatgttgcttaacaaagccttgagaatgcaacaagacctcgaagataaaaagaatgagattataatcgagggcttggaaaagaaaatcaaagatcatgaagcttctctagaaaagaaagatttccttcttcagacaatggagggttcattggcagaagcccaagccaaagttgccagattaaatgatgaactcctccaaaaatcagaagacttcgagcaagaaaggaaaagttttgatgccaggcttggagctgaagttgaaaaaactcanattgcaagaatcct

SEQ ID NO: 3859 - DNA, 295 bp, Zea mays
  unsure (1)..(295): unsure at all n locations
tcccccctnagcgacctataaaactaactattttcaaactcaataaacctccatttcttttctcaccggtcctaaataaccggcgaattaaacgtttgaagcattagagacatacattgggaaaaatacatttggatagagcactgaactgctattgattgacctttgggcattccgccctcaaaccaaaagatggcgtttcatcttgctcaacaaagaagaactggtaactttctcgattggtcaagggagacagggaaactgtcatgaaggatgtgaagaatatttgaccctc

SEQ ID NO: 3860 - DNA, 214 bp, Zea mays
ctctgccactcctgtcacaagaacaaaaaaccgggaatcgggttaaggaccgcccctcctattcccactggccttaacttcccaagccccaaaagcaaagccctcgattcacccacaataattgggccgccgaaaaccaaccttactggaaaacatggtctgaccttggaaggggcacactaaacagcagcttcccctggcccgaagggttccc

SEQ ID NO: 3861 - DNA, 442 bp, Zea mays
tgcaagctttacttatttgattatgcagaagatatgtcttgtctatatgcatgcttaattgtgaagactagcatgggctggccgtggcaccaccgcttatcacatgtggggatgaagaatcttcactcgcttctatagggagaacacgtgatatgtttgactaacatacaattctaaaaagacagaccttgagcatcttgtcaggcaggtaaatatgtgggaggagcacatcacagtatgaatgtgatgaccacatcaagacccctggagctgctacatatggacctcttcggacctgtcgcctatctaagcataggaggaagtaattatgggttagttattgttgatgactcttcccgcttcacttgggtgttcttttgcagataactctgaacccaaaggctcttccgcgctttcttcaggagagctcaaatgaggttga

SEQ ID NO: 3862 - DNA, 217 bp, Zea mays
  unsure (1)..(217): unsure at all n locations
ccccccccccagccaggggatgagctcgtgactgcgaccaagcnacgcagcagcagcgnagcaaacgaccaggagagatactggtataggtacacannaaagaagcgaagacagaggccccacgtgggagaaaacctaagtactgcccctacgggcaaacatgcgacctcacacgaaggcgcaggtgtgcgctataaagagatgaacaaggccccgc

SEQ ID NO: 3863 - DNA, 381 bp, Zea mays
  unsure (1)..(381): unsure at all n locations
tntagctctatgcataccactcacgtgaagatgactatattgtattattctactgcatcaaatgagcataatgtctctcttaagaactctagatgctaactatgttataactaacaaatcaggctaaatagttgccaaatatgttgagggcaaacatagagtcccaagacctgtgtttgggtacccaagattcttgtttctaatgtaaaaggacccaagacccgttgggtacctaaaaacaaggcctaaaatatgttgtaggtttatgcatccggtggttaagttggataatcgatagcaggtgcacaaaccacatgacatgggagaaaagaatgtttcctcctatgagataaagaagaaccccaacaaactcacatattc

SEQ ID NO: 3864 - DNA, 469 bp, Zea mays
  unsure (1)..(469): unsure at all n locations
agctntagatggcaaatggattcccagattaatatttccatagagaggcagcaactatctgagcccttgaccccttgcgtacaacagggagtacttgtctgaaatcacccccgaacacaacagtcctcccaccaaagggcagctcaggccgtcccattatatcacgcatgctattgtctagcgcctcaattgcttgtctcttagtcatcgatgcctcgtcccagataatgagcgatgctttttgtagcaactttgctgtcccgctttgtttcgtgaagctacatacaacaccatcatcaatagtaagtggtatcttgaagcatgaatgggcagtcctccccccaggcaatatggaagccgcaacaccagatgtagctagtgcaactgcaatcttgtcctgactgcgtagtgctgcaagcagtgccttatacagataggtcttgccagtcccaccaggcccatacacaaa

SEQ ID NO: 3865 - DNA, 439 bp, Zea mays
  unsure (1)..(439): unsure at all n locations
ntaacccncccctcgcgagacctttcccgtctccttctatccattatgaatgtgagatcgaatgtcatacttgatgcatattcactttaatggttcccttgtatgatgntactgttgttcccaatttgaatgaatgaatgtatgtatgcttgcaatcgcatagagaacgatccggtcgatgagcccgaagaactcgcaggagaagcccctgagcatcagtcggttggtggaggcaagtgtcccttgacctatctctgtcctattcattctttaattcaccctcccgcattacacatttatacctaatgattgactatgctttgttatccctgtccttgattacctatttgggctggattattattgcctagcttcatgctattgcttaactctaataatgaacatgatgagattatctatgatacgctcgtttcccttc

SEQ ID NO: 3866 - DNA, 451 bp, Zea mays
  unsure (1)..(451): unsure at all n locations
gcttagtgcctnatatagcatcaagtatttttattattatgaagactaacagngcttcaaatgtcgtgagttaaaagttccttcaaaagcaagtttgaaaattgcaaagtcttggatgcgcggaccgtccagcccttgaaggcggactcgtcgcgatccaccataggggtccgaagtctaaccacttaagcagctactttgttcttttgcactgcggaccgaccgggcctttgggccggaccgtccgtagtcatgaccaaagaaggctggtttcgggccagtccctgaattatagcgcggaccgttcggctgtgataagcggaccgtccacaaattgtaaacatgttttggacagggactgtgtgattctttatatttgactactgacagtgcggggactaatcctgacagattatctcatgtttggaccgtccgattataagcggacatt

SEQ ID NO: 3867 - DNA, 444 bp, Zea mays
cattcttctacaaaatagcaatgttcttactgattctaatgatgagaacacttgtagccacattgtcatagttagaagagaaaataacaaaaaaatttaaggatattctaaattgtcttcacaatttgacttacagtatgaagaacatctacagtaacaacatattgcatattctcaattgatgctagaagaacattgccttgaacctccgctttcctttcgtcagctccaacagcaggttgtgccagatcatcaaaaggtagaacatccaatttacataaaagagaataacagacaattgaaatagtagaatgcccatggtattctgaaaaagtaataattacatgtaatgtagcatccatggcagaataatggattggaagatacggattattataatccctgctgttgcggagggcatatgcagcatggctgctgctgcac

SEQ ID NO: 3868 - DNA, 461 bp, Zea mays
  unsure (1)..(461): unsure at all n locations
taagcttcatccttcttcttcacaaatagttcttgacatccncaaagcgaagtgcttgggcgaatgaaacccttatccagcaactcttgcaattgcttcttcaactctgccaactcagcgggtggcattcggtagggcctcttggaaattggggccagtcccggttgcaactcaatggcgaattcaacatcccggtccggtggcattcctggcaattcatcagggaagacatctgcatactcacagaccactgggatcttcttcaggggtaactccgtcatatagaaagcacatgactgagtaagaccctgactaggtataatcaaagtgaaatctccgcagaaaggagaattgacttccacggtacgactggctacatcaagcacaacttggtgcaaggtcatccaatttgctcctagaaaatgtccacatttctcatcccaacacaagaagagtggttt

SEQ ID NO: 3869 - DNA, 466 bp, Zea mays
  unsure (1)..(466): unsure at all n locations
gacacataaaacccacactnagctgattcaaagnnccttgtcggaccattcccatgtttatcttctccatctcttgacatagagtggtgncagaggtcttcaccgtaagacagtgacaggaaaccttaccgtttagtgcatctgccacaacattggctttgcctgggagataatgaatctccagctcatagtccttaataagctcaagccatcgcctttgtctcatattcaattctgactgggtgaagatatacttcaagcttttatggcctgtatagatatgacagacattacccagcagataatgacgccagatctttagggcatgaaccaccgcagctaactccagatcatgagtaggataatgttcctcatgtcggccgaactgccttgaagcatatgcaattactcggtcttcttgcattaatacacagccgaatccactggctgaggcatcacaatatac

SEQ ID NO: 3870 - DNA, 437 bp, Zea mays
  unsure (1)..(437): unsure at all n locations
agctnggaaccataaacacaaaggatagtttttttatctattatcctctttatgaactatatacaaatgcattccttgaaaaaaatagttaaaatgaaataacttatgggaaaaatattgtgtgggttgcataaatcatttttctttgccggaataaatgaataaattaattaatataaattatacttgcatcatgttggagtttgtttgtgcatctaacttanaaatttgaaattcaaacatggatttggactgaaatagaaaacaggaaataaaacaagaaaaataagacagaaggaagaatatatattaaaaataataataatcttaaaagcaaacagtacaagttaaattctcctttaagaacacgcttgatctntnttggaatctggaaactcacaatagaaattgaacttgggttgaatacttgaaatggg

SEQ ID NO: 3871 - DNA, 434 bp, Zea mays
  unsure (1)..(434): unsure at all n locations
agcttgaacctggaagagcatttgctgntttatacgaattgattcaagcctagctacgggtgcataggtttcaccgaagtccaaaccttcgacttgtgaatatcccttggccacaagtcgggctttgttccttgtcaccacaccatgctcatcttgtttgttgcggaagacccacttggttcctgcaacattttggttaggacgtggaacaagatgccatacatcattcctcatgaagttgctgagttcctcttgcattgctgaagcgtccccaatcctctgggactcaaatgtgatacaattactagtcctangaggctagtaaacacatttatacatcagataataccaaatatgcttaaactagacaaacctacataggtggcgaacaactttaagagttggtccacaactcgggacatatcatcagagtg

SEQ ID NO: 3872 - DNA, 455 bp, Zea mays
tctcctggacaagcgctgcacttaccgctgagtgttaatctgtcacatataataacaaaggagcccctggcattggtggagtcaatgtcgctagatctattaaatactggtttagctcttcaaaggccttctgttggattggtccccattgaaagacttcggctgacttcagtacttctaagaatggtaagtttctctttgctgatctggatatgaatctatcgagagatgccaatcttcctgtcaatctttgagcccccttctttgtagttggaggctccatccgaagtatagcttcaattttactcggattagcttccatcccctctgatgaaaccaagcatccaagataattccccttcttcactccgaagacgcatgttcttggatttaacttaacccacttgcctgatactggcgaagtcttctgcagatcaacaatatgaatctcctgc

SEQ ID NO: 3873 - DNA, 265 bp, Zea mays
  unsure (1)..(265): unsure at all n locations
tattaatggaaaatgggttttgntgttananaatgtgtttagtattttttanaatngaaaaggtggtaggaaattgatattgaagtnaatanntttatttgtagtatttataagagaaaataaaaggtgttgtaatgaatgatattaatggtntatttagagtagtatttgttagttntggttagagttgttttttttatatgtagaatgnattaaggttatgtgagttatgttganatagttagaagnatttttattatagtat

SEQ ID NO: 3874 - DNA, 465 bp, Zea mays
  unsure (1)..(465): unsure at all n locations
ccgctngcacacatagctctntngaatacctctgatcatatctcttttatatgctatgactaatgtgttttcaagtttatttcaaaccaagtcataggtatattgaaagggaattggagtcttcggcgaagacaaaggcttccactccgtaactcatacttcgccaccactccgagcaactctctcttctttgggggagaaatgagcatcaaggaaaaggacttcatccttgggggagagagtaaaagctcaaacgcaaaaggacttcgtctttggtataatcttaactcacttatttatgaccaaaggggaagattgcacttcgagggctctaatgattccgtttttggcgattcatgccaaaaagggggagaaatgagcccaaagcaaaaggaccgcaccaccaccaccaaattcaaacacttagtgctttccaaaagtctttatcatttggtatcctattgt

SEQ ID NO: 3875 - DNA, 459 bp, Zea mays
  unsure (1)..(459): unsure at all n locations
agcttcacaagctntgatggatgatcttgttttgtaatgacaatggacaaactgaagagttgccatcagagctcccctgctcgatcaagagaccaaaattttcagttgcagaacttctataagacctacagggtagaagtggttcttatgttgagacagcatctttggtttgtttcttgtgatgtcatttcatgatttggggttctgagacaagatagcttgcctctgaatattgtaaaatttttattgcagtcacaccaacacaccagagctaaacattggaagccaaagttcctttcttccgagaagaaaacaatatctattctaggagacaggagtattgacagtgaggaccccttggagcatgtaattgacggaacatctagcgaggaggaagtatggtaacacaaacactttatattagtcattgttcacttgaaaatagacatactcaacaga

SEQ ID NO: 3876 - DNA, 457 bp, Zea mays
  unsure (1)..(457): unsure at all n locations
tatgaagattcttcgtcccaacatgggctagtctgctgtgccaganccaacccatgttagtcttagcaattaagcatgtgtcgagttcagctctatcaaaatctactaagtatagctgaccctctaacacatccctaaatgctattgaatcatcacttcttttataagacaatgacacctacatcagtgaaaagacagttggtacccattttgcattattgagattcagaaagcaaattgtaatctaatgaattaataagaaaaacattggaaatggaatggtcacatgatattgctatattacccaaacctttgactaaaccttgatttccatccccgaatgtgatagctcgtaggggatcctggtttctctctaggaggagaacatcctatctaccctgcatgtggttgtgcaccgctgttagattcactttgctcctgatgcataacctctaaa

SEQ ID NO: 3877 - DNA, 467 bp, Zea mays
  unsure (1)..(467): unsure at all n locations
agcttctcctttattcctatttatccagcttacttcttgagagtcttttccttagtcgggtaagacttgctgagtaattccatactcagggtttatcccttcgttgtttttaggtgaggaagcgacaaatttttattgcttttgctccaaggtggtatcaaatgaagaaatacaagagtgaagatgcgggaggacttggtcctccatataggactttttgttttaaaactatcgggaggagtttttgcctcccttggtatgtgtaataatactactcagcactcgctttatacctctggtctataataagtaacttgatcttactttctaaataaatgtaagtntatgtaatagcttccgcatttctttatctctgatgttctgtaatgtctgcaagacgggtgagacgttcctggaaaggtaaagaaagataccgaacttgtcaagtgacttangaacatctacag

SEQ ID NO: 3878 - DNA, 445 bp, Zea mays
ctcagcttgaaaatatctggtatggttcgaaagttgagctttttttttgtgtttctgtcaaaaatatccctagaggacaaaatgagcatgctgatttgctagctaagtcagcagcacaggggctgcctttaccttcggatggatttttcgaaacaataaaagcaccttcggtggaacttcttgaaagagcagctcttaatatatcttctgttttagcgaagattggagaaccgagatcatctcttacctccagggtaagtgtctttcagatgacgaagcttataacaagaggatagaagcaagagcttgcccatatgtcatgatagaaggggagttgtataaacattgaggttgtgctccgctgcttacatgcttatctagaaccgaaggtatacagttaatgaaagaaatacatgcaagcctgtgtggattcacattggatcta

SEQ ID NO: 3879 - DNA, 448 bp, Zea mays
agctagcacccagatacataggtccattcttgttacttgagcaatgcggaccagtggcataccgacttcagctccccgaaaccttgtctgctgtgcataatgtgttccacgtgtcacaattgaagaagtgtcttcgggttcctgatcgaaccgttgaagtgactgatgttgtcctggaaccagatttaacatactcggaacatcctattcgagttctggatcaaaaggacagggtcacccgaagaaagactctcaagttctacaagatactgtggaaccagcattcggaaaatgaggctacatgggaaacccaagactttttagataagaatttcccaggctttctagcctcatgtaaattgtaaagcctgtatagttgttgtaataaagaagtaacccccacatcatctctgtcttgtaccaaaaataaagaaataaaaatgtgatg

SEQ ID NO: 3880 - DNA, 477 bp, Zea mays
acggaccaaaaactaagcagttatttcttgatagaccaaaatcctgacttttttaatgaattctagaattcaaaggccaatttgaggagggctcacgaccgctctatcaaaaaatagagcaagggatagtcgatgatgggcacagtagcagccacgacttatacgcgagaaccattaagggcatcatcagcttgagttcgactcctaggaaggtctgactcataatttatcatgaagagaattaatgagtcattggttccggtcaaatggaatcgacaactatatgagtcggtgtctgggtgaaagtgcattcatcccttttatgagttttggtgaatttgataacaacacatttaaaggtctaacaagtttgctaagtgttgaacatgaaattcagtatgatgaacatacttgaatagtgtattatgatcagtgaacaaaagatctacacaatgttaaataaccagcgagacaatg

SEQ ID NO: 3881 - DNA, 336 bp, Zea mays
aacaagtgcacaggcccaattccttcagtaataggcctcatgcaggctctcgctggcccgtaagtctcacagcgaattctagatgatagactaatctacaaatcagacattgcattctcattgctgccttggctggagcgaaagaaatatgattgctaactcatgaaacttttactctatcagagatctgagttacaaccaattatctggtcctataccatctatactaggcaacttgacatacactgagaagctgtaagatttcttatcaccctaaatccggctcatagattgtcaagattttaagtttaactgatacaagtcaccactagaaaa

SEQ ID NO: 3882 - DNA, 443 bp, Zea mays
  unsure (1)..(443): unsure at all n locations
ggacacaaaaactcagctaatgcccctcctaatagattgtctaactctgttaatgttcttagctcccatgcctcaggataatgagggttacattttataccctgccagttatcccgagcacaaaattaggagaattcattctaggaagtctcactctggctctcatcatgcttttatttacaagagtgaggcatctagttctaggcaatcaacccatgctaaattgcctaagaagaaaactcctattgcatcacatgaacataacatttcatttaagacttttgatgcatcctatgtgcttactaacaaatcaggctaggtagntgccaaatatgctgggggcaaacacaaggggtcaaagacttgtgtttgggtacccaaggtgcttggttctaatgtcaaacgacccaagaccggctgggtctcttagaacaaagcctaaa

SEQ ID NO: 3883 - DNA, 439 bp, Zea mays
  unsure (1)..(439): unsure at all n locations
agcttagcanaagaaatttctagaatcattataattgttctcatgcctaagtctggtaaaagattgttcatcaagtggcttggtaaagatatcggctaattgatctttagtattaatgtaagaaatctcgatatcccccttttgttggtgatccctaagaaaatgataccgaatggctatgtgcttagtgcggctatgctcgacgggattgtcggccattttaattgcactctcattatcacatagcaaagggactttggttaatttgtaaccgtagtcccgcagggtttgcctcatccaaagcaattgcgcgcaacaatgtcctgcggcaatgtactctgcttcggcggtggaaagagcgaccgaattttgcttctttgaagcccaagacaccaaggatcttcccaagaactggcaagttcccgatgtgctctttcta

SEQ ID NO: 3884 - DNA, 386 bp, Zea mays
tagataatggtaagcatgccaaagggtggaatccagtgtagttcggctacataaaccctacgtatgtgtccattcaggaccgacctttaccatttaacttacagggtataccaaacttgtcaaaagactatctggagtcaattcagtgactataagtatttacaattctgagagatgtatgcggcacaagaatagacgtcctagatagaacgagtaaagtggttcgacgggaacacactatggttttcacaccaacatagagaaaaatttctcagaataacctctcggaatactcgcaaattcgtgatgctagacggtacatgtgcttttatctcataatatgcttcatggcatccaacgacaaagagagcaatgtgctaacttct

SEQ ID NO: 3885 - DNA, 391 bp, Zea mays
tagccccaagagcagctagagagccgtttggagggccaacttaggaaggccacaacttgccttctgtcggatgggtgcaccggacagttcggtgcaccaccgtacagtcactgtagcagtccggagcgcgatctccttccatatctagcacatccgactgttgtgcctcagggccggctggcgcatccgatagtccggtgtgcccaaccgaccgttgctgcgggccacgcgtcgcccgcggattgcgcagccgaccgttggcgctaacgaccgttggctcaccggacagctcggtgaattatagtcccacgcctctgcgatctcgtgagagcacgttggtcaccgcctgctctacaggcgcaacaacattgttcgtgcccaccggacattc

SEQ ID NO: 3886 - DNA, 435 bp, Zea mays
  unsure (1)..(435): unsure at all n locations
gcnaatgatacaagtgccataaatgcaaaggatcatatttagttatcgcgctcnggaagaatgttccggacaattcataagctggaggtatcataaaaaaagcataagcatttccatggatggataccaacagaacagaacacgttcttgaaatatcccattctcatgaacatgcataacacaatcagnacagtttaacatacaacaaacataaaatggggatcgaaactataatcaaaacatttttttcgaaaatgatcatcaaaatttgttaacgcgcgattgaggatccatgtgtcatgtggtgagcccacccaactttatatcaaaaccacatatcgcaaaaaatgcgtcgacgacagatatccatgtcgacacccgtgtgggtcacaacctcatctgtctggacggaacctcaatatggaaacatacttc

SEQ ID NO: 3887 - DNA, 429 bp, Zea mays
  unsure (1)..(429): unsure at all n locations
agcttgtgaaggttcttcatccncttaagtgctattcggcgatgccacagccagcccatgctagtcttagctattaagcatgcatctagaccggcctcttcttttgcaaaatcaactaaataaagtttgccgtctaatacacccttaaaagctagtgaaccatcacttcttctaaagacagacacatctatatttgtaaaaagacaattatatcccatattgcataattgacttacagataataaattatatcccaaagactcaactaaaaacactttagaaattgagtgctcattagaaattgcaattttacctaacccttgtaccttgccttgattcccatcaccgaatatgattgaatcttgggaatccttattcttgacgtaggaggtgaacatcttcttctccctcgtcatatggtttgtgcat

SEQ ID NO: 3888 - DNA, 433 bp, Zea mays
cgagggtctcggcgtatatgatgttgaggcagctgtcttcttcttcaggaccttggtgagcctgacatcgccgacaacggtgtcgacgacgagcgggtatttccccgggctcggcacatggtcgggatggacggcccgggcgatagtgatgggcttgtcggaccagtctatgtagactggcgccgccaccttcaccgagcagaccttccggcgctcttgcttgcggtgccgagccgaggtattcgccgcatgccctccatatatcatgaagcagtcgcggacctcggggaacccccctgctgggtgatcttcgttcttgtcgtcgtcgcgggccctgccaccctcggcgggtggcccggcccttgggaaatgacgtcgaatcataacgcacttcttgagggtgtgcttgactggtccctgattgtatgggcac

SEQ ID NO: 3889 - DNA, 382 bp, Zea mays
agcttacggagacaaagcacccaggccgtatttggcgccgaccatagcggcctcggagagccagagcctccccaagcggccgccgcggctcccatccctaggggccacttcggcaacgatgccagcaaagtagccactaccgccgcgtggcacgagcgccgggaactgctccgcggcggcggcggcgatggatgggaggtcgacgcttctctcgccatcgccagttccggagccagcggagggacaagatgaaagcgtgcgtggggacggccgcggcgacatcgatgggttcttcttcttgcccttggaaggaggcatctcggcgcgcggtgggcgaagcgggacgggacgggacgggacggcggcgagcctaaaccctgga

SEQ ID NO: 3890 - DNA, 426 bp, Zea mays
taccgcatttgaagcatgagcgcttccccttggcttttgtcttgtcttggtgtcccttgcgacctttaagcaccgtcttgaatcttttgatgatgagagccatctcttcatcattaagtccggccgcctcaatctgtgccaccttgctaggtagcgcctccttgcttcgtgttgctttgagagcaaggggttgcggctcgttgatcggaccattcaaggcgtcgtccacgtaccttgcctccttgatcatcattcgcccactaacgaatttcccaagaacttcttcgggcgacatcttggtgtacctgggatattcacgtatattgttcaccaaatgaggatcaagaacggtaaatgaccttagcattatgctgacgatgtcgtggtccgtcatcgcgtgctcccggagctccttattttgttgat

SEQ ID NO: 3891 - DNA, 451 bp, Zea mays
  unsure (1)..(451): unsure at all n locations
agcttaattccaacaatagatctccggattatttatttattagaatttcatgtgacaacacttctgcaaccagcgaggtcttattgcgtactatattaaaaaggtttggatggccaaagcttggagacccaccgtcccattttcaaatttgttataattaaatggtggctatgcaatgatctttcatcacacaatcttcacttcactgcggatcaacgatcggtacgtcctaatgagttatgttagcagaaacggtagaaaaaacgaagtagatcaacaaaaaaatactcggtaagaaaataatctgtaaaaaacattcgacaaacaaaaaacactctgtaaaaaaacactcggcaaagagtttttntgctgagtgtttttttgacattcgcaaaggacttctttgcggagtgtttntttaaacactagacaaatacaatntaaaaatcgc

SEQ ID NO: 3892 - DNA, 457 bp, Zea mays
  unsure (1)..(457): unsure at all n locations
actcagcttacttgatggctctggataagaggcttgctcatgntttttgagcacactcaagaaggtattaaagaaagacatggttagaggattaaaagatgtggtgtttgaaaaagataagccatgaagtgcttgtcaagctggaaagcaagttgctaatacacatcctactaaagctttcatgccaacatcaaggccactggaactacttcatatggatttatttggacctacaaattatgtaagtgccggtggcaacctctactgtctagtgattgttgatgacttctcaagatacacttgggtgttctttctccatgacaaatctgaagttgcatttatattcaagaagcttgccaagaaagcacaaaatgaatttgattgcaagatcaagaagattagaagtgacaatggcanagaatttgacaacacccacattcatgagtactgtgatgaa

SEQ ID NO: 3893 - DNA, 433 bp, Zea mays
  unsure (1)..(433): unsure at all n locations
agcttctccgtcaacctgagttttttgtttaananacaagatcttaatgcaaaacttgaagccgaagctcagcaaaattcagatttgagaaaactactgacaagtcttcaagaaaaatgcttggaatttagcaacaagtgcattcaacgattaagaaagattttttactcagttggagccagcagtgaaaaattcaccccctcagctgaagatttaccgaagaccttctaacatattgagggggaaattgacgagctcgacgaagtcatagctaggcacggtgacttctgtgcctgagtggcttctcgagggactgctgcagctntcctgaaggctggctgtgatcatgggaagaatgtcaacaggccaaatttcactttatcaccatcaatcctggacgacattcccgatcttgcccgaagtatatcgaaca

SEQ ID NO: 3894 - DNA, 459 bp, Zea mays
tataaaggttcttcatcccaacatgtgctatatggctatgtctaagccagcccatgttggtcttaacaagtaaacatgcatctagatcggcattgtctttattaaaatctactaaataaagcttgccatcatatgcacctttaaatgctaatgaaccatcactttttctaaagaacagtacatcaacatttgtaaataaacaactataacccatgtggcatagctgactaacagaaagaaaattatatccaagggattctaccaaaaagacattataaatggaatgctcggtagtaatcgctattttacctattccctttaccttgccttggttcccatctctaaagatgatcgtgtcatgggaatctttattcttgacgtaagaggtgaatatagtcttctccactatcatgtggtttgtgcattcactatcaataatccaacttgagcccccggatg

SEQ ID NO: 3895 - DNA, 467 bp, Zea mays
agcttatgaagattcttcatcccaacatggttctttttgttgtgccagagccaacccatgttagttttagcaattaagcatgtgtcgagttcagctctatcaaaatctactaagtatagctgaccctctaacacacccttaaatgctattgaatcatcacttcttctaaagacagtgacacctacatcagtaaaaagacagttgtagcccatttgacataattgggaaacagaaagcaagttgtagtctaaagaatcaacaagaaaaacattggaaatagaatggtcaggagatatagcaattttaccaagtcctttgaccaaaccttgatttccatccccgaatgtgatagctcgttgggaatcttggtttttctcatatgaggagaacatccttttctccccggtcatgtggtttgtgcacccgctgtcgagtatccaacttgagctcccggatgcataaaccta

SEQ ID NO: 3896 - DNA, 469 bp, Zea mays
agcttgcataggatcaatggaatatcttctttatctctgtgcacaacatctatccgtagatttctactacatagttccctgaagaaggtccccagctctgcaattgcttcatatacatccttcctcaccagtcctctaaggccagcggctatgattctctgtaggagtatgtggcaagaatgtgttttcagttttccaaccacctttgaaccatcttcacttatgtatcttgctaggttatccgcaaatccatcaagaaacttgatacctttgaggaacttgcaaaactcgactttctgatccttccccaacacatatggagcaagtggagccctgcaggccgagttgccatcttgttgcaagtgcagttcaggtcttatgcccatatcatacaaatctagccttgcattatgtgtgtccttggacttgcctgatatactaagtagtgtgcaaagaaatatttcacata

SEQ ID NO: 3897 - DNA, 83 bp, Zea mays
actaagctaaggacatgttggtcaccacgtttcaagtgtttcagattattctcgttacttctcaggccttattctagtgcaca

SEQ ID NO: 3898 - DNA, 444 bp, Zea mays
  unsure (1)..(444): unsure at all n locations
gtcacctgcggcatgcaagcttctacgtatatatttcgtattaataactagatctaactctaacgatctatggntctagagttatcttggtcttgcagtcgggattgccataaaactggtgtccacgctgaggtgagcggtacgggtgctgagtcccgacgggagcgggggaaccaccatccaagtgacgacgtttcgcgcgctcagcccgcagcatggcgatctcagcacgagccctactcagctcgtctaatgcatggtccagctccgtgtttagcacggcggctaggttgactgtgctgctcaacctatgattgccctcaccgacaggtgagacaatcacgcctcctgtgctgccagatggacggcggtggtaatacttcaggtcaagaccgtcagctgccccatcgaaaaccgagcagtagtgcgaaaacgcacgccgtg

SEQ ID NO: 3899 - DNA, 70 bp, Zea mays
taaaaactcagctacattggatacatactcgtaatagtcggctgcacagttctgcttcacatgcaggggg

SEQ ID NO: 3900 - DNA, 459 bp, Zea mays
  unsure (1)..(459): unsure at all n locations
gctagctacatgcagttcatttcaactttattttattctattattaatattatgagacatatttataagttatttaactttagcttaaactttgttacatatagttcatttcaactaaaacatactcaattaatactattatgagacatggttgtaacttgtaaggactagtttgaaactgaaatctcctccgtgatttttggatgaaatttacgttccaaattagttctaagttatgttgatttttagggtgggtttttagaaacccatgagttcttggttatgtgtagtgcatccattgagtttccttttgaatccattaataatcgcactatgtagagaaattaggctaaaatacatacttaagggctagtttaagaactctatttttccaagagacttctattntattaacagaagataaactaattttccttagaaaaatgaaaattgtgaaat

SEQ ID NO: 3901 - DNA, 388 bp, Zea mays
  unsure (1)..(388): unsure at all n locations
agcnncgtcctgacatacgttgaggcacttataattttattccaaagatacctgttcacatatttcacttggaagacatcgtcaaatcatgcttttgaggaccttctgaagccaaatgcccccatcacatacatatcatcagacaaaatatagatcaatattggtcacatgacaaacacattcagtgacatagcttacaaaaacttcacattacaaccacataatcaaattacacatcacaaacttcacatcaccaacatagcttacataaccatttcaaatagcaataacacaatacattaaagagttcaaatgactaaaacagcgtgcatgacttaataaacagagacgaccaatcaccatactcaaggataaccaccacttggat

SEQ ID NO: 3902 - DNA, 442 bp, Zea mays
  unsure (1)..(442): unsure at all n locations
cttactatatgcaagggttttttgtttntgtcagtgtatgcatagccgaacatgtcttcttttaccaggatttgacgctgcttctttgtacctctggtagagatcctggtataatacctcggaatactcatcctcctgaacctgaatccattgatgggatcaatgatacaggcgttcagactccacaacaatttcgtttgcctcgcacataggaagttgttgtaaatgggatcagtgttcgggtaaaatactgtgatacttgcatgttgtaccgaccacctcgatgctcacactgttccatttgcaataactgtgtggaacggtttgatcatcactgtccatgggtcggccagtgcatatgactggtaagttacacaagattactagggtgttcataggcgtcctcatattacttgaattgatatttacagctactatttct

SEQ ID NO: 3903 - DNA, 490 bp, Zea mays
atccttaagtcacctgcggcatgcaagcttaagatgataattgaaagcccttgggtaattgtttcgcatgttgatcattaaacaattgctgcatttccttccttggaagtgattaccattctttgagtacctattttacttaaaaattttctgatgctttgttgtgctatagaaaacaaaaatgttttgtttttaaacaaagatgatgcttcatatgtgtggtagaactgcccgaattattctagcttaagttcccaagtcacgccttaggggccacaacacacttaaatcgaaataacccatcagtccctcagatctagtcggataaagccacttatccaggatcaaataccattaactcactcgatggtgagtcacagagaaaatacaataaaataggaaacctcgaattaaagtactggagttattacatgaatcggagtttttcaagtaactgaaacgagttcataatttaaattgcaccggatag

SEQ ID NO: 3904 - DNA, 458 bp, Zea mays
agcttgttctattaattacataaattatgatctggttgtagtatattaccttgtttgttggccatgcaacgggcataaaaagagcatcccccatactctctacacctaagtatggtcgtggcagagtactttcccgttttagcacgcgagtcacaaaaacctgtgtgaactcccttccaagaggaacatctcccactttagtggttgggtcggttgagataatatttgctattgcaacaggaacttctgatctcatcatagaatataatatcacttctttaccaacctaataaaatatgcgaactaagattacaaagttcaaataatgaaacataaatatgaagtgatagatgagaaaattacaggattatcatcttgaatttgagatgatccatgatttctttgaggtaccattgttgcaatgtctcgcctgcgactttgctcttcatagtataaca

SEQ ID NO: 3905 - DNA, 431 bp, Zea mays
  unsure (1)..(431): unsure at all n locations
ctttcatctaagaggagcagaaactctggaagaaaatttctttttccaccactcaagtctacgcaatgtagttgaacgggcttttggacttctgaaatcaaggtgggatcgtgtgtgaggactcccaatgtatgaaagaagcgggcaagtgaagatttgtattgcgtgttttgctttgccaactatttgttggactgatgccacatatgaggatcaggaagtagctcgcatggccaagctgattacgatgtgtcaaattgtgtgggtgctaatgcaagtcaagaaattacactagtgagagattggatcgctcctagagtgtcgttgatgtagtcatcaatgggtagtagtgttagtgaagttaagtttgntttcttttcatatttgcgtgggttgcacaaattactaacaatttttaactatacacagat

SEQ ID NO: 3906 - DNA, 402 bp, Zea mays
agcttccctggcacgataagtgatgattgtcttttgcacctcgcagcacgggcgtactgtttgacaatggactggacaagcacgccgtctgccatcggagtggacaggacacattatatgctgagagggcacatcgtctgtcagcggatagacaggcggcgcgtcttctccgcaataaatgcagaggcagcgcggcccagaggccttacgtcaggccccgcccactggtttacatcacgggcgatagtccacgtggcagcatcgggcctccgcctgagcggtgagtggaagcgcactggataaagcctggacacatgtcagtaccggaccctcgcctgtccttgacctagaccagggtattccctgtcccaggaccttgctgcgggtgcctggacctcactt

SEQ ID NO: 3907 - DNA, 412 bp, Zea mays
  unsure (1)..(412): unsure at all n locations
tcggccttcggaggccgaaggttgaaatgaacaaagctgtcttatagtgccaaagagccttcggcgttgtctgctcttttataggaacaagggacttagtacaagagcatattgccttcatggtgtggccgcttgcggagaaatgggaaatgccacaagaaaccgtttaagaggccgacgaaggtggacttgtcaggtttaagtacacttttaaatntgaagataaanttattgagccagacgatgagtggttgaaaagcattgacaatttaagtgatgagctgcttgggacatactcgaaggccgaagatactgcaatgtcagcagccttcggaggccgaaaaaagaaaaggctgaatcgggtatttgatgccatcnggtttgtctaccctgactattgctaccccattcg

SEQ ID NO: 3908 - DNA, 388 bp, Zea mays
agcttctctcttatgacgaaggcactctttattaatgaggatccaaagaggataagagtaaacgtcgaagttaccaccagatgaacagcttcggtcacaatgaagatgatgagtaatgatgatgaccaaaaggggaaaagactacctaatccttaataatttgtattatgatcatgtgtaaatgttgaggacataaatgtacttttgctcgggctacgtcccgtgcctataaatagatgaacactaacaccatactgttaatgatggattgtattcactctctcgcatccaagccttcaagcaatccgaaggtatcattgttgatattattacttattttatggaatgcaaatataaatgaataaaatatatggagtcatcataatta

SEQ ID NO: 3909 - DNA, 466 bp, Zea mays
  unsure (1)..(466): unsure at all n locations
ntattagtacaagatccgaacatgttctggtagtttaaattatataatgaacatgttatgaattctgatagtatctagcaagagaacaatctttctttntttttaaaaggtaaaaaacaaacttccaactactatttgatacaaccaataaaaccatagcaatttcagagcatatcataggtctaaaggttggagttaatccagcaaactaactatcacacttataatttcagttcattagtatctattccagttataacgacacttgtatgcggtagggcctctagatgagtatgtatgaatatgatagagatttttggattggccatcttcttcttgtaaaagggaacaatagtagagttcccaatatgtcagtgacttttttttatcccttttgtacatgcaaaaatccgcaggtcatgagagaatgtatgattgcacaatcaggaaagtatgatgaattaat

SEQ ID NO: 3910 - DNA, 338 bp, Zea mays
  unsure (1)..(338): unsure at all n locations
cagcgangccacagccagcccatgctagtcttagcaattaagcatgcatctagaccgacctcctcttttgcaaaaacaactaaataaagtgtgccgcctagtacacccttaaaagctagtgaaccatcacttcttctaaagacagacacatctacatttgcgaagaaacagttatatcccatattacacagttgactcacagacaacaaggtatatccaagcgactcaactaagaacacattagaaatagagtgctcggatgaaatagcaacttttcctaaccctttcaccttaccttggttcccatcactgaatatgattgaatcttgtggatcctt

SEQ ID NO: 3911 - DNA, 425 bp, Zea mays
tcgaacactaagctgaagatattccatatcctatgccctatgtcaataaatcaacctccctctatatataactattagatgttccacttatcatgtgtattactccacaggatcgtaactcggcacatggacggatttctgatttcaatagtatataaaaatgacggctctttaatcttaaccattgacaacaacatacagcatgagggctatgacttcgattctcatttaagtctgcgttattagtgatgagagcgatgatgctacagacaagtccggtttatgagtcatcctttgtctgtttcatactgtcatagaaaaaatgtcgaatcacatattatgcatgactcaacttgcggatgatactctcgaatggcatttcaaattattcgccatgtgtgagcctataacagattgcgaattga

SEQ ID NO: 3912 - DNA, 449 bp, Zea mays
  unsure (1)..(449): unsure at all n locations
agcttatagtctattactacacttgtncttatgagctaaanagngaaacacctccaaattcgtggacaaattgttaaaataaaatcacaaattttgatgatgatgatgagagcaagtacaatggttcaaccacatgctagttgtgagccacttctatgtcacttttagtcagcaatttagatttctcatacaataagttatgtaacacccttaatttggggtatacattttttctctgatatctaccaaattcaagtgttactccttttttctatctctatagattccctttctcttcgttttaatagaattctaggtatttatgagagaggtgtactattttttagaatattaaaacctaggggagacatgaaatgttgcatcatactgagcctanntttttgtttgatacacatgtttgaaatatttaaatttgaaattttgtcatg

SEQ ID NO: 3913 - DNA, 438 bp, Zea mays
  unsure (1)..(438): unsure at all n locations
taccgcatttgaagcatgatcgctntcccttggtcttatgtcttgcttggctgtcccttgcgaccctttaatgtcgtcttgaatcgttggatgattagggccatctcttcatcattaagaccggccgcctcaatttgcgccaccttgctgggtagcgcctccttgctccttgttgccttgagagcaatgggttgaggctcatggattgggccattcaacgcgtcgtccacgtacctcgcctccttgatcatcattcgcccgcttacaaattttccaagaatttcttcgggcgacatcttgatgtacctaggattttcacgaatattgttcaccaagtgaggatcaagaacggtaaatgaccttagcattaggcggacgacgtcgtgatccgtccatcgcgtgcttccatagctccttattttgttgataggatcttga

SEQ ID NO: 3914 - DNA, 335 bp, Zea mays
agctttaagctccactttacccataatattcttggagcctctcctcccttcctcagctgcttgtaacacctactacgagtttgatcattaatggtgccggtagcacaagccaccaatgactggaagtagggatgttctgtcctaaccatgtataaatatgctccctccacacaccctctagaacttgaaacacacacaataaatctacttatctgagcgaggtatgaaacacccacatctatctactgaatgtgtgcgcggtacacacaatatttatactggttcatacggaacgttcctacatccagtcttcgatgactcacactaccggcacc

SEQ ID NO: 3915 - DNA, 470 bp, Zea mays
tcggtgatgggctaaaaattttggcaagaatacagtgcatttattattgtatgctgtggtaacttcacacctactcgtctggttatatagtgctgcacgtaagaaggcgaagcgccatagtttttacaccaggcgcacacccgcttgcgctcgctgcgcggtggaccgcaaggacaaacagtatactctgcaaggtgggaccactacgtgctgtgaaattaaatcgtttctcggcaacgagctcagggaaggtgttttttggaccttcggctccccgaagcttaagagacttttttcacggatcaagctcgttacgaaaaacgatctatcaccgcgaaaggggctactggtgggtctatgcttcgtcgccgaaggtcttcaagggagaagcagcttttgctgacgctgtttgcatgagatggccgaatgttcctttccatgaagcttctacagtgtaaaccgacttatag

SEQ ID NO: 3916 - DNA, 451 bp, Zea mays
agcttagagtaagtactgtaacacactcttttttatacagtatatcagaaccaaactagataagtaaataaatcagtgttttatttttctgggataaccttaatacaactccaactgccgtactatccgatcatcacatgcaagtttaccaatcagatctaccaaaccaattatcatttcaattctgaaggcaataagtacaaagacaccttttgagacagtcagcgtcatcatgctaatagtcatagaaatgctacccatcaaagctacacaagaaaaggttgggacttatcattgcttcatcgtcagtacctctaaaactaaggctatagatcgtgcatatggtcgtgtaaaacactgttttgcattgagattgtttatagagtggtgtttaaaaataagagacgtgaatgagtaagctttaaaaataatagacgtggatgagtaacct

SEQ ID NO: 3917 - DNA, 465 bp, Zea mays
  unsure (1)..(465): unsure at all n locations
tctccccagatggaacatggattgtcttgggtccaaccnctcctcttaagaacttattcacaagacgaatggtggcaaaggttcccctagccatgatctcatcatttcctcttcggctaccatatgagttgaagtccttcctttcaacgccacgctccttcagatattttgcagctgggctgtctgggtgaatgtttcccgcacgtgagatgtgatcggntgtgatgctgtcaccaaaattcaaaaggcaatatgcatccttcacaggccgcgggccaggaggactcattttcatatccttgaagtaaggtggctcatggatgtatgtagatgatggatcccatgggtagagagtgcttgttgagactggcagctcattccacataggatttcctttggtgattgactcatatgtgctcttgaacatgtcagggaacacacttgacntgacaacctggcagaatt

SEQ ID NO: 3918 - DNA, 252 bp, Zea mays
  unsure (1)..(252): unsure at all n locations
agctggtacctcaacctaggaactctggttagttttntccggagttccgacagtcaacggcatgtagatgtgtccgagtgggtactctccttcagtcgtcacaatgccgaagaaaggagtgtctgaatcgtggagctctttgagtgggactcccaagccttggagtgtccgggggaaggtgacttttatcctctatcgccctgcccctccttccattttaccctactctctgtgaaaacctggtcagcgagt

SEQ ID NO: 3919 - DNA, 423 bp, Zea mays
tgcagcataagataagagtatatatattctccaacagcactgaatgattatcatcttcactgatctccaacacagaccacacagcttctcaaataaagaggaaaggagaataatgggtttcccaactatataactaactctattgacataatatggtaaccaaaatgcatgggatacccacactctggtgacaatcattacaaagatccaaacccaacatagttcatcatgacaaacataaatgcacaggatatagcaaactaccctgtctaactaaaactaactaagaccgagactaacgctaagactgaagcttccatgtatatatttatttcgtattaattacaagatccaactctaacgatctatggttctagagttatcttggtcttgcaggcgggattgccataagactggtgtcca

SEQ ID NO: 3920 - DNA, 445 bp, Zea mays
  unsure (1)..(445): unsure at all n locations
agctttggtncacatggacaactgcgaanagtacttatgcgttgcgacgatataccaatcatatttcataccaatcatgttttgaggtggttcatgaaggatatgggtatagtattaaaaattaggagggagagagtcttggactttctggtaacttttgacctattgatatccaacactntctttaagaagatagactcctagttacttataatagtgctcaaaactagccaaattgactttgtcctcacaaggataaagaataaacgagtacgtttagattataaagtgagttgtctctcaacgtaagtttgtggtggcgtatnttattttagcccgtagggataaaacaaggcaagattgtaagaataaagtgatggaaactgaaaggggagaagacaaaagtcttcgagttaataaccatcacagagggttcttgaaagga

SEQ ID NO: 3921 - DNA, 298 bp, Zea mays
atggcccgtcttaatcccattgcccttaacttccgaagccccaacagaagtgcttccgactcagcaatattatttgtgcaaccgaaaacaagctaggctgcataacatgctatgacttttgaaagtgccactaagaccgctaccgctcctgcaccgaaaggtccccaagaaccatcgcagaacaaagtccaagcatcggcatctttgattacttcttcttcgtgagcccacggcgtccaatcagcgatgaagtcagctaacgcctgagactgaattgaggatcaatgcacaaagacca

SEQ ID NO: 3922 - DNA, 471 bp, Zea mays
  unsure (1)..(471): unsure at all n locations
cttaagcacctgggctgcagctatgaaatcttcatcaacgtttgttgtctgtgatgccagagccaacccatgttagtcttagcaattaagcaagtgtcgagttcagctctattaaaatcaactaagtatagctgaccctctaacactcccttaaatgctactgaatcatcacttctaaagacagtaacaactatatccgtaaaaagacaattgtagcccattttgcataattgagaaactgaaagcaagatgtaatctaaagaatctacaagaaaaacattggaaatggaatggtcaggtgatatagcaattttaccaagacctttgaccaaaccttgatttccatccccgaatgtgatagctttttgcggatcatggtttttctcataagaggagaacatccttttctccccagtcatgtggttggtgcacncgctatncaatatccaacttgagcccccagatgcataa

SEQ ID NO: 3923 - DNA, 469 bp, Zea mays
  unsure (1)..(469): unsure at all n locations
tctaaagggagagcacattttgggactaaccaatgttcattttgagaaatacagggtttgtagcgcatgtcaagcanggaagcaagttggtgttcatcatccacacaagaacatcatgacggccgacaggccgcttgagctactccacatggatctattcgacccaatagcttacataagcatcaaggggagtaagtattgtcttgtaattgtggatgattattatcgattcacttgggtattctttntgcaggataaatctcaaacccaagaaactttaaagggattcttgagatgggctcaaaatgagttcggcttgaggatcaagaagataagaagcgacaatgggacagagttcaagaactctcaaatcgaatgcttccttgaggaggagggcatcaagcatgagttctcttctccctacacgccacaacaaaatggtgtagtggagaggaagaatagaactcta

SEQ ID NO: 3924 - DNA, 448 bp, Zea mays
  unsure (1)..(448): unsure at all n locations
ccggatccttaagtcacctgcggcatgcaagcttcggcgtcttagtttatttcttttttctgagcccctggcgtccaatcagcgatgaaatctgctaaaggcagggactgaattgaggatctatgcacatagtcaatagtaaatttgttaagctccgtagcccattttccaatccttcaagtagcttctctgttcctcattatgtccttcagaggctatgacgaaagaacaattatgtgatatgcttgaaaataatgtcgaagcttcctggaggccattaacatagcatataacacctttttcaattctgtataatttttctttgacaaacttaaaacttcggaggcaaaatagactaggagcctgcctttgattnggccatctagcttctcctgtaccagagccgcactaactgcgtagtgcgaagctgccacatataagagtaatg

SEQ ID NO: 3925 - DNA, 483 bp, Zea mays
  unsure (1)..(483): unsure at all n locations
ggacacaaaaactcagctttaattaggagtacgccttgaactgcactttctattctngtacacgaactccatccattntgcagcccagtctatagacataggactaagatcctccaaccagtccatccctagtataagatcataaccgtccaatggcaagaacttgaaatcagtataaaaagttattccctcacatagccattgacagcttggtacccatttttcacaccacaaatagtacccgtcagcaactttgactttaacaggtctgaccaaattctgcacccctttcactacttccatcagatgggtacccataaaactagccgagctaccagaatccaccaatacgagcacctgttgacagtgaatcgaggcccataaccgaatagtcctggtgtttncactaccatttactgccgccgtagacaacgccaacactgcctcctcgttctcagtttcataatgctcatcccttggatc

SEQ ID NO: 3926 - DNA, 464 bp, Zea mays
agcttacaaaatgcccgattacttcctcttaggtcattttagtatatctaggattaccacgaattaattgaacttgagtagggttaaggaaaataagagatcttagaataaccttaaccatttcatggtcatcccactttacgctcccgaggttgcgcacttggttcaccaaggtcttgagccggttgtacatgtgttgtggctcctcccctttgcgaagccggaaccgaccgagctctccctcgatcgtttcccgcttggtgatcttggtgagctcatctccctcgtgcgcggttttgagcacatcccaaacctccttggcgctcttcaacccttgcactttgttatactccgatcctctctacttaaagaggcgaggagtatcgttgtcgctagagagttgaagtgctcgaattgggccacctcatcctcatcataatccttatcccctacagatggtacct

SEQ ID NO: 3927 - DNA, 360 bp, Zea mays
  unsure (1)..(360): unsure at all n locations
gtgacacttcgagtgaaaccagagctaactcttccagcaacgtatgtttgtaatttgtttctggttatctatgcgaatttgatctcccatcttttcatgtgttggctgttaatgtgtctaatcatttcaaagcccttacaaatgccttactttaagctttcttcatgaatgccaattttgtcactgaaaggtacctctangtcccacatgtgaatgtcatctacttgctagaaattttgattttgtgatcacgaagcttattttgtttacaactgaaagtgaaattctttttatacgacaagtggacaacataaaaattagaccctgaataattcacaacagaccaaatgattccttttg

SEQ ID NO: 3928 - DNA, 466 bp, Zea mays
agcttcgtctatacactcgcgtagtgtttgtgctagccgaaggtcgctagccttggcgtggagaaagcttaaaccctaaattatgtgtgtgagctttgtgggcatgttagtaaggtgcaagccgaagcgtgcaaagaagttttgtctattcgaaggagaagaagttcaagacttgtgcaacatgatagaaagaagaaaggcaatgatgcccttgtaatttttgtaaaattatctgtgtgagctttgtgggcatgtacaacttccctgtaaataggttaacagtgccatgcataaattcacttttcgacggtcttaagtttcgtctagcttagccttcgaagtaccttccagttattcctcgtgtaaagccgaaggtatgcttgtaaatttatattgtgtgcaaaagtatggaaagaaaaacgctaaagcacataagatgagtaaaatgcattgtattttatcactc

SEQ ID NO: 3929 - DNA, 456 bp, Zea mays
  unsure (1)..(456): unsure at all n locations
tctcatgtggggacttaatgggaattctgaatttcagaattcttaaattcagaccttgagccaaagatcagggatgttcaccttgatccctaactcgaatcctaatggtcccattgacaaaattgtgtctaactaacccctctgtcgtgtgccagaaaatggcattgggacgcaagccctagacacgacaaaaccttggatttgcctcgggtttgggcagggagacagaccggatttcctggctccatatctctgcaaccagtaggcaaaatcctatgacccccacacaagattggtagcttgtagggaggagaagaggttntgtgcactgaccaaggcgagagcaggctcggatgagcgaccgcacgcgccagaacttgggcagaacgcacgggcacacttgttcgacccttttcggcacgccagagcttgcccaacccgcgcgcgcgctcaccc

SEQ ID NO: 3930 - DNA, 407 bp, Zea mays
agcttgctcaataacatactctgtatattatgttctcttcgttagaaaataccttcgttgttaaaaataatgaagagtcaaagaaaagtttttaacttgaaattggaatagaataaactaccaacgatatgctgtcgtcggtagcggctgatatcggtctcaagcttcggaaaaccaatactcttcgacagagtaccgataaccttcgccccggtttggtctcggacacaacctaagctctcatcgtcaatgccgccgaagagtagcacccctggttgatacccgtaggatatggcatagtctccaattcttctttttcagctttcgacaattcttgtctcaattaagtttgaaagttgaaatcttctgaagtatcttcgactatttccttttctttcccaggcact

SEQ ID NO: 3931 - DNA, 469 bp, Zea mays
  unsure (1)..(469): unsure at all n locations
tgctattnttgtntatcttcctttcattacaaatgattacttttatccttccgggatctgagtagcaatcccaaggtaagaaaaccatatatcttcgtaggatgaacgatcccgcaaacacgagtgtctgtccaacaaaaggtgaaaatgcatgagaactatacctctatttataggggcagtgcgacgtacaactttgtataaaattacaaccatgacccaaaatcctatacacatgaactattgggtctgttgagggcaacatcgtcttttccttttgaagacgtggtgtgcacgctgctcgacttctttctcacttctttgtcgctccaatcgtgccaaaaaactttagttgagtgtcataaccgaagcttccccgaccttcggctatagtcactatgacaaagggttgtatgacagtgacatacaatacaatgtngaaacttcgtagtttgtgtaccttcagcta

SEQ ID NO: 3932 - DNA, 446 bp, Zea mays
agcttgaagccatggtaagtagcataagtcttttatatacgaattgactcaagcctagctacgggtgcataggtttcaccgaaatccaaaccttcgacttgggagtatcctttggtcacaagtcgggctttgttccttgtcaccacaccatgctcgtcttgcttgttgcggaacacccatttggttcctacaacattttgattaggacgtggaactaaatgccatacctcattcctagtgaagttgttgagttcctcttgcattgccaccacccaatccgaatcttgtagtgcttcctctaccctgtgtggctcaatagaggaaacaaaagagtaatgctcacaaaaatgtgcaacacgggatctagtggttacccccttatgaatatcgccgaagatggtgtcgacagggtgatctcgttggattgctagatggactctagggtg

SEQ ID NO: 3933 - DNA, 470 bp, Zea mays
  unsure (1)..(470): unsure at all n locations
tcaaaattatatatggggaatgtggatgtgtgtttgcataataaagtttcactaccaattgtttgttttgatgcaacaggaaccacatgtacatttaggtcataatagtatgaagcaatcataagatgtcagacatgcacccatcttttggcagttaaggctatctcctgcagcttactcatccccatattcaaacttcgctctacgaacaatgcagtctacagcgcaaaacagtacaaaacagtgttttggataacgaactactgaagacggtgtaaagtgcagaaaacatactttttagattgagcagactcagatagatcaaagaattccatagaaactcgcccttcaacagaactaagagcatatcctgatgcaagacagaaaaaactgagatcagcatacagcttatgattggtgttatatacaccatacaataaatntgaaaatgaaataaacaatattggaca

SEQ ID NO: 3934 - DNA, 464 bp, Zea mays
  unsure (1)..(464): unsure at all n locations
agcttaatgccggaattgctatcaaggaatctccctcactcttctcatccccccattgtctcatggcaaagggagatgctaaggtaaaaatcatcatcgatttaaatgatataaaagatgatgatgatatcgatgatgttgatgatgatggctattcatatgatgatcttgttagaatgttagatgaggccgatgactacatgcacaaagaaaaagaaaaatttaagaccttgaaggaattgtataaaaacctccaagtgtcttttgaggagctcaagacctctcacaatgacctcaaagaaaattgtgagaagcttgcggatgctcaaaaatcatctattgtgcatgaagttgaggtggtcactaaagatgttggagtcacttgtgacttacttgatagtcttacgagtgaaccactacctactaactctatntgtgataaatgcaaaatttctctcaatgat

SEQ ID NO: 3935 - DNA, 453 bp, Zea mays
agcttctatagtcgacacacattctccttgttccatctttcttgggcacgaatagaactggggttccctagggagacgaactagggtgaataaaatctttttctagtaattcttctatttgtttcttcagttcaattaaatctttaacatccattcggtaagctctttttgagatcgatggagtttcgggtaatagttcaatagaaaattctatatcacgatcaggtggcatacctggtagttcttccggaaatacgtctaggtattcacacaccattctgatgtgctccaaagatttctcctctaattgatctaccattgcttctgctgttgctggcatactgacattgacttcaattctttctccttgcggactggttaatgtagccttcctctaggcacatgatattactccatcatactaggtcaagtagtctattccaagtatcacat

SEQ ID NO: 3936 - DNA, 438 bp, Zea mays
  unsure (1)..(438): unsure at all n locations
tctaaagggagagcacantttangactaaaatgttcattttgagaaagacagggtttgtagcgcatgtcaagcangaaagcaagttggctcccaccatccacacaagaacataatgacaacggacaggccactggagttactccacatggatctattcggcccgataacttatataagcatcggcgggattaagtactgtctagtaattgtggatgattattctcacttcacttgggtatntcttttgcaagaaaaatcacaaacctaagagactntgaagggattcttgagacgggctcaaaatgagttcggattgagaatcaagaagataagaagcgataacgggacggagttcaagaactctcaaattgaaggctttcttgaggatgagggcattaagcatgagttctcttctccctacacacctcaacaaaatg

SEQ ID NO: 3937 - DNA, 355 bp, Zea mays
  unsure (1)..(355): unsure at all n locations
tctcacagcaccactctcactcttgagcttacgatgtctntttagatggctcgtatcaagtgcaccccatgtaagtctgagatcccctctttgccttctcatttggcggagcgtccccagcgtcccacggtgttaagccactctagtcacctggagagactgcatctcctcctgcacgatgagcaggagcgcccatgccacgaacacgagcaagagcaccaagactcttccccctcgcctcagcaagaggtggagtctgaagggccaccttcccctgcacctcacctagagatgcccctgcaccaccacagggcatcccggctgctggaggagaccctgacagatatggagacta

SEQ ID NO: 3938 - DNA, 488 bp, Zea mays
ttaagtcacctgcagcatgcaagcttgtgaaggttcttcatccccacatgtgtcttgtcggcgatgccacagccagcccatgcaagtcttagccattaagcatgcatctagaccggcctcttcttttgcaaaatcaactaaataaagtttgccgtctaatacacccttaaaagctagtgaaccatcacttcttctaaagacagacacatctatatttgtaaacagacagttatatcccatattgcacaattgactaacagatagtaaattatatcctagtgactctactaaaaacacattagagatagagtgctcattagaaattgcaattttacctaacccttttaccttgccttgattcccatcaccgaatatgattgaatcttgggaatccttattcttgacgtaggaggtgaacatcttcttctctcccgcatatgggttgtgcatccgctatcaataatccagctagaacctccagatgcata

SEQ ID NO: 3939 - DNA, 464 bp, Zea mays
  unsure (1)..(464): unsure at all n locations
tgaagctgagttatgcgctatgacgaaggaggatcttgctgattgctttgcatacaatagcctgaaggtacgagaactgcgtgtttggaaatttttttaatttgcaactcattcntttattcttataccgactctnttacatacagggtttaatactaagcaacgcgttgagagctcaaaagaatgccgaagacgagagctatgatattgcntttaacaacctacgatcagaggttattaagctgagaaacgaagctctggaaaaggataaaattctgcttacattggtggacaatgtaaaagaggacgaagctgcctcaaagcccaggctgaagcgcagaaacgcgaatttaaagatctttagaagcagctggctagagctaatgaagaacgtatgcttgaagagacaatacgagagcttagtgaccaatggggcgatcatttataaattaatgtaaagagct

SEQ ID NO: 3940 - DNA, 404 bp, Zea mays
aaaatattcctcgtggagaaaatgaatatgttgatctattggccaagtcagcagcgcaggggctgcctttaccttctgaagtatttttcgaaacaataaaagcaccttcggtcgagctttttgaaaaagcggtcctcaacatatcccctgtgtatagtgaagactggagaactgaaattatctctttccttcagggtaattgtctttcacacgacgaatcttataacaaaaggatagaagcaagagctcgaccatatgtcataatagaaggagagctatacaagcgtggggttctgtctccgttgctcaagtgtttatctagatccgaaggtatagaattaatgaaggaaatacacgcacgcctgtgttgatctcacattggatctaggcctttgctcgggaag

SEQ ID NO: 3941 - DNA, 444 bp, Zea mays
  unsure (1)..(444): unsure at all n locations
tactaagcttcttcaggctggacttctgttccatatgagagagtgtttatttttttgctgaagatctaccagatctttcttcactagatcacccctgaagctataatgaggatggagatttttgtctgggctgagtcacgggctatagcccaacgcgaagtgcttctgcagtaagcacgaactcttatattataggaaggctgctggcaaagaacagtactacaacaacttcgattgttatggatttattgctcgccccaacgcaagccatccggtctcaacgtttcggaagagatggcccatagcctgtatggaaggaaaccatcactaattctggtgagggtaatttagtccgattgaagtataccttcagggttggggataaatatgacgagccanacgatgactggctgaagtgcattgaagctactagcgacgagctac

SEQ ID NO: 3942 - DNA, 458 bp, Zea mays
  unsure (1)..(458): unsure at all n locations
gcagcaacttgtaggcaagcaagctatatttantttgctaacgctcatcctacaaaagctcttatgtcaacatcaaggccactagagttacttcataaggatctatttggaccaacaacttatgctagtgctggaggcaacctctattgtccagtgatagtcgacgactttccaagatatacttgggtgttctttcttcatgacaagtctgaagtcgcatcaatattcaagaagtttgctaagaagactcaaaatgaatttgacagcaaaatcaagaagataaggagtgacaacggaaaggaattagacaacaccaacattcatgagtaccgcgatgaaattgggatcaagcatgaagtttccgcaacatacacacctcaagagaatggagctgtggaacgatagaataggaccttgatcactcttgcaagaacattatcgatgggttaacacacctg

SEQ ID NO: 3943 - DNA, 455 bp, Zea mays
  unsure (1)..(455): unsure at all n locations
agcttgtacacatgattcacaaatgacacaaggtgttgtgtgncttctatctttatcatcttggctactaaatcttgtaaacaccttcttctagcctcgttcgacttctgccttcgtcttcccgtatcgttatgacaaagataatgcctttgtcctttttcttgatctattgcgaaggtaactagtgtcgaagcacccgcaacacctagagatgtgtcgagaaataatggttatatgtgtttttgaggaccttcgaaagacaaaggcccccaacaggtatggttctaccacttaatcatttgtttgagatgcaaacaatgttcatctaagtgctacggatcttcttaggttgagccaaaatgaactaaagaagtttggctaggtatggtcaaacttgggacaagctcggtctcaccgcacagtcacctgacacatcctcgggcgagtcggaacta

SEQ ID NO: 3944 - DNA, 444 bp, Zea mays
agcttctaagggagaacatgtgaatgtctaccatgtttatttcttattgatataccttgtgcagctgggcagcagggtaacaggtaggaagagcgcatcacatcacgaatgtgatgaccacttcaagacccctggagctgctgcatatggatctcttctgacccgtcgcctatctaagcatagggggaagtaagtatgggctagttattgttgatgacttttcccgcttcacttgggtgttctttttgcaggataagtctgaaacccaggggaccctcaagcgcttcctcaggagggctcaaaatgagtttgagctcaaagtgaaaaagataaggagcgacaacgggtccgagttcaagaaccttcaagtggaggagttccttgaagaagaagggatcaagcccgagttctccgctcctacacaccacagcaaatggtgtggtg

SEQ ID NO: 3945 - DNA, 369 bp, Zea mays
  unsure (1)..(369): unsure at all n locations
agcttgntagagacaagtattctcatttttatttaattatcaacgagctcaattccattgacattaataagctaggcgatgcgaatattgtgaggaagattatctccctactaccacaacaaaaatataggagcatcatcactattcttcacaacatggaggacttgagtacaataaccccgaccataatgattaggaaaaatcgcggcctttgggatgtcgcgaacaatgtgtcaaggagaggagccaacttcctcaagaccatatgcttttgcatgtgatgaaaggaagggtaaaaagaaagttctcactccaagttcctcaagtgaagaagaggacgaagaagaaagggatgacgatgaagataat

SEQ ID NO: 3946 - DNA, 438 bp, Zea mays
ggaccttaagtcacctgcggcatgcaagcttcgtcgtctgaaagaaaattacttttttgtaatagatgatctcagttctccaatcttcgctataaacaggggatatgttaaggattgctctttcaaaaagctcgaccgaaagtgcttctattgttttgaaaaatacttccgaaggtatatgttggggaccttctgcattcgaaggtcctcaaaaacaggatttaacagtatttctggagtataatgtgtgaacaggtatcctcggactaaagtcggcattacatgtagaccagaataatactaaggttgctacatagccgaaagtgcgagcaagaaagctcttgcgtgacagcaaagagtggaaccgacttaaagatgaaaaggctattcagacctcgacagactactatagaattgttatcaaatgtaaagggcatg

SEQ ID NO: 3947 - DNA, 366 bp, Zea mays
tcttcactattaacaggagatatattgagcactgctctttcaagacagtctaccgcaagtgcttttattgcttcaaagaatacttccgaatgcaagggcagcccctgtgccgctgacttggctagcatatcaacgtgctcattttctcctcgtggaatattcttgacagaaaacccttcgaaggaagctttaagccttctgaactatatccaaatatatctcaagcttctgatctcttgctttgcaacttttgtcaacatgaccaaaaataactcgtgaattatgtttgaaaaccgcccttcttatccccattgccttcaacttttgaagcgcccaaagcaaaagcttcgattcacattattattt

SEQ ID NO: 3948 - DNA, 384 bp, Zea mays
agcttcagctcgtcatccttcagcttcattattctgtacatattaaaacaaaatgagaaaggtgctaacttcaaggagaaggtaaaagtaacaagtataagtctctcaccggcttaaggtggctccgagcttcgtcaccagccatttttcgcccgccgtttacccaaatctgggtcataaatctgtttcctatgcttcgggctaagcttgggatgtcaaccaaatctgccggtgacaagctgaagtttggcctatttacaatcttcccatgtgtacagtcggccttcaagaaagcggtagtcgttcctcgagaagctagcagggcgcagaaatcagcatgcccagcaataacttcgtcaagtgcatcaacctcgccttcaatgt

SEQ ID NO: 3949 - DNA, 472 bp, Zea mays
  unsure (1)..(472): unsure at all n locations
actaagcttagcatgtccactctttcaagntgggaacactctgttagcctagaattcttgcattaagtccctagtgccgatatgctccgcaataactctaaattcagccagagcaatntggcttggattccctggtgtcatgttgcactgcggtctgatctctccgaagaataattctagcggattctggaccaacttctccttttcttcgtcaactttgacgtaaaaccattcagacttccagccagctagccacttgctacgatagctgatcactggaaatttcgtactcttgtgaaaggaaaaactgtagcagccaaagttttcatgcaacccatctcctctagctttggtttgataatgaagctcgtgcactccgcaaaaaccttcggcaaatggtttcacccctttgcttctgagagcccagatataaacgctaagcctaacgatagcattangagtaaagtgatgt

SEQ ID NO: 3950 - DNA, 248 bp, Zea mays
  unsure (1)..(248): unsure at all n locations
agcatgcataagccttcttctctttctttttttaagaaccttgccggaacactactccacttaaaaagaatganggtggatctcttgaatcttgcggatttgaactccttgaagtacctcataacaaaggtgttacggggccctcctctgctattgctgcttgagcacgctgcggacaaatgaccgacacagggctgattctgggacaaccttcttcccatcttctctctcctatctcctttcacttc

SEQ ID NO: 3951 - DNA, 462 bp, Zea mays
  unsure (1)..(462): unsure at all n locations
tctggagatctgggactatatcctgaggatggttagttttatctaatgngccatgtaccataaaccattcttattgcatacatggtgtcatctccgatacaaagctccctatactacaatacctgcatcttttggtaacgttctgtgctctattcacggtccatccgctgaaggtaacgcacttatgacgacaatgaaaatgaaacctcctatgttcccagaatgacattcaccttctctctctcccccatatcctcttcctcttacactcctctccttacctccctgtctctggactccctatggtcactacatagtcacaatattcctggatcgataaggtcgatgaacgtggtacgctacctaggatagatttttacatggtgggtacgaaaatgaccatgtgtaccctgggtctgtgactatgttactgggtcgaggatcgctaccactgtacccgtc

SEQ ID NO: 3952 - DNA, 436 bp, Zea mays
  unsure (1)..(436): unsure at all n locations
gcgatccttaagtcacctgcggcatgcaagcttctgactatatatttcgtcatgctttgtgtttaattctaagcgaaaaagagaaaagagaagctcagttctacgcgcaaaaattgaaatatccaaaaggggcgctgatattcaacagcagcggagaagaagacttcttgtattgtctccgtgacagcaaggagatttctgtctatcgggagataagcaagagcttcggattcccaacattagaagatgggctctctgtgttgtcaaaaaacgagttggccgacagcttagcgtacaatagcttaaaggtgaaaaaatgagatatttgtattattccttgaaaccaaaattttccatttgcttaaacttattaacacattntttgcaggtccttatacttagcaatgccctcagggcacanaaagatgccgaagac

SEQ ID NO: 3953 - DNA, 360 bp, Zea mays
  unsure (1)..(360): unsure at all n locations
agcttccccgtgtaagctacaacttttctttgtttcactgacagttnggaatgcaaaaactaagtctggttttgtttgctcaagaatgaggaagagctccggattgattggataatttgatggttggagttgagcaggtaatgccgtgatactatgttctttgtgtaaaagaccagatgccaacagtatctcatagatatactggtgatctttatttgcagtgactgatgccatgacttctttgatacttgcgtcttcttcgttcattgattgtagttgctcaagcttctggatcagaacttccacaatttctggtttaatctggttggcttcactgctcgcttttgactgtggagtgtc

SEQ ID NO: 3954 - DNA, 467 bp, Zea mays
tgtgaaggttcttcatccccacatgtgctgagcggcgatgtctcttctgagagcacctagagggggggtgaataggtgatcctgtatacttcaaaacttaagccacaaaactttgattaagtgttagcacagttaatgccaagcggctagagagaagatcttgcacaatatgataaccacaaggagttcaacacagagtagacacagtgatttatcccgtggttcggccaagtacaaaacttgcctactccacgttgtggcgtcccaacggacgagagttgcactcaactcctctcaagtgatccaatgatcaacttgaataccacagtgttatgcttttcctttcaatttcccgtttgcgaggaatctccacaacttggagtctctctcccttacacttgagatcacaaagaatactgagtagggagggaagcatccacacatatcacagcaaaatgcgacacacc

SEQ ID NO: 3955 - DNA, 459 bp, Zea mays
agctcttcttttctgtacaaaacataaattactatttcttctttcaggcgaagcttttctttgttgtacaaaacatagaagactacttcttctttctgtcgaagcttcttctttttgtacactccagaacataaaagaatacttctcctttctgtcgaagcttttcttttctgacactccagaacataaaagaatacttctcctttctgtcgaagcttttcttttttgtacactccagaacataaaagaatacttctcctttttgccgaagcaatcacttagtaacacagatgccatgaatgaatgcttatgaatgcaaatgctatgatgtaatgtgatgtgcgaatgaatgtccacaacatataaccgaagccacactcaaccattatttccttggaatcaaccacacatcagctctgcattctcttatgaacgaccttagagcttcctcgtctttac

SEQ ID NO: 3956 - DNA, 387 bp, Zea mays
  unsure (1)..(387): unsure at all n locations
agctcactcctccctaggaagggcctcttttctatttctagattgcgaagcccggaacatacaagctagccaacgatcaaagcgaggtctacaacaacgctgggaacatccaacagctacgtccctattacccttaaaaaggtcaagtcagctatgaaccccgctcactttacataaataaagtcaaaccatcaaggaagggtcagccttacctcgagaaagcccgaccctcccttgggggctagaaggggggaaccccttctgcgcaaaantttccttgaaaaatccttaggccagaacgcccttcacgcttttcgactgcgtcgataatagaatcctaacaacgagcgagagagaccttgaacggcaagccgatcgagccgagga

SEQ ID NO: 3957 - DNA, 416 bp, Zea mays
agctttatcacccttgcattgtgcctctatttttctatcactcacttttctatcctttctacaaatagcaaaggaagcatttaaagcatgatatattgtagaaggttcattaactttcctaggaatattaacaacatttcttctaggcacattatgaacaacatttctcctaccaacatttctatcatgcacataagaagaactagaggcaaacatgtcatgaaaatcaaaagcatcatatgcattataactcctataagcatttctagattgtctcctatcatggtacataaaggcatggttcttttgcacactattagccataagagccttccctttcttcttggcggagatgggagccttatggctttgcaagttcttggcttccctcttgaatccaagaccattcttaattg

SEQ ID NO: 3958 - DNA, 450 bp, Zea mays
  unsure (1)..(450): unsure at all n locations
gttgtatttntatggtgagaatatcttctagcatgtgatgtgntttctntgctctctcgctctttntagaagtttgagcacgaccgccttatctatttggcttagatgagcgtagagttgcatgaagcttctttcatcctcctcatcctcatttgtgcttccactatcattttcattagccacacaacatatgtgggaatcgaaatgggaagacaaaccttttggagagatggattcatcgtttggtctccaacgttcattttcttcttcttccttcaaaggggtagtttcacaaggactaaaggatgtagaagcatcatatgaactaatatgtttggactcattaaatttacttttaattctagtccaaatatcatgcgcatcagaaatatgttcattataattcattatgaaggcacgataatcttttctgctaagagatatacttaa

SEQ ID NO: 3959 - DNA, 415 bp, Zea mays
agcttggacactagagcttacttatttttgttagaactcccaaatctattttggtaagaacagaccgggtagctgatcgattgagatttgaagtgtttatcttcttgttggtcaaggtcaactcgactttgagctgaacaccatcagctagaggaagaaattaagagttctgtaccaagacttaatctgggattcatatatgccacagagcagatctgcatcgtttttgtttgattctatttggcattaaaataagaaagcaaggaaattatatttctttgataacactcttccattattttccccacttttcacttgtttatttcaggttttaccagggctgagtatttatggccaacatcatatacagactgaattctgcaaaatcttttattctttatccagagactcaact

SEQ ID NO: 3960 - DNA, 392 bp, Zea mays
  unsure (1)..(392): unsure at all n locations
cttgataccacttgtcatggaccccttggccgcggcgtcttcactttatcgngagcactcgcacaggtaaccaggaagaagatccaggtatgtggatatgatttctgttattcttctcatccctttcttcgttcacaagtatgagtacttatagctattacaatctagacttaatccttctaagattacatggcccaatactggcctaacatttcaaaagataatttctatactaagtagtagtagaggttctcacacggccgtggccgtcaccgttgtctgcaccgatgagacgtcgggcatggctttcacccatcatgcatggcatcatccctcaccggcaacaatgacaaagcgaaccagcagtaaccaacagattgtcatagcatggg

SEQ ID NO: 3961 - DNA, 443 bp, Zea mays
  unsure (1)..(443): unsure at all n locations
agcttcggcagcatctatgttatggatctttcttgagtccgnccaactcccttcagccctcctggtagcttcttgactcccatgaacaacaatgggaccttgttccgaaagtatcttcatgcataagtatgctggatgaagtattgcttcgaaggcattaagcgtccctcgaacaaagattgtgttgtatgggtactccatgtcaataatgtcaaagacaacttgctcagttcttgtgttgtgaatgtaaccgaaggtaactgacattgttattttgctaagttccacaatctgccttcctccaaagccacaaagagggtgtgttgcgtcatgaatcttgtcttctggttcttgcatttgtctgaaagcctttgcaaagatgatgtctgctacactgcccgtgtcaaccagaacattgtggactagaaatccgttgatgacac

SEQ ID NO: 3962 - DNA, 377 bp, Zea mays
  unsure (1)..(377): unsure at all n locations
aattcactcaaggatctgcaagaaaaatgcttaggcttcggcacccggtgcattcaactactgaaataggnctttaactcagttggagtcagctccgaaaaatttaaaccttctgttgaagacctgtcgggcacatttgatcatattgaaggtgaagntgatgccctcgacgaagttatanctggacatggtgacttttgtgccttgttagcttctcgaggcacggctgncgctttaaggaaggctggtngcacacatggaaatatnggaaacagaccaaacttcagcctgtcaccagcagacttagatgacatccccggcctagcccgaagcatcggagacagattcattactanaatctgggcatagggcgggcg

SEQ ID NO: 3963 - DNA, 468 bp, Zea mays
  unsure (1)..(468): unsure at all n locations
agctgtgaaagttcttcatccccacatgtgctaagtttctatgccacagccagcccatgctagtcttagctattaagcatgcatctagaccggcctcttcttttgcaaaatcaactaagtaaagttggccgtctaatacacccttaaaagctagtgaaccatcacttcttctaaagacagacacatctacatttgtaaatagacagttatatcccatatgacataattgactaacagatagtaaattatatccaagactctctactaaaaatacattagagatagaatgctcattagaaaatgcaattntacctaatccttttaccttgccttgattcccatcaccgaatataattgaatcttgggaatccttattcttgacgtaagaagtgaacatcttcttctcccccgtcatatggtttgtgcatctgctggcgataatccagcttagaaccctcgatgcataaa

SEQ ID NO: 3964 - DNA, 459 bp, Zea mays
  unsure (1)..(459): unsure at all n locations
agcttccactcgcttgccacagagatcggttttcttgtttgaatagctctctggtaagtcactctcgcattcttgaggccgaacgacatgaaggtatagcagaaagctccaaacggggtgatgaatgcagttttttcctcatcttcttttgccaagctgatctgatggtatccagaatagcagtctaggaaggacaacatagaacatccagcggtcaaatcaaccacctggtctattttagggagtccgaagggatccttcggacagtgtttgttgagatctgtatagtcagcgcacatgtgccaatccactttattctttttttagtacaagaacaggatntgctagccactcaggatgcagtacttctttaatgaaccctgctgccactaagcgagctaactccgcgtgaatagcttctctcttgtcaagcgtgaaacgacacaattttagtcgaat

SEQ ID NO: 3965 - DNA, 463 bp, Zea mays
  unsure (1)..(463): unsure at all n locations
agcttactcctccctgagaagggccgtttattatcgtttatatnttgaagcccggaacatacaagctggccaacaatcaaggcgaggtctacagcaacgcttggaacatccgacagctacgtcgcttctacccttaagatgttttcaagtcgttcatatacctcgttttctatacatacacaaataaagtctaaccatcaaggaagggtcacccttgcctcggcaaagcccgaccctccctcgggggctagaaagggggaaccccctctgtgtcaaaattttcctcggaaaaaatctttctaccagaacatctttcgcgcttttcgactgcttcgatagcgggatcctgaaaacgacggagtacacgtaagcggcaaggccgaccgagccgagggactcctacgcctccgggatacggatacctcactcatcaccttctacgatangtaactcacgctcggat

SEQ ID NO: 3966 - DNA, 451 bp, Zea mays
  unsure (1)..(451): unsure at all n locations
ctcacatggnttgattggtgaatggcgctctgtttcattgcgtctgctgacgcactcaccgtcaacccgccttcagtcacgccaactgccatatctgtcctcgcagctgactgacccgtggcccccatgcctggtggttttgttgggcaacgcgcgaggtgcctcgttgctgctacattggttaaaatattaccttctgtcttccgcagcggctccaaggaggcgcactacaagcgtgcgcgacggttcgctccttccgcacccgagnnccgacacacanaaccgatgactggtggacttgggcccccgtgtcatagactgngtttgtcttctgcagcggccccaaagaggcgcactacaggcgcgtgcgatggttcgctctacaggcgcgcgcggcggttcacttattccgcacccaaagttcagcgcacaatctgtatgacttgtggac

SEQ ID NO: 3967 - DNA, 392 bp, Zea mays
tatcccacttcctccgcccttctggcagcttcctgactcccatgaatagcattaggcccttggttcgaaagtatcttcatgcatagataatctgggtgaagaattgcttcacaagcatttagggtaccacgaccaatgatggcgttgtagggatattccatgtcaacaatatcaaacaccatttgctcactccttgtgttattaacaaatccgaaggttaccggcatggtaatcttcccgagtgccacaatctgcctgcctccgaagccacaaagagggtgcgtaccatcatgaatcttgtctccaagctcttgtctctgtctgaaagccttggcaaatataatgtcagctgtactgcctgtgccactatgacattgtgatcacaaactctt

SEQ ID NO: 3968 - DNA, 454 bp, Zea mays
agctttacaccattcaaactatagggtggtgatgattcattaactccggaagaagccacagctggatcaataagaatggtgccttcgatggaagacgaatctgaagctgattactctgtggaagaagatgctatagaggggatcatgcttcaagctgtggaaaacatcttctaataccaagctgaaacaatgaaatggcgtgatataaaggttaggctaaagaacattgaaccaggacatttggtgcttctaagagtatccaaccgagagacagtatgcaaattacagctgaagtgggaaggaccttttctggtagtatcttcgtcaagaccccgttcctacagattgaaggatatggatggccacgacattcctagatcattgaatgcggacgagcttccgcaatattatgtttagcgtgaggtaatgtttctattctttcttgtggcaccct

SEQ ID NO: 3969 - DNA, 165 bp, Zea mays
ccaaagaacaaaacgccccaccccgaaagcagaacgacccaaaggacacaacgaaaaaacgaccagcaacgaaaaagcaagcacaaacacaaaacagaaaaaggaggaacactccaaccgccagcgacccgaaggaaccggaacacggcgagaaaaaccgcccga

SEQ ID NO: 3970 - DNA, 233 bp, Zea mays
  unsure (1)..(233): unsure at all n locations
caccgcagccgcaacancgaacaaataagttttccactcacacacacaagacggccatcgcaaacaaagcgcggccgaaccaacccaaaaaggccaacacctgaacctaactcaaaaaaccccagacaacacctagctcaaaaccaaccctaggaccagcagatctaaaaaacacaccccccaaacacaaaggagggcaccagcaatccaactaaaaccagcccaaggggccc

SEQ ID NO: 3971 - DNA, 465 bp, Zea mays
cgggaccttaagtcacctgcagctgaagcttaacattattttcaagcataccactttattgttccttcatcacagcctctgaagaatattaggaggaacagagaagctactggaaggattggaaagtgggccgtggagcttaatgaattcaccattgactacgtgcatagatattcaatccaatcccaagcgttagcagacttcatcgttgattagacaccaggggctcacgaagaagaagtaaacaaagataccgaagcttggacagtgttctgcgatggttcttggggaaccttcagtgcaggagcagttgcggtcctagtggcactttcaaaagtcaaaacatgttatgcagccaaattggatttcagttgcacaagtaatattgctgagtacgaagcactttctgtggtgcttcggaagttaagggcaatgggaataagaagggtcatcctaaagactgac

SEQ ID NO: 3972 - DNA, 461 bp, Zea mays
  unsure (1)..(461): unsure at all n locations
tgagatttcaccatgttntgcatcctagagcaatatattttcttctatttnttcattaacatatactattacttctgctccttgtggtcataacgtgccccttactaatttgctttttgcttgatttatgttgtgaatgtttctagtctcttcgaacacggcaagtcagtcagtgtcangtagctactacttagtttagtagccttatctgagttctaaccacattttcatcangggggagcgaacgctggacataccatctacaactcagaaggcaagaagtttgctctgcatcttgttccatctggtattctccatgaagggacactgtgtgttgttggcaatggagcagtgatccatgttccagggttctttggagaaattgatggtcttgagtccaatggagtccgctgcgatggaaggatactggttaccgaccgggcacatctgctgnttgatct

SEQ ID NO: 3973 - DNA, 396 bp, Zea mays
ccgcatgcaagcctgaagccatggtaagcagcatttgttattaatatacaaatcgactcaagccgagctatgggtgcataggcttcaccgaaatccaaaccttcgacttgtgaatatcccttggccacaagtcgggctttgttccttgtcaccacaccatgctcatcttgcttgtggcggaagacccacttggttcctacaacattttgattaggacgcggaactaaatgtcatacctcattcctcatgaagctgtagagtgcctcttgcatcgccaacacctaatccgaattccttaatgcgtcttccaccctatatggctcaatacaggacacaaaggagtaatgtttacaaatatgagcaacacgagatcgagtgggtaccctcttttgaata

SEQ ID NO: 3974 - DNA, 423 bp, Zea mays
  unsure (1)..(423): unsure at all n locations
acaagaaagaaagtgggagcgctgtaattcttatctttgatgcggatggcttattattgattgggaatgacattcttatgctggagtctgtcaaggcttcactgaaaaagagtatttctatgaaggatttaggggaagcaacatatattttgggcataaggatctatagagataggtgaaaggagcttatatgattaagtcaagatacatactttgacaaggtgttgaaacggttcaacatggaatagtctaagaaagggttcttacctatgtcacatggtatagaccttattcagaagcagcgttttgtgatggctaatgagcgagagngcatgagnnaggtaccatacgccttatcaattggataaaccatgtatgccacgataaanacacgtntagaagtttcatacgctataagtgcta

SEQ ID NO: 3975 - DNA, 452 bp, Zea mays
tgcaagcttgccgtctaatacaccctcaatagctagttatccatcactccttctaaagacagacacatctacatttgtaaatagacagttataccccatatgacataattgactaacggatagcaaattatatccaatactctctactaaaaatacattagagatagaatgctcattagaaatcgcaattttacctaacccttttaccttgccttgattcccatcaccgaatataattgaatcttgggaatccttattcttgacgtaagaggtgaacatcttcttctcccccgtcatatgggttgtgcatccgctatcaataatccagcttgaacccccggatgcataaacctgcaaagcaaaattaggcttgggacttacgtacccaactcatgttgggtcctacaaagttagcacaaatattcttagggacaccaatgcaagttttatct

SEQ ID NO: 3976 - DNA, 376 bp, Zea mays
  unsure (1)..(376): unsure at all n locations
atggnncaggatagtgagggttacatnttatatcctgcaaactatcccaaagataaaattagcaaaattcatgctaggaaacctcacaatgtttctcatcatgcatttatgtataaaaattaagcttctagctctaggcataccactcatattaaaatgcctaaaaagaagattcctactgcatcaaatgaggataatatttcatttaagacttttgatgcttcgtattgctcactaacaaatcaggcaaaatagttgccaaatatgttgggggcaaacacaagagtattaagacttgttgttgggtacccgatgtgcttgtttctaattgtcaaggacccaataagggcatattatgggagattgaaagggaaat

SEQ ID NO: 3977 - DNA, 448 bp, Zea mays
agcttggaaatagaaacaaggtgtttattattagcattaatggcaaaatctttacacctagtacaaattacaacatgttctacacaagaataggatttatttgctacttctaatttagcatttaaatcattgttgacacctttcaaagtataaatggtttcatgacaagtagatagttcaaaagaaagcatttcatttcttttaacttctaatgcaagggatttttgagcctctacaaacttatcatgttcttcatacaacaaatcctcttgcttttctaaaagtatattcttttcattcaaggcatcaattaattcattaattttgtctatcttagatctatctaagccttcgaataaacatgaataatctactttcttctcatcactagattcgtcctcacttgaagaagcataggtagagttgcgagtacataccttcttctccc

SEQ ID NO: 3978 - DNA, 459 bp, Zea mays
  unsure (1)..(459): unsure at all n locations
tccnctgcacgccaatactatgcaagccgctgatattattgcgcaaggagattgcacccggcccagcattagtggctccgggtgttccattcgttatgttcctgggcccacatgtcggggctcagcatccttgtaagcgtcccccttgagctataaaaggggaggcacgcaggctcacatggacaagctcacacagacacagactcacttagactctcacactcacnaagtcatacaagctctcaagctcaatacaacacatagtggagtagggtattacgctccggcgacccgaaccactctaaaccgttgtgtgttcttcctgtttccacctaacaggcaaaacgcttaggcccctcctcatctaaagatntagggtgggtgcattccgccacctggccggagatttcctctctgacaatgagtaatcttaaaaattacaacttaaaacacaagcta

SEQ ID NO: 3979 - DNA, 438 bp, Zea mays
  unsure (1)..(438): unsure at all n locations
agcttctaaagggagaacacgtgatatgtttgtttaacgtgcaattcgaaaaagatagaccttgtgcagcttgtcaagcaggtaaacaagtgggaggagcgcatcacagcaagaatgtgatgaccacttcaagacccctggagctgctgcatatggacctcttcggacctgtcgcctatctgagcataggagggagtaagtatggtctagttattgttgatgacttttcccgcttcacttgggtgttctttttgcaggataagtctgaaacccaagggaccctcaagcgcttcctcaggagagctcanaatgagtttgagctcaaggtgaagaagataaggagcgacaacgggtccgagttcaagaaccttcaagtggaggagttccttgaggaggaagggatcaagcatgagttctccgctccctacacaccacagc

SEQ ID NO: 3980 - DNA, 455 bp, Zea mays
  unsure (1)..(455): unsure at all n locations
ggacctatgaaactaagcttttaaagctggatacgattccctgagtatttgtcgtggaagngctgaagacatttgaaatctaccttcaccaacttatctccgaagcaatcataaggatgaacatctttgtgtgggccgcgagaagccaaggtttggaacctaacgcaaaaagcttctgtaacatacacgagctattgtatgagacaaaaccctgnggcaaagagcagtatcacaacaactttggctgctacagcttcggcgctcggtccgggtcaagctgccctgtgccaacttttcgaaagaggtggcccggcgactggatgacagaatggttttacgtgaaaaatgagttgaaatcacgtgaagatatcanaggtatcattatgcgccctatctggcaacgctttggcctccggaagccgaaggtggaaatggatgaagcagccgaagaatgc

SEQ ID NO: 3981 - DNA, 406 bp, Zea mays
caagctttataggctcttattggctctattgtcttaagtcggcctcttgtggggagaagtgtttattatgggaaatagggggagtctttgatcaatctcttttggaatgactctctttatgcctcaacatgtgtgtttgacatagaaatagagatttgagtttgatttgcaaaaacaaaccaagtggtggcaaaggatgatccatatatgccaaaatgaatcaaatttattttacttgaagtgattttgcacttgttctagctgctctatgttgtgttggcataaatcaccaaaaagggggagattgaaagggaaatgtgcctttggaccatttctaagtattttggtgattgagtgcaaacacaagtgcttaaatgtgcccatggttgaacctagtgcaaatcac

SEQ ID NO: 3982 - DNA, 362 bp, Zea mays
  unsure (1)..(362): unsure at all n locations
actaggaaagatgtggagaaaatctactctgagttctgcttctctctcccatgcagccacatcttgtgcatggtgactccattgcactttgcatacttatatcactatactccttgaaactcgagtcaaggtatcaagaatcttgatatgatatgtctgatattgcacgtcatctagaacactaagatcctccatacgtagctgctcttcgggcaccctgagacacttcttcagttgagacacatggaagacattgcgaacatctgcaagatgatcaagctagtccagntgatatgcaacctctcccactcgtatcaagatccagaacggtccaatgaagcgaggggacaacttcccttaac

SEQ ID NO: 3983 - DNA, 464 bp, Zea mays
  unsure (1)..(464): unsure at all n locations
accctaagtcacctgcagcatgcaagcttctcaccatgtcgctgctagccatgttgttgcttttactctccatcaaagatcaaacgacatgaacgctccttaatgacacactttgttngaaacaacgaatgtcgctgattctgctctgccttctccatttgtgcactaagcacacgctgtacaatgaggctctcataatgctctgcatcatctgcaccaatctgttcttcgggtggttccttatagcctgcatcatcagccgcaagcaaagcaagtgtatcttcattcaaatcattagcagaggaatacccactcatcgtctttaccaccaaaacacgctgattaggacaatcacgctgcacgtgttcatagtcctggcatcgataacacagaacatctcttgttctacccgtggaggctactgaagaggcactacctgctgggttctgggcagatttggttgc

SEQ ID NO: 3984 - DNA, 415 bp, Zea mays
cttgaacattccaatccgagcccgcatctgttctttttatctcgcacaagaggagctcgactgcagaccgaatccagcatgttccaatcctcttccctctcggacttctccctgattcctaagcaaaacaagagtgcacgggtctccatggtctaaatatgatggacatgaactcaagagtgtaatcacctgaagggtgagtagacgagcacaagcgcgagtaatgggaccagaaattggtacttgtattggtatagatgcatcaatagtgtggatgtcttaatcattctccccttcttgcatttgagtcgtcctcgactcaagctcaacttcctctcccaagtagggctttataactgcaatgctaaatgtggagctaaccccaaagtctgcacgcaaatctagcctatatgca

SEQ ID NO: 3985 - DNA, 469 bp, Zea mays
  unsure (1)..(469): unsure at all n locations
cgcgatcttaagtcacctgcagcatgcaagcttggcatacagntgataatcgcgtaacctctgaagtaccttcctcaaaagctcctcatgcgcttgctcattctgggaatatataagaatatcatcaatgaacactactacaaacttgtcgaggtagtccatgaatacactgttcatcaagtatatgaagtaagctggcacattcatcaaatcgaatgacataaacgtgaactcatacagtcaatacttggtgatgaatgttgtcttcggtatgtttgagggtcagattctgagctgatggtaacctgaccttagatctatctttgagaacacactggctcctctcaactgatcgaataaatcttcaattctaggcagggggtactttgtcttgatagtaacctcattcaaagctcggtaatcgatacacatcctcttcgtgccatacttcttctccacaaacaacact

SEQ ID NO: 3986 - DNA, 328 bp, Zea mays
  unsure (1)..(328): unsure at all n locations
ttgggcggcccgcgactcacttcgcacgggcaaaccgcgacgagctaactccngcagggtgtggatggtgccctgaatggtgtatttcaaacttgggagggctntataagctcgggcgcgggccacagcgcgggcttggctctggcgcancgccgggcatgctggaacacgcgcgaacgtgctcttgcgcgggcaaaaggcgtctaacacgtggaggtgagtttcttccagtgttcaaacgtctccagagatcgcaaacgtgcgaatctcgccatgaatccggcgcagacctttctctggcacctagggctatctcacatgtgtgagt

SEQ ID NO: 3987 - DNA, 464 bp, Zea mays
  unsure (1)..(464): unsure at all n locations
ctaagtcacctgcggcatgcaagcttggggagggtcttcatccncacatgtgctaagttgtgatgccacagccagcccatgcaagtcttagccattaagcatgcatctagaccggcctcttcttttgcaaaatcaactaaataaagtttgccgtctaatacacccttaaaagctagtgaaccatcacttcttctaaagacagacacatctatatttgtgaacagacagttatatcccatattgcacaattgactaacagatagtaaattatatcctagtgactctactaaaaacacattagagatagagtgctcattagaaattgcaattttacctaacccttttaccttgccttgattcccatcaccgaatatgattgaatcttgggaatccttattcttgacgtaagaggtgaacatcttcttctcccccgtcatatggtttgtgcatccgctatcaataat

SEQ ID NO: 3988 - DNA, 333 bp, Zea mays
gcttcttcctataagaccttcggcgacgaaacataagcccaacagttacccctttcgcggtgctagatcgtttttcgtaacgagcttgatccgtgaaaaaagtctcttaagcttcggggagccgaaggttcaaaaaacaccttccctgagctcgttgtcgagaaacgattcaattttccaacgcgtagcggtcccaccttgcagagatactgttttgtctctgcggtccaccgcacagcgagtgcaagcgggtgtccaactggagtaaaaatcctggcgctgcgccttcttaacctgctgtctatattaacagacgagtatgtgtgaagtacc

SEQ ID NO: 3989 - DNA, 452 bp, Zea mays
agcttctctgccaatctgaacagtttgaacaatataagcaagaacttaatgcataacttgaagccgaagtccaacaaaattcagatttgaaaaaactattggcgggccttcaagacaaatgtttggaatttagcaacaaatgtattcaacgactgagaaaaattttccactcagttcgagctagcagtgagaaattcaccccgtcagccgaagatttaccaaagaccttcgatcatatcgaaggtgaaattgatgagcttgacgaagttatagccgggcacagtgactcttgcgcctgggtagcttctcggggcactgctgcagctttcctaaaagctggctgcgatcatggaaaaattgtcaataggcccaatttcactttatcaccatcatatctagatgacatttctgatctcgcccgaagcatttctaatagaattgaaagatgatat

SEQ ID NO: 3990 - DNA, 337 bp, Zea mays
cataaaactcaacttgagaatattagaaacacttgaagaagagagattgtttattagaaaacagctgatgaaaaaatatagagttgaccacacagatctgtcgaaatgcggaccacataaataaacggactcagaccggatatcaagaaatcggattccgaaatatatcagataacatagcatctatcgagagtttggataaatgaacttgctatgaagattggcaaggccaaatcgacgtgcgaattagcatttgcttcaagagacaacagtaggaaacggctctaaatatggttgtctctcaccaccgagtaacttcaagatttggtgaaacctt

SEQ ID NO: 3991 - DNA, 464 bp, Zea mays
  unsure (1)..(464): unsure at all n locations
agctttgcaagaaaaggagatggtatgaatctttgtggtgctcgagagagtcaanttcaattttaactcaagctatcaatcttcaatgatctatattcaagattgacccaaagttattttgaattgttatatataaaactcatatcatctcggggaagatattgatgttgtaggaaataaagaattaatcctatgccaaaaagtcaaggcctacaacatggaggaaggccaaaggatggtaacaatcatgcttttaagtgcaagtatcttaaattatcatttcttatgtgtcttgtgtagtcacatagaaaaagaaagcacttcaaatgttcttaaattatgtcaccattctttaaaagaaattcctctcatatggtagattgtatattcatcattnttatactatggcaatctacatgctttaaattgttgtaagtatctcatggcatgctttacactaatca

SEQ ID NO: 3992 - DNA, 462 bp, Zea mays
  unsure (1)..(462): unsure at all n locations
tgcatctacttcacatgttgagtgaactacaaactttcttctctaacttacanttttattctcacttcacctaaatggggtttactggggtttgatgacacagaccctaaaaaccttagctcaacaaacaaggtgagattaaaccgccataatctctgaccaacataaacatgggcagggctgtcggttcatgtgccgagaaaggcctgtgccttgtttaatgctgcggtggtcattaatattggtgatggtaactcaacgtgtttcttggctgatcactggttgcagggcaaaactgttgctgaatgggcccctaatctgatcagcgtggttccaaaaaggattgatcaaagaggcactntcagttcaagtcatcctggagtactcgctgatctgggatctggttgatgcattggtgctgcaagctgatgtcccagacaagctatatttgaagctcacttc

SEQ ID NO: 3993 - DNA, 464 bp, Zea mays
agcttctgtgcatcatgaacagctgtcattcatctataacttgcttctgaacatatcaatgtcaaatgatcgaacattatctggggctgatgagttccttcctattcttatctatgttactatcaaggcaagcaactcttagtcttggccactgtttattctttctgtttcttcttactggttcgctgcaactgagaagctttctgaaaatttgatgtaggccaatcctcctcagctgcactcaaatctgaagttcattcagctctttagaagagaaacaaagctaatttcagaagtcgaatattacctgactaacctcatttcagcaaagatgtttataatagatgtcagtgctcactcgctctcaatggaggaaagcgagtttcagaaacatatggaatcggcaagactagctactcaagtatctgttgcaagcccaagtagctcacaggggcttcccacat

SEQ ID NO: 3994 - DNA, 444 bp, Zea mays
tggtcatttatggctaactgtcccgacaatgatatcgttcttgatcaacggaacaagagggagaagaagaataactataagaaggcaaagggcgaggcacatcttggcaaggagtgggattcggattgctcctcgtccgactccgacaatgaaggactcgccgccaccgctcttaacaagtcatccctcttccccaacgagcgtcacacatgccttatggcaagggagaagaaggtatgtactcgaaactctacttatgcttcttcaagtgaggacgaatctattgatgaggatgaaatacattattcatatttatttaagggcctagatagaaccaacggtagataaaataatgaattgactgatgccttgaatgaaagaatatgctcttagaagaacaagacgacttgttgtatgaagaacatgacaaatttgtagaagcac

SEQ ID NO: 3995 - DNA, 444 bp, Zea mays
  unsure (1)..(444): unsure at all n locations
agctngtggcatcctcgggcgtcttgtcttatctcaagtaccaagtctcccacttggaagcctcggggccgaacccttcgggcgtggtagtgtcgcagagactactgataccgcgccaagtgtagtaaggctacgtcccgagcctcttccagctggtccaatgaatcctcttggctggtctggttgttttggtcgtggtatgccttcgtcctcagggaaccgtattccaagtccgtgggtaagatggcctcggccccatagactaggaaaaacggcgagaagcccgtggcccggctcggcgtctttctcagactccaaaccaccaagggtagttattttatccaccgcttgccaaacttgttgaggtcgttgtatatcctcggtnttagtccctgcaaaatcatgccattggcgcgctccacctgcccatttatcatcgggtga

SEQ ID NO: 3996 - DNA, 426 bp, Zea mays
  unsure (1)..(426): unsure at all n locations
gtgagacgganacaaccgcggcatgcactacatccttttgtttataatgccaaggatttgaggattgccatgaggagggaacaaaatatgaaattcaacacctcctccaaaagcctcaaccacgcctccacaaaaggtaacatccaaggtaatgatcaagccacacttcacattaaaaaatgtagtgaatgctttgaagaacggcacttgattaagtcatgtccctatattaatggcttgattatcaacaaggatgatagactttgttttaaatgctcaaagaagggatacttacttagatcttgtccccatttaaaacaaagagacatagggttagaaaagaaacattttactaaccatgtagcaagccacaaacaaggataaaagaaatcttcaaaatttggaaacacctatgctcacatgccg

SEQ ID NO: 3997 - DNA, 417 bp, Zea mays
  unsure (1)..(417): unsure at all n locations
agcttaggggttagagcgatgttagcgggatgtgccatancgtcactctgcaaagcctggaggcggtacagcgcactcatacactgaacagtgaccctcccaaccaagtcaggatacattgcccacacatctttcacatggctcacgtggttacaccacatggggtcatccttcttctcatcagggaagagttccaaggggtgcatcaccatctccaagggatggtatccacagaaagtgtagggtaaccggcggagttaagcacttcccacaagatggaaggaaagccatcgtgagaaaggaagtcagagctgaaacgagtgtctcctccactggcggtggtgggtgaatccatctgcggaagggtatcataggtaaagattatggtggaaggaagaaaaataaaagagcctggat

SEQ ID NO: 3998 - DNA, 410 bp, Zea mays
tctgtaatggtcatgaattattatatgaaacaaagtcttgtggcaaggaacaataccataacaactttggctgctacagtttcgtttctcggtccggggcaagctgtcccgtaccatcctttctgaagagatggcccggggattggatgacagaatggttttatgtgaagaatgacttatcacgacgagaagacatcagaggtataattatgcgtcctatttggcaaagcttcggccttcggaggccgaagggtgaaatggacgaagccgccgaagagtgccaaagggcctttggggtagtctgctcgtttattgggtcaagggacttggtccaagaacacattgcattcaaggtatggccacctgcggagaagtgggaaatgccgaaggagaccatttaagagcccgac

SEQ ID NO: 3999 - DNA, 373 bp, Zea mays
  unsure (1)..(373): unsure at all n locations
agcttctcctagtcctcatctttcttacttataaccattctgatttctagccgaagcagatggcaagtgtgcgtaccaaatgagttngtggtatgatcttatttatacgcccacggcgttgaaaattgaaagaccccgcttgtcattgaatgttgctattctagcaaagggaaagtgttttttcggaccttcggctcaaggccttcgtccatatcgcaatctgaatttattattaacaaattaatattgcgaggggctactgttgggggccttcgtcctccgaaggttctcaaaaacatgatttgacaatgtcttccaagtggattatgtgaacaggtaccttttgactcacaattatcaacatgaagtgtgg

SEQ ID NO: 4000 - DNA, 462 bp, Zea mays
  unsure (1)..(462): unsure at all n locations
tctaaagggagaacacantttgggactaacaaatgttcattttgagaaagacagggtttgtagcgcatgtcaagcaaggaagcaagttggtgcccatcatccacacaagaatatcatgacgaccgacaggccgcttgagctactccacatggacctattcggcccgatagcttacataagcatcggcgggagtaagtattgtcttgtaattggggatgattattctcgcttcacttgggtggttttttgcaggaaaaatcacaaacccaagagaccttaaagggattcttgagacgggctcaaaatgagttcggattaaggatcaagaaaataagaagcgacaacgggatggagttcaagaactctcaaattgaaggctttcttgaggaggagggaatcaaacatgagttctcttctccctacacacctcaacaagatggtagtggagaggaagaatataac

SEQ ID NO: 4001 - DNA, 438 bp, Zea mays
  unsure (1)..(438): unsure at all n locations
agcttctaaagggagaacacgtgataagtctaactaatgtaactntcgaaaaagatagaccttgtgcagcttgtcaagcaggtaaacaggtgggaagctctcatcatgccaaaaatgtgatgacaacatcaagacccctggagttacttcatatggacctcttcggacccgtcgcctatctaagtataggaggaagtaagtatggtcttgttatagttgatgatttttcccgcttcacttgggtattctttttgcaggataaatctgaaacccaaaggaccctcaagcgcttcctaaagagagcccaaaacgagtttgagctcaaagtgaagaagataaggagcgacaatgggtccgagttcaagaaccttcaagtggaggagtatcttgaggaggaaggaatcaagcacgagttctccgctccctacacaccacagc

SEQ ID NO: 4002 - DNA, 463 bp, Zea mays
  unsure (1)..(463): unsure at all n locations
tgcacacatagctcatttgaatacctttgatcatatctcgtttatatgctatgactaatgtgtttcaagtctatttcaaaccaagtcatatgtatattgaaagggaattggagtcttcggcgaagacaaatgcttccactccgtaactcatacttcgccaccactccgagcaactctctcttctttgggggagaaatgagcatcaatgaaaaggacttcgtccttgggggaaagagtaaaagctcacacgcaaaacgacttcgtctttggcataatcttaactcactcatttatgaccaaatgggaagagtgcactgtgagggctctaatgattccgtttttggcgattcatgccataaagggggagaagtgaactcatagcataaggaccgcaccaccaccaccanattcaaaaacttagtgccttccanagtctttatcatctgtatcctattatgtcaaa

SEQ ID NO: 4003 - DNA, 456 bp, Zea mays
  unsure (1)..(456): unsure at all n locations
agcttctcggcaacgagcctctatttctctcgtcaacacgacctccacaagcagaatttggatcataaactcaacaatctccaccttaaaataaatttcatcttgtacccaataacttgtaatcaattttctgaataataaaaggaataaactgatggtgccaacaaagccactatgcttaaacaattataccaactaagttctagcaaaactcaaacgtagctctaggaatatgtttagtcatcatgtcagctggattgaaatgagtactgatcttccatgtcctcaatttaccttctccaactatttctcagatataatgatacttaatatcaatgtgctttgtcctctcacgaagcatatgatccttntgtaagcaaataacactctgactgacacagaacaatgtaatacaaaatatatctctataaaactcagcatataaacctttcaact

SEQ ID NO: 4004 - DNA, 459 bp, Zea mays
  unsure (1)..(459): unsure at all n locations
tctgcaacatacacgagttattgtacgagactatatcccttgggaaaggagcaataccacaacaactttgggtgctacagcttcggcgcccgctccgggtcaagctaccctgtgccaacctttcggaagagatggcccggagcctggatgtctgaatggttttatgtgaaaaatgatctaacagcgcaaaataatgtcaaaagtatcattatgtacccaatntggcaacgcttcgggcttcgaaggccgaaggttgaaatggatgaagcagccgaagaatgccaaagagccttcggcgcagtctgctccttcattgggacaagggacttggtccatgaacacattgccttcagggtatggccacttgcagaatagtgggaaatgccgaaagaaaccatcatagagtccgacgaacgcggactagtcagataaaatacacattctaatatgcagatagat

SEQ ID NO: 4005 - DNA, 415 bp, Zea mays
  unsure (1)..(415): unsure at all n locations
gaagcttgaggcttgacatcagccagctacacgacgacatgtttatttgttngcagccctattctattccaattttaaggtacgatctttcttcaactttttactgtttttgtgatgaagcaaagattattgacgaaggttattttacacagagtatgctactaagcaaagccttgagaatgcaacaagacctcgaaaataagaagaatgaggttataatcgagggtctagaaaagaagatcaaagatcatgaagcttctctagaaaagacagatttccttcttcagacaatggagggctcattggctgaagcccacaccacaaatgccagattacacgatgaactcctccaaaaatcagaaaacttcgaccaagaaaagaaaagtttcgatgcaaggcttggagccgaagtcga

SEQ ID NO: 4006 - DNA, 420 bp, Zea mays
ctgtcccatagtagctcatggttatagtctatgttcagccactgtcactgtacataagtacattcacagattaatacatatgttcagaaataaaacttgtgtatgaatagacaattcttcttaatacaatgatgcgcagaactcccgtcgagataaaaatcttaaatttgaacttacttccccttcaaaaatttcaagtcttggtggagagggtcgtatccattgaggaggcaatcctttaagtgatgtttgttgaagtaaagtagcaaccatgtcatctctatttggtattattgaggacagcctgtgaataatgaaagaacttggttcataatcaaaccggtcgaagtgaaatgaattccgaagtatggattgcccatcagtcattgcaagcaggtagtaattatacatactcctgat

SEQ ID NO: 4007 - DNA, 426 bp, Zea mays
  unsure (1)..(426): unsure at all n locations
agctngcctttgtccatgcttaagttggcctgtattgttattatatgaatctgaactccgtagaaggctcatgctcaattgaatggatgcaaaggtcactgatagctcagaagcaacagccgttggcctggtataaagtatgaacagaatgtcatgttggtaaataccatctataatgtatgaacagattgtcaccgcagttgggttttgtatgcttactattagactcccagcggggacgagccattggcttttgatatgggcagcatgggcaaaggacaggtctggataaacggacaaagcattggacgctactggacagcgtatgcagacggtgactgcaaagggtgcaactacaccgggaccttncgggcacccaagtgccaagcatgctgctgccagcccacccagcgttggtaagggaca

SEQ ID NO: 4008 - DNA, 482 bp, Zea mays
  unsure (1)..(482): unsure at all n locations
gctgaatcaaacaactggggcgcgcgcgcgcgttatgccatgcatcatttccgtccagctagctgcgcgtggatgcagtacgtgcaaagcataagaaaatcctntgcttgggaataaaatcacctctgccttgcgttgcatgcgtcgccgctgcagagctagctagcacggccggccggccttcgtttcatctcaaacaaataaagttcaggacctgatatatatgcttcttagtcgatcagtctgcgtgcaaaacgacgttcttggtaccatatatatgtacactactacgtcttaattatgagatgtgtagattgtttgtcctagctagtggcggtacatacatgcatagtcatgtcgggttggacagttgtgggaggttgagctagagctacgtactagcttgtttgactgaactagctagatcgatcggggatcagcatgcaagctaatgaactttttaagatgcatgcngtctcgct

SEQ ID NO: 4009 - DNA, 396 bp, Zea mays
agctttggccccacctgaaagctcgcaccctcctttgatgttgggccccaggccactgttaataccctaaaacaggggtaccacttactactatacgaagacacagtacccacgcggctatctttggtcgcgtggggatggggctgtgcgtggggccagaccgcgactcaccccagcttcgagtgactactctgggccagtaacaacacccggccccaccacatggactgctccggggccgtcacgtggccataaaagatgatatactccaaggtatcaacggtgagtcccgacccccatgggagagtgtttgacccctgtatatacaagccggaccttcgggtaaggtctatgaccttcacgggcgcataccggaccactaggatgggatccgga

SEQ ID NO: 4010 - DNA, 431 bp, Zea mays
tgttcatctagtggcttggaaagatatcggctaattgatctttattattaatatatgcgacctcgatatcccccttttgttggtgatccctacgaaaatgatatcgaatggctatgtgtttagtgcggctatgctcaacgggattatccgccatgcggattgcactctcattatcacatagaagaggaactttgtgtaatttgtaaccatagccccgcagggggtgcctcatccaaagcaatagcgcgcaacaatgacctgcggcaatatactcagcttctgcgggtgaaagagccacataattttgcctctgtgaaacccaagtcaccaaggatctctccaagaactggcaaggctccgatgtgctctgtctattgattatcaccctgcccaatcggcatctgaataaccaagttaatcaaaagtggatc

SEQ ID NO: 4011 - DNA, 428 bp, Zea mays
  unsure (1)..(428): unsure at all n locations
agcttgtgaagattcttcatcgcaacatgtgtttatttgtgangccaaagccagcccatgttagtcttagcaattaagcaagtgtcgagttcagctctatcaaaatctaccaagtatagatgaccctctaacactcccttaaatgctattgaataatcacttcttctaaagacagtaacacctgtatccgcaaagagacacttgtaacccattttgcataattgcgaaactgaaagcaagttgtaatctaaagaatctacaagacaaacattggaaatggagtggtcaggagatatagcaattttacccaatccttngaccaaaccttgatttccatccccgaatgtgatagctcgttggggatcttgggtattctcgtaggaggagaacatcttcttctcccctgtcatatggtttgtgcacccgct

SEQ ID NO: 4012 - DNA, 287 bp, Zea mays
tgctattgggtctgtctttgaaataaaactactccctccattccaattaaaagacgtattgtcttttctaagcactaacttctgtatgcacttatattacattatgtctagatacataataaaaagggttaattgtgtctgtgccattataattatctatgttttgatataaacactgtttctagaaaagccaaaacatttaccatattgttttttcagcttgcactagaagtcctggtatattttattcctctaacacacagagagctacgtatcattatattaag

SEQ ID NO: 4013 - DNA, 371 bp, Zea mays
  unsure (1)..(371): unsure at all n locations
agcttctaaaggggagaacacatttgggactaacatatgttcattttgagaaagacagggtttgtagcgcatgtcaagaagggaagcaagttggtaccaaccatccacacaagaacatcatgacgactgacaggccgcttgaactactccacatggatctatttggcccgatcgcttacataagcatcggcgggagtaagtattgtcttgtaattgtggatgattattctcgcttcacttgggtgttctttttgcagaaaaatgtcaaacccaagagaccttanagggattcttgagacgagctcanaatgagttcggattaaggatcaagaagataagaagcaacaacgggacggagttcaagaactctc

SEQ ID NO: 4014 - DNA, 473 bp, Zea mays
  unsure (1)..(473): unsure at all n locations
gctatgaagattcttcatccaacatgtgctagtcggcgatgctctagccagcccatgttagtcttagcaattaagcaagtgtcgagttcagctctatcaaaattcactaagtatagctgaccctctaacactcccataaatgctattgaatcatcacttcttctaaagacagtgacacctacatcagtgaataaacagttgtagcccattttgcataattgagaaacggaaagcaaattgtaatctaatgaatctacaagagaaacattggcaatagaatggtcaggagatatagcaattttacccaaacccttgaccaaaccttggtttccatccccgaatgtgatagctcattgnggatcttgngttttctcgtaggaggagaacatcttcttctcccctgtcatgtggtttgtgcacccgctgtcgattacccagctggagcccccggatgcataaacctacaaaacaag

SEQ ID NO: 4015 - DNA, 428 bp, Zea mays
agcttcagcttaggcttcgtcttcagcttcgttaaacttcagcttcatcaatcttcagcttcgtcatcctatgtatatcaaacaacagagtaagaaaggtgcaaatttcaaaggagaaggtaaaagtaacaaacataagtttcttaccggcttaagatggcttcgagcttcgtcgcctgccatttttcgcccgccacttacccagatctgggtcatgaatcgatttccaatgcttcgggctaggcttgggatatctatcaaatctgaagctgacaagctgaagtttggtctgtttacaatgttttcatgtgtgcagccaaccttcaaaaaagcagtatctgtgcctcgtgaagctaccagggcgcagaagtcggtgttcccaccaatatcttcgtcagaggcatcaacttcgccttcaatatattcta

SEQ ID NO: 4016 - DNA, 488 bp, Zea mays
cagcttatatgttcctatataagagatcctcttgcttttctaatatcctattcttatcattcaaggcatcaattaattcattaattgtatctaccttggttctatctaggcccttaaataaacatgaataatctatttcatcctcatcactagattcgtcctcacttgaagaagcataagtggagtctcgagtacttactttcttctccttagccatgaggcatgtgtgatgctcgttggggaagagggatgacttgttgaaggcggtggcggcgagtccttcattgtcggagtcggatgacgaacaatccgagtcccactccttgccaaggtgtgcctcgcccttagccttcttgtatgccttcttcttctccctcttgttcccttgttcctggtcactatcattatcgggacagttagcgataaaatgaccaatcttaccacatttgaagcatgagcgctctccctttgtcttggtcttgcttggc

SEQ ID NO: 4017 - DNA, 426 bp, Zea mays
agcttcatgcaactactgccaaaaatgagaggtgttctgggtgcctctatctgatactatcttcttcggaacgccatgcaagcacacaatccgagacatgtataattctaccaacactgcactgtagtaggtggtcttgactggtttgaaatgggccgcctttgtcaaacggtccactactacctatatagagtcataaccagtatgagtgcgaggcaaaccgactatgataaccattccgatctcatcccacttccactgaggactctgcaacggttgcaacaaacctgcaggtctctgatgttctgctttaatcctctgacaactgccacatacagccacatactctgctatctaccttattataccgtaccaccagaatcatttctttagatcttggtacatcttctcactgccagcgtgtat

SEQ ID NO: 4018 - DNA, 466 bp, Zea mays
  unsure (1)..(466): unsure at all n locations
tgtgtatgatgaaaggttttcacccttatcaccttgtgagtgggataatcagggactccctggtttaggggagggcctaatgtgatggctcanctggtttatgcgtgagcacaaggattgtcccctcgtataaggaccggattgtcatctttcactacctgtactcatgacaagtacaaccactcgagactgtgtgggcagtcactcaatctgaactcgtacggtctaaccccanggttatgaaggctggggagcaccgggaggataaggagggggaaagttttgtccggtttggacatggtggtggcctgactccttccggataaccattaaagttatgacgtgcggtgatagaaagagattcggtattggatctcactgatcatgagatcgtatagccggactagtgggtaaagtgtacacctctgcgcagagtatgtaaacctattctaatagtgtagcatcc

SEQ ID NO: 4019 - DNA, 436 bp, Zea mays
  unsure (1)..(436): unsure at all n locations
agcttgtaggggttatgatgtcgccacttacttgatgctaacaagacatttccttcaccaaagccatcttcaacacttcgcccataaaaaagatcaattctctttttcaattgtctatctgcaagacaagtgataattacaataagtaacatgatatgttaaccagaaggtatgctagcgctagaaacgaccaaagaagatggtatgctaggaaagatattatgaagaagacattcacccggctcaggaaggaatcgctccctagttttcaatcaaaatcacttactcgagcagtcgcagatggcgacgacgacatataagttctagtttacaacaaacaatttaaaattaagcaacaatgatagtatattctgtagcaaataaatataaataagaatgttgagagatacgttaacaaaataagatgaatntacca

SEQ ID NO: 4020 - DNA, 357 bp, Zea mays
tttcttcagcccttctggcagcttcctgacttccataaatagcaataagcccttgattcgaaagtatcttcatgcatagaattgctggatgaagaattgcttcaaaagcattgagtgtcccacgagcaatggttgcattgtatgggtactccatgtctacaatatcaaacacaacttgctcagtccttgtattgttgacaaatctgaaggtcactggcatcgtgatcttgccgagcgctacaatctgccatctttcgaagccacaaagagggtgtgtagcatcatgaatcttatccttctgctctcgcatctgtctgaatgcctgtacaaatattatatccgctgcactgactgtat

SEQ ID NO: 4021 - DNA, 402 bp, Zea mays
  unsure (1)..(402): unsure at all n locations
agcttgtggnggtgggatcagccatctgttcttttttaatcattgccacgggctgcgcaactcatctcctagctaggagaggacaaggatacatcgaaaagactgtggcaagcgcagcacgactggatacacacctagcttggccggaacagagcaccgcgcttgcttgaccatgttcgtcacagctagcgcttgactaagtcccacaccttatcaacaacaactgtgcctctactgcctccgatctccgcgagagctcccgtcccgacgacctttcctcctgtatcactctacagattacaccacgcatcagcgttttctgttgcatgttgtactgcacacatctacgacgtccgattccagtgctttgctcactgacaccgtatcttatgagcaaggagc

SEQ ID NO: 4022 - DNA, 343 bp, Zea mays
cacctttagtcttatgtgactaagcggtgggagactctttttatagcgagaaataattaacaaacgggacgtcataagacatacattagatgaagaaagagataagtgcattgcctgtcatgagcatcacatatattttattgacacactgctccctatgaatagcctgagatatagtgtctatactttgacctaaatatgtgctttgcggcattgagtacgagagtgttatttactgaaatgcacatatttatggggaggaaactatatcatatgattaacatctattatcaaatctatgcagcttaaatgtgttgcatcaatcccaatatgggagattgaa

SEQ ID NO: 4023 - DNA, 419 bp, Zea mays
agcttgtgcaggttcttcatccctacatgtgctaatcggcgatgccacagccagcccatgctagtcttagctattaagcatgcatctagaccgacctcctcttttgcaaaatcaactaaataaagtgtgccgtctaatacacccttaaaagctaatgaaccatcacttcttctaatgacagacacatctacatttgtaaatagacaattatatcccatattacataattgactgacagatagcaaattatatccaagggactcaactaaaaacacattaaagatagagtgctcatttgaaattgcaatcttgcctaagcctttcaccttgccttggttcccatcaccaaatatgattgaatcttgggaatccttgtttttgacgtaggaggagaacatcttcttctccccagtcatatg

SEQ ID NO: 4024 - DNA, 442 bp, Zea mays
gtgccggctgccaacatactaaagatacagttatgtccactacggtgtgaattaaatgaaataaacacccagtctagagtatattctccatgtatgagcatcaaagcattgctgtattataaatatgagaaccacaactgtactgtgtctgaaaacatgtaacagcaccagtaggactggaaaatcattatttgcttgctttgaagaagccaccttaccattctgtggcctgaaaaacatataaactcaagtatgctaacataaagcaacaatatgtaactgtagatttgaataacgatacactttgtctcctaaatatatattaagtatcatctcatgaaatactttgaagcacatgcagcccttcaatgagtgatgaatgaaacaatctccttattatcaatatagtcatctgattgcctttctggtagaagcactatat

SEQ ID NO: 4025 - DNA, 438 bp, Zea mays
  unsure (1)..(438): unsure at all n locations
agcttctaaaaggagaacacattntgggactaacctatgttcattttgagaaagacagggtttgtagcgcatgtcaagtatgaaagcaagttggtgttcatcatccacacaagaacatcatgacgactgacaggcctctcgagctcctccacatggacctattcggcccgatagcttacataagcatcgacgggagtaagtactgtctagttattgtggatgattattctcgcttcacttgggtgttctttttgcaggaaaaatcacaaacccaagagacattgaagggattcttgagacgggctcaaaatgagttcggcttaaggatcaaaaagataagaagcgacaacgggatggagttcaagaactcacaaatcgaaggttntcttgaggaggagggaatcaagcatgggttctcttctccctacatgccacaac

SEQ ID NO: 4026 - DNA, 436 bp, Zea mays
  unsure (1)..(436): unsure at all n locations
agactaagatcaaccacattgccattngtatccaaatacagttgaccatttgttcccattggtgtgtgaaatggatttccttcatccattccaaacttctataacatatctttgatgtacttgccttgactcacgaatgtaccattcttcatttgcttgacttggagtccaaggaactaactcaactctctaaccatagacatctcanaaaccttgatccatcatcaatccaaactcctcacaaaaaatcttgatttgttgatcacacagatttgtcacacgaacaaattgtttccaatatattggtgagaagaatagtatgaatctttcccatcttaaatcccttcgagagtataaagtctccctcaaccgctcatatcatgttgtaggtgctngtntcaatccatagaatgccctcttgatcgtttcacatggg

SEQ ID NO: 4027 - DNA, 438 bp, Zea mays
  unsure (1)..(438): unsure at all n locations
agctngtgaacagtacaaatttagaagggagaaagcagcttcagcagatcagccgaagcccatgctcttatgtgaggacatatcagagcagaaggtgctgttgggctctcaattatccgaagaacaggagaaaaccttgataaagtttttgttcaacaacaaagatgtttttgcatggtcagccactgatctttgcggagttaacagggatgttattgaacactcgctcaatgttgacccatctttcagacccagaaagcagaggcttcggaaaatgtctgatgacaaggccgaaggcgctcggaatgaagtcaaaagactcctcagtgcaggagttatcagagaagtaaagtacccagaatggctagctaacactgntatggtaaaaaaggccaatggcaaatggcgaatgtgtatcgattntacgaatctcaacaa

SEQ ID NO: 4028 - DNA, 451 bp, Zea mays
  unsure (1)..(451): unsure at all n locations
tgctgtggtaacttcacacctacccgtctatttatatagtgctgcaggtaagaaagtgaatcgtcagagtcttntacaccagacaaacagtcgctcgcacccactgaacagtaggccacacaacctgagaaggtgaacctgcatggtgggaccgcttcacgctcggaagttgtatcgtttcccggcaacgagctcagggaaggtgtttttcggaccttcggcttcccgaagcctaagagactttnttcacggatcaagctcgttacgaaaaacgatctagcaccgcgaacgggctactgttgggaccatgcttcgtcgtcgaaggtcctgaaggaagaaacaccttcggcaaaatctgtntatacgtgacaccgaagctaccgctcataaagcttcgttattatagcgtntccgaagatgaaggatcgaaccgacttaaagatggaatgac

SEQ ID NO: 4029 - DNA, 435 bp, Zea mays
  unsure (1)..(435): unsure at all n locations
agctntatcaaatggacgtgaaaagtgccttcctcaatggaccaatcaaggaagaagtctacgttgagcaacctcccggctttgaagacagtgagtaccctaaccatgtctataggctctctaaggcgctttatgggctcaagcaagccccaagagcatggtatgaatgccttaaagatttcctcattactaatggcttcaaagtcggaaaagccgatcctacactctttactaaaactcttgaaaatgacttgtttgtatgccaaatttatgttgatgatattatatttgggtctactaacgagtctacatgtgaagagtttagtaggattatgacacagaaattcgagatgtctatgatgggggagttgaagtatttcttaggattccaagtaaagcaactccaagagggcaccttcattagccaaacaaaag

SEQ ID NO: 4030 - DNA, 462 bp, Zea mays
cacatgtgctaagcggcgatgccacagccagcccatgctagtcttagctattaagcatgcatctagaccggcctcttcttttgcaaaatcaactaaataaagtttgccgtctaatacacctttaaaagctaatgaaccatcgcttcttctaaagacagacacatctacatttgtaaatagacagttataccccatatgacataattgactaacagatagcaaattatatccaagactctctactaaaaatacattagatatagaatgctcattagaaattgcaattttacctaacccttttaccttgccttgattcccatcaccgaatataattgaatcctgggaatccttattcttgacgtaggaagtgaacatcttcttctcccccgtcatatggtttgtgcatccgctgtcgataatccagctggatcccccggatgcataaacctgcaagggcaaatt

SEQ ID NO: 4031 - DNA, 430 bp, Zea mays
  unsure (1)..(430): unsure at all n locations
agcttactgaggtccttcgngactcatttgttggtaactctatgacagngatgatttcttgcatttctccaaacgcaagttcatgtgaacacacactaaatacattgagatacgctgataggtaacaatgttatatccaagtgatatacatgattgtatgtttcaaaaaaatgcttcttctcactaacgtagtagatttctcattaaacaacagggtcaaaagtctttccaagggcggaaatacaagataagagcagtccacaggaccaactaccacttctagccgggattctttgtcagctttatcatattcattgcctgctgaagctgaagaaatttctaatcaagttcaagagaagagaccagtcgatacttataggaagggcactgaaaatttatctccaacccttctgtggagtctgaccgaaat

SEQ ID NO: 4032 - DNA, 460 bp, Zea mays
  unsure (1)..(460): unsure at all n locations
tctcagcttgcactgtgtgttcaaataattttctagtattcgttggcatctcgatcaggttcngcaacagcgcattttaatttggcctcggctaactattttcgaaggtcttcaatttcacttttctgggcctcagctngaactttggaactagcttcgtcttcttttatcttgtttaccaatgaaattaataatttatccttttcaaggccttcgtttcttagttcaatcacctctgaatgaaggttgttcaaagccattgttgcacccttatcttcgatatttttctgtgccctgagggcattgctaaggatcaagccctgcaaaaggagtatagtattaagtataaacaagtgaaataatttgtttttaaatacaaaaattgatnttcgcacctttatactattatatgccagactgtctgccaattcattcttcgacagtactgagaggccatctt

SEQ ID NO: 4033 - DNA, 438 bp, Zea mays
  unsure (1)..(438): unsure at all n locations
tgcaagcttgagcggtaactggcttcattagaaacccttttttctggtgatcagcatgtccttcagcttctgccatgatgtgattgttcctggcccaatataggagtaccaggtttgtgtaacattcttgacttcctgacgaaagatttctccctgactgcaatattgccaccatatgaagatatggtagcttcgtaactcatcagaaactgcttcggatctgagtgtctgtcatacatggagagctgggtggcttgtaagacgggggccagggtgtatcctgcagttctgctgatagaggagaagcatcatctaaagcaaaatttccatgatggaaatcttcataccattcattctcgttgtagaagccctcttggtgcagctctctgtgctggggtcttcngtgttgctcatcttgagtaagatgacacacttctt

SEQ ID NO: 4034 - DNA, 387 bp, Zea mays
  unsure (1)..(387): unsure at all n locations
tcatcatccacagcaaaacatcatgactacagacaggccactggagttactccacatggatttattcagcccgatagcttacataatcatcggcaggagtaatgaccgcctttgtaatgaggatgattattctcgcttcacttgggtattcttttngcaggaaaaatcacaaacccaagagaccttaaaaggattcttgagatgggcccaaaatgagttcgaattgagaatcaagaagataagaagcgacaatgggaccgagttcaagaactcacaaatcgaaggcttccctgaggatgatgggatcaagcatgagttctcttcttcctacacacctcaacataatggtgtagtggagaggaagaatagaactctattggacatggc

SEQ ID NO: 4035 - DNA, 429 bp, Zea mays
  unsure (1)..(429): unsure at all n locations
agcttctaaagggagaacacagtgtgggacttatttatgttgatnatgagaaagacagggtttgtagcgcatgtcaggcagggaagcaagttggtgttcatcatccacataaaaagatcatgacgactgacaggccactcgagctcctacacatggacctattctgcccgattgcttacataagcatcagcgggagtaagtactgtctagttattgtggatgattattctcgcttcacttgggtgttctttttgcaggaaaaatctcatacccaagagaccttaaagggattcttgagacgggctcaaaatgagttcggcttaaggatcaagaaaattagaagcgacaacgggacggagttcaagaactcacaaatcgaaggcttccttgaggaggagggcatcatgcatgagatctcttctccctgca

SEQ ID NO: 4036 - DNA, 357 bp, Zea mays
  unsure (1)..(357): unsure at all n locations
ccacataactcctgcgctgaacacttacagcagttgtacctccggctggcttgctgctgggacgatttgtgggactgtctcaatgctaaaataagaacaaggcacacaaaattgtagtgtaaggcccttcgtcctccataacgatatatccctttnggatataaagcatctctgacgaaggttacgaaggacataccttcgtaagcataacaacgaagaatgatacattcacataaatcatagaatatgaaataaacatttaaatattggcatagaattatctctatttgtaccattgaatataaatgactctgaattacaaatgtaccttcggtcctgcggaaggcanaagtacaa

SEQ ID NO: 4037 - DNA, 432 bp, Zea mays
  unsure (1)..(432): unsure at all n locations
agcttctccttgtcgtcatcaaccttgacatataaccactccgacttccagcctgctgcccatttgcttcggtagctgattacaggaaactttgtggttttccggtaagcaaaattatagcaaccaaaattgtcatgcaatccatcttttctagcctttgtctgatagtgcagttcgtgaactcgacagaacctgtccgcaaacggctccaccgcttggcttcggagggcccagatataaacgctaagtctaacaatagcgttaggagtcagctgatgaaagtagataccaaatctcttcattacctctgcaataatcccatgtagggggaatcttaatccagcctttagaaagctcttgaaaatgacaatttcatccttctctggctntggggtagtctcttctcccccgaagcgtaatagcttcttctga

SEQ ID NO: 4038 - DNA, 391 bp, Zea mays
tatgaggccaaccattatgcaaaggagctgaaatatccgaatggggcagtaatattcaatgggacaaatgaagatgattttttatactgcctaccggataataaggaactatctgtctgtcgagaaatggccaggggcatatgcttcccgaagctcgaagttggactaacgccatgacaaagaggatctccagacagcttgcgtcaacactgaagtccgaattaaccttaaaaacccccattatttttacccatattctttcttattaatctttcttaggctatctacaccctaaccaaaacccaaataatataatgcttatatacctcgatataactaaatgacttgaaagaaatttgtaatgtgataataaaaacagcgttaagcatca

SEQ ID NO: 4039 - DNA, 428 bp, Zea mays
agctagacattgctcccctgttggaaaccaatgccatccttaatgccagggcgtctcccattataaagcatactacgagcaaatttaaaattttcaatttcgagctcatactcggcaattttagcacttaattgagctatgtgatcattttgtttcttaatcatggcaaggtggtcatctatagcttcaacattaatatctctacgtctagtgcaaatagtcacatgatcatcagtagatgtacatggtttgcattcatttaattcctcaatcttagcatttaatttaatattctcatttctaagacaggaaatagaatcattgcaaacattcaattctttaaccttagaaattaaactagcattttcatttctaagactagaaattcaatcatgacaaatgctgagctccttagataaatattcaca

SEQ ID NO: 4040 - DNA, 469 bp, Zea mays
  unsure (1)..(469): unsure at all n locations
cctgcaatggaaggagcaacatatctatgggagcaatagggttgaacccatatacaatttcgaaagggcataaattagttgtagaatgtactgccctgttataagcaaactccacgtgtggcaaacattcctccaaattcttcaagttcttttttaccattgttcgcagcagcattgacaatgtacgattcaccacttcagtttggccatcagtttgggggtggcatgtggtggagaacaaaagtttagtcccaagctttgcccacaatgtcttccaaaaatagctcacaaacttcacattacggtcagatacgatggtcttgggcactccatgtagtctcacgatttctctgaaaaacaaattagcaacatgtgaagcatcgtcgctcttgttgcatggaataaaatgagccatctttgaatatctatcaaccacaacanaaatagaatctctctgtttcgagtcatc

SEQ ID NO: 4041 - DNA, 417 bp, Zea mays
  unsure (1)..(417): unsure at all n locations
agcttctaaagggagaacacgtgataggtttgacttacgtgcatttcgaanaagatagaccttgtgcagcttgtcaagcatgtaaacaagtgggaggagcgcatcacagcaagaatgtgatgaccactttaagacccctggagctgctgcatatggacctcttctgacccgtcgcctatctgagcataggagggaagaagtatggtttagttattgttgatgacttttcccgcttcacttgggtattctttttgcaggataagtctgaaacccaatggaccctcaagcgcttcctcatgagagctcaaaatgagtttgagctcaaagtgaagaagattaggagcgacaacgggtccgagttcaataaccttcaagtggaggatgtccttgaggaggaagggatcaagcacgagttct

SEQ ID NO: 4042 - DNA, 471 bp, Zea mays
  unsure (1)..(471): unsure at all n locations
tcagctagctcgggttaatcgatgtagtcctgtaatntgatctctttacaaccatggcaaataagatgttcaataacactacttatttggcatcgcgttcttccttctcatggggtaaacaggaaaacattgggctttagaatctttgtatgactcgatagtggtactagaaattgttctaaagaaatgttataggataaagaagtaagttaataaagttttggactgtattctatcattttcatctcacttatcctatttctttcaggaatcataaaagcatatggaggaactatgtatatgctacaaataagcataagaagcatttttacatcagaagccaagtgttctgatgattttgttttttcattgagtttctgttattggttagcatgtcatatattgactgattatggctgcattaccatcttggatattatgactcgtcttgatgatggtgcgacagaatga

SEQ ID NO: 4043 - DNA, 436 bp, Zea mays
agcttagagaaatctgggatgaatctgttattatttccatctagtccaagaaaactccggacttggtgaacagttgttgggggtttccattctagaatatctttgaccttgctaggatctaccgcaattcctttagctgataacacgtgccccaaaaattgaatttcttccagccagaacgcacacttgctgaacttggcatatagctggtgttcccttatgcgcgtcaatacaatccgtaaatgctgagcatggtcttcttcattcttggaatatatcaagatatcatcaatgaagactaccacgaacttgtccaattcaggcatgaataccgagttcattatataagtgaaatgggcaggagcatttgtgagcccgaaagacattaccaagtattcaaacaatccatatcgcgtagtaaacgcggtcttcggta

SEQ ID NO: 4044 - DNA, 419 bp, Zea mays
  unsure (1)..(419): unsure at all n locations
ctcagcttcggcgaccaatgacccagctcttcgagtgctatgatatctataccctgagcatctgtttggtgaaagcaagtgtcctctgacctattatgtcccatttactttataattcatcaacccgcataccatgatcaacctaaggattgactatctttgtatctaccttatccttgattaccttttgggttactatggttagcttcatgctattgctttactttaatcaatgaacatgatgcgaacacttacgatacgatgttgtcattatgattacgatgttggactggtgatactctaaggggctcgagcggtttctcgagtgcctctccgtaaagacctgttcactggatgactgccccggaatacagagccaccatganggtggaatgggacaccctttactgaattattag

SEQ ID NO: 4045 - DNA, 425 bp, Zea mays
  unsure (1)..(425): unsure at all n locations
agctngatttaaaattatccacataaataactctattctaggcattaaataacttcagaagaatcataacttaataactctaactccgactttagtggttcgcgtttccacgatctcgtagcaatgcgtagattatcattacgaaacttattcttatgtttggtatgatgttaattctatttataccatatttgtttgtattgctacgactagcgtgaggacacgtgtcatctgaaaagcaagttggtacctggaatctcaagtgccaggcaagttgtgcccttgatcacttctttntacctactcatgttctgattaatcataatgatctgcataggttaattctgatgggacccaataggttaccctagtatgattatctttataccgttgtaccactgaactttttgggagtacttgctagt

SEQ ID NO: 4046 - DNA, 404 bp, Zea mays
tgagctattcttgcctgaagaatatccaatggctgccccgaatgtaatatcttgatcaatcatgagattgttaactaaatcattgattggcatctatcttgctatggtgtatgtgctctagcatttatttatctccattgatgtgaattctggattgtatcctaattacaaccgtttgatacatttaattcaacttgattaactcctatggggatcatattagtgttatgtgtcctaacagagcccagtgccatgcacccttccaatttgttatatgctacctgtctcttcctgtcttccatacttgcaagtaagtagtttcactctgcatagtcatgagcagagctgattgaaggccaaagtgaaagctgaccatccacacttctaaataataaaagggcata

SEQ ID NO: 4047 - DNA, 429 bp, Zea mays
  unsure (1)..(429): unsure at all n locations
agctntcttcggtgccatagcgagggtctatggtcttcctaaggtgttcaaaaaactcgaagtggaagtgagttcaccggaggtgggcgccaatgttggggacttgttctcaagtgctatgagttaagaacaaggcaacacagagaatgttaaacgataaagtccttcgtcctttgaaacattatatcccttatgatataacgatcttcggacgaaggtcatgaaagacgaaccttcatcgtcacaatatacattaatgaaagacgaagcatatgaaacataaaagatagcatgaataatcatataacatcatccatttaactttattatatcatcatagaaaaatagagacaataccgaattaaaaatgtaccttcggcttggaaggagatgaaaatacaagtgtgacgcaaaagcaaatgccaagtc

SEQ ID NO: 4048 - DNA, 449 bp, Zea mays
  unsure (1)..(449): unsure at all n locations
ctggtttgtcataatcgaacgaagctccatcttgaagcctgcttcggaggaaaaaagtattaaggtttcacaagttcatagctaaatggccagagtccgctctaccgccagggttgaacgtgagggggacgaaacggaagcttcggagactgtccctatctccgaagccatgcaacgatccgggttagtgacttcggaaagggctcctgttgatgatgcagaacaaacaattgctgaagcaaaatgagaagatgctgaggaaactgaccccgaagatgattatcaccttgctacgccaagcanacccagccatttggacttcgggaaatctactgtttcgaaggctgatctgtccaagatggtaaagtcaggctatttcactgaaaatcaatagaagctactacgcttcggaggagaagagactgacccagagccggagaaagatgaaa

SEQ ID NO: 4049 - DNA, 435 bp, Zea mays
  unsure (1)..(435): unsure at all n locations
agcttgaaggccaagtcaaaaagcaagccccaatatactttgtatcctaagttcttagtttaacaaagaanaattatacagaattggagaaggtgctgtatgctgttttgatggcctccaggaagcttcggcattattttcaagcatacaatatagttgttccttcttcacaaccgttgaaagatattatgagaaatagagaagctactggaagggttggaaaatgggttgcggaactcaatgaattttgtattgattatgtgcatagatcttcgattcagtcccaagcgttggcagatttcattgctgactggacgccaggggctcaggaagaagaaacgagtaaagatgtcgaagtttggacagtattttgcgatggatcttgnggaaccttcggagtaggagcaactgctgtgttggtcgcaccttccaaag

SEQ ID NO: 4050 - DNA, 469 bp, Zea mays
  unsure (1)..(469): unsure at all n locations
ccgcgtcaccggaatagctcaatcgtgctcgccggagttcanaaacccgccggcgcacgtggaccgggtaagcctctgcaccattttccaattcgttgcgcgcatggcctctacatcaccccgtggagctcctcgtgcaccttaattgaactataccgccatggtttggccggaacaggagccgccgacgacccccgccgcctgtgctcgtggccagggtagctccgaccacctccgacgccgacccgcacaccgacgtgaccgtcgtgacctcccggacgtcactgaccaccccgccggagctctactgccgccggtaagcctcgccgccgtaatctatgccgcgggtactgtttaagtcagtcagggagcgcgggttagatttcggttaggtcccagggggtttgtgcaatgtcagtgacccatgccaatagtataccgaggactggtttgtgagaaaagaatgaga

SEQ ID NO: 4051 - DNA, 449 bp, Zea mays
ttaacacattgattaacccactgagtcatcaagttgccgggtcaaagtatccttctgcatttgcaggaaatggcttgcctcgatttgttcctttcccatagcccacttatatgggaccttcatcattgcgtcaacccactgtttattgtattctagacccattctttagagggcacatacaagccttcaccatctctttaccatactttctgcactctcggcctacattcattcttactgatatcaattgtagctgctacaaagtactgccctctaattgatgtcaatgcaattgaacaagatttgagtctgtgatttatctaacattggacatgaaacaggtggttcccaacacatgagcgtgctactgccgttggcatttccatgggtggattccatcttggaaatgtcataagcttcctagcaacaccaatcatcatgtcacacat

SEQ ID NO: 4052 - DNA, 433 bp, Zea mays
  unsure (1)..(433): unsure at all n locations
agcttcatatcttggtactcaatttgaattgggttctttgagattagtaataagagccttgagtacccacacaatccttattgtggcctttctctttgtgtaggcacccacatatacttgacaaccatcttacatggtttcaagtcaatatttaatcacacagataaaagcaagagttaagaataagagccttttctccttttcttgatacatcgntgtgttgccttctcgatgatgaacctagcttgaccttgggtgcacctatcttatcaaggttagtcgcataagcattcataacatgaagacaagttatacatgtgaattacaacttagtgatccaattcaatgtgaagcatatggataccgatttaagtagatntctaagatatgaaaatatgggtttccaaatcttagagagtatggatcactaact

SEQ ID NO: 4053 - DNA, 462 bp, Zea mays
acctgcctatacagactaacaagagttgttttcgtaaaacgcatggaatctacaaagaatttactctgtgctgtattgctgtggaatgctctacccctgtaacagtgtctaaggtaactgctcttgcccatgttttatggcttcaagagataatggtaattccttgtctattgttgtgatgatcctaattttatccttacagtgctcatctttgtcttgcaaaaggaggagccctttcccatccccgataaggcgtgagagctgttctccatctcctaggaggcgcaatagtccacctccatcacggaagcgttacagaagatagagcagtccgagtgtcattagctctccagttactgcatctcacagttcccaccttgggttggaagagaataagaatgctattgatacgcacatgctacaagaagaaaagaaaaggtgggaagtatctgctctactatg

SEQ ID NO: 4054 - DNA, 237 bp, Zea mays
agcttgtttaccgagtgcaggacacgcagcacattttttattctgcaaagacttctttgccagcgaagcactcggcaaaaacttctttgccgagcggcaaacattcggcaaataaggcgctctgtaaagaaccgttagtggcccgctacagttgatgttcgtccgactctgtccaaggcctttcatggacactcgggaaagcatattttatatttttgtattccggcccccacactt

SEQ ID NO: 4055 - DNA, 336 bp, Zea mays
tacacgcttaaaggctagtgaaccatcactgcttctaaagacagacacatctacatatgtaaaaagacaattatatcccatatcgcatagttgactaacagatagcagattgtgaccaagagactcaactaataacacattggagatagagtgctcattagaaatatcaattgtacctaacccttttaccttgcctcgattcccatcaccgaatataattgaatcttgggaatccttattcttgacgtacgatgtgaacatcttcttctccaccggcatatggtttgtgcatccgctgtcgataatccagctagaacccccggatgcataaacctg

SEQ ID NO: 4056 - DNA, 433 bp, Zea mays
  unsure (1)..(433): unsure at all n locations
acctgcngcatgcaagcttgagtcaatcattttgcaaaggataattgattcttttttatattatcnggggacgaagcacataccagagaagataaaggctggagtagccaaatgtttcaaggaagaccatcaaggtgtgatattgtttaaaaaccgcatagtattgccaaagaaccaagaactccgccagctaattcttgatgaagcacatcttagtcggtattctattcatcccggaagcactaagatgtaccaatacttaaagcaacattactggtggacaaagatgaagatcgaaattgcacgctatgttgcttagtgtgacacttgcagacgtgtcaacgccatacacatgaatactgctggtccattacagtcgttacccataccaacattgaaatgggaagagatcaatattgactttattgtggga

SEQ ID NO: 4057 - DNA, 432 bp, Zea mays
agcttatcacgtgcgagttctggatcagttatgttctattcttgggtcacattataaaccgagaaggattggttgtagatccgaagaaggtaacagctatcttggactggaaagcaccaaaagatgtccgaggaatcaagagtttcatcggaatggccggttattatcggtgtttcattgaaggtttctccaagattgcccggccaatgacagcctcgttagcaaagaaggttgagttcaagtggaccccagcatgccagaagtcctttgagacattgaaggagaagttgacaatggcaccagtactgattctgccagatgttcacaagccattctcagtatattgtgatgcttcatacgccggactggcgatgtgtgtaatgcatgaagggagagtagtgacatactcgtccctgacagtgaaggttcttg

SEQ ID NO: 4058 - DNA, 472 bp, Zea mays
  unsure (1)..(472): unsure at all n locations
tgcatggtgcgtgtacggataatcgttcttcttngcagccatgctttggaaagggttctaacaatttggcttcggtacagttccgaaggcatcttagtttcccttcgttgaccccaccaaacagcatagcccctgatttgtatctgcaagatatggcatattttttcaactcctctttttcggcgtctgttaattcttgtccgagcaaatcttgaaagttaaaatcttcttcttctgaaatttcatcaatttgctctttccccttctcagttgccgtattcactgtagccacggtagcttcctcttcagccattttcagcagtatattgtcaataacctcaaatgtggtttccaggttcgaatcttcggtggccccggcttctgccccggtagcttcagctccgccggttcagcttcagtagttttagacaccgttgccggtggcggcgtctgatggtcacatctgtacttg

SEQ ID NO: 4059 - DNA, 410 bp, Zea mays
agcttggtgccaatggagaagcaaaaattcttgttgtcttggctgtcaaactgcttgccgttgtcaactgttagttcggacggtactccgaagcggcaaacaatgttttgccaaaagaatatctgtgcagactttgatgttattgtggaaacagccctcgcctcgatccatttggtaaagtactcgacagcgacgaaggtgaacttgaggttcccctgagccatgggcaggggcccgacgatgtccagtccccagcgctggagaggccatgtgtgggcgatcagttttgtgaattgtgaggggctgcctgatcgaggagaaaacttctggcaggcttcgcaggaccttgtgacccgatttgtggcgcagatcattgcgggccagtagaaaccttggcggatcacctttgc

SEQ ID NO: 4060 - DNA, 330 bp, Zea mays
  unsure (1)..(330): unsure at all n locations
cagtacaagggacctggttcaggaagttttggctttcaaagtttttcccagtttgaaagaatgggaaatgccgaagctaaagggggagaagaaagaatgtgaacttgtacgtttaccttaccatttcaagtttaagaaatactttaaagcgccttgccaagagtggctagacacaattgaagtaatgtgtaatgaaatacttggcaattattccaaataagaagatcaattaatgactgcgggccttcggtcacccgtccgaagccgaagactgaaccgagtgttggacgcacttgggttttgaataccctgactatgaanaatctgaac

SEQ ID NO: 4061 - DNA, 444 bp, Zea mays
acccggatccttaatcaccgcggctgcaacttggtggcggccagtgcattatgttttgtatcctatagaaagggcgttgaaaaagctcagggcgtctgttcggaacaaagctagagtcgaagggtgtattgcggaggcttttgcccttaaggagatatctcaattctcaaccaggtatttcgctcgagccaacaatgtgtttgcgccttcagcgcgacttcatgtcgataatgaatcaccccaaagcacccttcaaatttttgcgaatccgggtaaagcagttggaaaagggagtgtacgtcacattgaagcatcagatttgaacacgctaatgctatatatgtatagcaatattgacagcacacaggaggcgttcgagtaagtttttctcataattacgaccattctctcatctcataatttctatagtgcgtaatctccatg

SEQ ID NO: 4062 - DNA, 406 bp, Zea mays
  unsure (1)..(406): unsure at all n locations
tgtacatatgatntacaaatgacacaaaggtagtattgtcttctatctttatcatattgatcaccgaatcttgtgaacacctccttttggccttgtttgacttctgcattctgctagaaatatgccctaaagataatcatagagagtagcatatctctttgtatccatgatatatatatattgcttaattgaatatccatgataggcaccttgtgctgattatcaattatgtgaattgtttgtgagattctttacttgtatggctattctaaatgatgtccctggtcagagtcgatgactatcacatatattagttaatgtactacatttcacaagtcatggacatggagatgtccaactaataattggggcgcatgtatgacatgacgcttgaccgacccaatgt

SEQ ID NO: 4063 - DNA, 425 bp, Zea mays
  unsure (1)..(425): unsure at all n locations
agcttagaanaatctgggatgaatctgcgataatacccagctagtccaagaaaactccggacttggtgaacagttgttgggggtttccactccataatatctttgaccttgctaggatctaccgcaattcctttaactgataacacgtgccccaaaaattgaatttcttccagccagaacgcgcacttgctgaacttggcatatagctgatgttccctgaggcgcgtcaatacaatccgtaaatgctgagcatggtcctcttcattcttagaatatatcaagatatcgtcgatgaagactaccacgaacttatccaactcgggcatgaacaccgagttcatcanataagtgaaatgggcaggagcattcgtgagcccgaaagacattaccaggtattcgaacaatccataccgcgtagtaaacgc

SEQ ID NO: 4064 - DNA, 488 bp, Zea mays
  unsure (1)..(488): unsure at all n locations
tctccatcatctctctctctatttctttggcacanagatgtctataaaagtagcttagctccgctaatgctgtccagacatcatcttttacaaaaccacgaaacataacaggaaggagtctttccattattatgtggtagtcatgactcttcaacccagaaaacttgcccgtcttcaaattcacagaccttctaaagcccgcggcgtaaccatctgggaactttaagtgtttcaaccatttcatcaattgtttcttccttttaggtttaatactgaaaggagcacgtggcttcttctgattctctcctatctccatagttggtcttctacagattaaagccaagtctttccttgccttagggatgtcttttgttttgtcggtgatattcatgcaagtgctgataatgctttcacccatatttcgctcctggtgcatgacatcaatgttatgcattataatcaaagctatcatataaaggaagtcccat

SEQ ID NO: 4065 - DNA, 428 bp, Zea mays
  unsure (1)..(428): unsure at all n locations
ttagatcacctgcagcatgcaagcttggacaccactgtcgcaattttttgtatttgattnttgggtgaaggaagatgctttcttatgacatatcgttaccgatggtggaattaaagtgaacccatgaaagataagtgagatactggattggaagcaacctaaggatgcgtccaagatcagaagatttcttggattggcaggatactatagaagaattattgaaggttgtttccaagttagtaaaaccacttacctctctactggagaaaggcaaagagttcaaatgggatgaagctcgccacaattgttttgaagaactcaagataaggttaaccactgcaccaatactggtaatgccagacatccacaagggatttgatgtgtattgcgatgcatcacaccttggacttggatgtgtgctaatgcaa

SEQ ID NO: 4066 - DNA, 438 bp, Zea mays
  unsure (1)..(438): unsure at all n locations
tcttcacgaagcatgaaaagaaaggaaggtgtttttctttcgccgaaggctcanaaaacagtatgtatgcaaagtttcatgcatcgtaaagaatgaaactataaatagatgatatattacatttaaagttaccatatattacacatctctaccgttcatatgtttttacaatagcattcaatcctctttaagtactatctccgcagcttcgttcaatagttggatgacaaccttgtccataatggctttcagccatctttctaaattcatcgaacaccttcgggtgggggcccggagatgcttcaacatgttctgagggaagaaaagataccgctttgttactattacaaaccgagagcagaatcnggaatgtaaaattacagcatgattaaaaccactaattaatacctatttcccttcgggctctgtacttgtttc

SEQ ID NO: 4067 - DNA, 381 bp, Zea mays
agctttgtttggagagagaagacattattttttatatcggccctgacgaccaagtcacactatcttcggaaaatcatccattaagcacagtcacaattgacgcttttgaacatggagatattctctgacgtattccaattgtgagagctggaggggacagttccacaccttgctcccaaagaatatgatgtggttgttgacatgagctttatgaacgcacggcttcggctcccattatgctaattcctatttgaagtactgaagacctttgatattttccttcatctagttacccttgtagccattatcatgatgggggtttacatttgggccgtgagaagccagtggatagatccaagcgcataatgtttctgctacatg

SEQ ID NO: 4068 - DNA, 474 bp, Zea mays
ctaccctataggctgtaccgttaagggcctctatcttaagcctacatcgagaaggtccttaatcgacacagacagagacactacatcgagactctcttctcgtgcaagtcacccgcccggtctcagctttatcatttcaacccaaattttggtaccttgcagaggtacatcttttccgatgttgaacccatcatggccatgatggatccaccatcaagttttgtttgtgaagaacatcccacacactttgcaacatcatcttttgtgaaaacaaaacattatgtttttctagagcatggctaagcataataaaaaccttttataaaacaaggatttaaggagaagtaatcaaatccaacgaatgaaatgcaagaattggtttagcacacaactgcttccacctaatgcaataagcaagtgagaaaaatttaaacgaacaatgacgtgaaaatgcccgtggctttctttgtactg

SEQ ID NO: 4069 - DNA, 427 bp, Zea mays
agcttgtaggaaaatagatcagagatctatcttatatggtctggagcctgcgaacctagccaagccgggccttgcatggaaacaccccattcttcatggtatatggatcagaagcagtattaccagcagatttgatctttggagcacccaggataacatttaaaagcatagctaaggcagaagaaactaggctagaagatgttgatatattataggaagaatgtctgaatgttgtcattcagttggccagatgccagcaaaccctgaggcgctaccacaacaaaacagtgcaacatcgatccttcgcagtaggagacctagtccttcaccgagtactgacgggagaaggatgacacaaactgtcacccccatgggaaggaccattcatcgttgcagaggttacccagccaggatcctaccggcttac

SEQ ID NO: 4070 - DNA, 349 bp, Zea mays
  unsure (1)..(349): unsure at all n locations
ctctccactagcattgacctgatcaagtattcactcttttggttacccattgagagcattgtccgtgatgtcctccttggttcacctagtattagctgcccttagctggggttgagtagattatgagataatggcatttgtgctctagcttaagtttatcttcattagctggtctgtttggttttaagatagctagagtttagcagataatcattatctaggtgaaactaaaccaaagagcaccttagcttcatctgtgatcactagcaattgatgcctgaaccgcgctgatgattctcgtanttactcataactgctatctttnttctatgacttttgcgaagttggg

SEQ ID NO: 4071 - DNA, 321 bp, Zea mays
  unsure (1)..(321): unsure at all n locations
agctntatcaaatagacgtgaaaaatgccttcctcaactgtctcaatcaagaagaggtctatgttgagcaacctcccggctttgaagatagtgagtatcctaatcacgtttataaactctctaaggcactttacgggctcaagctagccccaagagcatggtatgaatgcctaagagatttccttatcactaatggcttcaaagtcggaaaggccgatcctactttatttactaaaactcttgacaatgatttgtttgtatgccaaattatgttgatgatattatatttgggtctactaacgaatctacatgtgaagattt

SEQ ID NO: 4072 - DNA, 480 bp, Zea mays
  unsure (1)..(480): unsure at all n locations
cagcttcgcgcgatgcaataggggaaccgacttatagatgaanagactacgtggaccttgtcaggtttccataagtcattgacaaatgtaatggacataaatgtaattttacgtgggctgcgtcccgcgtctataaatagatgaacagtactcccgtactgttcacgctgacttggcatttgcttttgcgtcacgtttgtactttntaccttctctcaagaccaaaggtacatttgtaatttgaaatcatttctatttttccatgttaataaaatagaaatgatcctatgatgatgcttatattatatttcatgctttatatgaatccttcgtcattacttgttatgtttacgaaggtatgtttcttatgatcttcgtccgaaactcattatttcccgaagggacataatgcttcgaaggacgaatgactntaacacttaacactctttatgttgccttggtcttaattcctagcattta

SEQ ID NO: 4073 - DNA, 85 bp, Zea mays
tcctgcacaagagccacacttactgcagagagtgaagcagtcacatacaataataacagatcccctgtcgctggtggagataatg

SEQ ID NO: 4074 - DNA, 430 bp, Zea mays
  unsure (1)..(430): unsure at all n locations
agcttcaaaagatgcttcgggaataggtgtggttattttctcatataaagcttcttctgcagattctttttccatttctttttcaatttccaagaattccctcttggtaggctctgaaagcccagtttcagtttcctcttgacttttgacagcttcgacctcagtttgtgtctttgaaacttcagcagctatctttggagtagcgcttgaagattttatcgtttccagtatatctagcacattaaccattcttttcctcttggggttgtagtaaggtctttttgtgtcatcggcattggcattagcacctcaactcttgctgaaggacttaaaattntcgatgtctgtgtttcttcagctctcacttcttttattttntccatctccagcattttggccagctcttcaatatntgacaggggagtcggct

SEQ ID NO: 4075 - DNA, 479 bp, Zea mays
  unsure (1)..(479): unsure at all n locations
actcagcttcttagcaacttcttttcctttctttgacgctgcggtcatgttctcttcggcagcagcttcttctgcagccatgtctagcagtatntggtcaatatgttcaattgtgctctccaaattcacatcttcagctgaggcagcttcggcagctgcggcctccgaaggtacaatttcagtatctgctccctctgcagccgcttgtgttctttgggccgaagctcttggcggcgtcttgtcaattacctctgtcacagtgataattctttgtttctttgccttgattgttttcttcgatttctcgggctccttgtccttctgaaaaaactttgtcagttgaggacccagtggacttagcttcgcaggtaaggattcaatcattaccttcagaatttctcaactacagcagcagaaagtgatgcggggatctcttctgcttcggataattgttgcttcggaagagaaagcttcctctt

SEQ ID NO: 4076 - DNA, 419 bp, Zea mays
agcttgtgaaggttcttcatccccacatgtgctattactgttatgccacagccagcccatgcaagtcttagcaattaagcatgcatctaaaccgacctcctcttttgcaaaatcaactaaataaagtttgtcgtctagtacacccttaaaggctagtgaaccatcacaccttctaaagacagacatatctacatttgtgaataaacaattatatcccattttacaaagttgactaacggataacagattatatccaagcgactcaactaaaaacacattagaaatagagtgctcggatgaaatagcaatcttccttaacccttttaccttgccttggttcccatcaccgaatatgattgaatcttgggaatccttgttcttgacgtaggaggtgaacatcttcttctcccccgtcatgt

SEQ ID NO: 4077 - DNA, 430 bp, Zea mays
  unsure (1)..(430): unsure at all n locations
atatccatctgggaccagacttcaacaatagatagcactactctcatgcgaaagggtcatcangactaaggagaacacaacaagtctccataaggtcttcatatttctaagacaaattaccatcactaataatctagtggtcaagagatattgctcttctggcgcggaggactaaggacaaattaatgtccaatttagcttcaagctctatagtgatgtgagatttcatagttatttgtctacttttctcacttctggtagatcagatatagattacggtaagcataccaagggggtggaatccaatgtagttttgctacataaactccaaatttatttccattcagtactgacctttaccatttgacttactgtataccattatcgtcaagggactatctataagtcaattaacgactgagtatttacc

SEQ ID NO: 4078 - DNA, 410 bp, Zea mays
  unsure (1)..(410): unsure at all n locations
agctntaaaggttaatcttcacctaaaagaaagatttgtatgtttatgcttaggtatggatcaaattgcttcaattggtagttgatcaataatagatcctttccagtggcattctttcaattgggaataatctattttgtgaaaaaatgtcaatatgaaagctaaattctttttggcttaaatatgtaaattggtgcatattattaattcactcatccatgtgcatcaatttaaaaggaatttaatttatacctttacgcctgataaatgatgaatttgttgccattcatatatagatatcatcattcattaaatacttccttgtactactaatacctcttttcaaagtgttttatcgactagttttaaaaggaaaagagaaaacaaagaaggaagtctccaccaatgat

SEQ ID NO: 4079 - DNA, 306 bp, Zea mays
gcttctaagggagaacacattgaggattttcttgttcatttgagaaagacaggtttgtagcgcatgccaagccgggaagcaagttggcactcatcatccacacaaaaacatcatgactaccgacaggccactggagctcctacacatggatttattcggcccgatcgcttacataagcatcggcggtagtaagtattgtcttgaattggggatgattattctcgcttcacttgggtattctctttgcaggaaaaatcacaaacccaagagaccttaaaaggattcttgagacgagctcaaaatgag

SEQ ID NO: 4080 - DNA, 432 bp, Zea mays
  unsure (1)..(432): unsure at all n locations
tcactctntgatcgattgatggtattggtcaacaaaataagagttcttgggagtgaagattggagtgactccaacgtcacaagattgttcatgagagcttataaagagaaggataatagtcttgcaaggatgataagggatcgtgatgattatgaggacatgacgcctcatcaattatttgcaaaaattcaacaacacgagtccgaagaagcccccatcaagacaagagactctcatgccttgatcacaaatgaacaagacaatctcaagaagagcaaagaccacaaagcaaagaaagtggtcgagacctcaagtgatgaagatagctcaagtgatgaagacacagctatgttcatcaaaaccttcaagaaatatgtatggaagaatgacaagtttcaaatgaaaggaaagaagatggcatgctatgaatgt

SEQ ID NO: 4081 - DNA, 414 bp, Zea mays
  unsure (1)..(414): unsure at all n locations
agctngcatagtccctgatgagttgtgttatagtcatgattagttatcaagggcatgaatgtaattttgtccgggttgtgtcccgtgcctataaatagatgaacagtacccctgtactgttcacgctgacttgtaatcactcgcacgtcactcttggatctttaccttctgtcaagccgaaagtacaaatgtaattcaatatcattgatgtttgtttataactatatgatgatattatgaataatctaacggtttaaaatgattattcatgttttctctatgtttcatacaatcatgtttatatctttgtatattgcaatgaagaaggtatgtccttctcgaccttcttccaaagatcattatatcctaagggagataatgttataaaggatgaaagtctttaactattaattt

SEQ ID NO: 4082 - DNA, 495 bp, Zea mays
  unsure (1)..(495): unsure at all n locations
gcttctcctgtacaagcgccgcactcactgtagagtgcgaatctgccacatacaatagtaatggagcccctggcgctggtggagttaatgttgttagatcaatcaaatactgcttcagctcttcgaaggctttttgttgaggtgggccccattgaaaaacttcggctgactntagtatttcaaagaatggcaagtttctttctgctgatctagatatatatctattcaatgaagccagtcttcctgctaaccgttgagcccccttctttgtgcttggcggctccattcgaaggatagcttcgatcttgtttgggttagcttcaatccccttcgttgaaactagatagccaaggaacttacccttctttactccaaagacacanttttcaggatttaatttcaggccagcttgcctgaaattagcaaatgtttcttgtagatcagtgatatgatnttcttgcttcgtgctttttactatgatatcatcaacgtatg

SEQ ID NO: 4083 - DNA, 431 bp, Zea mays
agctttagggtaaaagtcataaaatgactttaatttataacttgaatcacttttgtacccctgagataccagaaaccctaattggaaccctgtaaaaccctaaaccaaaccctaggggcttatatgcaaaattagtccacttttgggctaaagtgcaaaaaccaagtcaaataggtttcttaagtcccttggttcacaaaaatgtgtacttgaaagcaaaacccaaagttttggacttaaatgcaaaatggacctcatttgagttttgctctaagtctgaaaatcagtgaatgggctcaactttgaggctttgtaacttacaaagtatatggtttttgccctaggtcaccacatcaaagttgaagacctattataggagaacaactgtgctcaagagtgcaagcatagttgttatgagaaatatagagaaa

SEQ ID NO: 4084 - DNA, 496 bp, Zea mays
cagcttagatgggcagctcagcaacctctctggcccgggactgtgctccgtttcgggagtcttgagttcatgtccttcgacggcagctacgacatgatactccttccaccgccgcgcgacaacgacaatggcggccgacaacccgaccaccggcggcggaatcgacgacatcttccccgcgtggtggaagaacaacattcgagctcgccccgtcctctcccccgccaacggaggaggaggcggtgcaaccaaggccaagcgggaggccgcgcttcgtcggctgtcgagcgaatcgacgtccccagcgccccaacggggggcgcgtcgggcgtcgacctcgcgtttgagacgaatgcgagcgccgtccgcccgcgacacaccaatcccgagcaagtggacgacaccagcgcgctcgcggagggcttgcaggacgtcctcctcgtacctaagacgacggtgcaatcagtccccgacgtgactatgtcgctcctcgtcg

SEQ ID NO: 4085 - DNA, 421 bp, Zea mays
agcttgcagattcaaagtcaacttaattaatctttatcaaccaatgaaccaaccctgttttccttgctagcctcttcttgaatctcgagggcgagattctgttaagggggttagatttgtaacaccctgaatttgagggtataaaatttattttctaacatccaccaaattcaggtgttaccctctctttttcttgtttttcttttcttttttataaataatggagagttattttataatatatataagtttttagtgtagtaaaataaaatcctaaagaagcttccattgttgcattcatgcctttgtatagtgtttatgagtgcaaatgatttcaaaacatatcgaattatcttatggatgctttcgagaatatttgggaacgttcatattatctcctctagtattaaatatgaatttc

SEQ ID NO: 4086 - DNA, 424 bp, Zea mays
  unsure (1)..(424): unsure at all n locations
ctcagcttcaattgcacttcgggagtttcggcaattgtcttcggtgtattgctagaagactttattgtctccagtacatccagaacgttaaccattctttttcttttgggggtcaccagtggacctttctgagtntgtggcactccaacttctgctgaagggcttaaaatttctgatatatttgtcccttcagctttcagctcttcaattctttcagccttcggtgttgcagtcagctcttcagttttctgcgcaggtataggttttttggcttctgtagccgaagaagcctcaccgacaaactcgggcactatggccggttcaataaagcgcggtccgtgagtaaggacttttaccctttttctcttcggcacaagctcgcttggagcagacgaagcatcgtcttttccggaagttgcttctt

SEQ ID NO: 4087 - DNA, 430 bp, Zea mays
  unsure (1)..(430): unsure at all n locations
agcttgtgaagagtattgtggcctttgctgctgacttcttcaatcatcagnttgagcagagttatgaattgacctaacgtgcctcgggtgaaatcttccaacgaagcccctggtcatttcagagaacctgaatgcttcctcccttctttggcggaagtcattgtcagctcgaatgtattcgtccatcttctggagcagcttctccaacgtttgtggtggcttcctggcaaagtactgcgctgaaggtcccggccgaagccccttaatcatggcctcaatgaaaatttcattgggcactgttggcgcttgtgccctcagacgcagaaaccttcggacgtacacctagaggtattcttcgtggtcctgggtacactgaaataaagcttgagcagtgactggcttcatctgaaacccttggaagctagttatc

SEQ ID NO: 4088 - DNA, 360 bp, Zea mays
  unsure (1)..(360): unsure at all n locations
ntatcttngtgatttcacaacaagtaaagtgacgccttatacttgtntagtggcaaagtccgacaagggttggctttggcatcgccggctagcccatgtcggtatgaggaatttggccaaacttcaaaaggataatcacatcattggactaacaaatgttgtatttgagaaagatagggtttgtggcgcatgccaagcatgaaagcaacatggagtcccacatcaatcaaaaatgggtcacaacaaaagccatgagcttttacatggacctttcgactgggctaatacatgggaagaaaatgttatcatgtgagattttcatcaccggttctttgatgacaagaactaaaatttaaaata

SEQ ID NO: 4089 - DNA, 421 bp, Zea mays
  unsure (1)..(421): unsure at all n locations
agcttctaaagggagagcacattntatgactaactaatgtgcattntgagaaagacaggatttgtagcgcatgccaagcagggaagcaagttggtgttcatcatccacataagaacatcatgacgactgacaggccactggagttactccacatggatctattctgcccgatagcttacataagcatcggcgggagtaagtactgtcttgttattgtggatgattattctcgcttcacttgggtattctttttacaggataaatctcaaacctaagaaactttaaaaggattcttgagacaggctcacaataagttcagctcgaggattaagaagataagaagcgacaatgggacggagttcaagaactcacaaatagaaggctttcttgaggaggagggcatacacgccacaataaaatg

SEQ ID NO: 4090 - DNA, 440 bp, Zea mays
  unsure (1)..(440): unsure at all n locations
tcaacaaagatctaggaacccacaagtcctttgtgttagcattangtaaactcattacctttctagcacaagttgcaattttgggttgcctagttacataagaattaattgacaagctaggagtggaattgttaccaatgggacaatccttgcattgatgtcccttctttcggcatgtgtagcataggcgtttttcaagttttgaagttttcttctttccttgtatgttgcctgctacatggttagtaaaaactttcttttctaaccctatgcctgtttgttttaaatggggacaagatctaagcaagtgtcccttcttggagcatttaaaacaaagtctatcatccttgttaataatcaagccattcttaatgtaaggacatgacctaatcaagtgcccctcttcaaagcattcactacaccttttaaagtgaagtgtg

SEQ ID NO: 4091 - DNA, 427 bp, Zea mays
  unsure (1)..(427): unsure at all n locations
agcttctaaagggagaacatgtgatatgtctatcttatgttcattncgaaaaagatagaccttgtgcagcttgtcaagcagggaaacaggtgggaggagcgcatcacagcaagaatgtgatgaccacttcaagacccctggagctgctgcatatggatctcttcggacccgtcgcctatctaagcatagggggaagtaagtatggtctagttattgttgatgacttttcccgcttcacttgggtgttctttgtgcaggataagtctgaaacccaagggaccctcaagcgcttcctcaggagggctcaaaatgagtttgagctcaaagtgaaaaagataaggagcgacaacgggtccgagttcaagaaccttcaagtggaggagttccttgaagaagaaaggatcatgcacgagttctccgctcccta

SEQ ID NO: 4092 - DNA, 404 bp, Zea mays
ctaagcttacaagaggaccttcgctatcttaacaaacagcttatctgatgatcgcttctctctataagaccttcggcgacgaagcatggacccaacacctacaatttgtatggattaatcatatagcacaaggaaaacattaaatgggatagaagatgtaacatatatgcgaaagctagtacatcatcaccttcaagttatgaagctgggctacataatagtatgcaaaagttgttctttgcaatgctatactgaaagtcgcctagaggggggtggataggcgaaatctgaaatctataacttaatccacaaactacaagccggggttagcgttatagcgaatatcaagtctgggagagaagggtaaacataatcaccacgataataaagcggatgacacggtg

SEQ ID NO: 4093 - DNA, 430 bp, Zea mays
  unsure (1)..(430): unsure at all n locations
agcttgggcatnttaggtggaaaacctggtacatcttcatacattgctggggtacaggatgatagggctctctacctagatccccatgaagttcagatggtaaacctgcatactttttatatttacttagcatgcatatgcatctatttcataaacgttgtatagttttctaccttgtaacttaagttgagcaccatacttaagaagtatcaaaatcgtcaagtttcaagtttgaactgagttccattctcttattcaaagataacagtggcatgtctattctgcagcaattcctgttccataggccactagaatctggttatttttgttggagtgaagtgcattgtgagttcctataattcgttaggttgtgccattggagtccctgaacttggcagctgaagattcacgtcaaggcatgctcaaacta

SEQ ID NO: 4094 - DNA, 468 bp, Zea mays
  unsure (1)..(468): unsure at all n locations
ccgtggcatgcaatacatcccttgaagaatatgtctatganttgaggattgccaagaggaagaaacaaaagatgaaattcaacacctcctccaaaagcctcaaccacgcctccacataaggtaacatccaatgtaatgatcaagccacacttcacattaagaggtgtggtgaatgctttgaagaggggcacttgattaagtcatgtccctacattaaaaatggcttgataattaacaaggatgatagactttgttgtaaatgctcaaagaagggacacttgcttagatcttgtccccatttaaaacaaaaaggcatagggttaagaaaagaaagtttttactaaccatgtagcaagcaacaaacaaggaaagaagaaaacttcanaacttgaaaaacacctatgctacacatgccgaaagaagggacatcaatgcaaggaattgcccattggtaacaaatccactcct

SEQ ID NO: 4095 - DNA, 148 bp, Zea mays
  unsure (1)..(148): unsure at all n locations
agcttgaagccatggtaagtagcataggccaatttatattaatgactcngcctactacggtgcataggttcaccaaagctaaccttcgacttgggagtatcctttggccacaagtcaagctttgtttcttgtcaccacaccatgctcg

SEQ ID NO: 4096 - DNA, 457 bp, Zea mays
tggtgtgatttaaatgaccgaagaacatgccatgtgcaagttacaaatgaaacgacaaaaagataatcaatcaaagatatagataggttactagaaataaactactaataataacatatatatatatctactatagacactttaaacacacggtccataacaaatttacctaattaacatatgtcggcttttacgagcatgtaccgctcacaacagctacataaaaaataacattcacataacatattttgtgtatgttatatagaaattgcttaatacgctgtttggatgaatagttgtgataaatcctatatgcatatatatatgcaagtatagaaaatccacatcccggggccatgaccatgaagtacatacatgtcagctactgcctagtcctagtctagacaaactcgcttgttcaaaagtgcggtgtctgtttgctacgccaaccgtctta

SEQ ID NO: 4097 - DNA, 105 bp, Zea mays
aaaaaacagaaaaaaccacccaataacaacggaaaaaagctaactgaaccaccgaacaacgcacccaagaaccggcgaggctctcacaacaagccaaacgcagac

SEQ ID NO: 4098 - DNA, 408 bp, Zea mays
  unsure (1)..(408): unsure at all n locations
ttaactgcagcgtgcgagcttcacctctccgcaacgcgctccaaaaccctttctttttgtttggagaccacgtgcctcgcctttccgcacgcctcccagctggcgtttcgcgcttcccctcccgggcccactattgcgcgctgccaaagatcttctttgctcatgcctcgcccacccttcatccctcgagccacgtcgttggggctcttgcctccacaaaatacccactgttgccacccgcaaaaactcacgcctcgcagatatggcctatgcgttgtttacccatgcaacagccaaagccatgcatcgtaaggccctgaaagaatacctcgagacctgctctgctgccgtgaagttggagacaaaanagcaccgcattctgtccaggacgatgttccccatcccgat

SEQ ID NO: 4099 - DNA, 359 bp, Zea mays
cttattccagtgcacccaggaccatgaagaataccttcaggcgtatgttcgatagttcctgcgtctaagggcacaggcaccaacagtgcccaatgaaattgtcattgaggccatgattaatgggcttcggccgggaccttcagctcaatacttagccaagaagcctcctcaaactttggagaagctgctccagaacatggacgagtattatctgaacttgataatgacttccgccaaagaagggaggaagcatacacgttctctgaaatgaccacgggctcctgaggaagattccatccgaagcacgtcacgtcaatttacaactctactcagagtgatgatagatggaatcaacagca

SEQ ID NO: 4100 - DNA, 365 bp, Zea mays
agcttccacacgcttgccctagtggtcttttattttcttgttgaatagctctctgataagttgctccacgcgttttgaggatgaacgacatggaggtatagcacaaagctccgaacggagtgaagaatgctgttttttcctcgtcttcttttgccaagctaatttgatgatacccagaattagctatacaagatagacaccacagaacatccggctgttgagtccaccacctggtctattttagggagtccgaatggatccttcgaacagggtttgtgaggatctgtatattcacccacatcccccaatccactttattctttttgagtacaagaccaggatcagctacccactcaggatgtaac

SEQ ID NO: 4101 - DNA, 421 bp, Zea mays
  unsure (1)..(421): unsure at all n locations
tggaggcgtctatgggttgacgactaggtgtagccttcttcttcttttgctccgtcgctntgaatgcgacgggttgagcttccgatgtggtgggttcgtcgagctcgctgatctttcttgagccttcgatcatgcactctaaacttacaaaatgcccgattacttcctcgggggtcattgtagtatatcttggatgaccacgaattaattgaacttgagtagggttaaggaaaataagagatcttagaataaccttaaccatttcatggtcatcccattttacgctcccgaggttgcacacttggttcaccaaggtcttgagccggttgtacatgtgttgcggctttttcactttgcgaagccggaaccgaccgagcttcccctcgattcgttcccgcttgtggatcttggtgagctcatc

SEQ ID NO: 4102 - DNA, 381 bp, Zea mays
  unsure (1)..(381): unsure at all n locations
agcttcggcttgggccaaaattttcacgtgttcgcaccctgctttctccaaaatagccgcaactctttcgcaccagaaaaagcacagacgtccccgcggtcgctcaaaatttcttcaaaagcttcggcttcgttgctgatccactcaattggaccttcggggtcgccccgtatgaagttatcttcgattgaatatgcgccaacgttggcaaatctagtttttatctttttcacgcattctaaagatttttaaaagcatctttcttttgatgtgcgaagctctgcaactgttttttcccagtaatttttccagtaatcactggcatctcgttcagcttcggcaacagcgcatttntaattggcttcagccagctgcttccga

SEQ ID NO: 4103 - DNA, 473 bp, Zea mays
  unsure (1)..(473): unsure at all n locations
agaagctgacatcagtcgctaccggcgacaacatatcatctgttgtatattctattctaattncaaggtaaaatttttccctcagcttgttattgttttacgatgaaggtgatttctgatgaaggttgctcgtacagagtatgctactaagtaaagccttgaggatgcaacaggacctcgaatataagaaaaatgatgttataattgaaggcttggaaagtaaaatcaaagatcatgaagctgctcttgaaaagaaagattttgttcttcaaacaatggaaggttcattggcagaggctcaagccataattaccagattaaacagtgaactcctcttgaagtcagaaaacttctagcaatacaagaagaactgtgatgcgaagcttgaagttgaagtcgaaaagagtttcaacttgcataaatcctcgatagagcttctagacaaatgcctaaacttctgctaccaatgcgtg

SEQ ID NO: 4104 - DNA, 427 bp, Zea mays
agcttagacagtacatcagccgccgtgtttcgttctctttctatatgatgaaactccagaccttcgaatttatcttctagctttcggacggcggcgcagtatcttcccattgaatcacttgagcaatcccattccttgtttatttgactgatgactaccagagaatctccgtacaccatcagtctcttgacacccagtgatatggcgatgtttaatccgtgtatcaaagcttcatactcggcagcattgttagaggccgggaatagcaactggagagcatatttgaggtgctcgcctccaggtgcagggaaaagaattcctgctcctgctccctgcagcttcagcgagccatcaaaatacattcgccatacttctgcggtttctggattatcccgcacttgctgttctgtccactctgatatgaaat

SEQ ID NO: 4105 - DNA, 486 bp, Zea mays
  unsure (1)..(486): unsure at all n locations
gcttcgcacctccgaactaactcgactgcatcactgttcgctgtgtgtcatagaatcccgacctgaagactttcccgactagtgtcttggacgctgcgtgtattccacattgtccagcatggacctcgtctagaagtcgcttcccagttgatgagagaatgcacttcatgaagatgcctgatgtgccccttctgtatagtgtctccccaatgagtgtgtagtgagctgattgtctagcgatgcgctcggctgcatttttatcgtctggttcctcttcattctttatatatctgataatcggccttctccagtcatcagagcctgactctggttgattcacgatattacactcttctgcctgatattgagatgcttggttgtggtatttcttgtacaaagactccangtgggacttgagttcgactggatcctatcttggacaatacatcggctgccgtgtntcgatctctttctacatgatgaaat

SEQ ID NO: 4106 - DNA, 424 bp, Zea mays
  unsure (1)..(424): unsure at all n locations
catgcaagctggggaaggancttcatccacacatgttcttatttgcgatgccacagccagcccatgctagtcttggcaataaagcatgcatctagaccggcctcttcttttgcaaaatcaactaagtagagcttgccatctaatacacccttaaaagctagagaaccatcacttcttctaaagacagacacatctacatttgtaaatagacagttatatcccatatgacataattgactaacagatagcaaattatatccaagactctccactaaaaacacattagagatagaatgctcattggagaatgcaattttacctagcccttttaccttgccttgattcccatcaccgaatataattgaatctcgngaatccttattcttgacataggaggtgaacatcttcttctcccccgtcatat

SEQ ID NO: 4107 - DNA, 421 bp, Zea mays
ctaagctggaccccagcgtgtctcgggttatagatgcacactttctattatggtataaaacatattctagaatgatacaaatgaccacccgtcgagattttaaatttaaagtgtgagacaggtaatgtcagttttttaatcaacacaattctggaataagtgtacaacacgttgagcctcctaattctcttcagcagcagtactaaagaatttattaccataggagcttcctgaactgcatgcatccactttttgtactcatgcattcatgtagttgttaccataaaaacgcatgtacactgacactgggacttctgaaaaaaataaaaacgcatgtacactctgaagtgtaaggggatcacatacctttctcgttggacaacgccgtaaactccttccatatatcctggccataagaaca

SEQ ID NO: 4108 - DNA, 435 bp, Zea mays
  unsure (1)..(435): unsure at all n locations
agcttctaagggagagcacatttaggtattttttttgtttttttgagaaagacaggatttgtagcgcatgccatgcagggaagcaagttggagtccatcatccacacaagaacatcatgacgaccgacaggccgcttgagctactccacatggatctattcggcccgattgcttacataaacatcggcgggagtaagtattgtcttgtaatagtggatgattattctcgcttcacttgggtattctttttacaggaaaaatctcaaacccaagagactttaaagggattcttgagacgggctcaaaatgagttcggcttaaggatcaagaaaataagaagcgacaacgggacggagttcaagaactctcanattgaaggcttccttgaggaggagggcatcaagcatgagttctcttctccctacacacctcaac

SEQ ID NO: 4109 - DNA, 346 bp, Zea mays
  unsure (1)..(346): unsure at all n locations
gtacctctgtcggaccaataccagagaggctaccacgctttgttagtggagagatggcgagagtaacgtgtaccctntatggcaagtggctggacggaggagaatctgtgctctcggatggcgtgaacccattctagtcttgagaaacccacgtgcgagttgacatatgcatgggctaatagctatgtatgtcatgtggtccaagaccccagctgggtattaatcgatttggatcgccgatactttttggacatgaagacttggtcactaacttacatgtagcagctagtaaacagaagggatgattanagatggctagtgtaagccaagttcttgatctagaata

SEQ ID NO: 4110 - DNA, 423 bp, Zea mays
agcttgccaacgaatgccaataacaattatgtttttttattgtagaaaattatgcattttacaatacattttaattctaatattatttagataattcatgaacatgggtattgttcgtgaagcaatgtaatcatagtatattcacatgttcatgtttatcatccttataattatgaatagtataaacataagaagcttgatggaatacactaaagcagagccattgctgaaggcattggttgcgctgttatgaactagagtagtcatatttactcaattggcttctgttgatgtagttgtaaagatcgatgtcatggattgttgatgttgtgttgcccctctaacagtcactgagaagtagatgaagtaattgttcagcgagcaatcacgtatacgctaaccataaaaccttacatgctgcta

SEQ ID NO: 4111 - DNA, 235 bp, Zea mays
  unsure (1)..(235): unsure at all n locations
ggcagaagaaaccccnggctaacaacacctgccattgtgtcctcaattctgccaattcaaccggtggcatccagtaagaccttctggaataagtgccggtctcgggtgcaactccatggcgaattcaatatcccggactggtggcattccttgcaatacaatatgaaaacatctgcatactcacagaccactggaatgttcctctaagggtactctatcatatccaaagcacatg

SEQ ID NO: 4112 - DNA, 331 bp, Zea mays
  unsure (1)..(331): unsure at all n locations
ccggccgggctgcagctggagcctgctagagaagagaagaagcttgtggagtgtgctggctactgtctgacagcgtagcggcaagtgaccgttgccgttggcgctggtggcctggagggaggggagctgcatggcctggctggagtctggactccaacggtcgagtgacgaatgccctgccccgtgctgcacttctgacctcttcatccgtggtagcatgttccaccatctggttgagaatacgggtgagcaaagaactcgcacatntgccctctttcgctcagtcatttcgaaagcgactgcatatgcacaatttacacgcgtaataacg

SEQ ID NO: 4113 - DNA, 291 bp, Zea mays
acactatagatactcagctgcgcagtcagagtgagctgaccaggaaccttaggccgtatgtcacgccactcatggtggcagagattagatggttcaagtcgccaactgcaacgttagaacccattgtttgtcagtaccaaccttttcaatagaatacaaactacattgtatcagaattctaaactgctattggtgaggattaacttacaggtaggggtggcgagctttaacgtgcgaaagcatatgtcatacagagcttcgttgtcaagcaccatacattgatcagccgtc

SEQ ID NO: 4114 - DNA, 352 bp, Zea mays
gcgggaaaaggcgggctactgtgggtgccctccggcagctctggccggtcacggggaggtcgtcggagctcttgtcgagctctggggagataagcgtggtaccgaggatgcaactgggaagacacccgcgctctgggatgagattatagccgtggcaccggcgtggtcacgggctgccgcctgcgcgtgggggttctcgcactggcctgctttgagcgcgcccccgagtgtcaccccgcttcgaacacgtgggagctcgcttctgccatgggtcaacggcggatatgagcaccttagcgtgcgtatattgcaaaaccactgtgttcggctcttccctgctcctatactacct

SEQ ID NO: 4115 - DNA, 404 bp, Zea mays
tcacccactacaaattctcgctcggaacggaccttatcagctcgatgcttcatgcgttgcttggccctcaataggttgtgcttgatgacgtgaaagattacctcgcgttgggacagccattcggacaggtcagagctgatgatagcatctgcaggatgtattcccaggtgtctaggagcacgcccatacatgacctagaaaggagacatgcccaaggaagaatgaaggcatgtattgtaccataactctgcttgtggtaaccagtcgctccattaggtcggacatcaatggacaaaactgctgagaacggtttccagacaatggatgacccgcttggtttgtaccatcactcgaagatgaaatgacgcgctcatttggagttggtgtctgaaagtggaacagtc

SEQ ID NO: 4116 - DNA, 286 bp, Zea mays
aacacccctggtgatactataactaaaacttgagcatggtatcatgagcattggtatggatatgtttgaccacctagagggcgttactatgcaaaattacaaacaagtgattgtttaaggttttgaactataacctactttagaacttaccctcatgggattatagggaaacctactcaggtagaaacctaatacttagggtaaagtcataaataccctaaaataactcgatcaattataccctgaatacctaaacctaatgaacctgaaaacctgaacaacccta

SEQ ID NO: 4117 - DNA, 431 bp, Zea mays
  unsure (1)..(431): unsure at all n locations
ttgtgctctgntgatggcactgagttggttcctgctggttcgttgcaagctgcttcaggtggcgaccttacgcccggtcatcaattgatctctcatgatatgngggtcccttcgttcttttccaacctgcaggtattgtgatataccttagcttgatttttacaccgcacgaactgctgtcgttacactcatctgttctccttatcaangcttggtggatgggatggctatccagctgaggttacagggtgctcctgttccagaagtagcttcgtctctagcacgttggaatccagtgttacttcaacatcgtgtctctcacttggaggcgaccaatgctagtcagtgctttttgcttctctttgtcttcactattaaactgctttacattctgaccccttttgttgaatgtctcctgctaagtatgactc

SEQ ID NO: 4118 - DNA, 353 bp, Zea mays
  unsure (1)..(353): unsure at all n locations
ccccgcttcttcttataaaacacgcaataaacaatacatcaacagtggtttactgaatggagcgggtcaaattctaacattattattttatgtgacttacaaagtgtctagtaaatttttggtacctacaatactgagaaataaataactaacagagaaaacagtttggaacacataaaaatgttttttgctctggtgggccgtggggcgaaaactggcccaaccgggcacatgggcgcgcgcgggcatgagcgcgccggcccagccactggccacgacgagaaatatcgcgggcgcatgagagacggtgccatntacacggtgcccacgcgtcatggagagcgggaggggga

SEQ ID NO: 4119 - DNA, 383 bp, Zea mays
  unsure (1)..(383): unsure at all n locations
agctnntcttgtacaagtgccacactcactgatgtgtgttatttttccacacgcaatagcaatggagcccctatcactggaggagtgaatgttgtttaatcaaccacgtattgcttcaactcttctaacgctttctgttgagttgggccccattgaaaaacatcatctgactttaatgcttacaaaaacggttaacttatttctgttgatctagatatatatcgatacacagatgccagtcttcctgtcagccgttgggcccccttctttgtgcttggcggctccattcgaaggatagcttcgatcttgcttgggttggcttccatccccttcgttgaaactagacagacaaggaacttgcccttcttcactcctaagacaca

SEQ ID NO: 4120 - DNA, 398 bp, Zea mays
  unsure (1)..(398): unsure at all n locations
cggagacgacatcccacggcgataacggtgcacacatgctgctttgggcctgtttgatttggcttctagccgaaattctggccgtcagaatcgacttctagccgccaaacgcttcacttcttatcccgctactgtaagaatcgcttctataaaaactttcaaatcaacgtgaatacaaaatctactgagtcatcgtgaagagaggattctctcgttntcgctttctaaaaacctacaaaccccttcatcttgctccacacgtaaaccccatgatatcctgattctcgtgacaactagattattcaagaatccatattatagaaactataccagataggccctttaacttctgaagaggagtggaggtgtatntgactatggcccaatctactgcatgg

SEQ ID NO: 4121 - DNA, 356 bp, Zea mays
ctctattctctggtgactgaagatgaaacccacagcttctcggctggttcctctaatatgcattttctacgttaagttttcaacagtagcgccttcacctggtgaaaacccgttggataacgttgataaactcatccacggtcatggttatgatcaccaacatttctacgtaagcgttcacctgctcgctccaatggtaggctcagcatgtctggaaagctcaatgataataactgcagtattcttgagccaaacgacatggatgtatattataaagccgcaaagagcatgatgaacggagatcatccttgatctctgcatcgctagactgatacggcgatatcccgagtaacaga

SEQ ID NO: 4122 - DNA, 477 bp, Zea mays
tattagttattacctaagttgcaagtatcacttgcatgtttttctacagccttgggcactcaatacgagctctcgtaaaccaggttgtactgtccatggttattactcttacccactactggtacattccaagcacgaagtgcgtgcacagctgcatcgcgctgcctgtagtagagtagcgtgcatacgaacaaggaagaagaaacgcacgtcccagtcagaatatgtgagaagcatctcgtccaaatccagagaaagcgacacggaggaattaaaggctgcagaaaccgacctcacacctcagcccgccagcgtccagtgatctagtagtcacgggtaagaggaagtacagtagcaagcagtagccatccaagcggtggaaacatacgcacgcaccacgccgcggggaccgccaggaatcaatgcggcaggagagctggatccgtcggcgcatgtatctgcggcccagcccaatgg

SEQ ID NO: 4123 - DNA, 402 bp, Zea mays
gccgctgcaacagaccgaatctgagacaatttttgtacttttaaagcgctcttccaacagccaaactgcaggcaggctctatgattgggctttatgtactagcttcaacgatgatccactctgatgatggtgatgtataaacattgtgtaccggtacatactaaatcgcttctttgtactgcataaaatcagattaatacaatttctaaccattataaaactattatgactaatgcatgacgaaccaatggaccaacatgcgtgtggtttacattacctaacctttcatggaacaacagggattacccctttcctgcataactaatccctttcaaatatgttccaaagaaacgacgttgttttaaagcaacgtttatctatcatacctgacatcattccgta

SEQ ID NO: 4124 - DNA, 426 bp, Zea mays
  unsure (1)..(426): unsure at all n locations
atatctttccaggtagtaccgccaagggctggaccatatgaatttgaatctaaaatgtctatgcaacgaagctggaaattgattgcatatagagtccagtgactacgacagagcatatgaaccatgatctgttaacataaattgataggatatgacttaagaatgatatgaatgtgaaaaaagaaagtaaatataaaaaactgaatatactgtgagcaagataacagtgtttggtatcaaaaaggaaacttataaaaaagaaacattaatataatcttacaaacaagaatggttgggactcaccagtttaactttggttagagcttcaactggaggaaggctacggacaagtaaatctgtaagaacggaggttgagaanaggtgcgganttgaactatgttgttcgagctcctncatattcagaac

SEQ ID NO: 4125 - DNA, 292 bp, Zea mays
aaaagctctatgaatgggacaatggaacgaacaataaacttctattgtgacaaaactatgtaatagttgatgtgtgtaactttgaatcaaatatactaatcgcgagaatctatatctttacgatgcatgaaactcacacacataccgtgtttgagccatcggcgagaaaacacctttccttctgttcatgctttgtaaagaaagagatcccttcttgtgacaaggcgaataaatcagtatttctcgaagcgtactcctggccatatcacatattcatattacaaaacatgtg

SEQ ID NO: 4126 - DNA, 411 bp, Zea mays
cttgctagtcaaaattgaatagaaagggattcaatcccctcaatccctttcgatccccatgcaaccgaacaagcctgctcaggaacccccatatggggcaaccacctctcagtcccagcccctgccatggtgcccccttggcatggactgtgttccacaacacaactgttgctggtgccatcctctgccccaatttggctcatatgagaggaagagaaaaattctataaaattgatatgttctcttatatgtaaaatattttataatgaatctttcatggaggtcggaggtttgacaattatggcaatcattgccaaatggtaaaaaatatttgagtgcaagtaaccaaataatcatgtatggtatcttagaatatttgcaacatgctaagcataatctggttggtatgaa

SEQ ID NO: 4127 - DNA, 145 bp, Zea mays
ctcagaccgctttgtaccctcattataagctcgactcgtcgacgctttaacgcctgagccaagaagatagtaagatgccacttcgctatcctcgtatttttaaacgtgctcctttactttgcgttcccttatgcaaaccaccata

SEQ ID NO: 4128 - DNA, 429 bp, Zea mays
  unsure (1)..(429): unsure at all n locations
cttcattccaacatgtgctagtcggcgatttcttattctcccatatnagtcttagcaattaagcaagtattgagttcaactctattaaaatcaactaagtatagctgaccctctaatactcccttaaatgctactgaatcatcacttcttctaaagacaggaacacctatattcgtaataaaacagttgtaacccattttgcataattgagatactgaaagcaagttataatctaaagaatctacaagaacaacattggaaatggaatggtcaggtgatatagcaattttaccaagtcctttgaccaaacctttgattccatcctcgaatgagatagctctttggggatctttgtttntctcgtaagaagagaacatcctttttcccctgtcatgtggtttgtgcattcgctatcaatgatctagcttg

SEQ ID NO: 4129 - DNA, 368 bp, Zea mays
ataaggaccaaagggcgaccgacgtcgttacccagaacattgtctgcggtgcataatgtgttccacgtatctcaagttaagaagagtgtttaggtttcaaaactgatactgttgaagtaactgattcttccttagaaccagacttgacatattccgaacatcctattcgagtcttgtgacaaaaggacagaattacccgcaagagaactctcaggtttataagatacaatggaaccaacacacggaagacgaagctactcgggaaactcaagacttttatacaataattttcccaggttcttagcttcatgtatatagtaagatatgtacacttgtgttataaaagaatgaaccccctaccacccctg

SEQ ID NO: 4130 - DNA, 495 bp, Zea mays
  unsure (1)..(495): unsure at all n locations
attacgtgacactaagaccctcagcttaggagaccaatactctgtgatagagtaccgatactcttttgtcctgtntgatctcaaacgcagcctaactnttcatcgtcaacaccaccgaagagtattgcccctggttgatatccacacgatatggcatattctgttaattcttctttctcagccttcatcaaaactcttgtccaattaaggtttgaaagttgaaaatgtcctcttttgaagcatcttcagctattttcttccccttcataggtactgtagccatggcttcttcagtggctgcgacagcttcttctatggccatgctagaagtatcttatcaatattagaaattgtgctctttaaatgtacatcttcggtcgtggcagcttcggcagctgcagcttcactaagtgcagtttcggtcgctgttgtgctctcaacaactagtgccttcggagcccaagcttgcggaggcgtccctatcataacttctgt

SEQ ID NO: 4131 - DNA, 424 bp, Zea mays
  unsure (1)..(424): unsure at all n locations
agcttgactcaggtatccacacattattccttattttatttttcccgnctcatggacaaggcatcctccctggatccaagtccatagaccaacatagatcccgttatcaagatgaatacaatcaattcctgacctcgcgcgagtgctagaaaaatcactcgacttctaccgagatcctgattagcaagcagctactcgacctagcatactagtattcatctcaaaaaggaatcctaagttcatgcaactagaggtttcaagcaactcctacacttaagtgcacattgcaatcctacaagcattaagtgtagtaaagtagcatataataacatggttatgcataaaaccggngcttgccttcaattgctggggctgcggngagatcctcaatagcagcctctgaagcctgctcctggtcctcctc

SEQ ID NO: 4132 - DNA, 380 bp, Zea mays
  unsure (1)..(380): unsure at all n locations
tcgcccacccttcgtccagatatatgttatgaatctattttctatgcttcgagccaggctggggatatcaattaaatctgctggtgattaactgaagtttggtccattaacgatcttcccatgcgtgcaaccagttntcatgaaggcaacagctatgccccgagaagctagcagggcacagaaatcgccgcgtccagctataactttgtcaagagcatcaacttcgccctcaacgtgttcgaaggtccctggcaggtcttcaactgaatgttcaaacttctcagaactggccccaactgagttgaagacctgcttcagccactgcacgcatcggntgccgaagtctagacatatatcttgaagctctttcaatgaattct

SEQ ID NO: 4133 - DNA, 463 bp, Zea mays
gaatttatcagatgataccacttgaagatttctatattgaaccacatgaatgatatcagttgaaaggattactccccctaaacgagtgttctctttagaaagaattttctcccctgtttagagatgaagaaatactccccctgatagagatcctctacttaggaaaaagcatgtgaaaattagaggtgcaagacatgatttgaaaagactaatttcccttatgcataggtaacagaatatgaattaaccacttatgattcttagcaacatggaagtatatgatatgaaatatagtctaatcaaatattggagaagacatgtgaatgataatagatgtagtctcaaaagataccgattgaagttcaatggcgagcttaagagacatgagagttcttggagattttgagcggaagattgttgtgtttctcggggacctcattttcttacaatgggacatcacatg

SEQ ID NO: 4134 - DNA, 415 bp, Zea mays
  unsure (1)..(415): unsure at all n locations
taatcagtctttatgatggcccttcttattcccattgcccttagtttccgaagccccaatagaagtgcttcatactcagcaatattatttgtgcaactgaaatccagtttgactgttaaacatgttttgacttttgaaagtgccactatgaccgcagttgctcctgctccgaaggttccccaagaaccatcgcataacaccatccaagcttctgtacccttgcttgtcccttcttcgtgagcccttggcgtccagtcagcgatgaagtctgctagcgcctgggattgaattgaagatctgtgcacgtagtcaatggtgaattcattgagcttcgcggcccactttccaaccctttcaatagccnctatgttccctcatatatccttcagaagctgtgacgagggaacaattatat

SEQ ID NO: 4135 - DNA, 440 bp, Zea mays
  unsure (1)..(440): unsure at all n locations
atgatttgtaccatgtttggtacctacaacctataaccctagtcttctaataatacatgccctatgaacttcacntttgactccaaaaaccctagtttcctggagtcccgtgaaggaaaattgtattcaggaccttagataatatatctttattatctttgcatcctcatgagcatttcatgggcattcatgaatatatatgtgtggtatatagagaacgaagaagaaaatagaagttgaagaagcaaaagctacaccaccaccaccacctgaagaacctcaagtatggaactgcttttattttgacatctgtggagcagaacctgacttacctatagcacaaggcaagccctggtgcatttgccacctccttgcaattgtaaaatctttctcacttgcttgatgcattangtgataggaattgcatgctaaacaaattg

SEQ ID NO: 4136 - DNA, 325 bp, Zea mays
  unsure (1)..(325): unsure at all n locations
tctgaagagaaccttcgccatctatacaacaactttatttttgtccgttttctaaagaccttcgcgacaacatagtccaacagtatcaatgtattgaaattgataatantatgtcaaaataaaattaaaagtctttattggattgagttaaaacagattaagacgtgtggaaaatgagattaagataattttaaaaatgttacaattaaatattaagagtgtgaacagctagcgctcacagcctgcttattaaatataaatatctagtgttcaactcctaattatcctagattttgcttacatttaaattgcttattctcttcgc

SEQ ID NO: 4137 - DNA, 218 bp, Zea mays
atcgcgcccacagatgtgcgcagactcatgatcctcattagattaggaacaactgttgactacgtttcatgaggatgtttatccaatgatgcgcatactattgacggtctggttggcactgaaggagggagtcctacggagcccaacttgccagatgacctttgagaccctgtacgaaaagctgtcaacagctccacaattgattccgccagatgttc

SEQ ID NO: 4138 - DNA, 433 bp, Zea mays
  unsure (1)..(433): unsure at all n locations
acactaagaaactccgctttgagaataacaattcatccttctacggctatggagtattctcttcttccccgaagcgtaatagcttcttctgattctcattaaaaaagcccgactttaccatcttggaaagatcagccttcgaaacagtagactttgcaaaatccatgtggctgtgcttgcttggcatggcaaagcgataatcatcttcaggatcaggntcagtaatatcttcctcttctgcttggcaaatgctagtctgcctgtctgcatcatcgtgagatctttccaagtaccttccggatcttgattgctcgaatggaacagctcgagcttcatttccccctacgctaccctgcgtaaacccttggcattatatgattgggattatactttctcgagattctcgcaacagctcgctggtcgtcatcaagca

SEQ ID NO: 4139 - DNA, 446 bp, Zea mays
  unsure (1)..(446): unsure at all n locations
ctgtgcgtagcgctaaggaacatgtccattagggatgtgtgtcctaacgaatactaaaagcctacacaagcacaggatcaaccaccatcattccatacaagcatgatcatcaacccaagatgatgatcaggctcaagacaatgaagatgagaatcaagaggatgaggctcctccagaggaggacactgatcaatggggagatgagaatgatgaagacaaggaagatgatcaagagataccgggtcatagaccgccacacccaagagttcaccaagcaattcaacgagatcacccactgaactccattctcggtgacattcataacgaggcaaccactatatctcgagttgctcattattgtgaacattactcttttgttgcctctattgaggcatatangatagaggatgcacttaaatatctgtattgggtgctggctatgcaag

SEQ ID NO: 4140 - DNA, 372 bp, Zea mays
ccacaaacgcctgtgatattctatgcatatgtactctattccgttctctagtatggagtacatgattgcttactaaaaagaaaagattgatgtatgtatgcttgcaaacgcatacaaaacaattctgctgaggagcccggataactttcaagagaagcccctgagcaacagtcggacggaggatgcaagtgacccttgacctaactctgtcctatatattcttaattcacctctctctttacacatgtataccataagatagaatatcttttggtaacatgacctagctacctatttagttggatataattggtcatctatatgctattgctcactttaatcacgaacagatgagatttctatgatccctgc

SEQ ID NO: 4141 - DNA, 317 bp, Zea mays
  unsure (1)..(317): unsure at all n locations
cccaacagtgacgacacgcgacgaggggagtggagaacgaacgtgatggctgctgcagcgcgcggcttgctgcgcactttgtcgaatagctggcgggcaccacggagaacagcatggaggggttccccgctgtgcgtatatgatggcgcacggaacggcgctgcttgggtgctccgatggnggagccgagggggagaaagtcgctgtgcacggcgcccgccagaggtgagacgcgccacggtaggatgagtagatggcgcgacaacttctggcatgggggagctatgttggaaaatctgggtgccatggagcaggga

SEQ ID NO: 4142 - DNA, 439 bp, Zea mays
  unsure (1)..(439): unsure at all n locations
tcagctgcttcatgtggcgtgaagtattacttncgtatctgttctgagaagagttcactacagatcaccaccgagatgaagctatctcagtctttagacatggaatgcgaacaaaaatgcacagaaatttctaccgtcaccataaagacgactgcgccatgtaacttatgaagtcgtgcttgttttggctgaggtgataccgaccatcttgttaatggttgtcttaagaaggatgtggagatcaattagatcctaaagaaaagacaacaccctcaaacccatgcgtcaacaaatattaaataacggacagagatcacaggaaagataagttatgcagtgacaggaaccattccatatgatgatgcagtaattcttggaacactagtcattcacacaaccatcgccaccgtgttggatgatcctcgtacaacacattctc

SEQ ID NO: 4143 - DNA, 423 bp, Zea mays
  unsure (1)..(423): unsure at all n locations
ttcggctgaagggaccaactgtaagtcttctaattnttgacatgactggcatcctttgtagtacttaaaacaatcagctatcatgataggccaatagaagccagaccttcgcaacaaccacttcatctttggagccgattgatgggtaccacaaatcccttcatgtacttcgactatggctaatatagcatcatctgggcccaagcacttaagcaagacgtcgttgactgttcggcagtagagttcatcactcattaaaacatacttgaaagttgtacgctgaatggttttatctgtcctaatattgcgatttcataaataatcagttatgggcattctccaatcacttgcatcggcttcattatcaaccaagtcaattatgagaactttcttggcgaccccggacagtccggagtcttcact

SEQ ID NO: 4144 - DNA, 487 bp, Zea mays
  unsure (1)..(487): unsure at all n locations
taagctttcttcattggtgctactcctagcctatcacgtatatcattgttctctgactcgatcatttcttgtgtgggcacaaatccaacgcaacatacgcatttctacaatacatataagcatagggttgagaccttgtgatgcttatgactatgttggggactgggcgaggtatctagtagttaaatcgagtcatttattactaactgcagcatctgtaatttgttgggccatttggttaggtatgaaggatgtgggtttcaataaatcttcacctaaatcatgtttgcaggtaaccttcanggcaacttactagtgtcgcttctggtcacaactacaacttaattgcgaggatcaagagttattaaagtcttcatgtcgcaatgcggagatggtactgctacagtgttttcgctatttcggatggggatcttgtttgagcttaaccttatagtacatcatggtatgttattaatgttctttgatg

SEQ ID NO: 4145 - DNA, 327 bp, Zea mays
gcatgcttctagcaaagtgtacatctccactttctaagacatgctcaataatatgagcactaagatgagctatgcgatcatctttgttgcttaattaaggctccctgatcatgaatagcatccacatttaataactctacatctatgtgcaaatagtaacatgctcaacgcgttatgtacaggggttgcaagtattaattcaacaatcttatcacaaagcgcgcacataagatatgcccacattcaccatgcgccatattctcgaacaccctagcccacacacgcccgtgacaccgtgaggggcggctctaatccacttgttacacc

SEQ ID NO: 4146 - DNA, 432 bp, Zea mays
tctgctgcgttcttgttatgttgcctgtgtcctaacttttgatgatcagttgttcactatcgtttggcagacatgtgtaaagtggtgctcggagtctgagagggatgctatctctgatgttctacagccacatttgcttactctttcttgcaagaaatatgccatttttcttgtaaagaagcttatagaacttggtacatttcctacaactttatatatggatcacatcatgtgtggccatgttgctatgttagaatgttacatgatagtttgatatggcccttagctgcattaacatgatgctatttgtgggtgctgcctctaaaacacaggttaccagaatcatatcttcccttcatggtcgtgttgcaaccttcttcatatactattggactgctgtgtggtcaaaactcccattactttcctatgtgt

SEQ ID NO: 4147 - DNA, 392 bp, Zea mays
  unsure (1)..(392): unsure at all n locations
gcataccgactcctactacccaaaacattgtctgcagtgcacaatgtgttccacgtatctcaattgaagaagtgtcttcnggttccagaccgaaccgctgaagtgacagatgttgccttataaccagacttgacatattcagaacatcctattcgagtgctggatccaaaggacagggttacccaaaggaaaactcttcaattctataagatacaatggaaccaacacaccgaggatgaagctacgtgggaaactcaagacttcttagaagagaatttcccaggctgtttagcttcatgtagattgtgagatatgtacaaattggtgtaatagaagagtagccctataccacctctactttgtgcaagaaataaggaaatgaaaatatgacg

SEQ ID NO: 4148 - DNA, 494 bp, Zea mays
  unsure (1)..(494): unsure at all n locations
ctaagcttggctctnggactacataggttacttggatactatggttatctttatggatcttgggtttctggttttgtgtcgatacctcttttgccagactgtattggcgctctcaacagagctcactaagcatattggtattgatgcctcttatactagagcatagctacaagaccatgttattgaacttcgctttgtctgctcagagctttagttgtcagacttcttcaaaaaggcacagacaagagctcaccaccgtttcttctaatacaaactcatttttcataattcaccctgagtttgaggtaggtatatgctcttattatttctgtttgtataaatgtctctatgtgcatgtacatatatgtgctttatcccttcttctggatacaaacattattctaaacaattttgtctcttctgggaacataattantttttctatgcatttagatatatgctatgcctagatacgtagtgaagactacatatct

SEQ ID NO: 4149 - DNA, 454 bp, Zea mays
  unsure (1)..(454): unsure at all n locations
tgtagaacttgacagttaattntagataatgtctgcttgagtatctgagaatgcaaagctcagatcaggacacaaataaaaatagaaccaaatggacatattatatgttgtttcatgtagttgatttataaagagttattctcaacaaaaacacaatatatcacatggtacaacaaagcagaggctagggaagtgatcagagtactttccaccaaacaaaatacgaagtgctcaaattatgactgtacaggtaatgccaaactaaaagagcccttatacttcctacgaaaacatattgatgttttaggtatctggcgactgtaaatttaagcaggcagaaattaaattaatgtgcagacatccataatgaacagacaacacagaagcatctagttcaatctgaattcanggcctcgaaatgacaatataaatgaatgtagttcaatctgaattt

SEQ ID NO: 4150 - DNA, 310 bp, Zea mays
tactcaagcttgtcctgtgtgcggcgcacagtaccatctgtgtgtgctttcctttccgctgttgctaccacgacagccacgatggcgcagacagtgggtgacgacgacgcccctgttttgtattgattgtcatgcacatggcacgttccacttcccgtcctgcgactacccaatgagcgaaggaggcatcggatcatcatgcagcgaacctctccgccacgtgtctgactacctgcacactgaaatgccggtcccttttcattttgcatcctcgctacacggtacggcaccatgtgtggcgtccggtctg

SEQ ID NO: 4151 - DNA, 433 bp, Zea mays
  unsure (1)..(433): unsure at all n locations
gatagaccttgtgcagcttgtcaagctgggaaacaggtgggaagctctcatcacaccaaatatgtgatgacaacatcaagacccgtggagctgctacatatggacctcttcggacccgtcgcctatctgagcataggaggaagtaagtatggtctagttatcgttgatgacttttcccgcttcacttgggtgttctttttgcaggataagtctgaaacccaagggaccctcaagcgcttcctcaggagagctcanaatgagtttgagctcaaggtgaagaagataaggagcgacaacgggtccgagttcaagaaccttcaagtggaggagttccttgaggaggaagggattcagcacgaagttctcgctccctacacaccacaacataatggtgtggtatagaggaagaacaggactctaatcgatatggcga

SEQ ID NO: 4152 - DNA, 432 bp, Zea mays
  unsure (1)..(432): unsure at all n locations
agcttctaaaggcagaacacatattatgactattatttgttcattnngagaaagacaggatttgtagcgcatatcaagcagggaagcaagttggagttcatcatccatacaagaacattatgacaaccgataggccgcttgagctactccgcatggacctattcggcccgatcgcttacataagcatcgacgagagtaagtactatcttgtaattgtggatgactattctcgcttcacttgggtattcttcttgcaagaaaaatctcaaacccaagagaccttaaagagattcttaagacgggctcaaaacgagttctgattgagaatcaagaagattagaagcaataatggaatggagttcaagaattcacanaattgaaggatttcttgatgaagagggcatcaagcatgagttctcttctccctacaca

SEQ ID NO: 4153 - DNA, 366 bp, Zea mays
  unsure (1)..(366): unsure at all n locations
agcttattaggtggngaaatttactctgttgtatggatgaaaggcatccgtgagatagctaatgaagctattaagaaaaatgagaaagaatctcacgacactcaagaagaagctaaataaagagttgaagaagctgccgagcgcgcctggattataggtacatctattgtggtctagcttcgtaatctgttttagcttcggaactaacaaacacatactacggtgcagctaaactatctccccctctagagccataccatccagaagacgacccgtccatcaaagaggcactagacattatcaaaattgcaaatgacgctattgaggaagccgtcgactggcttttgaacgaagctaccgataatg

SEQ ID NO: 4154 - DNA, 295 bp, Zea mays
ggcaacaccagctggtccgaggtgcccacttggagatgcgccgtgggcggaaaaccgagtatcttgagattacgctcaaagatagcattataagctggcgtatggagtggcttatagttgataattatggaaattctctcccttcccggtcaagaagacagccagacatgggtactccgagttggactgagtctcccacagatcaagaattggccgaagcaggcgtgttgctcactgaagtctgattactgaaagagagaggtctgactgccgaaactgtgggcactgattttgt

SEQ ID NO: 4155 - DNA, 175 bp, Zea mays
tccgcacgacatgcgagttttcttcattcatgaaaaattctcctttatgcttacacaaggtttacaagtgtggccaattgcgtataacttaatgccgactgaataaactgagttatgagtttaacaataaacagcacgctgaaatattcactcacactagtatgcgacgactaat

SEQ ID NO: 4156 - DNA, 407 bp, Zea mays
  unsure (1)..(407): unsure at all n locations
attcatcagacacncggcacccgacatcgggcgtcaaaaaattgtcattgccgaagccatatccaccggagctgaaaccaccggagccaaaataaccagagacgaagccaccgaagccgaagctaccggagcaaccactgaagccgaagccaccggagccgaaaccgagaccaccgaagatcctaatctagagaccacacttggtgatattgacaatatacttctgagaatggctgaagaagaagctgctgcggttgcggtgaacacgacaattgaaaaaggataagagcatatngaagatactntggaagaaagaaaaatttaattntcaagatataattggacatgagttaacagacacttganaacaagaagctaagaaatatgctatatcctgtggatacaaa

SEQ ID NO: 4157 - DNA, 324 bp, Zea mays
  unsure (1)..(324): unsure at all n locations
ctgcagcttcctaatctntgttggtgcttatttagtatactttaatgtttataattggcccaagccatgattctatattcttcatactcttttgccctttctcttgaattttgtttatagggctcaattaaggtttttattggggttgcacattttgcctttntgaaaaactcatttgttttgaacatgatacttttaagtataagctaagtggatcctttattcttaagtcaatttgatgcgcatgcttaattttggttcacataagatgatggttctcgggttagcacttgagagaaaccctatgtgacactggtgtgtcac

SEQ ID NO: 4158 - DNA, 261 bp, Zea mays
acttttacatgactttcgaccgtgctcctactagggagagatgctgatgtgaatttcctcctggattttgcgaataacagactaacttagagcaatatactagtaaaagcacacgcataacgatagttttggagtactattctcttactacagttaagaaaacatctgaacactgataacccgtgtgattaccgcctatttttttctaaatctactcgcacagtttcgtgcacctgaagatatttcggagtcgtaacagtg

SEQ ID NO: 4159 - DNA, 367 bp, Zea mays
  unsure (1)..(367): unsure at all n locations
gctntgtggaattgggagaagattngatcacttaggagtgtcttgtattgaatgcctacctctcgtaagtggttggaaggtggaaaactcggatgacttgaatgtggggtggttgggggtatttataaccccaacaaccaaactagccgtttggtggaggctgtctgtcgcatcgtgcaccggacagtccggtgcataccggacagtgtccggtgcgccaaccacgtcaccatgccgttgggttctggccgttggagctctgactgctgggcccgcctggatgtctggtgccacaccggacatgcactgtatagtgtccggtgcgccacttcgcgcgtgcctgccttctgcgcgctctggcacgcat

SEQ ID NO: 4160 - DNA, 275 bp, Zea mays
  unsure (1)..(275): unsure at all n locations
acatatcgggggccacattactatacctacctatgactcctcccccgatataatgctcagtgccatttcttcgctcacacaatggttccctcttcttcgtagcctcgccctctgtccggtcggcgtcgtctctctccccttgatgaaggggaccctatacacgtctgctcgccttccattcgtggctctttttggaaaaggctcatgaaagcnaggcgaaagtcgatggcgcatatctcccagcgatcggagtggtcttcatctcgtcgtctaca

SEQ ID NO: 4161 - DNA, 210 bp, Zea mays
ctggtcgaactttgcaccgttgtaaatgccgcgccacttcaatctgtttggcctctcggaaattgaaaattagtatttccgaatattcaagcctgtatggcaaatatctctgtcaccaatttcgcggatgtattggtcgcgacgcctgctcagaatggtctgtttcgagggatgttgattattacacttttcattttttggacgccctga

SEQ ID NO: 4162 - DNA, 415 bp, Zea mays
  unsure (1)..(415): unsure at all n locations
agcttggtcccttgggtggaaacccaaaagatcgagttctctggtgccggtcctgctgctgagctcggaggacttggaatttcctcttgaggtgacctttttcttcttcccttgccctttccacttgtatggctttgtttgagaggtgcgagaagctgaggaaatcttggctgtctaggatggtcttgagttcttgtctgagccctttcaagaagcgggccatcttcttggcttctgtgctgacgtcatcaggtgcgtagcgggctaattctgtgaatntatgcacgtactcgctgacagatcttccaccctgagttagttcccgaaattcattttccttgagctgaacaatcccttngggcacatggtgctctcggaaagcagtttcaaattctgtccaggtagcatctctgac

SEQ ID NO: 4163 - DNA, 339 bp, Zea mays
tttcttcttgattatagctcaacctgacgggtctgagttcactgttgaggattgccttatattgggttaaccaattcattcccaaaattacatctatatcctggcccttcagaacaatcatgttagcaagaaagttccgtccggccattgttactggcactccatatgccacttctttagtataaatgtgtcccccaggtgaatgaatcttaaatccctcctttgattcatggtatgcaatatgatgttgttccacaaacttcttgctaataaatgtatgtgaagcaccagattcaaaaagattaattgctgtgtgactggccacgggaaacgtaccca

SEQ ID NO: 4164 - DNA, 419 bp, Zea mays
  unsure (1)..(419): unsure at all n locations
agcttgtggaggttcttcatccccacatgtgctaagcggcgatgccacagccagcccatgcaagtcttagccattaagcatgcatctagaccggcctcttcttttgcaaaatcaactaagtaaagcttgccgtctagaatacccttaaaagttagtgaaccatcacatcttctaaagacagacacatctacatttgtaaacaaacagttatatcccatattgcataattgactaacagatagcaaattatatccaagagactctactaataacacattagagatagagtgctcatttgatattggcaatttacctaacccttttaccttgccttgatttccatcaccgaatattatngaatcttgggaatccttattcttgacgtaggaggtgaacatctttcttctccccgtcatatg

SEQ ID NO: 4165 - DNA, 198 bp, Zea mays
gatacaatatttggtgtcagttcgtttcgtcggtatctgccgtgccaccttcgataatgccgcactgtgacaaatgttatgtgaatgactgcgcaaaattcaagttaatccctattgcactcgcttcggcgagtgagatgactgcaatgtagctcggtttgtcttttacaaatatcaactttgctagttgcgtcgtat

SEQ ID NO: 4166 - DNA, 422 bp, Zea mays
  unsure (1)..(422): unsure at all n locations
gagctttgaagatatttaagtgatcactgtaatgtctgtgcgttctccagtgcaagaggaatntcagccatcctagagaaggcgggttgcgaccatgtcaaaaccctggcccatgccgaagctgccttctccgtggatgatacaaaagatcccacagctgaagcaagtttaatgggaggaaaattttacagtgacatctggataaatggtggccgagaaatggctcatgaaattatgaagaanagtgaaaaagatattcatgacgcccgagtggaagcgaaacaagctgaggaagctgcagaacgtgaaagacgcttatgtattgtttcgtgacttttagcttcggcatttgctttatagcttcanactaattaactnttnctatcgtagctgaatatcntcgcatcgaaccattgatccct

SEQ ID NO: 4167 - DNA, 346 bp, Zea mays
actattactgtttaattattatacatatgagaatcgatactatgcccgcactaactgtgtcaacatttgaaaacgcttacatagttgagggagacctctatggtgtaaaaaacgacatagaggataagcatcaaccacctcgcttcggaggaagctatacgagtgacgtaccgctgacacccagcttctttactggagatgttaaaacactacggcgccagggctcattgtcgttgtggaagttggtttcactttatttcattaacgattaccaacactacgtgtatcactatcatgtatactaaatgtaccattctctcaatttatgactgttattattattact

SEQ ID NO: 4168 - DNA, 384 bp, Zea mays
  unsure (1)..(384): unsure at all n locations
tcccacatgtgctaagcgcgatgcccagccacccagcagtcttaccttaacatgctctaaccggctttttttagcaaatcaactaagtaaagtttggcgtctaatacacccttaaaagctagtgaaccatcacttcttctaaagacagacacatctacatgtgtaaatagacagttatatcccatattgcataattgactaacagatagcaaattatatccaagagactctactaaaaacacattagatatagagtgctcatgtgagaatgcaattnntacctaagcctttaccttgccttgattcccatcaccgaatataattgaatcttgggaatccttattcttgacgtaagaggtgaacatnctcttcttccccgtcata

SEQ ID NO: 4169 - DNA, 228 bp, Zea mays
aaaaaaaaaaagcgctgactggctgaacaaaaacaaaacccacgacgggcacccacataccacagcacacaaaccaaacaccaaccgagagacaaccaaagacccagaaaggccggacagacgcaagacaacacaacagaaagcggaaagccaccgcacgacccagaacagacagcaaaaaacccccggggcacgcacaaaccggaccaaaacaagacagggctgaaa

SEQ ID NO: 4170 - DNA, 409 bp, Zea mays
  unsure (1)..(409): unsure at all n locations
agcttgctacatgccttcttctttttctccaaagcaagaactntactggaacactaccccacttaaaaagaatgagggtagaactcttgaatcttggggatttgaactccttgaagtacctcataacaagggtgttacagggccttcttctgctgttgctgcttgaccaggctgcagagagatgactgtcacagggttgattctgggagaaccttcttcttatcttctcttcactatcttcttttcactgaccctttctttctctttgctcttcccactggaggattctatcaaagagtattaccatcacacattggaggaaaccaaagattatgaaccatgtacaacagtcttcaacccaagaatcaccaagcattgtgatcttatgggcgaaggagtgggaaatggg

SEQ ID NO: 4171 - DNA, 221 bp, Zea mays
  unsure (1)..(221): unsure at all n locations
ctattaattaaccttaataacaaacataggcaattttaataagtatatatagattacaaatggtgacacttgtagatcataatataatnttagtcttgtattaaaagataacaaatgataatggaactactgcaccggtcctgcggtgtctatnttcctacaactatcctggctctatcatgatactgctcttataccctgtcttatctaccggctctcat

SEQ ID NO: 4172 - DNA, 418 bp, Zea mays
atgtagcaacctcatgtgatgacttgattcaagaagagtatactagtctacatgctgaattgactgaaaaagttgaagtcctgactttagacaaccaaaaattgaagaattacttgactgatgcaactactagaggaaaagttgctattgagaacaatgatttcaacaatgagttggcagtggataatcaaaggcttaagaatgaggtcaagaaactaaaaagtgaaaatgaacatcttgcaacaagtgtgcaaaagttcaacaagggtcactacctacaaaatgagctgcttatgaacactgttatgaaaaataacaagagtggtattggatacaatgcttttgtgcaaaagacagctatcactcaatacaagccagagcagactcacaagcctatcaaatgctttgagtgtggaaa

SEQ ID NO: 4173 - DNA, 411 bp, Zea mays
agcttatgaagattcttcatcccaacatgtgccagtcggcgatgccagagccaacccatgttagtcttagcaattaagcaagtgtcgagttcagctctatcaaaatctactaagtatagctgaccctctaacactcccttaaatgctattgaatcatcacttcttctaaagacagtgacacctacattagtgaatagacagttgtagcccattttgcataattgagatacagaaagcaaattgtaatctaatgaatttacaagaaaaacattggaaatagaatggtcatgagatatagcaattttacccaaacccttgaccaaaccttggtttccatccccgaatgtgatagctcgttgggtatcctgggttttctcgtaagaggagaatatcttcttctcccctgtcatg

SEQ ID NO: 4174 - DNA, 424 bp, Zea mays
  unsure (1)..(424): unsure at all n locations
caatagatgacacttggccattagtaatccacgatatatatttngcttctaaaccactagtggaggtagagtggaaacagggagattcacatttttggtccagtttgatgaaagcaaaacaagaataccttcgctttggatctttcattataatgatggatcacaggttagattttgggaagatatttggttgtggaattctactcttaaatattagtaccctgagctgtataatataactagatccaaattcattattattgcggaggctttacgaacaaactcgcccaacttcatttagcggagggatcttttggacctaaactaatagtgtggaatgaattgctatcatgatngactaactnttctttggcacaagggcatgatcagtttcattggaatttaaatccaaatgggaaattct

SEQ ID NO: 4175 - DNA, 335 bp, Zea mays
gcagcttacattgtttgatgacaatggtgtatcattttatgggctactcgtgaaatgaagtattgtcgctcgagtagaggttaaattctcgattaaaccacattatcgtgacagacaacactttatgtgtttgacatcaatgtaagataacatttctaagcgttttgggtaaagattaattattaaaaaattatatgatcttcctacagccgtgtctttttctactgaaatactattagggagccaacaacaaggccgcgacaaattgttatgagacaattcaacacttcaacaatttgctccatgaaaagcgtgtttataagatgcacaatgta

SEQ ID NO: 4176 - DNA, 217 bp, Zea mays
  unsure (1)..(217): unsure at all n locations
tcattacttttacacaagtgcaattttggtttgcctagtacattgcgaaataaattgacaagctataagtggggttgttaccaatgggacaatccttgcattgatgtcccttttccggcatatgtagcaaagtcgatcctcaagtcttgaagacttcttctttccttngttcttgcttgctacatggtcagntaatattttcttttctaaccctatg

SEQ ID NO: 4177 - DNA, 394 bp, Zea mays
agcttctagatatgtcgaggtgacaaatgatgagggtgaattggtagttacgaaggttgcagctaagcaacttcgtcggttgcccatcattcctcggctttcaaggttgttcctcaacaaggaaatagctctgcatatgatgtggccaaagaatagtgtacgtctcgtcactgatccagacataatggtccatccgtcggacggtgatgcgtggaaggcatttgacgagtttgatcccgatattgcaaacgaccctaggagtgtacggcttggtctatcgacggacagattcacacctttcaataccagtgcaagcctgtactcgtgttggcctgtcttcattgtgccatataatcatccctctgagttggtcaataaagaagaagttcatgtc

SEQ ID NO: 4178 - DNA, 345 bp, Zea mays
  unsure (1)..(345): unsure at all n locations
agcttcattagatgtggccccagcggacttatcttgataggcaaagattcagtcattacctttaagatttcttccacgtcggcagcaaaaggtgttgaaggaacttcttcttctaaatcagctntcgacttcggagctggagcctttcttttcttcggcacagccaccttcggcttaagactagattttttcttttttgccaaattttcatcttcttttatcatcctggcagcttgtctttgtataatactgacagcccttttccattttggcccttcagcacctttgtctaacctttcgtagtctggatattcaaatttcaaagcgtccattactcggtttaac

SEQ ID NO: 4179 - DNA, 320 bp, Zea mays
agcttggaccatgtcgtcccaattggatatctgccccggaggcaggtgctccaaccaggcgcgagcggtgtcagagaggaacagggggaggttgcggatgatggggttgtcatcgtccgttccacccaattggcaagccagacggtaatccgcgagccacagttccggtctcgtctcccccgagtactttgtgatagtagtcgggggtcggaaccgggtctggaacggcgcccgtcgtatggcccggctgaaagcctgcggaccgggtggttcgggcgagggactccgatcctccccgctgtcgtagcgtcccccacgct

SEQ ID NO: 4180 - DNA, 350 bp, Zea mays
  unsure (1)..(350): unsure at all n locations
agccttttcaccattattatcacgatatcttgagaaagttgagcatgatactttcccttcaattgagtcaagctccttcttagcctctcattntcttccttgagctcattgttttcttttccatgggaaacattacttgttcctgaaaattctagctcaatggaagaatggctttcttgagagcaacatttgttagcacatgataatatagtttctttttgagtacatgtgcatatgtgaggttggtatgatttcaaattagttaacacaacctcatgagccatttctagcatgatatgtgaatctataaatttattataagagcacacaagcatatcatgtttttcttg

SEQ ID NO: 4181 - DNA, 289 bp, Zea mays
ctttatccccacatgttgctagcggcgatgccacaaccagcccatgcaagtcttagccattaagcatgcatctagaccgagctcttcttttgcgaaatcaactaaataaagcttgtcgtctagtacacccttaatagctagtgaaccatcacatcttctaaagacagacacatctacatctgtgaataaacaattatatcccatattacataattgactaacagatagtaaattatatccaagagactctactaaaaacacattagagatagagtgctcattggagatt

SEQ ID NO: 4182 - DNA, 261 bp, Zea mays
ttttttttttttgcggcgcgcaggctctgccattattgcgtcgtatgcgtgtgatacgctactgacggtctttaatcctgaagtcatcgttatccatcaagacgacgacctcctctttccatcaacatagttgtagtaagattatgcacctatctctttgtgtgctggagtgagagaggggcgtttacgtgctgtccattccgccctctatgctaatattcccaaacgttgagatcataaaattttttgagatgcttcagt

SEQ ID NO: 4183 - DNA, 418 bp, Zea mays
  unsure (1)..(418): unsure at all n locations
atcttcttcaccatgtgatcacgggtatcttgagaaggttgagcaatgcatttcccttttagttgtgttaagctccttattagcctctcattntcttctttgagcttttgatatgtatcattttttgttcctgcaaattctagctcaaaggaagaattgcttgtcgatggacaacaagcattagcacatgataatgtagtttcaatttgaatacatgtgcatgagtgaggttgttgagattntaagttttctatcacaacctcatgagctacatttaatatgatatgatcatccataagattttcatgagagcttagaagcatatcatatntatcttgaaaagctagattntcaacttttagctnttctacttggtctttaagcaaggcattcctatttactaattgagcgatacaat

SEQ ID NO: 4184 - DNA, 413 bp, Zea mays
  unsure (1)..(413): unsure at all n locations
gcttaccgcatttgaagcatgagcgcttcccctaggctttggtcttgctnggttgtcccttgcgacctttaagcaccgtcttgaatcttttgatgatgagagccatctcttcatcatcaagtccggccgcctcaatctgtgccaccttgctaggtagcgcctccttgcttcgtgttgccttgagagcaaggggttgcggctcgttgatcggaccattcaaggcgtcgtccacgtaccttgcctccttgatcatcattcgcccgctaacgaatttcccaagaacttcttcgggcgacatcttggtgtacctgggattntcacgaatattgttcaccaaatgaggatcaagaacggtaaatgaccttagcattatgcggacgacgtcgtggtccgtccatcgcgtgctcccgtag

SEQ ID NO: 4185 - DNA, 441 bp, Zea mays
  unsure (1)..(441): unsure at all n locations
aagggagaacacgtgatatgttttactaacgngcattttttttatatagaccttgngcagctgggcaagcaggtaaacaagngggaggagcacatcacaacaagaatgtgatgaccacttcaagacctctggagctgctgcatatggacctcttcggactcgtcgcctatctgagtataggaggaagtaagtatggtctagttattgttgatgacttttcccgcttcacttgggtgttctttttgcaggataagtctgaaacccaagggaccctcaagcgcttcctcaggagagctcaaaatgagtttgagctcaaggtgaagaagataaggagcgacaacgggtccgaattcaagaatcttcaagtggaggagtntcttgaggaggaagggatcaagcacgagttctccgctcnctacacacctcagcaaaatggtgtgg

SEQ ID NO: 4186 - DNA, 264 bp, Zea mays
ctgcactcacgacagttcaaattgctctttatggacgctctatcttggaatcacgcaagactagtccacgggcggcccttcgcccctaagctgtgcaactggtgagggcacagaacttgcgtaactgatatggcatatgagctacctggactgcagctgccctaccctcaggctccgtctctgtgtactactgttacctttatgctacacacgtacagctctatctgtgattcgacgtggccctgctatgatcggccttttgct

SEQ ID NO: 4187 - DNA, 404 bp, Zea mays
  unsure (1)..(404): unsure at all n locations
agcttatcgcatttgaagcatgatcgcttttctctggtcttaatcttgcttggctggccctttcgatcttttagcgccgtcttgaatcttttgatgatgagggccatctcttcatcattaagaccggcagcctcaatntgtgccaccttgctgggtagcgcctccttgctccttgttgccttgagagcaatgggttgaggctcgttgatcggaccattcaaggcgtcgtcgacgtatctcgcctccttgatcatcatcctcccgcttacgaatnttccgagtacctcctcaggcgtcatcatcgtgtacctgggattctcacgaatattggttacgagatgaggatcaagaacagtaaaggaccttatcattaggcggacgacgtcgtggtccgtccatcgcgt

SEQ ID NO: 4188 - DNA, 436 bp, Zea mays
  unsure (1)..(436): unsure at all n locations
agcttaatgtacctaaaaaattgtctaattttgttaagggtaatgctctcatggttcatgatagtgagggctatattttatatcttgcaaactatcccgaacacaaaattaggaagattcatgctaggaaacctcacaatgtttctcatcatgcattcatgtataaaaatgaggcttctagttctaggcattccactcatatcaaaatgcctaagaagaaaattcctaatgcatcaaatgagcataacatttcattttagacttttgatgcttcctatgttttaactaacaaatcaggcaaagtagttgccaaatatgtttggggcaaatacaagagtcccaagacttgtgtttgggtacccaaggtgcttgtttcttatgtgaaaagacccaagaccgtntgtgtacctaagaacaaagcctaaatttgttttgt

SEQ ID NO: 4189 - DNA, 216 bp, Zea mays
ctgttaacataagttgctgcgcacgcacttacatcgtgtacctactcggtttaacatatgtgaataccactctgttgctctgcgtaaatttagaccacttttgttcactttgcctcgcatccatatgattactcctaaacaatgctgacagccgttatcaagaggagtctacacgatgccactcatatgagttgtgttcaagaaagtttcaagtac

SEQ ID NO: 4190 - DNA, 306 bp, Zea mays
  unsure (1)..(306): unsure at all n locations
gcaagctngtagtctggtattgaataacttttattcgaactctattctatttgaagtaaggaatggggntactagcctcctgcgactagtaattgtatcacatttgagtcccaaaggatcggggcgcttcatgtggtatcagaaccatatgactgttcgtagaccgcagccctgactttagaagttgccttaacaagaaaacaactcttacccctaagaaaaaccttctctcctttccccgatattaacagacccttcttgtctcctactagatggaaggctcttgggtcattagaacatcctact

SEQ ID NO: 4191 - DNA, 155 bp, Zea mays
cgtggtcgtatctgaaatgccatattttcgatcaaataccttcttatgttactcacactctaacacttgattttatatacctctctatctcgcttttatttgattagtagacgactatgactgagagaaaactgttcatcacattaacaatccca

SEQ ID NO: 4192 - DNA, 421 bp, Zea mays
  unsure (1)..(421): unsure at all n locations
agaacacgtgatatgtttttcttacgtgcatttcgaaaaagatagaccctgtgcagcttgtccaacagggtaacaagtgggaggagcgcatcacagcaagaacgtgatgaccacttcaagacccctggagctgctgcatatggacctcttcggacctgtcgcctatctgagcatangagggagtaagtatggtttagttattgttgatgatttttcccgcttcacttgggtgttctttntgcaggataagtctgaaacccaagtgaccctcaagcgcttcctcangagagctcaaaatgagtttgagctcaaggtgaagaagataaggagcgacaacgggtccgaattcaagaaccttcaagtggaggaattccttgagaggaanggatcaagcacgagttcttcgcttcctacacaccac

SEQ ID NO: 4193 - DNA, 358 bp, Zea mays
agcttggtctttttaccccaagggacctttctttgatttattaggatattctgatgctgattgggcagggtgtaaaattgataggaagagcacatcagggacttgtcagtttctaaggagatccctggtgtcttgggcttcaaagaaacaaaactcagtagctctttctaccgccaaagctgagtatattgccgcaggccattattgcgcgcaattgctttggatgaggcaaaccctcagggactatggctacaaatttagcaaagtccctctcctatatgacaatgagagtgcaatccgcatagcggataatcccgttgaacacagctgcactaagcacatagccattcggtatcac

SEQ ID NO: 4194 - DNA, 100 bp, Zea mays
atgtccctcactatactcttgtctgaatagaggtacactaacgggttaagcgtgaacaagtgaacttgtactgctgtgttattcaactcatggtacttat

SEQ ID NO: 4195 - DNA, 417 bp, Zea mays
agcttacccatgatgatgcatgtgaccagtttataggtcctcaatcatcaagcctacatcgagacagtccttaatcgactcagacggagacactacaccgagactctcttttcgtgcaagtcacccgcccggtctcatctttatcatttaacccaaagtttggtacctgacagaggtacatctgttccgatgttgaacccatcacggccatgatggatccaccatcaagttttattttgaaaacatcgcatcccacttgaagcatcatcttttgtcaaaacaaaacattttgtttttctagagcaaggctaagcatgagaaaaacctctttataaaacaaggggatcaggaaaggttatcatattctcaaggaagggaaatgcagcatttgttagcacacaactcctatcacctaat

SEQ ID NO: 4196 - DNA, 248 bp, Zea mays
  unsure (1)..(248): unsure at all n locations
gcgtgcagtntcgcgactcacgaacagttgctaaatttggcactgagttggaacgctgctatcttgtatgagctgtggcacacttgtacgcaggctcgacagaaacttgagttcaactgacattgggcattggccaaactgcgaactaatggctgctgttaccactcaggactcggacgtcctatcggacatacatgtgctacctttgtagtgctcatatcaatccgtcatgtagctgctcttgcgtg

SEQ ID NO: 4197 - DNA, 366 bp, Zea mays
  unsure (1)..(366): unsure at all n locations
agctttatcaaatggacgtgaagatgcttttctattggaccaatcaaagaagaggtctatgttgagcaacctcccggctttgaagataatgagtaccctaaccatgtttataaactctctaaagcgctttatgggctcaagcaagccccaagagcatggtatgaatgccttagggattttctcatcactaatgaattcaaagtcggaaaggctgatcctactctatttactaaaactattgaaaatgacttgtttgtatgccanatttatgttgatgatattatatttgggtctactaacgagtctacatgtgaagaatttagtaggatcatgacacaaatgttcgagatgtctatgatgggggag

SEQ ID NO: 4198 - DNA, 310 bp, Zea mays
ttaatcaccgcagctgcacttagcctttacctccaattttccaccttcccaattggtataatctactccctatgctcggctgctggggatatcaaccaatctgcgaaatggctgaagtggctattcacaatcttccatgcgtacagcaccttaaaaatgtgtggtggcccgagaactagcaggcacaaatcaccggcccgtatacttatcaaggcctacttcccttaatggctcaaaggcttattgtttaaccaagggtaattttcacgctgctcaccagtgaaactttcatcctgacgcacgtgcaaat

SEQ ID NO: 4199 - DNA, 315 bp, Zea mays
  unsure (1)..(315): unsure at all n locations
agctaggcgactgccagttctacctctgtaagcagtcctacttggccgcatgcgtcgcttggacgcggtccatagcggctacaccgctgtccatattcaaacgagggaccttatagtcgtcgccaacgccggcgactctcgggttgttttgtgcaccgcattcgacgacagcgccgtcacgccatctagctcatcatccacctgaagctcaactggccacgtaagtcgctactgaccggccatgaattcttgtccgctgggacgacgngctgtgctgacgttgtgtgattgtcctcgaacaagatgtatgtagag

SEQ ID NO: 4200 - DNA, 407 bp, Zea mays
  unsure (1)..(407): unsure at all n locations
agcttggccactgggccattgattgtctgcagccacgacgtggccaggccaacgtcncacaagcggatgcggaagaagaagccctgctcctggcacatgcaagcatcgagccatcttcagcggcaccggccgcagcggcactcctccaccttgatgagtcgaaagcacgcgctntcctcggcgacggctccaacaaggacatgatcgaaggatggtgcctcgacaccggcgccactcatcacatgaccggccgacgggagttcttcaccgagcttgactctagcgtccgaggctcccgtcaagttggggaccgcctcggcgtaaagatcaagggcgccggctcagtcgtcttcaccgccgcgtctggtgagcacaggctgctcaccggagtctactacatccccgcg

SEQ ID NO: 4201 - DNA, 208 bp, Zea mays
agtgctatcgcctatcttgaagtaacacttaacatcaattatgtagggacggataagcttatttcatgtcggtatactgtcatcggcaaataaagtctttagaaccatgttgagcaacgcgaaacctgactgtcacaaataaaaatgcaggattgtcaacctctagacgttccgcattcacgaccatgttgagcactaatgcgacgtt

SEQ ID NO: 4202 - DNA, 343 bp, Zea mays
  unsure (1)..(343): unsure at all n locations
agcttatcgcatttgaagcatgatcgcttttccttgngcttagtcttgcttggtctgccctttcgatcttttagcgccgtcttgaatcttttgatgatgagggccatctcttcatcattaagaccggcagcctcaatttgtgccaccttgctgggtagcgcctccttgctccttgttgccttgagagcaatgggttgaggctcgttgatcggaccattcaaggcgtcgtcgacgtatctcgcctccttgatcatcatcctcccgcttacgaattntccgagtacctcctcaggcgtcatcatcgtgtacctgggattctcacgaatattggttacgagatgag

SEQ ID NO: 4203 - DNA, 407 bp, Zea mays
  unsure (1)..(407): unsure at all n locations
gcttcagaagatgcttcgggtgtggcgtttttctcagatnatatttcttctgcaaattctttctccgcttctttttcaatttccaagaattccctcttggtgggctctgaaagcccagtttcaagttccgctcgactttaggcagcttccgcctcaatttgtgtctttggagcttcggcagctatcttcgaagtagagcttgaagattttatcgtttccagcacatctagcacgttaaccattcttttcctcttgggagttgttgaaaggtctttntgtgccctcggcattggtgttggcacctcaacttttgctgaaagacttaaaatttccgatgtctttgtttcttcagccctcggttcttctattttccccatctccggcattatggccggctcttcaatatt

SEQ ID NO: 4204 - DNA, 392 bp, Zea mays
agctctatcaaatggatgtgaagagtgccttcctcaacggaccaatcaaagaagaggtctatgttgagcaacctcccagctttgaagatagtgagtaccctaaccatatttataggctctctaaagcgctttatgggctcaagcaagccccaagagcatggtatgaatgccttagagaatttcttattgcaaatggcttcaaagtcggcaaggccgatcctactttattcactaaaactcttgcaaatgatttgttcgtatgccaaatttatgttgatgatattatatttggatctactaacaaatctacatgtgaggaatttagtaggatcatgacacagaaattcgagatgtctatgatggcggaagtgaagtatcttctaggatttcaa

SEQ ID NO: 4205 - DNA, 124 bp, Zea mays
gaatgcctagcttttgtaaagtagtggaaggtggaaaacttggattgacttgaatgtggggtggttgggggtatttatagccccaacccaccaaactaccgtttggtggaggctgctgtcgcat

SEQ ID NO: 4206 - DNA, 315 bp, Zea mays
  unsure (1)..(315): unsure at all n locations
agctntccttcctcggtgtgggtgtgtgtattattgaagagtgaagttagttgtatagaagggaagcaccacgacgtcgttagtaaaaccatttgaacagtctcatttggtgttagaagcaatggcagtggaagcaaagcanggtgaagtgagatgggaaaagatgatgaacacactatacattgatggaaaaggtggaagatatagagaaagttcatcatcagttgttgggacagtatgaattaacgactgaattattgaagcatgcggcagatgaaagggcgattctgtctatgagggtggaggagaatggga

SEQ ID NO: 4207 - DNA, 363 bp, Zea mays
agcttcggagcctaatcatctctagctttgttgttgaacaaagccatcagctcaaaaaagtggaagtgagttcaccggaggtgggcgccaatgttggggacttgttctcaaatgctatgaattaagaacaaggcaacataaaatgttaaatattaatgttcttcgtccgctgaaacattatttccccaaggatttaatgaacttcggatgaaggttataatgacacaattacgaaggttatatcttcgtaattggactttcaaagataatgtaaaatgacacgagacataaagcattaaagacgagtaaattagaagtaaacaacatcatttacatattatgtaaacttaagatattcaaata

SEQ ID NO: 4208 - DNA, 374 bp, Zea mays
  unsure (1)..(374): unsure at all n locations
agcgtttcttcaaattcggtctatgnttcttaattgaggcaaaaaatcgcatcanaatgagaaagaaaacaaatggagatcatatatctgcataaactattgaaatcaatcaataaactcaaaaacaaaaccttctccctgtagatctcaaaaaaaaacccgccgccgctacagtgctgtgaatattctgcgagttagggttctggaacccgtggggggctagcccttttatagtgtacacacatcacaggcggatatttagcaaaaccgcttgtgatagataacatcacaggcggttttttacgtcgaccgcctgtaaagttaatctatcacagacggtcaaaatatacaaccggctgtgatgttgtctatca

SEQ ID NO: 4209 - DNA, 423 bp, Zea mays
  unsure (1)..(423): unsure at all n locations
agcttgaagctgatgtcgaaaagagttctaattacaaatatccttgaaagagcttcaagataaatgcctaaacttctgcagccggtgcgtgcaatggctgaagcaggtcttcaactcagtgggagccagttctgaganaattgaaccttcggttgaagacctatcaagcaccttcgaacatattgaaggcgaagttgatgcgcttgacgaagttatagctaggcatggtgacttctatgccctgctagcttcttgcggcacagttgttgcttttatgaaagctggttgcacgcacggaaaaatcgtaaacagaccaaacttcagcctatcaccagcggacttgactggaatccccagcctggcctgggagcatgganatatgattataacgcanatctggactaatggtgggcgatacttatc

SEQ ID NO: 4210 - DNA, 330 bp, Zea mays
agcttcggcgatgtgttaataatttggctgcagaacagtgcaaatagcaatgagtgctgtggtaacttcacacctactcatctgtttatatagtactgcaggaaagaaggcgaagcgccaggatttttacaccaggcggaaacccgcttgcactcgctgtgcggtggaccgcagagaccaaacagtaactctgcaaggtgggaccgctacgcgctgggaaattgaatcgtttctcgacaacgagctcaaggaaggtgttttttggaccttcggctccccgaagcctaagagacttttttcacggatcaagctcgttacgaaaaacgatct

SEQ ID NO: 4211 - DNA, 122 bp, Zea mays
tgatctgtcgcagctgactctcaggtttgcaattccagaaatgccctgcctccatacgcaggcgcttactaaagttttgacataaccctcgtgacttgaacatgcattttctgttacaaatg

SEQ ID NO: 4212 - DNA, 419 bp, Zea mays
  unsure (1)..(419): unsure at all n locations
agcttcggcgatggttaataattttggcttgaaaacagtgcaaatagcaatgaatgctgtggtaacttcacacctactcgtctgtttatatagtgctgcaggtaagaaggcgaagcgtcagaattttacaccaggcgcacacccgcttgcgctcgctgcgcggtggaccgcatggacaaacagtaaactctgcaaggtgggaccgctgcgtgctgggaaattaaatcgtttctcggcaacgagctcagggaaggtgtnttttggaccttcggctccccgaagcttaagagactttnttcacggatcaagctcgttacgaaaaacgatctatcaccgcgaaaggggctactattgagtctatgcttcgtcgccgaaggtcttcaatggagaagccgcttaaatgtgtgagcatgtatctt

SEQ ID NO: 4213 - DNA, 364 bp, Zea mays
  unsure (1)..(364): unsure at all n locations
agctngccttcgcttnagtntatcatncttattccaacagagtcgtggagcgtgccaatgggaaaatcttcacagccatcaagaagatgctcctcgacgagaaaaatggcagatggaccgacttgctaccggatgcagtctgtgcgctgaacacaaccgagtgcatggcgaccgggttcactcctttccgccttctatacggatcagaggcaatgaccccgcaagatataaaacacgggtcttcgcgcatagctccgtcagccacccctgacgtggatgagccaacctccaaagatctcattgacggagaccgggtcttcgccctgcatgccttatacaaataccaagcccagaccaaagcatg

SEQ ID NO: 4214 - DNA, 458 bp, Zea mays
gatgccagaaattcttgacttctagcttccatcagtcttctttaattctttgctaagtttgaaatcagcccaagagaggacattatcgattacactagatttctcaactgcaatcattcaaagtgagtgttagcattaattgagaagcaaaaatctgatgacaaactgtaatgttctgcatggcatacctttcttgaggaaatcactagaaagctcacactttgacccaaagcttccctgacgagtggtcaaggtctccttggtctgtgaatcaaaggccggattgtcaatcagcgcattgacaaagacccacaaatggctcttcacattgtgtagcttcatgtttgcattcttgtttttcttattcacaaaagccatcacatgggtggcaatttgattggtgacataatcaacatgagttccaccccttatggtggcaatttctgtgacaaagctga

SEQ ID NO: 4215 - DNA, 405 bp, Zea mays
  unsure (1)..(405): unsure at all n locations
agcttaccgcatttgaagcataatcgctttcccttggtcttagtcttgcttggctgtcccctgcgaccctntagtgtcgtcttgaatcttttgatgatgagggccatctcttcatcattaagaccggccgcctcaatttgtgccaccttgctgggtagcgcctccttgctccttgttgccttgagagcaatgggttgaggctcatggattgggccattcaacgcgtcgtccacgtacctcgcctccttgatcatcattcgcccgcttacaaattttccaagaatttcttcgggcgacatcttgatgtacctaggattntcacgaatattgtttaccaagtgaggatcaagaacggtaaatgaccttagcattatgcggacgacgtcgtgatccgtccatcgcgtg

SEQ ID NO: 4216 - DNA, 361 bp, Zea mays
  unsure (1)..(361): unsure at all n locations
atcctcaaacaaagtaaggggaaggtctaccaaccccgctccaagagggttttctacaggtgtggtaaagtcggtcattatatttgcaaatgtccatatacaaatgacagtgatagggacgatnataagaaagggaagaagaagatggaaaaaaaaagatactacaataagaagggtggtgaggcgcacatgggatgggaatgggactccgatgagagttccaatgactcctcctctgacgaggatgtcgccaacatcgtcatcaacaaaggccttctcttcccaatgttggcacaaatgtctcatggccaaggatagaanaaagaaggtacattatagagatgcccncacatacactaca

SEQ ID NO: 4217 - DNA, 118 bp, Zea mays
cccagtacattggtcctttttctattcttgaacaatgtggaccagtggcatatcgactccaattacccaaaacattgtctgcttggcacaatgtgttccatgtgtcttaattgaagaa

SEQ ID NO: 4218 - DNA, 162 bp, Zea mays
cttcatacccaagactctcggacctgttgacctacgcatgttggcgacagtgcgcgcgactcgcgctgctctggcaagagtcatcactcacccgactgcacctttgttccggactccgactacaaacccccgacttatgcgcgtacctgcgcggacttgccg

SEQ ID NO: 4219 - DNA, 409 bp, Zea mays
  unsure (1)..(409): unsure at all n locations
agcttataggttntctgagatgactaggtgtgcttagaggaagaatccaccctaagcatgtcagatcaatccacaactccagtcagagtgatgacagaggaagccaaattcagaggccacggcatagctcataatcttcatggcagcagcagagctctttcatgccaccatctcctaggggcaaaggcggcacgggcttcaaaggaagatatggggaacatcctangaaactctatttcttattctgtggtgaggacaagggccacaccataagaacatgccaagtcaccattcagaagcaaaaagagattgtcgaagcagaagcacggcagaatcaaccaaagcagggtttacatactgcttcgtgctactctccctatataccagaatacgagggtaatcagcctgc

SEQ ID NO: 4220 - DNA, 417 bp, Zea mays
  unsure (1)..(417): unsure at all n locations
ggatcttaagcacctgagctgcagcttgtttttttacaagttccttattaacttatgctaaaaacaaatggttaattatgtttttgaggaccttcggaaggagaaggcccccaacagtagcccctcgcagtattgatttgtttctttgtaacaaatttagactacgacgtaaacgaaggcctttagccgaaggtccgaaaaaaaaccttcccttcgctagaatagcgaattacactgacctgcgggcccaccaatntgtggggctctgaacatataaataggagcctgcattgtgagtatttttcgtgctatttcagttgcttacattgtgcttgtcattntaacctttcttggctcgtcgagttcaattagaatttaagcttcggcattctagcaaccatcaaccaaatggagctc

SEQ ID NO: 4221 - DNA, 399 bp, Zea mays
  unsure (1)..(399): unsure at all n locations
ttatcaaattggtgttgaaagtgccttcctcaatgcaccaatcaaagaagaggtctatgttgagcaacctccctgctttgaagatagtgagtaccttaaccatgtgtattgtggcggaactgcccgaattattccaacttaagtgcctaagtcccgccttagaggctagaccacacttaaatgggaataacccgtcaatccctcggatctagtccgacgaggccactgacaggatcaagtaccacagtatcactcgatggtgagtcacagagcaaatacaataaagcatanaaccatacatttaagagtatttaacatatcacatcatcattgaagttttaacaaaagtagtcattattgttcgatatgcagcggaattaaactaacgataaataaaca

SEQ ID NO: 4222 - DNA, 86 bp, Zea mays
ctacgatggctatttctcgttatcactttaattttctacaaaaaaaaacgatgcttggtatgacatcgtgcaggaacccccccccc

SEQ ID NO: 4223 - DNA, 159 bp, Zea mays
  unsure (1)..(159): unsure at all n locations
agcttatcgagctatagcatcttgtcatatgtatcatatacctacctatagcatcgncggatcggatcgaagagtgtatatatttatatgtgaaaataaacgggatgatatattagcatctcagatagaccacttttcgcgttggaacgatggtattat

SEQ ID NO: 4224 - DNA, 421 bp, Zea mays
tgtgaagaatcttcatcccaacatgagtcaagcggcgatgactagatcccacccatattagtcttataaaatatgcaagtgtctagtttaacattattggcagtgaaatcaactaaatataggtgaccatctaacactcccttacaagctagagaatcatcatttcttctaaagacagtaataaacagttagaacccattgtgcataatggagacatagaaagcaagttgtaacctagagattctacaagaaacacattagaaatggaatggtcaggtgatatagtcaatttaccaatcatgtgaccaaaccttgatttcattccagaatgtgattgctctatgggatcattatattctatatgaagagaaattctttcttccctgcagtggtttggcactgtataatatcaactgtccac

SEQ ID NO: 4225 - DNA, 389 bp, Zea mays
aagcccatgctcctgtgtgaagacattgtagaccaacaggttctgctgggatctcagttatttggtgaataaaaaaagactccgctaagatttttgttcagcaacaaagatgtcttcgcttggatagccaacgatctctatggtgttaatagagatgtcattgagcattcactcaatgtggattcatctttcaggccaagaaagcaaagacttcggaaaatgtctaaggatatagctgtaactgctctgaatgaagtaaagagacttctcagtgctggtgtcctcagagaagtagcatatccagagtatctatctaacacttgtttggtgaagaaggcttatggaaaatagagaatgtgtattgatttcacagatctcaacaaggcatg

SEQ ID NO: 4226 - DNA, 330 bp, Zea mays
tggaattacatatactaccttacaccctaaacatgactcctttctagaaagccctatattaaaaggacccttactatgaacaaacaatgatgaaaatcctaaaactggaaaagggcagaattaattaccatcttacaactggtcatccatggaatgtgggctggttctattagaacatttttccgatgggtggccgcgatacactgccccggtaaccaaaatatttatttgccaagttggctgataaaaactagccataaactgccggctccaattgatcgcgtgataactaacagtataaatgatggtggttttgataagtggcagaag

SEQ ID NO: 4227 - DNA, 417 bp, Zea mays
  unsure (1)..(417): unsure at all n locations
agcttcngcgaccaagtgatctagctcttctagttccacgaagttgataccctgagcatctgtttggtgaaggcaagtgtcctctgacccattatgtcccatttactttataatacactgtcccgcatactatgaacaacctaaggatttactagctttctatttaccttgtccttgatttaccttttgggttactatggttagctacatgctagcgctttactttaatcaatgaacatgatgagatacaatgatgatactatgattttattctggatatgatgatatacttgtggcatttaggggactcgagctgtttctcgagtacccctccgtaaggacctgttcgttgagagaccacccgggataacagtgcaaccatgagggtgaaatgggatgcccttatctaattaatta

SEQ ID NO: 4228 - DNA, 145 bp, Zea mays
ctattactaccttctacctttgtagctgcttggccaacgggtagatggaaaattgctagcttcacagaggaatacttcacgctacatcttacccaaaattttcggatatttgctttttttattaaactcatctttttaatttcct

SEQ ID NO: 4229 - DNA, 288 bp, Zea mays
ggaaagactacatgccccgctccaagaggctgtgctaccggtgtggtaagtccggtcatttcattgcaaaatgttcatatacaagtgaaagtgacagggacaacgacaagaaggggaagaagaaaatggaaaagaagaaatactgcaagaagaaaggcggaaggcgcacatgggacgggaatgagactccaacgagagctccaccaactcctcctccgacgaggacgccgccatcatcgtcatcaacaagggacttctatttcccaacgtcagccacaagtgtctcat

SEQ ID NO: 4230 - DNA, 429 bp, Zea mays
  unsure (1)..(429): unsure at all n locations
ccactgtatctgggttatactattcttcgaagcaccatatggcctggtttgatatatttcaatcgaacttttctgtcacgccattttattggttcacttggtacttattgatgtgctctatggcctaaaagctggtcccttctatggtgtctttcgttatttggcaatcagcttcatcctccgtcgaagctatggttcttattgaacccgttcttgcttcttcagtgctattgcttcgtcaccgaacaaaagcttgaatggagtaaaacatgttgaccttgagataacagtgttgtggttccacaccacctttattaattcatctggccactttcctctgggctgatngaagatagacttcattattcctcttattataattccatctgctctttctactaatccatttgattccggatgccttactga

SEQ ID NO: 4231 - DNA, 367 bp, Zea mays
  unsure (1)..(367): unsure at all n locations
cacatagncgcgaagatgtatttcttttagatagnccatgtcttctaaagctatcactttgcgagagaccgcattgaaaaagtaacacatgcgtgtgatgacaactttgacatgctctgttttgagggctcttaccgcacctgggatgaactccgacatcatcacatggcggtcatgagagtttgtaccaaatagagacaagtccttcatcctgactagtctgctgatataggatgataaaccagtgggcactttgaccccacgcaaacatttgcaaatatttgttctctctcaactgacaagttgtggctagctgggggaggtaaagtttcctttgcactatcactggatgaagttcggtctgatt

SEQ ID NO: 4232 - DNA, 313 bp, Zea mays
  unsure (1)..(313): unsure at all n locations
gcttcttcaccatgtgatcacaggtatcttgagaaagtgggccatgcatttccctttaagttgtgtcaagctcttctttagcctctcattttcttctttgagcctttgatatgaatcatcatttgttctgtagatctagctcaaaagaagatttgcttgtcgacgaacaacaagcattagcacatggttatatagtatcaatttgaatacatgtgcatgagtgaggttgttggngatttaaaattttctatcacaacctcatgagcaatgtttaatatgatatgatcatctantagattttcatgagaacata

SEQ ID NO: 4233 - DNA, 438 bp, Zea mays
  unsure (1)..(438): unsure at all n locations
agcgtattaatcattcctgtcaagatttctatgtggccttcaagacccatgcacgtgttgaatgcattgaaaacccactcgaatgtgtctacagtttcgtctcccaacaacgtgaaaccaaatatggtgcactgcatatggtggttacaaccaacaaacattcccaagggtgtatcatatagatttgtcttatgagttgtatcaaaggtaactgcatcactaaagtcaatgtaatccgcctgctggctagcatgggaccaaaaaattctcanaatctttccttctttgtccagttggaagtcagagaaaaactgtgggttatcttttctacacaatggcaaatagagaggagctnatacacatcattggcatttctttctctttgtcgcgctntcttcctgtcacaattaacaattatcatacgtcatacgtcaaagc

SEQ ID NO: 4234 - DNA, 395 bp, Zea mays
agcttcggcatctagttcaacgccccggttccgcagagcccaaataaaagttcctaaacgcactatggcgtttggtgaaagctggcgaatgtatatgttaaaccttttaaaacagcaactaccgtcttatgcaagggaaatctaagcctagcttttaagaagcttcggaacacaacaatttcgtcttctttcggcttcgacactaagtcatcgcctcctagttgaacccaatcaatgttgccactgtaactgaatcgattaagtaccttaatgtgtcatcccttgatctttgatttaccaaagttcatatgacttggcttcgtaggacgaatggtagcgttgtcttcctcaatatcaatattgtcgccatcctcggatggatccatggcgccagc

SEQ ID NO: 4235 - DNA, 52 bp, Zea mays
attccatcaaaccggcatgtctatatgtaaaaccctcataattgcttcgctt

SEQ ID NO: 4236 - DNA, 353 bp, Zea mays
  unsure (1)..(353): unsure at all n locations
atcctctgagtcacctgcggcatcaagcttgtgatgttcgattcgatgggatactgttaattcatccccaagcatatntctatgcccatcgcaacaattacaagtctagaatcggtgtctgattagatacggaggaaaaacaatcacaagattaagttggcgtgccttcgatagatatgagaaaaatcaaagggcccaaattcaagagaacgactgtatatgtctttcctagactgggttggtaaagcaacaatgtgatcctccagaagaggcaaattggaatagaaacatcatcttgcaccaaccaaacaaaggaatggttttggaatgagacatgactccagattcttgtt

SEQ ID NO: 4237 - DNA, 382 bp, Zea mays
  unsure (1)..(382): unsure at all n locations
agctttaccaaatggacgttaagagtgtctttctcaatggaccaatcaaagaagaggtctatgttgagcaacctcccggctttgaagatagtgagtaccctaaccatgtntataaactctctaaggccctttatgggctcaagcaagccccaagggcatggtatgaatgccttagagatttccttatagataatggcttcaaagtcggaaaggtcgatcctactttattcaccaaaacacttgaaaatgattcgtttgtatgccagaattatgttgatgatattatatntgggtctactaacgaatctacatgtgaagaatttagtatgatcatgacacataaattcgagatgtctatgatgggggagttgaagtatttctt

SEQ ID NO: 4238 - DNA, 428 bp, Zea mays
  unsure (1)..(428): unsure at all n locations
atcttgaactgatctagtcttgaactgttgtagtcttgaactgccttgatgttcacatgttaatatgagctgatatagtcttaatgttaatatgcactgatgttcacatgttattatgaatggatctagtcttaatgttaatatgcattgatgttcatatgttcctatgttaatatctccttgtttactcaatatctgtggtaggccgtgaggaaccggtgcgcgccaccttgacggcgacggaactggtgctccggctctctaaattgtgatggaggaaggtgttggtggtgataacagtctagatcagttcattaacaatgatntgaggattataccctgtgatcagaatgctccctctcagtccgttaacaacggtagcagtgctgcacctattgaccttgaaaggccgctgtaccgacaatact

SEQ ID NO: 4239 - DNA, 408 bp, Zea mays
  unsure (1)..(408): unsure at all n locations
gcttgtgcaaagtccactcgagctaactttcggagaaacccgttcccactgctacatgacaccagagggtcaaactcaacgggcaatggatgaattcagaatcgttgcagagcatattggtaccagggatctggttcaagaattcttagcattcagagtcttccctactctgaaaaaatgggaaatgccgaagttaaagggggagaagaaggaaggggatcttgtccggcttccttaccacttcaaattcaagaaatattttaagaagccctgccaagagtggctggatacagttgaggtgatgtgtaatgaaattcttgggaattactcgaanaaggaagatcaactgatgacagcagccttcggcacccgtccgaagcgaaagctgaaccgagtgcttgatgctct

SEQ ID NO: 4240 - DNA, 343 bp, Zea mays
  unsure (1)..(343): unsure at all n locations
tcgagacaaataatagttgcgctggtagaaagaattgttagcctcacactttcccgcttagcacaggcattcaaacccctcacattccaagatgaaatatagcagtttgtattcattaaaagatgaaccctctacttgaacagatattgccacataaaatatataacatagctaacatttgatgcagactggcaagcttgttcaccaacagtaagatacacatgtcccatgagacacacaaaagttccaaactgaaattactaagatacagagggtcaatgatccaatgattcgaanaccacctctatgaccaccaaataccatgcgacgaccaacagtctat

SEQ ID NO: 4241 - DNA, 185 bp, Zea mays
actcgagtttaatcttggtactatgccttgtggctgtacgggagcgggtcgactggtatcaccaacgtggtgcctatgggagatacacagctatgtcgtacggctgctgtatttgttgtgcagcacggtgctgtaccaacattctggtcactctaccgctgctgtggcagatttccactaaaggc

SEQ ID NO: 4242 - DNA, 430 bp, Zea mays
  unsure (1)..(430): unsure at all n locations
gctggaccanaacactattattaaatttacgggttagatcacatcanaagctaagaaagatttatacatgcgaaaagacatcaatcaaaattaactggtgcatcacaggttcttcaagaataaacatggtttaagctacatcacatcaagcactactaacagctaagtgcataaatacgtatatcaccacataccataactctcaaatgtgacaaacatatcaagtctaggctattactaatacaaagcacatacaaaagtacagagctcacaaggtctatgtcgatgcatcgtacattaaactgtagcatcaacacattttgtaaccataccaaacatatgaagacaaataagtgctgctacactcgtacatgcattccttgtgctatataagtaatataactattctaantaacttctaacataactc

SEQ ID NO: 4243 - DNA, 388 bp, Zea mays
agcttcggaatatctcgacttcatttcttctcgggagtcgaacatgttttctctccttcgtcagccctcacaatagataaatcccgaaaatatctacccttcatattgacaagatggctttgtttaatgcttgattttccaaaaactgcatggcttggtcgccaaagtcgatcttcagaatcttcaccaccactttccacatcatagttgtcactgtcaccagtgtcttcagacaaaccctctaaaatctccctagtaatcttctttgtatttgtctttgctattgattcaagaaagccgagattcatctcctcataaaggctcagcttcgtttcagcgacaactttcttatcttcagacatcttcgaaaatgctgagaaagtgctct

SEQ ID NO: 4244 - DNA, 395 bp, Zea mays
  unsure (1)..(395): unsure at all n locations
agcttcacgggctactggcggagcaacttattcactggttgttctggagggtggctggagtgagctggcctctgcggccgaagctctggcggcaatggcagacggaaatgagctcgccggagctaaagaacagtggctgatcngtgagggtgagcgcggtgcgaattgaggcgcgcctggggaggctttataagcacagcgcggtgcacgggcggtcttggaccggcgagtgcacgcgggcgtgcactgtgaatgcgcggtgcgcgaacaggcgtgaaccatgggtgtcagccgcggtcgaacacgtgttcccgttgcctctgnccctgttcaagcgccgattgggagcaaatcttctcgaatttgggcaagatcactgcaagtgatttgttcac

SEQ ID NO: 4245 - DNA, 352 bp, Zea mays
  unsure (1)..(352): unsure at all n locations
ccttttggcgtgctcacaacatcatttcgtatgggatcatctgcgcatcctattgatatctctacatattgaaacatcaagtatttatgcaaaatgtggtgatatgttcaaggtcactcctcacatatgatgttgatactaattacactaaacacgtttgctaatcttatgaaatgcangttcgctatattgcaccccattgttctcaacccagggggtgtatgtctgctcatctcttgcaaactgaagaagtgcgctcttgcaagacttgcagacctgtacaaataatgtatgagatactactaattctgaaagatgttaacctgactaagctgtcaattgcctctgctct

SEQ ID NO: 4246 - DNA, 238 bp, Zea mays
  unsure (1)..(238): unsure at all n locations
catggtccaatccttttccccttcaggcttctcactgattccctaacanaacaagaatgcacgggtctccatgggctaaatatgatggacatgaactctagaatgtaatcacctgatggttgagttgacgagcacgagcgcgagtaatgggaccagaaattggtcttgtattggtatagatgcatcagtagtgtggatgtcttcatcattctccccttcttgcatatgaatcgtcctc

SEQ ID NO: 4247 - DNA, 447 bp, Zea mays
  unsure (1)..(447): unsure at all n locations
agcttatgaagattcttcatcccaacatgggctagtcggcggtgccagagccaacccatgttagtcttagcaattaagcatgtgtcgagttcagctctatcaaaatctactaagtatagctgaccctctaacacacccttaaatgatattgaatcatcacttcttctaaagacagtgacacctacatcagtaaagagacagttgtagcccattttgcataattgagatacagaaagcaaattgtaatctaatgaatctacaagaaaaacattggaaatggaatggtcaggggatatagcaattttacccaatccttngaccaaaccttggtttccatccncgaatgtgatncgctcgtggggatcttgattttctcgtaagaagagaacatactttctccnctgcatatggtttgtgatccgctgtcgagtatcaaactgacccccg

SEQ ID NO: 4248 - DNA, 233 bp, Zea mays
tgtaaagaggagcgtatctccaaaaaaaaatagctgagatgtaaactcagttgagctaacttacatgctaaaatggaactggtgtaaaatatgctgatagtgacagttgacatgatctgtctcatacatctcacttggtagaatctatgtctgttggaaattggatatgataaaatctacactaacttggaaatgtttgacatcttcgagtgtgcaagaagttacaatggaag

SEQ ID NO: 4249 - DNA, 367 bp, Zea mays
agcttatcacctgcgcctgtagccgagctacgtggctggaccaccggtatcgccgtggtactccggtgacctcaattatgccacgccgtagctctttaccgtgtagtagtaaccgtggcatgcctatgctcgccattttataaccgttgcatcggcggacaccacgattgagccgccagtgacctcccctctctctggccgccagcgcgccttcgcaaaattggacgccgccgccaatggaacctataaattaccgccccagtgagctccgcaaggtcgtcacgaagccagagaacccgcccttgtctccgattagccaccatagcctcccaatttctatcttcccccaaatcgaatttccacgcta

SEQ ID NO: 4250 - DNA, 54 bp, Zea mays
actaatacgaagtattaaaagtgtatgcctacctcttttaactacacaagatgt

SEQ ID NO: 4251 - DNA, 344 bp, Zea mays
atcttgttgatctaatgttatcgagaatttgtcgagcgcagcagccactcggcaaagtactttcttctggatttccggtagtgatgcatgcaaatagtagtgtcttttttatttcttcattttccacatatgagttgatattctgtccactttaaattatactagttagtcgctcgtatatttctacgatttttatatatcatataggtagactcctctcaaataagatatttattcaaacatatatatatatatatattattgttaaattattaatatatatatgtatgtacaagtattcttctttgtataacaaacaacaggcatgaacctagggttataca

SEQ ID NO: 4252 - DNA, 286 bp, Zea mays
  unsure (1)..(286): unsure at all n locations
atgctagagtcagncctttttctaaagattatggatgctcaaaaggataatgaaggtatgaaacacatccatgagaaaatagatgccggataagccaaatgcttcacaaaggatgatcaaggcattatatggttcaacaaccgcataggtgtgccgaacaatgaatagctccgctagcaaattntagatgaagcacatcttagtcgctattctattcatcccggaagcactaagatgtatcaagatctaaaacaacattattgatggacaaagatgaaaatagaaa

SEQ ID NO: 4253 - DNA, 442 bp, Zea mays
  unsure (1)..(442): unsure at all n locations
attcttgagcttgtgcaacatttctctgtctttggtctngatatanatagatcaagaacaactgttttataaaaatataatgttgccatgtttattctgctatcacatcaaagtcatattgaaacttacaaatgttttattactatattccaaaaatttaccaaaggacatttcctctatggtncacaccaaatgcacctggtcttcagcaacgcgctcgctgctaacctcacaagataattataagttaattgcttattcatgttgtataagttaatcgcagattcagttcacggaagaacagaatggcacacattggtcagatgcataaacaaaaaatgtattggatgatgcacaggcaggaagaaagatggcaactcacacgccgatagaattgtgcagcaagtatgttcatgtcacgcgatgacgacaccctcagctc

SEQ ID NO: 4254 - DNA, 163 bp, Zea mays
acgaaccgtcaaaaagtgtgtacccttggcaattatcgcctttaaccttacttttttcgacctagtatctgccttgggaataagatgcctggaagactgatgcactctaatggctctttctcacgagaatacgcttggtcagcgagggaatgtatgcgtaaag

SEQ ID NO: 4255 - DNA, 343 bp, Zea mays
tgctttaagtcattaacattcttggtaatacatggtctccaagattcttatactcttctccttaagtttcttccacatgtgatcacagtcattagtgcatagatgtgccctaaccatggtaaccacctgggtgttacagccctccccccttaaaggaatctcgtcccgagaatttaggtagagtcctctagaggggtgccaagaaggcgtgttggtgcgttgttccttcttttgttcaagtttctctagttaactgctcttcgaatgtcattctctttgtgacttcagaaggaagttctttttaatttaaatccacaacttatactacccttgtcatctaagt

SEQ ID NO: 4256 - DNA, 194 bp, Zea mays
tttattattagaccactgtaacggtcaatgtaaacttcacctgaaatttaaaatagagtcgaagaaaatccagggccgagtatgtactgaaccttaactatgttggtagccctttactaaagctggccgagcttttttgtgatgcctaaaatttgttgattttgcggactggcatttgcgtattttacatctgt

SEQ ID NO: 4257 - DNA, 445 bp, Zea mays
  unsure (1)..(445): unsure at all n locations
gctttaagcacctgacaactttaaaattttatacagacaaggttatatgcntttattgataacagctctttgcaggctataatttccaacttattcaaaggtgtcaattgatgtgggaaactaatatatctaatcttctggaagccttcgatctttagtgacttcagtgatggaagttctgagaaggtcngcagttcaacaccgtaatgaaatgacacatgcactaaggaaataaggcgaggcaatttggttagtttcgggcatctactgatagaaagtcgaaagagtcgtggataatccttctctctcgtgctaacccagaactgcatatcatacatctcgcatatattcagcaccttcagtgatggaaatctagtgggatantttacttcagtggccaaagaactggtctcgattacaaatccttcaacaacatttattctct

SEQ ID NO: 4258 - DNA, 373 bp, Zea mays
gcttgacacatatggcactagtcgatcttgaaagagcaagatttctataagttgttataagccacgtttgctctatgtgcagcacctgcagatattcttcattctattcatattactgctaaggagtttaacatatcaaagtgcgaaataacttatcaaaatacataatgcaatcttttgggtattattagtcattacagtattcttctgtgtgactaatggattacttctaggggtggtaatgagctctaaattttacactataaagtctaaagatcgaattggattaggatcgagctctatttctattcatttttgaactaaaattattaagaaccctaagagcattttcaagagctccccagagaatgac

SEQ ID NO: 4259 - DNA, 109 bp, Zea mays
ctgatcgttactgaaacacactatacccgttcactctgtgcacctcatgtagatacacatagtacgcttccagtcgctcaggcaagagtcgctaccaccagctcgctac

SEQ ID NO: 4260 - DNA, 407 bp, Zea mays
  unsure (1)..(407): unsure at all n locations
agctcgaagccatggtaagtagcatatgtatagtatatacgaattgactcaagcctagctacgggtgcataagtttccccaaaatccaaacctttgacttgtgaatatcccttggccacaagtcaggctttgttccttgtcaccacaccatgctcatcttgcttgttgtggaagacccacttggttcctacaacattntggttaaaacgtggaactaaatgtcatacctcattccttgtgaagttgttgatatcctcttgcattgccagcacccaatccgaatcttgaagtgcttcctctaccctgtgtggctcaatagaggaaacaaaggagtaatgttcacaaaaatgagcaacacgagatcgagtggttacccccttatgaatgtcgccgaagatggtgttcat

SEQ ID NO: 4261 - DNA, 315 bp, Zea mays
ttctttatcaaatggacgtgaaaagtgtcttcctcaatggaccaatcaaggaagaggtctatgttgagcaacctcccagctttgaagatagtgagtaccctaaccatgtttataaactctctaaagcgctttatgggctcaagcaagccccaagagcatggtatgaatgccttaaggattttcttttatataatggcttcaaagtcggaaaggccgatcctactttatttactaaaactcttgagaatgaactagttgtatgccaaaattatgttgatgatattatatttgggtctactaacgagtctacatgtg

SEQ ID NO: 4262 - DNA, 357 bp, Zea mays
  unsure (1)..(357): unsure at all n locations
acacgtggatagcttctttcaagcacttctatccaaacacaactccattgtaatattccattccttcaaagcccttttgattgcctcctcccatgtcaagtttggttgacctctaccgctcttcacattatggtatcaacatatataacagtatgaaatgcaagttccactcacctgctgataaactctgctacaagcaacaaggggtgcggtacacacaactacacaaggcttgcatggctcccgcatattcagaactacatccacgtcaaggcatcaaagcaaaatgtgtntacacctgctgcctcttttgtatcataaactatcaaccacgtctctccctgtgctaagtacatg

SEQ ID NO: 4263 - DNA, 184 bp, Zea mays
actctaacaggtcaactactttgacattaactctctcttcatcctcttaccttcttcaaaatcttccacaatcccaaaaggagacatggattgtaagaggatatcttttgttgagaaaatacgcggtctatcacagagactaatccttatgtgtatctaccgtaaactctgagctaaggttgct

SEQ ID NO: 4264 - DNA, 375 bp, Zea mays
  unsure (1)..(375): unsure at all n locations
agcttattatcagtataagacatagcatattctaaggtgttgctgggatctcagttaactgatgagcaagacaagactctgctaaagttcttgtttaacaacaaagatgtttttgcttggacagccaatgatctctgtggtgttaatagggacatcatcgagcagtcactcaatgtagactcgtccttcaaacaaaggaagcagagacttctgaaaatgtctgatgacaaggctgaatgtgcacgaaatgaagtgaaaagacttctaagtgtcggtgttattagtgaggtaacatacctagagtggctgggcaatacaatcatggtaaagaaagccaacggaaaatggaggatgtgtatcgactntacagatctc

SEQ ID NO: 4265 - DNA, 343 bp, Zea mays
  unsure (1)..(343): unsure at all n locations
agctntantaagattgctcttgacnatctgatctgctgttcaccttaagccagagagagcatagtctgccatgaaattgcagaggtntgtgcttcctcttactttgtgagtggagaaaatggagagatcttggatgaatatttccagactagagcgaaatgaacaagctgaagatgcagtaacaaagctgactcttcttttttctttnttcctctgcagaaggcaagcaactgattaagacgctacggactggagaaaacctgtgattggaaagacgcataanattagtgaatctgaatgggaaaatggagcacaaaccaattctttttctttctcgtcatgt

SEQ ID NO: 4266 - DNA, 413 bp, Zea mays
  unsure (1)..(413): unsure at all n locations
ttcttgtnattcttagcttactttgagcttcgagatatgangntcgatgngatgttatgatgtatgatgcgatgatttgatgcacacaatgatgngagtgtattatgcgaatgaatgcccaaacacacacattcatagctctgatcccgacctctattatctaaggaatgactgagatctctttggcgcttactttacggctgcaccgcttattccgtggtgtaagttctgcatttcctaagaacgtatttagaactttgcggcctttatttcggnggatttgtgtgacttttgcgcctcacctatttagcgaaggttttggtctgcttccctaagaacgactttgaacgaaactcacctgcgtccttagaaaggttttaagctcaaaatttcactgggtttagaagactttt

SEQ ID NO: 4267 - DNA, 424 bp, Zea mays
  unsure (1)..(424): unsure at all n locations
gagctcattttagaactaacaaatgttcattttgagaaagacatganttgtagcgcatgtcaagtanggaagcatgttggagttcatcatccacacaagaacatcatgacgaccgagaggccgcttgagctactccacatggatctatttggcccgatcgctntagcatcggcgagagtaagtattgtcttgtaattgtggatgattattctcgcttcacttgggtattccttttgcaggaaaaatctcaaacccaagagaccttgaagagattcttaagatgggctcaaaatgagttcggattgagaatcaagaagattagaagcgacaatggaatggagtttaaaaactctcaaattgaaagatttcttgaggagganggcatcaagcatgagtngtctttctctacacacctcaaaaaaat

SEQ ID NO: 4268 - DNA, 332 bp, Zea mays
  unsure (1)..(332): unsure at all n locations
ttatgcctcgatcatgcttactcgaaccaaataactctctacatatatgtcactaatatctgccatacattacttgaaggaacacacacactgtctgtcaagttccatacctacaaatatgctctcgatttattgtcttctctaccctgctcatctcatgagctgcacctggactgatcaacatgactatagtcaatatgactctgagcattcatcttcaactctcgttatattctanagtggagngacattgtgactgaatatgcactctgagctcaacctatacttcattgtattcttaaataactgtcaatttagctcttactgctact

SEQ ID NO: 4269 - DNA, 315 bp, Zea mays
atcttaaacgaagaagcttgggacgggttctgaccggaattgggctggcgacagtgggctcggttctaccgtggcggaaatcggattggggcgaatccaaaattcgtgagttctagcgaaagactgccagcgattaacggtggctgggaggatgatgatgttatgcagctaggggagggctcaatttatagaaagcttcgacggcggcgctcacattggatgaagttgtgcagcggccggagatatggaagaagcctggcgcgcggttacatgtcctatagcgtggcagtaaccccggtgagccacagagagttc

SEQ ID NO: 4270 - DNA, 302 bp, Zea mays
ttgttaccggaggcagtctgggcgcttaacacaactgagtgcagggcgactgggttcactccttttcaccttctatacggatcggaggccatgaccccgcaagatataaagcatgggtccccgcgtacagttccgtcagccgtcctcgaagtggacgagccaacttcaaaagatctcattaacggagaccgggtgttcgccctacaggccctaaacaaataccaagctcagaccaaagcatggcgcgaccacgcagtcatcccgatgggagtcagtgagggggacctcgtgctcgtctaaca

SEQ ID NO: 4271 - DNA, 242 bp, Zea mays
actaaaaaaatagccctcccacccggcatgtctcagcccctaaaccacgcgaaacgaagagcactgaatttaacgccaaagagcggcaagaggcctacaagagccccaacagcagccacccccagaaagacaagctgagaacagcggagcccgagaccggcgctcaacaagcacacaactaagccaagcagacacggcgaaagaagatccacccgccctcgaccagaagaacggcgccagac

SEQ ID NO: 4272 - DNA, 406 bp, Zea mays
ttgcaaagaatttttgatgctcaaaaggataatccgggtatgaagcacattcgaaagaaaataaaggctggagtatccaagtgttttgaggaagacgatcaaggtgtgatatggtttaaaaaccgcatagtaatgccaaagaacgaagaactccgccagcaaatttttgatgaagcacatcttagtcgttattctattcatcccggaagcactaatatgtaccaagatttaaagcaactttactggtggacaaaaatgaagaatgaaattgcacgctatgttggttattgtgacacctgcagacgtgtcaaggcatacacatgaaaactggcggtcattacaatctttgccaatccacctggaatgggagacatcacatggattcattgtggattgcagaacgcaa

SEQ ID NO: 4273 - DNA, 353 bp, Zea mays
  unsure (1)..(353): unsure at all n locations
ggtcaatncctgacattgcggtagcgagtattgaagcttctgttgcaacttctgcttcggcacttgcagcagtcaccattttgcccgctgaggctgaaggcggtgttcgctcaatggcttgcatcacgtagactattcttcatttgttttgcccttcagccttctccgttgcagccgaaggctgtcctttcttctgtaaaaatttcgtcagttccggccccagacgacttatcagcttgatgggcatggaatcagtcagtacctttaaaatttctgctacttcggcagcatagggtgttgaaggagctttgtctcacccaccttcggctcaacataggaagttgtatcgagct

SEQ ID NO: 4274 - DNA, 429 bp, Zea mays
agcttggatatagctacttccactggtatttgattcatatctggctagataaagtagagctcaaaataatttaactaatactcccttcgagttcgaatttataattcatttagcacgtctcgaatttataattcgttgaacacgtcttattgaaaaagtcaaaaatttatgaattgggacagggagtaatctttcctactctattaagaccgtaagtaaagcgtccacactcgtgcccccgccccggctccatcgtcaccagaaatccaaccgtcggcccctttccatcacccactcccactcccttccttcgtctccgcgctcggcgccctcactggtttcccctctgcctccgacctcgattcgagtcgcgactggaggaatcacaccttcgttccgacggggccactctcaaggactccattctcg

SEQ ID NO: 4275 - DNA, 426 bp, Zea mays
tgtagtattcctcgcctaggctctgcgcttaacttctttaaactgcgcagagagctgcttcacgggtcgggcaccggctccgatatcaatgagtgctctgggacatccctcggtatggccggcatgtccgagggactccacgcgaactcctcagcgttcgcgaggagaaaagtcgacgaagcattgcttccttattggggtccatgctcggagccgaacccggacttgctttgcaagcgatgctgctggggtcgaaaaggacggacttaaccgactcagctggctcgaacttgccggcatggcgcttcgatcgggcactctcttggaaaagcacttcatgtcggcgatgagggcctcagactccgcgaaggcctgagcgtactccactcacttcacgaagtattcgtacgcctggcggaccgggat

SEQ ID NO: 4276 - DNA, 445 bp, Zea mays
agcttaacattgcctcctaggtgtatacttatgccatccttaatgccaaggtgtctcccactatagagcatgcttctagcaaatttaaacttttcattttccatctcatgctcattaattttagcattaagatgagctatgtgatcattttggagtttaattaaagctaggtgatcatggatatcatcaacattaatgtttctacatctagtataaatagtaacatgatcaacattagatgtagagggtttgcaagcatttaatacatcaatcttagcatgtaatatggcattctcatttctaagattggagatagaaacatcgcaaacatttaaatccttagccttagcaattaatttatcattctcaatcttaaggctagaaattgattcattcaacttgtcaatcttaccaatcaaactagcattatcatttctaaggttga

SEQ ID NO: 4277 - DNA, 372 bp, Zea mays
gccgcccggcacgggcgcactgtttgccagcagacccagcaggcgcgccgcctgctggatgaccttgacgccgcctgccagcggatgggacgggacacattaaaagctgagagggcacgtctcccgtaagcgcattggcaggcggcgcgtcttttcctcaataaatgcaggtgctgcacgacttctcgtcaggttcagcccggaagcttaggtcatgggccacaagctgcaggtctccgtctgagccggaagcgtaaggcaaggccccgtacacgtgcagcgccggacccctgacacactagggtccttattgatcccggaccctgctggagttcagacttacctggaggctccggacttgaatggatatac

SEQ ID NO: 4278 - DNA, 471 bp, Zea mays
  unsure (1)..(471): unsure at all n locations
tgacgagttgactaaagaatgtgaggagctaaagtgctcttatgttgatttggtccaaaggtatgaaactatcttaattgagcaagataactctttacattgtatcactcaattagtaaataagaatgccttgcttaaggaccaagtataaaagctaaaagttgaaaatctagcttttcaagaaaaatatgatatgcttctatgttctcatgaaaatcttatggatgatcatatcatgttaaatattgctcatgaaggtgtgatagaaaacttaaaatcccaacaaccttactcatgcacatgtattcaaattaaaactattttaccatgtgctaatgctngttgtccgtcgacaagcaaatcctcctttgagctagaatttccaggaacaaaagatgatacatgtcaagagctcanagaagaaaatgagaggctaaagatgagcttgacacaactacaagggaagtgcaa

SEQ ID NO: 4279 - DNA, 452 bp, Zea mays
tgccagtacctgtcataacaacagcacctgccagtacatttactgcaaaccataccagtaacttggccttttgcatgctggggtttggatatgaatggacctttcaagaaagctcaaggaagatacacccatgtattggtggctattgacaagttcactaaatggatagagtttagcccattgtctctttaaactctgctaaagccgtggaattcatacagagcataatatttcagatttgggataccaaacagtatcatcacttgactgggatccaactttaccagctcagaattctttgatttctgcgagcagaaaagcattcagatcaagtatgcatctgtatcccatccgagagccaatgggcaagttgagcgagccaactgaatgatatttgaggcactcagaaagaaggtctttgataaaaatgataaattcgcaggaaaatggat

SEQ ID NO: 4280 - DNA, 407 bp, Zea mays
  unsure (1)..(407): unsure at all n locations
agctnataccccgaaccacatctttcgtacgcagcttgcgataggaccatagcgctctacacacagatatgcactacggcctaaatgcgctacaacaccgtatcctgcgcattcaattttatcaacatccactatggtacggtaagggtaaggtaggggggccgcttgctatttcatttctccagactacttcttcttttttctccttaaaaggaactagagtaaccattctattaacgaccactttcagtgggtggctttgcgtctgatgctggaaaattgtcttcaaggtcatgtgccctcacatacatcacctttgcgtacctataagggcgtgtacaacccccatttctacgggtttcttgagtgttctatataactactcaaaaatacagagacagttcttc

SEQ ID NO: 4281 - DNA, 380 bp, Zea mays
agctgaagcctatagtattaattagcttactccactttctgtaaattaatgtgaattcgcacagcggatgaccttgtcttgccttccgaggactcacgggatggtgacttcaatccgtcaagtccaaattctagtgaataccaaaaagatggaatgaacttcgaagagtcacaattcacatctgactctgatgatattagggctgagattgccaaatcttgtggccaggatgaagtcttctgatcttcattatcaaatgtgataaaccatacttatataatgaaactcagggccatcaacaacctgcttcatgaagaaaaccctgatcatgtctatatggacatggagctagggcaagacatggtgctaccaatttcaaa

SEQ ID NO: 4282 - DNA, 307 bp, Zea mays
  unsure (1)..(307): unsure at all n locations
gactgcagcatgcaagctntcgacagcaatttccagtgcacgttcttgcgccccgggaattcctgggaccttcgaagctgccggcagtagccgggagagtctttccgagactacatccggcgattttcgaggcagcgcaccgagctgtccaacatcaccgactcggatgttatcggcgcgtttctcgccggtaccacctgccgcgacctggtgagcaagttgggtcgcaagacccccaccagggcgagcgagctgatggatatcgccaccaagttcgcctccggccaggaggcggttgatgctatct

SEQ ID NO: 4283 - DNA, 463 bp, Zea mays
agcaacaggccccacctcaacctcagatgcaagtgcagatacctcagatgcctagagacaagcgtgctgaattcatgagaggtcatcccccaatgttcgctcactctgctgaccccatggatgctgaagattggctgcgtatcgtggagcgggagttgcacaccgctcactgtgatgacagagagaaggttctatatggtccccgtctgttgaggggagcaactcagtcttggtgggagtcctacctcgccacccatgtcaacctcgacaccatcacttgggaggaattcatagataattctcgtcagtatcatgttccagcatgtctgatgacagtgaataaagagtaatttctagcgctcaagcaattgcccatgtcagtaagtgagtacaaagacatgtctctgcagctgtccaactatgctcctaaagatgtcacacagatgccacgagcaatattgat

SEQ ID NO: 4284 - DNA, 473 bp, Zea mays
cttaagcgacctgaggcatgcaagctgggaggcgtcgattggttgactacttggtgtttactcctccttcttttcttccgatgccttgaatgcgacgggttgagcttcagatgtaaatggatcgtcaagctcgttgatcttcctcgagccttcgatcatgcactcaaaacttacaaaatgcccgattacttcctcgggggtcattttagtatatctaggattaccacgaattaattgaacttgagtagggttaaggaaaataagagatcttagaataaccttaaccacttcgtggtcatcccactttacgctcccgaggttgcgcacttggttcaccaaggtcttgagccggttgtacatgtgttgtggctcctcccctttgaaagccggaaccgaccgagctctccctcgatcgtttcccgcttggtgatcttggtgagctcgtctacctcgtgcgcggtattgagcacatt

SEQ ID NO: 4285 - DNA, 463 bp, Zea mays
  unsure (1)..(463): unsure at all n locations
tgtgaagattcttcattccaacatgggctagtcggcgatgccatagccaacccatattggtcttagcaattaaacaagtatcgagtttagctctattgaaatcaaccaagtatagcagaccctctaatactcctttaaatgctactgaatcatcacttcttctaaagacagtaacacctatatccgtaaaaagacagttgtaacccattntacataattgagaaactgaaatcaaattataatctaaagaatctacaagaaaaacattggaaatagagtggtcaggagatatagcaattntaccaagtcctttgaccaaaccttgattttcatccccgaatgtgatagctctttggggatcatagtttttcttgtaggaggagaacatctttttatccncagtcatgtggtttgtgcacccgctatcaattatccaactngagcccncaaatgcataaaccta

SEQ ID NO: 4286 - DNA, 415 bp, Zea mays
agcttgcacgatgaagctgtgtgccctctcgcgccttttcctgcgagggcgctgtgtacattgactgagatggttggttacgctgcgctggagtgatcatagtcggccttagcgcggatggcttgatgttgccgtcactgatctcgttgaactagttcggctgcgcccttatgcggcttctgcgcggatagccttcgggtaaacttcgcgttttgtcgcgcttatttcacacttgttgggctagtccggttgcacccttaagcgacatctgcgcggagcctttagcgatagactacgggttttttcgcactcgtagtgctagtccagttgcacccttatgcgaatttctgcgcggatagtcttcctaataaaatctgtatttttcaaactggtgtgcatgtccggctgcaccctt

SEQ ID NO: 4287 - DNA, 439 bp, Zea mays
cactgacatctaggaaaatggtttttatggatggcccacgaaataataaagaaaagcgataaagatactcatgacgctagggaagcaacaaaagcagctgaaaaagctgcagaactcgaaaggcggataggtataacttaatagcttttaactttattggttatttttgtgacttcgaactgatttacgttttctaccgcagctgaactatcttctccgccagagcccttcgaatcattggccgacccagaggcaaaggaatcaacagaaattattaacatggctgaaactattgtagacgaagtcgttacccaactgctgaccgaagctgcagacaaagttttgaaagaagaatagctattggaaaaacatcgctagaatattaatgtaacatttgttggactatgcttgtaatacttggggctcatgggtgttgaat

SEQ ID NO: 4288 - DNA, 466 bp, Zea mays
  unsure (1)..(466): unsure at all n locations
taagcaccgcagctgcagctgctatcgcatcgcagtgagcttgtatttttctgctngtgcgatcatacgggattatttttagatctgtgacattgataggaaattctagggctcgtttgtttcctttgaattgaattctattataataataataactgggaaataaattaattaagttaatatatttgtatatgtaacatatttatatattattctaaattatatgtatgttatagactagccaattatgtgtgctttgctacgattattatctatcatataaataagtatcgagatgtttatttaaatatgattattggttatttctaagtactaagatacgtgtattctggtggttagctcttaatttctggagtttgttgttatccaacttagtgtagaaaagtcaaaccaattataaattggaatagatttatgctaacttaataattggtttgtcattatg

SEQ ID NO: 4289 - DNA, 474 bp, Zea mays
  unsure (1)..(474): unsure at all n locations
taattgagacagagatgcanacttccattaatgaaccttgtatttttaatgatatattaagtagatcatgcttcctctagttcttgtcataacccctcgcaaggatgccctaacaaggactacgcttctgttcgggaaactctatggataacctcagcccttcccatatacatgtgggtctcagagatgggttactcctagaccactctccaccatcttaacttttgagcttctagctaaaccaccatgggtctcgtaccctctaatacacgaggcaaccacacaataaacatggttggtgtggtctcttttatgtgcatataacaagggtatcaaaacgacaaaacgttgagacgctcatgggtagagttttgacttttatacgttttaaacagtttaaatgtagtttaaaacactatatgtaaatttcaataacataccaatatgcgtgtatcaacagagcgtgtcactcaa

SEQ ID NO: 4290 - DNA, 450 bp, Zea mays
  unsure (1)..(450): unsure at all n locations
agctatagatcgctccctccgagatttgctctacttatatgcatctgcatctaccaatgctcctttcgaaggtaaagtaattgtcttaggaggtgatccaaaacaaatcttgcctgttatagaaggtggagatcgtgcacaaattgttaatgctgcaataacaaactcaccactttggtcatcaattgttgttcttcacctcacaaaaaatatgaggctagcttcagcagaattaacaaataaggaaagaactcatattgctgaattcagcaaatggatactagacattggtgatggtaacataccagctacagcgaaaccaggagaatctgaacctgcttggataaaaataccatcagaattcttattaatgccagaacacgacaacatatcagcaatcattggaagcatttatacanatattacagagaatttaatgatcctatctac

SEQ ID NO: 4291 - DNA, 323 bp, Zea mays
agcttctaaagggagaacacgtgataggtttgacttacgtgcatttcgaagaagatagaccttgtgcagcttgtcaagcaagtaaacaagtgggaggaacgcatcacagcaagaatgtgatgaccacttcaagacccctggagctgctgcatatggacctcttcggacccggcgcctatctgaacataagagggaggaagtatgtgctaagtattggtgaagacttttcccgcttcacttgggtggtctttttgcaggataagtctgaaacccaagggacccttcagcgctttctcaagagaagctcaaatgagtttgagctc

SEQ ID NO: 4292 - DNA, 454 bp, Zea mays
  unsure (1)..(454): unsure at all n locations
ggtcaatcatatttnggtacccatcgcttgatgggtccatcatggttagtcaacaaagatctatgaacccaaaagtcctttgtgttagcactaggtaaactcattacctttctagcacaagttgcaattttgggttgcctacttacatgagaatcaattgacaagttaggagtgggataatcaccaatgggacaatccttgcattgatggcccttctttcggcatgtgtaacataggcgtttttcagttttgaaactttcttctttccttgtttgttgcttgctacattgttagtaaaaactttctttctaaccctatgccttcttgtttaaatggtgacaagatctaagtaagtgtccttcttagacatttaagacaagtctatcatcttgtaataatcaagccattttaatgtaggacatgacctaataagtgccctattcaagcattacta

SEQ ID NO: 4293 - DNA, 444 bp, Zea mays
  unsure (1)..(444): unsure at all n locations
tagcttgaccaaagaatgtcaatacacctttctcatcggaagnggcggctgtttgggtcgaggggactgagttacaccgtcaattcgaacgcggagttaccctatacggaaatgacaatgaatattattcgataaaacctcaccatgggtgctatgatccattggcttatcctctcttcttcccaagaggggagctcggttggcattcaggcatacccaaggtcagtgtcaacactgctagaattgatggacgacaatccacagattccgacaacctaggttagttgcccatgttcaataccttttactaaggtgttgctttggccataatgttctttaatgtcttctctaaaattatatttttattgtataataagatttgaatggccaacttctatgttatgatgcgtgagaactactgctacaaaatccaggtgcgtcatg

SEQ ID NO: 4294 - DNA, 443 bp, Zea mays
  unsure (1)..(443): unsure at all n locations
ngctatctacggttctatgtgcaaaacacgaacttttttatcttgcttgaaatttatgtctagagaatgcactctaagtgtgtcaaacatatgcaatgccaatgctcatgatgccacgctcaagctctattacagtaacaccaggggtgctactcgcaaatggcaaaaatttcacagctgtcatgaaaacgcccctcgatgagataaagggcaagtgggccgatttgttacctgaacgggtctgggcactaaacaccactgagtgcanggcgactgggatcaaacctttccgtcttctatatggatcggaagccatgaacccgcaagaaataaaacatgggtcctcacggacagtctcgtcacttgacccgacgtggacgaacccacttcgaaggatctcttccatggagaccgagtcttcgccctacagcgtctaaataata

SEQ ID NO: 4295 - DNA, 446 bp, Zea mays
  unsure (1)..(446): unsure at all n locations
agcttcataccatctcttgctcctacatatcttgttaagcacattttggtacccatcgcttgatgggtccgtcaaggttagtaagcaaagatctaggaacccaagagtcctttgtgttagcacttggtaaacttattacctttctaacacaagttgcaattttgggttgcctagatatatatgaatcaaatgacaagctatgagtggaggagttaccaatgggacaatcattgcattgatgtcccttttcccggcatatgtagcataggcgttttccaagttttgaagatttcttctttccttgtttgttgcttgctacatggttagtaaaaactttcttttctaacccaatgcncttntgttttaaatggggacaagatttaataaagtgttccttctttgacatttaaaacagaggttatcatccctgctaataatcaagtcat

SEQ ID NO: 4296 - DNA, 404 bp, Zea mays
gcctttcgcatgctagggactggatatgattggacctttcagaaagctcaaggaggatacactcatgtattggtagcaatcgacaaattcactaaatggatagagttcaagcccatcgcttctttaacctcagctaaggccgtggaattcatacaagacataatatttagattcgggataccaaacaacatcataactgacctaggatccaacttcacaagttcagagttcttcgacttctgcgagcaaaaaagcattcagatcaagtatgcatctgtagcacatccaagagccaacgggcaggttgagcgagccaacgggatgatactagaggcactcatgaaaaaggtcttcgataagaatgaaaaatctgcacgaaagtggataagggagttgccctatgt

SEQ ID NO: 4297 - DNA, 408 bp, Zea mays
  unsure (1)..(408): unsure at all n locations
taaggatactatncaactaaagtaagatgaagtttattttatgcctaggtatgaaaacttcctctactttaatcgtattaatattctatccttactgggaagtaccataatatagattaatttcattgcaatataaaatgttcaatagtgcatattacgttgacatcaaccatatatgtgcactaatttaacataatttaatctacccttttgggttctaagaatgatgattcatttgccatcctcatataaggatcatcatttgtgaaaccctcctttgagtttctaatgctctcttttctaagcgtttcaataaagttcttccaagcgctttcaagatggatgcaaaatctatggatataagagtcttggctgtttcaatcattgagtattaattgatccaatcaa

SEQ ID NO: 4298 - DNA, 262 bp, Zea mays
ctaacccacacgcacaatgcccatctgacctggcattatgacatacgaactgagtagctaggcctgcagtttaggacccctctacgaaagaaagggggccggtagcccaggagccggctctaaacaacgggaacccattccatggggcggcccggagctgggtggccgcttagcccgcttctgtacccaaaggctatacactccaccactctgtgacggaaaccctagtatgtggagctatagtccttggggttcgacaatc

SEQ ID NO: 4299 - DNA, 82 bp, Zea mays
  unsure (1)..(82): unsure at all n locations
attacctggcaggggcaccggactgtccggtgcgccatctagcaaacaagctcccaacggccacttttggtggntanaatat

SEQ ID NO: 4300 - DNA, 399 bp, Zea mays
  unsure (1)..(399): unsure at all n locations
ggtgaaggttcttcatccccacatgtgctaagcggttatgccacagccagcccatactagtcttagctattaagcatgcatctagaccggcctcttcttttgcataatcaactaaataaagtttgccgcctaatacacccttaaaagctagtgaaccatcacttcttctaaagacagacacatctacatttgtcaatagacagttataccccatgttgcataattgactaacagatagcatattattaccaagagactctactaaaaacacattagatatagagtgctcattagaaattgcaattttacctagccctnttaccttgccttgattcccatcaccgaatataattgaatcttgggaatccttattcttgacgtaagaggtgaacatcttct

SEQ ID NO: 4301 - DNA, 327 bp, Zea mays
  unsure (1)..(327): unsure at all n locations
tagcaatgactgatgtgatgacttcacagctacccggatgcttatatagtgccacaggtaggaaggtaaatcgtcaagtctttcgtaccgaacaaacagtagctccgtcccactgaacggtgggccacaaaacctgacaaggagaatcgatacgacactcataactgctgtatggnggggccacctcgcgctcggattattctaatcgatgctccgcaacgagctcagggaaggtgtttttcggatcttccgcatactcgaacctaggagacttttttacggattaatgcttgttacgtaatacgatctatcctcgcgaatgggcta

SEQ ID NO: 4302 - DNA, 401 bp, Zea mays
atgccatagccagcccatgttagtcttagcaattaagcatgggtcgagttcatctttatcaaaagctactaagtatagctgaccctctaacagctctcttaaagtgctatatgaatacatcacatctttctatagaccgtaacacctatatccgtaaaaagacagctgtaccccattttacataattgtgaaactgaaagcaagttgtaatctaaagaatctacaagaaaaacattggaaatggagaggtcaggaaatatagcaattatacccaatcctttgaccaaaccttgatttccttccccaatgtgatagctcgttggggatcttggctttactcataagaggagaacattctctttctcccctgtcatgtggcttgcgcacccgctattgatgat

SEQ ID NO: 4303 - DNA, 67 bp, Zea mays
accctgaaccgcacaaaaacaagcttacagaaaagagcaagcctcctagttttatgaagggagtcaa

SEQ ID NO: 4304 - DNA, 409 bp, Zea mays
atgaatcgccgaagtgtaagcatgaaagcttctttgtgacagcagcagatgaaaccgacttaaagatgaaaaggctatttagacctcgacagattactatagaattattatcaagcgtaaagggcattaatgtaattttgcacgagctgcgtcccgtgcctataaataggtgaacagtagccccgtactgtggacgctgacttggcattcgctttttgtgtcacgcttgtactatcatctccttccaattgaaggtacacttgtaattcaatgatatctctgtttatgcctgataataatatataattgttcatgatgtctttcatattctttatatttcatccttcgccattatttaatgagttcatgaaggtatgtccctcataacctttcgccataaaccattata

SEQ ID NO: 4305 - DNA, 358 bp, Zea mays
  unsure (1)..(358): unsure at all n locations
tttcattatatcttccatgtggtgtggagaccaaccatatgcaggaccacgaactatggcccatcgcttatgtagtactccaaatggtcgtcaaatgtcttttctaacggactcttgaatagtggcaaagtgttgtgtcctcacatcatacggatgacggattgtctngacaaacgctggccagtccggataaataccatctgctaggtaatatcccatgttgtacgtgtgtccattgacggagaaagtgacttggtggactatcaccggtagatgcgaatcatacaggtttgaacgctgaagaacattgatgtcgttacagctaccgggcatgccgaagtatgcatgccaaatccat

SEQ ID NO: 4306 - DNA, 426 bp, Zea mays
  unsure (1)..(426): unsure at all n locations
agcttgagcagtaactggctacgnctgatacccttgtaagctggatatcaacatatccttcagcttctgccatgaggtgattgtccctggccgaagagaggagtaccaggtttgagcgacactcttgacggccatgacaaaagactttgccatgactgcagtattgccaccatatgaagatatggttgcttcatagctcatcaagaattgcttcgggtctgtatgaccgtcgtacatggggagctagggtggcttgtaagactggggccatggtgtagcctgcaattctgttgatagaggagaagcatcatcaaaagcaaaagttccatgatggagatcttcataccagtcgtcctcattgtaaagccttcctgatgaagctctctgcgcggaggccttcggttctagtcatcttgagcaagatga

SEQ ID NO: 4307 - DNA, 462 bp, Zea mays
tacccatgacgaggcatgtggccgtttaatgtcctttttattttcctacgtagggacggaccttaatcgagtcagatggagacactacactgagacttccttctcgtgcaagtcacccgtccgatctcagctttattatttaaaatgcaaagtttggtacctgacagacgtacgtcttttccaatgatgaacccatcacgaccatgatggattcaccatcaagttttatttttgaaaacttcccatcccatctgaagcatcactttttgtttgaaaacaatacattttgttgttctaaagcacgactaagcatcataaaaatccttctcataaaagggtatcacggaagggtaatcaatttttcaggaaggaaatgcatcaactggttagcacacaactcctatcacctaatgcatcatataaggtgatacatattttaggacacacggaaagggataatgc

SEQ ID NO: 4308 - DNA, 402 bp, Zea mays
  unsure (1)..(402): unsure at all n locations
tcttcacctaanatgattatttngaatgttcaaggcaaaggtatggaacaaattgcttcaattggtagttgatcaatagtagttccttccaagtggcattctttcaattggtaataatatattctatggaaaggaatgtcaatatgaaggttaaattccttttggcttaaatttgtaaattaatgcatattgtgaattcactgctccatgtgcattaacttaaaaggaatttaatttatgcctttacgcctcataattgatgatttgtttgccattcatatatagatatcatcattcattaaatacttccttgtactactaatacctcttttaaagtgtttatcgactagtctaaaatgaaagagatacaaaaaggaagtctccaaatgataaagaaaatct

SEQ ID NO: 4309 - DNA, 307 bp, Zea mays
atactgaagactgcgcagaagccatacagccacaccgaaatcaactctgcagaattcccgaaaaggctgcctcacattagctcgggaaatacctttgaattgagctatacctcgctaaggctggtagttaccacataaactaccccctatgtcaaaatgtaaggcagcttatgataatccaaaacagaaccccttttgatcaggtgtgagctaaccaatattgagagtgaactctaccccattgctctcgcgactgcttcgcgggatagaaaagcggcggattatccgccccaaatgtgctctactc

SEQ ID NO: 4310 - DNA, 454 bp, Zea mays
  unsure (1)..(454): unsure at all n locations
agcttctaaagggggagcatattttgggactaacatttgttcattttgagaaagacaggatctgtagcgcatgccaagctggaaagcaagttgggtcacatcatccacacaagaacatcatgacgagtgataggccactggagctcctacacatggacttatttggcccgattgcttacataagcatcggcgggagtaagtactgtctagtaattgtggatgattattctcgcttcacttgggtgttctttttgcaggacaaatctcatacccaagaaaccttatagggattcttgagacgggctcaaaatgagttcggcttaaggatcaagaaaattagaagtgacaatgggacggagttcaagaactctcaaattgaaggccttcttgaggaggagggcatcaagcatgagttctcttctccatacaccccacaacanaatggagtagtgga

SEQ ID NO: 4311 - DNA, 352 bp, Zea mays
cttcccttagctttgcgtatggcgaatgtcgcagcgcattgagtgtttgcttgcttcctcctagaagagtgagcgatactcaggggctgatccacagctaagaatcaagacctattctgatccgtggaagaaactcaagttttctataaacaaggcaaggggacttctccctgtgcgtactctatttaatcccaaacaccacatgtaataaggttattcttggatatatatgcataatctgatgggtacctattctgatacacctaaccttttcaactgtattcctcgatcaaacttgagtattatactttaccttcgcagctatgctatagctacaacttaactttatgta

SEQ ID NO: 4312 - DNA, 418 bp, Zea mays
tctttccaaaaagatagaccttgagcatcttggcaagcagggaaacaggtgggaagctctcatcatgcccaaaatgtgatgacaacatcaagacccctggagttacttcatattgacctcgtcggacctgtcctctatttaagtataggaagaagtaagtatgggcttgttataattgatgaattttcccgcttcacttgggtattctttttgcaagataaatctgaaacccaagggacccttaagcgcttcctaaggaaagctcaaaatgagtttgagctcaaggtgaaaaagataaggagcgacaacgggtccgagttcaagaaccttcaagtggaggagtaccttgaggaggaaggaatcaagcacgagttctccacttcttacacaccacagcaaaatggtgtggtagagagga

SEQ ID NO: 4313 - DNA, 401 bp, Zea mays
attagttgatttcactaatgagaatgtcgatgatgatgcttgtttaatccctaagcctaatatgggctggctctggcaccgtcgtctagcacatgttggaatgaagaatctctataagcttataaagggagaacatgtgttaggactaaccgatgtctgttttgagaacgacagaccttgtgcagcgtgccaagcaggaaaacatgtgggaactacttatccaagcaagaacgtgatgacaacgtcaagaacactagaactcctccatatggatctctttgggcatgtttgctatcctatcatcaagggaagtaagtatggccttgcacttgctgtgaattttaccacttaactgggatcctttttgatgattattagaaacccaaagtccctaaagcgct

SEQ ID NO: 4314 - DNA, 394 bp, Zea mays
  unsure (1)..(394): unsure at all n locations
aatgaacatgctgatttgctaactaaatcagcaacacaagggctgcccttaccttcggatgtgttcttcgaaacaataaaagcaccttcggtggaacttcttgaaagagcagtccttaacatatctcctgtntttagcgaagattggagaaccgagatcatctcttaccttcagggtaaattcctttcagatgacgaagcttataacaagaggatagaggcaagagctcgtccatatgtcatgatagaaggggacgtgacaaacatggagttcgtcttccgtgctcaatgttatccagagccgaaggtatgagttaatgaaagaaatcatgcaggcctgtgtggatctacattggatctaggccgttactcgaaaaagtttccgcaagggttta

SEQ ID NO: 4315 - DNA, 449 bp, Zea mays
  unsure (1)..(449): unsure at all n locations
agcttgacaaagcccgctggaattaatcttcgtagaaacccgacctcgctgcaacatgacacccgaaggtccaacacaacaagcaatgagtgaattcagaattattgcagagcatatcagcacaagggacctggttcaagagtttttagcattcaaagtttttcccagtttgaaagaatgggaaatgccgaagctacagggggaaaagaaagaaggtgaactcgtacgtttaccttactatttcaagtttaaaaagttctttaaagcaccttgccaagagtggctagatacgattgaagcaatgtgcaatgaaatacttggcaattactctaaaaaagaagatcaattgatgactgcggccttcggcacccgtccgaagcgaaggctaaaccgagtgttggacgctctnggagttgaatacccagactatgaaaaattanacaaaaatg

SEQ ID NO: 4316 - DNA, 471 bp, Zea mays
tctaaagggagagcacactttatgattaacaaatgtttattttgagaaagacaggatttgtagcgcatgccacgcggggaagcaagttggagtccatcatccacacaagaacatcatgacgaccgacaggccgcttgagctactccacatggatctattccgcccgattgcttacataagcatcggcgggagtaaatattgtcttgtaatagtggatgattattctcgcttcacttgggtattctttttgcaggaaaaatctcaaacccaagagactttaaagggattcttgagacgagctcaaaatgagttcggcttaaggatcaagaatataagaagcgacaatgggacggagttcaagaactctcatatagaaggcttccttgatgaggagggcatctagcatgagttctcttctccctacactccacaacataatggtgtagtggagaggaagaatctaactctatt

SEQ ID NO: 4317 - DNA, 397 bp, Zea mays
agcttctaaagggagaacacgtgatttgtttaaccaatgttcaattcgaaaaagatagaccttgtgcagcttgtcaagcagggaaacaggtaggaggctctcatcacaccaaaaatgtgatgacaacatcaagacccctggagctgctacatatggacctcttcgaacccgtcgcctatctgagcataggaggaagtaagtatggtctaattattgttgatgacttttcccgcttcacttgggtattctttttgcaggataaaactgagacccaagggaccctcaagcgcttcctaaggagagctcaaaatgagtttgagctcaaggtgaagaagataaggagcgacaacgggtccaagttcaagaaccttcaagtggaggagttccttgaggagga

SEQ ID NO: 4318 - DNA, 455 bp, Zea mays
taagttgtctccgagactgaactggagcaaatgttatttgtactctatcgaagagtattggtttcccgaagcttgagaccgatatcagccgctaccgacgacatcatatcgtcggtagtttgttctattctaatttcaagataaaaactcttcttcgacttttcattgtttctaacaacgaaggtgttctctaacgaaggttgcctctgtacagagtatgctattaagtaaagctttgaggatgcaacaggaccttgaagataaaaaacatgaagttataattgaaggtttagagagcaaaataaaagatcaagtagctgctcttgaaaagaaagatttcgaacttcagacaatagagggtttactggcagaagttgtagccaaaattgcaagaatgaataaggaacttatctcatagtcagaaatcttcgaacaagaaaagcagaaattcatac

SEQ ID NO: 4319 - DNA, 439 bp, Zea mays
agcttaccacatttgaagcatgagcgctttccctttgtcttggacttgcttggctgccccttgcgaccttttagcgccgtcttgaatcttttgatgatgagagccatctctttatcattaagtccggccgcctcaatttgtgccaccttgctaagtagcgtctccttgcttcttgttgccttgaaagcaagaggttgaggctcattgattggaccattcaatgtgtcgtccacgtatcttgcttccttgatcatcattcgcccgctcacgaactttccaagtatctcctcgggcgtcatcttggtgtacctaagattctcacgaatatttgttacaagatgaggatcaaggacagtaaaagaccttacattaggcggacgacgtcgtggtccgttcatcgcgtgcttccataacttatccttgttgacaagggtcttga

SEQ ID NO: 4320 - DNA, 448 bp, Zea mays
  unsure (1)..(448): unsure at all n locations
ttctncagcgttnttgagcccctcagcatccgaagatatctatatgtgccactcggagttatgaagctagtcttcggctcatcttccttcttcatccagatttggtgatagtctgagtaacagtctagcagactcatgagctcggaagaagctgttgcatctactaaagagtctatccttggcaatggaaactccgccttcggacacgccttgttgaggtctgtaaaatcgatacacattcgccatttgccattggcctttnttaccataacagtattagccagccattctgggtactttacttctctgatgactcctgcactgaggagtcttttaacttcgttacgagcaccttcggccttatcatctgagcatttccgaagcttctgctttctgctctgaaggatggatcaacattgagcgagtgttaataacactcctattactc

SEQ ID NO: 4321 - DNA, 451 bp, Zea mays
  unsure (1)..(451): unsure at all n locations
agctngtggcgccctcgggcgtttttgtttttattctaagtaccaggtctcccacctggaagtctcgggaccggacccttcgggcgtggtagcgtcgtaaagactgctgataccacgccgactgtagtaaggccacgtcccgagcctcttccagctggtccaatgaatcttctcggctggtctggttgcttcggtcgtcatacgcctttgtcctcggggaaccgtattctaagtctgtgggtaagatagcctcggccccatagactagaaagaacggcgagaaacccgtggctcggcttggcgtcgtcctcagactccagaccactgagggtagctctttcatccaccgcttgccaagcatgttgaggtcgttgtaaatccctcggttaagtccctgtagaatcataccattggcacgctccacttgcccattcgtcatggtgtgagctac

SEQ ID NO: 4322 - DNA, 345 bp, Zea mays
tcacgggccactggcggggctagcgcaagcactgtctttacttgagggtggctggagtgtgctggccatggtggtcgaagctctggcggcaatggcgggcggaattaatctcgccggagctaaaggaaagtggtcggccggtgaatatgagtgcggtgcgaaatgagctgcgcccggtgaggctttataagcgccggcgagcacggtcgaaggccggggctctgacatgcgctcggggcgtgcgcggcgaacgccagtgcgcgctctggcgcttggcacagcgttgagcacgaggcagcgcagagagaggtcaagttcaaacgtggattggcccaaatctttgag

SEQ ID NO: 4323 - DNA, 315 bp, Zea mays
gaacaataccctcttgagcaccatactgtattgattgtgccctatgtctgggtattggaccatacaatgccactcaaaatataaaaatgtcactttgcatagattagggtcttcatcaaactttaagttcacaacatactctataaattgtcggaaaggttgtgggcaaaagcaacacaaagattatggagaagttgccatctttttcttgcagacaaagaaacctttattctccccctaaaatcattatgctgaaaatttgagtaaggggggatcattatttaagaaaatttggaggttgtaacaaaagtcacc

SEQ ID NO: 4324 - DNA, 437 bp, Zea mays
  unsure (1)..(437): unsure at all n locations
gtgaggaagaaccgaatgactcgaagtatctttatcattatcatcctcaactttattattntgctggcttaggagaacttcctcattaaagttgatgaggatggaattacaaccacactatcatcatcatcatcatcatattttgggtgtatttcaccaattgccatagttttcatagcattcctcaaaagagctccaccgagatcatcaagattatcattttcatcatgcgatccatttgtttcatcaaactcaacatcatatgcttcttcaataataccatgagtcttgttgataacactataatatttggtattcgtgaatacccaagtagaaaccctcacacatttttctcaatatagagagcgacttccttttcaaatatagcattacaccgatactcaaatatacatgttgactttaccaaaacaatcttt

SEQ ID NO: 4325 - DNA, 414 bp, Zea mays
  unsure (1)..(414): unsure at all n locations
agcttggcgaccctctctgcgtcacggtgtgtagatnttgttgcggaagccgtatacagcggagaggctgtatgtcagggtggagttgctggaggaggagtccaccatgtccatggcgtggagggttccattcttcacccaaacgtctaagatgcccggctcgggcgcccctactacgaggatcagatacccgaataccagcaccaaaaaggataccataccagcgaaataaaggcagccagtacagtcgatccctgcttcttctggcatggcagagtcggacacaagatcggaggatggctggctctctgatgatacgatcgatgctaaccttccttccatatctctctgtagtcttgatacatatataaggggggtgatgcttcttctaactaaacgttgccaataaatatg

SEQ ID NO: 4326 - DNA, 440 bp, Zea mays
  unsure (1)..(440): unsure at all n locations
tgtcactattgtcaatgtctgactttccactctgatttttttattgntgatgaaagcactgctactattttagttgaaactgaatacacgaaaagtgtaagggctatttctccctctctctcttcttttttctttctctttccttttttttaccttcttcttctcttctctctcatctacacttctccttcctctcctctctctctcttcttctcttttttcatctttccttcttctcctatcaacctctaatccactctctcttttaccctctcttctttcatatctcctctcccatctcctccttttctcattatttctcttctctctctcttctcttctattctactttcctctactttcttcttctctattcctcttctctgcttcttcgttccttcattttttttctctctcttttctccttttttcttcttttc

SEQ ID NO: 4327 - DNA, 432 bp, Zea mays
gcttatgcaacatcgtttgagatgggtatgatatatccatctaagacctgaagaggcactattgcatatcaaaataattaggtgtcccgagaatgtgaagagaggtaaaggtcgaccaaccttgacgtggacagaggttgtgaagagggacctgaaggagtggaatattgataaagagctcgtcgtggataggaaggggtggaagtgtgcaattcacgtgccataactctgatttgtagttccgcctttcctccttaatcgattgaccttttcttgcgcccctttagatcttgctggttcttgcgggttttatctctttttatgtgattccccgtttcgtcgttttacggttctcctttgcctttgtctcccttttcttttctttggaggaagagctctgatgttttcatatgggggttgatctctatccta

SEQ ID NO: 4328 - DNA, 389 bp, Zea mays
  unsure (1)..(389): unsure at all n locations
ttttgcttcagcttctgccttaaaccttctgctgcctggagctcaaagttctttttctcaaaagcatctgattgctcctttattttgttttccaaatttccaattataacttcatgctttttatcttcaagatcttgctgcatttgcaaggctttgctcaatagcatactctacataaacacaaccttcgtcagacatgnttttattagaagcaataaaagttaagggacaagtcattcaccttgaagttggagtaaaataaactaccaacgatatgttgtcgtcgatagcggctgatgtctgtttctagcttcgggaatccaatactcttggacagagtactgataactttgcccctgttggtcccgaatcactctaattctcgtatc

SEQ ID NO: 4329 - DNA, 364 bp, Zea mays
cacgcatgcatgcttgcgaagaaactcattccaacatgtgctagtctgtgacgccagagctagcccatgttagccttaacaattaagcaagtggcgagtacatctctatcataatctactaagtatagctgaccctctaacactcccttaaatgctactgaatcatcaccttcttctaaagacagttacacctatatccgtaacaagacagttgtaacccattttacataattgcgaaactgaaagcaagttgtaatctaaagaatctacaagaaacacatttgaaatggaatggtcaggtgatatagcaatattacccaatcctttgaccaaaccttgatttccatccccgaatgtgaaagct

SEQ ID NO: 4330 - DNA, 350 bp, Zea mays
tacgctaaaagagaaatacgtgacagccagcattacccttgtctatataaagtatcagagcatataaactcaacatgagatccaaataaggcctatatcctcaccaatagatgtcatgaaataaatgggctaacatatgaggtccacccagcccatttacatgatggtgcaagatctgctctgctttgaccatgatgctgaaattagggcacaaaacaaccaattgacctctttagactgtgcgcctaaatcgtgaggttttttagcggacgagtttccatgctgactccaattctttgaggcgacatatacgcacctgggagaatgccaacggactgatggacaaacct

SEQ ID NO: 4331 - DNA, 446 bp, Zea mays
  unsure (1)..(446): unsure at all n locations
caccatattatcacggttatctttatattgttgagcatgacactttcccttcaattgaatcaagctcctttttagcctctcattttcttccttgagcttattgttttcttttgcataggaaacattacttattcctgaaaattctagctcaatggaagattggctttcttgaaagcaacatttgttagcacatgataatatagtttctatttgagtacatgtgcatatgtgaggttggtatgatatcaaattagttaacacaacctcatgagccatttctaacatgatatgtgaatccataaatttattatgagagcacacaagcatatcatgtttttcttgcaaagctagattttcaatatttagcctttctatcgtgttcttgaacatagcatntttattttctaattgagcaatatatgatgaattattaacagctttaattt

SEQ ID NO: 4332 - DNA, 482 bp, Zea mays
ctatagacactcaagcctgccaattcttatcaaagcagcagcatttaccagcacagtatctgcagagcatacccgtaacatggccatttgcatgctggggactggacatgattggacccttcaagaaagctcagggaggatacactcacgtgttgggcgccattgacaaattcaccaaatggatagaatacaaaccctttgcttttttaacttcagccaaggcagtggaattcatacaagatataatattcaggtttgggatactgaatagcatcataaccgacctgtgatccaatttcactaactctgaagtctttgatttctacgaacaacagagcattcagatcaaatatgcgtcattagcacacccaagagccaatggtcaggtggaaagggctaatgggatgatactagaagcactcacgaagaaaagtcttgacaagaaccaacagttcgcgggaatatggatcagagagttgtcg

SEQ ID NO: 4333 - DNA, 411 bp, Zea mays
agcttgtgaaggttcttcatccacacatgtgtttatttgtaatgccacaaccagcccatgctagtcttaacaattaagcatgcatctaaaccggccttctcttttgcaaaatcaactaaatagagattgccgtctagtacacccttaaaagctaatgaaccatcacttcttctatagacagacacatctacatttgtgaataaacaattatatcccatattacaaagttgactaacagacaacaagttatatccaagcgactcaactaaaaacacattggaaatggagtgctcggatgaaatagcaatcttttctaaccctttcaccttgccttgattcccgtcaccgaatatgatagagtcttgggaagttttgttcttgacgtaggaagagacaatctctttcccccgc

SEQ ID NO: 4334 - DNA, 309 bp, Zea mays
gggcatgatgacaataatctccgctattaacctccctttctcatcttctatatacgaaccctcttgcgggtctgaactacatcagagggttaactcctgcccaatatcctataaaaaatacacggggccactatttgccatcgccacccgcccttaacagttgatgaccaaactaaatcgagtttgctccggacaaaaataacaaaagttggggcaaagggggtcactctgcactacaactcttagccagggggggatctcgcctaacggccattgtcgctggtatctaaaagaaataacatgcctctg

SEQ ID NO: 4335 - DNA, 447 bp, Zea mays
agcttcatcaccatacctacctctcaactttacttaacataaccttttagtcccaagcaatttagggtaggctagagttaaaccctaacaagatgtcaccaaaaaggaaaagaaagagaaagggttggaaaaatcttttgagagcactaaaacgaaaaaggcctatataccgaaaagcacttcggaaaccggccgagccccctaagggcttggtcagttctaccccaatccatatggattgagggggattgaaggggtttcaatccctattaagtcaaaatctcttctgattcgtatcaatccccttcaattcatacggattgaaaataaccgaacaaacccttaaatgccacaagtttataatcataatgaatcatagtatcatacagtaattctcatcatgctttgtaattatggtaaacactagcaattagttgattataataa

SEQ ID NO: 4336 - DNA, 373 bp, Zea mays
  unsure (1)..(373): unsure at all n locations
ntatcaaatggacgtgaagagtgcctccctcaatggacctatcaaggaagaggtctatgttgagcaacctcccggctttgaatatagngagtatcctaaccatgtctataaactctctaaggcgctttatgggctcaagcaagccccaagagcatggtatgaatgcctaagagaatttcttatcactaatggcttcagagtcggaaaggccgatcctactctctttactgaaacaattgaaaatgatgtggttggatgccaaaattatgttgatgatatcatatttgggtctactaacaaatctatttgtgaagagcttagtaggagcatgatacacaaattcgaaatgtctatgatgggggagttgaagtat

SEQ ID NO: 4337 - DNA, 470 bp, Zea mays
ttaattatgtcaaagttccgtgtggatcatactcatgtttaacctttccatttcttgacatagtgtggtgtcaggggtccttactgtaagacaatgacaggaagctttgcgactcaatgcatctgccaccacattgacttttcctgggtgatagtggatttctaagtcatagtctttaatcagctcaagccatcttcgctggctcatgttcagttctgactgggtaaagatatatttcattttatgatctgtatataaatggcaagtatttcccagcaaataatgacgccatatcttaagggaatgaacaactgcagctagttccaaatcatgagttggatagtgctcctcatgccggcatagttgtcttgaagcataagctatgactcagccctcctgcataggacacattcgagtccactgcctgatgcgtcacaatacacatcaataagcttttctatattcggttg

SEQ ID NO: 4338 - DNA, 422 bp, Zea mays
tgaaaatacctggaaacattctgtttattataggcctccttcgaaggagtttctgtaaaaaatattccaagaggggaaaatgagcatgcagatctgctagctaagtcagcggcacaggggctcactctaccttcggaagtattctttgagacaataaaggcaccttcggttgaacttatggagagagcagtgcttgcaatatcacctgtacatagtgaagattggagggctgcaattatatctttcctccaaggaaactgtcttttggatgacgaagtttataataaaagaatggaagcaagaacaagaccatatgtgttggaggccttcatctttcgaaggtcttcaaaagtacgattaacaatgtttcccaagtataatatatgtacaggaaccttcggacttggaatgaagttgtacat

SEQ ID NO: 4339 - DNA, 362 bp, Zea mays
gttagatgtctgaagagaagaagatgtttgaggagaagaagattgtggactctgctctagctgggttttacgaggctatggaaaagacaaacacagaaaagattacaaatgaaatattagttgggttattctgaggattctgatgatagcgagaactttgatgtggaaagtgggaatgaagatgccaaagacagccctggcggccgagtcatactatcttcggaaagtcgtccatcaaacagagtcagattgatgctatgaagggaagatattttcgtgatatgtctattgtgagggcttggggaaacaaggccagccctgcacctgatgaggatgaagttgttgtttacaagagcttcatg

SEQ ID NO: 4340 - DNA, 447 bp, Zea mays
  unsure (1)..(447): unsure at all n locations
gatcttaagcaccgcagctgcagcttagcttgantaaatttttgctttcttacagngcaatagcaatgaatgctgtggtaacttcacacctacccgtctgtttatatagtgctgcaggtaagaaggtgaatcgtcaggatttttacaccaggaaaacagttgctcgcacccgctgcacggtgggccgcataaaccaaaatagtgaacctgcatggtgggaccgctacgcgctcgaaaactgtatcgtttctcgacaacgagctcagggaaggtgtttttcggaccttctgcttccttaagcctaatagacttcattcacggttcatgctcgttacgataaacgatctatcaccgtgtacgggctattattgggaccatgcttactctccgaatgtcatgcggaatggacacagctctcgctgcagttgctggaacgtattgcccaaa

SEQ ID NO: 4341 - DNA, 470 bp, Zea mays
aaaactcagcttgaaatgcacaggacttggaagataataaaatacgttgttataatcgacaagttaaagagcaaaataaaagagcaatcagctgctattgaaaagaaagacttcgagcttcagacaaccgaaggcttactggcggaagctgaagctaaaataacagaattaaatacgaaacttctctctcaattagaaaactttgatcaagaaaagtagaagcttaatgcataacttgaggccgaagtccaaaaaagttcagatttgaaaaaatcattgacaagccttcagaataaatgtctggagttcagcaatcgatgcgttcaacggttgaagcaggtgttctatcttgttggagccagcagcgcgaaatttactccttcgactgaagacctgccaggtgccttcatacatattgaaggtgaaattgatgacctagacatagttatagctggacatggtgaactatg

SEQ ID NO: 4342 - DNA, 381 bp, Zea mays
ctcgtcccggatcttaagtcaccgcggctgcagcttgttgcccccacacttttttcttatgggtgacgtgcaccaacgaaattgtgcaaaaccaccccaaacatgagttttggacctaaaggagtggaatgggcatgttcgttgtgaaaaacgaagaaatggttccggtggcaaaaactcctgcttgtatgcaccccgacactcgttatcggaatgggtaacgtgcggcaaccaatatgcgccaaaccaccccaaacatgagttttggacctaaagtagtggattgggcatgtcattgagaaaaacgaagaaatggttcctgtggcaaaaactcgtgctttgatgctccccaacacccgtttttggaattgcgtgacgtcc

SEQ ID NO: 4343 - DNA, 382 bp, Zea mays
  unsure (1)..(382): unsure at all n locations
tatcatgtctactttcatatggatccggaattatatttatatctgttccgaggccgccgntatcattgttttcttaccgagacatttcctgccttttctgcccatggtgctgcgtcaccctattttggcccaatgggtcgtgtatcaagataggtccattaaggacgcattctaaggttgcaacacgaccccaatacccttgtggtcgtcctcccatgtttataaaccctctagccgccaccaagaacagcgaggtttgtttagatcaagtttagctctcgctacttgcttgcaagcgcgcgtgctagttcagccgcccgtcttcttgtcttcggaaccctaccatattgtagtttgatctttaaacctacatttaagatct

SEQ ID NO: 4344 - DNA, 454 bp, Zea mays
agcttcggcctctctgcttatccactctataacaccttcaggggcacctcgtatgaagttatcttcgtttgaataggcgttgtagcatcccaaaaattcaaatcttgaaattttctcaaactcgctctaaattcaaaatgaatttcaaatttcatttcaaaatgtttgtttgtgagttgatatcagcaaataaaatatagtcgtctatattctctccaaaatcctcctcaaaatatcctacaaatatttccccagtgaaccccctcaaattcttcccagaaatactacccaaatatttccctagtgatccccttcaagttctttccagaaatattgcctagatattccaccgatatatctccaagtattttcctcctgagagataccttcagaatcatttttcaagtccctacaaatatgttcttcataactttcctcatgcccatacgtatac

SEQ ID NO: 4345 - DNA, 442 bp, Zea mays
tcggaaaaccaacactcttctatagagtgctgataatcttctccctattatggactcgaatgcatcctaaggcttcttcattgattcctccaaagagcatggctctctggtggtagccacaggatatagcatactcctgcagctcctccttctcggccttggataattcttgaccaactacattctgaaagctgaaaccttgttcttccgaaccgtcttcggtaatttctttccctttatcaggcactgcggccaggacttattctgtaaccgcagcagtctcctgtgcagccatatccaagagcactttatcaatagcagataacgtactccccagattggtaagctcgaccgccgcagcttcggcagctggtgtcatatttgatgatgaggccggcggtggcgtttccttaatggcttgataacagtaacattctttgct

SEQ ID NO: 4346 - DNA, 376 bp, Zea mays
gtgctaagcggcgaagccacagccaggccatgctattcttatcaattaagcatgcatctagaccggcctcttcttttgcaaaatcaactaagtaaagcttgccgtctaatacacccttaaaagctagtgaaccatcacttcttctaaagacagacacatctacatttgtaaacaaacagttatatcccatattgcataattgactaacagatagcaaattatatccaagagactctactaaaacacattagagatagagtgctcatttgagattgcaattttacctaacccttttaccttgccttgattcccatcaccgaatattattgaatcttgggaatctttattcttgacgtaggaagtgaacatcttcttc

SEQ ID NO: 4347 - DNA, 256 bp, Zea mays
ctttgttccttgtcaccacaccatgctcatcttgcttgttgcggaagacccatttggttcctacaacattttggttaggacgtggaactaaatgccatacctcatttctagtgaagttggtgagctcctcttgcattgccaccacccaatccgaatcttgtagtgcttcctctaccctgtgtggctcaatagaggacacaaacgagtaatgttcacaacaatgtgtaatgcgagatctagtagttactcccttatg

SEQ ID NO: 4348 - DNA, 447 bp, Zea mays
  unsure (1)..(447): unsure at all n locations
agcttatgaagattcttcatcccaacgtgtgctagncggcgatgccagagccaacccatgttagtcttagcaattaagcaagtgtcgagttcagctctattaaaatcaactaagtatagctgaccctctaacactcccttaaatgctactgaatcatcacttcttctaaagaaagtaacacctaaatctgtaaaaagacaagtatagcccattttgcataattgagaaacagaaagcaaattgtaatgtaaagaatctacaagaaaaacattggaaatagaatggtcaggagatatagcaattttaccaattcctttgaccaaaccttgaattccatccccgaatgtgatagctctctagggatcatggttattctcgtaagaggagaacatccttttctccccagcatgtggtttgtgcacccgtatcaatgatccaacttgagcc

SEQ ID NO: 4349 - DNA, 359 bp, Zea mays
tgtgaagattcttcatcccaacgtgggctagtcggcattgccagagccaacccatgttagtcttagcgattaagcaagtgtcgagttcagctctattaaaatcaactaagtatagctgaccctctaacactcccttaaatgctactgaatcatcacttcttctaagacaataacacctatatccgcataaagacaagttgagcccattttgcataattgagaaaaagaaagcaagctgtaatctaaagaatctacaagataacatcggaaatagaaaggtcaggtgatatagcaattttaccaagtcctttgacccaacttgatttccatccccgaatgtgatagctctctggggatca

SEQ ID NO: 4350 - DNA, 449 bp, Zea mays
  unsure (1)..(449): unsure at all n locations
agcttattgtctttctccggggactccattttcttttaatgagactactacatataatagacttgaaaacagatattagtctaaaaaacttagattatagagtaacccccctataagtgtgcatacaagttttgaatacttgtaggagacatgcactttgatttgatatcaagaggggcaaattgtctataatctgagctttggcacatataagttaaatgataccaattgaatatcaattgaagcacaattgaagtattataccacttgaagagtatatatggaaataccaattgatgtatcattttcttaggagtgttaaatgagctatgcgtcgcgcttaactaaacattntaagccatgtaggcttgctcaagagtatgaagtgaaagtgagcaattctaccatatgattgacctagtgaatatcccaaaaaatgtaacccaaag

SEQ ID NO: 4351 - DNA, 429 bp, Zea mays
  unsure (1)..(429): unsure at all n locations
acggacctataaaactcagcttcacacanaccaataaaaagatctaagttagggttcattagtattgagcataagaaaccgaagataaccttggtctggtgcaccggactgtccggtgcaccaccggacagtgtccgatgcaccagggaccgtacaggctgaactcttcaccttcgggtttctagagagccgctccgctataattcaccgaactgtccggtgggtcaccggactgttcggtgtgccagcggagcaatggctaggaagcgcaacgatcgactccaacggtcgcctgcaacgtgaacagtgcatggacagttcgcgtagagttagagcagcgccagaaggcgcaccggacagtgaacagtgcttgtccggtgtggcaccggactgtccggtgccccaagatgtcagagctccaacggtcaa

SEQ ID NO: 4352 - DNA, 450 bp, Zea mays
agcctggatatttcttatcagaacactatggatattgtcgtgataaatgataaattcttcttcacgaagcatgaacagaagggaaggtgttttttcgtcgaagactcaaaaatggtacgtgtttaaagtttcatgcatcgtaaagaattgaatcataaaacaagtatattacatacaggattacagaatattacacaaatcatatatcaaatgttttttgcaatagcacttagtcttccctaagtactatctctgcagcttcgttcagcagtcgatcgacaacctgatccatgatagcttcggccatctttataatttcgtcgtcatctttaggctgagggcccgaagatgcttgagtaggatctgagtgaggacgggacacgactacattactattacaaatcgcaaacagatcttaaaagctctaagataccacacggtaaaactata

SEQ ID NO: 4353 - DNA, 468 bp, Zea mays
ggtgaaggttcttcatccccacatgtgctaagcggcgatgcctttccagcccatgctagtcttagcaattaagcatgcatctagaccgacctcttcttttgcaaaatcaactaagtaaagcttgccgtctaatacacccttaaaggctagtgaaccatcacttcttctaaagacagacacatctacatttgtaataagacaattatatcccatattgcatagttgactaacagatagcaaattgtaaccaagagactcaactaaaaacacattggagatagagtgctcattagaaattgcaattttacctaacccttttaccttgccttgattcccatcaccgaatataattgaatgttgggaatccttattcttgacgtaggaggggaacatcttcttctcccccgtcatatggtttgtgcattcgctgtcgataatccaacttgaaccccggatcataaacctgca

SEQ ID NO: 4354 - DNA, 453 bp, Zea mays
  unsure (1)..(453): unsure at all n locations
gcttcgagcagcgccgctgcctcattcttgttcttgtctgngctgaagccgacgggatcaaggggcagatgacccgcacctggttctcgcttgcgggcgaggaggtctttgctgttggagggatctggcgccagaccgacgaatggggcgcagcctattccatggtcatggtagatggcgcgcccgagatggccgaggtcaacgaccgcatgccggtcatcctgcggcgcaaggactggccgacctggctggccggcgcacctgctgctgcctttgctctctgccggacttgggaaggcggccttgccaccgaaaagacagccgagcgctgggggaaaggacgctccacggcaacgacaggatgaggggagggggaacaggctggtcggatcaatgaccagctgaaaggacccaagtccatgggcgagcgagcccctgtccacatcaccatcg

SEQ ID NO: 4355 - DNA, 434 bp, Zea mays
tgtcgatcacgaggattcggacggcaacgccggttccatgtttttgatagccgcccttgtcgagtctgagcgacaaggcgacgcgggcaccctcaagcgtgcggcggtagacctcgccatgacgcgcatcgggcgtgaaccagtccggcatgattgccacgatccggccgccgggcaggacgagatcgagcgccgcgcgcaaatgccgggctgccgtgttgggatcctcaccgcgtgactgcgataccgagaagggcgggttcatgaccaccgcgctgggccgctccgtttgagcgagcagcgcgccgagcttggcgccgtcatgccgggaaacggtggctgcggggaagattgcctcgagaagctgcgccctcaccggctccagttcattgagcatgcagcgcccgggctgtgccgcgacaagggacgcgatg

SEQ ID NO: 4356 - DNA, 395 bp, Zea mays
ggacctctaagcacctgcggcatgcaagcttgtgaagattctttatcccaacatgttctattttgaggtgtcagagccaacccatggtagacttagcaattaagcatggggcgagttcatctctatcaaaatctactaaggataactgaccctttaacacacccttaaaagctattgaatcattactttttctaaagacagtgacacctataatagtgaatagacagttgtagcccaatttgcttaattgagataccgaaagcaaattgtagtctaatgaatccaccagaaaaacattggaaattgaatgggcaagagatataacttttttaccaagacctttgaccaaaccttgatatccaatcccgaatgtgatagctcgctggggatcttgg

SEQ ID NO: 4357 - DNA, 320 bp, Zea mays
tgtgaacagtacaaattctaaagggagaaagcagcttttctatatctccgtaacccatgctcttatgtgaggacatagcatagcataacgtgctgttgggatcccaattattcgaagaacatgagagaaccctgataagggttttgttcaacaacaaaaatgtttttgcatggtcagctaatgatccttgcggagttaacagggatgttattgaacactctctcaatgttgacccatcctttatacccagaaagcagaggcttctgaaaatgtctgaagacaaggcccaaggagctcggaatgaagtccaaagactcctc

SEQ ID NO: 4358 - DNA, 300 bp, Zea mays
catccgcggacagatggccataccgacagaaccaatcaaattcttggagacatgccgagagcctgcgcgtagcaagatcagtccggatgggacaagacattgccatatgcagagttttcctataacaacacgaagaggcccgcctgaagacgccaccattgcaggcgctctatggaaggagcctgagaactctcgcgcgaagggaacagcccggaaaaaagcaggtgtacgggccaaacatttagcctgaagctgaagagaacatcatgagggccccagagaatctgaagatagcgcaat

SEQ ID NO: 4359 - DNA, 350 bp, Zea mays
  unsure (1)..(350): unsure at all n locations
tgccccgccgatacgcccgaagccgggtccggattcatggttacgctggcgtnnnnaggaggacctggatgttggcgcctccctcaacgaggctatggatgtaattctggaaaaacatgaccgggtcgaagggctcgggctcgttctcgggggtgggcgtgccggctgcggcgcgcgaggcagagccgccgaccctgatgggttgttcgcctagtcccaggaaggagttgaggatggaggagatgtcgttgggctgggaaggggaggtcgcggcggaagaggacgaggacgataatgaaggggacccaccggagccggctgctggggcggtggccggggtggtgctggcg

SEQ ID NO: 4360 - DNA, 385 bp, Zea mays
agctttaattggatcaatccgggctatgttgtgtctgaccacggtgacagcggataccgaacaccgatcaagacgttccggttgattatgtgaagtcaagctcaatgggctgagcaggtgaaagggaatttttcttacccttttttcctattagatcttggttgctgattcgcctaacactaattactggactaacttggttgcttctattttataatctatatctgtgccattggtgtacaatatgccaatttcttaccaagatcagggtttaaaacaagatcactgtattatcctaactgtctcctgtttgctcacctacattgtctggtctcctttgatcttatgttaacttatacttttgtactctcttatctcttccttt

SEQ ID NO: 4361 - DNA, 301 bp, Zea mays
ccacaccatgattctaaatttttcatactctcttccccattttcttgaattttgagtatagggctcaaatacggtatttgttggggttgcacattatgcctctttgaaaagcccatttgtttggaacatgatgcttttaattataatcttagggggttctttattcttaaatcaacttgatgttcatgctcaattttggcctacataagatgatggtttttgggttaccacttgagagaaaccctaggtgacactggggtgtcacaatttccagccccgtccaaccctcggaagagactct

SEQ ID NO: 4362 - DNA, 441 bp, Zea mays
agcttgacttaaatgctacgtcttattattcaatacaaatcgacgacacagatagagatgaaacaaattgctctcaacgaagatatcacgcgctttctaatacctcggaaaaggattgacacgatgaaactagtttcacctttttctaataaatacagtatcatatcatcaaaaatctcatgtgacatactaattaatattatgaactctcccataaaactctcattgagaatggcataaggctctgtttggtttgagggactccattttacacaatttagtctctaaattatcaaacggtggaactaaagcaatgactagactattttagtctctagtctctcaaggggtgaataaaaaaagctaaatcatattaatttcaccttttgcccctcatatatttcagctgcactagtgaccgaagaatactaatggtatttt

SEQ ID NO: 4363 - DNA, 458 bp, Zea mays
tctcctgatattgctaagtacgagggggatgacatatgttgttaaccgacatctccttcgacccctccaacagttactgaaccatctgtcgacgaagaggagttctactgcccggatgtgagtgacgagtggtacttcagcgactcagataggtcaactcgtaatagctattggaatatttattaattcaatgtattccacctgtacaagcaggattggcttttgaacatcccagtactcgggttctcgcacttgtcatgttgtcgaactagtcgtgtgatgtatgtctaagtctccatgctacctcgtcagcttaagttagtatgatgttaagaacgttgtcgtctgtgaactatgtcgaatcttaaatgttctgatggtactccttaataaggtcattacattatggcacttatattttccgtgggtcatatgggttggcttacgtataacggacc

SEQ ID NO: 4364 - DNA, 390 bp, Zea mays
agcttcgcacctctgaactaactctgctgtatcactctatgctgatgccaatagaatcctgacctaaagactttcccgactagtgttctggaggctgcatgtattccacattgcccagcatggacctcctctagaagttgcttcccagtggacgggagaatgcatttcatgaggacgcctgatgcaccccttctgtataatttctccccaatgagtgtatagtgagccgactgtctggcaatgcgctctgccgagttcttgtcgtctgggtcttcttcattctttatatactagatgattggccttctccagacatcaaagtctgactcgggttgatctataatgatgcactcttctgtttgatccattgagatactcggctgcagtatt

SEQ ID NO: 4365 - DNA, 386 bp, Zea mays
  unsure (1)..(386): unsure at all n locations
tganagatatctggatacagttcgaatgttggaggcttttttcgaagggttntctgtcaagaatattccaagaggtgaaaatgaacatgcagatttgctagccaaatcggcgtctcaggggctccctctaccttcggaagtattttttgaaacaataaaggcaccttcggttgaactcatggagatagcagtgcttactatntctccagtacatagtgaagattggaggactgaaattatatctttcctccaagttaattgtctttcagatgacgaaacttataataagagaattgaggcaaggacaagaccatatgtgataatagaaggcgaattatatacacatggagtctattcctcacttctcaagtggttatcaagagctg

SEQ ID NO: 4366 - DNA, 419 bp, Zea mays
  unsure (1)..(419): unsure at all n locations
agcttgtgaaggttcttcatccccacatgtgctaagcggcgatgccacagccagcccatgctagtcttagctattaagcatgcatctagaccgacctcttcttttgcaaaatcaactaaataaagtttgccgtctaatacacccttaaaagctagtgaaccatcacttcttctaaagacagacacatctatatttgtaaatagacagttataccccatattgcataattgactaaccgatagcaaattatatccaagagactctactaaaaacacattatatatagagtgctcattagaaattgcaattntacctaacccttttaccttgccttgattcccatcaccgaatataatngaatcttgggaatccttattcttgacgtaggaggtgaacatcttcttctcccccgtcatatg

SEQ ID NO: 4367 - DNA, 394 bp, Zea mays
taacttgcggactggatgctttgaccttcacgcgcttgataccaatcgatactattcttgaggatcccttggacctgtgggttaggacccacacacgctttcgctacaccactctgatcttgttggttgatgtacatcacattgtcttcattggggttagcagctaacccccttaacatgaatgttgatatgcacttggtgaagatgtcgaccactctgatcttgacttgattagagcatttgtaggatgccaactggacaggtgcaagagggaagggtataaatagaaaagggtatcatagatggaataaagagagagaagggagagcacccagctccctactctatggcaatcactagtaactgatgtcttggtgaccaaggccacacacat

SEQ ID NO: 4368 - DNA, 453 bp, Zea mays
  unsure (1)..(453): unsure at all n locations
cgcttatgaagattcttcatcccaacatggtctagtctgcggtgcccgagccaacccatgttagtcttagcaattaagcaagtgtcgagttcagctctatcaaaatctactaagtatagctgaccctctaacactcccttaaatgctattgaatcatcacttcttctaaagacagtgacacctacatcagtgaatagacagttgtagcctatttgacataattgagaaacagaaagcaagttgtaatctaatgaatcaacaagaaaaacattggaaatggagtggtcaggggaaatagcaattttacccaaacctttgaccaatccttgatttccatccccgaatgtgatagctcgntggggatcttggtttctctcatatgaggagaacatctttttctcccatgtcatgtggttggcgcacccgctgtcgagtattcaacttgagcccccg

SEQ ID NO: 4369 - DNA, 411 bp, Zea mays
tggtgcggcagtgaacccgtctccctcagacgcgcagcaccaattaccctaccaccaattctagaccctcccggctctagcttccccacactccgtcgcgggctcgtgggctccggcggtggctatattcagggtgcgggagtctggcgtcgtcgtccgagatgccatccttctctgccggcgcctcatcgcagaagcagcagttcgcgaggtgccaactcttatcttgttgacgctgttctcttccgattgtttcattagttggcctgaggattgagccttcgtgttggctggcttgcagagggaggcagctgattcgacaacagcgcaagtcgctccccattgcgtcaggtttgcctgcagagcttttatatgtctttgataccttttgggatcttagctcagggagca

SEQ ID NO: 4370 - DNA, 372 bp, Zea mays
ccctttttattctcgctccgaacgtttgattactctgctggacaaacaatgcaattataaaccttgtgcacgatctctcggataacgcacgcgggtctggatcattttgcaccaaaaactttattcgtcgaattctaatacatctgtttgggatgaaatcggatgtctgaactaaattcccaaattcgtatttgcacaatcgatgaattttaattaatcacaagactcgctaattttcagaacaaatacgttccacactttagaaaggttccagatagataaagatgaaagtgatgtcgaattctagatagacgaccatttagacatagagaccattattctcaacgatctctcatgcttaagtccataatc

SEQ ID NO: 4371 - DNA, 357 bp, Zea mays
tatccatcaacgaatctacgcagcacagtcagacaactctaatggctacaactatatactctggcatagtgcaaccccagaccttctgcagtgtgaggtactgatcgcagaactcgagaacgaggtccagattggcggtagagttccgggttcggatgttgttggcgacggcatcccggttgtttcggatccatttgaaatcaatcgcggccttccactgcggactcaccacaccggcaccacctcccgcactatcgtctcctgaatgaaaaggcggaagcttagatagcaaccgttgagatgaagagcgaacgttttaaacttttaccattggtgtcgagttccacggcggtggcg

SEQ ID NO: 4372 - DNA, 449 bp, Zea mays
tctagagggagaacacgtgatatgtttgactaacgtgctattctaataggatagacctcgtgcagctcgtcaagcaggtaaacaagtgggaggagcgcatcacagcaagaatgtgatgaccacttcaagacccctggagctgctgcatatggatctcttcggacccgtccgctatctgagcataagaggaagtaagtatggtctggttattgctgatgacttttcccgctacacttgggtgttctttttgcaggataagtctgaaacccaagggaccctcaagcgcttcctcatgagagctcaaaatgagtgtgagctccaagtgaagaatataaggagcgacaacgggtccgagttcaagaaccttcaagtggaggaggctcttgaataagaatggatcatgcctgagttctccgctccttacacacaacaacaaaatggtgtggttg

SEQ ID NO: 4373 - DNA, 409 bp, Zea mays
aagtcacctgaggctgcagcttatactcgtgcttggagatgtcgttttatttactggagagcatacttgaggtgctcgcctccaggtgcaatgaaaagaattcctgctcctgctccctgcagcttcagcgagccatcaaaatacattcgccatacttctgcgggttctggattatccggcacttgctggtctgtccactctgatacgaaatcgaccaatgcttgagttttgatggcagtgtgaggaccgaactcgatatcatgggatcccaactcgcaagcccacttggctattcggacaatggcttccttgttgtgaagaatgtcccctattggaaaactcagtactactatgactttgtgggcgtcaagtaagggcgcaactcgcgggcagccagaagtactgcata

SEQ ID NO: 4374 - DNA, 370 bp, Zea mays
ctttggaaaacaggccaagcgcggaccgttcgggcctcttgttgtgaccgtccgtgacagaagaatgaccctcggacagaaccaatgcaaaaacacaagtttccactacagactgtccggaggataagcgaagaccgtccgaggcctcgcgcggaccgttcggcctcaagcgcggaccgttcggtcggttagaaaccgaataacccgatagtgacgggttcagagaaatgaattatatggggcctcgcggaccgtccggggtgcacgaccggaccgtccgcgactggttctgtctgacatctgacgacgcattaagtgcaatatatccctactgcttgaccgtgcattttagacgttgatctcacgggcg

SEQ ID NO: 4375 - DNA, 380 bp, Zea mays
agctaaatgcctcctaaagaatgtttaatttttgttacggcacagctctcatggttcaggataaccagggctatatactatatcttgctggttatcccgaacataaaattaggagaattcatgctaagaagtattattcggtttctcaacatgcatttatgtataaaaatgaggcatcttgctataggtattctacacatgttaaaatgcctaaaaagaaaactcctactgcatcaaatgatcataatatgtcatttaacacttttgatgcttcttatgttttaactaacaaatcaggcaaaatagttgccaaatatgtagggggcaaacacaaaggctccaagactgtgtttgggacccaagcgcttgttctaacataa

SEQ ID NO: 4376 - DNA, 368 bp, Zea mays
cgcttcggctttgaaaatagatttttagtattttcgaagatgtctggagacaagaaagctgtcgctgagacgaagctgactcttgatgaagagaaaaagaaagctgctgctgagacgaagttgactcttgatgaagagaaaaacttggggtttcttatagcgatgtcaaagacgaacacggaaaaaattaccaaggaaattctggaaggcttgtctgaggatactggtgacagtgacagttatgatgtggacagcggtagcgaatactccgaagatcgtccctggcgaccaagccattcagtttatggtaaatcgactatcatagagaatcatcttgtcaacatgagaggaaggtattttcgggattt

SEQ ID NO: 4377 - DNA, 435 bp, Zea mays
tgaatcagaatgccgggtactactagcacgctgtgcattctgtgttcctaatatataaatcgggtgatgtggtagatgtccaacgcgatagaagttgagtcacttacgttataaatagatgctcgacatgtgaggtctccaaaatatggagatttaaggacttgcgggtcttccagtttaacgtgagaaaatggctaagaaaaactaattaacctgctcccacctctgtttttgagttgcgaagtctaaaatacttgctaagttttatattagtcagccaacttgttagaagactgagttaagcgcggaatcactatgaattgtttgctgtattctaaacacgtatgtttacggtccgggatgaactcttagtagtgctcatgtgatgtctacgctatatatgcacactattggcgtcatagccctctcactctc

SEQ ID NO: 4378 - DNA, 353 bp, Zea mays
tgaactgcagacctccatccgacacctatctcttccgcacaccatgaaggcacactaaccgagacatgaataacccagctaacgccgctcccggtgaatgccgtcctcaacgggaaaaaacgacccacctatggtaagcgcgccacaaccacccagatggaatcatagccggcccgggtacgaggtaggccaactataaaatccatcccgatctcatcccacttccactgaggaatcagcattggctgctacagtccggcgggcccctgaggctctgccttggtacttgacagctaacacagatggcgacatatactgcgagcactcttatgatgccataccaccaaaacctc

SEQ ID NO: 4379 - DNA, 111 bp, Zea mays
aaaacacagcgaaataaacagccggcgggtcgaccaccgaaaggcgcagggccggacgcaaaaagagggaggcggggaaggcataaggcgacgggcaccagacgaggcaag

SEQ ID NO: 4380 - DNA, 306 bp, Zea mays
  unsure (1)..(306): unsure at all n locations
agcttttgcgcacataccaccttttacattaatggagnaaaccctatacccctcttgagcccctatctccaaaaaccatggatgaaggggggagagattaaacatatgtgcaaatcatagacctacacctctgggtaaagctaagtaacaaatcaatcaacatcaatggagaggaaacattcaaaaagacctccaaaacacctaaatccattccttaaagtaagaatgagctaaagctctctaattctctctaagtcaaaatctacacctaatctaaaaatccaccatgttcaccttgtagatagc

SEQ ID NO: 4381 - DNA, 460 bp, Zea mays
  unsure (1)..(460): unsure at all n locations
gcagcaggcgcatgcgagcttgtgtgagttctcataggttatattctttagattgngtctagcagttcacccttatggtcactaaaaacacattttgcactggtttgcactggaggttgtactattcgcagagtatagtttgaatatgagtatgaggatgcgttaggtgctggagataacataactatctattattaggcgagaagtcaggaagaggaacatacctatatgtttcgtacgtagagatggcaacaagtatatacccctgtcgggtagtatcatcccatacccgtacacaaaaaatcctacacatcggattacctatataaggtcacggatataaaatcttacccatacccacgcgggttacttgtacccactagaaaagcctaaaatactaatggaccaatcacccaaaatgtaaacaagcacataaaaataacttcaattaaaatacaac

SEQ ID NO: 4382 - DNA, 364 bp, Zea mays
tgctaacggagtcctttgttccggtctgaataagatggttaagaaactgacatcaagaccacaaattctaagacgagttacttaataccccaagggatatatcttaatgctgctagcacgagctccttaagtgaagaaacttcttataagatttttcttcaaaacaaataggccatgttcactaattcaagatggagcccaaaaaatgaatctgcaaatttgaagccttgatttggactgatgaaagtcgcagacccattactaataaacaaccacaactcaaaagttcacaacactcaccactttacatcgtcttttctcccgccaggtctctcaaagcttatcaaagagggtcaatatagca

SEQ ID NO: 4383 - DNA, 419 bp, Zea mays
agaaactcacgcttgtgaagattcttcatcccaacgtgagctattcggcgatgccagagccagcccatattagtcttagcaattaagcaagtgtcgagttcagctctattaaaatcaactaagtatagctgaccctctaacactcccttaaatgctactgaatcatcacttcttctaaagacagtaacacctatatctgtaaaaagacagtggtaacccattttgcataattgagaaactgaaagcaaattatagtctaatgaatctacaagaaaaacattggaaatagaatggttaggtgatatagcaattttaccaagtcctttgaccaaaccttgattccatcctcgaatgtgatagctcgttggggatcctcgtttttctcatatgaggagaacatcttctcccctgtcatatgg

SEQ ID NO: 4384 - DNA, 391 bp, Zea mays
tagcctgaaagatatctatttactgttcatacgttggaggcttctttcgaaggtgtttctgttaagaatatcccacgaggtgaaaatgagcacgcatatttactagctcaatcagtggcccaggggttccctctaccttcggaagtattttttgagacaataaaggcaccttcggttgaactcatggaaagagcagtgcttactatttctccggtacatagtgaagattggaggactaaaattatatctttcctccaaggtaattgtctttcagatgacgaagcttataataagagaatggaggccagaacaacaccatacgtgataatagaaggggagttataccaacatggagtctgctcttcacttctcacgtggttattcagaaccg

SEQ ID NO: 4385 - DNA, 357 bp, Zea mays
tgactcaggtatccacacattaatccttaattcattttttccgtctcatggacaaggcatcctccctggatccaagtccatagaccaacatagatcccgttatcaagatgaatacaatcaattcctgacctcgcgcgagtgctagaaaaatcactcgacttttaccgagatcctgattagcaagcagctactcgacctagcatactagtattcatctcaaaaaggaatcctaagttcatgcaactagaggtttcaagcaactcctacacttaagtgcacattgcaatcctacaagcattaagtgtagtaaagtagcatataataacatgggtatgcataaaaccggggcttggcttc

SEQ ID NO: 4386 - DNA, 387 bp, Zea mays
  unsure (1)..(387): unsure at all n locations
gcttgtaactcttgaggcttcgtattggatcttcattggtgaagctttcagtcgcaggacaaaggtgatcaagttatttcaacgttcgtatggtcttcgtccttgagtaaattgagatattcacctttttcctttattaccatgtttattactttttttaccaaagctaagttagtcttgtgaatgaatgggaaacaaagagtggttgttagactgctcctaaatatcgacggttgcgtttgcgtgtggtgcaattcccaacagtaaacccctcgtggaagaagaactgctccgaatcttgcgaaaccatgattnttgagtaaaggtaagaatgtcattcccgatctttggagttggctattaacgagtgaacattatattttatac

SEQ ID NO: 4387 - DNA, 476 bp, Zea mays
  unsure (1)..(476): unsure at all n locations
tctaaagggagagcacattntatgattaacaaatgttcattttgagaaagacatganttgtagcgcatgccaagcagggaagcaagttggtgctcaccatccacacaagaacatcatgacgactgacaggccactagagctcctacacatggatctattcggcccgattgcttacataagcatcggcgggagtaagtactgtctagttattgtggatgattattcttgcttcacttgggtgttctttttgcaggaaaaatctcatacccaagagaccttaaagggattctgagacaggctcaaaatgagttcggcttgaggatcaagaaaattagaagtgacaacggaacggagttcaagaactcacaaattgaaggcttccttgaggaggagggcatcaagcatgagttctcctctccctacacgccacaacaaaatggtgtagtggagaggaagaatcgaactctattggacat

SEQ ID NO: 4388 - DNA, 479 bp, Zea mays
  unsure (1)..(479): unsure at all n locations
tctaaagggagaacacatnttaggactaacaaatgttcttttttagaaagacaggatttgtagcgcatgtcaggcaggaaagcaagttggagctcatcatccacacaagaacatcatgacgaccgacaggccgcttgagctactccacatggatctattcggcccgattgcttacataagcatcggcgggagtaagtattgtcttgtaatagtggatgattattctcgcttcacttgggtattctttttgcaggaaaaatctcaaacccaagaaaccttaaagggattcttgagacgggctcaaaatgagttcggcttaaggatcaagaaaataagaagcgacaacgggacggagttcaagaactctcaaattgaaggcttccttgaggaggagggcatcaagcatgagttctcttctccctacacgccacaacaaaatggtgtagtggataggaagaatcgaactctattggacatgg

SEQ ID NO: 4389 - DNA, 347 bp, Zea mays
  unsure (1)..(347): unsure at all n locations
attttaggaaaaactcttgactagttaccttaaaagtcggtgaggcctaactctcaacctgactaggctaactgtggtacccagccaacatggtaaactggcaaggcttgccatgccaaactttgggggctacacagtgaactgttcaagccaacttttaaccatggccaagcatctttgtctgtgcagattatgtttaagaccattattagtttcgtgactccaatcatcaatccgctttgtttgtgtgtttccaatagtgtaagacnaatcttagttctcatgtaactagttgcgtatagaagattttgggttggaatcttatttcattgtgattgaagttgaca

SEQ ID NO: 4390 - DNA, 392 bp, Zea mays
  unsure (1)..(392): unsure at all n locations
agcttctccttatcttgctcatatgtttcttactttttgagnaantcattctttaaactgtcaatttcggctcggacctcagccaaggagccttccatggactgaataacaaagtctttcttttctagggcaccttcgagctctttagccatgatttcaagatcttgaatggtgaagtccttcttcttcaaacagctccagaattttcaacttattcttctaaatctttgatgatagctttgttcttctccttttcaagatcttggtgcattctaagcactttacttaatagtatactctgccaatacaaccttcgtcagaaaacgacgtaaaaataataattataaaataataatattattttttaccttaaattaacataaagtacgcta

SEQ ID NO: 4391 - DNA, 414 bp, Zea mays
  unsure (1)..(414): unsure at all n locations
tcggcatctttattcgcttcgtcgccctgagccactggcgttctatttgcaataaaatctgccaatgcttgagactggatcgaggatctgtgcacataatcaatgtaaaattcattaagctccgcagcccattttccaattcggccagtagcttctttatttctcatgatatctttcacggctgcgaagaaggaacantaatattatatgcctgaaaataatgccgaaacttcctggatgccattagaacggcatacaacaccttctccagttctggataatttctctttgagacactaaggacctcagatacaaaatatactgcgacctgcttcatgatatgtccatcaaacttttcctgacaagtgccgcacttactgctgagtgcgaagcttgcacatacaacaacagagg

SEQ ID NO: 4392 - DNA, 472 bp, Zea mays
ttaatcaccgcggctgcaagctgtgggtgtccgaaaccctcatgttcatgtttctattcaaaattttacacccatcatgagtatgtgtttttataggatttatatttttcttagcggatataagtttaggctagatataactagcaagtttttattaaaaatggtaacaggtatttctccgtcgggaaatagctccacatccctgtccccatgacgaaaagttgtcccgtggggatcctcacgaacgtttgaaggggacatttcttttctatctttgatggggatctccgtctccacttaaattaattagaaacgaacttttttattattaatgcaaaatattgtgactttcacatattgtcagatgtaagaaaccattatgtgtgtacatcaaaatgaacacacttgtacaatgtgtggtctcttgacaacgtaattatttagttttattattaactattacacacaaata

SEQ ID NO: 4393 - DNA, 373 bp, Zea mays
  unsure (1)..(373): unsure at all n locations
tgaatgtgtcnttgggtgaaatgcttgctctagtattgaatgatagtgaatgagaagcttggatcaattgaatggaagtggctgggttgtatttatatccaccaaccacttccagtcattgcccttgatctgccatccgcgaacggtctgcccctggtccaaacagtacgcccctacacattaacggctaatattccaacggccagcaataacgactatatgaacggctacagtgcttaaatgtgtcgttagatgtcagataaagcagtcagagacagtccgaccgtgcaccccggatggtccgcgaggacgctaaaaatgcaattcaccgaacccatcacctttggtttctctcgttatcaacgatcgggcg

SEQ ID NO: 4394 - DNA, 465 bp, Zea mays
gatcctcaaagtcacctgacgcatgcaagcttctaaagggagaacacattttatgattaacaaatgttcattttaagaaagacagggtttgtagcgcatgccaggcgggaaagcaagttggaattcatcatccacacaagaacattatgacgaccgacagggtgcttgagctactccacatggatctattcggtctgattgcttacataagcatcggcgggagtaagtattgtcttgtaatagtggatgattattctcgcttcacttgggtattctttttacaggaaaaatctcaaacccaagagaccttaaagggattcttaagacgagctcaaaatgagttcggcttaaggatcaagaaaataagaagcgacaacgggacggagttcaagaactctcaaattgaaagtttttctgaggaagagggcatcaagcatgagttctcttctccctacactccacaac

SEQ ID NO: 4395 - DNA, 402 bp, Zea mays
tctttcgaagggttttctgtcaagaatattccattatgttataatgagcatgcagatttgctagccaaatcggcggctcatgggctccctctaccttcggaagtattttgtgaaacaataaaggcaccttcggttgaactcatggagagagcagtgcttactatttctccagtacatattgaagattggaggactgaaattatatctctcctccaaggtaattgtctttcatatgacgaagcttataataagagaatggaggcaagaacaagaccatatgttataatagaaagggaattgtataagcatggagtctgttctccacttctcaagtgtttatcaagagctgaaggtattgaattaatgaaagagatacacgcaggtctgtgtggatctcacatt

SEQ ID NO: 4396 - DNA, 447 bp, Zea mays
  unsure (1)..(447): unsure at all n locations
agcttggtgattntctcagatgtcaagttttcttatcactttatgttatattataacctgggtgggtggagcattcattttatcagacaactcattaaagaaatgtagtagttttagatggtcacaatgaatattaagttcatgaacacaacaacatatttttggtgtatgcattttcaagtaaggacaaaaaagaagaaataattacggctgttgtttatggcaggtgaaagtgtggtgcacaaatcaagaagcaagtgtgatcaatattgatatgaaagcaaatatttgctcggntaaatataatcctggatcaagcttctacgttgcagtatgttgcttcatttcttagcttatattgaatacttaatttgtttgcttnttcaaccganatgttatttgtttacctatcaaatactacaatatttcaggtcggatctgctgatc

SEQ ID NO: 4397 - DNA, 470 bp, Zea mays
tgctcattcagagatctctcacatacaccaaggatattctgatcaatttctggattagatctgttacgagtaaagtgaaccaactgatggttgatgcccgcacgaagaacaatctgagtatctgactattcatggaactcgagggtatgtcagtttggacatcatgtacctgactttgtgaatcatcaccacccaactttatttcaggtacagaattaccaaccttgcaagaacattgtgattcatagacatgtgtatcattgataaggtgaaaggttcttaatgtactaccaaaagctttgtcatagttattcacgaaacactgaaatctgacaccatgaatcaacatcgctaaaaaagaaaatattataagtttatgggaagccgaaacatatctgtgaaatagaaactgcgctactcatacattagttaaagactcctctactgccgagggacacatctgcattcag

SEQ ID NO: 4398 - DNA, 434 bp, Zea mays
agcttcaattctttatgctattattatccttaatttattatctatagacgtattccgcgcgatttattattttaattcataagtgcagctcaagatcacccctggtgcttgctggactggtgctcattcattgtttgcctgtatggactttggagtggcgtttgttcactatttggcctgaggctgaaagggtgttaaactgttaagactgatttggtgatcggggatccccaggggaagaaatcctcttgctattcaaaattgaattagaacgtgattcttccacatggatcccctcaggaatcctaatcaccaaatcaacccttaatgggctgccaatccattagtgcataagtgtgcaagttagaagtgatttgcaaacacatgagcatctcctactgtttattcacacatatgcatctactaccactaat

SEQ ID NO: 4399 - DNA, 331 bp, Zea mays
tccatattggttctttcctgcaacggaatgggcaacaaatctatgggagcaataggtttgaaccatatacaatttcgaaggggcataaatcaatcgtacaatgtactgccctgttataggcaaatctcacatgtggctaacattcctcccaatcctttcagttcttctataccattgttcgcagcaccattgacaatgtatgattcaccacttcagtttggccatcaatttgggggtggcatgtggcggagaacaataatttagttccaagctttgcccacaatgtcttccaaaatagctcaaaactttacattacggcagatacatggct

SEQ ID NO: 4400 - DNA, 427 bp, Zea mays
  unsure (1)..(427): unsure at all n locations
agcttctaaagggagagctcattttatgattaacaaatgtgcattntgagaaagacagggtttgtagcgcatgtcaagcccgaaaaccagtcggcgctcatcgtccacacaagaacatcaagacgaccggctgtgacaccccagtgtcacctagagtttctgttaaaacaccacaccaagacccatcattttatgtgaaccaaagtatgcatgagcatcaaattaacttaagaagaaagaattcccccagcctatacttagaagtattatgatcacaacagatgggtctttcaaaaaggtaagaatgttgcaatcttaatatcaactccagtgagccccatgaacaaatcaaagaaataaggaaagggttgaacattaaaaatttgacttgagccaatataaagtcgaggatattaataaccacaaa

SEQ ID NO: 4401 - DNA, 379 bp, Zea mays
  unsure (1)..(379): unsure at all n locations
taatgccccaaagaaactatctaattttgttaanggcattgcgcccatgactcatgataacgagggttgcattttatatcctgctgggtatcctgagcataagattatgagaattcatgctatgaagccacattctatttcccatcatgcatttatgtataagaatgaggcatctagctctaggcaatcaacccatgttaaattgcctaaaaggaaatctcctgttgcatcaaatgagcctaatgtttcatttaagacttttgatgcttcttatgttttaactaacaaattaggcaaagtagttgccaaatatgttgggggcaaacacaaaggctccaagacttgtgtttgggtacccaaggtgcttgcttctaatgtg

SEQ ID NO: 4402 - DNA, 409 bp, Zea mays
ttatcaactcacgctatcaatcttcaaatgatctacatattccagattgacccacggttacttaaattctttgtattcaaaacccatatcatctcggggaaaatattggtgttgtaggatttaaagaatcatcatgtgcggaaaatcaaggcctacaacatggaggaatgtcaaaggatggtaacacttatgctttcgagtgcaagtatcttaaattatcatttcttatgtgtcttgtgtagtcacataggaaaaggaagcacttaagatgtttctaaatttatgtcaccattctttgaagaaattcctctcatatggtagattggatattcatcattcccatactatggcaatctacatgtttaaattattaagcaactcatggcatggtttacacttactatcttat

SEQ ID NO: 4403 - DNA, 235 bp, Zea mays
  unsure (1)..(235): unsure at all n locations
ctccgcctagctacgggtgcataaatttcaccgaatatcaaacctttgacttgggagtatgccttggccacaagtcgagctttgttcccttgtgaccacaccatgctcatcttgcttgttgnggaacacccatttggtccctaccacattttgattaagacgtggaaccaaacgccatacctattctagtgagagtgttgagctcctcttgcatcggcaccacccaatccgaatt

SEQ ID NO: 4404 - DNA, 429 bp, Zea mays
gcatgttgcagatgtctactctctcagacccctcaaaagaagatacttcacctgagggttcaggtactacccagagaaatggagcctggagtaacacattgaacactcttctgcagcaagcctcaatatatggtgtggccgctgggtattgtttatcagcgtccctgctctcgatcatcaataaatgggcaatcatgaaatttccatatcctggagccctgacagctctgcagtacttcactagtgttgctggagttctcctatgtggacagctcaagctcattgagcacgatggacttaacttgaggacaatgtggaagttcttacctgctgctgtgatgttctacatctccatcttcacaaatagtgaactcctgcttcatgccaatgtggatactttcattgtgttccgctctgctgtgcctatat

SEQ ID NO: 4405 - DNA, 475 bp, Zea mays
  unsure (1)..(475): unsure at all n locations
tcacactatatggctaaagtggaagaacaaccttcaacagtattattaattctaataagattataggaccaaaatctcagtaaggatctgtctggcattgtatagtggctctatgtatgttgttatacctgttgtccagttgttagacgtggaatttagtgatggggttcatgtcgagaatacgaagagatgtcaacatctccccttatccccacagctgcaacacaagcccttggacattgccttgtgtatactgtatagtttaattcattgtccaaatcaactccatcctcctcatctccccgaacttgagggcttcctaaatttgaacatggagatcttaaagaccacatagtgatgatgtgcataatttattttccattagaaaatttaaacagatgtgtgcaatattcagtaacagatgtcatcaagcagtntgaacttgcaaagtattgagttagctcactatgtacac

SEQ ID NO: 4406 - DNA, 105 bp, Zea mays
gcatatatgtacgccagcccggtgaggtctgtccttataaacccggtctgttggcctacactcatgaataccaagttataaagaaaaggttcgcccctagaattg

SEQ ID NO: 4407 - DNA, 189 bp, Zea mays
aaagggagaagaaaaaggaaaaaagtaagggaagggaggagaagaagaagaggaagaaaaaggaagagagaaaaggagggaaaggaaagagagaaaaagagaggagaagagagggaaaaggaaggaaaaagagaaagaagggaaaagggaggaagaaaagaaaagggaaagaaagggagaaaagagaaa

SEQ ID NO: 4408 - DNA, 423 bp, Zea mays
ggaccttaagcacctcggctgcagcttggtcggtcttctgcaaggattttgttctcaaagaagtgatgagggtatgaaacacattcatgagaaaataatggccagtaaagcaaactgtttcaaaaaagatgatcaaggcattgtatggtttaacaaccgcatagttgtgcccaagaatgatgaagtccgccagcaaattttggatgaagctcatcttagccgctattccattcatcccggaagcactaagatgtatcatgatctaaagcaacattattggtggacgaaaatgaaaattgagattgcacgctatgtggcgaggtgcgacacttgtagaccgtgtcaagccatacacatagaaactgcgagtccattgcaatccttacctattccaacttggagatgggaggatattagcatgga

SEQ ID NO: 4409 - DNA, 250 bp, Zea mays
  unsure (1)..(250): unsure at all n locations
gtgtgatctctatatnccaaattgtaatacattatgattcttttgcacatcatactaattatacatatataggtagatattacgagcccatggtcttcccctagctaggggaagccctgacctaatacttccatccgagtcaaccgcaccacgtctcgagcgtctataaaaagagctccaggccgccaatgctctagttttgacgctctcaccactatgcacgagcgactatcgcccacctatgtgcgca

SEQ ID NO: 4410 - DNA, 367 bp, Zea mays
aattgcaccttccaaagtcagaacatgctatgcagtgaaacttgatttcagctgcacaaataatattgctaaatacgaagctttgcttttggggcttcggaagatgaaggcaatggggataagaagggcggatctaaaaactgattcacaagttatttctgggcatgttgacaaaagttgcaaagcaagagatccgaagcttgagaaacatttggatatagttcgaaggcttgaagcttccttcgaagggttctctgtcaagaatattccacgacgagaaaatgagcacgctgatctactagccaagttagcggcatatgggctgcctctaccttcgaaagtattctcagaaacaataaaacgcacc

SEQ ID NO: 4411 - DNA, 425 bp, Zea mays
catgcaacttataccatccctgctttgcttttacttgcaagcatatcttggtacccatctcttgatcgggccatcaaggttactcaacatagatctaggaacccaaacgtcctttgtgctagcactatgtaaactgattacctttctagcacaagttgcaaatttgggttgcctagctacatgagaattaattgacaagctaggagtgggattgttaccaatgggacaatcatttcattgatgtcccttctcttggtatatgcagcaaaggcgatcttcaaggcttgaagatctcttctttgcttggctctttcttgctacatggttagtcaatattttcttatctaacactatgcctttttgtttcaaatggggacaagacctaaacaagtgtcctttcttggagcatatacaacaaattgatc

SEQ ID NO: 4412 - DNA, 399 bp, Zea mays
tgtcaaaatctttacacctagtacaaattacaacatgttctacacaagaattagatttatttgctacttctaatttagcatttaaatcattgttgacaccttctaaagtagaaatggttttatgacaagtagatacttcaccagagagtatttcattccttttaatttctagagcaagagaattttgtgcactaacaaatttatcatgctcctcatataaaagatcttcttgtttttctagtaatctattcttgtcattcaaagcatcaatcaactcattaatcttatctattttaaatctatctaaacccttgaataagcatgaatagtctatgtcatcatcatcactagactcattatcactagaagaagcataagtggagtctcgagtactcacct

SEQ ID NO: 4413 - DNA, 421 bp, Zea mays
  unsure (1)..(421): unsure at all n locations
tctcannaatnttctaaccccagtcaaatagggcaactaagtntggccctattattaagctnttggtcaaaactataattaaatcaaagctttaatgttctctatagtacatagggggttatatatctttcttaagtaggttacattatttagagtctgacaaaaattggttgaccaaatttggatgatttaaacagaagttatgcattttcaaagattctgtccaattgtaaaaacagatttaataaaggtattctggaaaaacagtttacaccgaggtccctgagtttaaactaaatccacctttgcaaatctacccccacgccactattcccctgtgtctctgacatttcacaagaccccctgaccttctctccctctcacccgcaagtcttccccttatgccaacagcaaccgcggg

SEQ ID NO: 4414 - DNA, 452 bp, Zea mays
tgcagcatgcaagcttggtgattttctcaagtgttatatttcaaaatcaccttatgttatattataacctgtgtgggtggaacattcattccatcagacaactcattaaagaaatgtattacttttagatggtcacaatgaatattaagttcatgaacacaacaacatattattggcgtatgcattttcaagtaaggacaaaaaagaataaataattacggttgttgtttatggcacgtgaaagtgtggtgcacaaatcaagaagcaagtgtgatcaatattgatatgaaagcatatatttgctcggataaatataatcctggatcaagcctctacgtagcacgatgatgcttcatattctaccttatatcgaacacttaaattgtttgctttccaaccgatatgtatttgtttacctacaaatactacaatatttcaggtctgatctgctg

SEQ ID NO: 4415 - DNA, 412 bp, Zea mays
tctaagtcacctgcggcatgcaagcttgtaaagggagaacacatgattggtttatttaatgcgcaattcgaaaaagatagaccttgtgcaaactgtcaagcacgcaaacaagtgggaagctctcatcacaccaaaaatgtgatgaccacatcaagacctttggagatgcttcacatggacctcttctgacccgtcccctattaagtatggacgaaagaagtatggtcttattatagatgatgacttttccctgttcacttgggtattctttatgcaggataaatctgaaacccaagggaccctcaagcgcttactaaggagagctcaaaacgagtttgaacttaaggtgaataagattaggagcgacaatggatccgaattcaagaaccttcaagtggaggagtccttgagg

SEQ ID NO: 4416 - DNA, 409 bp, Zea mays
tgtcgaggtgacaaatgatgagggtgaattggtagttaccaaggtcacagctaagcaacttcgtcggttgcccatcattcctcggctctcaaggttgttcctcaacacagaaatagctctgcatatgacgtggccaaagaatggtgtacgtctctccagagagtgctgactacgtgagtaccagcagggacaacgatgatgctgtttctcaaccagaagcagcgtctaagcaagacatagctcaccgattccatgtgaccaatggagaaggccttgaacatctctggtgggttgaaatcaaagcaacccacaagtcgtcgctctagagagtgctgactacgtgagtacgagcacggacaacgatgatgtggtttttcaaccaaaagcaacgtctaatcatgacatagct

SEQ ID NO: 4417 - DNA, 439 bp, Zea mays
tctgtgatatacacgaattatcatattatacaaaaccttggggtaaggaacagtatcacaatatatttggctgctacagtttcgtttctcggcccgggtcaagttgccccgtgccaacctttcggaagagatggcccgtcgactggatgacagaatggttttatgtgaataatgatctgacaatacgagaagatatccaaggtataattatgcgccctatttggcaaagcttccgccttctgaggccgaaggttgaaatgaatgaagctgccgaagaatgccagatggccttcggcgcagtctgctctttcattggaacgagaaacttagtacaagagcatattgccttcatggtatggccgctcgcggagaaatgggaaatgccacaagatacttgtaaagaagccgacgaaggtggacttatcacggtgaagtacac

SEQ ID NO: 4418 - DNA, 150 bp, Zea mays
ttgcataattgagaaactgaaagcaagttataattcaatgaatctacaagaaaaacattggaaatggaatgggtaagtgatatagcacatttaccaagtcctttgaccagaccttgatttccattcccgaatgtgagagctcgttgggca

SEQ ID NO: 4419 - DNA, 474 bp, Zea mays
  unsure (1)..(474): unsure at all n locations
gtcacctgaggcatgcaagcttncatatggtctttctgcaaggaaggtcatcaaatctatcggagcaataggtttgaacccatatacaatttcgaaggggcataaattagttgtagaatgtgaaagggaaatgtgcccttggaccatttctaagtattttggtgattgagtgccaacacaagtgtttttgtgttcatctatgcaaagtggtggacaaagtgcaaatcatgtcaaaaggtatgtttctagacttaatacattgttttatggactaatgtattgtgtctaagtgctggaaacaggaaaaattgaactggaaatgagatggctctgttcagccaaagtcagctcggtctgggtgcaccggactgtccggtggtgcaccggacagtgtccggtgcgccagactggctctggcgaacttgctgctctcgggagttcgacggcggtgtacggctataaatcaccggactg

SEQ ID NO: 4420 - DNA, 449 bp, Zea mays
gtcaaactccataagaaggatggttctcaagcaataaatgaagaaatcaacatgaacaacgaaaaaggtgaaaatccaattaatcatgttgtttgtactgatcatctctccatgtcatttaagaccaaaaagggaaaaagaaaaaggatgtgcttcaagtgcaagaagataagccacctcatcgcgtcttgtccgtacaaagacacgaatgaagggacaaggagttgttttggatgcaacaataaggaccacaccatcacttcatgttctggcatgaagaatcaagggtgtgcatcctccaaggtgaccctcaccaaggaaaatgacaaacagcacgcgttatgtcatgttgagcgacagctttgctacaagtgtggtgagcaaggtcatctatccaatgtttgtataaaagtaagattactaagcaagtgaatgttctcaatcttatt

SEQ ID NO: 4421 - DNA, 461 bp, Zea mays
  unsure (1)..(461): unsure at all n locations
agcttgtatgccaattattcgaatncgttattggactantattttgtgacaacatnggctgtggttgtttaggtggattgggttggccaaaagaatcagatcgatgctggtatgtgttaattctgctcagtgtttcactttctggttttttggtagctcatatttttcagaacgtaaatgaaataatgattgctaatttggacctatattggcagctaaagctgctggagtgaagcatattgtgctggtgggatctatgggaggaacaaatcctaaccatccgctgaacagcatgggtaatggcaatatactggtaagctaaaatttggctcttccatacgcaactactattcacaaattgtagaagtgggatcttgattattgcatatatctgctatagggatggaagcgctcagcagaacagttatttgcacacagtggaatctcttatacaatcatat

SEQ ID NO: 4422 - DNA, 469 bp, Zea mays
  unsure (1)..(469): unsure at all n locations
ggaccttagaaactcaagctgccagtacctgtctaaacagcagcatctaccagcacagtttgttgttgctatacccataacttggtcgatcgcgngctggggattggatatgattgaacctttcacacaagctcaaggaggatacactcatgtgctggtggctgtcgacaaattcactaaatggatagagttcagacctattggctctctaacttcagctaaggcagtggaaatcatacaagatataactatttgggtcgggataccgaatagcatcataaccgacctatgatccaacttcaccagttcagaattcttcgatttctgtgagcaaaagagcattcacatcaaatatgcctcggtggcacatccaaaggccaactggcaagtggaaagagctcacgggatgatattataagcactcatacagaaagtcttggcaagaacgagaatatctcagaaaatggat

SEQ ID NO: 4423 - DNA, 463 bp, Zea mays
  unsure (1)..(463): unsure at all n locations
gagtcacctgcggcatgcaagcttctaaagggagaacacgtgataggtttgacttatttgcaattcgaaaaagatagaccttgtgcagcttgtcaagcaggtaaacaagtgggaggagcacatcacagcaagaatgtgatgaccacttcaagacccctggagctgctgcacatggacctcttcggacccgttgcctatctgagcataggagggagtaagtatggtctagttattgttgatgacttttcccgcttcacttgggtgttctttntgcaggataagtctgaaacccaagggtccctcaagcgcttcctcaggagagctcaaaatgagtttgagctcaaggtgaagaagataaggagcgacaacgggtccgagttcaagaaaccttcagtggaggagttccttgaggaggaagggatcaagcatgagttcttcgctccctacacaccacagcaaaatg

SEQ ID NO: 4424 - DNA, 407 bp, Zea mays
gaactcactggacccaagttaaaacactccgactcttgtttaacatcaatctcacggtacggcccccttgatagtactgttcggactctgcggtccaccacgcagcgagttctagcgggtgtccgcctggtgtaaaaaatctggcgcttcggcttcttacctgcaacactatataaacagacgagtatgtgtgaagttaccacagcattcactgctatttacactgttttgctgccaaaatttttaaccgtcgccgaagcttgtctgtctgaatcgaacgaaactccagtttgatacctgcctcagaggaagaaagtattaacgttccacaagttcataattaaatgtgcagagtgcgttctaccgccagggttgatcgtgaggaggactagactgaatcttcggag

SEQ ID NO: 4425 - DNA, 403 bp, Zea mays
  unsure (1)..(403): unsure at all n locations
catgaccgcttggaagcttcagaaacttgatattctttgccatgtagtggcatgtttcggtttccaagttatctgggcagcagtatagatattcatcttctccaccaccaaagatggttgctcccaatgtataccttagcattttgacaaaactttgcaattnggtaatctgttcttctatgagctccttaccagcgacgtggcgaataacatattcaggtggcctggtcacttgctcgccttctcgcatatgtgtttccttttgaaagtactccttttccttctctaccatcttcaaaacttttttatttctctcactgtcgacattttcaggaataatattctctttggnggtaatatcgtgggttttggcctgcgttggtacaccacagccagcacacct

SEQ ID NO: 4426 - DNA, 365 bp, Zea mays
  unsure (1)..(365): unsure at all n locations
gcaccgttggtgcctgtgccctcagacgccagaaccttcggacatatgcctgaaggtattcctcgtgatcctgagtgcactggaacagagcctgagcagtaaccggatttgtgtgaaatccttgaatgctggctaacaacaaatccttnaggttntggcatgaagtgatcgttcctggccgaagggaggaataccaggtttgagcaacacttttgacagccatgacgaaagatttggccatgactgaagcattgccaccatacgaagacacttgtgcgtcgtagctcatcatagacttgctttggatctgagtggccatcaaattcaaggagctgatgcggcttgtaagacgggggccctggtgt

SEQ ID NO: 4427 - DNA, 416 bp, Zea mays
  unsure (1)..(416): unsure at all n locations
agcttgtgaaggttcttcatccctacatgttctaagcggcgatgccacagccagcccatgctagtcttagctattaagcatgcatctagaccggcctcctcttttgcaaaatcaactaagtagagcttgccgtctaatacacccttaaaagctagtgaaccatcacttcttctaaagacagacacatctacatttgtaaatagacagttatatcccatatgacataattgactaacagatagcaagttatatccaagactctccactagaaacacattagagatagaatgctcattggagattgcaattttacctagcccttntaccttgccttgattcccgtcaccgaatataattgaatcgtgggaatccttattcttgacgtaggaggtgaacatcttcttctccccgcatat

SEQ ID NO: 4428 - DNA, 447 bp, Zea mays
  unsure (1)..(447): unsure at all n locations
gcatgaagaggaaccttcggtcatcacatgctggcagcttcattcgaagctggttcttcctacaagaccttcagcgacgaagcatagtcccaacagtagccccttcgcggtgctagatcgtttttcgtaacgagcttgattcgcgaaaaaagtatcttaagcttcgggaagccgaaggtccaaaaaacacctttcctgagctcgtngtcgagaaacgattcagtttccgagcgcatagcggtcccaccttgcagagatactatttagtctctgcggtccaccgcgcagcgggtgcaagcagctgttcgcctggtgtaaaaatcctggcgattcaccttcttacctgcgtcactatataaacagacgagtaggtgtgagagtaccacatcattcattgctattatcactgtttcgctgccaaacttttaaccatagccgaagcttgac

SEQ ID NO: 4429 - DNA, 445 bp, Zea mays
gtcacctgcggcatgcaagcttcagaaaacgaagccttcgcgtttattatttatttggagaacatctaacaaaagctgaaatagaagagcttaaagagtatgcccaatcctgtggatacaaacctggggcactcctcttcggaggcgttgatgacgagaaattagagtgtattcgggaccaaacaggggccaaagttatcagtactctgtccaagagtattggattcccgaagctagaaacagacatcagccgctaccgacgacaacatgtcgttggtagtttattttactccaacttcaaggtgaatgacttgtcccttaacctttattgcttctaataaaaacatgtctgacgaaggttgtgtttgtgtagagtatgttactgagcaaagccttgcaaatgcagcaagatcttgaagataaaaagcatgaaattataatccga

SEQ ID NO: 4430 - DNA, 450 bp, Zea mays
  unsure (1)..(450): unsure at all n locations
actcaagcnttgaagcacannatatcgaaattggtggggggtcacgatagaatgtattatatgcctgattgatcattntgcttaaaaaatgcaggaacctaaaaccagcacgaatacttttctagccggggtactggtaacccgacggataaatttatccacacgagtacgagtatgagtaagattatatattcgcgactttatatgagtaatccgatgagtagattttttctggacagatatggatatgagatgatactaaacgacgagtacatacccgtggccatctctagaagttatttgtaccaaattgactactgctgggccgagaattgaaacgtatcatgcccatatcacctgcttgccatagcctagcaaacgtatggctgataggaccgcgcataggacgttcatggagtagttagatttaggtagcccttcccattctcc

SEQ ID NO: 4431 - DNA, 437 bp, Zea mays
  unsure (1)..(437): unsure at all n locations
agcttaagaaaatagtacaaaatggacttatattgaatctaagncgcatttacacccctgaaataccaagaaccctaattggaaccctggaaaaccctaaacctaaaccctagggggctaagtgcaaaattagggcacttttggactaaagtttaaaaactatgatgctaaagcatataagtcatatggttcacaatcatgaagatttacaagctaaaccctgaattatggacttatttgcaaaaagaccttatttgagatctcaccctaagtctgaaattcagtgatatgggctcaactttggagccttgtaactttcaaattctaaggttttgccctaggtcaccacatcaatattgtagacctatgaaaggggaataactgtgcttaagagtgtaagcatagttgtcatgaagaatatgaagaaaactgcactc

SEQ ID NO: 4432 - DNA, 364 bp, Zea mays
ggacctatgatactaactgcaacctctctgaaagaaactcgggatacccttatcattctcatgtaaggctgcctatcaagaaagatggctaaggtaatatacatcacgccctgtggctcaagacgttcggatatgcttggacagtggacaccattgtgttttatacagctcacataatacattcacaacatggaagataatatacactgtaaagcagaagcaagccaacaggagcggtctatataaaaaatgaagggggctataacatatcaccactatagaaaacaaattgagtcataaagatccaagagaaaactgtgagaagattcgcgctcgcgtgtcaaggaccacagcagaataggat

SEQ ID NO: 4433 - DNA, 457 bp, Zea mays
ggatcttaagcgactgggctgcagctttaaggaaaacggattgttatttaatgtaactttcgaaaaagatagaccttgtgcagcttgtcaagcaggtaaacaagtgggaagctctcatcatgccaaaaatgtgatgacaacatcgagacccctggagttacttcatatggacctcttcggactcatcgcctatctaagtataggaggaagtaagtacggtcttgttatagttgatgatttttcccgcttcacttgggtattctttttgcaggataaatctgaacccaagggaccctctagcgcttcctaaggagagcccaaaacgagtttgagctcaaagtgaagaagataaggagcgacaatgggtccgagttcaagaacctttaagtggaggactatcttgaggaggaaggaatcaagcacgagttctccgctccctacacaccacaacaaaatg

SEQ ID NO: 4434 - DNA, 372 bp, Zea mays
  unsure (1)..(372): unsure at all n locations
acactatagannaactcagctggcatgaccattnttttttatgaatagaggcagctgactttatatttgttatgccaaaatataaagcacggtttcaattctctggtggttttaagggcctggattattntggaagaataaagaatgacaataatgttctgtgttcaaaccggctctccccataatggacctggctctcggcctggcgcaagatgaatcggccttctggatgctggcacgagcacaacggttagggtacttataggcgatcaagcctgaggggtaactatgggcccctgttttgtggtcacggctatattctgttttcaacggtaagttcacataaatatatttggaatgtgagagtgtgtg

SEQ ID NO: 4435 - DNA, 467 bp, Zea mays
actcagctatgaaatcttcatccatatgggctagtctgcggttctatagccaacccatgttagtcttagcaattaagcaagtgttgagttcagctctatcaaaatctatcaagtatagctgaccctctaatactcccttaaatgctattgaatcatcacttcttctaaagacagtaacacctacatcattgaatagacagttgtagcccatttgacataatggcgaaacggaaagcaaattgtaatctaaagaatctacaagaaaaacattggaaatggaatggtcaggtgatatagcaattttacccaatcctttgaccaaaccttggtttccatccccgaatgtgatagctcgttggggatcttggtttttctcgtaggaggagaacatctacttctccccagtcatgtgggttgtgcatccgctgtcgattatccaacttgatcctccggatgcataaacctac

SEQ ID NO: 4436 - DNA, 449 bp, Zea mays
  unsure (1)..(449): unsure at all n locations
agcttctgttcaatttaaaaacaatgttttaatattagtttcctggaaaaacagtttacactgaggcccctgngtttagactaaatcaactcgcacaaatctacccctgcgccactgttcccttgggtcgctgacagttcaaaaagccccctgaccttctcttcctctcacccgcagtccttcccccaatgtaaacagtacccgcgggaaagaaaagggtggcgcggcttaccggcggtgagataggtccagcgaagggcagggttggctcggggaggctctggcggtcacagcgaggtgcggctcgacggcggggatggccggaatcgctcggtccacgtgcgcaggcgggtgttctcatcggcggcgagtgtaccggccaaaccacggcgatctggttcaatccaagggcacggtgagctttcctgggtgacgtataagctatctgt

SEQ ID NO: 4437 - DNA, 446 bp, Zea mays
tcgcacctctgaactaactcggctgcatacttttcgttttggtcatagaatcccgacctgaagactttcccgactaatgtcttggatgctgcgtgtattccacattgcccagcatggacctcatctagaagttgcttcccggtagatgagagaatgcatttcatgaggacgcccgatgctccccttctgtacagagtctccccaatgagtgtgtagtgagctgactgtctagcgatgcgttcggctgcatttttgtcatctggttcctcttcattctttatatatctggtgatcggccttctccagtcatcagaatccgactctggttggttcacgatattacattcttctgcctgatccattgagatgcttggatgtgatatttcttgtacaaagactccaggtgggacctgatgtcgactggatcctaacttggacaatacatc

SEQ ID NO: 4438 - DNA, 206 bp, Zea mays
  unsure (1)..(206): unsure at all n locations
ctatatgcctcgggcccacggataagggcccagacattattgagcatgccccccttcactataaaaagagaggcttgcgacgttacacacacgcacaaccttaagacacaccgttaaactcacaaactcatacaagctcacaagcaatacatctcacagcggagcanggtagtacacttcggcgacccgaaccactctaaatcata

SEQ ID NO: 4439 - DNA, 462 bp, Zea mays
  unsure (1)..(462): unsure at all n locations
agcttgtgaagattcttcatcccaacatgggctattcttttatgccagagccaacccatgttagtcttagcaattaagcaagtgtcgagttcagctctatcaaaatctaccaagtatagctgaccctctaacactcccttaaatgctattgaatcatcacttcttctaaagacagtgacacctacatcagtgaatagacagttgtagcccattntgcataattgagatacagaaagcaaattgtagtctaatgaatcaacaagaaaaacattggaaatggaatggtcaggtgaaatagcaattttacccaatcctttgaccaaaccttgatttccatcctcgaatgtgatagctcgttggggatcttgattnttctcatatgaggagaacatcttcttctcccctgtcatgtggtttgtgcgcccgctgtcgatgatccaacttgagcccncggatgcataa

SEQ ID NO: 4440 - DNA, 460 bp, Zea mays
  unsure (1)..(460): unsure at all n locations
catatggagagttattttagtgcaacaggcctcctactacctgatcaggttattttacacagcactgcatcactaaatntattatgtggtaatttccgctaccttgattatcctaaagatcctgaggtgaaactgtgcctttttgatcgggcactgctgaatntgaaaaaggaaaacaaattgctcttacaatttaaagcctggaggatattatgtgaggagtgagcggatcctaacttctgagcaaaaggcttatgatagcagatatggtaaagatggaattggccccaaaaaactcattatatttatcttctgtatgaacaacagccttctacggaagatgtacaaggtatcatatttacaaacttacactcgtttacatgcaggctaagcaaaactgctgacaaaaaggagacagaatttgactggacgtctgaatatctttccttcaatctgagct

SEQ ID NO: 4441 - DNA, 456 bp, Zea mays
  unsure (1)..(456): unsure at all n locations
gctttacctggtgggttagtgtaggccattattttttaaangtctgttttagtccattgcatgctaaacattttttggttccacaaagaggacaaaaaaaacatcaatcggcactcttcttcgagcatattggtcttatcggcagaggcggatctacgtgtaatggaatgagagcataggccctcactcatttttgtgttgtaagtataaaagactagattttcagcgtatatcctcctctgttcaactcaattattatgctttggctttgacatttggcgcttgttgnttgaagtatatcctcactctcatttcattctgagcccggccctacttatcggaatagctgctcctttctggctttgctaggcctangcaatccagcaaactntttatcgcaacttattctgagaagatagactaaatatttccatttctctntctgcatgatctgca

SEQ ID NO: 4442 - DNA, 298 bp, Zea mays
gccgggaagcaagatggaaccaacatccacacaagaacattatgacgaccgacatgccgcttgaactacttcacatggatctattcgggccgattgcttacattagcatcagcgggagggagaactgcctacgtgtaagggaagataattctcgcctcacatgggtatgtattttacaggaagaacttcaaacccaagagaccttaaagggagtcttgatacaggctcataatgagttccgctcaatgaacaagacaataagaagcgacatcgtgaccgacgtcatgaactctcaaac

SEQ ID NO: 4443 - DNA, 292 bp, Zea mays
  unsure (1)..(292): unsure at all n locations
ccagcccatgtnagtcttagcagataagcatgtgtcgagctcacctctatcaaaatctactaagaatagccgaccctctaacacacccttaaatgctattgaatcatcacttcttctaaagacagtgacacctacatcaggaaagagacagttggagcccatttcgcataatcgagaaatagaaagcaaaatgcaatctaaagaacccacaagaaaaacattggaaaaagaatggccaggagaatatagctatttaccaagacctttgaccaaaccttgacctccatccccg

SEQ ID NO: 4444 - DNA, 439 bp, Zea mays
  unsure (1)..(439): unsure at all n locations
acttaatctggtttataattgntcgcaatattctaatgcaagcatacatccaagggcacacaagaaagtgatagcctaatcacactgcttattatactaatctattgaggttggttatttattaatactcagattagtagcacaattattagaaatggtaacatctcatcaaatttgtttttcgtccatatagtaacacttgttaaattgacgtggatcgaagctaatttcttactagacgtcaaccatttaatttactactgcactagttacttgtatatctctaattatataatctactaatatagggatcatgagataacactatcaatcatactcaagcaagacaagagagtagagcaatcaaccacaatcaacaagattaggacagcaacacaacatttactcgtttcagtcgtaactcacaggatattcatct

SEQ ID NO: 4445 - DNA, 447 bp, Zea mays
cttcatccccacatgtgctaaacggcgattccacttttagtccatgctagtcttagcaattaagcatgcatttagactggcctcctctttcgcaaaatcaactaaataaaggttgtcgtctaatgcacccttaaaagctaatgaaccatcacttcttctatagacagacacatctacatttgaataaacaattatatcccatattacaaagttgactcacagacaacaagttatatccaagcgactcaaccaagaacacattataaatagagtgctcggatgaaatagcaattttttctaaccctttcaccttgccttggttcccatcaccgaatatgattgaatcttggggatcgctgttcttgacgtaggaagagaacatcctcttttcctctggcatgtggtgtgtgcatccgctgtcgataatccagcttgagccccgcgatg

SEQ ID NO: 4446 - DNA, 276 bp, Zea mays
caattgcttgccattggccacggtgagttcggaccggactccgaagcggcaaacaatggtttgccaaaagaatttctgggccgtcttcgaaggttttgtaataccaccctcgcctcgatccatttgggaaaatatttgacagcgacgaaggtgaacttgaggttcccctgggccatgggtaggggcccgacaatgtccaggccccaacgctgtagaggccatgtgtgggcgattagcttcgtgaattgcgaaaggcttcccgagcgtggagaaaat

SEQ ID NO: 4447 - DNA, 161 bp, Zea mays
  unsure (1)..(161): unsure at all n locations
aaattannaagatagtgannttaagatgnttaaagtattgaatatattttataagaagtgatatttataggaaagaagttgagnnattgaataatgggaaaggaaagagtgttattaagaataaatgaaaaattggaaatggaaggtgggaaatagaattt

SEQ ID NO: 4448 - DNA, 445 bp, Zea mays
  unsure (1)..(445): unsure at all n locations
agctttaccttattaatttaatcattcacttattctattgtaatngctaaattgcatatcatgccatacatatatcttactctgtggggggtcttcatcttctgaaggtcctcaaaaacacgactaacatgttttctagtaaaatatactgtcataggaagcttccactttaagatgaaggtgtgcatggtatgaaaagcgtgatctggaagaaggatgaaccaactccgaaattgtggctggaaaagcttctgctcagcacaaggacggtgatggaggatgaaactgacctaaaagggaaaagactgcgtagtcctcgatagcttgccttttggctaacagtaaatgtcacggacatgaatgtaattttgctcacgctacgtcttgtgcctattaatagatgaacagtaacaccgtactattcacgttgacttgtaatcactca

SEQ ID NO: 4449 - DNA, 339 bp, Zea mays
  unsure (1)..(339): unsure at all n locations
gttatgcacactatntgtaacaccctacaaatttaaccatgtttattatccaaatacggcgtgccctatgggagatcggaggccggagatgtataaatctcgccgagatgataccgaccaattactagtttgccctggttggagaccggatgagtcttttcgagtgccagtagatctaagccattggatattaagattatggaagtctccttctatttatacctccctaatcctagcaggcacgtgctcccacccctagcagccatcaccctattgtgccttgtcccaagagacaacaggaagaacaagggagagaagagaggggagatgagggcatac

SEQ ID NO: 4450 - DNA, 461 bp, Zea mays
  unsure (1)..(461): unsure at all n locations
ttaagtcacctgcggcatgcaagcttgtcaatacctgtcaaagcaacagttctatttcagcacagcagctacagaccataccagtaacttggcctttcgcatgctggggattggatatgatcggacctttcaagaaagctcaaggaggttatacccacgtattggtggcaattgacaaattcactaaatggatagagttcaagcccattgcttctttaacctctgctaaggccgtggaattcatacaggatataatattcagattcgggataccaaacagcatcatcactgacttaggatccaacttcaccagctcagaattctttgacttctgcgagcaaaagagcattcagatcaaatacgcatctgtagcgcatccaagagccaacgggcaggttgagcgagccaacggaatgatatnggaggcactcangaaaagggtcttcgataagaatgaaaaa

SEQ ID NO: 4451 - DNA, 390 bp, Zea mays
tgagcagtaactggcttcgtctgaaacccttggtaactggtgatcagcattgtccttcagcttctgccatgatgtgattgttcctggccgaagagaggagtaccaagtttgtgcaacatttttgactgccatgacaaaagatttcgccatgactgcagtattgcctccatatgaagatatggtagcttcgtagctcatcaaaaactgcttcggatctgagtgcccgtcgtacatgggaagctgaggtggtttgtaagatggaggccaaggtgtagcctgcagttctgttgacagaggagaagcatcatcaaaagcaaaatttccatgatgggaatcatcataccatccatcatcattaaacaatcccccttgatgaagctgtctgtgctg

SEQ ID NO: 4452 - DNA, 437 bp, Zea mays
agcttctaagggagagcacattttgggtcttacaaatgttcattttgagaaagacaggatttgtagcgcatgccaagccggaaagcaagttgggactcatcatccacacaagaacattatgacaagtgacaggccactggagctccttcacatggatctattcggcccgatcgcttacataagcatcggcgggagtaagtactgtctagttattgtggatgattattctcgcttcacttgggtgttctttttgcaggacaaatctcatacccaagagaccttaaagggattcttgagacgggctcaaaatgagttcggcttaaggatcaagaaaattagaagcgacaatgggacggagttcaagaactctcaaattgaaggcttccttgaggaggagggcatcaagcatgagttctcttctccctacactccacaac

SEQ ID NO: 4453 - DNA, 269 bp, Zea mays
  unsure (1)..(269): unsure at all n locations
cttggaggcgncaattggttgtctacttggtgtaaactcctccttcttctcctacgttgccttaaaggccaccggttgcgcctcggatgtggaaggctcgtcaagctcgttgatcttcttggagcccttaatcatgcattcaaaactcacaaaattcccgataactttcctcggggtcattagtggatatctatgattcccacgaattaattgtacttgagtggggttaaggaaaactagagctcttaaaataaccttaaccacttcgt

SEQ ID NO: 4454 - DNA, 326 bp, Zea mays
  unsure (1)..(326): unsure at all n locations
ccgacttactgatatttattcttccacatacagcagcagaagagcccctggcgctagtggagttagggctgttaaatctatcagatactgcttcagctctatgaaggctttntgctgagctgatccccattgaaaaacttcggctgacttcagcacttcaaagaatggtaaaattctctctgctgatctggatataaatcgattcaaagatgccagtctttttgttagccgttgaacccctttcnttgtgcttggcggctccatccgaaggatagcttcgattgtatttggataagctgtgatccctcttgttgaaaccaaacaac

SEQ ID NO: 4455 - DNA, 461 bp, Zea mays
  unsure (1)..(461): unsure at all n locations
agctntgcaggagaaggagatgatatgttttcttggggtgcttgagagagtcaattcaattcttattaactcaagctatcaatcttcaatgatctatatatccatgattgacccaaagttgttttgaattattatgtctaaaactcatatcatttcggggaagatattgatgttataggaaatgaagaattatcctgtgcggaaaaatcaagacctacaacatggaggaaagccaaaggatggtaacaattatgcttttaagtgcaagtatcttaaattatcatgtgtcttgtgtagtcacatagaaaaggaagcacttcaaatgtctttaaaattatgtcacctttccttgaagaaattcctctcatatggtagattgcatattcatcatctctatactatggcaatctacatgctntaaattattgtaagcacctcatggcattgtttacactaattat

SEQ ID NO: 4456 - DNA, 450 bp, Zea mays
ttaccaaatggacgtgaagagtgccttcctcaatggatctttcaaagaagagggttatgttgatcaacctcctggctttgaacatagtgagtaccctaaccatgtgcatatactttctatgcgctttatgggctcaagcaaaccccaagagcatggtatgaatgccttagagattttcttatcactaatggcttcaaagatggaaaggcagaacctactttatttactaaaactcttgacaatgatttgtatgtatgccaaatttatgatgacaatattatatgttgggtcttactaacgaatctacatgtgaagaatttagtacgatcatgacaaacaaattctagatgtcttatgatggcggagctgaagtactcttttgtgatttcatgtgaaacaactcctagagggcacctttattagccatacgaattatattctagacattct

SEQ ID NO: 4457 - DNA, 337 bp, Zea mays
  unsure (1)..(337): unsure at all n locations
agctttgcnatctcattttaataataattttctaaacatacaacaaccaacgagtgtaaaaagcaacccatcttacactgcagctaagtttactccaacaatacaaatgtagaattgtggatattatagaatattatggaataaaaaatagtaacatcattttgaaggtgaatgtcttttgcctttataatttgtatcaatggacaaagtatagaaaatgagcgaaatacaagagtatcaattcatcatgtactaatttgtcaaaataaaccattacatgctcctaactcagctggagaactatgtcagtgagaacattaccatatagtcttagggg

SEQ ID NO: 4458 - DNA, 283 bp, Zea mays
atacaccctcagaagctagagaaccaacgtcttttctcaagacagagacatctacatttgttaaaagacagtgataccccatgttgcattattgactaacagatagcaaagtatatccaagagactctactaaaaacacattatagatagagtgctcattaaagaatgcaagtttgcctaacccttttaccttgccttgattcccatcaccgaatataatagaatcttgggaaaccctattcttgacggaggaggggaacatcttcttctcgcctgtcatatg

SEQ ID NO: 4459 - DNA, 419 bp, Zea mays
  unsure (1)..(419): unsure at all n locations
ccttcgagngcttcagaaaaagcaatcacgttacagtgaattgttggcgtcgctgagagaagaaattgggagatgtggtcatctggaccgtcacaacgatgctttgcgctacgctgtaaatgactctcactcgtcagtgttctggaagtttaagttctataaggaaactgggagagtagaagattgctggagctagtgtcttttgtgaacaggaacctttggtgtccaagtgacagacgagtggggtcaaacatggtcgagacttttgttttgatatatactcccgccatttcgtaatgggcattcatggccttggatctatctcgttcacaatgctagcttctacatacagatgggcacactaatatgcgtcctgctgtacctcacacgatatagcttctacagatgcaactcttttt

SEQ ID NO: 4460 - DNA, 474 bp, Zea mays
  unsure (1)..(474): unsure at all n locations
tgaaggaggttcaaactgaattagatacttatgcaattcttcatgttttagacaatgagaaagaaactcatgaanactacgggtgggcgttcgggttactctaaaatttcgggttgggtaattcgggttttgagaatcgatacccgaaattacaacgggttttgcaatacccgaaaattcgggtactctgaatttccggttcgggttcgggttcgggtattcccaaactattgtgtctgcttcataaaaacacatacaccctattagattagcataaaatatacgttgaataatgatatatatggacatataaaacacaagccatctacaatcacaagttatgcacacttacacatagttataaatgtacaaatcaataattaagcatgacatatgttcagaacacatgatagtttcggtaattctggtaccccgatgtgatacccgaattactcgaaataaattcgggttttg

SEQ ID NO: 4461 - DNA, 282 bp, Zea mays
cgagcgcacccaaggagcccacacctcttcagacacccggcggagccgagcagccccaggccacaaggaccctcccgcgcgaacaaaggggcccaacgccgcacgggacacacgccccccggcgaaacacaccggcacccgactcccgcacgggaggaggcggccccggcacagagaacccgcgcgcacaacacaagcggccacgggaaccggcagacccgcaaacaaaggggcgtcccaccccccaacgcaagacccccccaagatgggcgacccgccgaa

SEQ ID NO: 4462 - DNA, 442 bp, Zea mays
  unsure (1)..(442): unsure at all n locations
tanagccatggtaagtagcataggctaataatatacgatttttcttcttcctagctacgggtgcataggtttcaccaaaatccaaaccttcgacttgtgaataccccttggccacgagtcgagctttgttccttgtcaccacaccatgctcgtcttgtttgttgcggaagacccacttggttcctacaacattttgattatgacgtggaactaaatgccatacctcatttctagtgaagttgttgagctcctcttgcatcgccaccacccaatccggatcttggagtgcttcctctaccctgtgtggctcaatagaggaaacaaaagagtaatgctcacaaaaatgtgcaacacgagatctagtggttacccccttatgaatgtcgccgagtatggtgaccacagcgtgatctcgttggattgcttggtggactcttcggtg

SEQ ID NO: 4463 - DNA, 235 bp, Zea mays
  unsure (1)..(235): unsure at all n locations
ccagagccaacccacggnagccttagcaatnaagcaagcgccgagcccagctctatcaaaatctaccagatatagccgaccctccaacacccccgtaaaagcgacggaatcaacacttcgccgaaagacagcgacacctatatcagggaacagacagccgcagcccaacggacacaaacgagaaacagaaagcaagccggaatctaaagaacctaccagaaaaacaccggaaaca

SEQ ID NO: 4464 - DNA, 436 bp, Zea mays
  unsure (1)..(436): unsure at all n locations
taagcaccgcggctgcagctttgaggagaaggagatgatatgaattctttggtgcttgagggagttaattcaattcttaacaactcaagctatcaatcttcaaatgatctacatagtcaagattgacccaaggttacttcaatttattatattcaaaacccatatcatctcgggaagatattaatgttgtaggaaataaagaatcatcatgtgcggaaattcaaggcctacaacatggaggaaagtcaaaggatggtaacacttatgcttttaagtgcaagtatcttaaattatcttttcttatgtgtcttgggtagncacataggaaaaggaagcactgaagatgttttaaaattatgtcgccattctttgaagacattctctcatatggtagaatgcatattcttcatttctatattatggcaatatacatgct

SEQ ID NO: 4465 - DNA, 372 bp, Zea mays
  unsure (1)..(372): unsure at all n locations
atagtgaggagtacattttatatccctcanactatcccaaacacaaaattatcatgaatcatgctatgaaacctcacaatatttctcatcatgcattcatgtataaaaatgaggcttctagctctaggcataccactcatattaaaatgcctaaaaagaaaattcctactgtatcaaataaacacaatatttcattcaagacttttgatgcttcctatgtgctaacaaacaaatcatgtaaagtagttgccaactatgtatggggcaaacacaatagcccaaatacttgngtttgggtacccacagtgcttgtttctaatgtgaaaggacccaagaccgttctggtacctaagatcaaggccttaatttgtt

SEQ ID NO: 4466 - DNA, 374 bp, Zea mays
  unsure (1)..(374): unsure at all n locations
gggtctgcgatattgtgccacatgatctgagataatttgcctgattgtcatggaattccatagaacacgttttaatgagatatgttattcttttgcatgagacttcaaaatacagcagaattaccaaagctgaaagataatagtgattatgcatattaaccaatataccttcggtaaacatttaaagatatgttttcctataaatctcacatgtatatagaccaagtattctcaaaaagagataggtactcacatgcaacaaacacgccaaatcttatggtgtcgtcatacacaaagccctgggattttgttttctttagaagttgaacattgaantgactgtgcacacatgaacatatgtagacgatcccgtt

SEQ ID NO: 4467 - DNA, 329 bp, Zea mays
  unsure (1)..(329): unsure at all n locations
aacaagaaaccaagctgggaagccatcacaagnctatagaacaattatcaatatttaacaggccctcaagacgcaacaaagcgctcgagcagctgaatgtgttatagaccactgctccagcattagctcaaccggacattgaacaaccttctaatgcgtatagcgacacatcaagcaccggtctaggctgagttttaatgcaagaaagccgagttataaccgatgcttcaagacaattgcgccagcaagaggaacattatgcagctcatgacttagaattaaccaaccgggggcatgccctcaacaaatggcgccattaactgctggga

SEQ ID NO: 4468 - DNA, 461 bp, Zea mays
  unsure (1)..(461): unsure at all n locations
agctntctcccctctagcctttgcttcatgtcttcttcggtagatatcattcacaaaatccttgaatggtgattccattctgtcaaacagatagctgcagattgggtagaccttgtaaccgatacttacaacatactttagctcctcagagaaatagacacctataaacctactagttggaaatatgagcgtatcgtcactctgtttataaggtagaaatggcttgtgcatgtcagcagggcatattatgaacgctttaatgaaaccaaacatatccttcagctcaatcttggttttctttaacccaagattatttttccatctaggcttgcccgctggcatctctgataacatagaataggggtatagagaattcacatcgtaatacttcaaatgttcccccgtaggtagatatacatctgtatgatcgccgtaatatccactcctaatgaattgttctt

SEQ ID NO: 4469 - DNA, 363 bp, Zea mays
tgagcgtggacccacatcaccggaatagctctatcttgctcaccggagtacaagaactcgccggcgcacgtggaccggggaagcacctgcaccgttttccaattcgttgcgcgcatggcctctacggcaccccgtgaagctccttgtgccccttaattgaactataccgccgggggttggccggagcaggagccgtcgacgaccctcagcgcctgtgctcgtggccagggtagctccgaccaccttcgacgccgaccctgacaccgacgtgaccgtcgcgacctcccggacgtcactgaccaccccgccggaactctactgccggcgggaagccccaccgccgtaatctatgccgtgggtact

SEQ ID NO: 4470 - DNA, 379 bp, Zea mays
aaacaatgctaaacgtacaatatgtccccacttggacattattcaactactcaattcaaaatccataattggaggctcaatcataccattcaggtgctcccagactttttagaaagctatgaaaaattgtcttataattcatttataaacatatcaagttaattcaatgcatatcaagggcaaaagacacgagaaaggctctgctgtccaaaattggacagactcagagatcacacttaaaacatctgtaacttagcttatatatctccaacaaaagttatccaaaatttgtcgaagagattaaaaaaagtactacaactcctttatatttataataagtattccaagttaaattgggcaacaaggcagcttccaaatc

SEQ ID NO: 4471 - DNA, 372 bp, Zea mays
  unsure (1)..(372): unsure at all n locations
cagcgtatcaagcacggaaacaggtgggaggctctcatcacaccataaatgtgatgagcacatcaagaccctgggagatgcttcatatggacctcttcggacccgccgcctatctaagtataggaggaaagaagtatggtcttgctatagatgaagatttttcccgctacacttgggtattctttttgcaggagaaatctgaaacccaagggaccctcaagcgcttcctcaggagagcacataatgagtntgagctcaaggtgaagaagaaaaagagcgacaacgggtccgaagtcaagaaccttcaagaggaggagctccttgaggaggaggtgatcaagcacgagttctctgctcccacacacctaacca

SEQ ID NO: 4472 - DNA, 212 bp, Zea mays
cgacgacccacggtaaaaacaccccgggcaccacacggacgaaaaaaacaagggcaagcaccgaaggagacagaaaaccacccccagacggcaaagaacggcacgcgacaaaaaagaccggcagacagcggacagaccaccaaaaaggagcaaacaccaagcgacgagcaacacgcaccaacaccaaaaaaaaactgagagacacggaaaaa

SEQ ID NO: 4473 - DNA, 419 bp, Zea mays
  unsure (1)..(419): unsure at all n locations
agcttaagctccttgataataaaattacttcatctcgttnaaacaacgattaagaatgaatgtttgagaagttaaactaagtctgaaccagggtttaatgcatgaacatgctttctcttctttttatacaagatatgcaaggaatgtgggaagatttaggtacatgtataaataacattgaatagatttacccttttgtacctttacatagtgatgttctcttcattgtgcttngtccttagtcttattgaatttgcctaagacctgtactcaagacaatgtatggaaatatttcgcacaagagagagatgtacaactagtgatccttttctaagtcattgtttttagatatcaagtagatcacaaattgcataaatatatcatgaattctcctgtaacttagggatatcaagatagat

SEQ ID NO: 4474 - DNA, 304 bp, Zea mays
cacatcttggcgaggagagtgatctcgattgctcctctgtcgactccgactatgaaggactcgccgccaccgccttcaacaagtcatccctcttctccaacgagcgacacacatgccttatggcaagggagaagaaagtatgtactcgaaactctacttatgcttcaagtgaagacgaatctagcgatgatgatgaaatacattattcatgttaattaagggcctagaatgaaccaaggtagataaactaatgaattgatcgatgccttgaacgataagaataggcttttagaaaaaaacaaga

SEQ ID NO: 4475 - DNA, 475 bp, Zea mays
  unsure (1)..(475): unsure at all n locations
tcagcttgcaacaccatttgacatcttacattaaagttctgagatcaagaatnattagttcatttctcaacatgcaaaagcgggtcttatcaagtggcttagtgaaaatatccgctaattgatcttccgacctcactccttctaaaatgatatctcctttagcaacatgatctctaaggaagtgatgacgaatatcaatgtgcttggtgcgagagtgttgtacaggattattagcaattttaacagcactctcattatcacacaacaaaggtaccttttctagaactacgccatagtctagaagagtttgtttcatatacaaaatttgtgtgcaacaagcacctgcgacaatgtattccgcttctgcagttgacaaggcaacactgttttgctttctggatgtccatgaaactattgatctaccaagcagatggcatctcccagaagtacttttcctatcaattttgcaaccggc

SEQ ID NO: 4476 - DNA, 466 bp, Zea mays
  unsure (1)..(466): unsure at all n locations
agctctntcaccatattatcacggctatcttgagtttgttgagcatgacactttcccttcaattgagtcaagctcctttttagcctctcattttcttccttgagctctttattttcttgtgtgatagaaatatcactaattcctgaaatttctagctcaatggaagaatggcttgcttgataacaacaattgttagcacatggtaatatagtttctatttgagtacatgtgcatatgtgaggttggtatgatttcaaattagttaacacaacctcatgagccatttctaacatgatatgtgaatccataaatttattatgagagtacataagcatatcatgtntttcttgcaaagctacattntcaatatttatcttttctattgtgttcttgagcatagcanttntattttcaaatcgagcaatatatgatgaatgatgaacaactctaatttgctcaattgaaa

SEQ ID NO: 4477 - DNA, 446 bp, Zea mays
  unsure (1)..(446): unsure at all n locations
aaatactcaagctaatacccncagaacagactctctaatattggaagggttaggctcttatggttcaagatagagagggttacattttatatcctgagaaccatcctgagcataaaattaagaaaattcatgctagaaaaccttatactgtttctcatcatgcttatatgtacagcaatgaggcatctagctctaggcattcaactcatatcaaaatgcctaaaagatagtcaatgtatcaaatgaacattgcatttcatttaagacttgtgatgcatcttttgtgctaactaacaaatcaagtaaagtagttgccaaatatgttggggcaagcacaagaagtcaaagacttgtgtttgggtacccaaagagcttgtgtctaatgtcaaatgacctatgaccatttgtgtacctatgaacaaggcctaaatttgttttgaggttta

SEQ ID NO: 4478 - DNA, 470 bp, Zea mays
  unsure (1)..(470): unsure at all n locations
agcttgatggtacaattgagaagtacaatgtcttgcttgtatctaaaggctatactcaaaaaggagaagacttctttgatatttactcaattgttgctagaatgactactattcgagtattactctccttggctgcctcgtatggtcttcttgtctatcagatggatgtgaagacaacttttcttaatggagagttggacgaggaaatctatatgtaacggcctgatggatttgtagtaaagggtcaagaaagcaaagtgtgcaagttattaaaatctttgtatggtcttaagctagcaccaaagcagcgacatcagaagtttgacacgactctaacatctgcaggctttgccattaataaggcagacatgtgtgtatattattgctatggtgggggcgaaggagttatattgtgcctatatgttggtatatattgatattnggcacaaacattgatgtgatcaatgaag

SEQ ID NO: 4479 - DNA, 466 bp, Zea mays
  unsure (1)..(466): unsure at all n locations
gcttatatcttaattactggtttatactctttgttattaaatgtgattgggtacacaggcttgggaagaagcggcattcgccatacaacgcagacagagggtttcttcgacattgagctgaacgccagaggtgtttcttgacaagagatggctctccaatagttttacaattagcaccctaacaaagtaacacctgataagacacgatgtttttaatgcctttgtatatgccctaataaaccttggtagagcttaaggctttatttagaacttctagaactaatagttagctactaaaagttagtttattgggttctaaacaccctcaactaatacaataattaattgttagctaatcatagctaacaattagttaattaattggctcaacccaattaataatttattagctgagctctagatattccaaacagatatntaaaattatactatntaaatatatttg

SEQ ID NO: 4480 - DNA, 411 bp, Zea mays
  unsure (1)..(411): unsure at all n locations
ggacacataaaactcaagcttctaaagggagaacacatgataggttaactaaggttactcttcttatttanatagaccttgtgcagcttgtcaagcatgtaaacaagtgggaggagcgcatcacagcaagaatgtgatgaccacatcaagacccctggagctgctacatatggacctcttcggacccgtcgcctatctaagcataagaggaagtaattatggtttaagtaatggtgatgacttttcccgcttcacttgggtgttctttttgcaagataagtctgaaacccaagggaccctcaagcgcttcctatagagagctcaaaaccagtttgagctcaaggtgaagaagataatgagcgacaatgggtctgattcaagaaccttcagtggaggaattcttgaggggga

SEQ ID NO: 4481 - DNA, 351 bp, Zea mays
  unsure (1)..(351): unsure at all n locations
agcttcctccgtcgcctgtcgtcttgctcttatgttangctngcggctcgcgtggaagggctcatgacagggacgcgcgctcgtgaatgcattcaccaatgtttcaagtcacctcacaagcaaagcaaggggtgggtgataagagattatagctctctgatatgactggtgcactcagcacgatgtcaaaattcacaaatcgcgcgatgttttaccagtcgactatttctggaatgataatttgatctatcctacaaccgaaggagtaagttccattacgattcacctcaggcctggctcgttatacctaaactatatggattatgatgtattagggtgaactgaggagga

SEQ ID NO: 4482 - DNA, 192 bp, Zea mays
  unsure (1)..(192): unsure at all n locations
acacaaaaaccactncaaggaaaccatgtggacaacatatgtgtttctgagaaagacagggcggggagcgcatgacacgcagggaagcaagttggtggtcatcatccacacaagaacatcatgaggactgacaaaccactcgagctcctacacaaggacggatgcgacccagaagcttacataaacatcggc

SEQ ID NO: 4483 - DNA, 477 bp, Zea mays
ggatcttaagtcaccgcggctgcagcttatttgtaatgactatctacaaatggcttatgaaagctcagtcataataaaaaatgtttatcagtggagaagagaagaaccaagcatagaactactttcaaactaaataagcataaagcacatttcatgaatttgttgctttagcattgttcaacacatttcccctactctaagcacgaatagtctttccatgctatatgaaatcctatgaacaaacttgataaaacatttcatttaattcattctaggtaaactggagccatatcattgcttctatttgccataaagtaaatgcttttactcaatagcttatggctgatcaagccaaacattattcctataacttataaggcatacagagcttttatccagtaaattaaatgtctagacaatgtataacacttccttcgattgaaatacaagttcatcttggtttgtcctaagtcaaac

SEQ ID NO: 4484 - DNA, 366 bp, Zea mays
ctttcaaccttcccggcaacatcttgactcatgagaacaacaatgtgcccttgttcccaaagtatcttcatgcataaatatgctggatgaagaatcgcttctaaggcattaagcgtacctcgaccaatgatttcgttgtatggataccccatgtctgacatgtcaaagacaacttggacaattcttgcgttatggacgttaccgaaagtactgacattgttattttccaagtgtcaccatctgtctttctccaaaaccacacagagggtgctgtgcatcatatactatagcttctggctctagcatctgtctgaaagcctcttgcaagatgatgaacactactctgcctgtgtcaatcagaacatt

SEQ ID NO: 4485 - DNA, 364 bp, Zea mays
agcttctcctggacaagtgctgctcttactctctgattgcgaagctgccacatataataacaaaggagcccctggcgtatgtggacttaatgttgttagatctatcaaatactgtttcagctcttcaaaggccttctgctaaattggtccccattgaaagacttccgctgacttcaccacttcgaagaatgcgtaatctctctctgctgatctggatatgaatctattgagagatgccagccttcctgtcaatctttgagcccccttatttgtacctggtggctccattcgaagtatagcttctattttacttgggttggcctcaaattcctctgttgaaactaggcaaccacaaaattcccct

SEQ ID NO: 4486 - DNA, 414 bp, Zea mays
  unsure (1)..(414): unsure at all n locations
agcttgctattcaattaactggcttattaaatantttagaatatagcttaagttcttctggtgcaggtaatgactgcttcctccatgatctggaattctggatagcattcctcgctgaattgaaacctggattcttgatggggggcaacaataaacaaatgcatccacctaaactttagtgaacgcaagcctctccacaagtacaacagcaacaacgaattgttgttcatagcaagacgccaagactacccaaacatcactcaccaagtggagacgcgctgacagcaaggtttcttcgctcctctcgacaagtttagacccctctgcaaacggatcacgagaccatattaaaaaggcattaattagagataagagctcttccaggaagcgaggcattcttacaaactcataccg

SEQ ID NO: 4487 - DNA, 483 bp, Zea mays
  unsure (1)..(483): unsure at all n locations
tctaagtcacctgcccgcatgcaagcttgtgaagattcttcattccaacatgttctattcggcgatgccagagtcagcccatgttagtcttagcaattaagcaagtgtcaagtttagctctatcaaaatctactaagtatagctgaccttctaacactcccttaaatgctattgaatcatcacttcttctaaagacagtaacacctatatctgtaaaaagacagttatagcccattttacataattgcgaaactgaaagcaagttataatctaaagaatctacaagaaaaacattggaaatggagtggtcaggagatatagcaattttacccaatcctttgaccagaccttgatttccatccccgaatgtgatagctcgttggggatcttggtttttctcgtaggaggagaacatcttcttctcccctgtcatgtggtttgtgcacccgctatcgatgatccaacttgagcccncggatgcat

SEQ ID NO: 4488 - DNA, 332 bp, Zea mays
  unsure (1)..(332): unsure at all n locations
aagggtgtattggaacatgctgtctacagaaaaggggctggaaattatntnctnggggngggagnnnangnanangaaaaaanaannngngggccatnagtgaataaaattactgaatttaagcaacagatgatgcattcttttaatatgagtgatttgggtcttctcagctactacttgggcatggaggtcagacaaaaggaaaatgaaataacaatttgtcaaaaggcgtatgctgcaaggatagtaaatcactgtataatgacagattgtaacctcactgatacacctatggagcagagaatcaaacttaaagctgcaataaaagtgac

SEQ ID NO: 4489 - DNA, 404 bp, Zea mays
  unsure (1)..(404): unsure at all n locations
agcttctaagggagaacactgtgatgtgtctatccaatgttactttcgaaaaagatagaccttgtgcagctngttaagcaggtaaacaagtgggaggagcgcatcacagcaagaatgtgatgaccacgtcaagacctctggagttgctacatatggacctcttcggacccgtcgcctatctaagcataggaggaagtaagtatggactcattattgttgatgacttttccctcttcacttgggtattctttttgcaggataaatctgaaacccaagggaccctcaagcgcttcctaaagagagctcaaaacgagtttgagctcaaggtgaanaagataaagagcgacaatgggtccgagttcaacaaccttcagatggaggagttcctcgaggaggaatggatc

SEQ ID NO: 4490 - DNA, 361 bp, Zea mays
gaccataaaaccaaccgaaaaagaggatagatcattacattcttgtatatcgcttcagcccaaagctttctaggagtcctatgctcaatgagcatcgtcctagccacctcaacaaggatccaattttcgcatttaacaacaccattctattgagggatatatggagagggaaaatgatgatcaagtcccaaagaagcacacaaggtctcaaaaagagtgatcttgaattctatgccattgccactatgaatcgctcttatgacattcttaggaaaatcattctgcgactgaagaatcaaatctcaaacatgagtaaagccccatccttcatctccatgaaacacacccaagagtagtgaga

SEQ ID NO: 4491 - DNA, 317 bp, Zea mays
gtgggcgccaaaggcggtcacttgctctcaaaagctatgaatcaacaacaacgcaacacatatgttaatggtcaaagaccattgtccttcgaagcattatctcgctgacgatataatgatcttttgaccaacgtcacgaaggacataccttcctcattcccatatgtaagtgtaaatacaaacttatgaaccacagaaagagtccaaattaacctattaaatcatccaattattcatctcaccattatataagaatgaacaaacattgataatatcaaataacacttgtacctctcggcttgacacaagtgtaaaat

SEQ ID NO: 4492 - DNA, 435 bp, Zea mays
cttaaaactcactagagcgcgatggagcactgttgaaccttctttccttcgggcttgaatcaatatgtagcctttggttgtggaggtggtgccttgctccaaagtgacaatatgtttggagtctctgatcataagttcaaagctcacaaacttgccaattacctcctcaggagacatctgtgtatatctaggatcaccacggattaattgcacctaagtgggattacgaaaaagaagagatctaagaataaccttgaccatttcatggtcatcccacttggtgctcccgagggtgcggacttggctgaccattgacttgagctggttgtacattgcttgtggctcctctccttggttgaggacggatcgaccgatctctccctcgatcggttcgcgctaggtgattatggtcacctccgccccctcatgcgccat

SEQ ID NO: 4493 - DNA, 416 bp, Zea mays
agcttctcaatgtcagctactgcctacacctctctataatcgaaccataacattgatcacgaacaacacacacccattagtttatgattaagaaaaaagagacagtcatctcggagtccatcagcgacgacgtcgagagggagactgaagaactaatgtttctagcagaattttcaggcaaaataagaagtagctggaattgacaagggtgtaaaaatgttttccttacaaatatatcatgttggatagcttacgatagaaaagaatttgaactaatgataagtaattaaaatgatcacatggacaaatagtagctggtgaactcaccaaacctgaagctgagctgcatcgtgtccgcgtgaagaaatagagtccaatgcggatctcgactcgcgcctcccatagcggagcctgtg

SEQ ID NO: 4494 - DNA, 458 bp, Zea mays
  unsure (1)..(458): unsure at all n locations
tcgacaccacgtncagccaccaaggtacgtcctacccgctttttatcgagcagcatcacgccgtccacggtcggatccttcccacccaaaccgtgtctcgtcgcgctgcagacgcgtcgttcatggacagcctcccgaggcaggtgcgcgcgccggcggtgttcaagtgcgtgcgcgtgacgtccatcgaggacggcgaggactagtacgcgtaccaggcgacggtcaccatcaacggccacctcttcaaggggttcctgtacgaccagggccccgacgacgggcgccacgcggtcaccagcaacgacgactgcacggccggcggggtgcccaacatctccgagctccatctcggagcggcgtctggtttcggcgccggcaccggcacctcgatgtcgatggctcctcccacggagctgtactgtggcggtggcggaggacattatccggacatttct

SEQ ID NO: 4495 - DNA, 375 bp, Zea mays
gcccaatcgattgccagatcccgttcagcaagctcgtcttgaagatgtcggatgtcagctctcaactcatttatacgctgaccatcctcttcccacaccctatttctgtgacgtaactccgttcgaagctgctccacctgggcttctaggtctccaatggggtcattactgccgccgctgctctcctcatgccttggagccagctgatgcctaggcacgccaatcggtcaagtggacttacgcgcggtattcctcgtgcccatcgacatatctccataagtgcacacccggtctagaaggaatccattgcgaccatgatgtgcgagattactttcctgtccaactgtacatacatgggctattcacaggctcata

SEQ ID NO: 4496 - DNA, 344 bp, Zea mays
catttctgggcatgttgacaagagtcgcacggcaagagatccgaagcttgagaaatatctggacacaattcgaaggcccgaagcctctttccaaagagtctctgtccagaatattccaagaggggaaaatgagcatgctgatctgctagccaagtcagtggcacaggggcttcctctacctccggaagtaatttttgagacaataagagcaccttcgcgtgaactcctcgaaagagcagtgctcacaatatctcctggccatagtgaagaatggacgacgcaaattatatctctcctccaagggaacagactctccgaagacgaggggtgatacaaaagaatgg

SEQ ID NO: 4497 - DNA, 142 bp, Zea mays
  unsure (1)..(142): unsure at all n locations
cctgtttggagagatcatcattaattttattgtttgccgntcgcggtacataaaatactcagccagagctgctcccgtataaggagcgagatattgtaatgtagcgggtgaatccgccatttcagctactacggggacattt

SEQ ID NO: 4498 - DNA, 432 bp, Zea mays
taccgcatttgaagcacgaacgctttcccttgggctttgtctttcttggctattccttgcgacctttaagcgccgtcttgaatcttttgatgatgagggccatctctttatcattaagttcggccgcctcaatttgtgccaccctgctaggtagcgcctccttgcttcttgttgcctttagagcaaggggttgaagcttgttgatcggtccattcagggcgtcgacacgtatcttgcctccttgatcatcatccgcccgcttacgaatttttcgagtaccttctcgggcgtcatcttcgtgtacctgggattctcactaatatcgttcacgagatgaggattcaaaacggtaaatgaccttatcatttggcggacaacatcgtgatccagtcatcgcgtgctatcgtaactccttaattgttaaaaagatct

SEQ ID NO: 4499 - DNA, 383 bp, Zea mays
  unsure (1)..(383): unsure at all n locations
agctngtatcccctacatcaagcaccccggtgcattataatataagcctcatcctccctctgctggaagtagggccttcttagcccgaaccaggataaaccttgtgtttcatcttgcatcaatccatttgggcagggacacgcagcataaaattcactagtcggttgagggtcccccgggtccgaaacaccgacaggttgaaaccgccagaaccttaacggttgggtaacgtggctggcgcaccggactgttcggtgcgcccatcgacagcagcctaccccaacgatcgaattggtggttganctccctctcacatacttctaacagtactcatatatatcattttctatgtcacctatatattatacatatttttatttatt

SEQ ID NO: 4500 - DNA, 459 bp, Zea mays
  unsure (1)..(459): unsure at all n locations
actcagctgccactagctcattgaatacctctgatcatatctcttttatattctatgactaatgcggtttcaagtctatttcaaaccaagtcataggtatattgaaagggaattggagtcttcggcgaataaaaaggcttccactccgtaactcatacttcgccatcactccgagcaactctctcttctttgggggagaaatgagcatcaaggaaaaggacttcatccttgggggagagagtaaaagctcaaacgcaaaaggacccgatttcgtctttggtataatcttaactcatttacttatgaccaaaggggaagaaattaccagagggctctaatgattccgtttttggcgattcatgccataaagggggagaaatgagcccaaagcaaaatgaccgcaccaccaccaccanattcaaaaacttagtgctctccacaagtatttatcattttgga

SEQ ID NO: 4501 - DNA, 372 bp, Zea mays
  unsure (1)..(372): unsure at all n locations
actatagagcatacctttagnaaannggaagggtgcattttctaaggcatgctcantaattggagcaccaaaaagagctatgggaacattttgttgtttaattaacgctaggcgatcanggagagcatcaacattttnggggaaaaannnagggggaaagaaacatgctcaacggtggatgtagatgggttgcaagcatctaattcatcaatcttattatgtaacatggcattctcatttataagattggaaatagaatcattgcgaatatttaaaatcttagccttatcaattaaaatatcattgttaatcttaacgctagaaagggagtcatacaacttgtcaattttaaatcatacttacattatcatt

SEQ ID NO: 4502 - DNA, 380 bp, Zea mays
  unsure (1)..(380): unsure at all n locations
taagcccccgacgnccaatcagcaatgaagtctgctaacgcctgggactgaattgaggatctatgtacatagtcaatactgaattcgttaagctctgcaacccattttccaatccttccagaagcttctctggtcttcattatgcccttcagaggctgtgatgaaggaacaattatgtgatatgctcgaaaataatgacgaagcttcctggaggccattaacacagcatacaacaccttctccaattctgtatagttcttctttgataaacttagaacttcgaagacgaagtatactggggcccgctctgtgagtcggccatttagcttctcctgtacaagcaccgcactaattgcagaggtgagaagctgctacataca

SEQ ID NO: 4503 - DNA, 371 bp, Zea mays
  unsure (1)..(371): unsure at all n locations
aactcaagcccgaagggagacacaacgaggagaacatttgtttattttgagaaagacaggacttcgagcgcacgccaagcanggaagcaagntggcactcatcatccgcataagaacataatgacgaccgacaggccactggagctcctacatatggatctattcagcccgattgctgacataagcatcggcgggagtaagaaccgtctacatattgcggatgaaaattctcgctacacttgggtgttctgtgtgcaggaaaaagctcatacccaagaaaccttaaagggaccctcgagacgggctcacaaagagttccgctcaaggatcaacaaaataagaagcgaccacgggatggagttcaagaactc

SEQ ID NO: 4504 - DNA, 392 bp, Zea mays
ggacacaaaaaccagcttcaaggaaaccggaaagcaactttgttctttcataaaaagacccggcacatgtaagcaggaaacagggggaagctccatatgccgaaatggatgacacatcagacccctggagtacttcatatggacctctcggacccgtccctatctgacatagaggaacaagatgcgctcgtttagctgatatttcccgctcacttgggtattctatgtgcaggaaaatctgaacccaaggacctcaacgcttctgaaagagccaaacgatttgactcaagtgaaaataaagaacgacatggggcgagctcagaaccttcagtggggatatctgaggggaggaataacacgagtctcgtcccacacaccaacaaaagggggaa

SEQ ID NO: 4505 - DNA, 370 bp, Zea mays
agcttcttagggagaacacattctatgattaacaaatgttcattttgagaaagacagagtttatagtgcatgtcaagcaagaaagcaagttggagtccatcatccacacaagaacataatgacgactgacaggccgctcgagctactccacatggatttattcggcctgataacttacataagcatcgacgagagtaagtactgtttagtcattgtggatgattattctcgcttcacttgggtgttctttttgcagaaaaaatcacaaacctaagatacattaaaaggattcttgagacgggctcaaaacgagttcggattaaggataaaaaagattataagcgataatgggacggagttcaagaactca

SEQ ID NO: 4506 - DNA, 451 bp, Zea mays
atgatctgtatagatatgacagatatttctcatcttattatgacgccatattttaagggcatgaaccacaacagccaattccaggtcatgagttggataatgctcctcatgtcggcgcaactgtcttgaggcatacactataactcggccttcttgcatcaagacacaacctaaaccactgcctgatatgtcacaatacacataaaaaggcttttcaatgtccggttgagctaataccggagcagtggtcaataacaccttcagctgctcgaaggcttcattgcatcttgaagacaagttaaatttcgtatcgttcttcaataaacttgtgattggtttcacaagcttagaaaaatctggaataaattggcgggaataaccagccagtctaaggaagcttcgaacttgatgtacagtggttggtggtttcactccaaatatccttgacttt

SEQ ID NO: 4507 - DNA, 373 bp, Zea mays
  unsure (1)..(373): unsure at all n locations
gccatggtaagaagcatatgctctttaaatgcgaatngactcaagcctagctacgggtgcatagggttcaccgaaatccaaaccttcaacttgggagtatcccttggccacaagtcgagctttgttccttgtcaccacaccatgctcgtcttgcttggtgcggaaaacccatttggttcctacaacattttggctaggacgtggaactaaatgccatacctcattcctagagaagntgttgagctcctcttgcatcgccaccacccaatccgaatcttgaagtgcttcctctaccctgtgcggctcaatagaggaaacaaaagagtaatgttcacaaaaatgtgcaacacgagatctaatagttaccccctta

SEQ ID NO: 4508 - DNA, 419 bp, Zea mays
gacacttgaaactcagcttctggagctgctgccaaaatgaaggtgaactgcgctcctcttctgacactattttcttcggcacaccatgatagcggactatccgtgacatgtataactcagctaacgttgctccggtgtatgttgtcttcacaggtatgaaatgggccacctttgttaagcggtccacaaccacccagatggaatcatagccggcccgggtacgaggtatgccaactatgaaatacatcccgatctcatcccacttgcactgaggaatccgtaatggctgcaacaatccggcgggcctctgatgctctgctatggttctctgacagctatcacagatggcgacatattctgcgatctctcttttcatgccataccaccaaaaccttcgtgtgaaatcctggtacatcttc

SEQ ID NO: 4509 - DNA, 457 bp, Zea mays
  unsure (1)..(457): unsure at all n locations
gaccttaagtcacctgcggcatgcaagcttgtagactccgatggatggtgatgtttttataacttcatctcttgatttgtgaaggaatactcaaatggtctaagtgatcatttgagaggggaaaaaggttgaaaagacccgttcttattggactcttcaacgaggatgtaggttcttcggagtcgaacctcggaaaacaaatcatctatgtctttcgtgttgtacttgattgtgatttgtttcttcctccccctctctctaaagttctcttgcttgcgcttgatcttaaatcatttgtcttgctcctaaagtaattccacaatcattttgagaaacactagcaagaagaacttctctccctcactctaattaagtttcttctcattctaacgcctaaatggggcttgatatttngcatttagtgaaaaaatagggttttgccattcaccccctttgg

SEQ ID NO: 4510 - DNA, 390 bp, Zea mays
  unsure (1)..(390): unsure at all n locations
actcagctctngacattccagagataatacatggaatgctacatttatctaggactggagctgcttgatatatgggaatggagagactagagtttattgtggaacaacctgacatggcatgtgattcacgggaacattcacggaactgcctatcggtctttctttgtgatcctggtagtaccaaaaggttctcatcggcttgggggcaagccgaaacttaagaaggggggaatgtcagggattacagttgggcaatcgtgggcctcgggccttagcctggttgaatagtacacgggcatcttctacaagaggcagaaggaatagcgacaaggaaaggcagaacagatacacgaatcgcttcctccttcctagctgttggttcctatctct

SEQ ID NO: 4511 - DNA, 440 bp, Zea mays
  unsure (1)..(440): unsure at all n locations
agctngggagactcctccngtgcttatgttttccttttatagccccaaggcagctaggagccgttgaagatcaacaaggaaggctatccttgccttctgtcgagtggctcacggacagtccggtgcgccaccggacagtcactgtagacggtccggtgctgatctccttccttttctagcgcagacgaccgntgcacctccggtcagttggcgcaccggacactgtccggtgcacaccggacagtccggtgcctcctgccgaccgttggtgcgggccacgcgtcgcccgcggattgcgcggccgaccattgcgctggcgactgttggctcaccagacagtccgatgcaccaccggacagtccggtgaattatagccgtacgccgctggtgtttcctgagagcggccttttcaccggagtccagcctggcgcaccggacac

SEQ ID NO: 4512 - DNA, 289 bp, Zea mays
tttagccaccttacattgaaattttacattagaagtttaaagctccctaatgaattaaaatactctaaaatttaaagaagggaatctaaaccgatcctaaggacctgttcgttgtgtcggaatgcacctggaatcgatccagctaaacaaagtttatataaaatatagaatcactgcggttagttattggttccgacccacaaatccggtacaactaaacaaggcctaaatgttgttcaatctccccggatctattcttgtgtggatttctctgcaggtgtgccaaata

SEQ ID NO: 4513 - DNA, 360 bp, Zea mays
ctaaagggagaacactttacttgttttacccatgctcacttccaacaagatagacgctgtgcaggttgccaagcaggcaaacaagtgggaggagcacatcacagcaagaatgagatgaccacgtcaagacctctggagctgctgcatatggacctcttcggacccgacgcctatctgagcataggaggaagtaagtatgggctagatattgttgacgaccttacccgcttcactagggtgtaccttttgcaagataacgctgaaacccaagggaccctcaagcgctctctaaagagagctcaaaatgagtttgagctcaaagtgaaaaagataacgagcgacaacggcgccgaattcaag

SEQ ID NO: 4514 - DNA, 314 bp, Zea mays
aatccatgactaggggaggacccgcgcgttgcaacgggaacatattataacataataatcgatatacaaaacgtggtgtatattgttataaaaaatattccataatccatttggaatcctagccatacaaaaagtgtgggattttaatttagttgtttcactactccattgcaatcatcagcatcatgcagacttcgatatatgccacgatttgcatggttgcatcattgaagagcacgtgtcaaacctgcctgcagaagttccctcgtacattgtcagtcatcaagtacgcaccaccatacacgcctgcttaa

SEQ ID NO: 4515 - DNA, 460 bp, Zea mays
  unsure (1)..(460): unsure at all n locations
agctngccgcagttgtgacagccgtcgtcttgttcttgtttcttgttgccgacggcgccgccttgggcacctccacgggcaccaacctcagcatgtcctcgcgtcccggcctgggcgcctccacgcgccttgcgcggtttgccgcgtctgcggcctcgtgtcgaggaggactcccccttcttcttgtcaccctggcaggcctcccactgctcccgagtgagatgtagcttcccgccgatagtgataggctcagagggagcctgtggttcgtcgccatcgaccaccttgagacgacctatcgcttcttcgattgtcatcgtggagaggtctagcagagactcgatcgagcgagcaatctgcttgtacttctcagggatgcaacggaagagcttctcaacagctctctcctcatcgtaggtgtcgtcgccgaactgcaccatcttctgcaacagagtgttga

SEQ ID NO: 4516 - DNA, 476 bp, Zea mays
  unsure (1)..(476): unsure at all n locations
actcagcttgtacattgatcctaaagatgtgttgaggaaaaccaacttcagtatctcctatgcatttgcaacagccaatgatttccatatgcctctntcaataatcttatttcggtgatccttaatgattttttcttgaggtttgcagaagacttccatgttttcactttctgcatttgaatgtctgcatgatttttcaagatcacagaacccgctttctgaaactgcactcgttttggtttcacctagtatagcctgattattctaaaatgaaaaaaaacattattgacaaatatatgtctgcgtatcggctgttgatgttaaatgtataaattacttactggcagttcctgagaacatattgtgtcctttgtgacatcattatcattgttaatgttgttttgattaacaggcccaattctcttggcctgatctattttttctggttgaattaaatcaacgacttcctttagtgc

SEQ ID NO: 4517 - DNA, 452 bp, Zea mays
  unsure (1)..(452): unsure at all n locations
agcttccatcgataccgtcttagactgttgtaaatcatctgtaagtcttcgatgaagttttccgagttctccgttttgattaccacatcatctacgtaggcctccacacgcttgccccagtgatcggctaagcatgtttgaatggctctctgataagtcgctccagcgtttttgaggccgaacggcatggaggtataacagaaagcacaaaacggagtaatgaacgctgttttttcttcgtcttcctttgccaaactaatctgggggtatccggaatagcaatccaggaaagacagcacagaacatccagcggtggagtctaccacctgatctatcctcgggagcccgaagggatccttcggacagtgttngttgagatcagtatagtcgacgcacatgcgccaatccattttattctttttgagtacaagaacagggttggctaaccactc

SEQ ID NO: 4518 - DNA, 247 bp, Zea mays
aataagctaatccatcatatgcttacttctctattgtttagtgtgtggaatggaatgcggcgatctatcactaacccattccttatagtgagtgataatacgaggaatgaggtcatcccactacatctgaggaatgaacatatgatgtaccactcttaatttggataaatgattactcaaactaaacacgctaagacctcattagttcgatggaatccaactccactttaataatataatctagata

SEQ ID NO: 4519 - DNA, 165 bp, Zea mays
agcttatctggtggcggggatcctgcctgttttatttgtcagcggacggcggcacgctggacgggtctgtgacgaccactagaagatgaatgcccccaatttgatcccccgcagtggaaccttatttcttatgtacgaatggagacgggggaaccaacggcggcc

SEQ ID NO: 4520 - DNA, 370 bp, Zea mays
  unsure (1)..(370): unsure at all n locations
gagcttgagcatatgtgtttcttcagggatgttgcttgtctttttgtcgnacgggncaaaaacataagtggcagtagaatcttcttgagtaccatcgatctcgatatcctcatcgggatcctcatctgatatttttttgaaaacaatgagtaagacatgaatatttacataagccttgctaggataataataatcgaaaatagtacattgcgcagcgaataggtatcccctcgtctcatcatcgtcgtcttcgaatatgacaccctcatcgtcatcacctaaatggatcccagatgatgaagcacatggttagcaaactacatactatcgatgtcttgcatatccatataaacttggatagtaattacca

SEQ ID NO: 4521 - DNA, 382 bp, Zea mays
  unsure (1)..(382): unsure at all n locations
ttaaagcacaaancctncccccttgacatcaaacaccatatatccttcttttatcagaacatangangatgtccaaggacaccagggtgtctagggaaaaatacgactatcaaaaaaactccccttacttattgaacatatgcactatcaacatttaggtgagatacatatatgccaaaagaataatactccctttgtacctctaccatggttgagtgtacttcccaccttgaaagaatctgatctctcaagagcttcttcacacttgtgccttgatctgcatccttactttgtcttgttgcctagacaccaaacttataacaagttatgtatttggcaccaaaagaaacttccaatctcatgattatctgaagatagcatt

SEQ ID NO: 4522 - DNA, 400 bp, Zea mays
  unsure (1)..(400): unsure at all n locations
ctgcaagcttgtatgcaccccgaccctttaattattttggngacgngcggcaacgaaanggcgcgaaaccaccccaaacatgagcgcnggacctaaangaggggaatgggcatggccgcagcgaaaaacgaagaaanggctccggnggcaaaaactcgtgcttgtatgcaccccgacacccattttcggaatgggtaacgtgcggcaacgaaattgcgcgaaaccaccccaaacatgagttttggacctaaagcataggattgggcatcgtcgttgacaaaaacgaacaaatggttccggnggcaaaaactcgtgctttatgcacctcaacacccgttttctgaatgggtgacgttcggtaacgaaattgcgcgaaaccaccctaacatgtattttggac

SEQ ID NO: 4523 - DNA, 347 bp, Zea mays
  unsure (1)..(347): unsure at all n locations
caaacgacatgaacgcgccttaatgacacacttntgttgaaacaacggatgacgctgattcagccctgccttcaccatttgtgcacaaagcacacgccgtacaatgaggccctcataaagctctgcatcatctgcaccaaacagatctttgggagggaccctagtgcctgcgtcatcagccgcaagcaaagcaagtgaagctgcatccagatcactagcagaggaatacccaccatcggcgattaccaccaaaacacgctgaggaggacaatcacgccgcacgagaccatagccctagcagcgataacacagaacatatctaggtctacccgaggaggctactgaag

SEQ ID NO: 4524 - DNA, 398 bp, Zea mays
  unsure (1)..(398): unsure at all n locations
atgcacttacatngatgattgtttgccatggtattcaaaatgttatccataatggatatgacaaatctgagattcgggcaattaagatcagtcatgaccatcactaatgaattgtcatttccaactagttatggttggagtcaggaagttctacacacttctgacttgtgattaactgcacgtaagagttcccctatggttttagtacacgtgcatccatgaaagatttcccatgtgtatatattgggatgttttcccattctcaccaccgcagcgtacatttatgggcacatagaaagttggcgatctatgtgagaatacattcttcgtcaatcattaagtatctagaatctctgtgcgagaattctattacaacccatactgaagctcgaatcatg

SEQ ID NO: 4525 - DNA, 451 bp, Zea mays
  unsure (1)..(451): unsure at all n locations
tgtggaggaccagatcatcaaagcatataagtttctggttgagatgttgtcacccaagnnttgtngatgaagcacaagaagaccaatcaagaaaggaatccatgtgggaggttcgcaagagaaaggtttgcgtgttggcatcaatgcttcctcaataagctagctgccaagcgaaagccacaagcctgaagatgatctttgagtagctagaatcagcgtttgcaatcagcaaccagatgctccgccaggccagatcttgttgaagttccatctcctcgaagagttgcaaagtgaagatatgtggctgaagtaaagctatacccataacccttctaagccgaatctcgaggacgagattccttttaagtggtgtagatgtgtagcatcccacaaattcaaatcctgaattttctcaactcgctctaaatcaaaatgaattcaaattcattta

SEQ ID NO: 4526 - DNA, 346 bp, Zea mays
ggatagctctgatatttctccaagcaacatcatagagccgacttgggaaaccttgctggctgacgagcagctccagtttgaggagcacaaggagcggatgatccaggaggcgaaagcaaagttcttggccaacttcaaagtggacaagaacaacaaggtcgtccgacatcgggcgacggattcgggttctctccaacccacgccagatatccccaatgtaagtaataccaacgatatgcaatctcttagaaattatgtagaagatcagcgtgaacaaatgcacaacatcatagggggtatgcaaagcgatcttaaagactactacgtgcatttgataaatctagta

SEQ ID NO: 4527 - DNA, 414 bp, Zea mays
  unsure (1)..(414): unsure at all n locations
aactcagctggctccactgcaccagaggggatttattctctnttacatccatggaagtacaagagggagaccccactcggacaccctctggggctgggccatagtttgcgctacccacttgagccggatcatctccggcaataccctctggggctgggtcatggcttgcgctttccacccgagccgaatcatccccggcaacaccctcggaggctgggtaagtgtcaacatcatccttgaggaccaagttctctgcagtaaccgcctctaaggctgaaggtccctcacttacttccatgggaacaagacgatccaagtcagtttcctgaccctcaagaccgcgctccattgtcaatgaaggtgaggacgctgcccgggatgaccctcaaccccgcgtctagcacattagcacaa

SEQ ID NO: 4528 - DNA, 412 bp, Zea mays
  unsure (1)..(412): unsure at all n locations
ggtgaagggttcttcatccccacatgtgctaagcggcgatgccacagccagcccatgcaagtcttagccattaagcatgcatctagaccggcctcttcttttgcaaaatcaactaaataaagtttgtcgtctaatacacccttataagctagtgaaccatcactntttctaaagacagacacatcctatattgtaaacagacagttatatcccatattgcacaattgactaacagatagtaaattatatcctagtgactctactaaaaacacattagagatagagtgctcattagaaattgcaattttacctaacccttttaccttgccttgattcccatcaccgaatatgattgaatcttgggaatccttattcttgacgtaggaggtgaacatcttcttctcccccgtca

SEQ ID NO: 4529 - DNA, 443 bp, Zea mays
agccttaatagtcgggtattctttattatggcgtccattacccggttcaatcttcgtttcggctgggtaccgaaggctgcagtcatcaactgatcttctttcttggtataattaccaagtatttcattgcacattgtctcgatcatctctagccattctttgcaaggttttttgaattgtttctcaaacttaaagcgataggggagccgtacaagctcatgcttctttcccacttcttttctcttcggcattccccaaccactagaagttggatatgttctgtttgataagtactcttgcaccaagtccctagtactgatgtgccgagccaccactctaaattctactttcggcaattggcaaggggaccctaactacatgttgcacaagggtctagtcatgccgaagtcagcttcaaggactcataccatactatgaatttt

SEQ ID NO: 4530 - DNA, 310 bp, Zea mays
acggacccgcgtaagtagacacaattaatattatatgttgtgcaaatctacacaagaagctaacgaggaatccaagtcaggcaccaaggcttctgcaatgaaaggtgcaatgtgcagctttacttgctgacacacagactggtgtcagaattcctaaactgaaaaacgcccatctagctgaaacaacctcggcgttttttccagggataaaggagcgcatggagaaggacatcgatggagtactgaagatcccacgcaacgcgaaagtgaagctggaacagatggacagaaacgtatggacattaagcct

SEQ ID NO: 4531 - DNA, 364 bp, Zea mays
agcttgtgcttcggctagcttcttcttatcctgtgaagctcgccaagccctcggacccgaccggacttcaccggaggcccgagatcaacctcaccggacttcggtcttccgccgccgcgcgtggaccgagctatccagtgagtctccgcccaattcctttcgctcatatcttctctggcaccccgtggacctccctaacctatttgattgaactatctcgccgtgaccaggccggtctcctcgccgccgacgagcatccccgcctgcgcgcgtggaccgaccgactccggccatattcgacggcgttccgcacaccgttgtgatccccgcgaccttccctttattctcgaccacttcaccggaa

SEQ ID NO: 4532 - DNA, 206 bp, Zea mays
ttttttttttttaatgtaacgaacactccggatacgtaataatcagctgaggcaccctgtcaccctaagttgcctgattgccggcggcatacaaaaacatgttcttacgagaggtcttaaaaacgttcggccccgtgaggcccaagataacctctataaagagggggaacacgttcattaaattttatcatgaattgatagagtga

SEQ ID NO: 4533 - DNA, 453 bp, Zea mays
  unsure (1)..(453): unsure at all n locations
acctgcggcatgcaagcttcttcaccatgtgatcatggntatcttgatattgttgagcaacgcacttccctnttagttgtgtcaagctcattnttagcctctcantttcttccttgagctcttgatatgtatcatcatttgtttctgcaagttctagctcaaaagaagatttgcttgtcgacggacaacaagcattagcacatggtaatatagtattaatttgaatacatgtgcatgagtgaggttgttgggattttaagttttctatcacaacctcatgagcaatggttaatatgatatgatcatctctaagatcttcataagagcataggagcatatcatatntttcttgaaaagctagattttcaatnnttagctcttctacttggtccttaagcaaggtattcttatttaccaattgatctatacaatgtaaagcgttatcttgctcaa

SEQ ID NO: 4534 - DNA, 185 bp, Zea mays
gaatgctagagctcttcgaagtagttggaagatagaaaacttggatgactcgaatgcgagggcgggggggtatttataaccccaaccaccaaactagccgttaggaggaggccgctgacacatggcgcaccagacactacggggcaccacacgacagagtccaggtgccagcgccaacaccctgc

SEQ ID NO: 4535 - DNA, 429 bp, Zea mays
aacatagattttctatggataaactcaacacaagagatggcattagtagcacaagcactaagttcttatttagcaaccctttatatgtgaaagtcaaacgagttgctaaaatagagaaacctcataatatggactaaatttcccttgagccctcatgcacaatatattttgaatgacatggataatatgcatggttgttcaatgaagtttaaaaggctgatttaatccatattatggtgagtatctaatatggaagaatataatccagattaactagatagaaaatacgtcacactaatttggattggtgatcatatgataatattcattaatcttccaattggacctttatttcataatcaacaactgatgtgtatcctcaagtgcttcttcttccttagtggctacacaagtcacaaaagagataag

SEQ ID NO: 4536 - DNA, 427 bp, Zea mays
  unsure (1)..(427): unsure at all n locations
atagaaactcagctttgaagccgtcccccatggttngaaccccacacaagcttctnntttgctcattttcttcgcactttgttcaagcaccatggacttctgacaggctcggtacgatgtggaccaatctgtactgtgcttatgcctaaaacgcgattaccatggtctggcacatagtggcacaacctgttagctagtcagacctaaacgggtcgagcctaaacaagccgggccaaagacggattcgtgccgggttggtccgatctgtttggatttcaacatgtatagctagagatataggctaaaaaggctctaaaagggagagcgtctagtgaacgcaagtgggcaaaggtggctatcaaattatcaacaacaagacaaggagcgagggatggttgaaagcacagataccaatttcccattgctc

SEQ ID NO: 4537 - DNA, 377 bp, Zea mays
  unsure (1)..(377): unsure at all n locations
taatcaaatcaaacattacagttttcgaaatctgttctgacagtggacagaaaacatcaatcatcttataaaattcataactctcaaactatcaggtttattgtcatgaaaatttaacacaagtaagataaggaaattaactacaacttccttgtaaatgataaggactgattctaatctgaacttaagcaaacaattcactctctgaaatctgtacagaaattggacagattcagttactgaatttgtgaaaagcacaacttctaaacgatcagacctatgactgtcaaattttaacacgagcaagataataaatttatgtacaacttttctatatgatttttgtacaaaaaacatattntacttgactagattac

SEQ ID NO: 4538 - DNA, 444 bp, Zea mays
  unsure (1)..(444): unsure at all n locations
agcttcaacagaatgacagcgaagggtcncctttcttttatggcaggaatgcgctaacttatgttgatgatatcattgtaaaaagcacgaagcaagataatcacattgctgatctgcaggagaccttcgctaattttagacaggctggtttaaagctgaatccaaaaaaatgtgttttcggagtgaagaagggaaaatttcttggttgcctattttcaacaaagggaattgaggctaatccaagcaaaatcgaagctatacttcgaatggaaccaccaagtacaaagaagggggctcaaagattgacaggaaggctggcatctctcaacagattcatatctagatcagaagagagaaatttaccacttttcgaagtgctgaagtcagccgaagtttttcaatggggaccagtccagcagagagccttcgaagaactgaagcaat

SEQ ID NO: 4539 - DNA, 444 bp, Zea mays
  unsure (1)..(444): unsure at all n locations
agcttatggctctattgaatatcattattgtgaccaatatcaaattatttgatacaggtggaagtaatgatatgttgggtacaagtggaagtgtgcaacatagagttctaacaaaatgtaaagaaaagtcagcaatatcctctttccttcttgcagtcatacgccccgtagatgtttgcgatacaatcaaaactcaaataggaaaaacaaaacttgtaaccacaaaagtttctagaagcaactccgttaaaagaaacatattgcgataagatgtaccgataattttttgtcttcatagaaatgtgtctcagctnttcattgtctagggaaaaatttgaccgcatagagtgaataattagatgcgggcaaaaggacaaaccgacaaagtagtacatttagcactgcattacctaaatgttagaacatttggtaccactaccattt

SEQ ID NO: 4540 - DNA, 433 bp, Zea mays
  unsure (1)..(433): unsure at all n locations
ttctctccaactcttgtataggagcaaaccatattccttaattattactatncaccatcatatggtatttaattcctatatatattctacggcccanaacctcatggattaggcacaattgagctccaaaaacagctatatatactgaaatctcaatttcagttcactgttcccaatctgaaaactcaaaaagtctgacaaccccactttggatcaccttttctcttagttgtgtatagttccagggctgtcacacttaataaaagttgctctcctatacttattctacaatttgtatatagtggtcattaacccaaacctcatggattccaaactacaatagcccaaagtttgctccaaatgctgaaattcacgctctgaatatcactgtttgaaatccacaaattttgacagctgtactttggaccaggtt

SEQ ID NO: 4541 - DNA, 267 bp, Zea mays
atgagaggagctaacatattctcaaaaatatatctaagatcaggatattatcagctaaatatttgaactgaagatgtacctaacacaacctttaccacaagatacagactatatgagtttttggtcatgtcatttggactaactaatgcaccagcatacgttgtgaaattgatgaataaagtatttatggagtacctcgaccaggttgggggtgattcattgatgaatactagacactctcaaatgaagaacgcatgaagatcatat

SEQ ID NO: 4542 - DNA, 416 bp, Zea mays
  unsure (1)..(416): unsure at all n locations
caagcttggaaggttcttcatcctcacatgttctaaacggcgangccacagccagcccatgcaagtcttagcaattaagcatgcatctagactggcctcctcttttgcaaaatcaactaaataaagtttgtcatctagtacacccttaaaagctagtgaaccatcacaccttctaaagacagacacatctacatttgtgaatagacaattatatcccatattacaaagttgacttacatataacaaattatatccaagtgactcaactaaaaacacattataaatagagtgctcggatgaaatagcaatctttcctaaccctttcaccttgccttggttcccatcaccgaatatgattgaatcatgggaatccttgttcttgacgtaggaggtgaacatcttcttctccccatcat

SEQ ID NO: 4543 - DNA, 450 bp, Zea mays
  unsure (1)..(450): unsure at all n locations
agcttgacgagaactggncatggactgatttatatatagaatagaatgttacggcagttcgctcatcagtgtctctctgatctgatcttcagaagttcggatgcagcatgtccaatgcatggcgcgcttcacgcgtccatggccatgtggccagtttcatgcctcgttagtaccatgacgtgggaatgtgctggatcttcaacacgtccatgtcacgccctttaactgatgaaagtggtaaccctgtttcttttttgtcccctcgtgaagtgggcttgcaacgtccatatcatgaccttggtcggggtcgggcacgatctccaccggagaataattaatcttctttctttataactaatgatagaactattaaaatcaaaatacaagtttttttttaatagaaacttaatcaagaaaactgctccctcaatcacaacaaagaagtagagc

SEQ ID NO: 4544 - DNA, 460 bp, Zea mays
  unsure (1)..(460): unsure at all n locations
cctttaaactcagcttgtcttccgctgagcggctcgacagacagattttgtcgtcctgggtgagggagcctcgaccgggacggagagtcacctgagcttccgtcctgcccgagacatgcctcggacgaggcatgtgtttagtaagacccatgaaggggacctctggcgaggcaaggttttggtttcgtgccctcgaaggacatatcttgatggagttcttaggattttaagcacgttttaaggggcgtaatctgggtacccctaattatcgtacctgaaacataactttttaaagtttatatataagactatctcaaattcataggatgacagatggaaattaattctatatatgtacatgatacttntctaatgtacaacttatagatactcttttctttgattctctatagcataaatgtagtggatatctttctctctcatatttaagatattatac

SEQ ID NO: 4545 - DNA, 452 bp, Zea mays
  unsure (1)..(452): unsure at all n locations
gtcgttcctaaggggatgcatagcttttatccacctaagtagaggtgcagaaactccaaaatcgttcctaaggtgatgcagagctaaaataccaccttagtaaaggtgaagaagctccaaagtcgtttctaaggggatgcaaagctaaactccaaagtcattcctacgggtatgcagagctaaaataccacctagtaaaggtgaagagactccaaggtcattcctaagggatctaaagtcttattatgaaatgttttctatcatcatttttgcttaaacatcttttgcatcatatcattgcatcatcctgcatcataggatcatgcattatttcgcgtcattgaaagggaaattgggttaaccatttcctataattaattttggtggttgatgatcaacacanacacatggactaactattttgtctagaattcatgtattacaggtgcata

SEQ ID NO: 4546 - DNA, 453 bp, Zea mays
  unsure (1)..(453): unsure at all n locations
caagcacctgggctgcagctcttaccatgttcaggtatcttgttgtgtttacatgacactntatcctcaaattcctcatgttccttcttagttttccaacttcgtccttgagattttcttcttttgaaattgaaacatttatgtttcctgaaatttctagctcaatggaacattggctttcttgaaagcaacaaggattagcacatggtaatatattttcaaatngaacacatgtacatctgtgaggttggtaataaagaatttaaactagtaatcacaacctcatgagcaatatctaacattatatgattattcattaatttttcatgagggccaagcaacatatcatgtttgtctagtaaagttatatttntcaaatttagcttttctactaggtccttgagcatgacggtctcattctcaacctgagcagaacatgataaagcatttaat

SEQ ID NO: 4547 - DNA, 295 bp, Zea mays
aaccacccggcgttgaagacagtaaggatcctaaccatgactactagctctctaaggggctctaagggctcaagcaagccccaagagcatggcatgaatgccctacagatatcatagtgcagaaggattccaagtcggaaaggccgatcctacactctctactaaaactcttgaaatgacttgttggatgccaacactatgatgatgatattatatttgggtctactaacgagactacatgtgaagagcttagtaggactatgacacacaaagtccgagatgtctatgatggggg

SEQ ID NO: 4548 - DNA, 394 bp, Zea mays
  unsure (1)..(394): unsure at all n locations
accttatacggttttgttgtgtgtaagatgatgatgtcnaaaattaataatccgaagcagattccgaaggccgctgaagctgtttttaggcctgcctgcgtaaatcttttagaggcatttgtattatctctgtaaaagacattgtaatcgagaattgaacattactctgtatattngtccataccttgtaatatatttttaccttttcttccatgtgtaaattgctttgctgtggatgaaacttgtagcttttgagccgaaggcgaaaaacaccttctcttcttttcgtatacaatgaagcatatcttcgcttcttcatgctcatcgaagcattggtatcagagctgaagtatctgtttgtgccttatgttatgatgatgatgatcctaccaat

SEQ ID NO: 4549 - DNA, 322 bp, Zea mays
  unsure (1)..(322): unsure at all n locations
gcaagcttcaaagcgcagactgtttcttattttctgaagctgaagctgcaaagagccaggccgagaccgaagctgggcctttaaagcccgccaaggagaaatccttggaaaccggggaagaggaaactaaaaaagaagttgcagaacaaatgttgcctgaaacaattgctactcctactacccaagcggttttcgaagttcttgattatattgtaccacacgcttcgggaaanaggttgtctgataaagaaaaactagaagctcaatactatgcccagatactgaaatatccaaagggggcattgatattcaacgacagcgg

SEQ ID NO: 4550 - DNA, 403 bp, Zea mays
  unsure (1)..(403): unsure at all n locations
ttgacacacttgcacatataggaagggtatgggtccaagtatctttgatatatattagcgactttgaagtgcaaatgacaataatttcacccctcccgattcctttacggagatgtggtaagttgtttatggcttaatgctcgatataatttatttctgaaaatctgatattgttttattaatgcggntgatatcgctggtcatttgtgagaatgaagttgtactatgcttgtgatatacaagatgcctatgttgcttcaccatgttttcatggtagagtttattacaaaatatcgtatatatgcttgactaggatgttctaaaacgagtgtgaattgtgtgtttggggacaaggaatcatcaattaattaagctgtgagtggctggggaaactcccctatct

SEQ ID NO: 4551 - DNA, 455 bp, Zea mays
  unsure (1)..(455): unsure at all n locations
agcttatcaaatggacgtgaagagtgtctttttcaatggacacatcaaggaagaggtctatgttgagcaaactcctggctttgaagatagtgagtaccctaaccatgtttacaaactctcaaatgtgctttatgggctcaagcaagccccaagagcatggtatgaatgcctgcgagatttccttatcactaagggcttcaaagtcggtaaagccaatcctactctcttcactaaaactattgcaaaagacttgtttatatgccaaatctatgttcatgatattatatttgggtctactaataagtcaacttgtgaagagtttagtaggatcatgatacaaaaatttgagatgtctacaaactctcatgttcctactaatcagtagatgtagaaggttngcaagtatttgaaatagtgagtcccttaccatgttacaaactctcaaattgctttat

SEQ ID NO: 4552 - DNA, 454 bp, Zea mays
  unsure (1)..(454): unsure at all n locations
tctcagcttgacagatgtganagcacttatgagagaacaatttgtttctatttatgatactaaaaataatttgagtaattctactaatgccatgcctttatataaatctgagttgcctttgttacaagaggattgtcttgttgttccttgtgataaagaagacttttgtgatgatattactattatttctatgccacaactagagaacaaacttgatgttgttgcttctgatcctattaattgtgccaaaattagaacattcaatcctataactggcgtgcaggatgagctgaaattgttatcttctttaaatactttaggctatattaaatttgatgttctatgtaatctaaataatttagaggagaaactttcttgtagtgctgatttgccatggctatctaaatatacatatcatgttattggaagatataattggacacgagaatatatg

SEQ ID NO: 4553 - DNA, 438 bp, Zea mays
agcttctaaagggagaacacgtaattggtttttatttacgttcaattcgaaaaagatagaccttgtgcagcttgtcaagcaggtaaacaagtgggaggaacacatcacagcaagaatgtgatgaccacctcaagaccactggagctgctgcatatggacctcttcagacccgtcgcctatctgagcataagaggaagtaagtatggtctagttattgttgatgacttttcccgcttcacttgggtgttctttttgcaggataagtctgaaactcaagggaccctcaagcgcttcctcaggagagcacaaaatgagtttgagctcaaagtaaagaagataaggagcgacaacgggtccgagttcaagaaccttcaagtagaggagttccttgaagaggaagggatcaagcacgagttctccgctcctacacaccacatc

SEQ ID NO: 4554 - DNA, 464 bp, Zea mays
ggacctttaatctcagcttatgttttctcgggactcattttcttcatgatattctacacatagagaattgaaaatggtattagtctcaaaacttggattattagtaacctccccttgaaagtgtgcatacaagttttgaatacttgtaggagacatgcactctgattttgagatcaagaggggtgaattatctataatccgagcattggcacatataagtcaaaatgacaccatttggagaatatcactagtaggatataaactttgaagcattagtgtcatttacttagaaaagttaaataagctatgtgtcgtgcttaactaaacattttagaccatgtaggtttgctcaagaatatgaattaataacgagcactcctaccatatgattgacctagtatgcatgtagttaatatcacaagtaaatatcacatgtaaaacgacgcacatgttatgtaaaaaat

SEQ ID NO: 4555 - DNA, 313 bp, Zea mays
aaactcctactgcatcaaatgatcctaacatttcatttaagactttcgatgcatcatatgtgcttactaacaaatcaagcaaaatagttgccaaatatgttgggggaaaacacaaaggttcaaaaacttgtgtttgggtacccaaagggctttgttctaacatcaaaagacccaagactgtttgggtacctcaaaacaaggcctaaatttgttttttaagtttatgcctctggtggttcaagttggataatcgatggcggctgcaccaaccacatgacaagggagaaaaggatgttctcctcctatgagaaaa

SEQ ID NO: 4556 - DNA, 411 bp, Zea mays
  unsure (1)..(411): unsure at all n locations
gctaccaccatgcatcctgtgtgtggatgcgatcccgcatgaacgtccatggaagtacaagagggagaccccgctcggacacccttgggggctgggtcacgggttgcgctgcccacttgaatcggatcatctcccgcagtaccctctggggctgggcaatggcttgcactttccacccgagccgagtatccccggaacatcctcgggggctgggcaagtgtcaacaccgcccttggggaccaagttctctgcaatagccgcctctaaggctgatggaccctcagttacttccatgggaccaagatgatccaagtcagtctcctgacccttaagaccgcgttctaaggtcgatgaggcacnggatgacctcacccagcatcgagcacattagcacaaaccctcatcacacca

SEQ ID NO: 4557 - DNA, 407 bp, Zea mays
  unsure (1)..(407): unsure at all n locations
agcttcatgctntctgagaacttgtttgtttatcttctgacaaacgtctaattaagcttgtgcggcttcgtctcataagaactgaaatggctagagtgaggtctactgccataatagcacatgaaggagaagaagcctgagcttctaagacggaccctatcttataaatgatgaaacgttctgggttagttgcacaagaagaaaaggagtcagttcctatataatatgttgttgttgccgaagccgaaccaactacttccgaagctgacagcgtaacaaagatgatgatggcattttaagtccgagtaaacccacccatattgatgttgaaaatccatggttaagcggaagactggttctatgaagaattatgatatttgagagatgatgataactagtctgtttgc

SEQ ID NO: 4558 - DNA, 445 bp, Zea mays
tgagggattaaaggcatcacgctgatggaggagcttgactttaacttcgtcgtggccaacacagtgattatctagaccctcctctaaggatagcaatcagggacaacattatgagttgtttactatagagaattataagaactctctccttgctcattcacagagacaactcgatgtgagaataccgagttgggtatagggacaaactgacttagaggccactgagattactgattctttggtgcgcccatggagggtacctcaacacatagctgcgatgccccgtaagggaaggatttggctacgacgaccatccagacgagattgagccttccaagcttccagattgttcgccaccacagttctttcaaccacaagacttgtatattatttatattatggtcttgtatgaactaaacatatttttatagctatggacaattat

SEQ ID NO: 4559 - DNA, 451 bp, Zea mays
  unsure (1)..(451): unsure at all n locations
ngaaatgcattggtctcgtatcttacctggcctagctctgggtcctgaactacagtaccattgcagcagaattccttcttcagatccttgaggatcttgttataactgaacttctttttcagaacctggactgtagtcagactctatctgcccgtgcgctgctggatgcgcacatgcacataatccttcgtttcaggaccaacaccaaaagtctcagcatttgccttagcaaacggatctatcaaagatgatgccataccatctgatgcaaacagaacactaataagcatgttcaagatgaacttcgtgtgtatgatgttatcaatctattcaggaatactcttcaggaagctggaagatgctatgtattatgtaaaaccacaatataaaaaaaaacatggcatcatgaattgagaaagagccataccacaggcagatggaagctggacgt

SEQ ID NO: 4560 - DNA, 414 bp, Zea mays
ctaagcttatacaggaggatagaggcaagagctcgtccatatgtcatgatattatgagagttgtacaagcatggagtttgtgctccgctactcaagtgtttatccagaaccaaaggtatagagttgatgaaagaaatacatgcaggcctgtgtggatctcacattggatctatgccgttacttggaaaaattttctgctcaagattgtattggccgaatgcagcttcggatgcagcggaattaatccaaaagtgcgaaagttgtcagaaatgtgcaagagatcaaaaacaaccttcgtccttaacacagctcatacaacccatttggccattgcaaaggtggggccttgacttgttagatccgttaccaccgtgccaagggaacctaagatatgttgtagtggccgaggaatat

SEQ ID NO: 4561 - DNA, 303 bp, Zea mays
cttggaatttcgctctacccacaaccaacaagaaaagcaccagtcaccaatccaaaggtatttgagcatgccattgcaaatcccacaataccaccattcctgtcaagaacaagtattttatgtcaaacgccctactagatacatgtataacagacagctggtttcagaagaaatatactcactgggatgaaagcaaagcatcattcactgggaataaaggccgtacctcgatagaaccactgattatgtttattcatctcatgaaccaaatgtgattgtgcgacactaatctatgcactaaac

SEQ ID NO: 4562 - DNA, 234 bp, Zea mays
  unsure (1)..(234): unsure at all n locations
tgagtgaacangctaccgaccagacaacgggtgtgtgctattatagagatgtttgccgaccaagggaggcgctatctactaccgacttgcttacagcacaacagcactggcgcatgaccaagtatctctgcagtccaaagatgttaatactcgatagggaccacctacgggcattaacaaccactattatctatctctttacctcaactaaaacaatgtgaaaaacctgtatat

SEQ ID NO: 4563 - DNA, 446 bp, Zea mays
  unsure (1)..(446): unsure at all n locations
cgcaaagtatctagatgcagtctgaaggatggaagcctcttttgaaggattttctgtaaaaaatatctcaaggggagagaacgagcatgcagacttattagctaaatcactggcacatgggctccctttaccttcggaagtattttttgaaacaataaaagcaccttcggtcgagctcatggaaagagtagtgctcacaatttcacatgtacatagttaagattagatgactgaaattgtatccttcctccagggcaactgtttttctaatgatgaagcttacaacaaaagaatggaggcaaggataaggccatatgtcataatagaaggggaattgtacaagcatggagttttctctccaatgctaaaatgcttgtctagagtcgaaggacaagaactaatgaaggagatacatgcangaatatgcggagcccacattgtgtcta

SEQ ID NO: 4564 - DNA, 418 bp, Zea mays
  unsure (1)..(418): unsure at all n locations
tcacgggctactggcggagctagccgaagcactgtctttttcataggatggctggagtgggctggccacngtggccgaagctctggcggcaatggcgggtggaattgaactcgccggagctaatggaaagtggctggtccgtgagggtgagtgcggggcgaaatggggcgcgcctgggaaggctttatatgcaccgcgcggtgcacaggcggtcgtggaccggcgagtgcacgcgggcgtgcactgtgaggcgcggtgcgcgaacaggcgtgaaccgggggtgtcagccacggtcgaacacgtgttcccgttgcctctgcccctgtcaagcgccgattgagagcacatcttctcgaatatgtgcaagatcgctatgaaagatntgttcaccagaccaagctttgtcttttgtgatgga

SEQ ID NO: 4565 - DNA, 364 bp, Zea mays
  unsure (1)..(364): unsure at all n locations
tgaagccatggaagtagcatatgcaagtaatatatgaattgactcaagcctagctacgggtgcatagggttcaccaaaatccaaaccttcgacttgtgaatatccctcggccacaagtcgagctctgttccttgtcaccacaccatgctcatcttgcttgttgcggaagacccacttagctcctacaacattttgattatgacgtggaactaaatgccatacctcattcctcgtgaagttgttgagttcctcttgcatcgccaacacccaatctgaatcctttaatgtgtcttctaccttgtatggctcaatagaagacacaanagagtaatgttcacaaaaatgagcaacacaagatcgagtg

SEQ ID NO: 4566 - DNA, 440 bp, Zea mays
  unsure (1)..(440): unsure at all n locations
tgtcaattcttatcaaagcaacaacatttaccagctcatcttctgcagaccatacccgtaacatggccatgtgtgtgctggggactggacatgattgaacccttcaagaaagctcagggaggatacactcacgtgttggtcgccattgacaaattcaccaaatggatagaatacaaacccattgcttctcgaacttcatccaaggcagtggaattcatacaagatataatatttaggtttgggataccgaatagcatcataaccgacctgagatctaatttcactagctctaaattctttgatttctgcgaacaacggagcattcagatcaaatatgcctctatagcgcatccaagagccaatggccaagtggaaagggctaatggaatgatactggaagcacttangataaaagtcttctactataatgaaaagtttgc

SEQ ID NO: 4567 - DNA, 334 bp, Zea mays
tatcaatgttgtacttggtgcgtccaggaagttgcgccactattttcatgcacaaagggttatgtggtgacctcctacccgttaagggccattctccacaactctaacgccacatgcaacattgccaagtgggccgcggaacttgctgagttccaactggacttccagcctcgccacgctgtcaagagccaggtcctcgctgacttcatcatggagtggaccctatccccgagcgctcctgggggtccggatcccaattcggatcccacacctgcggagcccaaggctccggtcttcaccgagccccactggacgctcttcttcgacggatctg

SEQ ID NO: 4568 - DNA, 453 bp, Zea mays
  unsure (1)..(453): unsure at all n locations
tgtgaagattcttcatcccaacatgtgctagtcggcgatgcctgtatccacccatgttagtcttagcaattaagcaagtgtcaagttcagctctatcaaaatctaccaagtatagttgaccctctaacactcccttaaatgctattgaatcatcacttcttctaaagacagtgacacctatatcagtgaaaagacagttgtagcccattttgcataattgagatacggaaagcaaattgtaatctagagaatctacaagataaacattggaaatggaatgatcaggggatatagcaattttacccaaacctttgaccaaaccttgatttccatccccgaatgtgatagctcgttggggatcttcgattttctcatatgaggagaacatnttcttctcccctatcatcgtggttgtgcacccgctgtcgatgatccaacttgagcncccggatg

SEQ ID NO: 4569 - DNA, 440 bp, Zea mays
  unsure (1)..(440): unsure at all n locations
tgcagcattcaccagcgagacgtcgttcaccgacgagcaacgactgcggccctggcgggacngcgggtggcggacacacacgcctggagctttgctgcggcgccgcgccacgcgcagaccttgggaaagccgaccaaaggcttgttctctggtgaactgctacaggcgggcggggcccaaccggcgaggggcagttcgcgccacccgggacagcctgtctgggccgaagtggacgactcggggcgaccgccgcgctgcaacttatgccacaccgcctcagcttaagggccgtcngatgattctgccggtgcggcatgcgggccggcgccgggcggcagtggccgaagggcgaggttgagtggatgacngtgacngangcggcgggcgcangcatgtgcgctacnggctgcggctggtcggtctgtgtgcgggagcgtgat

SEQ ID NO: 4570 - DNA, 371 bp, Zea mays
  unsure (1)..(371): unsure at all n locations
tctnagggagagcacanttngggactaacagacgggtatttttagaaagaccggcttgtagcgcataccaagcaagatagcacgttggtattcatcatccacacaagaacatcatgacgaccaacaggccgcttgagttactccacaaggacctatacggcccgatagcctacataagcatccgcgggagtaaatatcgtcttgaaatacgggatgataattcccgcttcacttggggattcttttcgcaggacaaatcccatacccaagagaccccaaaaggagtcttgacacgggctccaaacgagattggcttaacgatcacaaacaatcaaaacgacaaccggacggagttcaagaactcacaaaaa

SEQ ID NO: 4571 - DNA, 328 bp, Zea mays
  unsure (1)..(328): unsure at all n locations
tatatatttatctttacataccttattatggtatgtatattgtttgtcatcttccatcccatcgccagcattatttttattcaactcttcttcctggtacaaataacatgttactatgcataatttatgttacaaatattataacactaaaaacatctggaatattattaccttgtcttcctcatcatcactaacatctgttgactcattacatccaatatctggctctaatcggcttagaacgacatcgagctcatccaacacatccatcgccttatcgtaccctgcttttgacatacacgcctggcgaactactnttcattgtttc

SEQ ID NO: 4572 - DNA, 423 bp, Zea mays
  unsure (1)..(423): unsure at all n locations
ctttaggttntctcaatttgggttatgttctaccccttttattcttatctagggttaagttccctatccagggttctatttgcaaaatgctataacaatacaacttgtttgaaaattttgcctagtgaatgcactctaagtgtgtcaaacatatgcaatgccaatgcttatgatgttatgatcaagttttagttacagtaacaccaggggtgttacaaatcatacctttgtattgacttgcacttttgtccaccctttggcatatactcattcccttaatgtgtgttgggcacttaatcaccaaaatcttatagaaatggcccaagggcacatttccctttcaatggcgcacccagctaatacagatgcatggaaggcactagatngctttgatttcagctntgctggtgaagtgcagaatgt

SEQ ID NO: 4573 - DNA, 449 bp, Zea mays
  unsure (1)..(449): unsure at all n locations
tccctttaaccccgaaacgcgatacacccttcattggtgttactnttaagtagacaaaatcgcctaccagaaagcataagggttgtcgtcgtcggtctgcataactcttttgtcgagtctgagctttcttcatattatgaataattctctgaaccttatcctcggcctctttcaccatatcaggcctaaagaagcacctttcaccgggttcagaccaatttagcggagttcgacaccgtcgaccatataaagcttcaaaaggtgccatcttgatactttcttgataactgttattgtatgaaaactccgctaggggcaaacattcatcccatttctgcgagaagtccagaacacaggcccgcagcatatcctcgagtatctgattaactctctcagtctgtccactggtttggggatgataggccgatctgtggagcaacttagtaccc

SEQ ID NO: 4574 - DNA, 443 bp, Zea mays
  unsure (1)..(443): unsure at all n locations
tcagcaatntcaacactctnttttggagttgtgcttgaatacttaattgtctccaagacatctagtacatttaccattcttttcctttttggggtcaccattggagccttttggatttttgctgcttcaatatttattgcaggacttaaaatttctgaggttttttccttagtcacatttttcgcttcttccattttttctgtcgatggtgcttcggccatctctgcaatttctggcaataagagtggccgttcagcttcagcggccgaaggagttcctccagtatactcatgcaccgaagctggttcaatatggcgtggtcggtgtgtgaagaccttcaacctttttccttatggttctggctcgctaggagcggttccagcttcttctttttcagaggttatgtctttcctttcttgccttcggatgggataacaataatc

SEQ ID NO: 4575 - DNA, 443 bp, Zea mays
  unsure (1)..(443): unsure at all n locations
tcgcacctctgaactaactcggctgcatcgatcttctttgntggccnatagaatcctgacctgaagaccttcccgactagcgttctggaggctgcgtgtattccacattgcccagcatggacctcctccaaaagttgcttcccagtggacgggagaatgctcttcatgaggacgcctgatgcaccccttctgtataatgtctcctcaatgagtgtatagtgagccgactgtctatcaatgcgctctgccgagttcttgtcgtttggttcttcttcattctttatatacttaatgatcggccttctccagtcatcatagtctaactcgggttgatctatgatcactcttcttgttgaaccatagagatactcggcttgagaattacttgacaaagacttcggtgggacctgagttcgactggacacctacttggatagtacatt

SEQ ID NO: 4576 - DNA, 436 bp, Zea mays
  unsure (1)..(436): unsure at all n locations
tgaagccatggnaagtagcataggctaataatatgtgtatggactcaagcctagctacgggtgcataggtttcaccaaaatccaaaccttctacttgtgaataccccttggccacgagtcgagctatgttccttgtcaccacaccatgctcgtcttgcttgttgcggaagacccatttggttcctacaacactttggttaggacgtggaactaaatgccacacctcgttcctagtgaagttgttgagctcctcttgcattgccatcacccaatccgaatcttgtagtgcttcctctaccctgtgtggctcaatagaggaaacaaaagagtaatgctcacanaaatgtgcaacacgagatcgagtagttacccccttatgaatgtctccgaggatggtgtcgacggagtgatctcgttgtattgcttggtggactct

SEQ ID NO: 4577 - DNA, 442 bp, Zea mays
ccatgaatataactaccgcttgaacagacgtttgcttggcttattttgcttggctgaccctttcgacttttagcgtcgtcttgaatctattgatgatgagggccatctcttcatcattaaaaccggcagcctcaatttgtgccaccttgctgggtagcgcctccttgctccttgttgccttgagagcaatgggttgaggctcgttgatcggaccattcaaggcgtcatcgacgtatctcgcctccttgatcatcatccttccgcttacgaattttccgagtacctcctcgggcgtcatcatcgtgtacctgcgatactcacgaatattgtttacgagatgaggatcaagaacagtaaaggaccttagcattatgcggacgacgtcgtggtccgtccctcgcgtgcttccgaagctccttatttcgttgataaaggtcttgag

SEQ ID NO: 4578 - DNA, 446 bp, Zea mays
  unsure (1)..(446): unsure at all n locations
tgtcatcacggcaactccattcttccccgacgtcctcttcatcggtggaagagtggaatcgtcccccatctccgacgacgaaccaaccgtgcctggggaagaacctcctcagcgagaagctcgccgacgaaggaaccgacaccgtaatgctcgacgacatcatgaagccagagaacgagacccggcgcagcctgtatcacgagatgagatctcggaggtgggagaaactcctgatgaatgattcttcaggaaaaggaggaactcccgccgacgtgatcgtcggcaagctcaagagcaagccgatcaggaggcgagacaaagccgagagaaccctctcttcggacgaaatctgaaccccgactntgcccaagccatgaacacaccgagcgaggtcggtggagtgttaacctcgatagctgatggccctccccggactctaaatgctg

SEQ ID NO: 4579 - DNA, 442 bp, Zea mays
  unsure (1)..(442): unsure at all n locations
actaagcttctaagggagaatacattntaggactaacaaatgttcattntgttaaatacagagattgtagcgcatgtcaagcaggacagcaagatggcacccatcatccacacaagaacataatgacaatgaataggccactggaactactccacatggatctattccgcccgatagctaacataagcatcgacgggagtaagtactgtctagtaattgtggatgattattctcgcttcacttgggtattctttttgcaggaaaaaacaaaacccaagagaagttatagggattcttgagacaggctctaaacgagttcggattaaggatcaagaaaataagatgcgataatgggacggaaatcaagaactctcaaattgaaggctttcttgaggatgaaggcatcaagcatgagttctcttttcctacacacctaacaaat

SEQ ID NO: 4580 - DNA, 399 bp, Zea mays
  unsure (1)..(399): unsure at all n locations
tacacgtggtagagaagaggatatagccaagggtcaggtatgttatacaccgctctcaaattgggataggagattggagatcttagaggacagacatagtgtaatcaccgaagtaagatttagagatgaaaaagattaaggccataaccaaccaaagcctaacaaatgatggagtttaaaactcgcatgcgacaaggaagaggatacgaccaacggaaaagtangtagaatacaatgctccgattgagatagaaaagagggtattttaaaggccggtataagataaacatcaaggtaagatatagaggtgataaggataaaggtactaatgacgaanaacataatccgtggacagagttaatgcaagactcgcaaagtgacgaagtggagaaaacaatc

SEQ ID NO: 4581 - DNA, 468 bp, Zea mays
  unsure (1)..(468): unsure at all n locations
tagctntcttcggtggcatgacgaaggtcaatgcttgccgaatgttgtctataagagttcaccagaggtgggcgccaatgttgaggacttgttctcaaatgctatgagttaagaacaaggcaacacaaaaaatgttaaacgttaaagtccttcgtccttcgaagcattatttcccttgggatataatgattttcggacgaaggttatgaaggacataccttcatcagcacaacatataataatgaagagggaaccatatgaaatatataaaaaataacatgaacaattatgtattatcatcaactcatttctatntttattattatggaaaaatagaaatgatatcaaattacaaatgtaccttcggctcgaaagaaagtaagagtacaagcgtgacgcanaagcaaatgccaagtcagcctgaacagtacatgagcactattcatctatttataggcacgggacaca

SEQ ID NO: 4582 - DNA, 436 bp, Zea mays
  unsure (1)..(436): unsure at all n locations
taataatagcaagaaaaatgggtgtattatttaactaaggttantaatttttagagaagttattatctaccttctgacctagttaaaaatattaaacacctctgtccactccatttaagttagttttacccttttattctataatatgcttaaagataaggaaaatagaaaatgcaacttaattaatgaaccagagagtacttctatttttgttaggttacttattcaatatagttcactggaaaaatatatcataccctggtttagtacaaattaagtaggatatcttttattttaataaaacaaggataacttagaataaccctacaaaaatgaccccaaggtaaaaacacccccacccttgggataactattgttttattagaaagaacctaagacaaatatgagatctgctggttgacatctttcaaataat

SEQ ID NO: 4583 - DNA, 382 bp, Zea mays
  unsure (1)..(382): unsure at all n locations
taacagacacatgacatcttgcaagctgcaattgttgtttagtgtgattatatgcacgctntgcatttgtatgcatgcttaagaaaggtatctgacataagaaaaaaattgaaaaatataataatcaaaataagcatctaatgggaaatggatgttgggttgcttatgatattgtataaaaaagggtgtgaaaggaaatggatgttgggttgcttatctgtgaagattgtacagaaggttgttccatacacacggctaattntagtatcttgcaggatcctctggtgactaaaggtgcaagcttggttccgctgttggggattgatgtctgggaacatgcatactatctgcaggtgatcttgatgatgcttctaaactgatg

SEQ ID NO: 4584 - DNA, 430 bp, Zea mays
  unsure (1)..(430): unsure at all n locations
ntatcaaatgaacgnngaaagtgccttcctcaatgtccctatctaggaagaggtctatgttgagcaaccttccggctttgaagatagcgagtaccctaaccatgtgtataaactctaaaaggcgctttatgggctcaagcaagcccaagagcatggtatgaatgcatgcgagattttcttatcactaatgacttcaaagtcggtaaagccgatcctactctcttcactaagacaattgcaaaagacttgtttatatgccaaatttatgttgatgatattatatttgggtctactagcaagtcatcctgtgaagagtttagtaggatcatgattcaaaaattcgagatgtttatgatgggagagttgaagtatttcctacgattcaaatcaagcacttccagagggcaccttcatagccaaactatgtaca

SEQ ID NO: 4585 - DNA, 460 bp, Zea mays
acctatgaaactcagcttctggtgggccgggttaaagtcccactattgtttccttgtatagactacgttgggaaccattgtcccaacgtctcgcttggatccttggaattgaattagattctactaaaattaatttacgcacttatcaattaagataattcagttttatacaaaatatatttgtataatattattagcaagatgacggagatatttatatgctacacttttattatagaggagtgagcctaagagcatcctattatttgtagagtagaaacaaattctattgatacataaaatcatttctcatccctcacctcatgaattcgagataggcttatacctgaatttcaaaagtggtggaatgttcaattccaagctaaacaggctactttattaagtaaattccaatcctccaaaatgaatggatccaaacgcccacaagggaaattagttt

SEQ ID NO: 4586 - DNA, 455 bp, Zea mays
  unsure (1)..(455): unsure at all n locations
cgatggccaagccaggaaacaggtcccaggatactttgtatctgaagttctcagtatatcaaagaanaactacacagaattagagaaggtgttatatgctgttttgatggcatccagaaagcttcggcattattttcaagcttacaacataatcgttccttcttcacaatctctgaaggatattatgaggaaccgagaagctactggaaggattggaaaatgggctgcagagctcaatgaattttgtaatgaatatgttcatagatcttcaattcagtcccaggcgttagcagacttcattgctgactggacgccaggggctcatgaggaagaagcaaataaagacgccgaagcatggatagtgttttgtgatggatcttggggaaccttcngtgcaagagcggctgctgtgttggttcaccttccaaggcaaaacttgtatgcggcaagcttga

SEQ ID NO: 4587 - DNA, 433 bp, Zea mays
  unsure (1)..(433): unsure at all n locations
ntatcaaatggacgtgaagagtgccttcctcaatggacttatctttgaggaggtctatgttgagcaaccccccgactntgaagatagtgagtatcctaaccatgtctataaactctctaaggcgctttatgggctcaagcaagcccctagagcatggtatgaatgcctaagagattttcttatcgctaatggcttcaaagtcggaaaagccgatcccactctctttactaaaacaattgctaatgatttgtttggatgccaaatttatgttgatgatattatatttgtgtctactaacaaatctacatgtgaagagtttattaggatcatgtgatatatccctagagggggggcggtgtataaactcatactttatttactaagattactctaacttcgatcgggttgcgttatatatcgatctatttgcata

SEQ ID NO: 4588 - DNA, 330 bp, Zea mays
  unsure (1)..(330): unsure at all n locations
tgtgaaggttcttcatccncacatgtgctaagcggtgattccacagccagcccatgctagtcttagctattaagcatgcatctagaccggcctcttctttcgcaaaatcaactaaataaagtttgccgtctaatacacccttaaaagctagtgaaccatcacttcttctaaagacagacccatctacatttgtaaatagacagttataccccatgttgcatagttgactaacagatagcaaattataaccaagagactctactaaaaacacattagagatagagtgctcattagacattggaattttgcctaaaccttttaccttggctt

SEQ ID NO: 4589 - DNA, 90 bp, Zea mays
aaagacagcgagggcgggagggaaaggggttctaacacccacaaggggggcgccccccaccacgaccaaaccggagacaacgaccccgaa

SEQ ID NO: 4590 - DNA, 455 bp, Zea mays
  unsure (1)..(455): unsure at all n locations
tatctttattntttgaaaaggggataaataattaacaaaatgtgggattcataaganaaacataagatatagaaagttgatgagtgcatagtatgtcatgagcatcacatttattttatgacaaactgcaccccataaatagtatgatataaattgtctccatactttgacccaaatatgtgcttttggcatttaagttcaaaagtgttattttttgaaatgcacatatttagggggaggaaacgatatcataggattcaaaatcttatttataaaatcttatgtaagctttaaatgtgttgtcattaatcaccaaaaagggagagattgtaagtgcattcatcccttttgtgagttttggtgatttggataacaacacatttaaaggtcttacgaagttgttaagtgttgaacaggaaattcagtatgatgaacatacttgaatagtgtataat

SEQ ID NO: 4591 - DNA, 456 bp, Zea mays
  unsure (1)..(456): unsure at all n locations
acggaccttagaaactaagcttagagtaccgtggattntagaacctttgagctttatgatccaagtccagattggagccactttccaatgttcgaaattaatcaaaagattgacagcattgtcaaccgtaaacgaaggactccacctctggatctaaatgtgtctgcatcccatgtgatggccctatcgtcacaagaatacatgatgcactcacatcaaacagctgatgagaacatggatacgtgccaacctgcataaggctttgcatctcgtgtagaaaatcatgctggcttcaattcagatcctccagggccaaaattaatagggcaattgttggataccatgtcatgttcttgcagcaaggatgacaacaactcagcagattgtccaatatatgagcagcacacaagccactatttttgcaactcagagcatgaactaccctctgtatctaac

SEQ ID NO: 4592 - DNA, 469 bp, Zea mays
  unsure (1)..(469): unsure at all n locations
actaagnttggtnattttattgctaactgtcctgataatgatagtgatcttttaatgggaacaagagggaaaagaagaagcattaccagaaggcaaagggcgaggcgcatctangcaaggagtgggactcggattgctcctcgttcgactccgacaatgaatgactcgccgccaccgccttcaacaaatcaaccctctttcccaacgagcgtcacacatgccttatggcaagagagaagaaagtatgtactcgcaactctacctatgcttcttcaagtgaggacgaatctagtgatgaggatgaagtagattattcatgtttgttcaacggcttagatagatctaagatagaccaaactaatgaattaattgatgccttgaatgaaaagaatatactcttagaacagcaagaggatttgttgtatgacgagcatgactaaattgttgaggcacaataatcctatgcttt

SEQ ID NO: 4593 - DNA, 428 bp, Zea mays
tgggaagattcttcattccaacatgggctagtcggcggtgccattaccaacccatggtagtcttagcaactatgcaagagtggagtgcggctctatcaaaatctaccaagcatagctgaccctctaacactcgcttagatgctatttaaacatcacttcttctaaagacagtgacacctacatcagtaaaaaagacagttgtagcccatttgacataattgagaaacagacttctgttgaactacttgagtctctcaaacaagaccgagagacactggcacgatatatgcaatctacccaacacttgaccaaccttgattccatcccgaatggatactcgtggggatcttggatgactcgtagaagaaacatcttttctccctgtatgtggttgtgcacccgtgcgatatccaactgagccccgatgc

SEQ ID NO: 4594 - DNA, 474 bp, Zea mays
cggtgttctcaatcgtgcttacaaggttaggtaggctcttgtgttctaatttgactgcctttcttgctcgtttaaatttggccattagctgcatggcagggtcttgttgttgagttcgctgattccaaagtgattgaactacagccggaagatcatcatattgcagccaaacattctcaaattgtacggccgatttgaccatgccaaaagaaaaacagctcaactcaagaaaattgcaccttatcactcatatataaattgaccaacattcttttatgtcgtaagttagaccgtttctaacagttcactcatatggtcactctaaacattattatgtactgtaaactatatcgtccatagagtggagtttaaatatggcgatgatgataactaaaatgctagatatagccttacatacacccgcacaaagtatctcttccccatatctttcttcaatttctgataggacacaaa

SEQ ID NO: 4595 - DNA, 428 bp, Zea mays
tacttagactgggagatgacagtagaacaaaaatttatttcttatcttgttcttgagcagcatagggttagacaagccactagtgaatttagagattttgctaccatttggtggaatgaacttgttaacacacgtgctgcaccacaaacatggaattcgttaaaagaggagatgcgagctcactttgttcccccttcttatagacgtgatcttcgaaaaaaattgcaacgcttatatcagggagacatgtcggtacaggaatactaccaagaacttcagaaaggtatgctacgatgtgggggtagttaaggatccggaggatcaaatggttaggttttatggtggattgaggcgggagattcaggatattgttgattataaagaatatcattgtatacaacgcttggtccatctttctatgttgacag

SEQ ID NO: 4596 - DNA, 450 bp, Zea mays
  unsure (1)..(450): unsure at all n locations
ntactccattcaagttattattcggtgacgaagcttttaccccggaggaagctaaaaccggatcaataagagtagtagcttcggcagaatcaggttccgaagctgcttattctgtggaaaaagatgctttagaagggatcaggttgcaagccgtggagaacattaataaatatcaagccgaaacaatcaaatggcgtgatagaaaggttcggctaaagaatattgagccaggacacttggtgcttcggagagtggccaacccggatacagtgggcaagttgcagttgaaatgggatggacccttcttagtagcatcttcgtcaagacccggttcatacagattgaaggatatggacggcaacgacattcctagatctnggaatgcggatgagcttcggcggtattatgtgtaatttgatgtaaattttggtttttcttttcatggcaccc

SEQ ID NO: 4597 - DNA, 450 bp, Zea mays
  unsure (1)..(450): unsure at all n locations
gggatattattcatcaaaacactacgaatgttgttgtgacaaatganaatcattcttcacgaagcatgnaaagaagggaaggtgtttttcgtcaaaaacgcaaaaacggtacgtatgtaaaatttcatgcatcgtaaagaattaaacaataaaagcaggtatattacattcaggactacaagatgtcacattttacatttcagaagttttttacaatagtatttaatcttctgtcagaacaacttctgcagcctcattcaggagccgattgacaacttcgtccataatagcttcagccatctttttaatttcgtcgtctcctttcggctgagagcccgaagacgctntagcaggatctgaaggaggacaggatacgactacattgctatcacaaactgaaaatgaagttaaaacccaaaattaaacacaatanaaccattagtaatacct

SEQ ID NO: 4598 - DNA, 454 bp, Zea mays
  unsure (1)..(454): unsure at all n locations
tgcttcggctgagggatcctttgtgtcatccatggagaatgcagcttctacctgcgccagggttntgacatgttcgcaacccgccttctccaagatggctgaaattcctctcacatcagagaacgcgcagacatccccgcgatcacttaaaatttcttcaaaaacttcggcctctccgcttatccattttataacaccttcggggccacctcgtataaagttatcttcattagaataggcgcccacgttggcgaagctagcctttatcttctccatgcaacccacggattntttgaagcatctttctttggatgcgtggagttcttcaacagttttttctagatagtttttccaatattcactaatatctcggttggcctctacgagtccaaattnttctttgctttcggtcagctgtttccgaggtcttcgatctcattcttttgaattcagc

SEQ ID NO: 4599 - DNA, 468 bp, Zea mays
  unsure (1)..(468): unsure at all n locations
tctaaaggagaacacattntaggattaacaaatgttcatttttagaaagacagganttgtagcgcatgccaagcagggaagcaagttggctctcatcatccgcataagaacataatgacgaccgacaggccactggagctcctacacatggacctattcggcccgatcgcttacataagcatcggcgggagtaagtactgtctagttattgtggatgattattctcgcttcacttgggtattctttttacaggaaaaatctcaaacccaagagaccttatagggattcttgagacgggctcaaaatgagttcggcttaaggatcaagataataagaagcgacaacgggacggagttcaagaactctcanatcgaaggctttcttgatgaggagggcatcaagcatgagttctcttcttcctacacgccacaacaaaatggtgtagtggagaggaagaatcgaactcta

SEQ ID NO: 4600 - DNA, 446 bp, Zea mays
  unsure (1)..(446): unsure at all n locations
tggcgtggctgcttgctcgcccctaccaatcttgtcaatgttggctatctggatcacccctgtagagtaaagtaagctccacatcttgtanggttgcatggtttgcctttacttctgccgtcgatgtcttttgagacaaccaattgacttgtagttatgattgttttaccgtatcatcctatttctttcagatggactttatttcaaaatattccgtggtggatagatataaaagtatacacactcaaaaaaaaaaaggtggagctgcgatggggcatttgatattgtaaatagattaacaatctggacactctattgatacctttttttttaaaccttggtcaacaggcaacagctgaactataatttaagatggtgctaacgtgaataaatgtccttgctgacacatgtatccacttcgaccagtttaccttcttttttttaat

SEQ ID NO: 4601 - DNA, 439 bp, Zea mays
  unsure (1)..(439): unsure at all n locations
ggcatgacananacgtgaatgccataaatccgactcatcatanaaatgaacagaattcacgagtntattacacacatcatgcagtgataagcggaacaggcctccgcagtcatatcctttaccaacaaaagtaccatgtttcgacacaacacatttattagactcaagaacaactttgtatccatctcgacatagcatagacgcgctaacgagattcttcttgatagagggcacatgctgcacgctctttaatggcaccgtctttcccgaagtaaacttcagaatgaccgtaccaacaccaagaacatgagcacgcgacccatttcccatcaacaaggcgccagacctcccgacctgatatgaagtgaacatagaggcatcagcacacacatgaatgtttgcaccactggtcattcaccactcatgtgaattacagact

SEQ ID NO: 4602 - DNA, 398 bp, Zea mays
  unsure (1)..(398): unsure at all n locations
tctcctggacaagtgccgcactcactgcagagtgcgaatctgtctcatataacagcagaggagcccctggcgcgggtggagttagcgtcgttaggtctatcaagtactgcttcaactcttcgaaggctttctgctgagctgatccccattgaaagactttggctgacttcatcacttcaaagaatggtaaatttctctctgctgatctagatatgaatcggttcaaagatgccagtcttcctatcagtcgttgagctcccttttttgtgcttggcggttccatccgaaggatagcttcgattttatttggattagcttcgatcccttttgttgaaactaaacaaccaaggaattttcctctttttactctgaagacacattnttctggattcaacttc

SEQ ID NO: 4603 - DNA, 453 bp, Zea mays
  unsure (1)..(453): unsure at all n locations
tgctacaagtctnttcctttttttctctatagcaggaaccttactttaacactaccccacttaaaaagaatgagggtagaactcttgaatcttggggatttgaattccttgaagtaccacataacaagggtgttacgggtccttctgctgctgttgctgcttgagcacgctgcggagggatgactggcacacggttgattctgggagaaccttcttatcttctcttcactatcttcttttctcttctcacttttcacttttcactgcctctttctttctctttgctcttcccactggaggattctatcgatgagtattaccatcatacagaggaggaaaccaaagactatgaaccatgtgcaacagtcttcaacccaagaatcaccaagcattgtgatcttatgggcgagggagtggaaaatggagttgcttgcgattatgcagaggggattt

SEQ ID NO: 4604 - DNA, 350 bp, Zea mays
tataccaattttctctacctaacttcgggtgcataaggttcaacgcaattcaaaccttctacttgggagtattctttggccacaactcgggctttgttgcttggtaccacaccatgctcatcttgcttggtgcggaacacccatttggttgctacaaccatttggtttggacgtggaactaaatgccataccttattccttgtgaagttattgagctcctcttgcattgacaccacccaatccgaatattgttgtgcctcctctaacctgtgtggctcaatagaggaaacaaaagagtaatgctcacaataatgtgcaacacgagatctagtgggtacccccttatgaat

SEQ ID NO: 4605 - DNA, 465 bp, Zea mays
  unsure (1)..(465): unsure at all n locations
aatgcacaaattctcccnctttgacatcaaacaccaaaaccatattctagcaagaacatataatgatgtcaaaggacagcagtgtattgagcacgtaaaacgtactaacaataatcccctttactcattaaacatatgcaccacaagcattggaggaaaaataagatacatacacgcgaaagatcaatacttccttttgtacctttttcctgttgtggtgtactttccatcttgtagggctaatctctcatgagcttctccacacttatgcctgatcctttatcctaaccttttcttgttgctaagacactaaacttagacgcaaggatttatcccgaggttcggccaagcctgaaacgcttgcctagtccttgttggagttagccacacctgggcttggagtctatttcaactccttccttccgttgctcagatctgtcaatatgacagatagagcctttcact

SEQ ID NO: 4606 - DNA, 351 bp, Zea mays
gaccttgaatctaagcttgggtttataaatgggctctctgatataattaaccggactgttctgtgtaacaccgaactgtccggtgtgccaagcggagtaacggctacagtgccaacagtcgtctgcaaaaggtgaatagtgagctacagtgcgcggactgcgcgcgcaaaagtcaaagcatgcgcaaatggtgcacgagacaatgaacagtgactgtccggtgcaccaccggactccagtgtgcccacttgtcatagctccaacggtcgaaccctaacggttgggtgacgtggctggcgcaccggactgtccggtgcacccttctacagcagtctttctcaacgaccactt

SEQ ID NO: 4607 - DNA, 399 bp, Zea mays
  unsure (1)..(399): unsure at all n locations
cttgacgaagtcttaactagcataggggactnttgttcttgtgtgggtgctcgaggggctatgtcattgctcaaaaaagctggttgtgaacatctgaaggctataattcaaccagaattcttagttttagcgaatgatattagaaaaccttcaactgaagccaacgcccttagcgagaaattttactctaaagtgtggatgaacggtggtagagagatagcagatgaagctatcaaacgaagtgaagaagaatcacatctagcttcagaggaagcaagataagctaaagaagttgtatagcatgaaaggcgtataggtatgtgtcggcgtttcgagacacgggggtccctaaatcgacgagtgaatgtcgccgcgtgccccagcccagatgggtcaacg

SEQ ID NO: 4608 - DNA, 426 bp, Zea mays
tagcctttatttgtggagcctcaaattctaaaacatgcttttatatcaaagggcaacccactgtaatatttacagaatatttggaaaatattaaaccactgtcgtagttcaaacctacactagagaccataagttgatattaagataacgacaatgaataatggtgattaatgtcatcctataacccttgtacatttgtccactgaaatgtataaagacaatacaaatccactatgttatcctcaatgaaaacctaagcctaaaaaagtaataagtatataccactggaagccccgcacgactaagaaaccctaagttactttttgacttagtttcttttagcataatgctattaaatctcgcataatcatgacatacaatattcattgcatttcgatagactgtaaccttgctgacggagagtac

SEQ ID NO: 4609 - DNA, 448 bp, Zea mays
  unsure (1)..(448): unsure at all n locations
agcttgtggcgccctccgacgtcctgccgcaggcgaagtatcttgtctcccacttggaagtctcggggccgaaccccttcggcgtggtagtgtcgtaaagactgctggtaccaccccgagtgtagtaaggccatgttccgagcctcttccagctggtccagtgagtcttctcggctggtctggttgcttcagtcgtcgtacgcccttgtcctcggggaaccgtattctaagtctgtgggcaagatagcctcggccccatagactagatagaacagcgagaaccccatggctcggcttggcgtcgtcctcagtctccagaccaccgagggtagttccttcattcaccgcttgccgaacttgttgaggtctgtgtagattctcggnttatgtccctgcagaagcataccgttggcacgctccacctgcccattcgtcatggggtgagcca

SEQ ID NO: 4610 - DNA, 350 bp, Zea mays
  unsure (1)..(350): unsure at all n locations
tcagtcttagcgttagtctcagtcttagttagtctttttatacagggtngttagctatatcctgtgcatttatgcttgtcatgatgaactatgtttggtttggatctttgtaatgactgtcaccagagtgagggtatcccatgcattntggtttacctattatgttaatggacgtagtattatagtttggaaaccttttattccactttcctctttatctgagaagctgtgtggtctgtgttggagatcaatgaagatgctcatctgttcaatgctgttgaagaattctcttctcttttcttatgctgcaagatctgccagatcagttctgatgtgtggttgcattctgc

SEQ ID NO: 4611 - DNA, 457 bp, Zea mays
  unsure (1)..(457): unsure at all n locations
actcagcttcgcatctgtattacttcgtcttcgagagcctctggtttttcttcttcgatgaagnctgcttacacttgggactggattgaggatcgatgcacatagtcaatggtgaattcattaagttctgcagcctatttttccaatccttccagtagcttatctgttcctcataatatccttcaaaggctatgacgacagaacaattatgtgatatgcttgaaaataatgttgaagctttctggaggccattaacacagcatatagcaccttttccaattctgtgtaattgttctttgacggacccaatacttttgagacaaagtacactggagcttgcttttgactagccatctaacttctctgtacagtgccgactcactcaaatgtaagctccacatatatagcatggagccctccgacgtggaataccgtgtaatcattaaaattgttaact

SEQ ID NO: 4612 - DNA, 228 bp, Zea mays
  unsure (1)..(228): unsure at all n locations
tgcgtgcgtgcttgacgcccacatatgataccctgttattcttcatccactcctcgctaagngagtcgatttaccatgcattgagacgcgcgcttctctcttgctgaatgggataaacctagcgtgtcccaacataaccctcatgagcacagaacctctcttcttttgagacatacacaaaagctctgtgagtacacccttatatacaattgtgcatattagactagc

SEQ ID NO: 4613 - DNA, 347 bp, Zea mays
  unsure (1)..(347): unsure at all n locations
tggaggcgtctatgggacgtcgactaggtgtagactctcttctttctttcttccgncgccttgaatgcaacgggttgatcttctgatgtgtctccaagctcgttgattttcctcgagccttctatcatgcactcaaaacttacaaaatgcccgataactattctgggggtcattatagtgtatttaggaataccacgaatcacttgaactcgagtgggagttagaaaaatgagagatctttaaataacatctaccactttttggtcgtcccacttcttgctcccgaggttgcgcacttggtttaccaaagtcttgagccggattaacatgtgttgtggcttctccct

SEQ ID NO: 4614 - DNA, 455 bp, Zea mays
  unsure (1)..(455): unsure at all n locations
ntctgctgagctggaccccattgaaacacttcggctgacttcagtatttcaaagaatggcagatttctttctgctgatctagatatgaatctatttaatgatgccagtcttcctgccagccgttgggcccccttttttgtatttggtggctccatccgaaggataacttcgatcttattagggttagcttcgattcccttcgttgataccatatagccaagaaacttacccttcttcactccaaaaacacacttttctggatttaatttcaaaccagcttacctgaagttggcaaatgtttcttgcaagtcagcaatgtgattntcttgctttgtgctttttactatgatatcatcaacataagtcaacacattcctgcctatttgagaatgaagaaccttggctgtaattntgctgaagcttcctccggcattcttaagcccctcaggcatccg

SEQ ID NO: 4615 - DNA, 434 bp, Zea mays
  unsure (1)..(434): unsure at all n locations
tcctccgacattcttgagccnctcgggcatccgaaggttgcaatatgttccactaggggttatgaagcttggtttaggctcgtccttctccttcatccagatttgatgatagcctgaatagcagtccaataaactcatgagctctgaagtggctgctgcatccacaagggagtctattcttagcaaggggaactcatccttcgggcatgccttgttgagatttgtgaaatcaatacacattctccactttccattggcattatttaccatcagagtattggctagccattctggatatgtcacctctctgattactccggcactcacgagtcttttgactctgnttcttgcaccttcggttntgtcatcggacattgtcggggaccataattaggggtacccccaagactcctaatctcagctggtgaccccca

SEQ ID NO: 4616 - DNA, 474 bp, Zea mays
gacacttaaatctcagcttctaagggagaacacgtgataggtttaactaacgttcaattcgttaaagatagaccttgtgcagcttgtcaagcaggtgaacaagtgggaggagcacatcacagcacgaatgtgatgaccacttcaagacctctggagctgctacatatggacctcttcggacccgtcgcctatctgagcataagagggagtaagtatgggctagttattgttgatgacttttcccgcttcacttgggtgttctttttgcaggataagtctgaaacccgagggaccctcaagcgcttcctcacgagagctcaaaaagagtttgagctcaaagcgaagaaaataacgagcgacaacgggttcgagttcaagaaccttcaagtggaggagtttcttgaggatgaaaggatcacgcaccagttcttcactccctacacaccacagcaaaatggtgtgtgagagaggaag

SEQ ID NO: 4617 - DNA, 437 bp, Zea mays
  unsure (1)..(437): unsure at all n locations
aatatctggataccggtcgaagagtcgaacttccttctttgtttttctgtcaaaaatatccctcgaggacaaaatgagcatgctgattngctagctaagtcagcagcacaggggctgcctttaccttcggatgtgttcttcgaaacaataaaggcaccttcagtggaactccttgaaagagcagttctcaatatatctcctgtttatagcgaagattggagaactgaaatcatttcttatctttaaggtaaattcctctcagatgacgaaacttataacaggaggatagaggcaagagctcgtccatatgtcatgatagaaagggagttgtacaagcatgcgagttgtgctccgctgcttaagtgtctatctagaaccgaaggcatagagttgatgaaagaaatacatgcacgcctgtgtggatctcacattggatc

SEQ ID NO: 4618 - DNA, 437 bp, Zea mays
ttagaaactaacctctgaagattcttcatcccaacatgggctagtcggcgatgccatagccaacccatgttagtcttagcaattaagcaagtgtcgagttcagctctatcaaagtctaccaagtatagctgaccctctaacactcccttaaatgctattgaatcatcacttcttctaaagacagtgacacctacatcagtgaatagacagttgtagcccatttgacataattgggaaacagaaagcaagttgtaatctaatgaatcaacacgaaaaacattggaaatggaatggtcgggtgaaatagcaattttacccaaacctttgaccaaaccttgatttccatccccgaatgtgatagctcgttggggatctttcgttttctcatatgaggagaacatattcttctcccctgtcatgtggtttgtgcacacgct

SEQ ID NO: 4619 - DNA, 335 bp, Zea mays
  unsure (1)..(335): unsure at all n locations
tgacggcggcttgccgccggcggcccggatcctggtcctaggggggtggtttagcacgggcggcggttggtgattctcatggcaggttcaattnggccaatggggtcgggagggggctgcccacggggagggggcggagttccgcggcggggatcgccgccggtgggttctgggtggggaacgggggctgtaatgcggtgcttctggttcgtggctatgcgacggagctgctaggctctatcaattccttgtcggaccaccagagaaggacagggaggaggatgattggactcaccgcagaggatgactacgcctgctctttgcactatgggctc

SEQ ID NO: 4620 - DNA, 439 bp, Zea mays
  unsure (1)..(439): unsure at all n locations
tcggtattgcaacatgtccgaagatgaagggtcgaacctacttatagatagaatgactttttagcccataaaggtctgagtcagtgctgtaaacttttatgaggggcatgattgtaattcctcacaggctgtgtcctgtgcctataaatagtgaacagtactcctttactgttcacgcattcctgtaattgcaatcgcatcattcggaaattattctttgtcaaggcagaggtataaatgtatttaatatttaaacgacatcacgtttatataatataaaaatgatgtcgtttacttttaatttacttgtctttaatacttcatattgtgcattggtttatataatctctgacagttcaattaccaagattcnacctctttaattgcaccgcntttaaccttcgttcgaagtgcatcaaatcctttaggaaataatgct

SEQ ID NO: 4621 - DNA, 416 bp, Zea mays
tacccatgatgaacgggtgggctaaggtgactcactgctacgtggttaaagcaccaatgcacgtggcgcaaggtcgcgaggtggctaactctggtgagtctattctaagcggccatgactcatgcgggtactgtggccagagcggaacaatggcctgagttcacccacgacgcgatatttcttacccttaagagttatctgcaccccacatagcacgaatcgcaacgacgacgaagatcacagcgcgggatcaccggcggcgaggggatctaaacccaaaattcttttcagttagtgtaccatgagaacttgttcagagcgcctgacagactgaattacagtgcccagatctcagattttcgtatgagaacttgcttattcatctgtaacaaacttgtagctctatatccagctac

SEQ ID NO: 4622 - DNA, 403 bp, Zea mays
  unsure (1)..(403): unsure at all n locations
tgcattngggtccctaaggaaatagtgactattcttgtatgacccaacaagagttgggtacctaagacccaagcctaaatttgccttgcaggtttatgcatccgggggctcaagatggattatcgatagcggatgcacaaaccatatgacggtggagaagaagatgttcaccttctacgtcaagaataaggattcccaagattcaatcatattctgtgatgggaaccaacgcaaggtgaaaggattatgcaagattgcaatatccaatgagcactctatctctaatgtgtttttagtagagactcttggatataatttactatctgtcagtcaattatgtcatatgggatataattgtctattacaaatgtagatgagctgtctttagaaaagtgatggtcac

SEQ ID NO: 4623 - DNA, 420 bp, Zea mays
  unsure (1)..(420): unsure at all n locations
tgtgagcagtacaagttcagataggagaaagctgtctttgctgatcagccaacacccatgctcttgtgtgaggatatagcacaccataaggtgctatcgggatctcaattgtccgaagagcatgagaaaaccttgatcatgtctttgttcaacaattaagatgtttttgcttggtcagctaatgatctttgcggagctaacagggatgttatccagcactcgctcaatgttgatccatccttcagacccaggaagcatatgcttcggaagatgtctgatgataatgcctaaagtgctctgaatgaaatgaaatgactcctcagtgccggagttattatagaggcaaaatacccagaatggttagctaacacttgtatggtaaagatagccatnggataatggagaatgtgcatcgatttt

SEQ ID NO: 4624 - DNA, 309 bp, Zea mays
  unsure (1)..(309): unsure at all n locations
ntatcaaatcgacgtgaagagtgcctctcttattggaccaatcaaggaagaggtctatgttgagcaaccttcccgctgtgaagatagtgatgtaccctaaccatgtgtataaactctctaaggcgctttatgggctcaagcaagccccaagagcatggtttgaatgcctaagagatttacttatcactaatggcttcaaagtcggtaaagccgatcctactctctttacttaaactattgcaaatgatttgtctgtatgccaaatttatgttgatgatatcattattggggctactacacaaatctact

SEQ ID NO: 4625 - DNA, 61 bp, Zea mays
  unsure (1)..(61): unsure at all n locations
gtttatccccttccccccccaaaagtgtgatctgcagcccnanacccgcgcaaccgaagaa

SEQ ID NO: 4626 - DNA, 163 bp, Zea mays
  unsure (1)..(163): unsure at all n locations
acaagtgggaggagcgcatcacagcaagaatgtgatgaccacttcaagacncctggagctgctgcatatggacctcttcngactcgtcgcctatctgagcatatgagggagtaagtatgggttagttattgttgatgactnttcccgcttcacttgngtattc

SEQ ID NO: 4627 - DNA, 271 bp, Zea mays
tttcggaccgcgctattaattagagaatagtatgtttgtatatgatattttccgtcactggattcttttgagataatcgaaccagaacctcagccttctagaagtcaatagttgactatggaaaataggacacaccgtccatcaaacctcagtgagatcttagagaggtaaccagtttcgtctccaccacaatgggggaagaacatactttgttgtagcatatgaagtaacccacattgtgagctaatggtccatttaatataagatttct

SEQ ID NO: 4628 - DNA, 197 bp, Zea mays
ctggccgtcgctgctaactcaacacggggccttgcttttttatgtgagcgtgaatctggttagtctgaaacataccgtggccctcactgcatttatggggactacgcgccgcccacgtgtggggcctcaaattagactttccgtgatactccatgcggagatgcttggctcaacgatgtgattgtaaaacccccgct

SEQ ID NO: 4629 - DNA, 81 bp, Zea mays
acacgcgctcactcgtctctgttgacgttgatctcatcttatccctgcgctttatccaaaacatggcttgttaagatttat

SEQ ID NO: 4630 - DNA, 51 bp, Zea mays
  unsure (1)..(51): unsure at all n locations
ttttatgatggactgcacactactgacaatgcgtgatgcncgaatactatg

SEQ ID NO: 4631 - DNA, 183 bp, Zea mays
tgactaaaaactgatactttatacctggatccgaaccctatggacctggaaccctaaccaaccttgggtttatgcaaatgagaactttgactaaggtaaactcttgtttgacttaagcatggtacaatgggaattacactaacctagttgactaatgaaaggactattagtcttccagctgaa

SEQ ID NO: 4632 - DNA, 170 bp, Zea mays
  unsure (1)..(170): unsure at all n locations
aacagtacccctgtactggtcacacaatcttgtaatcactggtacattacactggaattattgctntctgcccacacgaaggtataaatgtatattatgtcntaatatctacggttatataatanaatatgtgaataatggtattagttttcggatgtncttctataatg

SEQ ID NO: 4633 - DNA, 57 bp, Zea mays
caaaaaactccagcagggcttgagggatgtgtcccctcccagatcctgtaaagtttc

SEQ ID NO: 4634 - DNA, 262 bp, Zea mays
taacacatgccaatgccatcggtgactccttattgttcttgtacaaccagtgtgaaaatttgcgcaccttataataaactcattggagtctgtcacctactgaacttgcgatcacagacaatgtcatgccttcttatacatagtcttctagagttgggtgctcctctagcaacttctcgtgatgtcattagatatattttgacattttgcagcttggcgcttcttgttatctgtattgaggctatgtatcactgaatcactg

SEQ ID NO: 4635 - DNA, 146 bp, Zea mays
atggtaaacattctctctcaacatatttcctatgcatatgatcttggccaaagcacgaaggatccttctctttataatactgtacaaatttaccctagaataatatatcatataacatctatttatttttatactaacatctcaca

SEQ ID NO: 4636 - DNA, 191 bp, Zea mays
  unsure (1)..(191): unsure at all n locations
aactcctacatttgtaacctctccgtttttttccgagctaagtcagctgaccttcggggcaaataatgaatcccttggagagaccggacgtagctcttaatgcgcatggctcctcgctgaaggactattgtttggagctgcgcnggtattttggttgcatcaacgcttctgaaaaatcgtctcgctctgcg

SEQ ID NO: 4637 - DNA, 94 bp, Zea mays
actctctatgactttggctctgtttttacatgggagtatatgcttgatgtagatttccgttatatatttttggcgcattcgtcagcccccgcat

SEQ ID NO: 4638 - DNA, 159 bp, Zea mays
  unsure (1)..(159): unsure at all n locations
tctcgtggtgaccaatacgtggtataactcataactctaaaggaataaactaagaccagcaactcgacacaaccgatgcaaccaanaactcaacaagccctatctaagtagtactagtaaatgctcaatggtntatatgagtgccgttaaactaatcta

SEQ ID NO: 4639 - DNA, 203 bp, Zea mays
cccttgcgcgccggccgtcaccatttatgttgacagctatatcaattctgcattctcgttatatactattagcgacaccagcgttaaggcccatactgcttaaaaataccccgcctgcctcatccatctgtgtatcataacatttgcgactgaccatcaacgatataactgatcgcacgctaccctgcgctgcttatatgcct

SEQ ID NO: 4640 - DNA, 512 bp, Zea mays
  unsure (1)..(512): unsure at all n locations
ctagctatcagctacagcatcatacacaggagatggtgtacgctcctgttgtttaatcactctanacacatcgngtagtcttgtcgtatttcttggtttccctgcttacaagcaaaacacctatgccactcctcatcttaagattcaaggcgggtgcactcccgcaccccgccggagaattgctctacgacactatgtttaccaaataaatatctggaatgatattattataaagcactatatgtgtcgctggattcaccagatataacgtcaatgatactgatatataatcacgatcgaatatcgacggtactaaattaaatatacgatatcatttatatgtatatgttgaactaacaccatattaatgttcactcacctatattgccaaaacagaaataaacactctactaaacttgtcacactgtactctcgattctcacacttcactcgacatacacacatgtgcgttcttccgcttctcgcacatcactcggcgccgctcggctctt

SEQ ID NO: 4641 - DNA, 285 bp, Zea mays
ctcctgtaccagcgctcggggctttatttctccaaccgcacggcccgaacccgcccgttaaccgctatgtggtgcttccgtactctcgactggccgactgccaccacattaatcggactccccaccgcatgcgccgaagcacacgtgcagccttcctcttcgtgacacctaaagttggacgattgtactacggacctacgaaccattgtcgataaccgcgccggacgacctgcgtcatctgcgcgcttggaccgatcggccatattgccgtgcgagaccaatccc

SEQ ID NO: 4642 - DNA, 234 bp, Zea mays
  unsure (1)..(234): unsure at all n locations
catgagataacatgtcatgagtacaagtanggagttatggccctgggtaacacctgtggtgtacatgtacgagcctctggtcgatgatcaatggncacactaccctcantgttgtcgataatagccatgaatgaccattntcaataataacgaaggctaacatctacgaattattgaccaagaaatggtctcaccacacatcaagaatgtgatctatggcatggaaacatatgt

SEQ ID NO: 4643 - DNA, 289 bp, Zea mays
acaattggtgaaatgactcccccactttcaacttcattttacactctcggaaagtactaaaaaacaagctattatccaactgaatccagggcgtattacgcggagaaaatctttatttctacaagaatttgtgcgaatacaactcgttcacataaaaggtttggtgaaaaactgcacctgctcaactaagcaaaagctgtatataacaatttatctactatacaacttgagcttctaatctagtaaaactaacaggtagctaactctcatatatagacaataaaaaatc

SEQ ID NO: 4644 - DNA, 254 bp, Zea mays
ctgttagttcggaccacaggagcgccgtccaccagagtgtgctggatgacgcgtgtgttggggtgtatggaggatgttataggtgccccctgcttgcacggacgccttgcgctggaactctgtgaattatcacgcacgccagtagttcggagtttactcaattcagagaagctactttaggtgtgtactttgatgatagaagaatgaactctgtagcacgataatcccaaacaccgcataggtgtgtactttta

SEQ ID NO: 4645 - DNA, 161 bp, Zea mays
  unsure (1)..(161): unsure at all n locations
ctcaacttcactgaaaatcanggttagccacttanggtttcttgtgtctttttcaattaagtacaaatctttctatactactttgaaaatctncaatgtgaaaagatactttggtttgatagtttatcactttgatatttgcactttggtacaaaagtgta

SEQ ID NO: 4646 - DNA, 158 bp, Zea mays
  unsure (1)..(158): unsure at all n locations
catctgatcctctgtcaagctatgcgatatgctatgtagcaaatgatggatatgtatgtatgcanatggatttggccgcagaacatatcctgtataagccacacgctttatatacgctgactttcctgaacctccttagactcttgctttacttcagc

SEQ ID NO: 4647 - DNA, 296 bp, Zea mays
ccggctgggactgaatgatggcctttcaaaagccacgagatcactctgtctgtagcattcacaatactaatgatgagtcaaccatgcttttacctacctaagcgtgattatcagacaatatcgatcggtacaacacattactgacagatcacttcagtctattttacttgcacaaagcatcttagttgcttgtccaccaacacgcagtacaccatgaatctgagctagaaagcttctaataaagtcagaatgtagatgccctgttgactaacacacactgtgacctctttatgttg

SEQ ID NO: 4648 - DNA, 119 bp, Zea mays
taaaaattatgataaaaattagaacctgccctgcaaaaaaccttgtttgtgagcatggaacacgcgtgcaatctgaccgcttaagtgtggttgtgcctgtgcggtctaagcctccagaa

SEQ ID NO: 4649 - DNA, 179 bp, Zea mays
aatgaccctgactaatgttctaagttttaccactaactactgtcaatggaaagtctcaatccaattactaagctcacttgagagaactgtacaccgaggtgcatgtataaatagcgatagcccacacttcaagactaggatatagccaacaggaagtctttactaacaggagtattcaa

SEQ ID NO: 4650 - DNA, 253 bp, Zea mays
  unsure (1)..(253): unsure at all n locations
tcatatgtttctttgcatgttgctcatatggactagtgttccgctgcgatgaattatttggcttctatagtgtaatagatagtcatgtgggtaatggtgctntaagattgtcttacatagtgtctatattacattggtattagttcgaattggtatcttaatgatgaatagtggtacgttgatattcctgtgatatatccactatttcgaatggtgttaactctgatatgtgcattgtgtatatagcatcatg

SEQ ID NO: 4651 - DNA, 310 bp, Zea mays
  unsure (1)..(310): unsure at all n locations
ctcagctaaggatagaccccgatgggccccactcacctctcgaccatttccttggcctttatctttacctncacctcacctaccggacatcaggtatgtgaattcatcatcattcgagaaggactacttgtcgtatattacgatgtaactcgacgaatgtcatttgcacatgtatattagaccccctcacctatcttgccgacgcaacaacaagatgacagctttgactttgtcaatcgctcttcgatagtggagataacanacatcattcatcgcaggtccccgatgttgatcgggcatcatgatcttg

SEQ ID NO: 4652 - DNA, 211 bp, Zea mays
  unsure (1)..(211): unsure at all n locations
acatttatacccctgccgttatcccgagcacaannatangagaaatcactctagaaagtctcactctagctctcatcatgcttntatgtataagagtgaggcatctagttctaggcaatccactcatgctaaatngcctaagaagaaaactcctatagcatcaaatgaacctaatatttatttaagactcttgatgtgcttatgtttaact

SEQ ID NO: 4653 - DNA, 404 bp, Zea mays
  unsure (1)..(404): unsure at all n locations
gtcaagctacttcttagcctctcattatcttctctgagcttatgatatgaatcatcatttgttcctgcaaattctagctcacaggaagattngcttgttgtacaacaacaagcattagcacatggtaatatagtatcaatttgaatacatgtgcacgaatgatgctgtngggaagtttaagtctctatcacaacctcatgagcaatgttaatatgatatgatatccataagatttcatgagncatagaacatatatatttatttgaaagctgagtttaacttttactttttattgtcctgagcacgattctattactattgacgatcaatgtgagcgtatcttgtaatcgaatagtcataccttggacaatcacatagacactttactctcatgtcttagtcac

SEQ ID NO: 4654 - DNA, 216 bp, Zea mays
  unsure (1)..(216): unsure at all n locations
actagctgacttggttgactgcttctggcagtgatcaacgggagtggaatatgcgcaagttaactcaaggaatgctctgtatcacctctatggcctgtacgagattattgtgcccagtcccacgtccgattangacgatatccctcagccctgactatccagaaatctataaggaggtacaactgcattacaaaagctttcaatcggccgaacacc

SEQ ID NO: 4655 - DNA, 269 bp, Zea mays
tgagattgactattaacatcagccacttggggcactgaaataacccctttatattgggaaaaggggatgccaccacacacgtatttttccaacaggtaagcttgctttttaccgcctctactatgcacaatgcctttcttatgtagagccggacgctctccaactgagggagttgaggctgtgacgtcttggctaacaaactcccaattgctcaaatgcaacagctaaatgctattgcagtattatgggcatgcaagaactttgctaat

SEQ ID NO: 4656 - DNA, 145 bp, Zea mays
  unsure (1)..(145): unsure at all n locations
atcttccgacctcactccttctaanatgatatctcctttagcaacatgatctctaaggaagtgatgacngatatcaatgtgctcggtgcgagagtgttgtacaggaatattagcaattntaacaacactctcattatcacacaac

SEQ ID NO: 4657 - DNA, 151 bp, Zea mays
  unsure (1)..(151): unsure at all n locations
ctacccgcagcgcccagctcatgatccgaagatcactaatacccagaccccccangtccttgtgtctagtgactttgtgccaagtcagcagacaatggccaccattcaccttcttcctctncacagaaagcctcgtctaagcttatcaatt

SEQ ID NO: 4658 - DNA, 296 bp, Zea mays
  unsure (1)..(296): unsure at all n locations
ctcaagaaagcctagatttggagcatggtatagaggtttggttcttatagcatatgcanantcgaaagtcaatctcgtctcgcatatcccatccagactcatttattngaattcttgacagttgtattcgatctatgtctgaatccgatatctcgacttcgatctatgtccgactatataatctgaatccacattctccagcggaatctctgttggtgaacctctactaatnctatgcaatcacttgtatcttatgcatcatcattctattacaagtgtatctaaattctcaagtg

SEQ ID NO: 4659 - DNA, 102 bp, Zea mays
aaaacttaaagcaaggcagccattagcagagggatcgatgtctctcactcacataagatcccgcacgcttcacagtcatcctcttccacagcataccatcct

SEQ ID NO: 4660 - DNA, 117 bp, Zea mays
ccagctaccatggagctgaccttccttgctggctgctggtgcctgcacttttcccgctgattctgagagaagccatttcatattaatcgcagctcattgtgccactgttcgacgctc

SEQ ID NO: 4661 - DNA, 120 bp, Zea mays
ggagctgcgcttacccttattaccctcggaagagctgctttccgcttaagagcaggctattacccgagcaagacctcgaaccgaagctctacaatgcccattgttgccccctgcgaaacc

SEQ ID NO: 4662 - DNA, 364 bp, Zea mays
  unsure (1)..(364): unsure at all n locations
tggtatgccgatatatcagatttatggcgagaaatcgctacacgacctttatgtcaggcttattggttatttaatgggttgcatgacatcngcttaaaatgtggcgctctatcaaaggcatgaactgacttcatgagtatatgaacactgggaatctcattgtgaattgactcaatcggtgagttagtctatatnctgattgcgcaagctttgaaaatgtgtcgattgttacaatgaccacgtaatggctttggaggcngctggaagtntatgattgcatcatgactggataaataacctgccgatcagctatcgatgtggctcactgaggcgatacaagtctgcaggatatacaagtatttac

SEQ ID NO: 4663 - DNA, 277 bp, Zea mays
acatggtatgctaagatctatcctatggtcaagcggaaccatctcttttactaacatgaagatgtgagcaatatgcgtaatcaattggctacaccactactgaaagttaagactatcaaatcaatgttaggggataattttagattagcacactcaaggcctctagcaacagcatagactctccgttggatagggacctagaccttaacaggttactcccgagaactataagctcgctatgcttctttatcttacgattctcttcgtcagacacaca

SEQ ID NO: 4664 - DNA, 167 bp, Zea mays
tcttagggtaactaaactatcttcaattcaaatcggtttagggtatttttaattggtaaatatgttttttaaaataaataagaaggggttactcacttttcagatatttaatattttgcttaagtatactatttcaatttaccctaactatatattcatatttaatt

SEQ ID NO: 4665 - DNA, 297 bp, Zea mays
  unsure (1)..(297): unsure at all n locations
atgcataaaatggactatctataataatatatttgttatgttgaacatagttaacaaatattntatttagacaatatctgtctacatgatatatgtgaaaccgagaaaagcatagacacctaactactaataattacgtatgagctattacacttatctatgtggtgcctattctaactacactctaccactactcaccgtatatcgtgtatccatggtaaggatgacaacctccttatatatgcacacatgagtcatggatgagtgacatatgtctaaatntataacagtcacaat

SEQ ID NO: 4666 - DNA, 244 bp, Zea mays
  unsure (1)..(244): unsure at all n locations
agcatgcatctagaccgggctcttctttggcanaatcaactaaatataggttgccgtctaatacacncttaaaagctagtgaaccatcacttcttctaaagacagacacatctacanttggtaatagacacgtataccccatatgacataatggactaacagatagcanattatatccaagactctctactaaanatacattagagatagaatgctcattagaaaatcgcaatttaccctaccc

SEQ ID NO: 4667 - DNA, 367 bp, Zea mays
tctttcccccccccgcagttcctttgccctgccgcccaacacgcgctgactatacaggatgaccgatttgttgaattcccgggctgtcgcctgaaggtgggaccggagagaaaagtgtagaccgacaccatgactagaaaaaagggtaaacagcttggaaagggccgggcgggtgatctttaccggatgagaggccttctctcgatcctcctgccaagggcggccctcacacaaacaagaaacgaggggagtgtgttctaaaaagggagcggagaatgtattctgtgagctggaggggaactggtgtctgggcaaactattacctgcgttttttacagccccagcaacgtgggggggagaatcctag

SEQ ID NO: 4668 - DNA, 186 bp, Zea mays
tccacttatcatactttgatgcgtgccctctcaaacccctaggtacgtttccctgacgtgcttctaatggctgaaatcatgaagttatgtggtagggacgacaacgcgatacctaatgttctatctgatcacgataattatggcgaataaggtccttaacactgacgtaaaacaaacgtcgacgtc

SEQ ID NO: 4669 - DNA, 230 bp, Zea mays
  unsure (1)..(230): unsure at all n locations
cctccaaaaccacngctcgtagctatcgaccacgatggacggtatgtgtatttcgcgcagaatcccctagaaaatgaatgaccatgtccgagctcggccttaacacaggcggcgacgttactcttcgcttatcgacgagcagaccgagaataacaggctcgcacgtctcgcccctaggataccactcaagttatgcgaaccgcttcctgagctaacatacaccaacaact

SEQ ID NO: 4670 - DNA, 201 bp, Zea mays
actataagctcttcttggatcgatataactattgtctatgcgcgtatattgttcttacgaacattctgcttttgcatgggtgcgacctatttgccagggtggttaagtagtcttaggacctctaggtgacacgaccatacctgggcgcctcctgtataaccctaccgcacagacacggtttgtaataattacttcttctgc

SEQ ID NO: 4671 - DNA, 173 bp, Zea mays
  unsure (1)..(173): unsure at all n locations
gattctaagcanaacaagagtgcactggtctgcatggtctaaatatgatggacatgaactcaagagtgtaatcacctgattggtgagttgacgagcactagcgcgagtaatgtgaccagaaattggtacttgtattggtatagatgcatcactcatgtggatgtcttatcatt

SEQ ID NO: 4672 - DNA, 276 bp, Zea mays
ctgcactgccttcatttctcttgaagattcttttgtgtctttactactaagggtttgctatggaggaaaaatcttgcttggatgaaaaatttttcaacctacatcccactgtggtcttaatgaaaaaatatctaaagatttataatttactgcttgtggcttatggggtggaggctgaaagggtccatgcgtgtagattttccgtgagctggcatggtgtacaaaaaaaatgccttttattatgcaaatcatgactgatgcgtacattatgtgaaa

SEQ ID NO: 4673 - DNA, 308 bp, Zea mays
  unsure (1)..(308): unsure at all n locations
ttcctgctggagaaaggatgcaagtattgcttctacatgataatatcttctggcttctttgatgcanatggttgtggagcacctaactatttcctgtgattccaggctcatttcaacaccctgtacatacttttcttttcaacaggcttatgcttcaagatcagtctagaaagcatcangagacaacctatatgataaaatgtttgaataacattgccttattccagacactaaggaacatttgatgcaatattctttctatccacaagtagtatgttgatgatattaccatataatctatgaaatca

SEQ ID NO: 4674 - DNA, 197 bp, Zea mays
  unsure (1)..(197): unsure at all n locations
cctacttcttcccgcgatttttcttcccttccccccccccgtatctatgcacatgcggaccanacacgagcgcacttaaatctttcacgggcagcggatcaagcacctgtgctacatacaggcagtcctttaaatactattactgaccttacctcttaatgcactgatatactctttaagacgtacactattcgaaa

SEQ ID NO: 4675 - DNA, 306 bp, Zea mays
cgcggagaccctggtttttgtcgcgttctctccgtcactcctgggcgggattgcccctgcagtcgtgctgcctctttctttcctgcaccgatctctcgcgtccgcgatatggtaccaaactcagccaatcctggccgtcattttgtcttctgttgcggcgaactccaccgacgttctctttcgcgccgccagcgttagctcctgcatcgtgtttcgcctgcgtggacacatcgtggtgtgtagtatcacgtgccgctctcccgaccgagcacgatcgcatcgcattacgggactcctgttctggat

SEQ ID NO: 4676 - DNA, 63 bp, Zea mays
ctgctaaaaccccaaagtttctaaaagttttccttaaataaaaactcccgtgaactagaaact

SEQ ID NO: 4677 - DNA, 493 bp, Zea mays
  unsure (1)..(493): unsure at all n locations
ctcttcaggcaacccagaacatcaccatgaccgactcagcgagagcttcgtcatcgcgcttccgatttgtcgattggatctntcggtcatcgttaatctatgagaaaacagaaatgtctatcaacaacgctagatcgaagggctngtgtggaaagtgagtnggtgataggttcgtggtctctcccgcgtgataggattggcgcttcccacctaatatataaccattaccagaggcccctttacatgaacacaatcatgccacacatatttaacagtagattcaactatgataagtntgcattatttgatcatgcccttataacaaacctttccaccataacaatcatctaccaatcagtcgcgtatgtaactattctatgtaccctactattattaaatatgaatctttaggcaatgattgttaatctatcagtactacgtctatacgttggtcgcgactacatattaatatcacatgatactattactttat

SEQ ID NO: 4678 - DNA, 411 bp, Zea mays
acctctgagtcacctgcggcatgaagctttgtatgctgtcagctaaaaggtttttgctaacactcatccaacaaaagcttttatcttaacatcaaggccactagagttgcttcatatggatctatttggaccaacaacttatgctagtgctggtggcaacctctattgtctggttattggtgatgacatttcaagatacactatgtgttctttcttcatgataagtctgaggttgcatcaatattcaagaagtttgccaagaaggctcaaaatgaatttgactgcaaaattcagaagctcaggagtgacaacgaaaaggaatttgacaacaccaacattcatgagtactgtgatgaaattgggatcaagcatgaatgttttgcaacatacacacctcaacagaatggagtt

SEQ ID NO: 4679 - DNA, 457 bp, Zea mays
  unsure (1)..(457): unsure at all n locations
tcttggcctcagctcccactaccaccaccaatgccacctactcatacccgaagccagcagccaagaagggcactagcacgcccaacagcaccgcgacttcagggaggagtccgaagctcgtacagtcaacatcactgtaccagagtcgaagcatatatattgagaaatatgctacttttgatgtaccttcatattttatgccattttattttctgtgcgaaaaataagtaatgaagaacgtaatttcaatttctcgtaataattctgcttataccacaatgaaatatatcttcttcatagatttacgaagctcgaaagatgactcttaatggaacgaagtaaatttcgaagctcacaagtctttcctaagggaatgtagagccgaaaattgatgaagttacaataagtcgttcctaagggagcgcagcgtaagttntctgctcacaagtcattccta

SEQ ID NO: 4680 - DNA, 63 bp, Zea mays
atgcgctctaagtgtatcaaacatattgcatgcaaatgcttatgatgttatgtctcaagtttt

SEQ ID NO: 4681 - DNA, 114 bp, Zea mays
acatactactaccttccgatgcctgatgggctcattaacgctggaggaagcttcaacatgatgactcccaatttccctacttcctaatttgcaacattgtgttgacttatgttg

SEQ ID NO: 4682 - DNA, 288 bp, Zea mays
  unsure (1)..(288): unsure at all n locations
aatcagatataagtatggaccttctattccatgcttttactctcctagaccctacagcaaggcttcctacccggcaatgttattcgtgcaacttacgtcaacctatgccgcataacaagtnttcaaccctggaaggtgaaaccaacacagcaaccgttccttgcttcaagggttcccaataatcatcgcacaacactgtccatgcttcggcatcattatttggttctttcttctgagcccccggcgtccattcatgaatgaaatctgtcaatagcctgagactgaatc

SEQ ID NO: 4683 - DNA, 444 bp, Zea mays
  unsure (1)..(444): unsure at all n locations
gcttatcttgtaacgatgataagctacctttgttctcaaggtggaggttccttaagtttctttgaatcctcaagggtaaatgcatcanatgtttataacatgctatcgtaagtgtgtagtctatcatgagcatcacgtttatattatgacacattgcacttcacaatttctatgatatagatatgttctcattgacctcattatgtgcatttggtatctaacgccaaaaaatgtattcctctctatgcacatacttagggagagcaatctatattgtagaactatggtaaagcttaattgacatatcttcttatcttatatatctctttcaattaatacttgctcttaattcatattcttgcttataccaaggttcaatgtgtagaacttgcatcctccgacctcacatgttctaaagtgcatttgtctacaagtattcatcac

SEQ ID NO: 4684 - DNA, 316 bp, Zea mays
tgtggcgaaatatccacttgtcggtgaccacatatgtgcttgttggacactgtaccaggtcccaggtgtggttggccatgagggccgcgtactcctcctccatagcgtgtcactagtgtgggtcggcgagagcggtatgaacataggaggggaccggggaggcatccggtggagtggtagtcatatcatctgccaagatcagctggtcgacagttcgaagaatgcctgcggcgtgccgggtcaccatcgggtggatgtgcccggggtcacggtggatggcgaccgggtggtacactggtggctcggggtggtctgc

SEQ ID NO: 4685 - DNA, 438 bp, Zea mays
cgctgtagactccctcttctcttcttccatcgccttgaatgcgactggttgcacctctggtgttgatgtggcgccttgctctcaattgacaatatgtttggagtctttgatcataagttcaaagctcacaaacttgccaataacttcctcggaagacatctatttatatctagggtctccacggattagttgcacttgagtgggattaccaaaaacaagggatctaagaatatccttgaccattctatggtcatcccacttggtgctcccgaggttgcgtacttggttcaccaacgtcttgagcccggcgacattgcttgtggctcctctcctttgtgaaataaatcgtccgagttctacttgatcgtttgcgcttgatgacctggcacttttccccttatgcccgttatgagacactcaattttttgcgctcttacc

SEQ ID NO: 4686 - DNA, 227 bp, Zea mays
  unsure (1)..(227): unsure at all n locations
nttagctatgaagcttcggctatgaaaacagtttcttagtgttcccgaagatgtctgaagctgctaagaaagctgctgctgagatgaaactaagtcttgatgaacagaagaacttanggtttcttatagcgatgtcgaagacctacacagaaaaaaataccaacgagattctggaagggctgtctgaagatactggtgacagtgaaagttatgatgtggacagtggt

SEQ ID NO: 4687 - DNA, 458 bp, Zea mays
  unsure (1)..(458): unsure at all n locations
tcggtatacacnctgggtgctngggagggcatcgtcaagctatggctcggtcagcgtgtttactctgccgcggatccgccacactgcgggccacggcattgggcaagggccaaagccgctcgcgttccgcatagaatcggcacagatacgattcagcgtcaggttgttgaactgcagaggagaagatcaagtttgtcggctagattaacgattcagcctatattaacacgaacccgtggtagccacgttcatatttcctttcactctcaaacgaccaaaatttcaatggagaaccaaacgacagcggctgcggaggaccatatcagcaagctgccggacgacgttctcgttcacattctctccctgtgcccttatatactctcatgagaacggtttcagtttaacatcgtgggagcgtctcttctccaacaactccagacctgatctttacttgtcga

SEQ ID NO: 4688 - DNA, 282 bp, Zea mays
gctccttgaccacctcaacgtactttaagtttgtggtggtaccaccgccaaagatggtggaacacggcagtccttgactatgaggaacatgatgaaaagggtgtggcgcagtctgttgtcactcgcactatactgaggaactcaaagctcgtgggacaatcacagccctaaaggactcgtgcgctgtagtaccaaaaacctcttcagtaccaccataagtctcgtacaaggttagctccaacaggaacttcatcttcaacatagaaggactaacatacccac

SEQ ID NO: 4689 - DNA, 287 bp, Zea mays
  unsure (1)..(287): unsure at all n locations
tggacgtgaagagtgtcttttcttttngaccgaacagggaggaggtctatagttagcaacctcctggcttagaagatatcgagtaccctaaccatgtccataggctctctatggcgctctatgggctcaaacaagccccaagaacatggtatgaatgccttatagatttccattattgctagtggctctcaagtccgctaggtcgatcctactttattcactaaatctcttgactaatatttggttgtctgcccataatatgttgatgatatcatatttgggtctac

SEQ ID NO: 4690 - DNA, 442 bp, Zea mays
  unsure (1)..(442): unsure at all n locations
taatactcacttttatttaagaaaccaacctttgccctgtattaacgaatgttccaaaataaaaaccttgagggtgcctggtcatttgcaagaaccatgttnatatgtatatatgattctaatcaaaaaatttaaaaaaacccatcagtatgaatcttcttcatgtgcttctcacttgtatgactataacgacaataccacatgtatgtaggacttaagcataatacctttagcacttatattatagacctgtgcatcattaagatttaaaacgaataacccattcacaatggatgaaaaaacctcacacctattattcttaaagaatacacaaccactatttttactcgctaatgagtaaccatacttcatctaacatgaaggagacataatattctactcaaacacgtactaatattatattaactccatataatactga

SEQ ID NO: 4691 - DNA, 199 bp, Zea mays
  unsure (1)..(199): unsure at all n locations
ccgatctcagcccgagtnnttgaattctccattctcttccccaatggaccgtcagtacctggagtttatacacactccggcgtaattaagctatatgctattgcctgtgcactcaagaatatgaaagaatcatagaaccatagcagggtcgacaagactaaccagtaaagcctacaaacttcgtgtcaaatttccacta

SEQ ID NO: 4692 - DNA, 181 bp, Zea mays
ggaacaaaaaatttaagggcacggcaggaccgggagaaaaacagtccccgaaagaaaggaagcccgccaaaagaagggcccacacccggattcgtggaaatatttgaaaataaaaaaaataaaaaaaaaaaaaaaggggggggggggggaccctattaacacttccccccaacccccccca

SEQ ID NO: 4693 - DNA, 211 bp, Zea mays
atgctgcatgtactccacactgccctgcatggattatcctcacaacttgcttccccgtggacgggagaacgcacttcatgaggacgcctgacgcacccatcctgtataataccttgcccaatgagtggcatagcgacgtgaatgactggcaatgctctatgccgagttccagacatcacggtgctcttcaactcttatatacctagtaatc

SEQ ID NO: 4694 - DNA, 131 bp, Zea mays
gactgcagcagcaagcttgagaggtatagggagaggataagatctctttgttgttgtttgaattgaatgccaaagccctcgaaagcagttggaaagaggaaaacatggatgccattgaatgtgggggggga

SEQ ID NO: 4695 - DNA, 475 bp, Zea mays
  unsure (1)..(475): unsure at all n locations
tcatactcggttgcattgttggaggctgngaatagcaactggagggcgtacttgaggtgttcgcctccaggcgcagtgaagagaatccctgctcctgctccctgcagcttcagtgagccatcaaaatacattcgccatacttctgcagtctccgggttgtctggtacttgctgttcagtccactctgatacgaaatcaaccagtgcttgagttttgatggcagtgcgaggtcggaactcgatgtcatgagatcccagctcacaagcccacttggctattcgaccgatggcttccttgttgtgaagaatatcccctattggaaaacttgtaactactatgactttgtggtcgtcaaagtagtgacgcagcttgcgggcagttagaagtactgcgtataatagcttctgaacttgagggtactttnntcttgggggcctangacttcactaatgaagtaaacaggattgtgtactgg

SEQ ID NO: 4696 - DNA, 455 bp, Zea mays
tctatcgaagcttcggctcaactagctaaagctgaagctgtgccttcatagccctgcaaggagcaaccttgtgaagccgaagcaataaaaattccagaacatgtattatttgaagaaactgacaccgtcatccccgaagcacctgccagcatgcgtgattacatgatacgacatgcttcggggaagaagctatctgaagaagaaactcatgaagccatccattatgcaaaggaactaaaatatccgaagggggcagtaatattcaatggaacgaatgaagatgacttcctatactgcctgcctgacaacaaagagctatctgtctgccgagaaatggccagaagtattggcttttcgaagcttgaagctgggttaagcgccatgacgaaagaggatctctcagacaagcttgcgtacaacagtctgaaggtatatgaattatacacttgaaaaat

SEQ ID NO: 4697 - DNA, 357 bp, Zea mays
  unsure (1)..(357): unsure at all n locations
taatgcccncaaganattatctaactctgtaagggtatggctcccatggctcacgataacgagggctatattttatatcctggttggtatcctgagcacaagattatgtgaattcattctaggaagtctcactctggctctcatcatgcttttatgtataagagcgaggcatctagttctaggtaatccactcatgttaaattgcctaaaaagaatttcctattgcatcatatgagcctaatgtttcatttaatactttggatgcttcttatgcgctcactaacaaatcaggcaaagtatttgccaaatatgttgggggcaaacacaagtggtcaaaagacttgtgtttgggcaccc

SEQ ID NO: 4698 - DNA, 334 bp, Zea mays
  unsure (1)..(334): unsure at all n locations
ggtcgagcattcaatgcttgngcgcattgagcctcttcattgcttcttcaatcccctagcctggattgcaaaataataatgatcaacaaaagcgcaacagattccagtatggaattcataggtgactcatccagattgcattaactgttaaaagtaacagcaactacacactacttgaatacaaaagaccctcttcatacatgtctatctctattacttatatatgagcagtgccatcgtcagcacctcctgtatgtatacctagtacgacatcatctggcgaggggcgcggggacgcatgggcatcttggactggctcacccttataacacac

SEQ ID NO: 4699 - DNA, 288 bp, Zea mays
  unsure (1)..(288): unsure at all n locations
tacttttggtttttagtttgttttcaccgggacaaatatgccaagatcacgagaatgaagtggtggaagtttataggggaagtggcacaaacgcttaacgacaggatgctatggaaggggcttgggaagaaaatgcatacgacatgtggctaaagatggcaacatgtgttccgaaggcggcttcatatgtgtttggtgtgagtaggggaggcaaaccggatacgaaagacactttggggtggaatgactatgcgcatagggctattaaagaaaaggagtgnttcaagc

SEQ ID NO: 4700 - DNA, 385 bp, Zea mays
acttccttctgaagtcgcatagagaatgacattcgaagagcagttaactagagaaacttggataaaggaatgagcaacacaccagctgttggggacttgttctcaaatgctatgaattaagaacaaggcaacataaaatgttaaatgttaatgcccttcgttcaacgaagcattattcccttaaggattaatgagccttggacgaaggtttaagacaatatgattacgaaggttaatcttcgtaattgaatcctaatagattgaataaagtaatataaaatacgaagcgtcaaatgtgaataaattataaacgaacaacattactttcatattatatcgatttcacacatgtaagcacttgatacaattatacctttgccttggc

SEQ ID NO: 4701 - DNA, 320 bp, Zea mays
agcttccccacccctccgttcatttattggttttttattttccgctgcatttcgaacaatgatgactactcttgcaaaaactccgatgatgatgttataaatttaatactctctaatgtgtggatttatgctttattgtatttgctctgtgcctcaccatcgagtgagtacgtggtacttgatcctgttagtggcctcgtcggactaaatccgagggactgaccgtgtattcccatttaagtgtggtctaacctctaaggcaggacttatgcacttaagatggaataattcgggcggttccgccacagctggtatcggag

SEQ ID NO: 4702 - DNA, 260 bp, Zea mays
tgagaatggctcgccgaagcaacagagggcgtatgctgttgattacctacatactctgggacataggaagaatatcatgaggcagtatgtacgacctgcttcggctgattctgcggtgcctcagcttcgacaatctcctttagcttttgaattggtacttggcatgttctcgtggtgcggcccttgcttcaccgcataataagcagtatagtcttctaagctgcttctccgatcttcctttcaaacttctgacgcctcta

SEQ ID NO: 4703 - DNA, 487 bp, Zea mays
  unsure (1)..(487): unsure at all n locations
gatactctgagtcacctgcggcgtgcagctngaggctgtgtatatataaccgttcttttattgcggtgactattaagaacaagtatcctttgcctcgtattgatgtcctttttgaccaattggtcggggctaaagagttttccaaaatagaccttcgctctggctaccatcagatcaagatacgagcaagcgatattccgaagacggcattctcaaccagatatgggctatatgaaatcttagtgatgtctttcgggctgactaatgcaccagcatatttcatgtatccgatgaattctgttttcatgcctgaattggacaaattcataggggggttcatcaatgatatcttggtgtactctaagaacgaagaagaacatgccgggcatatgcatgtattgctctaacgtctgcgagagcaccacctttatgccaagttttcacagtgtgatttttggctaaggaaataaattttgggcacactatc

SEQ ID NO: 4704 - DNA, 325 bp, Zea mays
  unsure (1)..(325): unsure at all n locations
cctatcanatcgcaatgcacaagagcttaaaattgagtaagcaggagcagttggtcagaaagcgtgtcaaatgagtttgcggtatgcccgtatttatacgccaagagcgttgaaaattcagagaccccgcttgtcagtggttgttgctattctagcaaagggaaggtgttttttctgaccttcggtgtaaagccttcgttcatgtcgcaatctaaattcgttatttcaaacaaattaatattgcgaggggctactgttggggaccttctgcatccgaaggtccctcaaaacaggatttaacagtatttctggaagtataatgtgt

SEQ ID NO: 4705 - DNA, 437 bp, Zea mays
agcactgagcatcaacttgaaggattttacggttaagcttgtttctaaatattatctaacgccgcgaaaggggctactgttgagtccatgcttcgttgcgccgaaggtcttgcgtgaagaatcaacttccgctgaaatcgtccccacgaataggccgaaggttcctttttatatagcttcggcgttgctaaccgacataaagataagacgacccttttatccatagaggtcttaaataacgttggcaacttttgaaagggcctaaatgtaattcgccacaggctgcgctctgtgtctattaaaaaatgaacagaacccccctacagtgaacaccctgaattggcaattgctttgcgcccgccttgacttttacctatctcagaacgaagtcacttgtaattgaaacctttcattttcctgtaataaaaaaatgatct

SEQ ID NO: 4706 - DNA, 474 bp, Zea mays
  unsure (1)..(474): unsure at all n locations
tgagagagttnttcacgggtcgagctcgntacgaanaacgatctggcactgtgaaggggctactgttgggggcctgcttcgtcgccgaaggtcccataagaagaaacaccttcggaagactgacacaaagccgaagctatcaatcaaagggcttcaaagtacatttccaaatgcaccgacttaaagatggaatgacgaatcggcccgtgataacttgtattatgattgtaaacctttgtaaaggacatgaatgtaatttctcacaggctgcgtcctgtgcctataaatagatgaacagtacccctgtactgttcacgctatcttgtattcgctcgtgtgcagcgcttggattttntgccttctgtcaagccgaaggtatacatgcgattaaatattggatttaaatacttgaatttatataatgaagatatgtgaataatgttatatgattgctcatgctatctttcatgtttc

SEQ ID NO: 4707 - DNA, 459 bp, Zea mays
tcttttcatcgtcgatgagcaacgtcaacacgagcgccttctgtcagtggtgtttgttcggggtttctaagtaagaaacatggattcatctctggcgttggtttatgaaaatgactcacaagtcagagccatggaaaaatattacggagaataaatgtcacacatataaaaaagaatttaagttgaaaacatttttcaaacaaaagaaattacatgcaaggctcttttttaaatactactccctccatccaaaaatataattcaagaatcttcgtgataattatttactactacacattgggcaaaggtagcaagtgggctttgtagagatgtagtatatatttttactgtaacagatattgacatatacacacatgtggtgtagtggtagctacgagcatatttgcttgagaggtcgcatgttcgaatcccattggagccacatttgtggtttttaat

SEQ ID NO: 4708 - DNA, 380 bp, Zea mays
  unsure (1)..(380): unsure at all n locations
agcttgaattgtccgcgaatgcaggtgaactactttaccggtgggagccattgggttattgacagtggatgcacacaacatatgacaggctacccacggatgttcacctcattagatgagaatgttgatggccaagataaaatcacatctggagacaactcaaaaggaaaagtacaaggtacttggcaaggcggcaatctcaaatgacttatcaataacaaatgttctcttagttgcacctttgagcttcacattattatcagngggacaactctgtgaacttggacttcaacgcttattcactccatcagagggttatggaacaaaaatggatgaagaatcaatggtattcacgggttttagatacaacaacctctact

SEQ ID NO: 4709 - DNA, 416 bp, Zea mays
ttcgcttagtctatcatccgcagtccaacggtgttttgtatcgtgccaatgggaaaatattcacagctgtcaaaaagatgctcctcgatgaacaaaaggcacatggaccgacttattaccggaggcagtctgggcgctaaacacaactgagtgcagggcgaccgggttcactcctttccgccttctatacggatcggaggcaatgaccccgcaagacataaagcatgggtccccgcgtacagttccgtcagccgttcctgacgtggacgagccaacttacataagatttcattgacggagaccggttctctcgcctacaggccctaaacaaataccaagcctagaccaaagcatggcgcgactatgcagtcatcccgagggagtcagagagggggatcttatactctttcaaacag

SEQ ID NO: 4710 - DNA, 388 bp, Zea mays
  unsure (1)..(388): unsure at all n locations
agcgggacatatgcangccgcgatagaacactctgatcnactaggagtcgatgcttgcatcaaatgatttgaacacttcaaatcttatgagggcctgtactatctctcgggatcctatctgagctccaagtgatgtctcttgctgacagtagaatgcctttctcaaatactgcatgtctatctcaaaatgcaacacacctgactgttctttacatacaacagcgaggacccagatgtccatttcaagtatggatttgctaggagttcttccaactggccttgcaacgtcaacacctgagacaaatacatctgagtcccaatggagcagtgacagcagtggtcatcacaagagcaagagccattcacagagcccagtagttgtcaatct

SEQ ID NO: 4711 - DNA, 248 bp, Zea mays
cggacccaagggagggctgaagccaaagccccgaccaacaagagaccgaaacccacaaagaggaccagcaacctggggaaagacacccacagactctccccatattgaaataaggcgagaaaaaccaagcatccagaaaagaggggcccagggagacctcttcgacccccacaactaaaggcggagaacaatccggacaccccataaaaccaagagacaggagcatcaaccctcccgttgagggaaga

SEQ ID NO: 4712 - DNA, 376 bp, Zea mays
  unsure (1)..(376): unsure at all n locations
tcttttcttctaacaagtctttttgttcttcaccttcttttctagatcattgacaataagctcattctttttatcttcactctcttgctgcaatttcaaggcttttcttagtaggaagctctgtcacaaaggccaaagctacataagttttcgacccttataatttgaaaaccaatgaattataagaagaaataataaattttgttccttaaaattcgagtaaaataagctaccagtaatattgggtttcctatagttgctaagatatcgctcaagctttagaaattcgatgctttttgataaaatattaacaatatnttgtccggcacggtcagggatgcaccctagattctctttatcaatgccacccgtgggg

SEQ ID NO: 4713 - DNA, 418 bp, Zea mays
  unsure (1)..(418): unsure at all n locations
tcagcaatntcaacactctnttttggaattatgcttgaagacttaattgtctccaagatgtctagtacatttaccattcttttcctctttggggtcactgatggccccttctggttttatgctgtttcaatatttactgcgggactcaaaacttctaatgttgtttccttagttggctctttcgcttcttccattttttctgtggatggcgcttctgccatctctgcactttctggcagcaaggttggctgatcagcttctgtggccgaagaagcttttccggtgaactcaggcaccgaaactgggtcaatatatcgaggacggtgtgtgaagacttttatgctctttctctttgattctggctcgctaagagcagntacagccttcccttctgcagaggttgtgtgctttcttttct

SEQ ID NO: 4714 - DNA, 404 bp, Zea mays
  unsure (1)..(404): unsure at all n locations
tataaaaactcacgcttacaacaggggtaatagcctcacgtgcggtgttttataataggtcattgtcaacaagaagaatgccctgaaccaaattaatttggagatagncttccctgagctttactagcctaatttgcaacttcctaataacttcatttaattatgcctatttttccttacctcttttaggagttcgtgagctcatttacagctgatgacacagcctcaattttcttcctttaattcatcactaacccttataccatgtctacctggcatttaaagattcattttcattttcaccctatccctttagcttttgactttctaggagttgagcatatctttagtaagtcaggcactcatcatatgaaggtgagccaatttcacgctatcccatcact

SEQ ID NO: 4715 - DNA, 287 bp, Zea mays
agctcatctcctttgcttgacatgttctggttcttgttttattgataatcgaaaagtatggatttcatatcaaccagatgttcaatctacaatcttccagaccatcataagcacacagcccacccgccaagtggtgttatcaagcccaaagaagggtgaaacctggatttaaggtccagctctgtggcataaacattcttaacatgtattaaggactctggtcaatctaccctgcagaatgtgtgaaccggcgatctgaaaccacctccagtgctgtggcatgaaaa

SEQ ID NO: 4716 - DNA, 345 bp, Zea mays
agctttataagagagcattgattacactcatcctccatgcttcgggaaacggactttctcaagaagaagaacgagaagctcagcactatgcccaaaaattgaaatactcgaagggggcatcagtgttcaatggcagtggggaaaaatatttcttgtactgtctcccggataacaaagagatatccgtctaccgggagatatgtataagcttccgatttccgaagctggaagacggcctttcaatattatctaaggatgaactggctgacagtttaccatataatagcataaaggtacaaaagtcaattttgtatttgaaaacgaattatttcgtatgtcatacta

SEQ ID NO: 4717 - DNA, 330 bp, Zea mays
  unsure (1)..(330): unsure at all n locations
aattgttttatcaatcaactcctatcacctaatgcatcaagcaagtgaaaaagattttaaaagtatcaagggaggtggcaaatgcaccggggcttgccttcgtttacaagtgattcgggttccgatccacagatatcgaagtagaaactattcccggcctgggattccgaatgtggtggtgtcctgtcttcngggacttctacctcttcttcacgttctaatcataaccatacataagtataagaatggatgccatgggatgctcatgaggatgcanagataacatanacttattatttatgtcttgaatacaactttccttcacggagt

SEQ ID NO: 4718 - DNA, 466 bp, Zea mays
tgactcctttctccttgagacaccggaatgtcacttcaatgtctgagaggaggtccgaagccttccgcgtcttgactacgatgtcatcgacgtaggcctctactgtgcgaccgatgtgttcgccgaacacatggttcatgcaccgctggtacgtcgcgcccgcattcctcaaaccgaacggcatggtgacataacagcacatgccgaacggcgtgatgaaagaagtcgcgagctggtcggactcttacatccggatctggtgataccctgagtaggcatcgaggaacgacagggtttcgcacccatcagtggaatccacgatttggtcgatgcgaagcagagggtagggaaccttcggacatgctttgttgagaccagtgtagtctacacacatccaccattttccctctttcttgctcacaacacagggttggcatccattcggatggaatcctcttgatgaacc

SEQ ID NO: 4719 - DNA, 124 bp, Zea mays
cgcatgccaagcacgaaagctaagtggtgcccatcattcacacaagaacatcatgacgaacgacaggccgcttgagctacttcacatggatctatgccgcccgattgcttacattaacatcggc

SEQ ID NO: 4720 - DNA, 400 bp, Zea mays
cttgtatgactagcctcagatgatcttcgcgtgcttcttcattctgagaatatatcagcttgtcgacaaagaatacaaccactaactgatccagatattccatgaatactttattcatcaagttcataaagtatgctggtgcattagttcattcaaacgacatgaccaaaaactcatataattcatatctcgtcgtgaaggctgtcttcggtacatcttctgctcgaatctttaactgatgatatcccgaactcagatctatcttcgagaatatcttagcatctttcatttgatcgaataagtcttcaattcgaggtagtgggtatttattcttgatggttacttcattcaaacttctatcatcaacgcacattctccttgaaccatacttcttgttcac

SEQ ID NO: 4721 - DNA, 336 bp, Zea mays
aaatactactgtatcttttacacccttaaaccaatactagtgaatctattaacaccctataactaatctttgtttcggcggcaagaatattctctaaagtgttgtgcttgaaattagacctctttactcacatacacttggcagagatcacattactggactgtgagcaggattcttaaatggtaacacgagttaaaaatattggctcattatcgtacaatttggtcttgtcttgtcaggatagtacttacaaagttcgtaactcttactacaaaatgtgaacataaatttacgcaatctaatggtacatctccaagcatcctcacacgaattttg

SEQ ID NO: 4722 - DNA, 294 bp, Zea mays
tgccacatgccaacctcattaataaactcgaaaagccacttgcttagcaaacacttattctgcaaacatattcaaagcaaaaccccccaccatggctgcaaagatgctcattagcaaggcatatttgctcttatgatatcgtccctgccagaagaacctaccacgagagaaatcaatcctgtccaacacctctctaggaacttcataaaatgacagtataaacctaaccaggctcgaaagggacaaaatgattatcaatcagtcgactaccgatcgacatatacttttcattcc

SEQ ID NO: 4723 - DNA, 406 bp, Zea mays
agcatatatggttagatgagaagaaatacatttttcttatggatttgggctaaccattgaaaccacgcctacagtaagaagcaagcgaaggcgcacttggccaatgaacaaattttccaagaaatgttcaaaccacggataaactccctcggtgacaatgcaactttaaccgcctgtttgggaggaaggataccctaagggttacatgtgcacgtatctcacaaaaagaggaaatacaatcggtgggggaactcaggaagaggaagatattctgactgctccaaatactttgaattaaaaatagggaacacttttcataaagcatgaaatatcaggataacccaccatatgaaaaggggatactggctgtcaatcattaatcaaaataaggactaccatgccatac

SEQ ID NO: 4724 - DNA, 109 bp, Zea mays
gagagagagagtgatctgtgtgatatttgtcgctcttgtcgcttggcttttgcaatcgcgctttcttcttttcccattcctattttcaagtgacttgtaatcaaagcaa

SEQ ID NO: 4725 - DNA, 358 bp, Zea mays
actcaactttacttgcgtcatcacctcgaatataaccttctgtattcagcctgctgccatttgctctgtagctgattacaggaaactctgtggttttccggctagcaaaattatagcaaccaaaattgtcatgcaatccactctttctagccttcgtctgatagtgccagtcgtgaactcgacaaaagctgtccgcaaacggttccaccgcttggcttcgaagggcccagatataaacgctaagcctaacaatagcagtaggagccagctgatgaaagtagataccaaacctcttcagtacctctgcaataattccatgtaaggggaaacttaatccaccctttaaaagctcttgaaa

SEQ ID NO: 4726 - DNA, 468 bp, Zea mays
  unsure (1)..(468): unsure at all n locations
ttaatcactgagctgcaactgactttttggtttatacaattatgttgtttgtaatacctatggacatgaactgtaaaccggactatgaatgttataaggacttggctatactctttttggcttttccctccaaggatgttctcacgaggtgtgaatttttacctatgagggctactttgggaacctcaaatcccttctgggattggaggggattgagatggaaataaactaatttcctctccaatcctctttaatcctgaaggggatttgagtttccaaactagccctgcaggatattaatgaggcagcattgcactaaagctccaatttaattatatactacctagttggttaattggccttntgtgaaggcttatgttcgatgcacatgaagacaatatcttatgtctactgttctgtgttctagctacttggagatgtcaatggagatgtattttggtgaattct

SEQ ID NO: 4727 - DNA, 437 bp, Zea mays
  unsure (1)..(437): unsure at all n locations
tgctcctattatatctcagaactcaaatacacaccccttccaaaaccaagccataagtgcccaaaataagcattgctttcaatgttggaaataacatataatcgtataaggaataatatcttcaaaatggttttaatttgaggtgcattgcgccattgtacaaaggtgcataacaccatatccacaatgcaacaattcacgggccgaggcttaattggttcattagtactacctacagtcataaaaacatgtcatttangacaaaatttagtaaagctttaaaagctaaggacatcaataacttttaaattatttagtctgaaaacatgtangttaaatgtgtagaattctattggaaaatacttgaaaaaactcatactttgaaggattntaataatatactatagaagagactaatggtcaaatatatgcatgga

SEQ ID NO: 4728 - DNA, 478 bp, Zea mays
tatgaaactaagcttgcggcggcaccgtgctcggtttcctagcgatcaccgttgttatgtcccgacaagggtgtgagacgtgcggaagggctagaccgaaagggtgggcttctaataggcaagggcgtgggcacgggcgcatggctagtggtgcggtcaagccaaccagagctcgtggcatgcgcgggcgcggtcagagcacattcccgagtgctagccgaggtcgaacacgtggaggtttgcttctgtccctgtccaagcgcttgtttagcttccctaacatgtatatcttggcaaggatccatgtagggtctcttccctgctcgaaatcatttcttttccatgtgagtcccgagcttagatatgcttagggtgaggagaaaagcttatgtcaagtcgggtctgtcactctgcttgggtcgtgacaaaaaccaggccaaagcgtgtcaaacagtattggtttggtgtcaaacttcac

SEQ ID NO: 4729 - DNA, 308 bp, Zea mays
  unsure (1)..(308): unsure at all n locations
gtttatcggcctctcttggcgctttntgggctcnngcttgcccctngagcctggtntgaatgtcttagagattccttattgcaatggcttcaagtcggaaggccgatcctcactctttactaaactnnaagaaatgactagaaagaaaccaaaaaatagaattgaaaaaattataaaacatactataacaatgtttaaaaaaatgtttaaaaattaattaaataaattttttaaaaattaatttaaaaataattatgaaaacttttaaaaagaacttatttcccaacacgcactcttacattttgtta

SEQ ID NO: 4730 - DNA, 378 bp, Zea mays
  unsure (1)..(378): unsure at all n locations
ntcaggctttcagacgaagccgatcacaactcaggctctgtttctatgcacgcaagaccatgagaagtatcttcaagcatacgtccgaagattcttgcgtctcagagcacaggcgcctacagtgcccaatgaaattgtcattgaggccatgatcaaggggcttcgtccaggacctactgtccagtattttgccagaaagcctacgcagactttggagaagatacttcaaaagatggatgagtacatcagggctgacaatgactttcgccaaagaagggaggaagcttacaagttctctgagttgaccaggggctccggaggaagaatacacccgaggcatgtcaggtcaattcacaactccactcagaatgatgacag

SEQ ID NO: 4731 - DNA, 433 bp, Zea mays
tctgcgtgacagcagaaagtggaaccgacttaaagatgattatgctacttagacctcaacagattactatagaattattatcaactgtaacaggcatgaatgtaattttgtatgaggtgtgtaccgcgcctataaatatgtgaacaatactctcgtactggtcacgctgacttggcattcgctttttgcggcacgctagtactatcatttcctttcaattgaaagtacacttgaaattcaacaatactcctgtttattcataataataatgcataaatgcgcatgttgtcatttataatttttacatttcaatcttcgccattatataatgaatctatgaaggtataccctttatgaccttcgtccgagaactattataccctaatggaaataatatttcgatgacgaaggacttttacaattaacatcttct

SEQ ID NO: 4732 - DNA, 279 bp, Zea mays
gactgcatgacttggtcgccagggccgatcttcagagtcttcgcctccactcttcacatcatagctatcgccgtcattagtatcttcagacaatccttctagaatctctttaataatcttctctgcattcgatattgctattgactcaacaaatccagcagtcttctcctctaggagcttctcctctttggttagcttcgtctcaacaactgtcctcttgtcttgagacatcttttcttcatatataacgaacacatgtccctaataccgaagcctaaa

SEQ ID NO: 4733 - DNA, 465 bp, Zea mays
  unsure (1)..(465): unsure at all n locations
tgaacaaaatanatagcttcggttgaggatgcattcagcaagcttcggctttggtcaaatttttggtagcaaaacagcgcaatagcaatgaatgttgtggtaacttcacacctacccgtctgtttatatagtgctgtaggtgggaaggtgaatcatcaaggtcttccgcaccggacaaacagccacccgcacccactgaacggtgggccataaagttcaagaaggtgaatcgccagagcgtgcgtaactgctgcatgatggggccacctcgcgctcggagtattttaatcgtttctcggcaacgagctcagggaaggtgtttttcggatcttcggcatcccgaagcctagaagattntttcacggatccagctcgttacgaaaaacgatctagcaccgcgaatgggctactgttgtgggtatgcttcgtagccgaagatcctgaagaaagaaacaccttccgcag

SEQ ID NO: 4734 - DNA, 380 bp, Zea mays
tgactatgaaggggccctttttcttggctccaacttgcccttggactccgtccgagctggtcgaatgaatacgaggttcccctcgcttgaactcctcgggatgactgcgtggtcgcgccatgctttggtctgggcttggtatttgtttagggcctggagggcgaagacaccggctctcgctatgagatactttgaagttggcttgtccacgtcagggaccgctgacggaactgtacgcggggacccatgtcttatttcttgcggggtcattgcctccgatccgtatagaaggcggaaaggagtgaacccggtcgccctgcaccaattgtgtttagcgcccatactggctccgtacaaatcggccatctgcgcttttttca

SEQ ID NO: 4735 - DNA, 389 bp, Zea mays
tctctagaatcttgaggtaaactatgaacctctatcagacacgatgttcattggtactccatgtaaacacacaatccgagccatgtattactctacaacgtgagaacctttataagtagtcttgaccggaatgaagtgtgccactttggtcagtctatcaacaatcacccatatagaattgtatccttttgggatgtgaggcaatccgataatgaaatccataccaatctcttgccactttcactcgggtatctttagtggatgcagtagtccagctggcctctggtgttcaaccttaactctttgacacacatcgcacatagccacatgtgcaagcacatctctcttcaattcataccaccaataatttggcttcaaattctgataca

SEQ ID NO: 4736 - DNA, 292 bp, Zea mays
agactggaggcgacgattggaggggtactttgtgtatactccacctctctttcatccgacgccttgaatgcgacgggttgagcttccgatgtatatagataatcaatctcgttgatcttcctccagccttcgatcatgcgctcaaaacttacaaaacgccccgaaacttcctcgtgggtcatatttgtatatattggattaccacgaattaattgaacttcagtatgggtaaggaaaaagagaaatcttataataaccttaaccccttcatgggcatctcactttacactcc

SEQ ID NO: 4737 - DNA, 411 bp, Zea mays
  unsure (1)..(411): unsure at all n locations
tcgaggaatcgacaatcaagatacggtgactccgagatcttgtntttcaagatctaaaaggttgaagatcctgagcatctatntggtgaaggcaagtgtcctctgacctacttattccctattcacatgataattcatttccctacattacgtaattaaaacctaaggattgactagctttctatttaccttgtccttcggtacctcttggcttattatggttagctttatgccaccaattaacatgatgagatacatttatgatacgttgatgatatcttaattatgatgatgaacatgtgatactttatgggactcaagctgtttcccgagtacctctctgtaaggacctgttctgtggataaccacccatgaaaacagtacaaccatgacggtggaatgggatgccct

SEQ ID NO: 4738 - DNA, 300 bp, Zea mays
cgctaatcagttcgaaaacaagaactccaattgcatctcggaagaagcacgaactccaacacttcatctttagtggcagaggctaaagctcgctcctcaaacagtatatatgcgaacattgtacacaatatcatgcttcttgtggcttgactaaccacgcaaggaaggacaactcacaggttaaagtcaagggaatattgaagaaatgctctagcaatgatgggctaaataaagttgaacccaagttcaaatccttgaagcccaacaatgggagagagggacttggggacaactcataca

SEQ ID NO: 4739 - DNA, 439 bp, Zea mays
tgacctccaataagaagaagtgctcgttgacttcctccacgcaaatgccaaagtatttgcgtggagtccctcggacatgccgggcatactgagggaggtcgctgggcactcctttgacatctgcgcaatctccagactattgagacaacacctaccttgattcgaccaggatgggtatgtcaggagcaaagtcctcgagatctttggcctcctgcccaaagcctccactatggactaaggccttattgcctatagaccctgtctggggcctacagatcctttgtgtcgtatgagggggacttcacacactcggcataatctcccggcttgaggtttgtttgcattagaacatgaacgaacacacatcatagtgaagtgacacactccctcacttctcaagtgggttgacagagagcattcctatccaatattgcatgct

SEQ ID NO: 4740 - DNA, 459 bp, Zea mays
cacatataaaactcaacttaagaaaatagtcataacatgttactaagaagggacttacattacattcacacccttgaaaaccaaaaaccctaaaaaggaccctataaaaccctaaatccaaaccctagggggttaagtgcaaaattagtccacttttatactaaagtgcacaaaccatgataataaagtgtcctgagtcatatggctcacaatcatgaagattcgcaagctaaaccctgaattttggacctaattgcaaaaagaccctatttgagttctaaccctaagtctgaaattcagtgatattggctcaactttggagctctatatcttccatactattgagaatttaccctaggtcaccacatcaatattatagacctatcagaggtgaacaactttgcttaatgggttcaacatggttgtcatgaataatatgaagacgaatgcacccaaagt

SEQ ID NO: 4741 - DNA, 487 bp, Zea mays
accttaaaactcagctactcagaatatgcacatgaacccagatatcagcttaactcatatacatattggagacaacgtctagtacctgatatgggcgacacaaattctgaaagttgatggtggtgtttcacagttccaatagctatgatgaaacaagtgaaatgttcaattttcagcaccacaagagcaaatgaggccaacttagcttgaagacatatccgaagaaactagcttgcataatctcacactttgcgctctgttggtcatccgatgatgttttctgattcctagcgttcaaacgatggactaccaccggcctgaatatgtacatccaaaacttattttcaacaaaatactagagatcaagtgagacaactaatctaagtaccttcctgacaacatgtggatgagcaaccccagtaattattacatcacaactaggaggctttctgacactaatactctcaatcctgatcgaatatacacc

SEQ ID NO: 4742 - DNA, 444 bp, Zea mays
  unsure (1)..(444): unsure at all n locations
actctatanaaactcaagcttgagcgggtcggaatgcgatcatgacgaaggataaaatggtcactaatctatgtgcagaacagacttcggatgacggcagaaaagacgaaccgactctaatatgaatagccaaattatacctcgaacaatcattatagagttattgataaatgtaaagggcattaatgtaattctacacgggctgcgtctcgcgcctataaataaatatcctgtactgttcacgctgacttggtatcgctanttgcatcacgcttgcacctttacttttcatcaatccgaaggtatatatataatttgttgttacgaatttgatactaaaaataagctgatgatagtatctgcattattatttgacttcatatatgagtcctcttcatcatctatcgaattacgaaagcttttccttctaactcttccaaatta

SEQ ID NO: 4743 - DNA, 470 bp, Zea mays
  unsure (1)..(470): unsure at all n locations
tgagtcaatcattttgcnaggataattgatgctcaaaatgttaatctgggtatgaagcacattcgagagaagataaaggctggagtatccaagtgtttcaaggaagacgatcaaggtgtgatatggtttaaaaaccgcatagtagtgccaaagaacgaagagctccgccagcaaattctggatgaagcacatcttagtcgctattctattcatcccggaagcactaagatgtatcaagacttatagcagcattactggtggactaagatgaagattgagattgcacgctatgtggctaaatgcgacacctgtagacgtgtcaaggccatacacatgaaaactgcgggtccattgcaatctttgccaatctcaacatggaaatgggaagacatcagcatggatttcattgtgggattgcccagaaccgcaaaaggctttgactccatctgggttatcatcgatcgacttac

SEQ ID NO: 4744 - DNA, 452 bp, Zea mays
  unsure (1)..(452): unsure at all n locations
tctcctgtccggaataatctacggtattccggacagtcgatttattatagttgtagatgaacctttggcacctgtagaacatataatctacagcaaactatttcgtccaattatttgtgttgggcaattcaaccaccaaaatcaattagaaagtaggtgtaagcctaattccctttcaatctccccctttttggtgattgatgccaacacaaaccanagccaatataaaagtgcataattgaactagtttgcataatgtatgtgcaaaggttgcttggagttgagccaataagaattcttgcatggattgtttctttacttttaacattatggaccacgcttgcaccacaagctnttgtttntgccaattcttttggtaatatctttcaaagtcattttgcaagatagcccaagatcaatgaataagattctgagagcattttcacaattga

SEQ ID NO: 4745 - DNA, 450 bp, Zea mays
  unsure (1)..(450): unsure at all n locations
gcttggatattcttcagaacacttctgatattgnttgtgataaatgaaacctcttcttcacgaagcatgaaaagaagggaaggtgtttctttcgtctcagactcaaaaacggttcgtatgtataatttcatgcatcgtaaagaattgaaccataaaagcaagtgtattacattcagggttaccagatgttacacatattacatttcagaagtttttacaatagcacttaatcttctctaagttcaacttccgcagcttcgttcatgagaccgataacaacttcatccatgatagcttcagccatctttataattccgtcctctcctttccgtgaaggccccgcaacgcttttataggatctgaagagaataggaacacctcattgctttacaaattgcaacaaatttaaaccaaaattcacccataaaaccttattatccttttgccttc

SEQ ID NO: 4746 - DNA, 434 bp, Zea mays
  unsure (1)..(434): unsure at all n locations
taaccttgtaacgaggataagctgcctttgtttcttatgtggatggtccttaagtctctctgaaatccttataggtaaatgcttgagatatatataacatgctttcataagtgcttaaactgtcatgagcatcacacttatactatgacacaatgcacttcacattctctatgatatagacgtaatcccattaacctaattatgtgcacttggcatttaagaccaaaaaatttgtattcctctcaaagcacaaatttagggggagcaatctatattatatagaattgtttaagcttaattgacatacccttttaatcatgtctctttcccttggtacatttgcatatttcttctctctatatatgccaaggctaagactaatatgtnttcatgagcatctcatgtattaaggcctagatcgagagggaaatgga

SEQ ID NO: 4747 - DNA, 352 bp, Zea mays
  unsure (1)..(352): unsure at all n locations
ggcatcctaggtgggggaccaggtaccagggaggagtcaacaacatcgcacacagcaggaataggcggtacacagataagtgccaacactgctttataaatagtgctcaaaagtaccttacaaaaagcaaaagtattacatccgccttcaagcggaatcctagttccatctctactctgcaggtataaactacccgacgccagcagagtcgcgctggaagttcgtggccactgtccctgcggaatccttcaggacgacgtgacaacggtgatggccgcctcaatgcatgcgccattgcgaagagatcctcgcccctgtcctcctacggngggcgacaacgaggccattaaag

SEQ ID NO: 4748 - DNA, 396 bp, Zea mays
tctcctggacaagcgccgcacttactgcagagtgcgaagctgccacatacagcagcagaggagcccctggcgctggtggagttaaagttgttaaatctatcagattctgcttcagctcttcgaaggctttttgctgagctgatccccattgaaaaacttcggctgacttcaacacttcaaagaatggtaaatttctctctgccgatctggatataaatcgatttaaagatgccagtcttcatgttagtcgttgagcccctttctttgtgcttggtggttctatccgaagaatagcttcgattttatttggattagcttcaatccctcttgttgaaaccaaacaactaaagaattcccccttctttactccgaagacacaattttctggattcatct

SEQ ID NO: 4749 - DNA, 393 bp, Zea mays
  unsure (1)..(393): unsure at all n locations
tgtggaggttcttcatacccacatgtgctaagcggtgatgccacagccagcccatgcaagtcttagctcttaagcatgcatctagaccggcctcttcttttgcaaaatcaactatgtaaagcttgccgtctagtacacccttaaaagctagtgaaccatcacatcttctaaagacagacacatctatatttgtaaacaaacaattatatcccatattgcataattgactaacagatagcagattatatccaagagactctactagaaacacattagagatagagtgctcatttgagattgcaatattacctaacccttttaccttgccttgatatccatcaccgaatataattgaatcttgggaatccttattctngacgtacgaggtgaaca

SEQ ID NO: 4750 - DNA, 467 bp, Zea mays
acctgcggcatgcaagcttcggcttcatctatattatggatgacctttgtttccgtccaatttccttcggctctgctggcaacctcttgactcccatgtacaacaatgggtccttgtttacaagtaataaaactaataagggctatctaatcatttttcctttgcttggtctcggacaaagctattgaggtaggggtggatatcgagctacctcggctcaactcgaccgagctccagctggcttattaagggaacgagctggctcggctcgactcgttaagcaaccaaaccaaagaaccagctctgctcggctcagttgcgagcttaagctggatcgtatagctcgtgagccacaacaaaaaatagtatacttgtatatatacaacaatataaccaattgctagttaatgtcatactatattaacactagagaagactaacaatcctcatacatttatatatcacat

SEQ ID NO: 4751 - DNA, 259 bp, Zea mays
acattgtcttcctgttggaagccaaagctacggcgtctctcactatatagcatacttctagcaactataaatgtttcatttcctatctcatgctcattaacgttgctacgttagttgtgctatgcgatcatcttgttgattaattaatgctatgagatcatgaatagcatcatccctaatgtctctacatctattacaattggaaacatcgcttacaggatcatgtctagtggttgcaagcacattatctcatcaatct

SEQ ID NO: 4752 - DNA, 430 bp, Zea mays
tggcgaggaccagatcaccgaagcttataagtttctggattagatgtggtcacccaagttccgttaatgaagcaccaaatgaccaatcaagtaaggaatccatgtgggagtttgcaagagaaaggtttgcgcgttggcatcgatgcttcttcaataagctagctgccaagcaaaagctagaagcctgaagatgatctttgagtagccagaatcagccgttgcaatcggcaaccggatgctcctgaaaggctagatattgttgaagttccatctcctcgaatagtttgcaaagtgaaaatatgtagctgaagtaaagctatacccataacccttctaagccaaatctcgaggacgagattcctttaaagtgggtagatttgagcatcccaaaattcaaatctgaaatttctcaactcgctcaaatcaaatg

SEQ ID NO: 4753 - DNA, 397 bp, Zea mays
tagaaaaatctggtatgaatctgcgatagtacccagctagttcatgaaaactccggacttggtgaacaggtgatggggggttccattccagaatatctttgaccttgctaggatctaccgcaattcctttagctgataatacgtgccccaaaaatcgaatttcttgcagccaaaatgcgcacctactgaacttggcataaagctgatgttccctgatgcgctgcaatacaatccgtaaatgctgagcatggaccccttcaatcttgtaatatatcaagatatcatcgatgaagactaccacgaacttgttcaattcatgcatgaacactgagttcattaaataagttgaatgggcacgagcatgtatgagccctaaagacatcaccaagtattaaac

SEQ ID NO: 4754 - DNA, 384 bp, Zea mays
  unsure (1)..(384): unsure at all n locations
tgaagccatggtaagtagcataggctaataatatgcgaattgattcaagcctagctacgggtgcataggtttcaccgaaatccaaaccttcgacttgggagtatcctttggccacaagtcgagctatgttccttgtcaccataccatgctcatcttgcttattgcagaagacccatntggttcctacaacattttggttacgacgtggaacttagcgccataccttgttccttgtgaaattgttgagctcctcttgcatcgccatcacccaatctgcatcttggagtgctttctctaccctttgtggctcaatagaggaatacccaagagtaatgctcacataaatgtgcaacacgagatcgagtagttacccccttatgaatg

SEQ ID NO: 4755 - DNA, 237 bp, Zea mays
  unsure (1)..(237): unsure at all n locations
nttgcgaccaagaggtctggttattctagttctacaaagttgaagaccctgagcacccgtttggtgaaggcacaagtcctatgacccattatgatctacttacttataattgaatgtcctgcactacttaattgagacctcacgagtgactagctctgtatttaccttgtccctgattaccctctgggttactatgggtagcattatgctattgcgctactttcatcaatcaacatg

SEQ ID NO: 4756 - DNA, 441 bp, Zea mays
agcttcggcatctttgcgtgtcccctcttcttgagcccttggccgccaatcagcgatgaaatctgctatcgcatgggattgaattgaagatctgtgcaccgtctcaataatgaattctttaagctccgcggcccacttttcaatccttccaggagcttctctattcctcatgatatccttcaggggctgtgatgaaggaacaattatgtgatatgccttgaaataatgccgaagcttcctggacaccatcaacacaacatacaacaccttctccaattctgtataggttttctttgataaactcaaaacttcggaaacgaagtatactgggactggctttttggcttggccttcaaggttttcttgtacaagcgccgacttactgtagagtgcgaagctgccacatacaatagcaatggagcccctaactctggtggagta

SEQ ID NO: 4757 - DNA, 200 bp, Zea mays
  unsure (1)..(200): unsure at all n locations
aatttaactcataactacctattaacctatttcgtnacctaagaactacctaactactgcccaaattcgatacaacttcagacgaaatcgagatgatcgacccataatcaggaagatagatctagccaaacttcaaagaattcagatccacaatcttggttggagtatatccttaccctaccctatctggcccaaaccta

SEQ ID NO: 4758 - DNA, 405 bp, Zea mays
ttcttgcgcggcgcggtgactaaaggcgaccatacacacaagtgctgtcaactattataggaagatcttgatgaacagataactgttctttcttcctactttctttcttttctctgatctcttgagtcgtgctgataacgtgttgtcatctactcaacggtaatgggattgagagagagacaaatgacagcgatgtatcctttattgcatggaagacttgtttatatacatgtgacaggggtcatcaccaaggggtgtgtcccttggggatatgttcgttgagccccttggattggtcaccatatcacatataactttgtaatatgttattttgtaacacgcttgattggttggcgaccggtatgtggcccgttgaagaaagacacgcgtttcttccaaccgact

SEQ ID NO: 4759 - DNA, 458 bp, Zea mays
  unsure (1)..(458): unsure at all n locations
tgccttgattcccatcaccgaatacaagtgaatcttgggaatctttatatcttgacgtaagaggtgaacatcttcttctcccccgtcatatgggttgtgcatccgctgtcgataatccagcttgaacccccggatgcataaacctgcaaggcaaatttaggcttgggtcttatgtacccaactcttgttgggtcctacaaggttaatcacaatttccttagggacccaaatgcaagttttatcacctttgcattttgcccctaacttcctagcaattacttttctatcctttctacaaattgcaaatgaagtatttaaagcacaataaattgtagaggttcattcactactttcctaggagcatgaataacattccttcttgcacatgatgaatagcatttcttttaggaacaacatntctcctagtaacatttctatcatacacataagaagaacta

SEQ ID NO: 4760 - DNA, 406 bp, Zea mays
  unsure (1)..(406): unsure at all n locations
gcttctnagggaaaacacgtgataggcttaactaatgttaccttcgaaaaagatagaccttgtacagcttgtcaagcaggtaaacaagtgggaggagcgcatcacagcaaaaatgtgatgaccacatcaagacccctggagctactacatatggacctcttcggacccgtcgcctatctaagcataggaggaagtaagtatggtttagttattgttgatgacttttcccgcttcacttgggtgttctttttgcaggataagtctgaaacccaaaggaccctcaagcgcttcctaaagagagctcataacgagtttgagctcaaggtgaaaaagataagatgcgacaatgggtccgagttcaagaacctttcagtggaggaataccttgaggaggaaaggatcaagc

SEQ ID NO: 4761 - DNA, 303 bp, Zea mays
accatcgacatgaatcaagtatgcatcatttggttcattttgttccaagacagattatccgaccactctttactatactatttcatcatcacaggaacattatatggaggagactttgaatatgaggaattgatgcaagagttactgaagaaacaagatggcgtgagatatccatcaatactcggtgtaaaagaacacatcttcaccggaaggtacaccctaattcatagtcaatatctgagcgtattagcgccatttatatggacaatcaaagtcaaatcttttaaaccttctacaccgcgt

SEQ ID NO: 4762 - DNA, 144 bp, Zea mays
gtgtggtattgggagaggatttgatcacttgggtgtgtcttgaactgaatgctagagctcttgtaagtagttggaatgtggaaaacttggatgacttgaatgtggggtggttgggggtatttataaccctcaccaccaaactac

SEQ ID NO: 4763 - DNA, 227 bp, Zea mays
tttttactccgggccttgaatgcgaccggtgagctctgatgttaggatatcagctcttgatattctcagcctttgacatgccccaaaattacaaagcccgataccttctcggggtatttattttttttgattccacgaactattgacctggtggggtaaggaaatagagatcttaaataccttacctttcgggcccccattgaactcctagtttcacttgtcaccaa

SEQ ID NO: 4764 - DNA, 217 bp, Zea mays
gacccaagcacgcgcagcacgaaccggaaaacaagctttattgcaacgaccaccaatacgggctagttaaccgaaacaacctcactggaaacccaggccaagacacttgtcctgaacaaccagcacgcagttgagcaaaaaccttggaccacaaataaggaacgcgggaaaaatgctaccaagcctgaaaaggagaactctctcatcgcacaccaac

SEQ ID NO: 4765 - DNA, 173 bp, Zea mays
tgaagaggaaccttcgatcatctcatactaacagcttcagccgaaaactgcttcttcctacaagacctttggcgacgaagcatagtcccaacagatggctgaaaacttggatgcattgaagtgtggtggtttagccaactcatataaatcctttcttctttatatctttatct

SEQ ID NO: 4766 - DNA, 350 bp, Zea mays
  unsure (1)..(350): unsure at all n locations
accacatcatctacgtaggcctccacacgcttgccccagtgatcggctaagcatgtttgaatggctctctgataagtcgctacaccgtttttgaggccgaacggcatggaggtatagcaganagcaccaaacggagtgatgaacgctgatttttcttcgtactactttgccagactaatctggtggtacccggaatagcaatccacgaaagacagcatataacacccagtggtggaatccaccacctgatctatccttgggagctcgaagggatccttcggacagcgcttgatgagatcaggatagtcgacgcacatgcgcccatccactttattctttttgagtacaag

SEQ ID NO: 4767 - DNA, 443 bp, Zea mays
  unsure (1)..(443): unsure at all n locations
agcttctaaggggagaacacattntaggactaacttatgttcattttgagaaagacacggattgtagcgcatgccaagcaagaaagcaagttggtgtccatcatccacacaagaacatcatgacgactgacagaccactggagctcctacacatggatctattcgacccgattgcttacataaacatcggcgggagtaagtactgtctagtaattgtggatgattattctcgcttcacttgggtgttctttttgcaggaaaaatctcatacccaagagaccttaaagggattcttgagacgggctcaaaatgagttccgcttaaggatcaagaaaattagacgcgacaacgggacggagttcaagaactctcaaattgaacgcttccttgaaaaggaaggcatcaagcatgagttctcttctccctacacgccacaacaaaat

SEQ ID NO: 4768 - DNA, 452 bp, Zea mays
  unsure (1)..(452): unsure at all n locations
ttagggtaaaagtcataagatgatcctaagaataaactngattcnattttgtacccctgggataccagaaaccctaattggaaccctggaaaaccctaaaccaaaccctaggggcttatatgcaaaattagtccacttttgggctaaagtgcaaaaaccaagccaaataggtttcttaagtcctttggttcacaaaaatgtgtacttgaaagcaaaacctaagggtttggacttaaatgcaaaatggacctcatttgagttttgctctaagtctgaaaatcagtgttaaaggctccacttttgggctttataacttgcaaagcatagggtttttgccctatgtgaccacatcaaagttgaagatcaatattaggtgaacaactttgctaaagagtgtgagctcacttgttaagaaaaatccagagaaaaccaagcctaaagttgggctgtca

SEQ ID NO: 4769 - DNA, 442 bp, Zea mays
  unsure (1)..(442): unsure at all n locations
taaggcgaaaggagagtccttggacaggcgggaggcgatctcnctccatgtctggagacggacctcgccaggcgggagaaggatctcgccttcaaggaggaaatgcttgagaggcgggagaagttgctggccgagcatgagctctaggtggaagagaaggagcggacgctggaggagtgggtctgccagttctaggcagcgcaggcggcaccggggccccaggtggtggaggcgacgaagaaagcacttgaagatcttcaggcggagcatcgcaccggggtccagcgcatcaccgcatgggccagcgaggcgagcacggctctggtgccgctaggggtgagtcccatcccggtgtcgcaactgccgacgtccatctccaacgcgctcccggtgctggactccaccgctgaccgcctccgatgcctggatcagattcttggcg

SEQ ID NO: 4770 - DNA, 209 bp, Zea mays
ggaggatggcattccctctagaatgtgatgaccacttcaagacctctggagttacaacatatggaccttttcttacccgtttgctatctaatcataggaggaagtacgtatggtctatctattgttgacgactataaccgctcaacttgggtattgttttcgcaggagaaatcttaaacccaagggaccctcaagcgcttcctaatgag

SEQ ID NO: 4771 - DNA, 351 bp, Zea mays
ttctcttgcgcataacttgatgtaaaccatctttattatttgtggcactgcttcatgctgatctcagaaaaattgtattttcgaatgcaagttgaacaaccaaatttgatgtggcccatacttctggcttaattggtatgaactctgactctgagaacctttgaaaggctcactgcttggttggaagcccaatataacactaagcctacatacgtatgagttattggtgaaaagatccaaatttttcaccatcggaatcatctattaaggagattcaaccacttaggaactcttaaatactattctcttttgggttcgggaatatttttcaccaagcaatatttttttatt

SEQ ID NO: 4772 - DNA, 234 bp, Zea mays
tttatcacaaaccaggagtagggccactgaaaacacctggaaacagcccccgtaaaccagccccgctgggacaccggctaagcggggaagccacccagagacactgggccaacgcctcagacaaactgaaccgtaaaacacagcccgacaccaagtagcacggccagaccggaccaaggtgaggggatggcgacactcaacgcctgccgggaagacaacaaccacaaacgaggc

SEQ ID NO: 4773 - DNA, 400 bp, Zea mays
aacacaagtacccttcattaatgtggcataaatataaacaactaaatcttagaccgcacaataatccaaatataacctaatgtatgcaaagaccaatagtaacttgaacaagcgaaccgtaggattggactcataagaccacactagttatatacccgtgcgttgctacggagttaatattataaaacacaatattttttgtatattaatatattttatctagtaacacacgagtatatacctagttagattcttatatggtgagatcacaactatttaattccattatgctctataggatgcatgtacacgagatagttcacgggcaacgtacggatgaagtggttcgtaaattaataacttcttggtgcccattccagatcaatacaataactttttg

SEQ ID NO: 4774 - DNA, 432 bp, Zea mays
  unsure (1)..(432): unsure at all n locations
aagatatatctcgaatcttnaatttacttaaccaacattntatgcagaggaaaccaaaggttagccttcataaaacccttgtaaacaaccacttcatcagctttaggaagaggaacaatattctctcctcagccctcactatagttgtatcatgaaaatatttacctttcattgcttcaatatgtcctctcttaatagtggattttccaaatacaacatgacttggcctccacggctgatcttcggcgtcatcgttgtcactctccacatcaacatcctcgctgtcactagaacccccagacagcccagctaacatttcttcagtaatcttctcaatattggtcctttccatggcttcgtagaaaaactagctagtgcggggtccacgcttttcttctcttcggccatctcaacgttgaatgaaacaaaaag

SEQ ID NO: 4775 - DNA, 453 bp, Zea mays
  unsure (1)..(453): unsure at all n locations
agctngagttatntttattacagaccagcttattgtgagtgcatagagtaatattatacaaaccatggaggcaaaaactcctcccgagaagacaaaagcaaaagatcttaagtggaggaccgagtcctcccgcacttcagtcttgattttcttcttttggaaccaccttggcacagaagcagcaaaagtctgctacttcctcacctaaaaacaacaaagggataaaccctgagtatggaatactcagcaagtcttacccgactaaagaaaagactctcaagggtatgctggttatatgggagtcaaggtaaggcttttcaatattcaaagactctgtntttgcagaaatgcttactaaagtggatccttaanaatccagttntaattgtcaagttaagtaaaatacctgcactagagntctttctaccctagttcaatcactgatcctgcact

SEQ ID NO: 4776 - DNA, 450 bp, Zea mays
  unsure (1)..(450): unsure at all n locations
tagcaaaagaaatttctagaatcaagaatattgatcttatccnttgtctggtaaaagattgttcatcaagtggctgggtaaagatatcggctaattgatctttagtattaatgtaagaaatctcgatatcccccttttgttggtgatccctaagaaaatgataccgaatggctatgtgcttagtgcggctatgctcgacgggattgtcggccattttgattgcactctcattatcacatagcaaagggactttggttaatttgtaaccgtagtcccgcagggtttgcctcatccaaagcaattgcgcgcaacaatgtcctgcggcaatgtactcggcttcggcggtggaaagagcgaccgaattttgcttctttgaagcccaagacaccaaggatcttcccaagaactggcaagtccccgatgtgctcttcctattgattttgcaccccg

SEQ ID NO: 4777 - DNA, 453 bp, Zea mays
  unsure (1)..(453): unsure at all n locations
ctttaatggcttcttgagagctagctaacttagggtgacacctcngtttttgggggnataaaannnctttctaatgatcacccaaattcatgtgttactcttctctatctcactctaagtttctttctctctctagatttctctctcttttgctcttttaattagagttaggtgtattagtgagggattatttattttatttttcccaaaacatatgagtcatggaatgttgcatcatattgagcctaaatattctttaaaatgttgcacatatttgatttggtttgaatttgaaacttgatttgagtttgaattgaaaaccctagagaaaataaatagaaaaggcaatagaaattctaggaaaataggaaaagccaattcggcccaaggcagcccattaagcccaggccgcgcgcgcgcctgtctgtccctgtgcctgataggcggaccccg

SEQ ID NO: 4778 - DNA, 405 bp, Zea mays
agcttacaggttctccgaaatgaccagtgtgcttctgagggagaatccaccataggcacgtcaatctatccattctactcagattgacgataggggaagtcagcaacaaaggtcgcagtattcctctcaagcttcggggcagcaacagaactatcctcggcccccagctccaaggggcagaggcgccaggggcttcggaggaaggtttggggatcagcccaggaaaatttactgcctattctgcggtgaggacaagggacatactaccaggatgtgccatgtcaccattcaaaaacagaaagagatagcagaacctgtagcccaacagagccagccgaagcagcttatgcatactgcttcgtaccactcaccagacattctagagtatgtgggtaaccatcatgc

SEQ ID NO: 4779 - DNA, 419 bp, Zea mays
agctttactaggagtgtaagggctttgttattttccttctaaaatatataatttggattatagtgaaagagtagaaggataaaatattactttagaactataaataagttgaaattaagatatcattatgtagcttattttatcttatttatgaatccaaaataatattttatcctagtattacttcaccgtaatccaacttatataatttagaaaggaaaagacggtgctccacgagccgtttataggcaataaatatttgtgactcaggccctcgttgtatagatataatctctccagatatataatctggcgccataatccatttataaacaacaacttgatatgagtcagatatataattaaagtcagattagatatctatatctcccagagacctttttgcgatatttgtaaaa

SEQ ID NO: 4780 - DNA, 413 bp, Zea mays
tgtgaaggttcttcatccccacatgtgctaagctgttatgtttatccagcccatgctagtcttagcaattaagcatgcatctagaccggcctcctcttttgcaaaatcaactaaataaagtttgtcgtctaatacacccttaaaagctagtgaaccatcacttcttctaaagacagacacatctacatttgtaaatagacaattatatcccatattgcataattgactaacagataacaaattatatccaagagactcaactaaaaacacattagagatagagtgcttattagatattgcaatattacctaacccttttaccttgccttgattcccatcaccgaatattattgaatcttatgaatccttattcttgacgtatgaggtgaacatcttcttcttccccgtcatat

SEQ ID NO: 4781 - DNA, 441 bp, Zea mays
  unsure (1)..(441): unsure at all n locations
agcttctaaagggagagcacantttgtgacttaccaatgttcattntgagaaagacagggtttatagcgcatgtcaagcaaggaagcaagttggtgttcatcatccacacaagaacatcatgacgaccaacaggccgcttgagctactccacatggacctattcagcccgatcgcttacataagcatcagcgggagtaagtactgtctagttattgtggatgattattctcgcttcacttgggtgttctttttacaggaaaaatcacaaacccaagagacattaaagggattcttgagacgggctcaaaatgagttctgcttaaggatcaaaaagattagaagcgacaacgggacggagttcaagaactcacaaatagaaggctttcttgaggaggaggtcatcaagcatgagttctcttcttctacacgccacacaaaat

SEQ ID NO: 4782 - DNA, 445 bp, Zea mays
  unsure (1)..(445): unsure at all n locations
tcagccatatgttctgtaaagcccttaaattatgttatttgtatataatagaataaataaatacatgtatttatatataaatttttttgggaattaattgatgttctttgtgcatactccattatgggaaattaaagtggtcaaataataaataaataaatacagaatctgcattcatgttgagttcttatatttttgcatttgtattcacatttatgagacaagattaagtttaaaaaaaacagaatttgaaaataaaagaagaaaaggaagagaagggaaaaatacacactatatttacaagataataacaataaataaataatattattacagagagtggaagcatgattcatgtagacttttgttgacattntaaatttggagttcaaccaagaatttgaatttagtttgaataattatagaaaaaaaagagagaagaaaa

SEQ ID NO: 4783 - DNA, 424 bp, Zea mays
agcttagagaaatctggtatgaatctgcgataatatccatctagtccaagaaaactccggacttggtgaacagtggttgggggtttccactccagaatatctttgactttgctaggatctaccgcaattcctttggtcgataacacgtgccccaaaaattgaatttcctccagccagaacgcgcacttgctgaacttggcatacagctgatgttccctcaggcgcgttaatacaatccgtagatgttgagcatgctcctcttcatttttagaatatatcaagatatcatcgatgaagaccaccacgaacttgtccaactcgggcatgaacaccgagttcatcaaataggtgaagtgggcaggagcatttgttagcccaaaagacattaccaaatactcgaataaaccataccgcgtagtaaaca

SEQ ID NO: 4784 - DNA, 449 bp, Zea mays
  unsure (1)..(449): unsure at all n locations
tcngcgcgatggcacaagggggaaccgacctaaagatgaaaagacttctgtgtcctcaatagatttccataaaccgttaacaaatgtaatggacatggatgtaattttacgtgggctgcgtcccgcgtctataaatagatgaacagtactcccgtactgttcacgctgaccttacatttgcttttgcgtcacgcctgtactttttaccttctctcaggaccgaaggtacatttgtaatttgaaatcatttctattttcccgtgttaataaaatagaaatgatcccatgatgatgcttatattatatctcatgctttatatgagtctttcgttattacctattatatttacgaaggtatgtctcttatgactttcgtccgaaactcattatttcccgaagggacataatgcttcgaaggacgaaggactttaacatttaacacttttcat

SEQ ID NO: 4785 - DNA, 354 bp, Zea mays
  unsure (1)..(354): unsure at all n locations
agctntcttcggtggcatgacaaaggtcagtgcttttctaatgtggtcgaaaaggattcaccgaatgtgggcgccaatgttagggacttgttctcaaatgctatgagttaagaacaaggcaacacagaaaatgttgaacattaaagtccttcgtccttcgaagcattatttcccttgggagataatgattttcggacgaaggttatgaaggacgtaccttcattgattcaacatataaataatgaagaaggaatcatattaaatataaaagataacataaacaggtatgtattactatcagctcatttctattttattattatggaaaaatagaaatgaatacacattacaaat

SEQ ID NO: 4786 - DNA, 424 bp, Zea mays
  unsure (1)..(424): unsure at all n locations
aagctgacaaacacattanacccttactcttgaattatctagaagaatacatcagacaggttgctccaagcattgcaagtacaaagaaactgtgcgtgttgcacattgatatcatgatattccatgttcttttgcaaattcagggctaacaaacggctcatcttaacagtataactcatatttatacataagttatcatgatattatatgtttccgttgcaacgcacgggcactcacctagtttataccataagcctacatgtacattaattctttattattttggatcatataactccatgcatatttctctttatttgccttcgtcaataatgacccaatgcttcaccggaaataactgatcatttcttcggaatacccaaagttcatctgtattatcgaatgtttcgccgaataacctacg

SEQ ID NO: 4787 - DNA, 329 bp, Zea mays
tgagctagataatgaaaaacacttgcgttgagtcaagaaccatcagctcaagagagtcatgttgaaagagtggcctaagttgaagaagttaagaagaaaaagagggacattgttatgttgggatcaataacatgacttgagtcagtttggttaccacggctaatgcaggaaaaattgagggactaagcagggagaagtcagaggatgggtaccaaaagcaaggtgagaaagactgttgtagagtcaaggtgacaagcttgaaagttggtgatttgaaacacacataggatactgattaaaacttaagtattctatcattggatggtcaa

SEQ ID NO: 4788 - DNA, 428 bp, Zea mays
agcttcttgtagaagggatgatgagtacagtgcgcctttcggcacgggcgcactgttcgacaacagactggtcagccacgccgtctgctggatgaccctgacgccgtctgccagcggatttgacagggcgcattaaatgctgagagggcacatcgcccgttaacatggtggcaggcggcgcgtcctctccacaataaatgtaggggctgcttggctgtatgggccttacgtcaggttcggcccgttggcttatgtcacgggccacaagccacacggcaggagcgggtctccgcctgagcgggaagcatagggcaaggcctggacacgtgccggcaccggacccccactcatgtcggggtcctcctcgtcccgggactttgccaaggcctcgatcttactcggagggacctgtggcttacccgagggac

SEQ ID NO: 4789 - DNA, 451 bp, Zea mays
tctaattaaatcatgactgtgcctaagcagcgttattataatagtgaaggtggatgtgctcctacttcccacttcccttgatgagcaacaagcacctgcattgagtaatgcaagagtgagatgaaacatctcagcaagcgaataattttgacgagatatttaaaccacaaattgaattcatcaacattttaaaagagtcacaattaaaatcagaaatacttgtagatatggaactcagtagtcccactataaccaataccatctcatttcctcgaacaaccacaataggttctataacacttccctgcgtcaacaatacctgcaaatatcacttcaatgtatgcataggaatgcaatgtgtaggtactctatcttcatacctctgagagtataaaaccacatcatctgcaaatatcacttcaatgaatgcatatgaatgcaatgcatatgt

SEQ ID NO: 4790 - DNA, 429 bp, Zea mays
  unsure (1)..(429): unsure at all n locations
catgcaagcatncttcatgcgagtatcacttatatttatccaacgacagngccacatgtaggtaggacttaaatcattatgtcgaggccttttagcactaatattacagatatgtgcatcatcaagatntaaaatgaataacccattcataatggatgcaaaagccacaaacatgccagtcttagagatcacacaaccatagttatcactcgcaaatgaataaccatccttcatcaaacatgaaggagacataatgtttccactcatactacgaactagataacaattatttaactccaaaataaatcatgatgggaggaggagttgcatagtcccgacggtcaacacaacaactcttgcattatgcctatccggaaaaaacttctcctcttacacgctatacatctttatattctctgcatcaatagc

SEQ ID NO: 4791 - DNA, 329 bp, Zea mays
  unsure (1)..(329): unsure at all n locations
gcttacgagagagagggttcggccttgatgtgagcctgtattatttattctnctccgcgtgancgccctcgcctgtatatacgggaaggccctgtacatccccttntatagatacaacgagatgatccagctgtacatatggaggtgtagccatgctctaaccaggcacgcggagaattgcttgagccctgtccaagcgtatttaccgttgctgcccggggaacggctgacgttactttgccttcatatagagttgagaacactcgacgtcatggacgcatgcacggaaccgtctttacctatagccggagtcatctatatgggacacc

SEQ ID NO: 4792 - DNA, 359 bp, Zea mays
  unsure (1)..(359): unsure at all n locations
ctcccaggctggatatacttggatatctatgagangtgatctgacacgatactgaagatcgatntagggagaatatcgcggcatgtctagacaaaatgcagcgatcgctctgaaagaatgttcacaataggtatcacatcagtatactcccgtaatggatcacgattattaaccgtgataccagcgcgtgccgatcatctcaaccatgtgtgcaccataatatactctcgcgctcgtccggcaccatcagtctgtagtcatgacatcattactcaacgcatccaataagatattcacatagcatatatagatggagcccatgagagtatggctcacatattaatgatgtgaccggagtt

SEQ ID NO: 4793 - DNA, 432 bp, Zea mays
acctatgaaactcagctggacgtgttctgtgatggttcctgggaaccttcgttcatgattctgctgctgcctagttgcgccttctaaagtcagaacatgttatgcagcaaggcttgacttcagttgtacaaataatatttctaaatacaaagcacttctgttggggcttcggaagttaagggcaatgggaataagaagggccatccttaaaactgactctcaagtcatttccggtcatgtagacaaaagtagtaaggcaagagatccgaagcttgaaaaatatttggatacagttcgaaggctggaagcttctttcgaaggtttttccgtcaagaatattccaagaggagaaaatgagcatgcagatctgttagccaaatcagtggcacaggggctccctctacctccggaagtattttttgagacaataaa

SEQ ID NO: 4794 - DNA, 410 bp, Zea mays
gcctggcgtcatcgcattattattcttccggaggtttaagcatatcaactaaccacataccaaataaatgcccctcgagagaaatgtggcatatatactcatacaccaagatgtatagctttttttgcagcaacacccaagcagcatgacaatatattggtgtcgagctaaactgagaacttgcacttccgagaagaatacaatataaccctgtgagctagcttctttgtgcaccttggctgcaatgacctgaccatacttgagctggcccttgtacacatgcccaaaaccaccctcacccagcaaaatttcacttgaaaaatccgatgttgcagattgaatcttcgagaatggaaatacatggatatctttatgtacagaactggatttagaccgctcgcaatgcacaa

SEQ ID NO: 4795 - DNA, 442 bp, Zea mays
tcttcatccccacatgtgctaagcggtgaagtcatattcgcccatgctagtcttagctattaagcatgcatctagaccggcctcttcttttgcaaaatcaactaaataaagtttgccgtctaatacacccttaaaagctagtgaaccatcacttcttctaaagacagacacatctacatttgtaaatagacagttatatcccatattgcataattgactaaccgatagcaaattatatccgagagactctactaaaaacacattagagatagagtgctcattagaaattgcaattttacctaacccttttaccttgccttgattcccatcactgaatatgattgaatcttgggaatccttattcttgacgtaggaggtgaacatcttcttctcccccgtcatatggtttgtgcatccgctgtcaataatccagcttgaaccc

SEQ ID NO: 4796 - DNA, 454 bp, Zea mays
  unsure (1)..(454): unsure at all n locations
agcttagcataagaaatntctagaatcaattattctgtctcatgcctaagncngcgaaaagattggtcatcaagtggcttggtaaacatatcggctaattgatctttaatattaatgtaagaaatctcgatatcccccttttgttggtgatccctaacaaaatgataccgaatggctatgtgcttagtgcggctatgctcgacgggattgtcggccattttaattgcactctcattatcacatagcaaagggactttggttaatttgtaaccgtagtcccgcagggtttgcctcatccaaagcaattgcgcgcaacaatgtcctgcggcaatgtactcggcttcggcggtggaaagagcgaccgaattttgcttctttgaagcccaagacaccaaggatcttcccaagaactggcaagtccccgatgtgctcttcctattgattttgcaccccg

SEQ ID NO: 4797 - DNA, 448 bp, Zea mays
  unsure (1)..(448): unsure at all n locations
actcgcttatatgacaagacttgttcaaaagctactaatgnttatccttaaaagcccagttntatttgtcaagttaggtaaaattacctgcaactagagttctttctaccctagttcaatcacttgacctgcactagccaatttcttaacaacccttcatctttactggagttctacgtataggtcagtgaccaagtcttcataaccgcgaaggtacgacgatccgaatcaattatactcagctgaggatctccaatcacacgacatatgtagcacttaacccttgcatatgtcaactcgccagcggggttcttaagaccagatcaggtccacgccaaccgagagcacagatacaccaccgtcctgcctcttgccacggagggtacacactactctcgccatctctccactcccattgcgtggtatcttattctggtattagtcctgc

SEQ ID NO: 4798 - DNA, 328 bp, Zea mays
agcttgaagcagatatcagccgctaccgtttatagcatattgtcggcaatttattctattctaatttcaaggtaaacattttgtgtctaactcttattacttttggtacgaaaatattttctaacaaaggctatttattcacagagcatgcttttgagcaaggcattaaaaatgcaacaagatttagaggataaaaggcaagaagttataattgaaaatttagaaaacaaaataaaggagcaatctgctgccattgagaagaaaaccatcgagctacaaatagccgaaggcttattagtggatgctgaagcaaaaataacagaattaa

SEQ ID NO: 4799 - DNA, 368 bp, Zea mays
ccagtcttacctatcaagcatgcatctagaccggcctcttctattgcggagatgactgaataaagtgtgccgactaatacacccttaaaagatagtgaaccatcacttcttctcgatacacacacatctgacattgtaaatagacagctataccacatgttgtataatggactaacggatagctgattataaccctagagactctactagttacacatttgagatagagtgctcattacaaattgcaatattgcctaaccctgataccttgccttgattgccatcaccgaacataagagaatcatgggaaagcatattatcgacgtaggaggtgaacatataattctccccccgcatatggtttgtgc

SEQ ID NO: 4800 - DNA, 391 bp, Zea mays
  unsure (1)..(391): unsure at all n locations
agcttcagcaacttaagccttcggagaatatatatntcccttatgaccaaccacaaaaccattacatgaaaatcgaaatgttctttattatacagaaaatataactaaatggaaaagactgttatcaaggtaggatacttgtcaataaatgtgctttgactccggcacggtgctgttgactgtacgagcttcggactgctctctgaagtccctttggtgtggagcatattggctcccttctggcttgtggccttgttgcaacggtggtggaggtggaggttgttgccagaaaactagaggttgactcgccgaagcaacaaaactgcanggtggntacctacgtattctgggatgtaacgcacatggtacgaagcagtatgcatgacctgct

SEQ ID NO: 4801 - DNA, 440 bp, Zea mays
  unsure (1)..(440): unsure at all n locations
tagcccaaagcatcggaaatagatntatggcccatattttgtttaatggcgggcgaaaaatggctggtgacgaagctcgaagccaccttaagccagtgagaaacttatatttgttaattttaccttctccttgaaatttgcagctttcttattctgttctttaatatgtgcaggatgacgaagctgaagtatgacaaagctgaagtatgacggcctgaagcttaatagttgttataatagactttcctgcaaaaaattctggagagatccttgtaatatgatttatggaaaaaatttatgtaaatttaaatataccttgtaatatatcttgtctcctttatccgtgtacaatctgctttgctgtgaacgaaactacacttttgagccgaaggcgaaaaactccttcccttcttttcgtacacaacgaagcatgaaaattt

SEQ ID NO: 4802 - DNA, 477 bp, Zea mays
ggatccttaaatcacctgcggcatgcaagcttgtgattttaccaattgaaagacactttctctacttatgaatttccatgaaatatcttaaaagagattgtattagtaacacaagcaatagtttcctatttagcaacctctagtgtatgaatgacaagaaggttactaaaataaggaaacctcatgatatgagctaaattacccttacaagcatcatgcataacatcaattgtaaaaaagatgaaagtagcatgattatttaattaagtttacatggcaaatttaattcatagcatggtaagtgattaatgtagaagactcaaaaccaatttaaatgagaatgaatacatcacatagtattggttagatcttctttgaacgttgaatgtcacactccatttgggaaacacattctcatgttgtgaaactacataaatcacttagataaaaacattagtctcacaactctagtcatat

SEQ ID NO: 4803 - DNA, 437 bp, Zea mays
  unsure (1)..(437): unsure at all n locations
acgcataattatacctttgatgtcttctcgtgctgataagncattcttcacataaaaccattctgtcatccaatccccgggccatctcttccgaaaggttggtacgggacagcttgccccggaccgagaaacgaagctgtagcagccaaagttgttatggtactgttctttgccccaaggctttgtttcatataataattcatgaacattacaaaagcttcttgcgtcaggcttcagaccttggctcctcgcggcccacacgaagatatttagccttataattgcctcgggagtgagttgatgaagatagacttcgaagattttcaacacctccacgacgaagctgctcaaggggaatcgcaatccagctttcaaaaagcttcggtacaccacaacttcattttcttcagggtgtggacaagttttttccccttcgt

SEQ ID NO: 4804 - DNA, 466 bp, Zea mays
  unsure (1)..(466): unsure at all n locations
agctngagaaggggacaactgtagcatgcacaaaaccccttcaaaagaataccaagctttccaagaagggcatgagcaaaattcatggtaagaaaattaatgctcatactatttgctctaacaatgtacctatgtgcttcaacaaagaaagatcaaagagaagcgataggagatgctatggatgcaaggagaagggccatgaaattgattcatgcccccacatgaagaatcaagaccttgcaggatcaagaaatatgaccatcaaaaaggatgaaagcaaaaggcaaatgctttgcaaggacaagcatcacatttgctacaattgccgtgaaaaaggtcatctattcaaggattgtcccatgagtaagtatcctaagcctaccatgtcaattctttcatattcgcttaggagacccaanaatgacacttgtgctagaaaggtaattagttcacctaaaactagcac

SEQ ID NO: 4805 - DNA, 443 bp, Zea mays
gtggacagcggaagactacgccgacattgattcttcttactatgaagaaacggagtatgacctgtccactagactgggaacccaagtggaggcggcacccatattagatcgagtggtaagttttactcgattttaatactcgacatgtataaattgtatgtgtgatgcaaattgtgttgtacagggtaacacattgcgacggtcggtagaggacattgatcgccaacttttgactacgggcgacagcagcatgcgcagcttcttgcaggtaagcccacatgcatcgtttatagcctttagcgtgttatgaatatgttgtaaactaatatgtctttggcatgcagcgtttatctaggcgcctacgtggagctgctgctcgctgtggctgcaggactactgttgaacatgacgtccatgtaccatcgtgtaccgacacagcaacg

SEQ ID NO: 4806 - DNA, 369 bp, Zea mays
  unsure (1)..(369): unsure at all n locations
caccacctatactgaacaggaccaccgaccttagcctcatatggaagatgtgttaagagatgttgcatatgattgaagaaacccagtggaaatatnttttccaatatgcacaaaagcaccagtgcctctatctccaactgttccatcacatctccttctgatatctttagcacacaaccgtctgtaaaaatagctaacttcagctaacgttttccacacaggttcggaaatgtacccacgaaacattacaggcatgagcctctccataattatgtggaagtcatggctcttcagaccattcatcttcattgtcttcaagttcacagaatcttctaaaccagcgacataaccatcggggaaatataatat

SEQ ID NO: 4807 - DNA, 439 bp, Zea mays
  unsure (1)..(439): unsure at all n locations
ggattaaatttgtaaaanagacttataatttagagaactttctcttcatggtgttcagtcgtcgtttcatcctctggccaggtagaccgtacgtacccttcctccggaaaaaatttctttacataccggatataaagaattttttttacagcccctcacatacaatagttgttggtccatataaacagaaaaaaacaaattactaaagggttatnttgtaaattttgatctgtctttgtgggccttcaagtggtggatgtgaggggttataaaagatgatgtttacatccggtatgtacagaatttttcccccctcctctttacataccggatgtaaagaatctcttttacagcccctcacatacaatagttgttggtccatataaacagaanaaaaataaattactaaagggttatttttgaaattttgatctgtctt

SEQ ID NO: 4808 - DNA, 452 bp, Zea mays
  unsure (1)..(452): unsure at all n locations
ntgtgtctgtgcaggtgagagaaaccctgcctcatcatcaaattttatttactgaacatgaaccatcaggtctcctaagaacaaaccgattcatggtaacacgatgggtggtgcgttcaaggggaccgaagtatatttacgtaatatccttgtcatgatgccaaatccacatcataactgctagcagcagtagcgcagcataacacgtttctgaactgtgggcctatggcacaaaagtccgacctgtggccgtactaatctaattaattaatagccatgaccgggtcaaagcttagaagggatactccgatgaggccccagccacaagatgacaagaagcaactgccccactatcaacgaggaatacagaaacattttttcttcaaccatttccgtgttttgatcagttcaactgagctctctgtagccttgtttaagggcctccataccct

SEQ ID NO: 4809 - DNA, 378 bp, Zea mays
agcttctaggttatgcaaaagagctatctttgatttatgttatatgcctctaagtttgaagtgggggatcatgtgtacctcaaggtctcacacccaaaaggtgttcacagatatgggattaagggaaaattaccccctcgctatatagggccctatgaaatcaaggagactcgtggaccttgttggtgatctttcagaaagtgatactgaatgtctatttgcttagtgcggctgtgttcaacaggattatcccccatgcgaattgcactctcattatcacataggagagagactttgctcaatatagagccatattccctaaaggtttggctcatccaaagtaattgtgcacaacaattggcctgcggcaatgtactc

SEQ ID NO: 4810 - DNA, 450 bp, Zea mays
  unsure (1)..(450): unsure at all n locations
ntatcanatggacgtgaagagtgccttcctcaatggacttatctaagaagaagtctatgttgagcaacctcccggctttgaagatagtgagtaccctaaccatgtttataaactctctaaggcgctttatgggctcaagcaagccccaagagcatggtatgaatgccttagagatttccttattgcaaatggcttcaaagttggaaaggccgatcctactttattcactaaaactcttgaaaatgacttgtttgtatgccaaatttatgttgatgatattatatttggatctactaacgagtctacatgtgaagaatttagtcggatcatgacacaaaaattcgagatgtctatgatgggggagttgaagtatttcttaggatttcaagtgaagcaactccaagagggcaccttcattagccaaacgaagtatactcaagatattctaag

SEQ ID NO: 4811 - DNA, 417 bp, Zea mays
  unsure (1)..(417): unsure at all n locations
ggcttggtgaagatgtcggctaactggttgtgggtgctaacataagcaattgagatatctccccgttgttggtgatctattaggaagtgataccagatgtctatatgctttgtgcggctgtgttcaacaagattgtctgccatgcgtattgcactctcattgtcacataggagagggactttgctcaacttgtagccataatccctaagagtntgcctcatcaaaagtaattgtgcacaacagtgtcctacagcaatatactcggcttcgacggtggatagagctactgaatatttgttctttgaagcccaagacaccagggatcctcataaaactgataagtccctgatgtactctttctatcatcttacatttggataatcagatcagaatacccattagatcaaggtagatccc

SEQ ID NO: 4812 - DNA, 418 bp, Zea mays
  unsure (1)..(418): unsure at all n locations
ntgtgtggaattaggagaggaattgatcactcgtgtgtttctataattgaatgctacagctcttgtaagtagttgaagtgggaaaactcggatgacttgaatgtgggggtggttggggtatttatagccccaaccaccaaactagtcgtttggtggaggctgctgtcgcatggcgcaccggacagaccggagcgccagccacgtcacctggccgttgggttccgaccgttggagctctgtcttgtgggcccgcccgactgtccggtgtgcctcccgcgcgtggtctgtcctctgcacgcgcatgccctcattctatgcttttcacccgaccgatgaacccctattaccgccgctcctgtggctcaccggacagcccggtgtccatcggacatgtccggtgcaatatttctgttcgaat

SEQ ID NO: 4813 - DNA, 453 bp, Zea mays
tcagcagaatgactgctaaggttcttcactctcaaataggtagtaatgtgctaacttatgttgatgacatcatagtaaaaagcacgaaacaagaaaatcatattgccgatttgcaagagacgtttgccaatttcaggcaagctggtctcaagttaaatccagaaagtgtggttttggagtaaagaagggcaagtttcttggctgtctggtatcaacaaagggtatcgaagctaacccaagtaagatcgaagctatccttcagatggaaccgccaaatttaaagaagggggctcaacaattggcaggaaggctggcatcgctgaatagatttatatcaagatcagcagagaggaatctatcattctttgaaatgctaaagtcagccaaagtttttcaatggggtcccgctcaacagaaggctttcgaagagttaaaacaatacctgatagattt

SEQ ID NO: 4814 - DNA, 411 bp, Zea mays
  unsure (1)..(411): unsure at all n locations
aacttctgatcaaagccagggcattatttatataaacaggaggttntaatttggtgaagttattgtggcggcacctaaaggttatatgtatatattaataaatatgcacgttctcaaaacatggtatattttgtacaaaacatattgaaggctgtcaacttagaaaagatcataattgaaacagactcttgaaaaaaaaacatggacccatccattcaacaaacttgtgtgattaagataaaacattaatttcatagaaaatatgcaagaattaattattaatatatatattaatatatatgcacgtgctcagtttcaacaacagtaaacactcctacaataagttcgattgaattgtgaattttgtacaactagcacaagctcaaggtatacaactctggaggactgaca

SEQ ID NO: 4815 - DNA, 386 bp, Zea mays
tttttctcattctgtcttgtgatcaatctcaatggtgatcaaggcaagagacaccaattatgtggtggtccttgcggggaagtttggttcccgggtgattgagaagagaagctcactctgtcccatggaccgtttgaaagagggaaagggttgaaagagaccctgtctttgtgaccacctcaacggggagtaggtttgagagaaccgaacctcggtaaaacaaatcctctgtgttcagttatttattcgcttgcgatttgtttttacgccctatttcggactcgtaatatatttctaacgctaacccgacttgtagttgggattaactttggtgaatttaagtatcgccctattcacccccctctatgcgactttcaggttccctg

SEQ ID NO: 4816 - DNA, 408 bp, Zea mays
agcttctaaagggagaacacgtgttatgtttatctaatgtgcatttcgaaaaagatagaccttgtgcagcttgtcaagcaggtaaacaagtgggaggagcgcatcacagcaagaatgtgatgaccacttcaagacccctggagttactacatatggatctcttcggacccgtcgcctatctcagcataggaggaagtaagtatggcctagttattgttgatgacttttctcgcttcacttgggtgttctttttgcaggataagtctgaaacccaagggatcctcaagcgcttcctcaggagagctcaaaatgagtttgagctcaaggtgaagaagataaggagcgacaacgggtccgaattcaagaaccttcaagtggaggagttccttgagaaagaaggatcaagca

SEQ ID NO: 4817 - DNA, 387 bp, Zea mays
  unsure (1)..(387): unsure at all n locations
gccgaggctcaaagaaacttggtactganagaatctttgaacaatcttcaaaataagagtttggaaggctgcactcggggcattcatcagctcaagcacgtggtccatattgctggagccagtcttgaagagtttacttcttcgaccgaagacctgcctggtgccttctagcacattgaaggtgaaattaatgatcttgacgaagttatagctgggctagcgacttctgtgccctgacaacttctcggggcacagcatgagcttttttgaagtctggctgtgaacacgacaagattgntaatagacccaactttagcctgtctccagctgacctagatgatgttcccaaactggctcggagtatcgcaaatagatttataaagttag

SEQ ID NO: 4818 - DNA, 440 bp, Zea mays
  unsure (1)..(440): unsure at all n locations
agcttgtatcttgaagacgaagtttcctgtaatagcttatgctaaaaacaaatggttaattatgttnttgaggaccttcggaaggagaaggcccccaacacctccaccagctagaactgatccagtggttgcaacccagatgcagatgatgcaacaaatggctgatactacggcagatatgcatgcacagatgcagcaggaacgctaagagatgcgcctagaaaggcaagatatgcgagaggagatgcgtcaggagaggatggggcgacagcagcaagccccactgtcaccaccgccaccaccactttcacgccgggacaagcaccgagaatttgtgagccacaagccacctaccttcgctagctcttcagatcctttacacgccgacgactggttgaagttagtagagaagatgctatacattggccaatgctctgacc

SEQ ID NO: 4819 - DNA, 449 bp, Zea mays
actcagctttaaaggagaacacggaaggtttgacaacgtgcatttctaatagatagaccttgtgcagcttgtcaagcaggtaaacaagtgggaggagcgcatcacagcaagaacgtgatgaccacttcaagacccctagagctgctgcatatggacctcttcggacccgtcgcctatctgagcataggagggagtaagtatggtttagttattgttgatgacttttcccgcttcacttgggtattctttttgcaggataagtctgaaacccaaggaaccctcaagcgcttcctcaggagagctcaaaatgagtttgagctcaaagtgaagaagataaggagcgacaacgggtccgagttcaagaaccttcaagtggaggaattccttgaggaggaagggatcaagcatgagttctccgctccctacacaccacagcaaaatggtgtggt

SEQ ID NO: 4820 - DNA, 444 bp, Zea mays
  unsure (1)..(444): unsure at all n locations
agcttctaaagggagagcacattntgggactaaccaatgttcattntgagaaagacagggtttgtagcgcatgtcaagcagagaagcaagttggtattcatcatccacacaagaacatcatgacgaccgacaggccgcttaagttactccacatggatctattcggcccaatcgcttacataagcatcgacgggagtaagtattgtcttgtaattgtggatgattattctcgcttcacttgggtgttctttttgcaggaaaaatcacaaacccaagaaactttaaagggattcttgagacgggctcaaaatgagttcgacttgaggatcaagaaaataagaagcgacaacaggacggagttcaagaactcacaaatcgaaggctttcttgaggaggagggcatcaagcatgagttctcttctccctacacgccacaacaaaatg

SEQ ID NO: 4821 - DNA, 456 bp, Zea mays
actaagcttacacctctgaactaactcggctgcatcactttttgctatcggccagtagaaaccagacctaaagaccttcccaaccagagtcctggatgttgtgtgtatcctgcactgtccggcatggacctcatctaacagttgcttcccagtagctgaaagaatgcacttcatgaggactcctgttgcgccccttctgtacagtgcctccccaatgagggtgtagtgagctgattgccttgcgatgcgttctgctgcagttttgtcatccgactcctcttcattctttatatatctgatgattggctccctccagtcattagagtctgactcttgcttgctcagaacattgcactcttctgctcgatctaaggaaatactcgggcgtggtacttcttggacaataactccaggtgggacctgggtccgactggatcctagttttgacaacgcgtc

SEQ ID NO: 4822 - DNA, 450 bp, Zea mays
tcctctgcatgccggagatacggagatctcgggcgccttattataataagattgtctcggcaacagacattagtaggatccaagcactatattctttatgtccctgggcccacatgtcggggcccaaaccctttgtgcatgcccctcttcagctataaaaggggaggcatgagacgttacacacacacacaatcttagactcgctaagctcatacaagctcttgagcaatacaactcacagtggagtagggtattacgctccggcggcccgaaccaatctaaacccttgcgtgttcctgagttcttcttcctcacttcaacgatcaagcaaaacgcctaagcccctcctcatcttatgaattagggcgggtgcactgcgccactcggccggagatttctccccgacagatgttattatgtctgatggaaagggaactgttctggtgggtt

SEQ ID NO: 4823 - DNA, 315 bp, Zea mays
  unsure (1)..(315): unsure at all n locations
acactacatgaggaggttcatgtattgtattacaactgcaccctaacatacctgcggatcctgttgggatggaagccggaccttctggagtaacgggagaagcacttggtggcgaactggaccttttcaagccttctccctctatgaagctggatgatgaatggtctcctacgcccgatagtgaagctaccaaaagtgataagaagctagagtagtatagtatagaaatagtgtcaatgtataatatcctgttgtacacccaagtctgtatcattaccctttntagtaatgtacaatggatggtttgctttgcat

SEQ ID NO: 4824 - DNA, 333 bp, Zea mays
gagcctggcacttggaaacccacatttaaggtctacaagttgctaagtgttgacaagaaattcgtatgacgaacatacttgaaaatgtaaatgatcagcgaacaaatgttcaacacaggttaataaccagtgagacatgcaatggatataatatggctctatattgggtgaatattggacagacctgtaaacactatgcataatatgacataataaggtgaaggataagaggattgtcagccaaggaatagattgagaatcatgaatgcttgacattactttagcctattgattatgaaataaactaactgttgatctagcatttattagaga

SEQ ID NO: 4825 - DNA, 479 bp, Zea mays
ggatccttgagtcacctgcggcatgcaagcttggaggcgtcgattgggtgtctacttggtgtgtgactcctccttcttttcttccgacgccttgaatgcgacgggttgagcttcggatgtaaatggatcatcaagctcgttgatcttcctcgagccttcgatcatgcactcaaaacttacaaaatgcccgattacttcctcgggggtcattttagtatatcttggattaccacgaattaattgaacttgagtagggttaaggaaaataagcgatcttagaataaccttaaccacttcatggtcatcccactttatgctcccgaggttgcgcacttggttcaccaaggtcttgagccggttgtacatgtgttgtggctcctcccctttgcgaagccggaaccgaccgagctccccctcgatcgtttcccgcttggtgatcttggtgagctcgtctccctcgtgcgcggttttggcacatc

SEQ ID NO: 4826 - DNA, 454 bp, Zea mays
tctatctccaaacttaatcagatcgactcttctactctggactgtctttcttggtcatgcctttctgtactatggtcttgttctactcacatcagaactaaatcatggaaataggatctgtggatcagaagagggggcagaagtgacaacaacagcccacatacatgatgagaatctctacagaaatgtatttataacaagctttggaggtatgtgtgtttctgctatctggtcaaccagtcatttttcagaaacagtgtcctgtgaattcttgatatttagggcaacaatgatgcagaggtccctggtcttctcctgtcggctgccattgttgacatgatcgggcgcaagctctcgatgtcttccatgctttacatcagttgcctgtgcatatctccgcttatgttcgcccagacggaatcgctgacgaccatctttttgttctgtgcccggg

SEQ ID NO: 4827 - DNA, 362 bp, Zea mays
  unsure (1)..(362): unsure at all n locations
ctccgaagctatatcttgagattatatattgcnctccctggaacttgggatgaattgccccttttcaaagcattttccgaagatcgataacatgcccccttttgtgcccatgccgcatgatgtatgatgaatatgctatgcaaaatgatgtgatgatgttatgttatgccaaatgatattttgtgccgaagatacacacattcctgcgatggggcacaactctttgtatcaatactgactttttcattataagcctcccttaggagcttcttcgccttttacttcagcggatacagcagttatttttcgctgtaagatctgcatccccttaggaacagtcttggaacttcttcgccttttac

SEQ ID NO: 4828 - DNA, 439 bp, Zea mays
  unsure (1)..(439): unsure at all n locations
tanagccatggtaagtagcataggccaataatatactaattgactcaagcctagctacgggtgcataggtttcaccgaaatccaaaccttcgacttgggagtatcccttggccacaagtcgagctttgttccttgtcaccacaccatgctcatcttgcttgttgcggaagacccatttggttcctacaacattttggttaggacgtggaaccaaatgccatacctcattcctagtgaagttgttgagctcctcttgcatcgccaccacccaatccgaatcttggagtgcttcctctatcctgtgtggctcaatagaggaaacaaaagagtaatgctcacaaaaatgtgcaacacgagatctagtagttacccccttatgaatatcgccgaggatggtgtcgacggggtgatctcgttggatggcttggtggactcttgg

SEQ ID NO: 4829 - DNA, 411 bp, Zea mays
acctctaaaacgacctgcggcatgcaagctggacgaccatgatgcctgctggatgtgatgtcctctgaaagctgccttaaactctccccattccaccacatggtcaaccgactccatagcgagaaagtgatcccaccatgtccgcgcgggtcaacgaatctgctgggtggcgaaacggaccttagccacatctgaacaaactccattaagaagtggaaatttggattccaccaccctgagccacacatcagcatcaagtggatcctctgcccgagtgaacaatggcggctgagtgctgaggaactcctgataggtggccaatgctgggggacgttgatggtgatcaccaccaccatagtgctggggtggtggctgacgctgaactaactgtctgtaaatctcattttgctg

SEQ ID NO: 4830 - DNA, 445 bp, Zea mays
taaagccatggtaagtagcataggccaataatatgctatttgactcaagcctagctacgggtgcataggtttcaccgaaatccagaccttcgacttgggagtatcccttggacacaagtcgagctttgttccttgtcaccacaccatgctcatcttgcttgttgcggaaaacccatttggttcctacaacattatggctaggacgtggaactaaatgccatacctcattcctagagaagttgttgagctcctcttgcatcgccaccacccaatccgaatcttgtagcgctgactttaccctgtgtggctcaatagaggagacaaaagagtaatgctcacaaaaatgtgcaacacgagatctagtggttacccccttatgaatgtcgccgaggatggtgtcgacggcgtgatctcgttggaatgcttgatggactcttgggtgtgg

SEQ ID NO: 4831 - DNA, 421 bp, Zea mays
cgagctgcagcatgcaagtctagagccatggtaagtagcataagttttcttatacgaatcgactcacgcctagctataggtgcttaagttccatcaaaatccaaacctttgactggtgaataacctttggccacaagacgggttttgtttcttgtcaccacaccatgctcatcttacttgtggcggaatacccacttggtatctacaacattttgagtaggacgtggaactgaatgacatacctcattcatcgcgaaggtgttgagcttctcttgcattgccagcacccagtccggatctcttagtgcatcctccaccctgtatggcttaatagacgacacaaaagagtaatggtcacagaaatgagcaactctggatctagtggctaccctcttatgaatgtcaccaaggatggagtaga

SEQ ID NO: 4832 - DNA, 432 bp, Zea mays
  unsure (1)..(432): unsure at all n locations
tacacttgaaaaacaatactcttatttttttgcgactcttagcttgatgacgaatgaaagatataaagcatattttggtcacatgctagcatgcaggcagaatatgttgatttaggtgatgttgtaactnttgatacaacacataaaacaaatatgtactacaaaccactacgaatgtttgtttgagctaaccatcatcttcactgcacattgtttggttttgtgttactcggggatgagactgtatatacattcgagtgggcttttaatgcattcaaaacatgcatgtgtgaaggtccgcgagttatgctaacaggtatgatttttttggatatactgaatgtatatcgatttagaaatattatgttattttttattcttatgatcgtattatctagatcaagatcttgcgacgccagttgcactactaaa

SEQ ID NO: 4833 - DNA, 430 bp, Zea mays
  unsure (1)..(430): unsure at all n locations
agcttcctaaaccatggtttgaaaaaatggtgactaatatgttagggaggacctgggactctcgtaggctgttaacacaggcttgcagcctgcggtactggtctcttgcttcaggatactgattcatggaacgcacacgagccagtgctctatccaacctgcctgtagcctgtttcctgccatccttcaagaagtcatattcatcctcagcctcagcctttgcaggttggatctgccatgatggaccttcaagttgtttctcaggttggaaacctcgcagctcagtatgactttctccacgatgccaacagaccagactaccttccgatagtttttccttacctgatgtccacgtacatgggcctaacaaacaatagagtattcctagatactggatagaaacaagggatgggaatntaccgctacagct

SEQ ID NO: 4834 - DNA, 456 bp, Zea mays
aagcttctaagggagaacacgtgataggtctaaccaatgttcatttcttataagatagaccttgtgcagcttgtcaagcagggaaacaggtgggaggagcgcatcacagcaagaatgtgatgaccacttcaagacccctggagctgctgcatatggacctcttcggacccgtcgcctatctaagcataggggggagtaagtatggtttagttattgttgatgacttttcccgcttcacttgggtgttctttttgcaggataagtctgaaacccaaggaaccctcaagcgcttcctcaggagagctcaaaatgagtttgagctcaaagtgaagaagataaggagcgacaacgggtccgaattcaagaaccttcaagtggaggagttccttgaagaagaagggatcaagcacgagttctccgctccctacacaccacagcaaaatggtgtggtagaga

SEQ ID NO: 4835 - DNA, 451 bp, Zea mays
  unsure (1)..(451): unsure at all n locations
agcttgttctactacagaatgatagtctgtcattctgtagtctcataaaactgctctatgacacatacagtacactaccagcatcagaaactctatttttggtctcgagtgcatcccatattttattgtcaactgtttcttagctcgatggcggcgcacgacacatcttcatccttttctcaacatatatcatgttaatagacgaagtacaactataaagttgagttaatatccagtataggatattaaatcatacaatatagcttatttaatacgattcttagaatttatttaattatttatacgggctaagcccacaacatatctaaaagaattatcgagtattacgcaaactgatgaggcaacacataatataattgtggagtgcagatacanctaggccgtttcgtttatctcgaattgaggctatgaactattccagcctatcaat

SEQ ID NO: 4836 - DNA, 424 bp, Zea mays
gggcctgctgatccatggacggggggacttgttcggtcgccgaggtgctctctcccggcgaggccgagtggcccccagagctccgccttccgccgatgtcctacgtgccggagcccccatggccgaccccgcccgcccccgcctccgattcgctgcgactgcgaagcgtcggggtcgcgccccatctgcacggggaggtctatgatgatgacccgcagttcctcggatcgatcatgggggccgcggacccgcccccgccccatcatcagcagcagtagcccgccgccgcggcaccggtgaagaggaatagaggcacgccgccgaagaacagggaccgtgcggcgccggtgcctgcgccggtgaagcctgggaacaacaacgactaggaggaggtctgcttcatctgcttctatgggggcagcct

SEQ ID NO: 4837 - DNA, 369 bp, Zea mays
agcttcatgcccattaacttgaataggtttgttcataatgtggatgtgaaaattggatcacgatccgacactatcgttgttgggaggccatgaagtttgactacctccaaaaagaaggctgcaaccactatctttactgaatatgggtgttgaagggcaaggaagtgggcatacgtggagaagcgatccactactgagaggatgactgacttgcctccaacctttggaaggccctcgatgaaatccatcaagatgtctgaccaaacggacgttggtactagtaagagagtgttgggggccttcgtcttccgaaagtcctcaaaaatatgatttaacaatgtcttccaagtgtgacatatgaacaggtac

SEQ ID NO: 4838 - DNA, 99 bp, Zea mays
ggggggaaaccatttttcttaaaaccaaacactggcaaaccggggaaagcggccccaaccaaacagcccaagggcaacgcgagcgaacacaggaaagac

SEQ ID NO: 4839 - DNA, 433 bp, Zea mays
  unsure (1)..(433): unsure at all n locations
agactttgaaaactaccacttcatcatctttcggngtcggagaggtttcctccccggcaaaacgaataagcttcttctcagcttctccgaagttgcccagcttcatcatcatgcgcatatcagcttcagacacagtagatttttcaaaatccaagtggctgggttttgaggggaatcaaatgctataatcctcttcttcttcgatagcgttatcttcctcaacatcttgttcagctatggcagcaggtgcaccttcaatggctccatccgtcacactagtcccgattgcctcatgactccggagatcgaagatgtctcagtggcattagtctcctcccctacactggtcaccctaacaggtcgagcgtactctctccatatgatgatgaattctttgcgggttttacaaagctaatgatatttacagttctga

SEQ ID NO: 4840 - DNA, 427 bp, Zea mays
  unsure (1)..(427): unsure at all n locations
tgtcggcggcgtgtgctccggcctatccatggcgatacatgtcaatccaagggcacggngagctttacggngtgctaatgagtcgacccgtgcaaggaatcgcagaataactcaccgtggggctcggtctacattcaccggcgatcgggtgaagtccgacgaccttgatccggtggcgtctcctgtgaggcagagctcgattcctcgctctgggagcttcaccgctggcacgccgtctgcagggcaaacaccggcgatctcttgctccggtgaggtcgagagcgcgcgagggagtacgactaaagcttcggcgggctttatagacgcgggcgcaggcatgagacacgggcgcggcgcggggcacgcggggttgggcgctgggcgtgctctancgcgttcagagcgccgtcaacacgtggaagtgttc

SEQ ID NO: 4841 - DNA, 438 bp, Zea mays
agcttgttgccggagaagcccctgctgctgccgcggtggcctggacggcagccgttgctccctccccagctgcatccgctgcgtgcgccccctctctgcttcctctcttcgtagccgcgcagtactccgtcgggggcagaattcgcgtcaaccatctgcgacgaccttcacgggtgtagccggtttggcgtcgccgggacctcacttgtgaaccagggggcgtcttcagtgtaccaggaagcaaaccaaggccactgcgcgcacgaattgggttgcggtgcttgggaatttctcgtcgacgacttcggtgccgccgtgaagccatccgcgccgtagccggtgacctctgctaccttccagtgcgggtaaggccatggcccagctccctttcctttatagtttgcgtcgggacctattaaatttagtttgggagctctg

SEQ ID NO: 4842 - DNA, 449 bp, Zea mays
  unsure (1)..(449): unsure at all n locations
ngacaacgaggaaatggcgctcgtcatcaagagcttccttctttcctcaagcaaaggagggggaaggactacaaatcccgctccaagaaagtttgctacaaatgtggtaagctcggtcactttattgcaaaatgtccactatctagtgacagtgacaggggcgacgacaagaaggggagaagaaaggagaagaagagatactataagaagaagggcggcgatgctcatgtttgccgggagtggaactccgacgagagctccaccgactcctcctccgacgaggacgccgccaacatcgccgtcaccaaaggccttctcttccccaacgtcggccacaagtgcctcatggcaaaggacagcaaanagaagaaggttaaatccaaatcctccactaaatatgagtcctctagtgatgataatgctagtgatgaggaagataacttacgtac

SEQ ID NO: 4843 - DNA, 432 bp, Zea mays
agcttgagaaactaagcaagcgttggtgatcattatctatataattgagcaaataaagcaagtggcacaaacagcgtaccaaacgtggtcagggagagttcttatttatacactcgacgcgccctgagttggagggtcccgtttgtcattgactgttgctattctagcaaagggaaggtgttttttcggaccttcggcttaaggccttcgtccatgtcgcagtctgaatttgttatcctaaacaaattaatactgcgaggggctgctattgggggccttcgtcctccgaaggtcctcaaaaacgtaatttaacagtgtcttccaagcatggtttatagataggtaccttccgattcaggattaaaggcatatatgatgagaaaggcatgatcgtgacaaaggttgtcgttacttcgaagctatgcgcaaagt

SEQ ID NO: 4844 - DNA, 454 bp, Zea mays
  unsure (1)..(454): unsure at all n locations
ctcagcttgtggacattttcttgaggagacgatgaaatgagccttttaatcatggaaagctatatttacagcttccgaccaaaaccgctcaggcgtcttgtactctccaagcattgtcctcaccatgtcgatgagcgtcctgttctttctttctactgcaccattttgctgtggtgtgtagggagcacagaactcatgcttgatgccttcctcctcaagatactcttccacttgaagattcttgaattcagatccattgttgctcctgatcttcttcatcttgagctcaaactcattntgggctctccttaggaagcgctttagagtacttagggtttctgatttatcctgcaaaaataatacccaagtgaagcggtaaaaattatcatcaattacaagaccatacttacttcccctgatgctaagataagaaacaggcccggaaagatccata

SEQ ID NO: 4845 - DNA, 436 bp, Zea mays
  unsure (1)..(436): unsure at all n locations
aaccctctcacagatcanagacatngtacccctcttaatagaacttttttctattctactaatccggccaggtatcttctctaaactcctcaagaccggcaaaaacaaaacttatattataccttngccttcatctgatccacaaccaatgattatgattctccaacatttgctgttctatgtggtccaaccctgcattcttatttctccaagagcggttagtccacaagcagttatcattaattaccaaaacatcaccaaaggggcctagatgattcacaatctcccactttttggtaattgatgacaacactacataatatattaaagagaactttagnttctccaaatctttctcatacctaaggtataggataaaattttggagatgagtttcataggacttatctaaatttgaagatctgtccgaaagata

SEQ ID NO: 4846 - DNA, 407 bp, Zea mays
atggataaacccaacacaagagatgacattagtagcacaagcactagtttcttatatagcaaccctttatatgtggaaagcaagcgagttgctaaaatagagaaacctcataatatggactaaaattcccttgagccctcatgcacaatatattttgaatgacatagataataagcatggttgttcaatgaagtctaaagggctgacttaatccatattatggtgagtgtctaatatagaagaatcaaatccacagtaactagagagagaatacatcacataaatttggattggtgaccatatgataatattcatttatcttccaatttggacctctatttcataatccacaaccgatatatatgctcaagaactctcttttccttagtgctacacaagtcacaaaa

SEQ ID NO: 4847 - DNA, 451 bp, Zea mays
aactaagcttccactctgcagaagtgaacacttgtcaagagaatctctaggtatttctttaggcaaggcctagtatactctgtctccgaagttttgagtttatcaaacacaaactatacagaattggataaggtgttgcatgctgtgataatggcagccaggaagcttcgacattattttcaagcgtatcacataattgttctttcatcacaaccctcgaaagatatcatgaggaatagagaaactactggaaggattggaaaatgggccgcggagcttaatgaattcaatattgactacgtgcacagatctttaattcaatctcaagcgctagcagatttcatcactgattggacgccacgggctcaccaagaggggacatgcaaagatgccgaagcttggacagtgttatgcgatggttcttatggagccttccgtgcaggagcatctg

SEQ ID NO: 4848 - DNA, 434 bp, Zea mays
  unsure (1)..(434): unsure at all n locations
agcttcttctcgtcatcgatgagcgacgattctctttttgcctcctctcatggagttagttcggggtttgaagaaagaaacatggattcatgcttggcgttggtttatgaaaatgactcacaagtctgatccatggaaaaaaatattacgaagaaaaaatccacacatgccaaaaagggaacttaagtataatgcattattcanaacaaagaaatagcatgcaaagctcttctttaaataatattacctccatccaacaatataattcaagaatatcggtgatacttatctactattacacattgtgcaatggtagcaagtgagtttggagagagatgtagtatatgtgtttcctgtcatagatgtagacataaacacatataggtgggtgcccgtgcgttgcaacggaaacattttatatcatgataacttat

SEQ ID NO: 4849 - DNA, 435 bp, Zea mays
  unsure (1)..(435): unsure at all n locations
aaatatagcttcattagccttgtcacaaaagaatgtattctctttgcgaagcatggatattattgcgaagcatggatacttttacgaagcatggatatatttgtttatgaagcatgaaaagaagggaaggtgttttttcgctgaaggctcaaaaacggtatgtatgtatagtttcatgcatcgcaaagaaatgaattacaataatntacatattcgattcaaagcaacacacatcaaatattacagtcttgttacaataaaagtacaatgtccattctagcgtctcatacattgaccatctcaaaatgtttttacaataagtgttattcctctttaaggactttctctgcaacttcgtgcagtaatttggtaacaacttcatcaacaatggattcaaccatgtttattacgtccaacgcttcctttatttctgga

SEQ ID NO: 4850 - DNA, 388 bp, Zea mays
accggctcatcctgcctaaacgtgctggtgacttgaggaagtctcacacactccacagcgtgaagcccgactatggtgaaccccacgcctgggacgacaagaccttccaccacatgatccggctcttgtacttgcacatccggcgcggagagagtctgggcgtacaggaaatcttttccaaccgtaagaacaaggctgacttgggaaaagcagtgtacattctcatgtacctcgtcgacctcattatggaagctcctgtgatcccctcagaagtgctcactgtgtccaacctacaacgtctcaacgcaatggaactggtgcggaagcatgacctttctaaaaaagggatccctgagatggatgtgcgggatcgcctaccaaaccgcac

SEQ ID NO: 4851 - DNA, 348 bp, Zea mays
  unsure (1)..(348): unsure at all n locations
ctgaagccctaaagattctcttatatgacaatacagcaccaaagaanattcaataaaaaggctaagtaaatcaacttgtcatgacgtgggataattatagaagttgtagtacactaaataacctacaaaaaatagtaagagagttgccccaaaaaggcttcgcaaaaccctccaaacaagctaagtggaaactcccaataaaaaccacaattgagttttctgaaaatcagccccctcacaaagatcaaacgcgttcactttgttcctaaactcaaaaccacttggcccaaatgacaaagcggcgccaaaagaccccttggacgccctgctgaactttgaagacgaacc

SEQ ID NO: 4852 - DNA, 282 bp, Zea mays
caagagtagacagaatggttttttcttgtggcgccctgcacaacacgcgagccactgactagctgaactattgggcgggatgagttaaaacaacaaagaagccgacggcggcatgagacgccttcttctccactggcatgtgctacgcccctgaacatggacctcgactattgtttggtcaggaccagtagcaacaccatactcctcgcctccttcctcactatcaacagaaagcacaagccttgtgttcctctcaaataagcatacatatccttcgaaact

SEQ ID NO: 4853 - DNA, 418 bp, Zea mays
  unsure (1)..(418): unsure at all n locations
ntattacacgcgagngctatcgaggcgaagcccgaactctttctctaaagtgtccccaaataccttgagaaggtcatcaaggctggctagggacatttcctcggagtcggacgagtaacttatcctggaaggaggtagggctggaggggctacttccttctgctcagacagacatcctcggcttttgggcatcttgccgaaatttcttgcgggggcgagcttcttcagattcttgtcataatccatcttcagagtgcaggaggcctcacgggtattggatacctcgccttctgctatcacgaggctctcttgaagggacgccctatcccttgaagattcctgacgttttgctccaggctttccacccaggagttaacgtgagtgcagtgggaggcaaggtccacataatggttatcga

SEQ ID NO: 4854 - DNA, 364 bp, Zea mays
agctctcctattaggatcggggaagctcttatttttctaattctccccctcttgacttcatacaccacatccatattcaagcacgaccataagatgatgtcaagggacagcatggtgattagtagggaaaatgcaccacactaacattactcccccttgcacattaaacatatgcaacacaagcattgcaggaaaatttaagttcacatacgcaaaatggtcaacacctccttttgtaccttcaccatgttatggtgtactttccatctaagtaagcggaattccttttgcactcaaattagatatcctcttgaaattttatctctaaggacgccttacactagcctgacctttacctgacttt

SEQ ID NO: 4855 - DNA, 331 bp, Zea mays
ccccggaactccaactatgacagtattataaggatatcattatctcccaccgcaaataataataggtgaacgcatctcttgctgaacgttgatactgcacatcatcctgcatagaaaataaaaacaccatctacgacttgggtggcgcttggttcacgaaatgtaacgcaaacgcgaacgataatgatttacactcaaataccggcgggaacaaaagtgagaaagaacagatccaaccgcgatgcgggatcgaatacgaatagactcaaacaaacatgacctaacaataacagtcacccattacgttaccaataaatgaaccaaacgacac

SEQ ID NO: 4856 - DNA, 302 bp, Zea mays
tgcttgagggatatgcgcgcgttttgtttttatttggagatggcgccctcgagagagctccattgagagagactccctccccatgtctgggaagaggagagcatacaccttggagggaaacacgggagggagatggccttgagagctccccggcctatagattgaatatgacctcgcggtgatataaagctactggctgctgatcggtgaaaaatatctcggaacgaggggcggtgttattttttttccacgggctgcgcgacgaaaatatctacgtggccagatgatggaagataatctcg

SEQ ID NO: 4857 - DNA, 404 bp, Zea mays
  unsure (1)..(404): unsure at all n locations
ttgcgcttcnggggagaagagactaccncaaaactttataaagatgaaattgttattttcaaaagctttctaaaggctggattaaggttccctctacatgggattattgcagaggtgttaaaaaggttcggcatctattttcatcagctgacccctaatgctatcgntaggcttattgtttatatctgggcactccaaagccaagcagtggaaccatttgcggacagcttttgccgggttcacgagttgcattatcaaacgaaggctagaagggatggactgcacgacaattttggttgttataacttcgcctatcagaaaactactaagtttcctgtaattagttaccgtaacaaatgggcagcaggctggaaatctgagtggttctatgtcaaagttgatga

SEQ ID NO: 4858 - DNA, 436 bp, Zea mays
  unsure (1)..(436): unsure at all n locations
agcctatggccgacagagtttattttacttctctgatgtactaccctatgtccgaccggcggtgaaagtctntggacataatcttatctccgacgggttttatggaagtccttggagataacctaaccgtcggagaatatatgttttactgtagtggttatcgatgagataaaagccactggcaccaaacgttttgatagggatgtcttttatgacaatttccagctcttgcatgggtttattcctagtttggcttatgagaccttaagagaaaaaaatgttaatcgcccgtataggatcaaaatatttattggtcaatttagtggcaacaaatcattcttataggaagaagctacatgaggatgcttcaaattttgtccttggcaaaagaagtagcgggataagaaatcagcaaaatgttgaatattgatcactg

SEQ ID NO: 4859 - DNA, 413 bp, Zea mays
  unsure (1)..(413): unsure at all n locations
ttgtgagagaggaaagggaagaagcagagaacatcttttgtatgcgaanaaaccagaggagcatgggcgttatttatagaagggaaaggcaaccgctcacttccaaccgcggtcattgaacagtcgcaaagcattcaataagcactcccacccatctgaagacacgtcagacggcggacgccgtttcatgcaacactacacccattgggactccagtcaacagcgcaaaggatatgattacactagccgtcccatcacattactactcagaagcagctggctaaaacactcagcgcaccaagccgtcccttgcccacacccattggggggggacgcccaggaattatcagtatatttttcaaaacggtcacatccgtgcacggcacgcagtgaatacctcaagacacaaatga

SEQ ID NO: 4860 - DNA, 378 bp, Zea mays
  unsure (1)..(378): unsure at all n locations
agctngtatgaacttgtgagcctgattgtttctaagtgngtccccgtcagctcgtctgagcctgtgttgtaacgatgcatgcctccccttttatatctaaggggggcacgtacaaaggtactgagccccgacatgtgggcccaggaacataacaaatgtagtacttggagcaactaatgtttgttgatggagcaatcttcttgcgccctgacacccgtgatctgcgtagtcttggcgtgcaggggaagcttccctagcaacgtataagtgatgatggacatagtgcgcctcgtatcacgagcgtactgttcgacaatggactggacaggcacgtcgcctgcangatggcctaaacgccgcctgccagcggagtggaca

SEQ ID NO: 4861 - DNA, 437 bp, Zea mays
tttgtcttgactatgaaggggccctcccacttttgctttttttgcccttggactccgtccgagctgttcggatgagtacgaggtccccctcgctgaactcccttgggatgactgcgtggtcgcgccatgctttggtctgggcttggtatttgtttagggcctgtagggcgaagacccggtctccgtcaatgagatcttttgaagttggctcgtccacgtcggggacggctgacggaactgtacgcggggacccatgctttatttcttggggggtcattgcctccgatccgtatagaaggcggaaaggagtgaacccggttgccctgcactcagttgtgtttaacgcccagactgcctccggtaataaatcggtccatctgccttttttttcatcgaggagcatcttcttgacagctgtgaagattttcccgttggca

SEQ ID NO: 4862 - DNA, 390 bp, Zea mays
  unsure (1)..(390): unsure at all n locations
agctttgaggagggataatgtctctntgaataactcaaaccactacactcaccaaccttaccaaagcaagcgtcactcccagccttagtagcaaagcctaaccccggtctgccagttcccctcttgaactaactgaccatcatgcccaactcgaagctaatcccagtcacccagctcaagactgattgaaggtatgtgttttcctcctcaatcctagccttttcatgtatgtaggactcaagagcatactacaaatcctcacaaaatgcacactgcacaattgcaaatgcactcagggagctagccttctcaaccgaggatattcaaccgttcttctccgctagttcaaaatgcatgccaggacaagtcttacacacccttaacaagcta

SEQ ID NO: 4863 - DNA, 452 bp, Zea mays
tgtggaatttgataggacggagaggttgaatcattttgttttaactgattccgatatagcagtggttgatgatcttggacatatatttgaaaaatatccccattttcatctggctgttacttttcgtaataacaaagggcaaccattgaattctgggtttgttgcggtaagaggaaccagggatggcatcactaagtaagttgatagctattgaatatatcatattatacacagccagtaaatttcaaattaaaatctgttttttttcagagctgcggaattcttgaaacaagtccttaaagcttacagcttaagatatattaaggctgcccgtatgcttggtgaccaattagcacttgcatgggttgtcaagtctcatctaccatcggctttgggaaaattttctaagcatgaagcatttactggtgaagttaatggaacatctgttctct

SEQ ID NO: 4864 - DNA, 248 bp, Zea mays
cctatctggcagcttcctgacttccatgtatagcgatgggtccctgatccgaacgaacttcatgcaaagataggcatgatgaagaattgctccgaaagcattgagggcgccacgaccaataatagcactgtgaagggtataccaagtcaccaacgtcaaacacaaccagctcactcccaaagtagcagacgaacccgaaagatactgacacggtgatcttgcccaatgctacaatctgtcttcctccg

SEQ ID NO: 4865 - DNA, 435 bp, Zea mays
tcagtgacagcggctaccgctttgcagccactagacccttttattatgccctttctcttcgagaggcccgaagccataagaggaatgccactagtccaacactccaggaggaggagttggaccaagaaatcaaaaatatggagatgcttcatcaacaagtacaaaggaagaaggagaagatggcccaactagctgaccttcaaaggcagattgacgaagccactgaagaagtacgtcaccttgctcaacacgagcaagatcgaaggccccaacacagggagcttcatcaagagggcttattcaacgacgatggatggtatgatgattttaatcatgatacctttacttttgatgatgcttctcccttggcagcagaactgcaggctattccgtggccccatcatacaagccacctcagcttccaatggatgatgg

SEQ ID NO: 4866 - DNA, 414 bp, Zea mays
gctttaaaggaaacacttgaggatttcttatgttctttttgagaaagacaggatttgtagcgcatgccaggcagggaagcaagttggagtccattattcacacaagaacattatgacgaccgacaggccgcttgagctactccacatggatctattcggcccgattgcctacataagcatcggcgggagtaagtaatgtcttgtaatagtggatgattattctcgcttcacttgggtattctttttgcaggaaaaatctcaaacccaaaagaccttaaagggattcttgagacgggctcaaaatgagttcggctggaggatcaagaaaattataagcgacaacgggacggagttcaagaactctctacatgaacgcttccttgaggaagagggcatcaagcatgagttctcttc

SEQ ID NO: 4867 - DNA, 448 bp, Zea mays
  unsure (1)..(448): unsure at all n locations
ttaagcttaaccgcattgaagcatgatcgcttccgctcggtcttagtcttgctttgttgtccatngcgaccctntagcaccgtcttgaagcgcttaatgatgagagccatttcttcatcattaagcccggccgcctcaatttgcgccaccttgcttggtagtgcctccttgctcctcgatgccttgagagcaatgggttgaggctcgtggattggaccgttcaacgcgtcatcgacgtaccttgcctccttgatcatcatccgcccgcttacaaattttccaagaatttcttcgggcgacattttggtgtacctgggattctcacgaatattattcaccaaatgaggatcaagaacagtaaaggaccttagcattaggcggacgacgtcgtggtccgtccatcgcgtgcttccatagcttcttatcttgttgacaaaggtcttgagcc

SEQ ID NO: 4868 - DNA, 340 bp, Zea mays
agcttggaggcgtctattggttgacgactttgggtatactcctccttcttttcttccgtcgccttgaatgcgactggttgagcttcggatgtaaatggatcattaagctcgttgatctttctcgagccttcgatcatgcactcaaaacttacaaaatgcccgattacttccctgggggtcattttagtatatttaggattaccacgaattaattgaacttgagtagggttaaggaaaataagagatcttagaataaccttaaccacttcatggtcatcccattttacgctcccgaggttgcgcacttggttcaccaaggtcttgagccgatggtacatgt

SEQ ID NO: 4869 - DNA, 450 bp, Zea mays
ttatcaaatggacgtgaaaagtgccttcctcaatggaccaatttatgaagaggtctatgttgagcaacctcccagctttgaagatagtgagtaccctaaccatgtctataaactctctaaggcgctttatgggctcaagcaagccccaatagcatggtatgaatgccttagagatttccttatcactaatgaattcaaagtcggaaaggccgatcctactctattcactaaaactcttgataatgacttgtttgtatgccaaatttatgttgatgatattatatttgggtctactaacaagtctacatgtgaagaatttagtaggatcatgacacaaaaattcgagatgtctatgatgggggagttgaagtacttcttgggatttcaagtgaagcaactccaagagggcaccttcattagccaaacgaagtatactcaagatattctaaa

SEQ ID NO: 4870 - DNA, 371 bp, Zea mays
agctttgaagcgagttcttgtgaacacatttatcacagagaagggcacacacgatacacgcgagtttttatcccgtagttcagccaagtaacacttgcttacttccacgttgtggcgttccaatggacgagaagtgcactcaacccctttcaagtgatccgatgatcaacttgaataccacggtctttttctttaggtctcgtttgtttccgtggaattgaattccatcttaataatgataattacataaaattaattaagcctatatattcatatatggaatatatttggattatatcttaaatcatatgagagagatagctatatactacattcatgtattacgaagccagtagaagagtatgctatta

SEQ ID NO: 4871 - DNA, 446 bp, Zea mays
  unsure (1)..(446): unsure at all n locations
gtaanaagtgctctacaactatggtattgacatcatatttttgttaaacatttagcaaggtcaaatggtgcaaacacagcagctctgtccagatttggatagatgcagacttgcaacttcaaaaattcacaactgaagattcagacatccaaacaaattgatcctagactttctggaaagctaattaaattgtctacatatcatttataaacatccctagctggtttagcatgtatcaagggtaaaatatattatgaaggctgtgctgtccaaaactggacagattcagtcttcacacttcaaacacatgtaacttaattttcagaccaccaaaaagagtgatctaagacttttttgaaagcttagcaaaagtactacacaacctttataatcaccaagaagtgattcctggtttaactaaatcaaatattacacgttttcaaatc

SEQ ID NO: 4872 - DNA, 322 bp, Zea mays
agcttgccacattggtgacagccgtcatcttatgtctgtttcttgctgccgacggcgccgccttgggcgcctccgcgggcagcaccctcagcttgtcctcgcgccccggcttggtgcgttctgagcgccttgccgcgcttgcggccccgtgcaaggaggacccacttctttctgtcaccctatttggcctcccactgctctcgagtgaaatgtagcttcccgccgatggtgatacgcccagagagggcctatggtttgtctgcgtcgactaccttgagacgaccaatcgcttttttgtcgtaatcgcggagaggtctacagt

SEQ ID NO: 4873 - DNA, 187 bp, Zea mays
  unsure (1)..(187): unsure at all n locations
ntgtccataaacttcctcaatcctggtttctcactataataatatgtgtcgcttatcatctataaccatctcagcaaatgcagcccttaattcattgttggagaccaaatagagtcacgcggacggtccagccctgaggccggacggtccgcggtccggacagtccagtagtggtggcatggactga

SEQ ID NO: 4874 - DNA, 408 bp, Zea mays
agcctgatgtatacaaatataaagtttatattcttttatacctccgccttgacaaagaataatttccgagcgatgtgattgcaattacaggaatgtgtgaacagtaaaggaatactgatcactatttataggcacaggacacatcctgtgagcaattacaatcatacccctcataaaagtttacaacaacgactcaaactcttatggactaaaaggtcattctatctttaagtcggtttgtaaatccgaagcctcatgaacggcacccttcggcatcacgtacaaacagcttcagccgaagctgtttcttcctgcaggaccttcggtgacgaagcatggttccaacagtagcctcttcgcggcgctatatccgttatcgacacgagcttgatctgtgaaaaagtctct

SEQ ID NO: 4875 - DNA, 328 bp, Zea mays
  unsure (1)..(328): unsure at all n locations
tccacggtcctatatgcaaaacattaaaacaatacaacttgtttgaaattattgcctattgaaggcactctacgcgcgccaaacatatgcaacgccaatgcttatgatgccatgctcaaagtgtagttacagtaacaccaggggtgatacatccttcccccataaaacaatcacgtcccgagattaaaagccctacggtaagtaatggaaaaggaaacgcggaatacttttatatccttattactggcacaaggcaggggtggcgtggggngttattcctttattgcaagaactatatacactttacaaattacatgaggctagaaag

SEQ ID NO: 4876 - DNA, 411 bp, Zea mays
tctccgaccggatcttaagcacctgcagctgcaactaaagcctggtaagacttttcttttttatgcgaatagactcaagcctagctacgggtgcataggtttcaccgaaatccaaatcttcgacttgtgaatatcccttggctacaagtcgggctttgttccttgtcaccacaccatgctcatattgtttgttgcggaagacccacttggtacctacacacatttggttaggacgtggaactaaatgtcatacctcattcctcgtgaagatgttgagttcctcttgcatagacaacacctagtctgaatcccttaatgcgtattccaccctgtatggctcaatagaagacacaaaggagtaatgttcacaaaaatgagcaacacgagatcgagtggtcaccccttttgata

SEQ ID NO: 4877 - DNA, 241 bp, Zea mays
tgtcccatggaggcaaaatattctttttttaagggggcgtaaacgggccgcatctagtcagtgtcatcatcacatgaaacatctaacacctacagaagttcaaccgataaccatgtactatgtagattacgaccctccatccactctacgtaactgcttgaggtctaggcatcgatgatcggacatccttatcttttgtaaaaactaacgtccctcccgggccaaaatgggggaccccctg

SEQ ID NO: 4878 - DNA, 441 bp, Zea mays
acccggaccttaagcaccgcggctgcagctaaagcctggtagtacatatgttattattacgaattgactcaagcctagctacgggtgcataggtttcaccgaaatccaaaccttcgacttgagagtatcctttggccacaagtcgagctttgttccttgtcaccacaccatgctcatcttgcttgttgcggaagacccatttggttcctacaacattttgattaggacgtggaactaaatgccatacctcattcctagtaaagttgttgagctcctcttgcattgccaccacccaatccaaatcttggagtgcttcctctaccctgtgtggctcaatagaggaaacaaaagagtaatgctcacaaaaatgtgcaacacgagatctagtagttacccccttatgaatatcgccgagaatggtatcgacggggtgatctcgtt

SEQ ID NO: 4879 - DNA, 442 bp, Zea mays
tccacatgcttgccccagtggtcggctaagcatgtcttattagccctctggtaagttgctccagtgtttttaaggccaaatgacatggaggtatagcagaaggctccgaacggggtgatgaatgctgttttttcctcgtcttcttttgccaagctgatctgatgatatccagaatagcaatctaagaaagacaacatagaacacccggcagttgagtctaccacctggtctattctaggaagtccgaagggatccttcggacaatgtttgttgagatccgtatagttgacgcacatgcgccaatccactttattctttttgagtacaagaacaagatttgccaaccactcgagatgtaacacttctctaatgaatccgggcatgaccaagcgagccagctctgcatggatggcttctctcttgtccggcgtgaaacgacata

SEQ ID NO: 4880 - DNA, 451 bp, Zea mays
  unsure (1)..(451): unsure at all n locations
agcttgacaacgaggaaatggcgctcattatctagagcttctgccaaatcctcaagcaaaggagagggaaataatacaagtcccactccaagaaggttngctaccggtgtggtaagtccggtcactttattgctaaatgtccaatctctagtgaaagtgacagggacgaagacaaaaggggaagaagaaggaaaagaagaggtactacaagaagaagggcggcaatgcctacatatgtcgggaatgggactccgacgagagttccaccgactcctcctctcacgaggacgccgccaacatcgccgtcaacaagggcctcctcttccccaacgtcagccacaagtgtctaatggctaaggacggcaagaaaaagaggtacaatctagagccacccccaaatatacaacatctagtgatgagggtagctctagtgatagtgaagatacttaat

SEQ ID NO: 4881 - DNA, 429 bp, Zea mays
ttagagggtgggtgggctaattttagttcctccattttattccattttagttcttaaattgtcaaatatggaaactaaaatagagttttaattagtttatatatttgccaatttaatgactaaaatggaataaaatgtcactagaaaccaaacatcttcttaatctactattagacatatctatagatggtcaaacggaccgtccgggaggagagatcctagtgtttgtcttgggatgtggcaggccacccaagatgtctctagacaacatagagttacagagatgtgaagattgagatgaagaaggctatgtgactggctactcctaggcaagaaagtaaatggattgataaactggttgattgattcgattgatggtgcccacaattggtcgtaccccttcatatatatagggggaggtctagacct

SEQ ID NO: 4882 - DNA, 462 bp, Zea mays
agcttgagttgggtcactcataacctctattagtgatcattattatcctaatcgctacctaatcgtctaggtgatgtcgatcaccaaaagtacaagcactagctctcactttaccttattaagtctaattagggtggtggatgcacataagctgctctcaatacattaatgaagatgctaattgtatgattatccaccctcaagttcctaactaggaaggctcttcctcactctcaagtgattgattcaacagaaaaaaatgggcaagaggcctcaatagggtgagttggggtgtataaatagcctcaaggggtgaaactaaccgttacaccctcactcaacacagttggaggcaccaggcatgttcggtgctcaccaaccactacaccagaaaaattagtgccttcctaatggccagtctataaaaatagcagttactctatgtggtatccagtgctcata

SEQ ID NO: 4883 - DNA, 400 bp, Zea mays
tgtgaaggttcttcatccccacatgtgctaagcggcgatgcctcttcagcccatgctagtcttagctattaagcatgcatctagaccggcctcttcttttgcaaaatcaactaaataaagtttgccgtctaatacacccttaaaagctagtgaaccatcacttcttctaaagacagacacatctacattcgtaaatagacagttataccccatgttgcataattgactaacagatagcaaattatatccaagagactctactaaaaacacatttgaaatagagtgctcattagaaattgcaattttacctaacccttttaccttgccttgattcccatcaccgaatataattgaatcttgggaatccttattcttgacgtaggaggtgaacatcttcttc

SEQ ID NO: 4884 - DNA, 427 bp, Zea mays
tgcggcatgcagcttctaaaggaggacacgtgataggtttgactattctctcacaccgaaaaagatagaccttgtgcatctggtcaagcagggaaacaggagggaggctctcatcacaccaaaaatgtgatgacaacatcaagacctctggagctgctacatatggacctcttcggacccgacgcctatctgagtataggaggaagaagtacggtctacttatcgaagatgatttttcccgcttcacttgggtgttctttttgcatgataaagtctgaaacccaacggaccctcaagcgcttccttaggagagctcataatgagctttgagctcaaggtgaagaaaaaaaggagcgacaaccggtcccagttcaataaccttcagttgaggagttccttgaggaggacgggatcaagcacgagttct

SEQ ID NO: 4885 - DNA, 441 bp, Zea mays
  unsure (1)..(441): unsure at all n locations
cttaaaactaagctntaccctgcgagaccttccccgtctcttttaactattatttgcaatatcgnatgtcatatcctatgcatgtttaatctacttgttctcttgtatggtgtactgttggtttcctaatttcaatggatggatgtatgtatgtttgcactcgtatagagaacgatccggttgaagagcccgaggaactcacaggagaagcccctgagcatcattcggttggtggaagcaagtgtcccttgacctatctctggcctattcattctttaattcacctcccgcattacacagttatacctaaggattgactagcttctgctatccatgtccctgtttacctatttgggtgggatattattgcttaatctatgctacgcttcacttaatcaataacatgatgagatatccctgatacgctggttcccctctttt

SEQ ID NO: 4886 - DNA, 400 bp, Zea mays
  unsure (1)..(400): unsure at all n locations
gccttangataacgagggctatattttatatcctgctggttatcatgaggataagattagaagaattcatgcaaagaagactcattctcaccatgcttttatttataagaatgagacttctagctctaggcgttctacccatgttaaaatgcctaacaagaaatctcctattgcatcaaatgaacctaacatttcatttaagacttttgatgcatcatatgtgctaactaacaaatcaggcaaagtagttgccaaatatgttgggggcaaacacaagggctctaagacttgtgtttgggtacccaaggtgcttgtttctaatgtcaaaggacccaagaccgtttgggtacctaagaacaacgcctaaatctattttgtaggtttatgcatccggcggctc

SEQ ID NO: 4887 - DNA, 422 bp, Zea mays
  unsure (1)..(422): unsure at all n locations
agctntgcttcgttgctcttcagcctatctactattgtttgcagnattntatctttttcaatgtctcgttgcttagcgtgataacttctgaccgaaggttcccaagggctatttggtagctttcgtcttacgcattcttttgcgcccttaaagccttgcttaagattaagccctacaaaaaataaaggatcaacacacaataataagaaaaaacacaaaaagtaatctactcataagctaaaacatcctcacctttagactattataggcaaggctatctgcaaggtcatcctacgacattgcagataggccaaattctagcttcgggaatcctacattttcagccatctcccggcagacagatatcttcttgctgtccggaaggcaatataaanaatcatcttcatcactccagttaaaca

SEQ ID NO: 4888 - DNA, 450 bp, Zea mays
  unsure (1)..(450): unsure at all n locations
tactcaagcttcggtattacagcatatccgaagatgaagggtcgaaccgacnataatatataatgaccttntagtccataaaggtctgagtcaatgttgtaaacttttatgaggggcatgattgtaattcctcacaggatgtgtcctgtgcctataaatagtgaacagtattcctttactgttcacgcattcctgtaattgcaattgcatcactcggaaattattctttgccaccgaagaggtataaatgtgtctaatatttgaatacatcatgtttatataatatgtaaatgatgttgtttacttataatttacttgtctttaatgatttatatctcgcattgttttatataatctctgagagtccaattacgaagatttaacctttgtaattgtaccgtttttaaccttcgtccgaagctcattaaatccttgaggaattaatgcttc

SEQ ID NO: 4889 - DNA, 467 bp, Zea mays
  unsure (1)..(467): unsure at all n locations
aagtcacctgaggctgcagcttgccaagataagagtgaagcacatttgtgtattctaagttgcagaacgctccccctaaatatgtgcttacatgaaaatcttaactttgccctcatatgccaaatagcacatacttaggctaagtgtgaagcattattacaacttaccatccatggggtgtaaagtgtcaagaatcaaactgtgatgcgcatggcacacaaatgcacaaaatcaaagttaaacaccaattaaacagatataccatagggatatgagcctaccactattcaccatcaagataccaaattaaagcaccataaataccagtaaacatgaatatctatcgcaagacacacatcaagcacgaatgataccaattgatcgatctacacaacacacacaagattatgtcatactatagcgttattagcacctangcctaattatgcatatcaccatatatacaa

SEQ ID NO: 4890 - DNA, 435 bp, Zea mays
ttaagggcccaaaaggaagcagacaacgagagctgtcttattgtacttggaaatcttcgatcagaggtcatcacactaaggaatgaagctcttgagaaagataaaatattgttttccttagtggacaagctgaaagctagcggggtcaagcttagtgctcaaatcgaaaaccacaaagctgaagtcgaaggtttgaagaagcttgcagaaatgaatgaaaatttcgaagttgcaaaggcgaagcaggaaataagtgaaatgcaaagatcaagggtgcaaaagaatgttgaagagcttcagaattccaaggacagatgctacgaaacatccttggaatgcgtgaagaagctgaaaaatagctttgcaaaggtgggagcatactcttctgaacagaaatatactctcggtgatcccaaaggggttatccaatgggtc

SEQ ID NO: 4891 - DNA, 422 bp, Zea mays
  unsure (1)..(422): unsure at all n locations
gcacttgaaaacattcattctttctctttgggtagccttctcccgaacgcaaagctctctgatttcaagaaaaaagcccgattttaccatcttggacagatcagcttttgaaacagtagatttcccgaagtccaaatggctgggtttgcttggcataccaatgcgataatcatcttccggatcagtttcctcaatatcttcttcctctgtttcagcgattgcttgatctgcatcttcactgaggatcttttccgaagacactagtccggatcgttgcatagcttcggaaatgggaacagtctccgaagcttcagtttcgcccccctcacgttcaaccctggcggtagagcgcactctggccatttaattatgaactngagtaactntaatactttcttacttcgaagcaggttcaaacagga

SEQ ID NO: 4892 - DNA, 446 bp, Zea mays
gctaatcccgaaaaatgtgtattcggagtaccagcatgtaatttatctcggtttattgtcagccaccggggaattgaggctaatccggataagattgaagctatcatgaagatggaagcacctcaatcacaaaagaaggttcagcgacttactggatgtatggcagctctgagcagatttatatccaggctgggggaaaaaggtttaccatattacaagctactcaagaaggtagataagttttaatggacttcataggcacaggaagctctagatgcactgaagaaattcttgacaacaccaccaatactgaagccgccacgacgagctacgtcaactcaaccagctgaagatctgctactatatatctcttgcacgactcaacgtgtaagcaccacgttggtagtccagcgagcagaagaaggacatgcctacccattgcaaca

SEQ ID NO: 4893 - DNA, 480 bp, Zea mays
  unsure (1)..(480): unsure at all n locations
gatcttaagtcacctgaggcatgcaagcttgtggctatatagtgttaaatnttacaggatcacctattcacccccctctaggtgctctcaattctgcgggggctctttaacaaaatatatatgcgacggggtatcttctaatatcaaccataggattagattctatggctcggattaaatcgttctggagcataaagccgcttcactcagagccgctggatccacgatccaagggttaggatccagccggcaggtaccttcaatctaagccgataatcaagaaatctacgccccgaggatcgtcttcaaccttaccggttctctctctctcttctttcctagctaacccaccgcagccgagcgccaaggacgcggcagcaactactcgagctcgctattagacggcgtaaacccatctccttcccaaactccttgtcttcgttttcccatgccggcacccagccaacggtgatggaccac

SEQ ID NO: 4894 - DNA, 466 bp, Zea mays
  unsure (1)..(466): unsure at all n locations
acggaccttgaaactaagcttggacagatttggtagggcaaaatctggtggtttgctttttagcatntgtaggctntggacagtgtagtcaaatatgccaagaacgcccgtcgctgtcgttgtccgtcgccatttgttggcgctgctgcacggaaccaaacacaagggctgtcatattggatcaacgcgttcacatagtcggtgaccaagtctttttccttgtttttaagaccacgggttgagactaaactcgaacaactggtttgagatctagggccggtcctgacattttaggggccttaagcgaaaatctatatagaggctctatataaacgtttgattctgctattttttcaactttaaacgatatctgaaaaataaaaaagttgatgatttacccattttttttaaaatgatatgactggatactattacaatattttatgagttgtaaaattatacagat

SEQ ID NO: 4895 - DNA, 370 bp, Zea mays
  unsure (1)..(370): unsure at all n locations
acgcttgaaataactagtctacaatcactttcttatataaacagcataccaaaaataataatatacaaaaatgtaacgtggggggaaatacaaaatagattgtgcaccaaaattaacacataaataaacagaaatatatacatagtcactgggattttctaggagtcttctgtttaagagagcttcttttgcaatgatatttgacttgacatctatatcaaactttgaactgcttttcacactcggaacttatggggaagggactnttatcttctttgcactgtttttttctgaaggggaaggtgatgctgatctgaattggcgcttcaaagatggagtatccatgaaatcatcatcggacagtgtggat

SEQ ID NO: 4896 - DNA, 448 bp, Zea mays
ggacattgctcccttgttggaaactaatgccatccttattgtttgtgcgtctcccattatagagcatgcttctagcaaatttaaacttttcattttcaagttcatgctcattaattttagcagtcaatttagctatgtgatcattttgttgtttaatcatggcaatgtgatcatcaatagcttcaacattaatatctctacatctagtacaaatagacacatgctcaacagtagatgtagagggtttgcaaacatttaattcttctatcttagattttaatttagaattctcatctctaagataggaaatggaatcattgcaatcattcaattctttaaccttagaaattaaactagcattttaaattctaagactagtaattgaatcatgacaaatgctaagctccttagataagttttcacatttctctacttcctgagcataagc

SEQ ID NO: 4897 - DNA, 339 bp, Zea mays
agcttgagcactctgtgacgtccacaacattattcttcgttcccttcgacatggcagaaatctgtgaaacagcagcctccctcttctttccctaccttcacgagggatcacaatattctgggtacaccataccgataacatcgaagactctgaccaatctctatttgcctcgccctactgacgccactgcaagggcatcatcctccgccctcttgtaagcaccaaacaactcgacgctaactgcctgaatgcaatctagccagtcatcattcggctcatcgaatagattaccgtacctgaaggtatacttcaggtaaactaaaccatcttggctggacc

SEQ ID NO: 4898 - DNA, 392 bp, Zea mays
agatgcctacagaatggtgcatcatgtacgtgtccaatagacacctacatcactgaccaaaacggtcccatatccctatcaccttctcctatgaggaccttcatcttacggactatgcacatatagatgacatggctatctcatgcgtcatatacagcttcatggcgcacaatggcctgattgatctaggcactgcggcatatatcttatctgccgaggcctataagccaatgtatgaaccgcactacaatattcaggagtcatcttttcttatagggcttcagagggtaacacgcgatggcactaggagagctgactatgcccattacctttggctatgtcaacaatacaagaacatatgagttcatgtttgaaatagttgatatggattt

SEQ ID NO: 4899 - DNA, 367 bp, Zea mays
agcttccccagcgctacaggctcataattctcaaaggcgaggacctgtagcactcctggaacatcgacaaccttcgcaaatatttggtttgatccatttagggctgaatatcgccttgtaattcaccgcaaacaatcttgtaccggcccgcactcttttcctcccggggggtgagggttttaacgaggccgagccatgtaatatatgtgagaaaaattccccgcaaaaacatgtgtctgaaaaagaccgcgacaacggtcttcggcattcgaccaattcgaagtcaccgcgaggctaatcgctagccaccctcgcgtgcgacaagtccgcgcagaattcgcttaagggtgcagctggactaaacaca

SEQ ID NO: 4900 - DNA, 409 bp, Zea mays
  unsure (1)..(409): unsure at all n locations
agcaagctgtggcgacctcgggcattctgccgtatccgaagtaccaagtctcccacctggaagtctcggggctgaacccctcgggcgtggtagcgtcgcaaagactgctgataccgcgccgagtgtagtaaggccatgtcccgagcctcttccatttggtccagtgagtcttctcggctggtctggttgctntggtcgtcgtatgcccgcgtccttggggaaccgtattctaagtttgtgggcaagatagcctcggccccatagactagaaagaacggtgagaaacccgtggcccggcttggcgtcgtcctcagactccagaccacctagggtagttcatccaccgcttgccgaacttgttgaggtcgtngtagatcctcggtttaagtccctacagaagcatacccgt

SEQ ID NO: 4901 - DNA, 438 bp, Zea mays
  unsure (1)..(438): unsure at all n locations
taaatgaagtggccattaagaacaaaaatcccttaccacagattgaagatttgcttcatcagatgagaggagctaagatattctcaaaaatatatctaagatcaggatatcatcagttaaatatttgaactgaagatgtacctaagacaacctttaccacaagatacagactatatgagtttttggtcatgtcatttggactaactaatgcaccagcatactttgtgaaattgatgaataaagtatttatggagtacctcgaccagtttgtggttgtattcattgatgatatactagtatactctcagaatgaagaaacgcatgaagatcatataagactagttctacggaagcttcgtgacaaccaattgtatgcaaagttgtcaaagtgtgaattttggttgaaggaagtcgctttcctaggacatnatatcacag

SEQ ID NO: 4902 - DNA, 437 bp, Zea mays
  unsure (1)..(437): unsure at all n locations
atcctctnagtcacctgcggcatcaagcttcttcacgggagctttggctttgtttatccttctctcgaaccgcggncttcatattatgtatagcttcatcccatgtccgaaggttcctgtacatatattatacttgggaaacatgtttgtcgtgtgtttgaggaccttcggaagatgaaggcccccaacagtagtccctcgcagtattaatttgttataacaacgaatttatactgcgacgtgaacgaaggccttaagccgaaggtccgaaaaaacaccttcccttcgctagaatagcgaaagttaatgacagacgaggcccgccaagttgcaaagcactatgcgtttaaatatgaacccacagcggcagcatttgatacgctgtctctgctatatgcgttattttctcaaatttctagctcttgctcaatagctct

SEQ ID NO: 4903 - DNA, 445 bp, Zea mays
  unsure (1)..(445): unsure at all n locations
tctacacgctngccccagtggtcggctaagtatgtttattggctctctgngaagtcgctccagcgtttttgaggccaaacagcatggaggtatagcagaaagctccaaacggggtgatgaatgctgttttttcctcgtcttcttttgccaggctgatctaatgatacctagagtagcaatccaagaaggacaacacagaacacccggtggtcgagtctaccacctggtctattctaagaagtccaaagggatccttcggacagtgtttattgagatctgtatagtcgacgcacatgtgccaatccactttattctttttgagtacaagaacaggatttgctaaccactcgggatgtagtacttctctaatgaatcctgccacgactaagcgagccagctcagcacggatggcttctctcttgttgggcgtgaaacgatgcaactt

SEQ ID NO: 4904 - DNA, 423 bp, Zea mays
  unsure (1)..(423): unsure at all n locations
agcttgtgaaggttcttcatccacacatgagctaatcggtgatgccacagccagcccatgctagtcttagctattaagcatgcatctagaccagcctcttcttttgcaaaatcaactaaatagagtttgccgtctaatacacccttaaaagctagtgaaccatcacttcttctaaagacagacacatctacatttgtaaatagacagttatatcccatattgcataattgactaacagatagtaaattatatcctagagactctactaaaaacacattagagatagaatgctcattagaaattgcaattttacctaacccttttaccttgccttgattcccatcaccgaatatgattgaatcttgggaatccttattcttgacgtaggaggtgaacatttntcttctccccgtcatatgggtt

SEQ ID NO: 4905 - DNA, 450 bp, Zea mays
  unsure (1)..(450): unsure at all n locations
tgcgactctggctcggcttcttggcaaatgaaccttcgtcatcacctgtgcccgccgcacgctgntcgtcggcgccctgagccaaggcccgccgttgtgctgcaaaactttcaacaagttcattgatacttgctcctgcagttgtgctacagctattcgatgaaatgcccaaaagcaatattgcagagaagcaaacatcaagttcactggtataaccaccaccttgacagcaatagattgatactctactttgggcgatctatatttgtaattacaaagtatgtcgtttatagggcaactgcgtgcacatagtgacaggctagaagatgacatttgtgaagctganaatcagaggtgtcaaatacatgcactgctgaaaattctntgcattttcagtatacaggaagcacaaaaagaatatggggcaccttcaaaatgtaattccatcat

SEQ ID NO: 4906 - DNA, 406 bp, Zea mays
  unsure (1)..(406): unsure at all n locations
agcttgagncagttcttctatagagaattttgatgtttacagaaccgacaagggtatgaagcacattcatgagaaaatagaagccgacaaagctaattgcttcagaaaagatgaccaaggaataatatggtttaatgatcacatagttgtgcctaaggatgctgaagtccgctaacaaattttggatgaagctcatcttagtcgatattccattcatcctggaagtactaagatgtatcaagacttatagctacactattggtggacaaaaatgaagattgagattgcacgctatgtggcacgatgtgacacctgtagacgtgtcaaggcagtcatatgaagacagctagaccactggaatcttacccatccaacttggaaagggaagacttagtatggatttatt

SEQ ID NO: 4907 - DNA, 413 bp, Zea mays
atatctaagggtctccttttatttattttatatattaataaacatgcatctacattagttcatactcaatcctaacaattagagtgtgcagacagtaagtgaaaccattttatttaaatagggaataattatatgaacattatgcaatttgaatcactaaatttggagttcatatgcaaaagtcatgaagtaaacaacgttgggaattcaaaatatgaaattagggctaattctgtgaatatttaaaagtccagggctaaatttgcaagattacaggggtctgcgcgcgaaaaccacggacggcgggttgatttctagtaaaccgagggtctctttaaaaaaactatcgcgcgaaggggtatcgggtgaatataaccgtcagatctaaaaccaacggctgagattatatctgc

SEQ ID NO: 4908 - DNA, 400 bp, Zea mays
agcttgtgaagattcttcatcccacatgggtcttttttgtgtgccagagccaacccatgttagtcttagcaattaagccaagtgtcgagttcagctctatcaaaatctaccaagtatagctgaccctttaacacttccttaaatgctattgaatcatcacttcttctaaagacagtgacacctatatcagttaagtgacagttgtagcccatttgacataattgagaaacggaaagcaaattggaatctaaaagagtctacaaaaaaaacattggaaatagaatggtcgggggatatagcaattttacccaatcccttgaccaaaccttgatttccatccccgaatgtgattgctcgttgggggatctgggttttctcataggaggagaacattttcttc

SEQ ID NO: 4909 - DNA, 448 bp, Zea mays
ggactcccttcgccttgagacaccggaatgtacttcaattcttataggaggtcggaagccttccttgtcttgactacgatgtcatcgacgtaggcctcgactgtgcgaccgatgtgttcgccgaacacatggttcatgcaccgctggtacgtcgcgcccgcattcctcataccgaacggcatggtgacatagcagtacatgccgaacggcgtgatgaaagaagtcgcgagctggtcggactctttcatccggatctggtgataccctaagtaggcatcgaggaaggacagggtttcgcacccagcggtggaatccactatttggtcgatgcgaggcagagggtagggaaccttcggacatgctttgttgagaccagtgtagtctacacacatccgccatttcccccctttcttcctcacaagcacagggttggcaagccattctggat

SEQ ID NO: 4910 - DNA, 472 bp, Zea mays
aagtcacctgcagcatgcaagcttcggaattataaaccgacttagagatataactactttttagtccataagagttagagtcgctgttgtaaacttttatgaggggtatgaatgtaattgctcacacgctgcgtcttgtgcctataaatagtgaacacgattcctttactgatcacgcattcttgtaattgcaatcacatcactcggaaattattccttgccaaggcagaggtataaatgtacctaaacattacatctgaatatcttgggtttatataatatgtaaatgatgttgtttacttctaatttacttgtctttaatgctttatgactcgcgttattttacattatctttgagagttcaattacgaaaatataaacctttgtattgtgtcattataaccttcgtccgaaatcattaaatcctcgggaaaaatgttcagcggatgaagacataatattcacatttatg

SEQ ID NO: 4911 - DNA, 452 bp, Zea mays
  unsure (1)..(452): unsure at all n locations
ntacttcatgtatctgatactaataatggtgaaacaatatttatctaggctaattccttggtgactaatgaacttcatgacttcgaatttcngtttcaataactatatggtatggggtactattctctataaatttgtgcttaattctatcatttgatatgcgttgaacattctcatgtataactagatcaaactcagccatcatttccattatgcctaaaaagttcccattgctaggtacaacttgcaattagtaccacataatgtaagttatgtgttacaatcgtttcataaggagttcaacaatttttttcatttgtaaattcttctatgttttactatagattataaaagttccacacaattttctaccttaaaaaataaaacatcatgaaaaacaattgattttcatcaaaacctctatgtgaaacactaattaactcacaatttga

SEQ ID NO: 4912 - DNA, 292 bp, Zea mays
agcttatgcaacatacggatatattgtttttcatatccaacgaacacctgaagaggctccagtgcatatcggaataattaggcgtcccgagaatgtgaagagaggtataggtccacaaaccttgatgtggacagaggcactgaagagggacctgaaggagtggaatattgataaagagctcgccgtggatatgaaggggtggaagtgtgcaattcatgtgccagaaccttgatttatagttccgcttttcctccttaatcgtttgacctctttttgtgcccatttagacctt

SEQ ID NO: 4913 - DNA, 444 bp, Zea mays
actaagctgtcagcatatttggacccatcgcttgatgggtccatcattattagtcaacaaagatctaggaacccaaaagtcctttgtgttagcgcttggtaaactcattacctttctagcacaagttgtaattttgggttgcctagttacatgtgaaataattgacaagctatgagtggggttgttaccaatgggacaatccttgcattgatgtcccttctttcggcatatgtagcaaaggcgatcttcaagtcttgaagacttcttctttccttgtttctatcttgctacatggttagtgaatattatcttttctaacactatgcctttttgtttaaatggggacaagacctaaacaagtgtcccttcttggagcatttaaaacaaagtttatcatccttgttaataatcaagtcatttttaatatagggacatgacctaata

SEQ ID NO: 4914 - DNA, 446 bp, Zea mays
ggcacttacgaccaaaccgcacccgcatccatatcacattctttggctcaacaatagtggtaaggtcaaggtaaccaagctggtacgaattaattttgctattggttcatatcgtgatgttgttgactgtgatgttgtgcctatggatgcttgtaatattctgctaggtagaccatggcaatttgattcaaattgtatgcatcatggtagatcaaatcaatattctctcatataccatgataagaaaattattatgcttcccatgtcccctgaggctattgtgcgtgatgatgttgctaaagctaccaaagctaaaactgagaacaacaagaatattaaagttgttggtaataacaaagatgggataaaattgaaaggacattgcttgcttgcaacaaaaactgatgttaatgaattatttgctttcactactgttgcctacgcct

SEQ ID NO: 4915 - DNA, 296 bp, Zea mays
actatgctattaaatacatcatctctctacgcatgaaaaactcgaattctggaatgtaaagtgcactttgtaaaagtcttccgctctatcaccaatgtgagtgattaaaagggattactgcaatatacctgaattggggagaaccttgggaagatgaattccagatggcgaacgtcataaccttgtaagtaatccggaacacatgtacagcaacttacgccataaacgcatcgatgggtgcatgtgggcatgatacttgggagggctgtcacccttaaatgcttactaaaacatca

SEQ ID NO: 4916 - DNA, 452 bp, Zea mays
tgtgaagattcttcatcccaacatgggctagtcggctgttctttagccaacccatgttagtcttagcaattaagcaagtgtcgagttcagctctattaaaatttaccaagtacagctgaccctctaacactcccttaaatgctattgaatcatcatttcttctaaagacagtgacacctacatcagtgaagagacagttgtagcccattttgcataattgagatacagaaagcaaattgtaatctaaagaatctacaagaaaaacattggaaatagaatggtcaggagatatagctattttaccaagacctttgaccaaaccttgatttccatccccgaatgtgatagctcgttggggatcttggtttttctcataggaggagaacatccttttctcccctgtcatgtggtttgtgcacccgctgtcgatgatccaacttgagcccccggat

SEQ ID NO: 4917 - DNA, 454 bp, Zea mays
  unsure (1)..(454): unsure at all n locations
agcttataaacgacgccgcacctactcttattctcaaaccccgccacgtgtaacaattctccctgcacccaccaaactgcagcggcgctgcttaataatttcataactttaaaattatgacagcagtggtgacaaccaaaaactccagaggcatctacatcaaattccccacaagttttgtatacaatttataattaaattccaaaatctaattagcccaaaacagtccacaagataaaccctgtaatctgttttntctcttttggacagcgacatatccggattcaaacaacgatgtctnttaaaatataattccaaataaagtgcataagtactcattggaaagataagacaaagccctacatgattatcatactggttatcactaattacccacgaaaaatctccaaaaactgctaatactactgttgttcacccacctgaaaaaatctgt

SEQ ID NO: 4918 - DNA, 393 bp, Zea mays
agatgtctgaagataagaagactgttgctgagatgaagctgagccttgacgaagagaaaaacttgtggtttcttatagcgatgtcaaagaccaatacagaaaaaattaccaaggagattctggaaggtttgtctgaagatactggtgacagtgacagctatgatgtggacagtggcggtgaggactccgaatatcgtccctggcgaccaagccattcagtttatggtaaatcaactatcaaagagaatcatcttgtcaacatgagaggaaggtatttccgggatttgtccattgtgagggccgacgaaggggaaaaaacttgcccacaccctgaagagaatgaagtcgtagtgtaccgaagctttttgaaagctggactgcgatttcccttga

SEQ ID NO: 4919 - DNA, 435 bp, Zea mays
  unsure (1)..(435): unsure at all n locations
agcttgcatgttggccatggtattagccattttctggagtagctggtttggacagcgaagaaggcttccaccctagtgggtggaggatttgggggattcatctatgattctagattaactgttgtccttgttcgaccatctagggttagagatagataggtaagatagatttgcagataagacaaatagttaggtacaagacacatgacttttaggttgagatcttttgggtcacaatagctcaattgggtaaagtaatcctaccaatcattattgcactacttctatgttggtacatgctagaatgtacctactatactaggttntattgtggatataatcccacaaatatttcaatcaatcaaagaagtgaatcaaacagttatcataagaacaatcattcaagtgcctataatgccgataaaatagtttttc

SEQ ID NO: 4920 - DNA, 450 bp, Zea mays
  unsure (1)..(450): unsure at all n locations
tggtcattntattgctaactgtcctgataatgatagtgatcatganaaggggaacaagagggaaaagaagaagcattacaagaaggcaaagggcgaggcgcatctatgcaaggagtgggactcggattgctcctcgtccgactccgacaatgaaggactcgccgccaccgccttcaacaaatcaaccctcttccccaacgagtgtcacacatgccttatggcaagagagaagaaggtatgtactcgcaactctacctatgcttcttcaagtgaggacgaatctagtgatgaggatgaagtagattattcatgtttgttcaagggcttagatagatctaagatagacaaaattaatgaattaattgatgccttgaatgaaaagaatatacttttataaaagcaagaggatttgttgtatgaagagcatgataaatttgttgaggcacaaaa

SEQ ID NO: 4921 - DNA, 402 bp, Zea mays
  unsure (1)..(402): unsure at all n locations
agcttaagaaactctcttcacggatctttcttttacgaanaacgatctancaccgcgaaaggggctactgttgggtctatgcttcgtcgccgaaggtcttatataaagaagtggtcctcggatgaagctgtttgtatgagatacccgaaggttcctcttcttaaagcttcggcattacaaaccgacttaaagatagaatgaccttntagtccataaaggtctgagtcaatgttgtaagtttttataaggggtatacttgtaattcctcacaggctgcgtcctgtgcctataaatagtgaacagtattccgttactgttcacgcatccgattaattacaatcgcatctctcggaattcaactcttcgccaaagcaaaagtattattgtatttaatggtcaata

SEQ ID NO: 4922 - DNA, 308 bp, Zea mays
  unsure (1)..(308): unsure at all n locations
gggaacttcacacctactcgtctgtttatatagtgctgcaggtacaaaagcgaagcggcagggtttttacaccatgcgggcagtaactagtactcgctgcgcaggggaccgcanagaccagacagtgactctgcaaggtgggaccgacacgatcatgggaaacggatctattctctgaaactagctcagggaaggtgttttttggaccttctgctgcccgaagcttgagaggatgttttcacggttcaagctcgttacgaaaaacgatctagcgccgcgaaaggggctactgttgggcccatgcttcg

SEQ ID NO: 4923 - DNA, 313 bp, Zea mays
ggatctctaaatcgacctgctgcatgcaagctatgtattcttccattcttctgttgtgcagagccacaaatggggattcttcaactgaagccttgtatatatatagtttgaaagatgatgaacgagcacagataggaggatgccttgataggtcaagcggaaaaaaaccagaaggtgttgacccacctttttcgatctcggtattaacatgtgctacatatatatatatcttgacaaaaattctctacctttgatcgacttaatgctccttcaagggctgaatgggacaagactttggaaatgagattcttgc

SEQ ID NO: 4924 - DNA, 445 bp, Zea mays
  unsure (1)..(445): unsure at all n locations
tgacattgcttncctgtcggaaaccaatgctatttttattgccaangcgtctcccactatagagcatgcttctagcaaatntaaatttttcattctctatctcatgctcattaattntagcagtaagttgagctatgtgatcattttgttgtttaattaaagcaaggtaatcatgaatagcatcaatattaatgtctctacatctagtacaaattgcaacatgatcaacactatatgtagagggtttgcaagcatttaattcatcaatcttagcatgtaacatggcattctcatttctaagattggaaatagaaatattgcaaacattcaaatctttagccttagaaattaacttttcattctcagttttaaggctagaaattgattcatttaatctatcaatcttagcaattaaactagcattttcatttctaagactgacaat

SEQ ID NO: 4925 - DNA, 217 bp, Zea mays
atctcgagactggctgagagagcactgcccttcttcaggctattgtggaagtctggaccattctcttggaccgaagaggcagaacgagcctttcaagagttaaagcagcaccttgtgtcccttccaatactggtacctcacaaagcggtggagctgttgtacatatacattgtatcggcttcaaagttggtgagcatggtgctggtcgccgaaagga

SEQ ID NO: 4926 - DNA, 230 bp, Zea mays
agcttcggcatggcccactctttcatagttggaaacactttgaaagctaagaattcctgcactaagtccctagtgccgatgtgctctgcgataactctaaattcagccagcgcaatttgggttggaccctctggtgtcatattgcacgggggtctggtttctccgaagatcaactctaacggactctggaccagcttctccttatcatcgtcaaccttgacgtagaacca

SEQ ID NO: 4927 - DNA, 420 bp, Zea mays
  unsure (1)..(420): unsure at all n locations
ttctcaacctttcttgttgcttattaaatatactgtaattnttataattggctcaagtcattaattttaaattttcatacccttttccttattttcttgaattttgctcatggggcttatttagggtttttattagggttacacattcttacctttttgaaagacccatttgctttgatcatgatacttttaagtatatgcttggtgaattctttattcctaagttaatttgatgctcatgcttactttggttcacataaaataatggttcttggtttggcatttgtaagagaaaccctatgtgacactggggtgtcacagccttccccccttaaggaatctctgccaagattcggccatagtccttccaggtgaagctaagggtgagacttataagacatgggtgattattgtattatt

SEQ ID NO: 4928 - DNA, 230 bp, Zea mays
agcttcattccacttgaactctttacctttctccagtagagaggtaagaggtttcactaacttggaaaaaccttcaataaatcttctatagtatcctgccaatccaagaaaacttctgatctttgacgcatcctttggttgcttccaatctagtatctcacttatctttcctgggtccactttaattccaccatcagtaacgatatgccctaagaaagcaacttccttaa

SEQ ID NO: 4929 - DNA, 80 bp, Zea mays
actgtcagctgttcagcatttatttattattgccacccaaaagaacaactatcattgtggggggggggggtccccatctt

SEQ ID NO: 4930 - DNA, 224 bp, Zea mays
agcttctaaagggagaacacgtgataggtttgactaacgtacaattcgaaaaagatagaccttgtgcagcttgtcaagcaggtaaacaggtgggaggagtgcatcacagcaaaatgtgatgaccacttcaagacctctggagctgctgcatatggacctcttcggacccgtcgcctatctaagcataggaggaagtaagtatggtctagttatcgttgatgact

SEQ ID NO: 4931 - DNA, 435 bp, Zea mays
  unsure (1)..(435): unsure at all n locations
taaagccatgggtagtagcataggccagtaatattcgaattgactcaagcctagctaccggtgcataggtttcaccgaaatccaaaccttcgacttgtgaatatcccttggccacaagtcgggccctgttccttgttaccacgccatgctcatcttgcttgttgcggaatacccactttgntcccacaacattttggttaggacgtggaacaagatgccatacctcattcctcgtgaagttgttgagctcctcttgcattgccaacacccaatccaaatctcttaatgcatcttccaccctatatggctcaatagaagacacaaaagagtaatgttcacaaaaatgagcgacacgagatcgagtggttacccccttatgaatatcgctgaggatggagttcacggggtgatctctttgaatcgtntggtggactc

SEQ ID NO: 4932 - DNA, 223 bp, Zea mays
agcttgcattgatatggatgagatttggcattgccaaacaacaattgtgtggttgcgctttagaccatggtacccaacaattcaacaactaccaaaacttcatcaccattctgaccgatcacatctatagtggccttatccggatgagttggatcgatgacgtcatgacaaggatcctacgcatcaaggtcaccatgcgcctattcgggaacctcatgctaga

SEQ ID NO: 4933 - DNA, 225 bp, Zea mays
agcttgtaattcctaaatatatgtacaacacaataagcatattcatatcaaattatttgcgaacccaaaagtaatgatagataatgtgaggaagctaagagagtaatcagtaccatgccaacctcctcttcaccagaatcctcaccgtcctcaccatcctataaagaacttgattcctgaggactgcgttgtttgttgtttgcagttgttgcggtgatcattatt

SEQ ID NO: 4934 - DNA, 228 bp, Zea mays
ttttttttaggttttctcaacttgggttaagttttaccccattaaccactatttagggttaagtcctttaaccagggtttatttgcaaaaacattaaaacaatacaacttgtttgaaatttttgcctagtgaatgcattctaggtgtgtcaaacatatgcaatgccaatgctatgatgtcatgctcaagttttagttatagtaacaccaggggtgttacactatgcag

SEQ ID NO: 4935 - DNA, 375 bp, Zea mays
agaacacgtgatacgtgtgagctacctgctatttgtaaaggatagaccttgtgcagcttgtcaagcacgttaacaagtgggaggaccgcatcacagcaagaatatgatgaccacttcaagacccctggaattgctgcatatggatctcttcggacccgtcgcctatctgagcatatgaggaagtaagtatggtctagttattgttgatgactattcccgcttcacttgggtgttctttttgcaggataagtctgaaacccaagggaccctcaagcgcttcctcatgagagctcaaaatgagtttgagctccaagtgattaatataatgagcgacattgggtccggtcctagaactctctaggtggatgagtttct

SEQ ID NO: 4936 - DNA, 225 bp, Zea mays
agcttgaggacgttgagacaaaaattggtcttcttcaaggaagtgtacaaaggtactcttaagtctgttgttatatttgacagataagtaaccctgtcttcagtcaacctcattaatactattagttgttgattctatcataacagaaggacaacaccttactcctttgtttgacaagctttgatcagcaaaagtaggcagtaagtattagagaagtatcgggat

SEQ ID NO: 4937 - DNA, 453 bp, Zea mays
  unsure (1)..(453): unsure at all n locations
tgcccgtttggaattataactctttgttcgcaaataactgtgagacacatgttcaaattgtcatacaagtacaaatcagagtaggaaacaacattgtgaaacaaatatgtaatcaggtataactatattaaatcaaggttttgaatagtgaccataacagtatagaactcaagtagaaacatattaactctttatccataatcctttcttcaatactttgtgaattctgtcccaaattaaaattcgttttttgaagtaattaatatatgtcccaaatgcaacaagacatgttgatgttgattcaaatagatgatgataaatctatacatatttataaaacgcatacatcaaacaatgtaggaatatattaattacttcaaaaagcgaattntaatttgggaaggagggagtaatatattgagctcactaaagtncaacaagctaatttaagcc

SEQ ID NO: 4938 - DNA, 221 bp, Zea mays
agcttgtgcctgtgggccaaaatccccagaccccggcccaggtagccatgtccgctatccaaacccgagcactgacaggctttccccacgtgtcagtttccacacgagcgcacatgtgcgctgactggtgggccgtcctggtcagcccctcactccacagcaacgcaaccatcgttccaggccactgtcgtgtaggcccaaccgtcatccttctgccaccg

SEQ ID NO: 4939 - DNA, 446 bp, Zea mays
  unsure (1)..(446): unsure at all n locations
tgttgggctaaagagccatgataaccatgttctgttacagtatttactcccacttgctgtgagaaggattttaccagaaatagttagtgctgcactgattcatgtgagcaattttttcaagcaaatctattcgctagttattcgtataagcgatatgcataagctagagtcagaaatagttgagactctaagcattcttgagactatattcttgccatccttttttgatattatggtacacttaatggttcatctccctactcaagtcaacattgctagccctgttcaatttcgtaatatgtacccagtggagaggtaaattttaatatattttagcaataaattaaacttagttntactcaaaggaaggtttaacatatatgccatttctcctttataggttnttaatgagatgtaagggccatgttcgcactatgagtcaccca

SEQ ID NO: 4940 - DNA, 220 bp, Zea mays
agctttgtggctggagaaattcataggtacactattttgctctgtgagttctagtttcgtgataacttcgatatatgacatgaataactttttgtacaacggccctttccctaccaccaggaccgtatgatcctgaaaatgatctagaattgaaagatatccttgctgaactcaaggtggtacataaggcaatagactaagctgttgataaagctctgaa

SEQ ID NO: 4941 - DNA, 449 bp, Zea mays
gctttcaggattccagacgaagccagtcactgcccaggcccttttccaatgtacacaagatcatgatgaatacttgcaagcttatgttcgaagattcctccggcttcgagctcaagcacgaacagtaccaaatgaaatagttactgaggccatgatcaaggggtctcgcccggatccggtggctcaatgtttgccagaaaaccccctcagttcttagaaaatcttcttgagaagatggatgagcatatcaaagcagacaatgactttcgtcagaggaaggaggaggccttgagatattctgagatgaccaggggcttcgacgaacggttcaacccaagacataccagaaccatacataatccaaattagaacgaagacaaaaataatcacactcagggacaacaaagtcaacctcaacctacaggaacaacaatcacaaaataccttca

SEQ ID NO: 4942 - DNA, 224 bp, Zea mays
ttttttgagaaaagattgctagtgcaggccaagcatttgatctagattaggaaaggaatatagattcaggaaagtacttaacttgacaagtaaaaagaattcataaggactaactttagtaagctttgagcaaactgagtcgttggttcttgctataccttaccttgactactaaaggccagcatattcttgagagtcttttcttgggtaaaacttgcgaaagt

SEQ ID NO: 4943 - DNA, 451 bp, Zea mays
tcgtcctaatcgtacttcatgttcacaatctgtttctcttatatatctgttcatacatttcacttggaagatattgtcaaatcatgtttttgaggaccttctgaggacgaatgcccccaacattaatgaacatgggactatccgtactatcaaagtgcattccattttctactatctcccatatacttggatggagagagaacaagtggtactcatcttgtgactccaaaatccatagtcctctccatcaaagtgggggggtttaccgaggggaatggaaagcatatgagcatttgaactttgcggaattcgagaataatcaaaggataagtttggattaactcgtttctttctcgtagtctgtgtcgcatctcttttggaataagcagattgttacttgcaagtatactatcacttgatccccttgtttattcttactatgacacgcttt

SEQ ID NO: 4944 - DNA, 227 bp, Zea mays
tcatcttgctcaatctttattgatgcttattaaatatacttcaatgtttataattggtccaagccatgattctaaatttttcatactgttttccccattctcttgaattttgctcatagggctcaattagggtttttgttggggttgcacattttgcctttttgaaaaacccatttgttttgaacatgatacttttaagtataggtttggtggatcctttattctta

SEQ ID NO: 4945 - DNA, 449 bp, Zea mays
  unsure (1)..(449): unsure at all n locations
ctcaactgactgcttctgtggaacaatgcctccttgatgccgagcgtcttccactatagagcatgcttctagcaaatntaaaantttcattttcaatttcatgctcattgattttactagttaattgagctatatgatcattgtgttgtttaattaaagcaaggtgatcatgaatatcatcaatattaacatctctacatctagtacaaatagtaatatgatcaacactagatgtagagggtttgcaagcatttcattttttatcttagcatgtaatattacattctcatctctaagacaagaaatagaatcattgcaaacatttaagtctctagccttggaaattaaaccatcattcttagttttaagattagaaattgattcattcaatttatcaatcttagcaattaaactagcattttcatttctaagattgacaattgaatcat

SEQ ID NO: 4946 - DNA, 219 bp, Zea mays
agcttgcaccctggtatattggtccttttcctatccttgaaagatatggaccagtggcataccgactccagttacccgaaacattgtctgccatacataatgtgttccatgtgtctcaattgaagaagtgtcttcgggttcccgatcgaaccattgaagtaacggatgttgccttagaaccagacttgacatattcagagcaccctattcgagtcttgg

SEQ ID NO: 4947 - DNA, 408 bp, Zea mays
tacataaaaagtttgggaaatcttgggcttattatttattctctaaaaatccagaatcaatagtttaggttattttaaataccctaaaattccttgttcaaactaaaaatcataaaactatttttattaaatactatggaaaataacaagcctaggaaaattagtctcatatttttaggagttttctaccattttctagaatttatttggctctggaagaaaaagaaaagggaaatcggtgaatagtcttaggccaggatcagcccaaccggcccaacatcgcgcaaaatcagcccacggcggggaagcccgcgcgcctgcgctggcattcatgcaaaaacaaccctgcgctaaaactaaaccagcattgaccctgaccactcgttgactgagtcactgaccgattgc

SEQ ID NO: 4948 - DNA, 230 bp, Zea mays
agcttcgagaatgttgaagggaatggaccactgaagccagagctgtcaaaatatctgcaaaagtaattgacttaaattttaaatcttacagaagtgaagtttggcaattcgctgcggcaatggcgaaacggtggcggctgggcgtattgcggaccgcgcgtgcgagcggacagaaagagaaaaaagagaagggcggcagggatatttttatccgttaatttttggcggct

SEQ ID NO: 4949 - DNA, 436 bp, Zea mays
  unsure (1)..(436): unsure at all n locations
cagttcgagcgagaaaagctagagcttacttgcaaacttgaagccgaagctcaacaaaattcagatttgagaaaactactgacaagtcttcaagaaaaatgcttggaatttagcaacaaatgcattcaacgattaagaaagattttttactcagttggagccagcagtgaaaaattcaccccctcagctgaagatctaccgaaaaccttcgaacatattgagggggagattgacgagctcgacgaagtcatagctgggcatggtgacttctgtgcctgggtggcttctcgaggcactgctgcagctttcctgaaggctggctgtgatcatggaaaaatngtcaataggccaaatttcactctatcaccatcaatactggatgacattcctgatctcgcccgaagtatctcgaatagatttgtaaaatgatatggac

SEQ ID NO: 4950 - DNA, 227 bp, Zea mays
agcttgttttagaagctgatggtggggtaactttgttacaatcccattatgtggaaaaagtattgagtcgctttggttttagtgactgtgatcctgctccaacaccttatgaccccagtgtgctattaagaaagaattgtagaatagcaagggatcaattgacatactcccagatcattggctcgctcatgtaccttgcaagtgcaacaaggccagacatctcttat

SEQ ID NO: 4951 - DNA, 378 bp, Zea mays
aagcccatgctcttatgtgaggacatagcagagcagaaggtgctgttgggctctcaattatccgaagaacaggagaaaaccttgataaggtttttgttcaacaacaaagatgtttttgcatggtcagccaatgatctctgcggagttaatagggatgttattgaacactcgctcaatgttgacccatccttcagacccagaaagcagaggcttctgaaaatgtctgatgataaggccgaaggtgctcgtaatgaagtcaaaagactcctcagtgcaggagttatcaaagaagtaaagtacccagaatggctagctaacactgttatggtaaaaaaggccaatggcaagtggcgaatgtgtatcgattttacagatctc

SEQ ID NO: 4952 - DNA, 223 bp, Zea mays
agcttatgaagattcttcatcccaacatgggctagtcgacgatgccagagccaacccatgttagtcttagcaattaagcaagtgtcgagttcagctctattaaaatccactaagtatagctgaccctctaacacacccttaaatgctattgaatcatcacttcttctaaagacagtgacacctatatcagtgaatagacagttgtagcccatttgacataatt

SEQ ID NO: 4953 - DNA, 450 bp, Zea mays
  unsure (1)..(450): unsure at all n locations
ngacttttgcattcaaacgaagctncagtttagtctctgcttcgtcacaagaagagcttcggaaaaaagggtattaatttccaaggaattttcaagaaattcaaaatcaaatggcccgagtgcgctccactgctagagttgagcgtgatggaaatgaggccgaagctgctgaaactgttccgatttctgaagcaatgaggcgctntgggctggtttcagcagaggacacacctgctgccgaagcaacacaagctaatgttgaagaagttggttctgaggatgagttcagctgcggggtaccaagtaaacctagtcatttggactttggaaagtccaccatctctgaagctgaccttccaaaaatggtgaagctcggctacttcagcgaagcaaanaaggagctggttcgttttggcggagaggaaactactccgaagccagaaaagaatg

SEQ ID NO: 4954 - DNA, 223 bp, Zea mays
agcttttaaaaatctggtatgaatcggcggtaatatccagccagtccaaggaaacttcggacctgatgaatagtggtcgggggtttccactccaaaatgtccttgactttgctgggatctaccgcaatccccctggcagacagtacatgtcctagaaactgaatttcctccagccaaaacgcgcatttgctaaacttgacatataactgatgttctctcaagc

SEQ ID NO: 4955 - DNA, 446 bp, Zea mays
  unsure (1)..(446): unsure at all n locations
ttcatccttcttcttcaaaacaaggctagacatccccaatgcgaattacttgggcggatgaaacccttgtccaataattcttgcaattgtttcttcaattctgccaattcagtgggtgacatgcgggaaagcctcttggaaataagtgtcgttcccggttgcaactcgatggtgaattcaatatcccggtctggtgacattcttggcaactcatcangaaaaacatctgcatactcacagaccactggaattttctttaagggtaactctatcataggaaaagcacatgagtaggttcttggttgggtaaatacaatgtaaggtcttcgaaggtaggagaatggatttccagagctctggcagctacatccaacaccacccgatgttgactcatccagtcagctccgagaatgatgtccataccatctaatcccaaaatcaggagt

SEQ ID NO: 4956 - DNA, 225 bp, Zea mays
agcttttatgggagagcacattttgggactaacaaatgttcattttgagaaagacaggatttgtagcgcatgtcaagcagggaagcacgttggtgttcatcatccacacaagaatatcatgacgactaacaggccgcttgagctactccacatggacctattcggcccgatagcttacataagcatcggcgggagtacgtactgtctagttattgtggatgaata

SEQ ID NO: 4957 - DNA, 343 bp, Zea mays
  unsure (1)..(343): unsure at all n locations
tccaactagactaacattaaaacctacatcgcataacagaccaactagcactcccttaaatgctactgaacaatcacttcttttaaagacagcgacacccattatgtacacacccagtataaagacctacttcagtaaagagagcagaagggcccatttcgcataattgagaaacagaaagcaaaatttcatctcacaaacctattataaaaatgctggaaatagaacgatcaagagatatagactatttactcacacctttgaccaaaccatgattttcatccctgaatgtgaaactcagtggggatcttcattgntctcgtatgaggaaaacatacttttc

SEQ ID NO: 4958 - DNA, 228 bp, Zea mays
ttgtttgtcaattgagtgaacttgagttgatccctgtctaacctgagtatatatatatatatatatgttgttgcttgagaacaagtatgtacaatagaggcttgacaattgtgtgaacttgagttgaacatgaattttgataatcacaactcaccatccctttcaatatgcttagaatatagctttttataatttttcaccctacaatacaaaattgttctatgaagg

SEQ ID NO: 4959 - DNA, 226 bp, Zea mays
agctttacacagatcaaagtcattgacccctcttaatagtacagctaactagcctactaatccggtcaggtatcttatctaaactcctcaagaccggcaaaaacgaaacctatattatacctttgcctttatttgatccacaaccaatgcttatgattctccaacatttcctgttctatgtggtccaaccctgcattcttatttctccaagaatcgttagtccaca

SEQ ID NO: 4960 - DNA, 443 bp, Zea mays
  unsure (1)..(443): unsure at all n locations
ctaccaaatggacgttaagagtgccttcctcaatggaccaatcatatgaagaagtctatgttgagcaacctcccggctttgaagacagtgagtatcctaatcatgtctataggctctctaaggcgctttatgggctcaagcaagccccaagagcatggtatgaatgccttagagatttccttattgcaaatggcttcaaagtcggcaaggccgatcctactttattcactaaaactcttgacaatgatttgtttgtatgccaaatttatgttgatgatatcatatttgggtctactaacgaatctacatgtgaagaatttagtaggatcatgacacanaaattcgagatgtctatgatgggggagttgaagtattttctatgattccaagtcaagcaactccaagagggcacctttatttgccatacatagtatacacaagac

SEQ ID NO: 4961 - DNA, 220 bp, Zea mays
agcttcgccctcgactctcacagaggccacataggtcgctacctaaccatggagtctgacgctcgatgtcacttgggcgattaggtcagccccataccttctactcgtaaggtagcatgagagcaaactcttcctttgtaataggatagggtgtatctgtggtctagcccagtgaggtccgccctcataaacctggtctggcccagtgaggtccgccctc

SEQ ID NO: 4962 - DNA, 448 bp, Zea mays
cttggctgtcttatacggttagcaaatctaaatctaatttcttaatttaacttggtcaaaaagtctaagtgtcatgtgtgtgttgaatcaaaacaaccccgcaagcctcacaaggctgctgaggcgaggaatttggcacctctagaacttgttcattctgatctgtgcgagatgaatggaattttgacaaaaggtggtaaaagatactttctcacttttatagatgactccactagattttgctatgtgtatctcttaaaaacaaaggatgaagcgtttaattattttaagacctataaagctgaagttgagaaccaacttgagaggaaaataaaacggttaaggtccgatcgaggtggagaatatttatctaatgtgttcgatgagttctgcatggaacatggtattattcatgagaggacaccgccattctcaccacaatccaatg

SEQ ID NO: 4963 - DNA, 219 bp, Zea mays
tgcttcttaaaggctggactgtggtttctcttgagcagttttgtcgtggaagtactaaagatatttgaaatctgccttcatcaacttactcccgaagcaatcataaggatgagcatcttcgtctgggccgtgaggagccaaggtttagaaccaaatgcaaaaagtttctgcaacatacatgagctattgtatgagacaaaaccctggggtaaagagcag

SEQ ID NO: 4964 - DNA, 439 bp, Zea mays
  unsure (1)..(439): unsure at all n locations
tcgtgaaatattcttcgaagctgtaaaaaagttttgtgttgcttttccgaagaggctacacttcatgccgatttgccttgtgccttagcgcgaatttctctttcccaaaatatgttccgaaggtcaatactgtatccccttcttgttccagatgcattatgttgtatgatgcttatgttatgcaaaatgatgtgatgatgttatgttatgcaaaatgatgtttgtgccgtagatacatatccctgtgataaagcacacacactttttatatcagcgctgacttttcgctgtaagcctcccttaggagcttcttcngcctttactttcagcggaatcagcatttatttttcgctgtaagcctcccttatgagcttcttcgcctnttactttaagcggaatcagcgtttatttntcgctggtagcactccttaggagcttc

SEQ ID NO: 4965 - DNA, 226 bp, Zea mays
ttttttttaaagggagaacacgtgataggtctaaccaatgttcatttcgaaaaagatagaccttgtgcagcttgtcaagcagggaaacaggtgggaggctctcatcacaccaaaaatgtgatgacaacatcaagacccctggagctgctacatatggacctcttcggacccgttgcctatctgagcataggaggaagtaagtatggtctagttatcgttgatgact

SEQ ID NO: 4966 - DNA, 412 bp, Zea mays
agatctgggagacaagaattattatgttataattgaaaatttagaaggccaaataaaagagcaatcagcttctattgaaaagaagaacttctagcttcaagcaactgaaggcttattggcgggagccgaagcttaaataacagaactgaacacgaagcttctttggcaatctgaacagtttgaacaagaaaagctagaacttaatgcgagacttggagccgaagttcaacaaaattcagatctgaaaagactattggcgggccttcaagaccaatgtttggaatctagcaacaaatgtatctaacgactgagaataatatccactcagttgagctacagtgagaaatcaccccacagctgaagattaccaaagaccttcaacatatgagggtgaaaagatgacttgacaagt

SEQ ID NO: 4967 - DNA, 224 bp, Zea mays
agcttctaaagggagaacacattttaggactaacaaatgttcattttgagaaagacagggtttgtagcgcatgccaagcaggaaagcaagttggtgcccatcatccacacaagaacatcatgacgaccgacaggccgcttgagatactccacatggatctattcggcccgattgcttacataagcatcagcgggagtaagtattgtcttgtaatagtggatgat

SEQ ID NO: 4968 - DNA, 454 bp, Zea mays
  unsure (1)..(454): unsure at all n locations
tgtnaaaggtaaatgtcactatagcagtgaccggcatctttttatgccncaacaataattgttgaatgactcggccatgttactacactggaactcatatctccatccacctaagtcgtgagctctcgtccacttctccaaatccggcatcaatccattcaaccaatctctaccttcggcatttgttgcgactttgagcttttctaacttttctctaaagaacttgtcttccagctgtcgacatgtctcctggaaaagctcaaagttatccttgacaccatccttacgcagaagattctcagcaaggtgtcgagtacaccacctgtgatgcaaaggagggtacccatcgatctgctcacggaccgcgttgagtattccctggtgccgatctgatattacaccaacttcccgtcctgtgccaaccacatgtatccggaccagtcgcatgaaccag

SEQ ID NO: 4969 - DNA, 217 bp, Zea mays
agcttgccttgattcccgtctccaaagatgatcgaatcttgggaatctttgttcttgacgtaggaggtgaacatcttcttctcccccgtcatgtggtttgtgcatctgctgtcgataatccagcttgagcccccggatgcataaacctgcaaggcaaattaggcttgggttttaggtacccaactcttgttgggtcctacaaggttaataacaacag

SEQ ID NO: 4970 - DNA, 411 bp, Zea mays
  unsure (1)..(411): unsure at all n locations
tcggcctcgggaacaacattttagtgtttccgaagatgtctgaagacaagaagatccctgccgagacgaagctgagtctcgaggaggagaagaatctggggttcctgatagcgatggcagagactaatacagagaaaatcacgaaggagattctcgaaggtttgtccgaagatactgatgacagcgacagctatgatgtggaaagtgatggggaagaggccgaagatcgaccgtggcgaccaagtcactcagtttttgggaaaacaaccatcaagcagagtcacattgataatatgagggggcgatacttccgagacatatctattgtgagagctgatgccggggaaaagacttcttccacccctgaagaagatgaagcttgtattntccgaagcctcctcaaggctgggc

SEQ ID NO: 4971 - DNA, 229 bp, Zea mays
agcttgtgaacagtacaaattcagaagggagaaagcagcttcagcagatcagccgaagcctatgctattatgtgaggacatagcagagcagaaggtgctgttaggctctcaactatctgaagagcaggaaaaaaccttgataaggtttttgttcaataacaaagatgtttttgcatggtcagccaatgatctatgcggagttaatagggatgttattgagcactcgctc

SEQ ID NO: 4972 - DNA, 228 bp, Zea mays
agctttattgaattatttgtatacttgaaatcaattttcaaatttattatatatatattttagaggtctgtggaatgttatttaaatatatatataaattaaatctgaaaacttcgtgtgcgatatgaaaacagacggaaaaaacggaaaacccttatcccattttcgtttccgtgatttatcatcgaaaacgggattggaaccataagagtcagaaacagaaagtgt

SEQ ID NO: 4973 - DNA, 223 bp, Zea mays
agcttgtgaacagtataagtacagaagggagaaggctgcttcgactgatcagccgaagcccatgcttctatgtgaagacatagcagagcagaaggtattgttgggatcccaattatctgaagagcaggagaaaaccttgataaggtttttattcaacaacaaagatgtttttgcatggtcagccaacgatctctgtggtgtcaacagggacgtcattgaacat

SEQ ID NO: 4974 - DNA, 222 bp, Zea mays
agcttgtttacttggtaagatgaccaaggcgcccttcacgggtttaccggagaggacgttagatttattggaactcatacatactgatgtgtgcggaccaatgagtacgacagctaggggaggattccaatacttcataaccttcactgatgattttagtagatatgggtatgtctacttaatgaaacacaagtctgaatccttagaaaagttcaaagagtt

SEQ ID NO: 4975 - DNA, 238 bp, Zea mays
tcctgcaggcatgctttttgtccttcccctcagtatacgcgcccgctgtccaacggagttgtggaacgcgcacttggcaaaattttcacggctgtcaagaacatgctgctctactataaaaagggcaagtgggccaatttgttacctgaatcggtctgggcactaaacacgactgagtgcagggcgactgggttcacccctttccgccttctatatggatcggaggccatgacccctc

SEQ ID NO: 4976 - DNA, 397 bp, Zea mays
agcttgcctaggcgaccataccaaaaggcctatttcttttgttttggagagatggcgagagttgcgtgtacccttcgtggctagaggctggacggtgtggtatctgtgatctcagttggcgtgaacccagtctggtcttgagaaacccggtggcttgttgacatatgcaacggttaagtgctacatatgtcatgtgatcggagatcctcagctgagtattaatcgattcggatcgtcgttacttctctgatatgaagacttggtcattgtcttacacgttgcaattcaacaaagttaaaagggatgattaaagatggctgttgtggccaagtgcttgtactttggtagaaagaactcttgtttcaggtaatgactttatctgattatataactggat

SEQ ID NO: 4977 - DNA, 226 bp, Zea mays
agcttgacaatgaggaaatggcgctcgtcatcaagagcttccgccaaatcctcaagcaaaggagagggaaagactacaagtcccgctccaagaaagtttgctacaaatgtggtaagcccggtcactttattgcaaaatgtccattatcaagtgatagtgacagggataacgacaagaagggcaagaggagagaaaagaagaggtactacaaaaagaagggcggcga

SEQ ID NO: 4978 - DNA, 460 bp, Zea mays
  unsure (1)..(460): unsure at all n locations
tatgaagattcttcatcccaacatgggctagtctacggtgccagagccaactcatgttagtcttagcaattaagcaagtgtcgagttcagctctatcaaaatctaccaagtatagctcaccctctaacattcccttaaatgctattgaatcatcacttcttctaaaaacagtgacacctacatcagtgaaaagacagttgtaacccattttgcataattgagatacagaaagcaaattgtaatctaatgaatctacaagacaaacattggaaatagaatggttaggtgatatagcaattttacccaaacctttgaccaaaccttgatttccatcctcgaatgtgatagcttgttggggatcctgatttttctcataggaggagaacatcttcttcttccctgtcatatgggtngtgcacncgctgtcgagtatccaacttgagcacccgaatgcataaac

SEQ ID NO: 4979 - DNA, 221 bp, Zea mays
agcttgccagtatttgtcaaaacaacaacatctaccagcacagcaactgcagaccataccagtaacttggcccttcgcatgctggggactggatatgattggacctttcaagaaagctcaaggaggatacactcatgtgttggtagcaatcgacaaattcactaaatggatagagttcaagcccattgcttctttaacctcagctaaggccgtggaattca

SEQ ID NO: 4980 - DNA, 443 bp, Zea mays
  unsure (1)..(443): unsure at all n locations
tgtgtcaattatgtgtagattgttgtgcaatcaattctgtccagattnttctgcaatcaattctgcacatgtttgacacatttcacttcattttgtagcgtcttggtggaggctttatggaggtggagcaccagatttgcaatacatggctattagaatcctctcactgacatctagctcttctggatgtgaaaggaattggagcacctttgaacaagtcagattgtagtctctagtctctactaattgctctctagtactaatttaatgtacatgtgctgatgttgtaattcttatttataatgtacagcatcatacaaagagaaggaataggcttacaacagagcgtctaaactctctagtattcatccaattcaataataaattgctgtccaagaacgagaagattgccagaaagagtaattatgaagtgctcctaagta

SEQ ID NO: 4981 - DNA, 221 bp, Zea mays
ttgcttaaccctaatttgctaaatgtaccacaagaatttgttgtagcaagattaaactctacctgatttaagtagattagtcaccatcaaaagttaattgctaaattacatatcatatcatgcatgtatcttactcatttcattcactagactgcaatctagctggtggagagtacgtgctcatccccgagcaaggagttgtccacgaggaagaccaggag

SEQ ID NO: 4982 - DNA, 405 bp, Zea mays
tctcctgtccgaaataatctacggtattccggacagtctattaagttgagttatagatgaacctttggcacctgtggaacatataatctagagcaaactagttagtccaattgtttgtgttgggtaattcaaccaccaaaattaattaggaactacgtgtaagcctaattccctttcaagctttatgctgatgggggttaccagctgagaattaggcgtcttgagggtacccctaattatggtccccgacagtagcccccgagcctcgaagggagtgttagcactcgcttggaggctttcgtcgcatttttttgcaaggggaccagcctttctcggttacattttgttccggtgggtgcgcgcgagtgcacccgccgggtgtagcccccgatgtctctgaggagt

SEQ ID NO: 4983 - DNA, 228 bp, Zea mays
ttttctttatatgggagaaagtgcaggactcctttatattgggatcagactggagaaagacagttctttgggcctgaattgattcaagaagcagaagaacaagtccgtataattcgagagaatttaagggtgtctcaaaccagacaaaagagctatgctgataatagaaggaggccactggaatttgaagaaggagattatgtgtatctcaaggtgtcaccacttcgt

SEQ ID NO: 4984 - DNA, 223 bp, Zea mays
atcttcgcggagtgggcgctgcatcgagcggttacggatgtgaagccttatgggggtccgctggtacacatggatggggaccgcgccctcctcgtgcaggctcgtggcggtggctgcgagtaatttctcgtcggaaccatccgccgccgtggaaccttgcctcctccgtgggcagagaatcccactacgtattgccggtgagtctcccttttcgcttgtccga

SEQ ID NO: 4985 - DNA, 420 bp, Zea mays
tcgggaagccgaagggtccaaaaacaccttccctgagctcattgtcgagaaacgattcagtttccgagcgcgtagcggtccccccttgcagagctactgtttggtctatgcggtccaccacgcagcgagtgcaagcggctgtccgcctggtgtaaaaatcctggcgattcaccttcttacctgcatcactatataaacagacgagtaggtgtgaagttaccacaacattcattgctatttgcactgttttgctgccaaaatttttaaccatagccgaagcttgactctcagaatcagacgaagctccagtttgaagcctacttcgtcagaagaaaaagcttctgaagaaaaagcatttagttcccaaaaaattcagagttaaatggctagagtgcgttctaccgctagggttgagcgtga

SEQ ID NO: 4986 - DNA, 219 bp, Zea mays
agcttgtgaaggttcttcatccccacatgtgctaagcggcgatgccacagccagcccatgctagtcttagctattaagcatgcatctagaccggcctcttcttttgcaaaatcaactaaataaagtttgccgtctaatacacccttaaaagctagtgaaccatcacttcttctaaagacagacacatctacatttgtgaatagacagttataccccatg

SEQ ID NO: 4987 - DNA, 439 bp, Zea mays
  unsure (1)..(439): unsure at all n locations
tccncggcacgccgaggatacacagatctcgggtgtcattgcacgagaagattaccctagcagcgaacattagtagctccaagtgctatatacattttgtccctgggcccacatgtcggggctcagtacctttgtgcatgccccccttcagctataaaaggggaggcatgcgacgttacaacacaagttcactcagactctcaagctttcacagcaatccaacataaagtggagtagggtattacgcttcggcggcccgaaccactctaaaccgtcgcgtgttcttgtgttcgtccatccatctcacataacaggcaaaacgcttgggcccctcctcatcttaggatttagggcgggtgcactccgccacccggccgaagatttcctctccgacatttggcgcgccaggtaaggggctatgctctaagttttgcctgtg

SEQ ID NO: 4988 - DNA, 228 bp, Zea mays
agcttgtcaaccatctcacgacttgcaagattatggcagctccctccatcaatgatcacctttactactttgtcttgtactttggctcgcgtttgaaaaagattatgtcgctgtccaatttcagcttctttcatttgaacactcaagatttgtgtaaccaccagagtagtaccatgctcaaattcacatccagtgtgttcctcaattttatcttttatattttctgct

SEQ ID NO: 4989 - DNA, 226 bp, Zea mays
agcttttttgggagaacacgtgataggtttgactaacgtgcaattcgaaaaaaatagaccttgtgcagcttgtcaatcaggtaaacaagtgggaggagcgcatcacagcaagaatgtgatgaccacattaagacccctggagctgctacatatggacctcttcggacccatcgcctatctaagcataggaggaagtaagtatggtctagttatcgttgatgacttt

SEQ ID NO: 4990 - DNA, 223 bp, Zea mays
agcttcttccatcactgtcgccgctagcccctgccgggcctagtgcaacctcctgcctacctggacctagcctcgtcgccccctttcttcatctttgccaccactagatccgtcgttgttgcagccttcctagccaaatccatccctatctcggccttccaggctggatccaccatctctttgactggatccactgttttcatggctagatctattgctgcca

SEQ ID NO: 4991 - DNA, 219 bp, Zea mays
caggcagcagctgttatggaaaacagaggggagacgaaagaccccccaaaaaaacaaccaagcgccaaagagcagcaagggaacaagggggaaaaacgaacagaccaagaacgagagaccaaccacaaccccaggaacgaaacagagggaccaccacagacccaccgccacaaaagcacacgacagaaggagcacggacgaagaaacgaaaaagacgga

SEQ ID NO: 4992 - DNA, 267 bp, Zea mays
tttttttatccacccagtaggttagcattaagcagtgtcgagtcactcttcaaaatctccaagttagctgaccctctacactccttaatagcttataatcatcacatcttctaagacagtgcacctacatcagtgaataaacagggtagcccatttgacttattgggatccgaaagcaaatgtaatctatagaatttcacaaaaacatttgaaattaatgcgctatgatatagcaatttaccagactttgccaatacttgatttcat

SEQ ID NO: 4993 - DNA, 225 bp, Zea mays
agctttccgcaccctcaaaatggactacgacaagaaactgaagaagctcgcccccgcaagaaaaatccgcaagaagaccaaaagccaaggatgtcagactgagcagcaggaagagaaccctcctaggaaccagtccgacaccgaggacatgtccctggccagccttgatgaccttctcaaggaatttggggacactttagagaaagagttcgggggtaccctagg

SEQ ID NO: 4994 - DNA, 405 bp, Zea mays
  unsure (1)..(405): unsure at all n locations
agcccatgctagtcttagcaattaagcatgcatctagaccggcctcctcttttgcaaaatcaactaaatagagtttgtcgtctaatacacccttaaaagctaatgaaccatcacttcttctaaagacagacacatctacatttgtgaatagacaatgatatcccatattacataattgacttacggataacaaattatatccaagcgactctactaagaatacattagaaatagagtgctcatttgagattgcaatcttgcctaagcctttaaccttgccttgattcccgtcaccgaatattattgaatcttgggaatctntattcttgacgtaggaggtgaacatcttcttctcccncgtcatgtggttgtgcatccgctgtcgataatccagcttgatcctcc

SEQ ID NO: 4995 - DNA, 222 bp, Zea mays
ttttttgttcgcaacatgagggcacagagcgacccatggtttgcagaatatttgttgcgtgttggtggtgggactgaggaagcgaacaacgatggtgatgttcatctaccagatgagatatgtgtgccatatattggtgatgaccgcgaccttgacagactgatagatgacatttaccctaatttaaatgaaaatatgtctaacacaagatacatcacttca

SEQ ID NO: 4996 - DNA, 447 bp, Zea mays
tgtgaagattcttcatcccaacatgggctagtctgttgtgtcatagccaacccatgttagtcttagcaattaagcaagtgtcgagttcagctctatcaaaatctaccaagtatagctgaccctctaacactcccttaaatgctattgaatcatcacttcttctaaagacagtgacaccaatatcagttaaaagacagttgtagcccattttgcataattgagaaacggatagcaaattgttatctaatgaatctacaagaaaaacattggaaatagaatggtcaggagatataactatgttaccaagacctttgaccaaaccttgatgttcatccgcgaatgtaatagctcgttggggatcttggtttttctcatatgaggagaacaatttctatctccctgacatcttagtttgtgcacccgctggcgatgatccaacgtgagccc

SEQ ID NO: 4997 - DNA, 221 bp, Zea mays
agcttagcaattttagagaacccttcaataaatctccgataatatcctgcgagtcccaagaaacttcgaatctcagtaactatagtgggtatgctccacaccactatctccttgactttagcaggatccactgatattcctccattagaaataatatgtccaagaaatggcaccttgtcaatccaaaactcgcatttactgtacttggcatagagttgatt

SEQ ID NO: 4998 - DNA, 445 bp, Zea mays
  unsure (1)..(445): unsure at all n locations
ntaagctctntgacaagaaaatcacttcacctagttttaacataaatgcatcaatgcaggaatggaattnttgagaggttaaactaggtatgaagcanggatatgcatagacatgctttctcttccttttataaaagatatgcaaagaatgtatataagaggaagatttaggtacatgtataaatgagaggaagtaatttacccttttgtacctttacatagagacgctctctttattgtgctttgtccttagtcttggttacttaagacctatattcaagacaatgtatggaaatattgtgcacaagagagagttctacaactagtgatccttttctaagtcattgttgtcatatatcaagtagatcacacattgcataaatttatcctgaattctccttttaacttagtgcatatcaagggagacattaattgatagtatatg

SEQ ID NO: 4999 - DNA, 224 bp, Zea mays
ttttttaacaaacagagcaggctggctgtttttatgaagtttcctgatcaccctttgaacgtataggaagttatcgtaaattgaccgtttctggatgaaggtgttctgagcagttgatacgatctcgttcattctcagtgcaagcctgtttgccagaatttttgttatgattttcatgaagctattgataagactgattggtctaaatttgtctattgtgtcag

SEQ ID NO: 5000 - DNA, 442 bp, Zea mays
  unsure (1)..(442): unsure at all n locations
cttggcctccncttcctcctcttgaagtaactgttctttatgtgttgtgggaaggctgatgctaagagcttgcatgttgttggcctaactggctctaggattgggttggcttttcttcaccctataccggattatggatgcttcggacatgccttgggttaaaacttcctctaaagccactggtggtttcagtgtatctgtgcaactcctcccttctttggcagaagtcattatcagcccttatgtattcatccatcttttataccaatttctctagagtgcagaggcttccttgcgaagtattggactgctgatcctggcctgaaccccntgaccatggcttccatgacaatgccatcttgaactgttggtgcttgacctcgaagacgaaggaaccttctgacanatgactgtaggtttcgtatggatcttgggtgcactg

SEQ ID NO: 5001 - DNA, 223 bp, Zea mays
tgcttcataggcagagcgaatcaattcttctcggcctaaaaagtgtgacctatgcatggcactgttccctatttatagtcgagaaatacatctttgtagaaattacaatcatgccctcaatcctatacaaatgaactacaaagatgatcaagggcattgttgtccttttcctttgtaatcttgttgagcgagtcttgaggatttcgccttgctcgtgatatct

SEQ ID NO: 5002 - DNA, 435 bp, Zea mays
actaagcttataggtggaaaagtttcactaatatatgggttaatgtgcggccgaggaatggcccatgaaataataaagaaaaacgaaaaagatattcatgacactcgagagtcaataaaagtagctgaaaaggctgaggagcttgagagacgaataggtattacttaatagttttaactctattgtttatttttgtgacttcgaactgatttacgttttctaccgcagctgaactatctcctcccctagagcccttcgagtcattggccgacccagaggcaaaggaatcagcagaaattattaacatggccaaaactattgtagacaaagtcgttacccaactgctgaccgaagctgcagataaagatttgaaggaagaagagtagctattggtaatacattgctagaatattaatgttacatttgctggactat

SEQ ID NO: 5003 - DNA, 220 bp, Zea mays
atcttctcatcacttaaattgtcaatgcttttcaaccactcatcatctggctcaataaatttatctccaaatttaaaagtgtacttaaacctgacaagtccaccttcgtcggcctctttaatggtttcttgtggcatttcccatttctccgcaagcggccacaccctgaaggcaatatgctcttgtactaagtcccttgttcctataaaagagcagacaa

SEQ ID NO: 5004 - DNA, 287 bp, Zea mays
  unsure (1)..(287): unsure at all n locations
tcggccttctgaggccgaaggttgaaatgatacgaagctttcgtagagtgccaaagagccttcggcgttgtctgctcttntataggaacaagggacttagtacaagagcatattgccttcatggtgtggccgcttgcggagaaatgggaaatgccacaagaaaccattaaagaggccgactaaggtggacttgtcaggtttaagtacacttttaaatttggagataaatttattgagccagatgatgagtggttgaaaagcattgacaatttaagtgatgagctgct

SEQ ID NO: 5005 - DNA, 226 bp, Zea mays
agctttctcaacctttcttgttgctcattaaatatactttaattttcataattggctcaagtcataattttaaacttttcattccccttttcttattttcttgaattttgctcatggggctcacttagggttcttaattagggttgcacattcttatcttttcaaagactcaattgttttgatcatgttacttttaagtatatacttggtgaattctttattactt

SEQ ID NO: 5006 - DNA, 227 bp, Zea mays
agcttatttttagtcttatgtaactaagtgttagaagactcttaaaaaggggagaaataattaacaaaaagggaaagtcataagaaaaacataagatgtagaaaattgatgagtgcatactatgtcatgagcatcacgtttattttatgacacactgcaccccatgaatagtatgatataagttgtctccatactttgacccaaatatgtgcttttggcatttgagt

SEQ ID NO: 5007 - DNA, 446 bp, Zea mays
  unsure (1)..(446): unsure at all n locations
gtgctgcacttaccgctgagtgcgaagttccatatatataacaaaggagcccctggcgtacgtggagttaatgttgttaaatctatcaaatattgcttcagctcttcgaacgctctctgctggaatggtccccattgaaagacttccgctgacttcagcacttcgaagaatggtaagttgctctctactgatctggatatgaatctgttgagagatgtcagccttcctgtcaatctttgagcccccttttttgtacttggtggttccattcgaagtatagcttcgattttacttgggttggcctcaattccctttgttgaaactaggcaaccaagaaatttccccttctttactccgaagacacattnttctagattcagctntagaccagcctgtctaaaattagcgaacgtctcctgctaatcagcaatgtggttatcttgctt

SEQ ID NO: 5008 - DNA, 224 bp, Zea mays
agctttttttgcaatccaacacatagtggagtaagatattatgctccggcggcccgaaccactctaaactctcacgtgttcatgtgctcggtgatcgtttagcaggacagacaaaacgcttaagccccttcctcatcttaggattaagggcgggtgcactccgccacccggccggagaattccctctccgtcatttggcacgccaggtagggggctaggcatta

SEQ ID NO: 5009 - DNA, 380 bp, Zea mays
atcttccaatgatctacatattccagaatgaccccagggtacttcaatttattggattccaaactcatattatctatggaagatattaatgttgtacgaaataaacagatatcatgtgctgaatatcaaagcctacaacatggaggaaaatcaaatgatggtaacatttatattcttaagagcaactatcttaaatcgtcatgtgtcttgcgcagtcacataaaaatataaagcacttaagcatgtattaaaactatgtcatcattctttgaagaaattcctctcatatgcgatattgtgtatctatcaattctatattatgacaatctacatgctttaaattatcgcaagttctcatggcatgtatatacactaatcat

SEQ ID NO: 5010 - DNA, 212 bp, Zea mays
taagtcggggacagggccttatggacgggtgaaagtactcgtaagcggcaaggccgaccgagccgagggattcccacgcctctgggatatggatacctcactcgtcccttccgcgaaaagcaactctcgctcacacaaacatccctgttaccgacagagtccagatgctcggaacaggaggaaaaaagacgcagcttcgcgagcacggcgag

SEQ ID NO: 5011 - DNA, 390 bp, Zea mays
tatattgagcaacctcccggctttgaagatcgtgagtaccctaaccatgtttataaactctcaaatgcgctttattggttcaaacaaaccccaagagcatggtatgaatgtctacgagattttattatcactaatggcttcaaagtcggtaaagacgatcctacactctttactaaaactgtcgcaaaagatttgcttgtatgccaaatttatattgatgatatcatattcggttctactaacaaatctacttgtgaagagtttagtacgatcatgatacaaaaattctaggtatatatgatgggggagttgaagtatttcctaggatttcaagtcaagcaactccaagacggcaccttcatcagccaaacaaagtacattcaagacata

SEQ ID NO: 5012 - DNA, 224 bp, Zea mays
ttttttttgcaaccaccatgcagacagagtgcgggggcgatcccacatcaacgtccatggaagtacaagagggggaccccgctcggacactctcgggggctgggtcatagtttgcgctacccacgtgagccggatcatctccggcactaccctagggggctggacagtggcttgcacttaccacccgagccgagtcaccctccgcagcaccctcgggggctggg

SEQ ID NO: 5013 - DNA, 442 bp, Zea mays
  unsure (1)..(442): unsure at all n locations
cttcatctatattggggatntctttcgtgtctgttcttttccttcagcctttctggcagcttgctgaattccatgaatagcaatgggcccttgatccgagggtatcttcatgcataaatatgctggatgaagaattgcttctaatgcattgagtgttccacgaccaatgattgcattgtaaggatattccatgtcaacaatatcaaacacaacctgttcagttcttgtattgtggacaaatccgaaggtcactggcattgtgatcttgccaagtgctacaatctgccttcctccgaaaccacagagaggatgtgtggcatcatggatcgtatcctctggctcttgcatctgtctgaaagccttatcaaatatgatatccgctgcactgcctgtgtcgaccaaaacattgtggactagaaatcccttgatgacacaagatatg

SEQ ID NO: 5014 - DNA, 223 bp, Zea mays
ttgttttttaagagttgactaaagaacatattgatctaaagtgctctcatgttgatttggtctaaaggtatgaatctatttcaattgagcaacataactccttattttgtgtagctcaattagtaaataggaatgccttgcttaaggaccaagtagaaaggctaaagattgaaaatctagcctttcaagaaaaacatgatatgcttctatgttctcatgaaaa

SEQ ID NO: 5015 - DNA, 392 bp, Zea mays
tattgaagatttacagctggtcttcaacaggctgcgacgatatcggtggaagcttaatccagaaaaatgtgtcttcggagtaccagcgagaaagttactcggattcattgtcagccaccgaggaattgaagccaacccggagaaaattgaagctatcatgagaatggaagcaccacgatcgtagaagaaagtacagaggcttactagatgcatggcagctttaaccagattcatatcaaggctaggagaaaaaggcctaccattctacaaattgctcaagaaggtagataagttccagtggaccccagaagctcaggaagcccttgatgcactgaagaaattcctgacaacactgccagtgttaaagccgccacgctgagccacgctgagtc

SEQ ID NO: 5016 - DNA, 217 bp, Zea mays
ttcgccagcaaaatctaaggcacctacgtgcgccccgggaattcttgggacctccgaaactgccgacagcaaccgggaaagtccctccgagacaacatccggcgaatctcgaagcagcgcaccgagctgcccaacatcaccgactcggaagtcatcggcgcgttcctcgccggcaccacctgccgcgacctggatagcaaactgggtcgcaagaccc

SEQ ID NO: 5017 - DNA, 446 bp, Zea mays
tgtctgttcagcaatatgcttcatctgagaaaactagatctatttgaaatctttcataggtcacaaggcagaacagctatacgtgtacagatcgctaccccttggacaagatcggagacggaaccggtattggcagttttctgcatcttcatcatcctatgaccctggttcgggaagagtcttttttgaatctagagatggatattggagggtcattgattcatctgaggtagttgtttcctcaaaacaatcttagtcacaattccattagctaatattctcaataagagctctctaaaatagagttaaagatgattcttgattctttcaatgtgttaattggtttgtattttatgtaacttctgagaggtatttagatctagtttgaatggtgggaactgcaatcttatgcactagatcaactctgtatggtggggattatggat

SEQ ID NO: 5018 - DNA, 226 bp, Zea mays
tttcttccctgttgacatcagaactgcaagccacaccctggccaccactatacatgcctcctacattgcctatatacgatggtctatctggcccgaagcagtttctaatgagctatgaggccacaatatcctcctatggtggcaatgcagcagtcatgaccaaatcatttgtcattgtagtcagaagtgtggcctagacctggtatttatctcttcggccacggac

SEQ ID NO: 5019 - DNA, 464 bp, Zea mays
  unsure (1)..(464): unsure at all n locations
tcggcactattttcaagcatacgatataatatttccttcttctcaaccattgaaggatattatgagaaatagagaagctactggaaaggttggaaaacgggctgcggaactcaatgagttctgcattgattatgtgcacagatcttcgattcagtcccaagcgttagcagacttcattgctgactggacgccangggctcacgaagaagaagcgagtaaagacgcaaaagtttggacagtattctgcgatggttcttggggaacctctcgggcaagagcagccgctgtgttggtcgcaccctccagagttaaaacttgctacgcagcaagacttgatttcagttgcacaaataacattgctgagtacgaagctctgctcttgggtcttcggaagttaaaggcaatgagaattagaagggcagttcttaaaactgattgccaggttatatctggtcatattgaca

SEQ ID NO: 5020 - DNA, 220 bp, Zea mays
agtttgaaacttaatccacaaaaacttgattaggcgttagcacaataatgccaagtggctagagaggagtctcaacaaaacacaataaccacaagagatcaatcacagagatggcatagtggtttatcccgtggttcggccaagaccaacgcttgcctactccacgttgtggcgtcccaacggacgagggttgcaatcaacccctctcaagcggtccaaa

SEQ ID NO: 5021 - DNA, 429 bp, Zea mays
cgagctttgagggccctatattgcataggaccagtgacttctcaatcaaggactttgcaacccaaaattttctaggtctactcttgcttggtggacctaggaatgtaactatgacttttccatttgctacttttcttagaacataatgaacattgaaggcaaatggtcttgagtgctttggcaacggagttggtggtttagctatgcagttgtgggaaaaaatgaccttcttttccacactcaaagcatttgataggcttatgagtctgctttggcttgtattgagttatatctttcttttgcacaaaagaattatgtccaataccactcttgttgtttttcatgacagtgttcatgagcaattcattttggaggtataggcccttgttgaacttttgcacacttgttgcatgatgttcatattcactc

SEQ ID NO: 5022 - DNA, 226 bp, Zea mays
gagcgggagcagctttttatgcccagacgcaggaggggtcgagaaaacgaaacgccagggacctaagaacaacggaccgaacacaggaaaaatcacagacactaaagcaagcgagaccacaagcagcacaccaacctgaccaacatgacggacacagatgtaaacagcgacgaacgcgccgaaaccaccagccgagacctggatagcaaaaagggacacacgagcc

SEQ ID NO: 5023 - DNA, 385 bp, Zea mays
tcagatgatcagatttagcgctgaacttaaaatgcttgtctcattgtggctttcttccctttaagctcactatctctctctttctcttcagccccacctcttcttttcttgtgcagttttatcttatgtttgtacctattccttttttttcaatattactaaaatctatagctgtgggggtttcccctgcagcctttctttgttaatttattgtacaaatttagtcaactaatcaaacctatgatattttggtttaggatcatccaagaacatcaagtttttttagcccaagtagcacaccctttctactgcctatttttctctctaagtctgtaacactatccagcaacaaacccgcacacgagctctcaacgcacccacaagc

SEQ ID NO: 5024 - DNA, 225 bp, Zea mays
agcttctccttgtcgtcatcaaccttgacatagaaccactccgacttccagcctgctgcccatttgcttcggtagctgattacaggaaactttgtggttttccgataagcaaaattatatcaaccaaaattgtcatgcaatccatcttttctagccttcgtctgatagtgcaattcgtgaactcgacaaaagctgtccgcaaacggctccaccgcttggcttcgg

SEQ ID NO: 5025 - DNA, 456 bp, Zea mays
ctggctaggtgattttgacgcaatctgttggctaactatttcctattggttcgccataagaaaatatagtgtagctaaaaggagaatgacgtgcatagatgcatagactaaccgctgatcggaaaggcaaaccggtgagtggtctcgtccacactgcggcaaaggtcacccaggcagcaagcaccgagagcactgaaaaaacagctgaaaaagaattagctaaccagttcatgtaacttgggcattatttaaataataatggttgtatccagaccaaatcaggtttgatctgggatctgttcaagaatttgtggaatctcttcctaaatctagggcctgttaacactaccagttcatgtgtaacaggaccagagtcaacttttcattgacgattgcaagtcacatgcacatatggtaatgcagaattgttagacatggctttagcagtgataaaca

SEQ ID NO: 5026 - DNA, 279 bp, Zea mays
aaaaaccccgaaaaaagagaacgaaagcaagctattttaaagcccacggaaagaagaggggggctgaaaaaaaggccaagcgaacaaagagccaagcaacgggaagcagaggcgaacaccaaaaagccaaacacagaaaacaagggaaaacgcagggggccaaagaaacaaaagccaggcggcaaggacaccaaaaccaaggcaagaacggacaggaggcgggaagaacccaaaggaggtaccgacacaaagcaaggaaaaaaggacacgaaaacaaaa

SEQ ID NO: 5027 - DNA, 226 bp, Zea mays
agcttgtttatttattcttcatcccaacatgtgctagtcggcggggccagagccagcccatgttaatcttaacaattaagcaagtgtcgagttcggctctatcaaaatctaccaagtatagctgaccctccaacactcccttaaatgctattgaatcatcacttcttctaaagacagtgacaccttcatcagtgaatagacagttgtagcccatttgacataattg

SEQ ID NO: 5028 - DNA, 223 bp, Zea mays
agctttttgccagggagtcgctttagaggctagcgttcccgctgaccaagttttgggctctgttgatggtaccgagttggtccctgctggttcattgcaagctgcttcgggtggcgaccttatgccaggtcatcaattgatctctcacgatttgggagtcccttcgttcttctccagcctccaggtactgtggtatatcctagcctggcttttacaccatatg

SEQ ID NO: 5029 - DNA, 452 bp, Zea mays
  unsure (1)..(452): unsure at all n locations
nggtcattttattgctaactgtcccgacaatgatagtgatcatgatcaanggaacaagatggagaaaaggaagaactataagaatgcaaagggcgaggcacatcttggcaaggagtgggattcggattgctcctcgtccgactccgacaatgaatgactcgccgccatcgccttcaacaagtcatctctcttccccaacgagcgtcatacatgccttatggcaagggagaagaaagtatgtactcgagactctacctatgcttcttcaagtgaggacgaatctagtgatgaggatgaaatacattattcatgtctatttaagggcctagattgaaccaaggtagataaaattaacgaatngattgacgccttgaatgataaaaataagcttttagaaaaacaacaggacttgttgtatgaagaacatgaccaatttgcgaagctcaaaatct

SEQ ID NO: 5030 - DNA, 223 bp, Zea mays
agcttgaagccatggtaagtagcataggctaataatatacgaattgactcaagcctagctacgggtgcataggtttcaccaaaatccaaaccttcgacttgtgaataccccttggccacgagtcgagctttgttccttgtcaccacaccatgctcgtcttgcttgttgcggaagacccacttggttcctacaacattttgattaggacgtggaactaaatgcc

SEQ ID NO: 5031 - DNA, 453 bp, Zea mays
  unsure (1)..(453): unsure at all n locations
cttagaatactaagcttgtcatcctccctgtagcaagtgccagcggcacacgttaccacttgatcagaatctatgaacgagaatgcactccttgagttgcagcacgacgctgaaggatttgttcgagaacgttgaactgatatgaatcagaaggcagagaaggtgaggccacacatcctatacccaaggcacgcttcaatcgtgagacatgcacaactgggtgaattttagacgttgtcggaagcggtaatttataagcaatggagccaacacactatataatcttgaagggtccaaagaacttgaaagatagcttctggcgagatcggtgagcaaccaaagctcgtacatanggttgtagtttaagaaagacctantctcccacactgaaggtgcgctcaaaacagcctttgttcgcttgctctttcatatgaagcttggcgtgttcacaat

SEQ ID NO: 5032 - DNA, 221 bp, Zea mays
agcttgaaccgagggcccgcgtcaccggagaagccaaatcgcgctcaccggagttcaagaactcgccggcgcacgtggaccgggtaaaccccttcaccatttcccgattcgttgcgcgcatggcctctgtgtcatcccgtgaagctcctcgtgcccattaattgaactctcccgccgtggtttggccggagcaggcgccgccgtcgatccccgccgcctgt

SEQ ID NO: 5033 - DNA, 342 bp, Zea mays
tcgatgccgcctagactgtgaaaccgttgttattcttcatgaagtattccgagttctccgttttgattaccacatcatctacgtaggccttcacacgcttgccccagtgatcggctaagcatgtttgaatggctctctgataagtcgctccagcgtttttgaggccgaacggcatggaggtataacacaaagcaccaaacggagtaatgaacgctgttttttcttcgtcttcctttgccaaactaatcttgtggtattcggaatagcaattcatgaaagacagcacaaaacatccagtggtggagtccaccacctgatctatcctctggagcccaaagggat

SEQ ID NO: 5034 - DNA, 228 bp, Zea mays
ttttttttatcaaatggacgtgaaaagtgccttcctcaatggaccaatcaaggaagaggtctatgttgagcaacctcccggctttgaagacagtgagtaccctaaccatgtttataaactctctaaggcgctttatgggctcaaccaagccccaaagcatggtatgaatgcctaagagattttattatcgctaatggcttcaaagtcggaaaagccgatcctactctc

SEQ ID NO: 5035 - DNA, 385 bp, Zea mays
  unsure (1)..(385): unsure at all n locations
cctataaatactaagcttctaagggagagcacattntgtgactaaccaatgttcattctgagaaagacaagatttgtagtgcatgtcaagcatgaaagcaagttggtgcccatcatccacacaagaacatcatgacgaccgacaggccgcttgagctactccacatggatttattcagcccgatagcttacataagcatcggcgggagtaagtattgtctggtaattgtggatgactattctcgcttcacttgggtattctttttgtaggaaaaatcttcaacccaagaaacattaaagggattctngagtaaggctcaaaatgagttccgattgaggatcaagaaaataagaagcggcaatgggacggagttcaagaacttctc

SEQ ID NO: 5036 - DNA, 221 bp, Zea mays
agcttgacaacaccatttgacatcttaaataaaatttttgagatcaagtatatttaattcattcctcaacatgcaaaagcgggtcttatcaagtggcttagtgaaaatatccgctaattgatcttcctacctcactccttctaaaaggatgtctcctttagcaacatgatcactaaggaagtgatgacggatatcaatgtgcttggtgcgagagtgttgta

SEQ ID NO: 5037 - DNA, 220 bp, Zea mays
agctttgaaggccatagccatttcataccgacgatgccgaacagttgaccttcacatcatataaatactccgtccagcgtgtaggcactggcagttgatcttcatatacaaacaccatgatgaggcagcaggtcttcatatggctcagcagtagatcttcatgcggtgacgacgatgtatcatttaaactaactacaataaaaatgactgcaaccatagg

SEQ ID NO: 5038 - DNA, 232 bp, Zea mays
gcatgcaagcttgaggatggcatttcggttatgtcgaaggatgatcttgctgatagccttgcgtacaatagtataaaggtatagaagttaactttaaagttggaaatgaagtatttcattgtcatgcttaattctttctttttctttgcagggcttgattcttagcaatgccttgagagcacaaaagaacgccgaagacgaaagctacacaatagctctcagcaaccttcgc

SEQ ID NO: 5039 - DNA, 225 bp, Zea mays
agcttgcctagccctcggacccaaccggacttcaccggaggcccgagatcaacctcaccggacttcggtcttccgccgccgcgcgtggaccgagctatccagtgagtctccgcccaattcctttcgctcatagcttctctggcatcccgtggacctccctgacctatttaattgaactacctcgccgtgaccaggccggtctcctcgccgccgacgagcatcccc

SEQ ID NO: 5040 - DNA, 223 bp, Zea mays
agcttgtgaaggttcttcatccccacatgtgctaagcggcgatgccacagccagcccatgctagtcttagctattaagcatgcatctagaccggcttcttcttttgcaaaatcaactaaataaagtttgccgtctagtacacccttaaatgctagtgaaccatcacttcttctaaagacagacacatctatatttgtaaatagacagttatatcccatattgc

SEQ ID NO: 5041 - DNA, 215 bp, Zea mays
gcccctaagaaaacggctaattatggtaagggaaagcgaaggggacatgacctcaaatgctatgagtgaagaacaaggcaacataaaaagggttaacatctaaaggccttcgtccttcgagactttattccccttcggatataatgaatgccggacgaaggtcgtgaaggaaaaaccttcgtaagcacaataaatgatgaagaagaattcatatg

SEQ ID NO: 5042 - DNA, 213 bp, Zea mays
ggagaaagggcaggactcctttatattgggatcagactggagaaagacagttctttgggccccaattgatttaataagcgcaagaacaaatccgtataattcgagagaatttaagggtgtctcaaaccatacaaaagccctatgctgataatacaacgaagcccctggttattgaacaaggagattatgactgtttcaaggtgtaaccatttc

SEQ ID NO: 5043 - DNA, 371 bp, Zea mays
ctcctggggacccaagagagtgctgcggattgtattttgtccactacaagtttgaggcgtgcttcaagatatttattatcttgctgctaattgtttgactgtcggaacaattcatccttcaacttgatattctcactgtggacttcatccaaaaaaccatgcatggtccggataacaacatctttctttactaatgcaccctcgtgcgtctttgaccatgactgcagggcctggactgtgaagactttcttttccagactagcttcgtaattttcaacttctttatcacacggcttgaatgacggctttgatattctctcttccagatactgttgcattttagaaccttgatcctttagatctgggctgac

SEQ ID NO: 5044 - DNA, 223 bp, Zea mays
agcttgtggcgtcctcgggcgtcctgccgcagccgaagtaccaagtctcccacctggaagcctcgagaccgaacccctcgggcgtggtagcatcacagagactgctgataccgcgccgagtgtagtaaggccacgtcccgagcctcttcgagctggtccagtgagtcttctctgctggtctggttgcttcggtcgtcgtacgcctttgtcctcggggaaccgt

SEQ ID NO: 5045 - DNA, 438 bp, Zea mays
tgagtcggttcttctgcaagaataattgatgcacaaagaaatgatgagggtatgaaagagaaaatggaggccgataaagccaactgcttcaaaaaagatgatcaatgcgttgtatggtttaacaacgcatagttgtgcccaagaatgatgaggtccgccagcaaattttagatgaagcacatcttagtcgctattctattcatcccggaagcactaagatgtatcatgatctaaagcgacattattggtggactaagatgaagattgaaattgcacgttatgtggcgagatgtgacacttgcaaacgtgtcaaagccatacatatgaaatctgctggtccattacaatcattgcctatcccaacctggaaatgggaagatataagcatggactttattatgggattacctatgacaacaaaagggtttgactctattt

SEQ ID NO: 5046 - DNA, 223 bp, Zea mays
agcttgcaatttcacactgctgtgtggatacaatgacccgactgccattcttcctgtctggcaggtaagttccgatggtgtcccaatctccaattgtggacagattttccaggacgattaggtatctgttctcatttactttatccataaatgccccaatgagtccgcctcccgttgtcgccatttcctcaatcctcttcagttcatcgacatttataaccat

SEQ ID NO: 5047 - DNA, 451 bp, Zea mays
  unsure (1)..(451): unsure at all n locations
tctanaaagagcgagagagcaaggcgaagctcgtcagatgttataaagtattctctccatgaagatgcaatgctttgacgagttgactaaagaacatgaggagctaaagtgctctcatgatgatttggtccaaaggtatgaaactatttcaattgagcaagataacgctttacattgtatcgctcaattagtaaataagaataccttgcttaaggaccaagtggaaaagctaaaatttgaaaatctagcttttcaagaaaaatatgatatgctcctatgctctcatgaaaatcttagagatgatcatatcatattaaacattgctcatgaggttgtgatagaanaattaaaatcccaacaacctcactcatgcacatgtattcaaattgatactatattaccatgtgctaatgcttgttgtccgtcgacaagcaaatcttcctttgagcta

SEQ ID NO: 5048 - DNA, 222 bp, Zea mays
agcttttaaagggagagcacattttgggactaacaaatgttcattttgagaaagacagggtttgtagcgcatgtcaagcaggaaagcaagttggtgttcaccatccacacaagaacatcatgacgaccgacaggccgcttgaactactccacatggacctattcggcccgatagcttacataagcatcggcgggagtaagtattgtcttgttattgcggatg

SEQ ID NO: 5049 - DNA, 330 bp, Zea mays
  unsure (1)..(330): unsure at all n locations
ccatagacactcagctttaagggagncacgtgataggttgactacgtgcaattcganaagatagaccgtgtgcagcttgcaagcaggtaaacaagtgggacgagcacatcacatcaagaatgtgatgaccacttcaagacccctggagctgctgcatatggacctcttcggacccgtcgcctatttgagtataggaggaagtcagtatggtctagttattgttgatgactattcccgcttcactagggttttctttttgcacgataagtctgaaacccaagggaccctcaatcgcttattcaagagagctcaaaatgattgtgagctcaa

SEQ ID NO: 5050 - DNA, 223 bp, Zea mays
ttgcttcggctttgaaaacagttttttagtgtttccgaagatgtctgaagctgctaagaaggctgctgctgtaatgaagctgagtcttgatgaagagaagaacttagggtttcttatagcaatgtcgaagaccaacacagaaaagatcaccagggaaattctggaagggctgtctgaagatactggtgacagtgaaagttatgatgtggacagcggtggcgaa

SEQ ID NO: 5051 - DNA, 402 bp, Zea mays
agtccgtctgacaggtactcaagtaaagtgatctgaatttcttaagtccaatgcttagaatggttgctgtctggctatttacttttattgtatcaatgactataggttgctgtctggctaattactcttattgatggaatcggctgtggaatgaaaggggaggactgcaagtgatggaactgattcacaagtaattcgtttgacaagagggatgatatgtctgaagatgaactggtagtgcttggtggaaaaattgatgattcagtggacaatgtcaatattgatgaatctgaggacaacagaagtcaacaaggggtcaagagaaggcgcaaaatggtgaagatgaatgctacaactgaaactgaaacgagcaaaaaggcataatctaaagattgggatgcc

SEQ ID NO: 5052 - DNA, 222 bp, Zea mays
agcttaaaggggaaaagaaagagggggaacttgtccgactaccctattattataagtttaagaaatattttaaagcaccctgccaagaatggctggatactattgaaataatgagtaatgaaattcttggaaattactccaaaaaagaggaccagctgatgacagcagccttcggcactcggccgaagcgaaggctgaacagggtgcttgatgctataggat

SEQ ID NO: 5053 - DNA, 453 bp, Zea mays
  unsure (1)..(453): unsure at all n locations
tctaagcttctaagggagagcacatnttgggactaaccaatgttctatttgagaaagacagggtttgtagcacatgtcagacagggaagcaagttggtgttcatcatccacacaagaacatcatgacgaccgacaggccgcttgagctactccacatggacctattaggcccgatcgcttatataagcatcagcgggagtaagtattgtcttgtaattgtggatgattattctcgcttcacttgggtattctttttgtaggaaaaatctcacacccaagaaactttgaaaggattcttgagacgggcccaaaatgagttcggcttgaggatcaagaagataagaagtgacaacgggacgaagttcaataactctcaaatcgaaggcttccttgaggaggagggcatcaagcatgagttctcttctccctacacncacaacaaaatggtgtagt

SEQ ID NO: 5054 - DNA, 221 bp, Zea mays
atgcttcatgaaggcaggtcttcggttcccattgagcaaattttttgttgaagttttgaagacatttgagatctttcttcatcaaattactctcgaagctataattaggataggtattttgtctgggccatgagaagtcaagggctggaaccaagcgcaaagtgcttctgtaacatgcacaaactgctgtacgaaacgaaggccactggcaaagagcaata

SEQ ID NO: 5055 - DNA, 270 bp, Zea mays
actaagctgtgctagaagttcttgacgacttggaagctgtacttggtgtaacaatacgacggcactcaatgcttcacagtgaggtgaataagcttctataggtccatatgcttagttggcataagattgataatatctctcatggtgcactatgcatggttaccttcctcagttactcacaattgtttcagcaggtgactccttcttgctatgttcgtgacacaagatctttacaattactgacttgttaaatctagacatgccttttac

SEQ ID NO: 5056 - DNA, 221 bp, Zea mays
agcttgtgcaaagtccacttgaactaatcttcggagaaacccgacctcattgcaacatgacaccagaaggtccaactcaaaaagcgttgaatgaattcagaattattgcagagcatatcagtacaagagacctggtttaggagtttttggctttcaaggtttttcctagtttaaaagaatgggaaatgccgaagctaaagggggagaagaaagaagatgaa

SEQ ID NO: 5057 - DNA, 454 bp, Zea mays
  unsure (1)..(454): unsure at all n locations
tgctgcagaccaagattatttagatgatctctatcaaactcaaaactaaaacagacaagagcatgacccaagtgagaatgctgaattagatgttaatttgcatgtgacccactagatagtcccacacaatgtctgtagtgtcttcaaaattgaaaataaccctaagcaaaggatgaaccgagataatccccaatcttcatgagcagcgggttgagagcgagcaacaacacgtaccataatttcacggtgcatgacttgtgcttgtatgaaaccatgcagaatgaagggaacatggtccactcgatgataggccatagcaaccgaatgaaatgaaatgaaatgcgtcngggacggacaatcgctccttgcccttaagcaaatggaaagtgaagggttcattgccggtacactccgagaggggtttggtgaacaatgaggtttgggttgtactgag

SEQ ID NO: 5058 - DNA, 225 bp, Zea mays
agcttgcttacttggtaagatgaccaaggcgcccttcacgggtttaccggagaggacgttagatttattggaactcatacatactgatgtgtgcggaccaatgagtacgacagctaggggaggatttcaatacttcataaccttcactgatgattttagtagatatgggtatgtctacttaatgaaacacaagtctgaatccttagaaaagttcaaagagtttca

SEQ ID NO: 5059 - DNA, 436 bp, Zea mays
acgtgaaaagtgccttcctcaatggaccaatcaatgaagaggtctatgttgagcaaccttccggctttgaagacagtgaatatcctaaccatgtctataagctctctaaggcgctttatgggctcaagcaagccccaagagcattgtatgaatgccttagagattttcttattgcaaatggattcaaagtcggaaaggccgatcctacactctttactaaaactcttgaaaatgacttgtttgtatgccaaatttatgttgatgatattatatttgggtctactaacgagtctacatgtgaagagtttagtaggatcatgacacagaaattcgagatgtcaatgatgggggagttgaagtattttctatgatttcaagtaaagcaactccaagagggaaccttcatcagccaaacgaagtacactcaagacattct

SEQ ID NO: 5060 - DNA, 224 bp, Zea mays
agcttttggattattaaatcttcgacagtagcgaattttaaactgttcggatcacgtgcgtaagtgaatacaaaaatcagaaaacttttgattttatgtaaaaatttggagccccgctgtccgaaaaagtaatgcgccagctcattaattgaattgtttcactcagcatgtgatccttgacgttaaagcgaatgatcgacaaccggtgagaatcgtaaaattag

SEQ ID NO: 5061 - DNA, 292 bp, Zea mays
  unsure (1)..(292): unsure at all n locations
tgtcgtcantggcagcagcggtggggatgtggccatctcaccattatctccccaccgacaagcaaaatctccatgttgtttagggtggagcaaactgcatgtcattcgagcgttaattaatgcttcgtgcactatagatcatatgtactgggcatagaagataatgtcggggagcttctcggcagtgatgatgcggtagggatgctacagcacgcaaatagggctagcgtggtaacgtctatggtcggtgacgatatctgtggctgtgattgcagaacgcactctgccactc

SEQ ID NO: 5062 - DNA, 225 bp, Zea mays
agctttttttatccctaactgcacctacactatctagcaatgtgcctcacataaatgcatggtattggtagctagtcattttttactttttatgactatattaatacaggaaacatacacatatgtcgaccaataaacatgtaagtccaatcatcatttgtttgcctatggtctcaaaagaatgattccattctgatgtgcagttgtttaaactaatgaccttca

SEQ ID NO: 5063 - DNA, 417 bp, Zea mays
  unsure (1)..(417): unsure at all n locations
ctcagcttgcgcacgcgattagttagttcggttagctgttcgtgcattgtgttcatttcctgcatgcgcgcgagctccgattcttgtggacgcagaacagcagaagtatgctgacattgacgcatcgtgcctgcgtggggaagatgcacaaacccatgtcgcgataagcgctcaggatacttcttgaatgaatcattttggttgtatgcagttcattcagtttttctgaacaaggaagaacagagaaaaccctgcagttttgggcagcgccaaaatctttgtgttgtgtccaaattctcgttgtcttcttcggagcaccaaaatgtttgggcagcaccaacactttgntatggtgcaatcttatgtgttttctattttctcacgaactatttatgaaatttatacaattaccttttg

SEQ ID NO: 5064 - DNA, 217 bp, Zea mays
tttttacctggcaaaacaacagctcatgccagcacagcagctacaaaccataccagtaacttggcctttcgcatgctggggattggatatgattggacctttcaagaaagctcaaggaggatacacccatgtattggtagcaattgacaagttcactaaatggatagagtttcagcccattgcctccttaacctctgctaaagccgtggaattcata

SEQ ID NO: 5065 - DNA, 370 bp, Zea mays
ggcctatgaatctaagcttaacctatttgttgtcagtcttatcttcaatgatcttcccctttgtgagtgctgcacattattccccacaacttattgactatgatctttgtgagctcacccttgcgatatataaagccccaggtgaagagcatatagcccaggaggaggactactatgaggagtacgatgaagtctatgtggcgtctcccagtcagcttaatgacgccaaggaataatattagttcgctttattgttatcatttatttttgtgagacacttccgctatgtaataatgtttatgacattgatctctatacacttgggcattatatgtgtagtgcttctttggacacatatgataccacccga

SEQ ID NO: 5066 - DNA, 57 bp, Zea mays
cgcaggagggcagcggagaccaaaagagagaccaccaccggaggggggagggaaaac

SEQ ID NO: 5067 - DNA, 221 bp, Zea mays
agcttgtagttagaatgaatcaaaataatttaaaaactagatgctgtcgcgttcaagaaccaccatggtcctatctagctactctctcggccatgttcttccagctcaaccgaaacctgatctgaacacatgatgatcaaatgaaaggcccttctcttcctttttttccccaatttccgctgatacgacagatcgaaatcggaccagagtcaccagcccac

SEQ ID NO: 5068 - DNA, 283 bp, Zea mays
atttacccatgttttgttggcaatcgacaaattcactaattggatagagttccagcccattgcttctttaacctctgctaaagccgtagaatccatacaaagcataatattcagattcgggataccaaacagtatcatcactgacttgggatccaacttcaccagttcagaattctttgacttctgcgagcaaaaaagcattaagatcaagtacgcatctgtagcacattcaagagccaacgggcaggttgagcgagccaacggaatgatattggaggcactc

SEQ ID NO: 5069 - DNA, 222 bp, Zea mays
tgtttgttcttcattagaagttgaagcccgcgtgtaggtgtcaccattgtccccgtgcaacacttggttggtcgtggcaagctacaacaggaacttggccgtcggtgtcattcgacatgctgtgcacagccgccaaataagaattttcagcacttggtgcgagcgcgccgaggaagcagtgtaatatgatgaggatggaggacccctaccacaatgcaggga

SEQ ID NO: 5070 - DNA, 427 bp, Zea mays
ctttactcgcttggtggcggtttcttaactggtttacaagccctagatgcaatacaggaattaaacatgtaatgcaagcttgcaacaccatttgacattttcataaaatttctgagatcaagaatatttagttcattcctcaatatgcaaaagcgggtcttatcaagaggcttagtgaaaatatccactaattgatcttccgacctcactccttctaaaatgatatctcctttagcaacatgatctctaaggaagtgatgacggatatcaatgtgcttggtgcgagagtgttgtacacgattattagcaattttaacagcactctcattatcacacaacaaaggtaccttttctagaactacgccatagtctagaagaggttgttcatatattaaatttggtgcaacaagcacctgcagcaatgtat

SEQ ID NO: 5071 - DNA, 225 bp, Zea mays
ttttttttttcaaaacaatttaaataaaactccaaacaagcttctcaagtggggtttaaatagggaattccgaaattcagaattctgaattttagaccttgggccaaagatcaagcgtgttcaccttgatccctagctcaaatcctaatgatcccattgacaaaaacgtgcataactaacctctctgtcttgtgccagaagatggcatcgggacgcgtgccttgg

SEQ ID NO: 5072 - DNA, 448 bp, Zea mays
tgaaggagagaagaagaagaatgaactcgttcagctgccctatcatttcaagttcaagaaacacttcaaagaaccctaccaagaatggttggatacaattgaagttatgtgcaacgagattttgggcaattatacgagaaaagaagatcagttgatgactgtagccttcgatgcccgactaaagcgaagattgaatcaggtaatgtatgccctgaattttgaatatccagactatgagcgattgaacaagggcgccgaagggcaaaaaagaaaaagaattattagtattgtgggcagagaggctgctagaatggtaaaagaagatgaagaaaacctgaagaggagaaaattgagccctgagccgaaggtagttgctccgaagaaaaggaaagttgcggctctgaagcagaatgcgactgataacgaagaagaaactccttcaacacct

SEQ ID NO: 5073 - DNA, 223 bp, Zea mays
agctttcttgacatttatcatcccacttaaattctctgcccttctccagaagcgaggtcataggcttggcgatcttagagaatccttcaataaatctccgataatatcctgcaagccccaagaaactccgaatctcagtaactgtagtgggcactctccactccattatctccttcactttagcaggatccactgctattcctccattagaaataatatgtcc

SEQ ID NO: 5074 - DNA, 451 bp, Zea mays
tcatcacagtgaaacagatagacaatgtggcttctgcattaacgaaaaggaagtacaacgaagcatgtgtcataaaacaggcttcgtcacgacgaaacaatgagacgatgcaaggagaaggtgctgctcaagttattaaatacaaatggcgatgttgccattgtgacattttgtaaactctgtatgtaattgttgagggcataaatataatagcgtacgaacccttacggttgcctataaatagatgaacagtagccccgtactattcacgctggattgtaattgctctcgcgtcaacaccttcaaacaaaccgaaggtatcaatgtaatataaatttcgttaatgttcatatatatatatcatgaaataaatatatgagtgaatgaatgaataacatatattgtctctatgaactcttgtcctcatgaatgatgaaagtgtgtcctccat

SEQ ID NO: 5075 - DNA, 219 bp, Zea mays
ttcttgaccacaaggacatgacaattcgtcctggtctaggaaaaggaatttaaaattacaaaggacattgtgcatcttatccttggtgtaccaaatcatgcatggtggtggaaaaacattggggattgatgaagcagtagcagcaagtaacttgagatcagagctggtttggctaaagacgagttcaatgtgacattgctacaggatcgtttaaggaaa

SEQ ID NO: 5076 - DNA, 443 bp, Zea mays
  unsure (1)..(443): unsure at all n locations
tgagatcttcttccaaagtacgccgaactccttgtaaagtnagagtactgcatttatttcattttgtgagtacatgctaaatagttaaatgcacaaaaaagcaggtaagaaagggcattgggtatcaaaaaggggcaatggatatgcccccgaacatgataacattaacatgctcttgtttgtttcaacagaagtatttttgtagtccagaatgcagtgtccaaaccaaaatgagtaaaacataacacaaaacaagtaaatatgttctagggaaacaatattcctagataacacaaaatttgttctaataacaccctatattaagcaggatatgcaactagaaaaatactctgatcatgaaattttggcagttctctacttctcatcgccttcaagacgctaaattggacgttaatttctccatagtactagaagaagtgcaa

SEQ ID NO: 5077 - DNA, 221 bp, Zea mays
agcttagagtatgcattgattttcgcaatttgattagagcaactcctaaggacgaatatcccatgcccatagccgacacattgatcaataatgtgtcaggaaatagaattattagcttccttgatggtaatgccggatataatcagattttcatggccgaggaagatacgtctaaaacgacctttatatgtctaggctttattggtttattcaagtgggtt

SEQ ID NO: 5078 - DNA, 453 bp, Zea mays
  unsure (1)..(453): unsure at all n locations
tctgaagggagaacatgttgaaagtcgcctagaggaatgtgtgtatatgcgaaacctgaaatttataactttaaacacacactacaagtcggggttaacgttagattaatattcaagtcgaaaagagaggggaaaacaaatcaaataagaaacaatgcgagtgaacacggtgatttgttttaccgaggttcggttccaaagaacctagtccccgttgaggaggtcacaaagaccgggtctatttcaaccatttccctctctcaaacggtaacttagaccgagtgagccttcttccttaatatcacgggtcactaagaccccacaaggaccaccacactctnggtgtctcttgcctcgctcacagaacactcgataattataataggaaaagaagaaaggctatctatgcgacaagagcgcatatgaacacataaatctctttacacaagccac

SEQ ID NO: 5079 - DNA, 408 bp, Zea mays
catgcaagcttcagctccatctatgttatggattgcttttgttttatttcaaataccttcagcccttctggcagcttcctggcttccatgaatagcgatgggtccctgatccgaaggtatcttcatgcaaaaataaacatggtgaaggattgcttccaaggcattgagggtaccacgaccaataattgcattataagggtattccatgtcaacaatgtcaaacacaatatgctcagttctagtgttattgatgaatccgaaggtcactgacatggtgatcttttccagtgctacaatctgtcttcctccgaagccacaaagaggatgtgtagcatcatgaatcttatcttctggctcttgcatttgcctgaaagctctaacaaatatgatgtcagctgcactatctgt

SEQ ID NO: 5080 - DNA, 357 bp, Zea mays
  unsure (1)..(357): unsure at all n locations
ataggcccaggccaagcagtcttgaatggttcttcctcttatgaagccatattgattcttgtgaactaaagaggtcatcactgtctgcaggcgattggccaaaagctctgtgataattttcatactattatttaggagcaaaactggcctgaaatctcccacagtttgtggattttcctttatcagaaccagaacgataaaggacccatttatacttcgaagacaaacatcttcttgataaaactgctcacataaatcatagaaatcctgagaattgatatgccagcattntttgataaaattagtgttgaagccatcacgacccggggaattatccgaggggagtgctgcaataat

SEQ ID NO: 5081 - DNA, 398 bp, Zea mays
  unsure (1)..(398): unsure at all n locations
accgcggcatgcagctgtagaattctatgacatggactttttatcttgtgttttcnaaccccgcggggtaaaatcctgggttcaaagcaatcatacaactgtaaaaatatcatttcaaaatatggtaaaaatactattaagattaagtggtttaagtgtctaacctagactttatgttttattacaaactagaatgtaaatctctactaactattaagggggcagtgtagactgtacccgttttcgcaacacctgcgcgccagctcccgcacgcgctagcaattgtcttctgcgcacgccaccatttatggattacgcacgcgcgcgccgctgatatcgctcccacgcaatcagccatggtgcggttcggctgcctcctactcccgcggaacaacagc

SEQ ID NO: 5082 - DNA, 407 bp, Zea mays
tgcaacgcttgagcctatatggataaaagggctgcttttttatgtttgataaaccaccgctttgttcgctgttgattaacagattacgtgaagatggtaatatagatcggaatttaaattgggtaaccctgctcgcctgaaggggctaaatggcaataatgtaacatgattgtatcttcaaaacatgcacagggcctactccttccttccaattgatcccccaagctagtaagaacagaataaaaccaaagatatgctagcaagaatcgtgaagcaaaagaggatggtgaagacgtgaagtgactacaaaaaatcaaggataaggtgaacccaaacacagaagggaagaaaggataggaaccccttctgacttcctttgttaatcccacacgccctctcggagccca

SEQ ID NO: 5083 - DNA, 395 bp, Zea mays
  unsure (1)..(395): unsure at all n locations
tcacatttgatgatctcttcttgttttcttggttgantngatgccacataggttcatttgtttatttccttttccctttttgctttctggctcttctatctctgtcctaattaatatagcatcaagactttgctcacccaatcatacatacataccaaagaatgacagaaatctctctggagtgatcatctaccatgcatctctgagagctagctccttctccgtttcaggtacagaactctctaccgcgggccgggggtgtgcatgcatgcgtgcgtgctagttgtttgcagcgcacagcaacgaggatctagtggccacttgtatctagttgtttgctgcggcaacatttcttggagaaacacaacagcggcctgcatttcgctgcatcactt

SEQ ID NO: 5084 - DNA, 394 bp, Zea mays
agcttctactcttcggaccatgtctttattttttcaagtttcggatctttagccctggaactcttgtcgatatgacccgaaacaacctgtgaatcagttttaagaatggcccttctgactcccattgcttttaacttccgaagacccaaaagcagggcttcgtattcagtaatattgtttgtacaactaaaatcgagtcttgccgcataacaagttttaactttggatggtgaaaccaacacagcggctgctcctactctgaaggttccccaagacccatcgcaaaacactgtccatacttcggcatctttttttgtttcttcatcctgagcccctggcgtccaatcagcgataaaatctgccaacgcttgagactggatcgaagatctatgta

SEQ ID NO: 5085 - DNA, 393 bp, Zea mays
  unsure (1)..(393): unsure at all n locations
agcttatcaagtctactttcatatggatcctgttttatagncatatctgctctgaggccgccgtaatcattgttttcttaccgagatattttctgccttttctgcccatggagctgcgtcaccctattttggcccaatgggtcgtgtatcaagttaggtccattatggacgcatcctagggttgcaacacgaccccaatacccttgtggtcgtcctcccatgtttatagaccccctatccgccaccaagaacagcgggttttgtataaatcaagtttaactctcgctacttgcttgcaagcgcgcgtgctagttcagccgcccgtcttcttgtcttctgaaccccaccatattggagtttgactttgaaacgtacatttagatctggtaattc

SEQ ID NO: 5086 - DNA, 395 bp, Zea mays
aacttgacgtcggatcacattattatccgcattccaacggggtcggggagcgcgcccatgggaaaaacctcacagctgtcaacaagatgctcctcgacgaaaaaaaggcacatagaccgcattattaccggaggcgagcctgggcgctaaacacaactgagtgcagggcgactgggttcacaccttatcgccttctatacggatcggaggccatgaccccccaagaaataaaacatgggtccccgcgtacagtaccgtcagccgcccccgacgtggacgagccaacttcataagatctcattgacggagaacgggtcttctccctacatgccctgaacagataaccagcccagaccaaagcatggcgcgaccacgcacacttcccgagggagtta

SEQ ID NO: 5087 - DNA, 65 bp, Zea mays
aaaaattgctagattaccagttggctaactcagctaaaatgaactcgtctaatatatgctaatag

SEQ ID NO: 5088 - DNA, 399 bp, Zea mays
  unsure (1)..(399): unsure at all n locations
agctttgcgtggcattagtgagccgtatgcgtccggggcactgcttcaaattgctcatcggagcatggcggcgtggcggatccgctcctcaccgtgaacagagaccaacacggcaaaaccacgggtaaggaaccatctgatagaatctgcatatcctangcatcgtgttgggctgctatttcatggggttggtgaacaagcaggtcggttcggtcatcaccggcgtgcccgccgccgtgggctctatcgccgccaggtctgaccagtgggagaagatggccgctggaccgttgtctccttataatgtaattatttatttatcttgtatataacaactgttatgtagtaaagatgtgacattcgatcatgtgccatgattcatcatatgtgtgagacttg

SEQ ID NO: 5089 - DNA, 269 bp, Zea mays
  unsure (1)..(269): unsure at all n locations
gctaacactggtttaagacacttttaaatttcactaaacgaggtttcagcaaatgtgtcagtctctctaataattaatactttttctcagtcattttccagttgtcatgttcatacattatctctgaacatttgcactttatactgcacactttctaatgtcgctttttattcatttccttggtgggccgaatgctactgtctaggaaaaatcactcttcttacaacgcaacagcggantaattcaccatagacactattatctttgcc

SEQ ID NO: 5090 - DNA, 386 bp, Zea mays
agacttacgccttattcatgcagtcatgctataagaatgccacactttgttctggaatgaatatgaatattcgatattgcttttaacgttcctgcagttctgctacaaagtactatttctttcctggcctcagaatgatacatacgttttatcaagttcattcaacttgattggaatttgaatttacaggacgatgtgttcctgataagcaccaacgcgatgtgctacaattcaccagatacaatatactatcgacaggtcaaacattaagcctacatgctatgatctttgaatatagttatgaattatgatgtacttaacatccgtattccatgcataacaggcacgaggtattcaagagatcgctaaaaaggattttgagaatc

SEQ ID NO: 5091 - DNA, 401 bp, Zea mays
tggtatacttgactcaatggtttaatttgtattcaaaattcaaatttaaattcaaaatagttaagaataaaaagaaaacaagaaaggaaaatagaaaataaaagaaaagggaaaggaaacctacctgggccgcagatcagcatttcggcccacagttgctttcctccgcgtggcccaaatcggccttccctcgcgcaagtcacccgcaacgctgactggcgggtcccggtcgccagccactcgggttttcccacctgcgccactcggtcactgttgcgtgggtcccatgtgtcattctgaggatccttatgcgtcgctcgcacgcacacgcgcgttccgtgtcacttcctggtgggtccgcttcgtcagctggggcataggttatcttcgttcctcccccg

SEQ ID NO: 5092 - DNA, 410 bp, Zea mays
gcttgaagctggattatgcgctatgacgtttgatgttcttgcggatagccttgcatataatagccttaaggtatgagaactgcgtgtttggaaattttataatttgcaactcattcttttattcttataccaactcttttacatacagggtttaatactaagcaacgcgttaagggcgcaaaagaatgccgaagacgagagctatgaaattgctttcaacaacctacgatcagatgttattaaactgagaaacgaagctctggaaaaggataaaattctggttacattggtggacaagataaaagaagacgaagctgcctcaaaggcccaggctgaagcccaaaagcgcgaaattaaagatctctagaaacacctagctagagctaaagaagaacgtatacttgaagaga

SEQ ID NO: 5093 - DNA, 335 bp, Zea mays
tgattaggagaacttgagaatagcacagtcgacgcaaaaaagctatgtggatactcaaagaagaccactggaattcatagacgacgatcacgtatacctaaaggtgtcaccaattcatggatgaggagatttaatgcaaaggcagctatcccttgcttattgacctacaaatcttagaaactgggaatgctacactgactacaatattataatgtctgaggtcacgtttactagagtgtttgcaagacatcttgtactatgtctagccgactctaactatctgtgtctatagatatgcagcagatttaaacatcgagagatacgatcctctttca

SEQ ID NO: 5094 - DNA, 96 bp, Zea mays
tggagcaaattgcctcgcttggatatgtgctatgtcatcccttgttatacggaatctaaattcctctctggttgcccttcccaccgctctctgccc

SEQ ID NO: 5095 - DNA, 56 bp, Zea mays
actaagtcctcaagccagctatgaatgtctctaccctcaggagccgggttcttgcc

SEQ ID NO: 5096 - DNA, 376 bp, Zea mays
ctgtgtgaaattggtgcgtggtgttctcacctcgagtgatgcgtgcgtgcgtacctacaatacgtgctgccgttgctacgatctggctcgttttctttgagcaggcgagcagaaaaggttctccccttcttttttatttacacacttacgcaacgcaagcgacgacgatactagacaggcatgacgcacggcacggggggtgctttcgcttcgtgggtagatagatttggttagctggtccaaccaatcatcataggctgggccgggacgtggaaggtggggtgtcaacgttggtgcgtgctttctttcgggtgcggcggcatctatgggtcaccggcgatgttgcgaggggaccggacctgcaggcccaccaggt

SEQ ID NO: 5097 - DNA, 404 bp, Zea mays
  unsure (1)..(404): unsure at all n locations
aactttatggcaaatacagtcttattctctgtttgcatgcccgcnaactcctcgggaaacacattcggaatgactgacacaaccttgatagcctcgagtgggttgggctccttactatcaactgaaatctggtgacagactccctccgctgatttaagcattcttagctcgggcactacctcctctcctgacggggacctcaatgttacggtcctcttgtcacaactaacatttgcttcatacttcattaaccaattcatccctaaaatgacatctatcccaggggtgtctattactattaagtcactggggaatcctatcccccttatttccaccattatatttgagcatattttatctgtttgcaccttgccaccaaccgaattaatcctcatgggcggcat

SEQ ID NO: 5098 - DNA, 421 bp, Zea mays
ggaccttaagtgactgagctgcagctgaatggaaaagagtttctctttttatataccgacctataatacgctatattcgcccaattagaattgcataaatctgaagtgatgaggctatagaagaaacttgatgaagttaccgacaactttaacgttgagcaatcaaagcgtgagatatccactgagcggtctagggtacaaaagaatgttgaagagctttgccaagcgaaggaagaatgttacactgttgctatgcaatgctctgataagctaaaaaaatgcttttactagtgttagcgcattctcggctgagcgaaattttatccgtggagatctcgaggttgtgattaaatagattgagggtgaaatcaaagcatttgatgaagttctaactggcaggggggacttttgtgcttgtgta

SEQ ID NO: 5099 - DNA, 381 bp, Zea mays
agcttcgtcacatgaaagacaattgccttgttagaaagatatatattcagttctccagtcttcactgtgtactggagaaatagtaagcactgctctttccatgagctcaaccgaaggtgcttttattgtttcaaaaaatactccggagggtagtgggagcccttgagccgctgatttggctagcaaatctgcatgctcattttgacctcttggaatattcttgacagaaaaaccttcgaaggaagcttccaaccttcgaactgcatccagatatttttcaagcttcggatctcgtgccttgctgcttttatccacatggacagcaataacttgagaatcagtctttaggatggcccttcttatttccattgcccttagttt

SEQ ID NO: 5100 - DNA, 240 bp, Zea mays
  unsure (1)..(240): unsure at all n locations
caagcgtctaaggtgtgggaaacactatattaactataccgagatgcctaagagaccactaatcgataccgcatcctaattactgtaacccttcagatcatccctactacacaagtagctaaagatcataactgaaccccataggactgaatatactaatcaagtctataaaatacagttctattaaatgcacgatatcatacacatctgagattgcatgctancactcactctgacttc

SEQ ID NO: 5101 - DNA, 395 bp, Zea mays
  unsure (1)..(395): unsure at all n locations
agcttatgaagattcttcattccaacatgtgtctttctgcggngccagagccaacccaagttagtcttagcaaccaagcaagtgtcgagttcagctctatcaaaatctaccaagtatagctgaccctctaacactcccttgaatgctattgaatcatcacttcttctaaagacagtaacacctatgtcagtaaatagacagttgtagcccatttgacataattgggatacggaaagcaaattgtaatctaatgaatcaacaagaaaaacatttgaaatggaatggtcaggagatatagcaaatttacccaatcctttgaccaaaccttgatttccatccccgaatgtgatagctcgttggggatcttggtttttctcatatgaggagaacatctt

SEQ ID NO: 5102 - DNA, 393 bp, Zea mays
  unsure (1)..(393): unsure at all n locations
agctntggatatcccatattgtccatcatttctcggcagacatgtatttctttattgtctggtagacagtaaaggaaatcatcttcgtcatttccgccgtacaccaaggacccttggggtacttcagatccctggcataatgttgcacttcagcaacctgctcttctgataactgttttcctgaagcatgtcgaacaatgaattctagctctctaacagaagcttcaagagcaggagatttgtacttctcagttacactctctttttctagggtcgccgctgcagttttcgaaggtccagcttcggcaggaacttctacaggtctaattttactaatagtctgagccatgctggcggcgtcattttttcccggaactttagccttcgttctaa

SEQ ID NO: 5103 - DNA, 397 bp, Zea mays
  unsure (1)..(397): unsure at all n locations
agcttagagcaagttatattattggcacaagatgaagcttctattctagtgattatcaaaagatgtcaattgaagcaaactatcactgctaccaattgaaaggtcatttattatcatagctccatgatatttaaggataagcatctagtatcatcaaatattatagagcatgagcaatctaaaaatatgcaattgctcacgacttaagataccaatttcttgacttacagaggtacccaagtcctgattgctccacttcttgatcatcttctcttttccaccttgagactatataagatcgctcaagaaacaattagtctcaaaagacacaagttatgtgtgctccccctaaacttgtgcatcaagtatttgaataacttgcgctntgcacattcta

SEQ ID NO: 5104 - DNA, 392 bp, Zea mays
agcttatatctcccatagctctatgtgtgttttaaactcatgcttgtctgaaccattgcattctgtatcgtggcgattttgagaacgcaacaagatgcccagtttgcaatatcagtcgatacaagaagagctacaatcaagagtgtgtaaaaaaattcccgaagaaaaataaaaacaagatatccactattggacctgaaagtgacgatgacacttttgatggcatggatgggaaaaagaaatcaaagatcccagctttggtgatgtggtatcttccagtaattgatcgcttgaaacgtttgttctcaaatcctagggaggctgagcttatgcgttggcatgctgaaaatcgcaagcagagtaacaaacagatttgacaccctgctgatgca

SEQ ID NO: 5105 - DNA, 410 bp, Zea mays
  unsure (1)..(410): unsure at all n locations
agcttctaaagggagagcacattntaggattaacaaatgttcattttgagaaagacaggatttgtagcgcatgccaagcagggaagcaagttggtgctcatcatccacataagaacatcatgacgactgacaggccactcgagctcctacacatggatctattcggcctgatagcttacataagcatcggcgggagtaagtattgtctagttattgtggatgactattcttgcttcacttgggtattctttttgcaggaaaaatctcatacccaagagaccttaaagggattcttgagacgggctcaaaacgagttcggcttaaggatcaagaaaattagaagcgacaacgggacgaagttcaagaactcacaaatcgaaggcttccttgaggaggagggcatcaagcat

SEQ ID NO: 5106 - DNA, 411 bp, Zea mays
gcttgacaatgaggaaatggctcttatcatctatatgttctggcaaatcctcaaacaaaggaagggaaaggactacaaaccccgctctaagagggtttgctaccggtgtggtaagtccaatcattttattgctaaatgtccatatacaagtgatagtgacagggacgacgacaagaaatgaaagaagaagatggaaaagaagagatactacaacaagatgaagagtggcgaggcgcacatatgacgagaatgggactccgacgagagctccaccgactcctcctccgatgaggacgccgccaacatcgccgtcaacaaaggccttctcttccccaacgtcggccaccaatgcctcatggctaaggatagcaaaaagaagaagtacattctagagataccccaaatacacta

SEQ ID NO: 5107 - DNA, 352 bp, Zea mays
  unsure (1)..(352): unsure at all n locations
atgcggatcttcttcgagcgctgattgctccggttcgggtgggggatctgtgttgttcatcggtgctcaccagggggagctcgcggcatggctgccattgccgctgggcataagaatttggccggcctatgcctcaatcgcaggtaagtgcacgttcctgctattctcctccctccacttcgtgtagggtctgtccagagtatgaaccgggcgccaaaaccatacggtggcggctcgtctatgtgaaggccaccgaactangatgcgccactgtgttcctggcgttcggagaaagaagacggagcgggagcccttgatccgtgaatgaacggctctgttttgaccacgctga

SEQ ID NO: 5108 - DNA, 399 bp, Zea mays
agcttgtggtagtggtatgctatgtaatggtatggcttgatgtaatgaataaaataactagttaaaaaatggcatgtgcataataacgactctcttcccatggcagatggcttcggatagaaccacgcctaccgcctccgggattggagcaagacttcctctaagagctgagggagaggctggcggaaaagggggtgagacccacctccccgcacctccagaactaccactagacctagcccaaattctggccaatcaaaccagactcattgaagtcctcactcgaagtctggagaaccagcgcccaggcggtggaaggccccaggacaggatgggagaattcctgagactgaagccgcccacgttcgcggggtccagcaatcccctcgatgcagatga

SEQ ID NO: 5109 - DNA, 267 bp, Zea mays
ttttttctgtttttagataacccaatggccggaggccattaaaaatcatttctcaagcgctgatacaagaccttgggattacttagatccctggcatatcgcctaacttcagcaatccgatccttccacagttgcttccccgaagcatgtcgcaccaaaaaatatatctcttcagtagaagccttgggagcaagagatattaagtttctttgatacactttcttttcccacgagcataggaatagcccccagagggcatgcttctgt

SEQ ID NO: 5110 - DNA, 316 bp, Zea mays
tacttatttctcacacaaaaataaaatggccatacaagataaaactacatcaaaagtacgatattccatataagatcaaagtccatcaaaagtatgatatttctcagtatatatgcttctattcttgtacagagctattgactgtatgagcttcggactcctccctgaagtcgcactgctgttgggcgtgtcggtgcccttctgggtgctggcttcgggtatgagtatgtggcaacggtggtggtaaagggagctggggccacgaagctagtgaatgacttgtcaaagcaacaaaagctgcatgttgatcacccac

SEQ ID NO: 5111 - DNA, 399 bp, Zea mays
agcttctaaagggaaacacattttatgattttctttatgttcatttgagaaagacagggtttgtagcgcatgccaggcaggaaagcaagttggagcccatcatccacacaagaacatcatgacgaccgacaggccgcttgagctactccacatggatctattcggcccgattgcttacataagcatcggcgggagtaagtattgtcttgtaatagtggatgattattctcgcttcacttgggtattctttttgcaggaaaaatctcaaacccaagaaaccttaaagggattcttgagacgagctcaaaacgagttcggcttaaggatcaagaaaattagaagcgacaacgggacggagttcaagaactctcaaattgaaggcttccttgaggaggaggg

SEQ ID NO: 5112 - DNA, 189 bp, Zea mays
tacaagaacctaactgagtatgactgacccataatagaaatgcttttaactcctatggttttggaataaccgacacctctagataacatactaggaaaagcatggcataactagggacctagagagaacattctctccctaaaggggaagaacaccttaatggagcagctgaaataaccaaccttgtga

SEQ ID NO: 5113 - DNA, 365 bp, Zea mays
  unsure (1)..(365): unsure at all n locations
taaatccncttcttagtacattagtgcaccagagagaaactaagtgaaaggaccaagctaatcacattgtcatgacttgggccaattttaaaagttgttatacattaataacctacaaaaaatagtaagagattttttttcaaaaagattatgcaaaatccccaaacaagccactcaagtgggagcttcaaataaaaataaggatttcatagttctgaaattcagccctctcacaaagatcagacgcgttcaccatgttctaaaacgcaaaaccacttgtgccaattgacaaagtggcgccaaaggacccctataacaccctggaaaagatagaaaacatacccaatccggttgacatgactggg

SEQ ID NO: 5114 - DNA, 390 bp, Zea mays
  unsure (1)..(390): unsure at all n locations
agctcancaaaacgtagagcacaagagctataatttgagtgagcgggagcagctggccagagagcgtgtcaaatgcgctcgcggtatggccgtatttatacgccaagtgcatagaaaattgaaagaccccgcctgtcagagaatgatgctattctatcgaagggaaggtgttgtttcggaccatcggcgtaaagccttcgttcatgtcgcaatctaaacttattattttaaacaaattaatattgcgaggggctactgttggggaccttcggcatccgaaggtcctcaaaaacaggatttaatagtggttctggagcataatgtgtgaacaggtatcttcggactcaagtcaggcatcacagtaaaccagaataaaccgaaggtcggtgc

SEQ ID NO: 5115 - DNA, 394 bp, Zea mays
gcttacacagtaacacggtggtttatcttttctagttgcaacaacggtccgagatagctcttttgcacaaagctgatggaagaaatagctcaactctgaaagcgctagccaaacatgcttatggacatagcctcgaaccatcgcagaagaatccgttcaatccatatgtggaagtcatgactcttcatccctaagactcgcatagtagataagttcacccccctactcaggttagatgcatacccatcagggaacatcaacatcttgatccattgaagtacttccttcctctaggccctgcttaggacgaaatcggccttatgccttctccacgtctttccgccacttggcggcttcatctctagttttggtctatcacataacgctgccagat

SEQ ID NO: 5116 - DNA, 397 bp, Zea mays
agcttgggaagagtcttcatcccaacttggtctagtcggcggtgccagagccaacccatgttagtcttagcaattaagcatgtgtcgagttcagctctatcaaaatctactaagtatagctgaccctctaacacacccttaaatgctattgaatcatcacttcttctaaagacagtgacacctgcatcagtaaagaaacagttgtagcccattttgcataattgagatacagaaagcaaattgtaatctaatgaatctacaagaaaaacattggaaatagaatggtcaggggatatagcaattttacccaatcctttgaccaaaccttgatttccatccccgaatgtgatagctcgttggggatctttggttttctcatatgaggagaacattttct

SEQ ID NO: 5117 - DNA, 184 bp, Zea mays
  unsure (1)..(184): unsure at all n locations
atgtgaacacatatgttatcctctccctgctctatctacatgagaataatgtcatacaatngcatataccactaacccaccacagagcacccacaccatgtctatgtcacattcgtgctgtgagacacgatataaaagataactcttactatctttcacatgtactaagaattgtttcattatt

SEQ ID NO: 5118 - DNA, 390 bp, Zea mays
  unsure (1)..(390): unsure at all n locations
agctntaccaaatggacgttaaaagtgtcttcctcaatggaccaatcaaggaagaggtctatgttgagcaacctcccggctctgaagatagtgagtatcctaaccatgtttataaactctctaaggcgctttatgggctcaagcaagccccaagagcatggtatgaatgcctaagagattttcttatcattaatggcttcaaagtcggaaaggtcgatcctactctttttactaaaacacttgcaaatgatttgtttgtatgccaaatttatgttgatgatatcatatttgggtctactaacgaatctacatgtgaagagtttagtaggatcatgactcacaaattcgagatgtctatgatgggggagttgaagtacttcttaggatttc

SEQ ID NO: 5119 - DNA, 231 bp, Zea mays
tcatttttactcttacgcttttgaaacaaaagtgcgcatacctaagcagacccttttaacaacctctgaaaacgattccttacaatgctcaaacaatttcaaccttctaatcataaataagcttggatgattctaccttactgctgtccatacaaatatgactggatctattgccagaagacttttttcccgtatgttgctcctggaatcacttacccgagctacctcagg

SEQ ID NO: 5120 - DNA, 411 bp, Zea mays
  unsure (1)..(411): unsure at all n locations
agctttacaatntacttagaaggttgagaaatagatgaataaagcacgattgcgaaaaccaagcaacaagagcgacaaataacacacggatcactctctctcaagtcactaatcactaatgatcacttgtctcaattgtgaaacttggagagattggaagctttgattttgtcttggatggattgctagctcttgtattgaatgtgaaggattggagtgcttgggtaaagtaaatggaggttgttggggttgtatttatagcccccaaccacttcctagccgttgctccctttctgccgaccgcggacggtccgtgcccctggtccggacagtccgcccatgcacatcaacgactgaaatcgcaacggttagcagtaacggctatatcaacggctactgtgcataaaatgg

SEQ ID NO: 5121 - DNA, 308 bp, Zea mays
ccaagccacaagagcgactaataacacaccgatcactctctctcaagtcactaatcaccaatgatcacttgtctcaattgtgaaacttggagagaatggaagccttgattttgtcttggatggattgctaactcctgtattgaatgtgaaagattggagcgcttgggtaaagtaaatggaggttgttggggttgtatttatagcccccaaccacttcctagccgtagctccctttctgccgaccgcggacggtccgtgcccctggtccggacagaccgcccatgcacatcaacgactgaaattgcaac

SEQ ID NO: 5122 - DNA, 345 bp, Zea mays
atggacatggcatactccctggacccaagtccactgacttaacaatttttccattatcaagatgaatacatacaattcctgacctcgcgcgagtgctcataaaaaacactccaattttgccgagatcctgaaatcaatcagttacctgacctagcatactagtattcatctcaaaaggaatcctaagttcatgcaactagaggtttcaagcaactcctacacttaagtgcacattgcaatcctacaagcattaattgtagtaaagttgcatataataacatggttatgcataaaaccggtgcttgccatcaattgctggggcggcggggagatcctcaatatcat

SEQ ID NO: 5123 - DNA, 395 bp, Zea mays
agcttcaccccctatgctagaagtagggcctcttataattctgaaccaagataatcgcttgtgtcatctcgcacaccatctagagtcggccatgtggcacattactggttggttaaggcccgcagtccaaacaccgacactgcttaacgtaattgcctctcgaccgtagcttcaaccgttatattttctttctcgcatagtcgtagatgcgagtcccgcgctacgcgtctgtttagttattatattttattatgtggtgtattgtttctttctatgttaagattgtggaatgtatgtttgaactcgtatagataacggtctgttggtggagtccgaaagagttgcaggcgaaaaccctgagcaacagttggttggtgaaggcaagtgttctctga

SEQ ID NO: 5124 - DNA, 320 bp, Zea mays
ttctgcgatgaaacatggcccccaccgtagccccttcgtggtgctagatcgtttttcgtaacgagcttgatccgtgaaaaaatctcttatgcttccggaagccaaaggtccaaaaattttcgagcgcgaagtggccccaccctgcaaattcaccttctccggttttgtggcccaccgttcagtgggtgcgagcgactgttcgtccggtatatgagacttgacgattcaccttcttacctgcagcactatataaacagacgagtaggtgtgaagttaccacaacattcatcgctattgcactgttttgctgccaggaattt

SEQ ID NO: 5125 - DNA, 87 bp, Zea mays
agtcacactcgaccaccgaaccactacgctgactccgcgtatacaccgcgactcttgcgcgtacctgcgcgatcatgcgcggctgtt

SEQ ID NO: 5126 - DNA, 361 bp, Zea mays
  unsure (1)..(361): unsure at all n locations
ctgagctgcaactgaagactgctcgtttatttttttttncgcgagaccagagcggcccaccgagtcgctttatctcgagcgcaagttacttatcgcagaaggtgatgagtgaggtatccgtatcccggaggcgtaagagtccctcggctcggtcagccttggctgcttacgtgtactccgccgttccaggatccgctgtccgaagtagtcaagaagcacgaaagaaatcctgccaaaaagagatcctttttctaggaaaaattctacgcagagggggtctcccccttttagcccccgagggagggtcgggctatgccgatgctatgccgacccttctttgatatcaaactttgcgtacgcg

SEQ ID NO: 5127 - DNA, 401 bp, Zea mays
  unsure (1)..(401): unsure at all n locations
agcttgtcagactatgggggttttgcatgttcttttacgagangangctcgactatgcacatatgaagaacggaagccttgacagggttctatttggtagttctcttccacaatttcaatacatagatttcttatttacgcgaataagaggaaccacatgcaaatggcaactgataatacgtggataagagactagatcgcgggtgatgaatataataatgtatgcgtcagaagtaccacatgcatgcctaagaactgggttgatggttaatatcatgatactgataggtagcttagttggaagaataaatcccactcttagtaacgatatatatgggaattaaaatattcttagatgtagtcttctaattgtttttcctaaacacctcttttttaaaatc

SEQ ID NO: 5128 - DNA, 327 bp, Zea mays
tggcgcatttgtcatgcctaaagacataatgtgtactcaacaacacatacttggttataaattgttgtcttctggatgtccgaagtttatatcctgagctgatgataacctgaccctatatatattttcgagaacacgttggctcctctcatacttataagaacaggtctattattctatgcagagggtacttgttcttgctggtgacttctttcagagctcgataatcatgcacatcctcctggtgtcgtctttcttctccacgaacaggactgaatctaacctatgtgaggtactaggtctgatgtaacctttctttgacagctc

SEQ ID NO: 5129 - DNA, 385 bp, Zea mays
agcttatgaaggttcttcatcccaacatgtgctatacggtgatgccatagccaacccatgttagtcttagccattaatcatgcatctagatcggcattctctttcgaaaaatcaactaaatagagcttgctgtctaatacacccttaaaagctaatgaaccatcactccttctaaagacagatacatctacatttgtgaataagcaattataacccatgttacataattgactcacagataacaaattatacccgagcgattcaactaaaaatacattagagatagaatgctcgaaggtgatggctatctttcccaatcctttgaccttgccttggttcccatctccaaagatgatcgaatcatgggaatccttgtttttgacat

SEQ ID NO: 5130 - DNA, 372 bp, Zea mays
gcttctaaatggagagcacattttgggactaaccaatgttcattttgaaaaagacaagacttgtagcgcatgccaagcagggaaacaaattggtgttcatcatccacacaagaacatcatgacgactaataggccgctcgagctactccacatggacctatttggcccgatagcttacataagcatcggcaggagtaagtactatctagttattgtggattattctcgcttcacttgggtattctttttgcaggaaaaatctcaaacccaagagattttgaaaggattcttgagacgggctcaaaaagagtttggcttaaagctcaagaaagtaagaagcgacaatggaacggaattcaagaactctcaaat

SEQ ID NO: 5131 - DNA, 205 bp, Zea mays
gtgtgactctaaaacttctgacgaaggggcctccaatgaacctaactgtgtttgcttaccccttactaggaaatgtaatggattcctctggttttcgattaacagactacctctagaataatatactaggaaatagcacacgcataattatagtctaggagacccattctctcccacatgggtagaaaacttttgagcatgataa

SEQ ID NO: 5132 - DNA, 391 bp, Zea mays
agcttgtcccatcactcctcatgctccttctcagccgaggcaggatcccactcgactgtccaacccggtggcaagatggacggctaaatcactccagcaaccatgtcctccagagaacctataaaattatgccacaagaaaggctgagtatactaatactcagctagacttacccggtgtgaggagtctactcctctacctctagacatgcaactgtttggctgtggggtttggttgccaaaagcactagctgagtttataaaccaagttttagccttgtcaagttttagtgtgactcacttaagactagatgtgtactatctactcattcatggtatcaagcaaatatagcaatcaacatcttttgtcacatcatcacatttccacttgt

SEQ ID NO: 5133 - DNA, 407 bp, Zea mays
  unsure (1)..(407): unsure at all n locations
agcttatcctgaacaataatattggggnatatactaatccgtatattttttncttaatcgaggaactcgacaaaaacctttttgcttcgctgtgaagcaacagtggcggcttttgcatcgtcaaatttgcaacagcaacagcaacagcgcggtggtggtgaatcttgtgagtggaagggagagtcaaggtggaatggacggactcgcgactntacgaggggtggggggtggggccgtgggggtgattgaacgctgatgggacgaccccaaaggcaacgccaaagctgagggcataaatactcgatcctgtaactgtaacgggatgaaagtggccatgggggccccatggtcggcctgcatggtgcgccactgttgttagtaaggtaggcgaataaagcttgctgcct

SEQ ID NO: 5134 - DNA, 146 bp, Zea mays
gacattattatcaatactggccaattacccgtttgtataacacccagcctagtggagcaggttgccttaatgtatctatttcaatatgatttccaagggaaatacttctttaagatcctattttttgtcttaaacaaataactcat

SEQ ID NO: 5135 - DNA, 379 bp, Zea mays
  unsure (1)..(379): unsure at all n locations
agccttntcacatcttgtcaaagaaccatctatttgagagctcttcttatcattccgttggctctatctacttggccattggctcttgggtgcgccactgatgcatatttaatccggatgctccgctgctcgcataaatcgaagaattcatagctggtgaagttggatcctatgtctgtaacgatgctatttggtatttcaaacctgaatattatgtcttgtatgaattccactgccttggctgatgtcaaagaggcaatgggcttgtgctctatccattttgtgaatttgtcaatggcaaccagtacgtgagtatagcctccctgagtctttttgaaaggatcgatcatgtccagccccctaacatgcaaatgaacat

SEQ ID NO: 5136 - DNA, 357 bp, Zea mays
gggcaaaagcgccaagggcttctagggaaggtttggagaccaacccaaaaaaaattattggctattctatggtgaaaacaaaggccataccaccaagatgtgtcatgttaccatccagaaacagaaggagatagcagaagcagcagcgcaacaaagtcagccgaagcaggtcatgcacactgcttcgtatcactcgccttatattccagaatatgtaagcaaccactccgcagcttctgttgcttcggcgagccaaccccaagcatcttggcagcagcctccaccgccaccgccgatccagcgagggcagcacctcgacctgaccaccagagaaccccggacctcgcccgatctttt

SEQ ID NO: 5137 - DNA, 285 bp, Zea mays
ggaacaaaacgccgagcacagttccatccacggtttatttttttatccgcgccgcacaagatactactgaactccagggagaaatgaaactcctagtggctatgcttatgatgcctggatcccacatgaatgggactgtcctgtagtggcctcgactaaccaggatgacggtatccttatggggttaccttaaggggactagcctaatcgatatctgcatcccccataaatactaccatcaaatatgcagcattataatgaaatcactgatgattgataatacaa

SEQ ID NO: 5138 - DNA, 417 bp, Zea mays
ggaaccttaagcacctgagctgcaacttgctatactggctattttttttctctatatattcaactcaaaagggcctcatgctcttgctcattctgggaatagataaggatatcatctatgaacaccactacgaatttgtcgaggtagtccgtgaacacactgttcatcagatacatgaagtaagctggcgcattcgtcaatccaaatgacataaccatgaactcatatagtccgtatttggtgatgaatgttgtcttcggtatgtctgagggtcagattctcaactgatggtaacctgacctctgatctatctttgagaacacactggctcctctcaattgatcaaataagtcttcaattcaaggtacgggatacttgttcttgatagtaacttcgttcagggctctgtaatcaatg

SEQ ID NO: 5139 - DNA, 387 bp, Zea mays
agcttgtcaagtacatttaggtattcatttcttgatgggtccgctacggttagtaaacaaagatctatgaacccaaaagtcctttgtgttagtgcttggtaaacttgttacctttctaacacaagttgcaattttgggttgcctatttacatgcgaaatgattgaaaagctagaggtggggttgttaccaatgggacaatccttgcattgatgtccctttttccggcatgtgtagcataggcgttattgaagtcttgaagatctcttctttccttggttgttgcttgctacatggttagtaaaaactttcttttctaaccctatgcctctttgtttcaaatggggacaagatttgattaattgtcccttctttggcatttaaaacaa

SEQ ID NO: 5140 - DNA, 393 bp, Zea mays
agctttataggtgatagcttcatcactacttttgagaggatctgctgaaggtgtttctttctttaggatcttcggctacgaagcatacccccaacagtagccccttcgtggtgctagatcatttttcgtaaggagcttgatccgtgaaaaagtctcttatgcttcgggatgccgaagatccgaaaaacaccttccctgagctcgttgccgagaaacgattaaaataatccgagcgcgaggtagccccaccatgcagcagttacgcacgtcctggtgattcaccttctcgggctctgtggcccaccgttcagtgggtgcgggtggctgtttgtccgatgcggaagacttggcgatttaccttcccacctgtggcactatataaacagacgggta

SEQ ID NO: 5141 - DNA, 201 bp, Zea mays
  unsure (1)..(201): unsure at all n locations
ctacctgaacttccgcttttacatngatgcactatgctctgtgctttcttatgccctgggggacgtgttcaattgatgagatgatgtgctgcaccatgaaacaccggcgtagccgagactccagaaagcctgacacatcngttgtgagcagtgtcctgactatcttgcctatcattcttattcactccgcatacacatatg

SEQ ID NO: 5142 - DNA, 403 bp, Zea mays
  unsure (1)..(403): unsure at all n locations
cgggaccnnagagtcacctgcagcatgcaagctcttgcagaaagtttggcctaaattactccccanggaggggagaccctaaaggtgaccatcacagcctctagcactggtgggcaagcgcagacgggaagacagttgcgggaacccgtgctgcgcatcacggacagtccgccgaacatacgcggacggtccgacgcttctcctgacggtccggaggactctatcggacattcctgccgtgctcaggacccgcagcgaccacgtaccttcaaaccacgacgacccgagataggtacgtggaaaacaaatacatttaaagcatctggtcggctgatcaagcctggcccgactttcgatcaattgttgtctaaatacatgaaaaagaaggccggccccaatgacc

SEQ ID NO: 5143 - DNA, 389 bp, Zea mays
agctttatcaaatggacgtgaaaagtgccttcctcaacggaccaatcaaggaagaggtctatgttgagcaacctcccggctttgaagacagtgagtaccctaaccatgtctataggctctctaaggcactttatgggctcaagcaagccccaagagcatggtatgaatgcctaagagatttccttattactaatggcttcaaagtcggcaaggccgatcctactctattcactaaaactcttgacaatgatttgtttgtatgccaaatttatgttgacgatatcatatttgggtctactaacgaatctacttgtgaggaatttagtaggatcatgacacaaaaattcgagatgtctatgatgggggagttgaagtattttctaggattt

SEQ ID NO: 5144 - DNA, 206 bp, Zea mays
tttttagtgagactaaaaactacttattttatatgaccctaactgtgataaaggaaaggataggttttaaataaggaaagtattaatttaacattacactatcatcaccaatacctacatgtcttatcccccaatatacatggggaagacagggtactactataacattactatcatgttgataaactaatataacttctttgaaa

SEQ ID NO: 5145 - DNA, 208 bp, Zea mays
ctgttacgctctttgaatactaaagtgtgtatccctagctatgactctcttaacaccttcttggtacatttctttcagtgtcacacagtttcacatctaacacataaaagtgtgaacatttctacttactctgtccatacattatgactggatctgttcagaaacaatttccttggtggctcgctatccttgacccgtctaactaaga

SEQ ID NO: 5146 - DNA, 324 bp, Zea mays
ctactactttgtttttgcgatcgctcgcgtcgaggcttcttctctgcaacatccggtttcaggcatctgcttgctgctctgaaaacggcaatcatccttttggttgcgacgaatattatatagattactaaaaaaaatcaaccaaaggcatgacaacgcaacttccgtcacggtgcaccagtgcacttgtcagcgccgcgaggtcgctcttcgctgagagcgtcgtcggacctgacgccttctccacgatcactcagtgcgcgcggcgtgcgaggttctaggctctccactgcgagttctgcacactgacttccaatgctgctt

SEQ ID NO: 5147 - DNA, 395 bp, Zea mays
agcttctaaagggagaacatgtgataggtttaatttatgttatcttcgaaaaagatagaccttgtgcagcttgtcaagcaggtaaacaagtgggaggagcgcattacagcaagaatgtgatgaccacataaagacccctggagctgctgcatatggacctcttcggacccgtcgcctatctaagcataggaggaagtaagtatggtttagttattgttgatgacttttcccgcttcacttgggtgttctttttgcaggataagtctgaaacccaagggaccctcaagcgcttcctaaggagagctcaaaacgagtttgagctcaaggtgaaaaatataaggagcgacaatgggtccgaattcaagaaccttcaagtggaggagtaccttgaggag

SEQ ID NO: 5148 - DNA, 130 bp, Zea mays
tgaaaatccgcgaattttcttcttccactcttccggcgctacttgagatttcacaaaaccctcgcaccttgaaacagctactacctgtattgaatgggaccgactccttctccgcattctctaacaactt

SEQ ID NO: 5149 - DNA, 388 bp, Zea mays
agggagaacacgtgataggtctaaccaatgtttatttcgaaaaagatagaccttgtgcagcttgtcaagcagggaaacaagtgggaggctctcatcacaccaaaaatgtgatgacaacatcaagacccctggagctgctacatatggacctcttcggacccgtcttctatctgagcataggaggatataagtatggtctagttatcggtgatgacttttctcgcttcacttgggtgttctttttgcaggacaagtctgaaacccaagggaccctcaagcgctttctcaggagagctcaaaatgagtttgagctcaaggtgaagaagataaggagcgacaatgggtccgagttcaacaaccttcaagtggaggagttccttgaggagga

SEQ ID NO: 5150 - DNA, 304 bp, Zea mays
  unsure (1)..(304): unsure at all n locations
gagaacatgtgataggtgttatctgacttttaatncgcaaaagatagacctttggctgcttgacaagcaggtaaaccattgggaggatcaccattcaaccagaatgggatgaccacctcaagacctcaggagctgctgcatatggacctctattgacccgtcgcctatctgagcatatgaagaagatagtatggtttagttattggtgatgacttttccgcttcacttgggtgtttttttgcaggataagtttgatacccaagggaccctcttgcgctttctctagagagctcaaaatgagttt

SEQ ID NO: 5151 - DNA, 331 bp, Zea mays
tgtatttgtcgccggaaggacaaaacctgagagaattcccaacacgcccatccaagtcgatagagcatgtgtattattccacgcatctggattagtttcccaagtgtggaaagattgatagatgtgataagttgcaggagaaagcttttcttctatcatgccaaaaaaaccaagatcgggagtgggttttggaaactcttggagatgctcttactgattaaggcacccctagatggatcattccatcttttgtgatcaagaaaagggaaacaaaatatcattattattcaaataaacaaaaaatacctaaaaaaatctatggtctcaacct

SEQ ID NO: 5152 - DNA, 396 bp, Zea mays
  unsure (1)..(396): unsure at all n locations
agcttgggaagggtcttcattttttttgtattttgcggcgangccacaaccagcccatgctagtcttagcaattaagcatgcatctaaaccggcctcttcttttgcaaaatcaactaagtaaagcttgccgtctaatacacccttaaaggctagtgaaccatcacttcttctaaagacagacacatctacatttgtaaaaagacaattatatcccatattgcatagttgactaacagatagcaaattgtaaccaagagactcaactaaaaacacattggagatagagtgctcattagaaattgcaattttacccaactcttttaccttgccttgattcccatcaccgaatataattgaatcttgggaatccttattcttgacgtaggaggtgaaca

SEQ ID NO: 5153 - DNA, 392 bp, Zea mays
agcttgtattgcaccccatgttctccgattctattttgaaggatgaaattgctagagcttgcacagagaaaaataaatctgttcataataaaaatctatgtgctgcaaaagagttggtacaacataagagtgacaattctaaatctgctcaagtgaggaagacagaaatacaactgaaaagtgcttggtttcttgcttccagatctgatttgcttgaattaaatgatgttgcttcaatctgttatgtatttatttgcaaggatgctttgttctcacttcacaacataccatctactttgccttctactatcactaatcttttgcaggaatatgctgatgtatttccaaacgatgtgccacctgtcctgccaccgataagaggaattgagcat

SEQ ID NO: 5154 - DNA, 193 bp, Zea mays
aacctgtcgggcgaaggcgtcaatgttacactttatgaagaccatagctcaatcctctcaacactcattgaacatcagacccttactgctccaataacggactctacctatcctctgctgccatggtaagagttcaacttctatgtagaaggcgcatcacctgtgtgccggttaagtaaccatgtcataaaaa

SEQ ID NO: 5155 - DNA, 384 bp, Zea mays
agcttctgacatgtgggcccgtctggatgttcggtgcacaccggacatgcactgtttactgtccggtgtgccaatatgggcacgcctgacttctgtgcgcgctgcgcgcgcatttaatgcgccgcaagtagccgttggcgcggagatagtcgttgctccggaattgcactggacagtccggtgcacaccggacatgtccggtgaattatagcggactaaccgttggagttttccgaagctggcgagttcctgaggccgacctcccttggagcaccggacactgttcggtgtacaccggacagtccggtgaattatagtggagtcgcctctggaaatatccgaaagtagcaagttcgcgttggagtcctctggtacaccggacat

SEQ ID NO: 5156 - DNA, 396 bp, Zea mays
  unsure (1)..(396): unsure at all n locations
agctttgtcatccgaatgtataattttcttgtatgaaagatacaatttcagtcctccaatcttcgctatgcataggggatattgcaagcaccgctccctccataagctcaaccgaaggtgcttttattgtttcaaaaaatactttcaaaggtagagggagcccctgtgccgctgatttggctaacagatctgcgtgctcgttttctcctcttggaatattcttgacagaaaaaccttcgaaagaagcctccaaccttcagactgtatccagatatttttcaagctttgggtctcttgccttgctacttttgtctatatggccaaaaatgacttgaaaatcagttntcaggatggcccttcttattcccatttcctttaactttcgaagccccaaca

SEQ ID NO: 5157 - DNA, 233 bp, Zea mays
taattactggtggtgttatttaaggggatgctttcatgacttgactaatactgattatctgccaggtgtaaattaatttttgttgttcaggctgaactcacaacccctgtgtttctcaataactgttcgaactcttatgcaacattataacaacctgtttggtttgagttaacatggatcgaggcatttaactatccagtgttcggctatacaagtgaaggtaaattcaattg

SEQ ID NO: 5158 - DNA, 390 bp, Zea mays
agcttctaaagggagagcacattttgggactaaccaatgttcattttgagaaagacagggtttgtagcgcttgccaagcaggaaagcaagttggtgttcatcatccacacaagaacatcatgacgaccgataggccacttgagttattccacatggatttattcggccagatcgcttacataagcatcggcgggagtaagtattgtcttgtaattgtggatgattattctcgcttcacttgggtgttctttttgcaggaaaaatcacaaacccaagagacattaaagggattcttgagatgggctcaaaatgagttcggattaaggaccaaaaagattagaagcgacaacgggacggagttcaagaactcacaaatacaaggctttcttg

SEQ ID NO: 5159 - DNA, 400 bp, Zea mays
  unsure (1)..(400): unsure at all n locations
agcttactggtttgatatttnnnggncttttattactttctacttggagactaaagtatacccatttttggtgcaagtcttgttactcctgatggtgggcagccaatggattctctgcaggtaattttttcctcgctcggaggaaatatttggtttttgttgtgggacactagaggccatctcagcgtgcaaaacactgactgttctacgttgtaaatgtactgtttacagagttgagtttgaaaacaaacactgttttgtattgtaaatgcattactataaatgcaaaatactgtttacagaatggagtttgaaatggagagtgagataccgaggctgctggagtaattgctagcatatactttatatagcaattcataatctatttctcatatttatc

SEQ ID NO: 5160 - DNA, 406 bp, Zea mays
acctgctgcatgcaacctcagtcttatcgataggcccggcgtttgttaatcttacttagacagggaactttgctatatcctgtgcatctatgttagtcatgatgaaccatgtttggtttggatctttgttatgtatgtcaccagagtgtgggtatcctctgcattttggtttacctattatgtctattaagatagttttatagttgggaaaccctttattcccctttgctctttatctgagaagctgtgtggtctgttgttggagatcagtgaatatgctcatctgttcatcgctggtgaaagattctattctctttccttatgctgcaagatctgccagatcagtttcgatgagtggttgcattctgcaaacgtcacagaacatgcgcatatgaagaaggcgtgc

SEQ ID NO: 5161 - DNA, 395 bp, Zea mays
  unsure (1)..(395): unsure at all n locations
tgggctatttactatttaaatttatatgatcacatattcacccncctctaggtgctctcactacatatgtcggtaccctaaatcaagggtaccctcttctacaacatgccccattttatctataaaaagggaggcatgcgacgttacagacacacgcaatcttaaactcgctagctcatacaagctctcaagcaatacaactcatagtggagtagggtattacgctccagcggcccgaaccactctaaacccttatgtgttcttgagttcttccccttcactccaacgatcaagaaaaacgcctaagcccctcctcatcttaggatttagggcgggtgcactccgccacccggccggaaacttnctctccgacatttggcgcgccaggtaggggg

SEQ ID NO: 5162 - DNA, 211 bp, Zea mays
aacccgggaaaattttacgatttgccaaacccggggcttcttcctcgggtccacaaaccctcggattattacccacaccgctgacaaagactacctccccaaggttccacccccttggaatgtacccaaacatacggctgacccctcttattgggagcatggcttcagcccctcttttgtgtcattccaattttgaaacccgctacctcgg

SEQ ID NO: 5163 - DNA, 322 bp, Zea mays
gccgccaatacccacaacgacacccagaagctacattagccaaacttacaagtcttcttcaaaatgttgctagactatatttcatattgttacatcccatggtgctatacatgcctaaatggataaatcatatttctgttacctatgcataagggaagttagtctaatcaaatcatatcttgcacctctatagcacacaatctttttcctaagtagaagatcactgttagggggagtattcctttcgtctctaatgggggagaacaatcttttctgaaggagaacactcatttatgatgagttataaagtcaagttcctcaa

SEQ ID NO: 5164 - DNA, 393 bp, Zea mays
  unsure (1)..(393): unsure at all n locations
agcttgaaatccccaaggggcttttccactttctacttangcatactgtgatactcagttcagtgattagttgatatcagatttcagatggcgactctgagattgattatctttctgttatctcttattaaactcgtaaaattactgcagaacacaagggagacagcttttgcgcttcgcaagctgcctttgaccaaggctaagcgataccttgaggatgttattgctcacaagcaggcaattcccttccggagatactgtggaggtgttggtcgcaccgcacaagcaaagtctcgccactccaatgggcagggtcgctggcctgttaagtcagccaggttcatattggatttgctgaagaatgctgagagtaacgctgatgtatgccctctt

SEQ ID NO: 5165 - DNA, 390 bp, Zea mays
  unsure (1)..(390): unsure at all n locations
agctnacgcggcagtagactttgttgtatttcctataaagctctcacttgaagaggtaccctacctgaacatttcagtctttctctgtttatagaacttaacactaactgacgctttccattgtagataaaaaaagaacttgaatcgggtaaataccaacgtatgttgcaatattcggatcacctcacacatatatttgtaagttgtgataagcataagtcaccatcagtagccgcgtatcgtgccaatattagatgtgggaacttaagtagtgcaagtactggaaagcgcatgattgacgagacctcttccaccatgtttgtcagaagagctcaaaagatcatgtggctcagtcattacaaaatggcatgacccacgaggatgcaatga

SEQ ID NO: 5166 - DNA, 386 bp, Zea mays
cctgcagcatgcaagctaccatgcatgagtgatgatctttatttcttttcagaactacggagtcatgatctttgaaatcaattacaccatgccagcatctctgcacctaaaactcccatgcccctttttttttggattccttcgccagtctgaatcaaatagaataatcaggcttgaaatctctcatggacctgggtctctccctccctttgttatcatctttggagtttgcactctcttctgcagcagcagcttcgtctccctggtcctcctcctggaaggccgggcgggtgatgatgttcgtcaggagctgcgtgcccctgatggcgttggtgaacggtatgtgttcctccggcgtgtcgtccgtcaaactccacaagaactct

SEQ ID NO: 5167 - DNA, 385 bp, Zea mays
  unsure (1)..(385): unsure at all n locations
agctttgggcacacatttgaagtttagtttttcttatcacccgtagacaaatggtcagactaagagaaccaaccggatcctttaagatatgttgagagcttgtgcattgcaaaacaagtaaggttgggacaaaaggctatcatatgcagaattctcttacaacaaccgctacccggccagtctaaagatgtcaccatttcaagcactctatgggaggaattgtagaactccattgcattgggaccaacctggcgaaaggcaggtgttcggtccagatattttgcttgaagccgaagagaacatcaggatggttcgagagaatctgaagacagtgcagtccangcagcgaagctatgctgacacccgaagaaagatctgagttttg

SEQ ID NO: 5168 - DNA, 92 bp, Zea mays
atttaatactccaagtaattttgctacaattccggagtcatccctaggaatagtagcattactaattccccataccaattatactaattttt

SEQ ID NO: 5169 - DNA, 389 bp, Zea mays
agctttgggaagccgaatgttcaaaatactctttccctgagctcggtgtcgagaaacgattcagtttccgagcgcgtagcggtcccaccttgcaaaactactgtttggtctctgcggtccatcgcgcagcgagtgcaagcggctgtccgcctggtgtaaaaatcctggcgattcaccttcttacctgcatcactatataaacagacgagtaggtgtgaagttaccacagcattcaatgatatttgcactgttttgctgccaaaatttttaaccatagccgaagcttgactctcagaatcagacgaagctccagtttgaagcctacttcgtcagaagaaatagcttctgaagaaaaagcatttagttcccaaaaaattcagagttaaatg

SEQ ID NO: 5170 - DNA, 346 bp, Zea mays
acttccctccatgcttgaagggcacatgctcttcaacaatatcttctcaatacattgattatgttcttatcaagtctgcttcattcaatcttgaggtgtgaataagtcttgtacctaataaattcaacattttgtacatcatatatctctatgaaaagcttcttccaaaactcttgaggtgaaactgtgaacctcgatcagacacaatcttctttggcactccatgtaaacacacaatccgagccatatataactctgcttgctgagaacctttataagtagtcttcaccggaataaagtgagccaacttagtcaaactatccacaatcacccatatagcatcata

SEQ ID NO: 5171 - DNA, 209 bp, Zea mays
ttactcttacccctaaatatgggtgccctacttactctttaacactctgataatttcttctagctcatgatttcaaatctacctaatagttattgcttctacttctgctggtcatccaatatgattggatctatttgcgagaggacatttctccctataggttggctcgttcatttcactgaccccgtgctactcagaatttgtggcta

SEQ ID NO: 5172 - DNA, 244 bp, Zea mays
  unsure (1)..(244): unsure at all n locations
ccgagctacggcaccagctaaggcacgcccaccctccgtccagaattggggataaaactatatccaatgctccgggccaggctggggatgtcagacaagaccgctggtgataggctgaagatcggcctatttacaatttttccgcgcgcgcaaccagctttcataaaagctacagctgtgtcgcgagaagccagcagggcacagaagtcaccatgcctagctataactntgtcaagcgcctcaa

SEQ ID NO: 5173 - DNA, 398 bp, Zea mays
atgcacttcaccgatgcctgacaacatttttttttgttttctttgggacatggatgagacacttattttgctcaagtcacttctggttggctcatatgctagggatattgaacgccctaacgatcgtgagaaaagtactcaaacaaagaagcgatgggagaacctcattttacaactctgtgatgagcacttcttttatgaggaggtcaattagtgcctaaactcagtactcaaataccgctgctagatgttccttgtttgatttactgttttttcaattctgattttgcagcggagtgccggtccaagagagattcaccaagccttttcagtcatgccaagagcatcatgtacgccctcaaagagaaaaaaaatgacatggtgattgcttcttgctc

SEQ ID NO: 5174 - DNA, 394 bp, Zea mays
  unsure (1)..(394): unsure at all n locations
agcttctgaaagtgggattagttcttcctgttgcaactgctggtgttgagagggtcttttcttcaatgaaccacatcaaaagcaagctaagaaataagatgggacaagaattcttgaatggttgtttggttacatttattgaaagagaattcttcttgcaagccaaggataaagacatcatcgctcgttttcaaaatatgaaggatcgaaaacttgtcttataatgtaagcttccttatcatttagatatttattatcctttatatatttcaaatattggctcttatcactggcattgaagaattttattttttgatcaattttatgcccatctaaaacttgattntgtttggtagatattatatgtatgatatcaaacttgtggttttcctat

SEQ ID NO: 5175 - DNA, 393 bp, Zea mays
agcttaatgcccctaatagattgtctaattttgttaaaggcaaggctcccatggttcaggatagtgaaggctatattttatatcctgctaactatcctgagcacaaagttaggaagattcatgctaggaaacctcataccgtttcacatcatgcatttatgtataaaaatgaggcttctagctctaggcataccacacatgttcaaatgcctagaaagaaaattcctgctgcatcaaatgaacataatgtttcttttaaaacttttgatgcttcttatgtttcaactaacaaactaggcaaagtagttgtcaaatatgttgggggcaaacacaagagctccaaaacttgtgtttgggtatccaacgtgcttgtttctaatgtgaaaggaccca

SEQ ID NO: 5176 - DNA, 255 bp, Zea mays
tatctcgctacgctctgcgactgttacctgctcctgagagttatgctgcacggcaacttgcgatgcgcgatgactccgactagaaacacgacggctgtatcggcaaggccgcggagttatgacgcggccgcgctgacgcaccccgctcctaagccggcacgctacgggtaccgcaacttctgctctgtaccagggatccatgcaactgagagtaccacttttttgctccgttgtgcgagctcaggcgatcgcgat

SEQ ID NO: 5177 - DNA, 405 bp, Zea mays
acctgcagcatgcagcttaatcctttggaatgatttttattgctgctgatgacaagcggaaggaagtcctctctaaaatagaagaggatgttgctaagctcagcggttctgccccctacactatgtgtgcaagctactcgattgatttaacattctcaaaacttcactgtcaaatgtcgacaggtttaccatttgaacccaaacattgcaccagacatatcaaatttttagttggagttaggtacttaacttttattttagttttcccttttaagtttcaagcttgtttttttaatccaacactacaagaaactcaaaacttcaattgtgaataggtttacctttggtctccaaacaaccgttaggcatctcaaaactttagttagagttgggttacttaacttt

SEQ ID NO: 5178 - DNA, 395 bp, Zea mays
gcttgagtcagtcctcctatataggataattgactcacaaagaagtgatgaggatatgaaacatattcatgagaaaatggaggctggtaaagccaactgctttaaaagagatgatcaaggtgttgtatgatttaacaaattgtgcctaaagatgatgagatctgccagcaaattctagatgaagcacatcttagtcgctattctattcatccaggaaacactaagatgtatcatgatctaaaacaacattattggtggacaaagatgaagatagaaatcgcgcgctatgtggcaagatgtgacacttgcagacgtgtcaaggccatacatatgaagactgctggtccattacaatctttacctatccctacatggaaatgggaggatataagcat

SEQ ID NO: 5179 - DNA, 257 bp, Zea mays
ctgtgcactctgcggcatgtatcatgctcaacgaaatattcaaaatttgcgctattaggtctcctctcatcttgagatacatcagactagtctactggcgccaatttagcactaggcctggacattactagggcactggaattaagtcgatcacatcgcataggcgtactgttactcctgctgggcgacagcctctccgatactgctgaactcctcgcctttggccaatattgtggactgccttacgaatcccgcgt

SEQ ID NO: 5180 - DNA, 375 bp, Zea mays
  unsure (1)..(375): unsure at all n locations
ggccccgacattattgattttttctgcctctcnacaagtagagactgtatctttttgtgctcctataaagaaatgtccatgaaatcaatgncattctgactggtagtaggtctctattcttacattctgtttggataaaggggatggaaaccaaatccttaagatttagttcaactttgaactaaatttctagagcaacccccttatttgagcacccatgtatgggccagattatgtgattccctgtaccatcaaccagttgattaataaatactctatatctctgtattatatgtgatattctatgttgcgtgtgattttatgtttgtctaaatttccatttctgtaaatattattttcttttcggaaaacgga

SEQ ID NO: 5181 - DNA, 393 bp, Zea mays
agcttgaagccatggttagtagcatatgcttgtaatatacaaattgactcaagcctagctacgggtgcataggtttcaccgaaatccaaaccttcgacttgtgaatagcccttggctacaagtcgggctttgttccttgtcaccacaccatgctcatcttgcttgttgcgaaatacccacttggtacctacaacattttgattaggacgtggaacaagatgccatacctcattccttgtgaagttgttgagctcctcttacattgccaacacccaatccaaatctcttaatgcatcttccaccctgtatggctcaatagcagaccaaaagagtaatgttcacaaaaatgtgcgactcgagatcgtgtagttacccccttatgaatgtcaccga

SEQ ID NO: 5182 - DNA, 392 bp, Zea mays
agcttgaaggactgcttttgcaggatagctttctaacgtgaagacttgttctgtccacggagtctctttatccgagcgcgagttacttatcgcaaaaggtgatgagtgaggtatccgtatcccggaggcgtatgagtccctcggctcggtcagccttggctgcttacgtgtactccgtcatttctaagatccgctttccgaagtagtcaagaagcacgaaagtaatcctgctaaaaagagatcctttttcgaggaaaaattcgacgcagagggggtctctccccttttagcccccgagggagggtcgggctttgccggggctaggccgacccttccttgacgactaaactttgcgtaggtgcaaggtatatgaacaacttggaaacatctta

SEQ ID NO: 5183 - DNA, 321 bp, Zea mays
agaatcacacgtggtacctcagtaaaagaatctgaaatatccgagatcccatccaaggcaactgcatcagactggcaagagaaaatgttctttggagccaacaccacctgacccgctggatgttaccaccaggagaaacatgcatggagccaacaaaaggtacacctgcacccgcgtcgacaaaaggaacaacactatagggccccaattcctggtatgattagaaaaacatgactcctgtgctttgacacatgctggaacagacaaaagatcagaggaatcatttctttttgtatgaggaagaaaaagaaaaatatcaac

SEQ ID NO: 5184 - DNA, 66 bp, Zea mays
ctggctaacacttgcggggtgtgtacattgacccttcatgtaacatggcaacaatgggtggactca

SEQ ID NO: 5185 - DNA, 180 bp, Zea mays
caagcacctgagctgcagctgctgattttacctaatattcagggtttcataattctgctcgcgacaccacatctgatgcatatgctgctgtggtatctgatgctacctagaatatctctctacttaatgattatttcctcctgttcatgactgcttctggcttaagttacagcctattac

SEQ ID NO: 5186 - DNA, 436 bp, Zea mays
  unsure (1)..(436): unsure at all n locations
tgcaagcttgctaagggagaacacaatttgcgactaatatatgtttattttgaaaaagacagggatagtagcgcatgtcaagcaggaaagcaagttggcgcccatcatccacacatgaacataatgacgactgacaagcagctcgagctactccacatggatntattcggcctgattgcttacataagcatcaacgggagtaagtattgtcttgttattgtggatgattattctcgttcacttgggtatcctcttttgacgataaatttcacacccaagtgaccttaaagggattcttaagacgggctcaatacgagttcggattaaggataacaaagataagaagcgacaatacgacggagttcaagaactctcatatccaatgctctcttgacgaggagggcatcacgcatgagttctcttctcctacacacct

SEQ ID NO: 5187 - DNA, 380 bp, Zea mays
  unsure (1)..(380): unsure at all n locations
acacagagcagcagccttaggacgctacttctagaganctaaaactgcgttgcttccgaaacatataaaagaacatcggcatgttgagcacgttacactcgcaccatgcactccgagccaatggcaattccgacaatatcaatggaggaccaggccagcatgtcaccggacccacaaatatagacacatactgtcccaccagccatagacactggatgggataataacagacagcccaatttgagagtggcaaaacagcaaacttcccacgcattccataaggtgttctgaatcaaatgcatctgcaagcatagaattaccgtcatgtcacgtgacaacgattcaattcagcgtcagatagctaccacaagcatggaaca

SEQ ID NO: 5188 - DNA, 435 bp, Zea mays
agcttctaaagggagaacacgtgataggtttgactaacgtacaattcgaaaaagatagaccttgtgcagcttgtcaagcaggtaaacaggtgggaggagcgcatcacagcaagaatgtgatgaccacttcaagacccctggagctgctgcatatggacctcttcggacccgtcgcctatctgagcatatggggaagtaagtatggtctagttattgtcgatgacttttcccgcttcacttgggtgttctttttgcaggataagtctgaaacccaaggaaccctcaagcgcttcctcaggagagctcaaaatgagtttgagctcaaggtgaagaagataaggagcgacaacgggtccgagttcaagaaccttcaagtggaggagtttcttgaggaggaaggaatcaagcatgagttctccgctccctacacacctc

SEQ ID NO: 5189 - DNA, 260 bp, Zea mays
  unsure (1)..(260): unsure at all n locations
cgcgccaatggtaagaatttcacagctatctaaaacatgtttctcgacgacaaacaaaggcaagtgggcccacctgttacctgaagcggtctgggcactaaacacaaccgagtgcagggcgaccgggttcaaccctttccgccttctatatggatcngaggccatgaccccgcaagaaataaaacatgggtcaccatggacagttccgtcagccgtccccgacgtggacgagcctacttcgaaggacctcattgacggag

SEQ ID NO: 5190 - DNA, 443 bp, Zea mays
agcttctaaagggagaacacgtgataggtctaactaatgttactttcgaaaaagatagaccttgtgcagcttatcaagcatggaaacaggtgggaagctctcatcatgccaaaaatgtgatgacaacatcaagacccctggagttacttcatatggacctcttcggacccgtcgcctatctaagcataggaggaagtaagtatggtcttgttatagctgatgatttttcccgctttacttgcgtattctctttgcaggataaatctgaaacccaaaggaccctcaagcgcttcctaaggagagctcaaaacgagtttgagctcaaggtgaagaagataatgagcgacaatgggttcgaaatcaagaaccttcatgtagaggagtatcttgatgatgaaagaataaagcacgagtctgccgttcctacacaccacaacaaaatg

SEQ ID NO: 5191 - DNA, 438 bp, Zea mays
  unsure (1)..(438): unsure at all n locations
agcttgggatatctatcanatccgaagctgacaatctgaagtttggtctgttcacaatgtttccatgtgtgcagctagccttcaaaaaagcagtagctgtgccccgagaagctaccagggcgcagaagtcggcgtgtccaccaataacttcgtcaagggcatcaacttcgccttcaatatattctaatgttcttggcagattntcagctgaaggtgtaaatttcgaagagctagctccgacagagtgaaacacgtccttcagccgctgcacacatcggctgccgaagcttaagcatttctcctgaagttctttgaaggaatttctgcaaattgagtanttatccacttcagtttttaggcttgcttcaagatatttcttttcttgctcgaattnttctgattgtcggagcaattcattctttaatttgtcattctcag

SEQ ID NO: 5192 - DNA, 454 bp, Zea mays
  unsure (1)..(454): unsure at all n locations
agctgtaccctgtagtctggactataagttggttacagtaggtgtgccttatgcagtttgaccatttccagcatttgcgtaatgaggactctagggagaagcctcgtagtgagaccctggccattcacctcggaagtgaatacgggtctagctaacccgggctagaagggaatcacgactcatgggtaaagatgcgccacctctgcagagtgtaaaactgatatatcagccgtgctcacggttatgagcagcctggactcctcacatgataatcgaacttgaagatgaaaataaatcgagatccgatgatctgccaatgggttgcttaagtggtttcacttaagtgttcttttgatatactcttgtacctttgcttaatgggaatacttgggattcacacttattagtaagacaggtgttgtcaataaaatgttgaccaactaanatgcttact

SEQ ID NO: 5193 - DNA, 426 bp, Zea mays
  unsure (1)..(426): unsure at all n locations
gagaacacattntacgatcaacaaatgtttatattgagaaagacaggatttgttgcgcatgccaagcacggaaacaaggtggttctcaccattcacacgagaacataatgacaaccgacaggccactggagcttctacacatggatctattcggcccgattgcttacataagcatcggcgggagtaagtactgtctatgtattgaggatgatcattctcgcttcacttgggtattctttttgcaggaaaaatctcagacccaacataccttacagggattgttgagacaggctcaaaatgagttcggcttaaggatcaagaagataagaagcgacaacgggaccgagatcaagaactctcaaattgaatgctgtcttgaagaggagggcataaagcatgagttctcctcttcctacacgccacaac

SEQ ID NO: 5194 - DNA, 416 bp, Zea mays
  unsure (1)..(416): unsure at all n locations
agcttgccagtatttgtcaaagcaacaacatctatcagcacagcaactgcagatcataccggtgacttggccctttgcatgctgggggctagatatgattggacctttcaagaaagctcaaggaggatacactcatgtactggtagcaatcgacaaattcactaaatggatagagttcaaactcattgcttctttgacctcagctaaagccgtggaattcatacaagacataatattcaggttcgaaataccgaacagtatcataaccgacctgngatccaacttcacaagttcagagttctttgatttctgcgagcaaaaaagcattcaggtcaagtatgcttcggtagcacacccgagagccaacgggcaggttgaacgagctaacgagatgatattggaggcactcangaaaa

SEQ ID NO: 5195 - DNA, 356 bp, Zea mays
  unsure (1)..(356): unsure at all n locations
agctntaaaagaaagtattgaatatataatctatcatgcttcgggaaaaagactctctacagaagaagaacgagaagctcaacactatgcccagaagctaatatattcgaagggggcattagtgtttaacggcagcggagaagaagattatttgtactgtctcccggatagcaaagagatatctgtttgccgggagatgggtagaagcttcgggtttccaacgttagaagatggcctctcagtactgtcaaaggatgaattggccgacagtttggcatataataggataaaggtgcgaaaatcaattcttgtatgtaaaaatgaattatttcacttggttgtacttaatactatac

SEQ ID NO: 5196 - DNA, 392 bp, Zea mays
agcttctgacacgacgtgatggtccctgtccgattagaagaataccatgtttgggctacattccggactgccatgacaaaggacttcgccatgactgcagtgatggccccatacaaagatatagttgcttcgtagctcatcagaaactgctttggatctgagagtgcatcatacatatggagctaaagcggcttgtatgatggggccatatggtatcctgtctttctgctgccacaggagaagcatcatccaaattaaaggcatcatgattaaaatcgtcataccatgcatgctcgatgaatatgccttcttgatgaagctccctgtgttggggccttctatcttgttcatcttggacaagatgacgcacttcttcagcggcttcatcgatc

SEQ ID NO: 5197 - DNA, 406 bp, Zea mays
  unsure (1)..(406): unsure at all n locations
agctntatcacccttgcattntgcccctaatttcctagcaactatcttcctatcctttctacaaatagcaaacgaagcatttaaagcatgataaattgtagagggaccattcataacttttttaggaacatgaacaatattcttcctaggcacatgatgaatatttttcctaggcatatctctaccatgcatataggaagaactggaagcatacatagcataagagtcataggcatgtgaatcaaaagtattgcaactcctatgagactgtcttttatcattgtacataaaagcatggttctttntagtactacttgccataggggccttccctttctccttggcggagatgggagccttatggcttgttaagttcttggcttcctcttgaagccaacccatctta

SEQ ID NO: 5198 - DNA, 459 bp, Zea mays
  unsure (1)..(459): unsure at all n locations
gcttctncgccaatctgagccaattgaacaagataagcattaacttaatacaaaacttgaagccgaagctcaacaaaattcagatttgaaaaaactattggcgggccttcaagaaaaatgtttggaatttagcaacagatgcattcaacgactaagaaaattntttcactcagttggagccagcagtgagaaattcaccccctcagctgaagatttttcgaagaccttcgaacatattgagggtgaaattgacgagctcgacgaagttatagctgggcacggtgacttctgtgcctgggtagcttctcggggcactgctgcagccttcctaaaagctggctgcgatcacggaaagaatgtcaataggcccaatttcactttatcaccatcaatcctagatgacattcctgatctcgcccgaagtatttccaatagaattgtgaaaatgatatggacaaa

SEQ ID NO: 5199 - DNA, 481 bp, Zea mays
  unsure (1)..(481): unsure at all n locations
agcttgactcaggtatccacacatgaatccttaattcatttttcccgtctcatggacaaggcatcctccctagatccaagtccatagaccaacatatcccattatcaagatgaatacaatcaattcctgacctcgcgcgagtgctagaaaaatcactcgacttctaccgagatcctgattagcaagcagctactcgacctagcatactagtattcatctcaaaaaggaatcctaagttcatgcaactagaggtttcaagcaactcctacacttaagtgcacattgcaatcctacaagcattaagtgtagtaaaatagcataattaacaggttatgcataaaatcggggcttgccttcaattgctggggctgcggngagatcctcgatagcagcctctgaagcctgctcctggtcctcctcttggacaggtccttgctcggngatgagcacgtactctccgtcggcaagaatacaatctaat

SEQ ID NO: 5200 - DNA, 475 bp, Zea mays
  unsure (1)..(475): unsure at all n locations
agctntaccatatgatatcgtgtactcatcagacacattctctactagcctcatgagtgtcctagcctacatatttggctcctactgcagtattaccatatatcacttcctaatgaaggttgatgtaaattggcgatgtaacatcggtaactcatgatcatcacatgtgtgcggtcactgtacttttgttatcttgcactctgctgtgatcttttgtattctagaacaaaccctccatgaacagttatccttgtcgcatacaaccgtgtaacgacatgtctcagacgaatgaagtactctataccgtctcttacgtaagactgcgtaatgctgcaaccacctcttcaacgcagataggtccttgaagaccctacccttttcaatcatcatgctatgactggcctcaagagcgtgaagcagctcatcatccctgtcctctgcattagnctgatgagaaagactaagatcgctgatg

SEQ ID NO: 5201 - DNA, 438 bp, Zea mays
  unsure (1)..(438): unsure at all n locations
agcttctaaagggagagcacattntaggantaacaaatgttcattntgagaaagacaggatttgtagtgcatgccaagcagggaagcaagttggtgtccatcatccacacaagaacatcatgacgaccgacaggccgcttgagctactccacatggatctattcggcccgnatgcttacataagcatcggcgggaagaagtattggcttggtattgtggatgattattctcgcttcacttgggtattctttntacaggaaaaatctcaaacccaagacaccttaaagggattcttgagacgagctcaaaatgagttcggcttaaggatcaagaaaattagaagcgacaatgggacggagttcaagaactctcacatcgaaagcttccttgaggagganggcatcangcatgagttctcttcttcctacactccacaac

SEQ ID NO: 5202 - DNA, 469 bp, Zea mays
  unsure (1)..(469): unsure at all n locations
agcttcttggaacagcttccgcctccatcaccgctgcaacaaggccagcagccagaagggggccaatatgctcaacaccaaagggacttcagagagcaatccgaagctagaacagttgatagcactgtgccagagtctaagcacatctattgacaaatatcctaccttgatagtagtcttttccattcagttttattttctgtgcaataaaggacactttttaaatttcatgtaatagtttcgttgtttgccacaaggaaaatatatcttctccacgggctcaagttgttgaagcttaaagatttgcgatagcaaggaggatcttcgaattatcaaacatttattntaaaaagtcgttctaaggaacgcagagtaagtttgctgaagttacaaaaagccgttccatagggagcgcagtgtaagttttctgctcaaaagtcgttccaaagggaatgcagagcttacagcg

SEQ ID NO: 5203 - DNA, 441 bp, Zea mays
gcatgcaagctcggtgcctatggagaagcagatatccttgtattcttggttgtcaaattgcttgccattgtcaactgtgagttcggacgggactccgaaatggcaaacaatgttttaccagaagaatatttgggcagtcttcgatgttattgtggatacagccctcgccttgatccatttggtaaaatactcgacagcgacgaaggtgaacttgatgttcccctgcgccatgggcaggggcccgacaatgtccaggccccagcgctgaataggccatgtgtgggcgattagcttcgtgaattgcgaggggcttcccgagcatggagaaaatatatggcaggcttcgcacgaccttgtgacccgatttgcggcgcagatcatggcgggccagtagataccttgacggattacctttgcggctagggccctaagccctgcgtg

SEQ ID NO: 5204 - DNA, 473 bp, Zea mays
  unsure (1)..(473): unsure at all n locations
agcttatgaagattcttcattccaacatgggctagtcggcggtgccagagccaacccaagttagtcttagcaaccaagcaagtgtcgagttcagctctatcaaaatctaccaagtatagctgaccctctaacactcccttgaatgctattgaatcatcacttcttctaaagatagtaacacctacatcagtaaatagacagttgtagcccatttgacataattgggatacggaaagcaaattgtaatccaaagaatctacaagaaaaacattggaaatagtatggtcaggtgatatagcaattttacccaatcctttgaccaaaccttgatttccatccccgaatgtgatagctcgttggggatcttggtttttctcatatgaggagaacatctttnntctccctgtcatgtggttggtgcacccgctgtcgagtatccaacttgagcccccggatgcataaacctacataac

SEQ ID NO: 5205 - DNA, 457 bp, Zea mays
  unsure (1)..(457): unsure at all n locations
agcttcatcaatagctgatttcacctgagctagttcatcttcgagggatgttgacctagtagacttcaaatttgtggtgtgctgttctgtccgagctgtctcaacattgccgcccttcaattgaacactaatcctaagagggtttagtttctgattaacagcagcatcacgtagctcattatcatcatccagcatgacatcatctccatcatcatcagtataggtgagagtgtactcagtgtcagaattgaacttaaaggcaattgaaatcttcaagcgaagggcaggcagatcatgctctaagtgtgaaccattcacagaaacattgaaacgcttcaaagtgtcaccatanttgacctgaaaaccagttgagactatactgagactcacagaaacaatcatggggtggcacattcaattacttctttagagtgagcatatatgacagctggtggac

SEQ ID NO: 5206 - DNA, 422 bp, Zea mays
  unsure (1)..(422): unsure at all n locations
agcttcgtgttcagntcttaatattttgcttcatcttccgccagtaaaccttcggctgcctggagttcgaagttctttttctcaaaagcatctgattgttcctttattttgttttccaaattttcaattataacttcatgcttcttatcttcaagatcctgctgcatttgcaaagccttgctcaatagcatactctacacaaacacaaccttcatcagacatgtttttgttaggagcagtaaaagttaggggacaagtcatttaccttgaagctggaataaaacaaactaccaacgacatgctgtcgtcggtagcggctgatatctgcttctagcttcggaaatccaatactcttggacagagtactaataactctggccgcctgttggtcccgaatacactctaacttctcatcatcaaca

SEQ ID NO: 5207 - DNA, 470 bp, Zea mays
  unsure (1)..(470): unsure at all n locations
agcttctaaagggagagcacattntaggactaacatatgttcattntgagaaagacagggtttgtagcgcatgtcaagcaggaaagcaagttggcgctcatcgtccacacaagaacatcaagacgaccggctgtgacaccccagtgtcacctagagtttctcttaaaataccaaaccaagacccatcattttatgtgaaccaaagtatgcatgagcatcaaattaacttaagaagaaagaattcaccaagcatatacttaaaagtatcatgatcacaacaaatgggtctttcaaaaaggtaagaatgttgcaaccctaatataaactccaagtgagccccatgaacaaaattcaagaaaataaggaaaagggtatgagaaatttaaaattntgacttgagccaattataaaagttgaagtatatttaataagcaacaagaaagggtgagaaagcttagccaaaataactc

SEQ ID NO: 5208 - DNA, 430 bp, Zea mays
  unsure (1)..(430): unsure at all n locations
gcagcttgtgtactacatctttgaacccgtcaatgtgaacccagtatgattcaaaacggaaccccttatagaaaatacaaggagagtggccctgcattaataacggagagtggtctgaagtcatggaacacaatgcctgcaaattagccgctggatagagcccatgccacgcagtagttgccatcaatctatcaatcctagacatcgtaggatcatcctgttcatttgaccaagtgaactttntaccaataaggtccagttctaggagctgtagggcgtcaatagtttggttgaacttcctcattactcttttgttgattgctcccttatttttttccctcactctccttatcatgttgaagtctcctaaaatcagccattcaggtttcatcaggttagagatggaacacaactcagatagaaaacacat

SEQ ID NO: 5209 - DNA, 405 bp, Zea mays
agcttgtgcacacctccgtgaggctccccgagcgatgaattggagtttccttcgccggagaagccagtccacccacgccggagcacttaccctcgccggagttcgtggaccgggtaatccactcagccattcttcgattccttgcgcacacagtcgctacgtgaccccgtgaagctcaccgtgccgtcggattgaaccagatcgccgtcgtttggccggtatactcgccgccgacgaggatacccgcctgcgctcgtggaccaggcgattccggccacctccgacgacgagccgtacctcgacgtgaccgccagagcctccccgagccgaccccacccttcgccggacctccctcgccgccggtaagccgcgccgtcctttctttcctacagctactggttcggt

SEQ ID NO: 5210 - DNA, 482 bp, Zea mays
  unsure (1)..(482): unsure at all n locations
agcttgtggagtaccagatcatcgaagcttatatgtttcatgatgagaagtggtcacccaagttntgttgataaagcaccagaagactaatcaaggaaggaatccatgtgggagttcgcaagaggaaggtttgcgtgttggcatcgatgcttcctcaataagctagctgccaagcgaaagccagaagcctaaatattgatctttgagtagccagaaccagcgtatgcaatcagcaaccggatgctcctcaaaggccaaattttgttgaagttccatctcctcgaagagtttgcaaagtgaagatatatagctgaagtaaagctatacccataacccttctaagccgaatctcgaggacgcgattccttttaagtggggtagatttgtagcatcccanagattcatatcctgaaatcttctcaaacttgctctanattcagaatgaatattaaatgtcgtttcacaatgtttgtttgcgagtc

SEQ ID NO: 5211 - DNA, 476 bp, Zea mays
  unsure (1)..(476): unsure at all n locations
agcttggtcattntattgctaactgtcccgacaatgatagtgatcaggatcaagggaacaagagggagaagaagaagaactataagaaggcaaagggcgaggctcatctaggcaaggagtgggattcggattgctcctcttccgactccgacaatgaaggactcgccgccaccgccttcaacaagtcatccctcttccccaacgagcgtcacacatgccttatggcaagggagaagaaggtatgtactcgaaactctacttatgcttcttcaagtgaggacgaatctagtgatgaggatgaaatagattattcatgtttattcaagggcctagatagaaccaaggtagataaaattaatgaatggattgatgccttanatgataagaataggctcttagaanagcaggaggatttgttgtatgaagaacatgacaaatntgtagaagcacacaaatctcatgctctagaagttaaa

SEQ ID NO: 5212 - DNA, 428 bp, Zea mays
  unsure (1)..(428): unsure at all n locations
agctngagacaggaacaaccgtggcatgcactacattccttgaagaaaatgtcaaggatttgaggattgcaatgaggagggaacaaaatatgaaattcatcaccttctccaaaagcctcaaccacgcctccacaaaaggtaacatccaaggtaatgatcaagtcacacttcacattaagaggtgtagtgaatgctttgaagaggggcacttgattaagtcgtgtccctacattaaaaatggcttgattattaacaaggatgatagactttgttttaaatgctccaagaaaggacacttgcttagatcttgtccccatttaaaacaaagaggcatagggttagaaaagaanatttttactaaccatgtagcaagcaacaaacaaggaaggaagaaagtttcaaaacttggaaaacgcctatgctacaca

SEQ ID NO: 5213 - DNA, 436 bp, Zea mays
gtcatgggaagcagcatatgcaagttatatgcgaattgactcaagcctagctacgggtacataggtgttaccgaaatccaaaccttcaacttgtgaatagcccttggccacaagacgggctctgtttcttgtcaccacaccatgctcatcttgcttgatgcggaatatccacttggttcctacaacattttggttaggacgtggaactaaatgccatacctcattccttgtgaagttgttgagttcctcttgcattgccaacacctaatccgagtctcttagtgcatactctaccttgtatggctcaatagaggaaacaaaagagtaatgttcacaaaaatgagcgactcgagatcgagttgtacccccttatgaatgtcggcgagaattgagatcacggagtgatctctctgaatctcttggtggactcttgggt

SEQ ID NO: 5214 - DNA, 432 bp, Zea mays
  unsure (1)..(432): unsure at all n locations
agcttccctggtgaaacgaacaactgacctcacttggcaagaggaggacctcgcctttagggaggagatgtgggcaaggcggaacaagctgctggatgagcttgagctcgaggcagaggagaaagggaagcgtctagaggggaaagtgcggacactggaggagcaggtaagtcagttccaagcggcacaggcgacgcagacggccccgggctcccaggtggtggaggtgatgaggaagacacttgatgacctccgggcagagcaacgtgccggagctcagcacatcgtcgcctaggctggcgaggcaagcacgacgctagtgccattgnggatgagtcccatcccggcattggtgcggccggcgtccatctccgatgcgctcccgatactggattccgctgctgaccgcctccgacgtctggatcagattct

SEQ ID NO: 5215 - DNA, 453 bp, Zea mays
  unsure (1)..(453): unsure at all n locations
agctntagatccaccgtgccagtgccatgaacataatcatgtgacccattccccattaggacggaagaatcctgtgcaccctgataagaagagaacatattaatgtcagaacacacatgaacattagcaccagtatcgagccaccaactaggtgattgaaatactgagaagatgaaaggtaaattaccataccctctgtcttcctcattgctagcgatcactgtgttgacattgccctttntgccacggcgatccgctcgatcaggacaatccttggcaaaatgacctgtctcgtcacatgcgaaacatgtcagtttagccttgttcttcttcttgaagttggtagtttttttgggcttgttagattttggctttcctttgcccttgttgtggttcctttgaaccatgttggcactggagtggccctcgcctcctttagatcctgtgtcctta

SEQ ID NO: 5216 - DNA, 450 bp, Zea mays
  unsure (1)..(450): unsure at all n locations
agcttggaggcgtctataggctgacgacttggtgtatccttctccttcttttcctccggcgccttgaatgcgacgggttgagcttctgatgcggtgggttcgtcaagctcgttgatcttcctcgagccttcgatcatgcactcaaaacttacaaaatgcccgataactttctcgggggtcattttagtatatctaggattaccacgaattaattgaacttgagtagggttaaggaaaataagagatcttagaataaccttaaccatttcatggtcatcccattttacgctcccgaggttgcgcacttggttcaccaaggtcttgagccggctgtacatgtgttgtggctcctcccctttgcgaagccggaatcgaccgagctccccctcgatcgtttcccgcttggtgatgttggtgagctcgtcttcctcgtgcgcgcgtntgagcaca

SEQ ID NO: 5217 - DNA, 386 bp, Zea mays
agcttcctcccttctttgtcggaagtcattatcatcccggatgtactcatccattttctaaagcagcttctccagagtctggggaggtttcctggcgaagtattgggccgtaggccctggccgaagacccttgatcatggcctcaatgacaatttcattgggcactgtggccgcttgtgctctcagtcgcaagaacctttgtacatacacctgaaggtattctttatggtcttgcgtgcactggaacaaggcctcactgtgactggcttcgtctgaaagccttgaaaactggtaaccaacatgtccttgagcttctgccatgacgtgattgtccctggccggagagaagagtaccatgtctgggccacatttcggactgccatgac

SEQ ID NO: 5218 - DNA, 467 bp, Zea mays
  unsure (1)..(467): unsure at all n locations
agcttaccataacatgtggctagttgcaaagtctccaccacatcagacctacatcgaatggtccttaagcgacacaaacatgcttgcctgtgataagacactatgtcagtattgttagatgatactcgcttggtgagcatctctcatcctggcactcgatcagatcatccattcttaggttcgtccatcaacatcaccttgagatccgtccggcttttgtccttcacatcacgtgatcaattaacgcacctaaatgatatgtgaaatgcacatgaatgagtacaagtataaatatcacaagatagagaatactatccgaagtagattaaacatttatagcaagacatcacaattctaattaatacgagaatactagatacntttaactctctaacacaacaatcttgatcttccaggtaatcgcacctaattcaaacatcaaataacataaattatctacaagtcct

SEQ ID NO: 5219 - DNA, 430 bp, Zea mays
  unsure (1)..(430): unsure at all n locations
agcttcggctaccaagtggtcaggttcttcgagttctacaaagttgaagaccctgagcatctgtttggtgaaggcaagtgtcctctgacccattatgtcctatttactttataattcactgtaccgcatactatgaacaacctaaggattgactagtattctgttttcctgtccttgtttacccttaggaaattggttattataattagtattatgctactgctttactttaatcaatgaacatgatgagaacatttatgatacgtttatgatatcttcattataatgttggactggtgatactttanggggctcgggcggtttctcgagtgcctctccgtaagacctgttcgttggatgaccacccgggaaaacagtgcagccatgagggtggtatgggacgcccttagctaattaattagaggaactt

SEQ ID NO: 5220 - DNA, 442 bp, Zea mays
  unsure (1)..(442): unsure at all n locations
gcttgtgcaaagtccactcgaactaatcttcggagaaacccgacctcgctgcaacatgacacccgaaggtccaacacaacaagcaatgaatgaattcagaattattgcagagcatatcagtacaagggacctggttcaggagtttttggctttcaaagtttttcccagtttgaaagaatgggaaatgccgaaactaaagggggagaagaaagaaggtgaacttgtgcgtttaccttactatttcaagtttaagaaatactttaaaacaccttgccaagagtggctagatacaattgaagtaatgtgcaatgaaatacttggcaattattctaaaaaagaagatcagttaatgaccgcggccttcggcacccgtccgaagcgaagactgaatcgagtgctggacgccctgngttntgaataccctgattatgaaaatctgaac

SEQ ID NO: 5221 - DNA, 471 bp, Zea mays
  unsure (1)..(471): unsure at all n locations
agtcctctntttntctcaatcaagagacctatgtctccatgagtcacttcacatgttgaagactctcgctagcctttacaatagatgggagccaaaactcaagcacaagagaacaagaaagtagcaacccacgctnttgtatctctcacataggcactatcactttctctagcttaaatcacttgaatgtggcatttgggaggctntggacaattggaagtgttgatgtagtgaatggacttgaatgctcaactcttgtgtcttgaatgggctggccggngtgtatttatagcccccaataaccaaaatagccattagcattgaatatcaaaatttgcactttctgcatgtgcaccggaccttgaactatatcggtccaatgtaccaccgaaccttgtgagattattgttgcaggtactgatggngagtagtcttngtagtctcatcggaccggtccgacgcaccactgga

SEQ ID NO: 5222 - DNA, 481 bp, Zea mays
  unsure (1)..(481): unsure at all n locations
agcttctaaagggagagcacattntangactaacaaatgttcatttgagaaagacaggatntgtagcgcatgccaaaccgggaagcaagttggcactcatcatccacacaagaacatcatgacaagagacaggccactggagctcctacacatggatttatttggcccgatcgcttacataagcatcggcgggagtaagtactgtctagttattgtggatgattattctcgcttcacttgggtgttctttttgcaggaaaaatcccatacccaagagaccttatagggattcttgagacgggcttaaaatgagttcggcttaaggatcaagaaaattagaagcgacaacgggacggagttcaagaactctcaaattgaaggcttctttgaggaggagggcatcaagcatgagttctcttcctcctgcaccncacaacaaaatggtgtagtggagaggaagaatcgaactctattggacatg

SEQ ID NO: 5223 - DNA, 445 bp, Zea mays
  unsure (1)..(445): unsure at all n locations
agctngaccaaggacaatgaggatgctagagaatgatatgtgaatggagaatgtggtgtgtgttttgtcttgtacgagtgcagaaacattgatgttttcaaataaatttctttgattcaaataattctcggtgaagttatgatatcaaatttacaaagcacttcaactctttatgttgttctattgtggntttaacctcaacttataacactttatgttttttgccgatcaaacagcttgtgacttcggtccactaatttggattaagcggccattaaatatgattatatgtcgtcgcaacgcatgggcgttatactagttgagattaaaattgaatttgcaatgtgcgaccgggtgcattcagatcagtgtgctcttccttccaatggtatagatcacggaattaccggtgaacatcactaagcatgcccaagcatgaagtgtg

SEQ ID NO: 5224 - DNA, 477 bp, Zea mays
  unsure (1)..(477): unsure at all n locations
agcttggacattgtttgcgatggttcttggggaaccttcggtgcangagcagctgcggtcttagtggcaccttcgaaagtcaaaacatgttatgcagtcaaacttttcagttgcacaaataatgttgctgagtacgaagcacttctattggggcttcggaaactaagggcaatgggaataagaagggtcatcctaaaaactgattctcaagttattactggccatgtggataaaagcagcaaggcacgagatccgaagcttgaaaaatatctggatgcagttcgaaggttggaagcttccttcgaaggtttttcagtcaagaatattccaagaggtgaaaatgagcatgcagatttgctagccaaaatcagcggctcaggggctcccactaccctccgaagtatattttgaaacaataaaagcaccttcagttgagctcatggagagagcagtgcttactatttctccagtacacag

SEQ ID NO: 5225 - DNA, 434 bp, Zea mays
  unsure (1)..(434): unsure at all n locations
ctgcaagcttgtggagattctacatccccacatgagcttatcggcgatgccacaaccagcccatgcatagtcttatctattaagcatgcatctagaccggactcttcttttgcaaaatccactaaatgaagttcgccggctaatacacccttaacagctagtgaaccatcacttcttctaaagacagacacatctacatttgtgaatagacaggtatatcccatatgacataattgactaacagataganatgatatccaatactgctcactaagaatacattagagatagaatgctcactagaaattgcaatattacctaacccttttaccttgccttgattcccatcaccgaagataactgaatcttgagaatcttattcttgacgtacgaagtgaacatcttcttttccgccgcatatgggttgtgcatcg

SEQ ID NO: 5226 - DNA, 307 bp, Zea mays
agcttcactgtctactggcggagctagctgtagctctgtcttgcccataagatggctggggcgggctggtcactaatctctggaggcaatggcgggcggaattgagctcaacggagctaagggaaagtggctggccggtgagggtgagagcgggactaacagtggcgcgcttgtgaaggctttatatgcacggcgcggtgcactggcggacatggaccggcgagtgcgcgcggacgtgcactgagaggtgccgtgcgcgaactggcgtgaaccgcgggtgtcagccactgtcgaacacgtgttcccg

SEQ ID NO: 5227 - DNA, 256 bp, Zea mays
tggacaccacctgatcgtgtagcaaactgttatgcgaatggagattcacgcttgataccagccggacacgattggtgtacagccgggggcgccctatgagagaacatactcacgctcttatgcgagcacatactgccgcgtttacaggacacaaaccgtgtgcgccagatgtttatatgaatatgccaacgcgaaccccttgtggtctaccggtccagacatctggctttatgtgctacaacgaacaacgacatat

SEQ ID NO: 5228 - DNA, 462 bp, Zea mays
agcttcaccacgttcctatgggtgatctgtgagaggatggccacctcgtttatgaactcgtcgatctccttctggactgctatcttcgacttcttgatggcaacaacgtgtagatccgatagaatccctttgtagacggtaccatgccctccaccgccaacctcacgagccttgtcgaagttgtttgtcgccttagcgagctcatctacaggcacgatcatcctttccgcaatgtctgcccttgcagataccagttgttgcaacagttgtccacgattctgcttgaagaaccttcgtttcaacatcatttgcctcttttgttttagcctttgagccacgaagattgctgcgagaaccagaagcataaaacctgctgcactacccactccaataccgatgcttatccctgtgtatgtgagtagggtgttagtaatattactcgctccatcgataataagaaac

SEQ ID NO: 5229 - DNA, 427 bp, Zea mays
  unsure (1)..(427): unsure at all n locations
agcttatccaaaaaagttggtaatttatggagttactaaataatttctaaaattccagaggtataggtttaagcccttttaaatattacataattttttgtttgtactaaaaataataaaactatttttattaaatactataaaactttaggagttcaacaaaattggtctcatatttttagcatttttctacaattttctataaattctctaatcctggcagaaaaagaaaaagagaaacaaatcaacagtgttgggctgcattcagccagagacggcccacgataggcaaaatgccccctcgcgcgcgcccgcgtagttggtttttcagaaaggtccctaccggttcaaacatcagaacaacagtcctcgacactattcatgcgtatcactgacatttacactaaggtcctctattntctatttc

SEQ ID NO: 5230 - DNA, 413 bp, Zea mays
  unsure (1)..(413): unsure at all n locations
agcaagcttgcctcgggtagactaataccagaataatataacacgcaatgggagtggagagatggcgagagtagcgtgtaccctccgtggcaagaggttggaccgtggtgtatctatgctctcggttggcgtgaacctgatctggtcttaagaaccccggtggcgagttgacatatgcaagggttaagtgctacatatgtcgngtgattggagatcttcaattgagtattaatcgattcggatagccgttacttctctgacatgaagacttggtcactgccctacatgtagcaaaccaatgaataagaagggctgataagaaataggctagtattggtcaagtgcttgaactatggtagaaagaactctagcactcaggtcatgaattaacatgctaataaaactggactttt

SEQ ID NO: 5231 - DNA, 430 bp, Zea mays
  unsure (1)..(430): unsure at all n locations
agctntaccacgtcgcagtaagccgctttagatagctggttcgtcgctggtaagcttgccacggtgaaagccacgcatcccttgcaccagtgacctcccctctctccggccaccgctcgtcttctcaaaaattagccgccaccgccgatggaacctataaattgccgccccagtgagctctgctaagtagttgtgcacccagtgaaccagccctcacctccaatcgtccgccacaactccccaatttgggatttcccctaatctatcaagaacaccgcagtgtgtgagctcgccgtggccagctctccacaggtccgatcactccctcctcactcttgagcaccgggaacacctcaattcatccgtatttcgcgccatcaccgtggatagagagattangagctagaactttgaattgagtgagaggtat

SEQ ID NO: 5232 - DNA, 445 bp, Zea mays
  unsure (1)..(445): unsure at all n locations
aagaaagtattgaatatatcatccggcatgcttcaggaaaaagactctctaaagaagaagaacgagaagctcaacactatgcccaaaaactgaaatatccgaagggcgcattagtgttcaatggcagcggggaggaagattttttgtactgtctcccggatagcaaagagatatctgtttgtcaggagatgggtagaagcttcggatttccaacgttagaagatggcctctcagtactgttgaaggattggctgacagtttagcctataatagcataaacgtatgaaaatcaattntgtatttgaaaacgaattacttcatttgtttatacttaatgatgtactcctcttgcagcgcttgatccttagcaatgccctcagagcacagaanaacatcgaagatgaagggtgtacaatggctctgaacaaccttcgttcagaggtga

SEQ ID NO: 5233 - DNA, 459 bp, Zea mays
  unsure (1)..(459): unsure at all n locations
agcttactcctncctgngaagggccgntcatcatcttcatgattttgaagcccgggacatacaagctggccaacgaacaaggcgagcaacgcttggaacatccaacagctatgttgtttctacccttaaaatgtttcaagtcattcatgtatctcgctntctttacatgtataaataaagtctaaccgtcaagggaggatcggccttgcctcagcaaaaaccgaacctccctcgagggctagaaggggggaaccccctctgcgtcaaaattttcctcggaaaagttttccgccaaaacgactttcgtccctttcgactatatcgatagcggaatcctaaaaacgacgagaggaaccttaaacgacaaggctgactgagccaagggactcctacgcctncggcatacggattcctcactcatcaccttccgcanaaagtaactcacgctcngataagtga

SEQ ID NO: 5234 - DNA, 465 bp, Zea mays
  unsure (1)..(465): unsure at all n locations
agcttctaanataccagtactaagtgttaccaagttagatttcataagctttcagatttaccattatttattaacagactgaattaggtagggaacacaaagacacaaaaggtgatacaggataacaccatctagcatcctatctgcattgctatcattacgttcctaaaatacatagcttacattgcccatcactgtggttcaagtatcgaggaacctttggtggcttgctgcggtggagaaggaccctatggtgtgtccctttctacagcctgtggatacggagattacaaggtgtgtgacaatccagacaagtatggctcgtgggatggtttccatccatcggaagctgcatacaaagccattgcaatgggccttttgcgcgggacatacacacaaccatctattgcttccaccaccagttcctgtccacagctcactgagctcggctcttctgttgaatac

SEQ ID NO: 5235 - DNA, 476 bp, Zea mays
  unsure (1)..(476): unsure at all n locations
agcttatgaagattcttcatcccaacatgggctattcggtgttgccagagccaacccatgttagtcttagcaattaagcatgtgtcgagttcagctctatcaaaatctactaagtatagctgaccctctaacacacccttaaatgctattgaatcatcacttcttctaaagacagtgacacctacatcagcaaagagacagttgtagcccattttgcataattgagatacagaaagcaaattgtaatctaatgaatctataagaaaaacatttgaaatagaatggtcaggtgatatagcaattttacccaaccctttgaccaaaccttgatttccatccctgaatgtgatagctcgttggggatcttggtttttctcataggaggagaatattntcttctccccagtcatgtggttggtgcacccgctatcgatgatccaacttgagcccncggatgcataaacctacaaaacaag

SEQ ID NO: 5236 - DNA, 463 bp, Zea mays
agcttgccaataattgtcaaagcaacaacacctgtcagcatattatctgcagaccataccagtaacttggccctccgcatgttggggattggatatgatcgaacctttcaagaaagctctggggggatacactcatatattggtagcgatcgacaaattcactaaatggatagagttcaagcccattgcttctttaacctctgctaaggccgcggaattcatacaggacataatattcagattcgggataccaaacagcatcataactgacttacgatccaacttcacaagttcagaattcttcgacttctgcgagcaaaagagcattcacatcaagtatgcatctgtagcacattcaagaaccaacgggcaggttgagcgagccaacgggatgatattggaggcactgatgaaaaaggtcttcgataataatgaatacgtcgcacgaaagtggataacggaa

SEQ ID NO: 5237 - DNA, 464 bp, Zea mays
  unsure (1)..(464): unsure at all n locations
agcttctactgcagatctacaagtattcttatgtctcacaagactacaattagtatctttgaggcaacatttggtatcatttacatgtcttctccaatatttgattagaccatatttcatatcttatacttcccatgttgctataaatgcatatgatgtcaaaaatatctgatacctatgcataagggaagatagtctaatcaaatcatgtcttggtcttttatttctcacttgctttttcctaagtagaagatctctgtcaggggcagtatttcttcgtcaaggggagaagatcttccaaaaggagaacactcgcttagggggagtaatcttttaagtgcttaaattcataaatctttaaaagagatcaagtcttagttgcttcctatatggctttaatgtctctcttttccggggttgatgccaaaggggagaagtttanggacaaagcaatgaaatgatat

SEQ ID NO: 5238 - DNA, 433 bp, Zea mays
  unsure (1)..(433): unsure at all n locations
agcttgtacttctggtgcattgtgcatcctctttatatttaatgaccagatcctctcgagaagtaactaaatcattcattntgtaagctgagaatatgtttctattgtaatggaatatattgagtatgtccaactagaatgacctagttctttntccatctattgatttatgtaatattcctctgttcataaaaattctntgaatgtgctatatcttgtgtgaaggcatcagttctgttaatctatatttaggaaaatgcgaatcaactctggagttccatcggcaataagcttgaaacaccaaccaagacaatcactccagttattccgcagcgtgatgggattcaagataactacaatgatgtattattcttaaactaatgggattcaaggtgactacaatgctctatttcagtacaaacttactgtgata

SEQ ID NO: 5239 - DNA, 472 bp, Zea mays
  unsure (1)..(472): unsure at all n locations
agcttgccaatacttgtcaaagcaacaacacatgtctttcaacaactacagaccataccagtaacctggcctttcgcatgctggggactggatatgattggacctttcaagaaatctcaaggtggatatactcatgtattggtggcgattgacaaattcactaaatggatagagttcaagcccattgcttctttaacctctgctaaggccgtggaattcatacaagacataatattcagattcgggataccaaacagcatcatcaccgacttaggatccaacttcaccagctcagaattcttcgacttctgcgagcaaaagagcatttagatcaagtacgcatctgtagcacatccaagagccaacgggcaggttgagcgagccaacggaatgatattggaggcactcanganaagggtcttcgataagaaatgaaaattcgcacgacagtggataagagaatcgccttatg

SEQ ID NO: 5240 - DNA, 470 bp, Zea mays
  unsure (1)..(470): unsure at all n locations
agcttgtgaagattcttcattccaacatgagctattcggtgatgccagagccaacccatattagacttatcaattaagctagtgtctacttcagcttgattataatcaactaagtataactgaccctctagcactcctttaaaagctattgaatcatcacttcttctaaagacagtaacacttatatcagtaaaaagacagttgtagcccattttacacaattgagaaacagaaagcaaattgtagtctaaagaatctacaagaaaaacattggaaatagaatggtcaagtgatattgcaattgtacccaaacctttgaccaaaccttgatttccatccccgaatgtgatagctcattgnggatcttcattntactcataggaggagaacatccttttctcccatgtcatgtggtttgtgcacccgctatcgattaccaacttgaaccaccggatgcataaacctacaaa

SEQ ID NO: 5241 - DNA, 463 bp, Zea mays
  unsure (1)..(463): unsure at all n locations
agcttgaaagggatatctgcaatggccaaaggagacctttgcatccttgcatacgcatgcttaaatgttagtatttaccttgttttgatttaaaataacttttattccgaagttgaagtaatgtatggtttctctatgttatgcagggacttataccaagcaaggcattgaaaacacaaagatattttgaagaaggcacccaaaaggcaataaataatctttgggcaaagataattgagccttataaaaagggtgaagagaaagaacatatgctaataaattagccgaagatttggtggataccctaaccgagcctcactcttgttgatgaaaggaataaggtgttagaaaacgcaatgtcacagccggttttggaaggcaaaccgaatacgaaccatgtatgtgccaggaatagaaattcacgtacacgacgattacatangtgactcatcatagcacactt

SEQ ID NO: 5242 - DNA, 464 bp, Zea mays
  unsure (1)..(464): unsure at all n locations
agcttcatannaattattttatctctactaaaatgcanaaactatntagagaagtataaaaaattcttgaaacattataatcgatgtataaacatgtttttttaactttgtacatccaaatatgggtcacaaccattacgagtgcaagtatgcaatgcaacatacattagcactgaatgtcttcattctattcacttgtgctagttgtgtattatgcttttttgtcatgaaataatcttaaaatacatttaaacatcaattggaatgttatgtaaattttttatttttagacacgttttccatttctctataagtaattnttttttgttggaagcatttagagataattattttataagctctaaatattttatttatataatcatctatctctagtactttcttatgatagttagaaacttaagggcattttctgtagtttaaaaatcttatcaaatacctac

SEQ ID NO: 5243 - DNA, 455 bp, Zea mays
  unsure (1)..(455): unsure at all n locations
agctttcattagcaaaattgatgcacaactgctcaaagctagcagaaggaggagccatcagaaattcaaagaaaaatagatataactaaataatctttcaaaagtattaacaatagagttgaagaatcttcatgtggagtaagacagctaacagtctagcttgaaaatgcattgtactataatgcagctttcaacctactctttntgtgtgtggggatgttacagattaccattaaaagaattcaaccaaagtgcatgaaacccaggaacaccagcatttcccaccatatcacaatattatcaagtgctggtacattatatagggccatcagcttcagaacatgccaactatctactacaagttntaccaatcaagtacaaacactacaaggaataactaagtgcattaagaatttnnttattaccatagattttccattngaagntctcttaca

SEQ ID NO: 5244 - DNA, 375 bp, Zea mays
  unsure (1)..(375): unsure at all n locations
cgctggagaggccagtccacggtcgccggagttctcaaccccgccggagtacgtggaccgggtaatccactcaaccattctccgattccttgtgcacacggtctctacgttaccccatgaagctcacagtgcccttggattgaaccagatcgccgtggtttggccggtacactcgccgccgacgagaacacccgcctgcgcgcgtggaccgagcgattccggtcatccccgccgccgagccgcacctcgctgtgaccgccagggcctcccagagccaaccctgcccttcgccggacctatctcgccgccggtaagccgcgccacccttttctttcccgtgggtactgtttacattnggggaaggactgcgggtga

SEQ ID NO: 5245 - DNA, 393 bp, Zea mays
  unsure (1)..(393): unsure at all n locations
agctacctaggggcttggatcgagcggaggaggacagggaatggttcgtcctcgggcggctctggcgggtcgcggagaggtcgctggagctatgggcgagctccggngagtttggcgcggggcaaaggatgcaacggggaagacagccgggctctgggacgggctttatagccgtggcgcgggcgtggtcacaagcggccgcgggcgcgcgggagttcgcgcacgggcgtgctctgagcgcgccctcgagtgtcagcccgcgtcgaacacgtgggagcttgcttctgccatggttcaacgacggatntgagcaccttagcgtgcatatcttggcaaaaccactgtgtacggtctctttcctgcaccatatcctacctcttttatgtgagttcc

SEQ ID NO: 5246 - DNA, 450 bp, Zea mays
  unsure (1)..(450): unsure at all n locations
agcttgcattngngtccctaaggaaattgtgactaaccttgtaggacccaacaagagttgggtacctaagacccaagcctaaatttgccttgcaggtttatgcatccgggggctcaagctggattatcgacagcggatgcacaaaccatatgacaggggagaagaagatgttcacctcctacgtcaagaataaggattcccaagattcaatcatattcggtgatgggaaccaaggcaaggtgaaaggtttaggcaagattgcaatatcccatgagcactctatctctaatgtgtttttagttgagtctcttggatataatttactatctgtcagtcaattatgcaatatgggatataattgtctatttacaaatgtagatgtgtctgtctttagaagaagtgatggttcactagcatttaagggtgtactagacgacaaactttatttag

SEQ ID NO: 5247 - DNA, 453 bp, Zea mays
  unsure (1)..(453): unsure at all n locations
agctntaccctgtagtctggactataagttggttacggtaggtgtgccttatgcagtttgatcatttccagcatttgcgtaatgaggactctagggagaagcctcgtagtgagaccctggccattcacctcggaagtgaatacgggtctagctaacccgggctaaaagggaatcgcgactcatgggtaaagatgcgccacctctgcagagtgtaaaactgatatatcagccgtgctcacggttatgagcagcctggactcctcacatgataattgaacttgaagatggaaataaatcgagatccgatgatctgccaatggttttgcttaagtggtttcacttaagtgtttttgaaatactctcatacttttgtttaatgagaatacttgngatttacacttattagtaagacatgtgttgttaataaaatgttgaccaactaanatgcttact

SEQ ID NO: 5248 - DNA, 456 bp, Zea mays
  unsure (1)..(456): unsure at all n locations
tcatcgggatccttgagtcacctgaggcatgcaagcttaaatagcgttcatgcttatttagacatttttttcttgataatcttagnttttttaaaaaaattacaacgtcatggctgcgacgacacgtatacacacatgaaatataccgatttagtaaaaaaacacatactgcatttcacaaattcaacaataaatttatatcacatactgcatttcacaaattcaacaataaatttatatcatgcgggaggaacccaaacttaaggtgttggtggcttcattcgcacaagtcggtatcgtgagttgttcaaagtagtatatcatagtcggtgtatgcatatattcgcagtattgttcctcgtgtgctcgacaaggataagaggaagaaagtgatcttctgatcggtgggcactgagcggtcacgacgaagctncgtaaaaactcgatcgtccgtac

SEQ ID NO: 5249 - DNA, 428 bp, Zea mays
tagctcaaagattgcattatctaaaataaccacttgcccctagattaaaaagagttagcacaagtgatacttgcctcgtgtttgtacttatatctttcgaaagtcgcaagatcgataaaaataatttaactcttcaatcaagtaaactactttatcttcatgttgacgagagaactttagcttagcaaaaaaatacatgctgtaattaatgaaggtagacaaatcaatagatgatataaacacaattattagaattaatttactcttgaataattactatctaccactcaaagtataagtagcaaccatgaactgcttcttgtcattgagttgcttgttggcatcatgtatcaaccatgggatgaagtgatagtaataattaatcatataggccaaatggttccaaagaaccatgcatttacatgata

SEQ ID NO: 5250 - DNA, 433 bp, Zea mays
agcttctaaagggagaacacgtgataggtttgactaacgtgcaattcgaaaaagatagaccttgtgcagcttgtctagcaggtaaacaagtgggaggagcacatcacagcaagaatgtgatgaccacttcaagacctctggagctgctgcatatggacctcttcggacccgtcgcctatctgagcatacgaggaagtaagtatggtctagctattgttgatgacttttctcgcttcacttgggtgttctttttgcacgataagtctgaaacccaagggaccctcaagcgcttcctaatgagagctcaaaatgagtttgagctcaaggtgaagaagataagaagcgacaatgggtccgaattcaagaatcttcaagtggaggagttccttgatgaggagggaatcaagcacgagttcttcgcttcctacacacc

SEQ ID NO: 5251 - DNA, 472 bp, Zea mays
  unsure (1)..(472): unsure at all n locations
agcttgccatgttattcatcggggtggtgatgaattcttttgtggagctcgtgagttcaccgaagatgggtgccaatgttgtgcacttgatttcaatccccagaagtattaaatatcaaggtaacacagttagatcgggcttcaacttcaccctataattccatcgctctcaaagagaaggtagattgataggatgaagatgaagggttagataaataggtgtgtcaaacaagggtaattcataatgtagactgaatagaaatacacacgatttaaatgtaactaataccattcatctccttcctctttcttttttatttaaacaaaagttntacaagtaccttggaatttgtgaatatacaatgaggaagatgtagagaatacaacttcatacaaagagtagtgacaccacctcaatcaaaaagtgtgcctgcgcatggcactgttcctttatttataggcgcgaggtaca

SEQ ID NO: 5252 - DNA, 453 bp, Zea mays
agctctaccaaatggacgtgaaaagtgccttccttaatggccctatcaaggaagagatctatgttgaacaacctcttggctgtgaagatagtgagtaccctaaccatgtttacaaactctcaaaggcgctttatgggctcaagcaagccccaagagcatggtatgaatgactgatagattttctttatcactaatggcttcaaagtcggtaaagccgatcctactctctttactaaaactgtttcaaaagacttgtttatatgccaaatttatgttgatgatattatattcgggtctactaacaagtcaacttgtgaagagtttagtaggatcatgatacagaaattcgagatgcctatgatggtggagtcgaaatattttcttggatttcacatcaagcaacttcaagatggcaccttcattagcctaacaaaatacatacaatatatactt

SEQ ID NO: 5253 - DNA, 466 bp, Zea mays
  unsure (1)..(466): unsure at all n locations
agcttgtgaagattcttcattccaacatgtgcttgtcggcgatgccagagccagcccatgttagtcttagcaattaagcaagtgtcgagttcagctctatcaaaatctactaagtatagctgaccctctaacactcccttaaatgctactgaatcatcacttcttctaaagacagtaacacctatatccgtaaaaagacagttgtaacccattttacataactgtgaaactgaaagcaagttataatctaaagaatctacaagaaaaacattggaaatagaatggtcaggtgatatagcaattttacccaatcctttgaccaaaccttgatttccatccccgaatgtgatagcttgttggggatcttggcttttcacgtaggaggagaacatcttcttctcccctgtcatgtggtttgtgcacccgctatcgatgatccaacttgagcncccggatgcataaacct

SEQ ID NO: 5254 - DNA, 444 bp, Zea mays
  unsure (1)..(444): unsure at all n locations
agcttcgacatanatcaaggaaagtacgacgatgcaagctctgtcacgataaaacaggaggcgatgtatggagagggtgttgttcaaattgttgagtacaaatgacaatgatgtctttgtgacattngtgaaccttgtatgtaattgttgaggatatgaatataataacgtaagaagttgtacgattgcttataaatagatgaacagtacactcgtattgttcaggttggattgtaatcgcactcgcgtcattaccttcaaacaaaccgaaggtatcaatgtaatacaaactttgatagtatcaatacattcattatgaagtaaatatgtgacatgatgttacatttgtaattatatttttatatctgtgaatgatgaggacttgttctttataaccttcgcctaagattcattacatccaagaagaataatgcttcaaaaaac

SEQ ID NO: 5255 - DNA, 462 bp, Zea mays
  unsure (1)..(462): unsure at all n locations
agctctgngaactatgcccgtatccaatctgcctgagccggtactataagcgcttgccaggtgcccccgttcctggtcgaccacgaccaacacccaacataagacttccctagttatttagccaagaccagagccatgatagtcctcatggtagcattgttttcccgggtggtcactccatgttccaattaatatgcaataatcttgtttaaccatcgggttaacaacaacaatgtaatcttaccatctggaacattaatatcataaaccggagtgactgcataaatttaaagttgtagcaatagcatagctacttgattagatcataatctcaggttaaacaaggagtaagggtggaatggttaggggtatctaaatagataacccatcaaattatgcatatatatatatatcgaagaataaactctattatatgtattgtttgggatcaaacagagtatg

SEQ ID NO: 5256 - DNA, 465 bp, Zea mays
  unsure (1)..(465): unsure at all n locations
agcttatgatgtcatagcctnttccaacatatgttccatacttagacaatatacatttactagactcaaaaacaattctgtagccatctcgacacaatagagagccactaactagattcttttttatggatgggacatgttgaatgttcttcaacagcagcgtcttttccgaagtaaacttcacaatgactataccaacactaagaacatgcacatgtgatccattctctatcaaaaaggctccagacactttgcactgataagaagaaaacaaagaaatatcagcacacacgtgaatattagcaccagtatcagcccaccactcgggtgaatgacacactgaaagaatagtaggtaaatgattaccataccccgacgttccttctccagtctcgctaataaccatgtttggtgttntcttctcttgagctgattttttctcttgcttanaattatgggctggac

SEQ ID NO: 5257 - DNA, 439 bp, Zea mays
  unsure (1)..(439): unsure at all n locations
agcttgaagccatggtaagtagcataggccaataatatactaattgactcaagcctagctacgggtgcataggtttcaccaaaatccaaaccttcgacttgggagtatcccttggccacaagtcgggctttgtttcttatcaccacaccatgctcatcttgcttgttgcagaagacccatttggttcctacaacattttggttaggacgtggaactaaatgccatacctcattcctagtgaagttgttgagctcctcttgcatcgccatcatccaatccgaatcttggagtgcttcctctaccctgtgtggctcaatagaggaaacaaaagagtaatgctcacaaaaatgtgcaacacgagatctagtggttacccccttatgaatgtcgccgaggatggtgtcgacggggtgatctcngtggattgcttggtggattc

SEQ ID NO: 5258 - DNA, 477 bp, Zea mays
  unsure (1)..(477): unsure at all n locations
agcttcagctccatctatattatggattgctcttgagtctgtccaatttcattcggcccttctggcagcttcctgacttccatgaatagcaatgggcccttggtccgaaggtatcttcatgcaaagataagctggatgaagaattgcttcgaaggcattgagagtgcctcgactaatgattgcattgtaagggtattccatgtcaacaatatcaaacacaacttgttcagtcctagtgttgttgataaatctgaaggtcactggcattgtgattntgccgagtgctacaatctgccttcctccgaagccacaaaggggatgcgtggcatcatgaattctgtcttcgagctcttgcatttgtttgaaggccttagcaaatataatatcagctgcgctgcctatatcaaccaaaacattatggaccaggaatccttcgatcacacaagagataaccatagcatcgttgtgtgggtcatc

SEQ ID NO: 5259 - DNA, 477 bp, Zea mays
  unsure (1)..(477): unsure at all n locations
agcttcgtaaaaataatctccgaagctatcacctctaaaatcaatattgtttctccctgtaacttggcatgatttgccctttttcaaagcattntccgaagatcgataacatgcccccttcttgtgccacatgcagcatgatgtatgatgattatgctatgcaaaatgatgtgatgatgttatgttatgcaaaatgatattttgtgccgaagatacacacattcctgcaatggggcacaatcttttgtatcaatactgactttttcattataagcctcccttaggagcttcttcgccttttacttcagcggaatcagcgtttatttttcgctgtaagttctgcatccccttaggaacgtctttggaacttcttcgccttttacttaggcggtataagctctgcattcccttangaacgtctctggagcttcttcgccttntacttacgcggtatcagcgttgacttttcgctgtatg

SEQ ID NO: 5260 - DNA, 457 bp, Zea mays
agcttgtggaggaccagatcatccaagcttataagtttctgtatgagaagtgatcacccaagttttgttgatgaagcaccagaagaccaatcaaggaagaaatccatgtgggagttctcaagaggaaggtttgcgtgttggcatcgatgcttcttcaataagctatctgccaagcgaaacctagaagcctgaagatgatctttgagtagccagaatcagcgtttccaatcggcaaccaaatgctcctgacaggccagattttgctgaagttccatctcctcgaagagtctgcaaagtgaagatatgtagctgaagtaaagctatacccataacccttctaagccgaatctcgaggacgagattccttttaagtggggtagatttgtagcatcccaaaaattcaaatcttgaatctttctcacactccctataaattcaaaatgaagttcaaatttcg

SEQ ID NO: 5261 - DNA, 413 bp, Zea mays
ttggaaagtgagctcgcaaggtatgactggatcaaaggtgagtcgctccaatcacttcttgatcgattgatggtattggtcaacaaaataagagtacttgggagtgaggattggagtgactccaacgtcacaagattgttcatgagagcttataaagagaaagataaaagtcttgcaaggatgataagggatcgtgatgattatgaggacatgacgcctcatcaactatttgcaaaaattaaacaacacgagtccgaggaagcccccatcaagacaagagactctcatgccttgatcacaaatgaacaagacaatctcaagaagagcacagaccacaaagcaaagaaagtggtcgagacctcaagtgatgaagatagctcaagtgatgaagacacagctatgttcatcaaaac

SEQ ID NO: 5262 - DNA, 446 bp, Zea mays
agcttcagctccatctatattatggattgcctttgagtctgtccagtttccttcggcccttctggcagcttcctgacttccatgaatggcgatgggtccttggtccgaaggtatcttcatgcaaagatatgctggatgaagaattgcttctaaggcattgagagtaccacgaccaatgattgcattgtaagggtattccatgtcaacaatgtcgaacacaacttgttcagtccttgtgttgttaataaatccgaaggttactggcattgtgatttttccaagtgctacaatctgccttcctccgaagccacaaaggggatgtgtggcatcatggatcttgtcttcgggctcttgcatctgtctgaaggccttagcaaatatgatatcagctgcaatgcatgtatcaaccaacacattatggaccagaaatcctttgatcacacaag

SEQ ID NO: 5263 - DNA, 471 bp, Zea mays
  unsure (1)..(471): unsure at all n locations
agctttaatgcaaaatntctccccctctgtcatttatctccaaaaaggatacgaagaatataaagggcagaaattatgattaatcaagatttgaacacactatcatgaaaagggtccttatatggcacaaaggtaatggagaagtgtcataagtgatgtacctttgtgttttaccttttcaaaggggtgttccacacttgtgttgtagagttcattttgcaatctcttgttggcataattgtgacataggtccaagatatcaaatgaatattgtcataccaattgaaagataaatcttgatacctggagtctagatgtcacctagcattntcttatcataacaagaggcagcatgaaaattgcacaagtatggagtatacaactagtgaccatgtacganatatcaattganaaacaccaattgatacaatntgatagataagcagatcactaatagcatattacacaatg

SEQ ID NO: 5264 - DNA, 466 bp, Zea mays
  unsure (1)..(466): unsure at all n locations
agcttatagggcggaggtcccaccttccgaattgatttaattcggttaggatctatctctataccatgttcatgaatgatgaatcctaagaacatactagccgacactccaaaagcacatttgcgtgggttcattttcagaccataccagcacattttatcaaaggctttgcgcaaatcagctatatgagaactaaactcagccgatttgactacaatatcatcaatgtagacttccatggtgtttcctaatagctcgtgaaagaacaaattcatagccctctgataagtagcatcgacatttttcataccaaatgtcatgacaacccactcaaataaaccaatgaagcctggacatataanaggccgttttagacgcatcttcttcggccatgagaatctgattatatccggcattaccatcaagaaagctaataattctatttcctgacgcattattgatcaat

SEQ ID NO: 5265 - DNA, 391 bp, Zea mays
gcaagctcacgtcctagggctatcctgatcgttctattatctatacaacactgatgctattaagttatactctggaaaaggaccgtatttatattttattgattcctctgtggtgcgacaagctccgataccagatgtggcaaaactgcccgaattattacgacttaagtgcctaagtcccaccttagaggctagaccacacttaaatgggaataacccgtcaatccctcggatctagttcgacaaggccactgacaggatcaagtaccacaatctcactcgatggtgagtcacagagcaaatacaataaagcatataaccatgcattaaggagtattaaattattacatcaccattagagtttcgaaaagtagtcatcattggtcgagtg

SEQ ID NO: 5266 - DNA, 459 bp, Zea mays
  unsure (1)..(459): unsure at all n locations
agctnggatattcttcatcagagaagtatgcatattcttgtgatatagaaaagattttcttcacgaagcatgaaaagaagggaaggtgttttttcgccgaaggctcaaaaatggtatgtatgcaaagtttcatgcatcgtaaagaattaaactataaatagattatatattacattcaaagttacaatgtattacacacgttacgttccaaatgtttctacaatagcatttaatcctccttaagaactatttctgcagcttcgttcagtagctggtcgacaaccttgtccataatggcttcggccattattctaatttcattgtcccccttcgggtgggggcccggagatgcctcagcaggttctgagggaagagaaaataccgctatattactattacaaaccgcgaacaaagtctggaatcaaaaattacaacataataaaaaccactaattaatac

SEQ ID NO: 5267 - DNA, 467 bp, Zea mays
  unsure (1)..(467): unsure at all n locations
agcttgcaagtaaaccttntagtctattagattatgattcaaccttaagccacatttaatacttaaactntntcaccaccagcttaagtagttttataaaaaaaatccaacaaactatggttacatttattgttagattatatataatctaacggatcaggaaagttactagcatatttatatttaaatactgcttacatagcagtcgttgttgtcattcatgatagcttactcgacatagtcaatctagttctgataaagaaaggatcggcagcagttgtgagtagtcgtattatgcagatctagttaaaactcctctaccactctctntattaaattcttgtcatattattggtaatttttatgtggcaggatatttaatgaagataaaattgaaatagtatcctcagtaaagatagtccgaagggagccaaatggtagccaggccagtctgtccactctgattg

SEQ ID NO: 5268 - DNA, 481 bp, Zea mays
  unsure (1)..(481): unsure at all n locations
acctgcggcatgcaagcttcttctccttctcctccttgtaatcagcggcacgtctcatttccttctctttaatctggtggtgctccaccgcaagctcatctcgtctcttgtctaccctctccttgtcctctgcatcccacttcttaagattctccatccatntttttatctttctcagatatttctgtgtccacccactgctcaaaatcatagagcagtggaagagtctacaaagcattcaatggttagtagcattaattcgtatgaaaaccgatagatgtttgagcaattattctcaccaaattgatccgacgttgagcaattgtcggctcataagcatagttagcacacatccaatacctctacccataagtgtcttcttcatcagacttagcaaccttgcaaggatcgccgcacaaacaaatatgcaatggaacacccctctggtaaggcagcgggtcgaaggcagtaccggtcaatg

SEQ ID NO: 5269 - DNA, 401 bp, Zea mays
  unsure (1)..(401): unsure at all n locations
agtcacctgaggcatgcaagcttcgcaccagctaatccgaataggaaatgttctactgttatcagaacaaatgcacaagcacccaacgcaacagacatgcttgtccagaacctctgagtccttcagtagttctgcaggtggctcatagaacacctttattgcggtggaaatcaatgtgccatatatcgggaaaatgacgccatacatcgcagacattattaaagcagaaaggaaatctgcttccatatgcgtccacgtcggcaaaatctccttgaccgtttgatcgtagatcatcggttcatgttatttctcgcgcagcccgtgtgtagatgcttncaggtgcttctctcctcgcatcttctctgcgactcccgtctgcacatctcgcgctccctgctcct

SEQ ID NO: 5270 - DNA, 451 bp, Zea mays
agcttacccatgacgaggcatgtggccagttaaaaggtcctcgatcatcaagcctacatcagtacggtccttaatcgacttagacggagacactacaccgagactttcttctcgtgcaagtcacccgcccggtctcatctttatcatttacaatcccaaagtttggtacctgcagaggtacatcttgtccgatgttgaacccatcacggccatgatggatccaccatcaaattttatttttggaaataccccattccatctaaagcatcatcttttattaaaaccaaaacatttttgttttctaaagcaagactaagcatcagaaaatcttttaataaaacaggtaatcaaggaatggtaaacagttccaaggaagaaaatccaacaattggtttagcacccaactcctatcacctaatgcatcattcaagtgataaagagtataaaatca

SEQ ID NO: 5271 - DNA, 428 bp, Zea mays
  unsure (1)..(428): unsure at all n locations
atttagccctgtgtttactgagctctgttttatgtggcagcagggactggtaaaactatttcctatatggtcatagtagaatggaagagattgttcccaaagacgatcctgtcaggtgatcaaggccttcttataagttcgttgctgtttgaaaattctaactcaattggtactataattcaacaaaacagtttcctggaaaagtggaaatgccagttcaagtagtgttaataacaatcctagacttgctgattcactgtaacacattcattctaggcttgtttctttcaattttcaacttgggctaccttccaggaggagataaaattgtaatcacaagtgcctagaacaactgagttagcattgcaagctgccagcagaattctcanngtctggggactcataagtgttcttgtatacattgggca

SEQ ID NO: 5272 - DNA, 324 bp, Zea mays
  unsure (1)..(324): unsure at all n locations
agcttggcgcagagctgattggcctctctgttgctgctgaggtatatgttgtagcaagtcttgagcacctggccgaggccctccccgcggatggcgacagtggggcaccgcgcggcggcgatgataacacggagggtggcaagctccattgcatcatcagagagagcgccacacgtaaggacggcggtgaagagcctggaggtgggggaagaagcatcgtccccggcgcagccgaggtcgccaaagaggaggcggtggtaaagaagtntggtgacgcaatcgagagcggggtcgacgaccttgggcgaagctgactctagagcg

SEQ ID NO: 5273 - DNA, 445 bp, Zea mays
  unsure (1)..(445): unsure at all n locations
gcttaatacctctaaaagattatcttattttgttagggcaaggctcccatggttcacgataacgagggctatatcttatatcctgctggttatcccgaacataagattaggagaattcacgctaaaaaatctcattatgtttcccatcatgcttttatgtataagaacgaggcttctagctctaggcaatcaacccatgttaaattgcctaaaaagaaaactcctactgcatcaaatgaatctaacatctcatttaatacttttgatgcttcatatgttttaactaacaaatcgggcaaagtagttgccaaatatgttggggacaaacacaagggctccaagacttgtgtttgggtacccaacgtgcttgtttctaacatcaaaggacccaagactgtttgggtacctaagaacaaggcctaaaactgttttganggttatgcat

SEQ ID NO: 5274 - DNA, 432 bp, Zea mays
  unsure (1)..(432): unsure at all n locations
agcttctaaagggagaacacgtgataggtctaactaatgttactttcgaaaaagatagaccttgtgcagcttgtcaagcagggaaacaggtgggaagctctcatcatgccaaaaatgtgatgacaacatcaagaccactgaagttacttcatatggacctcttcggacccgtcgcctatctaagcataggaggaagtaagtatgggcttgttatagttgatgatttttcccgcttcacttgggtattctttttgcaggataaatctgaaacccaagggaccctcaagcgcttcctaaggagagctcanaacgagtttgagctcaatgtgaagaagataaggagcgacaatgggtccgaattcaagaaccttcaagtggaggagtatcttgaggaggaaggaatcangcacgagttctccgctccctacacac

SEQ ID NO: 5275 - DNA, 469 bp, Zea mays
  unsure (1)..(469): unsure at all n locations
agcttggcaaaatcacttacataactttataatctccaagaagtgatttcaggtttaatcaaatcaaacattacagttttcgaaatttgttctgatagtagacagaacacaacaaccagtttgtaaaattcataactcctaaactgtcaggcctatggttgtgaaattttaacacaagcaagataagaaaaatatctacaacttttttataacgaccatgaacagattgtaatattaacttaagcaaacaatgcagtttctaaaatcaatacagaatttggacagattcagttactgactttgtaaaaagcataactcctaaacgatcagacttgtgcctgtcaaattttaacacaagtaagataatagagttatctacaactntcttgtaaccaccaataacttgattcaacattaacttaagcaatcattgaaatttcggaaatctattcagaaattcgacagattc

SEQ ID NO: 5276 - DNA, 458 bp, Zea mays
agctctatcagatggacgtgaaaagtgtcttcctcaatggacctatcaaggaagaagtttatgttgagcaacctcccgactttgaagatagtgagtaccctaaccatgtgtataaactctcaaaggcgctttatgggctcaagcaagccccaagagcacggtatgaatgcttgcgagatttccttatcactaatggcttcaaagtcggaaaagccgatcctactctctttactaaaattgttgcaaaagacttgtttatatgccaaatttatgttgatgatattatatttggatctactaacaagtcaagttgtgaagagtttagtatgatcatgatacaaaaattcgagatgtctatgatgggggagttgaagtatttccatggatttcacattaagaaactccaagagggcaccttcattagccaaaccaagtacattgaagacatacttaagaag

SEQ ID NO: 5277 - DNA, 328 bp, Zea mays
ttaattcatagcatttaaggacaagtcccccacacccaatgtttcatattttagagtctttgggagtaaatgctttattcttattaaaagacgtagaagttctcaatttgctcataatgctgtagaatgctctttactacggtatgacttatacacaacggcatatagaagtttctacaaattcactggagtagttgaacgttcttgtgacattatgtttgatgagactaatggctccccagtggagcaagttgaccctgatgaactacatgatgaagaggctccgtacgttgcgctaacgaacatgtccattggggatgtgtgtcct

SEQ ID NO: 5278 - DNA, 458 bp, Zea mays
  unsure (1)..(458): unsure at all n locations
agctntgtggcctacaacaatggtatttactgtgtgccccagattnttttcgcaacctgcactgctattttttctatgtggagttttttgatcaaacattgntgtcgatgccataacagatgagttatacatacctccaaagttgctactacacattactcgcccttccttattttccttcacctcctcgcccaagaatatccgcttcgtctagttttgactattcattntattgatcattntgtgcacacatggccacattcctatatatngattaacaattgtgtcatttgtttttgccaacatagtgctctgtgctccatatttttatgagttcgaatggaatntagtatgtagctaatggattaactaatgaaaatatcatatttttcatacaatagctaattaccactaacttcttcaaaactatttngtcccaacttaaagggatactagag

SEQ ID NO: 5279 - DNA, 466 bp, Zea mays
  unsure (1)..(466): unsure at all n locations
agcttgtggaggttcttcatcctcacatgtgctaagcggcgatgccacaaccagcccatgcaagtcttagccattaagcatgcatctagaccggcctcttcttttgcaaaatcaaccaaataaagtttgccgtctagtacacccttaaaagctagtgaaccatcacatcttctaaagacagacacatctacatttgtgaatagacaattatatcccatattgcataattgactaacaaataacaaattatatccaagcgactcaactaanaacacattagaaatagagtgctcggatgaaatagcaattntacctaacccttttaccttgccttggttcccatcaccaaatattattgaatcttgnggatccttattcttgacgtaggaagagaacatnctctnnttccccgtcatgtggtttgtgcatncgctgtcgataatccagcttggaacccccgatgcat

SEQ ID NO: 5280 - DNA, 441 bp, Zea mays
actaagcttctaagggggaacatgtgttatgactaactgatgtccgttttgataaagatataccttgtgcagcgtgccacacaggataacaggtgggaaccactcatcaaagcaagaacgtaatgatgacatcaagaccactggaactcctacatatggatctctttaggcccgttgcttatcttatcatcgggggaagtaagtatggtcttgtaattgttgatgattattcttgtttcacttgggtgttcttgttgcaggataaatctaaaacccaaggaacattaaaaggcttcctaaggagagctcaaaattagtgttgagggtcttcttctctgccgaaggtcctcaaggcagaaacacctttaacaagacaacacagaggctcggtctagcacctcaagacgaagactctacgtataagcaacaatgcagaatgtc

SEQ ID NO: 5281 - DNA, 433 bp, Zea mays
  unsure (1)..(433): unsure at all n locations
gatactaagctgagtcgncctcttgtaaggataattgatgcccaacacgatttgttttcttgagacacattcctgagaaataaaggctgttataaccacatgtttctaagaagatgatcaacgcatcgtatgggttaataaccgcatagtggtgcccaagaatgaagagctccgccagcaaattcttgatgaagcacatcttatccgctattctattcttcccggaagcactaatatgtaccaagacctgttgcaacattactggtggacaaagatgaagatcgaaattgctcgctatgtggctagatgtgacacctgcagacgtgtcaaatccattcatttgaaagctgccggtccattacagtcactaccaataccgacatggaaatgggaagacataagtatggactttatcgtgggattacccaggact

SEQ ID NO: 5282 - DNA, 451 bp, Zea mays
  unsure (1)..(451): unsure at all n locations
tctaaagggagaacatgtgttaggactaactgatgtcntatttgagaaagacataccttgagcagcgtgccagataggaaaacaggtggaaagtactcataaaagcaagaatgtgatgacgatatcaagaccactagaactcctacatatggatctcttcgggcccattgcttatcttaacatcgggagaagtaagtatggtcttgttattgttgatgattttttccacttcacttgggttttctttttgtaggataaatctgaaacccaagaaactctaaagcgcttcctaaggagagctcaatatgagtttgagctagaggtgaaaaagataaggagcgatagtggatcagagttcaagaaccttcatgtcaatgaatatcttgaggaggaaggcatcaagcatgagttctccgctccctacacaccacaacaaaatggtgtagtaaag

SEQ ID NO: 5283 - DNA, 425 bp, Zea mays
  unsure (1)..(425): unsure at all n locations
cttcatgccaacgtgggctagtcggcgattctcttatcctacccatattagncttagcagataagcaagtatcgagtttagctctattaaaatcaactaagtaaagctgaccctctaatactcctttaaatgctactgaatcatcacttcttctaaagacaggaacacctatatccgtaaaaagacaattgtaacccattttgcataattgagaaacagaaagcaaattgtaatctaaagaatctacaagaaaaacattggaaatagaatggtcaggtgatatagcaattttaccaagttctttgacaaaaccttgatttcattcccgaatgtgatagctccttggggatcatcgttttcctcgtaagaagagaaacatactttcttccccagcatgtggtgtgtgcacccgctatcaattattc

SEQ ID NO: 5284 - DNA, 450 bp, Zea mays
  unsure (1)..(450): unsure at all n locations
tcggcacttatttcaagcttacaacataattgttccttctttattatctctaaaggatattatgaggaaccgagaagctactggaaggattggaaaatgggctgcagagctcaatgaattntgtattgaatatgttcatagatcttcgattcggtccaaggcgttagcagacttcattgctgactggacgccacgggctcatgaggaagaaacaaataaagacgccgaagcatggacagtgttttgcgatgggtcttggggaaccttcngagcgggaacggctgctgtgttggtttcaccttccaaaggtaaaacttngtatgcggcaaaacttgattttagttgcacaaataacatcgccgagtatgaagctctgcttttgggtcttcggaaattaaaggcaatgggaatcagaagggtcatccttaaaactgantcccaagttatttc

SEQ ID NO: 5285 - DNA, 449 bp, Zea mays
  unsure (1)..(449): unsure at all n locations
nggatgaggtgtcatcatcatcatcatccgagctatcatccttgtcccattcaactaagtaggctttgccatctttcttcttgatatagaatttctttttcttcttgtcactttcatctttgcccttcttcttcttgcttggacaattcaaggcaatgtgaccgggttccccacactcaaaacattntctatcattgaaagcatttcttctagatgtttgacctcttctaggttgacctcttttcatcttcatgaatttattgaatttccttacaaataaagccatgtcaccatcactctcactttcattttcttcatcattgctatcttccttttcaattgcctttgaggccttggctttgagagcaatagattcatttttcaccttctttgccaaacttaaagcattcgcttgtgacttcttaaatatatcttgagtgagaatttct

SEQ ID NO: 5286 - DNA, 450 bp, Zea mays
gaaactcagctttaatgtgttgcatcaatcactcagaaggggagattgtttggcttttatcccttctgcgagctgtggtgattcggataacaacacatctaacgggctcacgagtttgcttagtgttgaacacgaaattcaacatgatgaacatacctgaatagtgtctaatgatcagtgaacaaaggtgcgacacaacgcttaattacatatgagacaatgcaaatggatataatatgatctctattttgtgtcgaaaatatggacaagacctgagaaactccttcctacctatgaccagaatagatgccaagtgatttttaggattggtctagtctaagaaaataagatttgaagaatcgtgaattggcttgacctattacagtccgtcctatttgctctatgagaatcaacttcacttggttgatcttgccgtgtttctacagacat

SEQ ID NO: 5287 - DNA, 445 bp, Zea mays
  unsure (1)..(445): unsure at all n locations
tacattaagagtaccataaccgagaagcatgttattatagttctataatagnagaaaaactagcagccgaggctcgattgagttgaggttaaagaacggaagatgattctgaatgctcggatctcttgactatnggccctgtttaaaagctaagtgtctttcgctttgataaaaatcacctatttaaattattgcaactataatctataaagacaaaaatacagtaaaaactgtataaatcagattaaaaccaatcgaacaagcctctttcgctgtgtatctatcacatcatatgttttatacggttagagttataaatataatccaattataaaactagttgcacagatgaagactaaacaatcacacgaatgtattaaacctaatttgttataattcgatcatgtgattctacggtaaacatttactaatcatgcactaatta

SEQ ID NO: 5288 - DNA, 430 bp, Zea mays
tatatgaataatttagatagtggtggaatgtctcattctactattataacctattccattagtgagattccaattcctcataatgaaagtaaataaatgggaccttatcgttttcgtattcatagaaaatatagaaacggaacgaaaatggatgagggtttattccgtccgttttttcatcccgtttttatttggattatacccatatatattctgtatttgataagtatgggacgagcctaatatgcattagtatataaactaaagtctcgtgtgtctttaggtgataaattatactacaagtggtcattgtaaccatcgactcttttcaatgacaagtggtctaaagtcttaaacaacattggatgtagctaaatgtacactattagtaaccaaacaacaaaagaatgttgcctctctatatctaata

SEQ ID NO: 5289 - DNA, 452 bp, Zea mays
  unsure (1)..(452): unsure at all n locations
gcagacacgacgaaatggcgctcgtcatcaagagcttccgcctttttctatgttatggagggggaaggactacaaatcccgctccaagaaagtttgctacaaatgtggtaagctcggtcactttattgcanaatgtccactatctagtgacagtgacaggggcgactactagaaggggagaagaaaggagaagaagagatactataataagaatggcggcgatgctcatgtttgcctggagtggaacttcgacgagagctccaccgacttctccttcgacgaggacgccgccaacattgccgtcaccaaaggccttctctttcccaacgtcagccatcagtgccttatggctaaggacagcaaaaagaagaccgttaaatccacatcctccactaaatatgagtcctctagtgatgataatgctagtgatgaggaagataactcacgtaccc

SEQ ID NO: 5290 - DNA, 463 bp, Zea mays
  unsure (1)..(463): unsure at all n locations
tactaagcttgcaaggttcttcatccncacatgtgctaaacggcgatgcctcagttatcccatgctagtcttagcaattaagcatgcatctagactagcctcctcttttgcaaaatcaactaaataaagtttgacgtctagtactgtcggcgtttcgaccccggggggttcctggaccgacgagtaaattgtcgccgcgtgtcccagcccagatgggttggcgcgagacagagcacagaggggggatacaaagagacaggcgtaaaaggggaaacccgcggccttcgtgtttgtcctgcgcccagatcgggtgcgcttgcagtanggggttacaagcgtccgcgtgggagggggcgagaggcctgcacgcgccgttccgtgcttccgcgcggncaaccttttcgtaagagagccctggacctttcttttatangcgtaaagagagggtccaggtgtacaatgg

SEQ ID NO: 5291 - DNA, 466 bp, Zea mays
  unsure (1)..(466): unsure at all n locations
tactaagcttagnaaacgaagccttcatgttccagaatatagttggagaacttctatcataagctgaaatagaagagcttagagagtatgccaaatcctgtggatacaaacctgtggcactcctcttcggaggcgttgatgatgaaaaattagattgtattcgagatcaaacaggagccaaagttatcagtactctgtccaagagtatcggcttcccgaagctagaaacagacatcagtcgctaccgacgacaacatgtcgttggtagtttattttattccaacttcaaggtgaactacttgtcccttaattnttattgtttctaataataaaaacatgtctgacgaaggttgttttcgtgcagagtatgctgttgagcaaagccttgcaaatgcagcaagattttgaagataagaagcacgaagttataattgaaaatttggaaagcagaataaaggagcaatca

SEQ ID NO: 5292 - DNA, 460 bp, Zea mays
  unsure (1)..(460): unsure at all n locations
ntatcaaatggacgtgtaaagtgcctccatcaatggaccaaccttgattgatgtctatgttgagcaacctcccggcttntaagatagtgagtaccctaaccatgtttataaactctctaaggcgctttatgggcttaagcaagccccaagagcatgatatgaatgcctaagatattttcttatcgctaatggcttcaaagtcggaaaagccgatcctactctctttactaagactattgaaaatgatttgtttgtataccgaatttatgttgatgacatcatatttgggtctactaacaaatctacatgtgaagagtttagtaggataatggttcaaaaattcgagatgtctatgatgggggagttgaagtatttcttacgttttcaagtcaagcaactccaagagggcaccctcatgagccacacgaagtacattcaagacatactcaccaaagttggg

SEQ ID NO: 5293 - DNA, 449 bp, Zea mays
  unsure (1)..(449): unsure at all n locations
tgtcacttaatgactatattngataatctatgaacttttttgtttctcaaccatgctagctagcaccttgtgagtagaaatcttctatttntcacgaacggttggcataagaatccacccatgaaatttgatctttaaggacagttctttatgataatcattcatgataatagtgaaattttaggagtggtgtaattatgtcaacgttctagagatggcttaatatatgaaccatctcaataaaatgggaaacgtgagagtgccatatacattacatgcactttcgattatagagatggtggtagaaccacagttgggacacaattacaattatagtacataaatacaatccatttattttattatcggctgaaagtctagaaaaaataaatacatagagtagtatgtaaaatgtaaataaatcattatattcccatacaatgaactgt

SEQ ID NO: 5294 - DNA, 453 bp, Zea mays
  unsure (1)..(453): unsure at all n locations
ctcagctgactcnngatccacacataatcctaatgcattttttcttgtctcatggaaaggcatcctccctggatgcaagttcatagaataacatacatcgcattatcaagatgaatacaatcaattcctgacctcgcgcgagtgctagaaaaatcactcgacttctaccgagatcctgattagcaagcagctactcgacctagcatactagtattcatctcaaaaaggaatcctaagttcatgcaactagaggttttaagcgactcctacacttaagtgcacatttcaatcctacaagcattaagtgtagtaaagtagcatataataatacagttatgcataaaaccggagcttgccttcaattgctggggctgcggggagatcctcaatagcagcctctgaagcctgctcctggtcctcctcttggacaggtacttgctcggcgatgaacac

SEQ ID NO: 5295 - DNA, 451 bp, Zea mays
  unsure (1)..(451): unsure at all n locations
ngacgggtgatgatgaagtgatgaagctgctgcanaatgttctatatatacttttgaattaactctgtaaaagatgttgtaatttatgaatcaaaaactgctctgtaaatatgtccataccttgtaatatatttttagcttctcctccgtgtatgaattgctttgatgtggacgaaacttgtacttttgagctgaaggcgaaaaacaccttcccttcttttcgtacacaacgaatcataaatctgcttcttttacactcgccgaagccttgtcattagagccgaagcaactatctgtactctatgacatgatgatgatgatcctacgaatgtctaaatgaatgtatatgaatccaatgaatgatgcgatgtaatgtgcaaatgaatgtccaaacacacgcttacgaagccacatccagactctgtatccccttagaacgactttggagtct

SEQ ID NO: 5296 - DNA, 445 bp, Zea mays
  unsure (1)..(445): unsure at all n locations
nttgaacgtactaagcacatgtcgggaaaaatggtaaccggtttacctattacctgagtgaagccgggcgcggactttatccctcacgcgacctgagactgggtctcccattctagatatggtgggtacaagtgcggccactgcacggcggcggccggggtcagtggagcattgtatgccaaggcggtgaggcctggacgcgaacggggaatcgatggggacggttgacatgtgtggggacggagtgccctgacatgtcgtgtgtttaggtttaccttgcaaggttaaaaactcgattcgaatcgtctgcttctcgcagctaatgagactgcttgatccattgtactgcattgagtaataagtgggaatgaggttacttacaaaagatgttggctgactaaattgcttgctaccatgaatggatagttaggtgctcatctagtct

SEQ ID NO: 5297 - DNA, 371 bp, Zea mays
  unsure (1)..(371): unsure at all n locations
taccgcatntgaagcatgatcgcttccgcttggtcttattcttgtctctttgaccattgcgaccctttagcaccgtcttgaatctctagataatgagggccatttcttctttattaagaccggccgcctcaatttgcgccaccctgctgggtagcgcctccttgctccttgtggcgttgagagcaaaacgttgcggctcggtgattggtccattcaaagcggcgttcacataccttgcctccttgatcatcattcgcccgctgacgaatttttctaagacttctttcggcgacattttggtgtacctgggattcttacaaatattattcaccaaatgaggatctagaacggttaaagacctgagccttaat

SEQ ID NO: 5298 - DNA, 431 bp, Zea mays
  unsure (1)..(431): unsure at all n locations
accatcaaactaagctctaaggagacactgaagtttgcttcgttcttttctataggatagaccttgtgcagctcgtctagcaggtaaacaagtgggaggagcgcatcacagcatgaacgtgatgaccacttcaagacccctggagctgctacatatggacctcttctgacccgtcgactatctaagcatagggggaagtaagtatggtctagttattgttgatgactattcccgcttcacttgtgtgttctttttggaggataagtctgaaaccccagggaccctctagcgcttcctcatgagagctccaaatgagttgagctcaaagtgagaagataatgagcgacaaccgatncgagtttcagagccttcaagtggaggagttcctttgagaggaagggatcaagcacgagttctccgttcctacacac

SEQ ID NO: 5299 - DNA, 448 bp, Zea mays
tatgaagattcttcatcccaacatgggctagtctgctgtgctttattcaacccatgttagtcttagcaattaagcaggtgtcaagttcagctctattaaaataaactaaatatagctgaccctctaacactcccttaaaagctactgaatcatcacttcttctaaagacagtaacacctacatccgtaaaaagacaattgtagcccattttgcataattgagaaacagaaagcaaattgtaatctaatgaatctacaagaaaaacattggaaatagaatggtcaggtgatatagcaattttacccaatcctttgaccaaaccttgatttccatcctcgaatgtgatcgctctttggggatcatggtttctctcgtaagaggagaacatcttcttctcccctgtcatgtggtttgtgcacccgctatcgatgatccaacttgagcccct

SEQ ID NO: 5300 - DNA, 459 bp, Zea mays
agagaataatggcaagagctcgtccatatgtaataatatattgggtgttatacaagcatggagtccgttctctattggtcaaatgtctatccagaaccgcaggtatagagctgatgaaagaaatacatgcagggcctgtgtggatctctacatcagatccatgacctttacttaggtaagggattttcgtcaagggattctattggcggaaaggcagcttctggatgcagcactaattagttcaaaatatgcaataggttgtcactaaatgtggcaagagatcaaaaaccaaccctcgtctctaacttaattaatacagcccacttggccattgccaagattgggccttgatttgctatgcccacttccaccaccacaagggaacttaagatatgttgtagtggcagtggaatattcttcttaatggatggatgcaaagcctctagccacaataacttc

SEQ ID NO: 5301 - DNA, 412 bp, Zea mays
  unsure (1)..(412): unsure at all n locations
tatcangaagactcgcaacattgaatagatgcatctcatgggtcatctatcgtagtctccccttcctcaaaacgttgagcggagccaaagacttctcctggggtcctgagcatgctgcaaccttataccatcccaaagtaataagagatcaaaattaataataaaaccacaatgtgatgcatatgacaaaataagtttacttccataagttaataatgtgagtgtccgaaccgctcatgaccgtgagcacggntgatatatcaattttacattctgcagaggttgcacatctttacccacaagccatgctacccatttgccaagggatctagaaattccattcatctctatcgaggaacgagacagtgtatcactatgacgcctgtccaaagttccactaattcgagaaaac

SEQ ID NO: 5302 - DNA, 465 bp, Zea mays
  unsure (1)..(465): unsure at all n locations
actcagcttcttaatgctctntctatatgaaacatccacctgtactgaatatttctccttccttagcctcatatggaagatgtataaaaagatgctgcataggattgaagaaacccggtgtaaatattcttttcaatttgcacaaaagcaccggtgcctctttctctagttgttccatcacatctcttctgatttctttagcacacaactgtctgtagaaatagctaacttcagctaatgttttccacacagctttggaaatgtacccacgaaacattacaggcatgagcctctccataattatgtggaagtcatggctcttcagtccattcatcttcattgtcttcaagttcacagatcttctataaccaacggcataaccatcagggaatttaatatccttcatccacttcatcacttctttacgttgcttaggtttcagacaatagtcagcttttggtttgc

SEQ ID NO: 5303 - DNA, 448 bp, Zea mays
  unsure (1)..(448): unsure at all n locations
ntaccaaatggacgtgaagagtgccttcctcaatggaccaatcttttattaggtttatgttgagcaacctcccgactctgaagacagtgagtatcctaaccatgtctataagctctctaaggcgctttatgggctcaagcaagccccaagagcatggtatgaatgcctaagagattttcttatcgctaatggcttcaaagtcggaaaggccgatcctactttatttactaaaactcttgacaatgatttgtttgtatgccaaatttatgtcgatgatattatatttgggtctactaacgaatctacatgtgaagaatttagtaggatcatgacacaaaaatttgagatgtctatgatgggggagttgaagtacttcttatgatttcaagtaaagcaactccaagagggcaccttcattagtcaaacgaagtatattcaagatattcta

SEQ ID NO: 5304 - DNA, 457 bp, Zea mays
  unsure (1)..(457): unsure at all n locations
tcggcccaacagcagagttcttttcggccgccagcgcacaggttctgaggcgccaggggcttcggnggaaggtttggagaccagccaagaaaaatatattgcatattctgtggtgaagacaagggccatactaccaggatgtgccatgttaccatccagaagcagaaggaaatagcggaagcagcagcgcaacagagtcagccgaagcaggtcatgcatactgcttcgtatcattcaccttatattccagaatatgtaggcaaccaccctgcagcttttgttgcttcggcgagccaaccccaagcatcttggcagcaacctccaccgtcaccgccgacccagcgaggacaacagccagaagggagtcagcacaatcatcttcagagggatttcagagaggggtccgaagctcgcacagtcaacaacacggtgccagagtcgaagcacatttattgac

SEQ ID NO: 5305 - DNA, 450 bp, Zea mays
  unsure (1)..(450): unsure at all n locations
tctntgccgagtgttgtggtcccaacactcgacaaagaacctcactttgctgatgtaacaccccgtccactcccggaccggcgatacttactcctaccagtcctctaggatcatagaccatccccacagaccaacacgagtcttttgtgtgcactttgtcctcactcgtgcacacccgagaagacttctcggtcgatcacccatcccaagattgctttggaccaagcatgcttaacctagaggttctttcgagataggcttccgaaaaagaagatacaccttgtttatattaagccttggaccaggatgtcaccatccactatgccaggatatcacaatccacccccttagaagatcgacgtcctcatcggtcaaacccaagctaggtgtaacaccccaagtgttactcacggtttctactctacacccacacctttgacctattatcac

SEQ ID NO: 5306 - DNA, 440 bp, Zea mays
aactcagcttgatagagtttgaggagatcttggcaaaaattgtgttcttggacttggtcgaagtaccttggtcattgcttcaataacaatttcatttggcaccgttggtgtcttggctttgagtcataaaaaccttcggacataggcctacaaatattcatcatggtcttgtgtgcactggaacaaggcctgagttaccggattcctctgaaacccctgaaagcttgtgatcataatatcgcttagtttctacaaagatgtaattgttcctgacctgagagaggaataccaagtttgagcaacactcctgaccgctatgacaaaggatttggtcatgacagtcgtgttgtcaccataagatgatatggttgcttcatagctcatcagaaattgctttggatctgagtggccatcgcacatgggtagttggggtggcttgt

SEQ ID NO: 5307 - DNA, 452 bp, Zea mays
  unsure (1)..(452): unsure at all n locations
ngacaatgaggagatggcgctcgtcatcaagagcttccttcttattctcaaacaaaggaggggaaagactacaagtcccgctccaagaaggtttgctacaaatgtggtaagcccggtcattttattgctaaatgtcctatatctagtgacagtgaccgaggcgacgacaagaaggggagacgaaaggagaagaagaggtactacaagaagaagggcggtgatgcccatgtttgtcgggagtggaactccgacgaaagctcaagcgactcctccgacgacgaagacgccgccaacatcgccgtcaccaagggacttctctttcccaacgtcggccacaagtgcctcatggcaaaggatggaaaaaggaaaaaggttaaatctaactcctctaccaaatatgaatcttctagtgatgataatgctagtgatgaggaggataatttgcgttccct

SEQ ID NO: 5308 - DNA, 428 bp, Zea mays
  unsure (1)..(428): unsure at all n locations
tctcccttatgacgaaagcacacaagatgaagacatcctatgttgattttagntaatgtcgaagctatcactagatggacagctttggctcgcaatgaagatgattaataataataatgatcggaagaggaaaagactacttagtccttaataacttgtattataatcatgtgtaaatgttcaagacataaatgtacttttcctcgggctgtgtctcgtgtctataaatagatgaacagtaacaccatattattcacgctggattataatcactctcccgtattctcaccttcaagtaagccggaggtacaaatgtaatatcaattttgttgaatattcatttacattttatggaacatgaatataaatgaattaatgatgatcccagtttcatctttatcctttcgcattcctattcatatattata

SEQ ID NO: 5309 - DNA, 428 bp, Zea mays
  unsure (1)..(428): unsure at all n locations
ttggcaaaagtattcatgcgacaaacatatctagcttctcttcttggtatgtggaacacgggcagacgtatctctagttacatttgttgctcttaaaccaaaatatattaaatgaatattatatctaatagacctgctcacggcgtgatcgaatcctggattcgcccctgtgtgggacaacctgaacgagggccgaggggaatgctacaggccaaagattaattatactggcttttcaacgttcacaagaggggaatatgaaaacacatcaaacttgcagatgctagaacgtaacgactgagatgtacgtggggttcccaccctaacttgcaagtgggctccccaatttcccttgaataaataaatcataaaaatactcttggagcagtcaaacacaaacagtgttatggatggctggngacactact

SEQ ID NO: 5310 - DNA, 473 bp, Zea mays
  unsure (1)..(473): unsure at all n locations
tattacggacactataaaactcagcttcaccaaatggacgtgtaaagtgccttcctctatggtcctatctatgtatagggctatgtngagcaacctcccggctttgaagatagtgagcaccctaaccatgtatataaactctctaaagcgctttatgggctcaagcaagccccaagagcatgggatgaatgcctaaaagattttcttatagctaatggcttcaaagtcggaaaagccgatcctactctctntactaaaacaattgcaaatgatttgtgtgtatgccaaatttatgttgatgacatcatatttgggtctactagcaaatctacttgtgaatagtttattacgattatggttcaaaaattccagatgtctatgatgggggagttgaaatatttcttaagatttcaagtcaagcaactccaagaagacactttcttcagccaaacaatagacattcaagacatact

SEQ ID NO: 5311 - DNA, 462 bp, Zea mays
  unsure (1)..(462): unsure at all n locations
tactaagcctctaagggagaacacatcttgggactaacaaatgttcatttttagttagacatggcttatagcgcatggcaagcagggaagcaagttggtacccatcatccacacaagaacatttagacgaccgacaggccgcttgagcaacgtcacatggatcaagcaagccccaagagcatggtatgaatgcctaagagattttcttatcactaatggcttcaaagtctgtaaaggcgatcctacactctctactaaaaccatttgcanatgatttcgttgtatgccaaatttacgttgatgatataatatttgggtctactaataaatctacttgtgaagaatttagtagcatcatgattcaaaaattcgagatgtcaatgatggcggagttgaagtacttcttaggatttcaagtgaagcactccaagagggcaccttcatcagtcaaacgaagtacat

SEQ ID NO: 5312 - DNA, 452 bp, Zea mays
  unsure (1)..(452): unsure at all n locations
ntctggatgccatcaaaacagcatataacaccttctctaattctgtatagattttctttgataaactgagaacttcagatacaaaatatactgtgacctgtttcctggcttggccatcaagcttctcctggacaagtgctgcacttaccgctgagtgcgaagctgccacatataataataaaggagcccctggcacgggtggagttaatgctgttagatctattaaatactgcttcaggtcttcaaaggccttctgctggattggtccccattgaaagacttcggctgacttcagcacttcgaagaatggtaagtttctctctgctgatctggatatgaatctattgagagatgccaacctttctgtcaatctttgggcccccttttttttgttggtggctccattcgaagtataacttcaatcttacttggaatggcttcaattccctttg

SEQ ID NO: 5313 - DNA, 459 bp, Zea mays
ggtgaagccaatcacaagtttgttgaagaatgacattaagttctattggtcttctaagtgcaatgaagcctctgaacaactgaagacactattgaccactgctccggtattagctcaaccggacatcactaaaccttctgacgtatattgtgatgcatcgggcagtgggctcggctgtgtactgatgcaagggggccgagtgattgcgtatgcttcaaggcagttgcgccggcatgaggagcactatccaactcatgatctggagctagctgctgtggttcatgccctaaagatttggcgtcactatctgctgggaaatatctgtcatatatatacagatcataaaagtttgaagtacatcttcacccagtcagagttaaatatgaggcaaagacgatggcttgagctcattaaagactacgaactggagatccattatcacccgggcaaggccaatgt

SEQ ID NO: 5314 - DNA, 438 bp, Zea mays
  unsure (1)..(438): unsure at all n locations
cttttagaaaagatataantttatatctatggtaatgggcttctttctctttctcactntacaagcattatagagcatattattcattgttcaacacctatcactcatgataaattaaaatataagtcttcatatgatttatgtgaaaaggtcattattattattaaacacctatttatggaaagatatggtatatgccttaaatgaacttttatattaaagacaatgaacaaacatctatcttttaatttcattaagaacacatttcctatattatattcaaagtatatatatatattaagtaacattttagttattactttattttaccctttaggaaaaactaaatgaattatataacatggactaaatgtgataaaataattaatcaagcctatataactagttatgaacaagtcgacaatatgtttgactaat

SEQ ID NO: 5315 - DNA, 378 bp, Zea mays
ctaagcttcaactgatgactgagttgggagtacattctaaattgcttgcttcctggatcaccgcagccttagcagaaatcatgtcaagaatggtttctccaccgacgccattgctaattggctacactgatgttcctttacgcatacacgatcgaagtgcttgcatgctcctcttcatctttggaatagatcagaatgtcgtcaatgaagaccactacaaaacttgtctaacttgggcatgaataccgagttcattaactatgtgaagtgggctggagcatttattaatccgaaagacataactagatgttctaataacccataccgcgtggtgaatgcggtcttgggtatatactcggctcgaatattgatctgatg

SEQ ID NO: 5316 - DNA, 413 bp, Zea mays
  unsure (1)..(413): unsure at all n locations
ctggggaggactctctcaagggagtccggcaacanacactggttgaattctcttcctccatcaagtcgcatcggagaggtgacaagaagaagatgaagaacgtggtctactacgagaccgactcctcgtcaccctccacatcaagctcctagtcgttcactacttctaagcgccatgagcgaaagaagtatagtaagatgcccctacgctatccccgtatttcaaggcgcgctctattactttccattcccttaggaaaaccaccatattttgatggtgaggattattgtacatggagtgataaaatgaggcaccatctaacctcactccacgaaagcatttgggatattgttgagtttggagcgcatgaagcaaaggtgggggacacggactacgactcggacgagggcacc

SEQ ID NO: 5317 - DNA, 284 bp, Zea mays
tctagacattggagctcttgagacgaagctaacggctaattgacttggcatatgttctaagaccatggaacaagtgctcagagcgcggaaagcttcgactttaataaaatatttcagcagcgcaccgatgcagtaccaatgaatgttgtggtcacttcttattgaccatctggatatatagtcctctaagtgaagaaagcgaaccgttccaccgcccatactgactgatcggtggattgacacacgtcgtaaactcttatttgcttttaataacaagctcacgg

SEQ ID NO: 5318 - DNA, 439 bp, Zea mays
  unsure (1)..(439): unsure at all n locations
tagtggttaatccttccttaacctagtatactgaggagtttattatttttaaacaaggtagttagtagctaagtatgtctctaattnttcttaccctcagtccaaaagtatttctatttttcctctatttatttagatttgggtagtatacttatttgaattaaaactctaaaagtattgcaggaatcaggttgtttattatttttcctaaatagttcataatattgaggacctaggaaaattggtttgaccaattttggttggataaaactcgagttatgaatttttcaagttctgcacttatttaaaagaataaatcttaaaggtttaaggaaaacaggtttgcaccgaggcccctgtggtttcctttaactaaatcatttaaacggtgcccctgcggaactgtgtccctgagtcacaaacatcacgaaaagcccct

SEQ ID NO: 5319 - DNA, 442 bp, Zea mays
  unsure (1)..(442): unsure at all n locations
ngaattgtctgtgaatgtaggtgaactacaagaccggtgggatctcttgtgttattgacagtggatgcacacaacatatgacaggcaacccacggatgttcacctctctagatgagaatgttgatggtcaagataaaatcacatttggagacaactcaaaaggaaaagtgcaaggacttggcaaggtggcaatctcaaatgacttatcaatatcaaatgttctcttagttgcacccttgagcttcaatttattatcagtgggacaactctgtgatcttggacttcaatgcttattcactccatcagaggttattgtaacaaaaatggatgatgaatcaatggtattcaagggatttagatacaacaacctctacttagtggatttcacttcaaaagatgcagacttaagaacttgcctcttcaccaaagcttctcttggatg

SEQ ID NO: 5320 - DNA, 464 bp, Zea mays
actcaagcttctagatatgtcgaggcgacaaatgatgagggtgaattggttttttctattgttgcagctaaacaacttcgtcggttgcccatcattcctcggctctcaaggatgttcctcaataaggaaatagctctgcatatgacgtggccaaagaatggtgtacgtctcgtcactgatccagacataatggtccatccgtcggacggtgatgcgtggaaggcatttgacgagtttgatcccgaattcgctaacgaccctatgagtgtacggcttggtctatcgacggacggattcacacctttcaatacccgtgcaagcccgtactcgtgttggcctgtcttcaatgtgccatataatcttcctcctgagttggtcaataaagaagagttcatgttccttgcactagtcatcccacgccccgagcatccagtgccaaagctgaatatgtatgtcgcccttta

SEQ ID NO: 5321 - DNA, 388 bp, Zea mays
ataaaatgcgacaagatttctgtgagttacacagactttgagcacagaaactattaatacatggtcaatcgtaacatggcgagtggtagaaataaatggctaataaaattgattaatgatatacatatatgagtgtggcagagattctaaccttgtcgccttcagtggtgtgtggcctgtcatagaatcacgtatatgccaatccctacgcattccatttttaccattagcactaacccatgtatttactttaacagtatcacccctacagcagaatagaggaacgacttataacgcataacagtagaacctagatgatgagggatcaacattcagttcaaagaaagttaacgttctaatatatggtagttaccatagaaaatgatca

SEQ ID NO: 5322 - DNA, 448 bp, Zea mays
taaaggatactattcaactaaagtaagaagaagttgataagagtgtcttgtatgaaaacttcctatccttcaggtgttttagtattctatccttagtgggatgtgccatagtatatgttaaattcctcgcaatacaaaatgttcaatagtgcatataactttgacatcaactatatgtgtgcactaatttaaaggaatttaatctatccttttgggtttcaagaatgatgattcattttccatccacatataaggattatcatttgtgaaaccctcccttgtgtttctaatgctctcttttctaagtgtttcaataagggccttccaagtgctttcaagatggattgaaaatctacggatataagagtcttagttgtttcaatcattgagtttcaattgatctcatatcaagtatgatcgaatcaagaaaagatgaaagaagttcatg

SEQ ID NO: 5323 - DNA, 432 bp, Zea mays
  unsure (1)..(432): unsure at all n locations
gaagtagtcttggcactnggcttattatattccaggntcattcccttgaaatctgggaaacgaatatttgggcacagatggatgtcctcaccctcccatcacctgatcttcttcttttcttagtctctcctggtgtggatctcttcttcttcggtttggatcatcttgatcagcaccctcccttgatgatccagcaccatcgtcctccaagtcctttgccatcatcttcgaacgcaactgcgccaccaccttgcccgtctcctccatctgcattgccaatatagaatgctcttcttctgccttccttgccaccgtaactgagagctcggcttgtccttccagccgatgctgtccagcttccaccgtatccaacttcttcaccactcgatccatcatcttcatcatctgttcccacttctcctctaccttctg

SEQ ID NO: 5324 - DNA, 452 bp, Zea mays
  unsure (1)..(452): unsure at all n locations
ctaagctagacgtctactcaggcatccagggttcgattcctgagcctggtatcaatttttattgctgcgacaataacggacggtgggcagaacgagggaggggcagaacggggtggtagcctaccccttacattcttcatagnatatatatatatatatatataaagaacagatagagtatatgtgaatgcatatccattttcaaattgtagatgtgcacctaaaaatacaaaaccagttataatgaataaaagtctcaccttatatgtacctctatcatctgatttggttggatgagtcctataaagtttaaactgtgggactatatagtggtatatatatcacatccctcaaatatgctctagtttggtactactggatgtcatgtatgaagcacgtagtaaccttcttaccttccccctgtntgacgcttttcggagcgccaaatactc

SEQ ID NO: 5325 - DNA, 449 bp, Zea mays
  unsure (1)..(449): unsure at all n locations
tcacacctctagactaactcggatgcatcactctctgctgtctgtgtgtataaaccagacctgaagacctttccaaccagggtcctggatgttgcatgtatcccgcactgttcggcgtggatctcatctaacagttgcttcccagtggccgaaagaatgcatttcatgaggactcctgttgcgccccttctgtacagtgcatccccaatgagggtgtagtgggctgactgccttgcgatgcgctgtgccgtanctttgacatccggttcctcttcattctttatatatctgatgatgggctccgtctagtcattagagtctgactctggctagctcaaaacgttgcactcttctgcttgatctgaggaaatgcttgggcgtggcacctcttggacgaaaactccatgtggaaactgggtccgactggatcctagttttgacaacgcgtc

SEQ ID NO: 5326 - DNA, 454 bp, Zea mays
  unsure (1)..(454): unsure at all n locations
tgtcatgcatattttgatccncgtctcttgatgggtccatcaatgttattcatcaaagatctaggaacccagatgtcctctgtgctagcacttggtaaactcattacctttctagcacaagttgcaattttggattgtctagttaatatgaatcaattgacaagttatgggcgggatagttaccaataagacaatccttacattgatgtcctttctttcggcatatgtagcaaaggcgatcttcatgtcttgaagatttcttctttacttgtttcttgcttgctacatcgttagtaaatattttcttttctaaactatgcctttttgttttatatagggacatgacttaactaaatgtcccttctcagagcantctaaagaatatttatcatccttgttaataatcaagccattttctttaatatagggacatgacctaatcaagtgcccattt

SEQ ID NO: 5327 - DNA, 389 bp, Zea mays
ccactgaatcacacctttgatatcctccctctcaaccaggtcattcttaacgtagaaccattgcttcatacatgaccttggccatttttcccgaaaggttgggatggggcgcctagcgctagaccgatatacgaaggaataacatccaaaattattatgatattgttcttttccagtagctttcatctgataaaaaaaactcatgaatattacaaaagcaatcgacatctggctccagccctcggctccttactacccagatgaaaactccaactctaactaaagcttcaggagtgtgctgatggataaatatctcaaaccttttcaggacctcaaccaataccttgtgaaggggaaaacacaatccaaccttcataaagcgtcggaaa

SEQ ID NO: 5328 - DNA, 430 bp, Zea mays
  unsure (1)..(430): unsure at all n locations
tgtgaaggttcttcatccccacatgtgctaagcggcgatgtcttattctttccatgccagncttagcaattaagcatgcatctagaccggcctcctcttttgcaaaatcaactaaataaaggttgtcgtctaatacacccttaaatgctagtgaaccatcacaccttctaaagacagacacatctacatttgtgaatagacagttatatcccatattgcataattgactaacagatagcaaattataaccaagagactcaactaaaaacacattagagatagagtgctcattagatattgcaattttacctaacccttttaccttgccttgattcccatcaccgaaaattattgaatcttgggaatccttattcttgacgtaggaggtgaacatcttcttctcccccgccatatggtttgtgcatccgct

SEQ ID NO: 5329 - DNA, 451 bp, Zea mays
tcacatctctggactaactcggctacgtcgctctttgccgtttgtctttagaaactagacctcgaaaccttcccaaccagagtccgggatgctgcgtgtatcccgcattgtccagtgtggacctcatctaaaagttgcttcctagtagccgaaagaatgcatttcatgaggactcctgtcgcgccccttctgtatagtgtttccccaatgagagtgtagtgagctgactgccttgcaatacgctctgcagcatttttgtcatctggctcctcctcattatttatgtatatgatgatcggctccctccagtcatcagaatctgactctgggtggctcagaatattgcactcttctgcccgatctaatgagatgctcgggcgcagtacttcttggacgaagactctatgcaggacctgagtctgactggatcctagctttgacaatgcatcag

SEQ ID NO: 5330 - DNA, 444 bp, Zea mays
  unsure (1)..(444): unsure at all n locations
tgggcanagtccacttgaactaatcttcggagaaacccgatcttgtgctacatgacaccagaaggtccaacccaacatgcgttggatgaattcagaattattgcagaacatatcagtacaagagacctggttcaggagtttttggctttcagagtttttcctagtttaaaagaatgggaaatgccgaagctagagggggagaagatagaaggggaacttgtgcggttaccttactattacaagtttaagaaatactttaaaacaccttgccaagagtggttggaaacaattgaaataatgtgcaatgaaatacttggcaattactccaaaaaagaagatcagttgatgactgcagccttcggcacccgtccgaagcgaagactgaatcgagtgctggacgccttgngttttgtataccctgactacgaatatctatataaaggt

SEQ ID NO: 5331 - DNA, 457 bp, Zea mays
actcagcttgagagttgatgaacttgtgagcctgagctgggtcttagtctgttctatgtggtaacattgcgtcccctcccttttatagctaaagggggcgcgtacaaagacactgaaccctgacatgtgggaccaaggacataacagagggaacacccggagcaactaatgccagtcaccttgtgcaatctccctgtgccccgatatctgctgcttgtgtagcattggcgtgcagcagaagcttccctggcaacgtacaagtcatgatgaccatggcgcgcacggtggtatgggcgtactgcccgctgtctgattggacaggccgtcgcctgtatggtggcctggtcgtcgtctgccagcggagtggacggggcacattaaatgccgaggcggcacatctcctgtcaacagggcggacaggtggcgcgtcttttccgcataaatgtagagatcgcgt

SEQ ID NO: 5332 - DNA, 443 bp, Zea mays
tctcctgaacaagcgctgcacttaccgctgagtgctaagctgtcacatataataacaaaggagcccctggcgtcggtggagttaatgttgttagatctatcaaatattgtttcagctcttcaaaggccttctgctggattggtccccattgaaagacttcggctgacttcagcacttcgaagaatggtaagtttctctctgctgatctggatatgaatctattgagagatgccaaccttcctgtcaatctttgagcccccttctttgtagttggtggctccatccgaagtatagcttcaattttacttggattagcttcaattccttttgttgaaaccaagcatccaagaaattttcccttctttactccgaagacgcatttttctggattcaactctaaaccagcttgtctgaaactggcgaaggtctcctgcaaatcagca

SEQ ID NO: 5333 - DNA, 418 bp, Zea mays
tgactacgaggaaccttacgctatctgatacacacatcctcttctggaaccacccttaccgtagaccttgcggacaagcatgacccacacgagcccttttgcgggaacatcggtttccaaccagcttgattcgcgaacaaagtctatttcgcttctgagcgccgaatgaataagaaacacctctactgagctcgctgtcgataaacgatttaatttgccaacggcgcccgaggccgccttgcatagttacctgttctgtgctgtgtggtccaccccacaatggagcgcgatcggatgtacgcctggtgatacaatatggcgcttggagctctttttctgcggcaactatactaatcacacgaggatgtgtgaagtaccacgcattattgtatttgactgtttgctgcaaattttacca

SEQ ID NO: 5334 - DNA, 398 bp, Zea mays
  unsure (1)..(398): unsure at all n locations
ctttagggtttctcactttgggttatgttntaccacttanattttattatgtgctaaccccctatccaaggttctatttgcaaaatgctataacattacatacttgttaaaatttttacctagtgaatgcactctatgtgtgtcaaacatatgcaatgccaatgtttatgatgccatgctcaagttttagttgcaataacactagaggtgttacagcctgtctagcgttggtgttggctgcacacagacaactcttttccttttctttacttcttcttttgtcactggttctagcacttatacaaacacaatattatacaaaattatatactaagcctataaacataccttatgctgtgatttgcactctttacacattttgccataagtactcattt

SEQ ID NO: 5335 - DNA, 459 bp, Zea mays
  unsure (1)..(459): unsure at all n locations
actaagcttgactatagcatntggagctagctgatgcaggtagatctcacacttatttaaaacttcaccgatcatttcgtgcaaaggaagccgaaatcctgctctgaagaatctcttaaacataacaacctcatcatcttttggcttgggaactacttcgttcccagcgaaccgtatcaattcatcatcattttccccaaaatattccaactttctcaataataccaaatcttctgccttaactatggattttccgaattcaatatggcttggcttgcttgggcttaaaatgccaccatcttcttcatcatcactaccagcttcggcaatagcatcatccttctctgggataactacttctccctcttgaacagctagcccagaacgtttcatcacctctgagatcggngccatctcagatgcttcagtactttcaccctcgtctattaatctagcagt

SEQ ID NO: 5336 - DNA, 468 bp, Zea mays
  unsure (1)..(468): unsure at all n locations
tatacatactcaagcttaccaagttgtacatanacctcattgtcactaaacgaacgtttttgttctgtgttatattcaatactccacaacctgtcgaagagctcggcaaagtcccattctggactaaagttgtcttcaccaaggggtgggaggacaacctgagggatcgaatagctgtcaagctggtgagttaccatgatgaccttgtccaaatactcttggaacaccagagaaatttgctccatcatgcaaagcaagttctccaatgctacaccaagtttggatgcatcaaaggacgtcaacccacgtcctggacggaattgttcccgagctacagaaaaaatcattgccgcaatccttagcatcctttcaaatgccatgatggtcatagagtccgctgaatccatacgatgtggatttacgtggttagtgtactagaacaggggaccatctactaacctccatgta

SEQ ID NO: 5337 - DNA, 385 bp, Zea mays
  unsure (1)..(385): unsure at all n locations
nttgaacgtactaagcacatgccgggaataatggtaaccggtttacttattacctgagtgaagccgggcgcggactttatccctcatgcgacctgagactgggtctcccatgctagctatggtgggtacaagtgcgatcactgcacggaggcagccggggtcagtggagcatttgatgccaaggcggtgaggcctggacgccaacggngaatcgatggggatggttgtcatgtgtggggtccgaatccctgacatgccgtgtgtttacgtttaccttgcaaggttaaaacccgattcgaatcgtctgcttctcgcagctaatgagactgcttgacccctcgtactgcatcgagtaagaagtgaaatgaggttacctgagataatt

SEQ ID NO: 5338 - DNA, 434 bp, Zea mays
  unsure (1)..(434): unsure at all n locations
acacataaaactcagctaatcccaaaatggcctttaggaccggcgggatcttctcgattattgcagccccgggaattaagctatccggttagattgagctatcatgaaatggagctcacgatcacaaagaagttcaggacttccggatgatggagccctgagcagattatatacggctngagaaaaagtttaccgtttacaagctactcaagaagtggacaagttcagtggacttcagaagcacaggaagccctagatgcactgaagaaattcttgacaaccccaccggtactgaagccgccacggcgagccacatcaactcaaccagctgaagatctgttgttgtatatctcttgcacgactcacgtggtaagcaccgcgttggtagtcgagcgagcagataaaggacatgcctacccagtacaacatcctgt

SEQ ID NO: 5339 - DNA, 461 bp, Zea mays
gacctatgaaactcaagcttctgagggagaacacgtgatatgcttgactaacgcacatttcttatattatagaccttgtgcagcttgccaagcaggtcaacatgcgggacgagcacatcacatcaagaatgtgatgaccacttcaagacctctggagctgctgcatatggacctcttcggacccgtcgcctatctgagcataggaggaagtaagtatggtctagttattggtgatgacttttcccgcttcacttgggtattctttttgcaggataaatctgaaacccaagggaccctcaagcgcttcctcatgagagctcaaaatgagtttgagctcaaagtgaagaagataaggagcgacaacgggaccgaattcaagaaccttcaagtagaggagttccttgaagaggaagggatcaagcacgagttctccgctccctacacaccacagcataatggtg

SEQ ID NO: 5340 - DNA, 441 bp, Zea mays
tagatgaaaagagcactaactcaagttctttcctgcggtgtgttgctttacttaaatgagtgtttaacttgaagcaacaccaaatgatatgagcaaagaacagtgcaagagaacttatagtaagggaaagcaaacaaatcacaagcaaaagcacaatgaacacgggtgatttgttttaccgaggttcggccctcgaaggcctagtccccgttgaggagtccacttaaggacgggtctttttcaaccctttccctctctcccgatcacacaaggatcggcgagctcttcttcttctcaaggatcactctcgatcccacaaggatcaccacactctttggtgtctcttgctagcttttacaagcctccaacactttggaggtagtttgaatgggagtcaaaactccacgcgcaaatgaacacaaagatgtagcacacactatc

SEQ ID NO: 5341 - DNA, 448 bp, Zea mays
  unsure (1)..(448): unsure at all n locations
ggcaccgngatcctggtgtggagaatggatcggctntggacatcttctgtgagagcaacctcatcgacaaattcttctgctatctcggtggcaaccaaggtacgtcgaggtcaaatgtaattattattctgtacttcaaaatgctttggtgtattttgcttttttgtgtgcctacaaaatgttgntttctgtctacttatctatatttttgttgacttatcatgcttcagtccctccttttgtttgatttactcttatttaatttactcaagcatttgcctatatcattttttataacaacattttgtgtttggatcactgaagccagncatcctctatcgttatatattattgcatggggnttattaatccatcatagntaaatatatttgactagacttgtttgcttataaagatttaacatgccctgttatgtcatgaattaata

SEQ ID NO: 5342 - DNA, 376 bp, Zea mays
ctaagcttgtgttttgatttgcgttctttgtagcgtcgaccgattatgttctttggcactatacctatgacacttaaaataagctagaaatagcttatttaaaggagcggtttggggaccttcccaatgaaggatgctctctcatacttgatgaaaatgaaatgtatacttagtttgaagagggcctatctcatgaaacttaaaaaaaattaaattttgactgatgagctaaatgtttgccatgattaaattaccttgcttaaaacttgaaattatgggaccttgatgcttatacttatggagtggaactcttgtcatgtttctacatctttaagttaacatgtttctatttgcatagatcccaaggggagatatt

SEQ ID NO: 5343 - DNA, 439 bp, Zea mays
  unsure (1)..(439): unsure at all n locations
tctaaagggagaacacgtgataggtctaaccaatgttcattttttaanagatagaccttgtgcagcttgtcaagcagggaaacaagtgggaggctctcatcacaccaaaaatgtgatgacaacatcaagacccctggagctgctacatatggacctcttcggacccgtcgcctatctgagcataggaggaagtaagtatggtttagttattgttgatgacttttcccgcttcacttgggtgttctttttgcaggataagtctgaaacccaagggaccctcaagcgcttcctcaggagagctcaaaatgagtttgagctcaaggtgaagaagataaggagcgacaacgggtccgaattcaagaaccttcaagtggaggaagtccttgaggaagaagggatcaagcacgagttctccgctccctacacaccacaacaaaat

SEQ ID NO: 5344 - DNA, 444 bp, Zea mays
  unsure (1)..(444): unsure at all n locations
ggggagaacagaataaatcaagactaaccggccacctaccgtcttattttntcccttccagctgctcaatttcttttcaaactttatctctatggttttccaatcactattacttaactttctataatgcactgggatccccaagtatctgaaaggaaagccgccttttggcatctaaatagagagagatagagtgtttcttcctcctcagtcaaaccaaaaccaaaaagctcacttttatgataatttatctttaaccctgaaacttgttcgaaagttatcaataagagctttaaatttgccgcttttgctaagtcatgttgcaaaaaaaggacggtgtcatccgcatattgcagaatggataaacctccatccactaaatgcgggatgagtccttcgaattgaccctcctcttttgctctatttatccaaatagcaagcatg

SEQ ID NO: 5345 - DNA, 453 bp, Zea mays
taatcctgagaagtgtgtcttcggggtgccccgaggcatgctcctattgttcatcgtctccgagcgaggcatcgaagccaacccggagaagatcgcggccatcaccagcatgggacccatcaaggacttaaaaggggtacagagggtcatgggatgcctcgcggccctgagccgcttcatctcacgcctcggcgaaagaggtctgcctctgtaccgcctcttaaggaaggccgagtgtttcgcttggacccctgaggccgaggaagccctcgacaacctgaaagcgctccttacaaaggcgcctgtcttggtgcccccggcggacgcagaagccctctcggtctacgtcgccgcgaccactcaggtggttagcgccgcgattgtggtcgaaaggcaagaggaagggcatgcattgcccgttcagaagccggtctacttcatcaacgaagtgct

SEQ ID NO: 5346 - DNA, 428 bp, Zea mays
  unsure (1)..(428): unsure at all n locations
gctttntgannagctggactacgatttccctgagcagctntgacgttatttgctgtaaatgtntgaagtctaccttcatcaacttacccccgaagcaattataaggctgaatatcttcgtgtgggccatgagaagccaaggtctggagcctgatgcgaaaagtttctgcaacatacacgaattatcatacgagacaaaaccctagggtaaggaacaggatcacaataattctggctgctacagattcgtttctcgatctgggtcaagctgtcccgtgccaacatttctgaagagatggcccggcgactggatgacagaatggttttatgtgaagaatgacctgtaagcacgggaagatattataggtatatatatgtgccctatttggcaaaggttcggcctgcgaaggccgaaggttgagatgaatg

SEQ ID NO: 5347 - DNA, 447 bp, Zea mays
attgctaactgtcctgataatgaaagtgaccatttatatgtgaacacaaaggagaagaagaaacactacaagaaagccaagggcgaggcgcatctgggcaaggagtgggattctgattgctcctcctccgactccgacaatgagggactcgccgccaccgccttcaacaaatcggtcctcttccccaacgagcgtcacacgtgtctcatggctaaagagaagaaagtaagtactcgaaactctacttatgcttcttctagtgataatgattctagtgacgatgatgaaatagactattctagtgtatttaaaggtctagatagaattacaattggcaaaatcaatgaattaattgatgcattgaatgagaaagataaactcttagagaaacaagaggatttattgtatgaagagcatgataaatttttagaagctcaaaaatctcat

SEQ ID NO: 5348 - DNA, 450 bp, Zea mays
tgaagctaaatggggcattaatatgtccttggtccttgtctctctaagagtcatatgtcttgaccactagactactagtgatgataatttgtgatagaaatatgaagatcttgtagagacctgttgtatcctctctactcctaatgatttattcgtatgagagcagtaatatctgttgttgaaaatggatcctatgcggataccaatattgtttcgctcttgcctagcagctatcatcatttgctttatcaaaagctagttatatggtgattttttctagataaaatgaattcttggccttgtatgttctattccaaagcttctctttttgctgaataatgaagagatcgaaataatgctatatagaacaatttgatatataatatgaggagaaatgtttgccctgctggcaacaccataaataattaattgttggtatatgttctctct

SEQ ID NO: 5349 - DNA, 455 bp, Zea mays
actcaagcttctcctgaacaagtgctgcacttaccgctgagtgcgaagctgtcacatataataacaaaggagcccctggcgtcggtggagttaatgttgttagatctatcaaatactgtttcagctcttcaaaggccttctgctggattgtgccccattgaaagacttcggctgacttcagcacttcgaagaatggtaagtttctctctgctgatctggatatgaatctattgagagatgccagccttcctgtcaatctttgagcccccttttttgtacttggtggctccattcgaagtatagcttcgattgtacttgggttggcctcaattccctttgttgaaactaggcaaccaagaaattttcccttctttactccgaagacacatttttctggattcagctctagaccagcctgtctaaaattagcgaaggtctcctgtaaataacaatgt

SEQ ID NO: 5350 - DNA, 452 bp, Zea mays
  unsure (1)..(452): unsure at all n locations
tctatagggagagncacatttgagactaaccaatgttcatttttagaaagacagggtctgtagcgcatgtcaagcgggaaagcaagttggctcccatcatccacacaaagaatatcatgacgaccgacaggccgcttgagctactccacatggatttattcagcccaattgcttacataagtatcagtgggagtaagtattgtcttgtaattgtggatgattattctcgcttcacttgggtattctttttgcaggaaaatcacaaacccaagagaccctaaagggattcttgagacgggctcaaaatgagtttggattgagaatcaaaaagattagaagcaacaatgggatggagttcaagaactcacaaattgaaggctttcttgaggaggagggcatcaagcatgagttctcttctccctacacacctcaacaaaatggtgtagtggaga

SEQ ID NO: 5351 - DNA, 336 bp, Zea mays
  unsure (1)..(336): unsure at all n locations
gacaccanannaaactcaagctggagtnttcgccaccggaaccatatcgtcgcgtatcgtaacttatatgttcagtccactactacagcgccaaaactcatgttcgagggcggctacagcgcaattatcgttggcgcacgtcacccattcaaaaaacacgtgtcggggtgcatacaaagcaccagttaattgtacacacggaaccatatcattattgttcgcaacgaacatgcccaatccactactctatgtccaaaactcatgtctggggtggatttacgcaaattcatagccggacgtcacccattcccgaaacgggtgtcggggtgcatacaa

SEQ ID NO: 5352 - DNA, 452 bp, Zea mays
acacatgatactcagcttctaagggagagcacattatgggactaacttatgttcatttttagaaagatagggattgtagcgcatgccaagcacggaagcaagttggtgttcatcatccacacaaaaacatcatgacaactgacaggccactggagctcctccacatggacctatttggcccgatagcttacataagcatttgcgggagtaagtactgtctagatattgtggatgattattctcgcttcacttgagtattctctttgcaggaaaaatctcaaacccaagagactttgaaaggattcttgagacgggctcaaaatgagttcggcttgaggatcaagaaaattagaagcgacaacgggacggagttcaagaactcacaaaattgaagctttcttgaggaggagggcatcaagcatgagttctcttctccctcacgccaaacaaaa

SEQ ID NO: 5353 - DNA, 448 bp, Zea mays
  unsure (1)..(448): unsure at all n locations
tggaggcgtcaattggttgcctacttggtgtagactcctccttctnttcctccgctgccttgaatgcgacggagtgtgcctcggatgtggagggatcatcaagctcgttgatcttcctcgagccttcgatcatgcactcaaaactcacaaaatttccgattacttcctccggggtcattagtgtatatcttggattgccacgaattaaatgtacttgagtggggttaagaaaaataagagatcttataataaccttaaccatttcgtggtcatcccatttcttgctccggaggttgcgcacttgatttaccatagtcttgagccggctgtacattgttttgtggctccttccctttacgaagccagaaccgaccgagctccccctcgatcggctcccgcttggtgatctttgttagctcatcttcttcgtgtgcggcattgagcacat

SEQ ID NO: 5354 - DNA, 441 bp, Zea mays
tggggaaagacaccgaacctaaagtgcatgtcttaagtgaatgtctttgtttttcggacggaaaaccggaggaggcgcgcggctactgtcggtaaggctgttctgccttgcgtttgggctgaaaacgatgggttctccatggcgcacgggccgaaaattgatgctggggcacgtaccccgaaataaactaagtccaagcatgtggtaagacaccgaacctaaagtgcatgtcttgagtgaagggcacggtggaactgatggaaaactggaggaagcagtgctgctcccggcggcatggctgttttggcttgcttttaggctgaaaacgatgagttctccatggtgcgcgggccgaaaactgatgctcgggcactaccccgaaaatatagctagtccatgcatgtggaaagacaccgaacctaaagtgcatgtcttgagtga

SEQ ID NO: 5355 - DNA, 443 bp, Zea mays
  unsure (1)..(443): unsure at all n locations
ntagggtaaaagtcatganatgaccttaagaataaacttgaattatttttatacccctgggataccagaaaccctaattgaaaccctggaaaaccctgaaaccaaaccctatggacctaagtgtaaaattagtccactnttgggctaaagtgcaaaaaccaagtcaaataagtattttaagttatttgggtcacttatatgagaatttgcaatccaaaacttgagatttggacttaagtgcaaaagtgccccacttaacctttttggggttaagtctggattttagtgacattggctcaactttggggctttgtaacttacaaagcatatggtttttaccctaggtcaccacatcaaagttgaagacccattataggagaacaatcttgcttaaggttgtgagcttatttgttaagaagaatttatagataaccaagcctaaa

SEQ ID NO: 5356 - DNA, 347 bp, Zea mays
  unsure (1)..(347): unsure at all n locations
actcaagctggaagccanggtaagnagcataggctaataacatgcgaattgtcttattcctatctactggtgcataggctacaccgaaatccaaaccttcgacttgagagtatcccttggtcacaagtcgagcttcgttccttgtcaccacaccatgctcgatttgcttgttgcggaagacccatttggatcctacaacattatgattatgacgtggaactaaatgccatacctcatttctagtgaagtagttgagctcctcttgcattcgccccacccaatccgaatcttgtagtgcttactctaccctgtgtggctttataaaggaaacaaaagaataatgctca

SEQ ID NO: 5357 - DNA, 458 bp, Zea mays
  unsure (1)..(458): unsure at all n locations
nccaagcaatacatcacacaggggagtatggtatcacgctccgttgattctgtaccactctaaaccctcgcgtgctctcatgcgtagatccaccagcctagtaacaagcaaaacacttaggcccctcctctctttaggatatagggcgggtgcaatccgccacctgaccggggagatattctccacgacatttggcgcaccaggtacgggcctaagcttcgagttttagctagtattctcgctcagcatgatggtgcggatcatcgagcactgcgccgaaacttcggaggatttcgtgatggagcatgaggttgcatcctccgcaccaagagtgcccgaccgccccgactctgggactgctggtggacacgtcgtgccacagcacacgctggtgcaagcgtcccggactccgtctatggcagtgcctaccgcgcttgctgcggctagagagatgctac

SEQ ID NO: 5358 - DNA, 256 bp, Zea mays
  unsure (1)..(256): unsure at all n locations
tcggggcagcaacaaagcttttccggccgccagctccaagaagcagatgtgccacgggctctggaggaagatatggngatcagcccaggaagatctactgcctattctgtggtgaagataagggccacaatacaagaacgtgccatatcaccattcaaaacaaanagaaattgcagaagctgaagcccggaaaagtcaaccaaagtatgttctgcacactgcttcgtgtcattcaccctatataccagaatatgtg

SEQ ID NO: 5359 - DNA, 428 bp, Zea mays
  unsure (1)..(428): unsure at all n locations
naactcaaaaaaagnccctgggagcaacataacaaagactatatatcacacacgagaatatacgagtggtgcgagcaaaagaaaaggaaatgtatacaaacttccaaactattatatgataaacaatctgcaagatgatccttgggcatcgaagatagtccaagctcaagctacggatagcccattttatccatcgtatcgcggcacacgtcaatttctctgatatcccgaaggcaatatagataaccatgctcagcatttcctccgtacacaagagagcctggaggatatgttaaatctttggtataatgccgaacttcagcaatctgctctttagttaatttaccgcccgaagcgcgaaaaataatgtatatgtgacttgtgagtggcactccttcgggtgatggaaactgccctccctgataatc

SEQ ID NO: 5360 - DNA, 441 bp, Zea mays
  unsure (1)..(441): unsure at all n locations
aagcatattatggcacccaacgctagaagggaccatcattgttagtcaacanagatctatgaacccaaaagtcctttgtgttagcactatggaaactcattacctttctagcacaagttgcaattttgggtcttctatttacatgtgaaataattgacaagctacaagtgggatagttaccaatgggacaatccttgcattgatgtgccttctttcggcatatgtagcaaaggcgatcttcaagacttgaagattacttctttccttgtatcttgcttgctacatggttagtcaatactttcttttataacaatatgcctttttgtttcaaattgggacaagacttaattaagtgtaccttctttgagcacttgaaacaaagtttatcatccttgttaataaacaagccatttttaataaagggacttgaactaatcgagt

SEQ ID NO: 5361 - DNA, 372 bp, Zea mays
tgcattgcatgtataaattcctagtatagcatctaaggcttgtttaacctagtagagaaaccgccaacaaagcgagtgagaaagcttaactcgggccaaacttgacaagccttagtgctaagctctcagcacttaaaatcttactctctatgcaattgatggctcttgaaatatgcatgaggtactgcacttagggggagtatacaaaactcatatcactcatgaaaacccctagcgcaagccaaaaagcagattttcaccatttgcctattttctctaaaaaatatctagcctatggcgaaatatttcgaatagtatatgagggtgccaatactctgtcccaacaagcgtcattttgtgagattataagtt

SEQ ID NO: 5362 - DNA, 441 bp, Zea mays
tcagccgccgctgctgcgcctcctcggccagtgaggccacgtgctcccgggccgacgaagcttcttcttgagccgactccacctctgtccacgctgacaccgctgcctctggctccagctcatcgcagaacagccgagggtgccttaactgaacaagggaagccttaagcggcaaggccgaccgagtcgagggactcctacgcctctgggatatggatacctcactcgtcaccttccgcacagggcaactcacacttggttaagcggctcagctagccaacaggcgagtccaagtgctcaaaatgaagaagaaacctggtattacactaaaatacccggatggtcagacctcgatagtcacaatgaacacacaccggcactcaaggtgccattacaaacggaactccggttccactcccgcgggtatcaacaacctccaca

SEQ ID NO: 5363 - DNA, 445 bp, Zea mays
tggtgtatcaaccaaatctgctgctgacaagctgaagtttggtctattcacaatctttccgtgcgtacaaccagcattcagaaaagcggtagctgtgtctcgagaagctaccatggcgcagaagtcggcatgcccaccaataacttcgtcaagagcatcaacctcaccttcaatatgttccaaggtgctgggcaggttatcggctgaaggtgaaattttttcagaactggctccgatagagtgaaatatgtccttcagccgctgcacgcatcggctgccgaaatatatgcatttctcttggagatccttcaatgatttttgcaaatttgaatttttctcgacctcagtcttgagacttgcttcaagcttctccttttcttgctcatatttttctgactttttgagtaattcatcctttaaactgtcatttttggctcggacctca

SEQ ID NO: 5364 - DNA, 438 bp, Zea mays
acactaagaacactcaagcttgaaggcatggtaagtagcatagagccaataatctctggcatgtttcaagcctcgcaccgggcgcataggtgtcaccgtattacaaacctttaacttgtgagattcccttggccatcaatcaagatctgttccttgacaccacaccatgctcatatcgcttgttgctgtaaaccacaattggttctacaacattttgattatgacctgttaccaaatgccatacctcgttcctactgaagatgttgaccaactcttgcatcgccacctaccaatccgaattttgaagagcttactcttccctgtgtggcttacttcacgaaacaatagatcaatgctcacaaacatgtgcatcacgagatctattggttacccccttatgaatatctacgaggatggcgtccccagggtgatctcccc

SEQ ID NO: 5365 - DNA, 229 bp, Zea mays
  unsure (1)..(229): unsure at all n locations
atcaccgttntccggtatgccattatggttgccttttctggggcccctagatcgacgtggaaacattcacgacttgggccgcagtcctcatcgccgaagctatggctaccgtcggaacaatcggaaaggcagtagtcacatgcggtcatgaagtcccgcatggcactggggttaccgagtccggagaaatcccaacaaaagtcgggctcgtcatcttcctcggaacccg

SEQ ID NO: 5366 - DNA, 377 bp, Zea mays
  unsure (1)..(377): unsure at all n locations
agctntatcaaatggacgtgaaaagtgccttcctcatctgaccaatcaaggaagaggtctatgttgagcaacctcccgactntgaagatagtgagtatcctaattatgtgtatagactctctaaggcgctttacgggctcaagcaagccccaagagcatggtatgaatgcctaagaaactctcttatcactaatggcttcaaagtcggaaaggcggatcctactttatttactaaaactcttgacaatgatttgtttgtatgccaaatttatgttgatgatattatatttgggtatactaacgaatctacatgtgaggaatttagtaggatcatgacacagaaattcaagatgtcgatgatgggggagttgaagtac

SEQ ID NO: 5367 - DNA, 470 bp, Zea mays
  unsure (1)..(470): unsure at all n locations
agcttctgatctttccttaatgggataaatataatcgtagcgatattttcatctatgaaggttatgaacgagttaaacgcatctactgtcctaattgaaaaaagaccacaaatatctgtatgaataatttctaacactctcgtactatgcttaacatttttcttaatctgcttcgcaaatttacccttaatgcaatctctgcattgctctaagtctgtgaagtctagggaatggagaattcgttccttaacgagactctctattctccccctcgaaatatggcccaaacgatagtgccataatttcgacgagggttcttcatcactttgntctctttttcttgccactgctggctggaatcgtttcttgtatatctaatacattaacaacatcactttgcgaaagtaaataaagcatatctcgtcngatggtgagaccaacatctttaatatcaaactgaataacacact

SEQ ID NO: 5368 - DNA, 259 bp, Zea mays
agtaacaggggagaccatacacagaagtatgacccatcagccctgagcgtcattgacctttcgcctgcgcctattaactagggaagaaatgttagattgggagacttccctcattggttcttttgagatagctgaaccaagaccctcaacctttatgaagctaaacagttgactcagtaaaaatagacacatgattagtcagacctaatgagagtttgagagaggatcaccatttcctctccacaacaatggtgtaaga

SEQ ID NO: 5369 - DNA, 383 bp, Zea mays
  unsure (1)..(383): unsure at all n locations
agcnnttggattgaaatgattaatccaagaccgttctgttgacttgcacgagaaaggagtctcggtgtagtgtctctgcctgagtcgattaaggaccgtctcgatgtaggcttgatgaccgaggaccctttaactggtcacatgccttgtcatgggtaagccttgcctcgggcagactaaggccagaataagataacacgcaatgggcatggagcggtggcgagagtagcgtgtaccctccgtggcaagaggctggacggtggtgtatctgtgctctcggttgacgtgaacctgatctagtcttaagaaccccggtggcgggttgacatatgcaagggttaagtgctacatatgtcgtgtgattggagatcctcagctgagta

SEQ ID NO: 5370 - DNA, 367 bp, Zea mays
  unsure (1)..(367): unsure at all n locations
agcttaccctgtcccatntccagtgcatgtggttagttaagatagtccttgatcatcaggcctacatacgcatccaatccttaactaacctgggtagaacatcacctgttcctagcccaagtcccgatttaagtacttccatccttaggattgtttatgttcctaggatgaaaagagcatcaaagggaactttgtagtaagatcccaccacgctctcaatgaaaatattcttgcaggtagaagccatctttcctcaggataacccctgagcaaggccttaacgcaaaagacaacctctatccacaagatctgagcanggcctaagcgttttggtaatcatattttgatacttcatcttgagtatcta

SEQ ID NO: 5371 - DNA, 290 bp, Zea mays
ttgtgcagcttgtcaagcacgccaacaagtgggaggagcgcatcacagcaagaatgtgatgaccacttcaagacccctggagctgctgcatatggacctcttcggacctgtcgcctatctgagcataggagggagtaagtatggtctagttattgttgatgactcttcccgcttcacttgggtgttctttttgcaggataagtctgaaacccaagggaccctcaagcgcttcctcaggagagctcaaaatgagtttgagctcaaggtgaagaagataaggagcgacaacg

SEQ ID NO: 5372 - DNA, 457 bp, Zea mays
  unsure (1)..(457): unsure at all n locations
agcttatcacgaggaggattctagacggataaatatatcananatcttaactgattaggagatatgatcgagatcctaataaacatggcataatggcaagatccacatagataaggaaaaacatctacaaagatatagtttaactctattagtttgggataaactcagttaccatctccatcttatatctaacccagatactcatcttgtaaatcattgtcccttctttatctataaaaggagacctgagggaaccctatgatggcagatcatcatcaaatcataacacatccatagaatacaaataccatgccaaacaggacatagggtattatctcatctcgagagcccaaacctatataaatcttcatgtcttccatgcctctaccttcaactntcgattacgtgaattaccacatatattcactatcaaataattaagagacgaatctgaata

SEQ ID NO: 5373 - DNA, 441 bp, Zea mays
  unsure (1)..(441): unsure at all n locations
gagtgccatcttaatgctttcttgatagctattattatatgaaaattccgctaacgacaaacattcatcccatttttgtgggaattccagaacacatgcccgcagcatatcttcaagtatttggttcactccctcagtctgtccactggtttgaggatgataggccgaactgtggagcaatttggtacccaaggatttatgaagtgcttcccaaaacttggctacaaattgaggtccacgatccgacactatggtttttggaacaccatgcagactaagagtacgagcaatgtacaattatgcatagacagtaaccgggtgatctgtcttgactggaagaaaatgagcaattntcgtaagccgatcaattataacccagatagaatcatacccttntgtagtcctggggtatcccataatgaagtccatactaatatcttc

SEQ ID NO: 5374 - DNA, 383 bp, Zea mays
  unsure (1)..(383): unsure at all n locations
agcttaaggacatgtnggtgactagtttccaatgcttttagatgattccagtcacaactcaggccctgttccaatgcacgcaagaccacgaagaataccttcaggcatatgtccgaaggttcttgcgactgagggcacaagcgcctacagtgcccaatgagattgtcattgaggccatgatcatgggtcttcggccaggacctactgctcaatatttcgccataaaacccccatagactctggagaagttgcttcaaaagatggatgagtacatccaggatgacaatgactctcgccaaagaagggaggaagcttacagattctctgagatgaccaggggcttcggtggacaaattcattcgaggcatgtcaggtcgatccac

SEQ ID NO: 5375 - DNA, 393 bp, Zea mays
  unsure (1)..(393): unsure at all n locations
gcttgagtaccattgctagcaatgttgtttgttcttttagtgcaagacttataccacatatgagggcttcatactatgcttcattattcgagcattcctccttcatcagagagaaggaatgataaattgtttcaccttatggggttttgaatactatccctgcgccagcccttctcctttgagaaccatcaggatcagtctctatacgagacgctccatcaaaataaagctcccatggtgactctatgtcgatggtaaaaacatccttgtcgggcaagtctatcaccaacgtcgaatcatctagcacaagatgagtagcaagaaaattagcccaggcttgacctctaattgctntttctggcacataagtaatgtcaaattccatcatgaata

SEQ ID NO: 5376 - DNA, 347 bp, Zea mays
  unsure (1)..(347): unsure at all n locations
agcttaacggctcctanggcccttggggctataaaagggacccctaggcgcctcanacaagtacacaaatgcagccaacaagtccatacactatttggatcaattctttctctccctctcttgggtatctctctagtttgggtagaggcgaagttataagcctttaaagagaggggaagtgctgctgagagctagagcaaaatcttgagcgcattgttactctgtcggagtgctgtcaggaagattgtagcagccacgacatcgttgtaactgatatcaacatagtggaaggctctatctattgcaccgacagatctgagcaaatggacgaaggagttgaaatagac

SEQ ID NO: 5377 - DNA, 260 bp, Zea mays
agcttgttctgggcctagcaaattacctccttattcttgatcagctcaacctgtgaatctgcaatttgcttctctatcacttcaatattggttagcgccacccaaatagaattgtcatgctctatcaatgcttttctaaatgcctccctttcagattcgtcagggagcgatgccgcaaagacaaccaatgatgactccaatgaactaaccccatatgggatgtctcttttagtatttgtggctcgtcttggatcagatta

SEQ ID NO: 5378 - DNA, 313 bp, Zea mays
agcttggtgaagggacatcttttatctcggagtcttgacagactgctactatcgaccgaagcgccaaagaatcggctgaagtgccaaaggttcctgcatccgaatcggcagaagcgccgaaacatactgccgaagccaaaggaaaggcagtcgaagagccagaccgagaggaaatgacaggaccaccaaaaatcttaagtccgccaccggagctagaattgccgaaggtgtcaaaagctcctgcaataactccaaagaggaggaggatggcaagtgtgctggatgctgtcatggagtcaacaaggacattgac

SEQ ID NO: 5379 - DNA, 352 bp, Zea mays
  unsure (1)..(352): unsure at all n locations
agcttgaaatagtgccgaagctttctggatgttatcaagacagcatacaggaccttctccaattctgtataatatttctttgataaactaagaacctcggatacaaaatatattagggcctgcctcttaacttggccttcaagcttctcctgaacaagtgctgcacttaccgctgagtgcgaagctgccacatataataacaaaggagcccctggcgtacgtggagttaatgttgttagatctatcanatactgcttcagctcttcgaaggccttctgctggattggtccccattgaaagactttggctgacttcagcacttcgaagaatggtaagttctctctactgatct

SEQ ID NO: 5380 - DNA, 343 bp, Zea mays
  unsure (1)..(343): unsure at all n locations
agcttgacaacgatgcacatctgtttcttgctctttactagctgngctactcttcaatttcattcaaacgacgactgtcaattactacttccaagtttgttttttagccaaattacctgtatccgcatatacagtcccactgactgtcgattgctcggagacttttttcctaaagaaaatattccgtagaaaatttgaattctggaggtccgatcaagttgcaatgaactactgaacgagagcgctgagcatcgcgataagatgcgctgcaacctcgtcagtttgcggcggacaacacgttcccctcggccctcgccgactcctttcgtaaaatctccggggt

SEQ ID NO: 5381 - DNA, 428 bp, Zea mays
  unsure (1)..(428): unsure at all n locations
agcttgtcagatgatccgaagcttatcgaatgatgatgaagctganaaccttgttgtgaacaaactctaganaaactcttgtattatccttgtaaagaatattgtaatttaagaatcggatactattctgtaaatatgtccataccttgtaatatatctttacctttccgtccatgtatgaactactttgatgtggacaaaacttgtattttttgagccgaaggcgaaaaataccttcccttcttttcgtacacaacgaagcataaattttgttcctttcctttcgccgaagccttatgcttagagctgaagcaactgtctgtatctgtatgatatgatgatgatgatcctatgtatgtctaaatgaatggttatgaatgcaattaatgatgtgatgtattgtgcaaatgaatgtccagacacacact

SEQ ID NO: 5382 - DNA, 388 bp, Zea mays
agctcgaagctctggtaagtatcatatgctaataatatgcgaattgactcaagcctagctacgggtgcataggtttcaccgaaatccaaaccctcgacttgtgaataccccttggacacgagtcgagctttgttccttgtcaccacaccatgctcgtcttgcttgttgcggaagacccacttggttcctacaacattttggttaggacgtggaactaaatgccatacctcgttccttgtgaaattgttgagctcctcttgcatcgccatcacccaatccgaatcttgaagtgcttcctctaccctgtgtggctcaatagaggaaacaaaagagtaatgctcacagaaatgtgcaacacgagatcgagtggtctaccccttatggatgt

SEQ ID NO: 5383 - DNA, 389 bp, Zea mays
  unsure (1)..(389): unsure at all n locations
agcttgccaacgaccaattcaaggtctatagcatcgctgggaacatccaacagctacgtcgcttctacccttaagatgttttaagtcgttcttgtacctcgtttacatacataaatagagtctaaccgtcaaggaagggtcagccttgcctcggcaaagcccgaccctccctcgggggctagaaggggggaaccccctctgcgtcaaaattttcctcggaaaagttttccaccaaaacgactntggtgtttcccgactatatcggtaacagaaccccgcanaacgaataagagcgcatgtaagcggcaaggccgaccgagccgagggactcctacgcctncgggatacggatacctcactcgtcaccttccgcgaaaataactcttact

SEQ ID NO: 5384 - DNA, 354 bp, Zea mays
gctgcagctatagttctaatgaaagggcaccttattccattgatgaagcacaggaggaccaatcaagataggaatccatgtgggagttcgcaagagaaaggtttgcgtgttgacatcaatgcttcctcaataagctagctgccaagcaaaagctagaagcctgaagatgatctttgagtagccagaatcagcgtttgcaatcggcaaccagatgctcctcaaaggccagattttgttgaagttccatctcctcgaagagtttgcaaagtgaagatatgtagctgaagtaaagctatacccataacccttctaagccaaatctcgaggacgagattccttttaagtggggtagat

SEQ ID NO: 5385 - DNA, 327 bp, Zea mays
  unsure (1)..(327): unsure at all n locations
catgcaagcttctaagggagaacacgtgatanggttgactaacgtacaattctaaaaagatagaccttgtgcagcttgtcaagcaggtaaacaagtgggaggagcacatcacagcaagaatgtgatgacaacttcaagacccctggagctgctgcatatggacctcttcggacccgtcgcctatctaagtatatgaggaagtaagtatgggctagttattgttgatgactnttcccgcttcacttgggtgttcttcttgcaggataagtctgaaacccaagggaccctcaagcgctttctcaggagagctcaaaatgagtttgagct

SEQ ID NO: 5386 - DNA, 379 bp, Zea mays
  unsure (1)..(379): unsure at all n locations
ctggtgcatgcaacttaatagcttcatcttcataccaacttataaacatttccatttcaacaataaacacataaacattntttactagtaataactctatctgtttcaagttataaaacattntagctttttaaaatcaattgcttttagtatctatatattntttataatttataatagaaggagtactattgatattttcgtaaaagtccatccatttgcatatgagaaacgcatgattcaaatgaaaaccttatagtctatacataatagatcaatccaaacaggtccactccctgtggacggcgtgaagattactatnttgggtcaagcggcctgatttgcgagattaatccggcccgcanaaatcccggttcat

SEQ ID NO: 5387 - DNA, 411 bp, Zea mays
  unsure (1)..(411): unsure at all n locations
agcttataacaggaggatagaggcaagagctcgaccatatgttataatagaaggggagctgtacaagcatggagtctgtgctccattactgaagtgtttatccagagccgaaggtatagaattgataaaggaaatacacgcaggcctatgtggatctcacattggatctaggcctttgcttggaaaagtttttcatcaaggattttattggccaaaggcagcttcggatgcagcggaattagttcaaaagtgcgaaggttgtcagaaatgtgcaagagatcaaaaacaaccttcgtctctaacccagttaatacaacccacttggccgttgcaaatgtggggccttgatttgttaggtctgttaccaccagcacaanggaacttaagatatgtngtagtggcagtggaata

SEQ ID NO: 5388 - DNA, 292 bp, Zea mays
  unsure (1)..(292): unsure at all n locations
agcttcagttccatctatattatggattgcgtttgagtctgtccaatttccttcggcccttctggcagcttcttgacttccatgaatagcaatgggcccttggtccgaaggtatcttcatgcaaagataagctggatgcagaattgcttcgaaggcattaagagtaccacgaccaatgattgcattgtaagggtattccatgtcaacaatatcaaacacaacttgttcagtccttgtgttgntgataaatccgaaggccactgacattgagattttgccgagtgctacaatc

SEQ ID NO: 5389 - DNA, 343 bp, Zea mays
  unsure (1)..(343): unsure at all n locations
cttcatcctcacatgggctattcagcaatgccagagccaacccatattagtcgtagcaattaagcaagtattgagctcagctctattaaaatcaactaagtatagctgaccctctaatactcccttaaatgctactgaatcattacttcttctaaagatagtaacacctatattcgtanagagacagttgtagcccaatttgcataattgagaaactgaaagcaaattgtaatctaaaaaatctacaagaaaaacattggaaatagaatggtcaggtgatatagcaattntaccaagtcctttaaccaaatcatgatttccatccccgaatgtgatagctctt

SEQ ID NO: 5390 - DNA, 338 bp, Zea mays
gagcttcaactccatctatattatggattgccttttaatcagaacagcttccttcggcccctgtggcaacttcctgactcccatgaatagcaataggccctcggtccgaaggtatcttcatgcagagataagctgggtgaagaattgcttcataagcatttatggtaccacgaccaatgatggcgttgtaggggtattccatgtcaacaatatcaaacacaatttgctcagtccttgtgttattaacaaatccgaaggttaccggcatggtaatcttcccgagtgccacaatctgccgccctccgaagccacaaagagggtgcgtagcatcatgaatc

SEQ ID NO: 5391 - DNA, 362 bp, Zea mays
  unsure (1)..(362): unsure at all n locations
agctnttgacagaataaaaactctattctactattttttataactctcaagtggtagctgatccatttatcactttggcctttattttctcccnctttggcatcaagcaccaaaacgggatcaatcttggccttctaaccccattgcctcaccaagatcttcaataagaatacaaaggcaataagattgcaggagatgaacttggaattagctaccctctcatcggagtgcagtggaaagctttcatggtccaagtccacctttttcctttcaatcctccttcgagactaaatcatcaaactcaagcacatggttagtctcacagggtcaagttgtaacacatcttcctctaaacatgtgca

SEQ ID NO: 5392 - DNA, 326 bp, Zea mays
acctctagctgatttagagtcctatgatgaattatccccaggcctagctgttccatttcttgacataaagtgttctcggaggtcttcaccataagacagtggcacgaagccttacggctcagtgcatctgccaccacattggctttgcctgagtgataatggatctccagttcatagtctttaataagctcaagccatcgtcttagcctcatatctaagtctgactgggtgaaaatatactctaaacctttatgatctgtatatatgtgatagatatttcccaccagatactgacgcctaattttcagggcatgaaccacaacagc

SEQ ID NO: 5393 - DNA, 280 bp, Zea mays
  unsure (1)..(280): unsure at all n locations
agctnttgaacgtactaagcacatgtcgagaaatatggtaaccaataaacctagtacctgagtgaagccgggcgcgggctttatccctcatgcgacctgagactggatctcccatgctagctatggtgggtacaagtgcggtcactgcacggcggcagtcggggtcaatggaacattgtatgccaaggcggtgagggctggacgccaacggggaaatcttggggaccggtgacatgtgtggggtccgaataccctggcatggtctatggttaaggtaccc

SEQ ID NO: 5394 - DNA, 295 bp, Zea mays
  unsure (1)..(295): unsure at all n locations
agcttgccgtctataatacccttaaaagctagtgaaccatcacatcttctaaagacagacacatctatatttgtaaacaaacagttatatcccatattgcataattgactaacagatagcaaattatatccaagagactctactaaaaacacattagagatagagtgctcatttgagattgcaattttacctaacccttttactttgccttgattcccatcaccgaatattattgaatcttgggaatccttattcttgacgtangaggtgaacatcttcttcttccccgtcatat

SEQ ID NO: 5395 - DNA, 260 bp, Zea mays
  unsure (1)..(260): unsure at all n locations
agcttctaccatgacgtgattgtccctgcccggagagaagagtaccatgtctgggccacactttggactgccatgatgaaggacttcaccatgactgcggtattgcccccgtacgaagatatagtttcttcgtagctcatcangaactgcttcngatctgagtgcccatcatacatggngagctganngtggttgtatgatgggggccattgggtagcctgcagttctgctgatagaggggaagcatcgtcaaaaacaaa

SEQ ID NO: 5396 - DNA, 210 bp, Zea mays
gctcgcgctaacggctggtgaacatgacttcgctgctagagatagaacccaccattacccggcgaccccattgccatctttctcatcaaacagagctgaaaactgaacttgcatatggcccttatgttatttacttcgccgcacatttgcctcttttatagatactgtatctgagagaccattttcgtgtctgtcaacagagtatgttgt

SEQ ID NO: 5397 - DNA, 462 bp, Zea mays
  unsure (1)..(462): unsure at all n locations
gcatgcacgctntagattatatggttggtacatgcaacttattatggtatttaatacagagatcatgagtcgaatcttggctagcgcaattaaataaaataattgttgctcgcttctatttcacgtctaagacccaaaagaggctcgatgtgagggattattggaatataatataagtgaattgtccacctcctcatatcagcttaagcttttggattgaattagttggtgcatgcaacttaatacttttcatctagagcaaaacagggagcttctccaaactacataaagcaggattacaatcagcacttgcttcaccactcgcaaacaagaatatcacaagtaatttctgcaacgacatctatgcatgttctattatcctttatagcatattcatgttacactctttagcatcttctcatttatcgtgcatgaaccttatagngttactgaaccattttc

SEQ ID NO: 5398 - DNA, 380 bp, Zea mays
  unsure (1)..(380): unsure at all n locations
agcttgtcaatacttatcataacagcaacatctttcttatattatactgcaaccatacctgtgacatggtcgttcgcgtgctggggactggatatgatcggacccttcaagaaagctcaacgaggatacactcatgtactggttgctattgacaaattcactaagtggatagagttcaagcctattgcttctctaacttcagctaaggcagtggaattcatacaggacataatattcaggttcngaataccgaacagcatcataaccgacctgggatccaatttcactaattcggaattctttgatttctgcgaacaagagagcagtcagatcaaatatgcatcagtagcacaccccagagccagcgggcaagtagaaag

SEQ ID NO: 5399 - DNA, 349 bp, Zea mays
  unsure (1)..(349): unsure at all n locations
gcatgcangctcgtgaagattcttatcccacangggctatctgtctatttttatccaacccanactagtcttagcaatgaagcatagttcgagtccagctctatcaacatcaactaagtatagctgaccctctaatactcccttaaatgctactgaatcatcacttcttctaaagacaggaacacctaaatcttgtaaaagacagttgtaacccatttgcataattgagaaacccaaagcaagctataatctaatgaatctacctgataaacatttgaaatataatggtcacgagatatagcaactttaccaagctctttgacacaaccttgatctttactccccaatg

SEQ ID NO: 5400 - DNA, 227 bp, Zea mays
  unsure (1)..(227): unsure at all n locations
agctcgtgagcaatacaagttctgatatggaatttctgctccagctgancagccgaagcccatgctcttatgtgaggacataacagagcacaaagtgctattgcgatctcaactgttcgaagagcacgagaaaaccttgataggtttttgttcaacaacaaacatgtctgtgcttggacaggtaatgatctttgcggcataaatagggaagctattgaccactcgct

SEQ ID NO: 5401 - DNA, 429 bp, Zea mays
  unsure (1)..(429): unsure at all n locations
gcatgcaagcttgcgttacggaatgaagggaatgntcttgttcatcagtttctgactggtggtatgcaaaggtgaatgttttgcagtgcgtctgttgtgatcatcttgtcttgccatatgctcccatttaccatgttttgttggatattttcacgtacgataggtcangaaagaaagaaagaaaaaacaatactcttcataataatataaaataaatgataacggataaaacgcagggagagggaagacaaaacatagggagacgacgcatatgagcaaaagatgccatgcgctctttttccctcaccactcccacattcccctatgatgatatgctataatctttcagcaaaagcaccacacaagtcctatttcccagtgagcaacgtagatcacatatcattcctgaaatattagtctacatccatg

SEQ ID NO: 5402 - DNA, 370 bp, Zea mays
  unsure (1)..(370): unsure at all n locations
agcttganaataatgccgaagcttcctggaggttatcataacagtatacagtactttctccaattctgtataatttttctttgataaactaagaacttcggatacaaaatatattggggcctgcttcttgacttggccttcaagcttctcctggacaagtgctgcacttaccgctgagagcgaagctgccacatataataacaaaggagcccctggcgttggtggagttagtgttgtaagatctatcaaatattgcttcagttcttcgaaggctctctgctggactggcccccattgaaaaacttcgactgacttcagcacttcgaaaaaataggtaattctctctactgatctagatatgaaatctgtg

SEQ ID NO: 5403 - DNA, 379 bp, Zea mays
  unsure (1)..(379): unsure at all n locations
agctntatcaaatggacgtgaaaagtgcctttcttttggaccaatcaaggaggaggtctatgttgagcaacctcccggctttgaagatagtgagtaccctaaccatgtttataggctctctaaggcgctntatgggctcaagcaagccctaagagcgtggtatgaatgccttagagatttccttattgcaaatggcttcaaagtcggcaaggccgatcctactttattcactaaaactcttgacaatgatttgtttgtatgccaaatttatgttgatgatatcatatttgggtctactaacgaatctacatgtgaagaatttagtaggatcatgacacaaaaattcgagatgtctatgatgggggaggtgaagtatttt

SEQ ID NO: 5404 - DNA, 377 bp, Zea mays
  unsure (1)..(377): unsure at all n locations
agctngaaccgaggaccccgtcaccggaatagtgtattcgtgctcgccggagttcatcaccccaccggcgcacgtggaccgggtaaatcactacgccatttttcgattcaatgcacagatagcctctacatcaccccaggaagctcaccgtgccgttggattggactangtcgctgtggtttggccggcacacccgccgccgacgaggacacccgcctgcgcacgtggaccgagcgattccggccatccccgccgtcgagccgtacgtcgttgtgaccgccagaacctncccgagccaaccctacccctcgccggacttctctcgtcgccggtaagccgcgccgcccctttcttctctgcgggtactggttacacct

SEQ ID NO: 5405 - DNA, 343 bp, Zea mays
  unsure (1)..(343): unsure at all n locations
aggaacctgagagcatgcatgcttgtaaagggagaacacgtgataagtttgtgttctttcgtttctaaaaagatagaccttgtgcagcttgtcaagcacgtaaacaagtgggaggagcgcatcacagcaagaacgtgatgaccacttcaaaacccctggagctgctgcatatggacctcttcggacctgtcgcctatctgagcataggagggagtaagtatggtttagttattgttgatgattnttcccgcttcacttgggtgttctttntgcaggataagtctgaaacccaagtgaccctcaagcgcttcctcaggagagctcanaatgagtttgagctcaa

SEQ ID NO: 5406 - DNA, 279 bp, Zea mays
  unsure (1)..(279): unsure at all n locations
catcttatcttgaaaatattttatcttatttcaattggatctagatcccacctaatctaacatgtaagttagataatgctggcgacaaaaaaaaattatgccataattctatacacatatcttaccctanattaataccttggactaacccgtccatanacaaaaacctaacctacatcataggttgtctaatccatttgttcaaaaagcacagtaagactctgttcaaacctacccacctcgtgtaccccggctatcctaactatatgtccttaattc

SEQ ID NO: 5407 - DNA, 279 bp, Zea mays
  unsure (1)..(279): unsure at all n locations
gcagaggcgctangggcttctgtggaaggtttggagatcagccaagaaaaattattgtctattctgtggtgaagataagggccataccaccaggatgtgtcacgttaccatccagaaacaaaaggagatagtacaagcagctgcgcaacatagtcagccgaagcaggtcatgcatactgcttcgtatcattcgccttatattccagaatatgtaggcaatcattctgtagcttctgttgcttcggctagccaaccccaagcatcttggcagcatccacc

SEQ ID NO: 5408 - DNA, 335 bp, Zea mays
  unsure (1)..(335): unsure at all n locations
ccacagccaggccatgctagtcttagctattaagcatgcatctacaccgcgctnttctttcgcaaaatcaactaaataaagtttggcgtctaatacacccttaaaagctagtgaaccatcacttcttctaaagacagacacatctacatctgtaaaaagacagctataccccatgtcgcataattgactaacagatagcaaantatatctcaaggactcaactaaaaacaccatataaattgagtgctcatttgagattgcaattttacctaatccttttaacttgccctgattcccatcaccgaatataattgaatcttgggaatcctattctt

SEQ ID NO: 5409 - DNA, 305 bp, Zea mays
  unsure (1)..(305): unsure at all n locations
gctcgaaagaagcgnncctgtccttctttctggcactagtggataccagcagcttcggtggctctctatacctgagcaagtcttctccctatcgagcagtgatttggaaggcatttctttctgaagtttatctctccatgtccagttagtatcaagttttgctaggctatatacactacataataataggatattgaggtgaattctactctcttacacctcacacaatggcacgcctggcgtattggtgagagctctcactgagtcaccaggtcttgggttcgaaacaccctttcacatttgca

SEQ ID NO: 5410 - DNA, 256 bp, Zea mays
agcttgagtcagtcctcttgcaaaggataattgatgctcaaaaggataatgagggtatgaaacacattcgtgagaagataagggctggaaaagccaaatgtttcaaagaagatgatcaaggcattgtatggtttaatgaccgcatagtggtgccaaagaatgaagaagtccgccagcaaattcttgatgaagcgcatcttagtcgctattctattcatcctggaagcactaagatgtaccaagacttgaaacaaca

SEQ ID NO: 5411 - DNA, 280 bp, Zea mays
  unsure (1)..(280): unsure at all n locations
agcttgtgaagattcttcatcccaacatgggctagtcggcggtgccagagccaacccatgttagtcttagcaattaagcaagtgtcgagttcagctctatcaaaatctaccaagtatagctgaccctctaacactcccttaaatgctattgaatcatcacttcttctaaagacagtgacaccaatatcagtaaaaagacagttgtagcccaattgacataattgagaaacagaaagcaaattgtaatctanagaatcaacgagaaaaacattggaaatgg

SEQ ID NO: 5412 - DNA, 399 bp, Zea mays
  unsure (1)..(399): unsure at all n locations
agctntcagtctttccatactacgggcgccgtttccgacccggttccaaaccccgactactatcaccaagtactcgggggagtcaaaaccggaactgtggctcgtggactaccggctggcctgccagctgggtgggacagacgatgacaacctcatcatccgcaaccttcccctgtttctctccgatgccgctcaagcctggctggagcatctgcctcctgcgcagatctccaactgggacgacctgntcaaagccttcgccggcaacttctagggcacatacgtgcgccctgngaactcctgngatctctgaagctgccgnncagcagccggagagtccctganggactacatncggtgaatttcgagcagcgcaccgagctgcccacatcacccgac

SEQ ID NO: 5413 - DNA, 349 bp, Zea mays
  unsure (1)..(349): unsure at all n locations
agctnggctcatcagcccaacagacaccgcaactgtcacgactagtccggggcccatgcatcgttcttcagtgcatggaaaacatgatcataagaatatctganaaactagcccggggctcacatagtcacatgatcatgaacttgtttccataaagctgaaaactagcactgcaaataaaggacggcgcaataggctaatgcaacaattagtttcacgatgatggacaaggagacacactggagatacccgcacaaacttgcaatcataagaatatctgaactgcataagctccaacgcatggattaaatcagcccgcaacttaacaagcaaagtaaagcaggatcgc

SEQ ID NO: 5414 - DNA, 304 bp, Zea mays
ccgaggacccgcgtcaccgggatatctttatcgtgcttttcggagttcattatcccgccggcgcacgtggaccacgtaaatcactgagccattttccgattcattgcacagatagcctctgatcaccccaggaagctcaccgtgcccttggattgaaccagatcgccgtggtttggccggtacacccgccgccgacgaggacacccgcctgcgcgcgtggactgagcgattccagccattctcgccggcgagccgtacgtcgttgtgaccgtcagaacctccccgagctaaccctacccctcgc

SEQ ID NO: 5415 - DNA, 377 bp, Zea mays
  unsure (1)..(377): unsure at all n locations
agctttgagcttctgtttgaaggacacgtnttttttttttctangacaagatctctcaagacaagaagacagttgctgagacgaagctaagtgaataggagaagctccttgaggagaaaactggctggattgttgagtcaatagcgaanacaaatacagagaagattaccaaagagatactagaaggcttgtctgaagataccgatgatagcaatatctatgacgtggagagtggaggcgaagactctgaagatcggccttggtggccaagtcatgcagtcttcgggaaatcaactatcaaacagagtcatcttgagtatatgagaggaaggtattntcgagatatgtctattgtgagggctgacgtagacagggtc

SEQ ID NO: 5416 - DNA, 377 bp, Zea mays
  unsure (1)..(377): unsure at all n locations
agcttctaaagggagaacacattntangagtaacttatgttctatttgagaaagacaggatttgtagcgcatgccaagcagggaagcaagttggcactcatcatccgcataagaacataataacgaccgacaggccactggagctccttcacatggatctattcggcccgatagcttacataagcatcggcggaagtaagtactgtctagttattgtggatgattattctcgcttcacttgggtattctttttacaggaaaaatctcaaacccaagagaccttaaagggattcttgagacgggctcaaaatgagttcgctttaaggatcaagaaaaatagaagcgacaacggaacggagttcaagaactctcaaatc

SEQ ID NO: 5417 - DNA, 404 bp, Zea mays
agcttctccagaatcttgaggtaaactgcgaacctctatcagactttatcttctttggtactctgtgtgaacacacaatccgggccatgtataactctgccagctgagagcctttgtaagtagtcttgaccggaatgaaatgagccactttggtcaatctatccacaattatccatatagaatgatatcctttccgggtgcgaggcaacccagtaatgaaatccatgccaatttcttcccacttccattcgggtatcttcaacaggtgcaataatccagctggtctttggtgttccgccttgattttttggcacacatcacacatagcaacatgtgcagccacatttctctttaacccataccaccagcacttctgggtcaaatcctgaatatcttagtgctct

SEQ ID NO: 5418 - DNA, 293 bp, Zea mays
gtgcccttgcatcctggagttctttgcaaggcatcagtcgcttgttggttcaaagtcaattgaactttgcattgcctcacctttttgtagccgtgccaaaggcgttcaagtctggaagtggagcggaattggttctgggaggcggattgccaataggtgtctaggaatccacggaaacaggaatagccgattggttgcttgctgcaagacagtggtggactatgggcttacccgctggctttgacagcaatccacgagccctgatctcagttgacccttaattgtgtcatctc

SEQ ID NO: 5419 - DNA, 369 bp, Zea mays
agcttcggtgattatagcgtatcctaagatgattgtgcgaaccgacttaaagatagaatgacattttagtccataagggtctgagtcattgttgtaaacttttataaggggcatgaatgtaattctttacaggcagtgtcctgtgcctataaatagtgaacagtattcctttactgttcacggattcctgtaattgcaaacacattgctcggaaatttgtatttgtcaagggcaaggtattaatgtacctaaacattatggtctgacatttttaggttcatataataaaatatgtgaatgaagttatctatctctgaatatttatcttaatggttcatgtatatatttaattcatttaatttggaatct

SEQ ID NO: 5420 - DNA, 453 bp, Zea mays
  unsure (1)..(453): unsure at all n locations
agcttcacatttgtaaaagttctttgctgctctatcctcagattcaacttctccatttcctgacataaagtggtgccaggtgctcttactgtaagacaatgacaaanagtcttgtgacataaagcatctgccaccacattggcttttcttgggtgataatggatttgcaagtcataatctttgattagctcaagccaccttatatgcctcatgttaagttctaattgggtaaagatatacttcaaacttttatgattcgtatacaaatggccggtatttcccagcggataatgatgccaaatcttcagggcatgaaccactgcagctagttccagatcattgagtggatagtgttcttcatgctggcgcaactggcttgaagcataagctatcactcggtcttcttgcattaagacacattcgaagtcactggctgacgcgtcacaatacaca

SEQ ID NO: 5421 - DNA, 317 bp, Zea mays
  unsure (1)..(317): unsure at all n locations
agcttattgcccacacatggtcttttctatgcttgtggctggatattgacgggccactacctatggctcaagggaacctcaagttcacctattgtcgtcgccaatattataccaagtggatcgaagccagtgcagtatccataataacatcgaagactgtccagaagttcttctggcaaaacattgtttgncgattcggagtcccgtcgagctcacaatcgacaatggccaatagtttgatatccaggactttaaggacttctgcttcttcatcggcaccaagcttgccttcgtctcggtataccaccccattccaa

SEQ ID NO: 5422 - DNA, 254 bp, Zea mays
agcttctaaagggagaacacattttatgactaactaatgttcattttgagaaagacagggtttgtagcgcatgccaagcaagaaagcaagttggtgttcatcatccacacaagaacatcatgacgaccgacaggccgcttgagctactccacatggatttatttggcccgatagcttacataagcatcggcgggagtaagtattgtcttgtaattgtggatgattattctcgcttcacttgggtgttctttttg

SEQ ID NO: 5423 - DNA, 380 bp, Zea mays
  unsure (1)..(380): unsure at all n locations
agcttcttaatatggtgctgtgttactgccatttgcagatacaagtgttgagggaatattttcagcggcgcattttgagaacaaactaagaaatggtataggaaatcaatataaatgattcttggttatacattgaaagaaatgtattcttgattcgtcttctataagttagtgatagtaaagccgcaacctcttgtttacaaaagagccttcatccaattaaccattggtattgcatntttagcttgtagggtatgaaccattatctagtactccaaatgtgaagtagttgactaaacgtgagtatatattaaataacctatttggtcttttgtcaccaaatgtgaagaaatgactatcagtaagtggacctgtcatga

SEQ ID NO: 5424 - DNA, 330 bp, Zea mays
agcttggactcatgggtcgccttagagggcattgttctcgctgaccaagttgtgggctctgttgatggcactgagttggttccttctggttcgttgcaagctgcttcgggtggcagccttacgcccggtcatcaattgatctctcatgatttgggggtcccttcgttcttttccaacctctaggtactgtgatatactctggcttgaattttccaccgcatgaactgctgtcattacactcatctgctctccttatcaggctttggtggacgggatggctagccaactgaggttacagggtggctctgttcagaagtagcttcctctctt

SEQ ID NO: 5425 - DNA, 356 bp, Zea mays
  unsure (1)..(356): unsure at all n locations
agcttctaaagggagaacacgtgataggtttgactaacgtacaattcgaaaaagatagaccttgtgcagcttgtcaagcaggtaaacaagtgggaggagcgcatcacagcaagaatgtgatgaccacttcaagacccttggagctgctgcatatggacctcttcggacccgtcgcctatctgagcataggaggaagtaagtatgggttagttattgttgatgacttttcccgcttcacttgggtgttctttntgcaggataagtctgaaacccaagggaccctcaagcgcttcctcaggagagctcaaaatgagtttgagctcaaagtaaagaagataaggagcgacaacgggtct

SEQ ID NO: 5426 - DNA, 347 bp, Zea mays
  unsure (1)..(347): unsure at all n locations
agcttcccctacacgccgatgatatgcagatctcttgtgttagggttctagaagatngccccagccgcaaatgtttgaagctccaagtactatattctttgtgtccgcctgggcccaaatgtcggggctcagtacctttgtgcatgcccccctttggctataaaaggggaggcatgccatgttacaagacagatccaatcttatgctcgcttagacgctcacaagttcatacaagctctcaagcaatacatcacacactggagtagggtgttacgctttggcggctcgaaacactctaaatccttgngtgttcttgtggttctcccattttcagctacaagccaaac

SEQ ID NO: 5427 - DNA, 340 bp, Zea mays
  unsure (1)..(340): unsure at all n locations
ataaaacatgactgggggtgggtacttgttctcaaatgctangatttaagaacaaggcaacacatagggttaaatgttgatgcccttcgtccaacgaagcattattcccttaaggattaatgaactctggacgaaggttaaaaggcaatacaattacgaaggttaaatcttcgtaatagattgaataaagtaatatagaatatgaagcgtcaaaggtaaataaattacaaatgaacaacattactttcatattaaattgatttagtatatttaagcattggatacaattatacctttgccttgacaaagattgattcccgaatgatgcgattgcaattac

SEQ ID NO: 5428 - DNA, 370 bp, Zea mays
  unsure (1)..(370): unsure at all n locations
agctntggctaattgttgatgactntaatctaattcgtcgaccggaggataggaatatagttggaggtgatattaatctaatgatgaagttcaatgaggcaataagtaacctagatctggttgaaattccccttcatggtctttccttcacctggtcgtataggcagagggcaccccttcttcaaaggctcgattggttcttcatttcgcaggaatggtcagtggtctatcctgaaactcgcgtaagaacgttgccacgtgatatttcagaccatgtgtcgtgtcttgtttcgttcaagtcgagggtcccaaagcccaagatttttatgttcgaaaactattggctggaatttganggctttatgaacat

SEQ ID NO: 5429 - DNA, 343 bp, Zea mays
agcttgcttcagctaaaggatcctttataccatctatggagaatgcatcttcagcctgggctatggtcttgatgtgatcacatccagccttctccaagatcgctgaaatcccacgcacacaggaaaacgcacaaatatccccgcgatcactcaaaatttcttcgaagctctctgcttctccacttatccattcaataatgcctttggggtcgcctcgtatgaagttttcttcggtagagtaggcgcccacgttggcgaagctagcttttattttcttcacacagtccaaggaatttttaaagcatcttttcttggatgtgcgaagttcttcaacatttttctc

SEQ ID NO: 5430 - DNA, 323 bp, Zea mays
  unsure (1)..(323): unsure at all n locations
agcttctaaagggagaacatgttatangtttgactaacgtacaattcgaaaaagacagaccttgtgcagcttgtcaggcaggtaaacaggtgggaggagcgcgtcacagcaagaatgtgatgaccacatcaagacccctcgagctgctacatatggacctcttcggacccgtcgcctatctaagcataggaggaagtaagtatggtttagttattgttgatgacttttcccgcttcacttgggtgttctttntgcaggataagtctgaaacccaagggaccctcaagcgcttccttaggagagctcaaaatgagtttgagctc

SEQ ID NO: 5431 - DNA, 376 bp, Zea mays
  unsure (1)..(376): unsure at all n locations
atctctacatcgacctgcggcatgcaagcttaaagccatggtaagtatcataggccaataatatgcgaattgactcaagcctagctacgggtgcataggtttcaccgaaatccaaaccttcgacttgggagtatcccttggccacaagtcgtgctttgttccttgtcaccacaccatgctcatcttgattgttgcggaagacccatttggttcctacaacattttggttaggacgtggaactaaatgccatacctcatttctagtgaagatgttgagctcctcttgcatcgccatcacccaatccgaatcttgaagtgcttnctccaccctgtgtggctcaatagaggaaacaaaagagtaatgctcacaaaaatg

SEQ ID NO: 5432 - DNA, 367 bp, Zea mays
  unsure (1)..(367): unsure at all n locations
agctngccttcgcttcagnctatttcctcagttcaactgagtcgtggagcgtgccaatgggaaaatcttcacagccatcaagaagatgctcctcgacgagaaaaagggcagatggaccgacttgctaccggaggcagtctgggcgctgaacacaaccgagtgcagggcgaccgggttcactcctttccgccttctatacggatcagaggcaatgaccccgcaagaaataaaacacgggtctccgcgcacagctccgtcagccacccctgacgtggatgagccaacctccaaagatctcattgaccgagaccgggtcttcgtcctgcaggccttaaacaaataccaagcccagaccaaagcatggcgc

SEQ ID NO: 5433 - DNA, 320 bp, Zea mays
  unsure (1)..(320): unsure at all n locations
agcttatcaaagaaaaatatacatagttggagtaagtgttatattctgtatcgatagcctcaaggaagcttcgacattatttccaagcatatcatataattgttccttcatcacaacctctgaaggacataatgaggaatagagaagctactgcgaggattggaaaatgggctgctgagctcaatgaattctttattgattatgtacacagatcctcaatccagtctcaggccttagcggatttcattgctgattggacgccangggcttatgaagaagaaataacaaaagacgccgaagcctggacattcttctctgat

SEQ ID NO: 5434 - DNA, 270 bp, Zea mays
  unsure (1)..(270): unsure at all n locations
ncaagctgngcgttgtttctgggctgccagatgcatcgccacccgactccatgtcagagcttcgctggaggcgagagcgcgaccatggcgggggccctatgacgctaggaagggcccaggtgggttcgaggtgacatggtgaacacaatcgcgggcacgacaccagcgcatgagcaccgaagggtggcgttccgcgatggagtggctcatcggcagcgcacccttgcttcgatgagcaattgcgcacacacacggggcacgaaatgggaa

SEQ ID NO: 5435 - DNA, 296 bp, Zea mays
  unsure (1)..(296): unsure at all n locations
agcttangacatggcctactgaccacagtgtgttgtgcatacggntggagtttgagcaaaaccatatcgccaacttgaaatgtgtgttcagtcctcagacgatctgccttcatcttcatacggttctgggctgctgcaagctgctccctcaacatcacggtaaactgagccctctctgctaacagctgtgccacatcaatggcagcatcagaaggaaaatgaggtgctgctgcaaacggaggggcataaccatacaacactnntgaaggagaacaagctatggaagtgtggtatgt

SEQ ID NO: 5436 - DNA, 397 bp, Zea mays
  unsure (1)..(397): unsure at all n locations
agcttagaatgtgctctacaactntggtattgttatcaccgcacgattaaacacttagcaaggtcaaaaggtgttaacacaacagcgctgtccagatttggacagattcagacttgtgactntaaaatttcataactgaagattcagacatccaaaaaaagtgatcttagactttctggaaagctaattaaatgttctacaaattatttataaacatcgctggctggtttaacatgtatcaagggtgaaatacactatgaaggctgtgttgtccagaactggacagattcagtcttcagactttaaacatccataacttaatcttcagaccaccaaaaatagtgatccaagactttttggaaatcttggcaattgcactacataactnttataatca

SEQ ID NO: 5437 - DNA, 292 bp, Zea mays
catgcaagcttgtgaacaatacatattcagaagggagaaatcttcttcatttatcagccgaagcccatgctcttatgtgaggatatagcagagcacaaggtgctgttgggctctcacctatccgaagaacaagagaaaaccttgataaggttcttggtcaacaacaaagatgtttttgcatggtcagccaatgatctctgcggagttaatacggatgttattgagcattcgctcaatgtcgatccatcctttagacccacaaagcaaaggcttcggaaaatgtcagatgata

SEQ ID NO: 5438 - DNA, 393 bp, Zea mays
  unsure (1)..(393): unsure at all n locations
tgaacatgtactcagaattagatttgtttcatgctgctcgctaattagcaagcagctcagaacagtagntgcgtcggtactctggtaacttacatatagcccgacagcctaaatttcaaacacttgcccattcatatcacattaaagaataagaagcatgcccggtgaaaatgagtagccattaagggacaatggtccacaacaaactggaagcatgccacaaaaactaacattagtcatctatgacatatcttcatggtggagatgaagtccaagaccaagacgcgcaccagcgcgacgaagagccatagacttttgccttctgtacgggaccaccatagattgtattatcaacagaagcagttgcagtgtgcttcttatagatctgattga

SEQ ID NO: 5439 - DNA, 245 bp, Zea mays
  unsure (1)..(245): unsure at all n locations
catgcaagcttatcctctctaaagcaaggctnctncgcttttttatgtttatataaacccatatgatggtgataatcatgcttctacaatacataattttcttccttttccttttattggtaatcgaaccttacaattacatacaatggatggatgataaaaagagtgtgccttgttgttgaactgaaattagtagcttttccatctctatgatggcatacgcagaagtgtactaaactccaatg

SEQ ID NO: 5440 - DNA, 151 bp, Zea mays
  unsure (1)..(151): unsure at all n locations
cggancttaagtcactgagctgcagctgctttggtacgattgacanttttataccaacaaaccacttncacattttggaactgacgtccactgctatgtaacctaacagacattcacccccagtaagcgtgcacattaaaattctgagaca

SEQ ID NO: 5441 - DNA, 63 bp, Zea mays
tctacccaacggacacagggatttcagtttaaggggcaagacaacaaggggggaggaacccca

SEQ ID NO: 5442 - DNA, 423 bp, Zea mays
  unsure (1)..(423): unsure at all n locations
agcttagcaacaatggagaagaccaagatccttagttcccttgcttattggtggaggatcatatttggtgcctcatggaattttcctttaatcttcatttcccacaggacatttgcaggtgatttgcttcaaccggatattatttcttttcttctcccaatggatctttcttcttattggccaccttctatcgctttcttttccaacttaatgatgaatctgtgagtctgtctcttcaatcttgtcttacgggatcaacccctagttttcatgtgactttcttgagtcgaaatcatttcaaatactctagggctaataagaacgttggcatgatagtntatgctctcaaacactttattggctattctntcgatgnttaatttcatctttggaacaatggttntcctagaaagcattttcatt

SEQ ID NO: 5443 - DNA, 419 bp, Zea mays
agcttggccaaaacaaattaaataaaactctaaacatgcctctcaagtgggatttcattagggaattctgaaattcagaattctgaatttcagaccttgagccaaagatcaagcgtgttcaccttgatccctaactcaaatcctaatggccccattgacaaaaacatgcataactaacctctatgtcttatgccagaagatggcattgggacacatgccttggacgcgtcaaaccagagatcttctccctgtgtgcggtagtgagacaaataggatttctcccctctctatctcttaatccagtcagcaaaacctgctagcctccacacacaaatgacaaagggacctgagaggaagagatctctcaacgggatcatggccataatctcaaagatttggggccaatccgcgcttgaact

SEQ ID NO: 5444 - DNA, 430 bp, Zea mays
  unsure (1)..(430): unsure at all n locations
agcttactcctccctgngaagggcccttcatcatcaccaatattntgaagcccgggacatacaagctggccaacgatcaaggcgaggtctacaacaacgcttggaacatccaaaagctacgtcgcttctacccttaaaatgtttcaagtcattcatgtatctcgcttttctttacatgcataaataaaagtctaaccgtcaaggaaggatcagccttgcctcggcaaagcctgaccctccctcgagggctagaaggggggaaccccctctacatcaaaattttcctcggaaaagtcttttaccagaacgaatttcgcacttttcgactgcgtcaataacaaaatcctaaagacgagcgagagagaccttgaacgcgcaagaccgactgagccgagggactcctacgcctccgggatacgaatacctcact

SEQ ID NO: 5445 - DNA, 429 bp, Zea mays
  unsure (1)..(429): unsure at all n locations
agcttatgaagattcttcatcccaacaaggactattctgtggtgccagagccaacccatgttagtcttagcaattaagcaagtgtcgagttcagctctatcaaaatcaactaagtatagctgaccctctaacactcccttaaatgctacgagatcatcacttcttctaaagacagtaacacctaaacctgtaaaaagatagttgtagcccattttgcataattgagaaacagaaagcaaattgttatctaaagaatctacaagaaaaacattggagatagaatggtcaggagatatagcaattntaccaagtcctttgaccaaaccttgatttccatccccgaatgtgatggctcttttgggatcatggtttttctcacaggaggagaacatcttcttctcccctgtcatgtggtttgtgcacccctat

SEQ ID NO: 5446 - DNA, 425 bp, Zea mays
agctttaactctcgcgagaccttttctcatttctttctaaccatggtaaggtcaatatcggatgtgatattctatgcatatttacttcatttgctctcttcgatggggtactgttaattatgtccctaatctgaatggatggatgtatgtatgcttgcaaccgcatagagaacgatccggtcgaagagcccgaggaactctcatgagaaacccctgagcagcaaacggttggtggaggcaagtgtcccttgacctatctctgtcctattcattctttaattcacctcccgctttacacatttatgcctaaggattgactagctttgttatccatgtccttgtttacctatttgggttggattattattgtttagctttatgctattgctcaactataatcaatgaacatgatgagattatctatg

SEQ ID NO: 5447 - DNA, 428 bp, Zea mays
agcttattcaccacatgtttgtaaatatcttgaggaattctagcatggcgtcttctcctcgattgtctgtgtttcttgttcccaagcaattttctttttgaccctacagcttgtttctcaatcaaagattggtctttcttgaggcagtggaggtcagcacatgataatactttaactaattgatcacttgtgcaagaatgaggttcacatgagtttaaactagtaattactacctcatgagcaatatcgagcattatatggtcatcaactaataggaaaacaacatatcatacttttcacctagagcaggtttttctaaattcatcatttctacttgactcctaagcatagaattctcagttctaagttgagcaacatcagataatacatcatgattatttctttgctcagataaaacagattcatac

SEQ ID NO: 5448 - DNA, 417 bp, Zea mays
  unsure (1)..(417): unsure at all n locations
agctntaccttgactcccaacaaaccagcataccctttagaatcttttctttagtcgggtaagtctcgctgagtaattgcatactcagggttttattcccatttttgttgcaggagaaactattaacacctttgagttctgctagaactcacactggagacttctacttttgtttatgtgcattatgtgtggagtacgggaagatggtttcttcgtagttgatgtaataagttagcacttgactctaccttaggcatgtaataataatacctactacttggtttgtatattttaaaagtttgttaatgtatactatcttattgtaaagtcttccgctcaactcctgtatttaaagtttatgttcttgtgggattattgtaatacttgcaactatggtgaatgatccttggaaatgaa

SEQ ID NO: 5449 - DNA, 408 bp, Zea mays
  unsure (1)..(408): unsure at all n locations
agcttattgcaagcgtgtggaatggaaagacaacttaatttaggtgtatgtatggctcgagtgaagggcaaagtggaacggagggaaaaccggatgaggcgcgctgcgacaggcggcanggctgttcggccttgcgtctgggctgaaaacgaagtgttcgccatggcgcacgggccgaaaacggatgctcgggcacgaactcgaaaataagctaagttcaagcatgtggaaagacaccgaacatacagagtatgtctttggtgaagggcacagtggaacggatggaaaacgacactgaggcacgcagcgacgggcggcatggctgttcggccttgcgtttgggctgaaaacgaggcgtatgccatgtcccgcgggccgaaaacaacggttcggacacggcctcgaaaa

SEQ ID NO: 5450 - DNA, 428 bp, Zea mays
agcttgatgccctcatcctcaagaaagccttctatttgagagttcttgaactcagtcccgttgtcgcttcttatctttttgattctcaatccgaactcgttttgagcccgtctcaagaatccctttagagtctcttgggtttgagatttttcctacaaaaagaatatccaagtgaagcgagaataatcatccacaattactagacagtacttactcccaccggtgcttatgtaagctatcgggtcgaatagatccatgtggagtagttccagtggcctgtccgctgtcattatgttcttatgtggatgatgggcgccaacttgctttcctgcttgacatgcgctacaaaccctgtctttctcaaaatgaacatttgttagtcctaaaatgtgctctccctttagaagcttgtgaatattcttcatccc

SEQ ID NO: 5451 - DNA, 426 bp, Zea mays
agcttgcacttacgaccaaaccacacccgtttctattttacattcaatggcttaacaatagtggtgaggtcaaggtaaccaagctagtacgaattaattttgctattggttcatatcgtgatgttgttgactgtgacgttgtgcctatggatgcttgctatattctgctaggtagaccatggcaatttgatacaaattgtatgcatcatggtagatcaaatcaatattctctcatacaccatgataataaaattattttgcttcccatgtcccctgaggctattgtgcgtgatgatgttgcttaagctacataagctataactgagaacaacaagaatattaacgttgttggtaataacaaagatgggataatattgaaaggacattgcttgcttgcgacgaaatctgatgttaatgaattatttg

SEQ ID NO: 5452 - DNA, 423 bp, Zea mays
agcttactctcaacctctccaaaatagcctaattttatcatcataagcatgtcatcttcagtcacagtagatttttcaaaattctgtgtagtttttctttgataggctgagtacttcggcgacaaagtatatcggtgcttgtctttttacttggccatcttgcttcttttgtctgagtgccgcactaaccgcatcatgggaagcaaccacatacagaagtagcagagttcctgatgaaagtggagttagagttgtcaaatctatcagatattgttttaactcttcgaaggctttctgttgagctggaccccactgaaagacttctgctgacttcagtatttcaaaaaatggtaaattcctctctattgatcttgatataaatctattcaacgatgccagtcatcctgccaaccgttgagcccc

SEQ ID NO: 5453 - DNA, 430 bp, Zea mays
agcttggctgacgacgtgaccgctgctcctgcccgcctgccaccgccattactgccggcccattttttgtcgtattgaccgtcgcgccgggctggcactgctgggtcgtacgcaaggtcgcctcgagttgcggtactggttccgcactggaagaggcgtggtattggtgcgagcggcggtgcaattgcttgcacgtagcgaccggcgcaccggttgcatgacgcgtgggcgtgggcccccatgctgggtgcgttggaagtcggaggggcgcgcccacttggcgcggttgcatgtcgcctgcatggctgcccgccctttcgcccgctggtctgggcgaaagtggaggaatgctcgtaaccgctgggcggttgcatgcaccgcgcgcgacagtttggcttcttctgctctgggccaacttgcatgacacgtg

SEQ ID NO: 5454 - DNA, 399 bp, Zea mays
  unsure (1)..(399): unsure at all n locations
gcaacttatgaaggagggcttcngttcccttgaattaattttaattgaattctgaagacttttgagattaccttcaccagattaccccccaagctatcataaggggatggggtttttatttgtgccgtgagaagccangactggagccgagtgcaaaatgcttctacaatatgcatgagctgtcctacaagacgaangctactgggaaggagcagtatcacnaataatttggttgttaccgcttcgtgcctcgctctgatgtgagctatccagttctgacgtttcggaagaggtggccaaaaacctggatggaagaatggttttatgtaaagaataacttatttgaaacggcagatataaaggggattatccaacaccctatttggtctcgcttcggca

SEQ ID NO: 5455 - DNA, 407 bp, Zea mays
agcttgtgaagattcttcatcccaacatgggctattctgtgatgccagagccaacccatgttagtcttagcgattaagcaagtatcgagttcagctctattgaaatcaactaagtatagctgaccctctaatactcccttaaaagctactgaatcatcacttcttctaaagacagtaacacctgtatccgtaaaaagacagttgttacccattttacataattgagatacagagagcaagttgtaatctaaggagtctacaagaaaaacattggaaatagaatgggaaggtgatatagcaattttacccaatcctttgaccaaaccttgatatccatcctcgaatgaatagctccgtgggaatcttggttttctcgtaagggagaacatacttttctccctatcatg

SEQ ID NO: 5456 - DNA, 429 bp, Zea mays
  unsure (1)..(429): unsure at all n locations
agcttctaaagggagaacacgtgataggtctaaccaatgttcaattcgaaaaagatagaccttgtgcagcttgtcaagcagggaaacaggtgggaggagcgcatcacagcaagaatgtgatgaccacttcaagacccctggagctgctgcatatggacctcttcggacccgtcgcctatctaagcatagggggaagtaagtatggtctagttattgttgatgacttttcccgcttcacttgggtgttctttttgcaggataagtctgaaacccaagggaccctcaagcgcttcctcangagggctcaaaatgagtttgagctcaaagtgaaaaagataaggagcgacaacgggtccgagttcaagaaccttcaagtggaggagttccttgaagaagaagggatcaagcacgaagtctccgctccctaca

SEQ ID NO: 5457 - DNA, 417 bp, Zea mays
agcttatgaaatccactacatcccagagttgaagccatatcatttttgagcaaatttggcacaccggacagtctcgtgaaacaattcctatgctcctacaatttttcagcacttctaactttgtattgtgggcataacgtttaactccaaactccaattttgatgatcttttactttttggaaagcttataaaattctctacatcttagagttgaatccatataagtttgagtagatctaatgttgtgaaacacttctaatttagtcagtcctttctctcaactttgtcaacttcacttttgttttgtggctttgcatcccacttctacttattgatgtgttggactcttaacatgtataaagtgtcttgaatatggctctgtaatgtcttctataggtcttataatatcttctttg

SEQ ID NO: 5458 - DNA, 412 bp, Zea mays
  unsure (1)..(412): unsure at all n locations
agcttgtatagccgagaattanattctcaattatatatatgttaaacagcgtaggagagattaaaccttccaattgattaccttgcatagtcaatctagcaaggttaggtagcttacctaaagcttgtgggatctgtccactgaagttattccatgccaagttcaaatctgtcagatctgtcaagttccccaaccaatctggaatcctccctgtcatgtagttttcggtggcactaaacattgtgagtcctgtaaggttcagcactgaagaaaggatgcttcctacgatgtcattgtcgcggaaattcagaatttctagttctgaaagacagccgatggactgaagaacgctcccggacaggtggttaacacttatgttgagataatggagagcacacaagttaccgatact

SEQ ID NO: 5459 - DNA, 423 bp, Zea mays
agcttatgtgtgcacccataagaggccctctgtttcatcgcggcaccataagtcgttagtcataacaccattaccaaatgtaaccaatgagaaatctacatagcacagatagatggagctcatgtgaatatggctcagaaaataagatcatgacaggagttgaaacataaatttgctggcaaatgtaacaccctgaatttgggggtataaaatttctttcttattatcatccaaattcaggtgttactcttctctctgtcactctagtttctatctctctagttcctctctctctctctttctcttttgggtaggggtagttaattagtgaggaattatttattttatttttgacaaaacatatgagtcatgaaatgttgcatcatgttgagttccaaatattcttcgaattctgtgcacatg

SEQ ID NO: 5460 - DNA, 410 bp, Zea mays
agcttgtgaagattcttcattccaacatgtgctagtctgcgatgccagagccagcccatgttagtcttaaccattaagcaagtgtcgagctcagctctatcaaaatctactaagtatagctaaccctctaacactcccttaaatgctactgaatcatcacttcttctaaatacagtaacacctatatccgtaaaaagacagttgtggcccattttgcataatcgagaaacagaaagcaaattgtaatctaaagaatctacaagaaaaacaatggaaatagattggtcaggtgatatagcaattttacccaagcctttgaccaacccttgatttccatccccgaatgtgatagctcgttggggatcttgttttttctcgtaggaggagaacatccttttctcccatgtcat

SEQ ID NO: 5461 - DNA, 398 bp, Zea mays
agcttgtagctaaattagacattaacatattcttgtgttctcggagccagaagagccatatgtcttgaccactagactactagtgatgataatttgtgatagaaatatgaagatattgtagagacctgttgtatcctctctactcctgatgatttcttcgtatgagagcagtaatatctattgttgaagatggtcctatgcgaataccagtactgtttcgttcttgccaagcagttatcatcatttgcttcatcaaaagctagttatatggtgatttttcccagataaaatgaattcttggccttgtctgttctattccaaagcttctctttttgccgaacaatgaagagatcgaaataatgctttatagaacaagttggtatataatatgaggagaa

SEQ ID NO: 5462 - DNA, 430 bp, Zea mays
agcttctaaagggagagcacattctgggactaacctatgttcattttgggaaagacaggatttgtagtgcatgccaagcagggaagcaaattggtgttcatcatccacacaagaacatcatgacgactgataggccactagagctactccacatggatttattcggcccgatagcttacataagcatcgacaggagtaagtactgtctagttattgtggatgattattctcgcttcacttgggtattctttttgcaggaaaaatcacaaacccaagagactttgaaaggattcttgagatgggctcaaaatgagttcggcttgaggatcaagaaaataagaagcgacaacgggacggagttcaagaactcacaaatagaaggctttcttgaggaggagggcatcaagcatgagttctcttctccctacac

SEQ ID NO: 5463 - DNA, 425 bp, Zea mays
agcttgacaacgaggaaatgacgctcatcatcaatagcttccgccaaatcctcaaacaaaggagggggaaggattacaagccccgctccaagaaagtatgctacaagtgtggtaagcccggtcatttcattgctaaatgtccattatctagtgatagtgacaggggcgacgacaagaaggggagaagaaaggagaagaataggtactacaagaaaaagtgtcgcgatgcccatgtttaccgggaatgggactccgacgagagctccaccgactcctccttcgacgaggatgctgcaaacatcgccgttaccaagggtcttctcttccccaacgtcggccacaagtgcctcatggcaaaggacgacaaaaggaagaaggtaaatcaagatccttcactaaatatgaaacctctagtgatgaggata

SEQ ID NO: 5464 - DNA, 385 bp, Zea mays
  unsure (1)..(385): unsure at all n locations
agcttgaaggactgcttcggcaggagagcttctgttcgtgaagacttgntcggtccacggaatcgctttatccgagcgcaagttacttatcgcagaaggtgatgagtgaggtatccgtatcccggaggcgtangagtccctcggctcggtcagccttggctgcttacgtgtaccccgtcgtttccaggatccgctttccgaagtagtcaagaagcacgaaagaaatcctgctaaaaagagatcctttntcgaggaaaaattcgacgcagagggggtctccccccttttagcccccgagggagggtcgggctttgccgatgctatgccgacccttccttgacgactaaactttgcgtaagtgcgaggcatatgaacaacttgtaaa

SEQ ID NO: 5465 - DNA, 431 bp, Zea mays
  unsure (1)..(431): unsure at all n locations
agcttcgagaagaagctctggttgcaagatgtcttgtcttatagatgtgcagccagtgtggagaaaacttcaatgtggcctccattgatattgagggagaaaatggtggagctccaatgtacctgcctccactattgcctccgccacagtgtgaatcgaagctaataaccagagcagatgatactgaagaagtggtaaagaaccggctacgtgtgtaccatgatctggtaggttccggttgcctaagattgccttctgatagttntcgcttgctcagtagtttttaaaatatctattcatgcaacctgaatacgcaatttgtggtacttgtagtgaatgagtttgttgttgatatagatcagctagactatttcttgcattatanaagccctatatatctattatttgtacatgtgaaatattgtaaattg

SEQ ID NO: 5466 - DNA, 317 bp, Zea mays
tgcagctttaacctccgttttgacgttaatatttatttacccgggagccacaacagagctcgttcagggctttgcgcattggctaagggagccgtgggttttgtaagtccaaatctatagtcttaatgaccaaagctcaactataacgggtgtccaaagaatgctctattgtaattcatggcataaaagagtccgcgctgggctgaataattatacttcagatttctttgacaatgtcgtagcttactttaaagttttatcatgagcttgaaaggactccatattagtaacctctcccaatggaatctttaaaaata

SEQ ID NO: 5467 - DNA, 392 bp, Zea mays
  unsure (1)..(392): unsure at all n locations
agcttnctccgcgaccaaatccgctcactcgagatcttttttccacctcgaggatatccactgcgcgccaggcacgaatcacggcgatcagtgtgaatccgggcgcgcgggtcactggcggcgaggttcactgaaccagcagatctttttgctactgtaccatcaagaattgctttacttgttctgatcgagtgttttgcaacgtgatttgcttcaaattttatgtagtgacttgatcatctctctatatcaaagttgtagctcaataatccaggtataattcaactatagtcaccatcctcaatcgatcactagatcccactccaatgcgaccccacagtcctgtcaatgtcactggtgaccctaattcagttatcagtgtgactgaaagc

SEQ ID NO: 5468 - DNA, 425 bp, Zea mays
  unsure (1)..(425): unsure at all n locations
agcttcgtaaaaataatctccgaagctatgcctcgaagatcaatattgnttctccctgtaacttggcatgatttgccctttctcaaagcattttccgaagatcgataacatgcccccttcttgtgccacatgcagcatgatgtatgatgattatgctatgcaaaatgatgtgatgatgttatgttatgcaaaatgatattttgtgccgaagatacgcacattcctgcaatggagcacaatcttttgtatcaatactgactttntcattataagcctcccttatgagcttcttcgccttttacttcagcggaatcagcgtttatttttcgctgtaagttctgcatccccttaagaacgtctttggaacttctttcgcttttactttcggcggtatcagcgttgacttttcgctgtaagttctgcat

SEQ ID NO: 5469 - DNA, 430 bp, Zea mays
agcttgtaccgccacagaggaatcaataaactattaacaccatccttttccaaagtaaaacttgatagaaacacatgttggatagatcgtaccacgatcaagatagacctatgacggaagccttacatgatagaggggtagctaggtggctgattgagtaagccctacacgctactataagggatgggagttcttccctattccctctaagattgatgtgaggtcgttcaggacgagcatgcatgcatcattaattaaactaatggataattgggtgagaactttaatacaaaacgatgaccaattaagtaccccagtaccattgttgtagttagagagaagctgagttgtgtttccttttcttttataattctttttcttttacttacgtttaaccgtacacagatgacttctcaccgatcctcggacg

SEQ ID NO: 5470 - DNA, 415 bp, Zea mays
agcttcttcaccatgtgatcacggttatcttgatattgttgagcagtgcacttcctttttagttttgtcaagctcatctttagcctctcattttcttctttgagctcttgatatgtatcatcttttgttcctgtaaattctagctcaaaggaggatttgcttattgatgagcaacaagcattagcacatggtaatatagtttcaatttgattacatgtgcatgagtgaggttgttgggattttaagttttctttctcaacatcatgagcaatgtttaacatgatatgatcatccataagattttcatgagaacatagaagcatatcatatttttcttgaaaagctagattttcaacttttagcttttctacttggtccttaagcaaggcattcctatatactaattgagcgatac

SEQ ID NO: 5471 - DNA, 425 bp, Zea mays
  unsure (1)..(425): unsure at all n locations
agcttgaagccgagattcanaaaagatcagagctgaaagaatccttgacaaatcttcagaataagtgcctggagttcagcaatcaatgcattcaacagttgaaacaggtattccattttgttggagccagtagcaaaaagttcactccttcggctgaagacctgtcaggtgccttctagcatattgaaggtgaaattaatgatcttgacgaggttatagctgggcatggcgacttctacgccctggcagcttctcggggcacagatgttgcctttttgaagtctggctgtgaacacgacaagattgttaatagacccaacttcagcctatcaccagcagacctatataacattcccagcctggcccgaagtattgcgaatagatntatataaatagtatggacaaagggtggacggagcacagct

SEQ ID NO: 5472 - DNA, 426 bp, Zea mays
agcttggccactgggccagggactgtcggcagccactacgtggtcaggccaacgtctcacaggcggaggcggaggaggaggccctgctcctggcacatgcaagcatcgagccacctccagcggcactcctccaccttgatgagtcgaaagcacgcgctttcctcggcgacggctccaacaaggacatgatcgaaggatggtgcctcgacaccggcgccactcatcacatgaccggccgacgggagttcttcaccgagcttgactctagcgtccgaggctccgtcaagtttggggacgcctccggtgtagagatcaagggcgccggctcagtcgtcttcaccgccacgtctggtgagcacaggctgctcaccggagtctactacatccccgcgttaagaaactctatcatcagctcggacagctgga

SEQ ID NO: 5473 - DNA, 319 bp, Zea mays
tagctttcttgtgtcattccgatagaagcgtcagatattttggacgaattctctttaagaggggtggaatgtgatacccggtttgcaaagaagaaaagctgggggttgttttttttgttttttttccctcatccagttgttgttttggggatttggaattttgtgaataacatttgccactagggcagtagacattttttggtttgacatttgcgttgcggtcgggagctgtcgcgtgggttagttgggccgcaattgttgtttcggcccattaagcctcccaaaccctagccgccaccctcctatctactctccctta

SEQ ID NO: 5474 - DNA, 425 bp, Zea mays
agcttgaaggctcagtgcgacaaggctatggacaatatcccttcgcgcggggtggatcttgatgagaaggccgggtgtgattgttcctgacgacataattgctgatgtcaacgctgctcctgactcttcgagtcgttcttcttcatcaggtgctcctgagaaaaacattactaattagaaacactgaatgccttgtgtatctggtcaatatgctcgaatattcttgttagaaaatgctctcgatactgaatgctattatttttctgttctttgaattcaacagtcgctatgattgcggaggtaagtgcagcgtgatggttttgaagcttcttcctatttcgcggggcttagagatcgccctaagacgagcaatcgaaaacatgcttatgcttaatcgagtagtcgcgagcgtgccgtgcccatta

SEQ ID NO: 5475 - DNA, 393 bp, Zea mays
  unsure (1)..(393): unsure at all n locations
agctttgaattgatgatcaaaggctccaagaagatcatcgagcaaggcgcctcctcctccgtacctgaggcataacccgttgcattcaaggcaatagaggagaagaaagaagactctacaccgagtagggtccccatcggcgcctccaaactcgacaatgaggagatggcgctcatcatcaagagcttccgccaaatcctcaagcaaaggaaggggaaagattacaagccccgttccaagaaggtgtgctacaaatgtggtaagcccggtcatttcattgctaaatgtccattatctagtgatagtgacaggggcgacgacaagaagggaaagatgagagaaaagaagaggtactacaaggacggcgatgcccatgtntgtcgggagtgggac

SEQ ID NO: 5476 - DNA, 389 bp, Zea mays
agcttagcaaaagaaatttctagaatcaagaatattgagctcatgcctaagtctggtaaaagattgttcatcaagtggcttggtaaagatatcggctaattgatctttagtattaatgtaagaaatctcgatatcccccttttgttggtgatccctaagaaaatgataccgaatggctatgtgcttagtgcggctatgctcgacgggattgtcggccattttaattgcactctcattatcacatagcaaagggactttggttaatttgtaaccgtagtcccgcagggtttgcctcatccaaagcaattgcgcgcaacaatgtcctgcggcaatgtactcggcttctgcggtggaaagagcgaccgaattttgcttctttgaagcccaag

SEQ ID NO: 5477 - DNA, 433 bp, Zea mays
  unsure (1)..(433): unsure at all n locations
agctnttagttntgaagcttcggctttgaaaatagttntttagtgtctccgaagatgtctgaagataagaagactgctgctgagatgaagctgagcctcgacgaagagaaaaacttggggtttcttatagcgatgtcaaagaccaacacagaaaaaattaccaaggagattctggaaggtttgtctgaagatactggtgacagtgacagctatgatgtggacagtggtggtgaagactccgaagatcgtccctggcgaccaagccattcagtttatggtaaatcaacgatcaaagagaatcatcttgtcaacctgagaggaaggtatttccgggatttgccattgtgagggccgacgaaggggagaaaacttgcccacaccctgaagagaatgaagtcgtagtgtaccgaagctttttgaaagctggactgcg

SEQ ID NO: 5478 - DNA, 419 bp, Zea mays
  unsure (1)..(419): unsure at all n locations
agcttgttgtctttctcttgggactatcattttctttttatgagactactacatgaaaaagacttggaaaagaggtattagctctcaaagttctcagattataagagaatctccccctgagagtgtgcatacaacgtttgaatacttggaggagacatgcacttttgattgatatcaagaggggcagattatccataatccgagctttggcacatatnaagtaaatgataccaattgttggatataagcttttgaagcattagtgtcatttacttagagatgttaaataagctatgtgtcatgcttaattaaacatattaaaccatgtaggtttgctcaagaatattgttgggggccttcggcttccgaaggcctcaaaaacatgatntgacaatgttntccaagtatgtgagcacgca

SEQ ID NO: 5479 - DNA, 411 bp, Zea mays
  unsure (1)..(411): unsure at all n locations
agcttatgaagattcttcatcccaacatgagctagtcttgtatgccagagccaacccatgttagtcttagcaattatgcaagtgtcgagttcagctccatcaaaatctaccaagtatagctgaccctctaacactcccttaaatgctattgaatcatcacttcttctagagacagtgacatcaacatcagtgaatagacagttgtagcccatttgacataattgagaaacggaaagcaagttgtaatctaaggaatctacaagaaaaacattggaaatggaatggtcaggagatatagcaattttaccaagacctttgaccaaaccttgatttccatccccgaatgtgatagctcgntggggatcttggtttttctcatatgaagagaacattcttttctccccggtcatg

SEQ ID NO: 5480 - DNA, 116 bp, Zea mays
agcttgctcacaacaaatgagttatatcacgcctcgtatcgctagcttaatacatcagcaagccaatgatatgagaatatctcaaatgatccctttctatactctcattctctctt

SEQ ID NO: 5481 - DNA, 431 bp, Zea mays
  unsure (1)..(431): unsure at all n locations
agcttgtgaagattcttcatcccaacatgtgctattctttgatgccagagccagcccatgttagtcttagcaattaagcatgtgtcgagttcagctctatcaaaatctactaagtttagctgaccctctaacacacccttaaatgctattgaatcatcacttcttttaaagacagtgacacctacatcagtaaagagacagttgtagcccattttgcataattgagatacagaaagcaaattgtaatctaaagaatctacaagaaaaacattggaaatagaatggtcaggagatatatgctatttaccaagacctttgaccaaaccttgatttccatcctcgaatgtgatagctcgatggggatcttgngttttctcgtatgaggagaacatcttcttctcccctgtcatgtggtttgtgcacccgctgtc

SEQ ID NO: 5482 - DNA, 428 bp, Zea mays
  unsure (1)..(428): unsure at all n locations
agctttgtgtgtgcccagaatagtagaatttatatctctctttaaccttcaagtagcgcaaaactcgttctagagcatgctaatgatctgaccctgtgtttgacatgaatctactcaacttgatcatagcaaaagagatgtgggccttgttgtgctagcaagatacatgagagaaccaaaaatatgagctcaattggtatataatagttctcttatttattcacagtgtcacgttcggatcataatgtgttgacgaaggtttacattctatgaaaccaaagaagctcaaaaccatcacaatatagtgagattgtaaaagagtaatcccaccatctgtatttattaatttaatgttcaaaataacattagcttctcctaaatctttcacatcaaagctctntgataagaaagacttgacttcattgatc

SEQ ID NO: 5483 - DNA, 412 bp, Zea mays
agcttgtggaggaccagatcatcaaagcatataagtttctggatgagaagtggtcacccaagttttgttgataaagcaccagaagaccaatcaagaaaggaatccatgtgggagttcgcaagagaaaggtttgcgtgttggcatcaatgcttcctcaataagctagctgccaagcgaaagctagaagcctgaagatgatctttgagtagccagaatcagcgtttgcaatcagcaaccagatgctctgccagaccagattttgttgaagttccatctcctcaaagagtctgcaaagtgaagatatgtagcagaagtaaagctatacccataacccttctaagccgaatctcgaggacgagattcattttaagtggggtagatttgtagcatcccacaaattcacatcttgaaa

SEQ ID NO: 5484 - DNA, 428 bp, Zea mays
  unsure (1)..(428): unsure at all n locations
agcttgtgacgaanaacgatctaacaccgcataggggctactgttgggggtcagcttcgcagccgaaggtcctgtaagaagaaacaccttctgaagatcagcatggaaataaagccgaagctaccttacagggaacttcggcataacgacatgcctaagacgaaaggttgcaccgacttaaagatgaaaagacagattgacccatgatagtntgtatcacgaatgtaatcaattgtaaagggtataaatgtaatttcacacaggatgcgccctgtgcctataaatagatgaacagtacccctgtactgttcacgctgatttgtactcgctcatgtgtcacgtttgttttcataccttctgtcaagccgaaggtacgatgtaatcttatgttgtttttattcgctcatgattatataataataaatata

SEQ ID NO: 5485 - DNA, 428 bp, Zea mays
  unsure (1)..(428): unsure at all n locations
agcttggaggcgtcggttggaagcctacttggtgtatactccctcttctcttcttccgccgctttgaatgcaacgggttgcacctcgggtgttgaggtggcgccttcctccaagttgacaatatgtttggagtctttgatcataagttcaaagctcacaaacttgccaatcacttcctcgggagacatctgtttatatctatggtctccacggattagttgcacttgagtgggattacgaaaaacaagtgatctaagaataaccttgaccattntatggtcatcccacttggtgctcccgaggttgcgcacttggttcaccatggtctttagccggttgtacattgcttgtggctcttctcctttgntgaggacgaatcgaccaagctcgccctcgactgtntcgcgcttggtgatcttggtcacctc

SEQ ID NO: 5486 - DNA, 399 bp, Zea mays
  unsure (1)..(399): unsure at all n locations
agcttgcattgcatatttacatttcttgtatttgatctatgacttgtctaacctagctgagagtaccgccaacaaagcgagtgaaaaagcttatactcgggatcaaacttgacaagtcttagatttaagcttttagcaattaaattcttacttactatgcaactgntggttcttgaaatatgcatgaggtacttcacttagggggagtattcaaaactcaaaacactcatgaaaacccctagtgtaaggccaaaatgcgaatttcaccatttgcctattttacctagaaattatctagcctatggcaaaatattttgaatattatgagaaaatatatgagggtgccaatacctatcccaacaagtgttattgtgtgtgattataagtcgggatttggtt

SEQ ID NO: 5487 - DNA, 417 bp, Zea mays
  unsure (1)..(417): unsure at all n locations
agcttcggctccatctatgttgtggattgtcttttaatctgtccaactcccttcagcccttctggcagcttcttgacttccatggacaacaatgggcccttgttccgaaggtatcttcatgcataagtatgctggatgaagtatggcttcgaaggcattaagcgtccctcgaccaatgattgcattgtatgggtaatccatgtcaacaatgtcaaagataacatgctcaaaccttgtgttatgaacataactgaaggtaactgacattgtgattntaccaagtgccacaatctgtcttcctccgaagccacaaagagggtgtgtagcatcatgaaatttgtcctctggctcttgcatctgcctgaaagcctntgcaaatatgatgtccgctgcactacctgtgtcaaccagaacatt

SEQ ID NO: 5488 - DNA, 419 bp, Zea mays
  unsure (1)..(419): unsure at all n locations
agctntatcaaatggacgtgaagagtgccttcctttttgtttaatcaaggaagaggtctatgttaagcaacctcccggcgttgaagatagtgagtaccctaaccatgtttataaactctcaaaggcgctttatgggctcaagcaagccccaagagcatggtatgaatgcctacgagatttccttatcactaatggcttcaaagtcggcaaagccgatcctacactctttactaaaactattgcaaaacatttgtttgtatgccaaatttatgttgacgatatcatatttgggtctactaacaaatctacttgtgaagagtttagtaggataatgattcaaatattcgagatgtctatgatgggggagttgaagtattttctaggattataagtcaagcaactccaagagggcaccttca

SEQ ID NO: 5489 - DNA, 426 bp, Zea mays
agctttacaagggttaatacaaaagttttcttagaattttattcacagctaggtattcgagcttcatcatcatctgttgagcttcggattgtctgctaagcttcgactctgtgttcttcggcttcgccatcctgtacatatcaaagcattataaggaaaatccaagtttcaacgaaaaggtaagcctaacgtatggattttattcccgcgttgagatggactcgagctttctcaccagctaaggtttccccacccttcgtccatatatgctttatgaatactgttcctatgcttcgagctaagctggggatattaatcagatcttttggtgataagctgaagattggtctattaacacattttccatgcgtgcaaccagacttcatgaaggcaacagctgggccccgagaagctagaagggcacat

SEQ ID NO: 5490 - DNA, 421 bp, Zea mays
tgcaagcttgcgcgccttgatgacagcggagaggtactggtctctttgcgcgacgctgcgggccaccgtgctctccattcctaggcccatccacttcttgcaccgccacaagcacctcgggaatatgaaccgcgtgagcgtcgtcttcgtggcgcggtcgaacgccgaggcgaatgcgttctcctgcaggcccggcgcgagcgtctctgggtccttgtcgaacgcgaggccgcagatgttgtctaatgtgatgcggatgaagatgtcctggatgtccacatgcgtcttttctgtggccgcctcttccaagatgggcagcagcctgatgtggatggagcgcgacacccagcgggacatggtcgtgcggagcgtgcgcgtggtgaactcaagcgcggacgtcttgcgctgtccacccacgtgt

SEQ ID NO: 5491 - DNA, 418 bp, Zea mays
agcttgtgaaggttcttcatccccacatgtgcttttctgtgatgccacagccagcccatgctagtcttagctattaagcatgcatctagaccggcctcttctttttgcaaatcaactaaatagagtttgccgtctaatacacccttaaaagctagtgaaccatcactttttctaaagacagacacatctacatttggtaatagacagttatatcccatattgcataattgacttacagatagcagattatatccaagagactcaactaaaaacacattagatatggagtgctcattagaaattgcaattttacctaacccttttaccttgccttgattcccatcaccgaatatgattgaatcttgggaatccttattcttgacgtaagaggtgaacatcttcttctcccccgtcatat

SEQ ID NO: 5492 - DNA, 325 bp, Zea mays
agcttccgcgaccaagtgatcgaattctttaagttcttcttagttgaagaccctgagcatctgtttggtgaaagcaaatgttctctgacccattatgtcccatttaaaatataattcattatcccgcatactatgaacaacataatgattgactagctttctatttaccttgtccttgattaaccttttgggttactatggttagccttatgctcgccctttactttaatcaatgaacatgatgagatacaatgatgatactatggttttattctggatatgatgatatactcgtggcattttaagggactccagcttgttctat

SEQ ID NO: 5493 - DNA, 396 bp, Zea mays
  unsure (1)..(396): unsure at all n locations
agcttcaccgtcgtcagccattttccagtttgtctctccctccctctgcttcgnttaagcttctccccgtgtctgtgatgcttactgaaccgtccaattgggctagaagtcccctgaccggcgggaacacatgaatctttggtccatccgtgcgctctctgtggccagaccaaattaatccaccaattgtgccattaacttaagggaatcgttggccggggtgtgaattctggttcgaccgaaaaaggacgtcagtccttgccccaatcggccggcacagacagctcgccggagctcgtgcgtgctccgcgccgtcggtgacttagccgtgccaagaatagaaaccagatgggctcggtgtaagcgtagcgacttatgaatattgtacggatctac

SEQ ID NO: 5494 - DNA, 419 bp, Zea mays
agcttaccacatttgaagcatgagcgcttccccttttttttggtcttgcttggctgccccttgcgacctcttagcgccgtcttgaatctcttgatgatgagagccatcactttatcattaagtccggccgcctcaatttgtgccaccttgctaggtagcgtctccttgcttcttgttgccttgagagcaagaggttgaggctcattgattggaccattcaatgcggtcgccacgtatcttgcttccttgatcatcattcgcccgctcacgaactttccaagtatctcctcgggcgtcatcttggtgtacctaagattctcacgaatatctgttacaagatgaggatcaaggacagctaaagaccttatcattatgcgaacgacgtcgaggccgtccatcgcgtgttccatagcttttat

SEQ ID NO: 5495 - DNA, 426 bp, Zea mays
agcttcatgcaactgctgccagaaatgagaggtgatctgcgttcctctgtctgacactatcttctttggcacaccatgaagacaaacgatccgagacatatacaattctgccaatactgcactgctatagttggtcttgacaggtatgaagtgggctgacttggtcaagcggtccactactacccaaatggaatcgtagccggctcgagtgcgaggcaatccgactatgaaatccataccaatttcatcccatttccactgagggatctgcaacggttgcaacaatccagcaggtctctggtgctctgccttaattcttcgacaactatcacacatagccacatgctctgcgatctcccttttcattccgtaccaccagaatttcttcttcagatcctgatacatcttctcactgccagggtgaat

SEQ ID NO: 5496 - DNA, 425 bp, Zea mays
  unsure (1)..(425): unsure at all n locations
agcttcngcgacggttaaaaattttggcagcatatctatgcaaatagcaatgaatgctgtggtaacttcacacctactcgtttgtttatatagtgctgcaggtaagaaggcgaagcgccaggatttttacaccaggcggacactcgcttgcgctcactgcgcggtggaccgcatagaccaaacagtaactctgaaaggtggggctgctacacgctgagaaattaaatcgtttctcgacaacgagctcacggaaggtggtttttagaccttcggtgctccgaagcctaagagactttttttttcacggaccaagctcgttacgaaaaacgatctatcaccgcgaaaggggctactgttgggtctgtgcttcgtcgccgaaggtcttatagaaagaagtggtcctcggctgaagctgnttacataag

SEQ ID NO: 5497 - DNA, 422 bp, Zea mays
  unsure (1)..(422): unsure at all n locations
agcttaattccctttcaggtctcatatgctatgatttaagaacaaggcaacacaaaatattaaatgttaatgtccttcgtccttcgaagcattatntcccgtagtatataatgatcttcaaacgaaggtcatgaaggacataccttcatcatcggggcatatgttaataaaaggagacacatatgaaatatatgacacaacatgaacaattatacagcgttatcaattcatcctcattatattatcatggagaaatagaaacaatattaaattacatatgtaccttcggcttgacagaaagtaaaagttcaagcgtgacgcacgagcaaatacaagtcagcgtgaacattactggggtactgttcatctatttataggcacaggacaaagcatgtgagaaattacagttattccatttacat

SEQ ID NO: 5498 - DNA, 432 bp, Zea mays
  unsure (1)..(432): unsure at all n locations
agcttaaaactttttccgttaccaaggaggaccttcggattaaaaatccttcggagtaacagaaagtcgttctaaggaacgcagagtaagtttatgaagtcacaaaaagccgttccaaagggagcgcagtgtaagttttctgctcagaagtcgttcctaaaggaatgcagagcctacagcgaaaagtcaacgctgataccgcctaagtaaaaggcgaagaagctcctatgggaggcttacagcgaanagtcaacgctgataccgcctaagtaaaaggcgaagaagctcctaagggaggcttacagcgaaaagtcaacgctgataccgtctaagtaaaagacgaagaagctccaaagacgttcccaagggaatgcagagcttacgaatatattttatgtgtatcttcggaacaaatgtcacatgcataacata

SEQ ID NO: 5499 - DNA, 420 bp, Zea mays
  unsure (1)..(420): unsure at all n locations
agctngagtcaatcattttgcaaaggataattgatgctcttaagataatctgggtatgaagtacatacgagagaagataatggctggagtagccaaatgttttaaggaagacgatcaaagtgtgatatggtttaaaaaccgcatagtaatgccaaaaaacgaagaacttcgccagcaaattcttgatgaagcacatcttattcgttattctattcatcccggaagcactaagatgtaccaagacttaaagcaacattactggtggacaaaaatgaagatcgaaattgcacgctatgtggctaagtgtgacacttgcagacgtgtcaaggccatacacatganaactgctggtccattgcagtcattaccaataccaacatggaaatgggaagacatcagtatggacttcattgtgggatt

SEQ ID NO: 5500 - DNA, 429 bp, Zea mays
agcttatttgctaaactgaacaactaggatactatcttatcctgtgtgagaaaagcagaacaaaatatgaaaataactagtttgaatgaacttataaattaccatgacaagaattatgtactatcaaaccagataaaaaagataaaaacatattaccatcatgcaatgcagggtctgatgtgtttagagcagtggagggcacaaaagaaatagaacacaatttactctactgaagatgttgagaattctataaaaaattatgttggcacagactcgacattcaaatatatggagcacatggccatggcaatagcaacaagtaatttaacagaaagcaaaggtggtcaactttacacatttgttaaattgaatgtcagatacaaattcaagaccattgcttacacaatgcttatttgctgaacctgaaca

SEQ ID NO: 5501 - DNA, 347 bp, Zea mays
  unsure (1)..(347): unsure at all n locations
agctngtcctgcccactcctgcccgatattttgcctaattttgtcaagaagtcatgcttccctcgtgagcctggcctgcatgtcgcggatttgctcgagctgtgcgttctgaccccccgcagagactgggaccacagctatgctcccgaagatgtcaacgcgaggcgcacgcctatgggatcgccgttctctatcataccaagatgggtgccttcgccgagaccccctatatccgaccggaaacattcgcgacttgggccacagtcctcttcgtcaaagctgtggccatcatcggagccatctgagaggcattgatcacatgcggtcatgaagttccacatggccct

SEQ ID NO: 5502 - DNA, 53 bp, Zea mays
agcttggatgactcgaatggaggtgggtggggggtgtttctcttccccccccg

SEQ ID NO: 5503 - DNA, 401 bp, Zea mays
  unsure (1)..(401): unsure at all n locations
agcttaacatcctcatgaatctcttgcaaaatgttgttgatactcggaggtaccccatcaaacacgcaagcattcctttgtttccacaaccgccaagacaccaagataagtagggaattaaacgaaaatgttgcgtcaaggtactttgatacatttatgtccaaaacatagtttattatcatgacatcacagttgcagatagcaagacatngtgattttgtacgctcatacattcatattaagtgatggaaaaatactgctgtatatgatatttcccttttctgggagttatgtctctactaccttggcgggaagtcataacaaaagtattttgggaagattcacatatttatttattgtctccatagcactgtgtatagaatcaaaccagacacttctgg

SEQ ID NO: 5504 - DNA, 419 bp, Zea mays
  unsure (1)..(419): unsure at all n locations
agctgcaggacgtcgccctcgtacctgagacgactgtgcaaccagtccccgatgtgactacgtcgctcctcgtcgaccaaaaggtactgactaactcccatcttacgtcatttcgactcggcctcaacccgcctagcaaccttgctttggcgggcgctctcattgaggcgagtgcaaccccactggggtttcgtatgtggtcgccttgggaccgattgacggacgtctcaacctacgggccctctgggtccgaggaagatgacgatcccagcatctgttgggatttctctggatatggcgaccccagtgccatgcgggacttcatgaccgcatgtgactactgtctctccgactgttccgacagtagccgcagccttgacgatgaagactgcngcccaagccgcgaatgttccacgtca

SEQ ID NO: 5505 - DNA, 439 bp, Zea mays
atccttatagtaacctgctgcatgcatgcttggaacactataaattaggagggttattcttctttgcacatcaccgaacccatgctcttatgtgagacattgcacaacaaagggtgctgttgggctctcaattattcgaagaacatgagaaaacctttattaagttcttgttcaacaattaagatgttttttgatggtcagcccatgatccttgcgggggtaacagggatgctattgaacactcgctcaatgttgacccattcttcatacccagaaagcagaagcttctgaaaatgtctgatgacaaagcctaatgtgctcgtaatgaagtcaaaatactcctcagtgcacgagttatcagacaagctaagtacccagaatggctatctaatactgctatggtatataaggcccattgccaatggcaaatgtgtatcga

SEQ ID NO: 5506 - DNA, 417 bp, Zea mays
  unsure (1)..(417): unsure at all n locations
agcttatgaaggttcttcattccaacgtgtgctttttgtggtgccagagccagcccatattagtcttagcaattaagcatgcatctagatcgacattctcttttgagaaatcaactaagtagagcttgccgtctaatacacccttaaaggctaatgaaccatcacttcttctaaagacagatacatcaatatttgtatataaacaattataacccatatgacataattggcttacaaacaacaaattgtacctgagcgattctactaaaaacacattatagatcgaatgctcggttgtgatggctatnttgcctaatcctttgaccttgtcttggttcccatctccaaaaatggtagtgttggagacttgttctcaatactatgaatcaagacaaggcacacaaaatgttaatatca

SEQ ID NO: 5507 - DNA, 416 bp, Zea mays
  unsure (1)..(416): unsure at all n locations
agcttgtctcaagggacgccgtactatntttgatgtatgccacagctaacattggagataattatcacatgttggtgttggccctttctgaaggtccctcataattttcaggggtgataatggggagctaagacttggagtgcgccgtgcagctcagcttaaaaatggatctgctttccagctctttataaccagtgctcaaattggcagtgggagatagttggcctacatttctgcctgtcctgtgcagtgtggccgagctgatgggtaaagacaactggaccatttcacctcgcttcagtagcttacagtttccacctgaaatattctggcatctgctgggcatttctttttattgtccagctacatcctcgaggctaactacaggggcatttccttttattgaccagctacat

SEQ ID NO: 5508 - DNA, 423 bp, Zea mays
  unsure (1)..(423): unsure at all n locations
agctnttaccccttggatcaaccatcaactagctccaaagtctaaagaaaaacactgaanattcagtttcagaggtctgaaacggcatacactaattctgacaaggcaagtttgggagcaatttcactcacaaccttgtacagtaccaggcccactcacttcaagagacatgttccccttcatatggactttgactttactacagaacgcttaaccaaaatctccgtagattaattatcatagagctccaaactgggcaacttgctgccattcagggttcagaactgaataaaaattcagttattaaccaacctgacaatccaatctttgagcaactatatctgcactttttgtatgggatcaggtccaccaccctataagaaagttgtccacattatatggtcttcacttattttacaaaca

SEQ ID NO: 5509 - DNA, 356 bp, Zea mays
  unsure (1)..(356): unsure at all n locations
agctntaccctgtagtctggactataagttggttactgtaggtgtgccttatgcagtttgaccatttccagcatttgcgtaatgaggactctatggagaagcctcgtaatgagaccctggccattcacctcggaagtgaatacaggtctagctaacccgggctagaagggaatcgcgactcatgggtaaagatgtgccaactctgcagagtgtaaaactgatatatcagccgtgctcacggttatgagcagcctggactcctcacatgataattgaacttgaagatgaaaataaatcgagatccgatgatctgccaattggttgcttaagtgggttcacttaagtgattttatata

SEQ ID NO: 5510 - DNA, 411 bp, Zea mays
agcttgtgaagattcttcattccaacatgtgctagtctgtgatgccagagccagcccatgttagtcttagcaattaagcaagtgtcgagttcagctctatcaaaatctactaggtatagctgaccctccaagactcccttaaatactagtgaatcatcacttcttctaaagacagtaacacctatatccgtaaaaagacaattgttacccattttacataattgtgaaactgaaagcaagttataatctaaagaatctacaagaaaaacatctgaaatagagtggtcaggtgatatagtaattttacctaatcctttgaccaaaccttgatttccatccccgaatgtgatagctcgctggggatcttggtttttctcgtaagaggagaacatcttcttttccccgtcatat

SEQ ID NO: 5511 - DNA, 422 bp, Zea mays
agcttgaagccatggtaagtagcatatgctaataatatattatttgactcacgcctagctacgggtgcataggtttcaccgaaatccaaaccttcgacttgagagtatcccttggccacaagacgagctttgttccttgtcaccacaccatgctcatcttgcttgttgcggaagacccatttggttcctacaacattttgattacgacgtggaactaaatgccatacctcattcctagtgaagatgtagagctcctcttgcatcgccaccacccaatccgaatcttggagtgcttcctctaccctgtgtggctcaatagaggaaacaagcgagttatgttcacaaaagagtgcaacacgagatctagtggttaccccttatgaatgtcgccgaggatggtgcaaccgggtgatctcgatgaa

SEQ ID NO: 5512 - DNA, 423 bp, Zea mays
  unsure (1)..(423): unsure at all n locations
agcttcaccacaccggtcatcgccccatcctcgacattcactcagccgccctcgntggcgttccttccctgcttccatgtcgcgcgcccctgccacgttttctgcgcgcccttcctgctcctcccttccctagcttgctcggacctcgccgcggagcttcctcgccggcgtgcacgcatctccttgggcaaagctctgctctcctctctctcgcgttatccctggagccccggcgtgtggttcgctccaattcctgcgctcgcctagctggcgcgccccagctcggatctccttcgcccatggcacgtggccgtcctactcgccgcgcccctagacccagctatggcgcgcctgctccctggctcgccacgtgcccaagccctcagattcctccttcctccttgctccctgttcagttgttct

SEQ ID NO: 5513 - DNA, 367 bp, Zea mays
agctttctttctcaccaaccaccagcagtggtactgtctttctgttcacacggcggagcatcaccggtgagcagtggttcggcacccacgtgccccaactaagctacgagtctatgctaaacacagcggagggtattaaaaacttattggagtgcaccatacccggtatcggagcgtctgcagtgttgtccacgccgcgggacggatccacgacatggtcgccaccgcggcgagaaattgccgcccttccgatcacccacgagcttgtggggctcatcgaacacactcggtgtttaccagcgaacgcccccgaacgcgccgtgcgtgcccaaccatgacggagatgatggacgccggttgcgaattc

SEQ ID NO: 5514 - DNA, 427 bp, Zea mays
agcttcatctgggggccaagtccttcgtcgtaattatggaagacctctaagggagttgtgcatcccaattgaacagggaaaacaactcctataagacatccatggcggcatctgtggcaccatgctgcctcgaggagcctcgtggggaatgcctaccgacagggattgtactagcccaccgcggtgtctaacgcgcatcatgtggtgagaacctgcacagggtgttagtactacacgcagcaaacccatctgcccgcgcagacactccaaaccattcctatcacctcgttgtttgccatctgggggcttgatctagttggacctcttaaaagagcactcgagcggctacactcacatcttgctcgcaatcgaccaaatctctaagtggattgaggcgtggcccctcgcaaagatcacctccgagctg

SEQ ID NO: 5515 - DNA, 422 bp, Zea mays
agcttacttagactgtgagatgacggtagaacaataatttaattcccgtcttgttcctgagcagcatatggttagacaagccactagtgaatttagagattatgctatcatttggtggaatgaacttgttaacacacatgctgcaccacaaatatggaatgcgttaaaagaggagatgcgagctcgctttgttcccccttcttatagacgtgatcttcgaaaaaattgcaacgcttagatcatggagacatgtcggtacacaaatactaccaagagcttaagaaaggtatgctacgatgtggggtagttgaggatcttatggatcaaatggttaggttttatggggggttgaggcgggagattcaagatattgctgattataaagaatatcattctatacaacgcttgttccatctttctat

SEQ ID NO: 5516 - DNA, 423 bp, Zea mays
agcttgacaactaccttgccggattgttagtttaaacataagaagcatcaaaagttttaaatgaaatgctataatcatttgatgcagcaggagttttccttttatgcaacttagcacgggttggttgcctagagctagatgtctcacccttatacatgaaagcatgattagggccagagtgagacttcctagaatgaattctcctaattttatgctcgggatagccggcagggtacaaaatgtaaccctcgttatcctgaggcatgggagccttgcccttaacaaagtttgataatttcttaggaggggcattaagtttgacattgtctctctcttggaagccaatgtcatccttgatgccagggcatcttccacaataaagcatactacgagcaagatttaaattttcattttcagttcatg

SEQ ID NO: 5517 - DNA, 414 bp, Zea mays
  unsure (1)..(414): unsure at all n locations
agcttatgaagattcttcattccaacatgtgctattcggcggtgctagagccagcccatgttagtcttagcaattaagcaagtgtcgagttcagctctatcaaaatctactgagtatagctgaccctctaacactcccttaaatgctattgaatcatcacttcttctaaagacagtgacacctacatcagtaaaaagacagttgtagcccatttgacataattgcgaaacggaaagcaaattgtagtctaaagaatctacaagaaaaacattggaaatggaatggtcaggtgaaatagcaattntacccaaacctttgaccaaaccttgatttccatcctcgaatgtgatagctcgttggggatcttggtttttttcataggaggagaacatcttcttctcccctgtcatatgg

SEQ ID NO: 5518 - DNA, 427 bp, Zea mays
  unsure (1)..(427): unsure at all n locations
agcttggatattcttcatctgagcactatggtcattgttgtgatacataaaaanttttcttcacgaagcatgaaaagaagggaaggtgttttttcgccgaaggctcaaaagcggtacgtatgtaaagtttcatgcatcgtaaagaattgaataatgaacagagacttgtatattacattcaaatgtaccaaatattacataaatcacacttcaactgtttttcctaataacacctagtcttctcttaatactacttcggcagcctcatttagaagctgttcaacaactctatccacgaatagttcggtcatttgtttaatttcgtcatccccttttgtgtgaaggtcaacaaacgatccagcaggttctgagggaagagaatatntttgcattactattacaaaccgcgaacaaagtttgaaataaa

SEQ ID NO: 5519 - DNA, 415 bp, Zea mays
  unsure (1)..(415): unsure at all n locations
agcttctaaagggagaacacattttaggactaactatatgttcattntgagaaagacaggatttgcagcgcatgccaagcaggaaagcaagttgggtctcatcatccacacaagaacatcatgactagtgacaggccactggagctcctacacatggatttattcggcccgatcgcttacataagcatcggcgggagtaagtactgcctagctattgtggatgattattctcgcttcacttgggtgttctttntgcaggaaaaatctcatacccaagaaaccttaaaaggattcttgagatgggctcaaaatgagttcgacttaatgatcaagaaaataagaagcgacaacgggacagagatcaagaactctcacatcgaatgctttcttgaggaggaaggcatcaagcatgagt

SEQ ID NO: 5520 - DNA, 412 bp, Zea mays
  unsure (1)..(412): unsure at all n locations
agcttatcccagtggcggcaccccaaaccctagaccctctatctgccaccccacgccaccatgagccgtgaactgtagctcgatcggaagctaagaaggagaggaatcgatgtctgaagtacctgtgcggatcagtttggaggagtggagcgaattgacggagattctaagccacgaacagcactaaaattgtatttcccccgaaaatttaatcatggacttaaaatacagacccttttatcactatttttgctcaaactttcagtcaaaaaaaattntggtactgggggtacttgtacttgtagggaaaaaaaaattagctgacttgcagcacggtagagtaaaaaaatcctatgtccgtttgctgccctgcaagtnttgaacttcgctgatgccaaatacttatttctat

SEQ ID NO: 5521 - DNA, 428 bp, Zea mays
agcttaatgagtttctggcacttactcaggggaatctttctgtgttgctgtacgctcaggccttcaatgacctgtgtcagtatgtcggatatcatgcacacactgatgagaagaagagggatatgttcatgagggggctcaacactaagctccgcgaccgtctcaacactgtcaaggccaatagttacaatgagttagtcaacatggccatttcccacgaagactgcatcacagcccgtcatgtataaaagaagaagaagacccctgtggtatgatcatcagctcagccttagcgcttcagaattgtatctgacgctcagaacaggggacctcagcagcagcaagaacgttgggtgatccgaccacagcatgcacccaatcgctctcagcccccagttcagaggaaccataatcagccacaacagcag

SEQ ID NO: 5522 - DNA, 432 bp, Zea mays
  unsure (1)..(432): unsure at all n locations
agcttgagccactgttctagaagctgcaacctttatgtctaccttctgaaacacttctggtgccaggacagcaatggagcagccattcagccaaaggttagaccaaaacgtggtgattttttccatcaccaacattagaatccaccgagatttcaaatatatntttgacctgagtttggatgagtagatctagatgacaccatggcttgttgggatcagtcttttttagccaaagccattttgcttgtatagcccaaccctgaaactgaaggttaggtatgccaagtcctcccaggttcagcggcctcattacttagtcccatggcacaatacaactacctcctttcacctcctttctttccttccaaaggaaacctcgtctaattttgtcaatcaccttaatcacccatttagggatatccatggcaataa

SEQ ID NO: 5523 - DNA, 432 bp, Zea mays
  unsure (1)..(432): unsure at all n locations
agcttttaaagggataacacattctaggactaacaaatgtttattttgagaaagacagggtttgtagcgcatgttaagcacgaaagcaagttggtgttcatcatccacataagaacatcatgacaaccgacaggccgcttgagctactccacatggacctattcggcccgatagcttacataagcatcggcgggagtaagtattgtcttgtaattgtggatgactattctcgtttcacttggatgttcttnttgcaggataaatctcaaacccaagagaccttaaagggattcttgagatgggctcaaaatgagttcggcttaaggatcaaaaagattagaagcgacaatgggacagagttcaagaactctcaaattgaaggctttcttgaggacgagggcatcaaacatgagttctcttctccctacacac

SEQ ID NO: 5524 - DNA, 346 bp, Zea mays
  unsure (1)..(346): unsure at all n locations
agcttgtgaagattcttcatcccaacatgggctagtctgcggtgccagagccaacccatgttagtcttagcaattaagcatgtgtcgagttcagctctatcaatatctactaaggatagctgaccctctaacacacccttaaatgctagtgaatcatcacttcttctaaagacagcgacacctatatcattaaaaagacagttgtagcccatttgacataattgtgaaacggaaagcaaattgttatctaaagaatctacaagaaaaacattggaaatagagtggtcaggagatatagcaattntaccaagaccttngaccaaaccttgatttccatccccgaatg

SEQ ID NO: 5525 - DNA, 402 bp, Zea mays
agcttctcctgaacaagtgccacactcactacatagtgcgaagctgccacatacagcaacagaggagcccctggcgctggtggagttagagtcgttaggtctatcagatactgcttcagctcttcaaaggctttctgctgagctggtccccactgaaaaacttcggccgacttcagcacttcaaagaataggaaatttctctctgcttatctggatataaatcgattcaaagatgccaatcttcttgttagccgttgagcccctttctttgtgcttggcggctccatccgaaggatagcttcaattttatttggattagcttcgatcccttttgttgaaactagacaaccaaggaatatgcccttctttactctgaaaacacatatttctggattcaacttc

SEQ ID NO: 5526 - DNA, 402 bp, Zea mays
agctttccagattgttaaagagcgcattcatatgatttatgaaattccagttatgttccgtttactgtggctgttcctgtttgcctgacaaaaatgagtgggtctgttcactggtggatttcttatagtaaatagccgaattggctgctccaactatggagatatttgtagagagataaaagttcttactgccaaaagaatttcgtaaattttggttgagtaggttgggagatattgaatttcgaagttaactatgttgttgtttgaaacagattcagacatttatcttatcagatgttttagaacatatagatggtagaatttaattatccattgaataccgaagttgtagagtattttgtgtagatactgctagagtatttgtttatatcaccactttta

SEQ ID NO: 5527 - DNA, 415 bp, Zea mays
agcttggaacaaatgatgggtgttttctcccagagaaaaagatttacaaggtgtaactctaaagcataatctctatgtgactaaacgtggttgctgcgctatcaagcgtgtgcatctttgtcaaacattctaagcacccaccttatggcactgtgcaaatgtttcacgtaccatcattgtcatctgataaaagaagagaaatcatatggttaactacaacggcaaaaactctgctgaatacaaaaattaaagaaagcacgcaccaagatgcgaccgggagtctaaaaaatgcaagatagagagagagcagacttgcataaataataatttaagcactgtaaacagacatattgagtcaagtagacaatctattaatgtggaaaacgttgaacaacgatgccacattattgcatca

SEQ ID NO: 5528 - DNA, 423 bp, Zea mays
  unsure (1)..(423): unsure at all n locations
agcttctacagaagatggatgagtacattanagccttctttgacttctagcaaagaagggaagaagcttacagatattctaagatgaccaggggctctggaggaaggcttcaccaaaggcatgtcaggacgatacataatcccagcccaggtgaagacaaaggcaatcacaaccaacgacatcaacacaactcccagtcaactgggacgcaacaaagcttcttcagaccaccagccccaagaggcagagggggacgaagctctggaggaagattcaattcacaaccaaaaaggttgttctgcttgttctgtggagaggataaggtgcacataactatgacatgccaagttacactacataagcaaaaggagatagctaatgccaaagcactgcagaatcagctgaagcaagtcctacatattg

SEQ ID NO: 5529 - DNA, 144 bp, Zea mays
  unsure (1)..(144): unsure at all n locations
agccttgtgtggagttgggagaggatttgatctctctattgtgtcttgnattgaatgctataactcttgtaaggtgtagaagtgtacaaagttggatgcacttgaatgtggggtggccnctccattctatatccttcctccctt

SEQ ID NO: 5530 - DNA, 397 bp, Zea mays
agcttttgatcgatggaaacaacgaatgcttgaccttatacttgaaggactcctgaggtatgcgcgtatgcacttcttacgtccagcggcaggtcatagaactcctgaatatcgagctatatgttcaccataatctcttctggaactccatgactcactacctgggagtgagttacggctatatgaatgaattgctatttttgacaatacccgcgtgataagcataaaatctacacgaaatctttttctggaagaagcacaacaagtgcattcaccacagcatacttttgtttcgaaagcgctacgcgtcattaattaaggaaagagtttaggctataagacgagtctcataggccttctataccctctaacaagctcataacatattatgacgggg

SEQ ID NO: 5531 - DNA, 408 bp, Zea mays
agcttgtgagcaatacaagttcagaagggaaaatgctgcttctgctgatcagccgaagcccatgctcatatgtgaggacatagcacagcacacagtgctattgggatctgaactgtccgaagaacaagagaaaaccttgataaggtttttgttcaacaacaaagatgtttttgcttggtcagctaatgatctttgcggagttaacagggatgttattgagcactcgctcaatgttgatccatccttcataccaagaaagcaaaggcttctgaagatgtctgatgacaaggccgaatgtgctcgaaacgaaatgaatagactcctcagtgccggagttatcagagaggtaaaatatccagaatggttggctaacactgctatggtaaagaacgcccatgggaaatggag

SEQ ID NO: 5532 - DNA, 469 bp, Zea mays
  unsure (1)..(469): unsure at all n locations
atccttaagtcacctgaggcatgcaagcttatataagatttcatctttgctcagttattatatgttgttgccgaactctgccctttccagcaatctacttccttaccatctaaattccaaatgcaaaaggtttgatcagctagaccagacaatatttgctttccatctcgaaaccaagcacatgatctcaaaccaatgccaggatgttcataaacatgaagaacattgccagatntaacatcccagcgtctgatggcttcctcctgcccacatgtgaggagctggcaatcatctgaactccatgcaaccatcatcactgactttngatgaccactcaatgtatgcctcagtaatagctcttcatcttcattaacctaagaaatgaaaagaataattcacgaatagacaaatgaaagagtgagaaagtaaagcgcatagcatggtcaataacagaacagaagttaaaact

SEQ ID NO: 5533 - DNA, 426 bp, Zea mays
  unsure (1)..(426): unsure at all n locations
agcttgcagnctattcgcttgcctttaatgatnttatctgcttctacattgntctgtctttatgtggtagcagtccgaacaactttagctcgtagctttcacatggggtcacataattgtctcactattcatgctcctgtccatttctaaacgatgagtttgcttcagatggcaaatcgcctcttcatgtattgtatgtatgcatcttcatgtattgcatgtatgcagaactgagcctgacatggcatacattttaatttcatttcatggttagctctgagatgtttctaaattcgaactgccctacagattcggcataatttctcgaaaggattttaccacttcggttgctattttctgctgagtttctgctatactacgaagataggtctcatatgatgtgaatcacggtctattgctctgtct

SEQ ID NO: 5534 - DNA, 380 bp, Zea mays
  unsure (1)..(380): unsure at all n locations
gctgcagctaccaatttgaagcatgagcgcttcctttgtttggtcttgtaggttgtccctgggccttttatgccgcttgaatctcttgtgatgagagccatctcttcatcattaatccggctgctcaatttgtgccaccttgctagagcagtccttgcttcttgttgccttgagagcaagaggtgaactcattgatggaccgttagagcgtcgcgacgatctcgccccttgatcatcatcctccgttacaaattttccgagtacctctcggcgtcatcatcggacctaaattctacgntattgttacagataggatcaggcggtaaggacttacatttgcgaacacgctggccgccatcgaggttcatactctatttgtg

SEQ ID NO: 5535 - DNA, 414 bp, Zea mays
  unsure (1)..(414): unsure at all n locations
agctntggtcttgttttataaaatgcatcgccaggctcagtatcatcacgacactcgggaggagtccgaagctcacacagtcaacaacactgtgtccgagtcaaggtatatctactgagtgtcttaatccaatgtatctttacccattttgcctttatattttttcttctaaaaagacaatacaaggaggtttaaccttcagcttgatgtaatgagtctgtggttacaccatcgagtgtaacaaaaaagtaccacgaagcttcaaagtcatttctaaaggaatgcagagctaagttaccacctaattgaaaggtgaagaagctccaaagttgttcctaaagggatacagagcttaaatgccacctaagtcaaatataaagaagctccaaagtcattcctaagtggatgcagagc

SEQ ID NO: 5536 - DNA, 214 bp, Zea mays
  unsure (1)..(214): unsure at all n locations
cagaagaatttctgtgcagcctttgatgttattgtggatacagccctcgcctcgatccatttggtgaaatactcgatagcgacgaaggtgaactngatggttccctgagccgtgggcatgggctcgacaatgtccaggccccagcactagagaggccatgtgtgggcgattagtttcgtgaattgcgaagggctttctgatcgacgagaaaact

SEQ ID NO: 5537 - DNA, 459 bp, Zea mays
  unsure (1)..(459): unsure at all n locations
tgcaagcttggacggagttctgtgatggttcttgggaaaccttctgtgcaggagcagttgcagtcctagtagcaccttcaaaagtcaaaacatgttttgcagtcaaactagacttcagttgcacaaataatattgctgagtacgaagcacttcttttggggcttcgaaaactaagggcaatgggaataagaagggccatcctaaaaactgattctcaagttattgctggccatgtggataagagcagcanggcacgagacctgaagctagaaaaatatctggatgcagtccgaaggttggaagcttccttcgaagggtttttcgttaaaaatattccaagaggtgaaaatgagcatgcggatttgctagccaaatcagcggctcaggggctccctttaccctccgaagtatnttttaaaacaataaaagcaccttctgttgagctcatggaaagagcag

SEQ ID NO: 5538 - DNA, 417 bp, Zea mays
  unsure (1)..(417): unsure at all n locations
ctcgtagcctctgcaggactttccacatatgctctttatgctctngctcattttggggatatacaagaatatcatcaatgaacaccactacgaattgatcgaggtagtccatgaacacacttgtcatcangtacatgaaataagctggcgcattcatcaaaccaaatgacatgaccgtgaacttatatagtgcatatttggtgatgaatgttgtcttcgatacatccgaaggtcggatcctgagttgatggtaacctgacctcaaatctatctttgagaacacactggctcctctcaactgatcgaataagtcctcaattcttggcagagggtacttgttcttgatagtgacttcattcanagatctcgtatcaatacacatactctttgttcattcttctttccacaaatagcact

SEQ ID NO: 5539 - DNA, 389 bp, Zea mays
tttcatggaactcgaagtcaacaagggcgtcgtgtgtcaacagaagccattccctgaagcggaagtcgaggctgtcgaggaggttaccttctacaggtggatccacaactaatggatcaagagactcgcatgcacgcttgcatctaatgattgcttgtatagtagtcgctgcccatactacagacttgaaatgggtagattcgcgaccaaatatactatgcaacgatcataattctataatcataaaaacgataatatagaataaatgaacggtcaattcgtaattaagtgaccgccagtctgagtgtgtcttacggaattaagatgcactctttcattgaatacaaagagcacactatgtctaagcgaattcatagcactatttcaac

SEQ ID NO: 5540 - DNA, 322 bp, Zea mays
  unsure (1)..(322): unsure at all n locations
ctcatcatccacacaagaacatcatgacaactgacagaccactggaactcctacacatggacctattcggcccgattgcttacataagcatcggcgggagaaggactgctagtattgggatattattctccttacttgggattcttttgcagaaaatcttatacccaaaaaccttatatggattcttgagacgggctcaaaatgagtttggcttaatgatcaagaaaattagaagcgacaacgggacggaggttaagaactctcaaattgaaagcttcctttacgagganggcatcaagcatgagttcttttcttcctacac

SEQ ID NO: 5541 - DNA, 387 bp, Zea mays
agcttcatgcaactgctgccaaaaatgataagtatactgggttcaccggtcagacactatcttcttaggaacaacatgcaagcatacaatctaagacatatatagctctgccaacactgcactattataggtggtcttgactggtatgaaatgagccgcctttgttaagcggtccactactacccagatggagtcataaccggctcgagtgcgaggcaaactaactatgatgtccatcccaatctcatcccacttccactgaggaatctgcaacagctgcaaaagacctgcggacctttgatgttatgccttgattctctgacaactgtcacatatggcaacatactctgtgatttcccttttcattctataccaccagaatcttct

SEQ ID NO: 5542 - DNA, 434 bp, Zea mays
agcttctaaagggagaacacgtgatatgtttgacttacgtgcaattcgaaaaagatagaccttgtgcagcttgtcaagcaggtaaacaagtgggaggagcacatcacaacaagaatgtgatgaccacctcaagacccctggagctgctacacatggaccttttcggacccgttgcctatctgagcataggaggaagtaagtatggtctagttattgttgatgacttttcccgcttcacttgggtgttctttttgcaggataagtctgaaacccaagggaccctcaagcgcttcctcaggagagctcaaaatgagtttgagctcaaggtgaagaagataaggagcgacaacgggtccgagttcaagaaccttcaagtggaggagttccttgaggaagaagggatcaagcacgagttcttcgctcctacacaccac

SEQ ID NO: 5543 - DNA, 445 bp, Zea mays
  unsure (1)..(445): unsure at all n locations
agcttaaccctgttatgaagataagctacctttgttccttaagaggatgtttcttaataggctgtctgagttggggatagaactactccatcatcttctcacttctcactattttgtttggtttagaggaatggaatgagtcaatccatcatcacctctntacttataggtagttagtactaatatgaagaatggggtcatcccaccaaatttgaggaatggacacatgatgtaccaccatatttcggataaagtgattcctcaaactaaacaccctctaagtctctttgaaaaccttaagggtaattacttaagatgtttccaacatgctttcataagtgcataatcagtcgtgagcatcacaactttattataacacattgcacttcacattctctatgatatagatatgttcttaataacctagatatgggcacttagcatt

SEQ ID NO: 5544 - DNA, 318 bp, Zea mays
tgccaaccacaggcccgctgtgagacttaccccctgcacgatggcgggaccatttatgctgaaggccgttcccgtcacgcagtggaggcggcgcgtctttttctcaataaatgcaggggctgcacgacttcttgtcaagttcggcccggtagcttatgtcatgggccacaagctgcgggtctccgtctgagcgggaagcgtatggcaaggcccgcacacgtgtcagcgccggactcctgcacacactatggtccttctcgttctcggacccttgctggagttcggacttaccttgaagctccgactcgtatggatata

SEQ ID NO: 5545 - DNA, 424 bp, Zea mays
  unsure (1)..(424): unsure at all n locations
agcttggagtaagcatggtcctcagagggcaatcttatcggaaaccttatgacagccgatttgatcaccacccatacccacagggaaccaagattcccgaattcgcaaaattttctggtgatcaaagaaagaacacgcgcgaacacataggccaattttagcacaattaggagaattggccaacacagaggcatttcacgtacgtttattttcattatctctaacaagaaccgcgtttgcatggtatgccactttacctcctaattccatttcatcatggggggatctagaacaaaaatttcatgatcattttttctccggtgactatgagttggatntggtaaaattaatgtcattgcgacaaggcaaaagataatcggttaatgattacatccggagattctgagatacaaaaaccgatgct

SEQ ID NO: 5546 - DNA, 374 bp, Zea mays
  unsure (1)..(374): unsure at all n locations
tggacgtgaaaagagccttcctcaatggaccaatcttagtatangtctatgtngagcaacctcccggnattgaagatagtgagtatcctaaccatgtttacaaactctctaatgcgctttataggctcaagcaagccccaagagcatggtatgaatgcctaagagattttcttatcaataatggcttcaaagtcggaaaggccgatcctactttatttactaaaactcttgacaatgatttgtttgtatgccaaatntatgttgatgatattatatntgggtctactaacgaatctacatgtgaggaatatagtaggatcatgacactgaaatttgagatgtcgatgatgggggagttgaagtacttcttggga

SEQ ID NO: 5547 - DNA, 254 bp, Zea mays
agcttcttgtatcttctgttctaaatgagaagtttctatgttcctcgatctgacactatacttcttcggcacaccatgcaggcagactatccgggacatgtataactcaactaatgttgctccggtgtatgttgtcttcacaggtatgaaatgggccacctttgttaatcggtccaccaccacccagatggaatcatagccagccggcgtatgaggcatgccaactataaaatccatcctgatctcatcgcact

SEQ ID NO: 5548 - DNA, 442 bp, Zea mays
  unsure (1)..(442): unsure at all n locations
ttcttcgaagctacacttccgaagctacacttttttaagatattntcaaagcattcttctgtacattgataatgtgtccacctcttgtgctatatgcaaaatgatgtatgatgcttatgctatgcaaaatgatgtgatgatgttatgttatgcgaggtgatgtttattccgaagatacatacgcattcctgcaataaaacacaattctttataagcctcccttaagagcttcttcgccttttacttctgcggaatcagcgtttatttttcgctgtaagcctcccttatgagcttcttcgccttttactttcagcggtattcgcgttgacttttcgcgcttcgccttttacttangcggtatcagcgttgacttttcgctgtatgctctgcattccctttggaacgactttggagcagaaaacttacactgcgctctctttgg

SEQ ID NO: 5549 - DNA, 428 bp, Zea mays
agcttgctaaaagtctttttatccacaggcttgtttttatatattggctagttgagggggggtgctaacataagcaatttcgatatcccccttttgttggtgatctctcaaaaagtgataccggatgtctatgtgcttaatgcggctgtattcaatgggattatccgccatgcagattgcactctcattgtcacataagagagggactttgctcaacttgtagtcgtagtccctaagggtttgcctcatccagagtaattgtgcacaacagggtcctgcaacaatatacttatcttctgcggtggatagagcttctgaaatttgtttctttgaagcccaagacaccacggatctttctagaaactgacaagaccctaaagtactcttcctatcaaatttataatgcggcataatcgacattagaatac

SEQ ID NO: 5550 - DNA, 412 bp, Zea mays
  unsure (1)..(412): unsure at all n locations
atgaggcatgtgaccagttaaaaggtcctctatcttcttcctacatcgagacgggccttaatcgactcatacggagacactacaccaagactctcttctcgtgcaagtcacctgcccggtcttagttntatcatttaaaaacccaaagtttggtacctggcagaggtacctctcttcctatgttgaattcatcatggccatgatggatccaacatgaagttntatttntgaaaacatcccttcccacttggagcatcatcttttgtcaaaacaaacattnttgttttctagagcaagactaagcatcagaaaaaccttttcatattatatgtgatcaagggaaagtaatcaattttccaaggaaggaaatgcatcaattggttagcacacaactcctatcacctatagcatc

SEQ ID NO: 5551 - DNA, 434 bp, Zea mays
  unsure (1)..(434): unsure at all n locations
agctntgatcatcaatgttgccggtagcgcaagccttctatgaccggtagtatggacgttctgtccgaaccagtataaatcttgcgcccattgtgcacaccatccagagcccgaacacgcacaacaaatttacttgttggaccgaggttcgaaacaccgacaagttcgataagttcttggccgttgtcgctctggtcaacctgcctatggcttatgatcaggatcgtcgccgtcttcgtgatcattatttagttatttttgtaaagaaattataccaatataataaagtttgtgacactatttgttatacacggagtcattatatacatggaatttgatcctaacatacgtacgagatgcatatggatttctccttaaatctggatatgacatatcttgagggtgctcttgcgtctcacttgcagctggacatg

SEQ ID NO: 5552 - DNA, 234 bp, Zea mays
ttttttatagccgagagacatgcggggccgactcgaccatggaatatttgcttctcatgagaatggctcgttcctactcttgcgtcttcacgtccaatcaggaactgttagagccataatttctatcaagaaatgcccccctctcccaacccaccacatgattattcgacaaactctgtacttgcgcttaataattgaatgctaaagttgcaattgacacacgcactgtggaaa

SEQ ID NO: 5553 - DNA, 437 bp, Zea mays
  unsure (1)..(437): unsure at all n locations
agcttgtaagcgctgggggaagctttgacttgtcttgttgggccctcccatntgggctccaacttgcccttggactccgtccgagctgttcggacgagtacgaggtccccctcgctgaactccctcgggatgactgcgtggtcgcgccatgctttggtctgggcttggtatttgtttaaggcctgtagggcgaagacccggtctccgtcaatgaggtcttttgaagttggctcgtccacctctgggacggctgacggaactgtacgcggggacccatgctttatttcttgcggggtcattgcctccgatccgtatagaaagcggaaaggagtgaacccggtcgccctgcactcagttgtgtttagcgcccagactgcctctcgtaataaatcggtccatctgccctttttttatcgaggagcatctttntgacagct

SEQ ID NO: 5554 - DNA, 340 bp, Zea mays
  unsure (1)..(340): unsure at all n locations
atcctttggtcatatatacacactgcactgttcttcgtttcttccatntgctcagttcttggatcggtgctgctgtatagtgcagttccacacacaacactgcctgttacctagcaatactatctaagggttcacaatgtcggaaaagggaaaagaattctgccccaccgaataacatgaaatttccgaaatttcagatattctatgccaaaggcaaattaatttatattttttaaaaacaaaaatgctattatttctcttaaacaatgccaatttctgaaatatattttttcggaccccagaaatttcgggaatttccgatcgaaattgtgaacctctt

SEQ ID NO: 5555 - DNA, 445 bp, Zea mays
  unsure (1)..(445): unsure at all n locations
agctttacttagttgattntgcacaagaagaggctgttctttatgcatgcttattgtctaagacttgcatgggctggctgtggcatccccgcttatcacatgtggggatgaagaacctccacaagcttctaaaaggagaacacgtgataggtctaaccaatgttcatttcgaaaaagatagaccttgtgcagtctgtccagcaaggaaacaggtgggaagctctcatcacaccaaatatgtgatgacaacatcaagacccctggagctgctacatatggacctcttcggacccgtcgcctatctgagcatatgaggaagtaagtatggtctagttatcgctgatgactnttcccgcttcacttgggtgttctttttgcaagataagtctgaaacccaagggaccctctagcgctttctcaagagagctcacaatgagtttgagct

SEQ ID NO: 5556 - DNA, 241 bp, Zea mays
cagcttttttcgtggacatatttctggagcaatttatcaatatcagaaagtgtggtctctatattcgcatctttggcagatttagcttctgtgggtgcaccttctgcatcatttgcacatctcaacacatggtgtttttacgccgatgcacgcggtggcgttcatttatggcttctatcacatgaaaagtctccgttatttggcctacaagcttttttcttccgatggtgcttttcttctg

SEQ ID NO: 5557 - DNA, 432 bp, Zea mays
agcttcagctccatctatgttatggatagcttttgagtcagtccaattaccttcggcctttctggcagcttcctgacttccatgaatagcgatgggtccttgatccgaaggtatcttcatgcaaaggtaagcaggatgaagaattgcttcgaaagcattgagggtgccacgaccaataattgcattataagggtattccatgtcaacaatgtcaaacacaacttgttcagttctagtgttgttgatgaatccgaaggtcaccggcatggtgatcttgcccagtgctacaatctgtcttcctccgaagccacagagagggtgtgtagcatcatgaatcttatcttctggctcttgcacttgtctgaaggccttagcaaatatgatatcagctgcactgcctgtatcaaccaagacattgtggaccagaaaccc

SEQ ID NO: 5558 - DNA, 417 bp, Zea mays
  unsure (1)..(417): unsure at all n locations
gatattcagtggttgatctagtagttaagaatcaagatctattcatatccggcgaagaacctcatgttttcaataagcaaggcaagtggacttctccctctgcatattctanttgtacccaattaatgcatataatgatgtttactttttggatatactgcataatttgatgggatttacctaattaagaattntctagaattaccaactgtattccttgattaccctacgaaaatattatgctctgcaaattgatgccaccactcaacttaataattggtatatcactcctgtctatgatattaatgttccataaatgaaattggtattatgatgttaacccgattgtcggcgtttcgaccccggngggtccctggaccgacgagtaaattgtcgctacgtgtcctatcccggatg

SEQ ID NO: 5559 - DNA, 449 bp, Zea mays
  unsure (1)..(449): unsure at all n locations
agctntgaaaatgactcanaaaggacttccttctgaagtcgcaaagagaatgacattctaagagcagttaactagagaaacttggataaaggaaggaacaacacaccagcacaccttcatggcacccctccaaaggactctacctaaaatctcgggacgagattcctttaagaggggagggctgtaacacctcaagtgttacttatagttttccactcaaggctacacaagtaagcccatcatcacatgtgacttaagttgggaaagtacaccaaacttggcactcaagatcctaagtaagtgcaacccatcttagatgccatgccttggcttatcatgcacatataatggggagaattgcccaaaccctaattcaaacccctttggacaagtggagcactagaagtaagtatgatcaataggctatgataaccacatgatcatgactt

SEQ ID NO: 5560 - DNA, 429 bp, Zea mays
  unsure (1)..(429): unsure at all n locations
atagtgctagatctaaactagccttaagtatcttgagggtgctattggtgtattcgtgtcatatgagataaagcgtggtagttgtgtgtggttcatttgtcaattatactccaacacatgtggattgggatagatataggtgcattcaagcaagggcataaagaatctattattattatttatatgtatctattattactggatattaacacaaccaacatgctaaaaacatctcaaaaatatatntagagagggtcgttacatgtatcatttgctctattattataccattatatatatatgccatagaatctttgaacggatggagtaatatctctttctatcgacactgaaccgcattctagatcaataataatgccattattatctgagaaagaaaaagctaacgatgtcatgaatcccttctgc

SEQ ID NO: 5561 - DNA, 324 bp, Zea mays
ccctccccccccagaggtgaatgtgcaatcggaccggaacttaatcgaccgagctgcacctggggcctaagaggacttttatattatggtgcctactgccgctccagcggaaaccgccggcactgctaaaaaaggcaacgcgaaccttgggcgccgggcgcgacaatctatgttgacactatcatcaatctgcatctcgctataccatatcagcgacaccagcttaaggcacataacgctaaaaaagaccccgcctgcctcacgagactgtgaattataacatctgcgactggagcccacaacggtgagaaccgaacgcacgga

SEQ ID NO: 5562 - DNA, 420 bp, Zea mays
agcttgaacgaggtaaaacctggtgaccttgagacaacagtgttgtggttccacaccacctttattatattgttcgaccattttcctctaggctggttgaagattgacttcattatccctattattatgattccatttgctctttctaccagtctatttgattccggatgtctcactgatgcaaagtgtatttttgtaccgatctaatcacaaaaagctttgaacgtttcagcatcaaattgagttccgttatcaactatgatagccttcggcacaccgaagcggcaaacaatattctgccaaaagaacttctgaactgtggccaaagttattctagctagaggcttaacttcgatccaattcgagaagtactccactgctatcacaacatatttcaagttcccttgtgctgatggaagt

SEQ ID NO: 5563 - DNA, 306 bp, Zea mays
  unsure (1)..(306): unsure at all n locations
ctctggcaatggtggcgggcggtggcgcttgcctttcatggcgaactccagtgatctctggctcatgtggggccttgggtgctcaagtataacactataaaaaccatcaactcaaaataatgcatttagttattaatggtaattatggcaataaaattttcactcaagtgtttgctatttatttacattcggaataatttatgattgctcaagattgattntggatatttaatagcatttcttttaaataaaaatctaaataaataatataataattattagtccaaaaataaatattttatttat

SEQ ID NO: 5564 - DNA, 440 bp, Zea mays
  unsure (1)..(440): unsure at all n locations
agcttattcaccacatagttgtaaatatcttgatgagtcgagcatggcgtcttctccttaattgtctttgtttcttgttcccaagcaattttctttttgaccctacagcttgtttctcaatcaaagattggcctttcttggggcagtgaaggttagcacatgataatactttaactaattgatcacttgtgcaagaatgaggttcacatgagtttaaactagtaattactacctcatgagcaatatcgagcatgatatggtcatcaactaatttactatgagagtacgacaacatatcaaacttttcacctagagcaagcttttctaaattcatcatttctacttgactcctaagcatagaattcttagttttaagttgagcaacatcagataatacatcatgattatttctttgctcaaataanacagaatcataccgt

SEQ ID NO: 5565 - DNA, 365 bp, Zea mays
ctggagaaatagtaagtactgctctcttcatgagttcaaccgaaggtgcttttattgtttcaaaaaatactttcgaaggtaaagggagcccctgagccgccgatttggctagcaaatctgcatgctcattttcacctcttggaatattcttgaccgaaaaaccttcgaaagaagcctccaaccttcgaactgtatccagatatctttcgagctttggatctcttgccttgctactttttgccacatggccagaaataacttgagagtcagtctctaagatggcccttcttattcccattgcccttaacttccgaagccccaacagaagtgcttcgtactcagcaatattatttgtgcaactgaaa

SEQ ID NO: 5566 - DNA, 431 bp, Zea mays
  unsure (1)..(431): unsure at all n locations
agcttaataagcagaaaanttgtattgatgtctgttaaaaagaaggtcgagggatggcccatgaaataataaagaaaagcgaacaagatactcatgacgctagagaagcaactaaagcagctgaaaaagttgcggaactcgaaaggcggataggtattacttaatggcttttaactttgttgtttatttttgtgactttgaactgatttacgttttctaccgcagctgaactatctcctcccccagagcccttctagtcattggccgacccagaggcaaaggaatcaacagaaattattaacatagccgaaattattgtggatgaagtcgttacccaactgctgaccgaagctgcaaaanaaggtttgaaaagngaagagtatctattgtaaaaacattgctagaataataatggaatatttgctcgacta

SEQ ID NO: 5567 - DNA, 454 bp, Zea mays
  unsure (1)..(454): unsure at all n locations
tctagaatcaagaatatttgtgctcatgcctttgtcttgtaaaagattgctcatcacgtggcttggtaaagatatcggcttattgatctctactattaatgtaagaaatctcgatatcctccttttgttggtgatccctaagaaaatgataccgaatggctatgtgcttagtgcggctatgctcgacgggattgttggccattttaattgcactctcattattcacatagcacagggactttggttaatttgtaaccgtagtcccgcaggggttgcctcatccaaagcaattgcgcgcaacaatgtcctgcggcaatgtactctgcttcggcggtggaaagagcgaacgaattttgcttctttgaagcccaagacaccaaggatcttcccaagaactggcnnagtcccgatgtgctctttctaattgatttgaccccgccaatcggattcgaat

SEQ ID NO: 5568 - DNA, 427 bp, Zea mays
  unsure (1)..(427): unsure at all n locations
agcttgagaatatgtataaattaccgccctcttttgcgatgactatcaaaaacaagtatcctttgcctcgtattgatgttctttttgatcaattggtcagaggcaaagtgtttttcaaaacagaccttcgctctagctatcatcaaatcaagatacgagcaagtgatattccaaagattgccttctcaaccaaatatgggttgtatgagtatctggtgatgtcgtttgggttaactaatgcgccagcatacttcatgtatctgatgaattcagtcttcatgcctgaactggacaagttcatggtggttntcatcgacgatatctacgtgtactcaaagaacaaagaagagcatgccggtcatttgcatgtaatgctccaacgtctgatagaacactggctttatgccaaattgtctaaatggatttc

SEQ ID NO: 5569 - DNA, 458 bp, Zea mays
tgcttacaacggtccagctgggcatccttctcaaagtatatcatgcaaccggtgggacacacgtcgatcttctcatatgtcatcccaagaccagccaacatcttctttgcgaagtacatattttttggcaacttatgattctccggtagaacctcgcccataagttggacgatgtcgttgtaagcactgtttgaaatgttgtgcttcgactttatcgccattagtcttgtgagagtcccaagaactgacatctgagtgtgctcgtgcagtctctcttctcctgcggcgagtagccggaagaattcttgagcatcgcgtggaagctgccccggctcctcagcgttcatttcaacctccctaccaagatcatgcaacatatcgtccatcctatcatgatcgtcatcaagctccacattcgcgtcaacgtgtctaatagactcttcatgccggtaccatac

SEQ ID NO: 5570 - DNA, 310 bp, Zea mays
  unsure (1)..(310): unsure at all n locations
agcttaagaaagagctaaatatactcgattctcttaactttgattgaaacattgcacacattgctcatttatatacctttgatcatgtctctttaatttgatacaaatgcatatttttcttgtgccacgactaagactaatatgcttccatgagtatctttacaattagtcttagattgaaagggaaatggagtattcggcaaatgcaaagcttccactccaactctgtcactatcatttatcctttgccttactcataaactctcaattggtataaactttcactcatatnctttatttttcaaaaggg

SEQ ID NO: 5571 - DNA, 447 bp, Zea mays
  unsure (1)..(447): unsure at all n locations
atagctntagccactgcgagaccttccttcttctcttttctcaatagcgaatgcaacatcgtataccatattttatgcatatttgacttatctgctctcttgtatggngtactgcttatttcctaattcacatggatggatgtatgtttgcgctcgcatatataacaacctggttgaggagtccgaagaactcgcangagaagatcctgatcagcacctggttggtggaggcaagtgttccttgacccatctatgtcctatacaattatataattcactcttcgcatttacacacgttatacttaacgattgactaacttttgttatccatgtccttgcttacatatttgggttggattattatgtgtnaactttatgctagtgcttaacactaatcaatgaacatgatgagaattatctatgatacgctcgtttgtttcttattta

SEQ ID NO: 5572 - DNA, 367 bp, Zea mays
  unsure (1)..(367): unsure at all n locations
agctctaccaaatggacgtgaagagtgccttccttattggaccaatcaaagaagaggtctatgttgagcaacctcccggctntgaagatagtgagtaccctaactatgtttataaactctctaaggcgctttatgggcttaagcaagccccacgagcatggtatgaatgcctaagagattttcttatcactaatggcttcaaagtcggaaaagccgatcctactttatttactaaaacacttgacaatgatttgtttgtatgccaaatttatgttgatgatatcatatttgggtctactaacgaatctacttgtgaggaatttaatacgatcatgacacaaaaattcgagatgtcaatgatggggga

SEQ ID NO: 5573 - DNA, 422 bp, Zea mays
  unsure (1)..(422): unsure at all n locations
ctgcttacttggtnagatgaccaatgcgcccttcactggtttacttttaggacgtgtagtttattggaactcatacatactgatgtgtgcggaccaatgagtacgacagctatgggaggattccaatacttcataaccttcactgatgattttagtagatatgggtatgtctacttaatgaaacacaagtctgaatccttagaaaagttcaaagagtttcagaatgaagtagaaaatcagcgtggcaagaaaattaaagcactgcgatcagatcgtggtggtgaatatttgagtcatgagtttagcaatcatctaaagagttgtggaattgttccacagcttacgccgcctggaacgcctcaaaggaatggcgtgtctgagcgacgtaatcggactttattggatatggttcgatcaatgat

SEQ ID NO: 5574 - DNA, 433 bp, Zea mays
  unsure (1)..(433): unsure at all n locations
agcttcggctatggctaanaatttggcagcaaaacagtgcaatagcaatgaatgttgtgataacttcacaactacccgtctgtttatatagtgccgcaggggggaaggtgaatcgtcaaggtctcccgcaccgagcaaacagtcacccacactcgctgaatggtgggccacaaggtccaagaaggtgaattgctggggcacgcgtaactgctgcaagagctagaactcgggtagaaagaaatcgccacgtgttcgacacgccctggcaatgctagagcacgccccggcgctcaaccccgcgcttgccgcgccgtgcaacgccagaccccgcgcccacgcccgcgcctataaagccgacctaagccttgaccgtacacccccgctcgctctcagccccgcccaagcgcaagttcaccggagatcgctctgtgca

SEQ ID NO: 5575 - DNA, 417 bp, Zea mays
  unsure (1)..(417): unsure at all n locations
tgttctaacatatgttgatgatatcatagtgaanagtactaagcaagaaaatcacatcgtcgatttacaagaaacattcgccaatgttagaaaggccggcctcaagctcagcctagagaaatgtgtcttccgagtaaagaaggggaaatttcttgtgtgtcttgtgtcaacaaaaggaattgaagctaacctaaacaagatagaagctatacttcggatggagccaccaaaatcaagaaaaggtgcccagagattgacaggaagggtggcatcattgaatagatttatttcaagatcagcagagaggaactngcaattcttctatatgttgaaatcaatcgaagtctttcaattgagaccaactcacgaaaaggctctcgaagagctgaagcatatctaatagaatgacaacttgac

SEQ ID NO: 5576 - DNA, 443 bp, Zea mays
  unsure (1)..(443): unsure at all n locations
agcttctaaagggagaacacattntaagactaatatatgttctatttgagaaagacagganttgtagcgcatgccaagcaggaaagcaagttaggactcatcatccgcataagaacataatgacgaccgacaggctactggagctcctacacatggatctatttggcccgatcgcttacttaagcatcggcgggagtaagtactgtctagttattgtggatgattattctcgcttcacttgggtattcttcttataggaaaaatctcaaacccaagagaccttaaagggattcttgagacgggctcaaaatgagttcggcttaaggatcaagaaaataagaagcgacaacgggacggagttcaagaactcacaaattgaaggctttcttgaagaggagggcatcaagcatgagttctcttcttcctacacacctcaacaaaat

SEQ ID NO: 5577 - DNA, 413 bp, Zea mays
  unsure (1)..(413): unsure at all n locations
tggcgctcgtcatcaaaagcttccgccatattcttagctaatgagagggaaagactacaagtcccgctccaagaaagtntgctacaagtgtggtaagcccgcgtcatttattgcaaaatgtcctttatctagtgacagtgaccgaggcgacgacaagaagggaagaagaaaggagaagaagaggtactacaagatgaatggcggcgatgcccatgtttgtctggagtgggaattcgacgaaagctcgagcgactcctctgacgacgaggacgccgccaacatcgccgtcaccaaaggacttctctttctcaacgtcggccacaagtgcctcatggcaaaagacggcaaacggaagaaggtaaatccaactcctncactaaatatgaatcttctagtgatgataatgctagtga

SEQ ID NO: 5578 - DNA, 433 bp, Zea mays
agcttctaaagggagaacacgtgataagtttgactaacgtgcatttcgaaaaatatagaccttgtgcagctggtcaagcaggttaacaagtgggaggagcgcatcacagcaagaatgtgatgaccacttcaagacccctggagctgctgcatatggacctcttcggacccgtcgcctatctgagcatatgagggagtaagtatggtttagttattgttgatgacttttcccgcttcacttgggtgttctttttgcaggataagtctgaaacccaagggaccctcaagcgcttcctcaagagagctcaaaatgagtttgagctcaaggtgaagaagataagaagcgacaacgggttcgaattcaagaaccttcaagtggaggaattccttgaggaggaagggatcaagcacgagttctccgctccctacacacc

SEQ ID NO: 5579 - DNA, 472 bp, Zea mays
  unsure (1)..(472): unsure at all n locations
gtagcatatgcaagtaaaatgcgaattgattctatcctagctacgggtgcataggtttcaccgaaatccaaaccttcgacttgtgaatatcctttggccacaagtcgggctttgttccttgtcaccacaccatgctcatcttgcttgttgtggaagacccacttggttcctacaacattttgattaggatgtggaactaagtgccatacctcattcctaagtgaagtgttgagctcctcttgcatcgccaccacccaatccgaatcttgtagtgcttcctctaccctgtgtggctcaatagaggaaacaaaagagtaatgttcacagaattgagcaacacgagatcgagtagttacccccttntgaatatcgccgaggatggtgttcacggngtgatctcgttggattgcttggtggactcttgggtgtggcggtcttggaacttggtcatcttcctcatcttgatcatggg

SEQ ID NO: 5580 - DNA, 461 bp, Zea mays
  unsure (1)..(461): unsure at all n locations
accatatggacgtgaagagtgccttcctcaatggaccaatcaatgaagaggtctatgttgatcaacctcccggctttgaagacagtgagtaccctaaccatgtctataggctctctaaggcactttatgggttcaagcaagccccaagagcatggtatgaatgcctaagagatttccttatagctaacggcttcaaagtcggcaaggccgatcctactttattcactaaaactcttgacaatgatttgtttgtatgccaaatttatgttgatgatatcatatttgggtctactaatgaatctacatgtgaagaatttagtaggataatgacacagaaattcgagatgtctatgatgggggagttgaagtattttctaggattccaagtcaagcaactccaagagggcaccttcatttgccaaaccaagtacactcaggacattctannnacagttgggatg

SEQ ID NO: 5581 - DNA, 441 bp, Zea mays
  unsure (1)..(441): unsure at all n locations
nagctnctaaagggagagcacattctatgtatttcttttgttcatttagagaaagacaggattcgtagtgcatgtcaagcggtgaagcaagttggagtccatcatccacacaagaacatcatgacgaccgacaggccgcttgagctactccacatggatctattcggcccgattgcttacataagcatcggcgggagtaagtattgtcttgttattgaggatgattattctcggttcacttgggtattctttgtacaggaaaaatctcaaacccaagagaccttaaaaggattcttgagacgagctcaaaatgagttcggcttaatgatcaagaaaataagaagcgaccacgggacggagtttaagaactcacacattgaaggctttcttgacgaagagggcatcaagcatgagttctctttttcctacacttcacaacaa

SEQ ID NO: 5582 - DNA, 338 bp, Zea mays
  unsure (1)..(338): unsure at all n locations
tattgacagtggatgcacacaacatatgacaggcaacccacggatgttcacctcatttgatgagaatgttgatggtcaagataaaatcacatctggagacaactcaaaaggataagtgcaaggacttggcaaggtggcaatctcaaatgatttattaatattcaaatgttctcttagatgcacctttgagcttcaatttattatcagtgggacaactctgtgatcttggactccaatgcctattcactccatcagaggntattgtaacaaaaatggatgatgaatcaatggtattaagggaattagaacaacaacctctaccttatggatttcacttc

SEQ ID NO: 5583 - DNA, 390 bp, Zea mays
  unsure (1)..(390): unsure at all n locations
agcttcttctcgtcgtcgatgagtgacaccaacgtgagcgcctcctgccagtggagtttgttcggagtttccaagtaataaacatgaattcatctttagcgttggtttatgaaaacgactcacaagtcagatccatgaaaaaatattacggagaataaatgtcacacatattgtcggggaccataattaggggtaccctcaagacgcctaattctcagctggtaacccccatcagcataaagctgcaaaggcctgatgggtacgattaagtcagggatcagtccacacgagtgactcgatcacgcttcacccgagcctagcctcggccaagggcagccgacctcgagagacttccgtctcgcccgaggcctcctttntatggcggacaca

SEQ ID NO: 5584 - DNA, 433 bp, Zea mays
  unsure (1)..(433): unsure at all n locations
ctaagcttctaagggagaacacgtgatangggtgactaacgtgcatttctaaaaagatagaccttgtgcagcttgtcaagcaggtaaacaagtgggaggagcacatcacagcaagaacgtgatgaccacttcaagacccctggagctgctgcatatggacctcttcggacatgtcgcctatctgagcataggagggagtaagtatggtctagttattgtagatgatttttcccgcttcacttgngtgttctttttgcaggataagtctgaaacccaagggaccctcaagcgcttcctcatgagagctcaaaatgagtttgagctcatagtgaagaagataaggagcgacaacgggtccgagttcaagaaccttcaagtggaggagttccttgaagaggaaaggatcaagcacgagttctccgcttcctacaca

SEQ ID NO: 5585 - DNA, 441 bp, Zea mays
agcttgggactggaagcaagaggctggttatgatttagtcagttcagtgttcgatgtggagttctattctgctgctagacagagaactgtaactgaagcagcagtaactgaaggagaggacgcagaattttctggtgattcagtttagaattcaccagctcaaggtgagtggagtgctggcactatttcacatggaggatcaactccacacacgcctgtaaggagtcctgcacatggagaattttcagaaacaccacagttagaatggtctagtaacactgaaagggttccaacaggttacagaaatctatctgatttatatgatacaactgaagaaattcatgatttcgagtatagtggtgtgtgtttccatgcagcagaagagccaagaagtgtggaggtagccctgtcagaacagtgctggagggaagccatgatgac

SEQ ID NO: 5586 - DNA, 443 bp, Zea mays
  unsure (1)..(443): unsure at all n locations
atgaaacgggtacccattctgatactatttnnttggnnttttatggtgaataaatatgatatagaatctgatatgcaaattgatattcttgtttttaactttgagctagtaaagatttataaaagataaatctcaaatntatcatataccttctcaaatgatagatataaaattcaggtaccattcgaatacggatacttttcatctttttttattgtagggagcaaataatgtataaaacaatttatgcaaaattttattcttatatgtaatactgtgcttgatagcacaagaaaagattaacatcaaatttcatacatatctattttaaaatattaaatatgtcctaatagtttcggatacccgttttcatccctagtcgggtgagatgggttagacatgtccaatggagatctctagaggcaccaacgagtagtgggatc

SEQ ID NO: 5587 - DNA, 433 bp, Zea mays
  unsure (1)..(433): unsure at all n locations
agcttctaaagggagaacacgtgatatgtctaactaatgttcatttcgaaaaagatagaccttgtgcagcttgtcaagcaggtaaacaagtgggtggagcacatcacagcaagaatgtgatgaccacgtcaagacctctggagctgctgcatatggacctcttcggacccgtcgcctatctgagcataagaggaagtaagtatggtctagttattgttgatgacttttcccgcttcacgtgggtgttctttntgcaggataagtctgaaacccaaaggaccctcaagcgcttcctaaagagagctcaaaatgagtttgagctcaaggtgaagaagataaagagcgacaatgggtccgaattcaaaaaccttcaagtggaggagttccttgaggaggaggggatcaagcacgagttctccgctccctacacacc

SEQ ID NO: 5588 - DNA, 406 bp, Zea mays
  unsure (1)..(406): unsure at all n locations
tcagagtgcggaagcagatgtcgtagagagcttcgttgtcgatgaccatacactcatcagcattctcaacaagttgatgaactgagagcgtggcattgtaaggttctaccacagtatcagacaccttgggtgatggaaaaactgagaacgtcagcatcatcctatctgggtactcttccctgattntggagatgagcagggtgcccatccctgagccagtacctccacccaatgaatggcanacctgaaatcctgcagaagaaaaggaaagattatttagatgcatttggaagctgaacataaatgaagagacaaaagtaattttctacaccaagaggacanactagcaaatgaacaccacatgaatacaacaaatatctaccgaaccgtaccatatgaatgagct

SEQ ID NO: 5589 - DNA, 433 bp, Zea mays
  unsure (1)..(433): unsure at all n locations
agcttacccatgattatgcatgtgaccagttaattattcctcgatcatcaagcttacatcgagatggtccttaatcaactcagacggagacactacactgagactctcttctcgtgcaagtcacccgcccggtcttagctttatcatttcaaacccaaagtttggtacctgtcagaggtacatcttttccgatgttgaacccatcacggccatgatggatccaccatcaagttttattatcaaaaacatcccatcccacttgaagcatcatccttttgtcaaacaaaacattntatttttctagagaaagactaagcatcacgaaaaacctttcataaaacaagtactcaaagataggtaatcaatctttcaagaaaagaaatgcatcaattgtttagcacacaactcctattacctaatgcatcaagcaagt

SEQ ID NO: 5590 - DNA, 342 bp, Zea mays
  unsure (1)..(342): unsure at all n locations
tactcagcttactgctgacccttagaaatttatttctggattatcatttatcaaccttgttgagctgatctctactgaaatcacgaagaatactgctttgcataaatgggttgtgctctattgccctggacatatttacacatcanatttgtggtgaaagaccccaagtatttaaattcaattaattatgattaattggcactgttattggaaattgatgtttggattctaagccatgaattatactctcatgtgttgtgatttgacttgagggttatctaatctcttgcttttctaatgctacgcctatttgattagagaaacagacagtgggcataatgc

SEQ ID NO: 5591 - DNA, 381 bp, Zea mays
  unsure (1)..(381): unsure at all n locations
agcttctcccagctcctacatactcacaacgccttactgcgaggacctggagcactcctggaacatcgacaacctccgcaaattntttgtttgactcctcaaggctgatttcgcccttgtaattcgcaaaaacaatcttgtaccggcccacactctttttctcccggggggtgaggtttttaacgaggcggagccatgtaatatatgtgtgaaaatcccccgccaaaacatgcgtcgaataaagaccgcgacgacggtcttcgacattcgaccaatacgaggtcacccgtgaggctaagcgctagccacccttgcgtgcgacaaatccggcagaagtcgcctagggtacagccggactagcacaacaagtgcgaaaaaacc

SEQ ID NO: 5592 - DNA, 438 bp, Zea mays
  unsure (1)..(438): unsure at all n locations
ctacctagagagaatcacttgaagtgtcgcttaaagaattctattatatttgaagtatactccctatattggtctatggtatctcaaaggtgctcactctgagttaattggatattcggattcggactatgcggngtgcaaagttgatagaaaaagcacctccggttgttgtcaatttcttggtagatctcttgtttcatgggcttctaagaaacaaaattcggttgctctatctaccgccgaggcggaatatatatcggccggaaattggtgtgctcaactattatggatgaaacaaaccttattggattatggaattattttcaagaatgtgcctctcatgtgtgataatgagagtgcggtataattggctatcaatccggtccaacacttaagaactaagcatattgatatacgacatcacttcttagggatcat

SEQ ID NO: 5593 - DNA, 451 bp, Zea mays
agcttatgaagattcttcattccaacatgggctagtctgctatgccagagccaacccaagttagtcttagcaactaagcaagtgtcgagttcagctctatcaaaatctaccaagtatagctgaccctctaacactcccttaaatgctattgaatcatcacttcttctaaagacagtgacacctatatcagtaaatagacagttgtaacccatttgacacaattgagatacggaaagcaaattgtaatctaaagaatctacaagaaaaacattggaaatagtatggtcaggtgatatagcaattttacccaatcctttgaccaaatcttgatttccatccccgaatgtaatagctcgttggggatcttggtttttctcatatgaagagaacatcttcttctcccctgtcatgtggtttgagcacccgctgtcgagtatacaacttgagcccc

SEQ ID NO: 5594 - DNA, 412 bp, Zea mays
cttcacactcttttttggaattgtgcttgaagacttatttgtctccaagacgtctagtacatttaccattcttttcctttttggggtcactgatggccccttttggttttttgctgtcccaatgattgcggtaggactcaaaacttctgatgttttggagccctcagttgcttctcttacctcctcaattttttctgtgagcggcgcttcggtttcctcttttgtttctgacaacaaaatgtttgattgttctgattctatctttggtggcacttcggccgtttctgcgatctctggcaacaaggctggctcgattagtttttcagcttcggtggctgaagaagtcttcccggtaaactcctgcaccgaagctggttcaatataacgaggccgctgcgtaagaacctttatc

SEQ ID NO: 5595 - DNA, 442 bp, Zea mays
agcttcccatcgttttgtgctcatcagaagcattttttcttataatttggcatcctcggggttagcgaacaaacacctcaatcgatcgatgacgggaaggtaccacatcaccaaagcaggaatctttttgagcgcataatagtctacttctttgttttctttgctcatggattttgaagtcttcttttgggctttctttcgcttcttgaccttagacacggatgcaacacactcatcttctcaatagtctttatttgtcttgtacctacttgcattgcactttgggtagctctccaagtctttataatcatcgcctcgataaaggatacaatgatttctacacgtgtggatcttctccacatccatagcgagcggactgattagtttctttgcatagtacgtgttagcaggcactttgttctcctttggaagcatgtctgcg

SEQ ID NO: 5596 - DNA, 442 bp, Zea mays
  unsure (1)..(442): unsure at all n locations
atgtgcatcgactacactagcctgaataaggcctggctctttgacccatatccacttccacgnatagatcaaattgtggattctacctctgggtgcgaccaattgtcgttcctagatgcttactctggtttccatcaaatccacatgtctatggaagataagaagcataccgcttttgtaacaatggacgggctttactgctatgttgttatgccttacgggctaaaaacgccttgccgacattcgtgtgggcgatcagtaagactttctgggacctaattatggacaaagtggaagtctacgtcgatgacatcatggttaagactaagagagggtcgaccctattggaagacttaaccctggtcttcgacaagctgcgggcaacccgcacaaagctgaacccggacaaatgcgtctttggtgtctccgctggaaagatgct

SEQ ID NO: 5597 - DNA, 455 bp, Zea mays
cacctgccgcatgcaagcttcatgcaactgctgccaaaaatgagaggtgtactatgtaccttcgtcggatactatcttctttggaacaccttgcaagcacacaacccgagacatatataattctgccaacactgcactgttataggtagtcttgactggtatgaaatgggctgcctttgttaaacggtccactactacccagatagtcatatccagcacgagtgcggggcagaccaactataaagtccatcccaatctcatcccatttccactgaagaatctgcaacggctgcaacaaacctgcgggccttggatgctctgtcttgatcctctgacaactgtcgcatctggccacatactctgctatctcccttttcatactggagagggccttcctcctccaaaggtcataaaaacgggactagcatgttttttagtgtagcataaactgatac

SEQ ID NO: 5598 - DNA, 510 bp, Zea mays
  unsure (1)..(510): unsure at all n locations
tatataatactaagctcttcgtgtttgcctattctcattatgccttactagccttgcatttatctggtgacctattgtcaaccgntcgacacctcgcaaataggtccccaaggtctcgactccccgtgagcgagatctatggatcattgatgtttgaccccaaagtaagtggtggcttgtggagcagaaataaatgtagagttcaaggctgcatcgtagagcctaccccaagggtntgcacgtcgtgtggaggccctaaggttcattggtatttggccctccaaaagatgtcaacactatttatatgatatataaaaatcgtagtaaagtacgagcaactaactagtctctgctcttttaaagcaccagcttcgtgcgttattactctctcctacttctcgcttaacaattgtccaatggaccattacaccacatatgagtcgttacacacagatgggccgtgagaaccattaatacccattacaacatataaccatacataatggttct

SEQ ID NO: 5599 - DNA, 430 bp, Zea mays
  unsure (1)..(430): unsure at all n locations
agcttcagtcatcgtgcgcatcatctncttcaattctattttttagacacactcatcgncgctaagattaagcccctagtccttgtccattcgattctttggtcatatcattgttagcacaaaacagagacaaaaaggcaacaaacaatgtgaaccctacaactatctctcaaggtggtggtggaggtggtggaatacaaattatgaagcgtcttaccccgctcttacaacgttcttaccancactgcaagtggcaaactgtgaccggtgtgactgttcaacgagcgtgggtgtaattgcaaaagagtacatgttctgctctagagaaaataggagctatgggaaggctgactaaatatatatatgtggcacacaagtcagtaacagatagcaatgctgaataagtgttccaagtactcattctatttgc

SEQ ID NO: 5600 - DNA, 423 bp, Zea mays
  unsure (1)..(423): unsure at all n locations
cctcgaagatcggaaatggatcgcagtctattctcttcgcgctattaatacncacaggcgcaagcaaacatgtacaagcataagaacattacaccatacaagataaaatattataaaagctagtaatataaaatagagagcgcttctactgctatgcgatgaaaagaatcgcgatagttcaagctacagtcgaggggttagcgtgtgtacattaagcaagcgttaattagaatatttaattccgatatttcttaaatataaataatatctactacttagttttggctaacttactgttttaattgtggatgattaaataaataactaattaactcacatgagtgattataagggaatggtgtaatctcgcgtgcggataacgcgcgatatgcgcgaacggcgcacgtgaatgtgtgcgacaca

SEQ ID NO: 5601 - DNA, 423 bp, Zea mays
  unsure (1)..(423): unsure at all n locations
agcttcttcaccatgtcgctgctagccaagntgttgtttttaccttcatcaatgatcaaacgacatgaacgctccttaatgacacactttgtttgaaacaacgtatggcgctgaatctgctctgccttctccatttgtgcactaagcacacgctgtacaatgaggctctcataatgctctgcatcatctgcaccaaactgttcttcgggggagtccttaatgcctacatcatcagccgcaagcaaagcaagtggagcttcattcaaatcactagcagaagaatacccaccatcgtcttttaccacccaaacacgctgattaagacaataacgctgcacgtgtccataacccttgcattgataacacagaacatctctgtgtctacctgtggaagctactgaaaaggcactacctgcgggttct

SEQ ID NO: 5602 - DNA, 337 bp, Zea mays
tattttcaaggtgacgctacctctgttatattttagcaaccgacatctttcttgtaagctcatgtagaggcgctgcactggagcttaaatcacgaacaaatctgcgggagataccggcaagtccaagaaagcttcgaatttgtgtgaccgtcgtgggtgtaggccactcccgaatggcagcatcttgctgctattcacctcaatgccctgctgggtaaccacattaccataaaacgagacacagtgcgtgcaaaatgtgcactttttcatgttaccaaacaagcgagcagcacgcaaagcattaataacagtacgcaaatgtcttaatgcacctcta

SEQ ID NO: 5603 - DNA, 161 bp, Zea mays
acgaaaccacactgtttggccaacaacgagagcagacgcggcaccacccaacacaagacacgcaacccaaagcagacaccgcagaagaccaaggaaaacaggcaccaaaaggaacgacaagaacaaaacacaaaacagaaagcggcgaaacaaaccacggc

SEQ ID NO: 5604 - DNA, 162 bp, Zea mays
acctgcggcatgcaagcttcaatggtcgggcagaccctatttctgtttagtttgtaacaccatcgcacggtcgggatccacatgctcagtaccggtagggcgcgctactgactcatatgctagctgcgtacattgaagagcacacaactcacatatactcac

SEQ ID NO: 5605 - DNA, 387 bp, Zea mays
  unsure (1)..(387): unsure at all n locations
gcagctgcaacttcgcgcagaagaaaaactttaagttagagatgacctcagctcttcaatcttcactataaacaggggatatgntcaagatcgctctttcaagaagctcgaccgaaagtgctcttattgtttcaaaaaatacttccgaaagtacgggcagcccctgtgctgctgacttatccaatagatcagcgtattcattttctccaccaggaatatttctgacagagaaaccttctaaggaagcctcaatccttcggaccgtatctaaatacttttcaagcttccggtctcttgctttgtaacttttgtcaatattaccagaaataacctatgaatcactcttaaggatggcccttccgattcacattgcctttaatttccgaa

SEQ ID NO: 5606 - DNA, 316 bp, Zea mays
  unsure (1)..(316): unsure at all n locations
tctcactctttcttgagatcaaactcacttgtaattgaggcaagagacaccaatcgtgtggtgatccttgtgggaactttgtgttccaattgattgagaagaaaagatcactccgtcccatggaccgttngagagagggaaagggttgaaagagacccggtctttgtgacatctcaacggggagtaggtttgcgagaaccgaacctcggtaatacaaatccacgtgtcacactccttattcgcttgcgatatgatttgcgtcctctctctcggactcgtcttatatttctaacgcttacccggcttgtagttgtga

SEQ ID NO: 5607 - DNA, 403 bp, Zea mays
agcttatgtaacgcaatgctaagtcttctcattatttatctggaccaaaggtattttgttccatttatcaacaattgatcattgtggatttgtttccaggaagtgcctccaagcaatggcccataaagatttgaatctaaaatgtctattcgacgaagttgaaagttgattgcataaagggtccagtgactacggtgtagcataagaaccatgatctgttaacatatatgtataaggttatgaatgaacaataatgtgtctatggaaaaataaagataacgtaaaatataacttatgaccaaatgaatattaaaattttcttacaaataatactgattgcggctcaccaatttaatttggttcacaacatcatctggaggaagcgtcggttctagttgttctt

SEQ ID NO: 5608 - DNA, 417 bp, Zea mays
  unsure (1)..(417): unsure at all n locations
tgctcacaccttcggcgctgtaccaaccttcgtattattctgtgctactgagangccgcactgagtccgaagatacctgtncacacattatactccagaaatactggttaatcctgnttttgaggaccttcggatgccgaaggtccccaacagtagcccctcgcaatattaatttgtttaaaatatataaattagattgcgacatggacgaaagctntacgccgaaggtccgaanaaacaccttccctttgctagaatagcaacattcactgacaagcggggtctttcaattttcaacgctcttggcgtataaatacggtcataccgcatactcatttgacacgctctctggccaactgctcccgctcactcaatttttagctcttgtgcactaagaattgtaagcctttagtttga

SEQ ID NO: 5609 - DNA, 435 bp, Zea mays
  unsure (1)..(435): unsure at all n locations
cgacaacaaggagatggctcttatcatcaggagcttctggcatattctattcttaggaagaagaaggactacaaaccccgttccaagagagtntgttatatgtgtggtaagtccggtcattttattgctaaatatccatatataagtgatagtgacagggatgacgaanagaaagggaagaagaagatggagaagaaaagatactacaagaagaaaggtggcgaggtgcacatggtgcaagaatgggactccgacgagagctccatcgactcctccaacgaggatgccgccaacatcaccgtcaacaaaggccttctcttcctcaacgtcgggcataaatgccttatggctaaggatagaaaaaagaaggtacattctatagatacctncaaatacactacttctgatgactanggtagctctagtgataatgat

SEQ ID NO: 5610 - DNA, 377 bp, Zea mays
  unsure (1)..(377): unsure at all n locations
cttaagtcacctgcngcatcaagcttttaaaatccattacttgcctcacatttttgagcagcttgattgacgagttgctgaacttgttacacgcatggacgtactggaggctcgttccccaccaccaactccaaccccaactcactcttctgtggacgacgacgacgatgacgacgacgacaatatttatgcaccgctgcgacaacgcctcgcacgtaatcgacaaggtatgggaagtaatggtagacgtcgtcatcataatcctgaaccagaccatgatccatttgctaagattaagttttctattccaccgctcatgggttcttatgatgttgaagcttacttagactgggagatgacngtagaacaacaaatta

SEQ ID NO: 5611 - DNA, 396 bp, Zea mays
gctcaagtccaccgagattgaccaccagactctgtccaagatcgagaaccctgctgcacctaccatggccctagtctctagatgtggttctgcttctaaccactcatctgctatgtttgctctatcttctttattgtctatcacagaggagaaggttgagagccatggagatgatgagctagcgtttgtggctagtcgattcacgtggtttcacaacaaccgtatgagctggcaacatggcaggtcaaaggatggatgctacaactgtggcaaccctgaccacttcattgccagttgccccaagaagggcaagcaggaggctggcccacgcgaccacctgtctcgttggcacaagggcaagcgggaatacaccttcgacaagtacaagtcccaatg

SEQ ID NO: 5612 - DNA, 423 bp, Zea mays
  unsure (1)..(423): unsure at all n locations
agcttgagaaaggttaaactatatcaagtgtcatactccacacaanaagaagttcctaaagcaataaatgaagcaatcaacatgaacaaggaaaaaggtgaagcttcaattaatcatgttgtttgcactgatcatctatctatgtccttcaagagcaaaaagggaagatgaaacaggaaatgcttccagtgtaaaaaattaagccacttcatagcgtcttgtccacacaaagacaatgatgaaaagatgaggagatgcttttggaagcaatgataaaggccatgtgatcactttatgcccgctcatgaagaatcaaagacgtgcattccccacgatgaccctcacatacacaagagtgaacaacaagcgtcatatcaagctaagtgacgcttctgctacaagtgtggtgagcaaagtcatcta

SEQ ID NO: 5613 - DNA, 379 bp, Zea mays
  unsure (1)..(379): unsure at all n locations
cngaagaggctaatgtggacgagacaactaactctgatgcacattattaangcgctgatattggtgaagctctttctaccatgtactcatgcacagagctagtgtggtcattttgtagttttgacttttgagtgaccttgacggacaagatgtgtgctgttttcaacccagcatctactttcagactgttagaagatacaacctattgttagattatgatctgagatatacagtgtaacagcagaacatggatacgaataaaggggggaaatattcacaacttatacaaaatggtagcggatgcttgcttttcatagtttccttggatatggtaagtaatgtactcgatgttccagactatctgtagaaaatgctattg

SEQ ID NO: 5614 - DNA, 449 bp, Zea mays
  unsure (1)..(449): unsure at all n locations
agctntatcaaatggacgtgaaaagtgccttccttttggaccaatcaaggaagaggtctatgttgagcaacctcctggctttgaagacagtaagtatcctaatcatgtctataagctctctaaggcgctttatgggctcaagcaagccccaagagcatggtatgaatgccttagagattttcttattgcaaatggattcaaagtcggtaaggccgatcctacactctttactaaaactcttgaaaatgacttgtttgtatgccaaatttatgttgatgatattatatttgggtctactaacgggtctacatgtgaagagtttagtaggatcataacacagaaattcgagatgtcgatgatgggggagttgaagtattttctatgattccaagtcaagcaactccaagagggcaccttcatttgccaaacgaagtacactcaagacattc

SEQ ID NO: 5615 - DNA, 410 bp, Zea mays
gccgatacaccgagcctcattgacggcacgtctgcttagcgatctacacttcggatcctctggagattcagctaatggcaccccattccaccctcattgttacactgtttttccgggcggtcatccaacgaacaggtccttacggagaggcactcgataaaccgctcgagcccacttgaagaccacatgtattacatcattatataagaggggagaacagcgtatcattcgaaatcctcatcatgttcattgattacagtcgagcgatagcttaagattaagcaatactaatcaaacccagataggttacaacgacatggattatcaaagctagtctatccttatgtataaacgtgacatgcgggaggtgaattatagaatgtatatgacagagattgggctaaggacac

SEQ ID NO: 5616 - DNA, 434 bp, Zea mays
agcttctaagggagaacacgtgataaggttgactaacgtgtaattcgaaaaagatagaccttgtgcagcttgtcaagcaggtaaacaagtgggaggagcacatcacagcaagaatgtgatgaccacttcaagacctctggagctattgcatatggacctcttcggacctgtcgcctatctgagcatatgaggaagtaagtatggcctagttattgttgatgacttttcccgcttcacttgggtgttctttttgcaggataagtctgaaacccaaaggaccctcaagcgcttcctcaagagagctcaaaatgagtttgagctcaaggtgaagaagataaagagcgacaacgggtccgaattcaagaatctccaagtggaggagtttcttgaggaggaggggatcaagcacgagttctccgctccctacacacctc

SEQ ID NO: 5617 - DNA, 466 bp, Zea mays
actcaagcttcagctccatctatgttatggattgctcttgagtcagtccaattaccttctgcccttcttgcagcttcctgacttccatggatagcaatgggtccctgatccgaaggtatcttcatgcaaagataggcaggatgaaggattgcttctaaggcattgagagtaccacgaccaataattgcattgtaagggtattccatgtcaacaatgtcaaacacaacttgctcagttctagtgttgttgatgaacccgaaggtcactgacatggtgatcttgcccaatgctacaatctgtcttcctccgaagccacagagaggatgtgtagcatcatgaaatttatcttctggctcctgcatctgtctgaaagccgtagcaaatatgatgtccgctgcactgcctgtgtcaaccaagacattgtggaccagaaatcctttgataacacaagagataaccatggcat

SEQ ID NO: 5618 - DNA, 436 bp, Zea mays
cacctgcggcatgcaagcttgagtcaatcattttgcaaaggataattgattctcataaagataatctgggtatgaagcacatacgagagaagataaaggctggagtagccaaatgttttaaagaagacgatcaaggtgtgttatggtttaaaaaccgcatagtagtgccaaagaatgaagaactccgccagcaaattcttgatgaagcacatcttagtcgttattctattcatcccggaagcactaagatgtaccaagacttaaagcaacattactggtggacaaagatgaagatcgaaattgcacgctatgtggctaagtgtgacacttgcagacgtgtcaaggccatacacatgaaaactgctggtccattacaatcttggccaatcccaacatggaaatgggaagacataagtatggactttattgtgggact

SEQ ID NO: 5619 - DNA, 467 bp, Zea mays
aagtcagttgcataattcgaagtatggctcttatgtgcacattgtagtcataccacatctaatgaaaatcacccaacgtcatgatttaactagaaatctatatattaagtcatttgaagaccctacatgtcgttagcaatatctttggccttcggccatccattataaaattagctcattctgcctaggaaatacaaacagatctatacttacatacgcaccaaattatttaaggtcatgtaaaagttatattgatctttgtcgttgtttataaaccacgtcctagtttggactgcataaaataaacaaaaggaaggtgccatttgatatgcatagtgctattatatttactaaattatgcacagataaattaaatggtaagctcgatggttatccttatagtcaaaataaagaaagacactaatgatggtcatatggcgtgtagtcgtacctaaacaaaattgata

SEQ ID NO: 5620 - DNA, 443 bp, Zea mays
  unsure (1)..(443): unsure at all n locations
agcttctaaagggagaatacattntaagattaacttatgttctatttgagaaagacaggatttgtagcgcatgccaagcagggaagcaagttggcactcatcatccacacaagaacatcatgacgatcgacaggccactggagctcctacacatggatctattcggcccgattgcttacataagcatcggcgggagtaagtactgtctagttattgtggatgattattctcgcttcacttgggtgttctttttgcaggaaaaatctcatacccaagagacattaaagggattcttgagacgggctcaaaatgagttcggcttgaggatcaagaaaattagaagcgacaacgggacggagttcaagaactcacaaatcgaaagcttccttgaagaggaaggaatcaagcatgagttctcttctccctacacgccacaacaaaat

SEQ ID NO: 5621 - DNA, 440 bp, Zea mays
  unsure (1)..(440): unsure at all n locations
ttctttctctggctattccctcaagttgcagaaaccaaagcaggaggcgagcagcagagtaaaaaaccaccaccggtccctcctccgaatatataaaggccagggcaagacccgttcaacacttcgcccgaacctgcagcgaaattcaaaactcgaaggcgaaacgcccgttcctcgaacggctcgcgcaacagctgcctcgcgaaccactcgtcccgtcgcattaactccgcggtagggcaggcgacacctttggcaggcgaagcgggcgacgcttcacctccaccataatgaccgcgtcaaanaatgtgcgccacttcgttcaatttcgtatccttttcctcttcccctttctctctcttgctacagggaccgggaaaggggatactccgaaagggatccttctctgcgaaagaagcgggccccgaccctcctactga

SEQ ID NO: 5622 - DNA, 372 bp, Zea mays
  unsure (1)..(372): unsure at all n locations
agctntacttagttgattgtgcaaaagaagaggctggtctatatgcatgcttaatggctaagacttgcatgggctggctgtggcatcgccgcttatcacatgtggggatgaagaacctccacaagcttctaaagggagaacacgtgataggtctaaccaatgttcatttctaaaaagatagaccttgtgcagcttgtcaagcatggaaacaggtgggaggctctcatcacaccaaaaatgtgatgacaacatcaagacccctggagctgctacatatggacctcttcggacccgtcgcctatctgagcataagaagaagtaagtatggtctagttatcgttgatgactttttccgcttcacttgggtgttct

SEQ ID NO: 5623 - DNA, 444 bp, Zea mays
  unsure (1)..(444): unsure at all n locations
atatacgaccatgaagcttgaatgtccttattgacttgctccgnaatggtttgtgaccttgcgaacttgggattgtggacttgtggctttgtgaactttattatgaacttgttatattgtgtacttgcgttatntgtgatcaacttatcatattgtgaacttgtgatctatgttatcaatttgtaatatcgtgaacttgtgatatttgtgatcacactgttatattgtgaacttgtgggctactggtctttgtgatcaactttntatattgtgaattgtgaacttgtggtgtttgtgatatttgtaaactttgtcgtattctgaacgtgttatattgacatatattcatattcgatatggtaccgattgtatttaaagttccgaccagtaccgatgtattttccgtaccgaactttcgattccgatgtttccgaaataccgata

SEQ ID NO: 5624 - DNA, 445 bp, Zea mays
aagcccagggatctagctctacaactcttttcattattaccagaaataacctgcgaatcggctgtaagaacagcccttctaatccccattgcctttaacttccaaagacccaaaagcaaagcttcgtactcagcaatattatttctgcaactaaaatcaagtcttgctgcgtaacaagttttgactttggagggtgcaaccaacacagcagctgctcctgccccgaaagttccccaagaaccgtcacaaaataccgcccatacttcagaatctttagttgtttcttctccttgagcccctagcgtccaatcggcaatgaaatctgctaacgcctaagatagtattaaagatctgtgcacataatcaatgctgaactcattgagctccgcaacccactgtccaaatcattcagtagcttctctgttgctcatgacatccttcaaaa

SEQ ID NO: 5625 - DNA, 176 bp, Zea mays
gaaaacaggcagctccataatgagttatggcgccaaccaaagagcgctcaggggaagcggcccgacaagagactacctagggggtgtggagccctacaagtaatcctacggacaagatctggcatctaatcacaatctctgccccaaagaccaaaagacgacatgaggggcacccc

SEQ ID NO: 5626 - DNA, 435 bp, Zea mays
agcttaagaatgtctcccatcattatgaattcctttattctcccacgaaaggcgacgcggtgaacatgatatggaggcaggtgaggcacaagatccccgcagttaaccttgctattcacaggaacagaagactgaaaattccagactggtggggataatgattggtggtgaatcgtgtacatattaccatatccactgttagtcctggttattttcggtgcgttatgatggaaacattgctcaccgtcctttgtgaaccaaagtgttcatcttaagatccaaggaccgagtccacaactatttgctgacaggaactgagattatcacctcttttttggtcgatttttgtgacggcttcctatttccccccctgatgctacaaaatagaggggacaaataaacttacagttacattatagaggagtcatgcctgac

SEQ ID NO: 5627 - DNA, 408 bp, Zea mays
  unsure (1)..(408): unsure at all n locations
ctcaagcttgaagccatggtaagtaacataagctaataatattctaatagtctccagcctagcaacgggngcatagggttcaccaaaatccaaaccttcgacttgtgaataccccttgtgcacgaatcgagctttgttccttgtcaccacaccatgttcgtcttatttgttgtggaagaaccacttggttcctactacatctttgttatgacgtggaactaaatgccataccctcgtcctcgtgaagaagttgagcttcttttgcatctccatcacccaatccgaatcttggagtgcttcctctaccctgtgtggctcaatataggaaacacaagagtaatgctcacaaaaatgtgcaacaccatatcgagtagttacccccttatgaatatcgcccatgatggtgtc

SEQ ID NO: 5628 - DNA, 203 bp, Zea mays
cacgaccttcgacgaccaagcatggccccaacagcgcgcttgcaccgtgagcatagtatttcgccagagcggggtcctcagccagatgattctatcgagctaacactcaaccaagtttggtggcgaccaagactgtgaattttacaggatcacctatccacccccctctaggtgctctcatagcgcgacaagctccaatacga

SEQ ID NO: 5629 - DNA, 255 bp, Zea mays
ttctcgattgtcctgttaatttacaaacaaaagtatgaaaagaaaagagcaccttgccgctgctgcttgctggtggcccctaccagagctacagctagctttagcactgaaccatagacctaatgactattattccaacagatctagagcgtgttctaccatttgagagatgatgacatgtctctgttgaaactgatcaaaatgattactcaccagataattcagtggcagctactcttgaaaattctctcctta

SEQ ID NO: 5630 - DNA, 451 bp, Zea mays
  unsure (1)..(451): unsure at all n locations
agctttctagtacaacctcgccttttgatctggcatttgttaggtttgcatggtatcgtacgtctagatctcaagctagaaagaagaaagaaaggtgcattgtgcctctatcggctccttattttggattaaggttcacccactacaaagtcctatgaaatttccaggaaattaccaggaaacttccatgaatcaaaatctatgatgaggattgatgatcctcatccccacttgagaaagtgatgacaaaggtaacgatcgcaaagttttgcatctgttctcgtgacaagaatttgcactttanccctaaaagaaaaaaagatagaagatggaaagtggtggcctaataataccagcacaatgcgtgtgcgttgcaacgccgcacaaattgttcaatataatgttagaccacaatgattacgatattaacatgggatatatgatcgtcgat

SEQ ID NO: 5631 - DNA, 463 bp, Zea mays
  unsure (1)..(463): unsure at all n locations
ntaccaaatggacgtgaagagtgccttcctcaacggaccaatcttagatgatgtctatgttgagcaacctcccggctttgaagatagtaagtaccctaaccatgtctataggctctctaaggcgctttatgggctcaagcaagccccaagagcatggtatgaatgccttagagatttccttattgctaatggcttcaaagtcggcaaggccgatcctactttgttcactaaaactcttgacaatgatttgttcgtatggccaaattatgttgatgatatncatattgggtctactaacgaatctacatgtgaagaatttagtaggatcatgacacanaaattcgagatgtctatgatgggggagttgaagtattttctaggattccaagtcaagcaactccaagagggcaccttcattagccaaacgaagtatactcaagacattctaagcaagtttggaatg

SEQ ID NO: 5632 - DNA, 311 bp, Zea mays
  unsure (1)..(311): unsure at all n locations
catgaagcttgggcacttgtgtctactaggccactgttgtgagctcccgtgggcagcccgcgggcgtggcacangcagggggagaagagggcgactgtatcaggcggctgctaaacgggtcggacctgccgggcgtcgcgctggagggcgagaaaagccgggccgtggacctcacgccgctggcggtcgaggccatctgcgatagcttctgggagtggctgcgagaggaggagcttccgctccggggccaggagcccgagcatctgcgtgtgtccgtcagccgcgacccgaagctgtctgggccgctgctc

SEQ ID NO: 5633 - DNA, 375 bp, Zea mays
  unsure (1)..(375): unsure at all n locations
ctatcaaatggacgtgaagagtgcctttctatatggaccaatcttggaagaggtctatgttgagcaacctctcgactttgaagatagtgagtaccctaaccatgtctataactctcaaaggcactctatgggctcaagtaagccctaagagcgtggtatgaaagcctgcgagattttcttatcactaatggcttcaaagtcggaaaggctgatcctaccctcttcactaaaacaattgcaaaagactngtttatatgccacatttatgttgatgatattatatttgggtctgctaacaagtcatcttgtgaagagtntactaagatcatgattcaaaaattccagatgtctatgatgggggagttgaagtatttc

SEQ ID NO: 5634 - DNA, 242 bp, Zea mays
  unsure (1)..(242): unsure at all n locations
agcttcaagnggttttttgtatattattcactctaaagtcttcatttcaagncttctcagaaatcactattatcttccacttgtgcgttttcagaggttggccttgccttcagtttgtcgtatgctttagaggtcagcattttgtctttcggngatgaatattcattgggtgcaccggtgtaacccccgagctttgagtggatttttgaaaataattcactcaaaggtcttcgtatcttact

SEQ ID NO: 5635 - DNA, 381 bp, Zea mays
  unsure (1)..(381): unsure at all n locations
ctttaaactcaacttctaagggagaacacgtgatatgtttgactaacgttcaattctattaagatagaccttgtgcagcttgtcaagcatgtaaatgaaagggaaatgtgcccttgggccatttctaagtattttggtgattaagtgtcaacacaagtgcttaaatgtgaatcaatgcccatggatgaacaaagtgcaaatctagagcaaaggtatgtntctaagtcttagtacattggttctgtgtactaatatacttgtcttagtatgagaaacaggaagaagaagaaaagaagagagttggctgtgtacagccaagaggctgtttcggtctggggcaccggactgttcggtggtgcaccggacagtgtccggtgcgcc

SEQ ID NO: 5636 - DNA, 440 bp, Zea mays
  unsure (1)..(440): unsure at all n locations
agcttctacccatttcccggcagacggatatctctttactatccaggagacagtacaaanaatcttcctccccgatgccattgaacactaatgcccccttcgggtatttcagtttttgggcataatgttgagcttctcgttcttcttccttagagagtccctttcccgaagcatggcggatgatgtaatcgatgctctcttttaaagcttcgggagcaggagtggcaaccttttcaggcgaaatttgctctgtagccttttcttctgttgccttttcttcaatttctgaaggctttttctcagcgggctctgaaggcccagcttcggtaccagcttggattactgcagcttcaatttcagccagctntgtttcagcttcggtttgcacttttgaagcctcggcaatttttcttgaaagagtagagttcaaagtctttact

SEQ ID NO: 5637 - DNA, 414 bp, Zea mays
  unsure (1)..(414): unsure at all n locations
gcatgagcatntccactttgtcttggtcatgctagtgtgccccttgcggccttttagagatgtcttgaatctcttgatgatgaaagccatctcttcatcattaagtctggccgcctcaatttgtgccaccttgctaggtagcatttacttgcttcttgttgccttgagagcaagaagatgaggctcattgattggaccgtttagagcgtcgacgacgtatctcgcctccttgatcatcatccgcccgcttactaattttccgagtacctcctcgggcgtcatcatcgtgtacctgtgaatttcacgaatattgnttacgagatgaggatcaagaacaggaaaggaccttatcattacgcggacgacgtcttggtccgttcatcacgtgcntccgtagctccttattttgttgat

SEQ ID NO: 5638 - DNA, 443 bp, Zea mays
agcttcagctccgaaagcgccggctattgaaagctctacagttactgaagctgcaccttcggaagccacaaatgccgaagctaccggagccgaagatattcatttagaaagcatggttgctgatatagataaaatactattaaacatggccgcggaagaggctgtcgcagaagagtgtgccgcagccaccgaagagactgcggccccaaagcccgagaaggagaaagaaatggccgaatatacttcggaagatgaagcttttaactttcaaaacttagttggtcaagagctgacgaaggctaaaaaagaagagctaaaggaatatgctatatcttgcggatatcggccgggagcacttctcttctgtggcatcgatgacgaaaggttgggctgcatccgggattagactggtgcgaaggttatcggtactctatcaaagagta

SEQ ID NO: 5639 - DNA, 467 bp, Zea mays
  unsure (1)..(467): unsure at all n locations
agagcacatattaggattaacaaatgttcattntgataaagacaggatttgtagcgcatgtcaagcaggaaagcaagttggtgctcaccatccacacaagaacatcatgacgaccgacaggccactagagctcctacacatggatctattcggcccgatagcttacataagcattggcgggagtaagtactgtctagttattgtggatgattattctcgcttcacttaagtgttctttntgcaggaaaaatctcacacccaagagaccttaaaaggattcttgagacaggctcaaaatgagttcggcttaaggatcaagaaaattagaagcgacaacgggacggagttcaagaactctcatattgaaggcttccttgatgaggagggcatcaagcatgagttctcttctccctacaccccacaacaaaatggtgtagtggagaagaagatagaactctattggacat

SEQ ID NO: 5640 - DNA, 450 bp, Zea mays
  unsure (1)..(450): unsure at all n locations
agctntatatggacgacggtgtcgtactccgctatattggtctgaacctgcggaaaggtacttctttaggcctgatatggtgaaagaggccgaggaaaaggttcataaaattattcataatatgaagaaagcacaagctcgtcagaagagttatgcagacaaacggcgaaggcccttatatttcctggaaggagactatgtttacctgaaggtctcaccaatgaaaggtgtatcgcgttttggggttaaagggaaacttgcacccaggtacattggtccattcctggtgcttgagcaatgtggaccagtggcataccgacttcagctccccaaaacattgtctgctgtgcataatgtgttccacgtgtcacaattgaagaagtgtcttctggttcccgatcgaaccattgaagtgactgatgttgtcctggaaccagattaacatactca

SEQ ID NO: 5641 - DNA, 481 bp, Zea mays
gaagattcttcatccaaacatgggctagtcggcggtgccttatcctacccatgttagtttttatcaaaaagcacgtggcgagttcagctctatcaaaatctaccaagtatagctgaccctctaacacacccttaaatgctatagaatcatcatttcttctaaagacagtgacacctacatcagtaaagagacagttgtagcccatatgacataattgggatacggtaagcaaattgtaatctaaagaatctacaagaaaaacactggaaatagtatggtcaggtgatatagcaattatacccaaaccttggaccaaaccttgatttccatctccgaatgtgatagctcggcggggatcttggttttctcatatgaggagaacatcttcttctcctctgtcatgtggtttgtgcacccgctgtcgagtatccaacatgagccctcggatgcataaacctaccatacaaatgtagttcttgac

SEQ ID NO: 5642 - DNA, 450 bp, Zea mays
  unsure (1)..(450): unsure at all n locations
agcttggtcatgatcganatgccagatgtaaagttcttctctttttcaacacattcgtaagagggcgggatatgatgccaacaaattttacaaattttctgtagtaaccagctaaacccaaaaaactgcggagctctttgacattggttggggtcggccaagactgaactgcagcaactttttccggatctgtcgccactccctcttgactaataacatgtccaaagtaatataactttgtttgagcaaaggtacacttcgaaagcttgactttaaatttatgttgctgcaaaagggaaaagactgttcgaacatgctgtaagtgaaagtcccaagatttgctgaagattaaaatgtcatcgataaagacgacaacacatttacgaagaaggggagacaagactgaattcatcgtgagctgaanagtggctggacctccagtaactccat

SEQ ID NO: 5643 - DNA, 380 bp, Zea mays
  unsure (1)..(380): unsure at all n locations
gtcgacagccaatttgtgtccgtttattgtgagtgacagccgatgaagagcttatctctatagagccacgcaagtgaaactgaaaattaatctgacagtggttcagcggtaactgatggccggtagaagaacgtggctgcccagacgagctgcatggaggaacggcgtgcttatctactgaaaggaaaggacctcggctgggagagggaactggctaccgggcttgcttggtacaagaagccgatggcgagctcggcaggacgcaaagaggagcgctgtcgagcagagaatattagcgcgcgcggcgatgggagctctgcggcagaggaggacgccgaccagcgcgcatgggagcangacgggggcaatctacgccatgg

SEQ ID NO: 5644 - DNA, 441 bp, Zea mays
  unsure (1)..(441): unsure at all n locations
agcagtgtgctaacgtgtctancaaagaggagctagtgccctatagtacatgtcgtcgnggcagccggagaggttttggcaccctgttcgtgtgatgtcgtggccgtcggaggagcgctggagccttgcggaaggacagctgtcggggctgtcgagtccttgctgacgtctccttgcttccgtaaggggttgagagccgccgtcgtcatggagcacgcggggcgccatcattatttgttttaccggggcgagccatatgggacgtctgtcttgtttcccgttnccccagctagctaggggtagggtaatgatggcccctcctgtgacgtggtcggtccgagccctgggtcgggcgagacagaagctcctccgaggtcgagttcgagtctgtcttccgaggtcgaggtcgagtccgagcccctgggtcgggcgaggcggata

SEQ ID NO: 5645 - DNA, 370 bp, Zea mays
  unsure (1)..(370): unsure at all n locations
gaaaatgtcaacagcaattcatattttctattcttatacaaagattactatccaaaagttgggtgtttcactttgggtatttttganggctttctaagtttcccttgtttctcaaaataaaaggtatcctatttattttatactaaacccaggtataatcaagtttttctagtaacctacactgaataagtatactaacaaaaatatgggggctccctgggtctttatttaaatcactcttcctcatttcttaaccttaagcataatgtaaaataaatggcacactctaccttaatgggatgtacagaggggtttagcattnntaaatangtcagtaggtggtcataaacttctccaacatttcttaact

SEQ ID NO: 5646 - DNA, 247 bp, Zea mays
ggggttacttttttcaatcccacacgaggaagagggcgagaggcactccggcttaatgaccgcgatcctgagccaacaccctatgaccccagcaagctatcgacaaagaaacggagacaaacaagggagcaactgacagactcccagagcataggcgcgatcaagcaccttgcaagcgcaacaaagccgaacatcacatacgccgggagaaaacagagtccgctcgcgcaaaaccacaagacgacca

SEQ ID NO: 5647 - DNA, 442 bp, Zea mays
  unsure (1)..(442): unsure at all n locations
agcttatcaatcaatcaaaacaatntgatcaagttaagctagaactgaattcgaagcttaaagccgaagtccagaccagctcagaattgaagaaagcattaacaagccttcaagacaaatgcttgaactttggcaataattgtattggacgattaaagaagatattttactctgttggagccagcagtgggaaatttaacccttcggcggaaaatttaccccaggccttcgatcatattgaagctgaaatcgaagagcttgacgaagttatagccgggcacggcgacttctgtgcctgggtagcttctcggggtaccgctgctgcatttctgaaagccggctgcgaacatggaaaggttgtcaacaggcccaacttcaccttatcttcatcaatcctggatgatatgcccgacctcgcccgaagtatcttcaatagaattat

SEQ ID NO: 5648 - DNA, 432 bp, Zea mays
  unsure (1)..(432): unsure at all n locations
atgatatgaagccttgggtgctcgagttattccattcaattcttatcactcaagctatcaatcttcaatgatctatatacatgatngacccaagggtatttttcaaattgctatgtcttaaactcatatcatctcgaggaagatatatatgttgtaggaaatgaagaaatatcatatacgaaaaatcaaggcctacaacatggaggaaagtcagaggatggttaaacttatcttttaagtgcaagtattttagaatatcatttcttatgtgtagtgtgtagtcacatagaaaaattaaagcacttcaaatgcctttaaatntatattaccattcnttgaagaattttcctctcatatggtagattgcatactcatcatntcaatcctatggcaatctacatgctttanaatgttgcaagtatctcatggcat

SEQ ID NO: 5649 - DNA, 425 bp, Zea mays
  unsure (1)..(425): unsure at all n locations
agcttgtttaaagtcttaaggaaattttgtatatgtatcaagcttttgcttanagcgctgttgtaatgtgttccctgtccttttgtgtccaccagcagnttaattaaagtagtctatatgtaattaaagaaaaccgaatgttactacttatggtactacctcatgttattatggtcccttgagtgttaattttgttttcttcttaattcgactgcactacgtattttaaaaactctacacttgttttgcactatatgaacaattctggcaaagtgattgcaaagtgggatagtatagcaacaaaaatttacacagaaatttgtgtataagaggtgaatgcacgcaacaagccccaacattttctatatgcagaaaggtatgctaaccttataaagaagtttaaagaacgaactggtcgcacttac

SEQ ID NO: 5650 - DNA, 373 bp, Zea mays
ccttgagcgatatgacgagccttacgtatgaaaggaactcgccaccttcacccaagctcttagcgtgcaggtagcccctgcacatgctggcggagtagaagagcatgcccagccacacccgatacatcaccctccagcgcgtggacgcttcaagctgcagcagctccattgcaagcccgcatgcctcggggatgtggaagaaagactgtaccgcctcctccccgtcgtcgtctgcagctccatgagcgacgccgacgggcacctggaaacgtacccgcgccacgtcgtcgatgatcttgtgcaggtcgtctttgcccggtggcttgccgctgcgatctaccatggtgcggtcaaagatggactcgagttcatc

SEQ ID NO: 5651 - DNA, 428 bp, Zea mays
  unsure (1)..(428): unsure at all n locations
gcgatccttnagtcaccgcggctgcagcttattaactaatggaagttattttttgttccactgatttccttttaatgtcttagcgagaacttaataagatttctagttgaacttatcggagcgagggttatttttcccttctttccttctattccttttatgcctttaatgtgggtttgaactacaagttaacttaataaatttccaaaaattctctgtctcaaaatttggggtataattctctgtctcaaattttggggtttaaaaagtaagtgggtttctctatataaaattattatggcacagagggtgttttgaactacaaccccttttaacagaaggttattctctaagacatatatttgctggaatctatatgttagaatatgaccttgtacagaattctagtcattaatactctattgcta

SEQ ID NO: 5652 - DNA, 446 bp, Zea mays
  unsure (1)..(446): unsure at all n locations
cagctntacaaagnacaatggaaccagcactccgaggatgaagctacttttgaatctgaagactacctaatggagcagattcccaagtttttagattcttgtcaatcctaagccttatgtaaattgtcatcatgtgaaccaacangggcacacccctgccttgttagaacgaatgtggaataagatcgtgacgcgtttcccttctcattacttagcctggaattctaatctcgagacgagattcctttntatggggaaggatgtaatcaccctggtgtacgagcactaaaaatttaacatttcatcatatacatcagcatcatcttgcttgatacacctagagtgcattcactacgtcaaaaatttcaaaccatatgtggtgagattgtcggagacaaacaaatccaattgaaacattaactatccgaaaagtggagtttgaatct

SEQ ID NO: 5653 - DNA, 453 bp, Zea mays
agcttcctccagcgcttacaggctcacttcgctctactgcgaggacctggagcactcatggaacatcgacaacctccgcaaatattttgtttgactcatcaaggctgatttcgcccttgtaattcgcaaaaacaatcttgtaccggcccgcactcttttcctcccggggggtgaggtttttaacgaggcggagccgtgtaatatatgtgtgaaaaatcccccgcaaaaacatgcgtcgaaaaaagaccgcgacgacggtcttcgacattcgaccaatacgaggtcaccgcgaggctaagcgctatccaccctcgcgtgcgacaaatccgcgcagaagtcgcctaaaggtgcagccggactagcacaacaagtgcgaataaaccaaagtctaccgcgaagactatccgcgcagaagtcgcctaaaggtgcacccggactatcacaacaagtgcg

SEQ ID NO: 5654 - DNA, 460 bp, Zea mays
  unsure (1)..(460): unsure at all n locations
ctcagcttcatccacttgaactctntacctttctccagtagagaggatatttgtttcactaactcggaaaaaccttcaataaatcttctatagtatcctgccaatccaagaaaacttctgatcttagaagcatccttatgttgcttccaatttaatatctcacttatctttcctgngtccactttaattccaccgtcggtaacaatatgccctaagaaagcaacttctttcaaccaaaaatcacacttcgagaattttgcgtatagttggttgtcacgaagcttttgtagaactagccttagatgatcttcatgtgcttcttcattcgaagaatatatcagtatgtcgtcaataaatacgaccacaaactgatccagatattccatgaatactttanttcatcaagtcataaagtatgcaagtgcattagtcattcaaacgacatgaccaaaaactcata

SEQ ID NO: 5655 - DNA, 404 bp, Zea mays
agcttcgttttaaaacatacactatttttgcaatgtgcatgcttcgttgagtacgaaaagaaaggaaagtgtttttcgccttcggctcaaaagataaaaatttggtccacaacaaagcaacttatacatggatggaaaggtaaaaatatattacaaggtatgcacaagtgtacaaagtactgttcaattctcgatcacaattttcctttacaaagataatacaaatgcttctaagctctatacaggcatgcttaaagagtagcttcagcagccttcggaatgtgctttggattatcaatcttcggcaccaacatcctgcagacaaacaagcgatataaagtaaaaagtaattataagagctaaagcaagcaacaagtataagtttcataccggcttaagcaagc

SEQ ID NO: 5656 - DNA, 388 bp, Zea mays
actcagcttactggctactggcggagctagtctaagcactggtttgtccatatgatggctggagtgggctggccacagtggccgaagctttggcggcaatggcgggcggaattaagctcgccggagctaatgaaaagtggctggccggtgagggtgagtgcggtgcgaaaagaggtgcgcctgtggagacttaatatgcgcgggcaggcacgaccgatggcatgggcgcgcggcggacttgaccggactccggggtgagcgcgcgcgcgggttgggcgagctctggcgtgccgaccagggtcgaacacgtgtgcccgtgcgttctgcccaagttctggcgcgtgtggtcgctcatccgaacctgctctcgcctttggcagtgcacaaa

SEQ ID NO: 5657 - DNA, 281 bp, Zea mays
  unsure (1)..(281): unsure at all n locations
agctntggctggattggttgctgagagagncattataatctcttcttggttatagctcaacctgacagttctgagttcagtgttgaggaatgccttgtgttgtgttaaccaattcataaccaagattacatctatatcctggcccttcagaacaatcatgttatcaagaaaagtccgttcggccattgttactggcactccataggccacattcttagtataaatgtgtcccccacgggaatgaaatttaaaatcctcctttgattcatggtatgcaatat

SEQ ID NO: 5658 - DNA, 447 bp, Zea mays
tgcatgacgcgtgtgacccagccctcgtgtcgtagcgggaggatcttggagtgtgttggtgaagactcagtccgcgacggctgaggacgcaagtggggagagtcgcatttaaaaagggggcgacccccttggatggcagccatgccttcgcactcccctcatgcattgcgcccttccaccttccaagcccccagatggggagcgcccgcgttgctttcatcttgctgctgttggaggagcacaacttcgcggaagttggtacctttcagccatcgctcggcttcaaggattttcatcaagcagcctggctgcatcccctcgccgatggtcacccaagatggtgaccaccagtttgatggtggtgagaagcaagcccgtgtgcgacctctgccccgcctcacttcaagatctcatatccgtctgggcggaggcaactacccgggctgc

SEQ ID NO: 5659 - DNA, 428 bp, Zea mays
agcttgtgcacacctctgtgaagctccacgagcaatgaatctgagttcccttcgtcagagaagccagtccgcgctcgccggagttctcacccccgccggagcacgtggaccgggtaagccactccaccatccttcgattccttgtgcacacagtcgttgcgtgaccccgtgatgctcaccgtgccctcggattgcgccagttcgccgtagtttggccggtacactcgccgccgacgaggacacccgcctgcacgcgtggaccgggcgattccggccacctccgacgccaagccgtacctcgacgtgaccgccagagtcttcccgagccgaccccacccttcgccggaccttcctcgccgccggtaagccgcgccgcccttttcttttccgcggttactgtttcagtgaaaggaaagactgcgggtgag

SEQ ID NO: 5660 - DNA, 473 bp, Zea mays
  unsure (1)..(473): unsure at all n locations
actggcacgtgagcccgagtaagctttntctctcgtctttgtggcggttatcttaactaggttagacaagccctagatgcaatacaagaaatttaaatatgcaatgcaagcttgacaacaccatttgagatcttaaataaaatttctgagatcaagtatatttaattcattcctcaacatgccaaaaccgggtttatcaagtggcttagtgaaaatatccgctaattgatcttccgacctcactccttctaaaaggatgtctcctttagcaacatgatttctaaggaagtgatgacagttatcaatgtgcttggtgcaagagtgttgtataggattattagcaattttaacagcactctcattgtcacacaacaaaggtacctctttctagaactacgccatagtctagaagagtttgtntcatatataaaatatgtgtgcaacaagcacccgcaacaatgtattccgctttg

SEQ ID NO: 5661 - DNA, 449 bp, Zea mays
agcttggtgccgatggagaaacaaaaatccttgatatcttgtgttgtcaaactgcttggccgtgtcaactgttagctcggacggtactccgaagcggcaaacgatgttctgccagaagaatttttgggtagtctttgatgtgatcgtggaaacagccctcgcttcaatccatttggtgaagtattcgacggctacgaaggcgaacttaaggttcccctgagcggtgggcaggggcccgacgatgtccaggccccagcgctggagaggccatgtatgggcaatcagctttgtatattgcgaggggttgcctgaccgaagagagaacttctggcaagcttcgcaagaccttgtgacccgatttgcggcgcagatcattgcgggccagtaaaacccttgtcggatcaccttggcagccagagcccttggccctgcgtgcgagccgcacgtgc

SEQ ID NO: 5662 - DNA, 370 bp, Zea mays
  unsure (1)..(370): unsure at all n locations
tggacgtgaagagtggccttctcaatggaccgatcaatgatgatgtctatgttgagcaacctcccggctttgaagacagtaagtatcctaaccatgtttataggctctctaaagcgctttatgggctcaagcaagccccaagagcatggtatgaatgccttagagaattccttattgcaaatggcttcaaagtcggcaaagctgatcctactttattcaccanaacacttgataatgatttgtttgtatgccaaatttatgttgatgatattatatttgggtctactaacaaatctacatgtgaagaatttagtaggatcatgacacagaaattcgagatgtctatgatgggggaagttgaagtatttct

SEQ ID NO: 5663 - DNA, 476 bp, Zea mays
  unsure (1)..(476): unsure at all n locations
tcttcagtcacctgcagcatgcaagctngaagccatggtaagtagcataagccaatatatatgctaattgactcaagcctagctacgggtgcataggtttcgccgaaatccaaaccttcgacttgtgaataccctttggctacgagtcgagctttgttccttgtcaccacaccatgctcatcttgcttgttgcggaagacccatttggttcctacaacattttggttaggacgtggaactaaatgccagacctcattcctcgtgaaattgttgagctcctcttgcatcgccaccacccaatccgaatcttggagagcttcctctaccctgtgtggctcaatagaggaaacaaaagagtaatgttcacaaaaatgagcaacccgagatcgagtagttaccctcttatgaatgtcgccgaagatggtgtcgacagagtgatctcgttggatagcttggtggactctagagtgtggcgg

SEQ ID NO: 5664 - DNA, 389 bp, Zea mays
  unsure (1)..(389): unsure at all n locations
tttgcanagaataattgatgctcaaaggattatttgggtatgtttcacattcgagagaagatanaggctggagtagccaagtgtttcaaggaagacaatcaaggtgtgatatggtttaaaaaccgcatagtagtgccaaagaacgacgaactccgccaacaaaatcttgatgaagcacatcttattcgctattctattcatccccgaagcactaagatgtatcaagacctaaaacaacattactggtggactaagatgaagattgaaattgcacgctatgtggctaagtgtgacacttgtagacgtgtcaaggccatacacatgaaaaccgctggtccattatcaatcttgccaatcccaacatggaaatgggaagacatcagtatgga

SEQ ID NO: 5665 - DNA, 425 bp, Zea mays
gctgccttccttagtctatatccgcattttctgagtcttggagcgtgccaatgggaaaatcttcacagccatcaagaagatgctcctcgacgagaaaaaaggcagatggaccgacttattaccggaggcagtctgggcgctaaacacaaccgagtgcagggcgaccgggttcactcctttccgccttctatacggatcagaggcaatgaccccgcaagaaataaaacatgggtctccgcgcacagctccgtcagccatccctgacgtggatgagccaacctccaaagatctcattgacggagaccgggtcttcgccctgcaggccttaaacaaataccaagcccagaccaaagcatggcgcgaccgcgcagtcatcccaaaagaagtcagcgcggaggacctcgtactcatccgaacagctcgga

SEQ ID NO: 5666 - DNA, 420 bp, Zea mays
  unsure (1)..(420): unsure at all n locations
aatgccattgtgtctctttctataaagcatgctacgagcaaatttaaatttctcattttctagttcatgctcgacaatnttagcatcaagtttaactatatgatcattttgttatttaatcatagcaaggtgatcatgaatatcatcaacatttatatctctacatctagtacaaatagaaacatgatcaacggtagatgtagagggtttatcatttagttcaacaatcttagcatgtaaaatagcattctcatttctaagattggaaatagatacattgcaaacatctaattccttagccttagcaattaatttatcattatcaaacttaaggctagcaagagattcattcaacatgtcaatcttagcaattaaactagcattatcatttctaagattaacaattgaatcatcacaaac

SEQ ID NO: 5667 - DNA, 457 bp, Zea mays
  unsure (1)..(457): unsure at all n locations
agcttcggcgatgttcaaggtgtctataacacgtctcatagtgaactctatcggctntcatacctcggacctcggtaatcctgaccccatcgtgcctcgccgctattggccgacgtctccagacacatgccaacgtgctgttcgataccaggatgtgcacaatcaggtactggaattaccatgcctttcccacatgcaaacacgttatgaaccgaccctgattggtcgccatagttactcaacaccgccatgagcaactntcctgctggccatgcctttcctattgatcccctcgctttaatataagcctagatgattcgccatggccaacagaggattggcggaacccacagccctagccgagcgctcgtcatatccaatgccggtgaaccctcgtaggcttagcggtaacccacgtccctagtcgagcgcctatcgtagccaacaccaacaaact

SEQ ID NO: 5668 - DNA, 313 bp, Zea mays
tgtccgagcgggtattcttcttcattccgcacgatgccaacaaaaggagtgtctgactagtggagctctttgagtgcgactcctaatcctaagagtgtccgggggaaggtgatgttgatgctgctttccccgtccaccaacaccttttttaccctactctctctgatcaccggatcgacgaggagcgagtatttgcccggatgatcgaagttgagccattgatccgcctgagtgtaagtgatctggtgtgttgaccatcgattccgggcgggagcactggtggccaccaccagtatctgacgatcattgagct

SEQ ID NO: 5669 - DNA, 445 bp, Zea mays
  unsure (1)..(445): unsure at all n locations
agcttcttgtaactgctgcaaaaaatgatatgtgtactgcgttcctcgatctgacactatcttcttcggcacaccatgaaggcagactattcgtgacatgtataactcagctaacgttgctccggtgtatgtcgtcttcacaggtatgaagtgggccacctttgttaagcggtccacaaccacccagatggaatcgtagctggcccgggtacgaggtaggccaactataaaatccatcccgatttcatcccacttccactgaggaatccgcaatggctgcaacaatccggcaggcctctgatgctctgctttggttctctgacagctatcacagatggcgacatattctgcgatctcccttntcataccataccaccaaaacctnctttttaaatcctggtacatcttctcactccctgagtgtatggagtaggctgtctcatga

SEQ ID NO: 5670 - DNA, 419 bp, Zea mays
tcgatgatctggtctttcacaagcttgctacattgccttctttttttctccatagcaagaaccttactggaacactaccccacttaaaaagaatgagggtagaactcttgaatcttggggatttgaactccttgaagtacctcataacaagggtgttacggggccttcttctgatgttgcttgagcaagctgcggagaaatgactgacacagggttgattctgggagaaccttcttatcttttcttcactatcttcttttctcttctcacttttcacttttcactgcatctttctttctctttgctcttcccactagaggattctatcaaagagtattattatcgtacactggaggaaaccaaagattatgaaccatgtacaacagtcttcaacccaagaatcaccgagcattgtgatc

SEQ ID NO: 5671 - DNA, 435 bp, Zea mays
agcttgaggattcacaacagtcccatcaagatttatcgttaaaccattctgagatgtcctgatattttcaacgaagacaataatttaggaggaaattcatgctttgatagtacctttgattctgaagattagtagttattaataaacaaagaaaatgtcatgtatgtctttgaatacggtgcaaatttaaagtggtaaagagctctttcaatatgatgtcaataaatcaaaagaaaacatttatactttagtggcatctgaatattaagatttagttaagataataaaagcaattgtgtctttttaacacaagaaagattccaagttttgagcaagatgtcctaaaggtaaactaacaactaaagaaaggccaaatatatggacacgaacaaaggatgtaagaaataatttagttgtaacaagctaaaccctttt

SEQ ID NO: 5672 - DNA, 272 bp, Zea mays
agtcgcgccgcctgggccctcgctcgagggctccttgctcgaaggccagccaaccggcatggcgcgccgcggcaccagctgcagaaactagttccgtcttgagggccttcctatgggccagaccggccaagccctgcctccgtttgctgaaagaaagagcaagatcaagacatacagagaaaaaaccaaaacagagatatcctcggataacttacccgctccggaaccaggccaatcgtgcctgtggggaggccctcgggcctcggtccccg

SEQ ID NO: 5673 - DNA, 441 bp, Zea mays
  unsure (1)..(441): unsure at all n locations
agcttgggtattctccatcagagaagtatgcttattcttgtgatatataaaagattgtcttcacgaagcatgaaaagaaaggaaggtgttttttcgccgaaggctcaaaaaagtggtatgtatgcagaatttcatgcatcgtaaagaattgaactataaatagattatatattacattcaaagttacaatgtattacacatgttacgttccaaatgtttctacaatagcatttaatcctgtttaagaactatntctgcagcttcgtttagtagctggtcgacaaccttgtccatgatagcttcagccatttttctgatttcatcgtcccccttcgggtgggggcccggagatgtctcagcaagttctgaaggaggagaagataccgctatattactattacaaaccgcgaacaaagtctggaattcaaaattacaacagaa

SEQ ID NO: 5674 - DNA, 391 bp, Zea mays
  unsure (1)..(391): unsure at all n locations
acataaagtggtgtcaggtgttcttactgtgagacaatgacaaaaggctttatgacttanagtatctgccaccacattatcctttcctgggtgataatgaatttccaagtcataatctttgattaactcgagccaccttctttgtctcatgattagctctgactaggtgaagatatacttcaaactcttgtgatccgtatacaagtgtcatatattccctagcagataatgacaccaaatcttaagggcatgaactactgcagccagttccaaatcatgtgtgggataatgttcctcatgccggcgcagctgccttgaagcataagctattactcgtccctcttgcatcaggacacatncaagtccactggcctatgcatcacaataaaca

SEQ ID NO: 5675 - DNA, 445 bp, Zea mays
gtcacctgcggcatgcagcttctaagcccgccgggctatgtcctttttttctcgagcctctcccgcgggaccgagcggtgccaccgcgcctgtatctgtccctggccattagatctcaggcgtctgtctgagatcgggcgatttagatttaaccagagcagatctgatcacagccctccgatctatatccaaccacccttttttcttcccccttacccgcgcctctgcccctgggcccgactggtcaaccctccctggctcgctgacgccctgaccccgcctgtcacccttgtccgtgcgccagcgcgatctaatcctggtcgttgatctctgatccgatggccaaggttaccccgcactccttcgggtgtaagtcttgcttaagaaacccctggttttaagaaatcaacctcttcgtctcttgtttagctcgcacgcccctgac

SEQ ID NO: 5676 - DNA, 470 bp, Zea mays
  unsure (1)..(470): unsure at all n locations
cacatttaatactcaagcttctacacgcttgccctagagatcagctaagcatgtctgaatttttttctttaagatgctccagcgctttaaggccgaacgacatgaaagtatagcagaaagctccaaacggtgtgataaatgatgattttcctcgtcttcctttgccaagctaatctgatgatacctagagtagcaatccaagaaagacagcatatagcattcggcggtcgagtccaccacctggtcgattctatgaagcccaaagggatccttctgacagtgtttgttgagatccgtatagtcaacgcacatgcgccaatccactttattctttttgagtacaagaacatggttggctaaccactcatgatgtaacacctctctaatgaatccggncgcgaccaagcgagccagctcagcacagatgacttctctcttgtcgggcgtaaagcgacgtaacttttgtcgta

SEQ ID NO: 5677 - DNA, 333 bp, Zea mays
agcttcatattcagcaatattcactacacgacggttctcttacagcgacctacagttggttgctaaaacggccttcatcgacctacaggtgagtgctaaaaacttttagcgacccataaagatagtcgctgtaagtgccgccgctaaaggctttatcgaccgacatctttttatcgaccgaccgctcgcttctaatattgtatatttagcgaccaaccgcgagtggtgtactataaattagcaaccaatcgtgagtcggtatactatacatttagcgacccacagaaaattgcgccctattatagtccgtaataatgataatatcccgttaat

SEQ ID NO: 5678 - DNA, 435 bp, Zea mays
  unsure (1)..(435): unsure at all n locations
taaagccatggtaagnagcataggcaagtaatatgcgaattgattctatcctagctacgggtgcataggtttcaccgaaatccaaaccttccacttgtgaatatcctttggccacaagtcgggctttgttccttgtcaccacaccatgctcatcttgcttgttgcggaagacccacttggttcctacaacattttgattaggacgtgggactaaatgccataccacgttcctggtgaagttgttgagctcttcttgcatcgccaccacccaatccgaatcttgtagtgcttcctctaccctgtgtggctcaatagaggaaacaaaagagtaatgctcacaaaaatgtgcaacacgagatctagtggttacccccttatgaatgtcaccgacgatggtgtcgacagggtgatctcattggattgcttggtggactc

SEQ ID NO: 5679 - DNA, 380 bp, Zea mays
  unsure (1)..(380): unsure at all n locations
agctntaaatgttatttagaaaccttgggtaaagtttggcatgatttggacattgtttgatgcctaaaccccaaaaccctaatcctctagtgatgcctgccctaagaactacagttctgacttcaaaaaccctaatttcctatagtcccgtgaaggaaagttgtattcaaaatctaagataatatacctttattatctttgcattttcataagcattacatgagcattcatgattatatatgtgatataaataggaaacgaagaagaagtagaagttgaagaagaaagagctacaccaccaccaccacctgaagacccacctgccggaaactgcttttattttgacatttgtggagcagagcctgactcttctataacac

SEQ ID NO: 5680 - DNA, 461 bp, Zea mays
  unsure (1)..(461): unsure at all n locations
tcgatattacaaaccgacttaaagatagaatgaccttttagttcacaaaggtctgagtcaatgttgtaaacttttatgaggggtataattgtaattcctcacaggctgtgtcctgtgcctataaatagtgaacagtattccgttactggtcacgcattctggtaactgtagtcgcatctttcggaaatcaacctttgccaaggcagaggtattattggattcaatgattcaatatattaagtaaatataatataattcgtctatgatttatttacccttctataccctntaatttatgttatcttatacaatntattggaaatttattacgaagactcaagcttcgtaattatattttcgtcaaccttcgcccaagactcattatcctcaagggaataatgattcatggacgaaagggacgtaacattaacattttatgttgccttgtcttaattatagca

SEQ ID NO: 5681 - DNA, 394 bp, Zea mays
agcttcaaggtccacgtcatctcactttctattgtctcaatacatacaaataaacaaataatggatatgataacattacaccaaatacaagaacaaactacataagaatattctacgtgtcgctataagatcataggttcgagaaccaataaaatcggagtcatagttgaaaagatatgggtttccaaagttttatgtgattaaacaataaaagtatattctatgttcattaacataaatcatgtgagaacaatatttcagaaataactaattcaacttaatctaagtatagttttgatcgcgatatctttagtcagttataataatgataactaagatgataaaaaggtattctatggtttaagaaaatttaatataaaagtttgatttgttc

SEQ ID NO: 5682 - DNA, 452 bp, Zea mays
  unsure (1)..(452): unsure at all n locations
cgtctctaacaatgcattgaaaaagatcttcctcatttatatatgaatccataanaacaaaacgcttattcttcatatcaacaatgaacaaaaaccaatggtttgcatggcacactgaanaatacaactgagaaaacagattgaggtaaaataagaacaacgtagtgaatgtatggcacattaaggctgctgcttggaccaaaaaaaatgtacaacaaactaagcaaacaaaaaaccttgttagagcgatgcaacttcaaagcagaattagcccccagaaacgatttccttagatcttcaacttcatattggctattgtattccatcatcgaatgctgtagtaacaatagaaattaaaaaaaatgaataacactaaacaaaattacaaaataatgcataacaaaaccaaataaaaagttgaagaacaattacncccacttttggatataaaa

SEQ ID NO: 5683 - DNA, 442 bp, Zea mays
agcttctaaagggagaacacattttatgactaacttatgttcattctgagaaagacagggtttgtagtgcatgccaagcaggaaagcaagttggtgcccatcatccacacaagaacatcatgacgaccgacaggccgcttgagctactccacatggatctattcgacccgattgcttacataagcatcgtcgggagtaagtattgtcttgtaatagtggatgattattctcgcttcacttgggtattctcgttgcaggagaaatctcaaacccaagagaccttaaagggattcttgagacgggctcaaaatgagttcgacttaaggatcaagaaaattagaagcgacaacggaacggagttcaagaactctcatattgaaagcttccttgaggaggagggcatcaagcatgagttctcttctctctacacccctcaacaaaa

SEQ ID NO: 5684 - DNA, 442 bp, Zea mays
  unsure (1)..(442): unsure at all n locations
tacacccaatctcctactgtttacatgcgttcagagcgtgacctgtcagcttgcctcttcatgcgtaacttggcgtgttccaaatgctgcctgaccagctcagacatcaattatctgctgttcagccaagacgtccagtacgaggaactaacaccgtgggccagaattccaagtgtggggtcacaactggtaagggcttcgaaaggtgaaaaccctgtggataaatggggagaagaattgtactataatngtgctactgacagccattggctccactgagatggacacgcatgaacagagcagcgtangaacatctctaggcactgggtgacgcgctctgtcttgccatcggattgcggtggtatgttgagccattcaagacgcacatctcgacctgcacaaatgacataagaagatttgtatgatcagagacatctactgg

SEQ ID NO: 5685 - DNA, 407 bp, Zea mays
  unsure (1)..(407): unsure at all n locations
agcttcttcgaaggcaagacggagttgnggatggttctgctatccggtctatggtggcagaagggttgggcggccgcggactcgctgcgcacgggcaaacggcgacgagctaactcctgcgaggagtggatggtgtgcggaatggtagtaccgaagcctgagagggctttataagctcgggcgcgggccacggcgcgggtttggctctggtgcggctcggggcatgcgatggcgcgcgcgagcgtgctctggcgcgggcagaaagcgttgaacacgtggcattgagtttcttccaatgttcaaacgctttcagagatcgcaaacgtgcgaatctcgncatgaatccggtgcagaccttctcctgtcacctagggctatctcacatgtgtgagttccaagggatgata

SEQ ID NO: 5686 - DNA, 380 bp, Zea mays
  unsure (1)..(380): unsure at all n locations
gaacaataccatatgtggtaatataatgggaattgtctattcatggagtttgttcaccactccttaagtgtnatcaagaaccgaacgtatggaattaatgaaagagatacatgcaagtctgtgtggatctcacattggatctaagcccttgttgggaaaagttttttaacaatgatcttattggtcgaaagcagcttcggatgcggcatacttagtccaaanatgcgaacgctgtcaaaaatgtgcaagagatcagaagcaacctttatgtctcactcaattaatacaacccacttggccatggcaaaggtggcgcctcgatttactatgcccacttccaccagcacacagaaatctataatatgttgtggtggtggtag

SEQ ID NO: 5687 - DNA, 355 bp, Zea mays
  unsure (1)..(355): unsure at all n locations
agcttacacgcggtaaacacaaagatatagcccttgttgtgtgtttgttaaacaccactctctatttgggatatgagactggagattctatataacacacataatgtgctcacacaggtggatccagtgatgagcacactaaaggaaatagcatacaccagcacaagacaggatacagtttaaaacccgcacgtgacaaaggagaggacacaaccaaaggaaaagtttgtcactacaatgcttatatgagatgtgaaagaagatattntaaaggctggtatactatacacatttctgtagaatatacatgtgataacgataaacgtgataatgatgaaaagtgtcatccatggac

SEQ ID NO: 5688 - DNA, 393 bp, Zea mays
caactgtgagcccggacgggactacgaatcggcaaacaatgtgttgccagaagaacttctgggcagtcttcgacattattgtggatactggcctggcctcgatccacttggtgaagtattctacggcgacgaatgtgaacttgacgtttctcgagccgtaagttgtgtgccgactatatccataccccactgttgaagtagccatgtgctgggcatcatcttggtgaactgcgaaaggttgccctagcggggagaatacttctatgaagctttacacgacctcgtgactcgatttgtggcgcatgatatagtgggccagaaaaattcttgacagatcaccttggcctctagggccctgtgcccttgatgggagcaccaagtactcctgtgact

SEQ ID NO: 5689 - DNA, 385 bp, Zea mays
  unsure (1)..(385): unsure at all n locations
gcaggagctaaaaactgagtaagcaagagcagatggctaaggaagcgtaccatatgatattgccgagtgctcttatttatacatctggcgcattgagaacaggagggccccgcttgacattgacttgtgttattctatcaagaggaaggtgttntttcggaccttctgcttaaggcctttctccatatctcaatctgaatctattatcctaacaaattaatattgcgaggggctactgttgggggccttctgctttctaaggtcctcaaaaacgtaatttgacaatgtttctggagataatacatgatcaggacctttggaacgaacccntggacaagtaaaattgtgttgaagaaattcaagagacaaatgtggacatagccaa

SEQ ID NO: 5690 - DNA, 275 bp, Zea mays
tatgatcctgcccacattgcttctacataataaatattaaagatgcattatgttctgtggtgcgacacggatgaagtgtgatatcctacttgagacaccagcgatggagtcatcccaggagaggaatatcatctagatttaagataccccaactccccaaaagagaggacgcacttgtcttccagtgttgtttctcactgttaccacttctttttcatgcgctggttgagcagggcggccaccacaaagtcttgttggcctcagcggggatggca

SEQ ID NO: 5691 - DNA, 438 bp, Zea mays
agcttctaaagggagaacacattctgggactaactatatgtcattttgagagagacaggatttgtagcgcatgtcacgcaaggaagcaagttggtgttcatcatccacacaagaacatcatgacgatcgacaagccgcttgagctactccacatggatttattcggccttatagcttacataagcatcggcgggagtaagtattgtcttgtgattgtggatgattattctcacttcacttgggtgttctttttccaggaaaaatcacatacccaagagactttgaaaggattcttgagacgggctcaaaatgagttcggcttaaggatcaagaaaataagaagcgacaacgggaccgagttcaagaactcttcaaatgaaagcttccttgaagaggagggcatcaagcatgagttctcttctccctacaccccacaac

SEQ ID NO: 5692 - DNA, 374 bp, Zea mays
  unsure (1)..(374): unsure at all n locations
ctaagcctataactnccagnggtacttattgctaccttcagatgtctgatgggctcttatatacgctggaaggaagctcagccgaatgacagccaaagttcttcactctcaaatacgcaggaatgtgctgacttattgtgatgacatcatacttaaaagcacgaaacaagagaatcatattgctgacttgcaagagacgattgccaatttcacgcaagctggtcttaaattaaatctagaaaagtgtgtttttggaggaaacaagggccaagtccatggctgtttggtatcaacgaaaggaatcaaaactaacccaaataagatcgaagctatccttcgaatggagccaccaaattcaaagaatgtggctcaac

SEQ ID NO: 5693 - DNA, 383 bp, Zea mays
atagcaatatgtgccactgggggttatgaagctagtcttcggctcatcttccttcttcatccagatttggtgatagcctgagtaacaatctagtaaactcatgagctctgacaaagctgctgcatctactatagaatctattcttggcaatgggaactcattctttggacaagcctttgtaagatctgtaaaatcaatacacattcttcatgtaccgttggccttcttcaccataacagtgttggctaaccactctgggtacttcacctctctgatgacgccagcactaataagcctctttacttcgtttcgagcaccttcagctttgtcgtcagacattttccgaaacatttgctttcttggcttgaaagatggatccacat

SEQ ID NO: 5694 - DNA, 418 bp, Zea mays
  unsure (1)..(418): unsure at all n locations
ctaagcctcatcgatatcgtcgtagactgttgaaaccatctgtaagtcttctatgatattttctgagttctccgttgtgattaccacatcatctacataggcgtgcacacgcatgccccagtgatcggctaagcatgtttgaatggctctctggtaagtcgctctagcgttcttgaggccgaacagcatggaggtatagcataaagcaccgaacggagtgatgaacgcctgtttttcctcgtcttcttttgccaagctaatctgatgatatctggagtagcaatccacgaaagacagcacagaacatccagcggnggaatctaccacctgatctatcctaggaagcccgaaaggatcctttggacagtgtttgttgagatccgtatagtcgacgcacatgtgccaatccactttattc

SEQ ID NO: 5695 - DNA, 348 bp, Zea mays
  unsure (1)..(348): unsure at all n locations
agctncngntccatctatgatacggattgctntttagtctgtccaatttccttcggcccctgtggcagcttcctgactcccatgaatagcaatgggccctcgctccgaaagtatcttcatgcaaagataagctggatgaagaattgcttcgaaggcattgaaaggaccacgaccaatgactgcattgcaagggcataccatgtcaacaatatcaaacacaacactgtcacaccttgcgttgttgagaaatccaaagggcactggcatcgagataatgccgagtgctacaatatgccttcctccgaagccgcaaaggggatgtgtggcatcaagaatctcatcttccgg

SEQ ID NO: 5696 - DNA, 433 bp, Zea mays
agctttagtgatattcattttaagaagcaaacttcttatatccattcactgcaccactgacgttgaacacccaaagatgctgccaatcttttttcttaaacgcgcacgagagctgcacatcattaaattaagagaagaaatcagtccaaaatggaccaaagtacaatgccgaaataggctaaacacataacacaaaaccaccaacttctgctgcgcacaaaactgcagcctccataaatgcgcctggaaacagcagcacgcaataggagaacgaacagcaaatagtgccagcagaccacacacacctgctcttcactaatcacccaaaagaacccttgacctaaaaattccagcaccaggaaccaaagcctcaagatgcctagcaccggcaagccttcagaaatcaacttcatccataaaaaatgcctttatg

SEQ ID NO: 5697 - DNA, 420 bp, Zea mays
  unsure (1)..(420): unsure at all n locations
tatatcttaggacctgcttaactattaagtattttttgtcccatctatgatgggtccatcaggttagccaataaggacttatgcacccaaatagccttagtcctagaatgtggtgaactcatcacctttctagcacaagtctcatttttgggtctcctaagataatatgaatgaattgacatgataggcttangaaacttactcatgggacaatccttgcatangtgtccctttcttcggcaagtgtagcaaatctaattnttatttntgcaaggctccttcttaccttgcttcttgtttgctacatggtcagtgagcctctttctttctaaagttaagccactatcttttatgtagggacatgacttaatctcatgtcccttctcatgacattgataacactttctagtgcatcttctc

SEQ ID NO: 5698 - DNA, 212 bp, Zea mays
tttatatttttttttactcccggtggatctgaaatatatcgtgctttgattgaaaaaaatctcgcacagataggcagcatcctccagtaagccccaaacgtctgtcggctcctactgtgagcattcatatagaatgttctgtgcgagctcattcaacaaaatgcaagggttttccagcttcgaccatgtccctctcgtgcagtgtcctgatt

SEQ ID NO: 5699 - DNA, 435 bp, Zea mays
  unsure (1)..(435): unsure at all n locations
ctcaagcctgaccgttgatagcatagngaagcttctatatatgtctaggtgttatacgangagggtgaattggtcgctacgaatgacgcagctaatcaacttcttcagttgcctattattcctcggctttcaaggctgttcctcaacaaagaaatagctctgcatatgacgtggccaaagaatgtngtacgtctcgtcactgatccatacataatggtccatccgtcggacggcgatgcgtggaatgcatttgacgatgttgatcccgaatttgcaaacgaccctaggagtgttccgcttggtctatcgaccgacggattcacacctttcaataccagagcaagcccttactcgtgttggcctgtcttcattgtgccatataatcttcctcctgagttggtcaatatagaagagatcatgttgcttgcactaatc

SEQ ID NO: 5700 - DNA, 474 bp, Zea mays
  unsure (1)..(474): unsure at all n locations
gcttcggaattacaaaccgacttaaaagtagaatgtccttttagtccataagtgtttgagtccgtgttgtaaacttttatgaggggcatgattgtaattcctcacaggctgtgtcttgtgcctataaatagtgaacattattcctttactgttcacgcattcctgtaattgcaatcgcgtcactcgggaattaatctttgtcaaggcagaggtatagatgtatctaatattcgaatacattaagttgatataatatgaaagtgatgttgttcatttacaatttatttgtctttgatgcttcatatttcgtattattttatataatctattagagttcaattacgaagatttaaccttcgtaattgtatcgtctttaaccttcggtcgaagttcattaatccttaaagaaataatgcttcattggacgaagggcattaatatntaacattttatgttgcccttgtcttaattcat

SEQ ID NO: 5701 - DNA, 452 bp, Zea mays
  unsure (1)..(452): unsure at all n locations
gcttagcaagtgcgagttctggatcagcgaagttctgttcttatgtcatattatcaaccgagatggactagctgtggatccaaagaaagtagtagcaattttggactggaaagcaccaaaagatgtgcgaggaatcaagagttttatcggaatggccggttactatcggtgtgtcatcgagggtttctccaagaatgccagaccaatggtagacttgctggcaaagaatgttgagttcaagtggacccccgcgtgccaagaatcatttgagaagttgaagcagaagttgacaacagcaccgatattggttctgccagatgttcacaagtcgttctcagtatattgtgatgcttcgtacaccagaatgngatgtgtgttaatgcatgaagggaaagtagtggcatacttcgtccgccagctgaaggttcatgagaagaatatcccactcatga

SEQ ID NO: 5702 - DNA, 453 bp, Zea mays
  unsure (1)..(453): unsure at all n locations
agcnttggattctatgcttgcttttcatgggttgttattatctagattgcgtggacaagggtatgatggggcatcaaatgtgaggggaagaattcatggactgcaaagaagaatattagatgagaatccatatgctttttacatacattgcaactaggtgttgtttcaattgccaagcgttgttccttattgtttgattttttcagacatctactctaattgtgaacactgtcaatgcatcctgtaagcgaagggatcaattggcccaacaacaccatgaaaatttagtgaacatgttggatagaggtgaacttgtttctgggagagggaaaatcaagaaaccaaccttgtgcgacctgcggatactcgatggggttcacatcataagaccttatgttgtattcttcacatgtgggatgcagttctagaggtgttagagattgtatctgatga

SEQ ID NO: 5703 - DNA, 456 bp, Zea mays
  unsure (1)..(456): unsure at all n locations
agcttgaatcactnttataccccctgagataccagaatccctaattggaaccctgganaaccctaacactaaaccctaggggcttatgtgcaaaaatgatgaacctttggactaaagtgtaaaactactatgttttgacatataaagtcatttggttcacaaatatgtgaatttacaagccaaaccctgagttttggacttaaatgcaaaatggacctcatttgagttntgctctaagtctgaaaatcagtgaatgggctcaactttggggctttgtaacttacaaagcatagggtttttgccctaggtcaccacatcaaagttgaagaccaattataggagaacaactntgcttaaggttgtaagcttagttgttaagaagaaattggagaanaccaagcctaaagttgggctgtcaggctggtatgtcttgaatttcagactagcagtggactg

SEQ ID NO: 5704 - DNA, 443 bp, Zea mays
agcttgcagcatcctcaacggcgacagagcgcatgtgcctattgtcagtcttgttgccaatgagcattacgactatgttcgagtcagcatggtcccggagctccttcaaccacctcttcacattctcaaatgtcattactttagtgacatcgtagactagcaacgccccgacagctcctcgatagtaagcacttgtaattgctcggtacctctcctgcccagcagtgtcccagatttgagcttttataatcttgttctccacctgagtcagaggaaatcaaattttgtaacttgtttcttcagtggcagcaggaacagaagtattgctgtgctaataaggaaaatttattcataagtaaatgcaatgtgcatcacatataagtgaaataatgatcaatttatctgaataatagaattaactaggaactttcttcagagcattt

SEQ ID NO: 5705 - DNA, 404 bp, Zea mays
taccctactgatgcacctctgtgttttattatataagcctcatccctactcttgtgttccatcttgcatcaacccatctggacaggggctcgcgggacaaaattcactagtagggttgggtgagggtaccccggatccgatacgccgacagttggcgtgccacgtaagggtcgctgcgtgtatacaatactttcccgttgagttgcagatggacaatgttgagtatactcttgagcccaggacagtgctacgctttgggagcctcgagttcgtgtcccccgatggcagctactacatggtactcctccctccgcaacacgacaacaactgtagtcatctgttcgcccaccagatgtgaactcggtacgacatcatcccgtggcggaagaacacttgggtcaacc

SEQ ID NO: 5706 - DNA, 427 bp, Zea mays
acccaagcaccgagcatcactgcagctgataggcactgatttttatgtgggctgctaaatacccagactgaccttggacagtactatgctgagagtgaagccaatgtgattgaattcttggcgtgttatttatttgaagtttaccaattcacaaattgccagagtgattgtggtcttcaatatgtatctaagaccgacttggaggtgatttagctgatgctagggaagaactggctaaattgtcagagtcattaaaggtaaaaacagagcataccttattgatgcttgtgcaagcattgaccaacttcagtatttatggttggtcctcttatccttattggattattggattcatgaatgtctaaacatatggtgtgcccacatactgtgtctatgatagtgcccagagacattcctaaagcatatc

SEQ ID NO: 5707 - DNA, 469 bp, Zea mays
  unsure (1)..(469): unsure at all n locations
agcttcttttctctgattcataacacattcacactttatgaaggatcaaatgtggcccaccctaatcagccacatcctacataggatttaagaaataaataaatatatagctggattcatacgccaatcatagattcaggtaaaattccaaaactgtagcagacccttgcaccgttgccattgactcaacagggatggacgtatccatgggcattgactcatgttcggatccataatgtattttgaaaactagattntcagtatctgctcggaaccaaacacggccatgatgctctcgccagagtcccgcggtatccttactgagttactgtanccggagagggatggataggcgccggccgatgctgagggcttcttgcgactnttcgatggcatcaacggctgcggataagacgcgtggagctggtatggactggtactgaatntcttggatctcatgataagacac

SEQ ID NO: 5708 - DNA, 476 bp, Zea mays
  unsure (1)..(476): unsure at all n locations
agcttatgaagattcttcatcccaacatgggcttntctgcggtgccagagccaacccatgttagtcttagcaattaagcaagtgtcgagttcagctctatcaaaatctaccaagtatagctgaccctctaacactcccttaaatgctattgaatcatcacttcttctaaagacagtgacacctacatctgtaaagagacagttgtagcccattttgcataattgagatacagaaagcaaattgtaatctaaagaatctacaagaaaaacattggaaatggaatggtcaggtgatatagcaattttacccaatcctttgaccaaaccttggtttccatccccaaatgtgatagcttgttggggatcttggtttttctcgtaggaggagaacattntcttctcccctgtcatgtggtttgtgcacccactgtcgatgatccaacttgagcccccggatgcataaacctaccaaacaag

SEQ ID NO: 5709 - DNA, 378 bp, Zea mays
ttgaagtaggagaatccagtaaatatgcttctttagcaatgaaagcaacaatccttgatgagagcgacattattataacaagttggattgatatgtattagcatacatcatgagaaacttattcttatgcaagagactatatgagattactaggataaagcgatagtctcgatatgatcaggatatagaaataggctccccctagagatatgcatcaaagaattgaaatgaaaggaatagatgcattcaactctatagacgaatagggagaagcaccattcatcttgatcaaggcttacaagagttgcaataaacattctatgcctagtattctcacaatgaaaaagaattagaatgcttacaaccacaccattgatt

SEQ ID NO: 5710 - DNA, 455 bp, Zea mays
  unsure (1)..(455): unsure at all n locations
agcttgtctaacaccagatgagatggtttggtctatgtccaattgagacgtcttgatgcacaagtgtgtattgggcaaagggaatgccaaagttggcatggtaagaagcagtatacggagactcgaaaggatataatatactctaagatttagccttatatatgagtgcatgaaaaacagatatattcatgtgcctgagccttgatctgtggntttgggtgggtttcgactgtaacctatccctaaaagactttgttgtgtgggtgggtggggtcatgtgtatctttccatcctcttcaagacataaatgacatacctctttattgatatgacctattgcctttcttatgaaaaaacgcatgaaagataaactctggaggatcagatccattgtatatcttctgagaactgtttattttggaatcctcgaaacagtctggagcctagacttaatc

SEQ ID NO: 5711 - DNA, 472 bp, Zea mays
  unsure (1)..(472): unsure at all n locations
agcttgtgaagggtcttcatcctcacatgtgctaagcggcgatgccacagccagcccatgctagtcttagctattaagcatgcatctagaccggcctcttcttttgcaaaatcaactaaataaagtgtgtcgtctaatacacccttaaaagctagtgaaccatcacttcttctaaagacagacacatctacatttgtaaatagacagttatatcccatattgcatagttgactcacagatagcaaattatatccaagagactcaactaaaaacacattagatatggagtgctcattagaaattgcaattntacctaaaccttntaccttgccttgattcccatcaccgaatataattgaatcttgggaatccttattcttgacgtaggaggtgaacatcttcttctcccccgtcatatggttggtgcatccgctatctataatccagctnggaacccccgatgcataaacct

SEQ ID NO: 5712 - DNA, 459 bp, Zea mays
agcttgagcaaaaactatgcgctcatgaatcaaaactataatgaatagaaagtgaaattgtgattgaagaaccaataatgttacatgataatatgaagtggatcattatcacccacagagattgaatgcttgtgtagcgtcaccattaacaagacatgaatggagtgcataagacaaaggtatgacttatagggtatttcatttcactcgtcaaaagttgtgtagaaaagagctttggtcgggtttaggatagatagccatactatcaagaggggttaatgcattttactcaatggatcacttatgcatcataacacatatagttgagactcttgcatgagggctgattgcgtgagaaaaagatttctttacaaagggttgaactatgtaccatgggctatctgtcttttgtagtgcaatcaatcccaattgagggtggtggtgattaaatgacaaaac

SEQ ID NO: 5713 - DNA, 469 bp, Zea mays
gcttggttttgtgcatggcaagcacgtacccaccattaatgcacaccgaggcagaggatgtcttctgctagtgctaggattgtcaacggatagtcccctcgtcgccttacagctcacagcatgtaccgactctgctttcctctcatacacacactgcacgccgtacttgcttgctccgatagatgcatggactaagataacacgttcacataagtttctttcactcacgttaaactcagatcaaacaactatataataccgactgcatttgtgtgtcgtggaaaacaaacaatggcggtgtacagcaagagcggggctcctctacttacgtgccatacagtccacgctctgtattgaatccgcaaacgctcacccgagacgtccctatacgacatgaagtcaaagagggatgaagatttggggttcagaaaaggctaaactacgtctagatactcctactcctaacgcg

SEQ ID NO: 5714 - DNA, 457 bp, Zea mays
  unsure (1)..(457): unsure at all n locations
tgtggatacggcatcaagaagatgactatcatgttgacaattgtcgacgatcttgtgtccatcgacactctaattgaggaccaccttacgcaagagcccatcaatgagtacgtccagaggtgcgacattgtggctttcaacaagatctagagttcagtttctgagtttgggcaacggcagcggctcagctcgtcaagtttgtgctgggatgccagtttatcccttctagtctattacagaaacgttgttcggagctgagtctattataaacatcttggtctgagtttattgttgagtggtgccagtttttttcaatatacatttatcttaaaaacagcggtactgatgtttttttgtctaaagttaatgagtttgcaatggctctgagtctaaagttcgagtcttcacatctataccagagtgttaaatgacgttgtgggttntcaaatctatactc

SEQ ID NO: 5715 - DNA, 449 bp, Zea mays
agcttgtggcgccctctggcgtcttgccgcagtctaatctttaagtctcccacttggaggtctcggggccgaacccctcgggcgtggtagcgtcgcagagactgctgatatcgcgccgagtgtagcaaggccacgtcccgagcctcttccagctggttcagtgagtcttctcggctagtctggttgccttggtcgtcgtatgcccttgtcctcggggaaccgtattctaagtctgtgggcaagacggcctcggccccatagactagaaagaacggtgagaaacccatggctcgccttggcgtcgtactcagactccagaccaccgagggtacttacttcatccaccgcctgccgaacttgttgaggtctgtgtagatcctcggcttaagtccctgcagaatcatgccgttggcacgctccacctggcctatttgcatggggtgagccac

SEQ ID NO: 5716 - DNA, 367 bp, Zea mays
  unsure (1)..(367): unsure at all n locations
aaactcttggaatctgattttgaaatgaccataattactaatgccttcatgaatggcaacccgtattgagggtagctgcacttcatagagaatgactgcttcactcccatatacaaaagagtatggactggcttgtgtnggtgtactcacagagactctatatgcccataaagcttcactaagacgagcatgccaatctcttcgattattggtgactggcttctttaatattttgccaagtgttttgttaaatgcttctgctagaccatatgctagaggataataaccttgtggtatagtgacgcgagcaattatatcttggcaacagatcttgtatctcgtcctatctgagagcctctccattatc

SEQ ID NO: 5717 - DNA, 389 bp, Zea mays
  unsure (1)..(389): unsure at all n locations
agctntaaaactaaagactcagggaatcttatctcgcataagctaanaatcgagcgagcgagagcaagtgacaagagagcgtaccaaatgagctcgcggtatgctcttatttatacgctcggtgcggtgaaaatggaaagaccccgcctgtcagtgaatgttgctattctagcaaagggaaggtgttttttcggaccttctgcttaaagccttcgtccatgtcgcaatctaaatttattattttaacaaaataatattgcgaggggctactgttgggggccttcggcttccgaaggtcctcaaaaacatgatttaacagtgtttctagagtataatgtgtgaacaggtatcttcggactcgtatcatagagggagaagctcataagata

SEQ ID NO: 5718 - DNA, 466 bp, Zea mays
agcttgcacccgcacataatggtggacctatgatttgaacctatgatagtcgaggaaaaaatatttaacatgtaataccgtgtatatataatttggtagcgtacatatataatttccatcaatttagcacatgagttgaaaataaacaaaatatctcataatgcattcaattcaataaattagattgcaattcattaaattaggttgtaagttgcatgcatttgtttctttagggcatgtttggtatggctgaagagcaaaactctaagcaggagctggccagagtctgttaaacatcctaactccagagttgcaaactccatagagttttcagagctgtagtacgaatttttgaagtacctcttttgctgctccaaaatctctaaaaacaacctagatgtggtgttcgaagttatttacccatcactgtcacaggttatgagaaagaaatttaaactctagaaca

SEQ ID NO: 5719 - DNA, 420 bp, Zea mays
  unsure (1)..(420): unsure at all n locations
agcttctgacttgtgggcccgcctgagtgtcctgtgcacaccggacatgtactgtttgatgtccggtgcaccggtatgggcgtgcctgacgtctgcgcgcgctgcgcgcgcaataaatgcaccgcagggagccgttggcgctgcanggagccgttgctccgctggcacaccggacagtccggtgcacaccggacagtccggtgaattttagcggagcggctgccgcgcaaacccgaggctggcgagttcctgaggccgacctcccttggcgcaccggacactgtccggtgtacaccggacagtccggtgaattatagccgagtcgccttggaaattcccgaaggtggcgagtttgagtctgagtcccctggtgcaccggacaggtactgtttactgtccggtggcacaccggacagtccg

SEQ ID NO: 5720 - DNA, 437 bp, Zea mays
  unsure (1)..(437): unsure at all n locations
agcttgcaatctcgtagcaacgtgtagaatattcttatgatggttgctcaaggttggtgtagtgttatttttatgtactccttgtctatttgtatgaattgctacgagtagagcgaggtcacgagaaacccggagactaacttggtgaagtacccggcaagttctgcccttgatcactcttatttatctaataatgttcatgttaatcactgtgacatgcttangttaatttgatgggacctaataggtttccctactattgtttatcccacaccttgcaaacaaatgaactatcgggtagatttgctattgctctaactggttttgggaattaatgttatatatgatcatgttccattaatactgttggtttaattattgttcataataagattattggattaattggaacatgaagaaccacacggganaatagt

SEQ ID NO: 5721 - DNA, 492 bp, Zea mays
  unsure (1)..(492): unsure at all n locations
ctctaagtcacctgccgcatgcnaacttgtgaaagttcttcatccctatatgtgctaagcggcgatgccacagccagcccatgctagtcttagctattaagcatgcatctataccggcctcttcttttgcaaaatcaactaaataaagtttggcgtctaatacacccttaaaagctagtgaaccatcacttcttctaaagacagacacatctacatttgtaaatagacagttataccccatgttgcataattgactaatagatagcaaattatatccaagagactctactaaaaacacatttgaaatggagtgctcattagaaattgcaattttgcctaacccttttaccttgccttgattcccatcaccgaatataattgaatcttgggaatccttattcttgacgtaagaggtgaacatcttctctctccccgtcatatggattgtgcatccgctgtctataatccagcttgaacccccggatgcataaa

SEQ ID NO: 5722 - DNA, 439 bp, Zea mays
  unsure (1)..(439): unsure at all n locations
agctngaaccgctgtcaaaggatactttgactcccactcggtagtaaccaagatacggtcaagagtctcaaaggtgggtacgcttctagagttagcccaagtgaatttccgatttgataatcccaattcccggagatccaagctatcaatgactgcattaaaaaggaaaggccatctatcattgtagttatccttatttttttcatgttggttcctaatgatattaaaatcaccaccaacaataagcggcaggttttctttggcacaagtttgcaccagttcagccagaaaagattccttgaattcatcttgtgcagccccatagaccgccaccagaacccaactaaagccatcatccttgtttcgtagatggaacttcacatagaagtcacccacatcaatactaccgatgtcaaaaacttccagatttacaccaagt

SEQ ID NO: 5723 - DNA, 477 bp, Zea mays
  unsure (1)..(477): unsure at all n locations
agcttcaagttctccacaagaagtaactaacccatagataggggaataaaacttctcctacaaaaacacacagggataaaaccctgagtacgcaattactcagcaagacttaccggactaaagaaaagactctcaagggtatgctggcttttgggaatcaaggtaaagctcatcaaagttcaaggactcattntgcagaaaagcttactagaagtgggtccttaagccaagttttatttcacaagttagtttattacctgaatcttctagcctgaatctagcattttcctaatctagttcattcacttgacctacactaggttgcttttaaaatccaaattttgtttcgcttgttatctacgatgaagggcagcgatccagtcttcatatccgagaagtaacggcgatccgaatcgattaatacccagctggggatctccaaccacacgacatatgtagcacttaacccttgcatat

SEQ ID NO: 5724 - DNA, 426 bp, Zea mays
  unsure (1)..(426): unsure at all n locations
agcttcttgcggaagagaagatgagtatatcgcgccgctcggcacaggcgtactgtttaccagtagacccagcaggcgcgctgcctactggatgaccttgacaccgcctgctatcggatgggacgggacgcattaaatgctgagggggcacgtctcctgtcagcgcagtggcaggtggcgcgtcttttcctcaataaatgcaggggctgcacgactttctcgtcaggtttggcccggtagcttatgtcatgggccacaagcagcgggtctccgcctgtgcgggaagtggagagcaaggcccgcacacgtgtcagtaccggacccctgcacacaccaaggtccttctcgttccggaaccctgccggggttcggacctacccggnggctccgaacctatatgtatataggggcccggtgaccttctgt

SEQ ID NO: 5725 - DNA, 466 bp, Zea mays
  unsure (1)..(466): unsure at all n locations
agcttgtgaaggttcttcatccncacatgtgctaagcggtgatgccacagccagcccatgctagtcttagctattaagcatgcatctagaccggcctcttcttttgcaaaatcaactaaataaagtttgccgtctaatacacccttaaaagctagtgaaccatcacttcttctaaagacagacacatctacatttgtaaatagacagttatatcccatatgacataattgactaatagatagcaaattatatccaagactctctactaaaaatacattagagatagaatgctcattggagattgcaattntacctagcccttttaccttgccttgattcccatcaccgaatataattgaatcttgggaacccttattcttgacgtaggaggtgaacatcttcttctcccccgtcatatgggttgtgcatccgctgtcgataatccagcttgaacccccggatgcat

SEQ ID NO: 5726 - DNA, 455 bp, Zea mays
  unsure (1)..(455): unsure at all n locations
agctttggtgaagaggcaagttcttaagtctgcatcttctgaagtgaaatccactaagtagaggttgttgtatctaaatcccttgaataccattgattcatcatccatctttgttacaataacctctgttggagtgaataagcattgaagtccaagatcacaaagttgacccactgataataaattgaagctcaaaggtgcaactaagagaacatttgatattgataaatcatttgaaattgccaccttgccaagtgcttgcacttttccttttgaattgtctccaaatgtgattntatcttgaccatcaacattctcatctagtgaggtgaacatccgagggttgcctgtcatatgttgtgtgcatccactgtcaataacccaatggctcccaccgatcttgtagttcacctacattcacagacaattcaagcttgagttttgagggccctata

SEQ ID NO: 5727 - DNA, 449 bp, Zea mays
  unsure (1)..(449): unsure at all n locations
agcttaccctgtcccataccagggtatgtggctagttgcaaagtctcaaccacaacaggccagtcaacggtacggtccttaatcgacacagacgggcgactctgtctgctcagcgtctggtctagatttattaaccatttccccatttttggcacccgacaggggtactcttttccaatgatgatcccactccggccgaagtggagtcatcaccttagtttgctntgattnttgaatcaaaaagcccataactaatgttccgcaatcattctttctgaaaacaaatgatttttcagtttctaagcagggttaagcattatcagttctttgtataaatcacggatcaaggtatagtatttaaattccaaggaatggtaatgcatcagttgttcatcacacaactcctatcacctaatgcatcatctaaggtgataaagcatttaaaacac

SEQ ID NO: 5728 - DNA, 482 bp, Zea mays
cctgcggcatgctagcttgtcccaaagacccatatccacttcctcttatatatcaaatcgtggattctaccttcgggtgcaacctgctgttcttcttatatgcttactctggtatccatcatatccagatgtctagggaagatatgaagcatatcgcttctgtaatattggatgggctttactactatgtcgtaatgccttacggtctgaaaaaacgccttgccgacatttgtgcaagcgatgagtaagacttttggagtaagactttccgggacctgatcatggacagagtagaagtatacgtcgatgacatcgtggtcaagactaagagagggtcaaccctagtggaagacttaaccctggtcttcgacaagctgcgggcaacacacacgaagctgaacctggacaagtgcgtctttggtgtctacgtacaaaagttgctggggtcctgcgttcgcaccgcggcattgaacgaaactcgg

SEQ ID NO: 5729 - DNA, 448 bp, Zea mays
agcttcttcttcatattgatgaaaaccaagccctttgatcacttcatcaaaacgaatggtccaactccgagatgcttgcttcaacccataaatggatttctgaagtttgcatatctttccagcattgatcggatcgacaaaaccctcgggctgtatcatatacacgtcctcatctagggttccattaaggaaagctgttttgacatccatctgccaaatctcataatcgaagtatgcggcaatagctagaatgatccgaatagatttaagcatcgctactggcgagaatgtctcgtcataatcaactccttgaacttgtcgaagaccctttgcaacaagtcgagccttatagatgtgaacattgtcatccatgtctttcttcttcttatagatccatttgcattctataggtctaacaccatcaggcgggtcaaccaagttccaaact

SEQ ID NO: 5730 - DNA, 451 bp, Zea mays
  unsure (1)..(451): unsure at all n locations
agctngaaccgagggcccgcgtcaccggagaagtcaaatcgcgctcaccggagttcaagaactcgccggcgcacgtggaccgggtaaaccccttcaccatttcccgattcgttgcgcgcatggcctctgtgtcatcccgtgaagctcctcgtgcccattaattgaactctcccgccgtggtttggccggagcaggcgccgccgtcgatccccgccgcctgtgttcgtggccaggggagctccgaccacctctgacgccgacccgcacatcgacgtgaccgtcgcgacctcctgaacatcaccgaccacctcgccggacctccctcgccgccggtaagccgcgccaccgttttctttcccgcggctactgtttcagttaagggagggactgcgggtgagagggagagaaatccagggggttaagtgaaaagtcagagactcaagtgaatagt

SEQ ID NO: 5731 - DNA, 475 bp, Zea mays
  unsure (1)..(475): unsure at all n locations
agcttctaaagggagagcacattntaggattaacaaatgttcattntgagaaagacagggattgtagcgcatgccaggcggngaagcaagttggagtccatcatccacacaagaacatcatgacgaccgacaggccgcttgagctactccacatggatctattcggcccgattgcttacataagcatcggcgggagtaagtattgtcttgtaatagtggatgattattctcgcttcacttgggtattctctttgcaggaaaaatctcaaacccaagagaccttaaagggattcttgagacgggctcaaaatgagttcggcttgaggatcaaganaattagaggcgacaacgggacggagttcaagaactctcaaattgaaggcttccttgtggaggagggcatcaagcatgagttctcttctccctacacacctcaacaaaatggtgtagtggagaggaagaatctgaactcttt

SEQ ID NO: 5732 - DNA, 458 bp, Zea mays
agcttaaagacatgctggtcaccatttttcatagatttcagacagagccaatcactggtcaggcttcgttccagtgcactcaataccacgaggagtacctttagacatatgtccgaaggttcttgcgtctgagagcacaagcgcccacggtgcccaatgaaatcggcattgaggccatgatcaaaggtcttccgccagggcctactgctcaatacttctgcaggaagcccccccacactctggagaagctgctgtaaaaatggatgagtacatccgggctgacaatgacttccgtcaaagaagggaggaagcttacagattttctgagatgactaggggcttcggaggaagaattcaccctatgcatgtcagatcaatccatatctccagttacaacgatgacctaggaggccaatttcataggccacagtacagcttacaatcttcatgacagcatc

SEQ ID NO: 5733 - DNA, 455 bp, Zea mays
  unsure (1)..(455): unsure at all n locations
agcttagccagaagcatcggaaatagattcatgatccagatctgggtaaatggcgggcggaaaatggcaggcgacgaagctcgaagccatcttaagccggtaaaaaacttatgtttgttacttttaccttctcctttgaaatttgcacctttcttactgtgctgcttgatatatgcaggatgacgaagctgaagattgacagtgctgaagtttgacaaaactaaagacgaagccttagctgaagcttagaattgtttataatgtgctttcctgcaaaaattcttggagaaacttttgtaatatagatatggagtaacttatgtaaatntgtacataccttggaatatattctgtcttctttaatcgcatccattctgctttgctgtggacgaaacttcttttttgagccgaaagcgaanaacaccttcccttcttttcgtacacaacgaagcata

SEQ ID NO: 5734 - DNA, 452 bp, Zea mays
  unsure (1)..(452): unsure at all n locations
agagaagctgatggtggggtaactttgttactatcccattatgtggaaaaggtattgagtcgctttggttttagtgactgcgatcctgctccaacaccttatgaccctagtgtgctattgagaaagaatcgaagaatagcaagggatcaattgacatactcccagatcattggctcgctcatgtaccttgcaagtgcaacaaggccagacatctcttatgctgtgagtaagctaagtcggtttgtgtcgaaaccaggagatgatcactggcgtgctcttgagagagtgttgcaatatttgaaaggtactatgacatacagtattcattatactagaaacccaaaagtgttggaaggctattgtgatgccaactggatntctgatgctgatgagctntatgccacaagcggatatgtgtttctgttnggaggtggcgctgtttcctggaagtc

SEQ ID NO: 5735 - DNA, 473 bp, Zea mays
ggatcttaagcgactgagctgcagcttggagactatcgcatgagcaggaatattattatagctaaggcaataacacaatagatgtctcaacatatgcacagaagccccttcgtccaagagaagcaagtttaggccagctttatctatgatagtgcatctcaactttcaagatatttgcatgtagccccttagcttgatgcatacagaccacctttgtgttggggataagacccccgagcttctgggacccatgagtcagaggaaggacaaagggagagtctgcccaagaaggacatgtccctgaataatgccgaggcatcgagctcgggatcgagcgaggcggagtcagaagggggtcaggcgaaccgagaggaggccactcgagtggattccacacccggcccgggactgacccatcataaatgactgactgcattaaatattactcgcaccaagccacggtagggaagtcg

SEQ ID NO: 5736 - DNA, 477 bp, Zea mays
agcttctaagggagaacacgtgataggtctaacttatgttactttcgaaaaagatagaccttgtgcagcttgtcaagcagggaaacaggtgggaagctctcatcatgccaaaaatgtgatgacaacatccagacccctggagctacttcatatggacctcttcggacccgttgcctatctgagcatatgaggaagtaagtatggtcttgttatagttgataaattttcccgcttcacttgggtattctttttgcaggataaatctgaaacccaagggaacctcaagcgcttcctaaggagagctcaaaacgagtttgagctcaaggtgaagaagataagaagcgacaatgggtccgagttcaagaaccttcaagtggaggagtatcttgaggaggaaggaatcaagcacgagttctccgctccctacacaccacagcaaaatggtgtggtagagaggaagaacaggacgcttataga

SEQ ID NO: 5737 - DNA, 471 bp, Zea mays
  unsure (1)..(471): unsure at all n locations
agcttacccatgacgaggcatgtgaccagttaatgggtcctcggtcagcaagcctacatcgacacggtccttaatagactcagacggagacactacaccgagactctcttctcatgcaagtcacccgcccggtctcagcttaatcatttgaaatcccaaagtttggtacctgacagaggtacatctttttcgatgctgaacccatcatggccatgatggactcaccatcaagttttattttcgaaaacatccctcccactttgccacatcatcttttgtaaaaacaaaacattttgttttgctagagcaagactaagcatagtaaaaactgttngtaaaacagggattcaaaggaaggtaatcaaattcaaggaaggtaatgcangaattgtntagcattcaactcctatcacctaatgcatcaagcaagtgagaaagatttaaaagaataaggaggtggcaatgcaccgg

SEQ ID NO: 5738 - DNA, 434 bp, Zea mays
acctgctgcatgcagctcttgacttttggaaaggtactatttttctgtcgatctcggcgtgagcttctgcgagtgaaccttacatcatttgaagcacgaagtctttcttttctagggcagcttcatgatctttaatcttgatctctaagccctcaattataacttcgtttttcttgtcctcgaggtcttgttgtatcctcaaggctttgcttagtagtaggctctgacataataacctccatcacaaaacatcttcatatcataacaataacaaagttaatggaagaatttaccttaagttagaataaacaggtaccgcgatatgctgcgtcgtatctgctagatctgttcgagcttcgaaaccaactcttttcagtaagtgctacaactttgcccaactcgggccgaaggatcctaaactctttcggcacacc

SEQ ID NO: 5739 - DNA, 466 bp, Zea mays
  unsure (1)..(466): unsure at all n locations
agcttgctagtcttacggagatatatntggaggatttctcttttgatgatcgcaagttaatcaaagatcagttactgacatttattgttcatgtgcgaagagttgatgaattcaaagcttgtcatgatcttgcaagcctagcaaaaacaatggttcaaattggcagggatactgtatttcctttggtctatcggctcattgagttagcattgttactcccagtagcaacgaccatggttgaaagggctttttctgccatgaaaattatcaaaactgagttgcgcaacaaaatggggtgattattggcttaacgatttaatggtgatctacattgagagagaattgttcaaagagcttgatcttcaaaatattaagaagacatttcaaaagaagaaggataggcaaatgcaattgcctaggtctccaagacatatataacanaatcagtggtatgacaatttcatgt

SEQ ID NO: 5740 - DNA, 459 bp, Zea mays
  unsure (1)..(459): unsure at all n locations
atccttaaagcacctgaggcatgcaagctntccacacaagcaatccctcgccactttttatttcagaacagaatacgccgagaaagaaacaaacggcagcatccatcccatgcctccctgcacaaggcacctcaagtttgagctcagcctgtcctatcctgacaggcaatttaaacgttaagtggcctgtttggaagaaaaaaaatcgtcccatgggttgctttgcttgatgctctcgtcaccttctcgatcaaattagttgtgcgtgcccgtctcaatgctggactggacaacacaattcttggctttatccctgcccctggccttgcaacttgcaaacaaccctgtgtgcaactgatctctatcatctttcttttaataaaaaacactttttgtcagtaatttgggaaatcctgatatattgattataggttgaaaatggcgtacatgtcgctatgc

SEQ ID NO: 5741 - DNA, 439 bp, Zea mays
  unsure (1)..(439): unsure at all n locations
agctnttgttcgtgaaagcttaagcccttgttctgtttctgtgattttagtacctaataaagatggatcttggaggatgtgtgttgattgtaaagctataaataatattaccgttcgctatcgccatcctattccatggctagatgatatgcttgatgaattaagtggttccacaattcttactaaaattgatttgagaagtggataccatcaaataagaatgaaaaccggagatgaatggaagactgcatttaaaacaaaatttgggttgtatgaatggttagtgatgccctttgggttgactaatgctcctagtacttttatgagattaatgaaccatgtcttaaggactttcattggaaaatttgttggtgtctacttcgatgatattctaatttacagcaagtcttttgatgaacatgtgaaacacattcgacaa

SEQ ID NO: 5742 - DNA, 414 bp, Zea mays
  unsure (1)..(414): unsure at all n locations
acttccagctctatgaagattctcatttcncacgggctatttattatgccagagccaacccatgtcagtcttatcaattaagcaagtgtcgagttcagctctatcaaaatctaccaagtatagctgaccctctaacacttctttaaatgctattgaatcatcacttcttctaaagacagtgacatctacataagtaaaaagacagatgtagcccatttgacacaattgagaaacacaaatcaaattgtaatctaaagaatctaccataaaaacattggaaatggaatggtcaggtgatatatcaattttacccaatcctttgaccataccttgatttccatccccgaatgtgatagcttgttgaggatcttcgtctttctcgtaagaagagaacatcttcttctctcctatcat

SEQ ID NO: 5743 - DNA, 439 bp, Zea mays
agcttttatatacttcctacatgcttttaatgtctttctttgagggggctgatgccaaagggggagaagtttatggaccaaatcaatgacaactatatcaaacaccaaacaccaccaatttaaaattttatatctccaaatgactttttcaagtgggtttggttatttggtcaaaaaataggaagtaagcgaattatggagttagggggaggcttaagtccataatatcacattgtggggacaatcatgcatcttagcaagtagattgcatattttcactcacatacttgtattatttgcttgctttggttgtgttgtcatcaatcaccaaaaagggggagattgtaaggaaaatggaccccgggcctttaggctaattgagttttggtgtttgatgaacaacacaatctgtgaactaataagttatctagtgtttgtg

SEQ ID NO: 5744 - DNA, 285 bp, Zea mays
actcgatgtacaacggaaggaggatcccactctaaaatatccttgaccctgctcggatcaaccgtaatcacctcgacagacacatacgtgacccaaaaaaaggatttcccccagcctaaacgcccacttgccgaaaatagcatatagctaaagctcccttaagcgcgttaatacaaatccgcagatgtccggcatgctcttcttcattcttgaaatatatcaagatatcatcaacgaagaccaccacaacattttccaaatcggacataaataccgagttcatca

SEQ ID NO: 5745 - DNA, 470 bp, Zea mays
  unsure (1)..(470): unsure at all n locations
agcttttcactcgctntggtggcggttatctcatctatgttagacaagccctagatgcaatacaagaaatttaaacatgcaatgcaagtttgacaacaccatttgacattttacataaaatttctgagatcaagaatatttagttcattcctcaacatgcaaaagcgagtcttatcaagtggcttagtgaaaatatccgctaattgatcttccgacctcactccttctaaaatgatatctcctttagcaacatgatctctaaggaagtgatggcggatatcaatgtgcttggtgcgagagtgttgtacacgattattagcaattntaacagcactctcattatcacacaacaaaggtaccttttctagaactacgccatagtctagaagagtttgtttcatatacaaaatttgtgtgcaacaagcacctgcggtaatgtattccgcttcggcagttgacaaggcaacact

SEQ ID NO: 5746 - DNA, 459 bp, Zea mays
  unsure (1)..(459): unsure at all n locations
agcttgaacccggctattccaacatgaaaagttttctcgcactgggagtggagagatggcgagagtggcacgtaccctcctggcaaaggaccgcctaaaaggggtggtgtgctctcgggtggcacggacctgttcatgtggtggaggatccgtgggaatggtagacatgtgcaaaagagttaagagaagcatatgtcgtgtggttggagatccccagctgggtattaatcgattcggatcgccgaacttctcggatatgaagactggatcttcgaccctcatcgtagataacaagcaaaacaaaggttggattntaaaagaaagctagtgtaggacaagtgaatgctctacattaggcaaatctagattcagaanaagtacttaacttatgatgtaaanatttggcttaaggacccacttctagtaagcttttctgcaaatgagtctttgattcttgat

SEQ ID NO: 5747 - DNA, 444 bp, Zea mays
  unsure (1)..(444): unsure at all n locations
actgcagcatgcaagcttaaccctttgacataaatactttatctatttttactatgatgcattaaagcatgaatgaatatttgagaagttaaactagatatgaatcaaggatatgcatggacatgctttctcttccttttatacaagatatgttaagaaagtatataaaaaggaagatttangtacaagtttgaatgaaaggaagtggttttacccttttgtaccttcacatagagacgctctcttcattgtgctgtgtccttagtcttagttgcttaagacttatactcaatgacaatatatgagaatactttgcacaagagagagttctacaactagtgatctttttcaagttattgttagcatatatcacatggatcacaagttgcataaatgaatcatgaatactccttcttccttagtgcatatcaagatagatgtcaa

SEQ ID NO: 5748 - DNA, 448 bp, Zea mays
  unsure (1)..(448): unsure at all n locations
agcnttgtataacttccctgcgcctgctgctatactatcaccagtatggtctctaatgacaaacccccatgctcctactttcagctctggtagaaaagctccatcacaattaattntgaggaaaccttcaggtggtggagtccatcgttcttgcatctgtacagcagctgtatttcttggtttcgtacctttcacaattttctcccatcctgtcatgctcattaccgagtgaactaattcatcagttgagttccttttgtcaccattgatcactntgtttcttacattccaccaagcccagagtaaataaataatcaccaaacgaactgtctctggtaatttaataatttcatggaccatgttctgagccgttgcttcttttaacagatttaatctgaaatcttctaaaccaagagtcctccaacattttttaacatctttgcatttt

SEQ ID NO: 5749 - DNA, 451 bp, Zea mays
  unsure (1)..(451): unsure at all n locations
agcttctagtggaggaataatatattnttattttcttattnctatccacaaaattcttattttattctcttttctaaattcaagaatttcttttagattctaaattccctttttggactttgatatttttcttgtcacataatttttatattgtcacaaaatgctcacaaaaataaaaacccagcatgatgcataacttagtggcgtatattttattaattatttgtttttaagtatgatgttcacatgtgatggtgcataaaggtcacactcacatataaataaagagaaattgtttctccattcatattttctattacaaattataaattgggtattacatgttagttcacacatagtgtgttgtgcatttaatcacgaanacaatatataaatggcccaagggcacatttcccttntagatggaaatgcaacaagctaaattcaattt

SEQ ID NO: 5750 - DNA, 458 bp, Zea mays
  unsure (1)..(458): unsure at all n locations
agcttcttggccttagcttccaccgccacttctattgttgcctacctattcccgaagccagcagccagaagggcgccagcactcccaacaacaacgtgaattcagggaggaatccgaagctcgtacagtcaatagtactgtaccagaatcgaagcacatatactgagcaatatcctgcttctgaaatacttttatgttctatgccattttgctttttgaataaggaacaagcaatgtaaatttagttntaatttcttgtaatgattttgcttctatcagaatgaaatatatcttcttcacagatttacgaagctcaaagatcgttcctaagggaatgcagagccgaagttgccgaagctacaaaaattcgttcctaagggagcgcaacgtaagtcttgtgctcaaaaagtcgttcctaagggaatgcagagccaaaattgccgaaactacaaaaagtc

SEQ ID NO: 5751 - DNA, 442 bp, Zea mays
  unsure (1)..(442): unsure at all n locations
agcttgccaatntntgtcaaagcaacaacatttaccatcatagcagctgcagaccatacctataacatggtcatttgcgtgttggggattggacatgattggacccttcacgaaagctcatggaggctatactcacgtgctggtcgccatcgataaattcaccaaatggatagaatacaaacccattgcttctctaacttcagctaaggcagtggaattcatacaagagataatattcagatttgggataccgattagcgtcataaccgacctgtgatccaacttcactagctctgaattctttgatttctgcgagcaacggagcatccagatcaaatatgcatcagtagcacacccaagagctaacggtcaggtggaaagggctaatggaatgatactggaagcactcacgaagatagtcttcgacaagaatgaatagttc

SEQ ID NO: 5752 - DNA, 423 bp, Zea mays
  unsure (1)..(423): unsure at all n locations
gaccttaagttacctgangcatgcaagcttgatatcgtccattgtgctaagtataacttgttttttgcttgtccaacacatttgtcaacagcccatttagcattacgtcgatgaaacgaacaccaactagtaggaacaagcatgtgaacacctttgtgaaggtagtacaagggactatgtctccgtacccttatgtgcacaaactaatgatggtgaagtattaggcatccactagcttgaatgtggattttcctctgaagccttcaacatttgtcatgtatacaagcacccctattgagatgtataagatgacgctgacaatagcccgccttgcaattgatggcgtatattgtgcagcagcagcagcttggctttggccaccaaacttatacacacagtgtgcttctttgcttgatgtgatat

SEQ ID NO: 5753 - DNA, 445 bp, Zea mays
  unsure (1)..(445): unsure at all n locations
agcttatcaaatttcaaagactcaatttttgcttaatagcttactagtagtggatcattatgccaaacttttacttcacaaattaagtacttttcctgaatctaaatttgtctgatctaaagcattcacttgtcctacactagcttcattttaaccactttagtttcacttgttatctacgctgagggtcgaaaatccagtcttcatatccgagaaagttggcgatccgaatcgattaatacccagctggggatctccaaccacacgacatatgtaacacttaacccttgcatatgtcaacttgccaccgggtttctcaagaccagaacgggttcatgcgactcgagagcacagtaccccaccatccagccacttgctaggtgggcacacgttactcccgccatctctcccctcccagtgcgtgcgagctgntctggtattggtc

SEQ ID NO: 5754 - DNA, 457 bp, Zea mays
  unsure (1)..(457): unsure at all n locations
agcttgctaccagcaagcgaggacagaatagaatcattaaaatggtcccttttagtttcttgtaaaccaacgaaatcaatttttcctccctaatgatttctctcaagaaatcaaatttagtgctccgacccaaaccctgacagttccaaataaggcctctcatgatttaaaacagatcaggagggaggtcagaacattcaggcacccattttctagtagatgaacatctactntttggggaagccttttttaatcatgttttccgatgcttaattttccttccttttcttaaaaccatcacatcaagtaaatcctgatcattattgagatctgaatcatcatggacactactatccacatctttgtgatcaacaagggaggggacctccacatttgaggtattatattttttacaagctcggaatgccaaaattttctggaacagtccagatctttg

SEQ ID NO: 5755 - DNA, 442 bp, Zea mays
agcttatagtcatggttagtagcatatgctagttttataccaattgactcatgcctagctacgggtgcatatgtttcaccaaagtccaaaccttcgacttgtgaatatcctttggccataggtcgggctttgttccttatcaccacaccatgctcgtcttgcttgttgcggaatacccatttggtacctacaacattttgattaagatgtggaactaaatgccatacctcattcctcatgaagttgttgagctcttcttgcatagccaacacccaatccgaatctcttagtgcatcctctaccttgtatggctcaatagaggagacaaaagagtaatattcacaaaaatgagcaactcgagatcgagtggttacccccttatgaatatcgccgaagatgtagattcacgtggtgatctctttgaatcgcttggtggactctt

SEQ ID NO: 5756 - DNA, 470 bp, Zea mays
agcttcacctcctgagcactgagaacagtggggacaacctgtggtggggtggtttgtaaagcaagggtgagtacacttcaacgtactcagcaaatgtctcgtttggctaaagtggactagctgtatgtggagttaaggttaagaagttgcttttagttggtcaagtttttttactataagtagagccaagttttagtaataacctaattattacccagaggcactccctccaagaggaaataccagagatcaggattataatcaccattgttaatcatcatcataaaagtaaccattgttcttctaatcgaagaggatcccaaggctgctcataactgtgagcatggctgatatactagtttctaacactctgcagaggttgcacactttacccacaagccgtgattccattctgcccgggttctagcctcccattgtcactaccaattgaccttcagggtctactatgt

SEQ ID NO: 5757 - DNA, 423 bp, Zea mays
  unsure (1)..(423): unsure at all n locations
ctcagntctatacgataaanatatatattatggagaagttagttatgcctcttgggtgtttgaacgatagttgctctcgagcatacgttgttggactggaactgtttcctgtgttgcggagcgctgattacctatacacagaatcatatcgctgccagtcgtacagattgcactcccccaatctgatctttaacaattcctaggttaatttcatctgtacttgtcagctaactaagctagactcttcgcctatggtcagtgtgatgtcgaacgacttcgccggagctctgctctacgtacacccgtgtcatcctcctctaacacccaagatatgttacacagttcttatctaataatggctatatatgtgttgagatccaaattgagcggaccgaccggcccttgggcccgacagtcgcgtgc

SEQ ID NO: 5758 - DNA, 433 bp, Zea mays
  unsure (1)..(433): unsure at all n locations
agcttatcagcagtataagcacaaaagacaaaatgctgtttctgcatatcaaccaaagcctatgctcttgtgtgaagacatagcggagcaaaaagtattgatgggaactcaactatttgatgaacaagaaaagactttgctaagatttttgtttaacaacaaagatgtttttgcttggacagccaatgatctttgtggtgtcaatagagacatcattgaacactcactcaatgtggacccatcttttagaccaagagagcagagacttcataaaatgtccgatgattaagctgaaggtgcacgaaatgaagtaaaaagacttctaagtgctggcgttattagacatgtaacatacctagagtggctggccaacactgtcatggtgaagaaagctaacggaanatggagaatgtgtattgattttacagatctc

SEQ ID NO: 5759 - DNA, 470 bp, Zea mays
atcctctaagtcacctgccgcatgcaagcttctgtggaggaaggttcggcaatcaacctatatagttgtactgcctcttttgtggcgaggacaagggccatacaacaaggacatgccatgaaattgttgaagccgaggcgaggcagagtcagccgaagcaagtcctccacactgctatgtgctactctccatacatcccacaatatgtaggcaatcaacaacctacgacttctgtctcttcggcaagtcattcccgagcttcttggcctcagctgccaccaccaccaccgctggttcacaatcagcagccagaagggcacaatcatactcagcaacagtgcaacctttgggaggagtctgaagctcacacagtcaatagcattgtgcctaaattgaatcacatctactaaagggactacagtggcttggccaaggaatatgttaatataatgtatcttaactctttctgg

SEQ ID NO: 5760 - DNA, 374 bp, Zea mays
caatatctaggtcattgctcagcatgcaaaagcgggtcttatcaataggcttaatgaaaatatccgctaattgatcttccgacctcactccttctaaaatgagatctcctttagcaacatgatcactaaggaagtgatgacagatatcaatgtgcctggcgagagagcgtcgcacccggttattaacaattttaacaacactctcattatcacacaacagagggactatttctagaactacgccatagtctagaagagttcgtgcatatatataaatgtgtgcaaaaacacctgcagaatgactccgtctggagtgacaagaacactatttgcttttggatgccatgaactaggatcaccaagcaaggcatccc

SEQ ID NO: 5761 - DNA, 419 bp, Zea mays
  unsure (1)..(419): unsure at all n locations
agcttctcanaaatnttctaaccncagtcaaatattgcaactaattntggccctattattaagcttttcgtcaaaactataattaaatcagagctctaaggttctctatagtacatagggggttttatatttttcttaagtaggttacattatttagagtctgacaaaattggtttgaccaaatttggatgatttaaacagaagttatgcattttcaaagnttctgtccaatttaaaaacagatttaataaaggttttctagaaaaacagtttacaccgaggtccctgngtttaaactaaatccaccttcgcaaatctacccccacgccactattcccctgtgtctctgacatttcacaaaacccnctgaccttctctccctctcacccgcagtcctttcccttatgccaacagtaacc

SEQ ID NO: 5762 - DNA, 337 bp, Zea mays
gcttgtgacacctctgtgaagctccccgagcaatgaatcggagttcccttcgccggagaagccagtccacgctcgccggagctctcacccccgccggagcacgtggaccgggtaagccactccaccatccttcgattccttgtgcacacagtcggtgcgtgaccccgtgatgctcaacgtgccctcggattgcgccagttcgcccgaatttggccggtatactcgccgccgacgaggacacctgcctgcacgcgtggaccgggcgattccggccacctccgacgccgagccgtacctcgacgtgaccgccagagttctcccaagccgaccccaccct

SEQ ID NO: 5763 - DNA, 419 bp, Zea mays
  unsure (1)..(419): unsure at all n locations
agctngtgaaggttcttcatccncacatgtgcttagctgcgatgccacagccagcccatgctagtcttagctattaagcatgcatctagaccggcctcttcttttgcaaaatctactaaataaagtttgccgtctaatacacccttaaaagctagtgaaccatcacttcttctaaagacagacacatctacatttgtaaatagacagttatatcccatattgcataattgactcacagatagcagattatatccaagagactcaactaaaaacacattagatatggagtgctcattagaaattgcaattttacctaaaccttttaccttgccttgattcccatcaccgaatataattgaatcttgcgaatctttattcttgacgtaagaggtgaacatcttcttctaccacgtcatatg

SEQ ID NO: 5764 - DNA, 390 bp, Zea mays
  unsure (1)..(390): unsure at all n locations
agcttgaagctgggttaagtgccatgtcgaaagatgatctcgcanacagcctcgcgtacaatagcctgaaggtaccggaattaaacacttgaattctttttacgcaaccccctatttttttacgcaacgcattccttttttcttatatgaattctttttgcatatagggcctggtcctaagcaacgcgttaagagcgcaaaagaacgccgaagatgaaagttatgaaattgcgtttaataatttacgctccgaagttatcaaactgagaaacgaagctttggaaaaagataaacatctacttacactggtagataaagtgaaaaaagacgaagctgcttcaaagcccangccgaagctcaaaaacgcgagattaaagatcttcataaaca

SEQ ID NO: 5765 - DNA, 449 bp, Zea mays
  unsure (1)..(449): unsure at all n locations
caagcttaaaacggtctgtcaggatgactgaactccattctccatggtacagnagctgaaatggatgagatcgccagcgcaactgacccaccgccgacgaccaactacacggcgaattgtgccgtcgccggtccatgttgtgctctgggtgggtaacacccggtgtacgctacgccgccgtggataagttccggccattaaaaattccggccaccatactacgtcaccgcagtggaagacgataagaacgccggtcatagccgtcgtccgaccctacgccacgtatccgggcacctctgtcgagtcatcgtgtttccccgctgttgtctcaccgatgccggtgagcccgccacggcggtggacacgaaaccgtggcgccagagttctttcccatctccggccgccagcacgaccttgcgaaattgaacaccaccgtcgatgggatctat

SEQ ID NO: 5766 - DNA, 439 bp, Zea mays
  unsure (1)..(439): unsure at all n locations
agcttataggccgaaattgaagaccttcagaaataactcgccgaagctaatgaaaatcttccacttgctaaagctagttaagaaattagtgaatggtcgaaagttaggctagagaaaaatgttgaggagcttcgcgaatccaaggaaaggtgcttcgagaagtccttgcattgcgtaagaaaattgaaaaaaagctttgccaaagtaggtgcttattcttccgaagagaattntattcgaggcgaccccgaaggtgttattaattggataagcggtgaatccgaagcttttgaagagatcctaagcgatcgcgaagatatttgtgctttcactggcactcgaggtatttcggcaattctagaaaggctgattgcgaccacgttaaagttgcggcccaaactgaagctcgcttctccacanacaacacgaaagacccttc

SEQ ID NO: 5767 - DNA, 410 bp, Zea mays
  unsure (1)..(410): unsure at all n locations
agcttttagcattgaagcttcngctttgaaaacatgtttttagtgtttccgaagatgtctgaagctgctaagaaggctgctgctgaaatgaagctgagtcttgatgaagagaagaacttatggtttcttatagcaatgtcgaagaccaacacagaaaagatcaccagggaaattctggaagggctgtctgaagatactggtgacagtgaaagttatgatgtggacagcggtggcgaagactccgaagatcgcccctggcgaccaagccattcagtttatggtaaatcaactatcaaagagaatcatcttgttaatatgagaggaaggtatttccgggatctgtccattgtgagggcggacgaaggggaaaagacttgtccacactctgaagaaaatgaagttgtggtgta

SEQ ID NO: 5768 - DNA, 464 bp, Zea mays
  unsure (1)..(464): unsure at all n locations
agcttgccaagccctcggacccggccggacttcaccggaggcccgagatcgacctcaccggacttcggtcttccgccgccgcgtgtggaccgagctatccagtgagtctccacccaattccttgcgctcatgtcttctctggcatcccttggacctccctgacccatctgattgaactctctcgccgtgatgaccaggccggtctcctcgccgccgacgagcatccccgcctgcgcgcgtgaaccgaccgactccggccatctccgacggcgtcccgcacatcgttgtgatccccgagacctccccttcgtcctcgaccacttcaccggagcaatctcgccgccggtaagcccctctgccctttcttccgccgcggntactggttaaggtagaagaacgacctcgggttaggatttgtagaacccgaggggttttctgtaacgtcagtgactcatgtgaatagt

SEQ ID NO: 5769 - DNA, 473 bp, Zea mays
  unsure (1)..(473): unsure at all n locations
agctngatcaatcgcttgagagggttgaaagagacatggttccttgggacacattaatggagatataggtttcatttggaaaccaaactctggtaaacaaatcatcatgtcattgatgttgttttgcttacgatgtgttttcccctctccatctctaagttctcttgcttgatcgtcattgaaatcattctgtgttacttacaatttaattcctcaatcataagagcaagattagcaagaagaactcctctcccttgctttgattgttttatctctcgntctaacgcctaactggtgattgaagttttgataataagtgatagaatttgggtttcgtctatttacccctctaggcaatnttcaaagcatacacataaacatttacaaaacatgagaatacaaataacttgtcatcagagtgaacacatgtaactaatagttcttatgttccattactagatatgtgcacgtgt

SEQ ID NO: 5770 - DNA, 404 bp, Zea mays
agcttccagtggaatgatatctggggtaaataacattgaaagggcagcacgccaaagcttgcaacaagggtgcctagggccatctttacaaagtacagcaaagccttactaagtcgatttacatcaggcatttatatgagaaaggaatccacaatgaccatattgtaactgcaaactgagctataaaggaactataaaggctatattcacaatttattatactttatcttgaaaccaattaattggttgagcagataaacaaatcgaaaatgcaacactacattctgaaggcctacctggcaccaattaaatccttccattacgagttgatgggcccttgaaatgagagaggaccatttgtatgggtgaactgctgtgcaatgtcttgcccaaatgtgtaacct

SEQ ID NO: 5771 - DNA, 459 bp, Zea mays
  unsure (1)..(459): unsure at all n locations
tttattgtacatgaaatctaacatatgtaatatattctcaaaaattaaatgatcttttatgtgtatattgcttgcttatgtgagctcttggagtttcttgagtgtaaaaagattcaaaatatgttcctttatcaaataggctctcccgagaatttaccagattttctagccattattctcattttcctagagctatttatatttattagaaggctctataatcttttttggactacgattatttatttggattcctcatatccaaacagtcctctgggatgtttgctacaatttacgggaccttgatactttctgtggtttaaatattctacacttttttataatactattagatcaatacaaataaatattttgaatacattctaatccttagngggaagcccacttttcccatgcccgagccgaccgactgaaggcataaaccgttgatccattttt

SEQ ID NO: 5772 - DNA, 479 bp, Zea mays
acctgctgcatgcaagcttgtgaagattcttcattccaacatgggctattctgcggtgccaaagccaacccaagttagtcttatcaactaagcaagtgtcgagttcagctctttcaaaatctaccaagtatagctgaccctctagcactcccttaagagctattgaatcgtcacttcttctaaagacagtaacacccgtatcagtcaaaagacagttgtagcccattttacataattgggatacggaaagcaaattggaatctaaagaatctacaagaaaaacattggaaatagtatggtcaggtgatatagcaattttacccaaacctttgaccaaaccttgatatccatccccgaatgtgatagctcgttggggatcttggtttttctcatatgaggagaacatctttttctcccctgtcatatggttggagcacccactgtcgagtatccaacttgaggccccgatgcataaccta

SEQ ID NO: 5773 - DNA, 419 bp, Zea mays
  unsure (1)..(419): unsure at all n locations
agcttgtgaaggttcttcatccctacatgtgctaagcggcgatgccacagccagcccatgctagtcttagcaattaaacatgcatctagaccggcctcttcttttgcaaaatcaactaagtaaagcttgccgtctaatacacctttaaaagctaatgaaccatcacttcttctaaaaacagacacatctatatttgtgaataaacagttataccccatattgcataattgactaacagatagtaaattatatcccagagactcaactaagaacacatttgaaatagagtgttcatttgagattgcaattttacctaacccttttaccttgccttggttcccatcaccgaatattattgaatcttgggaatccttggttttgacgtaggaggtgaacatcttcttctcccncgtcatatg

SEQ ID NO: 5774 - DNA, 471 bp, Zea mays
agcttaacaacagggttaatagcctcatgtgtgtcaatagataaaagctcatatgcaacaagaagattgtcatgatgaactctaattttagtgtaatattcttttatcttgacaaacctatcatttaactttttcgaagaaataggaggggctgaagacccctactagaaaagttttattaagaaaaaagaagaacaattacatgaacatattacaattaaaggagaaaggctctccaaagttctgcagaagcgaaatgcttcttgcctaataacctatgaagaaagagatcaaaaaagcctttaaaacatgaataatatgagtcaaccgaaggatccaaaccattgaaaatccaattatttctttgttttcaaattgctcgtgtcataagaatgataatatccattgcaaaagggattgaaagttttgctttgatgtcgacaatggcttgacgaatatcgatatggagag

SEQ ID NO: 5775 - DNA, 435 bp, Zea mays
agcttctaaagggagaacacgtgataggtttgactaacgtgaatttcgaaaaagatagaccttgtgcagcttgtcaagcaggtaaacaagtgggaggagcacatcacagcaagaatgtgatgaccacttcaagacccctggagctgctgcatatggacctcttcggacccgtcgcctatctgagcataggagggagtaagtatggtctagttattgtagatgatatttcccgcttcacttgggtgttctttttgcaggataagtctgaaacccaagggaccctcaagcgctttctcaggagagctcaaaatgagtttgagctcaaggtgaagaagataaggagcgacaacgggtccgagttcaagaaccttcaagtggaggagttccttgaagaggaagggatcaagcacgagttctccgtccctacacaccaca

SEQ ID NO: 5776 - DNA, 468 bp, Zea mays
agcttgtgaaggttcttcatccctacatgtgctaagcggcgaagccacagccagcccatgctagtcttaactattaagcatgcatctagaccgacctcttcttttgcaaaatcaactaaataaagtttgccgtctaatacacccttaaaagctagtgaaccatcacttcttctaaagacagacacatctacatttgtaaatagacaggtatatcccatattgcataattgactaaccgatagcaaattatatccaagagactctactaaaaacacattagagatagagtgttcattagaaattgcaattttacctaaccctcttaccttgccttgattcccatcaccgaatatgattgaatcttgggaatccttattcttgacgtaggaggtgaacatcttcttctcccccgtcatatgggttgtgcatccgctgtcgataatccagcttggaaccccggatgcataa

SEQ ID NO: 5777 - DNA, 462 bp, Zea mays
  unsure (1)..(462): unsure at all n locations
agctngttagcaatatgagggcataatacgacccttggtttgcggagtatttgctgcacgtaggtggtggaactgaggtcacaaatagtgatggcgacatccgtcttcctgacgaggtatgcgtgccttatagtgggagtgacaatgatcttgacaatctaatagacttcgttttcccagatctcaacgaaaaaatgtcagattccacctacattacttcaagggcgatactgtcaacgcggaatgactgggtggatatgataaatgctaagatgatcaatcgttttcaaggggagcatatggtgtaccatagtttcgatagcgccatggatgatccccataactactacccacctgagttcctaaacacactgacgcctaatgggctgcccccgcatgtttngaagctcaagattggatgccatgttatattgcttcggaatatagaccctgcgaatggac

SEQ ID NO: 5778 - DNA, 445 bp, Zea mays
agcttcacgggtcactggcggagctagccgaagtactggctcgacttgggggtggctggagtgggctggccacagtggccgatgctctggcggcagtggcgggcggaaaagagctcgccggagctaacgaggggtggctggccggtgatggtgagcgcggggtgaagtgaggcgcgccccgagaggctatataggtgcgggtgagcacgaccgagggcaagggcgcgcggcagacttgaccgaacgtctgggcgagcgcgcgcggcggttgggtgagcgccggcgtgccgaccaaggtcgaacacgtgtgcccgtgcgttctgcccaagatctggcgcgtgtggtcgcccatccgagcctgctctcgccttggtgagtgcacaaaacctcttcttctccctacaagctaccgatcttgtgtgagggtcataggatattgcctact

SEQ ID NO: 5779 - DNA, 468 bp, Zea mays
  unsure (1)..(468): unsure at all n locations
agcttctaagggagaacatgtgataggtctaaccaatgttcatttcgaaaaagatagaccttgtgcagcttgtcaagcagggaaacaggtgggaggagcgcatcacagcaagaatgtgatgaccacttcaagacccctggagctgctgcatatggacctcttcggacccgtcgcctatctgagcataggaggaagtaagtatggtttnagtattgttgatgactnttcccgcttcacttgggtgttctttttgcaggataagtctgaaacccaagggaccctcaagcgcttcctcaggagggctcaaaatgagtttgagctcgaagtgaaaaagataaggagcgacaacgggtccgagttcaagaaccttcaagtggaggagttccttgaagaagaagggatcaagcacgagttctccgctccctacacaccacagcanaatggtgtggtagagagaaagaacaggac

SEQ ID NO: 5780 - DNA, 475 bp, Zea mays
  unsure (1)..(475): unsure at all n locations
ngcttctaaagggagaacacgtgataggtctgactaatgtgcaattcgaanaagatagaccttgtgcagctcgtcaagcaggtaaacaagtgggaggagcgcatcacagcaagaatgtgatgaccacctcgagacccctagagctgctgcatatggacctcttcggacccgtcgcctatctgagcataggagggagtaagtatggtctagttattgttgatgattnttcccgcttcacttgggtgttctttttgcaggataagtctgaaacccaagggaccctcaagcgcttcctcaggagagctcaaaatgagtttgagctcaaggtgaagaagataaggagcgacaacgggtccgagttcaagaaccttcaagtggaggagttccttgaagaggaagggatcaagcacgagttctccgctccctacacaccacagcataatggtgtggtagagaggaagaacaggacactcat

SEQ ID NO: 5781 - DNA, 455 bp, Zea mays
  unsure (1)..(455): unsure at all n locations
agcttgttattgtgtccatgggactccatactactacttgcttgcattggacctgaactacaaatgtatatatatgagcaagctacaggttgtactatgctgctaggtggtgcgccacatccgaatacactcgcattagtttgttagtgagcttcacgggtacactctgtgtatcagcatcttcaacagtaaactgaaagtgctcattccagatacgattcacatcgatgttctataaagtactatagggaacacgacacccaggtatctgctacaaaagataatgtattgccaaacctcaagagtgtttgaaattacaagtacaacanaaatttcgccactaatgatcttcagtctgaaatctagcttcttctgacatagcgcatgatttgagataaataaatgagataactaagctcaggagtctataatgcaactctagaatctatatgata

SEQ ID NO: 5782 - DNA, 440 bp, Zea mays
agcttgtactcatttgaatgctgatttagcatatctcttgcatatgctgcattgctacttgcaatggtagcgcaatatgcagcaaaccagtgagatatttatttgctgcatgatgctccaatgttaccaacatgctacttctaacagtagcactatatgcttttctcatgtgcaaatcttattggctaggtagcatgtaattctgctgatgtacatcaaagttcttgttttacatactgcatgtactttataacctcgtgcagttgtctgttttctttatcatagagtgatgtcctcacacagttgcaaaatgtcctgctgaaaattgcaactacccaaattatggatttggtactactactactctattatctttctaaaagcgctcctctctatccttaatactcgctggctatgctattgtgctgcttatattgtct

SEQ ID NO: 5783 - DNA, 429 bp, Zea mays
  unsure (1)..(429): unsure at all n locations
agctngagtnttcgccaccggaaccatttcttctttcttcgcaacgaacatgcccaatccactactttatgtccaaaactcatgtttggggtggtttcgcgcaatttcgttgccgcacgttacccattcagaaaacgggtgtcggggtgcatacaagcacgagtttttttcaccggaaccatttcttcgtttttcgcaacgaacatgcccaatccactactctatgttcaaaactcatgtttggggtggtttcgcgcaatttcgttgccgcacgtcacccattccgaaaacgggtgttggggtgcatacaaagcacgagtttttgccactggaaccatttcttcgtttgtgtcacgaacatgccaatccactctttagtcccaaactcatgtttgggggctttcgcgcatttcattgccgacgtaccca

SEQ ID NO: 5784 - DNA, 471 bp, Zea mays
  unsure (1)..(471): unsure at all n locations
agcttccagtgtctgcacctgngcgtgcatcgctttctattgccaccccgaatctaaacattgggatggacatttggaatgcttctcctgccttggctgtgcctgcagtgcagggggaagtgagtcctgagttggcacttgcccgacgtgatggcgttactcaactggtagggatggcctttgctgaatcttagcctcatcttgaaattaattcattatgtgcataattgctatatgatgtctgttgattcatgagtttttatcttatgcaaagttacagaccataattgtgccttattcagacctatttcttttatcaaagttccttatttcttcaggacgaacgtganataaagagggagaggcgaaaacaatctaacagggagtctgcaaggagatctagattacgcanacaggtagactggaatcagtgcatcctcatttcctgcagaacgacatggagagaaatat

SEQ ID NO: 5785 - DNA, 465 bp, Zea mays
  unsure (1)..(465): unsure at all n locations
agctttacaatttcaaccctttcatctggattacttctatactcnttgncttgttgtagccttgattcattccatggattgaaccttagaaactagagcctgagcatatgcttctgtatatggattatggaagcaaagttttggttgattcagcgaaggggtagcacgatatgtgtgccgggatgattgaacggttgcatttcaccgaaacaaattcgtaaacctttgctccatgagatacctattgtttgttgtctgttagctgctctagtgtcacctgttagtatgatgaatatttgctggtttactgggcctggcctgggtgctgcacaaagtcacctcctcgagaaaatcagggtaggtggttctatttttctgttgtggcatgatgtggaagaaaacctctggtcccggacgtgaggctgcgctgaaacctctcgcctgccctgttggcatgcgggcatt

SEQ ID NO: 5786 - DNA, 461 bp, Zea mays
  unsure (1)..(461): unsure at all n locations
agctttatatggacgtcggtgtcgaactctattatattggtttgaacctggagaaagatgcttctttaggcctgatatggtgaaagaggccgaggataaggttcanaaaattatttataatatgaaaaaggcacaagctcgtcagaagagttatgcatacacacggcgaaggcccttatatttcctggaaggagactatgnttacttgaaggtctcaccaatgaaaggcgtatcgcgttttggggttaaagggaaacttgcacccaggtacattggtccattcccggtgcttgagcaatgtggaccagtggcataccgactttagctccccgaaacattgtctgttgtgcatgatgtgttccacgtgtcacaattgaagaagtgtcttcgagttcccaatcgaacccgntgagtgactgatgttgtcctcgaaccagatntaacctactcggacatcctat

SEQ ID NO: 5787 - DNA, 415 bp, Zea mays
gggaacacattttggaccaacctatttttttttgagaaagacacagattatagcgcatgacaagcatgggagtatgttggaattcatcaaccacaccaaaacatcatgacgaccgaaaggccactcgagctactccacatggatctattcgaccagattgcttacatacacatcggcgagaagaagtattggcatggaatagtggatgataattctcgcttcactagcgtattatttctgtacgaaaaatcacacaaccaagagatgttaaagatattcttgagacgaggtcaaaatgagctcggattgagaatcaacaagattagaagcgacaatagaacggaggtcaagaactatcaaatcgaacgatttcttacggaggagggcatcaagcaagaagtatcctcttcccaca

SEQ ID NO: 5788 - DNA, 416 bp, Zea mays
  unsure (1)..(416): unsure at all n locations
agcttgagaagattctttattccaacatgtgctagtcttttatgcctgagccagcccatgttagtcttagcaattaagcaagtgtcgagttcagctctatcaaaatctactaagtatagctgaccctgtaacactcccttaaatgctattgaatcatcacttcttctaaaggcagcaacacctatattcgtgaaaagacatgtgtaacccattttacataattgcgaaactgacagcaaattataatctaaagaatctacaagacaaacattggaaatagaatggtcaggtgatatagcaattttacccaatccttntaccaaaccttgattcccatccccgaatgtaatagcccgtggggatcttggttntctcgcggaggagacatctcttctcccctgctatggttgtgaccc

SEQ ID NO: 5789 - DNA, 445 bp, Zea mays
  unsure (1)..(445): unsure at all n locations
agacttgatcgtggttcaaatgaatcatgaaatacatgtaactaaattttctgtagcgcgttacggacgaaaggaacacccaatcgtgtgatcctgtgaccatcgtacttccagcacatgcgctactctgtattctgcagcanggcaatcaaactgcaactgcaaatagtaactcatgaatgttcatagctcgcttggcaacaaggccacatgtggaatgaagccaggaacagtggaatacaatccaagatcccatgtgctaaacttcaacaaggtgctaaaaattagttctttcaaatagagagctaaagtttgaatacaattactaatgtttagcacatacatacacaaagacatttatgccctgtttgtgaacaccagttttctcaactgcatgtttcaaatactnanatatactntagtcatgacattactacatgttaca

SEQ ID NO: 5790 - DNA, 196 bp, Zea mays
  unsure (1)..(196): unsure at all n locations
acaccatgctcgtntggttgtacggaagacccattgggttcctacaacattttgattatgacgtggaactaaatgccatacctcattcctagtgaagttgttgagctcctcttgcattagcaccacccaatccgaatcttgtagtgctttctctaccctgtgtgctcaatagaggaaacagaagagtaatgttcac

SEQ ID NO: 5791 - DNA, 438 bp, Zea mays
agcttgccacctcgaacctcaggaattcagttctgtagttttccggagttccaaaggtgacacgcatgtggatgtgtccaagcgggtattctcctttggtcggcacaatgccaaagaaaggagtgtctgactcgtggagctctttgagtgcaactcccaagcctaagactgtccaggggaaggtgacgttgatgcttggttcctctgtcaccaacaccttcttcaccctgctctctcggatcaccggatcgacgaggagtgggtacttgcccggatgatcgaaagtgggccattgatccacccgggtaaaggtgatcgggtgttccgaccaccgatagggtgcgggggcactggtggtcgccaccaatatctgtcgatcattgagcttctgctgcctttgttctcttgtgacccgcgtccgccgaagatgacgttgac

SEQ ID NO: 5792 - DNA, 394 bp, Zea mays
  unsure (1)..(394): unsure at all n locations
ctcttaactactttttagcgtgttttttcaagtcatgttgcagaataatctcttttgagcaagataacctatcattcgtctgacctttacttggcattgatagtctgtgtagtgttatgtagcttcatgcgaggtagatttctctctctagcatgttgtatagcattaatgtatattagaaanaagaactgcttacagttgagtggagataaaaggaaaatgtagtcacagtaaagtctgtgaactaactagacctcttgaacaagaagttccttcagctgtgcattttcagacttatactcttggaggcgagatgaaagcccagcacanacctattctttagttgaaaacaatggacaaagaacatattggtatgttataacaaatgaacaag

SEQ ID NO: 5793 - DNA, 430 bp, Zea mays
agcttgtgcaaagaccacttgaattaatcttcggagaatatcgtcctcgttgcaacatgacaccagaaggtccaacccaacaagcgttggatgaattcataattattgcagagcatatcagtacaagagacctgggtcaggagtttttggctttcaaggttttcctattttaaaagaatgggaaatgccgaagctaagggggagaagaaaaaaggtgaacttgtgcatttaccttactatttcaagtttaagaaatactttaaaacaccttgccaagagtggctggatacaattgaagtaatgtgcaatgaaatacttggcaattactccaaaaaagaagatcagttgatgactgcgaccttctgcacccgtccgaaacgaagactaaatcgagtgctggacgccttgtgttttgaatacctgactatga

SEQ ID NO: 5794 - DNA, 391 bp, Zea mays
  unsure (1)..(391): unsure at all n locations
tatgaatggcatgatcgtaattcatcacaagctgtgttctgtgcttataaatagtgaanagattactttactgtttgggcattccttgtaattgctagagcatcactcgggaattattgcttgtcaaggcgaaggtataagcataccttgagcattgtatccaaacactttagattcagataataaatatgtgaatggtgtcatttatctccaacatatatatctttaatattctacattcagcattattttatattactgttattaccttcatcatgttatgtttgtaaccttcgtccgaagtcattatacccttgagggataatggtcaccggacaaagtatttaatatttaacatttttgtgtcgcttgttctgactctaacgtttgg

SEQ ID NO: 5795 - DNA, 417 bp, Zea mays
  unsure (1)..(417): unsure at all n locations
gcttttggcacgaggctgccttttcttatttttttcagnggtgatatggtgtgggtgttattnttgggaggcatcgtgggagtagtcttcgtctcacaaatgtggggcgccaaatggatggcacttacatgcgctggcgcactatcatgtggacccaaacactaagagacgatgggagagaattcaggtgcacgacaagacaagcggtagggaactgtagcttctcattatacgtgcttgtaccactacatgacgagggtatttatagggccatctggggttggtggtccaaaatacaccactacctccattcaacttcatgttttacaatatagattgtacaacggcgaattgaagcctcataagcccctctggttatgtgcacacactaccatacccatcaatacattgatatgt

SEQ ID NO: 5796 - DNA, 373 bp, Zea mays
  unsure (1)..(373): unsure at all n locations
ttttatctaacccacccatacggattccctccattgctggtatattgacatccggatttgtagcctgggggcccatccaggagaacagataatcgtccctgagaaggtccggaaccatgcggccgcttagcttggtccagtaccctaagcccacactctccaccgctcggtggcggatgttctaatgcccggaactatagtcctgtgggtccgaaaacccgaggtccgggtttaaagaaaggacacttgtcccgtgggggtagggagatgcgtggctggttatcctgatcccgtaccgtaagcctacgcactccaccaccatgcgatgagtatcctagttaatagaagtcgnaacccaggggcccggacacac

SEQ ID NO: 5797 - DNA, 431 bp, Zea mays
agcttaccacatttgaagcatgatcgctctctcttggtcttagtcttgctcggcttgccattgcgaccctataacaccgtctcgaatctcttgatgatgagggccatttcttcatcattaaaaccggctgcctcaatttgcgccaccttgctgggtagcgccttcttgctccttgtggctttgagagcaaaaagttgcggctcgttgatcggtccattcaaggcgtcggccacataccttgcctccttgatcatcattcgcccgctgacgaattttcctacgacttcttctggcgacatgttggtgttcctgggattctcacgaatattattcaccaaatgaggatcaagaacggtaaaggacctgagcattagtctgacgacgtcgtggtccgtccatcgcgtgctttcgtagctccttattttgttgat

SEQ ID NO: 5798 - DNA, 436 bp, Zea mays
  unsure (1)..(436): unsure at all n locations
agctntatcaaatggatgtgaagagtgcttttcttattggaccaatcaacgaggaggtctatgtgtgagcaacctcccggctttgaagacagtgagtaccctaaccatgtttataggctctctaaagcgctttatgggctcaagcaagccccaacagcatggtatgaatgccttacagattgccttattgcaaatggcgttaaagtcggcaaagccgatcctactttattcactaaaactctcgacaatgagttgtctgtatgccaaatctatgttgatgatattatatttgggtctactaacgaatctacatgtgaagaatatagtaggatcatgacaaagaaattcgagatgtctatgatggtggagttgaagtattatctatgatttcaagccaagcaacttcaagaaggcactttcatttgtcaaacgaagt

SEQ ID NO: 5799 - DNA, 303 bp, Zea mays
tctatatcaccctcttatgccataagtataattgtcaagttttaacaagttagtgcttgaaccaaatcaacaatatgactgacgtaagcttggagcacgcgaagcagttatggcaatgttgactctagtgttggcaaaaaacgcctaacatggcattgtctgggtacgacctaccgacggaaggcaaggcaagatgcggtgggctgctcaacatggtgttggtatggtacaactgaccaggggaggtcgagcatgcctaacacaatgctggtggagcgcggtcggtcggtggtggggcgcaat

SEQ ID NO: 5800 - DNA, 89 bp, Zea mays
ttgcaattcagaggaacatgctgcacctgaatgtcgcttattattctagaccttacaagtatgggtaatcttgtactgaatgggattgc

SEQ ID NO: 5801 - DNA, 386 bp, Zea mays
  unsure (1)..(386): unsure at all n locations
acaatagccttatggacccaaatgcaagtcttgtcttccttgcatttggcccccaatttcctagcaaccactttcttatttttacatgagagtacaaaatcagtgttgcaggtatgaaaaacgggagcagattcattttgcattttcctaggcacatgacgaacaacattgtttctaggcatatttctactatgcacaaaggaagaacttgaaacaatcatggcatgtgaatcataagcattataactcctattataatgagcattcctagaagattttctatcataaataaatgcatgattctttngactactactatccataggtgccttccctctctccttgttgagaatgggagccctttgacttgttaagttcttggcttc

SEQ ID NO: 5802 - DNA, 448 bp, Zea mays
  unsure (1)..(448): unsure at all n locations
agcttgacattgtctccctgttagaagctaatgccatccttaatgtcagggtgtctcccactataaagcatactacgagcaaatttaaaattttcattttctagttcatgcttggcaattttagcatctagtttagctatatgatcattttgttgtttaatcatagcaaggtgatcatgaatagcatcaacattaatgtctctacatctagtgcaaatagtaacatgctcaacggtagatgtagagggtttgcaagtatttatttcaacaatcttagcatgtaaaataacattctcatttctaagattggtaatagaaatattgcaaacatctaattctttagccttagcnaattaattttcattntcattcttaaggctagagagggatgcattcaatttgtcaatcttagcaattagactagcattatcatttctaagaataacaa

SEQ ID NO: 5803 - DNA, 415 bp, Zea mays
gtcatctcatatcccaccatcaccaatgacctcgagggactgcaatccctgcataatgttcgcttggcaattgtcttcaataatttcttccctaaagcatgacgcactataaattctaattcctcagtagatgttccaggggcagggaactcatattcttcggtagcaacctctcttcttaacaatgatggtccctcagcagcctccaaaggccttgcttcagcaccctcctcaacggcccccgaaggtcttgcttcggcgggggttgagggcccagcctcaatcgcagcccgcgctgtgccagcatcggcagattccttttacaatcttctctctgcagacgcgctgatgaagagttacaccttactgattctataataacgtcatacactggcatcatcttctttcgagtact

SEQ ID NO: 5804 - DNA, 447 bp, Zea mays
  unsure (1)..(447): unsure at all n locations
agctntaccctgtagtctggactataagttggttactgtatgtgtgccttatgcagtttgaccatttccagcatttgcgtaatgaggactctagggagaagcctcgtagtgagaccctagccattcacctcggaagtgaatacgggtctagctaacccaggcaagaaggcaatcgtgactcatgggtaaagatgcgccacctctgcagagtgtaaaactgatatatcagccgtgctcacggttatgagcagcctggactcctcacatgataattgaacttgaagatggaaataaatcgagatccgatgatctgccaatggttttgcttaagtggtttcacttaagtggttttggtatactcttatacacttgcttaatgggaatacttgngattcacacttattagtaagacaggtgttgttaataaaatgtcgaccaactaaaatg

SEQ ID NO: 5805 - DNA, 419 bp, Zea mays
  unsure (1)..(419): unsure at all n locations
agctntctcacaatttctttgagatcattgtgagaggtcttgatctcctcaaaagacacttggaggttgttatacaattccttcaaggccttaaatttttctttttctttgtgcatgtagtcatcggcctcacctaacattctaacaagatcatcatatgaatagccatcatcatcaacatcatcgatatcatcatcatcatgtatatcatttaaatcggtgatgatttttaccttagcatctccctttgccatgaggcaatggggggatgagaagagtgagggagctttcttgatggcaattccggcattaagcttggatgaggtgtcatcatcatcatcatccgagctatcatccgagtcccattcaactaaataggctttgccatctttcttctggttatagtatttctttttctt

SEQ ID NO: 5806 - DNA, 319 bp, Zea mays
  unsure (1)..(319): unsure at all n locations
gaacaatatntactanacaattacttgcatataacgcattccctgtataagatacataggtactcaatatttacatacgagttantacaacacaaccttgttattgttgcaccttcacgagctatgccaggagaagntgctcgtacaagaaatctttaatcatgacagattctaatgacatattagaaatgtctgacataatttgtgcggtttttgctatcatggcaatttgcagaaaacatccatattacaattgtgaccctgtcatgacaattaaattctcacatcatacttgtgatgtttactaatcatgcaattt

SEQ ID NO: 5807 - DNA, 432 bp, Zea mays
  unsure (1)..(432): unsure at all n locations
gctttaagggagaacaatttgggacttttctttgttattttgagaaagacaggatatgtagcgcatgccaagccgggaagcaagttggcacccatcattcacacaagaacattatgacaagtgacaggccactggaacttcttcacatggatctattcggcccgatcgcttacataagcatcggcgggagtaagtactgactagttattgcggatgatatttctcgcttcacttgtgtgttctttttgcaggacaaatctcatacccaagacaccttaaagggattcttgagacgggctcaaaatgagttctgcttaaggatcaagataattaaaagcgacaacggaacggagttcaagaactctcaaattgaaggctttcttgaggaggagggcatcaagcatgagttntcttctccctacactccacaac

SEQ ID NO: 5808 - DNA, 457 bp, Zea mays
agagtgaactgcggcatgcaagcttctaaaggagagcacattatgggactattctatgttcattttgagaaagacagggtttgtagcgcatgtaaagcacggaagcatagtggtgttcatcatccacacaagaacatcatgacgaccgacaagccgcttgagctactccacatggacctattcggcccgatagcttacataagcatcagcgggagtaagtattgtcttgtaattatggatgattattctcgcttcacttgggtgttctttttgcaggaaaaatcacatacccaagagactctaaagggattcttgagacgggctcaaaatgagttcggatcgaggatcaaaaagataagaatcgacaacgggatggagttcaaaaactcacaaatcgaaggctctcttgaggaggagggcttcaagcatgagttctcttctccctacacaccacaac

SEQ ID NO: 5809 - DNA, 92 bp, Zea mays
ggaggatagatcctgacgacatcagcagcggcacggaccttgacagtagtggagtgatcccagcagtagcgcagagacttcagcagtagcag

SEQ ID NO: 5810 - DNA, 382 bp, Zea mays
  unsure (1)..(382): unsure at all n locations
cataccccgntctcccttttcactttacctctntctcgtgggctaagcagnantcttttgatcttggattcattggtgaaatctcttggagctctccctgtacttccagtatttctggctataatatactatttggtaattttgtgatgattttcccattttctctggactttccctcttcagttgaagtccgatacttttcccaccctcactcacttcttcgcttgggtctccacccagttccatctgccggtccgagcactacagtgtgacaacggtcgcgaattcgacaaccacgcctctcgatcattcttcctcaccaacggctgtcaattaagcctctcgtgcccctacacctccgcctagaatggtcgggccgaac

SEQ ID NO: 5811 - DNA, 424 bp, Zea mays
agcttcaaactcgtcacctttcggaaattccggatgtgactccgctataattcaccggactgtccggtgtacaccggacatgtccggtgctccaaggaagagcggcctccggaactcgccagcctcgggatttcgttgaaacaactccgctataattcaccggactgtccggtgtacaccggactgtccggtgttacagcggggtaacggctatttcggcgccaacggctacctgcgacgcattaaatgcgcgcgctgcgcgcgcagaggtcatgcacgcccatgctggcgcaccggacaatctacagtgcatgtgcggtgcgccaccggacatctaggtgggcccagaagtcagagctccaacggtcgaccccaactgcttttggtgacgtggctgtcgcaccggacatgttcggtgtgcacc

SEQ ID NO: 5812 - DNA, 186 bp, Zea mays
  unsure (1)..(186): unsure at all n locations
acccctcagacctctggagctgtgataggacctctttggacccgtcacttatctaaacatatggggaagtaagtatgggttagcattgtggatgatnttccgttcacttgggtattcttttacaggataagtctgagacccatgaaccctcaagcgccttctaatgagagctcataacgagtttga

SEQ ID NO: 5813 - DNA, 409 bp, Zea mays
  unsure (1)..(409): unsure at all n locations
agcttttacggagtgtcccttccctggaccttactgttataaagttcaacggcactggtgatgttatctatgccatcctgaggcgtaatcttgatgacgtgacatcatccatcaatgctcggagggtcaggcatcctcttttccctgcattccgcacgattgatgcggtgacttactcggatattgcaaccgtccaaatcgaccgctgcgtacttgatcttgccactgagcccaatgattctcttattggggtggttgctatggacgatcaccaggagcttttctcttctgcccgcttgttcgaagttggcaggaagcgaataaccgatgacgattcatacccggaggatgcatgtgaaaccgacgatgacgaccacgacgatggcgactctgatgatgatngtcttct

SEQ ID NO: 5814 - DNA, 255 bp, Zea mays
  unsure (1)..(255): unsure at all n locations
caccggacagtccggtcacaccggacgtcccgtgaatttacggacggctgcgcgcgacccgacgctgcgagtgctgaagcgcctccttgggcacggacactgtcggtgtcaccgacagccgggaatttaccgntcgcttggaattctgatgaggcagtgatctgatccctgtgaccgacaggctgtcctgtctgtgacacggcatctgtggcaaccgggagctctgtgcccttgttttatgatccaaactggctt

SEQ ID NO: 5815 - DNA, 433 bp, Zea mays
  unsure (1)..(433): unsure at all n locations
agcttcaactcttcgaaccatatccagatantttttttgcttcggatccttagccttgcaactcttgtcaatatgacccgaaacaacctgggaatcagttttgagtatagcccttctgattcccattgcttttagctttcgaagacctagaagcaaggcttcgtactcggcaatgttatttgtgcaactaaaatcaagttttgccgcataacaagttttgaccttggaaggtgaaaccaacacagcagccgctcctgctccgaaggttccccaagatccatcacaaaacactgtccatgcttcggcgtctttatttgtttcttcctcctgagcccctggcgtccagtcaacaatgaagtctgccaaagtctgtgactgaatcgaagatctatgaacatattcaatacaaaattcattgagctctgcagcccat

SEQ ID NO: 5816 - DNA, 338 bp, Zea mays
  unsure (1)..(338): unsure at all n locations
agcttctttccttnttttgccgagaatcattgtctgttcttatgtattcatccattttttggagaagcttctcaaaagtttgtggtggcttccgcacaaagtattgtgccgtatgtcctggtcgtatccccttgatcatggcctcaatgatgatctcattgggcactgtaagtgcctgaactcgtattcacaagaaccttcgaacataaacctgtaaatactccttctggtcctgtgtacactgaaaaagagcctgtgcagagaccgccttctttggaaaccctgaaagctggtcactaacataatcatttaacttctgccatgacgtgattgtccct

SEQ ID NO: 5817 - DNA, 434 bp, Zea mays
  unsure (1)..(434): unsure at all n locations
gcttctaaagggagagcacattttaggactaacaaatgttcattttgagaaagtcaggatttgtagcgcatgccaagcaggaaagcaagttggtgcccatcatccacacaagaacatcatgacgaccgacaggccgcttgagctactccacatggatatattcggcctgattgcttacataagcatcggcgggagtaagtattgtcttgtaatagtggatcattattctcgcttcacttgggtattctttttgcaggaaaaatctcaaacccaagagaccttaaagggattcttgagacgggctcaaaacgagttcggcttaaggatcaagaaaattagaagcgacaacaggacggagttcaagaactcacaaatngaaggcttccttgaggaggagggcatcaagcatgagttctcttctccctacaccccgc

SEQ ID NO: 5818 - DNA, 404 bp, Zea mays
  unsure (1)..(404): unsure at all n locations
agcttatgttctagcatctttataggagggtgaagctcatccattggtcttgttgatccttacggagttaacctgaactgaactcgggctctacaccagcaggactgtcctgatgtctacccaccaaaaccttgtttattcggtgtcaattgttgtgcgcatcgcgctgtccgtgtctcactcgtgctccctgtgccctcaatntgaaacatcccgtgcttaaaccagttgggtgagcgccgcggtactgggctctcatcatgggcacagtcaggtcactctgtgagctattgagccaaatctatggccgcaattgctcgggataaaggagggcttgctctggcactatcccatgactgcccgaagcgaagtgtagtggctggttgaatctggtagggcttttg

SEQ ID NO: 5819 - DNA, 232 bp, Zea mays
  unsure (1)..(232): unsure at all n locations
tgttgatatatcatactctaatacataatgaggcatcagaccactagagtatggatatgacatattcgggctcgttgtttatcttatcaacgacgagagtaagtatggtcttgtaattgttgattacaatacacacttcacttacgtatcttcttgtatgataaaagtgaaacccaatggactctcaagcggttcttaaggagaagctcaaatgagtntgacttactgatca

SEQ ID NO: 5820 - DNA, 357 bp, Zea mays
tgcaagcttgattctcgcaatcagacgaagctctcggttatattcttctttcgttgaagaaaatgcttcggaagagaaagatttttagtgccccagacattcacaatcaaatggccagagtgcgccctaccgctagagttgagcgtgagggacgcgataccgaacgagcggagactgtttctatcttcgaagcgatgcaacgatccggactggtgaccacggaggaatccgcactgccgagacagagcagactgttgtcgatacagaacaagatgctgccgaagcggaagaaggagatattgaggaagctgattccgatgatgaataccatattgccggaccaagcaagcgcaacca

SEQ ID NO: 5821 - DNA, 456 bp, Zea mays
cgtcccgggacctctgagtcacctgcggcatgcaagcttaagagacttttttacggatcaagctcgttacgaataacgatctagcaccgcgaaaggggctactgttgggcctatgcttcgtcgccgaaggtcttatatgaagaagcggtcttctgctgaagctgtttgtataagatggccgaaggttcctcttcgtgaagcttcggtattacaaaccgacttaaagatagaatgaccttttagtccataaaggtctgagtcaatgttgtaagcttttataaggggcatacttgtaattcctcacaggctgcgtcctgtgcctataaatagtgaacaatattcctttactgttcacgcattctggtgattgctatcgcatattctggaattcaaccttttttgcaaggcagaggtattattgtattcaatgattcgatatattaagtaaatataata

SEQ ID NO: 5822 - DNA, 443 bp, Zea mays
agcttcgggaagccgaaggtccaaaaaacaccttccctgatctcattgccgagaaacgattcatttcccgagatcgtgtcggtcccaccttgcagagtcactgtttggtctttgcggtccactgcgcagcgagtacaagttactgcccgcctggtgtaaaaaccctgccgcttcgccttcttacctgcagcactatataaacagacgagtaggtgtgaagttaccacagcatttactgctatttgcactgttttgctgccaaaatttttaaccatcaccgaagcttgtttgtcaggtttgaacgaagctccatcttgaagcctgcttcggagaaaaaagtattaaagtttcacaagttcataattaaatggccagagttcgctctacagctagtggtgagcgtgagggggacgaaactgaagcttcggagactgtgcccatct

SEQ ID NO: 5823 - DNA, 129 bp, Zea mays
atcattcacacaagaacatcatgacgaccgacaggccgcttgagctactccacatggatctattttgccgattgcttacataagcatcggcgggagtaaatattgtcttgtatagtggatgatattctc

SEQ ID NO: 5824 - DNA, 439 bp, Zea mays
  unsure (1)..(439): unsure at all n locations
agcttggcttgaccacactacagcatccccactcttattacattcaatggtttaacaacagcggtaagttcaaggtaacaataaacagcaaggtgcatttttctattggctcttaccatgactttgctgatttcgatgtggtgagtatggatgcttactctcttttactgggacgtccttgggagtttgatactgatgctattcaccatggtagatctaataaatatactttcatgcataagggaaagaaaattgtgttgcttcctatgactcccactgaaatggtccactttgaacatgagaaatagactaatgctaagcaaaaggtgttttgaactctgaaaatcagcaacctattatagttaaaactcctactttgctagccacaaaatctgatctttgttgagtacatgcctctgttggactntgctatgcctta

SEQ ID NO: 5825 - DNA, 303 bp, Zea mays
tgttgtgctactgtgagaccctgccaagctgcgagcgctcatctctctgtgctgtatacgccactgccagtgaagcgactatagtagtgctcacagttatattattccgttactatgttaattactcgaaatactgtacacgaacaaggttcacgtagacgcctaccaggtggacggcacgccaggctattaacaccccccacacccaccatttgtcggtcaaagggtctaccacagatggtgtgccaccaatgtcacactgcacgcagggaagcatgctattgctaaagtgatccgcttatt

SEQ ID NO: 5826 - DNA, 435 bp, Zea mays
tagcttggctaaagcactacataactcttattatttatttataattgattctacgttgaacggaatcaaacaatacacttttctaaatataatctgacagtggacagaacacagcacccacgcttgtataatttataactttttaaccatcacgcctattgttatgaaattttaacacaagccatataagaaaagcatctacaactttcttatatctaccattaacagattgtaactgtaacttaatcagacgattcaatctctgaaatctgtacagaaattggacggattcagttactgaatttgtgaaaatctcaacatgtaaacgatcagacttattggttgtcatatttaacacaagttagataatacgagtaattttcactcttctataggacttgtctacagataacacaatttatttcatccaacata

SEQ ID NO: 5827 - DNA, 434 bp, Zea mays
  unsure (1)..(434): unsure at all n locations
agctntagcccctgatttctaattggatgttcaattgttcaatattagatggcaggttagtttctaatgatttattttgttttgacttctaatgcttcagcaactatagttatgctgtttcgatttttctcattatcattatcatcttaattttctatcgttataagagcatgtccttgtaaagtagctctaatctttgaggtcaaactgtattctatattgtacctgttacctgactattcagacatacatcattttatcaacacatattttccagtatttataaactaactgccagatttttgttcttatttcctttgtttgcaaagnttgttcgttgttatacgcaactatagttatgttttcttttttgagaggattatcctcataatttctctggagtgattctttgttcatttaaatctgatcgaaat

SEQ ID NO: 5828 - DNA, 204 bp, Zea mays
  unsure (1)..(204): unsure at all n locations
actagctcaaggggactggatggttgctacgtgaattaaagaacctggcactgcagcggaacagtggagacacatcacacagatggatacccttcagaccttggactgctgatatgacctctttggacccgtcgcctatctgagcatangaggaagtaagatggtctagtattgtgatacttttctgttacttggggtcttttg

SEQ ID NO: 5829 - DNA, 417 bp, Zea mays
agctcgtggagaatcttcattccaacatgggccatttttcgatgccagagccagcccatattattcttatcaattaaacaagtgtctagatcagctttagtatcattaaaatcaacttaatatagctgaccatctaacactcccttaaatgctattgaatcattacttcttctaaagacagtaacacctacatcagcaaatatacagttgtagcccattttacacagttgagaaacagaatgcaaattatagtctaaagaatctaccagaaaaacattggaaatagaatggtcaggtgatatagcaattttacccaaaccttttaccaaaccttgatttccattcccgaatgtaatagctcgttggggatcttcatctttctcatatgaggagaacatccttttctcctcttgcatg

SEQ ID NO: 5830 - DNA, 424 bp, Zea mays
  unsure (1)..(424): unsure at all n locations
agcttgacaatgaggagatggcgctcgtcatcaagatgcttcgtcaaatcctcaaacagagggggaaagactacaagtcccgctccaagaaggtttgctacaaatgtggtaagcccggtcattttattgctaaatgtcctatgtctagtggcagtgaccgaggcgacgacaagaatgggagaagaaaggagaagaagaggtactacaggaagaagggcggcgatgcccatgtttgtcgcgagtgggactccgacgagagctcaagcgactcctccgacgacgaggacgccgccaacatcgtcgtcaccaagggacttctcttcccaacgtcngtcacaagtgcctcatggcaatgacggcaaaagaagaaagtaaatccaactcctcactaaatatgaatcgctagtgatgaaatgctagtgat

SEQ ID NO: 5831 - DNA, 434 bp, Zea mays
  unsure (1)..(434): unsure at all n locations
agcttgacattgtcttcctgttggaagccaatgccattcttaatacctgngcgtgtgccactatagagcatgcttctagcaaatttaaaattgtcattttctaagtcatgctcattaattctggcactaagttgagctatgtgatcattttgttgtttaattaaagctaggtgatcataaatagcatcaacattaatatgtctacatctagtgtaaatagtaacatgctcaacagtagatgtacagggtttgcaagtatttaattcaacaatcttagcatgtaaaataatattctcatctctaagattggaaatagaaacattacaaacatttaaatttttagccttagcaattaatttttcatgtctcaatttaaggctagagagagatgcatttcattcgtcaatcttagcaatcaaattagcagtatcatt

SEQ ID NO: 5832 - DNA, 365 bp, Zea mays
  unsure (1)..(365): unsure at all n locations
atatatttataggaacannaaatgcctatgttacatacggaaaattaaattcccttgagatagttagatatttagatgttgactaggtatactgtgttaatacaataaaattcgcttttggatacatcttcacacttggtggngggtggttattggaagagctacanataaaccgtcgatgcatcatcaacaatgcacattgagttatggtaacatatgaggcaactggacaagagatgtaaccaaagaaacttatactcgtgctaagagtggtggtagcatagaagaccataatatatatatgacatgagccacgtgtttactctacacagtatgtggactatcagtcatacatcaatgtatgt

SEQ ID NO: 5833 - DNA, 411 bp, Zea mays
  unsure (1)..(411): unsure at all n locations
agctntctcgactaagtcggggacagggcctcatggtctggtgaaagtacgcgtaagcggcaaggccgaccgagccgagggattcccacgcctctgggatacggatacctcactcgtcccttccgcgagaagcaactctcgctcacacaaacattcctgttaccgacagagtccagatgctcgaaacaagagaaaaaaagacgcagcttcgcaagcgaggcgagggtgtgtttttctggcctcggcggccgcagaaagcacacgctacaagatgatctgatcctgcaggctcgggtcttcacgctgaagggagccgtagcaccctcggcatcgacgacgtcttcagcaaagtccgacccaccctctgacggcgacgcggtccaaggactcctccgggaatccggcccgagc

SEQ ID NO: 5834 - DNA, 187 bp, Zea mays
  unsure (1)..(187): unsure at all n locations
ctggagtgtgatatggattnttggacccgtcgcctatctgatcatatgaggaagtaagtatggtctggttattgttgatgacttttcccgcttcacttgggtgttctttttgcacgataagtctgaaacccaagggaccctcaagcgctctctcangagagctcaaaatgagtttgagctcaaagtg

SEQ ID NO: 5835 - DNA, 436 bp, Zea mays
  unsure (1)..(436): unsure at all n locations
agctttatacagttaggctaatctatagacagtgtttagtttgtatttttgacaatacagttcaaattcttagaacaatgcggtctgaaagtttaatacagttctgacaatagaagtgagtacactgttttgaggctaatatgtcaagcttagataccagtttgtcaagcttgtttaagtccaaatttgtatttacttagttgtgtaaattgggtacaatttgaagactgtgttagttggtgtagaaattgtgtagaatttctagatagatttatgttgctcggtgtgagacgtgtaaattgtggcttctgtattttttatgcccagtnaatactatcagtaattatggctgagtcggtacaggagaccaaacacgagctcattaaatcctgtgtgaatcgatacacgaaaccaaacacgtaacanattaactact

SEQ ID NO: 5836 - DNA, 246 bp, Zea mays
  unsure (1)..(246): unsure at all n locations
tctttcttgttttctctactcttttaagggacttgatagtggttatttataacatagagcaaatacaaaccatatacgaaattaataattatatagattcttatagaaatagatccatcttaaaataccctacaagacagggatgaaactatgcattttgaatggtactgaagatgcactcatagtgacaaaagcagntacatcttactctagtcgtctacactctacatgcgcgccacactcaat

SEQ ID NO: 5837 - DNA, 403 bp, Zea mays
  unsure (1)..(403): unsure at all n locations
agcttgtgaagattcttcatcccaacatgtgctagtttgcgatgccagagccagcccatgttagttttagcaattaagcaagtgtcgagttcagctctatcaaaatctaccaagtatagctgaccggctaacactcccttaaatgctattgaatcatcacttcttctaaagacagtgacacctatatcagtgaatagacaggtgtagcccatatgacataattgggtaacagaaagcaagttgtaatctaaagaatcaacaagaaaaacattggaaatggagtggtcatgagatatagcaattntacccaaaccttttaccaaaccttgatttcatcctcgaaagtgatagctcgttggggatctattgttttcttatatgaggagaacatcttcttcttccc

SEQ ID NO: 5838 - DNA, 380 bp, Zea mays
taagcgactgcggctgcagcttgctaaatttttatctagggctttgtttatattgctactggtgtgtggctacataagcaatttcgatatccccctttgtttggatctctagaaagtgtaccggatgtcttgtgctttgtgcggctgcgttcaacatattatccgcctgcggattgcactctattgtcacataggagagggacttttataacttgtaccatagccctaaaggtggcctcatctaaagaattgtcacaacaatgtcatgtgcaacatacttggcttcggtggagatagactactgaatttgtttattgaacccaagacactaggatctccagaaatgacagtcttgatgtactctttataatttacatcgc

SEQ ID NO: 5839 - DNA, 230 bp, Zea mays
  unsure (1)..(230): unsure at all n locations
acaagtcgtgctatgtccgttgtanataccatgccatcttgcttgttgctgaacacccagtgtggttcctacaacattttggttaggatgtggaactaaatgccatacgctcgtcctagtgaagttgttgagctcctcttgcagtcgcaccacccaatccacatcttgtagagcttcctctaccctgtgtggctcaatagaggaaacanaagagtaatgctcacagaaat

SEQ ID NO: 5840 - DNA, 439 bp, Zea mays
agcttggtgccaatggagaagcaaaaatctttgatgtcttggttatcaaactgcttgccgttgtcaactgtcagttcggacggtactccgaagcggcaaacgatgttctgccagaagaatatttgggcggtctttgatgttattgtagagacagcccgcgcctcgatccatttggtgaagtactcgacagcgacgaaggcgaacttaaggttcccttgagcggtgggcaggggcccgacgatgtccaggccccagcgctggagaggccatgtgtgggcgatcagctttgtatactgcgaggggctgcccgaccgaggagaaaacttctggcaggcttcgcatgaccgggtgacccgatttgcagcgcagatcattgcgggccaattaaaacccctgcggaccaccttaacagctaaggcccttgggcctgcgtgggagc

SEQ ID NO: 5841 - DNA, 353 bp, Zea mays
agcttaccgcatttgaagcatgatcgcttccccttggtcttagtcttgctcggctgtccattgcgaccctttagcattgtcttgaagcgcttaatgatgagagccatttcttcatcattaagcccggccgcctcaatttgcgccaccttgcttggtagtgcctccttgctcctcgatgccttgagagcaatgggttgaggctcgtggattggaccgttcaacgcgtcatcgacgtaccttgcctccttgatcatcatccgcccgcttacaaattttccaagaatttcttcgggcgatatattggtgtacctgtgattctcacgaatattattcaccaaatgaggatcaagaac

SEQ ID NO: 5842 - DNA, 410 bp, Zea mays
  unsure (1)..(410): unsure at all n locations
agctctagtatcgagtgaaggctcgctccttaatgttatgctttctgtgctacccatgcttgattggtgttaccataatttatccaactacttgatgaacaattatgatcattgactagtacagtaacctacaaaaacagtgaaataaagaaaattgaagccaaaatgtcacaaataccagtatgaagttagaattaaacatagggagggttagtaccataacactagaatctggccttctagaaccattaagtttccaagttccctatatatctactcatatctgattttgttatgccaagctcaaactcctcatttatagcatattgcatgacatctagcctaaattctttcatccatgcatagatagntaccaacttcatatcanggtgatcagcgtcatgcaatat

SEQ ID NO: 5843 - DNA, 397 bp, Zea mays
  unsure (1)..(397): unsure at all n locations
ctaagctgtccgtcctgtggaggganaatgtgtcagtgctgtgntgtggtggaattgagctattcgctgctcacccgactcccttatgtggtttggacctacagaggtggtgaaaaactagatttggcttgtgcgcattgcatgattgttgtattgtctgatacgttgtttggaatggatgatanacaatgatcgagtgcattcttcangtatgtagctggattgcatttttatgtgcttagttgcatccaggatattctggtgattgtttggatccctactaaaactttgcatgtacacatgtcttgtgaactgaagaatcgtagctggattacattattcctatcatattgtaacctgtctgctccanatgctgcttcaccatggttatgttttt

SEQ ID NO: 5844 - DNA, 424 bp, Zea mays
agcttcaataaacaatctggacccactccatcactctacagtcagcagagtcagaggtcccttcaggcaccctccgttgcgagcaaccagccgccagcaaacgcctgttggcactgtggagaccccagtcacttcaagaacaattgccctcagttgaaagcatctggaccaacctactccaactcagtgaatggccccaagattccatcgacacctacccccaaggcactttcttcaagcagccagcagagcaggactcagtatcagggcagagcccgggtcaaccacgtcgacgctcaagaagctcagcaagccccgggagtagtgctcggtgaagtccttgttgaatttactcccgctactggtgcttttgattcaggagcatcccattcttttatagcacgctaagttgtggaaaagcatg

SEQ ID NO: 5845 - DNA, 404 bp, Zea mays
agcttcgggaatccgacactctttgacagggtgcctataatttttgcaccagcacgatcccgaatgcatcccaggatttcttcgtcaaccccgccaaagagtaccgacccaggttgataaccacacgagatcgcaaattcccttaactttgatctgtcctcttcagagagttgttggctgcccacgtgtcgtaagtcgaaatccattccctttgaagaggtttcataaatctcttttcccttgcctaaaatggttgcgaccacttccttctccacaaccacatctgatatcagcttgtcgatctcggacagagtggttgcaagtttttcaccttctggtgtggcagtggcttcggcatcagtcgatttggcagctttgcttgccgaagctgaaggtgggggggg

SEQ ID NO: 5846 - DNA, 422 bp, Zea mays
agctttgcctctggcagaccaatactagaaaggccatcactctttgggagtggagagatggcgagagtagcgtgtaccctccgtggcaagaggctggacggtggtgtatatatgctctcggttggcatgaacccggtctggtcttgagaacccctgtcacagacgggtttcggggcaccaagacccggacgcgaacataatcaccaggtgtgctgggaccaagtgtcacacatatgatgaatcatggcatatgatcgaatgtcacatctttactatataataggagttctatacaaaataaataattaattacattataagaagacaaccggccagcaacccaatagtgacttggagacgacgacctagaccactcttgaactcgtcacaacatccttcatgcgccttattctacaatacat

SEQ ID NO: 5847 - DNA, 430 bp, Zea mays
agcttcagattcagcaatatgaatacgcgcaacccgattttcatgtcttctgcatagccagccccgactctcgaaggcgcaattaaaactgcagctgcacccgccccgtaggatccctacgagccatcgcagaacactgtccaagctttggcatctttacttgcttcttcctcctgagcccccagcgtccagtcagcaatgaaatctgctactgcctgggactgaatcgaagatctatgcacataatcaatgctgaactacgtgagttccgcatcccactttcaaaccatccagtatcttctctggtctcataatatcctccaaggctgggatgaacgacaatcaaatgggatgctgaaaaacaagtgaagtttctgtagccattaagaagcatacaacccctccccactctaatagacttctttgaaaa

SEQ ID NO: 5848 - DNA, 413 bp, Zea mays
agcttatgaagattcttcatcccaacatgggctattctgttgttgcctagccaacccatgttaatcttagcaattaagcatgtgtcgagttcagccctaacaaaatctactaagtatagctgaccctctaacacacccttaaaagctattgcatcatcacttcttctcaagacagggacccctacattatgaaaaagataggtgtagcccatattggcatattgataaaccgaaagcaaattgtaatctaatgaatctaccaaaaatacatttgaaatagaatggtcaggagatatagcaattatacccaatcctctgaccaaaccttgatatccatcccacaaagtgatagctcgtaggggaactcgagttttctcacatgaagagaacagatttctcctccccgttatgtg

SEQ ID NO: 5849 - DNA, 369 bp, Zea mays
  unsure (1)..(369): unsure at all n locations
cagcaagcagcgnccagatggattaaacaccaaacgattcgatttgttctgtggtggcaaaaacaaaccagagatgtcttcggagatgtgggatctcctggcgaccaatacgtggtagaactcaaaactctcaaggaataaactaagaccagcaactcgacacaaccgatgcaaccacaaacacaaccagccctacccaaggagcactaagaaatgctcaatggtttataggatagccgcaaaaccaatccactatcttttggcttttcctggactataagacagaagaaaacaacgaagagaagtaaatctctcaccgtaaaaccctgctctgaataccaactgatgtgcaccccgagggggattgcc

SEQ ID NO: 5850 - DNA, 349 bp, Zea mays
ctgagcatgcactttgtgctagcttgctttaaaaactatatgttttgtttttacaaaatatgatgtggccaaattgggtgggatgtttttccaaaataaaacttgatgatggatctatcaaaggccttgatatgttcaacattacaaaggatgtacctctgccaggtaccaactttgggttttaaatgattaagctgagaccgggcaggtgacttgcacgaaaagagagtctcggtgtagtgtcttcgtctgagtcgattaaagaccgtctcgatgtatgcttgatgatcgaggaccctttaactggtcacatgcctcgtcatgggtaagccttgcctctggcagacta

SEQ ID NO: 5851 - DNA, 277 bp, Zea mays
  unsure (1)..(277): unsure at all n locations
ctactgaatgatagtggtgtgccatgtaaaataataacactactgacacacttgaacttgacagagaagttctgtcagttttcagttaagcgtngccatcagaagtcagagcacaggacagctgtattcatgggcctttatcttacaacattatcatattggttcaagagtttaaaagatccatgcgcattcagtgagggtaacaagtcgctatggtgtctgagaaaccatctgtttctctgagagatggcgacgaagccaagtatatatatatatt

SEQ ID NO: 5852 - DNA, 386 bp, Zea mays
  unsure (1)..(386): unsure at all n locations
catgcaagcttatctgaagcaacgatgtcgatcagtggtttctgctctaacatcagaaaccctgaattnttcaagccaggtaaccatgcacctgaagaagtgcacgaggatctttgtccggcccttcaagatatgcagctcgactacgtagatctgtaccttgaaaattcatgttcttgaacttggtacctactaccagataatagtctggctactgttgaccttctaagatccatctgataaagaccttactttacatatacatgggccaatcccgatccagaaaggaaccatgtgtatcccgggaaacctataaaatcttgcaatgagctcataggaatcccataacttaagcgcgtgcattacaaatataaaacattatatgc

SEQ ID NO: 5853 - DNA, 365 bp, Zea mays
agcttatctcggaacacctcagctatttcttccctttctatatcaatggcagccggcgcgagaccaccggcactctggtcaaacataagtggggtaggctggataatggcattttgatttaccctcaatgggttgagctatgtggtgcattactatttgccctattagagtcataagagtgactgttcctttctggccttctaagcggggccggaaagaactcgttcccatgggctcgagactccgtgataatgggctggtgcatcgtataatgtgatgggatgtgctgctgggatggatgacgaatcatgtaacaatcctccttataaaactctatgctagaccagcccgttggatatgcggac

SEQ ID NO: 5854 - DNA, 435 bp, Zea mays
agcttggtgtcttatcaacaagaaaaggttatgattattgatcaggcacaagtgtggagaagctcccgagagattaaaccttcaagatggaaagttcaccacaacagggtaaaggtacaaaaggaagtgttgatattttgcgtatttgtacctaaattttcctccaatacttgggttgcatatgtctactgagtaagggggagcaatgattgtgtgtagtattttaccttcttaataacctgctgtcccttgacatcatactatgctcttgcttgaatgtggttttggtgctcgatgtcaaaggagaagaatattatgcattaaagcttaggtttccttgagtttctttgctcttaatgaaagaatatagttctttgagttcttttgatcttaaagaaagatgtaataactgcgttgttgataattctattatat

SEQ ID NO: 5855 - DNA, 427 bp, Zea mays
  unsure (1)..(427): unsure at all n locations
agcttgcaccccggnatattggtcctttccctattcttttacaatgtggaccagnggcataccgactccagttaccagaaacattggctgctgtacataatgtgttccatgtgtctcaattgaagaagtgtcttccggttcccgatcgaaccattgaagtaacggatgttgccttagaaccatacttgacatattctgaacatcctattcgagtcttggatcaaaaagacagaatttcccgaaggaaaactctcaagttttacaagaaacagtggaaccaacataccgaagatgaagctacttgggagactcaagactctntgtataagaatttcccatactttttagcttcgtgaaaattggtagacgtgtacattgctgtgatagaggaatgaaccccatgtcacccctgccttatacccaaata

SEQ ID NO: 5856 - DNA, 424 bp, Zea mays
  unsure (1)..(424): unsure at all n locations
agctttccatattgataaagagtgtattcatatgatatttggaactccagctatgtttgttttacggtggctgtatccatttgcctagcaaaccgagcacgtctgttcactggtgaattntatctagtaaatggccgaattggctcttccaactatggagaattctgtagagggataaaagtacttactgtcagcaaaaattcataatttttggataagtagtttgggaaatatcgaactttgaagttaattatgctgctgtctgaaacagattcagtcggttatcttgtctgatgttttataacttatagatggaaaaatttaattatccatcaaatactgaagtcgtagcatattttgtgtagatgcttccagatattttgtttgatagcactgttgtagtaattttaagatataattaaca

SEQ ID NO: 5857 - DNA, 414 bp, Zea mays
agcttgtcatagcctctggtgaacccgtgaagctttctcgagcttcaattttagcatccatgccgttagttgctcagaacacgatcaccagagtcattccaccgccgtgaccatgaacaagctccaatttgggttgaatccttcaaattaagtgagggcttttgaccggataggctggcacacaacatctatgtacttattgcctcttgttcgggtcacccgcgccgtagaatcgtggctctggcctagtgctcgacgcggttccgccatggacccagcgtggtgaagaaacagaaaggaggtgggttttcgcaaaggtcagtgagacagtaaatagtagcctgcgtttcttcaccacatatataaataaccaagggtattcgcgcaaaaaaactgaccgcgcgggcgtgggtg

SEQ ID NO: 5858 - DNA, 265 bp, Zea mays
atgtgagacactcagacctgggatctgataggcctttagaccctgcgcctatctgagtataggaggaagtaagtatggtctagttattgtagatgatgtttcccgcttcactcgagtgttctttttgcatgagaagtccgaaacccaaggggccctcatacgccttctcaagagagctcaaaatgagtttgagctcaaattgaagaagataaggagcgacaacgggtccgagttcaagaaccttcaagtggaggaattccttgag

SEQ ID NO: 5859 - DNA, 431 bp, Zea mays
  unsure (1)..(431): unsure at all n locations
agcttgtgagattaataatgtgtactacattgagtctcctctgttctaaattntaggtcacaataaaataaattaatctatgtntatgtacttgtaagtaacacttatggaaataatattctatttctaaataaagttaatgtatgttatagtttatgattatactttgaattcattatcccttacgtagtattgtgtccttataagatgtgttccaatgtttgtacatgtttggtgtgatgttcatttgtactttccaaatatattgaatgcatgctcgctttatttagacaacgagcagtccgaggttcctgagtgtgttgtggagacctccctgagcaacaaccttgggaaggcatgtgtcctctgacctattatgtcctacatactttatgattactgtcccgcttactttataaacctaagattga

SEQ ID NO: 5860 - DNA, 391 bp, Zea mays
  unsure (1)..(391): unsure at all n locations
agcttgnctctgttcacatgaattggtgtaaatatttcttttttgttatgaaatgatgatcagtctctcttgaggctattcccaaacagatacacctcttaaaaatagaatttaaagttttacgcgttgcattaagtttagtccaccttttggaagtgatatgatgtgcatcatttaagtgatttcgaggtctggcaaatgatacatccttatcttgactgcaaggggggactaatggatggaataattttgttgtgctatcacaatattcaaacacttcttttgctactgtcaggttcagattatggcgagcagcgcaagcacggatctgacgggtgtttaaatatcnaatcgaataacttgaagatttgttacaggagagaaaagcctg

SEQ ID NO: 5861 - DNA, 432 bp, Zea mays
agcttctaaagggagaacacattttgggactaacatttgtttattttgagaaagacagggtttgtagcgcatgttatgcatggaagcaagttggtgcccatcatccacatacactacaaaaaatggtgttgtatgacaaaagtaaaaagtcatgtgtaatacaaaattgggcataaaaagcattttatgacaaaaatgttgcgtcataaaggtcgtcatataacgaccgtcacattatgtaccttgtgacgacttgtcagagtacccgcacataatgtcatcaccttttgtgacagctgcgttcgtccatcacatattggtgctatatatgaccgtgttatctgtcacattcttttcagtcaacgcgtcacctaatgttgggatcgtcacttatggcacccacatacagtgaccatacagtgacgacacact

SEQ ID NO: 5862 - DNA, 227 bp, Zea mays
ttattacaaagtggtagtcatactataaatgtattggtgaatcttacctactatagcccgttagtatacttcaacgtgtgcccaataccatttatagaggatgtaaatctatacctaggctaacctagacaagtgctcaagcatgatctactactaacactctcaccactaaatatgttatgctaaatattgccaagttctagattgtccacagttgacacacctaa

SEQ ID NO: 5863 - DNA, 437 bp, Zea mays
  unsure (1)..(437): unsure at all n locations
agcttggacatgaacagttagcacgagcattaaaaatttgtatttttattggtatagacaaaatcataagacatcaatatatagacaaccacttgccttggtctctagtgggatccttgctctcagtctatcttggtgaactaagttgtatagcggcatacatgctttgggtgcaatcctggtttgtggcaccacaagaatttggcattgtaccggccattatgcgttggntggactattggtttatggtagtactccttcgtctagtgactataattgggtgttttgtacttcagcgcaacaacccttttagaggctcttgtaatttttgaagagagttcgacaccattgtcagggggtgtggctacgtacaaccttatcaactatggattcctgcataggtacaacacaatatactgtataattgattgtggaag

SEQ ID NO: 5864 - DNA, 333 bp, Zea mays
  unsure (1)..(333): unsure at all n locations
tgaacgttgttatgcgagagatgttactcatttccccttttattggccctggcgcatgggtagtgntcactcctgactagacattacatagctgtgacctcatgaataatccatatgtttgatacttgagaatctatgaagttatgccgcactgcacgagatgagttcaatatcatcaacgaggttgtctgcaaaaccatctcatctgtagtacattggctctctgccttatgtatgctattctgatttacctctcttgtattggaagacattccatgtcacgtcggctcttgactatacatgaggtatttgcattctgacaaccttggggtt

SEQ ID NO: 5865 - DNA, 431 bp, Zea mays
  unsure (1)..(431): unsure at all n locations
tgcagcatgctagcttttgaagaaatttcgagtggcccgggggtcatatgctcgntctcgggtgctagggggagtgccgctatcttggagagaagaggctgtgaacatggtaaatccttggcgcaaaccgaggccgccttatctgatgaaggtataaaagacccctcggtcgaagcaagcttgggtggtggaaaatatttcaccgacatttgggaaaatggcggtcgccagatggctcaagaaattataatgaaaagtgaaaaagttattcacgatgctagagaaatagcataagccgctgagaaaagtgtggatctcgagatgcgaacatgtattgattaataacttttgactctatgttgtaattttatgactccgaacttatatacacgtctgcatcactgccgcactatctatctccccagagcccg

SEQ ID NO: 5866 - DNA, 433 bp, Zea mays
agcttctaaagggagaacacgtgataagtttactttgttctattcgaaaaagatagaccttgtgcagcatgtcaagcacgttaacaggtgggaagagcacatctcagcaagaatgtgatgaccacatcaaggtccctggagctgctacatatggacctcttcggacccgtcgcctatctgagcataggaggaagtaagtatggtctagttatcgttgatgacttttcccgcttcacttgggtgttcttcttgcaggataagtctgaagccaaagggaccctctagcgcttcatcaagagagctcaaaatgaagttgagctcaaggtgaagaagataatgagcgacaacgggtccgagttcaagaaccttcatgtggatgagttccttgaggaggaagggatcatgcacgagttcttcgctccctacacaccac

SEQ ID NO: 5867 - DNA, 450 bp, Zea mays
atctctaagtcacctgcggcatgcatcttgccacatacttttgaaaccttttatctttctattttatatgctatgaccaatgtgttttcaagtataattacaacccagtcataggtatattgaaagggaattggagtcttctgcgaagacaaatgctttcactccgtaactcatactatgccaccactcctagcaactctctcttctttgggggagaaatgaacctcaatgaaaatgacttcatccttggcggagagagtaaaagctccaacgcaaaaggacttcgtctctggtataatcttaactcacttatttatgaccaaaggggaagattgcacttcgagggctctaatgattccgtttttggcgattcatgccacaaagggggagaaatgagcccaaagcaaaaggaccgctccaccaccactcaattcataaacttattgcttt

SEQ ID NO: 5868 - DNA, 433 bp, Zea mays
  unsure (1)..(433): unsure at all n locations
agcttgtgaaagttcttcattcccacatgtgctattttgttatgccacagccagcccatgcaagtcttagcaattaagcatgcatctagaccgacctcctcttttgcaaaatcaactaaataaagattgtcgtctagtacacccttaaaggctagtgaaccatcacaccttctaaagacagacatatctacatttgtgaataaacaattatatcccattttacaaaagtgactaacggataacagattatattcaagcgactcaactaaaaacacattaaaaatagagtgctcggatgaaataacaatcttccttaacccttttaccttgccttggntcccatcaccgaatatgattgaatcttgggaattcttggtcttgacgtatgaggtgaacatcttcttcttccccggcatgtggtttgtgcatccgc

SEQ ID NO: 5869 - DNA, 419 bp, Zea mays
  unsure (1)..(419): unsure at all n locations
agcttgtgaacagtacaagtacagataggagaatgttgtttctgccgatcaaccgaaacccatgcttttatgcgaagatatcgcatagcacaaagtgctactgggatctcaattgtctgaggaacaagagaaaaccttgataaggtttctgttcaacaacaaggatgtctttgcatggncaactaatgatctctgtggtgttaacagggatgtcattgaacactcgctcaatgttgacccatccttcagacctataaagcagaggcttctgaaaatgtctgacgacaaagctgaaggtgctcggaatgaagaaaaagactcttatcactggggtcatcagagaagtgaaaacctacagtggctaccacactgtttggtgaaaacgccatggaaatggaaatgtgtattgattttactga

SEQ ID NO: 5870 - DNA, 121 bp, Zea mays
aaaatactgcgagtaccgaatggaacgatcactatggtgcctgacctaattttggttcgccggtttaccgaagattgctgatgtgcttcgctatgttcttcgtattaacaaactaccttaa

SEQ ID NO: 5871 - DNA, 424 bp, Zea mays
agcttttatgatctgtatatatatgatttatatttctccatcaaatatgatgccatattttcagggcatgaaccacaacaactaattctaaatcatgagttggataatgttcctcatgccggcgcaattgtcttgaggcatacactataactcgaccctcttgtatcaagacacagcctaagccactgcctgatgcgtcacaatacacatcaaaaggcttttcaatgtccggttgagctaataccggagcagtagtcaataataccttcagctgctcgaaagcttcattgcatcttgaagaccagattaaatttgtatcgttcttcaataaacttgtgattggctttacaagcttggaaaaatccgtgataaatcagcggtaataaccaaccagtccaaggaaacttcgaacttgatgtacagt

SEQ ID NO: 5872 - DNA, 424 bp, Zea mays
agcttgctaaagtggccaaaatgaactatcctactgctgatgcagatttagaaccttcccagagcaaaggattcaaagggaaggtttcagagactggttatttacgtgatgtggatgtgatgatgacaggacagattagtgatgtcatgaaacctctagcagcaagtggtgaaaggaaacgcaaaggggtggcaaatttggacatgcgtgtttatgataactctgatctgcatgaagtcaatgaagatgcaaatgactctttcatgttggcggaatatgaaaggcttgccagtagatcaggccatgcagtccaagattctaatggtggttatggtggtactgaaagaaccagctctagctccaaaatagcataaggaagagtcgaagttcctagcctggatgagcatggtgagcatttgtcatc

SEQ ID NO: 5873 - DNA, 405 bp, Zea mays
  unsure (1)..(405): unsure at all n locations
cttcatccccacatgtgctaagcggcgatgccacagccagcccatgctagtcttagctattaagcatgcatctagaccgacttcttcttttgcaaaatctactaaataaagtttgccgtctaatacacccttaaaagctagtgaaccatcacttcttctaaagacagacacatctacatttgtaaatagacagntatatcccatgttgcataattgactcacagatagcagattatatccaagagactcaactaaaaacacattagatatggagtgctcattagaaattgcaattttacctaaaccttttaccttgccttgattcccatcaccgaatataattgaatcttgtgaatctttattcttgacgtaagaagtgaacatcttcttcttccccgtcatatg

SEQ ID NO: 5874 - DNA, 165 bp, Zea mays
  unsure (1)..(165): unsure at all n locations
actgtcaagacatgaaaacctgatatgttttgtcaacaacaaatgtttttgcttggtcagctaatgatctttgcggagtaaacagggatgttattgagcactcgctcaatgttgatccatccttcataccaagaaagcanaggcttctgaagatgtctgatgaca

SEQ ID NO: 5875 - DNA, 403 bp, Zea mays
  unsure (1)..(403): unsure at all n locations
agcttgaagccatggtaagtagcataggccaataatatactaattgactcaaacctagctacgggtgcatagatttcaccgaaatccaaacctttgacttgggagtatcctttggccacaagtggagctttgttccttgtcaccacaccatgctcgtcttgactattgcggaagacccacttggttcctacaacattntgattaggacgtggaactaaatgccagacctcatttcttgtgaagttgttgagctcctcttgcatcgccaccacccaatccgaatcttgaagtgcttcctctaccctatgtggctcaatagaggaaataaaagagtaatgttcacaaaaatgagcaacacgagatctagtggttacccccttatgaatgtcgccgaagatggtgt

SEQ ID NO: 5876 - DNA, 397 bp, Zea mays
  unsure (1)..(397): unsure at all n locations
tctagctgcataaatgcgagctccgtgcgcgaccattatgccatctgaagatattctgacatggaaagatgctgaatacctggccnacagcatcatcccacacacacctcgacacgacactaccacgtgggtgggagatccgcgaccaggagatggacgcgagggtccggcagcagcatgccacgagagctggggacgctttctcagacgccttgctggattatttggatcaatccagaagggggtgttagatagatgtcttgtgcctttctcatagcgaaattgagtcaccacttcaatcatcttcatgatgaaggtggcgtgaagacatcccttaagaggagagcagacagcatgaataatttctttgccaatcatgtcanaaacattgatactt

SEQ ID NO: 5877 - DNA, 425 bp, Zea mays
  unsure (1)..(425): unsure at all n locations
agcttcngttccctaactcgttcaaagtacctgagtctgttgtgtcttactttaatcttcttacccttcggcgttgcagagatggtctaagcaacaactcttcttttctttccctgctttcacgagggatagcaatagtctgggtatacaaaacctatcacatcaaaaactctgttcaaccttttcttgcctcgtcctccgaaagcttttgtcatggcatcatcttcggctaaggatggcacgttgacccgtgggcatggatacccgtcggtttcatacccggtggtgtaacaacctgcaattgtgggtacaaaatttattgtctaatattcaccaaatttaattgttaccctctctgtttcttccttcctttgtttttctctaacaatggagagcgattccattatatatatatacatatatat

SEQ ID NO: 5878 - DNA, 308 bp, Zea mays
ttatctccttaatgtactgatcatacatgttatagacagtaacacctatatctgtaaagagacagtcgtagccattttgataattgagaaactgaaagcaagtattatcttaagatgtactacaaaacactgaaaatggaatggcatgtgatatagcaactttaccaagtactatgaccacaccattacttccatccgcgaatgtgataactctctggggatctacgggtttctcgtaagaggagaacatccttttctccctattatgtggttgagcatcactgttattttcaacttgagccccattg

SEQ ID NO: 5879 - DNA, 442 bp, Zea mays
  unsure (1)..(442): unsure at all n locations
agcttcggcaagaggaagaagcggtcttttatgtttcgtcatgtacaaaaaagaaaaagcttccgcaagaggaagaagcggtcttttatgtttcgtcatgtacaaaaaagaaaagctttggcaaaaagaagaaatggtcttttatgctctcgtgtgtccgaaaagaagggaaggtgttttttcgccttcggctcaaaatactgatttcgtccacatcanagcgtctcaataaaagggtaagaatatattacaaggtatgaacaaagttccttgagaatagattaattgtatttacaaaaagttgttacaaattctcctgagttgtttctagtctactcctaataatcttcgtcaggtttctgcttcggcggcatattctttaagtatcaccttcagcttcgtcatcctacatgaatcaaggtatcccgagtaaaaatcaagt

SEQ ID NO: 5880 - DNA, 213 bp, Zea mays
  unsure (1)..(213): unsure at all n locations
tttatactactctctctcaaacttgtctatagcagtgtgcccagatctgatatatggagtggttgccccaactataaagttctgtagctgttcaaatattgttcatgcncataatgagttctcatggcgccctgatcaccacactgctctatatgcatgtttaacctgtcgaccaatacatctccatagatcacttcacacaaaacataactg

SEQ ID NO: 5881 - DNA, 445 bp, Zea mays
agcttgctctcccagaaatacaatctatcaagtgttgtgtatttgttgccagcattagtcccaagaagatttctagatggtgaaagttttgaggacactgatctatgccaagtaaggtactttatctcagcttgaggaggagatgcattaaaccattgtgcatcacattatttgtacaacaggaaagattatgtttgatattttatagtgcaaatcacaaataactgaaaaataaccacttatataagaaagctaatgtaataaagcaatcactatggaatgaaagcaatagtatgaaaataatttcacacaatttctgagtaccacattacgattactcgctaaaagaagcctagcttgtaattgtatattgaacacataaataatgtgagacaattaagtaattaacacacatttatgaacagtggcatccttcatgaagtaa

SEQ ID NO: 5882 - DNA, 440 bp, Zea mays
  unsure (1)..(440): unsure at all n locations
agctctatcaaatggacgtgaagagtgccttcctcttctgtccatatcaaggtagaagtctatgttgagcaacctcccggctttgaagacagtgagtaccctaaccatgtttataggctctctaaggcgctttatgggctcaagcaagccccaagagcatggtatgaatgccttagagatttccttattgctaatggcttcaaagtcggcaaggccgatcctactttattcactaaaactcttgacaatgatttgtttgtatgccaaatttatgttgatgatattatatttgggtctactaacgaatctacatgtgaagaatttagtagaatcatgacacaaaaattcgagatgtctatgatggnggagttgaagtattttctatgattccaagtcaagcaactccaagagggcacctttattagccatacaaagtatac

SEQ ID NO: 5883 - DNA, 212 bp, Zea mays
  unsure (1)..(212): unsure at all n locations
ctacttgtatttcgaacaaattctgtgctgttaatctaatctctttcgtgcgtgaaccaagcccttgaattcactatggcataggtagctttcgcttttttttaaagattttttccgaagcatgatggataatatattcaatattctcttttaaagcctctggagtaagagcggcagatctttcacgcanaatttattctatagcttcttcc

SEQ ID NO: 5884 - DNA, 375 bp, Zea mays
agcttggtgccaatggagaagcaaaaatccttgaagtctttgctgtcgaactgcttgccgttgtcgactgttaattctgacggtactccgatacggcaaacaatgttttgccaaaagaatatctgtgcagtctttgatgttattgtggaaacagccctcgcctcgatccatttggtaaagtattcgacagcgacgaaggcgaacttaaggttcccctgagccgtgggcaggggcccgacgatgtccaagccccagcgctggagaggccatgtgtgggcgatcagttttgtgaattgcgaggggctgcgtgatcgaggagaatacttctggcatgctttgcaggaccttgcaacccgatttgcggcgcagatcatt

SEQ ID NO: 5885 - DNA, 323 bp, Zea mays
actagctgctgtatcgcatgggaaggcctccgttacttattactgcacgaactgaattgctccaacgacacctcatatatcacagatacacatcaatacagttatacaaaattatatagggcaaaacataatgagggaagcttataaattggcatggggttaaactactatggggacgagtctaccagagggattgagcaacacctatctgagcgcaagcgatactagggggggtgtgctagctagggttatgggtgaaggagagtactggtgttatactaggatgtggttacaggattactgtgtgaatatgcataatcttg

SEQ ID NO: 5886 - DNA, 366 bp, Zea mays
  unsure (1)..(366): unsure at all n locations
agcttctaaagggagaacacattntatgatttacatatgttcattctgagaaagacaggatttgtagtgcatgccaagcagggaagcaagttggctctcatcatccacataagaacataatgacgaccgacaggccactggagctcctacacatggacctattcggcccgattgcttacataagcatcggcgggagtaagtactgtctagttattgtggatgattattctcgcttcacttgggtattctttttacaggaaaaatctcaaacccaagagaccttaaagggattcttgagacgggctcaaaatgagattggcttaaggatcaagaaaataagaagcgacaacgggacggagttcaaga

SEQ ID NO: 5887 - DNA, 435 bp, Zea mays
  unsure (1)..(435): unsure at all n locations
agcttctaaagggagaacacgtgataggtttgactaacgtgcaattcgaaaaagatagaccttgtgcagcttgtcaagcaggtaaacaagtgggaggagcgcatcacagcaagaatgtgatgaccacatcaagacccctggagctgctacatatggacctcttcggacccgtcgcctatctgagcataagaggaagtaagtatggactagttattgttgatgacttttcccgcttcacttgggtattctttttgcaggataagtctgaaacccaagggaccctcaagcgcttcctaaggagagctcanaatgagtttgagctcaaggtgaagaagataagaagcgacaatgggtccgagttcaagaaccttcanatggaggagttccttgaggaggaagggatcaagcacgagttctccgctccctacacaccac

SEQ ID NO: 5888 - DNA, 428 bp, Zea mays
  unsure (1)..(428): unsure at all n locations
agctnggtcattttattgctaactgtcccgaaaatgaagtgaccaggagcaagggaaaaatgggaagagagagaacaagaaggtttacaagaaggccaaaggcgaagcacaccttggaaaggagtgggattcggattgctcttcgtccgactccgacgacgagggactcgccgccactgccttcaacaaatcggctctcttccccaacgagcatcacacttgcctcatggcaagggaaaagaaggtaatcactcataatgctaatgcttatgattcttctagtgatgatgaatctagtgaggatgagattgattactctagtttattcaagggactggatagaactaagatagctaagaataatgagttgattgatgccttaaatgaaaaggatagaatcttagagaaacaagaagaccttntatatg

SEQ ID NO: 5889 - DNA, 371 bp, Zea mays
agcttgcctatggaacctctgtaaaaacaaacatcatctatccttgtatcttttttttctaaatgcatatgagcggatgatcgatcggacgaatgaataataatatataaacgctgaatataattgaaggcatacgtgacccaagacaacgtgctgatgtctacgctgtctgtgcgggaggccgtgtactactcagcgcagctgcagctgcccgacacgacacctgcggtggaaaatcgggcgcacgcggagcgggtgatccgggagatggtgctcgcggacgccatggacacgcgcatctgcggccgcgtcaccaaaggcatcatcggcgggcagcggaagcggctcagcatctgcattgagatgctgac

SEQ ID NO: 5890 - DNA, 271 bp, Zea mays
  unsure (1)..(271): unsure at all n locations
ctcaagcatgccacaagagcatggtatgaatggccttagaagatttcctttattgctaatgagcttcaaagtcgtgaaggccgatcctactctattcactataactcttgacaatgatttgcttgtatgccaaatttatgttgatgatattatatttgtgtctactcacgaatctacatgtgaagaatttactacgatcatgacacacaaattcnagatgtcgatgatgggggagttggagtactttctacgatttcaagttaagcaactt

SEQ ID NO: 5891 - DNA, 244 bp, Zea mays
  unsure (1)..(244): unsure at all n locations
cctaactgtggcagcngaacaacgaatatttcttattcttggttggaagctcaggcgaaagaacaccaacttctgggagcgcttttagctttttccgagcaaattacgccgtttgtctaactagagccgcaacttgaggttaagcagatcctcgccggcgcctgagggtgctgcgttagtgtccggtggggcagagacgcgggaggtccttcttcagttgagcatgtccacggtgccgtcgggc

SEQ ID NO: 5892 - DNA, 289 bp, Zea mays
catttgaagatagtgagtaccctaaccatgtttataggctctctaatgcgccttatgggctcaagcaagccccaagagcatggtatgaatgccttagagatttccttattgcaaatggcttcaaagtcggcaaggccgatcctactttattcactaaaactcttgacaatgatttgtttgtatgccaaatttatgatgatgatatcatatttgggtctactaaacaatctacatgtgaagaattaatatgatcatgacacacaaattcgagatgtctatgattggggag

SEQ ID NO: 5893 - DNA, 421 bp, Zea mays
  unsure (1)..(421): unsure at all n locations
agcttgataaaagtcttttcatccaagggcttggtgtatatatcggctaatcggntgtgggtgctaacataagcaatatcaatatcgcccttgttggtgatctctcaaaaagagataccggatgtctatgtgcttattgcggctgtgttcaacaagattatccgccatgcggattgcactctcattatcacataagagagggactttgctcaactttgtagccatattccctaacggtttgcctcatccagagtaattgtgcacaacactgtcctacagcattatactctgcttcggtggttgatataggtactgaatcttatttctttgaagcccaagacaccaaagatcttcctagaaactgacaaggccctgatgtgttcttcctatcacttttacattcagcataatcggcatcaga

SEQ ID NO: 5894 - DNA, 380 bp, Zea mays
agcttcagataacccttgttatccattatttctcttcatacatttatctccttggtggctggtagacagtaaaggaaatcatcttcgttattttctccgtatactaaagatcctcgaggatattttatgtccttcgcatagtgttgcgcttcggcaatttagacttccgataattggttccctgaagcatggcgaacaatgtgtccaaaattgcctccagaagaggcttcgaatatatgcgatgttagtttctccggaagaccttactttgcttgctccactggctaaatccccgaaggccggctttattgcatgcacgagaagcacttgcagcaactgctcctcccaactcttcaattttgttctcagaagccttagaa

SEQ ID NO: 5895 - DNA, 188 bp, Zea mays
  unsure (1)..(188): unsure at all n locations
agacatatntatgactacanatgtgatttttaagacacgatatgagcgcatgcgagcagggatcaagtngagctcatatacacacataacatcatgagaccgaaggtantngagntntcacatggacctattcgacccgattgcttacataagcatcgatgggagaaatactgctagtaatatggatg

SEQ ID NO: 5896 - DNA, 357 bp, Zea mays
tataaccttgcataattcttctgattcagctgccgcattgtttgagctgatacaggaaaccttgcggttttccggtaggcataattgtaacaaccgacgtttttatgaagcccatctcttctggcctctgtttgataatgcaattcatgaactcgacagaaactgccagcaaaaggctccactgcttggcttcggagggcccaaatataaacgcttagcctaacgatagcgttaggagttaactggtgaaggtagatgccaaacctcttcaatatctccgcaacaatctcgtgaacagggaatcttagcccagcctttataaagcttttgaagatgacaacctccttcttctctggc

SEQ ID NO: 5897 - DNA, 323 bp, Zea mays
  unsure (1)..(323): unsure at all n locations
tatataacttgaactacctgctctagtatattttgttttagatttagcctgatgcctatgacactttgactcacattttggctcgtagttgtgaaagaaattnatttgtnaacataatattacagaatttaaactaagttacttgctgtcctataaaaacaaatgacgtcacataaagtattaaggacgatatcctaataatggcttgatctggatacactggtactgacgagctcgatcctcctgattcacgtgctgtgaagtctgcccctctgctgtgctcnggattgtagtgcatgtggggggggagctagcaaaacctg

SEQ ID NO: 5898 - DNA, 398 bp, Zea mays
agcttactcacacacaagctccacgtcgtcatcatctccttaccttaccttacctgcttcctgcttaacgaacagaagagtctgccttatataagattgtagtaatgacggtgcgcgtatgttaccagaaacatctgtccaagttgattattggtcaacagtttcaatcgtaactgttacccaaaaaaaaagacctgctgctacccttgaagtacaattgcttctaatccaagagccagcagtgtttcgatttttcgttctgggctgggctgggcctgtgcggctggcgattcgcgagcgagtcgtctgttcggatcggaggctccaacgaatgggccgagaatttcgagtggcgagagtacgcggaacgaacgtgcgcgtgccgactattctcagtc

SEQ ID NO: 5899 - DNA, 243 bp, Zea mays
  unsure (1)..(243): unsure at all n locations
atatgataacatgatatgttgtagtgacaaatactcttgtttaaggttaaaaggaatgagatgctttcttctaaattatctgcttgtcatgaaactgtgtctaatgtaaagagtggtaatgatgatttaaatgctaagttagaagaagcacataagtctagttcacatgtagagcatgttgtcatttgtaataagtgtaaggattttgatgttgatgcatgtgttgacacnctacttctatac

SEQ ID NO: 5900 - DNA, 430 bp, Zea mays
agcttgtggcgccctcgggcgtcttgtcgcatccgatgtaccaagtcttccacttggaagcctcggggccaaacccttcaagcatggtagcgtcgcaaggactgctgataccgcgccgagtgtagtaaggtcacgtcttgagcctcttccagctggtccaacgagttttctcggttggtctggttgctttggtcgtcagaagcctttgtcctgtgggaaccatattctaagtccgtgggtaagatggcctcggccccatagactataaagaacggtgagaaactcgtggctcggctcgggcgtcgtctcagactccataccaccgagggtagttcctttatccatcgcttgccaaacttgctgaggtcgttggagattcttggctttagtcccttgaaaatcataccgttggcgcgctccacctacccat

SEQ ID NO: 5901 - DNA, 312 bp, Zea mays
tactggtaaagttggaattgaatttaattcctaatcagataattggtattaatcccacatccataaacaaaatatgaacgtgttctaatactatataattaaattacaaattggatggattttagcattttctatatttctggaatccaagccaaaaaaaaaaaggaaacagctcaatgtctaactggctggtcgcattatgcaagctccccttgtggttcaaaggcctacgttgatacgaacatatggctattctgctactacctacaaactcccagttattctccgccaatccacgcacaactggcactc

SEQ ID NO: 5902 - DNA, 437 bp, Zea mays
  unsure (1)..(437): unsure at all n locations
agctntgcttttgggtcttcggaagttgaatgctattgggatatataaggcggttctcaaaactgattcccaagttatttctggccatgttgacaaaagttgcaaggcaagagatccgaagcttgagaaatatttggatacagttcgaagacttgaagcttccttcgaagggttttctgtcaagaatattccacgaggagaaaatgaacacgctgatctactagccaagtcagcggcacaggggctgccattaccttcggaagtattctttgaaacaataaaagcaccttctggtgaccttcttgaaagagcagtgctcaatatatctcctggttatagcgaagattggagaactgagattatgtcctttcttcagggcaattctctttcagatgacgaagcttatcataagagaatactagcaagagcccgtccat

SEQ ID NO: 5903 - DNA, 382 bp, Zea mays
  unsure (1)..(382): unsure at all n locations
atatatttaaatgaaattaattgtttctatctacgtcttacataatgaaatcaactatgtacctatttaatcgcggttgattctttgcttccttgcgcgtantaaactcgagcacctgcttctatcgcgcgcacatacactcggccagacgctgtacaccctggctcctgtccttgaatggcatctcgtccccctagctatccttgcccccgcagcgggtccctaccactctcggtccagatctctccacgtcattgccgatcattcacccgccatcgactggtctggtgtctaccggcacaccatcaatttggctcgtcaaaaacgactatcttcattatcgttttgatcaactgcttaggtttttgtaccactttaatgg

SEQ ID NO: 5904 - DNA, 390 bp, Zea mays
agcttatttcttaaatatggtgaaatgacttcatttctcatgttagtactaattaactaattataaaaaatgaaatggtgatggatcaattcattctattccacaaccaaacaaaaaaatgataagggcatgttcggttgcaatgatttaattacactgggattgagtggatctcgccactgtctattgccactcaattctcttggaggattaatatgttgccactacgtaacaggatctttgcatccttccatgtgctgctcgcttgtgagacaaggaattctcacatgccggtggactcgtggtttatatcctggaccatggaggcagggaaaggtggtgtttgactatgatgaagtctacacagtgcttacatggtgtcatgaacat

SEQ ID NO: 5905 - DNA, 433 bp, Zea mays
  unsure (1)..(433): unsure at all n locations
agctttccagaatgttaaagagtgcattcatatgatttgtgaaactccagctatgtttgttttactgtggctgttcctgttaacctgacaaaaatgagtgggtctgttcactggtgggtttcatctantaaatggtcgaattggctcttcgaactatggagacttttgtagagggataaaagttcttacttccagcagaatttcataatttttggtttagtagttcgggagatatcgaattttaaagttaaccatactgctgtctaaaacagattcagtcagttatcttgtcagatgttctagaacttgtagatggcagaatttaattatctattgaatactgacagtgtagagtattttgtgtagatactcctagagtatctgtttgatatcaccgctcgttttaatttaaagatacaaaatttacacacag

SEQ ID NO: 5906 - DNA, 433 bp, Zea mays
agctttttcttatcggcatcaaccttgacatagaaccattccgatttccaccctgctgcccatttgcttcggtagttgatcacaggatacttcgtagttttccgataagcaaaattatagcaaccaaaattgtcatgtaatccatcctttctagcctttgtctgatagagcagttcgtgaactcggcaaaagctgtccgcaaacggttccaccgcctggcttcggagtgcccagatataaacactaagcctaacgatagcgttaggggtcagctggtgaaaatagattccgaacttcttcaatacctctgcaataatcccatgtagggggaatcttaacccagcctttatgaagctcttataaataacaatttcatctttctcccgctttggggtagtctcttctcccccgaagcgtaatagcttcttttgat

SEQ ID NO: 5907 - DNA, 245 bp, Zea mays
ttgttgggcttgttggtacggcgctatccattggactcatatggcgttgactctgcagagaatgtatttatgatatggaacctacaaatgcgactttttatgtagagatagcagacatttatgaatattatctgactcacgaagcttcaactgaggccactctggaacttattctaacaaataacatgtaatgccttacgggaaaaacaaaaaaaaaaatatgtaatgccttttctgaaaacgcc

SEQ ID NO: 5908 - DNA, 298 bp, Zea mays
aaaattcttggtttgggggatctagcttgctcgtgaatgaacttttaatttggtttcaacaagtgatcctcccttatagagagagcacaaaaaacttgagatgcgttgtgaatgcgtgtactacaaagtggtcttcttagttatcattagttgagttttgacaacatcataccactcttctttgtatggccatcatccccagcattcgggcgttgatgcaccaaaccctgatcataatgtttatctcaatagttcgcttcagggcaatctctgattcagcaactgagtaaacaacatc

SEQ ID NO: 5909 - DNA, 294 bp, Zea mays
gtacaaatagtatgggtacccttcgtttcaaataaaaaagattggaaacccataggagtcttttaagcacagtactacagtatgattagctgaatcttttaaacaccatgcattgttgaaagactgaaatttgacctgcctcatatttgcacatataactaaatatatgttggacatgttctaacaatctcgaacttaaatgcataaataaataggatataagtgagtccattcaataaaactattattaagtgccataattctgattctttggatgtgcttggatcatgcctg

SEQ ID NO: 5910 - DNA, 215 bp, Zea mays
caacgagcgtcacacatgccttatggaggagaagaatgtatgtaatcaaaacaatgtcacttatgattcttccagtgatgatgagtctagtgatgatgaaatagattactctagcttgttcaaggggatggatagaactaaagtagataaaattaatgaattgattgatgccttgaatgaaaaagatagactcttataaaaacaagaggatcttt

SEQ ID NO: 5911 - DNA, 251 bp, Zea mays
  unsure (1)..(251): unsure at all n locations
aacatgttcaaaagaagaaagaaaagatgcttcgttctatcttcngaggaaagattgatgaggccactgaggaaatgcgtcatctcacccaagatgaccaagaccgaaggcctcaatacagagagcttcgtcaagacaattcgcacaacgatgatgaatggtacgatgatttccatcatggtaatttcacttttgacgatgcttcttctctagcagcagagttacaggctaccccatggcccccatcatac

SEQ ID NO: 5912 - DNA, 480 bp, Zea mays
  unsure (1)..(480): unsure at all n locations
ttngatgataagcgccatttcctcattgtcgagcttggaggcgttgattggttgtctacttgatgtagactcctccttcttctccttcgttgccttgaatgccaccggntgtgcttcgggcgtggaggaggtaccttgctcgatgattttctttgagcctttaatcattagctcaaagctcacaaattttcctataacctcctcgggagacattagcttatatctangatcacctcgaattaattgaacttgcgtagggttaagaaatacgagggatctaagaataaccttgaccatctcatggtcatcccatttttcgctcccgaagttgcgcacttggttcaccaaagtcttcaagcaggtgtacatatgcttgtggatcctcaccttggtgaagcatgaagcgaaccgagctcccctcgatcgtctcccgcttggtgatctttgtcacctcgtcttcttcgtgcgcggtcttgagta

SEQ ID NO: 5913 - DNA, 442 bp, Zea mays
agctttccagaaaatcttagtttgaagttttggattaatatttgaagaggtatggttaaaacaagtaactggtgtgcttgtgtcctaaaaatctgcatgtgcgcaattgattggttaattcaccctatttggtaaaaatggttgggtaacacttaaagtaatggagacttggcatgactaaacttaataatgtacgtgtgtcagggttttgatgtctgctctaattcattgtgatataagagttccacaattattgatgcctatgtcgtattcaagcttacgttgtcttggttgggcttgtgtggttggtgatgcttgtgcgtgatcaataggaaaactaatgacaagccgtagcaaattaaataaatgttcatgcttgtgatgtcctgtttgtgttggttaattataggtagtaatcgtcatccttccagtggtattgatg

SEQ ID NO: 5914 - DNA, 391 bp, Zea mays
  unsure (1)..(391): unsure at all n locations
ccttaaatctcagctgaccagctcacgctactagaagctttgggcttgatcaacggaggggactggagagggtcgccacgcggtgctctcggcggactggcggtccgggaggtcgcggagcaatggtggctcggcgagtcggnaggtaccgagaggaacgngaaagaaccaacgctggacgggtttatggcgtgacgcggcggngcgccgtaaccgttggcgcaccggcacccggcgccgcgcgcgtcttggcagctagacgcgtaacactggccgtgtttgccggtcttgtctgtgacggcagcgtcaattgcctacgctgtgagactttctgcctaactcctgtatggagtcaaagaatgggctgtgagaaatggacccagctgttgca

SEQ ID NO: 5915 - DNA, 231 bp, Zea mays
tccttaccgtcaatacgatctgcaagtgctgagcattgctctcttcattcttggagtatattaagatatcgtcaatgaataccaccacaaatttgtcctactcgggcataaatattgagttcattagatatgtgaagtgggcaggagcatttgtctgtccggaagacataaccagatattcaaataacccataccgcgtggtgaatgcggtctttggtatatcttcgggtc

SEQ ID NO: 5916 - DNA, 386 bp, Zea mays
  unsure (1)..(386): unsure at all n locations
ntactcaacagcatactctgtgcacaagcaaccttcgntaganaacaccttcattgttaaagacaataaaaagttgaagaaaagtnttttacctttgaattggaatagaataaactactgacgatgtgttgtcgtcgttagcggctaatgtctgtctcaagcttcgggaaaccaatactctttgatagagtaccgataacctttgctccggtttgatctcggacgcagcctaacttttcatcgtcaacaccaccgaagagtagtgcccctggttgatatccgtaggatatgtcatattcttttaactcttctttctcagcctttgcaactcttgtcaactaagttttgaaattgaaaattcctcttctgaagcgcttcgtatttct

SEQ ID NO: 5917 - DNA, 307 bp, Zea mays
  unsure (1)..(307): unsure at all n locations
acgttcaattcgaaaaggatagaccttgtgcagcttgtcaagcacgtaaacaagtgggaggagcacatcacagcaagaatgtgatgaccacttcaagacccctggagctgctgcatatggacctcttcggacccgtcgcctatctgaacatatgagggagtaagtatggtctaattattggagaattttcccgcttcacttgggtgttcttnttgcaggataagtctgaaacccaagggaccctcaagcgcttcctcaggagagcttaaaatgagtttgagctcaaggtgaagaaaataggagcgac

SEQ ID NO: 5918 - DNA, 269 bp, Zea mays
  unsure (1)..(269): unsure at all n locations
tatgcttcattgggtccgctgataagttgataccaaagggagatgtatctttctcttccaagcattcacacacaaaaccagaggagtcgagaagattccacaaagttggttgtcatggttcaagaaaaaagtcgatattaaccttaacagagttgtagctcacatgtataggatctaanggcatgaatgtaattntatacgaagctgtatctcaccactataaataagagcacaatgccatgcatatggacacttttttagtcggtgaa

SEQ ID NO: 5919 - DNA, 423 bp, Zea mays
  unsure (1)..(423): unsure at all n locations
agctctggctgtcttatgcgggtagcaaatattaatntaattcctaaatntaacttggtcaacaagtctaagtgccatgtgtgtgttgaatcaaaacaacccgcaagcctcacaaggctgctgaggcgaggagtttggcacctctagaacttgttcattctgatctgtgcgagatgaatggaattctgaccaaaggtggtaaaagatactttctcacttatgatgactccactagattttggtatgtgtatctcttaaaaacaaaagatgaagcgttcaattattttaaggcctataaagctgaagtaagagaaccaacttgagaggaaaaataaacgtttaaggtccgaccgaggtagagaatatttctctaatgtgttcgatgagttctgcgtggaacatggtattattcatgagaggaca

SEQ ID NO: 5920 - DNA, 256 bp, Zea mays
  unsure (1)..(256): unsure at all n locations
atttttttttattccatcctctccagcggnacttttgttctgctaccaccttaaaccagctgcacccttacataataattcgaaacaatatagtatctcacgcaacggtctatcaagctatgaaatccgttatgtctccacccactctttaaaagaatctctttgcccatatctttaggaaggatgaccgatttcaatggcttgggccagagtgttggacaggaatatatgcacttttaaaaccactctcattgtc

SEQ ID NO: 5921 - DNA, 398 bp, Zea mays
agcttgcttcggtcgaggggtgcttcgtatcattattggagaaagcagcttctgcctgagccaagggtttaacatgctcacaacctgacttcttcaaaatagctgcaacttcccttgcaccagaaaaggcacagacgatcccgcggtcactcaaaatcttttcaaaggcttcgggctcagcgctgatccactcaattacgccctcaggatacacataaagatggcttcactcgagtatgcgcccacgttggcgaaactagtctctatttttctaacgcactccacagatatttcaaaacatctttcttatgatgagcgaagttctgcaactgttttttcacaatatcttttctagtaatcactggcatctcattcagcttcggcacaacgcattttaa

SEQ ID NO: 5922 - DNA, 479 bp, Zea mays
  unsure (1)..(479): unsure at all n locations
taacagaggacctatgcatcaatgtcgatagactcctatatcataatcaactacagcaagcaagcacattaatcatggaacacatgttaacctatgtttagccattacaagtatatgtccgctaagtgctaactaagcatttttagccaaaagggtgaactcaatcatcaaatgggcacttgcagatttttggggcagcaacacagcagctacttgttttaatcataacttntcaattattagtccataaatatcaaactatgactntctcgaaagcctaaaaagtgaactacaactctggtattgtcattacaacatgaataaacacttaacaaggtcaaaaggtgttaacacaaccgcgctgttcagattaggacagattcagacttgtgactttanaaatcataactgaagatcagacatccaacaaagtgatttagactttctgaaagatattaaatgtcctcaaattattataa

SEQ ID NO: 5923 - DNA, 437 bp, Zea mays
agcttatataaatagggtagtactccgagttagattcgttgtagacgactattccgtaggaaccgaacgggaccttatgacatatacaatctagatactatattacagttctccaagcactaaatatatctaagaaactttttcatacgacctaatatatttaaactttatattttattcattagaacctcttaagatatgacttattatggttgtataagtaaaatcgtttctagatctaaagaattgtgtaagagatattttttcactaaaatatgtctcttatatattttttttacatttatccttaatatctttaagatataaattatttagggtttttttgtttttaactcaatctatatggattgaatatgatttagtgagtttaaatctacggcaagttaaaatatatactaattcttaatttcatttaa

SEQ ID NO: 5924 - DNA, 455 bp, Zea mays
  unsure (1)..(455): unsure at all n locations
tatgaagattcttcatcccaacatgggctagtcggcggtgccatagccaacccatgttagtcttagcaatcaagcaagtgtcgagttcagctctatcaaaatccaccaagtatagctgaccctctaacactcccttgaatgctattgaatcatcacttcttctaaagacagtaacacctacatcagtaaatagacagttgtagcccatttggcataattgagatacggaaagcaaattgtaatctaaagaatcaacaagaaaaacattggaaatagaatggtcaggagatatagcaattttaccaagtcctttgaccaaaccttgatttccatccccgaatgtgattgctctttgnggatcttggtttttctcatatgaggagaacatccttntctcccctgtcatgtggttggtgcacncgctgtcgagtatccaactttgagccccggatgca

SEQ ID NO: 5925 - DNA, 439 bp, Zea mays
agcttatgaagattcttcatcccaacatgagctagtctgcggggccagagccaactcatgttagtcttagcaattaagcaagtgtcgagttcagctctatcaaaatctactacggatagctgaccctctaatactcccttgaatgctaatgaatcatcacttcttctaaagacagtaacacctatatctgtaaaagacagtgtagccatttgtattgagaaacagaaagcaaattgtaatctaaagaatctacaagaaaaacattggaaatagagtggtcaggagatatagcaattttacccaatcctttgaccaaaccttgatttccatccccgaatgtgatagctcgttggggatcttggtttttctcgtaagaggagagcatcttcttctcccctgtcatgtggtttgtgcacccgctatcgatgatccaacttga

SEQ ID NO: 5926 - DNA, 374 bp, Zea mays
tatgaagattcttcattccaacgtgggctagtcggcgatgccttatccaacccatgttagtcttagcaattaagcaagtgtcgagttcagctctattgaaatcaactaagtatagttgaccctctaacactcccttaaatgctactgaatcatcacttcttctaaagacagtaacacctatatccgtaaaaagacagttgtagcccaatttacataattgagaaactgaaagcaaattgtaatctaaatagtctacaagaaaaacattggaaatagaatggtcaggagatatagcaattttacccaatcctttgaccagaaccttgattccatcctcgaatgtgatagctcgttggggatcttggttttctcat

SEQ ID NO: 5927 - DNA, 393 bp, Zea mays
agcttctggaaccttctaaaaccttcttcaagctaacatagctaattatgagatatgcataaaataaggcaaggttctaaaatctcctacaacaatcatgataagccatgaagcttagatatttgtatagacctctcttgaatatggcaagatgtcactcatgcatggctcaaggagtcactcatgcatggctcatgtgtctatataaggaaaaggacccttgccatgatataccacacaaaacccattatatcacctcattccatacaaatctaagggcaaaatgtagtgatagagtgtatgagcccttgcgtaatcattaaaagagttcttggtttaagtctttcgctcgtgttggaatatttttatttacttagtgcataagatatgatg

SEQ ID NO: 5928 - DNA, 436 bp, Zea mays
agctctatcaaatggatgtgaagagtgccttcctcaatggaccaatcaaggagtaggtctatgttgagcaacctcccagctttgaagatagtgagtaccctaaccatgtttacaaactctctaaggcgcttcatgggctcaagcaagccccaagagcatggtatgaatgcctaagagattttcttgtcgctaatggcttcaaagtggaaagcgatcctactctattcactaaaactattgcaaaagatttgtttgtatgccaaatttatgttgatgatatcatatttgggtctactaacaaatccacttgtgaagaatttagtaggatcatgattcaaaaattcgagatgtctatgatgggggagttgaagtatttcttaagatttcaagtaaagcaactccaagagggcaccttcattagccaaatgaagtacat

SEQ ID NO: 5929 - DNA, 414 bp, Zea mays
  unsure (1)..(414): unsure at all n locations
ngaagccatggtaagtagcataggccaataatatacgaatcgtctcaagcctagctacgggtgcataggtttcaccgaaatccaaaccttcgacttgggagtatcccttggccacaagtcgggctttggtccttgttaccacaccatgctcgtcttgcttgttgcggaagacccanctggttcctacaacattttgattaggacgtggaaccaaatgtcatacctcattcctagtgaagttgttgagttcctcttgcatcgccaccacccaatccgaatcttgtagtgcttcctctaccctttgtggctcaatagaggaaacaaaagagtaatgctcacaaaaatgtgcaacacgagatctagtgatttaccccttataaatgtcgccgaggatggtgtcgatggggtgatctc

SEQ ID NO: 5930 - DNA, 345 bp, Zea mays
  unsure (1)..(345): unsure at all n locations
tctaaagggagagncacatttangattaacaaatgttcattntgagaaagacaggattngtagtgcatgccaagcagggaagcaaagtggtgcccatcatccacacaagaacatcatgacgaccgacatgccactggagctcctacacatggacctattcggcatgatagcttacataagcatcggcgggagtaagtactgtctagttattgtggatgattattctcgcttcacttgggtattctttttgcaggaaaaatctcatacccaagagacgttaaaaggattcttgagacgggctcaaaatgagttcggtttaaggatcaaaaagaatagaagcgacaa

SEQ ID NO: 5931 - DNA, 403 bp, Zea mays
  unsure (1)..(403): unsure at all n locations
ngactgtgacgacgatcatgacgaaggataagatgatcacgaagctatatgcataagagcttcggcatcacggcgggaaggggaaaccgacttaaagatgataagccaaactagacctcgaagaattactatagggttattgataaatgtaaagggcattattgtaattatgcatgggctgcgacccgtgcctataaataggtgaacagcatccctgtactgttcacgctgacttggcattcacttatgcgtcacgcctatattctattccttcaagccgaacgtacattagtaatttattcttgttcaaacaacgtatacatatagaaatagattaataattatggttataataattatgtcactctctatattttgtttgaatgttctcatattttatcat

SEQ ID NO: 5932 - DNA, 453 bp, Zea mays
  unsure (1)..(453): unsure at all n locations
ntatcanatggacgtgaaaagtgctttcctcaatggaccaatctatgtagatgtctatngtgagcaaccttccggctttgaagatagtaagtaccctaaccatgtctataagctctctaaggcgctttatgggctcaagcaagccccaagagcatggtatgaatgccttagagaattccttatcgctaatggcttcaaagtcggcaaggccgatcctactctattcactaaaactcttgacaatgatttgtttgtatgccaaatttatgttgatgatatcatatntgggtctactaacgaatctacttgtgaggaattagtangatcatgacacagaaattcgagatgtctatgatggnggagttaaagtatttcttatgatttcaagtgaagcaactcccagagggcaccttcctttaccaaacgaagtatactcaagatattctaagcaag

SEQ ID NO: 5933 - DNA, 221 bp, Zea mays
aatacgcggcggagaaccaagtcttccactgcaaaagatcggtgtcgtaccgctttatcgcggtagcgcctcaaggtctgttggtacctagccgactagatgacgacgttcaagtgttcctcttatagcacgtcaacctcctcaagtctagttgcttctaccttcgctatgctttcgaatgtcaacctgactgctccaaagatcaggtctgctagcaacac

SEQ ID NO: 5934 - DNA, 443 bp, Zea mays
  unsure (1)..(443): unsure at all n locations
tgtatgatgtacgagagtatgcgtcatgcangcattgntccagatggaatagtgtgttgcattttggacattggcaatgacaggggtggacattggcaatgacaggggtgattgtgatgtttctcataatgcgaagggtgtaacataattacataattttcacagagatttattaacttgatgaagggacttctctatgatggctgaatggctatgagctctccagtgcaggacacactgtttgctccatttgtttcctccacttccacactgccatcatatggacaaggaatgcaaagcagtaacctgaaatgtggcagttaaatccgtggacaactaccaatggtgtgaccgatacangttagcctttgtattgtgcaaataatcatataagaagtctgcattttgaaaatgctccttttgttcaaagtgttacatcaaca

SEQ ID NO: 5935 - DNA, 405 bp, Zea mays
  unsure (1)..(405): unsure at all n locations
actcggatttattggcagccatcggggaattgaagctaatccggaaaagattgaagctatcattaaaatggaagcttcacgatcacaaaagaaggttcaacgacttaccggatgtatggcagccctgagtagatttatatccacgctgggagaaaaagggttaccattntacagcctcaagaaggtggacaagtttcagtggacttcagaagcacaggaagccctagatgcactgaaaaaattcttgacaaccccaccagtgttgaaaccaccacggtgagccacatcgactcaaccagctgaagatctgctgtggtatatctcttgcacgactcacgtggtaagcaccgcgttggtagtcgagcgagcagaagaaggacatgcctacccagtgcaacaccctgt

SEQ ID NO: 5936 - DNA, 303 bp, Zea mays
  unsure (1)..(303): unsure at all n locations
tccatcggtaccgccgtagactggtgaanaccagctgcaagtccttaatgaagttttccgagttctccgttttgattaccacatcatctacgtaggcttccacacgcttgccccagtgatcggctaagcatgtttgaatgactctctgataagtcgctccagcgtttttgaggccaaacggcatggaggtataacagaaagcaccacacggagtgatgaacgctgttttttcctcgtcttcctttgccaaactaatctgatggtatccggaatagcaatccaggaaagacatcacagaacacc

SEQ ID NO: 5937 - DNA, 364 bp, Zea mays
  unsure (1)..(364): unsure at all n locations
aatgcttgagatatttataacatgctttcataagtgcataaaatgtcatgaacatcacacttatactatgacacaatgcactttacactccttatgatatagacatggtctcattaacctaattatgtgcacttggatagaccaaaaaatttgttttcctctctatgcacatatttagggggagcaatctatattgtatagaattgtttaagcttaattgacatatcctttttaatcatgtctctttcctttggtacattngcatatttcttatcttcattgtgtgccaaggctaagactaatatgttttcatgagcatctcatgtattaagtcttacattgaaagggaaatagagtattcggc

SEQ ID NO: 5938 - DNA, 480 bp, Zea mays
  unsure (1)..(480): unsure at all n locations
acacattaatactcagcctatgaagaatcttcattccaacatgggctagtcggccgtgccatagcccacccatggtagtcttaacaattaagcaaagtgtcgagttcaactctatcaaaatctaccaagtatagttgaccctctaacactcccttaaatgctattgaatcatcactccttctaaagacagggacacctacatcagtaaatagacagctgtagcccatttgacataattgcgaaacgggaagcaaattgtaatctaatgaatcaacaagaanaacagtgtcgagttcagctctatcanaatctaccaagtatagctgaccctctaacactcccttanatgctattgaatcatcacttcttctaaagacagtgacacctacatcagtaaatagacagttgtagcccatttgacataattgcgaaacggaaagcanattgtatctaatgaatcacaagaaaaacatggaaatg

SEQ ID NO: 5939 - DNA, 357 bp, Zea mays
  unsure (1)..(357): unsure at all n locations
agcttaatgcccctaagaaattgtctaactttgtttatggcaaagctcccatggttcaggataacgagggctatattttatatcctgctggttatcccgaacataagattaggagaattcattctaggaagtctcactctggctctcatcatgcttttatgtataagagtgaggcatctagttctaggcaatctactcatgttaaattgcctaaaagaatcctattgcatcaaatgatccaaatgtttcatttaagactgttgatgcttcttatgtgctcactaacaaatcangcaaagtagttgccaaatatgttgggggcaaacacaaggggtcaaagacttgtgtttgggtacc

SEQ ID NO: 5940 - DNA, 359 bp, Zea mays
  unsure (1)..(359): unsure at all n locations
tcacgagagagggacgggtcccaggtctcttgagaagtctagtgttgcagagtggagttcgatgnttgagtgagttcgtctccgtcgtccttgccgccttcgncttctncgggaaggccctgnngcatccattttatagatacaaagggatggtccagctgtacatatggnggtgtagctatgtgctaacgtggccggccgagaagtgcttgagccctgtagaaacgtagctggcggtgcggccctgggtcctgctgacgtttctttgccttcgtagagagcttgagaacaatcgacgtcatggacgcatgcanggaatcatcatttacctgtgccngagtaatctagatgtgacaccg

SEQ ID NO: 5941 - DNA, 442 bp, Zea mays
  unsure (1)..(442): unsure at all n locations
agcttgtanggttcaacacaagtgtttaagtgtgatggtccaaaagccaaagatggaggcaagaagagctnttaggtaccgagtgcatgggagaagatccaaaaggccgaggtaccaaaagccaagggtgaagaagaaaacttgcaaagtcaaggttgatcgagttgagaagagttgtggtgcatcgaggatcacgacttatggacatgataaccaaccaggtaatacatatggttatgtggtgtaagtcataaggctcaagatcaagctcaagaagtgaacaaggtcactagaaggagtagtgtcaaagacagaacctagaagcaaccaaatgtggcgcaaccgcccagattattccaacttaagtgcccaagtcccgccttagaggcaatgacacacttaaatcggaataaaccgtcagtccctcggatctagtccgata

SEQ ID NO: 5942 - DNA, 364 bp, Zea mays
  unsure (1)..(364): unsure at all n locations
tgtgaaccacattaattntactctatgccgctggagaaatgttgtatagctcaccggagcggacggagagagcggcggtgccggcttgattgagcttggcggaggggtgaggggtggctgatgccggtgtgaggagaggtggatcttgtgcggtcccttttataggcgctcggggagggaagtggccatcgccaacgggcaccggtgatgtgcgcatcggcggcgatagtggcgcacagcgccggtgatgataccgctcagggcaggctaccgtgtgagggtgctagcgaagtgcacaatgtggcgaagcggtgcctaactccactggagcacgagtaatggcggagatagacatggagggtgg

SEQ ID NO: 5943 - DNA, 407 bp, Zea mays
agcttgatatggataaggtatgatctctacggtgattaagactcgattaaggctgggctccttaagtttggtgccttcttctcaaactaaaccatatgtgataacatgttacagatgtaggtactgaggagaaaccctgagtaacacctgcggtgaacagccctccctctaaaagaatctcgccccgagattcaagtcgaggtcgtcaggtgacgaaggcgggtacatcttgcttgcatagtattggttaactctttaagggtcacgagaaaaatctgctcttcgaatgtgatcctctttgcaacttcagaaggaagcccttttcacatagtttcatatcttaatttggttttcattaaaagcaactttcctatatttggaatcagagggcaggggggctggtgcat

SEQ ID NO: 5944 - DNA, 374 bp, Zea mays
  unsure (1)..(374): unsure at all n locations
ntatcacatggacatgaaaagtgccttcctcaatggaccaatcaatgaagaggtctatgttgagcaacctcccggctgtgaagataatgagtaccctaaccatgtttataaactctctaaggcgctttatgggctcaagcaagccccaagagcatggtatgaatgccttaaggattttcttttagataatggcttcaaagtcggaaaggccgatcctactttatttactaaaactcttgagaatgacttgtttgtatgccaaatttatgttgatgatattatatttgggtctactaacgagtctacgtgtgaagaatttagtangagcatgacacaaaaattcgagatgtctatgatgtgggagttgaagtatt

SEQ ID NO: 5945 - DNA, 416 bp, Zea mays
agcttgtgaaggttcttcatccccacatgtgcttttcggcgatgccacagccatcccatgctagtcttaactattaagcatgcatctaaaccggcctcttcttttgcaaaatcaactaaagaaaagttgccgtctaatacacccttaaaagctagtgaaccatcactttttctaaagacagacacatctacattcgtaaatagacaggtatacccatgcataattgactaacagatagcaaattatatccaagagactctactaaaaacacatttgaaatagagtgctcattagaaattgcaattttacctaacccttttaccttgccttgattcccatcaccgaatataattgaatcttgtgaatccttattcttgacgtaagaggtgaacatcttcttctcccccgtcatatgg

SEQ ID NO: 5946 - DNA, 398 bp, Zea mays
  unsure (1)..(398): unsure at all n locations
ntatcaaatggacgtgaagagtgccttcctcaatggaccaatctttgaagaggtctatgttgagcaacctcccggctttgaagacagtgagtatcctaaccatgtctataagctctctatggcgctttatgggctcaagcaagccccaagagcatggtatgaatgccttagagatntccttattgcaaatggcttcaaagttggaaaggccgatcctactttattcactanaactcttaacaatgatntgtttgtatgccaaatttacgttgatgaatatcatattgggtctactaacgaatctacttgtgaaagaattagtatgatcatgacacaaaaattcgagatgtctatgatgggggagttgaagtatttctatgattccagtcaagcaactc

SEQ ID NO: 5947 - DNA, 424 bp, Zea mays
  unsure (1)..(424): unsure at all n locations
agcttgatgttaagaaagacatcagcttcttccatatctatcattccgaaagtgctcgatagaagatttttaacttcctcgatcacagtgagattttatccaaagatcaggatgtcatcaacataaaggctcagcataacagacatcacccccaccataccgatagtatacgcacgtgtcagattcatttacagcacaaccaacagttgtaagataacacaacttttcatgccattgcttaagagcttgttttaggccatacaatgattntatcaacctgcacaccttgttctcttgaccatccacaatgaacccttctggctgatccatgtatatctcctcatccaactctccatttaggaaagctgtcttaacatccatctgatgaatgataagactataagaggctaccatggctattaat

SEQ ID NO: 5948 - DNA, 290 bp, Zea mays
  unsure (1)..(290): unsure at all n locations
tgaaacattattaatatcaaaagttcaacatgtataacatcctcctcctagaaatatgcataaaagagatgaatacttttttaacctatgcacttggacttgtgagaccctangatggttttctattaattgaaccttggtataagcaaaatataaacaagtatgaaattgtaccaattgaaagaacatgatcaaaggtatagcagaataagcaatgcgtgcaatatttaaatccatgctgtgagaatcaagaatanttaactcactcctaagctcatgaaaaattttct

SEQ ID NO: 5949 - DNA, 481 bp, Zea mays
  unsure (1)..(481): unsure at all n locations
nggtaganaagaaaaaaagaaaactgtgaacagttctgggttgtaactggcccaatacggcccacgtctatgcgaaatgtgccgcgcgcgctcgtgatggtggttttgcagaaatgcccctattggtttgaataactcgaaaagggtcacggagctattcccgtgtctcactgacacttgcaaaaacacccccgcgcttctattccttcacaacccgaagtccacgatgtcgcaggcggagaaccgagctccggcgagctcataccggccggatcactcaactaccggtgctctaattcggctgagacctaatctagcccttaacaagtgtttccccttgcttaattgctggattggagttctacatcaccctgtccacggtgacagcgggcacaacggacagcacgacgtgttcctggcgatctaaggggcctagcctaatcggctgggtcggngagcatcatggacacgcaaggacact

SEQ ID NO: 5950 - DNA, 227 bp, Zea mays
  unsure (1)..(227): unsure at all n locations
tcacttcattgcgtcttgtcacaagacaangatgaangaatgaggagatgctttggatgcaacgataaggaccatatgatcacttcatgtccgctcatgaagaatcaaagacgtgcacccttcaagatgaccctcactaagcaaaaagacaaacaacaagtgtcaaatcaggttgagcgacgcttctactacatgtgtggtgagcatggtcatctacctaaggtatg

SEQ ID NO: 5951 - DNA, 183 bp, Zea mays
tctaaagggagaacatgtgatagggttgactaacgtgaaattcgaaaaagatagaccttgtgcaacttgtcaagcaggtaaacaagtgggaggagcacatcacagcaagaatgtgatgaccacttcaagacctctggagctgctgcatatggacctctttggacccgtcgcctatctgagcat

SEQ ID NO: 5952 - DNA, 164 bp, Zea mays
tgactcctttcgccttgagacaccggaatgtcacttcaaggtcggagaggaggtcggaagccttccttgtcttgactacgatgtcatcgacgtaggcctcgactgtgcgaccgatgtgttcgccgaacacatggttcatgcaccgcttgtacgtcgtgcccgca

SEQ ID NO: 5953 - DNA, 246 bp, Zea mays
  unsure (1)..(246): unsure at all n locations
tttaccctttttttttctttccttaccaacacccttaacatctacacaatttacacacaatagttagtataaatgattcaattataaaataaatttaagacaggtgtatggcatanattacagtaataaacatacataaattgtagtaataaaaaatcgtcagcatcagaatcctcttccctcacacatgcattaatgagtccttcaagaagtcttgntgacttttgacgtgcattaagtttaagt

SEQ ID NO: 5954 - DNA, 416 bp, Zea mays
  unsure (1)..(416): unsure at all n locations
ggaatggagtaaaccctggtgatcttgagacgatagtgttatgattctctactcagtttaccaactcatctggccactttccttttggcagattgaagattgacttcattattcctgctataatgattacgttagttcgttttaccaatccatttgattctagatgcctcacagatgcaaaatgcatttttgtaccaatttggtcacaaaaagttttgaatgtttcagcatcaaactgagttccgntatcaaccgtgatagccttcggcacaccaaaccgacaaacattattctgncagaagatcttctataccgtgaccgaagtgattttagctaggggtctagcttcgatccactttgataagtactccaccactaccacaacatatttcaagtttccttgcgctggtggaagt

SEQ ID NO: 5955 - DNA, 439 bp, Zea mays
agcttctaatgttctatatttttagatgggtcgtaacaaaaaatcaacgctgacccaagggtctacagcagcaggtaaatatttgcttctaatggaactaactattatttttgaaccttggaatcctactttggataatttcttcaactataagtggggattaatcataaccacagattaaaggcacataacttctaagggaaactaaggaagggtagcaaaaccatatcagacctctctctgcctatccatatatctgtaagacattgggcaaatgtgcaatttgagtaatgggctcacagcatgattcatttgtccatcataatagaatagaatagaatcacagttttgggcttccactagcatgctccactggatgggatctaaagcctgttaacttgactagtattcctgctcaagaaaatgcatttgcacttca

SEQ ID NO: 5956 - DNA, 432 bp, Zea mays
  unsure (1)..(432): unsure at all n locations
cttgagtgaatcgaaagctgctgcctgttcgggccctagacaaagttatttgctcccctcacggtcttcaagaaaggtatgcttcactctgtagatcgcgaaatgaacctgtttaatgctgacagccttctagtgagccattgatgtcttttgctgattgcagaggctgcatatcaattattgccttgaccttggtggggttggccttgatacctttgtgggatacaaggtagcctatgatttagccttagtgaacgctgaagacacacttttctggatttaggcaaacccttgcttcgcgcattcttgcaaacgtttcgatgagttcagcgatgaggtcttcctcgtttttgcttgcgatgacaattntgtcgacgtaagtgaaaacattgcgacccagctgctcttcaagtactgactntgttatgcatg

SEQ ID NO: 5957 - DNA, 119 bp, Zea mays
tagattacatagagcacttgctcacgttctattctcgcggagtgtttcttcacttaacagagatattaactcgaagcatctcttgatgatatgagctaagaacactgcgagagaactta

SEQ ID NO: 5958 - DNA, 441 bp, Zea mays
  unsure (1)..(441): unsure at all n locations
agctntatcaaatggacgtgaaaagtgcttttctcaatggaccaatcaaggaagaggtctatgttgagcaacctcccggctttgaagacagtgagtatcctaaccatgtctataagctctctaaggcgctttatgggctcaagcaagccccaagagcatggtatgaatgccttagagatttccttatcgctaatggcttcaaagtcggcaaggcggacactctattcactaaaactcttgacaatgatttgtttgtatgccaaatttatgttgatgatatcatatttgggtctactaacgaatctacttgtgagggaattagtaggatcatgacacaaaagttcgagatgtctatgatgggggagttgaagtacttcttatgatttcaagtgaagcaactccaagaggggcaccttctaagccaaacgaagtatactcaag

SEQ ID NO: 5959 - DNA, 160 bp, Zea mays
actaagctattgtatgagcagctactcattgtaggtggaagtaagcaaactggcacaagaacgggagtggagcaccatggatgcaacatgactactacagtagtcgtctatcgtatgaccataagcttgaaatatatttcttagaaaccattaaagacat

SEQ ID NO: 5960 - DNA, 376 bp, Zea mays
  unsure (1)..(376): unsure at all n locations
gcttcgcgagagagggtttggccttaaagtgagtcgtctgagttagcctccttcgcctctcttgggaaggccctgngcatccccttntatagatacaaggggatggtccaactgtacatatgggggtgtagctatgtgctaacgtggctggcaaagaagtgcttgagcccttgtaaagcgtaactggcagtgcggccctgggtcctgctgacgtttgccttcgtagagagctgagaacaatcgacgtcatggacgcatgcagggaaccatcattacctgttgccggagtaatctagatgtgacatcggtcttgttccttcatagcctgaggcggctagctaggggtagggtaatgatgtatcccttgagcgaatcg

SEQ ID NO: 5961 - DNA, 53 bp, Zea mays
  unsure (1)..(53): unsure at all n locations
ctcagctgagagatttntcacgncaagctcgtacgaaaacgatctgcgccgcg

SEQ ID NO: 5962 - DNA, 438 bp, Zea mays
agcttctcaagcccggccgttcccaccaccactggtcagctccatacactcctcacgttcgggcacctccactatgacaaccctcatcccctcttatattcttattgtgcatgtggctgccccttcgacgcctagaacctgctcgctcaaatgccccaaccggccctagtttctatctcaacaccctctatgttgtgtgatattgtgagatagcggatcacgctcggtgctacttgagaaatataataactgaatatataaaagtgtgactacacatggttcattttataacaacctaggagtttttgccaaatggtttttaaatggctttggcttctctagtaaaactgtttgcatggaaaaatcagagctaaagctatttcaaaaaggcaaatccctgccaaagggagcctatatatggaagaggagatgaacaaa

SEQ ID NO: 5963 - DNA, 430 bp, Zea mays
  unsure (1)..(430): unsure at all n locations
taactgcggacagcgcaagcgcaagcacaagctagtcttacctattggatgntcgatgatgcgtaatcaagaaccctataaccgtcagtcctcgcaaatcaagaaccctagcagtggcacataaggtaaaataaagggaaagctagaggagggtgacgtgactaccggcgagaagatagccaccggaggcgaactggaggccaccatgtcctatcgcagttggatttaaccggaggtgaagggccgcgcggaatggagactggaggctggaggcgacagaaccacacggaacgactgaacggtgtgcggatgatggtgggccggatccgtgttgcagctgccaccgccgctcgtgtatgcagcagccccagcccgccgtcgcgccgcttggctgtcgctatgacactcgtcgtcgtgttcctgcgggatt

SEQ ID NO: 5964 - DNA, 297 bp, Zea mays
  unsure (1)..(297): unsure at all n locations
agcttcacgcagacatgcaaggcgtgaataaacctgctaaacattgaacagccaacaaaatttccaccagcaagtcccatatatataattggggtcaatgcatcaacaccatgatcgcaaagaacagctgtacatatatcagacatgggcaatgccttctattgttcccaaatacatgggccaattgcatcataacagtgatcacaaagaacactgcatattatcaacatanataatggtttgtcttgctggccaaaaaggaagaccaatgccgccaccaccaaaaaaaaaatactc

SEQ ID NO: 5965 - DNA, 460 bp, Zea mays
tatcaacaatataagcacaaaagagagaaggctgcttcagcatatcagtcgaagcctatgctcctatgtgaagatatatcagatcaaagggtgttgctgggatctcggctatctgatgagccagacaagactctgctaagatttttgttcaacaataaagatgtcttcgcttggacaaccaatgatctctatggtgtcaacagagatgtcattgaacaaacacttaatgtggatccatctttcaagctaaggaagcaaagacttctgaagatgtctgaagataaaagctgaatgtgctcgaaacaaagtgaagagacttctcagtgctggtgttatcagagaagtaacatacccagaatggctagccaacactgttatggtgaagaaagctaatggaacatggataatgtgtattgattctacagatctcaacaaggcatgtccaaaggatgagttcaca

SEQ ID NO: 5966 - DNA, 450 bp, Zea mays
  unsure (1)..(450): unsure at all n locations
agcttctaaagggagaacacattttgggactatctaatgttcactttgagaaagacagagtttgtagcgcatgtcaagcagggaagcaagttggtacacaccatccacacaaaaacatcatgacaacagacatgcctctggaggtactccacatggatctattcggcccgatagcttacataagcatcggcgggagtaagtactgtctagtaattgggtattattctcgcttcacttgggtattctttttgtaggaaaaatctcaaacccaagagaccttaaagggattcttgagacaggctcaaaatgagttcggattaagaatcaagaagataagaagcgacaacgggacggagttcaagaactctcaaattgaaggctntcttgaggaagtgggcatcaagcatgagttctcttctccctacacacctcaacanaatggtgtagtgg

SEQ ID NO: 5967 - DNA, 308 bp, Zea mays
  unsure (1)..(308): unsure at all n locations
tctaaagggagagcacattntatgattaacaaatgttctatttgagaaagacaggatttgtagcgcatgccaggcagggaagcaagttggagcccatcatccacacaagaacatcatgacgaccgacaggccgcttgagctactccacatggatctattcggcccgattgcttacataagcatcggcgggaggtaagtatggcttggtattgtggatgattattctcgcttcacttgggtattctttntacaggaaaaatctcaaacccaagagaccttataaggattcttgagacgggctcaaaatg

SEQ ID NO: 5968 - DNA, 438 bp, Zea mays
  unsure (1)..(438): unsure at all n locations
agcttcggtattaccaaccgacttaaagatagaatgaccttttagcccataagggtctgagtcaatgttggtaacttttatgaggggcataattgtaattcttcacaggctgtgtcttgtgtctataaatactgaacattattcctttactgttcatgcattctggtaattgcaatcgcatctttcgggaaccaatctttgcaaggcaaagtactgtattcaatgattcaatatattaagtaaatataatataattcgtttatgattcatttacctttttatatcctttattttatgttatcttgtacaatctattaaaatttaattacgaagatttaaccttcgtaattatattctcatcaaccttcgtccaaggttcattatcctcaagggaataatgtttcatggatgaaggacgctaacatttaacatnttatg

SEQ ID NO: 5969 - DNA, 167 bp, Zea mays
tgcaccccgatacattggtcctttccttgttcttgaacaatgtggaccagtggcataccaactctagttacccgaaacattgtctgctgtgcataatgtgttccatgtgtctcaattgaagaagtgtcttttgggttccgatcgaaccattgaaggtacagatgttg

SEQ ID NO: 5970 - DNA, 433 bp, Zea mays
agcttatcaagttatgaggtgtctagaactgttgaacataatcctttaaagaaagaagctaaatctacaactattttcatgacatctttgctgggataacaagaacgtagtgcgataggaagaatttcctcaattagtacatggcaatcatgacttttaaggccagataacttgcactccttaacatccacacatctagatagattgacaaaccatcgggtgtcctaagattttgaataacagagcaaagaatctccttttgatctctagacatggtaaagggtgcatcatgcattactttgtttcctttgttatccaattgtggatgtagttcaggtcgaattccgagctcctccaagtcaagccttgcttttagattgtcctttgttttaccacttacatttagtaatgtcccaacaaaattatcgcatac

SEQ ID NO: 5971 - DNA, 433 bp, Zea mays
  unsure (1)..(433): unsure at all n locations
ngccttcacctcagtctatcacccgcagtccaacggagttgtggaacgcgccaatggaaaaatcttcacagctgtcaaaaagatgctcctcgacgaaaaaagggcaggtggaccgatctgttacccgaggcggtctgggcgctaaacacgattgagtgcagggcgaccgggttcactcctttccgccttttatatggatcggaggccatgaccccacacgaaataaaacatgggtccccgcgaacagttccgtcagccgtccccgacgtggacgagcccacttcgaaggatctcatcgatggagaccgagtcttcgccctacaggctctaaataaataccaagcccagacaaaagcatggcgcgaccacgcagtcatcccgagggaattcagcgaaggggacctcgtactcgtccgaacagctcggacagagt

SEQ ID NO: 5972 - DNA, 194 bp, Zea mays
  unsure (1)..(194): unsure at all n locations
gaacatttttgtgatgtaatatgcatacaagttgaacattgtatgtctatgtgtatattaatggaatatatttctttgcgatgcatgaaatttgcgtacataccattnttgagccttctgcgaaaaaacatcttcccttcttttcatgcttcgtaaagaaaaaacccttctttagcanagctgttatatgatgt

SEQ ID NO: 5973 - DNA, 203 bp, Zea mays
atggtgtatttactggctggtcctccttaataatacatgcccgcacgcacctactgcatcactttgctaccctgacttacttcgcaaccagtcctataatgtattgaataaaccaataaataatcgtatgaacaatatctaattgcatatcctcttatatgcctacagatttctctactgtcaaacaaatccagctagcttag

SEQ ID NO: 5974 - DNA, 437 bp, Zea mays
  unsure (1)..(437): unsure at all n locations
agcttgtgagagcaagttaattctaaaattaattattttctgtggatgcatgaccatattaagtttccttatgctactataatatcacacaaggacagtggaacatcattttccatttttatatccatatattatttataaatcatttaaaactactcaaggtgcattaaacaagctaaatcactaacttaaccatacatgcaccacaattcatgaaattacagtcaccaagcatcacacagagggtctactgtaaaaatttcaatccattttaagcaatcgagctacagatccaaaaataacaatcaaaacaatcatctttttcctatttaacatngttcaattaacacaccaagaaaacagtgaacaacctataaagtttatantttccctatatggagtatgacaacatctaactaacaaaacangnttcatca

SEQ ID NO: 5975 - DNA, 284 bp, Zea mays
  unsure (1)..(284): unsure at all n locations
tctcatgtccggaataatctacggtattccggacaatcgacttataattgatagagatggacttatgcacctgagaattaatcaactaggcaaactagttagtccataagaattgtgatggtcgtcaagcaccaaaatcaaatatagaaaatggttaaggtcgcttccctttaaaatttcccacanagtgtgatatgggagtgtctctatgtcnaatgcatggtgtaatgggcgaatgttctgtcgaacggtggttggcatgattcttaagagcaatgcatggt

SEQ ID NO: 5976 - DNA, 409 bp, Zea mays
  unsure (1)..(409): unsure at all n locations
cagcttcaattcatgcccctcggttattggtcacaaccaacatatctcatctatacaggcaggtcaatttggatggcagaataccatttacaggggtggcttttttttataacacacgactgaggtaaaatcctatgtgccggtgaccagatacacgagcccacatattaaaaatcaccgtggtccggtgacatgatacacgagccacataattaaataccaaataaatggggaaatgctgtgcactaatactgatagcctattctggtttcaaaaaaaaccccgatagtctatgagtcagtgatagggcagcatagcacattatcaccctatttcagatattgacatgcacaagccatccgcagntgatgccctcttgatgttntctattgtcataagtcaatctctg

SEQ ID NO: 5977 - DNA, 503 bp, Zea mays
  unsure (1)..(503): unsure at all n locations
tataaaactcagcttctaagggagaacacgtgataggttngactaacgtgcatttctaanaagatagaccttgtgcagcttgtcaagcaggtaaacaagtgggaggagcgcatcacagcaagaatgtgatgaccacttcaagacccctggagctgctgcatatggacctcttcggacctgtcgcctatctcagcataggagggagtaagtatgggttagttattggtgatgacttttcccgcttcacttgggtgttctttttgcaggataagtctgaaacccaagggaccctcaagcgcttcctcaggagagctcanaatgagtntgagctcaaggtgaagaagataaggagcgacaacgggtccgaattcaagaaccttcaagtggaggaaattcttgaggaggaanggatcaagcacgagttcttcgctccctacacaccacagcaaaatggtgtggtagagaggaagaacaggacgttaatcgatatggcgaggacaatg

SEQ ID NO: 5978 - DNA, 455 bp, Zea mays
  unsure (1)..(455): unsure at all n locations
gatcttaagtcacctgcggcatgaagcttctaagggagaacacgtgataggtttaactaatgttcaattcgaaaaagataaaccctgtgcagcttgtcaagcagggaaacaggtgggaggctctcatcacaccaaaaatgggatgacgacatcaagaaccttggagatgctgcatatggacctttttggacccgtcgcctatctgagcataggaggaaagtagtatgggttaattattggtgacttttcccgcttcacttgggtgttctttttacaggaaaagtccgaaacccaagggaccctcaaacgcttcctcaggagagctcaaaacgagtttgagctcaaagtgaagaanataaggagcgacaacggatccgagttcaagaaaccttcagtggaggagttccttgaagaggaaggaatcaagcacgagttctccgctccctacacaccac

SEQ ID NO: 5979 - DNA, 479 bp, Zea mays
  unsure (1)..(479): unsure at all n locations
ntaatgcacaatntctcccnctttgtcataaatctccaaaaaggatacaaaggatataaagggaagaanatttgattaagcaatatttaaacacactatcatgaaaagggtccttagatggcacaaagataatgtagaggtgacatgaagtgatgtacctttgcattntaccttttcaagggagttccaaacttgtgttggatttacaattcatttgcaagctcttgttggcatagttgtgacatatgtccaagatattaaatgaatattgtcataataaatcaaaggtgaaacttgatacctagagtctagatgtcacctagcattttcttatcacaacaagaggcaacatgaaaactgcacaagtatggattatgcaactagtgatcatgtatgaaaaatatcaattganaaacaccaattgatacaatttgatagataaatagatcactaatagcatattacactaagttcttctc

SEQ ID NO: 5980 - DNA, 398 bp, Zea mays
  unsure (1)..(398): unsure at all n locations
agctnggacagttcttctaggttctcttcaacactaatgaaatcagatccgcgaatccaatcatttgtacagataaggcgctcaaccattgctggggtgagtgaactcctaaactcatctagtgttctcccccctacgctaaaggctgactcagaagcaactgatgagataggaattgctaaaagatcacgggccatgcgagaacatattggcaacctagtactgtccttccaatacttaagaatatcaaaaccttttttgtcctcttcattgtcctctaaaagatatttatctaactcagacttgacagtactattgcaacacccattattgctcatctgttgagcaattatagacctcataaaccttttgttcaatgccggtttatcttgagaatc

SEQ ID NO: 5981 - DNA, 238 bp, Zea mays
  unsure (1)..(238): unsure at all n locations
ntgccaataggacgcataattatacctttgatgtcttctcgtcctgataagtcattcttcacataaaaccattctgtcatccaatccccgggccatctcttccgaaaggatggtacgggacagcttgccccggaccgagaaacgaagctgtagcagccaaaagtggtatgatactgttccttgccccaaggctttgtttcatataataattcatgaacattacagaaacttctcgcgt

SEQ ID NO: 5982 - DNA, 376 bp, Zea mays
ctcgaagcagccaaaagtctgcttattctgggtgcaccggactgtccggtggtgcaccggatagtgtccggtgcgccaggctggcatctacaaactaactgttctcgggacttcgacggcggtgtacgactataattcaccggactgtccggtggtgcaccggactgtccggtgagccaactgtcgacccggccaacggtcggccgctatcgggcgcgacgcgtggcagagccaacggtcagaagggggcaccggactgtgtccggtgcgccaacggctctaaaccgccaacggtcggcttcgccaaagaaggaaaggaatccgcaccggacagtgtccggtggtgcaccggactgttcggtgcgccaggcgacag

SEQ ID NO: 5983 - DNA, 387 bp, Zea mays
  unsure (1)..(387): unsure at all n locations
taagctctntgacaatggaattacttcatctagttttatcatatatgcaataatgcatgagtgaaatgttaagaggttaaactacgtatgaagcanggataaatgcaaaggacatgctntctcttccttttatacaagatatgtaaagaatgtataagaggaagaatttaggtacatatgtcaataataggaagtggatntaccctttttgtacctttgcatagagatgctctcttcattgtgccttggccttagtcctagatgcttaagacctataatgattatatgtggaaatactttgcacaagagagagttctacaactagtgatcttttttcaagtagtgttagcatatattcaattgatcacaagttgtataatgaatcat

SEQ ID NO: 5984 - DNA, 458 bp, Zea mays
  unsure (1)..(458): unsure at all n locations
tgtgatgntaccaactgagagagcacaagctctacttatgaatntgcatgaaatatcttaaaagagattgtattagtaacacaagcaatagtttcctatttagcaacctctagtatatgaatgacaagaaggttactaaaacaaggaaacctcatgatatgaactaaattacccttacaagcatcatgcataacatcaattgtaaaaaagatgaaagtagcatgaatatttatattaangttacatgacgagttaaattcatagcatggtgagtgattaatggagaagactcanaacccaattaacaagaatgaatactcacatagttatggttcgatcttctttgaatgttgaatggcacactccatttgtgaaacacattctcatggtgtgagactacataaacacttagatagaaacattagtctcacaactctagtcatatagagaaattccca

SEQ ID NO: 5985 - DNA, 436 bp, Zea mays
  unsure (1)..(436): unsure at all n locations
agctttctcaatctatcttggtgcttatcaaatatactttaacttatataattggctcaactcaaaattttaaacttttcattcccttttgcttattttcttgaatattgntcatggggttcacttagagttcttaattatggttgcacattcttatcttttcaaagactcaattgttttgatcatgacacttttaaccatatacttgggatctttatcacttaagttattttgatgctcatgcttactttggttcacataaaataatggttcttggtgtggctttttaagagaaaccctatgtgacactggggtgtcacaattgaactaataaattctcataagatgcgcatggattgatttctctatttttaacattntggaccacgctcgcaccacatgttttgtttttgcaaattcttttgtaaattctttt

SEQ ID NO: 5986 - DNA, 412 bp, Zea mays
  unsure (1)..(412): unsure at all n locations
ngctacgagntgatccttaagccaattttatntcactagttatgttattacctgaatctatatttgtctggtctagttcaagcacttggcctatactagctgcattttattcattctcatatttcacttgctaactacgatgatggtcacagggatgagtctccataaccaaggagcaacgacgattcgaaccgattatacccagctagggatctctaaccacacgacatatgtagcacttaacccttgcatatgtcaatcgttcccacagagtcctccactacatgaacaagtccgcgccacccgagagcacattaccctatcaggcgtgctactatgctangagggtacatgctactcccgccatctctctactcacagtgtgcgattgtctcttcacgtatggaatagt

SEQ ID NO: 5987 - DNA, 434 bp, Zea mays
  unsure (1)..(434): unsure at all n locations
agcttgcagactntggtttagccagtgcatttggaatttctgtccgtacatttactcatgaggtacatttgttatgctctaacttgagaaagggagtctgaattgtcctgttagggaaaaaaatattgtgagggatgccaaaggtatggattcccacaatgtttacccgaataacgtaaccttttgctgtatattctaggcacattaatcagacatatctatggaagtatttttcaggtagtgacattatggtacagagctccagaaattctgcttggagcgcggcagtattccacaccagttgatgtgtggtctgtgggctgtatctatgcggaaatggtgaaccaaaagccactattccctggcgattctgagatcgacgaactttttaagatattcaggttctatgattgtgctggcattaaatttcttat

SEQ ID NO: 5988 - DNA, 415 bp, Zea mays
  unsure (1)..(415): unsure at all n locations
taaacatttnctataatcaattntggtgtgtggcgtccatcacataccacgtggactaactagtttgcctagttgtcatttatttcacgtgcataaagttcaacataaaccaacaaagaaaataagttggggactcaataaagtttggagcaaagacaagctttggtgctgacagtggcgcaccgaacactgtccggtgcccaggccaagcacttcacgaactggccactctcggttntttccgagggatgctatgttataaatcaccggactatcttgtgtgcaccggacagtgtccgatgagccaacggagcaacggtcaaatgtgccaacggtcgactacgtgaacagtaaaaggcgcacaatgcagaagtcagaagtcggagcagcgaagtcagtacgcaccggacatgta

SEQ ID NO: 5989 - DNA, 438 bp, Zea mays
agcttgtgatagaaaacaataatgtgtccttctctattttattcagcaaaagaacaaacatattggtagaattataggcattttccgtatcattttgattccataaattaatattatgatgatgacatattgaagataatttaccatagagatcgggatctcaatcatatccataacaatatgaaacactgagacgcaaagcatatgaatcatatgcatataatacgataaacatataaactgactgagcacttgaaaataaacaaatataaacatcaacagcatgattgttaaattaaaacaaacagatataacacattgtaaggtaacagaacagatgagatatactctgtgctatacatgaaacagttcagatgcatatatataacatatataatctgtagaacgcactacagtaaggaattaaactgatcatac

SEQ ID NO: 5990 - DNA, 305 bp, Zea mays
tggactaggtcgtcccagttggagatctgccccggaggcaagtgctccaaccaggcgcgagcggtgtcggagaggaacaaggggaggttgcggatgatgaggttgtcatcgtccgttccacccagttggcaggccagacggtagtccgcgagccacagttccggtctcgtcttcctcgagtactttgtgatagtagtcggggatcggaaccaggtcaggaacgccgcccgtcgtattgcttggctaaaggcctgcggaccgggtggctcgggcgagggactctgatcctccccgctgtcgtagcg

SEQ ID NO: 5991 - DNA, 402 bp, Zea mays
agcttcatgatcggaatgaataacaaactcttttggccataagtagtgctgccatgtttcaagcgctcggaccaaagcatacaattctttgtcatacacagaataatttaattgagcacctcccaatttttcactaaaatatgctataggttttctttgttgcattaaaactcctcctatcccaatcccactagcatcacattctacttcaaattaaggcctgtttgttttcttggaaatgaaactcattccatgaataacattctagatattagattcctaaagaaagtaattccttagaatttgattcaattcaatttttttgtttggatgctaatggagatcttttccatgaatcacattcaatatcctggttggatagttatatatgggagttacata

SEQ ID NO: 5992 - DNA, 297 bp, Zea mays
  unsure (1)..(297): unsure at all n locations
tgctcaatgctctgctgtcccctgtattgctagcaccagtgaacccctctgtcatgcatgtcagttaggacgtcatgttcgtctaccctttcatacgtcttccaaatgtgctactcgcaattntcagttaactcattgtgagctttggacctctcatgtaacctgtaaccagtgtctcaggccataagtaatacatggctattntgatgattgctcgcactatctgtggactttcccttatgccttaaattgacacccttccacacttacctcgttttttgctatgtcacacaccgt

SEQ ID NO: 5993 - DNA, 431 bp, Zea mays
  unsure (1)..(431): unsure at all n locations
agcttgaaaaatatctggatacagttcgaagggtggaggcttctttcgaagtttttctgtcaagaatattacaagaggtgaaaatgagcatgcagatttgctggccaaatcggcggctcaggggctccctctaccttcgaaagaatnttttgaaacaataaaggcaccttcgattgaactcatggagagagcagtgcttactattttcgacatagtgaagattggaggactgaaattatatctttcctccaaggtaattgcctttcagatgacgaagcttataataagagaatggaggcaaggacaagaccgtatgtgataatagaagggaaattatataaacacggagtctgttctccacttctcaagtgtttatcaagagttgaaggtgttgaattaataaaggagatacacgcaggtctgtgtggatc

SEQ ID NO: 5994 - DNA, 482 bp, Zea mays
  unsure (1)..(482): unsure at all n locations
gggggtgggttgctnggtgcccgtggctgtaatggtgaccgctcctgtgatgaatctccacagggaacaccgcaattgctcaccagaacagtccattcgccgttggccgcgcgatgccatggccggggctctgcgctgcacgaatcaaggtaagaatacatccatggtgatcgccatgccgtgcccatcgtgttgctccgttcaatttgacaatggtgctcgggggaggctgatgggtgtcgcgcccgcgttctccgccgcggtgggcagcgccgccatgactagagcttgtgagggaagagagtgtgctgacctttgatcggagaatgtgtgcctccgatntaatcggagtcccccttcagcgctgtagaatcatggccatccgatcagaatgaacgaccctgattaagtggtgaatgcctttcgttagggtaaatccgagcccgtgatagatatcggatgaactagatctgatcgcaccc

SEQ ID NO: 5995 - DNA, 373 bp, Zea mays
  unsure (1)..(373): unsure at all n locations
ctactacatgtcatcctcaaactgatggtcaaactganagtgtgaatagaactttgtctactatgttaagggcagttctaaagaagaatattaagatgtgggaggactggttgcctcatattgaatttgcttataatcgatcattgcattctactacaaagatgtgcccatttcagattgtatatggtttgttacctcgtgctccatattaatgcctttgccatcttctgaaaaactaaattttgatgctactatgcgtgctgaattgatgttaaaactgcacgaaactactaaagaaaacatagagcgtatgaatgctagatataaagttgctagtgataaagggagaaaggaaaataaatttgaacctgga

SEQ ID NO: 5996 - DNA, 53 bp, Zea mays
  unsure (1)..(53): unsure at all n locations
atgttcggaaagaagcttcaattaattctgtntatttggcttcagcatccact

SEQ ID NO: 5997 - DNA, 379 bp, Zea mays
  unsure (1)..(379): unsure at all n locations
agcttatgaagattcttcattccaacatgggctattcttgggtgccagaaccacacccaagtagtcttaacaaccaagccagtgtcgagtttaactctatcaaaatctaccaagtataactgaccctctaacactcccttaaatgctattgaatcatcatttcttctaaagacagtaacacctacatcagtaaatagacagttgtagcccatttgactatgagaaacggaaagcaaattgtaatctaatgaatcaacaagaaaaacattggaaatggaatggtcaggtgaaatagcaattttacccaaacctttgaccaaaccttgatttccatccccgaatgtgatcgctctttggggatcttgngttttctcatatg

SEQ ID NO: 5998 - DNA, 431 bp, Zea mays
  unsure (1)..(431): unsure at all n locations
tattaaattcattntaactccaaattaatccatcctatgtggcaataatttgttttaatattgtctatcaactagtaacattggttagccatgaaacttagattaaaattgttcacttgaattagtctatgtgaagcattaaataacttcataaattcataacttataatatatatctcaagaataatgattcctattcctagaatcttattntaatgtgtagaatattactatgtattttggttacatggttggtgtgatngtaattntgcctacaccatgtttgtctattatggtacgtttagcagtgagggtacgagtcacctgaagagcaagttgtacctagaatctcaagcccaggcaagttgtgccttgatacttcttttacccactcatgtctgataatcatatgatctgatacgttaatttga

SEQ ID NO: 5999 - DNA, 274 bp, Zea mays
ctttataaacttcggcgccggccacggcgccggtttggttctaacgcggcggcatgcgaaggcgcgcgccgaacgtgctcttgcgccggcagaaggcgtcgaacacgtggcagtgaagttcttccaatgttcaaacgcttccagagatcgcaaacgtgcgaatctcgccatgaatccgacgcagacctcctcctagcacctagggctatctcacatgtgtgagttccaagggatgatacgccctagatagggagatagacgggcgccaaatctg

SEQ ID NO: 6000 - DNA, 430 bp, Zea mays
  unsure (1)..(430): unsure at all n locations
tgtcaatacttatcanaacaacagcatctataagcacaacaacttgtttacctaccttgtacatggccattcgcgtgctggggactagatatgattggacccttcaagaaagctcaaggaggatacactcatgtactagttgctattaacaaattcactaagtggatagagtacaagcccattgcttctctaactttagctaaggcagtggaattcatacaagacataatattcagatttggaataccgaacagcatcataaccgacctgngatccaatatcactagtttggagttctntgatttctgcaaacaaaaaagcattcagatcaaatatgcatcagtggcacacccaagagccaacgggcatgtagaaagagccaacggaatgatattggaagcactcanaaagaaagtcttcgacaagaatg

SEQ ID NO: 6001 - DNA, 434 bp, Zea mays
  unsure (1)..(434): unsure at all n locations
gcttattcaccgtattctcaatcgaagcatcgttttgctttagcttcgtcacaagagggagcttcggcaaagataaaaagtattcgacttcgcccaaacgcaagaaattcagcatcaaatggccagggtgcgctcgacagctagggtaacccgtgacggagaggagaccgaagctactgagactgccccagtctccgaaggtatgaaggcggtagtattgtgacagaaggcgcctctgacgaaggtgcgcctgctaccgaagccgagcaggcagatattgaagagggtgatactggtgaagaagagattgattataacaccactatgccatccaagcccagccatttggattttgggaagtcaactgtctccgaagctgatatgcccatgatgacgaagctaggctacttcggngaagtcgagaagaagctgat

SEQ ID NO: 6002 - DNA, 422 bp, Zea mays
  unsure (1)..(422): unsure at all n locations
ntggcatagtggcatgtctcaagacgaaagaatgcaccgacttatagatgaaatgaccgattgacccatgagagtctgtgtcatgattgttagcatttgtaaagggcatgaatgtaatctcacaggctgcatcctgtgcctataaatagatgaacagtacccctgtactgttcacgctgacttgcatttactcgcacgtcacactcaaattctcaccttctgtcaagccgaaggtataaatgtaattcaatattatccatgtntattcatgattatataataaaaatgtctgaatgatatcatatgattattcatgttttttatgtgtcatatgatcctgctttctattagttattgacatgatgaaagtacgcccttcatgaccttcgtctgaagatcattataccctacaggnataatgc

SEQ ID NO: 6003 - DNA, 434 bp, Zea mays
agcttaagatgtctggcccgaatgggatcatcatcgtcggatccacgtaccgccacgcgtacgaatgcgacatcgagtgcgtggagtacggcgaggctctcgcagagtccgaggccctcatcgctgacctggaacgcctctccaagaaggcgcccgacgcgaagtggcacaccgacaacttcgaaccagttgaggtagtcaagttcatctttctgccagcaacgacgccagcaagaaagtttggatcggctctaagctcgaccccaaataggaagcagtgctcatcgactttctccgtgcaaacgccgaagtctttgcgtggagtccctcggacatgcctggcataccgagggatgtcgccgagcactcactggacatcaaagctagagccctatccgtgaagaaaaccctatgccattttgacgaagaaaagc

SEQ ID NO: 6004 - DNA, 451 bp, Zea mays
tgcagttgcaacaagctaatgcgtggcaagaacaagagtctagatatgacccccacaaatatatagtatgagacgaagcaagtgactatagtggacttggttgggagtcgaaacaaactgacttaggatgtgcacaacatatgaaatgtcaagacgagtgacatatagataaacaagactccctataatatatcgattatgagtagggtcatcaagaggctcaccatcatcgatactaaggtgaagaatgagcttcatggggttttcatcgcttcggtggtcagtaatagcaacccgatgaagatcctaaatgtacttctcttaagatagataaagaccctcagacaaagaggaaacctctatctcacgaaagttatggagaggaccaagatcagacatgagaaattgctcactaaggtgtgccttaacaaacgtgacatactatggatca

SEQ ID NO: 6005 - DNA, 422 bp, Zea mays
tcttcacctaaaagaaagattatgaatgctcaccgcaaaggtatggaactaatcgcttcaattggtaattgatcaatagtagatcctttcaagtggcatactttcaattagtaataatctattttatgaaaagaaatgtcaatatgaaggttaaattccttctggattaaatttgtaaattggtgcatattgttaattacatacatgtgcattgacttaaaaggaatttaatttatgcctttacgcctcataaatgatgatttgtttgtcattcatatatagatataatcactcattaaatacttccttgtactactaatacctcttttcaaagtgctgtttgactagttttaaaaggaaaagagataacatgctaaagaatgaagtcttcacgagtgaagacaagaagaatacttagatga

SEQ ID NO: 6006 - DNA, 173 bp, Zea mays
tttctggcagattgctgacttccatgtatagcgatgggtcctcgatccgacagtatcttcatgctaagataggcaggatgaataattgcttctaaagcattgatggtgccacgacccaaaaatgcattgtaagggtatttcatatcaacaatgtcaaacacaacttgctcagt

SEQ ID NO: 6007 - DNA, 339 bp, Zea mays
  unsure (1)..(339): unsure at all n locations
gcttacaaatcaactctttgcgaggtgatgcttccctactattactacattacattactactactactatactacgctatactactctgcattactactatattattctaactacactatactaatatctaaagaccaggggcgtttagccactggccttgctgctgctgccaccgccaccgcctctggtgctgcccttgctgctgncgcttggctgcccttgctctcgtcgccgccgccgctgcccccgccgctgccgctgccgtcaccgtcgccaccgtcgtcgtcgtcgccgtcgtcgtcgtcgtccttgtcctcgttgccgtccgagtcctcctc

SEQ ID NO: 6008 - DNA, 491 bp, Zea mays
  unsure (1)..(491): unsure at all n locations
gcttctaagggagaacacgtgataggtctaaccaatgttcatttctaataagatagaccttgtgcagcttgtcaagcaggtaaacaagtgggaggctctcatcacaccaaatatgtgatgacatcatcaagacccctggagctgctacatatggacctcttctgacctgtcggctatctgagcataggaggaagtaaggatggtctagttattgttgatgacttttcccgcttcacttgggtgttctttttgcagaataagtctgaaactcaagggacctcaagcgctctctaaggagagctcanaatgagtntgagctcaaggtgaagaagataatgagcgacaacgggtgcgaattcaagaatcttcaagtggaggagttccttgatgaggaggggatcaagcacgagttctctcgctcctacacacctcagcaaaatggtgtggtagagaggaagaacatgacgtgtaacaccccaggttgttatatt

SEQ ID NO: 6009 - DNA, 396 bp, Zea mays
gtgcagcttgagccctccttttcttttcatggttttgttttatcttcttggtaagggggagtcgtcttcttcatctctccttatcctatgagaaggagagatccaaaggcaaaagcttctggcagacatggcgccctctcttcctcttctcctgccctgcgttccatcccttcttacgaatagctgagcccgtgccttgctgcctcgtgcgtaaaatgcgttcttgcacaatactgtcactaatcccttcatcgagctttgcctcgccatagacgaccatagatcttttttttttcttcttcgtcgctagttgaactgatgtagctaaccgtttcttgccatggtcttttttttttctctcttctgtttgcaggggttgtacacattctagatcta

SEQ ID NO: 6010 - DNA, 475 bp, Zea mays
  unsure (1)..(475): unsure at all n locations
tctaagggagaacacgtgataggtttgactaatgtgctatttctaaaagatagaccttgtgcagnctgtcaagcaggttaacaagtgggaggagcacatcacagcaagaatgtgatgaccacctcaagacctctagagctgctgcatatggacctcttctgacccgtcgcctatctgagcataggaggaaagaagtatggtctaattattgttgatgacttttcccgcttcacttgggtattctttttgcaggataagtctgaaacccaagggaccctcaagcgcttcctcatgagagctcataatgagtttgagctcaaagtaaagaagataaggagcgacaacgggtccgagttcaagaaccttcaagtggaggagttccttgaggaggaanggatcaagcacgagttcttcgctctctacacaccacacgcaaatggtgtggtagagaagaagaacagaacgctcatcgata

SEQ ID NO: 6011 - DNA, 443 bp, Zea mays
agcttctaaatggagaacacattgtgggactatcttatgttcattttgagaaagacagggtctgtaacgcatgtcaagcttggaagcatgttggtacccaccattcacacaagaacatcatgaccaccgactaatcgcttgagctacttcacatggatctattctgcccaatagcttatataagcatctgcgggaagaaacattgtcttgcaaatgggtaatattctcgcttcacttgtgtgttcgttttgcaggaaaaatcacaaacccaagagaccttaaaaggattctcgagatgggctcaaaatgagttccggttgaggatcaagaaaataagatgcgataactggacggaattcaagaactctctaatcgaatgctttcttgaagaagagggcatttagcattagttctctttctcctacacacctcaacacaatggt

SEQ ID NO: 6012 - DNA, 297 bp, Zea mays
  unsure (1)..(297): unsure at all n locations
tctccttgtcgtcatcaaccttgacatagaaccactctgacttcttttctgctgcccatttgcttcggtagctgaaacaggaaattttggtgtttccgataagcaaaattatagcaaccaaaattgtcatgcaacccatcttttctagccttcgtctgatagtgcagcttgtgaacttcgcaaaagctgtccgcanacagcttcactgcctaacttcggagggcccacatataaacactaagcctaacgatagcgctaggagtcaactgatgaaagtgatccaaatctcttcatacc

SEQ ID NO: 6013 - DNA, 374 bp, Zea mays
gcttcgcataacccattccttcatagttggtaatactttgaaagccagaaattccttgcccaaatccctagtgccaatgtgctctgcaataattctgaattcagccaacttcgtttgggttggaccttctggtgtcatactgcactggggtcgggtttctccgaagattagttcaagcggactctgtacaagcttcttcttgtcgtatatttgacgtagaaccattccgatttccagcctgtcggccacttgcttcggtagctaatcacaggaaattttgtagttttccgataggcaaaattgtaacaaccaaaattttcatgtagcccatcctttctggccttcgtttggtaatgtagctcgtgtactcggca

SEQ ID NO: 6014 - DNA, 351 bp, Zea mays
actcagcttccagacatgtggtacacaatcgtaaagtggctaacgcctgtgaggatcatccccgccagccgcagcgcaagtgggtacgacgagctcaccgtcgaccgtgtccgagccaattcgagcgctaagatccttaatcctctcagttatccacttgcgctgggcatgaatcgtagcggccggtgcgaatccgggcgcaagatcatcggcagtcgagggcgatgaccttggggatctttttcagttactgtacaatgggatccttattcagagtgccccaccgagcacatttggggatgatttattccataacttgtgtagcaacttgatcatccatctgtatcaaag

SEQ ID NO: 6015 - DNA, 428 bp, Zea mays
  unsure (1)..(428): unsure at all n locations
agcttttgctaaatattcaagatttcatcttggcatttgtctagataccaggtttttttggtgcctgcatacttgtgctcgtgtgcatgctgatttaagataaggctgtgttaacatacatgagacaggatctctgtcgttttcctaccgttttcaacaaacgcaggattctttggtcctttagatattttgggagaaaaagctgaggtgcgaaaatacctcccattctgtcgagatatatgttttgacccggcggaattttagacctaagcaactttctgaaaatttcatctgttgtttctcactagtctctccgctattctaaatagtcaaatatgcctgcttctcaattggttccgtcagtgactcagtgtgacgcgattacaccttaccaactccagntgcttgattggttcttgatttgacgt

SEQ ID NO: 6016 - DNA, 445 bp, Zea mays
  unsure (1)..(445): unsure at all n locations
tacggacctatagaaactcagcttactcctattgggagggcccttcatatcgtctatgtntgtattccgagacatacaagctggccaacgatcaaggcgaggtctacagcaacgcttggaacatcgaacaactacgtcgcttttacccttaaaatgtttcaagttgttcatgtatctcgctttctttacatgcataaataaagtctaaccatcaaggaaggataagccttgcctcggcaaagcccaaccctccctcgggggctagaaggggggaaccccctctgtgtcaaatatttcctcggaaaagtcttttatcagaacgactntcgcgcttttcgactacgtcgataacaaaatcctaaagacgagcgagagagaccttgaacggcaaggccgaccaagccgagggactnctacgccttctggatacggatacctcactcat

SEQ ID NO: 6017 - DNA, 427 bp, Zea mays
  unsure (1)..(427): unsure at all n locations
agcttggacagtgttctgcgacgggtcctgggaaaccttctgtgcaggtgcggctgctggcctagttgcaccttccaaaggtagaacatgctatgcaataaggcttgatttcaggtgcacaaataatattgctgaatacgaagctttacttttgggacttggaaagttaaaggcaatagggataagaagggcggtccttaaaaccgactctcaagtatctggtcatgttgacaagagttgcaaggcaagagatccaaagcttgagaaatacctggacacagttcgaaggcttgaagtttctttcgaaggattntctgttaagaatattccacgaggagaaaatgaacatgctgatctgctagccaagtcagcggcacaggggctttctctgccttcggaagtattttttgagacaataagagcacct

SEQ ID NO: 6018 - DNA, 328 bp, Zea mays
  unsure (1)..(328): unsure at all n locations
tactaagcttaagactagacttgtanggttgacccaagttaagctttntcactcgctttattggcggntatctcaactaggttagacaagtcctagatgcaatacaaggaatntaaatatgcaatgcaagtgacaacaccatttgacatttcacataaaatntctgagatcaaggatatttagttcattcctcaacatgcaaaagcgggtcttatcgagtggcttagtgaaaatatccgctaattgatctttcgacctcactccttctaaaataatatcttctttagcaacatgatctctaaggagtgatgacngatatcaatgtgct

SEQ ID NO: 6019 - DNA, 412 bp, Zea mays
  unsure (1)..(412): unsure at all n locations
tctaaccgaagctgcagaaaaaattctgaatgaagaagagtagctatttgttaaacattttctagaatattgatgtaatatttgctanactatgtttgttatattcagtgcttatagattcgaatgtcatatatgaggggtttggaaattagttctttgcgatgcatgaaacttcttgtacataccgtttntgagcctgctgcgaaaaacaccttccttcttttatgctcgtaaaaatagctttatgcttctaaaatatcatgcttgtaaacatcatacttctaacatagacccttttcccatcaaactgtgagtgtgatctcacttactttaagattgccgaaacggctcattcaatatgcatgattacatatgatgatggagctggcgaatatcatgagatctatgatgg

SEQ ID NO: 6020 - DNA, 474 bp, Zea mays
  unsure (1)..(474): unsure at all n locations
tgacaatgaggaaatggcgctcgtcatcaagagcttccgccatatcctctatctatgagagggaaagactacaagtcccgctccaagaaagattgctacaaatgtggtaagcccggtcattttattgctaaatgtcctatatctagtgacagtgaccgaggcaacgaccagaagggaagaagaaaggaaaagaagaggtactacaagaagaaaggcggcgatgcccatgtntgtcgggagtgggacaccgacgaaagctcaagcgactcctccgacgacaaggacgccgtcaacatcgccgtcaccaaaaggcttctcttccccaacgtcggccacaaatgcctcatggctaaggacggcaaanagaaagttaaatctaaatcctccactacatatgaatcctctactgatgaataatgtagtgatgaggaagataacttgcgctctctttttgcaacctcacatgcaacaaaa

SEQ ID NO: 6021 - DNA, 475 bp, Zea mays
  unsure (1)..(475): unsure at all n locations
ntataaaagccaccagtaaaaccatctggccttggggccttgttcgatgggagttgcttgatggtttcccacacttccttttcagagctaggggcatccaagcccgagagatgatgcctagaaatattcaactcctgcaggttgatagaacgatctctatccaaattgcaacccagtaaatctgagtagaaaccatcaaccanagcagccttgtcctcatgcttggttagaactcgattatcatccactaacctggcaatgaagttttttctttttctatgacgggtgtgagcatgaaagagtttagtgttggcatctccctccttcaaccaattcagtctagaccttgatctagcaatggttcttttgagagnaagctccacagagtgcttggtaagacagctcttcaagcattgctcatttggttgtagctggctcaaatcttgggcaatttctaactggtgcagcacgtccc

SEQ ID NO: 6022 - DNA, 429 bp, Zea mays
  unsure (1)..(429): unsure at all n locations
agctttacatagcaaaacatataagactacttcttccttctgccgaagctnttacatagcagaacataaaagactacttcttccttctgccgaagcttttacatagcaaaacataaaagactacttcctctttctgccgaagcttttacttttacacaacgattcataaaaaaccaattctcttttttgccgaagcaaccactttggtacataaagctaatgaatgcttatgtatgcaaatgccatgatgtaatgtaatgtgcaaatgaatgtccgaagcgtatatccgaagccacactcatccatcattttcttaggagcaaaacacacgtcagctctgcattcccttatgaacgactntggagcatctttgccttttacttatgcagtatcagcgttgacttttcgctgtaagctctgcatccccct

SEQ ID NO: 6023 - DNA, 312 bp, Zea mays
  unsure (1)..(312): unsure at all n locations
tctatagggagagcacatgttgtgactaaccaatgttcatattgagaaagacagagtgtgtagcgcatgtcaagcatggaagcaagttggtgttcatcatccacacaagaacatcatgacgactgacaggccgctcaagctactccacatggacctattctgcccgatagcttacataagcatcggcgggagtaagtactgtctagttattgtggatgattattctcgcttcactcgggtgttctttttgcaggacanatcccatacccaagagaccttaaacggattcttgagatgagctcaaaatgagtt

SEQ ID NO: 6024 - DNA, 237 bp, Zea mays
  unsure (1)..(237): unsure at all n locations
ccaacgagcgtcacactctcatggccaagggagaagaaaagtagcactcctaatactagtacttatgcttcttcaagtgaggatgagtctagtgatgatgatgagatagattactcatgcttattcaagggattagatagaactaaggtagacaaaattaatgaattgattggtaccttgaatgataggaatatacntgtagaaaagcaagaggatntgttgtatgaagaacatgat

SEQ ID NO: 6025 - DNA, 482 bp, Zea mays
  unsure (1)..(482): unsure at all n locations
tgccttcgcttcagttatcatccgcagtccaatggggtcgttttacgcgccaatgggaaaatcttcacagctgtcaagaagatgctccttgatgaaaaaaagggcaaatggaccgatttgttacctgaggcagtctgggcactaaacacgaccgagtgcagagcgactgggtttactcccttccgccttctatacggatcggaggccatgaccccgcaagaaataaagcatgggtccccgcgaacagttccgtcagccgtccccgatgtgtacgagccaacttcaaaggatctcattgacggagaccgagtcttcgccctacaggctctaaacaaataccaagcccagaccaaagcatggcgcgaccacgcagtcatcccgagggagtttagcgaaagggacctcgtactcgtccgaacagctcggacggagttcataggcatgctggagcccaagtgggagggcccctntatagtcaagac

SEQ ID NO: 6026 - DNA, 435 bp, Zea mays
agcttggatctataaagatcctctcgtaccaatgttgaagtagtagaaatggaggcacctgcaccaaacacaaattatcctaatatcatgttgacaaattatggtaacaggacaagccctactacactaatctattcacatgcatagaagctgacaagcccacatggggattggttataaattaaaacatgaaaaattacagatcaccaatagcccaatcaatccattcacgaccgctatctatctgaatcatctacgatcatatagcgcgacctaagtgccttgaacagaatctgatggaacagggtggcaaccaaaaaagccaagggaccaggggcaagcatgcaatgttaacctatagagctcctcgaaggagaggctgatgcagttgtggttgtagatctcgcggatggtgtcatggagcttacgccacaa

SEQ ID NO: 6027 - DNA, 255 bp, Zea mays
tgaagtttggtgagtgatatgagcttaagttaaaaagctactataacctacatggtattgcttgtggtacttcattggtgacatgcagttgtatggtattgtgtggcttgtttgccctagcttgtaatatgagatgtcagaattattcgaagatcatctcttcaatatattagaaaagagtaaagtgcaacatcaatggtccaatgtttatcttaatatataccgtacccccccccccctcagtatactccatct

SEQ ID NO: 6028 - DNA, 435 bp, Zea mays
  unsure (1)..(435): unsure at all n locations
agcttgtcctagaattaaaaatattacacatttttatggccagtttacggggtctagatgatatatttgagacgacatggcatgctntattgaccgtctcaattagagatggcaacgggtatatatacccgtcgggtagtagcatttcatacctgtatacatcacaaaaaattatacccatcagataatccgtatacactcgagggtataaatacctatacacgtactcaagagtgggttcttttacccgtcggagttaaaaaatcataatcatatacgttcacggttataaaatcttacccatactcgtacctgcatgagtacttttacccatcagagttaaaaaaatcatacacatatatacgctcgcgggtataaaatcttacttatacccatacctccgtaggtacttttacccgttggtaatctgtaccc

SEQ ID NO: 6029 - DNA, 483 bp, Zea mays
  unsure (1)..(483): unsure at all n locations
tatgaagattcttcattccaacatgggctagtcgacggtgctctagtctacccatgttagtcttagcaatcaagcatgtgtcgagctcagctctatcaaaatctactaagtatagctgaccctctaacacacctttaaatgctattgaatcatcacttcttctaaagacagtgacacctacatcagtaaaaagacagttgtagcccatttgacataactgggaaacagaaagcaagttgtaatctaaagaatcaacaagagaaacattggaaatagtatggtcaggtgatatagcaattttacacaaaccttngaccaaaccttgatttccattcccgaatgtgatagctcgctgggaatcttggtttntctcatatgaggagaacatccttttctccccggtcatgtggtttgtgcacccgctgtcgagtatccaacttgagccccncgatgcatatacctacaaaacaattttagttcttg

SEQ ID NO: 6030 - DNA, 435 bp, Zea mays
  unsure (1)..(435): unsure at all n locations
agctntannacaagttaaacagttcaaggctgtattatagaatcaacacgatctgaagataaagattgttcgatcagatcgtggagggagtactatgggcgccataccgagtatggtcaggtcccaggacctttcgcgaggttcctaagagaaaatggtattgttgcccactattcaacacctggtgtaacagaacgctaaatataacactggataccaagttatgcaagtatttcgtggtacttcttgtttggccattccatcattatgttgctacatgaggcatttcaagatttttttacagaatttcaccttagctctaccttcatttgatgtatgcgtttgcttttcatatcaaagaatgtatccgcttgcaaacctgtattcatgctatgttgaacctgaagatcatgattcaacagagcctgatccctc

SEQ ID NO: 6031 - DNA, 428 bp, Zea mays
  unsure (1)..(428): unsure at all n locations
gaaagagcacaatctctacttatgaattttatgaaatagcttaaaagagattgcattagtaacacaagcaatagtttcctaattagcaacctctagtatatgaatgaccagaaggttactataataaggaaacctcatgatatgaactaaattacccttacaagcatcatgcataacatcaattgaaaaaagatganagtagcatgattatttaattaaagttatagggcaactctaattcataacatggtgagtgattaatggagaagactcacaaccaatttaaacaagaatgaatacatcacatagtattggttcgatcttctttgaatgatgaatggcacactccatttgggaaacacattctcatgttgtgagactacataaacacttatatagaaacattagtctcacaactctagtcatat

SEQ ID NO: 6032 - DNA, 401 bp, Zea mays
agcttaaagccatggtaagtagcataggccaataatatgtgaattgactcgagcctagctacgggtgcataggtttcaccgaaatccaaaccttcgacttgggagtatcctttggccacaagtcgagctttgttccttgtcaccacaccatgctcatcttgcttggtgcggaagacccatttggttcctacaacattttgattaggacgtggaacaatgcatacctcattcctagtgaagttgttgagctcctcttgcatcgcgaccacccaattcgaatcttggagtgctttctctaccctgtgcggctcaatagaggaaacaaaagagtaatgttcacaaaaatgtgcaacacgagatctagtagttacccccttatgaatgtcgccgaggatggtgtc

SEQ ID NO: 6033 - DNA, 325 bp, Zea mays
  unsure (1)..(325): unsure at all n locations
ntgattcatggactgaacattgccatatcactgggcatcaagagaatgatggtatatggcgattcactggtggtcataagtcagataaacaaagaatgggattgctcgaatgactccatggngaaatactacaccgccgtccgaaagctagaagacaagtttgaagggctggaatttcatcatgtggagagagaccgcaacacggcagctgatgcattatcaaagataggatccagtcgaactcacgtcccgcctagagttttcattcaagagtactgcgcccgagcatttcattatatcgggtagaagagtgcaatattctgag

SEQ ID NO: 6034 - DNA, 412 bp, Zea mays
  unsure (1)..(412): unsure at all n locations
agcttgtgaagattcttcatcccaacatgagcatgttagcgatgccaaagccagcccatattagtcttagcaattaggcaagtatctagttcaacattggtattagtgaaatcaactaaatatagctgaccatctaacactcccttaaaagctagtgagtcatcatttcttctaaagacggtaacatcaacatcagtaaataaacagtgtccattttgcataattgagatacagaaagcaagttgtaacctagagattctacaagaaatacattagaaatggaatggtcatgtgatatagcaattntacccaaacctttgaccaaaccttgattcccatccccgaatgtgattgctctttgaggatcattatttttctcaatgaggagaacattcttttctcccctatcatg

SEQ ID NO: 6035 - DNA, 385 bp, Zea mays
  unsure (1)..(385): unsure at all n locations
ntagtcatcgcgcgcatcatctccttcaattccatntgagagacacactcatcgtcgttaagtttaggccccttgtccttgtctatttgattctttggtcctgtcattgttagcacaaaacagagacaaaaaggcaacaaacaatgtgaaccctacaactatctctcatgggtggcggtggaggtggtggaatacaaattatgaagcgtcttaccccgctcttacaacgttcttaccagcactgcaggtggtaaacggtgaccagtgtgactgtccaatgagcgtgggtgtgattgcaaagtagtacctgttctgctcgagagaaaatnggagctatgggaaggctgactaaatatatatatatgtggcacacaagtcagtaaca

SEQ ID NO: 6036 - DNA, 434 bp, Zea mays
  unsure (1)..(434): unsure at all n locations
agcttctaaagggggagcacattntgggactaacaaatgttcattttgagaaagacaggatctgtagcgcatgccaagctggaaagcaagttgggtcacatcatccacacaagaacatcatgacgagtgacaggccactagagctcctacacatggacttatttggcccgattgcttacataagcatcggcgagagtaagtactgtcagatgtggatgattattctcgcttcacttgggtgttctttttgcaggacaaatctcatacccaagaaaccttaaagggattcttgagacgggctcaaaatgagttcggcttaaggatcaagaaaattagaagcgacaatgggacgaagttcaagaactctcaaatcgaaggctttcttgaggaggagggcatcaagcatgagttctcttcttcctacaccccacaac

SEQ ID NO: 6037 - DNA, 453 bp, Zea mays
  unsure (1)..(453): unsure at all n locations
tctgagagaganaagatcagcactaataacgctgcactaccggtgatttttctccatgtgtatatccttccttatctcttcttattttcttttgccgctttggaggggagtctgggagacaattaatatcactacatcactgatgaggatcagaggatggatcgatcttctttcttcttttgacggggatggatggattcaaatttggcgaaagcgaccgcgacgccctcccggtcccggatctatgccaccaagcgagggctggccggccggcttgctggctggtggctgctgctactcgagatgttgaagcccggctgccgtgggccgtcccgtatgctgaatcagatgccagcgtatagcctagcctagcctacgtagccccgagtgcgaatgtgcgatactgctactatcatatcatgctgctggtatctcngcttcgaagctcaacct

SEQ ID NO: 6038 - DNA, 266 bp, Zea mays
  unsure (1)..(266): unsure at all n locations
gaatttgaagaaggagattatgtgtatctcaggtgtaccttcgggaatgaggagattcaaagtcaagggcaaattgtcccctcgctatattggaccattcttgatctttaggcgagttggggagatggcataccaactcgagttaccggatagtctatcagatgtgcataatgtgtttcacgtatctcaactcaagaagtgtctccgtgttcccgaggaaccagtacccatggaagagctcagtgctcaaggtgattngacttaca

SEQ ID NO: 6039 - DNA, 458 bp, Zea mays
  unsure (1)..(458): unsure at all n locations
tactaagcttggctttctncatagcctctgccgctgcaaacagttcatcgttcatctcatgtactccatgatcatcatcgtaaacatcatcgtccacatccatatgtatcccaaagtcatgatcatatccttcgacatcctcctctataccctcaacttctgtatctgccgactccccatgatgaatccacctcgtgtatgtagctgagattccataaatgtgtatatgagtttctacttcactctgaggtcgtagcctttgattaagacaattcacgcacggacaatgaatgtgtgtgtcttctgggtatctttcactaacaaaattcatgaactcttcaactcctttcacatatgcaggtgtgaattgtttcccataaacccatcttctatacatctattntgacaataaattaaaacttgcattaactncataaactatgataaattgaacaaaa

SEQ ID NO: 6040 - DNA, 446 bp, Zea mays
  unsure (1)..(446): unsure at all n locations
agctttactcaacattaatcgttgcattacgaaaatagatccgttcaactgaatatattctgggtacccaacattaatccccgcaaaatcttcatagtctgggtactttgtggggacttgttctcaaatgctatgaattaagaacaaggcaacacaaaaaatgttaaacgttaaagtccttcgtccttcgaagcattatttcccttggggatatatgttcggacgaaggttatgaaggacataccttcataaacacaacatataataatgaagaagaaaacatatgaaattgtaaggataacgtaaacaattatatattattatcaactcatttctatattattattatggaaaaatagaaatgatatcaaattacaaatgtaccttcggcttaaaagaaggtaaaagtacaagcgtgacgcanaagcaaatgccaagtcctcgtg

SEQ ID NO: 6041 - DNA, 284 bp, Zea mays
  unsure (1)..(284): unsure at all n locations
gggaaaaaaaaaaacgccccacaagaagaaaagaaaanaanggagagggaaaggagagaggaggaagagaaggggaagaaagagaaagagagaaagaaaaagaagcgggagaaaggaagagagagaaggggaaagaagaaaaggaagaaacagaagggaggaaaaagaaggagagagagaaagggaaggaaggagagggaagaggaagaagagagagagaagagaaaaaaaaaaagagggggaaaaagaagaggaggagaggaaaggaggaaagaagagaagga

SEQ ID NO: 6042 - DNA, 430 bp, Zea mays
  unsure (1)..(430): unsure at all n locations
ctgagctgcagcttataaggtcttattccacatgggctatttcttcggtgccanaacccacccatgttaggcctagcaattaaacatgtgccaggtaactttttaaaatctacaagataactgccctctacacaccttaatgctattgaatcatcactttcttctaaagacagtgacacctacatcagtaaagagacaagtgagcccatttgctattgagatacagaaagcaaattgtaatctaatgaatctacgaaaaaaacattggaaatagaatggtcaggagatatagcaattntacccaatcctttgaccaaaccttgatttccatccccgaatgtgatagctcggtggggatcttgatttttctcataggaggagaacatcttcttcttccctgttcatgtggttgtgcacccgctatcgatga

SEQ ID NO: 6043 - DNA, 297 bp, Zea mays
gcaccttaattagacaacagcagaagacatattgatagtggctggcaagtaatgtaaaaaaagcagactgttcaaagataaagcggttgaaatgtggtgaaatttgaaactggcatagagtgcttactggaatcactatgtcataacatgacgcactggaccattaattacactgctaaggcaactggcagataaacattaaactacacatcatactaccaaaattaaagccctaaactggacaccatgattatacaggaacatgctcaattgtcaaaaaataaatatggcacatac

SEQ ID NO: 6044 - DNA, 445 bp, Zea mays
  unsure (1)..(445): unsure at all n locations
ctgcagctgccaatcttgtaaagcaacagcgcatgccctcacaacaactacagaccataccaagtacctggccttttgcatgccggggactggatatgattggacctttcaagaaagcctcagggggatatactcatgtattggtggcgattgacaaattcacttaatggatagagttcaagcccattgcttctttaacctctgctaaagcccggaatctacaagacataatattcagaattgggataccaaacagcatcatcactgacttaggatccaacttcaccagttcagaattcttcgacttctacgagcaaaagagcattcagatcaagtatgcatctgtagcacatccaagagccaacgggcaggttgagcgagccaacggaatgatattggaggcactcatgantaaagtctttgataagaatgaaaaattcacagg

SEQ ID NO: 6045 - DNA, 277 bp, Zea mays
  unsure (1)..(277): unsure at all n locations
taaaactaagctgtggccgaggaaaacaanatccttggatcttggtgtcttactgtttgccgtgtcgactgttagctcggacggtactccgaagcggcaaacgatgttctgccagaagaatttatgggcaatctctgatgtgattgtggaaacagccctcgcttcaatccatntagtgaagtattctacagccacgaaggcgaacttaagattcccctgagcggggggcaggggcccgacgatgtccatgccccaacgctggagaggccatgtatgg

SEQ ID NO: 6046 - DNA, 398 bp, Zea mays
  unsure (1)..(398): unsure at all n locations
agcttntatgagatgattatcacataagcctattctatgtgtaccaagcttaatacgaagggcaggcgctacgtgcangtgagccacgagatactactccactaaaaaatttaatgcgcaatggctgtgttagttaacatgacacacatcatacaatatgttatatcatgccccacaatgatcacacaaaattgcaatatatgtacataagagaaatctacttacaatgactactattgagcatgtcgatatactcttggatacgatcgcgcgcttcggatatggcacttcttcgcagcttcacaaaggtcattaaaaataaactggcaacaatcggtctcatggaaacggcgcacttcatctgtcataaacactttctaggttgttatgccccagct

SEQ ID NO: 6047 - DNA, 297 bp, Zea mays
tactaagcttctactggaaacacgtgatacgtctaactaatgttactgtcttttattatagaccttgtgcagctcgtcaagtagggaaacaagtgggaagctctcatcatgccaaaaatgtgatgacaacatcaagaccccgcgagttactttatatggacctcttctgacccgtcgcctatctaagcatatgaggagagaagtatggtcttgttatagatgatgatatttcccgcttcacttgggtattctttttgcaggataaatctgaaacccacgggaccttaagcgcttcct

SEQ ID NO: 6048 - DNA, 421 bp, Zea mays
gaattcccctacctatgattgattctctagttgatgccacagcttcttcagagctcatgagtctggtagactgttattcaggctatcaccaaatatggatgaaaaaggaagatgagccgaagactagcttcataactccaagtggcacatattgctatcttcggatgcctgaggggctcaaaaacgctggaggaagtagccgaatgactgcgaaggttctccaatctcaaataggcagaaacgtgctaacttatgttgatgacatcattgtcaaaagcacgaagcaggagaatcatattgctgatctgcaggagaccttcgccagtttcaggcaagctggcttgaagttaaatccagaaaaatgcgtcttccgagtgaagaagtgaaatttctggatgcttgtttcaacaaagggatgaac

SEQ ID NO: 6049 - DNA, 205 bp, Zea mays
aacttactcccgcaggaccaaataataatgatttgattagtctgacctgggatggcatatgtggtcatgccataactgaaggacgtttagatatcaataaattaaaacaatagaggtactcacgtatatagaaacaatactaagaagacattaatttgcaaaaatcttatccagttttgaaatagactatatagaataaagtgaa

SEQ ID NO: 6050 - DNA, 432 bp, Zea mays
  unsure (1)..(432): unsure at all n locations
cttcgtcatctgaaaggaaattaccctgtaggttatttattatttcagttctccaggcttcgctataaacaggagatatattgaggattgctctttcaagaagttccaccgaaggggcttttattgtttcgaagaacacatcccaaggtaagggcagcccctgtgctgctgactttgctagcaaatcaacatgctcattttgtccttcaggattttgacagaaaatccctcgaaggaaacttcaactcttcgaaccatatccagatacttttcaagcttcggatctttagccttgcaactcttgtcaatatgacccgaaacaacttgngaatcagttttaagaatggcccttctgattcccattgcttttagcttccgaagacccagaagcagggcttcgtacttcggcaatgttgttgtgcaactaaaatc

SEQ ID NO: 6051 - DNA, 461 bp, Zea mays
  unsure (1)..(461): unsure at all n locations
gaaacgctgagancatanctttattgagaagnnatngagtttacgttatgcaaatatgaactaaaacaattcattcgacatacttgcattaatcgacatttactaaatgtaaactagagctatcgcctagtttcaattaatctattatgctaatagctcacagttaaataaataatttaaacaatattagcgactctaagcgaggtgaattaacggtgcaagactaagtgtgcgacgtgcgaaacagcacgacaacacgcggacagaatgcgcaaggcgcgtggatcaacgcgatacgagaggactattaaatagatgatgtgtttatactaaacaattactaataaagaatatntcaactagtattaaccactgttgatattatttataatgcgccagttgaaaaccctanattatattaaattggaacgctactntaataatcattgatcanacaaaca

SEQ ID NO: 6052 - DNA, 435 bp, Zea mays
  unsure (1)..(435): unsure at all n locations
agcttggttataaagatgttagtgcaatcgaaccaagtggctataaagcgagctcttgcaaatcacaataatcatagagaaagacatcacaagagacatagtggtttatcccgtggttcggccaagtataacacttgcctacttccatgttgtggcatcccaatggatgagggttgcactcaacccctttcaagtgatccaatgataactgaacacggnattcttccttatatgttttcccatttgcgaggaacctccacaagttggagcctctcgcccttacaagattgatcacagagaaagcacaagagtaaggttggggaaaaacacacacaaatccgcagcacatgcacgcacacaagccaagacttgagctcanaatgaaacacagagagttcacaactagaacggggctcanatcactaacacgatcga

SEQ ID NO: 6053 - DNA, 443 bp, Zea mays
  unsure (1)..(443): unsure at all n locations
tgaagccatggtaagtagcataggccaataatatacgaattgactcaagcctagctacgggtgcataagtttcaccgaaatccaaaccttcgacttgggagtatcccttggccacaagtcgggctttgtttcttgtcaccacaccatgctcgtcttgcttgttgcggaacaccaacttggttcctacaacattttgattatgacgtggaaccaaatgccatacctcgttcctagtgaagttgttgagctcctcttgcatcgccaccacccaatccgaatcttgaagtgcttcctctaccctgtgtggctcaatagaggaaacaaaagagtaatgttcacaaaaatgagcaacacaagatctagtggttacccncttatgaatgtcgccgaggatggtgtcgacggcgtgatctcgttggattgcttggtggactcttgggtgt

SEQ ID NO: 6054 - DNA, 424 bp, Zea mays
  unsure (1)..(424): unsure at all n locations
agctntaagctctntgacaataattcacttcatccttttgtgcctttacatagagatgctctcttcattgtgctttgtcttgaaagtcgcttaagacctatactcaagacaatgtatggaaatattttgcccaagagagagttctacaactagtgatccttttctaagtcattggtattagatatcaagtagaccacaaattgcataaataatataattctccttttaacttagtgcatatcaagatagatgtcgattgaaatcaattgaaatcaaattgaaattacatgaggcactaagaagcataagtgttaattgaagttattcaatgatcaaacacacaacagatgcgatcaagagaaaaacatatgcattgaatcaataaacaagctttaaatgggagaatccagtaaatatgctacta

SEQ ID NO: 6055 - DNA, 387 bp, Zea mays
  unsure (1)..(387): unsure at all n locations
tcacatctntggactaattcggctgcgtcattctttgctgttggccagtagaaaccagacctgaagaccttcccaaccagagtcctagatgctgcatgtatcccgcattgcccagtgtggatctcatctagcagttgcttcccagtagccgaaagaatgcacttcatgtggactcctattgcgcccattctgtataatgtttccccaatgagagtatagtgagctgactgccttgcgatgcgttctgctgcatttttgtcatccggctcctnctcattctntatatatatgatgattggctccctccagtcatcagaaattgactctggttggctcagaatattgcactcttctgcccgatctaatgaaatactcgggcgtagtact

SEQ ID NO: 6056 - DNA, 432 bp, Zea mays
  unsure (1)..(432): unsure at all n locations
agcttgtgaagattcttcatcccaacatgggcatttctgcgatgccagagccaacccatagtagtcttagcaattaagcaagtgtctagttcagcttgattgaaatcaactaagtatagctgaccctctagcactcccttaaaagctattgaatcatcacttcttctaaagacagaaacacctatatcagtaaaaagacagttgtagccatacataactgagaaacaaaaagcaaattgtaaactaaagagtatacaagaaaaacattggaaatataatgggcaggggatatagcaattttacccaaacctttgaccaatccttgatttccatccccgaatgtgatagctcgttggggatcactggttttctcataggaggagaacattcttttctcccatgtcatgtnggttgtgcattcactatcaatta

SEQ ID NO: 6057 - DNA, 456 bp, Zea mays
  unsure (1)..(456): unsure at all n locations
tgcccgcctccacacgtggaccggccgattccggccatcaccgtcgtcgagtcgtacctcgttgtgaccgcaaggacttcccgaagctaaccacgtccttcgtcgaacctccctcgccgccggtaagccgcgccgcccttctttctttcacgggtactgttcaaaaggggggagggacctcacggaagaaggaatagaaatcacgggggttttttgaactatcaaagactcagatgaatagttgtgcaggggtataagttaaagaactggtttaagaaaagcccacggtcctcggtgtaaactgtgnttccagaaaacctttttaatatttctaatttaaatgcagaaaaagcttgtgaaattcataacttcagntttgntcaaccaaatatggtcaaaccaattttgccagagtctcaataatgtgaactacctatgagaaatcaaaaccttctt

SEQ ID NO: 6058 - DNA, 287 bp, Zea mays
ctacacatggacctattcggcccgatagcttacataagcatcggcgggtgtaagtactggctagtattgggactattctcgcttcacttgggtgttctttttgcaggaaaaatctcatacccaagagaccttaaagggattcttgagacgggctcaaaatgagttcggcttaaggatcaagaaaattagaagtgacaacgagacggagttcaagaactctcaaattgaaggcttccttgaggaagagggcatcaagcatgagttctcttctccctacacgccacaac

SEQ ID NO: 6059 - DNA, 459 bp, Zea mays
  unsure (1)..(459): unsure at all n locations
ntgatagaaaaggtanggagtntaacaacagaatgtagacaaatccattcgtaaacaaatcttagaaccaaaaatgtatccggcatcgagctcattgcatgtgtcatgcttcgatagagtgggctatgtttcagtttggaacaacaatattagtagagactaaaatacaaccgtgtcgagcatggttcctaaggtctgaactatgtttgatgacantcaaatggacacatgctcttccaaatgctnttttgcatcttgccgacctacatttgctatcgcaagtttctcaagtggcagttcgtcctcctcctgcaccgccttgttgtacttgatggctangtttagcatttcctggacaagaataggcagattgtcaataacaagaaaaacaatcatctcagtatacagctaaaggaagctgagtggtataggcacctggacagtctgctcgttggtttt

SEQ ID NO: 6060 - DNA, 237 bp, Zea mays
ctggcatctaggaagacatctgcatactcacagaccactgggatcttcttcaggggtaactccgtcatagagaaagcacatgaccgagtagaaccctaactaggcagaattaaagtgaaatttccgcagaatggagaattaactttcacggtacgactggctacatcaagcacaacttggtgcaaggtcatccaatttgctcctagaataatgtccacattttccaatcccaacaca

SEQ ID NO: 6061 - DNA, 131 bp, Zea mays
tagagaattattcccttggggacctaaaagaccatgttgctagcgttctaagtgcgatatgcttatatactgaaggttgtatgacgatcgagtgcttcagatgccacgttggatgccgtcggggaacacga

SEQ ID NO: 6062 - DNA, 441 bp, Zea mays
  unsure (1)..(441): unsure at all n locations
tgcaacccttacattagaaactagactcaaatcaatggatgtatgacgttaacaacccttggttattaaggtggacaaaagagacttgcctaaatgaccaagatgatgatgccacttggtgaaggacaaagtcgatggatattggagatgcactgagtgatgatgcagcgggtgatacatgggcggtagagtgaggaatgcgcaaggtgccgagaactatgagaacctttatggcgatggctagcctcaagtacagcctcngtgcgatgaccccgaataaaacaagatgagtcatcaaatccaacanaatagttgttgattggttacttgaccgaccgaaagaagaatcatggacaactaatgtactaatgagaatatgttaaaaattagaagagcanagagaaccctgatgagtaatgtgacatgatgtaccatctgcta

SEQ ID NO: 6063 - DNA, 267 bp, Zea mays
  unsure (1)..(267): unsure at all n locations
ctacaaatgcgagggaaacttacaaaaggccctcaaaacccaatccacttagtagatagcacactagagctctctaatcttctctaagtcaaaatttaaccctaatctaaagatcagacatgttcacttagtaaatggcgccaaaaccacttggtctgaataccaaaaaggtgccaaactacctaaggaagccactagaanaaatttgaacccgagccaaaacaattgacatgaattgacatcacttttgtctcggggtggacagta

SEQ ID NO: 6064 - DNA, 424 bp, Zea mays
  unsure (1)..(424): unsure at all n locations
tgtgaacaatacaagttcagaagggagaaagccgcttctgccgatcattcgaagcccatgctcttatgtgatgacatagcagagcagaaggtgctattgagatcccaactgtccgaagaacaggagaaaaccttgataaggtttctgttcaacaacaaagatgtttntgcatggttagctaatgatctttgcggagtcaacagggatgttattgaacacttgctcaatgttgatccatccttcatacccagaaagcagaggcttctgaagatgtctgatgataaggccgaaggtgctcggaatgaagtgaaaagactcctcagtgccggagttatcagagaggtaaaatacccacaatggctggtaacactgttattgtaaaaggccaatggaaatggggatgtgtattgattactgatctaac

SEQ ID NO: 6065 - DNA, 393 bp, Zea mays
agcttcaccgttagcatctcccggccttaattcgtagcaattcgagcataaccaatccctagcaagatcgcctatggtttttatggaacaagaggagcgtgtttttcatgcatacatgtcaaattcaaaatgtaggccattttaagattacgtccgttcaaatctatctaaactgacatgtcaacatatgacaagttacatggatatttacataataattcatgatttgaactaattttactatcttaaacgatggatacataaattgcaagtcatcatggatctctgaaagggaaatgtgcctttgggcaatttctattatgttttggtgattaagtgtctaacacatttaaataagctctcatgtgctcaacaaagagagaagtgataatc

SEQ ID NO: 6066 - DNA, 214 bp, Zea mays
tataaaactcagctttcataagattactgaagcaataataggccatctatttgatctgagttcacgcctgtccgtgataatgcgagagtaattgaatatttgactagctcaacaatggaccttggtgatgaccctttagacagagcaaattcacaaaatcttgctccagctgttggtgacctcttattagagcaatgcagtgagcacatgcttc

SEQ ID NO: 6067 - DNA, 419 bp, Zea mays
agcttgacattgccttcctgttggaagcctattgcattctttattgccaggcgtcttccactattaagcatgctacgaacgaatttaaatttctcattttctagatcatgcttggcaatcttagcatctagcttaactatatgatcattttgttatttaatcatagcaaggtgatcatgaatagcatcaacattaatatctctacatctatgaatagtaacatgctcaatggtagatgtagagggtttgcaaactagttcaattctgcacttttatatttgctttggtttgtgttggcatcaatcaccaaaaagggggagattgaaagggaaatagggtcaaaccttctcctaaataattttggtgagtgaattgcccaacacagatatttatactaaccacgttgctctagaataaat

SEQ ID NO: 6068 - DNA, 424 bp, Zea mays
  unsure (1)..(424): unsure at all n locations
ntcttctncttcccctttccctttatgcgggattcttccgatgaagccttcccgtggcttgtagtgggctnttcgccggtctccatctccttcttggcgtgatctcccgacatcacttcgagcggntaggctctaatgaagcaccgggctttgataccaattgaaagtcgcctagagggggggtgaatagggcgaaactgaaatttacaaagttaatcacaactacaagccgggttagcgttagaaatataatcgagtccgcgagagagggtgcanaacaaatcgcaagcgaataaagagtgtgacacgcggatntgntntaccgagattctggttttcaaacctacntcccgttgaggaggccacanaggccgggtctttttcaacccctccctctctcaaacggccctcggaccgagtgagc

SEQ ID NO: 6069 - DNA, 412 bp, Zea mays
atgatttatttgagttggattgataaaaacatgaggacatatggcttagacttagttagatgaactctggacatgtttgcttaagtctgtactacttattaaggcggtaaaggtagcctgccggtctgccttttttcatttccttgtttgccctcatccctgttatggctcagaaaatgaaattgaaattgtgaatcgaactcaagacctgctgctagattaaagacaacatatccaccacaccacgtcttattttgatgttatagtagaagatataagagttattaaggccgtaagggtagcctgtctctcgctgttctgccaccagccgtggcctccctcccacgcggcaaaaatatgtggcgagcacgaatcgaactgtgactgattcggtagagaacgacacgcttaa

SEQ ID NO: 6070 - DNA, 463 bp, Zea mays
  unsure (1)..(463): unsure at all n locations
ntacttctgntcaccttggctctatgcacttttaattcgcttctatgtagccaaaacaatatgatgaggattcagtgagcagaggtcaaagtgctttagaacatttcgatctctttgacatgaaacacctgctagacatcgattntgtttctttggaccttcggtagcccctcgcaggtttagtttattttttgtaattagctcaaaccacaaatctagtctgaagggctccgaggcaaaggtccgaaaacacctccttttgagttctttataaaaacataacatagaaatatgcagactacaagtgaaaacacatttgccttttgggccaaaatggcagtgagtgcgttttgcacttgatcctcgnatgggtgagccatatggctatataaagatgcgagaggtgtcgagttctgcatgacattcctccagctccaatttttcacttatttaaattcgagca

SEQ ID NO: 6071 - DNA, 434 bp, Zea mays
agcttcgtcagtcgaagccctaatggacttatcttcgtgggcatgggttcagtcattacctttagaatttcctccacgtcgctggtaaaaggtggtgtgggggtctcctctccttcggatagttttcgctctggagttgatatttttctcttgacaattttcttcttttttggtgggtgttcttcatccttgtttaaagcttcggcctctcttctctctggccctcagcatccttgttcagctgcgcatagtcaggatattcgaagcccagtgcatcaagcactcggttcagccttcgcttcggacgggtaccgaaggctgctgtcatcagttgatcttcttttttcgaataatttccaagaatttcattacacatcacctcaactgtgtccagccactcttggcagggcttcttaaaatatttcttgaatttg

SEQ ID NO: 6072 - DNA, 431 bp, Zea mays
  unsure (1)..(431): unsure at all n locations
tgtagagtaagacagatcccacacgattttttttaatgttgcttcagcttcacaaaaattattggtcaaacaatgacatgcantttgtattttcagttaaaaacaattgttttttccatttcatgttgtatttaagcttagctacatttgctgcaggtgtttaacaaccacactgaaaatacaaatttatgtactgantatgtggatcaagcagcactaatcattaagaagtgtcatggacttccccttgcaatatctgcaataggtggattcctagctaataagcccaaaactgctactgaatggaggaaggtcaatgatcgcatcanggctgaattggacatgaatccggaacttatgagtataaagacagttcttatgaggagctatgancggttaccataccatctcaagtncgctttttatacatg

SEQ ID NO: 6073 - DNA, 434 bp, Zea mays
agcttcttcaccacgttttcgcagatatcttgaggaagttgagcatggcgtcttctccttaattgtctttgtttcttgttcccaagcaattttctttttgaccctacaacttgttgctcattcaaacattcgcttccttttgagcgacaggggttagcacatgacggtatattttctagatgtgtacttgtgcaagaatgaggtcacatgataatttgtaattacaacctcatgagcaacattaagcatgatatggtcatcaactagtttactatgagaatatgataacctatcatactttttacctagagcaagtttttccaaatttatcatttctacttgactcctaagcatgaaattttccgttttaagttgagcaacattagataatgcatcatgactatttctttgctcaattaaaacagaatcatacc

SEQ ID NO: 6074 - DNA, 497 bp, Zea mays
  unsure (1)..(497): unsure at all n locations
tctattacggacctataaaactaagcttaagctctntgacatagaatcacttcatctagttntagcaaagatgcagtaatgcatgagtgaaattttaagaggttaaactaggtatgaagcagggattaaatgcatggacatgctttctcttccttttatgcaagatatgcaaagagtgtatataagaggaagatnttaggtacatatgtaaatgataggaataaaatattacccgtttgtacctttacttgtagacgctctcttcattgggcttttgtccttagtcttgtttgcttaagacctatgctcaatgacaatgtgtggaaatactttgcacaagagagagttctacaactagtgatctttttcaagttatttgtagcatatatcacatggatcacaagttgcataaatgaatcatgaattctcctttttccttagtgcataagatagatgtcaagtaacattatcaattgagatcaacatgaaattacatg

SEQ ID NO: 6075 - DNA, 399 bp, Zea mays
agcttcgtctgtgtccatggagcttcgtcttttactcctcagcttcggcctcggcttcgtcatcctgtacgtattaaagtactgtaagcaaaattcaatttcgaaggaagaggtagtacaggatgatttgttacggttagatgacttgacttcatcaccagcttgcttcgtcaccctttgccatccaatttataaattagctatgcttcgggcaaggttgggaatgttatccagatctgctggtgataagctgaaattgggtctattgataacctttccgtgttcgcagccagacttcaggaaggcaacagctgtgccccgagaagctactatggcacagaagtcaccatgtccagctatgacttcatcgaggtcatcaatttcaccttcgatatgttc

SEQ ID NO: 6076 - DNA, 309 bp, Zea mays
  unsure (1)..(309): unsure at all n locations
tctaagggagaacacgtaataggtctaactaatgttaccttctaaaaagatagaccttgtgcagcttgtcaagcagggaaacaggtgggaagctctcatcatgcanaaaatatgatgaccacatcaagacccctggagttacttcatatggatctcttcggacccgtcgcctatctaagcatatgaggaagtaagtatgggcttgttataagtgatgatttttcccgcttcacttgggtattctttttgcaggataaatctgaaacccaagggaaccctcagcgctttctaaggagaagctcaaacgag

SEQ ID NO: 6077 - DNA, 417 bp, Zea mays
  unsure (1)..(417): unsure at all n locations
agcttatgaagattcttcatttcaacatgggctatttggcgatgccagagccaacccatattagtattagcaattaaacaagtgttgagttcagctatgttttcattaaaatcaactaaatatagctgaccctctaacactcccttaaatgctattgaatcatcacttcttctagagacagtaacacctacatctgtaaatagacagtgacccattttgcataattgagaaatggaaagcaaattgtaatgtaaagaatctacaagaaaaacattggaaatagaatggtcaggggatataacaattttacccaaacctttgaccaaaccttgattcccatccccgaatgtgatagctcgttggggatcttcattnttctcgtaggaggagaacattcttttctccccagtcatgtgg

SEQ ID NO: 6078 - DNA, 425 bp, Zea mays
  unsure (1)..(425): unsure at all n locations
tggatagcgctctgtgatggctcatggggaaccttctgtgcaagtgcagctgccggtttaatagcaccttccaaggtcagaacatgctatgcagcaaaacttgatttcagctgcacaaataatattgctgaatacgaaggtttgctttngggacttccgaagatgaaggcaatggggataagaatggcggttctcaaaaccgattcccaagatatttctggacatgttgacaaaagttgctaagcaagagatccgaagcttgagaaatatttggatacagttcgaaggcttgaagcttcctttcgaagggttttctgtcaagaatattccacgaggagaaaatgagcatgctgatctgctagccaatggagcagcacattggctgtctttaccttcagaagaattctttgaacaataaaagcacc

SEQ ID NO: 6079 - DNA, 381 bp, Zea mays
agcttatagttcaatttgaattattgaatcactcaccttatgaaaggctattagctggctctgtccagctattgtagcttataaaaaaggtttagttgatctaaacagggtctaaacccttgcctatgtgctctcatatctagcatttacatccaccagacttcatcctttagccagtgcagtgattgggttcaatgtcttcttgggatacagactgagcagacagtgtctctattattgtgctttctgtcatgttttagatgtatacaatcttatttgaagttgtagagtggacgtactaactagttcaacccaaaagctcaaactgttaggagaaggtatgcaattcacttatacacttcaacacccacactcacgtgt

SEQ ID NO: 6080 - DNA, 480 bp, Zea mays
  unsure (1)..(480): unsure at all n locations
taaagccatggtaagtagcataggctaataatatgcgaattgactcaagcctagctacgggtgcataggtttcaccgaaatccaaaccttcgacttgtgagtatcccttggccacaagtcgagctttattccttgtcaccacaccatgctcgtcttgcttgttgcggaagacccatttggttcctacaacattttgattatgacgtggaactaaatgccatacctcatttctagtgaagttgttgagctcctcttgcattgccaccacccaatccgaatcttgaagtgcttcctctaccctgtgtggctcaatagaggaaacanacgagtaatgttcacaaaaatgggcaacacgagatcgagtagttacccccttatgaatgtcgccgatgatggtgtcgacggggtgaatctcgtgaatgcttggtgggactcttggtgagcgcctctgctcttcatctcttgcttctcattgatctc

SEQ ID NO: 6081 - DNA, 499 bp, Zea mays
  unsure (1)..(499): unsure at all n locations
cccgggaccttaagtcacctgangctgcaagctgttaaaacttctggtgcgagagaattgttgaagctatatcctgaaatgcactaccaaatcagctaagaaatgattacatatgaaggaaggatatggcccatgttagtantttattaagccataatttgtatgatgatgttgtcaagctttataagaaggaaggatatggtccatgttagtattttctccatctggcacacgagcaccttacaaacatatccaaatctcagcatggccgtagtgagattggtcgtggccatggtttggatttagcctgtttctctgctttagcctctgtggtcatggtttggattcctgcagagattatacttattagttatgtatggttggatgatgtgtatagtgtattatccttattagttcttgctttttcaattctttgatgtgccatcataattaagnattctgcacattatagttatgtactgctcctgttgaatattat

SEQ ID NO: 6082 - DNA, 367 bp, Zea mays
  unsure (1)..(367): unsure at all n locations
agcttcttggagcacatagatccctgatggtggtatccttggtcgataacagttgtccaagtcgcagaacctcatcttgggctacttgcagctcctgacgatgatgatccangtctgacatagtgaagcggnggctcctctccaatatagtcaaggagttactaacgtcatggtataacctatccagattgtcacgagaggccgcgagtgcctcgttctcctcctacgaacaagaagcaacattcaacacccaatcaacaatagcatggcaaagtcaaccaagggagtttacctcatgcgccatcctttcagagtcaagatgggcattgagggaggaattcaaagaacgtgcaccgtccaaagaagt

SEQ ID NO: 6083 - DNA, 334 bp, Zea mays
agcttgagttatgttattacagaccagactataagtgagtgcagagtagtagtattatacaaaccagggaggcacaaactcctcccgagaagcttaataaacgaaagatcctaagtggaggaccgagtcctcccgcacatcagtcttctttttcctcatttggtaccaccttggtgtaggattacggggaggctacgctagcgcaaaacaaaaattttcatccccataataccaagaactactgcggttataggtcatggaattaccactagacgcgcagagcagcggaagacgtctcgatgtagacgaacgcgtcgagcagtgccgtgcagtc

SEQ ID NO: 6084 - DNA, 468 bp, Zea mays
  unsure (1)..(468): unsure at all n locations
agcttctggacaataccatgtgatataatgatgttttatctgagtgtnaccctctttctcaaggatatgtgcaaatcctctaaagctcttcacgaagtccatttgcatatcacatttatgaccacattcatcattactgcttgtccagaactcatactctacacgctcatccggatggggaagggattctctccagtctagaagaacgctaagcatatcgccattttccgcggatttcttaaggctttcccccaatttctttgttataagcactgagggaatagtgatgctttctaagcgctctttgccttcttctgngttgtccattgtgataagaagtccgacttgtcatccacaacaagaaccgcagcagctccagcgtgtatgcattccatgccttggttgtgaagaagcatcctgctcattaataaacataatactcattagaacacgtttttctcactcatg

SEQ ID NO: 6085 - DNA, 448 bp, Zea mays
  unsure (1)..(448): unsure at all n locations
agctntaccaaatggacgtgaagagtgcttttctcaatggaccgatcaaggaagaggtctatgttgagcaacctcccggctttgaagatagtgagtatcctaaccatgtgtatgaactctctaaggcgctttatgggctcaagcaagccccaagagcatggtatgaatgcctaagagattttcttatcactaatggcttcaaagtcgaaaaggccgatcctactttattcactaaaactcttaacaatgatttgtttgtatgccaaatttatgttgatgaatattatattgggtctactaacgaatctacatgtgaggaatttagtaggatcatgacacaaaaaatcgagatgtcaatgatgggggaagtgaagtacttcttgggatttcaagtgaaacaactcanagagggcaccttcattagccaaacgaagtatattcaagacat

SEQ ID NO: 6086 - DNA, 341 bp, Zea mays
  unsure (1)..(341): unsure at all n locations
agcttgagtacaaactntctctctttcagatctattgtgtactgattttttcttccacaatgctgagaataacggtcatattgccaaggtcttcccagcagcaagtgacacatagacatgggtgcaacattgcactccactatgtcaacatactctcaaatcttgaatggaactttcaccttataaccaatcttgatatctcctaattcattcaaccattggacatgatatggatgagcgtgtcgctgcaacttctgaccaagcttttcaaccatctcacgacttacaagattatgatagcttcctccatcaatgatcccctttactattttgtcttgcac

SEQ ID NO: 6087 - DNA, 436 bp, Zea mays
  unsure (1)..(436): unsure at all n locations
gtcacctgcggcatgcaagcttgtgaaggttcttcatccncacatgtgctatgcggcgatgccacagccagcccatgctagtcttagctattaagcatgcatctagaccggcctcttcttttgcaaaatcaactaaataaagtttgccgtctaatacacccttaaaagctaatgaaccatcgcttcttctaaagacagacacatctacatttgtaaatagacagttatatcccatatgacataattgactaacagatagcaaattatatccaagactctctactaaaaatacattagagatagaatgctcattagaaattgcaattttacctaacccttttaccttgccttgattcccatcaccgaatataattgaatcttgggaatccttattcttgacgtaggaggtgaacatcttcttctcccccgtcatatg

SEQ ID NO: 6088 - DNA, 444 bp, Zea mays
  unsure (1)..(444): unsure at all n locations
agcttcacaaagaggaaccttcggctatcttatacaaacagcttcagccgaggaccacttcttcctataagaccttcggcgacgaagcatagacccaacatccaaagagcgattacattcggggatggaaaccgaggtttggtcaaaggattgggtaaaattgctatatctcctgaccattctatttccaatgtttttcttgtagattctttagattacaacttgctttcagtttcgcaattatgtaaaatgggttacaactgtctttttacggatacaggtgtcactgtctttagaagaagtgatgattcaatagcatttaaggggagtgttagagggtcagctatacttagtagattntgatagagctgaactcgacacttgcttaattgctaagactaacatgggctggctctggcatcaccgactagcacatgttggaat

SEQ ID NO: 6089 - DNA, 470 bp, Zea mays
  unsure (1)..(470): unsure at all n locations
gtcacctgaggcatgcaagcttctaaagggagaacacattttangactaacttatgttcattntgagaaagacaggatttgtagcgcatgccaagcaggaaagcaagttggcacacatcatccacataagaacataatgacgaccgacaggccactggagctcctacacatggatctatttggcccgatcgcttacataagcatcggcgggagtaagtactgtctagttattgtggatgattattctcgcttcacttgggtattctttctacaggaaaaatctcaaacccaagagatcttatagggattcttgagacgggctcaaaatgagttcgccttaaggatcaagaaaataagaagcgacaacgggacggagttcaagaactctcaaattgaaggctttctcgaggaggagggcatcaagcatgagttctcttcntcctacactccacaacacaatggtgtagtgg

SEQ ID NO: 6090 - DNA, 442 bp, Zea mays
  unsure (1)..(442): unsure at all n locations
agcttacaacataattgttccttcttcacaacctctgtaggatattatgaggaaccgagaagctactggaaggattggaaaatgggctgcagagctcaatgaattntgtattgaatatgttcatagatcttcgattcagtcgcagacgttagcagacttcattgctgactggacgccaggggctcangaggaagaaacaaataaagacgccgaagcatggacagtgttttgcgatgggtcctgnggaaccttctgagcgggagcggctgctgtgttggtttcaccttccaaagttaaaacctgctatgcngcaaagcttgattttagttgcacaaacaacattgccgagtacgaagccctgcttcttggccttctgaagctaatagcaatgggaatcagaagggccattcttaaaactgatttccaagttgttcgagtcata

SEQ ID NO: 6091 - DNA, 367 bp, Zea mays
  unsure (1)..(367): unsure at all n locations
agctnggaaggaatatggctgctcagttatgtcttatgcatggaccgatacaagacaacgacatttgatcaactttcttgctaatagtcctgcatggacattctttttagcttctgttgatgcatcgactgaggtagctagtgctgaaatgttggcagatctactagagaagcaaattgacagtgttggtagagaacatgtcgtccagatagtaactgataatggatctaactttaaagtagcagggagggctcttgtgaaaagaattccacacctcatttggacgccttgtgctgctcactgtttggatttattgttagaggacatcnggaaaatcaggaattcaatgactgtattactatggcaa

SEQ ID NO: 6092 - DNA, 402 bp, Zea mays
gcagttgtgatagccgtcgtctcgtttctgcttcttgttgccgatggcgctgccttgggcacctccacgtgcaccaccctcagcatgttctcacgctccggcctgggcgcctccacgcgccttgcgcggcatgccgcgtttgcggcctcgtgtcgaggactccccattcttcttgtcaccctggcaggcctcccactgctcccgagtgagatatagcttcccgccgatagtgataggcccagagggagcctgtggttcgtcgtcgtcgaccaccttgagacgacctatcgcctcttcgattgtcatcgtggagaggtctagcagagactcgatcgagcgagcaatctgcttgtacttctcggggatgcaacggaagagcttctcaatagctctctcctcatc

SEQ ID NO: 6093 - DNA, 323 bp, Zea mays
  unsure (1)..(323): unsure at all n locations
gctattaatttcttctcattcttcatgggatgtcaaaaggatctgtgagactaatcttggattggtctcccaatgatgtctgactaaacatgttttcaaggtgaacaagcagcattatcttgcaaatgttgccctaaaaataaatgtgaaggtatgtagttgcgctaactcttctaatcttgattntaacacctattctcctcttaaagttatcatacttttaaggttgggggaaggaatattgtgcttgttgatgctttggcaaagagaatcccccttgtcagtgacataacgactattatctttggtgctgatgtgaccca

SEQ ID NO: 6094 - DNA, 445 bp, Zea mays
  unsure (1)..(445): unsure at all n locations
agcttgtgcacaatttaacattatgtgaaaagtgttgcattaatatgtcttcttatccacatcctgaaatttgggaatttcaaggtgtggcattcaagggtcaaacacaaatgaaccttctattggtctttttttcattatagcaatgaatcgcttgtggtcctcagctgaaattntatgacgtgtgactacaacatggtttctaaggctatttgtgcttgaactctctttacttgtcaactatgccccacaatatttgaaatagccttactatcgacctcaattaactcatgttgaaagtacttcgaaacctttacccttctgatcggcatttgcacagattggtcatccgaggtggtattagaacccaaaccctcagatacccctcaatctatctctatttagaagaanaataaactaagttaagaattcatggatataatga

SEQ ID NO: 6095 - DNA, 380 bp, Zea mays
  unsure (1)..(380): unsure at all n locations
agcttagtgcctcatagagcatctagtattttgttttgcatgaggactaacaacgcttcaaatttcatgagttaaaaatcctttcaaaagcgtgtttgaaaagtgccaagtcttgggatgcgcggaccgtccggaccttgagggcggaccgtccgtgatcctccagtggggtccgaagtctgttcacttcggacaagtcctgttcatttgtactgcggactgtccgggccttgtggccgaaccgtncgtagtcctgaccagaggaggctgctctcggcatagtccctgaattaaagtgcggaccgtccgaccttgatgggcggaccgttcgcaggtgccaaattttggtttggacagggactgttgtggttctgggatct

SEQ ID NO: 6096 - DNA, 443 bp, Zea mays
  unsure (1)..(443): unsure at all n locations
atacatagagccgaccgcggcatgcangctataaatctacattaaatggattctgttttataccgtatctggactaaagccatcggaatcattgtctccttactgagacatatactgccttttctgcccatagagctgcattatcctattttggtcccacggaaaagagatcgaattgagtccattacggacacatcctatggttgcagcatgaccaccatacccttattgatgtcctcccatgtctataagcctcctaaccgacatcaagaacagagggttgtgtttataacaagattaactctcgctacttgcttgtaagcgcgtgtgctggttcacacgaccatcttcttcgctttggaacccaccatattggattttgattgtgagacctacatgtacatctggtataacaaactcgttctacttgtttgagctagatc

SEQ ID NO: 6097 - DNA, 405 bp, Zea mays
agcttatgaacattatgcaattagaaccacccaatttgtatttatttgcataatataagaaataaacaagtctcggaattcaaaatacacaactaagcccatttatgtgctatcctaaaaggtgtggggcttctctgcaaatttcagcgtctgcacgcacaacgcagggacagcgggtagaaatctgtacagccgaggaggttttaacaagatttctaagcagacaggtatcggcttatcttgaccgcacgatcgttgatcaaccgccaagatatgatctaatcaccagcgcgcgcgaaggcgcccgagtgagcttctacaaacgggtcaaggcggtcagcgactgtgtatgtgggacgggctgaccagtccatccatcagcatgtgcgcaagcactgacggaaa

SEQ ID NO: 6098 - DNA, 422 bp, Zea mays
  unsure (1)..(422): unsure at all n locations
agcttggtccaaggacagtggattgtgtncttcttgtataatcttcntgtaccataacatatagattcttagtactccaatctgaagatcctgatgtgtatgctgatactatcatggaatcacgtgatgctactttctttgagcatatatttccaatgaaagacattcatagcaattctagatactcttctgagataattcctgaacataatacacctatcgagagttttgaacagccacatgaaattgctctacacgaggatgacaatgatgctcctaaaaggagcaagagaccaagggttgagacactctttggtaatgatatcattgagaaccttgtggacgatactcctactaccattgcagaagctcttgcatctccagatgctaatgagtggaataagcagtcataatgagatgga

SEQ ID NO: 6099 - DNA, 462 bp, Zea mays
  unsure (1)..(462): unsure at all n locations
agcttagatcgcanaaaaatgaaattggaaggccctatgctcaaggtccgaaaacaccttcgcgaagctcgttatgaaacactagttttgggagcactctaataagtgggtccaagcggtcagtgagtgtaatagtcaaacttttaaaagtcgcccgtataaaaagaacgataaccatgggtgctggcacgacatatcatatgctacttgccttgctttcgttgttgttagagcttaatttgccttcgaagcttgccttagctagtcgcaaagcaattgcttttattagagatggctggagagcaatttgccttgagctgtatttgttacctttgtcagatgcgccagaatcaaaggttgaagacttgaccatgtcaacagaggccattggttcccagttcgatggtgatgttgcggatccgcccgaaggatcgagaggggatagtgaaaatatcaatatcg

SEQ ID NO: 6100 - DNA, 387 bp, Zea mays
agcttagtgcaagcgtgtggaatggaaagacaactaattctatgtgtatgtatggctcgagtgaagggcaaagtggaacggatggaaaacaggaggaggcgcgcggcgaccggcggcagggctgttcggccttgcgtctgggctgaaaacgacgtgttcgccatggcgcacgggccgaaaacggaggctcgggcacgaactccaaaataagctaagttcaagcatgtggaaagacaccgaacatacagtgtatgtctttggtgaagggcacagtggaacggagggaaaaccacacggaggcacgcggcgacgggcggcatggctgttcggccttgcgtttgggctgaaaatgaggcgttcgccatgtcgcgcgggccgaaaacaacg

SEQ ID NO: 6101 - DNA, 470 bp, Zea mays
  unsure (1)..(470): unsure at all n locations
agcttctaaagtgagaacacattttgggactattttatgttcattttgagaaagataggggttgtagcacatgtcaagcaaggaagcaagttggtacccatcatccacacaagaacatcatgacgaccgacaggccgcttgagctactccacatggacctattcggcccgataacttacataagcatcggcgggagtaagtattgccttggaattgtggatgactattcttgcttcacttgagtgttctttntgcaggataaatctcatacccaagaaaccttatagggattcttgagacggcctcaaaatgagttcggcttaagaatcaaaaagattagaagcgacaatggaatggagttcaagaactctcaaatagaaggctttcttgaggaggaaggcatcaagcatgagttctcttctcctacacaccacaacaaaatggtgtagtggagaggaagaatagaactc

SEQ ID NO: 6102 - DNA, 441 bp, Zea mays
  unsure (1)..(441): unsure at all n locations
agctngaggtgccgcgccgcanaggggcggctgaataacgccatcagtcccgcgccctggtgatggacggcgccgaagcccgtaccggaggcgtcgcagtagcagtccatggcgaaggtcttctcgaagtccagcatctgaaggaccggacctgtggtcaaggctgtctttagctgctggaaggcaacctangtgtcgtcgtcccaggcgaaggcatcgcgccgcagaaggcgcgtgagaggtgccgcgatcacatcgaagtcacggatgaacttcctgtagtagccagcgaggcccaagaagccccgcaagccacgagcgaaacgcggtaccgaccacgaggagacggcctctaccttggtcgcatccatggccaccctagcggcggatatgacgtgcctgaggtacgccaccgagcgtgccccgaaagagcacttggag

SEQ ID NO: 6103 - DNA, 386 bp, Zea mays
  unsure (1)..(386): unsure at all n locations
agcttgaagctgggttaagtgccatgacgaatgaggatctcgcagacagccttgcgtataatagcttgaaggtaccggaattaaacacttgaaaaaacccccttattatttttacgcacatcattcctttntccttatttgaattctttttcgtatagggcctgatcctaagcaacgcgctaagagcgcagaagagcgccgaagatgaaagttatgaaattgcgtttaataatttacgctccgaagttatcaagctgagaaatgaagctttggaaaaagataaaattctgtttacattggtggataaagtgaaaaaagacgaagccgcttcaaaggcccaatccgaagctcanaaacgcgagattaaagatcttccgaaacaactg

SEQ ID NO: 6104 - DNA, 423 bp, Zea mays
tgctgaggctgtgtatatattaccgcccttttttgtgtgtactatcaagaacaagtatcctgtgcctcggattgatgttctttttgaccacttggtcggggccaacgtgtttttcaaaatagaccttcgctctggctaccatcagatcaagattcgagcaagcaactttacgaagacgacattctcaaccagatatgggttatatgaattcttggtgatgtctttcgggctgaccaatgcaccagcatatttcatgtttctgatgaattcatgtttcatgcctgaataggacaagttcgtagtggcgtcatcgatgatatcttggtgtactctaagaacgaaggagaacatggcaggcatttgcatgttatacataaagcgttgcgagagcaccacctttatggcaaggtgtccacgcgtgat

SEQ ID NO: 6105 - DNA, 292 bp, Zea mays
gcttggatgctcagaggtctgacaatgttctctctaaacgttcttgccgagccgatcaacccactttttctgctgaggggcagaaaaagaagaagagacgtcttcgtcgagtgtctagcttggatcagggtgccggtccttctgttcctgttgctgaggaagtgccactgcctgaatttgctgaagctgaccgtaatgggtgtgtcccgtttgatgctgacccccatgggtgtgatcctgctgaagctgaccccaatgggtgtactgtccatgttgttgatgaagatgatga

SEQ ID NO: 6106 - DNA, 460 bp, Zea mays
  unsure (1)..(460): unsure at all n locations
agctnggatattntcatcagaacactntggatattgttatgataaatgacaatccttcttcacgaagcatgaaaagaagggaaggtgttttttcgtcgaagactcaaaaacggtatgtgtttaaaatttcatgcatcgtaaagaattaaaccataaaaacaagtatattacattcagggttacaagatattacacatattacacttcgaatgtttttacaatagcacctagtcttccttaagtgcgacttctgcagcctcgttcaggagccgattaacaacttcatccatgatagcttcagccatctttttaatttcgtcgtctcctttcggnggaggtcccgaagacgctttagtangatctgaaggaggacaggatacggctacattgctattacaaactgcgaacgaagtttaaaatcgaaaattacaacacaataaaaaccattagttgataccta

SEQ ID NO: 6107 - DNA, 456 bp, Zea mays
  unsure (1)..(456): unsure at all n locations
agctnggacggtattctgtgatggatcttgtggaaccttcngtgcaggagcagctgctgttctagtggcaccctctaaagtcagaacatgttatgcaataaagttagacttcagttgtacaaataacattgccgagtatgaagctcttcttttagggctttggaaattaaaggcaatgggaataagaagggcaatcgtcaaaactgattcacaaattatttctggccacgtggataagagtagcaaggcaagagacccaaagcttgagaagtatttggatgcagtccgaagattggaagcttcttttgagggattttctgtaaaaaaatatcccaaggggagaaaatgagcatgcagatttgctagctaaatcagcggcacaggggcttccttttgcttcggaagtattttntgaaacaataaaagcaccctcagtcgagctcatggagagagcag

SEQ ID NO: 6108 - DNA, 349 bp, Zea mays
  unsure (1)..(349): unsure at all n locations
agctataagacaagatagtgcttggcaacgatgattatttatttattagatgctcttttaccgattctattcaatcggcttctttttccttctgctctttggagcattacaaacaatgaggtactcatgacttcaaacatggcccgaatgtctgaaattgactggcgtcaactattttacacagaattgtgtgaagctgctgcactctggcataaatggaactaaacaaacatcacacgaacaatatatggatgctcactcattgttccggaaagaattttattgtntaatgcgcatatatatgatatgcaaatacttgttatgtactactttaatatagttatgcatt

SEQ ID NO: 6109 - DNA, 467 bp, Zea mays
  unsure (1)..(467): unsure at all n locations
agcttgagccagtctcacggcttcaccaggaagtcttctgagggcctggatcgaacggaggaggacgggagaggggctggccacggtggttgctctcgggcggcactggcgggtcgcggggaggtcaccggagctaatggctggctcgggtaagtcaggcgaggtacggaggaggtaacggggaaggcagccaagcactggggcgggctttatagccgtggcgcgggcgtggtcaagggcggctgcgggcgcgcggcgttcgcgcacgggcgtgctctgagcgcgcccccggatgccagcttgcgtcgaacacgtggaagcttgcttctaccatggttcaacggccgattagagcgccatagcgtgcgtatcttggcaaagtcactgtgtacggtcgcttctctggctcaaatcctatcttttcgctgtgagttccaagtcgagatatggtangggtagggagatag

SEQ ID NO: 6110 - DNA, 453 bp, Zea mays
  unsure (1)..(453): unsure at all n locations
atgcttcttgcgcacagcttcggctctattccatccttcgntctctntgngtttcttcatccagcaattttgacttgtccgaagggttcgtgtctgaaggtacctgctcatgtattatattccagaaacattgtcaaatcatgtttttgaggaccttcggaagccgaaggcccccaacagtagcccctcgcgatattaatttgttaggataataaattcagattgcgatatggatgaaggccctaagccgaaggtccgaaaaaacaccttcctcttgctagaatagcaacagtcaatgtcaagcggngccctcctgttctcaatgcgccagatgtataaataagagcacaccgcaatgtcattnggtacgctntctttgccatctgctcttgcttactcagnttttagctcctgcgcaacaagaattgcttaactttgtaagtttttaagctt

SEQ ID NO: 6111 - DNA, 414 bp, Zea mays
  unsure (1)..(414): unsure at all n locations
agcttaatgttcattctattgtctcatacatctatcattacanaaatattttacgataaagtctattcttctctgagaactttttccgcaacttcgtttataagtttatcgacaacttcgtcaataatggagttcaccatgtatataatgtccagcgcttacttcgtttccggatcagctaggggatcgtacggntccggcggcgaagatagttcagctgaagtaagtaaaattgattagttcgaagccacaaaacaagtaccgaagctaanaaaccaaaaaataatacctatatgcctttcacgttctgcagcctctttagctcgttttgcttttgcttgggcgtcatgggtgtctttttcactctntnttataatctcatgggtcatctctcggccaccattcacccagaca

SEQ ID NO: 6112 - DNA, 193 bp, Zea mays
  unsure (1)..(193): unsure at all n locations
gtccgaaaagctgattcaactctctttactaaaaatgcaaaagggttgtcggtatgccaaaattatgttgatgatatcatatttgggtctactaacaacattacatgtgaagagtttagtacgatcatggttcaaaattcnagatgtctatgatgggggagctgaagtattttctatgatttcaagtcaagca

SEQ ID NO: 6113 - DNA, 379 bp, Zea mays
  unsure (1)..(379): unsure at all n locations
agcttagttgttaagaagaatntggagaatactctgtctaaagttgggctgtcaggctgctatgtctgaattttcatactagcagtgaactgaccttgacttcaagctgggttctgagcatgatccagtgctcaaatgagtttgatctctatagttggattgtagctggtttgtaactctacaactntggtacagagtattgacaaagttgcagtgtaaaatttggagaaatactgctctgaacttgctctgtcaagctaactgatggagtcttctcatggcacacgaccccgagttgataaggtcgtcagcaaaccgccgccggtggcttttcaccgagattcacgtcgccggagtcatgattcgcgctcgggtgtgt

SEQ ID NO: 6114 - DNA, 466 bp, Zea mays
  unsure (1)..(466): unsure at all n locations
agcttaatgaagatcagtagaaatgtactatattataaactcangatactcttgtaacaagttttgtaaatacaattgaactgttctcaaggaactttgtacataccttgtaatatattcttacccttcggttgaggtgctttgatgtggacgaaatcagtatttcgagccgaaggcgaaaaaacaccttcccttcttttcgtacacaacgaagcataaaaggccgctttctctttttgtcgaagcctttccttacataacaaaacatataagactgctactcttatctgccgaagcttttatttacatgacataacatataagactgctactcttatctgccgaagctctttattacatagacaaacatataagactgctactcttatctgccgaagcttttatttacataacaaaacataaaagactgcttctcttattctcaacgattcatataaaaccactt

SEQ ID NO: 6115 - DNA, 437 bp, Zea mays
  unsure (1)..(437): unsure at all n locations
agcttcttcctcctctacctctcagagttagtgttctgtaagaagattgctgcatgcccgaagactgtgagctacgatgactgctctgagcattgttggccctttcatcgatggcattggaattatggattgacctgacatgcctgtgatgaagtcttcctccgaagcccctagtcatttcagaaaacctgtatgcttcctcccttctttggcataaatcattatcatcccggatgtgctcatncatcttctgaaggagtttttacaaagtctggggtggcttccttgcacaatattatgttgtaggtcctggccgaagccattgatcatagcctcaataacaatttcattgggcactgcaggtgcttgagctctcaaacgcaagaaccttctgacgtatgctcgcaggtactcctcatggacatgcgtgcattgaa

SEQ ID NO: 6116 - DNA, 458 bp, Zea mays
  unsure (1)..(458): unsure at all n locations
acagcgagggtccttcattctcatatatgcagaaacgtgctaacatatgttgatgatatcatagtaaaaagcacgaagcaagaaaaccacattgctgatctacaggagacattcgctatatttaggcaagctggtctgaagctgaatccagaaaaatgtgtcttctgagtaaagaaggggaaattccttggttgtttggtttcaacaaaagggatcgaagctaatccaaataaaatcgaagctatccttctgatggaaccgccaagcacaaacactacacgacggttcacttacagcaacctacgggtggttgctaaaacggccttcagcgacctacagttggtcgctaaaaactnttagcgacccataaggatggtcgctgtaagtgccgtcgctaaaggctttagcgaccgacatctttttagcgaccgactgtccgttgctaatatgatatattt

SEQ ID NO: 6117 - DNA, 416 bp, Zea mays
agcttctgccttttgaggccgaaagtggaaataaattattctgccgaagaatgccagagggccttcggcgtcatctgctcttttattggaacacgagatttagtacaagaacatattgccttccgggtgtggccgcttgcggagaaatgggaaatgcctcaagatactataaaagagaccgacgaatgtgggcttgtgagactgaagtacaccttcaagtttggagataaatttactgagccagatgacgactggctaaagagtattgaaaatttaagtgacgaattgcttggtgcttattcgaaggccgaagataccgcgatgtcagcagccttcggaggccgaaataagaagaggctgaatcgggtatttgatgcaattgggttggtttaccctgactatagctaccccgtccg

SEQ ID NO: 6118 - DNA, 462 bp, Zea mays
  unsure (1)..(462): unsure at all n locations
gcttcaagtgttggatacctcggcaaacttactctttatggtgagacctttggacaggatcaggtatatatgtctgatttgagtgtctcttttctcatattcttgtgaattgactaaggttgatntcttccataacaaatattgttttagtctgaatatgttattgttgtcatctgaatatattcagaagtggctgattctgcatttgtagcatgtgcagtgtttaattcacaaacaatgttttttactacnttacataactactaacaaattagtttaggccatgtcgacaaaatttggtgcccagttgctgtaaagcccacaattggtagatggataataataatatatataaacacatatatctattatagtggtttggatattcttgacaccttggattaaataataataataatgatagaattttaaatggagagaanaatataagaaaagaatgtc

SEQ ID NO: 6119 - DNA, 470 bp, Zea mays
  unsure (1)..(470): unsure at all n locations
agcttctaaagggagaacacgtgataggtctattctatgttcatttcgaaaaagatagaccttgtgcagcttgtcaagcaagtaaacaagtaggaggagtgcatcacagcaagaatgtgatgaccacgtcaagacctctggagctgctgcatatggacctcttcggacccgtcgcctatctgagcataggaggaagtaagtatggtctagttattgttgatgacttttcccgcttcacttgggtgttctttttgcaggataagtctgaaacacaagggaccctcaagcgcttcctaaggagagctcaaaatgagtttgagctcaaggtgaagaagataaggagcgacaacgggtccgaattcaagaatcttcaagtggaggagttccttgaggaggaggggatcaagcacgagttctccgctccctacacacctcagcanaatggtgtggtagagaggaagaacatgacc

SEQ ID NO: 6120 - DNA, 450 bp, Zea mays
  unsure (1)..(450): unsure at all n locations
agcttcagctgaagtgtgaaggaccctctttgtgtttatcttcatcaagacccggntcttacagattaaaggacatggatggcaacgacattcctagatcttgtaatgcagatgagcttcgacgatattatgtataaattgatgtaatctttttcatttttcctatggcaccctcttcctttccaaagggggagaaaggtttttaatggggccatagttngtaaactccttctttattcagctctatgagagcaaaatcccccaagatatgtaaatgtaaaatctgagcatgcaccatcgagtgcaaagagaaataacagggagaagctcgaaagtcatccctaaggggatgcagagcacgatgaagctacacaaagtcgttcctataggagcgcagcgtaagttttctgctccatagtcgttcctaatggaatgcagagccaaatacca

SEQ ID NO: 6121 - DNA, 450 bp, Zea mays
  unsure (1)..(450): unsure at all n locations
agcttgagcttggtttgttcgctatgacaaaggatcatcttgtggacagcctcacttacaatagcttgaaggtttgtacattttggcttcgtatttggtacttttcgttatagtggactattttgtggaaattcttacaattattgtttgttcgttcttctgtttggcagggtctaaaccttagtaaggctctgaaagctcaaaaagatgatgaggacgaaagctgccagatagcacttggaaacctccgattggaggttataactntgacgaacaaagcccttgaaaaagataagatcttgctttctttggttgagaggctaaaatccagcgaagctaagttatctactcaatcagagctacatagatatgagattcaagaaatagagaagaaattatacgaagcgactaataattntaatgtggagctgacaaaacgtgaaatatctg

SEQ ID NO: 6122 - DNA, 402 bp, Zea mays
cttcatcctcacatgttctttacggcgatgccacagccagcccatgctagtcttagcaattaagcatgcatctagaccggcctcctctctttgcaaatcaactaaataaagtttgccgtctagtacacccttaaaagctaatgaaccatcacttcttctaaagacagacacatctacatttgtgaataaacagttatatcccatattatcaaagtgactcacagacaacaagttatatccaagcgactcaactaagaacacattataaatagagtgctcggatgaagatagcaattatcctaaccctttcaccttgccttggttcccatcaccgaatatgattgaatcttggggatacttggtcttgacataagaagagaacatcctcttctccctcgtcat

SEQ ID NO: 6123 - DNA, 435 bp, Zea mays
  unsure (1)..(435): unsure at all n locations
cagtactgtgccagaatttaagcatatttattgagcgatatcctacctctgaaatacttttatgttctatgtcattttgttttttaataaggaacaagacaagtagatctagtttcaagttcttgtaatgattttgcttctatcgagatggaatatatcttcttcatagacttacgaagctcaaaaattgtcgaagctcaaaagtcgttcctaagggaatacagagctaaaaattgctgaaattacaaaaaaaatgtcgttcctaaaggagcgcagcgtaagttttgccaaagatataaaaaagtcgttactaagggagcgcagtgtaagttttctgctcaaaagtcgttccataaggaatgcagagccaattacccgcgaaatataatgcgaagaagttaaaagacatttctaangngatgcagaacttatacc

SEQ ID NO: 6124 - DNA, 371 bp, Zea mays
cactgccgctgcaactatactttttagaaatcatctaaaataattttttatataatatacctttcaccctaaacctataaagaatatttgaaaatcttataaaagattttggtccttacacataccctttagtggctgactatgacaacataccctatgaccatctccaggtcggtgcaatcatatgccccaggcctaaatacaaactttctgcgcactagatccggtgcacccaccaactctgtcccgatggcccaaacctttgtgttacaaataagctctttacgtacgtagtccacagctccactaaacctggtctgggtgccaaagcatcttgtgccctaatagacactctacaacgccggttcaat

SEQ ID NO: 6125 - DNA, 389 bp, Zea mays
  unsure (1)..(389): unsure at all n locations
agctntgattggaagccttggaagctagtgagaatcttttcctttaacttctgccatgaagaaacagttattggtcaaagcgacgagtaccagtgtaacaccctgaatttgggggtataaaatatcttctctaatatctaccaaattcaagtgtatagatttcttctctgtatagatatcttctctcttcctttattagaatgtgtttatttatttgggagatatattatttccttagtatattaaaacctatgggagacatggaatgttacatcatgatgagcctaaactttgcttntgattgatgcacatgtttgaaatattcacatttgtatttctgggttgattggatttgaattcaacagaagaaaataaaagaaaaatgatta

SEQ ID NO: 6126 - DNA, 327 bp, Zea mays
  unsure (1)..(327): unsure at all n locations
cgaagccttcatgtttcataattttttggaganaaattgtcaaacccgaaatagaagagcttatagagtatgccaaatcttgcaggtacaaaccaggagcactcctcttcggaggtattgatgatgaaaaattagatggtatccgaaaccaaactggagccaaagttatcggtactctgtcaaagagtatcggttttctgaagctagaaacggacattagccgctaccgacgacaacatatcgttggtagtttattttattccaatatcaaggtgaactacttttcccttaacttatatagggtttaataatgaaaacatgtctaac

SEQ ID NO: 6127 - DNA, 469 bp, Zea mays
  unsure (1)..(469): unsure at all n locations
agctnggaaatngaaactaggtgttcactacaagcatcaatgtcaatatctttacacctagtacaaattacaacatgttctacacaagaattagatttatttgctacttctaatttagcatttaaatcattgttgacaccttctagagtagaaatggtttcatgaaaagtagataattcaccagagagtatttcatttcttttaatttctagagcaagagaattttgtgcctctacaaatttgtcatgctcttcatacaaaagatcttcttgtttttctagtaatctattcttgtcattcaaagcatcaatcaactcattaatcttatctattttagatctatctaaacccttgaataagcatgaatagtctatgtcatcatcatcactagactcattatcactagaagaagcataagtggagtctcgagtactcaccttcttctcccttgccataaggcatgtgtgac

SEQ ID NO: 6128 - DNA, 389 bp, Zea mays
  unsure (1)..(389): unsure at all n locations
tgcctggacataatgccgaagcttcctgttgtcttttctacancatacaacactctctacaagactgtgtgaaatctctttgataagcttaacacttctaagacaaaatattctgggacttgctttttatttagtccttcaagcttctctagaacaagtgccccactcactgcaaagtgcgaagctgccacatacaatagcacatgatcccctggcacgggtggaggttacgttgttagatctatcacgtattgcttcagctcttcaaagctttctgcgaactgatccccattgtaagacttcctcgacttcagcacttcaaagaatggtagatatctctctactgatctagatatgaatcaattcaaagatgccaactcttcctgtca

SEQ ID NO: 6129 - DNA, 461 bp, Zea mays
  unsure (1)..(461): unsure at all n locations
agcttgtgctctcgataacagggcggntcatgctctttatcctactaacaagaaacagaagaaggaggctctgtgaagagttctacatgtaggggtacaaggaccctatatcaagtctagatggtctcacatcccgattaccttctctcaagaggatcctcagctcaagtattacccacacaatgatgctatggttatcctcttgtgtgatcaaagggtttctggtccacaatgttttggttgatacaggtagtgcatcggatattatatttgctaaggccttcagacagatgcatgagcccgaagacaagatccatgatgccacccattcactttgtggcttcggaggaaggcagattgttcacttggcaagatcacaatgccagtaaccctcgtatttatcaacaacacaacgactgaactagttgtgttgatattgttgcattgaataccttacaatg

SEQ ID NO: 6130 - DNA, 467 bp, Zea mays
  unsure (1)..(467): unsure at all n locations
ttaagnnacctgcggcagcaagcttcggcccatctatgttgtgaatcgctttttatgtctgtccagcttccttcggctttcctagcggcttcctgactcccatgaacagcaatgggcccttgttccgaaggtatcttcatgcatagatatgctggatgaagtattgcttcgaaagcattaagtgtcccacgaccaatgattgcattgtaggggtattccatatcaacaatgtcatacacaacctgttcagtccttngattgtggacgaacccaaagtcactggcatcgtgattttgccgagtgctgtaatctgcctttctccgaagccacaaaggaggtgtgtagcatcatgaatcttgtgctctggctcttgatctatctgaaggcctanaanatatgatatctgctaactgcctctatcaaccagaacattgttgaccagaaatgccttgatgacacaagatatg

SEQ ID NO: 6131 - DNA, 464 bp, Zea mays
  unsure (1)..(464): unsure at all n locations
agcttctaaagggagagcacattntaggactatccaatgttcattttgagaaagactggatttgtagcgcatgccaagtangaaagcaagttggcactcaccatccacacaaaaacatcatgacgacagagaggccgctcgagctactccacatggatctattcggcccgatcgcttatataagcatcggcgggagtaagtattgtctagttattgaggatgattattctcgcttcacttgggtgttctttttgcaggagaaatcacaaacccaagagaccttaaaaggattcttaagacgagctcaaaacgagtttgaattaaggataaaaaagataagaagcgataatgggacgaagttcaagaattctcaaatcgaaggatttcttgaggatgagggcatcaagcatgagttctcttctccctacacacctcaacaaaatggtgtagtggagaggaagaat

SEQ ID NO: 6132 - DNA, 116 bp, Zea mays
caaaagaagaccttcgcagcaggtatgcacgaaacaagtggaggagtcatcacagcaagaatggaagaccacatcacggcccctgggccgctaacatggatctctacgaccccacg

SEQ ID NO: 6133 - DNA, 383 bp, Zea mays
  unsure (1)..(383): unsure at all n locations
agcttaatgcccctaagaaattgtctaactctgttaatggcaaagctcccatggtttaagataatgagggctatattttatatcctgctaattatcctgagcacaaaattatgagaattcatgctaggaaacctcatactgtttcacatcatgcttttatgtataaaaatgaggcttctagctctaggcaatcaactcatgttaaattgcctaaaaggaaaattcctactgcatcaaatgatcgtaatatttcattcaaaacttttgatgcttcttatgtgctcactaacaaatcangcaaaatagttgccaaatatgttgggggcaaacacaaggggtcaaagacttgtgtttgggtacccaaggtgcttgtttctaacgtg

SEQ ID NO: 6134 - DNA, 407 bp, Zea mays
agcttatgaagattcttcatcccaacatgggctagtcttttgtgccagagccaacccatgttagtcttagcaattaaacatgtgtcgagctcagctctatcaaaatctactaagtatagctgaccctctaacacacctttaaaagctattgaatcatcacttcttctaaagacagtgacacctatatcagtaaaaagacaggtgtagcccatctgacataattgggaaacagaaagcaagttgtaatctaatgaatcaacaagaaaaacattggaaatggaatggtcaagtgaaatagcaatttacccaaacctctgaccagaccttgtgtttcatccccgaatgtaatcgctcgttggggatctttgttgttctcataagaagagaacatacttttctcccctgtc

SEQ ID NO: 6135 - DNA, 439 bp, Zea mays
  unsure (1)..(439): unsure at all n locations
agcttcagcaacaggggctgccgctctgcagnctctggacccgaaccaagagactctttctcttcgagaggcccgaagccagaagaggaaggccactagtccaacaccccaggaggacgagttggaccaagaaatcacgaatatggagatgcttcatcaacaagtacaaaggaaaaaggaaaagatggctatactagccgacctttataggcagattgacgaagctactgaagaagtacgccatctcactcaagatgagcaagagcgaaggccccaacatatggagcttcatcaagaaggcttcttcaacgaggatgaatggtatgagaatatccatcatggaaattttgctnttgatgatgcttctcctctgtcaacagaactgcaggctacaccttggccctcatcttacaagccaacccagctacccatgtatgac

SEQ ID NO: 6136 - DNA, 431 bp, Zea mays
  unsure (1)..(431): unsure at all n locations
agcttctccaagggttggtggggcttccttgcaaaatattgcgtcgntggtcctggtctgagctccttgatcatggcctcattgacaatctcattgggcactgtaggcgcctgggctctcaatcgcaggaaccttcggacatacgcctggaggtactcttcctcgtcctgtgtgcactggaatagggcttgagcagtgagtggcttcgtttggaaaccctagaagctagtgaccagcatgttttttagcttctgccatgatgtaattgtccctggccaaagagaagagtaccaagtttgagctacgcttttgactgccatgatgaaggatttctccatgactgcagtattgcccccatatgaagatatggtcgcttcatagctcatcangaattgcttcnggtctgagtgtccatcatacatangaagctg

SEQ ID NO: 6137 - DNA, 403 bp, Zea mays
agcttcacaagaatatctttatattgtgagtgtctataagaacaacaatatctttggattatctcatggatatcttctaaaacatttgtaatcgctcgaacttgaatttccaaagaacatgagtgtgattgttatatgccccaacggaatgcgtccttctgtcacatgctttatggacagggcaaaaaagtcaatggtgctagcatcaactctagcttcgatgtgcaccaggcatgtttaaagctttgttgtgcttatcaatgtgtctgttttcatttctctttctctggtcttttgaaaaacatattccagatgtgtttggtgacagatgtgctttattcttttactaatggtttttcattgtgtaagatgctgacgggagggctactgatgttgcttaaca

SEQ ID NO: 6138 - DNA, 322 bp, Zea mays
  unsure (1)..(322): unsure at all n locations
tgttcattcngagaaagaccagatttgtcgcgcatgtctaagaggcgaataagctggtgttcatcatccacacacgaacattatgacgaccgacaggccggttgagctacttcacatggacctattcaacccggtagctgacataagcatcgtcaggagtaagtattgtcctgtaattgtggatgactattctcgcttcacttgggtggttctctttgaggaaaaatgacgcacccaagagaccttaaagggattcttgagacggtctcaacatgagttcggctcaaggataaaagagattataagcgactatggaacggag

SEQ ID NO: 6139 - DNA, 377 bp, Zea mays
  unsure (1)..(377): unsure at all n locations
atgttcttacgaagcatggatattntcacgaagcatggatattnttacgaagcatggatctttttctttacgaagcatgaaaagaagggaaggtgttttttcgccaaaggctcaaacacggtatgtatataaaagtttcatgcatcgcaaagaagtgaattataaataatttacatattagattaaaaaatatacacatcgaatattacagttntgttacagcaaagttacattgaccatctaaaaatgtttttacaataagtactagtcttccttcaggatcttatcagaaacttcatttagcaacttgttaacaacttcgccaacaatagcttcggccatgttaataatctccagggcctccttcgtttctggat

SEQ ID NO: 6140 - DNA, 466 bp, Zea mays
agcttattaggggggaaaaccgaaaactcattttcctctagaaaaccatatcattctgaaaataagaataaaaaacaatatatcgagatataccatgccctgttatagacataggtgccaactgatattttgcttgtgcggtataaacagacaaaacagggaagttctgcaaatacgaaccaatcggaggacattgccaaccaggagcaatatccatgatgattttaaccatgagcaataagctaccattagcaaacatcaatttgaaatgttacagcctaaggaatcacatgcccatcattaaccactatgttaccgcatcatattacatatcacaactacaatatatcagccagattacccaaaggacataataagttacatatagcaggtaacactgtgcttcgctttatcacgtgagacatgatgctcaaatctgcagcaattactgccatgtcagaaactt

SEQ ID NO: 6141 - DNA, 446 bp, Zea mays
catgcaagcttgtgtgcacttatcaccttggacaagaatggtagtaaccctaaacccctcttgaaaccctacctcctaaacaccatggttgaaggggggagagattaagcaaatgtgttaaacatgacctaaccctcggctaaagttaagtgacacattaatccacaaatatggagagggaacattgcaaaaagaccccttaagaaaccccaaatccattccttaagtaaagaaagagctagagctctctaattctctctaagtcaaaatctacacctaatctaaagatccaccgtgttcaccttgaagatggcaccaaaaccacctaagttctataccataaatgtggcataccacctaaggcaccccctggaaaaaagtgagactgagcccttgacatttgacatgtcttggcatcacttttgtcgcgcaacgggcagggggac

SEQ ID NO: 6142 - DNA, 305 bp, Zea mays
  unsure (1)..(305): unsure at all n locations
tagtggcacctatacaagtcaaaacatgttatgcaaccaagcttgaattcagtcgcacaaataatattgctgagtacggagcaactttgttggggcttctctaagtataagggcaatgcggaataaaaaagggccatcctgaaaactgattctcaagttatttctggccatgtgaacaanattaacaacgcaagagatctgaagcttgaaagatatatggatacagttcgtacgctggaggctgttttcgaaggtttttctgtcaagaatattccaagaggtgaaaatgaacatgcagatttgct

SEQ ID NO: 6143 - DNA, 395 bp, Zea mays
  unsure (1)..(395): unsure at all n locations
agcttctgcaattnttctggcaggagcaggactcatggtttctgttgtttctagcacatccagtacatttaccattctcctcctcttaggagttacgacagaacccatttgtaccttcggtactgttaccttttctgaagggctcaaaacctctaccatcttcgttatttcttcaatttctggcttttcagccttatcaaccttcgtttcaaccaccttgactgaagggaactttggcattatagccggttcttcagtcctcttcgcaggaggagcggtctcttttattttggccgctgaagaggtcccttcatcaaactcaggcaccacagccggttcaatgtaacgcggccggtgggtaagtaccttcataattttgcccgagtcttcgggac

SEQ ID NO: 6144 - DNA, 169 bp, Zea mays
acttcatcaaaacaaatgatctaactccaagatgcttgcttcaacccataaatggatttctgaagttgcatatctttccaacactgatcgatcaatagaacctctccggttgatcatatacatgtccttatctatggttccattaaggaaaactattttgacatccatc

SEQ ID NO: 6145 - DNA, 450 bp, Zea mays
  unsure (1)..(450): unsure at all n locations
tgcaagcttcgcgggatcaaatacagcgtgtgtgtggttgtggatgtcacngtgcatagcgggcaagatgtgaattgttcgccagagctggggatttccgccatggccattctttcttgacgacgggactctgtcggatgccatcattggtgaactaccttccatgacgatcgccttgttctatctagtgtataacgcccatcgtccataggatacgggtaccgggtcgccggattcgccgcacgctggtggagagccgccacgggcatctgctacaccttctctggtcatcgcgtggtggaagaacataagcgcgtcgtcgaattgtgagtgagaggtggagattagaatgagtcttaccccttcggtgtttaaatccggaccctcatttagatctgaccgttagaaccagtcgggaacttcgcgatctgggtcgggttctctgatcca

SEQ ID NO: 6146 - DNA, 453 bp, Zea mays
  unsure (1)..(453): unsure at all n locations
agcttctncgccaatctgaacagttcgaacgagaatagcaagatcttaatgcanaacttgaagccgaagctcaacaaaattcagatttgagaaaactattgacaagccttcaagaaaaatgtctggaatttagcaacaaatgtattcaacgattaagaaaaatcttccactcagttggagccagcagtgaaaaattcaccccctcagctgaagatctatcgaagaccttcgaacatattgaaggtgagattgacgagctcaacgaagtcatagctgggcacggtgacttctgtgcctgtgtggcttctcgaggcactgctgcagctttcctgaaagctggctgcgatcatggaaagattgtcaataggccaaatttcactttatcaccatcaatcctggatgacattcctgatctcgcccgaagtatctctaatagatntgtaanaatgatat

SEQ ID NO: 6147 - DNA, 412 bp, Zea mays
cttcatctatattatggattgtcttgtgattagtccagcttccttcggcccttctggcagcttcctgactcccatgaatagcaataagcccttggtccgaaggtatcttcatgcaaagataagcttggtgaagaattgcttcaaaagcatttagggtaccacgaccaatgatggcgttgtaggggtattccatgtcaacaatatcaaacacaatatgctcagtccttgtgttattaacaaatctgaaaggtaccggcatggtaatctttccgagtgccacaatcctgccgcctccgaagccacaaagagggtgcgtagcatcatgaatcttgtcttcacgctcttgcatctgtctgaaggcttggccaatataatgtcagctgcactgcctgtgtcaactatgacattgtga

SEQ ID NO: 6148 - DNA, 355 bp, Zea mays
ctagccctcctctgtatattgtatactctaagggtccgtgcaccgacatgaaattatcttggatgaaaccacctttgatgaaagcactctgattccgaggtatcataatattgagcttcttatccaaacgagaggcccacactttactgatgagcttaacaaagctatgcgctaatttggtcgcatttgctaagttggttatattacttacccacgcactgggttactctctttagttggattagaaaccaactgcacattgcgaccaactcatccaagtttgttttatctagtaagaaaggggataacctattcctttccttaaacaatcaatcccatgttgggcgattatata

SEQ ID NO: 6149 - DNA, 410 bp, Zea mays
agctttcgagcttcggtttaggaacgtgttttctctatgtctagggagaagatgactgatgaaaagaatataactgcggaaacgaaggtaactcaagggatgaagtcgtttgaagaaaagaaaactgcggatccttttatcgccgggtttgttgagtctatgtcaaaaacaaacacagagaagattactaaagagattctagaaggtttgtctgaagatactaatgatagtgatagttatggtgtggaaagtggagacgaagattctgaagatcgttcctagcgaccaagccatactgtcttcggaatatcgactattaaacagagtcatcttgacacatgagaggaaggtactttctggacatgtctatcgtgagagttggcgaagacaacaacgtccttgcttctgag

SEQ ID NO: 6150 - DNA, 453 bp, Zea mays
gcaagcttatcatgtgcgagttctggatcagcaaagttctgttcttgggtcatattataaaccgagatggactagctatggatccaaagaaggtagcaacgcatctggactggaaagcaccaaaggatgtctgaggaatcaagagtttcattggaatggccggatactatcggcgtcttattgaacgtttctccaagattgccagaccaatgacagccttgctagaaaagaacgttgatttcaagtggaccccagtgtgcaatcatttgaaatgttgaagcagaagttgacaacaacaccggtgttggatcttgcacactgtcacaagccatacttagtatattgtgatgcttcatacaccgcactgcgatgtgtgttaatgcaggaaaggaaagtagtggcatactcgttccgaccattgaagttcatgagagaactacccactcaggattg

SEQ ID NO: 6151 - DNA, 491 bp, Zea mays
  unsure (1)..(491): unsure at all n locations
ctgcagcttaancattgctnnggcgaatgatgtagtggcgtgtttgcatcgacatgagcacttttgatgagtttgttcatgctctcgctacgctgtgtagagaccatcaacccacaataatcatgtttaaaaaaagctggtatccaatctttacgaatttcatacattctggaaagactgatgttatcatgtagatggaaatcatcaatcagcattgcccacgcagtctcaaactcagttacagttaaaggatgatgtattatagattggaaccttgttttgaaatcctcttcctcaaatctagcatacaactcgtttaaatacggcatatacctgttctgaacatgccacaaacacaaacgatggattgtgtttggaaataccctgcctagtgcaactggcattgctggatcttgatctgaaatcatatattttcacaacattatgcaacacattaccaactataattacattcaatacaatcatagtag

SEQ ID NO: 6152 - DNA, 442 bp, Zea mays
  unsure (1)..(442): unsure at all n locations
tactggagaaagaataatagctgcatattgccattttgtcagcaacacacccgctgcgtcgtctcctgatgggcctcgggatgaaaggccaaactggcccaagaggccaagatgaggaacatgcgcccgagtgggccggagtggatcgggaactgatggcagccggattctaatctggccctcgtcttgcttatggtccccaatttcgaatcgctaataacaaatcggtagtattggcttcaatccttgaaccacacgtaatcgaccaccataatntcaccagatttcacaagaaagtgggtgccatatgtgctaagacaaagacgaccatcgacgagctcaagaatgtgcgccgatcagtccaacttaaatattgcactcttcgaaactaaactaannataattatttgtcctttatgtgtacgttcaaaacaggataata

SEQ ID NO: 6153 - DNA, 434 bp, Zea mays
agcttagcaaaagaaatttctagaatcaagaatattgagctcatgcctaagtctggtaaaagattgttcatcaagtggcttggtaaagatatcggctaattgatctttagtattaatgtaagaaatctcgatatcccccttttgttggtgatccctaagaaaatgataccgaatggctatgtgcttagtgcggctatgctcgacgggattgtcggccattttgattgcactctcattatcacatagcaaagggactttggttaatttgtaaccgtagtcccgcagggtttgcctcatccaaagcaattgcgcgcaacaatgtcctgcggcaatgtactcggcttcggcggtggaaagagcgaccgaattttgcttctttgaggcccaagacaccaaggatcttcccaagaagctggcagtccccgatgtgctct

SEQ ID NO: 6154 - DNA, 413 bp, Zea mays
gtcacctgcggcatgcaagcttctggtagagtctatgaagccattgtactgtagatctagaacattccggtagtatgtgagtttccagatgtatttccggaagatttgcctggactaccccctgaaagagatgtagaatttgtgattgagctaaagcccggtacggctccgatttcccgaagatcgtaccgtatgccccctaatgaattggcagaactgaagactcaattacaagacctgctgaataagggatttatccggccaagctcgttcccgtggggttgccccgccattattgttaagaagaaggatcaaaccttgagaatgtgcgtggattatcgacccctacatgaggtcaccatcaagaataagtacccccttcctcggatcgacatcttatttgatcaactaac

SEQ ID NO: 6155 - DNA, 477 bp, Zea mays
agcttgaagatgcagcggccaaacgagaccaccttctctaatgccgacggacaatctggacttccggaacacacaggggaggcaaaccggcgcctgatatcattctcgaatagcaaacccggtagaaagtccagccttaacaaatccataacgcaagacgaagaggagcaagaagcggggagagaagaagcacagtcgcgaggcgaaacaaacccgagagtcaaccgaagacgaagagggtgcagcagatgccgttaatcaaccgccgccaacgatgaggagacccttgcgagcacggccatcatccatccgcgaatgaggcgcgcccgcgcgcggcggcggcggcgcgacaaggcgtcgcacccttggaatagtttcttcggagagcgaacccactgatcaataggagtacaagttacctcggcaaataacctcggcgggccctgcatgcctcggctggatccaccgcgaaaacct

SEQ ID NO: 6156 - DNA, 477 bp, Zea mays
tagcttgagacattattacttaatggtcatgtgttgtccgaacgacacacttgaggtcatcatatagatgcgccaaataaccatataaaaccttcaatgtccatacaactctgtaatggaccacacttgttcctttgaaataattccaagaacttaaccaattcagatcggattttaagataagagggacttaaaatctcattcccaacgatactcatcaagtatccatcttatgggaaaaacatgaccaacagaattgtccataacttttcatttcatccaaataatggaattaccaattcagtcttacccagcatggtaagaatcatcacatgataagttataacaaatgcaacactttgtatgggaggatgtatgtagaatacagtccataagagatgtttctgagaaacatatagcaatatcatcactatcaccttgttgtttcacatgatagtaatattattgatatctctg

SEQ ID NO: 6157 - DNA, 346 bp, Zea mays
cgaagatatagtccataaacttgcatattctctacataaaatagatgatttgcggcattcaggcgaaggatcgcttgacgcagcgcatgctcagaatacgaaatagagcgaggcgctaatggagggttatacactcttggaagaaaactccatacgattcaaccgtgagatcggaccttcgcatatgacactcaagggtgaggctgagaagaacctgacgctcactgaagcactcatgactcctaaggagaaatgttctcaccttgcgcgcccatgcatttgtcgattaacgagtatattcaattcagctggagttgcgtcgaggaagtagcctctatcgccgaga

SEQ ID NO: 6158 - DNA, 466 bp, Zea mays
  unsure (1)..(466): unsure at all n locations
agcttatgaagattcttcatcccaacatgggcctttcggcggngctagagccaacccatgttagtcttagcaattaagcatgtgtcgagttcagctctatcaaaatctactaagtatagctgaccctctaacacacccttaaatgctattgaatcatcacttcttctaaagacagtgacacctacatcagtaaagagacagttgtagcccattttgcataattgagatacagaaagcaaattgtaatctaatgaatctacaagacaaacatttgaaatggaatggtcaggtgatagcaattttacccaatcctttgaccaaaccttgatttccatccccgaatgtgatagctcgttggggatcttggtttttctcatatgaggagaacatctttttctcccctgtcatgtggttggtgcacccgctgtcgagtatccaacttgagccctcggatgcataaacctac

SEQ ID NO: 6159 - DNA, 346 bp, Zea mays
atgatgaagacagaatgaacgaaattgttgtcaagggtttcgaagataaaatcaaaaaacttgaagattctctaaaagaaaaagatgatttgcggcattcagtcgaaggatcgcttgccgaagcgcaagctcagaataagaaattgagcaaggagctaaaagaggcttagacacttttggaagaaaactccatccgattcaaccgtgaaatcgaagctttgcatatgacactcaaggttgaggctgagaagaacctgaagctcaatgaagcactcataactcctaaggagaaatgtttaactctgcagccaatgcattgctcgattaaggagtatattcaattcag

SEQ ID NO: 6160 - DNA, 485 bp, Zea mays
  unsure (1)..(485): unsure at all n locations
agcttgtggaagaccagatcatcaaagcatatatgtttctggatgagaagtggtcacccaagttctgttgatgaagcaccagaagaccaatcaaggaaggaatccatgtggaagttcgcaagaggaaggtttgtgtgttggcatcgatgcttcttcaataagctagctgccaagtgtaatacccaaaatgtatacgatgaggatatagtaaatctccttatgttgtgtgccatatattcattataacaagagcatacctataattaagagtgattagttaaaataaaagatactaaaatggaatatgcatcatgctgaggttntgctttgtgtgccatttgtgacaagatagaaataatgtaaaaagaattatgttggtacccaaattgggaattgaattctaaaaggaaattctataatttgagaagagaaagagaatactataacatatagagaaaataaanatacaaataatgaaactaatt

SEQ ID NO: 6161 - DNA, 479 bp, Zea mays
  unsure (1)..(479): unsure at all n locations
agcttgtgaacagtacatattcagaatggagaaatcatcttttcttatcagccgaagcctatgctcttatgtgaggacatagcagagcagaaggtgctgttaggctctcaattatccgaagagcaggaaaaaaccttgataaggtttttgttcaataacaaagatgtttttgcatggtcaaccaatgatctatgcggagttaatagggatgttattgagcactcgctcaatatcgatccatccttcagacccagaaagcaaaggcttctgaanatgtcagatgataaggccgaacgtgctcgcaacgaagtcaaaagactcctcagtgcacgagttattagagaagtgaagtacccagaatggctggctaacactgttatggtaaaaaaggccaatggcaagtggcgaatgtgcatcgattttacagatcttaacaaggcttgtccgaaggatgaattcccactaccaacgatagactc

SEQ ID NO: 6162 - DNA, 473 bp, Zea mays
  unsure (1)..(473): unsure at all n locations
agcttcngcatggtggcagaaaaagaaaccgacttatttatgaaaagggctattggacctcagtggattactatagaattactaccaaatgtaaaggacatgggtgtaattttacatgggctgcgtcccacgcctataaatagttgaacagtactcccgtactgttcatgctgacttgtcatacgcttttgcatcacacttgtacttttatctcttcccgagtcgaaggtacacttgtaatctgaaattatttcttattttccataatattaatataaaagtgagttgatgataatacaattgtttatgtcattctttatatttcatttaagtattccttcgttattatatgctatgattatgaaggcgcgtccttcataaccttcgtccgaaagtcattatatcctaagggaaataatgcttcgaaggacgaaaggttttaacctttgacatnntttatgtgccttgttctt

SEQ ID NO: 6163 - DNA, 434 bp, Zea mays
  unsure (1)..(434): unsure at all n locations
agctcgtggaggaccanatcatctcagcatatatgtttcttgatgagaagatggcacccaagttccgttgatgaggcaccagaagaccaatcaaggaaggaatccatgtgggagttcgcaagatgaaggtttgcatgttggcatcgatgcttcttcagtaagctagctgccaagcgaaagttataagcgtgaagatgatattngaatagccataatcagcgtttgcaatcggcaaccggatgctcctgaaaggccagatttcgttgaagctccatctcctcgaagagtatgcaaagtaaagatatgtagctgaagtaaagctatacccataacccttctaagccgaatctcgaggacgagattcattttaagtggngtagatctgcagcactccacaaattcaaatcttgaaaatctctcanactcgctctaaa

SEQ ID NO: 6164 - DNA, 421 bp, Zea mays
  unsure (1)..(421): unsure at all n locations
tgcttagctactgcgcgcagggcgaccgtttttctatcttccctaagctcggcgacggcggtaaggcgacgatgactgctgccacgtctgcattgaggacagcagaccggttatcggtcaggtgacggtcctacaccgagccgcagctgttcaacaagagatggaagaaggccgtggcagaggactggtgctggaccgacccttacccgaacccggcgacgaccaccggctgaccgttggacggagcgaggcagcgcagggaagtacagtagttggtagctgtcagattgaccttgcctagaagatggtagtagatcatacacccgcattaatttacaggttcacaaagagctatacatatgatgcctagatgtgatcgacagtgagaaggcctatgggagaagattgctgcanaaatggt

SEQ ID NO: 6165 - DNA, 472 bp, Zea mays
  unsure (1)..(472): unsure at all n locations
agctngacaacaccattngacatcttaaattatatgtctgagatcaagtatatttaattcattcctcaacatgcaaaagcgggtcttatcaagtggcttagtgaaaatattcgctaaatgatcttccgacctcactccttctaaaatgatatctcctttcgcaacatgatctctaatgaagtgatgacggatatcaatgtgcttggtgcgagagtgttgtacaggattattgtcaattttaacaacactctcattgtcacacaacaaaggtaccttttctagaactacgccatagtctataagagtttgtctcatatantaaaattgtgtgcaacaagcacccacgacaatgtattccgcttcggcgattgacaacgcacacactattttgcttttggatgtccatgataatagtgatctctgagagcacctacaggggggatgaataggtgatccttgtaaactcaacact

SEQ ID NO: 6166 - DNA, 453 bp, Zea mays
  unsure (1)..(453): unsure at all n locations
agctnttcatgttcacttgttctcattattcgtttctagcactgcattcactaggtatgatgccttgcctcgtaactcaattagttcctaggatgctctagagcataagtttcatcaacatttattctttatggattatgagttagttttaactgaactggcatcgctccaacaagaggatgatgaatcagttaattaatatatccgaaggttccaaaaacctagaaaccgatgtttctagatctaggtcttagataagaacctaacagggttgtctttcaatggtcatacttcanagaaaaattagacgactgctaattcttttcgctaacttagttgcaccagtgggacttggcttgtgaaagtcgaagcaaagaactctctcttcataatgagcttcatgatagtagtagctcagatgatgagacaaaagtggtatatgtccctaagctt

SEQ ID NO: 6167 - DNA, 445 bp, Zea mays
  unsure (1)..(445): unsure at all n locations
cagcttcttctttaaatcttcaacttcggctttgttaacttctgcttgtgcactaagtttggcttcgctagatattagcctgtccactaaggaaagcaatatcttatctttctcgagagcttcgttccttagtgtaatgacttctgactgaagattaccaagagctatttgacagctctcgtcttctgcttccttttgggcatttaaagcttacttagaatcaagccctaataataaaaaatatatgagaacataacgatagcaagaaaagctacagatataatttattgtacaagaaaaaatatatgcaccttcagcctattaaaagcaaggctatttgtaagatcatccttcgacattgtagataggccgagttcaagcttcgggtactgaaagtcgcctataggggggggtgaatatgcgaaacctgaaatntataaacttg

SEQ ID NO: 6168 - DNA, 449 bp, Zea mays
  unsure (1)..(449): unsure at all n locations
caagcttggaaattgctcatttagggctattttgtctctcctaggattactatcttctcaagggaaattagtttatttttcctaggggctgatttggtgattanggatcccgagggcattcatgatcatcaaatcagccctaaggaaaataaaaatcctttggaaaaatagcgttgtcaaattagccccaagtcattcagttctaaagaatgttttcccgcataatttaactacatacaatgctttggacagccagtgatggtgttagtggtccttattgcgtgccatgaccttgatgaatttgatcaaataaaagaacatgccctgaactnttagcgactaaagctttctattttntagttntagtgagactgatcactacttcacctctttattntgtctganatagagagatcggccccaaagactataaacanaatactcacaag

SEQ ID NO: 6169 - DNA, 426 bp, Zea mays
  unsure (1)..(426): unsure at all n locations
agcttcctggaagccatcaaaacatcatatagcttcttctccaattctgtataatatttctttgataaactaagaacttcggagacgaagtatattgtggcttgctttttgacttgcccttcaagcttctcttggacaagagccgcacttaccgctgagtgcgaagctgccacatataacaacagaggagcccctggcgttggtggagataatgtcgttaggtctatcaaatactgcttcagctcgtcgaaggctttctgctgaactggtccccattgaaaaacttcggctaacttcagtatttcaaaaaatggtagatttctctctgctgatctagatatgaatcggntcagagatgcaagtcttcccgttagtcgctgagcccccttcttttgtgcttggggtttcattcgaagaatagcttcg

SEQ ID NO: 6170 - DNA, 452 bp, Zea mays
  unsure (1)..(452): unsure at all n locations
agcccttgccatggacgtagtccgccattgcctctgtgctcgtattggtcaccggcttctccacgacgggctctgacgcgacgttattctccggctcctccgggatggccagcgccagcttgggcattgacgagacgttcaagcattntgccgaacacttggcaggtatacctccgatgcaagcagtgagacgcttctcgtcaatgatgtgctggtgcccatcgatcgtcacgttgaggtcacagcgcacggagacactcttggaggcaacgttgaaggagtcggcagtgcacccgtgcaagatgagccgcgcctcggctccatcccactgatctgagtggggaaggaaggcggtgtctgcttcncgctccangagatgggacaacacggatccgtggccgccgtggacggagctgtcatcgtccaagtcaagcgggacacccgaatcatca

SEQ ID NO: 6171 - DNA, 485 bp, Zea mays
  unsure (1)..(485): unsure at all n locations
gcaagcttaatgagtttctggcacttactcaggggagtctttctttgttataatacgcccaagccttcaatgacctgtgtcagtatgcacgctatcatgctgacactgatgagaagaaaagggacaggttcaggagggacctcagtactaagctccgcgatcgtctcaacacagtcagggccaacagctacaatgagttagtcaatatggccatttctcacgaagactgcatcacagcccgccaggcagaanagaagaggaagacccctatggcagggcattcagctcagcctcagcgcttccggaatgtgtccgacactcagagtatgggacctcagcagcaaggacggtgggtgatccgaccacagtagcagcatgcactcaaccgctcttaactcccagtttagaagagcaacaaccatgcacagcagcagtaccgtcaagcctatgacaacagatgtttcacttgtggcagcactggacac

SEQ ID NO: 6172 - DNA, 492 bp, Zea mays
  unsure (1)..(492): unsure at all n locations
atccttaagtcacctgcggcatgcagttcggtttctttggtaaccttctaaatttagtcttttttaagtaaaatctggtaggtatgctacagtttcattgaagtgagataaaattgttcttgattacatagcagatcgaacagagattggataaaggaataggaaaaaaaacaaaacaaaccacggaaagtaaactgaaaactagcgcttaagaggctaatagattaatatgttgggtgtctcctctacggctggtcatcaatgaccggattgacaaaacccaactaaccatcttctcaatcgggcccttgattgggagggcccacgcgaacctcagttgtagccttcgatcacatgacgctatataaaggattaaggggtcacagganaaaccaacgttagtactcgcccgaaaccttaatccacacataggccccatcacctaagcgtcagagtgaccgaaagagcgacaaccaacgacgacccggatct

SEQ ID NO: 6173 - DNA, 465 bp, Zea mays
  unsure (1)..(465): unsure at all n locations
aagattcttcattccaacatgtgctattctgcgatgtcttagccagcccatgttagtcttagcaattaagcaagtgtcgagttcagctctatcaaaatctactaagtatagctgaccctctaacactcccttaaatgctattgaatcatcacttcttctaaagacagtaacacctgtatccgtaaaaagacagttgtaacccattntacataactatgaaactgaaagcaagttgtaatctaaagaatctacaaaagaaacatttgaaatggaatggtcaggtgatatagcaattttacccaatcctntgaccaaaccttgatttccatccccgaatgtgatagctcgttggggatcttggtttntcttataggaggagaacatcttcttctcccctatcatatnggttgtgcacccgctgtcgatgatccaacttgagccctcggatgcataaacctacaaaac

SEQ ID NO: 6174 - DNA, 481 bp, Zea mays
  unsure (1)..(481): unsure at all n locations
agcttctaaagggagaacacattntaggattaacaaatgttctatttgagaaagacaggatttgtagcgcatgccaggcaggaaagcaagttggtacccatcatccacacaaaaacatcatgacaaccgacaggccgcttgagctactccacatggacctattcggcccgattgcttacataagcatcggcgggagtaagtactgcctagttattgtggatgattattctcgcttcacttgggtattctttntacaggaaaaatctcaaacccaagagaccttaaagggattcttgagacgggctcaaaatgagttcgacttatggatcaagaaaataagaagcgacaacgggacagagttcaagaattctcaaatngaaggcttccttgaggaggagggcatcaagcatgagttctcttctccctacacgccacaacanaatggtgtagtggagaggaagaatagaactctattggacat

SEQ ID NO: 6175 - DNA, 449 bp, Zea mays
  unsure (1)..(449): unsure at all n locations
agcttaccaaggtagatcaacctctgctgtgaaggatatgatatgatacgagaaggatntaggatctgacctccaatcctcccataactgtctgtcctatagagagagaaagagatatagagatctggatggcagctgcgttgagctctggcatatggctctgacctctggctgctgctgaggagctcccacattttaaaggcacctgcttgatcccctctcctcactacagccgaggtgttttggaaggagagcctgcccaaagcaccgcagcaagaacaatccatgcgcacaatacatgcatgcagtacaataaagcacacttgtcgcccccggccctctcatccgatcctcacaactaggagaaccccctcactactgacatgatcatgctgtgcatattagcaattggtatcatatgtggggatcggagagagcacacacacaca

SEQ ID NO: 6176 - DNA, 422 bp, Zea mays
  unsure (1)..(422): unsure at all n locations
agctctccaacctatctggntccaaacctttattttcttggagctcatgggaatcatcataacatgatttcgtccaaaatctgccatgaatcatcgacgcctgttattgagcctaagagactagtacatcttaggttttctcggccaccccttggccaccacctgagtcgaggacgactcctattacggtggaggatgattatgaggacatcactcccatagaaataatgcatgagctgacaacacgagcacgtgcacgataactaaatctccatgttccntattacctaggcaattgcatatcataagttacgctctgtgccatggatgttctgatgattagatacctgtgagaggaccatcaccgacttgggacacgctacgatatctaggacgagaatataggacgttcactacacgag

SEQ ID NO: 6177 - DNA, 475 bp, Zea mays
  unsure (1)..(475): unsure at all n locations
agcttctggaaaccgacactcttcgatagagtgctgattatctntgccccagcgcgagctcgaatacatccataggccccttcatcgattccaccaaagagcatagcccctggctggtagccataagatatcccatattctgtagctccttcttctcagcctcagacaattcttgacccaccaggttccgaaggtaaaagtccttttcttctgtagcagcatcagcaatatttttccctttgtcaggcactgcggccatgaccttctctgtagctgcagctatctcttctgcagccatatccaanagaagtttattaatccctgacagagtactttcaagattgacagcttcagcgacagctgcagcttctgtagaggtatcagcttcggcagtagcctcgacacttgcgataggtgcttatttggatgacgaggccaacgatggcgtccgtcaatggcttgatgacagaacaat

SEQ ID NO: 6178 - DNA, 455 bp, Zea mays
  unsure (1)..(455): unsure at all n locations
agcttcggcatctntatttatctcttctttctgagcccctggcgtccagacagcgatgaagtctgctaacgcctgngacagaattgaagatctatgcacataatcaatggtgaattcattaagctctgtagcccattttccaatccttccagtaaccttatgtctctaacccgattaaagacaccaagacaagagacgggatagatcaacctcgtcaaggaacgatagaagccaaacaagattccaaataagacaggatccaccatccgggatagaagctcctcttacctaaaaccttctactatcataaatcttctttaatactacctattagctaaaacaaaatatgcccatgtttggtaatgatgaggaacttgtgaaagcattaaaattaattggaaactaaaggttaaaactacatacaaagctttctgcatcccttttctactaatctc

SEQ ID NO: 6179 - DNA, 478 bp, Zea mays
  unsure (1)..(478): unsure at all n locations
agcttcttcaccatgttatcacggatatcttgagaatgttgttcatgacactctcccttgaaaagagagaagctgcttcttagccttccaacttcttccttgagctctgtattttcttgtgtgatagaaatatcactaattcctgagatttctagctcaatggaagattggcttgcttgataacaacaattgttagcacatggtaatatagcttcaatttcaacacatgtgcacatgtgaggttggtatgatttcaaattanttaacacaacctcatgagccatgtttaacatgatatgtgaatccataaatctattatgagagcatacaagcatatcatgtttttcttgcaaagctagatattcaatgtttagctgttctaccgtgttcttgagcatagcatttttattttctaattgagcaatatatgatgaatgagtaatagctttaatatgctcaattgaaatgtcttcatacc

SEQ ID NO: 6180 - DNA, 480 bp, Zea mays
  unsure (1)..(480): unsure at all n locations
agcttctggaaggatgccttattgctggagttggaatgagggcatcagctgcttacatctacattagaggtgaatacgtgaatgagcgtctcaaccttgagaaagctcggcaggaagcgtatgcagctggacttctgggtaagaatgcttgtggctctggttatgattttgatgtgcatattcattttggtgctggtgcgtacatctgtggtgaagagaccgccctactagagagccttgaagggaagcagggcaaacctaggctgaagccacctttcccagccaatgctgggctctacggctgccccacaactgtgactaatgtagaaactgtggctgtatccccaacaattcttatgcgcggtccagaatggttngcaagctttgggcgcaagaacaactctggaaccaagctctattgcatctcagggcatgtgaacaaaccttgcaccgtggaagaggaaatgagcatacctctga

SEQ ID NO: 6181 - DNA, 312 bp, Zea mays
agcttgtggcatggtttaatgatagacacacccatgcagttggattgcagaatgagggagagagatgggctccaaagcctaagtgaaagggaaatgtgcccttgggccatttctaagtattttggtgattgagtgcaaacacaagggcctaaatgtgaatttatgtacatggatgaacaaggtgaaaatcatgaagtaaaggtatgtttctaagccttagtacattggttttaagtactaatatatttgtctaagtgttagaaacagaaagaagaagaatatagaaaaggagaagggacttggctgtgtgct

SEQ ID NO: 6182 - DNA, 433 bp, Zea mays
ctgcagcttcgtcgccatccacaattaataagaggttctttgaagatggctagaaggatttgccagggagtgcggagtcgtgtgtagggcttgatcgagtgcaagggacatccagggcagaggcgcacctcgccggagtccatggtttgtagtcgatctgcgtcgagtcgtggatggggctcccgtctctcttagcaatggtgagccatccctctattgtgttcgcttttgtctctgctccctgttgtgtatagtaaccgtcagactagagccctatatcattggtgggccgagcgccgatgacagcaccactgaagtttacatcgtctgctgtgtccaagacgtggatgaagaagaagcacgatcatccattgattatgtagtggacaactccgattagaagtcctcgtaccccttcggtgggagtgaatct

SEQ ID NO: 6183 - DNA, 486 bp, Zea mays
  unsure (1)..(486): unsure at all n locations
agctntagctntgagagccgatgattcattcttcactttctttgccaaacttatagcatcagcttgagatttattgaatatatcttgaataagaatttcccccaatacttcggttggagaagttgtagatagatcacttcttactaacatggtcataatggtctcatacttctccggaagagatctaaggaacttatgagtgaaatccacatccggtacattaaaaccaagtcccttgagttcattcactatctcatttaaccggttgaacatatcagatacactctcatcttctttcataatgaattgctcanattttcctttgcacacatatagcttggcactcttcacaatngtagttccttcatgaatttccattagcttaatccanatctcatgagcggttgtaagattcttgatacggttgaactcatttatatcaagagcatcatagaatacattcatggcttgatcatttgtaagaat

SEQ ID NO: 6184 - DNA, 437 bp, Zea mays
  unsure (1)..(437): unsure at all n locations
agcttgtgcaaagtccactcgaactaatcttctgttatacccgacctcgctgcaacatgacaccagaaggtccaacacaacaagcattaaatgaattcagaattattgcagagcatatcagtacaagagacctggttcaggagtttttggctttcaaagtttttcctagtttgaaagaatgggaaataccgaagctaaagggggagaagaaagaaggtgtgcgtttaccttactatttcaagtttaagaaatactttaaaacgccttgccaagagtggctggatacaattgaagtaatgtgcaatgaaatactcggcaattattctaaaaaagaagatcagttaatgacctcggccttcggcacccgtccgaagcgaagactgaatcgagtgctggacgccctgngtttcgaataccctgactatgaanatctgaac

SEQ ID NO: 6185 - DNA, 467 bp, Zea mays
agcttgtgaaggttcttcatccccacatgtgctattcggcgatgccacaggcagcccatgctagtcttaggctattaagcatgcatctagaccggcctcttcttttgcaaaatcaactaaataaagtttgccgtctaatacacccttaaaagctagtgaaccatcacttcttctaaagacagacacatctacatttgtaaatagacagttataccccatgttgcataattgactaacagatagcaaattatatcccaaggactcaactaaaaacacattagaaattgagtgctcatttgagattggcaatttacctaatccttttaccttgccttgattcccatcaccaaatataatggaatcttgggaatccttattcttgacgtaggaggtgaacatcttcttctcccccgtcatatgggttgtgcatccgctatcaataatccagcttggacccccggatgcat

SEQ ID NO: 6186 - DNA, 443 bp, Zea mays
  unsure (1)..(443): unsure at all n locations
agcttgaagccatggtaagtagcataggccaataatatactaattgactcaagcctagctacgggtgcataggtttcaccgaaatccaaaccttcgacttgtgaatatcccttggccacaagtcgagctttgttccttgtcgccacaccatgctcgtcttgcttgttgcggaagacccacttggttcctacaacattttgattaagacgtggaactaaatgccatacctcgttcctagtgaagttgttgagctcctcttgcatcgccaccacccaatccgaatcttgtagtgcttcctctaccttgtgtggctcaatagaggaaacaaaagagtaatgctcacaaaaatgtgcaacacgagatctagtggttacccncttatgaatatcgccgaggatggtgtcgacggggtgatctcgttggattgcttggtggactcttgg

SEQ ID NO: 6187 - DNA, 473 bp, Zea mays
  unsure (1)..(473): unsure at all n locations
agctngaccctannatgctaagtgtaccacaaaatccttcagtagtaagattgagctctaccttataaaattgatcatcccccataaaattttaattgcaaaatttgcatatcatgccatgcatgtatcttactcattgcattcattagactgcaatctcgctgatggagagtacgtgctcatccccgagcaaggagctgtccacgaggaagaccaggagcaagctcccaagactgccatcgaggatctccccacagccccagcatttgaaggcaagccccagttttatgcataaccaatttatatatgctactttactacacttaatgtttgtaggcttgtaatgtgcacttaagtgtangagttgcttgaaaccgtagtttcatgaactcagactcctttntgagatggatactagtatgctaggtcgaatagatgctatgctaattangatctcagtagaagtcgagtga

SEQ ID NO: 6188 - DNA, 405 bp, Zea mays
gcagcatgcagctcgggccaatggaaacacacatctttatgtttggctgcaaactgctagtcgttgcaactgatactcaaacggtactccgaagcggcaaataatgttttgccaaaagacatatagggcagtctttgatgttattgcggaaacaaccctcgcctcgatccatttggggaagtattcgacagcgacgaaggcgaacttaagggttccctaaacccggggcaggggcccgacgaagtccaggccccagcgctggagaggccatgtgtgggcgatcagctatgtaaattgcgaggggctgcctgatcgaggagaaaacttctggcaggcttctcaggaccttgtgacccgatctgagcgcagatcattgcgggccagtagaaaccttggcggatcacc

SEQ ID NO: 6189 - DNA, 409 bp, Zea mays
  unsure (1)..(409): unsure at all n locations
agctntatatcatagcatgatgcatatgctagtatgatacggatggcttctagtcgagcaactggtgcaaaggtctctctaaaatctaagccttcaacttgagagaatcccgccttgcaacaagttttgccttgttccttacaatcacgccttgatcatcttgtttgtttctgaacacccactttgttccaatgattcttgcatcttgtgggggcttctccagggtccaaacttggttacgtgtgatgttgttaagttgttcatgcatggcgttcacccagtccggatcttgtagcgcctcatctatacatgtaggctcaacacaagaaacaaaggagtgatgttcaataaaagaagcatgtctatgtgatcgagtaataaccccttgtgaaggactcccaactgattt

SEQ ID NO: 6190 - DNA, 324 bp, Zea mays
cagcttgtgctctcgataacaagcggtatatgcttatatctcttctacaagaaacacacgaatgtggcaccagtaatagtactccatgttaggtgacaatgaccctctatcaactcatgatggactcacatcccgtataccttcactctaaaggagcttcagctctaatattacccacacagtgatgctatggtcatctcttgtgtgatcaaaggagtttcaggacacaaagcattcgctgatacctgatttgcacacgatattatattcgctaaggccttcatacagtatcacgacccctatacaagacccatgatgcacacc

SEQ ID NO: 6191 - DNA, 476 bp, Zea mays
  unsure (1)..(476): unsure at all n locations
agcttatgtgccaaaaatcacaaatagctaagggatggttatttagttgtgattttccaaagtttaatgccaaaaaggcaccttctactgccttgttatttgaaaaatgtcaaacaacagatttcatatttttcctatgttcttcataacaaaacattaattatcccaagggttggggtgtttttgccttggggttatttttgtagggttttttctaagttttccttgttttcttaaaataaaaggtatcccaattaatttgtactaaactagagtataataaatttttctagtgaactatactaaataagtagactagaaaaaatatggnggctccctggttctttatttaaattacctttcttattttctntaactctaagcataatgtaaaataaatggcaactctaccttaatggggtgtacagaggggtttaatcattttaaatangtcagtangtggtcaagtacttctc

SEQ ID NO: 6192 - DNA, 435 bp, Zea mays
  unsure (1)..(435): unsure at all n locations
agctngaagctggcgtcagtcgctaccgacgacagcatatcgtcggtagcttattctattctaatttcaaggtaaaatttctccttcagcttttttcattgttttacgatgaaggtgattgctgatgaagattattttacatagagtatgctactaagtaaagccttgaggatgcaacaggacctcgaagataagaaaaaggaggttataattgaaggtttggaaagcaaaatcaaagatcatgaagctgctcttgaaaagaaagattttgttctttaaacaatggagggttcactggcagaagcccaagccgaaattgccagattaaacagtgaactctccacgaagtcagaaagcttcgaacaagaaaagaagagctttgatgcgaagcttaaagttgaagtcgaaaagaattcgaatttgcggaaatcattg

SEQ ID NO: 6193 - DNA, 482 bp, Zea mays
agcttcatagggagaacacgtgataagtctaactatctgtgcatttcgaaaaagatagaccttgtgcagcctgtcaagcacgcaaacaggtgggaagctctcatcacaccaaaaatgtgatgaccacatcaagacccttggagatgcttcatatggacctcttcggacccgtcgcctatctaagtataggaggaagtaagtatggtcttgttatagatgatgataattcccgcttcactcgggtattcttcttgcaggataaatctgaaacccaagggaccctcaagcgcttcctaatgagagctcaaaatgagtttgagctcaaggtgaaaaagataaggagcgacaacgggtccgaattcaagaaccttcaagtggaggagtatcttgaggaggaagggatcaagcacgagttcttcgctccttacacaccacaacaaaatggtgtggttgagaagaagaacatgacgctcatctatatg

SEQ ID NO: 6194 - DNA, 478 bp, Zea mays
  unsure (1)..(478): unsure at all n locations
agctntccatgttgtgcttgaacattccaatccgagcccgcatctgaccgtggtgaccgtcacaagttggtgttcttctgcagtccgaatccagcatgttcaaatccttttccctttcggtcttctccctgattcctaagcaaaacaagagtgcacgggtctccatggtctaaatatgatggacatgaactcaagagtgtaatcacctgatggttgagttgacgagcacgagcgcgagtaatgggaccagaaattggtacttgtattggtatagatgcatcagtagtgtggatgtcttcatcaatgtgacttgaataaatatgttttcaaataggagattatatagaagatcattatatgagttaatttattgaataanacatttataaatatctcctaaaacatttaagctaaggtatattntaataaataatanaattataaattagtgtcttaatacaccttatgtgagcataat

SEQ ID NO: 6195 - DNA, 486 bp, Zea mays
  unsure (1)..(486): unsure at all n locations
gcatgcaagctttctggattgataggagggcctttcgagattacttatgctagtctcccctagaacctttagatgtttgagcaatggactcggcagcttctctagatttctgcctcttacttcgagattctctgttttttttcctgaactctttgttccccatgtactatgaagtttcttgtttaatctctactgtataaagcaccagtttccaccatttcaccgttgtcgtgcgtcaaccttggttatcgactcaatatttacactcacctaaccaacataacacatatatttctgtgctttatattatatacgcaatcaaaatataaaataaagactacttaagtgtgatatacaaaccatagtgatgaaccagcatctaagtagtagatatcatgtangggcttcggccagtctaatttcgtattaaaagatgagagtctagctcatgctggtgaatgaaacggcatccacaatcttgtggat

SEQ ID NO: 6196 - DNA, 384 bp, Zea mays
gagcttcgtccactcaagggatgcgatctcgcctcgtcctagcccaggctcgggcaggaacagtactcctagacgaatccacgcctcgcccgaagacctcttcaagcaacgggcgcaccctcgactcgcccgaggcccagctcgggcaggcttcacagtgaagcaaccttggccagatcgcctcgccaaccgaccgtatcgcaggagcattcaatgcgaggatcgcctgacaccttatcctaacttgcggtcctcagtcgacagggccaaagtgaccgcagtcacttcgcccttccactgaccgacctgacaggataagtagcgttgcctgccccgctccgactactgtgccacccgccagggtgaggctgacaacagctaact

SEQ ID NO: 6197 - DNA, 426 bp, Zea mays
  unsure (1)..(426): unsure at all n locations
agctngagttgtgaggtcgtctcctccgcagatcatagtcgttctgcttccctgtcgcgactgagatgggccctgtacattgccttcccgcgattatcatgttttgcttaaatcggatcggatcaaatggggattataataagtttgatctgatggatcatcttaatcgctgtttaattatgcttcccttcttgctgaggtgggtgaggactactatgccattcgggaatcctcagtgtttagctgatcgaactctgacgcttgtacacacccggaggcactgcatcgttcattttgctcctaccactccaccgtgttggtgcggagctcgtgcgcatgcaccacctcgcagtgacgacgctccgtgcctgcacgtgtggtaatacacgtctctcagctctcttcacgttcacattcacgactctg

SEQ ID NO: 6198 - DNA, 471 bp, Zea mays
agcttataaactctggaatgaaatactctattctcatgttgatccttgtatcctttcttgcagggcttaatacttagcaatgccctatgggcgcataagaatgctgaagacgagagctgcactatagctctcaacaaccttcgaacagaggttatcatgctgagaaccgaagacacgaaaaaagacaaaattctactttcattggtggacaaagtaaaagatgaagctagtttcaaggctcaagctgaaattcaaaagaatgagattgaagaccttccgaaatagctggccgaagccaaagataaatgtggtcttggagaggccaaccgagatatgagtgattactataaaaagtatttagaataaacagatgaagaacttcgcgcatccaaagaaagatgcttcactaaatctctgggctgcgtggagaagataaatgctagcttcgccaacgtgggtgcctattccaat

SEQ ID NO: 6199 - DNA, 380 bp, Zea mays
tcatgaagataaacacactatctaaactcccccttattcattaaacatatgccccacagatattaagatacatttacgcgaaatatcaaaactttcttttgtacctttaccatggtgcgatgtaccttccatcttgacagtattaatctctcgagagcttctccacacctgtgcctgatcctttatcctaaccttgtcttgttgctaagacacccagcttagagcaaggtatagtattgtggcacaagatgaagcttctattctagtgattatcaagagatgtcaattgaagcaaactatcacggctaccaattgagaggtcatttattattatagctccatgatatttaaggatgaacatctactatcaccaaatatta

SEQ ID NO: 6200 - DNA, 484 bp, Zea mays
  unsure (1)..(484): unsure at all n locations
agctgctnttaagataaatgtaagtntatgttattcgcttccgcatttctttatctccgatgttctgtaatgtctgcaagacgggtgagacgttcctggtaaggtaaggaaagataccgagcttgtcaagtgacttaagaacatctacagggtgtctaatgtccgtgggacaaggacaactgtaggtgggcctaattacttgggaggttctgtcacagctggtatcggagcgtagcccttctttgcagatattatgaggcatcttcaaaaggattttcaaaagtcttacctaanaattcttttctcttcttacctaagtattctgaagagtctcatttaaagaccacataggaagagtgcaacgtatagaaggttgaatcgactaaggttgattctgtaattatacatgcatcatgctaagcactatactaataacgttttccctcttagaaaagatgctcgcacgtaccaagctaacgggccg

SEQ ID NO: 6201 - DNA, 451 bp, Zea mays
  unsure (1)..(451): unsure at all n locations
agctntccaagccctcggacctggcagaacttcatcggaaggcaaagatcgacctcaccggacttcggccgcccgcctgcgcgcgtagactgggcactccggtgagccattcttcaattcctcgcgcacacaccttccttgatccctggtgaagctctctgacccgtttgattggtcaattgtgccctagataggccggactcctcgccgccaccgagctccctggcctgcgcacgcagaccggccaacttcgaccgtccccgacggcgacccgcacatcgtcgtgaccctcaggacctcccctacaccctcgaccacctcaccggagcaatctcgccaccggtaagcccctccgtcctttcttccgtcgcgggtactgtttaatatgggggaaggacctcgggttaggattagaagaatccagnggttttctgagatgtcagtgactcaa

SEQ ID NO: 6202 - DNA, 353 bp, Zea mays
agcttgaagccatggtaagtagcataggcaagtattatatcaaatgactcacgcctagctacgggggcttaggtttaaccgaaatccaaaccttcgacttcggagtatcccttggccacaagtcgggctttgttccttgtcaccacaccatgctcatcttgcttgtggcggaagacccactgggttcctacaacattctggttaggacgtggaacaagatgccatacctcattcctcgggaagttgttgagttcctcttgcattaccaacacccaatcagaatctcttaatacgtcttccatcctgtatggctcaatagaacacacaaaagagtaatgttcacaaacatgagc

SEQ ID NO: 6203 - DNA, 387 bp, Zea mays
agcttgaagccatggtaagtagcatatgataataatacgcgaattgactcaagcctagctacgggtgcataggtttcaccgaaatccaaaccttcgacttgggagtatcccttggccacaagtcgagctttgttccttgtcaccacaccatgctcatcttgtttgttgcggaagacccatttggttcctacaacactttgattacgacgtggaactaaatgtcatacctcattcctagtgaagatgttgagctcctcttgcatcgccatcacccaatccgaatcttggagtgcttcctctaccctgtgtggctcaatagaggaaacataagagtaatgctcacaaaaatgtgcaacacgagatctagtagttacccccttatgaatg

SEQ ID NO: 6204 - DNA, 491 bp, Zea mays
  unsure (1)..(491): unsure at all n locations
agcttcngtattacacaaccgactttatagatactattgtctctttctancacataatagatactgagtcaactgtcgtaatacttatcgtgagggggcataacttgtaattacttcacacagctgcgccctcgtgtctatataatagtgaaccagtatctcctttactcgtctcacgccattctgataagttgtaatacgcatactttcggagacccaaccctttgctcaaggctaaggtattattgtattcaacaattcaacatattgagcatatataatataatataattcgtctatgatttattttcctttatttataccttttctatgctatcttacaatatctattgaaatcttattacaaagatttcagcttcgtaattatactctcatcaaccttcgtccatggcccattatccttcatggaataatgttccatggacgaaagacgttacaattaacattatgtgccttggtctaaatcatag

SEQ ID NO: 6205 - DNA, 471 bp, Zea mays
  unsure (1)..(471): unsure at all n locations
agcttggcaagaccaaataactcatgacccaaaggaagaacaataaaggggagtgaagaaagggttattaaattgggagaanaaggtacaaagaatatgaccaggaaatgtcagaagtgtggaattgctgatggtcacaacagtacgacatgtttgtcaatggaggaaaatagacaaaggttggcaagccttgctggacgtaagagaggacgacctccaggatctaggaacaagggtggcagtaaagctcctgattggaatgagacaacaacatcaaaaaaacacgcaaatgatttcgatagtagtgagtcagacagtgattagaatgttgtatgagatacgattaattngtttnttacaataaaccttgcttgtttggcaactgatttatatagaggtggatattgaaatctaataaatggtgcgtatattgcttaataatgttgcgtaactggaactacaaaacatcgt

SEQ ID NO: 6206 - DNA, 483 bp, Zea mays
  unsure (1)..(483): unsure at all n locations
agcttaacaacagggttaatagcctcatgtgttttgcttgataaaagttcattntcaacaagaagattgtcatgatcaaatttaatttgagtatagtcttccttgatcttaactagtctatnttgcaactccctattagcttcatttaatttgtcatacttctccttggcatcttttagggagtttgtgagctcatttatggttgatgacatagttttattttcttcttttatttcatcactagcctttataactatgtcatacttggcatttaaagatatcattttcattttcaacctatcacatttagcttttgactttctaatgatttgagtatattctttaagtaagtcagctaactcatcatatgaaggtgaagcaaattcttcatcactatcactatcactatcatcataaatattaatatcantttgtaccttccgttcacccctagccatgaagcatangtgagaggtggatgat

SEQ ID NO: 6207 - DNA, 410 bp, Zea mays
  unsure (1)..(410): unsure at all n locations
gagcttgngaagattattcatcccaacatgggctagtctgttatgccagagccaacccatgttagtcttagcgattaagcatgtgtcgagttcaactctattaaaatccactaagtatagctgaccctctaacacacccttaaatgctattgaatcatcacttcttctaaagacagtgacacctatatcagtaaatagacacgtgtagcccatttgacataattgggaaacagaatgcaagttgtaatctaatgaatcaacaagaaaaacattggaaatggaatggtcacgtgatatagcaaatttacccaaaccttggaccaacccttgatttccatccncgaatgtgatagctcgttggggatctaggtgtnctcatatgatgagaacactcctttctcctctgcatg

SEQ ID NO: 6208 - DNA, 320 bp, Zea mays
  unsure (1)..(320): unsure at all n locations
agcttcngataaccgacactcttcgacatagtgctcgttacctntgccctggtacgggcacgaacacattccaaagcctcttcatcgattccaccaaaaagcatggctcctaataggtagccacaggaaatgccatattcctgtagctccttcttctcggcttcagatagttcttgtccgatcaggttctgaagatcgaaacctatttcttccgaagcagcttcagcaattcctttccctatgtcaagcactggggccatgacccattctgcaggcgcagatgtttcttttgtatgcatacccagtatcattttatcaat

SEQ ID NO: 6209 - DNA, 132 bp, Zea mays
ttatccggtataatactattctgcgaccaccaccgcttaagcaccataactgactatactatacgcccgactgcaatatcgcatctgtgtattattatcatttgcgactggaccttcaacggtgagacctaa

SEQ ID NO: 6210 - DNA, 448 bp, Zea mays
  unsure (1)..(448): unsure at all n locations
tgctnctaaatggagaacacgtaatatggttgactatcgttcaattccaaaaagatagaccttgtgcagctggtcaagcaggtaaacaagtgggaggaacacatcacagcaagaatgtgatgaccacctcaagaccactggagctgctgcatatggacctcttcggacccgtcgcctatctgagcatatgaggaagtaagtatggtctaattattggtgatgacttttctcgcttcacttgggtggtctttttgcaggataagtctgaaacacaagggaccctcaagcgcttcctcaggagagctcataatgagtgtgagctcaaagtaaagaatataatgagcgacaacgggtccgagttcaagaaccttcaagtggaggagttccttgaagaggaaaggatcaagcacgagttctccgctctctacacaccacagcataatggtgt

SEQ ID NO: 6211 - DNA, 454 bp, Zea mays
  unsure (1)..(454): unsure at all n locations
agcttatgcaacatcgttggagatggtntggacatattcaacgaagatctgaggaggcaccagtgcatatcggaataattaggcgtcctgagaatgtgaagagaggtagaggtcgaccaaccttgacgtggtcagaggctgtgaagagggacctgaaggagtggaatattgataaagagctcgccgtggataggaaggggtggaagtgtgcgattcacgtgccagaaccttgatttatagttttcgcttttcctctttaatcgtttgaccttttcttgtgcccatttagatcttgctggttcttgtgggttntatctctcttatgtgtttccccgtttcatcgtttttcggttctcctttgccttagttcccctttctcctctttggggggtgagctctgagggtttcgtacggggtttcatctctagcctaccccaacgtgcttgggacaaaa

SEQ ID NO: 6212 - DNA, 360 bp, Zea mays
agcttatgaagattcttcatcctaacatgggcaagtcgacgatgtcagggccagcccatattagtcttagcaattaagaaagtgtctagtttagccttgttatcattaaaatcaactaaatatagcataccatctaacacttgtcacacccggatttaaggaacaaagccgggtgcatctcatacatgcgccaaagaagacaacatatataataacagagtgtatagagataaatgtcacaataaattagagtacttattacatagcggaagtcttacaaaataaaatataaatatagatcgaactaatccatccttggcgccagaaagtcaactgggagacgccacctatatcgaatcg

SEQ ID NO: 6213 - DNA, 472 bp, Zea mays
agccttgtcaaacttcaacttcgtcattctccatcttcgtcatcctgcgtatatcaaacagcagaataagaaaggtgcacatttcaaggagaaggtaaaagtaacaaatataagtttcttaccggcttaagatgacttcgagcttcgtcacccgccatttttcgcccgccacctacccagatctgggtcatgaatctatttccaatgcttcgggctaggcttgggatatctatcatatctgatgctgacaagctgaagtttggtctgttcacaatatttccatgcgtgcagccagccttcagaatagaggtggctgtgccccgagaagctaccagggcgcagaagtcggcatgaccaccaataacttcgtcaagggcatcaacctcgccttcaatatattctaacgtgctgcgtagattagcagctgaaggtgtatatatttgcagagctggctccgacagaatgaaacaca

SEQ ID NO: 6214 - DNA, 398 bp, Zea mays
gactgagcagcagcttcttggtcaatagattatctcgcgagtgtcttgttctctgccctcatatggagctacacattccggatgatcggatccctcttccgctaactagcacagataagaacaatacatcaatcatggcgactttagtggggtgtgccaactcttataccatactatttatgtgccatataatttatataaactatctctggtgcataaaatatctgcatataaacatatatatatatatatatatatatgaaaacggggaacagaaatgggaaaagaaaaagagaaatgatatctagctagctgggccgcgggtgtttatggtcctacaaggcgcgagcgctcgcagccgcacgggcaggcgggccactctgaccaccagctgggga

SEQ ID NO: 6215 - DNA, 413 bp, Zea mays
  unsure (1)..(413): unsure at all n locations
tagtttagaatataggattggaacttacgttgctaaacttcttttgcggctgagatagaaacacttaaacaaaacctagtttgcacattattgattagtattctgcataagttgtgtttagaagactcatttatggcctagattagtgagaaaaatagatgttctaattcaccctctcttaagtgttcgtagtcctttcatatatatcaatgtatgacaaagctatgcatgtgagatcttgatgcatgtatggaagaatttcagtttgtaaaccgggtgtgacactttcataatgagaaatatggacaagaatgtngcggtggtggcagagatgtcgatccatctgtctcctccatcacctacatatagatgcatagtgtataactggacatcgatagtcatgaatgggatat

SEQ ID NO: 6216 - DNA, 465 bp, Zea mays
agcttgacattgtccccgtgttggtagccaatgccttccttaatgccagggtgtctcccactatagagcatacttctagcaaatttaaatttctcattttccaagtcatgctcattgattttagcagttaatgtagctatatgatcattttgttgcttaattaaagcaaggtgatcataaataacatctaaattaacatctctacatctagtgcatatagaaacatgatccacggtatatgtagaatgtttgcaatcatttaattcaacaatcttagcatgtaaaatgacattctcatctctaacattggaaatagaaatattgcaaacatctaattccttagccttagcaattaattcttcattctcatttctaatgctagcaagagagacattcaacttatcattcatagcaattaagctagcattatcatttctgagatcgacaatcgaatcatcacacata

SEQ ID NO: 6217 - DNA, 359 bp, Zea mays
  unsure (1)..(359): unsure at all n locations
gagcttntatagggagagcacattttatgattaactaatgtttattttgagaaagacaggatatgtagcgcatgtcatgcanggaagcaagttggtgttcatcatccacataagaacatcatgacgactgataggccactggagctcctacacatggatctattcgacccgatagcttacataagcatcggcgagagtaagtactggctaattattgtggatgaatattctcgcttcacttgcgtgttctttatcaggacaaatctcatacccaagagactttaaagggattcttgagatgagctcacaacgagttccgcttaagtatcaagagaaatagaagcgacaacgggacggag

SEQ ID NO: 6218 - DNA, 305 bp, Zea mays
  unsure (1)..(305): unsure at all n locations
ttttattttctgcttcaacagaagaagagctntttgccgaatagttgtttatttccaaccacactccaagagatactaacactaatggcccgagtgcgctctcctgctggagttgatcgccaaagacaccaaaccgatagcgcggaaactgttccatctcggaagcaatgaggcgaacagggctggtacatctgaaaacactcctgctgcctaagcagaacatgctgatattgatgagactgatattgaaggagaacacaattacgctgtgcctagcaagcctagccacttggacttctgaaagt

SEQ ID NO: 6219 - DNA, 192 bp, Zea mays
aaatgcacagaaacttcttccaactaccgaaagaacacttcaccatgtaacttatctagtcatgcttgctttggctgtggtgataccagacatctttgtactggttgtgctaacaaggatgtggagatcaataatgttcacaagagaagacaacacctctcaactcatgcatcaacaaagaataaacaacgg

SEQ ID NO: 6220 - DNA, 475 bp, Zea mays
  unsure (1)..(475): unsure at all n locations
agcttcttgatcaagcttcagaccttggcttctcgcggcccacacgaagatatttagccttataattgcctcgggagtaagttgatgaagatagacttcgaaaattttcaacacctccacgacgaagctgctcaagggaaatcgtagcccagctttcagaaagcttccgtatactacgacttcattttcttcagggtgtggacaagtcttctctccttcatcggccctcacaatggacaaatcccgaaaataccttcctctcatgttgacaagatgattctctctgatggttgacttaccataaactgaatggcttggtcgccagggacgatcttcggagtcttcgctaccgctgtccacatcataactgtcactgtcaccagtatcctcagacaagccttccagaagtttcttggtaatttttccgcggttgcttcnacatcggtataagaaaccccaaggttttcttctcatc

SEQ ID NO: 6221 - DNA, 437 bp, Zea mays
agcttctatagggagaacacgtgataggtctaactaatgttactctcgaaaaagaaagaccttgtgcagcttgtctagcacgtaaacaggtgggaagctctcatcatgccaaaaatgtgatgacaacatcaagacccttagagttacttcatatggacctcttcggacccgtcgcctatctaagtataggaggaagtaagtatggtcttgttatagttgatgattcttcccgcttcacttgggtattctttttgcaggataaatctgaaacccaagggacccttaagcgcttcctaaggagagcccaaaacgagtttgagctcacagtgaagaagataaggagcgataatgggtccgagttcaagaaccttcaagtggaagagtatcttgaggaggaaggaatcaagcacgagttctccgttcctacacaccacaac

SEQ ID NO: 6222 - DNA, 463 bp, Zea mays
  unsure (1)..(463): unsure at all n locations
agcttatgaattccaagaattggacttgttgtatntgatctagtttaaagattctttagaaacacagttgtctcacctcaaggtacctattgctgcaatgtttgtttcatttaatgcacatcaattagtttcatgttttatggatgaattcaattaattaatgattttattgatgttaatcaatatatggataggtaatggaccgaggttggatgtacaatgtgccaagaccacatccgtcgtacattcaaaatttgagaagctttattgaagcggccaacaagcacgcgaatttgcaaaagagcaaggagatattatgtccgcgcatcgattgtgataataagatagcttggagagatacaagagtaatccaatcacatctgctaaaaagaggtgttaaaaacaattacaagatatgatcagatcatggtgagttggatccgtgtgaagtgcctggtaatga

SEQ ID NO: 6223 - DNA, 467 bp, Zea mays
  unsure (1)..(467): unsure at all n locations
agcttgtgtagggtcttcatacacacatgtgcttagcggcgatgccacagncagcccatgctagacttagctattaagcatgcatctagaccggcttcttcttttgcaaaatcaactaaataaagtttgtcgtctaatacacccttaaaagctagtgaaccatcacttcttctaaagacagacacatctacatttggaaatagacaggtataccccatgttgcatcactgactaaccgatagcaaattatgtccaagagactctacctataacacattagagatagagtgctcattagaaattgcaattttacctagcccttttatcttgccttgatgtccatcaccgaatataattgagtcttgggaatccctattcttgacgtaagatgtgaacatcttcttctccgccggatatggtttgtgatccgctgcgatatacagcttgacccccgatgcataactgaa

SEQ ID NO: 6224 - DNA, 446 bp, Zea mays
  unsure (1)..(446): unsure at all n locations
tacttatagtcacctgaggcatgcaagcttacatgtctcgatgatcataattaattatttttaaagcccatcataatgaagctcctttatgtgatactcacttatatgacccaaacgacagtgccacatgttggtaagacttatatcattaagccgaggccttttatcactaacattacagataggtgcatcatcaagatttaaaatgaataacccattcataatggatgcataagccacaaacatgccattcttagagatcacacaaccattgttttcactcgcaaatgaataaccatccttcatcaaacatgaaggagacataatgtttagactcatactangaactatataacaattatttaactccaaaataaatcctgatgggaggtggagttgcatctgttcgacggtcaacgcagcaactcttgcattattgcctaccc

SEQ ID NO: 6225 - DNA, 465 bp, Zea mays
  unsure (1)..(465): unsure at all n locations
ctgcgattgcccttgatcagcttcgtcgtggaggtgctgaagattttgaagtctatcttcaccaacttacccccgaggcaatcataaggctgaatatctttgtgtgggccgtgcgaagccaaggtctgaagcctgatgcacaaagtttctgcaatatgcacgaattatcatacgagacaataccttggggtaaggaacagtatcacaataactttggctgctacaattatgtttctcggtctggatcaagctgccccgtgccaactttacggaaaagatggcccagcggctggatgacagaatggttctatgtaaaaaatgatctgaaagcccgagaagatatcaagggtataattatgcgccctatttggcaaagcttcggccttncaagccgaaggttganatgaatgaagctgccgaagaatgccagagagccattcgcattgtctggtcttttataggaac

SEQ ID NO: 6226 - DNA, 434 bp, Zea mays
  unsure (1)..(434): unsure at all n locations
cttaatcacctgagctgcagcttctatgtggagactcaatanggaattctgaatctcacattctgaatttcaaaccttgagccaaagatcaagcgtgttcaccttgatccctagctcaaatgctaataacctcattgacaaaaacgtgtctcactaacccctctatcgcatgctaaaagatggcattgggacgcgagccctatacacgacaaaaccctggatttgcctcgggtttgagcagagagacagaccggatttctgggctccaaatctctgcaaccagtaggcaaaatcctatgacccccacacaagatcggtagcttgtatggaggagaagaggttctgtgcactgaccaatgcgagagcaggcttggatgagtgaccacacgcgtcagaactggtgcagaacgaacgggcacacgtgttcgaccctg

SEQ ID NO: 6227 - DNA, 409 bp, Zea mays
  unsure (1)..(409): unsure at all n locations
agcttgtagtcactagcaatagagaactcntcattctatagatatcttctttggagagttcctggccacccaagtgtcacacgtcctaacctcttgttgcacgaagaagctccttccaattctatcatctttaagggcgaagccctaccagtggtcacttcatccatttccctctcgagaaccacatcagctataatccgatcaatctctgacattgtggttccaagagggcctccgctattttcagctctagcgaccattttatcagcttcgacaccggcggcggcagtaatattttctatcaagaccgggggtggagtcatatggatggacctcatcacaactatcatgtgtcgtttcttctgaccaccctcacttgcaccagacagcaaagtagtcttcttctcct

SEQ ID NO: 6228 - DNA, 452 bp, Zea mays
  unsure (1)..(452): unsure at all n locations
cgcaggcttggaaagtgagctcgcaagatatgattggacaatggtgagtcngcttaatcactctttgatcggttgatggtgttggtcaacaaaataagagtacttgggagtgaagattggagtgactccaaggtcacaagattattcatgagagcatataaagaaaaggataagagtcttgcaaggatgattatggatcgtgatgactatgaggatatgacgcctcatcaattatttgcaaagattcaacaacacgagtccgaagaagcccctatcaagtcaagggactctcatgccttgatcactaatgaacaagacaaccccaagaagaacaaagaccacaaagcatagaatgtggtcgagacctcaagtgatgaagatagctcatctgatgaagacacagctatgttcatcacaacattcaagaaatttgtaagganaaatgacaagtt

SEQ ID NO: 6229 - DNA, 473 bp, Zea mays
  unsure (1)..(473): unsure at all n locations
agcttcctttactgtntcatttatgatttattttctgttatctttcataagtattttgaatccaatatgaatttgaatatgagtttcacctttgggtaaatgtaccatttcaaatcttaatgtagaaataatatattttgatatatatatttctattcctttttttatagtattccctttcttctcttccaaaccctagaatttcttttagggtttaatttctcattggagtattaacatacttattattatatcattaccaaatgcacacaaagtatgatccagcatgatgcaagatttatttaggtgtctttggggtatttatttaattgtgtaagtggggtgttcacatatgatggtaagtagaaataacacacatatagataaaggaattaatttctcctcttttattataggttacaaactgggtggtacaaatcctaccctccttagaataatctcgtctcgagata

SEQ ID NO: 6230 - DNA, 470 bp, Zea mays
  unsure (1)..(470): unsure at all n locations
agctngcggatgctcaanaatcatctattgtgcatgaagttaagggtgncactaaggatattggagtcacttgtgacttacttgatagtattacaagtgaatcactatctactaactctatttgtgataaatgcaaaatttctctcaatgataacattgctcttgatgaatcaaaaattattgttgagaatgaagtgttagtagatagagtaaacactctaactcatgacctagaaaaggcatatggtggtaaggccaaattgaatttcatattgggaagtcaacgatgctctcttgaccgtgaaggtcttggatatgttcccaagaaaggaaagaatgcttttgtaaagcaaaagacattgtttgcaaagaatgtgacacattgtgtacaagtgtacacaaaggacatgttaagnacattgtcccagttcaaaatgtatctcacttgtttgagcatgtatgtcttctat

SEQ ID NO: 6231 - DNA, 414 bp, Zea mays
gaatatcaagctttccaagaagagcatgagcaaaattcatggtaagaaaattaatgttcatactatttgctctaacaatgtacctatgtgcttcaacaaagaaagatcaaagagaagcgatagaaggtgctatggatgcaacgagaagggtcatgaattgattcatgcccccacatgaagaaccaaaaccttgctcgatcaagaaagatgaccatcaaaaaggatgaaagcaaaaggcaaatgcattgcaaggacaagcaccgcatttgttacaattgccgtgaaaaaggtcatctattcaagggttgtccaaagggtaaaatttctaagcctaacttgtcaatacattcagatatgcttatgaaacccaacattgactcttgtgctagaaaggtgatgagttcaccacattct

SEQ ID NO: 6232 - DNA, 446 bp, Zea mays
  unsure (1)..(446): unsure at all n locations
agctntatggtaaaagttataaaatgaccccaaaaataaagttgaatcacatttatacccctaagataccagaaaccctaattggaaccttggaaaaccctgaaaccaaaccctaggggcttatgtgcaaaattagtccacttttgggctaaagtgcagaaaccaagctaaataagtatttaaagtcatttggttcacaaatatgtggacttgaaagccaaaccctaagttttggaccaaaatgcaaaaatcacttcttaaagcactatagaggctaagtctgaaattaagtgttgagggctcaactttggagcattggatcttccaaagtattgagaatttgccctaggtcaccacatcaatattgtagatctatggaaggagagtaactnntgtatagaactcatgccttggtaccataagggattctgaaattaatgagcccg

SEQ ID NO: 6233 - DNA, 480 bp, Zea mays
agcttgtgttacaagaaggaaagtgggagcgctgttgtatttctgatcttgtatgtggatgacatattattgattgggaatgacattcctatgctggagtccgtcaagacttcactgaaaaagagtttttctatgaaggacttatgggaagcagcatatattttggtcataaggatctatagagataggtcgaagaggcttataggattaagtcaagatacgtacattgacaaggttttgaaacggttcaacatggaacagtccaagaaagggttcatacctatgtcacatggtaaacaccttagccagatgcaatgtcctgcaacggctaatgagcgggagcgcatgagtaaggtaccatacgcctcagcgattggttcaatcatgtatgccatgataagtacacgcccagatgttcatacgctataagtgctacgagtagataccaggctgatccaggtgaggatcactggacagccg

SEQ ID NO: 6234 - DNA, 317 bp, Zea mays
  unsure (1)..(317): unsure at all n locations
agcttatccaaaaagttagtgatttttggagttattaataaatntctaaaattccagaggtgtaggtttaaaccctcttaaatactacataattcgtggtttggactaaaaatcttgaaactatttttattaaatactatagaaatttagaagtccaacaaaatgggtctcatatttttaccatttttctataattttctagggatttcctaattctagtagaaaaagagaagggaaagagatcacctgtcctgggcttaatttggccagagacggcgcacgacaggcgaaaacacacncgtggtgtcgggttacac

SEQ ID NO: 6235 - DNA, 407 bp, Zea mays
taagctttctcgagctgggcgctcgctgtttcggagtctgtccgagggtgaagctggcctcgagtcaagcggctgaagttctcacgggctcatgctcgatctgcgactcgcgagcactcatgtgactggcagccgcggagctgggatgagtactcgatagaggaatgtcgtcggactactttgcgggcgcgttggagtctggggcagcggtgtacatcctatagagctacgggctcgtcccggtcctcgagaatgtgaccgtgttcagcgcgtggcgcgaactggcccgctcgagctcgttgccgggctgatgcaccggtggcagcacgttgggcttgacctccccgacgagttctacccgtcgacattcatgccaagaagatcgttggagtcgaacggtaacatct

SEQ ID NO: 6236 - DNA, 448 bp, Zea mays
  unsure (1)..(448): unsure at all n locations
agcttatgaatgaactaaacatattagattctctgaactttgattcaaatcttgcacatattgctcattntatacctttgatcatattatatctctttcatttggtacaaatgcatatttcttattcttcttgtgccaaagctaagactactgtgcttccgagagtgtttctatatttagtcttagattgaaagggaaatggagtaataggcaaaagcaaggcttccactacgactctgtaagtatcatataccctctgccctactcatgtacttactttcatatctgttaaaggcctctcgatttctttaattttggtgcttaataccataggggagaaattaataggccaatgcaaaaggaccgcactatcaccctatnttctgaanactctntacaaaaaaattngcatttacaaaaaccctctttgacagctaaatgagaactt

SEQ ID NO: 6237 - DNA, 433 bp, Zea mays
  unsure (1)..(433): unsure at all n locations
ctaagctcggtctctgcttatagctnctgtcaacatgaccagaaatatcttgagatatcagtttaagaatggcccttctgattcccattgctnttagcttccgaagacccaagagcagagcttcatactcagcgatattgtttgtgcaactaaaatcaagtctggccgcataacaagttntaactttggagggtgaaatcaacacagcagccgctcctgctctaaaggttccccaagacccatcacaaaacattgtccatgcttctgcatctttattcatttcctgctcctgagcccctggcgttcagtcagcaatgaagtctgtctacgcttgggactgaatcgaagatctattgacataatcaatacacaaatcattgagctctgcagcccatnttccattccttccagttgcttctcggttctcataata

SEQ ID NO: 6238 - DNA, 464 bp, Zea mays
agcttgccctagacaattatttattctcagagcctgtcttatctcttttgcaacttcgacggggctcaaggtgaactataataaatcaagtatgtaccccatcaatgtttgctcagctaaaatggagattctagccagaactctcaattgtcagacgggttcaatgcccttcacctaccttggtgttccgcttggtctgtcaaagcctaaaatctactgctttttaccgctcattcataggattgagaagagattgtcctgtacttctgctctcctctcccagaccgacaggttagagcttgttaactcggtgttctcagctctcccgacctttctgatgtgcaccctgaaaattccggttgccacggtcaagaagattgattcttatcggaaacattgtctttggagaggaaatgacgtcaactcgaagaaaccagctctggctgcttggagcatgaatactc

SEQ ID NO: 6239 - DNA, 300 bp, Zea mays
  unsure (1)..(300): unsure at all n locations
tctttgaagtctaggttattattcttcttgccgctgtcaactgtcagttcggaccgtacttcgaagcggcaaacaatgttctgccagaagaaattttgggtagtctttgatgttattgtagagacagcccgcgcctcgatccatttggtgaaagactcgacagtgacgaatgcgaacttagggtcccttgagcggtgggcaggggcccgacgatgtccaggccccaccgcttgagaggccatgtatgggcgatcagctntgtatactgcgaggggctgcccgaccgatgagaaaacttct

SEQ ID NO: 6240 - DNA, 482 bp, Zea mays
agcttctaaagggagaacacgtgataggtctaacctatgttactttcgaaaaagatagaccttgtgcagctggtcaagcaggtaaacaagtgggaggagcgcatcacagcatgaatgtgatgaccacatcaagacctctggagctgctgcatatggacctcttcggacccgtcgcctatctaagcataggaggaagtaagtatggtctagttattgttgatgacttttcccgcttcacttgggtattctttttgcaggataaatctgaaacccaagggaccctcaagcgcttcctaaggagagctcaaaacgagtttgagctcaaggtgaagaagataaagagtgacaatgggtccgagttcaagaaccttcaagtggaggagtaccttgaggaggaagggatcaagcacgagttcttcgctccctacacaccacagcataatggtgtggtagagaggaagaacatgacgcttatagacatg

SEQ ID NO: 6241 - DNA, 431 bp, Zea mays
  unsure (1)..(431): unsure at all n locations
gctgtcaccaaatgtttcctcncctcggtgaagcccacaaataacgggcagtggtggtggatgacacgccataatctcttcttggtgtccttcagcattataacatcacagccatgccttctttgtctaactgcattggaaagtgcacttctatctgctccgtgcttcccgacccgaatcaggcattcagccgatgccattctccatataagtcccaaacagagaatatggatgaggtagtcaagattgtacgcgctagtgctcaactactatcatctatagatatggacacaagtccaaatatggtgctactcggcaccatctatatcactagggagaacaaatacatcaaagagatccacttccccatagtactcgaagaatagtcattgacctgacactctctaagggttcatacaaatacattatct

SEQ ID NO: 6242 - DNA, 419 bp, Zea mays
agcttgtatagctgtgtaataaagaagtaacccctacatcacccctgccttgtaccaaaattaaagaaataaaaatgtgatgtgtttcctttaccattacttaccctaggattttaatctcgggacgagattcttttatggggggaaggatgtaacacccttggtgttactataactaaaacttgagcatgacatcataagcattggcattgcatatgtttgacacacctagagtgcattcactaggcaaaaatttcaaacaagttgtattgttttaagtgttttgcaactagaaccctggttaaggaacttaaccctaaatagggatcataggggtaaaactttacccaagttagaaaaccttaagctttaggtaaagcctaaaagaccctaaaataactgaatactttgtcccctgg

SEQ ID NO: 6243 - DNA, 434 bp, Zea mays
  unsure (1)..(434): unsure at all n locations
tcgactatggttaaattnttcagcagcacaacagtacaatggctatgtttggtgtggtaacttcacacctacccgtctatttatatagtgctgcaggtgtgcagatgaatcgtcaagtcggccgtacccgctcaacattcacccgcacccactgaacggtggaccacggtgcgtgggagatgaatcgccagatcgcgcatacccgctgcatggtggggccacctcgcgctcggattattttaatcgtttctcggcaacgagctcagggaagttgtttttcggaccttcgatattccgaagcctaggacaatttttcacggatcaaactcgttacganaaacgatctagcaccgcgaaggggctactgttgggggtctgcttcgtagtcgaaggtcctgtaagaagaacaccttcagaagatcagcacagaaata

SEQ ID NO: 6244 - DNA, 480 bp, Zea mays
agcttccatagcaatccatcatatagtggagtatggtattacgctccggcggcccgaaccactctaaatcctcgcgtgttcatgtgctcggtgttcgcttagcaagacaggcaaaacgcttaagccccttcctcatcttaggatttagggcgggtgcattccgccacccggccggagaattccctctctgacatttggcacgccaggtaagggccaacgcattaggtttttgcttgtttcctcgctcaacatgatggtgcaaatcgtggagcaccgcgccgagacttcaacggattttctggtggagtaagaagctgtttcttccacgccacaggttcccaaccacccagtgtcgggcactgctgctatgcacgctgcacgacagcatacaactgcgtagacataccggactccatcatgggtggctccgggagcattgtcagtagccagggagttgctgcgtcaccctccaagctccat

SEQ ID NO: 6245 - DNA, 344 bp, Zea mays
  unsure (1)..(344): unsure at all n locations
tatatatatttcgtattaattacaagatccaactctatctatctatggttctagatatatcttggtcttgcagtcgggattgccataagactggtgtccacgctgaggtgagcggtacgggtgctgagtcccgacgggagcggtggaaccaccattcaaataacgacgttccgcgcgctcagcccgcagcagggcgatcttagcacgagccctactcagctcatctaatgcatggtccagctccgtgtttagcacggcggctaaggtgactgtgctgctcaacctangattgccctcaccgacaggtgagacaatcacgccttctgtgctgccagatgaacggc

SEQ ID NO: 6246 - DNA, 460 bp, Zea mays
  unsure (1)..(460): unsure at all n locations
atgggtagaaaggttctctgattgtttatattcactccactcaccaacctgtccaaagcaagcagcatccccatccttagcagcaaagtgtgaccctagtccgccagttcctctcttgaactgactaaccatcatgaccaattggggctcactgctagacacccagcttaagaccgatcgaaggtgtgtgtgttttcttccttgatccgggtcttgtcatgtntgcaggactcaaaagcagactacaaaccctcacaaagtgtatactacataggtgcagaggcactcactaagctagccatctcaagcaaagctatcctagcgtctctctctactagcttagtctgcgagccaagacaaacagtgcacacacctaacaatctagacctagatcttaactcatcatgctcatctagcaagggggcgtacttggtctacaaagctgtgatgttcgacatgt

SEQ ID NO: 6247 - DNA, 276 bp, Zea mays
  unsure (1)..(276): unsure at all n locations
gcatgcatctagaccggcctnctcttttgcaaaatcaactaaataaagtttgtcgtctagtacacccttaaaagctagtgaaccatcacatcttctaaagacgacacatttatattttgaaataaacaactatatcccatattacataattgactgacagatagtaaattatatccaagagactcaactaannaacacgtagagatagagtgctcatttgatattgcaatcttgcctaaacctttcaccttgccttagttcccatcaccgaatatg

SEQ ID NO: 6248 - DNA, 474 bp, Zea mays
  unsure (1)..(474): unsure at all n locations
acctctgagtcacctgcggcatgcaagctggtatctcgccttgtggaaatgcttgagtttcttttccacacaagtaccaagagcatacagacaatcatcataaaggatgtgccacactttatccagtatatcggactcaaaaaacttattttcctccttagtgtctaaagaagatgttttatcagaagatgactgcaaaaccttagtcattgaccccagcatgctcaagacattttcttttgttgactggttatatgtgtagtcagcaacaacctataaagcanacactcaacanagttagcataaaatagtctactaaagaactatgtcgcaatgatacaagacagaaacagtatgctttttttcctcaaacatgcagcagagctgggtatcattgctaaaanaaatcaaacgacagatgggcggatatgattaaggaatagctcanagtgttagacaangttatatacatat

SEQ ID NO: 6249 - DNA, 440 bp, Zea mays
  unsure (1)..(440): unsure at all n locations
acatactacataactntaataatcaccaagaagtattttcagtntatcaactcanacaacaaagttttcaaaatatgttcgagagtggatagaacatagcaatcgctttgtaaaattcataactcttaagctatcaggattatggtaatgaaattttaacacaagaaatataataaagttatctacaactctcttatggtcatcttaagaggattntatagttaattagctcaaacaacatcaagatgaaatgatgtttcggtttgggacagatttcaatgtgcaacttataacagtcataaatatagntatatatatatatcanataaatatgggtctaggctctttagaacgcttataaaaagtactacaactcttataatatcactaagaagtgattctaagtctaactcagtcaaacaatacaatcattcagatct

SEQ ID NO: 6250 - DNA, 439 bp, Zea mays
  unsure (1)..(439): unsure at all n locations
agcttctaaagggagaacatcatttgggactatctatatggtcatcttgagaaagacagggtttgtagcgcatgtcaagcatggaagcaagttggtacccaccatccacacaaaaacatcatgacaacagacaggccactggagttactcgacatggatctagtcggcccgatagcttacataagcatcggcgggagtaagtactggttagtaattgtggatgattattctcgcttcacttgggtgttctttttgcagaaaaaaatcagaaacccaagaaactttaaagggattcttgagatgagctcaaaacgagttcggattaaggatcaagaagataagaagtgacaacgggacggagttcaagaactctcagatagaaggctntcttgaggaggagggcatcaagcatgagttctcttctccctacacacctcaa

SEQ ID NO: 6251 - DNA, 344 bp, Zea mays
  unsure (1)..(344): unsure at all n locations
gtccactctaactaatcttcggagaaacccgacctttctgtacatgacacccgaaggtccaacacaacaagccatgaatgaattcagaattattgcagagcatatcagtacaagggacctggttcaagagtttttgctttcaaaggttttcccagtttgaaagaatgggaaatgccgaagctgaatggggagaagaaagaaggtgaacctgtacgtttaccttactatttcaagtttaagaaatactttaaaacgccttgccaagagtggctatacacaattgaagtaatgtgcaatgaaatacttggcaattattcgaanaaggaagatcaattgatgatcgc

SEQ ID NO: 6252 - DNA, 482 bp, Zea mays
  unsure (1)..(482): unsure at all n locations
cacctgcngcatgcaatgcttgacaactcatcacacagggtggtgattttttcatccatactcacacagatgcactgggccttccgacttaaggcatctgccacaacattggctntgccaggatggtaatgcacttccaaatcatagtccttgatgagttccaaccatcttctctgcctcatattaagatcagcctgagtgaagatatatttgagactcttatgatcagtgtagatattacaatgagctcccatcaagtaatgtctccaaatcttgagagcatgaactacggctgctaactccagatcatgtgtggggtagttctgctcatggggtcagagtgctctggaggcataagcaatgactctgttgtcttgcattaagacacatcccaatccagtacctgaagcatcacaataaacctcatagggtgtggtgtgtcaggctgagctagcacgagtgctcgtgtcaaatattgcctt

SEQ ID NO: 6253 - DNA, 487 bp, Zea mays
  unsure (1)..(487): unsure at all n locations
tcgcatctctgaactaactcggctgcatcgttcttcgctgtctgtttatagaatcctgacctganaacctttccgactagtgttctggatgctgcatgaattccacattgccctgcatgaacctcctccagaagttgcttcccaccggacgggagaacgcacttcatgaggatgcctgatgcgccccttctgtacaattcttccccaatgagtgtatagtgagccgactgcctggcaatgcgctctgccgagttcttgtcgtctgagtcttcttcattctttatgtacttaataatcagccttctccagtcatcagagtctgactcgggttgatatatgatgttgcactcttctgtgtgatccattgagatactcggctgcagaatttctggcacgaagactcctggtgggacctgagttcgactggatccgagcttggacagtacatctgctgctgtgttccgatctctttctacatgatgaaatt

SEQ ID NO: 6254 - DNA, 489 bp, Zea mays
  unsure (1)..(489): unsure at all n locations
acctgctgcatgcaagctatgcatcaagcttcagcttttcttgttatttatttctgaangggaaagaagcttcgaatgtaattctgttatttttgcttcatagtccactaataagccttcggctgtttgtagctcgaatcctttctactcgatggcagcaaaatgctctcttattatgttttctaagttttcaattataacttcttgccctttatctactaagtcttgctgcattattaatgccttgctatgaagtatactctatggacaaataagcttcgttagacaatattttcgttaccacaaataataagagttagacacaagatgtctaccttaaaattagaatagaacacactgccgacaatgngtngtcgtcagaagcggctaatatcacgttcaagcttctggaagccgatactctatgataaagtaccaacaaccctcgcaccagattggtcttgtatgcagcctaacacttcatcatca

SEQ ID NO: 6255 - DNA, 263 bp, Zea mays
  unsure (1)..(263): unsure at all n locations
ttcactatggagcttcggatctgaatacagnctcttatctttatctaagatgtccgaagctgctaagaaggctgctgctgagatgatactgactctcgatgacgagaagaacttatggtttcttatagcgatgtcgaagaccaacacacaaatatcaccaaggagattctcggagggccgtctgaagatactcgtgagagtgatacgtatgatgtggacagcggtggcgaagactccgaagaacgtacctggcgaccaagcca

SEQ ID NO: 6256 - DNA, 262 bp, Zea mays
  unsure (1)..(262): unsure at all n locations
accgatcctcggaagctggtggataccaagctcaagttcatgtggttgatatatcagatgcatttgccaaggctgttggcccaaatcaaacctacttattaactaacgagaaaaaattgtgatactggaaattttataggttgatggttcaaagatgtacaatangatcataataggtgttaatgcacatgatgcactaaaagtactatgagctgaagctacacgtgtgaatngttctacatagattcaacaatagtaaact

SEQ ID NO: 6257 - DNA, 313 bp, Zea mays
tatggtcagaccgaaagaaccaatcaaattcttgaagatatgatgagagcccgcgcgttgccagatcagtccggatgggataagagaatgccttatgcacaagtttcctataacaacagttaccaagccagtttgaagatgtcaccatttcacgcgctccatggaaggaggtgcagaactccgatgcaatgggatcagcctggagaaaagcaagagtttgggccagacattatgcttgaagccgaagagaacatcaagatggtccgagaacatctgaagatagcgcaatcgatgcaccgaagctatgcacaca

SEQ ID NO: 6258 - DNA, 480 bp, Zea mays
  unsure (1)..(480): unsure at all n locations
agcttgtgaagattctttatcccaacacgagctaatctgctatgtctgagccagcttatgttagtcttagcaattaagcaagtgtctagttcggcattggtatctgtcggagaggaaatctccggccgggtggcggagtgcacccgccctaaatcctaagatgaggaggggcctaagcgttttgcttgttgcgagatgaaggaatgaacacaagaacacgcatgagtttatagtggttcgggccgccggatcgtaataccctcgttggggaccataattaggggtacccccaagactcctaatctcagctggtaacccccatcagcacanagctgaaaaggcctgatgggtgcgattaagtcaaggctcggtccactcaagggacacgatctcgcctcgcccgagcccagcctcgggcaagggcagccgaccccggatgattcacgtctcacccgagggacccctcaagcaacggacaca

SEQ ID NO: 6259 - DNA, 382 bp, Zea mays
  unsure (1)..(382): unsure at all n locations
gggtgcgctgcttcgagaattgtcggatgtagtcccggagagactctctctgctgctgtcggcagcttcggaggtcccaggaattcccagggcgcacgtacgtgccctagaaattgccggcgaaggcttggaccaagtcgtcccagttagagatctaccccggaggcaggtgctccaaccaagcgcgagcggtgtcngagaggaacagggggaggttgcggatgatgaggttgtcattgtccgttccacccagttggcaggccagccggtagtccgcgagccacactctggtctcgtctcccccgagtactttgtgatagtagtcgngggtcggaaccgggtcgggaacggcgcccgtcgtatggcccggctgaaagctcac

SEQ ID NO: 6260 - DNA, 477 bp, Zea mays
  unsure (1)..(477): unsure at all n locations
agctntgccaaataggacgcataattataccttttatgtcttctcgtgctgataagtcattcttcacataaaaccattctgtcatccaatccccgggccatctcttccgaaaggttggtacgggacagcttgccccggaccgagaaacgaagctgtagcagccaaagttgttatggtactgttctttgccccaaggctttgtttcatataataattcatgaacattacaaaagcttcttgcgtcaggcttcagaccttgactcctcgcggcccacacgaagatatatagccttataattgcctcgggagtaagttgatgaagatagacttcgaagattttcaacacctccacgacgaagctgctcaaggggaatcgcagtccagctttcanaaagcttcggtacaccacaacttcattntcttcagggtgtggacaagtntgttccccttcgtccaccctcacaatagacagatccc

SEQ ID NO: 6261 - DNA, 363 bp, Zea mays
  unsure (1)..(363): unsure at all n locations
tagaataatatntagaaaccttgtgtgaagtttggcatgattttgttctatagatgggtacctaaaccccanaaccctgaacttctaagtaaagcctgccctatgaacttaaatactgactccacaaaccctagttntctggagtaccgtgaaggaaaattgtattcaagacctaatatgatgttgtcggagagggaattctccgaccgggtggcggaatgcacccgccctaaatcctaagatgaggaaggggcttaagcgttttgcctatcttgctaagcgatcaccgagcacatgaacacgcgagaatttatagtggttcgggccgccggagcataataccctactccactgtgtgttgga

SEQ ID NO: 6262 - DNA, 471 bp, Zea mays
agtgacctgcggcatgcaagcttgaagccatggtaagtagcatatgaaagttatattcttattaactcaagcctagctacgggtgcatatgtttcaccgaaatccaaaccttcgacttgtgaatataccttggtcacaagtcgggctttgttccttgtcaccacaccatgctcatcttgcttgttgaggaatactcacttggttcctacaacattctggttaggacgtgaaactaaatgccatacctcattcctcttgaagtatttgagctcctcttgcattgccatcacccagtccgaatctcttaatgcattctctacccctaaattatttgatcatcttccttgtctagatcaacttcatctccgccttgatcatatgtctcatcttgaggtggctcatcctcttgatcttcatcttcattgtcttgagcctgatcctcatctcgagttggtggagatcttgcatgga

SEQ ID NO: 6263 - DNA, 336 bp, Zea mays
  unsure (1)..(336): unsure at all n locations
tcagtagaagntncagcaacttcaacactcttatttggaattgtgctttattacttaattgtctccaagacgtctagtacatttaccattcttttcctttatgggggcactgatggccccttttggttttttgatgtcccaatgattgctgtatgactcaaaacttctgatgtgttggagccctcagttgcttctcttacctcctcaattttttctgtgagcggcgcttcggattctctattgtttctgacaacaaaatagttaattgatctgattctatctctggtggcacttcggtcgtttctgcgatctctggcaacaaagctggctcgatta

SEQ ID NO: 6264 - DNA, 439 bp, Zea mays
  unsure (1)..(439): unsure at all n locations
gtcacctgcggcatgcaagcttcggctatggttaanatatttggcagcatattattgtatagcaatgaatgttgtggtaacttcacacctacctgtctgtttatatagtgctgcaggtaagaaggtgaatcgtcaggatttttacaccaggcaaacagttgctcgcacccgctgcgcggtgggccgcaaaaaccaaatagtgaacctgcactgtgggaccgctctgcgctcagaaactgtatcgtttctcgacaacgagctcanggaaggtgtttttcggaccttcggcttcctgaagcctaagagactnttttcacggatcaagctcgttacgaaaaacgatctagcaccgcgaaggggctactgttgggaccatgcttcgtcgccgaaggtcctgcagaaagaaacagcttctgctgaagctgctcgtacgcgatgt

SEQ ID NO: 6265 - DNA, 474 bp, Zea mays
  unsure (1)..(474): unsure at all n locations
ntctaaagctctctatgggcttaagcaagctccacgcgcctgatatgatatgcttannggattctcgctttccaaagactctaaaattaggaaggttgacactaccctattcactaaaagaattggaaaatacttatttgtctgtcaaatttatgttgatgatattatttttggatctactaatgaattgttttgtgagagatttgaaaaaatgatgtcaaaagaatttgaaatgtctatgataggagaattgagcttctttcttggtcttcaaatcaaacaattgaaagatggaatctttataagccaatcacaatatttgaaggacatgctcaaagttnggcttataatatgcanagcctatcaagactcctatggcaacaaatggtcatctagacttagatgatggaggtactatcggtgatcaacaacttatcgcttaataattggtagttactttatattaccgcatct

SEQ ID NO: 6266 - DNA, 481 bp, Zea mays
  unsure (1)..(481): unsure at all n locations
agctngcacatagtctcgatgatgtatgcctttatatagtccaagtcttctaaagctattactttntgtgaaaccgaattgaaaaagtaacacaagcgtgtgatgacaactttgacatgctctgttttgagggctcttaccgcaattgggaggaacaccgtcatcatcacatggcagtcatgagagttgtagccaaatagagacaagtccttcatcctgactagtctgctgatattggatgagaaacctgtgggcactttgaccccacgcaaacatttgcaaatctttgttctctcctcaactgacaagttgtagctagctggggggaggtaaggcttccctttgccactatccactggatgaaagtccggtctgatttgaagatctactagatcattgcgtgaattaagtccgtcttttgtcttactcggcatgcccaacaagggtncaatgatgcctgtcaaaacattttttgtacatg

SEQ ID NO: 6267 - DNA, 517 bp, Zea mays
  unsure (1)..(517): unsure at all n locations
tgtagtgattaaatagggatactgggttctntggtgattatcaactgtgtgagaaaggtattaccaggaagtgactaattcaactaaatctatgttctatcctaaatagattatgggttagtcagatttgattatagacagattaactttgactataaagattaacctccaatcataggctagtccaatattcatttataaaaattatgagatatgacaaaataataacactactgcgtagacaatattaatgtgaagctaacgcaacatgaatggattaaaacggagcaaaaacccacaagatatgaatttcctactcttttaggagtatttctataaaaaatactacagtattcctgcanatgctagggggtatcctgtaaattctatgacttaaccgcgatgttcttcgcatagctatggatgggtgggtgttccttanaacagcaggggctnttaagcanaagtgcattagtgaagggggctatttcaatctaacttgtcgacccaacgtgag

SEQ ID NO: 6268 - DNA, 462 bp, Zea mays
  unsure (1)..(462): unsure at all n locations
agcttatagtgctggctcatgtttagccgtcttatgatgagtactcgttcgtgtcatcgtgtgccttccgcgcagattggaaataaacaaataaatgcatcgagagacgtcacaagcagagcaaggcggcgggagctagcagagcagcagttgcaactagcaagcgcacgagcgagatgggcatcgagagtcttgatcgcgtccagcaagtcagggagtccaagagagacgacgacgacgacgacaaaggatgtctatcggaggagatagagggctgcagaggttggagatcggccaccgcgtgtcgtagaacacctgtgaggtggcggagccgcacctctcgcctctcgccgtcggagaaccttgacatggtagtcactagtcagatatcaatgattaacgtggtagtcggaatatgttgttaaactgcacgtttttctactcangatanttatgatatac

SEQ ID NO: 6269 - DNA, 415 bp, Zea mays
  unsure (1)..(415): unsure at all n locations
gagatgtattctgaaaggtcccttgtgcggtntttgttttgtatgacaacacaattaaaggtctgacatgggtgttaagtgttgaacatgtgctaactgaaaagcctacaaggttcaacacatggagacaaatgtgatggtccaaatacgctgagttaagtatggttctggatatcacaaaattgaaggatggacattgattaagtggaaatcgatgtacttgacttaaagacaattgatcgaactgaggatgaaggcaagaaggacttcaaggaaccgagtgcatgggagaatgtcaagaagactgatgtacctatagccaagggtgaagaagatggcttgcaagaagtcaatgttgatcaagctaagaagagttctactgcattgaagaccatgatatatgagcatgacttac

SEQ ID NO: 6270 - DNA, 411 bp, Zea mays
taattatccatttcttgacacaatgtggtgtcagaggtctttactgtaagacaatggcaggaagccttgcgacttattgcatctgccaccacattggccttgcctaggtgatagtgaatttctaattcataatccttaatcagctcaagccatcttctctgcctcatgtttagttctgactgagtaaaaatatacttcaaacttttatgatctgtatatatatatatggaagatattccctagcagataatgactccatattttaagggcatgaaccacaacagctaattctaagtcatgagttggataatgttcctcatgccggcgcaactgtcttgaagcatatgctataacttggccctcctgcattaagacacattcgaagccactggccgatgcgtcacagtacac

SEQ ID NO: 6271 - DNA, 313 bp, Zea mays
ctgctacgtgacatcgacccataacttcttttgcttcagctctgctattaatatgcctacacatttgtcaagtctagaagaggccatcttaacaagactgacggtctataaccatctgggagaagagcttcgttgtcaggcgatctgactgaggacctgaccaactttttgaaccatgctcttactgatcaacaacttatttggctgggacttgtctgagactcatcaactggattagccaccttgtcatttgtcccaaacatgggtgccagaagctgctattacctgcaccttttttgtttgatccaatcgc

SEQ ID NO: 6272 - DNA, 419 bp, Zea mays
  unsure (1)..(419): unsure at all n locations
agcttctgcacgtctgggtgggtcgngcaaacgatctccctccccatgtgatgagacaggtacgcgcaactgtcctaaagttgtagtaccggaacacactactactacagaaaaaatggattcggacccctccccctaacaaattattgagatttagagctgagggaaggtgctggtccaagtaaagtgacgtctaaaaagtcgcgtctaccatctgttaccgtagcgctggagtacagtagcagggatcgatccgctatatatatatatgctcctcattgggatcggtactccatgtgaccagctaccactatgcaatgcatgcagcgtatacacgtgggctgaaaacgtcaaacccttgagatggaataccgagtcagtccgccgccccccccccccccaccaaacaccacgggctg

SEQ ID NO: 6273 - DNA, 439 bp, Zea mays
  unsure (1)..(439): unsure at all n locations
tgtttganaagtgccaagtcttgtgatgtgcagaccgttcgcgttcctccagtggggtccaaaatctgttcacttcggacaggtcttgttcatttgtactgcggaccgtccacagtcctgaccagagaaggctgctctcggcaaagtccctgaattatattgcggactgtccggccttggtaggcggaccgtccgcaagtgccaaattcggtttggacagggactgtgtggtttttgggatttgtactatggactttctggaggacaagcccggacagtagtgactcccaggtcacggatcgtccggccttgtatgcggacggtccgcatgtgttaactcctcttggtcagaggtctaggtgttccaagtttctatgtcgcggacggtccggccaangtgggcggactgtccggaccttacttttctgacagctctcac

SEQ ID NO: 6274 - DNA, 459 bp, Zea mays
agcttggctatgatcaaaactggcaaaacttcttagagcagtatacgggtaccaaactttcttcctcaattcctccagcgacagcacgaaaacgccagcgcatttacatctccgggctccggcgaccgaagcggtgacagtacccagcggcgctggtgccgtttgtcgagcactgcactgcacattcatgcttggttttttatcggcgactcgttgatatagacattaacgggcgctcttcggataggttcttcttatccgaactaggcagatcgagattgcatacacagtaaaagtgacggattatgatgcacataccatatgaggatccaaccggaaatggcggaggaagagccgaccagagaagctaggagcgtgtggcatagggagcgatcgagcgcctgataggaaagctagggcgtgaggggctgaccagaaatggcagagaagctatggcat

SEQ ID NO: 6275 - DNA, 505 bp, Zea mays
  unsure (1)..(505): unsure at all n locations
tcctggaggccattaacacagcatacaacaccttctccaattctgtatagtttttctttgatacacttaaaacttcggagacgaagtatactggggcctgctttttgatttggccatcttgcctctcctgtacaagcgctgcactgactgcagagtgagaagctgctacatatagaagcaatggagcccctggcgaaggtggagttaaggttgtcaagtctattaagtattgctttaactcttcgaaagccctttgttgagccggaccccattggaaaacttcggctgacttcagtatttcaaagaatggcaaatttctttctgttgatctggatataaatctatntaatgatgccagcctttcttgcaatcgttgggccacctctctttgtatttggcggtgtggcggaaccgcccgaattatttcagcttatgtgcccaagtcgcacccttaatggcagcaacacacttaaacaggaataacccgtcagtccctcggatctac

SEQ ID NO: 6276 - DNA, 368 bp, Zea mays
  unsure (1)..(368): unsure at all n locations
agcttgtgctggaacatatagaatgttaaatatttctatagaaacaaaaagaatttgattaggatttacaataaacattttatggctaataaacaaatctgcatggacctaatggtaagtatctatagttctcaaggttacttttgagtaaaataagggttggtgggttgtttctttaaaagctgagggctatggtgtaaaatgatcagagntggatgatgagttctatatcctgaaagtgtaagggctaaccgtaaacaaaaaaaacttgttggtaaggagatttgaattacataaagatcgggtgttaaaataataaagcacttgagccttatcacanaatggacaacatctaccttcatctcaca

SEQ ID NO: 6277 - DNA, 428 bp, Zea mays
  unsure (1)..(428): unsure at all n locations
cttgctttggtttgagtacaacccctcctttcaataatctttaggtactgctgctctttcatttggagaaagaaatggctctgcagatcattaacttacaaattgagcaccccatcgaggcatagatntaagtgcacagaatgcacatgattctaattggtatcacaagttccactcatctgcccaccttttccacccacccacccacggaataactttcatttagaatttatctggtgtcatgtaaacatggtggattagtaattgttattgccattctttcttccaaatgttgactatntcctcttgtntcctcaggaacatatatacaaacaaccatggatctgatctgttgccatatatggnaacatgataagctgctctatacctaccagatattgctttgaaccgaagtttacatcatgcta

SEQ ID NO: 6278 - DNA, 472 bp, Zea mays
  unsure (1)..(472): unsure at all n locations
agcttgagcttggagccttcttgccttttaactntttgtgttcatcacatgcaaaagcatacgactttgaagaagttggctcctcttcttgacgcatcttgagtgacatttcaaatgccacaatcttcccaatcacaagtgtcggggtcatttggctaaagtcgtccaaattgtgaagaatggtgatgatgctcccatatttttgttgaggtaaccgagagatgatcttcctcacaatgtctgcatcatctagcttattaatgccaatagaattgagcttataacaagatttaaacatgaatacatgtctctaacaagctcattttctttcacagcanaagaattatactcattccagaccagacaatgtttttgctcaccaacatttgatgtgtcgtcatggagctcatgcaattntagctaaatctcattagcggttntcaagggaaatacttgactgaagattctatgc

SEQ ID NO: 6279 - DNA, 375 bp, Zea mays
  unsure (1)..(375): unsure at all n locations
taagctagtacaaattcgactgaggagcccaaactagagaagacgaccgaatagttgaagacgttgagtccatcatgtgcaatgggactgcctaagccatcaagcactcccgcagcgactccaaggaaaaggagaatggctagcatgctatatgttgttctagagtccataanaacatcagctcttgcctctgccaaagctcttaacacgcaagctaaagattcaaggaaaactagcgacgccagcatggcccacactcttgctgaagctggaccctcaaaagctcctgctgaagccagaccttcagaaactgtaccgataactctggagaaagatagtgttcctaagaaatccaaatctcctgcccctatagca

SEQ ID NO: 6280 - DNA, 436 bp, Zea mays
agcttaacgtatacgaatatcaacaagctaagggatcatggattacagtttacttcctgcagcatcttggcctcatgggtatcaatcagaacatgcgtgtgatatgattgtcacacccgtggccgcggcgatcgccagcgacgtgaggaacaactggatcggctgggagatagagtttggcttgcggaagaagttccttccgtaggctgttttttctttttctatttctcacccgcacaggtatcgacccagggtttaagtacacacggttcacttacaatactggcccaccaacggtgccattaaattctttgattaacgacagtaaagtaattaagcagtagataacttcagcttcttctgacgccgcgcagcttctgttaccctctacagtagtgcgtctgacatgtgaggcactacagtttcccccccttga

SEQ ID NO: 6281 - DNA, 433 bp, Zea mays
  unsure (1)..(433): unsure at all n locations
ctcagcttggtgtcaaacatctatgaacaaccttgcccaataatgcaacaatatctataacctgaatgcctgcagtttctgaaacagatggtggttgtctcacttgtttacagaacaagtataaaaagatgttaataagctcatatagacaactttattttttattcaaattgcacttgttcttacatcacttaatgtcatcattattttctgagagttgctcttgtgttataaccaggttttatttttttctttctttttggagagagtagtgctaccagcattagaacactagactactctatgtgaatggagtacatacagaaacagaatacaacttccttcgttagattctgatngatataatggtgaggttgaaccatcttttgcactaaaagtgatttgtataatcttctatttagaggtgtacatg

SEQ ID NO: 6282 - DNA, 464 bp, Zea mays
cgcagctgcagctggatatattaccagaaactatggatattgttgtgactaatagaacatcttcttcacgaagcatgaaaagaaggaaggtgtttttcgtcatagacacacaaacggtacgtgagtaaaatttcatgcatcgcaaagaattgagcagtacaaacagatgtattacgttcagcggtacaagatattacacatattacactccagatatttttacaatagcacctagatttccctaagtactacttctgcagcttcgttcagaagtcgatcaacaacttgatccatgatatcttcaaccatctttttaattccatcgccatctttaggctgagggcccgaagacgcttcagtaggatctgagggaggataggatacgactacattgctattacagtgtgcgagcgaagtttataatcacaagttacaacacaacaaatacccattagtaataccta

SEQ ID NO: 6283 - DNA, 383 bp, Zea mays
gtgagtcacatgttgtatctgtgcatgcatgcgtgtgttcttatgataaggtatctatcgcatgtgacacaggatgcaatgccgcgatcttcccgtcttagatgcttcctgatggcctattctgaaaggaaagtgtaggtcagcagcaactgcgaaacgccgaccatgtgcggctgcgtgtatcgtcacacacaagatgcaacccttatcgccggcgacgttggcaacaaaaagggatattgttggcagacgtgtatttcttgggtgaataatatatactgcctagaataatatgggcaccaacaacgaaatatctataatgatactcttcagtgttatgctgcagcatgttctgttttagataactaaatatttatctctcc

SEQ ID NO: 6284 - DNA, 468 bp, Zea mays
  unsure (1)..(468): unsure at all n locations
agcttatgaagattcttcatcccaacatgggctattctgtgatgccagagccaacccatgttagtcttagcaattaagcatgtgtcgagttcagctttattaaaatccactaagtatagctgaccctctaacacacccttaaatgctattgaatcatcacttcttctaaagacagtgacacctatatcagtaaaaagacagttgtagcccatttgacataattgggaaacagaaagcaagttgtaatctaatgaatcaacaagaaaaacattggaaatggaatggtcaggtgaaatagcaattntacccaaacctttgaccaacccttgatttccatccncgaatgtgatagctcgttggggatctntgntnttctcatatgaggagaacatccttttctccccggtcatggtggttgtgcacccgctgtcgagtatccaacttgagcccccggatgcataaacctac

SEQ ID NO: 6285 - DNA, 450 bp, Zea mays
  unsure (1)..(450): unsure at all n locations
agctaggtgccaatgganaagcaaanatccttgatgtcttggctgtcaaactgcttgccgttgtcgactgttagttcggacggtacttcaaagcggcaaacaatgttttgccaaaagaatatctgtgcagtctttgctgttattgtggaaacagccctcgcctcgatccatttggtaaagtactcaacagcgacaaaggtgaacttgaggttcccctgagccgtgggcaggggcccgaaaatgtccaggccccagcgctggagaggccatgtgtgggcgatcagctatgtaaattgcgaggggctgcctgatcgaggggaaaacttctggcaggcttcgcaggaccttgtgacccgatatgcggcgcagatcattgcgggccagtaaaaaccttggcggatcacctttgcggctagggcccttgaccctgcgtgagagccgcaagtacca

SEQ ID NO: 6286 - DNA, 445 bp, Zea mays
  unsure (1)..(445): unsure at all n locations
actcagcttagccacggggctgccactctgcagccgctggatcctaatcatgatgtcctttctcttatggaggcctgaagccattagaggaaggctcccagtccaacgcctccggaggacgacttggatcaataaatccaaaacttggagatgctccaccaacatgttcaacgaattaaggaaaagatggttcgtctatctttcctacagaggcttatatatgaagcttctgaagaagatcgtcatcttgctcaagatgaccagaaccgaatgcctccgcgcagagagcttcatcatgatggcttctacatctaggacgactggtatgaagatttncatcatggaaantagcttttgaagatgcttctcctcttgcaacagaactgcatgctacaccatggtcccagtctacaagctancncagttcctcatgtacgacggtcat

SEQ ID NO: 6287 - DNA, 480 bp, Zea mays
  unsure (1)..(480): unsure at all n locations
agcttcataacccctagtgggacttactgctaccttcttatgcctgaggggctcaagaatgctggaggaagcttccgcagaatgactgccaaagtcctttattcgcaaattggcacgaatgttgtaacatatgttgatgatattatagttaaatgtaccaagtaaaaaaatcacacagctgatttacaagaaacattcgccaaatttagaaaggcaggtctcaaacttaacccagaaaaatgtgttttcagggtaaagacaggaaagtttcttgggcgtctcgtgtcaactaagggaattgaggcaaacccttgaaagatagaagcaatagtttggatggaacaaccaaagtcaaggaaaggcgcccaaaggatgacaggaagaatggcttcattgaatagatntatttcaagatcagcagaaaggaactcgccattcttcgaagtatgaagtcagccgaagtcttcagtggggaccagt

SEQ ID NO: 6288 - DNA, 389 bp, Zea mays
cgtcaaatggttgtctacttggtgtagactcctccttcttcttctctcgtgccttgaatgcaacgggttgtgcttcggatgtggtggcttcatcaagctcgttgatcttcctagagccttcgatcatgcactcaaaactcacaaaatttctgataacttcctcggcggtcactttagtatatctaggattaccacggattaattgaacttgagtagggttaatgaaaataagagatcttagaataaccttaaccatctcgtggtcatcccactttacgctctcgagggtgcgcacttgattaccaaggtcttgagccgcgtgtacatgtgttgtggctcctcccctttgcgaagcctgaaccgaccgagctcaccctcgatcatttccc

SEQ ID NO: 6289 - DNA, 410 bp, Zea mays
  unsure (1)..(410): unsure at all n locations
agcttgtttaaaaagtttggtggaatttgggattataaattattctctaaaattccataagtatggattntggctattttaaatgtcccaaaattccctattggaactaaaaatcatgaaactatttttattaaatactatagaaattaggagcctagcaaaattggtctggtatttttagcatttttctacaattttctagaaattcttaaaccctgatagaaaaagaaaaaggaaaaagcatgaacaactctggaccggaactggcctaagtcggcccatctacaggcggaaacgcgtccgcgtgcgcctgcgctgctggttttgcagaaatgtccctcacagtttgaataactgaaagaaaagtcatggcactattctcatgtctcactgacattngtaagaacacc

SEQ ID NO: 6290 - DNA, 493 bp, Zea mays
  unsure (1)..(493): unsure at all n locations
gtgcattcttttcatttgcaagactaactatagaggttnttacattagccatttctttctctttatcctctatagttattttgactaaagatatttccttagtcaaaacttcgagcatctcatctttattggataacaattcttgaagctctaggtttctctcctttntaaggatgagcaagtcttcttgagcatcaagggttgcttttcttttatctagcttctccattagtttagtgattacattatatcaatttaagacaaattctttaatcattttattnttcatggcaagctgtttatcatcatcattagtaaaatcatcattaaataaggttaccttatctccttttgccatgangcaagtgggagtgtatgagtcgttggagaggttagtgaagagttgcgaggtcnangtggattgaatggcgacattanccacctcttcctccgagcttgaactctcttcgtcgggagtccattcttcacctat

SEQ ID NO: 6291 - DNA, 478 bp, Zea mays
  unsure (1)..(478): unsure at all n locations
cttgaactcttaaatctcctacattatattattaagttcttaactgatcttttatagtcttgcgatcataagagaaatcatcagaatagatatccgcgagccgagcaagcttatccacatcaaacttagagaatgaatcccttgggtcaagacaagaaaaacacacaagcaactcttgagatagctcattaaagtgatgatcgaactctgtggtgataaaatctatagcaacatagaaagtatcaacacgataaanatgctctatggtaagaagaaatgaagagttcatttgcaaggcagaatgttgtggcttcttccaacaatggctcccaacctttatttctcagattaatcaaacgtgttctcacatcaacaaccaaatacatggcttggacaacgcnttgatcctttctttgctagagaagggaaagtgtatntgtgatacggaggatctgtaacatcgtcttcatcataaaca

SEQ ID NO: 6292 - DNA, 282 bp, Zea mays
tcctgttaaatccttctttccagggggtctgaatatgacatattcctgtgtctttacaggtggttttatgatatgactaagaaactttacttgttatgctttgaatcgttctccattgtttatttactctttttggacctataactctttcatgcaaacatgacaagtgttgtaattttgtctaaccggaaaggcagcagtacttgtagagatgtttcaccatggccaatgatggagacgatggacaaagccaggattatctcttctaaattgtcctgatcg

SEQ ID NO: 6293 - DNA, 450 bp, Zea mays
  unsure (1)..(450): unsure at all n locations
agctntaccaaatggacgtgaagagtgcctttctcttggaccaatcaaggaagaggtctatgttgagcaacctcccggctttgaagacagtgagtaccctaaccatttctataggctctctaaggcgctttatgggctcaagcaagccccaagagcatggtatgaatgcctaagagatttccttattgctaatggcttcaaagtcggcaaagccgatcctactttattcactaaaactcttgacaatgatttgtttgtatgccaaatttatgttgatgatattatatttgggtcaactaacgaatctacatgtgaagaatttagtaggatcatgacacagaaattcgagatgtcaatgatgggggagttgaagtatttcttaggaattcaagtgaagcaactccaagagggcaccttcattagccaaacgaagtatactcaagacattct

SEQ ID NO: 6294 - DNA, 363 bp, Zea mays
  unsure (1)..(363): unsure at all n locations
tgtttaaattccttgtattgcatctagggcttgtctaacctagttaagataaccgccaacaaagcgagtgaaaaagcttaactcgggtcaaacttgacaagtcttagttttaagcttttagcacttaaattcttactttttatgcaattggtgattcttgaaatatgcatgaggtactgcactaagggggagtattcaaaactcaaatcactcatgaaaacccctagtgcaagccaaaatggcaaattcaccatctgcctattttctctaaaaattatctagcctatggcagaaatattttgaaaatatatgagggtgccaatacctgtcccaacaagtgttattntgtgtgattataagttg

SEQ ID NO: 6295 - DNA, 458 bp, Zea mays
  unsure (1)..(458): unsure at all n locations
agcttggtgccgatggagaagcanaaatccttgtagtcttggctgtcaaactgcttgccgttgtcgactgttagttcggacggtactccgaagcggcaaacaatgttttgccaaaagaatttctgtgcagtctttgatgttattgtggaaacagccctcgcctcgatccatttggtaaagtattcgacaacgacgaaggcgaacttaaggttcccctgagccgtgggtaggggcccgacgatgtctaggccccaacgctagagaggccatgtgtgggcgaatcagtttgtgaattgcgaggggctgcctgatcgaggagaaaacttctggcaggcttcgcatgaccttgcaacccgatttgcgtcgcagatcattgcgggccagtagaaaccttggcagatcacctttgcggctagggcccttggccctgcgtgagagccgcaagtaccactgtggac

SEQ ID NO: 6296 - DNA, 498 bp, Zea mays
  unsure (1)..(498): unsure at all n locations
tgtcaccagcatatccttgagcttctgccacgaagtaatggtttctggccagagagaagaataccatgtttgggccacattccgaactgccatgacgaaggacttggccatgacagctgcattgcctccatatgaagatataattgcttcataactcataaaaaactgctttgggtctgaatgcccatcatacatgggaagctgaggtggcttgtatgatgggggccatatgatagcctgcagttctgctgccaagggagaagcatcatcaaaagtaaaggtatcatgactaaaatcatcataccatccatcgtcgttgaacaagccttcttgatgaagctccttatgttggggcctttgatcttgttcgtcttgagcaagatggcgtacttctttagtggcttcgtcgatctgcctttgaagatcagccagtcgggccatcttcntcttcttcctttgtacttgttgatgggataatctcatgtttctgatttcttg

SEQ ID NO: 6297 - DNA, 471 bp, Zea mays
  unsure (1)..(471): unsure at all n locations
agcttcanggcacgcttgtccttgccaaccttcataagctcagtgatacgcttctcataaggagcaaacccagcaacctctctgatcaggcccctgaccatagacaccctcttcgttgatttctgaacaacaaaataacttggaatgaaggacacagatatgtaaatctacagcatacttgtgctaatcatttacatgtacagacacaatcatggcttttacaagattagtaaataaaaccaaatatagagcgtagaataaccaaatatctccaagtagaaacaatgatcacataggagaaagttctacttaaaacaaaacatacatctataataaacttgcggttcttcgaacctgtagaccaacatgcctaacactattcacagcaaacaaaccttccatcagcatgaagtacagtggaactcctacactatcattgcagatccgtcgaattgtgtnttgttgagttgt

SEQ ID NO: 6298 - DNA, 444 bp, Zea mays
  unsure (1)..(444): unsure at all n locations
tctttgtccttctgaaaaaacttcgtcagttctggcgccatcggacttatcctgataggcaaatgttcagtcattaccttcagaatctcttccacttcagcagcataaggtgttgaaggagtttcctcctctcgggccgatgtctttggttttggggatgcagcttttcttttccttggagcagctatcttcggctcagggctcaatttttcagaaatatccttgtcctttttagccaatttggtgccttctttgtcaagggcgctggcaatcctatttctcttcgggccttcggcatctccgcccagttgctcataatcagggtaatcaaaattcaaggcatctagcacccaattcaatcttcgtttcggacgagtgctgaaggttgcagtcattaactgatcttctctcttagaataattaccgaggatatcgtngcacata

SEQ ID NO: 6299 - DNA, 464 bp, Zea mays
  unsure (1)..(464): unsure at all n locations
agctntangcaatnttatcaacagaattaatctctatgtattgtaaagaagttgtagacaatntcatatgctntccagattgttaaagagcgcattcatatgaattatgaaagtccagttatgtttgttttactgtggctgttcctgtttgcctgacaaaaatgagcgggtctgttcactggtgggtttcatatagtaaatagccaaattggctgttccaactatgaagacatttgtagagggataaaagttcttactgccagcagaatttcatatattttggttgagtagtttggtagatattgaattttgaagttaactatgctgctgtctgaaacagattcagacatttatcttatcagatgttttagaacttatagatggcagaattaattatccattgaataccgaagttatagaatattntgtgtagatactcatagagtatttgttaatatcaccac

SEQ ID NO: 6300 - DNA, 448 bp, Zea mays
  unsure (1)..(448): unsure at all n locations
tatcanagaaaaattacacagaattggagaaagtgttgtatgctttattatggcctccacgaagcttcggcattaatttcaagcttaccatataattgttcactcgtcacagcctctgatggatattatgaggaacagagaagctactggaagggttggaaagtgggccgtggagctcaatgaattcaccattgactacgtgcatagatcttcaattcaatcctaggcgctagcagacttcatcgctgactggacgccaggggctcacgaagaagggataagcaaggataccgaagcttggacggtgttctgcgatggttcttggggaaccttcagtgcaagagcagctgcggtcctagtggcaccttcataagtcaaaacatgttttgcagtcaaattggatttcagatgcacaaataatattgctgagtacgtagcacttctactg

SEQ ID NO: 6301 - DNA, 314 bp, Zea mays
  unsure (1)..(314): unsure at all n locations
tacaccgttaaggtggaaattctaaaagcacatatcatatcatgcatatatcttacgcactgcatgtattagaatggaatcttgccgacggagagtacgtgctcgtccccgagcaaggacctgtccaagaggaggaccatgagcacgcttcagaggctgcgtatgaggatctccccgcagccccaacaaattgaaggcaagccccgggttatgcataaccggattatatatgctactntactacactcaatgctgggaggattgcaatgtgcactcaagggtacgagttgctngaaacctctagttgcatgaac

SEQ ID NO: 6302 - DNA, 397 bp, Zea mays
tctccaagattgagctgaggcattccctcaccggatatgtgtgattaccctcgccggacttcggccacccgccaccgcgcgtggaccaagcaatacggtgagccattctctaattacttgcacccttgtccttcttgacctctggtgaagctcactgaccgggtcatttggactatcgagtcgtgagcagaacggattcctcaccaccgacgagcatctccccctgcgcacgtggatcggccgacttcgaccattcccgacggctatccgcacatcgtcgtgaccctcaggaccatccctatgctctcgaccacctcaccggagcagtctcgccgccagtaagcccctccacccctatcttcctctgcggcactattccatatggaaagaccgtggg

SEQ ID NO: 6303 - DNA, 304 bp, Zea mays
acacaacacatgtgggaattgaaatgggaagacaaaccttttggagaggtggattcatcgtttggtctccaccgttcattttcttcttcttccttgcaagggttagtatcacaaataccaaaggaagtagaagcacaaaatgaactatcatgtttggacttaattaaattgcttttaattctagtccaaatatcatgcacatcacaaatgggtttgtcatattttattatgaaagcatgataatcttctttgctgagggatttacttaagatgtcataagctagatagtttaagcgtatacatc

SEQ ID NO: 6304 - DNA, 384 bp, Zea mays
  unsure (1)..(384): unsure at all n locations
tactaagctnttgaaggctgngctgcgattgcccttgagcagcttcgtcgtttatattgttgaaaattttgaagtctatcttcaccaacttacccccgaggctatcataaggctgaacatcttcgtgtgggccgtgcgaagccaaggtctgaagcctgatgcaaaaagtttctgcaatatgcacgaattatcatacgagacaataccttgnggtaaagaacagtatcacaataactttggctgctacagtttcgtctctcggtccggggcaagctgtcccgtaccaacctttcggaagagatggcccggngattggatgacagaatggttntatgtgaagaatgacctatcagcacgagaagacatcanaggtataattatgcg

SEQ ID NO: 6305 - DNA, 499 bp, Zea mays
  unsure (1)..(499): unsure at all n locations
atccttgagtcacctgcggcatgcaagcttatattatcttgcaccggagtgctcgtagtatgtgttacaagcgtcgcgagagagagggggagaggattctgtcctgaggtgaggtgtctgagttagcctccatcgcgtctctcctactctgcctgcctctcttcgctcgccccgtccgtctttcgcgtgccccttatgatgaccctggacatccccttttatagatacaaggagatgacccagatgtacaatgggggtgtagctatgtgctaacgtggctggcggagaagtgccttgagccctgtacgtgtgctaacgtggccgtcggagaagtgcttgagccctgtagaagcatagctggcggtgcggcatagatcctgctgacgtttccttgcttccgtagggggttgagagcaaccaacgtcatgggcgcacgcggngaaccatcattacctgttaccggagtaatctagatgggacaccggtcttgttcctttgt

SEQ ID NO: 6306 - DNA, 458 bp, Zea mays
  unsure (1)..(458): unsure at all n locations
tcaaatcaagtcaagtgatcaaaagtgcttagtgacttgagagttgtctgtattgtgttgttntgttgctcttgttgcttggttgcattcttcttctcattctaaacttctcaagtgttntgtaaagcaagcgagagacacctaattgtgtggtgatccttgcggngtcttagtgacccgcgtgattaagaagatgcacttaaccggtctaagtgaccgattgagagagggaaagggttggaatagacccagcctttgtggcctcctcaatggggagtaggttccatggaaccgaacctcgggaaacaaatcaccgtgttcacttgtgttgatctttatcactcgatntgtttcttccctctcctctctctctaanagttcccttgctcacanttgatttgagttgctcccaaacttatccgcattgatttgagcactcatagcaaggagaactatct

SEQ ID NO: 6307 - DNA, 446 bp, Zea mays
  unsure (1)..(446): unsure at all n locations
agcttaaactgaatatacagggtggcatacccgaccctcatcccttcctcgatgtcagttggagacactntatcccccagtccaacaacaaactgcaggattcattacaaggcataaaaagctgcacaaattctatgtggcatgagatgagaaaaatgacacgagcatggcatacttttgcgatttgttttacatttataacatanttggcatcatccgtattagggcttatgatctttgtacaccttgccacctgcagaaagagaaagagaagttattaatgcactagcacatgtaaaattgaaaccaaaaagatttctaccaactatcatgcatggtaggtcataactcanagctgtaaaagtaaaatctacgaagtaacacaatatcagggtcatttaatatacnttgtaacggtgttcttcttgcatcatcntgttatctga

SEQ ID NO: 6308 - DNA, 466 bp, Zea mays
  unsure (1)..(466): unsure at all n locations
agataaaacaaacagggcatgattctcggtggagtatcgagtatcgacggatccgggcgcccccgcatacgacccctccggctggcgagagctctgtctccgcttaactagacttttggacatgatgatgttattgatttatatatactagtgactaaggcgcgcctagcgcgccgtcaattgtatagttttatagaaaaggagcaggggtataatgatttatgttcaattttgacaacagtttgaacggctgatatttacacatgtattgcttgaaacaatggaatacttntactaaacagttagtatgatctaaatgataagtatacatgtgtgtgttgtactttacaaatcaacagcgtatagtctttcagtcctaattaagtgggtcgccatccanattagatacaagctatactaccctatcntgttctagcgattagtaccacaattgaaggggtgatta

SEQ ID NO: 6309 - DNA, 458 bp, Zea mays
  unsure (1)..(458): unsure at all n locations
agcttgctntcgcctcagtgtaccacccgcaatccttcttagttgtggagcgcgccaacggtaaaatctttacagccatcaagaaaatgctcctcgacgacaagaaaggcaagtgggcagacctgttacccgaagcggtctgggcgctgaacacaactgaatgcagggcgactggattcaccccttttcgccttctatatgggtcagaggccatgactccgcangaaataaaacatgggtcaccacggacagtcgcgacagccgtccncgacgtagacgagcctacttcgaaggacctcatcgacggagaccgcgtcttcgcactacaagctctaaacaaataccaagctcaaacaaaggcatggcgcgaccacacagtcatcccgagggaattcagcgaaggagacctcgtactcgtccggacagctcggacagagtcccggggcaagctggagccc

SEQ ID NO: 6310 - DNA, 462 bp, Zea mays
  unsure (1)..(462): unsure at all n locations
tgtgaagaatcctcattccaacgtgggctagtcggcgatgccagagcctacccatattagtcttagcaattaagcaagtatcgagttcagctctattaaaatcaaccaagtatagctaaccctctaatactcccttaaatgctactgaatcatcacttcttctaaagaaagtaacacctatatccgtaaaaagacaattgtagcccattntgcataattgagaaactgaaagcaagttgtaatctaaagaatctacaagaaaaacattggaaatagaatggtcaggtgatatagcaattttaccaagtcatttgaccaaaccttgatttccatcctcgaatgtgatagctctttggggatctttggttttctcataggaggagagacatcctttctcccagtcatgtggtttgtgccccactatcaatgatccaactngagccctcggatgcataaacctac

SEQ ID NO: 6311 - DNA, 487 bp, Zea mays
  unsure (1)..(487): unsure at all n locations
agcttatgtccgatggctntggccgtcggaagttgttntgtttactgtagtggttgatacattttctggttacaagccattcactgatgcatcacttcaacaatcaggtagtagcctcggcctcaggaactactaggaatctgaaatctgtacacataaatcattctcacacagtcacttccatgttcaaatagcttcaggaactactctatacaatctctgaanaaaacactatgaaatgagttcttgaagaccaccagcttgaaggcgcccagcttgaaccatcacagcttgtaggtgtaatacccactttgtaattggttaaaaataatatcaatagagaaacaattnttccttatgtaagtttgacctttatgcatcatcatatgtgaacaccctatgtaaaaaatgattaataacatacaaagccactaanatatgtatcatggtggttntcattggtgtgtgcatcatgtgaccacataat

SEQ ID NO: 6312 - DNA, 215 bp, Zea mays
tcttaattgcaccatctaaagtcagaacatgctttgcaataaagcttgactttagctgcataaataatattgctgaatacgaagctttgctttttgggctttggaagttaaaggcaatggtgataagaagggcagtccttaataccgattcccaagttatttctggacatgtcgacaagagttgcaaagcaagagatccaaagcttgagaaatac

SEQ ID NO: 6313 - DNA, 460 bp, Zea mays
  unsure (1)..(460): unsure at all n locations
agcttgttgtcagaattgatcgaagctctatcttttaacctgcttcggagaaaaaagtttaaagtttcacaagttcatagctaaatggccagaatccgttctactgctatgattgaaggcgagggagaggaaactgaagcttctgagaccgtccctatctccgaagccatgcaacggtccgggctagtgatttcggaaaagattcctattgatgatgcagaacaagcaatcgctgaagcagaaggagaagaagctgaggaaacaatctccgaagatgattatcaccttgccacaccaagcaaacccagccatttggacttcgggaaatctactgtttcgaaggctgacttgtccaagatggtaaagtcaggctattttactgaaaatcaaaagaagctactacgcttcggaggagaagagactacccccaagccggagaaagatgannatgtattttaaa

SEQ ID NO: 6314 - DNA, 478 bp, Zea mays
  unsure (1)..(478): unsure at all n locations
tctaaagggagaacacattntatgattaacaaatgttcatttttatatagacaggatttgtagcgcatgccaggcatgatagcaagttggagcccatcatccacacaagaacattatgacgaccgacaggccgcttgagctactccacatggatctgttcggcccgattgcttacataagtatcggcgggagtaagtattgtcttgtaatagtggatgattattctcgcttcacttgggtattctttttacaggaaaaatctcaaacccaagagaccttaaaaggattcttgagacgggctcanaatgagttcggcttaaggatcaagaaaattagaagcgacaacggaacggagttcaagaactctcatatcgaaggtttccttgatgatgatggcatcangcatgagttctcttctccctacacacctcaacaaaatggtgtagtggagaggaagaatcgaactctattggacatg

SEQ ID NO: 6315 - DNA, 478 bp, Zea mays
  unsure (1)..(478): unsure at all n locations
agcttgntaacatgacaaccccaagcaaattagttatgattgccaagcaacaaactcaggacatccatcagctgttgacatggtttttttttggagaggtaaggtagtacgtgagcttcgtacagttgcggcgtcaacatccatcctctgcttctgctagagctgcaaaaaaccaccgaatgctgaatgttctgtggcgacctgctgctgttatgtggacgcgcttggtaatcaagaaattgggtgccttctggatgtcgtaataatagtatatccagcagcatctgggaaagttacctcgtgctgtaatctctggatcctcctattatgtgcttgttctctgatggagacaagggtgttcttgatctcgctacatatccttccttcaaggagtctcactggaacccagagcttgggctccagctcaaccacgtaagacagtgttgtctccaattcctgcttctcagaattctcccca

SEQ ID NO: 6316 - DNA, 502 bp, Zea mays
  unsure (1)..(502): unsure at all n locations
tgcactgtaagccagtactcttcttcgagaagccatagcctatctttccttgcacgacaaccgcatggcttctatccgaagcgtacttcctctataaataccgagtgagccttccatacttcactcaaccttgcctttacatactcctcaaccatgaatccctacttaaaaaacaattttcttgtgcgcgtgatggaagaaatggaagaggaagaagaagagttgcagttggcgaggcacatggtcaataggaggcgacatgcacgcaatgagcgtcgtcatggtggttcgattccagtgcgtgttaggattcatcgtgatcacatgagcggcgatgcaagaatccgagcggactactttggagcgaacccggtgtacacggatgcttaatntcgtagaggtatttgaattaccacattcatttaccatgtacataacttcatgacccctattatgacacatgaattctatggtaggntccgcatgtgtcgccatgtgtttg

SEQ ID NO: 6317 - DNA, 469 bp, Zea mays
  unsure (1)..(469): unsure at all n locations
agcttataacagacttgtggcagaagcgctcttttttgatcatgcttgattctttggcctaatctacatgagattcacaatttttcgatttagttgagttcgacaatagttgtgtgcttctttgttactagtagccatgtacgtgcggcgcacgcgtgtttacgattctatgccctaacatagtaaggctattccaacgctgccacgttatgattttatgattaatgggagttcgtancaccatgataatgagaaatagtgctacgaagctcttattatatgacaagtgccataaatcgtagcacttatgattttatgataatggggagcttcgtagagctctttctaacgtgccacgtcatcataagtgctatgaaactatgaattaaacaatgtctcttaatattaatatttacgtcaatatttataggctaatatactaattaaatgtcgtaactcaatgatcaat

SEQ ID NO: 6318 - DNA, 410 bp, Zea mays
  unsure (1)..(410): unsure at all n locations
tgcatgttacttcctacctttcaatcttaaatatattatgactttnttaggtacgtagattttgctatacctatatatacttagtcatatagtagaaacaatacgacattcaaaaagtcaaaacgtcctataatttaaatccttgctagtttgaggcgagctaaagttagtctttttagtccctaaagaaacaaacatggtgactaaaatggggtgactaaacattcattctttagtcaccaagtangtaactaaaagacactatagtagtatgtttaccttattaccctctccactctcttcatatagcaaacatccatttattaatacgggtaaaacgtcattattcacaagcaataatgctcttatttcgcgttaagcactggaacccacatgatactttaacgact

SEQ ID NO: 6319 - DNA, 475 bp, Zea mays
agcttgtcgttaatgtgtgggagccgatgggtttccttgtttgtacaacgagtagttgtgtcagcaagatggcagtgtcaacctgctgcgtcccgaggcaaaaccgtgtcaaaccatgtccaacggttgagattggcccccaaacgtttccaggacatgcctagggtatatttggcgccactttggtatttggactttgtggatttgggttttggaaaacacagaacacggctgaattttacgaaggggttaaaattcagattctgaattttctgaatctcccattgagttctcacttgaggggttattttgagaatattgcagaacatctcttataaatctttcttactacatgttgtagcctatatagtatactataactcttgtatttggtcctcatcatgaaatttatgttttcatgatcattcacatcttttccttttagcacttaaatggcttacttaggaatcattta

SEQ ID NO: 6320 - DNA, 479 bp, Zea mays
  unsure (1)..(479): unsure at all n locations
agcttgatccgtataaatctccaagctttatatttccgtatgtcctgaaaacaccttccctgagctcgttgccgagaaacgattaaaatattccgagcgtgaggtggcccaccatgcagtgggtacgaacgacctgtcgattcacttcccaagcgccgagtggtccacagttcagcgggtgcgggtgactgttcatcgggcgcgagtgacttggcgattcaccttcccacctgcaacactatataaacagacgggtaggtgtgaagttaccacagcattcattgccattgcactgttgagctcgtgaaaaatttaaccataaccgaagctttttcactgcattctcaagcgaaccaacattctgaattagcttcgtcaaaagagagagctttgtcaaaaactgtataataacatcagcttcgtaataactgcataagaatcatcagatggncagagtatgctcgactgcgagggtgact

SEQ ID NO: 6321 - DNA, 431 bp, Zea mays
  unsure (1)..(431): unsure at all n locations
ngatggntccctcccccttgctctacatatattcggtggctgctaactgaattcaatgaagccccctttctacacttaaatctagccaaggttctctacatatgagaggtgttcctggtgtccccaagactacacaacccctcccagtctcaaagtggatctgctctagagttcgagcatcagttcctgtgtctgtggtaacaacagccaccatcctcccacctcaccgtggccaggtaacttcaagggtttcctcggtcgagatgtgcatgttttgtgctctgcataacatagagaagctcatatgatggtgaacagatctccttaagagagatttgttggatgctatataaaaattggagtaaacgctgtctaaagttggactgtcaagctggacacataactgaatttttattcagttctgagaactg

SEQ ID NO: 6322 - DNA, 448 bp, Zea mays
  unsure (1)..(448): unsure at all n locations
agcttgtgaagccaatcacaagtttattgaagaatgacattaagtttaattgggcttctaagtgtaatgaagcctttgagcaactgaagacactattgaccactgctccggtattggctcaaccggacatcactaaatcttttgacgtatattgtgatgcatctggcagtgggctcggctgtgtactgatgcaagagggccgagtgattgcgtatgcttcaaggcagttgcgccgacatgaggagcactatccaactcatgatctggagctagctgctgtggttcatgccctaaagaattggcgtcactatctgctgggtaatatctgtcacatatatacagatcataaaagtttgaagtacatcttcacccagtcagaattaaatatgaggcanagacgatggcttgagctcattatagactatgaactggagatccattatcaccc

SEQ ID NO: 6323 - DNA, 477 bp, Zea mays
  unsure (1)..(477): unsure at all n locations
actaagcttcgaatattacgacttcattntcctcagggagtggacaagttttctctccttcgtcggccctcacagcggacaagtctcggaaatatcttcccctcatgttgataagatgattttctttaatacttgatttgccgaaaaccgcatggcttggtcgccagggtcgatcttcggactcttcacctccactatccacatcatagctgtcgctgtcgccggtatcttcagataaaccctccaagatttctttagtaatcttctctgtattagtattcgacatagattgaagaaaacccagatgcatctcctcagaaagacttagcttcgaatcacccgaatcatcaacaacttttttaccttcagacatctttccaaacgcttgaaagcgctctctataccgaagctttaaaatctaaaagggccaagcaagtgttgtgcgtgtaggtcaaagattgngtgagtaaaaacagt

SEQ ID NO: 6324 - DNA, 468 bp, Zea mays
  unsure (1)..(468): unsure at all n locations
agctntagcccctgatttctaattggatgttcaattgttcaatattagatggcaggttagtttctaatgatttattttgttntgacttctaatgctttagcaactacacgggattcaattgtttaacattactttagcaaacctgatctaatgctttcaatattagaaagcagcaagaggccagtagcagagcatatcggcggctcggataagtggagcctgactgacagcgagcggccacacccagatgatagctgttgttggtagagaaaaaaaggttagagacagagaccgatcgatggtgtttagttttttttctccttcttcttctcttggcgatgtgttggaaatcctgctgcacatggcanagaattgcagctcggatctcacgtggaaatgagcatgtgcagtgcagtgcagatgccagttcgcagactcagtctgatgctctaccgctcgatctgagat

SEQ ID NO: 6325 - DNA, 333 bp, Zea mays
  unsure (1)..(333): unsure at all n locations
tcaactgttacctattgtcccttgatctgtttctgccgcctactctggacgacgcttcatgcatacgagatgatgtagtggccgcaagttttctttgatcccagcataggatccaccagctcacgcgcacacaaaaactattgactttttaactcgctttggttttattggatctgttgtttctgttgcgcangggaggaaggaagaggctgaaagggcggtggagagagaaagactataatggcgagctgagtcccttgaggatgccgtcaagaaaccgcgtggagaggagggcgatgagatgatggatgctggccgcggtgatggactact

SEQ ID NO: 6326 - DNA, 444 bp, Zea mays
  unsure (1)..(444): unsure at all n locations
agcttctaaagggagaacacattntaggactaacttatgttcattntgagaaagacagnaattgtagcgcatgccaagcaggaaagcaagttggcattcatcatccgcataagaacataatgacgaccgataggccactggagctcctgcacatggatctattcggcccgatcgcttacataagcatcggcgggagtaagtactgtctagttattgtggatgattattctcgcttcacttgggtattctttttgcaggaaaaatctcaaacccaagagaccttaaagggattcttgagacgggctcaaaatgagttcggcttaaggatcaagaaaattataagcgacaacgggacggagttcaagaactcacaaatcgaaggcttccttgaggaggagggcatcaagcatgagttctcttctctctacactccacaacaaaatg

SEQ ID NO: 6327 - DNA, 390 bp, Zea mays
  unsure (1)..(390): unsure at all n locations
ntacttagttgattntgcaaaagaagaggccggtctagatgcatgcttaatggctaagacttgcatgggctggctgtggcatcgccgcttagcacatgtggggatgaagaacctccacaagcttctaaagggagaacacgtgataggtctaaccaatgttcatttcgaaaaagatagaccttgtgcagcttgtcaagcagggaaacaggtgggaagctctcatcacaccaaaaatgtgatgacaacatcaagacccctggagctgctacatatggacctcttcggacccgtcgcctatctgagcatagaaggaagtaagtatggtctagttattcgtgatgacttttcccgcttcactcgggtgttctttttgcaggataagtctgaaac

SEQ ID NO: 6328 - DNA, 482 bp, Zea mays
  unsure (1)..(482): unsure at all n locations
agcttctaaagggagagcacattntaggattaacttatgttcattntgagaaagacaggatttgtagcgcatgccaggcagggaagcaagttggagtccatcacccacacaagaacatcatgacgaccgacaggccgcttgagctactccacatggatctattcggcccgattgcttacataagcatcggcgggagtaagtattgtcttgttattgtggatgattattctcgcttcacttgggtattctttttacaggaaaaatctcaaacccaagagaccttaaagggattcttgagacgagctcaaaatgagttcggcttaaggatcaagaaaataagaagcgacaacggcacggagttcaagaactctcaaattgaatgcttccttgaggaggagggcatcaagcatgagttctcctctccctacacgccacaacanaatggtgtagtggagaggaagaatcgaactctatttgacatg

SEQ ID NO: 6329 - DNA, 437 bp, Zea mays
  unsure (1)..(437): unsure at all n locations
tctaaaggggagaacacatttgtgtctaacaaatgttcattttttgatttacaagggttgtagcgcatgtcaagcaggaaagcaagttggtacccatcatccacacaagaacattatgacaaccgacaggtcggttgagctactccacatggacgctattggcctgatagcttacataagcatcggcgggagtaagtattatcttgtaattgtggatgattattctcgcttcacttgggtgttctttttgcaggaaaaatcacaaacccaagagaccttaaagggagtcttgagatgagctcaaaatgagttcagattaatgatcatgaaaataagaagcgacaacgggacggagttcaagaactctcanattgatggtttcttgaggatganggcatcaagcatgagttctcttcttcctacacacctcaacaaaa

SEQ ID NO: 6330 - DNA, 472 bp, Zea mays
  unsure (1)..(472): unsure at all n locations
agctttatgttntctcaacttgggttaagttatctctcttaatccctatatanggtaaagcttcctattcagggtcctaattgcaaaacacttaaacaatacaacttgtttgaaatttttgcctagtgaatgcattctaggtgtatcaaacatatgcaatgccaatgcttatgatgccatgctcaagttttagttatagtaacaccaggggtgttacatccttccccccataaaagaatctcgtcccgagattaaaagtcctagggtaagtaatggaaaaggaaatgtgtcatattattatttccttaattctggtacaaggcaggggtgatgtgggggttcattcctttattgcaatagctatacaggctgtacaatttacaagaggcttaaaagcctgngaaattcttatccaacaagtctcgagtttcccatgtagcctcatcttcagaatggtggttccactgtatct

SEQ ID NO: 6331 - DNA, 483 bp, Zea mays
  unsure (1)..(483): unsure at all n locations
tggacgtgaagagtgccttcctcaatggaccaatctttgaagaggtctatgttgagcaacctcccggctttgaagatagtgagtaccctaaccatgtttataaactctctaaggcgctttatgggctcaagcaagccccaagagcatggtatgaatgcctaagagattttcttatcactaatggcttcaaagtcggaaaggccgatcctactttatttactaaaactcttgacaatgatttgtttgtatgccaaatttatgttgatgatattatatttgggtctactaacgaatctacatgtgaagaaattatatgatcatgacacagaaattctagatgtcaatgatggnggagttgaagtacttcttgggattcaagtaaatcaactccaagagggcaccttcattatccagaccgaattaaattcaagacattctaaacaagtttggaatgatggatgccaagcctatcatgacacccat

SEQ ID NO: 6332 - DNA, 473 bp, Zea mays
  unsure (1)..(473): unsure at all n locations
agctntagtaggatgtgtattagcaacttgctttccatcttgacatgcactgcatggcttgtctttttcaaataccacatcctttaatcctctaactatatctttctttaataccttcttgagtgtgctcatcccaacatgtgcaagcctcctatgccaaagccatccaagagaagctttggtgaagaggcaagttcttaagtctgcatcttctgaagtgaaatccactaagtagaggttgttgtatctaaatcccttgaataccattgattcatcatctatttttgttacaataacctctgatggagtgaataagcattgaagtccaagatcacagagttgtcccactgataataaattgaagctcanaggtgcaactaagagaaacattgatattgataaatcatttgagattgcaccttgccagtccttgacttntcttttgagttgctccaatgtgatttatcttgaca

SEQ ID NO: 6333 - DNA, 491 bp, Zea mays
  unsure (1)..(491): unsure at all n locations
tctanagggagaacacgtgataggtctaaccaatgtacatttcgaataagatagaccttgtgcagcttgtcaagcaggtaaacaggtgggaggagctcatcacagcaagaatgtgatgaccacttcaagacctctggagctgatgcatatggacctcttcggacccgtcgcctatctaagcataggaggaagtaagtatggtctagttattgttgatgacttttctcgcttcactngggtgttctttttgcaggataagtctgaaacccaagggaccctcaagcgcttcctcaggagagctcanaatgagtttgagctcaaggtgaagaagataaggagcgacaacgggtccgaattcaagaatcttcaagtggaggagttccttgaggaggaggggatcaagcacgagttctccgctccctacacacctcagcanaatggtgtggtagagaggaagaacaggacactcattgatatggcgaggactatgc

SEQ ID NO: 6334 - DNA, 453 bp, Zea mays
  unsure (1)..(453): unsure at all n locations
agctntatcagatggacgtgaagagtgctctcctctttggttcaatcatggaagaggtctatgttgagcaacctctcggctttgaagatagtgagtaccctaaccatgtgtataaactctcataggcgctatatgggctcaagctagccccaagagcatggtatgaatgcctgcgagattgtcttatcactaatggctccaaagtcggtaaagtcgatcatactctctttactaaaactattgccaaaaacttgtatatatgccaaatttatgttgatgatattatatttgggtctactaacaagtcaacttgtgaagagtttagtaggagcatgattcacataatcgagatgtctatgatggaggagttgaagtactttctttgggttcatattaagcaactccaagatgacaccttcattagtcaaacgaagtacatgtaatacatactta

SEQ ID NO: 6335 - DNA, 469 bp, Zea mays
  unsure (1)..(469): unsure at all n locations
ctcagctatgaagacatcagaatgggtggtaataagagccttcctttcttgtatgccatccaggcaagngcctggtacagtatgcttaatcgcaatgatagccaaacccgcttgtttacttctccttctctactatcatcggcgactcgggagactatgcaatgaacaagctgaccaacatgaacaacttctgcgcataaattgatcccactatcctgcagaagaacaggatcagtaggttcaccagatggctaaacactgacaaagcagtatgtattatgaattactctagacgaatatatctaccttacgatttttctgcatagcagtgtcgtaaacatgctctgagtgaacaaagcctgtaatgccacgcacgagacttaacacaatagctgtctggttaacctcattgacacacctcaagcttcatattgtgaatattctgacagggaggtggcttaacagtcac

SEQ ID NO: 6336 - DNA, 496 bp, Zea mays
  unsure (1)..(496): unsure at all n locations
atcttaagtcacctgcngcatgcaagcttgtgaaggttctttatccncacatgttctattctgcgatgccacagccagcccatgctagtcttagcaattaagcatgcatccagaccggcctcctctnttgcaaaatcgactaaataaagtttgtcgtctagtacacccttaaaagctagtgaactatcacaccttctaaagacagacacatctatatttgtgaataaataattatatcccatattgcataattgactaactgataacaaattatatccaagtgactcaactaaaaacacattataaatagagtgctcggatgaaatagcaatcttccctaaccctttcaccttgccttggttcccatcaccgaatattattgaatcttagggatctttgttnttgacgtaggaagagaacatcttcttttccctcatcatgtggtttgtcatccgctgtcgataatccagcttgagcctncggatgcatatacctg

SEQ ID NO: 6337 - DNA, 484 bp, Zea mays
tgcttcgtgttaacgaacaccttcccgttgagttccagatgagtagtcttcagcaacctcttctgcccgggacagtgctccgcttcgggagtctcgagttcatgtccctcgacggcagctacgacatggtactcctccccccgcagcgcgatagcaacaacgacggccgtcagctcgcccggcggcggcaaactcgacgaagtcttcccccgtggcggaagagcagcatccgggttttccccgccaccctcctcaccgcaggaggaggagacagggcaatcgtggccacgcatgaggcggcacctcatcggcagtcggtccagagcaagtcggcgatgccgacaccccagcgtgggacatgtctgtgcgtgtcctcgcacctgagacaacgacggatgttgtttcccgcgacaagccaacctcaagcggactgatgacgccagcactctcacgaaggacttgctgggcattagcctcgtaccta

SEQ ID NO: 6338 - DNA, 451 bp, Zea mays
  unsure (1)..(451): unsure at all n locations
agctntatcaaatggacgtgaaaagtgcctttctattggaccaatcaaggaagaggtctatgttgagcaacctcccggctttgaagatagtgagtaccctaaccatgtctataaactctctaaggcgctttatgggctcaagcaagccccaagagcatggtatgaatgccttaaagatttccttatcactaatgaattcaaagtcggagaggccgatcctactctattcactaaaactcttgaaaatgacttgtttgtatgccaaatttatgttgatgatattatatttgggtctactaacgagtctacttgtgaagaatntagtaggatcatgacacagaaattcgagatgtctatgatgggggagttgaagtacttcttgggatttaagtgaaccaactccaagagggcaccttcattatccaaacgatgtatactcaagacattctaa

SEQ ID NO: 6339 - DNA, 474 bp, Zea mays
  unsure (1)..(474): unsure at all n locations
tgacaacgaggaaatggcgctcatcatcaagagcttccttcatattctctagcaaaggaaggggaaggattacaagccccgctccaagaaagtgtgctacaaatgtggtaagcccggtcatttcattgctaaatgtccattatctagtgatagtgacaggggcgacgacaataaggggagaagaaaggagaagaagagatactactagaagaagggcggcgatgcccatgtttgccaggagtgggactccgacgagagctccaccgactcctcctccgacgaggacgccacaaacatcaccgtcaccaagggtcttctcttccccaacgtctgccacaagtgcctcatggctaaggacggtcaaaagaagaaggtataatcaagaccctccactaaatatgatacctctactgatgaggataatgctagtgatgangaggattatttgcgtaccctttttgccacctatacatg

SEQ ID NO: 6340 - DNA, 241 bp, Zea mays
  unsure (1)..(241): unsure at all n locations
atcttaagtcaccgcngcatgcagcttctaatatgtcaggtgacaatgtatgagtggtatgtgagttacnaaggtcgcagctaagcaacttcgtcggttgcccatcattcctcggctttcaaggatggtcctcaacaaggaaatagctctgcatatgacgtggccaaacactactgcagctacaggcattttcggcggccagaagccaccgaaaataagccctttgccgggatggaaaatg

SEQ ID NO: 6341 - DNA, 430 bp, Zea mays
  unsure (1)..(430): unsure at all n locations
tagagatgaagttaagaaacttaagatngagaatgaacatcttgcctcaagtgtgcaaaagttcaacaaaggccaataccttcaaaatgagttactcatgaacactattatgaaaaacaacaagagtggtattggatacaattcttttttgcaaaagaaagcaacaagtcaatacaaggcaaaacagactcctaagcccatcaaatgctttgactgtggaaaagaaggacactttcccgacaactgcatagccaaaccaccaactcccttgccaaagcactcaagaccatttgctttcaatgctcattatgttctaataaaagtagcaaatgggagagtcaaagttacattcctaggtccaccaagcaagagtagacctatacacaatttgggttgcaaagtcttgattgagaaagtactggtcctatgc

SEQ ID NO: 6342 - DNA, 467 bp, Zea mays
  unsure (1)..(467): unsure at all n locations
agcttcatcatctganaggcaattgccctggagataagatataatctcagttctccaatcttcactatgaacaggagatatattgagcactgctctttcaaagaggtccaccgaatgtgctcttattgtctcaaagaatacttccgaaggtaaaggcagcccctgtgccgctgacttggctagcagatcagcgtgctcattttctcctcgtgaaatattcttgacagaaaacccttcaaaagaagcttcaagccttcgaactgtatccaagtatttctcaagctttgggtctcttgctctacaactcttgtcaatatgaccagaaataacttgggaatcggtntaagaaccgcccttcttatccccattgcctttaacttccgaagccccaaaagcaaagcttcatattcagcaatattatttgtgcagctganatcaagttcactgcatagcatgttctgactttg

SEQ ID NO: 6343 - DNA, 408 bp, Zea mays
  unsure (1)..(408): unsure at all n locations
ctctaagaactcttgttataatcctttgtaagaatattgtaatttaagaattagactttactggtgtaaatttgtccataccttgtaatatattcttacctttccaccaatgtatgaagtgctttgatgtgaacgaaactagcatttcttgagccgaaggcgaaaaacattttcccttcttttcgtacacaacgaagcatgaaactgcttctctttatttttgccaaagctttatctntagagccgaagcatccgccgatgttatgatgatgatgaccctatgtatgtctaaatgaatgtttatgaatgcaaatgtatgatgtaatgtgtcgtgcaaatgaatgtccaaactcacgcatacgaagccacaaccatagccttcatttccttgngaataatcgaagtatc

SEQ ID NO: 6344 - DNA, 480 bp, Zea mays
  unsure (1)..(480): unsure at all n locations
agcttgtggaggctcaaaactcatatgttatgcatgaagttgtggtgatcaccgaggatgttggaatcacttgtgacttacttgatagttctacaagtgaaccacaacctactagttttatttgtgataaatgcaaactttctcttgtgaatgataatattgggtgtgatgaatcacaaatcattgttgagaatgaagccttggtaggaaagtaaatgatctaactcattacttatagaaggcctatggtggaaaggctaagttggattttatattgngaagccaacagtgctcacttaatcatgagggtcttgggtatgttcctaanaaaggaaagaatgcttttgtggagcaaaatactatgtttgtgaaagaatgtgacaaagtgtgtcacaagtgccacaagaagggacatgtcaagaagaattgtctcanattcaataatgtatcctcatcttggtntgagcattgatatgttct

SEQ ID NO: 6345 - DNA, 469 bp, Zea mays
  unsure (1)..(469): unsure at all n locations
tctaatgatatataccagccataactggctgcttgaataataaaacgaagttttcgaatgcaccacaccgaactggtcatttatgaggagtttcaccacagataatcacagtggagactccatgtcttcataaaagacattactttgttgtttccatgaaggcaaatcctatctaaacttgccattgattnttgcatcttttcattntcatgactggccctgtagtgcttttttgttgttttattttcccattttcagtcccttccatcacattaacatggtttcactattgatgccatcaccatactctcatatatataaatactaaattaccctaatttccattgtaacaccaggtactatcttgcttacccgtgctgctntctgtatcttacctaccagtatctcagcattgacagcttttctctgacaagtgtagtcttgctgcacttatacaacggagttattg

SEQ ID NO: 6346 - DNA, 467 bp, Zea mays
  unsure (1)..(467): unsure at all n locations
tgactcagtatcctggccatttctcctctaagtgcttcaaaaactggggtttgggcagatttggacagatgttttgagtggactgctatctacctcgtccacacaagttatgcttaagggagtagcaggtgaaagaattcagcttaaaaagggtttaaggcagggagaccccctctcacctatgttgttcatactagtcatgtacgtgctaggctggttaatcttaaaagctgaactggaaaatctgctgcaacccttgttctccagacctttgcaacacagagtgtccttgtatgctgatgatgtgatcatgttcttgcatccaaaagaatctgatatacaaattgtactcaaaatcttatagattnttggagaagcttcagggctgagaaccaacatccaaaaaagcaatatgtatccaattagatgtggggaagaagtgtaacccttcaagagctgctccatgt

SEQ ID NO: 6347 - DNA, 502 bp, Zea mays
  unsure (1)..(502): unsure at all n locations
ntctttgtccagaacaccctaganaaaagtacatcaaattagtatattgttgctacatttgacaaataaaaatacagttntgatgccttatctacctccactagacggtgttgcagccttatgcaccaacttcagccttatgccttagctacagcatctttcataaccaatgttgaaccaaagctggcaccaaaaactatggtgctaagagatacacaatgcttagtcagggtcaaagaaggcactgattgataatcatatacttatgcagtttgttgaaatggaagtacaacaccactagactgaaggcgagatggggatgctattaaatctgagtattatcggccatgtatattgaaaactatgggcagaatgagtacaataaanagaaccatgacctatctccattgctatntaacaccaaactcatcattnttcacactatctccccagtgttacnagtttatgcttgcggacagcacacctgattacagaatcatat

SEQ ID NO: 6348 - DNA, 397 bp, Zea mays
  unsure (1)..(397): unsure at all n locations
agcttatcaagtcagctttctaacgcatctagccccacgtcatttggagattcctaggagaagttattatcaaaatactaaagactgcgcagaagtcaaacagccacacgaaattcagctctgcatatctctcgaagaggctccttcacattagaacgtgaaaatacttttgtttcgtgtttatacctctctaaggctggttgttactagtataaatacccccctatgtctgtgatgtaaggcatcttatgataatctaaaaatagaacccttttgttcagctgtgtgctaacaaatatttatagtgatctctnaccccttgctcttgtgaattcctttgcgggattgcagaaacggcggcttcatccgctcccaagtggtgctcctactcccttcg

SEQ ID NO: 6349 - DNA, 323 bp, Zea mays
  unsure (1)..(323): unsure at all n locations
cgcgatgataggggcgaggagccgacacaaacatacaaccggctcaagaccctcatcaacaaaataaggagctacgggagcacgcgatggacggaccacgacgtcgtccgcctaatgctaaggtcatttaccgntcttgatcctcatttggtgaacaatattcgtgaaaatcccaggtacaccaagatgtcgcccgaagaagttcttgggaaattcgttagcgggcgaatgatgatcaaggaggcgaggtacgtggacgacgccttgaatggtccgatcaacgagccgcaaccccttgctctcaaggcaacacgaagcaagga

SEQ ID NO: 6350 - DNA, 481 bp, Zea mays
  unsure (1)..(481): unsure at all n locations
agcttctaaagggagaacacgtgataggtctaactaatgttactttcgaaaaagatagaccttgtgcagcttgtcaagcagggaaacaggtgggaagctctcatcatgccaaaaatgtgatgacaacatccagacccctggagctacttcatatggacctcttcggacccgttgcctatctgagcataggaggaagtaagtatggtcttgttatagttgataaattttcccgcttcacttgggtattctttttgcaggataaatctgaaacccaagggaacctcaagcgcttcctaaggagagctcaaaacgagtttgagctcaaggtgaagaagataagaagcgacaatgggtccgagttcaagaaccttcaagtggaggagtatcttgaggaggaaggaatcaagcacgagttctccgctccctacacaccacagcanaatggtgtggtagagaggaagaacaggacgcttatagacat

SEQ ID NO: 6351 - DNA, 471 bp, Zea mays
  unsure (1)..(471): unsure at all n locations
agtctttctgcagtctctncaaatcttggtcatctgcattatcacantttgtatgacatggattgtatttattttacattcacgacagaaaatatttgtagcttacctttagcattccttttcaaatcactagcgttgatgaaagagaggaaatatggagccatgtctggattgtccatgtcagtttcaatggaagcagtttctgctggaaggtcatcatccaagtccattagaacctgatcaggaaatgcgttctgctattttcgatgtgcttgacggagttctcctgccgcatggtcatatctttctgctatagctcgcgatgcacggtacagctcctcaagtaaggtcatcagctcaggcccgcgtcngtagtacatatcagctctttcttgcaatgattcaacatcttcttcaatgatcctgatcatcagcttaantntactatccatatctgaattaccaacattc

SEQ ID NO: 6352 - DNA, 419 bp, Zea mays
  unsure (1)..(419): unsure at all n locations
ttaagtcacctgccgcatgcaagcttaaaataatctataagccaagcaagcgttgttattttatatataaaaattgagcaagcagagtagatggcaaaaagcgtgccaaatgagctcgtggtgtgctcttatttatacgcctagtgcattgcaaactggagggccccgcttgtcattgactgttgctattctagcaaagggaaggtgttttttcggaccttctgcttaaggccttcgtccatatcgcaatctgaatntatcattctaacaaattaatattgtgaggggctactgttgggggccttcggcttccgaaggtcctcaaaaacataatttaacacatgttttggagtaatatacatgaacaggtatcttcggactcngatcagaaccacagtatgaagaaacacatagaacac

SEQ ID NO: 6353 - DNA, 484 bp, Zea mays
  unsure (1)..(484): unsure at all n locations
ctaagctaaagcctgggagagcaatgcaagtatatgcgaattgtctcattcttatctaccggtgcatatgtatcaccgaaatccataccttcgacttgtgaataatccttggccataagtcggactttgtttcttgttgccacactatgctcatcttgcttgttgcggaaagcccacttggtttctacaacattttgattatgacgtggaactaaatgccatacctcatttctcgtgaagttgttgagctcctcttgcattgccaacacccaattcgaatctcttggtgcatcctctaccctgtatggctcaatagagaanacaaagagtaatgttcacaaaaatgagcaactcgagatagagtggttaccccttatgaatatcgtcgatgatggagctcacggtgtgatatctctgaattgcctgatggactcttacgtgtggcggctttgaccctgtatctcttgctcatcatccttgcttg

SEQ ID NO: 6354 - DNA, 467 bp, Zea mays
  unsure (1)..(467): unsure at all n locations
gcagcttatgctcaagtttatcctttctgatcgtgtgtttttatattagncgatacctagaatttatttgttcacttcgaaacaaaggtaactcgaggaccttaggcaaaagtagacccccaatagtatccccttgtgggatgattttgttaattcatgacgagcttatattgccaataatgcaattaggaggccttgtgccgaaggtccaataaacacctttctgaagctcgttatgaatcgagaggatgagatcactttgactggaggggcccagttgttggtgagtgtaacgattaatattcaaaagttgcatatagaatgaacggtacccggagacattntacttgtcatttatggcttacgcttgcttgcagaacccgctctgtgttcgaagcttacttcaaatgtcttcactacttttgaactagccttagctagttgcaangatcatacttcttcgctag

SEQ ID NO: 6355 - DNA, 324 bp, Zea mays
  unsure (1)..(324): unsure at all n locations
tggaagcgtctattggatgtcgacttggtgtacactactccttcttttatttcgtcgncttgaatgcaacaggctgagcttcggatgtgtcgacaagctcgtttattatcctcgagccttctatcatgcactcaagacctacaaaatgcccgataacttcctcggtggtcattttaatggatctaggattaccacgaatcagttgaacttgagtgggatctataaaaatgagagatcttagaataacatttaccacttcgtggtccgtccacttcttgctccgaggttgcgcacttgttcaccaaaacttgagcggtagacatg

SEQ ID NO: 6356 - DNA, 472 bp, Zea mays
  unsure (1)..(472): unsure at all n locations
agcttcagctccatctatattatggattgccttggaatcattccagcttccttcggcccttctggcagcttcctgactcccatgaatagcaataggcccttgatccgaaggtatcttcatgcagagataagctgggtgaagaattgcttcaaaagcatttagagtaccacgaccaatgatggcgttgtaggggtattccatgtcaacaatatcaaacacaatttgctcagtccttgtgttattaacaaatccgaaggttaccggcatggtaatcttcccgagtgccacaatctgccgccctccgaagccacaaagagggtgcgtagcatcatgaatcttgtcttcaggctcttgcatctgtctgaaggctntggcaaatataatgtcagctgcactgcctgtgtcaactagaacattgtgaaccagaaaccctttgatcacacaagaaatgaccatagcatcattgtgggga

SEQ ID NO: 6357 - DNA, 402 bp, Zea mays
  unsure (1)..(402): unsure at all n locations
ntgttccagtgcacacaagatcacgaagaataccttcaggcgtatgttcgaaggttcttgcgtttaagggcacaagcgccaacagtgcccaatgaaattgtcattgaggccatgatcaagggacttcggccaggacctgcggcccaatacttcgccaggaaacccccctcagaccctggagaaactgcttcaaaagatggatgaatatatccgcgcagataatgactttcgacaaagaagggaggaagcttacaggttctctgaaatgaccaggggcttcggagggagagtccaccctaggcacgtcagatcaatccactctactcagaatgacgataggggaagtcagcaacagaggctgcagtattccttccaggcttccgggcagcaacagagttatcc

SEQ ID NO: 6358 - DNA, 480 bp, Zea mays
  unsure (1)..(480): unsure at all n locations
agcttgaggaaggagaaaccgcagcaagggtcatactccctgagaaagatgttcctaaagcaataagtgaagcaatcaacaagagacaagaaaaaaggtaatgattcaattagtcatgttatttgcactaataatctctctatgtcatccaaaagcaaaaagagaagaggaaaaacgaggtgcttcaagtgcaagagattaggtcacctcattgcttcttgtccatacaaagacaaggacaaagggataaggagatgttttggatgcaatgaanaggaccacatgatcacctcatgtccggtcataaagaatcaaggacatgcactntccgagatgaccctcaccaaggaaaatgataaacagcaagcgtcatgtcgggttgagcgacgtttctgctatatgtgtggtgagcatggtcatccacctgaggtatgtaataaaggtaaggttcttaagcaaagtaaattgtctcaatcttat

SEQ ID NO: 6359 - DNA, 475 bp, Zea mays
tccacagcaatccaacacacagtggagtagggtagtacgctctatcggcccgaaccactctaaatattcgcgtgttcatgtgctctgtgatcgcttagcaagataggcaaaattcttaatccccttcctcatcttaggatttagggtgggtgcattccgccgcccggccggagaattccctctccgacatttggcgcgccaggtagggggctaggcattaggttttctattgtttcctcactcagcatgatggtgcaaatcgtggagcaccgggccgagacttcaacggatttcctggtggaggaagaagttgtttcttccacgccataggttcccaaccgtccagtgttgggcactgctgctgtgcacgctgcacggcagcatacaactgcgcagacatcccggactccgtcgagggcggctctggagcattgtcagcaaccagggagttgctgcgtcacccttcaagctccat

SEQ ID NO: 6360 - DNA, 302 bp, Zea mays
agcttgcagatgaagatatgatgctgaactccgtttatgctattctagtgatacccttagtcatcttcctgtggatggatgtccatgtttcgctgtacttagatgaataaaggttaagacattacgtctgttcgaagtgtaatatgttaatataatcgttatttacgcttttatgcattgttcttttgatatattacacttgtgacttcaacatatgtgtggaaatagatcctatcacacatatgttatgcaccccgctcttgcccttggaaaccggtgtgatagaagtgggatcaaaccat

SEQ ID NO: 6361 - DNA, 378 bp, Zea mays
  unsure (1)..(378): unsure at all n locations
cgaactcggcttgtctgcgatgaccaatgatcagcttgcatatatcttatcctacaacagcctaaaggtgtgtatactctgatttgtcattatgcaatttgtgttacgataaactatntttgtggtatttcttatcggtgttacatgttcactcttccgtntccacggcttgattctaagcaaggctctgaaagcctataaagatgcagaggatgagagctaccgaatagagcttggaaaccttcgctcagaggttattacattaagaaatgaagctcttgtgaaggataagatcctactctctntagtggaaagattaaaatctagcgaagccaggctttctgctcaagccanagctcatgaagccgacgtgcaaga

SEQ ID NO: 6362 - DNA, 428 bp, Zea mays
  unsure (1)..(428): unsure at all n locations
agcttctaaagggggaacacantttangattatttttgttcantttgagaaagacaggattngtagcgcatgccaagccgggaagcatgttggcactcatcatccacacaagaacattatgacaagtgacaggtcactggagctccttcacatggatctattcggcccgatcgcttacataagcatcggcgggagtaagtactgtctagttattgtggatgattattctcgcttcacttgggtattctttttataggaaaaatctcaaacccaagagatcttaaaaggattcatgagacgggctcaaaatgagttcggcttaagaatcaagacaataagaagcgacaacgggacggagttcaagaactctcanatcgaaggctttcttgaggaggagggcatcaagcatgagttctcttctccctaca

SEQ ID NO: 6363 - DNA, 407 bp, Zea mays
  unsure (1)..(407): unsure at all n locations
agctttttgacaggccaaaacgctagtgttcctctctgtttgggccctngagacagatcaacctttgggacaagacaactcctcacccatgccaagaaaagcttcaatctgcacaaggaacaaatagaggaaagttagaggaggatatcatacaaaatgatcttgcccaaattcgccaagatttgggaccaataagcgtttgaatatgactacacgggctgtcaccacgcgctcgattggggatgacacgtcagtgtacgtccaaccagcgcccgcgcgtgcccccgtgcccgcggtcaaccaccgcctagttccactcgctcctgcacctataagaccaccccgcccttgattgttctccctgcaaacccatgaccagttggcaagtgcaccttcactggtatttc

SEQ ID NO: 6364 - DNA, 428 bp, Zea mays
  unsure (1)..(428): unsure at all n locations
cttcgtcacaaacagtgctggacatccncaaggctaagtacttgngcaaataaatcccttatccagcaactcctgcaattgcttcttcaattcttccaacttagcgggtggcattcggtagggcctcttggaaattggtgccgttcccggttgcaactcgatggcaaattcaatataccggtctggcggcattcttggcaattcatcaggaaagacatccgcgtactcatagaccactgngattttcttcagaggtaactccgtcatagaaaaagcacatgactgagtagaacctcgactgggcagaattagggtgaagttcccacagaacggagaatngatntccacgatacggctagctacatcaagcacaacttggtgcanggtcatccaattagctcccagataatgtccacattttcgaacac

SEQ ID NO: 6365 - DNA, 461 bp, Zea mays
cacctgctgcatgcaagcttaaaggatactattcaactaaagtaagatgtattttattataggccaaggtatgaacacttcctatccttcagttgttttagtattctatccttagtgggatgtaccatagtataggttaaattcattgcattataaaatgttcaatagtgcatataactttgacatcaactatatgtgtgcactaatttaaaggaatttagtctatccttttgggtttcaagaatgatggttcattttcatccacatataaggatcatcatttgtgaaaccttcccatgtgtttttaatgctctcttttctaagtgtttgaacaaagtccttccaagtgctttcaagatggattcataatctgcggatataagagtcttggttatttcaatcattgagtttcaatgggtctcatatcatgtatgattgaaccatgccaagatgaatgaagt

SEQ ID NO: 6366 - DNA, 446 bp, Zea mays
  unsure (1)..(446): unsure at all n locations
ctcagctacaaccttaagcanagntgttctcctattatgggtcttcaactttgatgtggtgacctanggtaaaaaccctatacnttgtaagttacaaagccctaaagtggagcctttaacactgaatttcagacttagtgtagaactcaaatgaggtccactttgcacttaagtccaaatctcacggtttggcttgtaagtacacatatttgtgaaccaagggacttaagaaacctatttggctttggttttcactttagcccaaaagtggactaagtttgcacttaggtccctacgggtttggttcacggtgttccaaggttccaattanggtttctggtatctcacgggtataaaagtgatcaagcttattcttanggtcatttataacttttaccctcaagtattcaggtttcttaacttggtaaagtntacccctatatccc

SEQ ID NO: 6367 - DNA, 466 bp, Zea mays
  unsure (1)..(466): unsure at all n locations
agcttcnggtttgagacgaaggtgtgcatggtatgtaaaaacgtgatctggaagaaggatagaccaactccgaagctgtggctggagaagcttcggctcagcacaaggacgatgttggaggatgaaaccgacttaaaaggaaaagactgctcattcctcgatagcttgccttatgattaacagtaaatgttagggacatgaatgtaattttacccaggctgcgtcctatgcctataaatagatgaacagtaacaccgtactgttcacgctgacttgtaatcattcacacgtcactctctgatttttaccttctgtcaagccaaaggtacaaatgtaatttaaatatcattgatgtttgttcatgactatataatgatagtgtgaatagactaatgattcaaaatgattattcataccctnttctatgtttatatgtccctgntatatacctatactttgagatgat

SEQ ID NO: 6368 - DNA, 438 bp, Zea mays
  unsure (1)..(438): unsure at all n locations
tctagagggagagcacattntagcactaataaatgttcattttatgaaagccacggattgtagcgcatgtcaagcagggaagcatgttggagctcaccatccacacaagaacatcatgacggccgacaggccgcttgagctagtccacgtggatctattcggcccgatcgcttacataagcatcggcgggagtaaatattgtcttgttattgtggatgattattctcgcttcatttgggtattctttttacaggaaaaatctcaaacccaagagaccttatagagattntgagacaagcttaaaatgagttcagattgagaatcaagaagattagaagcgataatggaacggagttcaagaactctcaaattgaaggatntcttgaggaggagggcatcaagcatgagttctcttctccctacacaactcaacaaaat

SEQ ID NO: 6369 - DNA, 466 bp, Zea mays
  unsure (1)..(466): unsure at all n locations
agcttgcattgcatatttaaatttcttgtattgcatctanggcttgtctaacctagttgagataaccgccaacaaagcgagtgaaaaagcttaactcggatcaaacttgacaagtcttagttttaagtttttagcacttaaattcttacttactatgcaattgttggttcttgaaatatgcatgaggtactgcacttatggggagtattcaaaactcaaaacactcatgaaaacccctagtgcaaggccaaaatgcaaatttcaccatttgcctattttctctanaaattatctagcctatggcaaaatattttgaaaattatgagaaaatatatgagggtgccaatacctgtcccaacaagtgttattntgtgtgattataagttgggattaagtttggttgaaaactagatagaanaattcanaaatttcannaattccctctgtctgggtcaccggacagtcc

SEQ ID NO: 6370 - DNA, 443 bp, Zea mays
ttatgatctgtatagatatgacagatattccccagcaaataatgacgccatattttcagggcatgaaccatagcagctaattctaggtcatgagttggataatgttcctcatgccggcacaactgtcttgaggcatacactataaatcgtccttcttgcatcaagacacaacctaaaccactgcctgatgcgtcacaatacacatcaaaaggcttttcaatatccgattgggctaataccggagcagtggtcaataacaccttcagctgctcgaaggcttcatcacatcttgaagaccagttaaattttgtatcgttcttcaataaacttgtgattggattcacaagcttgggaaatctggaataaatcggcggtagtaaccagccagtccaaggaaacttcggacttgatatacagtggttggtggctccactccaaatatc

SEQ ID NO: 6371 - DNA, 440 bp, Zea mays
  unsure (1)..(440): unsure at all n locations
agcttatgaagagtnganacagatattgattgatttaacaacattaactccacccgcaccaggggctccattgctcttatatgtggcagcttcgcattctgcagtgagngcgacactggtacaggagaagctagatggtgaggctaaaaagcaagctccaatatacttcgtctccgaagttctaagtccatcaaagaaaaattacacagaattggagaaggtattatatgctgtgttaatggcctccagaaagcttcagcattattttcaagcataccacataattgttccttcgtcacaacttctaaaggacatcatgaggaacagagaggctactggaaggattggaaaatgggctacagagcttaatgaatacaccattgattatgtgcatagatcttcaattcagtcccagacgttagcaaacttcatcgctgact

SEQ ID NO: 6372 - DNA, 391 bp, Zea mays
  unsure (1)..(391): unsure at all n locations
gtctcacggcctcaccaagaagctatctgagggctnggatctaacggaggaggacgggagaggggctggccacggtggttgctctcgggcggcactagcgggtcgcggggaggtcgccggagctaatggctggctcgggtaagtcaggcgaggtacggaggaggcaacggggaaggcagccaagcactggggcgggctttatagccgtggcgcgggcgtggtcactggcggtcgcgggcgcgcggtggttcgcgcacgggcgtgctctgagcgcgcccccggatgtcagctcgcgtcgaacacgtggaagcttgcttctgccatggttcaacggcagattatagcgccatagcgtgcgtatcttggcaaagtcactgtgtatggtcgcttc

SEQ ID NO: 6373 - DNA, 462 bp, Zea mays
  unsure (1)..(462): unsure at all n locations
agctngtatggtttgtcggggaagaggtggttcctctttctagggaggatgaaatcgttgtttttaagagcttcttcagagcagggcttcgattccctctacatgagatgattggagaagttttaaagaattttgagatgtactttcatcagttgacacccaatgcaatcgttagacttagtgtctacatatgggctctccgaagctagggtatgagtcctaatgccgaagctttgtgccgggtacacgagatgcactatcaaacgaaggccagagcggatggtcttcataagaacttcagctgctacaacttcacatatcggaaagatacgaaggccctggtaattggctatcgtaccaagtggccgaccggttggacaagcgaatggttntacataatagcacatgagaaggaaagggagaagctaatgactatggtcatgagtccattgaagttaagct

SEQ ID NO: 6374 - DNA, 441 bp, Zea mays
  unsure (1)..(441): unsure at all n locations
ctgtgttccaaattcttcgattagaatgctnttattggaagagtcacatggaggaggtctaacaggtcattttggacaaaagaagacttatgaactgctcagtgatcatttctattggcccaagatgaggagagacgtcatcagatntgtggagcgctgtgtcaccagtcacaaagctaagtcaaaattgaaccctcatgggttatatactcctttacccgctcctaaaattccttaggaagatataagcatggattnntatttatggctgcctaggactaaaaaaagagattctcattttgttgtggttgatagaatttcaaaaatggctcattntattccatacaacaagagcgacgaatgcttcacatgttgctaatttgtttttagagaaatcttgaggctacatggaatgcccaagaccatcgtatctgaccgtga

SEQ ID NO: 6375 - DNA, 447 bp, Zea mays
  unsure (1)..(447): unsure at all n locations
tgcaagcttgaagccatggtaagtagcataggctaataatatacgaattgactcaagcctagctacgggtgcataggtttcaccgaaatccaaaccttcgactngggagtatcctttggccacaagtcgagctttgttccttgtcaccacaccatgcttgtcttgcttgttgtgggacacccacttggttcctacaacattttgattatgacgtggaaccaaatgccataccttgttcctagtgaagttgttgatctcctcttgcattgccaccacccaatccgaatcgtgtagttcttcctctaccctgtgtggctcaatagaggaaacaaaagagtaatgttgacaaaaatgagcaacacgagatctagtggttacccccttatggatgtcgccgaggatggtgtcgacggcgtgatctctgttgattgcttggtggactcttgg

SEQ ID NO: 6376 - DNA, 436 bp, Zea mays
  unsure (1)..(436): unsure at all n locations
gcttctaaagggagaacacgtgataggtttgactactttcaattcgaaaaagatagaccttgtgcagcttgtcaagcaagtaaacaagtgggaggagcgcatcacagcaagaatgtgatgaccacttcaagacccctggagctactacatatggacctcttcggacctgtcgcctatctaagcataggaggaagtaagtatggtctatttattgttgatgacttttcccgcttcacttgggtatactttntgcaggataaatctgaaacccaagggaccctcaagcgctttctcatgagagctcanaatgagtttgagctcaaggtgaagaagataaggagcgacaacgggtccgagttcaagaaccttcaagtggaggagttccttgaggaggaagggatcaagcacgagttcttcgctccctacacaccacaac

SEQ ID NO: 6377 - DNA, 449 bp, Zea mays
ggctatcaatgtggacgtgaaggtcattacttccgtaactgttctgataagagttcactacagatcacctccgagatgaagctatctcagtcttcagacatggaatatgaacaaaaatgcacagaaacttctaccaacaacgtaaagacaactccaccatgtaacttatcaagtcgtgcttgctttggctggggtgataccggccatcttgttaatagttgtcctaagaacgatgtggagatcaataaggtccaaaagaaaagacaacaccctcaaactcatgcatcaacaaagaataaacaacgacaaaagtccatgggaagggataagtatgcagtgacaggaaccattccgtataataatgcagtaatttttggacactagtcgttacacaactactgccaccgtgttgtatgatcctcgtacaacacattcttttatcagtgcct

SEQ ID NO: 6378 - DNA, 417 bp, Zea mays
  unsure (1)..(417): unsure at all n locations
agcttaattaacacaaattaaatatggtngtntatttctctatctgctatatgncattnttatgaccgagttgattttatgtgaggtggcatggagcctggttttcgtttgtttgcatagattttgattgttatatttcactatatttcctggtttcatttgacttgttcatcaattgagtgtagtacaaacattttttttggtaccagtgtgctgaaatagcacctgcttgcaggggcatgaaattgatacatacattcatgcagnttgtctgtttggtagtgctagtaaagttctaatactggaattgctggtcaaatggtttaattgacgagtaattctgcaaatctttgttattcactatctgaggaagtgtctcaatggttgaattaattactggcagttggtaactcttca

SEQ ID NO: 6379 - DNA, 408 bp, Zea mays
  unsure (1)..(408): unsure at all n locations
tctccttttcttgctcatatatntctgacttcttgagtagntcattctttatactgtcatcttcggcttggacctcagccaatgagccttccatagactgaataataaagtctttcttctctaaagcaccttcgtgttctttagccataattntaagatcttgaatggtgaagtccttcttcttcagaacatcttcgtaattttcaactttttcttctaaatctttgatgatagctttgttcttctcctcttcaagatcttgttgcacttttagcactttacttaatagtatactctaccaaaacaaccttcgtcaggaaaagacataagaatagataataataataaaataataataataattttaccctaaaattcgcataaagcaagctgccggcgacatgatgt

SEQ ID NO: 6380 - DNA, 472 bp, Zea mays
  unsure (1)..(472): unsure at all n locations
cctgcngcatgcaagctntanggtaaaagtcataaaatatcccttatatttaagttgaatcacatttatacccctgggataccaaaaatctcaattagaaccctggaaaaccctaaatccaaaatcctaggggcatatgtgcaaaattagtccacttttggactaaagtactagagccaagttaaataagtatattaagtcattcgggtcattcatatgtgaatttacaagccaaaccctgagttntggacttacttgcaaaagagccacatttgaactctnttggctaagtctgaatttcagtgtattgtgctcaccttggtgaccttgcaactttcaaaatatagggtttttgccctacgccaccacataaatnttgtaaacctattataggagagcaactttgatgcagacatctcctgttgttgttatacaaaaattagagaaaaatacacccaaagtcatgctgtca

SEQ ID NO: 6381 - DNA, 407 bp, Zea mays
aataagaattggaataactttctcaaaattctgcatcaacctcttcgatatcagcattgcgcatacttccctatagaagtaactcagctctgcacatatgctccatagcctatccttaaaatagcctctaaacatcacgggcatcatcctctccataataatatggtagtcatggcttttcaaaccgaacatattacctgtcttcagattgactacccatgttagatttgccgcatatcgatctagagatttcagagtcttcaaccacttaaatatttaatcctctcatccggcttgaggatgaataagctcgggcctactctcatgcccttatcgtcactttcaattgacatcggctatacaaattcagcatgctttatgcctcatatatcttcgttatcaacaca

SEQ ID NO: 6382 - DNA, 477 bp, Zea mays
agcttggcgcttttgtccagcaggcatgcgtttgttgtttctaaggcagagatgaggttgtgaatcttcttcatattgaccacgatgtcatcgacgtaggtctcaatcgttgcgccgatgtgatcgccgaacacgtcgttcatgcaccgctggttcgtgtcaccagtgttcctcaaaccgaagggcatggtggtatagcaattgaaagggaaatggccttaaccattttctataaatgattttggtgcttgacgaccatgacaaatattatggactaaccagtttgcctagttgattatttctcaggtgcataagtccatctatatcaattctatgtcgactgtccgaaataccatagattattctggacaggagaaagttttgtggaaaattcacctgtgcacagaccgttcgggcccttccggcggccatccgcgagaccaggtgtgcctcagatatgaacaatgcagaacacac

SEQ ID NO: 6383 - DNA, 508 bp, Zea mays
  unsure (1)..(508): unsure at all n locations
ctcagcttaattggttaagggtccatgctgaatcattcccaagtttattttctctatntcttggcataatgtgatgtcagaagtctttactgtaagacaatggcaggaagccttacgacttagtgcatctgccaccacgttggccttgcctgggtgatagtgaatctctaattcataatccttaataagctcaagccatctcgtttgcctcatatttagttctgactgggtaaaaatgtactttaaacttttatgatctgtatatatatatgacagatatttcccagtagataatgatatcatantttaagggcatgaaccacagcagctaattctaagtcatgaggtggataatgttcctcatgtcggcgcaactgtcttgaagcatatgctataactcggtcctcttgcattaagacacatnctagaccactacctaatgtgtcacaatatacatcaaaaagcttctcaatatccggntgagctaataccggagcagtggtcaata

SEQ ID NO: 6384 - DNA, 446 bp, Zea mays
  unsure (1)..(446): unsure at all n locations
agcttcacaaaggtgaacgaaaatagagatttggttaatggagttagggttcaagtgagtcaggttgatgtgataaaaatcaaggatgccacggaaaaaaggagatatgggaaggccgaggccgcgaagaaggaaaggagtgtaaaccactgactcgtgggtatcttcggttgggacagtagtcccgtggcaagcccgccaagaacagagttcccgtggagggagaaccccgatggagacaaggcggagaagctcaacttcagaaattacagacatatggttacctgcgaagggtaactgactgttggggtcgatagcggggatcactgcggcagacgagttcgcagtcttcctcttgngcgccatcttgcttctcgctggcgaaacagagtangaggcgagtggcagagaagactcatatgcgganatgcaagaactatggcacg

SEQ ID NO: 6385 - DNA, 492 bp, Zea mays
  unsure (1)..(492): unsure at all n locations
ntaagctctnntgacaataaaatacttcacctagtttcaacatagatgcattaatgcaggaatganaatttaagaggttaaactatgtatgaagcanggataatgcatggacatgctttctcttccttttatacaagatatgcaaagaaagtatagnaaaagaagatgtaggtacaagtttaaatgaaaggaggtagttntacccttttgtaccttcacatagagacgctctctttattgtgctttgtcctcagtcttagctgcttaagacctatactcaagacaacatatggaaatgttntgcacaagagagagttctacaactagtgatccttctccaagtcattgttagcatatatcanatggatcacaaattgcataaatgtatcatgagttctccttttaacttagtgcacatcaagagagatatcgactgatagtatatacggcactaagaaacattagtgtaattgaagtattcattgatcaaac

SEQ ID NO: 6386 - DNA, 317 bp, Zea mays
  unsure (1)..(317): unsure at all n locations
agcttttctctcttagtttcggaatgagaatgtatatttacaatattaacttccaaataccttgcaatcatcactcccagatactagcattgaagagtctgtgcgagaaaaatcaacactccatgctctcttctcatgctcttcatattccatcacactctagcatggcacaatacacagaaaccatatgcctcagttngaattacaatacagccattgcagaatgaactgtcgaatagagagtggatacctgacgggtctgaacatcccacacaggtactatacccttataatcactggttgccattatatttttt

SEQ ID NO: 6387 - DNA, 418 bp, Zea mays
  unsure (1)..(418): unsure at all n locations
tgtgaagggtcttcattcctacatgtgctacgcggcgatgccacaatcagcccatgctagtcttagcaattaagcatgcatctagaccggcctcctcttttgcaaaatcaactaaataaagtttgctgtctaatacacccttaaaagctaatgaaccatcacaccttctaaagacagacacatctacatttgtgaatagacaattatatcccatattgcataattgactcacagataacaaattatatccaagcgactcaactaaaaacacattagaaatagagtgctcggatgagatagcaattttacctaacccttttaccttgccttggttcccatcaccgaatattattgaatcttgnggatccttgntcttgacgtaggaagagaacatcctcttttcccncgtcatgtggtt

SEQ ID NO: 6388 - DNA, 469 bp, Zea mays
  unsure (1)..(469): unsure at all n locations
agcttccttgcgcacatcttcggcgctggttcattcttcgttctgaccctgctttccatattgtgtatagcttcatcacgagtccgaaggttcctgtacatatattatgctttgggaaacattgtgaatcatgtttttgaggaccttcggaagacgaaggccaccaacagtagcccctcgcaatattaatttgttataataacgaattcagactatgacatgaacgaaggccttaagccgaaggtccgaaaaaacaccttcccttttctagaatagcaataatcaatgatagatggggccctccaagttgcagcgtgctaggcgtataaatatgaactcacaccggctgcatttgatacactgtttctgccattttgcattatttctcaaacttttagctcttgctcattagcgctcgctagaaatttcaagcttttgagcttcngataaaagacgcgtctctaccatg

SEQ ID NO: 6389 - DNA, 461 bp, Zea mays
  unsure (1)..(461): unsure at all n locations
taacttgtggactgggtgctttgaccttcagatgctcatgaccaagcaatagacttcttgtggatcccttggacctgtgggttaggacccacacacactttcgctacgtcactttgatcttgttggttgacgttgatcgcatggtcttcattgaggttagcggctaacccccttaacaggagtgttgatacacgcttggtgaagatgttgccaactcggatcttgattgatttagagaggttgtaggatgtcaaccagacatgtgcaagaggaaagagtatagatagaaaaggtaagcatatatggattatagagagaaaagggagagcgcccaactacctgactctatggtagtcacctagtaaactgatgccattgccgacgatagctactacacatctacactcatttcaaagaacanatcagtcataacacatagacaaacattatgagcacacaac

SEQ ID NO: 6390 - DNA, 304 bp, Zea mays
  unsure (1)..(304): unsure at all n locations
agcttatgaagattcttcatcccaacatgggctattctgcggtgccagagccaacccatgttagtcttatcacataagcatgtgtcaagttcagctntatcaaaatctactaagtatagctgaccctctaacacacccttgaatgctattgaatcatcacttcttctaaagacagtgacacctgtatcagtaaaaagacagttgtagcccacttgacataattgggaaacaaaaaacaagttgtgatctaaagaattcaacagataaacattggaaatagaatggtcaggagatatagcaattt

SEQ ID NO: 6391 - DNA, 502 bp, Zea mays
  unsure (1)..(502): unsure at all n locations
caccctagctctagagttacaaactatatagtagtttgagagctgcattacagatctttggagtacctctcttgattctccgaaaactataaaaaagcaacctatacccggagtttggatttatttatccaccactgtcactggttatgagaaaaccacttaaatatggagaagaggtgctccattcatagttttggagtgagctcctctaaagtaaaacatagtcacgccaaacatctctactacttattaagagagcaatagtagtctgcctctaacatgttctgccatcagtgtgttctgtcgttctgccatctaccccacccagagcanaagtaacacacgaacgtgagaatngaagccaccaaacacaatatagttcaaccacagangtcttattcacaagactgagctaacgcttataagccgctctatgcctcttttactagccgatacgggactaaaagttttgcatacaatgcaacaacacagcagtgcaagc

SEQ ID NO: 6392 - DNA, 484 bp, Zea mays
agcttaggacctcatcggaggagcaaagcctgcatctgcggcaccgcgacacgacacgaaccaacaacccaacaaatgttgggagaagaggccttgtgaagaagtccacgtcgccggaccacccgcctctcgcacccgaggaggacctcgtggaggtgaacgcacgctggacgacatcctcgacgcctagtgcccataccacaaggacatgcgccacacccttcagaactacagagacttcaaacattctgtggggaacggccgacccttccaacctctgccacctcccccaccacgaggaggacctggagaacctcgacaaccccaacagcaggagggggaggaggtggagccttcccacgcgtcgacagagaagtcaacgtcatcttcggcggacatgggtcgcaagaaagcaagaggcaacaaaagctcaacgaccgtcagatactggtggcgaccattggtcctcccgccccgtatcgat

SEQ ID NO: 6393 - DNA, 367 bp, Zea mays
  unsure (1)..(367): unsure at all n locations
gagatccttccacccacttcgtttttttatgccgggccagatcccgccgaaggtggagactacgccgagggtgctgctgctccctctgntgatgtctgaacctgcaaggagagtttgtctgtagtgtgcgtattgttttcacggccgccgaggccaaacatatcattgtcgtgttgtaaagctacgtttnctttcctctttgtttgagtatcaagacttgttcgtcgatacagaatcagttatccgagcgagagattacttttacggaaggtgatgagtgaggtatctgtatcccggaggcatatgagtacttcngctcggtcgaccttgtcgcttatatgcactcttactcgttcgtaggattctg

SEQ ID NO: 6394 - DNA, 506 bp, Zea mays
  unsure (1)..(506): unsure at all n locations
tcctctgagtcacctgcngcatgcaagctntgttatacacatcatcatacaaacataaatatttcaaaccttcataattatagcctttgctaacaaatgtcacatacttcgacaatacacatttattagactaaaaaatattctacaaccatctctagataatagagagctactaactagatctcttttttttatggatgggacatgttacacattcttcaacaacactatctttttttagtgaacttcagaatgaccatactaatctaagaacacatggatgagatccattctctgtcagcaaggatccaatcatgctgaccttctaagaagaaaacaaagaagcatccacacatgcatgaatattagccctagtgtccgctcactactaagatgaatggcagactccatgaacgggaggtaaagggttatcatacccaaacattcgtcctttatgcgtcgtaataattatgtttatagacttcttttgcctgcttaaaattatg

SEQ ID NO: 6395 - DNA, 406 bp, Zea mays
  unsure (1)..(406): unsure at all n locations
gctaccaagggcatatgagaattactgatnccgagcgcatgccaagccgggaagcaagttggcactcatgaggcacacaataacattatgacaagtgacaggccactggagctcctccacatggatctattctgcccgatcgcttacattagcatcggcgggagtaagtactgtctagttattgtggatgattattctcgcttcacttgggtgttctctttgcaggacagatctcatacccaagagaccttatagggattcttgagatgggctcacaatgagttcggcttaaggatcaagaaaattataagcgacaacgggacggagttcaagaactctcaaattgaaagcttccttgaggaggagggcatcaagcatgagttctcttctctctacactccacaac

SEQ ID NO: 6396 - DNA, 484 bp, Zea mays
agcttgagacattattacttaatggtcatatgttgtccgaaggacacacttgaggtcatcatatagatgcaccaaagaaccatataaagccttcaatgtccatacaatctctgtaatggaccacactcgttcctttgaaacaattcaaagaacttaaccaattcagatcagattgtaagataagaggaacttaaaatctcatttctgatgatactcatgaagtatccatcttatgggaaaaacatgaccaatagaattgttcataacttttcatttcatcccaacaatgggatgaccaattcaatcttacccagcatggtaagtatcatcactcgaaaagttataacatatgcaacactttgtatgggaggatgtatgtagaatacagtccataagaaatgtttctgagaaacatatgcaatatccatcactatcaccttgtgctttcacatgatagagattatatggatatctctataatatg

SEQ ID NO: 6397 - DNA, 386 bp, Zea mays
  unsure (1)..(386): unsure at all n locations
gacgtgaaaagtgccttcctcaatggaccaatctttgatgaggtctatgttgagcaacctcccggctntgaagacagtgagtaccctaaccatgtctataagctctctaaggcgctttatgggctcaaacaagccccaagagcatggtatgaatgccttagagatttccttatcactaatggcttcaaagtcggaaaggccgatcctactctattcactaaaactcttgaaaatgacttgcttgtatgctaaatttatgttgatgatattatatttgggtctactaacgagtctacatgtgaagaatttagtaggatcatgacacnaaaattcgagatgtctatgatggcggagttgaagtactntttgggattcaagtgaagcac

SEQ ID NO: 6398 - DNA, 472 bp, Zea mays
  unsure (1)..(472): unsure at all n locations
agcttgaacccggctattccatacgtgaaaagacaaccgcgcactangcgtgggagatggtgggagtagcgtgtaccctcctggctggaggctggacggaggagtactgtgctcctgtgtagcgcggaccggttcacgttgtggaggatctgtgggaacggttgacatatgcaagggttaagtgctacatatgtcgtgtggttagagatcctcagctgagtaaatcgattctgatcgccgttatatccccggacagtggagacttgatcactgacctgcaacctaagtcaggatgtgaacctcatgaataaaaatgatgttgtattgatgagatggtgaaattagaccagatgcanacagagtctattaatatntaatctggcgttaaaatattgaaagtaaggactcactctagtaagctaatcctacaaaagtatctaagttgattcttgctaaagcatctncttgattc

SEQ ID NO: 6399 - DNA, 425 bp, Zea mays
ctcggagaccagttcccggaaggcgagcgctacttctgtctcgagaacttcggcaacacttgctactgcaacagtgtccttcaggtatgggtacatgcctctgaaaccaacagctaatagatttgatgcttggttatgcttggcttgatactggtaagtgcggcagtgtagtgaagcggccttgttcgggttttttagtgtgtatatgctagatattataatgttctagcacttgttcgccagtttcgagttatgctgtcgtagcgtgatgtgtgtgctgatatgattagaatagtttgacaaaatcaatcggaactgtttgtatagtactagttgctcaatgcattcgatatcgtgctactgtaatgtaacatatgtgccgatatgagaagtcctttggtaatgtgagtccaaactgttctgag

SEQ ID NO: 6400 - DNA, 437 bp, Zea mays
  unsure (1)..(437): unsure at all n locations
agcttgtttaagacataaaactatatacctattattctcgtttggttgantaatgaactattccatcgnnnnntcactcctcactatttttgtttggnttttgacatagaatgagttgattcatcaccatctcattcctcatagttagttagttagtattaatatgaggaatanannnatcccaccaaatctgaggaatgaacccatgatgcaccatcttaatttagatggtatgatttctcanaccaaacactctataatttatccctctcttatgtgtccacattcgctccaaaggcgacgacgcaaggaatagactatgaaagataaagaagaaacgacaaggaagatggttaaattttggtagctcttttctgaccaccaaaattaagaaggggatnnntacacggctcatgtgagccactaaaaataactaa

SEQ ID NO: 6401 - DNA, 339 bp, Zea mays
  unsure (1)..(339): unsure at all n locations
ctgagctcaaagggagattgatctggggatgatgatgtctccgatgttgttgtgccacgggtcggcgaggtgggaggcgaggttctccatcgggccggtgccggtgtacgccgactgctggacgcagaagccgacgaaagccancatggcgaggcggccgttcttgatctccttgagcttgtactcctctaacttggccgggtccttggagaagccgagcgggtctaaggcgccgccggggtacttcttcttctcggggccttctccatggtgcgcctgtgctcggcgaatgcgatggccactaactctatcaccaggatggtcggcagcgtgccccac

SEQ ID NO: 6402 - DNA, 473 bp, Zea mays
  unsure (1)..(473): unsure at all n locations
agctntgccagaggatccaaactgctgcattattattgacatattgngcaaccttgagaactagtcatctaagtgcatttccttgtatctttaaaatgtaacaacaaatggagtttggaaaggtagcatggtctatttagctgtttgttttgcactgtcagttcatgaaattgttaatgcttatatctccccatgaccatgaacctaccttgtcttgctgcccatagatttgtgcactgttgtgcaagtgcatgtgaggcattataatgactgtttttaatcttgtgatggattcaagtttttccttgaactcggttcctaaactccatcctcttggtttattatcagtccctgttttaatgccacatcattgatcaaatttggccaagtattatttcgcanattcatagcccagttgcattgtatactaagcaaactaattctcttttagctngttcatggagtactatctt

SEQ ID NO: 6403 - DNA, 478 bp, Zea mays
  unsure (1)..(478): unsure at all n locations
agctngatacacccaatattcataccaaggcggataccatttacttctcatctctctccctctacttaatcctttcaatcttatataacctgtgagttccatcttggaagcttgaatttgatttatagatcttggagaataagttatccccctcgcctctttaatttatacgtgttgacttagtttatatcatgtgaattttgtaattctagttttccaggtaaatatttgattgaataaattttgattttgttgtataagcaaagttatttaggtaaatgggtgcatttttaaacatgtgcttaggttccgccttggaattattgggtaaatattgatgtattatatggtcagattataatgttaattgttatcttcaaatttaacttagggttaaatttgttgttaccttcattatgttgtttgtaacttttaaggtttagggttagtcttaattagttatctagtatggggtata

SEQ ID NO: 6404 - DNA, 441 bp, Zea mays
  unsure (1)..(441): unsure at all n locations
cactacaagcattaatgtcaaagtctttacacctagtacaaatttcaacatgttctacacaagaattggatttgtttgctacttctaatttagcatttaaatcattgttgacacctttcaaagtagaaatggtttcatgacaagtagatagttcaaaagaaagcatttcatttctcttaacttctaaagcataggaattttgtgcctcaacaaatttatcatgctcttcatacaacaaatcctcttgcttttctaaaagtatattcttttcattcaaggcatcaattaattcatntaatttggctatcttagatctatctaagcccccgaacaaacatgaataatctacttcatcctcatcactagattcgtcctcacttgaagaagcatangtagagttgcgagtacataccttcttctctcttgcataaggcatgtgtg

SEQ ID NO: 6405 - DNA, 454 bp, Zea mays
  unsure (1)..(454): unsure at all n locations
ctgcagcatgcagcttaaancatcccaagtgacctgntgttctttttggtgaatctccacanaatatccgcaccaggtactggcaggacctcttagttgctgggcggcgaacaacggcttatgtgtttatgtgcaacgaattaatccgaacatctgctccattaccctagtccactcatcatcttcaatatggtcttcaactttaatgaagagtgggggacgccgttcagagaagtctagatatgaaggtacacacggtccctgtgaaagagcccttccgccaggctgctggaattgattacctgccatctcacgtaagaagcgggtattatctgtagttgcattgaccaagacagcgatagcctcagccatccgtggttggacaagtgtgtgagtagaatgatcttcccgaccacgagaagtacccgcactgtcatgcgtataatgttttgat

SEQ ID NO: 6406 - DNA, 485 bp, Zea mays
  unsure (1)..(485): unsure at all n locations
agctgactacccacttgagcccgatcatgcacggcagcactttctgtggctgggcatgtgtcagcaccatccgtgaggtccaagttctctgcagtagccacctctaaggttgacgggccctcagctactttcataggaccaggacgatccaagtcagtctcccgaccctcgagaacgcgctctaaggtcgacgaggcactggatgaccacaacccagcatcaggcacgtcagcgcatacctccattacaccatcacccactggctccgataacaagtcctctgggaccatatnctcaagagtctgatcaaagttggccagggacagttcttgcagaccaatgagggcagacaaagcacgagagggaactccactactttcaccgctggcgatgaactgtcgactgtntttctgagtcaaggaatatattttctcctcctatcatcacattgcacacagcacaccccattggatagcacatatgag

SEQ ID NO: 6407 - DNA, 450 bp, Zea mays
  unsure (1)..(450): unsure at all n locations
agcttacaacatagtgttccttcttcacaacctctgaaggatattatgaggaaccgagaagctactggaaggattggaaaatgggctgcagagctcaatgaattttgcattgaatatgttcatagatcttcgattcagtcccaggcgttagcagacttcattgctgattggacgccaggagctcatgaggaagaaacaaataaagacgccgaagcatggacagtgttntgcgatgggtcttggggaaccttcggagtgggagcgactgctgtgttggtttcaccttccaaagttaaaacttgttatgcggcaaaacttgattntagttgcacaaataacattgcgagtatgaagctctgcttttgggtcttctgaaattaaaggcaatgggaatcagaagggccatccttaaaactgattcccaagttatttctggtcacatttgacaaa

SEQ ID NO: 6408 - DNA, 486 bp, Zea mays
  unsure (1)..(486): unsure at all n locations
tctaaagggagaacacattntgggactaaccaatgttcattttgagaaagatatgggttgtagtgcatgtcaagcaggaaagcaagttggtacccaccatccacacaagaacatcatgacgactgacaggccgcttgagctactccacatggatttattcggctcgatcgcttacataagcatcggcgggagtaagtattgtcatgtaattgtcgatgactattctcgcttcacttgggtattcnttttgcagganaaatcacaaaccccagagaccttaaagggattcttgagacgagctcaaaatgagttcgggttaatgatcaagataataagaagcgataatgggacggagttcaagaactcacaaatagaaggctttcttgaggatganggcatcaagcatgaagtctcttnctcctacacacctcaacaaaatggtgtagtggagaggaagaatagaactctactggacatggagaggac

SEQ ID NO: 6409 - DNA, 470 bp, Zea mays
agcttcaccgggctccatttgagtgatgggtctactgctagccctcctcgcttattactctctattaaagatgtgtttggttggtgagtgaatgagaagagagccgctctattcctatttttagaatgtttggttaactaaagaggaagagaggagtggctcctgaagtttgtccgttcgagtataccactaaaattgggaagagcccgctcgccaaaatcgatgtcctgttctttcctctctcacaaaatcgatcccctcctctacgaccacctccctttgtcctccatcctgtcgccaccatcaggagatccgccatcgtgcgtcaacttaggtgaatcgatagccacatattctccttcctggtcgctcctcttctcctcccttcaccaaactaattaagctcctccaacattgtatgcacttctttctactcccacatcagccccttttctcccttacctagatct

SEQ ID NO: 6410 - DNA, 490 bp, Zea mays
  unsure (1)..(490): unsure at all n locations
ntagtggcaagctgaaccatgggataaatccatgtctcgtgtgcttcaattacattcttacacattcatattattatgttaggggttgtgatcgatctacttgttcacttgtggtttacttgatttagctctagaattgcaatctatatacctgcagaaaggctaggaacttatctcatctaagttttgcaggttcgtagtgctgccctataaggttgacagtgcctccctctactttgatagaatttcaagttgaatatttacatgcatattcaccccctgtagccctccatcgcattccaaaagatcctacaagtggtattagagctggttgcttnttaatttcttctttgcatgaagtatggaagtgggtggaggctcataagccaatggtcgtgtggttgacgatattggaagcagcgagctcttaattcaacagcaagtgaggcttccataaanaatcccaagtccaccaatgaatggagaagaa

SEQ ID NO: 6411 - DNA, 431 bp, Zea mays
  unsure (1)..(431): unsure at all n locations
acttagttgattttgcaaaagaagaggccgatctagatgcatgcttaattgctaagactagcatgggctggttgtggcatcgccgcttagcacatgtggggatgaagaaccttcacaagcttctaaagggagaacacgtgataggtttgactaacgtacaatttgaaaaagacagaccttgtgcagcttgtcaggcaggtaaacaggtgggaggagcgcatcacagcaagaatgtgatgaccacatcaagacccctcgagctgctacatatggacctcttcggacccgtcgcctatctaagcataggaggaagtaagtatgggttagttattgttgatgactcttcccgcttcacttgggtgttctttttgcaggataagtctgaaacccaagggaccctcaagcgcttnctcaggagagctcanaatgag

SEQ ID NO: 6412 - DNA, 510 bp, Zea mays
  unsure (1)..(510): unsure at all n locations
actcaagctttaggaaaaatgcgggcatcatatgtntaaatggaaacttaaactcaagtgaaaatgttttatcgtaatgaggatataataaactcaactagttcatgttgggagccttcggcttacgaaggtccttaaaaacaggatttaacagtgtttctggagtataatgtgtaagcaggtatcttcagactcaagtcggtatcacagcaggagaagaccagaataatacgaacgttgatacagcgccgaagatgtgagcaggaaagcttcggcatggtagcagaaaatgaaaccgacttaaagatgaaaaggctattcagacctcgatagtttactatagaattattatcaaatgtaaagggcatgaatgtaattttgtatgagctgtgtcccatgtctataaatatgtgaagcagtacccccgtactgttcacgctgattggcatttgctcgtgcgcacacctgtctttcattccttcaagtgaaggacatttgaattcatatatt

SEQ ID NO: 6413 - DNA, 435 bp, Zea mays
cttgcccactttctatggatatgtacttcttctattactaggctagcatatgtctggtactatctattactaatctttgccacaggccacaactgctgggcgctggctattcttctttgccacatggcttcttcagttcaatcactgatgagctctgattggatgtgagatcagagtgagcactctctctttttcggttcctcttcaacatggtagattatcttggttctgtgtgagctggggtgactagtgaactgcgaatcactttatttctttttctctataaattcagctacagaagcactttcacagtggcctccacctaatcagcacattcagaaattacaagtggtggattgctttcactctgaacaagatagagccagtccccaaacaatgttaaaaaacataagacctatgccagtgttatattga

SEQ ID NO: 6414 - DNA, 362 bp, Zea mays
  unsure (1)..(362): unsure at all n locations
acgaatgcgacatcgagtgcgtggagtacggcgaggctctcgcagagtccgaggccctcatcgctgacctggaacgcctctccaagaaagcgcccgacgcgaagtggcacaccgacaacttctaaccagttgaggtagtcaagtccatctctctcgaccccagcaacgacgccagcaagaaagtttggatcggctctaagctcgaccccaaataggaagcagtgctcatcgactntctccgtgcaaacgccgaagtctttgcgtggagtccctctgacatgcctggcataccgagggatgtcgccgagcactcactggacatcaaagctagagccctacccgtgaagaaaaccctatgccat

SEQ ID NO: 6415 - DNA, 447 bp, Zea mays
gcttgtgaagattcttcatcccaacatgagcaagtcggcgatgcagaggcaacccatgttagtcttagcaattaagcaagtgtctagttcagcttggttatcattaaaatcaactaaatatagctgaccatctaacactcccttaaatgctatagaatcatcacttcttctaaagacagtaacacctatatcgataaaaagacagttgtggcccattttacataattgagaaacagagagcaaattgtaatctaaagaatctacaagaaaaacattagaaatggaatggttaggggatatagcaaatttacccaaacctttgaccaatccttgatttccatccccgaatgtaatagatctttaggggtcttcatttctctcatatgaggagaacattcttttctccctcgtcatgtggtttgtgcacccgctatcgattatctaact

SEQ ID NO: 6416 - DNA, 290 bp, Zea mays
atttttttttaagaaaatgcaaaggccttctctatttgtattgaaaagcaaacccgaatcatatttctatgtctaaaacaatatcatatccaggtcgggtgttccctggatacatctctaggatttctagtttccttgtttctaaaataaaagggttcctaattactcttactaaccacagcataaagattttctatgaactttactgatacgtgactaccaaaaatggatgctcctcgcactctcttaacatacacttctcatttcttaacttaaccccaagggaataa

SEQ ID NO: 6417 - DNA, 443 bp, Zea mays
agcttaccaatgaaatattgatataacttccttattgttgtttaacttttgagcttgaatgtgatgcttgtgaaattgacattggtggtgttttgttgtacaatagtaaacctaaatgggggtattcttaatattccacgtatgacatagaaccatatgcgattgttcgttcgttagagatgtgtcgacattatttatagcctacagaatttgtattcacttggatcatgaaccactcagatatatttggagtcaaggaaaactaaatgatagacatgctaactgggttgaatttatctaatttttttacttatattatcaaacacacgaaagggaaggataatatttatcgttgctttggctacacaatataccatgctaatccaacttgggtgtcatatatttggccttgaatcaattaaagaataatatgttaatgatga

SEQ ID NO: 6418 - DNA, 328 bp, Zea mays
ctcgtgcatacttttcgctgatggtctataatcccgacctgaagacctttccgactagtgtcttggacgctgcgtgtactccacattgtccagcatgaacctcatccagaagttgcttcccagtagatgagagaatgcatatcatgaagatgtctgatgcgccccttctgtatagtgtcttctcaatgagtgtgtattgagctgactgtctatcaatgcgctcggctggatttctatcattcggcgtctttcattctttgtatactcgtgatcgggcttctccggcatataatctgactctggtggttacgatatacactcttttgct

SEQ ID NO: 6419 - DNA, 339 bp, Zea mays
  unsure (1)..(339): unsure at all n locations
agcttcngcttcttcgtttattcactcaacaacgccctcggtgtgcctcggcaaaagttttcctcagaggaataagcaccaactttggaaaagctagttnttaatttcttcacgcaatccaatgatttttcaaaacgtctttccttggatttgcgaagctcctcaatatttttctctagcttggtcttccaccattcactaatttcctggctagcctttgcgaccgcgcaattntcattggcttcggcaagttgtttccgaaagtcttcaacctcagctttatgagcttcggtctgagcgttgtatttcgcctcatcttccttcactttattcacaaat

SEQ ID NO: 6420 - DNA, 401 bp, Zea mays
ctaagcttacacctctgactactcggtgctcgtcttcgcgtcgcttttaatcctgatctaaaacctttccgctagtgtctggagctgcatgaattaacattgccctgatggactttctccagaagtgtttccagtggacggagaacgcacttatgaggatgcctgacgcccccttctgtcaatacttccccatgagtgtatgtgagctgactgcctggaatgcgatctgccagttcttgtcattggctcttctcattcttatatctaataatcggcttctcagtcgtaaatctgactcggtgattatgatgtgcctctttgttgtccttgaaactcgtgcaaattttgccaaattcggggggactgttgacggatcactgacagaatcgttgtggtcactt

SEQ ID NO: 6421 - DNA, 385 bp, Zea mays
  unsure (1)..(385): unsure at all n locations
gcttgccanacttgaatcgaggacccccgccaccggaatagcgcaatcgtgctcgccggagttcggaacctcgccggagcacgtggaccgggtgagtctccgcaccattttccaattctttgtacgtatgacctctacatcaccccgtggagctccttgtgccgtttaattgaactatattgccatggttaggccggagctctcgccgccgacgagttcccccgcctgcgcacgtggaccggtcgattccggccaccaccgccgtcaagccgtacctcgctgtgaccgcaagaacctcccggagccaaccccgccctccggcggacctccctcgccgccggtatgccacgccgccctttttacttccgcgagtactatttaaatc

SEQ ID NO: 6422 - DNA, 122 bp, Zea mays
ttacaagaaacgatgtggcattgatcgatccacgctattggcgcttgttttcatccacccagaagagggcatgatgtctgattacatggatgagagaaaaataagttttgtgctcaccaaag

SEQ ID NO: 6423 - DNA, 417 bp, Zea mays
agcttatctcctccaagggtggccttattcttgaaagcaataatagaaagccatgcaagcacagcccagatgccatctttctcacgaatgtggtcagaccctagccaaagtagtacatataaacatctcaataatgtctataccaaataccaaccagtccttgactttactatgggttggattcatgaccactaactcaataaaagggcgagagagctcactgtcagaacacaagtgatttgccccattcatataccacatcatgataacacaatttacccatctaacatgacaatacaagaggtggtgacatgtttactactgtgattggcatgtatagaaatgatagccagaagccaaatattaccagtgccaaagctttcttcaccacagaatgagcacattccagcatccatc

SEQ ID NO: 6424 - DNA, 290 bp, Zea mays
tctagaggccattaagacagcatacaacaccttctctaattctgtatatatttctttgataagcttagaacttcggagacaaagtatactggggcttgctctttgatttgtccttccaatttctcctgcacaagcgtcgcactcactgtagagtgcaaagctaccacatacaatagtaacggagcccctggcgcaggttgagttaatgttgttatatcaatcaagtattgcttcagctcttcgaaggctttctgctgagctgggccccattgaaagacttcggctgactt

SEQ ID NO: 6425 - DNA, 436 bp, Zea mays
agcttgtgaggaatattgtggcctctgttattattctgggtagagtggattgatctgacatgccttgggtggattctccctccgaagcccttggtcatctcagagaacctgtaggcctcctcccttctttgatggaagtcattatcagcgcagatgtattcatccatcttttgaagcagcttctccaaagtctatggaggctttctagcaaaatactgggcagtaggtcctggacgaagccccttgatcatggcctcaatgacaatttcattgtgcactgtaggcgcttgtgctcttaaacgcaagaaccttcggacgtatgcctggagatactcctcgtgatcttgcgtgcattgaaacagagcctgagctgtgactggcttcgtctggaagccttggaagcttgtcaccagcatgtctttgaacttctgccatg

SEQ ID NO: 6426 - DNA, 286 bp, Zea mays
gaatcaaagactctgtttgcagaagagcttactatcattgattcttacaaatccagatctattatacgggtaagttattacctgtatctacagttctttctatcctagatcagtcacttagactacactagccatcttttatcaccccttgagtccactagaatgctacgtgtaagtcaatgaccaagtcttcatgtccgagaagtaacgacgatccgaatcgattaatacccaacttgggatcttccaccacacgacatatgtagcacttaacccttgcatatgc

SEQ ID NO: 6427 - DNA, 360 bp, Zea mays
  unsure (1)..(360): unsure at all n locations
agcttgcttttagcctccnccgagataaccaagttttctcatcataaccatgtcatcctctggtaaagtagatatcccacactcggtgtggatgggctatattgggctcaaaatactgntatcttcttcactctcattgtcactttcgcctctagctacaacctgttcagtttcggtattggaggcaccttcggcaacaacttcctctgacacaacctgacctgatcgcttcatcacttctgaaattgctgttgtatcgccggtttcggtctcctctccttcaagagataccctagcagnggatctcacccttgccatttgtgttttcaagttctttgagccgaagctgatctcatgtga

SEQ ID NO: 6428 - DNA, 179 bp, Zea mays
  unsure (1)..(179): unsure at all n locations
caacgaaaccattacatcaaagcctaagaatgtcctttattacacataanatgcaactgaatgaacaagaccgctatcaatgtaggatatttgtcaatagatgtgctttgactcttgcacacagcttgtgactgtgccagcttcagactggtctctgaagatctttggtgtggagcata

SEQ ID NO: 6429 - DNA, 379 bp, Zea mays
  unsure (1)..(379): unsure at all n locations
agcttctcaagaatcttatatctttacctttgtctctgtgcanaagactctgaaaagaatnttcaaaacctttgcaaaaacaaaacatgtggtgcaagcgtggtccaaaatgtttaataataaagaaacaatccatgcaaaacttatgaaaatttctattggctcaattctaagtaacctttgcacttacaattatgcaaactagttcaattatgcacttttatatttgctttggtttgtgttggcatcaatcaccaaacagggggagattgaaagggaattatgcttacaaccttttcctaattaattttggtgggtgaattgtccaacacaaataattggactaactatgttactctagtctattaggtttacaggt

SEQ ID NO: 6430 - DNA, 340 bp, Zea mays
ctcaagctttacgcgctcaacagccgctgtagctcacttagatacttgtgttccatgatgccactacaatcaatgtgcgatgaggtgtcatctactttgaacagaaacaacaaggcttggtttgacaccaccaataatctcttcataagcgaggctgatactgaaattcagacgaagaactgcatacaccatattatttttaatttgcaaactgctatgaccattaactggcgtttgagtcacacaacacacacacacacatatatatgctaacggttctgaactgctgagcttctcacacactattatatcatgtcactcatagacgaatatacaccag

SEQ ID NO: 6431 - DNA, 433 bp, Zea mays
agcttcatctttgatatcaatagagaaaacaatacatttgtgaaaaccacatgaatctttatttcgaaattatttgaaattggtggtgcggcccttttgctttgggcttaatattttctccccctgtggcattaatcgccacaaacgaagactgtgagagcccttgagttactttcttccctattggtacaagtaaatatgagtgaagggatataccaatttggagtgagtggagtagcgaccaaagataaatgataccgttatagtggagtggaagccttgtcttcgtcacatacttcatttcccttccaatctatgactagaatggaaatacacctgaaaacacattattcgtagccttggtacataagaaagatgtatttgctccaaaatgaaagagatatgatcaaaggtatataatagagctatgtgt

SEQ ID NO: 6432 - DNA, 429 bp, Zea mays
agctttagttgattcacagtcccttgttggattatccccacgttagcttttccatttcttgacacatagagttctcggaggtctttgccataagacagaggcaggaagtcttacgactcaatgcatctgccaccacattggctttccctgggtgaaaatggatctccaagtcataatctttaatgagctcaagccatcgcctttgcctcatatttaactctgactgggtgaagatgtacttcaaacttttatgatctgtatatatgtgacagatattacccagcagatagtgacgccaaatctttatggcatgaaccacagcagctagcgtcagatcatgagttggatagtgttcctcatgcccgcgcaactgtcttgaagcatacgcaatcactcaaccctcttgcatcatacacagccgagcccact

SEQ ID NO: 6433 - DNA, 270 bp, Zea mays
tttcttcttcatgagcccctggcgttattattaatgaagtctgctaacgcctgggactgaattgaggatctatgcacatattctatggtgaattcactaagttttgtagcccattttccaattcttccagtagcttctctattcctcataatgatctttagaggctgtgacgaacgaacaattatgcagtatgctttaaaataatgcctgaactttctggttgcagcgtcacaacatatagcggcctcttcgaatatgtatatttttttt

SEQ ID NO: 6434 - DNA, 433 bp, Zea mays
  unsure (1)..(433): unsure at all n locations
agctttacctgccctatgaatatttacattaattagctatttcacagctatttgttgtcctacatccgttggtacgatcgaaacgcgtgtgaaagtcttcgctagtctgatttggtgtggccagtcatccaattagccagctagtaattggtttctgagccgttaggatagaacaaattcatgccacatagcggctcggtctgatagatttggggagccgaatggttcagcaagcctaatttttnttagtcactctatcccacatggaaccgatcacaactaaattaagaacggagcgagttcatcctaccctactctagaactaaatactaccttaatctcanactgtggctcgctggttggcagtatgaataacagtttcttttcttctccgtttgcttctccatgcgtggtcagccgatgggcatcgatg

SEQ ID NO: 6435 - DNA, 411 bp, Zea mays
  unsure (1)..(411): unsure at all n locations
agcttctaaaggggaacacattttatgcctaaccaatgttcattttgagaaagacaggatttgtagtgcatgtcaagcatggaagcatgttggagttcatcatccacacaagaacattatgacgaccgagagaccgcttgagctactccacatggatctattcggcccgattgcctacataagaatcggtgggagtaagtattgtcttgtaattgtggacaattattctcgcttcacttgggtgttctttctacagggaaatcataaacccaagagaccttaaagaaattgttgagatgagctcaaaatgagttcggattgagaatcaagaagattagattcttgaggaggagggtttcaacatgagttctcttctccttacacacctcacaaaggtgntgtgagagaaaa

SEQ ID NO: 6436 - DNA, 333 bp, Zea mays
  unsure (1)..(333): unsure at all n locations
cctattaaactaagctccaaagggggaacacgtgataggtctaacanatgtactttctatatagatagaccttatgcagcttgtcaagcacgtaaacaggtgggaagctctcatcataccaaaaatgtgatgaccacatcaagacctttggagttgctacatatggacctctttggacccgtcgcctacctaagcttaagaggaagtaagtatggtcttgttataattgatgatttttccctcttcatttgggtattctttttgcacgataagtcagaaacccaagggagcctcaagcgcttcctaaggagagctcaaaatgagtttgagctc

SEQ ID NO: 6437 - DNA, 437 bp, Zea mays
  unsure (1)..(437): unsure at all n locations
ccaccacagaggaatcaataaaatataaatatcatcctttccaaagtaaaactggatagaaacaatgttggatagatcgtaggacgatcaggatagacctaggacgtgaagccttacgatgatagaagggtagctaggtggctaagtgattaagccctacaggctactataagggatgggagttcttccctattccctttatattgatgtgaggtcgttcaagatgagcatgcatgcattcttaaattaaacaaatggataattgagtaaggactntaatacaaaatgatgaccaactaagtaccccagtaccattgttatatttagagagaggctgagttgtgttcctttnttctttntataattctttntcttttacttacgcttaaccgtacacaaatgacttcccacggatcctcaaacgacgggaatgcact

SEQ ID NO: 6438 - DNA, 338 bp, Zea mays
tggcaaaatactgagtcgtatgtctggtctaagcccattgatcatggcctcaatgacaatgtcattgggtattgtaggcgctagtgctctcagacgcaggaaccttcggacatatgcctgaaggtactcctcatggtcttgtgtgcagtggaacaaagcctgagcagtgactggcttcatctaaaatccttggaagctagtgattagcatatccttcagcttctaccaagatgggattgtccctggccggagagaagagtactcaagttgtgcgacactttttaccaccatgacgaagggattcgccatgactacagtgttcgcaccatatgaagata

SEQ ID NO: 6439 - DNA, 446 bp, Zea mays
agcttagtctgatggcatgagtgagtggctctatttttttcttctggtgatctaattaatagtttcctcttcaaaggatagtttgatatattatgcttttccacaaatgacttttttacaaaagagtgagatgctccaaaatcaaataaaactgatgcaggtatggagttaataaggaacatgccatacaccacatcggcatcctctggaactatttctgctatcacatgattaattcttcccttactctggttctgcgcagtcttgttctgtgcagtaccatgagcaggtgtattctgatcaactctctgaatgttgttcctttggggtgtctgtgggttgcgcttaaggcaattgttggcatagtgaccaatttctccacacttaaaacatccactgggttgaactagagtagttttattgggtattttaataggtgtgttcat

SEQ ID NO: 6440 - DNA, 146 bp, Zea mays
cccgaagaggctccttcacattatcacgtcaaaaaacttttgtgtcgtgtttatacctaactcaggctggttggcactagtataactacccgcctatgtctatgacgtaatgcagcttgtgatcatctaacaacagaaacctttcg

SEQ ID NO: 6441 - DNA, 432 bp, Zea mays
agctttatcaaatggacgtgaagagtgccttcctcaatggaccaatcaacgaagaggtctatgttgagcaaccttccggctttaaagatagcgagaacccttaccatgtttataaactatctaagccactttatgggctcaaagcagccccaagagcatgtatgtatgccaaatttatgttgatgatatcatatttgggtctactaacaaatctacttgtgaatagtttagtaagataatggttcaaaaattcgagatgtctatgatgggggagttgaagtatttcttaggatttcagtcaagcaactccaagagggcaccttcatcagccaaacgaagtacattcaagatatactcaccaagtttgggatgaaggatgccaagcccatcaagacacccatgggaaccaatgggcatctcgacctcgacacg

SEQ ID NO: 6442 - DNA, 361 bp, Zea mays
cgacttcgtcatcctgcacataacagagtgtttattgtatatagaaatcttaggagaaggttagcaacgggtacaagtttaataccgacttgagatgacttctagctttggcaccagcagagtctcgcccacccttcgtctagaattgtggtataaatctatatccaatgcttcgggccaggctggggatgtcagtcaagtcagctggtgataggctgtaagttggcatgtttacaatttttccatgcgtgcgactagccttcataaaagctacagctgtgtcgcgagaagctagcagggcacataagtcaccatgctcagctataacttcgtcaagcaccttaacttcgccctcaatatg

SEQ ID NO: 6443 - DNA, 289 bp, Zea mays
gtcagctaaatacaacaaatgccagctccttgtgctaggttagtacttaatggcttctacttctatttgctggcgcgcaaatgaaggtagtaatttgtatactgtcacgtaaattgaaacttgtaattgtaataatcttaaggaatctggtcaaattgaggagaacatttttacagtttaccgaatcaatgattcttcaccaataagaatgtgtaatatataaaggttggtcaaagcccctgagtggatccgaagtgatcatccagtgatggacgcggctccatacact

SEQ ID NO: 6444 - DNA, 478 bp, Zea mays
  unsure (1)..(478): unsure at all n locations
ctatgaaagctggactatgcttccnctgcacaagatgttggntttgttctatattagtttgaaatatttcttcatcaactgactcctgaagctttgattagagttggagtcttcatctgggcaataaggagccaacgaataaaaccagatgctgattgcttttgtaatattcatgagttgtcctatcatacgaaggctactataaaatagcagtatcacaataactttgtgtgttatacctttgcataccgatcagatgctaggcaacccttgccaacttttcgggaaaatggtcgggctcatggatgaagcaattggttttgcgtgaagaatgancttagataaagaagtgatttatggatgtaatccagtggcatatttgattctgcctggaataaagaggccaactatttgtgaacacagaaaatctcacgcttgactgactgctttcaacgatgtgtgcatccacatcagtact

SEQ ID NO: 6445 - DNA, 444 bp, Zea mays
  unsure (1)..(444): unsure at all n locations
agcttcanaggggtgccatctgatactctcttgatagctgttgttgtatgaaaactttaccaatggtaaacattcatcccatttctgtgggtattccaaaacgcatgctcgtaacatgtcttcaagtatttggttcactctctcagtctgcccactagtttggggatgataggccgaactgtatagcaacttagtacccaaagaattgtggagttcttcccaaaatttggatacaaattgtggtccgcggtctgacactatagtttttggaatcccgtgcaaactgagaatacgagcaatatacatttgggcataagtgatgaccgggtagtacgtcttaactggcagaaaatgagctattttcgtaagccgatcaattataacacaaatagaatcaaatccttttgctgtcctaggtaatcccacaatgaagtccatgctaat

SEQ ID NO: 6446 - DNA, 239 bp, Zea mays
tcttgtagaagggataacacagtgcactgtctggcacagacgcactgttttcatcatacccagcaggcgcgccgtctgctggatgaccttgacgccgcctgccaatagatgggacgggacgcattaaatgctgagagggcacgtcgcccgttagcgcaatggcaagcggcgcgttctctcctaataaatgcagggactgcacggtttcacgtcatgcttgacccgatagcttatgtcat

SEQ ID NO: 6447 - DNA, 452 bp, Zea mays
  unsure (1)..(452): unsure at all n locations
ggatcttaagtcacctgagctgtcactgatgagaaaaacatggctttttttcttgtgaagaatgtgagagatatgaataggctaagaaggaagctctccaacacctacaccaataaggtgaataagaaggctaccacacgatatatgttgaagaaatgaaatatggcacctatggaggccatcaaagtaagcaagtgagccaccataaaacgacctatatgaattttggtgccaaaaggaattgtntaaaccgtgaacaacaccaagaacgtttgtatctcatatgtaaagtcagaagtccaatgaagtggactaacctttactctagtattatgaatgagattgatttaacttaacatacaaggttcaacaagatttgcgaccatgaaaagaatgagtgtgtcttaacatggaaagtggaaggatgaatagcaaatacaatgacctaagac

SEQ ID NO: 6448 - DNA, 182 bp, Zea mays
gtcatccgtcactttactcaactacaatgttactgatgaacctgaattcatattcccactagaacacgctatgatttatgcgaccaaacaataattgatggctgaactactgataataaaaaatactttcggcgacagccagacacacctgtgaagataaacaatattcggtggctgacacc

SEQ ID NO: 6449 - DNA, 438 bp, Zea mays
  unsure (1)..(438): unsure at all n locations
agcttatgatctgtccttaatgggatatatatatccgtagcgagagtagtcatctgtgaaggctatgaaagagtaaacccatctactgtcctaactagaaaagaactatagatatatgtatgaataatntctaacactctcgtacagcgcttgcaatctctgcattgctctaagtctgtgaaatctacgtgatggagaatctgttccttaacgagacgttctattctccccctcgaaacatggcccaaatgatagntgccataatttgatgaggtttccctatcacttcgttttcttactcttgccactgttggctggattggtttctggtgtatctaagacgttaatagcaccattgtgcaaagataaataagcatgtcgcgtcggatggcgagaccaacatctttattatcaaactgaataacacacaatctctgt

SEQ ID NO: 6450 - DNA, 256 bp, Zea mays
ctggactatgcttcccctgcacaagaagatggttgttttttatatatagtttgacataattcttcatcaactgactcctgaagctctgattacagtcggagtcttcatctgggcaataaagagaccaaggaattcaaccacaccccgattgctcttggtaaattcaagaattgtcccatcatacgaaggcctcttagtaagtaccagttctacaaaaactttggttgttatacctttgcataccgatcaaatgcta

SEQ ID NO: 6451 - DNA, 410 bp, Zea mays
agcttatgaagagtcttcatcccaacatgggctatttggcggtgccagagccaacccatgttagtcttagcaattaagcatgtgtcaagttcagctctatcaaaatctactaagtatagctgaccctctaacacacccttaaatgctattgaatcatcacttcttctaagacagtgacacctgtatcagtaaaaagacagttgtacgcatttgacataaatgggaaacagaaagcaagttgtaatctaaagaatcaacaagaaaaacattggaaatagaatggtcaggagatatagcaattttaccaagtcctttgaccaaaccttgatttccatccccgaatgtgatagctcggtggggatcttgtgttttctcatatgaagagaacattcttttctccccggtcatgt

SEQ ID NO: 6452 - DNA, 346 bp, Zea mays
attaaactcagctggcctgactgatcgtcctaccgggagagggttttatcttttctcctccgactgcctgacgaagacttcgcatgactgtgtattgccctatacaagaatagtgcttataactcatagaaactgcttggatctgaggcccctatacatgggagctaaggggcttgtatatgaggacatcgcgtgcctgtattctgatgtagggagaagcatatcaaagcaaatttcatgaggaaatcatcataccatcatcatcttgttgaatatctgacgaacttcttgggaggcttcgcctgacatctgagtagatacgattcttaatacttatcatctcttt

SEQ ID NO: 6453 - DNA, 441 bp, Zea mays
  unsure (1)..(441): unsure at all n locations
agcttctaaagggagaacacattctgggactaactaatgttcattntgagaaagacagggtttgtagcgcatgtcaagcaggaaagcaagttggcgcccaccatccacacaagaacattatgatgattgacaggtcgcttgagctactccacatggatttattcggcacgatagcttacataagcatcggcgggagtaagtactatctagttattgtggatgattattctcgcttcacttgggtgttctttttgcaggaaaaaccacagacccaagagaccttaaaaggattcttgagacgggctcaaaatgagttcggattaagaatcanaaagataagaagcgataatgggatggagttcaagaattctcaaattgaagggtttcttaaggacgagggcatcaagcatgaggtctcttctccctacacacctcaacaaa

SEQ ID NO: 6454 - DNA, 438 bp, Zea mays
  unsure (1)..(438): unsure at all n locations
agcttcagctccatctatgttattgttttcttttgagtcagnccaatcgccttcggcccttctggcagcttcctgacttccatgaatagcgatgggtccttgatccgaaggtatcttcatgcaaagataagcaggatgaagaattgcttctaaagcattgagggtgccaccaccaataattgcattgtaagggtattccatgtcaacaatgtcaaacacaacttgctcagttctagtattgttgatgaacccgaaggtcactgacatggtaatcttgcccagtgctacaatttgtcttcctccgaagccacagagaggatgggtagcatcatgaatcttatcttctggctctcgcatttgtctgaaggccttatcaaatatgatgtcagctgcactgcctgtgtcaaccaagacattgtggaccacaaatcctttgat

SEQ ID NO: 6455 - DNA, 357 bp, Zea mays
cgtgaaggctcttcatccacacatgtgctaagcggcgatgccacatcaaaccatgctagttatagcaattaagcatgcatctagaccgacctcctcttttgcaaaatcaactaagtaaagtttgtcgtctaatacacccttaaaggctaatgaaccatcacttcttctaaagacagacacatctatattagtgaataaacagttatatcctatattgcataattgactaacagataacaaattgtgtcctagacactcaactaaaaacacattatatatagagtgctcggatgatatagcaattttacctaacccttataccttgccttgattcccatcaccgaatattattgaatc

SEQ ID NO: 6456 - DNA, 423 bp, Zea mays
agcttctagatatgtcgaggtgacaatatgatgatggtgaattggtagttacgaaggtcgcagctaagcaacttcgtcggctgcccatcattcctcggctttcaaggttgttcctcaacaaggaaatagctctgcatatgacatggccaaagaatggtgtacgtctcgtcactgatccagacataatggtccatccgtcggacggtgatgcgtggaaggcatttgacgagtttgatcccgaatttgcaaacgaccctatgagtgtacggcttggtctatcgatggatggattcacacctttcaataccagtgcaagcccttactcgtgttggcctgtcttcattgtgccatataatcttcctcctgagttggtcaataaagaagatacatgttccttgcactagtcatcccaggccccgagca

SEQ ID NO: 6457 - DNA, 348 bp, Zea mays
tctaagggagaacacattctacgactaacaaatttattttgttatataatgatatgtagcgcatgccaagcaggaaagcaagttggcactcatcatccgcataagaacataatgacgaccgacaggccactggagctcctgcacatggatctattctgcccgatcgcttacataagcatctgcgggagtaagtactgtctagatattgtggatgattattctcgcttcacttcggtattctttttacacgaagaatcttatacccaagagaccttatagggattcctgagaccggctcaaaatgagttcggcttaaggatcaagaaaataagaagcgacaaccggacg

SEQ ID NO: 6458 - DNA, 445 bp, Zea mays
  unsure (1)..(445): unsure at all n locations
gcttatgaagattcttcattccagtatgtgctatatggcggtgctagagctagcccatattagtcttagctattaaacatgcatctagattgacatattctttagaaaaatcaactaaatagagttttccgtctaatacacctttaaaagctaatgaaccatcacttcttctaaagacagatacatcaatatttgtaaataaacaactatagtccatatgacataattgatttatagaaagtaaattgtaaccaagcgattctactaagaacacattagaaattgaatgctcggtagtgatggctattttaccctaacctttgaccttgccttgattcccatctccaaatatgatcgtgtcgtgggaatccttgttcttgacgtangaagtgaacatcttcttctcccccgtcatgtgatttgtgcatacgctatcactaatcta

SEQ ID NO: 6459 - DNA, 348 bp, Zea mays
  unsure (1)..(348): unsure at all n locations
cgtgaaggctcttcatccncacatgtgctaagcggcgatgccacaacaaaccatgcctagtttagcaattaagcatgcatctagaccgacctcctcttttgcaaaatcaactaagtaaagtttgtcgtctaatacacccttaaaggctaatgaaccatcacttcttctaaagacagacacatctatattagtgaataaacagttatatcctatattgcataattgactaacagataacaaattgtatccaagagactcaactaanaacacattagatatagagtgctcggatgaaatagcaattntaacctaaccctttaccttgccttgattcccatcaccgaatat

SEQ ID NO: 6460 - DNA, 443 bp, Zea mays
  unsure (1)..(443): unsure at all n locations
agctngcaacaatcgagcttgcattggaagcacttgactcgttctatttgaaacattacctgcagataattactaagaagctttattacatacatgtgaattaacttgccattttctttgattttatataactgaaaatagtcctaactattcaatggcacctacaaaactcttcttccactgacacaaacaaaagcaagcaacacaatagcgagacatgaacaacaactgctgtggataactcctttaacccaatggcatatcacctccaccgcccaccttgctggagaatcccggcagcaacaagttttcctttttacctgcacagagtaaaatgtatgtttttagctgaagtggaattacccatattcattatgactcaccctgctatacacactgtattgaataatataatncttttgtaccaaaaaagccaccaagta

SEQ ID NO: 6461 - DNA, 123 bp, Zea mays
aatatccgctaattgatcttccgatctcactccttctaaaatgatatctcctttagcaacatgatctctaggaagtgatgacggatatcaatgtgctcggtgcgagagtgttgaacaggatta

SEQ ID NO: 6462 - DNA, 437 bp, Zea mays
  unsure (1)..(437): unsure at all n locations
agcttaatgatgagttggctagtcttaatgcccatctcaagactagcaggaatgaatntgataaactaaaatttgcaagggatgcctacacgatcggtagacacccctcaattaaggatggacttggcttcaagagggaagccaaaaacttaacaagccataaggctcccattcccgctaaggagaaagggaaggcccctatagctactagtgctaaaaaaaaccatgcctttttgtatcatgataggagacaaactataaatgcttataggagttataatgcttacgatgatttttctcatgctatgtttgcttctagctcttcatatgtgcatgatagaaatgttggtaaaaggaatgttgttcataatatgcctatgagaaatgttgttaatgctcctaggatagtaaatgaaccttctacaatatatcatgct

SEQ ID NO: 6463 - DNA, 390 bp, Zea mays
  unsure (1)..(390): unsure at all n locations
tcttgtgagtattaaatatacttcaactcgtgtattggtttcagtcataaaattaaatctttcatacccttttccttattatcttgaaatatgctcatggggctcacttatggtttttattatggttacaacattcttacctttttgaaagacccatttgttttgatcatgatacttttaagtatatgcttggtgaattctttattcttaagataatttgatgctcatgcttactcttgttcacataaaataatggatcttggtttggcattttaagagaagccctatgtgacactanggtgtcacagacttgtggagaatattaaacaaggaatgcaatctgaattctagttgttgtaaagtatataactatccaactagaagttcatg

SEQ ID NO: 6464 - DNA, 177 bp, Zea mays
  unsure (1)..(177): unsure at all n locations
agctngactcaggtatccacacattaatccttaattcctttttcccgtcttatggacaaggcatccttcctggatccgagtccatagactaacatagatcctgttatcaagatgaatacaatcaattcctgacctcgcgcgagtgctagaaaaatcactcgacttctaccgagatca

SEQ ID NO: 6465 - DNA, 445 bp, Zea mays
tctgagtcacctgcggcatgcaagcttaggctgtctccgagaccgaaccggagcgatgttatcggtactctgtcgaagagaattggttttccgaagctggagactgacatcagccgctaccgatgacagcatatcacccgctggttattctattctaatttcaaggtaaaaacttttcttcgactctttatacgttttaacaatgaaagtgtttgctaacaaagattgcttctgcatagagcatgctattgaataaagctttgaggatgcaacaagatcttgtggataaatagcatgaagttataatcgagggtttagaatacaaaataaacgatcaagcagctgcctcttgaaagaagggattcgaacttcagacggtagagggtttattggcagaagctgaagctaaaatttgcaaagtgaataccgagcttctctcatagtc

SEQ ID NO: 6466 - DNA, 122 bp, Zea mays
  unsure (1)..(122): unsure at all n locations
agcgcatgccaagccgggaagcgagttggcactcatcattcacacaagaacattatgacacgtgacaagccacctggagctgcttcacatggatctattctgcccgancgcttacataaaca

SEQ ID NO: 6467 - DNA, 441 bp, Zea mays
  unsure (1)..(441): unsure at all n locations
agcttcgttagatgcggccccagtggacttattcttataggtnaggattccgncattacctttagaatttcttctatgtcagtagcagaaagtgttgaaggagtctcttcttctatctcagatgtttttggcttcggagccgcgccttcctcttcttcggagctgccaccttcggctcagggctggattttctcttttttagagtttcttcatcttctttcaccatcctagcagcttgtctgctcagaacactaacaatcatttttctcttttgcccttcggcacccttgttcaatcgctcatagtcaggatattcaaagttcagggcatccatcacccgattcaaccttcgttttggttgggtgtcgaaagctgcagtcatcagctgatcnttctttttagtgtaattacccaaaatttccttgcacatagtttctatca

SEQ ID NO: 6468 - DNA, 268 bp, Zea mays
  unsure (1)..(268): unsure at all n locations
ctcttcatcctcacatgtgctgagcggcgatgccacaactatccatgctacttctagcaatcaagcgtgcatcatagaccgacgctactgttctgcaaaatcaagtatgtacatgctgacatataatacaccgataaatgctaatgaagcatcacttgttcttaagacagagacagctatgttagggaataaacagttatatactatatagcatacatgactagcagatgacaaatngcatccaagagactcaactgaaaacgcatta

SEQ ID NO: 6469 - DNA, 444 bp, Zea mays
  unsure (1)..(444): unsure at all n locations
nngcagctgtagaactctctcacatcctctagatnagcttgattattctgtagntctgggtactcattcctaatatcatccaacatctcttccattcggtctacatcctggtccccattcgactcaatagtatggtccacctctcctgctcatgccataccagatagttcggcataaagccatgtttgaaaacatgatatgagagctccacttttttcaactgaaccaagttccgacattntatacacgggcacttcgctaaacaagcatcaccagcaaatacgagtgccacgaatttatctgcaactctcacccatgcattagagtgcccatgagtgacactgtcgaatcatcgtacatcgcccttcttcgatcatcactcacattcaaagctaaagaaatagcacatatttaacaacatatggtttggcacatattcaaagc

SEQ ID NO: 6470 - DNA, 144 bp, Zea mays
actctttgcttgtggtgcaacagataaaatgggagctcaatggtggatggttgtgcgtaatattacaaaaaggctaagtggtattaaaaagacggatactttccatatcacacatatatccagtgagaagaatggccgagctta

SEQ ID NO: 6471 - DNA, 354 bp, Zea mays
agcttgccaatacctgtcaaagcaacagcacatgctagcgcagcagctgcagaccataccagtaacttggcctttcgcatgctggggactggatatgattggacctttcaagaaagctcaaggaggatatacccatgtattggtggcaattgacaaattcactaaatggataaagtttcagcccattgcttctttaacctctgctaaagccgtggaattcatacaaagcataatatttagattcgggataccaaacagtatcattactgacttgggatccaacttcaccagctcagaattctttgacttctgcgagcaaaagagcattcagatcaagtacgcatccgtagcaca

SEQ ID NO: 6472 - DNA, 345 bp, Zea mays
  unsure (1)..(345): unsure at all n locations
taatgcccctaaaaaaatgtctaactatgttaagggcaaagtctctggttcatgataacgagggttacattatataccctgtcggttattccgaacacaaaatcaggagaattcactctaggaagtctcaccctggatctcatcatgcctttatgtataagagtgaggcatctagttcgaggcaatccactcatgctaaattgcctaagaagaaaactcctattgcatcaaatgatcataacatttcatttaagactttngatgcatcatatgttttaactaacaaatcaggcaaagtagttgccaaatatgttgtggccaaacacaatggctcaaagacttgtg

SEQ ID NO: 6473 - DNA, 431 bp, Zea mays
  unsure (1)..(431): unsure at all n locations
agcttatgaagattcttcattccaacatgggctagtcggcggtgccagagccaacccatgttagtcttagcaattaagcaagtgtcgagttcagctctatcaaaatctaccaagtatagctgaccctctaatactcccttaaatgctattgaatcatcacttcttctaaagacagtgacacctacatcagtgaatagacagttgtagcccatttgacataattgagatacggaaagcaaattgtaatctagagaatctacaagaaaaacattggaaatagaatggtcaggagatatagcaattttacccaaaccttngaccaaaccttgatttccatccccgaatgtgatcgctctttggggatcttggtttttctcgtaagaggagaacattttcttctcccctgcatgtggtttggcacccgctgtcga

SEQ ID NO: 6474 - DNA, 242 bp, Zea mays
actatcagaactaagcatctcctctaaacatagctatgccgagagatcgcgctttttctatgtcttcactgcgcactgcagacctaggaggcactggactatccatgacctccactgaaggcgcgttcaattgacccgaaaaatactgacgatggtagggtgagccactgagccgctgatgtggctagcccaccgtgatgctcgtgctcaccactagcaatatcactgagggacccacctag

SEQ ID NO: 6475 - DNA, 345 bp, Zea mays
agcttctaaagggagaacacgtaatatgtctaaccaatgttactttcgaaaaagatagaccttgtgcagcttgtcaagcagggaaacaggtgggaagctctcatcatgccaaaaatgtgatgacgacatcaagacccctggagttacttcatatggacctcttcggacctgtcgcctatctaagcataggaggaagtaagtatggtcttgcttaattgatgatttttcccgcttcacttgcgtattctttttgcaggataaatctgaaaccaaaggaccctcaagcgcttcctaaggagagctcaaaatgagtttgagctctacgtgaagaagataatgagcgac

SEQ ID NO: 6476 - DNA, 348 bp, Zea mays
tcaggccgtgtgcataagtggtgcggcagaggcaccattaattttatcctctcctggaatagaactagtgtagtactatcacgcacgaagctcgtttcatttgaataaacaactgggcaatacgccttatccctttcagaagcacagctcatttgctttcccatcgaatctgatagcttccctttcccctcctccgtgtagttaaattgatgtctctgtatgaacactgtttgaggcgactagtatgaaccactgttgcggcgactagacgtattgaacataactttttttctttcagttgactcagcatgacttgaacagtctcacattgtgtgtaaaggatttact

SEQ ID NO: 6477 - DNA, 441 bp, Zea mays
agcttcgctctggaatctgatagatgcacaaacaacatagcagaatacgaagctgtcatcctcggcctctgcaagctaagggcccttggtgtcaccacctgcattgtcagaacagactccaaggtagtcgctggccaagtcgagaaagactatgcagcaaaggaccccgcacttatgcaatacctcgcgaccatctgcagtctcaagaaacaattcaagggattcaccttgcagcatgtggaccgggccaagaatgaagaagccgacgcattggccaaggctgccgccagaggcgagtccctgccctccgacgtgttctaccatgttatcggcacgccagccgtccggagccccgaagggctccaaataaccaatgacagcgagggccaccgcatagtcaaccttattatgaccgaagactggcgggcaccaataaccctg

SEQ ID NO: 6478 - DNA, 450 bp, Zea mays
  unsure (1)..(450): unsure at all n locations
tcgtcacttgaaagaacaatgcattggaggaaagaattattttttctccagtcttcactgtgtactggagaaatagtaagcactgctctttccatgagctcaactgaaggtgctattattgtttcaaaaaatacttccgagggtagggggagccactgagccgctgatttggctagcaaatctgcatgctcattttcacctcttggaatattcttgacggaaaaaccttcaaaggaagcttncaaccttcgaactgcatccagatatttttcaagcttcggatctcgtgccttgcaactnttatccacgtggccagtaataacttgagaatcagtctttagaatggcccttcttattcccattgcccttagtttccgaagccccaatagaagtgctttgtactcagcaatattatatgtgcaactgaaatccagtntgactgcataacat

SEQ ID NO: 6479 - DNA, 420 bp, Zea mays
  unsure (1)..(420): unsure at all n locations
agcttgtgaaggttcttcatccncacatgtgctatagctgtgatgccacagccagcccatgctagtcttagctattaagcatgcatctagaccggcctcttcttttgcaaaatctactaaataaagtttgccggctaatacacccttaaaagctagtgaaccatcacttcttctaaagacagacacatctacatttgtaaatagacagttatatcccatattgcataattgactcacagatagcagattatatccaagagactcaactaaaaacacattagatatggagtgctcattagaaattgcaattntacctaaaccttntaccttgccttgattcccatcaccgaatataattgaatcttgggaatctttattcttgacgtaggaggtgaacatcttcttctcccccgtcatatg

SEQ ID NO: 6480 - DNA, 291 bp, Zea mays
  unsure (1)..(291): unsure at all n locations
caacttgtgaataatccttggccataagtccggctttgttccctggcaccacaccatgctcatctttcttgttacggaagacccactnggttcctacaacattttggttaggacgtggaactaaatgtcatacctcattcctcgtgaagatgttgaggtcctcttgcattgccaacacccaatccgaattccttaatgcgtcttccaccctgtatggctcaatagaagacacaaacgagtaatgttcacaaaaatgagccacacgagatcgagtggttaccctcttatgaa

SEQ ID NO: 6481 - DNA, 437 bp, Zea mays
agcttcagcagaatgacagcgaaggttctctattcttatatagcaggaatgcgctaacttatgttgatgatatcattgtaaaaagcacgaagcaagataatcacattgctgatctgcaggagaccttcgctaattttagacaatctagtttaaagctgaatccagaaaaatgtgtcttcggagtgaagaaggggagaattcttggttgcctagtttcaacaaagggaattgaggctaatccaagcaaaatcgaagctatacttcgaatggaaccaccaagtacaaagaagggggctcaaagattgacagaaaggctggcatctctcaacagattcatatctagatcagcagagagaaatttaccatttttcgaaatgctgatatcagccgaagtttttctatggggaccagtccagcagagagacttcgaagaactg

SEQ ID NO: 6482 - DNA, 325 bp, Zea mays
  unsure (1)..(325): unsure at all n locations
actcgatggatagnggctgggggtttctacttcaaaatatacttgactatgctgagatccaccgcaatgcccttggcagataatacatgtcccagaaattggatctcctccagccagaatgtgcacttattgaacatagcatataattggtgctcccttaagtgcgttaatacgatcccgcaatgtcgagcatgctcctcttcattttagaagatatcaaatatcatcaatgaataacaccacgaatttatccaactcgggcatgaataccgagttcataagatatgtgaagtgtgcacgagtatttgttagtccgaaagacata

SEQ ID NO: 6483 - DNA, 432 bp, Zea mays
  unsure (1)..(432): unsure at all n locations
agctntacgatttgtttgcgatttgtaatagcaatgtatccgtgtcctgtcctacttcagatcctgctgaagcgtcttcgggccctcagccgaaaggagacgacgaaattaaaaagatggctgaagatatcatggacgaagtcgtcaatcggcttctgaacgaggctgcagaagtcgttttgagagaagattgagtatttgtgtaaaaacttctggaatgtaatatactgtaacattttgtaaccccaaatgtaatatacctatttttgttagtcaattctttacgatgcatgaaactttatacgtaccgcttttgagtctttgacgaaaaaacaccttcccttcttttcatgcttcgtgaagaagaaattttctttgtcacaacaatatccagtgttctgatgaataatatccaagcttcgtaaagatatt

SEQ ID NO: 6484 - DNA, 440 bp, Zea mays
  unsure (1)..(440): unsure at all n locations
aaagtcataaaatgaccctaagaataaacttgaatcattttatacccctgagataccagaaaccctaattggaaccctggaaaaccctaaaaccaaaccctatgggcttatatgcaaaattagtccacttttggactaaagtgcaaaaaccaagccaaataagtgtcttaagtcctttggttcacaaatatgtggacttgaaagcaaaaccctaagttatgggtttatttgcaaaaagtaccacttgacctctatatggcctaagtctgaaattagtgttgtgagcacaactttgagcccttgtaactgtcaaagcatatggttattgccctatgtcaccacaccaaatttgaagatctatcacagaagaacaactttgcttaacgtggaagcatggttgtaagagtatntgagagataattagctcaaagtcggctgtc

SEQ ID NO: 6485 - DNA, 309 bp, Zea mays
  unsure (1)..(309): unsure at all n locations
agcttctatcatattggaaagattccaaaaatctgtataggaattggtgcttctagctgaggaaaaagaacaactgattgtataaaagaaggtaggactcactgtttccttttatgcaaaatattggttggttgattacccttttcttttcttttttttccaaagagcgcaagagaactgtgcacccatgtattaaagtaaaggggataggggggggggggcataaaggacctagatacaatggctccttattgaggccagaagcaatttcttactcaattctatacataataatcaaaacttanaaac

SEQ ID NO: 6486 - DNA, 250 bp, Zea mays
agctcactagataatgatgaagctcgaattattatttcgtagaaactctaataactcttgcttaacgcttgtaaagaatattgtatatttagacatagaatctactctgttaatctggtccataccttgtaatatatttttacctttccatcaatgtgtgaagtgcttcgatgtgaacgaaacttgtactctatgagcccaaggcgaaaaacaccattccttctttcttacacagatgaagcatgatttt

SEQ ID NO: 6487 - DNA, 441 bp, Zea mays
agcttctaaagggagaacacactttacgattattttatgttcatcttgagaaagacaggatttgtagcgcatgccatgcacggaagcaagttggtacccatcatccacacaaaaacatcatgacgaccgacaggccactggagctcctacacatggacctattctgcccgattgcttacataagcatcggcgggagtaagtactgtctagctattgcggatgattattctcgcttcactagagtgttctttttgcaagaaaaatctcatacccaagaaaccttaaagggattcttgagacgggctcaaaatgagttccgcttaagaatcaagataactagaagcgacaatgggacggagttcaagaactctcaaattgaatggcttcttgaggaggacggaatcaagcatgagttctcttcttcctacacctctcaacaaa

SEQ ID NO: 6488 - DNA, 441 bp, Zea mays
  unsure (1)..(441): unsure at all n locations
agcttcggctttgaanaacagattttagtgtttccgaagatgtctgaagctgccaagaaggctgctgctgaaatgaagctgagtcttgatgaagagaagaacttatggtttcttatatcaatgtcgaagaccaacacagaatagatcaccagggaaattctggaagggctgtctgaagatactggtgacagtgaaagttacgatgtggacagcggtggcgaagactccgaagatcgcccctggcgaccaagccattcagtttatggtaaatcaactatcaaagagaatcatcttgttaatatgagaggaaggtattttcgggatctgtccattgtgagggcggacgaaggggaaaaaacttgtccacatcctgaagaaaatgaagttgtggtgtaccgaaactttttgaaagccggattgcgattccccttgagcagcttc

SEQ ID NO: 6489 - DNA, 429 bp, Zea mays
  unsure (1)..(429): unsure at all n locations
agcttacacagtaacacaggtgtcaatctttcctattctgcagtcatggtccgagataactctnttgcacaaagctggcggaagaaatagctcaactccgaaagtgctagccagacatgctcagggacataggctcgaaccatcgtaggaagaatccgttcaatccatatgtggacgtcatgactcttcatccctaagactcgcagagtagataagttcaccccctactcaggttagctgcatacccatcagggaacatcaacatcttgatccactgaaatacttccttcctctgggccctacttaggatgaaatcggccttaggctttctccatgtctttccaccactaggtggcttcatctcttggtttggtctatcacataacgctgctagatccactcttgcctttacngtatcctttgacttat

SEQ ID NO: 6490 - DNA, 332 bp, Zea mays
  unsure (1)..(332): unsure at all n locations
cgccacattaaatacactctaaattggttattagttcatcattatatatcaccacaaggtagcagtcaggagagactcaccattgaagacaacatgaagcccaagatgcgccaattgatgctgcttatttcaatgaaccagcaggtagtaccttagcccgtaaagacatcacaaagtcttcgatgccttctttatcatcatcgcctcctgatgcacactcctagcatcatcactctatccttagagtgcactctcctgatanactggttggggatttacatctttttcgacattataatttcaagtgtgtgtgcctatgctgaatactctga

SEQ ID NO: 6491 - DNA, 422 bp, Zea mays
  unsure (1)..(422): unsure at all n locations
agctngcgagagacacctaattgtgtggtgatccttacacggtcttagtgacccgtgagattaagaagaagcactcaaccggtttgagtgaccgattgagagagggaaatggttgaaatagacctagcctttgtggcctcctcaacggggactaagttctttggaactgaacctcggtaaaacaaatcaccgtgtccactcgtcaatcctcacttgatttgtttttcctctctaaaaattcccttgctcatattgatttgagtttgcccccaaaggtcatcagcattgattgagcaactctaagcaaggagaactatcatttaattataatgctaaccccgaccttaagtgcaagttaagtttataaatttcaggttttgcctattacccccctcttagcgactntcagaagcaatcgtacg

SEQ ID NO: 6492 - DNA, 307 bp, Zea mays
  unsure (1)..(307): unsure at all n locations
tctaagggagaacacattntatgactaataaagtgtcatttgttaattacatgatttgtagcgcatgccaagctgagaagcatgttggcactcatcatccacacaagaacatcatgacttgtgataggccactggagctcctacacatggacctattcggcccgatcgcttacataagcatcggcgggagtaagtactgtctagttattgtggatgattattctcgcttcactcgggtgttctttttgcaggataaatctcatacccaagaagacctataaggattcttgagaccggctcaaaatga

SEQ ID NO: 6493 - DNA, 402 bp, Zea mays
agctttaccaaatagacgtgaagagtgcctttctctatggaccaatcaaggaagaggtctatgttgagcaacctcccggctttgaagatagtgagtaccctaaccatgtatataatctctctaaggcgctttatgggctcaagcaagccccaagagcatggtatgaatgccttagagatttctttatcactaatggattcaaagtcggaaaggctgatcctacactctttaccaaaacacttgaaaatgatttgtttgtatgccaaatttatgttgatgatattatatttgggtctactaacgaatctacatgtgaagagtttagtaggatcatgacaaagaaattcgagatgtcaatgatgggggagttgaagtacttcttaggatttcaagtaaagcaac

SEQ ID NO: 6494 - DNA, 377 bp, Zea mays
  unsure (1)..(377): unsure at all n locations
agcttgtagaaagtaaatgacgctatatgagtcaccaacataccacgtatccccaacaacaatttgttgaatgactctgccatgttactgcactggaactcacacctccatctgaaagggaaataaggtcaaaccttttcctaaatgatnttggtggttgaaatgcccaacacaaataattggactaactagtttgctctagactatgtattctacaggtgccaaaggttcaacacaaaccaataaaaagatccaagttagggttcaaaagaaaggagcaaaagaaatcgaacagaaccctggtctgacgcatcggactgtccggtgtgccaccagacagtgtctggtgcaccangggcgatcgactcaaactcttt

SEQ ID NO: 6495 - DNA, 158 bp, Zea mays
gagcgtgctggcgtcgtccgcttgctcaggatggcgtgtgttctgcgagacagcgctcgtctttgtcttaaacgcgaagaagataaccggtgcgccccccgttggggtgccggcgctgtctactcgctcgacaggcgacgaggcgctggctcctgctt

SEQ ID NO: 6496 - DNA, 368 bp, Zea mays
agcttcccctgcacggcaaggatactcagacctcgagcgccagggcacaagaagattgcctcggcaacagacattagaggatccaagcactatattctttatgtccctgggcccacatgtcggggcctagtccttttgtgcatgccccccttcagttataaaaggggaggcatacgacgttacaaggagaggctctcagacctagctttaagcggacactcataagttcatacaagctctcaagcaatacatcacacagtggagtagggtattacgctccggtggcccgaaccactctaaaccctcgcgtgctctcatgcgttgatccaccagccttgtagcaagcaaaacgcttaggcccctcctct

SEQ ID NO: 6497 - DNA, 373 bp, Zea mays
  unsure (1)..(373): unsure at all n locations
cgtgaagattcttcatcccaacatgggctagtcggcgtacctatgtttacccatattagncttagcaattaagcaagtatcgagttcagctctattaaaatcaactaagtatagctgaccctctaatactcccttaaatgctactgaatcatcacttcttttaaagacagtaacacatatatccgtaaaaatacaattgtagcgcattttgcataattgagaaactgaaagcaagttgtaatctaaagaatctacaagaaaaacattggaaatggaatggtcatgtgatatagcaaatttaccaagtccttttgaccaaccttgatttccatccccgaatgtgatagctctttgggatcatggtntttctcat

SEQ ID NO: 6498 - DNA, 438 bp, Zea mays
  unsure (1)..(438): unsure at all n locations
agcttctaaagggagagcacattntgggactaactcaatgttcatttgagaaatacagggtttgtagcgcatgccaagccggaaagcaagttggtgttcatcatccacacaagaacatcatgacgaccgacaggacgcttgagctactccacatggatctattcggcccgatcgcttacataagcatcggcgggagtaagtattgtcttgtgattgtggatgactattctcgcttcacttaggtgttatttttgcatgataaatctcaaacccaagagaccttaaagggattcttgagactggctcaaaatgagctcggcttaaggatcaaaaagattagaagcgacaatggaatggagttcaagaactctcanatcgaaggcttccttgaggacgagggtatcaagcatgaagtctcttctccctacacaccacaac

SEQ ID NO: 6499 - DNA, 378 bp, Zea mays
agcttaactgagaggtccacaagagtagttatgtcattgaatctatcatctctcttattccatcaatataattgtcaagttgcagatcaagttttaacaagtcagtgcttgacatgtcattatgatagaaatcagctagcttccgtaccttgtgtgcatcaaaagaagcacaagagttggaaggatctaatgttgacatacaagaaagcagctccatattagcctcactaaaccgactatcaagctctacgctaatttgatcaatgaccccaatatatacttctcttctgaagtggtcatcattggttcggttatgaacaaatcgtgatgatcttccataaggcttataattccatccattcaggaacttggatatca

SEQ ID NO: 6500 - DNA, 430 bp, Zea mays
  unsure (1)..(430): unsure at all n locations
agctgactcggtatccaccattaatccctaatttctttttcccgtctcatggacaaggcatcctccctggatccaagtccctagactaacatatatctcgttttcaagatgaatacaatcaattcctgacctcgcgcgagtgctagaaaaatcactcgacttctaccgagatcttgattagcaagcagctactcgacctagcatactagtattcatctcaaaaaggaatcctaagttcatgcaactagaggtttcaagcaactcctacacttaagtgcacattacaatcctacaagcattaagtgtagtaaagtagcatataataatacggttatgcataaaaccggggcttgccttcaattgctggggctgcggngagatcctcaacagcagccttcgaagcttgctctggntcctctcttggacagat

SEQ ID NO: 6501 - DNA, 358 bp, Zea mays
  unsure (1)..(358): unsure at all n locations
acttcttactagcatggtcacaatagtctcatacttctccagaagggatctaaagaacttatgagtgaaattcacatctggtagatcaaaaccaagtcccttgagctcattcactatctcatttaaccggttgaacatatcggatacactttcttcttctttcataatgaattgctcaaattttcctttgcacacatatagctttgcactcttcacaattgtagttccttcatgaatttccattagcataatccanatctcatgagcagttgtgagattcttgatacngtngaactcatttatgtcaagagcatcatagaatacattcatggcttgacatttgaagaatgttctcatg

SEQ ID NO: 6502 - DNA, 439 bp, Zea mays
  unsure (1)..(439): unsure at all n locations
tagcttgagcagtgactggcttcgtctgaaaccctttggagctagttatcagcatatccatcaacttctgccaagaagtgactgtccctggccgaagagaagagtaccaggtctgagcaacgctcttgacggccatgacaaaagaatttgccatgactgcagtattgccaccatacgaagatatggntgcttcatagctcatcaagaattgcttcgggtctgtatgaccgtcatacatggggagctggggtggcttgtaagactggggccatggtgtagcctgcaattctgttgagaggggagaggcatcatcgaaagaaaagtttccatgatggaaatcttcataccagtcgtcctcattgtggaagccttcttgatggagctctcttcgtggaggccttcgggtctgatcatctngaacaagatgacgaacctcttc

SEQ ID NO: 6503 - DNA, 358 bp, Zea mays
tcaaactaagctgcatgatgttaaaatctgattgatctaggctgtcttcttttttataccggcacaagcggtgaaaagtaactcggtcaaactgacaggctatttttaacttttgcacttaggtcttacttttatcaatattggttttgaaatatcatgaggactgccttaggagagattcaaactcaaatactcatgaaaccctatgcagccaaatgcaattcacatttgctattttctaaaatatctacctatgcaatatttgaaaaatatgaggtgcatcatgccaacaaggtatttggtgatatagtggaatgggtggtgggagtaataaaattccaatttcaaactccttgtt

SEQ ID NO: 6504 - DNA, 442 bp, Zea mays
  unsure (1)..(442): unsure at all n locations
agcttctaaagggagaacatgtgataggtctaacatatgtaaccttcgaaaaagatagaccttgtgcagcttgtcaagcaagtaaacaggtgagaagctctcatcataccaaaaatgtaatggccacatcaagacctttggagttgcttcatatggacctcttcggacccgtcacctatataagcataggaggaagtaagtatggtcttgttatagttgatgattnttccctcttcacttgggtattctttttgcaggataaatctaaaacccaagggaccctcaagcgcttcctaaggagagctcaaaatgagtttgagttcaaggtgaagaagataaggagcgacaacgggtccaagttcaagaaccttcaagtggaggagtaccttgaggaggaaggaatcaagcacgagttcttcgctccctacacaccacaacaaaa

SEQ ID NO: 6505 - DNA, 287 bp, Zea mays
agtcaactagcaacaaacacaatacatgagaaagaattactaaatgagatacttggaagggcttgtcctgaagaatactgatgatagcaacatactatgatgtggagagtggatgcgaagactctgaagatcggccctggcgaccaagtcatgcagtcttcgggaaatcaactatcaaacagagtcatcttgataatatgagaggaaggtatctttgagatatgtctattgtgagggctgacgtacacagagccgttcctgctcccgaagaaaacgaagttgtgatc

SEQ ID NO: 6506 - DNA, 425 bp, Zea mays
  unsure (1)..(425): unsure at all n locations
agctntaacccctgcgagaccttccnccgtctctttctagccatggtaaatgcaatatcgtatgtcatattctatgcatgtttaatctacttgttctcttgtatggtgtactgtttgtttcctaatttgaatggatggatgtatgtatgtttgcactcgcatagagaacgatccggttgaagagcccgaagaactcgcaggagaagcccctaagcagcagtcggttagtggaggcaagtgtcccttgacccatctctgtcctattcaatctttaattcacctcccgcattacacatttatacctaaggattgactagctttgttatccatgtccttgtttacctatttgggttggattattattgcttagtcttatgctattgctcaactctaatcaatgaacatgatgagaatgatcaatgata

SEQ ID NO: 6507 - DNA, 331 bp, Zea mays
aactaagctgagtatttattacagaccagactaagtgaggcatatatattttatcaaccagggaggacgaactctccgattagtctaagtaaagacctagtggaggaccgaccctccgccttagtatgttttctttttgaaccaccttggcacagaacgcaaagttgctcttctccctaaaacaacaaggataaccctgagatggatctcacagtttacccgataagaaagacttaaggttctggatatggagtcagaagtttaaatcaaacttgttgcaaagttctaagggtctaaatcattattgcagtagtaatactgacaagtttta

SEQ ID NO: 6508 - DNA, 424 bp, Zea mays
  unsure (1)..(424): unsure at all n locations
agcnttggtgcgtgagagatttcaaacgttggtatctgggctgaggacggncggttatggtgatcttatgcccncaatcccccgcgagaatcggtccctcacaacaaattccggcgggtacggagttcggcgcggtccgcacggattgttacatggcgccgcgtcgggtggaagacagcactgctcggacgggcccacacgtcactggagccagtcaccgcgccgtgcaacactcgggtctttggagttctaggcccgcgcgtcagcgcaagcgccttcggcaccatcgcgcgcggagagtgggagaagtgggccgcacgggtgcaatggctaaatgggccgaataggtggtagccggcccgattcgaaatagttctgttttcctttttcatttctcaattcaagtagctccaaattcagattc

SEQ ID NO: 6509 - DNA, 408 bp, Zea mays
  unsure (1)..(408): unsure at all n locations
aacctttatactctatagtcctctacgagaactctaatttattttctcatattacggtttcatcaagttccactttatcatccgaaattatatacccctttgacctcatctatcaccaagacaaatagataagggctcaaaactgatctttgatatagtcttactctaatacgaaagtcatcagtgtcccatcacttgttgaatattggtcacaatattattaatgagttcaacatacttcattaaaactttatgattatctaaagcccactacataacattntttagtatatttgcataagctctctctanattgatgaaaatcatacatatatgtacttgtccctatacctcattggtgatctactaacggcatgtgtttataatccaaacaacacccctagacta

SEQ ID NO: 6510 - DNA, 424 bp, Zea mays
  unsure (1)..(424): unsure at all n locations
agctgtcccatcactcctcatgctcctnctcagtcgatgtagggtcccactcgacagtccaacccggtggcaagatggacgaccaagtcactccaacaaccatgtcttccaaagaacctttaataaaattatgccacaagcaaggctgagtatactaatactcagctagacttacccggtgtgaggagtctactcctctacctctagacatgcagctgttaggctgtggggtttggttgccaaaagcactagctgagtttctaagtcagttttaacttgtcaaattaagtgtgactctcttaaggctaaatgtgtactatctactcatacatggtagcaaacattattagcaatcaacatcttatatcaactcatcatatttccacttgttactcaatgcagtacaatggatcaagcagtctca

SEQ ID NO: 6511 - DNA, 371 bp, Zea mays
  unsure (1)..(371): unsure at all n locations
acatgaaaagacaatcgcgcactggtgtttatatatgaccagagtggcacgtaccctcctggcaaaggaccgcctataaggggtggtgtgctcttcggtggcgcggacctgttcattccgtggaagatccgtgggaatggtttacatctgcaaaagagttaaaagaagcatatgtcgtgtgtgtggagatccccagctgggtattaatcgattcagatcgccgaacttctcggatatgaagactggatcttcgactcttatcgtanatagcaagccgaacaaaggttggattttatagaaagcttgtgatgacaagtgaatactctaaatatgcaatctacataaggaaagtattaacttgtgatgtaaat

SEQ ID NO: 6512 - DNA, 288 bp, Zea mays
gagaacacactctaagagtaacaaatgttcattttgagaaagacaggatttgtatcgcatgccacgcgaggaatcaagtttgaatccattgtccacaccaaaacatcatgtttatcgacttgccgtttgagctactgcacatggatctattcggcccgattgcttacataatcatcggcgggaagaagtattgtcttggtattgtggatgatgattctcgcttcacttgggtattctatttacaagaaaaatctgcaaccctagagaccttataaagattcttgagac

SEQ ID NO: 6513 - DNA, 169 bp, Zea mays
gatatttttatgaaaattgaaagaaatagaaagagctgttcgaactttctctctgttcatctgaaacaagacaattatgctacagaaattgcttaattgggtctgtggcatgactgtttggttccgtgtatgctaaaagacaactcccatatacttatcaagatgtagc

SEQ ID NO: 6514 - DNA, 404 bp, Zea mays
  unsure (1)..(404): unsure at all n locations
ggaacttanatcgacctgtcgcatgcattctgtcgacttcgaaaggtttttatcttctaagagcgaggacaggtctgccatatgtgtctacatcatgactatgacaagtggggtgagggtgtcttgaaggctttgattctggctaattgcgcacattcttggaacgagtgctattcgttggtaatggctttatggtcggatctggcttcggatgtatgttataatataattgttaccaaactctatagttcacccgttcacgaagtatccattgttccgtgttcaccggacagtccggtagtcacctgctattcgtgtcaaccggtagttcggtgaatttacgaaaccgcctggaaaacccgaagcggtagttattcttgtcttgcctggtgaccggaactgtc

SEQ ID NO: 6515 - DNA, 430 bp, Zea mays
  unsure (1)..(430): unsure at all n locations
agcttgacattgtctccttgttggaagccaatgccatccttaatgccagggcgtctcccactatagagcatactacgagcaaatttaaatttttcattttctaactcatgctcagcaattttagcatctaattttgctatatgatcattttgttgtttaatcatagcaatgtgatcatgaatagcatcaatgttaacatctctacatctagtgcaaatagtaacatgctcaacggtagatgtagagggtttgcaagaatttagttcaacaatcttagcatgtaaaatgtcattctcatctttaagattgttaatcaaaacattgcaacatctaaatccttaaccttagcaattaatttttcattttcaactntaagactagaaagagatgcattcaacttgtcaatcttagtaattaaactagcattatc

SEQ ID NO: 6516 - DNA, 439 bp, Zea mays
  unsure (1)..(439): unsure at all n locations
agctngaatagcacaagataagtgagagtgtggttgtttacccgacatatgaagctgagagcctgagacataattttaaattgaactgtgtaaagaattaaggaatacctgaaattctattcgacctagaacagaatatatgaaattagagtagtttgcttagaaacgtggacaatctttatgaacgagaggaggctctaaacaagtaatttgtgtgttaaacattgtttcgtttagttaaaatatgtcccattcagaaaactatatatgactttcatgttacaagaatgagactttaataaggttagaaacaattcaacctgcaaagtatgcccaccacgttgaggtcctcctccctgcgagcacctnctttagcaatatcttgtccacgcgagcagaggtatataaggtagacattgaaaaagagttatgcgatgga

SEQ ID NO: 6517 - DNA, 366 bp, Zea mays
gtcgcggagtgtgcgtgagacaaccatatttttcttgttatctcctaacctagggcgtatcctcccttggaactcacatgaaatacgtagctctatgtgcatggaagagatcttcacagtcgacatggcgagattcgtacgcttggccgctcagcagagcgaagaacacgggcagaagcaacgcgccacgtgttcgacgcgttctgccgcgccagagcacgcccgcgcgcgctcttgtgagccccgcgccgcgcccgagccaaagccagcgccctggtccgcgttcgagcctataaaagcctcccgagcgttgatcttacccgttcgcacccacccgaccctcgcctgagtatgtatcgacgtcga

SEQ ID NO: 6518 - DNA, 436 bp, Zea mays
cttaagcgacgcagctgcagctgccgcagacaccttaaagcagtttattttacatcttttaaagacagacacatcgacattttgtaacaaacagttatatcccatattgcataattgactaacagatagcaaaatatatctcagagactctactaaaaacacattaaagatagagtgctcatttgagattgcaattttacctaacccttttaccttgccttgatttccatcaccgaatattattgaatcttgggaatctttgtttttgacgtaggaggtgaacatcttcttctcccccgtcatatgggttgtgcatccgctgtcaataatccagcttgaacccccggatgcataaacctgcaaggcaaatttaagcttgggtcttaagtacccaactcatgttgggtccggcgaggttagcacatatatccttagg

SEQ ID NO: 6519 - DNA, 348 bp, Zea mays
cccttacgacaacgctttatgcatacaaagtcctttattctcaatatatccacccgcaatccacagagactggacaatgagtctagtatcccttgcgcaaaggaccctgcgctatttaataattgtgcgcccagttcagagagttggaaaatcacagaaaatagattagaaatggatgcttagtgctagaattaatgctagaacttgattaatcatagaaaattatatgatgccagattagtcattccaattctaaattctgggcattatcgttatacatagacctctgtttgattgaagtccatcaaattatatttattaatctagttaaatactaaaccttagaat

SEQ ID NO: 6520 - DNA, 438 bp, Zea mays
  unsure (1)..(438): unsure at all n locations
agcttgacattgtctccctgttggaagccaatgtctttcttaatgctagggtgtctcccactatagagcatgcttctagcaaatntaaatttttcattttctaagtcatgctcatcaatcttggcactaagttgagctatgtgatcattctgtttcttaactaaagctaggtgatcatgaatagcatcaacattaatatctctacatctagtgcaaatagtaacatgcttaacggtagatgtagatggtttgcaagaatttagttcaacaatcttagcatgtaaaatgtcattctcatctctaagattggaaatagaaacattgcaaacatctaattccttagccttagcaattagtttttcattctcatttctaaggctagcaagagaggcattcaattnttcaatcttagcaattgaattagcattatcatttcta

SEQ ID NO: 6521 - DNA, 316 bp, Zea mays
  unsure (1)..(316): unsure at all n locations
ctaagctggctgtagaacaacaagctccagatgaacctgcttctgtgaataaaattntaaaggtgcacaagttcacagtttaatggccagaatccggtctaccgccagggatgagcgtgagggggaccaaactgaagcttcagagactgtgcctatcttcgaagacatgcaacgatccgggctagtgacttctgaaaagattctattgatgatgcggaacaagctatctctgaagcacaatgagaagatgctggggaaactgaccccgaagatgattatcaccttgtcacgccaagcaaacccagtcatttggact

SEQ ID NO: 6522 - DNA, 437 bp, Zea mays
  unsure (1)..(437): unsure at all n locations
agctcgtacttacgaccaaaccgcacccccatccatatcacattcaatggcttaacaatagtggtaaggtcaaggtaaccaagctggtatgaattaattntgctattggttcatatcgtgatgttgatgactgtgacaaaggctgaactgggagttgtctaaataggattgagaaggtgcactttgttgttggtagtcaggtaagacagtgttgtgttcatatgcttgttgaaaacctggtagtctttcgagttacctcatcatggaggagaagacatgcaatggtcgtcttttgtttttcagattctactattgcacttttattgcaagattgcgttgtagtgatcatgtctgtgtatttgtcttttcgatatatatacagaaaacactatatggactctcggagaggattgctgatctgncggaatctatcgcac

SEQ ID NO: 6523 - DNA, 240 bp, Zea mays
gatgtcatacttgatgcatgttcactttatttgttccctcgtatgatgtactgtttggtttccaatttgaatggatgaatgtatgtatgcttgcaatcgcataaaaaacgatccggtctaagagcccgaggaactctcacgagaaatccctgagcagcagtcgtttggtggaggcaagtgtcccttgacctatctatgtcctattcattatttaattcacctttccgctacacatttatg

SEQ ID NO: 6524 - DNA, 444 bp, Zea mays
agcttcggtacactacgacttcattctcctcgggatgtgggcaagttttttccccttcgtccgccctcacaatggacaaatccccgaaataccttcctctcatattgacaagatgattttctttgatagtcgatttaccataaactgaatggcttggtcgccagggacgatcttcggagtcttcaccaccactgtccacatcatagctgtcactgtcaccagtatcctcagacagaccttccagaatctccttggtgattttttctgtgttggtctttgacatcgctataagaaaccccaaatttttctcttcgtcgaggctcagcttcgtctcagcagcagtcttcttatcttcggacatcttcggagacactaaaaaactattttcaaagccgaagcttcaaaactaaaagcttagcaaatcgtagtgcacaagagctaaaa

SEQ ID NO: 6525 - DNA, 291 bp, Zea mays
taagcatgggcccgagctgacatgttaggcgaccaatcctggtttataaatgcactatgacttgtatggaggaataagaggaagaaatggtaacatgattcaaggctttaatatgttcttatattttggctatccaatctgatcatcgaattattcatgtatttattgtcatgtatttgtctcatgttgagacatgtagacatgtatatttgtcatgttgagaatgatgcttgctgaacgacatgtatgttaaatttttattcaattttaagttgtgtatgatgttgaatt

SEQ ID NO: 6526 - DNA, 436 bp, Zea mays
  unsure (1)..(436): unsure at all n locations
agcttcggttgtggtcaattnttttggtatcacttcagtgcaatagtagtaaatgttgtggtaacttcacacctactcgtccgtatatatagtgctgcaggtgggaaggtaaatcgacaaggcaatcgtacccgctgaatagccgcccgcacccactgaacggtggaccataccgcgcgaggagacgaatcaccagatcgagtgtacccgtcgtacggagggatcgccttacactctgaatatttaaatcgtttctcggcaaaaagctcgttacgaaaaacgatctagcaccgtgaaggcgctactgttgggggtctacttcgtcgccgaaggtcctgtgagaagaaacaccttcggaaggccagaacaggaacaatgccgtagctaccagtcaggaagcttcgtagtatatttcaaaatgcaccgacttatagat

SEQ ID NO: 6527 - DNA, 440 bp, Zea mays
  unsure (1)..(440): unsure at all n locations
agcttaacactcatatattnttttagataatatttacataagattcccctcttacccctaactaacgattatgctgctctcgtcctgtttttccatacttcccacagcgcaagaaaaataaaaactagaaataggaacaaaccgagaccgagagcgagagcgagagggtgaatgccaaattgatccaaaggactctccgctaaatgcatcgcagcgaaatttgccgctaaattctcattcgctagctcagctattccgtacttgaaggcttcacttttagtgccatttgctactaaatcccggagctgtgatcgaagaaatcctatattagcactccccccatgtattcattcggctgcaactagaatctcttggtgatccctgccgggcattaatttggccatttcctcgcgtatagcccctcgatattctacgaccct

SEQ ID NO: 6528 - DNA, 372 bp, Zea mays
taacagaatagctgtccgccatttggaaaaggagctgatggggcagtggaactttatctcaaccgcctaccaaaaatggatttggcgcagtcagatttcccgaagcagaaggcaacaaaacagttcaactaaatgtcaagccaaatgaggccgtgagagatttccatatttgaaaggagaatgatgaagtccttcattgttcatgtttgcctggtggttctgaacacaatgggggacatgcagattcagggctaagagctcagcgcctagagaatcaaggacgtccagtgagtcctcttagtggtaacactagcaaaaacgctccttacactatgctgaatgttgtaaacataaagaattctactgagaaac

SEQ ID NO: 6529 - DNA, 406 bp, Zea mays
  unsure (1)..(406): unsure at all n locations
agctngaagccatggtaagtagcataggctaataatatgcgaattgactcaagcctagctacgggtgcataggtttcaccaaaatccaaaccttcgacttgtgaataccccttggccacgagttgagctttgttccttgtcaccacaccatgctcgtcttgcttgttgcggaagacccacttggttcctacaacattttggttaggacgtggaactaaatgtcatacctcattcctagtgaagttgttgagttcttcttgcatcgccaccacccaatccgaatcttgaagtgcttcctctaccctgtgtggctcaatagaggaaacaaaagagtaatgctcacaaaaatgtgcaacacgagatcgagtggttacccccttatgaatgtcaccgaggatggtgtcga

SEQ ID NO: 6530 - DNA, 329 bp, Zea mays
  unsure (1)..(329): unsure at all n locations
taagagacttttntcacgggtcaagctcgttactgaaaacgactatcaccgcgaaaggggctactgatgggtctatgcttcgtcgccgaaggtcttcaaggaagaagcggctttcggctgaagctgtttgcatgagatggccgaaggttcctttccatgaagcttcgacagtataaaccgacttaaagatagaatgactttntagtccatgaaggtctgagtcaatgttgtaagcttttataaggggcatacttgtaattcctcacaggctgcgtcctgtgcctataaatagtgaacagtattccgttgctgttcacggattctggtat

SEQ ID NO: 6531 - DNA, 432 bp, Zea mays
  unsure (1)..(432): unsure at all n locations
agcttggaggcattgattgggagcctatttgttggtgtaggctcttccttcgnttcttctgttgccttgaatgcaacaggttgcacctcgggtgtggaagtggcgccttactccaagttgacaatgtgtttgaagtctttgatcataagttcaaagctcataaacttgctaatcacctcctcgggagacatttgcttatacctagaatcttcacgaattaattgcacttgagtggggttacgaaaaacaagagatttgagaataaccttgaccatttcatggtcatcccacttggtgctcctgaggttgcggacttggttcaccatcgtcttgaggcggttgtacattgcttgtggctcttctctctttgtgaggatgaaccgaccaagttctccctcgatatatccccgctggtgatctttgcacttcatc

SEQ ID NO: 6532 - DNA, 258 bp, Zea mays
tgaaagctggactgcgattcctcttgagcagcttcgtctgtgtgtgttgaaaatcttcgaagtatatcttcatcaacttactcccgaggcaattataaggctaaatatcttcgtgtgggccgcgaggagccaatgtctgaagcctgacgcaagaagcttctgtaatgttcatgaattattatatgtaacaaagccttggggcaaagaacagtaccataacaactttggctgctacagcttcgtttctcggtccggggc

SEQ ID NO: 6533 - DNA, 385 bp, Zea mays
agcttcttggaagcacagatccttgatggtggtatccttggtcgataacagctgtacaagtcgtagaacctcatcatgggatacctgcagctcgtgacggtgatgatctatgtcagacatggtgaagcggtggctcctctccaatatggtcaaggagttgctagcatcacggtatagcctgtccagattatcaccgagaagccgcgagtgctcgtttctcctcctatgaacaagcaatattcagcaccaaggcagtaatagcatgacagggtcaaccaaggaagtttacctcatgcaccattttttcagaatcaagctgggcagtgaggaattcaaagaacgtgcaccgtccaaagaagcagaggtctgagccaagtcagcttaa

SEQ ID NO: 6534 - DNA, 223 bp, Zea mays
actgtctcagatatcgatataaaagcttacgtgttcctgataatgacatatgctggttactaagcgcatgtaaaatactaagccgtctttggatcggttttcagatataaaagataactaaaaaactatatgatacaactttaaatatatatatatatatagctaagaaaataatatacatatagagtcaaacagactctttgtaatatgcataatgacaccg

SEQ ID NO: 6535 - DNA, 420 bp, Zea mays
  unsure (1)..(420): unsure at all n locations
agcttctcaaagntgaaattgttgaagatctatttaatgtcaactatgtctcaagatcgtctcaacggattggctactttatgtattaagaaaaattattagataaggttgatagcaacactattatcaatgacttcgcatcaagaaatgttagaatttttttgagataatttgtacaaagatttgaagttgttttaatacattatagacttttatcattcaaaaatttgcttctgtacttagaagaaagtgtatatatatatatatatatatatatatatatatatattaaaggacccattttttttgtttcggcacgggtccatgaaacctcaggaccggccctgcatatattattagtatccataaagttaaataaatgcactttcagaatatattatatgagaaaactaatgaaac

SEQ ID NO: 6536 - DNA, 245 bp, Zea mays
ctgggccaggtagtcgctttatagggcagcgggcccgtgaccaatatattggctctgatggaggcactgagttgggttctggtggtatcttgcacgctgcttcaggtggcgaccttacgcccggtcattagttgatctctcacgaattgggggtaccttcgttcttctccaatctccaagtactgagatatattctgtcctgactttcgtactgtatgaacatctgtcaatgcattcatctggtc

SEQ ID NO: 6537 - DNA, 333 bp, Zea mays
agcttgtctactagagactagaatctttacagctctcgctatatttggtttatcaaagggcatacctggagcaaaagtgagagctgtctcactcagtcatcaagtcaaataatttgcatcaatgcaactgataatatactgaccactgactgcttaattttgatgatactcacgccctaatgcatgggctgggggtattactttgtgaaaattgtgcaacagaggaggcgcatctatttgctttgttgtgaatgttttcctacatatgaactatgttttaagtaattcatgggtgttgagctctaaaaagagcagtgcggacagtccggtccc

SEQ ID NO: 6538 - DNA, 414 bp, Zea mays
  unsure (1)..(414): unsure at all n locations
cngatgtttgtgatgattcaattggtggtcttagatattaatgttatcttaattgctaagatcgacaaattgaatgcttctctttctagccttaaaattgaaaatgaaaaattaattgctaaggataaggatttagatatttgcaatgtttccatttccaatcttagagatgagaacgatatattgcatgctaagaatgttgaattaagtacttgcaaaccctctacatcttccattgagcatgttactatatgtactatatgtagagatgttaatgtagatgctattcatgatcacctttgctttattaaacaacaaaatgatcacatatctacattaactgctaaaataatgagcttgactagaaaatgaaaattaaattgcttaagctgtctatattggaactcctgcatt

SEQ ID NO: 6539 - DNA, 440 bp, Zea mays
  unsure (1)..(440): unsure at all n locations
agctntctagaaagtccttgntcaccccttttggatgatatttttgtaagttatgagcaaaaccggtgactactgtgctgctgtcccgaaaaatctgcatgtggtaaattgattgtttggcgtcattcttgtttggcttgatagaattagttaatttttttattattgaagactggttgaatatagtggttatagtaatccatgctatgctttagtaggaatcccgcgcgcgagttgggcctggataaaaaacaatatccttttaggtttgtttttccataacatcatgcatgcaatgataaatggggtctataaaattctagtcgggtctggatgagacatcagctgaagatgacctattcttatgtacattnttgttcaccgtatgtaaatgtatggcatgggaaaaatatgctaagtgctaacaccacactctatca

SEQ ID NO: 6540 - DNA, 432 bp, Zea mays
actaagccggcatttattgctactgtcccgacatgatagcgatcatgtaattgtaacatgagggacataaagaagaactatatgaaggcatagggcgaggctcatcttggcaaacagtgggattcatactgctcttcgtccgactctgaccatgaaagactcgccgccactgccttcaacaagtcatccctcttccgcaacgaacgtcacacttgccttatggcaagggagaagaaagtaagcactcataatactagtacttatgcttcttcaagtgacgatgagtctagtgatgatgatgagatagattactcatggctattcaaggcgatatatttaaccaacgcagaccaaactaatgaactaaatgatgccttgtatgatacgaatatacttctagaaaagcaggaggatttgtcgttgaagagcatg

SEQ ID NO: 6541 - DNA, 442 bp, Zea mays
agcttgtgaagattcttcatctcaacatgggctattcggcgatgccagagccaacccatattagtcttagcaattaagcaagtgtcgagttcagctctattaaaatcaactaagtatagctgaccctccaacactcccttcaatgctaccaaatcatcacttcttctaaagacagtaacacctacatcactaaaaagatagttgtaacccattttgcataattgatatacaaaaagcaaattgtaatctaaagaatctacaagaaaacattggaaatagaatggtcaggtgatatagcaattttaccaagtcctttgaccaaaccttgatttccatccccgaatgtgatagttctttggggatcttcgtttctctcataggaggagaacatccttttctccccaggcatatggtttgtgcatacgctatcaatgatccaact

SEQ ID NO: 6542 - DNA, 304 bp, Zea mays
  unsure (1)..(304): unsure at all n locations
agacaaagtatactanggcatgctttntgatttgtcttcaaatatctcctgcacaagcgccacacttactgcagagtgcgaagctaccacatacaatagtaacggagcccctggcgcangtggagttaatgttgttatatcaatcaagtattgcgtcagctcttcgaaggctttctgttgagctgggccccattgaaagacttcggctgactctagtatttcaaagaatggcaagttctttctgctgatctagatataaaactattcaatgaagctagtcttcttgccaaccgctgggccccct

SEQ ID NO: 6543 - DNA, 444 bp, Zea mays
  unsure (1)..(444): unsure at all n locations
agcttcttggcctcagctcccaccaccaccaccacttgtacctacttattcccgaagccagcagccagaagggagccaacactctcaacagcaacgtgaattcagagaggaatccgaagctcgtacagtcaatagtaccgtgccagaatcaaagcatatatactgagtgatatcctgcctctgaaatccttttatgttctatgccatttttctttttaataagaaataagcaatgttagtttttaatttcttataatgattttgcttctatcagaatgaaatatattttcttcacaaatttacgaaattcaaaagttacgaagctacaaaaagtcgttcctaagggagcgcatcgtatgttntgtgctcaaaagacgttcctaagggaatgcagagctaaaattgccgaagctacaaanagtcgttcctaagggagcgcaacgt

SEQ ID NO: 6544 - DNA, 211 bp, Zea mays
cgaacaaaatccacacaggctatgcacatccatgtatactcatattatacacaaattgatgcaatgataccttgccgctaatcacctctgttagcagagccattcagattgtcccccttgtacggatgttaaattcaaaataaacatttgacttaagttgcccaaatgatctgttctacgtatatataaaaaggtctacgtacatccatat

SEQ ID NO: 6545 - DNA, 318 bp, Zea mays
  unsure (1)..(318): unsure at all n locations
caaacaatgttctgccagaagaatttttgggcagtctttgatgtgattgtggaaacagccctcgcttcaatccatttggtgaagtattcgacggctacgaaggcgaacttaaggttcccctgagcggtgggcaggggcccgacaatgtccaggccccagcgctggagaggccatgtatgggcgatcagctntgtatattgcgaggggttgcctgaccgaggagagaacttctggcaggctttgcaggaccttgtgactcngattgcggcgcaaatcattgcaggccaataaaacccttgtcggatcaccttggcagct

SEQ ID NO: 6546 - DNA, 140 bp, Zea mays
tgcagcttgtcaagccggtaaacacgtgggaggagcgcatcacaccatgaatgtgatgaccacatcatgacctttggagatgcgtcacatggacctcttctgacccgtcgcctatctaagtatatgaggaagcaagtatg

SEQ ID NO: 6547 - DNA, 365 bp, Zea mays
  unsure (1)..(365): unsure at all n locations
agcttgcagatcagttctgatatgtgatttgttttctgcagatgtcagacaacacgcgcagaggaggaatgcgtgctcaacangagcaggcaaccccgcaagaagaggcaccccgtcagcagctgcctacctcgcccttgatgaccatcgagcagatgttcttgntgcncactcaagccggtcaagccatttgtcagattcttggccgcattcagtagcagcagtagcagccaccatctcatcctcagatgcctcatatgcccagaagacttcgtgctaacttcggagaggtcatccccagtatttcttacttttttgacccatgaggctgaaaattggtccctctgtgaacgggagtgcacccg

SEQ ID NO: 6548 - DNA, 298 bp, Zea mays
  unsure (1)..(298): unsure at all n locations
gcgaggctcatcccggtaaatagtgggattcagactgctcttcgtccgactctgacnntaaaagactcgccatcactgccttcagcaagtcattcctcttacccgactaacagtccacttgcctcatggtatggtataaaataagaagtntataagactagtacttatgcatcttcaagtgaggaagagtctaatgatgatgatcacatagattactcatgcttaatcnnngnattatcatgaacccacgttgacaaattcatgaattgttgatgcctgaatgattgaatatcttcta

SEQ ID NO: 6549 - DNA, 303 bp, Zea mays
  unsure (1)..(303): unsure at all n locations
agcgacgaagcaagcccncaacagtagcccttcttggtgctagggtcgttttcgtaacgagcttgatccgtgaaaatctccaaggcttcggaatgccgaaggtccgaaaaacaccttccctgagctcattgccgagaaacaattaaaatatttcgagcacgaggtggcccaccacgcagcgggtacgaatgatccggcgatttacttcctaggcgccgagtggtccaccattcagcgggtgcgggcgactgttcaatgggtgcgggtgacttggcgattcacctttccacctgcagcactata

SEQ ID NO: 6550 - DNA, 354 bp, Zea mays
  unsure (1)..(354): unsure at all n locations
tctaaaggggagaacacatttgggactaacaaatattcattttagaaagacagggttngtagcacttgtcaagcagggaagcaagttggtacccaccatccacacaagaacatcatgacgaccgacaggccgcttgagctactccacatcgatttattcggcccgattgcttacataagcattggcgggagtaagtattgtcttgtaattgtggatgattattctcgcttcacttgggtattctttntacaggaaaaatcttagacccaagagaccttaaagggattcttgagacgggctgaanacgagttcggattaaggatcaagaagatacgaagcgaccacgggacggag

SEQ ID NO: 6551 - DNA, 432 bp, Zea mays
  unsure (1)..(432): unsure at all n locations
agctgggaggcgtctattggttgtcgacttggtgtagactcctccttcttctcctccgttgccttgaatgcaacgggttgggcttcggatgaatcgccaagctcggtgattntcctcgagccttctatcatgcactcaaaacttacaaaatgcccgataacttcctcgggggtcattttagtatatctaggattaccacgaattaattgaacttgagtgggattaagaaaaatgagagatcttaaaataacatttaccacttcatgatcgtcccacttcttgctcccgaggttgcgcacttggttcaccaaagtcttgaagccggtgtacatgtgttgtggctcctcccctttgtgaagccggaaccgaccgagnctcccctcgatcgtttcccgcttggtgatcttggtgagctcgccttcctcgtgcgcg

SEQ ID NO: 6552 - DNA, 340 bp, Zea mays
  unsure (1)..(340): unsure at all n locations
gaaacatcaataaataccaagccgaaacatttattggtcgcgatacaaaggcttggttaaagaatattaaaccacgacatttggtgcttccgagagtggccaacccatacacagtaggcaagctatagctgaagtgggaaggaccttttctggtagtatcttcgtcaagacccggttcttacagattgaatgatatggacgacaacgacattcctagatcatggaatgcggatgagcttcngcgatattatgtctagcgtgatgtaaatatttctattctttcttatggcacccttttccttccaaaggggagaaaggttttaatggggccatacatgta

SEQ ID NO: 6553 - DNA, 438 bp, Zea mays
  unsure (1)..(438): unsure at all n locations
agctnggagtagcagaggattcaacagcatctatctagcaatttagtctcaagcaagttgcggtaggctatagttgaaacccaagtatccaacatgagtcccaagcaaattcagaggaaagcggatgattgcaagaggaatacaaagaattaggtgtgtacccttgtttcaatattgacaatctctccaaacagagaaacagagtggctctgttctgattgccaaacacagaatagagtcattccatactcagaatctagaatggaaccattccatccaaatagactctggaaccaaacactaccagcacaagttttattgttgctgacatacagagcaagcttttatatatcgaacaggcttacatatgcttcctctctagttttgcatgcctatcgtggctctgtcctactgcctaagcctctctacgaactgaat

SEQ ID NO: 6554 - DNA, 300 bp, Zea mays
tccgcatgatcgcacaaaagggaaccgacttatagatgaaaagtctttatacctcgatagaatgctatagaattatcaccaaatgtaaagggcatgtatgttatattgtatgggttgtaccccgtgcctataaataggtgaacagtacccccgtactgttcacgctaacttggtgtcacttttgcgtcacgcttgtactttcattttcttctaattgaaggtacatctgtaatccaatggtatttttatttatatataataatgatatatgatgatctacgtaatcctttatgtttcttg

SEQ ID NO: 6555 - DNA, 232 bp, Zea mays
ttaaccagctttatataaaggaactcgacagaccgttgttttatttttgggaattatacaagcatacagtctgttctccactcctcacatgtttatccagaacagaatgtatataattaatgaacgagatacatgcacgtctgtgtggatctcatattgtgactaggcccttattatgaaaagtgtttatacaacgattttattggccgaatgcagcttatgatacagcaga

SEQ ID NO: 6556 - DNA, 429 bp, Zea mays
agcttgttctgtattggtgttgttctacaaaacaagaaaatcgttgcagtttcttgcacgacagcatggctcagtagagcgtactcacatagatctttttttcacacaaaactaaccgtctctaaagtcgtattttgtgcaggtagattacccttctcttcctgtaccgcagacctaatcgccttcatttcctacgagcaaaatgacaggatggtgtgctgctcctgctagagaccagatcaaaggtaaaaaggaatagaagtcgacagaatgggagggcgcaccgatttcagctgttccacttcagagtcaagtcctttcttgagaccctggagttcctgtaagcaacacaattcaaattcaccggtggtatggggtgttcattactacaagcagcaaccttgaatttccaggtgagtgaaaaaggca

SEQ ID NO: 6557 - DNA, 176 bp, Zea mays
gatacgtgggtctatatgctcaacgagagcacagggactcggctcgcgtgaccgatcctacctctagagagattcttataagataaagatgggcaaactttctatcagctaaaagatgatatcgatatccatgtagatgtacatatggcaaaacccggctatagggtaagccatgt

SEQ ID NO: 6558 - DNA, 430 bp, Zea mays
  unsure (1)..(430): unsure at all n locations
agctntagtgttaagtgagagtgattnngttgtgttctttgagctcttgcgcttggattgctttcttctttctcattctttcttgagatcaatactcacttgtaaccgaggcaagagacaccaattgtgtggtggtccttgcggagaagttttgttcccggctgatttgagaagagaaagctcactcggtccgagggaccgtttgagagagggaaggggttgaaaaagacccggcttttgtggcctcctcaacggggagtagggttgcgaaaaccgaacctcggtaaaacaaatctgcgtgtcacactctttattcacttgcgatttgttttgcactctctcgcggactcgattatatttctaacgctaacccggcttgtagttgtgattaacatctgtaaattcagtttcaccctattcacccccctct

SEQ ID NO: 6559 - DNA, 262 bp, Zea mays
  unsure (1)..(262): unsure at all n locations
ctagttcaaattaagcatcccataagtggatgttcggtttgttatcacattagcagctaacggagctaatatgcatgaatggtctttngagccatagcctcctttgatattggtgcataacctccttccttggacggatccaaatccgagatgaacttatgaggggtactagatgacaactacaacttctcaaaagcctttcaagattttttaacaagttaatcgacaattgaaaacccttcatacaatgtcttgattcaca

SEQ ID NO: 6560 - DNA, 387 bp, Zea mays
agcttagaaacatacctttacttgtgagttgcactttgttcattcatgggcataaattcacatttaagcactttgtgttggcactcaatcaccaaaatacttagaaatggcccaagggcacatttccctttcaatctccccctctttggtgatttatgccaacacaacataaagcaactagaacaagtgcaaaatcacttcaaataaaaacaaatttgagttttattcaattttggcatatatggatcatcctttgccaccacttggtttgtttttgcaaatcaaactcaaatttctatctctagtcaaaccccatgttaaacataaagagagcattccaaagagattatcaaagattcaaaaactccccttttccataatcctact

SEQ ID NO: 6561 - DNA, 155 bp, Zea mays
  unsure (1)..(155): unsure at all n locations
gaaatgacctaaacggcagaaccacggaaaaatactacggagacaaaatggcacacatgccacaaaggaattcacggcgaaaacactactcaaacaaaagaaaangcacgcgagacccttctccaaataatacccccccaatccaaaaacatcaa

SEQ ID NO: 6562 - DNA, 285 bp, Zea mays
ttttttttactgtgaaagagcggggatctttcaacgccctatcgactacacggttattttaactggatgtgtatccacattctacgttatcataccagcatgctgctagttaagctgatctaacgacttggttgcaaacaatataagttgtcttatcaccttaagctggacatactttttagacaacctgacttgtaaaaagtcttcattgaaattgtacagaataatattcatatttaaaatcttaatgagctataaatgattactaccttcctgctgttcata

SEQ ID NO: 6563 - DNA, 417 bp, Zea mays
agcttgaaaataatgctgaagctttctggaggctatttatacattatacaacactttctccaattctattgaatttttctttgataagcttaatacttcggagacaaaatatactgggacttgctttttagtttgtcattcaagattctcctgtacaagcgccacacttactgccgagtgcgaagctgccacatacaatagcagaggagcccctggcgtgggtggagttagcgttgctagatctatcaggtattgcttcagctcttctaaggctttctgctgagctgatccccattgaaagacttcggccgactttagcacttcaaagaatggtaaatttctctctgctgatctagatatgaatcgattcaaagatgccagtcttcctgtcagccagtgagcccccttctttgtgct

SEQ ID NO: 6564 - DNA, 154 bp, Zea mays
  unsure (1)..(154): unsure at all n locations
aagccgatactctnttgataagtaccgacaaccttcgctccgttttgtctcgtatgcagcctaacccttcatcatctataccaccaaagagaagcgacctccgccgatatccacaagatatagcatactcttttaattcctctttttcagcttc

SEQ ID NO: 6565 - DNA, 438 bp, Zea mays
  unsure (1)..(438): unsure at all n locations
agcttgacattgcttccctcgtggaaaccaatgccatccttaatgccagagcgtctcccattatagagcatacttctagcaaatataaacttctcattttcaatttcatgctcattaattttagcagttaatttagctatgtgattattttattgtttaattagagcaagatgatcatttatagcttctacattaacatctctacatctagtgcaaatagaaacatgctcaatagtagatgtagaaggtttgcaaacatttaatttatctatcttagattntaacatggcattttcatttctaagacaggaaatagaatcattgcaaacatttaaatctttaaccttagaaattaagctagcatcttcatttctaaggctagaaattgtatcattcaattcatcaatcttagcatttagactagcatttntatttcta

SEQ ID NO: 6566 - DNA, 299 bp, Zea mays
tatgaagattcttcatcccaacgtgagctagtcagcgatgccagagcttcccatattagtcttagcaattaagcaggtgtcgagttcaactctattaaaatcaactaagtatagttgaccctctaacattcccttaaatgctactgaatcatcacttcttctaaagacagtaacacctatatccataaaaagacaattgtaacccattttgcataattgagaaactgtaagcaagttataatcttaagaatctaccagaaaaatattagaaatagaatggcaggtgatatagcaattta

SEQ ID NO: 6567 - DNA, 436 bp, Zea mays
  unsure (1)..(436): unsure at all n locations
agcttggacagtgttctgcgatggatcgtcnggaaccttcgatgcaggtgcagctctcaatctaatctcaccatccaaaatcaaaacttgctaggtagctagattggagttcaactgcacaaataacattacagagtacgaagctcttcttttggggcttcgaaagcttatggcaatgggaataagaagggcagttctcaaatatgtctcacatgtcatcatagggcacgttgataaaagcagcaaagcatgagacccgaagctcgaaaagtatcttgacacagtctgaagaatggaaccttccttcgaaggtttttcagtgaagaacattccaagaggcgaaaatgagcagacagatttactagctaaatcagcggcacaggggctcccactcccctcagaagtgttcttcgaaactctcaaagcacctttagtc

SEQ ID NO: 6568 - DNA, 223 bp, Zea mays
atttatttcttcttatgagcccctggtgtctatcatcaatgaagtctgcttatgcctgtgactaaattgaggaactatgtacatagacaatactgaatatcgtaagtccgtagcccattttccaatccttccactaacttctctgttgctcattatgtgcttcagaggctgtgaagaacgaacaattatgtgatatgcttgaaaataatggccgaactttctg

SEQ ID NO: 6569 - DNA, 429 bp, Zea mays
  unsure (1)..(429): unsure at all n locations
agcttctaaagggagaacacgtgataggtctaactaatgttcatttcgaaaaagatagaccttatgcagcttgtcaagcaggtaaacaagtgggaggagcacatcacaacaaaaatgtaatgaccacgtcaagacctctggagctgctgcatatggacctcttcggacccgtcgcctatctgagcataggaggaagtaagtatggtctagttattgttgatgacttttcccgcttcacttgggtgttctttntgcaggataagtctgaaacccaagggaccctgaagcgcttcctaaggagagctcaaaatgagtttgagctcaaggtgaagaagataaggagcgacaacgggtccgaattcaagaatcttcaagtggaggagttccttgaggaggangggatcaagcacgagttcttcgctcctacac

SEQ ID NO: 6570 - DNA, 306 bp, Zea mays
gatacttgagttactaagaagaacagaaccattctgtttttcttatacaacgtataatcaactactcactgtccaggaagattaatgattagtcaatcgaccaaaaccggaacaagaagatatataactaccggaatcgacttttttgccgagtgcctgaagaacttgtcaaagcctgaaaaacactcggcacatgctttgtcgagtgtcgcactccgcaaatatggctcggcaaacagtatatcggcaaagccttctttggcgagtacattatttcgggcactctgcacagactttgtcgagtgc

SEQ ID NO: 6571 - DNA, 408 bp, Zea mays
  unsure (1)..(408): unsure at all n locations
agctntagcgatatattaccactttatgtgttgtttatctctngttctcctctttacattggattctaggtacgagagctatattgatgttgaaatacaacagagagcagttgaatattttgaactaagcacgaaaggtcctgctttggcagatgtgttggctgaaatgccaaaattccctgaacgtgaggtaactccattgataggacactttctcttggtcaacgtcaatttattccattgagaaggattttccccttactgtgggttatttgccaaatctaatctgcactgttgaagaaggctgaagactctgaaattgacacagcacagcaaagtgccataaagctacgcagtcagcaacaaacatttagtgctcttgtngtagctgatcacccccctgcaaat

SEQ ID NO: 6572 - DNA, 379 bp, Zea mays
cgcattctaagtccgcaatctgaaaagggatgaacatgggatattaatatttcaagtctgctaagtaagaacctgtaagaacactaactattcatgctcctagcatgcaaacagcagtaactactttcactcgtaccttctgctgaagtacattacacatttcttccttctcttttagttttccagaaagctgccgctgctgtttctctgatgttatttgacactgtgccttggaatctaactgaccctcgagctctttcacctacgcaagcaaaggccgtcagacacaaatgaataacaataaccaagaaataccggaaggaccaactcttcaaataataccctcatcaattatgtaccttctcttgcaagtttttgc

SEQ ID NO: 6573 - DNA, 428 bp, Zea mays
  unsure (1)..(428): unsure at all n locations
agcttcctatccagggtcctatntgcaatacatttaaacaatacaacttgtttgaaatttttgcctagtgaatgcactctaagtgtgtcaaacatatgcaatgccaatgcttatgatgccatgctcaagttttagttagaagaacaccaggggtgttacattttgggtccctggatcctggatcgtcccagtgttttttctcggtaaggggtgcttttcgtgcggttttcacccgtccgacatgcttgtgcggggcaatccctgagcctctgctcgatgcggagatccgattggnagggtgctccatcttttttgttctactctcccactacatccccttcacgagaatgaggggaggtgagctgtacattgctttcctcgatggactagcaatgtcgcttggaaagtataaacgggtaatccgagtg

SEQ ID NO: 6574 - DNA, 276 bp, Zea mays
tcctcgatgttgagcttggatgctctatggggagcctacttgatgtagactcttctttcttctcctctgttgctttgaaggcaacgggttgcacctacggtgtggaggtggcgccttgctcgatgatttgtttggagcccttgatcatcaattcaaagctcacaaactttcctattacttcctcaggagacattagtttatatctaggatcaccacgaattaattgaacttgtgtacggttaagaaaaatgagtgatcttagaataaccttgacca

SEQ ID NO: 6575 - DNA, 427 bp, Zea mays
  unsure (1)..(427): unsure at all n locations
agctttaaaaactaccacctcatcctttcctggcttctgagtgatttcctctccgccaaaacgaattagcttcttcttagcttcactgaaataccctaactttatcaacatgggcatatcatgttcagtaacagtagacttcccaaacttcatgtggctgggtttaaatggcaggacgctgtaatcttcttcatcaatttcaccttcttcaacatcaacctgttcagcttcggcagcaggtgcaccctcgtcagaagcatcctccggcgctaccagacctgactgtctcatcacttcggaaatctgagctgtttcagcagcttcggtttcttcttcgtcatgagtaactctagcagtggagcgtacccttgccatttgatgatgaatccttacaactttngatgaagttgttgactttttttatttt

SEQ ID NO: 6576 - DNA, 247 bp, Zea mays
tctaatgggagagcacatttgggactaacaaatgttcattatgtaaatacagggtttgtagcgcatgtcaagcaggaaagcaagttggtgtccaccatccacacaagaacatcatgaccacagacgggccactcgagttactccacatggatctattctgcccgatagcttacataagcatcggcgggagtaagtactgtctaagtaatgtggacaatttttctcgcttcacttgggtggtcttttt

SEQ ID NO: 6577 - DNA, 439 bp, Zea mays
gcttgacattgtctccttgttggaagccaatgttatccttaatgctagggtgtctcccattataaagcatgctacgagcaaatttaaaattttcattttctagttcatgctcgacaattttagcatctagtttagctatatgatcattttgttgtttaatcatagcaatgtgatcatggatagcatcaacattaatatctctacatctcatgcaaatagaaacatgatcaacagtggatgtagagggttcgcaagattttaattcatctatcttagattttagcatgacattttcatctctaagacaggaaatagaagcattgcaaacatttaaatctttagccttagcaattaatttgtcattctcaatcttaaggctagaaaatgattcattcaatttgtcaatcttagcaattaaactagcattatcatttttaag

SEQ ID NO: 6578 - DNA, 231 bp, Zea mays
  unsure (1)..(231): unsure at all n locations
tgaacgtgaagagtgcctttctcaatggaccttattgtagaggtctatgtcgagcaacctcccggctntgaagatagtgagtatcctaaccatgtgtataagctctcaaaggcgctttatgggctcaagcaagccccaagagcatggtatgaatgcctaagagactttcttatcactaatagcttcaaagtcggaaaagccgatcctactctctttactaaaactggttgc

SEQ ID NO: 6579 - DNA, 399 bp, Zea mays
  unsure (1)..(399): unsure at all n locations
agcttagcaactgttactgagtttatggttaaatatacaggcactacatttcctgngtctgtccgggcactcatcatcgccaccttcctgggcctgtcttcatcatccaaatgtggttgcattttatggtgcatcttgtgcaaaacttttatcagagttatctgcaaactgattgcagcgaacttagctgtcattttacagtgaacttgtgcacctatctgcaaactgattgccaactgaatgtgcatcttgaactgaacagtgaacagattgaactggtgcagattgtagactgaactgaactgaatgtgctaagtgaactgaactggttcagactgaactgaatgtgctaagtgaactgaactggttcaaaagactgaactgaactgaactggttca

SEQ ID NO: 6580 - DNA, 368 bp, Zea mays
tcacatctctggacaactcgttgcgtactcttgctttgtttttagaaaccagacctgaagaccttctcaaccagagacctatatgctacctgtattccgcattgcctagcgtggacctcatctaatagttgctttacattaaccgaaagaatgcatttcatgaagactcctgtcgcggccttatgtatagtgtttccccaatgagagtatagtgagttgactgccttgcaatgcgctcttgtgcatatttgacatccggctcctactcgttctttatatatctgatgattggcttcctccagtcatcagaatctgactctagttggctcataatattgaactcttctgcccgatctaatgaaatgctc

SEQ ID NO: 6581 - DNA, 432 bp, Zea mays
  unsure (1)..(432): unsure at all n locations
agctntacctttattcctagaagccagcatattcttgagagtctttttcctttgacgggtaagacttgcgaaagtacactccgtactcatggtttttgaacccatgttgttgtaagtgatgaaacgacggagttctgctgtttctgttcaaaggtggtgccaaagcaggaggaagaacactaaacttatttgagggagggtgttttgcctcctagttatgtcataataagttatgcactcgaacacccgattatgtaataattactctctatatattttggtatgaatgtaaattatattattgtaatcctttccgctcgttctcatcttcgattatgtgtaatgtctgcgtgatgggttaagcgctcttgggcggtatgatgaagatacagataaccaaacttgccgagtcattatgcgcacctgcatgac

SEQ ID NO: 6582 - DNA, 205 bp, Zea mays
attaatctaagctctctggacttctatccacttgaatctcttcctttcttatagcgatgacaacgcttagcaatgtagagaacccttcaataaatcttcgataatatactgcgagtcccaagaaactccaaatctccgtaactgtggtgggcactctccactccattatcttcttcactttagcacgagccgctgctattcctcc

SEQ ID NO: 6583 - DNA, 428 bp, Zea mays
  unsure (1)..(428): unsure at all n locations
ngctttagtgattantgagagagattcgntgtgtttatttgagctcttgcgctnggattgcttntattctcattctttcttgcggtcatctcaattgttatcaaggcaagagacaccaattgtgtggtggtccttgcgggaagcttggtcccaattgatctgagaagagaagctcactcggtccgagggaccgcttgagagagggaaagggttgaaagagacccggtctttgtgaccacctcaacggggagtaggtttgcgagaaccgaaccctcgttaaacaaaatacttgtgtttcacttcttattcgccacgaattgttttgtgcctctcttccgacccgttttattttaaccctacccggcttgtgttggattacgttgtaatttagaatcccctattccccccctctaggcatttttattgga

SEQ ID NO: 6584 - DNA, 462 bp, Zea mays
  unsure (1)..(462): unsure at all n locations
ctaccaaatggacgtgaagagtgcattcctcaatggaccaatcattgaagaggtctatgttgagcaacctcccggctttgaagatagtgagtaccctaaccatgtctataggctctctaaggcgctntatgggctcaagcaagccccaagagcatggtatgaatgccttagagatttccttattgctaatggcttcaaagtcggcaaggccgatcctactttgttcactaaaactcttgacaatgatttgttcgtatgccaaatttatgttgatgatatcatatttgggtctactaacgaatctacttgtgaagaatttagtaggatcatgacacaaaaattcaagatgtctatgatgggggagttgaagtattttctatgatntcaagtcaagcaactccaagagggtaccttcatttgccanacgaagtacactcaagacattctaaccaagtttggaat

SEQ ID NO: 6585 - DNA, 495 bp, Zea mays
  unsure (1)..(495): unsure at all n locations
ctatgactntgtccttctggatctcccttagagcgcactaatctcttatcggtcacctcatcaatattgtccatcattagattaaaataataaccgacacctagatcattctgtctggcgaacctgatagcatttaagctaatctccacaggcaaaacagcttcctgtccataaacaagctcaaaaggagaaacttcactagcacggtgcttagatattccatgagcacgtagagcctcagacaaaaccttgtgccaattcataggaagatcacaaatattttttcttaataaggctaatcaatgccctactgctagacccggtctgtccattgtgagagcacctagaggggggtgaatagctgatcctgtaaaaacttgaaacttatagccacaaaacttggttaagtgttagtaggctaaatagcgagctcttgtgaacacaagtaccatagaaaagcaatcacaaaagacacgccgagtatcccgtggttcg

SEQ ID NO: 6586 - DNA, 184 bp, Zea mays
gcacacagacgacggacacactgttgcggtaacaacgcagcttattccttctgatggcgacactggcttacggcatgccatggaatcaaccagccacacgagcgccattcatcgctcgccatgatccttgttaaccatacttgtggactccagcacactggaaatatcatccctgcatacacat

SEQ ID NO: 6587 - DNA, 388 bp, Zea mays
atgcagcttgacgttcaaatcaaaactcaagtgcacttgataattgtagaacattaatgcctcatctttagtgaatgaatctaagtctagctcctcacataatacctcttgcaaacattgtgcccaatatcatgcttcttgttgtctaactaactatgcaagaagaaaagcccacaggtgaaggtcaaagaaatattgaaaagatgcactatcaatgatgggttaaagaaagttgaacccaagtacaagtctctaaagcccaacaatggaagaaagggacttgggttcaactcattcaaagaaaaccctatcatagtgcataaagggtggagatcccccacagttatagagggaaccaccctatatgatgcctctgggaggattcact

SEQ ID NO: 6588 - DNA, 427 bp, Zea mays
  unsure (1)..(427): unsure at all n locations
tcctcttgtacgaagctagagcanaacgatccttcggttcagaatgcaatgagcaagcttcgactgtggtcaagttttttggcagcacaacagtgcaatagcagtaaatgctgtcgtaacttcacacctactcgtctgtttatatagtgctacaggtgggaaggtgaatcgtcaagccgctcgcacccgttgaatagtcacccgcacacgctgaacggtggaccactcggtgcctggaaggtgaatcgccagatcgctcgtatacactgaacggtggaccacctgacgctgggagtattttaatcgtttctcggcaacaagctcatggaaggtgtttttcggaccttcagcattccgaagactgggagagtttttcacggatcgagctcgtcacgaaaaacgatctagtactgtgaaggggctacta

SEQ ID NO: 6589 - DNA, 448 bp, Zea mays
  unsure (1)..(448): unsure at all n locations
acctgcngcatgcagcttctaaaggagaacatgtgataggtttaacttacgtgcaatttcaaaaatatagaccttgtgcagcttgtcaagcaggtaaacaagtgggaggagcgcatcacagcaaaaatgtgatgaccacttcaagacccctggagctgctgcatatggacctcttcggacctgtcgcctatctgagcataggagggagtaagtatggcctagttattgttgatgacttttcccgcttcacttgggtgttctttttgcaggataagtctgaaacccaagggaccctcaagcgcttcctcaggagagctcaaaatgagtttgagctcaacgtgaagaagataaagagcgacaatgggtccgagtcaagaaccttcaagcggaggagttcttgaggaggaaggataagcacgagttctcgctcctacacccacaaaaaatg

SEQ ID NO: 6590 - DNA, 516 bp, Zea mays
  unsure (1)..(516): unsure at all n locations
aactaagcttactacttttactgtattctagtcaaacatacatatgcttgcccaaatttatgtggatacatttaattttctctataaaaacaaaatactaaatcttctcagatacatctaaacttcactactttactgcacccaagtcaaagtcacttctgcatgcataaactgatgtgcatacatttaactttcatgaaataaaaataaaacaaaacatgcttangtgcatataaacttcacaacttaaattattttgaatcaagctaactaactttcacatgtagaaacagaagcgttgaccaacaaaacctgctcatctgcatcaaaaatctactacttcattctagttatgtttccatgaaactgatgcgcatacatttaatttccatgcnagccccaaatacttgctacatatgtttaaccttcactactttactacatttcagtcaaacatacacccacttgctcaaatgaatgtgcatacatttattcatgaagcgaaacaaaagctat

SEQ ID NO: 6591 - DNA, 412 bp, Zea mays
ctttagtatcctagaacctctgtgtgatatctttaactgattcctcgtcccccaggcgaagcgatgtctaatcggctaaatatgtcttgtaatcccgagaatagaagtgcttatgaaatttatgctctaaatcattccaggaatcaatcgaattaggggtaaggcagcataccaagcaaatgcggtgccagtaagagataatgaaaacaagtgaacacagaaaactttgttgtcaaccaattctcccaattgtgctagataatggcctacatgatcatgagtgcgtttagtgccctcgcctgagaatttggtgaaatttgcacactattccccaagggtatggaatgacatcccaccagggtcgatggccttgatattattggtctggcagaatacttaacacctaattata

SEQ ID NO: 6592 - DNA, 314 bp, Zea mays
agcttgtacagtcaacagtactgtgccagaatcgaagcacatatactgaacgatatcctgcctctgaaatacttttatgttctatgccatttttgctttttaataaggaacaagtaatgtaaatttagttttaatttcttgtaatgattttgcttctatcagaatggaatatatcttcttcacagatttacgaagctcaaaagttacgaagttcaaaagtcgttcctaagggaatgcagagctaaaattacgaagctacaaaaagtcgttcctaagggagcgcaacgtaagttacgaagctcaaaagtcgttcc

SEQ ID NO: 6593 - DNA, 434 bp, Zea mays
aaacaaagctcagctcatctattatggatgcctcgaatagtccagcttccttcggccctttggcagcttcctgactcccatgaatagcaataggcccttggtccgaaggtatcttcatgcagagataagctgggtgaagaattgcttcataagcatttagagtaccacgaccaatgatggcgttgtaggggtatttcatgtcaacaatatcaaacacaatttgctcagtccttgtgttattaacaaatccgaaggttaccggcatggtgatcttcccgagtgccacaatctgccgccctccgaagcccaaagagggtgcgtatatcatgaatcttgtctcaggctcttgatctgtctgatgctttgcaaatatatgaagctgactgctgtgcacttaacatgtgaccaaaacctttgtcccaaaatgacataca

SEQ ID NO: 6594 - DNA, 449 bp, Zea mays
  unsure (1)..(449): unsure at all n locations
agcttcagctccatctatgntatggattgcttttgagtctgtccaatttccttcggcccttctggcagcttcctgacttccatgaatgacaataggtccttggtccgaaggtatcttcatgcaaagatatgctggatgaagaattgcttcgaaggcattgagagtaccacgaccaatgattgcattgtaagggtattccatgtcaacaatatcgaacacaacttgttcagtccttgtgttgttgataaatccgaaggttactggcattgtgatttttccaagtgctacaatctgccttcctccgaagccacaaaggggatgtgtggcatcatggatcttgtcttcgggctcttgcatctatctgaaggccttagcaaatatgatatcagctgcactgcctgtatcaaccaaaacattatggaccagaaatcctttgatcacacaagaga

SEQ ID NO: 6595 - DNA, 484 bp, Zea mays
  unsure (1)..(484): unsure at all n locations
tgtacctagcactgctcccctgcanaacattgataaaccaaatggattagtcagaatacaaagttgtgaagtacacttttcttttcctttacaagttacttttcaatagcttaatttattttttcctttaaaggacaaattaagtctttaaaaaaagcaaagttgcttggtagccaatgcccatgggatagggcctatgtgagctatgtgacaattatgccgactccagcagttcaaccaaagcttacacataagcactgttctgcactgttcatagagtggagtttgaatatgggtatgagtataagtaagctgacggagatagtcttagacactagatagaatggtgttgcctagcacatatgcacctgagcagccattttttaaactagtgcagaactgcagattgtgtgtcctggcatccccattagtagtgaataaatcatgcatagtngtgcgctcactttacttgcacctaagacta

SEQ ID NO: 6596 - DNA, 449 bp, Zea mays
  unsure (1)..(449): unsure at all n locations
agcttacccatgatgaggcatgtgaccagttaaagggtcctcgatcagcaagcctacatcgacaaggtccttaatcgactcagacaaagatactacaccgagactctcttctcgtgcaagtcactcgcccggtcgcagatttatcatttcaaacccaaagtttggtacctgacagaggtacatcttttccgatgttgaacccatcatggccatgatggattcgccatcaagttttatttttgaaaacatcccacccactttgaagcatcatcttttatcaaaagacaacattttgttttctaaagcaaggctaagcataagaaaaacctttctgtaacaggggattaaggagaagtaatcaaatccaacgaaggaaatgcaacaactggtttagcacacaactnctatcacctaatgcatcaagtaagtgagaaagatttcaaaataac

SEQ ID NO: 6597 - DNA, 472 bp, Zea mays
  unsure (1)..(472): unsure at all n locations
actaagcttggcatagtccactcgagctaactttcggagaaacccgaccctactgcaacatgacaccagagggtcaaactcaacgggcaatggatgaattcagaatcattgcagagtatattggtaccagggatctggttcaagaattcttagcattcaaagtctactaaaaaagtcatggccgcagtgcctgagaaggggaaagaaatagccgaagtcgcttcggacgacgaagcctacacatttcataatttaattgggcaaaaactttcggaggacgaaatagaagagctaaaagactatgccaaatcttgcggatacaggccaggagctcttctattcggaggtgtggacgatcgaaaattatgctgcattcgagaccaaaccggagctaatgtcatcggtactctgtcaaagagtatcggttnttcgaagctagagatagatatcagccgctaccgacgacagcata

SEQ ID NO: 6598 - DNA, 441 bp, Zea mays
  unsure (1)..(441): unsure at all n locations
agcttaacaacagggttaatagcctcatgtgttttgcaagataaaagttcattttcaacaagaagattgtcatgatcaaatttaatttgagtatagtcttccttgatcttaactagtctattttgcaactccctattagcttcatttaatttgtcatatttttccttagcatcctttagggagtttgtgagctcatttacacgtgatgacatagttttattctcttcttttatttcatcactagcctttataactatgtcatacttggcatttaaagattcattttcatttttcaacctatcacatttagcttttgactttctaatgatttgagtatattctntaagtaagtcagctaactcatcatatgaaggtgaagcaaattcttcatcactatcactatcactatcatcatcatactaatatcattttgtgccttcg

SEQ ID NO: 6599 - DNA, 435 bp, Zea mays
  unsure (1)..(435): unsure at all n locations
tatggagtctttaacacaaccattggcataattgtataagtacattatgttgaatttgatgaatctaatggctctcaagatgaagatgataaacgacatgatgtgagaggtactcaattgaacaatgctatgaaggctattacaatttgtgatatgaaaccaagagaggtggtttaccagaaagaagatcaagaagtatggaaatctacgatcaacctagcacaagtggtattcatgatcaagaataactaagtgatcaacccagctaaagtgctagaacaaactatactatcaatcactatttgataagatcatctattggaccaaatagttggagactatagatgtggtgttcaaacgagatcaacgctaacatcattttgtgagcactacttgnttgtttcatccatcgcgctacatagactgatgaagcat

SEQ ID NO: 6600 - DNA, 346 bp, Zea mays
agcttcttcattaaaactcattcctcatgtttcacggtggagctgccaaactcgatatggctaggcttgcttggactttgtatgccatcatcttcttcttcatcgcttccagcttcggcattagcgttatccatctcgggaaaagcttcttcctcctctggaataatcaacccagagcgcctcataacttctgaaattggagctgtttcagcggtttcagactccccgccctcgtttgtcagtcttgcagtagatctaattctagccatttcaattcttgagacgaagctaactttcaattgacttgacgttcgttcagagaccagtcaacaagtgcacagagcac

SEQ ID NO: 6601 - DNA, 387 bp, Zea mays
  unsure (1)..(387): unsure at all n locations
tctccaagctagagattgagccctgccttaccagagcatcangatcatcgtcgtcggacttcggtcacccaccaccgcgtgtagaccgagctatctagtgagccattcttcaattcctcgcacccatgccttccctagcacctagtgaagctcactgaccagtttaattgaactctaccgccctggataggccggagccctcgcccccgacgagctcccctgcctgcgcatgtggatcggcctactccgaccgtcctcggagacgatccgcacatcggtgtgaccgtcacgacctcccctacaccctcggccacttcaccagagcaatctcgccggtggtaagcccctctgccctattctccgccgcgggtactatataattgggag

SEQ ID NO: 6602 - DNA, 467 bp, Zea mays
  unsure (1)..(467): unsure at all n locations
taagaaatcttattccaacatgggcaagtcggtgatgccatatccaccccatattagtcttagcgattaagcaagtgtctagttcagcttggttatcattaaaatcaactaaatatagctgaccatctaatactcccttaaatgatattgaatcatcacttcttctaaagacagtaacacctacattagtgaatagatagttgtagcctattttgcataattgagaaacagaaagcatattgtaatctaatgagtctacgagaaaaacattagaaatgaaatggtcagaagatatagcaattttacccaaacctttgaccaaaccttgatttccatccccgaatatgatagctctttggggatcngtcattttctcatatgaggagaacattcttttctcccctgttatgtggttcatacacccgatatcgattatcctactagatccaccggatgcataaacctac

SEQ ID NO: 6603 - DNA, 449 bp, Zea mays
agctgttgaacccaaggatagccattagaggaagtgcccatggaggtggcaaccagttgttaggtgggggacgcctactttgctctcttatagagtagtaaagattatcaagaaggttgcaacatttagatgtgaccaaagaattgagatagcaggttccatttgacaagaataagataccaaatcactgccgcactactcaaaggaaacacggatctgtagatacataaaccacatatggaatagaactggacaaagaattttctattcaagaaataaatacagacgctatacagcaaaccatgagaactatatgaactataagacctatatcatctaaagtgtatcagattttcatctctggaggcattctaacatctaagctaggaccaaaaggcccacattctcggttctaatatattatagtgataaaaaattgaacataccta

SEQ ID NO: 6604 - DNA, 470 bp, Zea mays
  unsure (1)..(470): unsure at all n locations
gagaacacattttgggactaacaaatgttcattntgttaaagacaggatttgtagcgcatgtcaggcagggaagcaagttggtattcatcatccacataagaacatcatgacgaccgacagaccactcgagctcctacacatggacctattcggctcgattgcttacataagcatcggcgggagtaagtactgtctagttattgtggatgattattctcgcttcacttgggtgttctttttgcagganaaatctcatacccaagagaccttaaagggattcttgagacgggctcaaaacgagttcggcttaaggatcaagaaaataagaagcgacaacgggacggagttcaagaactctcanattgaatgcttccttgaggaggagggcatcaagcatgagttctcttctccctacacgccacaacanaatggtgtagtggagaggaagaatataactctattggacatg

SEQ ID NO: 6605 - DNA, 427 bp, Zea mays
  unsure (1)..(427): unsure at all n locations
ctgcagcttacggcctctcagggaagctatccgagggcttggaccgttctgatgagggcaagaaaggggttggccacggtggttgccctctggcggctctggcgggtcgcggggaggtcgccggagctatgggcgagctcgggggagttaggcgtggtacggaggatgcaacggggaaggcagccgggcactgtgacgggctttatagccgtggcgcgggcgtggtcacaggcggccggggtgcgcgggggttcgcgcacgggcgtgctctgagcgcgcccccgagtgtcagcccgcatcgaacacgtgggagctcgcttctgtcatggttcaacggcagattngagcaccttagtgtgtgtatcttggccaagccactgtgtacgttctcttccctgctacatattctaccttttttctgtgagtt

SEQ ID NO: 6606 - DNA, 342 bp, Zea mays
  unsure (1)..(342): unsure at all n locations
ctgttccaatgtacccaggacgatgaggagtacttgcaggcatacgtccggatgttcttgcgacttaaagctcaagcgcctacagtgcctaatgagattgtcattgaagccatgatcaaggggcgtagaccatgaccaacatcgcaatattttgcaaagaagccaccacaaaccttggagaagcttctctagaaaatgggatgagtacatccgagctaacaaccgatttcgccagagaagggaggaagcctataggtattctgagatgactagggccttcataggaaggctccaccctacgcatgttangacaatccacaatcctagctcaagtgatgacag

SEQ ID NO: 6607 - DNA, 493 bp, Zea mays
  unsure (1)..(493): unsure at all n locations
tggacgtgaagagtgccttcctcaacggaccaatctatgaggaggtctatgttgagcaacctcccggctntgaagatagtgagtaccctaaccatgtttataggctctctaaggcgctttatgggctcaagcaagccccaagagcgtggtatgaatgccttagagatttccttattgcaaatggcttcaaagtcggcaaggctgatcctactttattcactaaaactcttgacaatgatttgtttgtatgccaaatttatgttgatgatatcatatttgggtctactaacgaatctacatgtgaagaatttagtatgatcatgacacagaaattctagatgtcgatgatgggggagttgaagtattttctatgaattcaagttaagcaactccaagagggcaccgtcattatccaaacatagtacactcaagacatcctaaccaagattggaatgaatgatgccaagcccatcaagacacccatgggaacaat

SEQ ID NO: 6608 - DNA, 450 bp, Zea mays
  unsure (1)..(450): unsure at all n locations
agcttcacgctcctccccacanatcaccgaagtcttccctccacgatcgcgcacgggattaccgtatatcctgcggnctctctctctctctttgattcttctctctcagctcgacgcagatgcatacgacggtggctacgactaggcggtcaggagtttataggagcccaaaggcatccggtcggtaggattcctaggtgagccggcgctacggcatctctactcgaaggcgaggcagctgtcgagctcaagttttatagccacaaatacgtgggtgaaacggctgaggcgtatatcacggcttttgttgtaacagacaacaagaccaaagagtttaccgttctacacgctgactctacatcggctgctgaggcttcacagtacatgcaggtatggttctggaacccaaacactggccagggcgatggagtcgcctgcgtcaaggctagc

SEQ ID NO: 6609 - DNA, 478 bp, Zea mays
  unsure (1)..(478): unsure at all n locations
tgacttgtggccaagggatattcacaagtcgaaggtttggatttctgtgaaacctatgcacccgtagctaggcttgagtcagttcgtatattacttgcctatgctacttaccatggctttaagctttaccaaatggacgtgaaaagtgccttcctcaatggaccaatcaaggaagaggtctatgttgagcaacctcccggctntgaagatagtgagtaccctaaccatgtttacaaactctctaaggcgctttatgggctcaagcaagccccaagagcatggtatgaatgcctaagagattttctcatcgctaatggcttcaaagtcggaaaagctaatcctactttctttactaaaacaattgcaaatgaattgtttgtatgccaaatttatgttgatgaatatcatattgggtctactaacaaatctacatgtgaagaattagtaggatcatggtacaataattcgagatgtctat

SEQ ID NO: 6610 - DNA, 388 bp, Zea mays
  unsure (1)..(388): unsure at all n locations
agcttctaaagggagaacacgtgataggtctaacttatgtgcatttcgaanaagatagaccttgtgcagcttgtcaagcaggcaaacaggtgggaagctctcatcacaccaaaaatgtgatgaccacatcaagacctttagagatgcttcatatggacctcttcggacccgtcgcctatctaagcataggaggaagtaagtatggtcttgttatagttgatgatatttcccgcttcacttgggtattctttgtgcagaataaatctgagacccaagggaccctcaagcccttcctaaggagagctcanaatgagtttgagctcaaggtgaagaagataaggagcgacaatgggtccgagttcaagaccttcaagggaggaatccttga

SEQ ID NO: 6611 - DNA, 491 bp, Zea mays
  unsure (1)..(491): unsure at all n locations
tgctcaaacaccttttctgatggaagatgagttaatgccatataatatttcaatcgtaaatgtctcagtgaagtgaggccaccaaggcaaatagctaaagcttcatctgtaatactgcatgaagaaagagaaagttcacagagtcctgacggtagaaccaatggcatcttcatggtccttccataaatgaatcttatcctctgctcatggaaaaagagccatgccttgatgatgttttctttcatccatactttatcttctctttcctccagaccactttcaataatttgaagatgctttgatacatcatcatccatcatcaatgtcatcaactgtttcagagatgaatagtctttcgacagtacactcctaacttcttctcctgaatccacctcccacatcaatgcaagtttatatgccangtcgtctgccttcattattatatattccctcacgtcatgctgtcctagctcaatgttggtgataaacat

SEQ ID NO: 6612 - DNA, 275 bp, Zea mays
  unsure (1)..(275): unsure at all n locations
agctttagtgagtatagagagagatttgttgtgtttatttganctcttgcgctaggattgcttccttctttctcattcttcttgtgatcaactcaattgtaaccgacgcaagagacaccaaatatgtggcggtccttgcggagactttgtgtcctatacgatatgaaaaaaaagctcactcggtctaattgaccgtttgagagagggatagggctgaaagagacccggtctttgtgaccacctcaacgaggagtaggtttgcaagaaccgaacct

SEQ ID NO: 6613 - DNA, 399 bp, Zea mays
  unsure (1)..(399): unsure at all n locations
ctcgcttatgactgagagtgattgagtgtcatttttctctnttgctcgtatcacctctttctgtccattctttcttgagatcatactcacttgtaattgaggcaagagacaccaattgtgtggtggtccttgccggaagcttgatttccaagtgatttgagaagagaagctcactcggtccgagggaccgtttgatatagggaaaggggttaaagagatccggtctttggaccacctcacccgtgagtatgtttgcgagagcccaaccttggaaaacaaatccttgtgtacactccttatttgctcgagatttgtaatgaccctctctcggaactcgtgttatttatacgctacccggcttgagctgggtagagtgtaatttaattcccctttaccccc

SEQ ID NO: 6614 - DNA, 394 bp, Zea mays
agcttagaaaagtctggtataaatctgcggtaatatccagccagtccaaggaaacttcggacctgatgaacagtggttgggggtttccactccaaaatgtccttgactttgctggggtctaccgcaatccctctggcagatagaacatgtcccagaaattgaatttcctccagccaaaacgcgcatttgctaaacttggcatacaactgatgttccctcaggcgcgttaacacgatccgtaaatgttgggcgtgctcctcttcattcttggaatatatcaaaatattatcaatgaagaccaccacaaacttgtccaactcgggcatgaataccgagttcatcaaataagtgaagtgggccggagcatttgtaaccccgaagaattactagatat

SEQ ID NO: 6615 - DNA, 403 bp, Zea mays
  unsure (1)..(403): unsure at all n locations
tggtgccaatggagaagcaaanatccttgaagtcttggctgtcaaactgcttgccgatgtcaactgttaattctgacggtactccgaagcggcaaacaatgttttgccaaaagaatttctgggcagtttttgatgttattgtggaaacaacccttgcctcgatccatttggtgaagtactcgacagcgacgaaggcgaatttaaggttcccctgagcggtgggcaggggcccgacaatgtccaggccccagtgctggagaggccatgtgtggacaatcagctatgtatactgcgaggggttgcttgaccgaggagaaaacttctaacaggcttcgcaggaccttgtgacccgatttgcggcgcagatcattgcgggccagtaaaagccttggcggatcacctt

SEQ ID NO: 6616 - DNA, 399 bp, Zea mays
  unsure (1)..(399): unsure at all n locations
cagacaaaaatccccattcttataatagcttccggagtgagttgatgaaggtagatttggaatgttttcagtacctcaacaacaaaattgctcagggggaatcgaagcccagccttgaggaggcttcggaaaatcacaacttcatcttcttcaggggtgggagaagtcttttccccggcatcagctctcacaatagatatgtctcggaagtatcgccccctcatattatcaatgtgactctgcttgatggttgttttcccaaaaactgagtgacttggtcgccacggtcgatcttcggcctcttccccatcactttccacatcatagctgtctctgtcatcagtatcttcggacaaaccttcgagaatctccttcgngattttctctgtattaatctct

SEQ ID NO: 6617 - DNA, 475 bp, Zea mays
  unsure (1)..(475): unsure at all n locations
gggcgactgccagttcgacctctggaagcagtcttacgtggccgcatgcgtcgctgtgtacgacaagctccagcgcagccgccgcttggacgcggtccagagcggctgcaccgcgctgtccatcgtcaaacagggggacctcatggtcgttgccaatgccgccgactctcgggttgttctgggcacctcaacctacgacgacgctgtcacgccgtccagctcatcatccacctgaagcccaaccagccacgtaagtcgctactaaccgatcatgaattcttgtgcgctgggatgacgtccattgctgctgttgtgttagtgtcctcgaacaagatgtatgtagaggagtagcacatccggtggtacaacgatcaggtgtactacctcgctgatgagcccggngtgcacttcatttggaagcccaaccaagagtcattcgtactcaccatgtcgcgcgcgtcaacgactactatat

SEQ ID NO: 6618 - DNA, 427 bp, Zea mays
  unsure (1)..(427): unsure at all n locations
agctntggcaccgtagccgnttcaatatacctatgtaggtgcgttaaaactttaatctttttgcctttcagcacaatagagatggccgaagcgacatttttccttttctttccctgctttcacgagggataagtgtagtacaggtacacgaagccgataacatcaaaaactctgttcaaccttttctttccttgtccttcgaaggctaaggtcatagcatcatcttcggctcttgtgtacgctccaagcaattcgtcgctagtcacctcaacacatgtcagccagtcatcacttggctcgtcaaactggtctctatatctgaaggtgtatttcaagtaaaaccaaaccaccttgactggactcgatagcaggctccttcgccatctcctagtcattcacaagtggccacactctgtaggctatgtgc

SEQ ID NO: 6619 - DNA, 455 bp, Zea mays
  unsure (1)..(455): unsure at all n locations
tgtctntggctcatcctccttcttcatccagagttgatgataacccgagtagcagtctagtaaactcatgagttctgaagaagctgctgcatccacaagtgaatctattcttggtagtgggaattcatccttcagacatgccttgtttagatctgtgtagtcgatacacattctccattatctattagctttctttaccatgacagtgttggccagccactctgggtatgttacttctctgatgacgctagcacttagaagtctcttcacttcatttcatgcaccttnggctttatcatcggacattntccgaagcctttgctttcttggtctgaaggacgggtccacaatgagtgagtgctcaataacttctctattaacaccacagagatcattggttgtccaagcaaacacatctttgttggtaaacaagaatcttaacaaagtttttttct

SEQ ID NO: 6620 - DNA, 343 bp, Zea mays
  unsure (1)..(343): unsure at all n locations
agcttcagctccatatatattgtggatcgctnttgagtctgtccaatttccttcagtctatctagcagcttcttgacttccatgaatagcaatgggcccttgttccgaaggtatcttcatgcatagatatgctgggtgaagtattgcttcaaaagcattgagtgttcctcggccaattattgcattgtaggggtattccatgtcgacaatgtcaaagacaacctgttcggtccttgtgttatgaacaaagacgaaggttactggcattgtgattttaacgagtgccacaatttgtcttcctccgaagccgtatagaggatgtgtagcatcgtgaatcttgtct

SEQ ID NO: 6621 - DNA, 490 bp, Zea mays
  unsure (1)..(490): unsure at all n locations
ntgcaggagaaggagatgatatgaagcctatggggcttaagagtgtcaagacaattcttgttaactcaagctatcaatcttcaaagatcgatatctatgattgaaccaaggttatttttcaaattactatatcttaaactcatatcatctcgaaggaagatgttgatgttgtatgaaataaagaattatcctatgccgaanaatcaaggcctacaacatggaggaaagccaaaggatggtaacatttatgtttttaaatgcaaagtatcgtagaatatcatttcttatgtgtcttgtgtagtcacataggaaaaagaaagcacttcaaatgttttaaattatgtcaccattctttgaagaaattcctcccatatggtagaatgttgtaaggcccacaaaattggtaggaaaaaaaattaacataaatataatgagtaataaataatgaagctttggaatgaacctttaatggactanacattcgaaatat

SEQ ID NO: 6622 - DNA, 386 bp, Zea mays
  unsure (1)..(386): unsure at all n locations
agcttgaagttcagacatttatgggcattgttgaaataatgtgtggcgaatgcgatggttcaagtggtcttgtgagagacccatcccacatatgtgttgaataaacattgttccgctatatgacataatttggcaaatgacatgaattaaaatatgtagttaataggattctaaagatccgtcatgagatccaaggaggactcatattcttgaattataaacattcaagcacattgatgacctataaaaatagttttatgcatatgattaggactctntttcctaagggtcactttaggtacaagattccaaatggtgaaatccacttggtatttagaagtgaaagggtagaatgatcagaagtaattcacaataaatgagaaagt

SEQ ID NO: 6623 - DNA, 353 bp, Zea mays
tccaactccatcttttcagaacttaggaccaacacttcttccttgataagtttaagagcatgcatatgttcctctaacttcatgcctccctggataatatccctgtattccatttcattatcaacacgaagtctaggaatggtttgtttggcaagtatatggatctcgtcttcaatgacagctaattcttgcctaaggcccaaaatatcctctagcacaagagtattattagcagcaattctacaaatctcttaacaaccaactgcaagttcgtcctgtaaagggagcagaggcatgggtccaggaactcctccatctaatgaatttgaaggggaatttctatgaccattatt

SEQ ID NO: 6624 - DNA, 378 bp, Zea mays
  unsure (1)..(378): unsure at all n locations
agcttcggtattacaaaccgacttatagatagaatgaccttttagtccatanaggcctgagtcaatgttgtaaactttcataaggggcatacttgtaatctctcacaggctgcgccctgtgcctataaatagtgaacagtattcctctactgttcacggattccaatatctgaaatcgcattattcggaaaccaatctttgccaaggcagaggtataactgtattcacttaaatatgttgaatgaatgcaatatgactcatttatgattcggcaccttcgcacctcaatccttacgaacgctctcctctctacagctcgtaactaaacaaacatcccccgccccttctcgcacacacttcttcctacttcctcccctt

SEQ ID NO: 6625 - DNA, 465 bp, Zea mays
  unsure (1)..(465): unsure at all n locations
acaacattgccgagtacgaagccctgcttctggggcttcgaaagctaaaagcaatgggaatcagaagggctgttcttaaaactgattcccaagttgtttcgggtcatatcgacaagagttgcaaggttaaagatccgaagcttgaaaagtatctggacatggttcggagagttgaagcttcctttgagggattttctgtcaaaaatatccctcggggacaaaatgagcatgctgatttgctagctaagtcagcagcacaggagctgcccttaccttcggatgtcttcttcgaaacaataaaagcaccttcggtggaacttcttgaaagagcggtcctcagtatatctcctgttaatagcgaagattggaggactgagatcatctcttatcttcagggtaaattcctttcagatgacgaagcctataacatgangatagaggcangagctcgtccatatgtcatga

SEQ ID NO: 6626 - DNA, 444 bp, Zea mays
  unsure (1)..(444): unsure at all n locations
gcaagcttagaccagganaatatctcgccgacgaggagttcaatctcgtctcagattcatgtagtaggtggtcgcgccctttaaattcagtccttacctcatcacttcttatcgttcttccttttagctttgcactgattggcttatccaaatttattccaccaatgtcaaaatttagcttctacataatcaaatgatatgcacattattacaacataccaaaccagatgtgatcttactgaaatagatattttatttatgtaacattgtattctcgtttattaccttcctagactttttgtctgatccacaaccaccacaatcatctacgttgagctggcgtccttggcattgatctcgtcttagttgatatgttcttattntttttatcaatgtacctagcatgatagcctctactagtcgatcgatgatacgtacaagtag

SEQ ID NO: 6627 - DNA, 446 bp, Zea mays
  unsure (1)..(446): unsure at all n locations
cgtacattatgcanatggttgcccacagaggatngctactaccccagttcataacaagcagcagactccgggatctgttaagggattctctattgacagggttaatcaagtcagcgctgatgctactcctgatggggatgacatcgcacttggtatgttttacattaatgcaattcctgcaacaatagtatttgattctagtgctacacattcatttatgtctgctcgatatgccaacacacatgagttaccactgaatattatgaaaacatcaatgatagtaattacacccaaagcgcctgttgaggaaaatcatatgatacatanaatggcattgacaattatgggaagagaatatggggctaccactataatattagaggcaagcagcttggatctaatccttggtatgtcgtggttaagaaaggcaaaggccattatacact

SEQ ID NO: 6628 - DNA, 374 bp, Zea mays
tcggaccaataccataaaggctaccacgcatttggagtggagagatggtgagagtagcgtgtaccctttatggcaagtggctggacggtggagtatctgtgctctcggttggcgtgaacccattctagtcttgagaaacccaggtgcgagttgacatatgcatgggttaagtgctatgtatgtcgtgtggtcgaagaccccagctgggtattaatcgatttggatcgccgctactttatggacatgaagacttggtcactaacttacatgtagcatcaagtaaacagaagggatgataaaagatggctagtatagcgcaagttcttgatctagaattataggaaatctagatgcaagtgactacttaacttgat

SEQ ID NO: 6629 - DNA, 431 bp, Zea mays
tcggatatagattcatgacccagatctgcgttagtgtgcggtggtacatggcaggcgacgaagctcgatgccatcttaaaccggtcagaaacttatgtttattacttttaccttctcctttgaaatttgtacctttcttactctgctatttggtatatacaggatgacgaagctgaagattgacaattctgaagcttgacaaaactgaagacgaagccttagctgaagcttaaagttgcttataatgtgctttcctgcaaaaattcttggagaaactcttgtaatatggaataacttatgtaaatttgtacataccttgtaatatattctgtctcccttgtacgtattcaatctgctatgctgtggacgagacttctctattgagccgcaggcacgaaacaccttcccttcttttcgtacacaacgaagca

SEQ ID NO: 6630 - DNA, 392 bp, Zea mays
ctgagctgcagcttaatggagcttcatcacacaagtggaattgttgtgcttctcccttcaggaggttggtgatatggataacaacacattaaaagtctaacacatttgctaattggtgaacagggagattagtatgatgaacacacttgcttagtgtgttatgatcagcgaacaaggttcatacactggtggaactaccaggtgagacaatgcggatgggcttaatatggtctctatattgtgttgaatatatggacaaggtctgacaaattactatgcggagatatcaacacaattgaggttgaggagattaatacgaatggtgactctcaagtgaataaaatatgaggactcgagaaatggtttgaacatcttactatcaatccatatat

SEQ ID NO: 6631 - DNA, 435 bp, Zea mays
  unsure (1)..(435): unsure at all n locations
catgggctagtctgcggtgccagaaccaacccatgttagtcttagcaattaaacatgtgtcgagctcagctctatcaaaatctactaagtatagctgaccctctagcacacccttaaatgctattgaaccatcacttcttctaaagacagtgacacctatatcagtaaaaagacagttgtagcccatttgacataattgggaaacagaaagcaagttgtaatctaatgaatcaacaagaaaaacattggaaatggaatggtcacgtgaaatagcaattttacccaaacctttgaccaacccttgatttccatccccaaatgtgatagctcgntggggatctttggttttctcatatgaggagaacattcttttctccccgcgcatgtnggttgtgcatccgctgtcgagtatccaacttgagcccccggatgcat

SEQ ID NO: 6632 - DNA, 459 bp, Zea mays
  unsure (1)..(459): unsure at all n locations
gacacttcaaactcggcttcatagtactcgctccggtttactattagttgtcgtttaggacaacgacactgtctccaaaatataactttgaccaatgttttttgttaaaatacaaatgaactcttntacattatacttttaaaaagtagtgatatgataatatggcgcatataaatattacgttccaaaactaaataacacaatagttatttcgactcaaaatgttataagtttgactcgaaccttatacaaaacgacaactaataggaaaccggagggagtatattctatggcccgaacatcgagcactcctagggtacagggtcataggaattcaacgactcatgatacataaaattaggattaataatatcattggacgacacttgaattgtatgaaccactaatgcagctttcattgaaccctaacagacaaactgagccttaagcgcgcgaacg

SEQ ID NO: 6633 - DNA, 408 bp, Zea mays
  unsure (1)..(408): unsure at all n locations
cttgatctcgtagggtccaatgtaacgaggagctaacttgcccttgatcccaaatctctggacacccttggtgggtgataccttaagataaacatgatctcccacctcaaactgtagaggcttccgcctcttgtcatgatagctcttttgcctggcctgagcagcttctaagttcttcttgatgatcctgacctttgcctctgcttcaagtaccaaatatggcccacaaatttaactttctcctgcttgataccaattcagcggggttctgcatcttctcccatataaagcttcagaaggtgccatctttagactggactgatagctgttattataggaaaactcagccnaggaaagacacttgtcccaatcatttgcgtagaggagtacacatgcccttaacatatc

SEQ ID NO: 6634 - DNA, 441 bp, Zea mays
  unsure (1)..(441): unsure at all n locations
gcttctcctgtccggaataatctacggtattccagacagtcgacttattatagttgtagatgaacctttggcacctgtagaacatataatctagagcaaactcgctagtccaattatttgtgttgggcgattcaaccaccaaaatcaattaggaagtaggtgtaagcctaattcccttacaatctccccctttttggtgattgatgccaacacaaaccaaagcaaatataaaagtgtataattgaactagtttgcataattgtacgtgcaaaggatacttagaatngcgccaataagaattcttgcatggattgttactttatttttaacattatggaccacgcatgcaccacacgttatgtttttgcaaattcttttgtaaatccttttcaagtctttttgcaattagtcaaagatagatgaataagaattcgagaagca

SEQ ID NO: 6635 - DNA, 424 bp, Zea mays
  unsure (1)..(424): unsure at all n locations
agctnttgaacgtactaagcacatgccgggaaatatggtaaccggtaaacctagtacctgagtgaagccgggcgcggactttatccctcatgcgacctgagacagggtctcccatgctagctatggtgggtacaagtgcggccactgcacgacggtagtcggggtcagtggagcattgtatgccaaggcggtgaggcctggacgcgaacggngaatcgatggggacggttgtcatgtgtggggtcggagtaccctgacatgccgtgtgtttaggtttaccttgcaagggttaaaaactcgattcgaatcgtctgcttctcgcagctaatgagactgcttgattccttgtactgcatcgagtaagaagtgaaatgtggattatatgagataacttgttgaatgaactaattgattggtaccatgt

SEQ ID NO: 6636 - DNA, 397 bp, Zea mays
  unsure (1)..(397): unsure at all n locations
tatacatataagcatcatgatcaaaacacatgggtttttatatatgcaaaatgtgcaaccccaacaaaaaccctaattgagccctatgaacaaaattcaagaaaatggggaaaagagtatgacaaatttagaatcatggcttgggccaattataaacattgaagtatatttaataagcaacaataaagattcaggaagcttggccaaaatatattaaataaaactctaaacaagcctctcaaatgggatttcattatggaattatgaaattcagaattctgaatttcagaccttgagccaaagatcaagcgtgttcaccttgatccctaactcanatcctaatggccccactgtacaaaatgtgcataactaacccctctatctcatgccataagat

SEQ ID NO: 6637 - DNA, 294 bp, Zea mays
catgcaagcttccattatcaataaggtgtcatcagcatattgaacgatcagaaaatcttgaccacagttcgcgacatggggcaacttgagcaggtcttgttgccgcccttaattgatgatgctctgcaccaaatccgccgcgagaacaaaaagaagaggcaagagggggtctccctgcctaccctgcgcttgcaatgaaaagattcccttggtccgccataacgaagaccgatgacgtcccacactaaaaaatatccctaatccagctcatccacctgggcccaaacccttatg

SEQ ID NO: 6638 - DNA, 454 bp, Zea mays
  unsure (1)..(454): unsure at all n locations
ggctnttgaaataaatgtaagtttatgtaattgcttccgcatttcttcatctccgatgttctgtaatgtctgcaagacgggtgaaacgttcctggtaaggtaaggaaagataccgaacttgtcaagtagttcaggggcacctacagggttgtctgaagtccgttggacaaggacaactgtaggtgggcctaattacttgggaggttccgtcacacgagggactcccacgcctccgggatacagatacctcactcgtcaccttcgcacgaggcaactcacacttggttaagcggttcagttagccgataggcgagtcctagtgctcagaatgaggaaaaaacatggctccgtgccaaaaatacatacatgttcaggcctcgacagccacaatgaacagacaccggcactcaatgtgccattacaaacggaactccggttccgttctcgcgggtat

SEQ ID NO: 6639 - DNA, 443 bp, Zea mays
  unsure (1)..(443): unsure at all n locations
agcttctaaagggagaacacgtgataggtttgactaacgtgcaattcgaaaaagatagaccttgtgcagcttgtcaagcaggtaaacaagtgggaggagcacatcacagcaagaatgtgatgaccacttcaagacctctggagctgctgcatatggacctcttcggacccgtctcctatctgagcataggaggaagtaagtatggtctagttattgttgatgacttttcccgcttcacttgggtgttctttttgcaggataagtctgaaacccaagggaccctcaagcgcttcctaaggagagctcanaatgagtttgagctcaaggtgaagaagataagaagcgacaatgggtccgagttcaagaaccttcaagtggaggagttccttgaggaggaggggatcaagcacgagttctccgctccctacacacatcaggcaaat

SEQ ID NO: 6640 - DNA, 471 bp, Zea mays
  unsure (1)..(471): unsure at all n locations
gcgcacaaaggacgtccgagctgtggccgtggagcgaggaggaggacngcagggaaaccctgcagaaacgccaggcacgggcaccgatttgaatttccgctgggaggaggtcctgatgtatcaatcgatacaactgttcatagcgttttgctgcaactattgtagtttagctacctaccaccgttgttgtaacatgggcttgggttccttggagtaagacgtagacggcggcccatcgtgtcctgtgggtttggttaatggctgggggaaaaaaaacgagaggatggaggggatggtgtattggtttgaaattaataataacgggcatgatggccggttgattattttttttaaaaaaaatatgtatttttttagtggtagcaactagtgctacgagtaaatagataataaggttttcggacataattcatagaaaccttanaaggctagtggtagtttggatacccacgt

SEQ ID NO: 6641 - DNA, 467 bp, Zea mays
  unsure (1)..(467): unsure at all n locations
taagtcacctgcggcatgcaagcttccatagtatgcggctgacctctatagtatgcggtaagcttccaatcagcgcccncgtccacccccatccatgccccattccaaccttggcgcaaccttccaacgacgatgcctaccttccacccaacatgtccgccattactgcttttaaaagaaggacacaggcgatgccgccaacccacccccattccccacgcatcttccccgtcgtggatccacatgaacaaggtactatcagtttgttttgaattgtgttctattttctgcattttagagctgatgcacaaacctaattttgaatgacccctgcacaactaagttcaaacctgaaaagctagaggggtggatgataatttgctgatagctattgaaactggtggatgatagttcaaacctgatacgagacaccaanttattctacactgtaatgaaattttacatgt

SEQ ID NO: 6642 - DNA, 424 bp, Zea mays
  unsure (1)..(424): unsure at all n locations
tgccgtggatgaattggtctagaatgtaattagtgtgtatgccttttatatatggccgcaatgcttgctaagagacttatttgggaagactcatatgccatggttaaaactatacctatatctgagaagcttntcataggaggaggtcttaatgggcatgtatgtacaacaagtgtatgtttcgaggcggttcatgaaggttttgatatggtagtgggaatcatgagagagaagccttggactttgtggcagcttttgacttgttgatagccaacacttcctttatgaagagaattccatttagtaacctatagtagttgccaacactctagtcagattgactttgtccctcacaggaagagaggataaacgagcatgcttggattttaaggtgatactatgggagcgtgttgtctcttaacat

SEQ ID NO: 6643 - DNA, 361 bp, Zea mays
  unsure (1)..(361): unsure at all n locations
agcttcaagtganttgaagntccatgttgtatcattcccaggttcaacttctccatttcttggcataacgtaatgtcagaagtcttcattgtaagacaatgataggaagccttgcgacttagtgcatctgccactacattagccttgcctgggtggtagtgaatctccaattcattatctttaatcagctcaagccatctcctctgcctcatattaagctctaactgggtgaagatatacttcaagcttttatgatctgtatagatatgacagatattcccctgcagataatgatgccatattttcagggcatgaaccacagcagctaattctaggtcatgagttggataatgttcctcat

SEQ ID NO: 6644 - DNA, 482 bp, Zea mays
  unsure (1)..(482): unsure at all n locations
agcatgctctgcanataaacaaccttcgttaaaatatattgccatcattaanaaacaatagangctagagagaaggatgtttaccttgaaatttgaataaaataagctgccgacgatatgttgtcgtcggtagcggctgatgtctgtctctagtttcggaaaaccgatactctttgatagagtaccgatgattttagccccagctgagtcccggatgcagcccagtttttcatcatcaatgcctccaaatagaagagctcctggcttgtatccgcaagatttggcgtattccttaagctcttctttttcggccttcgacagtttttgcccgactaaattctgaaatgagtaggcttcgtcgtccgaagtgtcttcggctatttctttccctttcctaggcactgtggccatggtttcttcagcagtggtggcagcttcttctgcagccatgcctgttaaaatattgntgatgtcttcaatag

SEQ ID NO: 6645 - DNA, 355 bp, Zea mays
  unsure (1)..(355): unsure at all n locations
agcttgacaatgaggagatggcgctcatcattaatagcttctgccanatcctcaagcaaaaggaggnggaaggactacaaaccctgctccacaagggtgtgctacaagtgtggtaagcctagtcattntattgcaaaccgtcctatatctagtgatagtgacaggggcgacgacaagagagggaagaagaaggagaagattagataccacaagaagaaaggcggcgatgcccacgtgtgtcgggaatgggactctaacatgagctccaccgactcttcctccgacgaggatgccgcaaacatcgccgtcagcaagggacttctcttccccaacgtcaaccacaagtgccccatgg

SEQ ID NO: 6646 - DNA, 483 bp, Zea mays
tagccatgtgcaattctatgtgaattattgccaaccaattatttttagccaaaagggtgaactaacaattaaatgagtgcttgcagatatttgggacagcaacacagcagctacttgttttaatcataacttttcaaatattaacccacaaatagcaaactaagattctctgaaaagcttaaaaagtgaactacaactttggtatttttacctccacaggattcagctattatcaaggtcaaaaagtgcaattaccgcaacactgtccagatttggacagattctaacttgcaacttcaaaaattcacaactgaagattcaagcatccaaacaaggtgatcctagactttctggacaggtaataaaattgtatacatatcatttataaccatcttaacgtgattcaatatttaactaaggataaaatacactataacgctttgttgtccagaattggacagattcagtcttcatagttaaaca

SEQ ID NO: 6647 - DNA, 244 bp, Zea mays
acgctcttggtcaaatacctttctagcaaaacatcggtcggtgattgtaacgcccccgatatatttgcagatgaattttttcttctctttactcgccaaaatacgggcgttacctgtatctttgtttatatccttcgctaaaacttgaccctttccaaagttctatcgggatgtccgttggatctcccgtgcaagaaaaacactaaatactctatgtttgttgttgcaccatgccgaaccctgc

SEQ ID NO: 6648 - DNA, 480 bp, Zea mays
  unsure (1)..(480): unsure at all n locations
tctaaagggagagcacattntaggattaacaaatgttcattttgagaaagacatgatttgtagcgcatgccacgcagggaagcaagttggtgttcatcatccacataagaacatcatgacgactgacaggccactcgagctcctacacatggatctattcggcccgatagcttacataagcatcggcgggagtaagtactgtctagttattgtggatgattattctcgcttcacttgggtattctttttgcaggaaaaatctcatacccaagaaaccttatagggattcttgagacgggctcaaaacaagttcggcttaagggtcaagataattagaagcgacaacgggacgaagttcaagaactctcaaattgaaggcttncttgagtaggagggcatcaagcatgagttctcttctccctacacgcctcacanaatggtgtatggagaggagaattaactctatttacatggcacgac

SEQ ID NO: 6649 - DNA, 422 bp, Zea mays
  unsure (1)..(422): unsure at all n locations
gctntccaannaagtattgttcactattcttggataatatatttgtagagttatgactgaaacaagcaactgctgtgctgctgtcctacatttattatgttcggtggattgctctactctgtggtgtatttcttgagtcggctatttcctcgttttgaccttggttgaacacatgataatataactaatacaattgtgcctaattatataagtaactagtacacgtctcgctaaattagcgaactaaattggttaaggtctaataagagttcgcctagtaaacaattgcaaaacccgattaagtaactattccttnttaactatggtctgctatatataagtcccaacaaatttaggtgtacttaactaagtttaaaattaagtaaccaatgaacgattaaagtgaacattgcgaatgcctg

SEQ ID NO: 6650 - DNA, 497 bp, Zea mays
actaagctcctattaaaagtacatgaacttggctacattgatcttgctgattgtaaggtttgttgttataaatctatgatgaaggcacagagctagacaaagagtattagcagataaccaagcacaagcagaaaaatcaggttgttcgcattcaacattttagccttgtcataaattacctaagtccgtttaacaagaattgttctaccttctcatatatatgaattaacttgatgaattatcacttatattacaaaatatgcatattgattctgcaaatgatatattgtcattatcacttatattacagtttattagagcacgtggggcgcgcaccagttaatagttatatataagtgtgatcactttcatctttgtagtgagctcctacaggatgcaggtgatgggccctgcactctaaggtggcttatttggcgacaagagaattgagtagattggagtgaaaaatagctatatttctccttaatcttatgtac

SEQ ID NO: 6651 - DNA, 409 bp, Zea mays
agctctgcctcgggcacaccaatatctttaaggttatctcacaatggggcggagagctggcgagagttgcttgcaccctctcgggcaacaggctggacgcgtgtgtatctgtgctctcgattggcgtgaacccagtctagtcttgaaaaaccaacccggtggcgagttgacatacgcaagggcttagcgctacatatgtagtgtggttggagatacccacctgggtattaattgattcggatcgccgctacttatccaacaagaagacttggtcactgacatacaccgagcaatacagtattgtaaagaggcgataatagaccggttgtatacgccaagcgttctgatctagattataaggactcttgatacagggatgacttaaccttggtattaaaactggaattta

SEQ ID NO: 6652 - DNA, 372 bp, Zea mays
gaagaggctgagcagcgccaacagtacaaggataggacgaacaagcatcgtcaggaggccgaagatgataatgatagtatggagaagaacactgatggccatgcaggacccagctcatcatatgacgaaaaccaaatcccggcggagtctgatgaagaaaacaacaattcgacccacccaagccgactgtctgtagaccgaaactcagtacgccaggctgatctcactgagttccataggatgatattcaagcgcctaggtgatagagagctgacaaagcctagggagacaaaaccacattcaagatccaccgaaacgaactgagaacccgtggcaaggctgttgcactacgcggaagatgcatctgacctg

SEQ ID NO: 6653 - DNA, 407 bp, Zea mays
agcttatgcaacatcgcttgagattgtctggacatatccaactaagacctgaagaggcgccagtgcatatcggaataattaggcgtcccgaaaatgtgaagagaggtataggtcgaccaactctgacgtggacagaggctgtgaagagagacctgaaggagtggaatattgacaaagagctcgccgccgataagaaggggtggaagtgtgcaattcacgtgcccaaaccctgattgatagcgtcgcttttcctccttaatcgattgaccttttcttgtgtccattttagatcttgctggcccttggggggtttatctctcttatgtgttcctccgttcgatgtttcggtctcctatgctctgttcctttctgtctttggggtgaaccctgaggttcatacggttcat

SEQ ID NO: 6654 - DNA, 368 bp, Zea mays
atctacgacgctctgcaatatctacaagacgggtgaaacgctcctggtgaggcaaggaaagataccgaacttgtcaagtagttcaggggcacctacacggttgtctgatgtccgttggacaaggacaactgtaagagggcctaaatactcgggaggttctgtcacaatgatcacacaaattacatgacctcttgatcatagcttcaattacggatcctattgcccaacaggggtttgctatagggttttgtgagattccccacttagatgtgcatgacaagctacggcatgatatccaaggtggtttgcacttgaataggaccttgaattcaagaatgatgtactctgtccaatacaatacccatgtg

SEQ ID NO: 6655 - DNA, 247 bp, Zea mays
attaaggtataaaaattgttttttgaaaaaaggttagaatgggaatatattaaaaggaaagtgaaaatgagtaaatgaataagaggaaataaactatgagaatattagttgaaggcacaataatatagagaaaaatagaacattttaattaagaagttttaaagatatgaagtattaagataaattagattagtgagaaatagatataatatatattttttgtaataaaaatatacgtggaaaaata

SEQ ID NO: 6656 - DNA, 308 bp, Zea mays
aagaaaaaaaggggagaaagaaagtgtaagagaagaaaaaaaaaagaaaaaaaaaagtaaataaagagaagggaaaaaaagaaaaaatatgacaaagaaagggaggaaaagggaagaagaagaggtaaagaaaaaaaacgagggagggaaaaaagaggaggaaaaagggagaaaaagggagaggcaaaagggaaggtaaagggaaggaaaagagggggaggggaaaacgaagaagatgagaggaagaaaaaaaaggggaagaaaaagaaaacaggaaaggagtaggaataaaaaaaaggggaaaaaaa

SEQ ID NO: 6657 - DNA, 440 bp, Zea mays
  unsure (1)..(440): unsure at all n locations
agctttacaaacttgngtattacatatctctactctccttaaaagaatctcgtactcgagaaataagaaggtctagggataagatggaaaaaatctatgcgaagctcttcttctctttcccatgttgcttcatcttctccatggtgactccattgcactttgcacatctttatcgccttatttcttgtaactcgagtcaatgtatcaagaatcttgacaggatattccatgtaagtcaaatcaccctagacactgagctcttccattggtaactgttcctcagggacacggagacacttcttaagttgagacacatggaatacattatgcacatcagatagattatcacgtagctcgagttgataggccatctctccaacacgcctaataactctgaatggccaattaagtgaggagacaatttgccttaactctaatct

SEQ ID NO: 6658 - DNA, 417 bp, Zea mays
tctccaggtttgtgggggcttcctggcaaaatattgagccatatgtactggtcgaagccccttgatcatggccttaatgacaatctcattatgcactataggcgcttgtgctcttagacgtaggaaccttcggacatacgcctgaaggtactcctcatggtcttgcgtgcactgaaacaaagcctgagcaatgactggcttcgtctgaaaaccttggaagctagtgattagcatatccttgagcttctgccatgatgtgattgtccctggcctgagagaagagtaccaagtttgtgcgacacttttgactgccatgacgaaggatttcgccattaccgcagtattgtccccatatgaagatatggttgcctcatagcttactaagaactgcttcgggtctgagtgcccatcatacat

SEQ ID NO: 6659 - DNA, 281 bp, Zea mays
  unsure (1)..(281): unsure at all n locations
tagcttgacatcggttttgttgnggtatgtgcatttatacacaccaaacttggcgccggtctatctcctaacctagggcgtatcctcccttggaactcacatgaaatatgtagctctaggtgcagggaagagatctttcacagtcgacatggcgagattcgtacgcttggccgctcatcagagcgaagaacacgggcagaagcaacgcgccacgtgttcgacgtgttctgtcaggccagagcacgcccgcgcgcgccctcacgagccccgcgccgcgcccg

SEQ ID NO: 6660 - DNA, 387 bp, Zea mays
  unsure (1)..(387): unsure at all n locations
tgantagtacaagatacgngagagtgtgtatgtctatccgacatatgaagctgagagcctgagacataattgtaaattgaactgtgtaaagaatcaacgaatacctgcaattctattcgacctagaacagaatatatgaaattagagtacgttcgcttataaacgtggacaatctttatgaacgagaggaggctctaaacaagtaattcgtgtgataaacattgtttcgcttattttaaatatgtcccattcagataactatatatgactctcatgttacaagaatgagactttatataggttataaacaattcaacctgctaagaatgcccaccaacgtgaggtcctcctccgtgcgagcacctcctttagcatatcttgtccacg

SEQ ID NO: 6661 - DNA, 327 bp, Zea mays
gactcaagaacgccgggacaacctcctctcgcctcaccaagaaggtcctctaaagccaagtcggcagcaacattttcacctacgtagacgacattgtcgtcgcaagcaaaaacaaagaggatcacctggccgatctcgcagaaacattcgccaacatgcgcgacgcacgacttcggctcaatcctgagaagtgtggcttcggagttcgccaggggaagatactttggtacctagtatttgaccgagggagcgaggtcaactcaactaagatccatgcgatcaataacattggaaccttcgaaggcaccagggacagtcaacgactga

SEQ ID NO: 6662 - DNA, 463 bp, Zea mays
tgcaccgtaagccagtactcttcttcgagaagccatattcttgtcttccttgcacgacatgcgcacgtcttctattcgaagtgtacttcctctataaataccaagtgagccttccatacttcactcaaccttgcatttacaaactcgacaaccatgaatccctacttagaaaacaatattcttgtgcgcttgatggaagaaatggaagaggaagaagaagagttgcagttggcgaggcacatggtcaataggaggcgacgtgcacacaatgagcgtcgtcatggtggttcgattccagggcatgttaggattcatcgtgatcacatgagcggcgatgcaagaatccgagccgactactttggagccaacccggtgtacacggatgctcaatttcataggaggtatttacaattaacacattcttattaccatgtacaatgacttatgacccctattatgacac

SEQ ID NO: 6663 - DNA, 345 bp, Zea mays
  unsure (1)..(345): unsure at all n locations
agcttgtgaaggttcttcatccncacatgtgctatagcggcgatgccacagcctgcccatgctagtcttagctattaagcatgcatctagaccggcctcttcttttgcaaaatcaactaaataaagtttgccgtctaatacacccttaaaagctagtgaaccatcacttcttctaaagacagacacatctacatttgtaaatagacagttatatcccatgttgcataattgactcacagatagcagattatatccaagagactcaactaaaaacacattagatatggagtgctcattagaaattgcaattttacctaaaccttttaccttgcttgaatcccatca

SEQ ID NO: 6664 - DNA, 496 bp, Zea mays
  unsure (1)..(496): unsure at all n locations
tcaacctcagaagtagctatttgtggaccacccttgtcccaaatattcatatatgaccactntatagcattgaacacctccttcgaaggcttatttatctcttcaacatccatgttgaagtctattttgctgattgccttgatgtgatcgtagcatgtcttctctagcatagaggccataccgcgagatccaacaattgcgtaataatcgcctcagacattcataacaccttcgagttccccagttctttttccacccaagcaagaactccgccaacatccctgctagtataagaattctcgcctaaagtgtcgtcggtagagaagagaacctttctcaggcgatcacagcacagggaggcgatgctgaagcagtgacctcgaagatgtcttaaggactctagtagcttcacattatcttcgctcttggcattaatttattcttttccttttcaggatctgcatgaagctcaatgatagcttcatcttgctcctta

SEQ ID NO: 6665 - DNA, 407 bp, Zea mays
cgcttgtgccagcagccaagaagatgtcagcggcggctagcactataccttcatcatccacatctcattgtggtgttgtctctgtatctatagaaaaggtattaatgtatgataaatttcaatatttcatacatgaatagctctgatttatgcagatgtttgtactgtttttttctgcagcaacttgatgttgtgatggaggaggggcaaggggagagctggaattggaggttatgttgtcggaatcagatgacagtgagtttgaccatcattatgagtttccaccttcaactgatggatatatgatgagtatggctgatgcaatgttgaacaagcttgataatattgggaagtgagaacaatgtcatggtattgctacatccttgaccttagttaaaatgagatca

SEQ ID NO: 6666 - DNA, 416 bp, Zea mays
  unsure (1)..(416): unsure at all n locations
actcaagcttgctgcgagcccgccggcagccattcaaacccanaccacgccgtattatcattatcgtctcgcccctcctgctccactgttgctatgcagacaagcttcgcctcgggcaccgcgtgctttatcgcctggccacaaagcaaggaatccaaagcaaaggcaacggccaagttcgcagccagggttacagccaaaccacggcgatccgccgatcctattatcccaaaaccacaacacaagaacgggaagcgtgcatgcacacgcacgagcacgaacctgagctgtagcgccctctcgctcgctccccgcgcgcaatggccagcgtagccccaggtcccatgcaaaccagccatgcctcacggcggccgatccctacagctacaggccccgtgcccgtggccgtgcttctc

SEQ ID NO: 6667 - DNA, 357 bp, Zea mays
acgcagctgcaactctattaatatgactgccctaacattttttatatgaggatgtggaggctggtactccacttccttgagagcacaacacctgcttgagtatgcaagaggagatgaaacatctcacgacgaatatttgatgagatatttaaccccaattgaatctcaacatttttaagagcacaataagatcaaaatactcgtaatatgaatcatagtccactataaccaaaccatctatttctcaacaccacaaacgtctaacacttcctagtaacaatcctgaaaatactcatgatgctagaagcaagggagactctattcatcctcgaagataaacctatattgcaaatactc

SEQ ID NO: 6668 - DNA, 459 bp, Zea mays
  unsure (1)..(459): unsure at all n locations
actaacaaatgttcattntgagaaagatagtanattgtttgcatgacaagcagggaagcaggttggtgttcatcatccacacacgaacatcatgatgactgatagaccacttgagctactccacatggacctattcggcccaatagcttacattagcatcggcgagagtaattactgtctagttattgtggatgattattctcgcttcacttgggtgttctttntgcacgaaaaatcccaaacccaagaaaccttatagggattcttaagacgagcacaaaatgagttcggtttaaggatcaagaaaataagaagcgacaacgagacagagttcaagaactcacaaatagaaggctttctcgaggaagagggcatcaagcatngattctcttcttcctacacaccanaacaaaatggtgtagtagagaggaagaatagaactctacttgacatggcgag

SEQ ID NO: 6669 - DNA, 266 bp, Zea mays
  unsure (1)..(266): unsure at all n locations
agcttacccttgaagcctggaataagctacagaatgaaccagtcttaccgctcagtcaaaaggaccgaccgtgagaatcaaagcactgcccctgagtcaaagtaaacaggaaaagaggacagaaggagttattaccatacagagaggcaaagattcttggaaccagagaccacaaacatcagggtcattgaccccaccactcacccgtgcccnccacatgtgtgcccgcctccatgcgcaccctcaccggtactagaatctcttat

SEQ ID NO: 6670 - DNA, 467 bp, Zea mays
  unsure (1)..(467): unsure at all n locations
tgggcccccatgctcncgctcacgtcgagcacagtcaccagatccagtggagtacttgtgctcacccacgacggagccttgagatggatgacgatggcgaattcctcgtgtgccacggactcctggacggctgggaattcagtgtacgtcgtgatctcaagcaaaggaggaggaggaggaggagcctcatcaccaactgctgtttcagtaggctgtatctgctcatcgtcgttcataactgctgtatcctgatagccaaagaccgggagctcatccagcggactcactgactgcatgctcatctggggccaaaccacatgagcagcagcagatgtagccacatgcccctggaaaggcagctccttccacacagcacggcagattgggcagatcttggtgccgtgctgcacgtttgaggagatgcagttgaaatggaacttgtgggagcattcagcagtgaatagcgc

SEQ ID NO: 6671 - DNA, 351 bp, Zea mays
agctataatagactctcccacatgtgctaatttgttgtgcccaagccagcccatgcaaggcttaggaagtgaacaagtgcctagctcacctctatcggagaccactgagtatagctgaccctctagcgctcgcttaaatgctaatgaaacattacatgatctaaagacagcgacacctacttcagagaataaactagtgtcccccactttgcatatttgtgatacagaaagcaaatatggatctaacgaatctactcgataaacattggaaatagaatggtcaagagatatatctatcttacctagagctctgaccaaaccttgatgaacgtccgcgcatgtataaacatc

SEQ ID NO: 6672 - DNA, 425 bp, Zea mays
  unsure (1)..(425): unsure at all n locations
tgtgagaggatggtcgactactgttctcacgactgcncagtagctattagattatcctcttgtaggtctaagagtgtgcttgacacggttcatggttaatcagctttcataatgagagcagataacatgactatacactaatatattacccacactgtgtctagaatgggtgatcaggagttgacagactcctgatttttattatataagtaatatcgtgaacacctcataccagaaacatctgtgagcctatacccaagctattgtgttgtcctgaatgatgctattgtggagatacaagactgccgtctcataataatgacaagagcaaatctgactgacattattataatagttgtcagaagaataatacatatcatgactgactcacaatggtctatttctcatgtccagagtgagcatta

SEQ ID NO: 6673 - DNA, 347 bp, Zea mays
  unsure (1)..(347): unsure at all n locations
agcttgagtcggttcttctgcanaattattgattcacaaagaaatgatgagggtatgaaacacattcatgagaaaataaaggccggtcaggcaaactgttttataaaagatgatcaaggcattgtatggtttaacaaccgcatatttgtgcccaagaatgatgagatccgccagcaaattttagatgaagcacatcttagtcgctattctattcatcccggaagcactaagatgtatcatgatctaaagcaacattaatggtggacaaagatgaagattgaaatgcacgctatgtggcaagatgcgacacttgcagacgtgtcaaggccatacatatgaaaactact

SEQ ID NO: 6674 - DNA, 370 bp, Zea mays
accatgctcttatgtgaggatatagcacagaagaagtgctattgtgatctcaattgtccgaagaacaggagaaaaccttgataatgtttttgttcaacaataaagatgtttttgcttggtcagctaatgatctttgtggagttaacacgtatgttattgagcactcgctcaatgttgatccatccttcagacctatgaagcagaggcttcggaagatgtctgatgacaaggccgaatgtgctcgaaatgaagtgaaaagactcctcagtgccggagttattatagaggtaatatacccagaatggttggctaacactgatatggtgaagaaggccaatggtaaatggagaatgtgtatcgattctactga

SEQ ID NO: 6675 - DNA, 430 bp, Zea mays
  unsure (1)..(430): unsure at all n locations
ctgcaagcttganatatatattcactcagatagaactctttctcagacagagaagaaggctngagttgattaaagattatgatttggaaatacaatatcaccccggaaaagcaaatgatatatctgatgctttgagccgtaagggtcaagcgaacaacatcactactcagttgatgtcacaagaattgtggtgggaaatggaacgactcaatcttggatttctcaataatgttgaagcaacaattatggaagttgaatctactttgtaagaagagattcgtataggacaagagtctgatgagacaatcaaagaaattaaagctttgattggttgggtaaagccccagatttccggaagatgaacaagacacagatgggttaaaaaaagaatttgtgtacccgaatctagcactagcgccaacttattttg

SEQ ID NO: 6676 - DNA, 459 bp, Zea mays
  unsure (1)..(459): unsure at all n locations
cttggcactactttcaagcatatcatataattggtccttcatcacaacctctgtaggatataatgagaaatagagaagctactgtgaggatcggaaaatgggctgccgagctcaacgaattttctattgattatgttcatagatccttaatttagtctcaggccttagcagacttcattgctgattggacgccatgggctcaaggagaagaagcaacaaaaaatgtcgaagcctggacggttttctgtgatggttcttggggaaccttcggcgcaggagcggttgctgttctagtagcgccttccaaagtcaaaacatgctatgcagcaaggctagattatagttatacaaataatattgttgaatacgaagcccttctgttgtggctttgaaagttataggcaatgggaataagaacggcaatccttaaaatngactatcaagtcatttctggtcatg

SEQ ID NO: 6677 - DNA, 444 bp, Zea mays
  unsure (1)..(444): unsure at all n locations
agcttatgcaatgtaatttacaagatatcttctattgccctctcaaacagattaaaaggtattctcccggacatcatttcaatgaatcaaagtgcctatttatttgtcgtaaataaggtctaaatcgtcgtaaatatttattaacattggtttcaggttgtcagtaataaaacgtcgtaaataggtttatttatgtcgactggtcgctgtaaatatttaatttattttgtaagtaacggacggttaacgtaaagaaattaatttatgacagtctgctatagatcgtcataacgaagccaaacttatntactatgggtaataaaatcagacgcacatatttttagagctggctttagatttaatcacccataataaacagtagatgtcactataaacattttttttattgtagcggtagaagggaactattttcatctaacatga

SEQ ID NO: 6678 - DNA, 348 bp, Zea mays
atggcctccatgaagcttcgacactatttttaagcttacaacataattgttccttctttacaacctctgaaggatattatgatgaaccgagaagctactggaaggattggataatgggctgcagagctcaatgaattttgtattgattatgttcatagatctttgattcagttccaggcgttagcagacttcattgatgactggacgccacgggcttatgaggaagaaacaaataaagacgccgaagcatggacagtgttttgcgatgggttttgtggaaccttctgagcgggagcggctgctgtgtggtttaccttccaagataaaacatgtttgatgaaacttgat

SEQ ID NO: 6679 - DNA, 338 bp, Zea mays
  unsure (1)..(338): unsure at all n locations
acctgcngcatgcaagcttgttccacatcatanagtgtgatccgcgttttctcatgatgtttgggaagggggtggtagctggtgaggtttatgctgtcttttttttccagcctgttttgacacggattcctgtatacttgaactggcggttggaaatgtaccacctgttagattcagttgacataatttcttgctgtttgagcctgtaaccatcatctcttcttagatcaattgacacaactgctggaatcgcgtaataatggtaatcaataatgaagaaatgctgtaccacggtgctggttcctgtaactttcttggtttatatttttccctggaat

SEQ ID NO: 6680 - DNA, 468 bp, Zea mays
cgaagtctgacaatggagcatccatttgcacgaaccgtgcatatatattatatgatttcagacttcagaaaccatgtgtttggttgccttcccgatgggtgtaactgtatctgcatatacaaattttagtgtttgtttggttccctttattacgagagataggctagcacgaaacttaaagcgccgccagccaggcccggcgggaaccctggcgcggtcgcacgcgcgcggccaggcttgggtgagccggctgtttcctcatgcacgcaaatcgagatattgatattgttggttttttgttatatctggtaattaaaagaattaattaccgaaccgattcatatgtgtgttctgattttttacaacaaactagactacacatgctatgatatttaaataaataattacgtgttaagatagttataatagcgttattacatatagtagcgtctttaaatactttacata

SEQ ID NO: 6681 - DNA, 383 bp, Zea mays
  unsure (1)..(383): unsure at all n locations
agctngatggccaagtcaagaagcatgtcccagtgtattttgtatctgaagttcttagtatatcaaagaaaaactatacagaattggagaaggtgttatatgctgttttgatggcatccaggaagcttcggcattactttcaagcatacaatattgttgttccttcttcgcagccgctgaaggatattatgagaaatagagaagctactgggcggattgaaaaatgggctgcagagctcaatgaattttgcattgattatgtgcacagatcttcgatccagtctcaagcgttggcagattatatcgccgattggacgccacgggctcaggatgaagaaacaaataaagatgccgaagtatggacagtgtnttgcgatgggtct

SEQ ID NO: 6682 - DNA, 469 bp, Zea mays
  unsure (1)..(469): unsure at all n locations
tatctaggtggcgtctcccagtcagctatatggcgccaaggattaatgtttagtttgctctattgttcgcatttattattgtaagacttccgctatgtaataatgatatttatgacatttatttctatacactctgtcattatatgtgatgttcttctttggcggacatatgggacgcacccaactttatcccttatatccgggtgtgacagaagtggtatcataggaaatgttgactgtatgacgaaacctatatagaactggacgaaacccttacctacttatcttactntgattttttctatacttatcttgatcatgtctcaccttttgctgttctaatctgactattcttatgttttctactctagaaagacaagaaggagttcacaccttggaatcctacatttatgaccctttaaggagatatgagacctaagaacaaataacaaacatttctctatctaaa

SEQ ID NO: 6683 - DNA, 393 bp, Zea mays
  unsure (1)..(393): unsure at all n locations
agctngagacattattgcttaatggttatgtgttgtctgaaggacacacttgaggtcatcatatagatgcaccaaagaaccatataaagccttcaatgtccatacaatctctgtaatggaccacacttgttcctttgaaacaattcaaagaacttaaccaattcagatcagattttaagataagagggacttaaaatctcattttcgatgatactcatcaagtatccatcttatgggaaaaacatgaccaatagaattgttcataacttttcatttcatcccaacaatgggatgaccaattcaatcttacccagcatggtaagtatcatcacatgaaaagttataacatatgcaacactttgtatgggaggatgtatgtagaatacacttcat

SEQ ID NO: 6684 - DNA, 453 bp, Zea mays
  unsure (1)..(453): unsure at all n locations
tgagggtctcggcgtagatgatgttgttgcatctgctcccgtttatcatgaccttggtgagcctgacgtcgccgacaacggtgtcgacgacgagcgggtatttccccgggctcggcacatggtcggcgtggtcggcccggtcgaaagtgatgggcttgtctgaccactctaggtagactggcgccgccaccttcaccgagcagacctcccggcgctcttgcttgcggtgccgagccgaggtattcgccgcatgccctccatagatcatgaagcagtcgcggacctcggngaacccccctgctgggtgatcttcgttcttgtcgtcgacgtgggtactgccaccctcggcgggtgtgccggccctgtggaaatgacgccgaagcataacgcactcctcgagggtgtgcttgacnggcccctgatggtangggcactgctccttgagcatcttgt

SEQ ID NO: 6685 - DNA, 329 bp, Zea mays
agcttccaatctctccaagttccacaattgagacaagtgatcattagtgattagtgacttgagagagagagagagagtgatctgtgtgttatttgtcgctcttgtcgcttggcttttgcaatcgtgctttcttcttttcccattcttattcttcaaacacttgtaatcaaagcaagagacaccaattgtgtggtggtccttgtggggtctaagtgacccgtttgattaaggagaaagctcactcggtctatgtgactgtttgagagagggaaaggattgaaagagacctattctttgtgaccacctcaacgaggattatgttctttgga

SEQ ID NO: 6686 - DNA, 451 bp, Zea mays
  unsure (1)..(451): unsure at all n locations
ntaccaaatggacgtgaagagtgccttcctcaatggaccaatcattgaagaggtctatgttgagcaacctcccggctntgaagacagtgagtaccctaaccatgtttataagctctctaaggcgctttatgggctcaagcaagccccaagagcatggtatgaatgcctaagagatttccttatagcgaatggcttcaaagtcggaaaggccgatcctacttaatttactaaaactcttgacaatgatttgtttgtatgccaaatttatgttgatgatatcatatttgggtctactaacgaatctacatgtgaggaatttagtaggatcatgacacagaaattcgagatgtcaatgatggnggagttgaagtatttcttatgatttcangtgaagcaactccaagagggcaccttcattagccaaacaaagtatactcaagacattctaaac

SEQ ID NO: 6687 - DNA, 440 bp, Zea mays
  unsure (1)..(440): unsure at all n locations
gcttaataaacaatctggacccactccatcacgctacagtcatcagagtcagaggtcccttcaggcaccctccgttgcgagcaaccagccgccagcaaacgcctgttggcactgtggagaccccagtcacttcaagaacaattgccctcagttgaaagcatctggaccaacctactccaactcagtgaatggccccaagattccatcgacacctacccccaaggcacttccttcaagcagccagcagagcaggactcagtatcagggcagagcccgggtcaaccacgtcgacgctcaagaagctcagcaagccccgggagtagtgctcggtgagttccttgttgaatntactcccgctactgtgctttttgattcaggagcatcccattcttttatagccgctaagtttgtggaaagcatggatcccctctaccccctac

SEQ ID NO: 6688 - DNA, 482 bp, Zea mays
  unsure (1)..(482): unsure at all n locations
cctttaaactcagctctacaagcctccaaacttggaggaagttcaaagggagtcaattctccactcacaaatgaacgcangatgtagcacacactntctcgcaatgaatctcacaaggcactagagctaaactcacacgagaggctttcttttgcttgctctctcttttgtggcacttgtgttggttgtagtggtctaaatcttgtgtataggatgaatcaatgaatagaggtggttggaagggcttggatatgtcaactatatgacttggaatgttgcttgggctccccatttttgaagtggccggttggggtggtatttatagccaccaaccaaattgtagtcgttggagaaggctgctggcgatgggcgaaccggacagtccggtgcaccgccacatcaccctgtcgttagggcttggagctggtcgaccgttggagactttgtcctcatgtggcaccngacagtccngtgtcacaccg

SEQ ID NO: 6689 - DNA, 383 bp, Zea mays
agcttcggccaccgaggccagctctcttcagtcacttccaagtttctctcgcccttcagatagctttgctagttgcgcgcgtagaccgagcaatccggtgagtcattctctgattccttgcacccacgtcttccctagcatccagtgaagctctctgacccgtctgattggactatcgcgtcgtgagcaggctgtactcctcgccgccgacgagttcctccgcctgcgcacgtggaccggccgactccgaccattcccgacggcgacccgcacattgtcgtgatcctcaagacctcccctacatactcgaccacctcactcgagcagcctctccgtcagtacgcccctttggccctttctacctccacagccactgttccatt

SEQ ID NO: 6690 - DNA, 465 bp, Zea mays
  unsure (1)..(465): unsure at all n locations
ctcaagcttctcgaatccattaanaagggtatcacgccgccagaagaaaatattgtatgacatatataaacctgggcagacaataattataggacataggagttatgatctgatgctcagtctgcagcttggaatcaggtaatgaatacaatgagacaccaggaggaactgatatttgaatgtcttcactttctatttcgctccttatcaatgttctccattatatgttgttaaatgcttgaaattgtattaacccatatgcaaggttccagaatgtatatcatataagccacctactgtgcatgaactgcatatatctacctccatttaccaaaatagttatgaattatatgtctttgcagtgtcaacaaaatgcgaaggagaactacgtggcggctntctgtcatctaaaagtaattgtagagcataactgaccggttaggaaatgactttcggctggagaac

SEQ ID NO: 6691 - DNA, 414 bp, Zea mays
  unsure (1)..(414): unsure at all n locations
caactagcagattgcccaccacaataatatcggataaaccaatttcaagttctggtagatccttaccacgacgtccctccttgtcgcactgcaaatgaagaatatataagcaaatgaaacactccagatagtgtacccaaaaatatcgtatggaagccattcatatcatactaaacgcctatctcacagcactaaagatttgcattctccttgtggtgcgcaacaaaagtactgcctatgctagattggtattactgcaccgcattaccttntagtgactatgtttactgcacaaaattagtagccatatctatattctagcagcatattaaacgagacaatcaacaattccgcacaaaccaccctaaatggtctgcagctgccaacaccacatcgatacctctgtccatatat

SEQ ID NO: 6692 - DNA, 498 bp, Zea mays
  unsure (1)..(498): unsure at all n locations
actaagcttcanagggagaacacgtgatccgttcgactaacgtgcatttctaataagatagaccttgtgcagcttgtcaagcaggtaaacaagtgggaggagcacatcacagcaagaacgtgatgaccacttcaagacccctggagctgctgcatatggacctcttcggacctgtcgcctatctgagcataggaggaagtaagtatggtttagttattggtgatgactattcccgcttcacttgggtgttctttttgcaggagaaatccgaaacccaagggactctcaaacgcttcctcaggagagctcaaaatgagtttgagctcaaagtgaaatagataataagcgacaacgggtccgagttcaagaaccttcaagtggaggagttccttgaagaggaagggatcaagcacgagttcttcgcttcctacacaccacagcaaaatggtgtggtagagaggaagaacatgacgctcatcgacatggcgaggacgatgc

SEQ ID NO: 6693 - DNA, 431 bp, Zea mays
tgacactgtataaattaggaggtcatatgaatagtgcgcatatatgtggcacaacggcgttgtcaagaactgctaatattttgtacagtagagatataaaggcgggacctgaagagtctttgttggaacatggcgtgtaataatagttggcgatccctaaaacttgccctatgtttcggtctctacgatatgtgtattagagtctcctctgtatctctctctctctccggttaactaaaccataccttacacagattcagagaactgtccccccaaccaacacacacacctttagtacattctaaatggttttagaaaaatacttgacatgctaaatctttatttaaaagtgctaaatagcgaaaacaattcacctttttggactccgttgatatgcaagcacattgtgtgttcccaggacttggcacaac

SEQ ID NO: 6694 - DNA, 429 bp, Zea mays
cggagggcgtacaggcagagctctccggtgattatggaggtgacgacgagcggagacgacgggtggaagtcgaggtctaagggcatctcctcgtggagagcctccatcgcggcgcctgacagttggggaggcgggcggcggcgcggctgacggagaaggaaacacaaacgaccgtgggagggcgtctcgggcagagctgggctattaaggcctgagacaaagctgggctggacatgtgtaaacgggctccgaagtaatcccgctgagggcccaaacgagatcttatcgcatctctttcgtcgtcgtcgtcgttttgttatagcccttggtaacgctgagaggagggaaaagaatgatgggagcggcgactgaaagaggaagataagggtcaaggggagggcaaaggggggggagagccgagagggggag

SEQ ID NO: 6695 - DNA, 406 bp, Zea mays
  unsure (1)..(406): unsure at all n locations
agctntgttcttgngactgcatattcaatcaatgtaagagctcattctctntggtataagtaatgattcctaggctcgtttatgggatttcttaatattattgatgctttattagttatgtaaactgcagtatgattttctctctctcaaacaactgcaatatgaattcttaatgtttatttcatttgccttttgtaagaatactgtccatttcttaattagtggccctggcttctaagcaagtgtaaagtcgggttttatcaactacactgttgaatggctcacacgcaagcaggcaagtttacatactgcagcaataacacagttgaacagcttgactacaggagaaacattatagactccgagctaatgcctttatgtgcagggaaaactcatttttttatta

SEQ ID NO: 6696 - DNA, 485 bp, Zea mays
  unsure (1)..(485): unsure at all n locations
ctcaagcttgttcgtgtcgtgtcgtgtgtctctgtagactactactatatgtatggctgtgccaaatgaagttgcttttcgatacgcatgcatggttgcaggagccggcctgcagccttcgttccatggccgcaagagacaaggtacacgaaccaaaagcatgcatgcataccctacagagctccgtgctctgaanagcaatccacgctgtggaaagggaagagtggaagatcagcgtccagagcggagccgggtggtgtatcggagacttgtagtagtagtagtagacctgaccagcagcgcctcgctagacgctagcggctgcctgctgcctagcctagccattgagtaaaaaggcaacatcaactaccattgctatatatgctntccagcatggttgcaaagtggagtcggtgcatgtccgtggcaatgtctcgatgcaagaatgaagaggggcagcagcacactgtacgtgctgtgtgcat

SEQ ID NO: 6697 - DNA, 404 bp, Zea mays
  unsure (1)..(404): unsure at all n locations
acctcagagtcacctgcggcatgcaagctttccaaaagtacaagatcatcgaaatcatatatcggagctaaaagntatggccaaaatacgacaagcaagtatggatgtccggtgcacaccggactgtccggtgcgccatcttcggaagctccaacggctacctttaacggctagtacatgtggcatgttcggtgcaccatcggatagtccggtgcacctgtccggggtgcgccgcataaagctgcaaaaccgctttccaacgactatattggagttggggcctatatatacttcacccaaccggccatttagaggtgtgggagcttaagcaacataccaagacatattgtagacatattcaagtgcgcatacacccaagtgcttaatagaatcaatcggctatt

SEQ ID NO: 6698 - DNA, 407 bp, Zea mays
ggctttggccgaggggtccttcgtatcacgaatatatatttttcttctgattgcgccaaagctgtcacatgatcgcaacctgatttttccaagatagccgcaattccccttgcacctgagaaggcgcatacgtccccgcggtcgtttaaaatctcctcacaggcttcggcctcgctgctgatccattcaattggcccctccggattgccccgtacgaagttgtcttcactcgaatatgcgtcaacattggcgaagctagtttttatttttcccacacattctatggatttttcataacatctttcttttgaagagcgaaggactacaaccggtttcttccaattattgttccagtaatcactggcgtctcggtcagcttcggcaatagcacatattatatttgcttc

SEQ ID NO: 6699 - DNA, 442 bp, Zea mays
  unsure (1)..(442): unsure at all n locations
agcttttggagaatcgctntcagatccacacgtctcagcccttgcagcaattntcggctggacggtggaagaaggggatgaggtgcgatcagcagaccttgctgatttttagacacctgngtgtatgtttctttggtcgcatccatttcgtattgattaataatgaacccttcatcaatcttgtttcggaacgcacatggccttaacaataaggccaggagagatattgttcgtgatgttattcaatccagccacacagaaattgtatgcatccaggcgactaaagtggcagacatgaaccacaatctttctctttcggtgtttggctcacctgttgataagtatgtggctcttccagctcanggtactatgggggagtgatcatcgcttggaaaagcaacatatgtcaagcaaaagcaattgccacaagaattgataattt

SEQ ID NO: 6700 - DNA, 413 bp, Zea mays
  unsure (1)..(413): unsure at all n locations
agcttcnngtgccaacagtggtgacgcgcggcccgccgactgtgtcgccaggcctcggcatcttgacccacaaccagatgcgattgacgctagtcttcttgtggcctttttcggctgcgtcgttgcaagcgccttgttcgaatcaatccgctatcgtgcacatatcgaagctgacaagtcccgcacattctgttggtaaatcaaaatagaactgtaaatgcatgctcctacgaatcggatcagaaaactgctttggatatatctcgtcgatcgtcacaaaaactccagatggatagctgaaatcaatttttcggttagatcgggacagacaagcagtgactcgtcgttcaagatagcaatcgaaatcagggattacaatgaccaaggccagcgcctcaagaatttttcatcta

SEQ ID NO: 6701 - DNA, 492 bp, Zea mays
  unsure (1)..(492): unsure at all n locations
tcaagccatggtaagtagcataggcaagtaatataaaacttgactcatgactagctacgggtgcataggtttcatcgaaatccaaaccttcgacttgtgaatatcctttggccacaagtcgggctatgttccttgtcaccacaccgtgctcattttgcttgttgcagaatacccatttggtacctacaacattttggttaggacgtggaactaaatgccatacctcattcctcgtgaagttgttgagctcctattgcattaccaccacccaattcggatctcttagtgcatcctctatcctgtatggctcaatagaagacacaaaagagtaatgttcacataaatgtgcaactcgagatctagtagttaccccttatgaatgtcaccaagaatagaattgacagggtgatctcgttgaattgcttggtggactcttgggtggtggcggctttgaccctanattcttgatcatcttncttatcttcatctccc

SEQ ID NO: 6702 - DNA, 384 bp, Zea mays
agcttcgggtctacacaataatgagaataaatcatatgttaatcctattcaatgttcaggggatgacattatggtggtgcaaaacctgctgccatgtgagatatcttctttcccttgatgctatcttggtcccccctgtctctttacaagcttactaaaaagcaagtgtagccaattgtggacagaattgcaggacaagtcctaaattggaaagctaacttattaacaagggcaggcggaagaatttatgtgcaagatatcctcacaggcatgatcatatacctagctatggctattgatctccctgcttgggccttggatgacatttgataaatcatatagagtttcctgtggcatggacgcaaagaagcaaaggggggcatt

SEQ ID NO: 6703 - DNA, 472 bp, Zea mays
  unsure (1)..(472): unsure at all n locations
tgtganagactacattacgaggctaggagctgcgctacttgtttttgttcangtctaagaatcttcatccagtgccagtgggcctactacaacctcttgagccgccccgttcggtgtgggttgacatcgccatggactttatggagggttttccttgcgtcggtgggacgtctgtgatccacacggtggttgaccgcttctccaagcgacaacgtcgtcaagctctatggtgttctatgctccattgtcaacaattgttttttttcgaaaacgcaggagagctgcatatcattatattaagaggaaaaaaggtgaggataggaaacctcatactaagccaaacaaaaccacacacacacgcactctatgatagctagaaatacaatgataatggtaccaactgcactcatgaccaatatagaaggtctcccgatantgcgctggagcggaaaggatgctatctaattcactg

SEQ ID NO: 6704 - DNA, 272 bp, Zea mays
  unsure (1)..(272): unsure at all n locations
agcttgtactcccgataacaggtggttcatgctcatatctgtctaactacaagcagatgaaggaggcgcagagaagggtacaacacgtangggtgcaaggacccttcatcaagtcaagatggtctcacatcccgattaccttctcccaagaggatcttcagctcaaggattaccctcacaatgatgctatggttatttcttgtgttatcaaaagatttctggtccacaactgtttggttgacacaggcagtgcagcggatattatatttgct

(The sequence listing continues in the following parts.)
